United States Patent Application Publication US 2018/0236103 A1 - sequence listing, part 3

SEQ ID NO: 56927 - RNA, 21 nt, Artificial Sequence
  Synthetic
  misc_feature (15)..(15): n is a, c, g, or u
  misc_feature (18)..(18): n is a, c, g, or u
gguuuggaacagcancangag

SEQ ID NO: 56928 - RNA, 22 nt, Artificial Sequence
  Synthetic
  misc_feature (16)..(16): n is a, c, g, or u
  misc_feature (19)..(19): n is a, c, g, or u
ggguuuggaacagcancangag

SEQ ID NO: 56929 - RNA, 23 nt, Artificial Sequence
  Synthetic
  misc_feature (17)..(17): n is a, c, g, or u
  misc_feature (20)..(20): n is a, c, g, or u
aggguuuggaacagcancangag

SEQ ID NO: 56930 - RNA, 24 nt, Artificial Sequence
  Synthetic
  misc_feature (18)..(18): n is a, c, g, or u
  misc_feature (21)..(21): n is a, c, g, or u
gaggguuuggaacagcancangag

SEQ ID NO: 56931 - RNA, 18 nt, Artificial Sequence
  Synthetic
  misc_feature (3)..(3): n is a, c, g, or u
ggnauacagaggcaugag

SEQ ID NO: 56932 - RNA, 19 nt, Artificial Sequence
  Synthetic
  misc_feature (4)..(4): n is a, c, g, or u
aggnauacagaggcaugag

SEQ ID NO: 56933 - RNA, 20 nt, Artificial Sequence
  Synthetic
  misc_feature (5)..(5): n is a, c, g, or u
caggnauacagaggcaugag

SEQ ID NO: 56934 - RNA, 21 nt, Artificial Sequence
  Synthetic
  misc_feature (6)..(6): n is a, c, g, or u
acaggnauacagaggcaugag

SEQ ID NO: 56935 - RNA, 22 nt, Artificial Sequence
  Synthetic
  misc_feature (7)..(7): n is a, c, g, or u
uacaggnauacagaggcaugag

SEQ ID NO: 56936 - RNA, 23 nt, Artificial Sequence
  Synthetic
  misc_feature (8)..(8): n is a, c, g, or u
auacaggnauacagaggcaugag

SEQ ID NO: 56937 - RNA, 24 nt, Artificial Sequence
  Synthetic
  misc_feature (1)..(1): n is a, c, g, or u
  misc_feature (9)..(9): n is a, c, g, or u
nauacaggnauacagaggcaugag

SEQ ID NO: 56938 - RNA, 18 nt, Artificial Sequence
  Synthetic
  misc_feature (6)..(6): n is a, c, g, or u
cacggnccggcagaugag

SEQ ID NO: 56939 - RNA, 19 nt, Artificial Sequence
  Synthetic
  misc_feature (7)..(7): n is a, c, g, or u
acacggnccggcagaugag

SEQ ID NO: 56940 - RNA, 20 nt, Artificial Sequence
  Synthetic
  misc_feature (8)..(8): n is a, c, g, or u
cacacggnccggcagaugag

SEQ ID NO: 56941 - RNA, 21 nt, Artificial Sequence
  Synthetic
  misc_feature (9)..(9): n is a, c, g, or u
gcacacggnccggcagaugag

SEQ ID NO: 56942 - RNA, 22 nt, Artificial Sequence
  Synthetic
  misc_feature (10)..(10): n is a, c, g, or u
ugcacacggnccggcagaugag

SEQ ID NO: 56943 - RNA, 23 nt, Artificial Sequence
  Synthetic
  misc_feature (11)..(11): n is a, c, g, or u
gugcacacggnccggcagaugag

SEQ ID NO: 56944 - RNA, 24 nt, Artificial Sequence
  Synthetic
  misc_feature (12)..(12): n is a, c, g, or u
agugcacacggnccggcagaugag

SEQ ID NO: 56945 - RNA, 18 nt, Artificial Sequence
  Synthetic
  misc_feature (2)..(2): n is a, c, g, or u
anuuucccaccuuaugag

SEQ ID NO: 56946 - RNA, 19 nt, Artificial Sequence
  Synthetic
  misc_feature (3)..(3): n is a, c, g, or u
aanuuucccaccuuaugag

SEQ ID NO: 56947 - RNA, 20 nt, Artificial Sequence
  Synthetic
  misc_feature (4)..(4): n is a, c, g, or u
aaanuuucccaccuuaugag

SEQ ID NO: 56948 - RNA, 21 nt, Artificial Sequence
  Synthetic
  misc_feature (5)..(5): n is a, c, g, or u
uaaanuuucccaccuuaugag

SEQ ID NO: 56949 - RNA, 22 nt, Artificial Sequence
  Synthetic
  misc_feature (6)..(6): n is a, c, g, or u
guaaanuuucccaccuuaugag

SEQ ID NO: 56950 - RNA, 23 nt, Artificial Sequence
  Synthetic
  misc_feature (7)..(7): n is a, c, g, or u
cguaaanuuucccaccuuaugag

SEQ ID NO: 56951 - RNA, 24 nt, Artificial Sequence
  Synthetic
  misc_feature (8)..(8): n is a, c, g, or u
ccguaaanuuucccaccuuaugag

SEQ ID NO: 56952 - RNA, 18 nt, Artificial Sequence
  Synthetic
uugcacuaguaaacugag

SEQ ID NO: 56953 - RNA, 19 nt, Artificial Sequence
  Synthetic
auugcacuaguaaacugag

SEQ ID NO: 56954 - RNA, 20 nt, Artificial Sequence
  Synthetic
aauugcacuaguaaacugag

SEQ ID NO: 56955 - RNA, 21 nt, Artificial Sequence
  Synthetic
aaauugcacuaguaaacugag

SEQ ID NO: 56956 - RNA, 22 nt, Artificial Sequence
  Synthetic
caaauugcacuaguaaacugag

SEQ ID NO: 56957 - RNA, 23 nt, Artificial Sequence
  Synthetic
acaaauugcacuaguaaacugag

SEQ ID NO: 56958 - RNA, 24 nt, Artificial Sequence
  Synthetic
aacaaauugcacuaguaaacugag

SEQ ID NO: 56959 - RNA, 18 nt, Artificial Sequence
  Synthetic
gaagauugaugaugugag

SEQ ID NO: 56960 - RNA, 19 nt, Artificial Sequence
  Synthetic
agaagauugaugaugugag

SEQ ID NO: 56961 - RNA, 20 nt, Artificial Sequence
  Synthetic
  misc_feature (1)..(1): n is a, c, g, or u
nagaagauugaugaugugag

SEQ ID NO: 56962 - RNA, 21 nt, Artificial Sequence
  Synthetic
  misc_feature (2)..(2): n is a, c, g, or u
cnagaagauugaugaugugag

SEQ ID NO: 56963 - RNA, 22 nt, Artificial Sequence
  Synthetic
  misc_feature (3)..(3): n is a, c, g, or u
ucnagaagauugaugaugugag

SEQ ID NO: 56964 - RNA, 23 nt, Artificial Sequence
  Synthetic
  misc_feature (4)..(4): n is a, c, g, or u
uucnagaagauugaugaugugag

SEQ ID NO: 56965 - RNA, 24 nt, Artificial Sequence
  Synthetic
  misc_feature (5)..(5): n is a, c, g, or u
cuucnagaagauugaugaugugag

SEQ ID NO: 56966 - RNA, 18 nt, Artificial Sequence
  Synthetic
acauagagguuccuugag

SEQ ID NO: 56967 - RNA, 19 nt, Artificial Sequence
  Synthetic
aacauagagguuccuugag

SEQ ID NO: 56968 - RNA, 20 nt, Artificial Sequence
  Synthetic
aaacauagagguuccuugag

SEQ ID NO: 56969 - RNA, 21 nt, Artificial Sequence
  Synthetic
gaaacauagagguuccuugag

SEQ ID NO: 56970 - RNA, 22 nt, Artificial Sequence
  Synthetic
ggaaacauagagguuccuugag

SEQ ID NO: 56971 - RNA, 23 nt, Artificial Sequence
  Synthetic
gggaaacauagagguuccuugag

SEQ ID NO: 56972 - RNA, 24 nt, Artificial Sequence
  Synthetic
agggaaacauagagguuccuugag

SEQ ID NO: 56973 - RNA, 18 nt, Artificial Sequence
  Synthetic
  misc_feature (7)..(7): n is a, c, g, or u
  misc_feature (12)..(12): n is a, c, g, or u
  misc_feature (16)..(16): n is a, c, g, or u
cauguanuguunacanag

SEQ ID NO: 56974 - RNA, 19 nt, Artificial Sequence
  Synthetic
  misc_feature (8)..(8): n is a, c, g, or u
  misc_feature (13)..(13): n is a, c, g, or u
  misc_feature (17)..(17): n is a, c, g, or u
ucauguanuguunacanag

SEQ ID NO: 56975 - RNA, 20 nt, Artificial Sequence
  Synthetic
  misc_feature (9)..(9): n is a, c, g, or u
  misc_feature (14)..(14): n is a, c, g, or u
  misc_feature (18)..(18): n is a, c, g, or u
uucauguanuguunacanag

SEQ ID NO: 56976 - RNA, 21 nt, Artificial Sequence
  Synthetic
  misc_feature (10)..(10): n is a, c, g, or u
  misc_feature (15)..(15): n is a, c, g, or u
  misc_feature (19)..(19): n is a, c, g, or u
guucauguanuguunacanag

SEQ ID NO: 56977 - RNA, 22 nt, Artificial Sequence
  Synthetic
  misc_feature (11)..(11): n is a, c, g, or u
  misc_feature (16)..(16): n is a, c, g, or u
  misc_feature (20)..(20): n is a, c, g, or u
gguucauguanuguunacanag

SEQ ID NO: 56978 - RNA, 23 nt, Artificial Sequence
  Synthetic
  misc_feature (12)..(12): n is a, c, g, or u
  misc_feature (17)..(17): n is a, c, g, or u
  misc_feature (21)..(21): n is a, c, g, or u
agguucauguanuguunacanag

SEQ ID NO: 56979 - RNA, 24 nt, Artificial Sequence
  Synthetic
  misc_feature (13)..(13): n is a, c, g, or u
  misc_feature (18)..(18): n is a, c, g, or u
  misc_feature (22)..(22): n is a, c, g, or u
aagguucauguanuguunacanag

SEQ ID NO: 56980 - RNA, 18 nt, Artificial Sequence
  Synthetic
augugagagaggcaauag

SEQ ID NO: 56981 - RNA, 19 nt, Artificial Sequence
  Synthetic
gaugugagagaggcaauag

SEQ ID NO: 56982 - RNA, 20 nt, Artificial Sequence
  Synthetic
ugaugugagagaggcaauag

SEQ ID NO: 56983 - RNA, 21 nt, Artificial Sequence
  Synthetic
augaugugagagaggcaauag

SEQ ID NO: 56984 - RNA, 22 nt, Artificial Sequence
  Synthetic
gaugaugugagagaggcaauag

SEQ ID NO: 56985 - RNA, 23 nt, Artificial Sequence
  Synthetic
ugaugaugugagagaggcaauag

SEQ ID NO: 56986 - RNA, 24 nt, Artificial Sequence
  Synthetic
uugaugaugugagagaggcaauag

SEQ ID NO: 56987 - RNA, 18 nt, Artificial Sequence
  Synthetic
  misc_feature (12)..(12): n is a, c, g, or u
agacacauccancgauag

SEQ ID NO: 56988 - RNA, 19 nt, Artificial Sequence
  Synthetic
  misc_feature (13)..(13): n is a, c, g, or u
cagacacauccancgauag

SEQ ID NO: 56989 - RNA, 20 nt, Artificial Sequence
  Synthetic
  misc_feature (14)..(14): n is a, c, g, or u
gcagacacauccancgauag

SEQ ID NO: 56990 - RNA, 21 nt, Artificial Sequence
  Synthetic
  misc_feature (15)..(15): n is a, c, g, or u
cgcagacacauccancgauag

SEQ ID NO: 56991 - RNA, 22 nt, Artificial Sequence
  Synthetic
  misc_feature (16)..(16): n is a, c, g, or u
ccgcagacacauccancgauag

SEQ ID NO: 56992 - RNA, 23 nt, Artificial Sequence
  Synthetic
  misc_feature (17)..(17): n is a, c, g, or u
gccgcagacacauccancgauag

SEQ ID NO: 56993 - RNA, 24 nt, Artificial Sequence
  Synthetic
  misc_feature (18)..(18): n is a, c, g, or u
cgccgcagacacauccancgauag

SEQ ID NO: 56994 - RNA, 18 nt, Artificial Sequence
  Synthetic
ggcaacauaccuugauag

SEQ ID NO: 56995 - RNA, 19 nt, Artificial Sequence
  Synthetic
gggcaacauaccuugauag

SEQ ID NO: 56996 - RNA, 20 nt, Artificial Sequence
  Synthetic
cgggcaacauaccuugauag

SEQ ID NO: 56997 - RNA, 21 nt, Artificial Sequence
  Synthetic
acgggcaacauaccuugauag

SEQ ID NO: 56998 - RNA, 22 nt, Artificial Sequence
  Synthetic
aacgggcaacauaccuugauag

SEQ ID NO: 56999 - RNA, 23 nt, Artificial Sequence
  Synthetic
aaacgggcaacauaccuugauag

SEQ ID NO: 57000 - RNA, 24 nt, Artificial Sequence
  Synthetic
caaacgggcaacauaccuugauag

SEQ ID NO: 57001 - RNA, 18 nt, Artificial Sequence
  Synthetic
aggagguguacuuccuag

SEQ ID NO: 57002 - RNA, 19 nt, Artificial Sequence
  Synthetic
aaggagguguacuuccuag

SEQ ID NO: 57003 - RNA, 20 nt, Artificial Sequence
  Synthetic
  misc_feature (1)..(1): n is a, c, g, or u
naaggagguguacuuccuag

SEQ ID NO: 57004 - RNA, 21 nt, Artificial Sequence
  Synthetic
  misc_feature (2)..(2): n is a, c, g, or u
gnaaggagguguacuuccuag

SEQ ID NO: 57005 - RNA, 22 nt, Artificial Sequence
  Synthetic
  misc_feature (3)..(3): n is a, c, g, or u
ggnaaggagguguacuuccuag

SEQ ID NO: 57006 - RNA, 23 nt, Artificial Sequence
  Synthetic
  misc_feature (4)..(4): n is a, c, g, or u
uggnaaggagguguacuuccuag

SEQ ID NO: 57007 - RNA, 24 nt, Artificial Sequence
  Synthetic
  misc_feature (5)..(5): n is a, c, g, or u
auggnaaggagguguacuuccuag

SEQ ID NO: 57008 - RNA, 18 nt, Artificial Sequence
  Synthetic
  misc_feature (15)..(15): n is a, c, g, or u
uguuguccauguucnuag

SEQ ID NO: 57009 - RNA, 19 nt, Artificial Sequence
  Synthetic
  misc_feature (16)..(16): n is a, c, g, or u
auguuguccauguucnuag

SEQ ID NO: 57010 - RNA, 20 nt, Artificial Sequence
  Synthetic
  misc_feature (17)..(17): n is a, c, g, or u
gauguuguccauguucnuag

SEQ ID NO: 57011 - RNA, 21 nt, Artificial Sequence
  Synthetic
  misc_feature (18)..(18): n is a, c, g, or u
ugauguuguccauguucnuag

SEQ ID NO: 57012 - RNA, 22 nt, Artificial Sequence
  Synthetic
  misc_feature (19)..(19): n is a, c, g, or u
gugauguuguccauguucnuag

SEQ ID NO: 57013 - RNA, 23 nt, Artificial Sequence
  Synthetic
  misc_feature (20)..(20): n is a, c, g, or u
ugugauguuguccauguucnuag

SEQ ID NO: 57014 - RNA, 24 nt, Artificial Sequence
  Synthetic
  misc_feature (21)..(21): n is a, c, g, or u
augugauguuguccauguucnuag

SEQ ID NO: 57015 - RNA, 18 nt, Artificial Sequence
  Synthetic
ugaacaaaagaugauuag

SEQ ID NO: 57016 - RNA, 19 nt, Artificial Sequence
  Synthetic
augaacaaaagaugauuag

SEQ ID NO: 57017 - RNA, 20 nt, Artificial Sequence
  Synthetic
caugaacaaaagaugauuag

SEQ ID NO: 57018 - RNA, 21 nt, Artificial Sequence
  Synthetic
acaugaacaaaagaugauuag

SEQ ID NO: 57019 - RNA, 22 nt, Artificial Sequence
  Synthetic
gacaugaacaaaagaugauuag

SEQ ID NO: 57020 - RNA, 23 nt, Artificial Sequence
  Synthetic
ggacaugaacaaaagaugauuag

SEQ ID NO: 57021 - RNA, 24 nt, Artificial Sequence
  Synthetic
  misc_feature (1)..(1): n is a, c, g, or u
nggacaugaacaaaagaugauuag

SEQ ID NO: 57022 - RNA, 18 nt, Artificial Sequence
  Synthetic
  misc_feature (5)..(5): n is a, c, g, or u
ggaanuagaggacaaacg

SEQ ID NO: 57023 - RNA, 19 nt, Artificial Sequence
  Synthetic
  misc_feature (6)..(6): n is a, c, g, or u
uggaanuagaggacaaacg

SEQ ID NO: 57024 - RNA, 20 nt, Artificial Sequence
  Synthetic
  misc_feature (7)..(7): n is a, c, g, or u
cuggaanuagaggacaaacg

SEQ ID NO: 57025 - RNA, 21 nt, Artificial Sequence
  Synthetic
  misc_feature (8)..(8): n is a, c, g, or u
ccuggaanuagaggacaaacg

SEQ ID NO: 57026 - RNA, 22 nt, Artificial Sequence
  Synthetic
  misc_feature (9)..(9): n is a, c, g, or u
uccuggaanuagaggacaaacg

SEQ ID NO: 57027 - RNA, 23 nt, Artificial Sequence
  Synthetic
  misc_feature (10)..(10): n is a, c, g, or u
auccuggaanuagaggacaaacg

SEQ ID NO: 57028 - RNA, 24 nt, Artificial Sequence
  Synthetic
  misc_feature (11)..(11): n is a, c, g, or u
gauccuggaanuagaggacaaacg

SEQ ID NO: 57029 - RNA, 18 nt, Artificial Sequence
  Synthetic
  misc_feature (5)..(5): n is a, c, g, or u
ccgungucggcuggaacg

SEQ ID NO: 57030 - RNA, 19 nt, Artificial Sequence
  Synthetic
  misc_feature (6)..(6): n is a, c, g, or u
cccgungucggcuggaacg

SEQ ID NO: 57031 - RNA, 20 nt, Artificial Sequence
  Synthetic
  misc_feature (7)..(7): n is a, c, g, or u
acccgungucggcuggaacg

SEQ ID NO: 57032 - RNA, 21 nt, Artificial Sequence
  Synthetic
  misc_feature (8)..(8): n is a, c, g, or u
gacccgungucggcuggaacg

SEQ ID NO: 57033 - RNA, 22 nt, Artificial Sequence
  Synthetic
  misc_feature (9)..(9): n is a, c, g, or u
cgacccgungucggcuggaacg

SEQ ID NO: 57034 - RNA, 23 nt, Artificial Sequence
  Synthetic
  misc_feature (10)..(10): n is a, c, g, or u
gcgacccgungucggcuggaacg

SEQ ID NO: 57035 - RNA, 24 nt, Artificial Sequence
  Synthetic
  misc_feature (11)..(11): n is a, c, g, or u
ugcgacccgungucggcuggaacg

SEQ ID NO: 57036 - RNA, 18 nt, Artificial Sequence
  Synthetic
cacaccgccuguaacacg

SEQ ID NO: 57037 - RNA, 19 nt, Artificial Sequence
  Synthetic
acacaccgccuguaacacg

SEQ ID NO: 57038 - RNA, 20 nt, Artificial Sequence
  Synthetic
aacacaccgccuguaacacg

SEQ ID NO: 57039 - RNA, 21 nt, Artificial Sequence
  Synthetic
aaacacaccgccuguaacacg

SEQ ID NO: 57040 - RNA, 22 nt, Artificial Sequence
  Synthetic
gaaacacaccgccuguaacacg

SEQ ID NO: 57041 - RNA, 23 nt, Artificial Sequence
  Synthetic
agaaacacaccgccuguaacacg

SEQ ID NO: 57042 - RNA, 24 nt, Artificial Sequence
  Synthetic
aagaaacacaccgccuguaacacg

SEQ ID NO: 57043 - RNA, 18 nt, Artificial Sequence
  Synthetic
gaugagaaggaacagacg

SEQ ID NO: 57044 - RNA, 19 nt, Artificial Sequence
  Synthetic
agaugagaaggaacagacg

SEQ ID NO: 57045 - RNA, 20 nt, Artificial Sequence
  Synthetic
cagaugagaaggaacagacg

SEQ ID NO: 57046 - RNA, 21 nt, Artificial Sequence
  Synthetic
gcagaugagaaggaacagacg

SEQ ID NO: 57047 - RNA, 22 nt, Artificial Sequence
  Synthetic
ggcagaugagaaggaacagacg

SEQ ID NO: 57048 - RNA, 23 nt, Artificial Sequence
  Synthetic
cggcagaugagaaggaacagacg

SEQ ID NO: 57049 - RNA, 24 nt, Artificial Sequence
  Synthetic
ccggcagaugagaaggaacagacg

SEQ ID NO: 57050 - RNA, 18 nt, Artificial Sequence
  Synthetic
cggcuggaacggcagacg

SEQ ID NO: 57051 - RNA, 19 nt, Artificial Sequence
  Synthetic
ucggcuggaacggcagacg

SEQ ID NO: 57052 - RNA, 20 nt, Artificial Sequence
  Synthetic
gucggcuggaacggcagacg

SEQ ID NO: 57053 - RNA, 21 nt, Artificial Sequence
  Synthetic
  misc_feature (1)..(1): n is a, c, g, or u
ngucggcuggaacggcagacg

SEQ ID NO: 57054 - RNA, 22 nt, Artificial Sequence
  Synthetic
  misc_feature (2)..(2): n is a, c, g, or u
ungucggcuggaacggcagacg

SEQ ID NO: 57055 - RNA, 23 nt, Artificial Sequence
  Synthetic
  misc_feature (3)..(3): n is a, c, g, or u
gungucggcuggaacggcagacg

SEQ ID NO: 57056 - RNA, 24 nt, Artificial Sequence
  Synthetic
  misc_feature (4)..(4): n is a, c, g, or u
cgungucggcuggaacggcagacg

SEQ ID NO: 57057 - RNA, 18 nt, Artificial Sequence
  Synthetic
gguggucuccaugcgacg

SEQ ID NO: 57058 - RNA, 19 nt, Artificial Sequence
  Synthetic
cgguggucuccaugcgacg

SEQ ID NO: 57059 - RNA, 20 nt, Artificial Sequence
  Synthetic
acgguggucuccaugcgacg

SEQ ID NO: 57060 - RNA, 18 nt, Artificial Sequence
  Synthetic
  misc_feature (14)..(14): n is a, c, g, or u
guaggucccgaacngacg

SEQ ID NO: 57061 - RNA, 19 nt, Artificial Sequence
  Synthetic
  misc_feature (15)..(15): n is a, c, g, or u
aguaggucccgaacngacg

SEQ ID NO: 57062 - RNA, 20 nt, Artificial Sequence
  Synthetic
  misc_feature (16)..(16): n is a, c, g, or u
gaguaggucccgaacngacg

SEQ ID NO: 57063 - RNA, 21 nt, Artificial Sequence
  Synthetic
  misc_feature (17)..(17): n is a, c, g, or u
cgaguaggucccgaacngacg

SEQ ID NO: 57064 - RNA, 22 nt, Artificial Sequence
  Synthetic
  misc_feature (18)..(18): n is a, c, g, or u
ucgaguaggucccgaacngacg

SEQ ID NO: 57065 - RNA, 23 nt, Artificial Sequence
  Synthetic
  misc_feature (19)..(19): n is a, c, g, or u
gucgaguaggucccgaacngacg

SEQ ID NO: 57066 - RNA, 24 nt, Artificial Sequence
  Synthetic
  misc_feature (20)..(20): n is a, c, g, or u
ugucgaguaggucccgaacngacg

SEQ ID NO: 57067 - RNA, 18 nt, Artificial Sequence
  Synthetic
acaaaaugaggcgcuacg

SEQ ID NO: 57068 - RNA, 19 nt, Artificial Sequence
  Synthetic
cacaaaaugaggcgcuacg

SEQ ID NO: 57069 - RNA, 20 nt, Artificial Sequence
  Synthetic
ccacaaaaugaggcgcuacg

SEQ ID NO: 57070 - RNA, 21 nt, Artificial Sequence
  Synthetic
cccacaaaaugaggcgcuacg

SEQ ID NO: 57071 - RNA, 22 nt, Artificial Sequence
  Synthetic
acccacaaaaugaggcgcuacg

SEQ ID NO: 57072 - RNA, 23 nt, Artificial Sequence
  Synthetic
gacccacaaaaugaggcgcuacg

SEQ ID NO: 57073 - RNA, 24 nt, Artificial Sequence
  Synthetic
ugacccacaaaaugaggcgcuacg

SEQ ID NO: 57074 - RNA, 18 nt, Artificial Sequence
  Synthetic
  misc_feature (8)..(8): n is a, c, g, or u
caccccancaggccaccg

SEQ ID NO: 57075 - RNA, 19 nt, Artificial Sequence
  Synthetic
  misc_feature (9)..(9): n is a, c, g, or u
ccaccccancaggccaccg

SEQ ID NO: 57076 - RNA, 20 nt, Artificial Sequence
  Synthetic
  misc_feature (10)..(10): n is a, c, g, or u
uccaccccancaggccaccg

SEQ ID NO: 57077 - RNA, 21 nt, Artificial Sequence
  Synthetic
  misc_feature (11)..(11): n is a, c, g, or u
cuccaccccancaggccaccg

SEQ ID NO: 57078 - RNA, 22 nt, Artificial Sequence
  Synthetic
  misc_feature (1)..(1): n is a, c, g, or u
  misc_feature (12)..(12): n is a, c, g, or u
ncuccaccccancaggccaccg

SEQ ID NO: 57079 - RNA, 23 nt, Artificial Sequence
  Synthetic
  misc_feature (2)..(2): n is a, c, g, or u
  misc_feature (13)..(13): n is a, c, g, or u
gncuccaccccancaggccaccg

SEQ ID NO: 57080 - RNA, 24 nt, Artificial Sequence
  Synthetic
  misc_feature (3)..(3): n is a, c, g, or u
  misc_feature (14)..(14): n is a, c, g, or u
ggncuccaccccancaggccaccg

SEQ ID NO: 57081 - RNA, 18 nt, Artificial Sequence
  Synthetic
  misc_feature (1)..(1): n is a, c, g, or u
  misc_feature (13)..(13): n is a, c, g, or u
nagccccaagcgnccccg

SEQ ID NO: 57082 - RNA, 19 nt, Artificial Sequence
  Synthetic
  misc_feature (2)..(2): n is a, c, g, or u
  misc_feature (14)..(14): n is a, c, g, or u
anagccccaagcgnccccg

SEQ ID NO: 57083 - RNA, 20 nt, Artificial Sequence
  Synthetic
  misc_feature (3)..(3): n is a, c, g, or u
  misc_feature (15)..(15): n is a, c, g, or u
uanagccccaagcgnccccg

SEQ ID NO: 57084 - RNA, 21 nt, Artificial Sequence
  Synthetic
  misc_feature (1)..(1): n is a, c, g, or u
  misc_feature (4)..(4): n is a, c, g, or u
  misc_feature (16)..(16): n is a, c, g, or u
nuanagccccaagcgnccccg

SEQ ID NO: 57085 - RNA, 22 nt, Artificial Sequence
  Synthetic
  misc_feature (2)..(2): n is a, c, g, or u
  misc_feature (5)..(5): n is a, c, g, or u
  misc_feature (17)..(17): n is a, c, g, or u
gnuanagccccaagcgnccccg

SEQ ID NO: 57086 - RNA, 23 nt, Artificial Sequence
  Synthetic
  misc_feature (3)..(3): n is a, c, g, or u
  misc_feature (6)..(6): n is a, c, g, or u
  misc_feature (18)..(18): n is a, c, g, or u
cgnuanagccccaagcgnccccg

SEQ ID NO: 57087 - RNA, 24 nt, Artificial Sequence
  Synthetic
  misc_feature (4)..(4): n is a, c, g, or u
  misc_feature (7)..(7): n is a, c, g, or u
  misc_feature (19)..(19): n is a, c, g, or u
gcgnuanagccccaagcgnccccg

SEQ ID NO: 57088 - RNA, 18 nt, Artificial Sequence
  Synthetic
uaaacaaaggacgucccg

SEQ ID NO: 57089 - RNA, 19 nt, Artificial Sequence
  Synthetic
guaaacaaaggacgucccg

SEQ ID NO: 57090 - RNA, 20 nt, Artificial Sequence
  Synthetic
cguaaacaaaggacgucccg

SEQ ID NO: 57091 - RNA, 21 nt, Artificial Sequence
  Synthetic
acguaaacaaaggacgucccg

SEQ ID NO: 57092 - RNA, 22 nt, Artificial Sequence
  Synthetic
gacguaaacaaaggacgucccg

SEQ ID NO: 57093 - RNA, 23 nt, Artificial Sequence
  Synthetic
ggacguaaacaaaggacgucccg

SEQ ID NO: 57094 - RNA, 24 nt, Artificial Sequence
  Synthetic
gggacguaaacaaaggacgucccg

SEQ ID NO: 57095 - RNA, 18 nt, Artificial Sequence
  Synthetic
  misc_feature (5)..(5): n is a, c, g, or u
ccgcnggauucagcgccg

SEQ ID NO: 57096 - RNA, 19 nt, Artificial Sequence
  Synthetic
  misc_feature (6)..(6): n is a, c, g, or u
uccgcnggauucagcgccg

SEQ ID NO: 57097 - RNA, 20 nt, Artificial Sequence
  Synthetic
  misc_feature (7)..(7): n is a, c, g, or u
guccgcnggauucagcgccg

SEQ ID NO: 57098 - RNA, 21 nt, Artificial Sequence
  Synthetic
  misc_feature (8)..(8): n is a, c, g, or u
cguccgcnggauucagcgccg

SEQ ID NO: 57099 - RNA, 22 nt, Artificial Sequence
  Synthetic
  misc_feature (9)..(9): n is a, c, g, or u
ucguccgcnggauucagcgccg

SEQ ID NO: 57100 - RNA, 23 nt, Artificial Sequence
  Synthetic
  misc_feature (1)..(1): n is a, c, g, or u
  misc_feature (10)..(10): n is a, c, g, or u
nucguccgcnggauucagcgccg

SEQ ID NO: 57101 - RNA, 24 nt, Artificial Sequence
  Synthetic
  misc_feature (2)..(2): n is a, c, g, or u
  misc_feature (11)..(11): n is a, c, g, or u
gnucguccgcnggauucagcgccg

SEQ ID NO: 57102 - RNA, 18 nt, Artificial Sequence
  Synthetic
caggccuggccguugccg

SEQ ID NO: 57103 - RNA, 19 nt, Artificial Sequence
  Synthetic
acaggccuggccguugccg

SEQ ID NO: 57104 - RNA, 20 nt, Artificial Sequence
  Synthetic
cacaggccuggccguugccg

SEQ ID NO: 57105 - RNA, 21 nt, Artificial Sequence
  Synthetic
gcacaggccuggccguugccg

SEQ ID NO: 57106 - RNA, 22 nt, Artificial Sequence
  Synthetic
ggcacaggccuggccguugccg

SEQ ID NO: 57107 - RNA, 23 nt, Artificial Sequence
  Synthetic
uggcacaggccuggccguugccg

SEQ ID NO: 57108 - RNA, 24 nt, Artificial Sequence
  Synthetic
uuggcacaggccuggccguugccg

SEQ ID NO: 57109 - RNA, 18 nt, Artificial Sequence
  Synthetic
  misc_feature (15)..(15): n is a, c, g, or u
caguuggcagcacanccg

SEQ ID NO: 57110 - RNA, 19 nt, Artificial Sequence
  Synthetic
  misc_feature (16)..(16): n is a, c, g, or u
ccaguuggcagcacanccg

SEQ ID NO: 57111 - RNA, 20 nt, Artificial Sequence
  Synthetic
  misc_feature (17)..(17): n is a, c, g, or u
uccaguuggcagcacanccg

SEQ ID NO: 57112 - RNA, 21 nt, Artificial Sequence
  Synthetic
  misc_feature (18)..(18): n is a, c, g, or u
auccaguuggcagcacanccg

SEQ ID NO: 57113 - RNA, 22 nt, Artificial Sequence
  Synthetic
  misc_feature (19)..(19): n is a, c, g, or u
gauccaguuggcagcacanccg

SEQ ID NO: 57114 - RNA, 23 nt, Artificial Sequence
  Synthetic
  misc_feature (20)..(20): n is a, c, g, or u
ggauccaguuggcagcacanccg

SEQ ID NO: 57115 - RNA, 24 nt, Artificial Sequence
  Synthetic
  misc_feature (21)..(21): n is a, c, g, or u
aggauccaguuggcagcacanccg

SEQ ID NO: 57116 - RNA, 18 nt, Artificial Sequence
  Synthetic
  misc_feature (15)..(15): n is a, c, g, or u
gaacagacggggagnccg

SEQ ID NO: 57117 - RNA, 19 nt, Artificial Sequence
  Synthetic
  misc_feature (16)..(16): n is a, c, g, or u
ggaacagacggggagnccg

SEQ ID NO: 57118 - RNA, 20 nt, Artificial Sequence
  Synthetic
  misc_feature (17)..(17): n is a, c, g, or u
aggaacagacggggagnccg

SEQ ID NO: 57119 - RNA, 21 nt, Artificial Sequence
  Synthetic
  misc_feature (18)..(18): n is a, c, g, or u
aaggaacagacggggagnccg

SEQ ID NO: 57120 - RNA, 22 nt, Artificial Sequence
  Synthetic
  misc_feature (19)..(19): n is a, c, g, or u
gaaggaacagacggggagnccg

SEQ ID NO: 57121 - RNA, 23 nt, Artificial Sequence
  Synthetic
  misc_feature (20)..(20): n is a, c, g, or u
agaaggaacagacggggagnccg

SEQ ID NO: 57122 - RNA, 24 nt, Artificial Sequence
  Synthetic
  misc_feature (21)..(21): n is a, c, g, or u
gagaaggaacagacggggagnccg

SEQ ID NO: 57123 - RNA, 18 nt, Artificial Sequence
  Synthetic
  misc_feature (6)..(6): n is a, c, g, or u
auacangugcaguuuccg

SEQ ID NO: 57124 - RNA, 19 nt, Artificial Sequence
  Synthetic
  misc_feature (7)..(7): n is a, c, g, or u
aauacangugcaguuuccg

SEQ ID NO: 57125 - RNA, 20 nt, Artificial Sequence
  Synthetic
  misc_feature (8)..(8): n is a, c, g, or u
gaauacangugcaguuuccg

SEQ ID NO: 57126 - RNA, 21 nt, Artificial Sequence
  Synthetic
  misc_feature (9)..(9): n is a, c, g, or u
ggaauacangugcaguuuccg

SEQ ID NO: 57127 - RNA, 22 nt, Artificial Sequence
  Synthetic
  misc_feature (10)..(10): n is a, c, g, or u
gggaauacangugcaguuuccg

SEQ ID NO: 57128 - RNA, 23 nt, Artificial Sequence
  Synthetic
  misc_feature (11)..(11): n is a, c, g, or u
ugggaauacangugcaguuuccg

SEQ ID NO: 57129 - RNA, 24 nt, Artificial Sequence
  Synthetic
  misc_feature (12)..(12): n is a, c, g, or u
augggaauacangugcaguuuccg

SEQ ID NO: 57130 - RNA, 18 nt, Artificial Sequence
  Synthetic
  misc_feature (13)..(13): n is a, c, g, or u
acagacggggagnccgcg

SEQ ID NO: 57131 - RNA, 19 nt, Artificial Sequence
  Synthetic
  misc_feature (14)..(14): n is a, c, g, or u
aacagacggggagnccgcg

SEQ ID NO: 57132 - RNA, 20 nt, Artificial Sequence
  Synthetic
  misc_feature (15)..(15): n is a, c, g, or u
gaacagacggggagnccgcg

SEQ ID NO: 57133 - RNA, 21 nt, Artificial Sequence
  Synthetic
  misc_feature (16)..(16): n is a, c, g, or u
ggaacagacggggagnccgcg

SEQ ID NO: 57134 - RNA, 22 nt, Artificial Sequence
  Synthetic
  misc_feature (17)..(17): n is a, c, g, or u
aggaacagacggggagnccgcg

SEQ ID NO: 57135 - RNA, 23 nt, Artificial Sequence
  Synthetic
  misc_feature (18)..(18): n is a, c, g, or u
aaggaacagacggggagnccgcg

SEQ ID NO: 57136 - RNA, 24 nt, Artificial Sequence
  Synthetic
  misc_feature (19)..(19): n is a, c, g, or u
gaaggaacagacggggagnccgcg

SEQ ID NO: 57137 - RNA, 18 nt, Artificial Sequence
  Synthetic
  misc_feature (2)..(2): n is a, c, g, or u
ancuucgucugcgaggcg

SEQ ID NO: 57138 - RNA, 19 nt, Artificial Sequence
  Synthetic
  misc_feature (3)..(3): n is a, c, g, or u
gancuucgucugcgaggcg

SEQ ID NO: 57139 - RNA, 20 nt, Artificial Sequence
  Synthetic
  misc_feature (4)..(4): n is a, c, g, or u
agancuucgucugcgaggcg

SEQ ID NO: 57140 - RNA, 21 nt, Artificial Sequence
  Synthetic
  misc_feature (5)..(5): n is a, c, g, or u
gagancuucgucugcgaggcg

SEQ ID NO: 57141 - RNA, 22 nt, Artificial Sequence
  Synthetic
  misc_feature (6)..(6): n is a, c, g, or u
ugagancuucgucugcgaggcg

SEQ ID NO: 57142 - RNA, 23 nt, Artificial Sequence
  Synthetic
  misc_feature (7)..(7): n is a, c, g, or u
uugagancuucgucugcgaggcg

SEQ ID NO: 57143 - RNA, 24 nt, Artificial Sequence
  Synthetic
  misc_feature (8)..(8): n is a, c, g, or u
auugagancuucgucugcgaggcg

SEQ ID NO: 57144 - RNA, 18 nt, Artificial Sequence
  Synthetic
aucuucugcgacgcggcg

SEQ ID NO: 57145 - RNA, 19 nt, Artificial Sequence
  Synthetic
gaucuucugcgacgcggcg

SEQ ID NO: 57146 - RNA, 20 nt, Artificial Sequence
  Synthetic
agaucuucugcgacgcggcg

SEQ ID NO: 57147 - RNA, 18 nt, Artificial Sequence
  Synthetic
aggccuuguaaguuggcg

SEQ ID NO: 57148 - RNA, 19 nt, Artificial Sequence
  Synthetic
aaggccuuguaaguuggcg

SEQ ID NO: 57149 - RNA, 20 nt, Artificial Sequence
  Synthetic
aaaggccuuguaaguuggcg

SEQ ID NO: 57150 - RNA, 21 nt, Artificial Sequence
  Synthetic
gaaaggccuuguaaguuggcg

SEQ ID NO: 57151 - RNA, 22 nt, Artificial Sequence
  Synthetic
agaaaggccuuguaaguuggcg

SEQ ID NO: 57152 - RNA, 23 nt, Artificial Sequence
  Synthetic
  misc_feature (1)..(1): n is a, c, g, or u
nagaaaggccuuguaaguuggcg

SEQ ID NO: 57153 - RNA, 24 nt, Artificial Sequence
  Synthetic
  misc_feature (2)..(2): n is a, c, g, or u
anagaaaggccuuguaaguuggcg

SEQ ID NO: 57154 - RNA, 18 nt, Artificial Sequence
  Synthetic
cgcuccagaccggcugcg

SEQ ID NO: 57155 - RNA, 19 nt, Artificial Sequence
  Synthetic
ucgcuccagaccggcugcg

SEQ ID NO: 57156 - RNA, 20 nt, Artificial Sequence
  Synthetic
uucgcuccagaccggcugcg

SEQ ID NO: 57157 - RNA, 21 nt, Artificial Sequence
  Synthetic
  misc_feature (1)..(1): n is a, c, g, or u
nuucgcuccagaccggcugcg

SEQ ID NO: 57158 - RNA, 22 nt, Artificial Sequence
  Synthetic
  misc_feature (1)..(2): n is a, c, g, or u
nnuucgcuccagaccggcugcg

SEQ ID NO: 57159 - RNA, 23 nt, Artificial Sequence
  Synthetic
  misc_feature (2)..(3): n is a, c, g, or u
annuucgcuccagaccggcugcg

SEQ ID NO: 57160 - RNA, 24 nt, Artificial Sequence
  Synthetic
  misc_feature (3)..(4): n is a, c, g, or u
gannuucgcuccagaccggcugcg

SEQ ID NO: 57161 - RNA, 18 nt, Artificial Sequence
  Synthetic
guuccgcaguauggaucg

SEQ ID NO: 57162 - RNA, 19 nt, Artificial Sequence
  Synthetic
aguuccgcaguauggaucg

SEQ ID NO: 57163 - RNA, 20 nt, Artificial Sequence
  Synthetic
gaguuccgcaguauggaucg

SEQ ID NO: 57164 - RNA, 21 nt, Artificial Sequence
  Synthetic
ggaguuccgcaguauggaucg

SEQ ID NO: 57165 - RNA, 22 nt, Artificial Sequence
  Synthetic
aggaguuccgcaguauggaucg

SEQ ID NO: 57166 - RNA, 23 nt, Artificial Sequence
  Synthetic
aaggaguuccgcaguauggaucg

SEQ ID NO: 57167 - RNA, 24 nt, Artificial Sequence
  Synthetic
caaggaguuccgcaguauggaucg

SEQ ID NO: 57168 - RNA, 18 nt, Artificial Sequence
  Synthetic
aggggaccugccucgucg

SEQ ID NO: 57169 - RNA, 19 nt, Artificial Sequence
  Synthetic
  misc_feature (1)..(1): n is a, c, g, or u
naggggaccugccucgucg

SEQ ID NO: 57170 - RNA, 20 nt, Artificial Sequence
  Synthetic
  misc_feature (2)..(2): n is a, c, g, or u
cnaggggaccugccucgucg

SEQ ID NO: 57171 - RNA, 21 nt, Artificial Sequence
  Synthetic
  misc_feature (3)..(3): n is a, c, g, or u
ucnaggggaccugccucgucg

SEQ ID NO: 57172 - RNA, 22 nt, Artificial Sequence
  Synthetic
  misc_feature (4)..(4): n is a, c, g, or u
uucnaggggaccugccucgucg

SEQ ID NO: 57173 - RNA, 23 nt, Artificial Sequence
  Synthetic
  misc_feature (5)..(5): n is a, c, g, or u
cuucnaggggaccugccucgucg

SEQ ID NO: 57174 - RNA, 24 nt, Artificial Sequence
  Synthetic
  misc_feature (6)..(6): n is a, c, g, or u
ucuucnaggggaccugccucgucg

SEQ ID NO: 57175 - RNA, 18 nt, Artificial Sequence
  Synthetic
  misc_feature (14)..(14): n is a, c, g, or u
aggugcgacccgungucg

SEQ ID NO: 57176 - RNA, 19 nt, Artificial Sequence
  Synthetic
  misc_feature (15)..(15): n is a, c, g, or u
gaggugcgacccgungucg

SEQ ID NO: 57177 - RNA, 20 nt, Artificial Sequence
  Synthetic
  misc_feature (16)..(16): n is a, c, g, or u
agaggugcgacccgungucg

SEQ ID NO: 57178 - RNA, 18 nt, Artificial Sequence
  Synthetic
agggcugaagcggugucg

SEQ ID NO: 57179 - RNA, 19 nt, Artificial Sequence
  Synthetic
  misc_feature (1)..(1): n is a, c, g, or u
nagggcugaagcggugucg

SEQ ID NO: 57180 - RNA, 20 nt, Artificial Sequence
  Synthetic
  misc_feature (2)..(2): n is a, c, g, or u
anagggcugaagcggugucg

SEQ ID NO: 57181 - RNA, 21 nt, Artificial Sequence
  Synthetic
  misc_feature (3)..(3): n is a, c, g, or u
uanagggcugaagcggugucg

SEQ ID NO: 57182 - RNA, 22 nt, Artificial Sequence
  Synthetic
  misc_feature (4)..(4): n is a, c, g, or u
guanagggcugaagcggugucg

SEQ ID NO: 57183 - RNA, 23 nt, Artificial Sequence
  Synthetic
  misc_feature (1)..(1): n is a, c, g, or u
  misc_feature (5)..(5): n is a, c, g, or u
nguanagggcugaagcggugucg

SEQ ID NO: 57184 - RNA, 24 nt, Artificial Sequence
  Synthetic
  misc_feature (2)..(2): n is a, c, g, or u
  misc_feature (6)..(6): n is a, c, g, or u
cnguanagggcugaagcggugucg

SEQ ID NO: 57185 - RNA, 18 nt, Artificial Sequence
  Synthetic
ccccaaagccacccaagg

SEQ ID NO: 57186 - RNA, 19 nt, Artificial Sequence
  Synthetic
gccccaaagccacccaagg

SEQ ID NO: 57187 - RNA, 20 nt, Artificial Sequence
  Synthetic
ugccccaaagccacccaagg

SEQ ID NO: 57188 - RNA, 21 nt, Artificial Sequence
  Synthetic
augccccaaagccacccaagg

SEQ ID NO: 57189 - RNA, 22 nt, Artificial Sequence
  Synthetic
caugccccaaagccacccaagg

SEQ ID NO: 57190 - RNA, 23 nt, Artificial Sequence
  Synthetic
ccaugccccaaagccacccaagg

SEQ ID NO: 57191 - RNA, 24 nt, Artificial Sequence
  Synthetic
uccaugccccaaagccacccaagg

SEQ ID NO: 57192 - RNA, 18 nt, Artificial Sequence
  Synthetic
  misc_feature (10)..(10): n is a, c, g, or u
cgggaagaanucagaagg

SEQ ID NO: 57193 - RNA, 19 nt, Artificial Sequence
  Synthetic
  misc_feature (11)..(11): n is a, c, g, or u
acgggaagaanucagaagg

SEQ ID NO: 57194 - RNA, 20 nt, Artificial Sequence
  Synthetic
  misc_feature (12)..(12): n is a, c, g, or u
gacgggaagaanucagaagg

SEQ ID NO: 57195 - RNA, 21 nt, Artificial Sequence
  Synthetic
  misc_feature (1)..(1): n is a, c, g, or u
  misc_feature (13)..(13): n is a, c, g, or u
ngacgggaagaanucagaagg

SEQ ID NO: 57196 - RNA, 22 nt, Artificial Sequence
  Synthetic
  misc_feature (2)..(2): n is a, c, g, or u
  misc_feature (14)..(14): n is a, c, g, or u
cngacgggaagaanucagaagg

SEQ ID NO: 57197 - RNA, 23 nt, Artificial Sequence
  Synthetic
  misc_feature (3)..(3): n is a, c, g, or u
  misc_feature (15)..(15): n is a, c, g, or u
acngacgggaagaanucagaagg

SEQ ID NO: 57198 - RNA, 24 nt, Artificial Sequence
  Synthetic
  misc_feature (4)..(4): n is a, c, g, or u
  misc_feature (16)..(16): n is a, c, g, or u
aacngacgggaagaanucagaagg

SEQ ID NO: 57199 - RNA, 18 nt, Artificial Sequence
  Synthetic
  misc_feature (2)..(2): n is a, c, g, or u
gnccggcagaugagaagg

SEQ ID NO: 57200 - RNA, 19 nt, Artificial Sequence
  Synthetic
  misc_feature (3)..(3): n is a, c, g, or u
ggnccggcagaugagaagg

SEQ ID NO: 57201 - RNA, 20 nt, Artificial Sequence
  Synthetic
  misc_feature (4)..(4): n is a, c, g, or u
cggnccggcagaugagaagg

SEQ ID NO: 57202 - RNA, 21 nt, Artificial Sequence
  Synthetic
  misc_feature (5)..(5): n is a, c, g, or u
acggnccggcagaugagaagg

SEQ ID NO: 57203 - RNA, 22 nt, Artificial Sequence
  Synthetic
  misc_feature (6)..(6): n is a, c, g, or u
cacggnccggcagaugagaagg

SEQ ID NO: 57204 - RNA, 23 nt, Artificial Sequence
  Synthetic
  misc_feature (7)..(7): n is a, c, g, or u
acacggnccggcagaugagaagg

SEQ ID NO: 57205 - RNA, 24 nt, Artificial Sequence
  Synthetic
  misc_feature (8)..(8): n is a, c, g, or u
cacacggnccggcagaugagaagg

SEQ ID NO: 57206 - RNA, 18 nt, Artificial Sequence
  Synthetic
ucucuuccaaaaguaagg

SEQ ID NO: 57207 - RNA, 19 nt, Artificial Sequence
  Synthetic
uucucuuccaaaaguaagg

SEQ ID NO: 57208 - RNA, 20 nt, Artificial Sequence
  Synthetic
uuucucuuccaaaaguaagg

SEQ ID NO: 57209 - RNA, 21 nt, Artificial Sequence
  Synthetic
guuucucuuccaaaaguaagg

SEQ ID NO: 57210 - RNA, 22 nt, Artificial Sequence
  Synthetic
uguuucucuuccaaaaguaagg

SEQ ID NO: 57211 - RNA, 23 nt, Artificial Sequence
  Synthetic
cuguuucucuuccaaaaguaagg

SEQ ID NO: 57212 - RNA, 24 nt, Artificial Sequence
  Synthetic
acuguuucucuuccaaaaguaagg

SEQ ID NO: 57213 - RNA, 18 nt, Artificial Sequence
  Synthetic
gcaaacacuuggcacagg

SEQ ID NO: 57214 - RNA, 19 nt, Artificial Sequence
  Synthetic
agcaaacacuuggcacagg

SEQ ID NO: 57215 - RNA, 20 nt, Artificial Sequence
  Synthetic
cagcaaacacuuggcacagg

SEQ ID NO: 57216 - RNA, 21 nt, Artificial Sequence
  Synthetic
ucagcaaacacuuggcacagg

SEQ ID NO: 57217 - RNA, 22 nt, Artificial Sequence
  Synthetic
gucagcaaacacuuggcacagg

SEQ ID NO: 57218 - RNA, 23 nt, Artificial Sequence
  Synthetic
cgucagcaaacacuuggcacagg

SEQ ID NO: 57219 - RNA, 24 nt, Artificial Sequence
  Synthetic
gcgucagcaaacacuuggcacagg

SEQ ID NO: 57220 - RNA, 18 nt, Artificial Sequence
  Synthetic
cuaguaaacugagccagg

SEQ ID NO: 57221 - RNA, 19 nt, Artificial Sequence
  Synthetic
acuaguaaacugagccagg

SEQ ID NO: 57222 - RNA, 20 nt, Artificial Sequence
  Synthetic
cacuaguaaacugagccagg

SEQ ID NO: 57223 - RNA, 21 nt, Artificial Sequence
  Synthetic
gcacuaguaaacugagccagg

SEQ ID NO: 57224 - RNA, 22 nt, Artificial Sequence
  Synthetic
ugcacuaguaaacugagccagg

SEQ ID NO: 57225 - RNA, 23 nt, Artificial Sequence
  Synthetic
uugcacuaguaaacugagccagg

SEQ ID NO: 57226 - RNA, 24 nt, Artificial Sequence
  Synthetic
auugcacuaguaaacugagccagg

SEQ ID NO: 57227 - RNA, 18 nt, Artificial Sequence
  Synthetic
augaggcauagcagcagg

SEQ ID NO: 57228 - RNA, 19 nt, Artificial Sequence
  Synthetic
gaugaggcauagcagcagg

SEQ ID NO: 57229 - RNA, 20 nt, Artificial Sequence
  Synthetic
agaugaggcauagcagcagg

SEQ ID NO: 57230 - RNA, 21 nt, Artificial Sequence
  Synthetic
aagaugaggcauagcagcagg

SEQ ID NO: 57231 - RNA, 22 nt, Artificial Sequence
  Synthetic
gaagaugaggcauagcagcagg

SEQ ID NO: 57232 - RNA, 23 nt, Artificial Sequence
  Synthetic
agaagaugaggcauagcagcagg

SEQ ID NO: 57233 - RNA, 24 nt, Artificial Sequence
  Synthetic
aagaagaugaggcauagcagcagg

SEQ ID NO: 57234 - RNA, 18 nt, Artificial Sequence
  Synthetic
  misc_feature (4)..(4): n is a, c, g, or u
  misc_feature (13)..(13): n is a, c, g, or u
augnaaaugaaunucagg

SEQ ID NO: 57235 - RNA, 19 nt, Artificial Sequence
  Synthetic
  misc_feature (5)..(5): n is a, c, g, or u
  misc_feature (14)..(14): n is a, c, g, or u
gaugnaaaugaaunucagg

SEQ ID NO: 57236 - RNA, 20 nt, Artificial Sequence
  Synthetic
  misc_feature (6)..(6): n is a, c, g, or u
  misc_feature (15)..(15): n is a, c, g, or u
ugaugnaaaugaaunucagg

SEQ ID NO: 57237 - RNA, 21 nt, Artificial Sequence
  Synthetic
  misc_feature (7)..(7): n is a, c, g, or u
  misc_feature (16)..(16): n is a, c, g, or u
uugaugnaaaugaaunucagg

SEQ ID NO: 57238 - RNA, 22 nt, Artificial Sequence
  Synthetic
  misc_feature (8)..(8): n is a, c, g, or u
  misc_feature (17)..(17): n is a, c, g, or u
cuugaugnaaaugaaunucagg

SEQ ID NO: 57239 - RNA, 23 nt, Artificial Sequence
  Synthetic
  misc_feature (9)..(9): n is a, c, g, or u
  misc_feature (18)..(18): n is a, c, g, or u
ucuugaugnaaaugaaunucagg

SEQ ID NO: 57240 - RNA, 24 nt, Artificial Sequence
  Synthetic
  misc_feature (1)..(1): n is a, c, g, or u
  misc_feature (10)..(10): n is a, c, g, or u
  misc_feature (19)..(19): n is a, c, g, or u
nucuugaugnaaaugaaunucagg

SEQ ID NO: 57241 - RNA, 18 nt, Artificial Sequence
  Synthetic
  misc_feature (1)..(1): n is a, c, g, or u
  misc_feature (9)..(9): n is a, c, g, or u
nauacaggnauacagagg

SEQ ID NO: 57242 - RNA, 19 nt, Artificial Sequence
  Synthetic
  misc_feature (2)..(2): n is a, c, g, or u
  misc_feature (10)..(10): n is a, c, g, or u
unauacaggnauacagagg

SEQ ID NO: 57243 - RNA, 20 nt, Artificial Sequence
  Synthetic
  misc_feature (3)..(3): n is a, c, g, or u
  misc_feature (11)..(11): n is a, c, g, or u
gunauacaggnauacagagg

SEQ ID NO: 57244 - RNA, 21 nt, Artificial Sequence
  Synthetic
  misc_feature (4)..(4): n is a, c, g, or u
  misc_feature (12)..(12): n is a, c, g, or u
agunauacaggnauacagagg

SEQ ID NO: 57245 - RNA, 22 nt, Artificial Sequence
  Synthetic
  misc_feature (5)..(5): n is a, c, g, or u
  misc_feature (13)..(13): n is a, c, g, or u
cagunauacaggnauacagagg

SEQ ID NO: 57246 - RNA, 23 nt, Artificial Sequence
  Synthetic
  misc_feature (6)..(6): n is a, c, g, or u
  misc_feature (14)..(14): n is a, c, g, or u
gcagunauacaggnauacagagg

SEQ ID NO: 57247 - RNA, 24 nt, Artificial Sequence
  Synthetic
  misc_feature (1)..(1): n is a, c, g, or u
  misc_feature (7)..(7): n is a, c, g, or u
  misc_feature (15)..(15): n is a, c, g, or u
ngcagunauacaggnauacagagg

SEQ ID NO: 57248 - RNA, 18 nt, Artificial Sequence
  Synthetic
aagaugauuaggcagagg

SEQ ID NO: 57249 - RNA, 19 nt, Artificial Sequence
  Synthetic
aaagaugauuaggcagagg

SEQ ID NO: 57250 - RNA, 20 nt, Artificial Sequence
  Synthetic
aaaagaugauuaggcagagg

SEQ ID NO: 57251 - RNA, 21 nt, Artificial Sequence
  Synthetic
caaaagaugauuaggcagagg

SEQ ID NO: 57252 - RNA, 22 nt, Artificial Sequence
  Synthetic
acaaaagaugauuaggcagagg

SEQ ID NO: 57253 - RNA, 23 nt, Artificial Sequence
  Synthetic
aacaaaagaugauuaggcagagg

SEQ ID NO: 57254 - RNA, 24 nt, Artificial Sequence
  Synthetic
gaacaaaagaugauuaggcagagg

SEQ ID NO: 57255 - RNA, 18 nt, Artificial Sequence
  Synthetic
ccaugcgacgugcagagg

SEQ ID NO: 57256 - RNA, 19 nt, Artificial Sequence
  Synthetic
uccaugcgacgugcagagg

SEQ ID NO: 57257 - RNA, 20 nt, Artificial Sequence
  Synthetic
cuccaugcgacgugcagagg

SEQ ID NO: 57258 - RNA, 21 nt, Artificial Sequence
  Synthetic
ucuccaugcgacgugcagagg

SEQ ID NO: 57259 - RNA, 22 nt, Artificial Sequence
  Synthetic
gucuccaugcgacgugcagagg

SEQ ID NO: 57260 - RNA, 23 nt, Artificial Sequence
  Synthetic
ggucuccaugcgacgugcagagg

SEQ ID NO: 57261 - RNA, 24 nt, Artificial Sequence
  Synthetic
uggucuccaugcgacgugcagagg

SEQ ID NO: 57262 - RNA, 18 nt, Artificial Sequence
  Synthetic
  misc_feature (3)..(3): n is a, c, g, or u
agnccgcguaaagagagg

SEQ ID NO: 57263 - RNA, 19 nt, Artificial Sequence
  Synthetic
  misc_feature (4)..(4): n is a, c, g, or u
gagnccgcguaaagagagg

SEQ ID NO: 57264 - RNA, 20 nt, Artificial Sequence
  Synthetic
  misc_feature (5)..(5): n is a, c, g, or u
ggagnccgcguaaagagagg

SEQ ID NO: 57265 - RNA, 21 nt, Artificial Sequence
  Synthetic
  misc_feature (6)..(6): n is a, c, g, or u
gggagnccgcguaaagagagg

SEQ ID NO: 57266 - RNA, 22 nt, Artificial Sequence
  Synthetic
  misc_feature (7)..(7): n is a, c, g, or u
ggggagnccgcguaaagagagg

SEQ ID NO: 57267 - RNA, 23 nt, Artificial Sequence
  Synthetic
  misc_feature (8)..(8): n is a, c, g, or u
cggggagnccgcguaaagagagg

SEQ ID NO: 57268 - RNA, 24 nt, Artificial Sequence
  Synthetic
  misc_feature (9)..(9): n is a, c, g, or u
acggggagnccgcguaaagagagg

SEQ ID NO: 57269 - RNA, 18 nt, Artificial Sequence
  Synthetic
  misc_feature (1)..(1): n is a, c, g, or u
  misc_feature (12)..(12): n is a, c, g, or u
ngauccuggaanuagagg

SEQ ID NO: 57270 - RNA, 19 nt, Artificial Sequence
  Synthetic
  misc_feature (2)..(2): n is a, c, g, or u
  misc_feature (13)..(13): n is a, c, g, or u
ungauccuggaanuagagg

SEQ ID NO: 57271 - RNA, 20 nt, Artificial Sequence
  Synthetic
  misc_feature (3)..(3): n is a, c, g, or u
  misc_feature (14)..(14): n is a, c, g, or u
gungauccuggaanuagagg

SEQ ID NO: 57272 - RNA, 21 nt, Artificial Sequence
  Synthetic
  misc_feature (4)..(4): n is a, c, g, or u
  misc_feature (15)..(15): n is a, c, g, or u
cgungauccuggaanuagagg

SEQ ID NO: 57273 - RNA, 22 nt, Artificial Sequence
  Synthetic
  misc_feature (5)..(5): n is a, c, g, or u
  misc_feature (16)..(16): n is a, c, g, or u
ucgungauccuggaanuagagg

SEQ ID NO: 57274 - RNA, 23 nt, Artificial Sequence
  Synthetic
  misc_feature (6)..(6): n is a, c, g, or u
  misc_feature (17)..(17): n is a, c, g, or u
gucgungauccuggaanuagagg

SEQ ID NO: 57275 - RNA, 24 nt, Artificial Sequence
  Synthetic
  misc_feature (7)..(7): n is a, c, g, or u
  misc_feature (18)..(18): n is a, c, g, or u
ggucgungauccuggaanuagagg

SEQ ID NO: 57276 - RNA, 18 nt, Artificial Sequence
  Synthetic
  misc_feature (4)..(4): n is a, c, g, or u
augngugucucuuagagg

SEQ ID NO: 57277 - RNA, 19 nt, Artificial Sequence
  Synthetic
  misc_feature (5)..(5): n is a, c, g, or u
gaugngugucucuuagagg

SEQ ID NO: 57278 - RNA, 20 nt, Artificial Sequence
  Synthetic
  misc_feature (6)..(6): n is a, c, g, or u
ggaugngugucucuuagagg

SEQ ID NO: 57279 - RNA, 21 nt, Artificial Sequence
  Synthetic
  misc_feature (7)..(7): n is a, c, g, or u
uggaugngugucucuuagagg

SEQ ID NO: 57280 - RNA, 22 nt, Artificial Sequence
  Synthetic
  misc_feature (8)..(8): n is a, c, g, or u
guggaugngugucucuuagagg

SEQ ID NO: 57281 - RNA, 23 nt, Artificial Sequence
  Synthetic
  misc_feature (9)..(9): n is a, c, g, or u
uguggaugngugucucuuagagg

SEQ ID NO: 57282 - RNA, 24 nt, Artificial Sequence
  Synthetic
  misc_feature (10)..(10): n is a, c, g, or u
cuguggaugngugucucuuagagg

SEQ ID NO: 57283 - RNA, 18 nt, Artificial Sequence
  Synthetic
  misc_feature (4)..(4): n is a, c, g, or u
agancuucgucugcgagg

SEQ ID NO: 57284 - RNA, 19 nt, Artificial Sequence
  Synthetic
  misc_feature (5)..(5): n is a, c, g, or u
gagancuucgucugcgagg

SEQ ID NO: 57285 - RNA, 20 nt, Artificial Sequence
  Synthetic
  misc_feature (6)..(6): n is a, c, g, or u
ugagancuucgucugcgagg

SEQ ID NO: 57286 - RNA, 21 nt, Artificial Sequence
  Synthetic
  misc_feature (7)..(7): n is a, c, g, or u
uugagancuucgucugcgagg

SEQ ID NO: 57287 - RNA, 22 nt, Artificial Sequence
  Synthetic
  misc_feature (8)..(8): n is a, c, g, or u
auugagancuucgucugcgagg

SEQ ID NO: 57288 - RNA, 23 nt, Artificial Sequence
  Synthetic
  misc_feature (9)..(9): n is a, c, g, or u
gauugagancuucgucugcgagg

SEQ ID NO: 57289 - RNA, 24 nt, Artificial Sequence
  Synthetic
  misc_feature (10)..(10): n is a, c, g, or u
cgauugagancuucgucugcgagg

SEQ ID NO: 57290 - RNA, 18 nt, Artificial Sequence
  Synthetic
uugguaagugauuggagg

SEQ ID NO: 57291 - RNA, 19 nt, Artificial Sequence
  Synthetic
guugguaagugauuggagg

SEQ ID NO: 57292 - RNA, 20 nt, Artificial Sequence
  Synthetic
gguugguaagugauuggagg

SEQ ID NO: 57293 - RNA, 21 nt, Artificial Sequence
  Synthetic
agguugguaagugauuggagg

SEQ ID NO: 57294 - RNA, 22 nt, Artificial Sequence
  Synthetic
gagguugguaagugauuggagg

SEQ ID NO: 57295 - RNA, 23 nt, Artificial Sequence
  Synthetic
ggagguugguaagugauuggagg

SEQ ID NO: 57296 - RNA, 24 nt, Artificial Sequence
  Synthetic
aggagguugguaagugauuggagg

SEQ ID NO: 57297 - RNA, 18 nt, Artificial Sequence
  Synthetic
caaggcacagcuuggagg

SEQ ID NO: 57298 - RNA, 19 nt, Artificial Sequence
  Synthetic
ccaaggcacagcuuggagg

SEQ ID NO: 57299 - RNA, 20 nt, Artificial Sequence
  Synthetic
cccaaggcacagcuuggagg

SEQ ID NO: 57300 - RNA, 21 nt, Artificial Sequence
  Synthetic
acccaaggcacagcuuggagg

SEQ ID NO: 57301 - RNA, 22 nt, Artificial Sequence
  Synthetic
cacccaaggcacagcuuggagg

SEQ ID NO: 57302 - RNA, 23 nt, Artificial Sequence
  Synthetic
ccacccaaggcacagcuuggagg

SEQ ID NO: 57303 - RNA, 24 nt, Artificial Sequence
  Synthetic
gccacccaaggcacagcuuggagg

SEQ ID NO: 57304 - RNA, 18 nt, Artificial Sequence
  Synthetic
gccaggacaaguuggagg

SEQ ID NO: 57305 - RNA, 19 nt, Artificial Sequence
  Synthetic
agccaggacaaguuggagg

SEQ ID NO: 57306 - RNA, 20 nt, Artificial Sequence
  Synthetic
uagccaggacaaguuggagg

SEQ ID NO: 57307 - RNA, 21 nt, Artificial Sequence
  Synthetic
auagccaggacaaguuggagg

SEQ ID NO: 57308 - RNA, 22 nt, Artificial Sequence
  Synthetic
gauagccaggacaaguuggagg

SEQ ID NO: 57309 - RNA, 23 nt, Artificial Sequence
  Synthetic
cgauagccaggacaaguuggagg

SEQ ID NO: 57310 - RNA, 24 nt, Artificial Sequence
  Synthetic
  misc_feature (1)..(1): n is a, c, g, or u
ncgauagccaggacaaguuggagg

SEQ ID NO: 57311 - RNA, 18 nt, Artificial Sequence
  Synthetic
accaacaagaagaugagg

SEQ ID NO: 57312 - RNA, 19 nt, Artificial Sequence
  Synthetic
aaccaacaagaagaugagg

SEQ ID NO: 57313 - RNA, 20 nt, Artificial Sequence
  Synthetic
gaaccaacaagaagaugagg

SEQ ID NO: 57314 - RNA, 21 nt, Artificial Sequence
  Synthetic
agaaccaacaagaagaugagg

SEQ ID NO: 57315 - RNA, 22 nt, Artificial Sequence
  Synthetic
aagaaccaacaagaagaugagg

SEQ ID NO: 57316 - RNA, 23 nt, Artificial Sequence
  Synthetic
gaagaaccaacaagaagaugagg

SEQ ID NO: 57317 - RNA, 24 nt, Artificial Sequence
  Synthetic
agaagaaccaacaagaagaugagg

SEQ ID NO: 57318 - RNA, 18 nt, Artificial Sequence
  Synthetic
  misc_feature (11)..(11): n is a, c, g, or u
  misc_feature (15)..(15): n is a, c, g, or u
aaagcaucccnguanagg

SEQ ID NO: 57319 - RNA, 19 nt, Artificial Sequence
  Synthetic
  misc_feature (12)..(12): n is a, c, g, or u
  misc_feature (16)..(16): n is a, c, g, or u
uaaagcaucccnguanagg

SEQ ID NO: 57320 - RNA, 20 nt, Artificial Sequence
  Synthetic
  misc_feature (13)..(13): n is a, c, g, or u
  misc_feature (17)..(17): n is a, c, g, or u
cuaaagcaucccnguanagg

SEQ ID NO: 57321 - RNA, 21 nt, Artificial Sequence
  Synthetic
  misc_feature (14)..(14): n is a, c, g, or u
  misc_feature (18)..(18): n is a, c, g, or u
ucuaaagcaucccnguanagg

SEQ ID NO: 57322 - RNA, 22 nt, Artificial Sequence
  Synthetic
  misc_feature (1)..(1): n is a, c, g, or u
  misc_feature (15)..(15): n is a, c, g, or u
  misc_feature (19)..(19): n is a, c, g, or u
nucuaaagcaucccnguanagg

SEQ ID NO: 57323 - RNA, 23 nt, Artificial Sequence
  Synthetic
  misc_feature (2)..(2): n is a, c, g, or u
  misc_feature (16)..(16): n is a, c, g, or u
  misc_feature (20)..(20): n is a, c, g, or u
anucuaaagcaucccnguanagg

SEQ ID NO: 57324 - RNA, 24 nt, Artificial Sequence
  Synthetic
  misc_feature (3)..(3): n is a, c, g, or u
  misc_feature (17)..(17): n is a, c, g, or u
  misc_feature (21)..(21): n is a, c, g, or u
ganucuaaagcaucccnguanagg

SEQ ID NO: 57325 - RNA, 18 nt, Artificial Sequence
  Synthetic
gaacaaaagaugauuagg

SEQ ID NO: 57326 - RNA, 19 nt, Artificial Sequence
  Synthetic
ugaacaaaagaugauuagg

SEQ ID NO: 57327 - RNA, 20 nt, Artificial Sequence
  Synthetic
augaacaaaagaugauuagg

SEQ ID NO: 57328 - RNA, 21 nt, Artificial Sequence
  Synthetic
caugaacaaaagaugauuagg

SEQ ID NO: 57329 - RNA, 22 nt, Artificial Sequence
  Synthetic
acaugaacaaaagaugauuagg

SEQ ID NO: 57330 - RNA, 23 nt, Artificial Sequence
  Synthetic
gacaugaacaaaagaugauuagg

SEQ ID NO: 57331 - RNA, 24 nt, Artificial Sequence
  Synthetic
ggacaugaacaaaagaugauuagg

SEQ ID NO: 57332 - RNA, 18 nt, Artificial Sequence
  Synthetic
cugagccaggagaaacgg

SEQ ID NO: 57333 - RNA, 19 nt, Artificial Sequence
  Synthetic
acugagccaggagaaacgg

SEQ ID NO: 57334 - RNA, 20 nt, Artificial Sequence
  Synthetic
aacugagccaggagaaacgg

SEQ ID NO: 57335 - RNA, 21 nt, Artificial Sequence
  Synthetic
aaacugagccaggagaaacgg

SEQ ID NO: 57336 - RNA, 22 nt, Artificial Sequence
  Synthetic
uaaacugagccaggagaaacgg

SEQ ID NO: 57337 - RNA, 23 nt, Artificial Sequence
  Synthetic
guaaacugagccaggagaaacgg

SEQ ID NO: 57338 - RNA, 24 nt, Artificial Sequence
  Synthetic
aguaaacugagccaggagaaacgg

SEQ ID NO: 57339 - RNA, 18 nt, Artificial Sequence
  Synthetic
gccguugccgagcaacgg

SEQ ID NO: 57340 - RNA, 19 nt, Artificial Sequence
  Synthetic
ggccguugccgagcaacgg

SEQ ID NO: 57341 - RNA, 20 nt, Artificial Sequence
  Synthetic
uggccguugccgagcaacgg

SEQ ID NO: 57342 - RNA, 21 nt, Artificial Sequence
  Synthetic
cuggccguugccgagcaacgg

SEQ ID NO: 57343 - RNA, 22 nt, Artificial Sequence
  Synthetic
ccuggccguugccgagcaacgg

SEQ ID NO: 57344 - RNA, 23 nt, Artificial Sequence
  Synthetic
gccuggccguugccgagcaacgg

SEQ ID NO: 57345 - RNA, 24 nt, Artificial Sequence
  Synthetic
ggccuggccguugccgagcaacgg

SEQ ID NO: 57346 - RNA, 18 nt, Artificial Sequence
  Synthetic
gaagcgaagugcacacgg

SEQ ID NO: 57347 - RNA, 19 nt, Artificial Sequence
  Synthetic
ugaagcgaagugcacacgg

SEQ ID NO: 57348 - RNA, 20 nt, Artificial Sequence
  Synthetic
gugaagcgaagugcacacgg

SEQ ID NO: 57349 - RNA, 21 nt, Artificial Sequence
  Synthetic
ggugaagcgaagugcacacgg

SEQ ID NO: 57350 - RNA, 22 nt, Artificial Sequence
  Synthetic
aggugaagcgaagugcacacgg

SEQ ID NO: 57351 - RNA, 23 nt, Artificial Sequence
  Synthetic
gaggugaagcgaagugcacacgg

SEQ ID NO: 57352 - RNA, 24 nt, Artificial Sequence
  Synthetic
agaggugaagcgaagugcacacgg

SEQ ID NO: 57353 - RNA, 18 nt, Artificial Sequence
  Synthetic
  misc_feature (13)..(13): n is a, c, g, or u
uaggucccgaacngacgg

SEQ ID NO: 57354 - RNA, 19 nt, Artificial Sequence
  Synthetic
  misc_feature (14)..(14): n is a, c, g, or u
guaggucccgaacngacgg

SEQ ID NO: 57355 - RNA, 20 nt, Artificial Sequence
  Synthetic
  misc_feature (15)..(15): n is a, c, g, or u
aguaggucccgaacngacgg

SEQ ID NO: 57356 - RNA, 18 nt, Artificial Sequence
  Synthetic
gaaaauugguaacagcgg

SEQ ID NO: 57357 - RNA, 19 nt, Artificial Sequence
  Synthetic
agaaaauugguaacagcgg

SEQ ID NO: 57358 - RNA, 20 nt, Artificial Sequence
  Synthetic
cagaaaauugguaacagcgg

SEQ ID NO: 57359 - RNA, 21 nt, Artificial Sequence
  Synthetic
acagaaaauugguaacagcgg

SEQ ID NO: 57360 - RNA, 22 nt, Artificial Sequence
  Synthetic
aacagaaaauugguaacagcgg

SEQ ID NO: 57361 - RNA, 23 nt, Artificial Sequence
  Synthetic
uaacagaaaauugguaacagcgg

SEQ ID NO: 57362 - RNA, 24 nt, Artificial Sequence
  Synthetic
auaacagaaaauugguaacagcgg

SEQ ID NO: 57363 - RNA, 18 nt, Artificial Sequence
  Synthetic
uuccgcaguauggaucgg

SEQ ID NO: 57364 - RNA, 19 nt, Artificial Sequence
  Synthetic
guuccgcaguauggaucgg

SEQ ID NO: 57365 - RNA, 20 nt, Artificial Sequence
  Synthetic
aguuccgcaguauggaucgg

SEQ ID NO: 57366 - RNA, 21 nt, Artificial Sequence
  Synthetic
gaguuccgcaguauggaucgg

SEQ ID NO: 57367 - RNA, 22 nt, Artificial Sequence
  Synthetic
ggaguuccgcaguauggaucgg

SEQ ID NO: 57368 - RNA, 23 nt, Artificial Sequence
  Synthetic
aggaguuccgcaguauggaucgg

SEQ ID NO: 57369 - RNA, 24 nt, Artificial Sequence
  Synthetic
aaggaguuccgcaguauggaucgg

SEQ ID NO: 57370 - RNA, 18 nt, Artificial Sequence
  Synthetic
gagagaggcaauagucgg

SEQ ID NO: 57371 - RNA, 19 nt, Artificial Sequence
  Synthetic
ugagagaggcaauagucgg

SEQ ID NO: 57372 - RNA, 20 nt, Artificial Sequence
  Synthetic
gugagagaggcaauagucgg

SEQ ID NO: 57373 - RNA, 21 nt, Artificial Sequence
  Synthetic
ugugagagaggcaauagucgg

SEQ ID NO: 57374 - RNA, 22 nt, Artificial Sequence
  Synthetic
augugagagaggcaauagucgg

SEQ ID NO: 57375 - RNA, 23 nt, Artificial Sequence
  Synthetic
gaugugagagaggcaauagucgg

SEQ ID NO: 57376 - RNA, 24 nt, Artificial Sequence
  Synthetic
ugaugugagagaggcaauagucgg

SEQ ID NO: 57377 - RNA, 18 nt, Artificial Sequence
  Synthetic
  misc_feature (13)..(13): n is a, c, g, or u
ggugcgacccgungucgg

SEQ ID NO: 57378 - RNA, 19 nt, Artificial Sequence
  Synthetic
  misc_feature (14)..(14): n is a, c, g, or u
aggugcgacccgungucgg

SEQ ID NO: 57379 - RNA, 20 nt, Artificial Sequence
  Synthetic
  misc_feature (15)..(15): n is a, c, g, or u
gaggugcgacccgungucgg

SEQ ID NO: 57380 - RNA, 21 nt, Artificial Sequence
  Synthetic
  misc_feature (16)..(16): n is a, c, g, or u
agaggugcgacccgungucgg

SEQ ID NO: 57381 - RNA, 22 nt, Artificial Sequence
  Synthetic
  misc_feature (17)..(17): n is a, c, g, or u
gagaggugcgacccgungucgg

SEQ ID NO: 57382 - RNA, 23 nt, Artificial Sequence
  Synthetic
  misc_feature (18)..(18): n is a, c, g, or u
agagaggugcgacccgungucgg

SEQ ID NO: 57383 - RNA, 24 nt, Artificial Sequence
  Synthetic
  misc_feature (19)..(19): n is a, c, g, or u
aagagaggugcgacccgungucgg

SEQ ID NO: 57384 - RNA, 18 nt, Artificial Sequence
  Synthetic
gcaguuuccguccgaggg

SEQ ID NO: 57385 - RNA, 19 nt, Artificial Sequence
  Synthetic
ugcaguuuccguccgaggg

SEQ ID NO: 57386 - RNA, 20 nt, Artificial Sequence
  Synthetic
gugcaguuuccguccgaggg

SEQ ID NO: 57387 - RNA, 21 nt, Artificial Sequence
  Synthetic
  misc_feature (1)..(1): n is a, c, g, or u
ngugcaguuuccguccgaggg

SEQ ID NO: 57388 - RNA, 22 nt, Artificial Sequence
  Synthetic
  misc_feature (2)..(2): n is a, c, g, or u
angugcaguuuccguccgaggg

SEQ ID NO: 57389 - RNA, 23 nt, Artificial Sequence
  Synthetic
  misc_feature (3)..(3): n is a, c, g, or u
cangugcaguuuccguccgaggg

SEQ ID NO: 57390 - RNA, 24 nt, Artificial Sequence
  Synthetic
  misc_feature (4)..(4): n is a, c, g, or u
acangugcaguuuccguccgaggg

SEQ ID NO: 57391 - RNA, 18 nt, Artificial Sequence
  Synthetic
  misc_feature (10)..(10): n is a, c, g, or u
  misc_feature (14)..(14): n is a, c, g, or u
aagcaucccnguanaggg

SEQ ID NO: 57392 - RNA, 19 nt, Artificial Sequence
  Synthetic
  misc_feature (11)..(11): n is a, c, g, or u
  misc_feature (15)..(15): n is a, c, g, or u
aaagcaucccnguanaggg

SEQ ID NO: 57393 - RNA, 20 nt, Artificial Sequence
  Synthetic
  misc_feature (12)..(12): n is a, c, g, or u
  misc_feature (16)..(16): n is a, c, g, or u
uaaagcaucccnguanaggg

SEQ ID NO: 57394 - RNA, 21 nt, Artificial Sequence
  Synthetic
  misc_feature (13)..(13): n is a, c, g, or u
  misc_feature (17)..(17): n is a, c, g, or u
cuaaagcaucccnguanaggg

SEQ ID NO: 57395 - RNA, 22 nt, Artificial Sequence
  Synthetic
  misc_feature (14)..(14): n is a, c, g, or u
  misc_feature (18)..(18): n is a, c, g, or u
ucuaaagcaucccnguanaggg

SEQ ID NO: 57396 - RNA, 23 nt, Artificial Sequence
  Synthetic
  misc_feature (1)..(1): n is a, c, g, or u
  misc_feature (15)..(15): n is a, c, g, or u
  misc_feature (19)..(19): n is a, c, g, or u
nucuaaagcaucccnguanaggg

SEQ ID NO: 57397 - RNA, 24 nt, Artificial Sequence
  Synthetic
  misc_feature (2)..(2): n is a, c, g, or u
  misc_feature (16)..(16): n is a, c, g, or u
  misc_feature (20)..(20): n is a, c, g, or u
anucuaaagcaucccnguanaggg

SEQ ID NO: 57398 - RNA, 18 nt, Artificial Sequence
  Synthetic
ugagccaggagaaacggg

SEQ ID NO: 57399 - RNA, 19 nt, Artificial Sequence
  Synthetic
cugagccaggagaaacggg

SEQ ID NO: 57400 - RNA, 20 nt, Artificial Sequence
  Synthetic
acugagccaggagaaacggg

SEQ ID NO: 57401 - RNA, 21 nt, Artificial Sequence
  Synthetic
aacugagccaggagaaacggg

SEQ ID NO: 57402 - RNA, 22 nt, Artificial Sequence
  Synthetic
aaacugagccaggagaaacggg

SEQ ID NO: 57403 - RNA, 23 nt, Artificial Sequence
  Synthetic
uaaacugagccaggagaaacggg

SEQ ID NO: 57404 - RNA, 24 nt, Artificial Sequence
  Synthetic
guaaacugagccaggagaaacggg

SEQ ID NO: 57405 - RNA, 18 nt, Artificial Sequence
  Synthetic
ccguugccgagcaacggg

SEQ ID NO: 57406 - RNA, 19 nt, Artificial Sequence
  Synthetic
gccguugccgagcaacggg

SEQ ID NO: 57407 - RNA, 20 nt, Artificial Sequence
  Synthetic
ggccguugccgagcaacggg

SEQ ID NO: 57408 - RNA, 21 nt, Artificial Sequence
  Synthetic
uggccguugccgagcaacggg

SEQ ID NO: 57409 - RNA, 22 nt, Artificial Sequence
  Synthetic
cuggccguugccgagcaacggg

SEQ ID NO: 57410 - RNA, 23 nt, Artificial Sequence
  Synthetic
ccuggccguugccgagcaacggg

SEQ ID NO: 57411 - RNA, 24 nt, Artificial Sequence
  Synthetic
gccuggccguugccgagcaacggg

SEQ ID NO: 57412 - RNA, 18 nt, Artificial Sequence
  Synthetic
  misc_feature (12)..(12): n is a, c, g, or u
aggucccgaacngacggg

SEQ ID NO: 57413 - RNA, 19 nt, Artificial Sequence
  Synthetic
  misc_feature (13)..(13): n is a, c, g, or u
uaggucccgaacngacggg

SEQ ID NO: 57414 - RNA, 20 nt, Artificial Sequence
  Synthetic
  misc_feature (14)..(14): n is a, c, g, or u
guaggucccgaacngacggg

SEQ ID NO: 57415 - RNA, 21 nt, Artificial Sequence
  Synthetic
  misc_feature (15)..(15): n is a, c, g, or u
aguaggucccgaacngacggg

SEQ ID NO: 57416 - RNA, 22 nt, Artificial Sequence
  Synthetic
  misc_feature (16)..(16): n is a, c, g, or u
gaguaggucccgaacngacggg

SEQ ID NO: 57417 - RNA, 23 nt, Artificial Sequence
  Synthetic
  misc_feature (17)..(17): n is a, c, g, or u
cgaguaggucccgaacngacggg

SEQ ID NO: 57418 - RNA, 24 nt, Artificial Sequence
  Synthetic
  misc_feature (18)..(18): n is a, c, g, or u
ucgaguaggucccgaacngacggg

SEQ ID NO: 57419 - RNA, 18 nt, Artificial Sequence
  Synthetic
cguugccgagcaacgggg

SEQ ID NO: 57420 - RNA, 19 nt, Artificial Sequence
  Synthetic
ccguugccgagcaacgggg

SEQ ID NO: 57421 - RNA, 20 nt, Artificial Sequence
  Synthetic
gccguugccgagcaacgggg

SEQ ID NO: 57422 - RNA, 21 nt, Artificial Sequence
  Synthetic
ggccguugccgagcaacgggg

SEQ ID NO: 57423 - RNA, 22 nt, Artificial Sequence
  Synthetic
uggccguugccgagcaacgggg

SEQ ID NO: 57424 - RNA, 23 nt, Artificial Sequence
  Synthetic
cuggccguugccgagcaacgggg

SEQ ID NO: 57425 - RNA, 24 nt, Artificial Sequence
  Synthetic
ccuggccguugccgagcaacgggg

SEQ ID NO: 57426 - RNA, 18 nt, Artificial Sequence
  Synthetic
caggccaccguguggggg

SEQ ID NO: 57427 - RNA, 19 nt, Artificial Sequence
  Synthetic
  misc_feature (1)..(1): n is a, c, g, or u
ncaggccaccguguggggg

SEQ ID NO: 57428 - RNA, 20 nt, Artificial Sequence
  Synthetic
  misc_feature (2)..(2): n is a, c, g, or u
ancaggccaccguguggggg

SEQ ID NO: 57429 - RNA, 21 nt, Artificial Sequence
  Synthetic
  misc_feature (3)..(3): n is a, c, g, or u
cancaggccaccguguggggg

SEQ ID NO: 57430 - RNA, 22 nt, Artificial Sequence
  Synthetic
  misc_feature (4)..(4): n is a, c, g, or u
ccancaggccaccguguggggg

SEQ ID NO: 57431 - RNA, 23 nt, Artificial Sequence
  Synthetic
  misc_feature (5)..(5): n is a, c, g, or u
cccancaggccaccguguggggg

SEQ ID NO: 57432 - RNA, 24 nt, Artificial Sequence
  Synthetic
  misc_feature (6)..(6): n is a, c, g, or u
ccccancaggccaccguguggggg

SEQ ID NO: 57433 - RNA, 18 nt, Artificial Sequence
  Synthetic
aaaagccagacagugggg

SEQ ID NO: 57434 - RNA, 19 nt, Artificial Sequence
  Synthetic
uaaaagccagacagugggg

SEQ ID NO: 57435 - RNA, 20 nt, Artificial Sequence
  Synthetic
cuaaaagccagacagugggg

SEQ ID NO: 57436 - RNA, 21 nt, Artificial Sequence
  Synthetic
acuaaaagccagacagugggg

SEQ ID NO: 57437 - RNA, 22 nt, Artificial Sequence
  Synthetic
aacuaaaagccagacagugggg

SEQ ID NO: 57438 - RNA, 23 nt, Artificial Sequence
  Synthetic
uaacuaaaagccagacagugggg

SEQ ID NO: 57439 - RNA, 24 nt, Artificial Sequence
  Synthetic
auaacuaaaagccagacagugggg

SEQ ID NO: 57440 - RNA, 18 nt, Artificial Sequence
  Synthetic
  misc_feature (9)..(9): n is a, c, g, or u
aaagcccangaugauggg

SEQ ID NO: 57441 - RNA, 19 nt, Artificial Sequence
  Synthetic
  misc_feature (10)..(10): n is a, c, g, or u
uaaagcccangaugauggg

SEQ ID NO: 57442 - RNA, 20 nt, Artificial Sequence
  Synthetic
  misc_feature (11)..(11): n is a, c, g, or u
cuaaagcccangaugauggg

SEQ ID NO: 57443 - RNA, 21 nt, Artificial Sequence
  Synthetic
  misc_feature (12)..(12): n is a, c, g, or u
ccuaaagcccangaugauggg

SEQ ID NO: 57444 - RNA, 22 nt, Artificial Sequence
  Synthetic
  misc_feature (13)..(13): n is a, c, g, or u
uccuaaagcccangaugauggg

SEQ ID NO: 57445 - RNA, 23 nt, Artificial Sequence
  Synthetic
  misc_feature (14)..(14): n is a, c, g, or u
uuccuaaagcccangaugauggg

SEQ ID NO: 57446 - RNA, 24 nt, Artificial Sequence
  Synthetic
  misc_feature (15)..(15): n is a, c, g, or u
uuuccuaaagcccangaugauggg

SEQ ID NO: 57447 - RNA, 18 nt, Artificial Sequence
  Synthetic
agagguggagagacuggg

SEQ ID NO: 57448 - RNA, 19 nt, Artificial Sequence
  Synthetic
uagagguggagagacuggg

SEQ ID NO: 57449 - RNA, 20 nt, Artificial Sequence
  Synthetic
uuagagguggagagacuggg

SEQ ID NO: 57450 - RNA, 21 nt, Artificial Sequence
  Synthetic
cuuagagguggagagacuggg

SEQ ID NO: 57451 - RNA, 22 nt, Artificial Sequence
  Synthetic
ucuuagagguggagagacuggg

SEQ ID NO: 57452 - RNA, 23 nt, Artificial Sequence
  Synthetic
cucuuagagguggagagacuggg

SEQ ID NO: 57453 - RNA, 24 nt, Artificial Sequence
  Synthetic
ucucuuagagguggagagacuggg

SEQ ID NO: 57454 - RNA, 18 nt, Artificial Sequence
  Synthetic
uaaaagccagacaguggg

SEQ ID NO: 57455 - RNA, 19 nt, Artificial Sequence
  Synthetic
cuaaaagccagacaguggg

SEQ ID NO: 57456 - RNA, 20 nt, Artificial Sequence
  Synthetic
acuaaaagccagacaguggg

SEQ ID NO: 57457 - RNA, 21 nt, Artificial Sequence
  Synthetic
aacuaaaagccagacaguggg

SEQ ID NO: 57458 - RNA, 22 nt, Artificial Sequence
  Synthetic
uaacuaaaagccagacaguggg

SEQ ID NO: 57459 - RNA, 23 nt, Artificial Sequence
  Synthetic
auaacuaaaagccagacaguggg

SEQ ID NO: 57460 - RNA, 24 nt, Artificial Sequence
  Synthetic
uauaacuaaaagccagacaguggg

SEQ ID NO: 57461 - RNA, 18 nt, Artificial Sequence
  Synthetic
  misc_feature (10)..(10): n is a, c, g, or u
gaaucccagnggauuggg

SEQ ID NO: 57462 - RNA, 19 nt, Artificial Sequence
  Synthetic
  misc_feature (11)..(11): n is a, c, g, or u
agaaucccagnggauuggg

SEQ ID NO: 57463 - RNA, 20 nt, Artificial Sequence
  Synthetic
  misc_feature (12)..(12): n is a, c, g, or u
aagaaucccagnggauuggg

SEQ ID NO: 57464 - RNA, 21 nt, Artificial Sequence
  Synthetic
  misc_feature (13)..(13): n is a, c, g, or u
aaagaaucccagnggauuggg

SEQ ID NO: 57465 - RNA, 22 nt, Artificial Sequence
  Synthetic
  misc_feature (14)..(14): n is a, c, g, or u
gaaagaaucccagnggauuggg

SEQ ID NO: 57466 - RNA, 23 nt, Artificial Sequence
  Synthetic
  misc_feature (15)..(15): n is a, c, g, or u
ggaaagaaucccagnggauuggg

SEQ ID NO: 57467 - RNA, 24 nt, Artificial Sequence
  Synthetic
  misc_feature (16)..(16): n is a, c, g, or u
uggaaagaaucccagnggauuggg

SEQ ID NO: 57468 - RNA, 18 nt, Artificial Sequence
  Synthetic
  misc_feature (16)..(16): n is a, c, g, or u
uggaaagaaucccagngg

SEQ ID NO: 57469 - RNA, 19 nt, Artificial Sequence
  Synthetic
  misc_feature (17)..(17): n is a, c, g, or u
cuggaaagaaucccagngg

SEQ ID NO: 57470 - RNA, 20 nt, Artificial Sequence
  Synthetic
  misc_feature (18)..(18): n is a, c, g, or u
ucuggaaagaaucccagngg

SEQ ID NO: 57471 - RNA, 21 nt, Artificial Sequence
  Synthetic
  misc_feature (19)..(19): n is a, c, g, or u
gucuggaaagaaucccagngg

SEQ ID NO: 57472 - RNA, 22 nt, Artificial Sequence
  Synthetic
  misc_feature (20)..(20): n is a, c, g, or u
ggucuggaaagaaucccagngg

SEQ ID NO: 57473 - RNA, 23 nt, Artificial Sequence
  Synthetic
  misc_feature (21)..(21): n is a, c, g, or u
uggucuggaaagaaucccagngg

SEQ ID NO: 57474 - RNA, 24 nt, Artificial Sequence
  Synthetic
  misc_feature (22)..(22): n is a, c, g, or u
auggucuggaaagaaucccagngg

SEQ ID NO: 57475 - RNA, 18 nt, Artificial Sequence
  Synthetic
ugcgcugauggccaaugg

SEQ ID NO: 57476 - RNA, 19 nt, Artificial Sequence
  Synthetic
augcgcugauggccaaugg

SEQ ID NO: 57477 - RNA, 20 nt, Artificial Sequence
  Synthetic
caugcgcugauggccaaugg

SEQ ID NO: 57478 - RNA, 21 nt, Artificial Sequence
  Synthetic
gcaugcgcugauggccaaugg

SEQ ID NO: 57479 - RNA, 22 nt, Artificial Sequence
  Synthetic
cgcaugcgcugauggccaaugg

SEQ ID NO: 57480 - RNA, 23 nt, Artificial Sequence
  Synthetic
acgcaugcgcugauggccaaugg

SEQ ID NO: 57481 - RNA, 24 nt, Artificial Sequence
  Synthetic
cacgcaugcgcugauggccaaugg

SEQ ID NO: 57482 - RNA, 18 nt, Artificial Sequence
  Synthetic
  misc_feature (4)..(4): n is a, c, g, or u
acanccgagcagccaugg

SEQ ID NO: 57483 - RNA, 19 nt, Artificial Sequence
  Synthetic
  misc_feature (5)..(5): n is a, c, g, or u
cacanccgagcagccaugg

SEQ ID NO: 57484 - RNA, 20 nt, Artificial Sequence
  Synthetic
  misc_feature (6)..(6): n is a, c, g, or u
gcacanccgagcagccaugg

SEQ ID NO: 57485 - RNA, 21 nt, Artificial Sequence
  Synthetic
  misc_feature (7)..(7): n is a, c, g, or u
agcacanccgagcagccaugg

SEQ ID NO: 57486 - RNA, 22 nt, Artificial Sequence
  Synthetic
  misc_feature (8)..(8): n is a, c, g, or u
cagcacanccgagcagccaugg

SEQ ID NO: 57487 - RNA, 23 nt, Artificial Sequence
  Synthetic
  misc_feature (9)..(9): n is a, c, g, or u
gcagcacanccgagcagccaugg

SEQ ID NO: 57488 - RNA, 24 nt, Artificial Sequence
  Synthetic
  misc_feature (10)..(10): n is a, c, g, or u
ggcagcacanccgagcagccaugg

SEQ ID NO: 57489 - RNA, 18 nt, Artificial Sequence
  Synthetic
  misc_feature (10)..(10): n is a, c, g, or u
uaaagcccangaugaugg

SEQ ID NO: 57490 - RNA, 19 nt, Artificial Sequence
  Synthetic
  misc_feature (11)..(11): n is a, c, g, or u
cuaaagcccangaugaugg

SEQ ID NO: 57491 - RNA, 20 nt, Artificial Sequence
  Synthetic
  misc_feature (12)..(12): n is a, c, g, or u
ccuaaagcccangaugaugg

SEQ ID NO: 57492 - RNA, 21 nt, Artificial Sequence
  Synthetic
  misc_feature (13)..(13): n is a, c, g, or u
uccuaaagcccangaugaugg

SEQ ID NO: 57493 - RNA, 22 nt, Artificial Sequence
  Synthetic
  misc_feature (14)..(14): n is a, c, g, or u
uuccuaaagcccangaugaugg

SEQ ID NO: 57494 - RNA, 23 nt, Artificial Sequence
  Synthetic
  misc_feature (15)..(15): n is a, c, g, or u
uuuccuaaagcccangaugaugg

SEQ ID NO: 57495 - RNA, 24 nt, Artificial Sequence
  Synthetic
  misc_feature (16)..(16): n is a, c, g, or u
uuuuccuaaagcccangaugaugg

SEQ ID NO: 57496 - RNA, 18 nt, Artificial Sequence
  Synthetic
  misc_feature (3)..(3): n is a, c, g, or u
agnggauccagcugaugg

SEQ ID NO: 57497 - RNA, 19 nt, Artificial Sequence
  Synthetic
  misc_feature (1)..(1): n is a, c, g, or u
  misc_feature (4)..(4): n is a, c, g, or u
nagnggauccagcugaugg

SEQ ID NO: 57498 - RNA, 20 nt, Artificial Sequence
  Synthetic
  misc_feature (2)..(2): n is a, c, g, or u
  misc_feature (5)..(5): n is a, c, g, or u
anagnggauccagcugaugg

SEQ ID NO: 57499 - RNA, 21 nt, Artificial Sequence
  Synthetic
  misc_feature (3)..(3): n is a, c, g, or u
  misc_feature (6)..(6): n is a, c, g, or u
aanagnggauccagcugaugg

SEQ ID NO: 57500 - RNA, 22 nt, Artificial Sequence
  Synthetic
  misc_feature (4)..(4): n is a, c, g, or u
  misc_feature (7)..(7): n is a, c, g, or u
gaanagnggauccagcugaugg

SEQ ID NO: 57501 - RNA, 23 nt, Artificial Sequence
  Synthetic
  misc_feature (5)..(5): n is a, c, g, or u
  misc_feature (8)..(8): n is a, c, g, or u
ugaanagnggauccagcugaugg

SEQ ID NO: 57502 - RNA, 24 nt, Artificial Sequence
  Synthetic
  misc_feature (6)..(6): n is a, c, g, or u
  misc_feature (9)..(9): n is a, c, g, or u
cugaanagnggauccagcugaugg

SEQ ID NO: 57503 - RNA, 18 nt, Artificial Sequence
  Synthetic
aggaguuccgcaguaugg

SEQ ID NO: 57504 - RNA, 19 nt, Artificial Sequence
  Synthetic
aaggaguuccgcaguaugg

SEQ ID NO: 57505 - RNA, 20 nt, Artificial Sequence
  Synthetic
caaggaguuccgcaguaugg

SEQ ID NO: 57506 - RNA, 18 nt, Artificial Sequence
  Synthetic
  misc_feature (6)..(6): n is a, c, g, or u
  misc_feature (12)..(12): n is a, c, g, or u
ggaucnaacagngccugg

SEQ ID NO: 57507 - RNA, 19 nt, Artificial Sequence
  Synthetic
  misc_feature (7)..(7): n is a, c, g, or u
  misc_feature (13)..(13): n is a, c, g, or u
cggaucnaacagngccugg

SEQ ID NO: 57508 - RNA, 20 nt, Artificial Sequence
  Synthetic
  misc_feature (8)..(8): n is a, c, g, or u
  misc_feature (14)..(14): n is a, c, g, or u
ucggaucnaacagngccugg

SEQ ID NO: 57509 - RNA, 21 nt, Artificial Sequence
  Synthetic
  misc_feature (9)..(9): n is a, c, g, or u
  misc_feature (15)..(15): n is a, c, g, or u
cucggaucnaacagngccugg

SEQ ID NO: 57510 - RNA, 22 nt, Artificial Sequence
  Synthetic
  misc_feature (10)..(10): n is a, c, g, or u
  misc_feature (16)..(16): n is a, c, g, or u
ccucggaucnaacagngccugg

SEQ ID NO: 57511 - RNA, 23 nt, Artificial Sequence
  Synthetic
  misc_feature (11)..(11): n is a, c, g, or u
  misc_feature (17)..(17): n is a, c, g, or u
cccucggaucnaacagngccugg

SEQ ID NO: 57512 - RNA, 24 nt, Artificial Sequence
  Synthetic
  misc_feature (12)..(12): n is a, c, g, or u
  misc_feature (18)..(18): n is a, c, g, or u
acccucggaucnaacagngccugg

SEQ ID NO: 57513 - RNA, 18 nt, Artificial Sequence
  Synthetic
  misc_feature (9)..(9): n is a, c, g, or u
cgacccgungucggcugg

SEQ ID NO: 57514 - RNA, 19 nt, Artificial Sequence
  Synthetic
  misc_feature (10)..(10): n is a, c, g, or u
gcgacccgungucggcugg

SEQ ID NO: 57515 - RNA, 20 nt, Artificial Sequence
  Synthetic
  misc_feature (11)..(11): n is a, c, g, or u
ugcgacccgungucggcugg

SEQ ID NO: 57516 - RNA, 21 nt, Artificial Sequence
  Synthetic
  misc_feature (12)..(12): n is a, c, g, or u
gugcgacccgungucggcugg

SEQ ID NO: 57517 - RNA, 22 nt, Artificial Sequence
  Synthetic
  misc_feature (13)..(13): n is a, c, g, or u
ggugcgacccgungucggcugg

SEQ ID NO: 57518 - RNA, 23 nt, Artificial Sequence
  Synthetic
  misc_feature (14)..(14): n is a, c, g, or u
aggugcgacccgungucggcugg

SEQ ID NO: 57519 - RNA, 24 nt, Artificial Sequence
  Synthetic
  misc_feature (15)..(15): n is a, c, g, or u
gaggugcgacccgungucggcugg

SEQ ID NO: 57520 - RNA, 18 nt, Artificial Sequence
  Synthetic
auccagcugauggucugg

SEQ ID NO: 57521 - RNA, 19 nt, Artificial Sequence
  Synthetic
gauccagcugauggucugg

SEQ ID NO: 57522 - RNA, 20 nt, Artificial Sequence
  Synthetic
ggauccagcugauggucugg

SEQ ID NO: 57523 - RNA, 21 nt, Artificial Sequence
  Synthetic
  misc_feature (1)..(1): n is a, c, g, or u
nggauccagcugauggucugg

SEQ ID NO: 57524 - RNA, 22 nt, Artificial Sequence
  Synthetic
  misc_feature (2)..(2): n is a, c, g, or u
gnggauccagcugauggucugg

SEQ ID NO: 57525 - RNA, 23 nt, Artificial Sequence
  Synthetic
  misc_feature (3)..(3): n is a, c, g, or u
agnggauccagcugauggucugg

SEQ ID NO: 57526 - RNA, 24 nt, Artificial Sequence
  Synthetic
  misc_feature (1)..(1): n is a, c, g, or u
  misc_feature (4)..(4): n is a, c, g, or u
nagnggauccagcugauggucugg

SEQ ID NO: 57527 - RNA, 18 nt, Artificial Sequence
  Synthetic
cuaaaagccagacagugg

SEQ ID NO: 57528 - RNA, 19 nt, Artificial Sequence
  Synthetic
acuaaaagccagacagugg

SEQ ID NO: 57529 - RNA, 20 nt, Artificial Sequence
  Synthetic
aacuaaaagccagacagugg

SEQ ID NO: 57530 - RNA, 21 nt, Artificial Sequence
  Synthetic
uaacuaaaagccagacagugg

SEQ ID NO: 57531 - RNA, 22 nt, Artificial Sequence
  Synthetic
auaacuaaaagccagacagugg

SEQ ID NO: 57532 - RNA, 23 nt, Artificial Sequence
  Synthetic
uauaacuaaaagccagacagugg

SEQ ID NO: 57533 - RNA, 24 nt, Artificial Sequence
  Synthetic
auauaacuaaaagccagacagugg

SEQ ID NO: 57534 - RNA, 18 nt, Artificial Sequence
  Synthetic
  misc_feature (1)..(1): n is a, c, g, or u
ngugucucuuagaggugg

SEQ ID NO: 57535 - RNA, 19 nt, Artificial Sequence
  Synthetic
  misc_feature (2)..(2): n is a, c, g, or u
gngugucucuuagaggugg

SEQ ID NO: 57536 - RNA, 20 nt, Artificial Sequence
  Synthetic
  misc_feature (3)..(3): n is a, c, g, or u
ugngugucucuuagaggugg

SEQ ID NO: 57537 - RNA, 21 nt, Artificial Sequence
  Synthetic
  misc_feature (4)..(4): n is a, c, g, or u
augngugucucuuagaggugg

SEQ ID NO: 57538 - RNA, 22 nt, Artificial Sequence
  Synthetic
  misc_feature (5)..(5): n is a, c, g, or u
gaugngugucucuuagaggugg

SEQ ID NO: 57539 - RNA, 23 nt, Artificial Sequence
  Synthetic
  misc_feature (6)..(6): n is a, c, g, or u
ggaugngugucucuuagaggugg

SEQ ID NO: 57540 - RNA, 24 nt, Artificial Sequence
  Synthetic
  misc_feature (7)..(7): n is a, c, g, or u
uggaugngugucucuuagaggugg

SEQ ID NO: 57541 - RNA, 18 nt, Artificial Sequence
  Synthetic
  misc_feature (5)..(5): n is a, c, g, or u
  misc_feature (7)..(7): n is a, c, g, or u
  misc_feature (13)..(13): n is a, c, g, or u
  misc_feature (15)..(15): n is a, c, g, or u
aggananaaucungnugg

SEQ ID NO: 57542 - RNA, 19 nt, Artificial Sequence
  Synthetic
  misc_feature (6)..(6): n is a, c, g, or u
  misc_feature (8)..(8): n is a, c, g, or u
  misc_feature (14)..(14): n is a, c, g, or u
  misc_feature (16)..(16): n is a, c, g, or u
uaggananaaucungnugg

SEQ ID NO: 57543 - RNA, 20 nt, Artificial Sequence
  Synthetic
  misc_feature (7)..(7): n is a, c, g, or u
  misc_feature (9)..(9): n is a, c, g, or u
  misc_feature (15)..(15): n is a, c, g, or u
  misc_feature (17)..(17): n is a, c, g, or u
uuaggananaaucungnugg

SEQ ID NO: 57544 - RNA, 21 nt, Artificial Sequence
  Synthetic
  misc_feature (1)..(1): n is a, c, g, or u
  misc_feature (8)..(8): n is a, c, g, or u
  misc_feature (10)..(10): n is a, c, g, or u
  misc_feature (16)..(16): n is a, c, g, or u
  misc_feature (18)..(18): n is a, c, g, or u
nuuaggananaaucungnugg

SEQ ID NO: 57545 - RNA, 22 nt, Artificial Sequence
  Synthetic
  misc_feature (1)..(2): n is a, c, g, or u
  misc_feature (9)..(9): n is a, c, g, or u
  misc_feature (11)..(11): n is a, c, g, or u
  misc_feature (17)..(17): n is a, c, g, or u
  misc_feature (19)..(19): n is a, c, g, or u
nnuuaggananaaucungnugg

SEQ ID NO: 57546 - RNA, 23 nt, Artificial Sequence
  Synthetic
  misc_feature (2)..(3): n is a, c, g, or u
  misc_feature (10)..(10): n is a, c, g, or u
  misc_feature (12)..(12): n is a, c, g, or u
  misc_feature (18)..(18): n is a, c, g, or u
  misc_feature (20)..(20): n is a, c, g, or u
annuuaggananaaucungnugg

SEQ ID NO: 57547 - RNA, 24 nt, Artificial Sequence
  Synthetic
  misc_feature (3)..(4): n is a, c, g, or u
  misc_feature (11)..(11): n is a, c, g, or u
  misc_feature (13)..(13): n is a, c, g, or u
  misc_feature (19)..(19): n is a, c, g, or u
  misc_feature (21)..(21): n is a, c, g, or u
aannuuaggananaaucungnugg

SEQ ID NO: 57548 - RNA, 18 nt, Artificial Sequence
  Synthetic
ucccggaccgccgauugg

SEQ ID NO: 57549 - RNA, 19 nt, Artificial Sequence
  Synthetic
cucccggaccgccgauugg

SEQ ID NO: 57550 - RNA, 20 nt, Artificial Sequence
  Synthetic
  misc_feature (1)..(1): n is a, c, g, or u
ncucccggaccgccgauugg

SEQ ID NO: 57551 - RNA, 21 nt, Artificial Sequence
  Synthetic
  misc_feature (2)..(2): n is a, c, g, or u
uncucccggaccgccgauugg

SEQ ID NO: 57552 - RNA, 22 nt, Artificial Sequence
  Synthetic
  misc_feature (3)..(3): n is a, c, g, or u
uuncucccggaccgccgauugg

SEQ ID NO: 57553 - RNA, 23 nt, Artificial Sequence
  Synthetic
  misc_feature (1)..(1): n is a, c, g, or u
  misc_feature (4)..(4): n is a, c, g, or u
nuuncucccggaccgccgauugg

SEQ ID NO: 57554 - RNA, 24 nt, Artificial Sequence
  Synthetic
  misc_feature (2)..(2): n is a, c, g, or u
  misc_feature (5)..(5): n is a, c, g, or u
gnuuncucccggaccgccgauugg

SEQ ID NO: 57555 - RNA, 18 nt, Artificial Sequence
  Synthetic
gcgucagcaaacacuugg

SEQ ID NO: 57556 - RNA, 19 nt, Artificial Sequence
  Synthetic
ugcgucagcaaacacuugg

SEQ ID NO: 57557 - RNA, 20 nt, Artificial Sequence
  Synthetic
uugcgucagcaaacacuugg

SEQ ID NO: 57558 - RNA, 21 nt, Artificial Sequence
  Synthetic
guugcgucagcaaacacuugg

SEQ ID NO: 57559 - RNA, 22 nt, Artificial Sequence
  Synthetic
gguugcgucagcaaacacuugg

SEQ ID NO: 57560 - RNA, 23 nt, Artificial Sequence
  Synthetic
ggguugcgucagcaaacacuugg

SEQ ID NO: 57561 - RNA, 24 nt, Artificial Sequence
  Synthetic
gggguugcgucagcaaacacuugg

SEQ ID NO: 57562 - RNA, 18 nt, Artificial Sequence
  Synthetic
aaaggccuuguaaguugg

SEQ ID NO: 57563 - RNA, 19 nt, Artificial Sequence
  Synthetic
gaaaggccuuguaaguugg

SEQ ID NO: 57564 - RNA, 20 nt, Artificial Sequence
  Synthetic
agaaaggccuuguaaguugg

SEQ ID NO: 57565 - RNA, 21 nt, Artificial Sequence
  Synthetic
  misc_feature (1)..(1): n is a, c, g, or u
nagaaaggccuuguaaguugg

SEQ ID NO: 57566 - RNA, 22 nt, Artificial Sequence
  Synthetic
  misc_feature (2)..(2): n is a, c, g, or u
anagaaaggccuuguaaguugg

SEQ ID NO: 57567 - RNA, 23 nt, Artificial Sequence
  Synthetic
  misc_feature (3)..(3): n is a, c, g, or u
canagaaaggccuuguaaguugg

SEQ ID NO: 57568 - RNA, 24 nt, Artificial Sequence
  Synthetic
  misc_feature (4)..(4): n is a, c, g, or u
acanagaaaggccuuguaaguugg

SEQ ID NO: 57569 - RNA, 18 nt, Artificial Sequence
  Synthetic
uuccguccgaggguuugg

SEQ ID NO: 57570 - RNA, 19 nt, Artificial Sequence
  Synthetic
uuuccguccgaggguuugg

SEQ ID NO: 57571 - RNA, 20 nt, Artificial Sequence
  Synthetic
guuuccguccgaggguuugg

SEQ ID NO: 57572 - RNA, 21 nt, Artificial Sequence
  Synthetic
aguuuccguccgaggguuugg

SEQ ID NO: 57573 - RNA, 22 nt, Artificial Sequence
  Synthetic
caguuuccguccgaggguuugg

SEQ ID NO: 57574 - RNA, 23 nt, Artificial Sequence
  Synthetic
gcaguuuccguccgaggguuugg

SEQ ID NO: 57575 - RNA, 24 nt, Artificial Sequence
  Synthetic
ugcaguuuccguccgaggguuugg

SEQ ID NO: 57576 - RNA, 18 nt, Artificial Sequence
  Synthetic
ggggacugcgaauuuugg

SEQ ID NO: 57577 - RNA, 19 nt, Artificial Sequence
  Synthetic
uggggacugcgaauuuugg

SEQ ID NO: 57578 - RNA, 20 nt, Artificial Sequence
  Synthetic
uuggggacugcgaauuuugg

SEQ ID NO: 57579 - RNA, 21 nt, Artificial Sequence
  Synthetic
guuggggacugcgaauuuugg

SEQ ID NO: 57580 - RNA, 22 nt, Artificial Sequence
  Synthetic
gguuggggacugcgaauuuugg

SEQ ID NO: 57581 - RNA, 23 nt, Artificial Sequence
  Synthetic
agguuggggacugcgaauuuugg

SEQ ID NO: 57582 - RNA, 24 nt, Artificial Sequence
  Synthetic
gagguuggggacugcgaauuuugg

SEQ ID NO: 57583 - RNA, 18 nt, Artificial Sequence
  Synthetic
  misc_feature (14)..(14): n is a, c, g, or u
  misc_feature (17)..(17): n is a, c, g, or u
guuuggaacagcancang

SEQ ID NO: 57584 - RNA, 19 nt, Artificial Sequence
  Synthetic
  misc_feature (15)..(15): n is a, c, g, or u
  misc_feature (18)..(18): n is a, c, g, or u
gguuuggaacagcancang

SEQ ID NO: 57585 - RNA, 20 nt, Artificial Sequence
  Synthetic
  misc_feature (16)..(16): n is a, c, g, or u
  misc_feature (19)..(19): n is a, c, g, or u
ggguuuggaacagcancang

SEQ ID NO: 57586 - RNA, 21 nt, Artificial Sequence
  Synthetic
  misc_feature (17)..(17): n is a, c, g, or u
  misc_feature (20)..(20): n is a, c, g, or u
aggguuuggaacagcancang

SEQ ID NO: 57587 - RNA, 22 nt, Artificial Sequence
  Synthetic
  misc_feature (18)..(18): n is a, c, g, or u
  misc_feature (21)..(21): n is a, c, g, or u
gaggguuuggaacagcancang

SEQ ID NO: 57588 - RNA, 23 nt, Artificial Sequence
  Synthetic
  misc_feature (19)..(19): n is a, c, g, or u
  misc_feature (22)..(22): n is a, c, g, or u
cgaggguuuggaacagcancang

SEQ ID NO: 57589 - RNA, 24 nt, Artificial Sequence
  Synthetic
  misc_feature (20)..(20): n is a, c, g, or u
  misc_feature (23)..(23): n is a, c, g, or u
ccgaggguuuggaacagcancang

SEQ ID NO: 57590 - RNA, 18 nt, Artificial Sequence
  Synthetic
  misc_feature (4)..(4): n is a, c, g, or u
  misc_feature (8)..(8): n is a, c, g, or u
  misc_feature (17)..(17): n is a, c, g, or u
aagnaggnacaguagang

SEQ ID NO: 57591 - RNA, 19 nt, Artificial Sequence
  Synthetic
  misc_feature (5)..(5): n is a, c, g, or u
  misc_feature (9)..(9): n is a, c, g, or u
  misc_feature (18)..(18): n is a, c, g, or u
aaagnaggnacaguagang

SEQ ID NO: 57592 - RNA, 20 nt, Artificial Sequence
  Synthetic
  misc_feature (1)..(1): n is a, c, g, or u
  misc_feature (6)..(6): n is a, c, g, or u
  misc_feature (10)..(10): n is a, c, g, or u
  misc_feature (19)..(19): n is a, c, g, or u
naaagnaggnacaguagang

SEQ ID NO: 57593 - RNA, 21 nt, Artificial Sequence
  Synthetic
  misc_feature (2)..(2): n is a, c, g, or u
  misc_feature (7)..(7): n is a, c, g, or u
  misc_feature (11)..(11): n is a, c, g, or u
  misc_feature (20)..(20): n is a, c, g, or u
unaaagnaggnacaguagang

SEQ ID NO: 57594 - RNA, 22 nt, Artificial Sequence
  Synthetic
  misc_feature (3)..(3): n is a, c, g, or u
  misc_feature (8)..(8): n is a, c, g, or u
  misc_feature (12)..(12): n is a, c, g, or u
  misc_feature (21)..(21): n is a, c, g, or u
uunaaagnaggnacaguagang

SEQ ID NO: 57595 - RNA, 23 nt, Artificial Sequence
  Synthetic
  misc_feature (4)..(4): n is a, c, g, or u
  misc_feature (9)..(9): n is a, c, g, or u
  misc_feature (13)..(13): n is a, c, g, or u
  misc_feature (22)..(22): n is a, c, g, or u
auunaaagnaggnacaguagang

SEQ ID NO: 57596 - RNA, 24 nt, Artificial Sequence
  Synthetic
  misc_feature (5)..(5): n is a, c, g, or u
  misc_feature (10)..(10): n is a, c, g, or u
  misc_feature (14)..(14): n is a, c, g, or u
  misc_feature (23)..(23): n is a, c, g, or u
gauunaaagnaggnacaguagang

SEQ ID NO: 57597 - RNA, 18 nt, Artificial Sequence
  Synthetic
  misc_feature (17)..(17): n is a, c, g, or u
uccggaaguguggauang

SEQ ID NO: 57598 - RNA, 19 nt, Artificial Sequence
  Synthetic
  misc_feature (18)..(18): n is a, c, g, or u
uuccggaaguguggauang

SEQ ID NO: 57599 - RNA, 20 nt, Artificial Sequence
  Synthetic
  misc_feature (19)..(19): n is a, c, g, or u
uuuccggaaguguggauang

SEQ ID NO: 57600 - RNA, 21 nt, Artificial Sequence
  Synthetic
  misc_feature (20)..(20): n is a, c, g, or u
guuuccggaaguguggauang

SEQ ID NO: 57601 - RNA, 22 nt, Artificial Sequence
  Synthetic
  misc_feature (21)..(21): n is a, c, g, or u
aguuuccggaaguguggauang

SEQ ID NO: 57602 - RNA, 23 nt, Artificial Sequence
  Synthetic
  misc_feature (22)..(22): n is a, c, g, or u
uaguuuccggaaguguggauang

SEQ ID NO: 57603 - RNA, 24 nt, Artificial Sequence
  Synthetic
  misc_feature (23)..(23): n is a, c, g, or u
guaguuuccggaaguguggauang

SEQ ID NO: 57604 - RNA, 18 nt, Artificial Sequence
  Synthetic
  misc_feature (17)..(17): n is a, c, g, or u
cgaguaggucccgaacng

SEQ ID NO: 57605 - RNA, 19 nt, Artificial Sequence
  Synthetic
  misc_feature (18)..(18): n is a, c, g, or u
ucgaguaggucccgaacng

SEQ ID NO: 57606 - RNA, 20 nt, Artificial Sequence
  Synthetic
  misc_feature (19)..(19): n is a, c, g, or u
gucgaguaggucccgaacng

SEQ ID NO: 57607 - RNA, 21 nt, Artificial Sequence
  Synthetic
  misc_feature (20)..(20): n is a, c, g, or u
ugucgaguaggucccgaacng

SEQ ID NO: 57608 - RNA, 22 nt, Artificial Sequence
  Synthetic
  misc_feature (21)..(21): n is a, c, g, or u
gugucgaguaggucccgaacng

SEQ ID NO: 57609 - RNA, 23 nt, Artificial Sequence
  Synthetic
  misc_feature (22)..(22): n is a, c, g, or u
ggugucgaguaggucccgaacng

SEQ ID NO: 57610 - RNA, 24 nt, Artificial Sequence
  Synthetic
  misc_feature (23)..(23): n is a, c, g, or u
cggugucgaguaggucccgaacng

SEQ ID NO: 57611 - RNA, 18 nt, Artificial Sequence
  Synthetic
  misc_feature (3)..(3): n is a, c, g, or u
  misc_feature (17)..(17): n is a, c, g, or u
ganucuaaagcaucccng

SEQ ID NO: 57612 - RNA, 19 nt, Artificial Sequence
  Synthetic
  misc_feature (4)..(4): n is a, c, g, or u
  misc_feature (18)..(18): n is a, c, g, or u
uganucuaaagcaucccng

SEQ ID NO: 57613 - RNA, 20 nt, Artificial Sequence
  Synthetic
  misc_feature (5)..(5): n is a, c, g, or u
  misc_feature (19)..(19): n is a, c, g, or u
guganucuaaagcaucccng

SEQ ID NO: 57614 - RNA, 21 nt, Artificial Sequence
  Synthetic
  misc_feature (6)..(6): n is a, c, g, or u
  misc_feature (20)..(20): n is a, c, g, or u
gguganucuaaagcaucccng

SEQ ID NO: 57615 - RNA, 22 nt, Artificial Sequence
  Synthetic
  misc_feature (1)..(1): n is a, c, g, or u
  misc_feature (7)..(7): n is a, c, g, or u
  misc_feature (21)..(21): n is a, c, g, or u
ngguganucuaaagcaucccng

SEQ ID NO: 57616 - RNA, 23 nt, Artificial Sequence
  Synthetic
  misc_feature (2)..(2): n is a, c, g, or u
  misc_feature (8)..(8): n is a, c, g, or u
  misc_feature (22)..(22): n is a, c, g, or u
cngguganucuaaagcaucccng

SEQ ID NO: 57617 - RNA, 24 nt, Artificial Sequence
  Synthetic
  misc_feature (3)..(3): n is a, c, g, or u
  misc_feature (9)..(9): n is a, c, g, or u
  misc_feature (23)..(23): n is a, c, g, or u
ucngguganucuaaagcaucccng

SEQ ID NO: 57618 - RNA, 18 nt, Artificial Sequence
  Synthetic
  misc_feature (17)..(17): n is a, c, g, or u
uugguggucuauaagcng

SEQ ID NO: 57619 - RNA, 19 nt, Artificial Sequence
  Synthetic
  misc_feature (18)..(18): n is a, c, g, or u
uuugguggucuauaagcng

SEQ ID NO: 57620 - RNA, 20 nt, Artificial Sequence
  Synthetic
  misc_feature (19)..(19): n is a, c, g, or u
auuugguggucuauaagcng

SEQ ID NO: 57621 - RNA, 21 nt, Artificial Sequence
  Synthetic
  misc_feature (20)..(20): n is a, c, g, or u
cauuugguggucuauaagcng

SEQ ID NO: 57622 - RNA, 22 nt, Artificial Sequence
  Synthetic
  misc_feature (21)..(21): n is a, c, g, or u
gcauuugguggucuauaagcng

SEQ ID NO: 57623 - RNA, 23 nt, Artificial Sequence
  Synthetic
  misc_feature (22)..(22): n is a, c, g, or u
ggcauuugguggucuauaagcng

SEQ ID NO: 57624 - RNA, 24 nt, Artificial Sequence
  Synthetic
  misc_feature (23)..(23): n is a, c, g, or u
gggcauuugguggucuauaagcng

SEQ ID NO: 57625 - RNA, 18 nt, Artificial Sequence
  Synthetic
  misc_feature (5)..(5): n is a, c, g, or u
  misc_feature (8)..(8): n is a, c, g, or u
  misc_feature (11)..(11): n is a, c, g, or u
  misc_feature (14)..(14): n is a, c, g, or u
  misc_feature (17)..(17): n is a, c, g, or u
auugngunaanggngcng

SEQ ID NO: 57626 - RNA, 19 nt, Artificial Sequence
  Synthetic
  misc_feature (6)..(6): n is a, c, g, or u
  misc_feature (9)..(9): n is a, c, g, or u
  misc_feature (12)..(12): n is a, c, g, or u
  misc_feature (15)..(15): n is a, c, g, or u
  misc_feature (18)..(18): n is a, c, g, or u
cauugngunaanggngcng

SEQ ID NO: 57627 - RNA, 20 nt, Artificial Sequence
  Synthetic
  misc_feature (7)..(7): n is a, c, g, or u
  misc_feature (10)..(10): n is a, c, g, or u
  misc_feature (13)..(13): n is a, c, g, or u
  misc_feature (16)..(16): n is a, c, g, or u
  misc_feature (19)..(19): n is a, c, g, or u
acauugngunaanggngcng

SEQ ID NO: 57628 - RNA, 21 nt, Artificial Sequence
  Synthetic
  misc_feature (8)..(8): n is a, c, g, or u
  misc_feature (11)..(11): n is a, c, g, or u
  misc_feature (14)..(14): n is a, c, g, or u
  misc_feature (17)..(17): n is a, c, g, or u
  misc_feature (20)..(20): n is a, c, g, or u
cacauugngunaanggngcng

SEQ ID NO: 57629 - RNA, 22 nt, Artificial Sequence
  Synthetic
  misc_feature (9)..(9): n is a, c, g, or u
  misc_feature (12)..(12): n is a, c, g, or u
  misc_feature (15)..(15): n is a, c, g, or u
  misc_feature (18)..(18): n is a, c, g, or u
  misc_feature (21)..(21): n is a, c, g, or u
ccacauugngunaanggngcng

SEQ ID NO: 57630 - RNA, 23 nt, Artificial Sequence
  Synthetic
  misc_feature (10)..(10): n is a, c, g, or u
  misc_feature (13)..(13): n is a, c, g, or u
  misc_feature (16)..(16): n is a, c, g, or u
  misc_feature (19)..(19): n is a, c, g, or u
  misc_feature (22)..(22): n is a, c, g, or u
accacauugngunaanggngcng

SEQ ID NO: 57631 - RNA, 24 nt, Artificial Sequence
  Synthetic
  misc_feature (11)..(11): n is a, c, g, or u
  misc_feature (14)..(14): n is a, c, g, or u
  misc_feature (17)..(17): n is a, c, g, or u
  misc_feature (20)..(20): n is a, c, g, or u
  misc_feature (23)..(23): n is a, c, g, or u
aaccacauugngunaanggngcng

SEQ ID NO: 57632 - RNA, 18 nt, Artificial Sequence
  Synthetic
  misc_feature (2)..(2): n is a, c, g, or u
  misc_feature (17)..(17): n is a, c, g, or u
gngccugguggaacugng

SEQ ID NO: 57633 - RNA, 19 nt, Artificial Sequence
  Synthetic
  misc_feature (3)..(3): n is a, c, g, or u
  misc_feature (18)..(18): n is a, c, g, or u
agngccugguggaacugng

SEQ ID NO: 57634 - RNA, 20 nt, Artificial Sequence
  Synthetic
  misc_feature (4)..(4): n is a, c, g, or u
  misc_feature (19)..(19): n is a, c, g, or u
cagngccugguggaacugng

SEQ ID NO: 57635 - RNA, 21 nt, Artificial Sequence
  Synthetic
  misc_feature (5)..(5): n is a, c, g, or u
  misc_feature (20)..(20): n is a, c, g, or u
acagngccugguggaacugng

SEQ ID NO: 57636 - RNA, 22 nt, Artificial Sequence
  Synthetic
  misc_feature (6)..(6): n is a, c, g, or u
  misc_feature (21)..(21): n is a, c, g, or u
aacagngccugguggaacugng

SEQ ID NO: 57637 - RNA, 23 nt, Artificial Sequence
  Synthetic
  misc_feature (1)..(1): n is a, c, g, or u
  misc_feature (7)..(7): n is a, c, g, or u
  misc_feature (22)..(22): n is a, c, g, or u
naacagngccugguggaacugng

SEQ ID NO: 57638 - RNA, 24 nt, Artificial Sequence
  Synthetic
  misc_feature (2)..(2): n is a, c, g, or u
  misc_feature (8)..(8): n is a, c, g, or u
  misc_feature (23)..(23): n is a, c, g, or u
cnaacagngccugguggaacugng

SEQ ID NO: 57639 - RNA, 18 nt, Artificial Sequence
  Synthetic
aaaguaaggcaggaaaug

SEQ ID NO: 57640 - RNA, 19 nt, Artificial Sequence
  Synthetic
aaaaguaaggcaggaaaug

SEQ ID NO: 57641 - RNA, 20 nt, Artificial Sequence
  Synthetic
caaaaguaaggcaggaaaug

SEQ ID NO: 57642 - RNA, 21 nt, Artificial Sequence
  Synthetic
ccaaaaguaaggcaggaaaug

SEQ ID NO: 57643 - RNA, 22 nt, Artificial Sequence
  Synthetic
uccaaaaguaaggcaggaaaug

SEQ ID NO: 57644 - RNA, 23 nt, Artificial Sequence
  Synthetic
uuccaaaaguaaggcaggaaaug

SEQ ID NO: 57645 - RNA, 24 nt, Artificial Sequence
  Synthetic
cuuccaaaaguaaggcaggaaaug

SEQ ID NO: 57646 - RNA, 18 nt, Artificial Sequence
  Synthetic
augcgcugauggccaaug

SEQ ID NO: 57647 - RNA, 19 nt, Artificial Sequence
  Synthetic
caugcgcugauggccaaug

SEQ ID NO: 57648 - RNA, 20 nt, Artificial Sequence
  Synthetic
gcaugcgcugauggccaaug

SEQ ID NO: 57649 - RNA, 21 nt, Artificial Sequence
  Synthetic
cgcaugcgcugauggccaaug

SEQ ID NO: 57650 - RNA, 22 nt, Artificial Sequence
  Synthetic
acgcaugcgcugauggccaaug

SEQ ID NO: 57651 - RNA, 23 nt, Artificial Sequence
  Synthetic
cacgcaugcgcugauggccaaug

SEQ ID NO: 57652 - RNA, 24 nt, Artificial Sequence
  Synthetic
ccacgcaugcgcugauggccaaug

SEQ ID NO: 57653 - RNA, 18 nt, Artificial Sequence
  Synthetic
  misc_feature (7)..(7): n is a, c, g, or u
ucuggunuuaaaauaaug

SEQ ID NO: 57654 - RNA, 19 nt, Artificial Sequence
  Synthetic
  misc_feature (8)..(8): n is a, c, g, or u
gucuggunuuaaaauaaug

SEQ ID NO: 57655 - RNA, 20 nt, Artificial Sequence
  Synthetic
  misc_feature (9)..(9): n is a, c, g, or u
ugucuggunuuaaaauaaug

SEQ ID NO: 57656 - RNA, 21 nt, Artificial Sequence
  Synthetic
  misc_feature (1)..(1): n is a, c, g, or u
  misc_feature (10)..(10): n is a, c, g, or u
nugucuggunuuaaaauaaug

SEQ ID NO: 57657 - RNA, 22 nt, Artificial Sequence
  Synthetic
  misc_feature (2)..(2): n is a, c, g, or u
  misc_feature (11)..(11): n is a, c, g, or u
anugucuggunuuaaaauaaug

SEQ ID NO: 57658 - RNA, 23 nt, Artificial Sequence
  Synthetic
  misc_feature (3)..(3): n is a, c, g, or u
  misc_feature (12)..(12): n is a, c, g, or u
uanugucuggunuuaaaauaaug

SEQ ID NO: 57659 - RNA, 24 nt, Artificial Sequence
  Synthetic
  misc_feature (4)..(4): n is a, c, g, or u
  misc_feature (13)..(13): n is a, c, g, or u
auanugucuggunuuaaaauaaug

SEQ ID NO: 57660 - RNA, 18 nt, Artificial Sequence
  Synthetic
  misc_feature (11)..(11): n is a, c, g, or u
cuugaacagunggacaug

SEQ ID NO: 57661 - RNA, 19 nt, Artificial Sequence
  Synthetic
  misc_feature (12)..(12): n is a, c, g, or u
gcuugaacagunggacaug

SEQ ID NO: 57662 - RNA, 20 nt, Artificial Sequence
  Synthetic
  misc_feature (13)..(13): n is a, c, g, or u
ggcuugaacagunggacaug

SEQ ID NO: 57663 - RNA, 21 nt, Artificial Sequence
  Synthetic
  misc_feature (14)..(14): n is a, c, g, or u
aggcuugaacagunggacaug

SEQ ID NO: 57664 - RNA, 22 nt, Artificial Sequence
  Synthetic
  misc_feature (15)..(15): n is a, c, g, or u
gaggcuugaacagunggacaug

SEQ ID NO: 57665 - RNA, 23 nt, Artificial Sequence
  Synthetic
  misc_feature (16)..(16): n is a, c, g, or u
ggaggcuugaacagunggacaug

SEQ ID NO: 57666 - RNA, 24 nt, Artificial Sequence
  Synthetic
  misc_feature (17)..(17): n is a, c, g, or u
uggaggcuugaacagunggacaug

SEQ ID NO: 57667 - RNA, 18 nt, Artificial Sequence
  Synthetic
  misc_feature (5)..(5): n is a, c, g, or u
cacanccgagcagccaug

SEQ ID NO: 57668 - RNA, 19 nt, Artificial Sequence
  Synthetic
  misc_feature (6)..(6): n is a, c, g, or u
gcacanccgagcagccaug

SEQ ID NO: 57669 - RNA, 20 nt, Artificial Sequence
  Synthetic
  misc_feature (7)..(7): n is a, c, g, or u
agcacanccgagcagccaug

SEQ ID NO: 57670 - RNA, 21 nt, Artificial Sequence
  Synthetic
  misc_feature (8)..(8): n is a, c, g, or u
cagcacanccgagcagccaug

SEQ ID NO: 57671 - RNA, 22 nt, Artificial Sequence
  Synthetic
  misc_feature (9)..(9): n is a, c, g, or u
gcagcacanccgagcagccaug

SEQ ID NO: 57672 - RNA, 23 nt, Artificial Sequence
  Synthetic
  misc_feature (10)..(10): n is a, c, g, or u
ggcagcacanccgagcagccaug

SEQ ID NO: 57673 - RNA, 24 nt, Artificial Sequence
  Synthetic
  misc_feature (11)..(11): n is a, c, g, or u
uggcagcacanccgagcagccaug

SEQ ID NO: 57674 - RNA, 18 nt, Artificial Sequence
  Synthetic
ggacaugaacaaaagaug

SEQ ID NO: 57675 - RNA, 19 nt, Artificial Sequence
  Synthetic
  misc_feature (1)..(1): n is a, c, g, or u
nggacaugaacaaaagaug

SEQ ID NO: 57676 - RNA, 20 nt, Artificial Sequence
  Synthetic
  misc_feature (2)..(2): n is a, c, g, or u
unggacaugaacaaaagaug

SEQ ID NO: 57677 - RNA, 21 nt, Artificial Sequence
  Synthetic
  misc_feature (3)..(3): n is a, c, g, or u
gunggacaugaacaaaagaug

SEQ ID NO: 57678 - RNA, 22 nt, Artificial Sequence
  Synthetic
  misc_feature (4)..(4): n is a, c, g, or u
agunggacaugaacaaaagaug

SEQ ID NO: 57679 - RNA, 23 nt, Artificial Sequence
  Synthetic
  misc_feature (5)..(5): n is a, c, g, or u
cagunggacaugaacaaaagaug

SEQ ID NO: 57680 - RNA, 24 nt, Artificial Sequence
  Synthetic
  misc_feature (6)..(6): n is a, c, g, or u
acagunggacaugaacaaaagaug

SEQ ID NO: 57681 - RNA, 18 nt, Artificial Sequence
  Synthetic
aggaugaagaggaagaug

SEQ ID NO: 57682 - RNA, 19 nt, Artificial Sequence
  Synthetic
caggaugaagaggaagaug

SEQ ID NO: 57683 - RNA, 20 nt, Artificial Sequence
  Synthetic
gcaggaugaagaggaagaug

SEQ ID NO: 57684 - RNA, 21 nt, Artificial Sequence
  Synthetic
agcaggaugaagaggaagaug

SEQ ID NO: 57685 - RNA, 22 nt, Artificial Sequence
  Synthetic
cagcaggaugaagaggaagaug

SEQ ID NO: 57686 - RNA, 23 nt, Artificial Sequence
  Synthetic
gcagcaggaugaagaggaagaug

SEQ ID NO: 57687 - RNA, 24 nt, Artificial Sequence
  Synthetic
agcagcaggaugaagaggaagaug

SEQ ID NO: 57688 - RNA, 18 nt, Artificial Sequence
  Synthetic
  misc_feature (8)..(8): n is a, c, g, or u
cacacggnccggcagaug

SEQ ID NO: 57689 - RNA, 19 nt, Artificial Sequence
  Synthetic
  misc_feature (9)..(9): n is a, c, g, or u
gcacacggnccggcagaug

SEQ ID NO: 57690 - RNA, 20 nt, Artificial Sequence
  Synthetic
  misc_feature (10)..(10): n is a, c, g, or u
ugcacacggnccggcagaug

SEQ ID NO: 57691 - RNA, 21 nt, Artificial Sequence
  Synthetic
  misc_feature (11)..(11): n is a, c, g, or u
gugcacacggnccggcagaug

SEQ ID NO: 57692 - RNA, 22 nt, Artificial Sequence
  Synthetic
  misc_feature (12)..(12): n is a, c, g, or u
agugcacacggnccggcagaug

SEQ ID NO: 57693 - RNA, 23 nt, Artificial Sequence
  Synthetic
  misc_feature (13)..(13): n is a, c, g, or u
aagugcacacggnccggcagaug

SEQ ID NO: 57694 - RNA, 24 nt, Artificial Sequence
  Synthetic
  misc_feature (14)..(14): n is a, c, g, or u
gaagugcacacggnccggcagaug

SEQ ID NO: 57695 - RNA, 18 nt, Artificial Sequence
  Synthetic
aggcauagcagcaggaug

SEQ ID NO: 57696 - RNA, 19 nt, Artificial Sequence
  Synthetic
gaggcauagcagcaggaug

SEQ ID NO: 57697 - RNA, 20 nt, Artificial Sequence
  Synthetic
ugaggcauagcagcaggaug

SEQ ID NO: 57698 - RNA, 21 nt, Artificial Sequence
  Synthetic
augaggcauagcagcaggaug

SEQ ID NO: 57699 - RNA, 22 nt, Artificial Sequence
  Synthetic
gaugaggcauagcagcaggaug

SEQ ID NO: 57700 - RNA, 23 nt, Artificial Sequence
  Synthetic
agaugaggcauagcagcaggaug

SEQ ID NO: 57701 - RNA, 24 nt, Artificial Sequence
  Synthetic
aagaugaggcauagcagcaggaug

SEQ ID NO: 57702 - RNA, 18 nt, Artificial Sequence
  Synthetic
  misc_feature (14)..(14): n is a, c, g, or u
uuccuaaagcccangaug

SEQ ID NO: 57703 - RNA, 19 nt, Artificial Sequence
  Synthetic
  misc_feature (15)..(15): n is a, c, g, or u
uuuccuaaagcccangaug

SEQ ID NO: 57704 - RNA, 20 nt, Artificial Sequence
  Synthetic
  misc_feature (16)..(16): n is a, c, g, or u
uuuuccuaaagcccangaug

SEQ ID NO: 57705 - RNA, 21 nt, Artificial Sequence
  Synthetic
  misc_feature (17)..(17): n is a, c, g, or u
auuuuccuaaagcccangaug

SEQ ID NO: 57706 - RNA, 22 nt, Artificial Sequence
  Synthetic
  misc_feature (18)..(18): n is a, c, g, or u
uauuuuccuaaagcccangaug

SEQ ID NO: 57707 - RNA, 23 nt, Artificial Sequence
  Synthetic
  misc_feature (19)..(19): n is a, c, g, or u
guauuuuccuaaagcccangaug

SEQ ID NO: 57708 - RNA, 24 nt, Artificial Sequence
  Synthetic
  misc_feature (20)..(20): n is a, c, g, or u
gguauuuuccuaaagcccangaug

SEQ ID NO: 57709 - RNA, 18 nt, Artificial Sequence
  Synthetic
  misc_feature (3)..(3): n is a, c, g, or u
ucnagaagauugaugaug

SEQ ID NO: 57710 - RNA, 19 nt, Artificial Sequence
  Synthetic
  misc_feature (4)..(4): n is a, c, g, or u
uucnagaagauugaugaug

SEQ ID NO: 57711 - RNA, 20 nt, Artificial Sequence
  Synthetic
  misc_feature (5)..(5): n is a, c, g, or u
cuucnagaagauugaugaug

SEQ ID NO: 57712 - RNA, 21 nt, Artificial Sequence
  Synthetic
  misc_feature (6)..(6): n is a, c, g, or u
ucuucnagaagauugaugaug

SEQ ID NO: 57713 - RNA, 22 nt, Artificial Sequence
  Synthetic
  misc_feature (7)..(7): n is a, c, g, or u
gucuucnagaagauugaugaug

SEQ ID NO: 57714 - RNA, 23 nt, Artificial Sequence
  Synthetic
  misc_feature (8)..(8): n is a, c, g, or u
agucuucnagaagauugaugaug

SEQ ID NO: 57715 - RNA, 24 nt, Artificial Sequence
  Synthetic
  misc_feature (9)..(9): n is a, c, g, or u
cagucuucnagaagauugaugaug

SEQ ID NO: 57716 - RNA, 18 nt, Artificial Sequence
  Synthetic
  misc_feature (6)..(6): n is a, c, g, or u
  misc_feature (12)..(13): n is a, c, g, or u
uccaanaguccnnuuaug

SEQ ID NO: 57717 - RNA, 19 nt, Artificial Sequence
  Synthetic
  misc_feature (7)..(7): n is a, c, g, or u
  misc_feature (13)..(14): n is a, c, g, or u
guccaanaguccnnuuaug

SEQ ID NO: 57718 - RNA, 20 nt, Artificial Sequence
  Synthetic
  misc_feature (8)..(8): n is a, c, g, or u
  misc_feature (14)..(15): n is a, c, g, or u
aguccaanaguccnnuuaug

SEQ ID NO: 57719 - RNA, 21 nt, Artificial Sequence
  Synthetic
  misc_feature (9)..(9): n is a, c, g, or u
  misc_feature (15)..(16): n is a, c, g, or u
aaguccaanaguccnnuuaug

SEQ ID NO: 57720 - RNA, 22 nt, Artificial Sequence
  Synthetic
  misc_feature (10)..(10): n is a, c, g, or u
  misc_feature (16)..(17): n is a, c, g, or u
aaaguccaanaguccnnuuaug

SEQ ID NO: 57721 - RNA, 23 nt, Artificial Sequence
  Synthetic
  misc_feature (11)..(11): n is a, c, g, or u
  misc_feature (17)..(18): n is a, c, g, or u
gaaaguccaanaguccnnuuaug

SEQ ID NO: 57722 - RNA, 24 nt, Artificial Sequence
  Synthetic
  misc_feature (12)..(12): n is a, c, g, or u
  misc_feature (18)..(19): n is a, c, g, or u
ugaaaguccaanaguccnnuuaug

SEQ ID NO: 57723 - RNA, 18 nt, Artificial Sequence
  Synthetic
aagcccuacgcaccacug

SEQ ID NO: 57724 - RNA, 19 nt, Artificial Sequence
  Synthetic
aaagcccuacgcaccacug

SEQ ID NO: 57725 - RNA, 20 nt, Artificial Sequence
  Synthetic
gaaagcccuacgcaccacug

SEQ ID NO: 57726 - RNA, 21 nt, Artificial Sequence
  Synthetic
ggaaagcccuacgcaccacug

SEQ ID NO: 57727 - RNA, 22 nt, Artificial Sequence
  Synthetic
gggaaagcccuacgcaccacug

SEQ ID NO: 57728 - RNA, 23 nt, Artificial Sequence
  Synthetic
ggggaaagcccuacgcaccacug

SEQ ID NO: 57729 - RNA, 24 nt, Artificial Sequence
  Synthetic
gggggaaagcccuacgcaccacug

SEQ ID NO: 57730 - RNA, 18 nt, Artificial Sequence
  Synthetic
  misc_feature (9)..(9): n is a, c, g, or u
aagucccanucgggacug

SEQ ID NO: 57731 - RNA, 19 nt, Artificial Sequence
  Synthetic
  misc_feature (10)..(10): n is a, c, g, or u
gaagucccanucgggacug

SEQ ID NO: 57732 - RNA, 20 nt, Artificial Sequence
  Synthetic
  misc_feature (11)..(11): n is a, c, g, or u
ugaagucccanucgggacug

SEQ ID NO: 57733 - RNA, 21 nt, Artificial Sequence
  Synthetic
  misc_feature (12)..(12): n is a, c, g, or u
uugaagucccanucgggacug

SEQ ID NO: 57734 - RNA, 22 nt, Artificial Sequence
  Synthetic
  misc_feature (13)..(13): n is a, c, g, or u
guugaagucccanucgggacug

SEQ ID NO: 57735 - RNA, 23 nt, Artificial Sequence
  Synthetic
  misc_feature (14)..(14): n is a, c, g, or u
uguugaagucccanucgggacug

SEQ ID NO: 57736 - RNA, 24 nt, Artificial Sequence
  Synthetic
  misc_feature (1)..(1): n is a, c, g, or u
  misc_feature (15)..(15): n is a, c, g, or u
nuguugaagucccanucgggacug

SEQ ID NO: 57737 - RNA, 18 nt, Artificial Sequence
  Synthetic
  misc_feature (7)..(7): n is a, c, g, or u
  misc_feature (13)..(13): n is a, c, g, or u
cggaucnaacagngccug

SEQ ID NO: 57738 - RNA, 19 nt, Artificial Sequence
  Synthetic
  misc_feature (8)..(8): n is a, c, g, or u
  misc_feature (14)..(14): n is a, c, g, or u
ucggaucnaacagngccug

SEQ ID NO: 57739 - RNA, 20 nt, Artificial Sequence
  Synthetic
  misc_feature (9)..(9): n is a, c, g, or u
  misc_feature (15)..(15): n is a, c, g, or u
cucggaucnaacagngccug

SEQ ID NO: 57740 - RNA, 21 nt, Artificial Sequence
  Synthetic
  misc_feature (10)..(10): n is a, c, g, or u
  misc_feature (16)..(16): n is a, c, g, or u
ccucggaucnaacagngccug

SEQ ID NO: 57741 - RNA, 22 nt, Artificial Sequence
  Synthetic
  misc_feature (11)..(11): n is a, c, g, or u
  misc_feature (17)..(17): n is a, c, g, or u
cccucggaucnaacagngccug

SEQ ID NO: 57742 - RNA, 23 nt, Artificial Sequence
  Synthetic
  misc_feature (12)..(12): n is a, c, g, or u
  misc_feature (18)..(18): n is a, c, g, or u
acccucggaucnaacagngccug

SEQ ID NO: 57743 - RNA, 24 nt, Artificial Sequence
  Synthetic
  misc_feature (13)..(13): n is a, c, g, or u
  misc_feature (19)..(19): n is a, c, g, or u
uacccucggaucnaacagngccug

SEQ ID NO: 57744 - RNA, 18 nt, Artificial Sequence
  Synthetic
ugcgagcgaaacaagcug

SEQ ID NO: 57745 - RNA, 19 nt, Artificial Sequence
  Synthetic
cugcgagcgaaacaagcug

SEQ ID NO: 57746 - RNA, 20 nt, Artificial Sequence
  Synthetic
gcugcgagcgaaacaagcug

SEQ ID NO: 57747 - RNA, 21 nt, Artificial Sequence
  Synthetic
ggcugcgagcgaaacaagcug

SEQ ID NO: 57748 - RNA, 22 nt, Artificial Sequence
  Synthetic
cggcugcgagcgaaacaagcug

SEQ ID NO: 57749 - RNA, 23 nt, Artificial Sequence
  Synthetic
ccggcugcgagcgaaacaagcug

SEQ ID NO: 57750 - RNA, 24 nt, Artificial Sequence
  Synthetic
accggcugcgagcgaaacaagcug

SEQ ID NO: 57751 - RNA, 18 nt, Artificial Sequence
  Synthetic
aagggacucaagaugcug

SEQ ID NO: 57752 - RNA, 19 nt, Artificial Sequence
  Synthetic
aaagggacucaagaugcug

SEQ ID NO: 57753 - RNA, 20 nt, Artificial Sequence
  Synthetic
uaaagggacucaagaugcug

SEQ ID NO: 57754 - RNA, 21 nt, Artificial Sequence
  Synthetic
auaaagggacucaagaugcug

SEQ ID NO: 57755 - RNA, 22 nt, Artificial Sequence
  Synthetic
uauaaagggacucaagaugcug

SEQ ID NO: 57756 - RNA, 23 nt, Artificial Sequence
  Synthetic
guauaaagggacucaagaugcug

SEQ ID NO: 57757 - RNA, 24 nt, Artificial Sequence
  Synthetic
gguauaaagggacucaagaugcug

SEQ ID NO: 57758 - RNA, 18 nt, Artificial Sequence
  Synthetic
aaaaguugcauggugcug

SEQ ID NO: 57759 - RNA, 19 nt, Artificial Sequence
  Synthetic
aaaaaguugcauggugcug

SEQ ID NO: 57760 - RNA, 20 nt, Artificial Sequence
  Synthetic
gaaaaaguugcauggugcug

SEQ ID NO: 57761 - RNA, 21 nt, Artificial Sequence
  Synthetic
ugaaaaaguugcauggugcug

SEQ ID NO: 57762 - RNA, 22 nt, Artificial Sequence
  Synthetic
gugaaaaaguugcauggugcug

SEQ ID NO: 57763 - RNA, 23 nt, Artificial Sequence
  Synthetic
ggugaaaaaguugcauggugcug

SEQ ID NO: 57764 - RNA, 24 nt, Artificial Sequence
  Synthetic
aggugaaaaaguugcauggugcug

SEQ ID NO: 57765 - RNA, 18 nt, Artificial Sequence
  Synthetic
  misc_feature (15)..(15): n is a, c, g, or u
cugcuggaauuugcncug

SEQ ID NO: 57766 - RNA, 19 nt, Artificial Sequence
  Synthetic
  misc_feature (16)..(16): n is a, c, g, or u
acugcuggaauuugcncug

SEQ ID NO: 57767 - RNA, 20 nt, Artificial Sequence
  Synthetic
  misc_feature (17)..(17): n is a, c, g, or u
gacugcuggaauuugcncug

SEQ ID NO: 57768 - RNA, 21 nt, Artificial Sequence
  Synthetic
  misc_feature (18)..(18): n is a, c, g, or u
ggacugcuggaauuugcncug

SEQ ID NO: 57769 - RNA, 22 nt, Artificial Sequence
  Synthetic
  misc_feature (19)..(19): n is a, c, g, or u
gggacugcuggaauuugcncug

SEQ ID NO: 57770 - RNA, 23 nt, Artificial Sequence
  Synthetic
  misc_feature (20)..(20): n is a, c, g, or u
cgggacugcuggaauuugcncug

SEQ ID NO: 57771 - RNA, 24 nt, Artificial Sequence
  Synthetic
  misc_feature (21)..(21): n is a, c, g, or u
ucgggacugcuggaauuugcncug

SEQ ID NO: 57772 - RNA, 18 nt, Artificial Sequence
  Synthetic
  misc_feature (9)..(9): n is a, c, g, or u
gauugagancuucgucug

SEQ ID NO: 57773 - RNA, 19 nt, Artificial Sequence
  Synthetic
  misc_feature (10)..(10): n is a, c, g, or u
cgauugagancuucgucug

SEQ ID NO: 57774 - RNA, 20 nt, Artificial Sequence
  Synthetic
  misc_feature (11)..(11): n is a, c, g, or u
gcgauugagancuucgucug

SEQ ID NO: 57775 - RNA, 18 nt, Artificial Sequence
  Synthetic
gauccagcugauggucug

SEQ ID NO: 57776 - RNA, 19 nt, Artificial Sequence
  Synthetic
ggauccagcugauggucug

SEQ ID NO: 57777 - RNA, 20 nt, Artificial Sequence
  Synthetic
  misc_feature (1)..(1): n is a, c, g, or u
nggauccagcugauggucug

SEQ ID NO: 57778 - RNA, 21 nt, Artificial Sequence
  Synthetic
  misc_feature (2)..(2): n is a, c, g, or u
gnggauccagcugauggucug

SEQ ID NO: 57779 - RNA, 22 nt, Artificial Sequence
  Synthetic
  misc_feature (3)..(3): n is a, c, g, or u
agnggauccagcugauggucug

SEQ ID NO: 57780 - RNA, 23 nt, Artificial Sequence
  Synthetic
  misc_feature (1)..(1): n is a, c, g, or u
  misc_feature (4)..(4): n is a, c, g, or u
nagnggauccagcugauggucug

SEQ ID NO: 57781 - RNA, 24 nt, Artificial Sequence
  Synthetic
  misc_feature (2)..(2): n is a, c, g, or u
  misc_feature (5)..(5): n is a, c, g, or u
anagnggauccagcugauggucug

SEQ ID NO: 57782 - RNA, 18 nt, Artificial Sequence
  Synthetic
acaggagguugguaagug

SEQ ID NO: 57783 - RNA, 19 nt, Artificial Sequence
  Synthetic
gacaggagguugguaagug

SEQ ID NO: 57784 - RNA, 20 nt, Artificial Sequence
  Synthetic
ggacaggagguugguaagug

SEQ ID NO: 57785 - RNA, 21 nt, Artificial Sequence
  Synthetic
aggacaggagguugguaagug

SEQ ID NO: 57786 - RNA, 22 nt, Artificial Sequence
  Synthetic
gaggacaggagguugguaagug

SEQ ID NO: 57787 - RNA, 23 nt, Artificial Sequence
  Synthetic
ggaggacaggagguugguaagug

SEQ ID NO: 57788 - RNA, 24 nt, Artificial Sequence
  Synthetic
uggaggacaggagguugguaagug

SEQ ID NO: 57789 - RNA, 18 nt, Artificial Sequence
  Synthetic
acuaaaagccagacagug

SEQ ID NO: 57790 - RNA, 19 nt, Artificial Sequence
  Synthetic
aacuaaaagccagacagug

SEQ ID NO: 57791 - RNA, 20 nt, Artificial Sequence
  Synthetic
uaacuaaaagccagacagug

SEQ ID NO: 57792 - RNA, 21 nt, Artificial Sequence
  Synthetic
auaacuaaaagccagacagug

SEQ ID NO: 57793 - RNA, 22 nt, Artificial Sequence
  Synthetic
uauaacuaaaagccagacagug

SEQ ID NO: 57794 - RNA, 23 nt, Artificial Sequence
  Synthetic
auauaacuaaaagccagacagug

SEQ ID NO: 57795 - RNA, 24 nt, Artificial Sequence
  Synthetic
cauauaacuaaaagccagacagug

SEQ ID NO: 57796 - RNA, 18 nt, Artificial Sequence
  Synthetic
uggucuccaugcgacgug

SEQ ID NO: 57797 - RNA, 19 nt, Artificial Sequence
  Synthetic
guggucuccaugcgacgug

SEQ ID NO: 57798 - RNA, 20 nt, Artificial Sequence
  Synthetic
gguggucuccaugcgacgug

SEQ ID NO: 57799 - RNA, 21 nt, Artificial Sequence
  Synthetic
cgguggucuccaugcgacgug

SEQ ID NO: 57800 - RNA, 22 nt, Artificial Sequence
  Synthetic
acgguggucuccaugcgacgug

SEQ ID NO: 57801 - RNA, 23 nt, Artificial Sequence
  Synthetic
cacgguggucuccaugcgacgug

SEQ ID NO: 57802 - RNA, 24 nt, Artificial Sequence
  Synthetic
ucacgguggucuccaugcgacgug

SEQ ID NO: 57803 - RNA, 18 nt, Artificial Sequence
  Synthetic
  misc_feature (6)..(6): n is a, c, g, or u
ccccancaggccaccgug

SEQ ID NO: 57804 - RNA, 19 nt, Artificial Sequence
  Synthetic
  misc_feature (7)..(7): n is a, c, g, or u
accccancaggccaccgug

SEQ ID NO: 57805 - RNA, 20 nt, Artificial Sequence
  Synthetic
  misc_feature (8)..(8): n is a, c, g, or u
caccccancaggccaccgug

SEQ ID NO: 57806 - RNA, 21 nt, Artificial Sequence
  Synthetic
  misc_feature (9)..(9): n is a, c, g, or u
ccaccccancaggccaccgug

SEQ ID NO: 57807 - RNA, 22 nt, Artificial Sequence
  Synthetic
  misc_feature (10)..(10): n is a, c, g, or u
uccaccccancaggccaccgug

SEQ ID NO: 57808 - RNA, 23 nt, Artificial Sequence
  Synthetic
  misc_feature (11)..(11): n is a, c, g, or u
cuccaccccancaggccaccgug

SEQ ID NO: 57809 - RNA, 24 nt, Artificial Sequence
  Synthetic
  misc_feature (1)..(1): n is a, c, g, or u
  misc_feature (12)..(12): n is a, c, g, or u
ncuccaccccancaggccaccgug

SEQ ID NO: 57810 - RNA, 18 nt, Artificial Sequence
  Synthetic
gaugauuaggcagaggug

SEQ ID NO: 57811 - RNA, 19 nt, Artificial Sequence
  Synthetic
agaugauuaggcagaggug

SEQ ID NO: 57812 - RNA, 20 nt, Artificial Sequence
  Synthetic
aagaugauuaggcagaggug

SEQ ID NO: 57813 - RNA, 21 nt, Artificial Sequence
  Synthetic
aaagaugauuaggcagaggug

SEQ ID NO: 57814 - RNA, 22 nt, Artificial Sequence
  Synthetic
aaaagaugauuaggcagaggug

SEQ ID NO: 57815 - RNA, 23 nt, Artificial Sequence
  Synthetic
caaaagaugauuaggcagaggug

SEQ ID NO: 57816 - RNA, 24 nt, Artificial Sequence
  Synthetic
acaaaagaugauuaggcagaggug

SEQ ID NO: 57817 - RNA, 18 nt, Artificial Sequence
  Synthetic
  misc_feature (2)..(2): n is a, c, g, or u
gngugucucuuagaggug

SEQ ID NO: 57818 - RNA, 19 nt, Artificial Sequence
  Synthetic
  misc_feature (3)..(3): n is a, c, g, or u
ugngugucucuuagaggug

SEQ ID NO: 57819 - RNA, 20 nt, Artificial Sequence
  Synthetic
  misc_feature (4)..(4): n is a, c, g, or u
augngugucucuuagaggug

SEQ ID NO: 57820 - RNA, 21 nt, Artificial Sequence
  Synthetic
  misc_feature (5)..(5): n is a, c, g, or u
gaugngugucucuuagaggug

SEQ ID NO: 57821 - RNA, 22 nt, Artificial Sequence
  Synthetic
  misc_feature (6)..(6): n is a, c, g, or u
ggaugngugucucuuagaggug

SEQ ID NO: 57822 - RNA, 23 nt, Artificial Sequence
  Synthetic
  misc_feature (7)..(7): n is a, c, g, or u
uggaugngugucucuuagaggug

SEQ ID NO: 57823 - RNA, 24 nt, Artificial Sequence
  Synthetic
  misc_feature (8)..(8): n is a, c, g, or u
guggaugngugucucuuagaggug

SEQ ID NO: 57824 - RNA, 18 nt, Artificial Sequence
  Synthetic
aguugcauggugcuggug

SEQ ID NO: 57825 - RNA, 19 nt, Artificial Sequence
  Synthetic
aaguugcauggugcuggug

SEQ ID NO: 57826 - RNA, 20 nt, Artificial Sequence
  Synthetic
aaaguugcauggugcuggug

SEQ ID NO: 57827 - RNA, 21 nt, Artificial Sequence
  Synthetic
aaaaguugcauggugcuggug

SEQ ID NO: 57828 - RNA, 22 nt, Artificial Sequence
  Synthetic
aaaaaguugcauggugcuggug

SEQ ID NO: 57829 - RNA, 23 nt, Artificial Sequence
  Synthetic
gaaaaaguugcauggugcuggug

SEQ ID NO: 57830 - RNA, 24 nt, Artificial Sequence
  Synthetic
ugaaaaaguugcauggugcuggug

SEQ ID NO: 57831 - RNA, 18 nt, Artificial Sequence
  Synthetic
  misc_feature (1)..(1): n is a, c, g, or u
nagaagauugaugaugug

SEQ ID NO: 57832 - RNA, 19 nt, Artificial Sequence
  Synthetic
  misc_feature (2)..(2): n is a, c, g, or u
cnagaagauugaugaugug

SEQ ID NO: 57833 - RNA, 20 nt, Artificial Sequence
  Synthetic
  misc_feature (3)..(3): n is a, c, g, or u
ucnagaagauugaugaugug

SEQ ID NO: 57834 - RNA, 21 nt, Artificial Sequence
  Synthetic
  misc_feature (4)..(4): n is a, c, g, or u
uucnagaagauugaugaugug

SEQ ID NO: 57835 - RNA, 22 nt, Artificial Sequence
  Synthetic
  misc_feature (5)..(5): n is a, c, g, or u
cuucnagaagauugaugaugug

SEQ ID NO: 57836 - RNA, 23 nt, Artificial Sequence
  Synthetic
  misc_feature (6)..(6): n is a, c, g, or u
ucuucnagaagauugaugaugug

SEQ ID NO: 57837 - RNA, 24 nt, Artificial Sequence
  Synthetic
  misc_feature (7)..(7): n is a, c, g, or u
gucuucnagaagauugaugaugug

SEQ ID NO: 57838 - RNA, 18 nt, Artificial Sequence
  Synthetic
  misc_feature (4)..(4): n is a, c, g, or u
  misc_feature (16)..(16): n is a, c, g, or u
caanuguccuuguuunug

SEQ ID NO: 57839 - RNA, 19 nt, Artificial Sequence
  Synthetic
  misc_feature (5)..(5): n is a, c, g, or u
  misc_feature (17)..(17): n is a, c, g, or u
ccaanuguccuuguuunug

SEQ ID NO: 57840 - RNA, 20 nt, Artificial Sequence
  Synthetic
  misc_feature (6)..(6): n is a, c, g, or u
  misc_feature (18)..(18): n is a, c, g, or u
gccaanuguccuuguuunug

SEQ ID NO: 57841 - RNA, 21 nt, Artificial Sequence
  Synthetic
  misc_feature (7)..(7): n is a, c, g, or u
  misc_feature (19)..(19): n is a, c, g, or u
ggccaanuguccuuguuunug

SEQ ID NO: 57842 - RNA, 22 nt, Artificial Sequence
  Synthetic
  misc_feature (8)..(8): n is a, c, g, or u
  misc_feature (20)..(20): n is a, c, g, or u
uggccaanuguccuuguuunug

SEQ ID NO: 57843 - RNA, 23 nt, Artificial Sequence
  Synthetic
  misc_feature (9)..(9): n is a, c, g, or u
  misc_feature (21)..(21): n is a, c, g, or u
uuggccaanuguccuuguuunug

SEQ ID NO: 57844 - RNA, 24 nt, Artificial Sequence
  Synthetic
  misc_feature (10)..(10): n is a, c, g, or u
  misc_feature (22)..(22): n is a, c, g, or u
auuggccaanuguccuuguuunug

SEQ ID NO: 57845 - RNA, 18 nt, Artificial Sequence
  Synthetic
  misc_feature (1)..(2): n is a, c, g, or u
nnucccccuagaaaauug

SEQ ID NO: 57846 - RNA, 19 nt, Artificial Sequence
  Synthetic
  misc_feature (2)..(3): n is a, c, g, or u
unnucccccuagaaaauug

SEQ ID NO: 57847 - RNA, 20 nt, Artificial Sequence
  Synthetic
  misc_feature (3)..(4): n is a, c, g, or u
gunnucccccuagaaaauug

SEQ ID NO: 57848 - RNA, 21 nt, Artificial Sequence
  Synthetic
  misc_feature (4)..(5): n is a, c, g, or u
ggunnucccccuagaaaauug

SEQ ID NO: 57849 - RNA, 22 nt, Artificial Sequence
  Synthetic
  misc_feature (5)..(6): n is a, c, g, or u
gggunnucccccuagaaaauug

SEQ ID NO: 57850 - RNA, 23 nt, Artificial Sequence
  Synthetic
  misc_feature (6)..(7): n is a, c, g, or u
cgggunnucccccuagaaaauug

SEQ ID NO: 57851 - RNA, 24 nt, Artificial Sequence
  Synthetic
  misc_feature (7)..(8): n is a, c, g, or u
ccgggunnucccccuagaaaauug

SEQ ID NO: 57852 - RNA, 18 nt, Artificial Sequence
  Synthetic
caaggaauacuaacauug

SEQ ID NO: 57853 - RNA, 19 nt, Artificial Sequence
  Synthetic
ccaaggaauacuaacauug

SEQ ID NO: 57854 - RNA, 20 nt, Artificial Sequence
  Synthetic
uccaaggaauacuaacauug

SEQ ID NO: 57855 - RNA, 21 nt, Artificial Sequence
  Synthetic
guccaaggaauacuaacauug

SEQ ID NO: 57856 - RNA, 22 nt, Artificial Sequence
  Synthetic
aguccaaggaauacuaacauug

SEQ ID NO: 57857 - RNA, 23 nt, Artificial Sequence
  Synthetic
gaguccaaggaauacuaacauug

SEQ ID NO: 57858 - RNA, 24 nt, Artificial Sequence
  Synthetic
ugaguccaaggaauacuaacauug

SEQ ID NO: 57859 - RNA, 18 nt, Artificial Sequence
  Synthetic
cuaccuuguuugccauug

SEQ ID NO: 57860 - RNA, 19 nt, Artificial Sequence
  Synthetic
ccuaccuuguuugccauug

SEQ ID NO: 57861 - RNA, 20 nt, Artificial Sequence
  Synthetic
uccuaccuuguuugccauug

SEQ ID NO: 57862 - RNA, 21 nt, Artificial Sequence
  Synthetic
cuccuaccuuguuugccauug

SEQ ID NO: 57863 - RNA, 22 nt, Artificial Sequence
  Synthetic
acuccuaccuuguuugccauug

SEQ ID NO: 57864 - RNA, 23 nt, Artificial Sequence
  Synthetic
cacuccuaccuuguuugccauug

SEQ ID NO: 57865 - RNA, 24 nt, Artificial Sequence
  Synthetic
ccacuccuaccuuguuugccauug

SEQ ID NO: 57866 - RNA, 18 nt, Artificial Sequence
  Synthetic
cucccggaccgccgauug

SEQ ID NO: 57867 - RNA, 19 nt, Artificial Sequence
  Synthetic
  misc_feature (1)..(1): n is a, c, g, or u
ncucccggaccgccgauug

SEQ ID NO: 57868 - RNA, 20 nt, Artificial Sequence
  Synthetic
  misc_feature (2)..(2): n is a, c, g, or u
uncucccggaccgccgauug

SEQ ID NO: 57869 - RNA, 21 nt, Artificial Sequence
  Synthetic
  misc_feature (3)..(3): n is a, c, g, or u
uuncucccggaccgccgauug

SEQ ID NO: 57870 - RNA, 22 nt, Artificial Sequence
  Synthetic
  misc_feature (1)..(1): n is a, c, g, or u
  misc_feature (4)..(4): n is a, c, g, or u
nuuncucccggaccgccgauug

SEQ ID NO: 57871 - RNA, 23 nt, Artificial Sequence
  Synthetic
  misc_feature (2)..(2): n is a, c, g, or u
  misc_feature (5)..(5): n is a, c, g, or u
gnuuncucccggaccgccgauug

SEQ ID NO: 57872 - RNA, 24 nt, Artificial Sequence
  Synthetic
  misc_feature (3)..(3): n is a, c, g, or u
  misc_feature (6)..(6): n is a, c, g, or u
ggnuuncucccggaccgccgauug

SEQ ID NO: 57873 - RNA, 18 nt, Artificial Sequence
  Synthetic
cuagacucugugguauug

SEQ ID NO: 57874 - RNA, 19 nt, Artificial Sequence
  Synthetic
ucuagacucugugguauug

SEQ ID NO: 57875 - RNA, 20 nt, Artificial Sequence
  Synthetic
gucuagacucugugguauug

SEQ ID NO: 57876 - RNA, 21 nt, Artificial Sequence
  Synthetic
agucuagacucugugguauug

SEQ ID NO: 57877 - RNA, 22 nt, Artificial Sequence
  Synthetic
gagucuagacucugugguauug

SEQ ID NO: 57878 - RNA, 23 nt, Artificial Sequence
  Synthetic
cgagucuagacucugugguauug

SEQ ID NO: 57879 - RNA, 24 nt, Artificial Sequence
  Synthetic
acgagucuagacucugugguauug

SEQ ID NO: 57880 - RNA, 18 nt, Artificial Sequence
  Synthetic
aaacauagagguuccuug

SEQ ID NO: 57881 - RNA, 19 nt, Artificial Sequence
  Synthetic
gaaacauagagguuccuug

SEQ ID NO: 57882 - RNA, 20 nt, Artificial Sequence
  Synthetic
ggaaacauagagguuccuug

SEQ ID NO: 57883 - RNA, 21 nt, Artificial Sequence
  Synthetic
gggaaacauagagguuccuug

SEQ ID NO: 57884 - RNA, 22 nt, Artificial Sequence
  Synthetic
agggaaacauagagguuccuug

SEQ ID NO: 57885 - RNA, 23 nt, Artificial Sequence
  Synthetic
gagggaaacauagagguuccuug

SEQ ID NO: 57886 - RNA, 24 nt, Artificial Sequence
  Synthetic
  misc_feature (1)..(1): n is a, c, g, or u
ngagggaaacauagagguuccuug

SEQ ID NO: 57887 - RNA, 18 nt, Artificial Sequence
  Synthetic
  misc_feature (4)..(4): n is a, c, g, or u
  misc_feature (10)..(10): n is a, c, g, or u
ccancacaanauagcuug

SEQ ID NO: 57888 - RNA, 19 nt, Artificial Sequence
  Synthetic
  misc_feature (5)..(5): n is a, c, g, or u
  misc_feature (11)..(11): n is a, c, g, or u
cccancacaanauagcuug

SEQ ID NO: 57889 - RNA, 20 nt, Artificial Sequence
  Synthetic
  misc_feature (6)..(6): n is a, c, g, or u
  misc_feature (12)..(12): n is a, c, g, or u
ccccancacaanauagcuug

SEQ ID NO: 57890 - RNA, 21 nt, Artificial Sequence
  Synthetic
  misc_feature (7)..(7): n is a, c, g, or u
  misc_feature (13)..(13): n is a, c, g, or u
accccancacaanauagcuug

SEQ ID NO: 57891 - RNA, 22 nt, Artificial Sequence
  Synthetic
  misc_feature (8)..(8): n is a, c, g, or u
  misc_feature (14)..(14): n is a, c, g, or u
caccccancacaanauagcuug

SEQ ID NO: 57892 - RNA, 23 nt, Artificial Sequence
  Synthetic
  misc_feature (9)..(9): n is a, c, g, or u
  misc_feature (15)..(15): n is a, c, g, or u
ucaccccancacaanauagcuug

SEQ ID NO: 57893 - RNA, 24 nt, Artificial Sequence
  Synthetic
  misc_feature (1)..(1): n is a, c, g, or u
  misc_feature (10)..(10): n is a, c, g, or u
  misc_feature (16)..(16): n is a, c, g, or u
nucaccccancacaanauagcuug

SEQ ID NO: 57894 - RNA, 18 nt, Artificial Sequence
  Synthetic
gauagccaggacaaguug

SEQ ID NO: 57895 - RNA, 19 nt, Artificial Sequence
  Synthetic
cgauagccaggacaaguug

SEQ ID NO: 57896 - RNA, 20 nt, Artificial Sequence
  Synthetic
  misc_feature (1)..(1): n is a, c, g, or u
ncgauagccaggacaaguug

SEQ ID NO: 57897 - RNA, 21 nt, Artificial Sequence
  Synthetic
  misc_feature (2)..(2): n is a, c, g, or u
ancgauagccaggacaaguug

SEQ ID NO: 57898 - RNA, 22 nt, Artificial Sequence
  Synthetic
  misc_feature (3)..(3): n is a, c, g, or u
cancgauagccaggacaaguug

SEQ ID NO: 57899 - RNA, 23 nt, Artificial Sequence
  Synthetic
  misc_feature (4)..(4): n is a, c, g, or u
ccancgauagccaggacaaguug

SEQ ID NO: 57900 - RNA, 24 nt, Artificial Sequence
  Synthetic
  misc_feature (5)..(5): n is a, c, g, or u
uccancgauagccaggacaaguug

SEQ ID NO: 57901 - RNA, 18 nt, Artificial Sequence
  Synthetic
gaaaggccuuguaaguug

SEQ ID NO: 57902 - RNA, 19 nt, Artificial Sequence
  Synthetic
agaaaggccuuguaaguug

SEQ ID NO: 57903 - RNA, 20 nt, Artificial Sequence
  Synthetic
  misc_feature (1)..(1): n is a, c, g, or u
nagaaaggccuuguaaguug

SEQ ID NO: 57904 - RNA, 21 nt, Artificial Sequence
  Synthetic
  misc_feature (2)..(2): n is a, c, g, or u
anagaaaggccuuguaaguug

SEQ ID NO: 57905 - RNA, 22 nt, Artificial Sequence
  Synthetic
  misc_feature (3)..(3): n is a, c, g, or u
canagaaaggccuuguaaguug

SEQ ID NO: 57906 - RNA, 23 nt, Artificial Sequence
  Synthetic
  misc_feature (4)..(4): n is a, c, g, or u
acanagaaaggccuuguaaguug

SEQ ID NO: 57907 - RNA, 24 nt, Artificial Sequence
  Synthetic
  misc_feature (1)..(1): n is a, c, g, or u
  misc_feature (5)..(5): n is a, c, g, or u
nacanagaaaggccuuguaaguug

SEQ ID NO: 57908 - RNA, 18 nt, Artificial Sequence
  Synthetic
uuccuugagcaagaguug

SEQ ID NO: 57909 - RNA, 19 nt, Artificial Sequence
  Synthetic
guuccuugagcaagaguug

SEQ ID NO: 57910 - RNA, 20 nt, Artificial Sequence
  Synthetic
gguuccuugagcaagaguug

SEQ ID NO: 57911 - RNA, 21 nt, Artificial Sequence
  Synthetic
agguuccuugagcaagaguug

SEQ ID NO: 57912 - RNA, 22 nt, Artificial Sequence
  Synthetic
gagguuccuugagcaagaguug

SEQ ID NO: 57913 - RNA, 23 nt, Artificial Sequence
  Synthetic
agagguuccuugagcaagaguug

SEQ ID NO: 57914 - RNA, 24 nt, Artificial Sequence
  Synthetic
uagagguuccuugagcaagaguug

SEQ ID NO: 57915 - RNA, 18 nt, Artificial Sequence
  Synthetic
gcacaggccuggccguug

SEQ ID NO: 57916 - RNA, 19 nt, Artificial Sequence
  Synthetic
ggcacaggccuggccguug

SEQ ID NO: 57917 - RNA, 20 nt, Artificial Sequence
  Synthetic
uggcacaggccuggccguug

SEQ ID NO: 57918 - RNA, 21 nt, Artificial Sequence
  Synthetic
uuggcacaggccuggccguug

SEQ ID NO: 57919 - RNA, 22 nt, Artificial Sequence
  Synthetic
cuuggcacaggccuggccguug

SEQ ID NO: 57920 - RNA, 23 nt, Artificial Sequence
  Synthetic
acuuggcacaggccuggccguug

SEQ ID NO: 57921 - RNA, 24 nt, Artificial Sequence
  Synthetic
cacuuggcacaggccuggccguug

SEQ ID NO: 57922 - RNA, 18 nt, Artificial Sequence
  Synthetic
  misc_feature (4)..(4): n is a, c, g, or u
  misc_feature (13)..(13): n is a, c, g, or u
aagncccacaauncguug

SEQ ID NO: 57923 - RNA, 19 nt, Artificial Sequence
  Synthetic
  misc_feature (5)..(5): n is a, c, g, or u
  misc_feature (14)..(14): n is a, c, g, or u
aaagncccacaauncguug

SEQ ID NO: 57924 - RNA, 20 nt, Artificial Sequence
  Synthetic
  misc_feature (6)..(6): n is a, c, g, or u
  misc_feature (15)..(15): n is a, c, g, or u
aaaagncccacaauncguug

SEQ ID NO: 57925 - RNA, 21 nt, Artificial Sequence
  Synthetic
  misc_feature (7)..(7): n is a, c, g, or u
  misc_feature (16)..(16): n is a, c, g, or u
caaaagncccacaauncguug

SEQ ID NO: 57926 - RNA, 22 nt, Artificial Sequence
  Synthetic
  misc_feature (8)..(8): n is a, c, g, or u
  misc_feature (17)..(17): n is a, c, g, or u
ccaaaagncccacaauncguug

SEQ ID NO: 57927 - RNA, 23 nt, Artificial Sequence
  Synthetic
  misc_feature (9)..(9): n is a, c, g, or u
  misc_feature (18)..(18): n is a, c, g, or u
cccaaaagncccacaauncguug

SEQ ID NO: 57928 - RNA, 24 nt, Artificial Sequence
  Synthetic
  misc_feature (10)..(10): n is a, c, g, or u
  misc_feature (19)..(19): n is a, c, g, or u
gcccaaaagncccacaauncguug

SEQ ID NO: 57929 - RNA, 18 nt, Artificial Sequence
  Synthetic
  misc_feature (10)..(11): n is a, c, g, or u
ugccccuucnngucguug

SEQ ID NO: 57930 - RNA, 19 nt, Artificial Sequence
  Synthetic
  misc_feature (11)..(12): n is a, c, g, or u
augccccuucnngucguug

SEQ ID NO: 57931 - RNA, 20 nt, Artificial Sequence
  Synthetic
  misc_feature (12)..(13): n is a, c, g, or u
caugccccuucnngucguug

SEQ ID NO: 57932 - RNA, 21 nt, Artificial Sequence
  Synthetic
  misc_feature (13)..(14): n is a, c, g, or u
ccaugccccuucnngucguug

SEQ ID NO: 57933 - RNA, 22 nt, Artificial Sequence
  Synthetic
  misc_feature (14)..(15): n is a, c, g, or u
cccaugccccuucnngucguug

SEQ ID NO: 57934 - RNA, 23 nt, Artificial Sequence
  Synthetic
  misc_feature (15)..(16): n is a, c, g, or u
ucccaugccccuucnngucguug

SEQ ID NO: 57935 - RNA, 24 nt, Artificial Sequence
  Synthetic
  misc_feature (16)..(17): n is a, c, g, or u
gucccaugccccuucnngucguug

SEQ ID NO: 57936 - RNA, 18 nt, Artificial Sequence
  Synthetic
uggggacugcgaauuuug

SEQ ID NO: 57937 - RNA, 19 nt, Artificial Sequence
  Synthetic
uuggggacugcgaauuuug

SEQ ID NO: 57938 - RNA, 20 nt, Artificial Sequence
  Synthetic
guuggggacugcgaauuuug

SEQ ID NO: 57939 - RNA, 21 nt, Artificial Sequence
  Synthetic
gguuggggacugcgaauuuug

SEQ ID NO: 57940 - RNA, 22 nt, Artificial Sequence
  Synthetic
agguuggggacugcgaauuuug

SEQ ID NO: 57941 - RNA, 23 nt, Artificial Sequence
  Synthetic
gagguuggggacugcgaauuuug

SEQ ID NO: 57942 - RNA, 24 nt, Artificial Sequence
  Synthetic
ggagguuggggacugcgaauuuug

SEQ ID NO: 57943 - RNA, 18 nt, Artificial Sequence
  Synthetic
  misc_feature (6)..(6): n is a, c, g, or u
  misc_feature (18)..(18): n is a, c, g, or u
cgaacngacgggaagaan

SEQ ID NO: 57944 - RNA, 19 nt, Artificial Sequence
  Synthetic
  misc_feature (7)..(7): n is a, c, g, or u
  misc_feature (19)..(19): n is a, c, g, or u
ccgaacngacgggaagaan

SEQ ID NO: 57945 - RNA, 20 nt, Artificial Sequence
  Synthetic
  misc_feature (8)..(8): n is a, c, g, or u
  misc_feature (20)..(20): n is a, c, g, or u
cccgaacngacgggaagaan

SEQ ID NO: 57946 - RNA, 21 nt, Artificial Sequence
  Synthetic
  misc_feature (9)..(9): n is a, c, g, or u
  misc_feature (21)..(21): n is a, c, g, or u
ucccgaacngacgggaagaan

SEQ ID NO: 57947 - RNA, 22 nt, Artificial Sequence
  Synthetic
  misc_feature (10)..(10): n is a, c, g, or u
  misc_feature (22)..(22): n is a, c, g, or u
gucccgaacngacgggaagaan

SEQ ID NO: 57948 - RNA, 23 nt, Artificial Sequence
  Synthetic
  misc_feature (11)..(11): n is a, c, g, or u
  misc_feature (23)..(23): n is a, c, g, or u
ggucccgaacngacgggaagaan

SEQ ID NO: 57949 - RNA, 24 nt, Artificial Sequence
  Synthetic
  misc_feature (12)..(12): n is a, c, g, or u
  misc_feature (24)..(24): n is a, c, g, or u
aggucccgaacngacgggaagaan

SEQ ID NO: 57950 - RNA, 18 nt, Artificial Sequence
  Synthetic
  misc_feature (7)..(7): n is a, c, g, or u
  misc_feature (18)..(18): n is a, c, g, or u
ggucgungauccuggaan

SEQ ID NO: 57951 - RNA, 19 nt, Artificial Sequence
  Synthetic
  misc_feature (8)..(8): n is a, c, g, or u
  misc_feature (19)..(19): n is a, c, g, or u
uggucgungauccuggaan

SEQ ID NO: 57952 - RNA, 20 nt, Artificial Sequence
  Synthetic
  misc_feature (9)..(9): n is a, c, g, or u
  misc_feature (20)..(20): n is a, c, g, or u
guggucgungauccuggaan

SEQ ID NO: 57953 - RNA, 21 nt, Artificial Sequence
  Synthetic
  misc_feature (10)..(10): n is a, c, g, or u
  misc_feature (21)..(21): n is a, c, g, or u
gguggucgungauccuggaan

SEQ ID NO: 57954 - RNA, 22 nt, Artificial Sequence
  Synthetic
  misc_feature (11)..(11): n is a, c, g, or u
  misc_feature (22)..(22): n is a, c, g, or u
ugguggucgungauccuggaan

SEQ ID NO: 57955 - RNA, 23 nt, Artificial Sequence
  Synthetic
  misc_feature (12)..(12): n is a, c, g, or u
  misc_feature (23)..(23): n is a, c, g, or u
cugguggucgungauccuggaan

SEQ ID NO: 57956 - RNA, 24 nt, Artificial Sequence
  Synthetic
  misc_feature (13)..(13): n is a, c, g, or u
  misc_feature (24)..(24): n is a, c, g, or u
gcugguggucgungauccuggaan

SEQ ID NO: 57957 - RNA, 18 nt, Artificial Sequence
  Synthetic
  misc_feature (12)..(12): n is a, c, g, or u
  misc_feature (18)..(18): n is a, c, g, or u
cuggaauuugcncugaan

SEQ ID NO: 57958 - RNA, 19 nt, Artificial Sequence
  Synthetic
  misc_feature (13)..(13): n is a, c, g, or u
  misc_feature (19)..(19): n is a, c, g, or u
gcuggaauuugcncugaan

SEQ ID NO: 57959 - RNA, 20 nt, Artificial Sequence
  Synthetic
  misc_feature (14)..(14): n is a, c, g, or u
  misc_feature (20)..(20): n is a, c, g, or u
ugcuggaauuugcncugaan

SEQ ID NO: 57960 - RNA, 21 nt, Artificial Sequence
  Synthetic
  misc_feature (15)..(15): n is a, c, g, or u
  misc_feature (21)..(21): n is a, c, g, or u
cugcuggaauuugcncugaan

SEQ ID NO: 57961 - RNA, 22 nt, Artificial Sequence
  Synthetic
  misc_feature (16)..(16): n is a, c, g, or u
  misc_feature (22)..(22): n is a, c, g, or u
acugcuggaauuugcncugaan

SEQ ID NO: 57962 - RNA, 23 nt, Artificial Sequence
  Synthetic
  misc_feature (17)..(17): n is a, c, g, or u
  misc_feature (23)..(23): n is a, c, g, or u
gacugcuggaauuugcncugaan

SEQ ID NO: 57963 - RNA, 24 nt, Artificial Sequence
  Synthetic
  misc_feature (18)..(18): n is a, c, g, or u
  misc_feature (24)..(24): n is a, c, g, or u
ggacugcuggaauuugcncugaan

SEQ ID NO: 57964 - RNA, 18 nt, Artificial Sequence
  Synthetic
  misc_feature (13)..(13): n is a, c, g, or u
  misc_feature (18)..(18): n is a, c, g, or u
aggaaaauauuunguaan

SEQ ID NO: 57965 - RNA, 19 nt, Artificial Sequence
  Synthetic
  misc_feature (1)..(1): n is a, c, g, or u
  misc_feature (14)..(14): n is a, c, g, or u
  misc_feature (19)..(19): n is a, c, g, or u
naggaaaauauuunguaan

SEQ ID NO: 57966 - RNA, 20 nt, Artificial Sequence
  Synthetic
  misc_feature (2)..(2): n is a, c, g, or u
  misc_feature (15)..(15): n is a, c, g, or u
  misc_feature (20)..(20): n is a, c, g, or u
anaggaaaauauuunguaan

SEQ ID NO: 57967 - RNA, 21 nt, Artificial Sequence
  Synthetic
  misc_feature (3)..(3): n is a, c, g, or u
  misc_feature (16)..(16): n is a, c, g, or u
  misc_feature (21)..(21): n is a, c, g, or u
canaggaaaauauuunguaan

SEQ ID NO: 57968 - RNA, 22 nt, Artificial Sequence
  Synthetic
  misc_feature (4)..(4): n is a, c, g, or u
  misc_feature (17)..(17): n is a, c, g, or u
  misc_feature (22)..(22): n is a, c, g, or u
ccanaggaaaauauuunguaan

SEQ ID NO: 57969 - RNA, 23 nt, Artificial Sequence
  Synthetic
  misc_feature (5)..(5): n is a, c, g, or u
  misc_feature (18)..(18): n is a, c, g, or u
  misc_feature (23)..(23): n is a, c, g, or u
uccanaggaaaauauuunguaan

SEQ ID NO: 57970 - RNA, 24 nt, Artificial Sequence
  Synthetic
  misc_feature (1)..(1): n is a, c, g, or u
  misc_feature (6)..(6): n is a, c, g, or u
  misc_feature (19)..(19): n is a, c, g, or u
  misc_feature (24)..(24): n is a, c, g, or u
nuccanaggaaaauauuunguaan

SEQ ID NO: 57971 - RNA, 18 nt, Artificial Sequence
  Synthetic
  misc_feature (18)..(18): n is a, c, g, or u
auccaguuggcagcacan

SEQ ID NO: 57972 - RNA, 19 nt, Artificial Sequence
  Synthetic
  misc_feature (19)..(19): n is a, c, g, or u
gauccaguuggcagcacan

SEQ ID NO: 57973 - RNA, 20 nt, Artificial Sequence
  Synthetic
  misc_feature (20)..(20): n is a, c, g, or u
ggauccaguuggcagcacan

SEQ ID NO: 57974 - RNA, 21 nt, Artificial Sequence
  Synthetic
  misc_feature (21)..(21): n is a, c, g, or u
aggauccaguuggcagcacan

SEQ ID NO: 57975 - RNA, 22 nt, Artificial Sequence
  Synthetic
  misc_feature (1)..(1): n is a, c, g, or u
  misc_feature (22)..(22): n is a, c, g, or u
naggauccaguuggcagcacan

SEQ ID NO: 57976 - RNA, 23 nt, Artificial Sequence
  Synthetic
  misc_feature (2)..(2): n is a, c, g, or u
  misc_feature (23)..(23): n is a, c, g, or u
gnaggauccaguuggcagcacan

SEQ ID NO: 57977 - RNA, 24 nt, Artificial Sequence
  Synthetic
  misc_feature (3)..(3): n is a, c, g, or u
  misc_feature (24)..(24): n is a, c, g, or u
cgnaggauccaguuggcagcacan

SEQ ID NO: 57978 - RNA, 18 nt, Artificial Sequence
  Synthetic
  misc_feature (9)..(9): n is a, c, g, or u
  misc_feature (14)..(14): n is a, c, g, or u
  misc_feature (18)..(18): n is a, c, g, or u
uucauguanuguunacan

SEQ ID NO: 57979 - RNA, 19 nt, Artificial Sequence
  Synthetic
  misc_feature (10)..(10): n is a, c, g, or u
  misc_feature (15)..(15): n is a, c, g, or u
  misc_feature (19)..(19): n is a, c, g, or u
guucauguanuguunacan

SEQ ID NO: 57980 - RNA, 20 nt, Artificial Sequence
  Synthetic
  misc_feature (11)..(11): n is a, c, g, or u
  misc_feature (16)..(16): n is a, c, g, or u
  misc_feature (20)..(20): n is a, c, g, or u
gguucauguanuguunacan

SEQ ID NO: 57981 - RNA, 21 nt, Artificial Sequence
  Synthetic
  misc_feature (12)..(12): n is a, c, g, or u
  misc_feature (17)..(17): n is a, c, g, or u
  misc_feature (21)..(21): n is a, c, g, or u
agguucauguanuguunacan

SEQ ID NO: 57982 - RNA, 22 nt, Artificial Sequence
  Synthetic
  misc_feature (13)..(13): n is a, c, g, or u
  misc_feature (18)..(18): n is a, c, g, or u
  misc_feature (22)..(22): n is a, c, g, or u
aagguucauguanuguunacan

SEQ ID NO: 57983 - RNA, 23 nt, Artificial Sequence
  Synthetic
  misc_feature (14)..(14): n is a, c, g, or u
  misc_feature (19)..(19): n is a, c, g, or u
  misc_feature (23)..(23): n is a, c, g, or u
aaagguucauguanuguunacan

SEQ ID NO: 57984 - RNA, 24 nt, Artificial Sequence
  Synthetic
  misc_feature (15)..(15): n is a, c, g, or u
  misc_feature (20)..(20): n is a, c, g, or u
  misc_feature (24)..(24): n is a, c, g, or u
uaaagguucauguanuguunacan

SEQ ID NO: 57985 - RNA, 18 nt, Artificial Sequence
  Synthetic
  misc_feature (9)..(9): n is a, c, g, or u
  misc_feature (18)..(18): n is a, c, g, or u
gucauuaanucaccccan

SEQ ID NO: 57986 - RNA, 19 nt, Artificial Sequence
  Synthetic
  misc_feature (10)..(10): n is a, c, g, or u
  misc_feature (19)..(19): n is a, c, g, or u
agucauuaanucaccccan

SEQ ID NO: 57987 - RNA, 20 nt, Artificial Sequence
  Synthetic
  misc_feature (11)..(11): n is a, c, g, or u
  misc_feature (20)..(20): n is a, c, g, or u
aagucauuaanucaccccan

SEQ ID NO: 57988 - RNA, 21 nt, Artificial Sequence
  Synthetic
  misc_feature (12)..(12): n is a, c, g, or u
  misc_feature (21)..(21): n is a, c, g, or u
aaagucauuaanucaccccan

SEQ ID NO: 57989 - RNA, 22 nt, Artificial Sequence
  Synthetic
  misc_feature (13)..(13): n is a, c, g, or u
  misc_feature (22)..(22): n is a, c, g, or u
caaagucauuaanucaccccan

SEQ ID NO: 57990 - RNA, 23 nt, Artificial Sequence
  Synthetic
  misc_feature (14)..(14): n is a, c, g, or u
  misc_feature (23)..(23): n is a, c, g, or u
ccaaagucauuaanucaccccan

SEQ ID NO: 57991 - RNA, 24 nt, Artificial Sequence
  Synthetic
  misc_feature (15)..(15): n is a, c, g, or u
  misc_feature (24)..(24): n is a, c, g, or u
gccaaagucauuaanucaccccan

SEQ ID NO: 57992 - RNA, 18 nt, Artificial Sequence
  Synthetic
  misc_feature (4)..(4): n is a, c, g, or u
  misc_feature (18)..(18): n is a, c, g, or u
uuunuguugaagucccan

SEQ ID NO: 57993 - RNA, 19 nt, Artificial Sequence
  Synthetic
  misc_feature (5)..(5): n is a, c, g, or u
  misc_feature (19)..(19): n is a, c, g, or u
guuunuguugaagucccan

SEQ ID NO: 57994 - RNA, 20 nt, Artificial Sequence
  Synthetic
  misc_feature (6)..(6): n is a, c, g, or u
  misc_feature (20)..(20): n is a, c, g, or u
uguuunuguugaagucccan

SEQ ID NO: 57995 - RNA, 21 nt, Artificial Sequence
  Synthetic
  misc_feature (7)..(7): n is a, c, g, or u
  misc_feature (21)..(21): n is a, c, g, or u
uuguuunuguugaagucccan

SEQ ID NO: 57996 - RNA, 22 nt, Artificial Sequence
  Synthetic
  misc_feature (8)..(8): n is a, c, g, or u
  misc_feature (22)..(22): n is a, c, g, or u
cuuguuunuguugaagucccan

SEQ ID NO: 57997 - RNA, 23 nt, Artificial Sequence
  Synthetic
  misc_feature (9)..(9): n is a, c, g, or u
  misc_feature (23)..(23): n is a, c, g, or u
ccuuguuunuguugaagucccan

SEQ ID NO: 57998 - RNA, 24 nt, Artificial Sequence
  Synthetic
  misc_feature (10)..(10): n is a, c, g, or u
  misc_feature (24)..(24): n is a, c, g, or u
uccuuguuunuguugaagucccan

SEQ ID NO: 57999 - RNA, 18 nt, Artificial Sequence
  Synthetic
  misc_feature (7)..(7): n is a, c, g, or u
  misc_feature (10)..(10): n is a, c, g, or u
  misc_feature (13)..(13): n is a, c, g, or u
  misc_feature (18)..(18): n is a, c, g, or u
uuuaaunccnuunuccan

SEQ ID NO: 58000 - RNA, 19 nt, Artificial Sequence
  Synthetic
  misc_feature (8)..(8): n is a, c, g, or u
  misc_feature (11)..(11): n is a, c, g, or u
  misc_feature (14)..(14): n is a, c, g, or u
  misc_feature (19)..(19): n is a, c, g, or u
guuuaaunccnuunuccan

SEQ ID NO: 58001 - RNA, 20 nt, Artificial Sequence
  Synthetic
  misc_feature (9)..(9): n is a, c, g, or u
  misc_feature (12)..(12): n is a, c, g, or u
  misc_feature (15)..(15): n is a, c, g, or u
  misc_feature (20)..(20): n is a, c, g, or u
gguuuaaunccnuunuccan

SEQ ID NO: 58002 - RNA, 21 nt, Artificial Sequence
  Synthetic
  misc_feature (1)..(1): n is a, c, g, or u
  misc_feature (10)..(10): n is a, c, g, or u
  misc_feature (13)..(13): n is a, c, g, or u
  misc_feature (16)..(16): n is a, c, g, or u
  misc_feature (21)..(21): n is a, c, g, or u
ngguuuaaunccnuunuccan

SEQ ID NO: 58003 - RNA, 22 nt, Artificial Sequence
  Synthetic
  misc_feature (2)..(2): n is a, c, g, or u
  misc_feature (11)..(11): n is a, c, g, or u
  misc_feature (14)..(14): n is a, c, g, or u
  misc_feature (17)..(17): n is a, c, g, or u
  misc_feature (22)..(22): n is a, c, g, or u
angguuuaaunccnuunuccan

SEQ ID NO: 58004 - RNA, 23 nt, Artificial Sequence
  Synthetic
  misc_feature (3)..(3): n is a, c, g, or u
  misc_feature (12)..(12): n is a, c, g, or u
  misc_feature (15)..(15): n is a, c, g, or u
  misc_feature (18)..(18): n is a, c, g, or u
  misc_feature (23)..(23): n is a, c, g, or u
uangguuuaaunccnuunuccan

SEQ ID NO: 58005 - RNA, 24 nt, Artificial Sequence
  Synthetic
  misc_feature (4)..(4): n is a, c, g, or u
  misc_feature (13)..(13): n is a, c, g, or u
  misc_feature (16)..(16): n is a, c, g, or u
  misc_feature (19)..(19): n is a, c, g, or u
  misc_feature (24)..(24): n is a, c, g, or u
auangguuuaaunccnuunuccan

SEQ ID NO: 58006 - RNA, 18 nt, Artificial Sequence
  Synthetic
  misc_feature (18)..(18): n is a, c, g, or u
gaggguuuggaacagcan

SEQ ID NO: 58007 - RNA, 19 nt, Artificial Sequence
  Synthetic
  misc_feature (19)..(19): n is a, c, g, or u
cgaggguuuggaacagcan

SEQ ID NO: 58008 - RNA, 20 nt, Artificial Sequence
  Synthetic
  misc_feature (20)..(20): n is a, c, g, or u
ccgaggguuuggaacagcan

SEQ ID NO: 58009 - RNA, 21 nt, Artificial Sequence
  Synthetic
  misc_feature (21)..(21): n is a, c, g, or u
uccgaggguuuggaacagcan

SEQ ID NO: 58010 - RNA, 22 nt, Artificial Sequence
  Synthetic
  misc_feature (22)..(22): n is a, c, g, or u
guccgaggguuuggaacagcan

SEQ ID NO: 58011 - RNA, 23 nt, Artificial Sequence
  Synthetic
  misc_feature (23)..(23): n is a, c, g, or u
cguccgaggguuuggaacagcan

SEQ ID NO: 58012 - RNA, 24 nt, Artificial Sequence
  Synthetic
  misc_feature (24)..(24): n is a, c, g, or u
ccguccgaggguuuggaacagcan

SEQ ID NO: 58013 - RNA, 18 nt, Artificial Sequence
  Synthetic
  misc_feature (15)..(15): n is a, c, g, or u
  misc_feature (18)..(18): n is a, c, g, or u
gguuuggaacagcancan

SEQ ID NO: 58014 - RNA, 19 nt, Artificial Sequence
  Synthetic
  misc_feature (16)..(16): n is a, c, g, or u
  misc_feature (19)..(19): n is a, c, g, or u
ggguuuggaacagcancan

SEQ ID NO: 58015 - RNA, 20 nt, Artificial Sequence
  Synthetic
  misc_feature (17)..(17): n is a, c, g, or u
  misc_feature (20)..(20): n is a, c, g, or u
aggguuuggaacagcancan

SEQ ID NO: 58016 - RNA, 21 nt, Artificial Sequence
  Synthetic
  misc_feature (18)..(18): n is a, c, g, or u
  misc_feature (21)..(21): n is a, c, g, or u
gaggguuuggaacagcancan

SEQ ID NO: 58017 - RNA, 22 nt, Artificial Sequence
  Synthetic
  misc_feature (19)..(19): n is a, c, g, or u
  misc_feature (22)..(22): n is a, c, g, or u
cgaggguuuggaacagcancan

SEQ ID NO: 58018 - RNA, 23 nt, Artificial Sequence
  Synthetic
  misc_feature (20)..(20): n is a, c, g, or u
  misc_feature (23)..(23): n is a, c, g, or u
ccgaggguuuggaacagcancan

SEQ ID NO: 58019 - RNA, 24 nt, Artificial Sequence
  Synthetic
  misc_feature (21)..(21): n is a, c, g, or u
  misc_feature (24)..(24): n is a, c, g, or u
uccgaggguuuggaacagcancan

SEQ ID NO: 58020 - RNA, 18 nt, Artificial Sequence
  Synthetic
  misc_feature (2)..(2): n is a, c, g, or u
  misc_feature (6)..(6): n is a, c, g, or u
  misc_feature (15)..(15): n is a, c, g, or u
  misc_feature (18)..(18): n is a, c, g, or u
gnaggnacaguagangan

SEQ ID NO: 58021 - RNA, 19 nt, Artificial Sequence
  Synthetic
  misc_feature (3)..(3): n is a, c, g, or u
  misc_feature (7)..(7): n is a, c, g, or u
  misc_feature (16)..(16): n is a, c, g, or u
  misc_feature (19)..(19): n is a, c, g, or u
agnaggnacaguagangan

SEQ ID NO: 58022 - RNA, 20 nt, Artificial Sequence
  Synthetic
  misc_feature (4)..(4): n is a, c, g, or u
  misc_feature (8)..(8): n is a, c, g, or u
  misc_feature (17)..(17): n is a, c, g, or u
  misc_feature (20)..(20): n is a, c, g, or u
aagnaggnacaguagangan

SEQ ID NO: 58023 - RNA, 21 nt, Artificial Sequence
  Synthetic
  misc_feature (5)..(5): n is a, c, g, or u
  misc_feature (9)..(9): n is a, c, g, or u
  misc_feature (18)..(18): n is a, c, g, or u
  misc_feature (21)..(21): n is a, c, g, or u
aaagnaggnacaguagangan

SEQ ID NO: 58024 - RNA, 22 nt, Artificial Sequence
  Synthetic
  misc_feature (1)..(1): n is a, c, g, or u
  misc_feature (6)..(6): n is a, c, g, or u
  misc_feature (10)..(10): n is a, c, g, or u
  misc_feature (19)..(19): n is a, c, g, or u
  misc_feature (22)..(22): n is a, c, g, or u
naaagnaggnacaguagangan

SEQ ID NO: 58025 - RNA, 23 nt, Artificial Sequence
  Synthetic
  misc_feature (2)..(2): n is a, c, g, or u
  misc_feature (7)..(7): n is a, c, g, or u
  misc_feature (11)..(11): n is a, c, g, or u
  misc_feature (20)..(20): n is a, c, g, or u
  misc_feature (23)..(23): n is a, c, g, or u
unaaagnaggnacaguagangan

SEQ ID NO: 58026 - RNA, 24 nt, Artificial Sequence
  Synthetic
  misc_feature (3)..(3): n is a, c, g, or u
  misc_feature (8)..(8): n is a, c, g, or u
  misc_feature (12)..(12): n is a, c, g, or u
  misc_feature (21)..(21): n is a, c, g, or u
  misc_feature (24)..(24): n is a, c, g, or u
uunaaagnaggnacaguagangan

SEQ ID NO: 58027 - RNA, 18 nt, Artificial Sequence
  Synthetic
  misc_feature (12)..(12): n is a, c, g, or u
  misc_feature (18)..(18): n is a, c, g, or u
gugcaauguucnggugan

SEQ ID NO: 58028 - RNA, 19 nt, Artificial Sequence
  Synthetic
  misc_feature (1)..(1): n is a, c, g, or u
  misc_feature (13)..(13): n is a, c, g, or u
  misc_feature (19)..(19): n is a, c, g, or u
ngugcaauguucnggugan

SEQ ID NO: 58029 - RNA, 20 nt, Artificial Sequence
  Synthetic
  misc_feature (2)..(2): n is a, c, g, or u
  misc_feature (14)..(14): n is a, c, g, or u
  misc_feature (20)..(20): n is a, c, g, or u
gngugcaauguucnggugan

SEQ ID NO: 58030 - RNA, 21 nt, Artificial Sequence
  Synthetic
  misc_feature (3)..(3): n is a, c, g, or u
  misc_feature (15)..(15): n is a, c, g, or u
  misc_feature (21)..(21): n is a, c, g, or u
ggngugcaauguucnggugan

SEQ ID NO: 58031 - RNA, 22 nt, Artificial Sequence
  Synthetic
  misc_feature (1)..(1): n is a, c, g, or u
  misc_feature (4)..(4): n is a, c, g, or u
  misc_feature (16)..(16): n is a, c, g, or u
  misc_feature (22)..(22): n is a, c, g, or u
nggngugcaauguucnggugan

SEQ ID NO: 58032 - RNA, 23 nt, Artificial Sequence
  Synthetic
  misc_feature (2)..(2): n is a, c, g, or u
  misc_feature (5)..(5): n is a, c, g, or u
  misc_feature (17)..(17): n is a, c, g, or u
  misc_feature (23)..(23): n is a, c, g, or u
unggngugcaauguucnggugan

SEQ ID NO: 58033 - RNA, 24 nt, Artificial Sequence
  Synthetic
  misc_feature (3)..(3): n is a, c, g, or u
  misc_feature (6)..(6): n is a, c, g, or u
  misc_feature (18)..(18): n is a, c, g, or u
  misc_feature (24)..(24): n is a, c, g, or u
uunggngugcaauguucnggugan

SEQ ID NO: 58034 - RNA, 18 nt, Artificial Sequence
  Synthetic
  misc_feature (18)..(18): n is a, c, g, or u
uuccggaaguguggauan

SEQ ID NO: 58035 - RNA, 19 nt, Artificial Sequence
  Synthetic
  misc_feature (19)..(19): n is a, c, g, or u
uuuccggaaguguggauan

SEQ ID NO: 58036 - RNA, 20 nt, Artificial Sequence
  Synthetic
  misc_feature (20)..(20): n is a, c, g, or u
guuuccggaaguguggauan

SEQ ID NO: 58037 - RNA, 21 nt, Artificial Sequence
  Synthetic
  misc_feature (21)..(21): n is a, c, g, or u
aguuuccggaaguguggauan

SEQ ID NO: 58038 - RNA, 22 nt, Artificial Sequence
  Synthetic
  misc_feature (22)..(22): n is a, c, g, or u
uaguuuccggaaguguggauan

SEQ ID NO: 58039 - RNA, 23 nt, Artificial Sequence
  Synthetic
  misc_feature (23)..(23): n is a, c, g, or u
guaguuuccggaaguguggauan

SEQ ID NO: 58040 - RNA, 24 nt, Artificial Sequence
  Synthetic
  misc_feature (24)..(24): n is a, c, g, or u
aguaguuuccggaaguguggauan

SEQ ID NO: 58041 - RNA, 18 nt, Artificial Sequence
  Synthetic
  misc_feature (18)..(18): n is a, c, g, or u
augccuacagccuccuan

SEQ ID NO: 58042 - RNA, 19 nt, Artificial Sequence
  Synthetic
  misc_feature (19)..(19): n is a, c, g, or u
uaugccuacagccuccuan

SEQ ID NO: 58043 - RNA, 20 nt, Artificial Sequence
  Synthetic
  misc_feature (20)..(20): n is a, c, g, or u
uuaugccuacagccuccuan

SEQ ID NO: 58044 - RNA, 21 nt, Artificial Sequence
  Synthetic
  misc_feature (21)..(21): n is a, c, g, or u
uuuaugccuacagccuccuan

SEQ ID NO: 58045 - RNA, 22 nt, Artificial Sequence
  Synthetic
  misc_feature (22)..(22): n is a, c, g, or u
auuuaugccuacagccuccuan

SEQ ID NO: 58046 - RNA, 23 nt, Artificial Sequence
  Synthetic
  misc_feature (23)..(23): n is a, c, g, or u
aauuuaugccuacagccuccuan

SEQ ID NO: 58047 - RNA, 24 nt, Artificial Sequence
  Synthetic
  misc_feature (24)..(24): n is a, c, g, or u
caauuuaugccuacagccuccuan

SEQ ID NO: 58048 - RNA, 18 nt, Artificial Sequence
  Synthetic
  misc_feature (18)..(18): n is a, c, g, or u
ucgaguaggucccgaacn

SEQ ID NO: 58049 - RNA, 19 nt, Artificial Sequence
  Synthetic
  misc_feature (19)..(19): n is a, c, g, or u
gucgaguaggucccgaacn

SEQ ID NO: 58050 - RNA, 20 nt, Artificial Sequence
  Synthetic
  misc_feature (20)..(20): n is a, c, g, or u
ugucgaguaggucccgaacn

SEQ ID NO: 58051 - RNA, 21 nt, Artificial Sequence
  Synthetic
  misc_feature (21)..(21): n is a, c, g, or u
gugucgaguaggucccgaacn

SEQ ID NO: 58052 - RNA, 22 nt, Artificial Sequence
  Synthetic
  misc_feature (22)..(22): n is a, c, g, or u
ggugucgaguaggucccgaacn

SEQ ID NO: 58053 - RNA, 23 nt, Artificial Sequence
  Synthetic
  misc_feature (23)..(23): n is a, c, g, or u
cggugucgaguaggucccgaacn

SEQ ID NO: 58054 - RNA, 24 nt, Artificial Sequence
  Synthetic
  misc_feature (24)..(24): n is a, c, g, or u
gcggugucgaguaggucccgaacn

SEQ ID NO: 58055 - RNA, 18 nt, Artificial Sequence
  Synthetic
  misc_feature (18)..(18): n is a, c, g, or u
uuugguggucuauaagcn

SEQ ID NO: 58056 - RNA, 19 nt, Artificial Sequence
  Synthetic
  misc_feature (19)..(19): n is a, c, g, or u
auuugguggucuauaagcn

SEQ ID NO: 58057 - RNA, 20 nt, Artificial Sequence
  Synthetic
  misc_feature (20)..(20): n is a, c, g, or u
cauuugguggucuauaagcn

SEQ ID NO: 58058 - RNA, 21 nt, Artificial Sequence
  Synthetic
  misc_feature (21)..(21): n is a, c, g, or u
gcauuugguggucuauaagcn

SEQ ID NO: 58059 - RNA, 22 nt, Artificial Sequence
  Synthetic
  misc_feature (22)..(22): n is a, c, g, or u
ggcauuugguggucuauaagcn

SEQ ID NO: 58060 - RNA, 23 nt, Artificial Sequence
  Synthetic
  misc_feature (23)..(23): n is a, c, g, or u
gggcauuugguggucuauaagcn

SEQ ID NO: 58061 - RNA, 24 nt, Artificial Sequence
  Synthetic
  misc_feature (24)..(24): n is a, c, g, or u
ggggcauuugguggucuauaagcn

SEQ ID NO: 58062 - RNA, 18 nt, Artificial Sequence
  Synthetic
  misc_feature (6)..(6): n is a, c, g, or u
  misc_feature (9)..(9): n is a, c, g, or u
  misc_feature (12)..(12): n is a, c, g, or u
  misc_feature (15)..(15): n is a, c, g, or u
  misc_feature (18)..(18): n is a, c, g, or u
cauugngunaanggngcn

SEQ ID NO: 58063 - RNA, 19 nt, Artificial Sequence
  Synthetic
  misc_feature (7)..(7): n is a, c, g, or u
  misc_feature (10)..(10): n is a, c, g, or u
  misc_feature (13)..(13): n is a, c, g, or u
  misc_feature (16)..(16): n is a, c, g, or u
  misc_feature (19)..(19): n is a, c, g, or u
acauugngunaanggngcn

SEQ ID NO: 58064 - RNA, 20 nt, Artificial Sequence
  Synthetic
  misc_feature (8)..(8): n is a, c, g, or u
  misc_feature (11)..(11): n is a, c, g, or u
  misc_feature (14)..(14): n is a, c, g, or u
  misc_feature (17)..(17): n is a, c, g, or u
  misc_feature (20)..(20): n is a, c, g, or u
cacauugngunaanggngcn

SEQ ID NO: 58065 - RNA, 21 nt, Artificial Sequence
  Synthetic
  misc_feature (9)..(9): n is a, c, g, or u
  misc_feature (12)..(12): n is a, c, g, or u
  misc_feature (15)..(15): n is a, c, g, or u
  misc_feature (18)..(18): n is a, c, g, or u
  misc_feature (21)..(21): n is a, c, g, or u
ccacauugngunaanggngcn

SEQ ID NO: 58066 - RNA, 22 nt, Artificial Sequence
  Synthetic
  misc_feature (10)..(10): n is a, c, g, or u
  misc_feature (13)..(13): n is a, c, g, or u
  misc_feature (16)..(16): n is a, c, g, or u
  misc_feature (19)..(19): n is a, c, g, or u
  misc_feature (22)..(22): n is a, c, g, or u
accacauugngunaanggngcn

SEQ ID NO: 58067 - RNA, 23 nt, Artificial Sequence
  Synthetic
  misc_feature (11)..(11): n is a, c, g, or u
  misc_feature (14)..(14): n is a, c, g, or u
  misc_feature (17)..(17): n is a, c, g, or u
  misc_feature (20)..(20): n is a, c, g, or u
  misc_feature (23)..(23): n is a, c, g, or u
aaccacauugngunaanggngcn

SEQ ID NO: 58068 - RNA, 24 nt, Artificial Sequence
  Synthetic
  misc_feature (12)..(12): n is a, c, g, or u
  misc_feature (15)..(15): n is a, c, g, or u
  misc_feature (18)..(18): n is a, c, g, or u
  misc_feature (21)..(21): n is a, c, g, or u
  misc_feature (24)..(24): n is a, c, g, or u
uaaccacauugngunaanggngcn

SEQ ID NO: 58069 - RNA, 18 nt, Artificial Sequence
  Synthetic
  misc_feature (3)..(3): n is a, c, g, or u
  misc_feature (8)..(9): n is a, c, g, or u
  misc_feature (15)..(15): n is a, c, g, or u
  misc_feature (18)..(18): n is a, c, g, or u
acnacuannucccungcn

SEQ ID NO: 58070 - RNA, 19 nt, Artificial Sequence
  Synthetic
  misc_feature (4)..(4): n is a, c, g, or u
  misc_feature (9)..(10): n is a, c, g, or u
  misc_feature (16)..(16): n is a, c, g, or u
  misc_feature (19)..(19): n is a, c, g, or u
aacnacuannucccungcn

SEQ ID NO: 58071 - RNA, 20 nt, Artificial Sequence
  Synthetic
  misc_feature (5)..(5): n is a, c, g, or u
  misc_feature (10)..(11): n is a, c, g, or u
  misc_feature (17)..(17): n is a, c, g, or u
  misc_feature (20)..(20): n is a, c, g, or u
uaacnacuannucccungcn

SEQ ID NO: 58072 - RNA, 21 nt, Artificial Sequence
  Synthetic
  misc_feature (6)..(6): n is a, c, g, or u
  misc_feature (11)..(12): n is a, c, g, or u
  misc_feature (18)..(18): n is a, c, g, or u
  misc_feature (21)..(21): n is a, c, g, or u
uuaacnacuannucccungcn

SEQ ID NO: 58073 - RNA, 22 nt, Artificial Sequence
  Synthetic
  misc_feature (7)..(7): n is a, c, g, or u
  misc_feature (12)..(13): n is a, c, g, or u
  misc_feature (19)..(19): n is a, c, g, or u
  misc_feature (22)..(22): n is a, c, g, or u
guuaacnacuannucccungcn

SEQ ID NO: 58074 - RNA, 23 nt, Artificial Sequence
  Synthetic
  misc_feature (8)..(8): n is a, c, g, or u
  misc_feature (13)..(14): n is a, c, g, or u
  misc_feature (20)..(20): n is a, c, g, or u
  misc_feature (23)..(23): n is a, c, g, or u
aguuaacnacuannucccungcn

SEQ ID NO: 58075 - RNA, 24 nt, Artificial Sequence
  Synthetic
  misc_feature (9)..(9): n is a, c, g, or u
  misc_feature (14)..(15): n is a, c, g, or u
  misc_feature (21)..(21): n is a, c, g, or u
  misc_feature (24)..(24): n is a, c, g, or u
uaguuaacnacuannucccungcn

SEQ ID NO: 58076 - RNA, 18 nt, Artificial Sequence
  Synthetic
  misc_feature (18)..(18): n is a, c, g, or u
ggacugcuggaauuugcn

SEQ ID NO: 58077 - RNA, 19 nt, Artificial Sequence
  Synthetic
  misc_feature (19)..(19): n is a, c, g, or u
gggacugcuggaauuugcn

SEQ ID NO: 58078 - RNA, 20 nt, Artificial Sequence
  Synthetic
  misc_feature (20)..(20): n is a, c, g, or u
cgggacugcuggaauuugcn

SEQ ID NO: 58079 - RNA, 21 nt, Artificial Sequence
  Synthetic
  misc_feature (21)..(21): n is a, c, g, or u
ucgggacugcuggaauuugcn

SEQ ID NO: 58080 - RNA, 22 nt, Artificial Sequence
  Synthetic
  misc_feature (1)..(1): n is a, c, g, or u
  misc_feature (22)..(22): n is a, c, g, or u
nucgggacugcuggaauuugcn

SEQ ID NO: 58081 - RNA, 23 nt, Artificial Sequence
  Synthetic
  misc_feature (2)..(2): n is a, c, g, or u
  misc_feature (23)..(23): n is a, c, g, or u
anucgggacugcuggaauuugcn

SEQ ID NO: 58082 - RNA, 24 nt, Artificial Sequence
  Synthetic
  misc_feature (3)..(3): n is a, c, g, or u
  misc_feature (24)..(24): n is a, c, g, or u
canucgggacugcuggaauuugcn

SEQ ID NO: 58083 - RNA, 18 nt, Artificial Sequence
  Synthetic
  misc_feature (13)..(13): n is a, c, g, or u
  misc_feature (16)..(16): n is a, c, g, or u
  misc_feature (18)..(18): n is a, c, g, or u
gacuguuggcaancuncn

SEQ ID NO: 58084 - RNA, 19 nt, Artificial Sequence
  Synthetic
  misc_feature (14)..(14): n is a, c, g, or u
  misc_feature (17)..(17): n is a, c, g, or u
  misc_feature (19)..(19): n is a, c, g, or u
agacuguuggcaancuncn

SEQ ID NO: 58085 - RNA, 20 nt, Artificial Sequence
  Synthetic
  misc_feature (15)..(15): n is a, c, g, or u
  misc_feature (18)..(18): n is a, c, g, or u
  misc_feature (20)..(20): n is a, c, g, or u
aagacuguuggcaancuncn

SEQ ID NO: 58086 - RNA, 21 nt, Artificial Sequence
  Synthetic
  misc_feature (16)..(16): n is a, c, g, or u
  misc_feature (19)..(19): n is a, c, g, or u
  misc_feature (21)..(21): n is a, c, g, or u
uaagacuguuggcaancuncn

SEQ ID NO: 58087 - RNA, 22 nt, Artificial Sequence
  Synthetic
  misc_feature (17)..(17): n is a, c, g, or u
  misc_feature (20)..(20): n is a, c, g, or u
  misc_feature (22)..(22): n is a, c, g, or u
guaagacuguuggcaancuncn

SEQ ID NO: 58088 - RNA, 23 nt, Artificial Sequence
  Synthetic
  misc_feature (18)..(18): n is a, c, g, or u
  misc_feature (21)..(21): n is a, c, g, or u
  misc_feature (23)..(23): n is a, c, g, or u
uguaagacuguuggcaancuncn

SEQ ID NO: 58089 - RNA, 24 nt, Artificial Sequence
  Synthetic
  misc_feature (19)..(19): n is a, c, g, or u
  misc_feature (22)..(22): n is a, c, g, or u
  misc_feature (24)..(24): n is a, c, g, or u
auguaagacuguuggcaancuncn

SEQ ID NO: 58090 - RNA, 18 nt, Artificial Sequence
  Synthetic
  misc_feature (18)..(18): n is a, c, g, or u
gcccuuacccucggaucn

SEQ ID NO: 58091 - RNA, 19 nt, Artificial Sequence
  Synthetic
  misc_feature (19)..(19): n is a, c, g, or u
agcccuuacccucggaucn

SEQ ID NO: 58092 - RNA, 20 nt, Artificial Sequence
  Synthetic
  misc_feature (20)..(20): n is a, c, g, or u
gagcccuuacccucggaucn

SEQ ID NO: 58093 - RNA, 21 nt, Artificial Sequence
  Synthetic
  misc_feature (21)..(21): n is a, c, g, or u
agagcccuuacccucggaucn

SEQ ID NO: 58094 - RNA, 22 nt, Artificial Sequence
  Synthetic
  misc_feature (22)..(22): n is a, c, g, or u
cagagcccuuacccucggaucn

SEQ ID NO: 58095 - RNA, 23 nt, Artificial Sequence
  Synthetic
  misc_feature (23)..(23): n is a, c, g, or u
acagagcccuuacccucggaucn

SEQ ID NO: 58096 - RNA, 24 nt, Artificial Sequence
  Synthetic
  misc_feature (24)..(24): n is a, c, g, or u
uacagagcccuuacccucggaucn

SEQ ID NO: 58097 - RNA, 18 nt, Artificial Sequence
  Synthetic
  misc_feature (18)..(18): n is a, c, g, or u
gagcaggguucugugucn

SEQ ID NO: 58098 - RNA, 19 nt, Artificial Sequence
  Synthetic
  misc_feature (19)..(19): n is a, c, g, or u
ggagcaggguucugugucn

SEQ ID NO: 58099 - RNA, 20 nt, Artificial Sequence
  Synthetic
  misc_feature (20)..(20): n is a, c, g, or u
cggagcaggguucugugucn

SEQ ID NO: 58100 - RNA, 21 nt, Artificial Sequence
  Synthetic
  misc_feature (21)..(21): n is a, c, g, or u
ucggagcaggguucugugucn

SEQ ID NO: 58101 - RNA, 22 nt, Artificial Sequence
  Synthetic
  misc_feature (22)..(22): n is a, c, g, or u
gucggagcaggguucugugucn

SEQ ID NO: 58102 - RNA, 23 nt, Artificial Sequence
  Synthetic
  misc_feature (23)..(23): n is a, c, g, or u
agucggagcaggguucugugucn

SEQ ID NO: 58103 - RNA, 24 nt, Artificial Sequence
  Synthetic
  misc_feature (24)..(24): n is a, c, g, or u
uagucggagcaggguucugugucn

SEQ ID NO: 58104 - RNA, 18 nt, Artificial Sequence
  Synthetic
  misc_feature (6)..(6): n is a, c, g, or u
  misc_feature (9)..(9): n is a, c, g, or u
  misc_feature (15)..(15): n is a, c, g, or u
  misc_feature (18)..(18): n is a, c, g, or u
ucccungcngcaggnucn

SEQ ID NO: 58105 - RNA, 19 nt, Artificial Sequence
  Synthetic
  misc_feature (1)..(1): n is a, c, g, or u
  misc_feature (7)..(7): n is a, c, g, or u
  misc_feature (10)..(10): n is a, c, g, or u
  misc_feature (16)..(16): n is a, c, g, or u
  misc_feature (19)..(19): n is a, c, g, or u
nucccungcngcaggnucn

SEQ ID NO: 58106 - RNA, 20 nt, Artificial Sequence
  Synthetic
  misc_feature (1)..(2): n is a, c, g, or u
  misc_feature (8)..(8): n is a, c, g, or u
  misc_feature (11)..(11): n is a, c, g, or u
  misc_feature (17)..(17): n is a, c, g, or u
  misc_feature (20)..(20): n is a, c, g, or u
nnucccungcngcaggnucn

SEQ ID NO: 58107 - RNA, 21 nt, Artificial Sequence
  Synthetic
  misc_feature (2)..(3): n is a, c, g, or u
  misc_feature (9)..(9): n is a, c, g, or u
  misc_feature (12)..(12): n is a, c, g, or u
  misc_feature (18)..(18): n is a, c, g, or u
  misc_feature (21)..(21): n is a, c, g, or u
annucccungcngcaggnucn

SEQ ID NO: 58108 - RNA, 22 nt, Artificial Sequence
  Synthetic
  misc_feature (3)..(4): n is a, c, g, or u
  misc_feature (10)..(10): n is a, c, g, or u
  misc_feature (13)..(13): n is a, c, g, or u
  misc_feature (19)..(19): n is a, c, g, or u
  misc_feature (22)..(22): n is a, c, g, or u
uannucccungcngcaggnucn

SEQ ID NO: 58109 - RNA, 23 nt, Artificial Sequence
  Synthetic
  misc_feature (4)..(5): n is a, c, g, or u
  misc_feature (11)..(11): n is a, c, g, or u
  misc_feature (14)..(14): n is a, c, g, or u
  misc_feature (20)..(20): n is a, c, g, or u
  misc_feature (23)..(23): n is a, c, g, or u
cuannucccungcngcaggnucn

SEQ ID NO: 58110 - RNA, 24 nt, Artificial Sequence
  Synthetic
  misc_feature (5)..(6): n is a, c, g, or u
  misc_feature (12)..(12): n is a, c, g, or u
  misc_feature (15)..(15): n is a, c, g, or u
  misc_feature (21)..(21): n is a, c, g, or u
  misc_feature (24)..(24): n is a, c, g, or u
acuannucccungcngcaggnucn

SEQ ID NO: 58111 - RNA, 18 nt, Artificial Sequence
  Synthetic
  misc_feature (18)..(18): n is a, c, g, or u
cagggcccccagucuucn

SEQ ID NO: 58112 - RNA, 19 nt, Artificial Sequence
  Synthetic
  misc_feature (19)..(19): n is a, c, g, or u
gcagggcccccagucuucn

SEQ ID NO: 58113 - RNA, 20 nt, Artificial Sequence
  Synthetic
  misc_feature (20)..(20): n is a, c, g, or u
agcagggcccccagucuucn

SEQ ID NO: 58114 - RNA, 21 nt, Artificial Sequence
  Synthetic
  misc_feature (21)..(21): n is a, c, g, or u
uagcagggcccccagucuucn

SEQ ID NO: 58115 - RNA, 22 nt, Artificial Sequence
  Synthetic
  misc_feature (1)..(1): n is a, c, g, or u
  misc_feature (22)..(22): n is a, c, g, or u
nuagcagggcccccagucuucn

SEQ ID NO: 58116 - RNA, 23 nt, Artificial Sequence
  Synthetic
  misc_feature (2)..(2): n is a, c, g, or u
  misc_feature (23)..(23): n is a, c, g, or u
cnuagcagggcccccagucuucn

SEQ ID NO: 58117 - RNA, 24 nt, Artificial Sequence
  Synthetic
  misc_feature (3)..(3): n is a, c, g, or u
  misc_feature (24)..(24): n is a, c, g, or u
ucnuagcagggcccccagucuucn

SEQ ID NO: 58118 - RNA, 18 nt, Artificial Sequence
  Synthetic
  misc_feature (18)..(18): n is a, c, g, or u
cgagggaguucuucuucn

SEQ ID NO: 58119 - RNA, 19 nt, Artificial Sequence
  Synthetic
  misc_feature (19)..(19): n is a, c, g, or u
gcgagggaguucuucuucn

SEQ ID NO: 58120 - RNA, 20 nt, Artificial Sequence
  Synthetic
  misc_feature (20)..(20): n is a, c, g, or u
ggcgagggaguucuucuucn

SEQ ID NO: 58121 - RNA, 21 nt, Artificial Sequence
  Synthetic
  misc_feature (21)..(21): n is a, c, g, or u
aggcgagggaguucuucuucn

SEQ ID NO: 58122 - RNA, 22 nt, Artificial Sequence
  Synthetic
  misc_feature (22)..(22): n is a, c, g, or u
gaggcgagggaguucuucuucn

SEQ ID NO: 58123 - RNA, 23 nt, Artificial Sequence
  Synthetic
  misc_feature (23)..(23): n is a, c, g, or u
cgaggcgagggaguucuucuucn

SEQ ID NO: 58124 - RNA, 24 nt, Artificial Sequence
  Synthetic
  misc_feature (24)..(24): n is a, c, g, or u
gcgaggcgagggaguucuucuucn

SEQ ID NO: 58125 - RNA, 18 nt, Artificial Sequence
  Synthetic
  misc_feature (3)..(3): n is a, c, g, or u
  misc_feature (6)..(6): n is a, c, g, or u
  misc_feature (18)..(18): n is a, c, g, or u
uunggngugcaauguucn

SEQ ID NO: 58126 - RNA, 19 nt, Artificial Sequence
  Synthetic
  misc_feature (1)..(1): n is a, c, g, or u
  misc_feature (4)..(4): n is a, c, g, or u
  misc_feature (7)..(7): n is a, c, g, or u
  misc_feature (19)..(19): n is a, c, g, or u
nuunggngugcaauguucn

SEQ ID NO: 58127 - RNA, 20 nt, Artificial Sequence
  Synthetic
  misc_feature (2)..(2): n is a, c, g, or u
  misc_feature (5)..(5): n is a, c, g, or u
  misc_feature (8)..(8): n is a, c, g, or u
  misc_feature (20)..(20): n is a, c, g, or u
gnuunggngugcaauguucn

SEQ ID NO: 58128 - RNA, 21 nt, Artificial Sequence
  Synthetic
  misc_feature (3)..(3): n is a, c, g, or u
  misc_feature (6)..(6): n is a, c, g, or u
  misc_feature (9)..(9): n is a, c, g, or u
  misc_feature (21)..(21): n is a, c, g, or u
ugnuunggngugcaauguucn

SEQ ID NO: 58129 - RNA, 22 nt, Artificial Sequence
  Synthetic
  misc_feature (4)..(4): n is a, c, g, or u
  misc_feature (7)..(7): n is a, c, g, or u
  misc_feature (10)..(10): n is a, c, g, or u
  misc_feature (22)..(22): n is a, c, g, or u
augnuunggngugcaauguucn

SEQ ID NO: 58130 - RNA, 23 nt, Artificial Sequence
  Synthetic
  misc_feature (5)..(5): n is a, c, g, or u
  misc_feature (8)..(8): n is a, c, g, or u
  misc_feature (11)..(11): n is a, c, g, or u
  misc_feature (23)..(23): n is a, c, g, or u
uaugnuunggngugcaauguucn

SEQ ID NO: 58131 - RNA, 24 nt, Artificial Sequence
  Synthetic
  misc_feature (6)..(6): n is a, c, g, or u
  misc_feature (9)..(9): n is a, c, g, or u
  misc_feature (12)..(12): n is a, c, g, or u
  misc_feature (24)..(24): n is a, c, g, or u
guaugnuunggngugcaauguucn

SEQ ID NO: 58132 - RNA, 18 nt, Artificial Sequence
  Synthetic
  misc_feature (18)..(18): n is a, c, g, or u
ggcuggaacggcagacgn

SEQ ID NO: 58133 - RNA, 19 nt, Artificial Sequence
  Synthetic
  misc_feature (19)..(19): n is a, c, g, or u
cggcuggaacggcagacgn

SEQ ID NO: 58134 - RNA, 20 nt, Artificial Sequence
  Synthetic
  misc_feature (20)..(20): n is a, c, g, or u
ucggcuggaacggcagacgn

SEQ ID NO: 58135 - RNA, 21 nt, Artificial Sequence
  Synthetic
  misc_feature (21)..(21): n is a, c, g, or u
gucggcuggaacggcagacgn

SEQ ID NO: 58136 - RNA, 22 nt, Artificial Sequence
  Synthetic
  misc_feature (1)..(1): n is a, c, g, or u
  misc_feature (22)..(22): n is a, c, g, or u
ngucggcuggaacggcagacgn

SEQ ID NO: 58137 - RNA, 23 nt, Artificial Sequence
  Synthetic
  misc_feature (2)..(2): n is a, c, g, or u
  misc_feature (23)..(23): n is a, c, g, or u
ungucggcuggaacggcagacgn

SEQ ID NO: 58138 - RNA, 24 nt, Artificial Sequence
  Synthetic
  misc_feature (3)..(3): n is a, c, g, or u
  misc_feature (24)..(24): n is a, c, g, or u
gungucggcuggaacggcagacgn

SEQ ID NO: 58139 - RNA, 18 nt, Artificial Sequence
  Synthetic
  misc_feature (12)..(12): n is a, c, g, or u
  misc_feature (18)..(18): n is a, c, g, or u
agccccaagcgnccccgn

SEQ ID NO: 58140 - RNA, 19 nt, Artificial Sequence
  Synthetic
  misc_feature (1)..(1): n is a, c, g, or u
  misc_feature (13)..(13): n is a, c, g, or u
  misc_feature (19)..(19): n is a, c, g, or u
nagccccaagcgnccccgn

SEQ ID NO: 58141 - RNA, 20 nt, Artificial Sequence
  Synthetic
  misc_feature (2)..(2): n is a, c, g, or u
  misc_feature (14)..(14): n is a, c, g, or u
  misc_feature (20)..(20): n is a, c, g, or u
anagccccaagcgnccccgn

SEQ ID NO: 58142 - RNA, 21 nt, Artificial Sequence
  Synthetic
  misc_feature (3)..(3): n is a, c, g, or u
  misc_feature (15)..(15): n is a, c, g, or u
  misc_feature (21)..(21): n is a, c, g, or u
uanagccccaagcgnccccgn

SEQ ID NO: 58143 - RNA, 22 nt, Artificial Sequence
  Synthetic
  misc_feature (1)..(1): n is a, c, g, or u
  misc_feature (4)..(4): n is a, c, g, or u
  misc_feature (16)..(16): n is a, c, g, or u
  misc_feature (22)..(22): n is a, c, g, or u
nuanagccccaagcgnccccgn

SEQ ID NO: 58144 - RNA, 23 nt, Artificial Sequence
  Synthetic
  misc_feature (2)..(2): n is a, c, g, or u
  misc_feature (5)..(5): n is a, c, g, or u
  misc_feature (17)..(17): n is a, c, g, or u
  misc_feature (23)..(23): n is a, c, g, or u
gnuanagccccaagcgnccccgn

SEQ ID NO: 58145 - RNA, 24 nt, Artificial Sequence
  Synthetic
  misc_feature (3)..(3): n is a, c, g, or u
  misc_feature (6)..(6): n is a, c, g, or u
  misc_feature (18)..(18): n is a, c, g, or u
  misc_feature (24)..(24): n is a, c, g, or u
cgnuanagccccaagcgnccccgn

SEQ ID NO: 58146 - RNA, 18 nt, Artificial Sequence
  Synthetic
  misc_feature (6)..(6): n is a, c, g, or u
  misc_feature (12)..(12): n is a, c, g, or u
  misc_feature (18)..(18): n is a, c, g, or u
agacgnagaagngggcgn

SEQ ID NO: 58147 - RNA, 19 nt, Artificial Sequence
  Synthetic
  misc_feature (7)..(7): n is a, c, g, or u
  misc_feature (13)..(13): n is a, c, g, or u
  misc_feature (19)..(19): n is a, c, g, or u
cagacgnagaagngggcgn

SEQ ID NO: 58148 - RNA, 20 nt, Artificial Sequence
  Synthetic
  misc_feature (8)..(8): n is a, c, g, or u
  misc_feature (14)..(14): n is a, c, g, or u
  misc_feature (20)..(20): n is a, c, g, or u
gcagacgnagaagngggcgn

SEQ ID NO: 58149 - RNA, 21 nt, Artificial Sequence
  Synthetic
  misc_feature (9)..(9): n is a, c, g, or u
  misc_feature (15)..(15): n is a, c, g, or u
  misc_feature (21)..(21): n is a, c, g, or u
ggcagacgnagaagngggcgn

SEQ ID NO: 58150 - RNA, 22 nt, Artificial Sequence
  Synthetic
  misc_feature (10)..(10): n is a, c, g, or u
  misc_feature (16)..(16): n is a, c, g, or u
  misc_feature (22)..(22): n is a, c, g, or u
cggcagacgnagaagngggcgn

SEQ ID NO: 58151 - RNA, 23 nt, Artificial Sequence
  Synthetic
  misc_feature (11)..(11): n is a, c, g, or u
  misc_feature (17)..(17): n is a, c, g, or u
  misc_feature (23)..(23): n is a, c, g, or u
acggcagacgnagaagngggcgn

SEQ ID NO: 58152 - RNA, 24 nt, Artificial Sequence
  Synthetic
  misc_feature (12)..(12): n is a, c, g, or u
  misc_feature (18)..(18): n is a, c, g, or u
  misc_feature (24)..(24): n is a, c, g, or u
aacggcagacgnagaagngggcgn

SEQ ID NO: 58153 - RNA, 18 nt, Artificial Sequence
  Synthetic
  misc_feature (9)..(9): n is a, c, g, or u
  misc_feature (18)..(18): n is a, c, g, or u
aaucccagnggauugggn

SEQ ID NO: 58154 - RNA, 19 nt, Artificial Sequence
  Synthetic
  misc_feature (10)..(10): n is a, c, g, or u
  misc_feature (19)..(19): n is a, c, g, or u
gaaucccagnggauugggn

SEQ ID NO: 58155 - RNA, 20 nt, Artificial Sequence
  Synthetic
  misc_feature (11)..(11): n is a, c, g, or u
  misc_feature (20)..(20): n is a, c, g, or u
agaaucccagnggauugggn

SEQ ID NO: 58156 - RNA, 21 nt, Artificial Sequence
  Synthetic
  misc_feature (12)..(12): n is a, c, g, or u
  misc_feature (21)..(21): n is a, c, g, or u
aagaaucccagnggauugggn

SEQ ID NO: 58157 - RNA, 22 nt, Artificial Sequence
  Synthetic
  misc_feature (13)..(13): n is a, c, g, or u
  misc_feature (22)..(22): n is a, c, g, or u
aaagaaucccagnggauugggn

SEQ ID NO: 58158 - RNA, 23 nt, Artificial Sequence
  Synthetic
  misc_feature (14)..(14): n is a, c, g, or u
  misc_feature (23)..(23): n is a, c, g, or u
gaaagaaucccagnggauugggn

SEQ ID NO: 58159 - RNA, 24 nt, Artificial Sequence
  Synthetic
  misc_feature (15)..(15): n is a, c, g, or u
  misc_feature (24)..(24): n is a, c, g, or u
ggaaagaaucccagnggauugggn

SEQ ID NO: 58160 - RNA, 18 nt, Artificial Sequence
  Synthetic
  misc_feature (3)..(3): n is a, c, g, or u
  misc_feature (18)..(18): n is a, c, g, or u
canccgagcagccauggn

SEQ ID NO: 58161 - RNA, 19 nt, Artificial Sequence
  Synthetic
  misc_feature (4)..(4): n is a, c, g, or u
  misc_feature (19)..(19): n is a, c, g, or u
acanccgagcagccauggn

SEQ ID NO: 58162 - RNA, 20 nt, Artificial Sequence
  Synthetic
  misc_feature (5)..(5): n is a, c, g, or u
  misc_feature (20)..(20): n is a, c, g, or u
cacanccgagcagccauggn

SEQ ID NO: 58163 - RNA, 21 nt, Artificial Sequence
  Synthetic
  misc_feature (6)..(6): n is a, c, g, or u
  misc_feature (21)..(21): n is a, c, g, or u
gcacanccgagcagccauggn

SEQ ID NO: 58164 - RNA, 22 nt, Artificial Sequence
  Synthetic
  misc_feature (7)..(7): n is a, c, g, or u
  misc_feature (22)..(22): n is a, c, g, or u
agcacanccgagcagccauggn

SEQ ID NO: 58165 - RNA, 23 nt, Artificial Sequence
  Synthetic
  misc_feature (8)..(8): n is a, c, g, or u
  misc_feature (23)..(23): n is a, c, g, or u
cagcacanccgagcagccauggn

SEQ ID NO: 58166 - RNA, 24 nt, Artificial Sequence
  Synthetic
  misc_feature (9)..(9): n is a, c, g, or u
  misc_feature (24)..(24): n is a, c, g, or u
gcagcacanccgagcagccauggn

SEQ ID NO: 58167 - RNA, 18 nt, Artificial Sequence
  Synthetic
  misc_feature (18)..(18): n is a, c, g, or u
ugccugagagcgguaugn

SEQ ID NO: 58168 - RNA, 19 nt, Artificial Sequence
  Synthetic
  misc_feature (19)..(19): n is a, c, g, or u
uugccugagagcgguaugn

SEQ ID NO: 58169 - RNA, 20 nt, Artificial Sequence
  Synthetic
  misc_feature (20)..(20): n is a, c, g, or u
cuugccugagagcgguaugn

SEQ ID NO: 58170 - RNA, 21 nt, Artificial Sequence
  Synthetic
  misc_feature (21)..(21): n is a, c, g, or u
gcuugccugagagcgguaugn

SEQ ID NO: 58171 - RNA, 22 nt, Artificial Sequence
  Synthetic
  misc_feature (22)..(22): n is a, c, g, or u
agcuugccugagagcgguaugn

SEQ ID NO: 58172 - RNA, 23 nt, Artificial Sequence
  Synthetic
  misc_feature (23)..(23): n is a, c, g, or u
uagcuugccugagagcgguaugn

SEQ ID NO: 58173 - RNA, 24 nt, Artificial Sequence
  Synthetic
  misc_feature (24)..(24): n is a, c, g, or u
auagcuugccugagagcgguaugn

SEQ ID NO: 58174 - RNA, 18 nt, Artificial Sequence
  Synthetic
  misc_feature (3)..(3): n is a, c, g, or u
  misc_feature (18)..(18): n is a, c, g, or u
agngccugguggaacugn

SEQ ID NO: 58175 - RNA, 19 nt, Artificial Sequence
  Synthetic
  misc_feature (4)..(4): n is a, c, g, or u
  misc_feature (19)..(19): n is a, c, g, or u
cagngccugguggaacugn

SEQ ID NO: 58176 - RNA, 20 nt, Artificial Sequence
  Synthetic
  misc_feature (5)..(5): n is a, c, g, or u
  misc_feature (20)..(20): n is a, c, g, or u
acagngccugguggaacugn

SEQ ID NO: 58177 - RNA, 21 nt, Artificial Sequence
  Synthetic
  misc_feature (6)..(6): n is a, c, g, or u
  misc_feature (21)..(21): n is a, c, g, or u
aacagngccugguggaacugn

SEQ ID NO: 58178 - RNA, 22 nt, Artificial Sequence
  Synthetic
  misc_feature (1)..(1): n is a, c, g, or u
  misc_feature (7)..(7): n is a, c, g, or u
  misc_feature (22)..(22): n is a, c, g, or u
naacagngccugguggaacugn

SEQ ID NO: 58179 - RNA, 23 nt, Artificial Sequence
  Synthetic
  misc_feature (2)..(2): n is a, c, g, or u
  misc_feature (8)..(8): n is a, c, g, or u
  misc_feature (23)..(23): n is a, c, g, or u
cnaacagngccugguggaacugn

SEQ ID NO: 58180 - RNA, 24 nt, Artificial Sequence
  Synthetic
  misc_feature (3)..(3): n is a, c, g, or u
  misc_feature (9)..(9): n is a, c, g, or u
  misc_feature (24)..(24): n is a, c, g, or u
ucnaacagngccugguggaacugn

SEQ ID NO: 58181 - RNA, 18 nt, Artificial Sequence
  Synthetic
  misc_feature (18)..(18): n is a, c, g, or u
gcaggauaaccacauugn

SEQ ID NO: 58182 - RNA, 19 nt, Artificial Sequence
  Synthetic
  misc_feature (19)..(19): n is a, c, g, or u
agcaggauaaccacauugn

SEQ ID NO: 58183 - RNA, 20 nt, Artificial Sequence
  Synthetic
  misc_feature (20)..(20): n is a, c, g, or u
gagcaggauaaccacauugn

SEQ ID NO: 58184 - RNA, 21 nt, Artificial Sequence
  Synthetic
  misc_feature (21)..(21): n is a, c, g, or u
agagcaggauaaccacauugn

SEQ ID NO: 58185 - RNA, 22 nt, Artificial Sequence
  Synthetic
  misc_feature (22)..(22): n is a, c, g, or u
gagagcaggauaaccacauugn

SEQ ID NO: 58186 - RNA, 23 nt, Artificial Sequence
  Synthetic
  misc_feature (23)..(23): n is a, c, g, or u
ugagagcaggauaaccacauugn

SEQ ID NO: 58187 - RNA, 24 nt, Artificial Sequence
  Synthetic
  misc_feature (24)..(24): n is a, c, g, or u
augagagcaggauaaccacauugn

SEQ ID NO: 58188 - RNA, 18 nt, Artificial Sequence
  Synthetic
  misc_feature (12)..(12): n is a, c, g, or u
  misc_feature (17)..(18): n is a, c, g, or u
ggaaaauauuunguaann

SEQ ID NO: 58189 - RNA, 19 nt, Artificial Sequence
  Synthetic
  misc_feature (13)..(13): n is a, c, g, or u
  misc_feature (18)..(19): n is a, c, g, or u
aggaaaauauuunguaann

SEQ ID NO: 58190 - RNA, 20 nt, Artificial Sequence
  Synthetic
  misc_feature (1)..(1): n is a, c, g, or u
  misc_feature (14)..(14): n is a, c, g, or u
  misc_feature (19)..(20): n is a, c, g, or u
naggaaaauauuunguaann

SEQ ID NO: 58191 - RNA, 21 nt, Artificial Sequence
  Synthetic
  misc_feature (2)..(2): n is a, c, g, or u
  misc_feature (15)..(15): n is a, c, g, or u
  misc_feature (20)..(21): n is a, c, g, or u
anaggaaaauauuunguaann

SEQ ID NO: 58192 - RNA, 22 nt, Artificial Sequence
  Synthetic
  misc_feature (3)..(3): n is a, c, g, or u
  misc_feature (16)..(16): n is a, c, g, or u
  misc_feature (21)..(22): n is a, c, g, or u
canaggaaaauauuunguaann

SEQ ID NO: 58193 - RNA, 23 nt, Artificial Sequence
  Synthetic
  misc_feature (4)..(4): n is a, c, g, or u
  misc_feature (17)..(17): n is a, c, g, or u
  misc_feature (22)..(23): n is a, c, g, or u
ccanaggaaaauauuunguaann

SEQ ID NO: 58194 - RNA, 24 nt, Artificial Sequence
  Synthetic
  misc_feature (5)..(5): n is a, c, g, or u
  misc_feature (18)..(18): n is a, c, g, or u
  misc_feature (23)..(24): n is a, c, g, or u
uccanaggaaaauauuunguaann

SEQ ID NO: 58195 - RNA, 18 nt, Artificial Sequence
  Synthetic
  misc_feature (13)..(13): n is a, c, g, or u
  misc_feature (16)..(18): n is a, c, g, or u
aacccaugaaaunuannn

SEQ ID NO: 58196 - RNA, 19 nt, Artificial Sequence
  Synthetic
  misc_feature (14)..(14): n is a, c, g, or u
  misc_feature (17)..(19): n is a, c, g, or u
uaacccaugaaaunuannn

SEQ ID NO: 58197 - RNA, 20 nt, Artificial Sequence
  Synthetic
  misc_feature (15)..(15): n is a, c, g, or u
  misc_feature (18)..(20): n is a, c, g, or u
auaacccaugaaaunuannn

SEQ ID NO: 58198 - RNA, 21 nt, Artificial Sequence
  Synthetic
  misc_feature (16)..(16): n is a, c, g, or u
  misc_feature (19)..(21): n is a, c, g, or u
cauaacccaugaaaunuannn

SEQ ID NO: 58199 - RNA, 22 nt, Artificial Sequence
  Synthetic
  misc_feature (17)..(17): n is a, c, g, or u
  misc_feature (20)..(22): n is a, c, g, or u
acauaacccaugaaaunuannn

SEQ ID NO: 58200 - RNA, 23 nt, Artificial Sequence
  Synthetic
  misc_feature (1)..(1): n is a, c, g, or u
  misc_feature (18)..(18): n is a, c, g, or u
  misc_feature (21)..(23): n is a, c, g, or u
nacauaacccaugaaaunuannn

SEQ ID NO: 58201 - RNA, 24 nt, Artificial Sequence
  Synthetic
  misc_feature (2)..(2): n is a, c, g, or u
  misc_feature (19)..(19): n is a, c, g, or u
  misc_feature (22)..(24): n is a, c, g, or u
unacauaacccaugaaaunuannn

SEQ ID NO: 58202 - RNA, 18 nt, Artificial Sequence
  Synthetic
  misc_feature (12)..(13): n is a, c, g, or u
  misc_feature (15)..(15): n is a, c, g, or u
  misc_feature (17)..(18): n is a, c, g, or u
uaaugauuaacnncnunn

SEQ ID NO: 58203 - RNA, 19 nt, Artificial Sequence
  Synthetic
  misc_feature (13)..(14): n is a, c, g, or u
  misc_feature (16)..(16): n is a, c, g, or u
  misc_feature (18)..(19): n is a, c, g, or u
auaaugauuaacnncnunn

SEQ ID NO: 58204 - RNA, 20 nt, Artificial Sequence
  Synthetic
  misc_feature (14)..(15): n is a, c, g, or u
  misc_feature (17)..(17): n is a, c, g, or u
  misc_feature (19)..(20): n is a, c, g, or u
aauaaugauuaacnncnunn

SEQ ID NO: 58205 - RNA, 21 nt, Artificial Sequence
  Synthetic
  misc_feature (15)..(16): n is a, c, g, or u
  misc_feature (18)..(18): n is a, c, g, or u
  misc_feature (20)..(21): n is a, c, g, or u
aaauaaugauuaacnncnunn

SEQ ID NO: 58206 - RNA, 22 nt, Artificial Sequence
  Synthetic
  misc_feature (16)..(17): n is a, c, g, or u
  misc_feature (19)..(19): n is a, c, g, or u
  misc_feature (21)..(22): n is a, c, g, or u
aaaauaaugauuaacnncnunn

SEQ ID NO: 58207 - RNA, 23 nt, Artificial Sequence
  Synthetic
  misc_feature (17)..(18): n is a, c, g, or u
  misc_feature (20)..(20): n is a, c, g, or u
  misc_feature (22)..(23): n is a, c, g, or u
uaaaauaaugauuaacnncnunn

SEQ ID NO: 58208 - RNA, 24 nt, Artificial Sequence
  Synthetic
  misc_feature (18)..(19): n is a, c, g, or u
  misc_feature (21)..(21): n is a, c, g, or u
  misc_feature (23)..(24): n is a, c, g, or u
uuaaaauaaugauuaacnncnunn

SEQ ID NO: 58209 - RNA, 18 nt, Artificial Sequence
  Synthetic
  misc_feature (9)..(9): n is a, c, g, or u
  misc_feature (18)..(18): n is a, c, g, or u
ucuugaugnaaaugaaun

SEQ ID NO: 58210 - RNA, 19 nt, Artificial Sequence
  Synthetic
  misc_feature (1)..(1): n is a, c, g, or u
  misc_feature (10)..(10): n is a, c, g, or u
  misc_feature (19)..(19): n is a, c, g, or u
nucuugaugnaaaugaaun

SEQ ID NO: 58211 - RNA, 20 nt, Artificial Sequence
  Synthetic
  misc_feature (1)..(2): n is a, c, g, or u
  misc_feature (11)..(11): n is a, c, g, or u
  misc_feature (20)..(20): n is a, c, g, or u
nnucuugaugnaaaugaaun

SEQ ID NO: 58212 - RNA, 21 nt, Artificial Sequence
  Synthetic
  misc_feature (2)..(3): n is a, c, g, or u
  misc_feature (12)..(12): n is a, c, g, or u
  misc_feature (21)..(21): n is a, c, g, or u
annucuugaugnaaaugaaun

SEQ ID NO: 58213 - RNA, 22 nt, Artificial Sequence
  Synthetic
  misc_feature (3)..(4): n is a, c, g, or u
  misc_feature (13)..(13): n is a, c, g, or u
  misc_feature (22)..(22): n is a, c, g, or u
cannucuugaugnaaaugaaun

SEQ ID NO: 58214 - RNA, 23 nt, Artificial Sequence
  Synthetic
  misc_feature (4)..(5): n is a, c, g, or u
  misc_feature (14)..(14): n is a, c, g, or u
  misc_feature (23)..(23): n is a, c, g, or u
ucannucuugaugnaaaugaaun

SEQ ID NO: 58215 - RNA, 24 nt, Artificial Sequence
  Synthetic
  misc_feature (5)..(6): n is a, c, g, or u
  misc_feature (15)..(15): n is a, c, g, or u
  misc_feature (24)..(24): n is a, c, g, or u
aucannucuugaugnaaaugaaun

SEQ ID NO: 58216 - RNA, 18 nt, Artificial Sequence
  Synthetic
  misc_feature (15)..(15): n is a, c, g, or u
  misc_feature (18)..(18): n is a, c, g, or u
aagacuguuggcaancun

SEQ ID NO: 58217 - RNA, 19 nt, Artificial Sequence
  Synthetic
  misc_feature (16)..(16): n is a, c, g, or u
  misc_feature (19)..(19): n is a, c, g, or u
uaagacuguuggcaancun

SEQ ID NO: 58218 - RNA, 20 nt, Artificial Sequence
  Synthetic
  misc_feature (17)..(17): n is a, c, g, or u
  misc_feature (20)..(20): n is a, c, g, or u
guaagacuguuggcaancun

SEQ ID NO: 58219 - RNA, 21 nt, Artificial Sequence
  Synthetic
  misc_feature (18)..(18): n is a, c, g, or u
  misc_feature (21)..(21): n is a, c, g, or u
uguaagacuguuggcaancun

SEQ ID NO: 58220 - RNA, 22 nt, Artificial Sequence
  Synthetic
  misc_feature (19)..(19): n is a, c, g, or u
  misc_feature (22)..(22): n is a, c, g, or u
auguaagacuguuggcaancun

SEQ ID NO: 58221 - RNA, 23 nt, Artificial Sequence
  Synthetic
  misc_feature (20)..(20): n is a, c, g, or u
  misc_feature (23)..(23): n is a, c, g, or u
uauguaagacuguuggcaancun

SEQ ID NO: 58222 - RNA, 24 nt, Artificial Sequence
  Synthetic
  misc_feature (21)..(21): n is a, c, g, or u
  misc_feature (24)..(24): n is a, c, g, or u
uuauguaagacuguuggcaancun

SEQ ID NO: 58223 - RNA, 18 nt, Artificial Sequence
  Synthetic
  misc_feature (2)..(3): n is a, c, g, or u
  misc_feature (10)..(10): n is a, c, g, or u
  misc_feature (12)..(12): n is a, c, g, or u
  misc_feature (18)..(18): n is a, c, g, or u
annuuaggananaaucun

SEQ ID NO: 58224 - RNA, 19 nt, Artificial Sequence
  Synthetic
  misc_feature (3)..(4): n is a, c, g, or u
  misc_feature (11)..(11): n is a, c, g, or u
  misc_feature (13)..(13): n is a, c, g, or u
  misc_feature (19)..(19): n is a, c, g, or u
aannuuaggananaaucun

SEQ ID NO: 58225 - RNA, 20 nt, Artificial Sequence
  Synthetic
  misc_feature (4)..(5): n is a, c, g, or u
  misc_feature (12)..(12): n is a, c, g, or u
  misc_feature (14)..(14): n is a, c, g, or u
  misc_feature (20)..(20): n is a, c, g, or u
uaannuuaggananaaucun

SEQ ID NO: 58226 - RNA, 21 nt, Artificial Sequence
  Synthetic
  misc_feature (5)..(6): n is a, c, g, or u
  misc_feature (13)..(13): n is a, c, g, or u
  misc_feature (15)..(15): n is a, c, g, or u
  misc_feature (21)..(21): n is a, c, g, or u
guaannuuaggananaaucun

SEQ ID NO: 58227 - RNA, 22 nt, Artificial Sequence
  Synthetic
  misc_feature (1)..(1): n is a, c, g, or u
  misc_feature (6)..(7): n is a, c, g, or u
  misc_feature (14)..(14): n is a, c, g, or u
  misc_feature (16)..(16): n is a, c, g, or u
  misc_feature (22)..(22): n is a, c, g, or u
nguaannuuaggananaaucun

SEQ ID NO: 58228 - RNA, 23 nt, Artificial Sequence
  Synthetic
  misc_feature (2)..(2): n is a, c, g, or u
  misc_feature (7)..(8): n is a, c, g, or u
  misc_feature (15)..(15): n is a, c, g, or u
  misc_feature (17)..(17): n is a, c, g, or u
  misc_feature (23)..(23): n is a, c, g, or u
unguaannuuaggananaaucun

SEQ ID NO: 58229 - RNA, 24 nt, Artificial Sequence
  Synthetic
  misc_feature (3)..(3): n is a, c, g, or u
  misc_feature (8)..(9): n is a, c, g, or u
  misc_feature (16)..(16): n is a, c, g, or u
  misc_feature (18)..(18): n is a, c, g, or u
  misc_feature (24)..(24): n is a, c, g, or u
uunguaannuuaggananaaucun

SEQ ID NO: 58230 - RNA, 18 nt, Artificial Sequence
  Synthetic
  misc_feature (18)..(18): n is a, c, g, or u
agagaggugcgacccgun

SEQ ID NO: 58231 - RNA, 19 nt, Artificial Sequence
  Synthetic
  misc_feature (19)..(19): n is a, c, g, or u
aagagaggugcgacccgun

SEQ ID NO: 58232 - RNA, 20 nt, Artificial Sequence
  Synthetic
  misc_feature (20)..(20): n is a, c, g, or u
aaagagaggugcgacccgun

SEQ ID NO: 58233 - RNA, 18 nt, Artificial Sequence
  Synthetic
  misc_feature (18)..(18): n is a, c, g, or u
uauucuucgauccaggun

SEQ ID NO: 58234 - RNA, 19 nt, Artificial Sequence
  Synthetic
  misc_feature (19)..(19): n is a, c, g, or u
guauucuucgauccaggun

SEQ ID NO: 58235 - RNA, 20 nt, Artificial Sequence
  Synthetic
  misc_feature (20)..(20): n is a, c, g, or u
uguauucuucgauccaggun

SEQ ID NO: 58236 - RNA, 21 nt, Artificial Sequence
  Synthetic
  misc_feature (21)..(21): n is a, c, g, or u
auguauucuucgauccaggun

SEQ ID NO: 58237 - RNA, 22 nt, Artificial Sequence
  Synthetic
  misc_feature (22)..(22): n is a, c, g, or u
gauguauucuucgauccaggun

SEQ ID NO: 58238 - RNA, 23 nt, Artificial Sequence
  Synthetic
  misc_feature (23)..(23): n is a, c, g, or u
ugauguauucuucgauccaggun

SEQ ID NO: 58239 - RNA, 24 nt, Artificial Sequence
  Synthetic
  misc_feature (24)..(24): n is a, c, g, or u
uugauguauucuucgauccaggun

SEQ ID NO: 58240 - RNA, 18 nt, Artificial Sequence
  Synthetic
  misc_feature (9)..(9): n is a, c, g, or u
  misc_feature (18)..(18): n is a, c, g, or u
ugcaaauanugucuggun

SEQ ID NO: 58241 - RNA, 19 nt, Artificial Sequence
  Synthetic
  misc_feature (10)..(10): n is a, c, g, or u
  misc_feature (19)..(19): n is a, c, g, or u
augcaaauanugucuggun

SEQ ID NO: 58242 - RNA, 20 nt, Artificial Sequence
  Synthetic
  misc_feature (11)..(11): n is a, c, g, or u
  misc_feature (20)..(20): n is a, c, g, or u
uaugcaaauanugucuggun

SEQ ID NO: 58243 - RNA, 21 nt, Artificial Sequence
  Synthetic
  misc_feature (12)..(12): n is a, c, g, or u
  misc_feature (21)..(21): n is a, c, g, or u
guaugcaaauanugucuggun

SEQ ID NO: 58244 - RNA, 22 nt, Artificial Sequence
  Synthetic
  misc_feature (13)..(13): n is a, c, g, or u
  misc_feature (22)..(22): n is a, c, g, or u
aguaugcaaauanugucuggun

SEQ ID NO: 58245 - RNA, 23 nt, Artificial Sequence
  Synthetic
  misc_feature (14)..(14): n is a, c, g, or u
  misc_feature (23)..(23): n is a, c, g, or u
aaguaugcaaauanugucuggun

SEQ ID NO: 58246 - RNA, 24 nt, Artificial Sequence
  Synthetic
  misc_feature (15)..(15): n is a, c, g, or u
  misc_feature (24)..(24): n is a, c, g, or u
aaaguaugcaaauanugucuggun

SEQ ID NO: 58247 - RNA, 18 nt, Artificial Sequence
  Synthetic
  misc_feature (15)..(15): n is a, c, g, or u
  misc_feature (18)..(18): n is a, c, g, or u
ggauaaccacauugngun

SEQ ID NO: 58248 - RNA, 19 nt, Artificial Sequence
  Synthetic
  misc_feature (16)..(16): n is a, c, g, or u
  misc_feature (19)..(19): n is a, c, g, or u
aggauaaccacauugngun

SEQ ID NO: 58249 - RNA, 20 nt, Artificial Sequence
  Synthetic
  misc_feature (17)..(17): n is a, c, g, or u
  misc_feature (20)..(20): n is a, c, g, or u
caggauaaccacauugngun

SEQ ID NO: 58250 - RNA, 21 nt, Artificial Sequence
  Synthetic
  misc_feature (18)..(18): n is a, c, g, or u
  misc_feature (21)..(21): n is a, c, g, or u
gcaggauaaccacauugngun

SEQ ID NO: 58251 - RNA, 22 nt, Artificial Sequence
  Synthetic
  misc_feature (19)..(19): n is a, c, g, or u
  misc_feature (22)..(22): n is a, c, g, or u
agcaggauaaccacauugngun

SEQ ID NO: 58252 - RNA, 23 nt, Artificial Sequence
  Synthetic
  misc_feature (20)..(20): n is a, c, g, or u
  misc_feature (23)..(23): n is a, c, g, or u
gagcaggauaaccacauugngun

SEQ ID NO: 58253 - RNA, 24 nt, Artificial Sequence
  Synthetic
  misc_feature (21)..(21): n is a, c, g, or u
  misc_feature (24)..(24): n is a, c, g, or u
agagcaggauaaccacauugngun

SEQ ID NO: 58254 - RNA, 18 nt, Artificial Sequence
  Synthetic
  misc_feature (15)..(15): n is a, c, g, or u
  misc_feature (18)..(18): n is a, c, g, or u
cucaauucauuuuungun

SEQ ID NO: 58255 - RNA, 19 nt, Artificial Sequence
  Synthetic
  misc_feature (16)..(16): n is a, c, g, or u
  misc_feature (19)..(19): n is a, c, g, or u
ucucaauucauuuuungun

SEQ ID NO: 58256 - RNA, 20 nt, Artificial Sequence
  Synthetic
  misc_feature (17)..(17): n is a, c, g, or u
  misc_feature (20)..(20): n is a, c, g, or u
uucucaauucauuuuungun

SEQ ID NO: 58257 - RNA, 21 nt, Artificial Sequence
  Synthetic
  misc_feature (18)..(18): n is a, c, g, or u
  misc_feature (21)..(21): n is a, c, g, or u
cuucucaauucauuuuungun

SEQ ID NO: 58258 - RNA, 22 nt, Artificial Sequence
  Synthetic
  misc_feature (1)..(1): n is a, c, g, or u
  misc_feature (19)..(19): n is a, c, g, or u
  misc_feature (22)..(22): n is a, c, g, or u
ncuucucaauucauuuuungun

SEQ ID NO: 58259 - RNA, 23 nt, Artificial Sequence
  Synthetic
  misc_feature (2)..(2): n is a, c, g, or u
  misc_feature (20)..(20): n is a, c, g, or u
  misc_feature (23)..(23): n is a, c, g, or u
ancuucucaauucauuuuungun

SEQ ID NO: 58260 - RNA, 24 nt, Artificial Sequence
  Synthetic
  misc_feature (3)..(3): n is a, c, g, or u
  misc_feature (21)..(21): n is a, c, g, or u
  misc_feature (24)..(24): n is a, c, g, or u
aancuucucaauucauuuuungun

SEQ ID NO: 58261 - RNA, 18 nt, Artificial Sequence
  Synthetic
  misc_feature (13)..(14): n is a, c, g, or u
  misc_feature (16)..(16): n is a, c, g, or u
  misc_feature (18)..(18): n is a, c, g, or u
auaaugauuaacnncnun

SEQ ID NO: 58262 - RNA, 19 nt, Artificial Sequence
  Synthetic
  misc_feature (14)..(15): n is a, c, g, or u
  misc_feature (17)..(17): n is a, c, g, or u
  misc_feature (19)..(19): n is a, c, g, or u
aauaaugauuaacnncnun

SEQ ID NO: 58263 - RNA, 20 nt, Artificial Sequence
  Synthetic
  misc_feature (15)..(16): n is a, c, g, or u
  misc_feature (18)..(18): n is a, c, g, or u
  misc_feature (20)..(20): n is a, c, g, or u
aaauaaugauuaacnncnun

SEQ ID NO: 58264 - RNA, 21 nt, Artificial Sequence
  Synthetic
  misc_feature (16)..(17): n is a, c, g, or u
  misc_feature (19)..(19): n is a, c, g, or u
  misc_feature (21)..(21): n is a, c, g, or u
aaaauaaugauuaacnncnun

SEQ ID NO: 58265 - RNA, 22 nt, Artificial Sequence
  Synthetic
  misc_feature (17)..(18): n is a, c, g, or u
  misc_feature (20)..(20): n is a, c, g, or u
  misc_feature (22)..(22): n is a, c, g, or u
uaaaauaaugauuaacnncnun

SEQ ID NO: 58266 - RNA, 23 nt, Artificial Sequence
  Synthetic
  misc_feature (18)..(19): n is a, c, g, or u
  misc_feature (21)..(21): n is a, c, g, or u
  misc_feature (23)..(23): n is a, c, g, or u
uuaaaauaaugauuaacnncnun

SEQ ID NO: 58267 - RNA, 24 nt, Artificial Sequence
  Synthetic
  misc_feature (1)..(1): n is a, c, g, or u
  misc_feature (19)..(20): n is a, c, g, or u
  misc_feature (22)..(22): n is a, c, g, or u
  misc_feature (24)..(24): n is a, c, g, or u
nuuaaaauaaugauuaacnncnun

SEQ ID NO: 58268 - RNA, 18 nt, Artificial Sequence
  Synthetic
  misc_feature (18)..(18): n is a, c, g, or u
cgauuuacaggaaguuun

SEQ ID NO: 58269 - RNA, 19 nt, Artificial Sequence
  Synthetic
  misc_feature (1)..(1): n is a, c, g, or u
  misc_feature (19)..(19): n is a, c, g, or u
ncgauuuacaggaaguuun

SEQ ID NO: 58270 - RNA, 20 nt, Artificial Sequence
  Synthetic
  misc_feature (2)..(2): n is a, c, g, or u
  misc_feature (20)..(20): n is a, c, g, or u
gncgauuuacaggaaguuun

SEQ ID NO: 58271 - RNA, 21 nt, Artificial Sequence
  Synthetic
  misc_feature (3)..(3): n is a, c, g, or u
  misc_feature (21)..(21): n is a, c, g, or u
ggncgauuuacaggaaguuun

SEQ ID NO: 58272 - RNA, 22 nt, Artificial Sequence
  Synthetic
  misc_feature (1)..(1): n is a, c, g, or u
  misc_feature (4)..(4): n is a, c, g, or u
  misc_feature (22)..(22): n is a, c, g, or u
nggncgauuuacaggaaguuun

SEQ ID NO: 58273 - RNA, 23 nt, Artificial Sequence
  Synthetic
  misc_feature (2)..(2): n is a, c, g, or u
  misc_feature (5)..(5): n is a, c, g, or u
  misc_feature (23)..(23): n is a, c, g, or u
unggncgauuuacaggaaguuun

SEQ ID NO: 58274 - RNA, 24 nt, Artificial Sequence
  Synthetic
  misc_feature (3)..(3): n is a, c, g, or u
  misc_feature (6)..(6): n is a, c, g, or u
  misc_feature (24)..(24): n is a, c, g, or u
aunggncgauuuacaggaaguuun

SEQ ID NO: 58275 - RNA, 18 nt, Artificial Sequence
  Synthetic
  misc_feature (18)..(18): n is a, c, g, or u
cuucucaauucauuuuun

SEQ ID NO: 58276 - RNA, 19 nt, Artificial Sequence
  Synthetic
  misc_feature (1)..(1): n is a, c, g, or u
  misc_feature (19)..(19): n is a, c, g, or u
ncuucucaauucauuuuun

SEQ ID NO: 58277 - RNA, 20 nt, Artificial Sequence
  Synthetic
  misc_feature (2)..(2): n is a, c, g, or u
  misc_feature (20)..(20): n is a, c, g, or u
ancuucucaauucauuuuun

SEQ ID NO: 58278 - RNA, 21 nt, Artificial Sequence
  Synthetic
  misc_feature (3)..(3): n is a, c, g, or u
  misc_feature (21)..(21): n is a, c, g, or u
aancuucucaauucauuuuun

SEQ ID NO: 58279 - RNA, 22 nt, Artificial Sequence
  Synthetic
  misc_feature (1)..(1): n is a, c, g, or u
  misc_feature (4)..(4): n is a, c, g, or u
  misc_feature (22)..(22): n is a, c, g, or u
naancuucucaauucauuuuun

SEQ ID NO: 58280 - RNA, 23 nt, Artificial Sequence
  Synthetic
  misc_feature (2)..(2): n is a, c, g, or u
  misc_feature (5)..(5): n is a, c, g, or u
  misc_feature (23)..(23): n is a, c, g, or u
unaancuucucaauucauuuuun

SEQ ID NO: 58281 - RNA, 24 nt, Artificial Sequence
  Synthetic
  misc_feature (3)..(3): n is a, c, g, or u
  misc_feature (6)..(6): n is a, c, g, or u
  misc_feature (24)..(24): n is a, c, g, or u
uunaancuucucaauucauuuuun

SEQ ID NO: 58282 - RNA, 18 nt, Artificial Sequence
  Synthetic
  misc_feature (3)..(4): n is a, c, g, or u
gunnucccccuagaaaau

SEQ ID NO: 58283 - RNA, 19 nt, Artificial Sequence
  Synthetic
  misc_feature (4)..(5): n is a, c, g, or u
ggunnucccccuagaaaau

SEQ ID NO: 58284 - RNA, 20 nt, Artificial Sequence
  Synthetic
  misc_feature (5)..(6): n is a, c, g, or u
gggunnucccccuagaaaau

SEQ ID NO: 58285 - RNA, 21 nt, Artificial Sequence
  Synthetic
  misc_feature (6)..(7): n is a, c, g, or u
cgggunnucccccuagaaaau

SEQ ID NO: 58286 - RNA, 22 nt, Artificial Sequence
  Synthetic
  misc_feature (7)..(8): n is a, c, g, or u
ccgggunnucccccuagaaaau

SEQ ID NO: 58287 - RNA, 23 nt, Artificial Sequence
  Synthetic
  misc_feature (8)..(9): n is a, c, g, or u
cccgggunnucccccuagaaaau

SEQ ID NO: 58288 - RNA, 24 nt, Artificial Sequence
  Synthetic
  misc_feature (9)..(10): n is a, c, g, or u
acccgggunnucccccuagaaaau

SEQ ID NO: 58289 - RNA, 18 nt, Artificial Sequence
  Synthetic
agccaccagcaggaaaau

SEQ ID NO: 58290 - RNA, 19 nt, Artificial Sequence
  Synthetic
gagccaccagcaggaaaau

SEQ ID NO: 58291 - RNA, 20 nt, Artificial Sequence
  Synthetic
ggagccaccagcaggaaaau

SEQ ID NO: 58292 - RNA, 21 nt, Artificial Sequence
  Synthetic
uggagccaccagcaggaaaau

SEQ ID NO: 58293 - RNA, 22 nt, Artificial Sequence
  Synthetic
cuggagccaccagcaggaaaau

SEQ ID NO: 58294 - RNA, 23 nt, Artificial Sequence
  Synthetic
acuggagccaccagcaggaaaau

SEQ ID NO: 58295 - RNA, 24 nt, Artificial Sequence
  Synthetic
aacuggagccaccagcaggaaaau

SEQ ID NO: 58296 - RNA, 18 nt, Artificial Sequence
  Synthetic
aaaaguaaggcaggaaau

SEQ ID NO: 58297 - RNA, 19 nt, Artificial Sequence
  Synthetic
caaaaguaaggcaggaaau

SEQ ID NO: 58298 - RNA, 20 nt, Artificial Sequence
  Synthetic
ccaaaaguaaggcaggaaau

SEQ ID NO: 58299 - RNA, 21 nt, Artificial Sequence
  Synthetic
uccaaaaguaaggcaggaaau

SEQ ID NO: 58300 - RNA, 22 nt, Artificial Sequence
  Synthetic
uuccaaaaguaaggcaggaaau

SEQ ID NO: 58301 - RNA, 23 nt, Artificial Sequence
  Synthetic
cuuccaaaaguaaggcaggaaau

SEQ ID NO: 58302 - RNA, 24 nt, Artificial Sequence
  Synthetic
ucuuccaaaaguaaggcaggaaau

SEQ ID NO: 58303 - RNA, 18 nt, Artificial Sequence
  Synthetic
acagauuuggcccccaau

SEQ ID NO: 58304 - RNA, 19 nt, Artificial Sequence
  Synthetic
cacagauuuggcccccaau

SEQ ID NO: 58305 - RNA, 20 nt, Artificial Sequence
  Synthetic
gcacagauuuggcccccaau

SEQ ID NO: 58306 - RNA, 21 nt, Artificial Sequence
  Synthetic
ugcacagauuuggcccccaau

SEQ ID NO: 58307 - RNA, 22 nt, Artificial Sequence
  Synthetic
cugcacagauuuggcccccaau

SEQ ID NO: 58308 - RNA, 23 nt, Artificial Sequence
  Synthetic
gcugcacagauuuggcccccaau

SEQ ID NO: 58309 - RNA, 24 nt, Artificial Sequence
  Synthetic
ugcugcacagauuuggcccccaau

SEQ ID NO: 58310 - RNA, 18 nt, Artificial Sequence
  Synthetic
ugauggucuggaaagaau

SEQ ID NO: 58311 - RNA, 19 nt, Artificial Sequence
  Synthetic
cugauggucuggaaagaau

SEQ ID NO: 58312 - RNA, 20 nt, Artificial Sequence
  Synthetic
gcugauggucuggaaagaau

SEQ ID NO: 58313 - RNA, 21 nt, Artificial Sequence
  Synthetic
agcugauggucuggaaagaau

SEQ ID NO: 58314 - RNA, 22 nt, Artificial Sequence
  Synthetic
cagcugauggucuggaaagaau

SEQ ID NO: 58315 - RNA, 23 nt, Artificial Sequence
  Synthetic
ccagcugauggucuggaaagaau

SEQ ID NO: 58316 - RNA, 24 nt, Artificial Sequence
  Synthetic
uccagcugauggucuggaaagaau

SEQ ID NO: 58317 - RNA, 18 nt, Artificial Sequence
  Synthetic
agguuggggacugcgaau

SEQ ID NO: 58318 - RNA, 19 nt, Artificial Sequence
  Synthetic
gagguuggggacugcgaau

SEQ ID NO: 58319 - RNA, 20 nt, Artificial Sequence
  Synthetic
ggagguuggggacugcgaau

SEQ ID NO: 58320 - RNA, 21 nt, Artificial Sequence
  Synthetic
uggagguuggggacugcgaau

SEQ ID NO: 58321 - RNA, 22 nt, Artificial Sequence
  Synthetic
uuggagguuggggacugcgaau

SEQ ID NO: 58322 - RNA, 23 nt, Artificial Sequence
  Synthetic
auuggagguuggggacugcgaau

SEQ ID NO: 58323 - RNA, 24 nt, Artificial Sequence
  Synthetic
gauuggagguuggggacugcgaau

SEQ ID NO: 58324 - RNA, 18 nt, Artificial Sequence
  Synthetic
cuuaugaguccaaggaau

SEQ ID NO: 58325 - RNA, 19 nt, Artificial Sequence
  Synthetic
ccuuaugaguccaaggaau

SEQ ID NO: 58326 - RNA, 20 nt, Artificial Sequence
  Synthetic
accuuaugaguccaaggaau

SEQ ID NO: 58327 - RNA, 21 nt, Artificial Sequence
  Synthetic
caccuuaugaguccaaggaau

SEQ ID NO: 58328 - RNA, 22 nt, Artificial Sequence
  Synthetic
ccaccuuaugaguccaaggaau

SEQ ID NO: 58329 - RNA, 23 nt, Artificial Sequence
  Synthetic
cccaccuuaugaguccaaggaau

SEQ ID NO: 58330 - RNA, 24 nt, Artificial Sequence
  Synthetic
ucccaccuuaugaguccaaggaau

SEQ ID NO: 58331 - RNA, 18 nt, Artificial Sequence
  Synthetic
  misc_feature (1)..(1): n is a, c, g, or u
  misc_feature (10)..(10): n is a, c, g, or u
nucuugaugnaaaugaau

SEQ ID NO: 58332 - RNA, 19 nt, Artificial Sequence
  Synthetic
  misc_feature (1)..(2): n is a, c, g, or u
  misc_feature (11)..(11): n is a, c, g, or u
nnucuugaugnaaaugaau

SEQ ID NO: 58333 - RNA, 20 nt, Artificial Sequence
  Synthetic
  misc_feature (2)..(3): n is a, c, g, or u
  misc_feature (12)..(12): n is a, c, g, or u
annucuugaugnaaaugaau

SEQ ID NO: 58334 - RNA, 21 nt, Artificial Sequence
  Synthetic
  misc_feature (3)..(4): n is a, c, g, or u
  misc_feature (13)..(13): n is a, c, g, or u
cannucuugaugnaaaugaau

SEQ ID NO: 58335 - RNA, 22 nt, Artificial Sequence
  Synthetic
  misc_feature (4)..(5): n is a, c, g, or u
  misc_feature (14)..(14): n is a, c, g, or u
ucannucuugaugnaaaugaau

SEQ ID NO: 58336 - RNA, 23 nt, Artificial Sequence
  Synthetic
  misc_feature (5)..(6): n is a, c, g, or u
  misc_feature (15)..(15): n is a, c, g, or u
aucannucuugaugnaaaugaau

SEQ ID NO: 58337 - RNA, 24 nt, Artificial Sequence
  Synthetic
  misc_feature (6)..(7): n is a, c, g, or u
  misc_feature (16)..(16): n is a, c, g, or u
uaucannucuugaugnaaaugaau

SEQ ID NO: 58338 - RNA, 18 nt, Artificial Sequence
  Synthetic
  misc_feature (3)..(3): n is a, c, g, or u
  misc_feature (5)..(5): n is a, c, g, or u
  misc_feature (14)..(15): n is a, c, g, or u
cungnuggcauaannaau

SEQ ID NO: 58339 - RNA, 19 nt, Artificial Sequence
  Synthetic
  misc_feature (4)..(4): n is a, c, g, or u
  misc_feature (6)..(6): n is a, c, g, or u
  misc_feature (15)..(16): n is a, c, g, or u
ucungnuggcauaannaau

SEQ ID NO: 58340 - RNA, 20 nt, Artificial Sequence
  Synthetic
  misc_feature (5)..(5): n is a, c, g, or u
  misc_feature (7)..(7): n is a, c, g, or u
  misc_feature (16)..(17): n is a, c, g, or u
aucungnuggcauaannaau

SEQ ID NO: 58341 - RNA, 21 nt, Artificial Sequence
  Synthetic
  misc_feature (6)..(6): n is a, c, g, or u
  misc_feature (8)..(8): n is a, c, g, or u
  misc_feature (17)..(18): n is a, c, g, or u
aaucungnuggcauaannaau

SEQ ID NO: 58342 - RNA, 22 nt, Artificial Sequence
  Synthetic
  misc_feature (1)..(1): n is a, c, g, or u
  misc_feature (7)..(7): n is a, c, g, or u
  misc_feature (9)..(9): n is a, c, g, or u
  misc_feature (18)..(19): n is a, c, g, or u
naaucungnuggcauaannaau

SEQ ID NO: 58343 - RNA, 23 nt, Artificial Sequence
  Synthetic
  misc_feature (2)..(2): n is a, c, g, or u
  misc_feature (8)..(8): n is a, c, g, or u
  misc_feature (10)..(10): n is a, c, g, or u
  misc_feature (19)..(20): n is a, c, g, or u
anaaucungnuggcauaannaau

SEQ ID NO: 58344 - RNA, 24 nt, Artificial Sequence
  Synthetic
  misc_feature (1)..(1): n is a, c, g, or u
  misc_feature (3)..(3): n is a, c, g, or u
  misc_feature (9)..(9): n is a, c, g, or u
  misc_feature (11)..(11): n is a, c, g, or u
  misc_feature (20)..(21): n is a, c, g, or u
nanaaucungnuggcauaannaau

SEQ ID NO: 58345 - RNA, 18 nt, Artificial Sequence
  Synthetic
uccaaggaauacuaacau

SEQ ID NO: 58346 - RNA, 19 nt, Artificial Sequence
  Synthetic
guccaaggaauacuaacau

SEQ ID NO: 58347 - RNA, 20 nt, Artificial Sequence
  Synthetic
aguccaaggaauacuaacau

SEQ ID NO: 58348 - RNA, 21 nt, Artificial Sequence
  Synthetic
gaguccaaggaauacuaacau

SEQ ID NO: 58349 - RNA, 22 nt, Artificial Sequence
  Synthetic
ugaguccaaggaauacuaacau

SEQ ID NO: 58350 - RNA, 23 nt, Artificial Sequence
  Synthetic
augaguccaaggaauacuaacau

SEQ ID NO: 58351 - RNA, 24 nt, Artificial Sequence
  Synthetic
uaugaguccaaggaauacuaacau

SEQ ID NO: 58352 - RNA, 18 nt, Artificial Sequence
  Synthetic
  misc_feature (6)..(6): n is a, c, g, or u
gcacanccgagcagccau

SEQ ID NO: 58353 - RNA, 19 nt, Artificial Sequence
  Synthetic
  misc_feature (7)..(7): n is a, c, g, or u
agcacanccgagcagccau

SEQ ID NO: 58354 - RNA, 20 nt, Artificial Sequence
  Synthetic
  misc_feature (8)..(8): n is a, c, g, or u
cagcacanccgagcagccau

SEQ ID NO: 58355 - RNA, 21 nt, Artificial Sequence
  Synthetic
  misc_feature (9)..(9): n is a, c, g, or u
gcagcacanccgagcagccau

SEQ ID NO: 58356 - RNA, 22 nt, Artificial Sequence
  Synthetic
  misc_feature (10)..(10): n is a, c, g, or u
ggcagcacanccgagcagccau

SEQ ID NO: 58357 - RNA, 23 nt, Artificial Sequence
  Synthetic
  misc_feature (11)..(11): n is a, c, g, or u
uggcagcacanccgagcagccau

SEQ ID NO: 58358 - RNA, 24 nt, Artificial Sequence
  Synthetic
  misc_feature (12)..(12): n is a, c, g, or u
uuggcagcacanccgagcagccau

SEQ ID NO: 58359 - RNA, 18 nt, Artificial Sequence
  Synthetic
  misc_feature (6)..(6): n is a, c, g, or u
acaggnauacagaggcau

SEQ ID NO: 58360 - RNA, 19 nt, Artificial Sequence
  Synthetic
  misc_feature (7)..(7): n is a, c, g, or u
uacaggnauacagaggcau

SEQ ID NO: 58361 - RNA, 20 nt, Artificial Sequence
  Synthetic
  misc_feature (8)..(8): n is a, c, g, or u
auacaggnauacagaggcau

SEQ ID NO: 58362 - RNA, 21 nt, Artificial Sequence
  Synthetic
  misc_feature (1)..(1): n is a, c, g, or u
  misc_feature (9)..(9): n is a, c, g, or u
nauacaggnauacagaggcau

SEQ ID NO: 58363 - RNA, 22 nt, Artificial Sequence
  Synthetic
  misc_feature (2)..(2): n is a, c, g, or u
  misc_feature (10)..(10): n is a, c, g, or u
unauacaggnauacagaggcau

SEQ ID NO: 58364 - RNA, 23 nt, Artificial Sequence
  Synthetic
  misc_feature (3)..(3): n is a, c, g, or u
  misc_feature (11)..(11): n is a, c, g, or u
gunauacaggnauacagaggcau

SEQ ID NO: 58365 - RNA, 24 nt, Artificial Sequence
  Synthetic
  misc_feature (4)..(4): n is a, c, g, or u
  misc_feature (12)..(12): n is a, c, g, or u
agunauacaggnauacagaggcau

SEQ ID NO: 58366 - RNA, 18 nt, Artificial Sequence
  Synthetic
aacaagaagaugaggcau

SEQ ID NO: 58367 - RNA, 19 nt, Artificial Sequence
  Synthetic
caacaagaagaugaggcau

SEQ ID NO: 58368 - RNA, 20 nt, Artificial Sequence
  Synthetic
ccaacaagaagaugaggcau

SEQ ID NO: 58369 - RNA, 21 nt, Artificial Sequence
  Synthetic
accaacaagaagaugaggcau

SEQ ID NO: 58370 - RNA, 22 nt, Artificial Sequence
  Synthetic
aaccaacaagaagaugaggcau

SEQ ID NO: 58371 - RNA, 23 nt, Artificial Sequence
  Synthetic
gaaccaacaagaagaugaggcau

SEQ ID NO: 58372 - RNA, 24 nt, Artificial Sequence
  Synthetic
agaaccaacaagaagaugaggcau

SEQ ID NO: 58373 - RNA, 18 nt, Artificial Sequence
  Synthetic
caggaugaagaggaagau

SEQ ID NO: 58374 - RNA, 19 nt, Artificial Sequence
  Synthetic
gcaggaugaagaggaagau

SEQ ID NO: 58375 - RNA, 20 nt, Artificial Sequence
  Synthetic
agcaggaugaagaggaagau

SEQ ID NO: 58376 - RNA, 21 nt, Artificial Sequence
  Synthetic
cagcaggaugaagaggaagau

SEQ ID NO: 58377 - RNA, 22 nt, Artificial Sequence
  Synthetic
gcagcaggaugaagaggaagau

SEQ ID NO: 58378 - RNA, 23 nt, Artificial Sequence
  Synthetic
agcagcaggaugaagaggaagau

SEQ ID NO: 58379 - RNA, 24 nt, Artificial Sequence
  Synthetic
uagcagcaggaugaagaggaagau

SEQ ID NO: 58380 - RNA, 18 nt, Artificial Sequence
  Synthetic
aaauggauacccacagau

SEQ ID NO: 58381 - RNA, 19 nt, Artificial Sequence
  Synthetic
  misc_feature (1)..(1): n is a, c, g, or u
naaauggauacccacagau

SEQ ID NO: 58382 - RNA, 20 nt, Artificial Sequence
  Synthetic
  misc_feature (2)..(2): n is a, c, g, or u
unaaauggauacccacagau

SEQ ID NO: 58383 - RNA, 21 nt, Artificial Sequence
  Synthetic
  misc_feature (3)..(3): n is a, c, g, or u
uunaaauggauacccacagau

SEQ ID NO: 58384 - RNA, 22 nt, Artificial Sequence
  Synthetic
  misc_feature (4)..(4): n is a, c, g, or u
auunaaauggauacccacagau

SEQ ID NO: 58385 - RNA, 23 nt, Artificial Sequence
  Synthetic
  misc_feature (5)..(5): n is a, c, g, or u
uauunaaauggauacccacagau

SEQ ID NO: 58386 - RNA, 24 nt, Artificial Sequence
  Synthetic
  misc_feature (6)..(6): n is a, c, g, or u
guauunaaauggauacccacagau

SEQ ID NO: 58387 - RNA, 18 nt, Artificial Sequence
  Synthetic
  misc_feature (9)..(9): n is a, c, g, or u
gcacacggnccggcagau

SEQ ID NO: 58388 - RNA, 19 nt, Artificial Sequence
  Synthetic
  misc_feature (10)..(10): n is a, c, g, or u
ugcacacggnccggcagau

SEQ ID NO: 58389 - RNA, 20 nt, Artificial Sequence
  Synthetic
  misc_feature (11)..(11): n is a, c, g, or u
gugcacacggnccggcagau

SEQ ID NO: 58390 - RNA, 21 nt, Artificial Sequence
  Synthetic
  misc_feature (12)..(12): n is a, c, g, or u
agugcacacggnccggcagau

SEQ ID NO: 58391 - RNA, 22 nt, Artificial Sequence
  Synthetic
  misc_feature (13)..(13): n is a, c, g, or u
aagugcacacggnccggcagau

SEQ ID NO: 58392 - RNA, 23 nt, Artificial Sequence
  Synthetic
  misc_feature (14)..(14): n is a, c, g, or u
gaagugcacacggnccggcagau

SEQ ID NO: 58393 - RNA, 24 nt, Artificial Sequence
  Synthetic
  misc_feature (15)..(15): n is a, c, g, or u
cgaagugcacacggnccggcagau

SEQ ID NO: 58394 - RNA, 18 nt, Artificial Sequence
  Synthetic
cuucugcgacgcggcgau

SEQ ID NO: 58395 - RNA, 19 nt, Artificial Sequence
  Synthetic
ucuucugcgacgcggcgau

SEQ ID NO: 58396 - RNA, 20 nt, Artificial Sequence
  Synthetic
aucuucugcgacgcggcgau

SEQ ID NO: 58397 - RNA, 18 nt, Artificial Sequence
  Synthetic
gaggcauagcagcaggau

SEQ ID NO: 58398 - RNA, 19 nt, Artificial Sequence
  Synthetic
ugaggcauagcagcaggau

SEQ ID NO: 58399 - RNA, 20 nt, Artificial Sequence
  Synthetic
augaggcauagcagcaggau

SEQ ID NO: 58400 - RNA, 21 nt, Artificial Sequence
  Synthetic
gaugaggcauagcagcaggau

SEQ ID NO: 58401 - RNA, 22 nt, Artificial Sequence
  Synthetic
agaugaggcauagcagcaggau

SEQ ID NO: 58402 - RNA, 23 nt, Artificial Sequence
  Synthetic
aagaugaggcauagcagcaggau

SEQ ID NO: 58403 - RNA, 24 nt, Artificial Sequence
  Synthetic
gaagaugaggcauagcagcaggau

SEQ ID NO: 58404 - RNA, 18 nt, Artificial Sequence
  Synthetic
  misc_feature (13)..(13): n is a, c, g, or u
gaguuaaccagunaggau

SEQ ID NO: 58405 - RNA, 19 nt, Artificial Sequence
  Synthetic
  misc_feature (14)..(14): n is a, c, g, or u
ggaguuaaccagunaggau

SEQ ID NO: 58406 - RNA, 20 nt, Artificial Sequence
  Synthetic
  misc_feature (15)..(15): n is a, c, g, or u
aggaguuaaccagunaggau

SEQ ID NO: 58407 - RNA, 21 nt, Artificial Sequence
  Synthetic
  misc_feature (16)..(16): n is a, c, g, or u
aaggaguuaaccagunaggau

SEQ ID NO: 58408 - RNA, 22 nt, Artificial Sequence
  Synthetic
  misc_feature (17)..(17): n is a, c, g, or u
gaaggaguuaaccagunaggau

SEQ ID NO: 58409 - RNA, 23 nt, Artificial Sequence
  Synthetic
  misc_feature (18)..(18): n is a, c, g, or u
agaaggaguuaaccagunaggau

SEQ ID NO: 58410 - RNA, 24 nt, Artificial Sequence
  Synthetic
  misc_feature (19)..(19): n is a, c, g, or u
aagaaggaguuaaccagunaggau

SEQ ID NO: 58411 - RNA, 18 nt, Artificial Sequence
  Synthetic
  misc_feature (15)..(15): n is a, c, g, or u
uuuccuaaagcccangau

SEQ ID NO: 58412 - RNA, 19 nt, Artificial Sequence
  Synthetic
  misc_feature (16)..(16): n is a, c, g, or u
uuuuccuaaagcccangau

SEQ ID NO: 58413 - RNA, 20 nt, Artificial Sequence
  Synthetic
  misc_feature (17)..(17): n is a, c, g, or u
auuuuccuaaagcccangau

SEQ ID NO: 58414 - RNA, 21 nt, Artificial Sequence
  Synthetic
  misc_feature (18)..(18): n is a, c, g, or u
uauuuuccuaaagcccangau

SEQ ID NO: 58415 - RNA, 22 nt, Artificial Sequence
  Synthetic
  misc_feature (19)..(19): n is a, c, g, or u
guauuuuccuaaagcccangau

SEQ ID NO: 58416 - RNA, 23 nt, Artificial Sequence
  Synthetic
  misc_feature (20)..(20): n is a, c, g, or u
gguauuuuccuaaagcccangau

SEQ ID NO: 58417 - RNA, 24 nt, Artificial Sequence
  Synthetic
  misc_feature (21)..(21): n is a, c, g, or u
agguauuuuccuaaagcccangau

SEQ ID NO: 58418 - RNA, 18 nt, Artificial Sequence
  Synthetic
  misc_feature (15)..(15): n is a, c, g, or u
cggaaguguggauangau

SEQ ID NO: 58419 - RNA, 19 nt, Artificial Sequence
  Synthetic
  misc_feature (16)..(16): n is a, c, g, or u
ccggaaguguggauangau

SEQ ID NO: 58420 - RNA, 20 nt, Artificial Sequence
  Synthetic
  misc_feature (17)..(17): n is a, c, g, or u
uccggaaguguggauangau

SEQ ID NO: 58421 - RNA, 21 nt, Artificial Sequence
  Synthetic
  misc_feature (18)..(18): n is a, c, g, or u
uuccggaaguguggauangau

SEQ ID NO: 58422 - RNA, 22 nt, Artificial Sequence
  Synthetic
  misc_feature (19)..(19): n is a, c, g, or u
uuuccggaaguguggauangau

SEQ ID NO: 58423 - RNA, 23 nt, Artificial Sequence
  Synthetic
  misc_feature (20)..(20): n is a, c, g, or u
guuuccggaaguguggauangau

SEQ ID NO: 58424 - RNA, 24 nt, Artificial Sequence
  Synthetic
  misc_feature (21)..(21): n is a, c, g, or u
aguuuccggaaguguggauangau

SEQ ID NO: 58425 - RNA, 18 nt, Artificial Sequence
  Synthetic
  misc_feature (15)..(15): n is a, c, g, or u
gugcugguggucgungau

SEQ ID NO: 58426 - RNA, 19 nt, Artificial Sequence
  Synthetic
  misc_feature (16)..(16): n is a, c, g, or u
cgugcugguggucgungau

SEQ ID NO: 58427 - RNA, 20 nt, Artificial Sequence
  Synthetic
  misc_feature (17)..(17): n is a, c, g, or u
ccgugcugguggucgungau

SEQ ID NO: 58428 - RNA, 21 nt, Artificial Sequence
  Synthetic
  misc_feature (18)..(18): n is a, c, g, or u
cccgugcugguggucgungau

SEQ ID NO: 58429 - RNA, 22 nt, Artificial Sequence
  Synthetic
  misc_feature (19)..(19): n is a, c, g, or u
ucccgugcugguggucgungau

SEQ ID NO: 58430 - RNA, 23 nt, Artificial Sequence
  Synthetic
  misc_feature (20)..(20): n is a, c, g, or u
gucccgugcugguggucgungau

SEQ ID NO: 58431 - RNA, 24 nt, Artificial Sequence
  Synthetic
  misc_feature (21)..(21): n is a, c, g, or u
ggucccgugcugguggucgungau

SEQ ID NO: 58432 - RNA, 18 nt, Artificial Sequence
  Synthetic
  misc_feature (4)..(4): n is a, c, g, or u
uucnagaagauugaugau

SEQ ID NO: 58433 - RNA, 19 nt, Artificial Sequence
  Synthetic
  misc_feature (5)..(5): n is a, c, g, or u
cuucnagaagauugaugau

SEQ ID NO: 58434 - RNA, 20 nt, Artificial Sequence
  Synthetic
  misc_feature (6)..(6): n is a, c, g, or u
ucuucnagaagauugaugau

SEQ ID NO: 58435 - RNA, 21 nt, Artificial Sequence
  Synthetic
  misc_feature (7)..(7): n is a, c, g, or u
gucuucnagaagauugaugau

SEQ ID NO: 58436 - RNA, 22 nt, Artificial Sequence
  Synthetic
  misc_feature (8)..(8): n is a, c, g, or u
agucuucnagaagauugaugau

SEQ ID NO: 58437 - RNA, 23 nt, Artificial Sequence
  Synthetic
  misc_feature (9)..(9): n is a, c, g, or u
cagucuucnagaagauugaugau

SEQ ID NO: 58438 - RNA, 24 nt, Artificial Sequence
  Synthetic
  misc_feature (10)..(10): n is a, c, g, or u
ccagucuucnagaagauugaugau

SEQ ID NO: 58439 - RNA, 18 nt, Artificial Sequence
  Synthetic
aggagguugguaagugau

SEQ ID NO: 58440 - RNA, 19 nt, Artificial Sequence
  Synthetic
caggagguugguaagugau

SEQ ID NO: 58441 - RNA, 20 nt, Artificial Sequence
  Synthetic
acaggagguugguaagugau

SEQ ID NO: 58442 - RNA, 21 nt, Artificial Sequence
  Synthetic
gacaggagguugguaagugau

SEQ ID NO: 58443 - RNA, 22 nt, Artificial Sequence
  Synthetic
ggacaggagguugguaagugau

SEQ ID NO: 58444 - RNA, 23 nt, Artificial Sequence
  Synthetic
aggacaggagguugguaagugau

SEQ ID NO: 58445 - RNA, 24 nt, Artificial Sequence
  Synthetic
gaggacaggagguugguaagugau

SEQ ID NO: 58446 - RNA, 18 nt, Artificial Sequence
  Synthetic
  misc_feature (2)..(2): n is a, c, g, or u
  misc_feature (8)..(8): n is a, c, g, or u
  misc_feature (16)..(16): n is a, c, g, or u
ungcagunauacaggnau

SEQ ID NO: 58447 - RNA, 19 nt, Artificial Sequence
  Synthetic
  misc_feature (3)..(3): n is a, c, g, or u
  misc_feature (9)..(9): n is a, c, g, or u
  misc_feature (17)..(17): n is a, c, g, or u
uungcagunauacaggnau

SEQ ID NO: 58448 - RNA, 20 nt, Artificial Sequence
  Synthetic
  misc_feature (4)..(4): n is a, c, g, or u
  misc_feature (10)..(10): n is a, c, g, or u
  misc_feature (18)..(18): n is a, c, g, or u
uuungcagunauacaggnau

SEQ ID NO: 58449 - RNA, 21 nt, Artificial Sequence
  Synthetic
  misc_feature (5)..(5): n is a, c, g, or u
  misc_feature (11)..(11): n is a, c, g, or u
  misc_feature (19)..(19): n is a, c, g, or u
guuungcagunauacaggnau

SEQ ID NO: 58450 - RNA, 22 nt, Artificial Sequence
  Synthetic
  misc_feature (6)..(6): n is a, c, g, or u
  misc_feature (12)..(12): n is a, c, g, or u
  misc_feature (20)..(20): n is a, c, g, or u
uguuungcagunauacaggnau

SEQ ID NO: 58451 - RNA, 23 nt, Artificial Sequence
  Synthetic
  misc_feature (7)..(7): n is a, c, g, or u
  misc_feature (13)..(13): n is a, c, g, or u
  misc_feature (21)..(21): n is a, c, g, or u
cuguuungcagunauacaggnau

SEQ ID NO: 58452 - RNA, 24 nt, Artificial Sequence
  Synthetic
  misc_feature (8)..(8): n is a, c, g, or u
  misc_feature (14)..(14): n is a, c, g, or u
  misc_feature (22)..(22): n is a, c, g, or u
ccuguuungcagunauacaggnau

SEQ ID NO: 58453 - RNA, 18 nt, Artificial Sequence
  Synthetic
  misc_feature (10)..(10): n is a, c, g, or u
  misc_feature (16)..(16): n is a, c, g, or u
agccuguuungcagunau

SEQ ID NO: 58454 - RNA, 19 nt, Artificial Sequence
  Synthetic
  misc_feature (11)..(11): n is a, c, g, or u
  misc_feature (17)..(17): n is a, c, g, or u
aagccuguuungcagunau

SEQ ID NO: 58455 - RNA, 20 nt, Artificial Sequence
  Synthetic
  misc_feature (12)..(12): n is a, c, g, or u
  misc_feature (18)..(18): n is a, c, g, or u
aaagccuguuungcagunau

SEQ ID NO: 58456 - RNA, 21 nt, Artificial Sequence
  Synthetic
  misc_feature (13)..(13): n is a, c, g, or u
  misc_feature (19)..(19): n is a, c, g, or u
aaaagccuguuungcagunau

SEQ ID NO: 58457 - RNA, 22 nt, Artificial Sequence
  Synthetic
  misc_feature (14)..(14): n is a, c, g, or u
  misc_feature (20)..(20): n is a, c, g, or u
caaaagccuguuungcagunau

SEQ ID NO: 58458 - RNA, 23 nt, Artificial Sequence
  Synthetic
  misc_feature (15)..(15): n is a, c, g, or u
  misc_feature (21)..(21): n is a, c, g, or u
acaaaagccuguuungcagunau

SEQ ID NO: 58459 - RNA, 24 nt, Artificial Sequence
  Synthetic
  misc_feature (16)..(16): n is a, c, g, or u
  misc_feature (22)..(22): n is a, c, g, or u
gacaaaagccuguuungcagunau

SEQ ID NO: 58460 - RNA, 18 nt, Artificial Sequence
  Synthetic
  misc_feature (12)..(12): n is a, c, g, or u
ucuuguucccangaauau

SEQ ID NO: 58461 - RNA, 19 nt, Artificial Sequence
  Synthetic
  misc_feature (13)..(13): n is a, c, g, or u
cucuuguucccangaauau

SEQ ID NO: 58462 - RNA, 20 nt, Artificial Sequence
  Synthetic
  misc_feature (14)..(14): n is a, c, g, or u
gcucuuguucccangaauau

SEQ ID NO: 58463 - RNA, 21 nt, Artificial Sequence
  Synthetic
  misc_feature (15)..(15): n is a, c, g, or u
agcucuuguucccangaauau

SEQ ID NO: 58464 - RNA, 22 nt, Artificial Sequence
  Synthetic
  misc_feature (16)..(16): n is a, c, g, or u
uagcucuuguucccangaauau

SEQ ID NO: 58465 - RNA, 23 nt, Artificial Sequence
  Synthetic
  misc_feature (17)..(17): n is a, c, g, or u
guagcucuuguucccangaauau

SEQ ID NO: 58466 - RNA, 24 nt, Artificial Sequence
  Synthetic
  misc_feature (18)..(18): n is a, c, g, or u
uguagcucuuguucccangaauau

SEQ ID NO: 58467 - RNA, 18 nt, Artificial Sequence
  Synthetic
aauugguaacagcgguau

SEQ ID NO: 58468 - RNA, 19 nt, Artificial Sequence
  Synthetic
aaauugguaacagcgguau

SEQ ID NO: 58469 - RNA, 20 nt, Artificial Sequence
  Synthetic
aaaauugguaacagcgguau

SEQ ID NO: 58470 - RNA, 21 nt, Artificial Sequence
  Synthetic
gaaaauugguaacagcgguau

SEQ ID NO: 58471 - RNA, 22 nt, Artificial Sequence
  Synthetic
agaaaauugguaacagcgguau

SEQ ID NO: 58472 - RNA, 23 nt, Artificial Sequence
  Synthetic
cagaaaauugguaacagcgguau

SEQ ID NO: 58473 - RNA, 24 nt, Artificial Sequence
  Synthetic
acagaaaauugguaacagcgguau

SEQ ID NO: 58474 - RNA, 18 nt, Artificial Sequence
  Synthetic
gucuagacucugugguau

SEQ ID NO: 58475 - RNA, 19 nt, Artificial Sequence
  Synthetic
agucuagacucugugguau

SEQ ID NO: 58476 - RNA, 20 nt, Artificial Sequence
  Synthetic
gagucuagacucugugguau

SEQ ID NO: 58477 - RNA, 21 nt, Artificial Sequence
  Synthetic
cgagucuagacucugugguau

SEQ ID NO: 58478 - RNA, 22 nt, Artificial Sequence
  Synthetic
acgagucuagacucugugguau

SEQ ID NO: 58479 - RNA, 23 nt, Artificial Sequence
  Synthetic
cacgagucuagacucugugguau

SEQ ID NO: 58480 - RNA, 24 nt, Artificial Sequence
  Synthetic
ccacgagucuagacucugugguau

SEQ ID NO: 58481 - RNA, 18 nt, Artificial Sequence
  Synthetic
  misc_feature (7)..(7): n is a, c, g, or u
  misc_feature (13)..(14): n is a, c, g, or u
guccaanaguccnnuuau

SEQ ID NO: 58482 - RNA, 19 nt, Artificial Sequence
  Synthetic
  misc_feature (8)..(8): n is a, c, g, or u
  misc_feature (14)..(15): n is a, c, g, or u
aguccaanaguccnnuuau

SEQ ID NO: 58483 - RNA, 20 nt, Artificial Sequence
  Synthetic
  misc_feature (9)..(9): n is a, c, g, or u
  misc_feature (15)..(16): n is a, c, g, or u
aaguccaanaguccnnuuau

SEQ ID NO: 58484 - RNA, 21 nt, Artificial Sequence
  Synthetic
  misc_feature (10)..(10): n is a, c, g, or u
  misc_feature (16)..(17): n is a, c, g, or u
aaaguccaanaguccnnuuau

SEQ ID NO: 58485 - RNA, 22 nt, Artificial Sequence
  Synthetic
  misc_feature (11)..(11): n is a, c, g, or u
  misc_feature (17)..(18): n is a, c, g, or u
gaaaguccaanaguccnnuuau

SEQ ID NO: 58486 - RNA, 23 nt, Artificial Sequence
  Synthetic
  misc_feature (12)..(12): n is a, c, g, or u
  misc_feature (18)..(19): n is a, c, g, or u
ugaaaguccaanaguccnnuuau

SEQ ID NO: 58487 - RNA, 24 nt, Artificial Sequence
  Synthetic
  misc_feature (13)..(13): n is a, c, g, or u
  misc_feature (19)..(20): n is a, c, g, or u
cugaaaguccaanaguccnnuuau

SEQ ID NO: 58488 - RNA, 18 nt, Artificial Sequence
  Synthetic
cagaucauccauauaacu

SEQ ID NO: 58489 - RNA, 19 nt, Artificial Sequence
  Synthetic
ccagaucauccauauaacu

SEQ ID NO: 58490 - RNA, 20 nt, Artificial Sequence
  Synthetic
accagaucauccauauaacu

SEQ ID NO: 58491 - RNA, 21 nt, Artificial Sequence
  Synthetic
uaccagaucauccauauaacu

SEQ ID NO: 58492 - RNA, 22 nt, Artificial Sequence
  Synthetic
auaccagaucauccauauaacu

SEQ ID NO: 58493 - RNA, 23 nt, Artificial Sequence
  Synthetic
aauaccagaucauccauauaacu

SEQ ID NO: 58494 - RNA, 24 nt, Artificial Sequence
  Synthetic
caauaccagaucauccauauaacu

SEQ ID NO: 58495 - RNA, 18 nt, Artificial Sequence
  Synthetic
ggagugcgaauccacacu

SEQ ID NO: 58496 - RNA, 19 nt, Artificial Sequence
  Synthetic
aggagugcgaauccacacu

SEQ ID NO: 58497 - RNA, 20 nt, Artificial Sequence
  Synthetic
gaggagugcgaauccacacu

SEQ ID NO: 58498 - RNA, 21 nt, Artificial Sequence
  Synthetic
ggaggagugcgaauccacacu

SEQ ID NO: 58499 - RNA, 22 nt, Artificial Sequence
  Synthetic
  misc_feature (1)..(1): n is a, c, g, or u
nggaggagugcgaauccacacu

SEQ ID NO: 58500 - RNA, 23 nt, Artificial Sequence
  Synthetic
  misc_feature (2)..(2): n is a, c, g, or u
cnggaggagugcgaauccacacu

SEQ ID NO: 58501 - RNA, 24 nt, Artificial Sequence
  Synthetic
  misc_feature (3)..(3): n is a, c, g, or u
gcnggaggagugcgaauccacacu

SEQ ID NO: 58502 - RNA, 18 nt, Artificial Sequence
  Synthetic
cacugaacaaauugcacu

SEQ ID NO: 58503 - RNA, 19 nt, Artificial Sequence
  Synthetic
ccacugaacaaauugcacu

SEQ ID NO: 58504 - RNA, 20 nt, Artificial Sequence
  Synthetic
accacugaacaaauugcacu

SEQ ID NO: 58505 - RNA, 21 nt, Artificial Sequence
  Synthetic
caccacugaacaaauugcacu

SEQ ID NO: 58506 - RNA, 22 nt, Artificial Sequence
  Synthetic
gcaccacugaacaaauugcacu

SEQ ID NO: 58507 - RNA, 23 nt, Artificial Sequence
  Synthetic
cgcaccacugaacaaauugcacu

SEQ ID NO: 58508 - RNA, 24 nt, Artificial Sequence
  Synthetic
acgcaccacugaacaaauugcacu

SEQ ID NO: 58509 - RNA, 18 nt, Artificial Sequence
  Synthetic
  misc_feature (5)..(6): n is a, c, g, or u
guccnnuuauguaagacu

SEQ ID NO: 58510 - RNA, 19 nt, Artificial Sequence
  Synthetic
  misc_feature (6)..(7): n is a, c, g, or u
aguccnnuuauguaagacu

SEQ ID NO: 58511 - RNA, 20 nt, Artificial Sequence
  Synthetic
  misc_feature (1)..(1): n is a, c, g, or u
  misc_feature (7)..(8): n is a, c, g, or u
naguccnnuuauguaagacu

SEQ ID NO: 58512 - RNA, 21 nt, Artificial Sequence
  Synthetic
  misc_feature (2)..(2): n is a, c, g, or u
  misc_feature (8)..(9): n is a, c, g, or u
anaguccnnuuauguaagacu

SEQ ID NO: 58513 - RNA, 22 nt, Artificial Sequence
  Synthetic
  misc_feature (3)..(3): n is a, c, g, or u
  misc_feature (9)..(10): n is a, c, g, or u
aanaguccnnuuauguaagacu

SEQ ID NO: 58514 - RNA, 23 nt, Artificial Sequence
  Synthetic
  misc_feature (4)..(4): n is a, c, g, or u
  misc_feature (10)..(11): n is a, c, g, or u
caanaguccnnuuauguaagacu

SEQ ID NO: 58515 - RNA, 24 nt, Artificial Sequence
  Synthetic
  misc_feature (5)..(5): n is a, c, g, or u
  misc_feature (11)..(12): n is a, c, g, or u
ccaanaguccnnuuauguaagacu

SEQ ID NO: 58516 - RNA, 18 nt, Artificial Sequence
  Synthetic
  misc_feature (10)..(10): n is a, c, g, or u
gaagucccanucgggacu

SEQ ID NO: 58517 - RNA, 19 nt, Artificial Sequence
  Synthetic
  misc_feature (11)..(11): n is a, c, g, or u
ugaagucccanucgggacu

SEQ ID NO: 58518 - RNA, 20 nt, Artificial Sequence
  Synthetic
  misc_feature (12)..(12): n is a, c, g, or u
uugaagucccanucgggacu

SEQ ID NO: 58519 - RNA, 21 nt, Artificial Sequence
  Synthetic
  misc_feature (13)..(13): n is a, c, g, or u
guugaagucccanucgggacu

SEQ ID NO: 58520 - RNA, 22 nt, Artificial Sequence
  Synthetic
  misc_feature (14)..(14): n is a, c, g, or u
uguugaagucccanucgggacu

SEQ ID NO: 58521 - RNA, 23 nt, Artificial Sequence
  Synthetic
  misc_feature (1)..(1): n is a, c, g, or u
  misc_feature (15)..(15): n is a, c, g, or u
nuguugaagucccanucgggacu

SEQ ID NO: 58522 - RNA, 24 nt, Artificial Sequence
  Synthetic
  misc_feature (2)..(2): n is a, c, g, or u
  misc_feature (16)..(16): n is a, c, g, or u
unuguugaagucccanucgggacu

SEQ ID NO: 58523 - RNA, 18 nt, Artificial Sequence
  Synthetic
  misc_feature (5)..(5): n is a, c, g, or u
caaangacaccaaauacu

SEQ ID NO: 58524 - RNA, 19 nt, Artificial Sequence
  Synthetic
  misc_feature (6)..(6): n is a, c, g, or u
ccaaangacaccaaauacu

SEQ ID NO: 58525 - RNA, 20 nt, Artificial Sequence
  Synthetic
  misc_feature (7)..(7): n is a, c, g, or u
uccaaangacaccaaauacu

SEQ ID NO: 58526 - RNA, 21 nt, Artificial Sequence
  Synthetic
  misc_feature (8)..(8): n is a, c, g, or u
cuccaaangacaccaaauacu

SEQ ID NO: 58527 - RNA, 22 nt, Artificial Sequence
  Synthetic
  misc_feature (9)..(9): n is a, c, g, or u
acuccaaangacaccaaauacu

SEQ ID NO: 58528 - RNA, 23 nt, Artificial Sequence
  Synthetic
  misc_feature (10)..(10): n is a, c, g, or u
cacuccaaangacaccaaauacu

SEQ ID NO: 58529 - RNA, 24 nt, Artificial Sequence
  Synthetic
  misc_feature (11)..(11): n is a, c, g, or u
acacuccaaangacaccaaauacu

SEQ ID NO: 58530 - RNA, 18 nt, Artificial Sequence
  Synthetic
  misc_feature (8)..(8): n is a, c, g, or u
ccguaaanuuucccaccu

SEQ ID NO: 58531 - RNA, 19 nt, Artificial Sequence
  Synthetic
  misc_feature (9)..(9): n is a, c, g, or u
cccguaaanuuucccaccu

SEQ ID NO: 58532 - RNA, 20 nt, Artificial Sequence
  Synthetic
  misc_feature (1)..(1): n is a, c, g, or u
  misc_feature (10)..(10): n is a, c, g, or u
ncccguaaanuuucccaccu

SEQ ID NO: 58533 - RNA, 21 nt, Artificial Sequence
  Synthetic
  misc_feature (2)..(2): n is a, c, g, or u
  misc_feature (11)..(11): n is a, c, g, or u
gncccguaaanuuucccaccu

SEQ ID NO: 58534 - RNA, 22 nt, Artificial Sequence
  Synthetic
  misc_feature (3)..(3): n is a, c, g, or u
  misc_feature (12)..(12): n is a, c, g, or u
agncccguaaanuuucccaccu

SEQ ID NO: 58535 - RNA, 23 nt, Artificial Sequence
  Synthetic
  misc_feature (4)..(4): n is a, c, g, or u
  misc_feature (13)..(13): n is a, c, g, or u
gagncccguaaanuuucccaccu

SEQ ID NO: 58536 - RNA, 24 nt, Artificial Sequence
  Synthetic
  misc_feature (5)..(5): n is a, c, g, or u
  misc_feature (14)..(14): n is a, c, g, or u
agagncccguaaanuuucccaccu

SEQ ID NO: 58537 - RNA, 18 nt, Artificial Sequence
  Synthetic
  misc_feature (10)..(11): n is a, c, g, or u
cacccgggunnucccccu

SEQ ID NO: 58538 - RNA, 19 nt, Artificial Sequence
  Synthetic
  misc_feature (11)..(12): n is a, c, g, or u
acacccgggunnucccccu

SEQ ID NO: 58539 - RNA, 20 nt, Artificial Sequence
  Synthetic
  misc_feature (12)..(13): n is a, c, g, or u
gacacccgggunnucccccu

SEQ ID NO: 58540 - RNA, 21 nt, Artificial Sequence
  Synthetic
  misc_feature (13)..(14): n is a, c, g, or u
ggacacccgggunnucccccu

SEQ ID NO: 58541 - RNA, 22 nt, Artificial Sequence
  Synthetic
  misc_feature (14)..(15): n is a, c, g, or u
aggacacccgggunnucccccu

SEQ ID NO: 58542 - RNA, 23 nt, Artificial Sequence
  Synthetic
  misc_feature (15)..(16): n is a, c, g, or u
caggacacccgggunnucccccu

SEQ ID NO: 58543 - RNA, 24 nt, Artificial Sequence
  Synthetic
  misc_feature (16)..(17): n is a, c, g, or u
ccaggacacccgggunnucccccu

SEQ ID NO: 58544 - RNA, 18 nt, Artificial Sequence
  Synthetic
  misc_feature (4)..(4): n is a, c, g, or u
  misc_feature (8)..(8): n is a, c, g, or u
guunacanagaaaggccu

SEQ ID NO: 58545 - RNA, 19 nt, Artificial Sequence
  Synthetic
  misc_feature (5)..(5): n is a, c, g, or u
  misc_feature (9)..(9): n is a, c, g, or u
uguunacanagaaaggccu

SEQ ID NO: 58546 - RNA, 20 nt, Artificial Sequence
  Synthetic
  misc_feature (1)..(1): n is a, c, g, or u
  misc_feature (6)..(6): n is a, c, g, or u
  misc_feature (10)..(10): n is a, c, g, or u
nuguunacanagaaaggccu

SEQ ID NO: 58547 - RNA, 21 nt, Artificial Sequence
  Synthetic
  misc_feature (2)..(2): n is a, c, g, or u
  misc_feature (7)..(7): n is a, c, g, or u
  misc_feature (11)..(11): n is a, c, g, or u
anuguunacanagaaaggccu

SEQ ID NO: 58548 - RNA, 22 nt, Artificial Sequence
  Synthetic
  misc_feature (3)..(3): n is a, c, g, or u
  misc_feature (8)..(8): n is a, c, g, or u
  misc_feature (12)..(12): n is a, c, g, or u
uanuguunacanagaaaggccu

SEQ ID NO: 58549 - RNA, 23 nt, Artificial Sequence
  Synthetic
  misc_feature (4)..(4): n is a, c, g, or u
  misc_feature (9)..(9): n is a, c, g, or u
  misc_feature (13)..(13): n is a, c, g, or u
guanuguunacanagaaaggccu

SEQ ID NO: 58550 - RNA, 24 nt, Artificial Sequence
  Synthetic
  misc_feature (5)..(5): n is a, c, g, or u
  misc_feature (10)..(10): n is a, c, g, or u
  misc_feature (14)..(14): n is a, c, g, or u
uguanuguunacanagaaaggccu

SEQ ID NO: 58551 - RNA, 18 nt, Artificial Sequence
  Synthetic
  misc_feature (8)..(8): n is a, c, g, or u
  misc_feature (14)..(14): n is a, c, g, or u
ucggaucnaacagngccu

SEQ ID NO: 58552 - RNA, 19 nt, Artificial Sequence
  Synthetic
  misc_feature (9)..(9): n is a, c, g, or u
  misc_feature (15)..(15): n is a, c, g, or u
cucggaucnaacagngccu

SEQ ID NO: 58553 - RNA, 20 nt, Artificial Sequence
  Synthetic
  misc_feature (10)..(10): n is a, c, g, or u
  misc_feature (16)..(16): n is a, c, g, or u
ccucggaucnaacagngccu

SEQ ID NO: 58554 - RNA, 21 nt, Artificial Sequence
  Synthetic
  misc_feature (11)..(11): n is a, c, g, or u
  misc_feature (17)..(17): n is a, c, g, or u
cccucggaucnaacagngccu

SEQ ID NO: 58555 - RNA, 22 nt, Artificial Sequence
  Synthetic
  misc_feature (12)..(12): n is a, c, g, or u
  misc_feature (18)..(18): n is a, c, g, or u
acccucggaucnaacagngccu

SEQ ID NO: 58556 - RNA, 23 nt, Artificial Sequence
  Synthetic
  misc_feature (13)..(13): n is a, c, g, or u
  misc_feature (19)..(19): n is a, c, g, or u
uacccucggaucnaacagngccu

SEQ ID NO: 58557 - RNA, 24 nt, Artificial Sequence
  Synthetic
  misc_feature (14)..(14): n is a, c, g, or u
  misc_feature (20)..(20): n is a, c, g, or u
uuacccucggaucnaacagngccu

SEQ ID NO: 58558 - RNA, 18 nt, Artificial Sequence
  Synthetic
  misc_feature (1)..(1): n is a, c, g, or u
  misc_feature (7)..(7): n is a, c, g, or u
ncacaanauagcuugccu

SEQ ID NO: 58559 - RNA, 19 nt, Artificial Sequence
  Synthetic
  misc_feature (2)..(2): n is a, c, g, or u
  misc_feature (8)..(8): n is a, c, g, or u
ancacaanauagcuugccu

SEQ ID NO: 58560 - RNA, 20 nt, Artificial Sequence
  Synthetic
  misc_feature (3)..(3): n is a, c, g, or u
  misc_feature (9)..(9): n is a, c, g, or u
cancacaanauagcuugccu

SEQ ID NO: 58561 - RNA, 21 nt, Artificial Sequence
  Synthetic
  misc_feature (4)..(4): n is a, c, g, or u
  misc_feature (10)..(10): n is a, c, g, or u
ccancacaanauagcuugccu

SEQ ID NO: 58562 - RNA, 22 nt, Artificial Sequence
  Synthetic
  misc_feature (5)..(5): n is a, c, g, or u
  misc_feature (11)..(11): n is a, c, g, or u
cccancacaanauagcuugccu

SEQ ID NO: 58563 - RNA, 23 nt, Artificial Sequence
  Synthetic
  misc_feature (6)..(6): n is a, c, g, or u
  misc_feature (12)..(12): n is a, c, g, or u
ccccancacaanauagcuugccu

SEQ ID NO: 58564 - RNA, 24 nt, Artificial Sequence
  Synthetic
  misc_feature (7)..(7): n is a, c, g, or u
  misc_feature (13)..(13): n is a, c, g, or u
accccancacaanauagcuugccu

SEQ ID NO: 58565 - RNA, 18 nt, Artificial Sequence
  Synthetic
  misc_feature (1)..(1): n is a, c, g, or u
naaggagguguacuuccu

SEQ ID NO: 58566 - RNA, 19 nt, Artificial Sequence
  Synthetic
  misc_feature (2)..(2): n is a, c, g, or u
gnaaggagguguacuuccu

SEQ ID NO: 58567 - RNA, 20 nt, Artificial Sequence
  Synthetic
  misc_feature (3)..(3): n is a, c, g, or u
ggnaaggagguguacuuccu

SEQ ID NO: 58568 - RNA, 21 nt, Artificial Sequence
  Synthetic
  misc_feature (4)..(4): n is a, c, g, or u
uggnaaggagguguacuuccu

SEQ ID NO: 58569 - RNA, 22 nt, Artificial Sequence
  Synthetic
  misc_feature (5)..(5): n is a, c, g, or u
auggnaaggagguguacuuccu

SEQ ID NO: 58570 - RNA, 23 nt, Artificial Sequence
  Synthetic
  misc_feature (6)..(6): n is a, c, g, or u
cauggnaaggagguguacuuccu

SEQ ID NO: 58571 - RNA, 24 nt, Artificial Sequence
  Synthetic
  misc_feature (7)..(7): n is a, c, g, or u
ccauggnaaggagguguacuuccu

SEQ ID NO: 58572 - RNA, 18 nt, Artificial Sequence
  Synthetic
cugcgagcgaaacaagcu

SEQ ID NO: 58573 - RNA, 19 nt, Artificial Sequence
  Synthetic
gcugcgagcgaaacaagcu

SEQ ID NO: 58574 - RNA, 20 nt, Artificial Sequence
  Synthetic
ggcugcgagcgaaacaagcu

SEQ ID NO: 58575 - RNA, 18 nt, Artificial Sequence
  Synthetic
gccacccaaggcacagcu

SEQ ID NO: 58576 - RNA, 19 nt, Artificial Sequence
  Synthetic
agccacccaaggcacagcu

SEQ ID NO: 58577 - RNA, 20 nt, Artificial Sequence
  Synthetic
aagccacccaaggcacagcu

SEQ ID NO: 58578 - RNA, 21 nt, Artificial Sequence
  Synthetic
aaagccacccaaggcacagcu

SEQ ID NO: 58579 - RNA, 22 nt, Artificial Sequence
  Synthetic
caaagccacccaaggcacagcu

SEQ ID NO: 58580 - RNA, 23 nt, Artificial Sequence
  Synthetic
ccaaagccacccaaggcacagcu

SEQ ID NO: 58581 - RNA, 24 nt, Artificial Sequence
  Synthetic
cccaaagccacccaaggcacagcu

SEQ ID NO: 58582 - RNA, 18 nt, Artificial Sequence
  Synthetic
agguuccacgcaugcgcu

SEQ ID NO: 58583 - RNA, 19 nt, Artificial Sequence
  Synthetic
aagguuccacgcaugcgcu

SEQ ID NO: 58584 - RNA, 20 nt, Artificial Sequence
  Synthetic
aaagguuccacgcaugcgcu

SEQ ID NO: 58585 - RNA, 18 nt, Artificial Sequence
  Synthetic
  misc_feature (11)..(12): n is a, c, g, or u
gugccgaugannuucgcu

SEQ ID NO: 58586 - RNA, 19 nt, Artificial Sequence
  Synthetic
  misc_feature (1)..(1): n is a, c, g, or u
  misc_feature (12)..(13): n is a, c, g, or u
ngugccgaugannuucgcu

SEQ ID NO: 58587 - RNA, 20 nt, Artificial Sequence
  Synthetic
  misc_feature (2)..(2): n is a, c, g, or u
  misc_feature (13)..(14): n is a, c, g, or u
cngugccgaugannuucgcu

SEQ ID NO: 58588 - RNA, 21 nt, Artificial Sequence
  Synthetic
  misc_feature (3)..(3): n is a, c, g, or u
  misc_feature (14)..(15): n is a, c, g, or u
ucngugccgaugannuucgcu

SEQ ID NO: 58589 - RNA, 22 nt, Artificial Sequence
  Synthetic
  misc_feature (4)..(4): n is a, c, g, or u
  misc_feature (15)..(16): n is a, c, g, or u
gucngugccgaugannuucgcu

SEQ ID NO: 58590 - RNA, 23 nt, Artificial Sequence
  Synthetic
  misc_feature (5)..(5): n is a, c, g, or u
  misc_feature (16)..(17): n is a, c, g, or u
ugucngugccgaugannuucgcu

SEQ ID NO: 58591 - RNA, 24 nt, Artificial Sequence
  Synthetic
  misc_feature (6)..(6): n is a, c, g, or u
  misc_feature (17)..(18): n is a, c, g, or u
uugucngugccgaugannuucgcu

SEQ ID NO: 58592 - RNA, 18 nt, Artificial Sequence
  Synthetic
  misc_feature (1)..(1): n is a, c, g, or u
nuucgcuccagaccggcu

SEQ ID NO: 58593 - RNA, 19 nt, Artificial Sequence
  Synthetic
  misc_feature (1)..(2): n is a, c, g, or u
nnuucgcuccagaccggcu

SEQ ID NO: 58594 - RNA, 20 nt, Artificial Sequence
  Synthetic
  misc_feature (2)..(3): n is a, c, g, or u
annuucgcuccagaccggcu

SEQ ID NO: 58595 - RNA, 21 nt, Artificial Sequence
  Synthetic
  misc_feature (3)..(4): n is a, c, g, or u
gannuucgcuccagaccggcu

SEQ ID NO: 58596 - RNA, 22 nt, Artificial Sequence
  Synthetic
  misc_feature (4)..(5): n is a, c, g, or u
ugannuucgcuccagaccggcu

SEQ ID NO: 58597 - RNA, 23 nt, Artificial Sequence
  Synthetic
  misc_feature (5)..(6): n is a, c, g, or u
augannuucgcuccagaccggcu

SEQ ID NO: 58598 - RNA, 24 nt, Artificial Sequence
  Synthetic
  misc_feature (6)..(7): n is a, c, g, or u
gaugannuucgcuccagaccggcu

SEQ ID NO: 58599 - RNA, 18 nt, Artificial Sequence
  Synthetic
gcaggaggcggaucugcu

SEQ ID NO: 58600 - RNA, 19 nt, Artificial Sequence
  Synthetic
agcaggaggcggaucugcu

SEQ ID NO: 58601 - RNA, 20 nt, Artificial Sequence
  Synthetic
aagcaggaggcggaucugcu

SEQ ID NO: 58602 - RNA, 21 nt, Artificial Sequence
  Synthetic
gaagcaggaggcggaucugcu

SEQ ID NO: 58603 - RNA, 22 nt, Artificial Sequence
  Synthetic
ggaagcaggaggcggaucugcu

SEQ ID NO: 58604 - RNA, 23 nt, Artificial Sequence
  Synthetic
uggaagcaggaggcggaucugcu

SEQ ID NO: 58605 - RNA, 24 nt, Artificial Sequence
  Synthetic
guggaagcaggaggcggaucugcu

SEQ ID NO: 58606 - RNA, 18 nt, Artificial Sequence
  Synthetic
aaaaaguugcauggugcu

SEQ ID NO: 58607 - RNA, 19 nt, Artificial Sequence
  Synthetic
gaaaaaguugcauggugcu

SEQ ID NO: 58608 - RNA, 20 nt, Artificial Sequence
  Synthetic
ugaaaaaguugcauggugcu

SEQ ID NO: 58609 - RNA, 21 nt, Artificial Sequence
  Synthetic
gugaaaaaguugcauggugcu

SEQ ID NO: 58610 - RNA, 22 nt, Artificial Sequence
  Synthetic
ggugaaaaaguugcauggugcu

SEQ ID NO: 58611 - RNA, 23 nt, Artificial Sequence
  Synthetic
aggugaaaaaguugcauggugcu

SEQ ID NO: 58612 - RNA, 24 nt, Artificial Sequence
  Synthetic
gaggugaaaaaguugcauggugcu

SEQ ID NO: 58613 - RNA, 18 nt, Artificial Sequence
  Synthetic
  misc_feature (13)..(13): n is a, c, g, or u
  misc_feature (16)..(16): n is a, c, g, or u
gacugggguuggnuuncu

SEQ ID NO: 58614 - RNA, 19 nt, Artificial Sequence
  Synthetic
  misc_feature (14)..(14): n is a, c, g, or u
  misc_feature (17)..(17): n is a, c, g, or u
agacugggguuggnuuncu

SEQ ID NO: 58615 - RNA, 20 nt, Artificial Sequence
  Synthetic
  misc_feature (15)..(15): n is a, c, g, or u
  misc_feature (18)..(18): n is a, c, g, or u
gagacugggguuggnuuncu

SEQ ID NO: 58616 - RNA, 21 nt, Artificial Sequence
  Synthetic
  misc_feature (16)..(16): n is a, c, g, or u
  misc_feature (19)..(19): n is a, c, g, or u
agagacugggguuggnuuncu

SEQ ID NO: 58617 - RNA, 22 nt, Artificial Sequence
  Synthetic
  misc_feature (17)..(17): n is a, c, g, or u
  misc_feature (20)..(20): n is a, c, g, or u
gagagacugggguuggnuuncu

SEQ ID NO: 58618 - RNA, 23 nt, Artificial Sequence
  Synthetic
  misc_feature (18)..(18): n is a, c, g, or u
  misc_feature (21)..(21): n is a, c, g, or u
ggagagacugggguuggnuuncu

SEQ ID NO: 58619 - RNA, 24 nt, Artificial Sequence
  Synthetic
  misc_feature (19)..(19): n is a, c, g, or u
  misc_feature (22)..(22): n is a, c, g, or u
uggagagacugggguuggnuuncu

SEQ ID NO: 58620 - RNA, 18 nt, Artificial Sequence
  Synthetic
gaagcaggaggcggaucu

SEQ ID NO: 58621 - RNA, 19 nt, Artificial Sequence
  Synthetic
ggaagcaggaggcggaucu

SEQ ID NO: 58622 - RNA, 20 nt, Artificial Sequence
  Synthetic
uggaagcaggaggcggaucu

SEQ ID NO: 58623 - RNA, 21 nt, Artificial Sequence
  Synthetic
guggaagcaggaggcggaucu

SEQ ID NO: 58624 - RNA, 22 nt, Artificial Sequence
  Synthetic
gguggaagcaggaggcggaucu

SEQ ID NO: 58625 - RNA, 23 nt, Artificial Sequence
  Synthetic
ugguggaagcaggaggcggaucu

SEQ ID NO: 58626 - RNA, 24 nt, Artificial Sequence
  Synthetic
uugguggaagcaggaggcggaucu

SEQ ID NO: 58627 - RNA, 18 nt, Artificial Sequence
  Synthetic
  misc_feature (10)..(10): n is a, c, g, or u
cuguggaugngugucucu

SEQ ID NO: 58628 - RNA, 19 nt, Artificial Sequence
  Synthetic
  misc_feature (11)..(11): n is a, c, g, or u
ccuguggaugngugucucu

SEQ ID NO: 58629 - RNA, 20 nt, Artificial Sequence
  Synthetic
  misc_feature (12)..(12): n is a, c, g, or u
gccuguggaugngugucucu

SEQ ID NO: 58630 - RNA, 21 nt, Artificial Sequence
  Synthetic
  misc_feature (1)..(1): n is a, c, g, or u
  misc_feature (13)..(13): n is a, c, g, or u
ngccuguggaugngugucucu

SEQ ID NO: 58631 - RNA, 22 nt, Artificial Sequence
  Synthetic
  misc_feature (2)..(2): n is a, c, g, or u
  misc_feature (14)..(14): n is a, c, g, or u
ungccuguggaugngugucucu

SEQ ID NO: 58632 - RNA, 23 nt, Artificial Sequence
  Synthetic
  misc_feature (3)..(3): n is a, c, g, or u
  misc_feature (15)..(15): n is a, c, g, or u
aungccuguggaugngugucucu

SEQ ID NO: 58633 - RNA, 24 nt, Artificial Sequence
  Synthetic
  misc_feature (4)..(4): n is a, c, g, or u
  misc_feature (16)..(16): n is a, c, g, or u
caungccuguggaugngugucucu

SEQ ID NO: 58634 - RNA, 18 nt, Artificial Sequence
  Synthetic
cucaagaacuguuucucu

SEQ ID NO: 58635 - RNA, 19 nt, Artificial Sequence
  Synthetic
acucaagaacuguuucucu

SEQ ID NO: 58636 - RNA, 20 nt, Artificial Sequence
  Synthetic
uacucaagaacuguuucucu

SEQ ID NO: 58637 - RNA, 21 nt, Artificial Sequence
  Synthetic
auacucaagaacuguuucucu

SEQ ID NO: 58638 - RNA, 22 nt, Artificial Sequence
  Synthetic
aauacucaagaacuguuucucu

SEQ ID NO: 58639 - RNA, 23 nt, Artificial Sequence
  Synthetic
aaauacucaagaacuguuucucu

SEQ ID NO: 58640 - RNA, 24 nt, Artificial Sequence
  Synthetic
caaauacucaagaacuguuucucu

SEQ ID NO: 58641 - RNA, 18 nt, Artificial Sequence
  Synthetic
uagcagggcccccagucu

SEQ ID NO: 58642 - RNA, 19 nt, Artificial Sequence
  Synthetic
  misc_feature (1)..(1): n is a, c, g, or u
nuagcagggcccccagucu

SEQ ID NO: 58643 - RNA, 20 nt, Artificial Sequence
  Synthetic
  misc_feature (2)..(2): n is a, c, g, or u
cnuagcagggcccccagucu

SEQ ID NO: 58644 - RNA, 21 nt, Artificial Sequence
  Synthetic
  misc_feature (3)..(3): n is a, c, g, or u
ucnuagcagggcccccagucu

SEQ ID NO: 58645 - RNA, 22 nt, Artificial Sequence
  Synthetic
  misc_feature (4)..(4): n is a, c, g, or u
uucnuagcagggcccccagucu

SEQ ID NO: 58646 - RNA, 23 nt, Artificial Sequence
  Synthetic
  misc_feature (5)..(5): n is a, c, g, or u
guucnuagcagggcccccagucu

SEQ ID NO: 58647 - RNA, 24 nt, Artificial Sequence
  Synthetic
  misc_feature (6)..(6): n is a, c, g, or u
uguucnuagcagggcccccagucu

SEQ ID NO: 58648 - RNA, 18 nt, Artificial Sequence
  Synthetic
ggaccugccucgucgucu

SEQ ID NO: 58649 - RNA, 19 nt, Artificial Sequence
  Synthetic
gggaccugccucgucgucu

SEQ ID NO: 58650 - RNA, 20 nt, Artificial Sequence
  Synthetic
ggggaccugccucgucgucu

SEQ ID NO: 58651 - RNA, 21 nt, Artificial Sequence
  Synthetic
aggggaccugccucgucgucu

SEQ ID NO: 58652 - RNA, 22 nt, Artificial Sequence
  Synthetic
  misc_feature (1)..(1): n is a, c, g, or u
naggggaccugccucgucgucu

SEQ ID NO: 58653 - RNA, 23 nt, Artificial Sequence
  Synthetic
  misc_feature (2)..(2): n is a, c, g, or u
cnaggggaccugccucgucgucu

SEQ ID NO: 58654 - RNA, 24 nt, Artificial Sequence
  Synthetic
  misc_feature (3)..(3): n is a, c, g, or u
ucnaggggaccugccucgucgucu

SEQ ID NO: 58655 - RNA, 18 nt, Artificial Sequence
  Synthetic
  misc_feature (10)..(10): n is a, c, g, or u
cgauugagancuucgucu

SEQ ID NO: 58656 - RNA, 19 nt, Artificial Sequence
  Synthetic
  misc_feature (11)..(11): n is a, c, g, or u
gcgauugagancuucgucu

SEQ ID NO: 58657 - RNA, 20 nt, Artificial Sequence
  Synthetic
  misc_feature (12)..(12): n is a, c, g, or u
ggcgauugagancuucgucu

SEQ ID NO: 58658 - RNA, 18 nt, Artificial Sequence
  Synthetic
ggauccagcugauggucu

SEQ ID NO: 58659 - RNA, 19 nt, Artificial Sequence
  Synthetic
  misc_feature (1)..(1): n is a, c, g, or u
nggauccagcugauggucu

SEQ ID NO: 58660 - RNA, 20 nt, Artificial Sequence
  Synthetic
  misc_feature (2)..(2): n is a, c, g, or u
gnggauccagcugauggucu

SEQ ID NO: 58661 - RNA, 21 nt, Artificial Sequence
  Synthetic
  misc_feature (3)..(3): n is a, c, g, or u
agnggauccagcugauggucu

SEQ ID NO: 58662 - RNA, 22 nt, Artificial Sequence
  Synthetic
  misc_feature (1)..(1): n is a, c, g, or u
  misc_feature (4)..(4): n is a, c, g, or u
nagnggauccagcugauggucu

SEQ ID NO: 58663 - RNA, 23 nt, Artificial Sequence
  Synthetic
  misc_feature (2)..(2): n is a, c, g, or u
  misc_feature (5)..(5): n is a, c, g, or u
anagnggauccagcugauggucu

SEQ ID NO: 58664 - RNA, 24 nt, Artificial Sequence
  Synthetic
  misc_feature (3)..(3): n is a, c, g, or u
  misc_feature (6)..(6): n is a, c, g, or u
aanagnggauccagcugauggucu

SEQ ID NO: 58665 - RNA, 18 nt, Artificial Sequence
  Synthetic
aggggcauuugguggucu

SEQ ID NO: 58666 - RNA, 19 nt, Artificial Sequence
  Synthetic
uaggggcauuugguggucu

SEQ ID NO: 58667 - RNA, 20 nt, Artificial Sequence
  Synthetic
auaggggcauuugguggucu

SEQ ID NO: 58668 - RNA, 21 nt, Artificial Sequence
  Synthetic
gauaggggcauuugguggucu

SEQ ID NO: 58669 - RNA, 22 nt, Artificial Sequence
  Synthetic
  misc_feature (1)..(1): n is a, c, g, or u
ngauaggggcauuugguggucu

SEQ ID NO: 58670 - RNA, 23 nt, Artificial Sequence
  Synthetic
  misc_feature (2)..(2): n is a, c, g, or u
angauaggggcauuugguggucu

SEQ ID NO: 58671 - RNA, 24 nt, Artificial Sequence
  Synthetic
  misc_feature (3)..(3): n is a, c, g, or u
uangauaggggcauuugguggucu

SEQ ID NO: 58672 - RNA, 18 nt, Artificial Sequence
  Synthetic
  misc_feature (12)..(12): n is a, c, g, or u
gccuguggaugngugucu

SEQ ID NO: 58673 - RNA, 19 nt, Artificial Sequence
  Synthetic
  misc_feature (1)..(1): n is a, c, g, or u
  misc_feature (13)..(13): n is a, c, g, or u
ngccuguggaugngugucu

SEQ ID NO: 58674 - RNA, 20 nt, Artificial Sequence
  Synthetic
  misc_feature (2)..(2): n is a, c, g, or u
  misc_feature (14)..(14): n is a, c, g, or u
ungccuguggaugngugucu

SEQ ID NO: 58675 - RNA, 21 nt, Artificial Sequence
  Synthetic
  misc_feature (3)..(3): n is a, c, g, or u
  misc_feature (15)..(15): n is a, c, g, or u
aungccuguggaugngugucu

SEQ ID NO: 58676 - RNA, 22 nt, Artificial Sequence
  Synthetic
  misc_feature (4)..(4): n is a, c, g, or u
  misc_feature (16)..(16): n is a, c, g, or u
caungccuguggaugngugucu

SEQ ID NO: 58677 - RNA, 23 nt, Artificial Sequence
  Synthetic
  misc_feature (5)..(5): n is a, c, g, or u
  misc_feature (17)..(17): n is a, c, g, or u
gcaungccuguggaugngugucu

SEQ ID NO: 58678 - RNA, 24 nt, Artificial Sequence
  Synthetic
  misc_feature (6)..(6): n is a, c, g, or u
  misc_feature (18)..(18): n is a, c, g, or u
ugcaungccuguggaugngugucu

SEQ ID NO: 58679 - RNA, 18 nt, Artificial Sequence
  Synthetic
aggcgagggaguucuucu

SEQ ID NO: 58680 - RNA, 19 nt, Artificial Sequence
  Synthetic
gaggcgagggaguucuucu

SEQ ID NO: 58681 - RNA, 20 nt, Artificial Sequence
  Synthetic
cgaggcgagggaguucuucu

SEQ ID NO: 58682 - RNA, 21 nt, Artificial Sequence
  Synthetic
gcgaggcgagggaguucuucu

SEQ ID NO: 58683 - RNA, 22 nt, Artificial Sequence
  Synthetic
ugcgaggcgagggaguucuucu

SEQ ID NO: 58684 - RNA, 23 nt, Artificial Sequence
  Synthetic
cugcgaggcgagggaguucuucu

SEQ ID NO: 58685 - RNA, 24 nt, Artificial Sequence
  Synthetic
ucugcgaggcgagggaguucuucu

SEQ ID NO: 58686 - RNA, 18 nt, Artificial Sequence
  Synthetic
  misc_feature (1)..(1): n is a, c, g, or u
ncgauagccaggacaagu

SEQ ID NO: 58687 - RNA, 19 nt, Artificial Sequence
  Synthetic
  misc_feature (2)..(2): n is a, c, g, or u
ancgauagccaggacaagu

SEQ ID NO: 58688 - RNA, 20 nt, Artificial Sequence
  Synthetic
  misc_feature (3)..(3): n is a, c, g, or u
cancgauagccaggacaagu

SEQ ID NO: 58689 - RNA, 21 nt, Artificial Sequence
  Synthetic
  misc_feature (4)..(4): n is a, c, g, or u
ccancgauagccaggacaagu

SEQ ID NO: 58690 - RNA, 22 nt, Artificial Sequence
  Synthetic
  misc_feature (5)..(5): n is a, c, g, or u
uccancgauagccaggacaagu

SEQ ID NO: 58691 - RNA, 23 nt, Artificial Sequence
  Synthetic
  misc_feature (6)..(6): n is a, c, g, or u
auccancgauagccaggacaagu

SEQ ID NO: 58692 - RNA, 24 nt, Artificial Sequence
  Synthetic
  misc_feature (7)..(7): n is a, c, g, or u
cauccancgauagccaggacaagu

SEQ ID NO: 58693 - RNA, 18 nt, Artificial Sequence
  Synthetic
aacuaaaagccagacagu

SEQ ID NO: 58694 - RNA, 19 nt, Artificial Sequence
  Synthetic
uaacuaaaagccagacagu

SEQ ID NO: 58695 - RNA, 20 nt, Artificial Sequence
  Synthetic
auaacuaaaagccagacagu

SEQ ID NO: 58696 - RNA, 21 nt, Artificial Sequence
  Synthetic
uauaacuaaaagccagacagu

SEQ ID NO: 58697 - RNA, 22 nt, Artificial Sequence
  Synthetic
auauaacuaaaagccagacagu

SEQ ID NO: 58698 - RNA, 23 nt, Artificial Sequence
  Synthetic
cauauaacuaaaagccagacagu

SEQ ID NO: 58699 - RNA, 24 nt, Artificial Sequence
  Synthetic
ccauauaacuaaaagccagacagu

SEQ ID NO: 58700 - RNA, 18 nt, Artificial Sequence
  Synthetic
gagaaguccaccacgagu

SEQ ID NO: 58701 - RNA, 19 nt, Artificial Sequence
  Synthetic
agagaaguccaccacgagu

SEQ ID NO: 58702 - RNA, 20 nt, Artificial Sequence
  Synthetic
gagagaaguccaccacgagu

SEQ ID NO: 58703 - RNA, 21 nt, Artificial Sequence
  Synthetic
ugagagaaguccaccacgagu

SEQ ID NO: 58704 - RNA, 22 nt, Artificial Sequence
  Synthetic
uugagagaaguccaccacgagu

SEQ ID NO: 58705 - RNA, 23 nt, Artificial Sequence
  Synthetic
auugagagaaguccaccacgagu

SEQ ID NO: 58706 - RNA, 24 nt, Artificial Sequence
  Synthetic
aauugagagaaguccaccacgagu

SEQ ID NO: 58707 - RNA, 18 nt, Artificial Sequence
  Synthetic
  misc_feature (1)..(1): n is a, c, g, or u
nuuucccaccuuaugagu

SEQ ID NO: 58708 - RNA, 19 nt, Artificial Sequence
  Synthetic
  misc_feature (2)..(2): n is a, c, g, or u
anuuucccaccuuaugagu

SEQ ID NO: 58709 - RNA, 20 nt, Artificial Sequence
  Synthetic
  misc_feature (3)..(3): n is a, c, g, or u
aanuuucccaccuuaugagu

SEQ ID NO: 58710 - RNA, 21 nt, Artificial Sequence
  Synthetic
  misc_feature (4)..(4): n is a, c, g, or u
aaanuuucccaccuuaugagu

SEQ ID NO: 58711 - RNA, 22 nt, Artificial Sequence
  Synthetic
  misc_feature (5)..(5): n is a, c, g, or u
uaaanuuucccaccuuaugagu

SEQ ID NO: 58712 - RNA, 23 nt, Artificial Sequence
  Synthetic
  misc_feature (6)..(6): n is a, c, g, or u
guaaanuuucccaccuuaugagu

SEQ ID NO: 58713 - RNA, 24 nt, Artificial Sequence
  Synthetic
  misc_feature (7)..(7): n is a, c, g, or u
cguaaanuuucccaccuuaugagu

SEQ ID NO: 58714 - RNA, 18 nt, Artificial Sequence
  Synthetic
ugugagagaggcaauagu

SEQ ID NO: 58715 - RNA, 19 nt, Artificial Sequence
  Synthetic
augugagagaggcaauagu

SEQ ID NO: 58716 - RNA, 20 nt, Artificial Sequence
  Synthetic
gaugugagagaggcaauagu

SEQ ID NO: 58717 - RNA, 21 nt, Artificial Sequence
  Synthetic
ugaugugagagaggcaauagu

SEQ ID NO: 58718 - RNA, 22 nt, Artificial Sequence
  Synthetic
augaugugagagaggcaauagu

SEQ ID NO: 58719 - RNA, 23 nt, Artificial Sequence
  Synthetic
gaugaugugagagaggcaauagu

SEQ ID NO: 58720 - RNA, 24 nt, Artificial Sequence
  Synthetic
ugaugaugugagagaggcaauagu

SEQ ID NO: 58721 - RNA, 18 nt, Artificial Sequence
  Synthetic
gcaacauaccuugauagu

SEQ ID NO: 58722 - RNA, 19 nt, Artificial Sequence
  Synthetic
ggcaacauaccuugauagu

SEQ ID NO: 58723 - RNA, 20 nt, Artificial Sequence
  Synthetic
gggcaacauaccuugauagu

SEQ ID NO: 58724 - RNA, 21 nt, Artificial Sequence
  Synthetic
cgggcaacauaccuugauagu

SEQ ID NO: 58725 - RNA, 22 nt, Artificial Sequence
  Synthetic
acgggcaacauaccuugauagu

SEQ ID NO: 58726 - RNA, 23 nt, Artificial Sequence
  Synthetic
aacgggcaacauaccuugauagu

SEQ ID NO: 58727 - RNA, 24 nt, Artificial Sequence
  Synthetic
aaacgggcaacauaccuugauagu

SEQ ID NO: 58728 - RNA, 18 nt, Artificial Sequence
  Synthetic
guggucuccaugcgacgu

SEQ ID NO: 58729 - RNA, 19 nt, Artificial Sequence
  Synthetic
gguggucuccaugcgacgu

SEQ ID NO: 58730 - RNA, 20 nt, Artificial Sequence
  Synthetic
cgguggucuccaugcgacgu

SEQ ID NO: 58731 - RNA, 21 nt, Artificial Sequence
  Synthetic
acgguggucuccaugcgacgu

SEQ ID NO: 58732 - RNA, 22 nt, Artificial Sequence
  Synthetic
cacgguggucuccaugcgacgu

SEQ ID NO: 58733 - RNA, 23 nt, Artificial Sequence
  Synthetic
ucacgguggucuccaugcgacgu

SEQ ID NO: 58734 - RNA, 24 nt, Artificial Sequence
  Synthetic
uucacgguggucuccaugcgacgu

SEQ ID NO: 58735 - RNA, 18 nt, Artificial Sequence
  Synthetic
  misc_feature (7)..(7): n is a, c, g, or u
accccancaggccaccgu

SEQ ID NO: 58736 - RNA, 19 nt, Artificial Sequence
  Synthetic
  misc_feature (8)..(8): n is a, c, g, or u
caccccancaggccaccgu

SEQ ID NO: 58737 - RNA, 20 nt, Artificial Sequence
  Synthetic
  misc_feature (9)..(9): n is a, c, g, or u
ccaccccancaggccaccgu

SEQ ID NO: 58738 - RNA, 21 nt, Artificial Sequence
  Synthetic
  misc_feature (10)..(10): n is a, c, g, or u
uccaccccancaggccaccgu

SEQ ID NO: 58739 - RNA, 22 nt, Artificial Sequence
  Synthetic
  misc_feature (11)..(11): n is a, c, g, or u
cuccaccccancaggccaccgu

SEQ ID NO: 58740 - RNA, 23 nt, Artificial Sequence
  Synthetic
  misc_feature (1)..(1): n is a, c, g, or u
  misc_feature (12)..(12): n is a, c, g, or u
ncuccaccccancaggccaccgu

SEQ ID NO: 58741 - RNA, 24 nt, Artificial Sequence
  Synthetic
  misc_feature (2)..(2): n is a, c, g, or u
  misc_feature (13)..(13): n is a, c, g, or u
gncuccaccccancaggccaccgu

SEQ ID NO: 58742 - RNA, 18 nt, Artificial Sequence
  Synthetic
  misc_feature (5)..(5): n is a, c, g, or u
uacangugcaguuuccgu

SEQ ID NO: 58743 - RNA, 19 nt, Artificial Sequence
  Synthetic
  misc_feature (6)..(6): n is a, c, g, or u
auacangugcaguuuccgu

SEQ ID NO: 58744 - RNA, 20 nt, Artificial Sequence
  Synthetic
  misc_feature (7)..(7): n is a, c, g, or u
aauacangugcaguuuccgu

SEQ ID NO: 58745 - RNA, 21 nt, Artificial Sequence
  Synthetic
  misc_feature (8)..(8): n is a, c, g, or u
gaauacangugcaguuuccgu

SEQ ID NO: 58746 - RNA, 22 nt, Artificial Sequence
  Synthetic
  misc_feature (9)..(9): n is a, c, g, or u
ggaauacangugcaguuuccgu

SEQ ID NO: 58747 - RNA, 23 nt, Artificial Sequence
  Synthetic
  misc_feature (10)..(10): n is a, c, g, or u
gggaauacangugcaguuuccgu

SEQ ID NO: 58748 - RNA, 24 nt, Artificial Sequence
  Synthetic
  misc_feature (11)..(11): n is a, c, g, or u
ugggaauacangugcaguuuccgu

SEQ ID NO: 58749 - RNA, 18 nt, Artificial Sequence
  Synthetic
  misc_feature (12)..(12): n is a, c, g, or u
cagacggggagnccgcgu

SEQ ID NO: 58750 - RNA, 19 nt, Artificial Sequence
  Synthetic
  misc_feature (13)..(13): n is a, c, g, or u
acagacggggagnccgcgu

SEQ ID NO: 58751 - RNA, 20 nt, Artificial Sequence
  Synthetic
  misc_feature (14)..(14): n is a, c, g, or u
aacagacggggagnccgcgu

SEQ ID NO: 58752 - RNA, 21 nt, Artificial Sequence
  Synthetic
  misc_feature (15)..(15): n is a, c, g, or u
gaacagacggggagnccgcgu

SEQ ID NO: 58753 - RNA, 22 nt, Artificial Sequence
  Synthetic
  misc_feature (16)..(16): n is a, c, g, or u
ggaacagacggggagnccgcgu

SEQ ID NO: 58754 - RNA, 23 nt, Artificial Sequence
  Synthetic
  misc_feature (17)..(17): n is a, c, g, or u
aggaacagacggggagnccgcgu

SEQ ID NO: 58755 - RNA, 24 nt, Artificial Sequence
  Synthetic
  misc_feature (18)..(18): n is a, c, g, or u
aaggaacagacggggagnccgcgu

SEQ ID NO: 58756 - RNA, 18 nt, Artificial Sequence
  Synthetic
agaugauuaggcagaggu

SEQ ID NO: 58757 - RNA, 19 nt, Artificial Sequence
  Synthetic
aagaugauuaggcagaggu

SEQ ID NO: 58758 - RNA, 20 nt, Artificial Sequence
  Synthetic
aaagaugauuaggcagaggu

SEQ ID NO: 58759 - RNA, 21 nt, Artificial Sequence
  Synthetic
aaaagaugauuaggcagaggu

SEQ ID NO: 58760 - RNA, 22 nt, Artificial Sequence
  Synthetic
caaaagaugauuaggcagaggu

SEQ ID NO: 58761 - RNA, 23 nt, Artificial Sequence
  Synthetic
acaaaagaugauuaggcagaggu

SEQ ID NO: 58762 - RNA, 24 nt, Artificial Sequence
  Synthetic
aacaaaagaugauuaggcagaggu

SEQ ID NO: 58763 - RNA, 18 nt, Artificial Sequence
  Synthetic
  misc_feature (3)..(3): n is a, c, g, or u
ugngugucucuuagaggu

SEQ ID NO: 58764 - RNA, 19 nt, Artificial Sequence
  Synthetic
  misc_feature (4)..(4): n is a, c, g, or u
augngugucucuuagaggu

SEQ ID NO: 58765 - RNA, 20 nt, Artificial Sequence
  Synthetic
  misc_feature (5)..(5): n is a, c, g, or u
gaugngugucucuuagaggu

SEQ ID NO: 58766 - RNA, 21 nt, Artificial Sequence
  Synthetic
  misc_feature (6)..(6): n is a, c, g, or u
ggaugngugucucuuagaggu

SEQ ID NO: 58767 - RNA, 22 nt, Artificial Sequence
  Synthetic
  misc_feature (7)..(7): n is a, c, g, or u
uggaugngugucucuuagaggu

SEQ ID NO: 58768 - RNA, 23 nt, Artificial Sequence
  Synthetic
  misc_feature (8)..(8): n is a, c, g, or u
guggaugngugucucuuagaggu

SEQ ID NO: 58769 - RNA, 24 nt, Artificial Sequence
  Synthetic
  misc_feature (9)..(9): n is a, c, g, or u
uguggaugngugucucuuagaggu

SEQ ID NO: 58770 - RNA, 18 nt, Artificial Sequence
  Synthetic
ugguaagugauuggaggu

SEQ ID NO: 58771 - RNA, 19 nt, Artificial Sequence
  Synthetic
uugguaagugauuggaggu

SEQ ID NO: 58772 - RNA, 20 nt, Artificial Sequence
  Synthetic
guugguaagugauuggaggu

SEQ ID NO: 58773 - RNA, 21 nt, Artificial Sequence
  Synthetic
gguugguaagugauuggaggu

SEQ ID NO: 58774 - RNA, 22 nt, Artificial Sequence
  Synthetic
agguugguaagugauuggaggu

SEQ ID NO: 58775 - RNA, 23 nt, Artificial Sequence
  Synthetic
gagguugguaagugauuggaggu

SEQ ID NO: 58776 - RNA, 24 nt, Artificial Sequence
  Synthetic
ggagguugguaagugauuggaggu

SEQ ID NO: 58777 - RNA, 18 nt, Artificial Sequence
  Synthetic
aagcggugucgaguaggu

SEQ ID NO: 58778 - RNA, 19 nt, Artificial Sequence
  Synthetic
gaagcggugucgaguaggu

SEQ ID NO: 58779 - RNA, 20 nt, Artificial Sequence
  Synthetic
ugaagcggugucgaguaggu

SEQ ID NO: 58780 - RNA, 18 nt, Artificial Sequence
  Synthetic
  misc_feature (4)..(4): n is a, c, g, or u
guanagggcugaagcggu

SEQ ID NO: 58781 - RNA, 19 nt, Artificial Sequence
  Synthetic
  misc_feature (1)..(1): n is a, c, g, or u
  misc_feature (5)..(5): n is a, c, g, or u
nguanagggcugaagcggu

SEQ ID NO: 58782 - RNA, 20 nt, Artificial Sequence
  Synthetic
  misc_feature (2)..(2): n is a, c, g, or u
  misc_feature (6)..(6): n is a, c, g, or u
cnguanagggcugaagcggu

SEQ ID NO: 58783 - RNA, 21 nt, Artificial Sequence
  Synthetic
  misc_feature (3)..(3): n is a, c, g, or u
  misc_feature (7)..(7): n is a, c, g, or u
ccnguanagggcugaagcggu

SEQ ID NO: 58784 - RNA, 22 nt, Artificial Sequence
  Synthetic
  misc_feature (4)..(4): n is a, c, g, or u
  misc_feature (8)..(8): n is a, c, g, or u
cccnguanagggcugaagcggu

SEQ ID NO: 58785 - RNA, 23 nt, Artificial Sequence
  Synthetic
  misc_feature (5)..(5): n is a, c, g, or u
  misc_feature (9)..(9): n is a, c, g, or u
ucccnguanagggcugaagcggu

SEQ ID NO: 58786 - RNA, 24 nt, Artificial Sequence
  Synthetic
  misc_feature (6)..(6): n is a, c, g, or u
  misc_feature (10)..(10): n is a, c, g, or u
aucccnguanagggcugaagcggu

SEQ ID NO: 58787 - RNA, 18 nt, Artificial Sequence
  Synthetic
aaaauugguaacagcggu

SEQ ID NO: 58788 - RNA, 19 nt, Artificial Sequence
  Synthetic
gaaaauugguaacagcggu

SEQ ID NO: 58789 - RNA, 20 nt, Artificial Sequence
  Synthetic
agaaaauugguaacagcggu

SEQ ID NO: 58790 - RNA, 21 nt, Artificial Sequence
  Synthetic
cagaaaauugguaacagcggu

SEQ ID NO: 58791 - RNA, 22 nt, Artificial Sequence
  Synthetic
acagaaaauugguaacagcggu

SEQ ID NO: 58792 - RNA, 23 nt, Artificial Sequence
  Synthetic
aacagaaaauugguaacagcggu

SEQ ID NO: 58793 - RNA, 24 nt, Artificial Sequence
  Synthetic
uaacagaaaauugguaacagcggu

SEQ ID NO: 58794 - RNA, 18 nt, Artificial Sequence
  Synthetic
caguuuccguccgagggu

SEQ ID NO: 58795 - RNA, 19 nt, Artificial Sequence
  Synthetic
gcaguuuccguccgagggu

SEQ ID NO: 58796 - RNA, 20 nt, Artificial Sequence
  Synthetic
ugcaguuuccguccgagggu

SEQ ID NO: 58797 - RNA, 21 nt, Artificial Sequence
  Synthetic
gugcaguuuccguccgagggu

SEQ ID NO: 58798 - RNA, 22 nt, Artificial Sequence
  Synthetic
  misc_feature (1)..(1): n is a, c, g, or u
ngugcaguuuccguccgagggu

SEQ ID NO: 58799 - RNA, 23 nt, Artificial Sequence
  Synthetic
  misc_feature (2)..(2): n is a, c, g, or u
angugcaguuuccguccgagggu

SEQ ID NO: 58800 - RNA, 24 nt, Artificial Sequence
  Synthetic
  misc_feature (3)..(3): n is a, c, g, or u
cangugcaguuuccguccgagggu

SEQ ID NO: 58801 - RNA, 18 nt, Artificial Sequence
  Synthetic
uguaacacgagcaggggu

SEQ ID NO: 58802 - RNA, 19 nt, Artificial Sequence
  Synthetic
cuguaacacgagcaggggu

SEQ ID NO: 58803 - RNA, 20 nt, Artificial Sequence
  Synthetic
ccuguaacacgagcaggggu

SEQ ID NO: 58804 - RNA, 21 nt, Artificial Sequence
  Synthetic
gccuguaacacgagcaggggu

SEQ ID NO: 58805 - RNA, 22 nt, Artificial Sequence
  Synthetic
cgccuguaacacgagcaggggu

SEQ ID NO: 58806 - RNA, 23 nt, Artificial Sequence
  Synthetic
ccgccuguaacacgagcaggggu

SEQ ID NO: 58807 - RNA, 24 nt, Artificial Sequence
  Synthetic
accgccuguaacacgagcaggggu

SEQ ID NO: 58808 - RNA, 18 nt, Artificial Sequence
  Synthetic
aggccaccgugugggggu

SEQ ID NO: 58809 - RNA, 19 nt, Artificial Sequence
  Synthetic
caggccaccgugugggggu

SEQ ID NO: 58810 - RNA, 20 nt, Artificial Sequence
  Synthetic
  misc_feature (1)..(1): n is a, c, g, or u
ncaggccaccgugugggggu

SEQ ID NO: 58811 - RNA, 21 nt, Artificial Sequence
  Synthetic
  misc_feature (2)..(2): n is a, c, g, or u
ancaggccaccgugugggggu

SEQ ID NO: 58812 - RNA, 22 nt, Artificial Sequence
  Synthetic
  misc_feature (3)..(3): n is a, c, g, or u
cancaggccaccgugugggggu

SEQ ID NO: 58813 - RNA, 23 nt, Artificial Sequence
  Synthetic
  misc_feature (4)..(4): n is a, c, g, or u
ccancaggccaccgugugggggu

SEQ ID NO: 58814 - RNA, 24 nt, Artificial Sequence
  Synthetic
  misc_feature (5)..(5): n is a, c, g, or u
cccancaggccaccgugugggggu

SEQ ID NO: 58815 - RNA, 18 nt, Artificial Sequence
  Synthetic
  misc_feature (2)..(2): n is a, c, g, or u
gnggauccagcugauggu

SEQ ID NO: 58816 - RNA, 19 nt, Artificial Sequence
  Synthetic
  misc_feature (3)..(3): n is a, c, g, or u
agnggauccagcugauggu

SEQ ID NO: 58817 - RNA, 20 nt, Artificial Sequence
  Synthetic
  misc_feature (1)..(1): n is a, c, g, or u
  misc_feature (4)..(4): n is a, c, g, or u
nagnggauccagcugauggu

SEQ ID NO: 58818 - RNA, 21 nt, Artificial Sequence
  Synthetic
  misc_feature (2)..(2): n is a, c, g, or u
  misc_feature (5)..(5): n is a, c, g, or u
anagnggauccagcugauggu

SEQ ID NO: 58819 - RNA, 22 nt, Artificial Sequence
  Synthetic
  misc_feature (3)..(3): n is a, c, g, or u
  misc_feature (6)..(6): n is a, c, g, or u
aanagnggauccagcugauggu

SEQ ID NO: 58820 - RNA, 23 nt, Artificial Sequence
  Synthetic
  misc_feature (4)..(4): n is a, c, g, or u
  misc_feature (7)..(7): n is a, c, g, or u
gaanagnggauccagcugauggu

SEQ ID NO: 58821 - RNA, 24 nt, Artificial Sequence
  Synthetic
  misc_feature (5)..(5): n is a, c, g, or u
  misc_feature (8)..(8): n is a, c, g, or u
ugaanagnggauccagcugauggu

SEQ ID NO: 58822 - RNA, 18 nt, Artificial Sequence
  Synthetic
  misc_feature (10)..(10): n is a, c, g, or u
augcaaauanugucuggu

SEQ ID NO: 58823 - RNA, 19 nt, Artificial Sequence
  Synthetic
  misc_feature (11)..(11): n is a, c, g, or u
uaugcaaauanugucuggu

SEQ ID NO: 58824 - RNA, 20 nt, Artificial Sequence
  Synthetic
  misc_feature (12)..(12): n is a, c, g, or u
guaugcaaauanugucuggu

SEQ ID NO: 58825 - RNA, 21 nt, Artificial Sequence
  Synthetic
  misc_feature (13)..(13): n is a, c, g, or u
aguaugcaaauanugucuggu

SEQ ID NO: 58826 - RNA, 22 nt, Artificial Sequence
  Synthetic
  misc_feature (14)..(14): n is a, c, g, or u
aaguaugcaaauanugucuggu

SEQ ID NO: 58827 - RNA, 23 nt, Artificial Sequence
  Synthetic
  misc_feature (15)..(15): n is a, c, g, or u
aaaguaugcaaauanugucuggu

SEQ ID NO: 58828 - RNA, 24 nt, Artificial Sequence
  Synthetic
  misc_feature (16)..(16): n is a, c, g, or u
uaaaguaugcaaauanugucuggu

SEQ ID NO: 58829 - RNA, 18 nt, Artificial Sequence
  Synthetic
agauaacagaaaauuggu

SEQ ID NO: 58830 - RNA, 19 nt, Artificial Sequence
  Synthetic
cagauaacagaaaauuggu

SEQ ID NO: 58831 - RNA, 20 nt, Artificial Sequence
  Synthetic
acagauaacagaaaauuggu

SEQ ID NO: 58832 - RNA, 21 nt, Artificial Sequence
  Synthetic
cacagauaacagaaaauuggu

SEQ ID NO: 58833 - RNA, 22 nt, Artificial Sequence
  Synthetic
ccacagauaacagaaaauuggu

SEQ ID NO: 58834 - RNA, 23 nt, Artificial Sequence
  Synthetic
cccacagauaacagaaaauuggu

SEQ ID NO: 58835 - RNA, 24 nt, Artificial Sequence
  Synthetic
acccacagauaacagaaaauuggu

SEQ ID NO: 58836 - RNA, 18 nt, Artificial Sequence
  Synthetic
cccggaccgccgauuggu

SEQ ID NO: 58837 - RNA, 19 nt, Artificial Sequence
  Synthetic
ucccggaccgccgauuggu

SEQ ID NO: 58838 - RNA, 20 nt, Artificial Sequence
  Synthetic
cucccggaccgccgauuggu

SEQ ID NO: 58839 - RNA, 21 nt, Artificial Sequence
  Synthetic
  misc_feature (1)..(1): n is a, c, g, or u
ncucccggaccgccgauuggu

SEQ ID NO: 58840 - RNA, 22 nt, Artificial Sequence
  Synthetic
  misc_feature (2)..(2): n is a, c, g, or u
uncucccggaccgccgauuggu

SEQ ID NO: 58841 - RNA, 23 nt, Artificial Sequence
  Synthetic
  misc_feature (3)..(3): n is a, c, g, or u
uuncucccggaccgccgauuggu

SEQ ID NO: 58842 - RNA, 24 nt, Artificial Sequence
  Synthetic
  misc_feature (1)..(1): n is a, c, g, or u
  misc_feature (4)..(4): n is a, c, g, or u
nuuncucccggaccgccgauuggu

SEQ ID NO: 58843 - RNA, 18 nt, Artificial Sequence
  Synthetic
  misc_feature (2)..(2): n is a, c, g, or u
  misc_feature (16)..(16): n is a, c, g, or u
anucuaaagcaucccngu

SEQ ID NO: 58844 - RNA, 19 nt, Artificial Sequence
  Synthetic
  misc_feature (3)..(3): n is a, c, g, or u
  misc_feature (17)..(17): n is a, c, g, or u
ganucuaaagcaucccngu

SEQ ID NO: 58845 - RNA, 20 nt, Artificial Sequence
  Synthetic
  misc_feature (4)..(4): n is a, c, g, or u
  misc_feature (18)..(18): n is a, c, g, or u
uganucuaaagcaucccngu

SEQ ID NO: 58846 - RNA, 21 nt, Artificial Sequence
  Synthetic
  misc_feature (5)..(5): n is a, c, g, or u
  misc_feature (19)..(19): n is a, c, g, or u
guganucuaaagcaucccngu

SEQ ID NO: 58847 - RNA, 22 nt, Artificial Sequence
  Synthetic
  misc_feature (6)..(6): n is a, c, g, or u
  misc_feature (20)..(20): n is a, c, g, or u
gguganucuaaagcaucccngu

SEQ ID NO: 58848 - RNA, 23 nt, Artificial Sequence
  Synthetic
  misc_feature (1)..(1): n is a, c, g, or u
  misc_feature (7)..(7): n is a, c, g, or u
  misc_feature (21)..(21): n is a, c, g, or u
ngguganucuaaagcaucccngu

SEQ ID NO: 58849 - RNA, 24 nt, Artificial Sequence
  Synthetic
  misc_feature (2)..(2): n is a, c, g, or u
  misc_feature (8)..(8): n is a, c, g, or u
  misc_feature (22)..(22): n is a, c, g, or u
cngguganucuaaagcaucccngu

SEQ ID NO: 58850 - RNA, 18 nt, Artificial Sequence
  Synthetic
  misc_feature (2)..(2): n is a, c, g, or u
cnagaagauugaugaugu

SEQ ID NO: 58851 - RNA, 19 nt, Artificial Sequence
  Synthetic
  misc_feature (3)..(3): n is a, c, g, or u
ucnagaagauugaugaugu

SEQ ID NO: 58852 - RNA, 20 nt, Artificial Sequence
  Synthetic
  misc_feature (4)..(4): n is a, c, g, or u
uucnagaagauugaugaugu

SEQ ID NO: 58853 - RNA, 21 nt, Artificial Sequence
  Synthetic
  misc_feature (5)..(5): n is a, c, g, or u
cuucnagaagauugaugaugu

SEQ ID NO: 58854 - RNA, 22 nt, Artificial Sequence
  Synthetic
  misc_feature (6)..(6): n is a, c, g, or u
ucuucnagaagauugaugaugu

SEQ ID NO: 58855 - RNA, 23 nt, Artificial Sequence
  Synthetic
  misc_feature (7)..(7): n is a, c, g, or u
gucuucnagaagauugaugaugu

SEQ ID NO: 58856 - RNA, 24 nt, Artificial Sequence
  Synthetic
  misc_feature (8)..(8): n is a, c, g, or u
agucuucnagaagauugaugaugu

SEQ ID NO: 58857 - RNA, 18 nt, Artificial Sequence
  Synthetic
  misc_feature (5)..(5): n is a, c, g, or u
  misc_feature (17)..(17): n is a, c, g, or u
gaacngacgggaagaanu

SEQ ID NO: 58858 - RNA, 19 nt, Artificial Sequence
  Synthetic
  misc_feature (6)..(6): n is a, c, g, or u
  misc_feature (18)..(18): n is a, c, g, or u
cgaacngacgggaagaanu

SEQ ID NO: 58859 - RNA, 20 nt, Artificial Sequence
  Synthetic
  misc_feature (7)..(7): n is a, c, g, or u
  misc_feature (19)..(19): n is a, c, g, or u
ccgaacngacgggaagaanu

SEQ ID NO: 58860 - RNA, 21 nt, Artificial Sequence
  Synthetic
  misc_feature (8)..(8): n is a, c, g, or u
  misc_feature (20)..(20): n is a, c, g, or u
cccgaacngacgggaagaanu

SEQ ID NO: 58861 - RNA, 22 nt, Artificial Sequence
  Synthetic
  misc_feature (9)..(9): n is a, c, g, or u
  misc_feature (21)..(21): n is a, c, g, or u
ucccgaacngacgggaagaanu

SEQ ID NO: 58862 - RNA, 23 nt, Artificial Sequence
  Synthetic
  misc_feature (10)..(10): n is a, c, g, or u
  misc_feature (22)..(22): n is a, c, g, or u
gucccgaacngacgggaagaanu

SEQ ID NO: 58863 - RNA, 24 nt, Artificial Sequence
  Synthetic
  misc_feature (11)..(11): n is a, c, g, or u
  misc_feature (23)..(23): n is a, c, g, or u
ggucccgaacngacgggaagaanu

SEQ ID NO: 58864 - RNA, 18 nt, Artificial Sequence
  Synthetic
  misc_feature (6)..(6): n is a, c, g, or u
  misc_feature (17)..(17): n is a, c, g, or u
gucgungauccuggaanu

SEQ ID NO: 58865 - RNA, 19 nt, Artificial Sequence
  Synthetic
  misc_feature (7)..(7): n is a, c, g, or u
  misc_feature (18)..(18): n is a, c, g, or u
ggucgungauccuggaanu

SEQ ID NO: 58866 - RNA, 20 nt, Artificial Sequence
  Synthetic
  misc_feature (8)..(8): n is a, c, g, or u
  misc_feature (19)..(19): n is a, c, g, or u
uggucgungauccuggaanu

SEQ ID NO: 58867 - RNA, 21 nt, Artificial Sequence
  Synthetic
  misc_feature (9)..(9): n is a, c, g, or u
  misc_feature (20)..(20): n is a, c, g, or u
guggucgungauccuggaanu

SEQ ID NO: 58868 - RNA, 22 nt, Artificial Sequence
  Synthetic
  misc_feature (10)..(10): n is a, c, g, or u
  misc_feature (21)..(21): n is a, c, g, or u
gguggucgungauccuggaanu

SEQ ID NO: 58869 - RNA, 23 nt, Artificial Sequence
  Synthetic
  misc_feature (11)..(11): n is a, c, g, or u
  misc_feature (22)..(22): n is a, c, g, or u
ugguggucgungauccuggaanu

SEQ ID NO: 58870 - RNA, 24 nt, Artificial Sequence
  Synthetic
  misc_feature (12)..(12): n is a, c, g, or u
  misc_feature (23)..(23): n is a, c, g, or u
cugguggucgungauccuggaanu

SEQ ID NO: 58871 - RNA, 18 nt, Artificial Sequence
  Synthetic
  misc_feature (3)..(3): n is a, c, g, or u
  misc_feature (17)..(17): n is a, c, g, or u
uunuguugaagucccanu

SEQ ID NO: 58872 - RNA, 19 nt, Artificial Sequence
  Synthetic
  misc_feature (4)..(4): n is a, c, g, or u
  misc_feature (18)..(18): n is a, c, g, or u
uuunuguugaagucccanu

SEQ ID NO: 58873 - RNA, 20 nt, Artificial Sequence
  Synthetic
  misc_feature (5)..(5): n is a, c, g, or u
  misc_feature (19)..(19): n is a, c, g, or u
guuunuguugaagucccanu

SEQ ID NO: 58874 - RNA, 21 nt, Artificial Sequence
  Synthetic
  misc_feature (6)..(6): n is a, c, g, or u
  misc_feature (20)..(20): n is a, c, g, or u
uguuunuguugaagucccanu

SEQ ID NO: 58875 - RNA, 22 nt, Artificial Sequence
  Synthetic
  misc_feature (7)..(7): n is a, c, g, or u
  misc_feature (21)..(21): n is a, c, g, or u
uuguuunuguugaagucccanu

SEQ ID NO: 58876 - RNA, 23 nt, Artificial Sequence
  Synthetic
  misc_feature (8)..(8): n is a, c, g, or u
  misc_feature (22)..(22): n is a, c, g, or u
cuuguuunuguugaagucccanu

SEQ ID NO: 58877 - RNA, 24 nt, Artificial Sequence
  Synthetic
  misc_feature (9)..(9): n is a, c, g, or u
  misc_feature (23)..(23): n is a, c, g, or u
ccuuguuunuguugaagucccanu

SEQ ID NO: 58878 - RNA, 18 nt, Artificial Sequence
  Synthetic
  misc_feature (11)..(11): n is a, c, g, or u
  misc_feature (17)..(17): n is a, c, g, or u
ugcaauguucngguganu

SEQ ID NO: 58879 - RNA, 19 nt, Artificial Sequence
  Synthetic
  misc_feature (12)..(12): n is a, c, g, or u
  misc_feature (18)..(18): n is a, c, g, or u
gugcaauguucngguganu

SEQ ID NO: 58880 - RNA, 20 nt, Artificial Sequence
  Synthetic
  misc_feature (1)..(1): n is a, c, g, or u
  misc_feature (13)..(13): n is a, c, g, or u
  misc_feature (19)..(19): n is a, c, g, or u
ngugcaauguucngguganu

SEQ ID NO: 58881 - RNA, 21 nt, Artificial Sequence
  Synthetic
  misc_feature (2)..(2): n is a, c, g, or u
  misc_feature (14)..(14): n is a, c, g, or u
  misc_feature (20)..(20): n is a, c, g, or u
gngugcaauguucngguganu

SEQ ID NO: 58882 - RNA, 22 nt, Artificial Sequence
  Synthetic
  misc_feature (3)..(3): n is a, c, g, or u
  misc_feature (15)..(15): n is a, c, g, or u
  misc_feature (21)..(21): n is a, c, g, or u
ggngugcaauguucngguganu

SEQ ID NO: 58883 - RNA, 23 nt, Artificial Sequence
  Synthetic
  misc_feature (1)..(1): n is a, c, g, or u
  misc_feature (4)..(4): n is a, c, g, or u
  misc_feature (16)..(16): n is a, c, g, or u
  misc_feature (22)..(22): n is a, c, g, or u
nggngugcaauguucngguganu

SEQ ID NO: 58884 - RNA, 24 nt, Artificial Sequence
  Synthetic
  misc_feature (2)..(2): n is a, c, g, or u
  misc_feature (5)..(5): n is a, c, g, or u
  misc_feature (17)..(17): n is a, c, g, or u
  misc_feature (23)..(23): n is a, c, g, or u
unggngugcaauguucngguganu

SEQ ID NO: 58885 - RNA, 18 nt, Artificial Sequence
  Synthetic
  misc_feature (17)..(17): n is a, c, g, or u
ugccuacagccuccuanu

SEQ ID NO: 58886 - RNA, 19 nt, Artificial Sequence
  Synthetic
  misc_feature (18)..(18): n is a, c, g, or u
augccuacagccuccuanu

SEQ ID NO: 58887 - RNA, 20 nt, Artificial Sequence
  Synthetic
  misc_feature (19)..(19): n is a, c, g, or u
uaugccuacagccuccuanu

SEQ ID NO: 58888 - RNA, 21 nt, Artificial Sequence
  Synthetic
  misc_feature (20)..(20): n is a, c, g, or u
uuaugccuacagccuccuanu

SEQ ID NO: 58889 - RNA, 22 nt, Artificial Sequence
  Synthetic
  misc_feature (21)..(21): n is a, c, g, or u
uuuaugccuacagccuccuanu

SEQ ID NO: 58890 - RNA, 23 nt, Artificial Sequence
  Synthetic
  misc_feature (22)..(22): n is a, c, g, or u
auuuaugccuacagccuccuanu

SEQ ID NO: 58891 - RNA, 24 nt, Artificial Sequence
  Synthetic
  misc_feature (23)..(23): n is a, c, g, or u
aauuuaugccuacagccuccuanu

SEQ ID NO: 58892 - RNA, 18 nt, Artificial Sequence
  Synthetic
  misc_feature (9)..(9): n is a, c, g, or u
  misc_feature (17)..(17): n is a, c, g, or u
auccaggunauugaccnu

SEQ ID NO: 58893 - RNA, 19 nt, Artificial Sequence
  Synthetic
  misc_feature (10)..(10): n is a, c, g, or u
  misc_feature (18)..(18): n is a, c, g, or u
gauccaggunauugaccnu

SEQ ID NO: 58894 - RNA, 20 nt, Artificial Sequence
  Synthetic
  misc_feature (11)..(11): n is a, c, g, or u
  misc_feature (19)..(19): n is a, c, g, or u
cgauccaggunauugaccnu

SEQ ID NO: 58895 - RNA, 21 nt, Artificial Sequence
  Synthetic
  misc_feature (12)..(12): n is a, c, g, or u
  misc_feature (20)..(20): n is a, c, g, or u
ucgauccaggunauugaccnu

SEQ ID NO: 58896 - RNA, 22 nt, Artificial Sequence
  Synthetic
  misc_feature (13)..(13): n is a, c, g, or u
  misc_feature (21)..(21): n is a, c, g, or u
uucgauccaggunauugaccnu

SEQ ID NO: 58897 - RNA, 23 nt, Artificial Sequence
  Synthetic
  misc_feature (14)..(14): n is a, c, g, or u
  misc_feature (22)..(22): n is a, c, g, or u
cuucgauccaggunauugaccnu

SEQ ID NO: 58898 - RNA, 24 nt, Artificial Sequence
  Synthetic
  misc_feature (15)..(15): n is a, c, g, or u
  misc_feature (23)..(23): n is a, c, g, or u
ucuucgauccaggunauugaccnu

SEQ ID NO: 58899 - RNA, 18 nt, Artificial Sequence
  Synthetic
  misc_feature (17)..(17): n is a, c, g, or u
gauguuguccauguucnu

SEQ ID NO: 58900 - RNA, 19 nt, Artificial Sequence
  Synthetic
  misc_feature (18)..(18): n is a, c, g, or u
ugauguuguccauguucnu

SEQ ID NO: 58901 - RNA, 20 nt, Artificial Sequence
  Synthetic
  misc_feature (19)..(19): n is a, c, g, or u
gugauguuguccauguucnu

SEQ ID NO: 58902 - RNA, 21 nt, Artificial Sequence
  Synthetic
  misc_feature (20)..(20): n is a, c, g, or u
ugugauguuguccauguucnu

SEQ ID NO: 58903 - RNA, 22 nt, Artificial Sequence
  Synthetic
  misc_feature (21)..(21): n is a, c, g, or u
augugauguuguccauguucnu

SEQ ID NO: 58904 - RNA, 23 nt, Artificial Sequence
  Synthetic
  misc_feature (22)..(22): n is a, c, g, or u
gaugugauguuguccauguucnu

SEQ ID NO: 58905 - RNA, 24 nt, Artificial Sequence
  Synthetic
  misc_feature (23)..(23): n is a, c, g, or u
ugaugugauguuguccauguucnu

SEQ ID NO: 58906 - RNA, 18 nt, Artificial Sequence
  Synthetic
  misc_feature (11)..(11): n is a, c, g, or u
  misc_feature (16)..(17): n is a, c, g, or u
gaaaauauuunguaannu

SEQ ID NO: 58907 - RNA, 19 nt, Artificial Sequence
  Synthetic
  misc_feature (12)..(12): n is a, c, g, or u
  misc_feature (17)..(18): n is a, c, g, or u
ggaaaauauuunguaannu

SEQ ID NO: 58908 - RNA, 20 nt, Artificial Sequence
  Synthetic
  misc_feature (13)..(13): n is a, c, g, or u
  misc_feature (18)..(19): n is a, c, g, or u
aggaaaauauuunguaannu

SEQ ID NO: 58909 - RNA, 21 nt, Artificial Sequence
  Synthetic
  misc_feature (1)..(1): n is a, c, g, or u
  misc_feature (14)..(14): n is a, c, g, or u
  misc_feature (19)..(20): n is a, c, g, or u
naggaaaauauuunguaannu

SEQ ID NO: 58910 - RNA, 22 nt, Artificial Sequence
  Synthetic
  misc_feature (2)..(2): n is a, c, g, or u
  misc_feature (15)..(15): n is a, c, g, or u
  misc_feature (20)..(21): n is a, c, g, or u
anaggaaaauauuunguaannu

SEQ ID NO: 58911 - RNA, 23 nt, Artificial Sequence
  Synthetic
  misc_feature (3)..(3): n is a, c, g, or u
  misc_feature (16)..(16): n is a, c, g, or u
  misc_feature (21)..(22): n is a, c, g, or u
canaggaaaauauuunguaannu

SEQ ID NO: 58912 - RNA, 24 nt, Artificial Sequence
  Synthetic
  misc_feature (4)..(4): n is a, c, g, or u
  misc_feature (17)..(17): n is a, c, g, or u
  misc_feature (22)..(23): n is a, c, g, or u
ccanaggaaaauauuunguaannu

SEQ ID NO: 58913 - RNA, 18 nt, Artificial Sequence
  Synthetic
  misc_feature (8)..(8): n is a, c, g, or u
  misc_feature (17)..(17): n is a, c, g, or u
cuugaugnaaaugaaunu

SEQ ID NO: 58914 - RNA, 19 nt, Artificial Sequence
  Synthetic
  misc_feature (9)..(9): n is a, c, g, or u
  misc_feature (18)..(18): n is a, c, g, or u
ucuugaugnaaaugaaunu

SEQ ID NO: 58915 - RNA, 20 nt, Artificial Sequence
  Synthetic
  misc_feature (1)..(1): n is a, c, g, or u
  misc_feature (10)..(10): n is a, c, g, or u
  misc_feature (19)..(19): n is a, c, g, or u
nucuugaugnaaaugaaunu

SEQ ID NO: 58916 - RNA, 21 nt, Artificial Sequence
  Synthetic
  misc_feature (1)..(2): n is a, c, g, or u
  misc_feature (11)..(11): n is a, c, g, or u
  misc_feature (20)..(20): n is a, c, g, or u
nnucuugaugnaaaugaaunu

SEQ ID NO: 58917 - RNA, 22 nt, Artificial Sequence
  Synthetic
  misc_feature (2)..(3): n is a, c, g, or u
  misc_feature (12)..(12): n is a, c, g, or u
  misc_feature (21)..(21): n is a, c, g, or u
annucuugaugnaaaugaaunu

SEQ ID NO: 58918 - RNA, 23 nt, Artificial Sequence
  Synthetic
  misc_feature (3)..(4): n is a, c, g, or u
  misc_feature (13)..(13): n is a, c, g, or u
  misc_feature (22)..(22): n is a, c, g, or u
cannucuugaugnaaaugaaunu

SEQ ID NO: 58919 - RNA, 24 nt, Artificial Sequence
  Synthetic
  misc_feature (4)..(5): n is a, c, g, or u
  misc_feature (14)..(14): n is a, c, g, or u
  misc_feature (23)..(23): n is a, c, g, or u
ucannucuugaugnaaaugaaunu

SEQ ID NO: 58920 - RNA, 18 nt, Artificial Sequence
  Synthetic
  misc_feature (5)..(5): n is a, c, g, or u
  misc_feature (17)..(17): n is a, c, g, or u
ccaanuguccuuguuunu

SEQ ID NO: 58921 - RNA, 19 nt, Artificial Sequence
  Synthetic
  misc_feature (6)..(6): n is a, c, g, or u
  misc_feature (18)..(18): n is a, c, g, or u
gccaanuguccuuguuunu

SEQ ID NO: 58922 - RNA, 20 nt, Artificial Sequence
  Synthetic
  misc_feature (7)..(7): n is a, c, g, or u
  misc_feature (19)..(19): n is a, c, g, or u
ggccaanuguccuuguuunu

SEQ ID NO: 58923 - RNA, 21 nt, Artificial Sequence
  Synthetic
  misc_feature (8)..(8): n is a, c, g, or u
  misc_feature (20)..(20): n is a, c, g, or u
uggccaanuguccuuguuunu

SEQ ID NO: 58924 - RNA, 22 nt, Artificial Sequence
  Synthetic
  misc_feature (9)..(9): n is a, c, g, or u
  misc_feature (21)..(21): n is a, c, g, or u
uuggccaanuguccuuguuunu

SEQ ID NO: 58925 - RNA, 23 nt, Artificial Sequence
  Synthetic
  misc_feature (10)..(10): n is a, c, g, or u
  misc_feature (22)..(22): n is a, c, g, or u
auuggccaanuguccuuguuunu

SEQ ID NO: 58926 - RNA, 24 nt, Artificial Sequence
  Synthetic
  misc_feature (11)..(11): n is a, c, g, or u
  misc_feature (23)..(23): n is a, c, g, or u
cauuggccaanuguccuuguuunu

SEQ ID NO: 58927 - RNA, 18 nt, Artificial Sequence
  Synthetic
cacagauaacagaaaauu

SEQ ID NO: 58928 - RNA, 19 nt, Artificial Sequence
  Synthetic
ccacagauaacagaaaauu

SEQ ID NO: 58929 - RNA, 20 nt, Artificial Sequence
  Synthetic
cccacagauaacagaaaauu

SEQ ID NO: 58930 - RNA, 21 nt, Artificial Sequence
  Synthetic
acccacagauaacagaaaauu

SEQ ID NO: 58931 - RNA, 22 nt, Artificial Sequence
  Synthetic
uacccacagauaacagaaaauu

SEQ ID NO: 58932 - RNA, 23 nt, Artificial Sequence
  Synthetic
auacccacagauaacagaaaauu

SEQ ID NO: 58933 - RNA, 24 nt, Artificial Sequence
  Synthetic
gauacccacagauaacagaaaauu

SEQ ID NO: 58934 - RNA, 18 nt, Artificial Sequence
  Synthetic
  misc_feature (2)..(3): n is a, c, g, or u
unnucccccuagaaaauu

SEQ ID NO: 58935 - RNA, 19 nt, Artificial Sequence
  Synthetic
  misc_feature (3)..(4): n is a, c, g, or u
gunnucccccuagaaaauu

SEQ ID NO: 58936 - RNA, 20 nt, Artificial Sequence
  Synthetic
  misc_feature (4)..(5): n is a, c, g, or u
ggunnucccccuagaaaauu

SEQ ID NO: 58937 - RNA, 21 nt, Artificial Sequence
  Synthetic
  misc_feature (5)..(6): n is a, c, g, or u
gggunnucccccuagaaaauu

SEQ ID NO: 58938 - RNA, 22 nt, Artificial Sequence
  Synthetic
  misc_feature (6)..(7): n is a, c, g, or u
cgggunnucccccuagaaaauu

SEQ ID NO: 58939 - RNA, 23 nt, Artificial Sequence
  Synthetic
  misc_feature (7)..(8): n is a, c, g, or u
ccgggunnucccccuagaaaauu

SEQ ID NO: 58940 - RNA, 24 nt, Artificial Sequence
  Synthetic
  misc_feature (8)..(9): n is a, c, g, or u
cccgggunnucccccuagaaaauu

SEQ ID NO: 58941 - RNA, 18 nt, Artificial Sequence
  Synthetic
ccaaggaauacuaacauu

SEQ ID NO: 58942 - RNA, 19 nt, Artificial Sequence
  Synthetic
uccaaggaauacuaacauu

SEQ ID NO: 58943 - RNA, 20 nt, Artificial Sequence
  Synthetic
guccaaggaauacuaacauu

SEQ ID NO: 58944 - RNA, 21 nt, Artificial Sequence
  Synthetic
aguccaaggaauacuaacauu

SEQ ID NO: 58945 - RNA, 22 nt, Artificial Sequence
  Synthetic
gaguccaaggaauacuaacauu

SEQ ID NO: 58946 - RNA, 23 nt, Artificial Sequence
  Synthetic
ugaguccaaggaauacuaacauu

SEQ ID NO: 58947 - RNA, 24 nt, Artificial Sequence
  Synthetic
augaguccaaggaauacuaacauu

SEQ ID NO: 58948 - RNA, 18 nt, Artificial Sequence
  Synthetic
  misc_feature (1)..(1): n is a, c, g, or u
ncucccggaccgccgauu

SEQ ID NO: 58949 - RNA, 19 nt, Artificial Sequence
  Synthetic
  misc_feature (2)..(2): n is a, c, g, or u
uncucccggaccgccgauu

SEQ ID NO: 58950 - RNA, 20 nt, Artificial Sequence
  Synthetic
  misc_feature (3)..(3): n is a, c, g, or u
uuncucccggaccgccgauu

SEQ ID NO: 58951 - RNA, 21 nt, Artificial Sequence
  Synthetic
  misc_feature (1)..(1): n is a, c, g, or u
  misc_feature (4)..(4): n is a, c, g, or u
nuuncucccggaccgccgauu

SEQ ID NO: 58952 - RNA, 22 nt, Artificial Sequence
  Synthetic
  misc_feature (2)..(2): n is a, c, g, or u
  misc_feature (5)..(5): n is a, c, g, or u
gnuuncucccggaccgccgauu

SEQ ID NO: 58953 - RNA, 23 nt, Artificial Sequence
  Synthetic
  misc_feature (3)..(3): n is a, c, g, or u
  misc_feature (6)..(6): n is a, c, g, or u
ggnuuncucccggaccgccgauu

SEQ ID NO: 58954 - RNA, 24 nt, Artificial Sequence
  Synthetic
  misc_feature (4)..(4): n is a, c, g, or u
  misc_feature (7)..(7): n is a, c, g, or u
uggnuuncucccggaccgccgauu

SEQ ID NO: 58955 - RNA, 18 nt, Artificial Sequence
  Synthetic
  misc_feature (4)..(4): n is a, c, g, or u
  misc_feature (10)..(10): n is a, c, g, or u
  misc_feature (13)..(13): n is a, c, g, or u
ccanucaaunggncgauu

SEQ ID NO: 58956 - RNA, 19 nt, Artificial Sequence
  Synthetic
  misc_feature (5)..(5): n is a, c, g, or u
  misc_feature (11)..(11): n is a, c, g, or u
  misc_feature (14)..(14): n is a, c, g, or u
uccanucaaunggncgauu

SEQ ID NO: 58957 - RNA, 20 nt, Artificial Sequence
  Synthetic
  misc_feature (6)..(6): n is a, c, g, or u
  misc_feature (12)..(12): n is a, c, g, or u
  misc_feature (15)..(15): n is a, c, g, or u
uuccanucaaunggncgauu

SEQ ID NO: 58958 - RNA, 21 nt, Artificial Sequence
  Synthetic
  misc_feature (7)..(7): n is a, c, g, or u
  misc_feature (13)..(13): n is a, c, g, or u
  misc_feature (16)..(16): n is a, c, g, or u
uuuccanucaaunggncgauu

SEQ ID NO: 58959 - RNA, 22 nt, Artificial Sequence
  Synthetic
  misc_feature (8)..(8): n is a, c, g, or u
  misc_feature (14)..(14): n is a, c, g, or u
  misc_feature (17)..(17): n is a, c, g, or u
cuuuccanucaaunggncgauu

SEQ ID NO: 58960 - RNA, 23 nt, Artificial Sequence
  Synthetic
  misc_feature (9)..(9): n is a, c, g, or u
  misc_feature (15)..(15): n is a, c, g, or u
  misc_feature (18)..(18): n is a, c, g, or u
acuuuccanucaaunggncgauu

SEQ ID NO: 58961 - RNA, 24 nt, Artificial Sequence
  Synthetic
  misc_feature (10)..(10): n is a, c, g, or u
  misc_feature (16)..(16): n is a, c, g, or u
  misc_feature (19)..(19): n is a, c, g, or u
aacuuuccanucaaunggncgauu

SEQ ID NO: 58962 - RNA, 18 nt, Artificial Sequence
  Synthetic
  misc_feature (12)..(12): n is a, c, g, or u
aguuaaccagunaggauu

SEQ ID NO: 58963 - RNA, 19 nt, Artificial Sequence
  Synthetic
  misc_feature (13)..(13): n is a, c, g, or u
gaguuaaccagunaggauu

SEQ ID NO: 58964 - RNA, 20 nt, Artificial Sequence
  Synthetic
  misc_feature (14)..(14): n is a, c, g, or u
ggaguuaaccagunaggauu

SEQ ID NO: 58965 - RNA, 21 nt, Artificial Sequence
  Synthetic
  misc_feature (15)..(15): n is a, c, g, or u
aggaguuaaccagunaggauu

SEQ ID NO: 58966 - RNA, 22 nt, Artificial Sequence
  Synthetic
  misc_feature (16)..(16): n is a, c, g, or u
aaggaguuaaccagunaggauu

SEQ ID NO: 58967 - RNA, 23 nt, Artificial Sequence
  Synthetic
  misc_feature (17)..(17): n is a, c, g, or u
gaaggaguuaaccagunaggauu

SEQ ID NO: 58968 - RNA, 24 nt, Artificial Sequence
  Synthetic
  misc_feature (18)..(18): n is a, c, g, or u
agaaggaguuaaccagunaggauu

SEQ ID NO: 58969 - RNA, 18 nt, Artificial Sequence
  Synthetic
ucuagacucugugguauu

SEQ ID NO: 58970 - RNA, 19 nt, Artificial Sequence
  Synthetic
gucuagacucugugguauu

SEQ ID NO: 58971 - RNA, 20 nt, Artificial Sequence
  Synthetic
agucuagacucugugguauu

SEQ ID NO: 58972 - RNA, 21 nt, Artificial Sequence
  Synthetic
gagucuagacucugugguauu

SEQ ID NO: 58973 - RNA, 22 nt, Artificial Sequence
  Synthetic
cgagucuagacucugugguauu

SEQ ID NO: 58974 - RNA, 23 nt, Artificial Sequence
  Synthetic
acgagucuagacucugugguauu

SEQ ID NO: 58975 - RNA, 24 nt, Artificial Sequence
  Synthetic
cacgagucuagacucugugguauu

SEQ ID NO: 58976 - RNA, 18 nt, Artificial Sequence
  Synthetic
  misc_feature (4)..(4): n is a, c, g, or u
uggnaaggagguguacuu

SEQ ID NO: 58977 - RNA, 19 nt, Artificial Sequence
  Synthetic
  misc_feature (5)..(5): n is a, c, g, or u
auggnaaggagguguacuu

SEQ ID NO: 58978 - RNA, 20 nt, Artificial Sequence
  Synthetic
  misc_feature (6)..(6): n is a, c, g, or u
cauggnaaggagguguacuu

SEQ ID NO: 58979 - RNA, 21 nt, Artificial Sequence
  Synthetic
  misc_feature (7)..(7): n is a, c, g, or u
ccauggnaaggagguguacuu

SEQ ID NO: 58980 - RNA, 22 nt, Artificial Sequence
  Synthetic
  misc_feature (8)..(8): n is a, c, g, or u
gccauggnaaggagguguacuu

SEQ ID NO: 58981 - RNA, 23 nt, Artificial Sequence
  Synthetic
  misc_feature (9)..(9): n is a, c, g, or u
agccauggnaaggagguguacuu

SEQ ID NO: 58982 - RNA, 24 nt, Artificial Sequence
  Synthetic
  misc_feature (10)..(10): n is a, c, g, or u
cagccauggnaaggagguguacuu

SEQ ID NO: 58983 - RNA, 18 nt, Artificial Sequence
  Synthetic
ccacccaaggcacagcuu

SEQ ID NO: 58984 - RNA, 19 nt, Artificial Sequence
  Synthetic
gccacccaaggcacagcuu

SEQ ID NO: 58985 - RNA, 20 nt, Artificial Sequence
  Synthetic
agccacccaaggcacagcuu

SEQ ID NO: 58986 - RNA, 21 nt, Artificial Sequence
  Synthetic
aagccacccaaggcacagcuu

SEQ ID NO: 58987 - RNA, 22 nt, Artificial Sequence
  Synthetic
aaagccacccaaggcacagcuu

SEQ ID NO: 58988 - RNA, 23 nt, Artificial Sequence
  Synthetic
caaagccacccaaggcacagcuu

SEQ ID NO: 58989 - RNA, 24 nt, Artificial Sequence
  Synthetic
ccaaagccacccaaggcacagcuu

SEQ ID NO: 58990 - RNA, 18 nt, Artificial Sequence
  Synthetic
ucaagaacuguuucucuu

SEQ ID NO: 58991 - RNA, 19 nt, Artificial Sequence
  Synthetic
cucaagaacuguuucucuu

SEQ ID NO: 58992 - RNA, 20 nt, Artificial Sequence
  Synthetic
acucaagaacuguuucucuu

SEQ ID NO: 58993 - RNA, 21 nt, Artificial Sequence
  Synthetic
uacucaagaacuguuucucuu

SEQ ID NO: 58994 - RNA, 22 nt, Artificial Sequence
  Synthetic
auacucaagaacuguuucucuu

SEQ ID NO: 58995 - RNA, 23 nt, Artificial Sequence
  Synthetic
aauacucaagaacuguuucucuu

SEQ ID NO: 58996 - RNA, 24 nt, Artificial Sequence
  Synthetic
aaauacucaagaacuguuucucuu

SEQ ID NO: 58997 - RNA, 18 nt, Artificial Sequence
  Synthetic
agcagggcccccagucuu

SEQ ID NO: 58998 - RNA, 19 nt, Artificial Sequence
  Synthetic
uagcagggcccccagucuu

SEQ ID NO: 58999 - RNA, 20 nt, Artificial Sequence
  Synthetic
  misc_feature (1)..(1): n is a, c, g, or u
nuagcagggcccccagucuu

SEQ ID NO: 59000 - RNA, 21 nt, Artificial Sequence
  Synthetic
  misc_feature (2)..(2): n is a, c, g, or u
cnuagcagggcccccagucuu

SEQ ID NO: 59001 - RNA, 22 nt, Artificial Sequence
  Synthetic
  misc_feature (3)..(3): n is a, c, g, or u
ucnuagcagggcccccagucuu

SEQ ID NO: 59002 - RNA, 23 nt, Artificial Sequence
  Synthetic
  misc_feature (4)..(4): n is a, c, g, or u
uucnuagcagggcccccagucuu

SEQ ID NO: 59003 - RNA, 24 nt, Artificial Sequence
  Synthetic
  misc_feature (5)..(5): n is a, c, g, or u
guucnuagcagggcccccagucuu

SEQ ID NO: 59004 - RNA, 18 nt, Artificial Sequence
  Synthetic
cagaagcuccaaauucuu

SEQ ID NO: 59005 - RNA, 19 nt, Artificial Sequence
  Synthetic
acagaagcuccaaauucuu

SEQ ID NO: 59006 - RNA, 20 nt, Artificial Sequence
  Synthetic
cacagaagcuccaaauucuu

SEQ ID NO: 59007 - RNA, 21 nt, Artificial Sequence
  Synthetic
ccacagaagcuccaaauucuu

SEQ ID NO: 59008 - RNA, 22 nt, Artificial Sequence
  Synthetic
uccacagaagcuccaaauucuu

SEQ ID NO: 59009 - RNA, 23 nt, Artificial Sequence
  Synthetic
uuccacagaagcuccaaauucuu

SEQ ID NO: 59010 - RNA, 24 nt, Artificial Sequence
  Synthetic
auuccacagaagcuccaaauucuu

SEQ ID NO: 59011 - RNA, 18 nt, Artificial Sequence
  Synthetic
ggcgagggaguucuucuu

SEQ ID NO: 59012 - RNA, 19 nt, Artificial Sequence
  Synthetic
aggcgagggaguucuucuu

SEQ ID NO: 59013 - RNA, 20 nt, Artificial Sequence
  Synthetic
gaggcgagggaguucuucuu

SEQ ID NO: 59014 - RNA, 21 nt, Artificial Sequence
  Synthetic
cgaggcgagggaguucuucuu

SEQ ID NO: 59015 - RNA, 22 nt, Artificial Sequence
  Synthetic
gcgaggcgagggaguucuucuu

SEQ ID NO: 59016 - RNA, 23 nt, Artificial Sequence
  Synthetic
ugcgaggcgagggaguucuucuu

SEQ ID NO: 59017 - RNA, 24 nt, Artificial Sequence
  Synthetic
cugcgaggcgagggaguucuucuu

SEQ ID NO: 59018 - RNA, 18 nt, Artificial Sequence
  Synthetic
cgauagccaggacaaguu

SEQ ID NO: 59019 - RNA, 19 nt, Artificial Sequence
  Synthetic
  misc_feature (1)..(1): n is a, c, g, or u
ncgauagccaggacaaguu

SEQ ID NO: 59020 - RNA, 20 nt, Artificial Sequence
  Synthetic
  misc_feature (2)..(2): n is a, c, g, or u
ancgauagccaggacaaguu

SEQ ID NO: 59021 - RNA, 21 nt, Artificial Sequence
  Synthetic
  misc_feature (3)..(3): n is a, c, g, or u
cancgauagccaggacaaguu

SEQ ID NO: 59022 - RNA, 22 nt, Artificial Sequence
  Synthetic
  misc_feature (4)..(4): n is a, c, g, or u
ccancgauagccaggacaaguu

SEQ ID NO: 59023 - RNA, 23 nt, Artificial Sequence
  Synthetic
  misc_feature (5)..(5): n is a, c, g, or u
uccancgauagccaggacaaguu

SEQ ID NO: 59024 - RNA, 24 nt, Artificial Sequence
  Synthetic
  misc_feature (6)..(6): n is a, c, g, or u
auccancgauagccaggacaaguu

SEQ ID NO: 59025 - RNA, 18 nt, Artificial Sequence
  Synthetic
agaaaggccuuguaaguu

SEQ ID NO: 59026 - RNA, 19 nt, Artificial Sequence
  Synthetic
  misc_feature (1)..(1): n is a, c, g, or u
nagaaaggccuuguaaguu

SEQ ID NO: 59027 - RNA, 20 nt, Artificial Sequence
  Synthetic
  misc_feature (2)..(2): n is a, c, g, or u
anagaaaggccuuguaaguu

SEQ ID NO: 59028 - RNA, 21 nt, Artificial Sequence
  Synthetic
  misc_feature (3)..(3): n is a, c, g, or u
canagaaaggccuuguaaguu

SEQ ID NO: 59029 - RNA, 22 nt, Artificial Sequence
  Synthetic
  misc_feature (4)..(4): n is a, c, g, or u
acanagaaaggccuuguaaguu

SEQ ID NO: 59030 - RNA, 23 nt, Artificial Sequence
  Synthetic
  misc_feature (1)..(1): n is a, c, g, or u
  misc_feature (5)..(5): n is a, c, g, or u
nacanagaaaggccuuguaaguu

SEQ ID NO: 59031 - RNA, 24 nt, Artificial Sequence
  Synthetic
  misc_feature (2)..(2): n is a, c, g, or u
  misc_feature (6)..(6): n is a, c, g, or u
unacanagaaaggccuuguaaguu

SEQ ID NO: 59032 - RNA, 18 nt, Artificial Sequence
  Synthetic
  misc_feature (7)..(7): n is a, c, g, or u
cccgcgnaggauccaguu

SEQ ID NO: 59033 - RNA, 19 nt, Artificial Sequence
  Synthetic
  misc_feature (8)..(8): n is a, c, g, or u
ucccgcgnaggauccaguu

SEQ ID NO: 59034 - RNA, 20 nt, Artificial Sequence
  Synthetic
  misc_feature (9)..(9): n is a, c, g, or u
gucccgcgnaggauccaguu

SEQ ID NO: 59035 - RNA, 21 nt, Artificial Sequence
  Synthetic
  misc_feature (10)..(10): n is a, c, g, or u
cgucccgcgnaggauccaguu

SEQ ID NO: 59036 - RNA, 22 nt, Artificial Sequence
  Synthetic
  misc_feature (11)..(11): n is a, c, g, or u
acgucccgcgnaggauccaguu

SEQ ID NO: 59037 - RNA, 23 nt, Artificial Sequence
  Synthetic
  misc_feature (12)..(12): n is a, c, g, or u
gacgucccgcgnaggauccaguu

SEQ ID NO: 59038 - RNA, 24 nt, Artificial Sequence
  Synthetic
  misc_feature (13)..(13): n is a, c, g, or u
ggacgucccgcgnaggauccaguu

SEQ ID NO: 59039 - RNA, 18 nt, Artificial Sequence
  Synthetic
cgucuaacaacaguaguu

SEQ ID NO: 59040 - RNA, 19 nt, Artificial Sequence
  Synthetic
ucgucuaacaacaguaguu

SEQ ID NO: 59041 - RNA, 20 nt, Artificial Sequence
  Synthetic
gucgucuaacaacaguaguu

SEQ ID NO: 59042 - RNA, 21 nt, Artificial Sequence
  Synthetic
cgucgucuaacaacaguaguu

SEQ ID NO: 59043 - RNA, 22 nt, Artificial Sequence
  Synthetic
ucgucgucuaacaacaguaguu

SEQ ID NO: 59044 - RNA, 23 nt, Artificial Sequence
  Synthetic
cucgucgucuaacaacaguaguu

SEQ ID NO: 59045 - RNA, 24 nt, Artificial Sequence
  Synthetic
ccucgucgucuaacaacaguaguu

SEQ ID NO: 59046 - RNA, 18 nt, Artificial Sequence
  Synthetic
ggcacaggccuggccguu

SEQ ID NO: 59047 - RNA, 19 nt, Artificial Sequence
  Synthetic
uggcacaggccuggccguu

SEQ ID NO: 59048 - RNA, 20 nt, Artificial Sequence
  Synthetic
uuggcacaggccuggccguu

SEQ ID NO: 59049 - RNA, 21 nt, Artificial Sequence
  Synthetic
cuuggcacaggccuggccguu

SEQ ID NO: 59050 - RNA, 22 nt, Artificial Sequence
  Synthetic
acuuggcacaggccuggccguu

SEQ ID NO: 59051 - RNA, 23 nt, Artificial Sequence
  Synthetic
cacuuggcacaggccuggccguu

SEQ ID NO: 59052 - RNA, 24 nt, Artificial Sequence
  Synthetic
acacuuggcacaggccuggccguu

SEQ ID NO: 59053 - RNA, 18 nt, Artificial Sequence
  Synthetic
  misc_feature (5)..(5): n is a, c, g, or u
  misc_feature (14)..(14): n is a, c, g, or u
aaagncccacaauncguu

SEQ ID NO: 59054 - RNA, 19 nt, Artificial Sequence
  Synthetic
  misc_feature (6)..(6): n is a, c, g, or u
  misc_feature (15)..(15): n is a, c, g, or u
aaaagncccacaauncguu

SEQ ID NO: 59055 - RNA, 20 nt, Artificial Sequence
  Synthetic
  misc_feature (7)..(7): n is a, c, g, or u
  misc_feature (16)..(16): n is a, c, g, or u
caaaagncccacaauncguu

SEQ ID NO: 59056 - RNA, 21 nt, Artificial Sequence
  Synthetic
  misc_feature (8)..(8): n is a, c, g, or u
  misc_feature (17)..(17): n is a, c, g, or u
ccaaaagncccacaauncguu

SEQ ID NO: 59057 - RNA, 22 nt, Artificial Sequence
  Synthetic
  misc_feature (9)..(9): n is a, c, g, or u
  misc_feature (18)..(18): n is a, c, g, or u
cccaaaagncccacaauncguu

SEQ ID NO: 59058 - RNA, 23 nt, Artificial Sequence
  Synthetic
  misc_feature (10)..(10): n is a, c, g, or u
  misc_feature (19)..(19): n is a, c, g, or u
gcccaaaagncccacaauncguu

SEQ ID NO: 59059 - RNA, 24 nt, Artificial Sequence
  Synthetic
  misc_feature (11)..(11): n is a, c, g, or u
  misc_feature (20)..(20): n is a, c, g, or u
agcccaaaagncccacaauncguu

SEQ ID NO: 59060 - RNA, 18 nt, Artificial Sequence
  Synthetic
  misc_feature (11)..(12): n is a, c, g, or u
augccccuucnngucguu

SEQ ID NO: 59061 - RNA, 19 nt, Artificial Sequence
  Synthetic
  misc_feature (12)..(13): n is a, c, g, or u
caugccccuucnngucguu

SEQ ID NO: 59062 - RNA, 20 nt, Artificial Sequence
  Synthetic
  misc_feature (13)..(14): n is a, c, g, or u
ccaugccccuucnngucguu

SEQ ID NO: 59063 - RNA, 21 nt, Artificial Sequence
  Synthetic
  misc_feature (14)..(15): n is a, c, g, or u
cccaugccccuucnngucguu

SEQ ID NO: 59064 - RNA, 22 nt, Artificial Sequence
  Synthetic
  misc_feature (15)..(16): n is a, c, g, or u
ucccaugccccuucnngucguu

SEQ ID NO: 59065 - RNA, 23 nt, Artificial Sequence
  Synthetic
  misc_feature (16)..(17): n is a, c, g, or u
gucccaugccccuucnngucguu

SEQ ID NO: 59066 - RNA, 24 nt, Artificial Sequence
  Synthetic
  misc_feature (17)..(18): n is a, c, g, or u
ugucccaugccccuucnngucguu

SEQ ID NO: 59067 - RNA, 18 nt, Artificial Sequence
  Synthetic
guuggaggacaggagguu

SEQ ID NO: 59068 - RNA, 19 nt, Artificial Sequence
  Synthetic
aguuggaggacaggagguu

SEQ ID NO: 59069 - RNA, 20 nt, Artificial Sequence
  Synthetic
aaguuggaggacaggagguu

SEQ ID NO: 59070 - RNA, 21 nt, Artificial Sequence
  Synthetic
caaguuggaggacaggagguu

SEQ ID NO: 59071 - RNA, 22 nt, Artificial Sequence
  Synthetic
acaaguuggaggacaggagguu

SEQ ID NO: 59072 - RNA, 23 nt, Artificial Sequence
  Synthetic
gacaaguuggaggacaggagguu

SEQ ID NO: 59073 - RNA, 24 nt, Artificial Sequence
  Synthetic
ggacaaguuggaggacaggagguu

SEQ ID NO: 59074 - RNA, 18 nt, Artificial Sequence
  Synthetic
gguaagugauuggagguu

SEQ ID NO: 59075 - RNA, 19 nt, Artificial Sequence
  Synthetic
ugguaagugauuggagguu

SEQ ID NO: 59076 - RNA, 20 nt, Artificial Sequence
  Synthetic
uugguaagugauuggagguu

SEQ ID NO: 59077 - RNA, 21 nt, Artificial Sequence
  Synthetic
guugguaagugauuggagguu

SEQ ID NO: 59078 - RNA, 22 nt, Artificial Sequence
  Synthetic
gguugguaagugauuggagguu

SEQ ID NO: 59079 - RNA, 23 nt, Artificial Sequence
  Synthetic
agguugguaagugauuggagguu

SEQ ID NO: 59080 - RNA, 24 nt, Artificial Sequence
  Synthetic
gagguugguaagugauuggagguu

SEQ ID NO: 59081 - RNA, 18 nt, Artificial Sequence
  Synthetic
aguuuccguccgaggguu

SEQ ID NO: 59082 - RNA, 19 nt, Artificial Sequence
  Synthetic
caguuuccguccgaggguu

SEQ ID NO: 59083 - RNA, 20 nt, Artificial Sequence
  Synthetic
gcaguuuccguccgaggguu

SEQ ID NO: 59084 - RNA, 21 nt, Artificial Sequence
  Synthetic
ugcaguuuccguccgaggguu

SEQ ID NO: 59085 - RNA, 22 nt, Artificial Sequence
  Synthetic
gugcaguuuccguccgaggguu

SEQ ID NO: 59086 - RNA, 23 nt, Artificial Sequence
  Synthetic
  misc_feature (1)..(1): n is a, c, g, or u
ngugcaguuuccguccgaggguu

SEQ ID NO: 59087 - RNA, 24 nt, Artificial Sequence
  Synthetic
  misc_feature (2)..(2): n is a, c, g, or u
angugcaguuuccguccgaggguu

SEQ ID NO: 59088 - RNA, 18 nt, Artificial Sequence
  Synthetic
ugugauguuguccauguu

SEQ ID NO: 59089 - RNA, 19 nt, Artificial Sequence
  Synthetic
augugauguuguccauguu

SEQ ID NO: 59090 - RNA, 20 nt, Artificial Sequence
  Synthetic
gaugugauguuguccauguu

SEQ ID NO: 59091 - RNA, 21 nt, Artificial Sequence
  Synthetic
ugaugugauguuguccauguu

SEQ ID NO: 59092 - RNA, 22 nt, Artificial Sequence
  Synthetic
cugaugugauguuguccauguu

SEQ ID NO: 59093 - RNA, 23 nt, Artificial Sequence
  Synthetic
ccugaugugauguuguccauguu

SEQ ID NO: 59094 - RNA, 24 nt, Artificial Sequence
  Synthetic
uccugaugugauguuguccauguu

SEQ ID NO: 59095 - RNA, 18 nt, Artificial Sequence
  Synthetic
  misc_feature (2)..(3): n is a, c, g, or u
cnnuuauguaagacuguu

SEQ ID NO: 59096 - RNA, 19 nt, Artificial Sequence
  Synthetic
  misc_feature (3)..(4): n is a, c, g, or u
ccnnuuauguaagacuguu

SEQ ID NO: 59097 - RNA, 20 nt, Artificial Sequence
  Synthetic
  misc_feature (4)..(5): n is a, c, g, or u
uccnnuuauguaagacuguu

SEQ ID NO: 59098 - RNA, 21 nt, Artificial Sequence
  Synthetic
  misc_feature (5)..(6): n is a, c, g, or u
guccnnuuauguaagacuguu

SEQ ID NO: 59099 - RNA, 22 nt, Artificial Sequence
  Synthetic
  misc_feature (6)..(7): n is a, c, g, or u
aguccnnuuauguaagacuguu

SEQ ID NO: 59100 - RNA, 23 nt, Artificial Sequence
  Synthetic
  misc_feature (1)..(1): n is a, c, g, or u
  misc_feature (7)..(8): n is a, c, g, or u
naguccnnuuauguaagacuguu

SEQ ID NO: 59101 - RNA, 24 nt, Artificial Sequence
  Synthetic
  misc_feature (2)..(2): n is a, c, g, or u
  misc_feature (8)..(9): n is a, c, g, or u
anaguccnnuuauguaagacuguu

SEQ ID NO: 59102 - RNA, 18 nt, Artificial Sequence
  Synthetic
uaaccccaucuuuuuguu

SEQ ID NO: 59103 - RNA, 19 nt, Artificial Sequence
  Synthetic
  misc_feature (1)..(1): n is a, c, g, or u
nuaaccccaucuuuuuguu

SEQ ID NO: 59104 - RNA, 20 nt, Artificial Sequence
  Synthetic
  misc_feature (2)..(2): n is a, c, g, or u
unuaaccccaucuuuuuguu

SEQ ID NO: 59105 - RNA, 21 nt, Artificial Sequence
  Synthetic
  misc_feature (1)..(1): n is a, c, g, or u
  misc_feature (3)..(3): n is a, c, g, or u
nunuaaccccaucuuuuuguu

SEQ ID NO: 59106 - RNA, 22 nt, Artificial Sequence
  Synthetic
  misc_feature (1)..(2): n is a, c, g, or u
  misc_feature (4)..(4): n is a, c, g, or u
nnunuaaccccaucuuuuuguu

SEQ ID NO: 59107 - RNA, 23 nt, Artificial Sequence
  Synthetic
  misc_feature (1)..(3): n is a, c, g, or u
  misc_feature (5)..(5): n is a, c, g, or u
nnnunuaaccccaucuuuuuguu

SEQ ID NO: 59108 - RNA, 24 nt, Artificial Sequence
  Synthetic
  misc_feature (2)..(4): n is a, c, g, or u
  misc_feature (6)..(6): n is a, c, g, or u
annnunuaaccccaucuuuuuguu

SEQ ID NO: 59109 - RNA, 18 nt, Artificial Sequence
  Synthetic
  misc_feature (3)..(3): n is a, c, g, or u
  misc_feature (9)..(9): n is a, c, g, or u
  misc_feature (12)..(12): n is a, c, g, or u
canucaaunggncgauuu

SEQ ID NO: 59110 - RNA, 19 nt, Artificial Sequence
  Synthetic
  misc_feature (4)..(4): n is a, c, g, or u
  misc_feature (10)..(10): n is a, c, g, or u
  misc_feature (13)..(13): n is a, c, g, or u
ccanucaaunggncgauuu

SEQ ID NO: 59111 - RNA, 20 nt, Artificial Sequence
  Synthetic
  misc_feature (5)..(5): n is a, c, g, or u
  misc_feature (11)..(11): n is a, c, g, or u
  misc_feature (14)..(14): n is a, c, g, or u
uccanucaaunggncgauuu

SEQ ID NO: 59112 - RNA, 21 nt, Artificial Sequence
  Synthetic
  misc_feature (6)..(6): n is a, c, g, or u
  misc_feature (12)..(12): n is a, c, g, or u
  misc_feature (15)..(15): n is a, c, g, or u
uuccanucaaunggncgauuu

SEQ ID NO: 59113 - RNA, 22 nt, Artificial Sequence
  Synthetic
  misc_feature (7)..(7): n is a, c, g, or u
  misc_feature (13)..(13): n is a, c, g, or u
  misc_feature (16)..(16): n is a, c, g, or u
uuuccanucaaunggncgauuu

SEQ ID NO: 59114 - RNA, 23 nt, Artificial Sequence
  Synthetic
  misc_feature (8)..(8): n is a, c, g, or u
  misc_feature (14)..(14): n is a, c, g, or u
  misc_feature (17)..(17): n is a, c, g, or u
cuuuccanucaaunggncgauuu

SEQ ID NO: 59115 - RNA, 24 nt, Artificial Sequence
  Synthetic
  misc_feature (9)..(9): n is a, c, g, or u
  misc_feature (15)..(15): n is a, c, g, or u
  misc_feature (18)..(18): n is a, c, g, or u
acuuuccanucaaunggncgauuu

SEQ ID NO: 59116 - RNA, 18 nt, Artificial Sequence
  Synthetic
  misc_feature (1)..(1): n is a, c, g, or u
  misc_feature (6)..(6): n is a, c, g, or u
nuccanaggaaaauauuu

SEQ ID NO: 59117 - RNA, 19 nt, Artificial Sequence
  Synthetic
  misc_feature (2)..(2): n is a, c, g, or u
  misc_feature (7)..(7): n is a, c, g, or u
unuccanaggaaaauauuu

SEQ ID NO: 59118 - RNA, 20 nt, Artificial Sequence
  Synthetic
  misc_feature (3)..(3): n is a, c, g, or u
  misc_feature (8)..(8): n is a, c, g, or u
uunuccanaggaaaauauuu

SEQ ID NO: 59119 - RNA, 21 nt, Artificial Sequence
  Synthetic
  misc_feature (1)..(1): n is a, c, g, or u
  misc_feature (4)..(4): n is a, c, g, or u
  misc_feature (9)..(9): n is a, c, g, or u
nuunuccanaggaaaauauuu

SEQ ID NO: 59120 - RNA, 22 nt, Artificial Sequence
  Synthetic
  misc_feature (2)..(2): n is a, c, g, or u
  misc_feature (5)..(5): n is a, c, g, or u
  misc_feature (10)..(10): n is a, c, g, or u
cnuunuccanaggaaaauauuu

SEQ ID NO: 59121 - RNA, 23 nt, Artificial Sequence
  Synthetic
  misc_feature (3)..(3): n is a, c, g, or u
  misc_feature (6)..(6): n is a, c, g, or u
  misc_feature (11)..(11): n is a, c, g, or u
ccnuunuccanaggaaaauauuu

SEQ ID NO: 59122 - RNA, 24 nt, Artificial Sequence
  Synthetic
  misc_feature (1)..(1): n is a, c, g, or u
  misc_feature (4)..(4): n is a, c, g, or u
  misc_feature (7)..(7): n is a, c, g, or u
  misc_feature (12)..(12): n is a, c, g, or u
nccnuunuccanaggaaaauauuu

SEQ ID NO: 59123 - RNA, 18 nt, Artificial Sequence
  Synthetic
agaagcuccaaauucuuu

SEQ ID NO: 59124 - RNA, 19 nt, Artificial Sequence
  Synthetic
cagaagcuccaaauucuuu

SEQ ID NO: 59125 - RNA, 20 nt, Artificial Sequence
  Synthetic
acagaagcuccaaauucuuu

SEQ ID NO: 59126 - RNA, 21 nt, Artificial Sequence
  Synthetic
cacagaagcuccaaauucuuu

SEQ ID NO: 59127 - RNA, 22 nt, Artificial Sequence
  Synthetic
ccacagaagcuccaaauucuuu

SEQ ID NO: 59128 - RNA, 23 nt, Artificial Sequence
  Synthetic
uccacagaagcuccaaauucuuu

SEQ ID NO: 59129 - RNA, 24 nt, Artificial Sequence
  Synthetic
uuccacagaagcuccaaauucuuu

SEQ ID NO: 59130 - RNA, 18 nt, Artificial Sequence
  Synthetic
  misc_feature (1)..(1): n is a, c, g, or u
ncgauuuacaggaaguuu

SEQ ID NO: 59131 - RNA, 19 nt, Artificial Sequence
  Synthetic
  misc_feature (2)..(2): n is a, c, g, or u
gncgauuuacaggaaguuu

SEQ ID NO: 59132 - RNA, 20 nt, Artificial Sequence
  Synthetic
  misc_feature (3)..(3): n is a, c, g, or u
ggncgauuuacaggaaguuu

SEQ ID NO: 59133 - RNA, 21 nt, Artificial Sequence
  Synthetic
  misc_feature (1)..(1): n is a, c, g, or u
  misc_feature (4)..(4): n is a, c, g, or u
nggncgauuuacaggaaguuu

SEQ ID NO: 59134 - RNA, 22 nt, Artificial Sequence
  Synthetic
  misc_feature (2)..(2): n is a, c, g, or u
  misc_feature (5)..(5): n is a, c, g, or u
unggncgauuuacaggaaguuu

SEQ ID NO: 59135 - RNA, 23 nt, Artificial Sequence
  Synthetic
  misc_feature (3)..(3): n is a, c, g, or u
  misc_feature (6)..(6): n is a, c, g, or u
aunggncgauuuacaggaaguuu

SEQ ID NO: 59136 - RNA, 24 nt, Artificial Sequence
  Synthetic
  misc_feature (4)..(4): n is a, c, g, or u
  misc_feature (7)..(7): n is a, c, g, or u
aaunggncgauuuacaggaaguuu

SEQ ID NO: 59137 - RNA, 18 nt, Artificial Sequence
  Synthetic
gucuaacaacaguaguuu

SEQ ID NO: 59138 - RNA, 19 nt, Artificial Sequence
  Synthetic
cgucuaacaacaguaguuu

SEQ ID NO: 59139 - RNA, 20 nt, Artificial Sequence
  Synthetic
ucgucuaacaacaguaguuu

SEQ ID NO: 59140 - RNA, 21 nt, Artificial Sequence
  Synthetic
gucgucuaacaacaguaguuu

SEQ ID NO: 59141 - RNA, 22 nt, Artificial Sequence
  Synthetic
cgucgucuaacaacaguaguuu

SEQ ID NO: 59142 - RNA, 23 nt, Artificial Sequence
  Synthetic
ucgucgucuaacaacaguaguuu

SEQ ID NO: 59143 - RNA, 24 nt, Artificial Sequence
  Synthetic
cucgucgucuaacaacaguaguuu

SEQ ID NO: 59144 - RNA, 18 nt, Artificial Sequence
  Synthetic
cacucccauagguauuuu

SEQ ID NO: 59145 - RNA, 19 nt, Artificial Sequence
  Synthetic
ccacucccauagguauuuu

SEQ ID NO: 59146 - RNA, 20 nt, Artificial Sequence
  Synthetic
cccacucccauagguauuuu

SEQ ID NO: 59147 - RNA, 21 nt, Artificial Sequence
  Synthetic
gcccacucccauagguauuuu

SEQ ID NO: 59148 - RNA, 22 nt, Artificial Sequence
  Synthetic
ggcccacucccauagguauuuu

SEQ ID NO: 59149 - RNA, 23 nt, Artificial Sequence
  Synthetic
aggcccacucccauagguauuuu

SEQ ID NO: 59150 - RNA, 24 nt, Artificial Sequence
  Synthetic
gaggcccacucccauagguauuuu

SEQ ID NO: 59151 - RNA, 18 nt, Artificial Sequence
  Synthetic
gguauugugaggauuuuu

SEQ ID NO: 59152 - RNA, 19 nt, Artificial Sequence
  Synthetic
ugguauugugaggauuuuu

SEQ ID NO: 59153 - RNA, 20 nt, Artificial Sequence
  Synthetic
gugguauugugaggauuuuu

SEQ ID NO: 59154 - RNA, 21 nt, Artificial Sequence
  Synthetic
ugugguauugugaggauuuuu

SEQ ID NO: 59155 - RNA, 22 nt, Artificial Sequence
  Synthetic
cugugguauugugaggauuuuu

SEQ ID NO: 59156 - RNA, 23 nt, Artificial Sequence
  Synthetic
ucugugguauugugaggauuuuu

SEQ ID NO: 59157 - RNA, 24 nt, Artificial Sequence
  Synthetic
cucugugguauugugaggauuuuu

SEQ ID NO: 59158 - RNA, 18 nt, Artificial Sequence
  Synthetic
  misc_feature (5)..(5): n is a, c, g, or u
  misc_feature (8)..(8): n is a, c, g, or u
auacnucnaaaacaaaaa

SEQ ID NO: 59159 - RNA, 19 nt, Artificial Sequence
  Synthetic
  misc_feature (6)..(6): n is a, c, g, or u
  misc_feature (9)..(9): n is a, c, g, or u
aauacnucnaaaacaaaaa

SEQ ID NO: 59160 - RNA, 20 nt, Artificial Sequence
  Synthetic
  misc_feature (1)..(1): n is a, c, g, or u
  misc_feature (7)..(7): n is a, c, g, or u
  misc_feature (10)..(10): n is a, c, g, or u
naauacnucnaaaacaaaaa

SEQ ID NO: 59161 - RNA, 21 nt, Artificial Sequence
  Synthetic
  misc_feature (2)..(2): n is a, c, g, or u
  misc_feature (8)..(8): n is a, c, g, or u
  misc_feature (11)..(11): n is a, c, g, or u
unaauacnucnaaaacaaaaa

SEQ ID NO: 59162 - RNA, 22 nt, Artificial Sequence
  Synthetic
  misc_feature (3)..(3): n is a, c, g, or u
  misc_feature (9)..(9): n is a, c, g, or u
  misc_feature (12)..(12): n is a, c, g, or u
uunaauacnucnaaaacaaaaa

SEQ ID NO: 59163 - RNA, 23 nt, Artificial Sequence
  Synthetic
  misc_feature (4)..(4): n is a, c, g, or u
  misc_feature (10)..(10): n is a, c, g, or u
  misc_feature (13)..(13): n is a, c, g, or u
uuunaauacnucnaaaacaaaaa

SEQ ID NO: 59164 - RNA, 24 nt, Artificial Sequence
  Synthetic
  misc_feature (5)..(5): n is a, c, g, or u
  misc_feature (11)..(11): n is a, c, g, or u
  misc_feature (14)..(14): n is a, c, g, or u
auuunaauacnucnaaaacaaaaa

SEQ ID NO: 59165 - RNA, 18 nt, Artificial Sequence
  Synthetic
  misc_feature (5)..(5): n is a, c, g, or u
  misc_feature (11)..(11): n is a, c, g, or u
  misc_feature (14)..(14): n is a, c, g, or u
auuunaauacnucnaaaa

SEQ ID NO: 59166 - RNA, 19 nt, Artificial Sequence
  Synthetic
  misc_feature (6)..(6): n is a, c, g, or u
  misc_feature (12)..(12): n is a, c, g, or u
  misc_feature (15)..(15): n is a, c, g, or u
cauuunaauacnucnaaaa

SEQ ID NO: 59167 - RNA, 20 nt, Artificial Sequence
  Synthetic
  misc_feature (7)..(7): n is a, c, g, or u
  misc_feature (13)..(13): n is a, c, g, or u
  misc_feature (16)..(16): n is a, c, g, or u
ccauuunaauacnucnaaaa

SEQ ID NO: 59168 - RNA, 21 nt, Artificial Sequence
  Synthetic
  misc_feature (8)..(8): n is a, c, g, or u
  misc_feature (14)..(14): n is a, c, g, or u
  misc_feature (17)..(17): n is a, c, g, or u
uccauuunaauacnucnaaaa

SEQ ID NO: 59169 - RNA, 22 nt, Artificial Sequence
  Synthetic
  misc_feature (9)..(9): n is a, c, g, or u
  misc_feature (15)..(15): n is a, c, g, or u
  misc_feature (18)..(18): n is a, c, g, or u
auccauuunaauacnucnaaaa

SEQ ID NO: 59170 - RNA, 23 nt, Artificial Sequence
  Synthetic
  misc_feature (10)..(10): n is a, c, g, or u
  misc_feature (16)..(16): n is a, c, g, or u
  misc_feature (19)..(19): n is a, c, g, or u
uauccauuunaauacnucnaaaa

SEQ ID NO: 59171 - RNA, 24 nt, Artificial Sequence
  Synthetic
  misc_feature (11)..(11): n is a, c, g, or u
  misc_feature (17)..(17): n is a, c, g, or u
  misc_feature (20)..(20): n is a, c, g, or u
guauccauuunaauacnucnaaaa

SEQ ID NO: 59172 - RNA, 18 nt, Artificial Sequence
  Synthetic
  misc_feature (1)..(1): n is a, c, g, or u
  misc_feature (15)..(15): n is a, c, g, or u
nugggacuucaacanaaa

SEQ ID NO: 59173 - RNA, 19 nt, Artificial Sequence
  Synthetic
  misc_feature (2)..(2): n is a, c, g, or u
  misc_feature (16)..(16): n is a, c, g, or u
anugggacuucaacanaaa

SEQ ID NO: 59174 - RNA, 20 nt, Artificial Sequence
  Synthetic
  misc_feature (3)..(3): n is a, c, g, or u
  misc_feature (17)..(17): n is a, c, g, or u
ganugggacuucaacanaaa

SEQ ID NO: 59175 - RNA, 21 nt, Artificial Sequence
  Synthetic
  misc_feature (4)..(4): n is a, c, g, or u
  misc_feature (18)..(18): n is a, c, g, or u
cganugggacuucaacanaaa

SEQ ID NO: 59176 - RNA, 22 nt, Artificial Sequence
  Synthetic
  misc_feature (5)..(5): n is a, c, g, or u
  misc_feature (19)..(19): n is a, c, g, or u
ccganugggacuucaacanaaa

SEQ ID NO: 59177 - RNA, 23 nt, Artificial Sequence
  Synthetic
  misc_feature (6)..(6): n is a, c, g, or u
  misc_feature (20)..(20): n is a, c, g, or u
cccganugggacuucaacanaaa

SEQ ID NO: 59178 - RNA, 24 nt, Artificial Sequence
  Synthetic
  misc_feature (7)..(7): n is a, c, g, or u
  misc_feature (21)..(21): n is a, c, g, or u
ucccganugggacuucaacanaaa

SEQ ID NO: 59179 - RNA, 18 nt, Artificial Sequence
  Synthetic
  misc_feature (6)..(6): n is a, c, g, or u
  misc_feature (15)..(15): n is a, c, g, or u
gaucanauuguacanaaa

SEQ ID NO: 59180 - RNA, 19 nt, Artificial Sequence
  Synthetic
  misc_feature (7)..(7): n is a, c, g, or u
  misc_feature (16)..(16): n is a, c, g, or u
agaucanauuguacanaaa

SEQ ID NO: 59181 - RNA, 20 nt, Artificial Sequence
  Synthetic
  misc_feature (8)..(8): n is a, c, g, or u
  misc_feature (17)..(17): n is a, c, g, or u
aagaucanauuguacanaaa

SEQ ID NO: 59182 - RNA, 21 nt, Artificial Sequence
  Synthetic
  misc_feature (9)..(9): n is a, c, g, or u
  misc_feature (18)..(18): n is a, c, g, or u
caagaucanauuguacanaaa

SEQ ID NO: 59183 - RNA, 22 nt, Artificial Sequence
  Synthetic
  misc_feature (1)..(1): n is a, c, g, or u
  misc_feature (10)..(10): n is a, c, g, or u
  misc_feature (19)..(19): n is a, c, g, or u
ncaagaucanauuguacanaaa

SEQ ID NO: 59184 - RNA, 23 nt, Artificial Sequence
  Synthetic
  misc_feature (2)..(2): n is a, c, g, or u
  misc_feature (11)..(11): n is a, c, g, or u
  misc_feature (20)..(20): n is a, c, g, or u
cncaagaucanauuguacanaaa

SEQ ID NO: 59185 - RNA, 24 nt, Artificial Sequence
  Synthetic
  misc_feature (3)..(3): n is a, c, g, or u
  misc_feature (12)..(12): n is a, c, g, or u
  misc_feature (21)..(21): n is a, c, g, or u
ccncaagaucanauuguacanaaa

SEQ ID NO: 59186 - RNA, 18 nt, Artificial Sequence
  Synthetic
  misc_feature (9)..(9): n is a, c, g, or u
  misc_feature (12)..(12): n is a, c, g, or u
  misc_feature (15)..(15): n is a, c, g, or u
guaggcccncunacnaaa

SEQ ID NO: 59187 - RNA, 19 nt, Artificial Sequence
  Synthetic
  misc_feature (10)..(10): n is a, c, g, or u
  misc_feature (13)..(13): n is a, c, g, or u
  misc_feature (16)..(16): n is a, c, g, or u
uguaggcccncunacnaaa

SEQ ID NO: 59188 - RNA, 20 nt, Artificial Sequence
  Synthetic
  misc_feature (11)..(11): n is a, c, g, or u
  misc_feature (14)..(14): n is a, c, g, or u
  misc_feature (17)..(17): n is a, c, g, or u
uuguaggcccncunacnaaa

SEQ ID NO: 59189 - RNA, 21 nt, Artificial Sequence
  Synthetic
  misc_feature (12)..(12): n is a, c, g, or u
  misc_feature (15)..(15): n is a, c, g, or u
  misc_feature (18)..(18): n is a, c, g, or u
uuuguaggcccncunacnaaa

SEQ ID NO: 59190 - RNA, 22 nt, Artificial Sequence
  Synthetic
  misc_feature (13)..(13): n is a, c, g, or u
  misc_feature (16)..(16): n is a, c, g, or u
  misc_feature (19)..(19): n is a, c, g, or u
auuuguaggcccncunacnaaa

SEQ ID NO: 59191 - RNA, 23 nt, Artificial Sequence
  Synthetic
  misc_feature (14)..(14): n is a, c, g, or u
  misc_feature (17)..(17): n is a, c, g, or u
  misc_feature (20)..(20): n is a, c, g, or u
aauuuguaggcccncunacnaaa

SEQ ID NO: 59192 - RNA, 24 nt, Artificial Sequence
  Synthetic
  misc_feature (15)..(15): n is a, c, g, or u
  misc_feature (18)..(18): n is a, c, g, or u
  misc_feature (21)..(21): n is a, c, g, or u
caauuuguaggcccncunacnaaa

SEQ ID NO: 59193 - RNA, 18 nt, Artificial Sequence
  Synthetic
  misc_feature (6)..(6): n is a, c, g, or u
  misc_feature (12)..(12): n is a, c, g, or u
  misc_feature (15)..(15): n is a, c, g, or u
cauuunaauacnucnaaa

SEQ ID NO: 59194 - RNA, 19 nt, Artificial Sequence
  Synthetic
  misc_feature (7)..(7): n is a, c, g, or u
  misc_feature (13)..(13): n is a, c, g, or u
  misc_feature (16)..(16): n is a, c, g, or u
ccauuunaauacnucnaaa

SEQ ID NO: 59195 - RNA, 20 nt, Artificial Sequence
  Synthetic
  misc_feature (8)..(8): n is a, c, g, or u
  misc_feature (14)..(14): n is a, c, g, or u
  misc_feature (17)..(17): n is a, c, g, or u
uccauuunaauacnucnaaa

SEQ ID NO: 59196 - RNA, 21 nt, Artificial Sequence
  Synthetic
  misc_feature (9)..(9): n is a, c, g, or u
  misc_feature (15)..(15): n is a, c, g, or u
  misc_feature (18)..(18): n is a, c, g, or u
auccauuunaauacnucnaaa

SEQ ID NO: 59197 - RNA, 22 nt, Artificial Sequence
  Synthetic
  misc_feature (10)..(10): n is a, c, g, or u
  misc_feature (16)..(16): n is a, c, g, or u
  misc_feature (19)..(19): n is a, c, g, or u
uauccauuunaauacnucnaaa

SEQ ID NO: 59198 - RNA, 23 nt, Artificial Sequence
  Synthetic
  misc_feature (11)..(11): n is a, c, g, or u
  misc_feature (17)..(17): n is a, c, g, or u
  misc_feature (20)..(20): n is a, c, g, or u
guauccauuunaauacnucnaaa

SEQ ID NO: 59199 - RNA, 24 nt, Artificial Sequence
  Synthetic
  misc_feature (12)..(12): n is a, c, g, or u
  misc_feature (18)..(18): n is a, c, g, or u
  misc_feature (21)..(21): n is a, c, g, or u
gguauccauuunaauacnucnaaa

SEQ ID NO: 59200 - RNA, 18 nt, Artificial Sequence
  Synthetic
  misc_feature (6)..(7): n is a, c, g, or u
  misc_feature (13)..(15): n is a, c, g, or u
caagannugauannnaaa

SEQ ID NO: 59201 - RNA, 19 nt, Artificial Sequence
  Synthetic
  misc_feature (7)..(8): n is a, c, g, or u
  misc_feature (14)..(16): n is a, c, g, or u
ucaagannugauannnaaa

SEQ ID NO: 59202 - RNA, 20 nt, Artificial Sequence
  Synthetic
  misc_feature (8)..(9): n is a, c, g, or u
  misc_feature (15)..(17): n is a, c, g, or u
aucaagannugauannnaaa

SEQ ID NO: 59203 - RNA, 21 nt, Artificial Sequence
  Synthetic
  misc_feature (9)..(10): n is a, c, g, or u
  misc_feature (16)..(18): n is a, c, g, or u
caucaagannugauannnaaa

SEQ ID NO: 59204 - RNA, 22 nt, Artificial Sequence
  Synthetic
  misc_feature (1)..(1): n is a, c, g, or u
  misc_feature (10)..(11): n is a, c, g, or u
  misc_feature (17)..(19): n is a, c, g, or u
ncaucaagannugauannnaaa

SEQ ID NO: 59205 - RNA, 23 nt, Artificial Sequence
  Synthetic
  misc_feature (2)..(2): n is a, c, g, or u
  misc_feature (11)..(12): n is a, c, g, or u
  misc_feature (18)..(20): n is a, c, g, or u
uncaucaagannugauannnaaa

SEQ ID NO: 59206 - RNA, 24 nt, Artificial Sequence
  Synthetic
  misc_feature (3)..(3): n is a, c, g, or u
  misc_feature (12)..(13): n is a, c, g, or u
  misc_feature (19)..(21): n is a, c, g, or u
uuncaucaagannugauannnaaa

SEQ ID NO: 59207 - RNA, 18 nt, Artificial Sequence
  Synthetic
uuggccaauggcaaacaa

SEQ ID NO: 59208 - RNA, 19 nt, Artificial Sequence
  Synthetic
  misc_feature (1)..(1): n is a, c, g, or u
nuuggccaauggcaaacaa

SEQ ID NO: 59209 - RNA, 20 nt, Artificial Sequence
  Synthetic
  misc_feature (2)..(2): n is a, c, g, or u
anuuggccaauggcaaacaa

SEQ ID NO: 59210 - RNA, 21 nt, Artificial Sequence
  Synthetic
  misc_feature (3)..(3): n is a, c, g, or u
canuuggccaauggcaaacaa

SEQ ID NO: 59211 - RNA, 22 nt, Artificial Sequence
  Synthetic
  misc_feature (4)..(4): n is a, c, g, or u
acanuuggccaauggcaaacaa

SEQ ID NO: 59212 - RNA, 23 nt, Artificial Sequence
  Synthetic
  misc_feature (5)..(5): n is a, c, g, or u
gacanuuggccaauggcaaacaa

SEQ ID NO: 59213 - RNA, 24 nt, Artificial Sequence
  Synthetic
  misc_feature (6)..(6): n is a, c, g, or u
ggacanuuggccaauggcaaacaa

SEQ ID NO: 59214 - RNA, 18 nt, Artificial Sequence
  Synthetic
  misc_feature (4)..(4): n is a, c, g, or u
acanuuggccaauggcaa

SEQ ID NO: 59215 - RNA, 19 nt, Artificial Sequence
  Synthetic
  misc_feature (5)..(5): n is a, c, g, or u
gacanuuggccaauggcaa

SEQ ID NO: 59216 - RNA, 20 nt, Artificial Sequence
  Synthetic
  misc_feature (6)..(6): n is a, c, g, or u
ggacanuuggccaauggcaa

SEQ ID NO: 59217 - RNA, 21 nt, Artificial Sequence
  Synthetic
  misc_feature (7)..(7): n is a, c, g, or u
aggacanuuggccaauggcaa

SEQ ID NO: 59218 - RNA, 22 nt, Artificial Sequence
  Synthetic
  misc_feature (8)..(8): n is a, c, g, or u
aaggacanuuggccaauggcaa

SEQ ID NO: 59219 - RNA, 23 nt, Artificial Sequence
  Synthetic
  misc_feature (9)..(9): n is a, c, g, or u
caaggacanuuggccaauggcaa

SEQ ID NO: 59220 - RNA, 24 nt, Artificial Sequence
  Synthetic
  misc_feature (10)..(10): n is a, c, g, or u
acaaggacanuuggccaauggcaa

SEQ ID NO: 59221 - RNA, 18 nt, Artificial Sequence
  Synthetic
  misc_feature (7)..(7): n is a, c, g, or u
ucccganugggacuucaa

SEQ ID NO: 59222 - RNA, 19 nt, Artificial Sequence
  Synthetic
  misc_feature (8)..(8): n is a, c, g, or u
gucccganugggacuucaa

SEQ ID NO: 59223 - RNA, 20 nt, Artificial Sequence
  Synthetic
  misc_feature (9)..(9): n is a, c, g, or u
agucccganugggacuucaa

SEQ ID NO: 59224 - RNA, 21 nt, Artificial Sequence
  Synthetic
  misc_feature (10)..(10): n is a, c, g, or u
cagucccganugggacuucaa

SEQ ID NO: 59225 - RNA, 22 nt, Artificial Sequence
  Synthetic
  misc_feature (11)..(11): n is a, c, g, or u
gcagucccganugggacuucaa

SEQ ID NO: 59226 - RNA, 23 nt, Artificial Sequence
  Synthetic
  misc_feature (12)..(12): n is a, c, g, or u
agcagucccganugggacuucaa

SEQ ID NO: 59227 - RNA, 24 nt, Artificial Sequence
  Synthetic
  misc_feature (13)..(13): n is a, c, g, or u
cagcagucccganugggacuucaa

SEQ ID NO: 59228 - RNA, 18 nt, Artificial Sequence
  Synthetic
auugacccuuauaaagaa

SEQ ID NO: 59229 - RNA, 19 nt, Artificial Sequence
  Synthetic
cauugacccuuauaaagaa

SEQ ID NO: 59230 - RNA, 20 nt, Artificial Sequence
  Synthetic
acauugacccuuauaaagaa

SEQ ID NO: 59231 - RNA, 21 nt, Artificial Sequence
  Synthetic
gacauugacccuuauaaagaa

SEQ ID NO: 59232 - RNA, 22 nt, Artificial Sequence
  Synthetic
ggacauugacccuuauaaagaa

SEQ ID NO: 59233 - RNA, 23 nt, Artificial Sequence
  Synthetic
uggacauugacccuuauaaagaa

SEQ ID NO: 59234 - RNA, 24 nt, Artificial Sequence
  Synthetic
auggacauugacccuuauaaagaa

SEQ ID NO: 59235 - RNA, 18 nt, Artificial Sequence
  Synthetic
  misc_feature (12)..(12): n is a, c, g, or u
ucaccauauucnugggaa

SEQ ID NO: 59236 - RNA, 19 nt, Artificial Sequence
  Synthetic
  misc_feature (13)..(13): n is a, c, g, or u
gucaccauauucnugggaa

SEQ ID NO: 59237 - RNA, 20 nt, Artificial Sequence
  Synthetic
  misc_feature (14)..(14): n is a, c, g, or u
ggucaccauauucnugggaa

SEQ ID NO: 59238 - RNA, 21 nt, Artificial Sequence
  Synthetic
  misc_feature (15)..(15): n is a, c, g, or u
gggucaccauauucnugggaa

SEQ ID NO: 59239 - RNA, 22 nt, Artificial Sequence
  Synthetic
  misc_feature (16)..(16): n is a, c, g, or u
ugggucaccauauucnugggaa

SEQ ID NO: 59240 - RNA, 23 nt, Artificial Sequence
  Synthetic
  misc_feature (17)..(17): n is a, c, g, or u
gugggucaccauauucnugggaa

SEQ ID NO: 59241 - RNA, 24 nt, Artificial Sequence
  Synthetic
  misc_feature (18)..(18): n is a, c, g, or u
ugugggucaccauauucnugggaa

SEQ ID NO: 59242 - RNA, 18 nt, Artificial Sequence
  Synthetic
ccugccuuacuuuuggaa

SEQ ID NO: 59243 - RNA, 19 nt, Artificial Sequence
  Synthetic
uccugccuuacuuuuggaa

SEQ ID NO: 59244 - RNA, 20 nt, Artificial Sequence
  Synthetic
uuccugccuuacuuuuggaa

SEQ ID NO: 59245 - RNA, 21 nt, Artificial Sequence
  Synthetic
uuuccugccuuacuuuuggaa

SEQ ID NO: 59246 - RNA, 22 nt, Artificial Sequence
  Synthetic
auuuccugccuuacuuuuggaa

SEQ ID NO: 59247 - RNA, 23 nt, Artificial Sequence
  Synthetic
cauuuccugccuuacuuuuggaa

SEQ ID NO: 59248 - RNA, 24 nt, Artificial Sequence
  Synthetic
acauuuccugccuuacuuuuggaa

SEQ ID NO: 59249 - RNA, 18 nt, Artificial Sequence
  Synthetic
  misc_feature (15)..(15): n is a, c, g, or u
ugggggcccugcuangaa

SEQ ID NO: 59250 - RNA, 19 nt, Artificial Sequence
  Synthetic
  misc_feature (16)..(16): n is a, c, g, or u
cugggggcccugcuangaa

SEQ ID NO: 59251 - RNA, 20 nt, Artificial Sequence
  Synthetic
  misc_feature (17)..(17): n is a, c, g, or u
acugggggcccugcuangaa

SEQ ID NO: 59252 - RNA, 21 nt, Artificial Sequence
  Synthetic
  misc_feature (18)..(18): n is a, c, g, or u
gacugggggcccugcuangaa

SEQ ID NO: 59253 - RNA, 22 nt, Artificial Sequence
  Synthetic
  misc_feature (19)..(19): n is a, c, g, or u
agacugggggcccugcuangaa

SEQ ID NO: 59254 - RNA, 23 nt, Artificial Sequence
  Synthetic
  misc_feature (20)..(20): n is a, c, g, or u
aagacugggggcccugcuangaa

SEQ ID NO: 59255 - RNA, 24 nt, Artificial Sequence
  Synthetic
  misc_feature (21)..(21): n is a, c, g, or u
gaagacugggggcccugcuangaa

SEQ ID NO: 59256 - RNA, 18 nt, Artificial Sequence
  Synthetic
  misc_feature (15)..(15): n is a, c, g, or u
gaggcagguccccungaa

SEQ ID NO: 59257 - RNA, 19 nt, Artificial Sequence
  Synthetic
  misc_feature (16)..(16): n is a, c, g, or u
cgaggcagguccccungaa

SEQ ID NO: 59258 - RNA, 20 nt, Artificial Sequence
  Synthetic
  misc_feature (17)..(17): n is a, c, g, or u
acgaggcagguccccungaa

SEQ ID NO: 59259 - RNA, 21 nt, Artificial Sequence
  Synthetic
  misc_feature (18)..(18): n is a, c, g, or u
gacgaggcagguccccungaa

SEQ ID NO: 59260 - RNA, 22 nt, Artificial Sequence
  Synthetic
  misc_feature (19)..(19): n is a, c, g, or u
cgacgaggcagguccccungaa

SEQ ID NO: 59261 - RNA, 23 nt, Artificial Sequence
  Synthetic
  misc_feature (20)..(20): n is a, c, g, or u
acgacgaggcagguccccungaa

SEQ ID NO: 59262 - RNA, 24 nt, Artificial Sequence
  Synthetic
  misc_feature (21)..(21): n is a, c, g, or u
gacgacgaggcagguccccungaa

SEQ ID NO: 59263 - RNA, 18 nt, Artificial Sequence
  Synthetic
  misc_feature (3)..(3): n is a, c, g, or u
  misc_feature (6)..(6): n is a, c, g, or u
  misc_feature (9)..(9): n is a, c, g, or u
ccncunacnaaaaaugaa

SEQ ID NO: 59264 - RNA, 19 nt, Artificial Sequence
  Synthetic
  misc_feature (4)..(4): n is a, c, g, or u
  misc_feature (7)..(7): n is a, c, g, or u
  misc_feature (10)..(10): n is a, c, g, or u
cccncunacnaaaaaugaa

SEQ ID NO: 59265 - RNA, 20 nt, Artificial Sequence
  Synthetic
  misc_feature (5)..(5): n is a, c, g, or u
  misc_feature (8)..(8): n is a, c, g, or u
  misc_feature (11)..(11): n is a, c, g, or u
gcccncunacnaaaaaugaa

SEQ ID NO: 59266 - RNA, 21 nt, Artificial Sequence
  Synthetic
  misc_feature (6)..(6): n is a, c, g, or u
  misc_feature (9)..(9): n is a, c, g, or u
  misc_feature (12)..(12): n is a, c, g, or u
ggcccncunacnaaaaaugaa

SEQ ID NO: 59267 - RNA, 22 nt, Artificial Sequence
  Synthetic
  misc_feature (7)..(7): n is a, c, g, or u
  misc_feature (10)..(10): n is a, c, g, or u
  misc_feature (13)..(13): n is a, c, g, or u
aggcccncunacnaaaaaugaa

SEQ ID NO: 59268 - RNA, 23 nt, Artificial Sequence
  Synthetic
  misc_feature (8)..(8): n is a, c, g, or u
  misc_feature (11)..(11): n is a, c, g, or u
  misc_feature (14)..(14): n is a, c, g, or u
uaggcccncunacnaaaaaugaa

SEQ ID NO: 59269 - RNA, 24 nt, Artificial Sequence
  Synthetic
  misc_feature (9)..(9): n is a, c, g, or u
  misc_feature (12)..(12): n is a, c, g, or u
  misc_feature (15)..(15): n is a, c, g, or u
guaggcccncunacnaaaaaugaa

SEQ ID NO: 59270 - RNA, 18 nt, Artificial Sequence
  Synthetic
  misc_feature (2)..(2): n is a, c, g, or u
  misc_feature (16)..(16): n is a, c, g, or u
anugggacuucaacanaa

SEQ ID NO: 59271 - RNA, 19 nt, Artificial Sequence
  Synthetic
  misc_feature (3)..(3): n is a, c, g, or u
  misc_feature (17)..(17): n is a, c, g, or u
ganugggacuucaacanaa

SEQ ID NO: 59272 - RNA, 20 nt, Artificial Sequence
  Synthetic
  misc_feature (4)..(4): n is a, c, g, or u
  misc_feature (18)..(18): n is a, c, g, or u
cganugggacuucaacanaa

SEQ ID NO: 59273 - RNA, 21 nt, Artificial Sequence
  Synthetic
  misc_feature (5)..(5): n is a, c, g, or u
  misc_feature (19)..(19): n is a, c, g, or u
ccganugggacuucaacanaa

SEQ ID NO: 59274 - RNA, 22 nt, Artificial Sequence
  Synthetic
  misc_feature (6)..(6): n is a, c, g, or u
  misc_feature (20)..(20): n is a, c, g, or u
cccganugggacuucaacanaa

SEQ ID NO: 59275 - RNA, 23 nt, Artificial Sequence
  Synthetic
  misc_feature (7)..(7): n is a, c, g, or u
  misc_feature (21)..(21): n is a, c, g, or u
ucccganugggacuucaacanaa

SEQ ID NO: 59276 - RNA, 24 nt, Artificial Sequence
  Synthetic
  misc_feature (8)..(8): n is a, c, g, or u
  misc_feature (22)..(22): n is a, c, g, or u
gucccganugggacuucaacanaa

SEQ ID NO: 59277 - RNA, 18 nt, Artificial Sequence
  Synthetic
  misc_feature (2)..(2): n is a, c, g, or u
  misc_feature (10)..(10): n is a, c, g, or u
  misc_feature (16)..(16): n is a, c, g, or u
unccuguaunacugcnaa

SEQ ID NO: 59278 - RNA, 19 nt, Artificial Sequence
  Synthetic
  misc_feature (3)..(3): n is a, c, g, or u
  misc_feature (11)..(11): n is a, c, g, or u
  misc_feature (17)..(17): n is a, c, g, or u
aunccuguaunacugcnaa

SEQ ID NO: 59279 - RNA, 20 nt, Artificial Sequence
  Synthetic
  misc_feature (4)..(4): n is a, c, g, or u
  misc_feature (12)..(12): n is a, c, g, or u
  misc_feature (18)..(18): n is a, c, g, or u
uaunccuguaunacugcnaa

SEQ ID NO: 59280 - RNA, 21 nt, Artificial Sequence
  Synthetic
  misc_feature (5)..(5): n is a, c, g, or u
  misc_feature (13)..(13): n is a, c, g, or u
  misc_feature (19)..(19): n is a, c, g, or u
guaunccuguaunacugcnaa

SEQ ID NO: 59281 - RNA, 22 nt, Artificial Sequence
  Synthetic
  misc_feature (6)..(6): n is a, c, g, or u
  misc_feature (14)..(14): n is a, c, g, or u
  misc_feature (20)..(20): n is a, c, g, or u
uguaunccuguaunacugcnaa

SEQ ID NO: 59282 - RNA, 23 nt, Artificial Sequence
  Synthetic
  misc_feature (7)..(7): n is a, c, g, or u
  misc_feature (15)..(15): n is a, c, g, or u
  misc_feature (21)..(21): n is a, c, g, or u
cuguaunccuguaunacugcnaa

SEQ ID NO: 59283 - RNA, 24 nt, Artificial Sequence
  Synthetic
  misc_feature (8)..(8): n is a, c, g, or u
  misc_feature (16)..(16): n is a, c, g, or u
  misc_feature (22)..(22): n is a, c, g, or u
ucuguaunccuguaunacugcnaa

SEQ ID NO: 59284 - RNA, 18 nt, Artificial Sequence
  Synthetic
  misc_feature (7)..(7): n is a, c, g, or u
  misc_feature (13)..(13): n is a, c, g, or u
  misc_feature (16)..(16): n is a, c, g, or u
ccauuunaauacnucnaa

SEQ ID NO: 59285 - RNA, 19 nt, Artificial Sequence
  Synthetic
  misc_feature (8)..(8): n is a, c, g, or u
  misc_feature (14)..(14): n is a, c, g, or u
  misc_feature (17)..(17): n is a, c, g, or u
uccauuunaauacnucnaa

SEQ ID NO: 59286 - RNA, 20 nt, Artificial Sequence
  Synthetic
  misc_feature (9)..(9): n is a, c, g, or u
  misc_feature (15)..(15): n is a, c, g, or u
  misc_feature (18)..(18): n is a, c, g, or u
auccauuunaauacnucnaa

SEQ ID NO: 59287 - RNA, 21 nt, Artificial Sequence
  Synthetic
  misc_feature (10)..(10): n is a, c, g, or u
  misc_feature (16)..(16): n is a, c, g, or u
  misc_feature (19)..(19): n is a, c, g, or u
uauccauuunaauacnucnaa

SEQ ID NO: 59288 - RNA, 22 nt, Artificial Sequence
  Synthetic
  misc_feature (11)..(11): n is a, c, g, or u
  misc_feature (17)..(17): n is a, c, g, or u
  misc_feature (20)..(20): n is a, c, g, or u
guauccauuunaauacnucnaa

SEQ ID NO: 59289 - RNA, 23 nt, Artificial Sequence
  Synthetic
  misc_feature (12)..(12): n is a, c, g, or u
  misc_feature (18)..(18): n is a, c, g, or u
  misc_feature (21)..(21): n is a, c, g, or u
gguauccauuunaauacnucnaa

SEQ ID NO: 59290 - RNA, 24 nt, Artificial Sequence
  Synthetic
  misc_feature (13)..(13): n is a, c, g, or u
  misc_feature (19)..(19): n is a, c, g, or u
  misc_feature (22)..(22): n is a, c, g, or u
ggguauccauuunaauacnucnaa

SEQ ID NO: 59291 - RNA, 18 nt, Artificial Sequence
  Synthetic
  misc_feature (16)..(16): n is a, c, g, or u
ucggcgguccgggagnaa

SEQ ID NO: 59292 - RNA, 19 nt, Artificial Sequence
  Synthetic
  misc_feature (17)..(17): n is a, c, g, or u
aucggcgguccgggagnaa

SEQ ID NO: 59293 - RNA, 20 nt, Artificial Sequence
  Synthetic
  misc_feature (18)..(18): n is a, c, g, or u
aaucggcgguccgggagnaa

SEQ ID NO: 59294 - RNA, 21 nt, Artificial Sequence
  Synthetic
  misc_feature (19)..(19): n is a, c, g, or u
caaucggcgguccgggagnaa

SEQ ID NO: 59295 - RNA, 22 nt, Artificial Sequence
  Synthetic
  misc_feature (20)..(20): n is a, c, g, or u
ccaaucggcgguccgggagnaa

SEQ ID NO: 59296 - RNA, 23 nt, Artificial Sequence
  Synthetic
  misc_feature (21)..(21): n is a, c, g, or u
accaaucggcgguccgggagnaa

SEQ ID NO: 59297 - RNA, 24 nt, Artificial Sequence
  Synthetic
  misc_feature (22)..(22): n is a, c, g, or u
caccaaucggcgguccgggagnaa

SEQ ID NO: 59298 - RNA, 18 nt, Artificial Sequence
  Synthetic
uuccugggugggcaauaa

SEQ ID NO: 59299 - RNA, 19 nt, Artificial Sequence
  Synthetic
cuuccugggugggcaauaa

SEQ ID NO: 59300 - RNA, 20 nt, Artificial Sequence
  Synthetic
gcuuccugggugggcaauaa

SEQ ID NO: 59301 - RNA, 21 nt, Artificial Sequence
  Synthetic
ggcuuccugggugggcaauaa

SEQ ID NO: 59302 - RNA, 22 nt, Artificial Sequence
  Synthetic
uggcuuccugggugggcaauaa

SEQ ID NO: 59303 - RNA, 23 nt, Artificial Sequence
  Synthetic
uuggcuuccugggugggcaauaa

SEQ ID NO: 59304 - RNA, 24 nt, Artificial Sequence
  Synthetic
uuuggcuuccugggugggcaauaa

SEQ ID NO: 59305 - RNA, 18 nt, Artificial Sequence
  Synthetic
gccaacagucuuacauaa

SEQ ID NO: 59306 - RNA, 19 nt, Artificial Sequence
  Synthetic
ugccaacagucuuacauaa

SEQ ID NO: 59307 - RNA, 20 nt, Artificial Sequence
  Synthetic
uugccaacagucuuacauaa

SEQ ID NO: 59308 - RNA, 21 nt, Artificial Sequence
  Synthetic
  misc_feature (1)..(1): n is a, c, g, or u
nuugccaacagucuuacauaa

SEQ ID NO: 59309 - RNA, 22 nt, Artificial Sequence
  Synthetic
  misc_feature (2)..(2): n is a, c, g, or u
gnuugccaacagucuuacauaa

SEQ ID NO: 59310 - RNA, 23 nt, Artificial Sequence
  Synthetic
  misc_feature (3)..(3): n is a, c, g, or u
agnuugccaacagucuuacauaa

SEQ ID NO: 59311 - RNA, 24 nt, Artificial Sequence
  Synthetic
  misc_feature (1)..(1): n is a, c, g, or u
  misc_feature (4)..(4): n is a, c, g, or u
nagnuugccaacagucuuacauaa

SEQ ID NO: 59312 - RNA, 18 nt, Artificial Sequence
  Synthetic
uauuccuuggacucauaa

SEQ ID NO: 59313 - RNA, 19 nt, Artificial Sequence
  Synthetic
guauuccuuggacucauaa

SEQ ID NO: 59314 - RNA, 20 nt, Artificial Sequence
  Synthetic
aguauuccuuggacucauaa

SEQ ID NO: 59315 - RNA, 21 nt, Artificial Sequence
  Synthetic
uaguauuccuuggacucauaa

SEQ ID NO: 59316 - RNA, 22 nt, Artificial Sequence
  Synthetic
uuaguauuccuuggacucauaa

SEQ ID NO: 59317 - RNA, 23 nt, Artificial Sequence
  Synthetic
guuaguauuccuuggacucauaa

SEQ ID NO: 59318 - RNA, 24 nt, Artificial Sequence
  Synthetic
uguuaguauuccuuggacucauaa

SEQ ID NO: 59319 - RNA, 18 nt, Artificial Sequence
  Synthetic
  misc_feature (1)..(1): n is a, c, g, or u
  misc_feature (4)..(4): n is a, c, g, or u
  misc_feature (7)..(7): n is a, c, g, or u
  misc_feature (11)..(11): n is a, c, g, or u
ngcnggnauunuauauaa

SEQ ID NO: 59320 - RNA, 19 nt, Artificial Sequence
  Synthetic
  misc_feature (2)..(2): n is a, c, g, or u
  misc_feature (5)..(5): n is a, c, g, or u
  misc_feature (8)..(8): n is a, c, g, or u
  misc_feature (12)..(12): n is a, c, g, or u
angcnggnauunuauauaa

SEQ ID NO: 59321 - RNA, 20 nt, Artificial Sequence
  Synthetic
  misc_feature (3)..(3): n is a, c, g, or u
  misc_feature (6)..(6): n is a, c, g, or u
  misc_feature (9)..(9): n is a, c, g, or u
  misc_feature (13)..(13): n is a, c, g, or u
aangcnggnauunuauauaa

SEQ ID NO: 59322 - RNA, 21 nt, Artificial Sequence
  Synthetic
  misc_feature (4)..(4): n is a, c, g, or u
  misc_feature (7)..(7): n is a, c, g, or u
  misc_feature (10)..(10): n is a, c, g, or u
  misc_feature (14)..(14): n is a, c, g, or u
gaangcnggnauunuauauaa

SEQ ID NO: 59323 - RNA, 22 nt, Artificial Sequence
  Synthetic
  misc_feature (5)..(5): n is a, c, g, or u
  misc_feature (8)..(8): n is a, c, g, or u
  misc_feature (11)..(11): n is a, c, g, or u
  misc_feature (15)..(15): n is a, c, g, or u
ggaangcnggnauunuauauaa

SEQ ID NO: 59324 - RNA, 23 nt, Artificial Sequence
  Synthetic
  misc_feature (6)..(6): n is a, c, g, or u
  misc_feature (9)..(9): n is a, c, g, or u
  misc_feature (12)..(12): n is a, c, g, or u
  misc_feature (16)..(16): n is a, c, g, or u
uggaangcnggnauunuauauaa

SEQ ID NO: 59325 - RNA, 24 nt, Artificial Sequence
  Synthetic
  misc_feature (7)..(7): n is a, c, g, or u
  misc_feature (10)..(10): n is a, c, g, or u
  misc_feature (13)..(13): n is a, c, g, or u
  misc_feature (17)..(17): n is a, c, g, or u
auggaangcnggnauunuauauaa

SEQ ID NO: 59326 - RNA, 18 nt, Artificial Sequence
  Synthetic
  misc_feature (10)..(10): n is a, c, g, or u
  misc_feature (13)..(13): n is a, c, g, or u
uaacuaugunaanacuaa

SEQ ID NO: 59327 - RNA, 19 nt, Artificial Sequence
  Synthetic
  misc_feature (11)..(11): n is a, c, g, or u
  misc_feature (14)..(14): n is a, c, g, or u
uuaacuaugunaanacuaa

SEQ ID NO: 59328 - RNA, 20 nt, Artificial Sequence
  Synthetic
  misc_feature (12)..(12): n is a, c, g, or u
  misc_feature (15)..(15): n is a, c, g, or u
guuaacuaugunaanacuaa

SEQ ID NO: 59329 - RNA, 21 nt, Artificial Sequence
  Synthetic
  misc_feature (1)..(1): n is a, c, g, or u
  misc_feature (13)..(13): n is a, c, g, or u
  misc_feature (16)..(16): n is a, c, g, or u
nguuaacuaugunaanacuaa

SEQ ID NO: 59330 - RNA, 22 nt, Artificial Sequence
  Synthetic
  misc_feature (2)..(2): n is a, c, g, or u
  misc_feature (14)..(14): n is a, c, g, or u
  misc_feature (17)..(17): n is a, c, g, or u
unguuaacuaugunaanacuaa

SEQ ID NO: 59331 - RNA, 23 nt, Artificial Sequence
  Synthetic
  misc_feature (3)..(3): n is a, c, g, or u
  misc_feature (15)..(15): n is a, c, g, or u
  misc_feature (18)..(18): n is a, c, g, or u
gunguuaacuaugunaanacuaa

SEQ ID NO: 59332 - RNA, 24 nt, Artificial Sequence
  Synthetic
  misc_feature (4)..(4): n is a, c, g, or u
  misc_feature (16)..(16): n is a, c, g, or u
  misc_feature (19)..(19): n is a, c, g, or u
agunguuaacuaugunaanacuaa

SEQ ID NO: 59333 - RNA, 18 nt, Artificial Sequence
  Synthetic
  misc_feature (3)..(3): n is a, c, g, or u
  misc_feature (9)..(9): n is a, c, g, or u
  misc_feature (12)..(12): n is a, c, g, or u
uunaauacnucnaaaaca

SEQ ID NO: 59334 - RNA, 19 nt, Artificial Sequence
  Synthetic
  misc_feature (4)..(4): n is a, c, g, or u
  misc_feature (10)..(10): n is a, c, g, or u
  misc_feature (13)..(13): n is a, c, g, or u
uuunaauacnucnaaaaca

SEQ ID NO: 59335 - RNA, 20 nt, Artificial Sequence
  Synthetic
  misc_feature (5)..(5): n is a, c, g, or u
  misc_feature (11)..(11): n is a, c, g, or u
  misc_feature (14)..(14): n is a, c, g, or u
auuunaauacnucnaaaaca

SEQ ID NO: 59336 - RNA, 21 nt, Artificial Sequence
  Synthetic
  misc_feature (6)..(6): n is a, c, g, or u
  misc_feature (12)..(12): n is a, c, g, or u
  misc_feature (15)..(15): n is a, c, g, or u
cauuunaauacnucnaaaaca

SEQ ID NO: 59337 - RNA, 22 nt, Artificial Sequence
  Synthetic
  misc_feature (7)..(7): n is a, c, g, or u
  misc_feature (13)..(13): n is a, c, g, or u
  misc_feature (16)..(16): n is a, c, g, or u
ccauuunaauacnucnaaaaca

SEQ ID NO: 59338 - RNA, 23 nt, Artificial Sequence
  Synthetic
  misc_feature (8)..(8): n is a, c, g, or u
  misc_feature (14)..(14): n is a, c, g, or u
  misc_feature (17)..(17): n is a, c, g, or u
uccauuunaauacnucnaaaaca

SEQ ID NO: 59339 - RNA, 24 nt, Artificial Sequence
  Synthetic
  misc_feature (9)..(9): n is a, c, g, or u
  misc_feature (15)..(15): n is a, c, g, or u
  misc_feature (18)..(18): n is a, c, g, or u
auccauuunaauacnucnaaaaca

SEQ ID NO: 59340 - RNA, 18 nt, Artificial Sequence
  Synthetic
uauaagagagaauccaca

SEQ ID NO: 59341 - RNA, 19 nt, Artificial Sequence
  Synthetic
auauaagagagaauccaca

SEQ ID NO: 59342 - RNA, 20 nt, Artificial Sequence
  Synthetic
uauauaagagagaauccaca

SEQ ID NO: 59343 - RNA, 21 nt, Artificial Sequence
  Synthetic
  misc_feature (1)..(1): n is a, c, g, or u
nuauauaagagagaauccaca

SEQ ID NO: 59344 - RNA, 22 nt, Artificial Sequence
  Synthetic
  misc_feature (2)..(2): n is a, c, g, or u
unuauauaagagagaauccaca

SEQ ID NO: 59345 - RNA, 23 nt, Artificial Sequence
  Synthetic
  misc_feature (3)..(3): n is a, c, g, or u
uunuauauaagagagaauccaca

SEQ ID NO: 59346 - RNA, 24 nt, Artificial Sequence
  Synthetic
  misc_feature (4)..(4): n is a, c, g, or u
auunuauauaagagagaauccaca

SEQ ID NO: 59347 - RNA, 18 nt, Artificial Sequence
  Synthetic
aacauggacaacaucaca

SEQ ID NO: 59348 - RNA, 19 nt, Artificial Sequence
  Synthetic
gaacauggacaacaucaca

SEQ ID NO: 59349 - RNA, 20 nt, Artificial Sequence
  Synthetic
  misc_feature (1)..(1): n is a, c, g, or u
ngaacauggacaacaucaca

SEQ ID NO: 59350 - RNA, 21 nt, Artificial Sequence
  Synthetic
  misc_feature (2)..(2): n is a, c, g, or u
angaacauggacaacaucaca

SEQ ID NO: 59351 - RNA, 22 nt, Artificial Sequence
  Synthetic
  misc_feature (3)..(3): n is a, c, g, or u
uangaacauggacaacaucaca

SEQ ID NO: 59352 - RNA, 23 nt, Artificial Sequence
  Synthetic
  misc_feature (4)..(4): n is a, c, g, or u
cuangaacauggacaacaucaca

SEQ ID NO: 59353 - RNA, 24 nt, Artificial Sequence
  Synthetic
  misc_feature (5)..(5): n is a, c, g, or u
gcuangaacauggacaacaucaca

SEQ ID NO: 59354 - RNA, 18 nt, Artificial Sequence
  Synthetic
  misc_feature (7)..(7): n is a, c, g, or u
ucaacanaaacaaggaca

SEQ ID NO: 59355 - RNA, 19 nt, Artificial Sequence
  Synthetic
  misc_feature (8)..(8): n is a, c, g, or u
uucaacanaaacaaggaca

SEQ ID NO: 59356 - RNA, 20 nt, Artificial Sequence
  Synthetic
  misc_feature (9)..(9): n is a, c, g, or u
cuucaacanaaacaaggaca

SEQ ID NO: 59357 - RNA, 21 nt, Artificial Sequence
  Synthetic
  misc_feature (10)..(10): n is a, c, g, or u
acuucaacanaaacaaggaca

SEQ ID NO: 59358 - RNA, 22 nt, Artificial Sequence
  Synthetic
  misc_feature (11)..(11): n is a, c, g, or u
gacuucaacanaaacaaggaca

SEQ ID NO: 59359 - RNA, 23 nt, Artificial Sequence
  Synthetic
  misc_feature (12)..(12): n is a, c, g, or u
ggacuucaacanaaacaaggaca

SEQ ID NO: 59360 - RNA, 24 nt, Artificial Sequence
  Synthetic
  misc_feature (13)..(13): n is a, c, g, or u
gggacuucaacanaaacaaggaca

SEQ ID NO: 59361 - RNA, 18 nt, Artificial Sequence
  Synthetic
  misc_feature (14)..(14): n is a, c, g, or u
ggcuccaguucagngaca

SEQ ID NO: 59362 - RNA, 19 nt, Artificial Sequence
  Synthetic
  misc_feature (15)..(15): n is a, c, g, or u
uggcuccaguucagngaca

SEQ ID NO: 59363 - RNA, 20 nt, Artificial Sequence
  Synthetic
  misc_feature (16)..(16): n is a, c, g, or u
guggcuccaguucagngaca

SEQ ID NO: 59364 - RNA, 21 nt, Artificial Sequence
  Synthetic
  misc_feature (17)..(17): n is a, c, g, or u
gguggcuccaguucagngaca

SEQ ID NO: 59365 - RNA, 22 nt, Artificial Sequence
  Synthetic
  misc_feature (18)..(18): n is a, c, g, or u
ugguggcuccaguucagngaca

SEQ ID NO: 59366 - RNA, 23 nt, Artificial Sequence
  Synthetic
  misc_feature (19)..(19): n is a, c, g, or u
cugguggcuccaguucagngaca

SEQ ID NO: 59367 - RNA, 24 nt, Artificial Sequence
  Synthetic
  misc_feature (20)..(20): n is a, c, g, or u
gcugguggcuccaguucagngaca

SEQ ID NO: 59368 - RNA, 18 nt, Artificial Sequence
  Synthetic
ccuggaucgaagaauaca

SEQ ID NO: 59369 - RNA, 19 nt, Artificial Sequence
  Synthetic
accuggaucgaagaauaca

SEQ ID NO: 59370 - RNA, 20 nt, Artificial Sequence
  Synthetic
  misc_feature (1)..(1): n is a, c, g, or u
naccuggaucgaagaauaca

SEQ ID NO: 59371 - RNA, 21 nt, Artificial Sequence
  Synthetic
  misc_feature (2)..(2): n is a, c, g, or u
unaccuggaucgaagaauaca

SEQ ID NO: 59372 - RNA, 22 nt, Artificial Sequence
  Synthetic
  misc_feature (3)..(3): n is a, c, g, or u
aunaccuggaucgaagaauaca

SEQ ID NO: 59373 - RNA, 23 nt, Artificial Sequence
  Synthetic
  misc_feature (4)..(4): n is a, c, g, or u
aaunaccuggaucgaagaauaca

SEQ ID NO: 59374 - RNA, 24 nt, Artificial Sequence
  Synthetic
  misc_feature (5)..(5): n is a, c, g, or u
caaunaccuggaucgaagaauaca

SEQ ID NO: 59375 - RNA, 18 nt, Artificial Sequence
  Synthetic
cgccuccugcuuccacca

SEQ ID NO: 59376 - RNA, 19 nt, Artificial Sequence
  Synthetic
ccgccuccugcuuccacca

SEQ ID NO: 59377 - RNA, 20 nt, Artificial Sequence
  Synthetic
uccgccuccugcuuccacca

SEQ ID NO: 59378 - RNA, 21 nt, Artificial Sequence
  Synthetic
auccgccuccugcuuccacca

SEQ ID NO: 59379 - RNA, 22 nt, Artificial Sequence
  Synthetic
gauccgccuccugcuuccacca

SEQ ID NO: 59380 - RNA, 23 nt, Artificial Sequence
  Synthetic
agauccgccuccugcuuccacca

SEQ ID NO: 59381 - RNA, 24 nt, Artificial Sequence
  Synthetic
cagauccgccuccugcuuccacca

SEQ ID NO: 59382 - RNA, 18 nt, Artificial Sequence
  Synthetic
gucuguucaccagcacca

SEQ ID NO: 59383 - RNA, 19 nt, Artificial Sequence
  Synthetic
ggucuguucaccagcacca

SEQ ID NO: 59384 - RNA, 20 nt, Artificial Sequence
  Synthetic
uggucuguucaccagcacca

SEQ ID NO: 59385 - RNA, 21 nt, Artificial Sequence
  Synthetic
uuggucuguucaccagcacca

SEQ ID NO: 59386 - RNA, 22 nt, Artificial Sequence
  Synthetic
auuggucuguucaccagcacca

SEQ ID NO: 59387 - RNA, 23 nt, Artificial Sequence
  Synthetic
aauuggucuguucaccagcacca

SEQ ID NO: 59388 - RNA, 24 nt, Artificial Sequence
  Synthetic
aaauuggucuguucaccagcacca

SEQ ID NO: 59389 - RNA, 18 nt, Artificial Sequence
  Synthetic
accaccagcacgggacca

SEQ ID NO: 59390 - RNA, 19 nt, Artificial Sequence
  Synthetic
gaccaccagcacgggacca

SEQ ID NO: 59391 - RNA, 20 nt, Artificial Sequence
  Synthetic
cgaccaccagcacgggacca

SEQ ID NO: 59392 - RNA, 21 nt, Artificial Sequence
  Synthetic
acgaccaccagcacgggacca

SEQ ID NO: 59393 - RNA, 22 nt, Artificial Sequence
  Synthetic
  misc_feature (1)..(1): n is a, c, g, or u
nacgaccaccagcacgggacca

SEQ ID NO: 59394 - RNA, 23 nt, Artificial Sequence
  Synthetic
  misc_feature (2)..(2): n is a, c, g, or u
cnacgaccaccagcacgggacca

SEQ ID NO: 59395 - RNA, 24 nt, Artificial Sequence
  Synthetic
  misc_feature (3)..(3): n is a, c, g, or u
ucnacgaccaccagcacgggacca

SEQ ID NO: 59396 - RNA, 18 nt, Artificial Sequence
  Synthetic
  misc_feature (3)..(3): n is a, c, g, or u
  misc_feature (9)..(10): n is a, c, g, or u
uunaaauunnuuaugcca

SEQ ID NO: 59397 - RNA, 19 nt, Artificial Sequence
  Synthetic
  misc_feature (1)..(1): n is a, c, g, or u
  misc_feature (4)..(4): n is a, c, g, or u
  misc_feature (10)..(11): n is a, c, g, or u
nuunaaauunnuuaugcca

SEQ ID NO: 59398 - RNA, 20 nt, Artificial Sequence
  Synthetic
  misc_feature (2)..(2): n is a, c, g, or u
  misc_feature (5)..(5): n is a, c, g, or u
  misc_feature (11)..(12): n is a, c, g, or u
gnuunaaauunnuuaugcca

SEQ ID NO: 59399 - RNA, 21 nt, Artificial Sequence
  Synthetic
  misc_feature (3)..(3): n is a, c, g, or u
  misc_feature (6)..(6): n is a, c, g, or u
  misc_feature (12)..(13): n is a, c, g, or u
agnuunaaauunnuuaugcca

SEQ ID NO: 59400 - RNA, 22 nt, Artificial Sequence
  Synthetic
  misc_feature (4)..(4): n is a, c, g, or u
  misc_feature (7)..(7): n is a, c, g, or u
  misc_feature (13)..(14): n is a, c, g, or u
aagnuunaaauunnuuaugcca

SEQ ID NO: 59401 - RNA, 23 nt, Artificial Sequence
  Synthetic
  misc_feature (5)..(5): n is a, c, g, or u
  misc_feature (8)..(8): n is a, c, g, or u
  misc_feature (14)..(15): n is a, c, g, or u
gaagnuunaaauunnuuaugcca

SEQ ID NO: 59402 - RNA, 24 nt, Artificial Sequence
  Synthetic
  misc_feature (6)..(6): n is a, c, g, or u
  misc_feature (9)..(9): n is a, c, g, or u
  misc_feature (15)..(16): n is a, c, g, or u
agaagnuunaaauunnuuaugcca

SEQ ID NO: 59403 - RNA, 18 nt, Artificial Sequence
  Synthetic
  misc_feature (8)..(8): n is a, c, g, or u
ugcucggnugugcugcca

SEQ ID NO: 59404 - RNA, 19 nt, Artificial Sequence
  Synthetic
  misc_feature (9)..(9): n is a, c, g, or u
cugcucggnugugcugcca

SEQ ID NO: 59405 - RNA, 20 nt, Artificial Sequence
  Synthetic
  misc_feature (10)..(10): n is a, c, g, or u
gcugcucggnugugcugcca

SEQ ID NO: 59406 - RNA, 21 nt, Artificial Sequence
  Synthetic
  misc_feature (11)..(11): n is a, c, g, or u
ggcugcucggnugugcugcca

SEQ ID NO: 59407 - RNA, 22 nt, Artificial Sequence
  Synthetic
  misc_feature (12)..(12): n is a, c, g, or u
uggcugcucggnugugcugcca

SEQ ID NO: 59408 - RNA, 23 nt, Artificial Sequence
  Synthetic
  misc_feature (13)..(13): n is a, c, g, or u
auggcugcucggnugugcugcca

SEQ ID NO: 59409 - RNA, 24 nt, Artificial Sequence
  Synthetic
  misc_feature (14)..(14): n is a, c, g, or u
cauggcugcucggnugugcugcca

SEQ ID NO: 59410 - RNA, 18 nt, Artificial Sequence
  Synthetic
  misc_feature (4)..(4): n is a, c, g, or u
ucuncgucugccguucca

SEQ ID NO: 59411 - RNA, 19 nt, Artificial Sequence
  Synthetic
  misc_feature (5)..(5): n is a, c, g, or u
uucuncgucugccguucca

SEQ ID NO: 59412 - RNA, 20 nt, Artificial Sequence
  Synthetic
  misc_feature (6)..(6): n is a, c, g, or u
cuucuncgucugccguucca

SEQ ID NO: 59413 - RNA, 21 nt, Artificial Sequence
  Synthetic
  misc_feature (1)..(1): n is a, c, g, or u
  misc_feature (7)..(7): n is a, c, g, or u
ncuucuncgucugccguucca

SEQ ID NO: 59414 - RNA, 22 nt, Artificial Sequence
  Synthetic
  misc_feature (2)..(2): n is a, c, g, or u
  misc_feature (8)..(8): n is a, c, g, or u
cncuucuncgucugccguucca

SEQ ID NO: 59415 - RNA, 23 nt, Artificial Sequence
  Synthetic
  misc_feature (3)..(3): n is a, c, g, or u
  misc_feature (9)..(9): n is a, c, g, or u
ccncuucuncgucugccguucca

SEQ ID NO: 59416 - RNA, 24 nt, Artificial Sequence
  Synthetic
  misc_feature (4)..(4): n is a, c, g, or u
  misc_feature (10)..(10): n is a, c, g, or u
cccncuucuncgucugccguucca

SEQ ID NO: 59417 - RNA, 18 nt, Artificial Sequence
  Synthetic
ggaacaagagcuacagca

SEQ ID NO: 59418 - RNA, 19 nt, Artificial Sequence
  Synthetic
gggaacaagagcuacagca

SEQ ID NO: 59419 - RNA, 20 nt, Artificial Sequence
  Synthetic
ugggaacaagagcuacagca

SEQ ID NO: 59420 - RNA, 21 nt, Artificial Sequence
  Synthetic
  misc_feature (1)..(1): n is a, c, g, or u
nugggaacaagagcuacagca

SEQ ID NO: 59421 - RNA, 22 nt, Artificial Sequence
  Synthetic
  misc_feature (2)..(2): n is a, c, g, or u
cnugggaacaagagcuacagca

SEQ ID NO: 59422 - RNA, 23 nt, Artificial Sequence
  Synthetic
  misc_feature (3)..(3): n is a, c, g, or u
ucnugggaacaagagcuacagca

SEQ ID NO: 59423 - RNA, 24 nt, Artificial Sequence
  Synthetic
  misc_feature (4)..(4): n is a, c, g, or u
uucnugggaacaagagcuacagca

SEQ ID NO: 59424 - RNA, 18 nt, Artificial Sequence
  Synthetic
  misc_feature (5)..(5): n is a, c, g, or u
gaucnacgaccaccagca

SEQ ID NO: 59425 - RNA, 19 nt, Artificial Sequence
  Synthetic
  misc_feature (6)..(6): n is a, c, g, or u
ggaucnacgaccaccagca

SEQ ID NO: 59426 - RNA, 20 nt, Artificial Sequence
  Synthetic
  misc_feature (7)..(7): n is a, c, g, or u
aggaucnacgaccaccagca

SEQ ID NO: 59427 - RNA, 21 nt, Artificial Sequence
  Synthetic
  misc_feature (8)..(8): n is a, c, g, or u
caggaucnacgaccaccagca

SEQ ID NO: 59428 - RNA, 22 nt, Artificial Sequence
  Synthetic
  misc_feature (9)..(9): n is a, c, g, or u
ccaggaucnacgaccaccagca

SEQ ID NO: 59429 - RNA, 23 nt, Artificial Sequence
  Synthetic
  misc_feature (10)..(10): n is a, c, g, or u
uccaggaucnacgaccaccagca

SEQ ID NO: 59430 - RNA, 24 nt, Artificial Sequence
  Synthetic
  misc_feature (11)..(11): n is a, c, g, or u
uuccaggaucnacgaccaccagca

SEQ ID NO: 59431 - RNA, 18 nt, Artificial Sequence
  Synthetic
gaacucccucgccucgca

SEQ ID NO: 59432 - RNA, 19 nt, Artificial Sequence
  Synthetic
agaacucccucgccucgca

SEQ ID NO: 59433 - RNA, 20 nt, Artificial Sequence
  Synthetic
aagaacucccucgccucgca

SEQ ID NO: 59434 - RNA, 21 nt, Artificial Sequence
  Synthetic
gaagaacucccucgccucgca

SEQ ID NO: 59435 - RNA, 22 nt, Artificial Sequence
  Synthetic
agaagaacucccucgccucgca

SEQ ID NO: 59436 - RNA, 23 nt, Artificial Sequence
  Synthetic
aagaagaacucccucgccucgca

SEQ ID NO: 59437 - RNA, 24 nt, Artificial Sequence
  Synthetic
gaagaagaacucccucgccucgca

SEQ ID NO: 59438 - RNA, 18 nt, Artificial Sequence
  Synthetic
ucaccucugcacgucgca

SEQ ID NO: 59439 - RNA, 19 nt, Artificial Sequence
  Synthetic
uucaccucugcacgucgca

SEQ ID NO: 59440 - RNA, 20 nt, Artificial Sequence
  Synthetic
cuucaccucugcacgucgca

SEQ ID NO: 59441 - RNA, 21 nt, Artificial Sequence
  Synthetic
gcuucaccucugcacgucgca

SEQ ID NO: 59442 - RNA, 22 nt, Artificial Sequence
  Synthetic
cgcuucaccucugcacgucgca

SEQ ID NO: 59443 - RNA, 23 nt, Artificial Sequence
  Synthetic
ucgcuucaccucugcacgucgca

SEQ ID NO: 59444 - RNA, 24 nt, Artificial Sequence
  Synthetic
uucgcuucaccucugcacgucgca

SEQ ID NO: 59445 - RNA, 18 nt, Artificial Sequence
  Synthetic
  misc_feature (8)..(9): n is a, c, g, or u
caacgacnngaaggggca

SEQ ID NO: 59446 - RNA, 19 nt, Artificial Sequence
  Synthetic
  misc_feature (9)..(10): n is a, c, g, or u
ucaacgacnngaaggggca

SEQ ID NO: 59447 - RNA, 20 nt, Artificial Sequence
  Synthetic
  misc_feature (1)..(1): n is a, c, g, or u
  misc_feature (10)..(11): n is a, c, g, or u
nucaacgacnngaaggggca

SEQ ID NO: 59448 - RNA, 21 nt, Artificial Sequence
  Synthetic
  misc_feature (2)..(2): n is a, c, g, or u
  misc_feature (11)..(12): n is a, c, g, or u
unucaacgacnngaaggggca

SEQ ID NO: 59449 - RNA, 22 nt, Artificial Sequence
  Synthetic
  misc_feature (3)..(3): n is a, c, g, or u
  misc_feature (12)..(13): n is a, c, g, or u
cunucaacgacnngaaggggca

SEQ ID NO: 59450 - RNA, 23 nt, Artificial Sequence
  Synthetic
  misc_feature (4)..(4): n is a, c, g, or u
  misc_feature (13)..(14): n is a, c, g, or u
ucunucaacgacnngaaggggca

SEQ ID NO: 59451 - RNA, 24 nt, Artificial Sequence
  Synthetic
  misc_feature (5)..(5): n is a, c, g, or u
  misc_feature (14)..(15): n is a, c, g, or u
cucunucaacgacnngaaggggca

SEQ ID NO: 59452 - RNA, 18 nt, Artificial Sequence
  Synthetic
  misc_feature (5)..(5): n is a, c, g, or u
gacanuuggccaauggca

SEQ ID NO: 59453 - RNA, 19 nt, Artificial Sequence
  Synthetic
  misc_feature (6)..(6): n is a, c, g, or u
ggacanuuggccaauggca

SEQ ID NO: 59454 - RNA, 20 nt, Artificial Sequence
  Synthetic
  misc_feature (7)..(7): n is a, c, g, or u
aggacanuuggccaauggca

SEQ ID NO: 59455 - RNA, 21 nt, Artificial Sequence
  Synthetic
  misc_feature (8)..(8): n is a, c, g, or u
aaggacanuuggccaauggca

SEQ ID NO: 59456 - RNA, 22 nt, Artificial Sequence
  Synthetic
  misc_feature (9)..(9): n is a, c, g, or u
caaggacanuuggccaauggca

SEQ ID NO: 59457 - RNA, 23 nt, Artificial Sequence
  Synthetic
  misc_feature (10)..(10): n is a, c, g, or u
acaaggacanuuggccaauggca

SEQ ID NO: 59458 - RNA, 24 nt, Artificial Sequence
  Synthetic
  misc_feature (11)..(11): n is a, c, g, or u
aacaaggacanuuggccaauggca

SEQ ID NO: 59459 - RNA, 18 nt, Artificial Sequence
  Synthetic
  misc_feature (1)..(1): n is a, c, g, or u
  misc_feature (13)..(13): n is a, c, g, or u
ncauccacaggcnaugca

SEQ ID NO: 59460 - RNA, 19 nt, Artificial Sequence
  Synthetic
  misc_feature (2)..(2): n is a, c, g, or u
  misc_feature (14)..(14): n is a, c, g, or u
cncauccacaggcnaugca

SEQ ID NO: 59461 - RNA, 20 nt, Artificial Sequence
  Synthetic
  misc_feature (3)..(3): n is a, c, g, or u
  misc_feature (15)..(15): n is a, c, g, or u
acncauccacaggcnaugca

SEQ ID NO: 59462 - RNA, 21 nt, Artificial Sequence
  Synthetic
  misc_feature (4)..(4): n is a, c, g, or u
  misc_feature (16)..(16): n is a, c, g, or u
cacncauccacaggcnaugca

SEQ ID NO: 59463 - RNA, 22 nt, Artificial Sequence
  Synthetic
  misc_feature (5)..(5): n is a, c, g, or u
  misc_feature (17)..(17): n is a, c, g, or u
acacncauccacaggcnaugca

SEQ ID NO: 59464 - RNA, 23 nt, Artificial Sequence
  Synthetic
  misc_feature (6)..(6): n is a, c, g, or u
  misc_feature (18)..(18): n is a, c, g, or u
gacacncauccacaggcnaugca

SEQ ID NO: 59465 - RNA, 24 nt, Artificial Sequence
  Synthetic
  misc_feature (7)..(7): n is a, c, g, or u
  misc_feature (19)..(19): n is a, c, g, or u
agacacncauccacaggcnaugca

SEQ ID NO: 59466 - RNA, 18 nt, Artificial Sequence
  Synthetic
  misc_feature (7)..(7): n is a, c, g, or u
  misc_feature (16)..(16): n is a, c, g, or u
uccuganauucauuunca

SEQ ID NO: 59467 - RNA, 19 nt, Artificial Sequence
  Synthetic
  misc_feature (8)..(8): n is a, c, g, or u
  misc_feature (17)..(17): n is a, c, g, or u
uuccuganauucauuunca

SEQ ID NO: 59468 - RNA, 20 nt, Artificial Sequence
  Synthetic
  misc_feature (9)..(9): n is a, c, g, or u
  misc_feature (18)..(18): n is a, c, g, or u
uuuccuganauucauuunca

SEQ ID NO: 59469 - RNA, 21 nt, Artificial Sequence
  Synthetic
  misc_feature (10)..(10): n is a, c, g, or u
  misc_feature (19)..(19): n is a, c, g, or u
uuuuccuganauucauuunca

SEQ ID NO: 59470 - RNA, 22 nt, Artificial Sequence
  Synthetic
  misc_feature (11)..(11): n is a, c, g, or u
  misc_feature (20)..(20): n is a, c, g, or u
cuuuuccuganauucauuunca

SEQ ID NO: 59471 - RNA, 23 nt, Artificial Sequence
  Synthetic
  misc_feature (12)..(12): n is a, c, g, or u
  misc_feature (21)..(21): n is a, c, g, or u
ucuuuuccuganauucauuunca

SEQ ID NO: 59472 - RNA, 24 nt, Artificial Sequence
  Synthetic
  misc_feature (13)..(13): n is a, c, g, or u
  misc_feature (22)..(22): n is a, c, g, or u
uucuuuuccuganauucauuunca

SEQ ID NO: 59473 - RNA, 18 nt, Artificial Sequence
  Synthetic
auucuuuccagaccauca

SEQ ID NO: 59474 - RNA, 19 nt, Artificial Sequence
  Synthetic
gauucuuuccagaccauca

SEQ ID NO: 59475 - RNA, 20 nt, Artificial Sequence
  Synthetic
ggauucuuuccagaccauca

SEQ ID NO: 59476 - RNA, 21 nt, Artificial Sequence
  Synthetic
gggauucuuuccagaccauca

SEQ ID NO: 59477 - RNA, 22 nt, Artificial Sequence
  Synthetic
ugggauucuuuccagaccauca

SEQ ID NO: 59478 - RNA, 23 nt, Artificial Sequence
  Synthetic
cugggauucuuuccagaccauca

SEQ ID NO: 59479 - RNA, 24 nt, Artificial Sequence
  Synthetic
  misc_feature (1)..(1): n is a, c, g, or u
ncugggauucuuuccagaccauca

SEQ ID NO: 59480 - RNA, 18 nt, Artificial Sequence
  Synthetic
cugcacaacucuugcuca

SEQ ID NO: 59481 - RNA, 19 nt, Artificial Sequence
  Synthetic
ccugcacaacucuugcuca

SEQ ID NO: 59482 - RNA, 20 nt, Artificial Sequence
  Synthetic
accugcacaacucuugcuca

SEQ ID NO: 59483 - RNA, 21 nt, Artificial Sequence
  Synthetic
aaccugcacaacucuugcuca

SEQ ID NO: 59484 - RNA, 22 nt, Artificial Sequence
  Synthetic
aaaccugcacaacucuugcuca

SEQ ID NO: 59485 - RNA, 23 nt, Artificial Sequence
  Synthetic
aaaaccugcacaacucuugcuca

SEQ ID NO: 59486 - RNA, 24 nt, Artificial Sequence
  Synthetic
caaaaccugcacaacucuugcuca

SEQ ID NO: 59487 - RNA, 18 nt, Artificial Sequence
  Synthetic
  misc_feature (2)..(2): n is a, c, g, or u
  misc_feature (5)..(5): n is a, c, g, or u
cnaancauaccgcucuca

SEQ ID NO: 59488 - RNA, 19 nt, Artificial Sequence
  Synthetic
  misc_feature (3)..(3): n is a, c, g, or u
  misc_feature (6)..(6): n is a, c, g, or u
ccnaancauaccgcucuca

SEQ ID NO: 59489 - RNA, 20 nt, Artificial Sequence
  Synthetic
  misc_feature (1)..(1): n is a, c, g, or u
  misc_feature (4)..(4): n is a, c, g, or u
  misc_feature (7)..(7): n is a, c, g, or u
nccnaancauaccgcucuca

SEQ ID NO: 59490 - RNA, 21 nt, Artificial Sequence
  Synthetic
  misc_feature (2)..(2): n is a, c, g, or u
  misc_feature (5)..(5): n is a, c, g, or u
  misc_feature (8)..(8): n is a, c, g, or u
cnccnaancauaccgcucuca

SEQ ID NO: 59491 - RNA, 22 nt, Artificial Sequence
  Synthetic
  misc_feature (3)..(3): n is a, c, g, or u
  misc_feature (6)..(6): n is a, c, g, or u
  misc_feature (9)..(9): n is a, c, g, or u
acnccnaancauaccgcucuca

SEQ ID NO: 59492 - RNA, 23 nt, Artificial Sequence
  Synthetic
  misc_feature (4)..(4): n is a, c, g, or u
  misc_feature (7)..(7): n is a, c, g, or u
  misc_feature (10)..(10): n is a, c, g, or u
cacnccnaancauaccgcucuca

SEQ ID NO: 59493 - RNA, 24 nt, Artificial Sequence
  Synthetic
  misc_feature (5)..(5): n is a, c, g, or u
  misc_feature (8)..(8): n is a, c, g, or u
  misc_feature (11)..(11): n is a, c, g, or u
gcacnccnaancauaccgcucuca

SEQ ID NO: 59494 - RNA, 18 nt, Artificial Sequence
  Synthetic
  misc_feature (1)..(1): n is a, c, g, or u
  misc_feature (15)..(15): n is a, c, g, or u
ngggaugcuuuaganuca

SEQ ID NO: 59495 - RNA, 19 nt, Artificial Sequence
  Synthetic
  misc_feature (2)..(2): n is a, c, g, or u
  misc_feature (16)..(16): n is a, c, g, or u
cngggaugcuuuaganuca

SEQ ID NO: 59496 - RNA, 20 nt, Artificial Sequence
  Synthetic
  misc_feature (3)..(3): n is a, c, g, or u
  misc_feature (17)..(17): n is a, c, g, or u
acngggaugcuuuaganuca

SEQ ID NO: 59497 - RNA, 21 nt, Artificial Sequence
  Synthetic
  misc_feature (4)..(4): n is a, c, g, or u
  misc_feature (18)..(18): n is a, c, g, or u
uacngggaugcuuuaganuca

SEQ ID NO: 59498 - RNA, 22 nt, Artificial Sequence
  Synthetic
  misc_feature (1)..(1): n is a, c, g, or u
  misc_feature (5)..(5): n is a, c, g, or u
  misc_feature (19)..(19): n is a, c, g, or u
nuacngggaugcuuuaganuca

SEQ ID NO: 59499 - RNA, 23 nt, Artificial Sequence
  Synthetic
  misc_feature (2)..(2): n is a, c, g, or u
  misc_feature (6)..(6): n is a, c, g, or u
  misc_feature (20)..(20): n is a, c, g, or u
unuacngggaugcuuuaganuca

SEQ ID NO: 59500 - RNA, 24 nt, Artificial Sequence
  Synthetic
  misc_feature (3)..(3): n is a, c, g, or u
  misc_feature (7)..(7): n is a, c, g, or u
  misc_feature (21)..(21): n is a, c, g, or u
cunuacngggaugcuuuaganuca

SEQ ID NO: 59501 - RNA, 18 nt, Artificial Sequence
  Synthetic
  misc_feature (13)..(13): n is a, c, g, or u
caucaaucuucungaaga

SEQ ID NO: 59502 - RNA, 19 nt, Artificial Sequence
  Synthetic
  misc_feature (14)..(14): n is a, c, g, or u
ucaucaaucuucungaaga

SEQ ID NO: 59503 - RNA, 20 nt, Artificial Sequence
  Synthetic
  misc_feature (15)..(15): n is a, c, g, or u
aucaucaaucuucungaaga

SEQ ID NO: 59504 - RNA, 21 nt, Artificial Sequence
  Synthetic
  misc_feature (16)..(16): n is a, c, g, or u
caucaucaaucuucungaaga

SEQ ID NO: 59505 - RNA, 22 nt, Artificial Sequence
  Synthetic
  misc_feature (17)..(17): n is a, c, g, or u
acaucaucaaucuucungaaga

SEQ ID NO: 59506 - RNA, 23 nt, Artificial Sequence
  Synthetic
  misc_feature (18)..(18): n is a, c, g, or u
cacaucaucaaucuucungaaga

SEQ ID NO: 59507 - RNA, 24 nt, Artificial Sequence
  Synthetic
  misc_feature (19)..(19): n is a, c, g, or u
ucacaucaucaaucuucungaaga

SEQ ID NO: 59508 - RNA, 18 nt, Artificial Sequence
  Synthetic
acucccucgccucgcaga

SEQ ID NO: 59509 - RNA, 19 nt, Artificial Sequence
  Synthetic
aacucccucgccucgcaga

SEQ ID NO: 59510 - RNA, 20 nt, Artificial Sequence
  Synthetic
gaacucccucgccucgcaga

SEQ ID NO: 59511 - RNA, 21 nt, Artificial Sequence
  Synthetic
agaacucccucgccucgcaga

SEQ ID NO: 59512 - RNA, 22 nt, Artificial Sequence
  Synthetic
aagaacucccucgccucgcaga

SEQ ID NO: 59513 - RNA, 23 nt, Artificial Sequence
  Synthetic
gaagaacucccucgccucgcaga

SEQ ID NO: 59514 - RNA, 24 nt, Artificial Sequence
  Synthetic
agaagaacucccucgccucgcaga

SEQ ID NO: 59515 - RNA, 18 nt, Artificial Sequence
  Synthetic
  misc_feature (11)..(11): n is a, c, g, or u
gagcaccucunucaacga

SEQ ID NO: 59516 - RNA, 19 nt, Artificial Sequence
  Synthetic
  misc_feature (12)..(12): n is a, c, g, or u
ggagcaccucunucaacga

SEQ ID NO: 59517 - RNA, 20 nt, Artificial Sequence
  Synthetic
  misc_feature (13)..(13): n is a, c, g, or u
gggagcaccucunucaacga

SEQ ID NO: 59518 - RNA, 21 nt, Artificial Sequence
  Synthetic
  misc_feature (14)..(14): n is a, c, g, or u
ugggagcaccucunucaacga

SEQ ID NO: 59519 - RNA, 22 nt, Artificial Sequence
  Synthetic
  misc_feature (15)..(15): n is a, c, g, or u
augggagcaccucunucaacga

SEQ ID NO: 59520 - RNA, 23 nt, Artificial Sequence
  Synthetic
  misc_feature (16)..(16): n is a, c, g, or u
caugggagcaccucunucaacga

SEQ ID NO: 59521 - RNA, 24 nt, Artificial Sequence
  Synthetic
  misc_feature (17)..(17): n is a, c, g, or u
gcaugggagcaccucunucaacga

SEQ ID NO: 59522 - RNA, 18 nt, Artificial Sequence
  Synthetic
acuacuguuguuagacga

SEQ ID NO: 59523 - RNA, 19 nt, Artificial Sequence
  Synthetic
aacuacuguuguuagacga

SEQ ID NO: 59524 - RNA, 20 nt, Artificial Sequence
  Synthetic
aaacuacuguuguuagacga

SEQ ID NO: 59525 - RNA, 21 nt, Artificial Sequence
  Synthetic
gaaacuacuguuguuagacga

SEQ ID NO: 59526 - RNA, 22 nt, Artificial Sequence
  Synthetic
ggaaacuacuguuguuagacga

SEQ ID NO: 59527 - RNA, 23 nt, Artificial Sequence
  Synthetic
cggaaacuacuguuguuagacga

SEQ ID NO: 59528 - RNA, 24 nt, Artificial Sequence
  Synthetic
ccggaaacuacuguuguuagacga

SEQ ID NO: 59529 - RNA, 18 nt, Artificial Sequence
  Synthetic
acuguuguuagacgacga

SEQ ID NO: 59530 - RNA, 19 nt, Artificial Sequence
  Synthetic
uacuguuguuagacgacga

SEQ ID NO: 59531 - RNA, 20 nt, Artificial Sequence
  Synthetic
cuacuguuguuagacgacga

SEQ ID NO: 59532 - RNA, 21 nt, Artificial Sequence
  Synthetic
acuacuguuguuagacgacga

SEQ ID NO: 59533 - RNA, 22 nt, Artificial Sequence
  Synthetic
aacuacuguuguuagacgacga

SEQ ID NO: 59534 - RNA, 23 nt, Artificial Sequence
  Synthetic
aaacuacuguuguuagacgacga

SEQ ID NO: 59535 - RNA, 24 nt, Artificial Sequence
  Synthetic
gaaacuacuguuguuagacgacga

SEQ ID NO: 59536 - RNA, 18 nt, Artificial Sequence
  Synthetic
aaauuccagcagucccga

SEQ ID NO: 59537 - RNA, 19 nt, Artificial Sequence
  Synthetic
caaauuccagcagucccga

SEQ ID NO: 59538 - RNA, 20 nt, Artificial Sequence
  Synthetic
gcaaauuccagcagucccga

SEQ ID NO: 59539 - RNA, 21 nt, Artificial Sequence
  Synthetic
  misc_feature (1)..(1): n is a, c, g, or u
ngcaaauuccagcagucccga

SEQ ID NO: 59540 - RNA, 22 nt, Artificial Sequence
  Synthetic
  misc_feature (2)..(2): n is a, c, g, or u
gngcaaauuccagcagucccga

SEQ ID NO: 59541 - RNA, 23 nt, Artificial Sequence
  Synthetic
  misc_feature (3)..(3): n is a, c, g, or u
agngcaaauuccagcagucccga

SEQ ID NO: 59542 - RNA, 24 nt, Artificial Sequence
  Synthetic
  misc_feature (4)..(4): n is a, c, g, or u
cagngcaaauuccagcagucccga

SEQ ID NO: 59543 - RNA, 18 nt, Artificial Sequence
  Synthetic
  misc_feature (7)..(7): n is a, c, g, or u
auuuaangacugggagga

SEQ ID NO: 59544 - RNA, 19 nt, Artificial Sequence
  Synthetic
  misc_feature (8)..(8): n is a, c, g, or u
uauuuaangacugggagga

SEQ ID NO: 59545 - RNA, 20 nt, Artificial Sequence
  Synthetic
  misc_feature (9)..(9): n is a, c, g, or u
guauuuaangacugggagga

SEQ ID NO: 59546 - RNA, 21 nt, Artificial Sequence
  Synthetic
  misc_feature (10)..(10): n is a, c, g, or u
uguauuuaangacugggagga

SEQ ID NO: 59547 - RNA, 22 nt, Artificial Sequence
  Synthetic
  misc_feature (11)..(11): n is a, c, g, or u
guguauuuaangacugggagga

SEQ ID NO: 59548 - RNA, 23 nt, Artificial Sequence
  Synthetic
  misc_feature (12)..(12): n is a, c, g, or u
uguguauuuaangacugggagga

SEQ ID NO: 59549 - RNA, 24 nt, Artificial Sequence
  Synthetic
  misc_feature (13)..(13): n is a, c, g, or u
cuguguauuuaangacugggagga

SEQ ID NO: 59550 - RNA, 18 nt, Artificial Sequence
  Synthetic
auggcaaacaagguagga

SEQ ID NO: 59551 - RNA, 19 nt, Artificial Sequence
  Synthetic
aauggcaaacaagguagga

SEQ ID NO: 59552 - RNA, 20 nt, Artificial Sequence
  Synthetic
caauggcaaacaagguagga

SEQ ID NO: 59553 - RNA, 21 nt, Artificial Sequence
  Synthetic
ccaauggcaaacaagguagga

SEQ ID NO: 59554 - RNA, 22 nt, Artificial Sequence
  Synthetic
gccaauggcaaacaagguagga

SEQ ID NO: 59555 - RNA, 23 nt, Artificial Sequence
  Synthetic
ggccaauggcaaacaagguagga

SEQ ID NO: 59556 - RNA, 24 nt, Artificial Sequence
  Synthetic
uggccaauggcaaacaagguagga

SEQ ID NO: 59557 - RNA, 18 nt, Artificial Sequence
  Synthetic
cuguuccaaacccucgga

SEQ ID NO: 59558 - RNA, 19 nt, Artificial Sequence
  Synthetic
gcuguuccaaacccucgga

SEQ ID NO: 59559 - RNA, 20 nt, Artificial Sequence
  Synthetic
ugcuguuccaaacccucgga

SEQ ID NO: 59560 - RNA, 21 nt, Artificial Sequence
  Synthetic
  misc_feature (1)..(1): n is a, c, g, or u
nugcuguuccaaacccucgga

SEQ ID NO: 59561 - RNA, 22 nt, Artificial Sequence
  Synthetic
  misc_feature (2)..(2): n is a, c, g, or u
gnugcuguuccaaacccucgga

SEQ ID NO: 59562 - RNA, 23 nt, Artificial Sequence
  Synthetic
  misc_feature (3)..(3): n is a, c, g, or u
ugnugcuguuccaaacccucgga

SEQ ID NO: 59563 - RNA, 24 nt, Artificial Sequence
  Synthetic
  misc_feature (1)..(1): n is a, c, g, or u
  misc_feature (4)..(4): n is a, c, g, or u
nugnugcuguuccaaacccucgga

SEQ ID NO: 59564 - RNA, 18 nt, Artificial Sequence
  Synthetic
aggaaaauaccuauggga

SEQ ID NO: 59565 - RNA, 19 nt, Artificial Sequence
  Synthetic
uaggaaaauaccuauggga

SEQ ID NO: 59566 - RNA, 20 nt, Artificial Sequence
  Synthetic
uuaggaaaauaccuauggga

SEQ ID NO: 59567 - RNA, 21 nt, Artificial Sequence
  Synthetic
uuuaggaaaauaccuauggga

SEQ ID NO: 59568 - RNA, 22 nt, Artificial Sequence
  Synthetic
cuuuaggaaaauaccuauggga

SEQ ID NO: 59569 - RNA, 23 nt, Artificial Sequence
  Synthetic
gcuuuaggaaaauaccuauggga

SEQ ID NO: 59570 - RNA, 24 nt, Artificial Sequence
  Synthetic
ggcuuuaggaaaauaccuauggga

SEQ ID NO: 59571 - RNA, 18 nt, Artificial Sequence
  Synthetic
  misc_feature (13)..(13): n is a, c, g, or u
gucaccauauucnuggga

SEQ ID NO: 59572 - RNA, 19 nt, Artificial Sequence
  Synthetic
  misc_feature (14)..(14): n is a, c, g, or u
ggucaccauauucnuggga

SEQ ID NO: 59573 - RNA, 20 nt, Artificial Sequence
  Synthetic
  misc_feature (15)..(15): n is a, c, g, or u
gggucaccauauucnuggga

SEQ ID NO: 59574 - RNA, 21 nt, Artificial Sequence
  Synthetic
  misc_feature (16)..(16): n is a, c, g, or u
ugggucaccauauucnuggga

SEQ ID NO: 59575 - RNA, 22 nt, Artificial Sequence
  Synthetic
  misc_feature (17)..(17): n is a, c, g, or u
gugggucaccauauucnuggga

SEQ ID NO: 59576 - RNA, 23 nt, Artificial Sequence
  Synthetic
  misc_feature (18)..(18): n is a, c, g, or u
ugugggucaccauauucnuggga

SEQ ID NO: 59577 - RNA, 24 nt, Artificial Sequence
  Synthetic
  misc_feature (19)..(19): n is a, c, g, or u
uugugggucaccauauucnuggga

SEQ ID NO: 59578 - RNA, 18 nt, Artificial Sequence
  Synthetic
  misc_feature (3)..(3): n is a, c, g, or u
  misc_feature (11)..(11): n is a, c, g, or u
ganggucaaunaccugga

SEQ ID NO: 59579 - RNA, 19 nt, Artificial Sequence
  Synthetic
  misc_feature (4)..(4): n is a, c, g, or u
  misc_feature (12)..(12): n is a, c, g, or u
gganggucaaunaccugga

SEQ ID NO: 59580 - RNA, 20 nt, Artificial Sequence
  Synthetic
  misc_feature (5)..(5): n is a, c, g, or u
  misc_feature (13)..(13): n is a, c, g, or u
agganggucaaunaccugga

SEQ ID NO: 59581 - RNA, 21 nt, Artificial Sequence
  Synthetic
  misc_feature (6)..(6): n is a, c, g, or u
  misc_feature (14)..(14): n is a, c, g, or u
cagganggucaaunaccugga

SEQ ID NO: 59582 - RNA, 22 nt, Artificial Sequence
  Synthetic
  misc_feature (7)..(7): n is a, c, g, or u
  misc_feature (15)..(15): n is a, c, g, or u
ucagganggucaaunaccugga

SEQ ID NO: 59583 - RNA, 23 nt, Artificial Sequence
  Synthetic
  misc_feature (8)..(8): n is a, c, g, or u
  misc_feature (16)..(16): n is a, c, g, or u
uucagganggucaaunaccugga

SEQ ID NO: 59584 - RNA, 24 nt, Artificial Sequence
  Synthetic
  misc_feature (9)..(9): n is a, c, g, or u
  misc_feature (17)..(17): n is a, c, g, or u
uuucagganggucaaunaccugga

SEQ ID NO: 59585 - RNA, 18 nt, Artificial Sequence
  Synthetic
gcucgcagccggucugga

SEQ ID NO: 59586 - RNA, 19 nt, Artificial Sequence
  Synthetic
cgcucgcagccggucugga

SEQ ID NO: 59587 - RNA, 20 nt, Artificial Sequence
  Synthetic
ucgcucgcagccggucugga

SEQ ID NO: 59588 - RNA, 18 nt, Artificial Sequence
  Synthetic
uccugccuuacuuuugga

SEQ ID NO: 59589 - RNA, 19 nt, Artificial Sequence
  Synthetic
uuccugccuuacuuuugga

SEQ ID NO: 59590 - RNA, 20 nt, Artificial Sequence
  Synthetic
uuuccugccuuacuuuugga

SEQ ID NO: 59591 - RNA, 21 nt, Artificial Sequence
  Synthetic
auuuccugccuuacuuuugga

SEQ ID NO: 59592 - RNA, 22 nt, Artificial Sequence
  Synthetic
cauuuccugccuuacuuuugga

SEQ ID NO: 59593 - RNA, 23 nt, Artificial Sequence
  Synthetic
acauuuccugccuuacuuuugga

SEQ ID NO: 59594 - RNA, 24 nt, Artificial Sequence
  Synthetic
cacauuuccugccuuacuuuugga

SEQ ID NO: 59595 - RNA, 18 nt, Artificial Sequence
  Synthetic
  misc_feature (16)..(16): n is a, c, g, or u
agacuguguauuuaanga

SEQ ID NO: 59596 - RNA, 19 nt, Artificial Sequence
  Synthetic
  misc_feature (17)..(17): n is a, c, g, or u
aagacuguguauuuaanga

SEQ ID NO: 59597 - RNA, 20 nt, Artificial Sequence
  Synthetic
  misc_feature (18)..(18): n is a, c, g, or u
aaagacuguguauuuaanga

SEQ ID NO: 59598 - RNA, 21 nt, Artificial Sequence
  Synthetic
  misc_feature (19)..(19): n is a, c, g, or u
caaagacuguguauuuaanga

SEQ ID NO: 59599 - RNA, 22 nt, Artificial Sequence
  Synthetic
  misc_feature (20)..(20): n is a, c, g, or u
ucaaagacuguguauuuaanga

SEQ ID NO: 59600 - RNA, 23 nt, Artificial Sequence
  Synthetic
  misc_feature (21)..(21): n is a, c, g, or u
aucaaagacuguguauuuaanga

SEQ ID NO: 59601 - RNA, 24 nt, Artificial Sequence
  Synthetic
  misc_feature (22)..(22): n is a, c, g, or u
caucaaagacuguguauuuaanga

SEQ ID NO: 59602 - RNA, 18 nt, Artificial Sequence
  Synthetic
  misc_feature (16)..(16): n is a, c, g, or u
guggcuccaguucagnga

SEQ ID NO: 59603 - RNA, 19 nt, Artificial Sequence
  Synthetic
  misc_feature (17)..(17): n is a, c, g, or u
gguggcuccaguucagnga

SEQ ID NO: 59604 - RNA, 20 nt, Artificial Sequence
  Synthetic
  misc_feature (18)..(18): n is a, c, g, or u
ugguggcuccaguucagnga

SEQ ID NO: 59605 - RNA, 21 nt, Artificial Sequence
  Synthetic
  misc_feature (19)..(19): n is a, c, g, or u
cugguggcuccaguucagnga

SEQ ID NO: 59606 - RNA, 22 nt, Artificial Sequence
  Synthetic
  misc_feature (20)..(20): n is a, c, g, or u
gcugguggcuccaguucagnga

SEQ ID NO: 59607 - RNA, 23 nt, Artificial Sequence
  Synthetic
  misc_feature (21)..(21): n is a, c, g, or u
ugcugguggcuccaguucagnga

SEQ ID NO: 59608 - RNA, 24 nt, Artificial Sequence
  Synthetic
  misc_feature (22)..(22): n is a, c, g, or u
cugcugguggcuccaguucagnga

SEQ ID NO: 59609 - RNA, 18 nt, Artificial Sequence
  Synthetic
  misc_feature (6)..(6): n is a, c, g, or u
  misc_feature (15)..(16): n is a, c, g, or u
ccucunucaacgacnnga

SEQ ID NO: 59610 - RNA, 19 nt, Artificial Sequence
  Synthetic
  misc_feature (7)..(7): n is a, c, g, or u
  misc_feature (16)..(17): n is a, c, g, or u
accucunucaacgacnnga

SEQ ID NO: 59611 - RNA, 20 nt, Artificial Sequence
  Synthetic
  misc_feature (8)..(8): n is a, c, g, or u
  misc_feature (17)..(18): n is a, c, g, or u
caccucunucaacgacnnga

SEQ ID NO: 59612 - RNA, 21 nt, Artificial Sequence
  Synthetic
  misc_feature (9)..(9): n is a, c, g, or u
  misc_feature (18)..(19): n is a, c, g, or u
gcaccucunucaacgacnnga

SEQ ID NO: 59613 - RNA, 22 nt, Artificial Sequence
  Synthetic
  misc_feature (10)..(10): n is a, c, g, or u
  misc_feature (19)..(20): n is a, c, g, or u
agcaccucunucaacgacnnga

SEQ ID NO: 59614 - RNA, 23 nt, Artificial Sequence
  Synthetic
  misc_feature (11)..(11): n is a, c, g, or u
  misc_feature (20)..(21): n is a, c, g, or u
gagcaccucunucaacgacnnga

SEQ ID NO: 59615 - RNA, 24 nt, Artificial Sequence
  Synthetic
  misc_feature (12)..(12): n is a, c, g, or u
  misc_feature (21)..(22): n is a, c, g, or u
ggagcaccucunucaacgacnnga

SEQ ID NO: 59616 - RNA, 18 nt, Artificial Sequence
  Synthetic
  misc_feature (16)..(16): n is a, c, g, or u
cgaggcagguccccunga

SEQ ID NO: 59617 - RNA, 19 nt, Artificial Sequence
  Synthetic
  misc_feature (17)..(17): n is a, c, g, or u
acgaggcagguccccunga

SEQ ID NO: 59618 - RNA, 20 nt, Artificial Sequence
  Synthetic
  misc_feature (18)..(18): n is a, c, g, or u
gacgaggcagguccccunga

SEQ ID NO: 59619 - RNA, 21 nt, Artificial Sequence
  Synthetic
  misc_feature (19)..(19): n is a, c, g, or u
cgacgaggcagguccccunga

SEQ ID NO: 59620 - RNA, 22 nt, Artificial Sequence
  Synthetic
  misc_feature (20)..(20): n is a, c, g, or u
acgacgaggcagguccccunga

SEQ ID NO: 59621 - RNA, 23 nt, Artificial Sequence
  Synthetic
  misc_feature (21)..(21): n is a, c, g, or u
gacgacgaggcagguccccunga

SEQ ID NO: 59622 - RNA, 24 nt, Artificial Sequence
  Synthetic
  misc_feature (22)..(22): n is a, c, g, or u
agacgacgaggcagguccccunga

SEQ ID NO: 59623 - RNA, 18 nt, Artificial Sequence
  Synthetic
  misc_feature (10)..(10): n is a, c, g, or u
  misc_feature (16)..(16): n is a, c, g, or u
ccaccaggcncuguunga

SEQ ID NO: 59624 - RNA, 19 nt, Artificial Sequence
  Synthetic
  misc_feature (11)..(11): n is a, c, g, or u
  misc_feature (17)..(17): n is a, c, g, or u
uccaccaggcncuguunga

SEQ ID NO: 59625 - RNA, 20 nt, Artificial Sequence
  Synthetic
  misc_feature (12)..(12): n is a, c, g, or u
  misc_feature (18)..(18): n is a, c, g, or u
uuccaccaggcncuguunga

SEQ ID NO: 59626 - RNA, 21 nt, Artificial Sequence
  Synthetic
  misc_feature (13)..(13): n is a, c, g, or u
  misc_feature (19)..(19): n is a, c, g, or u
guuccaccaggcncuguunga

SEQ ID NO: 59627 - RNA, 22 nt, Artificial Sequence
  Synthetic
  misc_feature (14)..(14): n is a, c, g, or u
  misc_feature (20)..(20): n is a, c, g, or u
aguuccaccaggcncuguunga

SEQ ID NO: 59628 - RNA, 23 nt, Artificial Sequence
  Synthetic
  misc_feature (15)..(15): n is a, c, g, or u
  misc_feature (21)..(21): n is a, c, g, or u
caguuccaccaggcncuguunga

SEQ ID NO: 59629 - RNA, 24 nt, Artificial Sequence
  Synthetic
  misc_feature (1)..(1): n is a, c, g, or u
  misc_feature (16)..(16): n is a, c, g, or u
  misc_feature (22)..(22): n is a, c, g, or u
ncaguuccaccaggcncuguunga

SEQ ID NO: 59630 - RNA, 18 nt, Artificial Sequence
  Synthetic
  misc_feature (4)..(4): n is a, c, g, or u
  misc_feature (7)..(7): n is a, c, g, or u
  misc_feature (10)..(10): n is a, c, g, or u
cccncunacnaaaaauga

SEQ ID NO: 59631 - RNA, 19 nt, Artificial Sequence
  Synthetic
  misc_feature (5)..(5): n is a, c, g, or u
  misc_feature (8)..(8): n is a, c, g, or u
  misc_feature (11)..(11): n is a, c, g, or u
gcccncunacnaaaaauga

SEQ ID NO: 59632 - RNA, 20 nt, Artificial Sequence
  Synthetic
  misc_feature (6)..(6): n is a, c, g, or u
  misc_feature (9)..(9): n is a, c, g, or u
  misc_feature (12)..(12): n is a, c, g, or u
ggcccncunacnaaaaauga

SEQ ID NO: 59633 - RNA, 21 nt, Artificial Sequence
  Synthetic
  misc_feature (7)..(7): n is a, c, g, or u
  misc_feature (10)..(10): n is a, c, g, or u
  misc_feature (13)..(13): n is a, c, g, or u
aggcccncunacnaaaaauga

SEQ ID NO: 59634 - RNA, 22 nt, Artificial Sequence
  Synthetic
  misc_feature (8)..(8): n is a, c, g, or u
  misc_feature (11)..(11): n is a, c, g, or u
  misc_feature (14)..(14): n is a, c, g, or u
uaggcccncunacnaaaaauga

SEQ ID NO: 59635 - RNA, 23 nt, Artificial Sequence
  Synthetic
  misc_feature (9)..(9): n is a, c, g, or u
  misc_feature (12)..(12): n is a, c, g, or u
  misc_feature (15)..(15): n is a, c, g, or u
guaggcccncunacnaaaaauga

SEQ ID NO: 59636 - RNA, 24 nt, Artificial Sequence
  Synthetic
  misc_feature (10)..(10): n is a, c, g, or u
  misc_feature (13)..(13): n is a, c, g, or u
  misc_feature (16)..(16): n is a, c, g, or u
uguaggcccncunacnaaaaauga

SEQ ID NO: 59637 - RNA, 18 nt, Artificial Sequence
  Synthetic
gugccaaguguuugcuga

SEQ ID NO: 59638 - RNA, 19 nt, Artificial Sequence
  Synthetic
ugugccaaguguuugcuga

SEQ ID NO: 59639 - RNA, 20 nt, Artificial Sequence
  Synthetic
cugugccaaguguuugcuga

SEQ ID NO: 59640 - RNA, 21 nt, Artificial Sequence
  Synthetic
ccugugccaaguguuugcuga

SEQ ID NO: 59641 - RNA, 22 nt, Artificial Sequence
  Synthetic
gccugugccaaguguuugcuga

SEQ ID NO: 59642 - RNA, 23 nt, Artificial Sequence
  Synthetic
ggccugugccaaguguuugcuga

SEQ ID NO: 59643 - RNA, 24 nt, Artificial Sequence
  Synthetic
aggccugugccaaguguuugcuga

SEQ ID NO: 59644 - RNA, 18 nt, Artificial Sequence
  Synthetic
  misc_feature (10)..(10): n is a, c, g, or u
  misc_feature (13)..(13): n is a, c, g, or u
uguaaaucgnccnauuga

SEQ ID NO: 59645 - RNA, 19 nt, Artificial Sequence
  Synthetic
  misc_feature (11)..(11): n is a, c, g, or u
  misc_feature (14)..(14): n is a, c, g, or u
cuguaaaucgnccnauuga

SEQ ID NO: 59646 - RNA, 20 nt, Artificial Sequence
  Synthetic
  misc_feature (12)..(12): n is a, c, g, or u
  misc_feature (15)..(15): n is a, c, g, or u
ccuguaaaucgnccnauuga

SEQ ID NO: 59647 - RNA, 21 nt, Artificial Sequence
  Synthetic
  misc_feature (13)..(13): n is a, c, g, or u
  misc_feature (16)..(16): n is a, c, g, or u
uccuguaaaucgnccnauuga

SEQ ID NO: 59648 - RNA, 22 nt, Artificial Sequence
  Synthetic
  misc_feature (14)..(14): n is a, c, g, or u
  misc_feature (17)..(17): n is a, c, g, or u
uuccuguaaaucgnccnauuga

SEQ ID NO: 59649 - RNA, 23 nt, Artificial Sequence
  Synthetic
  misc_feature (15)..(15): n is a, c, g, or u
  misc_feature (18)..(18): n is a, c, g, or u
cuuccuguaaaucgnccnauuga

SEQ ID NO: 59650 - RNA, 24 nt, Artificial Sequence
  Synthetic
  misc_feature (16)..(16): n is a, c, g, or u
  misc_feature (19)..(19): n is a, c, g, or u
acuuccuguaaaucgnccnauuga

SEQ ID NO: 59651 - RNA, 18 nt, Artificial Sequence
  Synthetic
cgguguguuucuuguuga

SEQ ID NO: 59652 - RNA, 19 nt, Artificial Sequence
  Synthetic
gcgguguguuucuuguuga

SEQ ID NO: 59653 - RNA, 20 nt, Artificial Sequence
  Synthetic
ggcgguguguuucuuguuga

SEQ ID NO: 59654 - RNA, 21 nt, Artificial Sequence
  Synthetic
aggcgguguguuucuuguuga

SEQ ID NO: 59655 - RNA, 22 nt, Artificial Sequence
  Synthetic
caggcgguguguuucuuguuga

SEQ ID NO: 59656 - RNA, 23 nt, Artificial Sequence
  Synthetic
acaggcgguguguuucuuguuga

SEQ ID NO: 59657 - RNA, 24 nt, Artificial Sequence
  Synthetic
uacaggcgguguguuucuuguuga

SEQ ID NO: 59658 - RNA, 18 nt, Artificial Sequence
  Synthetic
  misc_feature (12)..(12): n is a, c, g, or u
  misc_feature (17)..(17): n is a, c, g, or u
cuaacaugggcnuaaana

SEQ ID NO: 59659 - RNA, 19 nt, Artificial Sequence
  Synthetic
  misc_feature (13)..(13): n is a, c, g, or u
  misc_feature (18)..(18): n is a, c, g, or u
acuaacaugggcnuaaana

SEQ ID NO: 59660 - RNA, 20 nt, Artificial Sequence
  Synthetic
  misc_feature (1)..(1): n is a, c, g, or u
  misc_feature (14)..(14): n is a, c, g, or u
  misc_feature (19)..(19): n is a, c, g, or u
nacuaacaugggcnuaaana

SEQ ID NO: 59661 - RNA, 21 nt, Artificial Sequence
  Synthetic
  misc_feature (2)..(2): n is a, c, g, or u
  misc_feature (15)..(15): n is a, c, g, or u
  misc_feature (20)..(20): n is a, c, g, or u
anacuaacaugggcnuaaana

SEQ ID NO: 59662 - RNA, 22 nt, Artificial Sequence
  Synthetic
  misc_feature (3)..(3): n is a, c, g, or u
  misc_feature (16)..(16): n is a, c, g, or u
  misc_feature (21)..(21): n is a, c, g, or u
aanacuaacaugggcnuaaana

SEQ ID NO: 59663 - RNA, 23 nt, Artificial Sequence
  Synthetic
  misc_feature (1)..(1): n is a, c, g, or u
  misc_feature (4)..(4): n is a, c, g, or u
  misc_feature (17)..(17): n is a, c, g, or u
  misc_feature (22)..(22): n is a, c, g, or u
naanacuaacaugggcnuaaana

SEQ ID NO: 59664 - RNA, 24 nt, Artificial Sequence
  Synthetic
  misc_feature (2)..(2): n is a, c, g, or u
  misc_feature (5)..(5): n is a, c, g, or u
  misc_feature (18)..(18): n is a, c, g, or u
  misc_feature (23)..(23): n is a, c, g, or u
unaanacuaacaugggcnuaaana

SEQ ID NO: 59665 - RNA, 18 nt, Artificial Sequence
  Synthetic
  misc_feature (17)..(17): n is a, c, g, or u
uuaaucauuauuuuaana

SEQ ID NO: 59666 - RNA, 19 nt, Artificial Sequence
  Synthetic
  misc_feature (18)..(18): n is a, c, g, or u
guuaaucauuauuuuaana

SEQ ID NO: 59667 - RNA, 20 nt, Artificial Sequence
  Synthetic
  misc_feature (1)..(1): n is a, c, g, or u
  misc_feature (19)..(19): n is a, c, g, or u
nguuaaucauuauuuuaana

SEQ ID NO: 59668 - RNA, 21 nt, Artificial Sequence
  Synthetic
  misc_feature (1)..(2): n is a, c, g, or u
  misc_feature (20)..(20): n is a, c, g, or u
nnguuaaucauuauuuuaana

SEQ ID NO: 59669 - RNA, 22 nt, Artificial Sequence
  Synthetic
  misc_feature (2)..(3): n is a, c, g, or u
  misc_feature (21)..(21): n is a, c, g, or u
gnnguuaaucauuauuuuaana

SEQ ID NO: 59670 - RNA, 23 nt, Artificial Sequence
  Synthetic
  misc_feature (1)..(1): n is a, c, g, or u
  misc_feature (3)..(4): n is a, c, g, or u
  misc_feature (22)..(22): n is a, c, g, or u
ngnnguuaaucauuauuuuaana

SEQ ID NO: 59671 - RNA, 24 nt, Artificial Sequence
  Synthetic
  misc_feature (2)..(2): n is a, c, g, or u
  misc_feature (4)..(5): n is a, c, g, or u
  misc_feature (23)..(23): n is a, c, g, or u
angnnguuaaucauuauuuuaana

SEQ ID NO: 59672 - RNA, 18 nt, Artificial Sequence
  Synthetic
  misc_feature (3)..(3): n is a, c, g, or u
  misc_feature (17)..(17): n is a, c, g, or u
ganugggacuucaacana

SEQ ID NO: 59673 - RNA, 19 nt, Artificial Sequence
  Synthetic
  misc_feature (4)..(4): n is a, c, g, or u
  misc_feature (18)..(18): n is a, c, g, or u
cganugggacuucaacana

SEQ ID NO: 59674 - RNA, 20 nt, Artificial Sequence
  Synthetic
  misc_feature (5)..(5): n is a, c, g, or u
  misc_feature (19)..(19): n is a, c, g, or u
ccganugggacuucaacana

SEQ ID NO: 59675 - RNA, 21 nt, Artificial Sequence
  Synthetic
  misc_feature (6)..(6): n is a, c, g, or u
  misc_feature (20)..(20): n is a, c, g, or u
cccganugggacuucaacana

SEQ ID NO: 59676 - RNA, 22 nt, Artificial Sequence
  Synthetic
  misc_feature (7)..(7): n is a, c, g, or u
  misc_feature (21)..(21): n is a, c, g, or u
ucccganugggacuucaacana

SEQ ID NO: 59677 - RNA, 23 nt, Artificial Sequence
  Synthetic
  misc_feature (8)..(8): n is a, c, g, or u
  misc_feature (22)..(22): n is a, c, g, or u
gucccganugggacuucaacana

SEQ ID NO: 59678 - RNA, 24 nt, Artificial Sequence
  Synthetic
  misc_feature (9)..(9): n is a, c, g, or u
  misc_feature (23)..(23): n is a, c, g, or u
agucccganugggacuucaacana

SEQ ID NO: 59679 - RNA, 18 nt, Artificial Sequence
  Synthetic
  misc_feature (3)..(3): n is a, c, g, or u
  misc_feature (11)..(11): n is a, c, g, or u
  misc_feature (17)..(17): n is a, c, g, or u
aunccuguaunacugcna

SEQ ID NO: 59680 - RNA, 19 nt, Artificial Sequence
  Synthetic
  misc_feature (4)..(4): n is a, c, g, or u
  misc_feature (12)..(12): n is a, c, g, or u
  misc_feature (18)..(18): n is a, c, g, or u
uaunccuguaunacugcna

SEQ ID NO: 59681 - RNA, 20 nt, Artificial Sequence
  Synthetic
  misc_feature (5)..(5): n is a, c, g, or u
  misc_feature (13)..(13): n is a, c, g, or u
  misc_feature (19)..(19): n is a, c, g, or u
guaunccuguaunacugcna

SEQ ID NO: 59682 - RNA, 21 nt, Artificial Sequence
  Synthetic
  misc_feature (6)..(6): n is a, c, g, or u
  misc_feature (14)..(14): n is a, c, g, or u
  misc_feature (20)..(20): n is a, c, g, or u
uguaunccuguaunacugcna

SEQ ID NO: 59683 - RNA, 22 nt, Artificial Sequence
  Synthetic
  misc_feature (7)..(7): n is a, c, g, or u
  misc_feature (15)..(15): n is a, c, g, or u
  misc_feature (21)..(21): n is a, c, g, or u
cuguaunccuguaunacugcna

SEQ ID NO: 59684 - RNA, 23 nt, Artificial Sequence
  Synthetic
  misc_feature (8)..(8): n is a, c, g, or u
  misc_feature (16)..(16): n is a, c, g, or u
  misc_feature (22)..(22): n is a, c, g, or u
ucuguaunccuguaunacugcna

SEQ ID NO: 59685 - RNA, 24 nt, Artificial Sequence
  Synthetic
  misc_feature (9)..(9): n is a, c, g, or u
  misc_feature (17)..(17): n is a, c, g, or u
  misc_feature (23)..(23): n is a, c, g, or u
cucuguaunccuguaunacugcna

SEQ ID NO: 59686 - RNA, 18 nt, Artificial Sequence
  Synthetic
  misc_feature (6)..(6): n is a, c, g, or u
  misc_feature (11)..(11): n is a, c, g, or u
  misc_feature (14)..(14): n is a, c, g, or u
  misc_feature (17)..(17): n is a, c, g, or u
uuccunugganaanggna

SEQ ID NO: 59687 - RNA, 19 nt, Artificial Sequence
  Synthetic
  misc_feature (7)..(7): n is a, c, g, or u
  misc_feature (12)..(12): n is a, c, g, or u
  misc_feature (15)..(15): n is a, c, g, or u
  misc_feature (18)..(18): n is a, c, g, or u
uuuccunugganaanggna

SEQ ID NO: 59688 - RNA, 20 nt, Artificial Sequence
  Synthetic
  misc_feature (8)..(8): n is a, c, g, or u
  misc_feature (13)..(13): n is a, c, g, or u
  misc_feature (16)..(16): n is a, c, g, or u
  misc_feature (19)..(19): n is a, c, g, or u
uuuuccunugganaanggna

SEQ ID NO: 59689 - RNA, 21 nt, Artificial Sequence
  Synthetic
  misc_feature (9)..(9): n is a, c, g, or u
  misc_feature (14)..(14): n is a, c, g, or u
  misc_feature (17)..(17): n is a, c, g, or u
  misc_feature (20)..(20): n is a, c, g, or u
auuuuccunugganaanggna

SEQ ID NO: 59690 - RNA, 22 nt, Artificial Sequence
  Synthetic
  misc_feature (10)..(10): n is a, c, g, or u
  misc_feature (15)..(15): n is a, c, g, or u
  misc_feature (18)..(18): n is a, c, g, or u
  misc_feature (21)..(21): n is a, c, g, or u
uauuuuccunugganaanggna

SEQ ID NO: 59691 - RNA, 23 nt, Artificial Sequence
  Synthetic
  misc_feature (11)..(11): n is a, c, g, or u
  misc_feature (16)..(16): n is a, c, g, or u
  misc_feature (19)..(19): n is a, c, g, or u
  misc_feature (22)..(22): n is a, c, g, or u
auauuuuccunugganaanggna

SEQ ID NO: 59692 - RNA, 24 nt, Artificial Sequence
  Synthetic
  misc_feature (12)..(12): n is a, c, g, or u
  misc_feature (17)..(17): n is a, c, g, or u
  misc_feature (20)..(20): n is a, c, g, or u
  misc_feature (23)..(23): n is a, c, g, or u
aauauuuuccunugganaanggna

SEQ ID NO: 59693 - RNA, 18 nt, Artificial Sequence
  Synthetic
  misc_feature (11)..(11): n is a, c, g, or u
  misc_feature (17)..(17): n is a, c, g, or u
uggguuaugunauuggna

SEQ ID NO: 59694 - RNA, 19 nt, Artificial Sequence
  Synthetic
  misc_feature (12)..(12): n is a, c, g, or u
  misc_feature (18)..(18): n is a, c, g, or u
auggguuaugunauuggna

SEQ ID NO: 59695 - RNA, 20 nt, Artificial Sequence
  Synthetic
  misc_feature (13)..(13): n is a, c, g, or u
  misc_feature (19)..(19): n is a, c, g, or u
cauggguuaugunauuggna

SEQ ID NO: 59696 - RNA, 21 nt, Artificial Sequence
  Synthetic
  misc_feature (14)..(14): n is a, c, g, or u
  misc_feature (20)..(20): n is a, c, g, or u
ucauggguuaugunauuggna

SEQ ID NO: 59697 - RNA, 22 nt, Artificial Sequence
  Synthetic
  misc_feature (15)..(15): n is a, c, g, or u
  misc_feature (21)..(21): n is a, c, g, or u
uucauggguuaugunauuggna

SEQ ID NO: 59698 - RNA, 23 nt, Artificial Sequence
  Synthetic
  misc_feature (16)..(16): n is a, c, g, or u
  misc_feature (22)..(22): n is a, c, g, or u
uuucauggguuaugunauuggna

SEQ ID NO: 59699 - RNA, 24 nt, Artificial Sequence
  Synthetic
  misc_feature (17)..(17): n is a, c, g, or u
  misc_feature (23)..(23): n is a, c, g, or u
auuucauggguuaugunauuggna

SEQ ID NO: 59700 - RNA, 18 nt, Artificial Sequence
  Synthetic
  misc_feature (16)..(17): n is a, c, g, or u
aauuuucuaggggganna

SEQ ID NO: 59701 - RNA, 19 nt, Artificial Sequence
  Synthetic
  misc_feature (17)..(18): n is a, c, g, or u
caauuuucuaggggganna

SEQ ID NO: 59702 - RNA, 20 nt, Artificial Sequence
  Synthetic
  misc_feature (18)..(19): n is a, c, g, or u
ucaauuuucuaggggganna

SEQ ID NO: 59703 - RNA, 21 nt, Artificial Sequence
  Synthetic
  misc_feature (19)..(20): n is a, c, g, or u
cucaauuuucuaggggganna

SEQ ID NO: 59704 - RNA, 22 nt, Artificial Sequence
  Synthetic
  misc_feature (20)..(21): n is a, c, g, or u
ucucaauuuucuaggggganna

SEQ ID NO: 59705 - RNA, 23 nt, Artificial Sequence
  Synthetic
  misc_feature (21)..(22): n is a, c, g, or u
cucucaauuuucuaggggganna

SEQ ID NO: 59706 - RNA, 24 nt, Artificial Sequence
  Synthetic
  misc_feature (22)..(23): n is a, c, g, or u
ucucucaauuuucuaggggganna

SEQ ID NO: 59707 - RNA, 18 nt, Artificial Sequence
  Synthetic
  misc_feature (9)..(9): n is a, c, g, or u
  misc_feature (17)..(17): n is a, c, g, or u
uuucagganggucaauna

SEQ ID NO: 59708 - RNA, 19 nt, Artificial Sequence
  Synthetic
  misc_feature (10)..(10): n is a, c, g, or u
  misc_feature (18)..(18): n is a, c, g, or u
cuuucagganggucaauna

SEQ ID NO: 59709 - RNA, 20 nt, Artificial Sequence
  Synthetic
  misc_feature (11)..(11): n is a, c, g, or u
  misc_feature (19)..(19): n is a, c, g, or u
acuuucagganggucaauna

SEQ ID NO: 59710 - RNA, 21 nt, Artificial Sequence
  Synthetic
  misc_feature (12)..(12): n is a, c, g, or u
  misc_feature (20)..(20): n is a, c, g, or u
gacuuucagganggucaauna

SEQ ID NO: 59711 - RNA, 22 nt, Artificial Sequence
  Synthetic
  misc_feature (13)..(13): n is a, c, g, or u
  misc_feature (21)..(21): n is a, c, g, or u
ggacuuucagganggucaauna

SEQ ID NO: 59712 - RNA, 23 nt, Artificial Sequence
  Synthetic
  misc_feature (14)..(14): n is a, c, g, or u
  misc_feature (22)..(22): n is a, c, g, or u
uggacuuucagganggucaauna

SEQ ID NO: 59713 - RNA, 24 nt, Artificial Sequence
  Synthetic
  misc_feature (15)..(15): n is a, c, g, or u
  misc_feature (23)..(23): n is a, c, g, or u
uuggacuuucagganggucaauna

SEQ ID NO: 59714 - RNA, 18 nt, Artificial Sequence
  Synthetic
  misc_feature (14)..(14): n is a, c, g, or u
  misc_feature (17)..(17): n is a, c, g, or u
aauuuguaggcccncuna

SEQ ID NO: 59715 - RNA, 19 nt, Artificial Sequence
  Synthetic
  misc_feature (15)..(15): n is a, c, g, or u
  misc_feature (18)..(18): n is a, c, g, or u
caauuuguaggcccncuna

SEQ ID NO: 59716 - RNA, 20 nt, Artificial Sequence
  Synthetic
  misc_feature (16)..(16): n is a, c, g, or u
  misc_feature (19)..(19): n is a, c, g, or u
acaauuuguaggcccncuna

SEQ ID NO: 59717 - RNA, 21 nt, Artificial Sequence
  Synthetic
  misc_feature (17)..(17): n is a, c, g, or u
  misc_feature (20)..(20): n is a, c, g, or u
aacaauuuguaggcccncuna

SEQ ID NO: 59718 - RNA, 22 nt, Artificial Sequence
  Synthetic
  misc_feature (18)..(18): n is a, c, g, or u
  misc_feature (21)..(21): n is a, c, g, or u
gaacaauuuguaggcccncuna

SEQ ID NO: 59719 - RNA, 23 nt, Artificial Sequence
  Synthetic
  misc_feature (19)..(19): n is a, c, g, or u
  misc_feature (22)..(22): n is a, c, g, or u
ugaacaauuuguaggcccncuna

SEQ ID NO: 59720 - RNA, 24 nt, Artificial Sequence
  Synthetic
  misc_feature (20)..(20): n is a, c, g, or u
  misc_feature (23)..(23): n is a, c, g, or u
gugaacaauuuguaggcccncuna

SEQ ID NO: 59721 - RNA, 18 nt, Artificial Sequence
  Synthetic
ugccaacagucuuacaua

SEQ ID NO: 59722 - RNA, 19 nt, Artificial Sequence
  Synthetic
uugccaacagucuuacaua

SEQ ID NO: 59723 - RNA, 20 nt, Artificial Sequence
  Synthetic
  misc_feature (1)..(1): n is a, c, g, or u
nuugccaacagucuuacaua

SEQ ID NO: 59724 - RNA, 21 nt, Artificial Sequence
  Synthetic
  misc_feature (2)..(2): n is a, c, g, or u
gnuugccaacagucuuacaua

SEQ ID NO: 59725 - RNA, 22 nt, Artificial Sequence
  Synthetic
  misc_feature (3)..(3): n is a, c, g, or u
agnuugccaacagucuuacaua

SEQ ID NO: 59726 - RNA, 23 nt, Artificial Sequence
  Synthetic
  misc_feature (1)..(1): n is a, c, g, or u
  misc_feature (4)..(4): n is a, c, g, or u
nagnuugccaacagucuuacaua

SEQ ID NO: 59727 - RNA, 24 nt, Artificial Sequence
  Synthetic
  misc_feature (2)..(2): n is a, c, g, or u
  misc_feature (5)..(5): n is a, c, g, or u
gnagnuugccaacagucuuacaua

SEQ ID NO: 59728 - RNA, 18 nt, Artificial Sequence
  Synthetic
  misc_feature (3)..(3): n is a, c, g, or u
  misc_feature (12)..(13): n is a, c, g, or u
uuncaucaagannugaua

SEQ ID NO: 59729 - RNA, 19 nt, Artificial Sequence
  Synthetic
  misc_feature (4)..(4): n is a, c, g, or u
  misc_feature (13)..(14): n is a, c, g, or u
uuuncaucaagannugaua

SEQ ID NO: 59730 - RNA, 20 nt, Artificial Sequence
  Synthetic
  misc_feature (5)..(5): n is a, c, g, or u
  misc_feature (14)..(15): n is a, c, g, or u
auuuncaucaagannugaua

SEQ ID NO: 59731 - RNA, 21 nt, Artificial Sequence
  Synthetic
  misc_feature (6)..(6): n is a, c, g, or u
  misc_feature (15)..(16): n is a, c, g, or u
cauuuncaucaagannugaua

SEQ ID NO: 59732 - RNA, 22 nt, Artificial Sequence
  Synthetic
  misc_feature (7)..(7): n is a, c, g, or u
  misc_feature (16)..(17): n is a, c, g, or u
ucauuuncaucaagannugaua

SEQ ID NO: 59733 - RNA, 23 nt, Artificial Sequence
  Synthetic
  misc_feature (8)..(8): n is a, c, g, or u
  misc_feature (17)..(18): n is a, c, g, or u
uucauuuncaucaagannugaua

SEQ ID NO: 59734 - RNA, 24 nt, Artificial Sequence
  Synthetic
  misc_feature (9)..(9): n is a, c, g, or u
  misc_feature (18)..(19): n is a, c, g, or u
auucauuuncaucaagannugaua

SEQ ID NO: 59735 - RNA, 18 nt, Artificial Sequence
  Synthetic
  misc_feature (2)..(2): n is a, c, g, or u
  misc_feature (5)..(5): n is a, c, g, or u
  misc_feature (8)..(8): n is a, c, g, or u
  misc_feature (12)..(12): n is a, c, g, or u
angcnggnauunuauaua

SEQ ID NO: 59736 - RNA, 19 nt, Artificial Sequence
  Synthetic
  misc_feature (3)..(3): n is a, c, g, or u
  misc_feature (6)..(6): n is a, c, g, or u
  misc_feature (9)..(9): n is a, c, g, or u
  misc_feature (13)..(13): n is a, c, g, or u
aangcnggnauunuauaua

SEQ ID NO: 59737 - RNA, 20 nt, Artificial Sequence
  Synthetic
  misc_feature (4)..(4): n is a, c, g, or u
  misc_feature (7)..(7): n is a, c, g, or u
  misc_feature (10)..(10): n is a, c, g, or u
  misc_feature (14)..(14): n is a, c, g, or u
gaangcnggnauunuauaua

SEQ ID NO: 59738 - RNA, 21 nt, Artificial Sequence
  Synthetic
  misc_feature (5)..(5): n is a, c, g, or u
  misc_feature (8)..(8): n is a, c, g, or u
  misc_feature (11)..(11): n is a, c, g, or u
  misc_feature (15)..(15): n is a, c, g, or u
ggaangcnggnauunuauaua

SEQ ID NO: 59739 - RNA, 22 nt, Artificial Sequence
  Synthetic
  misc_feature (6)..(6): n is a, c, g, or u
  misc_feature (9)..(9): n is a, c, g, or u
  misc_feature (12)..(12): n is a, c, g, or u
  misc_feature (16)..(16): n is a, c, g, or u
uggaangcnggnauunuauaua

SEQ ID NO: 59740 - RNA, 23 nt, Artificial Sequence
  Synthetic
  misc_feature (7)..(7): n is a, c, g, or u
  misc_feature (10)..(10): n is a, c, g, or u
  misc_feature (13)..(13): n is a, c, g, or u
  misc_feature (17)..(17): n is a, c, g, or u
auggaangcnggnauunuauaua

SEQ ID NO: 59741 - RNA, 24 nt, Artificial Sequence
  Synthetic
  misc_feature (8)..(8): n is a, c, g, or u
  misc_feature (11)..(11): n is a, c, g, or u
  misc_feature (14)..(14): n is a, c, g, or u
  misc_feature (18)..(18): n is a, c, g, or u
uauggaangcnggnauunuauaua

SEQ ID NO: 59742 - RNA, 18 nt, Artificial Sequence
  Synthetic
  misc_feature (4)..(4): n is a, c, g, or u
  misc_feature (7)..(7): n is a, c, g, or u
  misc_feature (10)..(10): n is a, c, g, or u
  misc_feature (14)..(14): n is a, c, g, or u
gaangcnggnauunuaua

SEQ ID NO: 59743 - RNA, 19 nt, Artificial Sequence
  Synthetic
  misc_feature (5)..(5): n is a, c, g, or u
  misc_feature (8)..(8): n is a, c, g, or u
  misc_feature (11)..(11): n is a, c, g, or u
  misc_feature (15)..(15): n is a, c, g, or u
ggaangcnggnauunuaua

SEQ ID NO: 59744 - RNA, 20 nt, Artificial Sequence
  Synthetic
  misc_feature (6)..(6): n is a, c, g, or u
  misc_feature (9)..(9): n is a, c, g, or u
  misc_feature (12)..(12): n is a, c, g, or u
  misc_feature (16)..(16): n is a, c, g, or u
uggaangcnggnauunuaua

SEQ ID NO: 59745 - RNA, 21 nt, Artificial Sequence
  Synthetic
  misc_feature (7)..(7): n is a, c, g, or u
  misc_feature (10)..(10): n is a, c, g, or u
  misc_feature (13)..(13): n is a, c, g, or u
  misc_feature (17)..(17): n is a, c, g, or u
auggaangcnggnauunuaua

SEQ ID NO: 59746 - RNA, 22 nt, Artificial Sequence
  Synthetic
  misc_feature (8)..(8): n is a, c, g, or u
  misc_feature (11)..(11): n is a, c, g, or u
  misc_feature (14)..(14): n is a, c, g, or u
  misc_feature (18)..(18): n is a, c, g, or u
uauggaangcnggnauunuaua

SEQ ID NO: 59747 - RNA, 23 nt, Artificial Sequence
  Synthetic
  misc_feature (9)..(9): n is a, c, g, or u
  misc_feature (12)..(12): n is a, c, g, or u
  misc_feature (15)..(15): n is a, c, g, or u
  misc_feature (19)..(19): n is a, c, g, or u
uuauggaangcnggnauunuaua

SEQ ID NO: 59748 - RNA, 24 nt, Artificial Sequence
  Synthetic
  misc_feature (10)..(10): n is a, c, g, or u
  misc_feature (13)..(13): n is a, c, g, or u
  misc_feature (16)..(16): n is a, c, g, or u
  misc_feature (20)..(20): n is a, c, g, or u
uuuauggaangcnggnauunuaua

SEQ ID NO: 59749 - RNA, 18 nt, Artificial Sequence
  Synthetic
guugguucuucuggacua

SEQ ID NO: 59750 - RNA, 19 nt, Artificial Sequence
  Synthetic
uguugguucuucuggacua

SEQ ID NO: 59751 - RNA, 20 nt, Artificial Sequence
  Synthetic
uuguugguucuucuggacua

SEQ ID NO: 59752 - RNA, 21 nt, Artificial Sequence
  Synthetic
cuuguugguucuucuggacua

SEQ ID NO: 59753 - RNA, 22 nt, Artificial Sequence
  Synthetic
ucuuguugguucuucuggacua

SEQ ID NO: 59754 - RNA, 23 nt, Artificial Sequence
  Synthetic
uucuuguugguucuucuggacua

SEQ ID NO: 59755 - RNA, 24 nt, Artificial Sequence
  Synthetic
cuucuuguugguucuucuggacua

SEQ ID NO: 59756 - RNA, 18 nt, Artificial Sequence
  Synthetic
  misc_feature (6)..(6): n is a, c, g, or u
ccgucnguucgggaccua

SEQ ID NO: 59757 - RNA, 19 nt, Artificial Sequence
  Synthetic
  misc_feature (7)..(7): n is a, c, g, or u
cccgucnguucgggaccua

SEQ ID NO: 59758 - RNA, 20 nt, Artificial Sequence
  Synthetic
  misc_feature (8)..(8): n is a, c, g, or u
ucccgucnguucgggaccua

SEQ ID NO: 59759 - RNA, 21 nt, Artificial Sequence
  Synthetic
  misc_feature (9)..(9): n is a, c, g, or u
uucccgucnguucgggaccua

SEQ ID NO: 59760 - RNA, 22 nt, Artificial Sequence
  Synthetic
  misc_feature (10)..(10): n is a, c, g, or u
cuucccgucnguucgggaccua

SEQ ID NO: 59761 - RNA, 23 nt, Artificial Sequence
  Synthetic
  misc_feature (11)..(11): n is a, c, g, or u
ucuucccgucnguucgggaccua

SEQ ID NO: 59762 - RNA, 24 nt, Artificial Sequence
  Synthetic
  misc_feature (12)..(12): n is a, c, g, or u
uucuucccgucnguucgggaccua

SEQ ID NO: 59763 - RNA, 18 nt, Artificial Sequence
  Synthetic
gcuuuaggaaaauaccua

SEQ ID NO: 59764 - RNA, 19 nt, Artificial Sequence
  Synthetic
ggcuuuaggaaaauaccua

SEQ ID NO: 59765 - RNA, 20 nt, Artificial Sequence
  Synthetic
gggcuuuaggaaaauaccua

SEQ ID NO: 59766 - RNA, 21 nt, Artificial Sequence
  Synthetic
ugggcuuuaggaaaauaccua

SEQ ID NO: 59767 - RNA, 22 nt, Artificial Sequence
  Synthetic
  misc_feature (1)..(1): n is a, c, g, or u
nugggcuuuaggaaaauaccua

SEQ ID NO: 59768 - RNA, 23 nt, Artificial Sequence
  Synthetic
  misc_feature (2)..(2): n is a, c, g, or u
cnugggcuuuaggaaaauaccua

SEQ ID NO: 59769 - RNA, 24 nt, Artificial Sequence
  Synthetic
  misc_feature (3)..(3): n is a, c, g, or u
ucnugggcuuuaggaaaauaccua

SEQ ID NO: 59770 - RNA, 18 nt, Artificial Sequence
  Synthetic
ccagucucuccaccucua

SEQ ID NO: 59771 - RNA, 19 nt, Artificial Sequence
  Synthetic
cccagucucuccaccucua

SEQ ID NO: 59772 - RNA, 20 nt, Artificial Sequence
  Synthetic
ccccagucucuccaccucua

SEQ ID NO: 59773 - RNA, 21 nt, Artificial Sequence
  Synthetic
accccagucucuccaccucua

SEQ ID NO: 59774 - RNA, 22 nt, Artificial Sequence
  Synthetic
aaccccagucucuccaccucua

SEQ ID NO: 59775 - RNA, 23 nt, Artificial Sequence
  Synthetic
caaccccagucucuccaccucua

SEQ ID NO: 59776 - RNA, 24 nt, Artificial Sequence
  Synthetic
ccaaccccagucucuccaccucua

SEQ ID NO: 59777 - RNA, 18 nt, Artificial Sequence
  Synthetic
acuucucucaauuuucua

SEQ ID NO: 59778 - RNA, 19 nt, Artificial Sequence
  Synthetic
gacuucucucaauuuucua

SEQ ID NO: 59779 - RNA, 20 nt, Artificial Sequence
  Synthetic
ggacuucucucaauuuucua

SEQ ID NO: 59780 - RNA, 21 nt, Artificial Sequence
  Synthetic
uggacuucucucaauuuucua

SEQ ID NO: 59781 - RNA, 22 nt, Artificial Sequence
  Synthetic
guggacuucucucaauuuucua

SEQ ID NO: 59782 - RNA, 23 nt, Artificial Sequence
  Synthetic
gguggacuucucucaauuuucua

SEQ ID NO: 59783 - RNA, 24 nt, Artificial Sequence
  Synthetic
ugguggacuucucucaauuuucua

SEQ ID NO: 59784 - RNA, 18 nt, Artificial Sequence
  Synthetic
uauauggaugaucuggua

SEQ ID NO: 59785 - RNA, 19 nt, Artificial Sequence
  Synthetic
uuauauggaugaucuggua

SEQ ID NO: 59786 - RNA, 20 nt, Artificial Sequence
  Synthetic
guuauauggaugaucuggua

SEQ ID NO: 59787 - RNA, 21 nt, Artificial Sequence
  Synthetic
aguuauauggaugaucuggua

SEQ ID NO: 59788 - RNA, 22 nt, Artificial Sequence
  Synthetic
uaguuauauggaugaucuggua

SEQ ID NO: 59789 - RNA, 23 nt, Artificial Sequence
  Synthetic
uuaguuauauggaugaucuggua

SEQ ID NO: 59790 - RNA, 24 nt, Artificial Sequence
  Synthetic
uuuaguuauauggaugaucuggua

SEQ ID NO: 59791 - RNA, 18 nt, Artificial Sequence
  Synthetic
uacaucaaagacugugua

SEQ ID NO: 59792 - RNA, 19 nt, Artificial Sequence
  Synthetic
auacaucaaagacugugua

SEQ ID NO: 59793 - RNA, 20 nt, Artificial Sequence
  Synthetic
aauacaucaaagacugugua

SEQ ID NO: 59794 - RNA, 21 nt, Artificial Sequence
  Synthetic
gaauacaucaaagacugugua

SEQ ID NO: 59795 - RNA, 22 nt, Artificial Sequence
  Synthetic
agaauacaucaaagacugugua

SEQ ID NO: 59796 - RNA, 23 nt, Artificial Sequence
  Synthetic
aagaauacaucaaagacugugua

SEQ ID NO: 59797 - RNA, 24 nt, Artificial Sequence
  Synthetic
gaagaauacaucaaagacugugua

SEQ ID NO: 59798 - RNA, 18 nt, Artificial Sequence
  Synthetic
  misc_feature (3)..(3): n is a, c, g, or u
  misc_feature (12)..(12): n is a, c, g, or u
ccncaagaucanauugua

SEQ ID NO: 59799 - RNA, 19 nt, Artificial Sequence
  Synthetic
  misc_feature (4)..(4): n is a, c, g, or u
  misc_feature (13)..(13): n is a, c, g, or u
accncaagaucanauugua

SEQ ID NO: 59800 - RNA, 20 nt, Artificial Sequence
  Synthetic
  misc_feature (5)..(5): n is a, c, g, or u
  misc_feature (14)..(14): n is a, c, g, or u
uaccncaagaucanauugua

SEQ ID NO: 59801 - RNA, 21 nt, Artificial Sequence
  Synthetic
  misc_feature (6)..(6): n is a, c, g, or u
  misc_feature (15)..(15): n is a, c, g, or u
uuaccncaagaucanauugua

SEQ ID NO: 59802 - RNA, 22 nt, Artificial Sequence
  Synthetic
  misc_feature (7)..(7): n is a, c, g, or u
  misc_feature (16)..(16): n is a, c, g, or u
auuaccncaagaucanauugua

SEQ ID NO: 59803 - RNA, 23 nt, Artificial Sequence
  Synthetic
  misc_feature (8)..(8): n is a, c, g, or u
  misc_feature (17)..(17): n is a, c, g, or u
cauuaccncaagaucanauugua

SEQ ID NO: 59804 - RNA, 24 nt, Artificial Sequence
  Synthetic
  misc_feature (1)..(1): n is a, c, g, or u
  misc_feature (9)..(9): n is a, c, g, or u
  misc_feature (18)..(18): n is a, c, g, or u
ncauuaccncaagaucanauugua

SEQ ID NO: 59805 - RNA, 18 nt, Artificial Sequence
  Synthetic
  misc_feature (8)..(8): n is a, c, g, or u
  misc_feature (10)..(10): n is a, c, g, or u
agguuaangnucuuugua

SEQ ID NO: 59806 - RNA, 19 nt, Artificial Sequence
  Synthetic
  misc_feature (1)..(1): n is a, c, g, or u
  misc_feature (9)..(9): n is a, c, g, or u
  misc_feature (11)..(11): n is a, c, g, or u
nagguuaangnucuuugua

SEQ ID NO: 59807 - RNA, 20 nt, Artificial Sequence
  Synthetic
  misc_feature (2)..(2): n is a, c, g, or u
  misc_feature (10)..(10): n is a, c, g, or u
  misc_feature (12)..(12): n is a, c, g, or u
unagguuaangnucuuugua

SEQ ID NO: 59808 - RNA, 21 nt, Artificial Sequence
  Synthetic
  misc_feature (3)..(3): n is a, c, g, or u
  misc_feature (11)..(11): n is a, c, g, or u
  misc_feature (13)..(13): n is a, c, g, or u
aunagguuaangnucuuugua

SEQ ID NO: 59809 - RNA, 22 nt, Artificial Sequence
  Synthetic
  misc_feature (4)..(4): n is a, c, g, or u
  misc_feature (12)..(12): n is a, c, g, or u
  misc_feature (14)..(14): n is a, c, g, or u
gaunagguuaangnucuuugua

SEQ ID NO: 59810 - RNA, 23 nt, Artificial Sequence
  Synthetic
  misc_feature (5)..(5): n is a, c, g, or u
  misc_feature (13)..(13): n is a, c, g, or u
  misc_feature (15)..(15): n is a, c, g, or u
agaunagguuaangnucuuugua

SEQ ID NO: 59811 - RNA, 24 nt, Artificial Sequence
  Synthetic
  misc_feature (6)..(6): n is a, c, g, or u
  misc_feature (14)..(14): n is a, c, g, or u
  misc_feature (16)..(16): n is a, c, g, or u
gagaunagguuaangnucuuugua

SEQ ID NO: 59812 - RNA, 18 nt, Artificial Sequence
  Synthetic
  misc_feature (7)..(7): n is a, c, g, or u
  misc_feature (11)..(11): n is a, c, g, or u
  misc_feature (16)..(16): n is a, c, g, or u
cuuucunugunaacanua

SEQ ID NO: 59813 - RNA, 19 nt, Artificial Sequence
  Synthetic
  misc_feature (8)..(8): n is a, c, g, or u
  misc_feature (12)..(12): n is a, c, g, or u
  misc_feature (17)..(17): n is a, c, g, or u
ccuuucunugunaacanua

SEQ ID NO: 59814 - RNA, 20 nt, Artificial Sequence
  Synthetic
  misc_feature (9)..(9): n is a, c, g, or u
  misc_feature (13)..(13): n is a, c, g, or u
  misc_feature (18)..(18): n is a, c, g, or u
gccuuucunugunaacanua

SEQ ID NO: 59815 - RNA, 21 nt, Artificial Sequence
  Synthetic
  misc_feature (10)..(10): n is a, c, g, or u
  misc_feature (14)..(14): n is a, c, g, or u
  misc_feature (19)..(19): n is a, c, g, or u
ggccuuucunugunaacanua

SEQ ID NO: 59816 - RNA, 22 nt, Artificial Sequence
  Synthetic
  misc_feature (11)..(11): n is a, c, g, or u
  misc_feature (15)..(15): n is a, c, g, or u
  misc_feature (20)..(20): n is a, c, g, or u
aggccuuucunugunaacanua

SEQ ID NO: 59817 - RNA, 23 nt, Artificial Sequence
  Synthetic
  misc_feature (12)..(12): n is a, c, g, or u
  misc_feature (16)..(16): n is a, c, g, or u
  misc_feature (21)..(21): n is a, c, g, or u
aaggccuuucunugunaacanua

SEQ ID NO: 59818 - RNA, 24 nt, Artificial Sequence
  Synthetic
  misc_feature (13)..(13): n is a, c, g, or u
  misc_feature (17)..(17): n is a, c, g, or u
  misc_feature (22)..(22): n is a, c, g, or u
caaggccuuucunugunaacanua

SEQ ID NO: 59819 - RNA, 18 nt, Artificial Sequence
  Synthetic
  misc_feature (5)..(5): n is a, c, g, or u
  misc_feature (7)..(7): n is a, c, g, or u
  misc_feature (16)..(16): n is a, c, g, or u
uuaangnucuuuguanua

SEQ ID NO: 59820 - RNA, 19 nt, Artificial Sequence
  Synthetic
  misc_feature (6)..(6): n is a, c, g, or u
  misc_feature (8)..(8): n is a, c, g, or u
  misc_feature (17)..(17): n is a, c, g, or u
guuaangnucuuuguanua

SEQ ID NO: 59821 - RNA, 20 nt, Artificial Sequence
  Synthetic
  misc_feature (7)..(7): n is a, c, g, or u
  misc_feature (9)..(9): n is a, c, g, or u
  misc_feature (18)..(18): n is a, c, g, or u
gguuaangnucuuuguanua

SEQ ID NO: 59822 - RNA, 21 nt, Artificial Sequence
  Synthetic
  misc_feature (8)..(8): n is a, c, g, or u
  misc_feature (10)..(10): n is a, c, g, or u
  misc_feature (19)..(19): n is a, c, g, or u
agguuaangnucuuuguanua

SEQ ID NO: 59823 - RNA, 22 nt, Artificial Sequence
  Synthetic
  misc_feature (1)..(1): n is a, c, g, or u
  misc_feature (9)..(9): n is a, c, g, or u
  misc_feature (11)..(11): n is a, c, g, or u
  misc_feature (20)..(20): n is a, c, g, or u
nagguuaangnucuuuguanua

SEQ ID NO: 59824 - RNA, 23 nt, Artificial Sequence
  Synthetic
  misc_feature (2)..(2): n is a, c, g, or u
  misc_feature (10)..(10): n is a, c, g, or u
  misc_feature (12)..(12): n is a, c, g, or u
  misc_feature (21)..(21): n is a, c, g, or u
unagguuaangnucuuuguanua

SEQ ID NO: 59825 - RNA, 24 nt, Artificial Sequence
  Synthetic
  misc_feature (3)..(3): n is a, c, g, or u
  misc_feature (11)..(11): n is a, c, g, or u
  misc_feature (13)..(13): n is a, c, g, or u
  misc_feature (22)..(22): n is a, c, g, or u
aunagguuaangnucuuuguanua

SEQ ID NO: 59826 - RNA, 18 nt, Artificial Sequence
  Synthetic
  misc_feature (16)..(16): n is a, c, g, or u
caccgcuucagcccunua

SEQ ID NO: 59827 - RNA, 19 nt, Artificial Sequence
  Synthetic
  misc_feature (17)..(17): n is a, c, g, or u
acaccgcuucagcccunua

SEQ ID NO: 59828 - RNA, 20 nt, Artificial Sequence
  Synthetic
  misc_feature (18)..(18): n is a, c, g, or u
gacaccgcuucagcccunua

SEQ ID NO: 59829 - RNA, 21 nt, Artificial Sequence
  Synthetic
  misc_feature (19)..(19): n is a, c, g, or u
cgacaccgcuucagcccunua

SEQ ID NO: 59830 - RNA, 22 nt, Artificial Sequence
  Synthetic
  misc_feature (20)..(20): n is a, c, g, or u
ucgacaccgcuucagcccunua

SEQ ID NO: 59831 - RNA, 23 nt, Artificial Sequence
  Synthetic
  misc_feature (21)..(21): n is a, c, g, or u
cucgacaccgcuucagcccunua

SEQ ID NO: 59832 - RNA, 24 nt, Artificial Sequence
  Synthetic
  misc_feature (22)..(22): n is a, c, g, or u
acucgacaccgcuucagcccunua

SEQ ID NO: 59833 - RNA, 18 nt, Artificial Sequence
  Synthetic
  misc_feature (6)..(6): n is a, c, g, or u
  misc_feature (9)..(9): n is a, c, g, or u
  misc_feature (12)..(12): n is a, c, g, or u
  misc_feature (16)..(16): n is a, c, g, or u
uggaangcnggnauunua

SEQ ID NO: 59834 - RNA, 19 nt, Artificial Sequence
  Synthetic
  misc_feature (7)..(7): n is a, c, g, or u
  misc_feature (10)..(10): n is a, c, g, or u
  misc_feature (13)..(13): n is a, c, g, or u
  misc_feature (17)..(17): n is a, c, g, or u
auggaangcnggnauunua

SEQ ID NO: 59835 - RNA, 20 nt, Artificial Sequence
  Synthetic
  misc_feature (8)..(8): n is a, c, g, or u
  misc_feature (11)..(11): n is a, c, g, or u
  misc_feature (14)..(14): n is a, c, g, or u
  misc_feature (18)..(18): n is a, c, g, or u
uauggaangcnggnauunua

SEQ ID NO: 59836 - RNA, 21 nt, Artificial Sequence
  Synthetic
  misc_feature (9)..(9): n is a, c, g, or u
  misc_feature (12)..(12): n is a, c, g, or u
  misc_feature (15)..(15): n is a, c, g, or u
  misc_feature (19)..(19): n is a, c, g, or u
uuauggaangcnggnauunua

SEQ ID NO: 59837 - RNA, 22 nt, Artificial Sequence
  Synthetic
  misc_feature (10)..(10): n is a, c, g, or u
  misc_feature (13)..(13): n is a, c, g, or u
  misc_feature (16)..(16): n is a, c, g, or u
  misc_feature (20)..(20): n is a, c, g, or u
uuuauggaangcnggnauunua

SEQ ID NO: 59838 - RNA, 23 nt, Artificial Sequence
  Synthetic
  misc_feature (11)..(11): n is a, c, g, or u
  misc_feature (14)..(14): n is a, c, g, or u
  misc_feature (17)..(17): n is a, c, g, or u
  misc_feature (21)..(21): n is a, c, g, or u
cuuuauggaangcnggnauunua

SEQ ID NO: 59839 - RNA, 24 nt, Artificial Sequence
  Synthetic
  misc_feature (12)..(12): n is a, c, g, or u
  misc_feature (15)..(15): n is a, c, g, or u
  misc_feature (18)..(18): n is a, c, g, or u
  misc_feature (22)..(22): n is a, c, g, or u
acuuuauggaangcnggnauunua

SEQ ID NO: 59840 - RNA, 18 nt, Artificial Sequence
  Synthetic
  misc_feature (9)..(9): n is a, c, g, or u
  misc_feature (14)..(14): n is a, c, g, or u
acaugggcnuaaanauua

SEQ ID NO: 59841 - RNA, 19 nt, Artificial Sequence
  Synthetic
  misc_feature (10)..(10): n is a, c, g, or u
  misc_feature (15)..(15): n is a, c, g, or u
aacaugggcnuaaanauua

SEQ ID NO: 59842 - RNA, 20 nt, Artificial Sequence
  Synthetic
  misc_feature (11)..(11): n is a, c, g, or u
  misc_feature (16)..(16): n is a, c, g, or u
uaacaugggcnuaaanauua

SEQ ID NO: 59843 - RNA, 21 nt, Artificial Sequence
  Synthetic
  misc_feature (12)..(12): n is a, c, g, or u
  misc_feature (17)..(17): n is a, c, g, or u
cuaacaugggcnuaaanauua

SEQ ID NO: 59844 - RNA, 22 nt, Artificial Sequence
  Synthetic
  misc_feature (13)..(13): n is a, c, g, or u
  misc_feature (18)..(18): n is a, c, g, or u
acuaacaugggcnuaaanauua

SEQ ID NO: 59845 - RNA, 23 nt, Artificial Sequence
  Synthetic
  misc_feature (1)..(1): n is a, c, g, or u
  misc_feature (14)..(14): n is a, c, g, or u
  misc_feature (19)..(19): n is a, c, g, or u
nacuaacaugggcnuaaanauua

SEQ ID NO: 59846 - RNA, 24 nt, Artificial Sequence
  Synthetic
  misc_feature (2)..(2): n is a, c, g, or u
  misc_feature (15)..(15): n is a, c, g, or u
  misc_feature (20)..(20): n is a, c, g, or u
anacuaacaugggcnuaaanauua

SEQ ID NO: 59847 - RNA, 18 nt, Artificial Sequence
  Synthetic
ugucuuuucgccaacuua

SEQ ID NO: 59848 - RNA, 19 nt, Artificial Sequence
  Synthetic
uugucuuuucgccaacuua

SEQ ID NO: 59849 - RNA, 20 nt, Artificial Sequence
  Synthetic
uuugucuuuucgccaacuua

SEQ ID NO: 59850 - RNA, 21 nt, Artificial Sequence
  Synthetic
uuuugucuuuucgccaacuua

SEQ ID NO: 59851 - RNA, 22 nt, Artificial Sequence
  Synthetic
cuuuugucuuuucgccaacuua

SEQ ID NO: 59852 - RNA, 23 nt, Artificial Sequence
  Synthetic
gcuuuugucuuuucgccaacuua

SEQ ID NO: 59853 - RNA, 24 nt, Artificial Sequence
  Synthetic
ggcuuuugucuuuucgccaacuua

SEQ ID NO: 59854 - RNA, 18 nt, Artificial Sequence
  Synthetic
cauggacauugacccuua

SEQ ID NO: 59855 - RNA, 19 nt, Artificial Sequence
  Synthetic
gcauggacauugacccuua

SEQ ID NO: 59856 - RNA, 20 nt, Artificial Sequence
  Synthetic
ggcauggacauugacccuua

SEQ ID NO: 59857 - RNA, 21 nt, Artificial Sequence
  Synthetic
gggcauggacauugacccuua

SEQ ID NO: 59858 - RNA, 22 nt, Artificial Sequence
  Synthetic
ggggcauggacauugacccuua

SEQ ID NO: 59859 - RNA, 23 nt, Artificial Sequence
  Synthetic
uggggcauggacauugacccuua

SEQ ID NO: 59860 - RNA, 24 nt, Artificial Sequence
  Synthetic
uuggggcauggacauugacccuua

SEQ ID NO: 59861 - RNA, 18 nt, Artificial Sequence
  Synthetic
  misc_feature (3)..(3): n is a, c, g, or u
agnuugccaacagucuua

SEQ ID NO: 59862 - RNA, 19 nt, Artificial Sequence
  Synthetic
  misc_feature (1)..(1): n is a, c, g, or u
  misc_feature (4)..(4): n is a, c, g, or u
nagnuugccaacagucuua

SEQ ID NO: 59863 - RNA, 20 nt, Artificial Sequence
  Synthetic
  misc_feature (2)..(2): n is a, c, g, or u
  misc_feature (5)..(5): n is a, c, g, or u
gnagnuugccaacagucuua

SEQ ID NO: 59864 - RNA, 21 nt, Artificial Sequence
  Synthetic
  misc_feature (1)..(1): n is a, c, g, or u
  misc_feature (3)..(3): n is a, c, g, or u
  misc_feature (6)..(6): n is a, c, g, or u
ngnagnuugccaacagucuua

SEQ ID NO: 59865 - RNA, 22 nt, Artificial Sequence
  Synthetic
  misc_feature (1)..(2): n is a, c, g, or u
  misc_feature (4)..(4): n is a, c, g, or u
  misc_feature (7)..(7): n is a, c, g, or u
nngnagnuugccaacagucuua

SEQ ID NO: 59866 - RNA, 23 nt, Artificial Sequence
  Synthetic
  misc_feature (2)..(3): n is a, c, g, or u
  misc_feature (5)..(5): n is a, c, g, or u
  misc_feature (8)..(8): n is a, c, g, or u
cnngnagnuugccaacagucuua

SEQ ID NO: 59867 - RNA, 24 nt, Artificial Sequence
  Synthetic
  misc_feature (3)..(4): n is a, c, g, or u
  misc_feature (6)..(6): n is a, c, g, or u
  misc_feature (9)..(9): n is a, c, g, or u
ccnngnagnuugccaacagucuua

SEQ ID NO: 59868 - RNA, 18 nt, Artificial Sequence
  Synthetic
cugucuggcuuuuaguua

SEQ ID NO: 59869 - RNA, 19 nt, Artificial Sequence
  Synthetic
acugucuggcuuuuaguua

SEQ ID NO: 59870 - RNA, 20 nt, Artificial Sequence
  Synthetic
cacugucuggcuuuuaguua

SEQ ID NO: 59871 - RNA, 21 nt, Artificial Sequence
  Synthetic
ccacugucuggcuuuuaguua

SEQ ID NO: 59872 - RNA, 22 nt, Artificial Sequence
  Synthetic
cccacugucuggcuuuuaguua

SEQ ID NO: 59873 - RNA, 23 nt, Artificial Sequence
  Synthetic
ccccacugucuggcuuuuaguua

SEQ ID NO: 59874 - RNA, 24 nt, Artificial Sequence
  Synthetic
cccccacugucuggcuuuuaguua

SEQ ID NO: 59875 - RNA, 18 nt, Artificial Sequence
  Synthetic
cggaaacuacuguuguua

SEQ ID NO: 59876 - RNA, 19 nt, Artificial Sequence
  Synthetic
ccggaaacuacuguuguua

SEQ ID NO: 59877 - RNA, 20 nt, Artificial Sequence
  Synthetic
uccggaaacuacuguuguua

SEQ ID NO: 59878 - RNA, 21 nt, Artificial Sequence
  Synthetic
uuccggaaacuacuguuguua

SEQ ID NO: 59879 - RNA, 22 nt, Artificial Sequence
  Synthetic
cuuccggaaacuacuguuguua

SEQ ID NO: 59880 - RNA, 23 nt, Artificial Sequence
  Synthetic
acuuccggaaacuacuguuguua

SEQ ID NO: 59881 - RNA, 24 nt, Artificial Sequence
  Synthetic
cacuuccggaaacuacuguuguua

SEQ ID NO: 59882 - RNA, 18 nt, Artificial Sequence
  Synthetic
  misc_feature (3)..(3): n is a, c, g, or u
canuauuugcauacuuua

SEQ ID NO: 59883 - RNA, 19 nt, Artificial Sequence
  Synthetic
  misc_feature (4)..(4): n is a, c, g, or u
acanuauuugcauacuuua

SEQ ID NO: 59884 - RNA, 20 nt, Artificial Sequence
  Synthetic
  misc_feature (5)..(5): n is a, c, g, or u
gacanuauuugcauacuuua

SEQ ID NO: 59885 - RNA, 21 nt, Artificial Sequence
  Synthetic
  misc_feature (6)..(6): n is a, c, g, or u
agacanuauuugcauacuuua

SEQ ID NO: 59886 - RNA, 22 nt, Artificial Sequence
  Synthetic
  misc_feature (7)..(7): n is a, c, g, or u
cagacanuauuugcauacuuua

SEQ ID NO: 59887 - RNA, 23 nt, Artificial Sequence
  Synthetic
  misc_feature (8)..(8): n is a, c, g, or u
ccagacanuauuugcauacuuua

SEQ ID NO: 59888 - RNA, 24 nt, Artificial Sequence
  Synthetic
  misc_feature (9)..(9): n is a, c, g, or u
accagacanuauuugcauacuuua

SEQ ID NO: 59889 - RNA, 18 nt, Artificial Sequence
  Synthetic
  misc_feature (9)..(9): n is a, c, g, or u
ccaucaucnugggcuuua

SEQ ID NO: 59890 - RNA, 19 nt, Artificial Sequence
  Synthetic
  misc_feature (10)..(10): n is a, c, g, or u
cccaucaucnugggcuuua

SEQ ID NO: 59891 - RNA, 20 nt, Artificial Sequence
  Synthetic
  misc_feature (11)..(11): n is a, c, g, or u
ucccaucaucnugggcuuua

SEQ ID NO: 59892 - RNA, 21 nt, Artificial Sequence
  Synthetic
  misc_feature (12)..(12): n is a, c, g, or u
aucccaucaucnugggcuuua

SEQ ID NO: 59893 - RNA, 22 nt, Artificial Sequence
  Synthetic
  misc_feature (13)..(13): n is a, c, g, or u
caucccaucaucnugggcuuua

SEQ ID NO: 59894 - RNA, 23 nt, Artificial Sequence
  Synthetic
  misc_feature (14)..(14): n is a, c, g, or u
ccaucccaucaucnugggcuuua

SEQ ID NO: 59895 - RNA, 24 nt, Artificial Sequence
  Synthetic
  misc_feature (15)..(15): n is a, c, g, or u
cccaucccaucaucnugggcuuua

SEQ ID NO: 59896 - RNA, 18 nt, Artificial Sequence
  Synthetic
gggucgcaccucucuuua

SEQ ID NO: 59897 - RNA, 19 nt, Artificial Sequence
  Synthetic
cgggucgcaccucucuuua

SEQ ID NO: 59898 - RNA, 20 nt, Artificial Sequence
  Synthetic
acgggucgcaccucucuuua

SEQ ID NO: 59899 - RNA, 18 nt, Artificial Sequence
  Synthetic
  misc_feature (4)..(4): n is a, c, g, or u
  misc_feature (10)..(10): n is a, c, g, or u
  misc_feature (13)..(13): n is a, c, g, or u
uuunaauacnucnaaaac

SEQ ID NO: 59900 - RNA, 19 nt, Artificial Sequence
  Synthetic
  misc_feature (5)..(5): n is a, c, g, or u
  misc_feature (11)..(11): n is a, c, g, or u
  misc_feature (14)..(14): n is a, c, g, or u
auuunaauacnucnaaaac

SEQ ID NO: 59901 - RNA, 20 nt, Artificial Sequence
  Synthetic
  misc_feature (6)..(6): n is a, c, g, or u
  misc_feature (12)..(12): n is a, c, g, or u
  misc_feature (15)..(15): n is a, c, g, or u
cauuunaauacnucnaaaac

SEQ ID NO: 59902 - RNA, 21 nt, Artificial Sequence
  Synthetic
  misc_feature (7)..(7): n is a, c, g, or u
  misc_feature (13)..(13): n is a, c, g, or u
  misc_feature (16)..(16): n is a, c, g, or u
ccauuunaauacnucnaaaac

SEQ ID NO: 59903 - RNA, 22 nt, Artificial Sequence
  Synthetic
  misc_feature (8)..(8): n is a, c, g, or u
  misc_feature (14)..(14): n is a, c, g, or u
  misc_feature (17)..(17): n is a, c, g, or u
uccauuunaauacnucnaaaac

SEQ ID NO: 59904 - RNA, 23 nt, Artificial Sequence
  Synthetic
  misc_feature (9)..(9): n is a, c, g, or u
  misc_feature (15)..(15): n is a, c, g, or u
  misc_feature (18)..(18): n is a, c, g, or u
auccauuunaauacnucnaaaac

SEQ ID NO: 59905 - RNA, 24 nt, Artificial Sequence
  Synthetic
  misc_feature (10)..(10): n is a, c, g, or u
  misc_feature (16)..(16): n is a, c, g, or u
  misc_feature (19)..(19): n is a, c, g, or u
uauccauuunaauacnucnaaaac

SEQ ID NO: 59906 - RNA, 18 nt, Artificial Sequence
  Synthetic
  misc_feature (14)..(14): n is a, c, g, or u
ugggacuucaacanaaac

SEQ ID NO: 59907 - RNA, 19 nt, Artificial Sequence
  Synthetic
  misc_feature (1)..(1): n is a, c, g, or u
  misc_feature (15)..(15): n is a, c, g, or u
nugggacuucaacanaaac

SEQ ID NO: 59908 - RNA, 20 nt, Artificial Sequence
  Synthetic
  misc_feature (2)..(2): n is a, c, g, or u
  misc_feature (16)..(16): n is a, c, g, or u
anugggacuucaacanaaac

SEQ ID NO: 59909 - RNA, 21 nt, Artificial Sequence
  Synthetic
  misc_feature (3)..(3): n is a, c, g, or u
  misc_feature (17)..(17): n is a, c, g, or u
ganugggacuucaacanaaac

SEQ ID NO: 59910 - RNA, 22 nt, Artificial Sequence
  Synthetic
  misc_feature (4)..(4): n is a, c, g, or u
  misc_feature (18)..(18): n is a, c, g, or u
cganugggacuucaacanaaac

SEQ ID NO: 59911 - RNA, 23 nt, Artificial Sequence
  Synthetic
  misc_feature (5)..(5): n is a, c, g, or u
  misc_feature (19)..(19): n is a, c, g, or u
ccganugggacuucaacanaaac

SEQ ID NO: 59912 - RNA, 24 nt, Artificial Sequence
  Synthetic
  misc_feature (6)..(6): n is a, c, g, or u
  misc_feature (20)..(20): n is a, c, g, or u
cccganugggacuucaacanaaac

SEQ ID NO: 59913 - RNA, 18 nt, Artificial Sequence
  Synthetic
  misc_feature (6)..(6): n is a, c, g, or u
cccganugggacuucaac

SEQ ID NO: 59914 - RNA, 19 nt, Artificial Sequence
  Synthetic
  misc_feature (7)..(7): n is a, c, g, or u
ucccganugggacuucaac

SEQ ID NO: 59915 - RNA, 20 nt, Artificial Sequence
  Synthetic
  misc_feature (8)..(8): n is a, c, g, or u
gucccganugggacuucaac

SEQ ID NO: 59916 - RNA, 21 nt, Artificial Sequence
  Synthetic
  misc_feature (9)..(9): n is a, c, g, or u
agucccganugggacuucaac

SEQ ID NO: 59917 - RNA, 22 nt, Artificial Sequence
  Synthetic
  misc_feature (10)..(10): n is a, c, g, or u
cagucccganugggacuucaac

SEQ ID NO: 59918 - RNA, 23 nt, Artificial Sequence
  Synthetic
  misc_feature (11)..(11): n is a, c, g, or u
gcagucccganugggacuucaac

SEQ ID NO: 59919 - RNA, 24 nt, Artificial Sequence
  Synthetic
  misc_feature (12)..(12): n is a, c, g, or u
agcagucccganugggacuucaac

SEQ ID NO: 59920 - RNA, 18 nt, Artificial Sequence
  Synthetic
  misc_feature (11)..(11): n is a, c, g, or u
caccauauucnugggaac

SEQ ID NO: 59921 - RNA, 19 nt, Artificial Sequence
  Synthetic
  misc_feature (12)..(12): n is a, c, g, or u
ucaccauauucnugggaac

SEQ ID NO: 59922 - RNA, 20 nt, Artificial Sequence
  Synthetic
  misc_feature (13)..(13): n is a, c, g, or u
gucaccauauucnugggaac

SEQ ID NO: 59923 - RNA, 21 nt, Artificial Sequence
  Synthetic
  misc_feature (14)..(14): n is a, c, g, or u
ggucaccauauucnugggaac

SEQ ID NO: 59924 - RNA, 22 nt, Artificial Sequence
  Synthetic
  misc_feature (15)..(15): n is a, c, g, or u
gggucaccauauucnugggaac

SEQ ID NO: 59925 - RNA, 23 nt, Artificial Sequence
  Synthetic
  misc_feature (16)..(16): n is a, c, g, or u
ugggucaccauauucnugggaac

SEQ ID NO: 59926 - RNA, 24 nt, Artificial Sequence
  Synthetic
  misc_feature (17)..(17): n is a, c, g, or u
gugggucaccauauucnugggaac

SEQ ID NO: 59927 - RNA, 18 nt, Artificial Sequence
  Synthetic
  misc_feature (14)..(14): n is a, c, g, or u
gggggcccugcuangaac

SEQ ID NO: 59928 - RNA, 19 nt, Artificial Sequence
  Synthetic
  misc_feature (15)..(15): n is a, c, g, or u
ugggggcccugcuangaac

SEQ ID NO: 59929 - RNA, 20 nt, Artificial Sequence
  Synthetic
  misc_feature (16)..(16): n is a, c, g, or u
cugggggcccugcuangaac

SEQ ID NO: 59930 - RNA, 21 nt, Artificial Sequence
  Synthetic
  misc_feature (17)..(17): n is a, c, g, or u
acugggggcccugcuangaac

SEQ ID NO: 59931 - RNA, 22 nt, Artificial Sequence
  Synthetic
  misc_feature (18)..(18): n is a, c, g, or u
gacugggggcccugcuangaac

SEQ ID NO: 59932 - RNA, 23 nt, Artificial Sequence
  Synthetic
  misc_feature (19)..(19): n is a, c, g, or u
agacugggggcccugcuangaac

SEQ ID NO: 59933 - RNA, 24 nt, Artificial Sequence
  Synthetic
  misc_feature (20)..(20): n is a, c, g, or u
aagacugggggcccugcuangaac

SEQ ID NO: 59934 - RNA, 18 nt, Artificial Sequence
  Synthetic
  misc_feature (9)..(9): n is a, c, g, or u
  misc_feature (12)..(12): n is a, c, g, or u
aacuaugunaanacuaac

SEQ ID NO: 59935 - RNA, 19 nt, Artificial Sequence
  Synthetic
  misc_feature (10)..(10): n is a, c, g, or u
  misc_feature (13)..(13): n is a, c, g, or u
uaacuaugunaanacuaac

SEQ ID NO: 59936 - RNA, 20 nt, Artificial Sequence
  Synthetic
  misc_feature (11)..(11): n is a, c, g, or u
  misc_feature (14)..(14): n is a, c, g, or u
uuaacuaugunaanacuaac

SEQ ID NO: 59937 - RNA, 21 nt, Artificial Sequence
  Synthetic
  misc_feature (12)..(12): n is a, c, g, or u
  misc_feature (15)..(15): n is a, c, g, or u
guuaacuaugunaanacuaac

SEQ ID NO: 59938 - RNA, 22 nt, Artificial Sequence
  Synthetic
  misc_feature (1)..(1): n is a, c, g, or u
  misc_feature (13)..(13): n is a, c, g, or u
  misc_feature (16)..(16): n is a, c, g, or u
nguuaacuaugunaanacuaac

SEQ ID NO: 59939 - RNA, 23 nt, Artificial Sequence
  Synthetic
  misc_feature (2)..(2): n is a, c, g, or u
  misc_feature (14)..(14): n is a, c, g, or u
  misc_feature (17)..(17): n is a, c, g, or u
unguuaacuaugunaanacuaac

SEQ ID NO: 59940 - RNA, 24 nt, Artificial Sequence
  Synthetic
  misc_feature (3)..(3): n is a, c, g, or u
  misc_feature (15)..(15): n is a, c, g, or u
  misc_feature (18)..(18): n is a, c, g, or u
gunguuaacuaugunaanacuaac

SEQ ID NO: 59941 - RNA, 18 nt, Artificial Sequence
  Synthetic
ggguucacacccccacac

SEQ ID NO: 59942 - RNA, 19 nt, Artificial Sequence
  Synthetic
  misc_feature (1)..(1): n is a, c, g, or u
nggguucacacccccacac

SEQ ID NO: 59943 - RNA, 20 nt, Artificial Sequence
  Synthetic
  misc_feature (2)..(2): n is a, c, g, or u
cnggguucacacccccacac

SEQ ID NO: 59944 - RNA, 21 nt, Artificial Sequence
  Synthetic
  misc_feature (3)..(3): n is a, c, g, or u
ccnggguucacacccccacac

SEQ ID NO: 59945 - RNA, 22 nt, Artificial Sequence
  Synthetic
  misc_feature (4)..(4): n is a, c, g, or u
uccnggguucacacccccacac

SEQ ID NO: 59946 - RNA, 23 nt, Artificial Sequence
  Synthetic
  misc_feature (5)..(5): n is a, c, g, or u
guccnggguucacacccccacac

SEQ ID NO: 59947 - RNA, 24 nt, Artificial Sequence
  Synthetic
  misc_feature (6)..(6): n is a, c, g, or u
gguccnggguucacacccccacac

SEQ ID NO: 59948 - RNA, 18 nt, Artificial Sequence
  Synthetic
acgucgcauggagaccac

SEQ ID NO: 59949 - RNA, 19 nt, Artificial Sequence
  Synthetic
cacgucgcauggagaccac

SEQ ID NO: 59950 - RNA, 20 nt, Artificial Sequence
  Synthetic
gcacgucgcauggagaccac

SEQ ID NO: 59951 - RNA, 21 nt, Artificial Sequence
  Synthetic
ugcacgucgcauggagaccac

SEQ ID NO: 59952 - RNA, 22 nt, Artificial Sequence
  Synthetic
cugcacgucgcauggagaccac

SEQ ID NO: 59953 - RNA, 23 nt, Artificial Sequence
  Synthetic
ucugcacgucgcauggagaccac

SEQ ID NO: 59954 - RNA, 24 nt, Artificial Sequence
  Synthetic
cucugcacgucgcauggagaccac

SEQ ID NO: 59955 - RNA, 18 nt, Artificial Sequence
  Synthetic
gaacauggacaacaucac

SEQ ID NO: 59956 - RNA, 19 nt, Artificial Sequence
  Synthetic
  misc_feature (1)..(1): n is a, c, g, or u
ngaacauggacaacaucac

SEQ ID NO: 59957 - RNA, 20 nt, Artificial Sequence
  Synthetic
  misc_feature (2)..(2): n is a, c, g, or u
angaacauggacaacaucac

SEQ ID NO: 59958 - RNA, 21 nt, Artificial Sequence
  Synthetic
  misc_feature (3)..(3): n is a, c, g, or u
uangaacauggacaacaucac

SEQ ID NO: 59959 - RNA, 22 nt, Artificial Sequence
  Synthetic
  misc_feature (4)..(4): n is a, c, g, or u
cuangaacauggacaacaucac

SEQ ID NO: 59960 - RNA, 23 nt, Artificial Sequence
  Synthetic
  misc_feature (5)..(5): n is a, c, g, or u
gcuangaacauggacaacaucac

SEQ ID NO: 59961 - RNA, 24 nt, Artificial Sequence
  Synthetic
  misc_feature (6)..(6): n is a, c, g, or u
ugcuangaacauggacaacaucac

SEQ ID NO: 59962 - RNA, 18 nt, Artificial Sequence
  Synthetic
  misc_feature (14)..(14): n is a, c, g, or u
gggaugcuuuaganucac

SEQ ID NO: 59963 - RNA, 19 nt, Artificial Sequence
  Synthetic
  misc_feature (1)..(1): n is a, c, g, or u
  misc_feature (15)..(15): n is a, c, g, or u
ngggaugcuuuaganucac

SEQ ID NO: 59964 - RNA, 20 nt, Artificial Sequence
  Synthetic
  misc_feature (2)..(2): n is a, c, g, or u
  misc_feature (16)..(16): n is a, c, g, or u
cngggaugcuuuaganucac

SEQ ID NO: 59965 - RNA, 21 nt, Artificial Sequence
  Synthetic
  misc_feature (3)..(3): n is a, c, g, or u
  misc_feature (17)..(17): n is a, c, g, or u
acngggaugcuuuaganucac

SEQ ID NO: 59966 - RNA, 22 nt, Artificial Sequence
  Synthetic
  misc_feature (4)..(4): n is a, c, g, or u
  misc_feature (18)..(18): n is a, c, g, or u
uacngggaugcuuuaganucac

SEQ ID NO: 59967 - RNA, 23 nt, Artificial Sequence
  Synthetic
  misc_feature (1)..(1): n is a, c, g, or u
  misc_feature (5)..(5): n is a, c, g, or u
  misc_feature (19)..(19): n is a, c, g, or u
nuacngggaugcuuuaganucac

SEQ ID NO: 59968 - RNA, 24 nt, Artificial Sequence
  Synthetic
  misc_feature (2)..(2): n is a, c, g, or u
  misc_feature (6)..(6): n is a, c, g, or u
  misc_feature (20)..(20): n is a, c, g, or u
unuacngggaugcuuuaganucac

SEQ ID NO: 59969 - RNA, 18 nt, Artificial Sequence
  Synthetic
  misc_feature (12)..(12): n is a, c, g, or u
aucaaucuucungaagac

SEQ ID NO: 59970 - RNA, 19 nt, Artificial Sequence
  Synthetic
  misc_feature (13)..(13): n is a, c, g, or u
caucaaucuucungaagac

SEQ ID NO: 59971 - RNA, 20 nt, Artificial Sequence
  Synthetic
  misc_feature (14)..(14): n is a, c, g, or u
ucaucaaucuucungaagac

SEQ ID NO: 59972 - RNA, 21 nt, Artificial Sequence
  Synthetic
  misc_feature (15)..(15): n is a, c, g, or u
aucaucaaucuucungaagac

SEQ ID NO: 59973 - RNA, 22 nt, Artificial Sequence
  Synthetic
  misc_feature (16)..(16): n is a, c, g, or u
caucaucaaucuucungaagac

SEQ ID NO: 59974 - RNA, 23 nt, Artificial Sequence
  Synthetic
  misc_feature (17)..(17): n is a, c, g, or u
acaucaucaaucuucungaagac

SEQ ID NO: 59975 - RNA, 24 nt, Artificial Sequence
  Synthetic
  misc_feature (18)..(18): n is a, c, g, or u
cacaucaucaaucuucungaagac

SEQ ID NO: 59976 - RNA, 18 nt, Artificial Sequence
  Synthetic
aaacuacuguuguuagac

SEQ ID NO: 59977 - RNA, 19 nt, Artificial Sequence
  Synthetic
gaaacuacuguuguuagac

SEQ ID NO: 59978 - RNA, 20 nt, Artificial Sequence
  Synthetic
ggaaacuacuguuguuagac

SEQ ID NO: 59979 - RNA, 21 nt, Artificial Sequence
  Synthetic
cggaaacuacuguuguuagac

SEQ ID NO: 59980 - RNA, 22 nt, Artificial Sequence
  Synthetic
ccggaaacuacuguuguuagac

SEQ ID NO: 59981 - RNA, 23 nt, Artificial Sequence
  Synthetic
uccggaaacuacuguuguuagac

SEQ ID NO: 59982 - RNA, 24 nt, Artificial Sequence
  Synthetic
uuccggaaacuacuguuguuagac

SEQ ID NO: 59983 - RNA, 18 nt, Artificial Sequence
  Synthetic
  misc_feature (10)..(10): n is a, c, g, or u
agcaccucunucaacgac

SEQ ID NO: 59984 - RNA, 19 nt, Artificial Sequence
  Synthetic
  misc_feature (11)..(11): n is a, c, g, or u
gagcaccucunucaacgac

SEQ ID NO: 59985 - RNA, 20 nt, Artificial Sequence
  Synthetic
  misc_feature (12)..(12): n is a, c, g, or u
ggagcaccucunucaacgac

SEQ ID NO: 59986 - RNA, 21 nt, Artificial Sequence
  Synthetic
  misc_feature (13)..(13): n is a, c, g, or u
gggagcaccucunucaacgac

SEQ ID NO: 59987 - RNA, 22 nt, Artificial Sequence
  Synthetic
  misc_feature (14)..(14): n is a, c, g, or u
ugggagcaccucunucaacgac

SEQ ID NO: 59988 - RNA, 23 nt, Artificial Sequence
  Synthetic
  misc_feature (15)..(15): n is a, c, g, or u
augggagcaccucunucaacgac

SEQ ID NO: 59989 - RNA, 24 nt, Artificial Sequence
  Synthetic
  misc_feature (16)..(16): n is a, c, g, or u
caugggagcaccucunucaacgac

SEQ ID NO: 59990 - RNA, 18 nt, Artificial Sequence
  Synthetic
ucugccguuccagccgac

SEQ ID NO: 59991 - RNA, 19 nt, Artificial Sequence
  Synthetic
gucugccguuccagccgac

SEQ ID NO: 59992 - RNA, 20 nt, Artificial Sequence
  Synthetic
cgucugccguuccagccgac

SEQ ID NO: 59993 - RNA, 21 nt, Artificial Sequence
  Synthetic
  misc_feature (1)..(1): n is a, c, g, or u
ncgucugccguuccagccgac

SEQ ID NO: 59994 - RNA, 22 nt, Artificial Sequence
  Synthetic
  misc_feature (2)..(2): n is a, c, g, or u
uncgucugccguuccagccgac

SEQ ID NO: 59995 - RNA, 23 nt, Artificial Sequence
  Synthetic
  misc_feature (3)..(3): n is a, c, g, or u
cuncgucugccguuccagccgac

SEQ ID NO: 59996 - RNA, 24 nt, Artificial Sequence
  Synthetic
  misc_feature (4)..(4): n is a, c, g, or u
ucuncgucugccguuccagccgac

SEQ ID NO: 59997 - RNA, 18 nt, Artificial Sequence
  Synthetic
uguuccaaacccucggac

SEQ ID NO: 59998 - RNA, 19 nt, Artificial Sequence
  Synthetic
cuguuccaaacccucggac

SEQ ID NO: 59999 - RNA, 20 nt, Artificial Sequence
  Synthetic
gcuguuccaaacccucggac

SEQ ID NO: 60000 - RNA, 21 nt, Artificial Sequence
  Synthetic
ugcuguuccaaacccucggac

SEQ ID NO: 60001 - RNA, 22 nt, Artificial Sequence
  Synthetic
  misc_feature (1)..(1): n is a, c, g, or u
nugcuguuccaaacccucggac

SEQ ID NO: 60002 - RNA, 23 nt, Artificial Sequence
  Synthetic
  misc_feature (2)..(2): n is a, c, g, or u
gnugcuguuccaaacccucggac

SEQ ID NO: 60003 - RNA, 24 nt, Artificial Sequence
  Synthetic
  misc_feature (3)..(3): n is a, c, g, or u
ugnugcuguuccaaacccucggac

SEQ ID NO: 60004 - RNA, 18 nt, Artificial Sequence
  Synthetic
  misc_feature (12)..(12): n is a, c, g, or u
agcagucccganugggac

SEQ ID NO: 60005 - RNA, 19 nt, Artificial Sequence
  Synthetic
  misc_feature (13)..(13): n is a, c, g, or u
cagcagucccganugggac

SEQ ID NO: 60006 - RNA, 20 nt, Artificial Sequence
  Synthetic
  misc_feature (14)..(14): n is a, c, g, or u
ccagcagucccganugggac

SEQ ID NO: 60007 - RNA, 21 nt, Artificial Sequence
  Synthetic
  misc_feature (15)..(15): n is a, c, g, or u
uccagcagucccganugggac

SEQ ID NO: 60008 - RNA, 22 nt, Artificial Sequence
  Synthetic
  misc_feature (16)..(16): n is a, c, g, or u
uuccagcagucccganugggac

SEQ ID NO: 60009 - RNA, 23 nt, Artificial Sequence
  Synthetic
  misc_feature (17)..(17): n is a, c, g, or u
auuccagcagucccganugggac

SEQ ID NO: 60010 - RNA, 24 nt, Artificial Sequence
  Synthetic
  misc_feature (18)..(18): n is a, c, g, or u
aauuccagcagucccganugggac

SEQ ID NO: 60011 - RNA, 18 nt, Artificial Sequence
  Synthetic
uggcuuuggggcauggac

SEQ ID NO: 60012 - RNA, 19 nt, Artificial Sequence
  Synthetic
guggcuuuggggcauggac

SEQ ID NO: 60013 - RNA, 20 nt, Artificial Sequence
  Synthetic
gguggcuuuggggcauggac

SEQ ID NO: 60014 - RNA, 21 nt, Artificial Sequence
  Synthetic
ggguggcuuuggggcauggac

SEQ ID NO: 60015 - RNA, 22 nt, Artificial Sequence
  Synthetic
uggguggcuuuggggcauggac

SEQ ID NO: 60016 - RNA, 23 nt, Artificial Sequence
  Synthetic
uuggguggcuuuggggcauggac

SEQ ID NO: 60017 - RNA, 24 nt, Artificial Sequence
  Synthetic
cuuggguggcuuuggggcauggac

SEQ ID NO: 60018 - RNA, 18 nt, Artificial Sequence
  Synthetic
  misc_feature (15)..(15): n is a, c, g, or u
gacuguguauuuaangac

SEQ ID NO: 60019 - RNA, 19 nt, Artificial Sequence
  Synthetic
  misc_feature (16)..(16): n is a, c, g, or u
agacuguguauuuaangac

SEQ ID NO: 60020 - RNA, 20 nt, Artificial Sequence
  Synthetic
  misc_feature (17)..(17): n is a, c, g, or u
aagacuguguauuuaangac

SEQ ID NO: 60021 - RNA, 21 nt, Artificial Sequence
  Synthetic
  misc_feature (18)..(18): n is a, c, g, or u
aaagacuguguauuuaangac

SEQ ID NO: 60022 - RNA, 22 nt, Artificial Sequence
  Synthetic
  misc_feature (19)..(19): n is a, c, g, or u
caaagacuguguauuuaangac

SEQ ID NO: 60023 - RNA, 23 nt, Artificial Sequence
  Synthetic
  misc_feature (20)..(20): n is a, c, g, or u
ucaaagacuguguauuuaangac

SEQ ID NO: 60024 - RNA, 24 nt, Artificial Sequence
  Synthetic
  misc_feature (21)..(21): n is a, c, g, or u
aucaaagacuguguauuuaangac

SEQ ID NO: 60025 - RNA, 18 nt, Artificial Sequence
  Synthetic
  misc_feature (15)..(15): n is a, c, g, or u
uggcuccaguucagngac

SEQ ID NO: 60026 - RNA, 19 nt, Artificial Sequence
  Synthetic
  misc_feature (16)..(16): n is a, c, g, or u
guggcuccaguucagngac

SEQ ID NO: 60027 - RNA, 20 nt, Artificial Sequence
  Synthetic
  misc_feature (17)..(17): n is a, c, g, or u
gguggcuccaguucagngac

SEQ ID NO: 60028 - RNA, 21 nt, Artificial Sequence
  Synthetic
  misc_feature (18)..(18): n is a, c, g, or u
ugguggcuccaguucagngac

SEQ ID NO: 60029 - RNA, 22 nt, Artificial Sequence
  Synthetic
  misc_feature (19)..(19): n is a, c, g, or u
cugguggcuccaguucagngac

SEQ ID NO: 60030 - RNA, 23 nt, Artificial Sequence
  Synthetic
  misc_feature (20)..(20): n is a, c, g, or u
gcugguggcuccaguucagngac

SEQ ID NO: 60031 - RNA, 24 nt, Artificial Sequence
  Synthetic
  misc_feature (21)..(21): n is a, c, g, or u
ugcugguggcuccaguucagngac

SEQ ID NO: 60032 - RNA, 18 nt, Artificial Sequence
  Synthetic
  misc_feature (1)..(1): n is a, c, g, or u
  misc_feature (10)..(10): n is a, c, g, or u
nugggguganuuaaugac

SEQ ID NO: 60033 - RNA, 19 nt, Artificial Sequence
  Synthetic
  misc_feature (2)..(2): n is a, c, g, or u
  misc_feature (11)..(11): n is a, c, g, or u
gnugggguganuuaaugac

SEQ ID NO: 60034 - RNA, 20 nt, Artificial Sequence
  Synthetic
  misc_feature (3)..(3): n is a, c, g, or u
  misc_feature (12)..(12): n is a, c, g, or u
ugnugggguganuuaaugac

SEQ ID NO: 60035 - RNA, 21 nt, Artificial Sequence
  Synthetic
  misc_feature (4)..(4): n is a, c, g, or u
  misc_feature (13)..(13): n is a, c, g, or u
gugnugggguganuuaaugac

SEQ ID NO: 60036 - RNA, 22 nt, Artificial Sequence
  Synthetic
  misc_feature (5)..(5): n is a, c, g, or u
  misc_feature (14)..(14): n is a, c, g, or u
ugugnugggguganuuaaugac

SEQ ID NO: 60037 - RNA, 23 nt, Artificial Sequence
  Synthetic
  misc_feature (6)..(6): n is a, c, g, or u
  misc_feature (15)..(15): n is a, c, g, or u
uugugnugggguganuuaaugac

SEQ ID NO: 60038 - RNA, 24 nt, Artificial Sequence
  Synthetic
  misc_feature (1)..(1): n is a, c, g, or u
  misc_feature (7)..(7): n is a, c, g, or u
  misc_feature (16)..(16): n is a, c, g, or u
nuugugnugggguganuuaaugac

SEQ ID NO: 60039 - RNA, 18 nt, Artificial Sequence
  Synthetic
  misc_feature (13)..(13): n is a, c, g, or u
  misc_feature (16)..(16): n is a, c, g, or u
auuuguaggcccncunac

SEQ ID NO: 60040 - RNA, 19 nt, Artificial Sequence
  Synthetic
  misc_feature (14)..(14): n is a, c, g, or u
  misc_feature (17)..(17): n is a, c, g, or u
aauuuguaggcccncunac

SEQ ID NO: 60041 - RNA, 20 nt, Artificial Sequence
  Synthetic
  misc_feature (15)..(15): n is a, c, g, or u
  misc_feature (18)..(18): n is a, c, g, or u
caauuuguaggcccncunac

SEQ ID NO: 60042 - RNA, 21 nt, Artificial Sequence
  Synthetic
  misc_feature (16)..(16): n is a, c, g, or u
  misc_feature (19)..(19): n is a, c, g, or u
acaauuuguaggcccncunac

SEQ ID NO: 60043 - RNA, 22 nt, Artificial Sequence
  Synthetic
  misc_feature (17)..(17): n is a, c, g, or u
  misc_feature (20)..(20): n is a, c, g, or u
aacaauuuguaggcccncunac

SEQ ID NO: 60044 - RNA, 23 nt, Artificial Sequence
  Synthetic
  misc_feature (18)..(18): n is a, c, g, or u
  misc_feature (21)..(21): n is a, c, g, or u
gaacaauuuguaggcccncunac

SEQ ID NO: 60045 - RNA, 24 nt, Artificial Sequence
  Synthetic
  misc_feature (19)..(19): n is a, c, g, or u
  misc_feature (22)..(22): n is a, c, g, or u
ugaacaauuuguaggcccncunac

SEQ ID NO: 60046 - RNA, 18 nt, Artificial Sequence
  Synthetic
caaaaauccucacaauac

SEQ ID NO: 60047 - RNA, 19 nt, Artificial Sequence
  Synthetic
acaaaaauccucacaauac

SEQ ID NO: 60048 - RNA, 20 nt, Artificial Sequence
  Synthetic
gacaaaaauccucacaauac

SEQ ID NO: 60049 - RNA, 21 nt, Artificial Sequence
  Synthetic
ugacaaaaauccucacaauac

SEQ ID NO: 60050 - RNA, 22 nt, Artificial Sequence
  Synthetic
uugacaaaaauccucacaauac

SEQ ID NO: 60051 - RNA, 23 nt, Artificial Sequence
  Synthetic
guugacaaaaauccucacaauac

SEQ ID NO: 60052 - RNA, 24 nt, Artificial Sequence
  Synthetic
uguugacaaaaauccucacaauac

SEQ ID NO: 60053 - RNA, 18 nt, Artificial Sequence
  Synthetic
accuggaucgaagaauac

SEQ ID NO: 60054 - RNA, 19 nt, Artificial Sequence
  Synthetic
  misc_feature (1)..(1): n is a, c, g, or u
naccuggaucgaagaauac

SEQ ID NO: 60055 - RNA, 20 nt, Artificial Sequence
  Synthetic
  misc_feature (2)..(2): n is a, c, g, or u
unaccuggaucgaagaauac

SEQ ID NO: 60056 - RNA, 21 nt, Artificial Sequence
  Synthetic
  misc_feature (3)..(3): n is a, c, g, or u
aunaccuggaucgaagaauac

SEQ ID NO: 60057 - RNA, 22 nt, Artificial Sequence
  Synthetic
  misc_feature (4)..(4): n is a, c, g, or u
aaunaccuggaucgaagaauac

SEQ ID NO: 60058 - RNA, 23 nt, Artificial Sequence
  Synthetic
  misc_feature (5)..(5): n is a, c, g, or u
caaunaccuggaucgaagaauac

SEQ ID NO: 60059 - RNA, 24 nt, Artificial Sequence
  Synthetic
  misc_feature (6)..(6): n is a, c, g, or u
ucaaunaccuggaucgaagaauac

SEQ ID NO: 60060 - RNA, 18 nt, Artificial Sequence
  Synthetic
uccucugccgauccauac

SEQ ID NO: 60061 - RNA, 19 nt, Artificial Sequence
  Synthetic
cuccucugccgauccauac

SEQ ID NO: 60062 - RNA, 20 nt, Artificial Sequence
  Synthetic
gcuccucugccgauccauac

SEQ ID NO: 60063 - RNA, 21 nt, Artificial Sequence
  Synthetic
ggcuccucugccgauccauac

SEQ ID NO: 60064 - RNA, 22 nt, Artificial Sequence
  Synthetic
uggcuccucugccgauccauac

SEQ ID NO: 60065 - RNA, 23 nt, Artificial Sequence
  Synthetic
guggcuccucugccgauccauac

SEQ ID NO: 60066 - RNA, 24 nt, Artificial Sequence
  Synthetic
uguggcuccucugccgauccauac

SEQ ID NO: 60067 - RNA, 18 nt, Artificial Sequence
  Synthetic
  misc_feature (2)..(2): n is a, c, g, or u
  misc_feature (11)..(11): n is a, c, g, or u
cncaagaucanauuguac

SEQ ID NO: 60068 - RNA, 19 nt, Artificial Sequence
  Synthetic
  misc_feature (3)..(3): n is a, c, g, or u
  misc_feature (12)..(12): n is a, c, g, or u
ccncaagaucanauuguac

SEQ ID NO: 60069 - RNA, 20 nt, Artificial Sequence
  Synthetic
  misc_feature (4)..(4): n is a, c, g, or u
  misc_feature (13)..(13): n is a, c, g, or u
accncaagaucanauuguac

SEQ ID NO: 60070 - RNA, 21 nt, Artificial Sequence
  Synthetic
  misc_feature (5)..(5): n is a, c, g, or u
  misc_feature (14)..(14): n is a, c, g, or u
uaccncaagaucanauuguac

SEQ ID NO: 60071 - RNA, 22 nt, Artificial Sequence
  Synthetic
  misc_feature (6)..(6): n is a, c, g, or u
  misc_feature (15)..(15): n is a, c, g, or u
uuaccncaagaucanauuguac

SEQ ID NO: 60072 - RNA, 23 nt, Artificial Sequence
  Synthetic
  misc_feature (7)..(7): n is a, c, g, or u
  misc_feature (16)..(16): n is a, c, g, or u
auuaccncaagaucanauuguac

SEQ ID NO: 60073 - RNA, 24 nt, Artificial Sequence
  Synthetic
  misc_feature (8)..(8): n is a, c, g, or u
  misc_feature (17)..(17): n is a, c, g, or u
cauuaccncaagaucanauuguac

SEQ ID NO: 60074 - RNA, 18 nt, Artificial Sequence
  Synthetic
  misc_feature (6)..(6): n is a, c, g, or u
  misc_feature (10)..(10): n is a, c, g, or u
  misc_feature (15)..(15): n is a, c, g, or u
uuucunugunaacanuac

SEQ ID NO: 60075 - RNA, 19 nt, Artificial Sequence
  Synthetic
  misc_feature (7)..(7): n is a, c, g, or u
  misc_feature (11)..(11): n is a, c, g, or u
  misc_feature (16)..(16): n is a, c, g, or u
cuuucunugunaacanuac

SEQ ID NO: 60076 - RNA, 20 nt, Artificial Sequence
  Synthetic
  misc_feature (8)..(8): n is a, c, g, or u
  misc_feature (12)..(12): n is a, c, g, or u
  misc_feature (17)..(17): n is a, c, g, or u
ccuuucunugunaacanuac

SEQ ID NO: 60077 - RNA, 21 nt, Artificial Sequence
  Synthetic
  misc_feature (9)..(9): n is a, c, g, or u
  misc_feature (13)..(13): n is a, c, g, or u
  misc_feature (18)..(18): n is a, c, g, or u
gccuuucunugunaacanuac

SEQ ID NO: 60078 - RNA, 22 nt, Artificial Sequence
  Synthetic
  misc_feature (10)..(10): n is a, c, g, or u
  misc_feature (14)..(14): n is a, c, g, or u
  misc_feature (19)..(19): n is a, c, g, or u
ggccuuucunugunaacanuac

SEQ ID NO: 60079 - RNA, 23 nt, Artificial Sequence
  Synthetic
  misc_feature (11)..(11): n is a, c, g, or u
  misc_feature (15)..(15): n is a, c, g, or u
  misc_feature (20)..(20): n is a, c, g, or u
aggccuuucunugunaacanuac

SEQ ID NO: 60080 - RNA, 24 nt, Artificial Sequence
  Synthetic
  misc_feature (12)..(12): n is a, c, g, or u
  misc_feature (16)..(16): n is a, c, g, or u
  misc_feature (21)..(21): n is a, c, g, or u
aaggccuuucunugunaacanuac

SEQ ID NO: 60081 - RNA, 18 nt, Artificial Sequence
  Synthetic
  misc_feature (2)..(2): n is a, c, g, or u
  misc_feature (12)..(12): n is a, c, g, or u
gnaguuggggancauuac

SEQ ID NO: 60082 - RNA, 19 nt, Artificial Sequence
  Synthetic
  misc_feature (3)..(3): n is a, c, g, or u
  misc_feature (13)..(13): n is a, c, g, or u
ggnaguuggggancauuac

SEQ ID NO: 60083 - RNA, 20 nt, Artificial Sequence
  Synthetic
  misc_feature (4)..(4): n is a, c, g, or u
  misc_feature (14)..(14): n is a, c, g, or u
uggnaguuggggancauuac

SEQ ID NO: 60084 - RNA, 21 nt, Artificial Sequence
  Synthetic
  misc_feature (5)..(5): n is a, c, g, or u
  misc_feature (15)..(15): n is a, c, g, or u
uuggnaguuggggancauuac

SEQ ID NO: 60085 - RNA, 22 nt, Artificial Sequence
  Synthetic
  misc_feature (6)..(6): n is a, c, g, or u
  misc_feature (16)..(16): n is a, c, g, or u
auuggnaguuggggancauuac

SEQ ID NO: 60086 - RNA, 23 nt, Artificial Sequence
  Synthetic
  misc_feature (1)..(1): n is a, c, g, or u
  misc_feature (7)..(7): n is a, c, g, or u
  misc_feature (17)..(17): n is a, c, g, or u
nauuggnaguuggggancauuac

SEQ ID NO: 60087 - RNA, 24 nt, Artificial Sequence
  Synthetic
  misc_feature (2)..(2): n is a, c, g, or u
  misc_feature (8)..(8): n is a, c, g, or u
  misc_feature (18)..(18): n is a, c, g, or u
unauuggnaguuggggancauuac

SEQ ID NO: 60088 - RNA, 18 nt, Artificial Sequence
  Synthetic
  misc_feature (1)..(1): n is a, c, g, or u
  misc_feature (4)..(4): n is a, c, g, or u
nugnugcuguuccaaacc

SEQ ID NO: 60089 - RNA, 19 nt, Artificial Sequence
  Synthetic
  misc_feature (2)..(2): n is a, c, g, or u
  misc_feature (5)..(5): n is a, c, g, or u
cnugnugcuguuccaaacc

SEQ ID NO: 60090 - RNA, 20 nt, Artificial Sequence
  Synthetic
  misc_feature (3)..(3): n is a, c, g, or u
  misc_feature (6)..(6): n is a, c, g, or u
ucnugnugcuguuccaaacc

SEQ ID NO: 60091 - RNA, 21 nt, Artificial Sequence
  Synthetic
  misc_feature (4)..(4): n is a, c, g, or u
  misc_feature (7)..(7): n is a, c, g, or u
cucnugnugcuguuccaaacc

SEQ ID NO: 60092 - RNA, 22 nt, Artificial Sequence
  Synthetic
  misc_feature (5)..(5): n is a, c, g, or u
  misc_feature (8)..(8): n is a, c, g, or u
ccucnugnugcuguuccaaacc

SEQ ID NO: 60093 - RNA, 23 nt, Artificial Sequence
  Synthetic
  misc_feature (6)..(6): n is a, c, g, or u
  misc_feature (9)..(9): n is a, c, g, or u
cccucnugnugcuguuccaaacc

SEQ ID NO: 60094 - RNA, 24 nt, Artificial Sequence
  Synthetic
  misc_feature (7)..(7): n is a, c, g, or u
  misc_feature (10)..(10): n is a, c, g, or u
ucccucnugnugcuguuccaaacc

SEQ ID NO: 60095 - RNA, 18 nt, Artificial Sequence
  Synthetic
cgucgcauggagaccacc

SEQ ID NO: 60096 - RNA, 19 nt, Artificial Sequence
  Synthetic
acgucgcauggagaccacc

SEQ ID NO: 60097 - RNA, 20 nt, Artificial Sequence
  Synthetic
cacgucgcauggagaccacc

SEQ ID NO: 60098 - RNA, 21 nt, Artificial Sequence
  Synthetic
gcacgucgcauggagaccacc

SEQ ID NO: 60099 - RNA, 22 nt, Artificial Sequence
  Synthetic
ugcacgucgcauggagaccacc

SEQ ID NO: 60100 - RNA, 23 nt, Artificial Sequence
  Synthetic
cugcacgucgcauggagaccacc

SEQ ID NO: 60101 - RNA, 24 nt, Artificial Sequence
  Synthetic
ucugcacgucgcauggagaccacc

SEQ ID NO: 60102 - RNA, 18 nt, Artificial Sequence
  Synthetic
aaccccagucucuccacc

SEQ ID NO: 60103 - RNA, 19 nt, Artificial Sequence
  Synthetic
caaccccagucucuccacc

SEQ ID NO: 60104 - RNA, 20 nt, Artificial Sequence
  Synthetic
ccaaccccagucucuccacc

SEQ ID NO: 60105 - RNA, 21 nt, Artificial Sequence
  Synthetic
  misc_feature (1)..(1): n is a, c, g, or u
nccaaccccagucucuccacc

SEQ ID NO: 60106 - RNA, 22 nt, Artificial Sequence
  Synthetic
  misc_feature (2)..(2): n is a, c, g, or u
anccaaccccagucucuccacc

SEQ ID NO: 60107 - RNA, 23 nt, Artificial Sequence
  Synthetic
  misc_feature (3)..(3): n is a, c, g, or u
aanccaaccccagucucuccacc

SEQ ID NO: 60108 - RNA, 24 nt, Artificial Sequence
  Synthetic
  misc_feature (1)..(1): n is a, c, g, or u
  misc_feature (4)..(4): n is a, c, g, or u
naanccaaccccagucucuccacc

SEQ ID NO: 60109 - RNA, 18 nt, Artificial Sequence
  Synthetic
ugggauucuuuccagacc

SEQ ID NO: 60110 - RNA, 19 nt, Artificial Sequence
  Synthetic
cugggauucuuuccagacc

SEQ ID NO: 60111 - RNA, 20 nt, Artificial Sequence
  Synthetic
  misc_feature (1)..(1): n is a, c, g, or u
ncugggauucuuuccagacc

SEQ ID NO: 60112 - RNA, 21 nt, Artificial Sequence
  Synthetic
  misc_feature (2)..(2): n is a, c, g, or u
cncugggauucuuuccagacc

SEQ ID NO: 60113 - RNA, 22 nt, Artificial Sequence
  Synthetic
  misc_feature (3)..(3): n is a, c, g, or u
ccncugggauucuuuccagacc

SEQ ID NO: 60114 - RNA, 23 nt, Artificial Sequence
  Synthetic
  misc_feature (4)..(4): n is a, c, g, or u
uccncugggauucuuuccagacc

SEQ ID NO: 60115 - RNA, 24 nt, Artificial Sequence
  Synthetic
  misc_feature (5)..(5): n is a, c, g, or u
auccncugggauucuuuccagacc

SEQ ID NO: 60116 - RNA, 18 nt, Artificial Sequence
  Synthetic
  misc_feature (7)..(7): n is a, c, g, or u
uccuccngcuuauagacc

SEQ ID NO: 60117 - RNA, 19 nt, Artificial Sequence
  Synthetic
  misc_feature (8)..(8): n is a, c, g, or u
cuccuccngcuuauagacc

SEQ ID NO: 60118 - RNA, 20 nt, Artificial Sequence
  Synthetic
  misc_feature (9)..(9): n is a, c, g, or u
acuccuccngcuuauagacc

SEQ ID NO: 60119 - RNA, 18 nt, Artificial Sequence
  Synthetic
  misc_feature (1)..(1): n is a, c, g, or u
  misc_feature (12)..(12): n is a, c, g, or u
nuuccaggaucnacgacc

SEQ ID NO: 60120 - RNA, 19 nt, Artificial Sequence
  Synthetic
  misc_feature (2)..(2): n is a, c, g, or u
  misc_feature (13)..(13): n is a, c, g, or u
anuuccaggaucnacgacc

SEQ ID NO: 60121 - RNA, 20 nt, Artificial Sequence
  Synthetic
  misc_feature (3)..(3): n is a, c, g, or u
  misc_feature (14)..(14): n is a, c, g, or u
uanuuccaggaucnacgacc

SEQ ID NO: 60122 - RNA, 21 nt, Artificial Sequence
  Synthetic
  misc_feature (4)..(4): n is a, c, g, or u
  misc_feature (15)..(15): n is a, c, g, or u
cuanuuccaggaucnacgacc

SEQ ID NO: 60123 - RNA, 22 nt, Artificial Sequence
  Synthetic
  misc_feature (5)..(5): n is a, c, g, or u
  misc_feature (16)..(16): n is a, c, g, or u
ucuanuuccaggaucnacgacc

SEQ ID NO: 60124 - RNA, 23 nt, Artificial Sequence
  Synthetic
  misc_feature (6)..(6): n is a, c, g, or u
  misc_feature (17)..(17): n is a, c, g, or u
cucuanuuccaggaucnacgacc

SEQ ID NO: 60125 - RNA, 24 nt, Artificial Sequence
  Synthetic
  misc_feature (7)..(7): n is a, c, g, or u
  misc_feature (18)..(18): n is a, c, g, or u
ccucuanuuccaggaucnacgacc

SEQ ID NO: 60126 - RNA, 18 nt, Artificial Sequence
  Synthetic
gggcuuuaggaaaauacc

SEQ ID NO: 60127 - RNA, 19 nt, Artificial Sequence
  Synthetic
ugggcuuuaggaaaauacc

SEQ ID NO: 60128 - RNA, 20 nt, Artificial Sequence
  Synthetic
  misc_feature (1)..(1): n is a, c, g, or u
nugggcuuuaggaaaauacc

SEQ ID NO: 60129 - RNA, 21 nt, Artificial Sequence
  Synthetic
  misc_feature (2)..(2): n is a, c, g, or u
cnugggcuuuaggaaaauacc

SEQ ID NO: 60130 - RNA, 22 nt, Artificial Sequence
  Synthetic
  misc_feature (3)..(3): n is a, c, g, or u
ucnugggcuuuaggaaaauacc

SEQ ID NO: 60131 - RNA, 23 nt, Artificial Sequence
  Synthetic
  misc_feature (4)..(4): n is a, c, g, or u
aucnugggcuuuaggaaaauacc

SEQ ID NO: 60132 - RNA, 24 nt, Artificial Sequence
  Synthetic
  misc_feature (5)..(5): n is a, c, g, or u
caucnugggcuuuaggaaaauacc

SEQ ID NO: 60133 - RNA, 18 nt, Artificial Sequence
  Synthetic
aaaaauccucacaauacc

SEQ ID NO: 60134 - RNA, 19 nt, Artificial Sequence
  Synthetic
caaaaauccucacaauacc

SEQ ID NO: 60135 - RNA, 20 nt, Artificial Sequence
  Synthetic
acaaaaauccucacaauacc

SEQ ID NO: 60136 - RNA, 21 nt, Artificial Sequence
  Synthetic
gacaaaaauccucacaauacc

SEQ ID NO: 60137 - RNA, 22 nt, Artificial Sequence
  Synthetic
ugacaaaaauccucacaauacc

SEQ ID NO: 60138 - RNA, 23 nt, Artificial Sequence
  Synthetic
uugacaaaaauccucacaauacc

SEQ ID NO: 60139 - RNA, 24 nt, Artificial Sequence
  Synthetic
guugacaaaaauccucacaauacc

SEQ ID NO: 60140 - RNA, 18 nt, Artificial Sequence
  Synthetic
  misc_feature (1)..(1): n is a, c, g, or u
  misc_feature (11)..(11): n is a, c, g, or u
naguuggggancauuacc

SEQ ID NO: 60141 - RNA, 19 nt, Artificial Sequence
  Synthetic
  misc_feature (2)..(2): n is a, c, g, or u
  misc_feature (12)..(12): n is a, c, g, or u
gnaguuggggancauuacc

SEQ ID NO: 60142 - RNA, 20 nt, Artificial Sequence
  Synthetic
  misc_feature (3)..(3): n is a, c, g, or u
  misc_feature (13)..(13): n is a, c, g, or u
ggnaguuggggancauuacc

SEQ ID NO: 60143 - RNA, 21 nt, Artificial Sequence
  Synthetic
  misc_feature (4)..(4): n is a, c, g, or u
  misc_feature (14)..(14): n is a, c, g, or u
uggnaguuggggancauuacc

SEQ ID NO: 60144 - RNA, 22 nt, Artificial Sequence
  Synthetic
  misc_feature (5)..(5): n is a, c, g, or u
  misc_feature (15)..(15): n is a, c, g, or u
uuggnaguuggggancauuacc

SEQ ID NO: 60145 - RNA, 23 nt, Artificial Sequence
  Synthetic
  misc_feature (6)..(6): n is a, c, g, or u
  misc_feature (16)..(16): n is a, c, g, or u
auuggnaguuggggancauuacc

SEQ ID NO: 60146 - RNA, 24 nt, Artificial Sequence
  Synthetic
  misc_feature (1)..(1): n is a, c, g, or u
  misc_feature (7)..(7): n is a, c, g, or u
  misc_feature (17)..(17): n is a, c, g, or u
nauuggnaguuggggancauuacc

SEQ ID NO: 60147 - RNA, 18 nt, Artificial Sequence
  Synthetic
  misc_feature (3)..(3): n is a, c, g, or u
ugnugcuguuccaaaccc

SEQ ID NO: 60148 - RNA, 19 nt, Artificial Sequence
  Synthetic
  misc_feature (1)..(1): n is a, c, g, or u
  misc_feature (4)..(4): n is a, c, g, or u
nugnugcuguuccaaaccc

SEQ ID NO: 60149 - RNA, 20 nt, Artificial Sequence
  Synthetic
  misc_feature (2)..(2): n is a, c, g, or u
  misc_feature (5)..(5): n is a, c, g, or u
cnugnugcuguuccaaaccc

SEQ ID NO: 60150 - RNA, 21 nt, Artificial Sequence
  Synthetic
  misc_feature (3)..(3): n is a, c, g, or u
  misc_feature (6)..(6): n is a, c, g, or u
ucnugnugcuguuccaaaccc

SEQ ID NO: 60151 - RNA, 22 nt, Artificial Sequence
  Synthetic
  misc_feature (4)..(4): n is a, c, g, or u
  misc_feature (7)..(7): n is a, c, g, or u
cucnugnugcuguuccaaaccc

SEQ ID NO: 60152 - RNA, 23 nt, Artificial Sequence
  Synthetic
  misc_feature (5)..(5): n is a, c, g, or u
  misc_feature (8)..(8): n is a, c, g, or u
ccucnugnugcuguuccaaaccc

SEQ ID NO: 60153 - RNA, 24 nt, Artificial Sequence
  Synthetic
  misc_feature (6)..(6): n is a, c, g, or u
  misc_feature (9)..(9): n is a, c, g, or u
cccucnugnugcuguuccaaaccc

SEQ ID NO: 60154 - RNA, 18 nt, Artificial Sequence
  Synthetic
acgacgaggcaggucccc

SEQ ID NO: 60155 - RNA, 19 nt, Artificial Sequence
  Synthetic
gacgacgaggcaggucccc

SEQ ID NO: 60156 - RNA, 20 nt, Artificial Sequence
  Synthetic
agacgacgaggcaggucccc

SEQ ID NO: 60157 - RNA, 18 nt, Artificial Sequence
  Synthetic
guccuuuguuuacguccc

SEQ ID NO: 60158 - RNA, 19 nt, Artificial Sequence
  Synthetic
cguccuuuguuuacguccc

SEQ ID NO: 60159 - RNA, 20 nt, Artificial Sequence
  Synthetic
acguccuuuguuuacguccc

SEQ ID NO: 60160 - RNA, 21 nt, Artificial Sequence
  Synthetic
gacguccuuuguuuacguccc

SEQ ID NO: 60161 - RNA, 22 nt, Artificial Sequence
  Synthetic
ggacguccuuuguuuacguccc

SEQ ID NO: 60162 - RNA, 23 nt, Artificial Sequence
  Synthetic
gggacguccuuuguuuacguccc

SEQ ID NO: 60163 - RNA, 24 nt, Artificial Sequence
  Synthetic
cgggacguccuuuguuuacguccc

SEQ ID NO: 60164 - RNA, 18 nt, Artificial Sequence
  Synthetic
gacgacgaggcagguccc

SEQ ID NO: 60165 - RNA, 19 nt, Artificial Sequence
  Synthetic
agacgacgaggcagguccc

SEQ ID NO: 60166 - RNA, 20 nt, Artificial Sequence
  Synthetic
uagacgacgaggcagguccc

SEQ ID NO: 60167 - RNA, 18 nt, Artificial Sequence
  Synthetic
  misc_feature (6)..(6): n is a, c, g, or u
uguccnacuguucaagcc

SEQ ID NO: 60168 - RNA, 19 nt, Artificial Sequence
  Synthetic
  misc_feature (7)..(7): n is a, c, g, or u
auguccnacuguucaagcc

SEQ ID NO: 60169 - RNA, 20 nt, Artificial Sequence
  Synthetic
  misc_feature (8)..(8): n is a, c, g, or u
cauguccnacuguucaagcc

SEQ ID NO: 60170 - RNA, 21 nt, Artificial Sequence
  Synthetic
  misc_feature (9)..(9): n is a, c, g, or u
ucauguccnacuguucaagcc

SEQ ID NO: 60171 - RNA, 22 nt, Artificial Sequence
  Synthetic
  misc_feature (10)..(10): n is a, c, g, or u
uucauguccnacuguucaagcc

SEQ ID NO: 60172 - RNA, 23 nt, Artificial Sequence
  Synthetic
  misc_feature (11)..(11): n is a, c, g, or u
guucauguccnacuguucaagcc

SEQ ID NO: 60173 - RNA, 24 nt, Artificial Sequence
  Synthetic
  misc_feature (12)..(12): n is a, c, g, or u
uguucauguccnacuguucaagcc

SEQ ID NO: 60174 - RNA, 18 nt, Artificial Sequence
  Synthetic
ggggcuuggccauuggcc

SEQ ID NO: 60175 - RNA, 19 nt, Artificial Sequence
  Synthetic
uggggcuuggccauuggcc

SEQ ID NO: 60176 - RNA, 20 nt, Artificial Sequence
  Synthetic
uuggggcuuggccauuggcc

SEQ ID NO: 60177 - RNA, 21 nt, Artificial Sequence
  Synthetic
guuggggcuuggccauuggcc

SEQ ID NO: 60178 - RNA, 22 nt, Artificial Sequence
  Synthetic
gguuggggcuuggccauuggcc

SEQ ID NO: 60179 - RNA, 23 nt, Artificial Sequence
  Synthetic
ugguuggggcuuggccauuggcc

SEQ ID NO: 60180 - RNA, 24 nt, Artificial Sequence
  Synthetic
cugguuggggcuuggccauuggcc

SEQ ID NO: 60181 - RNA, 18 nt, Artificial Sequence
  Synthetic
acugguuggggcuuggcc

SEQ ID NO: 60182 - RNA, 19 nt, Artificial Sequence
  Synthetic
cacugguuggggcuuggcc

SEQ ID NO: 60183 - RNA, 20 nt, Artificial Sequence
  Synthetic
ccacugguuggggcuuggcc

SEQ ID NO: 60184 - RNA, 18 nt, Artificial Sequence
  Synthetic
  misc_feature (12)..(12): n is a, c, g, or u
aaacaaggacanuuggcc

SEQ ID NO: 60185 - RNA, 19 nt, Artificial Sequence
  Synthetic
  misc_feature (1)..(1): n is a, c, g, or u
  misc_feature (13)..(13): n is a, c, g, or u
naaacaaggacanuuggcc

SEQ ID NO: 60186 - RNA, 20 nt, Artificial Sequence
  Synthetic
  misc_feature (2)..(2): n is a, c, g, or u
  misc_feature (14)..(14): n is a, c, g, or u
anaaacaaggacanuuggcc

SEQ ID NO: 60187 - RNA, 21 nt, Artificial Sequence
  Synthetic
  misc_feature (3)..(3): n is a, c, g, or u
  misc_feature (15)..(15): n is a, c, g, or u
canaaacaaggacanuuggcc

SEQ ID NO: 60188 - RNA, 22 nt, Artificial Sequence
  Synthetic
  misc_feature (4)..(4): n is a, c, g, or u
  misc_feature (16)..(16): n is a, c, g, or u
acanaaacaaggacanuuggcc

SEQ ID NO: 60189 - RNA, 23 nt, Artificial Sequence
  Synthetic
  misc_feature (5)..(5): n is a, c, g, or u
  misc_feature (17)..(17): n is a, c, g, or u
aacanaaacaaggacanuuggcc

SEQ ID NO: 60190 - RNA, 24 nt, Artificial Sequence
  Synthetic
  misc_feature (6)..(6): n is a, c, g, or u
  misc_feature (18)..(18): n is a, c, g, or u
caacanaaacaaggacanuuggcc

SEQ ID NO: 60191 - RNA, 18 nt, Artificial Sequence
  Synthetic
  misc_feature (4)..(5): n is a, c, g, or u
  misc_feature (7)..(7): n is a, c, g, or u
  misc_feature (13)..(13): n is a, c, g, or u
ugunnunacaacnuugcc

SEQ ID NO: 60192 - RNA, 19 nt, Artificial Sequence
  Synthetic
  misc_feature (5)..(6): n is a, c, g, or u
  misc_feature (8)..(8): n is a, c, g, or u
  misc_feature (14)..(14): n is a, c, g, or u
gugunnunacaacnuugcc

SEQ ID NO: 60193 - RNA, 20 nt, Artificial Sequence
  Synthetic
  misc_feature (6)..(7): n is a, c, g, or u
  misc_feature (9)..(9): n is a, c, g, or u
  misc_feature (15)..(15): n is a, c, g, or u
ggugunnunacaacnuugcc

SEQ ID NO: 60194 - RNA, 21 nt, Artificial Sequence
  Synthetic
  misc_feature (1)..(1): n is a, c, g, or u
  misc_feature (7)..(8): n is a, c, g, or u
  misc_feature (10)..(10): n is a, c, g, or u
  misc_feature (16)..(16): n is a, c, g, or u
nggugunnunacaacnuugcc

SEQ ID NO: 60195 - RNA, 22 nt, Artificial Sequence
  Synthetic
  misc_feature (2)..(2): n is a, c, g, or u
  misc_feature (8)..(9): n is a, c, g, or u
  misc_feature (11)..(11): n is a, c, g, or u
  misc_feature (17)..(17): n is a, c, g, or u
anggugunnunacaacnuugcc

SEQ ID NO: 60196 - RNA, 23 nt, Artificial Sequence
  Synthetic
  misc_feature (3)..(3): n is a, c, g, or u
  misc_feature (9)..(10): n is a, c, g, or u
  misc_feature (12)..(12): n is a, c, g, or u
  misc_feature (18)..(18): n is a, c, g, or u
canggugunnunacaacnuugcc

SEQ ID NO: 60197 - RNA, 24 nt, Artificial Sequence
  Synthetic
  misc_feature (4)..(4): n is a, c, g, or u
  misc_feature (10)..(11): n is a, c, g, or u
  misc_feature (13)..(13): n is a, c, g, or u
  misc_feature (19)..(19): n is a, c, g, or u
acanggugunnunacaacnuugcc

SEQ ID NO: 60198 - RNA, 18 nt, Artificial Sequence
  Synthetic
  misc_feature (5)..(5): n is a, c, g, or u
  misc_feature (16)..(16): n is a, c, g, or u
ccugnugggguggagncc

SEQ ID NO: 60199 - RNA, 19 nt, Artificial Sequence
  Synthetic
  misc_feature (6)..(6): n is a, c, g, or u
  misc_feature (17)..(17): n is a, c, g, or u
gccugnugggguggagncc

SEQ ID NO: 60200 - RNA, 20 nt, Artificial Sequence
  Synthetic
  misc_feature (7)..(7): n is a, c, g, or u
  misc_feature (18)..(18): n is a, c, g, or u
ggccugnugggguggagncc

SEQ ID NO: 60201 - RNA, 21 nt, Artificial Sequence
  Synthetic
  misc_feature (8)..(8): n is a, c, g, or u
  misc_feature (19)..(19): n is a, c, g, or u
uggccugnugggguggagncc

SEQ ID NO: 60202 - RNA, 22 nt, Artificial Sequence
  Synthetic
  misc_feature (9)..(9): n is a, c, g, or u
  misc_feature (20)..(20): n is a, c, g, or u
guggccugnugggguggagncc

SEQ ID NO: 60203 - RNA, 23 nt, Artificial Sequence
  Synthetic
  misc_feature (10)..(10): n is a, c, g, or u
  misc_feature (21)..(21): n is a, c, g, or u
gguggccugnugggguggagncc

SEQ ID NO: 60204 - RNA, 24 nt, Artificial Sequence
  Synthetic
  misc_feature (11)..(11): n is a, c, g, or u
  misc_feature (22)..(22): n is a, c, g, or u
cgguggccugnugggguggagncc

SEQ ID NO: 60205 - RNA, 18 nt, Artificial Sequence
  Synthetic
  misc_feature (10)..(10): n is a, c, g, or u
ucucucuguncccaaucc

SEQ ID NO: 60206 - RNA, 19 nt, Artificial Sequence
  Synthetic
  misc_feature (11)..(11): n is a, c, g, or u
aucucucuguncccaaucc

SEQ ID NO: 60207 - RNA, 20 nt, Artificial Sequence
  Synthetic
  misc_feature (12)..(12): n is a, c, g, or u
aaucucucuguncccaaucc

SEQ ID NO: 60208 - RNA, 21 nt, Artificial Sequence
  Synthetic
  misc_feature (13)..(13): n is a, c, g, or u
gaaucucucuguncccaaucc

SEQ ID NO: 60209 - RNA, 22 nt, Artificial Sequence
  Synthetic
  misc_feature (14)..(14): n is a, c, g, or u
agaaucucucuguncccaaucc

SEQ ID NO: 60210 - RNA, 23 nt, Artificial Sequence
  Synthetic
  misc_feature (15)..(15): n is a, c, g, or u
cagaaucucucuguncccaaucc

SEQ ID NO: 60211 - RNA, 24 nt, Artificial Sequence
  Synthetic
  misc_feature (16)..(16): n is a, c, g, or u
acagaaucucucuguncccaaucc

SEQ ID NO: 60212 - RNA, 18 nt, Artificial Sequence
  Synthetic
cccgucggcgcugaaucc

SEQ ID NO: 60213 - RNA, 19 nt, Artificial Sequence
  Synthetic
ucccgucggcgcugaaucc

SEQ ID NO: 60214 - RNA, 20 nt, Artificial Sequence
  Synthetic
gucccgucggcgcugaaucc

SEQ ID NO: 60215 - RNA, 18 nt, Artificial Sequence
  Synthetic
  misc_feature (13)..(13): n is a, c, g, or u
ucuaagagacacncaucc

SEQ ID NO: 60216 - RNA, 19 nt, Artificial Sequence
  Synthetic
  misc_feature (14)..(14): n is a, c, g, or u
cucuaagagacacncaucc

SEQ ID NO: 60217 - RNA, 20 nt, Artificial Sequence
  Synthetic
  misc_feature (15)..(15): n is a, c, g, or u
ccucuaagagacacncaucc

SEQ ID NO: 60218 - RNA, 21 nt, Artificial Sequence
  Synthetic
  misc_feature (16)..(16): n is a, c, g, or u
accucuaagagacacncaucc

SEQ ID NO: 60219 - RNA, 22 nt, Artificial Sequence
  Synthetic
  misc_feature (17)..(17): n is a, c, g, or u
caccucuaagagacacncaucc

SEQ ID NO: 60220 - RNA, 23 nt, Artificial Sequence
  Synthetic
  misc_feature (18)..(18): n is a, c, g, or u
ccaccucuaagagacacncaucc

SEQ ID NO: 60221 - RNA, 24 nt, Artificial Sequence
  Synthetic
  misc_feature (19)..(19): n is a, c, g, or u
uccaccucuaagagacacncaucc

SEQ ID NO: 60222 - RNA, 18 nt, Artificial Sequence
  Synthetic
acaucacaucaggacucc

SEQ ID NO: 60223 - RNA, 19 nt, Artificial Sequence
  Synthetic
aacaucacaucaggacucc

SEQ ID NO: 60224 - RNA, 20 nt, Artificial Sequence
  Synthetic
caacaucacaucaggacucc

SEQ ID NO: 60225 - RNA, 21 nt, Artificial Sequence
  Synthetic
acaacaucacaucaggacucc

SEQ ID NO: 60226 - RNA, 22 nt, Artificial Sequence
  Synthetic
gacaacaucacaucaggacucc

SEQ ID NO: 60227 - RNA, 23 nt, Artificial Sequence
  Synthetic
ggacaacaucacaucaggacucc

SEQ ID NO: 60228 - RNA, 24 nt, Artificial Sequence
  Synthetic
uggacaacaucacaucaggacucc

SEQ ID NO: 60229 - RNA, 18 nt, Artificial Sequence
  Synthetic
uccaccaaucggcggucc

SEQ ID NO: 60230 - RNA, 19 nt, Artificial Sequence
  Synthetic
uuccaccaaucggcggucc

SEQ ID NO: 60231 - RNA, 20 nt, Artificial Sequence
  Synthetic
cuuccaccaaucggcggucc

SEQ ID NO: 60232 - RNA, 18 nt, Artificial Sequence
  Synthetic
cuuaccaaccuccugucc

SEQ ID NO: 60233 - RNA, 19 nt, Artificial Sequence
  Synthetic
acuuaccaaccuccugucc

SEQ ID NO: 60234 - RNA, 20 nt, Artificial Sequence
  Synthetic
cacuuaccaaccuccugucc

SEQ ID NO: 60235 - RNA, 21 nt, Artificial Sequence
  Synthetic
ucacuuaccaaccuccugucc

SEQ ID NO: 60236 - RNA, 22 nt, Artificial Sequence
  Synthetic
aucacuuaccaaccuccugucc

SEQ ID NO: 60237 - RNA, 23 nt, Artificial Sequence
  Synthetic
aaucacuuaccaaccuccugucc

SEQ ID NO: 60238 - RNA, 24 nt, Artificial Sequence
  Synthetic
caaucacuuaccaaccuccugucc

SEQ ID NO: 60239 - RNA, 18 nt, Artificial Sequence
  Synthetic
ucccaauguuaguauucc

SEQ ID NO: 60240 - RNA, 19 nt, Artificial Sequence
  Synthetic
uucccaauguuaguauucc

SEQ ID NO: 60241 - RNA, 20 nt, Artificial Sequence
  Synthetic
cuucccaauguuaguauucc

SEQ ID NO: 60242 - RNA, 21 nt, Artificial Sequence
  Synthetic
gcuucccaauguuaguauucc

SEQ ID NO: 60243 - RNA, 22 nt, Artificial Sequence
  Synthetic
agcuucccaauguuaguauucc

SEQ ID NO: 60244 - RNA, 23 nt, Artificial Sequence
  Synthetic
cagcuucccaauguuaguauucc

SEQ ID NO: 60245 - RNA, 24 nt, Artificial Sequence
  Synthetic
ccagcuucccaauguuaguauucc

SEQ ID NO: 60246 - RNA, 18 nt, Artificial Sequence
  Synthetic
  misc_feature (1)..(1): n is a, c, g, or u
  misc_feature (8)..(8): n is a, c, g, or u
  misc_feature (10)..(10): n is a, c, g, or u
nuguuuungnaaacuucc

SEQ ID NO: 60247 - RNA, 19 nt, Artificial Sequence
  Synthetic
  misc_feature (2)..(2): n is a, c, g, or u
  misc_feature (9)..(9): n is a, c, g, or u
  misc_feature (11)..(11): n is a, c, g, or u
anuguuuungnaaacuucc

SEQ ID NO: 60248 - RNA, 20 nt, Artificial Sequence
  Synthetic
  misc_feature (3)..(3): n is a, c, g, or u
  misc_feature (10)..(10): n is a, c, g, or u
  misc_feature (12)..(12): n is a, c, g, or u
ganuguuuungnaaacuucc

SEQ ID NO: 60249 - RNA, 21 nt, Artificial Sequence
  Synthetic
  misc_feature (4)..(4): n is a, c, g, or u
  misc_feature (11)..(11): n is a, c, g, or u
  misc_feature (13)..(13): n is a, c, g, or u
aganuguuuungnaaacuucc

SEQ ID NO: 60250 - RNA, 22 nt, Artificial Sequence
  Synthetic
  misc_feature (5)..(5): n is a, c, g, or u
  misc_feature (12)..(12): n is a, c, g, or u
  misc_feature (14)..(14): n is a, c, g, or u
aaganuguuuungnaaacuucc

SEQ ID NO: 60251 - RNA, 23 nt, Artificial Sequence
  Synthetic
  misc_feature (6)..(6): n is a, c, g, or u
  misc_feature (13)..(13): n is a, c, g, or u
  misc_feature (15)..(15): n is a, c, g, or u
aaaganuguuuungnaaacuucc

SEQ ID NO: 60252 - RNA, 24 nt, Artificial Sequence
  Synthetic
  misc_feature (7)..(7): n is a, c, g, or u
  misc_feature (14)..(14): n is a, c, g, or u
  misc_feature (16)..(16): n is a, c, g, or u
caaaganuguuuungnaaacuucc

SEQ ID NO: 60253 - RNA, 18 nt, Artificial Sequence
  Synthetic
  misc_feature (5)..(5): n is a, c, g, or u
uaucnuauccacacuucc

SEQ ID NO: 60254 - RNA, 19 nt, Artificial Sequence
  Synthetic
  misc_feature (6)..(6): n is a, c, g, or u
cuaucnuauccacacuucc

SEQ ID NO: 60255 - RNA, 20 nt, Artificial Sequence
  Synthetic
  misc_feature (7)..(7): n is a, c, g, or u
ccuaucnuauccacacuucc

SEQ ID NO: 60256 - RNA, 21 nt, Artificial Sequence
  Synthetic
  misc_feature (8)..(8): n is a, c, g, or u
cccuaucnuauccacacuucc

SEQ ID NO: 60257 - RNA, 22 nt, Artificial Sequence
  Synthetic
  misc_feature (9)..(9): n is a, c, g, or u
ccccuaucnuauccacacuucc

SEQ ID NO: 60258 - RNA, 23 nt, Artificial Sequence
  Synthetic
  misc_feature (10)..(10): n is a, c, g, or u
gccccuaucnuauccacacuucc

SEQ ID NO: 60259 - RNA, 24 nt, Artificial Sequence
  Synthetic
  misc_feature (11)..(11): n is a, c, g, or u
ugccccuaucnuauccacacuucc

SEQ ID NO: 60260 - RNA, 18 nt, Artificial Sequence
  Synthetic
  misc_feature (1)..(2): n is a, c, g, or u
  misc_feature (7)..(7): n is a, c, g, or u
nnuuacnaaauauuuucc

SEQ ID NO: 60261 - RNA, 19 nt, Artificial Sequence
  Synthetic
  misc_feature (2)..(3): n is a, c, g, or u
  misc_feature (8)..(8): n is a, c, g, or u
annuuacnaaauauuuucc

SEQ ID NO: 60262 - RNA, 20 nt, Artificial Sequence
  Synthetic
  misc_feature (3)..(4): n is a, c, g, or u
  misc_feature (9)..(9): n is a, c, g, or u
aannuuacnaaauauuuucc

SEQ ID NO: 60263 - RNA, 21 nt, Artificial Sequence
  Synthetic
  misc_feature (4)..(5): n is a, c, g, or u
  misc_feature (10)..(10): n is a, c, g, or u
uaannuuacnaaauauuuucc

SEQ ID NO: 60264 - RNA, 22 nt, Artificial Sequence
  Synthetic
  misc_feature (5)..(6): n is a, c, g, or u
  misc_feature (11)..(11): n is a, c, g, or u
cuaannuuacnaaauauuuucc

SEQ ID NO: 60265 - RNA, 23 nt, Artificial Sequence
  Synthetic
  misc_feature (6)..(7): n is a, c, g, or u
  misc_feature (12)..(12): n is a, c, g, or u
ccuaannuuacnaaauauuuucc

SEQ ID NO: 60266 - RNA, 24 nt, Artificial Sequence
  Synthetic
  misc_feature (7)..(8): n is a, c, g, or u
  misc_feature (13)..(13): n is a, c, g, or u
uccuaannuuacnaaauauuuucc

SEQ ID NO: 60267 - RNA, 18 nt, Artificial Sequence
  Synthetic
gggaacaagagcuacagc

SEQ ID NO: 60268 - RNA, 19 nt, Artificial Sequence
  Synthetic
ugggaacaagagcuacagc

SEQ ID NO: 60269 - RNA, 20 nt, Artificial Sequence
  Synthetic
  misc_feature (1)..(1): n is a, c, g, or u
nugggaacaagagcuacagc

SEQ ID NO: 60270 - RNA, 21 nt, Artificial Sequence
  Synthetic
  misc_feature (2)..(2): n is a, c, g, or u
cnugggaacaagagcuacagc

SEQ ID NO: 60271 - RNA, 22 nt, Artificial Sequence
  Synthetic
  misc_feature (3)..(3): n is a, c, g, or u
ucnugggaacaagagcuacagc

SEQ ID NO: 60272 - RNA, 23 nt, Artificial Sequence
  Synthetic
  misc_feature (4)..(4): n is a, c, g, or u
uucnugggaacaagagcuacagc

SEQ ID NO: 60273 - RNA, 24 nt, Artificial Sequence
  Synthetic
  misc_feature (5)..(5): n is a, c, g, or u
auucnugggaacaagagcuacagc

SEQ ID NO: 60274 - RNA, 18 nt, Artificial Sequence
  Synthetic
  misc_feature (6)..(6): n is a, c, g, or u
ggaucnacgaccaccagc

SEQ ID NO: 60275 - RNA, 19 nt, Artificial Sequence
  Synthetic
  misc_feature (7)..(7): n is a, c, g, or u
aggaucnacgaccaccagc

SEQ ID NO: 60276 - RNA, 20 nt, Artificial Sequence
  Synthetic
  misc_feature (8)..(8): n is a, c, g, or u
caggaucnacgaccaccagc

SEQ ID NO: 60277 - RNA, 21 nt, Artificial Sequence
  Synthetic
  misc_feature (9)..(9): n is a, c, g, or u
ccaggaucnacgaccaccagc

SEQ ID NO: 60278 - RNA, 22 nt, Artificial Sequence
  Synthetic
  misc_feature (10)..(10): n is a, c, g, or u
uccaggaucnacgaccaccagc

SEQ ID NO: 60279 - RNA, 23 nt, Artificial Sequence
  Synthetic
  misc_feature (11)..(11): n is a, c, g, or u
uuccaggaucnacgaccaccagc

SEQ ID NO: 60280 - RNA, 24 nt, Artificial Sequence
  Synthetic
  misc_feature (1)..(1): n is a, c, g, or u
  misc_feature (12)..(12): n is a, c, g, or u
nuuccaggaucnacgaccaccagc

SEQ ID NO: 60281 - RNA, 18 nt, Artificial Sequence
  Synthetic
  misc_feature (5)..(5): n is a, c, g, or u
auucnugggaacaagagc

SEQ ID NO: 60282 - RNA, 19 nt, Artificial Sequence
  Synthetic
  misc_feature (6)..(6): n is a, c, g, or u
uauucnugggaacaagagc

SEQ ID NO: 60283 - RNA, 20 nt, Artificial Sequence
  Synthetic
  misc_feature (7)..(7): n is a, c, g, or u
auauucnugggaacaagagc

SEQ ID NO: 60284 - RNA, 21 nt, Artificial Sequence
  Synthetic
  misc_feature (8)..(8): n is a, c, g, or u
cauauucnugggaacaagagc

SEQ ID NO: 60285 - RNA, 22 nt, Artificial Sequence
  Synthetic
  misc_feature (9)..(9): n is a, c, g, or u
ccauauucnugggaacaagagc

SEQ ID NO: 60286 - RNA, 23 nt, Artificial Sequence
  Synthetic
  misc_feature (10)..(10): n is a, c, g, or u
accauauucnugggaacaagagc

SEQ ID NO: 60287 - RNA, 24 nt, Artificial Sequence
  Synthetic
  misc_feature (11)..(11): n is a, c, g, or u
caccauauucnugggaacaagagc

SEQ ID NO: 60288 - RNA, 18 nt, Artificial Sequence
  Synthetic
ggaccuacucgacaccgc

SEQ ID NO: 60289 - RNA, 19 nt, Artificial Sequence
  Synthetic
gggaccuacucgacaccgc

SEQ ID NO: 60290 - RNA, 20 nt, Artificial Sequence
  Synthetic
cgggaccuacucgacaccgc

SEQ ID NO: 60291 - RNA, 21 nt, Artificial Sequence
  Synthetic
ucgggaccuacucgacaccgc

SEQ ID NO: 60292 - RNA, 22 nt, Artificial Sequence
  Synthetic
uucgggaccuacucgacaccgc

SEQ ID NO: 60293 - RNA, 23 nt, Artificial Sequence
  Synthetic
guucgggaccuacucgacaccgc

SEQ ID NO: 60294 - RNA, 24 nt, Artificial Sequence
  Synthetic
  misc_feature (1)..(1): n is a, c, g, or u
nguucgggaccuacucgacaccgc

SEQ ID NO: 60295 - RNA, 18 nt, Artificial Sequence
  Synthetic
  misc_feature (3)..(3): n is a, c, g, or u
  misc_feature (9)..(9): n is a, c, g, or u
  misc_feature (15)..(15): n is a, c, g, or u
gancccucncggggncgc

SEQ ID NO: 60296 - RNA, 19 nt, Artificial Sequence
  Synthetic
  misc_feature (4)..(4): n is a, c, g, or u
  misc_feature (10)..(10): n is a, c, g, or u
  misc_feature (16)..(16): n is a, c, g, or u
cgancccucncggggncgc

SEQ ID NO: 60297 - RNA, 20 nt, Artificial Sequence
  Synthetic
  misc_feature (5)..(5): n is a, c, g, or u
  misc_feature (11)..(11): n is a, c, g, or u
  misc_feature (17)..(17): n is a, c, g, or u
acgancccucncggggncgc

SEQ ID NO: 60298 - RNA, 21 nt, Artificial Sequence
  Synthetic
  misc_feature (6)..(6): n is a, c, g, or u
  misc_feature (12)..(12): n is a, c, g, or u
  misc_feature (18)..(18): n is a, c, g, or u
gacgancccucncggggncgc

SEQ ID NO: 60299 - RNA, 22 nt, Artificial Sequence
  Synthetic
  misc_feature (7)..(7): n is a, c, g, or u
  misc_feature (13)..(13): n is a, c, g, or u
  misc_feature (19)..(19): n is a, c, g, or u
ggacgancccucncggggncgc

SEQ ID NO: 60300 - RNA, 23 nt, Artificial Sequence
  Synthetic
  misc_feature (8)..(8): n is a, c, g, or u
  misc_feature (14)..(14): n is a, c, g, or u
  misc_feature (20)..(20): n is a, c, g, or u
cggacgancccucncggggncgc

SEQ ID NO: 60301 - RNA, 24 nt, Artificial Sequence
  Synthetic
  misc_feature (9)..(9): n is a, c, g, or u
  misc_feature (15)..(15): n is a, c, g, or u
  misc_feature (21)..(21): n is a, c, g, or u
gcggacgancccucncggggncgc

SEQ ID NO: 60302 - RNA, 18 nt, Artificial Sequence
  Synthetic
uucaccucugcacgucgc

SEQ ID NO: 60303 - RNA, 19 nt, Artificial Sequence
  Synthetic
cuucaccucugcacgucgc

SEQ ID NO: 60304 - RNA, 20 nt, Artificial Sequence
  Synthetic
gcuucaccucugcacgucgc

SEQ ID NO: 60305 - RNA, 21 nt, Artificial Sequence
  Synthetic
cgcuucaccucugcacgucgc

SEQ ID NO: 60306 - RNA, 22 nt, Artificial Sequence
  Synthetic
ucgcuucaccucugcacgucgc

SEQ ID NO: 60307 - RNA, 23 nt, Artificial Sequence
  Synthetic
uucgcuucaccucugcacgucgc

SEQ ID NO: 60308 - RNA, 24 nt, Artificial Sequence
  Synthetic
cuucgcuucaccucugcacgucgc

SEQ ID NO: 60309 - RNA, 18 nt, Artificial Sequence
  Synthetic
ucucaaucgccgcgucgc

SEQ ID NO: 60310 - RNA, 19 nt, Artificial Sequence
  Synthetic
  misc_feature (1)..(1): n is a, c, g, or u
nucucaaucgccgcgucgc

SEQ ID NO: 60311 - RNA, 20 nt, Artificial Sequence
  Synthetic
  misc_feature (2)..(2): n is a, c, g, or u
gnucucaaucgccgcgucgc

SEQ ID NO: 60312 - RNA, 18 nt, Artificial Sequence
  Synthetic
  misc_feature (1)..(1): n is a, c, g, or u
  misc_feature (10)..(10): n is a, c, g, or u
nucuuuguanuaggaggc

SEQ ID NO: 60313 - RNA, 19 nt, Artificial Sequence
  Synthetic
  misc_feature (2)..(2): n is a, c, g, or u
  misc_feature (11)..(11): n is a, c, g, or u
gnucuuuguanuaggaggc

SEQ ID NO: 60314 - RNA, 20 nt, Artificial Sequence
  Synthetic
  misc_feature (1)..(1): n is a, c, g, or u
  misc_feature (3)..(3): n is a, c, g, or u
  misc_feature (12)..(12): n is a, c, g, or u
ngnucuuuguanuaggaggc

SEQ ID NO: 60315 - RNA, 21 nt, Artificial Sequence
  Synthetic
  misc_feature (2)..(2): n is a, c, g, or u
  misc_feature (4)..(4): n is a, c, g, or u
  misc_feature (13)..(13): n is a, c, g, or u
angnucuuuguanuaggaggc

SEQ ID NO: 60316 - RNA, 22 nt, Artificial Sequence
  Synthetic
  misc_feature (3)..(3): n is a, c, g, or u
  misc_feature (5)..(5): n is a, c, g, or u
  misc_feature (14)..(14): n is a, c, g, or u
aangnucuuuguanuaggaggc

SEQ ID NO: 60317 - RNA, 23 nt, Artificial Sequence
  Synthetic
  misc_feature (4)..(4): n is a, c, g, or u
  misc_feature (6)..(6): n is a, c, g, or u
  misc_feature (15)..(15): n is a, c, g, or u
uaangnucuuuguanuaggaggc

SEQ ID NO: 60318 - RNA, 24 nt, Artificial Sequence
  Synthetic
  misc_feature (5)..(5): n is a, c, g, or u
  misc_feature (7)..(7): n is a, c, g, or u
  misc_feature (16)..(16): n is a, c, g, or u
uuaangnucuuuguanuaggaggc

SEQ ID NO: 60319 - RNA, 18 nt, Artificial Sequence
  Synthetic
  misc_feature (9)..(10): n is a, c, g, or u
ggagcgaannucaucggc

SEQ ID NO: 60320 - RNA, 19 nt, Artificial Sequence
  Synthetic
  misc_feature (10)..(11): n is a, c, g, or u
uggagcgaannucaucggc

SEQ ID NO: 60321 - RNA, 20 nt, Artificial Sequence
  Synthetic
  misc_feature (11)..(12): n is a, c, g, or u
cuggagcgaannucaucggc

SEQ ID NO: 60322 - RNA, 21 nt, Artificial Sequence
  Synthetic
  misc_feature (12)..(13): n is a, c, g, or u
ucuggagcgaannucaucggc

SEQ ID NO: 60323 - RNA, 22 nt, Artificial Sequence
  Synthetic
  misc_feature (13)..(14): n is a, c, g, or u
gucuggagcgaannucaucggc

SEQ ID NO: 60324 - RNA, 23 nt, Artificial Sequence
  Synthetic
  misc_feature (14)..(15): n is a, c, g, or u
ggucuggagcgaannucaucggc

SEQ ID NO: 60325 - RNA, 24 nt, Artificial Sequence
  Synthetic
  misc_feature (15)..(16): n is a, c, g, or u
cggucuggagcgaannucaucggc

SEQ ID NO: 60326 - RNA, 18 nt, Artificial Sequence
  Synthetic
uuuaccccguugcucggc

SEQ ID NO: 60327 - RNA, 19 nt, Artificial Sequence
  Synthetic
cuuuaccccguugcucggc

SEQ ID NO: 60328 - RNA, 20 nt, Artificial Sequence
  Synthetic
ccuuuaccccguugcucggc

SEQ ID NO: 60329 - RNA, 18 nt, Artificial Sequence
  Synthetic
uguuuacgucccgucggc

SEQ ID NO: 60330 - RNA, 19 nt, Artificial Sequence
  Synthetic
uuguuuacgucccgucggc

SEQ ID NO: 60331 - RNA, 20 nt, Artificial Sequence
  Synthetic
uuuguuuacgucccgucggc

SEQ ID NO: 60332 - RNA, 21 nt, Artificial Sequence
  Synthetic
cuuuguuuacgucccgucggc

SEQ ID NO: 60333 - RNA, 22 nt, Artificial Sequence
  Synthetic
ccuuuguuuacgucccgucggc

SEQ ID NO: 60334 - RNA, 23 nt, Artificial Sequence
  Synthetic
uccuuuguuuacgucccgucggc

SEQ ID NO: 60335 - RNA, 24 nt, Artificial Sequence
  Synthetic
guccuuuguuuacgucccgucggc

SEQ ID NO: 60336 - RNA, 18 nt, Artificial Sequence
  Synthetic
  misc_feature (9)..(10): n is a, c, g, or u
ucaacgacnngaaggggc

SEQ ID NO: 60337 - RNA, 19 nt, Artificial Sequence
  Synthetic
  misc_feature (1)..(1): n is a, c, g, or u
  misc_feature (10)..(11): n is a, c, g, or u
nucaacgacnngaaggggc

SEQ ID NO: 60338 - RNA, 20 nt, Artificial Sequence
  Synthetic
  misc_feature (2)..(2): n is a, c, g, or u
  misc_feature (11)..(12): n is a, c, g, or u
unucaacgacnngaaggggc

SEQ ID NO: 60339 - RNA, 21 nt, Artificial Sequence
  Synthetic
  misc_feature (3)..(3): n is a, c, g, or u
  misc_feature (12)..(13): n is a, c, g, or u
cunucaacgacnngaaggggc

SEQ ID NO: 60340 - RNA, 22 nt, Artificial Sequence
  Synthetic
  misc_feature (4)..(4): n is a, c, g, or u
  misc_feature (13)..(14): n is a, c, g, or u
ucunucaacgacnngaaggggc

SEQ ID NO: 60341 - RNA, 23 nt, Artificial Sequence
  Synthetic
  misc_feature (5)..(5): n is a, c, g, or u
  misc_feature (14)..(15): n is a, c, g, or u
cucunucaacgacnngaaggggc

SEQ ID NO: 60342 - RNA, 24 nt, Artificial Sequence
  Synthetic
  misc_feature (6)..(6): n is a, c, g, or u
  misc_feature (15)..(16): n is a, c, g, or u
ccucunucaacgacnngaaggggc

SEQ ID NO: 60343 - RNA, 18 nt, Artificial Sequence
  Synthetic
cuuggguggcuuuggggc

SEQ ID NO: 60344 - RNA, 19 nt, Artificial Sequence
  Synthetic
ccuuggguggcuuuggggc

SEQ ID NO: 60345 - RNA, 20 nt, Artificial Sequence
  Synthetic
gccuuggguggcuuuggggc

SEQ ID NO: 60346 - RNA, 21 nt, Artificial Sequence
  Synthetic
ugccuuggguggcuuuggggc

SEQ ID NO: 60347 - RNA, 22 nt, Artificial Sequence
  Synthetic
gugccuuggguggcuuuggggc

SEQ ID NO: 60348 - RNA, 23 nt, Artificial Sequence
  Synthetic
ugugccuuggguggcuuuggggc

SEQ ID NO: 60349 - RNA, 24 nt, Artificial Sequence
  Synthetic
cugugccuuggguggcuuuggggc

SEQ ID NO: 60350 - RNA, 18 nt, Artificial Sequence
  Synthetic
  misc_feature (3)..(3): n is a, c, g, or u
  misc_feature (6)..(6): n is a, c, g, or u
gunaanacuaacaugggc

SEQ ID NO: 60351 - RNA, 19 nt, Artificial Sequence
  Synthetic
  misc_feature (4)..(4): n is a, c, g, or u
  misc_feature (7)..(7): n is a, c, g, or u
ugunaanacuaacaugggc

SEQ ID NO: 60352 - RNA, 20 nt, Artificial Sequence
  Synthetic
  misc_feature (5)..(5): n is a, c, g, or u
  misc_feature (8)..(8): n is a, c, g, or u
augunaanacuaacaugggc

SEQ ID NO: 60353 - RNA, 21 nt, Artificial Sequence
  Synthetic
  misc_feature (6)..(6): n is a, c, g, or u
  misc_feature (9)..(9): n is a, c, g, or u
uaugunaanacuaacaugggc

SEQ ID NO: 60354 - RNA, 22 nt, Artificial Sequence
  Synthetic
  misc_feature (7)..(7): n is a, c, g, or u
  misc_feature (10)..(10): n is a, c, g, or u
cuaugunaanacuaacaugggc

SEQ ID NO: 60355 - RNA, 23 nt, Artificial Sequence
  Synthetic
  misc_feature (8)..(8): n is a, c, g, or u
  misc_feature (11)..(11): n is a, c, g, or u
acuaugunaanacuaacaugggc

SEQ ID NO: 60356 - RNA, 24 nt, Artificial Sequence
  Synthetic
  misc_feature (9)..(9): n is a, c, g, or u
  misc_feature (12)..(12): n is a, c, g, or u
aacuaugunaanacuaacaugggc

SEQ ID NO: 60357 - RNA, 18 nt, Artificial Sequence
  Synthetic
auaccuaugggagugggc

SEQ ID NO: 60358 - RNA, 19 nt, Artificial Sequence
  Synthetic
aauaccuaugggagugggc

SEQ ID NO: 60359 - RNA, 20 nt, Artificial Sequence
  Synthetic
aaauaccuaugggagugggc

SEQ ID NO: 60360 - RNA, 21 nt, Artificial Sequence
  Synthetic
aaaauaccuaugggagugggc

SEQ ID NO: 60361 - RNA, 22 nt, Artificial Sequence
  Synthetic
gaaaauaccuaugggagugggc

SEQ ID NO: 60362 - RNA, 23 nt, Artificial Sequence
  Synthetic
ggaaaauaccuaugggagugggc

SEQ ID NO: 60363 - RNA, 24 nt, Artificial Sequence
  Synthetic
aggaaaauaccuaugggagugggc

SEQ ID NO: 60364 - RNA, 18 nt, Artificial Sequence
  Synthetic
uuggcuuccugggugggc

SEQ ID NO: 60365 - RNA, 19 nt, Artificial Sequence
  Synthetic
uuuggcuuccugggugggc

SEQ ID NO: 60366 - RNA, 20 nt, Artificial Sequence
  Synthetic
cuuuggcuuccugggugggc

SEQ ID NO: 60367 - RNA, 21 nt, Artificial Sequence
  Synthetic
acuuuggcuuccugggugggc

SEQ ID NO: 60368 - RNA, 22 nt, Artificial Sequence
  Synthetic
gacuuuggcuuccugggugggc

SEQ ID NO: 60369 - RNA, 23 nt, Artificial Sequence
  Synthetic
ugacuuuggcuuccugggugggc

SEQ ID NO: 60370 - RNA, 24 nt, Artificial Sequence
  Synthetic
augacuuuggcuuccugggugggc

SEQ ID NO: 60371 - RNA, 18 nt, Artificial Sequence
  Synthetic
  misc_feature (13)..(13): n is a, c, g, or u
caucccaucaucnugggc

SEQ ID NO: 60372 - RNA, 19 nt, Artificial Sequence
  Synthetic
  misc_feature (14)..(14): n is a, c, g, or u
ccaucccaucaucnugggc

SEQ ID NO: 60373 - RNA, 20 nt, Artificial Sequence
  Synthetic
  misc_feature (15)..(15): n is a, c, g, or u
cccaucccaucaucnugggc

SEQ ID NO: 60374 - RNA, 21 nt, Artificial Sequence
  Synthetic
  misc_feature (16)..(16): n is a, c, g, or u
ucccaucccaucaucnugggc

SEQ ID NO: 60375 - RNA, 22 nt, Artificial Sequence
  Synthetic
  misc_feature (17)..(17): n is a, c, g, or u
uucccaucccaucaucnugggc

SEQ ID NO: 60376 - RNA, 23 nt, Artificial Sequence
  Synthetic
  misc_feature (18)..(18): n is a, c, g, or u
auucccaucccaucaucnugggc

SEQ ID NO: 60377 - RNA, 24 nt, Artificial Sequence
  Synthetic
  misc_feature (19)..(19): n is a, c, g, or u
uauucccaucccaucaucnugggc

SEQ ID NO: 60378 - RNA, 18 nt, Artificial Sequence
  Synthetic
agcugugccuuggguggc

SEQ ID NO: 60379 - RNA, 19 nt, Artificial Sequence
  Synthetic
aagcugugccuuggguggc

SEQ ID NO: 60380 - RNA, 20 nt, Artificial Sequence
  Synthetic
caagcugugccuuggguggc

SEQ ID NO: 60381 - RNA, 21 nt, Artificial Sequence
  Synthetic
ccaagcugugccuuggguggc

SEQ ID NO: 60382 - RNA, 22 nt, Artificial Sequence
  Synthetic
uccaagcugugccuuggguggc

SEQ ID NO: 60383 - RNA, 23 nt, Artificial Sequence
  Synthetic
cuccaagcugugccuuggguggc

SEQ ID NO: 60384 - RNA, 24 nt, Artificial Sequence
  Synthetic
ccuccaagcugugccuuggguggc

SEQ ID NO: 60385 - RNA, 18 nt, Artificial Sequence
  Synthetic
  misc_feature (1)..(1): n is a, c, g, or u
  misc_feature (7)..(7): n is a, c, g, or u
  misc_feature (10)..(10): n is a, c, g, or u
  misc_feature (16)..(16): n is a, c, g, or u
nuugganganccugcngc

SEQ ID NO: 60386 - RNA, 19 nt, Artificial Sequence
  Synthetic
  misc_feature (2)..(2): n is a, c, g, or u
  misc_feature (8)..(8): n is a, c, g, or u
  misc_feature (11)..(11): n is a, c, g, or u
  misc_feature (17)..(17): n is a, c, g, or u
anuugganganccugcngc

SEQ ID NO: 60387 - RNA, 20 nt, Artificial Sequence
  Synthetic
  misc_feature (3)..(3): n is a, c, g, or u
  misc_feature (9)..(9): n is a, c, g, or u
  misc_feature (12)..(12): n is a, c, g, or u
  misc_feature (18)..(18): n is a, c, g, or u
aanuugganganccugcngc

SEQ ID NO: 60388 - RNA, 21 nt, Artificial Sequence
  Synthetic
  misc_feature (4)..(4): n is a, c, g, or u
  misc_feature (10)..(10): n is a, c, g, or u
  misc_feature (13)..(13): n is a, c, g, or u
  misc_feature (19)..(19): n is a, c, g, or u
uaanuugganganccugcngc

SEQ ID NO: 60389 - RNA, 22 nt, Artificial Sequence
  Synthetic
  misc_feature (5)..(5): n is a, c, g, or u
  misc_feature (11)..(11): n is a, c, g, or u
  misc_feature (14)..(14): n is a, c, g, or u
  misc_feature (20)..(20): n is a, c, g, or u
auaanuugganganccugcngc

SEQ ID NO: 60390 - RNA, 23 nt, Artificial Sequence
  Synthetic
  misc_feature (6)..(6): n is a, c, g, or u
  misc_feature (12)..(12): n is a, c, g, or u
  misc_feature (15)..(15): n is a, c, g, or u
  misc_feature (21)..(21): n is a, c, g, or u
aauaanuugganganccugcngc

SEQ ID NO: 60391 - RNA, 24 nt, Artificial Sequence
  Synthetic
  misc_feature (7)..(7): n is a, c, g, or u
  misc_feature (13)..(13): n is a, c, g, or u
  misc_feature (16)..(16): n is a, c, g, or u
  misc_feature (22)..(22): n is a, c, g, or u
caauaanuugganganccugcngc

SEQ ID NO: 60392 - RNA, 18 nt, Artificial Sequence
  Synthetic
uuggccaucagcgcaugc

SEQ ID NO: 60393 - RNA, 19 nt, Artificial Sequence
  Synthetic
auuggccaucagcgcaugc

SEQ ID NO: 60394 - RNA, 20 nt, Artificial Sequence
  Synthetic
cauuggccaucagcgcaugc

SEQ ID NO: 60395 - RNA, 21 nt, Artificial Sequence
  Synthetic
ccauuggccaucagcgcaugc

SEQ ID NO: 60396 - RNA, 22 nt, Artificial Sequence
  Synthetic
gccauuggccaucagcgcaugc

SEQ ID NO: 60397 - RNA, 23 nt, Artificial Sequence
  Synthetic
ggccauuggccaucagcgcaugc

SEQ ID NO: 60398 - RNA, 24 nt, Artificial Sequence
  Synthetic
uggccauuggccaucagcgcaugc

SEQ ID NO: 60399 - RNA, 18 nt, Artificial Sequence
  Synthetic
  misc_feature (7)..(7): n is a, c, g, or u
  misc_feature (11)..(11): n is a, c, g, or u
agcccunuacngggaugc

SEQ ID NO: 60400 - RNA, 19 nt, Artificial Sequence
  Synthetic
  misc_feature (8)..(8): n is a, c, g, or u
  misc_feature (12)..(12): n is a, c, g, or u
cagcccunuacngggaugc

SEQ ID NO: 60401 - RNA, 20 nt, Artificial Sequence
  Synthetic
  misc_feature (9)..(9): n is a, c, g, or u
  misc_feature (13)..(13): n is a, c, g, or u
ucagcccunuacngggaugc

SEQ ID NO: 60402 - RNA, 21 nt, Artificial Sequence
  Synthetic
  misc_feature (10)..(10): n is a, c, g, or u
  misc_feature (14)..(14): n is a, c, g, or u
uucagcccunuacngggaugc

SEQ ID NO: 60403 - RNA, 22 nt, Artificial Sequence
  Synthetic
  misc_feature (11)..(11): n is a, c, g, or u
  misc_feature (15)..(15): n is a, c, g, or u
cuucagcccunuacngggaugc

SEQ ID NO: 60404 - RNA, 23 nt, Artificial Sequence
  Synthetic
  misc_feature (12)..(12): n is a, c, g, or u
  misc_feature (16)..(16): n is a, c, g, or u
gcuucagcccunuacngggaugc

SEQ ID NO: 60405 - RNA, 24 nt, Artificial Sequence
  Synthetic
  misc_feature (13)..(13): n is a, c, g, or u
  misc_feature (17)..(17): n is a, c, g, or u
cgcuucagcccunuacngggaugc

SEQ ID NO: 60406 - RNA, 18 nt, Artificial Sequence
  Synthetic
  misc_feature (2)..(2): n is a, c, g, or u
  misc_feature (14)..(14): n is a, c, g, or u
cncauccacaggcnaugc

SEQ ID NO: 60407 - RNA, 19 nt, Artificial Sequence
  Synthetic
  misc_feature (3)..(3): n is a, c, g, or u
  misc_feature (15)..(15): n is a, c, g, or u
acncauccacaggcnaugc

SEQ ID NO: 60408 - RNA, 20 nt, Artificial Sequence
  Synthetic
  misc_feature (4)..(4): n is a, c, g, or u
  misc_feature (16)..(16): n is a, c, g, or u
cacncauccacaggcnaugc

SEQ ID NO: 60409 - RNA, 21 nt, Artificial Sequence
  Synthetic
  misc_feature (5)..(5): n is a, c, g, or u
  misc_feature (17)..(17): n is a, c, g, or u
acacncauccacaggcnaugc

SEQ ID NO: 60410 - RNA, 22 nt, Artificial Sequence
  Synthetic
  misc_feature (6)..(6): n is a, c, g, or u
  misc_feature (18)..(18): n is a, c, g, or u
gacacncauccacaggcnaugc

SEQ ID NO: 60411 - RNA, 23 nt, Artificial Sequence
  Synthetic
  misc_feature (7)..(7): n is a, c, g, or u
  misc_feature (19)..(19): n is a, c, g, or u
agacacncauccacaggcnaugc

SEQ ID NO: 60412 - RNA, 24 nt, Artificial Sequence
  Synthetic
  misc_feature (8)..(8): n is a, c, g, or u
  misc_feature (20)..(20): n is a, c, g, or u
gagacacncauccacaggcnaugc

SEQ ID NO: 60413 - RNA, 18 nt, Artificial Sequence
  Synthetic
  misc_feature (3)..(3): n is a, c, g, or u
agngacacagaacccugc

SEQ ID NO: 60414 - RNA, 19 nt, Artificial Sequence
  Synthetic
  misc_feature (4)..(4): n is a, c, g, or u
cagngacacagaacccugc

SEQ ID NO: 60415 - RNA, 20 nt, Artificial Sequence
  Synthetic
  misc_feature (5)..(5): n is a, c, g, or u
ucagngacacagaacccugc

SEQ ID NO: 60416 - RNA, 21 nt, Artificial Sequence
  Synthetic
  misc_feature (6)..(6): n is a, c, g, or u
uucagngacacagaacccugc

SEQ ID NO: 60417 - RNA, 22 nt, Artificial Sequence
  Synthetic
  misc_feature (7)..(7): n is a, c, g, or u
guucagngacacagaacccugc

SEQ ID NO: 60418 - RNA, 23 nt, Artificial Sequence
  Synthetic
  misc_feature (8)..(8): n is a, c, g, or u
aguucagngacacagaacccugc

SEQ ID NO: 60419 - RNA, 24 nt, Artificial Sequence
  Synthetic
  misc_feature (9)..(9): n is a, c, g, or u
caguucagngacacagaacccugc

SEQ ID NO: 60420 - RNA, 18 nt, Artificial Sequence
  Synthetic
gaagacugggggcccugc

SEQ ID NO: 60421 - RNA, 19 nt, Artificial Sequence
  Synthetic
  misc_feature (1)..(1): n is a, c, g, or u
ngaagacugggggcccugc

SEQ ID NO: 60422 - RNA, 20 nt, Artificial Sequence
  Synthetic
  misc_feature (2)..(2): n is a, c, g, or u
ungaagacugggggcccugc

SEQ ID NO: 60423 - RNA, 21 nt, Artificial Sequence
  Synthetic
  misc_feature (3)..(3): n is a, c, g, or u
cungaagacugggggcccugc

SEQ ID NO: 60424 - RNA, 22 nt, Artificial Sequence
  Synthetic
  misc_feature (4)..(4): n is a, c, g, or u
ucungaagacugggggcccugc

SEQ ID NO: 60425 - RNA, 23 nt, Artificial Sequence
  Synthetic
  misc_feature (5)..(5): n is a, c, g, or u
uucungaagacugggggcccugc

SEQ ID NO: 60426 - RNA, 24 nt, Artificial Sequence
  Synthetic
  misc_feature (6)..(6): n is a, c, g, or u
cuucungaagacugggggcccugc

SEQ ID NO: 60427 - RNA, 18 nt, Artificial Sequence
  Synthetic
caauuuguucaguggugc

SEQ ID NO: 60428 - RNA, 19 nt, Artificial Sequence
  Synthetic
gcaauuuguucaguggugc

SEQ ID NO: 60429 - RNA, 20 nt, Artificial Sequence
  Synthetic
ugcaauuuguucaguggugc

SEQ ID NO: 60430 - RNA, 21 nt, Artificial Sequence
  Synthetic
gugcaauuuguucaguggugc

SEQ ID NO: 60431 - RNA, 22 nt, Artificial Sequence
  Synthetic
agugcaauuuguucaguggugc

SEQ ID NO: 60432 - RNA, 23 nt, Artificial Sequence
  Synthetic
uagugcaauuuguucaguggugc

SEQ ID NO: 60433 - RNA, 24 nt, Artificial Sequence
  Synthetic
cuagugcaauuuguucaguggugc

SEQ ID NO: 60434 - RNA, 18 nt, Artificial Sequence
  Synthetic
caagccuccaagcugugc

SEQ ID NO: 60435 - RNA, 19 nt, Artificial Sequence
  Synthetic
ucaagccuccaagcugugc

SEQ ID NO: 60436 - RNA, 20 nt, Artificial Sequence
  Synthetic
uucaagccuccaagcugugc

SEQ ID NO: 60437 - RNA, 21 nt, Artificial Sequence
  Synthetic
guucaagccuccaagcugugc

SEQ ID NO: 60438 - RNA, 22 nt, Artificial Sequence
  Synthetic
uguucaagccuccaagcugugc

SEQ ID NO: 60439 - RNA, 23 nt, Artificial Sequence
  Synthetic
cuguucaagccuccaagcugugc

SEQ ID NO: 60440 - RNA, 24 nt, Artificial Sequence
  Synthetic
acuguucaagccuccaagcugugc

SEQ ID NO: 60441 - RNA, 18 nt, Artificial Sequence
  Synthetic
aaccugcacaacucuugc

SEQ ID NO: 60442 - RNA, 19 nt, Artificial Sequence
  Synthetic
aaaccugcacaacucuugc

SEQ ID NO: 60443 - RNA, 20 nt, Artificial Sequence
  Synthetic
aaaaccugcacaacucuugc

SEQ ID NO: 60444 - RNA, 21 nt, Artificial Sequence
  Synthetic
caaaaccugcacaacucuugc

SEQ ID NO: 60445 - RNA, 22 nt, Artificial Sequence
  Synthetic
gcaaaaccugcacaacucuugc

SEQ ID NO: 60446 - RNA, 23 nt, Artificial Sequence
  Synthetic
ugcaaaaccugcacaacucuugc

SEQ ID NO: 60447 - RNA, 24 nt, Artificial Sequence
  Synthetic
augcaaaaccugcacaacucuugc

SEQ ID NO: 60448 - RNA, 18 nt, Artificial Sequence
  Synthetic
  misc_feature (6)..(6): n is a, c, g, or u
  misc_feature (17)..(17): n is a, c, g, or u
gccugnugggguggagnc

SEQ ID NO: 60449 - RNA, 19 nt, Artificial Sequence
  Synthetic
  misc_feature (7)..(7): n is a, c, g, or u
  misc_feature (18)..(18): n is a, c, g, or u
ggccugnugggguggagnc

SEQ ID NO: 60450 - RNA, 20 nt, Artificial Sequence
  Synthetic
  misc_feature (8)..(8): n is a, c, g, or u
  misc_feature (19)..(19): n is a, c, g, or u
uggccugnugggguggagnc

SEQ ID NO: 60451 - RNA, 21 nt, Artificial Sequence
  Synthetic
  misc_feature (9)..(9): n is a, c, g, or u
  misc_feature (20)..(20): n is a, c, g, or u
guggccugnugggguggagnc

SEQ ID NO: 60452 - RNA, 22 nt, Artificial Sequence
  Synthetic
  misc_feature (10)..(10): n is a, c, g, or u
  misc_feature (21)..(21): n is a, c, g, or u
gguggccugnugggguggagnc

SEQ ID NO: 60453 - RNA, 23 nt, Artificial Sequence
  Synthetic
  misc_feature (11)..(11): n is a, c, g, or u
  misc_feature (22)..(22): n is a, c, g, or u
cgguggccugnugggguggagnc

SEQ ID NO: 60454 - RNA, 24 nt, Artificial Sequence
  Synthetic
  misc_feature (12)..(12): n is a, c, g, or u
  misc_feature (23)..(23): n is a, c, g, or u
acgguggccugnugggguggagnc

SEQ ID NO: 60455 - RNA, 18 nt, Artificial Sequence
  Synthetic
  misc_feature (17)..(17): n is a, c, g, or u
cugccaacuggauccunc

SEQ ID NO: 60456 - RNA, 19 nt, Artificial Sequence
  Synthetic
  misc_feature (18)..(18): n is a, c, g, or u
gcugccaacuggauccunc

SEQ ID NO: 60457 - RNA, 20 nt, Artificial Sequence
  Synthetic
  misc_feature (19)..(19): n is a, c, g, or u
ugcugccaacuggauccunc

SEQ ID NO: 60458 - RNA, 21 nt, Artificial Sequence
  Synthetic
  misc_feature (20)..(20): n is a, c, g, or u
gugcugccaacuggauccunc

SEQ ID NO: 60459 - RNA, 22 nt, Artificial Sequence
  Synthetic
  misc_feature (21)..(21): n is a, c, g, or u
ugugcugccaacuggauccunc

SEQ ID NO: 60460 - RNA, 23 nt, Artificial Sequence
  Synthetic
  misc_feature (1)..(1): n is a, c, g, or u
  misc_feature (22)..(22): n is a, c, g, or u
nugugcugccaacuggauccunc

SEQ ID NO: 60461 - RNA, 24 nt, Artificial Sequence
  Synthetic
  misc_feature (2)..(2): n is a, c, g, or u
  misc_feature (23)..(23): n is a, c, g, or u
gnugugcugccaacuggauccunc

SEQ ID NO: 60462 - RNA, 18 nt, Artificial Sequence
  Synthetic
  misc_feature (17)..(17): n is a, c, g, or u
ggaaguacaccuccuunc

SEQ ID NO: 60463 - RNA, 19 nt, Artificial Sequence
  Synthetic
  misc_feature (18)..(18): n is a, c, g, or u
aggaaguacaccuccuunc

SEQ ID NO: 60464 - RNA, 20 nt, Artificial Sequence
  Synthetic
  misc_feature (19)..(19): n is a, c, g, or u
uaggaaguacaccuccuunc

SEQ ID NO: 60465 - RNA, 21 nt, Artificial Sequence
  Synthetic
  misc_feature (20)..(20): n is a, c, g, or u
cuaggaaguacaccuccuunc

SEQ ID NO: 60466 - RNA, 22 nt, Artificial Sequence
  Synthetic
  misc_feature (21)..(21): n is a, c, g, or u
ucuaggaaguacaccuccuunc

SEQ ID NO: 60467 - RNA, 23 nt, Artificial Sequence
  Synthetic
  misc_feature (22)..(22): n is a, c, g, or u
cucuaggaaguacaccuccuunc

SEQ ID NO: 60468 - RNA, 24 nt, Artificial Sequence
  Synthetic
  misc_feature (23)..(23): n is a, c, g, or u
ucucuaggaaguacaccuccuunc

SEQ ID NO: 60469 - RNA, 18 nt, Artificial Sequence
  Synthetic
  misc_feature (8)..(8): n is a, c, g, or u
  misc_feature (17)..(17): n is a, c, g, or u
uuccuganauucauuunc

SEQ ID NO: 60470 - RNA, 19 nt, Artificial Sequence
  Synthetic
  misc_feature (9)..(9): n is a, c, g, or u
  misc_feature (18)..(18): n is a, c, g, or u
uuuccuganauucauuunc

SEQ ID NO: 60471 - RNA, 20 nt, Artificial Sequence
  Synthetic
  misc_feature (10)..(10): n is a, c, g, or u
  misc_feature (19)..(19): n is a, c, g, or u
uuuuccuganauucauuunc

SEQ ID NO: 60472 - RNA, 21 nt, Artificial Sequence
  Synthetic
  misc_feature (11)..(11): n is a, c, g, or u
  misc_feature (20)..(20): n is a, c, g, or u
cuuuuccuganauucauuunc

SEQ ID NO: 60473 - RNA, 22 nt, Artificial Sequence
  Synthetic
  misc_feature (12)..(12): n is a, c, g, or u
  misc_feature (21)..(21): n is a, c, g, or u
ucuuuuccuganauucauuunc

SEQ ID NO: 60474 - RNA, 23 nt, Artificial Sequence
  Synthetic
  misc_feature (13)..(13): n is a, c, g, or u
  misc_feature (22)..(22): n is a, c, g, or u
uucuuuuccuganauucauuunc

SEQ ID NO: 60475 - RNA, 24 nt, Artificial Sequence
  Synthetic
  misc_feature (14)..(14): n is a, c, g, or u
  misc_feature (23)..(23): n is a, c, g, or u
cuucuuuuccuganauucauuunc

SEQ ID NO: 60476 - RNA, 18 nt, Artificial Sequence
  Synthetic
ucgcagaagaucucaauc

SEQ ID NO: 60477 - RNA, 19 nt, Artificial Sequence
  Synthetic
gucgcagaagaucucaauc

SEQ ID NO: 60478 - RNA, 20 nt, Artificial Sequence
  Synthetic
cgucgcagaagaucucaauc

SEQ ID NO: 60479 - RNA, 18 nt, Artificial Sequence
  Synthetic
uggaucgaagaauacauc

SEQ ID NO: 60480 - RNA, 19 nt, Artificial Sequence
  Synthetic
cuggaucgaagaauacauc

SEQ ID NO: 60481 - RNA, 20 nt, Artificial Sequence
  Synthetic
ccuggaucgaagaauacauc

SEQ ID NO: 60482 - RNA, 21 nt, Artificial Sequence
  Synthetic
accuggaucgaagaauacauc

SEQ ID NO: 60483 - RNA, 22 nt, Artificial Sequence
  Synthetic
  misc_feature (1)..(1): n is a, c, g, or u
naccuggaucgaagaauacauc

SEQ ID NO: 60484 - RNA, 23 nt, Artificial Sequence
  Synthetic
  misc_feature (2)..(2): n is a, c, g, or u
unaccuggaucgaagaauacauc

SEQ ID NO: 60485 - RNA, 24 nt, Artificial Sequence
  Synthetic
  misc_feature (3)..(3): n is a, c, g, or u
aunaccuggaucgaagaauacauc

SEQ ID NO: 60486 - RNA, 18 nt, Artificial Sequence
  Synthetic
  misc_feature (14)..(14): n is a, c, g, or u
cucuaagagacacncauc

SEQ ID NO: 60487 - RNA, 19 nt, Artificial Sequence
  Synthetic
  misc_feature (15)..(15): n is a, c, g, or u
ccucuaagagacacncauc

SEQ ID NO: 60488 - RNA, 20 nt, Artificial Sequence
  Synthetic
  misc_feature (16)..(16): n is a, c, g, or u
accucuaagagacacncauc

SEQ ID NO: 60489 - RNA, 21 nt, Artificial Sequence
  Synthetic
  misc_feature (17)..(17): n is a, c, g, or u
caccucuaagagacacncauc

SEQ ID NO: 60490 - RNA, 22 nt, Artificial Sequence
  Synthetic
  misc_feature (18)..(18): n is a, c, g, or u
ccaccucuaagagacacncauc

SEQ ID NO: 60491 - RNA, 23 nt, Artificial Sequence
  Synthetic
  misc_feature (19)..(19): n is a, c, g, or u
uccaccucuaagagacacncauc

SEQ ID NO: 60492 - RNA, 24 nt, Artificial Sequence
  Synthetic
  misc_feature (20)..(20): n is a, c, g, or u
cuccaccucuaagagacacncauc

SEQ ID NO: 60493 - RNA, 18 nt, Artificial Sequence
  Synthetic
uauucccaucccaucauc

SEQ ID NO: 60494 - RNA, 19 nt, Artificial Sequence
  Synthetic
guauucccaucccaucauc

SEQ ID NO: 60495 - RNA, 20 nt, Artificial Sequence
  Synthetic
uguauucccaucccaucauc

SEQ ID NO: 60496 - RNA, 21 nt, Artificial Sequence
  Synthetic
  misc_feature (1)..(1): n is a, c, g, or u
nuguauucccaucccaucauc

SEQ ID NO: 60497 - RNA, 22 nt, Artificial Sequence
  Synthetic
  misc_feature (2)..(2): n is a, c, g, or u
cnuguauucccaucccaucauc

SEQ ID NO: 60498 - RNA, 23 nt, Artificial Sequence
  Synthetic
  misc_feature (3)..(3): n is a, c, g, or u
acnuguauucccaucccaucauc

SEQ ID NO: 60499 - RNA, 24 nt, Artificial Sequence
  Synthetic
  misc_feature (4)..(4): n is a, c, g, or u
cacnuguauucccaucccaucauc

SEQ ID NO: 60500 - RNA, 18 nt, Artificial Sequence
  Synthetic
  misc_feature (8)..(8): n is a, c, g, or u
uccucuanuuccaggauc

SEQ ID NO: 60501 - RNA, 19 nt, Artificial Sequence
  Synthetic
  misc_feature (9)..(9): n is a, c, g, or u
guccucuanuuccaggauc

SEQ ID NO: 60502 - RNA, 20 nt, Artificial Sequence
  Synthetic
  misc_feature (10)..(10): n is a, c, g, or u
uguccucuanuuccaggauc

SEQ ID NO: 60503 - RNA, 21 nt, Artificial Sequence
  Synthetic
  misc_feature (11)..(11): n is a, c, g, or u
uuguccucuanuuccaggauc

SEQ ID NO: 60504 - RNA, 22 nt, Artificial Sequence
  Synthetic
  misc_feature (12)..(12): n is a, c, g, or u
uuuguccucuanuuccaggauc

SEQ ID NO: 60505 - RNA, 23 nt, Artificial Sequence
  Synthetic
  misc_feature (13)..(13): n is a, c, g, or u
guuuguccucuanuuccaggauc

SEQ ID NO: 60506 - RNA, 24 nt, Artificial Sequence
  Synthetic
  misc_feature (14)..(14): n is a, c, g, or u
cguuuguccucuanuuccaggauc

SEQ ID NO: 60507 - RNA, 18 nt, Artificial Sequence
  Synthetic
  misc_feature (1)..(1): n is a, c, g, or u
  misc_feature (9)..(9): n is a, c, g, or u
nggucaaunaccuggauc

SEQ ID NO: 60508 - RNA, 19 nt, Artificial Sequence
  Synthetic
  misc_feature (2)..(2): n is a, c, g, or u
  misc_feature (10)..(10): n is a, c, g, or u
anggucaaunaccuggauc

SEQ ID NO: 60509 - RNA, 20 nt, Artificial Sequence
  Synthetic
  misc_feature (3)..(3): n is a, c, g, or u
  misc_feature (11)..(11): n is a, c, g, or u
ganggucaaunaccuggauc

SEQ ID NO: 60510 - RNA, 21 nt, Artificial Sequence
  Synthetic
  misc_feature (4)..(4): n is a, c, g, or u
  misc_feature (12)..(12): n is a, c, g, or u
gganggucaaunaccuggauc

SEQ ID NO: 60511 - RNA, 22 nt, Artificial Sequence
  Synthetic
  misc_feature (5)..(5): n is a, c, g, or u
  misc_feature (13)..(13): n is a, c, g, or u
agganggucaaunaccuggauc

SEQ ID NO: 60512 - RNA, 23 nt, Artificial Sequence
  Synthetic
  misc_feature (6)..(6): n is a, c, g, or u
  misc_feature (14)..(14): n is a, c, g, or u
cagganggucaaunaccuggauc

SEQ ID NO: 60513 - RNA, 24 nt, Artificial Sequence
  Synthetic
  misc_feature (7)..(7): n is a, c, g, or u
  misc_feature (15)..(15): n is a, c, g, or u
ucagganggucaaunaccuggauc

SEQ ID NO: 60514 - RNA, 18 nt, Artificial Sequence
  Synthetic
  misc_feature (8)..(8): n is a, c, g, or u
  misc_feature (14)..(14): n is a, c, g, or u
accaggcncuguungauc

SEQ ID NO: 60515 - RNA, 19 nt, Artificial Sequence
  Synthetic
  misc_feature (9)..(9): n is a, c, g, or u
  misc_feature (15)..(15): n is a, c, g, or u
caccaggcncuguungauc

SEQ ID NO: 60516 - RNA, 20 nt, Artificial Sequence
  Synthetic
  misc_feature (10)..(10): n is a, c, g, or u
  misc_feature (16)..(16): n is a, c, g, or u
ccaccaggcncuguungauc

SEQ ID NO: 60517 - RNA, 21 nt, Artificial Sequence
  Synthetic
  misc_feature (11)..(11): n is a, c, g, or u
  misc_feature (17)..(17): n is a, c, g, or u
uccaccaggcncuguungauc

SEQ ID NO: 60518 - RNA, 22 nt, Artificial Sequence
  Synthetic
  misc_feature (12)..(12): n is a, c, g, or u
  misc_feature (18)..(18): n is a, c, g, or u
uuccaccaggcncuguungauc

SEQ ID NO: 60519 - RNA, 23 nt, Artificial Sequence
  Synthetic
  misc_feature (13)..(13): n is a, c, g, or u
  misc_feature (19)..(19): n is a, c, g, or u
guuccaccaggcncuguungauc

SEQ ID NO: 60520 - RNA, 24 nt, Artificial Sequence
  Synthetic
  misc_feature (14)..(14): n is a, c, g, or u
  misc_feature (20)..(20): n is a, c, g, or u
aguuccaccaggcncuguungauc

SEQ ID NO: 60521 - RNA, 18 nt, Artificial Sequence
  Synthetic
caacuuguccuggcuauc

SEQ ID NO: 60522 - RNA, 19 nt, Artificial Sequence
  Synthetic
ccaacuuguccuggcuauc

SEQ ID NO: 60523 - RNA, 20 nt, Artificial Sequence
  Synthetic
uccaacuuguccuggcuauc

SEQ ID NO: 60524 - RNA, 21 nt, Artificial Sequence
  Synthetic
cuccaacuuguccuggcuauc

SEQ ID NO: 60525 - RNA, 22 nt, Artificial Sequence
  Synthetic
ccuccaacuuguccuggcuauc

SEQ ID NO: 60526 - RNA, 23 nt, Artificial Sequence
  Synthetic
uccuccaacuuguccuggcuauc

SEQ ID NO: 60527 - RNA, 24 nt, Artificial Sequence
  Synthetic
guccuccaacuuguccuggcuauc

SEQ ID NO: 60528 - RNA, 18 nt, Artificial Sequence
  Synthetic
uaccaauuuucuguuauc

SEQ ID NO: 60529 - RNA, 19 nt, Artificial Sequence
  Synthetic
uuaccaauuuucuguuauc

SEQ ID NO: 60530 - RNA, 20 nt, Artificial Sequence
  Synthetic
guuaccaauuuucuguuauc

SEQ ID NO: 60531 - RNA, 21 nt, Artificial Sequence
  Synthetic
uguuaccaauuuucuguuauc

SEQ ID NO: 60532 - RNA, 22 nt, Artificial Sequence
  Synthetic
cuguuaccaauuuucuguuauc

SEQ ID NO: 60533 - RNA, 23 nt, Artificial Sequence
  Synthetic
gcuguuaccaauuuucuguuauc

SEQ ID NO: 60534 - RNA, 24 nt, Artificial Sequence
  Synthetic
cgcuguuaccaauuuucuguuauc

SEQ ID NO: 60535 - RNA, 18 nt, Artificial Sequence
  Synthetic
aacaucacaucaggacuc

SEQ ID NO: 60536 - RNA, 19 nt, Artificial Sequence
  Synthetic
caacaucacaucaggacuc

SEQ ID NO: 60537 - RNA, 20 nt, Artificial Sequence
  Synthetic
acaacaucacaucaggacuc

SEQ ID NO: 60538 - RNA, 21 nt, Artificial Sequence
  Synthetic
gacaacaucacaucaggacuc

SEQ ID NO: 60539 - RNA, 22 nt, Artificial Sequence
  Synthetic
ggacaacaucacaucaggacuc

SEQ ID NO: 60540 - RNA, 23 nt, Artificial Sequence
  Synthetic
uggacaacaucacaucaggacuc

SEQ ID NO: 60541 - RNA, 24 nt, Artificial Sequence
  Synthetic
auggacaacaucacaucaggacuc

SEQ ID NO: 60542 - RNA, 18 nt, Artificial Sequence
  Synthetic
uuaguauuccuuggacuc

SEQ ID NO: 60543 - RNA, 19 nt, Artificial Sequence
  Synthetic
guuaguauuccuuggacuc

SEQ ID NO: 60544 - RNA, 20 nt, Artificial Sequence
  Synthetic
uguuaguauuccuuggacuc

SEQ ID NO: 60545 - RNA, 21 nt, Artificial Sequence
  Synthetic
auguuaguauuccuuggacuc

SEQ ID NO: 60546 - RNA, 22 nt, Artificial Sequence
  Synthetic
aauguuaguauuccuuggacuc

SEQ ID NO: 60547 - RNA, 23 nt, Artificial Sequence
  Synthetic
caauguuaguauuccuuggacuc

SEQ ID NO: 60548 - RNA, 24 nt, Artificial Sequence
  Synthetic
ccaauguuaguauuccuuggacuc

SEQ ID NO: 60549 - RNA, 18 nt, Artificial Sequence
  Synthetic
ccccagucucuccaccuc

SEQ ID NO: 60550 - RNA, 19 nt, Artificial Sequence
  Synthetic
accccagucucuccaccuc

SEQ ID NO: 60551 - RNA, 20 nt, Artificial Sequence
  Synthetic
aaccccagucucuccaccuc

SEQ ID NO: 60552 - RNA, 21 nt, Artificial Sequence
  Synthetic
caaccccagucucuccaccuc

SEQ ID NO: 60553 - RNA, 22 nt, Artificial Sequence
  Synthetic
ccaaccccagucucuccaccuc

SEQ ID NO: 60554 - RNA, 23 nt, Artificial Sequence
  Synthetic
  misc_feature (1)..(1): n is a, c, g, or u
nccaaccccagucucuccaccuc

SEQ ID NO: 60555 - RNA, 24 nt, Artificial Sequence
  Synthetic
  misc_feature (2)..(2): n is a, c, g, or u
anccaaccccagucucuccaccuc

SEQ ID NO: 60556 - RNA, 18 nt, Artificial Sequence
  Synthetic
  misc_feature (4)..(4): n is a, c, g, or u
  misc_feature (13)..(13): n is a, c, g, or u
uccngcggacgancccuc

SEQ ID NO: 60557 - RNA, 19 nt, Artificial Sequence
  Synthetic
  misc_feature (5)..(5): n is a, c, g, or u
  misc_feature (14)..(14): n is a, c, g, or u
auccngcggacgancccuc

SEQ ID NO: 60558 - RNA, 20 nt, Artificial Sequence
  Synthetic
  misc_feature (6)..(6): n is a, c, g, or u
  misc_feature (15)..(15): n is a, c, g, or u
aauccngcggacgancccuc

SEQ ID NO: 60559 - RNA, 21 nt, Artificial Sequence
  Synthetic
  misc_feature (7)..(7): n is a, c, g, or u
  misc_feature (16)..(16): n is a, c, g, or u
gaauccngcggacgancccuc

SEQ ID NO: 60560 - RNA, 22 nt, Artificial Sequence
  Synthetic
  misc_feature (8)..(8): n is a, c, g, or u
  misc_feature (17)..(17): n is a, c, g, or u
ugaauccngcggacgancccuc

SEQ ID NO: 60561 - RNA, 23 nt, Artificial Sequence
  Synthetic
  misc_feature (9)..(9): n is a, c, g, or u
  misc_feature (18)..(18): n is a, c, g, or u
cugaauccngcggacgancccuc

SEQ ID NO: 60562 - RNA, 24 nt, Artificial Sequence
  Synthetic
  misc_feature (10)..(10): n is a, c, g, or u
  misc_feature (19)..(19): n is a, c, g, or u
gcugaauccngcggacgancccuc

SEQ ID NO: 60563 - RNA, 18 nt, Artificial Sequence
  Synthetic
gaagaacucccucgccuc

SEQ ID NO: 60564 - RNA, 19 nt, Artificial Sequence
  Synthetic
agaagaacucccucgccuc

SEQ ID NO: 60565 - RNA, 20 nt, Artificial Sequence
  Synthetic
aagaagaacucccucgccuc

SEQ ID NO: 60566 - RNA, 21 nt, Artificial Sequence
  Synthetic
gaagaagaacucccucgccuc

SEQ ID NO: 60567 - RNA, 22 nt, Artificial Sequence
  Synthetic
  misc_feature (1)..(1): n is a, c, g, or u
ngaagaagaacucccucgccuc

SEQ ID NO: 60568 - RNA, 23 nt, Artificial Sequence
  Synthetic
  misc_feature (2)..(2): n is a, c, g, or u
ungaagaagaacucccucgccuc

SEQ ID NO: 60569 - RNA, 24 nt, Artificial Sequence
  Synthetic
  misc_feature (3)..(3): n is a, c, g, or u
cungaagaagaacucccucgccuc

SEQ ID NO: 60570 - RNA, 18 nt, Artificial Sequence
  Synthetic
gacaacucuguuguccuc

SEQ ID NO: 60571 - RNA, 19 nt, Artificial Sequence
  Synthetic
  misc_feature (1)..(1): n is a, c, g, or u
ngacaacucuguuguccuc

SEQ ID NO: 60572 - RNA, 20 nt, Artificial Sequence
  Synthetic
  misc_feature (2)..(2): n is a, c, g, or u
cngacaacucuguuguccuc

SEQ ID NO: 60573 - RNA, 21 nt, Artificial Sequence
  Synthetic
  misc_feature (3)..(3): n is a, c, g, or u
acngacaacucuguuguccuc

SEQ ID NO: 60574 - RNA, 22 nt, Artificial Sequence
  Synthetic
  misc_feature (4)..(4): n is a, c, g, or u
cacngacaacucuguuguccuc

SEQ ID NO: 60575 - RNA, 23 nt, Artificial Sequence
  Synthetic
  misc_feature (5)..(5): n is a, c, g, or u
gcacngacaacucuguuguccuc

SEQ ID NO: 60576 - RNA, 24 nt, Artificial Sequence
  Synthetic
  misc_feature (6)..(6): n is a, c, g, or u
ggcacngacaacucuguuguccuc

SEQ ID NO: 60577 - RNA, 18 nt, Artificial Sequence
  Synthetic
  misc_feature (2)..(2): n is a, c, g, or u
  misc_feature (5)..(5): n is a, c, g, or u
  misc_feature (8)..(8): n is a, c, g, or u
cnccnaancauaccgcuc

SEQ ID NO: 60578 - RNA, 19 nt, Artificial Sequence
  Synthetic
  misc_feature (3)..(3): n is a, c, g, or u
  misc_feature (6)..(6): n is a, c, g, or u
  misc_feature (9)..(9): n is a, c, g, or u
acnccnaancauaccgcuc

SEQ ID NO: 60579 - RNA, 20 nt, Artificial Sequence
  Synthetic
  misc_feature (4)..(4): n is a, c, g, or u
  misc_feature (7)..(7): n is a, c, g, or u
  misc_feature (10)..(10): n is a, c, g, or u
cacnccnaancauaccgcuc

SEQ ID NO: 60580 - RNA, 21 nt, Artificial Sequence
  Synthetic
  misc_feature (5)..(5): n is a, c, g, or u
  misc_feature (8)..(8): n is a, c, g, or u
  misc_feature (11)..(11): n is a, c, g, or u
gcacnccnaancauaccgcuc

SEQ ID NO: 60581 - RNA, 22 nt, Artificial Sequence
  Synthetic
  misc_feature (6)..(6): n is a, c, g, or u
  misc_feature (9)..(9): n is a, c, g, or u
  misc_feature (12)..(12): n is a, c, g, or u
ugcacnccnaancauaccgcuc

SEQ ID NO: 60582 - RNA, 23 nt, Artificial Sequence
  Synthetic
  misc_feature (7)..(7): n is a, c, g, or u
  misc_feature (10)..(10): n is a, c, g, or u
  misc_feature (13)..(13): n is a, c, g, or u
uugcacnccnaancauaccgcuc

SEQ ID NO: 60583 - RNA, 24 nt, Artificial Sequence
  Synthetic
  misc_feature (8)..(8): n is a, c, g, or u
  misc_feature (11)..(11): n is a, c, g, or u
  misc_feature (14)..(14): n is a, c, g, or u
auugcacnccnaancauaccgcuc

SEQ ID NO: 60584 - RNA, 18 nt, Artificial Sequence
  Synthetic
ccugcacaacucuugcuc

SEQ ID NO: 60585 - RNA, 19 nt, Artificial Sequence
  Synthetic
accugcacaacucuugcuc

SEQ ID NO: 60586 - RNA, 20 nt, Artificial Sequence
  Synthetic
aaccugcacaacucuugcuc

SEQ ID NO: 60587 - RNA, 21 nt, Artificial Sequence
  Synthetic
aaaccugcacaacucuugcuc

SEQ ID NO: 60588 - RNA, 22 nt, Artificial Sequence
  Synthetic
aaaaccugcacaacucuugcuc

SEQ ID NO: 60589 - RNA, 23 nt, Artificial Sequence
  Synthetic
caaaaccugcacaacucuugcuc

SEQ ID NO: 60590 - RNA, 24 nt, Artificial Sequence
  Synthetic
gcaaaaccugcacaacucuugcuc

SEQ ID NO: 60591 - RNA, 18 nt, Artificial Sequence
  Synthetic
accuuuaccccguugcuc

SEQ ID NO: 60592 - RNA, 19 nt, Artificial Sequence
  Synthetic
aaccuuuaccccguugcuc

SEQ ID NO: 60593 - RNA, 20 nt, Artificial Sequence
  Synthetic
gaaccuuuaccccguugcuc

SEQ ID NO: 60594 - RNA, 21 nt, Artificial Sequence
  Synthetic
ugaaccuuuaccccguugcuc

SEQ ID NO: 60595 - RNA, 22 nt, Artificial Sequence
  Synthetic
augaaccuuuaccccguugcuc

SEQ ID NO: 60596 - RNA, 23 nt, Artificial Sequence
  Synthetic
caugaaccuuuaccccguugcuc

SEQ ID NO: 60597 - RNA, 24 nt, Artificial Sequence
  Synthetic
acaugaaccuuuaccccguugcuc

SEQ ID NO: 60598 - RNA, 18 nt, Artificial Sequence
  Synthetic
caacucuguuguccucuc

SEQ ID NO: 60599 - RNA, 19 nt, Artificial Sequence
  Synthetic
acaacucuguuguccucuc

SEQ ID NO: 60600 - RNA, 20 nt, Artificial Sequence
  Synthetic
gacaacucuguuguccucuc

SEQ ID NO: 60601 - RNA, 21 nt, Artificial Sequence
  Synthetic
  misc_feature (1)..(1): n is a, c, g, or u
ngacaacucuguuguccucuc

SEQ ID NO: 60602 - RNA, 22 nt, Artificial Sequence
  Synthetic
  misc_feature (2)..(2): n is a, c, g, or u
cngacaacucuguuguccucuc

SEQ ID NO: 60603 - RNA, 23 nt, Artificial Sequence
  Synthetic
  misc_feature (3)..(3): n is a, c, g, or u
acngacaacucuguuguccucuc

SEQ ID NO: 60604 - RNA, 24 nt, Artificial Sequence
  Synthetic
  misc_feature (4)..(4): n is a, c, g, or u
cacngacaacucuguuguccucuc

SEQ ID NO: 60605 - RNA, 18 nt, Artificial Sequence
  Synthetic
uggccaaaauucgcaguc

SEQ ID NO: 60606 - RNA, 19 nt, Artificial Sequence
  Synthetic
cuggccaaaauucgcaguc

SEQ ID NO: 60607 - RNA, 20 nt, Artificial Sequence
  Synthetic
ccuggccaaaauucgcaguc

SEQ ID NO: 60608 - RNA, 21 nt, Artificial Sequence
  Synthetic
uccuggccaaaauucgcaguc

SEQ ID NO: 60609 - RNA, 22 nt, Artificial Sequence
  Synthetic
guccuggccaaaauucgcaguc

SEQ ID NO: 60610 - RNA, 23 nt, Artificial Sequence
  Synthetic
uguccuggccaaaauucgcaguc

SEQ ID NO: 60611 - RNA, 24 nt, Artificial Sequence
  Synthetic
guguccuggccaaaauucgcaguc

SEQ ID NO: 60612 - RNA, 18 nt, Artificial Sequence
  Synthetic
  misc_feature (2)..(2): n is a, c, g, or u
gnucucaaucgccgcguc

SEQ ID NO: 60613 - RNA, 19 nt, Artificial Sequence
  Synthetic
  misc_feature (3)..(3): n is a, c, g, or u
agnucucaaucgccgcguc

SEQ ID NO: 60614 - RNA, 20 nt, Artificial Sequence
  Synthetic
  misc_feature (4)..(4): n is a, c, g, or u
aagnucucaaucgccgcguc

SEQ ID NO: 60615 - RNA, 18 nt, Artificial Sequence
  Synthetic
uuucgcucgcagccgguc

SEQ ID NO: 60616 - RNA, 19 nt, Artificial Sequence
  Synthetic
guuucgcucgcagccgguc

SEQ ID NO: 60617 - RNA, 20 nt, Artificial Sequence
  Synthetic
uguuucgcucgcagccgguc

SEQ ID NO: 60618 - RNA, 21 nt, Artificial Sequence
  Synthetic
uuguuucgcucgcagccgguc

SEQ ID NO: 60619 - RNA, 22 nt, Artificial Sequence
  Synthetic
cuuguuucgcucgcagccgguc

SEQ ID NO: 60620 - RNA, 23 nt, Artificial Sequence
  Synthetic
gcuuguuucgcucgcagccgguc

SEQ ID NO: 60621 - RNA, 24 nt, Artificial Sequence
  Synthetic
agcuuguuucgcucgcagccgguc

SEQ ID NO: 60622 - RNA, 18 nt, Artificial Sequence
  Synthetic
uuccaccaaucggcgguc

SEQ ID NO: 60623 - RNA, 19 nt, Artificial Sequence
  Synthetic
cuuccaccaaucggcgguc

SEQ ID NO: 60624 - RNA, 20 nt, Artificial Sequence
  Synthetic
gcuuccaccaaucggcgguc

SEQ ID NO: 60625 - RNA, 18 nt, Artificial Sequence
  Synthetic
  misc_feature (8)..(8): n is a, c, g, or u
gcuaucgnuggauguguc

SEQ ID NO: 60626 - RNA, 19 nt, Artificial Sequence
  Synthetic
  misc_feature (9)..(9): n is a, c, g, or u
ggcuaucgnuggauguguc

SEQ ID NO: 60627 - RNA, 20 nt, Artificial Sequence
  Synthetic
  misc_feature (10)..(10): n is a, c, g, or u
uggcuaucgnuggauguguc

SEQ ID NO: 60628 - RNA, 21 nt, Artificial Sequence
  Synthetic
  misc_feature (11)..(11): n is a, c, g, or u
cuggcuaucgnuggauguguc

SEQ ID NO: 60629 - RNA, 22 nt, Artificial Sequence
  Synthetic
  misc_feature (12)..(12): n is a, c, g, or u
ccuggcuaucgnuggauguguc

SEQ ID NO: 60630 - RNA, 23 nt, Artificial Sequence
  Synthetic
  misc_feature (13)..(13): n is a, c, g, or u
uccuggcuaucgnuggauguguc

SEQ ID NO: 60631 - RNA, 24 nt, Artificial Sequence
  Synthetic
  misc_feature (14)..(14): n is a, c, g, or u
guccuggcuaucgnuggauguguc

SEQ ID NO: 60632 - RNA, 18 nt, Artificial Sequence
  Synthetic
  misc_feature (3)..(3): n is a, c, g, or u
  misc_feature (12)..(12): n is a, c, g, or u
  misc_feature (16)..(16): n is a, c, g, or u
canauuguacanaaanuc

SEQ ID NO: 60633 - RNA, 19 nt, Artificial Sequence
  Synthetic
  misc_feature (4)..(4): n is a, c, g, or u
  misc_feature (13)..(13): n is a, c, g, or u
  misc_feature (17)..(17): n is a, c, g, or u
ucanauuguacanaaanuc

SEQ ID NO: 60634 - RNA, 20 nt, Artificial Sequence
  Synthetic
  misc_feature (5)..(5): n is a, c, g, or u
  misc_feature (14)..(14): n is a, c, g, or u
  misc_feature (18)..(18): n is a, c, g, or u
aucanauuguacanaaanuc

SEQ ID NO: 60635 - RNA, 21 nt, Artificial Sequence
  Synthetic
  misc_feature (6)..(6): n is a, c, g, or u
  misc_feature (15)..(15): n is a, c, g, or u
  misc_feature (19)..(19): n is a, c, g, or u
gaucanauuguacanaaanuc

SEQ ID NO: 60636 - RNA, 22 nt, Artificial Sequence
  Synthetic
  misc_feature (7)..(7): n is a, c, g, or u
  misc_feature (16)..(16): n is a, c, g, or u
  misc_feature (20)..(20): n is a, c, g, or u
agaucanauuguacanaaanuc

SEQ ID NO: 60637 - RNA, 23 nt, Artificial Sequence
  Synthetic
  misc_feature (8)..(8): n is a, c, g, or u
  misc_feature (17)..(17): n is a, c, g, or u
  misc_feature (21)..(21): n is a, c, g, or u
aagaucanauuguacanaaanuc

SEQ ID NO: 60638 - RNA, 24 nt, Artificial Sequence
  Synthetic
  misc_feature (9)..(9): n is a, c, g, or u
  misc_feature (18)..(18): n is a, c, g, or u
  misc_feature (22)..(22): n is a, c, g, or u
caagaucanauuguacanaaanuc

SEQ ID NO: 60639 - RNA, 18 nt, Artificial Sequence
  Synthetic
  misc_feature (10)..(10): n is a, c, g, or u
  misc_feature (16)..(16): n is a, c, g, or u
uauccauuunaauacnuc

SEQ ID NO: 60640 - RNA, 19 nt, Artificial Sequence
  Synthetic
  misc_feature (11)..(11): n is a, c, g, or u
  misc_feature (17)..(17): n is a, c, g, or u
guauccauuunaauacnuc

SEQ ID NO: 60641 - RNA, 20 nt, Artificial Sequence
  Synthetic
  misc_feature (12)..(12): n is a, c, g, or u
  misc_feature (18)..(18): n is a, c, g, or u
gguauccauuunaauacnuc

SEQ ID NO: 60642 - RNA, 21 nt, Artificial Sequence
  Synthetic
  misc_feature (13)..(13): n is a, c, g, or u
  misc_feature (19)..(19): n is a, c, g, or u
ggguauccauuunaauacnuc

SEQ ID NO: 60643 - RNA, 22 nt, Artificial Sequence
  Synthetic
  misc_feature (14)..(14): n is a, c, g, or u
  misc_feature (20)..(20): n is a, c, g, or u
uggguauccauuunaauacnuc

SEQ ID NO: 60644 - RNA, 23 nt, Artificial Sequence
  Synthetic
  misc_feature (15)..(15): n is a, c, g, or u
  misc_feature (21)..(21): n is a, c, g, or u
guggguauccauuunaauacnuc

SEQ ID NO: 60645 - RNA, 24 nt, Artificial Sequence
  Synthetic
  misc_feature (16)..(16): n is a, c, g, or u
  misc_feature (22)..(22): n is a, c, g, or u
uguggguauccauuunaauacnuc

SEQ ID NO: 60646 - RNA, 18 nt, Artificial Sequence
  Synthetic
  misc_feature (15)..(16): n is a, c, g, or u
cggucuggagcgaannuc

SEQ ID NO: 60647 - RNA, 19 nt, Artificial Sequence
  Synthetic
  misc_feature (16)..(17): n is a, c, g, or u
ccggucuggagcgaannuc

SEQ ID NO: 60648 - RNA, 20 nt, Artificial Sequence
  Synthetic
  misc_feature (17)..(18): n is a, c, g, or u
gccggucuggagcgaannuc

SEQ ID NO: 60649 - RNA, 21 nt, Artificial Sequence
  Synthetic
  misc_feature (18)..(19): n is a, c, g, or u
agccggucuggagcgaannuc

SEQ ID NO: 60650 - RNA, 22 nt, Artificial Sequence
  Synthetic
  misc_feature (19)..(20): n is a, c, g, or u
cagccggucuggagcgaannuc

SEQ ID NO: 60651 - RNA, 23 nt, Artificial Sequence
  Synthetic
  misc_feature (20)..(21): n is a, c, g, or u
gcagccggucuggagcgaannuc

SEQ ID NO: 60652 - RNA, 24 nt, Artificial Sequence
  Synthetic
  misc_feature (21)..(22): n is a, c, g, or u
cgcagccggucuggagcgaannuc

SEQ ID NO: 60653 - RNA, 18 nt, Artificial Sequence
  Synthetic
  misc_feature (16)..(16): n is a, c, g, or u
caugggagcaccucunuc

SEQ ID NO: 60654 - RNA, 19 nt, Artificial Sequence
  Synthetic
  misc_feature (17)..(17): n is a, c, g, or u
gcaugggagcaccucunuc

SEQ ID NO: 60655 - RNA, 20 nt, Artificial Sequence
  Synthetic
  misc_feature (18)..(18): n is a, c, g, or u
agcaugggagcaccucunuc

SEQ ID NO: 60656 - RNA, 21 nt, Artificial Sequence
  Synthetic
  misc_feature (19)..(19): n is a, c, g, or u
cagcaugggagcaccucunuc

SEQ ID NO: 60657 - RNA, 22 nt, Artificial Sequence
  Synthetic
  misc_feature (20)..(20): n is a, c, g, or u
acagcaugggagcaccucunuc

SEQ ID NO: 60658 - RNA, 23 nt, Artificial Sequence
  Synthetic
  misc_feature (21)..(21): n is a, c, g, or u
uacagcaugggagcaccucunuc

SEQ ID NO: 60659 - RNA, 24 nt, Artificial Sequence
  Synthetic
  misc_feature (22)..(22): n is a, c, g, or u
cuacagcaugggagcaccucunuc

SEQ ID NO: 60660 - RNA, 18 nt, Artificial Sequence
  Synthetic
uugugggucaccauauuc

SEQ ID NO: 60661 - RNA, 19 nt, Artificial Sequence
  Synthetic
uuugugggucaccauauuc

SEQ ID NO: 60662 - RNA, 20 nt, Artificial Sequence
  Synthetic
uuuugugggucaccauauuc

SEQ ID NO: 60663 - RNA, 21 nt, Artificial Sequence
  Synthetic
auuuugugggucaccauauuc

SEQ ID NO: 60664 - RNA, 22 nt, Artificial Sequence
  Synthetic
cauuuugugggucaccauauuc

SEQ ID NO: 60665 - RNA, 23 nt, Artificial Sequence
  Synthetic
ucauuuugugggucaccauauuc

SEQ ID NO: 60666 - RNA, 24 nt, Artificial Sequence
  Synthetic
cucauuuugugggucaccauauuc

SEQ ID NO: 60667 - RNA, 18 nt, Artificial Sequence
  Synthetic
uucccaauguuaguauuc

SEQ ID NO: 60668 - RNA, 19 nt, Artificial Sequence
  Synthetic
cuucccaauguuaguauuc

SEQ ID NO: 60669 - RNA, 20 nt, Artificial Sequence
  Synthetic
gcuucccaauguuaguauuc

SEQ ID NO: 60670 - RNA, 21 nt, Artificial Sequence
  Synthetic
agcuucccaauguuaguauuc

SEQ ID NO: 60671 - RNA, 22 nt, Artificial Sequence
  Synthetic
cagcuucccaauguuaguauuc

SEQ ID NO: 60672 - RNA, 23 nt, Artificial Sequence
  Synthetic
ccagcuucccaauguuaguauuc

SEQ ID NO: 60673 - RNA, 24 nt, Artificial Sequence
  Synthetic
uccagcuucccaauguuaguauuc

SEQ ID NO: 60674 - RNA, 18 nt, Artificial Sequence
  Synthetic
  misc_feature (6)..(6): n is a, c, g, or u
cuaucnuauccacacuuc

SEQ ID NO: 60675 - RNA, 19 nt, Artificial Sequence
  Synthetic
  misc_feature (7)..(7): n is a, c, g, or u
ccuaucnuauccacacuuc

SEQ ID NO: 60676 - RNA, 20 nt, Artificial Sequence
  Synthetic
  misc_feature (8)..(8): n is a, c, g, or u
cccuaucnuauccacacuuc

SEQ ID NO: 60677 - RNA, 21 nt, Artificial Sequence
  Synthetic
  misc_feature (9)..(9): n is a, c, g, or u
ccccuaucnuauccacacuuc

SEQ ID NO: 60678 - RNA, 22 nt, Artificial Sequence
  Synthetic
  misc_feature (10)..(10): n is a, c, g, or u
gccccuaucnuauccacacuuc

SEQ ID NO: 60679 - RNA, 23 nt, Artificial Sequence
  Synthetic
  misc_feature (11)..(11): n is a, c, g, or u
ugccccuaucnuauccacacuuc

SEQ ID NO: 60680 - RNA, 24 nt, Artificial Sequence
  Synthetic
  misc_feature (12)..(12): n is a, c, g, or u
augccccuaucnuauccacacuuc

SEQ ID NO: 60681 - RNA, 18 nt, Artificial Sequence
  Synthetic
uaaagaauuuggagcuuc

SEQ ID NO: 60682 - RNA, 19 nt, Artificial Sequence
  Synthetic
auaaagaauuuggagcuuc

SEQ ID NO: 60683 - RNA, 20 nt, Artificial Sequence
  Synthetic
uauaaagaauuuggagcuuc

SEQ ID NO: 60684 - RNA, 21 nt, Artificial Sequence
  Synthetic
uuauaaagaauuuggagcuuc

SEQ ID NO: 60685 - RNA, 22 nt, Artificial Sequence
  Synthetic
cuuauaaagaauuuggagcuuc

SEQ ID NO: 60686 - RNA, 23 nt, Artificial Sequence
  Synthetic
ccuuauaaagaauuuggagcuuc

SEQ ID NO: 60687 - RNA, 24 nt, Artificial Sequence
  Synthetic
cccuuauaaagaauuuggagcuuc

SEQ ID NO: 60688 - RNA, 18 nt, Artificial Sequence
  Synthetic
cucacaucaucaaucuuc

SEQ ID NO: 60689 - RNA, 19 nt, Artificial Sequence
  Synthetic
ucucacaucaucaaucuuc

SEQ ID NO: 60690 - RNA, 20 nt, Artificial Sequence
  Synthetic
cucucacaucaucaaucuuc

SEQ ID NO: 60691 - RNA, 21 nt, Artificial Sequence
  Synthetic
ucucucacaucaucaaucuuc

SEQ ID NO: 60692 - RNA, 22 nt, Artificial Sequence
  Synthetic
cucucucacaucaucaaucuuc

SEQ ID NO: 60693 - RNA, 23 nt, Artificial Sequence
  Synthetic
ccucucucacaucaucaaucuuc

SEQ ID NO: 60694 - RNA, 24 nt, Artificial Sequence
  Synthetic
gccucucucacaucaucaaucuuc

SEQ ID NO: 60695 - RNA, 18 nt, Artificial Sequence
  Synthetic
ugcugguggcuccaguuc

SEQ ID NO: 60696 - RNA, 19 nt, Artificial Sequence
  Synthetic
cugcugguggcuccaguuc

SEQ ID NO: 60697 - RNA, 20 nt, Artificial Sequence
  Synthetic
ccugcugguggcuccaguuc

SEQ ID NO: 60698 - RNA, 21 nt, Artificial Sequence
  Synthetic
uccugcugguggcuccaguuc

SEQ ID NO: 60699 - RNA, 22 nt, Artificial Sequence
  Synthetic
uuccugcugguggcuccaguuc

SEQ ID NO: 60700 - RNA, 23 nt, Artificial Sequence
  Synthetic
uuuccugcugguggcuccaguuc

SEQ ID NO: 60701 - RNA, 24 nt, Artificial Sequence
  Synthetic
uuuuccugcugguggcuccaguuc

SEQ ID NO: 60702 - RNA, 18 nt, Artificial Sequence
  Synthetic
gcauaaauuggucuguuc

SEQ ID NO: 60703 - RNA, 19 nt, Artificial Sequence
  Synthetic
ggcauaaauuggucuguuc

SEQ ID NO: 60704 - RNA, 20 nt, Artificial Sequence
  Synthetic
aggcauaaauuggucuguuc

SEQ ID NO: 60705 - RNA, 21 nt, Artificial Sequence
  Synthetic
uaggcauaaauuggucuguuc

SEQ ID NO: 60706 - RNA, 22 nt, Artificial Sequence
  Synthetic
guaggcauaaauuggucuguuc

SEQ ID NO: 60707 - RNA, 23 nt, Artificial Sequence
  Synthetic
uguaggcauaaauuggucuguuc

SEQ ID NO: 60708 - RNA, 24 nt, Artificial Sequence
  Synthetic
cuguaggcauaaauuggucuguuc

SEQ ID NO: 60709 - RNA, 18 nt, Artificial Sequence
  Synthetic
ggacuucucucaauuuuc

SEQ ID NO: 60710 - RNA, 19 nt, Artificial Sequence
  Synthetic
uggacuucucucaauuuuc

SEQ ID NO: 60711 - RNA, 20 nt, Artificial Sequence
  Synthetic
guggacuucucucaauuuuc

SEQ ID NO: 60712 - RNA, 21 nt, Artificial Sequence
  Synthetic
gguggacuucucucaauuuuc

SEQ ID NO: 60713 - RNA, 22 nt, Artificial Sequence
  Synthetic
ugguggacuucucucaauuuuc

SEQ ID NO: 60714 - RNA, 23 nt, Artificial Sequence
  Synthetic
gugguggacuucucucaauuuuc

SEQ ID NO: 60715 - RNA, 24 nt, Artificial Sequence
  Synthetic
cgugguggacuucucucaauuuuc

SEQ ID NO: 60716 - RNA, 18 nt, Artificial Sequence
  Synthetic
acaggcuuuugucuuuuc

SEQ ID NO: 60717 - RNA, 19 nt, Artificial Sequence
  Synthetic
aacaggcuuuugucuuuuc

SEQ ID NO: 60718 - RNA, 20 nt, Artificial Sequence
  Synthetic
aaacaggcuuuugucuuuuc

SEQ ID NO: 60719 - RNA, 21 nt, Artificial Sequence
  Synthetic
  misc_feature (1)..(1): n is a, c, g, or u
naaacaggcuuuugucuuuuc

SEQ ID NO: 60720 - RNA, 22 nt, Artificial Sequence
  Synthetic
  misc_feature (2)..(2): n is a, c, g, or u
cnaaacaggcuuuugucuuuuc

SEQ ID NO: 60721 - RNA, 23 nt, Artificial Sequence
  Synthetic
  misc_feature (3)..(3): n is a, c, g, or u
gcnaaacaggcuuuugucuuuuc

SEQ ID NO: 60722 - RNA, 24 nt, Artificial Sequence
  Synthetic
  misc_feature (4)..(4): n is a, c, g, or u
ugcnaaacaggcuuuugucuuuuc

SEQ ID NO: 60723 - RNA, 18 nt, Artificial Sequence
  Synthetic
  misc_feature (4)..(4): n is a, c, g, or u
  misc_feature (7)..(7): n is a, c, g, or u
uacnucnaaaacaaaaag

SEQ ID NO: 60724 - RNA, 19 nt, Artificial Sequence
  Synthetic
  misc_feature (5)..(5): n is a, c, g, or u
  misc_feature (8)..(8): n is a, c, g, or u
auacnucnaaaacaaaaag

SEQ ID NO: 60725 - RNA, 20 nt, Artificial Sequence
  Synthetic
  misc_feature (6)..(6): n is a, c, g, or u
  misc_feature (9)..(9): n is a, c, g, or u
aauacnucnaaaacaaaaag

SEQ ID NO: 60726 - RNA, 21 nt, Artificial Sequence
  Synthetic
  misc_feature (1)..(1): n is a, c, g, or u
  misc_feature (7)..(7): n is a, c, g, or u
  misc_feature (10)..(10): n is a, c, g, or u
naauacnucnaaaacaaaaag

SEQ ID NO: 60727 - RNA, 22 nt, Artificial Sequence
  Synthetic
  misc_feature (2)..(2): n is a, c, g, or u
  misc_feature (8)..(8): n is a, c, g, or u
  misc_feature (11)..(11): n is a, c, g, or u
unaauacnucnaaaacaaaaag

SEQ ID NO: 60728 - RNA, 23 nt, Artificial Sequence
  Synthetic
  misc_feature (3)..(3): n is a, c, g, or u
  misc_feature (9)..(9): n is a, c, g, or u
  misc_feature (12)..(12): n is a, c, g, or u
uunaauacnucnaaaacaaaaag

SEQ ID NO: 60729 - RNA, 24 nt, Artificial Sequence
  Synthetic
  misc_feature (4)..(4): n is a, c, g, or u
  misc_feature (10)..(10): n is a, c, g, or u
  misc_feature (13)..(13): n is a, c, g, or u
uuunaauacnucnaaaacaaaaag

SEQ ID NO: 60730 - RNA, 18 nt, Artificial Sequence
  Synthetic
uggccaauggcaaacaag

SEQ ID NO: 60731 - RNA, 19 nt, Artificial Sequence
  Synthetic
uuggccaauggcaaacaag

SEQ ID NO: 60732 - RNA, 20 nt, Artificial Sequence
  Synthetic
  misc_feature (1)..(1): n is a, c, g, or u
nuuggccaauggcaaacaag

SEQ ID NO: 60733 - RNA, 21 nt, Artificial Sequence
  Synthetic
  misc_feature (2)..(2): n is a, c, g, or u
anuuggccaauggcaaacaag

SEQ ID NO: 60734 - RNA, 22 nt, Artificial Sequence
  Synthetic
  misc_feature (3)..(3): n is a, c, g, or u
canuuggccaauggcaaacaag

SEQ ID NO: 60735 - RNA, 23 nt, Artificial Sequence
  Synthetic
  misc_feature (4)..(4): n is a, c, g, or u
acanuuggccaauggcaaacaag

SEQ ID NO: 60736 - RNA, 24 nt, Artificial Sequence
  Synthetic
  misc_feature (5)..(5): n is a, c, g, or u
gacanuuggccaauggcaaacaag

SEQ ID NO: 60737 - RNA, 18 nt, Artificial Sequence
  Synthetic
cugccuuacuuuuggaag

SEQ ID NO: 60738 - RNA, 19 nt, Artificial Sequence
  Synthetic
ccugccuuacuuuuggaag

SEQ ID NO: 60739 - RNA, 20 nt, Artificial Sequence
  Synthetic
uccugccuuacuuuuggaag

SEQ ID NO: 60740 - RNA, 21 nt, Artificial Sequence
  Synthetic
uuccugccuuacuuuuggaag

SEQ ID NO: 60741 - RNA, 22 nt, Artificial Sequence
  Synthetic
uuuccugccuuacuuuuggaag

SEQ ID NO: 60742 - RNA, 23 nt, Artificial Sequence
  Synthetic
auuuccugccuuacuuuuggaag

SEQ ID NO: 60743 - RNA, 24 nt, Artificial Sequence
  Synthetic
cauuuccugccuuacuuuuggaag

SEQ ID NO: 60744 - RNA, 18 nt, Artificial Sequence
  Synthetic
  misc_feature (14)..(14): n is a, c, g, or u
aggcagguccccungaag

SEQ ID NO: 60745 - RNA, 19 nt, Artificial Sequence
  Synthetic
  misc_feature (15)..(15): n is a, c, g, or u
gaggcagguccccungaag

SEQ ID NO: 60746 - RNA, 20 nt, Artificial Sequence
  Synthetic
  misc_feature (16)..(16): n is a, c, g, or u
cgaggcagguccccungaag

SEQ ID NO: 60747 - RNA, 21 nt, Artificial Sequence
  Synthetic
  misc_feature (17)..(17): n is a, c, g, or u
acgaggcagguccccungaag

SEQ ID NO: 60748 - RNA, 22 nt, Artificial Sequence
  Synthetic
  misc_feature (18)..(18): n is a, c, g, or u
gacgaggcagguccccungaag

SEQ ID NO: 60749 - RNA, 23 nt, Artificial Sequence
  Synthetic
  misc_feature (19)..(19): n is a, c, g, or u
cgacgaggcagguccccungaag

SEQ ID NO: 60750 - RNA, 24 nt, Artificial Sequence
  Synthetic
  misc_feature (20)..(20): n is a, c, g, or u
acgacgaggcagguccccungaag

SEQ ID NO: 60751 - RNA, 18 nt, Artificial Sequence
  Synthetic
  misc_feature (14)..(14): n is a, c, g, or u
ucaucaaucuucungaag

SEQ ID NO: 60752 - RNA, 19 nt, Artificial Sequence
  Synthetic
  misc_feature (15)..(15): n is a, c, g, or u
aucaucaaucuucungaag

SEQ ID NO: 60753 - RNA, 20 nt, Artificial Sequence
  Synthetic
  misc_feature (16)..(16): n is a, c, g, or u
caucaucaaucuucungaag

SEQ ID NO: 60754 - RNA, 21 nt, Artificial Sequence
  Synthetic
  misc_feature (17)..(17): n is a, c, g, or u
acaucaucaaucuucungaag

SEQ ID NO: 60755 - RNA, 22 nt, Artificial Sequence
  Synthetic
  misc_feature (18)..(18): n is a, c, g, or u
cacaucaucaaucuucungaag

SEQ ID NO: 60756 - RNA, 23 nt, Artificial Sequence
  Synthetic
  misc_feature (19)..(19): n is a, c, g, or u
ucacaucaucaaucuucungaag

SEQ ID NO: 60757 - RNA, 24 nt, Artificial Sequence
  Synthetic
  misc_feature (20)..(20): n is a, c, g, or u
cucacaucaucaaucuucungaag

SEQ ID NO: 60758 - RNA, 18 nt, Artificial Sequence
  Synthetic
auuccuuggacucauaag

SEQ ID NO: 60759 - RNA, 19 nt, Artificial Sequence
  Synthetic
uauuccuuggacucauaag

SEQ ID NO: 60760 - RNA, 20 nt, Artificial Sequence
  Synthetic
guauuccuuggacucauaag

SEQ ID NO: 60761 - RNA, 21 nt, Artificial Sequence
  Synthetic
aguauuccuuggacucauaag

SEQ ID NO: 60762 - RNA, 22 nt, Artificial Sequence
  Synthetic
uaguauuccuuggacucauaag

SEQ ID NO: 60763 - RNA, 23 nt, Artificial Sequence
  Synthetic
uuaguauuccuuggacucauaag

SEQ ID NO: 60764 - RNA, 24 nt, Artificial Sequence
  Synthetic
guuaguauuccuuggacucauaag

SEQ ID NO: 60765 - RNA, 18 nt, Artificial Sequence
  Synthetic
  misc_feature (3)..(3): n is a, c, g, or u
  misc_feature (6)..(6): n is a, c, g, or u
  misc_feature (10)..(10): n is a, c, g, or u
gcnggnauunuauauaag

SEQ ID NO: 60766 - RNA, 19 nt, Artificial Sequence
  Synthetic
  misc_feature (1)..(1): n is a, c, g, or u
  misc_feature (4)..(4): n is a, c, g, or u
  misc_feature (7)..(7): n is a, c, g, or u
  misc_feature (11)..(11): n is a, c, g, or u
ngcnggnauunuauauaag

SEQ ID NO: 60767 - RNA, 20 nt, Artificial Sequence
  Synthetic
  misc_feature (2)..(2): n is a, c, g, or u
  misc_feature (5)..(5): n is a, c, g, or u
  misc_feature (8)..(8): n is a, c, g, or u
  misc_feature (12)..(12): n is a, c, g, or u
angcnggnauunuauauaag

SEQ ID NO: 60768 - RNA, 21 nt, Artificial Sequence
  Synthetic
  misc_feature (3)..(3): n is a, c, g, or u
  misc_feature (6)..(6): n is a, c, g, or u
  misc_feature (9)..(9): n is a, c, g, or u
  misc_feature (13)..(13): n is a, c, g, or u
aangcnggnauunuauauaag

SEQ ID NO: 60769 - RNA, 22 nt, Artificial Sequence
  Synthetic
  misc_feature (4)..(4): n is a, c, g, or u
  misc_feature (7)..(7): n is a, c, g, or u
  misc_feature (10)..(10): n is a, c, g, or u
  misc_feature (14)..(14): n is a, c, g, or u
gaangcnggnauunuauauaag

SEQ ID NO: 60770 - RNA, 23 nt, Artificial Sequence
  Synthetic
  misc_feature (5)..(5): n is a, c, g, or u
  misc_feature (8)..(8): n is a, c, g, or u
  misc_feature (11)..(11): n is a, c, g, or u
  misc_feature (15)..(15): n is a, c, g, or u
ggaangcnggnauunuauauaag

SEQ ID NO: 60771 - RNA, 24 nt, Artificial Sequence
  Synthetic
  misc_feature (6)..(6): n is a, c, g, or u
  misc_feature (9)..(9): n is a, c, g, or u
  misc_feature (12)..(12): n is a, c, g, or u
  misc_feature (16)..(16): n is a, c, g, or u
uggaangcnggnauunuauauaag

SEQ ID NO: 60772 - RNA, 18 nt, Artificial Sequence
  Synthetic
ugggaacaagagcuacag

SEQ ID NO: 60773 - RNA, 19 nt, Artificial Sequence
  Synthetic
  misc_feature (1)..(1): n is a, c, g, or u
nugggaacaagagcuacag

SEQ ID NO: 60774 - RNA, 20 nt, Artificial Sequence
  Synthetic
  misc_feature (2)..(2): n is a, c, g, or u
cnugggaacaagagcuacag

SEQ ID NO: 60775 - RNA, 21 nt, Artificial Sequence
  Synthetic
  misc_feature (3)..(3): n is a, c, g, or u
ucnugggaacaagagcuacag

SEQ ID NO: 60776 - RNA, 22 nt, Artificial Sequence
  Synthetic
  misc_feature (4)..(4): n is a, c, g, or u
uucnugggaacaagagcuacag

SEQ ID NO: 60777 - RNA, 23 nt, Artificial Sequence
  Synthetic
  misc_feature (5)..(5): n is a, c, g, or u
auucnugggaacaagagcuacag

SEQ ID NO: 60778 - RNA, 24 nt, Artificial Sequence
  Synthetic
  misc_feature (6)..(6): n is a, c, g, or u
uauucnugggaacaagagcuacag

SEQ ID NO: 60779 - RNA, 18 nt, Artificial Sequence
  Synthetic
  misc_feature (7)..(7): n is a, c, g, or u
aggaucnacgaccaccag

SEQ ID NO: 60780 - RNA, 19 nt, Artificial Sequence
  Synthetic
  misc_feature (8)..(8): n is a, c, g, or u
caggaucnacgaccaccag

SEQ ID NO: 60781 - RNA, 20 nt, Artificial Sequence
  Synthetic
  misc_feature (9)..(9): n is a, c, g, or u
ccaggaucnacgaccaccag

SEQ ID NO: 60782 - RNA, 21 nt, Artificial Sequence
  Synthetic
  misc_feature (10)..(10): n is a, c, g, or u
uccaggaucnacgaccaccag

SEQ ID NO: 60783 - RNA, 22 nt, Artificial Sequence
  Synthetic
  misc_feature (11)..(11): n is a, c, g, or u
uuccaggaucnacgaccaccag

SEQ ID NO: 60784 - RNA, 23 nt, Artificial Sequence
  Synthetic
  misc_feature (1)..(1): n is a, c, g, or u
  misc_feature (12)..(12): n is a, c, g, or u
nuuccaggaucnacgaccaccag

SEQ ID NO: 60785 - RNA, 24 nt, Artificial Sequence
  Synthetic
  misc_feature (2)..(2): n is a, c, g, or u
  misc_feature (13)..(13): n is a, c, g, or u
anuuccaggaucnacgaccaccag

SEQ ID NO: 60786 - RNA, 18 nt, Artificial Sequence
  Synthetic
uccugcugguggcuccag

SEQ ID NO: 60787 - RNA, 19 nt, Artificial Sequence
  Synthetic
uuccugcugguggcuccag

SEQ ID NO: 60788 - RNA, 20 nt, Artificial Sequence
  Synthetic
uuuccugcugguggcuccag

SEQ ID NO: 60789 - RNA, 21 nt, Artificial Sequence
  Synthetic
uuuuccugcugguggcuccag

SEQ ID NO: 60790 - RNA, 22 nt, Artificial Sequence
  Synthetic
auuuuccugcugguggcuccag

SEQ ID NO: 60791 - RNA, 23 nt, Artificial Sequence
  Synthetic
uauuuuccugcugguggcuccag

SEQ ID NO: 60792 - RNA, 24 nt, Artificial Sequence
  Synthetic
guauuuuccugcugguggcuccag

SEQ ID NO: 60793 - RNA, 18 nt, Artificial Sequence
  Synthetic
aacucccucgccucgcag

SEQ ID NO: 60794 - RNA, 19 nt, Artificial Sequence
  Synthetic
gaacucccucgccucgcag

SEQ ID NO: 60795 - RNA, 20 nt, Artificial Sequence
  Synthetic
agaacucccucgccucgcag

SEQ ID NO: 60796 - RNA, 21 nt, Artificial Sequence
  Synthetic
aagaacucccucgccucgcag

SEQ ID NO: 60797 - RNA, 22 nt, Artificial Sequence
  Synthetic
gaagaacucccucgccucgcag

SEQ ID NO: 60798 - RNA, 23 nt, Artificial Sequence
  Synthetic
agaagaacucccucgccucgcag

SEQ ID NO: 60799 - RNA, 24 nt, Artificial Sequence
  Synthetic
aagaagaacucccucgccucgcag

SEQ ID NO: 60800 - RNA, 18 nt, Artificial Sequence
  Synthetic
  misc_feature (12)..(12): n is a, c, g, or u
cauccacaggcnaugcag

SEQ ID NO: 60801 - RNA, 19 nt, Artificial Sequence
  Synthetic
  misc_feature (1)..(1): n is a, c, g, or u
  misc_feature (13)..(13): n is a, c, g, or u
ncauccacaggcnaugcag

SEQ ID NO: 60802 - RNA, 20 nt, Artificial Sequence
  Synthetic
  misc_feature (2)..(2): n is a, c, g, or u
  misc_feature (14)..(14): n is a, c, g, or u
cncauccacaggcnaugcag

SEQ ID NO: 60803 - RNA, 21 nt, Artificial Sequence
  Synthetic
  misc_feature (3)..(3): n is a, c, g, or u
  misc_feature (15)..(15): n is a, c, g, or u
acncauccacaggcnaugcag

SEQ ID NO: 60804 - RNA, 22 nt, Artificial Sequence
  Synthetic
  misc_feature (4)..(4): n is a, c, g, or u
  misc_feature (16)..(16): n is a, c, g, or u
cacncauccacaggcnaugcag

SEQ ID NO: 60805 - RNA, 23 nt, Artificial Sequence
  Synthetic
  misc_feature (5)..(5): n is a, c, g, or u
  misc_feature (17)..(17): n is a, c, g, or u
acacncauccacaggcnaugcag

SEQ ID NO: 60806 - RNA, 24 nt, Artificial Sequence
  Synthetic
  misc_feature (6)..(6): n is a, c, g, or u
  misc_feature (18)..(18): n is a, c, g, or u
gacacncauccacaggcnaugcag

SEQ ID NO: 60807 - RNA, 18 nt, Artificial Sequence
  Synthetic
  misc_feature (1)..(1): n is a, c, g, or u
  misc_feature (4)..(4): n is a, c, g, or u
naancauaccgcucucag

SEQ ID NO: 60808 - RNA, 19 nt, Artificial Sequence
  Synthetic
  misc_feature (2)..(2): n is a, c, g, or u
  misc_feature (5)..(5): n is a, c, g, or u
cnaancauaccgcucucag

SEQ ID NO: 60809 - RNA, 20 nt, Artificial Sequence
  Synthetic
  misc_feature (3)..(3): n is a, c, g, or u
  misc_feature (6)..(6): n is a, c, g, or u
ccnaancauaccgcucucag

SEQ ID NO: 60810 - RNA, 21 nt, Artificial Sequence
  Synthetic
  misc_feature (1)..(1): n is a, c, g, or u
  misc_feature (4)..(4): n is a, c, g, or u
  misc_feature (7)..(7): n is a, c, g, or u
nccnaancauaccgcucucag

SEQ ID NO: 60811 - RNA, 22 nt, Artificial Sequence
  Synthetic
  misc_feature (2)..(2): n is a, c, g, or u
  misc_feature (5)..(5): n is a, c, g, or u
  misc_feature (8)..(8): n is a, c, g, or u
cnccnaancauaccgcucucag

SEQ ID NO: 60812 - RNA, 23 nt, Artificial Sequence
  Synthetic
  misc_feature (3)..(3): n is a, c, g, or u
  misc_feature (6)..(6): n is a, c, g, or u
  misc_feature (9)..(9): n is a, c, g, or u
acnccnaancauaccgcucucag

SEQ ID NO: 60813 - RNA, 24 nt, Artificial Sequence
  Synthetic
  misc_feature (4)..(4): n is a, c, g, or u
  misc_feature (7)..(7): n is a, c, g, or u
  misc_feature (10)..(10): n is a, c, g, or u
cacnccnaancauaccgcucucag

SEQ ID NO: 60814 - RNA, 18 nt, Artificial Sequence
  Synthetic
  misc_feature (10)..(10): n is a, c, g, or u
  misc_feature (13)..(13): n is a, c, g, or u
gcuggauccncunuucag

SEQ ID NO: 60815 - RNA, 19 nt, Artificial Sequence
  Synthetic
  misc_feature (11)..(11): n is a, c, g, or u
  misc_feature (14)..(14): n is a, c, g, or u
agcuggauccncunuucag

SEQ ID NO: 60816 - RNA, 20 nt, Artificial Sequence
  Synthetic
  misc_feature (12)..(12): n is a, c, g, or u
  misc_feature (15)..(15): n is a, c, g, or u
cagcuggauccncunuucag

SEQ ID NO: 60817 - RNA, 21 nt, Artificial Sequence
  Synthetic
  misc_feature (13)..(13): n is a, c, g, or u
  misc_feature (16)..(16): n is a, c, g, or u
ucagcuggauccncunuucag

SEQ ID NO: 60818 - RNA, 22 nt, Artificial Sequence
  Synthetic
  misc_feature (14)..(14): n is a, c, g, or u
  misc_feature (17)..(17): n is a, c, g, or u
aucagcuggauccncunuucag

SEQ ID NO: 60819 - RNA, 23 nt, Artificial Sequence
  Synthetic
  misc_feature (15)..(15): n is a, c, g, or u
  misc_feature (18)..(18): n is a, c, g, or u
caucagcuggauccncunuucag

SEQ ID NO: 60820 - RNA, 24 nt, Artificial Sequence
  Synthetic
  misc_feature (16)..(16): n is a, c, g, or u
  misc_feature (19)..(19): n is a, c, g, or u
ccaucagcuggauccncunuucag

SEQ ID NO: 60821 - RNA, 18 nt, Artificial Sequence
  Synthetic
ccucacaauaccacagag

SEQ ID NO: 60822 - RNA, 19 nt, Artificial Sequence
  Synthetic
uccucacaauaccacagag

SEQ ID NO: 60823 - RNA, 20 nt, Artificial Sequence
  Synthetic
auccucacaauaccacagag

SEQ ID NO: 60824 - RNA, 21 nt, Artificial Sequence
  Synthetic
aauccucacaauaccacagag

SEQ ID NO: 60825 - RNA, 22 nt, Artificial Sequence
  Synthetic
aaauccucacaauaccacagag

SEQ ID NO: 60826 - RNA, 23 nt, Artificial Sequence
  Synthetic
aaaauccucacaauaccacagag

SEQ ID NO: 60827 - RNA, 24 nt, Artificial Sequence
  Synthetic
aaaaauccucacaauaccacagag

SEQ ID NO: 60828 - RNA, 18 nt, Artificial Sequence
  Synthetic
  misc_feature (4)..(4): n is a, c, g, or u
  misc_feature (10)..(10): n is a, c, g, or u
ggcncuguungauccgag

SEQ ID NO: 60829 - RNA, 19 nt, Artificial Sequence
  Synthetic
  misc_feature (5)..(5): n is a, c, g, or u
  misc_feature (11)..(11): n is a, c, g, or u
aggcncuguungauccgag

SEQ ID NO: 60830 - RNA, 20 nt, Artificial Sequence
  Synthetic
  misc_feature (6)..(6): n is a, c, g, or u
  misc_feature (12)..(12): n is a, c, g, or u
caggcncuguungauccgag

SEQ ID NO: 60831 - RNA, 21 nt, Artificial Sequence
  Synthetic
  misc_feature (7)..(7): n is a, c, g, or u
  misc_feature (13)..(13): n is a, c, g, or u
ccaggcncuguungauccgag

SEQ ID NO: 60832 - RNA, 22 nt, Artificial Sequence
  Synthetic
  misc_feature (8)..(8): n is a, c, g, or u
  misc_feature (14)..(14): n is a, c, g, or u
accaggcncuguungauccgag

SEQ ID NO: 60833 - RNA, 23 nt, Artificial Sequence
  Synthetic
  misc_feature (9)..(9): n is a, c, g, or u
  misc_feature (15)..(15): n is a, c, g, or u
caccaggcncuguungauccgag

SEQ ID NO: 60834 - RNA, 24 nt, Artificial Sequence
  Synthetic
  misc_feature (10)..(10): n is a, c, g, or u
  misc_feature (16)..(16): n is a, c, g, or u
ccaccaggcncuguungauccgag

SEQ ID NO: 60835 - RNA, 18 nt, Artificial Sequence
  Synthetic
  misc_feature (7)..(7): n is a, c, g, or u
gaggagnugggggaggag

SEQ ID NO: 60836 - RNA, 19 nt, Artificial Sequence
  Synthetic
  misc_feature (8)..(8): n is a, c, g, or u
ggaggagnugggggaggag

SEQ ID NO: 60837 - RNA, 20 nt, Artificial Sequence
  Synthetic
  misc_feature (9)..(9): n is a, c, g, or u
gggaggagnugggggaggag

SEQ ID NO: 60838 - RNA, 21 nt, Artificial Sequence
  Synthetic
  misc_feature (10)..(10): n is a, c, g, or u
ugggaggagnugggggaggag

SEQ ID NO: 60839 - RNA, 22 nt, Artificial Sequence
  Synthetic
  misc_feature (11)..(11): n is a, c, g, or u
cugggaggagnugggggaggag

SEQ ID NO: 60840 - RNA, 23 nt, Artificial Sequence
  Synthetic
  misc_feature (12)..(12): n is a, c, g, or u
acugggaggagnugggggaggag

SEQ ID NO: 60841 - RNA, 24 nt, Artificial Sequence
  Synthetic
  misc_feature (13)..(13): n is a, c, g, or u
gacugggaggagnugggggaggag

SEQ ID NO: 60842 - RNA, 18 nt, Artificial Sequence
  Synthetic
  misc_feature (6)..(6): n is a, c, g, or u
uuuaangacugggaggag

SEQ ID NO: 60843 - RNA, 19 nt, Artificial Sequence
  Synthetic
  misc_feature (7)..(7): n is a, c, g, or u
auuuaangacugggaggag

SEQ ID NO: 60844 - RNA, 20 nt, Artificial Sequence
  Synthetic
  misc_feature (8)..(8): n is a, c, g, or u
uauuuaangacugggaggag

SEQ ID NO: 60845 - RNA, 21 nt, Artificial Sequence
  Synthetic
  misc_feature (9)..(9): n is a, c, g, or u
guauuuaangacugggaggag

SEQ ID NO: 60846 - RNA, 22 nt, Artificial Sequence
  Synthetic
  misc_feature (10)..(10): n is a, c, g, or u
uguauuuaangacugggaggag

SEQ ID NO: 60847 - RNA, 23 nt, Artificial Sequence
  Synthetic
  misc_feature (11)..(11): n is a, c, g, or u
guguauuuaangacugggaggag

SEQ ID NO: 60848 - RNA, 24 nt, Artificial Sequence
  Synthetic
  misc_feature (12)..(12): n is a, c, g, or u
uguguauuuaangacugggaggag

SEQ ID NO: 60849 - RNA, 18 nt, Artificial Sequence
  Synthetic
uggcaaacaagguaggag

SEQ ID NO: 60850 - RNA, 19 nt, Artificial Sequence
  Synthetic
auggcaaacaagguaggag

SEQ ID NO: 60851 - RNA, 20 nt, Artificial Sequence
  Synthetic
aauggcaaacaagguaggag

SEQ ID NO: 60852 - RNA, 21 nt, Artificial Sequence
  Synthetic
caauggcaaacaagguaggag

SEQ ID NO: 60853 - RNA, 22 nt, Artificial Sequence
  Synthetic
ccaauggcaaacaagguaggag

SEQ ID NO: 60854 - RNA, 23 nt, Artificial Sequence
  Synthetic
gccaauggcaaacaagguaggag

SEQ ID NO: 60855 - RNA, 24 nt, Artificial Sequence
  Synthetic
ggccaauggcaaacaagguaggag

SEQ ID NO: 60856 - RNA, 18 nt, Artificial Sequence
  Synthetic
  misc_feature (11)..(11): n is a, c, g, or u
auuuggugucnuuuggag

SEQ ID NO: 60857 - RNA, 19 nt, Artificial Sequence
  Synthetic
  misc_feature (12)..(12): n is a, c, g, or u
uauuuggugucnuuuggag

SEQ ID NO: 60858 - RNA, 20 nt, Artificial Sequence
  Synthetic
  misc_feature (13)..(13): n is a, c, g, or u
guauuuggugucnuuuggag

SEQ ID NO: 60859 - RNA, 21 nt, Artificial Sequence
  Synthetic
  misc_feature (14)..(14): n is a, c, g, or u
aguauuuggugucnuuuggag

SEQ ID NO: 60860 - RNA, 22 nt, Artificial Sequence
  Synthetic
  misc_feature (15)..(15): n is a, c, g, or u
gaguauuuggugucnuuuggag

SEQ ID NO: 60861 - RNA, 23 nt, Artificial Sequence
  Synthetic
  misc_feature (16)..(16): n is a, c, g, or u
ugaguauuuggugucnuuuggag

SEQ ID NO: 60862 - RNA, 24 nt, Artificial Sequence
  Synthetic
  misc_feature (17)..(17): n is a, c, g, or u
uugaguauuuggugucnuuuggag

SEQ ID NO: 60863 - RNA, 18 nt, Artificial Sequence
  Synthetic
  misc_feature (10)..(10): n is a, c, g, or u
  misc_feature (16)..(16): n is a, c, g, or u
ggguuaugunauuggnag

SEQ ID NO: 60864 - RNA, 19 nt, Artificial Sequence
  Synthetic
  misc_feature (11)..(11): n is a, c, g, or u
  misc_feature (17)..(17): n is a, c, g, or u
uggguuaugunauuggnag

SEQ ID NO: 60865 - RNA, 20 nt, Artificial Sequence
  Synthetic
  misc_feature (12)..(12): n is a, c, g, or u
  misc_feature (18)..(18): n is a, c, g, or u
auggguuaugunauuggnag

SEQ ID NO: 60866 - RNA, 21 nt, Artificial Sequence
  Synthetic
  misc_feature (13)..(13): n is a, c, g, or u
  misc_feature (19)..(19): n is a, c, g, or u
cauggguuaugunauuggnag

SEQ ID NO: 60867 - RNA, 22 nt, Artificial Sequence
  Synthetic
  misc_feature (14)..(14): n is a, c, g, or u
  misc_feature (20)..(20): n is a, c, g, or u
ucauggguuaugunauuggnag

SEQ ID NO: 60868 - RNA, 23 nt, Artificial Sequence
  Synthetic
  misc_feature (15)..(15): n is a, c, g, or u
  misc_feature (21)..(21): n is a, c, g, or u
uucauggguuaugunauuggnag

SEQ ID NO: 60869 - RNA, 24 nt, Artificial Sequence
  Synthetic
  misc_feature (16)..(16): n is a, c, g, or u
  misc_feature (22)..(22): n is a, c, g, or u
uuucauggguuaugunauuggnag

SEQ ID NO: 60870 - RNA, 18 nt, Artificial Sequence
  Synthetic
  misc_feature (2)..(2): n is a, c, g, or u
  misc_feature (16)..(16): n is a, c, g, or u
gnugggggaggagaunag

SEQ ID NO: 60871 - RNA, 19 nt, Artificial Sequence
  Synthetic
  misc_feature (3)..(3): n is a, c, g, or u
  misc_feature (17)..(17): n is a, c, g, or u
agnugggggaggagaunag

SEQ ID NO: 60872 - RNA, 20 nt, Artificial Sequence
  Synthetic
  misc_feature (4)..(4): n is a, c, g, or u
  misc_feature (18)..(18): n is a, c, g, or u
gagnugggggaggagaunag

SEQ ID NO: 60873 - RNA, 21 nt, Artificial Sequence
  Synthetic
  misc_feature (5)..(5): n is a, c, g, or u
  misc_feature (19)..(19): n is a, c, g, or u
ggagnugggggaggagaunag

SEQ ID NO: 60874 - RNA, 22 nt, Artificial Sequence
  Synthetic
  misc_feature (6)..(6): n is a, c, g, or u
  misc_feature (20)..(20): n is a, c, g, or u
aggagnugggggaggagaunag

SEQ ID NO: 60875 - RNA, 23 nt, Artificial Sequence
  Synthetic
  misc_feature (7)..(7): n is a, c, g, or u
  misc_feature (21)..(21): n is a, c, g, or u
gaggagnugggggaggagaunag

SEQ ID NO: 60876 - RNA, 24 nt, Artificial Sequence
  Synthetic
  misc_feature (8)..(8): n is a, c, g, or u
  misc_feature (22)..(22): n is a, c, g, or u
ggaggagnugggggaggagaunag

SEQ ID NO: 60877 - RNA, 18 nt, Artificial Sequence
  Synthetic
cuucucucaauuuucuag

SEQ ID NO: 60878 - RNA, 19 nt, Artificial Sequence
  Synthetic
acuucucucaauuuucuag

SEQ ID NO: 60879 - RNA, 20 nt, Artificial Sequence
  Synthetic
gacuucucucaauuuucuag

SEQ ID NO: 60880 - RNA, 21 nt, Artificial Sequence
  Synthetic
ggacuucucucaauuuucuag

SEQ ID NO: 60881 - RNA, 22 nt, Artificial Sequence
  Synthetic
uggacuucucucaauuuucuag

SEQ ID NO: 60882 - RNA, 23 nt, Artificial Sequence
  Synthetic
guggacuucucucaauuuucuag

SEQ ID NO: 60883 - RNA, 24 nt, Artificial Sequence
  Synthetic
gguggacuucucucaauuuucuag

SEQ ID NO: 60884 - RNA, 18 nt, Artificial Sequence
  Synthetic
ccccguugcucggcaacg

SEQ ID NO: 60885 - RNA, 19 nt, Artificial Sequence
  Synthetic
accccguugcucggcaacg

SEQ ID NO: 60886 - RNA, 20 nt, Artificial Sequence
  Synthetic
uaccccguugcucggcaacg

SEQ ID NO: 60887 - RNA, 18 nt, Artificial Sequence
  Synthetic
aacuacuguuguuagacg

SEQ ID NO: 60888 - RNA, 19 nt, Artificial Sequence
  Synthetic
aaacuacuguuguuagacg

SEQ ID NO: 60889 - RNA, 20 nt, Artificial Sequence
  Synthetic
gaaacuacuguuguuagacg

SEQ ID NO: 60890 - RNA, 21 nt, Artificial Sequence
  Synthetic
ggaaacuacuguuguuagacg

SEQ ID NO: 60891 - RNA, 22 nt, Artificial Sequence
  Synthetic
cggaaacuacuguuguuagacg

SEQ ID NO: 60892 - RNA, 23 nt, Artificial Sequence
  Synthetic
ccggaaacuacuguuguuagacg

SEQ ID NO: 60893 - RNA, 24 nt, Artificial Sequence
  Synthetic
uccggaaacuacuguuguuagacg

SEQ ID NO: 60894 - RNA, 18 nt, Artificial Sequence
  Synthetic
caaauuccagcagucccg

SEQ ID NO: 60895 - RNA, 19 nt, Artificial Sequence
  Synthetic
gcaaauuccagcagucccg

SEQ ID NO: 60896 - RNA, 20 nt, Artificial Sequence
  Synthetic
  misc_feature (1)..(1): n is a, c, g, or u
ngcaaauuccagcagucccg

SEQ ID NO: 60897 - RNA, 21 nt, Artificial Sequence
  Synthetic
  misc_feature (2)..(2): n is a, c, g, or u
gngcaaauuccagcagucccg

SEQ ID NO: 60898 - RNA, 22 nt, Artificial Sequence
  Synthetic
  misc_feature (3)..(3): n is a, c, g, or u
agngcaaauuccagcagucccg

SEQ ID NO: 60899 - RNA, 23 nt, Artificial Sequence
  Synthetic
  misc_feature (4)..(4): n is a, c, g, or u
cagngcaaauuccagcagucccg

SEQ ID NO: 60900 - RNA, 24 nt, Artificial Sequence
  Synthetic
  misc_feature (5)..(5): n is a, c, g, or u
ucagngcaaauuccagcagucccg

SEQ ID NO: 60901 - RNA, 18 nt, Artificial Sequence
  Synthetic
  misc_feature (15)..(15): n is a, c, g, or u
ucggcgcugaauccngcg

SEQ ID NO: 60902 - RNA, 19 nt, Artificial Sequence
  Synthetic
  misc_feature (16)..(16): n is a, c, g, or u
gucggcgcugaauccngcg

SEQ ID NO: 60903 - RNA, 20 nt, Artificial Sequence
  Synthetic
  misc_feature (17)..(17): n is a, c, g, or u
cgucggcgcugaauccngcg

SEQ ID NO: 60904 - RNA, 21 nt, Artificial Sequence
  Synthetic
  misc_feature (18)..(18): n is a, c, g, or u
ccgucggcgcugaauccngcg

SEQ ID NO: 60905 - RNA, 22 nt, Artificial Sequence
  Synthetic
  misc_feature (19)..(19): n is a, c, g, or u
cccgucggcgcugaauccngcg

SEQ ID NO: 60906 - RNA, 23 nt, Artificial Sequence
  Synthetic
  misc_feature (20)..(20): n is a, c, g, or u
ucccgucggcgcugaauccngcg

SEQ ID NO: 60907 - RNA, 24 nt, Artificial Sequence
  Synthetic
  misc_feature (21)..(21): n is a, c, g, or u
gucccgucggcgcugaauccngcg

SEQ ID NO: 60908 - RNA, 18 nt, Artificial Sequence
  Synthetic
uggccaucagcgcaugcg

SEQ ID NO: 60909 - RNA, 19 nt, Artificial Sequence
  Synthetic
uuggccaucagcgcaugcg

SEQ ID NO: 60910 - RNA, 20 nt, Artificial Sequence
  Synthetic
auuggccaucagcgcaugcg

SEQ ID NO: 60911 - RNA, 21 nt, Artificial Sequence
  Synthetic
cauuggccaucagcgcaugcg

SEQ ID NO: 60912 - RNA, 22 nt, Artificial Sequence
  Synthetic
ccauuggccaucagcgcaugcg

SEQ ID NO: 60913 - RNA, 23 nt, Artificial Sequence
  Synthetic
gccauuggccaucagcgcaugcg

SEQ ID NO: 60914 - RNA, 24 nt, Artificial Sequence
  Synthetic
ggccauuggccaucagcgcaugcg

SEQ ID NO: 60915 - RNA, 18 nt, Artificial Sequence
  Synthetic
aauuuguucaguggugcg

SEQ ID NO: 60916 - RNA, 19 nt, Artificial Sequence
  Synthetic
caauuuguucaguggugcg

SEQ ID NO: 60917 - RNA, 20 nt, Artificial Sequence
  Synthetic
gcaauuuguucaguggugcg

SEQ ID NO: 60918 - RNA, 21 nt, Artificial Sequence
  Synthetic
ugcaauuuguucaguggugcg

SEQ ID NO: 60919 - RNA, 22 nt, Artificial Sequence
  Synthetic
gugcaauuuguucaguggugcg

SEQ ID NO: 60920 - RNA, 23 nt, Artificial Sequence
  Synthetic
agugcaauuuguucaguggugcg

SEQ ID NO: 60921 - RNA, 24 nt, Artificial Sequence
  Synthetic
uagugcaauuuguucaguggugcg

SEQ ID NO: 60922 - RNA, 18 nt, Artificial Sequence
  Synthetic
  misc_feature (4)..(4): n is a, c, g, or u
  misc_feature (10)..(10): n is a, c, g, or u
  misc_feature (16)..(16): n is a, c, g, or u
cgancccucncggggncg

SEQ ID NO: 60923 - RNA, 19 nt, Artificial Sequence
  Synthetic
  misc_feature (5)..(5): n is a, c, g, or u
  misc_feature (11)..(11): n is a, c, g, or u
  misc_feature (17)..(17): n is a, c, g, or u
acgancccucncggggncg

SEQ ID NO: 60924 - RNA, 20 nt, Artificial Sequence
  Synthetic
  misc_feature (6)..(6): n is a, c, g, or u
  misc_feature (12)..(12): n is a, c, g, or u
  misc_feature (18)..(18): n is a, c, g, or u
gacgancccucncggggncg

SEQ ID NO: 60925 - RNA, 21 nt, Artificial Sequence
  Synthetic
  misc_feature (7)..(7): n is a, c, g, or u
  misc_feature (13)..(13): n is a, c, g, or u
  misc_feature (19)..(19): n is a, c, g, or u
ggacgancccucncggggncg

SEQ ID NO: 60926 - RNA, 22 nt, Artificial Sequence
  Synthetic
  misc_feature (8)..(8): n is a, c, g, or u
  misc_feature (14)..(14): n is a, c, g, or u
  misc_feature (20)..(20): n is a, c, g, or u
cggacgancccucncggggncg

SEQ ID NO: 60927 - RNA, 23 nt, Artificial Sequence
  Synthetic
  misc_feature (9)..(9): n is a, c, g, or u
  misc_feature (15)..(15): n is a, c, g, or u
  misc_feature (21)..(21): n is a, c, g, or u
gcggacgancccucncggggncg

SEQ ID NO: 60928 - RNA, 24 nt, Artificial Sequence
  Synthetic
  misc_feature (1)..(1): n is a, c, g, or u
  misc_feature (10)..(10): n is a, c, g, or u
  misc_feature (16)..(16): n is a, c, g, or u
  misc_feature (22)..(22): n is a, c, g, or u
ngcggacgancccucncggggncg

SEQ ID NO: 60929 - RNA, 18 nt, Artificial Sequence
  Synthetic
  misc_feature (16)..(16): n is a, c, g, or u
ugccaacuggauccuncg

SEQ ID NO: 60930 - RNA, 19 nt, Artificial Sequence
  Synthetic
  misc_feature (17)..(17): n is a, c, g, or u
cugccaacuggauccuncg

SEQ ID NO: 60931 - RNA, 20 nt, Artificial Sequence
  Synthetic
  misc_feature (18)..(18): n is a, c, g, or u
gcugccaacuggauccuncg

SEQ ID NO: 60932 - RNA, 21 nt, Artificial Sequence
  Synthetic
  misc_feature (19)..(19): n is a, c, g, or u
ugcugccaacuggauccuncg

SEQ ID NO: 60933 - RNA, 22 nt, Artificial Sequence
  Synthetic
  misc_feature (20)..(20): n is a, c, g, or u
gugcugccaacuggauccuncg

SEQ ID NO: 60934 - RNA, 23 nt, Artificial Sequence
  Synthetic
  misc_feature (21)..(21): n is a, c, g, or u
ugugcugccaacuggauccuncg

SEQ ID NO: 60935 - RNA, 24 nt, Artificial Sequence
  Synthetic
  misc_feature (1)..(1): n is a, c, g, or u
  misc_feature (22)..(22): n is a, c, g, or u
nugugcugccaacuggauccuncg

SEQ ID NO: 60936 - RNA, 18 nt, Artificial Sequence
  Synthetic
ugcuguuccaaacccucg

SEQ ID NO: 60937 - RNA, 19 nt, Artificial Sequence
  Synthetic
  misc_feature (1)..(1): n is a, c, g, or u
nugcuguuccaaacccucg

SEQ ID NO: 60938 - RNA, 20 nt, Artificial Sequence
  Synthetic
  misc_feature (2)..(2): n is a, c, g, or u
gnugcuguuccaaacccucg

SEQ ID NO: 60939 - RNA, 21 nt, Artificial Sequence
  Synthetic
  misc_feature (3)..(3): n is a, c, g, or u
ugnugcuguuccaaacccucg

SEQ ID NO: 60940 - RNA, 22 nt, Artificial Sequence
  Synthetic
  misc_feature (1)..(1): n is a, c, g, or u
  misc_feature (4)..(4): n is a, c, g, or u
nugnugcuguuccaaacccucg

SEQ ID NO: 60941 - RNA, 23 nt, Artificial Sequence
  Synthetic
  misc_feature (2)..(2): n is a, c, g, or u
  misc_feature (5)..(5): n is a, c, g, or u
cnugnugcuguuccaaacccucg

SEQ ID NO: 60942 - RNA, 24 nt, Artificial Sequence
  Synthetic
  misc_feature (3)..(3): n is a, c, g, or u
  misc_feature (6)..(6): n is a, c, g, or u
ucnugnugcuguuccaaacccucg

SEQ ID NO: 60943 - RNA, 18 nt, Artificial Sequence
  Synthetic
cuucaccucugcacgucg

SEQ ID NO: 60944 - RNA, 19 nt, Artificial Sequence
  Synthetic
gcuucaccucugcacgucg

SEQ ID NO: 60945 - RNA, 20 nt, Artificial Sequence
  Synthetic
cgcuucaccucugcacgucg

SEQ ID NO: 60946 - RNA, 21 nt, Artificial Sequence
  Synthetic
ucgcuucaccucugcacgucg

SEQ ID NO: 60947 - RNA, 22 nt, Artificial Sequence
  Synthetic
uucgcuucaccucugcacgucg

SEQ ID NO: 60948 - RNA, 23 nt, Artificial Sequence
  Synthetic
cuucgcuucaccucugcacgucg

SEQ ID NO: 60949 - RNA, 24 nt, Artificial Sequence
  Synthetic
acuucgcuucaccucugcacgucg

SEQ ID NO: 60950 - RNA, 18 nt, Artificial Sequence
  Synthetic
  misc_feature (1)..(1): n is a, c, g, or u
nucucaaucgccgcgucg

SEQ ID NO: 60951 - RNA, 19 nt, Artificial Sequence
  Synthetic
  misc_feature (2)..(2): n is a, c, g, or u
gnucucaaucgccgcgucg

SEQ ID NO: 60952 - RNA, 20 nt, Artificial Sequence
  Synthetic
  misc_feature (3)..(3): n is a, c, g, or u
agnucucaaucgccgcgucg

SEQ ID NO: 60953 - RNA, 21 nt, Artificial Sequence
  Synthetic
  misc_feature (4)..(4): n is a, c, g, or u
aagnucucaaucgccgcgucg

SEQ ID NO: 60954 - RNA, 22 nt, Artificial Sequence
  Synthetic
  misc_feature (5)..(5): n is a, c, g, or u
gaagnucucaaucgccgcgucg

SEQ ID NO: 60955 - RNA, 23 nt, Artificial Sequence
  Synthetic
  misc_feature (6)..(6): n is a, c, g, or u
cgaagnucucaaucgccgcgucg

SEQ ID NO: 60956 - RNA, 24 nt, Artificial Sequence
  Synthetic
  misc_feature (7)..(7): n is a, c, g, or u
acgaagnucucaaucgccgcgucg

SEQ ID NO: 60957 - RNA, 18 nt, Artificial Sequence
  Synthetic
ggccaauggcaaacaagg

SEQ ID NO: 60958 - RNA, 19 nt, Artificial Sequence
  Synthetic
uggccaauggcaaacaagg

SEQ ID NO: 60959 - RNA, 20 nt, Artificial Sequence
  Synthetic
uuggccaauggcaaacaagg

SEQ ID NO: 60960 - RNA, 21 nt, Artificial Sequence
  Synthetic
  misc_feature (1)..(1): n is a, c, g, or u
nuuggccaauggcaaacaagg

SEQ ID NO: 60961 - RNA, 22 nt, Artificial Sequence
  Synthetic
  misc_feature (2)..(2): n is a, c, g, or u
anuuggccaauggcaaacaagg

SEQ ID NO: 60962 - RNA, 23 nt, Artificial Sequence
  Synthetic
  misc_feature (3)..(3): n is a, c, g, or u
canuuggccaauggcaaacaagg

SEQ ID NO: 60963 - RNA, 24 nt, Artificial Sequence
  Synthetic
  misc_feature (4)..(4): n is a, c, g, or u
acanuuggccaauggcaaacaagg

SEQ ID NO: 60964 - RNA, 18 nt, Artificial Sequence
  Synthetic
uuccuuggacucauaagg

SEQ ID NO: 60965 - RNA, 19 nt, Artificial Sequence
  Synthetic
auuccuuggacucauaagg

SEQ ID NO: 60966 - RNA, 20 nt, Artificial Sequence
  Synthetic
uauuccuuggacucauaagg

SEQ ID NO: 60967 - RNA, 21 nt, Artificial Sequence
  Synthetic
guauuccuuggacucauaagg

SEQ ID NO: 60968 - RNA, 22 nt, Artificial Sequence
  Synthetic
aguauuccuuggacucauaagg

SEQ ID NO: 60969 - RNA, 23 nt, Artificial Sequence
  Synthetic
uaguauuccuuggacucauaagg

SEQ ID NO: 60970 - RNA, 24 nt, Artificial Sequence
  Synthetic
uuaguauuccuuggacucauaagg

SEQ ID NO: 60971 - RNA, 18 nt, Artificial Sequence
  Synthetic
  misc_feature (3)..(3): n is a, c, g, or u
  misc_feature (9)..(9): n is a, c, g, or u
gcncuguungauccgagg

SEQ ID NO: 60972 - RNA, 19 nt, Artificial Sequence
  Synthetic
  misc_feature (4)..(4): n is a, c, g, or u
  misc_feature (10)..(10): n is a, c, g, or u
ggcncuguungauccgagg

SEQ ID NO: 60973 - RNA, 20 nt, Artificial Sequence
  Synthetic
  misc_feature (5)..(5): n is a, c, g, or u
  misc_feature (11)..(11): n is a, c, g, or u
aggcncuguungauccgagg

SEQ ID NO: 60974 - RNA, 21 nt, Artificial Sequence
  Synthetic
  misc_feature (6)..(6): n is a, c, g, or u
  misc_feature (12)..(12): n is a, c, g, or u
caggcncuguungauccgagg

SEQ ID NO: 60975 - RNA, 22 nt, Artificial Sequence
  Synthetic
  misc_feature (7)..(7): n is a, c, g, or u
  misc_feature (13)..(13): n is a, c, g, or u
ccaggcncuguungauccgagg

SEQ ID NO: 60976 - RNA, 23 nt, Artificial Sequence
  Synthetic
  misc_feature (8)..(8): n is a, c, g, or u
  misc_feature (14)..(14): n is a, c, g, or u
accaggcncuguungauccgagg

SEQ ID NO: 60977 - RNA, 24 nt, Artificial Sequence
  Synthetic
  misc_feature (9)..(9): n is a, c, g, or u
  misc_feature (15)..(15): n is a, c, g, or u
caccaggcncuguungauccgagg

SEQ ID NO: 60978 - RNA, 18 nt, Artificial Sequence
  Synthetic
aauggcaaacaagguagg

SEQ ID NO: 60979 - RNA, 19 nt, Artificial Sequence
  Synthetic
caauggcaaacaagguagg

SEQ ID NO: 60980 - RNA, 20 nt, Artificial Sequence
  Synthetic
ccaauggcaaacaagguagg

SEQ ID NO: 60981 - RNA, 21 nt, Artificial Sequence
  Synthetic
gccaauggcaaacaagguagg

SEQ ID NO: 60982 - RNA, 22 nt, Artificial Sequence
  Synthetic
ggccaauggcaaacaagguagg

SEQ ID NO: 60983 - RNA, 23 nt, Artificial Sequence
  Synthetic
uggccaauggcaaacaagguagg

SEQ ID NO: 60984 - RNA, 24 nt, Artificial Sequence
  Synthetic
uuggccaauggcaaacaagguagg

SEQ ID NO: 60985 - RNA, 18 nt, Artificial Sequence
  Synthetic
  misc_feature (4)..(4): n is a, c, g, or u
guanuaggaggcuguagg

SEQ ID NO: 60986 - RNA, 19 nt, Artificial Sequence
  Synthetic
  misc_feature (5)..(5): n is a, c, g, or u
uguanuaggaggcuguagg

SEQ ID NO: 60987 - RNA, 20 nt, Artificial Sequence
  Synthetic
  misc_feature (6)..(6): n is a, c, g, or u
uuguanuaggaggcuguagg

SEQ ID NO: 60988 - RNA, 21 nt, Artificial Sequence
  Synthetic
  misc_feature (7)..(7): n is a, c, g, or u
uuuguanuaggaggcuguagg

SEQ ID NO: 60989 - RNA, 22 nt, Artificial Sequence
  Synthetic
  misc_feature (8)..(8): n is a, c, g, or u
cuuuguanuaggaggcuguagg

SEQ ID NO: 60990 - RNA, 23 nt, Artificial Sequence
  Synthetic
  misc_feature (9)..(9): n is a, c, g, or u
ucuuuguanuaggaggcuguagg

SEQ ID NO: 60991 - RNA, 24 nt, Artificial Sequence
  Synthetic
  misc_feature (1)..(1): n is a, c, g, or u
  misc_feature (10)..(10): n is a, c, g, or u
nucuuuguanuaggaggcuguagg

SEQ ID NO: 60992 - RNA, 18 nt, Artificial Sequence
  Synthetic
cccguugcucggcaacgg

SEQ ID NO: 60993 - RNA, 19 nt, Artificial Sequence
  Synthetic
ccccguugcucggcaacgg

SEQ ID NO: 60994 - RNA, 20 nt, Artificial Sequence
  Synthetic
accccguugcucggcaacgg

SEQ ID NO: 60995 - RNA, 18 nt, Artificial Sequence
  Synthetic
uguuucgcucgcagccgg

SEQ ID NO: 60996 - RNA, 19 nt, Artificial Sequence
  Synthetic
uuguuucgcucgcagccgg

SEQ ID NO: 60997 - RNA, 20 nt, Artificial Sequence
  Synthetic
cuuguuucgcucgcagccgg

SEQ ID NO: 60998 - RNA, 21 nt, Artificial Sequence
  Synthetic
gcuuguuucgcucgcagccgg

SEQ ID NO: 60999 - RNA, 22 nt, Artificial Sequence
  Synthetic
agcuuguuucgcucgcagccgg

SEQ ID NO: 61000 - RNA, 23 nt, Artificial Sequence
  Synthetic
cagcuuguuucgcucgcagccgg

SEQ ID NO: 61001 - RNA, 24 nt, Artificial Sequence
  Synthetic
gcagcuuguuucgcucgcagccgg

SEQ ID NO: 61002 - RNA, 18 nt, Artificial Sequence
  Synthetic
gcuuccaccaaucggcgg

SEQ ID NO: 61003 - RNA, 19 nt, Artificial Sequence
  Synthetic
ugcuuccaccaaucggcgg

SEQ ID NO: 61004 - RNA, 20 nt, Artificial Sequence
  Synthetic
cugcuuccaccaaucggcgg

SEQ ID NO: 61005 - RNA, 21 nt, Artificial Sequence
  Synthetic
ccugcuuccaccaaucggcgg

SEQ ID NO: 61006 - RNA, 22 nt, Artificial Sequence
  Synthetic
uccugcuuccaccaaucggcgg

SEQ ID NO: 61007 - RNA, 23 nt, Artificial Sequence
  Synthetic
cuccugcuuccaccaaucggcgg

SEQ ID NO: 61008 - RNA, 24 nt, Artificial Sequence
  Synthetic
ccuccugcuuccaccaaucggcgg

SEQ ID NO: 61009 - RNA, 18 nt, Artificial Sequence
  Synthetic
gcuguuccaaacccucgg

SEQ ID NO: 61010 - RNA, 19 nt, Artificial Sequence
  Synthetic
ugcuguuccaaacccucgg

SEQ ID NO: 61011 - RNA, 20 nt, Artificial Sequence
  Synthetic
  misc_feature (1)..(1): n is a, c, g, or u
nugcuguuccaaacccucgg

SEQ ID NO: 61012 - RNA, 21 nt, Artificial Sequence
  Synthetic
  misc_feature (2)..(2): n is a, c, g, or u
gnugcuguuccaaacccucgg

SEQ ID NO: 61013 - RNA, 22 nt, Artificial Sequence
  Synthetic
  misc_feature (3)..(3): n is a, c, g, or u
ugnugcuguuccaaacccucgg

SEQ ID NO: 61014 - RNA, 23 nt, Artificial Sequence
  Synthetic
  misc_feature (1)..(1): n is a, c, g, or u
  misc_feature (4)..(4): n is a, c, g, or u
nugnugcuguuccaaacccucgg

SEQ ID NO: 61015 - RNA, 24 nt, Artificial Sequence
  Synthetic
  misc_feature (2)..(2): n is a, c, g, or u
  misc_feature (5)..(5): n is a, c, g, or u
cnugnugcuguuccaaacccucgg

SEQ ID NO: 61016 - RNA, 18 nt, Artificial Sequence
  Synthetic
  misc_feature (2)..(2): n is a, c, g, or u
  misc_feature (8)..(8): n is a, c, g, or u
cncuguungauccgaggg

SEQ ID NO: 61017 - RNA, 19 nt, Artificial Sequence
  Synthetic
  misc_feature (3)..(3): n is a, c, g, or u
  misc_feature (9)..(9): n is a, c, g, or u
gcncuguungauccgaggg

SEQ ID NO: 61018 - RNA, 20 nt, Artificial Sequence
  Synthetic
  misc_feature (4)..(4): n is a, c, g, or u
  misc_feature (10)..(10): n is a, c, g, or u
ggcncuguungauccgaggg

SEQ ID NO: 61019 - RNA, 21 nt, Artificial Sequence
  Synthetic
  misc_feature (5)..(5): n is a, c, g, or u
  misc_feature (11)..(11): n is a, c, g, or u
aggcncuguungauccgaggg

SEQ ID NO: 61020 - RNA, 22 nt, Artificial Sequence
  Synthetic
  misc_feature (6)..(6): n is a, c, g, or u
  misc_feature (12)..(12): n is a, c, g, or u
caggcncuguungauccgaggg

SEQ ID NO: 61021 - RNA, 23 nt, Artificial Sequence
  Synthetic
  misc_feature (7)..(7): n is a, c, g, or u
  misc_feature (13)..(13): n is a, c, g, or u
ccaggcncuguungauccgaggg

SEQ ID NO: 61022 - RNA, 24 nt, Artificial Sequence
  Synthetic
  misc_feature (8)..(8): n is a, c, g, or u
  misc_feature (14)..(14): n is a, c, g, or u
accaggcncuguungauccgaggg

SEQ ID NO: 61023 - RNA, 18 nt, Artificial Sequence
  Synthetic
accaaucggcgguccggg

SEQ ID NO: 61024 - RNA, 19 nt, Artificial Sequence
  Synthetic
caccaaucggcgguccggg

SEQ ID NO: 61025 - RNA, 20 nt, Artificial Sequence
  Synthetic
ccaccaaucggcgguccggg

SEQ ID NO: 61026 - RNA, 21 nt, Artificial Sequence
  Synthetic
uccaccaaucggcgguccggg

SEQ ID NO: 61027 - RNA, 22 nt, Artificial Sequence
  Synthetic
uuccaccaaucggcgguccggg

SEQ ID NO: 61028 - RNA, 23 nt, Artificial Sequence
  Synthetic
cuuccaccaaucggcgguccggg

SEQ ID NO: 61029 - RNA, 24 nt, Artificial Sequence
  Synthetic
gcuuccaccaaucggcgguccggg

SEQ ID NO: 61030 - RNA, 18 nt, Artificial Sequence
  Synthetic
  misc_feature (1)..(1): n is a, c, g, or u
  misc_feature (10)..(11): n is a, c, g, or u
nucaacgacnngaagggg

SEQ ID NO: 61031 - RNA, 19 nt, Artificial Sequence
  Synthetic
  misc_feature (2)..(2): n is a, c, g, or u
  misc_feature (11)..(12): n is a, c, g, or u
unucaacgacnngaagggg

SEQ ID NO: 61032 - RNA, 20 nt, Artificial Sequence
  Synthetic
  misc_feature (3)..(3): n is a, c, g, or u
  misc_feature (12)..(13): n is a, c, g, or u
cunucaacgacnngaagggg

SEQ ID NO: 61033 - RNA, 21 nt, Artificial Sequence
  Synthetic
  misc_feature (4)..(4): n is a, c, g, or u
  misc_feature (13)..(14): n is a, c, g, or u
ucunucaacgacnngaagggg

SEQ ID NO: 61034 - RNA, 22 nt, Artificial Sequence
  Synthetic
  misc_feature (5)..(5): n is a, c, g, or u
  misc_feature (14)..(15): n is a, c, g, or u
cucunucaacgacnngaagggg

SEQ ID NO: 61035 - RNA, 23 nt, Artificial Sequence
  Synthetic
  misc_feature (6)..(6): n is a, c, g, or u
  misc_feature (15)..(16): n is a, c, g, or u
ccucunucaacgacnngaagggg

SEQ ID NO: 61036 - RNA, 24 nt, Artificial Sequence
  Synthetic
  misc_feature (7)..(7): n is a, c, g, or u
  misc_feature (16)..(17): n is a, c, g, or u
accucunucaacgacnngaagggg

SEQ ID NO: 61037 - RNA, 18 nt, Artificial Sequence
  Synthetic
  misc_feature (12)..(12): n is a, c, g, or u
acugggaggagnuggggg

SEQ ID NO: 61038 - RNA, 19 nt, Artificial Sequence
  Synthetic
  misc_feature (13)..(13): n is a, c, g, or u
gacugggaggagnuggggg

SEQ ID NO: 61039 - RNA, 20 nt, Artificial Sequence
  Synthetic
  misc_feature (1)..(1): n is a, c, g, or u
  misc_feature (14)..(14): n is a, c, g, or u
ngacugggaggagnuggggg

SEQ ID NO: 61040 - RNA, 21 nt, Artificial Sequence
  Synthetic
  misc_feature (2)..(2): n is a, c, g, or u
  misc_feature (15)..(15): n is a, c, g, or u
angacugggaggagnuggggg

SEQ ID NO: 61041 - RNA, 22 nt, Artificial Sequence
  Synthetic
  misc_feature (3)..(3): n is a, c, g, or u
  misc_feature (16)..(16): n is a, c, g, or u
aangacugggaggagnuggggg

SEQ ID NO: 61042 - RNA, 23 nt, Artificial Sequence
  Synthetic
  misc_feature (4)..(4): n is a, c, g, or u
  misc_feature (17)..(17): n is a, c, g, or u
uaangacugggaggagnuggggg

SEQ ID NO: 61043 - RNA, 24 nt, Artificial Sequence
  Synthetic
  misc_feature (5)..(5): n is a, c, g, or u
  misc_feature (18)..(18): n is a, c, g, or u
uuaangacugggaggagnuggggg

SEQ ID NO: 61044 - RNA, 18 nt, Artificial Sequence
  Synthetic
  misc_feature (13)..(13): n is a, c, g, or u
gacugggaggagnugggg

SEQ ID NO: 61045 - RNA, 19 nt, Artificial Sequence
  Synthetic
  misc_feature (1)..(1): n is a, c, g, or u
  misc_feature (14)..(14): n is a, c, g, or u
ngacugggaggagnugggg

SEQ ID NO: 61046 - RNA, 20 nt, Artificial Sequence
  Synthetic
  misc_feature (2)..(2): n is a, c, g, or u
  misc_feature (15)..(15): n is a, c, g, or u
angacugggaggagnugggg

SEQ ID NO: 61047 - RNA, 21 nt, Artificial Sequence
  Synthetic
  misc_feature (3)..(3): n is a, c, g, or u
  misc_feature (16)..(16): n is a, c, g, or u
aangacugggaggagnugggg

SEQ ID NO: 61048 - RNA, 22 nt, Artificial Sequence
  Synthetic
  misc_feature (4)..(4): n is a, c, g, or u
  misc_feature (17)..(17): n is a, c, g, or u
uaangacugggaggagnugggg

SEQ ID NO: 61049 - RNA, 23 nt, Artificial Sequence
  Synthetic
  misc_feature (5)..(5): n is a, c, g, or u
  misc_feature (18)..(18): n is a, c, g, or u
uuaangacugggaggagnugggg

SEQ ID NO: 61050 - RNA, 24 nt, Artificial Sequence
  Synthetic
  misc_feature (6)..(6): n is a, c, g, or u
  misc_feature (19)..(19): n is a, c, g, or u
uuuaangacugggaggagnugggg

SEQ ID NO: 61051 - RNA, 18 nt, Artificial Sequence
  Synthetic
  misc_feature (13)..(13): n is a, c, g, or u
cacgguggccugnugggg

SEQ ID NO: 61052 - RNA, 19 nt, Artificial Sequence
  Synthetic
  misc_feature (14)..(14): n is a, c, g, or u
acacgguggccugnugggg

SEQ ID NO: 61053 - RNA, 20 nt, Artificial Sequence
  Synthetic
  misc_feature (15)..(15): n is a, c, g, or u
cacacgguggccugnugggg

SEQ ID NO: 61054 - RNA, 21 nt, Artificial Sequence
  Synthetic
  misc_feature (16)..(16): n is a, c, g, or u
ccacacgguggccugnugggg

SEQ ID NO: 61055 - RNA, 22 nt, Artificial Sequence
  Synthetic
  misc_feature (17)..(17): n is a, c, g, or u
cccacacgguggccugnugggg

SEQ ID NO: 61056 - RNA, 23 nt, Artificial Sequence
  Synthetic
  misc_feature (18)..(18): n is a, c, g, or u
ccccacacgguggccugnugggg

SEQ ID NO: 61057 - RNA, 24 nt, Artificial Sequence
  Synthetic
  misc_feature (19)..(19): n is a, c, g, or u
cccccacacgguggccugnugggg

SEQ ID NO: 61058 - RNA, 18 nt, Artificial Sequence
  Synthetic
gaugaucugguauugggg

SEQ ID NO: 61059 - RNA, 19 nt, Artificial Sequence
  Synthetic
ggaugaucugguauugggg

SEQ ID NO: 61060 - RNA, 20 nt, Artificial Sequence
  Synthetic
uggaugaucugguauugggg

SEQ ID NO: 61061 - RNA, 21 nt, Artificial Sequence
  Synthetic
auggaugaucugguauugggg

SEQ ID NO: 61062 - RNA, 22 nt, Artificial Sequence
  Synthetic
uauggaugaucugguauugggg

SEQ ID NO: 61063 - RNA, 23 nt, Artificial Sequence
  Synthetic
auauggaugaucugguauugggg

SEQ ID NO: 61064 - RNA, 24 nt, Artificial Sequence
  Synthetic
uauauggaugaucugguauugggg

SEQ ID NO: 61065 - RNA, 18 nt, Artificial Sequence
  Synthetic
aacccccacugguugggg

SEQ ID NO: 61066 - RNA, 19 nt, Artificial Sequence
  Synthetic
caacccccacugguugggg

SEQ ID NO: 61067 - RNA, 20 nt, Artificial Sequence
  Synthetic
gcaacccccacugguugggg

SEQ ID NO: 61068 - RNA, 21 nt, Artificial Sequence
  Synthetic
cgcaacccccacugguugggg

SEQ ID NO: 61069 - RNA, 22 nt, Artificial Sequence
  Synthetic
acgcaacccccacugguugggg

SEQ ID NO: 61070 - RNA, 23 nt, Artificial Sequence
  Synthetic
gacgcaacccccacugguugggg

SEQ ID NO: 61071 - RNA, 24 nt, Artificial Sequence
  Synthetic
ugacgcaacccccacugguugggg

SEQ ID NO: 61072 - RNA, 18 nt, Artificial Sequence
  Synthetic
ccuuggguggcuuugggg

SEQ ID NO: 61073 - RNA, 19 nt, Artificial Sequence
  Synthetic
gccuuggguggcuuugggg

SEQ ID NO: 61074 - RNA, 20 nt, Artificial Sequence
  Synthetic
ugccuuggguggcuuugggg

SEQ ID NO: 61075 - RNA, 21 nt, Artificial Sequence
  Synthetic
gugccuuggguggcuuugggg

SEQ ID NO: 61076 - RNA, 22 nt, Artificial Sequence
  Synthetic
ugugccuuggguggcuuugggg

SEQ ID NO: 61077 - RNA, 23 nt, Artificial Sequence
  Synthetic
cugugccuuggguggcuuugggg

SEQ ID NO: 61078 - RNA, 24 nt, Artificial Sequence
  Synthetic
gcugugccuuggguggcuuugggg

SEQ ID NO: 61079 - RNA, 18 nt, Artificial Sequence
  Synthetic
  misc_feature (4)..(4): n is a, c, g, or u
  misc_feature (7)..(7): n is a, c, g, or u
ugunaanacuaacauggg

SEQ ID NO: 61080 - RNA, 19 nt, Artificial Sequence
  Synthetic
  misc_feature (5)..(5): n is a, c, g, or u
  misc_feature (8)..(8): n is a, c, g, or u
augunaanacuaacauggg

SEQ ID NO: 61081 - RNA, 20 nt, Artificial Sequence
  Synthetic
  misc_feature (6)..(6): n is a, c, g, or u
  misc_feature (9)..(9): n is a, c, g, or u
uaugunaanacuaacauggg

SEQ ID NO: 61082 - RNA, 21 nt, Artificial Sequence
  Synthetic
  misc_feature (7)..(7): n is a, c, g, or u
  misc_feature (10)..(10): n is a, c, g, or u
cuaugunaanacuaacauggg

SEQ ID NO: 61083 - RNA, 22 nt, Artificial Sequence
  Synthetic
  misc_feature (8)..(8): n is a, c, g, or u
  misc_feature (11)..(11): n is a, c, g, or u
acuaugunaanacuaacauggg

SEQ ID NO: 61084 - RNA, 23 nt, Artificial Sequence
  Synthetic
  misc_feature (9)..(9): n is a, c, g, or u
  misc_feature (12)..(12): n is a, c, g, or u
aacuaugunaanacuaacauggg

SEQ ID NO: 61085 - RNA, 24 nt, Artificial Sequence
  Synthetic
  misc_feature (10)..(10): n is a, c, g, or u
  misc_feature (13)..(13): n is a, c, g, or u
uaacuaugunaanacuaacauggg

SEQ ID NO: 61086 - RNA, 18 nt, Artificial Sequence
  Synthetic
  misc_feature (4)..(5): n is a, c, g, or u
gacnngaaggggcauggg

SEQ ID NO: 61087 - RNA, 19 nt, Artificial Sequence
  Synthetic
  misc_feature (5)..(6): n is a, c, g, or u
cgacnngaaggggcauggg

SEQ ID NO: 61088 - RNA, 20 nt, Artificial Sequence
  Synthetic
  misc_feature (6)..(7): n is a, c, g, or u
acgacnngaaggggcauggg

SEQ ID NO: 61089 - RNA, 21 nt, Artificial Sequence
  Synthetic
  misc_feature (7)..(8): n is a, c, g, or u
aacgacnngaaggggcauggg

SEQ ID NO: 61090 - RNA, 22 nt, Artificial Sequence
  Synthetic
  misc_feature (8)..(9): n is a, c, g, or u
caacgacnngaaggggcauggg

SEQ ID NO: 61091 - RNA, 23 nt, Artificial Sequence
  Synthetic
  misc_feature (9)..(10): n is a, c, g, or u
ucaacgacnngaaggggcauggg

SEQ ID NO: 61092 - RNA, 24 nt, Artificial Sequence
  Synthetic
  misc_feature (1)..(1): n is a, c, g, or u
  misc_feature (10)..(11): n is a, c, g, or u
nucaacgacnngaaggggcauggg

SEQ ID NO: 61093 - RNA, 18 nt, Artificial Sequence
  Synthetic
uaggaaaauaccuauggg

SEQ ID NO: 61094 - RNA, 19 nt, Artificial Sequence
  Synthetic
uuaggaaaauaccuauggg

SEQ ID NO: 61095 - RNA, 20 nt, Artificial Sequence
  Synthetic
uuuaggaaaauaccuauggg

SEQ ID NO: 61096 - RNA, 21 nt, Artificial Sequence
  Synthetic
cuuuaggaaaauaccuauggg

SEQ ID NO: 61097 - RNA, 22 nt, Artificial Sequence
  Synthetic
gcuuuaggaaaauaccuauggg

SEQ ID NO: 61098 - RNA, 23 nt, Artificial Sequence
  Synthetic
ggcuuuaggaaaauaccuauggg

SEQ ID NO: 61099 - RNA, 24 nt, Artificial Sequence
  Synthetic
gggcuuuaggaaaauaccuauggg

SEQ ID NO: 61100 - RNA, 18 nt, Artificial Sequence
  Synthetic
  misc_feature (11)..(11): n is a, c, g, or u
guguauuuaangacuggg

SEQ ID NO: 61101 - RNA, 19 nt, Artificial Sequence
  Synthetic
  misc_feature (12)..(12): n is a, c, g, or u
uguguauuuaangacuggg

SEQ ID NO: 61102 - RNA, 20 nt, Artificial Sequence
  Synthetic
  misc_feature (13)..(13): n is a, c, g, or u
cuguguauuuaangacuggg

SEQ ID NO: 61103 - RNA, 21 nt, Artificial Sequence
  Synthetic
  misc_feature (14)..(14): n is a, c, g, or u
acuguguauuuaangacuggg

SEQ ID NO: 61104 - RNA, 22 nt, Artificial Sequence
  Synthetic
  misc_feature (15)..(15): n is a, c, g, or u
gacuguguauuuaangacuggg

SEQ ID NO: 61105 - RNA, 23 nt, Artificial Sequence
  Synthetic
  misc_feature (16)..(16): n is a, c, g, or u
agacuguguauuuaangacuggg

SEQ ID NO: 61106 - RNA, 24 nt, Artificial Sequence
  Synthetic
  misc_feature (17)..(17): n is a, c, g, or u
aagacuguguauuuaangacuggg

SEQ ID NO: 61107 - RNA, 18 nt, Artificial Sequence
  Synthetic
  misc_feature (14)..(14): n is a, c, g, or u
ggucaccauauucnuggg

SEQ ID NO: 61108 - RNA, 19 nt, Artificial Sequence
  Synthetic
  misc_feature (15)..(15): n is a, c, g, or u
gggucaccauauucnuggg

SEQ ID NO: 61109 - RNA, 20 nt, Artificial Sequence
  Synthetic
  misc_feature (16)..(16): n is a, c, g, or u
ugggucaccauauucnuggg

SEQ ID NO: 61110 - RNA, 21 nt, Artificial Sequence
  Synthetic
  misc_feature (17)..(17): n is a, c, g, or u
gugggucaccauauucnuggg

SEQ ID NO: 61111 - RNA, 22 nt, Artificial Sequence
  Synthetic
  misc_feature (18)..(18): n is a, c, g, or u
ugugggucaccauauucnuggg

SEQ ID NO: 61112 - RNA, 23 nt, Artificial Sequence
  Synthetic
  misc_feature (19)..(19): n is a, c, g, or u
uugugggucaccauauucnuggg

SEQ ID NO: 61113 - RNA, 24 nt, Artificial Sequence
  Synthetic
  misc_feature (20)..(20): n is a, c, g, or u
uuugugggucaccauauucnuggg

SEQ ID NO: 61114 - RNA, 18 nt, Artificial Sequence
  Synthetic
  misc_feature (1)..(1): n is a, c, g, or u
  misc_feature (14)..(14): n is a, c, g, or u
ngacugggaggagnuggg

SEQ ID NO: 61115 - RNA, 19 nt, Artificial Sequence
  Synthetic
  misc_feature (2)..(2): n is a, c, g, or u
  misc_feature (15)..(15): n is a, c, g, or u
angacugggaggagnuggg

SEQ ID NO: 61116 - RNA, 20 nt, Artificial Sequence
  Synthetic
  misc_feature (3)..(3): n is a, c, g, or u
  misc_feature (16)..(16): n is a, c, g, or u
aangacugggaggagnuggg

SEQ ID NO: 61117 - RNA, 21 nt, Artificial Sequence
  Synthetic
  misc_feature (4)..(4): n is a, c, g, or u
  misc_feature (17)..(17): n is a, c, g, or u
uaangacugggaggagnuggg

SEQ ID NO: 61118 - RNA, 22 nt, Artificial Sequence
  Synthetic
  misc_feature (5)..(5): n is a, c, g, or u
  misc_feature (18)..(18): n is a, c, g, or u
uuaangacugggaggagnuggg

SEQ ID NO: 61119 - RNA, 23 nt, Artificial Sequence
  Synthetic
  misc_feature (6)..(6): n is a, c, g, or u
  misc_feature (19)..(19): n is a, c, g, or u
uuuaangacugggaggagnuggg

SEQ ID NO: 61120 - RNA, 24 nt, Artificial Sequence
  Synthetic
  misc_feature (7)..(7): n is a, c, g, or u
  misc_feature (20)..(20): n is a, c, g, or u
auuuaangacugggaggagnuggg

SEQ ID NO: 61121 - RNA, 18 nt, Artificial Sequence
  Synthetic
  misc_feature (14)..(14): n is a, c, g, or u
acacgguggccugnuggg

SEQ ID NO: 61122 - RNA, 19 nt, Artificial Sequence
  Synthetic
  misc_feature (15)..(15): n is a, c, g, or u
cacacgguggccugnuggg

SEQ ID NO: 61123 - RNA, 20 nt, Artificial Sequence
  Synthetic
  misc_feature (16)..(16): n is a, c, g, or u
ccacacgguggccugnuggg

SEQ ID NO: 61124 - RNA, 21 nt, Artificial Sequence
  Synthetic
  misc_feature (17)..(17): n is a, c, g, or u
cccacacgguggccugnuggg

SEQ ID NO: 61125 - RNA, 22 nt, Artificial Sequence
  Synthetic
  misc_feature (18)..(18): n is a, c, g, or u
ccccacacgguggccugnuggg

SEQ ID NO: 61126 - RNA, 23 nt, Artificial Sequence
  Synthetic
  misc_feature (19)..(19): n is a, c, g, or u
cccccacacgguggccugnuggg

SEQ ID NO: 61127 - RNA, 24 nt, Artificial Sequence
  Synthetic
  misc_feature (20)..(20): n is a, c, g, or u
acccccacacgguggccugnuggg

SEQ ID NO: 61128 - RNA, 18 nt, Artificial Sequence
  Synthetic
  misc_feature (5)..(6): n is a, c, g, or u
cgacnngaaggggcaugg

SEQ ID NO: 61129 - RNA, 19 nt, Artificial Sequence
  Synthetic
  misc_feature (6)..(7): n is a, c, g, or u
acgacnngaaggggcaugg

SEQ ID NO: 61130 - RNA, 20 nt, Artificial Sequence
  Synthetic
  misc_feature (7)..(8): n is a, c, g, or u
aacgacnngaaggggcaugg

SEQ ID NO: 61131 - RNA, 21 nt, Artificial Sequence
  Synthetic
  misc_feature (8)..(9): n is a, c, g, or u
caacgacnngaaggggcaugg

SEQ ID NO: 61132 - RNA, 22 nt, Artificial Sequence
  Synthetic
  misc_feature (9)..(10): n is a, c, g, or u
ucaacgacnngaaggggcaugg

SEQ ID NO: 61133 - RNA, 23 nt, Artificial Sequence
  Synthetic
  misc_feature (1)..(1): n is a, c, g, or u
  misc_feature (10)..(11): n is a, c, g, or u
nucaacgacnngaaggggcaugg

SEQ ID NO: 61134 - RNA, 24 nt, Artificial Sequence
  Synthetic
  misc_feature (2)..(2): n is a, c, g, or u
  misc_feature (11)..(12): n is a, c, g, or u
unucaacgacnngaaggggcaugg

SEQ ID NO: 61135 - RNA, 18 nt, Artificial Sequence
  Synthetic
ugacgcaacccccacugg

SEQ ID NO: 61136 - RNA, 19 nt, Artificial Sequence
  Synthetic
cugacgcaacccccacugg

SEQ ID NO: 61137 - RNA, 20 nt, Artificial Sequence
  Synthetic
gcugacgcaacccccacugg

SEQ ID NO: 61138 - RNA, 21 nt, Artificial Sequence
  Synthetic
ugcugacgcaacccccacugg

SEQ ID NO: 61139 - RNA, 22 nt, Artificial Sequence
  Synthetic
uugcugacgcaacccccacugg

SEQ ID NO: 61140 - RNA, 23 nt, Artificial Sequence
  Synthetic
uuugcugacgcaacccccacugg

SEQ ID NO: 61141 - RNA, 24 nt, Artificial Sequence
  Synthetic
guuugcugacgcaacccccacugg

SEQ ID NO: 61142 - RNA, 18 nt, Artificial Sequence
  Synthetic
  misc_feature (12)..(12): n is a, c, g, or u
uguguauuuaangacugg

SEQ ID NO: 61143 - RNA, 19 nt, Artificial Sequence
  Synthetic
  misc_feature (13)..(13): n is a, c, g, or u
cuguguauuuaangacugg

SEQ ID NO: 61144 - RNA, 20 nt, Artificial Sequence
  Synthetic
  misc_feature (14)..(14): n is a, c, g, or u
acuguguauuuaangacugg

SEQ ID NO: 61145 - RNA, 21 nt, Artificial Sequence
  Synthetic
  misc_feature (15)..(15): n is a, c, g, or u
gacuguguauuuaangacugg

SEQ ID NO: 61146 - RNA, 22 nt, Artificial Sequence
  Synthetic
  misc_feature (16)..(16): n is a, c, g, or u
agacuguguauuuaangacugg

SEQ ID NO: 61147 - RNA, 23 nt, Artificial Sequence
  Synthetic
  misc_feature (17)..(17): n is a, c, g, or u
aagacuguguauuuaangacugg

SEQ ID NO: 61148 - RNA, 24 nt, Artificial Sequence
  Synthetic
  misc_feature (18)..(18): n is a, c, g, or u
aaagacuguguauuuaangacugg

SEQ ID NO: 61149 - RNA, 18 nt, Artificial Sequence
  Synthetic
  misc_feature (4)..(4): n is a, c, g, or u
  misc_feature (12)..(12): n is a, c, g, or u
gganggucaaunaccugg

SEQ ID NO: 61150 - RNA, 19 nt, Artificial Sequence
  Synthetic
  misc_feature (5)..(5): n is a, c, g, or u
  misc_feature (13)..(13): n is a, c, g, or u
agganggucaaunaccugg

SEQ ID NO: 61151 - RNA, 20 nt, Artificial Sequence
  Synthetic
  misc_feature (6)..(6): n is a, c, g, or u
  misc_feature (14)..(14): n is a, c, g, or u
cagganggucaaunaccugg

SEQ ID NO: 61152 - RNA, 21 nt, Artificial Sequence
  Synthetic
  misc_feature (7)..(7): n is a, c, g, or u
  misc_feature (15)..(15): n is a, c, g, or u
ucagganggucaaunaccugg

SEQ ID NO: 61153 - RNA, 22 nt, Artificial Sequence
  Synthetic
  misc_feature (8)..(8): n is a, c, g, or u
  misc_feature (16)..(16): n is a, c, g, or u
uucagganggucaaunaccugg

SEQ ID NO: 61154 - RNA, 23 nt, Artificial Sequence
  Synthetic
  misc_feature (9)..(9): n is a, c, g, or u
  misc_feature (17)..(17): n is a, c, g, or u
uuucagganggucaaunaccugg

SEQ ID NO: 61155 - RNA, 24 nt, Artificial Sequence
  Synthetic
  misc_feature (10)..(10): n is a, c, g, or u
  misc_feature (18)..(18): n is a, c, g, or u
cuuucagganggucaaunaccugg

SEQ ID NO: 61156 - RNA, 18 nt, Artificial Sequence
  Synthetic
  misc_feature (2)..(3): n is a, c, g, or u
annacccggguguccugg

SEQ ID NO: 61157 - RNA, 19 nt, Artificial Sequence
  Synthetic
  misc_feature (3)..(4): n is a, c, g, or u
gannacccggguguccugg

SEQ ID NO: 61158 - RNA, 20 nt, Artificial Sequence
  Synthetic
  misc_feature (4)..(5): n is a, c, g, or u
ggannacccggguguccugg

SEQ ID NO: 61159 - RNA, 21 nt, Artificial Sequence
  Synthetic
  misc_feature (5)..(6): n is a, c, g, or u
gggannacccggguguccugg

SEQ ID NO: 61160 - RNA, 22 nt, Artificial Sequence
  Synthetic
  misc_feature (6)..(7): n is a, c, g, or u
ggggannacccggguguccugg

SEQ ID NO: 61161 - RNA, 23 nt, Artificial Sequence
  Synthetic
  misc_feature (7)..(8): n is a, c, g, or u
gggggannacccggguguccugg

SEQ ID NO: 61162 - RNA, 24 nt, Artificial Sequence
  Synthetic
  misc_feature (8)..(9): n is a, c, g, or u
agggggannacccggguguccugg

SEQ ID NO: 61163 - RNA, 18 nt, Artificial Sequence
  Synthetic
augacuuuggcuuccugg

SEQ ID NO: 61164 - RNA, 19 nt, Artificial Sequence
  Synthetic
aaugacuuuggcuuccugg

SEQ ID NO: 61165 - RNA, 20 nt, Artificial Sequence
  Synthetic
uaaugacuuuggcuuccugg

SEQ ID NO: 61166 - RNA, 21 nt, Artificial Sequence
  Synthetic
uuaaugacuuuggcuuccugg

SEQ ID NO: 61167 - RNA, 22 nt, Artificial Sequence
  Synthetic
  misc_feature (1)..(1): n is a, c, g, or u
nuuaaugacuuuggcuuccugg

SEQ ID NO: 61168 - RNA, 23 nt, Artificial Sequence
  Synthetic
  misc_feature (2)..(2): n is a, c, g, or u
anuuaaugacuuuggcuuccugg

SEQ ID NO: 61169 - RNA, 24 nt, Artificial Sequence
  Synthetic
  misc_feature (3)..(3): n is a, c, g, or u
ganuuaaugacuuuggcuuccugg

SEQ ID NO: 61170 - RNA, 18 nt, Artificial Sequence
  Synthetic
cgcucgcagccggucugg

SEQ ID NO: 61171 - RNA, 19 nt, Artificial Sequence
  Synthetic
ucgcucgcagccggucugg

SEQ ID NO: 61172 - RNA, 20 nt, Artificial Sequence
  Synthetic
uucgcucgcagccggucugg

SEQ ID NO: 61173 - RNA, 21 nt, Artificial Sequence
  Synthetic
uuucgcucgcagccggucugg

SEQ ID NO: 61174 - RNA, 22 nt, Artificial Sequence
  Synthetic
guuucgcucgcagccggucugg

SEQ ID NO: 61175 - RNA, 23 nt, Artificial Sequence
  Synthetic
uguuucgcucgcagccggucugg

SEQ ID NO: 61176 - RNA, 24 nt, Artificial Sequence
  Synthetic
uuguuucgcucgcagccggucugg

SEQ ID NO: 61177 - RNA, 18 nt, Artificial Sequence
  Synthetic
  misc_feature (2)..(2): n is a, c, g, or u
  misc_feature (15)..(15): n is a, c, g, or u
angacugggaggagnugg

SEQ ID NO: 61178 - RNA, 19 nt, Artificial Sequence
  Synthetic
  misc_feature (3)..(3): n is a, c, g, or u
  misc_feature (16)..(16): n is a, c, g, or u
aangacugggaggagnugg

SEQ ID NO: 61179 - RNA, 20 nt, Artificial Sequence
  Synthetic
  misc_feature (4)..(4): n is a, c, g, or u
  misc_feature (17)..(17): n is a, c, g, or u
uaangacugggaggagnugg

SEQ ID NO: 61180 - RNA, 21 nt, Artificial Sequence
  Synthetic
  misc_feature (5)..(5): n is a, c, g, or u
  misc_feature (18)..(18): n is a, c, g, or u
uuaangacugggaggagnugg

SEQ ID NO: 61181 - RNA, 22 nt, Artificial Sequence
  Synthetic
  misc_feature (6)..(6): n is a, c, g, or u
  misc_feature (19)..(19): n is a, c, g, or u
uuuaangacugggaggagnugg

SEQ ID NO: 61182 - RNA, 23 nt, Artificial Sequence
  Synthetic
  misc_feature (7)..(7): n is a, c, g, or u
  misc_feature (20)..(20): n is a, c, g, or u
auuuaangacugggaggagnugg

SEQ ID NO: 61183 - RNA, 24 nt, Artificial Sequence
  Synthetic
  misc_feature (8)..(8): n is a, c, g, or u
  misc_feature (21)..(21): n is a, c, g, or u
uauuuaangacugggaggagnugg

SEQ ID NO: 61184 - RNA, 18 nt, Artificial Sequence
  Synthetic
  misc_feature (15)..(15): n is a, c, g, or u
cacacgguggccugnugg

SEQ ID NO: 61185 - RNA, 19 nt, Artificial Sequence
  Synthetic
  misc_feature (16)..(16): n is a, c, g, or u
ccacacgguggccugnugg

SEQ ID NO: 61186 - RNA, 20 nt, Artificial Sequence
  Synthetic
  misc_feature (17)..(17): n is a, c, g, or u
cccacacgguggccugnugg

SEQ ID NO: 61187 - RNA, 21 nt, Artificial Sequence
  Synthetic
  misc_feature (18)..(18): n is a, c, g, or u
ccccacacgguggccugnugg

SEQ ID NO: 61188 - RNA, 22 nt, Artificial Sequence
  Synthetic
  misc_feature (19)..(19): n is a, c, g, or u
cccccacacgguggccugnugg

SEQ ID NO: 61189 - RNA, 23 nt, Artificial Sequence
  Synthetic
  misc_feature (20)..(20): n is a, c, g, or u
acccccacacgguggccugnugg

SEQ ID NO: 61190 - RNA, 24 nt, Artificial Sequence
  Synthetic
  misc_feature (21)..(21): n is a, c, g, or u
cacccccacacgguggccugnugg

SEQ ID NO: 61191 - RNA, 18 nt, Artificial Sequence
  Synthetic
  misc_feature (9)..(9): n is a, c, g, or u
  misc_feature (15)..(15): n is a, c, g, or u
caagcuaunuugugnugg

SEQ ID NO: 61192 - RNA, 19 nt, Artificial Sequence
  Synthetic
  misc_feature (10)..(10): n is a, c, g, or u
  misc_feature (16)..(16): n is a, c, g, or u
gcaagcuaunuugugnugg

SEQ ID NO: 61193 - RNA, 20 nt, Artificial Sequence
  Synthetic
  misc_feature (11)..(11): n is a, c, g, or u
  misc_feature (17)..(17): n is a, c, g, or u
ggcaagcuaunuugugnugg

SEQ ID NO: 61194 - RNA, 21 nt, Artificial Sequence
  Synthetic
  misc_feature (12)..(12): n is a, c, g, or u
  misc_feature (18)..(18): n is a, c, g, or u
aggcaagcuaunuugugnugg

SEQ ID NO: 61195 - RNA, 22 nt, Artificial Sequence
  Synthetic
  misc_feature (13)..(13): n is a, c, g, or u
  misc_feature (19)..(19): n is a, c, g, or u
caggcaagcuaunuugugnugg

SEQ ID NO: 61196 - RNA, 23 nt, Artificial Sequence
  Synthetic
  misc_feature (14)..(14): n is a, c, g, or u
  misc_feature (20)..(20): n is a, c, g, or u
ucaggcaagcuaunuugugnugg

SEQ ID NO: 61197 - RNA, 24 nt, Artificial Sequence
  Synthetic
  misc_feature (15)..(15): n is a, c, g, or u
  misc_feature (21)..(21): n is a, c, g, or u
cucaggcaagcuaunuugugnugg

SEQ ID NO: 61198 - RNA, 18 nt, Artificial Sequence
  Synthetic
uuccugccuuacuuuugg

SEQ ID NO: 61199 - RNA, 19 nt, Artificial Sequence
  Synthetic
uuuccugccuuacuuuugg

SEQ ID NO: 61200 - RNA, 20 nt, Artificial Sequence
  Synthetic
auuuccugccuuacuuuugg

SEQ ID NO: 61201 - RNA, 21 nt, Artificial Sequence
  Synthetic
cauuuccugccuuacuuuugg

SEQ ID NO: 61202 - RNA, 22 nt, Artificial Sequence
  Synthetic
acauuuccugccuuacuuuugg

SEQ ID NO: 61203 - RNA, 23 nt, Artificial Sequence
  Synthetic
cacauuuccugccuuacuuuugg

SEQ ID NO: 61204 - RNA, 24 nt, Artificial Sequence
  Synthetic
ucacauuuccugccuuacuuuugg

SEQ ID NO: 61205 - RNA, 18 nt, Artificial Sequence
  Synthetic
  misc_feature (17)..(17): n is a, c, g, or u
aagacuguguauuuaang

SEQ ID NO: 61206 - RNA, 19 nt, Artificial Sequence
  Synthetic
  misc_feature (18)..(18): n is a, c, g, or u
aaagacuguguauuuaang

SEQ ID NO: 61207 - RNA, 20 nt, Artificial Sequence
  Synthetic
  misc_feature (19)..(19): n is a, c, g, or u
caaagacuguguauuuaang

SEQ ID NO: 61208 - RNA, 21 nt, Artificial Sequence
  Synthetic
  misc_feature (20)..(20): n is a, c, g, or u
ucaaagacuguguauuuaang

SEQ ID NO: 61209 - RNA, 22 nt, Artificial Sequence
  Synthetic
  misc_feature (21)..(21): n is a, c, g, or u
aucaaagacuguguauuuaang

SEQ ID NO: 61210 - RNA, 23 nt, Artificial Sequence
  Synthetic
  misc_feature (22)..(22): n is a, c, g, or u
caucaaagacuguguauuuaang

SEQ ID NO: 61211 - RNA, 24 nt, Artificial Sequence
  Synthetic
  misc_feature (23)..(23): n is a, c, g, or u
acaucaaagacuguguauuuaang

SEQ ID NO: 61212 - RNA, 18 nt, Artificial Sequence
  Synthetic
  misc_feature (2)..(2): n is a, c, g, or u
  misc_feature (8)..(8): n is a, c, g, or u
  misc_feature (11)..(11): n is a, c, g, or u
  misc_feature (17)..(17): n is a, c, g, or u
anuugganganccugcng

SEQ ID NO: 61213 - RNA, 19 nt, Artificial Sequence
  Synthetic
  misc_feature (3)..(3): n is a, c, g, or u
  misc_feature (9)..(9): n is a, c, g, or u
  misc_feature (12)..(12): n is a, c, g, or u
  misc_feature (18)..(18): n is a, c, g, or u
aanuugganganccugcng

SEQ ID NO: 61214 - RNA, 20 nt, Artificial Sequence
  Synthetic
  misc_feature (4)..(4): n is a, c, g, or u
  misc_feature (10)..(10): n is a, c, g, or u
  misc_feature (13)..(13): n is a, c, g, or u
  misc_feature (19)..(19): n is a, c, g, or u
uaanuugganganccugcng

SEQ ID NO: 61215 - RNA, 21 nt, Artificial Sequence
  Synthetic
  misc_feature (5)..(5): n is a, c, g, or u
  misc_feature (11)..(11): n is a, c, g, or u
  misc_feature (14)..(14): n is a, c, g, or u
  misc_feature (20)..(20): n is a, c, g, or u
auaanuugganganccugcng

SEQ ID NO: 61216 - RNA, 22 nt, Artificial Sequence
  Synthetic
  misc_feature (6)..(6): n is a, c, g, or u
  misc_feature (12)..(12): n is a, c, g, or u
  misc_feature (15)..(15): n is a, c, g, or u
  misc_feature (21)..(21): n is a, c, g, or u
aauaanuugganganccugcng

SEQ ID NO: 61217 - RNA, 23 nt, Artificial Sequence
  Synthetic
  misc_feature (7)..(7): n is a, c, g, or u
  misc_feature (13)..(13): n is a, c, g, or u
  misc_feature (16)..(16): n is a, c, g, or u
  misc_feature (22)..(22): n is a, c, g, or u
caauaanuugganganccugcng

SEQ ID NO: 61218 - RNA, 24 nt, Artificial Sequence
  Synthetic
  misc_feature (8)..(8): n is a, c, g, or u
  misc_feature (14)..(14): n is a, c, g, or u
  misc_feature (17)..(17): n is a, c, g, or u
  misc_feature (23)..(23): n is a, c, g, or u
gcaauaanuugganganccugcng

SEQ ID NO: 61219 - RNA, 18 nt, Artificial Sequence
  Synthetic
  misc_feature (5)..(5): n is a, c, g, or u
  misc_feature (17)..(17): n is a, c, g, or u
cuganuucuucccgucng

SEQ ID NO: 61220 - RNA, 19 nt, Artificial Sequence
  Synthetic
  misc_feature (6)..(6): n is a, c, g, or u
  misc_feature (18)..(18): n is a, c, g, or u
ucuganuucuucccgucng

SEQ ID NO: 61221 - RNA, 20 nt, Artificial Sequence
  Synthetic
  misc_feature (7)..(7): n is a, c, g, or u
  misc_feature (19)..(19): n is a, c, g, or u
uucuganuucuucccgucng

SEQ ID NO: 61222 - RNA, 21 nt, Artificial Sequence
  Synthetic
  misc_feature (8)..(8): n is a, c, g, or u
  misc_feature (20)..(20): n is a, c, g, or u
cuucuganuucuucccgucng

SEQ ID NO: 61223 - RNA, 22 nt, Artificial Sequence
  Synthetic
  misc_feature (9)..(9): n is a, c, g, or u
  misc_feature (21)..(21): n is a, c, g, or u
ccuucuganuucuucccgucng

SEQ ID NO: 61224 - RNA, 23 nt, Artificial Sequence
  Synthetic
  misc_feature (10)..(10): n is a, c, g, or u
  misc_feature (22)..(22): n is a, c, g, or u
gccuucuganuucuucccgucng

SEQ ID NO: 61225 - RNA, 24 nt, Artificial Sequence
  Synthetic
  misc_feature (11)..(11): n is a, c, g, or u
  misc_feature (23)..(23): n is a, c, g, or u
ugccuucuganuucuucccgucng

SEQ ID NO: 61226 - RNA, 18 nt, Artificial Sequence
  Synthetic
  misc_feature (7)..(7): n is a, c, g, or u
  misc_feature (16)..(17): n is a, c, g, or u
accucunucaacgacnng

SEQ ID NO: 61227 - RNA, 19 nt, Artificial Sequence
  Synthetic
  misc_feature (8)..(8): n is a, c, g, or u
  misc_feature (17)..(18): n is a, c, g, or u
caccucunucaacgacnng

SEQ ID NO: 61228 - RNA, 20 nt, Artificial Sequence
  Synthetic
  misc_feature (9)..(9): n is a, c, g, or u
  misc_feature (18)..(19): n is a, c, g, or u
gcaccucunucaacgacnng

SEQ ID NO: 61229 - RNA, 21 nt, Artificial Sequence
  Synthetic
  misc_feature (10)..(10): n is a, c, g, or u
  misc_feature (19)..(20): n is a, c, g, or u
agcaccucunucaacgacnng

SEQ ID NO: 61230 - RNA, 22 nt, Artificial Sequence
  Synthetic
  misc_feature (11)..(11): n is a, c, g, or u
  misc_feature (20)..(21): n is a, c, g, or u
gagcaccucunucaacgacnng

SEQ ID NO: 61231 - RNA, 23 nt, Artificial Sequence
  Synthetic
  misc_feature (12)..(12): n is a, c, g, or u
  misc_feature (21)..(22): n is a, c, g, or u
ggagcaccucunucaacgacnng

SEQ ID NO: 61232 - RNA, 24 nt, Artificial Sequence
  Synthetic
  misc_feature (13)..(13): n is a, c, g, or u
  misc_feature (22)..(23): n is a, c, g, or u
gggagcaccucunucaacgacnng

SEQ ID NO: 61233 - RNA, 18 nt, Artificial Sequence
  Synthetic
  misc_feature (17)..(17): n is a, c, g, or u
acgaggcagguccccung

SEQ ID NO: 61234 - RNA, 19 nt, Artificial Sequence
  Synthetic
  misc_feature (18)..(18): n is a, c, g, or u
gacgaggcagguccccung

SEQ ID NO: 61235 - RNA, 20 nt, Artificial Sequence
  Synthetic
  misc_feature (19)..(19): n is a, c, g, or u
cgacgaggcagguccccung

SEQ ID NO: 61236 - RNA, 21 nt, Artificial Sequence
  Synthetic
  misc_feature (20)..(20): n is a, c, g, or u
acgacgaggcagguccccung

SEQ ID NO: 61237 - RNA, 22 nt, Artificial Sequence
  Synthetic
  misc_feature (21)..(21): n is a, c, g, or u
gacgacgaggcagguccccung

SEQ ID NO: 61238 - RNA, 23 nt, Artificial Sequence
  Synthetic
  misc_feature (22)..(22): n is a, c, g, or u
agacgacgaggcagguccccung

SEQ ID NO: 61239 - RNA, 24 nt, Artificial Sequence
  Synthetic
  misc_feature (23)..(23): n is a, c, g, or u
uagacgacgaggcagguccccung

SEQ ID NO: 61240 - RNA, 18 nt, Artificial Sequence
  Synthetic
  misc_feature (8)..(8): n is a, c, g, or u
aaggacanuuggccaaug

SEQ ID NO: 61241 - RNA, 19 nt, Artificial Sequence
  Synthetic
  misc_feature (9)..(9): n is a, c, g, or u
caaggacanuuggccaaug

SEQ ID NO: 61242 - RNA, 20 nt, Artificial Sequence
  Synthetic
  misc_feature (10)..(10): n is a, c, g, or u
acaaggacanuuggccaaug

SEQ ID NO: 61243 - RNA, 21 nt, Artificial Sequence
  Synthetic
  misc_feature (11)..(11): n is a, c, g, or u
aacaaggacanuuggccaaug

SEQ ID NO: 61244 - RNA, 22 nt, Artificial Sequence
  Synthetic
  misc_feature (12)..(12): n is a, c, g, or u
aaacaaggacanuuggccaaug

SEQ ID NO: 61245 - RNA, 23 nt, Artificial Sequence
  Synthetic
  misc_feature (1)..(1): n is a, c, g, or u
  misc_feature (13)..(13): n is a, c, g, or u
naaacaaggacanuuggccaaug

SEQ ID NO: 61246 - RNA, 24 nt, Artificial Sequence
  Synthetic
  misc_feature (2)..(2): n is a, c, g, or u
  misc_feature (14)..(14): n is a, c, g, or u
anaaacaaggacanuuggccaaug

SEQ ID NO: 61247 - RNA, 18 nt, Artificial Sequence
  Synthetic
  misc_feature (11)..(11): n is a, c, g, or u
ggcccugcuangaacaug

SEQ ID NO: 61248 - RNA, 19 nt, Artificial Sequence
  Synthetic
  misc_feature (12)..(12): n is a, c, g, or u
gggcccugcuangaacaug

SEQ ID NO: 61249 - RNA, 20 nt, Artificial Sequence
  Synthetic
  misc_feature (13)..(13): n is a, c, g, or u
ggggcccugcuangaacaug

SEQ ID NO: 61250 - RNA, 21 nt, Artificial Sequence
  Synthetic
  misc_feature (14)..(14): n is a, c, g, or u
gggggcccugcuangaacaug

SEQ ID NO: 61251 - RNA, 22 nt, Artificial Sequence
  Synthetic
  misc_feature (15)..(15): n is a, c, g, or u
ugggggcccugcuangaacaug

SEQ ID NO: 61252 - RNA, 23 nt, Artificial Sequence
  Synthetic
  misc_feature (16)..(16): n is a, c, g, or u
cugggggcccugcuangaacaug

SEQ ID NO: 61253 - RNA, 24 nt, Artificial Sequence
  Synthetic
  misc_feature (17)..(17): n is a, c, g, or u
acugggggcccugcuangaacaug

SEQ ID NO: 61254 - RNA, 18 nt, Artificial Sequence
  Synthetic
caccagcacgggaccaug

SEQ ID NO: 61255 - RNA, 19 nt, Artificial Sequence
  Synthetic
ccaccagcacgggaccaug

SEQ ID NO: 61256 - RNA, 20 nt, Artificial Sequence
  Synthetic
accaccagcacgggaccaug

SEQ ID NO: 61257 - RNA, 21 nt, Artificial Sequence
  Synthetic
gaccaccagcacgggaccaug

SEQ ID NO: 61258 - RNA, 22 nt, Artificial Sequence
  Synthetic
cgaccaccagcacgggaccaug

SEQ ID NO: 61259 - RNA, 23 nt, Artificial Sequence
  Synthetic
acgaccaccagcacgggaccaug

SEQ ID NO: 61260 - RNA, 24 nt, Artificial Sequence
  Synthetic
  misc_feature (1)..(1): n is a, c, g, or u
nacgaccaccagcacgggaccaug

SEQ ID NO: 61261 - RNA, 18 nt, Artificial Sequence
  Synthetic
auuggccaucagcgcaug

SEQ ID NO: 61262 - RNA, 19 nt, Artificial Sequence
  Synthetic
cauuggccaucagcgcaug

SEQ ID NO: 61263 - RNA, 20 nt, Artificial Sequence
  Synthetic
ccauuggccaucagcgcaug

SEQ ID NO: 61264 - RNA, 21 nt, Artificial Sequence
  Synthetic
gccauuggccaucagcgcaug

SEQ ID NO: 61265 - RNA, 22 nt, Artificial Sequence
  Synthetic
ggccauuggccaucagcgcaug

SEQ ID NO: 61266 - RNA, 23 nt, Artificial Sequence
  Synthetic
uggccauuggccaucagcgcaug

SEQ ID NO: 61267 - RNA, 24 nt, Artificial Sequence
  Synthetic
uuggccauuggccaucagcgcaug

SEQ ID NO: 61268 - RNA, 18 nt, Artificial Sequence
  Synthetic
cugacgcaacccccacug

SEQ ID NO: 61269 - RNA, 19 nt, Artificial Sequence
  Synthetic
gcugacgcaacccccacug

SEQ ID NO: 61270 - RNA, 20 nt, Artificial Sequence
  Synthetic
ugcugacgcaacccccacug

SEQ ID NO: 61271 - RNA, 18 nt, Artificial Sequence
  Synthetic
uagggcuuucccccacug

SEQ ID NO: 61272 - RNA, 19 nt, Artificial Sequence
  Synthetic
guagggcuuucccccacug

SEQ ID NO: 61273 - RNA, 20 nt, Artificial Sequence
  Synthetic
cguagggcuuucccccacug

SEQ ID NO: 61274 - RNA, 21 nt, Artificial Sequence
  Synthetic
gcguagggcuuucccccacug

SEQ ID NO: 61275 - RNA, 22 nt, Artificial Sequence
  Synthetic
ugcguagggcuuucccccacug

SEQ ID NO: 61276 - RNA, 23 nt, Artificial Sequence
  Synthetic
gugcguagggcuuucccccacug

SEQ ID NO: 61277 - RNA, 24 nt, Artificial Sequence
  Synthetic
ggugcguagggcuuucccccacug

SEQ ID NO: 61278 - RNA, 18 nt, Artificial Sequence
  Synthetic
  misc_feature (13)..(13): n is a, c, g, or u
cuguguauuuaangacug

SEQ ID NO: 61279 - RNA, 19 nt, Artificial Sequence
  Synthetic
  misc_feature (14)..(14): n is a, c, g, or u
acuguguauuuaangacug

SEQ ID NO: 61280 - RNA, 20 nt, Artificial Sequence
  Synthetic
  misc_feature (15)..(15): n is a, c, g, or u
gacuguguauuuaangacug

SEQ ID NO: 61281 - RNA, 21 nt, Artificial Sequence
  Synthetic
  misc_feature (16)..(16): n is a, c, g, or u
agacuguguauuuaangacug

SEQ ID NO: 61282 - RNA, 22 nt, Artificial Sequence
  Synthetic
  misc_feature (17)..(17): n is a, c, g, or u
aagacuguguauuuaangacug

SEQ ID NO: 61283 - RNA, 23 nt, Artificial Sequence
  Synthetic
  misc_feature (18)..(18): n is a, c, g, or u
aaagacuguguauuuaangacug

SEQ ID NO: 61284 - RNA, 24 nt, Artificial Sequence
  Synthetic
  misc_feature (19)..(19): n is a, c, g, or u
caaagacuguguauuuaangacug

SEQ ID NO: 61285 - RNA, 18 nt, Artificial Sequence
  Synthetic
  misc_feature (14)..(14): n is a, c, g, or u
uuuguucauguccnacug

SEQ ID NO: 61286 - RNA, 19 nt, Artificial Sequence
  Synthetic
  misc_feature (15)..(15): n is a, c, g, or u
uuuuguucauguccnacug

SEQ ID NO: 61287 - RNA, 20 nt, Artificial Sequence
  Synthetic
  misc_feature (16)..(16): n is a, c, g, or u
cuuuuguucauguccnacug

SEQ ID NO: 61288 - RNA, 21 nt, Artificial Sequence
  Synthetic
  misc_feature (17)..(17): n is a, c, g, or u
ucuuuuguucauguccnacug

SEQ ID NO: 61289 - RNA, 22 nt, Artificial Sequence
  Synthetic
  misc_feature (18)..(18): n is a, c, g, or u
aucuuuuguucauguccnacug

SEQ ID NO: 61290 - RNA, 23 nt, Artificial Sequence
  Synthetic
  misc_feature (19)..(19): n is a, c, g, or u
caucuuuuguucauguccnacug

SEQ ID NO: 61291 - RNA, 24 nt, Artificial Sequence
  Synthetic
  misc_feature (20)..(20): n is a, c, g, or u
ucaucuuuuguucauguccnacug

SEQ ID NO: 61292 - RNA, 18 nt, Artificial Sequence
  Synthetic
  misc_feature (6)..(6): n is a, c, g, or u
  misc_feature (14)..(14): n is a, c, g, or u
uguaunccuguaunacug

SEQ ID NO: 61293 - RNA, 19 nt, Artificial Sequence
  Synthetic
  misc_feature (7)..(7): n is a, c, g, or u
  misc_feature (15)..(15): n is a, c, g, or u
cuguaunccuguaunacug

SEQ ID NO: 61294 - RNA, 20 nt, Artificial Sequence
  Synthetic
  misc_feature (8)..(8): n is a, c, g, or u
  misc_feature (16)..(16): n is a, c, g, or u
ucuguaunccuguaunacug

SEQ ID NO: 61295 - RNA, 21 nt, Artificial Sequence
  Synthetic
  misc_feature (9)..(9): n is a, c, g, or u
  misc_feature (17)..(17): n is a, c, g, or u
cucuguaunccuguaunacug

SEQ ID NO: 61296 - RNA, 22 nt, Artificial Sequence
  Synthetic
  misc_feature (10)..(10): n is a, c, g, or u
  misc_feature (18)..(18): n is a, c, g, or u
ccucuguaunccuguaunacug

SEQ ID NO: 61297 - RNA, 23 nt, Artificial Sequence
  Synthetic
  misc_feature (11)..(11): n is a, c, g, or u
  misc_feature (19)..(19): n is a, c, g, or u
gccucuguaunccuguaunacug

SEQ ID NO: 61298 - RNA, 24 nt, Artificial Sequence
  Synthetic
  misc_feature (12)..(12): n is a, c, g, or u
  misc_feature (20)..(20): n is a, c, g, or u
ugccucuguaunccuguaunacug

SEQ ID NO: 61299 - RNA, 18 nt, Artificial Sequence
  Synthetic
  misc_feature (2)..(2): n is a, c, g, or u
  misc_feature (7)..(7): n is a, c, g, or u
  misc_feature (14)..(14): n is a, c, g, or u
uncuuunaauccunacug

SEQ ID NO: 61300 - RNA, 19 nt, Artificial Sequence
  Synthetic
  misc_feature (3)..(3): n is a, c, g, or u
  misc_feature (8)..(8): n is a, c, g, or u
  misc_feature (15)..(15): n is a, c, g, or u
cuncuuunaauccunacug

SEQ ID NO: 61301 - RNA, 20 nt, Artificial Sequence
  Synthetic
  misc_feature (4)..(4): n is a, c, g, or u
  misc_feature (9)..(9): n is a, c, g, or u
  misc_feature (16)..(16): n is a, c, g, or u
ccuncuuunaauccunacug

SEQ ID NO: 61302 - RNA, 21 nt, Artificial Sequence
  Synthetic
  misc_feature (1)..(1): n is a, c, g, or u
  misc_feature (5)..(5): n is a, c, g, or u
  misc_feature (10)..(10): n is a, c, g, or u
  misc_feature (17)..(17): n is a, c, g, or u
nccuncuuunaauccunacug

SEQ ID NO: 61303 - RNA, 22 nt, Artificial Sequence
  Synthetic
  misc_feature (2)..(2): n is a, c, g, or u
  misc_feature (6)..(6): n is a, c, g, or u
  misc_feature (11)..(11): n is a, c, g, or u
  misc_feature (18)..(18): n is a, c, g, or u
unccuncuuunaauccunacug

SEQ ID NO: 61304 - RNA, 23 nt, Artificial Sequence
  Synthetic
  misc_feature (3)..(3): n is a, c, g, or u
  misc_feature (7)..(7): n is a, c, g, or u
  misc_feature (12)..(12): n is a, c, g, or u
  misc_feature (19)..(19): n is a, c, g, or u
gunccuncuuunaauccunacug

SEQ ID NO: 61305 - RNA, 24 nt, Artificial Sequence
  Synthetic
  misc_feature (4)..(4): n is a, c, g, or u
  misc_feature (8)..(8): n is a, c, g, or u
  misc_feature (13)..(13): n is a, c, g, or u
  misc_feature (20)..(20): n is a, c, g, or u
ugunccuncuuunaauccunacug

SEQ ID NO: 61306 - RNA, 18 nt, Artificial Sequence
  Synthetic
cucugccgauccauacug

SEQ ID NO: 61307 - RNA, 19 nt, Artificial Sequence
  Synthetic
ccucugccgauccauacug

SEQ ID NO: 61308 - RNA, 20 nt, Artificial Sequence
  Synthetic
uccucugccgauccauacug

SEQ ID NO: 61309 - RNA, 21 nt, Artificial Sequence
  Synthetic
cuccucugccgauccauacug

SEQ ID NO: 61310 - RNA, 22 nt, Artificial Sequence
  Synthetic
gcuccucugccgauccauacug

SEQ ID NO: 61311 - RNA, 23 nt, Artificial Sequence
  Synthetic
ggcuccucugccgauccauacug

SEQ ID NO: 61312 - RNA, 24 nt, Artificial Sequence
  Synthetic
uggcuccucugccgauccauacug

SEQ ID NO: 61313 - RNA, 18 nt, Artificial Sequence
  Synthetic
gggaccaugcaaaaccug

SEQ ID NO: 61314 - RNA, 19 nt, Artificial Sequence
  Synthetic
cgggaccaugcaaaaccug

SEQ ID NO: 61315 - RNA, 20 nt, Artificial Sequence
  Synthetic
acgggaccaugcaaaaccug

SEQ ID NO: 61316 - RNA, 21 nt, Artificial Sequence
  Synthetic
cacgggaccaugcaaaaccug

SEQ ID NO: 61317 - RNA, 22 nt, Artificial Sequence
  Synthetic
gcacgggaccaugcaaaaccug

SEQ ID NO: 61318 - RNA, 23 nt, Artificial Sequence
  Synthetic
agcacgggaccaugcaaaaccug

SEQ ID NO: 61319 - RNA, 24 nt, Artificial Sequence
  Synthetic
cagcacgggaccaugcaaaaccug

SEQ ID NO: 61320 - RNA, 18 nt, Artificial Sequence
  Synthetic
cccccacacgguggccug

SEQ ID NO: 61321 - RNA, 19 nt, Artificial Sequence
  Synthetic
acccccacacgguggccug

SEQ ID NO: 61322 - RNA, 20 nt, Artificial Sequence
  Synthetic
cacccccacacgguggccug

SEQ ID NO: 61323 - RNA, 21 nt, Artificial Sequence
  Synthetic
acacccccacacgguggccug

SEQ ID NO: 61324 - RNA, 22 nt, Artificial Sequence
  Synthetic
cacacccccacacgguggccug

SEQ ID NO: 61325 - RNA, 23 nt, Artificial Sequence
  Synthetic
ucacacccccacacgguggccug

SEQ ID NO: 61326 - RNA, 24 nt, Artificial Sequence
  Synthetic
uucacacccccacacgguggccug

SEQ ID NO: 61327 - RNA, 18 nt, Artificial Sequence
  Synthetic
  misc_feature (3)..(4): n is a, c, g, or u
gannacccggguguccug

SEQ ID NO: 61328 - RNA, 19 nt, Artificial Sequence
  Synthetic
  misc_feature (4)..(5): n is a, c, g, or u
ggannacccggguguccug

SEQ ID NO: 61329 - RNA, 20 nt, Artificial Sequence
  Synthetic
  misc_feature (5)..(6): n is a, c, g, or u
gggannacccggguguccug

SEQ ID NO: 61330 - RNA, 21 nt, Artificial Sequence
  Synthetic
  misc_feature (6)..(7): n is a, c, g, or u
ggggannacccggguguccug

SEQ ID NO: 61331 - RNA, 22 nt, Artificial Sequence
  Synthetic
  misc_feature (7)..(8): n is a, c, g, or u
gggggannacccggguguccug

SEQ ID NO: 61332 - RNA, 23 nt, Artificial Sequence
  Synthetic
  misc_feature (8)..(9): n is a, c, g, or u
agggggannacccggguguccug

SEQ ID NO: 61333 - RNA, 24 nt, Artificial Sequence
  Synthetic
  misc_feature (9)..(10): n is a, c, g, or u
uagggggannacccggguguccug

SEQ ID NO: 61334 - RNA, 18 nt, Artificial Sequence
  Synthetic
aaugacuuuggcuuccug

SEQ ID NO: 61335 - RNA, 19 nt, Artificial Sequence
  Synthetic
uaaugacuuuggcuuccug

SEQ ID NO: 61336 - RNA, 20 nt, Artificial Sequence
  Synthetic
uuaaugacuuuggcuuccug

SEQ ID NO: 61337 - RNA, 21 nt, Artificial Sequence
  Synthetic
  misc_feature (1)..(1): n is a, c, g, or u
nuuaaugacuuuggcuuccug

SEQ ID NO: 61338 - RNA, 22 nt, Artificial Sequence
  Synthetic
  misc_feature (2)..(2): n is a, c, g, or u
anuuaaugacuuuggcuuccug

SEQ ID NO: 61339 - RNA, 23 nt, Artificial Sequence
  Synthetic
  misc_feature (3)..(3): n is a, c, g, or u
ganuuaaugacuuuggcuuccug

SEQ ID NO: 61340 - RNA, 24 nt, Artificial Sequence
  Synthetic
  misc_feature (4)..(4): n is a, c, g, or u
uganuuaaugacuuuggcuuccug

SEQ ID NO: 61341 - RNA, 18 nt, Artificial Sequence
  Synthetic
  misc_feature (9)..(9): n is a, c, g, or u
accuccuunccauggcug

SEQ ID NO: 61342 - RNA, 19 nt, Artificial Sequence
  Synthetic
  misc_feature (10)..(10): n is a, c, g, or u
caccuccuunccauggcug

SEQ ID NO: 61343 - RNA, 20 nt, Artificial Sequence
  Synthetic
  misc_feature (11)..(11): n is a, c, g, or u
acaccuccuunccauggcug

SEQ ID NO: 61344 - RNA, 21 nt, Artificial Sequence
  Synthetic
  misc_feature (12)..(12): n is a, c, g, or u
uacaccuccuunccauggcug

SEQ ID NO: 61345 - RNA, 22 nt, Artificial Sequence
  Synthetic
  misc_feature (13)..(13): n is a, c, g, or u
guacaccuccuunccauggcug

SEQ ID NO: 61346 - RNA, 23 nt, Artificial Sequence
  Synthetic
  misc_feature (14)..(14): n is a, c, g, or u
aguacaccuccuunccauggcug

SEQ ID NO: 61347 - RNA, 24 nt, Artificial Sequence
  Synthetic
  misc_feature (15)..(15): n is a, c, g, or u
aaguacaccuccuunccauggcug

SEQ ID NO: 61348 - RNA, 18 nt, Artificial Sequence
  Synthetic
uauugggggccaaaucug

SEQ ID NO: 61349 - RNA, 19 nt, Artificial Sequence
  Synthetic
guauugggggccaaaucug

SEQ ID NO: 61350 - RNA, 20 nt, Artificial Sequence
  Synthetic
gguauugggggccaaaucug

SEQ ID NO: 61351 - RNA, 21 nt, Artificial Sequence
  Synthetic
ugguauugggggccaaaucug

SEQ ID NO: 61352 - RNA, 22 nt, Artificial Sequence
  Synthetic
cugguauugggggccaaaucug

SEQ ID NO: 61353 - RNA, 23 nt, Artificial Sequence
  Synthetic
ucugguauugggggccaaaucug

SEQ ID NO: 61354 - RNA, 24 nt, Artificial Sequence
  Synthetic
aucugguauugggggccaaaucug

SEQ ID NO: 61355 - RNA, 18 nt, Artificial Sequence
  Synthetic
gcaaacaagguaggagug

SEQ ID NO: 61356 - RNA, 19 nt, Artificial Sequence
  Synthetic
ggcaaacaagguaggagug

SEQ ID NO: 61357 - RNA, 20 nt, Artificial Sequence
  Synthetic
uggcaaacaagguaggagug

SEQ ID NO: 61358 - RNA, 21 nt, Artificial Sequence
  Synthetic
auggcaaacaagguaggagug

SEQ ID NO: 61359 - RNA, 22 nt, Artificial Sequence
  Synthetic
aauggcaaacaagguaggagug

SEQ ID NO: 61360 - RNA, 23 nt, Artificial Sequence
  Synthetic
caauggcaaacaagguaggagug

SEQ ID NO: 61361 - RNA, 24 nt, Artificial Sequence
  Synthetic
ccaauggcaaacaagguaggagug

SEQ ID NO: 61362 - RNA, 18 nt, Artificial Sequence
  Synthetic
acagagucuagacucgug

SEQ ID NO: 61363 - RNA, 19 nt, Artificial Sequence
  Synthetic
cacagagucuagacucgug

SEQ ID NO: 61364 - RNA, 20 nt, Artificial Sequence
  Synthetic
ccacagagucuagacucgug

SEQ ID NO: 61365 - RNA, 21 nt, Artificial Sequence
  Synthetic
accacagagucuagacucgug

SEQ ID NO: 61366 - RNA, 22 nt, Artificial Sequence
  Synthetic
uaccacagagucuagacucgug

SEQ ID NO: 61367 - RNA, 23 nt, Artificial Sequence
  Synthetic
auaccacagagucuagacucgug

SEQ ID NO: 61368 - RNA, 24 nt, Artificial Sequence
  Synthetic
aauaccacagagucuagacucgug

SEQ ID NO: 61369 - RNA, 18 nt, Artificial Sequence
  Synthetic
ccuuggacucauaaggug

SEQ ID NO: 61370 - RNA, 19 nt, Artificial Sequence
  Synthetic
uccuuggacucauaaggug

SEQ ID NO: 61371 - RNA, 20 nt, Artificial Sequence
  Synthetic
uuccuuggacucauaaggug

SEQ ID NO: 61372 - RNA, 21 nt, Artificial Sequence
  Synthetic
auuccuuggacucauaaggug

SEQ ID NO: 61373 - RNA, 22 nt, Artificial Sequence
  Synthetic
uauuccuuggacucauaaggug

SEQ ID NO: 61374 - RNA, 23 nt, Artificial Sequence
  Synthetic
guauuccuuggacucauaaggug

SEQ ID NO: 61375 - RNA, 24 nt, Artificial Sequence
  Synthetic
aguauuccuuggacucauaaggug

SEQ ID NO: 61376 - RNA, 18 nt, Artificial Sequence
  Synthetic
gcaauuuguucaguggug

SEQ ID NO: 61377 - RNA, 19 nt, Artificial Sequence
  Synthetic
ugcaauuuguucaguggug

SEQ ID NO: 61378 - RNA, 20 nt, Artificial Sequence
  Synthetic
gugcaauuuguucaguggug

SEQ ID NO: 61379 - RNA, 21 nt, Artificial Sequence
  Synthetic
agugcaauuuguucaguggug

SEQ ID NO: 61380 - RNA, 22 nt, Artificial Sequence
  Synthetic
uagugcaauuuguucaguggug

SEQ ID NO: 61381 - RNA, 23 nt, Artificial Sequence
  Synthetic
cuagugcaauuuguucaguggug

SEQ ID NO: 61382 - RNA, 24 nt, Artificial Sequence
  Synthetic
acuagugcaauuuguucaguggug

SEQ ID NO: 61383 - RNA, 18 nt, Artificial Sequence
  Synthetic
  misc_feature (13)..(13): n is a, c, g, or u
caggcaagcuaunuugug

SEQ ID NO: 61384 - RNA, 19 nt, Artificial Sequence
  Synthetic
  misc_feature (14)..(14): n is a, c, g, or u
ucaggcaagcuaunuugug

SEQ ID NO: 61385 - RNA, 20 nt, Artificial Sequence
  Synthetic
  misc_feature (15)..(15): n is a, c, g, or u
cucaggcaagcuaunuugug

SEQ ID NO: 61386 - RNA, 21 nt, Artificial Sequence
  Synthetic
  misc_feature (16)..(16): n is a, c, g, or u
ucucaggcaagcuaunuugug

SEQ ID NO: 61387 - RNA, 22 nt, Artificial Sequence
  Synthetic
  misc_feature (17)..(17): n is a, c, g, or u
cucucaggcaagcuaunuugug

SEQ ID NO: 61388 - RNA, 23 nt, Artificial Sequence
  Synthetic
  misc_feature (18)..(18): n is a, c, g, or u
gcucucaggcaagcuaunuugug

SEQ ID NO: 61389 - RNA, 24 nt, Artificial Sequence
  Synthetic
  misc_feature (19)..(19): n is a, c, g, or u
cgcucucaggcaagcuaunuugug

SEQ ID NO: 61390 - RNA, 18 nt, Artificial Sequence
  Synthetic
  misc_feature (3)..(3): n is a, c, g, or u
  misc_feature (16)..(16): n is a, c, g, or u
aangacugggaggagnug

SEQ ID NO: 61391 - RNA, 19 nt, Artificial Sequence
  Synthetic
  misc_feature (4)..(4): n is a, c, g, or u
  misc_feature (17)..(17): n is a, c, g, or u
uaangacugggaggagnug

SEQ ID NO: 61392 - RNA, 20 nt, Artificial Sequence
  Synthetic
  misc_feature (5)..(5): n is a, c, g, or u
  misc_feature (18)..(18): n is a, c, g, or u
uuaangacugggaggagnug

SEQ ID NO: 61393 - RNA, 21 nt, Artificial Sequence
  Synthetic
  misc_feature (6)..(6): n is a, c, g, or u
  misc_feature (19)..(19): n is a, c, g, or u
uuuaangacugggaggagnug

SEQ ID NO: 61394 - RNA, 22 nt, Artificial Sequence
  Synthetic
  misc_feature (7)..(7): n is a, c, g, or u
  misc_feature (20)..(20): n is a, c, g, or u
auuuaangacugggaggagnug

SEQ ID NO: 61395 - RNA, 23 nt, Artificial Sequence
  Synthetic
  misc_feature (8)..(8): n is a, c, g, or u
  misc_feature (21)..(21): n is a, c, g, or u
uauuuaangacugggaggagnug

SEQ ID NO: 61396 - RNA, 24 nt, Artificial Sequence
  Synthetic
  misc_feature (9)..(9): n is a, c, g, or u
  misc_feature (22)..(22): n is a, c, g, or u
guauuuaangacugggaggagnug

SEQ ID NO: 61397 - RNA, 18 nt, Artificial Sequence
  Synthetic
  misc_feature (3)..(3): n is a, c, g, or u
  misc_feature (16)..(16): n is a, c, g, or u
acnaaauauuuuccunug

SEQ ID NO: 61398 - RNA, 19 nt, Artificial Sequence
  Synthetic
  misc_feature (4)..(4): n is a, c, g, or u
  misc_feature (17)..(17): n is a, c, g, or u
uacnaaauauuuuccunug

SEQ ID NO: 61399 - RNA, 20 nt, Artificial Sequence
  Synthetic
  misc_feature (5)..(5): n is a, c, g, or u
  misc_feature (18)..(18): n is a, c, g, or u
uuacnaaauauuuuccunug

SEQ ID NO: 61400 - RNA, 21 nt, Artificial Sequence
  Synthetic
  misc_feature (1)..(1): n is a, c, g, or u
  misc_feature (6)..(6): n is a, c, g, or u
  misc_feature (19)..(19): n is a, c, g, or u
nuuacnaaauauuuuccunug

SEQ ID NO: 61401 - RNA, 22 nt, Artificial Sequence
  Synthetic
  misc_feature (1)..(2): n is a, c, g, or u
  misc_feature (7)..(7): n is a, c, g, or u
  misc_feature (20)..(20): n is a, c, g, or u
nnuuacnaaauauuuuccunug

SEQ ID NO: 61402 - RNA, 23 nt, Artificial Sequence
  Synthetic
  misc_feature (2)..(3): n is a, c, g, or u
  misc_feature (8)..(8): n is a, c, g, or u
  misc_feature (21)..(21): n is a, c, g, or u
annuuacnaaauauuuuccunug

SEQ ID NO: 61403 - RNA, 24 nt, Artificial Sequence
  Synthetic
  misc_feature (3)..(4): n is a, c, g, or u
  misc_feature (9)..(9): n is a, c, g, or u
  misc_feature (22)..(22): n is a, c, g, or u
aannuuacnaaauauuuuccunug

SEQ ID NO: 61404 - RNA, 18 nt, Artificial Sequence
  Synthetic
  misc_feature (3)..(3): n is a, c, g, or u
  misc_feature (6)..(6): n is a, c, g, or u
cunacnaaaaaugaauug

SEQ ID NO: 61405 - RNA, 19 nt, Artificial Sequence
  Synthetic
  misc_feature (1)..(1): n is a, c, g, or u
  misc_feature (4)..(4): n is a, c, g, or u
  misc_feature (7)..(7): n is a, c, g, or u
ncunacnaaaaaugaauug

SEQ ID NO: 61406 - RNA, 20 nt, Artificial Sequence
  Synthetic
  misc_feature (2)..(2): n is a, c, g, or u
  misc_feature (5)..(5): n is a, c, g, or u
  misc_feature (8)..(8): n is a, c, g, or u
cncunacnaaaaaugaauug

SEQ ID NO: 61407 - RNA, 21 nt, Artificial Sequence
  Synthetic
  misc_feature (3)..(3): n is a, c, g, or u
  misc_feature (6)..(6): n is a, c, g, or u
  misc_feature (9)..(9): n is a, c, g, or u
ccncunacnaaaaaugaauug

SEQ ID NO: 61408 - RNA, 22 nt, Artificial Sequence
  Synthetic
  misc_feature (4)..(4): n is a, c, g, or u
  misc_feature (7)..(7): n is a, c, g, or u
  misc_feature (10)..(10): n is a, c, g, or u
cccncunacnaaaaaugaauug

SEQ ID NO: 61409 - RNA, 23 nt, Artificial Sequence
  Synthetic
  misc_feature (5)..(5): n is a, c, g, or u
  misc_feature (8)..(8): n is a, c, g, or u
  misc_feature (11)..(11): n is a, c, g, or u
gcccncunacnaaaaaugaauug

SEQ ID NO: 61410 - RNA, 24 nt, Artificial Sequence
  Synthetic
  misc_feature (6)..(6): n is a, c, g, or u
  misc_feature (9)..(9): n is a, c, g, or u
  misc_feature (12)..(12): n is a, c, g, or u
ggcccncunacnaaaaaugaauug

SEQ ID NO: 61411 - RNA, 18 nt, Artificial Sequence
  Synthetic
  misc_feature (11)..(11): n is a, c, g, or u
  misc_feature (14)..(14): n is a, c, g, or u
cuguaaaucgnccnauug

SEQ ID NO: 61412 - RNA, 19 nt, Artificial Sequence
  Synthetic
  misc_feature (12)..(12): n is a, c, g, or u
  misc_feature (15)..(15): n is a, c, g, or u
ccuguaaaucgnccnauug

SEQ ID NO: 61413 - RNA, 20 nt, Artificial Sequence
  Synthetic
  misc_feature (13)..(13): n is a, c, g, or u
  misc_feature (16)..(16): n is a, c, g, or u
uccuguaaaucgnccnauug

SEQ ID NO: 61414 - RNA, 21 nt, Artificial Sequence
  Synthetic
  misc_feature (14)..(14): n is a, c, g, or u
  misc_feature (17)..(17): n is a, c, g, or u
uuccuguaaaucgnccnauug

SEQ ID NO: 61415 - RNA, 22 nt, Artificial Sequence
  Synthetic
  misc_feature (15)..(15): n is a, c, g, or u
  misc_feature (18)..(18): n is a, c, g, or u
cuuccuguaaaucgnccnauug

SEQ ID NO: 61416 - RNA, 23 nt, Artificial Sequence
  Synthetic
  misc_feature (16)..(16): n is a, c, g, or u
  misc_feature (19)..(19): n is a, c, g, or u
acuuccuguaaaucgnccnauug

SEQ ID NO: 61417 - RNA, 24 nt, Artificial Sequence
  Synthetic
  misc_feature (17)..(17): n is a, c, g, or u
  misc_feature (20)..(20): n is a, c, g, or u
aacuuccuguaaaucgnccnauug

SEQ ID NO: 61418 - RNA, 18 nt, Artificial Sequence
  Synthetic
ccuccaagcugugccuug

SEQ ID NO: 61419 - RNA, 19 nt, Artificial Sequence
  Synthetic
gccuccaagcugugccuug

SEQ ID NO: 61420 - RNA, 20 nt, Artificial Sequence
  Synthetic
agccuccaagcugugccuug

SEQ ID NO: 61421 - RNA, 21 nt, Artificial Sequence
  Synthetic
aagccuccaagcugugccuug

SEQ ID NO: 61422 - RNA, 22 nt, Artificial Sequence
  Synthetic
caagccuccaagcugugccuug

SEQ ID NO: 61423 - RNA, 23 nt, Artificial Sequence
  Synthetic
ucaagccuccaagcugugccuug

SEQ ID NO: 61424 - RNA, 24 nt, Artificial Sequence
  Synthetic
uucaagccuccaagcugugccuug

SEQ ID NO: 61425 - RNA, 18 nt, Artificial Sequence
  Synthetic
aaaccugcacaacucuug

SEQ ID NO: 61426 - RNA, 19 nt, Artificial Sequence
  Synthetic
aaaaccugcacaacucuug

SEQ ID NO: 61427 - RNA, 20 nt, Artificial Sequence
  Synthetic
caaaaccugcacaacucuug

SEQ ID NO: 61428 - RNA, 21 nt, Artificial Sequence
  Synthetic
gcaaaaccugcacaacucuug

SEQ ID NO: 61429 - RNA, 22 nt, Artificial Sequence
  Synthetic
ugcaaaaccugcacaacucuug

SEQ ID NO: 61430 - RNA, 23 nt, Artificial Sequence
  Synthetic
augcaaaaccugcacaacucuug

SEQ ID NO: 61431 - RNA, 24 nt, Artificial Sequence
  Synthetic
caugcaaaaccugcacaacucuug

SEQ ID NO: 61432 - RNA, 18 nt, Artificial Sequence
  Synthetic
ugaaccuuuaccccguug

SEQ ID NO: 61433 - RNA, 19 nt, Artificial Sequence
  Synthetic
augaaccuuuaccccguug

SEQ ID NO: 61434 - RNA, 20 nt, Artificial Sequence
  Synthetic
caugaaccuuuaccccguug

SEQ ID NO: 61435 - RNA, 21 nt, Artificial Sequence
  Synthetic
acaugaaccuuuaccccguug

SEQ ID NO: 61436 - RNA, 22 nt, Artificial Sequence
  Synthetic
uacaugaaccuuuaccccguug

SEQ ID NO: 61437 - RNA, 23 nt, Artificial Sequence
  Synthetic
  misc_feature (1)..(1): n is a, c, g, or u
nuacaugaaccuuuaccccguug

SEQ ID NO: 61438 - RNA, 24 nt, Artificial Sequence
  Synthetic
  misc_feature (2)..(2): n is a, c, g, or u
anuacaugaaccuuuaccccguug

SEQ ID NO: 61439 - RNA, 18 nt, Artificial Sequence
  Synthetic
uuccggaaacuacuguug

SEQ ID NO: 61440 - RNA, 19 nt, Artificial Sequence
  Synthetic
cuuccggaaacuacuguug

SEQ ID NO: 61441 - RNA, 20 nt, Artificial Sequence
  Synthetic
acuuccggaaacuacuguug

SEQ ID NO: 61442 - RNA, 21 nt, Artificial Sequence
  Synthetic
cacuuccggaaacuacuguug

SEQ ID NO: 61443 - RNA, 22 nt, Artificial Sequence
  Synthetic
acacuuccggaaacuacuguug

SEQ ID NO: 61444 - RNA, 23 nt, Artificial Sequence
  Synthetic
cacacuuccggaaacuacuguug

SEQ ID NO: 61445 - RNA, 24 nt, Artificial Sequence
  Synthetic
ccacacuuccggaaacuacuguug

SEQ ID NO: 61446 - RNA, 18 nt, Artificial Sequence
  Synthetic
gcgguguguuucuuguug

SEQ ID NO: 61447 - RNA, 19 nt, Artificial Sequence
  Synthetic
ggcgguguguuucuuguug

SEQ ID NO: 61448 - RNA, 20 nt, Artificial Sequence
  Synthetic
aggcgguguguuucuuguug

SEQ ID NO: 61449 - RNA, 21 nt, Artificial Sequence
  Synthetic
caggcgguguguuucuuguug

SEQ ID NO: 61450 - RNA, 22 nt, Artificial Sequence
  Synthetic
acaggcgguguguuucuuguug

SEQ ID NO: 61451 - RNA, 23 nt, Artificial Sequence
  Synthetic
uacaggcgguguguuucuuguug

SEQ ID NO: 61452 - RNA, 24 nt, Artificial Sequence
  Synthetic
uuacaggcgguguguuucuuguug

SEQ ID NO: 61453 - RNA, 18 nt, Artificial Sequence
  Synthetic
  misc_feature (15)..(15): n is a, c, g, or u
ugggugggcaauaanuug

SEQ ID NO: 61454 - RNA, 19 nt, Artificial Sequence
  Synthetic
  misc_feature (16)..(16): n is a, c, g, or u
cugggugggcaauaanuug

SEQ ID NO: 61455 - RNA, 20 nt, Artificial Sequence
  Synthetic
  misc_feature (17)..(17): n is a, c, g, or u
ccugggugggcaauaanuug

SEQ ID NO: 61456 - RNA, 21 nt, Artificial Sequence
  Synthetic
  misc_feature (18)..(18): n is a, c, g, or u
uccugggugggcaauaanuug

SEQ ID NO: 61457 - RNA, 22 nt, Artificial Sequence
  Synthetic
  misc_feature (19)..(19): n is a, c, g, or u
uuccugggugggcaauaanuug

SEQ ID NO: 61458 - RNA, 23 nt, Artificial Sequence
  Synthetic
  misc_feature (20)..(20): n is a, c, g, or u
cuuccugggugggcaauaanuug

SEQ ID NO: 61459 - RNA, 24 nt, Artificial Sequence
  Synthetic
  misc_feature (21)..(21): n is a, c, g, or u
gcuuccugggugggcaauaanuug

SEQ ID NO: 61460 - RNA, 18 nt, Artificial Sequence
  Synthetic
uuuccugccuuacuuuug

SEQ ID NO: 61461 - RNA, 19 nt, Artificial Sequence
  Synthetic
auuuccugccuuacuuuug

SEQ ID NO: 61462 - RNA, 20 nt, Artificial Sequence
  Synthetic
cauuuccugccuuacuuuug

SEQ ID NO: 61463 - RNA, 21 nt, Artificial Sequence
  Synthetic
acauuuccugccuuacuuuug

SEQ ID NO: 61464 - RNA, 22 nt, Artificial Sequence
  Synthetic
cacauuuccugccuuacuuuug

SEQ ID NO: 61465 - RNA, 23 nt, Artificial Sequence
  Synthetic
ucacauuuccugccuuacuuuug

SEQ ID NO: 61466 - RNA, 24 nt, Artificial Sequence
  Synthetic
uucacauuuccugccuuacuuuug

SEQ ID NO: 61467 - RNA, 18 nt, Artificial Sequence
  Synthetic
  misc_feature (5)..(5): n is a, c, g, or u
  misc_feature (14)..(14): n is a, c, g, or u
  misc_feature (18)..(18): n is a, c, g, or u
aucanauuguacanaaan

SEQ ID NO: 61468 - RNA, 19 nt, Artificial Sequence
  Synthetic
  misc_feature (6)..(6): n is a, c, g, or u
  misc_feature (15)..(15): n is a, c, g, or u
  misc_feature (19)..(19): n is a, c, g, or u
gaucanauuguacanaaan

SEQ ID NO: 61469 - RNA, 20 nt, Artificial Sequence
  Synthetic
  misc_feature (7)..(7): n is a, c, g, or u
  misc_feature (16)..(16): n is a, c, g, or u
  misc_feature (20)..(20): n is a, c, g, or u
agaucanauuguacanaaan

SEQ ID NO: 61470 - RNA, 21 nt, Artificial Sequence
  Synthetic
  misc_feature (8)..(8): n is a, c, g, or u
  misc_feature (17)..(17): n is a, c, g, or u
  misc_feature (21)..(21): n is a, c, g, or u
aagaucanauuguacanaaan

SEQ ID NO: 61471 - RNA, 22 nt, Artificial Sequence
  Synthetic
  misc_feature (9)..(9): n is a, c, g, or u
  misc_feature (18)..(18): n is a, c, g, or u
  misc_feature (22)..(22): n is a, c, g, or u
caagaucanauuguacanaaan

SEQ ID NO: 61472 - RNA, 23 nt, Artificial Sequence
  Synthetic
  misc_feature (1)..(1): n is a, c, g, or u
  misc_feature (10)..(10): n is a, c, g, or u
  misc_feature (19)..(19): n is a, c, g, or u
  misc_feature (23)..(23): n is a, c, g, or u
ncaagaucanauuguacanaaan

SEQ ID NO: 61473 - RNA, 24 nt, Artificial Sequence
  Synthetic
  misc_feature (2)..(2): n is a, c, g, or u
  misc_feature (11)..(11): n is a, c, g, or u
  misc_feature (20)..(20): n is a, c, g, or u
  misc_feature (24)..(24): n is a, c, g, or u
cncaagaucanauuguacanaaan

SEQ ID NO: 61474 - RNA, 18 nt, Artificial Sequence
  Synthetic
  misc_feature (13)..(13): n is a, c, g, or u
  misc_feature (18)..(18): n is a, c, g, or u
acuaacaugggcnuaaan

SEQ ID NO: 61475 - RNA, 19 nt, Artificial Sequence
  Synthetic
  misc_feature (1)..(1): n is a, c, g, or u
  misc_feature (14)..(14): n is a, c, g, or u
  misc_feature (19)..(19): n is a, c, g, or u
nacuaacaugggcnuaaan

SEQ ID NO: 61476 - RNA, 20 nt, Artificial Sequence
  Synthetic
  misc_feature (2)..(2): n is a, c, g, or u
  misc_feature (15)..(15): n is a, c, g, or u
  misc_feature (20)..(20): n is a, c, g, or u
anacuaacaugggcnuaaan

SEQ ID NO: 61477 - RNA, 21 nt, Artificial Sequence
  Synthetic
  misc_feature (3)..(3): n is a, c, g, or u
  misc_feature (16)..(16): n is a, c, g, or u
  misc_feature (21)..(21): n is a, c, g, or u
aanacuaacaugggcnuaaan

SEQ ID NO: 61478 - RNA, 22 nt, Artificial Sequence
  Synthetic
  misc_feature (1)..(1): n is a, c, g, or u
  misc_feature (4)..(4): n is a, c, g, or u
  misc_feature (17)..(17): n is a, c, g, or u
  misc_feature (22)..(22): n is a, c, g, or u
naanacuaacaugggcnuaaan

SEQ ID NO: 61479 - RNA, 23 nt, Artificial Sequence
  Synthetic
  misc_feature (2)..(2): n is a, c, g, or u
  misc_feature (5)..(5): n is a, c, g, or u
  misc_feature (18)..(18): n is a, c, g, or u
  misc_feature (23)..(23): n is a, c, g, or u
unaanacuaacaugggcnuaaan

SEQ ID NO: 61480 - RNA, 24 nt, Artificial Sequence
  Synthetic
  misc_feature (3)..(3): n is a, c, g, or u
  misc_feature (6)..(6): n is a, c, g, or u
  misc_feature (19)..(19): n is a, c, g, or u
  misc_feature (24)..(24): n is a, c, g, or u
gunaanacuaacaugggcnuaaan

SEQ ID NO: 61481 - RNA, 18 nt, Artificial Sequence
  Synthetic
  misc_feature (18)..(18): n is a, c, g, or u
uugcauacuuuauggaan

SEQ ID NO: 61482 - RNA, 19 nt, Artificial Sequence
  Synthetic
  misc_feature (19)..(19): n is a, c, g, or u
uuugcauacuuuauggaan

SEQ ID NO: 61483 - RNA, 20 nt, Artificial Sequence
  Synthetic
  misc_feature (20)..(20): n is a, c, g, or u
auuugcauacuuuauggaan

SEQ ID NO: 61484 - RNA, 21 nt, Artificial Sequence
  Synthetic
  misc_feature (21)..(21): n is a, c, g, or u
uauuugcauacuuuauggaan

SEQ ID NO: 61485 - RNA, 22 nt, Artificial Sequence
  Synthetic
  misc_feature (1)..(1): n is a, c, g, or u
  misc_feature (22)..(22): n is a, c, g, or u
nuauuugcauacuuuauggaan

SEQ ID NO: 61486 - RNA, 23 nt, Artificial Sequence
  Synthetic
  misc_feature (2)..(2): n is a, c, g, or u
  misc_feature (23)..(23): n is a, c, g, or u
anuauuugcauacuuuauggaan

SEQ ID NO: 61487 - RNA, 24 nt, Artificial Sequence
  Synthetic
  misc_feature (3)..(3): n is a, c, g, or u
  misc_feature (24)..(24): n is a, c, g, or u
canuauuugcauacuuuauggaan

SEQ ID NO: 61488 - RNA, 18 nt, Artificial Sequence
  Synthetic
  misc_feature (3)..(3): n is a, c, g, or u
  misc_feature (15)..(15): n is a, c, g, or u
  misc_feature (18)..(18): n is a, c, g, or u
gunguuaacuaugunaan

SEQ ID NO: 61489 - RNA, 19 nt, Artificial Sequence
  Synthetic
  misc_feature (4)..(4): n is a, c, g, or u
  misc_feature (16)..(16): n is a, c, g, or u
  misc_feature (19)..(19): n is a, c, g, or u
agunguuaacuaugunaan

SEQ ID NO: 61490 - RNA, 20 nt, Artificial Sequence
  Synthetic
  misc_feature (5)..(5): n is a, c, g, or u
  misc_feature (17)..(17): n is a, c, g, or u
  misc_feature (20)..(20): n is a, c, g, or u
uagunguuaacuaugunaan

SEQ ID NO: 61491 - RNA, 21 nt, Artificial Sequence
  Synthetic
  misc_feature (1)..(1): n is a, c, g, or u
  misc_feature (6)..(6): n is a, c, g, or u
  misc_feature (18)..(18): n is a, c, g, or u
  misc_feature (21)..(21): n is a, c, g, or u
nuagunguuaacuaugunaan

SEQ ID NO: 61492 - RNA, 22 nt, Artificial Sequence
  Synthetic
  misc_feature (1)..(2): n is a, c, g, or u
  misc_feature (7)..(7): n is a, c, g, or u
  misc_feature (19)..(19): n is a, c, g, or u
  misc_feature (22)..(22): n is a, c, g, or u
nnuagunguuaacuaugunaan

SEQ ID NO: 61493 - RNA, 23 nt, Artificial Sequence
  Synthetic
  misc_feature (2)..(3): n is a, c, g, or u
  misc_feature (8)..(8): n is a, c, g, or u
  misc_feature (20)..(20): n is a, c, g, or u
  misc_feature (23)..(23): n is a, c, g, or u
annuagunguuaacuaugunaan

SEQ ID NO: 61494 - RNA, 24 nt, Artificial Sequence
  Synthetic
  misc_feature (3)..(4): n is a, c, g, or u
  misc_feature (9)..(9): n is a, c, g, or u
  misc_feature (21)..(21): n is a, c, g, or u
  misc_feature (24)..(24): n is a, c, g, or u
gannuagunguuaacuaugunaan

SEQ ID NO: 61495 - RNA, 18 nt, Artificial Sequence
  Synthetic
  misc_feature (18)..(18): n is a, c, g, or u
uccugggugggcaauaan

SEQ ID NO: 61496 - RNA, 19 nt, Artificial Sequence
  Synthetic
  misc_feature (19)..(19): n is a, c, g, or u
uuccugggugggcaauaan

SEQ ID NO: 61497 - RNA, 20 nt, Artificial Sequence
  Synthetic
  misc_feature (20)..(20): n is a, c, g, or u
cuuccugggugggcaauaan

SEQ ID NO: 61498 - RNA, 21 nt, Artificial Sequence
  Synthetic
  misc_feature (21)..(21): n is a, c, g, or u
gcuuccugggugggcaauaan

SEQ ID NO: 61499 - RNA, 22 nt, Artificial Sequence
  Synthetic
  misc_feature (22)..(22): n is a, c, g, or u
ggcuuccugggugggcaauaan

SEQ ID NO: 61500 - RNA, 23 nt, Artificial Sequence
  Synthetic
  misc_feature (23)..(23): n is a, c, g, or u
uggcuuccugggugggcaauaan

SEQ ID NO: 61501 - RNA, 24 nt, Artificial Sequence
  Synthetic
  misc_feature (24)..(24): n is a, c, g, or u
uuggcuuccugggugggcaauaan

SEQ ID NO: 61502 - RNA, 18 nt, Artificial Sequence
  Synthetic
  misc_feature (18)..(18): n is a, c, g, or u
guuaaucauuauuuuaan

SEQ ID NO: 61503 - RNA, 19 nt, Artificial Sequence
  Synthetic
  misc_feature (1)..(1): n is a, c, g, or u
  misc_feature (19)..(19): n is a, c, g, or u
nguuaaucauuauuuuaan

SEQ ID NO: 61504 - RNA, 20 nt, Artificial Sequence
  Synthetic
  misc_feature (1)..(2): n is a, c, g, or u
  misc_feature (20)..(20): n is a, c, g, or u
nnguuaaucauuauuuuaan

SEQ ID NO: 61505 - RNA, 21 nt, Artificial Sequence
  Synthetic
  misc_feature (2)..(3): n is a, c, g, or u
  misc_feature (21)..(21): n is a, c, g, or u
gnnguuaaucauuauuuuaan

SEQ ID NO: 61506 - RNA, 22 nt, Artificial Sequence
  Synthetic
  misc_feature (1)..(1): n is a, c, g, or u
  misc_feature (3)..(4): n is a, c, g, or u
  misc_feature (22)..(22): n is a, c, g, or u
ngnnguuaaucauuauuuuaan

SEQ ID NO: 61507 - RNA, 23 nt, Artificial Sequence
  Synthetic
  misc_feature (2)..(2): n is a, c, g, or u
  misc_feature (4)..(5): n is a, c, g, or u
  misc_feature (23)..(23): n is a, c, g, or u
angnnguuaaucauuauuuuaan

SEQ ID NO: 61508 - RNA, 24 nt, Artificial Sequence
  Synthetic
  misc_feature (1)..(1): n is a, c, g, or u
  misc_feature (3)..(3): n is a, c, g, or u
  misc_feature (5)..(6): n is a, c, g, or u
  misc_feature (24)..(24): n is a, c, g, or u
nangnnguuaaucauuauuuuaan

SEQ ID NO: 61509 - RNA, 18 nt, Artificial Sequence
  Synthetic
  misc_feature (18)..(18): n is a, c, g, or u
aauuccagcagucccgan

SEQ ID NO: 61510 - RNA, 19 nt, Artificial Sequence
  Synthetic
  misc_feature (19)..(19): n is a, c, g, or u
aaauuccagcagucccgan

SEQ ID NO: 61511 - RNA, 20 nt, Artificial Sequence
  Synthetic
  misc_feature (20)..(20): n is a, c, g, or u
caaauuccagcagucccgan

SEQ ID NO: 61512 - RNA, 21 nt, Artificial Sequence
  Synthetic
  misc_feature (21)..(21): n is a, c, g, or u
gcaaauuccagcagucccgan

SEQ ID NO: 61513 - RNA, 22 nt, Artificial Sequence
  Synthetic
  misc_feature (1)..(1): n is a, c, g, or u
  misc_feature (22)..(22): n is a, c, g, or u
ngcaaauuccagcagucccgan

SEQ ID NO: 61514 - RNA, 23 nt, Artificial Sequence
  Synthetic
  misc_feature (2)..(2): n is a, c, g, or u
  misc_feature (23)..(23): n is a, c, g, or u
gngcaaauuccagcagucccgan

SEQ ID NO: 61515 - RNA, 24 nt, Artificial Sequence
  Synthetic
  misc_feature (3)..(3): n is a, c, g, or u
  misc_feature (24)..(24): n is a, c, g, or u
agngcaaauuccagcagucccgan

SEQ ID NO: 61516 - RNA, 18 nt, Artificial Sequence
  Synthetic
  misc_feature (13)..(13): n is a, c, g, or u
  misc_feature (18)..(18): n is a, c, g, or u
aaauauuuuccunuggan

SEQ ID NO: 61517 - RNA, 19 nt, Artificial Sequence
  Synthetic
  misc_feature (1)..(1): n is a, c, g, or u
  misc_feature (14)..(14): n is a, c, g, or u
  misc_feature (19)..(19): n is a, c, g, or u
naaauauuuuccunuggan

SEQ ID NO: 61518 - RNA, 20 nt, Artificial Sequence
  Synthetic
  misc_feature (2)..(2): n is a, c, g, or u
  misc_feature (15)..(15): n is a, c, g, or u
  misc_feature (20)..(20): n is a, c, g, or u
cnaaauauuuuccunuggan

SEQ ID NO: 61519 - RNA, 21 nt, Artificial Sequence
  Synthetic
  misc_feature (3)..(3): n is a, c, g, or u
  misc_feature (16)..(16): n is a, c, g, or u
  misc_feature (21)..(21): n is a, c, g, or u
acnaaauauuuuccunuggan

SEQ ID NO: 61520 - RNA, 22 nt, Artificial Sequence
  Synthetic
  misc_feature (4)..(4): n is a, c, g, or u
  misc_feature (17)..(17): n is a, c, g, or u
  misc_feature (22)..(22): n is a, c, g, or u
uacnaaauauuuuccunuggan

SEQ ID NO: 61521 - RNA, 23 nt, Artificial Sequence
  Synthetic
  misc_feature (5)..(5): n is a, c, g, or u
  misc_feature (18)..(18): n is a, c, g, or u
  misc_feature (23)..(23): n is a, c, g, or u
uuacnaaauauuuuccunuggan

SEQ ID NO: 61522 - RNA, 24 nt, Artificial Sequence
  Synthetic
  misc_feature (1)..(1): n is a, c, g, or u
  misc_feature (6)..(6): n is a, c, g, or u
  misc_feature (19)..(19): n is a, c, g, or u
  misc_feature (24)..(24): n is a, c, g, or u
nuuacnaaauauuuuccunuggan

SEQ ID NO: 61523 - RNA, 18 nt, Artificial Sequence
  Synthetic
  misc_feature (9)..(9): n is a, c, g, or u
  misc_feature (12)..(12): n is a, c, g, or u
  misc_feature (18)..(18): n is a, c, g, or u
guaaaucgnccnauugan

SEQ ID NO: 61524 - RNA, 19 nt, Artificial Sequence
  Synthetic
  misc_feature (10)..(10): n is a, c, g, or u
  misc_feature (13)..(13): n is a, c, g, or u
  misc_feature (19)..(19): n is a, c, g, or u
uguaaaucgnccnauugan

SEQ ID NO: 61525 - RNA, 20 nt, Artificial Sequence
  Synthetic
  misc_feature (11)..(11): n is a, c, g, or u
  misc_feature (14)..(14): n is a, c, g, or u
  misc_feature (20)..(20): n is a, c, g, or u
cuguaaaucgnccnauugan

SEQ ID NO: 61526 - RNA, 21 nt, Artificial Sequence
  Synthetic
  misc_feature (12)..(12): n is a, c, g, or u
  misc_feature (15)..(15): n is a, c, g, or u
  misc_feature (21)..(21): n is a, c, g, or u
ccuguaaaucgnccnauugan

SEQ ID NO: 61527 - RNA, 22 nt, Artificial Sequence
  Synthetic
  misc_feature (13)..(13): n is a, c, g, or u
  misc_feature (16)..(16): n is a, c, g, or u
  misc_feature (22)..(22): n is a, c, g, or u
uccuguaaaucgnccnauugan

SEQ ID NO: 61528 - RNA, 23 nt, Artificial Sequence
  Synthetic
  misc_feature (14)..(14): n is a, c, g, or u
  misc_feature (17)..(17): n is a, c, g, or u
  misc_feature (23)..(23): n is a, c, g, or u
uuccuguaaaucgnccnauugan

SEQ ID NO: 61529 - RNA, 24 nt, Artificial Sequence
  Synthetic
  misc_feature (15)..(15): n is a, c, g, or u
  misc_feature (18)..(18): n is a, c, g, or u
  misc_feature (24)..(24): n is a, c, g, or u
cuuccuguaaaucgnccnauugan

SEQ ID NO: 61530 - RNA, 18 nt, Artificial Sequence
  Synthetic
  misc_feature (7)..(7): n is a, c, g, or u
  misc_feature (9)..(9): n is a, c, g, or u
  misc_feature (18)..(18): n is a, c, g, or u
gguuaangnucuuuguan

SEQ ID NO: 61531 - RNA, 19 nt, Artificial Sequence
  Synthetic
  misc_feature (8)..(8): n is a, c, g, or u
  misc_feature (10)..(10): n is a, c, g, or u
  misc_feature (19)..(19): n is a, c, g, or u
agguuaangnucuuuguan

SEQ ID NO: 61532 - RNA, 20 nt, Artificial Sequence
  Synthetic
  misc_feature (1)..(1): n is a, c, g, or u
  misc_feature (9)..(9): n is a, c, g, or u
  misc_feature (11)..(11): n is a, c, g, or u
  misc_feature (20)..(20): n is a, c, g, or u
nagguuaangnucuuuguan

SEQ ID NO: 61533 - RNA, 21 nt, Artificial Sequence
  Synthetic
  misc_feature (2)..(2): n is a, c, g, or u
  misc_feature (10)..(10): n is a, c, g, or u
  misc_feature (12)..(12): n is a, c, g, or u
  misc_feature (21)..(21): n is a, c, g, or u
unagguuaangnucuuuguan

SEQ ID NO: 61534 - RNA, 22 nt, Artificial Sequence
  Synthetic
  misc_feature (3)..(3): n is a, c, g, or u
  misc_feature (11)..(11): n is a, c, g, or u
  misc_feature (13)..(13): n is a, c, g, or u
  misc_feature (22)..(22): n is a, c, g, or u
aunagguuaangnucuuuguan

SEQ ID NO: 61535 - RNA, 23 nt, Artificial Sequence
  Synthetic
  misc_feature (4)..(4): n is a, c, g, or u
  misc_feature (12)..(12): n is a, c, g, or u
  misc_feature (14)..(14): n is a, c, g, or u
  misc_feature (23)..(23): n is a, c, g, or u
gaunagguuaangnucuuuguan

SEQ ID NO: 61536 - RNA, 24 nt, Artificial Sequence
  Synthetic
  misc_feature (5)..(5): n is a, c, g, or u
  misc_feature (13)..(13): n is a, c, g, or u
  misc_feature (15)..(15): n is a, c, g, or u
  misc_feature (24)..(24): n is a, c, g, or u
agaunagguuaangnucuuuguan

SEQ ID NO: 61537 - RNA, 18 nt, Artificial Sequence
  Synthetic
  misc_feature (6)..(7): n is a, c, g, or u
  misc_feature (18)..(18): n is a, c, g, or u
gcgaannucaucggcacn

SEQ ID NO: 61538 - RNA, 19 nt, Artificial Sequence
  Synthetic
  misc_feature (7)..(8): n is a, c, g, or u
  misc_feature (19)..(19): n is a, c, g, or u
agcgaannucaucggcacn

SEQ ID NO: 61539 - RNA, 20 nt, Artificial Sequence
  Synthetic
  misc_feature (8)..(9): n is a, c, g, or u
  misc_feature (20)..(20): n is a, c, g, or u
gagcgaannucaucggcacn

SEQ ID NO: 61540 - RNA, 21 nt, Artificial Sequence
  Synthetic
  misc_feature (9)..(10): n is a, c, g, or u
  misc_feature (21)..(21): n is a, c, g, or u
ggagcgaannucaucggcacn

SEQ ID NO: 61541 - RNA, 22 nt, Artificial Sequence
  Synthetic
  misc_feature (10)..(11): n is a, c, g, or u
  misc_feature (22)..(22): n is a, c, g, or u
uggagcgaannucaucggcacn

SEQ ID NO: 61542 - RNA, 23 nt, Artificial Sequence
  Synthetic
  misc_feature (11)..(12): n is a, c, g, or u
  misc_feature (23)..(23): n is a, c, g, or u
cuggagcgaannucaucggcacn

SEQ ID NO: 61543 - RNA, 24 nt, Artificial Sequence
  Synthetic
  misc_feature (12)..(13): n is a, c, g, or u
  misc_feature (24)..(24): n is a, c, g, or u
ucuggagcgaannucaucggcacn

SEQ ID NO: 61544 - RNA, 18 nt, Artificial Sequence
  Synthetic
  misc_feature (6)..(6): n is a, c, g, or u
  misc_feature (18)..(18): n is a, c, g, or u
ucaccngaacauugcacn

SEQ ID NO: 61545 - RNA, 19 nt, Artificial Sequence
  Synthetic
  misc_feature (1)..(1): n is a, c, g, or u
  misc_feature (7)..(7): n is a, c, g, or u
  misc_feature (19)..(19): n is a, c, g, or u
nucaccngaacauugcacn

SEQ ID NO: 61546 - RNA, 20 nt, Artificial Sequence
  Synthetic
  misc_feature (2)..(2): n is a, c, g, or u
  misc_feature (8)..(8): n is a, c, g, or u
  misc_feature (20)..(20): n is a, c, g, or u
anucaccngaacauugcacn

SEQ ID NO: 61547 - RNA, 21 nt, Artificial Sequence
  Synthetic
  misc_feature (3)..(3): n is a, c, g, or u
  misc_feature (9)..(9): n is a, c, g, or u
  misc_feature (21)..(21): n is a, c, g, or u
ganucaccngaacauugcacn

SEQ ID NO: 61548 - RNA, 22 nt, Artificial Sequence
  Synthetic
  misc_feature (4)..(4): n is a, c, g, or u
  misc_feature (10)..(10): n is a, c, g, or u
  misc_feature (22)..(22): n is a, c, g, or u
aganucaccngaacauugcacn

SEQ ID NO: 61549 - RNA, 23 nt, Artificial Sequence
  Synthetic
  misc_feature (5)..(5): n is a, c, g, or u
  misc_feature (11)..(11): n is a, c, g, or u
  misc_feature (23)..(23): n is a, c, g, or u
uaganucaccngaacauugcacn

SEQ ID NO: 61550 - RNA, 24 nt, Artificial Sequence
  Synthetic
  misc_feature (6)..(6): n is a, c, g, or u
  misc_feature (12)..(12): n is a, c, g, or u
  misc_feature (24)..(24): n is a, c, g, or u
uuaganucaccngaacauugcacn

SEQ ID NO: 61551 - RNA, 18 nt, Artificial Sequence
  Synthetic
  misc_feature (9)..(9): n is a, c, g, or u
  misc_feature (18)..(18): n is a, c, g, or u
gcaccucunucaacgacn

SEQ ID NO: 61552 - RNA, 19 nt, Artificial Sequence
  Synthetic
  misc_feature (10)..(10): n is a, c, g, or u
  misc_feature (19)..(19): n is a, c, g, or u
agcaccucunucaacgacn

SEQ ID NO: 61553 - RNA, 20 nt, Artificial Sequence
  Synthetic
  misc_feature (11)..(11): n is a, c, g, or u
  misc_feature (20)..(20): n is a, c, g, or u
gagcaccucunucaacgacn

SEQ ID NO: 61554 - RNA, 21 nt, Artificial Sequence
  Synthetic
  misc_feature (12)..(12): n is a, c, g, or u
  misc_feature (21)..(21): n is a, c, g, or u
ggagcaccucunucaacgacn

SEQ ID NO: 61555 - RNA, 22 nt, Artificial Sequence
  Synthetic
  misc_feature (13)..(13): n is a, c, g, or u
  misc_feature (22)..(22): n is a, c, g, or u
gggagcaccucunucaacgacn

SEQ ID NO: 61556 - RNA, 23 nt, Artificial Sequence
  Synthetic
  misc_feature (14)..(14): n is a, c, g, or u
  misc_feature (23)..(23): n is a, c, g, or u
ugggagcaccucunucaacgacn

SEQ ID NO: 61557 - RNA, 24 nt, Artificial Sequence
  Synthetic
  misc_feature (15)..(15): n is a, c, g, or u
  misc_feature (24)..(24): n is a, c, g, or u
augggagcaccucunucaacgacn

SEQ ID NO: 61558 - RNA, 18 nt, Artificial Sequence
  Synthetic
  misc_feature (12)..(12): n is a, c, g, or u
  misc_feature (18)..(18): n is a, c, g, or u
gguauccauuunaauacn

SEQ ID NO: 61559 - RNA, 19 nt, Artificial Sequence
  Synthetic
  misc_feature (13)..(13): n is a, c, g, or u
  misc_feature (19)..(19): n is a, c, g, or u
ggguauccauuunaauacn

SEQ ID NO: 61560 - RNA, 20 nt, Artificial Sequence
  Synthetic
  misc_feature (14)..(14): n is a, c, g, or u
  misc_feature (20)..(20): n is a, c, g, or u
uggguauccauuunaauacn

SEQ ID NO: 61561 - RNA, 21 nt, Artificial Sequence
  Synthetic
  misc_feature (15)..(15): n is a, c, g, or u
  misc_feature (21)..(21): n is a, c, g, or u
guggguauccauuunaauacn

SEQ ID NO: 61562 - RNA, 22 nt, Artificial Sequence
  Synthetic
  misc_feature (16)..(16): n is a, c, g, or u
  misc_feature (22)..(22): n is a, c, g, or u
uguggguauccauuunaauacn

SEQ ID NO: 61563 - RNA, 23 nt, Artificial Sequence
  Synthetic
  misc_feature (17)..(17): n is a, c, g, or u
  misc_feature (23)..(23): n is a, c, g, or u
cuguggguauccauuunaauacn

SEQ ID NO: 61564 - RNA, 24 nt, Artificial Sequence
  Synthetic
  misc_feature (18)..(18): n is a, c, g, or u
  misc_feature (24)..(24): n is a, c, g, or u
ucuguggguauccauuunaauacn

SEQ ID NO: 61565 - RNA, 18 nt, Artificial Sequence
  Synthetic
  misc_feature (18)..(18): n is a, c, g, or u
accaccgugaacgccccn

SEQ ID NO: 61566 - RNA, 19 nt, Artificial Sequence
  Synthetic
  misc_feature (19)..(19): n is a, c, g, or u
gaccaccgugaacgccccn

SEQ ID NO: 61567 - RNA, 20 nt, Artificial Sequence
  Synthetic
  misc_feature (20)..(20): n is a, c, g, or u
agaccaccgugaacgccccn

SEQ ID NO: 61568 - RNA, 21 nt, Artificial Sequence
  Synthetic
  misc_feature (21)..(21): n is a, c, g, or u
gagaccaccgugaacgccccn

SEQ ID NO: 61569 - RNA, 22 nt, Artificial Sequence
  Synthetic
  misc_feature (22)..(22): n is a, c, g, or u
ggagaccaccgugaacgccccn

SEQ ID NO: 61570 - RNA, 23 nt, Artificial Sequence
  Synthetic
  misc_feature (23)..(23): n is a, c, g, or u
uggagaccaccgugaacgccccn

SEQ ID NO: 61571 - RNA, 24 nt, Artificial Sequence
  Synthetic
  misc_feature (24)..(24): n is a, c, g, or u
auggagaccaccgugaacgccccn

SEQ ID NO: 61572 - RNA, 18 nt, Artificial Sequence
  Synthetic
  misc_feature (15)..(15): n is a, c, g, or u
  misc_feature (18)..(18): n is a, c, g, or u
cuuccuguaaaucgnccn

SEQ ID NO: 61573 - RNA, 19 nt, Artificial Sequence
  Synthetic
  misc_feature (16)..(16): n is a, c, g, or u
  misc_feature (19)..(19): n is a, c, g, or u
acuuccuguaaaucgnccn

SEQ ID NO: 61574 - RNA, 20 nt, Artificial Sequence
  Synthetic
  misc_feature (17)..(17): n is a, c, g, or u
  misc_feature (20)..(20): n is a, c, g, or u
aacuuccuguaaaucgnccn

SEQ ID NO: 61575 - RNA, 21 nt, Artificial Sequence
  Synthetic
  misc_feature (18)..(18): n is a, c, g, or u
  misc_feature (21)..(21): n is a, c, g, or u
aaacuuccuguaaaucgnccn

SEQ ID NO: 61576 - RNA, 22 nt, Artificial Sequence
  Synthetic
  misc_feature (1)..(1): n is a, c, g, or u
  misc_feature (19)..(19): n is a, c, g, or u
  misc_feature (22)..(22): n is a, c, g, or u
naaacuuccuguaaaucgnccn

SEQ ID NO: 61577 - RNA, 23 nt, Artificial Sequence
  Synthetic
  misc_feature (2)..(2): n is a, c, g, or u
  misc_feature (20)..(20): n is a, c, g, or u
  misc_feature (23)..(23): n is a, c, g, or u
gnaaacuuccuguaaaucgnccn

SEQ ID NO: 61578 - RNA, 24 nt, Artificial Sequence
  Synthetic
  misc_feature (1)..(1): n is a, c, g, or u
  misc_feature (3)..(3): n is a, c, g, or u
  misc_feature (21)..(21): n is a, c, g, or u
  misc_feature (24)..(24): n is a, c, g, or u
ngnaaacuuccuguaaaucgnccn

SEQ ID NO: 61579 - RNA, 18 nt, Artificial Sequence
  Synthetic
  misc_feature (9)..(9): n is a, c, g, or u
  misc_feature (18)..(18): n is a, c, g, or u
cucucuguncccaauccn

SEQ ID NO: 61580 - RNA, 19 nt, Artificial Sequence
  Synthetic
  misc_feature (10)..(10): n is a, c, g, or u
  misc_feature (19)..(19): n is a, c, g, or u
ucucucuguncccaauccn

SEQ ID NO: 61581 - RNA, 20 nt, Artificial Sequence
  Synthetic
  misc_feature (11)..(11): n is a, c, g, or u
  misc_feature (20)..(20): n is a, c, g, or u
aucucucuguncccaauccn

SEQ ID NO: 61582 - RNA, 21 nt, Artificial Sequence
  Synthetic
  misc_feature (12)..(12): n is a, c, g, or u
  misc_feature (21)..(21): n is a, c, g, or u
aaucucucuguncccaauccn

SEQ ID NO: 61583 - RNA, 22 nt, Artificial Sequence
  Synthetic
  misc_feature (13)..(13): n is a, c, g, or u
  misc_feature (22)..(22): n is a, c, g, or u
gaaucucucuguncccaauccn

SEQ ID NO: 61584 - RNA, 23 nt, Artificial Sequence
  Synthetic
  misc_feature (14)..(14): n is a, c, g, or u
  misc_feature (23)..(23): n is a, c, g, or u
agaaucucucuguncccaauccn

SEQ ID NO: 61585 - RNA, 24 nt, Artificial Sequence
  Synthetic
  misc_feature (15)..(15): n is a, c, g, or u
  misc_feature (24)..(24): n is a, c, g, or u
cagaaucucucuguncccaauccn

SEQ ID NO: 61586 - RNA, 18 nt, Artificial Sequence
  Synthetic
  misc_feature (18)..(18): n is a, c, g, or u
ccgucggcgcugaauccn

SEQ ID NO: 61587 - RNA, 19 nt, Artificial Sequence
  Synthetic
  misc_feature (19)..(19): n is a, c, g, or u
cccgucggcgcugaauccn

SEQ ID NO: 61588 - RNA, 20 nt, Artificial Sequence
  Synthetic
  misc_feature (20)..(20): n is a, c, g, or u
ucccgucggcgcugaauccn

SEQ ID NO: 61589 - RNA, 18 nt, Artificial Sequence
  Synthetic
  misc_feature (6)..(6): n is a, c, g, or u
  misc_feature (9)..(9): n is a, c, g, or u
  misc_feature (15)..(15): n is a, c, g, or u
  misc_feature (18)..(18): n is a, c, g, or u
uugganganccugcngcn

SEQ ID NO: 61590 - RNA, 19 nt, Artificial Sequence
  Synthetic
  misc_feature (1)..(1): n is a, c, g, or u
  misc_feature (7)..(7): n is a, c, g, or u
  misc_feature (10)..(10): n is a, c, g, or u
  misc_feature (16)..(16): n is a, c, g, or u
  misc_feature (19)..(19): n is a, c, g, or u
nuugganganccugcngcn

SEQ ID NO: 61591 - RNA, 20 nt, Artificial Sequence
  Synthetic
  misc_feature (2)..(2): n is a, c, g, or u
  misc_feature (8)..(8): n is a, c, g, or u
  misc_feature (11)..(11): n is a, c, g, or u
  misc_feature (17)..(17): n is a, c, g, or u
  misc_feature (20)..(20): n is a, c, g, or u
anuugganganccugcngcn

SEQ ID NO: 61592 - RNA, 21 nt, Artificial Sequence
  Synthetic
  misc_feature (3)..(3): n is a, c, g, or u
  misc_feature (9)..(9): n is a, c, g, or u
  misc_feature (12)..(12): n is a, c, g, or u
  misc_feature (18)..(18): n is a, c, g, or u
  misc_feature (21)..(21): n is a, c, g, or u
aanuugganganccugcngcn

SEQ ID NO: 61593 - RNA, 22 nt, Artificial Sequence
  Synthetic
  misc_feature (4)..(4): n is a, c, g, or u
  misc_feature (10)..(10): n is a, c, g, or u
  misc_feature (13)..(13): n is a, c, g, or u
  misc_feature (19)..(19): n is a, c, g, or u
  misc_feature (22)..(22): n is a, c, g, or u
uaanuugganganccugcngcn

SEQ ID NO: 61594 - RNA, 23 nt, Artificial Sequence
  Synthetic
  misc_feature (5)..(5): n is a, c, g, or u
  misc_feature (11)..(11): n is a, c, g, or u
  misc_feature (14)..(14): n is a, c, g, or u
  misc_feature (20)..(20): n is a, c, g, or u
  misc_feature (23)..(23): n is a, c, g, or u
auaanuugganganccugcngcn

SEQ ID NO: 61595 - RNA, 24 nt, Artificial Sequence
  Synthetic
  misc_feature (6)..(6): n is a, c, g, or u
  misc_feature (12)..(12): n is a, c, g, or u
  misc_feature (15)..(15): n is a, c, g, or u
  misc_feature (21)..(21): n is a, c, g, or u
  misc_feature (24)..(24): n is a, c, g, or u
aauaanuugganganccugcngcn

SEQ ID NO: 61596 - RNA, 18 nt, Artificial Sequence
  Synthetic
  misc_feature (3)..(3): n is a, c, g, or u
  misc_feature (9)..(9): n is a, c, g, or u
  misc_feature (12)..(12): n is a, c, g, or u
  misc_feature (18)..(18): n is a, c, g, or u
aanuugganganccugcn

SEQ ID NO: 61597 - RNA, 19 nt, Artificial Sequence
  Synthetic
  misc_feature (4)..(4): n is a, c, g, or u
  misc_feature (10)..(10): n is a, c, g, or u
  misc_feature (13)..(13): n is a, c, g, or u
  misc_feature (19)..(19): n is a, c, g, or u
uaanuugganganccugcn

SEQ ID NO: 61598 - RNA, 20 nt, Artificial Sequence
  Synthetic
  misc_feature (5)..(5): n is a, c, g, or u
  misc_feature (11)..(11): n is a, c, g, or u
  misc_feature (14)..(14): n is a, c, g, or u
  misc_feature (20)..(20): n is a, c, g, or u
auaanuugganganccugcn

SEQ ID NO: 61599 - RNA, 21 nt, Artificial Sequence
  Synthetic
  misc_feature (6)..(6): n is a, c, g, or u
  misc_feature (12)..(12): n is a, c, g, or u
  misc_feature (15)..(15): n is a, c, g, or u
  misc_feature (21)..(21): n is a, c, g, or u
aauaanuugganganccugcn

SEQ ID NO: 61600 - RNA, 22 nt, Artificial Sequence
  Synthetic
  misc_feature (7)..(7): n is a, c, g, or u
  misc_feature (13)..(13): n is a, c, g, or u
  misc_feature (16)..(16): n is a, c, g, or u
  misc_feature (22)..(22): n is a, c, g, or u
caauaanuugganganccugcn

SEQ ID NO: 61601 - RNA, 23 nt, Artificial Sequence
  Synthetic
  misc_feature (8)..(8): n is a, c, g, or u
  misc_feature (14)..(14): n is a, c, g, or u
  misc_feature (17)..(17): n is a, c, g, or u
  misc_feature (23)..(23): n is a, c, g, or u
gcaauaanuugganganccugcn

SEQ ID NO: 61602 - RNA, 24 nt, Artificial Sequence
  Synthetic
  misc_feature (9)..(9): n is a, c, g, or u
  misc_feature (15)..(15): n is a, c, g, or u
  misc_feature (18)..(18): n is a, c, g, or u
  misc_feature (24)..(24): n is a, c, g, or u
ggcaauaanuugganganccugcn

SEQ ID NO: 61603 - RNA, 18 nt, Artificial Sequence
  Synthetic
  misc_feature (3)..(3): n is a, c, g, or u
  misc_feature (12)..(12): n is a, c, g, or u
  misc_feature (18)..(18): n is a, c, g, or u
ccngcggacgancccucn

SEQ ID NO: 61604 - RNA, 19 nt, Artificial Sequence
  Synthetic
  misc_feature (4)..(4): n is a, c, g, or u
  misc_feature (13)..(13): n is a, c, g, or u
  misc_feature (19)..(19): n is a, c, g, or u
uccngcggacgancccucn

SEQ ID NO: 61605 - RNA, 20 nt, Artificial Sequence
  Synthetic
  misc_feature (5)..(5): n is a, c, g, or u
  misc_feature (14)..(14): n is a, c, g, or u
  misc_feature (20)..(20): n is a, c, g, or u
auccngcggacgancccucn

SEQ ID NO: 61606 - RNA, 21 nt, Artificial Sequence
  Synthetic
  misc_feature (6)..(6): n is a, c, g, or u
  misc_feature (15)..(15): n is a, c, g, or u
  misc_feature (21)..(21): n is a, c, g, or u
aauccngcggacgancccucn

SEQ ID NO: 61607 - RNA, 22 nt, Artificial Sequence
  Synthetic
  misc_feature (7)..(7): n is a, c, g, or u
  misc_feature (16)..(16): n is a, c, g, or u
  misc_feature (22)..(22): n is a, c, g, or u
gaauccngcggacgancccucn

SEQ ID NO: 61608 - RNA, 23 nt, Artificial Sequence
  Synthetic
  misc_feature (8)..(8): n is a, c, g, or u
  misc_feature (17)..(17): n is a, c, g, or u
  misc_feature (23)..(23): n is a, c, g, or u
ugaauccngcggacgancccucn

SEQ ID NO: 61609 - RNA, 24 nt, Artificial Sequence
  Synthetic
  misc_feature (9)..(9): n is a, c, g, or u
  misc_feature (18)..(18): n is a, c, g, or u
  misc_feature (24)..(24): n is a, c, g, or u
cugaauccngcggacgancccucn

SEQ ID NO: 61610 - RNA, 18 nt, Artificial Sequence
  Synthetic
  misc_feature (18)..(18): n is a, c, g, or u
cuugaguauuuggugucn

SEQ ID NO: 61611 - RNA, 19 nt, Artificial Sequence
  Synthetic
  misc_feature (19)..(19): n is a, c, g, or u
ucuugaguauuuggugucn

SEQ ID NO: 61612 - RNA, 20 nt, Artificial Sequence
  Synthetic
  misc_feature (20)..(20): n is a, c, g, or u
uucuugaguauuuggugucn

SEQ ID NO: 61613 - RNA, 21 nt, Artificial Sequence
  Synthetic
  misc_feature (21)..(21): n is a, c, g, or u
guucuugaguauuuggugucn

SEQ ID NO: 61614 - RNA, 22 nt, Artificial Sequence
  Synthetic
  misc_feature (22)..(22): n is a, c, g, or u
aguucuugaguauuuggugucn

SEQ ID NO: 61615 - RNA, 23 nt, Artificial Sequence
  Synthetic
  misc_feature (23)..(23): n is a, c, g, or u
caguucuugaguauuuggugucn

SEQ ID NO: 61616 - RNA, 24 nt, Artificial Sequence
  Synthetic
  misc_feature (24)..(24): n is a, c, g, or u
acaguucuugaguauuuggugucn

SEQ ID NO: 61617 - RNA, 18 nt, Artificial Sequence
  Synthetic
  misc_feature (18)..(18): n is a, c, g, or u
ugugggucaccauauucn

SEQ ID NO: 61618 - RNA, 19 nt, Artificial Sequence
  Synthetic
  misc_feature (19)..(19): n is a, c, g, or u
uugugggucaccauauucn

SEQ ID NO: 61619 - RNA, 20 nt, Artificial Sequence
  Synthetic
  misc_feature (20)..(20): n is a, c, g, or u
uuugugggucaccauauucn

SEQ ID NO: 61620 - RNA, 21 nt, Artificial Sequence
  Synthetic
  misc_feature (21)..(21): n is a, c, g, or u
uuuugugggucaccauauucn

SEQ ID NO: 61621 - RNA, 22 nt, Artificial Sequence
  Synthetic
  misc_feature (22)..(22): n is a, c, g, or u
auuuugugggucaccauauucn

SEQ ID NO: 61622 - RNA, 23 nt, Artificial Sequence
  Synthetic
  misc_feature (23)..(23): n is a, c, g, or u
cauuuugugggucaccauauucn

SEQ ID NO: 61623 - RNA, 24 nt, Artificial Sequence
  Synthetic
  misc_feature (24)..(24): n is a, c, g, or u
ucauuuugugggucaccauauucn

SEQ ID NO: 61624 - RNA, 18 nt, Artificial Sequence
  Synthetic
  misc_feature (18)..(18): n is a, c, g, or u
aaaaaugaauugagaagn

SEQ ID NO: 61625 - RNA, 19 nt, Artificial Sequence
  Synthetic
  misc_feature (1)..(1): n is a, c, g, or u
  misc_feature (19)..(19): n is a, c, g, or u
naaaaaugaauugagaagn

SEQ ID NO: 61626 - RNA, 20 nt, Artificial Sequence
  Synthetic
  misc_feature (2)..(2): n is a, c, g, or u
  misc_feature (20)..(20): n is a, c, g, or u
cnaaaaaugaauugagaagn

SEQ ID NO: 61627 - RNA, 21 nt, Artificial Sequence
  Synthetic
  misc_feature (3)..(3): n is a, c, g, or u
  misc_feature (21)..(21): n is a, c, g, or u
acnaaaaaugaauugagaagn

SEQ ID NO: 61628 - RNA, 22 nt, Artificial Sequence
  Synthetic
  misc_feature (1)..(1): n is a, c, g, or u
  misc_feature (4)..(4): n is a, c, g, or u
  misc_feature (22)..(22): n is a, c, g, or u
nacnaaaaaugaauugagaagn

SEQ ID NO: 61629 - RNA, 23 nt, Artificial Sequence
  Synthetic
  misc_feature (2)..(2): n is a, c, g, or u
  misc_feature (5)..(5): n is a, c, g, or u
  misc_feature (23)..(23): n is a, c, g, or u
unacnaaaaaugaauugagaagn

SEQ ID NO: 61630 - RNA, 24 nt, Artificial Sequence
  Synthetic
  misc_feature (3)..(3): n is a, c, g, or u
  misc_feature (6)..(6): n is a, c, g, or u
  misc_feature (24)..(24): n is a, c, g, or u
cunacnaaaaaugaauugagaagn

SEQ ID NO: 61631 - RNA, 18 nt, Artificial Sequence
  Synthetic
  misc_feature (5)..(5): n is a, c, g, or u
  misc_feature (18)..(18): n is a, c, g, or u
uuaangacugggaggagn

SEQ ID NO: 61632 - RNA, 19 nt, Artificial Sequence
  Synthetic
  misc_feature (6)..(6): n is a, c, g, or u
  misc_feature (19)..(19): n is a, c, g, or u
uuuaangacugggaggagn

SEQ ID NO: 61633 - RNA, 20 nt, Artificial Sequence
  Synthetic
  misc_feature (7)..(7): n is a, c, g, or u
  misc_feature (20)..(20): n is a, c, g, or u
auuuaangacugggaggagn

SEQ ID NO: 61634 - RNA, 21 nt, Artificial Sequence
  Synthetic
  misc_feature (8)..(8): n is a, c, g, or u
  misc_feature (21)..(21): n is a, c, g, or u
uauuuaangacugggaggagn

SEQ ID NO: 61635 - RNA, 22 nt, Artificial Sequence
  Synthetic
  misc_feature (9)..(9): n is a, c, g, or u
  misc_feature (22)..(22): n is a, c, g, or u
guauuuaangacugggaggagn

SEQ ID NO: 61636 - RNA, 23 nt, Artificial Sequence
  Synthetic
  misc_feature (10)..(10): n is a, c, g, or u
  misc_feature (23)..(23): n is a, c, g, or u
uguauuuaangacugggaggagn

SEQ ID NO: 61637 - RNA, 24 nt, Artificial Sequence
  Synthetic
  misc_feature (11)..(11): n is a, c, g, or u
  misc_feature (24)..(24): n is a, c, g, or u
guguauuuaangacugggaggagn

SEQ ID NO: 61638 - RNA, 18 nt, Artificial Sequence
  Synthetic
  misc_feature (7)..(7): n is a, c, g, or u
  misc_feature (12)..(12): n is a, c, g, or u
  misc_feature (15)..(15): n is a, c, g, or u
  misc_feature (18)..(18): n is a, c, g, or u
uuuccunugganaanggn

SEQ ID NO: 61639 - RNA, 19 nt, Artificial Sequence
  Synthetic
  misc_feature (8)..(8): n is a, c, g, or u
  misc_feature (13)..(13): n is a, c, g, or u
  misc_feature (16)..(16): n is a, c, g, or u
  misc_feature (19)..(19): n is a, c, g, or u
uuuuccunugganaanggn

SEQ ID NO: 61640 - RNA, 20 nt, Artificial Sequence
  Synthetic
  misc_feature (9)..(9): n is a, c, g, or u
  misc_feature (14)..(14): n is a, c, g, or u
  misc_feature (17)..(17): n is a, c, g, or u
  misc_feature (20)..(20): n is a, c, g, or u
auuuuccunugganaanggn

SEQ ID NO: 61641 - RNA, 21 nt, Artificial Sequence
  Synthetic
  misc_feature (10)..(10): n is a, c, g, or u
  misc_feature (15)..(15): n is a, c, g, or u
  misc_feature (18)..(18): n is a, c, g, or u
  misc_feature (21)..(21): n is a, c, g, or u
uauuuuccunugganaanggn

SEQ ID NO: 61642 - RNA, 22 nt, Artificial Sequence
  Synthetic
  misc_feature (11)..(11): n is a, c, g, or u
  misc_feature (16)..(16): n is a, c, g, or u
  misc_feature (19)..(19): n is a, c, g, or u
  misc_feature (22)..(22): n is a, c, g, or u
auauuuuccunugganaanggn

SEQ ID NO: 61643 - RNA, 23 nt, Artificial Sequence
  Synthetic
  misc_feature (12)..(12): n is a, c, g, or u
  misc_feature (17)..(17): n is a, c, g, or u
  misc_feature (20)..(20): n is a, c, g, or u
  misc_feature (23)..(23): n is a, c, g, or u
aauauuuuccunugganaanggn

SEQ ID NO: 61644 - RNA, 24 nt, Artificial Sequence
  Synthetic
  misc_feature (13)..(13): n is a, c, g, or u
  misc_feature (18)..(18): n is a, c, g, or u
  misc_feature (21)..(21): n is a, c, g, or u
  misc_feature (24)..(24): n is a, c, g, or u
aaauauuuuccunugganaanggn

SEQ ID NO: 61645 - RNA, 18 nt, Artificial Sequence
  Synthetic
  misc_feature (8)..(8): n is a, c, g, or u
  misc_feature (17)..(18): n is a, c, g, or u
caccucunucaacgacnn

SEQ ID NO: 61646 - RNA, 19 nt, Artificial Sequence
  Synthetic
  misc_feature (9)..(9): n is a, c, g, or u
  misc_feature (18)..(19): n is a, c, g, or u
gcaccucunucaacgacnn

SEQ ID NO: 61647 - RNA, 20 nt, Artificial Sequence
  Synthetic
  misc_feature (10)..(10): n is a, c, g, or u
  misc_feature (19)..(20): n is a, c, g, or u
agcaccucunucaacgacnn

SEQ ID NO: 61648 - RNA, 21 nt, Artificial Sequence
  Synthetic
  misc_feature (11)..(11): n is a, c, g, or u
  misc_feature (20)..(21): n is a, c, g, or u
gagcaccucunucaacgacnn

SEQ ID NO: 61649 - RNA, 22 nt, Artificial Sequence
  Synthetic
  misc_feature (12)..(12): n is a, c, g, or u
  misc_feature (21)..(22): n is a, c, g, or u
ggagcaccucunucaacgacnn

SEQ ID NO: 61650 - RNA, 23 nt, Artificial Sequence
  Synthetic
  misc_feature (13)..(13): n is a, c, g, or u
  misc_feature (22)..(23): n is a, c, g, or u
gggagcaccucunucaacgacnn

SEQ ID NO: 61651 - RNA, 24 nt, Artificial Sequence
  Synthetic
  misc_feature (14)..(14): n is a, c, g, or u
  misc_feature (23)..(24): n is a, c, g, or u
ugggagcaccucunucaacgacnn

SEQ ID NO: 61652 - RNA, 18 nt, Artificial Sequence
  Synthetic
  misc_feature (11)..(12): n is a, c, g, or u
  misc_feature (18)..(18): n is a, c, g, or u
ucuuacauaannggacun

SEQ ID NO: 61653 - RNA, 19 nt, Artificial Sequence
  Synthetic
  misc_feature (12)..(13): n is a, c, g, or u
  misc_feature (19)..(19): n is a, c, g, or u
gucuuacauaannggacun

SEQ ID NO: 61654 - RNA, 20 nt, Artificial Sequence
  Synthetic
  misc_feature (13)..(14): n is a, c, g, or u
  misc_feature (20)..(20): n is a, c, g, or u
agucuuacauaannggacun

SEQ ID NO: 61655 - RNA, 21 nt, Artificial Sequence
  Synthetic
  misc_feature (14)..(15): n is a, c, g, or u
  misc_feature (21)..(21): n is a, c, g, or u
cagucuuacauaannggacun

SEQ ID NO: 61656 - RNA, 22 nt, Artificial Sequence
  Synthetic
  misc_feature (15)..(16): n is a, c, g, or u
  misc_feature (22)..(22): n is a, c, g, or u
acagucuuacauaannggacun

SEQ ID NO: 61657 - RNA, 23 nt, Artificial Sequence
  Synthetic
  misc_feature (16)..(17): n is a, c, g, or u
  misc_feature (23)..(23): n is a, c, g, or u
aacagucuuacauaannggacun

SEQ ID NO: 61658 - RNA, 24 nt, Artificial Sequence
  Synthetic
  misc_feature (17)..(18): n is a, c, g, or u
  misc_feature (24)..(24): n is a, c, g, or u
caacagucuuacauaannggacun

SEQ ID NO: 61659 - RNA, 18 nt, Artificial Sequence
  Synthetic
  misc_feature (18)..(18): n is a, c, g, or u
gacgaggcagguccccun

SEQ ID NO: 61660 - RNA, 19 nt, Artificial Sequence
  Synthetic
  misc_feature (19)..(19): n is a, c, g, or u
cgacgaggcagguccccun

SEQ ID NO: 61661 - RNA, 20 nt, Artificial Sequence
  Synthetic
  misc_feature (20)..(20): n is a, c, g, or u
acgacgaggcagguccccun

SEQ ID NO: 61662 - RNA, 21 nt, Artificial Sequence
  Synthetic
  misc_feature (21)..(21): n is a, c, g, or u
gacgacgaggcagguccccun

SEQ ID NO: 61663 - RNA, 22 nt, Artificial Sequence
  Synthetic
  misc_feature (22)..(22): n is a, c, g, or u
agacgacgaggcagguccccun

SEQ ID NO: 61664 - RNA, 23 nt, Artificial Sequence
  Synthetic
  misc_feature (23)..(23): n is a, c, g, or u
uagacgacgaggcagguccccun

SEQ ID NO: 61665 - RNA, 24 nt, Artificial Sequence
  Synthetic
  misc_feature (24)..(24): n is a, c, g, or u
uuagacgacgaggcagguccccun

SEQ ID NO: 61666 - RNA, 18 nt, Artificial Sequence
  Synthetic
  misc_feature (18)..(18): n is a, c, g, or u
gcugccaacuggauccun

SEQ ID NO: 61667 - RNA, 19 nt, Artificial Sequence
  Synthetic
  misc_feature (19)..(19): n is a, c, g, or u
ugcugccaacuggauccun

SEQ ID NO: 61668 - RNA, 20 nt, Artificial Sequence
  Synthetic
  misc_feature (20)..(20): n is a, c, g, or u
gugcugccaacuggauccun

SEQ ID NO: 61669 - RNA, 21 nt, Artificial Sequence
  Synthetic
  misc_feature (21)..(21): n is a, c, g, or u
ugugcugccaacuggauccun

SEQ ID NO: 61670 - RNA, 22 nt, Artificial Sequence
  Synthetic
  misc_feature (1)..(1): n is a, c, g, or u
  misc_feature (22)..(22): n is a, c, g, or u
nugugcugccaacuggauccun

SEQ ID NO: 61671 - RNA, 23 nt, Artificial Sequence
  Synthetic
  misc_feature (2)..(2): n is a, c, g, or u
  misc_feature (23)..(23): n is a, c, g, or u
gnugugcugccaacuggauccun

SEQ ID NO: 61672 - RNA, 24 nt, Artificial Sequence
  Synthetic
  misc_feature (3)..(3): n is a, c, g, or u
  misc_feature (24)..(24): n is a, c, g, or u
ggnugugcugccaacuggauccun

SEQ ID NO: 61673 - RNA, 18 nt, Artificial Sequence
  Synthetic
  misc_feature (15)..(15): n is a, c, g, or u
  misc_feature (18)..(18): n is a, c, g, or u
caauuuguaggcccncun

SEQ ID NO: 61674 - RNA, 19 nt, Artificial Sequence
  Synthetic
  misc_feature (16)..(16): n is a, c, g, or u
  misc_feature (19)..(19): n is a, c, g, or u
acaauuuguaggcccncun

SEQ ID NO: 61675 - RNA, 20 nt, Artificial Sequence
  Synthetic
  misc_feature (17)..(17): n is a, c, g, or u
  misc_feature (20)..(20): n is a, c, g, or u
aacaauuuguaggcccncun

SEQ ID NO: 61676 - RNA, 21 nt, Artificial Sequence
  Synthetic
  misc_feature (18)..(18): n is a, c, g, or u
  misc_feature (21)..(21): n is a, c, g, or u
gaacaauuuguaggcccncun

SEQ ID NO: 61677 - RNA, 22 nt, Artificial Sequence
  Synthetic
  misc_feature (19)..(19): n is a, c, g, or u
  misc_feature (22)..(22): n is a, c, g, or u
ugaacaauuuguaggcccncun

SEQ ID NO: 61678 - RNA, 23 nt, Artificial Sequence
  Synthetic
  misc_feature (20)..(20): n is a, c, g, or u
  misc_feature (23)..(23): n is a, c, g, or u
gugaacaauuuguaggcccncun

SEQ ID NO: 61679 - RNA, 24 nt, Artificial Sequence
  Synthetic
  misc_feature (21)..(21): n is a, c, g, or u
  misc_feature (24)..(24): n is a, c, g, or u
ugugaacaauuuguaggcccncun

SEQ ID NO: 61680 - RNA, 18 nt, Artificial Sequence
  Synthetic
  misc_feature (15)..(15): n is a, c, g, or u
  misc_feature (18)..(18): n is a, c, g, or u
caucagcuggauccncun

SEQ ID NO: 61681 - RNA, 19 nt, Artificial Sequence
  Synthetic
  misc_feature (16)..(16): n is a, c, g, or u
  misc_feature (19)..(19): n is a, c, g, or u
ccaucagcuggauccncun

SEQ ID NO: 61682 - RNA, 20 nt, Artificial Sequence
  Synthetic
  misc_feature (17)..(17): n is a, c, g, or u
  misc_feature (20)..(20): n is a, c, g, or u
accaucagcuggauccncun

SEQ ID NO: 61683 - RNA, 21 nt, Artificial Sequence
  Synthetic
  misc_feature (18)..(18): n is a, c, g, or u
  misc_feature (21)..(21): n is a, c, g, or u
gaccaucagcuggauccncun

SEQ ID NO: 61684 - RNA, 22 nt, Artificial Sequence
  Synthetic
  misc_feature (19)..(19): n is a, c, g, or u
  misc_feature (22)..(22): n is a, c, g, or u
agaccaucagcuggauccncun

SEQ ID NO: 61685 - RNA, 23 nt, Artificial Sequence
  Synthetic
  misc_feature (20)..(20): n is a, c, g, or u
  misc_feature (23)..(23): n is a, c, g, or u
cagaccaucagcuggauccncun

SEQ ID NO: 61686 - RNA, 24 nt, Artificial Sequence
  Synthetic
  misc_feature (21)..(21): n is a, c, g, or u
  misc_feature (24)..(24): n is a, c, g, or u
ccagaccaucagcuggauccncun

SEQ ID NO: 61687 - RNA, 18 nt, Artificial Sequence
  Synthetic
  misc_feature (18)..(18): n is a, c, g, or u
cacaucaucaaucuucun

SEQ ID NO: 61688 - RNA, 19 nt, Artificial Sequence
  Synthetic
  misc_feature (19)..(19): n is a, c, g, or u
ucacaucaucaaucuucun

SEQ ID NO: 61689 - RNA, 20 nt, Artificial Sequence
  Synthetic
  misc_feature (20)..(20): n is a, c, g, or u
cucacaucaucaaucuucun

SEQ ID NO: 61690 - RNA, 21 nt, Artificial Sequence
  Synthetic
  misc_feature (21)..(21): n is a, c, g, or u
ucucacaucaucaaucuucun

SEQ ID NO: 61691 - RNA, 22 nt, Artificial Sequence
  Synthetic
  misc_feature (22)..(22): n is a, c, g, or u
cucucacaucaucaaucuucun

SEQ ID NO: 61692 - RNA, 23 nt, Artificial Sequence
  Synthetic
  misc_feature (23)..(23): n is a, c, g, or u
ucucucacaucaucaaucuucun

SEQ ID NO: 61693 - RNA, 24 nt, Artificial Sequence
  Synthetic
  misc_feature (24)..(24): n is a, c, g, or u
cucucucacaucaucaaucuucun

SEQ ID NO: 61694 - RNA, 18 nt, Artificial Sequence
  Synthetic
  misc_feature (3)..(3): n is a, c, g, or u
  misc_feature (6)..(6): n is a, c, g, or u
  misc_feature (12)..(13): n is a, c, g, or u
  misc_feature (18)..(18): n is a, c, g, or u
gcngcnagggannuagun

SEQ ID NO: 61695 - RNA, 19 nt, Artificial Sequence
  Synthetic
  misc_feature (4)..(4): n is a, c, g, or u
  misc_feature (7)..(7): n is a, c, g, or u
  misc_feature (13)..(14): n is a, c, g, or u
  misc_feature (19)..(19): n is a, c, g, or u
ugcngcnagggannuagun

SEQ ID NO: 61696 - RNA, 20 nt, Artificial Sequence
  Synthetic
  misc_feature (5)..(5): n is a, c, g, or u
  misc_feature (8)..(8): n is a, c, g, or u
  misc_feature (14)..(15): n is a, c, g, or u
  misc_feature (20)..(20): n is a, c, g, or u
cugcngcnagggannuagun

SEQ ID NO: 61697 - RNA, 21 nt, Artificial Sequence
  Synthetic
  misc_feature (6)..(6): n is a, c, g, or u
  misc_feature (9)..(9): n is a, c, g, or u
  misc_feature (15)..(16): n is a, c, g, or u
  misc_feature (21)..(21): n is a, c, g, or u
ccugcngcnagggannuagun

SEQ ID NO: 61698 - RNA, 22 nt, Artificial Sequence
  Synthetic
  misc_feature (1)..(1): n is a, c, g, or u
  misc_feature (7)..(7): n is a, c, g, or u
  misc_feature (10)..(10): n is a, c, g, or u
  misc_feature (16)..(17): n is a, c, g, or u
  misc_feature (22)..(22): n is a, c, g, or u
nccugcngcnagggannuagun

SEQ ID NO: 61699 - RNA, 23 nt, Artificial Sequence
  Synthetic
  misc_feature (2)..(2): n is a, c, g, or u
  misc_feature (8)..(8): n is a, c, g, or u
  misc_feature (11)..(11): n is a, c, g, or u
  misc_feature (17)..(18): n is a, c, g, or u
  misc_feature (23)..(23): n is a, c, g, or u
anccugcngcnagggannuagun

SEQ ID NO: 61700 - RNA, 24 nt, Artificial Sequence
  Synthetic
  misc_feature (3)..(3): n is a, c, g, or u
  misc_feature (9)..(9): n is a, c, g, or u
  misc_feature (12)..(12): n is a, c, g, or u
  misc_feature (18)..(19): n is a, c, g, or u
  misc_feature (24)..(24): n is a, c, g, or u
ganccugcngcnagggannuagun

SEQ ID NO: 61701 - RNA, 18 nt, Artificial Sequence
  Synthetic
  misc_feature (1)..(1): n is a, c, g, or u
  misc_feature (18)..(18): n is a, c, g, or u
nauuucauggguuaugun

SEQ ID NO: 61702 - RNA, 19 nt, Artificial Sequence
  Synthetic
  misc_feature (2)..(2): n is a, c, g, or u
  misc_feature (19)..(19): n is a, c, g, or u
anauuucauggguuaugun

SEQ ID NO: 61703 - RNA, 20 nt, Artificial Sequence
  Synthetic
  misc_feature (3)..(3): n is a, c, g, or u
  misc_feature (20)..(20): n is a, c, g, or u
uanauuucauggguuaugun

SEQ ID NO: 61704 - RNA, 21 nt, Artificial Sequence
  Synthetic
  misc_feature (1)..(1): n is a, c, g, or u
  misc_feature (4)..(4): n is a, c, g, or u
  misc_feature (21)..(21): n is a, c, g, or u
nuanauuucauggguuaugun

SEQ ID NO: 61705 - RNA, 22 nt, Artificial Sequence
  Synthetic
  misc_feature (1)..(2): n is a, c, g, or u
  misc_feature (5)..(5): n is a, c, g, or u
  misc_feature (22)..(22): n is a, c, g, or u
nnuanauuucauggguuaugun

SEQ ID NO: 61706 - RNA, 23 nt, Artificial Sequence
  Synthetic
  misc_feature (1)..(3): n is a, c, g, or u
  misc_feature (6)..(6): n is a, c, g, or u
  misc_feature (23)..(23): n is a, c, g, or u
nnnuanauuucauggguuaugun

SEQ ID NO: 61707 - RNA, 24 nt, Artificial Sequence
  Synthetic
  misc_feature (2)..(4): n is a, c, g, or u
  misc_feature (7)..(7): n is a, c, g, or u
  misc_feature (24)..(24): n is a, c, g, or u
annnuanauuucauggguuaugun

SEQ ID NO: 61708 - RNA, 18 nt, Artificial Sequence
  Synthetic
  misc_feature (3)..(3): n is a, c, g, or u
  misc_feature (11)..(11): n is a, c, g, or u
  misc_feature (18)..(18): n is a, c, g, or u
aanucaaaganuguuuun

SEQ ID NO: 61709 - RNA, 19 nt, Artificial Sequence
  Synthetic
  misc_feature (4)..(4): n is a, c, g, or u
  misc_feature (12)..(12): n is a, c, g, or u
  misc_feature (19)..(19): n is a, c, g, or u
aaanucaaaganuguuuun

SEQ ID NO: 61710 - RNA, 20 nt, Artificial Sequence
  Synthetic
  misc_feature (1)..(1): n is a, c, g, or u
  misc_feature (5)..(5): n is a, c, g, or u
  misc_feature (13)..(13): n is a, c, g, or u
  misc_feature (20)..(20): n is a, c, g, or u
naaanucaaaganuguuuun

SEQ ID NO: 61711 - RNA, 21 nt, Artificial Sequence
  Synthetic
  misc_feature (2)..(2): n is a, c, g, or u
  misc_feature (6)..(6): n is a, c, g, or u
  misc_feature (14)..(14): n is a, c, g, or u
  misc_feature (21)..(21): n is a, c, g, or u
anaaanucaaaganuguuuun

SEQ ID NO: 61712 - RNA, 22 nt, Artificial Sequence
  Synthetic
  misc_feature (3)..(3): n is a, c, g, or u
  misc_feature (7)..(7): n is a, c, g, or u
  misc_feature (15)..(15): n is a, c, g, or u
  misc_feature (22)..(22): n is a, c, g, or u
canaaanucaaaganuguuuun

SEQ ID NO: 61713 - RNA, 23 nt, Artificial Sequence
  Synthetic
  misc_feature (4)..(4): n is a, c, g, or u
  misc_feature (8)..(8): n is a, c, g, or u
  misc_feature (16)..(16): n is a, c, g, or u
  misc_feature (23)..(23): n is a, c, g, or u
acanaaanucaaaganuguuuun

SEQ ID NO: 61714 - RNA, 24 nt, Artificial Sequence
  Synthetic
  misc_feature (5)..(5): n is a, c, g, or u
  misc_feature (9)..(9): n is a, c, g, or u
  misc_feature (17)..(17): n is a, c, g, or u
  misc_feature (24)..(24): n is a, c, g, or u
uacanaaanucaaaganuguuuun

SEQ ID NO: 61715 - RNA, 18 nt, Artificial Sequence
  Synthetic
  misc_feature (3)..(3): n is a, c, g, or u
  misc_feature (6)..(6): n is a, c, g, or u
  misc_feature (12)..(12): n is a, c, g, or u
ccncunuucagngcaaau

SEQ ID NO: 61716 - RNA, 19 nt, Artificial Sequence
  Synthetic
  misc_feature (4)..(4): n is a, c, g, or u
  misc_feature (7)..(7): n is a, c, g, or u
  misc_feature (13)..(13): n is a, c, g, or u
uccncunuucagngcaaau

SEQ ID NO: 61717 - RNA, 20 nt, Artificial Sequence
  Synthetic
  misc_feature (5)..(5): n is a, c, g, or u
  misc_feature (8)..(8): n is a, c, g, or u
  misc_feature (14)..(14): n is a, c, g, or u
auccncunuucagngcaaau

SEQ ID NO: 61718 - RNA, 21 nt, Artificial Sequence
  Synthetic
  misc_feature (6)..(6): n is a, c, g, or u
  misc_feature (9)..(9): n is a, c, g, or u
  misc_feature (15)..(15): n is a, c, g, or u
gauccncunuucagngcaaau

SEQ ID NO: 61719 - RNA, 22 nt, Artificial Sequence
  Synthetic
  misc_feature (7)..(7): n is a, c, g, or u
  misc_feature (10)..(10): n is a, c, g, or u
  misc_feature (16)..(16): n is a, c, g, or u
ggauccncunuucagngcaaau

SEQ ID NO: 61720 - RNA, 23 nt, Artificial Sequence
  Synthetic
  misc_feature (8)..(8): n is a, c, g, or u
  misc_feature (11)..(11): n is a, c, g, or u
  misc_feature (17)..(17): n is a, c, g, or u
uggauccncunuucagngcaaau

SEQ ID NO: 61721 - RNA, 24 nt, Artificial Sequence
  Synthetic
  misc_feature (9)..(9): n is a, c, g, or u
  misc_feature (12)..(12): n is a, c, g, or u
  misc_feature (18)..(18): n is a, c, g, or u
cuggauccncunuucagngcaaau

SEQ ID NO: 61722 - RNA, 18 nt, Artificial Sequence
  Synthetic
  misc_feature (5)..(6): n is a, c, g, or u
  misc_feature (12)..(14): n is a, c, g, or u
aagannugauannnaaau

SEQ ID NO: 61723 - RNA, 19 nt, Artificial Sequence
  Synthetic
  misc_feature (6)..(7): n is a, c, g, or u
  misc_feature (13)..(15): n is a, c, g, or u
caagannugauannnaaau

SEQ ID NO: 61724 - RNA, 20 nt, Artificial Sequence
  Synthetic
  misc_feature (7)..(8): n is a, c, g, or u
  misc_feature (14)..(16): n is a, c, g, or u
ucaagannugauannnaaau

SEQ ID NO: 61725 - RNA, 21 nt, Artificial Sequence
  Synthetic
  misc_feature (8)..(9): n is a, c, g, or u
  misc_feature (15)..(17): n is a, c, g, or u
aucaagannugauannnaaau

SEQ ID NO: 61726 - RNA, 22 nt, Artificial Sequence
  Synthetic
  misc_feature (9)..(10): n is a, c, g, or u
  misc_feature (16)..(18): n is a, c, g, or u
caucaagannugauannnaaau

SEQ ID NO: 61727 - RNA, 23 nt, Artificial Sequence
  Synthetic
  misc_feature (1)..(1): n is a, c, g, or u
  misc_feature (10)..(11): n is a, c, g, or u
  misc_feature (17)..(19): n is a, c, g, or u
ncaucaagannugauannnaaau

SEQ ID NO: 61728 - RNA, 24 nt, Artificial Sequence
  Synthetic
  misc_feature (2)..(2): n is a, c, g, or u
  misc_feature (11)..(12): n is a, c, g, or u
  misc_feature (18)..(20): n is a, c, g, or u
uncaucaagannugauannnaaau

SEQ ID NO: 61729 - RNA, 18 nt, Artificial Sequence
  Synthetic
  misc_feature (9)..(9): n is a, c, g, or u
caaggacanuuggccaau

SEQ ID NO: 61730 - RNA, 19 nt, Artificial Sequence
  Synthetic
  misc_feature (10)..(10): n is a, c, g, or u
acaaggacanuuggccaau

SEQ ID NO: 61731 - RNA, 20 nt, Artificial Sequence
  Synthetic
  misc_feature (11)..(11): n is a, c, g, or u
aacaaggacanuuggccaau

SEQ ID NO: 61732 - RNA, 21 nt, Artificial Sequence
  Synthetic
  misc_feature (12)..(12): n is a, c, g, or u
aaacaaggacanuuggccaau

SEQ ID NO: 61733 - RNA, 22 nt, Artificial Sequence
  Synthetic
  misc_feature (1)..(1): n is a, c, g, or u
  misc_feature (13)..(13): n is a, c, g, or u
naaacaaggacanuuggccaau

SEQ ID NO: 61734 - RNA, 23 nt, Artificial Sequence
  Synthetic
  misc_feature (2)..(2): n is a, c, g, or u
  misc_feature (14)..(14): n is a, c, g, or u
anaaacaaggacanuuggccaau

SEQ ID NO: 61735 - RNA, 24 nt, Artificial Sequence
  Synthetic
  misc_feature (3)..(3): n is a, c, g, or u
  misc_feature (15)..(15): n is a, c, g, or u
canaaacaaggacanuuggccaau

SEQ ID NO: 61736 - RNA, 18 nt, Artificial Sequence
  Synthetic
uugacccuuauaaagaau

SEQ ID NO: 61737 - RNA, 19 nt, Artificial Sequence
  Synthetic
auugacccuuauaaagaau

SEQ ID NO: 61738 - RNA, 20 nt, Artificial Sequence
  Synthetic
cauugacccuuauaaagaau

SEQ ID NO: 61739 - RNA, 21 nt, Artificial Sequence
  Synthetic
acauugacccuuauaaagaau

SEQ ID NO: 61740 - RNA, 22 nt, Artificial Sequence
  Synthetic
gacauugacccuuauaaagaau

SEQ ID NO: 61741 - RNA, 23 nt, Artificial Sequence
  Synthetic
ggacauugacccuuauaaagaau

SEQ ID NO: 61742 - RNA, 24 nt, Artificial Sequence
  Synthetic
uggacauugacccuuauaaagaau

SEQ ID NO: 61743 - RNA, 18 nt, Artificial Sequence
  Synthetic
  misc_feature (2)..(2): n is a, c, g, or u
  misc_feature (5)..(5): n is a, c, g, or u
  misc_feature (8)..(8): n is a, c, g, or u
cncunacnaaaaaugaau

SEQ ID NO: 61744 - RNA, 19 nt, Artificial Sequence
  Synthetic
  misc_feature (3)..(3): n is a, c, g, or u
  misc_feature (6)..(6): n is a, c, g, or u
  misc_feature (9)..(9): n is a, c, g, or u
ccncunacnaaaaaugaau

SEQ ID NO: 61745 - RNA, 20 nt, Artificial Sequence
  Synthetic
  misc_feature (4)..(4): n is a, c, g, or u
  misc_feature (7)..(7): n is a, c, g, or u
  misc_feature (10)..(10): n is a, c, g, or u
cccncunacnaaaaaugaau

SEQ ID NO: 61746 - RNA, 21 nt, Artificial Sequence
  Synthetic
  misc_feature (5)..(5): n is a, c, g, or u
  misc_feature (8)..(8): n is a, c, g, or u
  misc_feature (11)..(11): n is a, c, g, or u
gcccncunacnaaaaaugaau

SEQ ID NO: 61747 - RNA, 22 nt, Artificial Sequence
  Synthetic
  misc_feature (6)..(6): n is a, c, g, or u
  misc_feature (9)..(9): n is a, c, g, or u
  misc_feature (12)..(12): n is a, c, g, or u
ggcccncunacnaaaaaugaau

SEQ ID NO: 61748 - RNA, 23 nt, Artificial Sequence
  Synthetic
  misc_feature (7)..(7): n is a, c, g, or u
  misc_feature (10)..(10): n is a, c, g, or u
  misc_feature (13)..(13): n is a, c, g, or u
aggcccncunacnaaaaaugaau

SEQ ID NO: 61749 - RNA, 24 nt, Artificial Sequence
  Synthetic
  misc_feature (8)..(8): n is a, c, g, or u
  misc_feature (11)..(11): n is a, c, g, or u
  misc_feature (14)..(14): n is a, c, g, or u
uaggcccncunacnaaaaaugaau

SEQ ID NO: 61750 - RNA, 18 nt, Artificial Sequence
  Synthetic
acauggacaacaucacau

SEQ ID NO: 61751 - RNA, 19 nt, Artificial Sequence
  Synthetic
aacauggacaacaucacau

SEQ ID NO: 61752 - RNA, 20 nt, Artificial Sequence
  Synthetic
gaacauggacaacaucacau

SEQ ID NO: 61753 - RNA, 21 nt, Artificial Sequence
  Synthetic
  misc_feature (1)..(1): n is a, c, g, or u
ngaacauggacaacaucacau

SEQ ID NO: 61754 - RNA, 22 nt, Artificial Sequence
  Synthetic
  misc_feature (2)..(2): n is a, c, g, or u
angaacauggacaacaucacau

SEQ ID NO: 61755 - RNA, 23 nt, Artificial Sequence
  Synthetic
  misc_feature (3)..(3): n is a, c, g, or u
uangaacauggacaacaucacau

SEQ ID NO: 61756 - RNA, 24 nt, Artificial Sequence
  Synthetic
  misc_feature (4)..(4): n is a, c, g, or u
cuangaacauggacaacaucacau

SEQ ID NO: 61757 - RNA, 18 nt, Artificial Sequence
  Synthetic
cuggaucgaagaauacau

SEQ ID NO: 61758 - RNA, 19 nt, Artificial Sequence
  Synthetic
ccuggaucgaagaauacau

SEQ ID NO: 61759 - RNA, 20 nt, Artificial Sequence
  Synthetic
accuggaucgaagaauacau

SEQ ID NO: 61760 - RNA, 21 nt, Artificial Sequence
  Synthetic
  misc_feature (1)..(1): n is a, c, g, or u
naccuggaucgaagaauacau

SEQ ID NO: 61761 - RNA, 22 nt, Artificial Sequence
  Synthetic
  misc_feature (2)..(2): n is a, c, g, or u
unaccuggaucgaagaauacau

SEQ ID NO: 61762 - RNA, 23 nt, Artificial Sequence
  Synthetic
  misc_feature (3)..(3): n is a, c, g, or u
aunaccuggaucgaagaauacau

SEQ ID NO: 61763 - RNA, 24 nt, Artificial Sequence
  Synthetic
  misc_feature (4)..(4): n is a, c, g, or u
aaunaccuggaucgaagaauacau

SEQ ID NO: 61764 - RNA, 18 nt, Artificial Sequence
  Synthetic
ccaccagcacgggaccau

SEQ ID NO: 61765 - RNA, 19 nt, Artificial Sequence
  Synthetic
accaccagcacgggaccau

SEQ ID NO: 61766 - RNA, 20 nt, Artificial Sequence
  Synthetic
gaccaccagcacgggaccau

SEQ ID NO: 61767 - RNA, 21 nt, Artificial Sequence
  Synthetic
cgaccaccagcacgggaccau

SEQ ID NO: 61768 - RNA, 22 nt, Artificial Sequence
  Synthetic
acgaccaccagcacgggaccau

SEQ ID NO: 61769 - RNA, 23 nt, Artificial Sequence
  Synthetic
  misc_feature (1)..(1): n is a, c, g, or u
nacgaccaccagcacgggaccau

SEQ ID NO: 61770 - RNA, 24 nt, Artificial Sequence
  Synthetic
  misc_feature (2)..(2): n is a, c, g, or u
cnacgaccaccagcacgggaccau

SEQ ID NO: 61771 - RNA, 18 nt, Artificial Sequence
  Synthetic
gaacaagagcuacagcau

SEQ ID NO: 61772 - RNA, 19 nt, Artificial Sequence
  Synthetic
ggaacaagagcuacagcau

SEQ ID NO: 61773 - RNA, 20 nt, Artificial Sequence
  Synthetic
gggaacaagagcuacagcau

SEQ ID NO: 61774 - RNA, 21 nt, Artificial Sequence
  Synthetic
ugggaacaagagcuacagcau

SEQ ID NO: 61775 - RNA, 22 nt, Artificial Sequence
  Synthetic
  misc_feature (1)..(1): n is a, c, g, or u
nugggaacaagagcuacagcau

SEQ ID NO: 61776 - RNA, 23 nt, Artificial Sequence
  Synthetic
  misc_feature (2)..(2): n is a, c, g, or u
cnugggaacaagagcuacagcau

SEQ ID NO: 61777 - RNA, 24 nt, Artificial Sequence
  Synthetic
  misc_feature (3)..(3): n is a, c, g, or u
ucnugggaacaagagcuacagcau

SEQ ID NO: 61778 - RNA, 18 nt, Artificial Sequence
  Synthetic
gccaaaucugugcagcau

SEQ ID NO: 61779 - RNA, 19 nt, Artificial Sequence
  Synthetic
ggccaaaucugugcagcau

SEQ ID NO: 61780 - RNA, 20 nt, Artificial Sequence
  Synthetic
gggccaaaucugugcagcau

SEQ ID NO: 61781 - RNA, 21 nt, Artificial Sequence
  Synthetic
ggggccaaaucugugcagcau

SEQ ID NO: 61782 - RNA, 22 nt, Artificial Sequence
  Synthetic
gggggccaaaucugugcagcau

SEQ ID NO: 61783 - RNA, 23 nt, Artificial Sequence
  Synthetic
ugggggccaaaucugugcagcau

SEQ ID NO: 61784 - RNA, 24 nt, Artificial Sequence
  Synthetic
uugggggccaaaucugugcagcau

SEQ ID NO: 61785 - RNA, 18 nt, Artificial Sequence
  Synthetic
caccucugcacgucgcau

SEQ ID NO: 61786 - RNA, 19 nt, Artificial Sequence
  Synthetic
ucaccucugcacgucgcau

SEQ ID NO: 61787 - RNA, 20 nt, Artificial Sequence
  Synthetic
uucaccucugcacgucgcau

SEQ ID NO: 61788 - RNA, 21 nt, Artificial Sequence
  Synthetic
cuucaccucugcacgucgcau

SEQ ID NO: 61789 - RNA, 22 nt, Artificial Sequence
  Synthetic
gcuucaccucugcacgucgcau

SEQ ID NO: 61790 - RNA, 23 nt, Artificial Sequence
  Synthetic
cgcuucaccucugcacgucgcau

SEQ ID NO: 61791 - RNA, 24 nt, Artificial Sequence
  Synthetic
ucgcuucaccucugcacgucgcau

SEQ ID NO: 61792 - RNA, 18 nt, Artificial Sequence
  Synthetic
  misc_feature (6)..(6): n is a, c, g, or u
  misc_feature (15)..(15): n is a, c, g, or u
ccuganauucauuuncau

SEQ ID NO: 61793 - RNA, 19 nt, Artificial Sequence
  Synthetic
  misc_feature (7)..(7): n is a, c, g, or u
  misc_feature (16)..(16): n is a, c, g, or u
uccuganauucauuuncau

SEQ ID NO: 61794 - RNA, 20 nt, Artificial Sequence
  Synthetic
  misc_feature (8)..(8): n is a, c, g, or u
  misc_feature (17)..(17): n is a, c, g, or u
uuccuganauucauuuncau

SEQ ID NO: 61795 - RNA, 21 nt, Artificial Sequence
  Synthetic
  misc_feature (9)..(9): n is a, c, g, or u
  misc_feature (18)..(18): n is a, c, g, or u
uuuccuganauucauuuncau

SEQ ID NO: 61796 - RNA, 22 nt, Artificial Sequence
  Synthetic
  misc_feature (10)..(10): n is a, c, g, or u
  misc_feature (19)..(19): n is a, c, g, or u
uuuuccuganauucauuuncau

SEQ ID NO: 61797 - RNA, 23 nt, Artificial Sequence
  Synthetic
  misc_feature (11)..(11): n is a, c, g, or u
  misc_feature (20)..(20): n is a, c, g, or u
cuuuuccuganauucauuuncau

SEQ ID NO: 61798 - RNA, 24 nt, Artificial Sequence
  Synthetic
  misc_feature (12)..(12): n is a, c, g, or u
  misc_feature (21)..(21): n is a, c, g, or u
ucuuuuccuganauucauuuncau

SEQ ID NO: 61799 - RNA, 18 nt, Artificial Sequence
  Synthetic
guauucccaucccaucau

SEQ ID NO: 61800 - RNA, 19 nt, Artificial Sequence
  Synthetic
uguauucccaucccaucau

SEQ ID NO: 61801 - RNA, 20 nt, Artificial Sequence
  Synthetic
  misc_feature (1)..(1): n is a, c, g, or u
nuguauucccaucccaucau

SEQ ID NO: 61802 - RNA, 21 nt, Artificial Sequence
  Synthetic
  misc_feature (2)..(2): n is a, c, g, or u
cnuguauucccaucccaucau

SEQ ID NO: 61803 - RNA, 22 nt, Artificial Sequence
  Synthetic
  misc_feature (3)..(3): n is a, c, g, or u
acnuguauucccaucccaucau

SEQ ID NO: 61804 - RNA, 23 nt, Artificial Sequence
  Synthetic
  misc_feature (4)..(4): n is a, c, g, or u
cacnuguauucccaucccaucau

SEQ ID NO: 61805 - RNA, 24 nt, Artificial Sequence
  Synthetic
  misc_feature (5)..(5): n is a, c, g, or u
gcacnuguauucccaucccaucau

SEQ ID NO: 61806 - RNA, 18 nt, Artificial Sequence
  Synthetic
  misc_feature (2)..(2): n is a, c, g, or u
  misc_feature (10)..(10): n is a, c, g, or u
anggucaaunaccuggau

SEQ ID NO: 61807 - RNA, 19 nt, Artificial Sequence
  Synthetic
  misc_feature (3)..(3): n is a, c, g, or u
  misc_feature (11)..(11): n is a, c, g, or u
ganggucaaunaccuggau

SEQ ID NO: 61808 - RNA, 20 nt, Artificial Sequence
  Synthetic
  misc_feature (4)..(4): n is a, c, g, or u
  misc_feature (12)..(12): n is a, c, g, or u
gganggucaaunaccuggau

SEQ ID NO: 61809 - RNA, 21 nt, Artificial Sequence
  Synthetic
  misc_feature (5)..(5): n is a, c, g, or u
  misc_feature (13)..(13): n is a, c, g, or u
agganggucaaunaccuggau

SEQ ID NO: 61810 - RNA, 22 nt, Artificial Sequence
  Synthetic
  misc_feature (6)..(6): n is a, c, g, or u
  misc_feature (14)..(14): n is a, c, g, or u
cagganggucaaunaccuggau

SEQ ID NO: 61811 - RNA, 23 nt, Artificial Sequence
  Synthetic
  misc_feature (7)..(7): n is a, c, g, or u
  misc_feature (15)..(15): n is a, c, g, or u
ucagganggucaaunaccuggau

SEQ ID NO: 61812 - RNA, 24 nt, Artificial Sequence
  Synthetic
  misc_feature (8)..(8): n is a, c, g, or u
  misc_feature (16)..(16): n is a, c, g, or u
uucagganggucaaunaccuggau

SEQ ID NO: 61813 - RNA, 18 nt, Artificial Sequence
  Synthetic
  misc_feature (9)..(9): n is a, c, g, or u
  misc_feature (15)..(15): n is a, c, g, or u
caccaggcncuguungau

SEQ ID NO: 61814 - RNA, 19 nt, Artificial Sequence
  Synthetic
  misc_feature (10)..(10): n is a, c, g, or u
  misc_feature (16)..(16): n is a, c, g, or u
ccaccaggcncuguungau

SEQ ID NO: 61815 - RNA, 20 nt, Artificial Sequence
  Synthetic
  misc_feature (11)..(11): n is a, c, g, or u
  misc_feature (17)..(17): n is a, c, g, or u
uccaccaggcncuguungau

SEQ ID NO: 61816 - RNA, 21 nt, Artificial Sequence
  Synthetic
  misc_feature (12)..(12): n is a, c, g, or u
  misc_feature (18)..(18): n is a, c, g, or u
uuccaccaggcncuguungau

SEQ ID NO: 61817 - RNA, 22 nt, Artificial Sequence
  Synthetic
  misc_feature (13)..(13): n is a, c, g, or u
  misc_feature (19)..(19): n is a, c, g, or u
guuccaccaggcncuguungau

SEQ ID NO: 61818 - RNA, 23 nt, Artificial Sequence
  Synthetic
  misc_feature (14)..(14): n is a, c, g, or u
  misc_feature (20)..(20): n is a, c, g, or u
aguuccaccaggcncuguungau

SEQ ID NO: 61819 - RNA, 24 nt, Artificial Sequence
  Synthetic
  misc_feature (15)..(15): n is a, c, g, or u
  misc_feature (21)..(21): n is a, c, g, or u
caguuccaccaggcncuguungau

SEQ ID NO: 61820 - RNA, 18 nt, Artificial Sequence
  Synthetic
  misc_feature (16)..(16): n is a, c, g, or u
gaaaguuugucaacgnau

SEQ ID NO: 61821 - RNA, 19 nt, Artificial Sequence
  Synthetic
  misc_feature (17)..(17): n is a, c, g, or u
ggaaaguuugucaacgnau

SEQ ID NO: 61822 - RNA, 20 nt, Artificial Sequence
  Synthetic
  misc_feature (18)..(18): n is a, c, g, or u
uggaaaguuugucaacgnau

SEQ ID NO: 61823 - RNA, 21 nt, Artificial Sequence
  Synthetic
  misc_feature (1)..(1): n is a, c, g, or u
  misc_feature (19)..(19): n is a, c, g, or u
nuggaaaguuugucaacgnau

SEQ ID NO: 61824 - RNA, 22 nt, Artificial Sequence
  Synthetic
  misc_feature (2)..(2): n is a, c, g, or u
  misc_feature (20)..(20): n is a, c, g, or u
anuggaaaguuugucaacgnau

SEQ ID NO: 61825 - RNA, 23 nt, Artificial Sequence
  Synthetic
  misc_feature (3)..(3): n is a, c, g, or u
  misc_feature (21)..(21): n is a, c, g, or u
ganuggaaaguuugucaacgnau

SEQ ID NO: 61826 - RNA, 24 nt, Artificial Sequence
  Synthetic
  misc_feature (4)..(4): n is a, c, g, or u
  misc_feature (22)..(22): n is a, c, g, or u
uganuggaaaguuugucaacgnau

SEQ ID NO: 61827 - RNA, 18 nt, Artificial Sequence
  Synthetic
  misc_feature (3)..(3): n is a, c, g, or u
  misc_feature (6)..(6): n is a, c, g, or u
  misc_feature (9)..(9): n is a, c, g, or u
  misc_feature (13)..(13): n is a, c, g, or u
aangcnggnauunuauau

SEQ ID NO: 61828 - RNA, 19 nt, Artificial Sequence
  Synthetic
  misc_feature (4)..(4): n is a, c, g, or u
  misc_feature (7)..(7): n is a, c, g, or u
  misc_feature (10)..(10): n is a, c, g, or u
  misc_feature (14)..(14): n is a, c, g, or u
gaangcnggnauunuauau

SEQ ID NO: 61829 - RNA, 20 nt, Artificial Sequence
  Synthetic
  misc_feature (5)..(5): n is a, c, g, or u
  misc_feature (8)..(8): n is a, c, g, or u
  misc_feature (11)..(11): n is a, c, g, or u
  misc_feature (15)..(15): n is a, c, g, or u
ggaangcnggnauunuauau

SEQ ID NO: 61830 - RNA, 21 nt, Artificial Sequence
  Synthetic
  misc_feature (6)..(6): n is a, c, g, or u
  misc_feature (9)..(9): n is a, c, g, or u
  misc_feature (12)..(12): n is a, c, g, or u
  misc_feature (16)..(16): n is a, c, g, or u
uggaangcnggnauunuauau

SEQ ID NO: 61831 - RNA, 22 nt, Artificial Sequence
  Synthetic
  misc_feature (7)..(7): n is a, c, g, or u
  misc_feature (10)..(10): n is a, c, g, or u
  misc_feature (13)..(13): n is a, c, g, or u
  misc_feature (17)..(17): n is a, c, g, or u
auggaangcnggnauunuauau

SEQ ID NO: 61832 - RNA, 23 nt, Artificial Sequence
  Synthetic
  misc_feature (8)..(8): n is a, c, g, or u
  misc_feature (11)..(11): n is a, c, g, or u
  misc_feature (14)..(14): n is a, c, g, or u
  misc_feature (18)..(18): n is a, c, g, or u
uauggaangcnggnauunuauau

SEQ ID NO: 61833 - RNA, 24 nt, Artificial Sequence
  Synthetic
  misc_feature (9)..(9): n is a, c, g, or u
  misc_feature (12)..(12): n is a, c, g, or u
  misc_feature (15)..(15): n is a, c, g, or u
  misc_feature (19)..(19): n is a, c, g, or u
uuauggaangcnggnauunuauau

SEQ ID NO: 61834 - RNA, 18 nt, Artificial Sequence
  Synthetic
  misc_feature (3)..(4): n is a, c, g, or u
  misc_feature (9)..(9): n is a, c, g, or u
gannuagunguuaacuau

SEQ ID NO: 61835 - RNA, 19 nt, Artificial Sequence
  Synthetic
  misc_feature (4)..(5): n is a, c, g, or u
  misc_feature (10)..(10): n is a, c, g, or u
ggannuagunguuaacuau

SEQ ID NO: 61836 - RNA, 20 nt, Artificial Sequence
  Synthetic
  misc_feature (5)..(6): n is a, c, g, or u
  misc_feature (11)..(11): n is a, c, g, or u
gggannuagunguuaacuau

SEQ ID NO: 61837 - RNA, 21 nt, Artificial Sequence
  Synthetic
  misc_feature (6)..(7): n is a, c, g, or u
  misc_feature (12)..(12): n is a, c, g, or u
agggannuagunguuaacuau

SEQ ID NO: 61838 - RNA, 22 nt, Artificial Sequence
  Synthetic
  misc_feature (1)..(1): n is a, c, g, or u
  misc_feature (7)..(8): n is a, c, g, or u
  misc_feature (13)..(13): n is a, c, g, or u
nagggannuagunguuaacuau

SEQ ID NO: 61839 - RNA, 23 nt, Artificial Sequence
  Synthetic
  misc_feature (2)..(2): n is a, c, g, or u
  misc_feature (8)..(9): n is a, c, g, or u
  misc_feature (14)..(14): n is a, c, g, or u
cnagggannuagunguuaacuau

SEQ ID NO: 61840 - RNA, 24 nt, Artificial Sequence
  Synthetic
  misc_feature (3)..(3): n is a, c, g, or u
  misc_feature (9)..(10): n is a, c, g, or u
  misc_feature (15)..(15): n is a, c, g, or u
gcnagggannuagunguuaacuau

SEQ ID NO: 61841 - RNA, 18 nt, Artificial Sequence
  Synthetic
auauggaugaucugguau

SEQ ID NO: 61842 - RNA, 19 nt, Artificial Sequence
  Synthetic
uauauggaugaucugguau

SEQ ID NO: 61843 - RNA, 20 nt, Artificial Sequence
  Synthetic
uuauauggaugaucugguau

SEQ ID NO: 61844 - RNA, 21 nt, Artificial Sequence
  Synthetic
guuauauggaugaucugguau

SEQ ID NO: 61845 - RNA, 22 nt, Artificial Sequence
  Synthetic
aguuauauggaugaucugguau

SEQ ID NO: 61846 - RNA, 23 nt, Artificial Sequence
  Synthetic
uaguuauauggaugaucugguau

SEQ ID NO: 61847 - RNA, 24 nt, Artificial Sequence
  Synthetic
uuaguuauauggaugaucugguau

SEQ ID NO: 61848 - RNA, 18 nt, Artificial Sequence
  Synthetic
  misc_feature (5)..(5): n is a, c, g, or u
  misc_feature (8)..(8): n is a, c, g, or u
  misc_feature (11)..(11): n is a, c, g, or u
  misc_feature (15)..(15): n is a, c, g, or u
ggaangcnggnauunuau

SEQ ID NO: 61849 - RNA, 19 nt, Artificial Sequence
  Synthetic
  misc_feature (6)..(6): n is a, c, g, or u
  misc_feature (9)..(9): n is a, c, g, or u
  misc_feature (12)..(12): n is a, c, g, or u
  misc_feature (16)..(16): n is a, c, g, or u
uggaangcnggnauunuau

SEQ ID NO: 61850 - RNA, 20 nt, Artificial Sequence
  Synthetic
  misc_feature (7)..(7): n is a, c, g, or u
  misc_feature (10)..(10): n is a, c, g, or u
  misc_feature (13)..(13): n is a, c, g, or u
  misc_feature (17)..(17): n is a, c, g, or u
auggaangcnggnauunuau

SEQ ID NO: 61851 - RNA, 21 nt, Artificial Sequence
  Synthetic
  misc_feature (8)..(8): n is a, c, g, or u
  misc_feature (11)..(11): n is a, c, g, or u
  misc_feature (14)..(14): n is a, c, g, or u
  misc_feature (18)..(18): n is a, c, g, or u
uauggaangcnggnauunuau

SEQ ID NO: 61852 - RNA, 22 nt, Artificial Sequence
  Synthetic
  misc_feature (9)..(9): n is a, c, g, or u
  misc_feature (12)..(12): n is a, c, g, or u
  misc_feature (15)..(15): n is a, c, g, or u
  misc_feature (19)..(19): n is a, c, g, or u
uuauggaangcnggnauunuau

SEQ ID NO: 61853 - RNA, 23 nt, Artificial Sequence
  Synthetic
  misc_feature (10)..(10): n is a, c, g, or u
  misc_feature (13)..(13): n is a, c, g, or u
  misc_feature (16)..(16): n is a, c, g, or u
  misc_feature (20)..(20): n is a, c, g, or u
uuuauggaangcnggnauunuau

SEQ ID NO: 61854 - RNA, 24 nt, Artificial Sequence
  Synthetic
  misc_feature (11)..(11): n is a, c, g, or u
  misc_feature (14)..(14): n is a, c, g, or u
  misc_feature (17)..(17): n is a, c, g, or u
  misc_feature (21)..(21): n is a, c, g, or u
cuuuauggaangcnggnauunuau

SEQ ID NO: 61855 - RNA, 18 nt, Artificial Sequence
  Synthetic
  misc_feature (1)..(1): n is a, c, g, or u
  misc_feature (3)..(3): n is a, c, g, or u
  misc_feature (5)..(6): n is a, c, g, or u
nangnnguuaaucauuau

SEQ ID NO: 61856 - RNA, 19 nt, Artificial Sequence
  Synthetic
  misc_feature (1)..(2): n is a, c, g, or u
  misc_feature (4)..(4): n is a, c, g, or u
  misc_feature (6)..(7): n is a, c, g, or u
nnangnnguuaaucauuau

SEQ ID NO: 61857 - RNA, 20 nt, Artificial Sequence
  Synthetic
  misc_feature (2)..(3): n is a, c, g, or u
  misc_feature (5)..(5): n is a, c, g, or u
  misc_feature (7)..(8): n is a, c, g, or u
annangnnguuaaucauuau

SEQ ID NO: 61858 - RNA, 21 nt, Artificial Sequence
  Synthetic
  misc_feature (3)..(4): n is a, c, g, or u
  misc_feature (6)..(6): n is a, c, g, or u
  misc_feature (8)..(9): n is a, c, g, or u
gannangnnguuaaucauuau

SEQ ID NO: 61859 - RNA, 22 nt, Artificial Sequence
  Synthetic
  misc_feature (4)..(5): n is a, c, g, or u
  misc_feature (7)..(7): n is a, c, g, or u
  misc_feature (9)..(10): n is a, c, g, or u
ugannangnnguuaaucauuau

SEQ ID NO: 61860 - RNA, 23 nt, Artificial Sequence
  Synthetic
  misc_feature (5)..(6): n is a, c, g, or u
  misc_feature (8)..(8): n is a, c, g, or u
  misc_feature (10)..(11): n is a, c, g, or u
cugannangnnguuaaucauuau

SEQ ID NO: 61861 - RNA, 24 nt, Artificial Sequence
  Synthetic
  misc_feature (6)..(7): n is a, c, g, or u
  misc_feature (9)..(9): n is a, c, g, or u
  misc_feature (11)..(12): n is a, c, g, or u
ccugannangnnguuaaucauuau

SEQ ID NO: 61862 - RNA, 18 nt, Artificial Sequence
  Synthetic
  misc_feature (3)..(3): n is a, c, g, or u
  misc_feature (12)..(12): n is a, c, g, or u
ggnauuaaaccnuauuau

SEQ ID NO: 61863 - RNA, 19 nt, Artificial Sequence
  Synthetic
  misc_feature (1)..(1): n is a, c, g, or u
  misc_feature (4)..(4): n is a, c, g, or u
  misc_feature (13)..(13): n is a, c, g, or u
nggnauuaaaccnuauuau

SEQ ID NO: 61864 - RNA, 20 nt, Artificial Sequence
  Synthetic
  misc_feature (2)..(2): n is a, c, g, or u
  misc_feature (5)..(5): n is a, c, g, or u
  misc_feature (14)..(14): n is a, c, g, or u
anggnauuaaaccnuauuau

SEQ ID NO: 61865 - RNA, 21 nt, Artificial Sequence
  Synthetic
  misc_feature (3)..(3): n is a, c, g, or u
  misc_feature (6)..(6): n is a, c, g, or u
  misc_feature (15)..(15): n is a, c, g, or u
aanggnauuaaaccnuauuau

SEQ ID NO: 61866 - RNA, 22 nt, Artificial Sequence
  Synthetic
  misc_feature (1)..(1): n is a, c, g, or u
  misc_feature (4)..(4): n is a, c, g, or u
  misc_feature (7)..(7): n is a, c, g, or u
  misc_feature (16)..(16): n is a, c, g, or u
naanggnauuaaaccnuauuau

SEQ ID NO: 61867 - RNA, 23 nt, Artificial Sequence
  Synthetic
  misc_feature (2)..(2): n is a, c, g, or u
  misc_feature (5)..(5): n is a, c, g, or u
  misc_feature (8)..(8): n is a, c, g, or u
  misc_feature (17)..(17): n is a, c, g, or u
anaanggnauuaaaccnuauuau

SEQ ID NO: 61868 - RNA, 24 nt, Artificial Sequence
  Synthetic
  misc_feature (3)..(3): n is a, c, g, or u
  misc_feature (6)..(6): n is a, c, g, or u
  misc_feature (9)..(9): n is a, c, g, or u
  misc_feature (18)..(18): n is a, c, g, or u
ganaanggnauuaaaccnuauuau

SEQ ID NO: 61869 - RNA, 18 nt, Artificial Sequence
  Synthetic
auggacauugacccuuau

SEQ ID NO: 61870 - RNA, 19 nt, Artificial Sequence
  Synthetic
cauggacauugacccuuau

SEQ ID NO: 61871 - RNA, 20 nt, Artificial Sequence
  Synthetic
gcauggacauugacccuuau

SEQ ID NO: 61872 - RNA, 21 nt, Artificial Sequence
  Synthetic
ggcauggacauugacccuuau

SEQ ID NO: 61873 - RNA, 22 nt, Artificial Sequence
  Synthetic
gggcauggacauugacccuuau

SEQ ID NO: 61874 - RNA, 23 nt, Artificial Sequence
  Synthetic
ggggcauggacauugacccuuau

SEQ ID NO: 61875 - RNA, 24 nt, Artificial Sequence
  Synthetic
uggggcauggacauugacccuuau

SEQ ID NO: 61876 - RNA, 18 nt, Artificial Sequence
  Synthetic
uuugucuuuucgccaacu

SEQ ID NO: 61877 - RNA, 19 nt, Artificial Sequence
  Synthetic
uuuugucuuuucgccaacu

SEQ ID NO: 61878 - RNA, 20 nt, Artificial Sequence
  Synthetic
cuuuugucuuuucgccaacu

SEQ ID NO: 61879 - RNA, 21 nt, Artificial Sequence
  Synthetic
gcuuuugucuuuucgccaacu

SEQ ID NO: 61880 - RNA, 22 nt, Artificial Sequence
  Synthetic
ggcuuuugucuuuucgccaacu

SEQ ID NO: 61881 - RNA, 23 nt, Artificial Sequence
  Synthetic
aggcuuuugucuuuucgccaacu

SEQ ID NO: 61882 - RNA, 24 nt, Artificial Sequence
  Synthetic
caggcuuuugucuuuucgccaacu

SEQ ID NO: 61883 - RNA, 18 nt, Artificial Sequence
  Synthetic
  misc_feature (8)..(8): n is a, c, g, or u
cccuaucnuauccacacu

SEQ ID NO: 61884 - RNA, 19 nt, Artificial Sequence
  Synthetic
  misc_feature (9)..(9): n is a, c, g, or u
ccccuaucnuauccacacu

SEQ ID NO: 61885 - RNA, 20 nt, Artificial Sequence
  Synthetic
  misc_feature (10)..(10): n is a, c, g, or u
gccccuaucnuauccacacu

SEQ ID NO: 61886 - RNA, 21 nt, Artificial Sequence
  Synthetic
  misc_feature (11)..(11): n is a, c, g, or u
ugccccuaucnuauccacacu

SEQ ID NO: 61887 - RNA, 22 nt, Artificial Sequence
  Synthetic
  misc_feature (12)..(12): n is a, c, g, or u
augccccuaucnuauccacacu

SEQ ID NO: 61888 - RNA, 23 nt, Artificial Sequence
  Synthetic
  misc_feature (13)..(13): n is a, c, g, or u
aaugccccuaucnuauccacacu

SEQ ID NO: 61889 - RNA, 24 nt, Artificial Sequence
  Synthetic
  misc_feature (14)..(14): n is a, c, g, or u
aaaugccccuaucnuauccacacu

SEQ ID NO: 61890 - RNA, 18 nt, Artificial Sequence
  Synthetic
  misc_feature (11)..(11): n is a, c, g, or u
ucaaucuucungaagacu

SEQ ID NO: 61891 - RNA, 19 nt, Artificial Sequence
  Synthetic
  misc_feature (12)..(12): n is a, c, g, or u
aucaaucuucungaagacu

SEQ ID NO: 61892 - RNA, 20 nt, Artificial Sequence
  Synthetic
  misc_feature (13)..(13): n is a, c, g, or u
caucaaucuucungaagacu

SEQ ID NO: 61893 - RNA, 21 nt, Artificial Sequence
  Synthetic
  misc_feature (14)..(14): n is a, c, g, or u
ucaucaaucuucungaagacu

SEQ ID NO: 61894 - RNA, 22 nt, Artificial Sequence
  Synthetic
  misc_feature (15)..(15): n is a, c, g, or u
aucaucaaucuucungaagacu

SEQ ID NO: 61895 - RNA, 23 nt, Artificial Sequence
  Synthetic
  misc_feature (16)..(16): n is a, c, g, or u
caucaucaaucuucungaagacu

SEQ ID NO: 61896 - RNA, 24 nt, Artificial Sequence
  Synthetic
  misc_feature (17)..(17): n is a, c, g, or u
acaucaucaaucuucungaagacu

SEQ ID NO: 61897 - RNA, 18 nt, Artificial Sequence
  Synthetic
caacaucacaucaggacu

SEQ ID NO: 61898 - RNA, 19 nt, Artificial Sequence
  Synthetic
acaacaucacaucaggacu

SEQ ID NO: 61899 - RNA, 20 nt, Artificial Sequence
  Synthetic
gacaacaucacaucaggacu

SEQ ID NO: 61900 - RNA, 21 nt, Artificial Sequence
  Synthetic
ggacaacaucacaucaggacu

SEQ ID NO: 61901 - RNA, 22 nt, Artificial Sequence
  Synthetic
uggacaacaucacaucaggacu

SEQ ID NO: 61902 - RNA, 23 nt, Artificial Sequence
  Synthetic
auggacaacaucacaucaggacu

SEQ ID NO: 61903 - RNA, 24 nt, Artificial Sequence
  Synthetic
cauggacaacaucacaucaggacu

SEQ ID NO: 61904 - RNA, 18 nt, Artificial Sequence
  Synthetic
  misc_feature (12)..(13): n is a, c, g, or u
gucuuacauaannggacu

SEQ ID NO: 61905 - RNA, 19 nt, Artificial Sequence
  Synthetic
  misc_feature (13)..(14): n is a, c, g, or u
agucuuacauaannggacu

SEQ ID NO: 61906 - RNA, 20 nt, Artificial Sequence
  Synthetic
  misc_feature (14)..(15): n is a, c, g, or u
cagucuuacauaannggacu

SEQ ID NO: 61907 - RNA, 21 nt, Artificial Sequence
  Synthetic
  misc_feature (15)..(16): n is a, c, g, or u
acagucuuacauaannggacu

SEQ ID NO: 61908 - RNA, 22 nt, Artificial Sequence
  Synthetic
  misc_feature (16)..(17): n is a, c, g, or u
aacagucuuacauaannggacu

SEQ ID NO: 61909 - RNA, 23 nt, Artificial Sequence
  Synthetic
  misc_feature (17)..(18): n is a, c, g, or u
caacagucuuacauaannggacu

SEQ ID NO: 61910 - RNA, 24 nt, Artificial Sequence
  Synthetic
  misc_feature (18)..(19): n is a, c, g, or u
ccaacagucuuacauaannggacu

SEQ ID NO: 61911 - RNA, 18 nt, Artificial Sequence
  Synthetic
uguugguucuucuggacu

SEQ ID NO: 61912 - RNA, 19 nt, Artificial Sequence
  Synthetic
uuguugguucuucuggacu

SEQ ID NO: 61913 - RNA, 20 nt, Artificial Sequence
  Synthetic
cuuguugguucuucuggacu

SEQ ID NO: 61914 - RNA, 21 nt, Artificial Sequence
  Synthetic
ucuuguugguucuucuggacu

SEQ ID NO: 61915 - RNA, 22 nt, Artificial Sequence
  Synthetic
uucuuguugguucuucuggacu

SEQ ID NO: 61916 - RNA, 23 nt, Artificial Sequence
  Synthetic
cuucuuguugguucuucuggacu

SEQ ID NO: 61917 - RNA, 24 nt, Artificial Sequence
  Synthetic
ucuucuuguugguucuucuggacu

SEQ ID NO: 61918 - RNA, 18 nt, Artificial Sequence
  Synthetic
guuaguauuccuuggacu

SEQ ID NO: 61919 - RNA, 19 nt, Artificial Sequence
  Synthetic
uguuaguauuccuuggacu

SEQ ID NO: 61920 - RNA, 20 nt, Artificial Sequence
  Synthetic
auguuaguauuccuuggacu

SEQ ID NO: 61921 - RNA, 21 nt, Artificial Sequence
  Synthetic
aauguuaguauuccuuggacu

SEQ ID NO: 61922 - RNA, 22 nt, Artificial Sequence
  Synthetic
caauguuaguauuccuuggacu

SEQ ID NO: 61923 - RNA, 23 nt, Artificial Sequence
  Synthetic
ccaauguuaguauuccuuggacu

SEQ ID NO: 61924 - RNA, 24 nt, Artificial Sequence
  Synthetic
cccaauguuaguauuccuuggacu

SEQ ID NO: 61925 - RNA, 18 nt, Artificial Sequence
  Synthetic
  misc_feature (4)..(5): n is a, c, g, or u
  misc_feature (11)..(11): n is a, c, g, or u
uaannggacunuuggacu

SEQ ID NO: 61926 - RNA, 19 nt, Artificial Sequence
  Synthetic
  misc_feature (5)..(6): n is a, c, g, or u
  misc_feature (12)..(12): n is a, c, g, or u
auaannggacunuuggacu

SEQ ID NO: 61927 - RNA, 20 nt, Artificial Sequence
  Synthetic
  misc_feature (6)..(7): n is a, c, g, or u
  misc_feature (13)..(13): n is a, c, g, or u
cauaannggacunuuggacu

SEQ ID NO: 61928 - RNA, 21 nt, Artificial Sequence
  Synthetic
  misc_feature (7)..(8): n is a, c, g, or u
  misc_feature (14)..(14): n is a, c, g, or u
acauaannggacunuuggacu

SEQ ID NO: 61929 - RNA, 22 nt, Artificial Sequence
  Synthetic
  misc_feature (8)..(9): n is a, c, g, or u
  misc_feature (15)..(15): n is a, c, g, or u
uacauaannggacunuuggacu

SEQ ID NO: 61930 - RNA, 23 nt, Artificial Sequence
  Synthetic
  misc_feature (9)..(10): n is a, c, g, or u
  misc_feature (16)..(16): n is a, c, g, or u
uuacauaannggacunuuggacu

SEQ ID NO: 61931 - RNA, 24 nt, Artificial Sequence
  Synthetic
  misc_feature (10)..(11): n is a, c, g, or u
  misc_feature (17)..(17): n is a, c, g, or u
cuuacauaannggacunuuggacu

SEQ ID NO: 61932 - RNA, 18 nt, Artificial Sequence
  Synthetic
  misc_feature (14)..(14): n is a, c, g, or u
acuguguauuuaangacu

SEQ ID NO: 61933 - RNA, 19 nt, Artificial Sequence
  Synthetic
  misc_feature (15)..(15): n is a, c, g, or u
gacuguguauuuaangacu

SEQ ID NO: 61934 - RNA, 20 nt, Artificial Sequence
  Synthetic
  misc_feature (16)..(16): n is a, c, g, or u
agacuguguauuuaangacu

SEQ ID NO: 61935 - RNA, 21 nt, Artificial Sequence
  Synthetic
  misc_feature (17)..(17): n is a, c, g, or u
aagacuguguauuuaangacu

SEQ ID NO: 61936 - RNA, 22 nt, Artificial Sequence
  Synthetic
  misc_feature (18)..(18): n is a, c, g, or u
aaagacuguguauuuaangacu

SEQ ID NO: 61937 - RNA, 23 nt, Artificial Sequence
  Synthetic
  misc_feature (19)..(19): n is a, c, g, or u
caaagacuguguauuuaangacu

SEQ ID NO: 61938 - RNA, 24 nt, Artificial Sequence
  Synthetic
  misc_feature (20)..(20): n is a, c, g, or u
ucaaagacuguguauuuaangacu

SEQ ID NO: 61939 - RNA, 18 nt, Artificial Sequence
  Synthetic
  misc_feature (7)..(7): n is a, c, g, or u
  misc_feature (15)..(15): n is a, c, g, or u
cuguaunccuguaunacu

SEQ ID NO: 61940 - RNA, 19 nt, Artificial Sequence
  Synthetic
  misc_feature (8)..(8): n is a, c, g, or u
  misc_feature (16)..(16): n is a, c, g, or u
ucuguaunccuguaunacu

SEQ ID NO: 61941 - RNA, 20 nt, Artificial Sequence
  Synthetic
  misc_feature (9)..(9): n is a, c, g, or u
  misc_feature (17)..(17): n is a, c, g, or u
cucuguaunccuguaunacu

SEQ ID NO: 61942 - RNA, 21 nt, Artificial Sequence
  Synthetic
  misc_feature (10)..(10): n is a, c, g, or u
  misc_feature (18)..(18): n is a, c, g, or u
ccucuguaunccuguaunacu

SEQ ID NO: 61943 - RNA, 22 nt, Artificial Sequence
  Synthetic
  misc_feature (11)..(11): n is a, c, g, or u
  misc_feature (19)..(19): n is a, c, g, or u
gccucuguaunccuguaunacu

SEQ ID NO: 61944 - RNA, 23 nt, Artificial Sequence
  Synthetic
  misc_feature (12)..(12): n is a, c, g, or u
  misc_feature (20)..(20): n is a, c, g, or u
ugccucuguaunccuguaunacu

SEQ ID NO: 61945 - RNA, 24 nt, Artificial Sequence
  Synthetic
  misc_feature (13)..(13): n is a, c, g, or u
  misc_feature (21)..(21): n is a, c, g, or u
augccucuguaunccuguaunacu

SEQ ID NO: 61946 - RNA, 18 nt, Artificial Sequence
  Synthetic
ccucugccgauccauacu

SEQ ID NO: 61947 - RNA, 19 nt, Artificial Sequence
  Synthetic
uccucugccgauccauacu

SEQ ID NO: 61948 - RNA, 20 nt, Artificial Sequence
  Synthetic
cuccucugccgauccauacu

SEQ ID NO: 61949 - RNA, 21 nt, Artificial Sequence
  Synthetic
gcuccucugccgauccauacu

SEQ ID NO: 61950 - RNA, 22 nt, Artificial Sequence
  Synthetic
ggcuccucugccgauccauacu

SEQ ID NO: 61951 - RNA, 23 nt, Artificial Sequence
  Synthetic
uggcuccucugccgauccauacu

SEQ ID NO: 61952 - RNA, 24 nt, Artificial Sequence
  Synthetic
guggcuccucugccgauccauacu

SEQ ID NO: 61953 - RNA, 18 nt, Artificial Sequence
  Synthetic
cacauuuccugccuuacu

SEQ ID NO: 61954 - RNA, 19 nt, Artificial Sequence
  Synthetic
ucacauuuccugccuuacu

SEQ ID NO: 61955 - RNA, 20 nt, Artificial Sequence
  Synthetic
uucacauuuccugccuuacu

SEQ ID NO: 61956 - RNA, 21 nt, Artificial Sequence
  Synthetic
uuucacauuuccugccuuacu

SEQ ID NO: 61957 - RNA, 22 nt, Artificial Sequence
  Synthetic
guuucacauuuccugccuuacu

SEQ ID NO: 61958 - RNA, 23 nt, Artificial Sequence
  Synthetic
gguuucacauuuccugccuuacu

SEQ ID NO: 61959 - RNA, 24 nt, Artificial Sequence
  Synthetic
ugguuucacauuuccugccuuacu

SEQ ID NO: 61960 - RNA, 18 nt, Artificial Sequence
  Synthetic
accccagucucuccaccu

SEQ ID NO: 61961 - RNA, 19 nt, Artificial Sequence
  Synthetic
aaccccagucucuccaccu

SEQ ID NO: 61962 - RNA, 20 nt, Artificial Sequence
  Synthetic
caaccccagucucuccaccu

SEQ ID NO: 61963 - RNA, 21 nt, Artificial Sequence
  Synthetic
ccaaccccagucucuccaccu

SEQ ID NO: 61964 - RNA, 22 nt, Artificial Sequence
  Synthetic
  misc_feature (1)..(1): n is a, c, g, or u
nccaaccccagucucuccaccu

SEQ ID NO: 61965 - RNA, 23 nt, Artificial Sequence
  Synthetic
  misc_feature (2)..(2): n is a, c, g, or u
anccaaccccagucucuccaccu

SEQ ID NO: 61966 - RNA, 24 nt, Artificial Sequence
  Synthetic
  misc_feature (3)..(3): n is a, c, g, or u
aanccaaccccagucucuccaccu

SEQ ID NO: 61967 - RNA, 18 nt, Artificial Sequence
  Synthetic
ggcuuuaggaaaauaccu

SEQ ID NO: 61968 - RNA, 19 nt, Artificial Sequence
  Synthetic
gggcuuuaggaaaauaccu

SEQ ID NO: 61969 - RNA, 20 nt, Artificial Sequence
  Synthetic
ugggcuuuaggaaaauaccu

SEQ ID NO: 61970 - RNA, 21 nt, Artificial Sequence
  Synthetic
  misc_feature (1)..(1): n is a, c, g, or u
nugggcuuuaggaaaauaccu

SEQ ID NO: 61971 - RNA, 22 nt, Artificial Sequence
  Synthetic
  misc_feature (2)..(2): n is a, c, g, or u
cnugggcuuuaggaaaauaccu

SEQ ID NO: 61972 - RNA, 23 nt, Artificial Sequence
  Synthetic
  misc_feature (3)..(3): n is a, c, g, or u
ucnugggcuuuaggaaaauaccu

SEQ ID NO: 61973 - RNA, 24 nt, Artificial Sequence
  Synthetic
  misc_feature (4)..(4): n is a, c, g, or u
aucnugggcuuuaggaaaauaccu

SEQ ID NO: 61974 - RNA, 18 nt, Artificial Sequence
  Synthetic
ggcauggacauugacccu

SEQ ID NO: 61975 - RNA, 19 nt, Artificial Sequence
  Synthetic
gggcauggacauugacccu

SEQ ID NO: 61976 - RNA, 20 nt, Artificial Sequence
  Synthetic
ggggcauggacauugacccu

SEQ ID NO: 61977 - RNA, 21 nt, Artificial Sequence
  Synthetic
uggggcauggacauugacccu

SEQ ID NO: 61978 - RNA, 22 nt, Artificial Sequence
  Synthetic
uuggggcauggacauugacccu

SEQ ID NO: 61979 - RNA, 23 nt, Artificial Sequence
  Synthetic
uuuggggcauggacauugacccu

SEQ ID NO: 61980 - RNA, 24 nt, Artificial Sequence
  Synthetic
cuuuggggcauggacauugacccu

SEQ ID NO: 61981 - RNA, 18 nt, Artificial Sequence
  Synthetic
cgacgaggcagguccccu

SEQ ID NO: 61982 - RNA, 19 nt, Artificial Sequence
  Synthetic
acgacgaggcagguccccu

SEQ ID NO: 61983 - RNA, 20 nt, Artificial Sequence
  Synthetic
gacgacgaggcagguccccu

SEQ ID NO: 61984 - RNA, 18 nt, Artificial Sequence
  Synthetic
  misc_feature (5)..(5): n is a, c, g, or u
  misc_feature (14)..(14): n is a, c, g, or u
auccngcggacgancccu

SEQ ID NO: 61985 - RNA, 19 nt, Artificial Sequence
  Synthetic
  misc_feature (6)..(6): n is a, c, g, or u
  misc_feature (15)..(15): n is a, c, g, or u
aauccngcggacgancccu

SEQ ID NO: 61986 - RNA, 20 nt, Artificial Sequence
  Synthetic
  misc_feature (7)..(7): n is a, c, g, or u
  misc_feature (16)..(16): n is a, c, g, or u
gaauccngcggacgancccu

SEQ ID NO: 61987 - RNA, 21 nt, Artificial Sequence
  Synthetic
  misc_feature (8)..(8): n is a, c, g, or u
  misc_feature (17)..(17): n is a, c, g, or u
ugaauccngcggacgancccu

SEQ ID NO: 61988 - RNA, 22 nt, Artificial Sequence
  Synthetic
  misc_feature (9)..(9): n is a, c, g, or u
  misc_feature (18)..(18): n is a, c, g, or u
cugaauccngcggacgancccu

SEQ ID NO: 61989 - RNA, 23 nt, Artificial Sequence
  Synthetic
  misc_feature (10)..(10): n is a, c, g, or u
  misc_feature (19)..(19): n is a, c, g, or u
gcugaauccngcggacgancccu

SEQ ID NO: 61990 - RNA, 24 nt, Artificial Sequence
  Synthetic
  misc_feature (11)..(11): n is a, c, g, or u
  misc_feature (20)..(20): n is a, c, g, or u
cgcugaauccngcggacgancccu

SEQ ID NO: 61991 - RNA, 18 nt, Artificial Sequence
  Synthetic
  misc_feature (5)..(5): n is a, c, g, or u
guccnacuguucaagccu

SEQ ID NO: 61992 - RNA, 19 nt, Artificial Sequence
  Synthetic
  misc_feature (6)..(6): n is a, c, g, or u
uguccnacuguucaagccu

SEQ ID NO: 61993 - RNA, 20 nt, Artificial Sequence
  Synthetic
  misc_feature (7)..(7): n is a, c, g, or u
auguccnacuguucaagccu

SEQ ID NO: 61994 - RNA, 21 nt, Artificial Sequence
  Synthetic
  misc_feature (8)..(8): n is a, c, g, or u
cauguccnacuguucaagccu

SEQ ID NO: 61995 - RNA, 22 nt, Artificial Sequence
  Synthetic
  misc_feature (9)..(9): n is a, c, g, or u
ucauguccnacuguucaagccu

SEQ ID NO: 61996 - RNA, 23 nt, Artificial Sequence
  Synthetic
  misc_feature (10)..(10): n is a, c, g, or u
uucauguccnacuguucaagccu

SEQ ID NO: 61997 - RNA, 24 nt, Artificial Sequence
  Synthetic
  misc_feature (11)..(11): n is a, c, g, or u
guucauguccnacuguucaagccu

SEQ ID NO: 61998 - RNA, 18 nt, Artificial Sequence
  Synthetic
agaagaacucccucgccu

SEQ ID NO: 61999 - RNA, 19 nt, Artificial Sequence
  Synthetic
aagaagaacucccucgccu

SEQ ID NO: 62000 - RNA, 20 nt, Artificial Sequence
  Synthetic
gaagaagaacucccucgccu

SEQ ID NO: 62001 - RNA, 21 nt, Artificial Sequence
  Synthetic
  misc_feature (1)..(1): n is a, c, g, or u
ngaagaagaacucccucgccu

SEQ ID NO: 62002 - RNA, 22 nt, Artificial Sequence
  Synthetic
  misc_feature (2)..(2): n is a, c, g, or u
ungaagaagaacucccucgccu

SEQ ID NO: 62003 - RNA, 23 nt, Artificial Sequence
  Synthetic
  misc_feature (3)..(3): n is a, c, g, or u
cungaagaagaacucccucgccu

SEQ ID NO: 62004 - RNA, 24 nt, Artificial Sequence
  Synthetic
  misc_feature (4)..(4): n is a, c, g, or u
ccungaagaagaacucccucgccu

SEQ ID NO: 62005 - RNA, 18 nt, Artificial Sequence
  Synthetic
acccccacacgguggccu

SEQ ID NO: 62006 - RNA, 19 nt, Artificial Sequence
  Synthetic
cacccccacacgguggccu

SEQ ID NO: 62007 - RNA, 20 nt, Artificial Sequence
  Synthetic
acacccccacacgguggccu

SEQ ID NO: 62008 - RNA, 21 nt, Artificial Sequence
  Synthetic
cacacccccacacgguggccu

SEQ ID NO: 62009 - RNA, 22 nt, Artificial Sequence
  Synthetic
ucacacccccacacgguggccu

SEQ ID NO: 62010 - RNA, 23 nt, Artificial Sequence
  Synthetic
uucacacccccacacgguggccu

SEQ ID NO: 62011 - RNA, 24 nt, Artificial Sequence
  Synthetic
guucacacccccacacgguggccu

SEQ ID NO: 62012 - RNA, 18 nt, Artificial Sequence
  Synthetic
  misc_feature (3)..(3): n is a, c, g, or u
uuncucucuuuuuugccu

SEQ ID NO: 62013 - RNA, 19 nt, Artificial Sequence
  Synthetic
  misc_feature (4)..(4): n is a, c, g, or u
auuncucucuuuuuugccu

SEQ ID NO: 62014 - RNA, 20 nt, Artificial Sequence
  Synthetic
  misc_feature (5)..(5): n is a, c, g, or u
aauuncucucuuuuuugccu

SEQ ID NO: 62015 - RNA, 21 nt, Artificial Sequence
  Synthetic
  misc_feature (6)..(6): n is a, c, g, or u
gaauuncucucuuuuuugccu

SEQ ID NO: 62016 - RNA, 22 nt, Artificial Sequence
  Synthetic
  misc_feature (7)..(7): n is a, c, g, or u
ggaauuncucucuuuuuugccu

SEQ ID NO: 62017 - RNA, 23 nt, Artificial Sequence
  Synthetic
  misc_feature (8)..(8): n is a, c, g, or u
uggaauuncucucuuuuuugccu

SEQ ID NO: 62018 - RNA, 24 nt, Artificial Sequence
  Synthetic
  misc_feature (9)..(9): n is a, c, g, or u
guggaauuncucucuuuuuugccu

SEQ ID NO: 62019 - RNA, 18 nt, Artificial Sequence
  Synthetic
ccauacugcggaacuccu

SEQ ID NO: 62020 - RNA, 19 nt, Artificial Sequence
  Synthetic
uccauacugcggaacuccu

SEQ ID NO: 62021 - RNA, 20 nt, Artificial Sequence
  Synthetic
auccauacugcggaacuccu

SEQ ID NO: 62022 - RNA, 21 nt, Artificial Sequence
  Synthetic
gauccauacugcggaacuccu

SEQ ID NO: 62023 - RNA, 22 nt, Artificial Sequence
  Synthetic
cgauccauacugcggaacuccu

SEQ ID NO: 62024 - RNA, 23 nt, Artificial Sequence
  Synthetic
ccgauccauacugcggaacuccu

SEQ ID NO: 62025 - RNA, 24 nt, Artificial Sequence
  Synthetic
gccgauccauacugcggaacuccu

SEQ ID NO: 62026 - RNA, 18 nt, Artificial Sequence
  Synthetic
  misc_feature (1)..(1): n is a, c, g, or u
  misc_feature (6)..(6): n is a, c, g, or u
nuuacnaaauauuuuccu

SEQ ID NO: 62027 - RNA, 19 nt, Artificial Sequence
  Synthetic
  misc_feature (1)..(2): n is a, c, g, or u
  misc_feature (7)..(7): n is a, c, g, or u
nnuuacnaaauauuuuccu

SEQ ID NO: 62028 - RNA, 20 nt, Artificial Sequence
  Synthetic
  misc_feature (2)..(3): n is a, c, g, or u
  misc_feature (8)..(8): n is a, c, g, or u
annuuacnaaauauuuuccu

SEQ ID NO: 62029 - RNA, 21 nt, Artificial Sequence
  Synthetic
  misc_feature (3)..(4): n is a, c, g, or u
  misc_feature (9)..(9): n is a, c, g, or u
aannuuacnaaauauuuuccu

SEQ ID NO: 62030 - RNA, 22 nt, Artificial Sequence
  Synthetic
  misc_feature (4)..(5): n is a, c, g, or u
  misc_feature (10)..(10): n is a, c, g, or u
uaannuuacnaaauauuuuccu

SEQ ID NO: 62031 - RNA, 23 nt, Artificial Sequence
  Synthetic
  misc_feature (5)..(6): n is a, c, g, or u
  misc_feature (11)..(11): n is a, c, g, or u
cuaannuuacnaaauauuuuccu

SEQ ID NO: 62032 - RNA, 24 nt, Artificial Sequence
  Synthetic
  misc_feature (6)..(7): n is a, c, g, or u
  misc_feature (12)..(12): n is a, c, g, or u
ccuaannuuacnaaauauuuuccu

SEQ ID NO: 62033 - RNA, 18 nt, Artificial Sequence
  Synthetic
  misc_feature (3)..(3): n is a, c, g, or u
  misc_feature (6)..(6): n is a, c, g, or u
  misc_feature (9)..(9): n is a, c, g, or u
acnccnaancauaccgcu

SEQ ID NO: 62034 - RNA, 19 nt, Artificial Sequence
  Synthetic
  misc_feature (4)..(4): n is a, c, g, or u
  misc_feature (7)..(7): n is a, c, g, or u
  misc_feature (10)..(10): n is a, c, g, or u
cacnccnaancauaccgcu

SEQ ID NO: 62035 - RNA, 20 nt, Artificial Sequence
  Synthetic
  misc_feature (5)..(5): n is a, c, g, or u
  misc_feature (8)..(8): n is a, c, g, or u
  misc_feature (11)..(11): n is a, c, g, or u
gcacnccnaancauaccgcu

SEQ ID NO: 62036 - RNA, 21 nt, Artificial Sequence
  Synthetic
  misc_feature (6)..(6): n is a, c, g, or u
  misc_feature (9)..(9): n is a, c, g, or u
  misc_feature (12)..(12): n is a, c, g, or u
ugcacnccnaancauaccgcu

SEQ ID NO: 62037 - RNA, 22 nt, Artificial Sequence
  Synthetic
  misc_feature (7)..(7): n is a, c, g, or u
  misc_feature (10)..(10): n is a, c, g, or u
  misc_feature (13)..(13): n is a, c, g, or u
uugcacnccnaancauaccgcu

SEQ ID NO: 62038 - RNA, 23 nt, Artificial Sequence
  Synthetic
  misc_feature (8)..(8): n is a, c, g, or u
  misc_feature (11)..(11): n is a, c, g, or u
  misc_feature (14)..(14): n is a, c, g, or u
auugcacnccnaancauaccgcu

SEQ ID NO: 62039 - RNA, 24 nt, Artificial Sequence
  Synthetic
  misc_feature (9)..(9): n is a, c, g, or u
  misc_feature (12)..(12): n is a, c, g, or u
  misc_feature (15)..(15): n is a, c, g, or u
cauugcacnccnaancauaccgcu

SEQ ID NO: 62040 - RNA, 18 nt, Artificial Sequence
  Synthetic
  misc_feature (2)..(2): n is a, c, g, or u
  misc_feature (8)..(8): n is a, c, g, or u
  misc_feature (14)..(14): n is a, c, g, or u
ancccucncggggncgcu

SEQ ID NO: 62041 - RNA, 19 nt, Artificial Sequence
  Synthetic
  misc_feature (3)..(3): n is a, c, g, or u
  misc_feature (9)..(9): n is a, c, g, or u
  misc_feature (15)..(15): n is a, c, g, or u
gancccucncggggncgcu

SEQ ID NO: 62042 - RNA, 20 nt, Artificial Sequence
  Synthetic
  misc_feature (4)..(4): n is a, c, g, or u
  misc_feature (10)..(10): n is a, c, g, or u
  misc_feature (16)..(16): n is a, c, g, or u
cgancccucncggggncgcu

SEQ ID NO: 62043 - RNA, 21 nt, Artificial Sequence
  Synthetic
  misc_feature (5)..(5): n is a, c, g, or u
  misc_feature (11)..(11): n is a, c, g, or u
  misc_feature (17)..(17): n is a, c, g, or u
acgancccucncggggncgcu

SEQ ID NO: 62044 - RNA, 22 nt, Artificial Sequence
  Synthetic
  misc_feature (6)..(6): n is a, c, g, or u
  misc_feature (12)..(12): n is a, c, g, or u
  misc_feature (18)..(18): n is a, c, g, or u
gacgancccucncggggncgcu

SEQ ID NO: 62045 - RNA, 23 nt, Artificial Sequence
  Synthetic
  misc_feature (7)..(7): n is a, c, g, or u
  misc_feature (13)..(13): n is a, c, g, or u
  misc_feature (19)..(19): n is a, c, g, or u
ggacgancccucncggggncgcu

SEQ ID NO: 62046 - RNA, 24 nt, Artificial Sequence
  Synthetic
  misc_feature (8)..(8): n is a, c, g, or u
  misc_feature (14)..(14): n is a, c, g, or u
  misc_feature (20)..(20): n is a, c, g, or u
cggacgancccucncggggncgcu

SEQ ID NO: 62047 - RNA, 18 nt, Artificial Sequence
  Synthetic
cuugcagcuuguuucgcu

SEQ ID NO: 62048 - RNA, 19 nt, Artificial Sequence
  Synthetic
ccuugcagcuuguuucgcu

SEQ ID NO: 62049 - RNA, 20 nt, Artificial Sequence
  Synthetic
uccuugcagcuuguuucgcu

SEQ ID NO: 62050 - RNA, 21 nt, Artificial Sequence
  Synthetic
cuccuugcagcuuguuucgcu

SEQ ID NO: 62051 - RNA, 22 nt, Artificial Sequence
  Synthetic
acuccuugcagcuuguuucgcu

SEQ ID NO: 62052 - RNA, 23 nt, Artificial Sequence
  Synthetic
aacuccuugcagcuuguuucgcu

SEQ ID NO: 62053 - RNA, 24 nt, Artificial Sequence
  Synthetic
gaacuccuugcagcuuguuucgcu

SEQ ID NO: 62054 - RNA, 18 nt, Artificial Sequence
  Synthetic
  misc_feature (9)..(9): n is a, c, g, or u
ucuuuguanuaggaggcu

SEQ ID NO: 62055 - RNA, 19 nt, Artificial Sequence
  Synthetic
  misc_feature (1)..(1): n is a, c, g, or u
  misc_feature (10)..(10): n is a, c, g, or u
nucuuuguanuaggaggcu

SEQ ID NO: 62056 - RNA, 20 nt, Artificial Sequence
  Synthetic
  misc_feature (2)..(2): n is a, c, g, or u
  misc_feature (11)..(11): n is a, c, g, or u
gnucuuuguanuaggaggcu

SEQ ID NO: 62057 - RNA, 21 nt, Artificial Sequence
  Synthetic
  misc_feature (1)..(1): n is a, c, g, or u
  misc_feature (3)..(3): n is a, c, g, or u
  misc_feature (12)..(12): n is a, c, g, or u
ngnucuuuguanuaggaggcu

SEQ ID NO: 62058 - RNA, 22 nt, Artificial Sequence
  Synthetic
  misc_feature (2)..(2): n is a, c, g, or u
  misc_feature (4)..(4): n is a, c, g, or u
  misc_feature (13)..(13): n is a, c, g, or u
angnucuuuguanuaggaggcu

SEQ ID NO: 62059 - RNA, 23 nt, Artificial Sequence
  Synthetic
  misc_feature (3)..(3): n is a, c, g, or u
  misc_feature (5)..(5): n is a, c, g, or u
  misc_feature (14)..(14): n is a, c, g, or u
aangnucuuuguanuaggaggcu

SEQ ID NO: 62060 - RNA, 24 nt, Artificial Sequence
  Synthetic
  misc_feature (4)..(4): n is a, c, g, or u
  misc_feature (6)..(6): n is a, c, g, or u
  misc_feature (15)..(15): n is a, c, g, or u
uaangnucuuuguanuaggaggcu

SEQ ID NO: 62061 - RNA, 18 nt, Artificial Sequence
  Synthetic
  misc_feature (12)..(12): n is a, c, g, or u
aucccaucaucnugggcu

SEQ ID NO: 62062 - RNA, 19 nt, Artificial Sequence
  Synthetic
  misc_feature (13)..(13): n is a, c, g, or u
caucccaucaucnugggcu

SEQ ID NO: 62063 - RNA, 20 nt, Artificial Sequence
  Synthetic
  misc_feature (14)..(14): n is a, c, g, or u
ccaucccaucaucnugggcu

SEQ ID NO: 62064 - RNA, 21 nt, Artificial Sequence
  Synthetic
  misc_feature (15)..(15): n is a, c, g, or u
cccaucccaucaucnugggcu

SEQ ID NO: 62065 - RNA, 22 nt, Artificial Sequence
  Synthetic
  misc_feature (16)..(16): n is a, c, g, or u
ucccaucccaucaucnugggcu

SEQ ID NO: 62066 - RNA, 23 nt, Artificial Sequence
  Synthetic
  misc_feature (17)..(17): n is a, c, g, or u
uucccaucccaucaucnugggcu

SEQ ID NO: 62067 - RNA, 24 nt, Artificial Sequence
  Synthetic
  misc_feature (18)..(18): n is a, c, g, or u
auucccaucccaucaucnugggcu

SEQ ID NO: 62068 - RNA, 18 nt, Artificial Sequence
  Synthetic
gcugugccuuggguggcu

SEQ ID NO: 62069 - RNA, 19 nt, Artificial Sequence
  Synthetic
agcugugccuuggguggcu

SEQ ID NO: 62070 - RNA, 20 nt, Artificial Sequence
  Synthetic
aagcugugccuuggguggcu

SEQ ID NO: 62071 - RNA, 21 nt, Artificial Sequence
  Synthetic
caagcugugccuuggguggcu

SEQ ID NO: 62072 - RNA, 22 nt, Artificial Sequence
  Synthetic
ccaagcugugccuuggguggcu

SEQ ID NO: 62073 - RNA, 23 nt, Artificial Sequence
  Synthetic
uccaagcugugccuuggguggcu

SEQ ID NO: 62074 - RNA, 24 nt, Artificial Sequence
  Synthetic
cuccaagcugugccuuggguggcu

SEQ ID NO: 62075 - RNA, 18 nt, Artificial Sequence
  Synthetic
  misc_feature (15)..(15): n is a, c, g, or u
auucgcacuccuccngcu

SEQ ID NO: 62076 - RNA, 19 nt, Artificial Sequence
  Synthetic
  misc_feature (16)..(16): n is a, c, g, or u
gauucgcacuccuccngcu

SEQ ID NO: 62077 - RNA, 20 nt, Artificial Sequence
  Synthetic
  misc_feature (17)..(17): n is a, c, g, or u
ggauucgcacuccuccngcu

SEQ ID NO: 62078 - RNA, 21 nt, Artificial Sequence
  Synthetic
  misc_feature (18)..(18): n is a, c, g, or u
uggauucgcacuccuccngcu

SEQ ID NO: 62079 - RNA, 22 nt, Artificial Sequence
  Synthetic
  misc_feature (19)..(19): n is a, c, g, or u
guggauucgcacuccuccngcu

SEQ ID NO: 62080 - RNA, 23 nt, Artificial Sequence
  Synthetic
  misc_feature (20)..(20): n is a, c, g, or u
uguggauucgcacuccuccngcu

SEQ ID NO: 62081 - RNA, 24 nt, Artificial Sequence
  Synthetic
  misc_feature (21)..(21): n is a, c, g, or u
guguggauucgcacuccuccngcu

SEQ ID NO: 62082 - RNA, 18 nt, Artificial Sequence
  Synthetic
  misc_feature (6)..(6): n is a, c, g, or u
  misc_feature (10)..(10): n is a, c, g, or u
gcccunuacngggaugcu

SEQ ID NO: 62083 - RNA, 19 nt, Artificial Sequence
  Synthetic
  misc_feature (7)..(7): n is a, c, g, or u
  misc_feature (11)..(11): n is a, c, g, or u
agcccunuacngggaugcu

SEQ ID NO: 62084 - RNA, 20 nt, Artificial Sequence
  Synthetic
  misc_feature (8)..(8): n is a, c, g, or u
  misc_feature (12)..(12): n is a, c, g, or u
cagcccunuacngggaugcu

SEQ ID NO: 62085 - RNA, 21 nt, Artificial Sequence
  Synthetic
  misc_feature (9)..(9): n is a, c, g, or u
  misc_feature (13)..(13): n is a, c, g, or u
ucagcccunuacngggaugcu

SEQ ID NO: 62086 - RNA, 22 nt, Artificial Sequence
  Synthetic
  misc_feature (10)..(10): n is a, c, g, or u
  misc_feature (14)..(14): n is a, c, g, or u
uucagcccunuacngggaugcu

SEQ ID NO: 62087 - RNA, 23 nt, Artificial Sequence
  Synthetic
  misc_feature (11)..(11): n is a, c, g, or u
  misc_feature (15)..(15): n is a, c, g, or u
cuucagcccunuacngggaugcu

SEQ ID NO: 62088 - RNA, 24 nt, Artificial Sequence
  Synthetic
  misc_feature (12)..(12): n is a, c, g, or u
  misc_feature (16)..(16): n is a, c, g, or u
gcuucagcccunuacngggaugcu

SEQ ID NO: 62089 - RNA, 18 nt, Artificial Sequence
  Synthetic
aagacugggggcccugcu

SEQ ID NO: 62090 - RNA, 19 nt, Artificial Sequence
  Synthetic
gaagacugggggcccugcu

SEQ ID NO: 62091 - RNA, 20 nt, Artificial Sequence
  Synthetic
  misc_feature (1)..(1): n is a, c, g, or u
ngaagacugggggcccugcu

SEQ ID NO: 62092 - RNA, 21 nt, Artificial Sequence
  Synthetic
  misc_feature (2)..(2): n is a, c, g, or u
ungaagacugggggcccugcu

SEQ ID NO: 62093 - RNA, 22 nt, Artificial Sequence
  Synthetic
  misc_feature (3)..(3): n is a, c, g, or u
cungaagacugggggcccugcu

SEQ ID NO: 62094 - RNA, 23 nt, Artificial Sequence
  Synthetic
  misc_feature (4)..(4): n is a, c, g, or u
ucungaagacugggggcccugcu

SEQ ID NO: 62095 - RNA, 24 nt, Artificial Sequence
  Synthetic
  misc_feature (5)..(5): n is a, c, g, or u
uucungaagacugggggcccugcu

SEQ ID NO: 62096 - RNA, 18 nt, Artificial Sequence
  Synthetic
gcucuguauuuuccugcu

SEQ ID NO: 62097 - RNA, 19 nt, Artificial Sequence
  Synthetic
ggcucuguauuuuccugcu

SEQ ID NO: 62098 - RNA, 20 nt, Artificial Sequence
  Synthetic
gggcucuguauuuuccugcu

SEQ ID NO: 62099 - RNA, 21 nt, Artificial Sequence
  Synthetic
agggcucuguauuuuccugcu

SEQ ID NO: 62100 - RNA, 22 nt, Artificial Sequence
  Synthetic
aagggcucuguauuuuccugcu

SEQ ID NO: 62101 - RNA, 23 nt, Artificial Sequence
  Synthetic
uaagggcucuguauuuuccugcu

SEQ ID NO: 62102 - RNA, 24 nt, Artificial Sequence
  Synthetic
guaagggcucuguauuuuccugcu

SEQ ID NO: 62103 - RNA, 18 nt, Artificial Sequence
  Synthetic
  misc_feature (12)..(12): n is a, c, g, or u
uggcugcucggnugugcu

SEQ ID NO: 62104 - RNA, 19 nt, Artificial Sequence
  Synthetic
  misc_feature (13)..(13): n is a, c, g, or u
auggcugcucggnugugcu

SEQ ID NO: 62105 - RNA, 20 nt, Artificial Sequence
  Synthetic
  misc_feature (14)..(14): n is a, c, g, or u
cauggcugcucggnugugcu

SEQ ID NO: 62106 - RNA, 21 nt, Artificial Sequence
  Synthetic
  misc_feature (15)..(15): n is a, c, g, or u
ccauggcugcucggnugugcu

SEQ ID NO: 62107 - RNA, 22 nt, Artificial Sequence
  Synthetic
  misc_feature (1)..(1): n is a, c, g, or u
  misc_feature (16)..(16): n is a, c, g, or u
nccauggcugcucggnugugcu

SEQ ID NO: 62108 - RNA, 23 nt, Artificial Sequence
  Synthetic
  misc_feature (2)..(2): n is a, c, g, or u
  misc_feature (17)..(17): n is a, c, g, or u
unccauggcugcucggnugugcu

SEQ ID NO: 62109 - RNA, 24 nt, Artificial Sequence
  Synthetic
  misc_feature (3)..(3): n is a, c, g, or u
  misc_feature (18)..(18): n is a, c, g, or u
uunccauggcugcucggnugugcu

SEQ ID NO: 62110 - RNA, 18 nt, Artificial Sequence
  Synthetic
accugcacaacucuugcu

SEQ ID NO: 62111 - RNA, 19 nt, Artificial Sequence
  Synthetic
aaccugcacaacucuugcu

SEQ ID NO: 62112 - RNA, 20 nt, Artificial Sequence
  Synthetic
aaaccugcacaacucuugcu

SEQ ID NO: 62113 - RNA, 21 nt, Artificial Sequence
  Synthetic
aaaaccugcacaacucuugcu

SEQ ID NO: 62114 - RNA, 22 nt, Artificial Sequence
  Synthetic
caaaaccugcacaacucuugcu

SEQ ID NO: 62115 - RNA, 23 nt, Artificial Sequence
  Synthetic
gcaaaaccugcacaacucuugcu

SEQ ID NO: 62116 - RNA, 24 nt, Artificial Sequence
  Synthetic
ugcaaaaccugcacaacucuugcu

SEQ ID NO: 62117 - RNA, 18 nt, Artificial Sequence
  Synthetic
  misc_feature (7)..(7): n is a, c, g, or u
  misc_feature (16)..(16): n is a, c, g, or u
ucaacgnauugugggncu

SEQ ID NO: 62118 - RNA, 19 nt, Artificial Sequence
  Synthetic
  misc_feature (8)..(8): n is a, c, g, or u
  misc_feature (17)..(17): n is a, c, g, or u
gucaacgnauugugggncu

SEQ ID NO: 62119 - RNA, 20 nt, Artificial Sequence
  Synthetic
  misc_feature (9)..(9): n is a, c, g, or u
  misc_feature (18)..(18): n is a, c, g, or u
ugucaacgnauugugggncu

SEQ ID NO: 62120 - RNA, 21 nt, Artificial Sequence
  Synthetic
  misc_feature (10)..(10): n is a, c, g, or u
  misc_feature (19)..(19): n is a, c, g, or u
uugucaacgnauugugggncu

SEQ ID NO: 62121 - RNA, 22 nt, Artificial Sequence
  Synthetic
  misc_feature (11)..(11): n is a, c, g, or u
  misc_feature (20)..(20): n is a, c, g, or u
uuugucaacgnauugugggncu

SEQ ID NO: 62122 - RNA, 23 nt, Artificial Sequence
  Synthetic
  misc_feature (12)..(12): n is a, c, g, or u
  misc_feature (21)..(21): n is a, c, g, or u
guuugucaacgnauugugggncu

SEQ ID NO: 62123 - RNA, 24 nt, Artificial Sequence
  Synthetic
  misc_feature (13)..(13): n is a, c, g, or u
  misc_feature (22)..(22): n is a, c, g, or u
aguuugucaacgnauugugggncu

SEQ ID NO: 62124 - RNA, 18 nt, Artificial Sequence
  Synthetic
gucuguuccuucucaucu

SEQ ID NO: 62125 - RNA, 19 nt, Artificial Sequence
  Synthetic
cgucuguuccuucucaucu

SEQ ID NO: 62126 - RNA, 20 nt, Artificial Sequence
  Synthetic
ccgucuguuccuucucaucu

SEQ ID NO: 62127 - RNA, 21 nt, Artificial Sequence
  Synthetic
cccgucuguuccuucucaucu

SEQ ID NO: 62128 - RNA, 22 nt, Artificial Sequence
  Synthetic
ccccgucuguuccuucucaucu

SEQ ID NO: 62129 - RNA, 23 nt, Artificial Sequence
  Synthetic
uccccgucuguuccuucucaucu

SEQ ID NO: 62130 - RNA, 24 nt, Artificial Sequence
  Synthetic
cuccccgucuguuccuucucaucu

SEQ ID NO: 62131 - RNA, 18 nt, Artificial Sequence
  Synthetic
cccagucucuccaccucu

SEQ ID NO: 62132 - RNA, 19 nt, Artificial Sequence
  Synthetic
ccccagucucuccaccucu

SEQ ID NO: 62133 - RNA, 20 nt, Artificial Sequence
  Synthetic
accccagucucuccaccucu

SEQ ID NO: 62134 - RNA, 21 nt, Artificial Sequence
  Synthetic
aaccccagucucuccaccucu

SEQ ID NO: 62135 - RNA, 22 nt, Artificial Sequence
  Synthetic
caaccccagucucuccaccucu

SEQ ID NO: 62136 - RNA, 23 nt, Artificial Sequence
  Synthetic
ccaaccccagucucuccaccucu

SEQ ID NO: 62137 - RNA, 24 nt, Artificial Sequence
  Synthetic
  misc_feature (1)..(1): n is a, c, g, or u
nccaaccccagucucuccaccucu

SEQ ID NO: 62138 - RNA, 18 nt, Artificial Sequence
  Synthetic
cagcaugggagcaccucu

SEQ ID NO: 62139 - RNA, 19 nt, Artificial Sequence
  Synthetic
acagcaugggagcaccucu

SEQ ID NO: 62140 - RNA, 20 nt, Artificial Sequence
  Synthetic
uacagcaugggagcaccucu

SEQ ID NO: 62141 - RNA, 21 nt, Artificial Sequence
  Synthetic
cuacagcaugggagcaccucu

SEQ ID NO: 62142 - RNA, 22 nt, Artificial Sequence
  Synthetic
gcuacagcaugggagcaccucu

SEQ ID NO: 62143 - RNA, 23 nt, Artificial Sequence
  Synthetic
agcuacagcaugggagcaccucu

SEQ ID NO: 62144 - RNA, 24 nt, Artificial Sequence
  Synthetic
gagcuacagcaugggagcaccucu

SEQ ID NO: 62145 - RNA, 18 nt, Artificial Sequence
  Synthetic
acaacucuguuguccucu

SEQ ID NO: 62146 - RNA, 19 nt, Artificial Sequence
  Synthetic
gacaacucuguuguccucu

SEQ ID NO: 62147 - RNA, 20 nt, Artificial Sequence
  Synthetic
  misc_feature (1)..(1): n is a, c, g, or u
ngacaacucuguuguccucu

SEQ ID NO: 62148 - RNA, 21 nt, Artificial Sequence
  Synthetic
  misc_feature (2)..(2): n is a, c, g, or u
cngacaacucuguuguccucu

SEQ ID NO: 62149 - RNA, 22 nt, Artificial Sequence
  Synthetic
  misc_feature (3)..(3): n is a, c, g, or u
acngacaacucuguuguccucu

SEQ ID NO: 62150 - RNA, 23 nt, Artificial Sequence
  Synthetic
  misc_feature (4)..(4): n is a, c, g, or u
cacngacaacucuguuguccucu

SEQ ID NO: 62151 - RNA, 24 nt, Artificial Sequence
  Synthetic
  misc_feature (5)..(5): n is a, c, g, or u
gcacngacaacucuguuguccucu

SEQ ID NO: 62152 - RNA, 18 nt, Artificial Sequence
  Synthetic
aacucuguuguccucucu

SEQ ID NO: 62153 - RNA, 19 nt, Artificial Sequence
  Synthetic
caacucuguuguccucucu

SEQ ID NO: 62154 - RNA, 20 nt, Artificial Sequence
  Synthetic
acaacucuguuguccucucu

SEQ ID NO: 62155 - RNA, 21 nt, Artificial Sequence
  Synthetic
gacaacucuguuguccucucu

SEQ ID NO: 62156 - RNA, 22 nt, Artificial Sequence
  Synthetic
  misc_feature (1)..(1): n is a, c, g, or u
ngacaacucuguuguccucucu

SEQ ID NO: 62157 - RNA, 23 nt, Artificial Sequence
  Synthetic
  misc_feature (2)..(2): n is a, c, g, or u
cngacaacucuguuguccucucu

SEQ ID NO: 62158 - RNA, 24 nt, Artificial Sequence
  Synthetic
  misc_feature (3)..(3): n is a, c, g, or u
acngacaacucuguuguccucucu

SEQ ID NO: 62159 - RNA, 18 nt, Artificial Sequence
  Synthetic
aaagaauuuggagcuucu

SEQ ID NO: 62160 - RNA, 19 nt, Artificial Sequence
  Synthetic
uaaagaauuuggagcuucu

SEQ ID NO: 62161 - RNA, 20 nt, Artificial Sequence
  Synthetic
auaaagaauuuggagcuucu

SEQ ID NO: 62162 - RNA, 21 nt, Artificial Sequence
  Synthetic
uauaaagaauuuggagcuucu

SEQ ID NO: 62163 - RNA, 22 nt, Artificial Sequence
  Synthetic
uuauaaagaauuuggagcuucu

SEQ ID NO: 62164 - RNA, 23 nt, Artificial Sequence
  Synthetic
cuuauaaagaauuuggagcuucu

SEQ ID NO: 62165 - RNA, 24 nt, Artificial Sequence
  Synthetic
ccuuauaaagaauuuggagcuucu

SEQ ID NO: 62166 - RNA, 18 nt, Artificial Sequence
  Synthetic
ucacaucaucaaucuucu

SEQ ID NO: 62167 - RNA, 19 nt, Artificial Sequence
  Synthetic
cucacaucaucaaucuucu

SEQ ID NO: 62168 - RNA, 20 nt, Artificial Sequence
  Synthetic
ucucacaucaucaaucuucu

SEQ ID NO: 62169 - RNA, 21 nt, Artificial Sequence
  Synthetic
cucucacaucaucaaucuucu

SEQ ID NO: 62170 - RNA, 22 nt, Artificial Sequence
  Synthetic
ucucucacaucaucaaucuucu

SEQ ID NO: 62171 - RNA, 23 nt, Artificial Sequence
  Synthetic
cucucucacaucaucaaucuucu

SEQ ID NO: 62172 - RNA, 24 nt, Artificial Sequence
  Synthetic
ccucucucacaucaucaaucuucu

SEQ ID NO: 62173 - RNA, 18 nt, Artificial Sequence
  Synthetic
caucuucuuguugguucu

SEQ ID NO: 62174 - RNA, 19 nt, Artificial Sequence
  Synthetic
ucaucuucuuguugguucu

SEQ ID NO: 62175 - RNA, 20 nt, Artificial Sequence
  Synthetic
cucaucuucuuguugguucu

SEQ ID NO: 62176 - RNA, 21 nt, Artificial Sequence
  Synthetic
ccucaucuucuuguugguucu

SEQ ID NO: 62177 - RNA, 22 nt, Artificial Sequence
  Synthetic
gccucaucuucuuguugguucu

SEQ ID NO: 62178 - RNA, 23 nt, Artificial Sequence
  Synthetic
ugccucaucuucuuguugguucu

SEQ ID NO: 62179 - RNA, 24 nt, Artificial Sequence
  Synthetic
augccucaucuucuuguugguucu

SEQ ID NO: 62180 - RNA, 18 nt, Artificial Sequence
  Synthetic
gggccucagcccguuucu

SEQ ID NO: 62181 - RNA, 19 nt, Artificial Sequence
  Synthetic
ugggccucagcccguuucu

SEQ ID NO: 62182 - RNA, 20 nt, Artificial Sequence
  Synthetic
gugggccucagcccguuucu

SEQ ID NO: 62183 - RNA, 21 nt, Artificial Sequence
  Synthetic
agugggccucagcccguuucu

SEQ ID NO: 62184 - RNA, 22 nt, Artificial Sequence
  Synthetic
gagugggccucagcccguuucu

SEQ ID NO: 62185 - RNA, 23 nt, Artificial Sequence
  Synthetic
ggagugggccucagcccguuucu

SEQ ID NO: 62186 - RNA, 24 nt, Artificial Sequence
  Synthetic
gggagugggccucagcccguuucu

SEQ ID NO: 62187 - RNA, 18 nt, Artificial Sequence
  Synthetic
gacuucucucaauuuucu

SEQ ID NO: 62188 - RNA, 19 nt, Artificial Sequence
  Synthetic
ggacuucucucaauuuucu

SEQ ID NO: 62189 - RNA, 20 nt, Artificial Sequence
  Synthetic
uggacuucucucaauuuucu

SEQ ID NO: 62190 - RNA, 21 nt, Artificial Sequence
  Synthetic
guggacuucucucaauuuucu

SEQ ID NO: 62191 - RNA, 22 nt, Artificial Sequence
  Synthetic
gguggacuucucucaauuuucu

SEQ ID NO: 62192 - RNA, 23 nt, Artificial Sequence
  Synthetic
ugguggacuucucucaauuuucu

SEQ ID NO: 62193 - RNA, 24 nt, Artificial Sequence
  Synthetic
gugguggacuucucucaauuuucu

SEQ ID NO: 62194 - RNA, 18 nt, Artificial Sequence
  Synthetic
  misc_feature (3)..(3): n is a, c, g, or u
agngcaaauuccagcagu

SEQ ID NO: 62195 - RNA, 19 nt, Artificial Sequence
  Synthetic
  misc_feature (4)..(4): n is a, c, g, or u
cagngcaaauuccagcagu

SEQ ID NO: 62196 - RNA, 20 nt, Artificial Sequence
  Synthetic
  misc_feature (5)..(5): n is a, c, g, or u
ucagngcaaauuccagcagu

SEQ ID NO: 62197 - RNA, 21 nt, Artificial Sequence
  Synthetic
  misc_feature (6)..(6): n is a, c, g, or u
uucagngcaaauuccagcagu

SEQ ID NO: 62198 - RNA, 22 nt, Artificial Sequence
  Synthetic
  misc_feature (1)..(1): n is a, c, g, or u
  misc_feature (7)..(7): n is a, c, g, or u
nuucagngcaaauuccagcagu

SEQ ID NO: 62199 - RNA, 23 nt, Artificial Sequence
  Synthetic
  misc_feature (2)..(2): n is a, c, g, or u
  misc_feature (8)..(8): n is a, c, g, or u
unuucagngcaaauuccagcagu

SEQ ID NO: 62200 - RNA, 24 nt, Artificial Sequence
  Synthetic
  misc_feature (3)..(3): n is a, c, g, or u
  misc_feature (9)..(9): n is a, c, g, or u
cunuucagngcaaauuccagcagu

SEQ ID NO: 62201 - RNA, 18 nt, Artificial Sequence
  Synthetic
cucacaauaccacagagu

SEQ ID NO: 62202 - RNA, 19 nt, Artificial Sequence
  Synthetic
ccucacaauaccacagagu

SEQ ID NO: 62203 - RNA, 20 nt, Artificial Sequence
  Synthetic
uccucacaauaccacagagu

SEQ ID NO: 62204 - RNA, 21 nt, Artificial Sequence
  Synthetic
auccucacaauaccacagagu

SEQ ID NO: 62205 - RNA, 22 nt, Artificial Sequence
  Synthetic
aauccucacaauaccacagagu

SEQ ID NO: 62206 - RNA, 23 nt, Artificial Sequence
  Synthetic
aaauccucacaauaccacagagu

SEQ ID NO: 62207 - RNA, 24 nt, Artificial Sequence
  Synthetic
aaaauccucacaauaccacagagu

SEQ ID NO: 62208 - RNA, 18 nt, Artificial Sequence
  Synthetic
ggcaaacaagguaggagu

SEQ ID NO: 62209 - RNA, 19 nt, Artificial Sequence
  Synthetic
uggcaaacaagguaggagu

SEQ ID NO: 62210 - RNA, 20 nt, Artificial Sequence
  Synthetic
auggcaaacaagguaggagu

SEQ ID NO: 62211 - RNA, 21 nt, Artificial Sequence
  Synthetic
aauggcaaacaagguaggagu

SEQ ID NO: 62212 - RNA, 22 nt, Artificial Sequence
  Synthetic
caauggcaaacaagguaggagu

SEQ ID NO: 62213 - RNA, 23 nt, Artificial Sequence
  Synthetic
ccaauggcaaacaagguaggagu

SEQ ID NO: 62214 - RNA, 24 nt, Artificial Sequence
  Synthetic
gccaauggcaaacaagguaggagu

SEQ ID NO: 62215 - RNA, 18 nt, Artificial Sequence
  Synthetic
  misc_feature (9)..(9): n is a, c, g, or u
  misc_feature (15)..(15): n is a, c, g, or u
gguuaugunauuggnagu

SEQ ID NO: 62216 - RNA, 19 nt, Artificial Sequence
  Synthetic
  misc_feature (10)..(10): n is a, c, g, or u
  misc_feature (16)..(16): n is a, c, g, or u
ggguuaugunauuggnagu

SEQ ID NO: 62217 - RNA, 20 nt, Artificial Sequence
  Synthetic
  misc_feature (11)..(11): n is a, c, g, or u
  misc_feature (17)..(17): n is a, c, g, or u
uggguuaugunauuggnagu

SEQ ID NO: 62218 - RNA, 21 nt, Artificial Sequence
  Synthetic
  misc_feature (12)..(12): n is a, c, g, or u
  misc_feature (18)..(18): n is a, c, g, or u
auggguuaugunauuggnagu

SEQ ID NO: 62219 - RNA, 22 nt, Artificial Sequence
  Synthetic
  misc_feature (13)..(13): n is a, c, g, or u
  misc_feature (19)..(19): n is a, c, g, or u
cauggguuaugunauuggnagu

SEQ ID NO: 62220 - RNA, 23 nt, Artificial Sequence
  Synthetic
  misc_feature (14)..(14): n is a, c, g, or u
  misc_feature (20)..(20): n is a, c, g, or u
ucauggguuaugunauuggnagu

SEQ ID NO: 62221 - RNA, 24 nt, Artificial Sequence
  Synthetic
  misc_feature (15)..(15): n is a, c, g, or u
  misc_feature (21)..(21): n is a, c, g, or u
uucauggguuaugunauuggnagu

SEQ ID NO: 62222 - RNA, 18 nt, Artificial Sequence
  Synthetic
  misc_feature (2)..(2): n is a, c, g, or u
  misc_feature (8)..(8): n is a, c, g, or u
cncuucuncgucugccgu

SEQ ID NO: 62223 - RNA, 19 nt, Artificial Sequence
  Synthetic
  misc_feature (3)..(3): n is a, c, g, or u
  misc_feature (9)..(9): n is a, c, g, or u
ccncuucuncgucugccgu

SEQ ID NO: 62224 - RNA, 20 nt, Artificial Sequence
  Synthetic
  misc_feature (4)..(4): n is a, c, g, or u
  misc_feature (10)..(10): n is a, c, g, or u
cccncuucuncgucugccgu

SEQ ID NO: 62225 - RNA, 21 nt, Artificial Sequence
  Synthetic
  misc_feature (5)..(5): n is a, c, g, or u
  misc_feature (11)..(11): n is a, c, g, or u
gcccncuucuncgucugccgu

SEQ ID NO: 62226 - RNA, 22 nt, Artificial Sequence
  Synthetic
  misc_feature (6)..(6): n is a, c, g, or u
  misc_feature (12)..(12): n is a, c, g, or u
cgcccncuucuncgucugccgu

SEQ ID NO: 62227 - RNA, 23 nt, Artificial Sequence
  Synthetic
  misc_feature (1)..(1): n is a, c, g, or u
  misc_feature (7)..(7): n is a, c, g, or u
  misc_feature (13)..(13): n is a, c, g, or u
ncgcccncuucuncgucugccgu

SEQ ID NO: 62228 - RNA, 24 nt, Artificial Sequence
  Synthetic
  misc_feature (2)..(2): n is a, c, g, or u
  misc_feature (8)..(8): n is a, c, g, or u
  misc_feature (14)..(14): n is a, c, g, or u
ancgcccncuucuncgucugccgu

SEQ ID NO: 62229 - RNA, 18 nt, Artificial Sequence
  Synthetic
  misc_feature (3)..(3): n is a, c, g, or u
agnucucaaucgccgcgu

SEQ ID NO: 62230 - RNA, 19 nt, Artificial Sequence
  Synthetic
  misc_feature (4)..(4): n is a, c, g, or u
aagnucucaaucgccgcgu

SEQ ID NO: 62231 - RNA, 20 nt, Artificial Sequence
  Synthetic
  misc_feature (5)..(5): n is a, c, g, or u
gaagnucucaaucgccgcgu

SEQ ID NO: 62232 - RNA, 18 nt, Artificial Sequence
  Synthetic
cacagagucuagacucgu

SEQ ID NO: 62233 - RNA, 19 nt, Artificial Sequence
  Synthetic
ccacagagucuagacucgu

SEQ ID NO: 62234 - RNA, 20 nt, Artificial Sequence
  Synthetic
accacagagucuagacucgu

SEQ ID NO: 62235 - RNA, 21 nt, Artificial Sequence
  Synthetic
uaccacagagucuagacucgu

SEQ ID NO: 62236 - RNA, 22 nt, Artificial Sequence
  Synthetic
auaccacagagucuagacucgu

SEQ ID NO: 62237 - RNA, 23 nt, Artificial Sequence
  Synthetic
aauaccacagagucuagacucgu

SEQ ID NO: 62238 - RNA, 24 nt, Artificial Sequence
  Synthetic
caauaccacagagucuagacucgu

SEQ ID NO: 62239 - RNA, 18 nt, Artificial Sequence
  Synthetic
uccuuggacucauaaggu

SEQ ID NO: 62240 - RNA, 19 nt, Artificial Sequence
  Synthetic
uuccuuggacucauaaggu

SEQ ID NO: 62241 - RNA, 20 nt, Artificial Sequence
  Synthetic
auuccuuggacucauaaggu

SEQ ID NO: 62242 - RNA, 21 nt, Artificial Sequence
  Synthetic
uauuccuuggacucauaaggu

SEQ ID NO: 62243 - RNA, 22 nt, Artificial Sequence
  Synthetic
guauuccuuggacucauaaggu

SEQ ID NO: 62244 - RNA, 23 nt, Artificial Sequence
  Synthetic
aguauuccuuggacucauaaggu

SEQ ID NO: 62245 - RNA, 24 nt, Artificial Sequence
  Synthetic
uaguauuccuuggacucauaaggu

SEQ ID NO: 62246 - RNA, 18 nt, Artificial Sequence
  Synthetic
  misc_feature (12)..(12): n is a, c, g, or u
ggagugggaggnuacggu

SEQ ID NO: 62247 - RNA, 19 nt, Artificial Sequence
  Synthetic
  misc_feature (13)..(13): n is a, c, g, or u
aggagugggaggnuacggu

SEQ ID NO: 62248 - RNA, 20 nt, Artificial Sequence
  Synthetic
  misc_feature (14)..(14): n is a, c, g, or u
uaggagugggaggnuacggu

SEQ ID NO: 62249 - RNA, 21 nt, Artificial Sequence
  Synthetic
  misc_feature (15)..(15): n is a, c, g, or u
guaggagugggaggnuacggu

SEQ ID NO: 62250 - RNA, 22 nt, Artificial Sequence
  Synthetic
  misc_feature (16)..(16): n is a, c, g, or u
gguaggagugggaggnuacggu

SEQ ID NO: 62251 - RNA, 23 nt, Artificial Sequence
  Synthetic
  misc_feature (17)..(17): n is a, c, g, or u
agguaggagugggaggnuacggu

SEQ ID NO: 62252 - RNA, 24 nt, Artificial Sequence
  Synthetic
  misc_feature (18)..(18): n is a, c, g, or u
aagguaggagugggaggnuacggu

SEQ ID NO: 62253 - RNA, 18 nt, Artificial Sequence
  Synthetic
guuucgcucgcagccggu

SEQ ID NO: 62254 - RNA, 19 nt, Artificial Sequence
  Synthetic
uguuucgcucgcagccggu

SEQ ID NO: 62255 - RNA, 20 nt, Artificial Sequence
  Synthetic
uuguuucgcucgcagccggu

SEQ ID NO: 62256 - RNA, 21 nt, Artificial Sequence
  Synthetic
cuuguuucgcucgcagccggu

SEQ ID NO: 62257 - RNA, 22 nt, Artificial Sequence
  Synthetic
gcuuguuucgcucgcagccggu

SEQ ID NO: 62258 - RNA, 23 nt, Artificial Sequence
  Synthetic
agcuuguuucgcucgcagccggu

SEQ ID NO: 62259 - RNA, 24 nt, Artificial Sequence
  Synthetic
cagcuuguuucgcucgcagccggu

SEQ ID NO: 62260 - RNA, 18 nt, Artificial Sequence
  Synthetic
cuuccaccaaucggcggu

SEQ ID NO: 62261 - RNA, 19 nt, Artificial Sequence
  Synthetic
gcuuccaccaaucggcggu

SEQ ID NO: 62262 - RNA, 20 nt, Artificial Sequence
  Synthetic
ugcuuccaccaaucggcggu

SEQ ID NO: 62263 - RNA, 18 nt, Artificial Sequence
  Synthetic
  misc_feature (1)..(1): n is a, c, g, or u
  misc_feature (7)..(7): n is a, c, g, or u
ncuguungauccgagggu

SEQ ID NO: 62264 - RNA, 19 nt, Artificial Sequence
  Synthetic
  misc_feature (2)..(2): n is a, c, g, or u
  misc_feature (8)..(8): n is a, c, g, or u
cncuguungauccgagggu

SEQ ID NO: 62265 - RNA, 20 nt, Artificial Sequence
  Synthetic
  misc_feature (3)..(3): n is a, c, g, or u
  misc_feature (9)..(9): n is a, c, g, or u
gcncuguungauccgagggu

SEQ ID NO: 62266 - RNA, 21 nt, Artificial Sequence
  Synthetic
  misc_feature (4)..(4): n is a, c, g, or u
  misc_feature (10)..(10): n is a, c, g, or u
ggcncuguungauccgagggu

SEQ ID NO: 62267 - RNA, 22 nt, Artificial Sequence
  Synthetic
  misc_feature (5)..(5): n is a, c, g, or u
  misc_feature (11)..(11): n is a, c, g, or u
aggcncuguungauccgagggu

SEQ ID NO: 62268 - RNA, 23 nt, Artificial Sequence
  Synthetic
  misc_feature (6)..(6): n is a, c, g, or u
  misc_feature (12)..(12): n is a, c, g, or u
caggcncuguungauccgagggu

SEQ ID NO: 62269 - RNA, 24 nt, Artificial Sequence
  Synthetic
  misc_feature (7)..(7): n is a, c, g, or u
  misc_feature (13)..(13): n is a, c, g, or u
ccaggcncuguungauccgagggu

SEQ ID NO: 62270 - RNA, 18 nt, Artificial Sequence
  Synthetic
gacgcaacccccacuggu

SEQ ID NO: 62271 - RNA, 19 nt, Artificial Sequence
  Synthetic
ugacgcaacccccacuggu

SEQ ID NO: 62272 - RNA, 20 nt, Artificial Sequence
  Synthetic
cugacgcaacccccacuggu

SEQ ID NO: 62273 - RNA, 18 nt, Artificial Sequence
  Synthetic
uuauauggaugaucuggu

SEQ ID NO: 62274 - RNA, 19 nt, Artificial Sequence
  Synthetic
guuauauggaugaucuggu

SEQ ID NO: 62275 - RNA, 20 nt, Artificial Sequence
  Synthetic
aguuauauggaugaucuggu

SEQ ID NO: 62276 - RNA, 21 nt, Artificial Sequence
  Synthetic
uaguuauauggaugaucuggu

SEQ ID NO: 62277 - RNA, 22 nt, Artificial Sequence
  Synthetic
uuaguuauauggaugaucuggu

SEQ ID NO: 62278 - RNA, 23 nt, Artificial Sequence
  Synthetic
uuuaguuauauggaugaucuggu

SEQ ID NO: 62279 - RNA, 24 nt, Artificial Sequence
  Synthetic
uuuuaguuauauggaugaucuggu

SEQ ID NO: 62280 - RNA, 18 nt, Artificial Sequence
  Synthetic
  misc_feature (4)..(4): n is a, c, g, or u
  misc_feature (16)..(16): n is a, c, g, or u
uganuucuucccgucngu

SEQ ID NO: 62281 - RNA, 19 nt, Artificial Sequence
  Synthetic
  misc_feature (5)..(5): n is a, c, g, or u
  misc_feature (17)..(17): n is a, c, g, or u
cuganuucuucccgucngu

SEQ ID NO: 62282 - RNA, 20 nt, Artificial Sequence
  Synthetic
  misc_feature (6)..(6): n is a, c, g, or u
  misc_feature (18)..(18): n is a, c, g, or u
ucuganuucuucccgucngu

SEQ ID NO: 62283 - RNA, 21 nt, Artificial Sequence
  Synthetic
  misc_feature (7)..(7): n is a, c, g, or u
  misc_feature (19)..(19): n is a, c, g, or u
uucuganuucuucccgucngu

SEQ ID NO: 62284 - RNA, 22 nt, Artificial Sequence
  Synthetic
  misc_feature (8)..(8): n is a, c, g, or u
  misc_feature (20)..(20): n is a, c, g, or u
cuucuganuucuucccgucngu

SEQ ID NO: 62285 - RNA, 23 nt, Artificial Sequence
  Synthetic
  misc_feature (9)..(9): n is a, c, g, or u
  misc_feature (21)..(21): n is a, c, g, or u
ccuucuganuucuucccgucngu

SEQ ID NO: 62286 - RNA, 24 nt, Artificial Sequence
  Synthetic
  misc_feature (10)..(10): n is a, c, g, or u
  misc_feature (22)..(22): n is a, c, g, or u
gccuucuganuucuucccgucngu

SEQ ID NO: 62287 - RNA, 18 nt, Artificial Sequence
  Synthetic
  misc_feature (13)..(13): n is a, c, g, or u
uuguucauguccnacugu

SEQ ID NO: 62288 - RNA, 19 nt, Artificial Sequence
  Synthetic
  misc_feature (14)..(14): n is a, c, g, or u
uuuguucauguccnacugu

SEQ ID NO: 62289 - RNA, 20 nt, Artificial Sequence
  Synthetic
  misc_feature (15)..(15): n is a, c, g, or u
uuuuguucauguccnacugu

SEQ ID NO: 62290 - RNA, 21 nt, Artificial Sequence
  Synthetic
  misc_feature (16)..(16): n is a, c, g, or u
cuuuuguucauguccnacugu

SEQ ID NO: 62291 - RNA, 22 nt, Artificial Sequence
  Synthetic
  misc_feature (17)..(17): n is a, c, g, or u
ucuuuuguucauguccnacugu

SEQ ID NO: 62292 - RNA, 23 nt, Artificial Sequence
  Synthetic
  misc_feature (18)..(18): n is a, c, g, or u
aucuuuuguucauguccnacugu

SEQ ID NO: 62293 - RNA, 24 nt, Artificial Sequence
  Synthetic
  misc_feature (19)..(19): n is a, c, g, or u
caucuuuuguucauguccnacugu

SEQ ID NO: 62294 - RNA, 18 nt, Artificial Sequence
  Synthetic
ggcaacggccaggccugu

SEQ ID NO: 62295 - RNA, 19 nt, Artificial Sequence
  Synthetic
cggcaacggccaggccugu

SEQ ID NO: 62296 - RNA, 20 nt, Artificial Sequence
  Synthetic
ucggcaacggccaggccugu

SEQ ID NO: 62297 - RNA, 21 nt, Artificial Sequence
  Synthetic
cucggcaacggccaggccugu

SEQ ID NO: 62298 - RNA, 22 nt, Artificial Sequence
  Synthetic
gcucggcaacggccaggccugu

SEQ ID NO: 62299 - RNA, 23 nt, Artificial Sequence
  Synthetic
ugcucggcaacggccaggccugu

SEQ ID NO: 62300 - RNA, 24 nt, Artificial Sequence
  Synthetic
uugcucggcaacggccaggccugu

SEQ ID NO: 62301 - RNA, 18 nt, Artificial Sequence
  Synthetic
  misc_feature (9)..(9): n is a, c, g, or u
  misc_feature (12)..(12): n is a, c, g, or u
uuucccucnugnugcugu

SEQ ID NO: 62302 - RNA, 19 nt, Artificial Sequence
  Synthetic
  misc_feature (10)..(10): n is a, c, g, or u
  misc_feature (13)..(13): n is a, c, g, or u
guuucccucnugnugcugu

SEQ ID NO: 62303 - RNA, 20 nt, Artificial Sequence
  Synthetic
  misc_feature (11)..(11): n is a, c, g, or u
  misc_feature (14)..(14): n is a, c, g, or u
uguuucccucnugnugcugu

SEQ ID NO: 62304 - RNA, 21 nt, Artificial Sequence
  Synthetic
  misc_feature (12)..(12): n is a, c, g, or u
  misc_feature (15)..(15): n is a, c, g, or u
auguuucccucnugnugcugu

SEQ ID NO: 62305 - RNA, 22 nt, Artificial Sequence
  Synthetic
  misc_feature (13)..(13): n is a, c, g, or u
  misc_feature (16)..(16): n is a, c, g, or u
uauguuucccucnugnugcugu

SEQ ID NO: 62306 - RNA, 23 nt, Artificial Sequence
  Synthetic
  misc_feature (14)..(14): n is a, c, g, or u
  misc_feature (17)..(17): n is a, c, g, or u
cuauguuucccucnugnugcugu

SEQ ID NO: 62307 - RNA, 24 nt, Artificial Sequence
  Synthetic
  misc_feature (15)..(15): n is a, c, g, or u
  misc_feature (18)..(18): n is a, c, g, or u
ucuauguuucccucnugnugcugu

SEQ ID NO: 62308 - RNA, 18 nt, Artificial Sequence
  Synthetic
uaggaccccugcucgugu

SEQ ID NO: 62309 - RNA, 19 nt, Artificial Sequence
  Synthetic
cuaggaccccugcucgugu

SEQ ID NO: 62310 - RNA, 20 nt, Artificial Sequence
  Synthetic
ccuaggaccccugcucgugu

SEQ ID NO: 62311 - RNA, 21 nt, Artificial Sequence
  Synthetic
uccuaggaccccugcucgugu

SEQ ID NO: 62312 - RNA, 22 nt, Artificial Sequence
  Synthetic
cuccuaggaccccugcucgugu

SEQ ID NO: 62313 - RNA, 23 nt, Artificial Sequence
  Synthetic
acuccuaggaccccugcucgugu

SEQ ID NO: 62314 - RNA, 24 nt, Artificial Sequence
  Synthetic
gacuccuaggaccccugcucgugu

SEQ ID NO: 62315 - RNA, 18 nt, Artificial Sequence
  Synthetic
  misc_feature (7)..(8): n is a, c, g, or u
gggggannacccgggugu

SEQ ID NO: 62316 - RNA, 19 nt, Artificial Sequence
  Synthetic
  misc_feature (8)..(9): n is a, c, g, or u
agggggannacccgggugu

SEQ ID NO: 62317 - RNA, 20 nt, Artificial Sequence
  Synthetic
  misc_feature (9)..(10): n is a, c, g, or u
uagggggannacccgggugu

SEQ ID NO: 62318 - RNA, 21 nt, Artificial Sequence
  Synthetic
  misc_feature (10)..(11): n is a, c, g, or u
cuagggggannacccgggugu

SEQ ID NO: 62319 - RNA, 22 nt, Artificial Sequence
  Synthetic
  misc_feature (11)..(12): n is a, c, g, or u
ucuagggggannacccgggugu

SEQ ID NO: 62320 - RNA, 23 nt, Artificial Sequence
  Synthetic
  misc_feature (12)..(13): n is a, c, g, or u
uucuagggggannacccgggugu

SEQ ID NO: 62321 - RNA, 24 nt, Artificial Sequence
  Synthetic
  misc_feature (13)..(14): n is a, c, g, or u
uuucuagggggannacccgggugu

SEQ ID NO: 62322 - RNA, 18 nt, Artificial Sequence
  Synthetic
uccuguccuccaacuugu

SEQ ID NO: 62323 - RNA, 19 nt, Artificial Sequence
  Synthetic
cuccuguccuccaacuugu

SEQ ID NO: 62324 - RNA, 20 nt, Artificial Sequence
  Synthetic
ccuccuguccuccaacuugu

SEQ ID NO: 62325 - RNA, 21 nt, Artificial Sequence
  Synthetic
accuccuguccuccaacuugu

SEQ ID NO: 62326 - RNA, 22 nt, Artificial Sequence
  Synthetic
aaccuccuguccuccaacuugu

SEQ ID NO: 62327 - RNA, 23 nt, Artificial Sequence
  Synthetic
caaccuccuguccuccaacuugu

SEQ ID NO: 62328 - RNA, 24 nt, Artificial Sequence
  Synthetic
ccaaccuccuguccuccaacuugu

SEQ ID NO: 62329 - RNA, 18 nt, Artificial Sequence
  Synthetic
  misc_feature (14)..(14): n is a, c, g, or u
ucaggcaagcuaunuugu

SEQ ID NO: 62330 - RNA, 19 nt, Artificial Sequence
  Synthetic
  misc_feature (15)..(15): n is a, c, g, or u
cucaggcaagcuaunuugu

SEQ ID NO: 62331 - RNA, 20 nt, Artificial Sequence
  Synthetic
  misc_feature (16)..(16): n is a, c, g, or u
ucucaggcaagcuaunuugu

SEQ ID NO: 62332 - RNA, 21 nt, Artificial Sequence
  Synthetic
  misc_feature (17)..(17): n is a, c, g, or u
cucucaggcaagcuaunuugu

SEQ ID NO: 62333 - RNA, 22 nt, Artificial Sequence
  Synthetic
  misc_feature (18)..(18): n is a, c, g, or u
gcucucaggcaagcuaunuugu

SEQ ID NO: 62334 - RNA, 23 nt, Artificial Sequence
  Synthetic
  misc_feature (19)..(19): n is a, c, g, or u
cgcucucaggcaagcuaunuugu

SEQ ID NO: 62335 - RNA, 24 nt, Artificial Sequence
  Synthetic
  misc_feature (20)..(20): n is a, c, g, or u
ccgcucucaggcaagcuaunuugu

SEQ ID NO: 62336 - RNA, 18 nt, Artificial Sequence
  Synthetic
  misc_feature (1)..(1): n is a, c, g, or u
  misc_feature (9)..(9): n is a, c, g, or u
  misc_feature (11)..(11): n is a, c, g, or u
nagguuaangnucuuugu

SEQ ID NO: 62337 - RNA, 19 nt, Artificial Sequence
  Synthetic
  misc_feature (2)..(2): n is a, c, g, or u
  misc_feature (10)..(10): n is a, c, g, or u
  misc_feature (12)..(12): n is a, c, g, or u
unagguuaangnucuuugu

SEQ ID NO: 62338 - RNA, 20 nt, Artificial Sequence
  Synthetic
  misc_feature (3)..(3): n is a, c, g, or u
  misc_feature (11)..(11): n is a, c, g, or u
  misc_feature (13)..(13): n is a, c, g, or u
aunagguuaangnucuuugu

SEQ ID NO: 62339 - RNA, 21 nt, Artificial Sequence
  Synthetic
  misc_feature (4)..(4): n is a, c, g, or u
  misc_feature (12)..(12): n is a, c, g, or u
  misc_feature (14)..(14): n is a, c, g, or u
gaunagguuaangnucuuugu

SEQ ID NO: 62340 - RNA, 22 nt, Artificial Sequence
  Synthetic
  misc_feature (5)..(5): n is a, c, g, or u
  misc_feature (13)..(13): n is a, c, g, or u
  misc_feature (15)..(15): n is a, c, g, or u
agaunagguuaangnucuuugu

SEQ ID NO: 62341 - RNA, 23 nt, Artificial Sequence
  Synthetic
  misc_feature (6)..(6): n is a, c, g, or u
  misc_feature (14)..(14): n is a, c, g, or u
  misc_feature (16)..(16): n is a, c, g, or u
gagaunagguuaangnucuuugu

SEQ ID NO: 62342 - RNA, 24 nt, Artificial Sequence
  Synthetic
  misc_feature (7)..(7): n is a, c, g, or u
  misc_feature (15)..(15): n is a, c, g, or u
  misc_feature (17)..(17): n is a, c, g, or u
ggagaunagguuaangnucuuugu

SEQ ID NO: 62343 - RNA, 18 nt, Artificial Sequence
  Synthetic
  misc_feature (4)..(4): n is a, c, g, or u
  misc_feature (13)..(13): n is a, c, g, or u
  misc_feature (17)..(17): n is a, c, g, or u
ucanauuguacanaaanu

SEQ ID NO: 62344 - RNA, 19 nt, Artificial Sequence
  Synthetic
  misc_feature (5)..(5): n is a, c, g, or u
  misc_feature (14)..(14): n is a, c, g, or u
  misc_feature (18)..(18): n is a, c, g, or u
aucanauuguacanaaanu

SEQ ID NO: 62345 - RNA, 20 nt, Artificial Sequence
  Synthetic
  misc_feature (6)..(6): n is a, c, g, or u
  misc_feature (15)..(15): n is a, c, g, or u
  misc_feature (19)..(19): n is a, c, g, or u
gaucanauuguacanaaanu

SEQ ID NO: 62346 - RNA, 21 nt, Artificial Sequence
  Synthetic
  misc_feature (7)..(7): n is a, c, g, or u
  misc_feature (16)..(16): n is a, c, g, or u
  misc_feature (20)..(20): n is a, c, g, or u
agaucanauuguacanaaanu

SEQ ID NO: 62347 - RNA, 22 nt, Artificial Sequence
  Synthetic
  misc_feature (8)..(8): n is a, c, g, or u
  misc_feature (17)..(17): n is a, c, g, or u
  misc_feature (21)..(21): n is a, c, g, or u
aagaucanauuguacanaaanu

SEQ ID NO: 62348 - RNA, 23 nt, Artificial Sequence
  Synthetic
  misc_feature (9)..(9): n is a, c, g, or u
  misc_feature (18)..(18): n is a, c, g, or u
  misc_feature (22)..(22): n is a, c, g, or u
caagaucanauuguacanaaanu

SEQ ID NO: 62349 - RNA, 24 nt, Artificial Sequence
  Synthetic
  misc_feature (1)..(1): n is a, c, g, or u
  misc_feature (10)..(10): n is a, c, g, or u
  misc_feature (19)..(19): n is a, c, g, or u
  misc_feature (23)..(23): n is a, c, g, or u
ncaagaucanauuguacanaaanu

SEQ ID NO: 62350 - RNA, 18 nt, Artificial Sequence
  Synthetic
  misc_feature (8)..(8): n is a, c, g, or u
  misc_feature (11)..(11): n is a, c, g, or u
  misc_feature (17)..(17): n is a, c, g, or u
uaaaucgnccnauuganu

SEQ ID NO: 62351 - RNA, 19 nt, Artificial Sequence
  Synthetic
  misc_feature (9)..(9): n is a, c, g, or u
  misc_feature (12)..(12): n is a, c, g, or u
  misc_feature (18)..(18): n is a, c, g, or u
guaaaucgnccnauuganu

SEQ ID NO: 62352 - RNA, 20 nt, Artificial Sequence
  Synthetic
  misc_feature (10)..(10): n is a, c, g, or u
  misc_feature (13)..(13): n is a, c, g, or u
  misc_feature (19)..(19): n is a, c, g, or u
uguaaaucgnccnauuganu

SEQ ID NO: 62353 - RNA, 21 nt, Artificial Sequence
  Synthetic
  misc_feature (11)..(11): n is a, c, g, or u
  misc_feature (14)..(14): n is a, c, g, or u
  misc_feature (20)..(20): n is a, c, g, or u
cuguaaaucgnccnauuganu

SEQ ID NO: 62354 - RNA, 22 nt, Artificial Sequence
  Synthetic
  misc_feature (12)..(12): n is a, c, g, or u
  misc_feature (15)..(15): n is a, c, g, or u
  misc_feature (21)..(21): n is a, c, g, or u
ccuguaaaucgnccnauuganu

SEQ ID NO: 62355 - RNA, 23 nt, Artificial Sequence
  Synthetic
  misc_feature (13)..(13): n is a, c, g, or u
  misc_feature (16)..(16): n is a, c, g, or u
  misc_feature (22)..(22): n is a, c, g, or u
uccuguaaaucgnccnauuganu

SEQ ID NO: 62356 - RNA, 24 nt, Artificial Sequence
  Synthetic
  misc_feature (14)..(14): n is a, c, g, or u
  misc_feature (17)..(17): n is a, c, g, or u
  misc_feature (23)..(23): n is a, c, g, or u
uuccuguaaaucgnccnauuganu

SEQ ID NO: 62357 - RNA, 18 nt, Artificial Sequence
  Synthetic
  misc_feature (17)..(17): n is a, c, g, or u
gcccguuuguccucuanu

SEQ ID NO: 62358 - RNA, 19 nt, Artificial Sequence
  Synthetic
  misc_feature (18)..(18): n is a, c, g, or u
ugcccguuuguccucuanu

SEQ ID NO: 62359 - RNA, 20 nt, Artificial Sequence
  Synthetic
  misc_feature (19)..(19): n is a, c, g, or u
uugcccguuuguccucuanu

SEQ ID NO: 62360 - RNA, 21 nt, Artificial Sequence
  Synthetic
  misc_feature (20)..(20): n is a, c, g, or u
guugcccguuuguccucuanu

SEQ ID NO: 62361 - RNA, 22 nt, Artificial Sequence
  Synthetic
  misc_feature (21)..(21): n is a, c, g, or u
uguugcccguuuguccucuanu

SEQ ID NO: 62362 - RNA, 23 nt, Artificial Sequence
  Synthetic
  misc_feature (22)..(22): n is a, c, g, or u
auguugcccguuuguccucuanu

SEQ ID NO: 62363 - RNA, 24 nt, Artificial Sequence
  Synthetic
  misc_feature (23)..(23): n is a, c, g, or u
uauguugcccguuuguccucuanu

SEQ ID NO: 62364 - RNA, 18 nt, Artificial Sequence
  Synthetic
  misc_feature (6)..(6): n is a, c, g, or u
  misc_feature (8)..(8): n is a, c, g, or u
  misc_feature (17)..(17): n is a, c, g, or u
guuaangnucuuuguanu

SEQ ID NO: 62365 - RNA, 19 nt, Artificial Sequence
  Synthetic
  misc_feature (7)..(7): n is a, c, g, or u
  misc_feature (9)..(9): n is a, c, g, or u
  misc_feature (18)..(18): n is a, c, g, or u
gguuaangnucuuuguanu

SEQ ID NO: 62366 - RNA, 20 nt, Artificial Sequence
  Synthetic
  misc_feature (8)..(8): n is a, c, g, or u
  misc_feature (10)..(10): n is a, c, g, or u
  misc_feature (19)..(19): n is a, c, g, or u
agguuaangnucuuuguanu

SEQ ID NO: 62367 - RNA, 21 nt, Artificial Sequence
  Synthetic
  misc_feature (1)..(1): n is a, c, g, or u
  misc_feature (9)..(9): n is a, c, g, or u
  misc_feature (11)..(11): n is a, c, g, or u
  misc_feature (20)..(20): n is a, c, g, or u
nagguuaangnucuuuguanu

SEQ ID NO: 62368 - RNA, 22 nt, Artificial Sequence
  Synthetic
  misc_feature (2)..(2): n is a, c, g, or u
  misc_feature (10)..(10): n is a, c, g, or u
  misc_feature (12)..(12): n is a, c, g, or u
  misc_feature (21)..(21): n is a, c, g, or u
unagguuaangnucuuuguanu

SEQ ID NO: 62369 - RNA, 23 nt, Artificial Sequence
  Synthetic
  misc_feature (3)..(3): n is a, c, g, or u
  misc_feature (11)..(11): n is a, c, g, or u
  misc_feature (13)..(13): n is a, c, g, or u
  misc_feature (22)..(22): n is a, c, g, or u
aunagguuaangnucuuuguanu

SEQ ID NO: 62370 - RNA, 24 nt, Artificial Sequence
  Synthetic
  misc_feature (4)..(4): n is a, c, g, or u
  misc_feature (12)..(12): n is a, c, g, or u
  misc_feature (14)..(14): n is a, c, g, or u
  misc_feature (23)..(23): n is a, c, g, or u
gaunagguuaangnucuuuguanu

SEQ ID NO: 62371 - RNA, 18 nt, Artificial Sequence
  Synthetic
  misc_feature (11)..(11): n is a, c, g, or u
  misc_feature (17)..(17): n is a, c, g, or u
guauccauuunaauacnu

SEQ ID NO: 62372 - RNA, 19 nt, Artificial Sequence
  Synthetic
  misc_feature (12)..(12): n is a, c, g, or u
  misc_feature (18)..(18): n is a, c, g, or u
gguauccauuunaauacnu

SEQ ID NO: 62373 - RNA, 20 nt, Artificial Sequence
  Synthetic
  misc_feature (13)..(13): n is a, c, g, or u
  misc_feature (19)..(19): n is a, c, g, or u
ggguauccauuunaauacnu

SEQ ID NO: 62374 - RNA, 21 nt, Artificial Sequence
  Synthetic
  misc_feature (14)..(14): n is a, c, g, or u
  misc_feature (20)..(20): n is a, c, g, or u
uggguauccauuunaauacnu

SEQ ID NO: 62375 - RNA, 22 nt, Artificial Sequence
  Synthetic
  misc_feature (15)..(15): n is a, c, g, or u
  misc_feature (21)..(21): n is a, c, g, or u
guggguauccauuunaauacnu

SEQ ID NO: 62376 - RNA, 23 nt, Artificial Sequence
  Synthetic
  misc_feature (16)..(16): n is a, c, g, or u
  misc_feature (22)..(22): n is a, c, g, or u
uguggguauccauuunaauacnu

SEQ ID NO: 62377 - RNA, 24 nt, Artificial Sequence
  Synthetic
  misc_feature (17)..(17): n is a, c, g, or u
  misc_feature (23)..(23): n is a, c, g, or u
cuguggguauccauuunaauacnu

SEQ ID NO: 62378 - RNA, 18 nt, Artificial Sequence
  Synthetic
  misc_feature (17)..(17): n is a, c, g, or u
uugaguauuuggugucnu

SEQ ID NO: 62379 - RNA, 19 nt, Artificial Sequence
  Synthetic
  misc_feature (18)..(18): n is a, c, g, or u
cuugaguauuuggugucnu

SEQ ID NO: 62380 - RNA, 20 nt, Artificial Sequence
  Synthetic
  misc_feature (19)..(19): n is a, c, g, or u
ucuugaguauuuggugucnu

SEQ ID NO: 62381 - RNA, 21 nt, Artificial Sequence
  Synthetic
  misc_feature (20)..(20): n is a, c, g, or u
uucuugaguauuuggugucnu

SEQ ID NO: 62382 - RNA, 22 nt, Artificial Sequence
  Synthetic
  misc_feature (21)..(21): n is a, c, g, or u
guucuugaguauuuggugucnu

SEQ ID NO: 62383 - RNA, 23 nt, Artificial Sequence
  Synthetic
  misc_feature (22)..(22): n is a, c, g, or u
aguucuugaguauuuggugucnu

SEQ ID NO: 62384 - RNA, 24 nt, Artificial Sequence
  Synthetic
  misc_feature (23)..(23): n is a, c, g, or u
caguucuugaguauuuggugucnu

SEQ ID NO: 62385 - RNA, 18 nt, Artificial Sequence
  Synthetic
  misc_feature (17)..(17): n is a, c, g, or u
gugggucaccauauucnu

SEQ ID NO: 62386 - RNA, 19 nt, Artificial Sequence
  Synthetic
  misc_feature (18)..(18): n is a, c, g, or u
ugugggucaccauauucnu

SEQ ID NO: 62387 - RNA, 20 nt, Artificial Sequence
  Synthetic
  misc_feature (19)..(19): n is a, c, g, or u
uugugggucaccauauucnu

SEQ ID NO: 62388 - RNA, 21 nt, Artificial Sequence
  Synthetic
  misc_feature (20)..(20): n is a, c, g, or u
uuugugggucaccauauucnu

SEQ ID NO: 62389 - RNA, 22 nt, Artificial Sequence
  Synthetic
  misc_feature (21)..(21): n is a, c, g, or u
uuuugugggucaccauauucnu

SEQ ID NO: 62390 - RNA, 23 nt, Artificial Sequence
  Synthetic
  misc_feature (22)..(22): n is a, c, g, or u
auuuugugggucaccauauucnu

SEQ ID NO: 62391 - RNA, 24 nt, Artificial Sequence
  Synthetic
  misc_feature (23)..(23): n is a, c, g, or u
cauuuugugggucaccauauucnu

SEQ ID NO: 62392 - RNA, 18 nt, Artificial Sequence
  Synthetic
  misc_feature (4)..(4): n is a, c, g, or u
  misc_feature (17)..(17): n is a, c, g, or u
uaangacugggaggagnu

SEQ ID NO: 62393 - RNA, 19 nt, Artificial Sequence
  Synthetic
  misc_feature (5)..(5): n is a, c, g, or u
  misc_feature (18)..(18): n is a, c, g, or u
uuaangacugggaggagnu

SEQ ID NO: 62394 - RNA, 20 nt, Artificial Sequence
  Synthetic
  misc_feature (6)..(6): n is a, c, g, or u
  misc_feature (19)..(19): n is a, c, g, or u
uuuaangacugggaggagnu

SEQ ID NO: 62395 - RNA, 21 nt, Artificial Sequence
  Synthetic
  misc_feature (7)..(7): n is a, c, g, or u
  misc_feature (20)..(20): n is a, c, g, or u
auuuaangacugggaggagnu

SEQ ID NO: 62396 - RNA, 22 nt, Artificial Sequence
  Synthetic
  misc_feature (8)..(8): n is a, c, g, or u
  misc_feature (21)..(21): n is a, c, g, or u
uauuuaangacugggaggagnu

SEQ ID NO: 62397 - RNA, 23 nt, Artificial Sequence
  Synthetic
  misc_feature (9)..(9): n is a, c, g, or u
  misc_feature (22)..(22): n is a, c, g, or u
guauuuaangacugggaggagnu

SEQ ID NO: 62398 - RNA, 24 nt, Artificial Sequence
  Synthetic
  misc_feature (10)..(10): n is a, c, g, or u
  misc_feature (23)..(23): n is a, c, g, or u
uguauuuaangacugggaggagnu

SEQ ID NO: 62399 - RNA, 18 nt, Artificial Sequence
  Synthetic
  misc_feature (1)..(1): n is a, c, g, or u
  misc_feature (10)..(10): n is a, c, g, or u
  misc_feature (16)..(17): n is a, c, g, or u
ncaggcacanggugunnu

SEQ ID NO: 62400 - RNA, 19 nt, Artificial Sequence
  Synthetic
  misc_feature (2)..(2): n is a, c, g, or u
  misc_feature (11)..(11): n is a, c, g, or u
  misc_feature (17)..(18): n is a, c, g, or u
cncaggcacanggugunnu

SEQ ID NO: 62401 - RNA, 20 nt, Artificial Sequence
  Synthetic
  misc_feature (3)..(3): n is a, c, g, or u
  misc_feature (12)..(12): n is a, c, g, or u
  misc_feature (18)..(19): n is a, c, g, or u
ccncaggcacanggugunnu

SEQ ID NO: 62402 - RNA, 21 nt, Artificial Sequence
  Synthetic
  misc_feature (1)..(1): n is a, c, g, or u
  misc_feature (4)..(4): n is a, c, g, or u
  misc_feature (13)..(13): n is a, c, g, or u
  misc_feature (19)..(20): n is a, c, g, or u
nccncaggcacanggugunnu

SEQ ID NO: 62403 - RNA, 22 nt, Artificial Sequence
  Synthetic
  misc_feature (2)..(2): n is a, c, g, or u
  misc_feature (5)..(5): n is a, c, g, or u
  misc_feature (14)..(14): n is a, c, g, or u
  misc_feature (20)..(21): n is a, c, g, or u
gnccncaggcacanggugunnu

SEQ ID NO: 62404 - RNA, 23 nt, Artificial Sequence
  Synthetic
  misc_feature (3)..(3): n is a, c, g, or u
  misc_feature (6)..(6): n is a, c, g, or u
  misc_feature (15)..(15): n is a, c, g, or u
  misc_feature (21)..(22): n is a, c, g, or u
agnccncaggcacanggugunnu

SEQ ID NO: 62405 - RNA, 24 nt, Artificial Sequence
  Synthetic
  misc_feature (4)..(4): n is a, c, g, or u
  misc_feature (7)..(7): n is a, c, g, or u
  misc_feature (16)..(16): n is a, c, g, or u
  misc_feature (22)..(23): n is a, c, g, or u
gagnccncaggcacanggugunnu

SEQ ID NO: 62406 - RNA, 18 nt, Artificial Sequence
  Synthetic
  misc_feature (17)..(17): n is a, c, g, or u
acaccgcuucagcccunu

SEQ ID NO: 62407 - RNA, 19 nt, Artificial Sequence
  Synthetic
  misc_feature (18)..(18): n is a, c, g, or u
gacaccgcuucagcccunu

SEQ ID NO: 62408 - RNA, 20 nt, Artificial Sequence
  Synthetic
  misc_feature (19)..(19): n is a, c, g, or u
cgacaccgcuucagcccunu

SEQ ID NO: 62409 - RNA, 21 nt, Artificial Sequence
  Synthetic
  misc_feature (20)..(20): n is a, c, g, or u
ucgacaccgcuucagcccunu

SEQ ID NO: 62410 - RNA, 22 nt, Artificial Sequence
  Synthetic
  misc_feature (21)..(21): n is a, c, g, or u
cucgacaccgcuucagcccunu

SEQ ID NO: 62411 - RNA, 23 nt, Artificial Sequence
  Synthetic
  misc_feature (22)..(22): n is a, c, g, or u
acucgacaccgcuucagcccunu

SEQ ID NO: 62412 - RNA, 24 nt, Artificial Sequence
  Synthetic
  misc_feature (23)..(23): n is a, c, g, or u
uacucgacaccgcuucagcccunu

SEQ ID NO: 62413 - RNA, 18 nt, Artificial Sequence
  Synthetic
  misc_feature (17)..(17): n is a, c, g, or u
cuuacaaggccuuucunu

SEQ ID NO: 62414 - RNA, 19 nt, Artificial Sequence
  Synthetic
  misc_feature (18)..(18): n is a, c, g, or u
acuuacaaggccuuucunu

SEQ ID NO: 62415 - RNA, 20 nt, Artificial Sequence
  Synthetic
  misc_feature (19)..(19): n is a, c, g, or u
aacuuacaaggccuuucunu

SEQ ID NO: 62416 - RNA, 21 nt, Artificial Sequence
  Synthetic
  misc_feature (20)..(20): n is a, c, g, or u
caacuuacaaggccuuucunu

SEQ ID NO: 62417 - RNA, 22 nt, Artificial Sequence
  Synthetic
  misc_feature (21)..(21): n is a, c, g, or u
ccaacuuacaaggccuuucunu

SEQ ID NO: 62418 - RNA, 23 nt, Artificial Sequence
  Synthetic
  misc_feature (22)..(22): n is a, c, g, or u
gccaacuuacaaggccuuucunu

SEQ ID NO: 62419 - RNA, 24 nt, Artificial Sequence
  Synthetic
  misc_feature (23)..(23): n is a, c, g, or u
cgccaacuuacaaggccuuucunu

SEQ ID NO: 62420 - RNA, 18 nt, Artificial Sequence
  Synthetic
  misc_feature (7)..(7): n is a, c, g, or u
  misc_feature (9)..(9): n is a, c, g, or u
  misc_feature (15)..(15): n is a, c, g, or u
  misc_feature (17)..(17): n is a, c, g, or u
augccancnagauununu

SEQ ID NO: 62421 - RNA, 19 nt, Artificial Sequence
  Synthetic
  misc_feature (8)..(8): n is a, c, g, or u
  misc_feature (10)..(10): n is a, c, g, or u
  misc_feature (16)..(16): n is a, c, g, or u
  misc_feature (18)..(18): n is a, c, g, or u
uaugccancnagauununu

SEQ ID NO: 62422 - RNA, 20 nt, Artificial Sequence
  Synthetic
  misc_feature (9)..(9): n is a, c, g, or u
  misc_feature (11)..(11): n is a, c, g, or u
  misc_feature (17)..(17): n is a, c, g, or u
  misc_feature (19)..(19): n is a, c, g, or u
uuaugccancnagauununu

SEQ ID NO: 62423 - RNA, 21 nt, Artificial Sequence
  Synthetic
  misc_feature (1)..(1): n is a, c, g, or u
  misc_feature (10)..(10): n is a, c, g, or u
  misc_feature (12)..(12): n is a, c, g, or u
  misc_feature (18)..(18): n is a, c, g, or u
  misc_feature (20)..(20): n is a, c, g, or u
nuuaugccancnagauununu

SEQ ID NO: 62424 - RNA, 22 nt, Artificial Sequence
  Synthetic
  misc_feature (1)..(2): n is a, c, g, or u
  misc_feature (11)..(11): n is a, c, g, or u
  misc_feature (13)..(13): n is a, c, g, or u
  misc_feature (19)..(19): n is a, c, g, or u
  misc_feature (21)..(21): n is a, c, g, or u
nnuuaugccancnagauununu

SEQ ID NO: 62425 - RNA, 23 nt, Artificial Sequence
  Synthetic
  misc_feature (2)..(3): n is a, c, g, or u
  misc_feature (12)..(12): n is a, c, g, or u
  misc_feature (14)..(14): n is a, c, g, or u
  misc_feature (20)..(20): n is a, c, g, or u
  misc_feature (22)..(22): n is a, c, g, or u
unnuuaugccancnagauununu

SEQ ID NO: 62426 - RNA, 24 nt, Artificial Sequence
  Synthetic
  misc_feature (3)..(4): n is a, c, g, or u
  misc_feature (13)..(13): n is a, c, g, or u
  misc_feature (15)..(15): n is a, c, g, or u
  misc_feature (21)..(21): n is a, c, g, or u
  misc_feature (23)..(23): n is a, c, g, or u
uunnuuaugccancnagauununu

SEQ ID NO: 62427 - RNA, 18 nt, Artificial Sequence
  Synthetic
  misc_feature (2)..(4): n is a, c, g, or u
annnaaaugugaacaauu

SEQ ID NO: 62428 - RNA, 19 nt, Artificial Sequence
  Synthetic
  misc_feature (3)..(5): n is a, c, g, or u
uannnaaaugugaacaauu

SEQ ID NO: 62429 - RNA, 20 nt, Artificial Sequence
  Synthetic
  misc_feature (4)..(6): n is a, c, g, or u
auannnaaaugugaacaauu

SEQ ID NO: 62430 - RNA, 21 nt, Artificial Sequence
  Synthetic
  misc_feature (5)..(7): n is a, c, g, or u
gauannnaaaugugaacaauu

SEQ ID NO: 62431 - RNA, 22 nt, Artificial Sequence
  Synthetic
  misc_feature (6)..(8): n is a, c, g, or u
ugauannnaaaugugaacaauu

SEQ ID NO: 62432 - RNA, 23 nt, Artificial Sequence
  Synthetic
  misc_feature (1)..(1): n is a, c, g, or u
  misc_feature (7)..(9): n is a, c, g, or u
nugauannnaaaugugaacaauu

SEQ ID NO: 62433 - RNA, 24 nt, Artificial Sequence
  Synthetic
  misc_feature (1)..(2): n is a, c, g, or u
  misc_feature (8)..(10): n is a, c, g, or u
nnugauannnaaaugugaacaauu

SEQ ID NO: 62434 - RNA, 18 nt, Artificial Sequence
  Synthetic
ugacccuuauaaagaauu

SEQ ID NO: 62435 - RNA, 19 nt, Artificial Sequence
  Synthetic
uugacccuuauaaagaauu

SEQ ID NO: 62436 - RNA, 20 nt, Artificial Sequence
  Synthetic
auugacccuuauaaagaauu

SEQ ID NO: 62437 - RNA, 21 nt, Artificial Sequence
  Synthetic
cauugacccuuauaaagaauu

SEQ ID NO: 62438 - RNA, 22 nt, Artificial Sequence
  Synthetic
acauugacccuuauaaagaauu

SEQ ID NO: 62439 - RNA, 23 nt, Artificial Sequence
  Synthetic
gacauugacccuuauaaagaauu

SEQ ID NO: 62440 - RNA, 24 nt, Artificial Sequence
  Synthetic
ggacauugacccuuauaaagaauu

SEQ ID NO: 62441 - RNA, 18 nt, Artificial Sequence
  Synthetic
  misc_feature (1)..(1): n is a, c, g, or u
  misc_feature (4)..(4): n is a, c, g, or u
  misc_feature (7)..(7): n is a, c, g, or u
ncunacnaaaaaugaauu

SEQ ID NO: 62442 - RNA, 19 nt, Artificial Sequence
  Synthetic
  misc_feature (2)..(2): n is a, c, g, or u
  misc_feature (5)..(5): n is a, c, g, or u
  misc_feature (8)..(8): n is a, c, g, or u
cncunacnaaaaaugaauu

SEQ ID NO: 62443 - RNA, 20 nt, Artificial Sequence
  Synthetic
  misc_feature (3)..(3): n is a, c, g, or u
  misc_feature (6)..(6): n is a, c, g, or u
  misc_feature (9)..(9): n is a, c, g, or u
ccncunacnaaaaaugaauu

SEQ ID NO: 62444 - RNA, 21 nt, Artificial Sequence
  Synthetic
  misc_feature (4)..(4): n is a, c, g, or u
  misc_feature (7)..(7): n is a, c, g, or u
  misc_feature (10)..(10): n is a, c, g, or u
cccncunacnaaaaaugaauu

SEQ ID NO: 62445 - RNA, 22 nt, Artificial Sequence
  Synthetic
  misc_feature (5)..(5): n is a, c, g, or u
  misc_feature (8)..(8): n is a, c, g, or u
  misc_feature (11)..(11): n is a, c, g, or u
gcccncunacnaaaaaugaauu

SEQ ID NO: 62446 - RNA, 23 nt, Artificial Sequence
  Synthetic
  misc_feature (6)..(6): n is a, c, g, or u
  misc_feature (9)..(9): n is a, c, g, or u
  misc_feature (12)..(12): n is a, c, g, or u
ggcccncunacnaaaaaugaauu

SEQ ID NO: 62447 - RNA, 24 nt, Artificial Sequence
  Synthetic
  misc_feature (7)..(7): n is a, c, g, or u
  misc_feature (10)..(10): n is a, c, g, or u
  misc_feature (13)..(13): n is a, c, g, or u
aggcccncunacnaaaaaugaauu

SEQ ID NO: 62448 - RNA, 18 nt, Artificial Sequence
  Synthetic
  misc_feature (15)..(15): n is a, c, g, or u
aaaguuugucaacgnauu

SEQ ID NO: 62449 - RNA, 19 nt, Artificial Sequence
  Synthetic
  misc_feature (16)..(16): n is a, c, g, or u
gaaaguuugucaacgnauu

SEQ ID NO: 62450 - RNA, 20 nt, Artificial Sequence
  Synthetic
  misc_feature (17)..(17): n is a, c, g, or u
ggaaaguuugucaacgnauu

SEQ ID NO: 62451 - RNA, 21 nt, Artificial Sequence
  Synthetic
  misc_feature (18)..(18): n is a, c, g, or u
uggaaaguuugucaacgnauu

SEQ ID NO: 62452 - RNA, 22 nt, Artificial Sequence
  Synthetic
  misc_feature (1)..(1): n is a, c, g, or u
  misc_feature (19)..(19): n is a, c, g, or u
nuggaaaguuugucaacgnauu

SEQ ID NO: 62453 - RNA, 23 nt, Artificial Sequence
  Synthetic
  misc_feature (2)..(2): n is a, c, g, or u
  misc_feature (20)..(20): n is a, c, g, or u
anuggaaaguuugucaacgnauu

SEQ ID NO: 62454 - RNA, 24 nt, Artificial Sequence
  Synthetic
  misc_feature (3)..(3): n is a, c, g, or u
  misc_feature (21)..(21): n is a, c, g, or u
ganuggaaaguuugucaacgnauu

SEQ ID NO: 62455 - RNA, 18 nt, Artificial Sequence
  Synthetic
uuugugggucaccauauu

SEQ ID NO: 62456 - RNA, 19 nt, Artificial Sequence
  Synthetic
uuuugugggucaccauauu

SEQ ID NO: 62457 - RNA, 20 nt, Artificial Sequence
  Synthetic
auuuugugggucaccauauu

SEQ ID NO: 62458 - RNA, 21 nt, Artificial Sequence
  Synthetic
cauuuugugggucaccauauu

SEQ ID NO: 62459 - RNA, 22 nt, Artificial Sequence
  Synthetic
ucauuuugugggucaccauauu

SEQ ID NO: 62460 - RNA, 23 nt, Artificial Sequence
  Synthetic
cucauuuugugggucaccauauu

SEQ ID NO: 62461 - RNA, 24 nt, Artificial Sequence
  Synthetic
ccucauuuugugggucaccauauu

SEQ ID NO: 62462 - RNA, 18 nt, Artificial Sequence
  Synthetic
uauggaugaucugguauu

SEQ ID NO: 62463 - RNA, 19 nt, Artificial Sequence
  Synthetic
auauggaugaucugguauu

SEQ ID NO: 62464 - RNA, 20 nt, Artificial Sequence
  Synthetic
uauauggaugaucugguauu

SEQ ID NO: 62465 - RNA, 21 nt, Artificial Sequence
  Synthetic
uuauauggaugaucugguauu

SEQ ID NO: 62466 - RNA, 22 nt, Artificial Sequence
  Synthetic
guuauauggaugaucugguauu

SEQ ID NO: 62467 - RNA, 23 nt, Artificial Sequence
  Synthetic
aguuauauggaugaucugguauu

SEQ ID NO: 62468 - RNA, 24 nt, Artificial Sequence
  Synthetic
uaguuauauggaugaucugguauu

SEQ ID NO: 62469 - RNA, 18 nt, Artificial Sequence
  Synthetic
uugucuuuucgccaacuu

SEQ ID NO: 62470 - RNA, 19 nt, Artificial Sequence
  Synthetic
uuugucuuuucgccaacuu

SEQ ID NO: 62471 - RNA, 20 nt, Artificial Sequence
  Synthetic
uuuugucuuuucgccaacuu

SEQ ID NO: 62472 - RNA, 21 nt, Artificial Sequence
  Synthetic
cuuuugucuuuucgccaacuu

SEQ ID NO: 62473 - RNA, 22 nt, Artificial Sequence
  Synthetic
gcuuuugucuuuucgccaacuu

SEQ ID NO: 62474 - RNA, 23 nt, Artificial Sequence
  Synthetic
ggcuuuugucuuuucgccaacuu

SEQ ID NO: 62475 - RNA, 24 nt, Artificial Sequence
  Synthetic
aggcuuuugucuuuucgccaacuu

SEQ ID NO: 62476 - RNA, 18 nt, Artificial Sequence
  Synthetic
  misc_feature (7)..(7): n is a, c, g, or u
ccuaucnuauccacacuu

SEQ ID NO: 62477 - RNA, 19 nt, Artificial Sequence
  Synthetic
  misc_feature (8)..(8): n is a, c, g, or u
cccuaucnuauccacacuu

SEQ ID NO: 62478 - RNA, 20 nt, Artificial Sequence
  Synthetic
  misc_feature (9)..(9): n is a, c, g, or u
ccccuaucnuauccacacuu

SEQ ID NO: 62479 - RNA, 21 nt, Artificial Sequence
  Synthetic
  misc_feature (10)..(10): n is a, c, g, or u
gccccuaucnuauccacacuu

SEQ ID NO: 62480 - RNA, 22 nt, Artificial Sequence
  Synthetic
  misc_feature (11)..(11): n is a, c, g, or u
ugccccuaucnuauccacacuu

SEQ ID NO: 62481 - RNA, 23 nt, Artificial Sequence
  Synthetic
  misc_feature (12)..(12): n is a, c, g, or u
augccccuaucnuauccacacuu

SEQ ID NO: 62482 - RNA, 24 nt, Artificial Sequence
  Synthetic
  misc_feature (13)..(13): n is a, c, g, or u
aaugccccuaucnuauccacacuu

SEQ ID NO: 62483 - RNA, 18 nt, Artificial Sequence
  Synthetic
cccaaccuccaaucacuu

SEQ ID NO: 62484 - RNA, 19 nt, Artificial Sequence
  Synthetic
ccccaaccuccaaucacuu

SEQ ID NO: 62485 - RNA, 20 nt, Artificial Sequence
  Synthetic
uccccaaccuccaaucacuu

SEQ ID NO: 62486 - RNA, 21 nt, Artificial Sequence
  Synthetic
guccccaaccuccaaucacuu

SEQ ID NO: 62487 - RNA, 22 nt, Artificial Sequence
  Synthetic
aguccccaaccuccaaucacuu

SEQ ID NO: 62488 - RNA, 23 nt, Artificial Sequence
  Synthetic
caguccccaaccuccaaucacuu

SEQ ID NO: 62489 - RNA, 24 nt, Artificial Sequence
  Synthetic
gcaguccccaaccuccaaucacuu

SEQ ID NO: 62490 - RNA, 18 nt, Artificial Sequence
  Synthetic
  misc_feature (3)..(4): n is a, c, g, or u
  misc_feature (10)..(10): n is a, c, g, or u
aannggacunuuggacuu

SEQ ID NO: 62491 - RNA, 19 nt, Artificial Sequence
  Synthetic
  misc_feature (4)..(5): n is a, c, g, or u
  misc_feature (11)..(11): n is a, c, g, or u
uaannggacunuuggacuu

SEQ ID NO: 62492 - RNA, 20 nt, Artificial Sequence
  Synthetic
  misc_feature (5)..(6): n is a, c, g, or u
  misc_feature (12)..(12): n is a, c, g, or u
auaannggacunuuggacuu

SEQ ID NO: 62493 - RNA, 21 nt, Artificial Sequence
  Synthetic
  misc_feature (6)..(7): n is a, c, g, or u
  misc_feature (13)..(13): n is a, c, g, or u
cauaannggacunuuggacuu

SEQ ID NO: 62494 - RNA, 22 nt, Artificial Sequence
  Synthetic
  misc_feature (7)..(8): n is a, c, g, or u
  misc_feature (14)..(14): n is a, c, g, or u
acauaannggacunuuggacuu

SEQ ID NO: 62495 - RNA, 23 nt, Artificial Sequence
  Synthetic
  misc_feature (8)..(9): n is a, c, g, or u
  misc_feature (15)..(15): n is a, c, g, or u
uacauaannggacunuuggacuu

SEQ ID NO: 62496 - RNA, 24 nt, Artificial Sequence
  Synthetic
  misc_feature (9)..(10): n is a, c, g, or u
  misc_feature (16)..(16): n is a, c, g, or u
uuacauaannggacunuuggacuu

SEQ ID NO: 62497 - RNA, 18 nt, Artificial Sequence
  Synthetic
  misc_feature (5)..(5): n is a, c, g, or u
gacanuauuugcauacuu

SEQ ID NO: 62498 - RNA, 19 nt, Artificial Sequence
  Synthetic
  misc_feature (6)..(6): n is a, c, g, or u
agacanuauuugcauacuu

SEQ ID NO: 62499 - RNA, 20 nt, Artificial Sequence
  Synthetic
  misc_feature (7)..(7): n is a, c, g, or u
cagacanuauuugcauacuu

SEQ ID NO: 62500 - RNA, 21 nt, Artificial Sequence
  Synthetic
  misc_feature (8)..(8): n is a, c, g, or u
ccagacanuauuugcauacuu

SEQ ID NO: 62501 - RNA, 22 nt, Artificial Sequence
  Synthetic
  misc_feature (9)..(9): n is a, c, g, or u
accagacanuauuugcauacuu

SEQ ID NO: 62502 - RNA, 23 nt, Artificial Sequence
  Synthetic
  misc_feature (1)..(1): n is a, c, g, or u
  misc_feature (10)..(10): n is a, c, g, or u
naccagacanuauuugcauacuu

SEQ ID NO: 62503 - RNA, 24 nt, Artificial Sequence
  Synthetic
  misc_feature (2)..(2): n is a, c, g, or u
  misc_feature (11)..(11): n is a, c, g, or u
anaccagacanuauuugcauacuu

SEQ ID NO: 62504 - RNA, 18 nt, Artificial Sequence
  Synthetic
acauuuccugccuuacuu

SEQ ID NO: 62505 - RNA, 19 nt, Artificial Sequence
  Synthetic
cacauuuccugccuuacuu

SEQ ID NO: 62506 - RNA, 20 nt, Artificial Sequence
  Synthetic
ucacauuuccugccuuacuu

SEQ ID NO: 62507 - RNA, 21 nt, Artificial Sequence
  Synthetic
uucacauuuccugccuuacuu

SEQ ID NO: 62508 - RNA, 22 nt, Artificial Sequence
  Synthetic
uuucacauuuccugccuuacuu

SEQ ID NO: 62509 - RNA, 23 nt, Artificial Sequence
  Synthetic
guuucacauuuccugccuuacuu

SEQ ID NO: 62510 - RNA, 24 nt, Artificial Sequence
  Synthetic
gguuucacauuuccugccuuacuu

SEQ ID NO: 62511 - RNA, 18 nt, Artificial Sequence
  Synthetic
gcgcaugcguggaaccuu

SEQ ID NO: 62512 - RNA, 19 nt, Artificial Sequence
  Synthetic
agcgcaugcguggaaccuu

SEQ ID NO: 62513 - RNA, 20 nt, Artificial Sequence
  Synthetic
cagcgcaugcguggaaccuu

SEQ ID NO: 62514 - RNA, 21 nt, Artificial Sequence
  Synthetic
ucagcgcaugcguggaaccuu

SEQ ID NO: 62515 - RNA, 22 nt, Artificial Sequence
  Synthetic
aucagcgcaugcguggaaccuu

SEQ ID NO: 62516 - RNA, 23 nt, Artificial Sequence
  Synthetic
caucagcgcaugcguggaaccuu

SEQ ID NO: 62517 - RNA, 24 nt, Artificial Sequence
  Synthetic
ccaucagcgcaugcguggaaccuu

SEQ ID NO: 62518 - RNA, 18 nt, Artificial Sequence
  Synthetic
gcauggacauugacccuu

SEQ ID NO: 62519 - RNA, 19 nt, Artificial Sequence
  Synthetic
ggcauggacauugacccuu

SEQ ID NO: 62520 - RNA, 20 nt, Artificial Sequence
  Synthetic
gggcauggacauugacccuu

SEQ ID NO: 62521 - RNA, 21 nt, Artificial Sequence
  Synthetic
ggggcauggacauugacccuu

SEQ ID NO: 62522 - RNA, 22 nt, Artificial Sequence
  Synthetic
uggggcauggacauugacccuu

SEQ ID NO: 62523 - RNA, 23 nt, Artificial Sequence
  Synthetic
uuggggcauggacauugacccuu

SEQ ID NO: 62524 - RNA, 24 nt, Artificial Sequence
  Synthetic
uuuggggcauggacauugacccuu

SEQ ID NO: 62525 - RNA, 18 nt, Artificial Sequence
  Synthetic
  misc_feature (11)..(11): n is a, c, g, or u
ucccaucaucnugggcuu

SEQ ID NO: 62526 - RNA, 19 nt, Artificial Sequence
  Synthetic
  misc_feature (12)..(12): n is a, c, g, or u
aucccaucaucnugggcuu

SEQ ID NO: 62527 - RNA, 20 nt, Artificial Sequence
  Synthetic
  misc_feature (13)..(13): n is a, c, g, or u
caucccaucaucnugggcuu

SEQ ID NO: 62528 - RNA, 21 nt, Artificial Sequence
  Synthetic
  misc_feature (14)..(14): n is a, c, g, or u
ccaucccaucaucnugggcuu

SEQ ID NO: 62529 - RNA, 22 nt, Artificial Sequence
  Synthetic
  misc_feature (15)..(15): n is a, c, g, or u
cccaucccaucaucnugggcuu

SEQ ID NO: 62530 - RNA, 23 nt, Artificial Sequence
  Synthetic
  misc_feature (16)..(16): n is a, c, g, or u
ucccaucccaucaucnugggcuu

SEQ ID NO: 62531 - RNA, 24 nt, Artificial Sequence
  Synthetic
  misc_feature (17)..(17): n is a, c, g, or u
uucccaucccaucaucnugggcuu

SEQ ID NO: 62532 - RNA, 18 nt, Artificial Sequence
  Synthetic
cugugccuuggguggcuu

SEQ ID NO: 62533 - RNA, 19 nt, Artificial Sequence
  Synthetic
gcugugccuuggguggcuu

SEQ ID NO: 62534 - RNA, 20 nt, Artificial Sequence
  Synthetic
agcugugccuuggguggcuu

SEQ ID NO: 62535 - RNA, 21 nt, Artificial Sequence
  Synthetic
aagcugugccuuggguggcuu

SEQ ID NO: 62536 - RNA, 22 nt, Artificial Sequence
  Synthetic
caagcugugccuuggguggcuu

SEQ ID NO: 62537 - RNA, 23 nt, Artificial Sequence
  Synthetic
ccaagcugugccuuggguggcuu

SEQ ID NO: 62538 - RNA, 24 nt, Artificial Sequence
  Synthetic
uccaagcugugccuuggguggcuu

SEQ ID NO: 62539 - RNA, 18 nt, Artificial Sequence
  Synthetic
  misc_feature (2)..(2): n is a, c, g, or u
anuuaaugacuuuggcuu

SEQ ID NO: 62540 - RNA, 19 nt, Artificial Sequence
  Synthetic
  misc_feature (3)..(3): n is a, c, g, or u
ganuuaaugacuuuggcuu

SEQ ID NO: 62541 - RNA, 20 nt, Artificial Sequence
  Synthetic
  misc_feature (4)..(4): n is a, c, g, or u
uganuuaaugacuuuggcuu

SEQ ID NO: 62542 - RNA, 21 nt, Artificial Sequence
  Synthetic
  misc_feature (5)..(5): n is a, c, g, or u
guganuuaaugacuuuggcuu

SEQ ID NO: 62543 - RNA, 22 nt, Artificial Sequence
  Synthetic
  misc_feature (6)..(6): n is a, c, g, or u
gguganuuaaugacuuuggcuu

SEQ ID NO: 62544 - RNA, 23 nt, Artificial Sequence
  Synthetic
  misc_feature (7)..(7): n is a, c, g, or u
ggguganuuaaugacuuuggcuu

SEQ ID NO: 62545 - RNA, 24 nt, Artificial Sequence
  Synthetic
  misc_feature (8)..(8): n is a, c, g, or u
gggguganuuaaugacuuuggcuu

SEQ ID NO: 62546 - RNA, 18 nt, Artificial Sequence
  Synthetic
  misc_feature (14)..(14): n is a, c, g, or u
uucgcacuccuccngcuu

SEQ ID NO: 62547 - RNA, 19 nt, Artificial Sequence
  Synthetic
  misc_feature (15)..(15): n is a, c, g, or u
auucgcacuccuccngcuu

SEQ ID NO: 62548 - RNA, 20 nt, Artificial Sequence
  Synthetic
  misc_feature (16)..(16): n is a, c, g, or u
gauucgcacuccuccngcuu

SEQ ID NO: 62549 - RNA, 21 nt, Artificial Sequence
  Synthetic
  misc_feature (17)..(17): n is a, c, g, or u
ggauucgcacuccuccngcuu

SEQ ID NO: 62550 - RNA, 22 nt, Artificial Sequence
  Synthetic
  misc_feature (18)..(18): n is a, c, g, or u
uggauucgcacuccuccngcuu

SEQ ID NO: 62551 - RNA, 23 nt, Artificial Sequence
  Synthetic
  misc_feature (19)..(19): n is a, c, g, or u
guggauucgcacuccuccngcuu

SEQ ID NO: 62552 - RNA, 24 nt, Artificial Sequence
  Synthetic
  misc_feature (20)..(20): n is a, c, g, or u
uguggauucgcacuccuccngcuu

SEQ ID NO: 62553 - RNA, 18 nt, Artificial Sequence
  Synthetic
  misc_feature (6)..(6): n is a, c, g, or u
  misc_feature (15)..(15): n is a, c, g, or u
caacgnauugugggncuu

SEQ ID NO: 62554 - RNA, 19 nt, Artificial Sequence
  Synthetic
  misc_feature (7)..(7): n is a, c, g, or u
  misc_feature (16)..(16): n is a, c, g, or u
ucaacgnauugugggncuu

SEQ ID NO: 62555 - RNA, 20 nt, Artificial Sequence
  Synthetic
  misc_feature (8)..(8): n is a, c, g, or u
  misc_feature (17)..(17): n is a, c, g, or u
gucaacgnauugugggncuu

SEQ ID NO: 62556 - RNA, 21 nt, Artificial Sequence
  Synthetic
  misc_feature (9)..(9): n is a, c, g, or u
  misc_feature (18)..(18): n is a, c, g, or u
ugucaacgnauugugggncuu

SEQ ID NO: 62557 - RNA, 22 nt, Artificial Sequence
  Synthetic
  misc_feature (10)..(10): n is a, c, g, or u
  misc_feature (19)..(19): n is a, c, g, or u
uugucaacgnauugugggncuu

SEQ ID NO: 62558 - RNA, 23 nt, Artificial Sequence
  Synthetic
  misc_feature (11)..(11): n is a, c, g, or u
  misc_feature (20)..(20): n is a, c, g, or u
uuugucaacgnauugugggncuu

SEQ ID NO: 62559 - RNA, 24 nt, Artificial Sequence
  Synthetic
  misc_feature (12)..(12): n is a, c, g, or u
  misc_feature (21)..(21): n is a, c, g, or u
guuugucaacgnauugugggncuu

SEQ ID NO: 62560 - RNA, 18 nt, Artificial Sequence
  Synthetic
ucucacaucaucaaucuu

SEQ ID NO: 62561 - RNA, 19 nt, Artificial Sequence
  Synthetic
cucucacaucaucaaucuu

SEQ ID NO: 62562 - RNA, 20 nt, Artificial Sequence
  Synthetic
ucucucacaucaucaaucuu

SEQ ID NO: 62563 - RNA, 21 nt, Artificial Sequence
  Synthetic
cucucucacaucaucaaucuu

SEQ ID NO: 62564 - RNA, 22 nt, Artificial Sequence
  Synthetic
ccucucucacaucaucaaucuu

SEQ ID NO: 62565 - RNA, 23 nt, Artificial Sequence
  Synthetic
gccucucucacaucaucaaucuu

SEQ ID NO: 62566 - RNA, 24 nt, Artificial Sequence
  Synthetic
ugccucucucacaucaucaaucuu

SEQ ID NO: 62567 - RNA, 18 nt, Artificial Sequence
  Synthetic
  misc_feature (7)..(7): n is a, c, g, or u
caauccncugggauucuu

SEQ ID NO: 62568 - RNA, 19 nt, Artificial Sequence
  Synthetic
  misc_feature (8)..(8): n is a, c, g, or u
ccaauccncugggauucuu

SEQ ID NO: 62569 - RNA, 20 nt, Artificial Sequence
  Synthetic
  misc_feature (9)..(9): n is a, c, g, or u
cccaauccncugggauucuu

SEQ ID NO: 62570 - RNA, 21 nt, Artificial Sequence
  Synthetic
  misc_feature (1)..(1): n is a, c, g, or u
  misc_feature (10)..(10): n is a, c, g, or u
ncccaauccncugggauucuu

SEQ ID NO: 62571 - RNA, 22 nt, Artificial Sequence
  Synthetic
  misc_feature (2)..(2): n is a, c, g, or u
  misc_feature (11)..(11): n is a, c, g, or u
uncccaauccncugggauucuu

SEQ ID NO: 62572 - RNA, 23 nt, Artificial Sequence
  Synthetic
  misc_feature (3)..(3): n is a, c, g, or u
  misc_feature (12)..(12): n is a, c, g, or u
guncccaauccncugggauucuu

SEQ ID NO: 62573 - RNA, 24 nt, Artificial Sequence
  Synthetic
  misc_feature (4)..(4): n is a, c, g, or u
  misc_feature (13)..(13): n is a, c, g, or u
uguncccaauccncugggauucuu

SEQ ID NO: 62574 - RNA, 18 nt, Artificial Sequence
  Synthetic
aucuucuuguugguucuu

SEQ ID NO: 62575 - RNA, 19 nt, Artificial Sequence
  Synthetic
caucuucuuguugguucuu

SEQ ID NO: 62576 - RNA, 20 nt, Artificial Sequence
  Synthetic
ucaucuucuuguugguucuu

SEQ ID NO: 62577 - RNA, 21 nt, Artificial Sequence
  Synthetic
cucaucuucuuguugguucuu

SEQ ID NO: 62578 - RNA, 22 nt, Artificial Sequence
  Synthetic
ccucaucuucuuguugguucuu

SEQ ID NO: 62579 - RNA, 23 nt, Artificial Sequence
  Synthetic
gccucaucuucuuguugguucuu

SEQ ID NO: 62580 - RNA, 24 nt, Artificial Sequence
  Synthetic
ugccucaucuucuuguugguucuu

SEQ ID NO: 62581 - RNA, 18 nt, Artificial Sequence
  Synthetic
acaggcgguguguuucuu

SEQ ID NO: 62582 - RNA, 19 nt, Artificial Sequence
  Synthetic
uacaggcgguguguuucuu

SEQ ID NO: 62583 - RNA, 20 nt, Artificial Sequence
  Synthetic
uuacaggcgguguguuucuu

SEQ ID NO: 62584 - RNA, 21 nt, Artificial Sequence
  Synthetic
guuacaggcgguguguuucuu

SEQ ID NO: 62585 - RNA, 22 nt, Artificial Sequence
  Synthetic
uguuacaggcgguguguuucuu

SEQ ID NO: 62586 - RNA, 23 nt, Artificial Sequence
  Synthetic
guguuacaggcgguguguuucuu

SEQ ID NO: 62587 - RNA, 24 nt, Artificial Sequence
  Synthetic
cguguuacaggcgguguguuucuu

SEQ ID NO: 62588 - RNA, 18 nt, Artificial Sequence
  Synthetic
uuuggaagagaaacaguu

SEQ ID NO: 62589 - RNA, 19 nt, Artificial Sequence
  Synthetic
uuuuggaagagaaacaguu

SEQ ID NO: 62590 - RNA, 20 nt, Artificial Sequence
  Synthetic
cuuuuggaagagaaacaguu

SEQ ID NO: 62591 - RNA, 21 nt, Artificial Sequence
  Synthetic
acuuuuggaagagaaacaguu

SEQ ID NO: 62592 - RNA, 22 nt, Artificial Sequence
  Synthetic
uacuuuuggaagagaaacaguu

SEQ ID NO: 62593 - RNA, 23 nt, Artificial Sequence
  Synthetic
uuacuuuuggaagagaaacaguu

SEQ ID NO: 62594 - RNA, 24 nt, Artificial Sequence
  Synthetic
cuuacuuuuggaagagaaacaguu

SEQ ID NO: 62595 - RNA, 18 nt, Artificial Sequence
  Synthetic
  misc_feature (8)..(8): n is a, c, g, or u
  misc_feature (14)..(14): n is a, c, g, or u
guuaugunauuggnaguu

SEQ ID NO: 62596 - RNA, 19 nt, Artificial Sequence
  Synthetic
  misc_feature (9)..(9): n is a, c, g, or u
  misc_feature (15)..(15): n is a, c, g, or u
gguuaugunauuggnaguu

SEQ ID NO: 62597 - RNA, 20 nt, Artificial Sequence
  Synthetic
  misc_feature (10)..(10): n is a, c, g, or u
  misc_feature (16)..(16): n is a, c, g, or u
ggguuaugunauuggnaguu

SEQ ID NO: 62598 - RNA, 21 nt, Artificial Sequence
  Synthetic
  misc_feature (11)..(11): n is a, c, g, or u
  misc_feature (17)..(17): n is a, c, g, or u
uggguuaugunauuggnaguu

SEQ ID NO: 62599 - RNA, 22 nt, Artificial Sequence
  Synthetic
  misc_feature (12)..(12): n is a, c, g, or u
  misc_feature (18)..(18): n is a, c, g, or u
auggguuaugunauuggnaguu

SEQ ID NO: 62600 - RNA, 23 nt, Artificial Sequence
  Synthetic
  misc_feature (13)..(13): n is a, c, g, or u
  misc_feature (19)..(19): n is a, c, g, or u
cauggguuaugunauuggnaguu

SEQ ID NO: 62601 - RNA, 24 nt, Artificial Sequence
  Synthetic
  misc_feature (14)..(14): n is a, c, g, or u
  misc_feature (20)..(20): n is a, c, g, or u
ucauggguuaugunauuggnaguu

SEQ ID NO: 62602 - RNA, 18 nt, Artificial Sequence
  Synthetic
  misc_feature (3)..(3): n is a, c, g, or u
  misc_feature (15)..(15): n is a, c, g, or u
ganuucuucccgucnguu

SEQ ID NO: 62603 - RNA, 19 nt, Artificial Sequence
  Synthetic
  misc_feature (4)..(4): n is a, c, g, or u
  misc_feature (16)..(16): n is a, c, g, or u
uganuucuucccgucnguu

SEQ ID NO: 62604 - RNA, 20 nt, Artificial Sequence
  Synthetic
  misc_feature (5)..(5): n is a, c, g, or u
  misc_feature (17)..(17): n is a, c, g, or u
cuganuucuucccgucnguu

SEQ ID NO: 62605 - RNA, 21 nt, Artificial Sequence
  Synthetic
  misc_feature (6)..(6): n is a, c, g, or u
  misc_feature (18)..(18): n is a, c, g, or u
ucuganuucuucccgucnguu

SEQ ID NO: 62606 - RNA, 22 nt, Artificial Sequence
  Synthetic
  misc_feature (7)..(7): n is a, c, g, or u
  misc_feature (19)..(19): n is a, c, g, or u
uucuganuucuucccgucnguu

SEQ ID NO: 62607 - RNA, 23 nt, Artificial Sequence
  Synthetic
  misc_feature (8)..(8): n is a, c, g, or u
  misc_feature (20)..(20): n is a, c, g, or u
cuucuganuucuucccgucnguu

SEQ ID NO: 62608 - RNA, 24 nt, Artificial Sequence
  Synthetic
  misc_feature (9)..(9): n is a, c, g, or u
  misc_feature (21)..(21): n is a, c, g, or u
ccuucuganuucuucccgucnguu

SEQ ID NO: 62609 - RNA, 18 nt, Artificial Sequence
  Synthetic
cuuccggaaacuacuguu

SEQ ID NO: 62610 - RNA, 19 nt, Artificial Sequence
  Synthetic
acuuccggaaacuacuguu

SEQ ID NO: 62611 - RNA, 20 nt, Artificial Sequence
  Synthetic
cacuuccggaaacuacuguu

SEQ ID NO: 62612 - RNA, 21 nt, Artificial Sequence
  Synthetic
acacuuccggaaacuacuguu

SEQ ID NO: 62613 - RNA, 22 nt, Artificial Sequence
  Synthetic
cacacuuccggaaacuacuguu

SEQ ID NO: 62614 - RNA, 23 nt, Artificial Sequence
  Synthetic
ccacacuuccggaaacuacuguu

SEQ ID NO: 62615 - RNA, 24 nt, Artificial Sequence
  Synthetic
uccacacuuccggaaacuacuguu

SEQ ID NO: 62616 - RNA, 18 nt, Artificial Sequence
  Synthetic
  misc_feature (8)..(8): n is a, c, g, or u
  misc_feature (11)..(11): n is a, c, g, or u
uucccucnugnugcuguu

SEQ ID NO: 62617 - RNA, 19 nt, Artificial Sequence
  Synthetic
  misc_feature (9)..(9): n is a, c, g, or u
  misc_feature (12)..(12): n is a, c, g, or u
uuucccucnugnugcuguu

SEQ ID NO: 62618 - RNA, 20 nt, Artificial Sequence
  Synthetic
  misc_feature (10)..(10): n is a, c, g, or u
  misc_feature (13)..(13): n is a, c, g, or u
guuucccucnugnugcuguu

SEQ ID NO: 62619 - RNA, 21 nt, Artificial Sequence
  Synthetic
  misc_feature (11)..(11): n is a, c, g, or u
  misc_feature (14)..(14): n is a, c, g, or u
uguuucccucnugnugcuguu

SEQ ID NO: 62620 - RNA, 22 nt, Artificial Sequence
  Synthetic
  misc_feature (12)..(12): n is a, c, g, or u
  misc_feature (15)..(15): n is a, c, g, or u
auguuucccucnugnugcuguu

SEQ ID NO: 62621 - RNA, 23 nt, Artificial Sequence
  Synthetic
  misc_feature (13)..(13): n is a, c, g, or u
  misc_feature (16)..(16): n is a, c, g, or u
uauguuucccucnugnugcuguu

SEQ ID NO: 62622 - RNA, 24 nt, Artificial Sequence
  Synthetic
  misc_feature (14)..(14): n is a, c, g, or u
  misc_feature (17)..(17): n is a, c, g, or u
cuauguuucccucnugnugcuguu

SEQ ID NO: 62623 - RNA, 18 nt, Artificial Sequence
  Synthetic
aggaccccugcucguguu

SEQ ID NO: 62624 - RNA, 19 nt, Artificial Sequence
  Synthetic
uaggaccccugcucguguu

SEQ ID NO: 62625 - RNA, 20 nt, Artificial Sequence
  Synthetic
cuaggaccccugcucguguu

SEQ ID NO: 62626 - RNA, 21 nt, Artificial Sequence
  Synthetic
ccuaggaccccugcucguguu

SEQ ID NO: 62627 - RNA, 22 nt, Artificial Sequence
  Synthetic
uccuaggaccccugcucguguu

SEQ ID NO: 62628 - RNA, 23 nt, Artificial Sequence
  Synthetic
cuccuaggaccccugcucguguu

SEQ ID NO: 62629 - RNA, 24 nt, Artificial Sequence
  Synthetic
acuccuaggaccccugcucguguu

SEQ ID NO: 62630 - RNA, 18 nt, Artificial Sequence
  Synthetic
ggcgguguguuucuuguu

SEQ ID NO: 62631 - RNA, 19 nt, Artificial Sequence
  Synthetic
aggcgguguguuucuuguu

SEQ ID NO: 62632 - RNA, 20 nt, Artificial Sequence
  Synthetic
caggcgguguguuucuuguu

SEQ ID NO: 62633 - RNA, 21 nt, Artificial Sequence
  Synthetic
acaggcgguguguuucuuguu

SEQ ID NO: 62634 - RNA, 22 nt, Artificial Sequence
  Synthetic
uacaggcgguguguuucuuguu

SEQ ID NO: 62635 - RNA, 23 nt, Artificial Sequence
  Synthetic
uuacaggcgguguguuucuuguu

SEQ ID NO: 62636 - RNA, 24 nt, Artificial Sequence
  Synthetic
guuacaggcgguguguuucuuguu

SEQ ID NO: 62637 - RNA, 18 nt, Artificial Sequence
  Synthetic
  misc_feature (16)..(16): n is a, c, g, or u
ucauaaggugggaaanuu

SEQ ID NO: 62638 - RNA, 19 nt, Artificial Sequence
  Synthetic
  misc_feature (17)..(17): n is a, c, g, or u
cucauaaggugggaaanuu

SEQ ID NO: 62639 - RNA, 20 nt, Artificial Sequence
  Synthetic
  misc_feature (18)..(18): n is a, c, g, or u
acucauaaggugggaaanuu

SEQ ID NO: 62640 - RNA, 21 nt, Artificial Sequence
  Synthetic
  misc_feature (19)..(19): n is a, c, g, or u
gacucauaaggugggaaanuu

SEQ ID NO: 62641 - RNA, 22 nt, Artificial Sequence
  Synthetic
  misc_feature (20)..(20): n is a, c, g, or u
ggacucauaaggugggaaanuu

SEQ ID NO: 62642 - RNA, 23 nt, Artificial Sequence
  Synthetic
  misc_feature (21)..(21): n is a, c, g, or u
uggacucauaaggugggaaanuu

SEQ ID NO: 62643 - RNA, 24 nt, Artificial Sequence
  Synthetic
  misc_feature (22)..(22): n is a, c, g, or u
uuggacucauaaggugggaaanuu

SEQ ID NO: 62644 - RNA, 18 nt, Artificial Sequence
  Synthetic
  misc_feature (1)..(1): n is a, c, g, or u
  misc_feature (7)..(7): n is a, c, g, or u
  misc_feature (16)..(16): n is a, c, g, or u
nuugugnugggguganuu

SEQ ID NO: 62645 - RNA, 19 nt, Artificial Sequence
  Synthetic
  misc_feature (2)..(2): n is a, c, g, or u
  misc_feature (8)..(8): n is a, c, g, or u
  misc_feature (17)..(17): n is a, c, g, or u
unuugugnugggguganuu

SEQ ID NO: 62646 - RNA, 20 nt, Artificial Sequence
  Synthetic
  misc_feature (3)..(3): n is a, c, g, or u
  misc_feature (9)..(9): n is a, c, g, or u
  misc_feature (18)..(18): n is a, c, g, or u
aunuugugnugggguganuu

SEQ ID NO: 62647 - RNA, 21 nt, Artificial Sequence
  Synthetic
  misc_feature (4)..(4): n is a, c, g, or u
  misc_feature (10)..(10): n is a, c, g, or u
  misc_feature (19)..(19): n is a, c, g, or u
uaunuugugnugggguganuu

SEQ ID NO: 62648 - RNA, 22 nt, Artificial Sequence
  Synthetic
  misc_feature (5)..(5): n is a, c, g, or u
  misc_feature (11)..(11): n is a, c, g, or u
  misc_feature (20)..(20): n is a, c, g, or u
cuaunuugugnugggguganuu

SEQ ID NO: 62649 - RNA, 23 nt, Artificial Sequence
  Synthetic
  misc_feature (6)..(6): n is a, c, g, or u
  misc_feature (12)..(12): n is a, c, g, or u
  misc_feature (21)..(21): n is a, c, g, or u
gcuaunuugugnugggguganuu

SEQ ID NO: 62650 - RNA, 24 nt, Artificial Sequence
  Synthetic
  misc_feature (7)..(7): n is a, c, g, or u
  misc_feature (13)..(13): n is a, c, g, or u
  misc_feature (22)..(22): n is a, c, g, or u
agcuaunuugugnugggguganuu

SEQ ID NO: 62651 - RNA, 18 nt, Artificial Sequence
  Synthetic
  misc_feature (16)..(16): n is a, c, g, or u
cccguuuguccucuanuu

SEQ ID NO: 62652 - RNA, 19 nt, Artificial Sequence
  Synthetic
  misc_feature (17)..(17): n is a, c, g, or u
gcccguuuguccucuanuu

SEQ ID NO: 62653 - RNA, 20 nt, Artificial Sequence
  Synthetic
  misc_feature (18)..(18): n is a, c, g, or u
ugcccguuuguccucuanuu

SEQ ID NO: 62654 - RNA, 21 nt, Artificial Sequence
  Synthetic
  misc_feature (19)..(19): n is a, c, g, or u
uugcccguuuguccucuanuu

SEQ ID NO: 62655 - RNA, 22 nt, Artificial Sequence
  Synthetic
  misc_feature (20)..(20): n is a, c, g, or u
guugcccguuuguccucuanuu

SEQ ID NO: 62656 - RNA, 23 nt, Artificial Sequence
  Synthetic
  misc_feature (21)..(21): n is a, c, g, or u
uguugcccguuuguccucuanuu

SEQ ID NO: 62657 - RNA, 24 nt, Artificial Sequence
  Synthetic
  misc_feature (22)..(22): n is a, c, g, or u
auguugcccguuuguccucuanuu

SEQ ID NO: 62658 - RNA, 18 nt, Artificial Sequence
  Synthetic
  misc_feature (1)..(1): n is a, c, g, or u
  misc_feature (7)..(8): n is a, c, g, or u
  misc_feature (10)..(10): n is a, c, g, or u
  misc_feature (16)..(16): n is a, c, g, or u
nggugunnunacaacnuu

SEQ ID NO: 62659 - RNA, 19 nt, Artificial Sequence
  Synthetic
  misc_feature (2)..(2): n is a, c, g, or u
  misc_feature (8)..(9): n is a, c, g, or u
  misc_feature (11)..(11): n is a, c, g, or u
  misc_feature (17)..(17): n is a, c, g, or u
anggugunnunacaacnuu

SEQ ID NO: 62660 - RNA, 20 nt, Artificial Sequence
  Synthetic
  misc_feature (3)..(3): n is a, c, g, or u
  misc_feature (9)..(10): n is a, c, g, or u
  misc_feature (12)..(12): n is a, c, g, or u
  misc_feature (18)..(18): n is a, c, g, or u
canggugunnunacaacnuu

SEQ ID NO: 62661 - RNA, 21 nt, Artificial Sequence
  Synthetic
  misc_feature (4)..(4): n is a, c, g, or u
  misc_feature (10)..(11): n is a, c, g, or u
  misc_feature (13)..(13): n is a, c, g, or u
  misc_feature (19)..(19): n is a, c, g, or u
acanggugunnunacaacnuu

SEQ ID NO: 62662 - RNA, 22 nt, Artificial Sequence
  Synthetic
  misc_feature (5)..(5): n is a, c, g, or u
  misc_feature (11)..(12): n is a, c, g, or u
  misc_feature (14)..(14): n is a, c, g, or u
  misc_feature (20)..(20): n is a, c, g, or u
cacanggugunnunacaacnuu

SEQ ID NO: 62663 - RNA, 23 nt, Artificial Sequence
  Synthetic
  misc_feature (6)..(6): n is a, c, g, or u
  misc_feature (12)..(13): n is a, c, g, or u
  misc_feature (15)..(15): n is a, c, g, or u
  misc_feature (21)..(21): n is a, c, g, or u
gcacanggugunnunacaacnuu

SEQ ID NO: 62664 - RNA, 24 nt, Artificial Sequence
  Synthetic
  misc_feature (7)..(7): n is a, c, g, or u
  misc_feature (13)..(14): n is a, c, g, or u
  misc_feature (16)..(16): n is a, c, g, or u
  misc_feature (22)..(22): n is a, c, g, or u
ggcacanggugunnunacaacnuu

SEQ ID NO: 62665 - RNA, 18 nt, Artificial Sequence
  Synthetic
  misc_feature (10)..(11): n is a, c, g, or u
  misc_feature (13)..(13): n is a, c, g, or u
  misc_feature (16)..(16): n is a, c, g, or u
gaacgccccnngnagnuu

SEQ ID NO: 62666 - RNA, 19 nt, Artificial Sequence
  Synthetic
  misc_feature (11)..(12): n is a, c, g, or u
  misc_feature (14)..(14): n is a, c, g, or u
  misc_feature (17)..(17): n is a, c, g, or u
ugaacgccccnngnagnuu

SEQ ID NO: 62667 - RNA, 20 nt, Artificial Sequence
  Synthetic
  misc_feature (12)..(13): n is a, c, g, or u
  misc_feature (15)..(15): n is a, c, g, or u
  misc_feature (18)..(18): n is a, c, g, or u
gugaacgccccnngnagnuu

SEQ ID NO: 62668 - RNA, 21 nt, Artificial Sequence
  Synthetic
  misc_feature (13)..(14): n is a, c, g, or u
  misc_feature (16)..(16): n is a, c, g, or u
  misc_feature (19)..(19): n is a, c, g, or u
cgugaacgccccnngnagnuu

SEQ ID NO: 62669 - RNA, 22 nt, Artificial Sequence
  Synthetic
  misc_feature (14)..(15): n is a, c, g, or u
  misc_feature (17)..(17): n is a, c, g, or u
  misc_feature (20)..(20): n is a, c, g, or u
ccgugaacgccccnngnagnuu

SEQ ID NO: 62670 - RNA, 23 nt, Artificial Sequence
  Synthetic
  misc_feature (15)..(16): n is a, c, g, or u
  misc_feature (18)..(18): n is a, c, g, or u
  misc_feature (21)..(21): n is a, c, g, or u
accgugaacgccccnngnagnuu

SEQ ID NO: 62671 - RNA, 24 nt, Artificial Sequence
  Synthetic
  misc_feature (16)..(17): n is a, c, g, or u
  misc_feature (19)..(19): n is a, c, g, or u
  misc_feature (22)..(22): n is a, c, g, or u
caccgugaacgccccnngnagnuu

SEQ ID NO: 62672 - RNA, 18 nt, Artificial Sequence
  Synthetic
  misc_feature (6)..(6): n is a, c, g, or u
  misc_feature (8)..(8): n is a, c, g, or u
  misc_feature (15)..(16): n is a, c, g, or u
agauununuccuaannuu

SEQ ID NO: 62673 - RNA, 19 nt, Artificial Sequence
  Synthetic
  misc_feature (1)..(1): n is a, c, g, or u
  misc_feature (7)..(7): n is a, c, g, or u
  misc_feature (9)..(9): n is a, c, g, or u
  misc_feature (16)..(17): n is a, c, g, or u
nagauununuccuaannuu

SEQ ID NO: 62674 - RNA, 20 nt, Artificial Sequence
  Synthetic
  misc_feature (2)..(2): n is a, c, g, or u
  misc_feature (8)..(8): n is a, c, g, or u
  misc_feature (10)..(10): n is a, c, g, or u
  misc_feature (17)..(18): n is a, c, g, or u
cnagauununuccuaannuu

SEQ ID NO: 62675 - RNA, 21 nt, Artificial Sequence
  Synthetic
  misc_feature (1)..(1): n is a, c, g, or u
  misc_feature (3)..(3): n is a, c, g, or u
  misc_feature (9)..(9): n is a, c, g, or u
  misc_feature (11)..(11): n is a, c, g, or u
  misc_feature (18)..(19): n is a, c, g, or u
ncnagauununuccuaannuu

SEQ ID NO: 62676 - RNA, 22 nt, Artificial Sequence
  Synthetic
  misc_feature (2)..(2): n is a, c, g, or u
  misc_feature (4)..(4): n is a, c, g, or u
  misc_feature (10)..(10): n is a, c, g, or u
  misc_feature (12)..(12): n is a, c, g, or u
  misc_feature (19)..(20): n is a, c, g, or u
ancnagauununuccuaannuu

SEQ ID NO: 62677 - RNA, 23 nt, Artificial Sequence
  Synthetic
  misc_feature (3)..(3): n is a, c, g, or u
  misc_feature (5)..(5): n is a, c, g, or u
  misc_feature (11)..(11): n is a, c, g, or u
  misc_feature (13)..(13): n is a, c, g, or u
  misc_feature (20)..(21): n is a, c, g, or u
cancnagauununuccuaannuu

SEQ ID NO: 62678 - RNA, 24 nt, Artificial Sequence
  Synthetic
  misc_feature (4)..(4): n is a, c, g, or u
  misc_feature (6)..(6): n is a, c, g, or u
  misc_feature (12)..(12): n is a, c, g, or u
  misc_feature (14)..(14): n is a, c, g, or u
  misc_feature (21)..(22): n is a, c, g, or u
ccancnagauununuccuaannuu

SEQ ID NO: 62679 - RNA, 18 nt, Artificial Sequence
  Synthetic
  misc_feature (1)..(3): n is a, c, g, or u
nnnaaaugugaacaauuu

SEQ ID NO: 62680 - RNA, 19 nt, Artificial Sequence
  Synthetic
  misc_feature (2)..(4): n is a, c, g, or u
annnaaaugugaacaauuu

SEQ ID NO: 62681 - RNA, 20 nt, Artificial Sequence
  Synthetic
  misc_feature (3)..(5): n is a, c, g, or u
uannnaaaugugaacaauuu

SEQ ID NO: 62682 - RNA, 21 nt, Artificial Sequence
  Synthetic
  misc_feature (4)..(6): n is a, c, g, or u
auannnaaaugugaacaauuu

SEQ ID NO: 62683 - RNA, 22 nt, Artificial Sequence
  Synthetic
  misc_feature (5)..(7): n is a, c, g, or u
gauannnaaaugugaacaauuu

SEQ ID NO: 62684 - RNA, 23 nt, Artificial Sequence
  Synthetic
  misc_feature (6)..(8): n is a, c, g, or u
ugauannnaaaugugaacaauuu

SEQ ID NO: 62685 - RNA, 24 nt, Artificial Sequence
  Synthetic
  misc_feature (1)..(1): n is a, c, g, or u
  misc_feature (7)..(9): n is a, c, g, or u
nugauannnaaaugugaacaauuu

SEQ ID NO: 62686 - RNA, 18 nt, Artificial Sequence
  Synthetic
guggacuucucucaauuu

SEQ ID NO: 62687 - RNA, 19 nt, Artificial Sequence
  Synthetic
gguggacuucucucaauuu

SEQ ID NO: 62688 - RNA, 20 nt, Artificial Sequence
  Synthetic
ugguggacuucucucaauuu

SEQ ID NO: 62689 - RNA, 21 nt, Artificial Sequence
  Synthetic
gugguggacuucucucaauuu

SEQ ID NO: 62690 - RNA, 22 nt, Artificial Sequence
  Synthetic
cgugguggacuucucucaauuu

SEQ ID NO: 62691 - RNA, 23 nt, Artificial Sequence
  Synthetic
ucgugguggacuucucucaauuu

SEQ ID NO: 62692 - RNA, 24 nt, Artificial Sequence
  Synthetic
cucgugguggacuucucucaauuu

SEQ ID NO: 62693 - RNA, 18 nt, Artificial Sequence
  Synthetic
acacguagcgccucauuu

SEQ ID NO: 62694 - RNA, 19 nt, Artificial Sequence
  Synthetic
cacacguagcgccucauuu

SEQ ID NO: 62695 - RNA, 20 nt, Artificial Sequence
  Synthetic
ccacacguagcgccucauuu

SEQ ID NO: 62696 - RNA, 21 nt, Artificial Sequence
  Synthetic
uccacacguagcgccucauuu

SEQ ID NO: 62697 - RNA, 22 nt, Artificial Sequence
  Synthetic
auccacacguagcgccucauuu

SEQ ID NO: 62698 - RNA, 23 nt, Artificial Sequence
  Synthetic
aauccacacguagcgccucauuu

SEQ ID NO: 62699 - RNA, 24 nt, Artificial Sequence
  Synthetic
gaauccacacguagcgccucauuu

SEQ ID NO: 62700 - RNA, 18 nt, Artificial Sequence
  Synthetic
  misc_feature (7)..(7): n is a, c, g, or u
  misc_feature (9)..(11): n is a, c, g, or u
  misc_feature (14)..(14): n is a, c, g, or u
ggguuanannnuanauuu

SEQ ID NO: 62701 - RNA, 19 nt, Artificial Sequence
  Synthetic
  misc_feature (8)..(8): n is a, c, g, or u
  misc_feature (10)..(12): n is a, c, g, or u
  misc_feature (15)..(15): n is a, c, g, or u
gggguuanannnuanauuu

SEQ ID NO: 62702 - RNA, 20 nt, Artificial Sequence
  Synthetic
  misc_feature (9)..(9): n is a, c, g, or u
  misc_feature (11)..(13): n is a, c, g, or u
  misc_feature (16)..(16): n is a, c, g, or u
ugggguuanannnuanauuu

SEQ ID NO: 62703 - RNA, 21 nt, Artificial Sequence
  Synthetic
  misc_feature (10)..(10): n is a, c, g, or u
  misc_feature (12)..(14): n is a, c, g, or u
  misc_feature (17)..(17): n is a, c, g, or u
augggguuanannnuanauuu

SEQ ID NO: 62704 - RNA, 22 nt, Artificial Sequence
  Synthetic
  misc_feature (11)..(11): n is a, c, g, or u
  misc_feature (13)..(15): n is a, c, g, or u
  misc_feature (18)..(18): n is a, c, g, or u
gaugggguuanannnuanauuu

SEQ ID NO: 62705 - RNA, 23 nt, Artificial Sequence
  Synthetic
  misc_feature (12)..(12): n is a, c, g, or u
  misc_feature (14)..(16): n is a, c, g, or u
  misc_feature (19)..(19): n is a, c, g, or u
agaugggguuanannnuanauuu

SEQ ID NO: 62706 - RNA, 24 nt, Artificial Sequence
  Synthetic
  misc_feature (13)..(13): n is a, c, g, or u
  misc_feature (15)..(17): n is a, c, g, or u
  misc_feature (20)..(20): n is a, c, g, or u
aagaugggguuanannnuanauuu

SEQ ID NO: 62707 - RNA, 18 nt, Artificial Sequence
  Synthetic
aucaaagacuguguauuu

SEQ ID NO: 62708 - RNA, 19 nt, Artificial Sequence
  Synthetic
caucaaagacuguguauuu

SEQ ID NO: 62709 - RNA, 20 nt, Artificial Sequence
  Synthetic
acaucaaagacuguguauuu

SEQ ID NO: 62710 - RNA, 21 nt, Artificial Sequence
  Synthetic
uacaucaaagacuguguauuu

SEQ ID NO: 62711 - RNA, 22 nt, Artificial Sequence
  Synthetic
auacaucaaagacuguguauuu

SEQ ID NO: 62712 - RNA, 23 nt, Artificial Sequence
  Synthetic
aauacaucaaagacuguguauuu

SEQ ID NO: 62713 - RNA, 24 nt, Artificial Sequence
  Synthetic
gaauacaucaaagacuguguauuu

SEQ ID NO: 62714 - RNA, 18 nt, Artificial Sequence
  Synthetic
  misc_feature (2)..(3): n is a, c, g, or u
  misc_feature (9)..(9): n is a, c, g, or u
annggacunuuggacuuu

SEQ ID NO: 62715 - RNA, 19 nt, Artificial Sequence
  Synthetic
  misc_feature (3)..(4): n is a, c, g, or u
  misc_feature (10)..(10): n is a, c, g, or u
aannggacunuuggacuuu

SEQ ID NO: 62716 - RNA, 20 nt, Artificial Sequence
  Synthetic
  misc_feature (4)..(5): n is a, c, g, or u
  misc_feature (11)..(11): n is a, c, g, or u
uaannggacunuuggacuuu

SEQ ID NO: 62717 - RNA, 21 nt, Artificial Sequence
  Synthetic
  misc_feature (5)..(6): n is a, c, g, or u
  misc_feature (12)..(12): n is a, c, g, or u
auaannggacunuuggacuuu

SEQ ID NO: 62718 - RNA, 22 nt, Artificial Sequence
  Synthetic
  misc_feature (6)..(7): n is a, c, g, or u
  misc_feature (13)..(13): n is a, c, g, or u
cauaannggacunuuggacuuu

SEQ ID NO: 62719 - RNA, 23 nt, Artificial Sequence
  Synthetic
  misc_feature (7)..(8): n is a, c, g, or u
  misc_feature (14)..(14): n is a, c, g, or u
acauaannggacunuuggacuuu

SEQ ID NO: 62720 - RNA, 24 nt, Artificial Sequence
  Synthetic
  misc_feature (8)..(9): n is a, c, g, or u
  misc_feature (15)..(15): n is a, c, g, or u
uacauaannggacunuuggacuuu

SEQ ID NO: 62721 - RNA, 18 nt, Artificial Sequence
  Synthetic
  misc_feature (4)..(4): n is a, c, g, or u
acanuauuugcauacuuu

SEQ ID NO: 62722 - RNA, 19 nt, Artificial Sequence
  Synthetic
  misc_feature (5)..(5): n is a, c, g, or u
gacanuauuugcauacuuu

SEQ ID NO: 62723 - RNA, 20 nt, Artificial Sequence
  Synthetic
  misc_feature (6)..(6): n is a, c, g, or u
agacanuauuugcauacuuu

SEQ ID NO: 62724 - RNA, 21 nt, Artificial Sequence
  Synthetic
  misc_feature (7)..(7): n is a, c, g, or u
cagacanuauuugcauacuuu

SEQ ID NO: 62725 - RNA, 22 nt, Artificial Sequence
  Synthetic
  misc_feature (8)..(8): n is a, c, g, or u
ccagacanuauuugcauacuuu

SEQ ID NO: 62726 - RNA, 23 nt, Artificial Sequence
  Synthetic
  misc_feature (9)..(9): n is a, c, g, or u
accagacanuauuugcauacuuu

SEQ ID NO: 62727 - RNA, 24 nt, Artificial Sequence
  Synthetic
  misc_feature (1)..(1): n is a, c, g, or u
  misc_feature (10)..(10): n is a, c, g, or u
naccagacanuauuugcauacuuu

SEQ ID NO: 62728 - RNA, 18 nt, Artificial Sequence
  Synthetic
cauuuccugccuuacuuu

SEQ ID NO: 62729 - RNA, 19 nt, Artificial Sequence
  Synthetic
acauuuccugccuuacuuu

SEQ ID NO: 62730 - RNA, 20 nt, Artificial Sequence
  Synthetic
cacauuuccugccuuacuuu

SEQ ID NO: 62731 - RNA, 21 nt, Artificial Sequence
  Synthetic
ucacauuuccugccuuacuuu

SEQ ID NO: 62732 - RNA, 22 nt, Artificial Sequence
  Synthetic
uucacauuuccugccuuacuuu

SEQ ID NO: 62733 - RNA, 23 nt, Artificial Sequence
  Synthetic
uuucacauuuccugccuuacuuu

SEQ ID NO: 62734 - RNA, 24 nt, Artificial Sequence
  Synthetic
guuucacauuuccugccuuacuuu

SEQ ID NO: 62735 - RNA, 18 nt, Artificial Sequence
  Synthetic
  misc_feature (10)..(10): n is a, c, g, or u
cccaucaucnugggcuuu

SEQ ID NO: 62736 - RNA, 19 nt, Artificial Sequence
  Synthetic
  misc_feature (11)..(11): n is a, c, g, or u
ucccaucaucnugggcuuu

SEQ ID NO: 62737 - RNA, 20 nt, Artificial Sequence
  Synthetic
  misc_feature (12)..(12): n is a, c, g, or u
aucccaucaucnugggcuuu

SEQ ID NO: 62738 - RNA, 21 nt, Artificial Sequence
  Synthetic
  misc_feature (13)..(13): n is a, c, g, or u
caucccaucaucnugggcuuu

SEQ ID NO: 62739 - RNA, 22 nt, Artificial Sequence
  Synthetic
  misc_feature (14)..(14): n is a, c, g, or u
ccaucccaucaucnugggcuuu

SEQ ID NO: 62740 - RNA, 23 nt, Artificial Sequence
  Synthetic
  misc_feature (15)..(15): n is a, c, g, or u
cccaucccaucaucnugggcuuu

SEQ ID NO: 62741 - RNA, 24 nt, Artificial Sequence
  Synthetic
  misc_feature (16)..(16): n is a, c, g, or u
ucccaucccaucaucnugggcuuu

SEQ ID NO: 62742 - RNA, 18 nt, Artificial Sequence
  Synthetic
  misc_feature (6)..(6): n is a, c, g, or u
aauccncugggauucuuu

SEQ ID NO: 62743 - RNA, 19 nt, Artificial Sequence
  Synthetic
  misc_feature (7)..(7): n is a, c, g, or u
caauccncugggauucuuu

SEQ ID NO: 62744 - RNA, 20 nt, Artificial Sequence
  Synthetic
  misc_feature (8)..(8): n is a, c, g, or u
ccaauccncugggauucuuu

SEQ ID NO: 62745 - RNA, 21 nt, Artificial Sequence
  Synthetic
  misc_feature (9)..(9): n is a, c, g, or u
cccaauccncugggauucuuu

SEQ ID NO: 62746 - RNA, 22 nt, Artificial Sequence
  Synthetic
  misc_feature (1)..(1): n is a, c, g, or u
  misc_feature (10)..(10): n is a, c, g, or u
ncccaauccncugggauucuuu

SEQ ID NO: 62747 - RNA, 23 nt, Artificial Sequence
  Synthetic
  misc_feature (2)..(2): n is a, c, g, or u
  misc_feature (11)..(11): n is a, c, g, or u
uncccaauccncugggauucuuu

SEQ ID NO: 62748 - RNA, 24 nt, Artificial Sequence
  Synthetic
  misc_feature (3)..(3): n is a, c, g, or u
  misc_feature (12)..(12): n is a, c, g, or u
guncccaauccncugggauucuuu

SEQ ID NO: 62749 - RNA, 18 nt, Artificial Sequence
  Synthetic
  misc_feature (2)..(2): n is a, c, g, or u
  misc_feature (8)..(8): n is a, c, g, or u
cnauuganuggaaaguuu

SEQ ID NO: 62750 - RNA, 19 nt, Artificial Sequence
  Synthetic
  misc_feature (3)..(3): n is a, c, g, or u
  misc_feature (9)..(9): n is a, c, g, or u
ccnauuganuggaaaguuu

SEQ ID NO: 62751 - RNA, 20 nt, Artificial Sequence
  Synthetic
  misc_feature (1)..(1): n is a, c, g, or u
  misc_feature (4)..(4): n is a, c, g, or u
  misc_feature (10)..(10): n is a, c, g, or u
nccnauuganuggaaaguuu

SEQ ID NO: 62752 - RNA, 21 nt, Artificial Sequence
  Synthetic
  misc_feature (2)..(2): n is a, c, g, or u
  misc_feature (5)..(5): n is a, c, g, or u
  misc_feature (11)..(11): n is a, c, g, or u
gnccnauuganuggaaaguuu

SEQ ID NO: 62753 - RNA, 22 nt, Artificial Sequence
  Synthetic
  misc_feature (3)..(3): n is a, c, g, or u
  misc_feature (6)..(6): n is a, c, g, or u
  misc_feature (12)..(12): n is a, c, g, or u
cgnccnauuganuggaaaguuu

SEQ ID NO: 62754 - RNA, 23 nt, Artificial Sequence
  Synthetic
  misc_feature (4)..(4): n is a, c, g, or u
  misc_feature (7)..(7): n is a, c, g, or u
  misc_feature (13)..(13): n is a, c, g, or u
ucgnccnauuganuggaaaguuu

SEQ ID NO: 62755 - RNA, 24 nt, Artificial Sequence
  Synthetic
  misc_feature (5)..(5): n is a, c, g, or u
  misc_feature (8)..(8): n is a, c, g, or u
  misc_feature (14)..(14): n is a, c, g, or u
aucgnccnauuganuggaaaguuu

SEQ ID NO: 62756 - RNA, 18 nt, Artificial Sequence
  Synthetic
ggccugugccaaguguuu

SEQ ID NO: 62757 - RNA, 19 nt, Artificial Sequence
  Synthetic
aggccugugccaaguguuu

SEQ ID NO: 62758 - RNA, 20 nt, Artificial Sequence
  Synthetic
caggccugugccaaguguuu

SEQ ID NO: 62759 - RNA, 21 nt, Artificial Sequence
  Synthetic
ccaggccugugccaaguguuu

SEQ ID NO: 62760 - RNA, 22 nt, Artificial Sequence
  Synthetic
gccaggccugugccaaguguuu

SEQ ID NO: 62761 - RNA, 23 nt, Artificial Sequence
  Synthetic
ggccaggccugugccaaguguuu

SEQ ID NO: 62762 - RNA, 24 nt, Artificial Sequence
  Synthetic
cggccaggccugugccaaguguuu

SEQ ID NO: 62763 - RNA, 18 nt, Artificial Sequence
  Synthetic
  misc_feature (15)..(15): n is a, c, g, or u
cauaaggugggaaanuuu

SEQ ID NO: 62764 - RNA, 19 nt, Artificial Sequence
  Synthetic
  misc_feature (16)..(16): n is a, c, g, or u
ucauaaggugggaaanuuu

SEQ ID NO: 62765 - RNA, 20 nt, Artificial Sequence
  Synthetic
  misc_feature (17)..(17): n is a, c, g, or u
cucauaaggugggaaanuuu

SEQ ID NO: 62766 - RNA, 21 nt, Artificial Sequence
  Synthetic
  misc_feature (18)..(18): n is a, c, g, or u
acucauaaggugggaaanuuu

SEQ ID NO: 62767 - RNA, 22 nt, Artificial Sequence
  Synthetic
  misc_feature (19)..(19): n is a, c, g, or u
gacucauaaggugggaaanuuu

SEQ ID NO: 62768 - RNA, 23 nt, Artificial Sequence
  Synthetic
  misc_feature (20)..(20): n is a, c, g, or u
ggacucauaaggugggaaanuuu

SEQ ID NO: 62769 - RNA, 24 nt, Artificial Sequence
  Synthetic
  misc_feature (21)..(21): n is a, c, g, or u
uggacucauaaggugggaaanuuu

SEQ ID NO: 62770 - RNA, 18 nt, Artificial Sequence
  Synthetic
uggacuucucucaauuuu

SEQ ID NO: 62771 - RNA, 19 nt, Artificial Sequence
  Synthetic
guggacuucucucaauuuu

SEQ ID NO: 62772 - RNA, 20 nt, Artificial Sequence
  Synthetic
gguggacuucucucaauuuu

SEQ ID NO: 62773 - RNA, 21 nt, Artificial Sequence
  Synthetic
ugguggacuucucucaauuuu

SEQ ID NO: 62774 - RNA, 22 nt, Artificial Sequence
  Synthetic
gugguggacuucucucaauuuu

SEQ ID NO: 62775 - RNA, 23 nt, Artificial Sequence
  Synthetic
cgugguggacuucucucaauuuu

SEQ ID NO: 62776 - RNA, 24 nt, Artificial Sequence
  Synthetic
ucgugguggacuucucucaauuuu

SEQ ID NO: 62777 - RNA, 18 nt, Artificial Sequence
  Synthetic
auuuccugccuuacuuuu

SEQ ID NO: 62778 - RNA, 19 nt, Artificial Sequence
  Synthetic
cauuuccugccuuacuuuu

SEQ ID NO: 62779 - RNA, 20 nt, Artificial Sequence
  Synthetic
acauuuccugccuuacuuuu

SEQ ID NO: 62780 - RNA, 21 nt, Artificial Sequence
  Synthetic
cacauuuccugccuuacuuuu

SEQ ID NO: 62781 - RNA, 22 nt, Artificial Sequence
  Synthetic
ucacauuuccugccuuacuuuu

SEQ ID NO: 62782 - RNA, 23 nt, Artificial Sequence
  Synthetic
uucacauuuccugccuuacuuuu

SEQ ID NO: 62783 - RNA, 24 nt, Artificial Sequence
  Synthetic
uuucacauuuccugccuuacuuuu

SEQ ID NO: 62784 - RNA, 18 nt, Artificial Sequence
  Synthetic
ugguuaacuccuucuuuu

SEQ ID NO: 62785 - RNA, 19 nt, Artificial Sequence
  Synthetic
cugguuaacuccuucuuuu

SEQ ID NO: 62786 - RNA, 20 nt, Artificial Sequence
  Synthetic
acugguuaacuccuucuuuu

SEQ ID NO: 62787 - RNA, 21 nt, Artificial Sequence
  Synthetic
  misc_feature (1)..(1): n is a, c, g, or u
nacugguuaacuccuucuuuu

SEQ ID NO: 62788 - RNA, 22 nt, Artificial Sequence
  Synthetic
  misc_feature (2)..(2): n is a, c, g, or u
unacugguuaacuccuucuuuu

SEQ ID NO: 62789 - RNA, 23 nt, Artificial Sequence
  Synthetic
  misc_feature (3)..(3): n is a, c, g, or u
cunacugguuaacuccuucuuuu

SEQ ID NO: 62790 - RNA, 24 nt, Artificial Sequence
  Synthetic
  misc_feature (4)..(4): n is a, c, g, or u
ccunacugguuaacuccuucuuuu

SEQ ID NO: 62791 - RNA, 18 nt, Artificial Sequence
  Synthetic
  misc_feature (4)..(4): n is a, c, g, or u
  misc_feature (12)..(12): n is a, c, g, or u
aaanucaaaganuguuuu

SEQ ID NO: 62792 - RNA, 19 nt, Artificial Sequence
  Synthetic
  misc_feature (1)..(1): n is a, c, g, or u
  misc_feature (5)..(5): n is a, c, g, or u
  misc_feature (13)..(13): n is a, c, g, or u
naaanucaaaganuguuuu

SEQ ID NO: 62793 - RNA, 20 nt, Artificial Sequence
  Synthetic
  misc_feature (2)..(2): n is a, c, g, or u
  misc_feature (6)..(6): n is a, c, g, or u
  misc_feature (14)..(14): n is a, c, g, or u
anaaanucaaaganuguuuu

SEQ ID NO: 62794 - RNA, 21 nt, Artificial Sequence
  Synthetic
  misc_feature (3)..(3): n is a, c, g, or u
  misc_feature (7)..(7): n is a, c, g, or u
  misc_feature (15)..(15): n is a, c, g, or u
canaaanucaaaganuguuuu

SEQ ID NO: 62795 - RNA, 22 nt, Artificial Sequence
  Synthetic
  misc_feature (4)..(4): n is a, c, g, or u
  misc_feature (8)..(8): n is a, c, g, or u
  misc_feature (16)..(16): n is a, c, g, or u
acanaaanucaaaganuguuuu

SEQ ID NO: 62796 - RNA, 23 nt, Artificial Sequence
  Synthetic
  misc_feature (5)..(5): n is a, c, g, or u
  misc_feature (9)..(9): n is a, c, g, or u
  misc_feature (17)..(17): n is a, c, g, or u
uacanaaanucaaaganuguuuu

SEQ ID NO: 62797 - RNA, 24 nt, Artificial Sequence
  Synthetic
  misc_feature (6)..(6): n is a, c, g, or u
  misc_feature (10)..(10): n is a, c, g, or u
  misc_feature (18)..(18): n is a, c, g, or u
guacanaaanucaaaganuguuuu

SEQ ID NO: 62798 - RNA, 17 nt, Artificial Sequence
  Synthetic
gcgaaccacugaacaaa

SEQ ID NO: 62799 - RNA, 17 nt, Artificial Sequence
  Synthetic
gaacggcagacggagaa

SEQ ID NO: 62800 - RNA, 17 nt, Artificial Sequence
  Synthetic
ggacggucccucucgaa

SEQ ID NO: 62801 - RNA, 17 nt, Artificial Sequence
  Synthetic
gccgggcaacgggguaa

SEQ ID NO: 62802 - RNA, 17 nt, Artificial Sequence
  Synthetic
gauuuggugggcguuca

SEQ ID NO: 62803 - RNA, 17 nt, Artificial Sequence
  Synthetic
gugcaauuuccguccga

SEQ ID NO: 62804 - RNA, 17 nt, Artificial Sequence
  Synthetic
gaugcccgccuuccaua

SEQ ID NO: 62805 - RNA, 17 nt, Artificial Sequence
  Synthetic
guucacuguuccggaac

SEQ ID NO: 62806 - RNA, 17 nt, Artificial Sequence
  Synthetic
gaggcaguagucggaac

SEQ ID NO: 62807 - RNA, 17 nt, Artificial Sequence
  Synthetic
guugcccggcaacggcc

SEQ ID NO: 62808 - RNA, 17 nt, Artificial Sequence
  Synthetic
gugggagcauucgggcc

SEQ ID NO: 62809 - RNA, 17 nt, Artificial Sequence
  Synthetic
guguauucaaucuaagc

SEQ ID NO: 62810 - RNA, 17 nt, Artificial Sequence
  Synthetic
ggcaagccauucuuugc

SEQ ID NO: 62811 - RNA, 17 nt, Artificial Sequence
  Synthetic
gcgaagugcacacgguc

SEQ ID NO: 62812 - RNA, 17 nt, Artificial Sequence
  Synthetic
gguauguaaauaguguc

SEQ ID NO: 62813 - RNA, 17 nt, Artificial Sequence
  Synthetic
gcaguauggaucggcag

SEQ ID NO: 62814 - RNA, 17 nt, Artificial Sequence
  Synthetic
gcgcaccucucuuuacg

SEQ ID NO: 62815 - RNA, 17 nt, Artificial Sequence
  Synthetic
ggccaucagcgcaugcg

SEQ ID NO: 62816 - RNA, 17 nt, Artificial Sequence
  Synthetic
gccaacuggauccugcg

SEQ ID NO: 62817 - RNA, 17 nt, Artificial Sequence
  Synthetic
  misc_feature (12)..(12): n is a, c, g, or u
gcggacgacccnucucg

SEQ ID NO: 62818 - RNA, 17 nt, Artificial Sequence
  Synthetic
gguggucuauaagcugg

SEQ ID NO: 62819 - RNA, 17 nt, Artificial Sequence
  Synthetic
gauugacgagaugagug

SEQ ID NO: 62820 - RNA, 17 nt, Artificial Sequence
  Synthetic
gacucugcgguauugug

SEQ ID NO: 62821 - RNA, 17 nt, Artificial Sequence
  Synthetic
gucaacgaccgaccuug

SEQ ID NO: 62822 - RNA, 17 nt, Artificial Sequence
  Synthetic
gacggucccucucgaau

SEQ ID NO: 62823 - RNA, 17 nt, Artificial Sequence
  Synthetic
ggagcucccgugugucu

SEQ ID NO: 62824 - RNA, 20 nt, Artificial Sequence
  Synthetic
gaucggcagaggagccacaa

SEQ ID NO: 62825 - RNA, 20 nt, Artificial Sequence
  Synthetic
guugccgggcaacgggguaa

SEQ ID NO: 62826 - RNA, 20 nt, Artificial Sequence
  Synthetic
gauucuucccccauucgaga

SEQ ID NO: 62827 - RNA, 20 nt, Artificial Sequence
  Synthetic
gaucuucgucugcgaggcga

SEQ ID NO: 62828 - RNA, 20 nt, Artificial Sequence
  Synthetic
guagcuccaaauucuuuaua

SEQ ID NO: 62829 - RNA, 20 nt, Artificial Sequence
  Synthetic
gacacuauuuacauacccua

SEQ ID NO: 62830 - RNA, 20 nt, Artificial Sequence
  Synthetic
gcgagggaguucuucuucua

SEQ ID NO: 62831 - RNA, 20 nt, Artificial Sequence
  Synthetic
ggacuucucucaauuuucua

SEQ ID NO: 62832 - RNA, 20 nt, Artificial Sequence
  Synthetic
ggaucaucaaccaccaguac

SEQ ID NO: 62833 - RNA, 20 nt, Artificial Sequence
  Synthetic
gguucggcagggucccguac

SEQ ID NO: 62834 - RNA, 20 nt, Artificial Sequence
  Synthetic
gaagcgaagugcacacgguc

SEQ ID NO: 62835 - RNA, 20 nt, Artificial Sequence
  Synthetic
gcuggauccaacuggugguc

SEQ ID NO: 62836 - RNA, 20 nt, Artificial Sequence
  Synthetic
guggucccaaucuggauuuc

SEQ ID NO: 62837 - RNA, 20 nt, Artificial Sequence
  Synthetic
gauugaauacacgcauacag

SEQ ID NO: 62838 - RNA, 20 nt, Artificial Sequence
  Synthetic
ggucuccaugcgacgugcag

SEQ ID NO: 62839 - RNA, 20 nt, Artificial Sequence
  Synthetic
gauugagaucuucugcgacg

SEQ ID NO: 62840 - RNA, 20 nt, Artificial Sequence
  Synthetic
ggggcgcaccucucuuuacg

SEQ ID NO: 62841 - RNA, 20 nt, Artificial Sequence
  Synthetic
guaaagagaggugcgccccg

SEQ ID NO: 62842 - RNA, 20 nt, Artificial Sequence
  Synthetic
gauugagaucuucgucugcg

SEQ ID NO: 62843 - RNA, 20 nt, Artificial Sequence
  Synthetic
ggguucacucccccacacgg

SEQ ID NO: 62844 - RNA, 20 nt, Artificial Sequence
  Synthetic
gauuuggugggcguucacgg

SEQ ID NO: 62845 - RNA, 20 nt, Artificial Sequence
  Synthetic
ggacggucccucucgaaugg

SEQ ID NO: 62846 - RNA, 20 nt, Artificial Sequence
  Synthetic
gucaaucuucucgaggauug

SEQ ID NO: 62847 - RNA, 20 nt, Artificial Sequence
  Synthetic
  misc_feature (10)..(10): n is a, c, g, or u
gcgcaugcgnggaaccuuug

SEQ ID NO: 62848 - RNA, 20 nt, Artificial Sequence
  Synthetic
ggcuuucggaaaauuccuau

SEQ ID NO: 62849 - RNA, 20 nt, Artificial Sequence
  Synthetic
guaacacgagcagggguccu

SEQ ID NO: 62850 - RNA, 20 nt, Artificial Sequence
  Synthetic
gggggagcucccgugugucu

SEQ ID NO: 62851 - RNA, 20 nt, Artificial Sequence
  Synthetic
guuuaaagacugggaggagu

SEQ ID NO: 62852 - RNA, 20 nt, Artificial Sequence
  Synthetic
guccucuuauguaagaccuu

SEQ ID NO: 62853 - RNA, 20 nt, Artificial Sequence
  Synthetic
  misc_feature (6)..(6): n is a, c, g, or u
gacccnucucggggucgcuu

SEQ ID NO: 62854 - RNA, 20 nt, Artificial Sequence
  Synthetic
ggguuauguaauuggaaguu

SEQ ID NO: 62855 - RNA, 20 nt, Artificial Sequence
  Synthetic
gaugugaugcuuuccauguu

SEQ ID NO: 62856 - RNA, 17 nt, Artificial Sequence
  Synthetic
ugacgggacguagacaa

SEQ ID NO: 62857 - RNA, 17 nt, Artificial Sequence
  Synthetic
cgccuguaacacgagca

SEQ ID NO: 62858 - RNA, 17 nt, Artificial Sequence
  Synthetic
caccucugcacgucgca

SEQ ID NO: 62859 - RNA, 17 nt, Artificial Sequence
  Synthetic
ugcacgacucuugcuca

SEQ ID NO: 62860 - RNA, 17 nt, Artificial Sequence
  Synthetic
cuucgucugcgaggcga

SEQ ID NO: 62861 - RNA, 17 nt, Artificial Sequence
  Synthetic
ccaacuggauccugcga

SEQ ID NO: 62862 - RNA, 17 nt, Artificial Sequence
  Synthetic
uguucaaaaccuucgga

SEQ ID NO: 62863 - RNA, 17 nt, Artificial Sequence
  Synthetic
ccgaaagcccaugauga

SEQ ID NO: 62864 - RNA, 17 nt, Artificial Sequence
  Synthetic
caugcgcugauggccua

SEQ ID NO: 62865 - RNA, 17 nt, Artificial Sequence
  Synthetic
cuaggaguuccgcagua

SEQ ID NO: 62866 - RNA, 17 nt, Artificial Sequence
  Synthetic
  misc_feature (8)..(8): n is a, c, g, or u
ccguuccngccgaccac

SEQ ID NO: 62867 - RNA, 17 nt, Artificial Sequence
  Synthetic
caggauucagcgcugac

SEQ ID NO: 62868 - RNA, 17 nt, Artificial Sequence
  Synthetic
ucaucaaccaccaguac

SEQ ID NO: 62869 - RNA, 17 nt, Artificial Sequence
  Synthetic
ucggcagggucccguac

SEQ ID NO: 62870 - RNA, 17 nt, Artificial Sequence
  Synthetic
accccugcucguguuac

SEQ ID NO: 62871 - RNA, 17 nt, Artificial Sequence
  Synthetic
accuuuaccccguugcc

SEQ ID NO: 62872 - RNA, 17 nt, Artificial Sequence
  Synthetic
  misc_feature (6)..(6): n is a, c, g, or u
cgagangggucguccgc

SEQ ID NO: 62873 - RNA, 17 nt, Artificial Sequence
  Synthetic
caaaggacgucccucgc

SEQ ID NO: 62874 - RNA, 17 nt, Artificial Sequence
  Synthetic
agucgugcagguucggc

SEQ ID NO: 62875 - RNA, 17 nt, Artificial Sequence
  Synthetic
auacaggccucuuacuc

SEQ ID NO: 62876 - RNA, 17 nt, Artificial Sequence
  Synthetic
  misc_feature (13)..(13): n is a, c, g, or u
ugcggacgacccnucuc

SEQ ID NO: 62877 - RNA, 17 nt, Artificial Sequence
  Synthetic
uccaccaaucggcaguc

SEQ ID NO: 62878 - RNA, 17 nt, Artificial Sequence
  Synthetic
ccaaggucuuacauaag

SEQ ID NO: 62879 - RNA, 17 nt, Artificial Sequence
  Synthetic
ugaauacacgcauacag

SEQ ID NO: 62880 - RNA, 17 nt, Artificial Sequence
  Synthetic
cuccaugcgacgugcag

SEQ ID NO: 62881 - RNA, 17 nt, Artificial Sequence
  Synthetic
uucuucccccauucgag

SEQ ID NO: 62882 - RNA, 17 nt, Artificial Sequence
  Synthetic
ugagaucuucugcgacg

SEQ ID NO: 62883 - RNA, 17 nt, Artificial Sequence
  Synthetic
aagagaggugcgccccg

SEQ ID NO: 62884 - RNA, 17 nt, Artificial Sequence
  Synthetic
ucuucgucugcgaggcg

SEQ ID NO: 62885 - RNA, 17 nt, Artificial Sequence
  Synthetic
ugagaucuucgucugcg

SEQ ID NO: 62886 - RNA, 17 nt, Artificial Sequence
  Synthetic
cgcagagucuagacucg

SEQ ID NO: 62887 - RNA, 17 nt, Artificial Sequence
  Synthetic
ccgauacagagcugagg

SEQ ID NO: 62888 - RNA, 17 nt, Artificial Sequence
  Synthetic
uucacucccccacacgg

SEQ ID NO: 62889 - RNA, 17 nt, Artificial Sequence
  Synthetic
uuggugggcguucacgg

SEQ ID NO: 62890 - RNA, 17 nt, Artificial Sequence
  Synthetic
cggucccucucgaaugg

SEQ ID NO: 62891 - RNA, 17 nt, Artificial Sequence
  Synthetic
agagucuagacucgugg

SEQ ID NO: 62892 - RNA, 17 nt, Artificial Sequence
  Synthetic
ugacugccgauuggugg

SEQ ID NO: 62893 - RNA, 17 nt, Artificial Sequence
  Synthetic
acggucccucucgaaug

SEQ ID NO: 62894 - RNA, 17 nt, Artificial Sequence
  Synthetic
ucugccgauccauacug

SEQ ID NO: 62895 - RNA, 17 nt, Artificial Sequence
  Synthetic
cacgagucuagacucug

SEQ ID NO: 62896 - RNA, 17 nt, Artificial Sequence
  Synthetic
  misc_feature (2)..(2): n is a, c, g, or u
cnucucggggucgcuug

SEQ ID NO: 62897 - RNA, 17 nt, Artificial Sequence
  Synthetic
  misc_feature (17)..(17): n is a, c, g, or u
cguagcgccucauuuun

SEQ ID NO: 62898 - RNA, 17 nt, Artificial Sequence
  Synthetic
cgauagccaggacaaau

SEQ ID NO: 62899 - RNA, 17 nt, Artificial Sequence
  Synthetic
agaugcccgccuuccau

SEQ ID NO: 62900 - RNA, 17 nt, Artificial Sequence
  Synthetic
aguuccgcaguauggau

SEQ ID NO: 62901 - RNA, 17 nt, Artificial Sequence
  Synthetic
cgaaagcccaugaugau

SEQ ID NO: 62902 - RNA, 17 nt, Artificial Sequence
  Synthetic
ccgccucagcucuguau

SEQ ID NO: 62903 - RNA, 17 nt, Artificial Sequence
  Synthetic
uacaggccucuuacucu

SEQ ID NO: 62904 - RNA, 17 nt, Artificial Sequence
  Synthetic
caaucuucucgaggauu

SEQ ID NO: 62905 - RNA, 17 nt, Artificial Sequence
  Synthetic
  misc_feature (8)..(8): n is a, c, g, or u
aaccgucnuagaguauu

SEQ ID NO: 62906 - RNA, 20 nt, Artificial Sequence
  Synthetic
ccggcgaaccacugaacaaa

SEQ ID NO: 62907 - RNA, 20 nt, Artificial Sequence
  Synthetic
cgcugacgggacguagacaa

SEQ ID NO: 62908 - RNA, 20 nt, Artificial Sequence
  Synthetic
uuuaccccguugcccggcaa

SEQ ID NO: 62909 - RNA, 20 nt, Artificial Sequence
  Synthetic
cuuggacggucccucucgaa

SEQ ID NO: 62910 - RNA, 20 nt, Artificial Sequence
  Synthetic
  misc_feature (14)..(14): n is a, c, g, or u
aaucaauaggccgnuuaaca

SEQ ID NO: 62911 - RNA, 20 nt, Artificial Sequence
  Synthetic
uaguauuccuuggacucaca

SEQ ID NO: 62912 - RNA, 20 nt, Artificial Sequence
  Synthetic
cacuuucucgccaacuuaca

SEQ ID NO: 62913 - RNA, 20 nt, Artificial Sequence
  Synthetic
ccccgccuguaacacgagca

SEQ ID NO: 62914 - RNA, 20 nt, Artificial Sequence
  Synthetic
agagucgugcagguucggca

SEQ ID NO: 62915 - RNA, 20 nt, Artificial Sequence
  Synthetic
ugcuuuccauguucggugca

SEQ ID NO: 62916 - RNA, 20 nt, Artificial Sequence
  Synthetic
ugggaacaagagcuacauca

SEQ ID NO: 62917 - RNA, 20 nt, Artificial Sequence
  Synthetic
caagauuuggugggcguuca

SEQ ID NO: 62918 - RNA, 20 nt, Artificial Sequence
  Synthetic
cugccaacuggauccugcga

SEQ ID NO: 62919 - RNA, 20 nt, Artificial Sequence
  Synthetic
cuauuuacauacccuaugga

SEQ ID NO: 62920 - RNA, 20 nt, Artificial Sequence
  Synthetic
agcucuuguucccaagaaua

SEQ ID NO: 62921 - RNA, 20 nt, Artificial Sequence
  Synthetic
ccggaaguguugauaagaua

SEQ ID NO: 62922 - RNA, 20 nt, Artificial Sequence
  Synthetic
acaaugcucaggagauucua

SEQ ID NO: 62923 - RNA, 20 nt, Artificial Sequence
  Synthetic
aggaucaucaaccaccagua

SEQ ID NO: 62924 - RNA, 20 nt, Artificial Sequence
  Synthetic
cggcuaggaguuccgcagua

SEQ ID NO: 62925 - RNA, 20 nt, Artificial Sequence
  Synthetic
cucugaaugcuggauccaac

SEQ ID NO: 62926 - RNA, 20 nt, Artificial Sequence
  Synthetic
aggguucacuguuccggaac

SEQ ID NO: 62927 - RNA, 20 nt, Artificial Sequence
  Synthetic
agugaggcaguagucggaac

SEQ ID NO: 62928 - RNA, 20 nt, Artificial Sequence
  Synthetic
uuugcugaugcaacccccac

SEQ ID NO: 62929 - RNA, 20 nt, Artificial Sequence
  Synthetic
ccgcaggauucagcgcugac

SEQ ID NO: 62930 - RNA, 20 nt, Artificial Sequence
  Synthetic
aggaccccugcucguguuac

SEQ ID NO: 62931 - RNA, 20 nt, Artificial Sequence
  Synthetic
uggcacuaguaaacugagcc

SEQ ID NO: 62932 - RNA, 20 nt, Artificial Sequence
  Synthetic
agacacauccagcgauagcc

SEQ ID NO: 62933 - RNA, 20 nt, Artificial Sequence
  Synthetic
cauuuguucagugguucgcc

SEQ ID NO: 62934 - RNA, 20 nt, Artificial Sequence
  Synthetic
cccguugcccggcaacggcc

SEQ ID NO: 62935 - RNA, 20 nt, Artificial Sequence
  Synthetic
ugaaccuuuaccccguugcc

SEQ ID NO: 62936 - RNA, 20 nt, Artificial Sequence
  Synthetic
ucuuguccuccaauuugucc

SEQ ID NO: 62937 - RNA, 20 nt, Artificial Sequence
  Synthetic
accccgccuguaacacgagc

SEQ ID NO: 62938 - RNA, 20 nt, Artificial Sequence
  Synthetic
  misc_feature (9)..(9): n is a, c, g, or u
ccccgagangggucguccgc

SEQ ID NO: 62939 - RNA, 20 nt, Artificial Sequence
  Synthetic
caauuuguccuggcuaucgc

SEQ ID NO: 62940 - RNA, 20 nt, Artificial Sequence
  Synthetic
agacaaaggacgucccucgc

SEQ ID NO: 62941 - RNA, 20 nt, Artificial Sequence
  Synthetic
ccauuuguucagugguucgc

SEQ ID NO: 62942 - RNA, 20 nt, Artificial Sequence
  Synthetic
cuguuguuagacgaagaggc

SEQ ID NO: 62943 - RNA, 20 nt, Artificial Sequence
  Synthetic
aggugcgccccguggucggc

SEQ ID NO: 62944 - RNA, 20 nt, Artificial Sequence
  Synthetic
aagagucgugcagguucggc

SEQ ID NO: 62945 - RNA, 20 nt, Artificial Sequence
  Synthetic
acuacuaggucccuggaugc

SEQ ID NO: 62946 - RNA, 20 nt, Artificial Sequence
  Synthetic
augcuuuccauguucggugc

SEQ ID NO: 62947 - RNA, 20 nt, Artificial Sequence
  Synthetic
aacauggaaagcaucacauc

SEQ ID NO: 62948 - RNA, 20 nt, Artificial Sequence
  Synthetic
  misc_feature (16)..(16): n is a, c, g, or u
uccugcggacgacccnucuc

SEQ ID NO: 62949 - RNA, 20 nt, Artificial Sequence
  Synthetic
uguuuugcucgcagcagguc

SEQ ID NO: 62950 - RNA, 20 nt, Artificial Sequence
  Synthetic
cuaauaugggccuaaaguuc

SEQ ID NO: 62951 - RNA, 20 nt, Artificial Sequence
  Synthetic
cggaacaggguucacuguuc

SEQ ID NO: 62952 - RNA, 20 nt, Artificial Sequence
  Synthetic
uggucgggaaaaaaucccag

SEQ ID NO: 62953 - RNA, 20 nt, Artificial Sequence
  Synthetic
uccgcaguauggaucggcag

SEQ ID NO: 62954 - RNA, 20 nt, Artificial Sequence
  Synthetic
ugauucuucccccauucgag

SEQ ID NO: 62955 - RNA, 20 nt, Artificial Sequence
  Synthetic
ucggaaaauuccuaugggag

SEQ ID NO: 62956 - RNA, 20 nt, Artificial Sequence
  Synthetic
cggaaguguugauaagauag

SEQ ID NO: 62957 - RNA, 20 nt, Artificial Sequence
  Synthetic
cguuuuucauuuacuguuag

SEQ ID NO: 62958 - RNA, 20 nt, Artificial Sequence
  Synthetic
  misc_feature (10)..(10): n is a, c, g, or u
ugccguuccngccgaccacg

SEQ ID NO: 62959 - RNA, 20 nt, Artificial Sequence
  Synthetic
acaaggugggaaauuuuacg

SEQ ID NO: 62960 - RNA, 20 nt, Artificial Sequence
  Synthetic
agaucuucgucugcgaggcg

SEQ ID NO: 62961 - RNA, 20 nt, Artificial Sequence
  Synthetic
uaccgcagagucuagacucg

SEQ ID NO: 62962 - RNA, 20 nt, Artificial Sequence
  Synthetic
accccugcucguguuacagg

SEQ ID NO: 62963 - RNA, 20 nt, Artificial Sequence
  Synthetic
aucccgauacagagcugagg

SEQ ID NO: 62964 - RNA, 20 nt, Artificial Sequence
  Synthetic
acuucucucaauuuucuagg

SEQ ID NO: 62965 - RNA, 20 nt, Artificial Sequence
  Synthetic
ucggcagggucccguacugg

SEQ ID NO: 62966 - RNA, 20 nt, Artificial Sequence
  Synthetic
uuugguggucuauaagcugg

SEQ ID NO: 62967 - RNA, 20 nt, Artificial Sequence
  Synthetic
cgcagagucuagacucgugg

SEQ ID NO: 62968 - RNA, 20 nt, Artificial Sequence
  Synthetic
uccugacugccgauuggugg

SEQ ID NO: 62969 - RNA, 20 nt, Artificial Sequence
  Synthetic
uggacggucccucucgaaug

SEQ ID NO: 62970 - RNA, 20 nt, Artificial Sequence
  Synthetic
uccucugccgauccauacug

SEQ ID NO: 62971 - RNA, 20 nt, Artificial Sequence
  Synthetic
caccacgagucuagacucug

SEQ ID NO: 62972 - RNA, 20 nt, Artificial Sequence
  Synthetic
cuagacucugcgguauugug

SEQ ID NO: 62973 - RNA, 20 nt, Artificial Sequence
  Synthetic
aaugucaacgaccgaccuug

SEQ ID NO: 62974 - RNA, 20 nt, Artificial Sequence
  Synthetic
  misc_feature (5)..(5): n is a, c, g, or u
acccnucucggggucgcuug

SEQ ID NO: 62975 - RNA, 20 nt, Artificial Sequence
  Synthetic
cagcgauagccaggacaaau

SEQ ID NO: 62976 - RNA, 20 nt, Artificial Sequence
  Synthetic
aggaggcuguaggcauaaau

SEQ ID NO: 62977 - RNA, 20 nt, Artificial Sequence
  Synthetic
uuggacggucccucucgaau

SEQ ID NO: 62978 - RNA, 20 nt, Artificial Sequence
  Synthetic
aggaguuccgcaguauggau

SEQ ID NO: 62979 - RNA, 20 nt, Artificial Sequence
  Synthetic
uuccgaaagcccaugaugau

SEQ ID NO: 62980 - RNA, 20 nt, Artificial Sequence
  Synthetic
ucucucaaagguggagugau

SEQ ID NO: 62981 - RNA, 20 nt, Artificial Sequence
  Synthetic
uuauauggaugaugugguau

SEQ ID NO: 62982 - RNA, 20 nt, Artificial Sequence
  Synthetic
auaccgccucagcucuguau

SEQ ID NO: 62983 - RNA, 20 nt, Artificial Sequence
  Synthetic
  misc_feature (7)..(7): n is a, c, g, or u
cgacccnucucggggucgcu

SEQ ID NO: 62984 - RNA, 20 nt, Artificial Sequence
  Synthetic
ugcgagcaaaacaagcggcu

SEQ ID NO: 62985 - RNA, 20 nt, Artificial Sequence
  Synthetic
  misc_feature (17)..(17): n is a, c, g, or u
auccugcggacgacccnucu

SEQ ID NO: 62986 - RNA, 20 nt, Artificial Sequence
  Synthetic
cacagaaaggccuuguaagu

SEQ ID NO: 62987 - RNA, 20 nt, Artificial Sequence
  Synthetic
cgucccucgcaggauccagu

SEQ ID NO: 62988 - RNA, 20 nt, Artificial Sequence
  Synthetic
cggaaaauuccuaugggagu

SEQ ID NO: 62989 - RNA, 20 nt, Artificial Sequence
  Synthetic
auuccuuggacucacaaggu

SEQ ID NO: 62990 - RNA, 20 nt, Artificial Sequence
  Synthetic
ugcuggauccaacugguggu

SEQ ID NO: 62991 - RNA, 20 nt, Artificial Sequence
  Synthetic
  misc_feature (2)..(2): n is a, c, g, or u
  misc_feature (19)..(19): n is a, c, g, or u
cncguagcgccucauuuunu

SEQ ID NO: 62992 - RNA, 20 nt, Artificial Sequence
  Synthetic
cgucaaucuucucgaggauu

SEQ ID NO: 62993 - RNA, 20 nt, Artificial Sequence
  Synthetic
  misc_feature (11)..(11): n is a, c, g, or u
agaaaccgucnuagaguauu

SEQ ID NO: 62994 - RNA, 17 nt, Artificial Sequence
  Synthetic
gagggcuccaccccaaa

SEQ ID NO: 62995 - RNA, 17 nt, Artificial Sequence
  Synthetic
gguaacagagguauaaa

SEQ ID NO: 62996 - RNA, 17 nt, Artificial Sequence
  Synthetic
ggaugagugucucucaa

SEQ ID NO: 62997 - RNA, 17 nt, Artificial Sequence
  Synthetic
  misc_feature (9)..(9): n is a, c, g, or u
ggaggaganuagauuaa

SEQ ID NO: 62998 - RNA, 17 nt, Artificial Sequence
  Synthetic
ggacccugcaccgaaca

SEQ ID NO: 62999 - RNA, 17 nt, Artificial Sequence
  Synthetic
ggguucacucccccaca

SEQ ID NO: 63000 - RNA, 17 nt, Artificial Sequence
  Synthetic
gugaagcgaagugcaca

SEQ ID NO: 63001 - RNA, 17 nt, Artificial Sequence
  Synthetic
  misc_feature (9)..(9): n is a, c, g, or u
gccguuccngccgacca

SEQ ID NO: 63002 - RNA, 17 nt, Artificial Sequence
  Synthetic
gcacagccuagcagcca

SEQ ID NO: 63003 - RNA, 17 nt, Artificial Sequence
  Synthetic
ggaagauccagcaucca

SEQ ID NO: 63004 - RNA, 17 nt, Artificial Sequence
  Synthetic
gucgugcagguucggca

SEQ ID NO: 63005 - RNA, 17 nt, Artificial Sequence
  Synthetic
gaggugaaaaaguugca

SEQ ID NO: 63006 - RNA, 17 nt, Artificial Sequence
  Synthetic
gaacaagagcuacauca

SEQ ID NO: 63007 - RNA, 17 nt, Artificial Sequence
  Synthetic
guucuucuggacuauca

SEQ ID NO: 63008 - RNA, 17 nt, Artificial Sequence
  Synthetic
gaaggaaagaagucaga

SEQ ID NO: 63009 - RNA, 17 nt, Artificial Sequence
  Synthetic
ggaacggcagacggaga

SEQ ID NO: 63010 - RNA, 17 nt, Artificial Sequence
  Synthetic
gcaugccuugagccuga

SEQ ID NO: 63011 - RNA, 17 nt, Artificial Sequence
  Synthetic
gcaggauucagcgcuga

SEQ ID NO: 63012 - RNA, 17 nt, Artificial Sequence
  Synthetic
gaaguguugauaagaua

SEQ ID NO: 63013 - RNA, 17 nt, Artificial Sequence
  Synthetic
gcuccaaauucuuuaua

SEQ ID NO: 63014 - RNA, 17 nt, Artificial Sequence
  Synthetic
ggaauuagaggacaaac

SEQ ID NO: 63015 - RNA, 17 nt, Artificial Sequence
  Synthetic
ggccguugccgggcaac

SEQ ID NO: 63016 - RNA, 17 nt, Artificial Sequence
  Synthetic
gcugaugcaacccccac

SEQ ID NO: 63017 - RNA, 17 nt, Artificial Sequence
  Synthetic
gaugagaaggcacagac

SEQ ID NO: 63018 - RNA, 17 nt, Artificial Sequence
  Synthetic
gacagugggggaaagcc

SEQ ID NO: 63019 - RNA, 17 nt, Artificial Sequence
  Synthetic
guuuguccucuaauucc

SEQ ID NO: 63020 - RNA, 17 nt, Artificial Sequence
  Synthetic
gaacuggagccaccagc

SEQ ID NO: 63021 - RNA, 17 nt, Artificial Sequence
  Synthetic
guguuugcucugaaugc

SEQ ID NO: 63022 - RNA, 17 nt, Artificial Sequence
  Synthetic
ggccuguauuuuccugc

SEQ ID NO: 63023 - RNA, 17 nt, Artificial Sequence
  Synthetic
gcaggaggcggaucugc

SEQ ID NO: 63024 - RNA, 17 nt, Artificial Sequence
  Synthetic
ggauuguggucccaauc

SEQ ID NO: 63025 - RNA, 17 nt, Artificial Sequence
  Synthetic
gagagacacucauccuc

SEQ ID NO: 63026 - RNA, 17 nt, Artificial Sequence
  Synthetic
ggauccaacuggugguc

SEQ ID NO: 63027 - RNA, 17 nt, Artificial Sequence
  Synthetic
ggcuuucccccacuguc

SEQ ID NO: 63028 - RNA, 17 nt, Artificial Sequence
  Synthetic
gcugguggcuccaguuc

SEQ ID NO: 63029 - RNA, 17 nt, Artificial Sequence
  Synthetic
gucccaaucuggauuuc

SEQ ID NO: 63030 - RNA, 17 nt, Artificial Sequence
  Synthetic
  misc_feature (5)..(5): n is a, c, g, or u
gaaangauguauauuuc

SEQ ID NO: 63031 - RNA, 17 nt, Artificial Sequence
  Synthetic
gcugcgagcaaaacaag

SEQ ID NO: 63032 - RNA, 17 nt, Artificial Sequence
  Synthetic
ggccaagccccagccag

SEQ ID NO: 63033 - RNA, 17 nt, Artificial Sequence
  Synthetic
gccuguaacacgagcag

SEQ ID NO: 63034 - RNA, 17 nt, Artificial Sequence
  Synthetic
ggagaccgcguaaagag

SEQ ID NO: 63035 - RNA, 17 nt, Artificial Sequence
  Synthetic
gaaaauuccuaugggag

SEQ ID NO: 63036 - RNA, 17 nt, Artificial Sequence
  Synthetic
gggaguucuucuucuag

SEQ ID NO: 63037 - RNA, 17 nt, Artificial Sequence
  Synthetic
gaugauccuggaauuag

SEQ ID NO: 63038 - RNA, 17 nt, Artificial Sequence
  Synthetic
gccguugccgggcaacg

SEQ ID NO: 63039 - RNA, 17 nt, Artificial Sequence
  Synthetic
gacucuagcuaccuggg

SEQ ID NO: 63040 - RNA, 17 nt, Artificial Sequence
  Synthetic
gcagggucccguacugg

SEQ ID NO: 63041 - RNA, 17 nt, Artificial Sequence
  Synthetic
ggaugaugugguauugg

SEQ ID NO: 63042 - RNA, 17 nt, Artificial Sequence
  Synthetic
gauccugcagagcuugg

SEQ ID NO: 63043 - RNA, 17 nt, Artificial Sequence
  Synthetic
gccccuuuuacacaaug

SEQ ID NO: 63044 - RNA, 17 nt, Artificial Sequence
  Synthetic
gaaccaacaagaagaug

SEQ ID NO: 63045 - RNA, 17 nt, Artificial Sequence
  Synthetic
gucagcgcugaauccug

SEQ ID NO: 63046 - RNA, 17 nt, Artificial Sequence
  Synthetic
gcaacccccacuggcug

SEQ ID NO: 63047 - RNA, 17 nt, Artificial Sequence
  Synthetic
ggucuuuguugggauug

SEQ ID NO: 63048 - RNA, 17 nt, Artificial Sequence
  Synthetic
  misc_feature (17)..(17): n is a, c, g, or u
gaaaacucccuguuaan

SEQ ID NO: 63049 - RNA, 17 nt, Artificial Sequence
  Synthetic
ggcuggggcuuggccau

SEQ ID NO: 63050 - RNA, 17 nt, Artificial Sequence
  Synthetic
ggaaguguugauaagau

SEQ ID NO: 63051 - RNA, 17 nt, Artificial Sequence
  Synthetic
gcccaugaugaugggau

SEQ ID NO: 63052 - RNA, 17 nt, Artificial Sequence
  Synthetic
gccuccaagcugugccu

SEQ ID NO: 63053 - RNA, 17 nt, Artificial Sequence
  Synthetic
gagcaaaacaagcggcu

SEQ ID NO: 63054 - RNA, 17 nt, Artificial Sequence
  Synthetic
gcaagccauucuuugcu

SEQ ID NO: 63055 - RNA, 17 nt, Artificial Sequence
  Synthetic
guuuuauaccuuucucu

SEQ ID NO: 63056 - RNA, 17 nt, Artificial Sequence
  Synthetic
gagggaguucuucuucu

SEQ ID NO: 63057 - RNA, 17 nt, Artificial Sequence
  Synthetic
guuauguaauuggaagu

SEQ ID NO: 63058 - RNA, 17 nt, Artificial Sequence
  Synthetic
gccaagccccagccagu

SEQ ID NO: 63059 - RNA, 17 nt, Artificial Sequence
  Synthetic
gccaacaagguaggagu

SEQ ID NO: 63060 - RNA, 17 nt, Artificial Sequence
  Synthetic
gaaguaugccucaaggu

SEQ ID NO: 63061 - RNA, 17 nt, Artificial Sequence
  Synthetic
gguggagugauuggggu

SEQ ID NO: 63062 - RNA, 17 nt, Artificial Sequence
  Synthetic
gaggugcgccccguggu

SEQ ID NO: 63063 - RNA, 17 nt, Artificial Sequence
  Synthetic
  misc_feature (10)..(10): n is a, c, g, or u
guaugucaangaauugu

SEQ ID NO: 63064 - RNA, 17 nt, Artificial Sequence
  Synthetic
  misc_feature (10)..(10): n is a, c, g, or u
  misc_feature (16)..(16): n is a, c, g, or u
ggugaguganuggagnu

SEQ ID NO: 63065 - RNA, 17 nt, Artificial Sequence
  Synthetic
  misc_feature (16)..(16): n is a, c, g, or u
guagcgccucauuuunu

SEQ ID NO: 63066 - RNA, 17 nt, Artificial Sequence
  Synthetic
gacccuuauaaagaauu

SEQ ID NO: 63067 - RNA, 17 nt, Artificial Sequence
  Synthetic
guaggagugggagcauu

SEQ ID NO: 63068 - RNA, 17 nt, Artificial Sequence
  Synthetic
gauaagauaggggcauu

SEQ ID NO: 63069 - RNA, 17 nt, Artificial Sequence
  Synthetic
gauggaguuuuccaguu

SEQ ID NO: 63070 - RNA, 17 nt, Artificial Sequence
  Synthetic
guaaauagugucugguu

SEQ ID NO: 63071 - RNA, 17 nt, Artificial Sequence
  Synthetic
gugaugcuuuccauguu

SEQ ID NO: 63072 - RNA, 17 nt, Artificial Sequence
  Synthetic
guccaguggucuuuguu

SEQ ID NO: 63073 - RNA, 17 nt, Artificial Sequence
  Synthetic
  misc_feature (9)..(9): n is a, c, g, or u
  misc_feature (15)..(15): n is a, c, g, or u
gugaguganuggagnuu

SEQ ID NO: 63074 - RNA, 17 nt, Artificial Sequence
  Synthetic
gugccuuggguggcuuu

SEQ ID NO: 63075 - RNA, 17 nt, Artificial Sequence
  Synthetic
gaguauuuggugucuuu

SEQ ID NO: 63076 - RNA, 20 nt, Artificial Sequence
  Synthetic
  misc_feature (5)..(5): n is a, c, g, or u
gauanccacauuguguaaaa

SEQ ID NO: 63077 - RNA, 20 nt, Artificial Sequence
  Synthetic
guaaacugagccaggagaaa

SEQ ID NO: 63078 - RNA, 20 nt, Artificial Sequence
  Synthetic
  misc_feature (6)..(6): n is a, c, g, or u
ggauanccacauuguguaaa

SEQ ID NO: 63079 - RNA, 20 nt, Artificial Sequence
  Synthetic
  misc_feature (12)..(12): n is a, c, g, or u
gggggaggaganuagauuaa

SEQ ID NO: 63080 - RNA, 20 nt, Artificial Sequence
  Synthetic
gugaggcaguagucggaaca

SEQ ID NO: 63081 - RNA, 20 nt, Artificial Sequence
  Synthetic
gaggugaagcgaagugcaca

SEQ ID NO: 63082 - RNA, 20 nt, Artificial Sequence
  Synthetic
gcagcacagccuagcagcca

SEQ ID NO: 63083 - RNA, 20 nt, Artificial Sequence
  Synthetic
  misc_feature (14)..(14): n is a, c, g, or u
ggaaauauacaucnuuucca

SEQ ID NO: 63084 - RNA, 20 nt, Artificial Sequence
  Synthetic
gcagaggugaaaaaguugca

SEQ ID NO: 63085 - RNA, 20 nt, Artificial Sequence
  Synthetic
guauucccaucccaucauca

SEQ ID NO: 63086 - RNA, 20 nt, Artificial Sequence
  Synthetic
ggguggagcccucaggcuca

SEQ ID NO: 63087 - RNA, 20 nt, Artificial Sequence
  Synthetic
  misc_feature (14)..(14): n is a, c, g, or u
gggauauucccuanauuuca

SEQ ID NO: 63088 - RNA, 20 nt, Artificial Sequence
  Synthetic
ggcagaugagaaggcacaga

SEQ ID NO: 63089 - RNA, 20 nt, Artificial Sequence
  Synthetic
  misc_feature (4)..(4): n is a, c, g, or u
  misc_feature (13)..(13): n is a, c, g, or u
gggnaaauauuunguagaga

SEQ ID NO: 63090 - RNA, 20 nt, Artificial Sequence
  Synthetic
  misc_feature (3)..(3): n is a, c, g, or u
gcnggaacggcagacggaga

SEQ ID NO: 63091 - RNA, 20 nt, Artificial Sequence
  Synthetic
gaaagcccaugaugauggga

SEQ ID NO: 63092 - RNA, 20 nt, Artificial Sequence
  Synthetic
gguuuugaacagcaacauga

SEQ ID NO: 63093 - RNA, 20 nt, Artificial Sequence
  Synthetic
gggcuuucggaaaauuccua

SEQ ID NO: 63094 - RNA, 20 nt, Artificial Sequence
  Synthetic
gaauuuuggccaagacacac

SEQ ID NO: 63095 - RNA, 20 nt, Artificial Sequence
  Synthetic
gcagaugagaaggcacagac

SEQ ID NO: 63096 - RNA, 20 nt, Artificial Sequence
  Synthetic
gcaaacacuuggcacagacc

SEQ ID NO: 63097 - RNA, 20 nt, Artificial Sequence
  Synthetic
ggagugggagcauucgggcc

SEQ ID NO: 63098 - RNA, 20 nt, Artificial Sequence
  Synthetic
  misc_feature (10)..(10): n is a, c, g, or u
gcacagaccnggccguugcc

SEQ ID NO: 63099 - RNA, 20 nt, Artificial Sequence
  Synthetic
guacuggugguugaugaucc

SEQ ID NO: 63100 - RNA, 20 nt, Artificial Sequence
  Synthetic
gggccucagcccguuucucc

SEQ ID NO: 63101 - RNA, 20 nt, Artificial Sequence
  Synthetic
gcauacagaggcauuaaagc

SEQ ID NO: 63102 - RNA, 20 nt, Artificial Sequence
  Synthetic
gaauacuaacauugggaagc

SEQ ID NO: 63103 - RNA, 20 nt, Artificial Sequence
  Synthetic
gcauuugguggucuauaagc

SEQ ID NO: 63104 - RNA, 20 nt, Artificial Sequence
  Synthetic
gagaugggaaaaaaucuagc

SEQ ID NO: 63105 - RNA, 20 nt, Artificial Sequence
  Synthetic
gacugccgauugguggaggc

SEQ ID NO: 63106 - RNA, 20 nt, Artificial Sequence
  Synthetic
gucugugccuucucaucugc

SEQ ID NO: 63107 - RNA, 20 nt, Artificial Sequence
  Synthetic
gaggcaggaggcggaucugc

SEQ ID NO: 63108 - RNA, 20 nt, Artificial Sequence
  Synthetic
gugaaaaaguugcauggugc

SEQ ID NO: 63109 - RNA, 20 nt, Artificial Sequence
  Synthetic
  misc_feature (11)..(11): n is a, c, g, or u
ggcacagaccnggccguugc

SEQ ID NO: 63110 - RNA, 20 nt, Artificial Sequence
  Synthetic
  misc_feature (11)..(11): n is a, c, g, or u
ggucuggagcnaaacuuauc

SEQ ID NO: 63111 - RNA, 20 nt, Artificial Sequence
  Synthetic
gccuccaccaaucggcaguc

SEQ ID NO: 63112 - RNA, 20 nt, Artificial Sequence
  Synthetic
ggcauagcagcaggaugaag

SEQ ID NO: 63113 - RNA, 20 nt, Artificial Sequence
  Synthetic
gcaacaugagggaaacauag

SEQ ID NO: 63114 - RNA, 20 nt, Artificial Sequence
  Synthetic
gguuuuauaccuuucucuag

SEQ ID NO: 63115 - RNA, 20 nt, Artificial Sequence
  Synthetic
gacuucucucaauuuucuag

SEQ ID NO: 63116 - RNA, 20 nt, Artificial Sequence
  Synthetic
guugaugauccuggaauuag

SEQ ID NO: 63117 - RNA, 20 nt, Artificial Sequence
  Synthetic
gcugccaacuggauccugcg

SEQ ID NO: 63118 - RNA, 20 nt, Artificial Sequence
  Synthetic
ggaugagugucucucaaagg

SEQ ID NO: 63119 - RNA, 20 nt, Artificial Sequence
  Synthetic
gcaagccauucuuugcuggg

SEQ ID NO: 63120 - RNA, 20 nt, Artificial Sequence
  Synthetic
ggccuguauuuuccugcugg

SEQ ID NO: 63121 - RNA, 20 nt, Artificial Sequence
  Synthetic
ggcaagccauucuuugcugg

SEQ ID NO: 63122 - RNA, 20 nt, Artificial Sequence
  Synthetic
ggccaagccccagccagugg

SEQ ID NO: 63123 - RNA, 20 nt, Artificial Sequence
  Synthetic
gauaagauaggggcauuugg

SEQ ID NO: 63124 - RNA, 20 nt, Artificial Sequence
  Synthetic
gcugccccuuuuacacaaug

SEQ ID NO: 63125 - RNA, 20 nt, Artificial Sequence
  Synthetic
ggaacaagagcuacaucaug

SEQ ID NO: 63126 - RNA, 20 nt, Artificial Sequence
  Synthetic
gaagaaccaacaagaagaug

SEQ ID NO: 63127 - RNA, 20 nt, Artificial Sequence
  Synthetic
ggcaucccgauacagagcug

SEQ ID NO: 63128 - RNA, 20 nt, Artificial Sequence
  Synthetic
gagccaggagaaacgggcug

SEQ ID NO: 63129 - RNA, 20 nt, Artificial Sequence
  Synthetic
gaugcaacccccacuggcug

SEQ ID NO: 63130 - RNA, 20 nt, Artificial Sequence
  Synthetic
gcuaucgcuggaugugucug

SEQ ID NO: 63131 - RNA, 20 nt, Artificial Sequence
  Synthetic
gaagauugacgagaugagug

SEQ ID NO: 63132 - RNA, 20 nt, Artificial Sequence
  Synthetic
  misc_feature (14)..(14): n is a, c, g, or u
gaaaguaugucaangaauug

SEQ ID NO: 63133 - RNA, 20 nt, Artificial Sequence
  Synthetic
gguuauguaauuggaaguug

SEQ ID NO: 63134 - RNA, 20 nt, Artificial Sequence
  Synthetic
  misc_feature (20)..(20): n is a, c, g, or u
gagugggagcauucgggccn

SEQ ID NO: 63135 - RNA, 20 nt, Artificial Sequence
  Synthetic
gggcugaggcccacucccau

SEQ ID NO: 63136 - RNA, 20 nt, Artificial Sequence
  Synthetic
gggaacaagagcuacaucau

SEQ ID NO: 63137 - RNA, 20 nt, Artificial Sequence
  Synthetic
  misc_feature (13)..(13): n is a, c, g, or u
ggauauucccuanauuucau

SEQ ID NO: 63138 - RNA, 20 nt, Artificial Sequence
  Synthetic
  misc_feature (3)..(3): n is a, c, g, or u
  misc_feature (12)..(12): n is a, c, g, or u
ggnaaauauuunguagagau

SEQ ID NO: 63139 - RNA, 20 nt, Artificial Sequence
  Synthetic
gggaaaaaaucccagaggau

SEQ ID NO: 63140 - RNA, 20 nt, Artificial Sequence
  Synthetic
ggguugcaucagcaaacacu

SEQ ID NO: 63141 - RNA, 20 nt, Artificial Sequence
  Synthetic
gucuuacauaagaggacucu

SEQ ID NO: 63142 - RNA, 20 nt, Artificial Sequence
  Synthetic
ggcgagggaguucuucuucu

SEQ ID NO: 63143 - RNA, 20 nt, Artificial Sequence
  Synthetic
gcuacaucauggggcuuucu

SEQ ID NO: 63144 - RNA, 20 nt, Artificial Sequence
  Synthetic
gaagccaacaagguaggagu

SEQ ID NO: 63145 - RNA, 20 nt, Artificial Sequence
  Synthetic
gagaugagugaggcaguagu

SEQ ID NO: 63146 - RNA, 20 nt, Artificial Sequence
  Synthetic
gaccuugggcaagauuuggu

SEQ ID NO: 63147 - RNA, 20 nt, Artificial Sequence
  Synthetic
gcuaugccucaucuucuugu

SEQ ID NO: 63148 - RNA, 20 nt, Artificial Sequence
  Synthetic
  misc_feature (13)..(13): n is a, c, g, or u
  misc_feature (19)..(19): n is a, c, g, or u
guuggugaguganuggagnu

SEQ ID NO: 63149 - RNA, 20 nt, Artificial Sequence
  Synthetic
guccaaggaauacuaacauu

SEQ ID NO: 63150 - RNA, 20 nt, Artificial Sequence
  Synthetic
guugauaagauaggggcauu

SEQ ID NO: 63151 - RNA, 20 nt, Artificial Sequence
  Synthetic
guaagaccuugggcaagauu

SEQ ID NO: 63152 - RNA, 20 nt, Artificial Sequence
  Synthetic
gacaugaacaagagaugauu

SEQ ID NO: 63153 - RNA, 20 nt, Artificial Sequence
  Synthetic
gagcaagagucgugcagguu

SEQ ID NO: 63154 - RNA, 20 nt, Artificial Sequence
  Synthetic
gcugugccuuggguggcuuu

SEQ ID NO: 63155 - RNA, 17 nt, Artificial Sequence
  Synthetic
  misc_feature (2)..(2): n is a, c, g, or u
anccacauuguguaaaa

SEQ ID NO: 63156 - RNA, 17 nt, Artificial Sequence
  Synthetic
uggaauuagaggacaaa

SEQ ID NO: 63157 - RNA, 17 nt, Artificial Sequence
  Synthetic
aacugagccaggagaaa

SEQ ID NO: 63158 - RNA, 17 nt, Artificial Sequence
  Synthetic
  misc_feature (3)..(3): n is a, c, g, or u
uanccacauuguguaaa

SEQ ID NO: 63159 - RNA, 17 nt, Artificial Sequence
  Synthetic
cggcagaggagccacaa

SEQ ID NO: 63160 - RNA, 17 nt, Artificial Sequence
  Synthetic
accccguugcccggcaa

SEQ ID NO: 63161 - RNA, 17 nt, Artificial Sequence
  Synthetic
  misc_feature (1)..(1): n is a, c, g, or u
nggccguugccgggcaa

SEQ ID NO: 63162 - RNA, 17 nt, Artificial Sequence
  Synthetic
  misc_feature (1)..(1): n is a, c, g, or u
nuccccccagcaaagaa

SEQ ID NO: 63163 - RNA, 17 nt, Artificial Sequence
  Synthetic
  misc_feature (1)..(1): n is a, c, g, or u
nuauuguuuacacagaa

SEQ ID NO: 63164 - RNA, 17 nt, Artificial Sequence
  Synthetic
  misc_feature (6)..(6): n is a, c, g, or u
uauuunccccuagagaa

SEQ ID NO: 63165 - RNA, 17 nt, Artificial Sequence
  Synthetic
  misc_feature (13)..(13): n is a, c, g, or u
cccguggucggcnggaa

SEQ ID NO: 63166 - RNA, 17 nt, Artificial Sequence
  Synthetic
ugguaacagagguauaa

SEQ ID NO: 63167 - RNA, 17 nt, Artificial Sequence
  Synthetic
cuccaaauucuuuauaa

SEQ ID NO: 63168 - RNA, 17 nt, Artificial Sequence
  Synthetic
  misc_feature (7)..(7): n is a, c, g, or u
cuggacngaagccaaca

SEQ ID NO: 63169 - RNA, 17 nt, Artificial Sequence
  Synthetic
aggcaguagucggaaca

SEQ ID NO: 63170 - RNA, 17 nt, Artificial Sequence
  Synthetic
  misc_feature (11)..(11): n is a, c, g, or u
caauaggccgnuuaaca

SEQ ID NO: 63171 - RNA, 17 nt, Artificial Sequence
  Synthetic
auuuuggccaagacaca

SEQ ID NO: 63172 - RNA, 17 nt, Artificial Sequence
  Synthetic
uauuccuuggacucaca

SEQ ID NO: 63173 - RNA, 17 nt, Artificial Sequence
  Synthetic
uuucucgccaacuuaca

SEQ ID NO: 63174 - RNA, 17 nt, Artificial Sequence
  Synthetic
  misc_feature (3)..(3): n is a, c, g, or u
  misc_feature (6)..(6): n is a, c, g, or u
ugnccnaaagccaccca

SEQ ID NO: 63175 - RNA, 17 nt, Artificial Sequence
  Synthetic
ccaccaaaucuugccca

SEQ ID NO: 63176 - RNA, 17 nt, Artificial Sequence
  Synthetic
cccaccuugugagucca

SEQ ID NO: 63177 - RNA, 17 nt, Artificial Sequence
  Synthetic
  misc_feature (11)..(11): n is a, c, g, or u
aauauacaucnuuucca

SEQ ID NO: 63178 - RNA, 17 nt, Artificial Sequence
  Synthetic
uuuccauguucggugca

SEQ ID NO: 63179 - RNA, 17 nt, Artificial Sequence
  Synthetic
  misc_feature (12)..(12): n is a, c, g, or u
  misc_feature (15)..(15): n is a, c, g, or u
uggguggcuuunggnca

SEQ ID NO: 63180 - RNA, 17 nt, Artificial Sequence
  Synthetic
uucccaucccaucauca

SEQ ID NO: 63181 - RNA, 17 nt, Artificial Sequence
  Synthetic
cuuugaaguaugccuca

SEQ ID NO: 63182 - RNA, 17 nt, Artificial Sequence
  Synthetic
uggagcccucaggcuca

SEQ ID NO: 63183 - RNA, 17 nt, Artificial Sequence
  Synthetic
  misc_feature (11)..(11): n is a, c, g, or u
auauucccuanauuuca

SEQ ID NO: 63184 - RNA, 17 nt, Artificial Sequence
  Synthetic
ccaacaaaacaaaaaga

SEQ ID NO: 63185 - RNA, 17 nt, Artificial Sequence
  Synthetic
ugaauaucaggaaaaga

SEQ ID NO: 63186 - RNA, 17 nt, Artificial Sequence
  Synthetic
agaugagaaggcacaga

SEQ ID NO: 63187 - RNA, 17 nt, Artificial Sequence
  Synthetic
  misc_feature (6)..(6): n is a, c, g, or u
ucggcnggaacggcaga

SEQ ID NO: 63188 - RNA, 17 nt, Artificial Sequence
  Synthetic
  misc_feature (1)..(1): n is a, c, g, or u
  misc_feature (10)..(10): n is a, c, g, or u
naaauauuunguagaga

SEQ ID NO: 63189 - RNA, 17 nt, Artificial Sequence
  Synthetic
cccaagcgaccccgaga

SEQ ID NO: 63190 - RNA, 17 nt, Artificial Sequence
  Synthetic
ucuucccccauucgaga

SEQ ID NO: 63191 - RNA, 17 nt, Artificial Sequence
  Synthetic
cgguccggcagaugaga

SEQ ID NO: 63192 - RNA, 17 nt, Artificial Sequence
  Synthetic
ccaaucggcagucagga

SEQ ID NO: 63193 - RNA, 17 nt, Artificial Sequence
  Synthetic
agcccaugaugauggga

SEQ ID NO: 63194 - RNA, 17 nt, Artificial Sequence
  Synthetic
uuuacauacccuaugga

SEQ ID NO: 63195 - RNA, 17 nt, Artificial Sequence
  Synthetic
cauggggcuuucuugga

SEQ ID NO: 63196 - RNA, 17 nt, Artificial Sequence
  Synthetic
  misc_feature (15)..(15): n is a, c, g, or u
caccaaauacucuanga

SEQ ID NO: 63197 - RNA, 17 nt, Artificial Sequence
  Synthetic
uuugaacagcaacauga

SEQ ID NO: 63198 - RNA, 17 nt, Artificial Sequence
  Synthetic
agaagaucucuuacuga

SEQ ID NO: 63199 - RNA, 17 nt, Artificial Sequence
  Synthetic
  misc_feature (5)..(5): n is a, c, g, or u
uuccncgcaugcgcuga

SEQ ID NO: 63200 - RNA, 17 nt, Artificial Sequence
  Synthetic
ucuuguucccaagaaua

SEQ ID NO: 63201 - RNA, 17 nt, Artificial Sequence
  Synthetic
acauuaucuggauaaua

SEQ ID NO: 63202 - RNA, 17 nt, Artificial Sequence
  Synthetic
uuaugucaauacuaaua

SEQ ID NO: 63203 - RNA, 17 nt, Artificial Sequence
  Synthetic
ucuggcuuucaguuaua

SEQ ID NO: 63204 - RNA, 17 nt, Artificial Sequence
  Synthetic
acuauuuacauacccua

SEQ ID NO: 63205 - RNA, 17 nt, Artificial Sequence
  Synthetic
cuuucggaaaauuccua

SEQ ID NO: 63206 - RNA, 17 nt, Artificial Sequence
  Synthetic
uuuuauaccuuucucua

SEQ ID NO: 63207 - RNA, 17 nt, Artificial Sequence
  Synthetic
augcucaggagauucua

SEQ ID NO: 63208 - RNA, 17 nt, Artificial Sequence
  Synthetic
agggaguucuucuucua

SEQ ID NO: 63209 - RNA, 17 nt, Artificial Sequence
  Synthetic
cuucucucaauuuucua

SEQ ID NO: 63210 - RNA, 17 nt, Artificial Sequence
  Synthetic
aucaucaaccaccagua

SEQ ID NO: 63211 - RNA, 17 nt, Artificial Sequence
  Synthetic
  misc_feature (15)..(15): n is a, c, g, or u
auaacccaugaaaunua

SEQ ID NO: 63212 - RNA, 17 nt, Artificial Sequence
  Synthetic
caaggugggaaauuuua

SEQ ID NO: 63213 - RNA, 17 nt, Artificial Sequence
  Synthetic
acugagccaggagaaac

SEQ ID NO: 63214 - RNA, 17 nt, Artificial Sequence
  Synthetic
uaggcugugcugccaac

SEQ ID NO: 63215 - RNA, 17 nt, Artificial Sequence
  Synthetic
ugaaugcuggauccaac

SEQ ID NO: 63216 - RNA, 17 nt, Artificial Sequence
  Synthetic
cugucuuuaauccuaac

SEQ ID NO: 63217 - RNA, 17 nt, Artificial Sequence
  Synthetic
  misc_feature (12)..(12): n is a, c, g, or u
ucaauaggccgnuuaac

SEQ ID NO: 63218 - RNA, 17 nt, Artificial Sequence
  Synthetic
uuuuggccaagacacac

SEQ ID NO: 63219 - RNA, 17 nt, Artificial Sequence
  Synthetic
aucccaacaaagaccac

SEQ ID NO: 63220 - RNA, 17 nt, Artificial Sequence
  Synthetic
caguuaggauuaaagac

SEQ ID NO: 63221 - RNA, 17 nt, Artificial Sequence
  Synthetic
acuguuuguuuaaagac

SEQ ID NO: 63222 - RNA, 17 nt, Artificial Sequence
  Synthetic
caccagcaggaaaauac

SEQ ID NO: 63223 - RNA, 17 nt, Artificial Sequence
  Synthetic
aaggugggaaauuuuac

SEQ ID NO: 63224 - RNA, 17 nt, Artificial Sequence
  Synthetic
ugauauucauuugcacc

SEQ ID NO: 63225 - RNA, 17 nt, Artificial Sequence
  Synthetic
aacacuuggcacagacc

SEQ ID NO: 63226 - RNA, 17 nt, Artificial Sequence
  Synthetic
uaaugacucuagcuacc

SEQ ID NO: 63227 - RNA, 17 nt, Artificial Sequence
  Synthetic
ugugggggagugaaccc

SEQ ID NO: 63228 - RNA, 17 nt, Artificial Sequence
  Synthetic
  misc_feature (8)..(8): n is a, c, g, or u
caaauuuncacccaccc

SEQ ID NO: 63229 - RNA, 17 nt, Artificial Sequence
  Synthetic
acugacuacuagguccc

SEQ ID NO: 63230 - RNA, 17 nt, Artificial Sequence
  Synthetic
cacuaguaaacugagcc

SEQ ID NO: 63231 - RNA, 17 nt, Artificial Sequence
  Synthetic
cacauccagcgauagcc

SEQ ID NO: 63232 - RNA, 17 nt, Artificial Sequence
  Synthetic
uuguucagugguucgcc

SEQ ID NO: 63233 - RNA, 17 nt, Artificial Sequence
  Synthetic
  misc_feature (7)..(7): n is a, c, g, or u
cagaccnggccguugcc

SEQ ID NO: 63234 - RNA, 17 nt, Artificial Sequence
  Synthetic
uggaagauccagcaucc

SEQ ID NO: 63235 - RNA, 17 nt, Artificial Sequence
  Synthetic
cuggugguugaugaucc

SEQ ID NO: 63236 - RNA, 17 nt, Artificial Sequence
  Synthetic
auucugucguucucucc

SEQ ID NO: 63237 - RNA, 17 nt, Artificial Sequence
  Synthetic
ccucagcccguuucucc

SEQ ID NO: 63238 - RNA, 17 nt, Artificial Sequence
  Synthetic
auuuguuaauaaugucc

SEQ ID NO: 63239 - RNA, 17 nt, Artificial Sequence
  Synthetic
uguccuccaauuugucc

SEQ ID NO: 63240 - RNA, 17 nt, Artificial Sequence
  Synthetic
  misc_feature (4)..(4): n is a, c, g, or u
aaangauguauauuucc

SEQ ID NO: 63241 - RNA, 17 nt, Artificial Sequence
  Synthetic
uacagaggcauuaaagc

SEQ ID NO: 63242 - RNA, 17 nt, Artificial Sequence
  Synthetic
uacuaacauugggaagc

SEQ ID NO: 63243 - RNA, 17 nt, Artificial Sequence
  Synthetic
uuugguggucuauaagc

SEQ ID NO: 63244 - RNA, 17 nt, Artificial Sequence
  Synthetic
agaugaggcauagcagc

SEQ ID NO: 63245 - RNA, 17 nt, Artificial Sequence
  Synthetic
cuuguuuugcucgcagc

SEQ ID NO: 63246 - RNA, 17 nt, Artificial Sequence
  Synthetic
ccgccuguaacacgagc

SEQ ID NO: 63247 - RNA, 17 nt, Artificial Sequence
  Synthetic
augggaaaaaaucuagc

SEQ ID NO: 63248 - RNA, 17 nt, Artificial Sequence
  Synthetic
uuuguccuggcuaucgc

SEQ ID NO: 63249 - RNA, 17 nt, Artificial Sequence
  Synthetic
uuuguucagugguucgc

SEQ ID NO: 63250 - RNA, 17 nt, Artificial Sequence
  Synthetic
cauacccuauggaaggc

SEQ ID NO: 63251 - RNA, 17 nt, Artificial Sequence
  Synthetic
cugcucguguuacaggc

SEQ ID NO: 63252 - RNA, 17 nt, Artificial Sequence
  Synthetic
uuguuagacgaagaggc

SEQ ID NO: 63253 - RNA, 17 nt, Artificial Sequence
  Synthetic
ugccgauugguggaggc

SEQ ID NO: 63254 - RNA, 17 nt, Artificial Sequence
  Synthetic
ugcgccccguggucggc

SEQ ID NO: 63255 - RNA, 17 nt, Artificial Sequence
  Synthetic
augcaacccccacuggc

SEQ ID NO: 63256 - RNA, 17 nt, Artificial Sequence
  Synthetic
acuaggucccuggaugc

SEQ ID NO: 63257 - RNA, 17 nt, Artificial Sequence
  Synthetic
ugugccuucucaucugc

SEQ ID NO: 63258 - RNA, 17 nt, Artificial Sequence
  Synthetic
auuccaccaagcucugc

SEQ ID NO: 63259 - RNA, 17 nt, Artificial Sequence
  Synthetic
uugagcaagagucgugc

SEQ ID NO: 63260 - RNA, 17 nt, Artificial Sequence
  Synthetic
cuuuccauguucggugc

SEQ ID NO: 63261 - RNA, 17 nt, Artificial Sequence
  Synthetic
aaaaaguugcauggugc

SEQ ID NO: 63262 - RNA, 17 nt, Artificial Sequence
  Synthetic
  misc_feature (8)..(8): n is a, c, g, or u
acagaccnggccguugc

SEQ ID NO: 63263 - RNA, 17 nt, Artificial Sequence
  Synthetic
auggaaagcaucacauc

SEQ ID NO: 63264 - RNA, 17 nt, Artificial Sequence
  Synthetic
uggugcaaaugaauauc

SEQ ID NO: 63265 - RNA, 17 nt, Artificial Sequence
  Synthetic
cgccucagcucuguauc

SEQ ID NO: 63266 - RNA, 17 nt, Artificial Sequence
  Synthetic
ugauuaacuacauuauc

SEQ ID NO: 63267 - RNA, 17 nt, Artificial Sequence
  Synthetic
  misc_feature (8)..(8): n is a, c, g, or u
cuggagcnaaacuuauc

SEQ ID NO: 63268 - RNA, 17 nt, Artificial Sequence
  Synthetic
  misc_feature (2)..(2): n is a, c, g, or u
  misc_feature (8)..(8): n is a, c, g, or u
cncaccanacugcacuc

SEQ ID NO: 63269 - RNA, 17 nt, Artificial Sequence
  Synthetic
uuugggguggagcccuc

SEQ ID NO: 63270 - RNA, 17 nt, Artificial Sequence
  Synthetic
uuccaccaccaauccuc

SEQ ID NO: 63271 - RNA, 17 nt, Artificial Sequence
  Synthetic
  misc_feature (3)..(3): n is a, c, g, or u
ugnggugaacaaugcuc

SEQ ID NO: 63272 - RNA, 17 nt, Artificial Sequence
  Synthetic
  misc_feature (13)..(13): n is a, c, g, or u
cuaacaacaguanucuc

SEQ ID NO: 63273 - RNA, 17 nt, Artificial Sequence
  Synthetic
uuugcucgcagcagguc

SEQ ID NO: 63274 - RNA, 17 nt, Artificial Sequence
  Synthetic
uaggagugggagcauuc

SEQ ID NO: 63275 - RNA, 17 nt, Artificial Sequence
  Synthetic
uaucuuaucaacacuuc

SEQ ID NO: 63276 - RNA, 17 nt, Artificial Sequence
  Synthetic
cuucuuguugguucuuc

SEQ ID NO: 63277 - RNA, 17 nt, Artificial Sequence
  Synthetic
auaugggccuaaaguuc

SEQ ID NO: 63278 - RNA, 17 nt, Artificial Sequence
  Synthetic
aacaggguucacuguuc

SEQ ID NO: 63279 - RNA, 17 nt, Artificial Sequence
  Synthetic
  misc_feature (1)..(1): n is a, c, g, or u
nccacauuguguaaaag

SEQ ID NO: 63280 - RNA, 17 nt, Artificial Sequence
  Synthetic
acaaauuggaggacaag

SEQ ID NO: 63281 - RNA, 17 nt, Artificial Sequence
  Synthetic
aacggcagacggagaag

SEQ ID NO: 63282 - RNA, 17 nt, Artificial Sequence
  Synthetic
acuguuguuagacgaag

SEQ ID NO: 63283 - RNA, 17 nt, Artificial Sequence
  Synthetic
auagcagcaggaugaag

SEQ ID NO: 63284 - RNA, 17 nt, Artificial Sequence
  Synthetic
caggaucccagaguaag

SEQ ID NO: 63285 - RNA, 17 nt, Artificial Sequence
  Synthetic
aagaaaauugguaacag

SEQ ID NO: 63286 - RNA, 17 nt, Artificial Sequence
  Synthetic
aacugaaagccagacag

SEQ ID NO: 63287 - RNA, 17 nt, Artificial Sequence
  Synthetic
ucgggaaaaaaucccag

SEQ ID NO: 63288 - RNA, 17 nt, Artificial Sequence
  Synthetic
  misc_feature (11)..(11): n is a, c, g, or u
uguuggcuucnguccag

SEQ ID NO: 63289 - RNA, 17 nt, Artificial Sequence
  Synthetic
aagagaugauuaggcag

SEQ ID NO: 63290 - RNA, 17 nt, Artificial Sequence
  Synthetic
auccucaggccaugcag

SEQ ID NO: 63291 - RNA, 17 nt, Artificial Sequence
  Synthetic
uagugccauuuguucag

SEQ ID NO: 63292 - RNA, 17 nt, Artificial Sequence
  Synthetic
agccaacaagguaggag

SEQ ID NO: 63293 - RNA, 17 nt, Artificial Sequence
  Synthetic
acaugagggaaacauag

SEQ ID NO: 63294 - RNA, 17 nt, Artificial Sequence
  Synthetic
aaguguugauaagauag

SEQ ID NO: 63295 - RNA, 17 nt, Artificial Sequence
  Synthetic
uuuauaccuuucucuag

SEQ ID NO: 63296 - RNA, 17 nt, Artificial Sequence
  Synthetic
uucucucaauuuucuag

SEQ ID NO: 63297 - RNA, 17 nt, Artificial Sequence
  Synthetic
uuuucauuuacuguuag

SEQ ID NO: 63298 - RNA, 17 nt, Artificial Sequence
  Synthetic
  misc_feature (7)..(7): n is a, c, g, or u
cguuccngccgaccacg

SEQ ID NO: 63299 - RNA, 17 nt, Artificial Sequence
  Synthetic
augagaaggcacagacg

SEQ ID NO: 63300 - RNA, 17 nt, Artificial Sequence
  Synthetic
aggugggaaauuuuacg

SEQ ID NO: 63301 - RNA, 17 nt, Artificial Sequence
  Synthetic
ugcucguguuacaggcg

SEQ ID NO: 63302 - RNA, 17 nt, Artificial Sequence
  Synthetic
ucucgucaaucuucucg

SEQ ID NO: 63303 - RNA, 17 nt, Artificial Sequence
  Synthetic
ugagugucucucaaagg

SEQ ID NO: 63304 - RNA, 17 nt, Artificial Sequence
  Synthetic
uccuuggacucacaagg

SEQ ID NO: 63305 - RNA, 17 nt, Artificial Sequence
  Synthetic
acauacccuauggaagg

SEQ ID NO: 63306 - RNA, 17 nt, Artificial Sequence
  Synthetic
ccugcucguguuacagg

SEQ ID NO: 63307 - RNA, 17 nt, Artificial Sequence
  Synthetic
cgauugguggaggcagg

SEQ ID NO: 63308 - RNA, 17 nt, Artificial Sequence
  Synthetic
uugguggaggcaggagg

SEQ ID NO: 63309 - RNA, 17 nt, Artificial Sequence
  Synthetic
aaggucuuuguacuagg

SEQ ID NO: 63310 - RNA, 17 nt, Artificial Sequence
  Synthetic
ucucucaauuuucuagg

SEQ ID NO: 63311 - RNA, 17 nt, Artificial Sequence
  Synthetic
  misc_feature (12)..(12): n is a, c, g, or u
cugggaggagunggggg

SEQ ID NO: 63312 - RNA, 17 nt, Artificial Sequence
  Synthetic
acggaggccuuuugggg

SEQ ID NO: 63313 - RNA, 17 nt, Artificial Sequence
  Synthetic
uuuguuuaaagacuggg

SEQ ID NO: 63314 - RNA, 17 nt, Artificial Sequence
  Synthetic
agccauucuuugcuggg

SEQ ID NO: 63315 - RNA, 17 nt, Artificial Sequence
  Synthetic
ccaagcugugccuuggg

SEQ ID NO: 63316 - RNA, 17 nt, Artificial Sequence
  Synthetic
  misc_feature (15)..(15): n is a, c, g, or u
agacugggaggagungg

SEQ ID NO: 63317 - RNA, 17 nt, Artificial Sequence
  Synthetic
augcuggauccaacugg

SEQ ID NO: 63318 - RNA, 17 nt, Artificial Sequence
  Synthetic
cuguauuuuccugcugg

SEQ ID NO: 63319 - RNA, 17 nt, Artificial Sequence
  Synthetic
aagccauucuuugcugg

SEQ ID NO: 63320 - RNA, 17 nt, Artificial Sequence
  Synthetic
ugaaagccagacagugg

SEQ ID NO: 63321 - RNA, 17 nt, Artificial Sequence
  Synthetic
caagccccagccagugg

SEQ ID NO: 63322 - RNA, 17 nt, Artificial Sequence
  Synthetic
ucccagaggauuggugg

SEQ ID NO: 63323 - RNA, 17 nt, Artificial Sequence
  Synthetic
aaaaggccuccgugugg

SEQ ID NO: 63324 - RNA, 17 nt, Artificial Sequence
  Synthetic
uagccaggacaaauugg

SEQ ID NO: 63325 - RNA, 17 nt, Artificial Sequence
  Synthetic
uccugacugccgauugg

SEQ ID NO: 63326 - RNA, 17 nt, Artificial Sequence
  Synthetic
aaaucccagaggauugg

SEQ ID NO: 63327 - RNA, 17 nt, Artificial Sequence
  Synthetic
cccaaggcacagcuugg

SEQ ID NO: 63328 - RNA, 17 nt, Artificial Sequence
  Synthetic
aagauaggggcauuugg

SEQ ID NO: 63329 - RNA, 17 nt, Artificial Sequence
  Synthetic
ccuugggcaagauuugg

SEQ ID NO: 63330 - RNA, 17 nt, Artificial Sequence
  Synthetic
  misc_feature (16)..(16): n is a, c, g, or u
aagacugggaggagung

SEQ ID NO: 63331 - RNA, 17 nt, Artificial Sequence
  Synthetic
  misc_feature (11)..(11): n is a, c, g, or u
aggugacccanaaaaug

SEQ ID NO: 63332 - RNA, 17 nt, Artificial Sequence
  Synthetic
uuuugaacagcaacaug

SEQ ID NO: 63333 - RNA, 17 nt, Artificial Sequence
  Synthetic
acaagagcuacaucaug

SEQ ID NO: 63334 - RNA, 17 nt, Artificial Sequence
  Synthetic
aacaaaacaaaaagaug

SEQ ID NO: 63335 - RNA, 17 nt, Artificial Sequence
  Synthetic
caguuauauggaugaug

SEQ ID NO: 63336 - RNA, 17 nt, Artificial Sequence
  Synthetic
agaauuuggagcuacug

SEQ ID NO: 63337 - RNA, 17 nt, Artificial Sequence
  Synthetic
agcaugccuugagccug

SEQ ID NO: 63338 - RNA, 17 nt, Artificial Sequence
  Synthetic
uuccacugcauggccug

SEQ ID NO: 63339 - RNA, 17 nt, Artificial Sequence
  Synthetic
aucccgauacagagcug

SEQ ID NO: 63340 - RNA, 17 nt, Artificial Sequence
  Synthetic
ccaggagaaacgggcug

SEQ ID NO: 63341 - RNA, 17 nt, Artificial Sequence
  Synthetic
caagccauucuuugcug

SEQ ID NO: 63342 - RNA, 17 nt, Artificial Sequence
  Synthetic
aucgcuggaugugucug

SEQ ID NO: 63343 - RNA, 17 nt, Artificial Sequence
  Synthetic
cugaaagccagacagug

SEQ ID NO: 63344 - RNA, 17 nt, Artificial Sequence
  Synthetic
ccaagccccagccagug

SEQ ID NO: 63345 - RNA, 17 nt, Artificial Sequence
  Synthetic
uggugucuuuuggagug

SEQ ID NO: 63346 - RNA, 17 nt, Artificial Sequence
  Synthetic
cccaaaaggccuccgug

SEQ ID NO: 63347 - RNA, 17 nt, Artificial Sequence
  Synthetic
  misc_feature (12)..(12): n is a, c, g, or u
cugagugcagunuggug

SEQ ID NO: 63348 - RNA, 17 nt, Artificial Sequence
  Synthetic
caaaaggccuccgugug

SEQ ID NO: 63349 - RNA, 17 nt, Artificial Sequence
  Synthetic
  misc_feature (2)..(2): n is a, c, g, or u
  misc_feature (15)..(15): n is a, c, g, or u
anucugauguguucnug

SEQ ID NO: 63350 - RNA, 17 nt, Artificial Sequence
  Synthetic
  misc_feature (11)..(11): n is a, c, g, or u
aguaugucaangaauug

SEQ ID NO: 63351 - RNA, 17 nt, Artificial Sequence
  Synthetic
aaucuucucgaggauug

SEQ ID NO: 63352 - RNA, 17 nt, Artificial Sequence
  Synthetic
caaagguggagugauug

SEQ ID NO: 63353 - RNA, 17 nt, Artificial Sequence
  Synthetic
uggaugaugugguauug

SEQ ID NO: 63354 - RNA, 17 nt, Artificial Sequence
  Synthetic
aguucaggcaauuauug

SEQ ID NO: 63355 - RNA, 17 nt, Artificial Sequence
  Synthetic
uauguaauuggaaguug

SEQ ID NO: 63356 - RNA, 17 nt, Artificial Sequence
  Synthetic
agcuugguggaauguug

SEQ ID NO: 63357 - RNA, 17 nt, Artificial Sequence
  Synthetic
  misc_feature (8)..(8): n is a, c, g, or u
  misc_feature (14)..(14): n is a, c, g, or u
ugaguganuggagnuug

SEQ ID NO: 63358 - RNA, 17 nt, Artificial Sequence
  Synthetic
  misc_feature (7)..(7): n is a, c, g, or u
caugcgnggaaccuuug

SEQ ID NO: 63359 - RNA, 17 nt, Artificial Sequence
  Synthetic
cacacggaggccuuuug

SEQ ID NO: 63360 - RNA, 17 nt, Artificial Sequence
  Synthetic
  misc_feature (17)..(17): n is a, c, g, or u
ccaagcgaccccgagan

SEQ ID NO: 63361 - RNA, 17 nt, Artificial Sequence
  Synthetic
  misc_feature (17)..(17): n is a, c, g, or u
agagguuggugagugan

SEQ ID NO: 63362 - RNA, 17 nt, Artificial Sequence
  Synthetic
  misc_feature (17)..(17): n is a, c, g, or u
ugggagcauucgggccn

SEQ ID NO: 63363 - RNA, 17 nt, Artificial Sequence
  Synthetic
  misc_feature (17)..(17): n is a, c, g, or u
cuugccugagugcagun

SEQ ID NO: 63364 - RNA, 17 nt, Artificial Sequence
  Synthetic
  misc_feature (17)..(17): n is a, c, g, or u
aaagacugggaggagun

SEQ ID NO: 63365 - RNA, 17 nt, Artificial Sequence
  Synthetic
caaagacaaaagaaaau

SEQ ID NO: 63366 - RNA, 17 nt, Artificial Sequence
  Synthetic
aggcuguaggcauaaau

SEQ ID NO: 63367 - RNA, 17 nt, Artificial Sequence
  Synthetic
cuccugccuccaccaau

SEQ ID NO: 63368 - RNA, 17 nt, Artificial Sequence
  Synthetic
cauacuuuccaaucaau

SEQ ID NO: 63369 - RNA, 17 nt, Artificial Sequence
  Synthetic
uucauggguuauguaau

SEQ ID NO: 63370 - RNA, 17 nt, Artificial Sequence
  Synthetic
ccaaggaauacuaacau

SEQ ID NO: 63371 - RNA, 17 nt, Artificial Sequence
  Synthetic
cugaggcccacucccau

SEQ ID NO: 63372 - RNA, 17 nt, Artificial Sequence
  Synthetic
aacaagagcuacaucau

SEQ ID NO: 63373 - RNA, 17 nt, Artificial Sequence
  Synthetic
ucccaucccaucaucau

SEQ ID NO: 63374 - RNA, 17 nt, Artificial Sequence
  Synthetic
  misc_feature (10)..(10): n is a, c, g, or u
uauucccuanauuucau

SEQ ID NO: 63375 - RNA, 17 nt, Artificial Sequence
  Synthetic
caacaaaacaaaaagau

SEQ ID NO: 63376 - RNA, 17 nt, Artificial Sequence
  Synthetic
acaccagaaauccagau

SEQ ID NO: 63377 - RNA, 17 nt, Artificial Sequence
  Synthetic
  misc_feature (9)..(9): n is a, c, g, or u
aaauauuunguagagau

SEQ ID NO: 63378 - RNA, 17 nt, Artificial Sequence
  Synthetic
ccuuccugacugccgau

SEQ ID NO: 63379 - RNA, 17 nt, Artificial Sequence
  Synthetic
aaaaaaucccagaggau

SEQ ID NO: 63380 - RNA, 17 nt, Artificial Sequence
  Synthetic
ucaaucuucucgaggau

SEQ ID NO: 63381 - RNA, 17 nt, Artificial Sequence
  Synthetic
cucaaagguggagugau

SEQ ID NO: 63382 - RNA, 17 nt, Artificial Sequence
  Synthetic
  misc_feature (5)..(5): n is a, c, g, or u
uuaancggccuauugau

SEQ ID NO: 63383 - RNA, 17 nt, Artificial Sequence
  Synthetic
uaugucaauacuaauau

SEQ ID NO: 63384 - RNA, 17 nt, Artificial Sequence
  Synthetic
uuucggaaaauuccuau

SEQ ID NO: 63385 - RNA, 17 nt, Artificial Sequence
  Synthetic
uauggaugaugugguau

SEQ ID NO: 63386 - RNA, 17 nt, Artificial Sequence
  Synthetic
  misc_feature (9)..(9): n is a, c, g, or u
ucuggagcnaaacuuau

SEQ ID NO: 63387 - RNA, 17 nt, Artificial Sequence
  Synthetic
uugcaucagcaaacacu

SEQ ID NO: 63388 - RNA, 17 nt, Artificial Sequence
  Synthetic
cuguuuguuuaaagacu

SEQ ID NO: 63389 - RNA, 17 nt, Artificial Sequence
  Synthetic
aagauguuguacagacu

SEQ ID NO: 63390 - RNA, 17 nt, Artificial Sequence
  Synthetic
ugacauaacugacuacu

SEQ ID NO: 63391 - RNA, 17 nt, Artificial Sequence
  Synthetic
uuaaaggucuuuguacu

SEQ ID NO: 63392 - RNA, 17 nt, Artificial Sequence
  Synthetic
ccucuuauguaagaccu

SEQ ID NO: 63393 - RNA, 17 nt, Artificial Sequence
  Synthetic
aaugacucuagcuaccu

SEQ ID NO: 63394 - RNA, 17 nt, Artificial Sequence
  Synthetic
acacgagcagggguccu

SEQ ID NO: 63395 - RNA, 17 nt, Artificial Sequence
  Synthetic
aucacaucaggauuccu

SEQ ID NO: 63396 - RNA, 17 nt, Artificial Sequence
  Synthetic
ccaauguuaguauuccu

SEQ ID NO: 63397 - RNA, 17 nt, Artificial Sequence
  Synthetic
ccacccaaggcacagcu

SEQ ID NO: 63398 - RNA, 17 nt, Artificial Sequence
  Synthetic
ugggauccugcagagcu

SEQ ID NO: 63399 - RNA, 17 nt, Artificial Sequence
  Synthetic
  misc_feature (4)..(4): n is a, c, g, or u
cccnucucggggucgcu

SEQ ID NO: 63400 - RNA, 17 nt, Artificial Sequence
  Synthetic
ccccacuggcuggggcu

SEQ ID NO: 63401 - RNA, 17 nt, Artificial Sequence
  Synthetic
ugcaacccccacuggcu

SEQ ID NO: 63402 - RNA, 17 nt, Artificial Sequence
  Synthetic
  misc_feature (3)..(3): n is a, c, g, or u
ucnuuuccauggcugcu

SEQ ID NO: 63403 - RNA, 17 nt, Artificial Sequence
  Synthetic
uuacauaagaggacucu

SEQ ID NO: 63404 - RNA, 17 nt, Artificial Sequence
  Synthetic
uccaccaccaauccucu

SEQ ID NO: 63405 - RNA, 17 nt, Artificial Sequence
  Synthetic
  misc_feature (14)..(14): n is a, c, g, or u
cugcggacgacccnucu

SEQ ID NO: 63406 - RNA, 17 nt, Artificial Sequence
  Synthetic
  misc_feature (1)..(1): n is a, c, g, or u
nugggucaccuuauucu

SEQ ID NO: 63407 - RNA, 17 nt, Artificial Sequence
  Synthetic
acaucauggggcuuucu

SEQ ID NO: 63408 - RNA, 17 nt, Artificial Sequence
  Synthetic
acuucucucaauuuucu

SEQ ID NO: 63409 - RNA, 17 nt, Artificial Sequence
  Synthetic
agaaaggccuuguaagu

SEQ ID NO: 63410 - RNA, 17 nt, Artificial Sequence
  Synthetic
uuggaggcuugaacagu

SEQ ID NO: 63411 - RNA, 17 nt, Artificial Sequence
  Synthetic
acugaaagccagacagu

SEQ ID NO: 63412 - RNA, 17 nt, Artificial Sequence
  Synthetic
uuuucccgaccaccagu

SEQ ID NO: 63413 - RNA, 17 nt, Artificial Sequence
  Synthetic
cccucgcaggauccagu

SEQ ID NO: 63414 - RNA, 17 nt, Artificial Sequence
  Synthetic
uaaagacugggaggagu

SEQ ID NO: 63415 - RNA, 17 nt, Artificial Sequence
  Synthetic
aaaauuccuaugggagu

SEQ ID NO: 63416 - RNA, 17 nt, Artificial Sequence
  Synthetic
augagugaggcaguagu

SEQ ID NO: 63417 - RNA, 17 nt, Artificial Sequence
  Synthetic
  misc_feature (3)..(3): n is a, c, g, or u
acngaagccaacaaggu

SEQ ID NO: 63418 - RNA, 17 nt, Artificial Sequence
  Synthetic
ccuuggacucacaaggu

SEQ ID NO: 63419 - RNA, 17 nt, Artificial Sequence
  Synthetic
auuggaggacaagaggu

SEQ ID NO: 63420 - RNA, 17 nt, Artificial Sequence
  Synthetic
acucuagcuaccugggu

SEQ ID NO: 63421 - RNA, 17 nt, Artificial Sequence
  Synthetic
uggauccaacugguggu

SEQ ID NO: 63422 - RNA, 17 nt, Artificial Sequence
  Synthetic
cuugggcaagauuuggu

SEQ ID NO: 63423 - RNA, 17 nt, Artificial Sequence
  Synthetic
uuguacuaggaggcugu

SEQ ID NO: 63424 - RNA, 17 nt, Artificial Sequence
  Synthetic
ccaaaaggccuccgugu

SEQ ID NO: 63425 - RNA, 17 nt, Artificial Sequence
  Synthetic
ucccacuccuaccuugu

SEQ ID NO: 63426 - RNA, 17 nt, Artificial Sequence
  Synthetic
augccucaucuucuugu

SEQ ID NO: 63427 - RNA, 17 nt, Artificial Sequence
  Synthetic
aaaugugaacaauuugu

SEQ ID NO: 63428 - RNA, 17 nt, Artificial Sequence
  Synthetic
  misc_feature (1)..(1): n is a, c, g, or u
nguccaguggucuuugu

SEQ ID NO: 63429 - RNA, 17 nt, Artificial Sequence
  Synthetic
ccaucuuuuuguuuugu

SEQ ID NO: 63430 - RNA, 17 nt, Artificial Sequence
  Synthetic
  misc_feature (16)..(16): n is a, c, g, or u
cauaacccaugaaaunu

SEQ ID NO: 63431 - RNA, 17 nt, Artificial Sequence
  Synthetic
  misc_feature (12)..(12): n is a, c, g, or u
cugggugggugnaaauu

SEQ ID NO: 63432 - RNA, 17 nt, Artificial Sequence
  Synthetic
caaggaauacuaacauu

SEQ ID NO: 63433 - RNA, 17 nt, Artificial Sequence
  Synthetic
agaccuugggcaagauu

SEQ ID NO: 63434 - RNA, 17 nt, Artificial Sequence
  Synthetic
caccagaaauccagauu

SEQ ID NO: 63435 - RNA, 17 nt, Artificial Sequence
  Synthetic
augaacaagagaugauu

SEQ ID NO: 63436 - RNA, 17 nt, Artificial Sequence
  Synthetic
ucaaagguggagugauu

SEQ ID NO: 63437 - RNA, 17 nt, Artificial Sequence
  Synthetic
auggaugaugugguauu

SEQ ID NO: 63438 - RNA, 17 nt, Artificial Sequence
  Synthetic
uugcuguucaaaaccuu

SEQ ID NO: 63439 - RNA, 17 nt, Artificial Sequence
  Synthetic
cucuuauguaagaccuu

SEQ ID NO: 63440 - RNA, 17 nt, Artificial Sequence
  Synthetic
ccuccaagcugugccuu

SEQ ID NO: 63441 - RNA, 17 nt, Artificial Sequence
  Synthetic
  misc_feature (3)..(3): n is a, c, g, or u
ccnucucggggucgcuu

SEQ ID NO: 63442 - RNA, 17 nt, Artificial Sequence
  Synthetic
caauuuucuuuugucuu

SEQ ID NO: 63443 - RNA, 17 nt, Artificial Sequence
  Synthetic
ugggucaccuuauucuu

SEQ ID NO: 63444 - RNA, 17 nt, Artificial Sequence
  Synthetic
uuauguaauuggaaguu

SEQ ID NO: 63445 - RNA, 17 nt, Artificial Sequence
  Synthetic
caagagucgugcagguu

SEQ ID NO: 63446 - RNA, 17 nt, Artificial Sequence
  Synthetic
caucuuuuuguuuuguu

SEQ ID NO: 63447 - RNA, 17 nt, Artificial Sequence
  Synthetic
uuggggacugcgaauuu

SEQ ID NO: 63448 - RNA, 17 nt, Artificial Sequence
  Synthetic
auaauugccugaacuuu

SEQ ID NO: 63449 - RNA, 17 nt, Artificial Sequence
  Synthetic
auuucuugucucacuuu

SEQ ID NO: 63450 - RNA, 17 nt, Artificial Sequence
  Synthetic
cccacacggaggccuuu

SEQ ID NO: 63451 - RNA, 17 nt, Artificial Sequence
  Synthetic
ccaucaucaugggcuuu

SEQ ID NO: 63452 - RNA, 17 nt, Artificial Sequence
  Synthetic
  misc_feature (2)..(2): n is a, c, g, or u
angaauugugggucuuu

SEQ ID NO: 63453 - RNA, 17 nt, Artificial Sequence
  Synthetic
aauuuucuuuugucuuu

SEQ ID NO: 63454 - RNA, 17 nt, Artificial Sequence
  Synthetic
ccacacggaggccuuuu

SEQ ID NO: 63455 - RNA, 17 nt, Artificial Sequence
  Synthetic
  misc_feature (1)..(1): n is a, c, g, or u
ngaauugugggucuuuu

SEQ ID NO: 63456 - RNA, 20 nt, Artificial Sequence
  Synthetic
uccuggaauuagaggacaaa

SEQ ID NO: 63457 - RNA, 20 nt, Artificial Sequence
  Synthetic
ccugagggcuccaccccaaa

SEQ ID NO: 63458 - RNA, 20 nt, Artificial Sequence
  Synthetic
auugguaacagagguauaaa

SEQ ID NO: 63459 - RNA, 20 nt, Artificial Sequence
  Synthetic
  misc_feature (4)..(4): n is a, c, g, or u
accnggccguugccgggcaa

SEQ ID NO: 63460 - RNA, 20 nt, Artificial Sequence
  Synthetic
ugaggaugagugucucucaa

SEQ ID NO: 63461 - RNA, 20 nt, Artificial Sequence
  Synthetic
  misc_feature (3)..(4): n is a, c, g, or u
uannuccccccagcaaagaa

SEQ ID NO: 63462 - RNA, 20 nt, Artificial Sequence
  Synthetic
  misc_feature (3)..(4): n is a, c, g, or u
cannuauuguuuacacagaa

SEQ ID NO: 63463 - RNA, 20 nt, Artificial Sequence
  Synthetic
  misc_feature (9)..(9): n is a, c, g, or u
aaauauuunccccuagagaa

SEQ ID NO: 63464 - RNA, 20 nt, Artificial Sequence
  Synthetic
  misc_feature (2)..(2): n is a, c, g, or u
cnggaacggcagacggagaa

SEQ ID NO: 63465 - RNA, 20 nt, Artificial Sequence
  Synthetic
  misc_feature (16)..(16): n is a, c, g, or u
cgccccguggucggcnggaa

SEQ ID NO: 63466 - RNA, 20 nt, Artificial Sequence
  Synthetic
aauugguaacagagguauaa

SEQ ID NO: 63467 - RNA, 20 nt, Artificial Sequence
  Synthetic
uagcuccaaauucuuuauaa

SEQ ID NO: 63468 - RNA, 20 nt, Artificial Sequence
  Synthetic
  misc_feature (10)..(10): n is a, c, g, or u
ccacuggacngaagccaaca

SEQ ID NO: 63469 - RNA, 20 nt, Artificial Sequence
  Synthetic
uggggacccugcaccgaaca

SEQ ID NO: 63470 - RNA, 20 nt, Artificial Sequence
  Synthetic
cgaauuuuggccaagacaca

SEQ ID NO: 63471 - RNA, 20 nt, Artificial Sequence
  Synthetic
  misc_feature (3)..(3): n is a, c, g, or u
ccnggguucacucccccaca

SEQ ID NO: 63472 - RNA, 20 nt, Artificial Sequence
  Synthetic
  misc_feature (12)..(12): n is a, c, g, or u
ucugccguuccngccgacca

SEQ ID NO: 63473 - RNA, 20 nt, Artificial Sequence
  Synthetic
  misc_feature (6)..(6): n is a, c, g, or u
  misc_feature (9)..(9): n is a, c, g, or u
ccaugnccnaaagccaccca

SEQ ID NO: 63474 - RNA, 20 nt, Artificial Sequence
  Synthetic
cgcccaccaaaucuugccca

SEQ ID NO: 63475 - RNA, 20 nt, Artificial Sequence
  Synthetic
uuuggaagauccagcaucca

SEQ ID NO: 63476 - RNA, 20 nt, Artificial Sequence
  Synthetic
uuucccaccuugugagucca

SEQ ID NO: 63477 - RNA, 20 nt, Artificial Sequence
  Synthetic
cuucaccucugcacgucgca

SEQ ID NO: 63478 - RNA, 20 nt, Artificial Sequence
  Synthetic
  misc_feature (15)..(15): n is a, c, g, or u
  misc_feature (18)..(18): n is a, c, g, or u
ccuuggguggcuuunggnca

SEQ ID NO: 63479 - RNA, 20 nt, Artificial Sequence
  Synthetic
uugguucuucuggacuauca

SEQ ID NO: 63480 - RNA, 20 nt, Artificial Sequence
  Synthetic
agucuuugaaguaugccuca

SEQ ID NO: 63481 - RNA, 20 nt, Artificial Sequence
  Synthetic
accugcacgacucuugcuca

SEQ ID NO: 63482 - RNA, 20 nt, Artificial Sequence
  Synthetic
aucccaacaaaacaaaaaga

SEQ ID NO: 63483 - RNA, 20 nt, Artificial Sequence
  Synthetic
aaaugaauaucaggaaaaga

SEQ ID NO: 63484 - RNA, 20 nt, Artificial Sequence
  Synthetic
  misc_feature (9)..(9): n is a, c, g, or u
uggucggcnggaacggcaga

SEQ ID NO: 63485 - RNA, 20 nt, Artificial Sequence
  Synthetic
acugaaggaaagaagucaga

SEQ ID NO: 63486 - RNA, 20 nt, Artificial Sequence
  Synthetic
  misc_feature (2)..(2): n is a, c, g, or u
anccccaagcgaccccgaga

SEQ ID NO: 63487 - RNA, 20 nt, Artificial Sequence
  Synthetic
acacgguccggcagaugaga

SEQ ID NO: 63488 - RNA, 20 nt, Artificial Sequence
  Synthetic
caagugcaauuuccguccga

SEQ ID NO: 63489 - RNA, 20 nt, Artificial Sequence
  Synthetic
ccaccaaucggcagucagga

SEQ ID NO: 63490 - RNA, 20 nt, Artificial Sequence
  Synthetic
ugcuguucaaaaccuucgga

SEQ ID NO: 63491 - RNA, 20 nt, Artificial Sequence
  Synthetic
caucauggggcuuucuugga

SEQ ID NO: 63492 - RNA, 20 nt, Artificial Sequence
  Synthetic
  misc_feature (18)..(18): n is a, c, g, or u
agacaccaaauacucuanga

SEQ ID NO: 63493 - RNA, 20 nt, Artificial Sequence
  Synthetic
uuuccgaaagcccaugauga

SEQ ID NO: 63494 - RNA, 20 nt, Artificial Sequence
  Synthetic
ucuagaagaucucuuacuga

SEQ ID NO: 63495 - RNA, 20 nt, Artificial Sequence
  Synthetic
uuagcaugccuugagccuga

SEQ ID NO: 63496 - RNA, 20 nt, Artificial Sequence
  Synthetic
uccgcaggauucagcgcuga

SEQ ID NO: 63497 - RNA, 20 nt, Artificial Sequence
  Synthetic
  misc_feature (8)..(8): n is a, c, g, or u
agguuccncgcaugcgcuga

SEQ ID NO: 63498 - RNA, 20 nt, Artificial Sequence
  Synthetic
acuacauuaucuggauaaua

SEQ ID NO: 63499 - RNA, 20 nt, Artificial Sequence
  Synthetic
caguuaugucaauacuaaua

SEQ ID NO: 63500 - RNA, 20 nt, Artificial Sequence
  Synthetic
uaagaugcccgccuuccaua

SEQ ID NO: 63501 - RNA, 20 nt, Artificial Sequence
  Synthetic
cugucuggcuuucaguuaua

SEQ ID NO: 63502 - RNA, 20 nt, Artificial Sequence
  Synthetic
  misc_feature (1)..(1): n is a, c, g, or u
ncgcaugcgcugauggccua

SEQ ID NO: 63503 - RNA, 20 nt, Artificial Sequence
  Synthetic
agguuuuauaccuuucucua

SEQ ID NO: 63504 - RNA, 20 nt, Artificial Sequence
  Synthetic
  misc_feature (18)..(18): n is a, c, g, or u
uacauaacccaugaaaunua

SEQ ID NO: 63505 - RNA, 20 nt, Artificial Sequence
  Synthetic
ucacaaggugggaaauuuua

SEQ ID NO: 63506 - RNA, 20 nt, Artificial Sequence
  Synthetic
ccuggaauuagaggacaaac

SEQ ID NO: 63507 - RNA, 20 nt, Artificial Sequence
  Synthetic
uaaacugagccaggagaaac

SEQ ID NO: 63508 - RNA, 20 nt, Artificial Sequence
  Synthetic
ugcuaggcugugcugccaac

SEQ ID NO: 63509 - RNA, 20 nt, Artificial Sequence
  Synthetic
  misc_feature (3)..(3): n is a, c, g, or u
ccnggccguugccgggcaac

SEQ ID NO: 63510 - RNA, 20 nt, Artificial Sequence
  Synthetic
uaccugucuuuaauccuaac

SEQ ID NO: 63511 - RNA, 20 nt, Artificial Sequence
  Synthetic
  misc_feature (15)..(15): n is a, c, g, or u
caaucaauaggccgnuuaac

SEQ ID NO: 63512 - RNA, 20 nt, Artificial Sequence
  Synthetic
acaaucccaacaaagaccac

SEQ ID NO: 63513 - RNA, 20 nt, Artificial Sequence
  Synthetic
  misc_feature (11)..(11): n is a, c, g, or u
cugccguuccngccgaccac

SEQ ID NO: 63514 - RNA, 20 nt, Artificial Sequence
  Synthetic
uuccaguuaggauuaaagac

SEQ ID NO: 63515 - RNA, 20 nt, Artificial Sequence
  Synthetic
aagacuguuuguuuaaagac

SEQ ID NO: 63516 - RNA, 20 nt, Artificial Sequence
  Synthetic
agccaccagcaggaaaauac

SEQ ID NO: 63517 - RNA, 20 nt, Artificial Sequence
  Synthetic
cacaaggugggaaauuuuac

SEQ ID NO: 63518 - RNA, 20 nt, Artificial Sequence
  Synthetic
uccugauauucauuugcacc

SEQ ID NO: 63519 - RNA, 20 nt, Artificial Sequence
  Synthetic
  misc_feature (2)..(3): n is a, c, g, or u
annuaaugacucuagcuacc

SEQ ID NO: 63520 - RNA, 20 nt, Artificial Sequence
  Synthetic
ccgugugggggagugaaccc

SEQ ID NO: 63521 - RNA, 20 nt, Artificial Sequence
  Synthetic
  misc_feature (11)..(11): n is a, c, g, or u
uuccaaauuuncacccaccc

SEQ ID NO: 63522 - RNA, 20 nt, Artificial Sequence
  Synthetic
auaacugacuacuagguccc

SEQ ID NO: 63523 - RNA, 20 nt, Artificial Sequence
  Synthetic
ccagacagugggggaaagcc

SEQ ID NO: 63524 - RNA, 20 nt, Artificial Sequence
  Synthetic
auuuggaagauccagcaucc

SEQ ID NO: 63525 - RNA, 20 nt, Artificial Sequence
  Synthetic
auaauucugucguucucucc

SEQ ID NO: 63526 - RNA, 20 nt, Artificial Sequence
  Synthetic
cacauuuguuaauaaugucc

SEQ ID NO: 63527 - RNA, 20 nt, Artificial Sequence
  Synthetic
cccguuuguccucuaauucc

SEQ ID NO: 63528 - RNA, 20 nt, Artificial Sequence
  Synthetic
  misc_feature (7)..(7): n is a, c, g, or u
uggaaangauguauauuucc

SEQ ID NO: 63529 - RNA, 20 nt, Artificial Sequence
  Synthetic
ugcguguauucaaucuaagc

SEQ ID NO: 63530 - RNA, 20 nt, Artificial Sequence
  Synthetic
ccggaacuggagccaccagc

SEQ ID NO: 63531 - RNA, 20 nt, Artificial Sequence
  Synthetic
agaagaugaggcauagcagc

SEQ ID NO: 63532 - RNA, 20 nt, Artificial Sequence
  Synthetic
ccgcuuguuuugcucgcagc

SEQ ID NO: 63533 - RNA, 20 nt, Artificial Sequence
  Synthetic
uuacauacccuauggaaggc

SEQ ID NO: 63534 - RNA, 20 nt, Artificial Sequence
  Synthetic
ccccugcucguguuacaggc

SEQ ID NO: 63535 - RNA, 20 nt, Artificial Sequence
  Synthetic
cugaugcaacccccacuggc

SEQ ID NO: 63536 - RNA, 20 nt, Artificial Sequence
  Synthetic
cugguguuugcucugaaugc

SEQ ID NO: 63537 - RNA, 20 nt, Artificial Sequence
  Synthetic
agaggccuguauuuuccugc

SEQ ID NO: 63538 - RNA, 20 nt, Artificial Sequence
  Synthetic
aacauuccaccaagcucugc

SEQ ID NO: 63539 - RNA, 20 nt, Artificial Sequence
  Synthetic
uccuugagcaagagucgugc

SEQ ID NO: 63540 - RNA, 20 nt, Artificial Sequence
  Synthetic
ucaggcaagccauucuuugc

SEQ ID NO: 63541 - RNA, 20 nt, Artificial Sequence
  Synthetic
uugggauuguggucccaauc

SEQ ID NO: 63542 - RNA, 20 nt, Artificial Sequence
  Synthetic
uccuggugcaaaugaauauc

SEQ ID NO: 63543 - RNA, 20 nt, Artificial Sequence
  Synthetic
uaccgccucagcucuguauc

SEQ ID NO: 63544 - RNA, 20 nt, Artificial Sequence
  Synthetic
uaaugauuaacuacauuauc

SEQ ID NO: 63545 - RNA, 20 nt, Artificial Sequence
  Synthetic
  misc_feature (5)..(5): n is a, c, g, or u
  misc_feature (11)..(11): n is a, c, g, or u
caccncaccanacugcacuc

SEQ ID NO: 63546 - RNA, 20 nt, Artificial Sequence
  Synthetic
aaaauacaggccucuuacuc

SEQ ID NO: 63547 - RNA, 20 nt, Artificial Sequence
  Synthetic
ccuuuugggguggagcccuc

SEQ ID NO: 63548 - RNA, 20 nt, Artificial Sequence
  Synthetic
ucauuccaccaccaauccuc

SEQ ID NO: 63549 - RNA, 20 nt, Artificial Sequence
  Synthetic
uuugagagacacucauccuc

SEQ ID NO: 63550 - RNA, 20 nt, Artificial Sequence
  Synthetic
  misc_feature (6)..(6): n is a, c, g, or u
uggugnggugaacaaugcuc

SEQ ID NO: 63551 - RNA, 20 nt, Artificial Sequence
  Synthetic
  misc_feature (16)..(16): n is a, c, g, or u
cgucuaacaacaguanucuc

SEQ ID NO: 63552 - RNA, 20 nt, Artificial Sequence
  Synthetic
ccgggcuuucccccacuguc

SEQ ID NO: 63553 - RNA, 20 nt, Artificial Sequence
  Synthetic
uaggguauguaaauaguguc

SEQ ID NO: 63554 - RNA, 20 nt, Artificial Sequence
  Synthetic
agguaggagugggagcauuc

SEQ ID NO: 63555 - RNA, 20 nt, Artificial Sequence
  Synthetic
cccuaucuuaucaacacuuc

SEQ ID NO: 63556 - RNA, 20 nt, Artificial Sequence
  Synthetic
caucuucuuguugguucuuc

SEQ ID NO: 63557 - RNA, 20 nt, Artificial Sequence
  Synthetic
ccugcugguggcuccaguuc

SEQ ID NO: 63558 - RNA, 20 nt, Artificial Sequence
  Synthetic
  misc_feature (8)..(8): n is a, c, g, or u
auggaaangauguauauuuc

SEQ ID NO: 63559 - RNA, 20 nt, Artificial Sequence
  Synthetic
  misc_feature (4)..(4): n is a, c, g, or u
auanccacauuguguaaaag

SEQ ID NO: 63560 - RNA, 20 nt, Artificial Sequence
  Synthetic
ccugcugcgagcaaaacaag

SEQ ID NO: 63561 - RNA, 20 nt, Artificial Sequence
  Synthetic
aggacaaauuggaggacaag

SEQ ID NO: 63562 - RNA, 20 nt, Artificial Sequence
  Synthetic
  misc_feature (1)..(1): n is a, c, g, or u
nggaacggcagacggagaag

SEQ ID NO: 63563 - RNA, 20 nt, Artificial Sequence
  Synthetic
  misc_feature (2)..(2): n is a, c, g, or u
anuacuguuguuagacgaag

SEQ ID NO: 63564 - RNA, 20 nt, Artificial Sequence
  Synthetic
ugcccaaggucuuacauaag

SEQ ID NO: 63565 - RNA, 20 nt, Artificial Sequence
  Synthetic
cugcaggaucccagaguaag

SEQ ID NO: 63566 - RNA, 20 nt, Artificial Sequence
  Synthetic
caaaagaaaauugguaacag

SEQ ID NO: 63567 - RNA, 20 nt, Artificial Sequence
  Synthetic
uauaacugaaagccagacag

SEQ ID NO: 63568 - RNA, 20 nt, Artificial Sequence
  Synthetic
uauggccaagccccagccag

SEQ ID NO: 63569 - RNA, 20 nt, Artificial Sequence
  Synthetic
  misc_feature (14)..(14): n is a, c, g, or u
ccuuguuggcuucnguccag

SEQ ID NO: 63570 - RNA, 20 nt, Artificial Sequence
  Synthetic
cccgccuguaacacgagcag

SEQ ID NO: 63571 - RNA, 20 nt, Artificial Sequence
  Synthetic
aacaagagaugauuaggcag

SEQ ID NO: 63572 - RNA, 20 nt, Artificial Sequence
  Synthetic
cucauccucaggccaugcag

SEQ ID NO: 63573 - RNA, 20 nt, Artificial Sequence
  Synthetic
uacuagugccauuuguucag

SEQ ID NO: 63574 - RNA, 20 nt, Artificial Sequence
  Synthetic
cggggagaccgcguaaagag

SEQ ID NO: 63575 - RNA, 20 nt, Artificial Sequence
  Synthetic
  misc_feature (1)..(1): n is a, c, g, or u
ngaagccaacaagguaggag

SEQ ID NO: 63576 - RNA, 20 nt, Artificial Sequence
  Synthetic
cgagggaguucuucuucuag

SEQ ID NO: 63577 - RNA, 20 nt, Artificial Sequence
  Synthetic
  misc_feature (2)..(2): n is a, c, g, or u
cnggccguugccgggcaacg

SEQ ID NO: 63578 - RNA, 20 nt, Artificial Sequence
  Synthetic
cagaugagaaggcacagacg

SEQ ID NO: 63579 - RNA, 20 nt, Artificial Sequence
  Synthetic
cccugcucguguuacaggcg

SEQ ID NO: 63580 - RNA, 20 nt, Artificial Sequence
  Synthetic
auaggccaucagcgcaugcg

SEQ ID NO: 63581 - RNA, 20 nt, Artificial Sequence
  Synthetic
  misc_feature (15)..(15): n is a, c, g, or u
ccugcggacgacccnucucg

SEQ ID NO: 63582 - RNA, 20 nt, Artificial Sequence
  Synthetic
ucaucucgucaaucuucucg

SEQ ID NO: 63583 - RNA, 20 nt, Artificial Sequence
  Synthetic
uauuccuuggacucacaagg

SEQ ID NO: 63584 - RNA, 20 nt, Artificial Sequence
  Synthetic
uuuacauacccuauggaagg

SEQ ID NO: 63585 - RNA, 20 nt, Artificial Sequence
  Synthetic
ugccgauugguggaggcagg

SEQ ID NO: 63586 - RNA, 20 nt, Artificial Sequence
  Synthetic
cgauugguggaggcaggagg

SEQ ID NO: 63587 - RNA, 20 nt, Artificial Sequence
  Synthetic
uuaaaggucuuuguacuagg

SEQ ID NO: 63588 - RNA, 20 nt, Artificial Sequence
  Synthetic
  misc_feature (15)..(15): n is a, c, g, or u
agacugggaggagunggggg

SEQ ID NO: 63589 - RNA, 20 nt, Artificial Sequence
  Synthetic
cacacggaggccuuuugggg

SEQ ID NO: 63590 - RNA, 20 nt, Artificial Sequence
  Synthetic
cuguuuguuuaaagacuggg

SEQ ID NO: 63591 - RNA, 20 nt, Artificial Sequence
  Synthetic
aaugacucuagcuaccuggg

SEQ ID NO: 63592 - RNA, 20 nt, Artificial Sequence
  Synthetic
ccuccaagcugugccuuggg

SEQ ID NO: 63593 - RNA, 20 nt, Artificial Sequence
  Synthetic
  misc_feature (18)..(18): n is a, c, g, or u
uaaagacugggaggagungg

SEQ ID NO: 63594 - RNA, 20 nt, Artificial Sequence
  Synthetic
ugaaugcuggauccaacugg

SEQ ID NO: 63595 - RNA, 20 nt, Artificial Sequence
  Synthetic
aacugaaagccagacagugg

SEQ ID NO: 63596 - RNA, 20 nt, Artificial Sequence
  Synthetic
aaaucccagaggauuggugg

SEQ ID NO: 63597 - RNA, 20 nt, Artificial Sequence
  Synthetic
cccaaaaggccuccgugugg

SEQ ID NO: 63598 - RNA, 20 nt, Artificial Sequence
  Synthetic
cgauagccaggacaaauugg

SEQ ID NO: 63599 - RNA, 20 nt, Artificial Sequence
  Synthetic
ccuuccugacugccgauugg

SEQ ID NO: 63600 - RNA, 20 nt, Artificial Sequence
  Synthetic
aaaaaaucccagaggauugg

SEQ ID NO: 63601 - RNA, 20 nt, Artificial Sequence
  Synthetic
uauggaugaugugguauugg

SEQ ID NO: 63602 - RNA, 20 nt, Artificial Sequence
  Synthetic
ccacccaaggcacagcuugg

SEQ ID NO: 63603 - RNA, 20 nt, Artificial Sequence
  Synthetic
ugggauccugcagagcuugg

SEQ ID NO: 63604 - RNA, 20 nt, Artificial Sequence
  Synthetic
agaccuugggcaagauuugg

SEQ ID NO: 63605 - RNA, 20 nt, Artificial Sequence
  Synthetic
  misc_feature (19)..(19): n is a, c, g, or u
uuaaagacugggaggagung

SEQ ID NO: 63606 - RNA, 20 nt, Artificial Sequence
  Synthetic
  misc_feature (14)..(14): n is a, c, g, or u
auaaggugacccanaaaaug

SEQ ID NO: 63607 - RNA, 20 nt, Artificial Sequence
  Synthetic
agguuuugaacagcaacaug

SEQ ID NO: 63608 - RNA, 20 nt, Artificial Sequence
  Synthetic
cccaacaaaacaaaaagaug

SEQ ID NO: 63609 - RNA, 20 nt, Artificial Sequence
  Synthetic
uuucaguuauauggaugaug

SEQ ID NO: 63610 - RNA, 20 nt, Artificial Sequence
  Synthetic
uaaagaauuuggagcuacug

SEQ ID NO: 63611 - RNA, 20 nt, Artificial Sequence
  Synthetic
uuuagcaugccuugagccug

SEQ ID NO: 63612 - RNA, 20 nt, Artificial Sequence
  Synthetic
cccgucagcgcugaauccug

SEQ ID NO: 63613 - RNA, 20 nt, Artificial Sequence
  Synthetic
aggcaagccauucuuugcug

SEQ ID NO: 63614 - RNA, 20 nt, Artificial Sequence
  Synthetic
uaacugaaagccagacagug

SEQ ID NO: 63615 - RNA, 20 nt, Artificial Sequence
  Synthetic
uggccaagccccagccagug

SEQ ID NO: 63616 - RNA, 20 nt, Artificial Sequence
  Synthetic
auuuggugucuuuuggagug

SEQ ID NO: 63617 - RNA, 20 nt, Artificial Sequence
  Synthetic
caccccaaaaggccuccgug

SEQ ID NO: 63618 - RNA, 20 nt, Artificial Sequence
  Synthetic
  misc_feature (15)..(15): n is a, c, g, or u
ugccugagugcagunuggug

SEQ ID NO: 63619 - RNA, 20 nt, Artificial Sequence
  Synthetic
ccccaaaaggccuccgugug

SEQ ID NO: 63620 - RNA, 20 nt, Artificial Sequence
  Synthetic
  misc_feature (5)..(5): n is a, c, g, or u
  misc_feature (18)..(18): n is a, c, g, or u
uucanucugauguguucnug

SEQ ID NO: 63621 - RNA, 20 nt, Artificial Sequence
  Synthetic
aguggucuuuguugggauug

SEQ ID NO: 63622 - RNA, 20 nt, Artificial Sequence
  Synthetic
ucucaaagguggagugauug

SEQ ID NO: 63623 - RNA, 20 nt, Artificial Sequence
  Synthetic
auauggaugaugugguauug

SEQ ID NO: 63624 - RNA, 20 nt, Artificial Sequence
  Synthetic
uaaaguucaggcaauuauug

SEQ ID NO: 63625 - RNA, 20 nt, Artificial Sequence
  Synthetic
cagagcuugguggaauguug

SEQ ID NO: 63626 - RNA, 20 nt, Artificial Sequence
  Synthetic
  misc_feature (11)..(11): n is a, c, g, or u
  misc_feature (17)..(17): n is a, c, g, or u
uggugaguganuggagnuug

SEQ ID NO: 63627 - RNA, 20 nt, Artificial Sequence
  Synthetic
ccccacacggaggccuuuug

SEQ ID NO: 63628 - RNA, 20 nt, Artificial Sequence
  Synthetic
  misc_feature (20)..(20): n is a, c, g, or u
uuagaaaacucccuguuaan

SEQ ID NO: 63629 - RNA, 20 nt, Artificial Sequence
  Synthetic
  misc_feature (1)..(1): n is a, c, g, or u
  misc_feature (20)..(20): n is a, c, g, or u
nccccaagcgaccccgagan

SEQ ID NO: 63630 - RNA, 20 nt, Artificial Sequence
  Synthetic
  misc_feature (20)..(20): n is a, c, g, or u
acaagagguuggugagugan

SEQ ID NO: 63631 - RNA, 20 nt, Artificial Sequence
  Synthetic
  misc_feature (20)..(20): n is a, c, g, or u
uggcuugccugagugcagun

SEQ ID NO: 63632 - RNA, 20 nt, Artificial Sequence
  Synthetic
  misc_feature (20)..(20): n is a, c, g, or u
uuuaaagacugggaggagun

SEQ ID NO: 63633 - RNA, 20 nt, Artificial Sequence
  Synthetic
  misc_feature (3)..(3): n is a, c, g, or u
  misc_feature (20)..(20): n is a, c, g, or u
acncguagcgccucauuuun

SEQ ID NO: 63634 - RNA, 20 nt, Artificial Sequence
  Synthetic
acccaaagacaaaagaaaau

SEQ ID NO: 63635 - RNA, 20 nt, Artificial Sequence
  Synthetic
cgccuccugccuccaccaau

SEQ ID NO: 63636 - RNA, 20 nt, Artificial Sequence
  Synthetic
ugacauacuuuccaaucaau

SEQ ID NO: 63637 - RNA, 20 nt, Artificial Sequence
  Synthetic
  misc_feature (1)..(1): n is a, c, g, or u
nauuucauggguuauguaau

SEQ ID NO: 63638 - RNA, 20 nt, Artificial Sequence
  Synthetic
aguccaaggaauacuaacau

SEQ ID NO: 63639 - RNA, 20 nt, Artificial Sequence
  Synthetic
acuggcuggggcuuggccau

SEQ ID NO: 63640 - RNA, 20 nt, Artificial Sequence
  Synthetic
auaagaugcccgccuuccau

SEQ ID NO: 63641 - RNA, 20 nt, Artificial Sequence
  Synthetic
uauucccaucccaucaucau

SEQ ID NO: 63642 - RNA, 20 nt, Artificial Sequence
  Synthetic
ucccaacaaaacaaaaagau

SEQ ID NO: 63643 - RNA, 20 nt, Artificial Sequence
  Synthetic
uccggaaguguugauaagau

SEQ ID NO: 63644 - RNA, 20 nt, Artificial Sequence
  Synthetic
caaacaccagaaauccagau

SEQ ID NO: 63645 - RNA, 20 nt, Artificial Sequence
  Synthetic
cugccuuccugacugccgau

SEQ ID NO: 63646 - RNA, 20 nt, Artificial Sequence
  Synthetic
ucgucaaucuucucgaggau

SEQ ID NO: 63647 - RNA, 20 nt, Artificial Sequence
  Synthetic
aaagcccaugaugaugggau

SEQ ID NO: 63648 - RNA, 20 nt, Artificial Sequence
  Synthetic
  misc_feature (8)..(8): n is a, c, g, or u
cuguuaancggccuauugau

SEQ ID NO: 63649 - RNA, 20 nt, Artificial Sequence
  Synthetic
aguuaugucaauacuaauau

SEQ ID NO: 63650 - RNA, 20 nt, Artificial Sequence
  Synthetic
  misc_feature (12)..(12): n is a, c, g, or u
aggucuggagcnaaacuuau

SEQ ID NO: 63651 - RNA, 20 nt, Artificial Sequence
  Synthetic
agacuguuuguuuaaagacu

SEQ ID NO: 63652 - RNA, 20 nt, Artificial Sequence
  Synthetic
cucaagauguuguacagacu

SEQ ID NO: 63653 - RNA, 20 nt, Artificial Sequence
  Synthetic
uauugacauaacugacuacu

SEQ ID NO: 63654 - RNA, 20 nt, Artificial Sequence
  Synthetic
agauuaaaggucuuuguacu

SEQ ID NO: 63655 - RNA, 20 nt, Artificial Sequence
  Synthetic
aguccucuuauguaagaccu

SEQ ID NO: 63656 - RNA, 20 nt, Artificial Sequence
  Synthetic
  misc_feature (1)..(2): n is a, c, g, or u
nnuaaugacucuagcuaccu

SEQ ID NO: 63657 - RNA, 20 nt, Artificial Sequence
  Synthetic
caagccuccaagcugugccu

SEQ ID NO: 63658 - RNA, 20 nt, Artificial Sequence
  Synthetic
agcaucacaucaggauuccu

SEQ ID NO: 63659 - RNA, 20 nt, Artificial Sequence
  Synthetic
uucccaauguuaguauuccu

SEQ ID NO: 63660 - RNA, 20 nt, Artificial Sequence
  Synthetic
aagccacccaaggcacagcu

SEQ ID NO: 63661 - RNA, 20 nt, Artificial Sequence
  Synthetic
cucugggauccugcagagcu

SEQ ID NO: 63662 - RNA, 20 nt, Artificial Sequence
  Synthetic
aacccccacuggcuggggcu

SEQ ID NO: 63663 - RNA, 20 nt, Artificial Sequence
  Synthetic
ugaugcaacccccacuggcu

SEQ ID NO: 63664 - RNA, 20 nt, Artificial Sequence
  Synthetic
  misc_feature (6)..(6): n is a, c, g, or u
acaucnuuuccauggcugcu

SEQ ID NO: 63665 - RNA, 20 nt, Artificial Sequence
  Synthetic
caggcaagccauucuuugcu

SEQ ID NO: 63666 - RNA, 20 nt, Artificial Sequence
  Synthetic
aaauacaggccucuuacucu

SEQ ID NO: 63667 - RNA, 20 nt, Artificial Sequence
  Synthetic
cauuccaccaccaauccucu

SEQ ID NO: 63668 - RNA, 20 nt, Artificial Sequence
  Synthetic
aagguuuuauaccuuucucu

SEQ ID NO: 63669 - RNA, 20 nt, Artificial Sequence
  Synthetic
  misc_feature (4)..(4): n is a, c, g, or u
uuunugggucaccuuauucu

SEQ ID NO: 63670 - RNA, 20 nt, Artificial Sequence
  Synthetic
uggacuucucucaauuuucu

SEQ ID NO: 63671 - RNA, 20 nt, Artificial Sequence
  Synthetic
uggguuauguaauuggaagu

SEQ ID NO: 63672 - RNA, 20 nt, Artificial Sequence
  Synthetic
agcuuggaggcuugaacagu

SEQ ID NO: 63673 - RNA, 20 nt, Artificial Sequence
  Synthetic
auaacugaaagccagacagu

SEQ ID NO: 63674 - RNA, 20 nt, Artificial Sequence
  Synthetic
auuuuuucccgaccaccagu

SEQ ID NO: 63675 - RNA, 20 nt, Artificial Sequence
  Synthetic
auggccaagccccagccagu

SEQ ID NO: 63676 - RNA, 20 nt, Artificial Sequence
  Synthetic
  misc_feature (6)..(6): n is a, c, g, or u
uggacngaagccaacaaggu

SEQ ID NO: 63677 - RNA, 20 nt, Artificial Sequence
  Synthetic
uuugaaguaugccucaaggu

SEQ ID NO: 63678 - RNA, 20 nt, Artificial Sequence
  Synthetic
caaauuggaggacaagaggu

SEQ ID NO: 63679 - RNA, 20 nt, Artificial Sequence
  Synthetic
aaagguggagugauuggggu

SEQ ID NO: 63680 - RNA, 20 nt, Artificial Sequence
  Synthetic
augacucuagcuaccugggu

SEQ ID NO: 63681 - RNA, 20 nt, Artificial Sequence
  Synthetic
agagaggugcgccccguggu

SEQ ID NO: 63682 - RNA, 20 nt, Artificial Sequence
  Synthetic
ucuuuguacuaggaggcugu

SEQ ID NO: 63683 - RNA, 20 nt, Artificial Sequence
  Synthetic
accccaaaaggccuccgugu

SEQ ID NO: 63684 - RNA, 20 nt, Artificial Sequence
  Synthetic
  misc_feature (13)..(13): n is a, c, g, or u
aaaguaugucaangaauugu

SEQ ID NO: 63685 - RNA, 20 nt, Artificial Sequence
  Synthetic
ugcucccacuccuaccuugu

SEQ ID NO: 63686 - RNA, 20 nt, Artificial Sequence
  Synthetic
aacaaaugugaacaauuugu

SEQ ID NO: 63687 - RNA, 20 nt, Artificial Sequence
  Synthetic
  misc_feature (4)..(4): n is a, c, g, or u
uucnguccaguggucuuugu

SEQ ID NO: 63688 - RNA, 20 nt, Artificial Sequence
  Synthetic
uccccaucuuuuuguuuugu

SEQ ID NO: 63689 - RNA, 20 nt, Artificial Sequence
  Synthetic
  misc_feature (19)..(19): n is a, c, g, or u
uuacauaacccaugaaaunu

SEQ ID NO: 63690 - RNA, 20 nt, Artificial Sequence
  Synthetic
  misc_feature (15)..(15): n is a, c, g, or u
uaccugggugggugnaaauu

SEQ ID NO: 63691 - RNA, 20 nt, Artificial Sequence
  Synthetic
auugacccuuauaaagaauu

SEQ ID NO: 63692 - RNA, 20 nt, Artificial Sequence
  Synthetic
aagguaggagugggagcauu

SEQ ID NO: 63693 - RNA, 20 nt, Artificial Sequence
  Synthetic
aaacaccagaaauccagauu

SEQ ID NO: 63694 - RNA, 20 nt, Artificial Sequence
  Synthetic
cucucaaagguggagugauu

SEQ ID NO: 63695 - RNA, 20 nt, Artificial Sequence
  Synthetic
uauauggaugaugugguauu

SEQ ID NO: 63696 - RNA, 20 nt, Artificial Sequence
  Synthetic
auguugcuguucaaaaccuu

SEQ ID NO: 63697 - RNA, 20 nt, Artificial Sequence
  Synthetic
aagccuccaagcugugccuu

SEQ ID NO: 63698 - RNA, 20 nt, Artificial Sequence
  Synthetic
uaccaauuuucuuuugucuu

SEQ ID NO: 63699 - RNA, 20 nt, Artificial Sequence
  Synthetic
  misc_feature (3)..(3): n is a, c, g, or u
uunugggucaccuuauucuu

SEQ ID NO: 63700 - RNA, 20 nt, Artificial Sequence
  Synthetic
aaagauggaguuuuccaguu

SEQ ID NO: 63701 - RNA, 20 nt, Artificial Sequence
  Synthetic
uauguaaauagugucugguu

SEQ ID NO: 63702 - RNA, 20 nt, Artificial Sequence
  Synthetic
  misc_feature (3)..(3): n is a, c, g, or u
ucnguccaguggucuuuguu

SEQ ID NO: 63703 - RNA, 20 nt, Artificial Sequence
  Synthetic
ccccaucuuuuuguuuuguu

SEQ ID NO: 63704 - RNA, 20 nt, Artificial Sequence
  Synthetic
  misc_feature (12)..(12): n is a, c, g, or u
  misc_feature (18)..(18): n is a, c, g, or u
uuggugaguganuggagnuu

SEQ ID NO: 63705 - RNA, 20 nt, Artificial Sequence
  Synthetic
  misc_feature (3)..(3): n is a, c, g, or u
agnuuggggacugcgaauuu

SEQ ID NO: 63706 - RNA, 20 nt, Artificial Sequence
  Synthetic
acaauaauugccugaacuuu

SEQ ID NO: 63707 - RNA, 20 nt, Artificial Sequence
  Synthetic
cacauuucuugucucacuuu

SEQ ID NO: 63708 - RNA, 20 nt, Artificial Sequence
  Synthetic
ucccccacacggaggccuuu

SEQ ID NO: 63709 - RNA, 20 nt, Artificial Sequence
  Synthetic
aucccaucaucaugggcuuu

SEQ ID NO: 63710 - RNA, 20 nt, Artificial Sequence
  Synthetic
  misc_feature (5)..(5): n is a, c, g, or u
ucaangaauugugggucuuu

SEQ ID NO: 63711 - RNA, 20 nt, Artificial Sequence
  Synthetic
  misc_feature (1)..(1): n is a, c, g, or u
nuagaguauuuggugucuuu

SEQ ID NO: 63712 - RNA, 20 nt, Artificial Sequence
  Synthetic
accaauuuucuuuugucuuu

SEQ ID NO: 63713 - RNA, 20 nt, Artificial Sequence
  Synthetic
cccccacacggaggccuuuu

SEQ ID NO: 63714 - RNA, 20 nt, Artificial Sequence
  Synthetic
  misc_feature (4)..(4): n is a, c, g, or u
caangaauugugggucuuuu

SEQ ID NO: 63715 - RNA, 21 nt, Artificial Sequence
  Synthetic
  misc_feature (5)..(5): n is a, c, g, or u
gaccnggccguugccgggcaa

SEQ ID NO: 63716 - RNA, 21 nt, Artificial Sequence
  Synthetic
guuaauaauguccuggugcaa

SEQ ID NO: 63717 - RNA, 23 nt, Artificial Sequence
  Synthetic
gaugagugaggcaguagucggaa

SEQ ID NO: 63718 - RNA, 18 nt, Artificial Sequence
  Synthetic
ggucgggaaaaaauccca

SEQ ID NO: 63719 - RNA, 20 nt, Artificial Sequence
  Synthetic
guggucgggaaaaaauccca

SEQ ID NO: 63720 - RNA, 21 nt, Artificial Sequence
  Synthetic
gguggucgggaaaaaauccca

SEQ ID NO: 63721 - RNA, 22 nt, Artificial Sequence
  Synthetic
  misc_feature (10)..(11): n is a, c, g, or u
gagucauuannuccccccagca

SEQ ID NO: 63722 - RNA, 22 nt, Artificial Sequence
  Synthetic
gcaaaugaauaucaggaaaaga

SEQ ID NO: 63723 - RNA, 24 nt, Artificial Sequence
  Synthetic
gugcaaaugaauaucaggaaaaga

SEQ ID NO: 63724 - RNA, 21 nt, Artificial Sequence
  Synthetic
gaaagugaaagccugcuuaga

SEQ ID NO: 63725 - RNA, 23 nt, Artificial Sequence
  Synthetic
gagaaagugaaagccugcuuaga

SEQ ID NO: 63726 - RNA, 22 nt, Artificial Sequence
  Synthetic
guauauuuccgggagagaacga

SEQ ID NO: 63727 - RNA, 20 nt, Artificial Sequence
  Synthetic
gaucuucgucugcgaggcga

SEQ ID NO: 63728 - RNA, 22 nt, Artificial Sequence
  Synthetic
gagaucuucgucugcgaggcga

SEQ ID NO: 63729 - RNA, 24 nt, Artificial Sequence
  Synthetic
gaauuuuccgaaagcccaugauga

SEQ ID NO: 63730 - RNA, 23 nt, Artificial Sequence
  Synthetic
gaaagaagucagaaggcaaaaac

SEQ ID NO: 63731 - RNA, 24 nt, Artificial Sequence
  Synthetic
ggaaagaagucagaaggcaaaaac

SEQ ID NO: 63732 - RNA, 21 nt, Artificial Sequence
  Synthetic
gaaaauugagagaaguccacc

SEQ ID NO: 63733 - RNA, 20 nt, Artificial Sequence
  Synthetic
guacuggugguugaugaucc

SEQ ID NO: 63734 - RNA, 23 nt, Artificial Sequence
  Synthetic
  misc_feature (15)..(15): n is a, c, g, or u
gucguugacauugcngagagucc

SEQ ID NO: 63735 - RNA, 24 nt, Artificial Sequence
  Synthetic
  misc_feature (16)..(16): n is a, c, g, or u
ggucguugacauugcngagagucc

SEQ ID NO: 63736 - RNA, 22 nt, Artificial Sequence
  Synthetic
gacauaacugacuacuaggucc

SEQ ID NO: 63737 - RNA, 22 nt, Artificial Sequence
  Synthetic
gaaacauagagguuccuugagc

SEQ ID NO: 63738 - RNA, 23 nt, Artificial Sequence
  Synthetic
ggaaacauagagguuccuugagc

SEQ ID NO: 63739 - RNA, 24 nt, Artificial Sequence
  Synthetic
gggaaacauagagguuccuugagc

SEQ ID NO: 63740 - RNA, 22 nt, Artificial Sequence
  Synthetic
  misc_feature (19)..(19): n is a, c, g, or u
gugugggggagugaacccnggc

SEQ ID NO: 63741 - RNA, 21 nt, Artificial Sequence
  Synthetic
gaaaauacaggccucuuacuc

SEQ ID NO: 63742 - RNA, 22 nt, Artificial Sequence
  Synthetic
ggaaaauacaggccucuuacuc

SEQ ID NO: 63743 - RNA, 19 nt, Artificial Sequence
  Synthetic
gcauacagaggcauuaaag

SEQ ID NO: 63744 - RNA, 24 nt, Artificial Sequence
  Synthetic
  misc_feature (3)..(3): n is a, c, g, or u
  misc_feature (7)..(7): n is a, c, g, or u
ganaganccccaagcgaccccgag

SEQ ID NO: 63745 - RNA, 21 nt, Artificial Sequence
  Synthetic
gccgauugguggaggcaggag

SEQ ID NO: 63746 - RNA, 21 nt, Artificial Sequence
  Synthetic
  misc_feature (11)..(11): n is a, c, g, or u
gaccccgagangggucguccg

SEQ ID NO: 63747 - RNA, 23 nt, Artificial Sequence
  Synthetic
  misc_feature (13)..(13): n is a, c, g, or u
gcgaccccgagangggucguccg

SEQ ID NO: 63748 - RNA, 18 nt, Artificial Sequence
  Synthetic
gacaaaggacgucccucg

SEQ ID NO: 63749 - RNA, 21 nt, Artificial Sequence
  Synthetic
guagacaaaggacgucccucg

SEQ ID NO: 63750 - RNA, 24 nt, Artificial Sequence
  Synthetic
gacguagacaaaggacgucccucg

SEQ ID NO: 63751 - RNA, 22 nt, Artificial Sequence
  Synthetic
gaggaugagugucucucaaagg

SEQ ID NO: 63752 - RNA, 21 nt, Artificial Sequence
  Synthetic
gcaagagucgugcagguucgg

SEQ ID NO: 63753 - RNA, 23 nt, Artificial Sequence
  Synthetic
gagcaagagucgugcagguucgg

SEQ ID NO: 63754 - RNA, 23 nt, Artificial Sequence
  Synthetic
gcauuugguggucuauaagcugg

SEQ ID NO: 63755 - RNA, 24 nt, Artificial Sequence
  Synthetic
ggcauuugguggucuauaagcugg

SEQ ID NO: 63756 - RNA, 24 nt, Artificial Sequence
  Synthetic
gaaaaaaucccagaggauuggugg

SEQ ID NO: 63757 - RNA, 24 nt, Artificial Sequence
  Synthetic
gauuucugguguuugcucugaaug

SEQ ID NO: 63758 - RNA, 20 nt, Artificial Sequence
  Synthetic
gaugcuuuccauguucggug

SEQ ID NO: 63759 - RNA, 22 nt, Artificial Sequence
  Synthetic
gugaugcuuuccauguucggug

SEQ ID NO: 63760 - RNA, 24 nt, Artificial Sequence
  Synthetic
gacaaauuggaggacaagagguug

SEQ ID NO: 63761 - RNA, 19 nt, Artificial Sequence
  Synthetic
  misc_feature (19)..(19): n is a, c, g, or u
gucggucguugacauugcn

SEQ ID NO: 63762 - RNA, 20 nt, Artificial Sequence
  Synthetic
  misc_feature (20)..(20): n is a, c, g, or u
ggucggucguugacauugcn

SEQ ID NO: 63763 - RNA, 20 nt, Artificial Sequence
  Synthetic
guugggauuguggucccaau

SEQ ID NO: 63764 - RNA, 21 nt, Artificial Sequence
  Synthetic
gaaagcccaugaugaugggau

SEQ ID NO: 63765 - RNA, 21 nt, Artificial Sequence
  Synthetic
gucucucaaagguggagugau

SEQ ID NO: 63766 - RNA, 23 nt, Artificial Sequence
  Synthetic
gugucucucaaagguggagugau

SEQ ID NO: 63767 - RNA, 20 nt, Artificial Sequence
  Synthetic
guaaugauuaacuacauuau

SEQ ID NO: 63768 - RNA, 23 nt, Artificial Sequence
  Synthetic
gaaguaaugauuaacuacauuau

SEQ ID NO: 63769 - RNA, 24 nt, Artificial Sequence
  Synthetic
ggaaguaaugauuaacuacauuau

SEQ ID NO: 63770 - RNA, 22 nt, Artificial Sequence
  Synthetic
  misc_feature (7)..(7): n is a, c, g, or u
  misc_feature (13)..(13): n is a, c, g, or u
gaguganuggagnuuggggacu

SEQ ID NO: 63771 - RNA, 24 nt, Artificial Sequence
  Synthetic
  misc_feature (9)..(9): n is a, c, g, or u
  misc_feature (15)..(15): n is a, c, g, or u
gugaguganuggagnuuggggacu

SEQ ID NO: 63772 - RNA, 20 nt, Artificial Sequence
  Synthetic
guaacacgagcagggguccu

SEQ ID NO: 63773 - RNA, 24 nt, Artificial Sequence
  Synthetic
gccuguaacacgagcagggguccu

SEQ ID NO: 63774 - RNA, 19 nt, Artificial Sequence
  Synthetic
gcgagcaaaacaagcggcu

SEQ ID NO: 63775 - RNA, 22 nt, Artificial Sequence
  Synthetic
gcugcgagcaaaacaagcggcu

SEQ ID NO: 63776 - RNA, 24 nt, Artificial Sequence
  Synthetic
gccuauggccaagccccagccagu

SEQ ID NO: 63777 - RNA, 21 nt, Artificial Sequence
  Synthetic
gaaaagauggaguuuuccagu

SEQ ID NO: 63778 - RNA, 22 nt, Artificial Sequence
  Synthetic
ggaaaagauggaguuuuccagu

SEQ ID NO: 63779 - RNA, 19 nt, Artificial Sequence
  Synthetic
gucuauaagcuggaggagu

SEQ ID NO: 63780 - RNA, 20 nt, Artificial Sequence
  Synthetic
ggucuauaagcuggaggagu

SEQ ID NO: 63781 - RNA, 22 nt, Artificial Sequence
  Synthetic
guggucuauaagcuggaggagu

SEQ ID NO: 63782 - RNA, 23 nt, Artificial Sequence
  Synthetic
gguggucuauaagcuggaggagu

SEQ ID NO: 63783 - RNA, 21 nt, Artificial Sequence
  Synthetic
gucuagacucugcgguauugu

SEQ ID NO: 63784 - RNA, 23 nt, Artificial Sequence
  Synthetic
gagucuagacucugcgguauugu

SEQ ID NO: 63785 - RNA, 22 nt, Artificial Sequence
  Synthetic
  misc_feature (6)..(6): n is a, c, g, or u
gcuucnguccaguggucuuugu

SEQ ID NO: 63786 - RNA, 23 nt, Artificial Sequence
  Synthetic
  misc_feature (7)..(7): n is a, c, g, or u
ggcuucnguccaguggucuuugu

SEQ ID NO: 63787 - RNA, 22 nt, Artificial Sequence
  Synthetic
gccccguaaaauuucccaccuu

SEQ ID NO: 63788 - RNA, 21 nt, Artificial Sequence
  Synthetic
gcugcuaggcugugcugccaa

SEQ ID NO: 63789 - RNA, 22 nt, Artificial Sequence
  Synthetic
ggcugcuaggcugugcugccaa

SEQ ID NO: 63790 - RNA, 24 nt, Artificial Sequence
  Synthetic
gccuauugauuggaaaguauguca

SEQ ID NO: 63791 - RNA, 22 nt, Artificial Sequence
  Synthetic
  misc_feature (2)..(2): n is a, c, g, or u
gncauggacauugacccuuaua

SEQ ID NO: 63792 - RNA, 23 nt, Artificial Sequence
  Synthetic
  misc_feature (3)..(3): n is a, c, g, or u
ggncauggacauugacccuuaua

SEQ ID NO: 63793 - RNA, 21 nt, Artificial Sequence
  Synthetic
  misc_feature (4)..(5): n is a, c, g, or u
ggannuaaugacucuagcuac

SEQ ID NO: 63794 - RNA, 22 nt, Artificial Sequence
  Synthetic
  misc_feature (5)..(6): n is a, c, g, or u
gggannuaaugacucuagcuac

SEQ ID NO: 63795 - RNA, 23 nt, Artificial Sequence
  Synthetic
  misc_feature (6)..(7): n is a, c, g, or u
ggggannuaaugacucuagcuac

SEQ ID NO: 63796 - RNA, 24 nt, Artificial Sequence
  Synthetic
  misc_feature (7)..(8): n is a, c, g, or u
gggggannuaaugacucuagcuac

SEQ ID NO: 63797 - RNA, 22 nt, Artificial Sequence
  Synthetic
guucaagccuccaagcugugcc

SEQ ID NO: 63798 - RNA, 22 nt, Artificial Sequence
  Synthetic
guaggagugggagcauucgggc

SEQ ID NO: 63799 - RNA, 23 nt, Artificial Sequence
  Synthetic
gguaggagugggagcauucgggc

SEQ ID NO: 63800 - RNA, 21 nt, Artificial Sequence
  Synthetic
gggccaagucuguacaacauc

SEQ ID NO: 63801 - RNA, 22 nt, Artificial Sequence
  Synthetic
ggggccaagucuguacaacauc

SEQ ID NO: 63802 - RNA, 23 nt, Artificial Sequence
  Synthetic
gggggccaagucuguacaacauc

SEQ ID NO: 63803 - RNA, 20 nt, Artificial Sequence
  Synthetic
gcuuucuuggacggucccuc

SEQ ID NO: 63804 - RNA, 21 nt, Artificial Sequence
  Synthetic
ggcuuucuuggacggucccuc

SEQ ID NO: 63805 - RNA, 22 nt, Artificial Sequence
  Synthetic
gggcuuucuuggacggucccuc

SEQ ID NO: 63806 - RNA, 23 nt, Artificial Sequence
  Synthetic
ggggcuuucuuggacggucccuc

SEQ ID NO: 63807 - RNA, 23 nt, Artificial Sequence
  Synthetic
gaaucauuccaccaccaauccuc

SEQ ID NO: 63808 - RNA, 20 nt, Artificial Sequence
  Synthetic
gcccguuuguccucuaauuc

SEQ ID NO: 63809 - RNA, 23 nt, Artificial Sequence
  Synthetic
guugcccguuuguccucuaauuc

SEQ ID NO: 63810 - RNA, 18 nt, Artificial Sequence
  Synthetic
  misc_feature (13)..(13): n is a, c, g, or u
ggauauucccuanauuuc

SEQ ID NO: 63811 - RNA, 19 nt, Artificial Sequence
  Synthetic
  misc_feature (14)..(14): n is a, c, g, or u
gggauauucccuanauuuc

SEQ ID NO: 63812 - RNA, 20 nt, Artificial Sequence
  Synthetic
  misc_feature (15)..(15): n is a, c, g, or u
ggggauauucccuanauuuc

SEQ ID NO: 63813 - RNA, 23 nt, Artificial Sequence
  Synthetic
  misc_feature (18)..(18): n is a, c, g, or u
gauggggauauucccuanauuuc

SEQ ID NO: 63814 - RNA, 20 nt, Artificial Sequence
  Synthetic
gauuuuuucccgaccaccag

SEQ ID NO: 63815 - RNA, 21 nt, Artificial Sequence
  Synthetic
ggauuuuuucccgaccaccag

SEQ ID NO: 63816 - RNA, 22 nt, Artificial Sequence
  Synthetic
gggauuuuuucccgaccaccag

SEQ ID NO: 63817 - RNA, 22 nt, Artificial Sequence
  Synthetic
gacaaaaauccucacaauaccg

SEQ ID NO: 63818 - RNA, 18 nt, Artificial Sequence
  Synthetic
gucuacgucccgucagcg

SEQ ID NO: 63819 - RNA, 21 nt, Artificial Sequence
  Synthetic
gaccccugcucguguuacagg

SEQ ID NO: 63820 - RNA, 22 nt, Artificial Sequence
  Synthetic
ggaccccugcucguguuacagg

SEQ ID NO: 63821 - RNA, 18 nt, Artificial Sequence
  Synthetic
gucccucucgaauggggg

SEQ ID NO: 63822 - RNA, 19 nt, Artificial Sequence
  Synthetic
ggucccucucgaauggggg

SEQ ID NO: 63823 - RNA, 22 nt, Artificial Sequence
  Synthetic
gacggucccucucgaauggggg

SEQ ID NO: 63824 - RNA, 23 nt, Artificial Sequence
  Synthetic
ggacggucccucucgaauggggg

SEQ ID NO: 63825 - RNA, 18 nt, Artificial Sequence
  Synthetic
guuuguuuaaagacuggg

SEQ ID NO: 63826 - RNA, 22 nt, Artificial Sequence
  Synthetic
gacuguuuguuuaaagacuggg

SEQ ID NO: 63827 - RNA, 19 nt, Artificial Sequence
  Synthetic
gcuuucggaaaauuccuau

SEQ ID NO: 63828 - RNA, 20 nt, Artificial Sequence
  Synthetic
ggcuuucggaaaauuccuau

SEQ ID NO: 63829 - RNA, 21 nt, Artificial Sequence
  Synthetic
gggcuuucggaaaauuccuau

SEQ ID NO: 63830 - RNA, 21 nt, Artificial Sequence
  Synthetic
gauaccgccucagcucuguau

SEQ ID NO: 63831 - RNA, 19 nt, Artificial Sequence
  Synthetic
gcucuguaucgggaugccu

SEQ ID NO: 63832 - RNA, 21 nt, Artificial Sequence
  Synthetic
guuaccaauuuucuuuugucu

SEQ ID NO: 63833 - RNA, 22 nt, Artificial Sequence
  Synthetic
  misc_feature (19)..(19): n is a, c, g, or u
gaauccugcggacgacccnucu

SEQ ID NO: 63834 - RNA, 21 nt, Artificial Sequence
  Synthetic
guauuuggugucuuuuggagu

SEQ ID NO: 63835 - RNA, 23 nt, Artificial Sequence
  Synthetic
gaguauuuggugucuuuuggagu

SEQ ID NO: 63836 - RNA, 24 nt, Artificial Sequence
  Synthetic
  misc_feature (19)..(19): n is a, c, g, or u
gauuggaaaguaugucaangaauu

SEQ ID NO: 63837 - RNA, 23 nt, Artificial Sequence
  Synthetic
  misc_feature (4)..(4): n is a, c, g, or u
gucnuagaguauuuggugucuuu

SEQ ID NO: 63838 - RNA, 22 nt, Artificial Sequence
  Synthetic
  misc_feature (6)..(6): n is a, c, g, or u
agaccnggccguugccgggcaa

SEQ ID NO: 63839 - RNA, 23 nt, Artificial Sequence
  Synthetic
  misc_feature (7)..(7): n is a, c, g, or u
cagaccnggccguugccgggcaa

SEQ ID NO: 63840 - RNA, 24 nt, Artificial Sequence
  Synthetic
  misc_feature (8)..(8): n is a, c, g, or u
acagaccnggccguugccgggcaa

SEQ ID NO: 63841 - RNA, 22 nt, Artificial Sequence
  Synthetic
uguuaauaauguccuggugcaa

SEQ ID NO: 63842 - RNA, 23 nt, Artificial Sequence
  Synthetic
uuguuaauaauguccuggugcaa

SEQ ID NO: 63843 - RNA, 24 nt, Artificial Sequence
  Synthetic
uuuguuaauaauguccuggugcaa

SEQ ID NO: 63844 - RNA, 21 nt, Artificial Sequence
  Synthetic
ugagugaggcaguagucggaa

SEQ ID NO: 63845 - RNA, 22 nt, Artificial Sequence
  Synthetic
augagugaggcaguagucggaa

SEQ ID NO: 63846 - RNA, 24 nt, Artificial Sequence
  Synthetic
agaugagugaggcaguagucggaa

SEQ ID NO: 63847 - RNA, 21 nt, Artificial Sequence
  Synthetic
  misc_feature (15)..(15): n is a, c, g, or u
caaucaauaggccgnuuaaca

SEQ ID NO: 63848 - RNA, 22 nt, Artificial Sequence
  Synthetic
  misc_feature (16)..(16): n is a, c, g, or u
ccaaucaauaggccgnuuaaca

SEQ ID NO: 63849 - RNA, 23 nt, Artificial Sequence
  Synthetic
  misc_feature (17)..(17): n is a, c, g, or u
uccaaucaauaggccgnuuaaca

SEQ ID NO: 63850 - RNA, 24 nt, Artificial Sequence
  Synthetic
  misc_feature (18)..(18): n is a, c, g, or u
uuccaaucaauaggccgnuuaaca

SEQ ID NO: 63851 - RNA, 19 nt, Artificial Sequence
  Synthetic
uggucgggaaaaaauccca

SEQ ID NO: 63852 - RNA, 22 nt, Artificial Sequence
  Synthetic
ugguggucgggaaaaaauccca

SEQ ID NO: 63853 - RNA, 23 nt, Artificial Sequence
  Synthetic
cugguggucgggaaaaaauccca

SEQ ID NO: 63854 - RNA, 24 nt, Artificial Sequence
  Synthetic
acugguggucgggaaaaaauccca

SEQ ID NO: 63855 - RNA, 21 nt, Artificial Sequence
  Synthetic
auuucccaccuugugagucca

SEQ ID NO: 63856 - RNA, 22 nt, Artificial Sequence
  Synthetic
aauuucccaccuugugagucca

SEQ ID NO: 63857 - RNA, 23 nt, Artificial Sequence
  Synthetic
aaauuucccaccuugugagucca

SEQ ID NO: 63858 - RNA, 24 nt, Artificial Sequence
  Synthetic
aaaauuucccaccuugugagucca

SEQ ID NO: 63859 - RNA, 18 nt, Artificial Sequence
  Synthetic
uaagaugcccgccuucca

SEQ ID NO: 63860 - RNA, 19 nt, Artificial Sequence
  Synthetic
auaagaugcccgccuucca

SEQ ID NO: 63861 - RNA, 20 nt, Artificial Sequence
  Synthetic
uauaagaugcccgccuucca

SEQ ID NO: 63862 - RNA, 21 nt, Artificial Sequence
  Synthetic
auauaagaugcccgccuucca

SEQ ID NO: 63863 - RNA, 22 nt, Artificial Sequence
  Synthetic
uauauaagaugcccgccuucca

SEQ ID NO: 63864 - RNA, 23 nt, Artificial Sequence
  Synthetic
uuauauaagaugcccgccuucca

SEQ ID NO: 63865 - RNA, 24 nt, Artificial Sequence
  Synthetic
uuuauauaagaugcccgccuucca

SEQ ID NO: 63866 - RNA, 21 nt, Artificial Sequence
  Synthetic
  misc_feature (9)..(10): n is a, c, g, or u
agucauuannuccccccagca

SEQ ID NO: 63867 - RNA, 23 nt, Artificial Sequence
  Synthetic
  misc_feature (11)..(12): n is a, c, g, or u
agagucauuannuccccccagca

SEQ ID NO: 63868 - RNA, 24 nt, Artificial Sequence
  Synthetic
  misc_feature (12)..(13): n is a, c, g, or u
uagagucauuannuccccccagca

SEQ ID NO: 63869 - RNA, 21 nt, Artificial Sequence
  Synthetic
caaaugaauaucaggaaaaga

SEQ ID NO: 63870 - RNA, 23 nt, Artificial Sequence
  Synthetic
ugcaaaugaauaucaggaaaaga

SEQ ID NO: 63871 - RNA, 22 nt, Artificial Sequence
  Synthetic
agaaagugaaagccugcuuaga

SEQ ID NO: 63872 - RNA, 24 nt, Artificial Sequence
  Synthetic
cgagaaagugaaagccugcuuaga

SEQ ID NO: 63873 - RNA, 18 nt, Artificial Sequence
  Synthetic
auuuccgggagagaacga

SEQ ID NO: 63874 - RNA, 19 nt, Artificial Sequence
  Synthetic
uauuuccgggagagaacga

SEQ ID NO: 63875 - RNA, 20 nt, Artificial Sequence
  Synthetic
auauuuccgggagagaacga

SEQ ID NO: 63876 - RNA, 21 nt, Artificial Sequence
  Synthetic
uauauuuccgggagagaacga

SEQ ID NO: 63877 - RNA, 23 nt, Artificial Sequence
  Synthetic
uguauauuuccgggagagaacga

SEQ ID NO: 63878 - RNA, 24 nt, Artificial Sequence
  Synthetic
auguauauuuccgggagagaacga

SEQ ID NO: 63879 - RNA, 18 nt, Artificial Sequence
  Synthetic
ucuucgucugcgaggcga

SEQ ID NO: 63880 - RNA, 19 nt, Artificial Sequence
  Synthetic
aucuucgucugcgaggcga

SEQ ID NO: 63881 - RNA, 21 nt, Artificial Sequence
  Synthetic
agaucuucgucugcgaggcga

SEQ ID NO: 63882 - RNA, 23 nt, Artificial Sequence
  Synthetic
ugagaucuucgucugcgaggcga

SEQ ID NO: 63883 - RNA, 24 nt, Artificial Sequence
  Synthetic
uugagaucuucgucugcgaggcga

SEQ ID NO: 63884 - RNA, 21 nt, Artificial Sequence
  Synthetic
uuuuccgaaagcccaugauga

SEQ ID NO: 63885 - RNA, 22 nt, Artificial Sequence
  Synthetic
auuuuccgaaagcccaugauga

SEQ ID NO: 63886 - RNA, 23 nt, Artificial Sequence
  Synthetic
aauuuuccgaaagcccaugauga

SEQ ID NO: 63887 - RNA, 21 nt, Artificial Sequence
  Synthetic
  misc_feature (19)..(19): n is a, c, g, or u
uuacauaacccaugaaaunua

SEQ ID NO: 63888 - RNA, 22 nt, Artificial Sequence
  Synthetic
  misc_feature (20)..(20): n is a, c, g, or u
auuacauaacccaugaaaunua

SEQ ID NO: 63889 - RNA, 23 nt, Artificial Sequence
  Synthetic
  misc_feature (21)..(21): n is a, c, g, or u
aauuacauaacccaugaaaunua

SEQ ID NO: 63890 - RNA, 24 nt, Artificial Sequence
  Synthetic
  misc_feature (22)..(22): n is a, c, g, or u
caauuacauaacccaugaaaunua

SEQ ID NO: 63891 - RNA, 21 nt, Artificial Sequence
  Synthetic
aagaagucagaaggcaaaaac

SEQ ID NO: 63892 - RNA, 22 nt, Artificial Sequence
  Synthetic
aaagaagucagaaggcaaaaac

SEQ ID NO: 63893 - RNA, 22 nt, Artificial Sequence
  Synthetic
agaaaauugagagaaguccacc

SEQ ID NO: 63894 - RNA, 23 nt, Artificial Sequence
  Synthetic
uagaaaauugagagaaguccacc

SEQ ID NO: 63895 - RNA, 24 nt, Artificial Sequence
  Synthetic
cuagaaaauugagagaaguccacc

SEQ ID NO: 63896 - RNA, 21 nt, Artificial Sequence
  Synthetic
caugauguagcucuuguuccc

SEQ ID NO: 63897 - RNA, 22 nt, Artificial Sequence
  Synthetic
ccaugauguagcucuuguuccc

SEQ ID NO: 63898 - RNA, 23 nt, Artificial Sequence
  Synthetic
cccaugauguagcucuuguuccc

SEQ ID NO: 63899 - RNA, 24 nt, Artificial Sequence
  Synthetic
ccccaugauguagcucuuguuccc

SEQ ID NO: 63900 - RNA, 18 nt, Artificial Sequence
  Synthetic
acuggugguugaugaucc

SEQ ID NO: 63901 - RNA, 19 nt, Artificial Sequence
  Synthetic
uacuggugguugaugaucc

SEQ ID NO: 63902 - RNA, 21 nt, Artificial Sequence
  Synthetic
cguacuggugguugaugaucc

SEQ ID NO: 63903 - RNA, 22 nt, Artificial Sequence
  Synthetic
ccguacuggugguugaugaucc

SEQ ID NO: 63904 - RNA, 23 nt, Artificial Sequence
  Synthetic
cccguacuggugguugaugaucc

SEQ ID NO: 63905 - RNA, 24 nt, Artificial Sequence
  Synthetic
ucccguacuggugguugaugaucc

SEQ ID NO: 63906 - RNA, 21 nt, Artificial Sequence
  Synthetic
  misc_feature (13)..(13): n is a, c, g, or u
cguugacauugcngagagucc

SEQ ID NO: 63907 - RNA, 22 nt, Artificial Sequence
  Synthetic
  misc_feature (14)..(14): n is a, c, g, or u
ucguugacauugcngagagucc

SEQ ID NO: 63908 - RNA, 18 nt, Artificial Sequence
  Synthetic
uaacugacuacuaggucc

SEQ ID NO: 63909 - RNA, 19 nt, Artificial Sequence
  Synthetic
auaacugacuacuaggucc

SEQ ID NO: 63910 - RNA, 20 nt, Artificial Sequence
  Synthetic
cauaacugacuacuaggucc

SEQ ID NO: 63911 - RNA, 21 nt, Artificial Sequence
  Synthetic
acauaacugacuacuaggucc

SEQ ID NO: 63912 - RNA, 23 nt, Artificial Sequence
  Synthetic
ugacauaacugacuacuaggucc

SEQ ID NO: 63913 - RNA, 24 nt, Artificial Sequence
  Synthetic
uugacauaacugacuacuaggucc

SEQ ID NO: 63914 - RNA, 18 nt, Artificial Sequence
  Synthetic
cccgccuguaacacgagc

SEQ ID NO: 63915 - RNA, 19 nt, Artificial Sequence
  Synthetic
ccccgccuguaacacgagc

SEQ ID NO: 63916 - RNA, 20 nt, Artificial Sequence
  Synthetic
accccgccuguaacacgagc

SEQ ID NO: 63917 - RNA, 21 nt, Artificial Sequence
  Synthetic
aaccccgccuguaacacgagc

SEQ ID NO: 63918 - RNA, 22 nt, Artificial Sequence
  Synthetic
aaaccccgccuguaacacgagc

SEQ ID NO: 63919 - RNA, 23 nt, Artificial Sequence
  Synthetic
aaaaccccgccuguaacacgagc

SEQ ID NO: 63920 - RNA, 24 nt, Artificial Sequence
  Synthetic
aaaaaccccgccuguaacacgagc

SEQ ID NO: 63921 - RNA, 18 nt, Artificial Sequence
  Synthetic
cauagagguuccuugagc

SEQ ID NO: 63922 - RNA, 19 nt, Artificial Sequence
  Synthetic
acauagagguuccuugagc

SEQ ID NO: 63923 - RNA, 20 nt, Artificial Sequence
  Synthetic
aacauagagguuccuugagc

SEQ ID NO: 63924 - RNA, 21 nt, Artificial Sequence
  Synthetic
aaacauagagguuccuugagc

SEQ ID NO: 63925 - RNA, 21 nt, Artificial Sequence
  Synthetic
  misc_feature (5)..(5): n is a, c, g, or u
auuuncacccacccagguagc

SEQ ID NO: 63926 - RNA, 22 nt, Artificial Sequence
  Synthetic
  misc_feature (6)..(6): n is a, c, g, or u
aauuuncacccacccagguagc

SEQ ID NO: 63927 - RNA, 23 nt, Artificial Sequence
  Synthetic
  misc_feature (7)..(7): n is a, c, g, or u
aaauuuncacccacccagguagc

SEQ ID NO: 63928 - RNA, 24 nt, Artificial Sequence
  Synthetic
  misc_feature (8)..(8): n is a, c, g, or u
caaauuuncacccacccagguagc

SEQ ID NO: 63929 - RNA, 21 nt, Artificial Sequence
  Synthetic
  misc_feature (18)..(18): n is a, c, g, or u
ugugggggagugaacccnggc

SEQ ID NO: 63930 - RNA, 23 nt, Artificial Sequence
  Synthetic
  misc_feature (20)..(20): n is a, c, g, or u
cgugugggggagugaacccnggc

SEQ ID NO: 63931 - RNA, 24 nt, Artificial Sequence
  Synthetic
  misc_feature (21)..(21): n is a, c, g, or u
ccgugugggggagugaacccnggc

SEQ ID NO: 63932 - RNA, 21 nt, Artificial Sequence
  Synthetic
ccccagcaaagaauggcuugc

SEQ ID NO: 63933 - RNA, 22 nt, Artificial Sequence
  Synthetic
cccccagcaaagaauggcuugc

SEQ ID NO: 63934 - RNA, 23 nt, Artificial Sequence
  Synthetic
ccccccagcaaagaauggcuugc

SEQ ID NO: 63935 - RNA, 24 nt, Artificial Sequence
  Synthetic
uccccccagcaaagaauggcuugc

SEQ ID NO: 63936 - RNA, 18 nt, Artificial Sequence
  Synthetic
aauacaggccucuuacuc

SEQ ID NO: 63937 - RNA, 19 nt, Artificial Sequence
  Synthetic
aaauacaggccucuuacuc

SEQ ID NO: 63938 - RNA, 20 nt, Artificial Sequence
  Synthetic
aaaauacaggccucuuacuc

SEQ ID NO: 63939 - RNA, 23 nt, Artificial Sequence
  Synthetic
aggaaaauacaggccucuuacuc

SEQ ID NO: 63940 - RNA, 24 nt, Artificial Sequence
  Synthetic
caggaaaauacaggccucuuacuc

SEQ ID NO: 63941 - RNA, 18 nt, Artificial Sequence
  Synthetic
cauacagaggcauuaaag

SEQ ID NO: 63942 - RNA, 20 nt, Artificial Sequence
  Synthetic
cgcauacagaggcauuaaag

SEQ ID NO: 63943 - RNA, 21 nt, Artificial Sequence
  Synthetic
acgcauacagaggcauuaaag

SEQ ID NO: 63944 - RNA, 22 nt, Artificial Sequence
  Synthetic
cacgcauacagaggcauuaaag

SEQ ID NO: 63945 - RNA, 23 nt, Artificial Sequence
  Synthetic
acacgcauacagaggcauuaaag

SEQ ID NO: 63946 - RNA, 24 nt, Artificial Sequence
  Synthetic
uacacgcauacagaggcauuaaag

SEQ ID NO: 63947 - RNA, 21 nt, Artificial Sequence
  Synthetic
caagaagaugaggcauagcag

SEQ ID NO: 63948 - RNA, 22 nt, Artificial Sequence
  Synthetic
acaagaagaugaggcauagcag

SEQ ID NO: 63949 - RNA, 23 nt, Artificial Sequence
  Synthetic
aacaagaagaugaggcauagcag

SEQ ID NO: 63950 - RNA, 24 nt, Artificial Sequence
  Synthetic
caacaagaagaugaggcauagcag

SEQ ID NO: 63951 - RNA, 18 nt, Artificial Sequence
  Synthetic
cucgagaagauugacgag

SEQ ID NO: 63952 - RNA, 19 nt, Artificial Sequence
  Synthetic
ccucgagaagauugacgag

SEQ ID NO: 63953 - RNA, 20 nt, Artificial Sequence
  Synthetic
uccucgagaagauugacgag

SEQ ID NO: 63954 - RNA, 21 nt, Artificial Sequence
  Synthetic
auccucgagaagauugacgag

SEQ ID NO: 63955 - RNA, 22 nt, Artificial Sequence
  Synthetic
aauccucgagaagauugacgag

SEQ ID NO: 63956 - RNA, 23 nt, Artificial Sequence
  Synthetic
caauccucgagaagauugacgag

SEQ ID NO: 63957 - RNA, 24 nt, Artificial Sequence
  Synthetic
ccaauccucgagaagauugacgag

SEQ ID NO: 63958 - RNA, 21 nt, Artificial Sequence
  Synthetic
  misc_feature (4)..(4): n is a, c, g, or u
aganccccaagcgaccccgag

SEQ ID NO: 63959 - RNA, 22 nt, Artificial Sequence
  Synthetic
  misc_feature (1)..(1): n is a, c, g, or u
  misc_feature (5)..(5): n is a, c, g, or u
naganccccaagcgaccccgag

SEQ ID NO: 63960 - RNA, 23 nt, Artificial Sequence
  Synthetic
  misc_feature (2)..(2): n is a, c, g, or u
  misc_feature (6)..(6): n is a, c, g, or u
anaganccccaagcgaccccgag

SEQ ID NO: 63961 - RNA, 22 nt, Artificial Sequence
  Synthetic
ugccgauugguggaggcaggag

SEQ ID NO: 63962 - RNA, 23 nt, Artificial Sequence
  Synthetic
cugccgauugguggaggcaggag

SEQ ID NO: 63963 - RNA, 24 nt, Artificial Sequence
  Synthetic
acugccgauugguggaggcaggag

SEQ ID NO: 63964 - RNA, 18 nt, Artificial Sequence
  Synthetic
  misc_feature (8)..(8): n is a, c, g, or u
cccgagangggucguccg

SEQ ID NO: 63965 - RNA, 19 nt, Artificial Sequence
  Synthetic
  misc_feature (9)..(9): n is a, c, g, or u
ccccgagangggucguccg

SEQ ID NO: 63966 - RNA, 20 nt, Artificial Sequence
  Synthetic
  misc_feature (10)..(10): n is a, c, g, or u
accccgagangggucguccg

SEQ ID NO: 63967 - RNA, 22 nt, Artificial Sequence
  Synthetic
  misc_feature (12)..(12): n is a, c, g, or u
cgaccccgagangggucguccg

SEQ ID NO: 63968 - RNA, 24 nt, Artificial Sequence
  Synthetic
  misc_feature (14)..(14): n is a, c, g, or u
agcgaccccgagangggucguccg

SEQ ID NO: 63969 - RNA, 19 nt, Artificial Sequence
  Synthetic
agacaaaggacgucccucg

SEQ ID NO: 63970 - RNA, 20 nt, Artificial Sequence
  Synthetic
uagacaaaggacgucccucg

SEQ ID NO: 63971 - RNA, 22 nt, Artificial Sequence
  Synthetic
cguagacaaaggacgucccucg

SEQ ID NO: 63972 - RNA, 23 nt, Artificial Sequence
  Synthetic
acguagacaaaggacgucccucg

SEQ ID NO: 63973 - RNA, 21 nt, Artificial Sequence
  Synthetic
aggaugagugucucucaaagg

SEQ ID NO: 63974 - RNA, 23 nt, Artificial Sequence
  Synthetic
ugaggaugagugucucucaaagg

SEQ ID NO: 63975 - RNA, 24 nt, Artificial Sequence
  Synthetic
cugaggaugagugucucucaaagg

SEQ ID NO: 63976 - RNA, 18 nt, Artificial Sequence
  Synthetic
agagucgugcagguucgg

SEQ ID NO: 63977 - RNA, 19 nt, Artificial Sequence
  Synthetic
aagagucgugcagguucgg

SEQ ID NO: 63978 - RNA, 20 nt, Artificial Sequence
  Synthetic
caagagucgugcagguucgg

SEQ ID NO: 63979 - RNA, 22 nt, Artificial Sequence
  Synthetic
agcaagagucgugcagguucgg

SEQ ID NO: 63980 - RNA, 24 nt, Artificial Sequence
  Synthetic
ugagcaagagucgugcagguucgg

SEQ ID NO: 63981 - RNA, 21 nt, Artificial Sequence
  Synthetic
auuugguggucuauaagcugg

SEQ ID NO: 63982 - RNA, 22 nt, Artificial Sequence
  Synthetic
cauuugguggucuauaagcugg

SEQ ID NO: 63983 - RNA, 21 nt, Artificial Sequence
  Synthetic
aaaaucccagaggauuggugg

SEQ ID NO: 63984 - RNA, 22 nt, Artificial Sequence
  Synthetic
aaaaaucccagaggauuggugg

SEQ ID NO: 63985 - RNA, 23 nt, Artificial Sequence
  Synthetic
aaaaaaucccagaggauuggugg

SEQ ID NO: 63986 - RNA, 21 nt, Artificial Sequence
  Synthetic
ccccaaaaggccuccgugugg

SEQ ID NO: 63987 - RNA, 22 nt, Artificial Sequence
  Synthetic
accccaaaaggccuccgugugg

SEQ ID NO: 63988 - RNA, 23 nt, Artificial Sequence
  Synthetic
caccccaaaaggccuccgugugg

SEQ ID NO: 63989 - RNA, 24 nt, Artificial Sequence
  Synthetic
ccaccccaaaaggccuccgugugg

SEQ ID NO: 63990 - RNA, 21 nt, Artificial Sequence
  Synthetic
cugggauccugcagagcuugg

SEQ ID NO: 63991 - RNA, 22 nt, Artificial Sequence
  Synthetic
ucugggauccugcagagcuugg

SEQ ID NO: 63992 - RNA, 23 nt, Artificial Sequence
  Synthetic
cucugggauccugcagagcuugg

SEQ ID NO: 63993 - RNA, 24 nt, Artificial Sequence
  Synthetic
acucugggauccugcagagcuugg

SEQ ID NO: 63994 - RNA, 21 nt, Artificial Sequence
  Synthetic
uucugguguuugcucugaaug

SEQ ID NO: 63995 - RNA, 22 nt, Artificial Sequence
  Synthetic
uuucugguguuugcucugaaug

SEQ ID NO: 63996 - RNA, 23 nt, Artificial Sequence
  Synthetic
auuucugguguuugcucugaaug

SEQ ID NO: 63997 - RNA, 21 nt, Artificial Sequence
  Synthetic
ugacuacuaggucccuggaug

SEQ ID NO: 63998 - RNA, 22 nt, Artificial Sequence
  Synthetic
cugacuacuaggucccuggaug

SEQ ID NO: 63999 - RNA, 23 nt, Artificial Sequence
  Synthetic
acugacuacuaggucccuggaug

SEQ ID NO: 64000 - RNA, 24 nt, Artificial Sequence
  Synthetic
aacugacuacuaggucccuggaug

SEQ ID NO: 64001 - RNA, 18 nt, Artificial Sequence
  Synthetic
ugcuuuccauguucggug

SEQ ID NO: 64002 - RNA, 19 nt, Artificial Sequence
  Synthetic
augcuuuccauguucggug

SEQ ID NO: 64003 - RNA, 21 nt, Artificial Sequence
  Synthetic
ugaugcuuuccauguucggug

SEQ ID NO: 64004 - RNA, 23 nt, Artificial Sequence
  Synthetic
ugugaugcuuuccauguucggug

SEQ ID NO: 64005 - RNA, 24 nt, Artificial Sequence
  Synthetic
augugaugcuuuccauguucggug

SEQ ID NO: 64006 - RNA, 21 nt, Artificial Sequence
  Synthetic
aaauuggaggacaagagguug

SEQ ID NO: 64007 - RNA, 22 nt, Artificial Sequence
  Synthetic
caaauuggaggacaagagguug

SEQ ID NO: 64008 - RNA, 23 nt, Artificial Sequence
  Synthetic
acaaauuggaggacaagagguug

SEQ ID NO: 64009 - RNA, 18 nt, Artificial Sequence
  Synthetic
  misc_feature (18)..(18): n is a, c, g, or u
ucggucguugacauugcn

SEQ ID NO: 64010 - RNA, 21 nt, Artificial Sequence
  Synthetic
  misc_feature (21)..(21): n is a, c, g, or u
aggucggucguugacauugcn

SEQ ID NO: 64011 - RNA, 22 nt, Artificial Sequence
  Synthetic
  misc_feature (22)..(22): n is a, c, g, or u
aaggucggucguugacauugcn

SEQ ID NO: 64012 - RNA, 23 nt, Artificial Sequence
  Synthetic
  misc_feature (23)..(23): n is a, c, g, or u
caaggucggucguugacauugcn

SEQ ID NO: 64013 - RNA, 24 nt, Artificial Sequence
  Synthetic
  misc_feature (24)..(24): n is a, c, g, or u
ucaaggucggucguugacauugcn

SEQ ID NO: 64014 - RNA, 18 nt, Artificial Sequence
  Synthetic
ugggauuguggucccaau

SEQ ID NO: 64015 - RNA, 19 nt, Artificial Sequence
  Synthetic
uugggauuguggucccaau

SEQ ID NO: 64016 - RNA, 21 nt, Artificial Sequence
  Synthetic
uguugggauuguggucccaau

SEQ ID NO: 64017 - RNA, 22 nt, Artificial Sequence
  Synthetic
uuguugggauuguggucccaau

SEQ ID NO: 64018 - RNA, 23 nt, Artificial Sequence
  Synthetic
uuuguugggauuguggucccaau

SEQ ID NO: 64019 - RNA, 24 nt, Artificial Sequence
  Synthetic
cuuuguugggauuguggucccaau

SEQ ID NO: 64020 - RNA, 21 nt, Artificial Sequence
  Synthetic
cgggcugaggcccacucccau

SEQ ID NO: 64021 - RNA, 22 nt, Artificial Sequence
  Synthetic
acgggcugaggcccacucccau

SEQ ID NO: 64022 - RNA, 23 nt, Artificial Sequence
  Synthetic
aacgggcugaggcccacucccau

SEQ ID NO: 64023 - RNA, 24 nt, Artificial Sequence
  Synthetic
aaacgggcugaggcccacucccau

SEQ ID NO: 64024 - RNA, 22 nt, Artificial Sequence
  Synthetic
cgaaagcccaugaugaugggau

SEQ ID NO: 64025 - RNA, 23 nt, Artificial Sequence
  Synthetic
ccgaaagcccaugaugaugggau

SEQ ID NO: 64026 - RNA, 24 nt, Artificial Sequence
  Synthetic
uccgaaagcccaugaugaugggau

SEQ ID NO: 64027 - RNA, 18 nt, Artificial Sequence
  Synthetic
ucucaaagguggagugau

SEQ ID NO: 64028 - RNA, 19 nt, Artificial Sequence
  Synthetic
cucucaaagguggagugau

SEQ ID NO: 64029 - RNA, 20 nt, Artificial Sequence
  Synthetic
ucucucaaagguggagugau

SEQ ID NO: 64030 - RNA, 22 nt, Artificial Sequence
  Synthetic
ugucucucaaagguggagugau

SEQ ID NO: 64031 - RNA, 24 nt, Artificial Sequence
  Synthetic
agugucucucaaagguggagugau

SEQ ID NO: 64032 - RNA, 18 nt, Artificial Sequence
  Synthetic
aaugauuaacuacauuau

SEQ ID NO: 64033 - RNA, 19 nt, Artificial Sequence
  Synthetic
uaaugauuaacuacauuau

SEQ ID NO: 64034 - RNA, 21 nt, Artificial Sequence
  Synthetic
aguaaugauuaacuacauuau

SEQ ID NO: 64035 - RNA, 22 nt, Artificial Sequence
  Synthetic
aaguaaugauuaacuacauuau

SEQ ID NO: 64036 - RNA, 21 nt, Artificial Sequence
  Synthetic
caguagcuccaaauucuuuau

SEQ ID NO: 64037 - RNA, 22 nt, Artificial Sequence
  Synthetic
acaguagcuccaaauucuuuau

SEQ ID NO: 64038 - RNA, 23 nt, Artificial Sequence
  Synthetic
cacaguagcuccaaauucuuuau

SEQ ID NO: 64039 - RNA, 24 nt, Artificial Sequence
  Synthetic
ccacaguagcuccaaauucuuuau

SEQ ID NO: 64040 - RNA, 21 nt, Artificial Sequence
  Synthetic
  misc_feature (6)..(6): n is a, c, g, or u
  misc_feature (12)..(12): n is a, c, g, or u
aguganuggagnuuggggacu

SEQ ID NO: 64041 - RNA, 23 nt, Artificial Sequence
  Synthetic
  misc_feature (8)..(8): n is a, c, g, or u
  misc_feature (14)..(14): n is a, c, g, or u
ugaguganuggagnuuggggacu

SEQ ID NO: 64042 - RNA, 18 nt, Artificial Sequence
  Synthetic
aacacgagcagggguccu

SEQ ID NO: 64043 - RNA, 19 nt, Artificial Sequence
  Synthetic
uaacacgagcagggguccu

SEQ ID NO: 64044 - RNA, 21 nt, Artificial Sequence
  Synthetic
uguaacacgagcagggguccu

SEQ ID NO: 64045 - RNA, 22 nt, Artificial Sequence
  Synthetic
cuguaacacgagcagggguccu

SEQ ID NO: 64046 - RNA, 23 nt, Artificial Sequence
  Synthetic
ccuguaacacgagcagggguccu

SEQ ID NO: 64047 - RNA, 18 nt, Artificial Sequence
  Synthetic
cgagcaaaacaagcggcu

SEQ ID NO: 64048 - RNA, 20 nt, Artificial Sequence
  Synthetic
ugcgagcaaaacaagcggcu

SEQ ID NO: 64049 - RNA, 21 nt, Artificial Sequence
  Synthetic
cugcgagcaaaacaagcggcu

SEQ ID NO: 64050 - RNA, 23 nt, Artificial Sequence
  Synthetic
ugcugcgagcaaaacaagcggcu

SEQ ID NO: 64051 - RNA, 24 nt, Artificial Sequence
  Synthetic
cugcugcgagcaaaacaagcggcu

SEQ ID NO: 64052 - RNA, 21 nt, Artificial Sequence
  Synthetic
ucuggauuucugguguuugcu

SEQ ID NO: 64053 - RNA, 22 nt, Artificial Sequence
  Synthetic
aucuggauuucugguguuugcu

SEQ ID NO: 64054 - RNA, 23 nt, Artificial Sequence
  Synthetic
aaucuggauuucugguguuugcu

SEQ ID NO: 64055 - RNA, 24 nt, Artificial Sequence
  Synthetic
caaucuggauuucugguguuugcu

SEQ ID NO: 64056 - RNA, 21 nt, Artificial Sequence
  Synthetic
uauggccaagccccagccagu

SEQ ID NO: 64057 - RNA, 22 nt, Artificial Sequence
  Synthetic
cuauggccaagccccagccagu

SEQ ID NO: 64058 - RNA, 23 nt, Artificial Sequence
  Synthetic
ccuauggccaagccccagccagu

SEQ ID NO: 64059 - RNA, 23 nt, Artificial Sequence
  Synthetic
aggaaaagauggaguuuuccagu

SEQ ID NO: 64060 - RNA, 24 nt, Artificial Sequence
  Synthetic
caggaaaagauggaguuuuccagu

SEQ ID NO: 64061 - RNA, 21 nt, Artificial Sequence
  Synthetic
agcggcuaggaguuccgcagu

SEQ ID NO: 64062 - RNA, 22 nt, Artificial Sequence
  Synthetic
aagcggcuaggaguuccgcagu

SEQ ID NO: 64063 - RNA, 23 nt, Artificial Sequence
  Synthetic
caagcggcuaggaguuccgcagu

SEQ ID NO: 64064 - RNA, 24 nt, Artificial Sequence
  Synthetic
acaagcggcuaggaguuccgcagu

SEQ ID NO: 64065 - RNA, 18 nt, Artificial Sequence
  Synthetic
ucuauaagcuggaggagu

SEQ ID NO: 64066 - RNA, 21 nt, Artificial Sequence
  Synthetic
uggucuauaagcuggaggagu

SEQ ID NO: 64067 - RNA, 24 nt, Artificial Sequence
  Synthetic
ugguggucuauaagcuggaggagu

SEQ ID NO: 64068 - RNA, 18 nt, Artificial Sequence
  Synthetic
uagacucugcgguauugu

SEQ ID NO: 64069 - RNA, 19 nt, Artificial Sequence
  Synthetic
cuagacucugcgguauugu

SEQ ID NO: 64070 - RNA, 20 nt, Artificial Sequence
  Synthetic
ucuagacucugcgguauugu

SEQ ID NO: 64071 - RNA, 22 nt, Artificial Sequence
  Synthetic
agucuagacucugcgguauugu

SEQ ID NO: 64072 - RNA, 24 nt, Artificial Sequence
  Synthetic
cgagucuagacucugcgguauugu

SEQ ID NO: 64073 - RNA, 21 nt, Artificial Sequence
  Synthetic
  misc_feature (5)..(5): n is a, c, g, or u
cuucnguccaguggucuuugu

SEQ ID NO: 64074 - RNA, 24 nt, Artificial Sequence
  Synthetic
  misc_feature (8)..(8): n is a, c, g, or u
uggcuucnguccaguggucuuugu

SEQ ID NO: 64075 - RNA, 21 nt, Artificial Sequence
  Synthetic
auccccaucuuuuuguuuugu

SEQ ID NO: 64076 - RNA, 22 nt, Artificial Sequence
  Synthetic
uauccccaucuuuuuguuuugu

SEQ ID NO: 64077 - RNA, 23 nt, Artificial Sequence
  Synthetic
auauccccaucuuuuuguuuugu

SEQ ID NO: 64078 - RNA, 24 nt, Artificial Sequence
  Synthetic
aauauccccaucuuuuuguuuugu

SEQ ID NO: 64079 - RNA, 21 nt, Artificial Sequence
  Synthetic
ccccguaaaauuucccaccuu

SEQ ID NO: 64080 - RNA, 23 nt, Artificial Sequence
  Synthetic
agccccguaaaauuucccaccuu

SEQ ID NO: 64081 - RNA, 24 nt, Artificial Sequence
  Synthetic
aagccccguaaaauuucccaccuu

SEQ ID NO: 64082 - RNA, 23 nt, Artificial Sequence
  Synthetic
uggcugcuaggcugugcugccaa

SEQ ID NO: 64083 - RNA, 24 nt, Artificial Sequence
  Synthetic
auggcugcuaggcugugcugccaa

SEQ ID NO: 64084 - RNA, 21 nt, Artificial Sequence
  Synthetic
uauugauuggaaaguauguca

SEQ ID NO: 64085 - RNA, 22 nt, Artificial Sequence
  Synthetic
cuauugauuggaaaguauguca

SEQ ID NO: 64086 - RNA, 23 nt, Artificial Sequence
  Synthetic
ccuauugauuggaaaguauguca

SEQ ID NO: 64087 - RNA, 18 nt, Artificial Sequence
  Synthetic
uggacauugacccuuaua

SEQ ID NO: 64088 - RNA, 19 nt, Artificial Sequence
  Synthetic
auggacauugacccuuaua

SEQ ID NO: 64089 - RNA, 20 nt, Artificial Sequence
  Synthetic
cauggacauugacccuuaua

SEQ ID NO: 64090 - RNA, 21 nt, Artificial Sequence
  Synthetic
  misc_feature (1)..(1): n is a, c, g, or u
ncauggacauugacccuuaua

SEQ ID NO: 64091 - RNA, 24 nt, Artificial Sequence
  Synthetic
  misc_feature (1)..(1): n is a, c, g, or u
  misc_feature (4)..(4): n is a, c, g, or u
nggncauggacauugacccuuaua

SEQ ID NO: 64092 - RNA, 18 nt, Artificial Sequence
  Synthetic
aagccuccaagcugugcc

SEQ ID NO: 64093 - RNA, 19 nt, Artificial Sequence
  Synthetic
caagccuccaagcugugcc

SEQ ID NO: 64094 - RNA, 20 nt, Artificial Sequence
  Synthetic
ucaagccuccaagcugugcc

SEQ ID NO: 64095 - RNA, 21 nt, Artificial Sequence
  Synthetic
uucaagccuccaagcugugcc

SEQ ID NO: 64096 - RNA, 23 nt, Artificial Sequence
  Synthetic
uguucaagccuccaagcugugcc

SEQ ID NO: 64097 - RNA, 24 nt, Artificial Sequence
  Synthetic
cuguucaagccuccaagcugugcc

SEQ ID NO: 64098 - RNA, 21 nt, Artificial Sequence
  Synthetic
ccaccaagcucugcaggaucc

SEQ ID NO: 64099 - RNA, 22 nt, Artificial Sequence
  Synthetic
uccaccaagcucugcaggaucc

SEQ ID NO: 64100 - RNA, 23 nt, Artificial Sequence
  Synthetic
uuccaccaagcucugcaggaucc

SEQ ID NO: 64101 - RNA, 24 nt, Artificial Sequence
  Synthetic
auuccaccaagcucugcaggaucc

SEQ ID NO: 64102 - RNA, 21 nt, Artificial Sequence
  Synthetic
uaggagugggagcauucgggc

SEQ ID NO: 64103 - RNA, 24 nt, Artificial Sequence
  Synthetic
agguaggagugggagcauucgggc

SEQ ID NO: 64104 - RNA, 24 nt, Artificial Sequence
  Synthetic
ugggggccaagucuguacaacauc

SEQ ID NO: 64105 - RNA, 18 nt, Artificial Sequence
  Synthetic
uuucuuggacggucccuc

SEQ ID NO: 64106 - RNA, 19 nt, Artificial Sequence
  Synthetic
cuuucuuggacggucccuc

SEQ ID NO: 64107 - RNA, 24 nt, Artificial Sequence
  Synthetic
uggggcuuucuuggacggucccuc

SEQ ID NO: 64108 - RNA, 18 nt, Artificial Sequence
  Synthetic
auuccaccaccaauccuc

SEQ ID NO: 64109 - RNA, 19 nt, Artificial Sequence
  Synthetic
cauuccaccaccaauccuc

SEQ ID NO: 64110 - RNA, 20 nt, Artificial Sequence
  Synthetic
ucauuccaccaccaauccuc

SEQ ID NO: 64111 - RNA, 21 nt, Artificial Sequence
  Synthetic
aucauuccaccaccaauccuc

SEQ ID NO: 64112 - RNA, 22 nt, Artificial Sequence
  Synthetic
aaucauuccaccaccaauccuc

SEQ ID NO: 64113 - RNA, 24 nt, Artificial Sequence
  Synthetic
agaaucauuccaccaccaauccuc

SEQ ID NO: 64114 - RNA, 18 nt, Artificial Sequence
  Synthetic
caucucgucaaucuucuc

SEQ ID NO: 64115 - RNA, 19 nt, Artificial Sequence
  Synthetic
ucaucucgucaaucuucuc

SEQ ID NO: 64116 - RNA, 20 nt, Artificial Sequence
  Synthetic
cucaucucgucaaucuucuc

SEQ ID NO: 64117 - RNA, 21 nt, Artificial Sequence
  Synthetic
acucaucucgucaaucuucuc

SEQ ID NO: 64118 - RNA, 22 nt, Artificial Sequence
  Synthetic
cacucaucucgucaaucuucuc

SEQ ID NO: 64119 - RNA, 23 nt, Artificial Sequence
  Synthetic
ucacucaucucgucaaucuucuc

SEQ ID NO: 64120 - RNA, 24 nt, Artificial Sequence
  Synthetic
cucacucaucucgucaaucuucuc

SEQ ID NO: 64121 - RNA, 18 nt, Artificial Sequence
  Synthetic
ccguuuguccucuaauuc

SEQ ID NO: 64122 - RNA, 19 nt, Artificial Sequence
  Synthetic
cccguuuguccucuaauuc

SEQ ID NO: 64123 - RNA, 21 nt, Artificial Sequence
  Synthetic
ugcccguuuguccucuaauuc

SEQ ID NO: 64124 - RNA, 22 nt, Artificial Sequence
  Synthetic
uugcccguuuguccucuaauuc

SEQ ID NO: 64125 - RNA, 24 nt, Artificial Sequence
  Synthetic
uguugcccguuuguccucuaauuc

SEQ ID NO: 64126 - RNA, 21 nt, Artificial Sequence
  Synthetic
  misc_feature (16)..(16): n is a, c, g, or u
uggggauauucccuanauuuc

SEQ ID NO: 64127 - RNA, 22 nt, Artificial Sequence
  Synthetic
  misc_feature (17)..(17): n is a, c, g, or u
auggggauauucccuanauuuc

SEQ ID NO: 64128 - RNA, 24 nt, Artificial Sequence
  Synthetic
  misc_feature (19)..(19): n is a, c, g, or u
agauggggauauucccuanauuuc

SEQ ID NO: 64129 - RNA, 18 nt, Artificial Sequence
  Synthetic
uuuuuucccgaccaccag

SEQ ID NO: 64130 - RNA, 19 nt, Artificial Sequence
  Synthetic
auuuuuucccgaccaccag

SEQ ID NO: 64131 - RNA, 23 nt, Artificial Sequence
  Synthetic
ugggauuuuuucccgaccaccag

SEQ ID NO: 64132 - RNA, 24 nt, Artificial Sequence
  Synthetic
cugggauuuuuucccgaccaccag

SEQ ID NO: 64133 - RNA, 18 nt, Artificial Sequence
  Synthetic
aaaauccucacaauaccg

SEQ ID NO: 64134 - RNA, 19 nt, Artificial Sequence
  Synthetic
aaaaauccucacaauaccg

SEQ ID NO: 64135 - RNA, 20 nt, Artificial Sequence
  Synthetic
caaaaauccucacaauaccg

SEQ ID NO: 64136 - RNA, 21 nt, Artificial Sequence
  Synthetic
acaaaaauccucacaauaccg

SEQ ID NO: 64137 - RNA, 23 nt, Artificial Sequence
  Synthetic
ugacaaaaauccucacaauaccg

SEQ ID NO: 64138 - RNA, 24 nt, Artificial Sequence
  Synthetic
uugacaaaaauccucacaauaccg

SEQ ID NO: 64139 - RNA, 19 nt, Artificial Sequence
  Synthetic
ugucuacgucccgucagcg

SEQ ID NO: 64140 - RNA, 20 nt, Artificial Sequence
  Synthetic
uugucuacgucccgucagcg

SEQ ID NO: 64141 - RNA, 21 nt, Artificial Sequence
  Synthetic
uuugucuacgucccgucagcg

SEQ ID NO: 64142 - RNA, 22 nt, Artificial Sequence
  Synthetic
cuuugucuacgucccgucagcg

SEQ ID NO: 64143 - RNA, 23 nt, Artificial Sequence
  Synthetic
ccuuugucuacgucccgucagcg

SEQ ID NO: 64144 - RNA, 24 nt, Artificial Sequence
  Synthetic
uccuuugucuacgucccgucagcg

SEQ ID NO: 64145 - RNA, 18 nt, Artificial Sequence
  Synthetic
aauuuguccuggcuaucg

SEQ ID NO: 64146 - RNA, 19 nt, Artificial Sequence
  Synthetic
caauuuguccuggcuaucg

SEQ ID NO: 64147 - RNA, 20 nt, Artificial Sequence
  Synthetic
ccaauuuguccuggcuaucg

SEQ ID NO: 64148 - RNA, 21 nt, Artificial Sequence
  Synthetic
uccaauuuguccuggcuaucg

SEQ ID NO: 64149 - RNA, 22 nt, Artificial Sequence
  Synthetic
cuccaauuuguccuggcuaucg

SEQ ID NO: 64150 - RNA, 23 nt, Artificial Sequence
  Synthetic
ccuccaauuuguccuggcuaucg

SEQ ID NO: 64151 - RNA, 24 nt, Artificial Sequence
  Synthetic
uccuccaauuuguccuggcuaucg

SEQ ID NO: 64152 - RNA, 18 nt, Artificial Sequence
  Synthetic
cccugcucguguuacagg

SEQ ID NO: 64153 - RNA, 19 nt, Artificial Sequence
  Synthetic
ccccugcucguguuacagg

SEQ ID NO: 64154 - RNA, 20 nt, Artificial Sequence
  Synthetic
accccugcucguguuacagg

SEQ ID NO: 64155 - RNA, 23 nt, Artificial Sequence
  Synthetic
aggaccccugcucguguuacagg

SEQ ID NO: 64156 - RNA, 24 nt, Artificial Sequence
  Synthetic
uaggaccccugcucguguuacagg

SEQ ID NO: 64157 - RNA, 20 nt, Artificial Sequence
  Synthetic
cggucccucucgaauggggg

SEQ ID NO: 64158 - RNA, 21 nt, Artificial Sequence
  Synthetic
acggucccucucgaauggggg

SEQ ID NO: 64159 - RNA, 24 nt, Artificial Sequence
  Synthetic
uggacggucccucucgaauggggg

SEQ ID NO: 64160 - RNA, 19 nt, Artificial Sequence
  Synthetic
uguuuguuuaaagacuggg

SEQ ID NO: 64161 - RNA, 20 nt, Artificial Sequence
  Synthetic
cuguuuguuuaaagacuggg

SEQ ID NO: 64162 - RNA, 21 nt, Artificial Sequence
  Synthetic
acuguuuguuuaaagacuggg

SEQ ID NO: 64163 - RNA, 23 nt, Artificial Sequence
  Synthetic
agacuguuuguuuaaagacuggg

SEQ ID NO: 64164 - RNA, 24 nt, Artificial Sequence
  Synthetic
aagacuguuuguuuaaagacuggg

SEQ ID NO: 64165 - RNA, 21 nt, Artificial Sequence
  Synthetic
auaaagaauuuggagcuacug

SEQ ID NO: 64166 - RNA, 22 nt, Artificial Sequence
  Synthetic
uauaaagaauuuggagcuacug

SEQ ID NO: 64167 - RNA, 23 nt, Artificial Sequence
  Synthetic
uuauaaagaauuuggagcuacug

SEQ ID NO: 64168 - RNA, 24 nt, Artificial Sequence
  Synthetic
cuuauaaagaauuuggagcuacug

SEQ ID NO: 64169 - RNA, 21 nt, Artificial Sequence
  Synthetic
acaacauuccaccaagcucug

SEQ ID NO: 64170 - RNA, 22 nt, Artificial Sequence
  Synthetic
cacaacauuccaccaagcucug

SEQ ID NO: 64171 - RNA, 23 nt, Artificial Sequence
  Synthetic
ccacaacauuccaccaagcucug

SEQ ID NO: 64172 - RNA, 24 nt, Artificial Sequence
  Synthetic
uccacaacauuccaccaagcucug

SEQ ID NO: 64173 - RNA, 18 nt, Artificial Sequence
  Synthetic
  misc_feature (18)..(18): n is a, c, g, or u
uuggaagagaaaccgucn

SEQ ID NO: 64174 - RNA, 19 nt, Artificial Sequence
  Synthetic
  misc_feature (19)..(19): n is a, c, g, or u
uuuggaagagaaaccgucn

SEQ ID NO: 64175 - RNA, 20 nt, Artificial Sequence
  Synthetic
  misc_feature (20)..(20): n is a, c, g, or u
uuuuggaagagaaaccgucn

SEQ ID NO: 64176 - RNA, 21 nt, Artificial Sequence
  Synthetic
  misc_feature (21)..(21): n is a, c, g, or u
cuuuuggaagagaaaccgucn

SEQ ID NO: 64177 - RNA, 22 nt, Artificial Sequence
  Synthetic
  misc_feature (22)..(22): n is a, c, g, or u
acuuuuggaagagaaaccgucn

SEQ ID NO: 64178 - RNA, 23 nt, Artificial Sequence
  Synthetic
  misc_feature (23)..(23): n is a, c, g, or u
cacuuuuggaagagaaaccgucn

SEQ ID NO: 64179 - RNA, 24 nt, Artificial Sequence
  Synthetic
  misc_feature (24)..(24): n is a, c, g, or u
ucacuuuuggaagagaaaccgucn

SEQ ID NO: 64180 - RNA, 21 nt, Artificial Sequence
  Synthetic
cgaacauggaaagcaucacau

SEQ ID NO: 64181 - RNA, 22 nt, Artificial Sequence
  Synthetic
ccgaacauggaaagcaucacau

SEQ ID NO: 64182 - RNA, 23 nt, Artificial Sequence
  Synthetic
accgaacauggaaagcaucacau

SEQ ID NO: 64183 - RNA, 24 nt, Artificial Sequence
  Synthetic
caccgaacauggaaagcaucacau

SEQ ID NO: 64184 - RNA, 21 nt, Artificial Sequence
  Synthetic
aucccaacaaaacaaaaagau

SEQ ID NO: 64185 - RNA, 22 nt, Artificial Sequence
  Synthetic
aaucccaacaaaacaaaaagau

SEQ ID NO: 64186 - RNA, 23 nt, Artificial Sequence
  Synthetic
aaaucccaacaaaacaaaaagau

SEQ ID NO: 64187 - RNA, 24 nt, Artificial Sequence
  Synthetic
uaaaucccaacaaaacaaaaagau

SEQ ID NO: 64188 - RNA, 18 nt, Artificial Sequence
  Synthetic
cuuucggaaaauuccuau

SEQ ID NO: 64189 - RNA, 22 nt, Artificial Sequence
  Synthetic
ugggcuuucggaaaauuccuau

SEQ ID NO: 64190 - RNA, 23 nt, Artificial Sequence
  Synthetic
augggcuuucggaaaauuccuau

SEQ ID NO: 64191 - RNA, 24 nt, Artificial Sequence
  Synthetic
caugggcuuucggaaaauuccuau

SEQ ID NO: 64192 - RNA, 22 nt, Artificial Sequence
  Synthetic
agauaccgccucagcucuguau

SEQ ID NO: 64193 - RNA, 23 nt, Artificial Sequence
  Synthetic
uagauaccgccucagcucuguau

SEQ ID NO: 64194 - RNA, 24 nt, Artificial Sequence
  Synthetic
cuagauaccgccucagcucuguau

SEQ ID NO: 64195 - RNA, 18 nt, Artificial Sequence
  Synthetic
ugucuggcuuucaguuau

SEQ ID NO: 64196 - RNA, 19 nt, Artificial Sequence
  Synthetic
cugucuggcuuucaguuau

SEQ ID NO: 64197 - RNA, 20 nt, Artificial Sequence
  Synthetic
acugucuggcuuucaguuau

SEQ ID NO: 64198 - RNA, 21 nt, Artificial Sequence
  Synthetic
cacugucuggcuuucaguuau

SEQ ID NO: 64199 - RNA, 22 nt, Artificial Sequence
  Synthetic
ccacugucuggcuuucaguuau

SEQ ID NO: 64200 - RNA, 23 nt, Artificial Sequence
  Synthetic
cccacugucuggcuuucaguuau

SEQ ID NO: 64201 - RNA, 24 nt, Artificial Sequence
  Synthetic
ccccacugucuggcuuucaguuau

SEQ ID NO: 64202 - RNA, 18 nt, Artificial Sequence
  Synthetic
cucuguaucgggaugccu

SEQ ID NO: 64203 - RNA, 20 nt, Artificial Sequence
  Synthetic
agcucuguaucgggaugccu

SEQ ID NO: 64204 - RNA, 21 nt, Artificial Sequence
  Synthetic
cagcucuguaucgggaugccu

SEQ ID NO: 64205 - RNA, 22 nt, Artificial Sequence
  Synthetic
ucagcucuguaucgggaugccu

SEQ ID NO: 64206 - RNA, 23 nt, Artificial Sequence
  Synthetic
cucagcucuguaucgggaugccu

SEQ ID NO: 64207 - RNA, 24 nt, Artificial Sequence
  Synthetic
ccucagcucuguaucgggaugccu

SEQ ID NO: 64208 - RNA, 22 nt, Artificial Sequence
  Synthetic
uguuaccaauuuucuuuugucu

SEQ ID NO: 64209 - RNA, 23 nt, Artificial Sequence
  Synthetic
cuguuaccaauuuucuuuugucu

SEQ ID NO: 64210 - RNA, 24 nt, Artificial Sequence
  Synthetic
ucuguuaccaauuuucuuuugucu

SEQ ID NO: 64211 - RNA, 18 nt, Artificial Sequence
  Synthetic
  misc_feature (15)..(15): n is a, c, g, or u
ccugcggacgacccnucu

SEQ ID NO: 64212 - RNA, 19 nt, Artificial Sequence
  Synthetic
  misc_feature (16)..(16): n is a, c, g, or u
uccugcggacgacccnucu

SEQ ID NO: 64213 - RNA, 20 nt, Artificial Sequence
  Synthetic
  misc_feature (17)..(17): n is a, c, g, or u
auccugcggacgacccnucu

SEQ ID NO: 64214 - RNA, 21 nt, Artificial Sequence
  Synthetic
  misc_feature (18)..(18): n is a, c, g, or u
aauccugcggacgacccnucu

SEQ ID NO: 64215 - RNA, 23 nt, Artificial Sequence
  Synthetic
  misc_feature (20)..(20): n is a, c, g, or u
ugaauccugcggacgacccnucu

SEQ ID NO: 64216 - RNA, 24 nt, Artificial Sequence
  Synthetic
  misc_feature (21)..(21): n is a, c, g, or u
cugaauccugcggacgacccnucu

SEQ ID NO: 64217 - RNA, 22 nt, Artificial Sequence
  Synthetic
aguauuuggugucuuuuggagu

SEQ ID NO: 64218 - RNA, 24 nt, Artificial Sequence
  Synthetic
agaguauuuggugucuuuuggagu

SEQ ID NO: 64219 - RNA, 21 nt, Artificial Sequence
  Synthetic
  misc_feature (7)..(7): n is a, c, g, or u
cuggacngaagccaacaaggu

SEQ ID NO: 64220 - RNA, 22 nt, Artificial Sequence
  Synthetic
  misc_feature (8)..(8): n is a, c, g, or u
acuggacngaagccaacaaggu

SEQ ID NO: 64221 - RNA, 23 nt, Artificial Sequence
  Synthetic
  misc_feature (9)..(9): n is a, c, g, or u
cacuggacngaagccaacaaggu

SEQ ID NO: 64222 - RNA, 24 nt, Artificial Sequence
  Synthetic
  misc_feature (10)..(10): n is a, c, g, or u
ccacuggacngaagccaacaaggu

SEQ ID NO: 64223 - RNA, 21 nt, Artificial Sequence
  Synthetic
  misc_feature (16)..(16): n is a, c, g, or u
uggaaaguaugucaangaauu

SEQ ID NO: 64224 - RNA, 22 nt, Artificial Sequence
  Synthetic
  misc_feature (17)..(17): n is a, c, g, or u
uuggaaaguaugucaangaauu

SEQ ID NO: 64225 - RNA, 23 nt, Artificial Sequence
  Synthetic
  misc_feature (18)..(18): n is a, c, g, or u
auuggaaaguaugucaangaauu

SEQ ID NO: 64226 - RNA, 21 nt, Artificial Sequence
  Synthetic
cucccccacacggaggccuuu

SEQ ID NO: 64227 - RNA, 22 nt, Artificial Sequence
  Synthetic
acucccccacacggaggccuuu

SEQ ID NO: 64228 - RNA, 23 nt, Artificial Sequence
  Synthetic
cacucccccacacggaggccuuu

SEQ ID NO: 64229 - RNA, 24 nt, Artificial Sequence
  Synthetic
ucacucccccacacggaggccuuu

SEQ ID NO: 64230 - RNA, 21 nt, Artificial Sequence
  Synthetic
  misc_feature (2)..(2): n is a, c, g, or u
cnuagaguauuuggugucuuu

SEQ ID NO: 64231 - RNA, 22 nt, Artificial Sequence
  Synthetic
  misc_feature (3)..(3): n is a, c, g, or u
ucnuagaguauuuggugucuuu

SEQ ID NO: 64232 - RNA, 24 nt, Artificial Sequence
  Synthetic
  misc_feature (5)..(5): n is a, c, g, or u
cgucnuagaguauuuggugucuuu

SEQ ID NO: 64233 - RNA, 18 nt, Artificial Sequence
  Synthetic
  misc_feature (2)..(2): n is a, c, g, or u
cncguagcgccucauuuu

SEQ ID NO: 64234 - RNA, 19 nt, Artificial Sequence
  Synthetic
  misc_feature (3)..(3): n is a, c, g, or u
acncguagcgccucauuuu

SEQ ID NO: 64235 - RNA, 20 nt, Artificial Sequence
  Synthetic
  misc_feature (4)..(4): n is a, c, g, or u
uacncguagcgccucauuuu

SEQ ID NO: 64236 - RNA, 21 nt, Artificial Sequence
  Synthetic
  misc_feature (5)..(5): n is a, c, g, or u
cuacncguagcgccucauuuu

SEQ ID NO: 64237 - RNA, 22 nt, Artificial Sequence
  Synthetic
  misc_feature (6)..(6): n is a, c, g, or u
acuacncguagcgccucauuuu

SEQ ID NO: 64238 - RNA, 23 nt, Artificial Sequence
  Synthetic
  misc_feature (7)..(7): n is a, c, g, or u
aacuacncguagcgccucauuuu

SEQ ID NO: 64239 - RNA, 24 nt, Artificial Sequence
  Synthetic
  misc_feature (8)..(8): n is a, c, g, or u
aaacuacncguagcgccucauuuu

SEQ ID NO: 64240 - RNA, 18 nt, Artificial Sequence
  Synthetic
  misc_feature (2)..(2): n is a, c, g, or u
cnggccguugccgggcaa

SEQ ID NO: 64241 - RNA, 19 nt, Artificial Sequence
  Synthetic
  misc_feature (3)..(3): n is a, c, g, or u
ccnggccguugccgggcaa

SEQ ID NO: 64242 - RNA, 20 nt, Artificial Sequence
  Synthetic
  misc_feature (4)..(4): n is a, c, g, or u
accnggccguugccgggcaa

SEQ ID NO: 64243 - RNA, 18 nt, Artificial Sequence
  Synthetic
aauaauguccuggugcaa

SEQ ID NO: 64244 - RNA, 19 nt, Artificial Sequence
  Synthetic
uaauaauguccuggugcaa

SEQ ID NO: 64245 - RNA, 20 nt, Artificial Sequence
  Synthetic
uuaauaauguccuggugcaa

SEQ ID NO: 64246 - RNA, 18 nt, Artificial Sequence
  Synthetic
gugaggcaguagucggaa

SEQ ID NO: 64247 - RNA, 19 nt, Artificial Sequence
  Synthetic
agugaggcaguagucggaa

SEQ ID NO: 64248 - RNA, 20 nt, Artificial Sequence
  Synthetic
gagugaggcaguagucggaa

SEQ ID NO: 64249 - RNA, 18 nt, Artificial Sequence
  Synthetic
  misc_feature (12)..(12): n is a, c, g, or u
ucaauaggccgnuuaaca

SEQ ID NO: 64250 - RNA, 19 nt, Artificial Sequence
  Synthetic
  misc_feature (13)..(13): n is a, c, g, or u
aucaauaggccgnuuaaca

SEQ ID NO: 64251 - RNA, 20 nt, Artificial Sequence
  Synthetic
  misc_feature (14)..(14): n is a, c, g, or u
aaucaauaggccgnuuaaca

SEQ ID NO: 64252 - RNA, 18 nt, Artificial Sequence
  Synthetic
ucccaccuugugagucca

SEQ ID NO: 64253 - RNA, 19 nt, Artificial Sequence
  Synthetic
uucccaccuugugagucca

SEQ ID NO: 64254 - RNA, 20 nt, Artificial Sequence
  Synthetic
uuucccaccuugugagucca

SEQ ID NO: 64255 - RNA, 18 nt, Artificial Sequence
  Synthetic
  misc_feature (6)..(7): n is a, c, g, or u
cauuannuccccccagca

SEQ ID NO: 64256 - RNA, 19 nt, Artificial Sequence
  Synthetic
  misc_feature (7)..(8): n is a, c, g, or u
ucauuannuccccccagca

SEQ ID NO: 64257 - RNA, 20 nt, Artificial Sequence
  Synthetic
  misc_feature (8)..(9): n is a, c, g, or u
gucauuannuccccccagca

SEQ ID NO: 64258 - RNA, 18 nt, Artificial Sequence
  Synthetic
augaauaucaggaaaaga

SEQ ID NO: 64259 - RNA, 19 nt, Artificial Sequence
  Synthetic
aaugaauaucaggaaaaga

SEQ ID NO: 64260 - RNA, 20 nt, Artificial Sequence
  Synthetic
aaaugaauaucaggaaaaga

SEQ ID NO: 64261 - RNA, 18 nt, Artificial Sequence
  Synthetic
agugaaagccugcuuaga

SEQ ID NO: 64262 - RNA, 19 nt, Artificial Sequence
  Synthetic
aagugaaagccugcuuaga

SEQ ID NO: 64263 - RNA, 20 nt, Artificial Sequence
  Synthetic
aaagugaaagccugcuuaga

SEQ ID NO: 64264 - RNA, 18 nt, Artificial Sequence
  Synthetic
uccgaaagcccaugauga

SEQ ID NO: 64265 - RNA, 19 nt, Artificial Sequence
  Synthetic
uuccgaaagcccaugauga

SEQ ID NO: 64266 - RNA, 20 nt, Artificial Sequence
  Synthetic
uuuccgaaagcccaugauga

SEQ ID NO: 64267 - RNA, 18 nt, Artificial Sequence
  Synthetic
  misc_feature (16)..(16): n is a, c, g, or u
cauaacccaugaaaunua

SEQ ID NO: 64268 - RNA, 19 nt, Artificial Sequence
  Synthetic
  misc_feature (17)..(17): n is a, c, g, or u
acauaacccaugaaaunua

SEQ ID NO: 64269 - RNA, 20 nt, Artificial Sequence
  Synthetic
  misc_feature (18)..(18): n is a, c, g, or u
uacauaacccaugaaaunua

SEQ ID NO: 64270 - RNA, 18 nt, Artificial Sequence
  Synthetic
aagucagaaggcaaaaac

SEQ ID NO: 64271 - RNA, 19 nt, Artificial Sequence
  Synthetic
gaagucagaaggcaaaaac

SEQ ID NO: 64272 - RNA, 20 nt, Artificial Sequence
  Synthetic
agaagucagaaggcaaaaac

SEQ ID NO: 64273 - RNA, 18 nt, Artificial Sequence
  Synthetic
aauugagagaaguccacc

SEQ ID NO: 64274 - RNA, 19 nt, Artificial Sequence
  Synthetic
aaauugagagaaguccacc

SEQ ID NO: 64275 - RNA, 20 nt, Artificial Sequence
  Synthetic
aaaauugagagaaguccacc

SEQ ID NO: 64276 - RNA, 18 nt, Artificial Sequence
  Synthetic
gauguagcucuuguuccc

SEQ ID NO: 64277 - RNA, 19 nt, Artificial Sequence
  Synthetic
ugauguagcucuuguuccc

SEQ ID NO: 64278 - RNA, 20 nt, Artificial Sequence
  Synthetic
augauguagcucuuguuccc

SEQ ID NO: 64279 - RNA, 18 nt, Artificial Sequence
  Synthetic
  misc_feature (10)..(10): n is a, c, g, or u
ugacauugcngagagucc

SEQ ID NO: 64280 - RNA, 19 nt, Artificial Sequence
  Synthetic
  misc_feature (11)..(11): n is a, c, g, or u
uugacauugcngagagucc

SEQ ID NO: 64281 - RNA, 20 nt, Artificial Sequence
  Synthetic
  misc_feature (12)..(12): n is a, c, g, or u
guugacauugcngagagucc

SEQ ID NO: 64282 - RNA, 18 nt, Artificial Sequence
  Synthetic
  misc_feature (2)..(2): n is a, c, g, or u
uncacccacccagguagc

SEQ ID NO: 64283 - RNA, 19 nt, Artificial Sequence
  Synthetic
  misc_feature (3)..(3): n is a, c, g, or u
uuncacccacccagguagc

SEQ ID NO: 64284 - RNA, 20 nt, Artificial Sequence
  Synthetic
  misc_feature (4)..(4): n is a, c, g, or u
uuuncacccacccagguagc

SEQ ID NO: 64285 - RNA, 18 nt, Artificial Sequence
  Synthetic
  misc_feature (15)..(15): n is a, c, g, or u
gggggagugaacccnggc

SEQ ID NO: 64286 - RNA, 19 nt, Artificial Sequence
  Synthetic
  misc_feature (16)..(16): n is a, c, g, or u
ugggggagugaacccnggc

SEQ ID NO: 64287 - RNA, 20 nt, Artificial Sequence
  Synthetic
  misc_feature (17)..(17): n is a, c, g, or u
gugggggagugaacccnggc

SEQ ID NO: 64288 - RNA, 18 nt, Artificial Sequence
  Synthetic
cagcaaagaauggcuugc

SEQ ID NO: 64289 - RNA, 19 nt, Artificial Sequence
  Synthetic
ccagcaaagaauggcuugc

SEQ ID NO: 64290 - RNA, 20 nt, Artificial Sequence
  Synthetic
cccagcaaagaauggcuugc

SEQ ID NO: 64291 - RNA, 18 nt, Artificial Sequence
  Synthetic
gaagaugaggcauagcag

SEQ ID NO: 64292 - RNA, 19 nt, Artificial Sequence
  Synthetic
agaagaugaggcauagcag

SEQ ID NO: 64293 - RNA, 20 nt, Artificial Sequence
  Synthetic
aagaagaugaggcauagcag

SEQ ID NO: 64294 - RNA, 18 nt, Artificial Sequence
  Synthetic
  misc_feature (1)..(1): n is a, c, g, or u
nccccaagcgaccccgag

SEQ ID NO: 64295 - RNA, 19 nt, Artificial Sequence
  Synthetic
  misc_feature (2)..(2): n is a, c, g, or u
anccccaagcgaccccgag

SEQ ID NO: 64296 - RNA, 20 nt, Artificial Sequence
  Synthetic
  misc_feature (3)..(3): n is a, c, g, or u
ganccccaagcgaccccgag

SEQ ID NO: 64297 - RNA, 18 nt, Artificial Sequence
  Synthetic
gauugguggaggcaggag

SEQ ID NO: 64298 - RNA, 19 nt, Artificial Sequence
  Synthetic
cgauugguggaggcaggag

SEQ ID NO: 64299 - RNA, 20 nt, Artificial Sequence
  Synthetic
ccgauugguggaggcaggag

SEQ ID NO: 64300 - RNA, 18 nt, Artificial Sequence
  Synthetic
augagugucucucaaagg

SEQ ID NO: 64301 - RNA, 19 nt, Artificial Sequence
  Synthetic
gaugagugucucucaaagg

SEQ ID NO: 64302 - RNA, 20 nt, Artificial Sequence
  Synthetic
ggaugagugucucucaaagg

SEQ ID NO: 64303 - RNA, 18 nt, Artificial Sequence
  Synthetic
ccacugcauggccugagg

SEQ ID NO: 64304 - RNA, 19 nt, Artificial Sequence
  Synthetic
uccacugcauggccugagg

SEQ ID NO: 64305 - RNA, 20 nt, Artificial Sequence
  Synthetic
uuccacugcauggccugagg

SEQ ID NO: 64306 - RNA, 18 nt, Artificial Sequence
  Synthetic
ugguggucuauaagcugg

SEQ ID NO: 64307 - RNA, 19 nt, Artificial Sequence
  Synthetic
uugguggucuauaagcugg

SEQ ID NO: 64308 - RNA, 20 nt, Artificial Sequence
  Synthetic
uuugguggucuauaagcugg

SEQ ID NO: 64309 - RNA, 18 nt, Artificial Sequence
  Synthetic
aucccagaggauuggugg

SEQ ID NO: 64310 - RNA, 19 nt, Artificial Sequence
  Synthetic
aaucccagaggauuggugg

SEQ ID NO: 64311 - RNA, 20 nt, Artificial Sequence
  Synthetic
aaaucccagaggauuggugg

SEQ ID NO: 64312 - RNA, 18 nt, Artificial Sequence
  Synthetic
caaaaggccuccgugugg

SEQ ID NO: 64313 - RNA, 19 nt, Artificial Sequence
  Synthetic
ccaaaaggccuccgugugg

SEQ ID NO: 64314 - RNA, 20 nt, Artificial Sequence
  Synthetic
cccaaaaggccuccgugugg

SEQ ID NO: 64315 - RNA, 18 nt, Artificial Sequence
  Synthetic
ggauccugcagagcuugg

SEQ ID NO: 64316 - RNA, 19 nt, Artificial Sequence
  Synthetic
gggauccugcagagcuugg

SEQ ID NO: 64317 - RNA, 20 nt, Artificial Sequence
  Synthetic
ugggauccugcagagcuugg

SEQ ID NO: 64318 - RNA, 18 nt, Artificial Sequence
  Synthetic
ugguguuugcucugaaug

SEQ ID NO: 64319 - RNA, 19 nt, Artificial Sequence
  Synthetic
cugguguuugcucugaaug

SEQ ID NO: 64320 - RNA, 20 nt, Artificial Sequence
  Synthetic
ucugguguuugcucugaaug

SEQ ID NO: 64321 - RNA, 18 nt, Artificial Sequence
  Synthetic
cuacuaggucccuggaug

SEQ ID NO: 64322 - RNA, 19 nt, Artificial Sequence
  Synthetic
acuacuaggucccuggaug

SEQ ID NO: 64323 - RNA, 20 nt, Artificial Sequence
  Synthetic
gacuacuaggucccuggaug

SEQ ID NO: 64324 - RNA, 18 nt, Artificial Sequence
  Synthetic
uuggaggacaagagguug

SEQ ID NO: 64325 - RNA, 19 nt, Artificial Sequence
  Synthetic
auuggaggacaagagguug

SEQ ID NO: 64326 - RNA, 20 nt, Artificial Sequence
  Synthetic
aauuggaggacaagagguug

SEQ ID NO: 64327 - RNA, 18 nt, Artificial Sequence
  Synthetic
gcugaggcccacucccau

SEQ ID NO: 64328 - RNA, 19 nt, Artificial Sequence
  Synthetic
ggcugaggcccacucccau

SEQ ID NO: 64329 - RNA, 20 nt, Artificial Sequence
  Synthetic
gggcugaggcccacucccau

SEQ ID NO: 64330 - RNA, 18 nt, Artificial Sequence
  Synthetic
agcccaugaugaugggau

SEQ ID NO: 64331 - RNA, 19 nt, Artificial Sequence
  Synthetic
aagcccaugaugaugggau

SEQ ID NO: 64332 - RNA, 20 nt, Artificial Sequence
  Synthetic
aaagcccaugaugaugggau

SEQ ID NO: 64333 - RNA, 18 nt, Artificial Sequence
  Synthetic
uagcuccaaauucuuuau

SEQ ID NO: 64334 - RNA, 19 nt, Artificial Sequence
  Synthetic
guagcuccaaauucuuuau

SEQ ID NO: 64335 - RNA, 20 nt, Artificial Sequence
  Synthetic
aguagcuccaaauucuuuau

SEQ ID NO: 64336 - RNA, 18 nt, Artificial Sequence
  Synthetic
  misc_feature (3)..(3): n is a, c, g, or u
  misc_feature (9)..(9): n is a, c, g, or u
ganuggagnuuggggacu

SEQ ID NO: 64337 - RNA, 19 nt, Artificial Sequence
  Synthetic
  misc_feature (4)..(4): n is a, c, g, or u
  misc_feature (10)..(10): n is a, c, g, or u
uganuggagnuuggggacu

SEQ ID NO: 64338 - RNA, 20 nt, Artificial Sequence
  Synthetic
  misc_feature (5)..(5): n is a, c, g, or u
  misc_feature (11)..(11): n is a, c, g, or u
guganuggagnuuggggacu

SEQ ID NO: 64339 - RNA, 18 nt, Artificial Sequence
  Synthetic
ggauuucugguguuugcu

SEQ ID NO: 64340 - RNA, 19 nt, Artificial Sequence
  Synthetic
uggauuucugguguuugcu

SEQ ID NO: 64341 - RNA, 20 nt, Artificial Sequence
  Synthetic
cuggauuucugguguuugcu

SEQ ID NO: 64342 - RNA, 18 nt, Artificial Sequence
  Synthetic
ggccaagccccagccagu

SEQ ID NO: 64343 - RNA, 19 nt, Artificial Sequence
  Synthetic
uggccaagccccagccagu

SEQ ID NO: 64344 - RNA, 20 nt, Artificial Sequence
  Synthetic
auggccaagccccagccagu

SEQ ID NO: 64345 - RNA, 18 nt, Artificial Sequence
  Synthetic
aagauggaguuuuccagu

SEQ ID NO: 64346 - RNA, 19 nt, Artificial Sequence
  Synthetic
aaagauggaguuuuccagu

SEQ ID NO: 64347 - RNA, 20 nt, Artificial Sequence
  Synthetic
aaaagauggaguuuuccagu

SEQ ID NO: 64348 - RNA, 18 nt, Artificial Sequence
  Synthetic
ggcuaggaguuccgcagu

SEQ ID NO: 64349 - RNA, 19 nt, Artificial Sequence
  Synthetic
cggcuaggaguuccgcagu

SEQ ID NO: 64350 - RNA, 20 nt, Artificial Sequence
  Synthetic
gcggcuaggaguuccgcagu

SEQ ID NO: 64351 - RNA, 18 nt, Artificial Sequence
  Synthetic
  misc_feature (2)..(2): n is a, c, g, or u
cnguccaguggucuuugu

SEQ ID NO: 64352 - RNA, 19 nt, Artificial Sequence
  Synthetic
  misc_feature (3)..(3): n is a, c, g, or u
ucnguccaguggucuuugu

SEQ ID NO: 64353 - RNA, 20 nt, Artificial Sequence
  Synthetic
  misc_feature (4)..(4): n is a, c, g, or u
uucnguccaguggucuuugu

SEQ ID NO: 64354 - RNA, 18 nt, Artificial Sequence
  Synthetic
cccaucuuuuuguuuugu

SEQ ID NO: 64355 - RNA, 19 nt, Artificial Sequence
  Synthetic
ccccaucuuuuuguuuugu

SEQ ID NO: 64356 - RNA, 20 nt, Artificial Sequence
  Synthetic
uccccaucuuuuuguuuugu

SEQ ID NO: 64357 - RNA, 18 nt, Artificial Sequence
  Synthetic
cguaaaauuucccaccuu

SEQ ID NO: 64358 - RNA, 19 nt, Artificial Sequence
  Synthetic
ccguaaaauuucccaccuu

SEQ ID NO: 64359 - RNA, 20 nt, Artificial Sequence
  Synthetic
cccguaaaauuucccaccuu

SEQ ID NO: 64360 - RNA, 18 nt, Artificial Sequence
  Synthetic
gcuaggcugugcugccaa

SEQ ID NO: 64361 - RNA, 19 nt, Artificial Sequence
  Synthetic
ugcuaggcugugcugccaa

SEQ ID NO: 64362 - RNA, 20 nt, Artificial Sequence
  Synthetic
cugcuaggcugugcugccaa

SEQ ID NO: 64363 - RNA, 18 nt, Artificial Sequence
  Synthetic
ugauuggaaaguauguca

SEQ ID NO: 64364 - RNA, 19 nt, Artificial Sequence
  Synthetic
uugauuggaaaguauguca

SEQ ID NO: 64365 - RNA, 20 nt, Artificial Sequence
  Synthetic
auugauuggaaaguauguca

SEQ ID NO: 64366 - RNA, 18 nt, Artificial Sequence
  Synthetic
  misc_feature (1)..(2): n is a, c, g, or u
nnuaaugacucuagcuac

SEQ ID NO: 64367 - RNA, 19 nt, Artificial Sequence
  Synthetic
  misc_feature (2)..(3): n is a, c, g, or u
annuaaugacucuagcuac

SEQ ID NO: 64368 - RNA, 20 nt, Artificial Sequence
  Synthetic
  misc_feature (3)..(4): n is a, c, g, or u
gannuaaugacucuagcuac

SEQ ID NO: 64369 - RNA, 18 nt, Artificial Sequence
  Synthetic
ccaagcucugcaggaucc

SEQ ID NO: 64370 - RNA, 19 nt, Artificial Sequence
  Synthetic
accaagcucugcaggaucc

SEQ ID NO: 64371 - RNA, 20 nt, Artificial Sequence
  Synthetic
caccaagcucugcaggaucc

SEQ ID NO: 64372 - RNA, 18 nt, Artificial Sequence
  Synthetic
gagugggagcauucgggc

SEQ ID NO: 64373 - RNA, 19 nt, Artificial Sequence
  Synthetic
ggagugggagcauucgggc

SEQ ID NO: 64374 - RNA, 20 nt, Artificial Sequence
  Synthetic
aggagugggagcauucgggc

SEQ ID NO: 64375 - RNA, 18 nt, Artificial Sequence
  Synthetic
ccaagucuguacaacauc

SEQ ID NO: 64376 - RNA, 19 nt, Artificial Sequence
  Synthetic
gccaagucuguacaacauc

SEQ ID NO: 64377 - RNA, 20 nt, Artificial Sequence
  Synthetic
ggccaagucuguacaacauc

SEQ ID NO: 64378 - RNA, 18 nt, Artificial Sequence
  Synthetic
augacucuagcuaccugg

SEQ ID NO: 64379 - RNA, 19 nt, Artificial Sequence
  Synthetic
aaugacucuagcuaccugg

SEQ ID NO: 64380 - RNA, 20 nt, Artificial Sequence
  Synthetic
uaaugacucuagcuaccugg

SEQ ID NO: 64381 - RNA, 21 nt, Artificial Sequence
  Synthetic
  misc_feature (1)..(1): n is a, c, g, or u
nuaaugacucuagcuaccugg

SEQ ID NO: 64382 - RNA, 22 nt, Artificial Sequence
  Synthetic
  misc_feature (1)..(2): n is a, c, g, or u
nnuaaugacucuagcuaccugg

SEQ ID NO: 64383 - RNA, 23 nt, Artificial Sequence
  Synthetic
  misc_feature (2)..(3): n is a, c, g, or u
annuaaugacucuagcuaccugg

SEQ ID NO: 64384 - RNA, 24 nt, Artificial Sequence
  Synthetic
  misc_feature (3)..(4): n is a, c, g, or u
gannuaaugacucuagcuaccugg

SEQ ID NO: 64385 - RNA, 18 nt, Artificial Sequence
  Synthetic
aagaauuuggagcuacug

SEQ ID NO: 64386 - RNA, 19 nt, Artificial Sequence
  Synthetic
aaagaauuuggagcuacug

SEQ ID NO: 64387 - RNA, 20 nt, Artificial Sequence
  Synthetic
uaaagaauuuggagcuacug

SEQ ID NO: 64388 - RNA, 18 nt, Artificial Sequence
  Synthetic
acauuccaccaagcucug

SEQ ID NO: 64389 - RNA, 19 nt, Artificial Sequence
  Synthetic
aacauuccaccaagcucug

SEQ ID NO: 64390 - RNA, 20 nt, Artificial Sequence
  Synthetic
caacauuccaccaagcucug

SEQ ID NO: 64391 - RNA, 18 nt, Artificial Sequence
  Synthetic
acauggaaagcaucacau

SEQ ID NO: 64392 - RNA, 19 nt, Artificial Sequence
  Synthetic
aacauggaaagcaucacau

SEQ ID NO: 64393 - RNA, 20 nt, Artificial Sequence
  Synthetic
gaacauggaaagcaucacau

SEQ ID NO: 64394 - RNA, 18 nt, Artificial Sequence
  Synthetic
ccaacaaaacaaaaagau

SEQ ID NO: 64395 - RNA, 19 nt, Artificial Sequence
  Synthetic
cccaacaaaacaaaaagau

SEQ ID NO: 64396 - RNA, 20 nt, Artificial Sequence
  Synthetic
ucccaacaaaacaaaaagau

SEQ ID NO: 64397 - RNA, 18 nt, Artificial Sequence
  Synthetic
accgccucagcucuguau

SEQ ID NO: 64398 - RNA, 19 nt, Artificial Sequence
  Synthetic
uaccgccucagcucuguau

SEQ ID NO: 64399 - RNA, 20 nt, Artificial Sequence
  Synthetic
auaccgccucagcucuguau

SEQ ID NO: 64400 - RNA, 18 nt, Artificial Sequence
  Synthetic
accaauuuucuuuugucu

SEQ ID NO: 64401 - RNA, 19 nt, Artificial Sequence
  Synthetic
uaccaauuuucuuuugucu

SEQ ID NO: 64402 - RNA, 20 nt, Artificial Sequence
  Synthetic
uuaccaauuuucuuuugucu

SEQ ID NO: 64403 - RNA, 18 nt, Artificial Sequence
  Synthetic
uuuggugucuuuuggagu

SEQ ID NO: 64404 - RNA, 19 nt, Artificial Sequence
  Synthetic
auuuggugucuuuuggagu

SEQ ID NO: 64405 - RNA, 20 nt, Artificial Sequence
  Synthetic
uauuuggugucuuuuggagu

SEQ ID NO: 64406 - RNA, 18 nt, Artificial Sequence
  Synthetic
  misc_feature (4)..(4): n is a, c, g, or u
gacngaagccaacaaggu

SEQ ID NO: 64407 - RNA, 19 nt, Artificial Sequence
  Synthetic
  misc_feature (5)..(5): n is a, c, g, or u
ggacngaagccaacaaggu

SEQ ID NO: 64408 - RNA, 20 nt, Artificial Sequence
  Synthetic
  misc_feature (6)..(6): n is a, c, g, or u
uggacngaagccaacaaggu

SEQ ID NO: 64409 - RNA, 18 nt, Artificial Sequence
  Synthetic
  misc_feature (13)..(13): n is a, c, g, or u
aaaguaugucaangaauu

SEQ ID NO: 64410 - RNA, 19 nt, Artificial Sequence
  Synthetic
  misc_feature (14)..(14): n is a, c, g, or u
gaaaguaugucaangaauu

SEQ ID NO: 64411 - RNA, 20 nt, Artificial Sequence
  Synthetic
  misc_feature (15)..(15): n is a, c, g, or u
ggaaaguaugucaangaauu

SEQ ID NO: 64412 - RNA, 18 nt, Artificial Sequence
  Synthetic
ccccacacggaggccuuu

SEQ ID NO: 64413 - RNA, 19 nt, Artificial Sequence
  Synthetic
cccccacacggaggccuuu

SEQ ID NO: 64414 - RNA, 20 nt, Artificial Sequence
  Synthetic
ucccccacacggaggccuuu

SEQ ID NO: 64415 - RNA, 18 nt, Artificial Sequence
  Synthetic
agaguauuuggugucuuu

SEQ ID NO: 64416 - RNA, 19 nt, Artificial Sequence
  Synthetic
uagaguauuuggugucuuu

SEQ ID NO: 64417 - RNA, 20 nt, Artificial Sequence
  Synthetic
  misc_feature (1)..(1): n is a, c, g, or u
nuagaguauuuggugucuuu

SEQ ID NO: 64418 - RNA, 18 nt, Artificial Sequence
  Synthetic
acgguuucucuuccaaaa

SEQ ID NO: 64419 - RNA, 19 nt, Artificial Sequence
  Synthetic
gacgguuucucuuccaaaa

SEQ ID NO: 64420 - RNA, 20 nt, Artificial Sequence
  Synthetic
  misc_feature (1)..(1): n is a, c, g, or u
ngacgguuucucuuccaaaa

SEQ ID NO: 64421 - RNA, 21 nt, Artificial Sequence
  Synthetic
  misc_feature (2)..(2): n is a, c, g, or u
angacgguuucucuuccaaaa

SEQ ID NO: 64422 - RNA, 22 nt, Artificial Sequence
  Synthetic
  misc_feature (3)..(3): n is a, c, g, or u
uangacgguuucucuuccaaaa

SEQ ID NO: 64423 - RNA, 23 nt, Artificial Sequence
  Synthetic
  misc_feature (4)..(4): n is a, c, g, or u
cuangacgguuucucuuccaaaa

SEQ ID NO: 64424 - RNA, 24 nt, Artificial Sequence
  Synthetic
  misc_feature (5)..(5): n is a, c, g, or u
ucuangacgguuucucuuccaaaa

SEQ ID NO: 64425 - RNA, 18 nt, Artificial Sequence
  Synthetic
agaagucagaaggcaaaa

SEQ ID NO: 64426 - RNA, 19 nt, Artificial Sequence
  Synthetic
aagaagucagaaggcaaaa

SEQ ID NO: 64427 - RNA, 20 nt, Artificial Sequence
  Synthetic
aaagaagucagaaggcaaaa

SEQ ID NO: 64428 - RNA, 21 nt, Artificial Sequence
  Synthetic
gaaagaagucagaaggcaaaa

SEQ ID NO: 64429 - RNA, 22 nt, Artificial Sequence
  Synthetic
ggaaagaagucagaaggcaaaa

SEQ ID NO: 64430 - RNA, 23 nt, Artificial Sequence
  Synthetic
aggaaagaagucagaaggcaaaa

SEQ ID NO: 64431 - RNA, 24 nt, Artificial Sequence
  Synthetic
aaggaaagaagucagaaggcaaaa

SEQ ID NO: 64432 - RNA, 18 nt, Artificial Sequence
  Synthetic
ggagcucccccuagaaaa

SEQ ID NO: 64433 - RNA, 19 nt, Artificial Sequence
  Synthetic
gggagcucccccuagaaaa

SEQ ID NO: 64434 - RNA, 20 nt, Artificial Sequence
  Synthetic
cgggagcucccccuagaaaa

SEQ ID NO: 64435 - RNA, 21 nt, Artificial Sequence
  Synthetic
acgggagcucccccuagaaaa

SEQ ID NO: 64436 - RNA, 22 nt, Artificial Sequence
  Synthetic
cacgggagcucccccuagaaaa

SEQ ID NO: 64437 - RNA, 23 nt, Artificial Sequence
  Synthetic
acacgggagcucccccuagaaaa

SEQ ID NO: 64438 - RNA, 24 nt, Artificial Sequence
  Synthetic
cacacgggagcucccccuagaaaa

SEQ ID NO: 64439 - RNA, 18 nt, Artificial Sequence
  Synthetic
agcgauagccaggacaaa

SEQ ID NO: 64440 - RNA, 19 nt, Artificial Sequence
  Synthetic
cagcgauagccaggacaaa

SEQ ID NO: 64441 - RNA, 20 nt, Artificial Sequence
  Synthetic
ccagcgauagccaggacaaa

SEQ ID NO: 64442 - RNA, 21 nt, Artificial Sequence
  Synthetic
uccagcgauagccaggacaaa

SEQ ID NO: 64443 - RNA, 22 nt, Artificial Sequence
  Synthetic
auccagcgauagccaggacaaa

SEQ ID NO: 64444 - RNA, 23 nt, Artificial Sequence
  Synthetic
cauccagcgauagccaggacaaa

SEQ ID NO: 64445 - RNA, 24 nt, Artificial Sequence
  Synthetic
acauccagcgauagccaggacaaa

SEQ ID NO: 64446 - RNA, 18 nt, Artificial Sequence
  Synthetic
uuguaaguuggcgagaaa

SEQ ID NO: 64447 - RNA, 19 nt, Artificial Sequence
  Synthetic
cuuguaaguuggcgagaaa

SEQ ID NO: 64448 - RNA, 20 nt, Artificial Sequence
  Synthetic
ccuuguaaguuggcgagaaa

SEQ ID NO: 64449 - RNA, 21 nt, Artificial Sequence
  Synthetic
gccuuguaaguuggcgagaaa

SEQ ID NO: 64450 - RNA, 22 nt, Artificial Sequence
  Synthetic
ggccuuguaaguuggcgagaaa

SEQ ID NO: 64451 - RNA, 23 nt, Artificial Sequence
  Synthetic
aggccuuguaaguuggcgagaaa

SEQ ID NO: 64452 - RNA, 24 nt, Artificial Sequence
  Synthetic
aaggccuuguaaguuggcgagaaa

SEQ ID NO: 64453 - RNA, 18 nt, Artificial Sequence
  Synthetic
  misc_feature (15)..(15): n is a, c, g, or u
aauaaggugacccanaaa

SEQ ID NO: 64454 - RNA, 19 nt, Artificial Sequence
  Synthetic
  misc_feature (16)..(16): n is a, c, g, or u
gaauaaggugacccanaaa

SEQ ID NO: 64455 - RNA, 20 nt, Artificial Sequence
  Synthetic
  misc_feature (17)..(17): n is a, c, g, or u
agaauaaggugacccanaaa

SEQ ID NO: 64456 - RNA, 21 nt, Artificial Sequence
  Synthetic
  misc_feature (18)..(18): n is a, c, g, or u
aagaauaaggugacccanaaa

SEQ ID NO: 64457 - RNA, 22 nt, Artificial Sequence
  Synthetic
  misc_feature (19)..(19): n is a, c, g, or u
caagaauaaggugacccanaaa

SEQ ID NO: 64458 - RNA, 23 nt, Artificial Sequence
  Synthetic
  misc_feature (20)..(20): n is a, c, g, or u
ccaagaauaaggugacccanaaa

SEQ ID NO: 64459 - RNA, 24 nt, Artificial Sequence
  Synthetic
  misc_feature (21)..(21): n is a, c, g, or u
cccaagaauaaggugacccanaaa

SEQ ID NO: 64460 - RNA, 18 nt, Artificial Sequence
  Synthetic
acaaauggcacuaguaaa

SEQ ID NO: 64461 - RNA, 19 nt, Artificial Sequence
  Synthetic
aacaaauggcacuaguaaa

SEQ ID NO: 64462 - RNA, 20 nt, Artificial Sequence
  Synthetic
gaacaaauggcacuaguaaa

SEQ ID NO: 64463 - RNA, 21 nt, Artificial Sequence
  Synthetic
ugaacaaauggcacuaguaaa

SEQ ID NO: 64464 - RNA, 22 nt, Artificial Sequence
  Synthetic
cugaacaaauggcacuaguaaa

SEQ ID NO: 64465 - RNA, 23 nt, Artificial Sequence
  Synthetic
acugaacaaauggcacuaguaaa

SEQ ID NO: 64466 - RNA, 24 nt, Artificial Sequence
  Synthetic
cacugaacaaauggcacuaguaaa

SEQ ID NO: 64467 - RNA, 18 nt, Artificial Sequence
  Synthetic
acggggagaccgcguaaa

SEQ ID NO: 64468 - RNA, 19 nt, Artificial Sequence
  Synthetic
gacggggagaccgcguaaa

SEQ ID NO: 64469 - RNA, 20 nt, Artificial Sequence
  Synthetic
agacggggagaccgcguaaa

SEQ ID NO: 64470 - RNA, 21 nt, Artificial Sequence
  Synthetic
cagacggggagaccgcguaaa

SEQ ID NO: 64471 - RNA, 22 nt, Artificial Sequence
  Synthetic
acagacggggagaccgcguaaa

SEQ ID NO: 64472 - RNA, 23 nt, Artificial Sequence
  Synthetic
cacagacggggagaccgcguaaa

SEQ ID NO: 64473 - RNA, 24 nt, Artificial Sequence
  Synthetic
gcacagacggggagaccgcguaaa

SEQ ID NO: 64474 - RNA, 18 nt, Artificial Sequence
  Synthetic
  misc_feature (4)..(4): n is a, c, g, or u
auanccacauuguguaaa

SEQ ID NO: 64475 - RNA, 19 nt, Artificial Sequence
  Synthetic
  misc_feature (5)..(5): n is a, c, g, or u
gauanccacauuguguaaa

SEQ ID NO: 64476 - RNA, 20 nt, Artificial Sequence
  Synthetic
  misc_feature (6)..(6): n is a, c, g, or u
ggauanccacauuguguaaa

SEQ ID NO: 64477 - RNA, 21 nt, Artificial Sequence
  Synthetic
  misc_feature (7)..(7): n is a, c, g, or u
aggauanccacauuguguaaa

SEQ ID NO: 64478 - RNA, 22 nt, Artificial Sequence
  Synthetic
  misc_feature (8)..(8): n is a, c, g, or u
caggauanccacauuguguaaa

SEQ ID NO: 64479 - RNA, 23 nt, Artificial Sequence
  Synthetic
  misc_feature (9)..(9): n is a, c, g, or u
gcaggauanccacauuguguaaa

SEQ ID NO: 64480 - RNA, 24 nt, Artificial Sequence
  Synthetic
  misc_feature (10)..(10): n is a, c, g, or u
agcaggauanccacauuguguaaa

SEQ ID NO: 64481 - RNA, 18 nt, Artificial Sequence
  Synthetic
auguauacccaaagacaa

SEQ ID NO: 64482 - RNA, 19 nt, Artificial Sequence
  Synthetic
aauguauacccaaagacaa

SEQ ID NO: 64483 - RNA, 20 nt, Artificial Sequence
  Synthetic
aaauguauacccaaagacaa

SEQ ID NO: 64484 - RNA, 21 nt, Artificial Sequence
  Synthetic
uaaauguauacccaaagacaa

SEQ ID NO: 64485 - RNA, 22 nt, Artificial Sequence
  Synthetic
uuaaauguauacccaaagacaa

SEQ ID NO: 64486 - RNA, 23 nt, Artificial Sequence
  Synthetic
uuuaaauguauacccaaagacaa

SEQ ID NO: 64487 - RNA, 24 nt, Artificial Sequence
  Synthetic
auuuaaauguauacccaaagacaa

SEQ ID NO: 64488 - RNA, 18 nt, Artificial Sequence
  Synthetic
ccuggaauuagaggacaa

SEQ ID NO: 64489 - RNA, 19 nt, Artificial Sequence
  Synthetic
uccuggaauuagaggacaa

SEQ ID NO: 64490 - RNA, 20 nt, Artificial Sequence
  Synthetic
auccuggaauuagaggacaa

SEQ ID NO: 64491 - RNA, 21 nt, Artificial Sequence
  Synthetic
gauccuggaauuagaggacaa

SEQ ID NO: 64492 - RNA, 22 nt, Artificial Sequence
  Synthetic
ugauccuggaauuagaggacaa

SEQ ID NO: 64493 - RNA, 23 nt, Artificial Sequence
  Synthetic
augauccuggaauuagaggacaa

SEQ ID NO: 64494 - RNA, 24 nt, Artificial Sequence
  Synthetic
gaugauccuggaauuagaggacaa

SEQ ID NO: 64495 - RNA, 18 nt, Artificial Sequence
  Synthetic
uaaacugagccaggagaa

SEQ ID NO: 64496 - RNA, 19 nt, Artificial Sequence
  Synthetic
guaaacugagccaggagaa

SEQ ID NO: 64497 - RNA, 20 nt, Artificial Sequence
  Synthetic
aguaaacugagccaggagaa

SEQ ID NO: 64498 - RNA, 21 nt, Artificial Sequence
  Synthetic
uaguaaacugagccaggagaa

SEQ ID NO: 64499 - RNA, 22 nt, Artificial Sequence
  Synthetic
cuaguaaacugagccaggagaa

SEQ ID NO: 64500 - RNA, 23 nt, Artificial Sequence
  Synthetic
acuaguaaacugagccaggagaa

SEQ ID NO: 64501 - RNA, 24 nt, Artificial Sequence
  Synthetic
cacuaguaaacugagccaggagaa

SEQ ID NO: 64502 - RNA, 18 nt, Artificial Sequence
  Synthetic
ggaacggcagacggagaa

SEQ ID NO: 64503 - RNA, 19 nt, Artificial Sequence
  Synthetic
  misc_feature (1)..(1): n is a, c, g, or u
nggaacggcagacggagaa

SEQ ID NO: 64504 - RNA, 20 nt, Artificial Sequence
  Synthetic
  misc_feature (2)..(2): n is a, c, g, or u
cnggaacggcagacggagaa

SEQ ID NO: 64505 - RNA, 21 nt, Artificial Sequence
  Synthetic
  misc_feature (3)..(3): n is a, c, g, or u
gcnggaacggcagacggagaa

SEQ ID NO: 64506 - RNA, 22 nt, Artificial Sequence
  Synthetic
  misc_feature (4)..(4): n is a, c, g, or u
ggcnggaacggcagacggagaa

SEQ ID NO: 64507 - RNA, 23 nt, Artificial Sequence
  Synthetic
  misc_feature (5)..(5): n is a, c, g, or u
cggcnggaacggcagacggagaa

SEQ ID NO: 64508 - RNA, 24 nt, Artificial Sequence
  Synthetic
  misc_feature (6)..(6): n is a, c, g, or u
ucggcnggaacggcagacggagaa

SEQ ID NO: 64509 - RNA, 18 nt, Artificial Sequence
  Synthetic
ggguucacuguuccggaa

SEQ ID NO: 64510 - RNA, 19 nt, Artificial Sequence
  Synthetic
aggguucacuguuccggaa

SEQ ID NO: 64511 - RNA, 20 nt, Artificial Sequence
  Synthetic
caggguucacuguuccggaa

SEQ ID NO: 64512 - RNA, 21 nt, Artificial Sequence
  Synthetic
acaggguucacuguuccggaa

SEQ ID NO: 64513 - RNA, 22 nt, Artificial Sequence
  Synthetic
aacaggguucacuguuccggaa

SEQ ID NO: 64514 - RNA, 23 nt, Artificial Sequence
  Synthetic
gaacaggguucacuguuccggaa

SEQ ID NO: 64515 - RNA, 24 nt, Artificial Sequence
  Synthetic
ggaacaggguucacuguuccggaa

SEQ ID NO: 64516 - RNA, 18 nt, Artificial Sequence
  Synthetic
gcauagcagcaggaugaa

SEQ ID NO: 64517 - RNA, 19 nt, Artificial Sequence
  Synthetic
ggcauagcagcaggaugaa

SEQ ID NO: 64518 - RNA, 20 nt, Artificial Sequence
  Synthetic
aggcauagcagcaggaugaa

SEQ ID NO: 64519 - RNA, 21 nt, Artificial Sequence
  Synthetic
gaggcauagcagcaggaugaa

SEQ ID NO: 64520 - RNA, 22 nt, Artificial Sequence
  Synthetic
ugaggcauagcagcaggaugaa

SEQ ID NO: 64521 - RNA, 23 nt, Artificial Sequence
  Synthetic
augaggcauagcagcaggaugaa

SEQ ID NO: 64522 - RNA, 24 nt, Artificial Sequence
  Synthetic
gaugaggcauagcagcaggaugaa

SEQ ID NO: 64523 - RNA, 18 nt, Artificial Sequence
  Synthetic
gcgacgugcagaggugaa

SEQ ID NO: 64524 - RNA, 19 nt, Artificial Sequence
  Synthetic
ugcgacgugcagaggugaa

SEQ ID NO: 64525 - RNA, 20 nt, Artificial Sequence
  Synthetic
augcgacgugcagaggugaa

SEQ ID NO: 64526 - RNA, 21 nt, Artificial Sequence
  Synthetic
caugcgacgugcagaggugaa

SEQ ID NO: 64527 - RNA, 22 nt, Artificial Sequence
  Synthetic
ccaugcgacgugcagaggugaa

SEQ ID NO: 64528 - RNA, 23 nt, Artificial Sequence
  Synthetic
uccaugcgacgugcagaggugaa

SEQ ID NO: 64529 - RNA, 24 nt, Artificial Sequence
  Synthetic
cuccaugcgacgugcagaggugaa

SEQ ID NO: 64530 - RNA, 18 nt, Artificial Sequence
  Synthetic
accacaucauccauauaa

SEQ ID NO: 64531 - RNA, 19 nt, Artificial Sequence
  Synthetic
uaccacaucauccauauaa

SEQ ID NO: 64532 - RNA, 20 nt, Artificial Sequence
  Synthetic
auaccacaucauccauauaa

SEQ ID NO: 64533 - RNA, 21 nt, Artificial Sequence
  Synthetic
aauaccacaucauccauauaa

SEQ ID NO: 64534 - RNA, 22 nt, Artificial Sequence
  Synthetic
caauaccacaucauccauauaa

SEQ ID NO: 64535 - RNA, 23 nt, Artificial Sequence
  Synthetic
ccaauaccacaucauccauauaa

SEQ ID NO: 64536 - RNA, 24 nt, Artificial Sequence
  Synthetic
cccaauaccacaucauccauauaa

SEQ ID NO: 64537 - RNA, 18 nt, Artificial Sequence
  Synthetic
uugguaacagagguauaa

SEQ ID NO: 64538 - RNA, 19 nt, Artificial Sequence
  Synthetic
auugguaacagagguauaa

SEQ ID NO: 64539 - RNA, 20 nt, Artificial Sequence
  Synthetic
aauugguaacagagguauaa

SEQ ID NO: 64540 - RNA, 21 nt, Artificial Sequence
  Synthetic
aaauugguaacagagguauaa

SEQ ID NO: 64541 - RNA, 22 nt, Artificial Sequence
  Synthetic
aaaauugguaacagagguauaa

SEQ ID NO: 64542 - RNA, 23 nt, Artificial Sequence
  Synthetic
gaaaauugguaacagagguauaa

SEQ ID NO: 64543 - RNA, 24 nt, Artificial Sequence
  Synthetic
agaaaauugguaacagagguauaa

SEQ ID NO: 64544 - RNA, 18 nt, Artificial Sequence
  Synthetic
acaaaagaaaauugguaa

SEQ ID NO: 64545 - RNA, 19 nt, Artificial Sequence
  Synthetic
gacaaaagaaaauugguaa

SEQ ID NO: 64546 - RNA, 20 nt, Artificial Sequence
  Synthetic
agacaaaagaaaauugguaa

SEQ ID NO: 64547 - RNA, 21 nt, Artificial Sequence
  Synthetic
aagacaaaagaaaauugguaa

SEQ ID NO: 64548 - RNA, 22 nt, Artificial Sequence
  Synthetic
aaagacaaaagaaaauugguaa

SEQ ID NO: 64549 - RNA, 23 nt, Artificial Sequence
  Synthetic
caaagacaaaagaaaauugguaa

SEQ ID NO: 64550 - RNA, 24 nt, Artificial Sequence
  Synthetic
ccaaagacaaaagaaaauugguaa

SEQ ID NO: 64551 - RNA, 18 nt, Artificial Sequence
  Synthetic
  misc_feature (5)..(5): n is a, c, g, or u
gauanccacauuguguaa

SEQ ID NO: 64552 - RNA, 19 nt, Artificial Sequence
  Synthetic
  misc_feature (6)..(6): n is a, c, g, or u
ggauanccacauuguguaa

SEQ ID NO: 64553 - RNA, 20 nt, Artificial Sequence
  Synthetic
  misc_feature (7)..(7): n is a, c, g, or u
aggauanccacauuguguaa

SEQ ID NO: 64554 - RNA, 21 nt, Artificial Sequence
  Synthetic
  misc_feature (8)..(8): n is a, c, g, or u
caggauanccacauuguguaa

SEQ ID NO: 64555 - RNA, 22 nt, Artificial Sequence
  Synthetic
  misc_feature (9)..(9): n is a, c, g, or u
gcaggauanccacauuguguaa

SEQ ID NO: 64556 - RNA, 23 nt, Artificial Sequence
  Synthetic
  misc_feature (10)..(10): n is a, c, g, or u
agcaggauanccacauuguguaa

SEQ ID NO: 64557 - RNA, 24 nt, Artificial Sequence
  Synthetic
  misc_feature (11)..(11): n is a, c, g, or u
aagcaggauanccacauuguguaa

SEQ ID NO: 64558 - RNA, 18 nt, Artificial Sequence
  Synthetic
  misc_feature (14)..(14): n is a, c, g, or u
aaucaauaggccgnuuaa

SEQ ID NO: 64559 - RNA, 19 nt, Artificial Sequence
  Synthetic
  misc_feature (15)..(15): n is a, c, g, or u
caaucaauaggccgnuuaa

SEQ ID NO: 64560 - RNA, 20 nt, Artificial Sequence
  Synthetic
  misc_feature (16)..(16): n is a, c, g, or u
ccaaucaauaggccgnuuaa

SEQ ID NO: 64561 - RNA, 21 nt, Artificial Sequence
  Synthetic
  misc_feature (17)..(17): n is a, c, g, or u
uccaaucaauaggccgnuuaa

SEQ ID NO: 64562 - RNA, 22 nt, Artificial Sequence
  Synthetic
  misc_feature (18)..(18): n is a, c, g, or u
uuccaaucaauaggccgnuuaa

SEQ ID NO: 64563 - RNA, 23 nt, Artificial Sequence
  Synthetic
  misc_feature (19)..(19): n is a, c, g, or u
uuuccaaucaauaggccgnuuaa

SEQ ID NO: 64564 - RNA, 24 nt, Artificial Sequence
  Synthetic
  misc_feature (20)..(20): n is a, c, g, or u
cuuuccaaucaauaggccgnuuaa

SEQ ID NO: 64565 - RNA, 18 nt, Artificial Sequence
  Synthetic
agcaacaugagggaaaca

SEQ ID NO: 64566 - RNA, 19 nt, Artificial Sequence
  Synthetic
cagcaacaugagggaaaca

SEQ ID NO: 64567 - RNA, 20 nt, Artificial Sequence
  Synthetic
acagcaacaugagggaaaca

SEQ ID NO: 64568 - RNA, 21 nt, Artificial Sequence
  Synthetic
aacagcaacaugagggaaaca

SEQ ID NO: 64569 - RNA, 22 nt, Artificial Sequence
  Synthetic
gaacagcaacaugagggaaaca

SEQ ID NO: 64570 - RNA, 23 nt, Artificial Sequence
  Synthetic
ugaacagcaacaugagggaaaca

SEQ ID NO: 64571 - RNA, 24 nt, Artificial Sequence
  Synthetic
uugaacagcaacaugagggaaaca

SEQ ID NO: 64572 - RNA, 18 nt, Artificial Sequence
  Synthetic
guccaaggaauacuaaca

SEQ ID NO: 64573 - RNA, 19 nt, Artificial Sequence
  Synthetic
aguccaaggaauacuaaca

SEQ ID NO: 64574 - RNA, 20 nt, Artificial Sequence
  Synthetic
gaguccaaggaauacuaaca

SEQ ID NO: 64575 - RNA, 21 nt, Artificial Sequence
  Synthetic
ugaguccaaggaauacuaaca

SEQ ID NO: 64576 - RNA, 22 nt, Artificial Sequence
  Synthetic
gugaguccaaggaauacuaaca

SEQ ID NO: 64577 - RNA, 23 nt, Artificial Sequence
  Synthetic
ugugaguccaaggaauacuaaca

SEQ ID NO: 64578 - RNA, 24 nt, Artificial Sequence
  Synthetic
uugugaguccaaggaauacuaaca

SEQ ID NO: 64579 - RNA, 18 nt, Artificial Sequence
  Synthetic
aauuuuggccaagacaca

SEQ ID NO: 64580 - RNA, 19 nt, Artificial Sequence
  Synthetic
gaauuuuggccaagacaca

SEQ ID NO: 64581 - RNA, 20 nt, Artificial Sequence
  Synthetic
cgaauuuuggccaagacaca

SEQ ID NO: 64582 - RNA, 21 nt, Artificial Sequence
  Synthetic
gcgaauuuuggccaagacaca

SEQ ID NO: 64583 - RNA, 22 nt, Artificial Sequence
  Synthetic
ugcgaauuuuggccaagacaca

SEQ ID NO: 64584 - RNA, 23 nt, Artificial Sequence
  Synthetic
cugcgaauuuuggccaagacaca

SEQ ID NO: 64585 - RNA, 24 nt, Artificial Sequence
  Synthetic
acugcgaauuuuggccaagacaca

SEQ ID NO: 64586 - RNA, 18 nt, Artificial Sequence
  Synthetic
auaacugaaagccagaca

SEQ ID NO: 64587 - RNA, 19 nt, Artificial Sequence
  Synthetic
uauaacugaaagccagaca

SEQ ID NO: 64588 - RNA, 20 nt, Artificial Sequence
  Synthetic
auauaacugaaagccagaca

SEQ ID NO: 64589 - RNA, 21 nt, Artificial Sequence
  Synthetic
cauauaacugaaagccagaca

SEQ ID NO: 64590 - RNA, 22 nt, Artificial Sequence
  Synthetic
ccauauaacugaaagccagaca

SEQ ID NO: 64591 - RNA, 23 nt, Artificial Sequence
  Synthetic
uccauauaacugaaagccagaca

SEQ ID NO: 64592 - RNA, 24 nt, Artificial Sequence
  Synthetic
auccauauaacugaaagccagaca

SEQ ID NO: 64593 - RNA, 18 nt, Artificial Sequence
  Synthetic
gcugacgggacguagaca

SEQ ID NO: 64594 - RNA, 19 nt, Artificial Sequence
  Synthetic
cgcugacgggacguagaca

SEQ ID NO: 64595 - RNA, 20 nt, Artificial Sequence
  Synthetic
gcgcugacgggacguagaca

SEQ ID NO: 64596 - RNA, 21 nt, Artificial Sequence
  Synthetic
agcgcugacgggacguagaca

SEQ ID NO: 64597 - RNA, 22 nt, Artificial Sequence
  Synthetic
cagcgcugacgggacguagaca

SEQ ID NO: 64598 - RNA, 23 nt, Artificial Sequence
  Synthetic
ucagcgcugacgggacguagaca

SEQ ID NO: 64599 - RNA, 24 nt, Artificial Sequence
  Synthetic
uucagcgcugacgggacguagaca

SEQ ID NO: 64600 - RNA, 18 nt, Artificial Sequence
  Synthetic
  misc_feature (6)..(7): n is a, c, g, or u
guucannuauuguuuaca

SEQ ID NO: 64601 - RNA, 19 nt, Artificial Sequence
  Synthetic
  misc_feature (7)..(8): n is a, c, g, or u
gguucannuauuguuuaca

SEQ ID NO: 64602 - RNA, 20 nt, Artificial Sequence
  Synthetic
  misc_feature (8)..(9): n is a, c, g, or u
agguucannuauuguuuaca

SEQ ID NO: 64603 - RNA, 21 nt, Artificial Sequence
  Synthetic
  misc_feature (9)..(10): n is a, c, g, or u
aagguucannuauuguuuaca

SEQ ID NO: 64604 - RNA, 22 nt, Artificial Sequence
  Synthetic
  misc_feature (10)..(11): n is a, c, g, or u
aaagguucannuauuguuuaca

SEQ ID NO: 64605 - RNA, 23 nt, Artificial Sequence
  Synthetic
  misc_feature (11)..(12): n is a, c, g, or u
uaaagguucannuauuguuuaca

SEQ ID NO: 64606 - RNA, 24 nt, Artificial Sequence
  Synthetic
  misc_feature (12)..(13): n is a, c, g, or u
guaaagguucannuauuguuuaca

SEQ ID NO: 64607 - RNA, 18 nt, Artificial Sequence
  Synthetic
ggaaagcccggcgaacca

SEQ ID NO: 64608 - RNA, 19 nt, Artificial Sequence
  Synthetic
gggaaagcccggcgaacca

SEQ ID NO: 64609 - RNA, 20 nt, Artificial Sequence
  Synthetic
ggggaaagcccggcgaacca

SEQ ID NO: 64610 - RNA, 21 nt, Artificial Sequence
  Synthetic
gggggaaagcccggcgaacca

SEQ ID NO: 64611 - RNA, 22 nt, Artificial Sequence
  Synthetic
ugggggaaagcccggcgaacca

SEQ ID NO: 64612 - RNA, 23 nt, Artificial Sequence
  Synthetic
gugggggaaagcccggcgaacca

SEQ ID NO: 64613 - RNA, 24 nt, Artificial Sequence
  Synthetic
agugggggaaagcccggcgaacca

SEQ ID NO: 64614 - RNA, 18 nt, Artificial Sequence
  Synthetic
ggcugaggcccacuccca

SEQ ID NO: 64615 - RNA, 19 nt, Artificial Sequence
  Synthetic
gggcugaggcccacuccca

SEQ ID NO: 64616 - RNA, 20 nt, Artificial Sequence
  Synthetic
cgggcugaggcccacuccca

SEQ ID NO: 64617 - RNA, 21 nt, Artificial Sequence
  Synthetic
acgggcugaggcccacuccca

SEQ ID NO: 64618 - RNA, 22 nt, Artificial Sequence
  Synthetic
aacgggcugaggcccacuccca

SEQ ID NO: 64619 - RNA, 23 nt, Artificial Sequence
  Synthetic
aaacgggcugaggcccacuccca

SEQ ID NO: 64620 - RNA, 24 nt, Artificial Sequence
  Synthetic
gaaacgggcugaggcccacuccca

SEQ ID NO: 64621 - RNA, 18 nt, Artificial Sequence
  Synthetic
auggccaagccccagcca

SEQ ID NO: 64622 - RNA, 19 nt, Artificial Sequence
  Synthetic
uauggccaagccccagcca

SEQ ID NO: 64623 - RNA, 20 nt, Artificial Sequence
  Synthetic
cuauggccaagccccagcca

SEQ ID NO: 64624 - RNA, 21 nt, Artificial Sequence
  Synthetic
ccuauggccaagccccagcca

SEQ ID NO: 64625 - RNA, 22 nt, Artificial Sequence
  Synthetic
gccuauggccaagccccagcca

SEQ ID NO: 64626 - RNA, 23 nt, Artificial Sequence
  Synthetic
ggccuauggccaagccccagcca

SEQ ID NO: 64627 - RNA, 24 nt, Artificial Sequence
  Synthetic
uggccuauggccaagccccagcca

SEQ ID NO: 64628 - RNA, 18 nt, Artificial Sequence
  Synthetic
agcacagccuagcagcca

SEQ ID NO: 64629 - RNA, 19 nt, Artificial Sequence
  Synthetic
cagcacagccuagcagcca

SEQ ID NO: 64630 - RNA, 20 nt, Artificial Sequence
  Synthetic
gcagcacagccuagcagcca

SEQ ID NO: 64631 - RNA, 21 nt, Artificial Sequence
  Synthetic
ggcagcacagccuagcagcca

SEQ ID NO: 64632 - RNA, 22 nt, Artificial Sequence
  Synthetic
uggcagcacagccuagcagcca

SEQ ID NO: 64633 - RNA, 23 nt, Artificial Sequence
  Synthetic
uuggcagcacagccuagcagcca

SEQ ID NO: 64634 - RNA, 24 nt, Artificial Sequence
  Synthetic
guuggcagcacagccuagcagcca

SEQ ID NO: 64635 - RNA, 18 nt, Artificial Sequence
  Synthetic
ccgcaguauggaucggca

SEQ ID NO: 64636 - RNA, 19 nt, Artificial Sequence
  Synthetic
uccgcaguauggaucggca

SEQ ID NO: 64637 - RNA, 20 nt, Artificial Sequence
  Synthetic
uuccgcaguauggaucggca

SEQ ID NO: 64638 - RNA, 21 nt, Artificial Sequence
  Synthetic
guuccgcaguauggaucggca

SEQ ID NO: 64639 - RNA, 22 nt, Artificial Sequence
  Synthetic
aguuccgcaguauggaucggca

SEQ ID NO: 64640 - RNA, 23 nt, Artificial Sequence
  Synthetic
gaguuccgcaguauggaucggca

SEQ ID NO: 64641 - RNA, 24 nt, Artificial Sequence
  Synthetic
ggaguuccgcaguauggaucggca

SEQ ID NO: 64642 - RNA, 18 nt, Artificial Sequence
  Synthetic
  misc_feature (3)..(3): n is a, c, g, or u
ccnggccguugccgggca

SEQ ID NO: 64643 - RNA, 19 nt, Artificial Sequence
  Synthetic
  misc_feature (4)..(4): n is a, c, g, or u
accnggccguugccgggca

SEQ ID NO: 64644 - RNA, 20 nt, Artificial Sequence
  Synthetic
  misc_feature (5)..(5): n is a, c, g, or u
gaccnggccguugccgggca

SEQ ID NO: 64645 - RNA, 21 nt, Artificial Sequence
  Synthetic
  misc_feature (6)..(6): n is a, c, g, or u
agaccnggccguugccgggca

SEQ ID NO: 64646 - RNA, 22 nt, Artificial Sequence
  Synthetic
  misc_feature (7)..(7): n is a, c, g, or u
cagaccnggccguugccgggca

SEQ ID NO: 64647 - RNA, 23 nt, Artificial Sequence
  Synthetic
  misc_feature (8)..(8): n is a, c, g, or u
acagaccnggccguugccgggca

SEQ ID NO: 64648 - RNA, 24 nt, Artificial Sequence
  Synthetic
  misc_feature (9)..(9): n is a, c, g, or u
cacagaccnggccguugccgggca

SEQ ID NO: 64649 - RNA, 18 nt, Artificial Sequence
  Synthetic
ccggaaguguugauaaga

SEQ ID NO: 64650 - RNA, 19 nt, Artificial Sequence
  Synthetic
uccggaaguguugauaaga

SEQ ID NO: 64651 - RNA, 20 nt, Artificial Sequence
  Synthetic
cuccggaaguguugauaaga

SEQ ID NO: 64652 - RNA, 21 nt, Artificial Sequence
  Synthetic
ucuccggaaguguugauaaga

SEQ ID NO: 64653 - RNA, 22 nt, Artificial Sequence
  Synthetic
  misc_feature (1)..(1): n is a, c, g, or u
nucuccggaaguguugauaaga

SEQ ID NO: 64654 - RNA, 23 nt, Artificial Sequence
  Synthetic
  misc_feature (2)..(2): n is a, c, g, or u
anucuccggaaguguugauaaga

SEQ ID NO: 64655 - RNA, 24 nt, Artificial Sequence
  Synthetic
  misc_feature (3)..(3): n is a, c, g, or u
uanucuccggaaguguugauaaga

SEQ ID NO: 64656 - RNA, 18 nt, Artificial Sequence
  Synthetic
cagaugagaaggcacaga

SEQ ID NO: 64657 - RNA, 19 nt, Artificial Sequence
  Synthetic
gcagaugagaaggcacaga

SEQ ID NO: 64658 - RNA, 20 nt, Artificial Sequence
  Synthetic
ggcagaugagaaggcacaga

SEQ ID NO: 64659 - RNA, 21 nt, Artificial Sequence
  Synthetic
cggcagaugagaaggcacaga

SEQ ID NO: 64660 - RNA, 22 nt, Artificial Sequence
  Synthetic
ccggcagaugagaaggcacaga

SEQ ID NO: 64661 - RNA, 23 nt, Artificial Sequence
  Synthetic
uccggcagaugagaaggcacaga

SEQ ID NO: 64662 - RNA, 24 nt, Artificial Sequence
  Synthetic
guccggcagaugagaaggcacaga

SEQ ID NO: 64663 - RNA, 18 nt, Artificial Sequence
  Synthetic
  misc_feature (7)..(7): n is a, c, g, or u
gucggcnggaacggcaga

SEQ ID NO: 64664 - RNA, 19 nt, Artificial Sequence
  Synthetic
  misc_feature (8)..(8): n is a, c, g, or u
ggucggcnggaacggcaga

SEQ ID NO: 64665 - RNA, 20 nt, Artificial Sequence
  Synthetic
  misc_feature (9)..(9): n is a, c, g, or u
uggucggcnggaacggcaga

SEQ ID NO: 64666 - RNA, 21 nt, Artificial Sequence
  Synthetic
  misc_feature (10)..(10): n is a, c, g, or u
guggucggcnggaacggcaga

SEQ ID NO: 64667 - RNA, 22 nt, Artificial Sequence
  Synthetic
  misc_feature (11)..(11): n is a, c, g, or u
cguggucggcnggaacggcaga

SEQ ID NO: 64668 - RNA, 23 nt, Artificial Sequence
  Synthetic
  misc_feature (12)..(12): n is a, c, g, or u
ccguggucggcnggaacggcaga

SEQ ID NO: 64669 - RNA, 24 nt, Artificial Sequence
  Synthetic
  misc_feature (13)..(13): n is a, c, g, or u
cccguggucggcnggaacggcaga

SEQ ID NO: 64670 - RNA, 18 nt, Artificial Sequence
  Synthetic
  misc_feature (2)..(2): n is a, c, g, or u
  misc_feature (11)..(11): n is a, c, g, or u
gnaaauauuunguagaga

SEQ ID NO: 64671 - RNA, 19 nt, Artificial Sequence
  Synthetic
  misc_feature (3)..(3): n is a, c, g, or u
  misc_feature (12)..(12): n is a, c, g, or u
ggnaaauauuunguagaga

SEQ ID NO: 64672 - RNA, 20 nt, Artificial Sequence
  Synthetic
  misc_feature (4)..(4): n is a, c, g, or u
  misc_feature (13)..(13): n is a, c, g, or u
gggnaaauauuunguagaga

SEQ ID NO: 64673 - RNA, 21 nt, Artificial Sequence
  Synthetic
  misc_feature (5)..(5): n is a, c, g, or u
  misc_feature (14)..(14): n is a, c, g, or u
ggggnaaauauuunguagaga

SEQ ID NO: 64674 - RNA, 22 nt, Artificial Sequence
  Synthetic
  misc_feature (6)..(6): n is a, c, g, or u
  misc_feature (15)..(15): n is a, c, g, or u
aggggnaaauauuunguagaga

SEQ ID NO: 64675 - RNA, 23 nt, Artificial Sequence
  Synthetic
  misc_feature (7)..(7): n is a, c, g, or u
  misc_feature (16)..(16): n is a, c, g, or u
uaggggnaaauauuunguagaga

SEQ ID NO: 64676 - RNA, 24 nt, Artificial Sequence
  Synthetic
  misc_feature (8)..(8): n is a, c, g, or u
  misc_feature (17)..(17): n is a, c, g, or u
cuaggggnaaauauuunguagaga

SEQ ID NO: 64677 - RNA, 18 nt, Artificial Sequence
  Synthetic
  misc_feature (1)..(1): n is a, c, g, or u
nggaacggcagacggaga

SEQ ID NO: 64678 - RNA, 19 nt, Artificial Sequence
  Synthetic
  misc_feature (2)..(2): n is a, c, g, or u
cnggaacggcagacggaga

SEQ ID NO: 64679 - RNA, 20 nt, Artificial Sequence
  Synthetic
  misc_feature (3)..(3): n is a, c, g, or u
gcnggaacggcagacggaga

SEQ ID NO: 64680 - RNA, 21 nt, Artificial Sequence
  Synthetic
  misc_feature (4)..(4): n is a, c, g, or u
ggcnggaacggcagacggaga

SEQ ID NO: 64681 - RNA, 22 nt, Artificial Sequence
  Synthetic
  misc_feature (5)..(5): n is a, c, g, or u
cggcnggaacggcagacggaga

SEQ ID NO: 64682 - RNA, 23 nt, Artificial Sequence
  Synthetic
  misc_feature (6)..(6): n is a, c, g, or u
ucggcnggaacggcagacggaga

SEQ ID NO: 64683 - RNA, 24 nt, Artificial Sequence
  Synthetic
  misc_feature (7)..(7): n is a, c, g, or u
gucggcnggaacggcagacggaga

SEQ ID NO: 64684 - RNA, 18 nt, Artificial Sequence
  Synthetic
acauugggaagcuggaga

SEQ ID NO: 64685 - RNA, 19 nt, Artificial Sequence
  Synthetic
aacauugggaagcuggaga

SEQ ID NO: 64686 - RNA, 20 nt, Artificial Sequence
  Synthetic
uaacauugggaagcuggaga

SEQ ID NO: 64687 - RNA, 21 nt, Artificial Sequence
  Synthetic
cuaacauugggaagcuggaga

SEQ ID NO: 64688 - RNA, 22 nt, Artificial Sequence
  Synthetic
acuaacauugggaagcuggaga

SEQ ID NO: 64689 - RNA, 23 nt, Artificial Sequence
  Synthetic
uacuaacauugggaagcuggaga

SEQ ID NO: 64690 - RNA, 24 nt, Artificial Sequence
  Synthetic
auacuaacauugggaagcuggaga

SEQ ID NO: 64691 - RNA, 18 nt, Artificial Sequence
  Synthetic
ucuucugcgacgcggcga

SEQ ID NO: 64692 - RNA, 19 nt, Artificial Sequence
  Synthetic
aucuucugcgacgcggcga

SEQ ID NO: 64693 - RNA, 20 nt, Artificial Sequence
  Synthetic
gaucuucugcgacgcggcga

SEQ ID NO: 64694 - RNA, 21 nt, Artificial Sequence
  Synthetic
agaucuucugcgacgcggcga

SEQ ID NO: 64695 - RNA, 22 nt, Artificial Sequence
  Synthetic
gagaucuucugcgacgcggcga

SEQ ID NO: 64696 - RNA, 23 nt, Artificial Sequence
  Synthetic
ugagaucuucugcgacgcggcga

SEQ ID NO: 64697 - RNA, 24 nt, Artificial Sequence
  Synthetic
uugagaucuucugcgacgcggcga

SEQ ID NO: 64698 - RNA, 18 nt, Artificial Sequence
  Synthetic
gauucuucccccauucga

SEQ ID NO: 64699 - RNA, 19 nt, Artificial Sequence
  Synthetic
ugauucuucccccauucga

SEQ ID NO: 64700 - RNA, 20 nt, Artificial Sequence
  Synthetic
augauucuucccccauucga

SEQ ID NO: 64701 - RNA, 21 nt, Artificial Sequence
  Synthetic
aaugauucuucccccauucga

SEQ ID NO: 64702 - RNA, 22 nt, Artificial Sequence
  Synthetic
gaaugauucuucccccauucga

SEQ ID NO: 64703 - RNA, 23 nt, Artificial Sequence
  Synthetic
ggaaugauucuucccccauucga

SEQ ID NO: 64704 - RNA, 24 nt, Artificial Sequence
  Synthetic
uggaaugauucuucccccauucga

SEQ ID NO: 64705 - RNA, 18 nt, Artificial Sequence
  Synthetic
agaucucuuacugaagga

SEQ ID NO: 64706 - RNA, 19 nt, Artificial Sequence
  Synthetic
aagaucucuuacugaagga

SEQ ID NO: 64707 - RNA, 20 nt, Artificial Sequence
  Synthetic
gaagaucucuuacugaagga

SEQ ID NO: 64708 - RNA, 21 nt, Artificial Sequence
  Synthetic
agaagaucucuuacugaagga

SEQ ID NO: 64709 - RNA, 22 nt, Artificial Sequence
  Synthetic
uagaagaucucuuacugaagga

SEQ ID NO: 64710 - RNA, 23 nt, Artificial Sequence
  Synthetic
cuagaagaucucuuacugaagga

SEQ ID NO: 64711 - RNA, 24 nt, Artificial Sequence
  Synthetic
ucuagaagaucucuuacugaagga

SEQ ID NO: 64712 - RNA, 18 nt, Artificial Sequence
  Synthetic
  misc_feature (1)..(1): n is a, c, g, or u
ngauguauauuuccggga

SEQ ID NO: 64713 - RNA, 19 nt, Artificial Sequence
  Synthetic
  misc_feature (2)..(2): n is a, c, g, or u
angauguauauuuccggga

SEQ ID NO: 64714 - RNA, 20 nt, Artificial Sequence
  Synthetic
  misc_feature (3)..(3): n is a, c, g, or u
aangauguauauuuccggga

SEQ ID NO: 64715 - RNA, 21 nt, Artificial Sequence
  Synthetic
  misc_feature (4)..(4): n is a, c, g, or u
aaangauguauauuuccggga

SEQ ID NO: 64716 - RNA, 22 nt, Artificial Sequence
  Synthetic
  misc_feature (5)..(5): n is a, c, g, or u
gaaangauguauauuuccggga

SEQ ID NO: 64717 - RNA, 23 nt, Artificial Sequence
  Synthetic
  misc_feature (6)..(6): n is a, c, g, or u
ggaaangauguauauuuccggga

SEQ ID NO: 64718 - RNA, 24 nt, Artificial Sequence
  Synthetic
  misc_feature (7)..(7): n is a, c, g, or u
uggaaangauguauauuuccggga

SEQ ID NO: 64719 - RNA, 18 nt, Artificial Sequence
  Synthetic
aggccuccguguggggga

SEQ ID NO: 64720 - RNA, 19 nt, Artificial Sequence
  Synthetic
aaggccuccguguggggga

SEQ ID NO: 64721 - RNA, 20 nt, Artificial Sequence
  Synthetic
aaaggccuccguguggggga

SEQ ID NO: 64722 - RNA, 21 nt, Artificial Sequence
  Synthetic
aaaaggccuccguguggggga

SEQ ID NO: 64723 - RNA, 22 nt, Artificial Sequence
  Synthetic
caaaaggccuccguguggggga

SEQ ID NO: 64724 - RNA, 23 nt, Artificial Sequence
  Synthetic
ccaaaaggccuccguguggggga

SEQ ID NO: 64725 - RNA, 24 nt, Artificial Sequence
  Synthetic
cccaaaaggccuccguguggggga

SEQ ID NO: 64726 - RNA, 18 nt, Artificial Sequence
  Synthetic
aagcccaugaugauggga

SEQ ID NO: 64727 - RNA, 19 nt, Artificial Sequence
  Synthetic
aaagcccaugaugauggga

SEQ ID NO: 64728 - RNA, 20 nt, Artificial Sequence
  Synthetic
gaaagcccaugaugauggga

SEQ ID NO: 64729 - RNA, 21 nt, Artificial Sequence
  Synthetic
cgaaagcccaugaugauggga

SEQ ID NO: 64730 - RNA, 22 nt, Artificial Sequence
  Synthetic
ccgaaagcccaugaugauggga

SEQ ID NO: 64731 - RNA, 23 nt, Artificial Sequence
  Synthetic
uccgaaagcccaugaugauggga

SEQ ID NO: 64732 - RNA, 24 nt, Artificial Sequence
  Synthetic
uuccgaaagcccaugaugauggga

SEQ ID NO: 64733 - RNA, 18 nt, Artificial Sequence
  Synthetic
uuuugaacagcaacauga

SEQ ID NO: 64734 - RNA, 19 nt, Artificial Sequence
  Synthetic
guuuugaacagcaacauga

SEQ ID NO: 64735 - RNA, 20 nt, Artificial Sequence
  Synthetic
gguuuugaacagcaacauga

SEQ ID NO: 64736 - RNA, 21 nt, Artificial Sequence
  Synthetic
agguuuugaacagcaacauga

SEQ ID NO: 64737 - RNA, 22 nt, Artificial Sequence
  Synthetic
aagguuuugaacagcaacauga

SEQ ID NO: 64738 - RNA, 23 nt, Artificial Sequence
  Synthetic
gaagguuuugaacagcaacauga

SEQ ID NO: 64739 - RNA, 24 nt, Artificial Sequence
  Synthetic
cgaagguuuugaacagcaacauga

SEQ ID NO: 64740 - RNA, 18 nt, Artificial Sequence
  Synthetic
agaagauugacgagauga

SEQ ID NO: 64741 - RNA, 19 nt, Artificial Sequence
  Synthetic
gagaagauugacgagauga

SEQ ID NO: 64742 - RNA, 20 nt, Artificial Sequence
  Synthetic
cgagaagauugacgagauga

SEQ ID NO: 64743 - RNA, 21 nt, Artificial Sequence
  Synthetic
ucgagaagauugacgagauga

SEQ ID NO: 64744 - RNA, 22 nt, Artificial Sequence
  Synthetic
cucgagaagauugacgagauga

SEQ ID NO: 64745 - RNA, 23 nt, Artificial Sequence
  Synthetic
ccucgagaagauugacgagauga

SEQ ID NO: 64746 - RNA, 24 nt, Artificial Sequence
  Synthetic
uccucgagaagauugacgagauga

SEQ ID NO: 64747 - RNA, 18 nt, Artificial Sequence
  Synthetic
uagaagaucucuuacuga

SEQ ID NO: 64748 - RNA, 19 nt, Artificial Sequence
  Synthetic
cuagaagaucucuuacuga

SEQ ID NO: 64749 - RNA, 20 nt, Artificial Sequence
  Synthetic
ucuagaagaucucuuacuga

SEQ ID NO: 64750 - RNA, 21 nt, Artificial Sequence
  Synthetic
aucuagaagaucucuuacuga

SEQ ID NO: 64751 - RNA, 22 nt, Artificial Sequence
  Synthetic
uaucuagaagaucucuuacuga

SEQ ID NO: 64752 - RNA, 23 nt, Artificial Sequence
  Synthetic
guaucuagaagaucucuuacuga

SEQ ID NO: 64753 - RNA, 24 nt, Artificial Sequence
  Synthetic
gguaucuagaagaucucuuacuga

SEQ ID NO: 64754 - RNA, 18 nt, Artificial Sequence
  Synthetic
cgcaggauucagcgcuga

SEQ ID NO: 64755 - RNA, 19 nt, Artificial Sequence
  Synthetic
ccgcaggauucagcgcuga

SEQ ID NO: 64756 - RNA, 20 nt, Artificial Sequence
  Synthetic
uccgcaggauucagcgcuga

SEQ ID NO: 64757 - RNA, 21 nt, Artificial Sequence
  Synthetic
guccgcaggauucagcgcuga

SEQ ID NO: 64758 - RNA, 22 nt, Artificial Sequence
  Synthetic
cguccgcaggauucagcgcuga

SEQ ID NO: 64759 - RNA, 23 nt, Artificial Sequence
  Synthetic
ucguccgcaggauucagcgcuga

SEQ ID NO: 64760 - RNA, 24 nt, Artificial Sequence
  Synthetic
gucguccgcaggauucagcgcuga

SEQ ID NO: 64761 - RNA, 18 nt, Artificial Sequence
  Synthetic
cucucaaagguggaguga

SEQ ID NO: 64762 - RNA, 19 nt, Artificial Sequence
  Synthetic
ucucucaaagguggaguga

SEQ ID NO: 64763 - RNA, 20 nt, Artificial Sequence
  Synthetic
gucucucaaagguggaguga

SEQ ID NO: 64764 - RNA, 21 nt, Artificial Sequence
  Synthetic
ugucucucaaagguggaguga

SEQ ID NO: 64765 - RNA, 22 nt, Artificial Sequence
  Synthetic
gugucucucaaagguggaguga

SEQ ID NO: 64766 - RNA, 23 nt, Artificial Sequence
  Synthetic
agugucucucaaagguggaguga

SEQ ID NO: 64767 - RNA, 24 nt, Artificial Sequence
  Synthetic
gagugucucucaaagguggaguga

SEQ ID NO: 64768 - RNA, 18 nt, Artificial Sequence
  Synthetic
caagagguuggugaguga

SEQ ID NO: 64769 - RNA, 19 nt, Artificial Sequence
  Synthetic
acaagagguuggugaguga

SEQ ID NO: 64770 - RNA, 20 nt, Artificial Sequence
  Synthetic
gacaagagguuggugaguga

SEQ ID NO: 64771 - RNA, 21 nt, Artificial Sequence
  Synthetic
ggacaagagguuggugaguga

SEQ ID NO: 64772 - RNA, 22 nt, Artificial Sequence
  Synthetic
aggacaagagguuggugaguga

SEQ ID NO: 64773 - RNA, 23 nt, Artificial Sequence
  Synthetic
gaggacaagagguuggugaguga

SEQ ID NO: 64774 - RNA, 24 nt, Artificial Sequence
  Synthetic
ggaggacaagagguuggugaguga

SEQ ID NO: 64775 - RNA, 18 nt, Artificial Sequence
  Synthetic
cucccccuagaaaauuga

SEQ ID NO: 64776 - RNA, 19 nt, Artificial Sequence
  Synthetic
gcucccccuagaaaauuga

SEQ ID NO: 64777 - RNA, 20 nt, Artificial Sequence
  Synthetic
agcucccccuagaaaauuga

SEQ ID NO: 64778 - RNA, 21 nt, Artificial Sequence
  Synthetic
gagcucccccuagaaaauuga

SEQ ID NO: 64779 - RNA, 22 nt, Artificial Sequence
  Synthetic
ggagcucccccuagaaaauuga

SEQ ID NO: 64780 - RNA, 23 nt, Artificial Sequence
  Synthetic
gggagcucccccuagaaaauuga

SEQ ID NO: 64781 - RNA, 24 nt, Artificial Sequence
  Synthetic
cgggagcucccccuagaaaauuga

SEQ ID NO: 64782 - RNA, 18 nt, Artificial Sequence
  Synthetic
agauugaauacacgcaua

SEQ ID NO: 64783 - RNA, 19 nt, Artificial Sequence
  Synthetic
uagauugaauacacgcaua

SEQ ID NO: 64784 - RNA, 20 nt, Artificial Sequence
  Synthetic
uuagauugaauacacgcaua

SEQ ID NO: 64785 - RNA, 21 nt, Artificial Sequence
  Synthetic
cuuagauugaauacacgcaua

SEQ ID NO: 64786 - RNA, 22 nt, Artificial Sequence
  Synthetic
gcuuagauugaauacacgcaua

SEQ ID NO: 64787 - RNA, 23 nt, Artificial Sequence
  Synthetic
ugcuuagauugaauacacgcaua

SEQ ID NO: 64788 - RNA, 24 nt, Artificial Sequence
  Synthetic
cugcuuagauugaauacacgcaua

SEQ ID NO: 64789 - RNA, 18 nt, Artificial Sequence
  Synthetic
uucuaaggcaucccgaua

SEQ ID NO: 64790 - RNA, 19 nt, Artificial Sequence
  Synthetic
auucuaaggcaucccgaua

SEQ ID NO: 64791 - RNA, 20 nt, Artificial Sequence
  Synthetic
gauucuaaggcaucccgaua

SEQ ID NO: 64792 - RNA, 21 nt, Artificial Sequence
  Synthetic
agauucuaaggcaucccgaua

SEQ ID NO: 64793 - RNA, 22 nt, Artificial Sequence
  Synthetic
gagauucuaaggcaucccgaua

SEQ ID NO: 64794 - RNA, 23 nt, Artificial Sequence
  Synthetic
ggagauucuaaggcaucccgaua

SEQ ID NO: 64795 - RNA, 24 nt, Artificial Sequence
  Synthetic
aggagauucuaaggcaucccgaua

SEQ ID NO: 64796 - RNA, 18 nt, Artificial Sequence
  Synthetic
auugguaacagagguaua

SEQ ID NO: 64797 - RNA, 19 nt, Artificial Sequence
  Synthetic
aauugguaacagagguaua

SEQ ID NO: 64798 - RNA, 20 nt, Artificial Sequence
  Synthetic
aaauugguaacagagguaua

SEQ ID NO: 64799 - RNA, 21 nt, Artificial Sequence
  Synthetic
aaaauugguaacagagguaua

SEQ ID NO: 64800 - RNA, 22 nt, Artificial Sequence
  Synthetic
gaaaauugguaacagagguaua

SEQ ID NO: 64801 - RNA, 23 nt, Artificial Sequence
  Synthetic
agaaaauugguaacagagguaua

SEQ ID NO: 64802 - RNA, 24 nt, Artificial Sequence
  Synthetic
aagaaaauugguaacagagguaua

SEQ ID NO: 64803 - RNA, 18 nt, Artificial Sequence
  Synthetic
gagggaguucuucuucua

SEQ ID NO: 64804 - RNA, 19 nt, Artificial Sequence
  Synthetic
cgagggaguucuucuucua

SEQ ID NO: 64805 - RNA, 20 nt, Artificial Sequence
  Synthetic
gcgagggaguucuucuucua

SEQ ID NO: 64806 - RNA, 21 nt, Artificial Sequence
  Synthetic
ggcgagggaguucuucuucua

SEQ ID NO: 64807 - RNA, 22 nt, Artificial Sequence
  Synthetic
aggcgagggaguucuucuucua

SEQ ID NO: 64808 - RNA, 23 nt, Artificial Sequence
  Synthetic
gaggcgagggaguucuucuucua

SEQ ID NO: 64809 - RNA, 24 nt, Artificial Sequence
  Synthetic
cgaggcgagggaguucuucuucua

SEQ ID NO: 64810 - RNA, 18 nt, Artificial Sequence
  Synthetic
agacggggagaccgcgua

SEQ ID NO: 64811 - RNA, 19 nt, Artificial Sequence
  Synthetic
cagacggggagaccgcgua

SEQ ID NO: 64812 - RNA, 20 nt, Artificial Sequence
  Synthetic
acagacggggagaccgcgua

SEQ ID NO: 64813 - RNA, 21 nt, Artificial Sequence
  Synthetic
cacagacggggagaccgcgua

SEQ ID NO: 64814 - RNA, 22 nt, Artificial Sequence
  Synthetic
gcacagacggggagaccgcgua

SEQ ID NO: 64815 - RNA, 23 nt, Artificial Sequence
  Synthetic
ggcacagacggggagaccgcgua

SEQ ID NO: 64816 - RNA, 24 nt, Artificial Sequence
  Synthetic
aggcacagacggggagaccgcgua

SEQ ID NO: 64817 - RNA, 18 nt, Artificial Sequence
  Synthetic
uugaugauccuggaauua

SEQ ID NO: 64818 - RNA, 19 nt, Artificial Sequence
  Synthetic
guugaugauccuggaauua

SEQ ID NO: 64819 - RNA, 20 nt, Artificial Sequence
  Synthetic
gguugaugauccuggaauua

SEQ ID NO: 64820 - RNA, 21 nt, Artificial Sequence
  Synthetic
ugguugaugauccuggaauua

SEQ ID NO: 64821 - RNA, 22 nt, Artificial Sequence
  Synthetic
gugguugaugauccuggaauua

SEQ ID NO: 64822 - RNA, 23 nt, Artificial Sequence
  Synthetic
ggugguugaugauccuggaauua

SEQ ID NO: 64823 - RNA, 24 nt, Artificial Sequence
  Synthetic
uggugguugaugauccuggaauua

SEQ ID NO: 64824 - RNA, 18 nt, Artificial Sequence
  Synthetic
uaucuagaagaucucuua

SEQ ID NO: 64825 - RNA, 19 nt, Artificial Sequence
  Synthetic
guaucuagaagaucucuua

SEQ ID NO: 64826 - RNA, 20 nt, Artificial Sequence
  Synthetic
gguaucuagaagaucucuua

SEQ ID NO: 64827 - RNA, 21 nt, Artificial Sequence
  Synthetic
cgguaucuagaagaucucuua

SEQ ID NO: 64828 - RNA, 22 nt, Artificial Sequence
  Synthetic
gcgguaucuagaagaucucuua

SEQ ID NO: 64829 - RNA, 23 nt, Artificial Sequence
  Synthetic
ggcgguaucuagaagaucucuua

SEQ ID NO: 64830 - RNA, 24 nt, Artificial Sequence
  Synthetic
aggcgguaucuagaagaucucuua

SEQ ID NO: 64831 - RNA, 18 nt, Artificial Sequence
  Synthetic
guuuuucauuuacuguua

SEQ ID NO: 64832 - RNA, 19 nt, Artificial Sequence
  Synthetic
cguuuuucauuuacuguua

SEQ ID NO: 64833 - RNA, 20 nt, Artificial Sequence
  Synthetic
ucguuuuucauuuacuguua

SEQ ID NO: 64834 - RNA, 21 nt, Artificial Sequence
  Synthetic
uucguuuuucauuuacuguua

SEQ ID NO: 64835 - RNA, 22 nt, Artificial Sequence
  Synthetic
cuucguuuuucauuuacuguua

SEQ ID NO: 64836 - RNA, 23 nt, Artificial Sequence
  Synthetic
ucuucguuuuucauuuacuguua

SEQ ID NO: 64837 - RNA, 24 nt, Artificial Sequence
  Synthetic
aucuucguuuuucauuuacuguua

SEQ ID NO: 64838 - RNA, 18 nt, Artificial Sequence
  Synthetic
uaguccagaagaaccaac

SEQ ID NO: 64839 - RNA, 19 nt, Artificial Sequence
  Synthetic
auaguccagaagaaccaac

SEQ ID NO: 64840 - RNA, 20 nt, Artificial Sequence
  Synthetic
gauaguccagaagaaccaac

SEQ ID NO: 64841 - RNA, 21 nt, Artificial Sequence
  Synthetic
ugauaguccagaagaaccaac

SEQ ID NO: 64842 - RNA, 22 nt, Artificial Sequence
  Synthetic
uugauaguccagaagaaccaac

SEQ ID NO: 64843 - RNA, 23 nt, Artificial Sequence
  Synthetic
cuugauaguccagaagaaccaac

SEQ ID NO: 64844 - RNA, 24 nt, Artificial Sequence
  Synthetic
ccuugauaguccagaagaaccaac

SEQ ID NO: 64845 - RNA, 18 nt, Artificial Sequence
  Synthetic
aagguuuugaacagcaac

SEQ ID NO: 64846 - RNA, 19 nt, Artificial Sequence
  Synthetic
gaagguuuugaacagcaac

SEQ ID NO: 64847 - RNA, 20 nt, Artificial Sequence
  Synthetic
cgaagguuuugaacagcaac

SEQ ID NO: 64848 - RNA, 21 nt, Artificial Sequence
  Synthetic
ccgaagguuuugaacagcaac

SEQ ID NO: 64849 - RNA, 22 nt, Artificial Sequence
  Synthetic
uccgaagguuuugaacagcaac

SEQ ID NO: 64850 - RNA, 23 nt, Artificial Sequence
  Synthetic
guccgaagguuuugaacagcaac

SEQ ID NO: 64851 - RNA, 24 nt, Artificial Sequence
  Synthetic
cguccgaagguuuugaacagcaac

SEQ ID NO: 64852 - RNA, 18 nt, Artificial Sequence
  Synthetic
gugaggauuuuugucaac

SEQ ID NO: 64853 - RNA, 19 nt, Artificial Sequence
  Synthetic
ugugaggauuuuugucaac

SEQ ID NO: 64854 - RNA, 20 nt, Artificial Sequence
  Synthetic
uugugaggauuuuugucaac

SEQ ID NO: 64855 - RNA, 21 nt, Artificial Sequence
  Synthetic
auugugaggauuuuugucaac

SEQ ID NO: 64856 - RNA, 22 nt, Artificial Sequence
  Synthetic
uauugugaggauuuuugucaac

SEQ ID NO: 64857 - RNA, 23 nt, Artificial Sequence
  Synthetic
guauugugaggauuuuugucaac

SEQ ID NO: 64858 - RNA, 24 nt, Artificial Sequence
  Synthetic
gguauugugaggauuuuugucaac

SEQ ID NO: 64859 - RNA, 18 nt, Artificial Sequence
  Synthetic
gguucacuguuccggaac

SEQ ID NO: 64860 - RNA, 19 nt, Artificial Sequence
  Synthetic
ggguucacuguuccggaac

SEQ ID NO: 64861 - RNA, 20 nt, Artificial Sequence
  Synthetic
aggguucacuguuccggaac

SEQ ID NO: 64862 - RNA, 21 nt, Artificial Sequence
  Synthetic
caggguucacuguuccggaac

SEQ ID NO: 64863 - RNA, 22 nt, Artificial Sequence
  Synthetic
acaggguucacuguuccggaac

SEQ ID NO: 64864 - RNA, 23 nt, Artificial Sequence
  Synthetic
aacaggguucacuguuccggaac

SEQ ID NO: 64865 - RNA, 24 nt, Artificial Sequence
  Synthetic
gaacaggguucacuguuccggaac

SEQ ID NO: 64866 - RNA, 18 nt, Artificial Sequence
  Synthetic
gaacaguaggacaugaac

SEQ ID NO: 64867 - RNA, 19 nt, Artificial Sequence
  Synthetic
ugaacaguaggacaugaac

SEQ ID NO: 64868 - RNA, 20 nt, Artificial Sequence
  Synthetic
uugaacaguaggacaugaac

SEQ ID NO: 64869 - RNA, 21 nt, Artificial Sequence
  Synthetic
cuugaacaguaggacaugaac

SEQ ID NO: 64870 - RNA, 22 nt, Artificial Sequence
  Synthetic
gcuugaacaguaggacaugaac

SEQ ID NO: 64871 - RNA, 23 nt, Artificial Sequence
  Synthetic
ggcuugaacaguaggacaugaac

SEQ ID NO: 64872 - RNA, 24 nt, Artificial Sequence
  Synthetic
aggcuugaacaguaggacaugaac

SEQ ID NO: 64873 - RNA, 18 nt, Artificial Sequence
  Synthetic
aaaaaccccgccuguaac

SEQ ID NO: 64874 - RNA, 19 nt, Artificial Sequence
  Synthetic
gaaaaaccccgccuguaac

SEQ ID NO: 64875 - RNA, 20 nt, Artificial Sequence
  Synthetic
agaaaaaccccgccuguaac

SEQ ID NO: 64876 - RNA, 21 nt, Artificial Sequence
  Synthetic
aagaaaaaccccgccuguaac

SEQ ID NO: 64877 - RNA, 22 nt, Artificial Sequence
  Synthetic
caagaaaaaccccgccuguaac

SEQ ID NO: 64878 - RNA, 23 nt, Artificial Sequence
  Synthetic
acaagaaaaaccccgccuguaac

SEQ ID NO: 64879 - RNA, 24 nt, Artificial Sequence
  Synthetic
aacaagaaaaaccccgccuguaac

SEQ ID NO: 64880 - RNA, 18 nt, Artificial Sequence
  Synthetic
  misc_feature (13)..(13): n is a, c, g, or u
aucaauaggccgnuuaac

SEQ ID NO: 64881 - RNA, 19 nt, Artificial Sequence
  Synthetic
  misc_feature (14)..(14): n is a, c, g, or u
aaucaauaggccgnuuaac

SEQ ID NO: 64882 - RNA, 20 nt, Artificial Sequence
  Synthetic
  misc_feature (15)..(15): n is a, c, g, or u
caaucaauaggccgnuuaac

SEQ ID NO: 64883 - RNA, 21 nt, Artificial Sequence
  Synthetic
  misc_feature (16)..(16): n is a, c, g, or u
ccaaucaauaggccgnuuaac

SEQ ID NO: 64884 - RNA, 22 nt, Artificial Sequence
  Synthetic
  misc_feature (17)..(17): n is a, c, g, or u
uccaaucaauaggccgnuuaac

SEQ ID NO: 64885 - RNA, 23 nt, Artificial Sequence
  Synthetic
  misc_feature (18)..(18): n is a, c, g, or u
uuccaaucaauaggccgnuuaac

SEQ ID NO: 64886 - RNA, 24 nt, Artificial Sequence
  Synthetic
  misc_feature (19)..(19): n is a, c, g, or u
uuuccaaucaauaggccgnuuaac

SEQ ID NO: 64887 - RNA, 18 nt, Artificial Sequence
  Synthetic
auuuuggccaagacacac

SEQ ID NO: 64888 - RNA, 19 nt, Artificial Sequence
  Synthetic
aauuuuggccaagacacac

SEQ ID NO: 64889 - RNA, 20 nt, Artificial Sequence
  Synthetic
gaauuuuggccaagacacac

SEQ ID NO: 64890 - RNA, 21 nt, Artificial Sequence
  Synthetic
cgaauuuuggccaagacacac

SEQ ID NO: 64891 - RNA, 22 nt, Artificial Sequence
  Synthetic
gcgaauuuuggccaagacacac

SEQ ID NO: 64892 - RNA, 23 nt, Artificial Sequence
  Synthetic
ugcgaauuuuggccaagacacac

SEQ ID NO: 64893 - RNA, 24 nt, Artificial Sequence
  Synthetic
cugcgaauuuuggccaagacacac

SEQ ID NO: 64894 - RNA, 18 nt, Artificial Sequence
  Synthetic
gaauuuuggccaagacac

SEQ ID NO: 64895 - RNA, 19 nt, Artificial Sequence
  Synthetic
cgaauuuuggccaagacac

SEQ ID NO: 64896 - RNA, 20 nt, Artificial Sequence
  Synthetic
gcgaauuuuggccaagacac

SEQ ID NO: 64897 - RNA, 21 nt, Artificial Sequence
  Synthetic
ugcgaauuuuggccaagacac

SEQ ID NO: 64898 - RNA, 22 nt, Artificial Sequence
  Synthetic
cugcgaauuuuggccaagacac

SEQ ID NO: 64899 - RNA, 23 nt, Artificial Sequence
  Synthetic
acugcgaauuuuggccaagacac

SEQ ID NO: 64900 - RNA, 24 nt, Artificial Sequence
  Synthetic
gacugcgaauuuuggccaagacac

SEQ ID NO: 64901 - RNA, 18 nt, Artificial Sequence
  Synthetic
agaugagaaggcacagac

SEQ ID NO: 64902 - RNA, 19 nt, Artificial Sequence
  Synthetic
cagaugagaaggcacagac

SEQ ID NO: 64903 - RNA, 20 nt, Artificial Sequence
  Synthetic
gcagaugagaaggcacagac

SEQ ID NO: 64904 - RNA, 21 nt, Artificial Sequence
  Synthetic
ggcagaugagaaggcacagac

SEQ ID NO: 64905 - RNA, 22 nt, Artificial Sequence
  Synthetic
cggcagaugagaaggcacagac

SEQ ID NO: 64906 - RNA, 23 nt, Artificial Sequence
  Synthetic
ccggcagaugagaaggcacagac

SEQ ID NO: 64907 - RNA, 24 nt, Artificial Sequence
  Synthetic
uccggcagaugagaaggcacagac

SEQ ID NO: 64908 - RNA, 18 nt, Artificial Sequence
  Synthetic
cucuuccaaaagugagac

SEQ ID NO: 64909 - RNA, 19 nt, Artificial Sequence
  Synthetic
ucucuuccaaaagugagac

SEQ ID NO: 64910 - RNA, 20 nt, Artificial Sequence
  Synthetic
uucucuuccaaaagugagac

SEQ ID NO: 64911 - RNA, 21 nt, Artificial Sequence
  Synthetic
uuucucuuccaaaagugagac

SEQ ID NO: 64912 - RNA, 22 nt, Artificial Sequence
  Synthetic
guuucucuuccaaaagugagac

SEQ ID NO: 64913 - RNA, 23 nt, Artificial Sequence
  Synthetic
gguuucucuuccaaaagugagac

SEQ ID NO: 64914 - RNA, 24 nt, Artificial Sequence
  Synthetic
cgguuucucuuccaaaagugagac

SEQ ID NO: 64915 - RNA, 18 nt, Artificial Sequence
  Synthetic
caggacaaauuggaggac

SEQ ID NO: 64916 - RNA, 19 nt, Artificial Sequence
  Synthetic
ccaggacaaauuggaggac

SEQ ID NO: 64917 - RNA, 20 nt, Artificial Sequence
  Synthetic
gccaggacaaauuggaggac

SEQ ID NO: 64918 - RNA, 21 nt, Artificial Sequence
  Synthetic
agccaggacaaauuggaggac

SEQ ID NO: 64919 - RNA, 22 nt, Artificial Sequence
  Synthetic
uagccaggacaaauuggaggac

SEQ ID NO: 64920 - RNA, 23 nt, Artificial Sequence
  Synthetic
auagccaggacaaauuggaggac

SEQ ID NO: 64921 - RNA, 24 nt, Artificial Sequence
  Synthetic
gauagccaggacaaauuggaggac

SEQ ID NO: 64922 - RNA, 18 nt, Artificial Sequence
  Synthetic
aggcuugaacaguaggac

SEQ ID NO: 64923 - RNA, 19 nt, Artificial Sequence
  Synthetic
gaggcuugaacaguaggac

SEQ ID NO: 64924 - RNA, 20 nt, Artificial Sequence
  Synthetic
ggaggcuugaacaguaggac

SEQ ID NO: 64925 - RNA, 21 nt, Artificial Sequence
  Synthetic
uggaggcuugaacaguaggac

SEQ ID NO: 64926 - RNA, 22 nt, Artificial Sequence
  Synthetic
uuggaggcuugaacaguaggac

SEQ ID NO: 64927 - RNA, 23 nt, Artificial Sequence
  Synthetic
cuuggaggcuugaacaguaggac

SEQ ID NO: 64928 - RNA, 24 nt, Artificial Sequence
  Synthetic
gcuuggaggcuugaacaguaggac

SEQ ID NO: 64929 - RNA, 18 nt, Artificial Sequence
  Synthetic
guccucuuauguaagacc

SEQ ID NO: 64930 - RNA, 19 nt, Artificial Sequence
  Synthetic
aguccucuuauguaagacc

SEQ ID NO: 64931 - RNA, 20 nt, Artificial Sequence
  Synthetic
gaguccucuuauguaagacc

SEQ ID NO: 64932 - RNA, 21 nt, Artificial Sequence
  Synthetic
agaguccucuuauguaagacc

SEQ ID NO: 64933 - RNA, 22 nt, Artificial Sequence
  Synthetic
aagaguccucuuauguaagacc

SEQ ID NO: 64934 - RNA, 23 nt, Artificial Sequence
  Synthetic
caagaguccucuuauguaagacc

SEQ ID NO: 64935 - RNA, 24 nt, Artificial Sequence
  Synthetic
ccaagaguccucuuauguaagacc

SEQ ID NO: 64936 - RNA, 18 nt, Artificial Sequence
  Synthetic
  misc_feature (2)..(2): n is a, c, g, or u
  misc_feature (6)..(6): n is a, c, g, or u
anaganccccaagcgacc

SEQ ID NO: 64937 - RNA, 19 nt, Artificial Sequence
  Synthetic
  misc_feature (3)..(3): n is a, c, g, or u
  misc_feature (7)..(7): n is a, c, g, or u
ganaganccccaagcgacc

SEQ ID NO: 64938 - RNA, 20 nt, Artificial Sequence
  Synthetic
  misc_feature (4)..(4): n is a, c, g, or u
  misc_feature (8)..(8): n is a, c, g, or u
cganaganccccaagcgacc

SEQ ID NO: 64939 - RNA, 21 nt, Artificial Sequence
  Synthetic
  misc_feature (5)..(5): n is a, c, g, or u
  misc_feature (9)..(9): n is a, c, g, or u
acganaganccccaagcgacc

SEQ ID NO: 64940 - RNA, 22 nt, Artificial Sequence
  Synthetic
  misc_feature (6)..(6): n is a, c, g, or u
  misc_feature (10)..(10): n is a, c, g, or u
gacganaganccccaagcgacc

SEQ ID NO: 64941 - RNA, 23 nt, Artificial Sequence
  Synthetic
  misc_feature (7)..(7): n is a, c, g, or u
  misc_feature (11)..(11): n is a, c, g, or u
ggacganaganccccaagcgacc

SEQ ID NO: 64942 - RNA, 24 nt, Artificial Sequence
  Synthetic
  misc_feature (8)..(8): n is a, c, g, or u
  misc_feature (12)..(12): n is a, c, g, or u
gggacganaganccccaagcgacc

SEQ ID NO: 64943 - RNA, 18 nt, Artificial Sequence
  Synthetic
cuuccaauuacauaaccc

SEQ ID NO: 64944 - RNA, 19 nt, Artificial Sequence
  Synthetic
acuuccaauuacauaaccc

SEQ ID NO: 64945 - RNA, 20 nt, Artificial Sequence
  Synthetic
aacuuccaauuacauaaccc

SEQ ID NO: 64946 - RNA, 21 nt, Artificial Sequence
  Synthetic
caacuuccaauuacauaaccc

SEQ ID NO: 64947 - RNA, 22 nt, Artificial Sequence
  Synthetic
ccaacuuccaauuacauaaccc

SEQ ID NO: 64948 - RNA, 23 nt, Artificial Sequence
  Synthetic
cccaacuuccaauuacauaaccc

SEQ ID NO: 64949 - RNA, 24 nt, Artificial Sequence
  Synthetic
ccccaacuuccaauuacauaaccc

SEQ ID NO: 64950 - RNA, 18 nt, Artificial Sequence
  Synthetic
acacacgggagcuccccc

SEQ ID NO: 64951 - RNA, 19 nt, Artificial Sequence
  Synthetic
gacacacgggagcuccccc

SEQ ID NO: 64952 - RNA, 20 nt, Artificial Sequence
  Synthetic
agacacacgggagcuccccc

SEQ ID NO: 64953 - RNA, 21 nt, Artificial Sequence
  Synthetic
aagacacacgggagcuccccc

SEQ ID NO: 64954 - RNA, 22 nt, Artificial Sequence
  Synthetic
caagacacacgggagcuccccc

SEQ ID NO: 64955 - RNA, 23 nt, Artificial Sequence
  Synthetic
ccaagacacacgggagcuccccc

SEQ ID NO: 64956 - RNA, 24 nt, Artificial Sequence
  Synthetic
gccaagacacacgggagcuccccc

SEQ ID NO: 64957 - RNA, 18 nt, Artificial Sequence
  Synthetic
cagcacagccuagcagcc

SEQ ID NO: 64958 - RNA, 19 nt, Artificial Sequence
  Synthetic
gcagcacagccuagcagcc

SEQ ID NO: 64959 - RNA, 20 nt, Artificial Sequence
  Synthetic
ggcagcacagccuagcagcc

SEQ ID NO: 64960 - RNA, 21 nt, Artificial Sequence
  Synthetic
uggcagcacagccuagcagcc

SEQ ID NO: 64961 - RNA, 22 nt, Artificial Sequence
  Synthetic
uuggcagcacagccuagcagcc

SEQ ID NO: 64962 - RNA, 23 nt, Artificial Sequence
  Synthetic
guuggcagcacagccuagcagcc

SEQ ID NO: 64963 - RNA, 24 nt, Artificial Sequence
  Synthetic
aguuggcagcacagccuagcagcc

SEQ ID NO: 64964 - RNA, 18 nt, Artificial Sequence
  Synthetic
gcacuaguaaacugagcc

SEQ ID NO: 64965 - RNA, 19 nt, Artificial Sequence
  Synthetic
ggcacuaguaaacugagcc

SEQ ID NO: 64966 - RNA, 20 nt, Artificial Sequence
  Synthetic
uggcacuaguaaacugagcc

SEQ ID NO: 64967 - RNA, 21 nt, Artificial Sequence
  Synthetic
auggcacuaguaaacugagcc

SEQ ID NO: 64968 - RNA, 22 nt, Artificial Sequence
  Synthetic
aauggcacuaguaaacugagcc

SEQ ID NO: 64969 - RNA, 23 nt, Artificial Sequence
  Synthetic
aaauggcacuaguaaacugagcc

SEQ ID NO: 64970 - RNA, 24 nt, Artificial Sequence
  Synthetic
caaauggcacuaguaaacugagcc

SEQ ID NO: 64971 - RNA, 18 nt, Artificial Sequence
  Synthetic
caauguuuuuagcaugcc

SEQ ID NO: 64972 - RNA, 19 nt, Artificial Sequence
  Synthetic
gcaauguuuuuagcaugcc

SEQ ID NO: 64973 - RNA, 20 nt, Artificial Sequence
  Synthetic
ggcaauguuuuuagcaugcc

SEQ ID NO: 64974 - RNA, 21 nt, Artificial Sequence
  Synthetic
uggcaauguuuuuagcaugcc

SEQ ID NO: 64975 - RNA, 22 nt, Artificial Sequence
  Synthetic
cuggcaauguuuuuagcaugcc

SEQ ID NO: 64976 - RNA, 23 nt, Artificial Sequence
  Synthetic
gcuggcaauguuuuuagcaugcc

SEQ ID NO: 64977 - RNA, 24 nt, Artificial Sequence
  Synthetic
ugcuggcaauguuuuuagcaugcc

SEQ ID NO: 64978 - RNA, 18 nt, Artificial Sequence
  Synthetic
guggucgggaaaaaaucc

SEQ ID NO: 64979 - RNA, 19 nt, Artificial Sequence
  Synthetic
gguggucgggaaaaaaucc

SEQ ID NO: 64980 - RNA, 20 nt, Artificial Sequence
  Synthetic
ugguggucgggaaaaaaucc

SEQ ID NO: 64981 - RNA, 21 nt, Artificial Sequence
  Synthetic
cugguggucgggaaaaaaucc

SEQ ID NO: 64982 - RNA, 22 nt, Artificial Sequence
  Synthetic
acugguggucgggaaaaaaucc

SEQ ID NO: 64983 - RNA, 23 nt, Artificial Sequence
  Synthetic
aacugguggucgggaaaaaaucc

SEQ ID NO: 64984 - RNA, 24 nt, Artificial Sequence
  Synthetic
caacugguggucgggaaaaaaucc

SEQ ID NO: 64985 - RNA, 18 nt, Artificial Sequence
  Synthetic
gugcaggguccccaaucc

SEQ ID NO: 64986 - RNA, 19 nt, Artificial Sequence
  Synthetic
ggugcaggguccccaaucc

SEQ ID NO: 64987 - RNA, 20 nt, Artificial Sequence
  Synthetic
cggugcaggguccccaaucc

SEQ ID NO: 64988 - RNA, 21 nt, Artificial Sequence
  Synthetic
ucggugcaggguccccaaucc

SEQ ID NO: 64989 - RNA, 22 nt, Artificial Sequence
  Synthetic
uucggugcaggguccccaaucc

SEQ ID NO: 64990 - RNA, 23 nt, Artificial Sequence
  Synthetic
guucggugcaggguccccaaucc

SEQ ID NO: 64991 - RNA, 24 nt, Artificial Sequence
  Synthetic
uguucggugcaggguccccaaucc

SEQ ID NO: 64992 - RNA, 18 nt, Artificial Sequence
  Synthetic
uucccaccuugugagucc

SEQ ID NO: 64993 - RNA, 19 nt, Artificial Sequence
  Synthetic
uuucccaccuugugagucc

SEQ ID NO: 64994 - RNA, 20 nt, Artificial Sequence
  Synthetic
auuucccaccuugugagucc

SEQ ID NO: 64995 - RNA, 21 nt, Artificial Sequence
  Synthetic
aauuucccaccuugugagucc

SEQ ID NO: 64996 - RNA, 22 nt, Artificial Sequence
  Synthetic
aaauuucccaccuugugagucc

SEQ ID NO: 64997 - RNA, 23 nt, Artificial Sequence
  Synthetic
aaaauuucccaccuugugagucc

SEQ ID NO: 64998 - RNA, 24 nt, Artificial Sequence
  Synthetic
uaaaauuucccaccuugugagucc

SEQ ID NO: 64999 - RNA, 18 nt, Artificial Sequence
  Synthetic
auucgagagggaccgucc

SEQ ID NO: 65000 - RNA, 19 nt, Artificial Sequence
  Synthetic
cauucgagagggaccgucc

SEQ ID NO: 65001 - RNA, 20 nt, Artificial Sequence
  Synthetic
ccauucgagagggaccgucc

SEQ ID NO: 65002 - RNA, 21 nt, Artificial Sequence
  Synthetic
cccauucgagagggaccgucc

SEQ ID NO: 65003 - RNA, 22 nt, Artificial Sequence
  Synthetic
ccccauucgagagggaccgucc

SEQ ID NO: 65004 - RNA, 23 nt, Artificial Sequence
  Synthetic
cccccauucgagagggaccgucc

SEQ ID NO: 65005 - RNA, 24 nt, Artificial Sequence
  Synthetic
ucccccauucgagagggaccgucc

SEQ ID NO: 65006 - RNA, 18 nt, Artificial Sequence
  Synthetic
uaacacgagcaggggucc

SEQ ID NO: 65007 - RNA, 19 nt, Artificial Sequence
  Synthetic
guaacacgagcaggggucc

SEQ ID NO: 65008 - RNA, 20 nt, Artificial Sequence
  Synthetic
uguaacacgagcaggggucc

SEQ ID NO: 65009 - RNA, 21 nt, Artificial Sequence
  Synthetic
cuguaacacgagcaggggucc

SEQ ID NO: 65010 - RNA, 22 nt, Artificial Sequence
  Synthetic
ccuguaacacgagcaggggucc

SEQ ID NO: 65011 - RNA, 23 nt, Artificial Sequence
  Synthetic
gccuguaacacgagcaggggucc

SEQ ID NO: 65012 - RNA, 24 nt, Artificial Sequence
  Synthetic
cgccuguaacacgagcaggggucc

SEQ ID NO: 65013 - RNA, 18 nt, Artificial Sequence
  Synthetic
gggaaacauagagguucc

SEQ ID NO: 65014 - RNA, 19 nt, Artificial Sequence
  Synthetic
agggaaacauagagguucc

SEQ ID NO: 65015 - RNA, 20 nt, Artificial Sequence
  Synthetic
gagggaaacauagagguucc

SEQ ID NO: 65016 - RNA, 21 nt, Artificial Sequence
  Synthetic
ugagggaaacauagagguucc

SEQ ID NO: 65017 - RNA, 22 nt, Artificial Sequence
  Synthetic
augagggaaacauagagguucc

SEQ ID NO: 65018 - RNA, 23 nt, Artificial Sequence
  Synthetic
caugagggaaacauagagguucc

SEQ ID NO: 65019 - RNA, 24 nt, Artificial Sequence
  Synthetic
acaugagggaaacauagagguucc

SEQ ID NO: 65020 - RNA, 18 nt, Artificial Sequence
  Synthetic
  misc_feature (5)..(5): n is a, c, g, or u
gaaangauguauauuucc

SEQ ID NO: 65021 - RNA, 19 nt, Artificial Sequence
  Synthetic
  misc_feature (6)..(6): n is a, c, g, or u
ggaaangauguauauuucc

SEQ ID NO: 65022 - RNA, 20 nt, Artificial Sequence
  Synthetic
  misc_feature (7)..(7): n is a, c, g, or u
uggaaangauguauauuucc

SEQ ID NO: 65023 - RNA, 21 nt, Artificial Sequence
  Synthetic
  misc_feature (8)..(8): n is a, c, g, or u
auggaaangauguauauuucc

SEQ ID NO: 65024 - RNA, 22 nt, Artificial Sequence
  Synthetic
  misc_feature (9)..(9): n is a, c, g, or u
cauggaaangauguauauuucc

SEQ ID NO: 65025 - RNA, 23 nt, Artificial Sequence
  Synthetic
  misc_feature (10)..(10): n is a, c, g, or u
ccauggaaangauguauauuucc

SEQ ID NO: 65026 - RNA, 24 nt, Artificial Sequence
  Synthetic
  misc_feature (11)..(11): n is a, c, g, or u
gccauggaaangauguauauuucc

SEQ ID NO: 65027 - RNA, 18 nt, Artificial Sequence
  Synthetic
auacuaacauugggaagc

SEQ ID NO: 65028 - RNA, 19 nt, Artificial Sequence
  Synthetic
aauacuaacauugggaagc

SEQ ID NO: 65029 - RNA, 20 nt, Artificial Sequence
  Synthetic
gaauacuaacauugggaagc

SEQ ID NO: 65030 - RNA, 21 nt, Artificial Sequence
  Synthetic
ggaauacuaacauugggaagc

SEQ ID NO: 65031 - RNA, 22 nt, Artificial Sequence
  Synthetic
aggaauacuaacauugggaagc

SEQ ID NO: 65032 - RNA, 23 nt, Artificial Sequence
  Synthetic
aaggaauacuaacauugggaagc

SEQ ID NO: 65033 - RNA, 24 nt, Artificial Sequence
  Synthetic
caaggaauacuaacauugggaagc

SEQ ID NO: 65034 - RNA, 18 nt, Artificial Sequence
  Synthetic
auuugguggucuauaagc

SEQ ID NO: 65035 - RNA, 19 nt, Artificial Sequence
  Synthetic
cauuugguggucuauaagc

SEQ ID NO: 65036 - RNA, 20 nt, Artificial Sequence
  Synthetic
gcauuugguggucuauaagc

SEQ ID NO: 65037 - RNA, 21 nt, Artificial Sequence
  Synthetic
ggcauuugguggucuauaagc

SEQ ID NO: 65038 - RNA, 22 nt, Artificial Sequence
  Synthetic
gggcauuugguggucuauaagc

SEQ ID NO: 65039 - RNA, 23 nt, Artificial Sequence
  Synthetic
ggggcauuugguggucuauaagc

SEQ ID NO: 65040 - RNA, 24 nt, Artificial Sequence
  Synthetic
aggggcauuugguggucuauaagc

SEQ ID NO: 65041 - RNA, 18 nt, Artificial Sequence
  Synthetic
agccacccaaggcacagc

SEQ ID NO: 65042 - RNA, 19 nt, Artificial Sequence
  Synthetic
aagccacccaaggcacagc

SEQ ID NO: 65043 - RNA, 20 nt, Artificial Sequence
  Synthetic
aaagccacccaaggcacagc

SEQ ID NO: 65044 - RNA, 21 nt, Artificial Sequence
  Synthetic
  misc_feature (1)..(1): n is a, c, g, or u
naaagccacccaaggcacagc

SEQ ID NO: 65045 - RNA, 22 nt, Artificial Sequence
  Synthetic
  misc_feature (2)..(2): n is a, c, g, or u
cnaaagccacccaaggcacagc

SEQ ID NO: 65046 - RNA, 23 nt, Artificial Sequence
  Synthetic
  misc_feature (3)..(3): n is a, c, g, or u
ccnaaagccacccaaggcacagc

SEQ ID NO: 65047 - RNA, 24 nt, Artificial Sequence
  Synthetic
  misc_feature (1)..(1): n is a, c, g, or u
  misc_feature (4)..(4): n is a, c, g, or u
nccnaaagccacccaaggcacagc

SEQ ID NO: 65048 - RNA, 18 nt, Artificial Sequence
  Synthetic
ggaacuggagccaccagc

SEQ ID NO: 65049 - RNA, 19 nt, Artificial Sequence
  Synthetic
cggaacuggagccaccagc

SEQ ID NO: 65050 - RNA, 20 nt, Artificial Sequence
  Synthetic
ccggaacuggagccaccagc

SEQ ID NO: 65051 - RNA, 21 nt, Artificial Sequence
  Synthetic
uccggaacuggagccaccagc

SEQ ID NO: 65052 - RNA, 22 nt, Artificial Sequence
  Synthetic
uuccggaacuggagccaccagc

SEQ ID NO: 65053 - RNA, 23 nt, Artificial Sequence
  Synthetic
guuccggaacuggagccaccagc

SEQ ID NO: 65054 - RNA, 24 nt, Artificial Sequence
  Synthetic
uguuccggaacuggagccaccagc

SEQ ID NO: 65055 - RNA, 18 nt, Artificial Sequence
  Synthetic
ggcacuaguaaacugagc

SEQ ID NO: 65056 - RNA, 19 nt, Artificial Sequence
  Synthetic
uggcacuaguaaacugagc

SEQ ID NO: 65057 - RNA, 20 nt, Artificial Sequence
  Synthetic
auggcacuaguaaacugagc

SEQ ID NO: 65058 - RNA, 21 nt, Artificial Sequence
  Synthetic
aauggcacuaguaaacugagc

SEQ ID NO: 65059 - RNA, 22 nt, Artificial Sequence
  Synthetic
aaauggcacuaguaaacugagc

SEQ ID NO: 65060 - RNA, 23 nt, Artificial Sequence
  Synthetic
caaauggcacuaguaaacugagc

SEQ ID NO: 65061 - RNA, 24 nt, Artificial Sequence
  Synthetic
acaaauggcacuaguaaacugagc

SEQ ID NO: 65062 - RNA, 18 nt, Artificial Sequence
  Synthetic
uuuuagcaugccuugagc

SEQ ID NO: 65063 - RNA, 19 nt, Artificial Sequence
  Synthetic
uuuuuagcaugccuugagc

SEQ ID NO: 65064 - RNA, 20 nt, Artificial Sequence
  Synthetic
guuuuuagcaugccuugagc

SEQ ID NO: 65065 - RNA, 21 nt, Artificial Sequence
  Synthetic
uguuuuuagcaugccuugagc

SEQ ID NO: 65066 - RNA, 22 nt, Artificial Sequence
  Synthetic
auguuuuuagcaugccuugagc

SEQ ID NO: 65067 - RNA, 23 nt, Artificial Sequence
  Synthetic
aauguuuuuagcaugccuugagc

SEQ ID NO: 65068 - RNA, 24 nt, Artificial Sequence
  Synthetic
caauguuuuuagcaugccuugagc

SEQ ID NO: 65069 - RNA, 18 nt, Artificial Sequence
  Synthetic
gacacauccagcgauagc

SEQ ID NO: 65070 - RNA, 19 nt, Artificial Sequence
  Synthetic
agacacauccagcgauagc

SEQ ID NO: 65071 - RNA, 20 nt, Artificial Sequence
  Synthetic
cagacacauccagcgauagc

SEQ ID NO: 65072 - RNA, 21 nt, Artificial Sequence
  Synthetic
gcagacacauccagcgauagc

SEQ ID NO: 65073 - RNA, 22 nt, Artificial Sequence
  Synthetic
cgcagacacauccagcgauagc

SEQ ID NO: 65074 - RNA, 23 nt, Artificial Sequence
  Synthetic
ccgcagacacauccagcgauagc

SEQ ID NO: 65075 - RNA, 24 nt, Artificial Sequence
  Synthetic
gccgcagacacauccagcgauagc

SEQ ID NO: 65076 - RNA, 18 nt, Artificial Sequence
  Synthetic
gaucuucgucugcgaggc

SEQ ID NO: 65077 - RNA, 19 nt, Artificial Sequence
  Synthetic
agaucuucgucugcgaggc

SEQ ID NO: 65078 - RNA, 20 nt, Artificial Sequence
  Synthetic
gagaucuucgucugcgaggc

SEQ ID NO: 65079 - RNA, 21 nt, Artificial Sequence
  Synthetic
ugagaucuucgucugcgaggc

SEQ ID NO: 65080 - RNA, 22 nt, Artificial Sequence
  Synthetic
uugagaucuucgucugcgaggc

SEQ ID NO: 65081 - RNA, 23 nt, Artificial Sequence
  Synthetic
auugagaucuucgucugcgaggc

SEQ ID NO: 65082 - RNA, 24 nt, Artificial Sequence
  Synthetic
gauugagaucuucgucugcgaggc

SEQ ID NO: 65083 - RNA, 18 nt, Artificial Sequence
  Synthetic
cugccgauugguggaggc

SEQ ID NO: 65084 - RNA, 19 nt, Artificial Sequence
  Synthetic
acugccgauugguggaggc

SEQ ID NO: 65085 - RNA, 20 nt, Artificial Sequence
  Synthetic
gacugccgauugguggaggc

SEQ ID NO: 65086 - RNA, 21 nt, Artificial Sequence
  Synthetic
ugacugccgauugguggaggc

SEQ ID NO: 65087 - RNA, 22 nt, Artificial Sequence
  Synthetic
cugacugccgauugguggaggc

SEQ ID NO: 65088 - RNA, 23 nt, Artificial Sequence
  Synthetic
ccugacugccgauugguggaggc

SEQ ID NO: 65089 - RNA, 24 nt, Artificial Sequence
  Synthetic
uccugacugccgauugguggaggc

SEQ ID NO: 65090 - RNA, 18 nt, Artificial Sequence
  Synthetic
aaggcacagcuuggaggc

SEQ ID NO: 65091 - RNA, 19 nt, Artificial Sequence
  Synthetic
caaggcacagcuuggaggc

SEQ ID NO: 65092 - RNA, 20 nt, Artificial Sequence
  Synthetic
ccaaggcacagcuuggaggc

SEQ ID NO: 65093 - RNA, 21 nt, Artificial Sequence
  Synthetic
cccaaggcacagcuuggaggc

SEQ ID NO: 65094 - RNA, 22 nt, Artificial Sequence
  Synthetic
acccaaggcacagcuuggaggc

SEQ ID NO: 65095 - RNA, 23 nt, Artificial Sequence
  Synthetic
cacccaaggcacagcuuggaggc

SEQ ID NO: 65096 - RNA, 24 nt, Artificial Sequence
  Synthetic
ccacccaaggcacagcuuggaggc

SEQ ID NO: 65097 - RNA, 18 nt, Artificial Sequence
  Synthetic
gcgagcaaaacaagcggc

SEQ ID NO: 65098 - RNA, 19 nt, Artificial Sequence
  Synthetic
ugcgagcaaaacaagcggc

SEQ ID NO: 65099 - RNA, 20 nt, Artificial Sequence
  Synthetic
cugcgagcaaaacaagcggc

SEQ ID NO: 65100 - RNA, 21 nt, Artificial Sequence
  Synthetic
gcugcgagcaaaacaagcggc

SEQ ID NO: 65101 - RNA, 22 nt, Artificial Sequence
  Synthetic
ugcugcgagcaaaacaagcggc

SEQ ID NO: 65102 - RNA, 23 nt, Artificial Sequence
  Synthetic
cugcugcgagcaaaacaagcggc

SEQ ID NO: 65103 - RNA, 24 nt, Artificial Sequence
  Synthetic
ccugcugcgagcaaaacaagcggc

SEQ ID NO: 65104 - RNA, 18 nt, Artificial Sequence
  Synthetic
gugcgccccguggucggc

SEQ ID NO: 65105 - RNA, 19 nt, Artificial Sequence
  Synthetic
ggugcgccccguggucggc

SEQ ID NO: 65106 - RNA, 20 nt, Artificial Sequence
  Synthetic
aggugcgccccguggucggc

SEQ ID NO: 65107 - RNA, 21 nt, Artificial Sequence
  Synthetic
gaggugcgccccguggucggc

SEQ ID NO: 65108 - RNA, 22 nt, Artificial Sequence
  Synthetic
agaggugcgccccguggucggc

SEQ ID NO: 65109 - RNA, 23 nt, Artificial Sequence
  Synthetic
gagaggugcgccccguggucggc

SEQ ID NO: 65110 - RNA, 24 nt, Artificial Sequence
  Synthetic
agagaggugcgccccguggucggc

SEQ ID NO: 65111 - RNA, 18 nt, Artificial Sequence
  Synthetic
aaggccuuguaaguuggc

SEQ ID NO: 65112 - RNA, 19 nt, Artificial Sequence
  Synthetic
aaaggccuuguaaguuggc

SEQ ID NO: 65113 - RNA, 20 nt, Artificial Sequence
  Synthetic
gaaaggccuuguaaguuggc

SEQ ID NO: 65114 - RNA, 21 nt, Artificial Sequence
  Synthetic
agaaaggccuuguaaguuggc

SEQ ID NO: 65115 - RNA, 22 nt, Artificial Sequence
  Synthetic
cagaaaggccuuguaaguuggc

SEQ ID NO: 65116 - RNA, 23 nt, Artificial Sequence
  Synthetic
acagaaaggccuuguaaguuggc

SEQ ID NO: 65117 - RNA, 24 nt, Artificial Sequence
  Synthetic
cacagaaaggccuuguaaguuggc

SEQ ID NO: 65118 - RNA, 18 nt, Artificial Sequence
  Synthetic
ugaaaccacaauaauugc

SEQ ID NO: 65119 - RNA, 19 nt, Artificial Sequence
  Synthetic
gugaaaccacaauaauugc

SEQ ID NO: 65120 - RNA, 20 nt, Artificial Sequence
  Synthetic
ugugaaaccacaauaauugc

SEQ ID NO: 65121 - RNA, 21 nt, Artificial Sequence
  Synthetic
augugaaaccacaauaauugc

SEQ ID NO: 65122 - RNA, 22 nt, Artificial Sequence
  Synthetic
aaugugaaaccacaauaauugc

SEQ ID NO: 65123 - RNA, 23 nt, Artificial Sequence
  Synthetic
aaaugugaaaccacaauaauugc

SEQ ID NO: 65124 - RNA, 24 nt, Artificial Sequence
  Synthetic
gaaaugugaaaccacaauaauugc

SEQ ID NO: 65125 - RNA, 18 nt, Artificial Sequence
  Synthetic
uacuggugguugaugauc

SEQ ID NO: 65126 - RNA, 19 nt, Artificial Sequence
  Synthetic
guacuggugguugaugauc

SEQ ID NO: 65127 - RNA, 20 nt, Artificial Sequence
  Synthetic
cguacuggugguugaugauc

SEQ ID NO: 65128 - RNA, 21 nt, Artificial Sequence
  Synthetic
ccguacuggugguugaugauc

SEQ ID NO: 65129 - RNA, 22 nt, Artificial Sequence
  Synthetic
cccguacuggugguugaugauc

SEQ ID NO: 65130 - RNA, 23 nt, Artificial Sequence
  Synthetic
ucccguacuggugguugaugauc

SEQ ID NO: 65131 - RNA, 24 nt, Artificial Sequence
  Synthetic
gucccguacuggugguugaugauc

SEQ ID NO: 65132 - RNA, 18 nt, Artificial Sequence
  Synthetic
cuggugcaaaugaauauc

SEQ ID NO: 65133 - RNA, 19 nt, Artificial Sequence
  Synthetic
ccuggugcaaaugaauauc

SEQ ID NO: 65134 - RNA, 20 nt, Artificial Sequence
  Synthetic
uccuggugcaaaugaauauc

SEQ ID NO: 65135 - RNA, 21 nt, Artificial Sequence
  Synthetic
guccuggugcaaaugaauauc

SEQ ID NO: 65136 - RNA, 22 nt, Artificial Sequence
  Synthetic
uguccuggugcaaaugaauauc

SEQ ID NO: 65137 - RNA, 23 nt, Artificial Sequence
  Synthetic
auguccuggugcaaaugaauauc

SEQ ID NO: 65138 - RNA, 24 nt, Artificial Sequence
  Synthetic
aauguccuggugcaaaugaauauc

SEQ ID NO: 65139 - RNA, 18 nt, Artificial Sequence
  Synthetic
cagagcugaggcgguauc

SEQ ID NO: 65140 - RNA, 19 nt, Artificial Sequence
  Synthetic
acagagcugaggcgguauc

SEQ ID NO: 65141 - RNA, 20 nt, Artificial Sequence
  Synthetic
uacagagcugaggcgguauc

SEQ ID NO: 65142 - RNA, 21 nt, Artificial Sequence
  Synthetic
auacagagcugaggcgguauc

SEQ ID NO: 65143 - RNA, 22 nt, Artificial Sequence
  Synthetic
gauacagagcugaggcgguauc

SEQ ID NO: 65144 - RNA, 23 nt, Artificial Sequence
  Synthetic
cgauacagagcugaggcgguauc

SEQ ID NO: 65145 - RNA, 24 nt, Artificial Sequence
  Synthetic
ccgauacagagcugaggcgguauc

SEQ ID NO: 65146 - RNA, 18 nt, Artificial Sequence
  Synthetic
gcaggguccccaauccuc

SEQ ID NO: 65147 - RNA, 19 nt, Artificial Sequence
  Synthetic
ugcaggguccccaauccuc

SEQ ID NO: 65148 - RNA, 20 nt, Artificial Sequence
  Synthetic
gugcaggguccccaauccuc

SEQ ID NO: 65149 - RNA, 21 nt, Artificial Sequence
  Synthetic
ggugcaggguccccaauccuc

SEQ ID NO: 65150 - RNA, 22 nt, Artificial Sequence
  Synthetic
cggugcaggguccccaauccuc

SEQ ID NO: 65151 - RNA, 23 nt, Artificial Sequence
  Synthetic
ucggugcaggguccccaauccuc

SEQ ID NO: 65152 - RNA, 24 nt, Artificial Sequence
  Synthetic
uucggugcaggguccccaauccuc

SEQ ID NO: 65153 - RNA, 18 nt, Artificial Sequence
  Synthetic
  misc_feature (4)..(4): n is a, c, g, or u
gugnggugaacaaugcuc

SEQ ID NO: 65154 - RNA, 19 nt, Artificial Sequence
  Synthetic
  misc_feature (5)..(5): n is a, c, g, or u
ggugnggugaacaaugcuc

SEQ ID NO: 65155 - RNA, 20 nt, Artificial Sequence
  Synthetic
  misc_feature (6)..(6): n is a, c, g, or u
uggugnggugaacaaugcuc

SEQ ID NO: 65156 - RNA, 21 nt, Artificial Sequence
  Synthetic
  misc_feature (1)..(1): n is a, c, g, or u
  misc_feature (7)..(7): n is a, c, g, or u
nuggugnggugaacaaugcuc

SEQ ID NO: 65157 - RNA, 22 nt, Artificial Sequence
  Synthetic
  misc_feature (2)..(2): n is a, c, g, or u
  misc_feature (8)..(8): n is a, c, g, or u
unuggugnggugaacaaugcuc

SEQ ID NO: 65158 - RNA, 23 nt, Artificial Sequence
  Synthetic
  misc_feature (3)..(3): n is a, c, g, or u
  misc_feature (9)..(9): n is a, c, g, or u
gunuggugnggugaacaaugcuc

SEQ ID NO: 65159 - RNA, 24 nt, Artificial Sequence
  Synthetic
  misc_feature (4)..(4): n is a, c, g, or u
  misc_feature (10)..(10): n is a, c, g, or u
agunuggugnggugaacaaugcuc

SEQ ID NO: 65160 - RNA, 18 nt, Artificial Sequence
  Synthetic
  misc_feature (14)..(14): n is a, c, g, or u
ucuaacaacaguanucuc

SEQ ID NO: 65161 - RNA, 19 nt, Artificial Sequence
  Synthetic
  misc_feature (15)..(15): n is a, c, g, or u
gucuaacaacaguanucuc

SEQ ID NO: 65162 - RNA, 20 nt, Artificial Sequence
  Synthetic
  misc_feature (16)..(16): n is a, c, g, or u
cgucuaacaacaguanucuc

SEQ ID NO: 65163 - RNA, 21 nt, Artificial Sequence
  Synthetic
  misc_feature (17)..(17): n is a, c, g, or u
ucgucuaacaacaguanucuc

SEQ ID NO: 65164 - RNA, 22 nt, Artificial Sequence
  Synthetic
  misc_feature (18)..(18): n is a, c, g, or u
uucgucuaacaacaguanucuc

SEQ ID NO: 65165 - RNA, 23 nt, Artificial Sequence
  Synthetic
  misc_feature (19)..(19): n is a, c, g, or u
cuucgucuaacaacaguanucuc

SEQ ID NO: 65166 - RNA, 24 nt, Artificial Sequence
  Synthetic
  misc_feature (20)..(20): n is a, c, g, or u
ucuucgucuaacaacaguanucuc

SEQ ID NO: 65167 - RNA, 18 nt, Artificial Sequence
  Synthetic
agguuuuauaccuuucuc

SEQ ID NO: 65168 - RNA, 19 nt, Artificial Sequence
  Synthetic
aagguuuuauaccuuucuc

SEQ ID NO: 65169 - RNA, 20 nt, Artificial Sequence
  Synthetic
uaagguuuuauaccuuucuc

SEQ ID NO: 65170 - RNA, 21 nt, Artificial Sequence
  Synthetic
auaagguuuuauaccuuucuc

SEQ ID NO: 65171 - RNA, 22 nt, Artificial Sequence
  Synthetic
aauaagguuuuauaccuuucuc

SEQ ID NO: 65172 - RNA, 23 nt, Artificial Sequence
  Synthetic
uaauaagguuuuauaccuuucuc

SEQ ID NO: 65173 - RNA, 24 nt, Artificial Sequence
  Synthetic
auaauaagguuuuauaccuuucuc

SEQ ID NO: 65174 - RNA, 18 nt, Artificial Sequence
  Synthetic
caacauaccuugauaguc

SEQ ID NO: 65175 - RNA, 19 nt, Artificial Sequence
  Synthetic
gcaacauaccuugauaguc

SEQ ID NO: 65176 - RNA, 20 nt, Artificial Sequence
  Synthetic
ggcaacauaccuugauaguc

SEQ ID NO: 65177 - RNA, 21 nt, Artificial Sequence
  Synthetic
gggcaacauaccuugauaguc

SEQ ID NO: 65178 - RNA, 22 nt, Artificial Sequence
  Synthetic
cgggcaacauaccuugauaguc

SEQ ID NO: 65179 - RNA, 23 nt, Artificial Sequence
  Synthetic
acgggcaacauaccuugauaguc

SEQ ID NO: 65180 - RNA, 24 nt, Artificial Sequence
  Synthetic
aacgggcaacauaccuugauaguc

SEQ ID NO: 65181 - RNA, 18 nt, Artificial Sequence
  Synthetic
uggauccaacuggugguc

SEQ ID NO: 65182 - RNA, 19 nt, Artificial Sequence
  Synthetic
cuggauccaacuggugguc

SEQ ID NO: 65183 - RNA, 20 nt, Artificial Sequence
  Synthetic
gcuggauccaacuggugguc

SEQ ID NO: 65184 - RNA, 21 nt, Artificial Sequence
  Synthetic
ugcuggauccaacuggugguc

SEQ ID NO: 65185 - RNA, 22 nt, Artificial Sequence
  Synthetic
augcuggauccaacuggugguc

SEQ ID NO: 65186 - RNA, 23 nt, Artificial Sequence
  Synthetic
aaugcuggauccaacuggugguc

SEQ ID NO: 65187 - RNA, 24 nt, Artificial Sequence
  Synthetic
gaaugcuggauccaacuggugguc

SEQ ID NO: 65188 - RNA, 18 nt, Artificial Sequence
  Synthetic
augauucuucccccauuc

SEQ ID NO: 65189 - RNA, 19 nt, Artificial Sequence
  Synthetic
aaugauucuucccccauuc

SEQ ID NO: 65190 - RNA, 20 nt, Artificial Sequence
  Synthetic
gaaugauucuucccccauuc

SEQ ID NO: 65191 - RNA, 21 nt, Artificial Sequence
  Synthetic
ggaaugauucuucccccauuc

SEQ ID NO: 65192 - RNA, 22 nt, Artificial Sequence
  Synthetic
uggaaugauucuucccccauuc

SEQ ID NO: 65193 - RNA, 23 nt, Artificial Sequence
  Synthetic
guggaaugauucuucccccauuc

SEQ ID NO: 65194 - RNA, 24 nt, Artificial Sequence
  Synthetic
gguggaaugauucuucccccauuc

SEQ ID NO: 65195 - RNA, 18 nt, Artificial Sequence
  Synthetic
gcgagggaguucuucuuc

SEQ ID NO: 65196 - RNA, 19 nt, Artificial Sequence
  Synthetic
ggcgagggaguucuucuuc

SEQ ID NO: 65197 - RNA, 20 nt, Artificial Sequence
  Synthetic
aggcgagggaguucuucuuc

SEQ ID NO: 65198 - RNA, 21 nt, Artificial Sequence
  Synthetic
gaggcgagggaguucuucuuc

SEQ ID NO: 65199 - RNA, 22 nt, Artificial Sequence
  Synthetic
cgaggcgagggaguucuucuuc

SEQ ID NO: 65200 - RNA, 23 nt, Artificial Sequence
  Synthetic
gcgaggcgagggaguucuucuuc

SEQ ID NO: 65201 - RNA, 24 nt, Artificial Sequence
  Synthetic
ugcgaggcgagggaguucuucuuc

SEQ ID NO: 65202 - RNA, 18 nt, Artificial Sequence
  Synthetic
gaacaggguucacuguuc

SEQ ID NO: 65203 - RNA, 19 nt, Artificial Sequence
  Synthetic
ggaacaggguucacuguuc

SEQ ID NO: 65204 - RNA, 20 nt, Artificial Sequence
  Synthetic
cggaacaggguucacuguuc

SEQ ID NO: 65205 - RNA, 21 nt, Artificial Sequence
  Synthetic
ucggaacaggguucacuguuc

SEQ ID NO: 65206 - RNA, 22 nt, Artificial Sequence
  Synthetic
gucggaacaggguucacuguuc

SEQ ID NO: 65207 - RNA, 23 nt, Artificial Sequence
  Synthetic
agucggaacaggguucacuguuc

SEQ ID NO: 65208 - RNA, 24 nt, Artificial Sequence
  Synthetic
uagucggaacaggguucacuguuc

SEQ ID NO: 65209 - RNA, 18 nt, Artificial Sequence
  Synthetic
  misc_feature (6)..(6): n is a, c, g, or u
ggaaangauguauauuuc

SEQ ID NO: 65210 - RNA, 19 nt, Artificial Sequence
  Synthetic
  misc_feature (7)..(7): n is a, c, g, or u
uggaaangauguauauuuc

SEQ ID NO: 65211 - RNA, 20 nt, Artificial Sequence
  Synthetic
  misc_feature (8)..(8): n is a, c, g, or u
auggaaangauguauauuuc

SEQ ID NO: 65212 - RNA, 21 nt, Artificial Sequence
  Synthetic
  misc_feature (9)..(9): n is a, c, g, or u
cauggaaangauguauauuuc

SEQ ID NO: 65213 - RNA, 22 nt, Artificial Sequence
  Synthetic
  misc_feature (10)..(10): n is a, c, g, or u
ccauggaaangauguauauuuc

SEQ ID NO: 65214 - RNA, 23 nt, Artificial Sequence
  Synthetic
  misc_feature (11)..(11): n is a, c, g, or u
gccauggaaangauguauauuuc

SEQ ID NO: 65215 - RNA, 24 nt, Artificial Sequence
  Synthetic
  misc_feature (12)..(12): n is a, c, g, or u
agccauggaaangauguauauuuc

SEQ ID NO: 65216 - RNA, 18 nt, Artificial Sequence
  Synthetic
aaugaauaucaggaaaag

SEQ ID NO: 65217 - RNA, 19 nt, Artificial Sequence
  Synthetic
aaaugaauaucaggaaaag

SEQ ID NO: 65218 - RNA, 20 nt, Artificial Sequence
  Synthetic
caaaugaauaucaggaaaag

SEQ ID NO: 65219 - RNA, 21 nt, Artificial Sequence
  Synthetic
gcaaaugaauaucaggaaaag

SEQ ID NO: 65220 - RNA, 22 nt, Artificial Sequence
  Synthetic
ugcaaaugaauaucaggaaaag

SEQ ID NO: 65221 - RNA, 23 nt, Artificial Sequence
  Synthetic
gugcaaaugaauaucaggaaaag

SEQ ID NO: 65222 - RNA, 24 nt, Artificial Sequence
  Synthetic
ggugcaaaugaauaucaggaaaag

SEQ ID NO: 65223 - RNA, 18 nt, Artificial Sequence
  Synthetic
gaugagugucucucaaag

SEQ ID NO: 65224 - RNA, 19 nt, Artificial Sequence
  Synthetic
ggaugagugucucucaaag

SEQ ID NO: 65225 - RNA, 20 nt, Artificial Sequence
  Synthetic
aggaugagugucucucaaag

SEQ ID NO: 65226 - RNA, 21 nt, Artificial Sequence
  Synthetic
gaggaugagugucucucaaag

SEQ ID NO: 65227 - RNA, 22 nt, Artificial Sequence
  Synthetic
ugaggaugagugucucucaaag

SEQ ID NO: 65228 - RNA, 23 nt, Artificial Sequence
  Synthetic
cugaggaugagugucucucaaag

SEQ ID NO: 65229 - RNA, 24 nt, Artificial Sequence
  Synthetic
ccugaggaugagugucucucaaag

SEQ ID NO: 65230 - RNA, 18 nt, Artificial Sequence
  Synthetic
agaagaaccaacaagaag

SEQ ID NO: 65231 - RNA, 19 nt, Artificial Sequence
  Synthetic
cagaagaaccaacaagaag

SEQ ID NO: 65232 - RNA, 20 nt, Artificial Sequence
  Synthetic
ccagaagaaccaacaagaag

SEQ ID NO: 65233 - RNA, 21 nt, Artificial Sequence
  Synthetic
uccagaagaaccaacaagaag

SEQ ID NO: 65234 - RNA, 22 nt, Artificial Sequence
  Synthetic
guccagaagaaccaacaagaag

SEQ ID NO: 65235 - RNA, 23 nt, Artificial Sequence
  Synthetic
aguccagaagaaccaacaagaag

SEQ ID NO: 65236 - RNA, 24 nt, Artificial Sequence
  Synthetic
uaguccagaagaaccaacaagaag

SEQ ID NO: 65237 - RNA, 18 nt, Artificial Sequence
  Synthetic
aauacuaacauugggaag

SEQ ID NO: 65238 - RNA, 19 nt, Artificial Sequence
  Synthetic
gaauacuaacauugggaag

SEQ ID NO: 65239 - RNA, 20 nt, Artificial Sequence
  Synthetic
ggaauacuaacauugggaag

SEQ ID NO: 65240 - RNA, 21 nt, Artificial Sequence
  Synthetic
aggaauacuaacauugggaag

SEQ ID NO: 65241 - RNA, 22 nt, Artificial Sequence
  Synthetic
aaggaauacuaacauugggaag

SEQ ID NO: 65242 - RNA, 23 nt, Artificial Sequence
  Synthetic
caaggaauacuaacauugggaag

SEQ ID NO: 65243 - RNA, 24 nt, Artificial Sequence
  Synthetic
ccaaggaauacuaacauugggaag

SEQ ID NO: 65244 - RNA, 18 nt, Artificial Sequence
  Synthetic
cauagcagcaggaugaag

SEQ ID NO: 65245 - RNA, 19 nt, Artificial Sequence
  Synthetic
gcauagcagcaggaugaag

SEQ ID NO: 65246 - RNA, 20 nt, Artificial Sequence
  Synthetic
ggcauagcagcaggaugaag

SEQ ID NO: 65247 - RNA, 21 nt, Artificial Sequence
  Synthetic
aggcauagcagcaggaugaag

SEQ ID NO: 65248 - RNA, 22 nt, Artificial Sequence
  Synthetic
gaggcauagcagcaggaugaag

SEQ ID NO: 65249 - RNA, 23 nt, Artificial Sequence
  Synthetic
ugaggcauagcagcaggaugaag

SEQ ID NO: 65250 - RNA, 24 nt, Artificial Sequence
  Synthetic
augaggcauagcagcaggaugaag

SEQ ID NO: 65251 - RNA, 18 nt, Artificial Sequence
  Synthetic
cauuugguggucuauaag

SEQ ID NO: 65252 - RNA, 19 nt, Artificial Sequence
  Synthetic
gcauuugguggucuauaag

SEQ ID NO: 65253 - RNA, 20 nt, Artificial Sequence
  Synthetic
ggcauuugguggucuauaag

SEQ ID NO: 65254 - RNA, 21 nt, Artificial Sequence
  Synthetic
gggcauuugguggucuauaag

SEQ ID NO: 65255 - RNA, 22 nt, Artificial Sequence
  Synthetic
ggggcauuugguggucuauaag

SEQ ID NO: 65256 - RNA, 23 nt, Artificial Sequence
  Synthetic
aggggcauuugguggucuauaag

SEQ ID NO: 65257 - RNA, 24 nt, Artificial Sequence
  Synthetic
uaggggcauuugguggucuauaag

SEQ ID NO: 65258 - RNA, 18 nt, Artificial Sequence
  Synthetic
gcuuggaggcuugaacag

SEQ ID NO: 65259 - RNA, 19 nt, Artificial Sequence
  Synthetic
agcuuggaggcuugaacag

SEQ ID NO: 65260 - RNA, 20 nt, Artificial Sequence
  Synthetic
cagcuuggaggcuugaacag

SEQ ID NO: 65261 - RNA, 21 nt, Artificial Sequence
  Synthetic
acagcuuggaggcuugaacag

SEQ ID NO: 65262 - RNA, 22 nt, Artificial Sequence
  Synthetic
cacagcuuggaggcuugaacag

SEQ ID NO: 65263 - RNA, 23 nt, Artificial Sequence
  Synthetic
gcacagcuuggaggcuugaacag

SEQ ID NO: 65264 - RNA, 24 nt, Artificial Sequence
  Synthetic
ggcacagcuuggaggcuugaacag

SEQ ID NO: 65265 - RNA, 18 nt, Artificial Sequence
  Synthetic
gcagaugagaaggcacag

SEQ ID NO: 65266 - RNA, 19 nt, Artificial Sequence
  Synthetic
ggcagaugagaaggcacag

SEQ ID NO: 65267 - RNA, 20 nt, Artificial Sequence
  Synthetic
cggcagaugagaaggcacag

SEQ ID NO: 65268 - RNA, 21 nt, Artificial Sequence
  Synthetic
ccggcagaugagaaggcacag

SEQ ID NO: 65269 - RNA, 22 nt, Artificial Sequence
  Synthetic
uccggcagaugagaaggcacag

SEQ ID NO: 65270 - RNA, 23 nt, Artificial Sequence
  Synthetic
guccggcagaugagaaggcacag

SEQ ID NO: 65271 - RNA, 24 nt, Artificial Sequence
  Synthetic
gguccggcagaugagaaggcacag

SEQ ID NO: 65272 - RNA, 18 nt, Artificial Sequence
  Synthetic
uaacugaaagccagacag

SEQ ID NO: 65273 - RNA, 19 nt, Artificial Sequence
  Synthetic
auaacugaaagccagacag

SEQ ID NO: 65274 - RNA, 20 nt, Artificial Sequence
  Synthetic
uauaacugaaagccagacag

SEQ ID NO: 65275 - RNA, 21 nt, Artificial Sequence
  Synthetic
auauaacugaaagccagacag

SEQ ID NO: 65276 - RNA, 22 nt, Artificial Sequence
  Synthetic
cauauaacugaaagccagacag

SEQ ID NO: 65277 - RNA, 23 nt, Artificial Sequence
  Synthetic
ccauauaacugaaagccagacag

SEQ ID NO: 65278 - RNA, 24 nt, Artificial Sequence
  Synthetic
uccauauaacugaaagccagacag

SEQ ID NO: 65279 - RNA, 18 nt, Artificial Sequence
  Synthetic
cggaacuggagccaccag

SEQ ID NO: 65280 - RNA, 19 nt, Artificial Sequence
  Synthetic
ccggaacuggagccaccag

SEQ ID NO: 65281 - RNA, 20 nt, Artificial Sequence
  Synthetic
uccggaacuggagccaccag

SEQ ID NO: 65282 - RNA, 21 nt, Artificial Sequence
  Synthetic
uuccggaacuggagccaccag

SEQ ID NO: 65283 - RNA, 22 nt, Artificial Sequence
  Synthetic
guuccggaacuggagccaccag

SEQ ID NO: 65284 - RNA, 23 nt, Artificial Sequence
  Synthetic
uguuccggaacuggagccaccag

SEQ ID NO: 65285 - RNA, 24 nt, Artificial Sequence
  Synthetic
cuguuccggaacuggagccaccag

SEQ ID NO: 65286 - RNA, 18 nt, Artificial Sequence
  Synthetic
uggccaagccccagccag

SEQ ID NO: 65287 - RNA, 19 nt, Artificial Sequence
  Synthetic
auggccaagccccagccag

SEQ ID NO: 65288 - RNA, 20 nt, Artificial Sequence
  Synthetic
uauggccaagccccagccag

SEQ ID NO: 65289 - RNA, 21 nt, Artificial Sequence
  Synthetic
cuauggccaagccccagccag

SEQ ID NO: 65290 - RNA, 22 nt, Artificial Sequence
  Synthetic
ccuauggccaagccccagccag

SEQ ID NO: 65291 - RNA, 23 nt, Artificial Sequence
  Synthetic
gccuauggccaagccccagccag

SEQ ID NO: 65292 - RNA, 24 nt, Artificial Sequence
  Synthetic
ggccuauggccaagccccagccag

SEQ ID NO: 65293 - RNA, 18 nt, Artificial Sequence
  Synthetic
acuaguaaacugagccag

SEQ ID NO: 65294 - RNA, 19 nt, Artificial Sequence
  Synthetic
cacuaguaaacugagccag

SEQ ID NO: 65295 - RNA, 20 nt, Artificial Sequence
  Synthetic
gcacuaguaaacugagccag

SEQ ID NO: 65296 - RNA, 21 nt, Artificial Sequence
  Synthetic
ggcacuaguaaacugagccag

SEQ ID NO: 65297 - RNA, 22 nt, Artificial Sequence
  Synthetic
uggcacuaguaaacugagccag

SEQ ID NO: 65298 - RNA, 23 nt, Artificial Sequence
  Synthetic
auggcacuaguaaacugagccag

SEQ ID NO: 65299 - RNA, 24 nt, Artificial Sequence
  Synthetic
aauggcacuaguaaacugagccag

SEQ ID NO: 65300 - RNA, 18 nt, Artificial Sequence
  Synthetic
cauaccuugauaguccag

SEQ ID NO: 65301 - RNA, 19 nt, Artificial Sequence
  Synthetic
acauaccuugauaguccag

SEQ ID NO: 65302 - RNA, 20 nt, Artificial Sequence
  Synthetic
aacauaccuugauaguccag

SEQ ID NO: 65303 - RNA, 21 nt, Artificial Sequence
  Synthetic
caacauaccuugauaguccag

SEQ ID NO: 65304 - RNA, 22 nt, Artificial Sequence
  Synthetic
gcaacauaccuugauaguccag

SEQ ID NO: 65305 - RNA, 23 nt, Artificial Sequence
  Synthetic
ggcaacauaccuugauaguccag

SEQ ID NO: 65306 - RNA, 24 nt, Artificial Sequence
  Synthetic
gggcaacauaccuugauaguccag

SEQ ID NO: 65307 - RNA, 18 nt, Artificial Sequence
  Synthetic
  misc_feature (8)..(8): n is a, c, g, or u
ggucggcnggaacggcag

SEQ ID NO: 65308 - RNA, 19 nt, Artificial Sequence
  Synthetic
  misc_feature (9)..(9): n is a, c, g, or u
uggucggcnggaacggcag

SEQ ID NO: 65309 - RNA, 20 nt, Artificial Sequence
  Synthetic
  misc_feature (10)..(10): n is a, c, g, or u
guggucggcnggaacggcag

SEQ ID NO: 65310 - RNA, 21 nt, Artificial Sequence
  Synthetic
  misc_feature (11)..(11): n is a, c, g, or u
cguggucggcnggaacggcag

SEQ ID NO: 65311 - RNA, 22 nt, Artificial Sequence
  Synthetic
  misc_feature (12)..(12): n is a, c, g, or u
ccguggucggcnggaacggcag

SEQ ID NO: 65312 - RNA, 23 nt, Artificial Sequence
  Synthetic
  misc_feature (13)..(13): n is a, c, g, or u
cccguggucggcnggaacggcag

SEQ ID NO: 65313 - RNA, 24 nt, Artificial Sequence
  Synthetic
  misc_feature (14)..(14): n is a, c, g, or u
ccccguggucggcnggaacggcag

SEQ ID NO: 65314 - RNA, 18 nt, Artificial Sequence
  Synthetic
gugcacacgguccggcag

SEQ ID NO: 65315 - RNA, 19 nt, Artificial Sequence
  Synthetic
agugcacacgguccggcag

SEQ ID NO: 65316 - RNA, 20 nt, Artificial Sequence
  Synthetic
aagugcacacgguccggcag

SEQ ID NO: 65317 - RNA, 21 nt, Artificial Sequence
  Synthetic
gaagugcacacgguccggcag

SEQ ID NO: 65318 - RNA, 22 nt, Artificial Sequence
  Synthetic
cgaagugcacacgguccggcag

SEQ ID NO: 65319 - RNA, 23 nt, Artificial Sequence
  Synthetic
gcgaagugcacacgguccggcag

SEQ ID NO: 65320 - RNA, 24 nt, Artificial Sequence
  Synthetic
agcgaagugcacacgguccggcag

SEQ ID NO: 65321 - RNA, 18 nt, Artificial Sequence
  Synthetic
cgcaguauggaucggcag

SEQ ID NO: 65322 - RNA, 19 nt, Artificial Sequence
  Synthetic
ccgcaguauggaucggcag

SEQ ID NO: 65323 - RNA, 20 nt, Artificial Sequence
  Synthetic
uccgcaguauggaucggcag

SEQ ID NO: 65324 - RNA, 21 nt, Artificial Sequence
  Synthetic
uuccgcaguauggaucggcag

SEQ ID NO: 65325 - RNA, 22 nt, Artificial Sequence
  Synthetic
guuccgcaguauggaucggcag

SEQ ID NO: 65326 - RNA, 23 nt, Artificial Sequence
  Synthetic
aguuccgcaguauggaucggcag

SEQ ID NO: 65327 - RNA, 24 nt, Artificial Sequence
  Synthetic
gaguuccgcaguauggaucggcag

SEQ ID NO: 65328 - RNA, 18 nt, Artificial Sequence
  Synthetic
aggcaucccgauacagag

SEQ ID NO: 65329 - RNA, 19 nt, Artificial Sequence
  Synthetic
aaggcaucccgauacagag

SEQ ID NO: 65330 - RNA, 20 nt, Artificial Sequence
  Synthetic
uaaggcaucccgauacagag

SEQ ID NO: 65331 - RNA, 21 nt, Artificial Sequence
  Synthetic
cuaaggcaucccgauacagag

SEQ ID NO: 65332 - RNA, 22 nt, Artificial Sequence
  Synthetic
ucuaaggcaucccgauacagag

SEQ ID NO: 65333 - RNA, 23 nt, Artificial Sequence
  Synthetic
uucuaaggcaucccgauacagag

SEQ ID NO: 65334 - RNA, 24 nt, Artificial Sequence
  Synthetic
auucuaaggcaucccgauacagag

SEQ ID NO: 65335 - RNA, 18 nt, Artificial Sequence
  Synthetic
agagaugauuaggcagag

SEQ ID NO: 65336 - RNA, 19 nt, Artificial Sequence
  Synthetic
aagagaugauuaggcagag

SEQ ID NO: 65337 - RNA, 20 nt, Artificial Sequence
  Synthetic
caagagaugauuaggcagag

SEQ ID NO: 65338 - RNA, 21 nt, Artificial Sequence
  Synthetic
acaagagaugauuaggcagag

SEQ ID NO: 65339 - RNA, 22 nt, Artificial Sequence
  Synthetic
aacaagagaugauuaggcagag

SEQ ID NO: 65340 - RNA, 23 nt, Artificial Sequence
  Synthetic
gaacaagagaugauuaggcagag

SEQ ID NO: 65341 - RNA, 24 nt, Artificial Sequence
  Synthetic
ugaacaagagaugauuaggcagag

SEQ ID NO: 65342 - RNA, 18 nt, Artificial Sequence
  Synthetic
uccaugcgacgugcagag

SEQ ID NO: 65343 - RNA, 19 nt, Artificial Sequence
  Synthetic
cuccaugcgacgugcagag

SEQ ID NO: 65344 - RNA, 20 nt, Artificial Sequence
  Synthetic
ucuccaugcgacgugcagag

SEQ ID NO: 65345 - RNA, 21 nt, Artificial Sequence
  Synthetic
gucuccaugcgacgugcagag

SEQ ID NO: 65346 - RNA, 22 nt, Artificial Sequence
  Synthetic
ggucuccaugcgacgugcagag

SEQ ID NO: 65347 - RNA, 23 nt, Artificial Sequence
  Synthetic
uggucuccaugcgacgugcagag

SEQ ID NO: 65348 - RNA, 24 nt, Artificial Sequence
  Synthetic
guggucuccaugcgacgugcagag

SEQ ID NO: 65349 - RNA, 18 nt, Artificial Sequence
  Synthetic
  misc_feature (3)..(3): n is a, c, g, or u
  misc_feature (12)..(12): n is a, c, g, or u
ggnaaauauuunguagag

SEQ ID NO: 65350 - RNA, 19 nt, Artificial Sequence
  Synthetic
  misc_feature (4)..(4): n is a, c, g, or u
  misc_feature (13)..(13): n is a, c, g, or u
gggnaaauauuunguagag

SEQ ID NO: 65351 - RNA, 20 nt, Artificial Sequence
  Synthetic
  misc_feature (5)..(5): n is a, c, g, or u
  misc_feature (14)..(14): n is a, c, g, or u
ggggnaaauauuunguagag

SEQ ID NO: 65352 - RNA, 21 nt, Artificial Sequence
  Synthetic
  misc_feature (6)..(6): n is a, c, g, or u
  misc_feature (15)..(15): n is a, c, g, or u
aggggnaaauauuunguagag

SEQ ID NO: 65353 - RNA, 22 nt, Artificial Sequence
  Synthetic
  misc_feature (7)..(7): n is a, c, g, or u
  misc_feature (16)..(16): n is a, c, g, or u
uaggggnaaauauuunguagag

SEQ ID NO: 65354 - RNA, 23 nt, Artificial Sequence
  Synthetic
  misc_feature (8)..(8): n is a, c, g, or u
  misc_feature (17)..(17): n is a, c, g, or u
cuaggggnaaauauuunguagag

SEQ ID NO: 65355 - RNA, 24 nt, Artificial Sequence
  Synthetic
  misc_feature (9)..(9): n is a, c, g, or u
  misc_feature (18)..(18): n is a, c, g, or u
ucuaggggnaaauauuunguagag

SEQ ID NO: 65356 - RNA, 18 nt, Artificial Sequence
  Synthetic
ccccgccuguaacacgag

SEQ ID NO: 65357 - RNA, 19 nt, Artificial Sequence
  Synthetic
accccgccuguaacacgag

SEQ ID NO: 65358 - RNA, 20 nt, Artificial Sequence
  Synthetic
aaccccgccuguaacacgag

SEQ ID NO: 65359 - RNA, 21 nt, Artificial Sequence
  Synthetic
aaaccccgccuguaacacgag

SEQ ID NO: 65360 - RNA, 22 nt, Artificial Sequence
  Synthetic
aaaaccccgccuguaacacgag

SEQ ID NO: 65361 - RNA, 23 nt, Artificial Sequence
  Synthetic
aaaaaccccgccuguaacacgag

SEQ ID NO: 65362 - RNA, 24 nt, Artificial Sequence
  Synthetic
gaaaaaccccgccuguaacacgag

SEQ ID NO: 65363 - RNA, 18 nt, Artificial Sequence
  Synthetic
gagaucuucgucugcgag

SEQ ID NO: 65364 - RNA, 19 nt, Artificial Sequence
  Synthetic
ugagaucuucgucugcgag

SEQ ID NO: 65365 - RNA, 20 nt, Artificial Sequence
  Synthetic
uugagaucuucgucugcgag

SEQ ID NO: 65366 - RNA, 21 nt, Artificial Sequence
  Synthetic
auugagaucuucgucugcgag

SEQ ID NO: 65367 - RNA, 22 nt, Artificial Sequence
  Synthetic
gauugagaucuucgucugcgag

SEQ ID NO: 65368 - RNA, 23 nt, Artificial Sequence
  Synthetic
cgauugagaucuucgucugcgag

SEQ ID NO: 65369 - RNA, 24 nt, Artificial Sequence
  Synthetic
gcgauugagaucuucgucugcgag

SEQ ID NO: 65370 - RNA, 18 nt, Artificial Sequence
  Synthetic
auucuucccccauucgag

SEQ ID NO: 65371 - RNA, 19 nt, Artificial Sequence
  Synthetic
gauucuucccccauucgag

SEQ ID NO: 65372 - RNA, 20 nt, Artificial Sequence
  Synthetic
ugauucuucccccauucgag

SEQ ID NO: 65373 - RNA, 21 nt, Artificial Sequence
  Synthetic
augauucuucccccauucgag

SEQ ID NO: 65374 - RNA, 22 nt, Artificial Sequence
  Synthetic
aaugauucuucccccauucgag

SEQ ID NO: 65375 - RNA, 23 nt, Artificial Sequence
  Synthetic
gaaugauucuucccccauucgag

SEQ ID NO: 65376 - RNA, 24 nt, Artificial Sequence
  Synthetic
ggaaugauucuucccccauucgag

SEQ ID NO: 65377 - RNA, 18 nt, Artificial Sequence
  Synthetic
  misc_feature (2)..(2): n is a, c, g, or u
cnggaacggcagacggag

SEQ ID NO: 65378 - RNA, 19 nt, Artificial Sequence
  Synthetic
  misc_feature (3)..(3): n is a, c, g, or u
gcnggaacggcagacggag

SEQ ID NO: 65379 - RNA, 20 nt, Artificial Sequence
  Synthetic
  misc_feature (4)..(4): n is a, c, g, or u
ggcnggaacggcagacggag

SEQ ID NO: 65380 - RNA, 21 nt, Artificial Sequence
  Synthetic
  misc_feature (5)..(5): n is a, c, g, or u
cggcnggaacggcagacggag

SEQ ID NO: 65381 - RNA, 22 nt, Artificial Sequence
  Synthetic
  misc_feature (6)..(6): n is a, c, g, or u
ucggcnggaacggcagacggag

SEQ ID NO: 65382 - RNA, 23 nt, Artificial Sequence
  Synthetic
  misc_feature (7)..(7): n is a, c, g, or u
gucggcnggaacggcagacggag

SEQ ID NO: 65383 - RNA, 24 nt, Artificial Sequence
  Synthetic
  misc_feature (8)..(8): n is a, c, g, or u
ggucggcnggaacggcagacggag

SEQ ID NO: 65384 - RNA, 18 nt, Artificial Sequence
  Synthetic
gauuaaagacagguauag

SEQ ID NO: 65385 - RNA, 19 nt, Artificial Sequence
  Synthetic
ggauuaaagacagguauag

SEQ ID NO: 65386 - RNA, 20 nt, Artificial Sequence
  Synthetic
aggauuaaagacagguauag

SEQ ID NO: 65387 - RNA, 21 nt, Artificial Sequence
  Synthetic
uaggauuaaagacagguauag

SEQ ID NO: 65388 - RNA, 22 nt, Artificial Sequence
  Synthetic
uuaggauuaaagacagguauag

SEQ ID NO: 65389 - RNA, 23 nt, Artificial Sequence
  Synthetic
guuaggauuaaagacagguauag

SEQ ID NO: 65390 - RNA, 24 nt, Artificial Sequence
  Synthetic
aguuaggauuaaagacagguauag

SEQ ID NO: 65391 - RNA, 18 nt, Artificial Sequence
  Synthetic
agaugagugaggcaguag

SEQ ID NO: 65392 - RNA, 19 nt, Artificial Sequence
  Synthetic
gagaugagugaggcaguag

SEQ ID NO: 65393 - RNA, 20 nt, Artificial Sequence
  Synthetic
cgagaugagugaggcaguag

SEQ ID NO: 65394 - RNA, 21 nt, Artificial Sequence
  Synthetic
acgagaugagugaggcaguag

SEQ ID NO: 65395 - RNA, 22 nt, Artificial Sequence
  Synthetic
gacgagaugagugaggcaguag

SEQ ID NO: 65396 - RNA, 23 nt, Artificial Sequence
  Synthetic
ugacgagaugagugaggcaguag

SEQ ID NO: 65397 - RNA, 24 nt, Artificial Sequence
  Synthetic
uugacgagaugagugaggcaguag

SEQ ID NO: 65398 - RNA, 18 nt, Artificial Sequence
  Synthetic
gaugagaaggcacagacg

SEQ ID NO: 65399 - RNA, 19 nt, Artificial Sequence
  Synthetic
agaugagaaggcacagacg

SEQ ID NO: 65400 - RNA, 20 nt, Artificial Sequence
  Synthetic
cagaugagaaggcacagacg

SEQ ID NO: 65401 - RNA, 21 nt, Artificial Sequence
  Synthetic
gcagaugagaaggcacagacg

SEQ ID NO: 65402 - RNA, 22 nt, Artificial Sequence
  Synthetic
ggcagaugagaaggcacagacg

SEQ ID NO: 65403 - RNA, 23 nt, Artificial Sequence
  Synthetic
cggcagaugagaaggcacagacg

SEQ ID NO: 65404 - RNA, 24 nt, Artificial Sequence
  Synthetic
ccggcagaugagaaggcacagacg

SEQ ID NO: 65405 - RNA, 18 nt, Artificial Sequence
  Synthetic
  misc_feature (5)..(5): n is a, c, g, or u
cggcnggaacggcagacg

SEQ ID NO: 65406 - RNA, 19 nt, Artificial Sequence
  Synthetic
  misc_feature (6)..(6): n is a, c, g, or u
ucggcnggaacggcagacg

SEQ ID NO: 65407 - RNA, 20 nt, Artificial Sequence
  Synthetic
  misc_feature (7)..(7): n is a, c, g, or u
gucggcnggaacggcagacg

SEQ ID NO: 65408 - RNA, 21 nt, Artificial Sequence
  Synthetic
  misc_feature (8)..(8): n is a, c, g, or u
ggucggcnggaacggcagacg

SEQ ID NO: 65409 - RNA, 22 nt, Artificial Sequence
  Synthetic
  misc_feature (9)..(9): n is a, c, g, or u
uggucggcnggaacggcagacg

SEQ ID NO: 65410 - RNA, 23 nt, Artificial Sequence
  Synthetic
  misc_feature (10)..(10): n is a, c, g, or u
guggucggcnggaacggcagacg

SEQ ID NO: 65411 - RNA, 24 nt, Artificial Sequence
  Synthetic
  misc_feature (11)..(11): n is a, c, g, or u
cguggucggcnggaacggcagacg

SEQ ID NO: 65412 - RNA, 18 nt, Artificial Sequence
  Synthetic
acagugggggaaagcccg

SEQ ID NO: 65413 - RNA, 19 nt, Artificial Sequence
  Synthetic
gacagugggggaaagcccg

SEQ ID NO: 65414 - RNA, 20 nt, Artificial Sequence
  Synthetic
agacagugggggaaagcccg

SEQ ID NO: 65415 - RNA, 21 nt, Artificial Sequence
  Synthetic
cagacagugggggaaagcccg

SEQ ID NO: 65416 - RNA, 22 nt, Artificial Sequence
  Synthetic
ccagacagugggggaaagcccg

SEQ ID NO: 65417 - RNA, 23 nt, Artificial Sequence
  Synthetic
gccagacagugggggaaagcccg

SEQ ID NO: 65418 - RNA, 24 nt, Artificial Sequence
  Synthetic
agccagacagugggggaaagcccg

SEQ ID NO: 65419 - RNA, 18 nt, Artificial Sequence
  Synthetic
aucuucgucugcgaggcg

SEQ ID NO: 65420 - RNA, 19 nt, Artificial Sequence
  Synthetic
gaucuucgucugcgaggcg

SEQ ID NO: 65421 - RNA, 20 nt, Artificial Sequence
  Synthetic
agaucuucgucugcgaggcg

SEQ ID NO: 65422 - RNA, 21 nt, Artificial Sequence
  Synthetic
gagaucuucgucugcgaggcg

SEQ ID NO: 65423 - RNA, 22 nt, Artificial Sequence
  Synthetic
ugagaucuucgucugcgaggcg

SEQ ID NO: 65424 - RNA, 23 nt, Artificial Sequence
  Synthetic
uugagaucuucgucugcgaggcg

SEQ ID NO: 65425 - RNA, 24 nt, Artificial Sequence
  Synthetic
auugagaucuucgucugcgaggcg

SEQ ID NO: 65426 - RNA, 18 nt, Artificial Sequence
  Synthetic
augaggcauagcagcagg

SEQ ID NO: 65427 - RNA, 19 nt, Artificial Sequence
  Synthetic
gaugaggcauagcagcagg

SEQ ID NO: 65428 - RNA, 20 nt, Artificial Sequence
  Synthetic
agaugaggcauagcagcagg

SEQ ID NO: 65429 - RNA, 21 nt, Artificial Sequence
  Synthetic
aagaugaggcauagcagcagg

SEQ ID NO: 65430 - RNA, 22 nt, Artificial Sequence
  Synthetic
gaagaugaggcauagcagcagg

SEQ ID NO: 65431 - RNA, 23 nt, Artificial Sequence
  Synthetic
agaagaugaggcauagcagcagg

SEQ ID NO: 65432 - RNA, 24 nt, Artificial Sequence
  Synthetic
aagaagaugaggcauagcagcagg

SEQ ID NO: 65433 - RNA, 18 nt, Artificial Sequence
  Synthetic
acugccgauugguggagg

SEQ ID NO: 65434 - RNA, 19 nt, Artificial Sequence
  Synthetic
gacugccgauugguggagg

SEQ ID NO: 65435 - RNA, 20 nt, Artificial Sequence
  Synthetic
ugacugccgauugguggagg

SEQ ID NO: 65436 - RNA, 21 nt, Artificial Sequence
  Synthetic
cugacugccgauugguggagg

SEQ ID NO: 65437 - RNA, 22 nt, Artificial Sequence
  Synthetic
ccugacugccgauugguggagg

SEQ ID NO: 65438 - RNA, 23 nt, Artificial Sequence
  Synthetic
uccugacugccgauugguggagg

SEQ ID NO: 65439 - RNA, 24 nt, Artificial Sequence
  Synthetic
uuccugacugccgauugguggagg

SEQ ID NO: 65440 - RNA, 18 nt, Artificial Sequence
  Synthetic
gaacaagagaugauuagg

SEQ ID NO: 65441 - RNA, 19 nt, Artificial Sequence
  Synthetic
ugaacaagagaugauuagg

SEQ ID NO: 65442 - RNA, 20 nt, Artificial Sequence
  Synthetic
augaacaagagaugauuagg

SEQ ID NO: 65443 - RNA, 21 nt, Artificial Sequence
  Synthetic
caugaacaagagaugauuagg

SEQ ID NO: 65444 - RNA, 22 nt, Artificial Sequence
  Synthetic
acaugaacaagagaugauuagg

SEQ ID NO: 65445 - RNA, 23 nt, Artificial Sequence
  Synthetic
gacaugaacaagagaugauuagg

SEQ ID NO: 65446 - RNA, 24 nt, Artificial Sequence
  Synthetic
ggacaugaacaagagaugauuagg

SEQ ID NO: 65447 - RNA, 18 nt, Artificial Sequence
  Synthetic
  misc_feature (3)..(3): n is a, c, g, or u
aangauguauauuuccgg

SEQ ID NO: 65448 - RNA, 19 nt, Artificial Sequence
  Synthetic
  misc_feature (4)..(4): n is a, c, g, or u
aaangauguauauuuccgg

SEQ ID NO: 65449 - RNA, 20 nt, Artificial Sequence
  Synthetic
  misc_feature (5)..(5): n is a, c, g, or u
gaaangauguauauuuccgg

SEQ ID NO: 65450 - RNA, 21 nt, Artificial Sequence
  Synthetic
  misc_feature (6)..(6): n is a, c, g, or u
ggaaangauguauauuuccgg

SEQ ID NO: 65451 - RNA, 22 nt, Artificial Sequence
  Synthetic
  misc_feature (7)..(7): n is a, c, g, or u
uggaaangauguauauuuccgg

SEQ ID NO: 65452 - RNA, 23 nt, Artificial Sequence
  Synthetic
  misc_feature (8)..(8): n is a, c, g, or u
auggaaangauguauauuuccgg

SEQ ID NO: 65453 - RNA, 24 nt, Artificial Sequence
  Synthetic
  misc_feature (9)..(9): n is a, c, g, or u
cauggaaangauguauauuuccgg

SEQ ID NO: 65454 - RNA, 18 nt, Artificial Sequence
  Synthetic
uuccgcaguauggaucgg

SEQ ID NO: 65455 - RNA, 19 nt, Artificial Sequence
  Synthetic
guuccgcaguauggaucgg

SEQ ID NO: 65456 - RNA, 20 nt, Artificial Sequence
  Synthetic
aguuccgcaguauggaucgg

SEQ ID NO: 65457 - RNA, 21 nt, Artificial Sequence
  Synthetic
gaguuccgcaguauggaucgg

SEQ ID NO: 65458 - RNA, 22 nt, Artificial Sequence
  Synthetic
ggaguuccgcaguauggaucgg

SEQ ID NO: 65459 - RNA, 23 nt, Artificial Sequence
  Synthetic
aggaguuccgcaguauggaucgg

SEQ ID NO: 65460 - RNA, 24 nt, Artificial Sequence
  Synthetic
uaggaguuccgcaguauggaucgg

SEQ ID NO: 65461 - RNA, 18 nt, Artificial Sequence
  Synthetic
ggugcgccccguggucgg

SEQ ID NO: 65462 - RNA, 19 nt, Artificial Sequence
  Synthetic
aggugcgccccguggucgg

SEQ ID NO: 65463 - RNA, 20 nt, Artificial Sequence
  Synthetic
gaggugcgccccguggucgg

SEQ ID NO: 65464 - RNA, 21 nt, Artificial Sequence
  Synthetic
agaggugcgccccguggucgg

SEQ ID NO: 65465 - RNA, 22 nt, Artificial Sequence
  Synthetic
gagaggugcgccccguggucgg

SEQ ID NO: 65466 - RNA, 23 nt, Artificial Sequence
  Synthetic
agagaggugcgccccguggucgg

SEQ ID NO: 65467 - RNA, 24 nt, Artificial Sequence
  Synthetic
aagagaggugcgccccguggucgg

SEQ ID NO: 65468 - RNA, 18 nt, Artificial Sequence
  Synthetic
ugagccaggagaaacggg

SEQ ID NO: 65469 - RNA, 19 nt, Artificial Sequence
  Synthetic
cugagccaggagaaacggg

SEQ ID NO: 65470 - RNA, 20 nt, Artificial Sequence
  Synthetic
acugagccaggagaaacggg

SEQ ID NO: 65471 - RNA, 21 nt, Artificial Sequence
  Synthetic
aacugagccaggagaaacggg

SEQ ID NO: 65472 - RNA, 22 nt, Artificial Sequence
  Synthetic
aaacugagccaggagaaacggg

SEQ ID NO: 65473 - RNA, 23 nt, Artificial Sequence
  Synthetic
uaaacugagccaggagaaacggg

SEQ ID NO: 65474 - RNA, 24 nt, Artificial Sequence
  Synthetic
guaaacugagccaggagaaacggg

SEQ ID NO: 65475 - RNA, 18 nt, Artificial Sequence
  Synthetic
aaagcccaugaugauggg

SEQ ID NO: 65476 - RNA, 19 nt, Artificial Sequence
  Synthetic
gaaagcccaugaugauggg

SEQ ID NO: 65477 - RNA, 20 nt, Artificial Sequence
  Synthetic
cgaaagcccaugaugauggg

SEQ ID NO: 65478 - RNA, 21 nt, Artificial Sequence
  Synthetic
ccgaaagcccaugaugauggg

SEQ ID NO: 65479 - RNA, 22 nt, Artificial Sequence
  Synthetic
uccgaaagcccaugaugauggg

SEQ ID NO: 65480 - RNA, 23 nt, Artificial Sequence
  Synthetic
uuccgaaagcccaugaugauggg

SEQ ID NO: 65481 - RNA, 24 nt, Artificial Sequence
  Synthetic
uuuccgaaagcccaugaugauggg

SEQ ID NO: 65482 - RNA, 18 nt, Artificial Sequence
  Synthetic
cugaaagccagacagugg

SEQ ID NO: 65483 - RNA, 19 nt, Artificial Sequence
  Synthetic
acugaaagccagacagugg

SEQ ID NO: 65484 - RNA, 20 nt, Artificial Sequence
  Synthetic
aacugaaagccagacagugg

SEQ ID NO: 65485 - RNA, 21 nt, Artificial Sequence
  Synthetic
uaacugaaagccagacagugg

SEQ ID NO: 65486 - RNA, 22 nt, Artificial Sequence
  Synthetic
auaacugaaagccagacagugg

SEQ ID NO: 65487 - RNA, 23 nt, Artificial Sequence
  Synthetic
uauaacugaaagccagacagugg

SEQ ID NO: 65488 - RNA, 24 nt, Artificial Sequence
  Synthetic
auauaacugaaagccagacagugg

SEQ ID NO: 65489 - RNA, 18 nt, Artificial Sequence
  Synthetic
gcuggauccaacuggugg

SEQ ID NO: 65490 - RNA, 19 nt, Artificial Sequence
  Synthetic
ugcuggauccaacuggugg

SEQ ID NO: 65491 - RNA, 20 nt, Artificial Sequence
  Synthetic
augcuggauccaacuggugg

SEQ ID NO: 65492 - RNA, 21 nt, Artificial Sequence
  Synthetic
aaugcuggauccaacuggugg

SEQ ID NO: 65493 - RNA, 22 nt, Artificial Sequence
  Synthetic
gaaugcuggauccaacuggugg

SEQ ID NO: 65494 - RNA, 23 nt, Artificial Sequence
  Synthetic
ugaaugcuggauccaacuggugg

SEQ ID NO: 65495 - RNA, 24 nt, Artificial Sequence
  Synthetic
cugaaugcuggauccaacuggugg

SEQ ID NO: 65496 - RNA, 18 nt, Artificial Sequence
  Synthetic
uuccugacugccgauugg

SEQ ID NO: 65497 - RNA, 19 nt, Artificial Sequence
  Synthetic
cuuccugacugccgauugg

SEQ ID NO: 65498 - RNA, 20 nt, Artificial Sequence
  Synthetic
ccuuccugacugccgauugg

SEQ ID NO: 65499 - RNA, 21 nt, Artificial Sequence
  Synthetic
gccuuccugacugccgauugg

SEQ ID NO: 65500 - RNA, 22 nt, Artificial Sequence
  Synthetic
ugccuuccugacugccgauugg

SEQ ID NO: 65501 - RNA, 23 nt, Artificial Sequence
  Synthetic
cugccuuccugacugccgauugg

SEQ ID NO: 65502 - RNA, 24 nt, Artificial Sequence
  Synthetic
gcugccuuccugacugccgauugg

SEQ ID NO: 65503 - RNA, 18 nt, Artificial Sequence
  Synthetic
  misc_feature (11)..(11): n is a, c, g, or u
  misc_feature (17)..(17): n is a, c, g, or u
ugagugcagunuggugng

SEQ ID NO: 65504 - RNA, 19 nt, Artificial Sequence
  Synthetic
  misc_feature (12)..(12): n is a, c, g, or u
  misc_feature (18)..(18): n is a, c, g, or u
cugagugcagunuggugng

SEQ ID NO: 65505 - RNA, 20 nt, Artificial Sequence
  Synthetic
  misc_feature (13)..(13): n is a, c, g, or u
  misc_feature (19)..(19): n is a, c, g, or u
ccugagugcagunuggugng

SEQ ID NO: 65506 - RNA, 21 nt, Artificial Sequence
  Synthetic
  misc_feature (14)..(14): n is a, c, g, or u
  misc_feature (20)..(20): n is a, c, g, or u
gccugagugcagunuggugng

SEQ ID NO: 65507 - RNA, 22 nt, Artificial Sequence
  Synthetic
  misc_feature (15)..(15): n is a, c, g, or u
  misc_feature (21)..(21): n is a, c, g, or u
ugccugagugcagunuggugng

SEQ ID NO: 65508 - RNA, 23 nt, Artificial Sequence
  Synthetic
  misc_feature (16)..(16): n is a, c, g, or u
  misc_feature (22)..(22): n is a, c, g, or u
uugccugagugcagunuggugng

SEQ ID NO: 65509 - RNA, 24 nt, Artificial Sequence
  Synthetic
  misc_feature (17)..(17): n is a, c, g, or u
  misc_feature (23)..(23): n is a, c, g, or u
cuugccugagugcagunuggugng

SEQ ID NO: 65510 - RNA, 18 nt, Artificial Sequence
  Synthetic
  misc_feature (8)..(8): n is a, c, g, or u
  misc_feature (17)..(17): n is a, c, g, or u
cuaggggnaaauauuung

SEQ ID NO: 65511 - RNA, 19 nt, Artificial Sequence
  Synthetic
  misc_feature (9)..(9): n is a, c, g, or u
  misc_feature (18)..(18): n is a, c, g, or u
ucuaggggnaaauauuung

SEQ ID NO: 65512 - RNA, 20 nt, Artificial Sequence
  Synthetic
  misc_feature (10)..(10): n is a, c, g, or u
  misc_feature (19)..(19): n is a, c, g, or u
cucuaggggnaaauauuung

SEQ ID NO: 65513 - RNA, 21 nt, Artificial Sequence
  Synthetic
  misc_feature (11)..(11): n is a, c, g, or u
  misc_feature (20)..(20): n is a, c, g, or u
ucucuaggggnaaauauuung

SEQ ID NO: 65514 - RNA, 22 nt, Artificial Sequence
  Synthetic
  misc_feature (12)..(12): n is a, c, g, or u
  misc_feature (21)..(21): n is a, c, g, or u
uucucuaggggnaaauauuung

SEQ ID NO: 65515 - RNA, 23 nt, Artificial Sequence
  Synthetic
  misc_feature (13)..(13): n is a, c, g, or u
  misc_feature (22)..(22): n is a, c, g, or u
uuucucuaggggnaaauauuung

SEQ ID NO: 65516 - RNA, 24 nt, Artificial Sequence
  Synthetic
  misc_feature (14)..(14): n is a, c, g, or u
  misc_feature (23)..(23): n is a, c, g, or u
cuuucucuaggggnaaauauuung

SEQ ID NO: 65517 - RNA, 18 nt, Artificial Sequence
  Synthetic
guuuugaacagcaacaug

SEQ ID NO: 65518 - RNA, 19 nt, Artificial Sequence
  Synthetic
gguuuugaacagcaacaug

SEQ ID NO: 65519 - RNA, 20 nt, Artificial Sequence
  Synthetic
agguuuugaacagcaacaug

SEQ ID NO: 65520 - RNA, 21 nt, Artificial Sequence
  Synthetic
aagguuuugaacagcaacaug

SEQ ID NO: 65521 - RNA, 22 nt, Artificial Sequence
  Synthetic
gaagguuuugaacagcaacaug

SEQ ID NO: 65522 - RNA, 23 nt, Artificial Sequence
  Synthetic
cgaagguuuugaacagcaacaug

SEQ ID NO: 65523 - RNA, 24 nt, Artificial Sequence
  Synthetic
ccgaagguuuugaacagcaacaug

SEQ ID NO: 65524 - RNA, 18 nt, Artificial Sequence
  Synthetic
aggcauagcagcaggaug

SEQ ID NO: 65525 - RNA, 19 nt, Artificial Sequence
  Synthetic
gaggcauagcagcaggaug

SEQ ID NO: 65526 - RNA, 20 nt, Artificial Sequence
  Synthetic
ugaggcauagcagcaggaug

SEQ ID NO: 65527 - RNA, 21 nt, Artificial Sequence
  Synthetic
augaggcauagcagcaggaug

SEQ ID NO: 65528 - RNA, 22 nt, Artificial Sequence
  Synthetic
gaugaggcauagcagcaggaug

SEQ ID NO: 65529 - RNA, 23 nt, Artificial Sequence
  Synthetic
agaugaggcauagcagcaggaug

SEQ ID NO: 65530 - RNA, 24 nt, Artificial Sequence
  Synthetic
aagaugaggcauagcagcaggaug

SEQ ID NO: 65531 - RNA, 18 nt, Artificial Sequence
  Synthetic
uuccgaaagcccaugaug

SEQ ID NO: 65532 - RNA, 19 nt, Artificial Sequence
  Synthetic
uuuccgaaagcccaugaug

SEQ ID NO: 65533 - RNA, 20 nt, Artificial Sequence
  Synthetic
uuuuccgaaagcccaugaug

SEQ ID NO: 65534 - RNA, 21 nt, Artificial Sequence
  Synthetic
auuuuccgaaagcccaugaug

SEQ ID NO: 65535 - RNA, 22 nt, Artificial Sequence
  Synthetic
aauuuuccgaaagcccaugaug

SEQ ID NO: 65536 - RNA, 23 nt, Artificial Sequence
  Synthetic
gaauuuuccgaaagcccaugaug

SEQ ID NO: 65537 - RNA, 24 nt, Artificial Sequence
  Synthetic
ggaauuuuccgaaagcccaugaug

SEQ ID NO: 65538 - RNA, 18 nt, Artificial Sequence
  Synthetic
cuagaagaucucuuacug

SEQ ID NO: 65539 - RNA, 19 nt, Artificial Sequence
  Synthetic
ucuagaagaucucuuacug

SEQ ID NO: 65540 - RNA, 20 nt, Artificial Sequence
  Synthetic
aucuagaagaucucuuacug

SEQ ID NO: 65541 - RNA, 21 nt, Artificial Sequence
  Synthetic
uaucuagaagaucucuuacug

SEQ ID NO: 65542 - RNA, 22 nt, Artificial Sequence
  Synthetic
guaucuagaagaucucuuacug

SEQ ID NO: 65543 - RNA, 23 nt, Artificial Sequence
  Synthetic
gguaucuagaagaucucuuacug

SEQ ID NO: 65544 - RNA, 24 nt, Artificial Sequence
  Synthetic
cgguaucuagaagaucucuuacug

SEQ ID NO: 65545 - RNA, 18 nt, Artificial Sequence
  Synthetic
ucuuacucugggauccug

SEQ ID NO: 65546 - RNA, 19 nt, Artificial Sequence
  Synthetic
cucuuacucugggauccug

SEQ ID NO: 65547 - RNA, 20 nt, Artificial Sequence
  Synthetic
ccucuuacucugggauccug

SEQ ID NO: 65548 - RNA, 21 nt, Artificial Sequence
  Synthetic
gccucuuacucugggauccug

SEQ ID NO: 65549 - RNA, 22 nt, Artificial Sequence
  Synthetic
ggccucuuacucugggauccug

SEQ ID NO: 65550 - RNA, 23 nt, Artificial Sequence
  Synthetic
aggccucuuacucugggauccug

SEQ ID NO: 65551 - RNA, 24 nt, Artificial Sequence
  Synthetic
caggccucuuacucugggauccug

SEQ ID NO: 65552 - RNA, 18 nt, Artificial Sequence
  Synthetic
uugguggucuauaagcug

SEQ ID NO: 65553 - RNA, 19 nt, Artificial Sequence
  Synthetic
uuugguggucuauaagcug

SEQ ID NO: 65554 - RNA, 20 nt, Artificial Sequence
  Synthetic
auuugguggucuauaagcug

SEQ ID NO: 65555 - RNA, 21 nt, Artificial Sequence
  Synthetic
cauuugguggucuauaagcug

SEQ ID NO: 65556 - RNA, 22 nt, Artificial Sequence
  Synthetic
gcauuugguggucuauaagcug

SEQ ID NO: 65557 - RNA, 23 nt, Artificial Sequence
  Synthetic
ggcauuugguggucuauaagcug

SEQ ID NO: 65558 - RNA, 24 nt, Artificial Sequence
  Synthetic
gggcauuugguggucuauaagcug

SEQ ID NO: 65559 - RNA, 18 nt, Artificial Sequence
  Synthetic
ccgcaggauucagcgcug

SEQ ID NO: 65560 - RNA, 19 nt, Artificial Sequence
  Synthetic
uccgcaggauucagcgcug

SEQ ID NO: 65561 - RNA, 20 nt, Artificial Sequence
  Synthetic
guccgcaggauucagcgcug

SEQ ID NO: 65562 - RNA, 21 nt, Artificial Sequence
  Synthetic
cguccgcaggauucagcgcug

SEQ ID NO: 65563 - RNA, 22 nt, Artificial Sequence
  Synthetic
ucguccgcaggauucagcgcug

SEQ ID NO: 65564 - RNA, 23 nt, Artificial Sequence
  Synthetic
gucguccgcaggauucagcgcug

SEQ ID NO: 65565 - RNA, 24 nt, Artificial Sequence
  Synthetic
ggucguccgcaggauucagcgcug

SEQ ID NO: 65566 - RNA, 18 nt, Artificial Sequence
  Synthetic
acugaaagccagacagug

SEQ ID NO: 65567 - RNA, 19 nt, Artificial Sequence
  Synthetic
aacugaaagccagacagug

SEQ ID NO: 65568 - RNA, 20 nt, Artificial Sequence
  Synthetic
uaacugaaagccagacagug

SEQ ID NO: 65569 - RNA, 21 nt, Artificial Sequence
  Synthetic
auaacugaaagccagacagug

SEQ ID NO: 65570 - RNA, 22 nt, Artificial Sequence
  Synthetic
uauaacugaaagccagacagug

SEQ ID NO: 65571 - RNA, 23 nt, Artificial Sequence
  Synthetic
auauaacugaaagccagacagug

SEQ ID NO: 65572 - RNA, 24 nt, Artificial Sequence
  Synthetic
cauauaacugaaagccagacagug

SEQ ID NO: 65573 - RNA, 18 nt, Artificial Sequence
  Synthetic
uggucuccaugcgacgug

SEQ ID NO: 65574 - RNA, 19 nt, Artificial Sequence
  Synthetic
guggucuccaugcgacgug

SEQ ID NO: 65575 - RNA, 20 nt, Artificial Sequence
  Synthetic
gguggucuccaugcgacgug

SEQ ID NO: 65576 - RNA, 21 nt, Artificial Sequence
  Synthetic
cgguggucuccaugcgacgug

SEQ ID NO: 65577 - RNA, 22 nt, Artificial Sequence
  Synthetic
acgguggucuccaugcgacgug

SEQ ID NO: 65578 - RNA, 23 nt, Artificial Sequence
  Synthetic
cacgguggucuccaugcgacgug

SEQ ID NO: 65579 - RNA, 24 nt, Artificial Sequence
  Synthetic
ucacgguggucuccaugcgacgug

SEQ ID NO: 65580 - RNA, 18 nt, Artificial Sequence
  Synthetic
ccccaaaaggccuccgug

SEQ ID NO: 65581 - RNA, 19 nt, Artificial Sequence
  Synthetic
accccaaaaggccuccgug

SEQ ID NO: 65582 - RNA, 20 nt, Artificial Sequence
  Synthetic
caccccaaaaggccuccgug

SEQ ID NO: 65583 - RNA, 21 nt, Artificial Sequence
  Synthetic
ccaccccaaaaggccuccgug

SEQ ID NO: 65584 - RNA, 22 nt, Artificial Sequence
  Synthetic
uccaccccaaaaggccuccgug

SEQ ID NO: 65585 - RNA, 23 nt, Artificial Sequence
  Synthetic
cuccaccccaaaaggccuccgug

SEQ ID NO: 65586 - RNA, 24 nt, Artificial Sequence
  Synthetic
gcuccaccccaaaaggccuccgug

SEQ ID NO: 65587 - RNA, 18 nt, Artificial Sequence
  Synthetic
aaucccagaggauuggug

SEQ ID NO: 65588 - RNA, 19 nt, Artificial Sequence
  Synthetic
aaaucccagaggauuggug

SEQ ID NO: 65589 - RNA, 20 nt, Artificial Sequence
  Synthetic
aaaaucccagaggauuggug

SEQ ID NO: 65590 - RNA, 21 nt, Artificial Sequence
  Synthetic
aaaaaucccagaggauuggug

SEQ ID NO: 65591 - RNA, 22 nt, Artificial Sequence
  Synthetic
aaaaaaucccagaggauuggug

SEQ ID NO: 65592 - RNA, 23 nt, Artificial Sequence
  Synthetic
gaaaaaaucccagaggauuggug

SEQ ID NO: 65593 - RNA, 24 nt, Artificial Sequence
  Synthetic
ggaaaaaaucccagaggauuggug

SEQ ID NO: 65594 - RNA, 18 nt, Artificial Sequence
  Synthetic
ccaaaaggccuccgugug

SEQ ID NO: 65595 - RNA, 19 nt, Artificial Sequence
  Synthetic
cccaaaaggccuccgugug

SEQ ID NO: 65596 - RNA, 20 nt, Artificial Sequence
  Synthetic
ccccaaaaggccuccgugug

SEQ ID NO: 65597 - RNA, 21 nt, Artificial Sequence
  Synthetic
accccaaaaggccuccgugug

SEQ ID NO: 65598 - RNA, 22 nt, Artificial Sequence
  Synthetic
caccccaaaaggccuccgugug

SEQ ID NO: 65599 - RNA, 23 nt, Artificial Sequence
  Synthetic
ccaccccaaaaggccuccgugug

SEQ ID NO: 65600 - RNA, 24 nt, Artificial Sequence
  Synthetic
uccaccccaaaaggccuccgugug

SEQ ID NO: 65601 - RNA, 18 nt, Artificial Sequence
  Synthetic
gauagccaggacaaauug

SEQ ID NO: 65602 - RNA, 19 nt, Artificial Sequence
  Synthetic
cgauagccaggacaaauug

SEQ ID NO: 65603 - RNA, 20 nt, Artificial Sequence
  Synthetic
gcgauagccaggacaaauug

SEQ ID NO: 65604 - RNA, 21 nt, Artificial Sequence
  Synthetic
agcgauagccaggacaaauug

SEQ ID NO: 65605 - RNA, 22 nt, Artificial Sequence
  Synthetic
cagcgauagccaggacaaauug

SEQ ID NO: 65606 - RNA, 23 nt, Artificial Sequence
  Synthetic
ccagcgauagccaggacaaauug

SEQ ID NO: 65607 - RNA, 24 nt, Artificial Sequence
  Synthetic
uccagcgauagccaggacaaauug

SEQ ID NO: 65608 - RNA, 18 nt, Artificial Sequence
  Synthetic
ggucggucguugacauug

SEQ ID NO: 65609 - RNA, 19 nt, Artificial Sequence
  Synthetic
aggucggucguugacauug

SEQ ID NO: 65610 - RNA, 20 nt, Artificial Sequence
  Synthetic
aaggucggucguugacauug

SEQ ID NO: 65611 - RNA, 21 nt, Artificial Sequence
  Synthetic
caaggucggucguugacauug

SEQ ID NO: 65612 - RNA, 22 nt, Artificial Sequence
  Synthetic
ucaaggucggucguugacauug

SEQ ID NO: 65613 - RNA, 23 nt, Artificial Sequence
  Synthetic
cucaaggucggucguugacauug

SEQ ID NO: 65614 - RNA, 24 nt, Artificial Sequence
  Synthetic
ccucaaggucggucguugacauug

SEQ ID NO: 65615 - RNA, 18 nt, Artificial Sequence
  Synthetic
caauccucgagaagauug

SEQ ID NO: 65616 - RNA, 19 nt, Artificial Sequence
  Synthetic
ccaauccucgagaagauug

SEQ ID NO: 65617 - RNA, 20 nt, Artificial Sequence
  Synthetic
cccaauccucgagaagauug

SEQ ID NO: 65618 - RNA, 21 nt, Artificial Sequence
  Synthetic
ccccaauccucgagaagauug

SEQ ID NO: 65619 - RNA, 22 nt, Artificial Sequence
  Synthetic
uccccaauccucgagaagauug

SEQ ID NO: 65620 - RNA, 23 nt, Artificial Sequence
  Synthetic
guccccaauccucgagaagauug

SEQ ID NO: 65621 - RNA, 24 nt, Artificial Sequence
  Synthetic
gguccccaauccucgagaagauug

SEQ ID NO: 65622 - RNA, 18 nt, Artificial Sequence
  Synthetic
cuuccugacugccgauug

SEQ ID NO: 65623 - RNA, 19 nt, Artificial Sequence
  Synthetic
ccuuccugacugccgauug

SEQ ID NO: 65624 - RNA, 20 nt, Artificial Sequence
  Synthetic
gccuuccugacugccgauug

SEQ ID NO: 65625 - RNA, 21 nt, Artificial Sequence
  Synthetic
ugccuuccugacugccgauug

SEQ ID NO: 65626 - RNA, 22 nt, Artificial Sequence
  Synthetic
cugccuuccugacugccgauug

SEQ ID NO: 65627 - RNA, 23 nt, Artificial Sequence
  Synthetic
gcugccuuccugacugccgauug

SEQ ID NO: 65628 - RNA, 24 nt, Artificial Sequence
  Synthetic
ggcugccuuccugacugccgauug

SEQ ID NO: 65629 - RNA, 18 nt, Artificial Sequence
  Synthetic
gggauccugcagagcuug

SEQ ID NO: 65630 - RNA, 19 nt, Artificial Sequence
  Synthetic
ugggauccugcagagcuug

SEQ ID NO: 65631 - RNA, 20 nt, Artificial Sequence
  Synthetic
cugggauccugcagagcuug

SEQ ID NO: 65632 - RNA, 21 nt, Artificial Sequence
  Synthetic
ucugggauccugcagagcuug

SEQ ID NO: 65633 - RNA, 22 nt, Artificial Sequence
  Synthetic
cucugggauccugcagagcuug

SEQ ID NO: 65634 - RNA, 23 nt, Artificial Sequence
  Synthetic
acucugggauccugcagagcuug

SEQ ID NO: 65635 - RNA, 24 nt, Artificial Sequence
  Synthetic
uacucugggauccugcagagcuug

SEQ ID NO: 65636 - RNA, 18 nt, Artificial Sequence
  Synthetic
gaaaggccuuguaaguug

SEQ ID NO: 65637 - RNA, 19 nt, Artificial Sequence
  Synthetic
agaaaggccuuguaaguug

SEQ ID NO: 65638 - RNA, 20 nt, Artificial Sequence
  Synthetic
cagaaaggccuuguaaguug

SEQ ID NO: 65639 - RNA, 21 nt, Artificial Sequence
  Synthetic
acagaaaggccuuguaaguug

SEQ ID NO: 65640 - RNA, 22 nt, Artificial Sequence
  Synthetic
cacagaaaggccuuguaaguug

SEQ ID NO: 65641 - RNA, 23 nt, Artificial Sequence
  Synthetic
acacagaaaggccuuguaaguug

SEQ ID NO: 65642 - RNA, 24 nt, Artificial Sequence
  Synthetic
uacacagaaaggccuuguaaguug

SEQ ID NO: 65643 - RNA, 18 nt, Artificial Sequence
  Synthetic
  misc_feature (10)..(10): n is a, c, g, or u
gcacagaccnggccguug

SEQ ID NO: 65644 - RNA, 19 nt, Artificial Sequence
  Synthetic
  misc_feature (11)..(11): n is a, c, g, or u
ggcacagaccnggccguug

SEQ ID NO: 65645 - RNA, 20 nt, Artificial Sequence
  Synthetic
  misc_feature (12)..(12): n is a, c, g, or u
uggcacagaccnggccguug

SEQ ID NO: 65646 - RNA, 21 nt, Artificial Sequence
  Synthetic
  misc_feature (13)..(13): n is a, c, g, or u
uuggcacagaccnggccguug

SEQ ID NO: 65647 - RNA, 22 nt, Artificial Sequence
  Synthetic
  misc_feature (14)..(14): n is a, c, g, or u
cuuggcacagaccnggccguug

SEQ ID NO: 65648 - RNA, 23 nt, Artificial Sequence
  Synthetic
  misc_feature (15)..(15): n is a, c, g, or u
acuuggcacagaccnggccguug

SEQ ID NO: 65649 - RNA, 24 nt, Artificial Sequence
  Synthetic
  misc_feature (16)..(16): n is a, c, g, or u
cacuuggcacagaccnggccguug

SEQ ID NO: 65650 - RNA, 18 nt, Artificial Sequence
  Synthetic
gagcuugguggaauguug

SEQ ID NO: 65651 - RNA, 19 nt, Artificial Sequence
  Synthetic
agagcuugguggaauguug

SEQ ID NO: 65652 - RNA, 20 nt, Artificial Sequence
  Synthetic
cagagcuugguggaauguug

SEQ ID NO: 65653 - RNA, 21 nt, Artificial Sequence
  Synthetic
gcagagcuugguggaauguug

SEQ ID NO: 65654 - RNA, 22 nt, Artificial Sequence
  Synthetic
ugcagagcuugguggaauguug

SEQ ID NO: 65655 - RNA, 23 nt, Artificial Sequence
  Synthetic
cugcagagcuugguggaauguug

SEQ ID NO: 65656 - RNA, 24 nt, Artificial Sequence
  Synthetic
ccugcagagcuugguggaauguug

SEQ ID NO: 65657 - RNA, 18 nt, Artificial Sequence
  Synthetic
gaccuugggcaagauuug

SEQ ID NO: 65658 - RNA, 19 nt, Artificial Sequence
  Synthetic
agaccuugggcaagauuug

SEQ ID NO: 65659 - RNA, 20 nt, Artificial Sequence
  Synthetic
aagaccuugggcaagauuug

SEQ ID NO: 65660 - RNA, 21 nt, Artificial Sequence
  Synthetic
uaagaccuugggcaagauuug

SEQ ID NO: 65661 - RNA, 22 nt, Artificial Sequence
  Synthetic
guaagaccuugggcaagauuug

SEQ ID NO: 65662 - RNA, 23 nt, Artificial Sequence
  Synthetic
uguaagaccuugggcaagauuug

SEQ ID NO: 65663 - RNA, 24 nt, Artificial Sequence
  Synthetic
auguaagaccuugggcaagauuug

SEQ ID NO: 65664 - RNA, 18 nt, Artificial Sequence
  Synthetic
  misc_feature (3)..(3): n is a, c, g, or u
ucnguccaguggucuuug

SEQ ID NO: 65665 - RNA, 19 nt, Artificial Sequence
  Synthetic
  misc_feature (4)..(4): n is a, c, g, or u
uucnguccaguggucuuug

SEQ ID NO: 65666 - RNA, 20 nt, Artificial Sequence
  Synthetic
  misc_feature (5)..(5): n is a, c, g, or u
cuucnguccaguggucuuug

SEQ ID NO: 65667 - RNA, 21 nt, Artificial Sequence
  Synthetic
  misc_feature (6)..(6): n is a, c, g, or u
gcuucnguccaguggucuuug

SEQ ID NO: 65668 - RNA, 22 nt, Artificial Sequence
  Synthetic
  misc_feature (7)..(7): n is a, c, g, or u
ggcuucnguccaguggucuuug

SEQ ID NO: 65669 - RNA, 23 nt, Artificial Sequence
  Synthetic
  misc_feature (8)..(8): n is a, c, g, or u
uggcuucnguccaguggucuuug

SEQ ID NO: 65670 - RNA, 24 nt, Artificial Sequence
  Synthetic
  misc_feature (9)..(9): n is a, c, g, or u
uuggcuucnguccaguggucuuug

SEQ ID NO: 65671 - RNA, 18 nt, Artificial Sequence
  Synthetic
ccccaucuuuuuguuuug

SEQ ID NO: 65672 - RNA, 19 nt, Artificial Sequence
  Synthetic
uccccaucuuuuuguuuug

SEQ ID NO: 65673 - RNA, 20 nt, Artificial Sequence
  Synthetic
auccccaucuuuuuguuuug

SEQ ID NO: 65674 - RNA, 21 nt, Artificial Sequence
  Synthetic
uauccccaucuuuuuguuuug

SEQ ID NO: 65675 - RNA, 22 nt, Artificial Sequence
  Synthetic
auauccccaucuuuuuguuuug

SEQ ID NO: 65676 - RNA, 23 nt, Artificial Sequence
  Synthetic
aauauccccaucuuuuuguuuug

SEQ ID NO: 65677 - RNA, 24 nt, Artificial Sequence
  Synthetic
gaauauccccaucuuuuuguuuug

SEQ ID NO: 65678 - RNA, 18 nt, Artificial Sequence
  Synthetic
  misc_feature (18)..(18): n is a, c, g, or u
aagagguuggugagugan

SEQ ID NO: 65679 - RNA, 19 nt, Artificial Sequence
  Synthetic
  misc_feature (19)..(19): n is a, c, g, or u
caagagguuggugagugan

SEQ ID NO: 65680 - RNA, 20 nt, Artificial Sequence
  Synthetic
  misc_feature (20)..(20): n is a, c, g, or u
acaagagguuggugagugan

SEQ ID NO: 65681 - RNA, 21 nt, Artificial Sequence
  Synthetic
  misc_feature (21)..(21): n is a, c, g, or u
gacaagagguuggugagugan

SEQ ID NO: 65682 - RNA, 22 nt, Artificial Sequence
  Synthetic
  misc_feature (22)..(22): n is a, c, g, or u
ggacaagagguuggugagugan

SEQ ID NO: 65683 - RNA, 23 nt, Artificial Sequence
  Synthetic
  misc_feature (23)..(23): n is a, c, g, or u
aggacaagagguuggugagugan

SEQ ID NO: 65684 - RNA, 24 nt, Artificial Sequence
  Synthetic
  misc_feature (24)..(24): n is a, c, g, or u
gaggacaagagguuggugagugan

SEQ ID NO: 65685 - RNA, 18 nt, Artificial Sequence
  Synthetic
  misc_feature (12)..(12): n is a, c, g, or u
  misc_feature (18)..(18): n is a, c, g, or u
uuggugaguganuggagn

SEQ ID NO: 65686 - RNA, 19 nt, Artificial Sequence
  Synthetic
  misc_feature (13)..(13): n is a, c, g, or u
  misc_feature (19)..(19): n is a, c, g, or u
guuggugaguganuggagn

SEQ ID NO: 65687 - RNA, 20 nt, Artificial Sequence
  Synthetic
  misc_feature (14)..(14): n is a, c, g, or u
  misc_feature (20)..(20): n is a, c, g, or u
gguuggugaguganuggagn

SEQ ID NO: 65688 - RNA, 21 nt, Artificial Sequence
  Synthetic
  misc_feature (15)..(15): n is a, c, g, or u
  misc_feature (21)..(21): n is a, c, g, or u
agguuggugaguganuggagn

SEQ ID NO: 65689 - RNA, 22 nt, Artificial Sequence
  Synthetic
  misc_feature (16)..(16): n is a, c, g, or u
  misc_feature (22)..(22): n is a, c, g, or u
gagguuggugaguganuggagn

SEQ ID NO: 65690 - RNA, 23 nt, Artificial Sequence
  Synthetic
  misc_feature (17)..(17): n is a, c, g, or u
  misc_feature (23)..(23): n is a, c, g, or u
agagguuggugaguganuggagn

SEQ ID NO: 65691 - RNA, 24 nt, Artificial Sequence
  Synthetic
  misc_feature (18)..(18): n is a, c, g, or u
  misc_feature (24)..(24): n is a, c, g, or u
aagagguuggugaguganuggagn

SEQ ID NO: 65692 - RNA, 18 nt, Artificial Sequence
  Synthetic
  misc_feature (18)..(18): n is a, c, g, or u
uacauaacccaugaaaun

SEQ ID NO: 65693 - RNA, 19 nt, Artificial Sequence
  Synthetic
  misc_feature (19)..(19): n is a, c, g, or u
uuacauaacccaugaaaun

SEQ ID NO: 65694 - RNA, 20 nt, Artificial Sequence
  Synthetic
  misc_feature (20)..(20): n is a, c, g, or u
auuacauaacccaugaaaun

SEQ ID NO: 65695 - RNA, 21 nt, Artificial Sequence
  Synthetic
  misc_feature (21)..(21): n is a, c, g, or u
aauuacauaacccaugaaaun

SEQ ID NO: 65696 - RNA, 22 nt, Artificial Sequence
  Synthetic
  misc_feature (22)..(22): n is a, c, g, or u
caauuacauaacccaugaaaun

SEQ ID NO: 65697 - RNA, 23 nt, Artificial Sequence
  Synthetic
  misc_feature (23)..(23): n is a, c, g, or u
ccaauuacauaacccaugaaaun

SEQ ID NO: 65698 - RNA, 24 nt, Artificial Sequence
  Synthetic
  misc_feature (24)..(24): n is a, c, g, or u
uccaauuacauaacccaugaaaun

SEQ ID NO: 65699 - RNA, 18 nt, Artificial Sequence
  Synthetic
gcgauagccaggacaaau

SEQ ID NO: 65700 - RNA, 19 nt, Artificial Sequence
  Synthetic
agcgauagccaggacaaau

SEQ ID NO: 65701 - RNA, 20 nt, Artificial Sequence
  Synthetic
cagcgauagccaggacaaau

SEQ ID NO: 65702 - RNA, 21 nt, Artificial Sequence
  Synthetic
ccagcgauagccaggacaaau

SEQ ID NO: 65703 - RNA, 22 nt, Artificial Sequence
  Synthetic
uccagcgauagccaggacaaau

SEQ ID NO: 65704 - RNA, 23 nt, Artificial Sequence
  Synthetic
auccagcgauagccaggacaaau

SEQ ID NO: 65705 - RNA, 24 nt, Artificial Sequence
  Synthetic
cauccagcgauagccaggacaaau

SEQ ID NO: 65706 - RNA, 18 nt, Artificial Sequence
  Synthetic
aaaagugagacaagaaau

SEQ ID NO: 65707 - RNA, 19 nt, Artificial Sequence
  Synthetic
caaaagugagacaagaaau

SEQ ID NO: 65708 - RNA, 20 nt, Artificial Sequence
  Synthetic
ccaaaagugagacaagaaau

SEQ ID NO: 65709 - RNA, 21 nt, Artificial Sequence
  Synthetic
uccaaaagugagacaagaaau

SEQ ID NO: 65710 - RNA, 22 nt, Artificial Sequence
  Synthetic
uuccaaaagugagacaagaaau

SEQ ID NO: 65711 - RNA, 23 nt, Artificial Sequence
  Synthetic
cuuccaaaagugagacaagaaau

SEQ ID NO: 65712 - RNA, 24 nt, Artificial Sequence
  Synthetic
ucuuccaaaagugagacaagaaau

SEQ ID NO: 65713 - RNA, 18 nt, Artificial Sequence
  Synthetic
gguugaugauccuggaau

SEQ ID NO: 65714 - RNA, 19 nt, Artificial Sequence
  Synthetic
ugguugaugauccuggaau

SEQ ID NO: 65715 - RNA, 20 nt, Artificial Sequence
  Synthetic
gugguugaugauccuggaau

SEQ ID NO: 65716 - RNA, 21 nt, Artificial Sequence
  Synthetic
ggugguugaugauccuggaau

SEQ ID NO: 65717 - RNA, 22 nt, Artificial Sequence
  Synthetic
uggugguugaugauccuggaau

SEQ ID NO: 65718 - RNA, 23 nt, Artificial Sequence
  Synthetic
cuggugguugaugauccuggaau

SEQ ID NO: 65719 - RNA, 24 nt, Artificial Sequence
  Synthetic
acuggugguugaugauccuggaau

SEQ ID NO: 65720 - RNA, 18 nt, Artificial Sequence
  Synthetic
gguuuugaacagcaacau

SEQ ID NO: 65721 - RNA, 19 nt, Artificial Sequence
  Synthetic
agguuuugaacagcaacau

SEQ ID NO: 65722 - RNA, 20 nt, Artificial Sequence
  Synthetic
aagguuuugaacagcaacau

SEQ ID NO: 65723 - RNA, 21 nt, Artificial Sequence
  Synthetic
gaagguuuugaacagcaacau

SEQ ID NO: 65724 - RNA, 22 nt, Artificial Sequence
  Synthetic
cgaagguuuugaacagcaacau

SEQ ID NO: 65725 - RNA, 23 nt, Artificial Sequence
  Synthetic
ccgaagguuuugaacagcaacau

SEQ ID NO: 65726 - RNA, 24 nt, Artificial Sequence
  Synthetic
uccgaagguuuugaacagcaacau

SEQ ID NO: 65727 - RNA, 18 nt, Artificial Sequence
  Synthetic
uccaaggaauacuaacau

SEQ ID NO: 65728 - RNA, 19 nt, Artificial Sequence
  Synthetic
guccaaggaauacuaacau

SEQ ID NO: 65729 - RNA, 20 nt, Artificial Sequence
  Synthetic
aguccaaggaauacuaacau

SEQ ID NO: 65730 - RNA, 21 nt, Artificial Sequence
  Synthetic
gaguccaaggaauacuaacau

SEQ ID NO: 65731 - RNA, 22 nt, Artificial Sequence
  Synthetic
ugaguccaaggaauacuaacau

SEQ ID NO: 65732 - RNA, 23 nt, Artificial Sequence
  Synthetic
gugaguccaaggaauacuaacau

SEQ ID NO: 65733 - RNA, 24 nt, Artificial Sequence
  Synthetic
ugugaguccaaggaauacuaacau

SEQ ID NO: 65734 - RNA, 18 nt, Artificial Sequence
  Synthetic
gaaugauucuucccccau

SEQ ID NO: 65735 - RNA, 19 nt, Artificial Sequence
  Synthetic
ggaaugauucuucccccau

SEQ ID NO: 65736 - RNA, 20 nt, Artificial Sequence
  Synthetic
uggaaugauucuucccccau

SEQ ID NO: 65737 - RNA, 21 nt, Artificial Sequence
  Synthetic
guggaaugauucuucccccau

SEQ ID NO: 65738 - RNA, 22 nt, Artificial Sequence
  Synthetic
gguggaaugauucuucccccau

SEQ ID NO: 65739 - RNA, 23 nt, Artificial Sequence
  Synthetic
ugguggaaugauucuucccccau

SEQ ID NO: 65740 - RNA, 24 nt, Artificial Sequence
  Synthetic
gugguggaaugauucuucccccau

SEQ ID NO: 65741 - RNA, 18 nt, Artificial Sequence
  Synthetic
cggaaguguugauaagau

SEQ ID NO: 65742 - RNA, 19 nt, Artificial Sequence
  Synthetic
ccggaaguguugauaagau

SEQ ID NO: 65743 - RNA, 20 nt, Artificial Sequence
  Synthetic
uccggaaguguugauaagau

SEQ ID NO: 65744 - RNA, 21 nt, Artificial Sequence
  Synthetic
cuccggaaguguugauaagau

SEQ ID NO: 65745 - RNA, 22 nt, Artificial Sequence
  Synthetic
ucuccggaaguguugauaagau

SEQ ID NO: 65746 - RNA, 23 nt, Artificial Sequence
  Synthetic
  misc_feature (1)..(1): n is a, c, g, or u
nucuccggaaguguugauaagau

SEQ ID NO: 65747 - RNA, 24 nt, Artificial Sequence
  Synthetic
  misc_feature (2)..(2): n is a, c, g, or u
anucuccggaaguguugauaagau

SEQ ID NO: 65748 - RNA, 18 nt, Artificial Sequence
  Synthetic
gcacacgguccggcagau

SEQ ID NO: 65749 - RNA, 19 nt, Artificial Sequence
  Synthetic
ugcacacgguccggcagau

SEQ ID NO: 65750 - RNA, 20 nt, Artificial Sequence
  Synthetic
gugcacacgguccggcagau

SEQ ID NO: 65751 - RNA, 21 nt, Artificial Sequence
  Synthetic
agugcacacgguccggcagau

SEQ ID NO: 65752 - RNA, 22 nt, Artificial Sequence
  Synthetic
aagugcacacgguccggcagau

SEQ ID NO: 65753 - RNA, 23 nt, Artificial Sequence
  Synthetic
gaagugcacacgguccggcagau

SEQ ID NO: 65754 - RNA, 24 nt, Artificial Sequence
  Synthetic
cgaagugcacacgguccggcagau

SEQ ID NO: 65755 - RNA, 18 nt, Artificial Sequence
  Synthetic
  misc_feature (1)..(1): n is a, c, g, or u
  misc_feature (10)..(10): n is a, c, g, or u
naaauauuunguagagau

SEQ ID NO: 65756 - RNA, 19 nt, Artificial Sequence
  Synthetic
  misc_feature (2)..(2): n is a, c, g, or u
  misc_feature (11)..(11): n is a, c, g, or u
gnaaauauuunguagagau

SEQ ID NO: 65757 - RNA, 20 nt, Artificial Sequence
  Synthetic
  misc_feature (3)..(3): n is a, c, g, or u
  misc_feature (12)..(12): n is a, c, g, or u
ggnaaauauuunguagagau

SEQ ID NO: 65758 - RNA, 21 nt, Artificial Sequence
  Synthetic
  misc_feature (4)..(4): n is a, c, g, or u
  misc_feature (13)..(13): n is a, c, g, or u
gggnaaauauuunguagagau

SEQ ID NO: 65759 - RNA, 22 nt, Artificial Sequence
  Synthetic
  misc_feature (5)..(5): n is a, c, g, or u
  misc_feature (14)..(14): n is a, c, g, or u
ggggnaaauauuunguagagau

SEQ ID NO: 65760 - RNA, 23 nt, Artificial Sequence
  Synthetic
  misc_feature (6)..(6): n is a, c, g, or u
  misc_feature (15)..(15): n is a, c, g, or u
aggggnaaauauuunguagagau

SEQ ID NO: 65761 - RNA, 24 nt, Artificial Sequence
  Synthetic
  misc_feature (7)..(7): n is a, c, g, or u
  misc_feature (16)..(16): n is a, c, g, or u
uaggggnaaauauuunguagagau

SEQ ID NO: 65762 - RNA, 18 nt, Artificial Sequence
  Synthetic
ccuggugcaaaugaauau

SEQ ID NO: 65763 - RNA, 19 nt, Artificial Sequence
  Synthetic
uccuggugcaaaugaauau

SEQ ID NO: 65764 - RNA, 20 nt, Artificial Sequence
  Synthetic
guccuggugcaaaugaauau

SEQ ID NO: 65765 - RNA, 21 nt, Artificial Sequence
  Synthetic
uguccuggugcaaaugaauau

SEQ ID NO: 65766 - RNA, 22 nt, Artificial Sequence
  Synthetic
auguccuggugcaaaugaauau

SEQ ID NO: 65767 - RNA, 23 nt, Artificial Sequence
  Synthetic
aauguccuggugcaaaugaauau

SEQ ID NO: 65768 - RNA, 24 nt, Artificial Sequence
  Synthetic
uaauguccuggugcaaaugaauau

SEQ ID NO: 65769 - RNA, 18 nt, Artificial Sequence
  Synthetic
aaauacaggccucuuacu

SEQ ID NO: 65770 - RNA, 19 nt, Artificial Sequence
  Synthetic
aaaauacaggccucuuacu

SEQ ID NO: 65771 - RNA, 20 nt, Artificial Sequence
  Synthetic
gaaaauacaggccucuuacu

SEQ ID NO: 65772 - RNA, 21 nt, Artificial Sequence
  Synthetic
ggaaaauacaggccucuuacu

SEQ ID NO: 65773 - RNA, 22 nt, Artificial Sequence
  Synthetic
aggaaaauacaggccucuuacu

SEQ ID NO: 65774 - RNA, 23 nt, Artificial Sequence
  Synthetic
caggaaaauacaggccucuuacu

SEQ ID NO: 65775 - RNA, 24 nt, Artificial Sequence
  Synthetic
gcaggaaaauacaggccucuuacu

SEQ ID NO: 65776 - RNA, 18 nt, Artificial Sequence
  Synthetic
uuagcaugccuugagccu

SEQ ID NO: 65777 - RNA, 19 nt, Artificial Sequence
  Synthetic
uuuagcaugccuugagccu

SEQ ID NO: 65778 - RNA, 20 nt, Artificial Sequence
  Synthetic
uuuuagcaugccuugagccu

SEQ ID NO: 65779 - RNA, 21 nt, Artificial Sequence
  Synthetic
uuuuuagcaugccuugagccu

SEQ ID NO: 65780 - RNA, 22 nt, Artificial Sequence
  Synthetic
guuuuuagcaugccuugagccu

SEQ ID NO: 65781 - RNA, 23 nt, Artificial Sequence
  Synthetic
uguuuuuagcaugccuugagccu

SEQ ID NO: 65782 - RNA, 24 nt, Artificial Sequence
  Synthetic
auguuuuuagcaugccuugagccu

SEQ ID NO: 65783 - RNA, 18 nt, Artificial Sequence
  Synthetic
gccacccaaggcacagcu

SEQ ID NO: 65784 - RNA, 19 nt, Artificial Sequence
  Synthetic
agccacccaaggcacagcu

SEQ ID NO: 65785 - RNA, 20 nt, Artificial Sequence
  Synthetic
aagccacccaaggcacagcu

SEQ ID NO: 65786 - RNA, 21 nt, Artificial Sequence
  Synthetic
aaagccacccaaggcacagcu

SEQ ID NO: 65787 - RNA, 22 nt, Artificial Sequence
  Synthetic
  misc_feature (1)..(1): n is a, c, g, or u
naaagccacccaaggcacagcu

SEQ ID NO: 65788 - RNA, 23 nt, Artificial Sequence
  Synthetic
  misc_feature (2)..(2): n is a, c, g, or u
cnaaagccacccaaggcacagcu

SEQ ID NO: 65789 - RNA, 24 nt, Artificial Sequence
  Synthetic
  misc_feature (3)..(3): n is a, c, g, or u
ccnaaagccacccaaggcacagcu

SEQ ID NO: 65790 - RNA, 18 nt, Artificial Sequence
  Synthetic
  misc_feature (5)..(5): n is a, c, g, or u
ggugnggugaacaaugcu

SEQ ID NO: 65791 - RNA, 19 nt, Artificial Sequence
  Synthetic
  misc_feature (6)..(6): n is a, c, g, or u
uggugnggugaacaaugcu

SEQ ID NO: 65792 - RNA, 20 nt, Artificial Sequence
  Synthetic
  misc_feature (1)..(1): n is a, c, g, or u
  misc_feature (7)..(7): n is a, c, g, or u
nuggugnggugaacaaugcu

SEQ ID NO: 65793 - RNA, 21 nt, Artificial Sequence
  Synthetic
  misc_feature (2)..(2): n is a, c, g, or u
  misc_feature (8)..(8): n is a, c, g, or u
unuggugnggugaacaaugcu

SEQ ID NO: 65794 - RNA, 22 nt, Artificial Sequence
  Synthetic
  misc_feature (3)..(3): n is a, c, g, or u
  misc_feature (9)..(9): n is a, c, g, or u
gunuggugnggugaacaaugcu

SEQ ID NO: 65795 - RNA, 23 nt, Artificial Sequence
  Synthetic
  misc_feature (4)..(4): n is a, c, g, or u
  misc_feature (10)..(10): n is a, c, g, or u
agunuggugnggugaacaaugcu

SEQ ID NO: 65796 - RNA, 24 nt, Artificial Sequence
  Synthetic
  misc_feature (5)..(5): n is a, c, g, or u
  misc_feature (11)..(11): n is a, c, g, or u
cagunuggugnggugaacaaugcu

SEQ ID NO: 65797 - RNA, 18 nt, Artificial Sequence
  Synthetic
  misc_feature (4)..(4): n is a, c, g, or u
uuungcuccagaccugcu

SEQ ID NO: 65798 - RNA, 19 nt, Artificial Sequence
  Synthetic
  misc_feature (5)..(5): n is a, c, g, or u
guuungcuccagaccugcu

SEQ ID NO: 65799 - RNA, 20 nt, Artificial Sequence
  Synthetic
  misc_feature (6)..(6): n is a, c, g, or u
aguuungcuccagaccugcu

SEQ ID NO: 65800 - RNA, 21 nt, Artificial Sequence
  Synthetic
  misc_feature (7)..(7): n is a, c, g, or u
aaguuungcuccagaccugcu

SEQ ID NO: 65801 - RNA, 22 nt, Artificial Sequence
  Synthetic
  misc_feature (8)..(8): n is a, c, g, or u
uaaguuungcuccagaccugcu

SEQ ID NO: 65802 - RNA, 23 nt, Artificial Sequence
  Synthetic
  misc_feature (9)..(9): n is a, c, g, or u
auaaguuungcuccagaccugcu

SEQ ID NO: 65803 - RNA, 24 nt, Artificial Sequence
  Synthetic
  misc_feature (10)..(10): n is a, c, g, or u
gauaaguuungcuccagaccugcu

SEQ ID NO: 65804 - RNA, 18 nt, Artificial Sequence
  Synthetic
gguuuuauaccuuucucu

SEQ ID NO: 65805 - RNA, 19 nt, Artificial Sequence
  Synthetic
agguuuuauaccuuucucu

SEQ ID NO: 65806 - RNA, 20 nt, Artificial Sequence
  Synthetic
aagguuuuauaccuuucucu

SEQ ID NO: 65807 - RNA, 21 nt, Artificial Sequence
  Synthetic
uaagguuuuauaccuuucucu

SEQ ID NO: 65808 - RNA, 22 nt, Artificial Sequence
  Synthetic
auaagguuuuauaccuuucucu

SEQ ID NO: 65809 - RNA, 23 nt, Artificial Sequence
  Synthetic
aauaagguuuuauaccuuucucu

SEQ ID NO: 65810 - RNA, 24 nt, Artificial Sequence
  Synthetic
uaauaagguuuuauaccuuucucu

SEQ ID NO: 65811 - RNA, 18 nt, Artificial Sequence
  Synthetic
ucuuuaaacaaacagucu

SEQ ID NO: 65812 - RNA, 19 nt, Artificial Sequence
  Synthetic
gucuuuaaacaaacagucu

SEQ ID NO: 65813 - RNA, 20 nt, Artificial Sequence
  Synthetic
agucuuuaaacaaacagucu

SEQ ID NO: 65814 - RNA, 21 nt, Artificial Sequence
  Synthetic
cagucuuuaaacaaacagucu

SEQ ID NO: 65815 - RNA, 22 nt, Artificial Sequence
  Synthetic
ccagucuuuaaacaaacagucu

SEQ ID NO: 65816 - RNA, 23 nt, Artificial Sequence
  Synthetic
cccagucuuuaaacaaacagucu

SEQ ID NO: 65817 - RNA, 24 nt, Artificial Sequence
  Synthetic
ucccagucuuuaaacaaacagucu

SEQ ID NO: 65818 - RNA, 18 nt, Artificial Sequence
  Synthetic
cgauugagaucuucgucu

SEQ ID NO: 65819 - RNA, 19 nt, Artificial Sequence
  Synthetic
gcgauugagaucuucgucu

SEQ ID NO: 65820 - RNA, 20 nt, Artificial Sequence
  Synthetic
ggcgauugagaucuucgucu

SEQ ID NO: 65821 - RNA, 21 nt, Artificial Sequence
  Synthetic
cggcgauugagaucuucgucu

SEQ ID NO: 65822 - RNA, 22 nt, Artificial Sequence
  Synthetic
gcggcgauugagaucuucgucu

SEQ ID NO: 65823 - RNA, 23 nt, Artificial Sequence
  Synthetic
cgcggcgauugagaucuucgucu

SEQ ID NO: 65824 - RNA, 24 nt, Artificial Sequence
  Synthetic
acgcggcgauugagaucuucgucu

SEQ ID NO: 65825 - RNA, 18 nt, Artificial Sequence
  Synthetic
  misc_feature (15)..(15): n is a, c, g, or u
gucuaacaacaguanucu

SEQ ID NO: 65826 - RNA, 19 nt, Artificial Sequence
  Synthetic
  misc_feature (16)..(16): n is a, c, g, or u
cgucuaacaacaguanucu

SEQ ID NO: 65827 - RNA, 20 nt, Artificial Sequence
  Synthetic
  misc_feature (17)..(17): n is a, c, g, or u
ucgucuaacaacaguanucu

SEQ ID NO: 65828 - RNA, 21 nt, Artificial Sequence
  Synthetic
  misc_feature (18)..(18): n is a, c, g, or u
uucgucuaacaacaguanucu

SEQ ID NO: 65829 - RNA, 22 nt, Artificial Sequence
  Synthetic
  misc_feature (19)..(19): n is a, c, g, or u
cuucgucuaacaacaguanucu

SEQ ID NO: 65830 - RNA, 23 nt, Artificial Sequence
  Synthetic
  misc_feature (20)..(20): n is a, c, g, or u
ucuucgucuaacaacaguanucu

SEQ ID NO: 65831 - RNA, 24 nt, Artificial Sequence
  Synthetic
  misc_feature (21)..(21): n is a, c, g, or u
cucuucgucuaacaacaguanucu

SEQ ID NO: 65832 - RNA, 18 nt, Artificial Sequence
  Synthetic
cgagggaguucuucuucu

SEQ ID NO: 65833 - RNA, 19 nt, Artificial Sequence
  Synthetic
gcgagggaguucuucuucu

SEQ ID NO: 65834 - RNA, 20 nt, Artificial Sequence
  Synthetic
ggcgagggaguucuucuucu

SEQ ID NO: 65835 - RNA, 21 nt, Artificial Sequence
  Synthetic
aggcgagggaguucuucuucu

SEQ ID NO: 65836 - RNA, 22 nt, Artificial Sequence
  Synthetic
gaggcgagggaguucuucuucu

SEQ ID NO: 65837 - RNA, 23 nt, Artificial Sequence
  Synthetic
cgaggcgagggaguucuucuucu

SEQ ID NO: 65838 - RNA, 24 nt, Artificial Sequence
  Synthetic
gcgaggcgagggaguucuucuucu

SEQ ID NO: 65839 - RNA, 18 nt, Artificial Sequence
  Synthetic
uuacugaaggaaagaagu

SEQ ID NO: 65840 - RNA, 19 nt, Artificial Sequence
  Synthetic
cuuacugaaggaaagaagu

SEQ ID NO: 65841 - RNA, 20 nt, Artificial Sequence
  Synthetic
ucuuacugaaggaaagaagu

SEQ ID NO: 65842 - RNA, 21 nt, Artificial Sequence
  Synthetic
cucuuacugaaggaaagaagu

SEQ ID NO: 65843 - RNA, 22 nt, Artificial Sequence
  Synthetic
ucucuuacugaaggaaagaagu

SEQ ID NO: 65844 - RNA, 23 nt, Artificial Sequence
  Synthetic
aucucuuacugaaggaaagaagu

SEQ ID NO: 65845 - RNA, 24 nt, Artificial Sequence
  Synthetic
gaucucuuacugaaggaaagaagu

SEQ ID NO: 65846 - RNA, 18 nt, Artificial Sequence
  Synthetic
aacugaaagccagacagu

SEQ ID NO: 65847 - RNA, 19 nt, Artificial Sequence
  Synthetic
uaacugaaagccagacagu

SEQ ID NO: 65848 - RNA, 20 nt, Artificial Sequence
  Synthetic
auaacugaaagccagacagu

SEQ ID NO: 65849 - RNA, 21 nt, Artificial Sequence
  Synthetic
uauaacugaaagccagacagu

SEQ ID NO: 65850 - RNA, 22 nt, Artificial Sequence
  Synthetic
auauaacugaaagccagacagu

SEQ ID NO: 65851 - RNA, 23 nt, Artificial Sequence
  Synthetic
cauauaacugaaagccagacagu

SEQ ID NO: 65852 - RNA, 24 nt, Artificial Sequence
  Synthetic
ccauauaacugaaagccagacagu

SEQ ID NO: 65853 - RNA, 18 nt, Artificial Sequence
  Synthetic
gaugagugaggcaguagu

SEQ ID NO: 65854 - RNA, 19 nt, Artificial Sequence
  Synthetic
agaugagugaggcaguagu

SEQ ID NO: 65855 - RNA, 20 nt, Artificial Sequence
  Synthetic
gagaugagugaggcaguagu

SEQ ID NO: 65856 - RNA, 21 nt, Artificial Sequence
  Synthetic
cgagaugagugaggcaguagu

SEQ ID NO: 65857 - RNA, 22 nt, Artificial Sequence
  Synthetic
acgagaugagugaggcaguagu

SEQ ID NO: 65858 - RNA, 23 nt, Artificial Sequence
  Synthetic
gacgagaugagugaggcaguagu

SEQ ID NO: 65859 - RNA, 24 nt, Artificial Sequence
  Synthetic
ugacgagaugagugaggcaguagu

SEQ ID NO: 65860 - RNA, 18 nt, Artificial Sequence
  Synthetic
accccaaaaggccuccgu

SEQ ID NO: 65861 - RNA, 19 nt, Artificial Sequence
  Synthetic
caccccaaaaggccuccgu

SEQ ID NO: 65862 - RNA, 20 nt, Artificial Sequence
  Synthetic
ccaccccaaaaggccuccgu

SEQ ID NO: 65863 - RNA, 21 nt, Artificial Sequence
  Synthetic
uccaccccaaaaggccuccgu

SEQ ID NO: 65864 - RNA, 22 nt, Artificial Sequence
  Synthetic
cuccaccccaaaaggccuccgu

SEQ ID NO: 65865 - RNA, 23 nt, Artificial Sequence
  Synthetic
gcuccaccccaaaaggccuccgu

SEQ ID NO: 65866 - RNA, 24 nt, Artificial Sequence
  Synthetic
ggcuccaccccaaaaggccuccgu

SEQ ID NO: 65867 - RNA, 18 nt, Artificial Sequence
  Synthetic
uacaagugcaauuuccgu

SEQ ID NO: 65868 - RNA, 19 nt, Artificial Sequence
  Synthetic
auacaagugcaauuuccgu

SEQ ID NO: 65869 - RNA, 20 nt, Artificial Sequence
  Synthetic
aauacaagugcaauuuccgu

SEQ ID NO: 65870 - RNA, 21 nt, Artificial Sequence
  Synthetic
gaauacaagugcaauuuccgu

SEQ ID NO: 65871 - RNA, 22 nt, Artificial Sequence
  Synthetic
ggaauacaagugcaauuuccgu

SEQ ID NO: 65872 - RNA, 23 nt, Artificial Sequence
  Synthetic
gggaauacaagugcaauuuccgu

SEQ ID NO: 65873 - RNA, 24 nt, Artificial Sequence
  Synthetic
ugggaauacaagugcaauuuccgu

SEQ ID NO: 65874 - RNA, 18 nt, Artificial Sequence
  Synthetic
auguaaauagugucuggu

SEQ ID NO: 65875 - RNA, 19 nt, Artificial Sequence
  Synthetic
uauguaaauagugucuggu

SEQ ID NO: 65876 - RNA, 20 nt, Artificial Sequence
  Synthetic
guauguaaauagugucuggu

SEQ ID NO: 65877 - RNA, 21 nt, Artificial Sequence
  Synthetic
gguauguaaauagugucuggu

SEQ ID NO: 65878 - RNA, 22 nt, Artificial Sequence
  Synthetic
ggguauguaaauagugucuggu

SEQ ID NO: 65879 - RNA, 23 nt, Artificial Sequence
  Synthetic
aggguauguaaauagugucuggu

SEQ ID NO: 65880 - RNA, 24 nt, Artificial Sequence
  Synthetic
uaggguauguaaauagugucuggu

SEQ ID NO: 65881 - RNA, 18 nt, Artificial Sequence
  Synthetic
cuggauccaacugguggu

SEQ ID NO: 65882 - RNA, 19 nt, Artificial Sequence
  Synthetic
gcuggauccaacugguggu

SEQ ID NO: 65883 - RNA, 20 nt, Artificial Sequence
  Synthetic
ugcuggauccaacugguggu

SEQ ID NO: 65884 - RNA, 21 nt, Artificial Sequence
  Synthetic
augcuggauccaacugguggu

SEQ ID NO: 65885 - RNA, 22 nt, Artificial Sequence
  Synthetic
aaugcuggauccaacugguggu

SEQ ID NO: 65886 - RNA, 23 nt, Artificial Sequence
  Synthetic
gaaugcuggauccaacugguggu

SEQ ID NO: 65887 - RNA, 24 nt, Artificial Sequence
  Synthetic
ugaaugcuggauccaacugguggu

SEQ ID NO: 65888 - RNA, 18 nt, Artificial Sequence
  Synthetic
ucguuuuucauuuacugu

SEQ ID NO: 65889 - RNA, 19 nt, Artificial Sequence
  Synthetic
uucguuuuucauuuacugu

SEQ ID NO: 65890 - RNA, 20 nt, Artificial Sequence
  Synthetic
cuucguuuuucauuuacugu

SEQ ID NO: 65891 - RNA, 21 nt, Artificial Sequence
  Synthetic
ucuucguuuuucauuuacugu

SEQ ID NO: 65892 - RNA, 22 nt, Artificial Sequence
  Synthetic
aucuucguuuuucauuuacugu

SEQ ID NO: 65893 - RNA, 23 nt, Artificial Sequence
  Synthetic
aaucuucguuuuucauuuacugu

SEQ ID NO: 65894 - RNA, 24 nt, Artificial Sequence
  Synthetic
uaaucuucguuuuucauuuacugu

SEQ ID NO: 65895 - RNA, 18 nt, Artificial Sequence
  Synthetic
cccaaaaggccuccgugu

SEQ ID NO: 65896 - RNA, 19 nt, Artificial Sequence
  Synthetic
ccccaaaaggccuccgugu

SEQ ID NO: 65897 - RNA, 20 nt, Artificial Sequence
  Synthetic
accccaaaaggccuccgugu

SEQ ID NO: 65898 - RNA, 21 nt, Artificial Sequence
  Synthetic
caccccaaaaggccuccgugu

SEQ ID NO: 65899 - RNA, 22 nt, Artificial Sequence
  Synthetic
ccaccccaaaaggccuccgugu

SEQ ID NO: 65900 - RNA, 23 nt, Artificial Sequence
  Synthetic
uccaccccaaaaggccuccgugu

SEQ ID NO: 65901 - RNA, 24 nt, Artificial Sequence
  Synthetic
cuccaccccaaaaggccuccgugu

SEQ ID NO: 65902 - RNA, 18 nt, Artificial Sequence
  Synthetic
  misc_feature (11)..(11): n is a, c, g, or u
  misc_feature (17)..(17): n is a, c, g, or u
uggugaguganuggagnu

SEQ ID NO: 65903 - RNA, 19 nt, Artificial Sequence
  Synthetic
  misc_feature (12)..(12): n is a, c, g, or u
  misc_feature (18)..(18): n is a, c, g, or u
uuggugaguganuggagnu

SEQ ID NO: 65904 - RNA, 20 nt, Artificial Sequence
  Synthetic
  misc_feature (13)..(13): n is a, c, g, or u
  misc_feature (19)..(19): n is a, c, g, or u
guuggugaguganuggagnu

SEQ ID NO: 65905 - RNA, 21 nt, Artificial Sequence
  Synthetic
  misc_feature (14)..(14): n is a, c, g, or u
  misc_feature (20)..(20): n is a, c, g, or u
gguuggugaguganuggagnu

SEQ ID NO: 65906 - RNA, 22 nt, Artificial Sequence
  Synthetic
  misc_feature (15)..(15): n is a, c, g, or u
  misc_feature (21)..(21): n is a, c, g, or u
agguuggugaguganuggagnu

SEQ ID NO: 65907 - RNA, 23 nt, Artificial Sequence
  Synthetic
  misc_feature (16)..(16): n is a, c, g, or u
  misc_feature (22)..(22): n is a, c, g, or u
gagguuggugaguganuggagnu

SEQ ID NO: 65908 - RNA, 24 nt, Artificial Sequence
  Synthetic
  misc_feature (17)..(17): n is a, c, g, or u
  misc_feature (23)..(23): n is a, c, g, or u
agagguuggugaguganuggagnu

SEQ ID NO: 65909 - RNA, 18 nt, Artificial Sequence
  Synthetic
  misc_feature (17)..(17): n is a, c, g, or u
acauaacccaugaaaunu

SEQ ID NO: 65910 - RNA, 19 nt, Artificial Sequence
  Synthetic
  misc_feature (18)..(18): n is a, c, g, or u
uacauaacccaugaaaunu

SEQ ID NO: 65911 - RNA, 20 nt, Artificial Sequence
  Synthetic
  misc_feature (19)..(19): n is a, c, g, or u
uuacauaacccaugaaaunu

SEQ ID NO: 65912 - RNA, 21 nt, Artificial Sequence
  Synthetic
  misc_feature (20)..(20): n is a, c, g, or u
auuacauaacccaugaaaunu

SEQ ID NO: 65913 - RNA, 22 nt, Artificial Sequence
  Synthetic
  misc_feature (21)..(21): n is a, c, g, or u
aauuacauaacccaugaaaunu

SEQ ID NO: 65914 - RNA, 23 nt, Artificial Sequence
  Synthetic
  misc_feature (22)..(22): n is a, c, g, or u
caauuacauaacccaugaaaunu

SEQ ID NO: 65915 - RNA, 24 nt, Artificial Sequence
  Synthetic
  misc_feature (23)..(23): n is a, c, g, or u
ccaauuacauaacccaugaaaunu

SEQ ID NO: 65916 - RNA, 18 nt, Artificial Sequence
  Synthetic
agcucccccuagaaaauu

SEQ ID NO: 65917 - RNA, 19 nt, Artificial Sequence
  Synthetic
gagcucccccuagaaaauu

SEQ ID NO: 65918 - RNA, 20 nt, Artificial Sequence
  Synthetic
ggagcucccccuagaaaauu

SEQ ID NO: 65919 - RNA, 21 nt, Artificial Sequence
  Synthetic
gggagcucccccuagaaaauu

SEQ ID NO: 65920 - RNA, 22 nt, Artificial Sequence
  Synthetic
cgggagcucccccuagaaaauu

SEQ ID NO: 65921 - RNA, 23 nt, Artificial Sequence
  Synthetic
acgggagcucccccuagaaaauu

SEQ ID NO: 65922 - RNA, 24 nt, Artificial Sequence
  Synthetic
cacgggagcucccccuagaaaauu

SEQ ID NO: 65923 - RNA, 18 nt, Artificial Sequence
  Synthetic
ccaaggaauacuaacauu

SEQ ID NO: 65924 - RNA, 19 nt, Artificial Sequence
  Synthetic
uccaaggaauacuaacauu

SEQ ID NO: 65925 - RNA, 20 nt, Artificial Sequence
  Synthetic
guccaaggaauacuaacauu

SEQ ID NO: 65926 - RNA, 21 nt, Artificial Sequence
  Synthetic
aguccaaggaauacuaacauu

SEQ ID NO: 65927 - RNA, 22 nt, Artificial Sequence
  Synthetic
gaguccaaggaauacuaacauu

SEQ ID NO: 65928 - RNA, 23 nt, Artificial Sequence
  Synthetic
ugaguccaaggaauacuaacauu

SEQ ID NO: 65929 - RNA, 24 nt, Artificial Sequence
  Synthetic
gugaguccaaggaauacuaacauu

SEQ ID NO: 65930 - RNA, 18 nt, Artificial Sequence
  Synthetic
ucuagacucugcgguauu

SEQ ID NO: 65931 - RNA, 19 nt, Artificial Sequence
  Synthetic
gucuagacucugcgguauu

SEQ ID NO: 65932 - RNA, 20 nt, Artificial Sequence
  Synthetic
agucuagacucugcgguauu

SEQ ID NO: 65933 - RNA, 21 nt, Artificial Sequence
  Synthetic
gagucuagacucugcgguauu

SEQ ID NO: 65934 - RNA, 22 nt, Artificial Sequence
  Synthetic
cgagucuagacucugcgguauu

SEQ ID NO: 65935 - RNA, 23 nt, Artificial Sequence
  Synthetic
acgagucuagacucugcgguauu

SEQ ID NO: 65936 - RNA, 24 nt, Artificial Sequence
  Synthetic
cacgagucuagacucugcgguauu

SEQ ID NO: 65937 - RNA, 18 nt, Artificial Sequence
  Synthetic
aauuuccguccgaagguu

SEQ ID NO: 65938 - RNA, 19 nt, Artificial Sequence
  Synthetic
caauuuccguccgaagguu

SEQ ID NO: 65939 - RNA, 20 nt, Artificial Sequence
  Synthetic
gcaauuuccguccgaagguu

SEQ ID NO: 65940 - RNA, 21 nt, Artificial Sequence
  Synthetic
ugcaauuuccguccgaagguu

SEQ ID NO: 65941 - RNA, 22 nt, Artificial Sequence
  Synthetic
gugcaauuuccguccgaagguu

SEQ ID NO: 65942 - RNA, 23 nt, Artificial Sequence
  Synthetic
agugcaauuuccguccgaagguu

SEQ ID NO: 65943 - RNA, 24 nt, Artificial Sequence
  Synthetic
aagugcaauuuccguccgaagguu

SEQ ID NO: 65944 - RNA, 18 nt, Artificial Sequence
  Synthetic
uguaaauagugucugguu

SEQ ID NO: 65945 - RNA, 19 nt, Artificial Sequence
  Synthetic
auguaaauagugucugguu

SEQ ID NO: 65946 - RNA, 20 nt, Artificial Sequence
  Synthetic
uauguaaauagugucugguu

SEQ ID NO: 65947 - RNA, 21 nt, Artificial Sequence
  Synthetic
guauguaaauagugucugguu

SEQ ID NO: 65948 - RNA, 22 nt, Artificial Sequence
  Synthetic
gguauguaaauagugucugguu

SEQ ID NO: 65949 - RNA, 23 nt, Artificial Sequence
  Synthetic
ggguauguaaauagugucugguu

SEQ ID NO: 65950 - RNA, 24 nt, Artificial Sequence
  Synthetic
aggguauguaaauagugucugguu

SEQ ID NO: 65951 - RNA, 18 nt, Artificial Sequence
  Synthetic
agagcuugguggaauguu

SEQ ID NO: 65952 - RNA, 19 nt, Artificial Sequence
  Synthetic
cagagcuugguggaauguu

SEQ ID NO: 65953 - RNA, 20 nt, Artificial Sequence
  Synthetic
gcagagcuugguggaauguu

SEQ ID NO: 65954 - RNA, 21 nt, Artificial Sequence
  Synthetic
ugcagagcuugguggaauguu

SEQ ID NO: 65955 - RNA, 22 nt, Artificial Sequence
  Synthetic
cugcagagcuugguggaauguu

SEQ ID NO: 65956 - RNA, 23 nt, Artificial Sequence
  Synthetic
ccugcagagcuugguggaauguu

SEQ ID NO: 65957 - RNA, 24 nt, Artificial Sequence
  Synthetic
uccugcagagcuugguggaauguu

SEQ ID NO: 65958 - RNA, 18 nt, Artificial Sequence
  Synthetic
ggaacaggguucacuguu

SEQ ID NO: 65959 - RNA, 19 nt, Artificial Sequence
  Synthetic
cggaacaggguucacuguu

SEQ ID NO: 65960 - RNA, 20 nt, Artificial Sequence
  Synthetic
ucggaacaggguucacuguu

SEQ ID NO: 65961 - RNA, 21 nt, Artificial Sequence
  Synthetic
gucggaacaggguucacuguu

SEQ ID NO: 65962 - RNA, 22 nt, Artificial Sequence
  Synthetic
agucggaacaggguucacuguu

SEQ ID NO: 65963 - RNA, 23 nt, Artificial Sequence
  Synthetic
uagucggaacaggguucacuguu

SEQ ID NO: 65964 - RNA, 24 nt, Artificial Sequence
  Synthetic
guagucggaacaggguucacuguu

SEQ ID NO: 65965 - RNA, 18 nt, Artificial Sequence
  Synthetic
  misc_feature (10)..(10): n is a, c, g, or u
  misc_feature (16)..(16): n is a, c, g, or u
ggugaguganuggagnuu

SEQ ID NO: 65966 - RNA, 19 nt, Artificial Sequence
  Synthetic
  misc_feature (11)..(11): n is a, c, g, or u
  misc_feature (17)..(17): n is a, c, g, or u
uggugaguganuggagnuu

SEQ ID NO: 65967 - RNA, 20 nt, Artificial Sequence
  Synthetic
  misc_feature (12)..(12): n is a, c, g, or u
  misc_feature (18)..(18): n is a, c, g, or u
uuggugaguganuggagnuu

SEQ ID NO: 65968 - RNA, 21 nt, Artificial Sequence
  Synthetic
  misc_feature (13)..(13): n is a, c, g, or u
  misc_feature (19)..(19): n is a, c, g, or u
guuggugaguganuggagnuu

SEQ ID NO: 65969 - RNA, 22 nt, Artificial Sequence
  Synthetic
  misc_feature (14)..(14): n is a, c, g, or u
  misc_feature (20)..(20): n is a, c, g, or u
gguuggugaguganuggagnuu

SEQ ID NO: 65970 - RNA, 23 nt, Artificial Sequence
  Synthetic
  misc_feature (15)..(15): n is a, c, g, or u
  misc_feature (21)..(21): n is a, c, g, or u
agguuggugaguganuggagnuu

SEQ ID NO: 65971 - RNA, 24 nt, Artificial Sequence
  Synthetic
  misc_feature (16)..(16): n is a, c, g, or u
  misc_feature (22)..(22): n is a, c, g, or u
gagguuggugaguganuggagnuu

SEQ ID NO: 65972 - RNA, 18 nt, Artificial Sequence
  Synthetic
  misc_feature (7)..(7): n is a, c, g, or u
uggaaangauguauauuu

SEQ ID NO: 65973 - RNA, 19 nt, Artificial Sequence
  Synthetic
  misc_feature (8)..(8): n is a, c, g, or u
auggaaangauguauauuu

SEQ ID NO: 65974 - RNA, 20 nt, Artificial Sequence
  Synthetic
  misc_feature (9)..(9): n is a, c, g, or u
cauggaaangauguauauuu

SEQ ID NO: 65975 - RNA, 21 nt, Artificial Sequence
  Synthetic
  misc_feature (10)..(10): n is a, c, g, or u
ccauggaaangauguauauuu

SEQ ID NO: 65976 - RNA, 22 nt, Artificial Sequence
  Synthetic
  misc_feature (11)..(11): n is a, c, g, or u
gccauggaaangauguauauuu

SEQ ID NO: 65977 - RNA, 23 nt, Artificial Sequence
  Synthetic
  misc_feature (12)..(12): n is a, c, g, or u
agccauggaaangauguauauuu

SEQ ID NO: 65978 - RNA, 24 nt, Artificial Sequence
  Synthetic
  misc_feature (13)..(13): n is a, c, g, or u
cagccauggaaangauguauauuu

SEQ ID NO: 65979 - RNA, 18 nt, Artificial Sequence
  Synthetic
cacucccauaggaauuuu

SEQ ID NO: 65980 - RNA, 19 nt, Artificial Sequence
  Synthetic
ccacucccauaggaauuuu

SEQ ID NO: 65981 - RNA, 20 nt, Artificial Sequence
  Synthetic
cccacucccauaggaauuuu

SEQ ID NO: 65982 - RNA, 21 nt, Artificial Sequence
  Synthetic
gcccacucccauaggaauuuu

SEQ ID NO: 65983 - RNA, 22 nt, Artificial Sequence
  Synthetic
ggcccacucccauaggaauuuu

SEQ ID NO: 65984 - RNA, 23 nt, Artificial Sequence
  Synthetic
aggcccacucccauaggaauuuu

SEQ ID NO: 65985 - RNA, 24 nt, Artificial Sequence
  Synthetic
gaggcccacucccauaggaauuuu

SEQ ID NO: 65986 - RNA, 18 nt, Artificial Sequence
  Synthetic
ucuaacaguaaaugaaaa

SEQ ID NO: 65987 - RNA, 19 nt, Artificial Sequence
  Synthetic
cucuaacaguaaaugaaaa

SEQ ID NO: 65988 - RNA, 20 nt, Artificial Sequence
  Synthetic
ccucuaacaguaaaugaaaa

SEQ ID NO: 65989 - RNA, 21 nt, Artificial Sequence
  Synthetic
uccucuaacaguaaaugaaaa

SEQ ID NO: 65990 - RNA, 22 nt, Artificial Sequence
  Synthetic
guccucuaacaguaaaugaaaa

SEQ ID NO: 65991 - RNA, 23 nt, Artificial Sequence
  Synthetic
gguccucuaacaguaaaugaaaa

SEQ ID NO: 65992 - RNA, 24 nt, Artificial Sequence
  Synthetic
agguccucuaacaguaaaugaaaa

SEQ ID NO: 65993 - RNA, 18 nt, Artificial Sequence
  Synthetic
cgggcaucuuauauaaaa

SEQ ID NO: 65994 - RNA, 19 nt, Artificial Sequence
  Synthetic
gcgggcaucuuauauaaaa

SEQ ID NO: 65995 - RNA, 20 nt, Artificial Sequence
  Synthetic
ggcgggcaucuuauauaaaa

SEQ ID NO: 65996 - RNA, 21 nt, Artificial Sequence
  Synthetic
aggcgggcaucuuauauaaaa

SEQ ID NO: 65997 - RNA, 22 nt, Artificial Sequence
  Synthetic
aaggcgggcaucuuauauaaaa

SEQ ID NO: 65998 - RNA, 23 nt, Artificial Sequence
  Synthetic
gaaggcgggcaucuuauauaaaa

SEQ ID NO: 65999 - RNA, 24 nt, Artificial Sequence
  Synthetic
ggaaggcgggcaucuuauauaaaa

SEQ ID NO: 66000 - RNA, 18 nt, Artificial Sequence
  Synthetic
uggacggucccucucgaa

SEQ ID NO: 66001 - RNA, 19 nt, Artificial Sequence
  Synthetic
uuggacggucccucucgaa

SEQ ID NO: 66002 - RNA, 20 nt, Artificial Sequence
  Synthetic
cuuggacggucccucucgaa

SEQ ID NO: 66003 - RNA, 21 nt, Artificial Sequence
  Synthetic
ucuuggacggucccucucgaa

SEQ ID NO: 66004 - RNA, 22 nt, Artificial Sequence
  Synthetic
uucuuggacggucccucucgaa

SEQ ID NO: 66005 - RNA, 23 nt, Artificial Sequence
  Synthetic
uuucuuggacggucccucucgaa

SEQ ID NO: 66006 - RNA, 24 nt, Artificial Sequence
  Synthetic
cuuucuuggacggucccucucgaa

SEQ ID NO: 66007 - RNA, 18 nt, Artificial Sequence
  Synthetic
cuugucucacuuuuggaa

SEQ ID NO: 66008 - RNA, 19 nt, Artificial Sequence
  Synthetic
ucuugucucacuuuuggaa

SEQ ID NO: 66009 - RNA, 20 nt, Artificial Sequence
  Synthetic
uucuugucucacuuuuggaa

SEQ ID NO: 66010 - RNA, 21 nt, Artificial Sequence
  Synthetic
uuucuugucucacuuuuggaa

SEQ ID NO: 66011 - RNA, 22 nt, Artificial Sequence
  Synthetic
auuucuugucucacuuuuggaa

SEQ ID NO: 66012 - RNA, 23 nt, Artificial Sequence
  Synthetic
cauuucuugucucacuuuuggaa

SEQ ID NO: 66013 - RNA, 24 nt, Artificial Sequence
  Synthetic
acauuucuugucucacuuuuggaa

SEQ ID NO: 66014 - RNA, 18 nt, Artificial Sequence
  Synthetic
gcccaaggucuuacauaa

SEQ ID NO: 66015 - RNA, 19 nt, Artificial Sequence
  Synthetic
ugcccaaggucuuacauaa

SEQ ID NO: 66016 - RNA, 20 nt, Artificial Sequence
  Synthetic
uugcccaaggucuuacauaa

SEQ ID NO: 66017 - RNA, 21 nt, Artificial Sequence
  Synthetic
cuugcccaaggucuuacauaa

SEQ ID NO: 66018 - RNA, 22 nt, Artificial Sequence
  Synthetic
ucuugcccaaggucuuacauaa

SEQ ID NO: 66019 - RNA, 23 nt, Artificial Sequence
  Synthetic
aucuugcccaaggucuuacauaa

SEQ ID NO: 66020 - RNA, 24 nt, Artificial Sequence
  Synthetic
aaucuugcccaaggucuuacauaa

SEQ ID NO: 66021 - RNA, 18 nt, Artificial Sequence
  Synthetic
accugucuuuaauccuaa

SEQ ID NO: 66022 - RNA, 19 nt, Artificial Sequence
  Synthetic
uaccugucuuuaauccuaa

SEQ ID NO: 66023 - RNA, 20 nt, Artificial Sequence
  Synthetic
auaccugucuuuaauccuaa

SEQ ID NO: 66024 - RNA, 21 nt, Artificial Sequence
  Synthetic
uauaccugucuuuaauccuaa

SEQ ID NO: 66025 - RNA, 22 nt, Artificial Sequence
  Synthetic
cuauaccugucuuuaauccuaa

SEQ ID NO: 66026 - RNA, 23 nt, Artificial Sequence
  Synthetic
acuauaccugucuuuaauccuaa

SEQ ID NO: 66027 - RNA, 24 nt, Artificial Sequence
  Synthetic
uacuauaccugucuuuaauccuaa

SEQ ID NO: 66028 - RNA, 18 nt, Artificial Sequence
  Synthetic
uagguccucuaacaguaa

SEQ ID NO: 66029 - RNA, 19 nt, Artificial Sequence
  Synthetic
guagguccucuaacaguaa

SEQ ID NO: 66030 - RNA, 20 nt, Artificial Sequence
  Synthetic
uguagguccucuaacaguaa

SEQ ID NO: 66031 - RNA, 21 nt, Artificial Sequence
  Synthetic
uuguagguccucuaacaguaa

SEQ ID NO: 66032 - RNA, 22 nt, Artificial Sequence
  Synthetic
uuuguagguccucuaacaguaa

SEQ ID NO: 66033 - RNA, 23 nt, Artificial Sequence
  Synthetic
auuuguagguccucuaacaguaa

SEQ ID NO: 66034 - RNA, 24 nt, Artificial Sequence
  Synthetic
aauuuguagguccucuaacaguaa

SEQ ID NO: 66035 - RNA, 18 nt, Artificial Sequence
  Synthetic
auuucauggguuauguaa

SEQ ID NO: 66036 - RNA, 19 nt, Artificial Sequence
  Synthetic
  misc_feature (1)..(1): n is a, c, g, or u
nauuucauggguuauguaa

SEQ ID NO: 66037 - RNA, 20 nt, Artificial Sequence
  Synthetic
  misc_feature (2)..(2): n is a, c, g, or u
anauuucauggguuauguaa

SEQ ID NO: 66038 - RNA, 21 nt, Artificial Sequence
  Synthetic
  misc_feature (3)..(3): n is a, c, g, or u
uanauuucauggguuauguaa

SEQ ID NO: 66039 - RNA, 22 nt, Artificial Sequence
  Synthetic
  misc_feature (4)..(4): n is a, c, g, or u
cuanauuucauggguuauguaa

SEQ ID NO: 66040 - RNA, 23 nt, Artificial Sequence
  Synthetic
  misc_feature (5)..(5): n is a, c, g, or u
ccuanauuucauggguuauguaa

SEQ ID NO: 66041 - RNA, 24 nt, Artificial Sequence
  Synthetic
  misc_feature (6)..(6): n is a, c, g, or u
cccuanauuucauggguuauguaa

SEQ ID NO: 66042 - RNA, 18 nt, Artificial Sequence
  Synthetic
gggacccugcaccgaaca

SEQ ID NO: 66043 - RNA, 19 nt, Artificial Sequence
  Synthetic
ggggacccugcaccgaaca

SEQ ID NO: 66044 - RNA, 20 nt, Artificial Sequence
  Synthetic
uggggacccugcaccgaaca

SEQ ID NO: 66045 - RNA, 21 nt, Artificial Sequence
  Synthetic
uuggggacccugcaccgaaca

SEQ ID NO: 66046 - RNA, 22 nt, Artificial Sequence
  Synthetic
auuggggacccugcaccgaaca

SEQ ID NO: 66047 - RNA, 23 nt, Artificial Sequence
  Synthetic
gauuggggacccugcaccgaaca

SEQ ID NO: 66048 - RNA, 24 nt, Artificial Sequence
  Synthetic
ggauuggggacccugcaccgaaca

SEQ ID NO: 66049 - RNA, 18 nt, Artificial Sequence
  Synthetic
ggcuccaguuccggaaca

SEQ ID NO: 66050 - RNA, 19 nt, Artificial Sequence
  Synthetic
uggcuccaguuccggaaca

SEQ ID NO: 66051 - RNA, 20 nt, Artificial Sequence
  Synthetic
guggcuccaguuccggaaca

SEQ ID NO: 66052 - RNA, 21 nt, Artificial Sequence
  Synthetic
gguggcuccaguuccggaaca

SEQ ID NO: 66053 - RNA, 22 nt, Artificial Sequence
  Synthetic
ugguggcuccaguuccggaaca

SEQ ID NO: 66054 - RNA, 23 nt, Artificial Sequence
  Synthetic
cugguggcuccaguuccggaaca

SEQ ID NO: 66055 - RNA, 24 nt, Artificial Sequence
  Synthetic
gcugguggcuccaguuccggaaca

SEQ ID NO: 66056 - RNA, 18 nt, Artificial Sequence
  Synthetic
  misc_feature (1)..(1): n is a, c, g, or u
nggguucacucccccaca

SEQ ID NO: 66057 - RNA, 19 nt, Artificial Sequence
  Synthetic
  misc_feature (2)..(2): n is a, c, g, or u
cnggguucacucccccaca

SEQ ID NO: 66058 - RNA, 20 nt, Artificial Sequence
  Synthetic
  misc_feature (3)..(3): n is a, c, g, or u
ccnggguucacucccccaca

SEQ ID NO: 66059 - RNA, 21 nt, Artificial Sequence
  Synthetic
  misc_feature (4)..(4): n is a, c, g, or u
gccnggguucacucccccaca

SEQ ID NO: 66060 - RNA, 22 nt, Artificial Sequence
  Synthetic
  misc_feature (5)..(5): n is a, c, g, or u
ggccnggguucacucccccaca

SEQ ID NO: 66061 - RNA, 23 nt, Artificial Sequence
  Synthetic
  misc_feature (6)..(6): n is a, c, g, or u
gggccnggguucacucccccaca

SEQ ID NO: 66062 - RNA, 24 nt, Artificial Sequence
  Synthetic
  misc_feature (7)..(7): n is a, c, g, or u
cgggccnggguucacucccccaca

SEQ ID NO: 66063 - RNA, 18 nt, Artificial Sequence
  Synthetic
caaucccaacaaagacca

SEQ ID NO: 66064 - RNA, 19 nt, Artificial Sequence
  Synthetic
acaaucccaacaaagacca

SEQ ID NO: 66065 - RNA, 20 nt, Artificial Sequence
  Synthetic
cacaaucccaacaaagacca

SEQ ID NO: 66066 - RNA, 21 nt, Artificial Sequence
  Synthetic
ccacaaucccaacaaagacca

SEQ ID NO: 66067 - RNA, 22 nt, Artificial Sequence
  Synthetic
accacaaucccaacaaagacca

SEQ ID NO: 66068 - RNA, 23 nt, Artificial Sequence
  Synthetic
gaccacaaucccaacaaagacca

SEQ ID NO: 66069 - RNA, 24 nt, Artificial Sequence
  Synthetic
ggaccacaaucccaacaaagacca

SEQ ID NO: 66070 - RNA, 18 nt, Artificial Sequence
  Synthetic
  misc_feature (10)..(10): n is a, c, g, or u
ugccguuccngccgacca

SEQ ID NO: 66071 - RNA, 19 nt, Artificial Sequence
  Synthetic
  misc_feature (11)..(11): n is a, c, g, or u
cugccguuccngccgacca

SEQ ID NO: 66072 - RNA, 20 nt, Artificial Sequence
  Synthetic
  misc_feature (12)..(12): n is a, c, g, or u
ucugccguuccngccgacca

SEQ ID NO: 66073 - RNA, 21 nt, Artificial Sequence
  Synthetic
  misc_feature (13)..(13): n is a, c, g, or u
gucugccguuccngccgacca

SEQ ID NO: 66074 - RNA, 22 nt, Artificial Sequence
  Synthetic
  misc_feature (14)..(14): n is a, c, g, or u
cgucugccguuccngccgacca

SEQ ID NO: 66075 - RNA, 23 nt, Artificial Sequence
  Synthetic
  misc_feature (15)..(15): n is a, c, g, or u
ccgucugccguuccngccgacca

SEQ ID NO: 66076 - RNA, 24 nt, Artificial Sequence
  Synthetic
  misc_feature (16)..(16): n is a, c, g, or u
uccgucugccguuccngccgacca

SEQ ID NO: 66077 - RNA, 18 nt, Artificial Sequence
  Synthetic
ucaccucugcacgucgca

SEQ ID NO: 66078 - RNA, 19 nt, Artificial Sequence
  Synthetic
uucaccucugcacgucgca

SEQ ID NO: 66079 - RNA, 20 nt, Artificial Sequence
  Synthetic
cuucaccucugcacgucgca

SEQ ID NO: 66080 - RNA, 21 nt, Artificial Sequence
  Synthetic
gcuucaccucugcacgucgca

SEQ ID NO: 66081 - RNA, 22 nt, Artificial Sequence
  Synthetic
cgcuucaccucugcacgucgca

SEQ ID NO: 66082 - RNA, 23 nt, Artificial Sequence
  Synthetic
ucgcuucaccucugcacgucgca

SEQ ID NO: 66083 - RNA, 24 nt, Artificial Sequence
  Synthetic
uucgcuucaccucugcacgucgca

SEQ ID NO: 66084 - RNA, 18 nt, Artificial Sequence
  Synthetic
ucauccucaggccaugca

SEQ ID NO: 66085 - RNA, 19 nt, Artificial Sequence
  Synthetic
cucauccucaggccaugca

SEQ ID NO: 66086 - RNA, 20 nt, Artificial Sequence
  Synthetic
acucauccucaggccaugca

SEQ ID NO: 66087 - RNA, 21 nt, Artificial Sequence
  Synthetic
cacucauccucaggccaugca

SEQ ID NO: 66088 - RNA, 22 nt, Artificial Sequence
  Synthetic
acacucauccucaggccaugca

SEQ ID NO: 66089 - RNA, 23 nt, Artificial Sequence
  Synthetic
gacacucauccucaggccaugca

SEQ ID NO: 66090 - RNA, 24 nt, Artificial Sequence
  Synthetic
agacacucauccucaggccaugca

SEQ ID NO: 66091 - RNA, 18 nt, Artificial Sequence
  Synthetic
aggauuggggacccugca

SEQ ID NO: 66092 - RNA, 19 nt, Artificial Sequence
  Synthetic
gaggauuggggacccugca

SEQ ID NO: 66093 - RNA, 20 nt, Artificial Sequence
  Synthetic
cgaggauuggggacccugca

SEQ ID NO: 66094 - RNA, 21 nt, Artificial Sequence
  Synthetic
ucgaggauuggggacccugca

SEQ ID NO: 66095 - RNA, 22 nt, Artificial Sequence
  Synthetic
cucgaggauuggggacccugca

SEQ ID NO: 66096 - RNA, 23 nt, Artificial Sequence
  Synthetic
ucucgaggauuggggacccugca

SEQ ID NO: 66097 - RNA, 24 nt, Artificial Sequence
  Synthetic
uucucgaggauuggggacccugca

SEQ ID NO: 66098 - RNA, 18 nt, Artificial Sequence
  Synthetic
ggaacaagagcuacauca

SEQ ID NO: 66099 - RNA, 19 nt, Artificial Sequence
  Synthetic
gggaacaagagcuacauca

SEQ ID NO: 66100 - RNA, 20 nt, Artificial Sequence
  Synthetic
ugggaacaagagcuacauca

SEQ ID NO: 66101 - RNA, 21 nt, Artificial Sequence
  Synthetic
uugggaacaagagcuacauca

SEQ ID NO: 66102 - RNA, 22 nt, Artificial Sequence
  Synthetic
cuugggaacaagagcuacauca

SEQ ID NO: 66103 - RNA, 23 nt, Artificial Sequence
  Synthetic
ucuugggaacaagagcuacauca

SEQ ID NO: 66104 - RNA, 24 nt, Artificial Sequence
  Synthetic
uucuugggaacaagagcuacauca

SEQ ID NO: 66105 - RNA, 18 nt, Artificial Sequence
  Synthetic
cugcacgacucuugcuca

SEQ ID NO: 66106 - RNA, 19 nt, Artificial Sequence
  Synthetic
ccugcacgacucuugcuca

SEQ ID NO: 66107 - RNA, 20 nt, Artificial Sequence
  Synthetic
accugcacgacucuugcuca

SEQ ID NO: 66108 - RNA, 21 nt, Artificial Sequence
  Synthetic
aaccugcacgacucuugcuca

SEQ ID NO: 66109 - RNA, 22 nt, Artificial Sequence
  Synthetic
gaaccugcacgacucuugcuca

SEQ ID NO: 66110 - RNA, 23 nt, Artificial Sequence
  Synthetic
cgaaccugcacgacucuugcuca

SEQ ID NO: 66111 - RNA, 24 nt, Artificial Sequence
  Synthetic
ccgaaccugcacgacucuugcuca

SEQ ID NO: 66112 - RNA, 18 nt, Artificial Sequence
  Synthetic
cccaacaaaacaaaaaga

SEQ ID NO: 66113 - RNA, 19 nt, Artificial Sequence
  Synthetic
ucccaacaaaacaaaaaga

SEQ ID NO: 66114 - RNA, 20 nt, Artificial Sequence
  Synthetic
aucccaacaaaacaaaaaga

SEQ ID NO: 66115 - RNA, 21 nt, Artificial Sequence
  Synthetic
aaucccaacaaaacaaaaaga

SEQ ID NO: 66116 - RNA, 22 nt, Artificial Sequence
  Synthetic
aaaucccaacaaaacaaaaaga

SEQ ID NO: 66117 - RNA, 23 nt, Artificial Sequence
  Synthetic
uaaaucccaacaaaacaaaaaga

SEQ ID NO: 66118 - RNA, 24 nt, Artificial Sequence
  Synthetic
uuaaaucccaacaaaacaaaaaga

SEQ ID NO: 66119 - RNA, 18 nt, Artificial Sequence
  Synthetic
agacuguuuguuuaaaga

SEQ ID NO: 66120 - RNA, 19 nt, Artificial Sequence
  Synthetic
aagacuguuuguuuaaaga

SEQ ID NO: 66121 - RNA, 20 nt, Artificial Sequence
  Synthetic
aaagacuguuuguuuaaaga

SEQ ID NO: 66122 - RNA, 21 nt, Artificial Sequence
  Synthetic
caaagacuguuuguuuaaaga

SEQ ID NO: 66123 - RNA, 22 nt, Artificial Sequence
  Synthetic
ucaaagacuguuuguuuaaaga

SEQ ID NO: 66124 - RNA, 23 nt, Artificial Sequence
  Synthetic
uucaaagacuguuuguuuaaaga

SEQ ID NO: 66125 - RNA, 24 nt, Artificial Sequence
  Synthetic
cuucaaagacuguuuguuuaaaga

SEQ ID NO: 66126 - RNA, 18 nt, Artificial Sequence
  Synthetic
aaacaccagaaauccaga

SEQ ID NO: 66127 - RNA, 19 nt, Artificial Sequence
  Synthetic
caaacaccagaaauccaga

SEQ ID NO: 66128 - RNA, 20 nt, Artificial Sequence
  Synthetic
gcaaacaccagaaauccaga

SEQ ID NO: 66129 - RNA, 21 nt, Artificial Sequence
  Synthetic
agcaaacaccagaaauccaga

SEQ ID NO: 66130 - RNA, 22 nt, Artificial Sequence
  Synthetic
gagcaaacaccagaaauccaga

SEQ ID NO: 66131 - RNA, 23 nt, Artificial Sequence
  Synthetic
agagcaaacaccagaaauccaga

SEQ ID NO: 66132 - RNA, 24 nt, Artificial Sequence
  Synthetic
cagagcaaacaccagaaauccaga

SEQ ID NO: 66133 - RNA, 18 nt, Artificial Sequence
  Synthetic
  misc_feature (6)..(6): n is a, c, g, or u
ccacangaacacaucaga

SEQ ID NO: 66134 - RNA, 19 nt, Artificial Sequence
  Synthetic
  misc_feature (7)..(7): n is a, c, g, or u
accacangaacacaucaga

SEQ ID NO: 66135 - RNA, 20 nt, Artificial Sequence
  Synthetic
  misc_feature (8)..(8): n is a, c, g, or u
uaccacangaacacaucaga

SEQ ID NO: 66136 - RNA, 21 nt, Artificial Sequence
  Synthetic
  misc_feature (9)..(9): n is a, c, g, or u
uuaccacangaacacaucaga

SEQ ID NO: 66137 - RNA, 22 nt, Artificial Sequence
  Synthetic
  misc_feature (10)..(10): n is a, c, g, or u
auuaccacangaacacaucaga

SEQ ID NO: 66138 - RNA, 23 nt, Artificial Sequence
  Synthetic
  misc_feature (11)..(11): n is a, c, g, or u
cauuaccacangaacacaucaga

SEQ ID NO: 66139 - RNA, 24 nt, Artificial Sequence
  Synthetic
  misc_feature (12)..(12): n is a, c, g, or u
ucauuaccacangaacacaucaga

SEQ ID NO: 66140 - RNA, 18 nt, Artificial Sequence
  Synthetic
uuggacggucccucucga

SEQ ID NO: 66141 - RNA, 19 nt, Artificial Sequence
  Synthetic
cuuggacggucccucucga

SEQ ID NO: 66142 - RNA, 20 nt, Artificial Sequence
  Synthetic
ucuuggacggucccucucga

SEQ ID NO: 66143 - RNA, 21 nt, Artificial Sequence
  Synthetic
uucuuggacggucccucucga

SEQ ID NO: 66144 - RNA, 22 nt, Artificial Sequence
  Synthetic
uuucuuggacggucccucucga

SEQ ID NO: 66145 - RNA, 23 nt, Artificial Sequence
  Synthetic
cuuucuuggacggucccucucga

SEQ ID NO: 66146 - RNA, 24 nt, Artificial Sequence
  Synthetic
gcuuucuuggacggucccucucga

SEQ ID NO: 66147 - RNA, 18 nt, Artificial Sequence
  Synthetic
cgucaaucuucucgagga

SEQ ID NO: 66148 - RNA, 19 nt, Artificial Sequence
  Synthetic
ucgucaaucuucucgagga

SEQ ID NO: 66149 - RNA, 20 nt, Artificial Sequence
  Synthetic
cucgucaaucuucucgagga

SEQ ID NO: 66150 - RNA, 21 nt, Artificial Sequence
  Synthetic
ucucgucaaucuucucgagga

SEQ ID NO: 66151 - RNA, 22 nt, Artificial Sequence
  Synthetic
aucucgucaaucuucucgagga

SEQ ID NO: 66152 - RNA, 23 nt, Artificial Sequence
  Synthetic
caucucgucaaucuucucgagga

SEQ ID NO: 66153 - RNA, 24 nt, Artificial Sequence
  Synthetic
ucaucucgucaaucuucucgagga

SEQ ID NO: 66154 - RNA, 18 nt, Artificial Sequence
  Synthetic
gaagccaacaagguagga

SEQ ID NO: 66155 - RNA, 19 nt, Artificial Sequence
  Synthetic
  misc_feature (1)..(1): n is a, c, g, or u
ngaagccaacaagguagga

SEQ ID NO: 66156 - RNA, 20 nt, Artificial Sequence
  Synthetic
  misc_feature (2)..(2): n is a, c, g, or u
cngaagccaacaagguagga

SEQ ID NO: 66157 - RNA, 21 nt, Artificial Sequence
  Synthetic
  misc_feature (3)..(3): n is a, c, g, or u
acngaagccaacaagguagga

SEQ ID NO: 66158 - RNA, 22 nt, Artificial Sequence
  Synthetic
  misc_feature (4)..(4): n is a, c, g, or u
gacngaagccaacaagguagga

SEQ ID NO: 66159 - RNA, 23 nt, Artificial Sequence
  Synthetic
  misc_feature (5)..(5): n is a, c, g, or u
ggacngaagccaacaagguagga

SEQ ID NO: 66160 - RNA, 24 nt, Artificial Sequence
  Synthetic
  misc_feature (6)..(6): n is a, c, g, or u
uggacngaagccaacaagguagga

SEQ ID NO: 66161 - RNA, 18 nt, Artificial Sequence
  Synthetic
cuguucaaaaccuucgga

SEQ ID NO: 66162 - RNA, 19 nt, Artificial Sequence
  Synthetic
gcuguucaaaaccuucgga

SEQ ID NO: 66163 - RNA, 20 nt, Artificial Sequence
  Synthetic
ugcuguucaaaaccuucgga

SEQ ID NO: 66164 - RNA, 21 nt, Artificial Sequence
  Synthetic
uugcuguucaaaaccuucgga

SEQ ID NO: 66165 - RNA, 22 nt, Artificial Sequence
  Synthetic
guugcuguucaaaaccuucgga

SEQ ID NO: 66166 - RNA, 23 nt, Artificial Sequence
  Synthetic
uguugcuguucaaaaccuucgga

SEQ ID NO: 66167 - RNA, 24 nt, Artificial Sequence
  Synthetic
auguugcuguucaaaaccuucgga

SEQ ID NO: 66168 - RNA, 18 nt, Artificial Sequence
  Synthetic
cggaaaauuccuauggga

SEQ ID NO: 66169 - RNA, 19 nt, Artificial Sequence
  Synthetic
ucggaaaauuccuauggga

SEQ ID NO: 66170 - RNA, 20 nt, Artificial Sequence
  Synthetic
uucggaaaauuccuauggga

SEQ ID NO: 66171 - RNA, 21 nt, Artificial Sequence
  Synthetic
uuucggaaaauuccuauggga

SEQ ID NO: 66172 - RNA, 22 nt, Artificial Sequence
  Synthetic
cuuucggaaaauuccuauggga

SEQ ID NO: 66173 - RNA, 23 nt, Artificial Sequence
  Synthetic
gcuuucggaaaauuccuauggga

SEQ ID NO: 66174 - RNA, 24 nt, Artificial Sequence
  Synthetic
ggcuuucggaaaauuccuauggga

SEQ ID NO: 66175 - RNA, 18 nt, Artificial Sequence
  Synthetic
ccaacaaagaccacugga

SEQ ID NO: 66176 - RNA, 19 nt, Artificial Sequence
  Synthetic
cccaacaaagaccacugga

SEQ ID NO: 66177 - RNA, 20 nt, Artificial Sequence
  Synthetic
ucccaacaaagaccacugga

SEQ ID NO: 66178 - RNA, 21 nt, Artificial Sequence
  Synthetic
aucccaacaaagaccacugga

SEQ ID NO: 66179 - RNA, 22 nt, Artificial Sequence
  Synthetic
aaucccaacaaagaccacugga

SEQ ID NO: 66180 - RNA, 23 nt, Artificial Sequence
  Synthetic
caaucccaacaaagaccacugga

SEQ ID NO: 66181 - RNA, 24 nt, Artificial Sequence
  Synthetic
acaaucccaacaaagaccacugga

SEQ ID NO: 66182 - RNA, 18 nt, Artificial Sequence
  Synthetic
  misc_feature (7)..(7): n is a, c, g, or u
uguuaancggccuauuga

SEQ ID NO: 66183 - RNA, 19 nt, Artificial Sequence
  Synthetic
  misc_feature (8)..(8): n is a, c, g, or u
cuguuaancggccuauuga

SEQ ID NO: 66184 - RNA, 20 nt, Artificial Sequence
  Synthetic
  misc_feature (9)..(9): n is a, c, g, or u
ccuguuaancggccuauuga

SEQ ID NO: 66185 - RNA, 21 nt, Artificial Sequence
  Synthetic
  misc_feature (10)..(10): n is a, c, g, or u
cccuguuaancggccuauuga

SEQ ID NO: 66186 - RNA, 22 nt, Artificial Sequence
  Synthetic
  misc_feature (11)..(11): n is a, c, g, or u
ucccuguuaancggccuauuga

SEQ ID NO: 66187 - RNA, 23 nt, Artificial Sequence
  Synthetic
  misc_feature (12)..(12): n is a, c, g, or u
cucccuguuaancggccuauuga

SEQ ID NO: 66188 - RNA, 24 nt, Artificial Sequence
  Synthetic
  misc_feature (13)..(13): n is a, c, g, or u
acucccuguuaancggccuauuga

SEQ ID NO: 66189 - RNA, 18 nt, Artificial Sequence
  Synthetic
cacuauuuacauacccua

SEQ ID NO: 66190 - RNA, 19 nt, Artificial Sequence
  Synthetic
acacuauuuacauacccua

SEQ ID NO: 66191 - RNA, 20 nt, Artificial Sequence
  Synthetic
gacacuauuuacauacccua

SEQ ID NO: 66192 - RNA, 21 nt, Artificial Sequence
  Synthetic
agacacuauuuacauacccua

SEQ ID NO: 66193 - RNA, 22 nt, Artificial Sequence
  Synthetic
cagacacuauuuacauacccua

SEQ ID NO: 66194 - RNA, 23 nt, Artificial Sequence
  Synthetic
ccagacacuauuuacauacccua

SEQ ID NO: 66195 - RNA, 24 nt, Artificial Sequence
  Synthetic
accagacacuauuuacauacccua

SEQ ID NO: 66196 - RNA, 18 nt, Artificial Sequence
  Synthetic
  misc_feature (3)..(3): n is a, c, g, or u
  misc_feature (12)..(12): n is a, c, g, or u
acnaaauauuunccccua

SEQ ID NO: 66197 - RNA, 19 nt, Artificial Sequence
  Synthetic
  misc_feature (4)..(4): n is a, c, g, or u
  misc_feature (13)..(13): n is a, c, g, or u
uacnaaauauuunccccua

SEQ ID NO: 66198 - RNA, 20 nt, Artificial Sequence
  Synthetic
  misc_feature (5)..(5): n is a, c, g, or u
  misc_feature (14)..(14): n is a, c, g, or u
cuacnaaauauuunccccua

SEQ ID NO: 66199 - RNA, 21 nt, Artificial Sequence
  Synthetic
  misc_feature (6)..(6): n is a, c, g, or u
  misc_feature (15)..(15): n is a, c, g, or u
ucuacnaaauauuunccccua

SEQ ID NO: 66200 - RNA, 22 nt, Artificial Sequence
  Synthetic
  misc_feature (7)..(7): n is a, c, g, or u
  misc_feature (16)..(16): n is a, c, g, or u
cucuacnaaauauuunccccua

SEQ ID NO: 66201 - RNA, 23 nt, Artificial Sequence
  Synthetic
  misc_feature (8)..(8): n is a, c, g, or u
  misc_feature (17)..(17): n is a, c, g, or u
ucucuacnaaauauuunccccua

SEQ ID NO: 66202 - RNA, 24 nt, Artificial Sequence
  Synthetic
  misc_feature (9)..(9): n is a, c, g, or u
  misc_feature (18)..(18): n is a, c, g, or u
aucucuacnaaauauuunccccua

SEQ ID NO: 66203 - RNA, 18 nt, Artificial Sequence
  Synthetic
gcuuucggaaaauuccua

SEQ ID NO: 66204 - RNA, 19 nt, Artificial Sequence
  Synthetic
ggcuuucggaaaauuccua

SEQ ID NO: 66205 - RNA, 20 nt, Artificial Sequence
  Synthetic
gggcuuucggaaaauuccua

SEQ ID NO: 66206 - RNA, 21 nt, Artificial Sequence
  Synthetic
ugggcuuucggaaaauuccua

SEQ ID NO: 66207 - RNA, 22 nt, Artificial Sequence
  Synthetic
augggcuuucggaaaauuccua

SEQ ID NO: 66208 - RNA, 23 nt, Artificial Sequence
  Synthetic
caugggcuuucggaaaauuccua

SEQ ID NO: 66209 - RNA, 24 nt, Artificial Sequence
  Synthetic
ucaugggcuuucggaaaauuccua

SEQ ID NO: 66210 - RNA, 18 nt, Artificial Sequence
  Synthetic
acuucucucaauuuucua

SEQ ID NO: 66211 - RNA, 19 nt, Artificial Sequence
  Synthetic
gacuucucucaauuuucua

SEQ ID NO: 66212 - RNA, 20 nt, Artificial Sequence
  Synthetic
ggacuucucucaauuuucua

SEQ ID NO: 66213 - RNA, 21 nt, Artificial Sequence
  Synthetic
uggacuucucucaauuuucua

SEQ ID NO: 66214 - RNA, 22 nt, Artificial Sequence
  Synthetic
guggacuucucucaauuuucua

SEQ ID NO: 66215 - RNA, 23 nt, Artificial Sequence
  Synthetic
gguggacuucucucaauuuucua

SEQ ID NO: 66216 - RNA, 24 nt, Artificial Sequence
  Synthetic
ugguggacuucucucaauuuucua

SEQ ID NO: 66217 - RNA, 18 nt, Artificial Sequence
  Synthetic
gaucaucaaccaccagua

SEQ ID NO: 66218 - RNA, 19 nt, Artificial Sequence
  Synthetic
ggaucaucaaccaccagua

SEQ ID NO: 66219 - RNA, 20 nt, Artificial Sequence
  Synthetic
aggaucaucaaccaccagua

SEQ ID NO: 66220 - RNA, 21 nt, Artificial Sequence
  Synthetic
caggaucaucaaccaccagua

SEQ ID NO: 66221 - RNA, 22 nt, Artificial Sequence
  Synthetic
ccaggaucaucaaccaccagua

SEQ ID NO: 66222 - RNA, 23 nt, Artificial Sequence
  Synthetic
uccaggaucaucaaccaccagua

SEQ ID NO: 66223 - RNA, 24 nt, Artificial Sequence
  Synthetic
uuccaggaucaucaaccaccagua

SEQ ID NO: 66224 - RNA, 18 nt, Artificial Sequence
  Synthetic
uauauggaugauguggua

SEQ ID NO: 66225 - RNA, 19 nt, Artificial Sequence
  Synthetic
uuauauggaugauguggua

SEQ ID NO: 66226 - RNA, 20 nt, Artificial Sequence
  Synthetic
guuauauggaugauguggua

SEQ ID NO: 66227 - RNA, 21 nt, Artificial Sequence
  Synthetic
aguuauauggaugauguggua

SEQ ID NO: 66228 - RNA, 22 nt, Artificial Sequence
  Synthetic
caguuauauggaugauguggua

SEQ ID NO: 66229 - RNA, 23 nt, Artificial Sequence
  Synthetic
ucaguuauauggaugauguggua

SEQ ID NO: 66230 - RNA, 24 nt, Artificial Sequence
  Synthetic
uucaguuauauggaugauguggua

SEQ ID NO: 66231 - RNA, 18 nt, Artificial Sequence
  Synthetic
uaccgccucagcucugua

SEQ ID NO: 66232 - RNA, 19 nt, Artificial Sequence
  Synthetic
auaccgccucagcucugua

SEQ ID NO: 66233 - RNA, 20 nt, Artificial Sequence
  Synthetic
gauaccgccucagcucugua

SEQ ID NO: 66234 - RNA, 21 nt, Artificial Sequence
  Synthetic
agauaccgccucagcucugua

SEQ ID NO: 66235 - RNA, 22 nt, Artificial Sequence
  Synthetic
uagauaccgccucagcucugua

SEQ ID NO: 66236 - RNA, 23 nt, Artificial Sequence
  Synthetic
cuagauaccgccucagcucugua

SEQ ID NO: 66237 - RNA, 24 nt, Artificial Sequence
  Synthetic
ucuagauaccgccucagcucugua

SEQ ID NO: 66238 - RNA, 18 nt, Artificial Sequence
  Synthetic
  misc_feature (11)..(11): n is a, c, g, or u
ggucuggagcnaaacuua

SEQ ID NO: 66239 - RNA, 19 nt, Artificial Sequence
  Synthetic
  misc_feature (12)..(12): n is a, c, g, or u
aggucuggagcnaaacuua

SEQ ID NO: 66240 - RNA, 20 nt, Artificial Sequence
  Synthetic
  misc_feature (13)..(13): n is a, c, g, or u
caggucuggagcnaaacuua

SEQ ID NO: 66241 - RNA, 21 nt, Artificial Sequence
  Synthetic
  misc_feature (14)..(14): n is a, c, g, or u
gcaggucuggagcnaaacuua

SEQ ID NO: 66242 - RNA, 22 nt, Artificial Sequence
  Synthetic
  misc_feature (15)..(15): n is a, c, g, or u
agcaggucuggagcnaaacuua

SEQ ID NO: 66243 - RNA, 23 nt, Artificial Sequence
  Synthetic
  misc_feature (16)..(16): n is a, c, g, or u
cagcaggucuggagcnaaacuua

SEQ ID NO: 66244 - RNA, 24 nt, Artificial Sequence
  Synthetic
  misc_feature (17)..(17): n is a, c, g, or u
gcagcaggucuggagcnaaacuua

SEQ ID NO: 66245 - RNA, 18 nt, Artificial Sequence
  Synthetic
acaaggugggaaauuuua

SEQ ID NO: 66246 - RNA, 19 nt, Artificial Sequence
  Synthetic
cacaaggugggaaauuuua

SEQ ID NO: 66247 - RNA, 20 nt, Artificial Sequence
  Synthetic
ucacaaggugggaaauuuua

SEQ ID NO: 66248 - RNA, 21 nt, Artificial Sequence
  Synthetic
cucacaaggugggaaauuuua

SEQ ID NO: 66249 - RNA, 22 nt, Artificial Sequence
  Synthetic
acucacaaggugggaaauuuua

SEQ ID NO: 66250 - RNA, 23 nt, Artificial Sequence
  Synthetic
gacucacaaggugggaaauuuua

SEQ ID NO: 66251 - RNA, 24 nt, Artificial Sequence
  Synthetic
ggacucacaaggugggaaauuuua

SEQ ID NO: 66252 - RNA, 18 nt, Artificial Sequence
  Synthetic
ggggacccugcaccgaac

SEQ ID NO: 66253 - RNA, 19 nt, Artificial Sequence
  Synthetic
uggggacccugcaccgaac

SEQ ID NO: 66254 - RNA, 20 nt, Artificial Sequence
  Synthetic
uuggggacccugcaccgaac

SEQ ID NO: 66255 - RNA, 21 nt, Artificial Sequence
  Synthetic
auuggggacccugcaccgaac

SEQ ID NO: 66256 - RNA, 22 nt, Artificial Sequence
  Synthetic
gauuggggacccugcaccgaac

SEQ ID NO: 66257 - RNA, 23 nt, Artificial Sequence
  Synthetic
ggauuggggacccugcaccgaac

SEQ ID NO: 66258 - RNA, 24 nt, Artificial Sequence
  Synthetic
aggauuggggacccugcaccgaac

SEQ ID NO: 66259 - RNA, 18 nt, Artificial Sequence
  Synthetic
caccuuauucuugggaac

SEQ ID NO: 66260 - RNA, 19 nt, Artificial Sequence
  Synthetic
ucaccuuauucuugggaac

SEQ ID NO: 66261 - RNA, 20 nt, Artificial Sequence
  Synthetic
gucaccuuauucuugggaac

SEQ ID NO: 66262 - RNA, 21 nt, Artificial Sequence
  Synthetic
ggucaccuuauucuugggaac

SEQ ID NO: 66263 - RNA, 22 nt, Artificial Sequence
  Synthetic
gggucaccuuauucuugggaac

SEQ ID NO: 66264 - RNA, 23 nt, Artificial Sequence
  Synthetic
ugggucaccuuauucuugggaac

SEQ ID NO: 66265 - RNA, 24 nt, Artificial Sequence
  Synthetic
  misc_feature (1)..(1): n is a, c, g, or u
nugggucaccuuauucuugggaac

SEQ ID NO: 66266 - RNA, 18 nt, Artificial Sequence
  Synthetic
ccugucuuuaauccuaac

SEQ ID NO: 66267 - RNA, 19 nt, Artificial Sequence
  Synthetic
accugucuuuaauccuaac

SEQ ID NO: 66268 - RNA, 20 nt, Artificial Sequence
  Synthetic
uaccugucuuuaauccuaac

SEQ ID NO: 66269 - RNA, 21 nt, Artificial Sequence
  Synthetic
auaccugucuuuaauccuaac

SEQ ID NO: 66270 - RNA, 22 nt, Artificial Sequence
  Synthetic
uauaccugucuuuaauccuaac

SEQ ID NO: 66271 - RNA, 23 nt, Artificial Sequence
  Synthetic
cuauaccugucuuuaauccuaac

SEQ ID NO: 66272 - RNA, 24 nt, Artificial Sequence
  Synthetic
acuauaccugucuuuaauccuaac

SEQ ID NO: 66273 - RNA, 18 nt, Artificial Sequence
  Synthetic
agcauucagagcaaacac

SEQ ID NO: 66274 - RNA, 19 nt, Artificial Sequence
  Synthetic
cagcauucagagcaaacac

SEQ ID NO: 66275 - RNA, 20 nt, Artificial Sequence
  Synthetic
ccagcauucagagcaaacac

SEQ ID NO: 66276 - RNA, 21 nt, Artificial Sequence
  Synthetic
uccagcauucagagcaaacac

SEQ ID NO: 66277 - RNA, 22 nt, Artificial Sequence
  Synthetic
auccagcauucagagcaaacac

SEQ ID NO: 66278 - RNA, 23 nt, Artificial Sequence
  Synthetic
gauccagcauucagagcaaacac

SEQ ID NO: 66279 - RNA, 24 nt, Artificial Sequence
  Synthetic
ggauccagcauucagagcaaacac

SEQ ID NO: 66280 - RNA, 18 nt, Artificial Sequence
  Synthetic
  misc_feature (8)..(8): n is a, c, g, or u
guuggggnucauuaccac

SEQ ID NO: 66281 - RNA, 19 nt, Artificial Sequence
  Synthetic
  misc_feature (9)..(9): n is a, c, g, or u
aguuggggnucauuaccac

SEQ ID NO: 66282 - RNA, 20 nt, Artificial Sequence
  Synthetic
  misc_feature (10)..(10): n is a, c, g, or u
aaguuggggnucauuaccac

SEQ ID NO: 66283 - RNA, 21 nt, Artificial Sequence
  Synthetic
  misc_feature (11)..(11): n is a, c, g, or u
gaaguuggggnucauuaccac

SEQ ID NO: 66284 - RNA, 22 nt, Artificial Sequence
  Synthetic
  misc_feature (12)..(12): n is a, c, g, or u
ggaaguuggggnucauuaccac

SEQ ID NO: 66285 - RNA, 23 nt, Artificial Sequence
  Synthetic
  misc_feature (13)..(13): n is a, c, g, or u
uggaaguuggggnucauuaccac

SEQ ID NO: 66286 - RNA, 24 nt, Artificial Sequence
  Synthetic
  misc_feature (14)..(14): n is a, c, g, or u
uuggaaguuggggnucauuaccac

SEQ ID NO: 66287 - RNA, 18 nt, Artificial Sequence
  Synthetic
  misc_feature (2)..(2): n is a, c, g, or u
cnggguucacucccccac

SEQ ID NO: 66288 - RNA, 19 nt, Artificial Sequence
  Synthetic
  misc_feature (3)..(3): n is a, c, g, or u
ccnggguucacucccccac

SEQ ID NO: 66289 - RNA, 20 nt, Artificial Sequence
  Synthetic
  misc_feature (4)..(4): n is a, c, g, or u
gccnggguucacucccccac

SEQ ID NO: 66290 - RNA, 21 nt, Artificial Sequence
  Synthetic
  misc_feature (5)..(5): n is a, c, g, or u
ggccnggguucacucccccac

SEQ ID NO: 66291 - RNA, 22 nt, Artificial Sequence
  Synthetic
  misc_feature (6)..(6): n is a, c, g, or u
gggccnggguucacucccccac

SEQ ID NO: 66292 - RNA, 23 nt, Artificial Sequence
  Synthetic
  misc_feature (7)..(7): n is a, c, g, or u
cgggccnggguucacucccccac

SEQ ID NO: 66293 - RNA, 24 nt, Artificial Sequence
  Synthetic
  misc_feature (8)..(8): n is a, c, g, or u
ucgggccnggguucacucccccac

SEQ ID NO: 66294 - RNA, 18 nt, Artificial Sequence
  Synthetic
ccugauauucauuugcac

SEQ ID NO: 66295 - RNA, 19 nt, Artificial Sequence
  Synthetic
uccugauauucauuugcac

SEQ ID NO: 66296 - RNA, 20 nt, Artificial Sequence
  Synthetic
uuccugauauucauuugcac

SEQ ID NO: 66297 - RNA, 21 nt, Artificial Sequence
  Synthetic
uuuccugauauucauuugcac

SEQ ID NO: 66298 - RNA, 22 nt, Artificial Sequence
  Synthetic
uuuuccugauauucauuugcac

SEQ ID NO: 66299 - RNA, 23 nt, Artificial Sequence
  Synthetic
cuuuuccugauauucauuugcac

SEQ ID NO: 66300 - RNA, 24 nt, Artificial Sequence
  Synthetic
ucuuuuccugauauucauuugcac

SEQ ID NO: 66301 - RNA, 18 nt, Artificial Sequence
  Synthetic
gacuguuuguuuaaagac

SEQ ID NO: 66302 - RNA, 19 nt, Artificial Sequence
  Synthetic
agacuguuuguuuaaagac

SEQ ID NO: 66303 - RNA, 20 nt, Artificial Sequence
  Synthetic
aagacuguuuguuuaaagac

SEQ ID NO: 66304 - RNA, 21 nt, Artificial Sequence
  Synthetic
aaagacuguuuguuuaaagac

SEQ ID NO: 66305 - RNA, 22 nt, Artificial Sequence
  Synthetic
caaagacuguuuguuuaaagac

SEQ ID NO: 66306 - RNA, 23 nt, Artificial Sequence
  Synthetic
ucaaagacuguuuguuuaaagac

SEQ ID NO: 66307 - RNA, 24 nt, Artificial Sequence
  Synthetic
uucaaagacuguuuguuuaaagac

SEQ ID NO: 66308 - RNA, 18 nt, Artificial Sequence
  Synthetic
gauuaaaggucuuuguac

SEQ ID NO: 66309 - RNA, 19 nt, Artificial Sequence
  Synthetic
agauuaaaggucuuuguac

SEQ ID NO: 66310 - RNA, 20 nt, Artificial Sequence
  Synthetic
uagauuaaaggucuuuguac

SEQ ID NO: 66311 - RNA, 21 nt, Artificial Sequence
  Synthetic
  misc_feature (1)..(1): n is a, c, g, or u
nuagauuaaaggucuuuguac

SEQ ID NO: 66312 - RNA, 22 nt, Artificial Sequence
  Synthetic
  misc_feature (2)..(2): n is a, c, g, or u
anuagauuaaaggucuuuguac

SEQ ID NO: 66313 - RNA, 23 nt, Artificial Sequence
  Synthetic
  misc_feature (3)..(3): n is a, c, g, or u
ganuagauuaaaggucuuuguac

SEQ ID NO: 66314 - RNA, 24 nt, Artificial Sequence
  Synthetic
  misc_feature (4)..(4): n is a, c, g, or u
aganuagauuaaaggucuuuguac

SEQ ID NO: 66315 - RNA, 18 nt, Artificial Sequence
  Synthetic
cgucgcauggagaccacc

SEQ ID NO: 66316 - RNA, 19 nt, Artificial Sequence
  Synthetic
acgucgcauggagaccacc

SEQ ID NO: 66317 - RNA, 20 nt, Artificial Sequence
  Synthetic
cacgucgcauggagaccacc

SEQ ID NO: 66318 - RNA, 21 nt, Artificial Sequence
  Synthetic
gcacgucgcauggagaccacc

SEQ ID NO: 66319 - RNA, 22 nt, Artificial Sequence
  Synthetic
ugcacgucgcauggagaccacc

SEQ ID NO: 66320 - RNA, 23 nt, Artificial Sequence
  Synthetic
cugcacgucgcauggagaccacc

SEQ ID NO: 66321 - RNA, 24 nt, Artificial Sequence
  Synthetic
ucugcacgucgcauggagaccacc

SEQ ID NO: 66322 - RNA, 18 nt, Artificial Sequence
  Synthetic
caaugucaacgaccgacc

SEQ ID NO: 66323 - RNA, 19 nt, Artificial Sequence
  Synthetic
gcaaugucaacgaccgacc

SEQ ID NO: 66324 - RNA, 20 nt, Artificial Sequence
  Synthetic
  misc_feature (1)..(1): n is a, c, g, or u
ngcaaugucaacgaccgacc

SEQ ID NO: 66325 - RNA, 21 nt, Artificial Sequence
  Synthetic
  misc_feature (2)..(2): n is a, c, g, or u
cngcaaugucaacgaccgacc

SEQ ID NO: 66326 - RNA, 22 nt, Artificial Sequence
  Synthetic
  misc_feature (3)..(3): n is a, c, g, or u
ucngcaaugucaacgaccgacc

SEQ ID NO: 66327 - RNA, 23 nt, Artificial Sequence
  Synthetic
  misc_feature (4)..(4): n is a, c, g, or u
cucngcaaugucaacgaccgacc

SEQ ID NO: 66328 - RNA, 24 nt, Artificial Sequence
  Synthetic
  misc_feature (5)..(5): n is a, c, g, or u
ucucngcaaugucaacgaccgacc

SEQ ID NO: 66329 - RNA, 18 nt, Artificial Sequence
  Synthetic
  misc_feature (11)..(11): n is a, c, g, or u
cugccguuccngccgacc

SEQ ID NO: 66330 - RNA, 19 nt, Artificial Sequence
  Synthetic
  misc_feature (12)..(12): n is a, c, g, or u
ucugccguuccngccgacc

SEQ ID NO: 66331 - RNA, 20 nt, Artificial Sequence
  Synthetic
  misc_feature (13)..(13): n is a, c, g, or u
gucugccguuccngccgacc

SEQ ID NO: 66332 - RNA, 21 nt, Artificial Sequence
  Synthetic
  misc_feature (14)..(14): n is a, c, g, or u
cgucugccguuccngccgacc

SEQ ID NO: 66333 - RNA, 22 nt, Artificial Sequence
  Synthetic
  misc_feature (15)..(15): n is a, c, g, or u
ccgucugccguuccngccgacc

SEQ ID NO: 66334 - RNA, 23 nt, Artificial Sequence
  Synthetic
  misc_feature (16)..(16): n is a, c, g, or u
uccgucugccguuccngccgacc

SEQ ID NO: 66335 - RNA, 24 nt, Artificial Sequence
  Synthetic
  misc_feature (17)..(17): n is a, c, g, or u
cuccgucugccguuccngccgacc

SEQ ID NO: 66336 - RNA, 18 nt, Artificial Sequence
  Synthetic
  misc_feature (5)..(5): n is a, c, g, or u
  misc_feature (14)..(14): n is a, c, g, or u
cuacnaaauauuuncccc

SEQ ID NO: 66337 - RNA, 19 nt, Artificial Sequence
  Synthetic
  misc_feature (6)..(6): n is a, c, g, or u
  misc_feature (15)..(15): n is a, c, g, or u
ucuacnaaauauuuncccc

SEQ ID NO: 66338 - RNA, 20 nt, Artificial Sequence
  Synthetic
  misc_feature (7)..(7): n is a, c, g, or u
  misc_feature (16)..(16): n is a, c, g, or u
cucuacnaaauauuuncccc

SEQ ID NO: 66339 - RNA, 21 nt, Artificial Sequence
  Synthetic
  misc_feature (8)..(8): n is a, c, g, or u
  misc_feature (17)..(17): n is a, c, g, or u
ucucuacnaaauauuuncccc

SEQ ID NO: 66340 - RNA, 22 nt, Artificial Sequence
  Synthetic
  misc_feature (9)..(9): n is a, c, g, or u
  misc_feature (18)..(18): n is a, c, g, or u
aucucuacnaaauauuuncccc

SEQ ID NO: 66341 - RNA, 23 nt, Artificial Sequence
  Synthetic
  misc_feature (10)..(10): n is a, c, g, or u
  misc_feature (19)..(19): n is a, c, g, or u
caucucuacnaaauauuuncccc

SEQ ID NO: 66342 - RNA, 24 nt, Artificial Sequence
  Synthetic
  misc_feature (11)..(11): n is a, c, g, or u
  misc_feature (20)..(20): n is a, c, g, or u
ccaucucuacnaaauauuuncccc

SEQ ID NO: 66343 - RNA, 18 nt, Artificial Sequence
  Synthetic
acgaagaggcaggucccc

SEQ ID NO: 66344 - RNA, 19 nt, Artificial Sequence
  Synthetic
gacgaagaggcaggucccc

SEQ ID NO: 66345 - RNA, 20 nt, Artificial Sequence
  Synthetic
agacgaagaggcaggucccc

SEQ ID NO: 66346 - RNA, 21 nt, Artificial Sequence
  Synthetic
uagacgaagaggcaggucccc

SEQ ID NO: 66347 - RNA, 22 nt, Artificial Sequence
  Synthetic
uuagacgaagaggcaggucccc

SEQ ID NO: 66348 - RNA, 23 nt, Artificial Sequence
  Synthetic
guuagacgaagaggcaggucccc

SEQ ID NO: 66349 - RNA, 24 nt, Artificial Sequence
  Synthetic
uguuagacgaagaggcaggucccc

SEQ ID NO: 66350 - RNA, 18 nt, Artificial Sequence
  Synthetic
uuggaagauccagcaucc

SEQ ID NO: 66351 - RNA, 19 nt, Artificial Sequence
  Synthetic
uuuggaagauccagcaucc

SEQ ID NO: 66352 - RNA, 20 nt, Artificial Sequence
  Synthetic
auuuggaagauccagcaucc

SEQ ID NO: 66353 - RNA, 21 nt, Artificial Sequence
  Synthetic
aauuuggaagauccagcaucc

SEQ ID NO: 66354 - RNA, 22 nt, Artificial Sequence
  Synthetic
aaauuuggaagauccagcaucc

SEQ ID NO: 66355 - RNA, 23 nt, Artificial Sequence
  Synthetic
  misc_feature (1)..(1): n is a, c, g, or u
naaauuuggaagauccagcaucc

SEQ ID NO: 66356 - RNA, 24 nt, Artificial Sequence
  Synthetic
  misc_feature (2)..(2): n is a, c, g, or u
gnaaauuuggaagauccagcaucc

SEQ ID NO: 66357 - RNA, 18 nt, Artificial Sequence
  Synthetic
aauucugucguucucucc

SEQ ID NO: 66358 - RNA, 19 nt, Artificial Sequence
  Synthetic
uaauucugucguucucucc

SEQ ID NO: 66359 - RNA, 20 nt, Artificial Sequence
  Synthetic
auaauucugucguucucucc

SEQ ID NO: 66360 - RNA, 21 nt, Artificial Sequence
  Synthetic
gauaauucugucguucucucc

SEQ ID NO: 66361 - RNA, 22 nt, Artificial Sequence
  Synthetic
  misc_feature (1)..(1): n is a, c, g, or u
ngauaauucugucguucucucc

SEQ ID NO: 66362 - RNA, 23 nt, Artificial Sequence
  Synthetic
  misc_feature (2)..(2): n is a, c, g, or u
cngauaauucugucguucucucc

SEQ ID NO: 66363 - RNA, 24 nt, Artificial Sequence
  Synthetic
  misc_feature (3)..(3): n is a, c, g, or u
acngauaauucugucguucucucc

SEQ ID NO: 66364 - RNA, 18 nt, Artificial Sequence
  Synthetic
gcaucacaucaggauucc

SEQ ID NO: 66365 - RNA, 19 nt, Artificial Sequence
  Synthetic
agcaucacaucaggauucc

SEQ ID NO: 66366 - RNA, 20 nt, Artificial Sequence
  Synthetic
aagcaucacaucaggauucc

SEQ ID NO: 66367 - RNA, 21 nt, Artificial Sequence
  Synthetic
aaagcaucacaucaggauucc

SEQ ID NO: 66368 - RNA, 22 nt, Artificial Sequence
  Synthetic
gaaagcaucacaucaggauucc

SEQ ID NO: 66369 - RNA, 23 nt, Artificial Sequence
  Synthetic
ggaaagcaucacaucaggauucc

SEQ ID NO: 66370 - RNA, 24 nt, Artificial Sequence
  Synthetic
uggaaagcaucacaucaggauucc

SEQ ID NO: 66371 - RNA, 18 nt, Artificial Sequence
  Synthetic
ucccaauguuaguauucc

SEQ ID NO: 66372 - RNA, 19 nt, Artificial Sequence
  Synthetic
uucccaauguuaguauucc

SEQ ID NO: 66373 - RNA, 20 nt, Artificial Sequence
  Synthetic
cuucccaauguuaguauucc

SEQ ID NO: 66374 - RNA, 21 nt, Artificial Sequence
  Synthetic
gcuucccaauguuaguauucc

SEQ ID NO: 66375 - RNA, 22 nt, Artificial Sequence
  Synthetic
agcuucccaauguuaguauucc

SEQ ID NO: 66376 - RNA, 23 nt, Artificial Sequence
  Synthetic
cagcuucccaauguuaguauucc

SEQ ID NO: 66377 - RNA, 24 nt, Artificial Sequence
  Synthetic
ccagcuucccaauguuaguauucc

SEQ ID NO: 66378 - RNA, 18 nt, Artificial Sequence
  Synthetic
uucaccucugcacgucgc

SEQ ID NO: 66379 - RNA, 19 nt, Artificial Sequence
  Synthetic
cuucaccucugcacgucgc

SEQ ID NO: 66380 - RNA, 20 nt, Artificial Sequence
  Synthetic
gcuucaccucugcacgucgc

SEQ ID NO: 66381 - RNA, 21 nt, Artificial Sequence
  Synthetic
cgcuucaccucugcacgucgc

SEQ ID NO: 66382 - RNA, 22 nt, Artificial Sequence
  Synthetic
ucgcuucaccucugcacgucgc

SEQ ID NO: 66383 - RNA, 23 nt, Artificial Sequence
  Synthetic
uucgcuucaccucugcacgucgc

SEQ ID NO: 66384 - RNA, 24 nt, Artificial Sequence
  Synthetic
cuucgcuucaccucugcacgucgc

SEQ ID NO: 66385 - RNA, 18 nt, Artificial Sequence
  Synthetic
  misc_feature (6)..(6): n is a, c, g, or u
gacccnucucggggucgc

SEQ ID NO: 66386 - RNA, 19 nt, Artificial Sequence
  Synthetic
  misc_feature (7)..(7): n is a, c, g, or u
cgacccnucucggggucgc

SEQ ID NO: 66387 - RNA, 20 nt, Artificial Sequence
  Synthetic
  misc_feature (8)..(8): n is a, c, g, or u
acgacccnucucggggucgc

SEQ ID NO: 66388 - RNA, 21 nt, Artificial Sequence
  Synthetic
  misc_feature (9)..(9): n is a, c, g, or u
gacgacccnucucggggucgc

SEQ ID NO: 66389 - RNA, 22 nt, Artificial Sequence
  Synthetic
  misc_feature (10)..(10): n is a, c, g, or u
ggacgacccnucucggggucgc

SEQ ID NO: 66390 - RNA, 23 nt, Artificial Sequence
  Synthetic
  misc_feature (11)..(11): n is a, c, g, or u
cggacgacccnucucggggucgc

SEQ ID NO: 66391 - RNA, 24 nt, Artificial Sequence
  Synthetic
  misc_feature (12)..(12): n is a, c, g, or u
gcggacgacccnucucggggucgc

SEQ ID NO: 66392 - RNA, 18 nt, Artificial Sequence
  Synthetic
gaugcaacccccacuggc

SEQ ID NO: 66393 - RNA, 19 nt, Artificial Sequence
  Synthetic
ugaugcaacccccacuggc

SEQ ID NO: 66394 - RNA, 20 nt, Artificial Sequence
  Synthetic
cugaugcaacccccacuggc

SEQ ID NO: 66395 - RNA, 21 nt, Artificial Sequence
  Synthetic
gcugaugcaacccccacuggc

SEQ ID NO: 66396 - RNA, 22 nt, Artificial Sequence
  Synthetic
ugcugaugcaacccccacuggc

SEQ ID NO: 66397 - RNA, 23 nt, Artificial Sequence
  Synthetic
uugcugaugcaacccccacuggc

SEQ ID NO: 66398 - RNA, 24 nt, Artificial Sequence
  Synthetic
uuugcugaugcaacccccacuggc

SEQ ID NO: 66399 - RNA, 18 nt, Artificial Sequence
  Synthetic
uaggccaucagcgcaugc

SEQ ID NO: 66400 - RNA, 19 nt, Artificial Sequence
  Synthetic
auaggccaucagcgcaugc

SEQ ID NO: 66401 - RNA, 20 nt, Artificial Sequence
  Synthetic
cauaggccaucagcgcaugc

SEQ ID NO: 66402 - RNA, 21 nt, Artificial Sequence
  Synthetic
ccauaggccaucagcgcaugc

SEQ ID NO: 66403 - RNA, 22 nt, Artificial Sequence
  Synthetic
gccauaggccaucagcgcaugc

SEQ ID NO: 66404 - RNA, 23 nt, Artificial Sequence
  Synthetic
ggccauaggccaucagcgcaugc

SEQ ID NO: 66405 - RNA, 24 nt, Artificial Sequence
  Synthetic
uggccauaggccaucagcgcaugc

SEQ ID NO: 66406 - RNA, 18 nt, Artificial Sequence
  Synthetic
cugccaacuggauccugc

SEQ ID NO: 66407 - RNA, 19 nt, Artificial Sequence
  Synthetic
gcugccaacuggauccugc

SEQ ID NO: 66408 - RNA, 20 nt, Artificial Sequence
  Synthetic
ugcugccaacuggauccugc

SEQ ID NO: 66409 - RNA, 21 nt, Artificial Sequence
  Synthetic
gugcugccaacuggauccugc

SEQ ID NO: 66410 - RNA, 22 nt, Artificial Sequence
  Synthetic
ugugcugccaacuggauccugc

SEQ ID NO: 66411 - RNA, 23 nt, Artificial Sequence
  Synthetic
cugugcugccaacuggauccugc

SEQ ID NO: 66412 - RNA, 24 nt, Artificial Sequence
  Synthetic
gcugugcugccaacuggauccugc

SEQ ID NO: 66413 - RNA, 18 nt, Artificial Sequence
  Synthetic
aggcaagccauucuuugc

SEQ ID NO: 66414 - RNA, 19 nt, Artificial Sequence
  Synthetic
caggcaagccauucuuugc

SEQ ID NO: 66415 - RNA, 20 nt, Artificial Sequence
  Synthetic
ucaggcaagccauucuuugc

SEQ ID NO: 66416 - RNA, 21 nt, Artificial Sequence
  Synthetic
cucaggcaagccauucuuugc

SEQ ID NO: 66417 - RNA, 22 nt, Artificial Sequence
  Synthetic
acucaggcaagccauucuuugc

SEQ ID NO: 66418 - RNA, 23 nt, Artificial Sequence
  Synthetic
cacucaggcaagccauucuuugc

SEQ ID NO: 66419 - RNA, 24 nt, Artificial Sequence
  Synthetic
gcacucaggcaagccauucuuugc

SEQ ID NO: 66420 - RNA, 18 nt, Artificial Sequence
  Synthetic
  misc_feature (14)..(14): n is a, c, g, or u
  misc_feature (17)..(17): n is a, c, g, or u
cuuggguggcuuunggnc

SEQ ID NO: 66421 - RNA, 19 nt, Artificial Sequence
  Synthetic
  misc_feature (15)..(15): n is a, c, g, or u
  misc_feature (18)..(18): n is a, c, g, or u
ccuuggguggcuuunggnc

SEQ ID NO: 66422 - RNA, 20 nt, Artificial Sequence
  Synthetic
  misc_feature (16)..(16): n is a, c, g, or u
  misc_feature (19)..(19): n is a, c, g, or u
gccuuggguggcuuunggnc

SEQ ID NO: 66423 - RNA, 21 nt, Artificial Sequence
  Synthetic
  misc_feature (17)..(17): n is a, c, g, or u
  misc_feature (20)..(20): n is a, c, g, or u
ugccuuggguggcuuunggnc

SEQ ID NO: 66424 - RNA, 22 nt, Artificial Sequence
  Synthetic
  misc_feature (18)..(18): n is a, c, g, or u
  misc_feature (21)..(21): n is a, c, g, or u
gugccuuggguggcuuunggnc

SEQ ID NO: 66425 - RNA, 23 nt, Artificial Sequence
  Synthetic
  misc_feature (19)..(19): n is a, c, g, or u
  misc_feature (22)..(22): n is a, c, g, or u
ugugccuuggguggcuuunggnc

SEQ ID NO: 66426 - RNA, 24 nt, Artificial Sequence
  Synthetic
  misc_feature (20)..(20): n is a, c, g, or u
  misc_feature (23)..(23): n is a, c, g, or u
cugugccuuggguggcuuunggnc

SEQ ID NO: 66427 - RNA, 18 nt, Artificial Sequence
  Synthetic
gggaacaagagcuacauc

SEQ ID NO: 66428 - RNA, 19 nt, Artificial Sequence
  Synthetic
ugggaacaagagcuacauc

SEQ ID NO: 66429 - RNA, 20 nt, Artificial Sequence
  Synthetic
uugggaacaagagcuacauc

SEQ ID NO: 66430 - RNA, 21 nt, Artificial Sequence
  Synthetic
cuugggaacaagagcuacauc

SEQ ID NO: 66431 - RNA, 22 nt, Artificial Sequence
  Synthetic
ucuugggaacaagagcuacauc

SEQ ID NO: 66432 - RNA, 23 nt, Artificial Sequence
  Synthetic
uucuugggaacaagagcuacauc

SEQ ID NO: 66433 - RNA, 24 nt, Artificial Sequence
  Synthetic
auucuugggaacaagagcuacauc

SEQ ID NO: 66434 - RNA, 18 nt, Artificial Sequence
  Synthetic
uuuggaagauccagcauc

SEQ ID NO: 66435 - RNA, 19 nt, Artificial Sequence
  Synthetic
auuuggaagauccagcauc

SEQ ID NO: 66436 - RNA, 20 nt, Artificial Sequence
  Synthetic
aauuuggaagauccagcauc

SEQ ID NO: 66437 - RNA, 21 nt, Artificial Sequence
  Synthetic
aaauuuggaagauccagcauc

SEQ ID NO: 66438 - RNA, 22 nt, Artificial Sequence
  Synthetic
  misc_feature (1)..(1): n is a, c, g, or u
naaauuuggaagauccagcauc

SEQ ID NO: 66439 - RNA, 23 nt, Artificial Sequence
  Synthetic
  misc_feature (2)..(2): n is a, c, g, or u
gnaaauuuggaagauccagcauc

SEQ ID NO: 66440 - RNA, 24 nt, Artificial Sequence
  Synthetic
  misc_feature (3)..(3): n is a, c, g, or u
ugnaaauuuggaagauccagcauc

SEQ ID NO: 66441 - RNA, 18 nt, Artificial Sequence
  Synthetic
uauucccaucccaucauc

SEQ ID NO: 66442 - RNA, 19 nt, Artificial Sequence
  Synthetic
guauucccaucccaucauc

SEQ ID NO: 66443 - RNA, 20 nt, Artificial Sequence
  Synthetic
uguauucccaucccaucauc

SEQ ID NO: 66444 - RNA, 21 nt, Artificial Sequence
  Synthetic
uuguauucccaucccaucauc

SEQ ID NO: 66445 - RNA, 22 nt, Artificial Sequence
  Synthetic
cuuguauucccaucccaucauc

SEQ ID NO: 66446 - RNA, 23 nt, Artificial Sequence
  Synthetic
acuuguauucccaucccaucauc

SEQ ID NO: 66447 - RNA, 24 nt, Artificial Sequence
  Synthetic
cacuuguauucccaucccaucauc

SEQ ID NO: 66448 - RNA, 18 nt, Artificial Sequence
  Synthetic
ucuuacauaagaggacuc

SEQ ID NO: 66449 - RNA, 19 nt, Artificial Sequence
  Synthetic
gucuuacauaagaggacuc

SEQ ID NO: 66450 - RNA, 20 nt, Artificial Sequence
  Synthetic
ggucuuacauaagaggacuc

SEQ ID NO: 66451 - RNA, 21 nt, Artificial Sequence
  Synthetic
aggucuuacauaagaggacuc

SEQ ID NO: 66452 - RNA, 22 nt, Artificial Sequence
  Synthetic
aaggucuuacauaagaggacuc

SEQ ID NO: 66453 - RNA, 23 nt, Artificial Sequence
  Synthetic
caaggucuuacauaagaggacuc

SEQ ID NO: 66454 - RNA, 24 nt, Artificial Sequence
  Synthetic
ccaaggucuuacauaagaggacuc

SEQ ID NO: 66455 - RNA, 18 nt, Artificial Sequence
  Synthetic
ccugcacgacucuugcuc

SEQ ID NO: 66456 - RNA, 19 nt, Artificial Sequence
  Synthetic
accugcacgacucuugcuc

SEQ ID NO: 66457 - RNA, 20 nt, Artificial Sequence
  Synthetic
aaccugcacgacucuugcuc

SEQ ID NO: 66458 - RNA, 21 nt, Artificial Sequence
  Synthetic
gaaccugcacgacucuugcuc

SEQ ID NO: 66459 - RNA, 22 nt, Artificial Sequence
  Synthetic
cgaaccugcacgacucuugcuc

SEQ ID NO: 66460 - RNA, 23 nt, Artificial Sequence
  Synthetic
ccgaaccugcacgacucuugcuc

SEQ ID NO: 66461 - RNA, 24 nt, Artificial Sequence
  Synthetic
gccgaaccugcacgacucuugcuc

SEQ ID NO: 66462 - RNA, 18 nt, Artificial Sequence
  Synthetic
gggaugccuuagaaucuc

SEQ ID NO: 66463 - RNA, 19 nt, Artificial Sequence
  Synthetic
cgggaugccuuagaaucuc

SEQ ID NO: 66464 - RNA, 20 nt, Artificial Sequence
  Synthetic
ucgggaugccuuagaaucuc

SEQ ID NO: 66465 - RNA, 21 nt, Artificial Sequence
  Synthetic
aucgggaugccuuagaaucuc

SEQ ID NO: 66466 - RNA, 22 nt, Artificial Sequence
  Synthetic
uaucgggaugccuuagaaucuc

SEQ ID NO: 66467 - RNA, 23 nt, Artificial Sequence
  Synthetic
guaucgggaugccuuagaaucuc

SEQ ID NO: 66468 - RNA, 24 nt, Artificial Sequence
  Synthetic
uguaucgggaugccuuagaaucuc

SEQ ID NO: 66469 - RNA, 18 nt, Artificial Sequence
  Synthetic
uaauucugucguucucuc

SEQ ID NO: 66470 - RNA, 19 nt, Artificial Sequence
  Synthetic
auaauucugucguucucuc

SEQ ID NO: 66471 - RNA, 20 nt, Artificial Sequence
  Synthetic
gauaauucugucguucucuc

SEQ ID NO: 66472 - RNA, 21 nt, Artificial Sequence
  Synthetic
  misc_feature (1)..(1): n is a, c, g, or u
ngauaauucugucguucucuc

SEQ ID NO: 66473 - RNA, 22 nt, Artificial Sequence
  Synthetic
  misc_feature (2)..(2): n is a, c, g, or u
cngauaauucugucguucucuc

SEQ ID NO: 66474 - RNA, 23 nt, Artificial Sequence
  Synthetic
  misc_feature (3)..(3): n is a, c, g, or u
acngauaauucugucguucucuc

SEQ ID NO: 66475 - RNA, 24 nt, Artificial Sequence
  Synthetic
  misc_feature (4)..(4): n is a, c, g, or u
gacngauaauucugucguucucuc

SEQ ID NO: 66476 - RNA, 18 nt, Artificial Sequence
  Synthetic
cuccaccaaucggcaguc

SEQ ID NO: 66477 - RNA, 19 nt, Artificial Sequence
  Synthetic
ccuccaccaaucggcaguc

SEQ ID NO: 66478 - RNA, 20 nt, Artificial Sequence
  Synthetic
gccuccaccaaucggcaguc

SEQ ID NO: 66479 - RNA, 21 nt, Artificial Sequence
  Synthetic
ugccuccaccaaucggcaguc

SEQ ID NO: 66480 - RNA, 22 nt, Artificial Sequence
  Synthetic
cugccuccaccaaucggcaguc

SEQ ID NO: 66481 - RNA, 23 nt, Artificial Sequence
  Synthetic
ccugccuccaccaaucggcaguc

SEQ ID NO: 66482 - RNA, 24 nt, Artificial Sequence
  Synthetic
uccugccuccaccaaucggcaguc

SEQ ID NO: 66483 - RNA, 18 nt, Artificial Sequence
  Synthetic
uuuugcucgcagcagguc

SEQ ID NO: 66484 - RNA, 19 nt, Artificial Sequence
  Synthetic
guuuugcucgcagcagguc

SEQ ID NO: 66485 - RNA, 20 nt, Artificial Sequence
  Synthetic
uguuuugcucgcagcagguc

SEQ ID NO: 66486 - RNA, 21 nt, Artificial Sequence
  Synthetic
uuguuuugcucgcagcagguc

SEQ ID NO: 66487 - RNA, 22 nt, Artificial Sequence
  Synthetic
cuuguuuugcucgcagcagguc

SEQ ID NO: 66488 - RNA, 23 nt, Artificial Sequence
  Synthetic
gcuuguuuugcucgcagcagguc

SEQ ID NO: 66489 - RNA, 24 nt, Artificial Sequence
  Synthetic
cgcuuguuuugcucgcagcagguc

SEQ ID NO: 66490 - RNA, 18 nt, Artificial Sequence
  Synthetic
  misc_feature (16)..(16): n is a, c, g, or u
uccugcggacgacccnuc

SEQ ID NO: 66491 - RNA, 19 nt, Artificial Sequence
  Synthetic
  misc_feature (17)..(17): n is a, c, g, or u
auccugcggacgacccnuc

SEQ ID NO: 66492 - RNA, 20 nt, Artificial Sequence
  Synthetic
  misc_feature (18)..(18): n is a, c, g, or u
aauccugcggacgacccnuc

SEQ ID NO: 66493 - RNA, 21 nt, Artificial Sequence
  Synthetic
  misc_feature (19)..(19): n is a, c, g, or u
gaauccugcggacgacccnuc

SEQ ID NO: 66494 - RNA, 22 nt, Artificial Sequence
  Synthetic
  misc_feature (20)..(20): n is a, c, g, or u
ugaauccugcggacgacccnuc

SEQ ID NO: 66495 - RNA, 23 nt, Artificial Sequence
  Synthetic
  misc_feature (21)..(21): n is a, c, g, or u
cugaauccugcggacgacccnuc

SEQ ID NO: 66496 - RNA, 24 nt, Artificial Sequence
  Synthetic
  misc_feature (22)..(22): n is a, c, g, or u
gcugaauccugcggacgacccnuc

SEQ ID NO: 66497 - RNA, 18 nt, Artificial Sequence
  Synthetic
  misc_feature (3)..(3): n is a, c, g, or u
uunugggucaccuuauuc

SEQ ID NO: 66498 - RNA, 19 nt, Artificial Sequence
  Synthetic
  misc_feature (4)..(4): n is a, c, g, or u
uuunugggucaccuuauuc

SEQ ID NO: 66499 - RNA, 20 nt, Artificial Sequence
  Synthetic
  misc_feature (5)..(5): n is a, c, g, or u
uuuunugggucaccuuauuc

SEQ ID NO: 66500 - RNA, 21 nt, Artificial Sequence
  Synthetic
  misc_feature (6)..(6): n is a, c, g, or u
auuuunugggucaccuuauuc

SEQ ID NO: 66501 - RNA, 22 nt, Artificial Sequence
  Synthetic
  misc_feature (7)..(7): n is a, c, g, or u
cauuuunugggucaccuuauuc

SEQ ID NO: 66502 - RNA, 23 nt, Artificial Sequence
  Synthetic
  misc_feature (8)..(8): n is a, c, g, or u
ucauuuunugggucaccuuauuc

SEQ ID NO: 66503 - RNA, 24 nt, Artificial Sequence
  Synthetic
  misc_feature (9)..(9): n is a, c, g, or u
cucauuuunugggucaccuuauuc

SEQ ID NO: 66504 - RNA, 18 nt, Artificial Sequence
  Synthetic
cuaucuuaucaacacuuc

SEQ ID NO: 66505 - RNA, 19 nt, Artificial Sequence
  Synthetic
ccuaucuuaucaacacuuc

SEQ ID NO: 66506 - RNA, 20 nt, Artificial Sequence
  Synthetic
cccuaucuuaucaacacuuc

SEQ ID NO: 66507 - RNA, 21 nt, Artificial Sequence
  Synthetic
ccccuaucuuaucaacacuuc

SEQ ID NO: 66508 - RNA, 22 nt, Artificial Sequence
  Synthetic
gccccuaucuuaucaacacuuc

SEQ ID NO: 66509 - RNA, 23 nt, Artificial Sequence
  Synthetic
ugccccuaucuuaucaacacuuc

SEQ ID NO: 66510 - RNA, 24 nt, Artificial Sequence
  Synthetic
augccccuaucuuaucaacacuuc

SEQ ID NO: 66511 - RNA, 18 nt, Artificial Sequence
  Synthetic
cucaucucgucaaucuuc

SEQ ID NO: 66512 - RNA, 19 nt, Artificial Sequence
  Synthetic
acucaucucgucaaucuuc

SEQ ID NO: 66513 - RNA, 20 nt, Artificial Sequence
  Synthetic
cacucaucucgucaaucuuc

SEQ ID NO: 66514 - RNA, 21 nt, Artificial Sequence
  Synthetic
ucacucaucucgucaaucuuc

SEQ ID NO: 66515 - RNA, 22 nt, Artificial Sequence
  Synthetic
cucacucaucucgucaaucuuc

SEQ ID NO: 66516 - RNA, 23 nt, Artificial Sequence
  Synthetic
ccucacucaucucgucaaucuuc

SEQ ID NO: 66517 - RNA, 24 nt, Artificial Sequence
  Synthetic
gccucacucaucucgucaaucuuc

SEQ ID NO: 66518 - RNA, 18 nt, Artificial Sequence
  Synthetic
ugcugguggcuccaguuc

SEQ ID NO: 66519 - RNA, 19 nt, Artificial Sequence
  Synthetic
cugcugguggcuccaguuc

SEQ ID NO: 66520 - RNA, 20 nt, Artificial Sequence
  Synthetic
ccugcugguggcuccaguuc

SEQ ID NO: 66521 - RNA, 21 nt, Artificial Sequence
  Synthetic
uccugcugguggcuccaguuc

SEQ ID NO: 66522 - RNA, 22 nt, Artificial Sequence
  Synthetic
uuccugcugguggcuccaguuc

SEQ ID NO: 66523 - RNA, 23 nt, Artificial Sequence
  Synthetic
uuuccugcugguggcuccaguuc

SEQ ID NO: 66524 - RNA, 24 nt, Artificial Sequence
  Synthetic
uuuuccugcugguggcuccaguuc

SEQ ID NO: 66525 - RNA, 18 nt, Artificial Sequence
  Synthetic
cuacaucauggggcuuuc

SEQ ID NO: 66526 - RNA, 19 nt, Artificial Sequence
  Synthetic
gcuacaucauggggcuuuc

SEQ ID NO: 66527 - RNA, 20 nt, Artificial Sequence
  Synthetic
agcuacaucauggggcuuuc

SEQ ID NO: 66528 - RNA, 21 nt, Artificial Sequence
  Synthetic
gagcuacaucauggggcuuuc

SEQ ID NO: 66529 - RNA, 22 nt, Artificial Sequence
  Synthetic
agagcuacaucauggggcuuuc

SEQ ID NO: 66530 - RNA, 23 nt, Artificial Sequence
  Synthetic
aagagcuacaucauggggcuuuc

SEQ ID NO: 66531 - RNA, 24 nt, Artificial Sequence
  Synthetic
caagagcuacaucauggggcuuuc

SEQ ID NO: 66532 - RNA, 18 nt, Artificial Sequence
  Synthetic
ggacuucucucaauuuuc

SEQ ID NO: 66533 - RNA, 19 nt, Artificial Sequence
  Synthetic
uggacuucucucaauuuuc

SEQ ID NO: 66534 - RNA, 20 nt, Artificial Sequence
  Synthetic
guggacuucucucaauuuuc

SEQ ID NO: 66535 - RNA, 21 nt, Artificial Sequence
  Synthetic
gguggacuucucucaauuuuc

SEQ ID NO: 66536 - RNA, 22 nt, Artificial Sequence
  Synthetic
ugguggacuucucucaauuuuc

SEQ ID NO: 66537 - RNA, 23 nt, Artificial Sequence
  Synthetic
gugguggacuucucucaauuuuc

SEQ ID NO: 66538 - RNA, 24 nt, Artificial Sequence
  Synthetic
cgugguggacuucucucaauuuuc

SEQ ID NO: 66539 - RNA, 18 nt, Artificial Sequence
  Synthetic
ucccaacaaaacaaaaag

SEQ ID NO: 66540 - RNA, 19 nt, Artificial Sequence
  Synthetic
aucccaacaaaacaaaaag

SEQ ID NO: 66541 - RNA, 20 nt, Artificial Sequence
  Synthetic
aaucccaacaaaacaaaaag

SEQ ID NO: 66542 - RNA, 21 nt, Artificial Sequence
  Synthetic
aaaucccaacaaaacaaaaag

SEQ ID NO: 66543 - RNA, 22 nt, Artificial Sequence
  Synthetic
uaaaucccaacaaaacaaaaag

SEQ ID NO: 66544 - RNA, 23 nt, Artificial Sequence
  Synthetic
uuaaaucccaacaaaacaaaaag

SEQ ID NO: 66545 - RNA, 24 nt, Artificial Sequence
  Synthetic
uuuaaaucccaacaaaacaaaaag

SEQ ID NO: 66546 - RNA, 18 nt, Artificial Sequence
  Synthetic
auuccuuggacucacaag

SEQ ID NO: 66547 - RNA, 19 nt, Artificial Sequence
  Synthetic
uauuccuuggacucacaag

SEQ ID NO: 66548 - RNA, 20 nt, Artificial Sequence
  Synthetic
guauuccuuggacucacaag

SEQ ID NO: 66549 - RNA, 21 nt, Artificial Sequence
  Synthetic
aguauuccuuggacucacaag

SEQ ID NO: 66550 - RNA, 22 nt, Artificial Sequence
  Synthetic
uaguauuccuuggacucacaag

SEQ ID NO: 66551 - RNA, 23 nt, Artificial Sequence
  Synthetic
uuaguauuccuuggacucacaag

SEQ ID NO: 66552 - RNA, 24 nt, Artificial Sequence
  Synthetic
guuaguauuccuuggacucacaag

SEQ ID NO: 66553 - RNA, 18 nt, Artificial Sequence
  Synthetic
aggcagguccccuagaag

SEQ ID NO: 66554 - RNA, 19 nt, Artificial Sequence
  Synthetic
gaggcagguccccuagaag

SEQ ID NO: 66555 - RNA, 20 nt, Artificial Sequence
  Synthetic
agaggcagguccccuagaag

SEQ ID NO: 66556 - RNA, 21 nt, Artificial Sequence
  Synthetic
aagaggcagguccccuagaag

SEQ ID NO: 66557 - RNA, 22 nt, Artificial Sequence
  Synthetic
gaagaggcagguccccuagaag

SEQ ID NO: 66558 - RNA, 23 nt, Artificial Sequence
  Synthetic
cgaagaggcagguccccuagaag

SEQ ID NO: 66559 - RNA, 24 nt, Artificial Sequence
  Synthetic
acgaagaggcagguccccuagaag

SEQ ID NO: 66560 - RNA, 18 nt, Artificial Sequence
  Synthetic
uuacauacccuauggaag

SEQ ID NO: 66561 - RNA, 19 nt, Artificial Sequence
  Synthetic
uuuacauacccuauggaag

SEQ ID NO: 66562 - RNA, 20 nt, Artificial Sequence
  Synthetic
auuuacauacccuauggaag

SEQ ID NO: 66563 - RNA, 21 nt, Artificial Sequence
  Synthetic
uauuuacauacccuauggaag

SEQ ID NO: 66564 - RNA, 22 nt, Artificial Sequence
  Synthetic
cuauuuacauacccuauggaag

SEQ ID NO: 66565 - RNA, 23 nt, Artificial Sequence
  Synthetic
acuauuuacauacccuauggaag

SEQ ID NO: 66566 - RNA, 24 nt, Artificial Sequence
  Synthetic
cacuauuuacauacccuauggaag

SEQ ID NO: 66567 - RNA, 18 nt, Artificial Sequence
  Synthetic
ggguuauguaauuggaag

SEQ ID NO: 66568 - RNA, 19 nt, Artificial Sequence
  Synthetic
uggguuauguaauuggaag

SEQ ID NO: 66569 - RNA, 20 nt, Artificial Sequence
  Synthetic
auggguuauguaauuggaag

SEQ ID NO: 66570 - RNA, 21 nt, Artificial Sequence
  Synthetic
cauggguuauguaauuggaag

SEQ ID NO: 66571 - RNA, 22 nt, Artificial Sequence
  Synthetic
ucauggguuauguaauuggaag

SEQ ID NO: 66572 - RNA, 23 nt, Artificial Sequence
  Synthetic
uucauggguuauguaauuggaag

SEQ ID NO: 66573 - RNA, 24 nt, Artificial Sequence
  Synthetic
uuucauggguuauguaauuggaag

SEQ ID NO: 66574 - RNA, 18 nt, Artificial Sequence
  Synthetic
ccccugcucguguuacag

SEQ ID NO: 66575 - RNA, 19 nt, Artificial Sequence
  Synthetic
accccugcucguguuacag

SEQ ID NO: 66576 - RNA, 20 nt, Artificial Sequence
  Synthetic
gaccccugcucguguuacag

SEQ ID NO: 66577 - RNA, 21 nt, Artificial Sequence
  Synthetic
ggaccccugcucguguuacag

SEQ ID NO: 66578 - RNA, 22 nt, Artificial Sequence
  Synthetic
aggaccccugcucguguuacag

SEQ ID NO: 66579 - RNA, 23 nt, Artificial Sequence
  Synthetic
uaggaccccugcucguguuacag

SEQ ID NO: 66580 - RNA, 24 nt, Artificial Sequence
  Synthetic
cuaggaccccugcucguguuacag

SEQ ID NO: 66581 - RNA, 18 nt, Artificial Sequence
  Synthetic
aacucccucgccucgcag

SEQ ID NO: 66582 - RNA, 19 nt, Artificial Sequence
  Synthetic
gaacucccucgccucgcag

SEQ ID NO: 66583 - RNA, 20 nt, Artificial Sequence
  Synthetic
agaacucccucgccucgcag

SEQ ID NO: 66584 - RNA, 21 nt, Artificial Sequence
  Synthetic
aagaacucccucgccucgcag

SEQ ID NO: 66585 - RNA, 22 nt, Artificial Sequence
  Synthetic
gaagaacucccucgccucgcag

SEQ ID NO: 66586 - RNA, 23 nt, Artificial Sequence
  Synthetic
agaagaacucccucgccucgcag

SEQ ID NO: 66587 - RNA, 24 nt, Artificial Sequence
  Synthetic
aagaagaacucccucgccucgcag

SEQ ID NO: 66588 - RNA, 18 nt, Artificial Sequence
  Synthetic
cauccucaggccaugcag

SEQ ID NO: 66589 - RNA, 19 nt, Artificial Sequence
  Synthetic
ucauccucaggccaugcag

SEQ ID NO: 66590 - RNA, 20 nt, Artificial Sequence
  Synthetic
cucauccucaggccaugcag

SEQ ID NO: 66591 - RNA, 21 nt, Artificial Sequence
  Synthetic
acucauccucaggccaugcag

SEQ ID NO: 66592 - RNA, 22 nt, Artificial Sequence
  Synthetic
cacucauccucaggccaugcag

SEQ ID NO: 66593 - RNA, 23 nt, Artificial Sequence
  Synthetic
acacucauccucaggccaugcag

SEQ ID NO: 66594 - RNA, 24 nt, Artificial Sequence
  Synthetic
gacacucauccucaggccaugcag

SEQ ID NO: 66595 - RNA, 18 nt, Artificial Sequence
  Synthetic
uuuaaagacugggaggag

SEQ ID NO: 66596 - RNA, 19 nt, Artificial Sequence
  Synthetic
guuuaaagacugggaggag

SEQ ID NO: 66597 - RNA, 20 nt, Artificial Sequence
  Synthetic
uguuuaaagacugggaggag

SEQ ID NO: 66598 - RNA, 21 nt, Artificial Sequence
  Synthetic
uuguuuaaagacugggaggag

SEQ ID NO: 66599 - RNA, 22 nt, Artificial Sequence
  Synthetic
uuuguuuaaagacugggaggag

SEQ ID NO: 66600 - RNA, 23 nt, Artificial Sequence
  Synthetic
guuuguuuaaagacugggaggag

SEQ ID NO: 66601 - RNA, 24 nt, Artificial Sequence
  Synthetic
uguuuguuuaaagacugggaggag

SEQ ID NO: 66602 - RNA, 18 nt, Artificial Sequence
  Synthetic
aagccaacaagguaggag

SEQ ID NO: 66603 - RNA, 19 nt, Artificial Sequence
  Synthetic
gaagccaacaagguaggag

SEQ ID NO: 66604 - RNA, 20 nt, Artificial Sequence
  Synthetic
  misc_feature (1)..(1): n is a, c, g, or u
ngaagccaacaagguaggag

SEQ ID NO: 66605 - RNA, 21 nt, Artificial Sequence
  Synthetic
  misc_feature (2)..(2): n is a, c, g, or u
cngaagccaacaagguaggag

SEQ ID NO: 66606 - RNA, 22 nt, Artificial Sequence
  Synthetic
  misc_feature (3)..(3): n is a, c, g, or u
acngaagccaacaagguaggag

SEQ ID NO: 66607 - RNA, 23 nt, Artificial Sequence
  Synthetic
  misc_feature (4)..(4): n is a, c, g, or u
gacngaagccaacaagguaggag

SEQ ID NO: 66608 - RNA, 24 nt, Artificial Sequence
  Synthetic
  misc_feature (5)..(5): n is a, c, g, or u
ggacngaagccaacaagguaggag

SEQ ID NO: 66609 - RNA, 18 nt, Artificial Sequence
  Synthetic
aagaggcagguccccuag

SEQ ID NO: 66610 - RNA, 19 nt, Artificial Sequence
  Synthetic
gaagaggcagguccccuag

SEQ ID NO: 66611 - RNA, 20 nt, Artificial Sequence
  Synthetic
cgaagaggcagguccccuag

SEQ ID NO: 66612 - RNA, 21 nt, Artificial Sequence
  Synthetic
acgaagaggcagguccccuag

SEQ ID NO: 66613 - RNA, 22 nt, Artificial Sequence
  Synthetic
gacgaagaggcagguccccuag

SEQ ID NO: 66614 - RNA, 23 nt, Artificial Sequence
  Synthetic
agacgaagaggcagguccccuag

SEQ ID NO: 66615 - RNA, 24 nt, Artificial Sequence
  Synthetic
uagacgaagaggcagguccccuag

SEQ ID NO: 66616 - RNA, 18 nt, Artificial Sequence
  Synthetic
cuucucucaauuuucuag

SEQ ID NO: 66617 - RNA, 19 nt, Artificial Sequence
  Synthetic
acuucucucaauuuucuag

SEQ ID NO: 66618 - RNA, 20 nt, Artificial Sequence
  Synthetic
gacuucucucaauuuucuag

SEQ ID NO: 66619 - RNA, 21 nt, Artificial Sequence
  Synthetic
ggacuucucucaauuuucuag

SEQ ID NO: 66620 - RNA, 22 nt, Artificial Sequence
  Synthetic
uggacuucucucaauuuucuag

SEQ ID NO: 66621 - RNA, 23 nt, Artificial Sequence
  Synthetic
guggacuucucucaauuuucuag

SEQ ID NO: 66622 - RNA, 24 nt, Artificial Sequence
  Synthetic
gguggacuucucucaauuuucuag

SEQ ID NO: 66623 - RNA, 18 nt, Artificial Sequence
  Synthetic
  misc_feature (6)..(6): n is a, c, g, or u
ggaganuacuguuguuag

SEQ ID NO: 66624 - RNA, 19 nt, Artificial Sequence
  Synthetic
  misc_feature (7)..(7): n is a, c, g, or u
cggaganuacuguuguuag

SEQ ID NO: 66625 - RNA, 20 nt, Artificial Sequence
  Synthetic
  misc_feature (8)..(8): n is a, c, g, or u
ccggaganuacuguuguuag

SEQ ID NO: 66626 - RNA, 21 nt, Artificial Sequence
  Synthetic
  misc_feature (9)..(9): n is a, c, g, or u
uccggaganuacuguuguuag

SEQ ID NO: 66627 - RNA, 22 nt, Artificial Sequence
  Synthetic
  misc_feature (10)..(10): n is a, c, g, or u
uuccggaganuacuguuguuag

SEQ ID NO: 66628 - RNA, 23 nt, Artificial Sequence
  Synthetic
  misc_feature (11)..(11): n is a, c, g, or u
cuuccggaganuacuguuguuag

SEQ ID NO: 66629 - RNA, 24 nt, Artificial Sequence
  Synthetic
  misc_feature (12)..(12): n is a, c, g, or u
acuuccggaganuacuguuguuag

SEQ ID NO: 66630 - RNA, 18 nt, Artificial Sequence
  Synthetic
  misc_feature (3)..(3): n is a, c, g, or u
ganuacuguuguuagacg

SEQ ID NO: 66631 - RNA, 19 nt, Artificial Sequence
  Synthetic
  misc_feature (4)..(4): n is a, c, g, or u
aganuacuguuguuagacg

SEQ ID NO: 66632 - RNA, 20 nt, Artificial Sequence
  Synthetic
  misc_feature (5)..(5): n is a, c, g, or u
gaganuacuguuguuagacg

SEQ ID NO: 66633 - RNA, 21 nt, Artificial Sequence
  Synthetic
  misc_feature (6)..(6): n is a, c, g, or u
ggaganuacuguuguuagacg

SEQ ID NO: 66634 - RNA, 22 nt, Artificial Sequence
  Synthetic
  misc_feature (7)..(7): n is a, c, g, or u
cggaganuacuguuguuagacg

SEQ ID NO: 66635 - RNA, 23 nt, Artificial Sequence
  Synthetic
  misc_feature (8)..(8): n is a, c, g, or u
ccggaganuacuguuguuagacg

SEQ ID NO: 66636 - RNA, 24 nt, Artificial Sequence
  Synthetic
  misc_feature (9)..(9): n is a, c, g, or u
uccggaganuacuguuguuagacg

SEQ ID NO: 66637 - RNA, 18 nt, Artificial Sequence
  Synthetic
aggccaucagcgcaugcg

SEQ ID NO: 66638 - RNA, 19 nt, Artificial Sequence
  Synthetic
uaggccaucagcgcaugcg

SEQ ID NO: 66639 - RNA, 20 nt, Artificial Sequence
  Synthetic
auaggccaucagcgcaugcg

SEQ ID NO: 66640 - RNA, 21 nt, Artificial Sequence
  Synthetic
cauaggccaucagcgcaugcg

SEQ ID NO: 66641 - RNA, 22 nt, Artificial Sequence
  Synthetic
ccauaggccaucagcgcaugcg

SEQ ID NO: 66642 - RNA, 23 nt, Artificial Sequence
  Synthetic
gccauaggccaucagcgcaugcg

SEQ ID NO: 66643 - RNA, 24 nt, Artificial Sequence
  Synthetic
ggccauaggccaucagcgcaugcg

SEQ ID NO: 66644 - RNA, 18 nt, Artificial Sequence
  Synthetic
ugccaacuggauccugcg

SEQ ID NO: 66645 - RNA, 19 nt, Artificial Sequence
  Synthetic
cugccaacuggauccugcg

SEQ ID NO: 66646 - RNA, 20 nt, Artificial Sequence
  Synthetic
gcugccaacuggauccugcg

SEQ ID NO: 66647 - RNA, 21 nt, Artificial Sequence
  Synthetic
ugcugccaacuggauccugcg

SEQ ID NO: 66648 - RNA, 22 nt, Artificial Sequence
  Synthetic
gugcugccaacuggauccugcg

SEQ ID NO: 66649 - RNA, 23 nt, Artificial Sequence
  Synthetic
ugugcugccaacuggauccugcg

SEQ ID NO: 66650 - RNA, 24 nt, Artificial Sequence
  Synthetic
cugugcugccaacuggauccugcg

SEQ ID NO: 66651 - RNA, 18 nt, Artificial Sequence
  Synthetic
aucucaaucgccgcgucg

SEQ ID NO: 66652 - RNA, 19 nt, Artificial Sequence
  Synthetic
gaucucaaucgccgcgucg

SEQ ID NO: 66653 - RNA, 20 nt, Artificial Sequence
  Synthetic
agaucucaaucgccgcgucg

SEQ ID NO: 66654 - RNA, 21 nt, Artificial Sequence
  Synthetic
aagaucucaaucgccgcgucg

SEQ ID NO: 66655 - RNA, 22 nt, Artificial Sequence
  Synthetic
gaagaucucaaucgccgcgucg

SEQ ID NO: 66656 - RNA, 23 nt, Artificial Sequence
  Synthetic
cgaagaucucaaucgccgcgucg

SEQ ID NO: 66657 - RNA, 24 nt, Artificial Sequence
  Synthetic
acgaagaucucaaucgccgcgucg

SEQ ID NO: 66658 - RNA, 18 nt, Artificial Sequence
  Synthetic
cauuuguucagugguucg

SEQ ID NO: 66659 - RNA, 19 nt, Artificial Sequence
  Synthetic
ccauuuguucagugguucg

SEQ ID NO: 66660 - RNA, 20 nt, Artificial Sequence
  Synthetic
gccauuuguucagugguucg

SEQ ID NO: 66661 - RNA, 21 nt, Artificial Sequence
  Synthetic
ugccauuuguucagugguucg

SEQ ID NO: 66662 - RNA, 22 nt, Artificial Sequence
  Synthetic
gugccauuuguucagugguucg

SEQ ID NO: 66663 - RNA, 23 nt, Artificial Sequence
  Synthetic
agugccauuuguucagugguucg

SEQ ID NO: 66664 - RNA, 24 nt, Artificial Sequence
  Synthetic
uagugccauuuguucagugguucg

SEQ ID NO: 66665 - RNA, 18 nt, Artificial Sequence
  Synthetic
  misc_feature (5)..(5): n is a, c, g, or u
ggacngaagccaacaagg

SEQ ID NO: 66666 - RNA, 19 nt, Artificial Sequence
  Synthetic
  misc_feature (6)..(6): n is a, c, g, or u
uggacngaagccaacaagg

SEQ ID NO: 66667 - RNA, 20 nt, Artificial Sequence
  Synthetic
  misc_feature (7)..(7): n is a, c, g, or u
cuggacngaagccaacaagg

SEQ ID NO: 66668 - RNA, 21 nt, Artificial Sequence
  Synthetic
  misc_feature (8)..(8): n is a, c, g, or u
acuggacngaagccaacaagg

SEQ ID NO: 66669 - RNA, 22 nt, Artificial Sequence
  Synthetic
  misc_feature (9)..(9): n is a, c, g, or u
cacuggacngaagccaacaagg

SEQ ID NO: 66670 - RNA, 23 nt, Artificial Sequence
  Synthetic
  misc_feature (10)..(10): n is a, c, g, or u
ccacuggacngaagccaacaagg

SEQ ID NO: 66671 - RNA, 24 nt, Artificial Sequence
  Synthetic
  misc_feature (11)..(11): n is a, c, g, or u
accacuggacngaagccaacaagg

SEQ ID NO: 66672 - RNA, 18 nt, Artificial Sequence
  Synthetic
uuccuuggacucacaagg

SEQ ID NO: 66673 - RNA, 19 nt, Artificial Sequence
  Synthetic
auuccuuggacucacaagg

SEQ ID NO: 66674 - RNA, 20 nt, Artificial Sequence
  Synthetic
uauuccuuggacucacaagg

SEQ ID NO: 66675 - RNA, 21 nt, Artificial Sequence
  Synthetic
guauuccuuggacucacaagg

SEQ ID NO: 66676 - RNA, 22 nt, Artificial Sequence
  Synthetic
aguauuccuuggacucacaagg

SEQ ID NO: 66677 - RNA, 23 nt, Artificial Sequence
  Synthetic
uaguauuccuuggacucacaagg

SEQ ID NO: 66678 - RNA, 24 nt, Artificial Sequence
  Synthetic
uuaguauuccuuggacucacaagg

SEQ ID NO: 66679 - RNA, 18 nt, Artificial Sequence
  Synthetic
uucucucaauuuucuagg

SEQ ID NO: 66680 - RNA, 19 nt, Artificial Sequence
  Synthetic
cuucucucaauuuucuagg

SEQ ID NO: 66681 - RNA, 20 nt, Artificial Sequence
  Synthetic
acuucucucaauuuucuagg

SEQ ID NO: 66682 - RNA, 21 nt, Artificial Sequence
  Synthetic
gacuucucucaauuuucuagg

SEQ ID NO: 66683 - RNA, 22 nt, Artificial Sequence
  Synthetic
ggacuucucucaauuuucuagg

SEQ ID NO: 66684 - RNA, 23 nt, Artificial Sequence
  Synthetic
uggacuucucucaauuuucuagg

SEQ ID NO: 66685 - RNA, 24 nt, Artificial Sequence
  Synthetic
guggacuucucucaauuuucuagg

SEQ ID NO: 66686 - RNA, 18 nt, Artificial Sequence
  Synthetic
gcuguucaaaaccuucgg

SEQ ID NO: 66687 - RNA, 19 nt, Artificial Sequence
  Synthetic
ugcuguucaaaaccuucgg

SEQ ID NO: 66688 - RNA, 20 nt, Artificial Sequence
  Synthetic
uugcuguucaaaaccuucgg

SEQ ID NO: 66689 - RNA, 21 nt, Artificial Sequence
  Synthetic
guugcuguucaaaaccuucgg

SEQ ID NO: 66690 - RNA, 22 nt, Artificial Sequence
  Synthetic
uguugcuguucaaaaccuucgg

SEQ ID NO: 66691 - RNA, 23 nt, Artificial Sequence
  Synthetic
auguugcuguucaaaaccuucgg

SEQ ID NO: 66692 - RNA, 24 nt, Artificial Sequence
  Synthetic
cauguugcuguucaaaaccuucgg

SEQ ID NO: 66693 - RNA, 18 nt, Artificial Sequence
  Synthetic
  misc_feature (13)..(13): n is a, c, g, or u
acugggaggagunggggg

SEQ ID NO: 66694 - RNA, 19 nt, Artificial Sequence
  Synthetic
  misc_feature (14)..(14): n is a, c, g, or u
gacugggaggagunggggg

SEQ ID NO: 66695 - RNA, 20 nt, Artificial Sequence
  Synthetic
  misc_feature (15)..(15): n is a, c, g, or u
agacugggaggagunggggg

SEQ ID NO: 66696 - RNA, 21 nt, Artificial Sequence
  Synthetic
  misc_feature (16)..(16): n is a, c, g, or u
aagacugggaggagunggggg

SEQ ID NO: 66697 - RNA, 22 nt, Artificial Sequence
  Synthetic
  misc_feature (17)..(17): n is a, c, g, or u
aaagacugggaggagunggggg

SEQ ID NO: 66698 - RNA, 23 nt, Artificial Sequence
  Synthetic
  misc_feature (18)..(18): n is a, c, g, or u
uaaagacugggaggagunggggg

SEQ ID NO: 66699 - RNA, 24 nt, Artificial Sequence
  Synthetic
  misc_feature (19)..(19): n is a, c, g, or u
uuaaagacugggaggagunggggg

SEQ ID NO: 66700 - RNA, 18 nt, Artificial Sequence
  Synthetic
  misc_feature (14)..(14): n is a, c, g, or u
gacugggaggagungggg

SEQ ID NO: 66701 - RNA, 19 nt, Artificial Sequence
  Synthetic
  misc_feature (15)..(15): n is a, c, g, or u
agacugggaggagungggg

SEQ ID NO: 66702 - RNA, 20 nt, Artificial Sequence
  Synthetic
  misc_feature (16)..(16): n is a, c, g, or u
aagacugggaggagungggg

SEQ ID NO: 66703 - RNA, 21 nt, Artificial Sequence
  Synthetic
  misc_feature (17)..(17): n is a, c, g, or u
aaagacugggaggagungggg

SEQ ID NO: 66704 - RNA, 22 nt, Artificial Sequence
  Synthetic
  misc_feature (18)..(18): n is a, c, g, or u
uaaagacugggaggagungggg

SEQ ID NO: 66705 - RNA, 23 nt, Artificial Sequence
  Synthetic
  misc_feature (19)..(19): n is a, c, g, or u
uuaaagacugggaggagungggg

SEQ ID NO: 66706 - RNA, 24 nt, Artificial Sequence
  Synthetic
  misc_feature (20)..(20): n is a, c, g, or u
uuuaaagacugggaggagungggg

SEQ ID NO: 66707 - RNA, 18 nt, Artificial Sequence
  Synthetic
cacggaggccuuuugggg

SEQ ID NO: 66708 - RNA, 19 nt, Artificial Sequence
  Synthetic
acacggaggccuuuugggg

SEQ ID NO: 66709 - RNA, 20 nt, Artificial Sequence
  Synthetic
cacacggaggccuuuugggg

SEQ ID NO: 66710 - RNA, 21 nt, Artificial Sequence
  Synthetic
ccacacggaggccuuuugggg

SEQ ID NO: 66711 - RNA, 22 nt, Artificial Sequence
  Synthetic
cccacacggaggccuuuugggg

SEQ ID NO: 66712 - RNA, 23 nt, Artificial Sequence
  Synthetic
ccccacacggaggccuuuugggg

SEQ ID NO: 66713 - RNA, 24 nt, Artificial Sequence
  Synthetic
cccccacacggaggccuuuugggg

SEQ ID NO: 66714 - RNA, 18 nt, Artificial Sequence
  Synthetic
acacggaggccuuuuggg

SEQ ID NO: 66715 - RNA, 19 nt, Artificial Sequence
  Synthetic
cacacggaggccuuuuggg

SEQ ID NO: 66716 - RNA, 20 nt, Artificial Sequence
  Synthetic
ccacacggaggccuuuuggg

SEQ ID NO: 66717 - RNA, 21 nt, Artificial Sequence
  Synthetic
cccacacggaggccuuuuggg

SEQ ID NO: 66718 - RNA, 22 nt, Artificial Sequence
  Synthetic
ccccacacggaggccuuuuggg

SEQ ID NO: 66719 - RNA, 23 nt, Artificial Sequence
  Synthetic
cccccacacggaggccuuuuggg

SEQ ID NO: 66720 - RNA, 24 nt, Artificial Sequence
  Synthetic
ucccccacacggaggccuuuuggg

SEQ ID NO: 66721 - RNA, 18 nt, Artificial Sequence
  Synthetic
  misc_feature (16)..(16): n is a, c, g, or u
aagacugggaggagungg

SEQ ID NO: 66722 - RNA, 19 nt, Artificial Sequence
  Synthetic
  misc_feature (17)..(17): n is a, c, g, or u
aaagacugggaggagungg

SEQ ID NO: 66723 - RNA, 20 nt, Artificial Sequence
  Synthetic
  misc_feature (18)..(18): n is a, c, g, or u
uaaagacugggaggagungg

SEQ ID NO: 66724 - RNA, 21 nt, Artificial Sequence
  Synthetic
  misc_feature (19)..(19): n is a, c, g, or u
uuaaagacugggaggagungg

SEQ ID NO: 66725 - RNA, 22 nt, Artificial Sequence
  Synthetic
  misc_feature (20)..(20): n is a, c, g, or u
uuuaaagacugggaggagungg

SEQ ID NO: 66726 - RNA, 23 nt, Artificial Sequence
  Synthetic
  misc_feature (21)..(21): n is a, c, g, or u
guuuaaagacugggaggagungg

SEQ ID NO: 66727 - RNA, 24 nt, Artificial Sequence
  Synthetic
  misc_feature (22)..(22): n is a, c, g, or u
uguuuaaagacugggaggagungg

SEQ ID NO: 66728 - RNA, 18 nt, Artificial Sequence
  Synthetic
acggucccucucgaaugg

SEQ ID NO: 66729 - RNA, 19 nt, Artificial Sequence
  Synthetic
gacggucccucucgaaugg

SEQ ID NO: 66730 - RNA, 20 nt, Artificial Sequence
  Synthetic
ggacggucccucucgaaugg

SEQ ID NO: 66731 - RNA, 21 nt, Artificial Sequence
  Synthetic
uggacggucccucucgaaugg

SEQ ID NO: 66732 - RNA, 22 nt, Artificial Sequence
  Synthetic
uuggacggucccucucgaaugg

SEQ ID NO: 66733 - RNA, 23 nt, Artificial Sequence
  Synthetic
cuuggacggucccucucgaaugg

SEQ ID NO: 66734 - RNA, 24 nt, Artificial Sequence
  Synthetic
ucuuggacggucccucucgaaugg

SEQ ID NO: 66735 - RNA, 18 nt, Artificial Sequence
  Synthetic
ugaugcaacccccacugg

SEQ ID NO: 66736 - RNA, 19 nt, Artificial Sequence
  Synthetic
cugaugcaacccccacugg

SEQ ID NO: 66737 - RNA, 20 nt, Artificial Sequence
  Synthetic
gcugaugcaacccccacugg

SEQ ID NO: 66738 - RNA, 21 nt, Artificial Sequence
  Synthetic
ugcugaugcaacccccacugg

SEQ ID NO: 66739 - RNA, 22 nt, Artificial Sequence
  Synthetic
uugcugaugcaacccccacugg

SEQ ID NO: 66740 - RNA, 23 nt, Artificial Sequence
  Synthetic
uuugcugaugcaacccccacugg

SEQ ID NO: 66741 - RNA, 24 nt, Artificial Sequence
  Synthetic
guuugcugaugcaacccccacugg

SEQ ID NO: 66742 - RNA, 18 nt, Artificial Sequence
  Synthetic
uguuuguuuaaagacugg

SEQ ID NO: 66743 - RNA, 19 nt, Artificial Sequence
  Synthetic
cuguuuguuuaaagacugg

SEQ ID NO: 66744 - RNA, 20 nt, Artificial Sequence
  Synthetic
acuguuuguuuaaagacugg

SEQ ID NO: 66745 - RNA, 21 nt, Artificial Sequence
  Synthetic
gacuguuuguuuaaagacugg

SEQ ID NO: 66746 - RNA, 22 nt, Artificial Sequence
  Synthetic
agacuguuuguuuaaagacugg

SEQ ID NO: 66747 - RNA, 23 nt, Artificial Sequence
  Synthetic
aagacuguuuguuuaaagacugg

SEQ ID NO: 66748 - RNA, 24 nt, Artificial Sequence
  Synthetic
aaagacuguuuguuuaaagacugg

SEQ ID NO: 66749 - RNA, 18 nt, Artificial Sequence
  Synthetic
caagccauucuuugcugg

SEQ ID NO: 66750 - RNA, 19 nt, Artificial Sequence
  Synthetic
gcaagccauucuuugcugg

SEQ ID NO: 66751 - RNA, 20 nt, Artificial Sequence
  Synthetic
ggcaagccauucuuugcugg

SEQ ID NO: 66752 - RNA, 21 nt, Artificial Sequence
  Synthetic
aggcaagccauucuuugcugg

SEQ ID NO: 66753 - RNA, 22 nt, Artificial Sequence
  Synthetic
caggcaagccauucuuugcugg

SEQ ID NO: 66754 - RNA, 23 nt, Artificial Sequence
  Synthetic
ucaggcaagccauucuuugcugg

SEQ ID NO: 66755 - RNA, 24 nt, Artificial Sequence
  Synthetic
cucaggcaagccauucuuugcugg

SEQ ID NO: 66756 - RNA, 18 nt, Artificial Sequence
  Synthetic
uucuugucucacuuuugg

SEQ ID NO: 66757 - RNA, 19 nt, Artificial Sequence
  Synthetic
uuucuugucucacuuuugg

SEQ ID NO: 66758 - RNA, 20 nt, Artificial Sequence
  Synthetic
auuucuugucucacuuuugg

SEQ ID NO: 66759 - RNA, 21 nt, Artificial Sequence
  Synthetic
cauuucuugucucacuuuugg

SEQ ID NO: 66760 - RNA, 22 nt, Artificial Sequence
  Synthetic
acauuucuugucucacuuuugg

SEQ ID NO: 66761 - RNA, 23 nt, Artificial Sequence
  Synthetic
cacauuucuugucucacuuuugg

SEQ ID NO: 66762 - RNA, 24 nt, Artificial Sequence
  Synthetic
ucacauuucuugucucacuuuugg

SEQ ID NO: 66763 - RNA, 18 nt, Artificial Sequence
  Synthetic
  misc_feature (17)..(17): n is a, c, g, or u
aaagacugggaggagung

SEQ ID NO: 66764 - RNA, 19 nt, Artificial Sequence
  Synthetic
  misc_feature (18)..(18): n is a, c, g, or u
uaaagacugggaggagung

SEQ ID NO: 66765 - RNA, 20 nt, Artificial Sequence
  Synthetic
  misc_feature (19)..(19): n is a, c, g, or u
uuaaagacugggaggagung

SEQ ID NO: 66766 - RNA, 21 nt, Artificial Sequence
  Synthetic
  misc_feature (20)..(20): n is a, c, g, or u
uuuaaagacugggaggagung

SEQ ID NO: 66767 - RNA, 22 nt, Artificial Sequence
  Synthetic
  misc_feature (21)..(21): n is a, c, g, or u
guuuaaagacugggaggagung

SEQ ID NO: 66768 - RNA, 23 nt, Artificial Sequence
  Synthetic
  misc_feature (22)..(22): n is a, c, g, or u
uguuuaaagacugggaggagung

SEQ ID NO: 66769 - RNA, 24 nt, Artificial Sequence
  Synthetic
  misc_feature (23)..(23): n is a, c, g, or u
uuguuuaaagacugggaggagung

SEQ ID NO: 66770 - RNA, 18 nt, Artificial Sequence
  Synthetic
gacggucccucucgaaug

SEQ ID NO: 66771 - RNA, 19 nt, Artificial Sequence
  Synthetic
ggacggucccucucgaaug

SEQ ID NO: 66772 - RNA, 20 nt, Artificial Sequence
  Synthetic
uggacggucccucucgaaug

SEQ ID NO: 66773 - RNA, 21 nt, Artificial Sequence
  Synthetic
uuggacggucccucucgaaug

SEQ ID NO: 66774 - RNA, 22 nt, Artificial Sequence
  Synthetic
cuuggacggucccucucgaaug

SEQ ID NO: 66775 - RNA, 23 nt, Artificial Sequence
  Synthetic
ucuuggacggucccucucgaaug

SEQ ID NO: 66776 - RNA, 24 nt, Artificial Sequence
  Synthetic
uucuuggacggucccucucgaaug

SEQ ID NO: 66777 - RNA, 18 nt, Artificial Sequence
  Synthetic
cucugccgauccauacug

SEQ ID NO: 66778 - RNA, 19 nt, Artificial Sequence
  Synthetic
ccucugccgauccauacug

SEQ ID NO: 66779 - RNA, 20 nt, Artificial Sequence
  Synthetic
uccucugccgauccauacug

SEQ ID NO: 66780 - RNA, 21 nt, Artificial Sequence
  Synthetic
cuccucugccgauccauacug

SEQ ID NO: 66781 - RNA, 22 nt, Artificial Sequence
  Synthetic
gcuccucugccgauccauacug

SEQ ID NO: 66782 - RNA, 23 nt, Artificial Sequence
  Synthetic
ggcuccucugccgauccauacug

SEQ ID NO: 66783 - RNA, 24 nt, Artificial Sequence
  Synthetic
uggcuccucugccgauccauacug

SEQ ID NO: 66784 - RNA, 18 nt, Artificial Sequence
  Synthetic
caccaguacgggacccug

SEQ ID NO: 66785 - RNA, 19 nt, Artificial Sequence
  Synthetic
ccaccaguacgggacccug

SEQ ID NO: 66786 - RNA, 20 nt, Artificial Sequence
  Synthetic
accaccaguacgggacccug

SEQ ID NO: 66787 - RNA, 21 nt, Artificial Sequence
  Synthetic
aaccaccaguacgggacccug

SEQ ID NO: 66788 - RNA, 22 nt, Artificial Sequence
  Synthetic
caaccaccaguacgggacccug

SEQ ID NO: 66789 - RNA, 23 nt, Artificial Sequence
  Synthetic
ucaaccaccaguacgggacccug

SEQ ID NO: 66790 - RNA, 24 nt, Artificial Sequence
  Synthetic
aucaaccaccaguacgggacccug

SEQ ID NO: 66791 - RNA, 18 nt, Artificial Sequence
  Synthetic
gcaagccauucuuugcug

SEQ ID NO: 66792 - RNA, 19 nt, Artificial Sequence
  Synthetic
ggcaagccauucuuugcug

SEQ ID NO: 66793 - RNA, 20 nt, Artificial Sequence
  Synthetic
aggcaagccauucuuugcug

SEQ ID NO: 66794 - RNA, 21 nt, Artificial Sequence
  Synthetic
caggcaagccauucuuugcug

SEQ ID NO: 66795 - RNA, 22 nt, Artificial Sequence
  Synthetic
ucaggcaagccauucuuugcug

SEQ ID NO: 66796 - RNA, 23 nt, Artificial Sequence
  Synthetic
cucaggcaagccauucuuugcug

SEQ ID NO: 66797 - RNA, 24 nt, Artificial Sequence
  Synthetic
acucaggcaagccauucuuugcug

SEQ ID NO: 66798 - RNA, 18 nt, Artificial Sequence
  Synthetic
ucugugccuucucaucug

SEQ ID NO: 66799 - RNA, 19 nt, Artificial Sequence
  Synthetic
gucugugccuucucaucug

SEQ ID NO: 66800 - RNA, 20 nt, Artificial Sequence
  Synthetic
cgucugugccuucucaucug

SEQ ID NO: 66801 - RNA, 21 nt, Artificial Sequence
  Synthetic
ccgucugugccuucucaucug

SEQ ID NO: 66802 - RNA, 22 nt, Artificial Sequence
  Synthetic
cccgucugugccuucucaucug

SEQ ID NO: 66803 - RNA, 23 nt, Artificial Sequence
  Synthetic
ccccgucugugccuucucaucug

SEQ ID NO: 66804 - RNA, 24 nt, Artificial Sequence
  Synthetic
uccccgucugugccuucucaucug

SEQ ID NO: 66805 - RNA, 18 nt, Artificial Sequence
  Synthetic
gcagagucuagacucgug

SEQ ID NO: 66806 - RNA, 19 nt, Artificial Sequence
  Synthetic
cgcagagucuagacucgug

SEQ ID NO: 66807 - RNA, 20 nt, Artificial Sequence
  Synthetic
ccgcagagucuagacucgug

SEQ ID NO: 66808 - RNA, 21 nt, Artificial Sequence
  Synthetic
accgcagagucuagacucgug

SEQ ID NO: 66809 - RNA, 22 nt, Artificial Sequence
  Synthetic
uaccgcagagucuagacucgug

SEQ ID NO: 66810 - RNA, 23 nt, Artificial Sequence
  Synthetic
auaccgcagagucuagacucgug

SEQ ID NO: 66811 - RNA, 24 nt, Artificial Sequence
  Synthetic
aauaccgcagagucuagacucgug

SEQ ID NO: 66812 - RNA, 18 nt, Artificial Sequence
  Synthetic
caggcaagccauucuuug

SEQ ID NO: 66813 - RNA, 19 nt, Artificial Sequence
  Synthetic
ucaggcaagccauucuuug

SEQ ID NO: 66814 - RNA, 20 nt, Artificial Sequence
  Synthetic
cucaggcaagccauucuuug

SEQ ID NO: 66815 - RNA, 21 nt, Artificial Sequence
  Synthetic
acucaggcaagccauucuuug

SEQ ID NO: 66816 - RNA, 22 nt, Artificial Sequence
  Synthetic
cacucaggcaagccauucuuug

SEQ ID NO: 66817 - RNA, 23 nt, Artificial Sequence
  Synthetic
gcacucaggcaagccauucuuug

SEQ ID NO: 66818 - RNA, 24 nt, Artificial Sequence
  Synthetic
ugcacucaggcaagccauucuuug

SEQ ID NO: 66819 - RNA, 18 nt, Artificial Sequence
  Synthetic
  misc_feature (18)..(18): n is a, c, g, or u
uuucuguguaaacaauan

SEQ ID NO: 66820 - RNA, 19 nt, Artificial Sequence
  Synthetic
  misc_feature (19)..(19): n is a, c, g, or u
cuuucuguguaaacaauan

SEQ ID NO: 66821 - RNA, 20 nt, Artificial Sequence
  Synthetic
  misc_feature (20)..(20): n is a, c, g, or u
ccuuucuguguaaacaauan

SEQ ID NO: 66822 - RNA, 21 nt, Artificial Sequence
  Synthetic
  misc_feature (21)..(21): n is a, c, g, or u
gccuuucuguguaaacaauan

SEQ ID NO: 66823 - RNA, 22 nt, Artificial Sequence
  Synthetic
  misc_feature (22)..(22): n is a, c, g, or u
ggccuuucuguguaaacaauan

SEQ ID NO: 66824 - RNA, 23 nt, Artificial Sequence
  Synthetic
  misc_feature (23)..(23): n is a, c, g, or u
aggccuuucuguguaaacaauan

SEQ ID NO: 66825 - RNA, 24 nt, Artificial Sequence
  Synthetic
  misc_feature (24)..(24): n is a, c, g, or u
aaggccuuucuguguaaacaauan

SEQ ID NO: 66826 - RNA, 18 nt, Artificial Sequence
  Synthetic
  misc_feature (18)..(18): n is a, c, g, or u
uaaagacugggaggagun

SEQ ID NO: 66827 - RNA, 19 nt, Artificial Sequence
  Synthetic
  misc_feature (19)..(19): n is a, c, g, or u
uuaaagacugggaggagun

SEQ ID NO: 66828 - RNA, 20 nt, Artificial Sequence
  Synthetic
  misc_feature (20)..(20): n is a, c, g, or u
uuuaaagacugggaggagun

SEQ ID NO: 66829 - RNA, 21 nt, Artificial Sequence
  Synthetic
  misc_feature (21)..(21): n is a, c, g, or u
guuuaaagacugggaggagun

SEQ ID NO: 66830 - RNA, 22 nt, Artificial Sequence
  Synthetic
  misc_feature (22)..(22): n is a, c, g, or u
uguuuaaagacugggaggagun

SEQ ID NO: 66831 - RNA, 23 nt, Artificial Sequence
  Synthetic
  misc_feature (23)..(23): n is a, c, g, or u
uuguuuaaagacugggaggagun

SEQ ID NO: 66832 - RNA, 24 nt, Artificial Sequence
  Synthetic
  misc_feature (24)..(24): n is a, c, g, or u
uuuguuuaaagacugggaggagun

SEQ ID NO: 66833 - RNA, 18 nt, Artificial Sequence
  Synthetic
aggacauuauuaacaaau

SEQ ID NO: 66834 - RNA, 19 nt, Artificial Sequence
  Synthetic
caggacauuauuaacaaau

SEQ ID NO: 66835 - RNA, 20 nt, Artificial Sequence
  Synthetic
ccaggacauuauuaacaaau

SEQ ID NO: 66836 - RNA, 21 nt, Artificial Sequence
  Synthetic
accaggacauuauuaacaaau

SEQ ID NO: 66837 - RNA, 22 nt, Artificial Sequence
  Synthetic
caccaggacauuauuaacaaau

SEQ ID NO: 66838 - RNA, 23 nt, Artificial Sequence
  Synthetic
gcaccaggacauuauuaacaaau

SEQ ID NO: 66839 - RNA, 24 nt, Artificial Sequence
  Synthetic
ugcaccaggacauuauuaacaaau

SEQ ID NO: 66840 - RNA, 18 nt, Artificial Sequence
  Synthetic
  misc_feature (14)..(14): n is a, c, g, or u
accugggugggugnaaau

SEQ ID NO: 66841 - RNA, 19 nt, Artificial Sequence
  Synthetic
  misc_feature (15)..(15): n is a, c, g, or u
uaccugggugggugnaaau

SEQ ID NO: 66842 - RNA, 20 nt, Artificial Sequence
  Synthetic
  misc_feature (16)..(16): n is a, c, g, or u
cuaccugggugggugnaaau

SEQ ID NO: 66843 - RNA, 21 nt, Artificial Sequence
  Synthetic
  misc_feature (17)..(17): n is a, c, g, or u
gcuaccugggugggugnaaau

SEQ ID NO: 66844 - RNA, 22 nt, Artificial Sequence
  Synthetic
  misc_feature (18)..(18): n is a, c, g, or u
agcuaccugggugggugnaaau

SEQ ID NO: 66845 - RNA, 23 nt, Artificial Sequence
  Synthetic
  misc_feature (19)..(19): n is a, c, g, or u
uagcuaccugggugggugnaaau

SEQ ID NO: 66846 - RNA, 24 nt, Artificial Sequence
  Synthetic
  misc_feature (20)..(20): n is a, c, g, or u
cuagcuaccugggugggugnaaau

SEQ ID NO: 66847 - RNA, 18 nt, Artificial Sequence
  Synthetic
uugacccuuauaaagaau

SEQ ID NO: 66848 - RNA, 19 nt, Artificial Sequence
  Synthetic
auugacccuuauaaagaau

SEQ ID NO: 66849 - RNA, 20 nt, Artificial Sequence
  Synthetic
cauugacccuuauaaagaau

SEQ ID NO: 66850 - RNA, 21 nt, Artificial Sequence
  Synthetic
acauugacccuuauaaagaau

SEQ ID NO: 66851 - RNA, 22 nt, Artificial Sequence
  Synthetic
gacauugacccuuauaaagaau

SEQ ID NO: 66852 - RNA, 23 nt, Artificial Sequence
  Synthetic
ggacauugacccuuauaaagaau

SEQ ID NO: 66853 - RNA, 24 nt, Artificial Sequence
  Synthetic
uggacauugacccuuauaaagaau

SEQ ID NO: 66854 - RNA, 18 nt, Artificial Sequence
  Synthetic
ggacggucccucucgaau

SEQ ID NO: 66855 - RNA, 19 nt, Artificial Sequence
  Synthetic
uggacggucccucucgaau

SEQ ID NO: 66856 - RNA, 20 nt, Artificial Sequence
  Synthetic
uuggacggucccucucgaau

SEQ ID NO: 66857 - RNA, 21 nt, Artificial Sequence
  Synthetic
cuuggacggucccucucgaau

SEQ ID NO: 66858 - RNA, 22 nt, Artificial Sequence
  Synthetic
ucuuggacggucccucucgaau

SEQ ID NO: 66859 - RNA, 23 nt, Artificial Sequence
  Synthetic
uucuuggacggucccucucgaau

SEQ ID NO: 66860 - RNA, 24 nt, Artificial Sequence
  Synthetic
uuucuuggacggucccucucgaau

SEQ ID NO: 66861 - RNA, 18 nt, Artificial Sequence
  Synthetic
aguuaugucaauacuaau

SEQ ID NO: 66862 - RNA, 19 nt, Artificial Sequence
  Synthetic
caguuaugucaauacuaau

SEQ ID NO: 66863 - RNA, 20 nt, Artificial Sequence
  Synthetic
ucaguuaugucaauacuaau

SEQ ID NO: 66864 - RNA, 21 nt, Artificial Sequence
  Synthetic
gucaguuaugucaauacuaau

SEQ ID NO: 66865 - RNA, 22 nt, Artificial Sequence
  Synthetic
agucaguuaugucaauacuaau

SEQ ID NO: 66866 - RNA, 23 nt, Artificial Sequence
  Synthetic
uagucaguuaugucaauacuaau

SEQ ID NO: 66867 - RNA, 24 nt, Artificial Sequence
  Synthetic
guagucaguuaugucaauacuaau

SEQ ID NO: 66868 - RNA, 18 nt, Artificial Sequence
  Synthetic
uuucauggguuauguaau

SEQ ID NO: 66869 - RNA, 19 nt, Artificial Sequence
  Synthetic
auuucauggguuauguaau

SEQ ID NO: 66870 - RNA, 20 nt, Artificial Sequence
  Synthetic
  misc_feature (1)..(1): n is a, c, g, or u
nauuucauggguuauguaau

SEQ ID NO: 66871 - RNA, 21 nt, Artificial Sequence
  Synthetic
  misc_feature (2)..(2): n is a, c, g, or u
anauuucauggguuauguaau

SEQ ID NO: 66872 - RNA, 22 nt, Artificial Sequence
  Synthetic
  misc_feature (3)..(3): n is a, c, g, or u
uanauuucauggguuauguaau

SEQ ID NO: 66873 - RNA, 23 nt, Artificial Sequence
  Synthetic
  misc_feature (4)..(4): n is a, c, g, or u
cuanauuucauggguuauguaau

SEQ ID NO: 66874 - RNA, 24 nt, Artificial Sequence
  Synthetic
  misc_feature (5)..(5): n is a, c, g, or u
ccuanauuucauggguuauguaau

SEQ ID NO: 66875 - RNA, 18 nt, Artificial Sequence
  Synthetic
uugcccaaggucuuacau

SEQ ID NO: 66876 - RNA, 19 nt, Artificial Sequence
  Synthetic
cuugcccaaggucuuacau

SEQ ID NO: 66877 - RNA, 20 nt, Artificial Sequence
  Synthetic
ucuugcccaaggucuuacau

SEQ ID NO: 66878 - RNA, 21 nt, Artificial Sequence
  Synthetic
aucuugcccaaggucuuacau

SEQ ID NO: 66879 - RNA, 22 nt, Artificial Sequence
  Synthetic
aaucuugcccaaggucuuacau

SEQ ID NO: 66880 - RNA, 23 nt, Artificial Sequence
  Synthetic
aaaucuugcccaaggucuuacau

SEQ ID NO: 66881 - RNA, 24 nt, Artificial Sequence
  Synthetic
caaaucuugcccaaggucuuacau

SEQ ID NO: 66882 - RNA, 18 nt, Artificial Sequence
  Synthetic
agguaggagugggagcau

SEQ ID NO: 66883 - RNA, 19 nt, Artificial Sequence
  Synthetic
aagguaggagugggagcau

SEQ ID NO: 66884 - RNA, 20 nt, Artificial Sequence
  Synthetic
caagguaggagugggagcau

SEQ ID NO: 66885 - RNA, 21 nt, Artificial Sequence
  Synthetic
acaagguaggagugggagcau

SEQ ID NO: 66886 - RNA, 22 nt, Artificial Sequence
  Synthetic
aacaagguaggagugggagcau

SEQ ID NO: 66887 - RNA, 23 nt, Artificial Sequence
  Synthetic
caacaagguaggagugggagcau

SEQ ID NO: 66888 - RNA, 24 nt, Artificial Sequence
  Synthetic
ccaacaagguaggagugggagcau

SEQ ID NO: 66889 - RNA, 18 nt, Artificial Sequence
  Synthetic
aacaccagaaauccagau

SEQ ID NO: 66890 - RNA, 19 nt, Artificial Sequence
  Synthetic
aaacaccagaaauccagau

SEQ ID NO: 66891 - RNA, 20 nt, Artificial Sequence
  Synthetic
caaacaccagaaauccagau

SEQ ID NO: 66892 - RNA, 21 nt, Artificial Sequence
  Synthetic
gcaaacaccagaaauccagau

SEQ ID NO: 66893 - RNA, 22 nt, Artificial Sequence
  Synthetic
agcaaacaccagaaauccagau

SEQ ID NO: 66894 - RNA, 23 nt, Artificial Sequence
  Synthetic
gagcaaacaccagaaauccagau

SEQ ID NO: 66895 - RNA, 24 nt, Artificial Sequence
  Synthetic
agagcaaacaccagaaauccagau

SEQ ID NO: 66896 - RNA, 18 nt, Artificial Sequence
  Synthetic
gucaaucuucucgaggau

SEQ ID NO: 66897 - RNA, 19 nt, Artificial Sequence
  Synthetic
cgucaaucuucucgaggau

SEQ ID NO: 66898 - RNA, 20 nt, Artificial Sequence
  Synthetic
ucgucaaucuucucgaggau

SEQ ID NO: 66899 - RNA, 21 nt, Artificial Sequence
  Synthetic
cucgucaaucuucucgaggau

SEQ ID NO: 66900 - RNA, 22 nt, Artificial Sequence
  Synthetic
ucucgucaaucuucucgaggau

SEQ ID NO: 66901 - RNA, 23 nt, Artificial Sequence
  Synthetic
aucucgucaaucuucucgaggau

SEQ ID NO: 66902 - RNA, 24 nt, Artificial Sequence
  Synthetic
caucucgucaaucuucucgaggau

SEQ ID NO: 66903 - RNA, 18 nt, Artificial Sequence
  Synthetic
  misc_feature (6)..(6): n is a, c, g, or u
guuaancggccuauugau

SEQ ID NO: 66904 - RNA, 19 nt, Artificial Sequence
  Synthetic
  misc_feature (7)..(7): n is a, c, g, or u
uguuaancggccuauugau

SEQ ID NO: 66905 - RNA, 20 nt, Artificial Sequence
  Synthetic
  misc_feature (8)..(8): n is a, c, g, or u
cuguuaancggccuauugau

SEQ ID NO: 66906 - RNA, 21 nt, Artificial Sequence
  Synthetic
  misc_feature (9)..(9): n is a, c, g, or u
ccuguuaancggccuauugau

SEQ ID NO: 66907 - RNA, 22 nt, Artificial Sequence
  Synthetic
  misc_feature (10)..(10): n is a, c, g, or u
cccuguuaancggccuauugau

SEQ ID NO: 66908 - RNA, 23 nt, Artificial Sequence
  Synthetic
  misc_feature (11)..(11): n is a, c, g, or u
ucccuguuaancggccuauugau

SEQ ID NO: 66909 - RNA, 24 nt, Artificial Sequence
  Synthetic
  misc_feature (12)..(12): n is a, c, g, or u
cucccuguuaancggccuauugau

SEQ ID NO: 66910 - RNA, 18 nt, Artificial Sequence
  Synthetic
auauggaugaugugguau

SEQ ID NO: 66911 - RNA, 19 nt, Artificial Sequence
  Synthetic
uauauggaugaugugguau

SEQ ID NO: 66912 - RNA, 20 nt, Artificial Sequence
  Synthetic
uuauauggaugaugugguau

SEQ ID NO: 66913 - RNA, 21 nt, Artificial Sequence
  Synthetic
guuauauggaugaugugguau

SEQ ID NO: 66914 - RNA, 22 nt, Artificial Sequence
  Synthetic
aguuauauggaugaugugguau

SEQ ID NO: 66915 - RNA, 23 nt, Artificial Sequence
  Synthetic
caguuauauggaugaugugguau

SEQ ID NO: 66916 - RNA, 24 nt, Artificial Sequence
  Synthetic
ucaguuauauggaugaugugguau

SEQ ID NO: 66917 - RNA, 18 nt, Artificial Sequence
  Synthetic
  misc_feature (10)..(10): n is a, c, g, or u
gucuggagcnaaacuuau

SEQ ID NO: 66918 - RNA, 19 nt, Artificial Sequence
  Synthetic
  misc_feature (11)..(11): n is a, c, g, or u
ggucuggagcnaaacuuau

SEQ ID NO: 66919 - RNA, 20 nt, Artificial Sequence
  Synthetic
  misc_feature (12)..(12): n is a, c, g, or u
aggucuggagcnaaacuuau

SEQ ID NO: 66920 - RNA, 21 nt, Artificial Sequence
  Synthetic
  misc_feature (13)..(13): n is a, c, g, or u
caggucuggagcnaaacuuau

SEQ ID NO: 66921 - RNA, 22 nt, Artificial Sequence
  Synthetic
  misc_feature (14)..(14): n is a, c, g, or u
gcaggucuggagcnaaacuuau

SEQ ID NO: 66922 - RNA, 23 nt, Artificial Sequence
  Synthetic
  misc_feature (15)..(15): n is a, c, g, or u
agcaggucuggagcnaaacuuau

SEQ ID NO: 66923 - RNA, 24 nt, Artificial Sequence
  Synthetic
  misc_feature (16)..(16): n is a, c, g, or u
cagcaggucuggagcnaaacuuau

SEQ ID NO: 66924 - RNA, 18 nt, Artificial Sequence
  Synthetic
acuguuuguuuaaagacu

SEQ ID NO: 66925 - RNA, 19 nt, Artificial Sequence
  Synthetic
gacuguuuguuuaaagacu

SEQ ID NO: 66926 - RNA, 20 nt, Artificial Sequence
  Synthetic
agacuguuuguuuaaagacu

SEQ ID NO: 66927 - RNA, 21 nt, Artificial Sequence
  Synthetic
aagacuguuuguuuaaagacu

SEQ ID NO: 66928 - RNA, 22 nt, Artificial Sequence
  Synthetic
aaagacuguuuguuuaaagacu

SEQ ID NO: 66929 - RNA, 23 nt, Artificial Sequence
  Synthetic
caaagacuguuuguuuaaagacu

SEQ ID NO: 66930 - RNA, 24 nt, Artificial Sequence
  Synthetic
ucaaagacuguuuguuuaaagacu

SEQ ID NO: 66931 - RNA, 18 nt, Artificial Sequence
  Synthetic
ccucugccgauccauacu

SEQ ID NO: 66932 - RNA, 19 nt, Artificial Sequence
  Synthetic
uccucugccgauccauacu

SEQ ID NO: 66933 - RNA, 20 nt, Artificial Sequence
  Synthetic
cuccucugccgauccauacu

SEQ ID NO: 66934 - RNA, 21 nt, Artificial Sequence
  Synthetic
gcuccucugccgauccauacu

SEQ ID NO: 66935 - RNA, 22 nt, Artificial Sequence
  Synthetic
ggcuccucugccgauccauacu

SEQ ID NO: 66936 - RNA, 23 nt, Artificial Sequence
  Synthetic
uggcuccucugccgauccauacu

SEQ ID NO: 66937 - RNA, 24 nt, Artificial Sequence
  Synthetic
guggcuccucugccgauccauacu

SEQ ID NO: 66938 - RNA, 18 nt, Artificial Sequence
  Synthetic
aaagaauuuggagcuacu

SEQ ID NO: 66939 - RNA, 19 nt, Artificial Sequence
  Synthetic
uaaagaauuuggagcuacu

SEQ ID NO: 66940 - RNA, 20 nt, Artificial Sequence
  Synthetic
auaaagaauuuggagcuacu

SEQ ID NO: 66941 - RNA, 21 nt, Artificial Sequence
  Synthetic
uauaaagaauuuggagcuacu

SEQ ID NO: 66942 - RNA, 22 nt, Artificial Sequence
  Synthetic
uuauaaagaauuuggagcuacu

SEQ ID NO: 66943 - RNA, 23 nt, Artificial Sequence
  Synthetic
cuuauaaagaauuuggagcuacu

SEQ ID NO: 66944 - RNA, 24 nt, Artificial Sequence
  Synthetic
ccuuauaaagaauuuggagcuacu

SEQ ID NO: 66945 - RNA, 18 nt, Artificial Sequence
  Synthetic
auuaaaggucuuuguacu

SEQ ID NO: 66946 - RNA, 19 nt, Artificial Sequence
  Synthetic
gauuaaaggucuuuguacu

SEQ ID NO: 66947 - RNA, 20 nt, Artificial Sequence
  Synthetic
agauuaaaggucuuuguacu

SEQ ID NO: 66948 - RNA, 21 nt, Artificial Sequence
  Synthetic
uagauuaaaggucuuuguacu

SEQ ID NO: 66949 - RNA, 22 nt, Artificial Sequence
  Synthetic
  misc_feature (1)..(1): n is a, c, g, or u
nuagauuaaaggucuuuguacu

SEQ ID NO: 66950 - RNA, 23 nt, Artificial Sequence
  Synthetic
  misc_feature (2)..(2): n is a, c, g, or u
anuagauuaaaggucuuuguacu

SEQ ID NO: 66951 - RNA, 24 nt, Artificial Sequence
  Synthetic
  misc_feature (3)..(3): n is a, c, g, or u
ganuagauuaaaggucuuuguacu

SEQ ID NO: 66952 - RNA, 18 nt, Artificial Sequence
  Synthetic
uguugcuguucaaaaccu

SEQ ID NO: 66953 - RNA, 19 nt, Artificial Sequence
  Synthetic
auguugcuguucaaaaccu

SEQ ID NO: 66954 - RNA, 20 nt, Artificial Sequence
  Synthetic
cauguugcuguucaaaaccu

SEQ ID NO: 66955 - RNA, 21 nt, Artificial Sequence
  Synthetic
ucauguugcuguucaaaaccu

SEQ ID NO: 66956 - RNA, 22 nt, Artificial Sequence
  Synthetic
cucauguugcuguucaaaaccu

SEQ ID NO: 66957 - RNA, 23 nt, Artificial Sequence
  Synthetic
ccucauguugcuguucaaaaccu

SEQ ID NO: 66958 - RNA, 24 nt, Artificial Sequence
  Synthetic
cccucauguugcuguucaaaaccu

SEQ ID NO: 66959 - RNA, 18 nt, Artificial Sequence
  Synthetic
accccaaucacuccaccu

SEQ ID NO: 66960 - RNA, 19 nt, Artificial Sequence
  Synthetic
uaccccaaucacuccaccu

SEQ ID NO: 66961 - RNA, 20 nt, Artificial Sequence
  Synthetic
cuaccccaaucacuccaccu

SEQ ID NO: 66962 - RNA, 21 nt, Artificial Sequence
  Synthetic
ccuaccccaaucacuccaccu

SEQ ID NO: 66963 - RNA, 22 nt, Artificial Sequence
  Synthetic
gccuaccccaaucacuccaccu

SEQ ID NO: 66964 - RNA, 23 nt, Artificial Sequence
  Synthetic
agccuaccccaaucacuccaccu

SEQ ID NO: 66965 - RNA, 24 nt, Artificial Sequence
  Synthetic
cagccuaccccaaucacuccaccu

SEQ ID NO: 66966 - RNA, 18 nt, Artificial Sequence
  Synthetic
acacuauuuacauacccu

SEQ ID NO: 66967 - RNA, 19 nt, Artificial Sequence
  Synthetic
gacacuauuuacauacccu

SEQ ID NO: 66968 - RNA, 20 nt, Artificial Sequence
  Synthetic
agacacuauuuacauacccu

SEQ ID NO: 66969 - RNA, 21 nt, Artificial Sequence
  Synthetic
cagacacuauuuacauacccu

SEQ ID NO: 66970 - RNA, 22 nt, Artificial Sequence
  Synthetic
ccagacacuauuuacauacccu

SEQ ID NO: 66971 - RNA, 23 nt, Artificial Sequence
  Synthetic
accagacacuauuuacauacccu

SEQ ID NO: 66972 - RNA, 24 nt, Artificial Sequence
  Synthetic
aaccagacacuauuuacauacccu

SEQ ID NO: 66973 - RNA, 18 nt, Artificial Sequence
  Synthetic
cauuccaccaccaauccu

SEQ ID NO: 66974 - RNA, 19 nt, Artificial Sequence
  Synthetic
ucauuccaccaccaauccu

SEQ ID NO: 66975 - RNA, 20 nt, Artificial Sequence
  Synthetic
aucauuccaccaccaauccu

SEQ ID NO: 66976 - RNA, 21 nt, Artificial Sequence
  Synthetic
aaucauuccaccaccaauccu

SEQ ID NO: 66977 - RNA, 22 nt, Artificial Sequence
  Synthetic
gaaucauuccaccaccaauccu

SEQ ID NO: 66978 - RNA, 23 nt, Artificial Sequence
  Synthetic
agaaucauuccaccaccaauccu

SEQ ID NO: 66979 - RNA, 24 nt, Artificial Sequence
  Synthetic
aagaaucauuccaccaccaauccu

SEQ ID NO: 66980 - RNA, 18 nt, Artificial Sequence
  Synthetic
ccgucagcgcugaauccu

SEQ ID NO: 66981 - RNA, 19 nt, Artificial Sequence
  Synthetic
cccgucagcgcugaauccu

SEQ ID NO: 66982 - RNA, 20 nt, Artificial Sequence
  Synthetic
ucccgucagcgcugaauccu

SEQ ID NO: 66983 - RNA, 21 nt, Artificial Sequence
  Synthetic
gucccgucagcgcugaauccu

SEQ ID NO: 66984 - RNA, 22 nt, Artificial Sequence
  Synthetic
cgucccgucagcgcugaauccu

SEQ ID NO: 66985 - RNA, 23 nt, Artificial Sequence
  Synthetic
acgucccgucagcgcugaauccu

SEQ ID NO: 66986 - RNA, 24 nt, Artificial Sequence
  Synthetic
uacgucccgucagcgcugaauccu

SEQ ID NO: 66987 - RNA, 18 nt, Artificial Sequence
  Synthetic
ugcugccaacuggauccu

SEQ ID NO: 66988 - RNA, 19 nt, Artificial Sequence
  Synthetic
gugcugccaacuggauccu

SEQ ID NO: 66989 - RNA, 20 nt, Artificial Sequence
  Synthetic
ugugcugccaacuggauccu

SEQ ID NO: 66990 - RNA, 21 nt, Artificial Sequence
  Synthetic
cugugcugccaacuggauccu

SEQ ID NO: 66991 - RNA, 22 nt, Artificial Sequence
  Synthetic
gcugugcugccaacuggauccu

SEQ ID NO: 66992 - RNA, 23 nt, Artificial Sequence
  Synthetic
ggcugugcugccaacuggauccu

SEQ ID NO: 66993 - RNA, 24 nt, Artificial Sequence
  Synthetic
aggcugugcugccaacuggauccu

SEQ ID NO: 66994 - RNA, 18 nt, Artificial Sequence
  Synthetic
ggcuuucggaaaauuccu

SEQ ID NO: 66995 - RNA, 19 nt, Artificial Sequence
  Synthetic
gggcuuucggaaaauuccu

SEQ ID NO: 66996 - RNA, 20 nt, Artificial Sequence
  Synthetic
ugggcuuucggaaaauuccu

SEQ ID NO: 66997 - RNA, 21 nt, Artificial Sequence
  Synthetic
augggcuuucggaaaauuccu

SEQ ID NO: 66998 - RNA, 22 nt, Artificial Sequence
  Synthetic
caugggcuuucggaaaauuccu

SEQ ID NO: 66999 - RNA, 23 nt, Artificial Sequence
  Synthetic
ucaugggcuuucggaaaauuccu

SEQ ID NO: 67000 - RNA, 24 nt, Artificial Sequence
  Synthetic
aucaugggcuuucggaaaauuccu

SEQ ID NO: 67001 - RNA, 18 nt, Artificial Sequence
  Synthetic
  misc_feature (5)..(5): n is a, c, g, or u
acccnucucggggucgcu

SEQ ID NO: 67002 - RNA, 19 nt, Artificial Sequence
  Synthetic
  misc_feature (6)..(6): n is a, c, g, or u
gacccnucucggggucgcu

SEQ ID NO: 67003 - RNA, 20 nt, Artificial Sequence
  Synthetic
  misc_feature (7)..(7): n is a, c, g, or u
cgacccnucucggggucgcu

SEQ ID NO: 67004 - RNA, 21 nt, Artificial Sequence
  Synthetic
  misc_feature (8)..(8): n is a, c, g, or u
acgacccnucucggggucgcu

SEQ ID NO: 67005 - RNA, 22 nt, Artificial Sequence
  Synthetic
  misc_feature (9)..(9): n is a, c, g, or u
gacgacccnucucggggucgcu

SEQ ID NO: 67006 - RNA, 23 nt, Artificial Sequence
  Synthetic
  misc_feature (10)..(10): n is a, c, g, or u
ggacgacccnucucggggucgcu

SEQ ID NO: 67007 - RNA, 24 nt, Artificial Sequence
  Synthetic
  misc_feature (11)..(11): n is a, c, g, or u
cggacgacccnucucggggucgcu

SEQ ID NO: 67008 - RNA, 18 nt, Artificial Sequence
  Synthetic
ggcaagccauucuuugcu

SEQ ID NO: 67009 - RNA, 19 nt, Artificial Sequence
  Synthetic
aggcaagccauucuuugcu

SEQ ID NO: 67010 - RNA, 20 nt, Artificial Sequence
  Synthetic
caggcaagccauucuuugcu

SEQ ID NO: 67011 - RNA, 21 nt, Artificial Sequence
  Synthetic
ucaggcaagccauucuuugcu

SEQ ID NO: 67012 - RNA, 22 nt, Artificial Sequence
  Synthetic
cucaggcaagccauucuuugcu

SEQ ID NO: 67013 - RNA, 23 nt, Artificial Sequence
  Synthetic
acucaggcaagccauucuuugcu

SEQ ID NO: 67014 - RNA, 24 nt, Artificial Sequence
  Synthetic
cacucaggcaagccauucuuugcu

SEQ ID NO: 67015 - RNA, 18 nt, Artificial Sequence
  Synthetic
  misc_feature (2)..(2): n is a, c, g, or u
unugggucaccuuauucu

SEQ ID NO: 67016 - RNA, 19 nt, Artificial Sequence
  Synthetic
  misc_feature (3)..(3): n is a, c, g, or u
uunugggucaccuuauucu

SEQ ID NO: 67017 - RNA, 20 nt, Artificial Sequence
  Synthetic
  misc_feature (4)..(4): n is a, c, g, or u
uuunugggucaccuuauucu

SEQ ID NO: 67018 - RNA, 21 nt, Artificial Sequence
  Synthetic
  misc_feature (5)..(5): n is a, c, g, or u
uuuunugggucaccuuauucu

SEQ ID NO: 67019 - RNA, 22 nt, Artificial Sequence
  Synthetic
  misc_feature (6)..(6): n is a, c, g, or u
auuuunugggucaccuuauucu

SEQ ID NO: 67020 - RNA, 23 nt, Artificial Sequence
  Synthetic
  misc_feature (7)..(7): n is a, c, g, or u
cauuuunugggucaccuuauucu

SEQ ID NO: 67021 - RNA, 24 nt, Artificial Sequence
  Synthetic
  misc_feature (8)..(8): n is a, c, g, or u
ucauuuunugggucaccuuauucu

SEQ ID NO: 67022 - RNA, 18 nt, Artificial Sequence
  Synthetic
gacuucucucaauuuucu

SEQ ID NO: 67023 - RNA, 19 nt, Artificial Sequence
  Synthetic
ggacuucucucaauuuucu

SEQ ID NO: 67024 - RNA, 20 nt, Artificial Sequence
  Synthetic
uggacuucucucaauuuucu

SEQ ID NO: 67025 - RNA, 21 nt, Artificial Sequence
  Synthetic
guggacuucucucaauuuucu

SEQ ID NO: 67026 - RNA, 22 nt, Artificial Sequence
  Synthetic
gguggacuucucucaauuuucu

SEQ ID NO: 67027 - RNA, 23 nt, Artificial Sequence
  Synthetic
ugguggacuucucucaauuuucu

SEQ ID NO: 67028 - RNA, 24 nt, Artificial Sequence
  Synthetic
gugguggacuucucucaauuuucu

SEQ ID NO: 67029 - RNA, 18 nt, Artificial Sequence
  Synthetic
gguuauguaauuggaagu

SEQ ID NO: 67030 - RNA, 19 nt, Artificial Sequence
  Synthetic
ggguuauguaauuggaagu

SEQ ID NO: 67031 - RNA, 20 nt, Artificial Sequence
  Synthetic
uggguuauguaauuggaagu

SEQ ID NO: 67032 - RNA, 21 nt, Artificial Sequence
  Synthetic
auggguuauguaauuggaagu

SEQ ID NO: 67033 - RNA, 22 nt, Artificial Sequence
  Synthetic
cauggguuauguaauuggaagu

SEQ ID NO: 67034 - RNA, 23 nt, Artificial Sequence
  Synthetic
ucauggguuauguaauuggaagu

SEQ ID NO: 67035 - RNA, 24 nt, Artificial Sequence
  Synthetic
uucauggguuauguaauuggaagu

SEQ ID NO: 67036 - RNA, 18 nt, Artificial Sequence
  Synthetic
ggaucaucaaccaccagu

SEQ ID NO: 67037 - RNA, 19 nt, Artificial Sequence
  Synthetic
aggaucaucaaccaccagu

SEQ ID NO: 67038 - RNA, 20 nt, Artificial Sequence
  Synthetic
caggaucaucaaccaccagu

SEQ ID NO: 67039 - RNA, 21 nt, Artificial Sequence
  Synthetic
ccaggaucaucaaccaccagu

SEQ ID NO: 67040 - RNA, 22 nt, Artificial Sequence
  Synthetic
uccaggaucaucaaccaccagu

SEQ ID NO: 67041 - RNA, 23 nt, Artificial Sequence
  Synthetic
uuccaggaucaucaaccaccagu

SEQ ID NO: 67042 - RNA, 24 nt, Artificial Sequence
  Synthetic
auuccaggaucaucaaccaccagu

SEQ ID NO: 67043 - RNA, 18 nt, Artificial Sequence
  Synthetic
ccuccaccaaucggcagu

SEQ ID NO: 67044 - RNA, 19 nt, Artificial Sequence
  Synthetic
gccuccaccaaucggcagu

SEQ ID NO: 67045 - RNA, 20 nt, Artificial Sequence
  Synthetic
ugccuccaccaaucggcagu

SEQ ID NO: 67046 - RNA, 21 nt, Artificial Sequence
  Synthetic
cugccuccaccaaucggcagu

SEQ ID NO: 67047 - RNA, 22 nt, Artificial Sequence
  Synthetic
ccugccuccaccaaucggcagu

SEQ ID NO: 67048 - RNA, 23 nt, Artificial Sequence
  Synthetic
uccugccuccaccaaucggcagu

SEQ ID NO: 67049 - RNA, 24 nt, Artificial Sequence
  Synthetic
cuccugccuccaccaaucggcagu

SEQ ID NO: 67050 - RNA, 18 nt, Artificial Sequence
  Synthetic
ugacuucuuuccuucagu

SEQ ID NO: 67051 - RNA, 19 nt, Artificial Sequence
  Synthetic
cugacuucuuuccuucagu

SEQ ID NO: 67052 - RNA, 20 nt, Artificial Sequence
  Synthetic
ucugacuucuuuccuucagu

SEQ ID NO: 67053 - RNA, 21 nt, Artificial Sequence
  Synthetic
uucugacuucuuuccuucagu

SEQ ID NO: 67054 - RNA, 22 nt, Artificial Sequence
  Synthetic
cuucugacuucuuuccuucagu

SEQ ID NO: 67055 - RNA, 23 nt, Artificial Sequence
  Synthetic
ccuucugacuucuuuccuucagu

SEQ ID NO: 67056 - RNA, 24 nt, Artificial Sequence
  Synthetic
gccuucugacuucuuuccuucagu

SEQ ID NO: 67057 - RNA, 18 nt, Artificial Sequence
  Synthetic
ucugcaggaucccagagu

SEQ ID NO: 67058 - RNA, 19 nt, Artificial Sequence
  Synthetic
cucugcaggaucccagagu

SEQ ID NO: 67059 - RNA, 20 nt, Artificial Sequence
  Synthetic
gcucugcaggaucccagagu

SEQ ID NO: 67060 - RNA, 21 nt, Artificial Sequence
  Synthetic
agcucugcaggaucccagagu

SEQ ID NO: 67061 - RNA, 22 nt, Artificial Sequence
  Synthetic
aagcucugcaggaucccagagu

SEQ ID NO: 67062 - RNA, 23 nt, Artificial Sequence
  Synthetic
caagcucugcaggaucccagagu

SEQ ID NO: 67063 - RNA, 24 nt, Artificial Sequence
  Synthetic
ccaagcucugcaggaucccagagu

SEQ ID NO: 67064 - RNA, 18 nt, Artificial Sequence
  Synthetic
uuaaagacugggaggagu

SEQ ID NO: 67065 - RNA, 19 nt, Artificial Sequence
  Synthetic
uuuaaagacugggaggagu

SEQ ID NO: 67066 - RNA, 20 nt, Artificial Sequence
  Synthetic
guuuaaagacugggaggagu

SEQ ID NO: 67067 - RNA, 21 nt, Artificial Sequence
  Synthetic
uguuuaaagacugggaggagu

SEQ ID NO: 67068 - RNA, 22 nt, Artificial Sequence
  Synthetic
uuguuuaaagacugggaggagu

SEQ ID NO: 67069 - RNA, 23 nt, Artificial Sequence
  Synthetic
uuuguuuaaagacugggaggagu

SEQ ID NO: 67070 - RNA, 24 nt, Artificial Sequence
  Synthetic
guuuguuuaaagacugggaggagu

SEQ ID NO: 67071 - RNA, 18 nt, Artificial Sequence
  Synthetic
agccaacaagguaggagu

SEQ ID NO: 67072 - RNA, 19 nt, Artificial Sequence
  Synthetic
aagccaacaagguaggagu

SEQ ID NO: 67073 - RNA, 20 nt, Artificial Sequence
  Synthetic
gaagccaacaagguaggagu

SEQ ID NO: 67074 - RNA, 21 nt, Artificial Sequence
  Synthetic
  misc_feature (1)..(1): n is a, c, g, or u
ngaagccaacaagguaggagu

SEQ ID NO: 67075 - RNA, 22 nt, Artificial Sequence
  Synthetic
  misc_feature (2)..(2): n is a, c, g, or u
cngaagccaacaagguaggagu

SEQ ID NO: 67076 - RNA, 23 nt, Artificial Sequence
  Synthetic
  misc_feature (3)..(3): n is a, c, g, or u
acngaagccaacaagguaggagu

SEQ ID NO: 67077 - RNA, 24 nt, Artificial Sequence
  Synthetic
  misc_feature (4)..(4): n is a, c, g, or u
gacngaagccaacaagguaggagu

SEQ ID NO: 67078 - RNA, 18 nt, Artificial Sequence
  Synthetic
uccuuggacucacaaggu

SEQ ID NO: 67079 - RNA, 19 nt, Artificial Sequence
  Synthetic
uuccuuggacucacaaggu

SEQ ID NO: 67080 - RNA, 20 nt, Artificial Sequence
  Synthetic
auuccuuggacucacaaggu

SEQ ID NO: 67081 - RNA, 21 nt, Artificial Sequence
  Synthetic
uauuccuuggacucacaaggu

SEQ ID NO: 67082 - RNA, 22 nt, Artificial Sequence
  Synthetic
guauuccuuggacucacaaggu

SEQ ID NO: 67083 - RNA, 23 nt, Artificial Sequence
  Synthetic
aguauuccuuggacucacaaggu

SEQ ID NO: 67084 - RNA, 24 nt, Artificial Sequence
  Synthetic
uaguauuccuuggacucacaaggu

SEQ ID NO: 67085 - RNA, 18 nt, Artificial Sequence
  Synthetic
guuuugcucgcagcaggu

SEQ ID NO: 67086 - RNA, 19 nt, Artificial Sequence
  Synthetic
uguuuugcucgcagcaggu

SEQ ID NO: 67087 - RNA, 20 nt, Artificial Sequence
  Synthetic
uuguuuugcucgcagcaggu

SEQ ID NO: 67088 - RNA, 21 nt, Artificial Sequence
  Synthetic
cuuguuuugcucgcagcaggu

SEQ ID NO: 67089 - RNA, 22 nt, Artificial Sequence
  Synthetic
gcuuguuuugcucgcagcaggu

SEQ ID NO: 67090 - RNA, 23 nt, Artificial Sequence
  Synthetic
cgcuuguuuugcucgcagcaggu

SEQ ID NO: 67091 - RNA, 24 nt, Artificial Sequence
  Synthetic
ccgcuuguuuugcucgcagcaggu

SEQ ID NO: 67092 - RNA, 18 nt, Artificial Sequence
  Synthetic
  misc_feature (13)..(13): n is a, c, g, or u
ccugggugggugnaaauu

SEQ ID NO: 67093 - RNA, 19 nt, Artificial Sequence
  Synthetic
  misc_feature (14)..(14): n is a, c, g, or u
accugggugggugnaaauu

SEQ ID NO: 67094 - RNA, 20 nt, Artificial Sequence
  Synthetic
  misc_feature (15)..(15): n is a, c, g, or u
uaccugggugggugnaaauu

SEQ ID NO: 67095 - RNA, 21 nt, Artificial Sequence
  Synthetic
  misc_feature (16)..(16): n is a, c, g, or u
cuaccugggugggugnaaauu

SEQ ID NO: 67096 - RNA, 22 nt, Artificial Sequence
  Synthetic
  misc_feature (17)..(17): n is a, c, g, or u
gcuaccugggugggugnaaauu

SEQ ID NO: 67097 - RNA, 23 nt, Artificial Sequence
  Synthetic
  misc_feature (18)..(18): n is a, c, g, or u
agcuaccugggugggugnaaauu

SEQ ID NO: 67098 - RNA, 24 nt, Artificial Sequence
  Synthetic
  misc_feature (19)..(19): n is a, c, g, or u
uagcuaccugggugggugnaaauu

SEQ ID NO: 67099 - RNA, 18 nt, Artificial Sequence
  Synthetic
ugacccuuauaaagaauu

SEQ ID NO: 67100 - RNA, 19 nt, Artificial Sequence
  Synthetic
uugacccuuauaaagaauu

SEQ ID NO: 67101 - RNA, 20 nt, Artificial Sequence
  Synthetic
auugacccuuauaaagaauu

SEQ ID NO: 67102 - RNA, 21 nt, Artificial Sequence
  Synthetic
cauugacccuuauaaagaauu

SEQ ID NO: 67103 - RNA, 22 nt, Artificial Sequence
  Synthetic
acauugacccuuauaaagaauu

SEQ ID NO: 67104 - RNA, 23 nt, Artificial Sequence
  Synthetic
gacauugacccuuauaaagaauu

SEQ ID NO: 67105 - RNA, 24 nt, Artificial Sequence
  Synthetic
ggacauugacccuuauaaagaauu

SEQ ID NO: 67106 - RNA, 18 nt, Artificial Sequence
  Synthetic
ccaguuggauccagcauu

SEQ ID NO: 67107 - RNA, 19 nt, Artificial Sequence
  Synthetic
accaguuggauccagcauu

SEQ ID NO: 67108 - RNA, 20 nt, Artificial Sequence
  Synthetic
caccaguuggauccagcauu

SEQ ID NO: 67109 - RNA, 21 nt, Artificial Sequence
  Synthetic
ccaccaguuggauccagcauu

SEQ ID NO: 67110 - RNA, 22 nt, Artificial Sequence
  Synthetic
accaccaguuggauccagcauu

SEQ ID NO: 67111 - RNA, 23 nt, Artificial Sequence
  Synthetic
gaccaccaguuggauccagcauu

SEQ ID NO: 67112 - RNA, 24 nt, Artificial Sequence
  Synthetic
cgaccaccaguuggauccagcauu

SEQ ID NO: 67113 - RNA, 18 nt, Artificial Sequence
  Synthetic
ucaaucuucucgaggauu

SEQ ID NO: 67114 - RNA, 19 nt, Artificial Sequence
  Synthetic
gucaaucuucucgaggauu

SEQ ID NO: 67115 - RNA, 20 nt, Artificial Sequence
  Synthetic
cgucaaucuucucgaggauu

SEQ ID NO: 67116 - RNA, 21 nt, Artificial Sequence
  Synthetic
ucgucaaucuucucgaggauu

SEQ ID NO: 67117 - RNA, 22 nt, Artificial Sequence
  Synthetic
cucgucaaucuucucgaggauu

SEQ ID NO: 67118 - RNA, 23 nt, Artificial Sequence
  Synthetic
ucucgucaaucuucucgaggauu

SEQ ID NO: 67119 - RNA, 24 nt, Artificial Sequence
  Synthetic
aucucgucaaucuucucgaggauu

SEQ ID NO: 67120 - RNA, 18 nt, Artificial Sequence
  Synthetic
uauggaugaugugguauu

SEQ ID NO: 67121 - RNA, 19 nt, Artificial Sequence
  Synthetic
auauggaugaugugguauu

SEQ ID NO: 67122 - RNA, 20 nt, Artificial Sequence
  Synthetic
uauauggaugaugugguauu

SEQ ID NO: 67123 - RNA, 21 nt, Artificial Sequence
  Synthetic
uuauauggaugaugugguauu

SEQ ID NO: 67124 - RNA, 22 nt, Artificial Sequence
  Synthetic
guuauauggaugaugugguauu

SEQ ID NO: 67125 - RNA, 23 nt, Artificial Sequence
  Synthetic
aguuauauggaugaugugguauu

SEQ ID NO: 67126 - RNA, 24 nt, Artificial Sequence
  Synthetic
caguuauauggaugaugugguauu

SEQ ID NO: 67127 - RNA, 18 nt, Artificial Sequence
  Synthetic
ccuaucuuaucaacacuu

SEQ ID NO: 67128 - RNA, 19 nt, Artificial Sequence
  Synthetic
cccuaucuuaucaacacuu

SEQ ID NO: 67129 - RNA, 20 nt, Artificial Sequence
  Synthetic
ccccuaucuuaucaacacuu

SEQ ID NO: 67130 - RNA, 21 nt, Artificial Sequence
  Synthetic
gccccuaucuuaucaacacuu

SEQ ID NO: 67131 - RNA, 22 nt, Artificial Sequence
  Synthetic
ugccccuaucuuaucaacacuu

SEQ ID NO: 67132 - RNA, 23 nt, Artificial Sequence
  Synthetic
augccccuaucuuaucaacacuu

SEQ ID NO: 67133 - RNA, 24 nt, Artificial Sequence
  Synthetic
aaugccccuaucuuaucaacacuu

SEQ ID NO: 67134 - RNA, 18 nt, Artificial Sequence
  Synthetic
acauuucuugucucacuu

SEQ ID NO: 67135 - RNA, 19 nt, Artificial Sequence
  Synthetic
cacauuucuugucucacuu

SEQ ID NO: 67136 - RNA, 20 nt, Artificial Sequence
  Synthetic
ucacauuucuugucucacuu

SEQ ID NO: 67137 - RNA, 21 nt, Artificial Sequence
  Synthetic
uucacauuucuugucucacuu

SEQ ID NO: 67138 - RNA, 22 nt, Artificial Sequence
  Synthetic
uuucacauuucuugucucacuu

SEQ ID NO: 67139 - RNA, 23 nt, Artificial Sequence
  Synthetic
guuucacauuucuugucucacuu

SEQ ID NO: 67140 - RNA, 24 nt, Artificial Sequence
  Synthetic
gguuucacauuucuugucucacuu

SEQ ID NO: 67141 - RNA, 18 nt, Artificial Sequence
  Synthetic
cccccacacggaggccuu

SEQ ID NO: 67142 - RNA, 19 nt, Artificial Sequence
  Synthetic
ucccccacacggaggccuu

SEQ ID NO: 67143 - RNA, 20 nt, Artificial Sequence
  Synthetic
cucccccacacggaggccuu

SEQ ID NO: 67144 - RNA, 21 nt, Artificial Sequence
  Synthetic
acucccccacacggaggccuu

SEQ ID NO: 67145 - RNA, 22 nt, Artificial Sequence
  Synthetic
cacucccccacacggaggccuu

SEQ ID NO: 67146 - RNA, 23 nt, Artificial Sequence
  Synthetic
ucacucccccacacggaggccuu

SEQ ID NO: 67147 - RNA, 24 nt, Artificial Sequence
  Synthetic
uucacucccccacacggaggccuu

SEQ ID NO: 67148 - RNA, 18 nt, Artificial Sequence
  Synthetic
ucccaucaucaugggcuu

SEQ ID NO: 67149 - RNA, 19 nt, Artificial Sequence
  Synthetic
aucccaucaucaugggcuu

SEQ ID NO: 67150 - RNA, 20 nt, Artificial Sequence
  Synthetic
caucccaucaucaugggcuu

SEQ ID NO: 67151 - RNA, 21 nt, Artificial Sequence
  Synthetic
ccaucccaucaucaugggcuu

SEQ ID NO: 67152 - RNA, 22 nt, Artificial Sequence
  Synthetic
cccaucccaucaucaugggcuu

SEQ ID NO: 67153 - RNA, 23 nt, Artificial Sequence
  Synthetic
ucccaucccaucaucaugggcuu

SEQ ID NO: 67154 - RNA, 24 nt, Artificial Sequence
  Synthetic
uucccaucccaucaucaugggcuu

SEQ ID NO: 67155 - RNA, 18 nt, Artificial Sequence
  Synthetic
  misc_feature (4)..(4): n is a, c, g, or u
caangaauugugggucuu

SEQ ID NO: 67156 - RNA, 19 nt, Artificial Sequence
  Synthetic
  misc_feature (5)..(5): n is a, c, g, or u
ucaangaauugugggucuu

SEQ ID NO: 67157 - RNA, 20 nt, Artificial Sequence
  Synthetic
  misc_feature (6)..(6): n is a, c, g, or u
gucaangaauugugggucuu

SEQ ID NO: 67158 - RNA, 21 nt, Artificial Sequence
  Synthetic
  misc_feature (7)..(7): n is a, c, g, or u
ugucaangaauugugggucuu

SEQ ID NO: 67159 - RNA, 22 nt, Artificial Sequence
  Synthetic
  misc_feature (8)..(8): n is a, c, g, or u
augucaangaauugugggucuu

SEQ ID NO: 67160 - RNA, 23 nt, Artificial Sequence
  Synthetic
  misc_feature (9)..(9): n is a, c, g, or u
uaugucaangaauugugggucuu

SEQ ID NO: 67161 - RNA, 24 nt, Artificial Sequence
  Synthetic
  misc_feature (10)..(10): n is a, c, g, or u
guaugucaangaauugugggucuu

SEQ ID NO: 67162 - RNA, 18 nt, Artificial Sequence
  Synthetic
uagaguauuuggugucuu

SEQ ID NO: 67163 - RNA, 19 nt, Artificial Sequence
  Synthetic
  misc_feature (1)..(1): n is a, c, g, or u
nuagaguauuuggugucuu

SEQ ID NO: 67164 - RNA, 20 nt, Artificial Sequence
  Synthetic
  misc_feature (2)..(2): n is a, c, g, or u
cnuagaguauuuggugucuu

SEQ ID NO: 67165 - RNA, 21 nt, Artificial Sequence
  Synthetic
  misc_feature (3)..(3): n is a, c, g, or u
ucnuagaguauuuggugucuu

SEQ ID NO: 67166 - RNA, 22 nt, Artificial Sequence
  Synthetic
  misc_feature (4)..(4): n is a, c, g, or u
gucnuagaguauuuggugucuu

SEQ ID NO: 67167 - RNA, 23 nt, Artificial Sequence
  Synthetic
  misc_feature (5)..(5): n is a, c, g, or u
cgucnuagaguauuuggugucuu

SEQ ID NO: 67168 - RNA, 24 nt, Artificial Sequence
  Synthetic
  misc_feature (6)..(6): n is a, c, g, or u
ccgucnuagaguauuuggugucuu

SEQ ID NO: 67169 - RNA, 18 nt, Artificial Sequence
  Synthetic
  misc_feature (1)..(1): n is a, c, g, or u
nugggucaccuuauucuu

SEQ ID NO: 67170 - RNA, 19 nt, Artificial Sequence
  Synthetic
  misc_feature (2)..(2): n is a, c, g, or u
unugggucaccuuauucuu

SEQ ID NO: 67171 - RNA, 20 nt, Artificial Sequence
  Synthetic
  misc_feature (3)..(3): n is a, c, g, or u
uunugggucaccuuauucuu

SEQ ID NO: 67172 - RNA, 21 nt, Artificial Sequence
  Synthetic
  misc_feature (4)..(4): n is a, c, g, or u
uuunugggucaccuuauucuu

SEQ ID NO: 67173 - RNA, 22 nt, Artificial Sequence
  Synthetic
  misc_feature (5)..(5): n is a, c, g, or u
uuuunugggucaccuuauucuu

SEQ ID NO: 67174 - RNA, 23 nt, Artificial Sequence
  Synthetic
  misc_feature (6)..(6): n is a, c, g, or u
auuuunugggucaccuuauucuu

SEQ ID NO: 67175 - RNA, 24 nt, Artificial Sequence
  Synthetic
  misc_feature (7)..(7): n is a, c, g, or u
cauuuunugggucaccuuauucuu

SEQ ID NO: 67176 - RNA, 18 nt, Artificial Sequence
  Synthetic
aucuucuuguugguucuu

SEQ ID NO: 67177 - RNA, 19 nt, Artificial Sequence
  Synthetic
caucuucuuguugguucuu

SEQ ID NO: 67178 - RNA, 20 nt, Artificial Sequence
  Synthetic
ucaucuucuuguugguucuu

SEQ ID NO: 67179 - RNA, 21 nt, Artificial Sequence
  Synthetic
cucaucuucuuguugguucuu

SEQ ID NO: 67180 - RNA, 22 nt, Artificial Sequence
  Synthetic
ccucaucuucuuguugguucuu

SEQ ID NO: 67181 - RNA, 23 nt, Artificial Sequence
  Synthetic
gccucaucuucuuguugguucuu

SEQ ID NO: 67182 - RNA, 24 nt, Artificial Sequence
  Synthetic
ugccucaucuucuuguugguucuu

SEQ ID NO: 67183 - RNA, 18 nt, Artificial Sequence
  Synthetic
cugcugguggcuccaguu

SEQ ID NO: 67184 - RNA, 19 nt, Artificial Sequence
  Synthetic
ccugcugguggcuccaguu

SEQ ID NO: 67185 - RNA, 20 nt, Artificial Sequence
  Synthetic
uccugcugguggcuccaguu

SEQ ID NO: 67186 - RNA, 21 nt, Artificial Sequence
  Synthetic
uuccugcugguggcuccaguu

SEQ ID NO: 67187 - RNA, 22 nt, Artificial Sequence
  Synthetic
uuuccugcugguggcuccaguu

SEQ ID NO: 67188 - RNA, 23 nt, Artificial Sequence
  Synthetic
uuuuccugcugguggcuccaguu

SEQ ID NO: 67189 - RNA, 24 nt, Artificial Sequence
  Synthetic
auuuuccugcugguggcuccaguu

SEQ ID NO: 67190 - RNA, 18 nt, Artificial Sequence
  Synthetic
cauuucuugucucacuuu

SEQ ID NO: 67191 - RNA, 19 nt, Artificial Sequence
  Synthetic
acauuucuugucucacuuu

SEQ ID NO: 67192 - RNA, 20 nt, Artificial Sequence
  Synthetic
cacauuucuugucucacuuu

SEQ ID NO: 67193 - RNA, 21 nt, Artificial Sequence
  Synthetic
ucacauuucuugucucacuuu

SEQ ID NO: 67194 - RNA, 22 nt, Artificial Sequence
  Synthetic
uucacauuucuugucucacuuu

SEQ ID NO: 67195 - RNA, 23 nt, Artificial Sequence
  Synthetic
uuucacauuucuugucucacuuu

SEQ ID NO: 67196 - RNA, 24 nt, Artificial Sequence
  Synthetic
guuucacauuucuugucucacuuu

SEQ ID NO: 67197 - RNA, 18 nt, Artificial Sequence
  Synthetic
cccaaucacuccaccuuu

SEQ ID NO: 67198 - RNA, 19 nt, Artificial Sequence
  Synthetic
ccccaaucacuccaccuuu

SEQ ID NO: 67199 - RNA, 20 nt, Artificial Sequence
  Synthetic
accccaaucacuccaccuuu

SEQ ID NO: 67200 - RNA, 21 nt, Artificial Sequence
  Synthetic
uaccccaaucacuccaccuuu

SEQ ID NO: 67201 - RNA, 22 nt, Artificial Sequence
  Synthetic
cuaccccaaucacuccaccuuu

SEQ ID NO: 67202 - RNA, 23 nt, Artificial Sequence
  Synthetic
ccuaccccaaucacuccaccuuu

SEQ ID NO: 67203 - RNA, 24 nt, Artificial Sequence
  Synthetic
gccuaccccaaucacuccaccuuu

SEQ ID NO: 67204 - RNA, 18 nt, Artificial Sequence
  Synthetic
cccaucaucaugggcuuu

SEQ ID NO: 67205 - RNA, 19 nt, Artificial Sequence
  Synthetic
ucccaucaucaugggcuuu

SEQ ID NO: 67206 - RNA, 20 nt, Artificial Sequence
  Synthetic
aucccaucaucaugggcuuu

SEQ ID NO: 67207 - RNA, 21 nt, Artificial Sequence
  Synthetic
caucccaucaucaugggcuuu

SEQ ID NO: 67208 - RNA, 22 nt, Artificial Sequence
  Synthetic
ccaucccaucaucaugggcuuu

SEQ ID NO: 67209 - RNA, 23 nt, Artificial Sequence
  Synthetic
cccaucccaucaucaugggcuuu

SEQ ID NO: 67210 - RNA, 24 nt, Artificial Sequence
  Synthetic
ucccaucccaucaucaugggcuuu

SEQ ID NO: 67211 - RNA, 18 nt, Artificial Sequence
  Synthetic
gaaaaucaaagacuguuu

SEQ ID NO: 67212 - RNA, 19 nt, Artificial Sequence
  Synthetic
ugaaaaucaaagacuguuu

SEQ ID NO: 67213 - RNA, 20 nt, Artificial Sequence
  Synthetic
  misc_feature (1)..(1): n is a, c, g, or u
nugaaaaucaaagacuguuu

SEQ ID NO: 67214 - RNA, 21 nt, Artificial Sequence
  Synthetic
  misc_feature (2)..(2): n is a, c, g, or u
anugaaaaucaaagacuguuu

SEQ ID NO: 67215 - RNA, 22 nt, Artificial Sequence
  Synthetic
  misc_feature (3)..(3): n is a, c, g, or u
ganugaaaaucaaagacuguuu

SEQ ID NO: 67216 - RNA, 23 nt, Artificial Sequence
  Synthetic
  misc_feature (4)..(4): n is a, c, g, or u
aganugaaaaucaaagacuguuu

SEQ ID NO: 67217 - RNA, 24 nt, Artificial Sequence
  Synthetic
  misc_feature (5)..(5): n is a, c, g, or u
caganugaaaaucaaagacuguuu

SEQ ID NO: 67218 - RNA, 18 nt, Artificial Sequence
  Synthetic
cacaaggugggaaauuuu

SEQ ID NO: 67219 - RNA, 19 nt, Artificial Sequence
  Synthetic
ucacaaggugggaaauuuu

SEQ ID NO: 67220 - RNA, 20 nt, Artificial Sequence
  Synthetic
cucacaaggugggaaauuuu

SEQ ID NO: 67221 - RNA, 21 nt, Artificial Sequence
  Synthetic
acucacaaggugggaaauuuu

SEQ ID NO: 67222 - RNA, 22 nt, Artificial Sequence
  Synthetic
gacucacaaggugggaaauuuu

SEQ ID NO: 67223 - RNA, 23 nt, Artificial Sequence
  Synthetic
ggacucacaaggugggaaauuuu

SEQ ID NO: 67224 - RNA, 24 nt, Artificial Sequence
  Synthetic
uggacucacaaggugggaaauuuu

SEQ ID NO: 67225 - RNA, 22 nt, Artificial Sequence
  Synthetic
gauaguccagaagaaccaacaa

SEQ ID NO: 67226 - RNA, 21 nt, Artificial Sequence
  Synthetic
  misc_feature (5)..(5): n is a, c, g, or u
gaccnggccguugccgggcaa

SEQ ID NO: 67227 - RNA, 23 nt, Artificial Sequence
  Synthetic
gauguagcucuuguucccaagaa

SEQ ID NO: 67228 - RNA, 21 nt, Artificial Sequence
  Synthetic
gaagaucucuuacugaaggaa

SEQ ID NO: 67229 - RNA, 23 nt, Artificial Sequence
  Synthetic
gcuugaacaguaggacaugaaca

SEQ ID NO: 67230 - RNA, 24 nt, Artificial Sequence
  Synthetic
ggcuugaacaguaggacaugaaca

SEQ ID NO: 67231 - RNA, 21 nt, Artificial Sequence
  Synthetic
gguggucgggaaaaaauccca

SEQ ID NO: 67232 - RNA, 23 nt, Artificial Sequence
  Synthetic
guuugcucugaaugcuggaucca

SEQ ID NO: 67233 - RNA, 21 nt, Artificial Sequence
  Synthetic
gcagaggugaagcgaagugca

SEQ ID NO: 67234 - RNA, 23 nt, Artificial Sequence
  Synthetic
gugcagaggugaagcgaagugca

SEQ ID NO: 67235 - RNA, 22 nt, Artificial Sequence
  Synthetic
gaacaguaggacaugaacaaga

SEQ ID NO: 67236 - RNA, 18 nt, Artificial Sequence
  Synthetic
ggccuuguaaguuggcga

SEQ ID NO: 67237 - RNA, 22 nt, Artificial Sequence
  Synthetic
gaaaggccuuguaaguuggcga

SEQ ID NO: 67238 - RNA, 21 nt, Artificial Sequence
  Synthetic
ggauccaacugguggucggga

SEQ ID NO: 67239 - RNA, 24 nt, Artificial Sequence
  Synthetic
gcuggauccaacugguggucggga

SEQ ID NO: 67240 - RNA, 21 nt, Artificial Sequence
  Synthetic
gcacagccuagcagccaugga

SEQ ID NO: 67241 - RNA, 24 nt, Artificial Sequence
  Synthetic
gcagcacagccuagcagccaugga

SEQ ID NO: 67242 - RNA, 21 nt, Artificial Sequence
  Synthetic
guaaauagugucugguuugga

SEQ ID NO: 67243 - RNA, 21 nt, Artificial Sequence
  Synthetic
gaaagcccggcgaaccacuga

SEQ ID NO: 67244 - RNA, 22 nt, Artificial Sequence
  Synthetic
ggaaagcccggcgaaccacuga

SEQ ID NO: 67245 - RNA, 23 nt, Artificial Sequence
  Synthetic
gggaaagcccggcgaaccacuga

SEQ ID NO: 67246 - RNA, 24 nt, Artificial Sequence
  Synthetic
ggggaaagcccggcgaaccacuga

SEQ ID NO: 67247 - RNA, 21 nt, Artificial Sequence
  Synthetic
ggcaucccgauacagagcuga

SEQ ID NO: 67248 - RNA, 21 nt, Artificial Sequence
  Synthetic
gaagauugacgagaugaguga

SEQ ID NO: 67249 - RNA, 23 nt, Artificial Sequence
  Synthetic
gagaagauugacgagaugaguga

SEQ ID NO: 67250 - RNA, 24 nt, Artificial Sequence
  Synthetic
guccccaauccucgagaagauuga

SEQ ID NO: 67251 - RNA, 21 nt, Artificial Sequence
  Synthetic
gacacacgggagcucccccua

SEQ ID NO: 67252 - RNA, 19 nt, Artificial Sequence
  Synthetic
gccuuccauaggguaugua

SEQ ID NO: 67253 - RNA, 20 nt, Artificial Sequence
  Synthetic
gaccugccucuucgucuaac

SEQ ID NO: 67254 - RNA, 23 nt, Artificial Sequence
  Synthetic
guauggaucggcagaggagccac

SEQ ID NO: 67255 - RNA, 22 nt, Artificial Sequence
  Synthetic
gcaagauuuggugggcguucac

SEQ ID NO: 67256 - RNA, 23 nt, Artificial Sequence
  Synthetic
ggcaagauuuggugggcguucac

SEQ ID NO: 67257 - RNA, 24 nt, Artificial Sequence
  Synthetic
gggcaagauuuggugggcguucac

SEQ ID NO: 67258 - RNA, 21 nt, Artificial Sequence
  Synthetic
gaaaauugagagaaguccacc

SEQ ID NO: 67259 - RNA, 22 nt, Artificial Sequence
  Synthetic
gagggaccguccaagaaagccc

SEQ ID NO: 67260 - RNA, 24 nt, Artificial Sequence
  Synthetic
gagagggaccguccaagaaagccc

SEQ ID NO: 67261 - RNA, 24 nt, Artificial Sequence
  Synthetic
gaccgcguaaagagaggugcgccc

SEQ ID NO: 67262 - RNA, 23 nt, Artificial Sequence
  Synthetic
gauaaaacgccgcagacacaucc

SEQ ID NO: 67263 - RNA, 20 nt, Artificial Sequence
  Synthetic
guacuggugguugaugaucc

SEQ ID NO: 67264 - RNA, 23 nt, Artificial Sequence
  Synthetic
  misc_feature (15)..(15): n is a, c, g, or u
gucguugacauugcngagagucc

SEQ ID NO: 67265 - RNA, 24 nt, Artificial Sequence
  Synthetic
  misc_feature (16)..(16): n is a, c, g, or u
ggucguugacauugcngagagucc

SEQ ID NO: 67266 - RNA, 23 nt, Artificial Sequence
  Synthetic
gaauacaagugcaauuuccgucc

SEQ ID NO: 67267 - RNA, 24 nt, Artificial Sequence
  Synthetic
ggaauacaagugcaauuuccgucc

SEQ ID NO: 67268 - RNA, 22 nt, Artificial Sequence
  Synthetic
gacauaacugacuacuaggucc

SEQ ID NO: 67269 - RNA, 22 nt, Artificial Sequence
  Synthetic
gaaacauagagguuccuugagc

SEQ ID NO: 67270 - RNA, 23 nt, Artificial Sequence
  Synthetic
ggaaacauagagguuccuugagc

SEQ ID NO: 67271 - RNA, 24 nt, Artificial Sequence
  Synthetic
gggaaacauagagguuccuugagc

SEQ ID NO: 67272 - RNA, 21 nt, Artificial Sequence
  Synthetic
gauugacgagaugagugaggc

SEQ ID NO: 67273 - RNA, 24 nt, Artificial Sequence
  Synthetic
gaagauugacgagaugagugaggc

SEQ ID NO: 67274 - RNA, 24 nt, Artificial Sequence
  Synthetic
gacaugaacaagagaugauuaggc

SEQ ID NO: 67275 - RNA, 19 nt, Artificial Sequence
  Synthetic
gaaccacugaacaaauggc

SEQ ID NO: 67276 - RNA, 21 nt, Artificial Sequence
  Synthetic
gcgaaccacugaacaaauggc

SEQ ID NO: 67277 - RNA, 22 nt, Artificial Sequence
  Synthetic
ggcgaaccacugaacaaauggc

SEQ ID NO: 67278 - RNA, 22 nt, Artificial Sequence
  Synthetic
  misc_feature (15)..(15): n is a, c, g, or u
gccacaaagguuccncgcaugc

SEQ ID NO: 67279 - RNA, 24 nt, Artificial Sequence
  Synthetic
  misc_feature (17)..(17): n is a, c, g, or u
gagccacaaagguuccncgcaugc

SEQ ID NO: 67280 - RNA, 21 nt, Artificial Sequence
  Synthetic
ggcgagaaagugaaagccugc

SEQ ID NO: 67281 - RNA, 24 nt, Artificial Sequence
  Synthetic
guuggcgagaaagugaaagccugc

SEQ ID NO: 67282 - RNA, 18 nt, Artificial Sequence
  Synthetic
ggucuccaugcgacgugc

SEQ ID NO: 67283 - RNA, 20 nt, Artificial Sequence
  Synthetic
guggucuccaugcgacgugc

SEQ ID NO: 67284 - RNA, 24 nt, Artificial Sequence
  Synthetic
gcuuuccauguucggugcaggguc

SEQ ID NO: 67285 - RNA, 23 nt, Artificial Sequence
  Synthetic
gcaaaacaagcggcuaggaguuc

SEQ ID NO: 67286 - RNA, 20 nt, Artificial Sequence
  Synthetic
gacggggagaccgcguaaag

SEQ ID NO: 67287 - RNA, 21 nt, Artificial Sequence
  Synthetic
guuuuccaguuaggauuaaag

SEQ ID NO: 67288 - RNA, 23 nt, Artificial Sequence
  Synthetic
gaguuuuccaguuaggauuaaag

SEQ ID NO: 67289 - RNA, 24 nt, Artificial Sequence
  Synthetic
ggaguuuuccaguuaggauuaaag

SEQ ID NO: 67290 - RNA, 22 nt, Artificial Sequence
  Synthetic
gaugaugggaugggaauacaag

SEQ ID NO: 67291 - RNA, 19 nt, Artificial Sequence
  Synthetic
gcgacgugcagaggugaag

SEQ ID NO: 67292 - RNA, 22 nt, Artificial Sequence
  Synthetic
gagcucccccuagaaaauugag

SEQ ID NO: 67293 - RNA, 23 nt, Artificial Sequence
  Synthetic
ggagcucccccuagaaaauugag

SEQ ID NO: 67294 - RNA, 24 nt, Artificial Sequence
  Synthetic
gggagcucccccuagaaaauugag

SEQ ID NO: 67295 - RNA, 23 nt, Artificial Sequence
  Synthetic
  misc_feature (7)..(7): n is a, c, g, or u
gacccanaaaaugaggcgcuacg

SEQ ID NO: 67296 - RNA, 19 nt, Artificial Sequence
  Synthetic
  misc_feature (13)..(13): n is a, c, g, or u
gacagaauuaucngucccg

SEQ ID NO: 67297 - RNA, 23 nt, Artificial Sequence
  Synthetic
  misc_feature (17)..(17): n is a, c, g, or u
gaacgacagaauuaucngucccg

SEQ ID NO: 67298 - RNA, 23 nt, Artificial Sequence
  Synthetic
guaggcugccuuccugacugccg

SEQ ID NO: 67299 - RNA, 24 nt, Artificial Sequence
  Synthetic
gguaggcugccuuccugacugccg

SEQ ID NO: 67300 - RNA, 19 nt, Artificial Sequence
  Synthetic
gcgaagugcacacgguccg

SEQ ID NO: 67301 - RNA, 22 nt, Artificial Sequence
  Synthetic
gaagcgaagugcacacgguccg

SEQ ID NO: 67302 - RNA, 24 nt, Artificial Sequence
  Synthetic
gugaagcgaagugcacacgguccg

SEQ ID NO: 67303 - RNA, 18 nt, Artificial Sequence
  Synthetic
gacaaaggacgucccucg

SEQ ID NO: 67304 - RNA, 23 nt, Artificial Sequence
  Synthetic
guagcuccaaauucuuuauaagg

SEQ ID NO: 67305 - RNA, 22 nt, Artificial Sequence
  Synthetic
gacacauccagcgauagccagg

SEQ ID NO: 67306 - RNA, 21 nt, Artificial Sequence
  Synthetic
gcaagagucgugcagguucgg

SEQ ID NO: 67307 - RNA, 23 nt, Artificial Sequence
  Synthetic
gagcaagagucgugcagguucgg

SEQ ID NO: 67308 - RNA, 23 nt, Artificial Sequence
  Synthetic
guccucuuauguaagaccuuggg

SEQ ID NO: 67309 - RNA, 23 nt, Artificial Sequence
  Synthetic
gcauuugguggucuauaagcugg

SEQ ID NO: 67310 - RNA, 24 nt, Artificial Sequence
  Synthetic
ggcauuugguggucuauaagcugg

SEQ ID NO: 67311 - RNA, 24 nt, Artificial Sequence
  Synthetic
gaaaaaaucccagaggauuggugg

SEQ ID NO: 67312 - RNA, 23 nt, Artificial Sequence
  Synthetic
guaaugauuaacuacauuaucug

SEQ ID NO: 67313 - RNA, 19 nt, Artificial Sequence
  Synthetic
gcagggucccguacuggug

SEQ ID NO: 67314 - RNA, 20 nt, Artificial Sequence
  Synthetic
ggcagggucccguacuggug

SEQ ID NO: 67315 - RNA, 19 nt, Artificial Sequence
  Synthetic
  misc_feature (19)..(19): n is a, c, g, or u
gucggucguugacauugcn

SEQ ID NO: 67316 - RNA, 20 nt, Artificial Sequence
  Synthetic
  misc_feature (20)..(20): n is a, c, g, or u
ggucggucguugacauugcn

SEQ ID NO: 67317 - RNA, 21 nt, Artificial Sequence
  Synthetic
gaaagcccaugaugaugggau

SEQ ID NO: 67318 - RNA, 21 nt, Artificial Sequence
  Synthetic
gucucucaaagguggagugau

SEQ ID NO: 67319 - RNA, 23 nt, Artificial Sequence
  Synthetic
gugucucucaaagguggagugau

SEQ ID NO: 67320 - RNA, 23 nt, Artificial Sequence
  Synthetic
gaugcccgccuuccauaggguau

SEQ ID NO: 67321 - RNA, 20 nt, Artificial Sequence
  Synthetic
guucggcagggucccguacu

SEQ ID NO: 67322 - RNA, 20 nt, Artificial Sequence
  Synthetic
guaacacgagcagggguccu

SEQ ID NO: 67323 - RNA, 24 nt, Artificial Sequence
  Synthetic
gccuguaacacgagcagggguccu

SEQ ID NO: 67324 - RNA, 21 nt, Artificial Sequence
  Synthetic
gagaguaacuccacaguagcu

SEQ ID NO: 67325 - RNA, 19 nt, Artificial Sequence
  Synthetic
gcgagcaaaacaagcggcu

SEQ ID NO: 67326 - RNA, 22 nt, Artificial Sequence
  Synthetic
gcugcgagcaaaacaagcggcu

SEQ ID NO: 67327 - RNA, 24 nt, Artificial Sequence
  Synthetic
guaaauagugucugguuuggaagu

SEQ ID NO: 67328 - RNA, 22 nt, Artificial Sequence
  Synthetic
guggucuauaagcuggaggagu

SEQ ID NO: 67329 - RNA, 23 nt, Artificial Sequence
  Synthetic
gguggucuauaagcuggaggagu

SEQ ID NO: 67330 - RNA, 18 nt, Artificial Sequence
  Synthetic
gguucggcagggucccgu

SEQ ID NO: 67331 - RNA, 20 nt, Artificial Sequence
  Synthetic
guuccuugagcaagagucgu

SEQ ID NO: 67332 - RNA, 21 nt, Artificial Sequence
  Synthetic
gguuccuugagcaagagucgu

SEQ ID NO: 67333 - RNA, 23 nt, Artificial Sequence
  Synthetic
gagguuccuugagcaagagucgu

SEQ ID NO: 67334 - RNA, 18 nt, Artificial Sequence
  Synthetic
guugccgggcaacggggu

SEQ ID NO: 67335 - RNA, 21 nt, Artificial Sequence
  Synthetic
gccguugccgggcaacggggu

SEQ ID NO: 67336 - RNA, 22 nt, Artificial Sequence
  Synthetic
ggccguugccgggcaacggggu

SEQ ID NO: 67337 - RNA, 21 nt, Artificial Sequence
  Synthetic
gaggugaaaaaguugcauggu

SEQ ID NO: 67338 - RNA, 24 nt, Artificial Sequence
  Synthetic
gcagaggugaaaaaguugcauggu

SEQ ID NO: 67339 - RNA, 21 nt, Artificial Sequence
  Synthetic
gucuagacucugcgguauugu

SEQ ID NO: 67340 - RNA, 23 nt, Artificial Sequence
  Synthetic
gagucuagacucugcgguauugu

SEQ ID NO: 67341 - RNA, 22 nt, Artificial Sequence
  Synthetic
gauuguggucccaaucuggauu

SEQ ID NO: 67342 - RNA, 23 nt, Artificial Sequence
  Synthetic
ggauuguggucccaaucuggauu

SEQ ID NO: 67343 - RNA, 24 nt, Artificial Sequence
  Synthetic
gggauuguggucccaaucuggauu

SEQ ID NO: 67344 - RNA, 24 nt, Artificial Sequence
  Synthetic
  misc_feature (13)..(13): n is a, c, g, or u
gacccacaauucnuugacauacuu

SEQ ID NO: 67345 - RNA, 22 nt, Artificial Sequence
  Synthetic
gccccguaaaauuucccaccuu

SEQ ID NO: 67346 - RNA, 21 nt, Artificial Sequence
  Synthetic
ggucccuggaugcuggaucuu

SEQ ID NO: 67347 - RNA, 21 nt, Artificial Sequence
  Synthetic
gggcaagauuuggugggcguu

SEQ ID NO: 67348 - RNA, 18 nt, Artificial Sequence
  Synthetic
ggucccguacuggugguu

SEQ ID NO: 67349 - RNA, 19 nt, Artificial Sequence
  Synthetic
gggucccguacuggugguu

SEQ ID NO: 67350 - RNA, 22 nt, Artificial Sequence
  Synthetic
gcagggucccguacuggugguu

SEQ ID NO: 67351 - RNA, 23 nt, Artificial Sequence
  Synthetic
ggcagggucccguacuggugguu

SEQ ID NO: 67352 - RNA, 21 nt, Artificial Sequence
  Synthetic
guugauaagauaggggcauuu

SEQ ID NO: 67353 - RNA, 23 nt, Artificial Sequence
  Synthetic
guguugauaagauaggggcauuu

SEQ ID NO: 67354 - RNA, 22 nt, Artificial Sequence
  Synthetic
guauguaaauagugucugguuu

SEQ ID NO: 67355 - RNA, 23 nt, Artificial Sequence
  Synthetic
gguauguaaauagugucugguuu

SEQ ID NO: 67356 - RNA, 24 nt, Artificial Sequence
  Synthetic
ggguauguaaauagugucugguuu

SEQ ID NO: 67357 - RNA, 21 nt, Artificial Sequence
  Synthetic
gcugcuaggcugugcugccaa

SEQ ID NO: 67358 - RNA, 22 nt, Artificial Sequence
  Synthetic
ggcugcuaggcugugcugccaa

SEQ ID NO: 67359 - RNA, 23 nt, Artificial Sequence
  Synthetic
guacuaggaggcuguaggcauaa

SEQ ID NO: 67360 - RNA, 24 nt, Artificial Sequence
  Synthetic
gaacaauuuguagguccucuaaca

SEQ ID NO: 67361 - RNA, 23 nt, Artificial Sequence
  Synthetic
gcacuccuccagcuuauagacca

SEQ ID NO: 67362 - RNA, 18 nt, Artificial Sequence
  Synthetic
gaccaccgugaacgccca

SEQ ID NO: 67363 - RNA, 20 nt, Artificial Sequence
  Synthetic
gagaccaccgugaacgccca

SEQ ID NO: 67364 - RNA, 21 nt, Artificial Sequence
  Synthetic
ggagaccaccgugaacgccca

SEQ ID NO: 67365 - RNA, 21 nt, Artificial Sequence
  Synthetic
gagacacucauccucaggcca

SEQ ID NO: 67366 - RNA, 23 nt, Artificial Sequence
  Synthetic
gagagacacucauccucaggcca

SEQ ID NO: 67367 - RNA, 19 nt, Artificial Sequence
  Synthetic
gccgcuuguuuugcucgca

SEQ ID NO: 67368 - RNA, 21 nt, Artificial Sequence
  Synthetic
ggaagauccagcauccaggga

SEQ ID NO: 67369 - RNA, 24 nt, Artificial Sequence
  Synthetic
gcaagccauucuuugcugggggga

SEQ ID NO: 67370 - RNA, 24 nt, Artificial Sequence
  Synthetic
gauccagcauccagggaccuagua

SEQ ID NO: 67371 - RNA, 18 nt, Artificial Sequence
  Synthetic
ggggcgcaccucucuuua

SEQ ID NO: 67372 - RNA, 24 nt, Artificial Sequence
  Synthetic
gaccacggggcgcaccucucuuua

SEQ ID NO: 67373 - RNA, 24 nt, Artificial Sequence
  Synthetic
guccucuaacaguaaaugaaaaac

SEQ ID NO: 67374 - RNA, 21 nt, Artificial Sequence
  Synthetic
gaacucccucgccucgcagac

SEQ ID NO: 67375 - RNA, 24 nt, Artificial Sequence
  Synthetic
gaagaacucccucgccucgcagac

SEQ ID NO: 67376 - RNA, 23 nt, Artificial Sequence
  Synthetic
guugcuguucaaaaccuucggac

SEQ ID NO: 67377 - RNA, 18 nt, Artificial Sequence
  Synthetic
gggguuuuucuuguugac

SEQ ID NO: 67378 - RNA, 20 nt, Artificial Sequence
  Synthetic
gcgggguuuuucuuguugac

SEQ ID NO: 67379 - RNA, 21 nt, Artificial Sequence
  Synthetic
ggcgggguuuuucuuguugac

SEQ ID NO: 67380 - RNA, 21 nt, Artificial Sequence
  Synthetic
gcagucaggaaggcagccuac

SEQ ID NO: 67381 - RNA, 22 nt, Artificial Sequence
  Synthetic
ggcagucaggaaggcagccuac

SEQ ID NO: 67382 - RNA, 24 nt, Artificial Sequence
  Synthetic
gauccagcauucagagcaaacacc

SEQ ID NO: 67383 - RNA, 24 nt, Artificial Sequence
  Synthetic
gaaugggggaagaaucauuccacc

SEQ ID NO: 67384 - RNA, 24 nt, Artificial Sequence
  Synthetic
guuaugucaauacuaauaugggcc

SEQ ID NO: 67385 - RNA, 22 nt, Artificial Sequence
  Synthetic
guucaagccuccaagcugugcc

SEQ ID NO: 67386 - RNA, 22 nt, Artificial Sequence
  Synthetic
guaggagugggagcauucgggc

SEQ ID NO: 67387 - RNA, 23 nt, Artificial Sequence
  Synthetic
gguaggagugggagcauucgggc

SEQ ID NO: 67388 - RNA, 23 nt, Artificial Sequence
  Synthetic
gccuguauuuuccugcugguggc

SEQ ID NO: 67389 - RNA, 24 nt, Artificial Sequence
  Synthetic
ggccuguauuuuccugcugguggc

SEQ ID NO: 67390 - RNA, 21 nt, Artificial Sequence
  Synthetic
ggagcucccgugugucuuggc

SEQ ID NO: 67391 - RNA, 22 nt, Artificial Sequence
  Synthetic
gggagcucccgugugucuuggc

SEQ ID NO: 67392 - RNA, 23 nt, Artificial Sequence
  Synthetic
ggggagcucccgugugucuuggc

SEQ ID NO: 67393 - RNA, 24 nt, Artificial Sequence
  Synthetic
gggggagcucccgugugucuuggc

SEQ ID NO: 67394 - RNA, 21 nt, Artificial Sequence
  Synthetic
gggccaagucuguacaacauc

SEQ ID NO: 67395 - RNA, 22 nt, Artificial Sequence
  Synthetic
ggggccaagucuguacaacauc

SEQ ID NO: 67396 - RNA, 23 nt, Artificial Sequence
  Synthetic
gggggccaagucuguacaacauc

SEQ ID NO: 67397 - RNA, 21 nt, Artificial Sequence
  Synthetic
ggcuuucuuggacggucccuc

SEQ ID NO: 67398 - RNA, 22 nt, Artificial Sequence
  Synthetic
gggcuuucuuggacggucccuc

SEQ ID NO: 67399 - RNA, 23 nt, Artificial Sequence
  Synthetic
ggggcuuucuuggacggucccuc

SEQ ID NO: 67400 - RNA, 18 nt, Artificial Sequence
  Synthetic
gucuacgucccgucagcg

SEQ ID NO: 67401 - RNA, 21 nt, Artificial Sequence
  Synthetic
gaccccugcucguguuacagg

SEQ ID NO: 67402 - RNA, 22 nt, Artificial Sequence
  Synthetic
ggaccccugcucguguuacagg

SEQ ID NO: 67403 - RNA, 20 nt, Artificial Sequence
  Synthetic
gcugguggcuccaguuccgg

SEQ ID NO: 67404 - RNA, 18 nt, Artificial Sequence
  Synthetic
gucccucucgaauggggg

SEQ ID NO: 67405 - RNA, 19 nt, Artificial Sequence
  Synthetic
ggucccucucgaauggggg

SEQ ID NO: 67406 - RNA, 21 nt, Artificial Sequence
  Synthetic
gauuaaacuuagucaugccug

SEQ ID NO: 67407 - RNA, 24 nt, Artificial Sequence
  Synthetic
gaagauuaaacuuagucaugccug

SEQ ID NO: 67408 - RNA, 23 nt, Artificial Sequence
  Synthetic
  misc_feature (15)..(15): n is a, c, g, or u
gcccggcaacggccnggucugug

SEQ ID NO: 67409 - RNA, 22 nt, Artificial Sequence
  Synthetic
gcuacaucauggggcuuucuug

SEQ ID NO: 67410 - RNA, 24 nt, Artificial Sequence
  Synthetic
gagcuacaucauggggcuuucuug

SEQ ID NO: 67411 - RNA, 24 nt, Artificial Sequence
  Synthetic
gaucucaaucuccagcuucccaau

SEQ ID NO: 67412 - RNA, 24 nt, Artificial Sequence
  Synthetic
gaccuaguagucaguuaugucaau

SEQ ID NO: 67413 - RNA, 19 nt, Artificial Sequence
  Synthetic
gcuuucggaaaauuccuau

SEQ ID NO: 67414 - RNA, 20 nt, Artificial Sequence
  Synthetic
ggcuuucggaaaauuccuau

SEQ ID NO: 67415 - RNA, 21 nt, Artificial Sequence
  Synthetic
gggcuuucggaaaauuccuau

SEQ ID NO: 67416 - RNA, 21 nt, Artificial Sequence
  Synthetic
gauaccgccucagcucuguau

SEQ ID NO: 67417 - RNA, 21 nt, Artificial Sequence
  Synthetic
gccuaaaguucaggcaauuau

SEQ ID NO: 67418 - RNA, 22 nt, Artificial Sequence
  Synthetic
ggccuaaaguucaggcaauuau

SEQ ID NO: 67419 - RNA, 23 nt, Artificial Sequence
  Synthetic
gggccuaaaguucaggcaauuau

SEQ ID NO: 67420 - RNA, 18 nt, Artificial Sequence
  Synthetic
gaccuaguagucaguuau

SEQ ID NO: 67421 - RNA, 19 nt, Artificial Sequence
  Synthetic
ggaccuaguagucaguuau

SEQ ID NO: 67422 - RNA, 20 nt, Artificial Sequence
  Synthetic
gggaccuaguagucaguuau

SEQ ID NO: 67423 - RNA, 23 nt, Artificial Sequence
  Synthetic
gaagauccagcauccagggaccu

SEQ ID NO: 67424 - RNA, 24 nt, Artificial Sequence
  Synthetic
ggaagauccagcauccagggaccu

SEQ ID NO: 67425 - RNA, 23 nt, Artificial Sequence
  Synthetic
  misc_feature (17)..(17): n is a, c, g, or u
gaaaacucccuguuaancggccu

SEQ ID NO: 67426 - RNA, 21 nt, Artificial Sequence
  Synthetic
guaagaggccuguauuuuccu

SEQ ID NO: 67427 - RNA, 23 nt, Artificial Sequence
  Synthetic
gaguaagaggccuguauuuuccu

SEQ ID NO: 67428 - RNA, 21 nt, Artificial Sequence
  Synthetic
gcuuucccccacugucuggcu

SEQ ID NO: 67429 - RNA, 22 nt, Artificial Sequence
  Synthetic
ggcuuucccccacugucuggcu

SEQ ID NO: 67430 - RNA, 23 nt, Artificial Sequence
  Synthetic
gggcuuucccccacugucuggcu

SEQ ID NO: 67431 - RNA, 20 nt, Artificial Sequence
  Synthetic
gaacaauuuguagguccucu

SEQ ID NO: 67432 - RNA, 22 nt, Artificial Sequence
  Synthetic
gugaacaauuuguagguccucu

SEQ ID NO: 67433 - RNA, 18 nt, Artificial Sequence
  Synthetic
gacucgugguggacuucu

SEQ ID NO: 67434 - RNA, 23 nt, Artificial Sequence
  Synthetic
gucuagacucgugguggacuucu

SEQ ID NO: 67435 - RNA, 21 nt, Artificial Sequence
  Synthetic
gaagaucucaaucuccagcuu

SEQ ID NO: 67436 - RNA, 24 nt, Artificial Sequence
  Synthetic
gcagaagaucucaaucuccagcuu

SEQ ID NO: 67437 - RNA, 21 nt, Artificial Sequence
  Synthetic
gcugcuaugccucaucuucuu

SEQ ID NO: 67438 - RNA, 21 nt, Artificial Sequence
  Synthetic
gagucccuuuauaccucuguu

SEQ ID NO: 67439 - RNA, 23 nt, Artificial Sequence
  Synthetic
  misc_feature (4)..(4): n is a, c, g, or u
gucnuagaguauuuggugucuuu

SEQ ID NO: 67440 - RNA, 21 nt, Artificial Sequence
  Synthetic
auaguccagaagaaccaacaa

SEQ ID NO: 67441 - RNA, 23 nt, Artificial Sequence
  Synthetic
ugauaguccagaagaaccaacaa

SEQ ID NO: 67442 - RNA, 24 nt, Artificial Sequence
  Synthetic
uugauaguccagaagaaccaacaa

SEQ ID NO: 67443 - RNA, 22 nt, Artificial Sequence
  Synthetic
  misc_feature (6)..(6): n is a, c, g, or u
agaccnggccguugccgggcaa

SEQ ID NO: 67444 - RNA, 23 nt, Artificial Sequence
  Synthetic
  misc_feature (7)..(7): n is a, c, g, or u
cagaccnggccguugccgggcaa

SEQ ID NO: 67445 - RNA, 24 nt, Artificial Sequence
  Synthetic
  misc_feature (8)..(8): n is a, c, g, or u
acagaccnggccguugccgggcaa

SEQ ID NO: 67446 - RNA, 21 nt, Artificial Sequence
  Synthetic
uguagcucuuguucccaagaa

SEQ ID NO: 67447 - RNA, 22 nt, Artificial Sequence
  Synthetic
auguagcucuuguucccaagaa

SEQ ID NO: 67448 - RNA, 24 nt, Artificial Sequence
  Synthetic
ugauguagcucuuguucccaagaa

SEQ ID NO: 67449 - RNA, 22 nt, Artificial Sequence
  Synthetic
agaagaucucuuacugaaggaa

SEQ ID NO: 67450 - RNA, 23 nt, Artificial Sequence
  Synthetic
uagaagaucucuuacugaaggaa

SEQ ID NO: 67451 - RNA, 24 nt, Artificial Sequence
  Synthetic
cuagaagaucucuuacugaaggaa

SEQ ID NO: 67452 - RNA, 21 nt, Artificial Sequence
  Synthetic
uugaacaguaggacaugaaca

SEQ ID NO: 67453 - RNA, 22 nt, Artificial Sequence
  Synthetic
cuugaacaguaggacaugaaca

SEQ ID NO: 67454 - RNA, 21 nt, Artificial Sequence
  Synthetic
aacuuccaauuacauaaccca

SEQ ID NO: 67455 - RNA, 22 nt, Artificial Sequence
  Synthetic
caacuuccaauuacauaaccca

SEQ ID NO: 67456 - RNA, 23 nt, Artificial Sequence
  Synthetic
ccaacuuccaauuacauaaccca

SEQ ID NO: 67457 - RNA, 24 nt, Artificial Sequence
  Synthetic
cccaacuuccaauuacauaaccca

SEQ ID NO: 67458 - RNA, 22 nt, Artificial Sequence
  Synthetic
ugguggucgggaaaaaauccca

SEQ ID NO: 67459 - RNA, 23 nt, Artificial Sequence
  Synthetic
cugguggucgggaaaaaauccca

SEQ ID NO: 67460 - RNA, 24 nt, Artificial Sequence
  Synthetic
acugguggucgggaaaaaauccca

SEQ ID NO: 67461 - RNA, 21 nt, Artificial Sequence
  Synthetic
cauccauauaacugaaagcca

SEQ ID NO: 67462 - RNA, 22 nt, Artificial Sequence
  Synthetic
ucauccauauaacugaaagcca

SEQ ID NO: 67463 - RNA, 23 nt, Artificial Sequence
  Synthetic
aucauccauauaacugaaagcca

SEQ ID NO: 67464 - RNA, 24 nt, Artificial Sequence
  Synthetic
caucauccauauaacugaaagcca

SEQ ID NO: 67465 - RNA, 21 nt, Artificial Sequence
  Synthetic
uugcucugaaugcuggaucca

SEQ ID NO: 67466 - RNA, 22 nt, Artificial Sequence
  Synthetic
uuugcucugaaugcuggaucca

SEQ ID NO: 67467 - RNA, 24 nt, Artificial Sequence
  Synthetic
uguuugcucugaaugcuggaucca

SEQ ID NO: 67468 - RNA, 21 nt, Artificial Sequence
  Synthetic
auuucccaccuugugagucca

SEQ ID NO: 67469 - RNA, 22 nt, Artificial Sequence
  Synthetic
aauuucccaccuugugagucca

SEQ ID NO: 67470 - RNA, 23 nt, Artificial Sequence
  Synthetic
aaauuucccaccuugugagucca

SEQ ID NO: 67471 - RNA, 24 nt, Artificial Sequence
  Synthetic
aaaauuucccaccuugugagucca

SEQ ID NO: 67472 - RNA, 21 nt, Artificial Sequence
  Synthetic
auauaagaugcccgccuucca

SEQ ID NO: 67473 - RNA, 22 nt, Artificial Sequence
  Synthetic
uauauaagaugcccgccuucca

SEQ ID NO: 67474 - RNA, 23 nt, Artificial Sequence
  Synthetic
uuauauaagaugcccgccuucca

SEQ ID NO: 67475 - RNA, 24 nt, Artificial Sequence
  Synthetic
uuuauauaagaugcccgccuucca

SEQ ID NO: 67476 - RNA, 22 nt, Artificial Sequence
  Synthetic
ugcagaggugaagcgaagugca

SEQ ID NO: 67477 - RNA, 24 nt, Artificial Sequence
  Synthetic
cgugcagaggugaagcgaagugca

SEQ ID NO: 67478 - RNA, 21 nt, Artificial Sequence
  Synthetic
aacaguaggacaugaacaaga

SEQ ID NO: 67479 - RNA, 23 nt, Artificial Sequence
  Synthetic
ugaacaguaggacaugaacaaga

SEQ ID NO: 67480 - RNA, 24 nt, Artificial Sequence
  Synthetic
uugaacaguaggacaugaacaaga

SEQ ID NO: 67481 - RNA, 21 nt, Artificial Sequence
  Synthetic
uauguaagaccuugggcaaga

SEQ ID NO: 67482 - RNA, 22 nt, Artificial Sequence
  Synthetic
uuauguaagaccuugggcaaga

SEQ ID NO: 67483 - RNA, 23 nt, Artificial Sequence
  Synthetic
cuuauguaagaccuugggcaaga

SEQ ID NO: 67484 - RNA, 24 nt, Artificial Sequence
  Synthetic
ucuuauguaagaccuugggcaaga

SEQ ID NO: 67485 - RNA, 19 nt, Artificial Sequence
  Synthetic
aggccuuguaaguuggcga

SEQ ID NO: 67486 - RNA, 20 nt, Artificial Sequence
  Synthetic
aaggccuuguaaguuggcga

SEQ ID NO: 67487 - RNA, 21 nt, Artificial Sequence
  Synthetic
aaaggccuuguaaguuggcga

SEQ ID NO: 67488 - RNA, 23 nt, Artificial Sequence
  Synthetic
agaaaggccuuguaaguuggcga

SEQ ID NO: 67489 - RNA, 24 nt, Artificial Sequence
  Synthetic
cagaaaggccuuguaaguuggcga

SEQ ID NO: 67490 - RNA, 21 nt, Artificial Sequence
  Synthetic
uggugcaaaugaauaucagga

SEQ ID NO: 67491 - RNA, 22 nt, Artificial Sequence
  Synthetic
cuggugcaaaugaauaucagga

SEQ ID NO: 67492 - RNA, 23 nt, Artificial Sequence
  Synthetic
ccuggugcaaaugaauaucagga

SEQ ID NO: 67493 - RNA, 24 nt, Artificial Sequence
  Synthetic
uccuggugcaaaugaauaucagga

SEQ ID NO: 67494 - RNA, 22 nt, Artificial Sequence
  Synthetic
uggauccaacugguggucggga

SEQ ID NO: 67495 - RNA, 23 nt, Artificial Sequence
  Synthetic
cuggauccaacugguggucggga

SEQ ID NO: 67496 - RNA, 22 nt, Artificial Sequence
  Synthetic
agcacagccuagcagccaugga

SEQ ID NO: 67497 - RNA, 23 nt, Artificial Sequence
  Synthetic
cagcacagccuagcagccaugga

SEQ ID NO: 67498 - RNA, 22 nt, Artificial Sequence
  Synthetic
uguaaauagugucugguuugga

SEQ ID NO: 67499 - RNA, 23 nt, Artificial Sequence
  Synthetic
auguaaauagugucugguuugga

SEQ ID NO: 67500 - RNA, 24 nt, Artificial Sequence
  Synthetic
uauguaaauagugucugguuugga

SEQ ID NO: 67501 - RNA, 22 nt, Artificial Sequence
  Synthetic
aggcaucccgauacagagcuga

SEQ ID NO: 67502 - RNA, 23 nt, Artificial Sequence
  Synthetic
aaggcaucccgauacagagcuga

SEQ ID NO: 67503 - RNA, 24 nt, Artificial Sequence
  Synthetic
uaaggcaucccgauacagagcuga

SEQ ID NO: 67504 - RNA, 22 nt, Artificial Sequence
  Synthetic
agaagauugacgagaugaguga

SEQ ID NO: 67505 - RNA, 24 nt, Artificial Sequence
  Synthetic
cgagaagauugacgagaugaguga

SEQ ID NO: 67506 - RNA, 21 nt, Artificial Sequence
  Synthetic
cccaauccucgagaagauuga

SEQ ID NO: 67507 - RNA, 22 nt, Artificial Sequence
  Synthetic
ccccaauccucgagaagauuga

SEQ ID NO: 67508 - RNA, 23 nt, Artificial Sequence
  Synthetic
uccccaauccucgagaagauuga

SEQ ID NO: 67509 - RNA, 21 nt, Artificial Sequence
  Synthetic
  misc_feature (5)..(5): n is a, c, g, or u
aguanucuccggaaguguuga

SEQ ID NO: 67510 - RNA, 22 nt, Artificial Sequence
  Synthetic
  misc_feature (6)..(6): n is a, c, g, or u
caguanucuccggaaguguuga

SEQ ID NO: 67511 - RNA, 23 nt, Artificial Sequence
  Synthetic
  misc_feature (7)..(7): n is a, c, g, or u
acaguanucuccggaaguguuga

SEQ ID NO: 67512 - RNA, 24 nt, Artificial Sequence
  Synthetic
  misc_feature (8)..(8): n is a, c, g, or u
aacaguanucuccggaaguguuga

SEQ ID NO: 67513 - RNA, 18 nt, Artificial Sequence
  Synthetic
acacgggagcucccccua

SEQ ID NO: 67514 - RNA, 19 nt, Artificial Sequence
  Synthetic
cacacgggagcucccccua

SEQ ID NO: 67515 - RNA, 20 nt, Artificial Sequence
  Synthetic
acacacgggagcucccccua

SEQ ID NO: 67516 - RNA, 22 nt, Artificial Sequence
  Synthetic
agacacacgggagcucccccua

SEQ ID NO: 67517 - RNA, 23 nt, Artificial Sequence
  Synthetic
aagacacacgggagcucccccua

SEQ ID NO: 67518 - RNA, 24 nt, Artificial Sequence
  Synthetic
caagacacacgggagcucccccua

SEQ ID NO: 67519 - RNA, 18 nt, Artificial Sequence
  Synthetic
ccuuccauaggguaugua

SEQ ID NO: 67520 - RNA, 20 nt, Artificial Sequence
  Synthetic
cgccuuccauaggguaugua

SEQ ID NO: 67521 - RNA, 18 nt, Artificial Sequence
  Synthetic
ccugccucuucgucuaac

SEQ ID NO: 67522 - RNA, 19 nt, Artificial Sequence
  Synthetic
accugccucuucgucuaac

SEQ ID NO: 67523 - RNA, 21 nt, Artificial Sequence
  Synthetic
auggaucggcagaggagccac

SEQ ID NO: 67524 - RNA, 22 nt, Artificial Sequence
  Synthetic
uauggaucggcagaggagccac

SEQ ID NO: 67525 - RNA, 24 nt, Artificial Sequence
  Synthetic
aguauggaucggcagaggagccac

SEQ ID NO: 67526 - RNA, 21 nt, Artificial Sequence
  Synthetic
caagauuuggugggcguucac

SEQ ID NO: 67527 - RNA, 22 nt, Artificial Sequence
  Synthetic
agaaaauugagagaaguccacc

SEQ ID NO: 67528 - RNA, 23 nt, Artificial Sequence
  Synthetic
uagaaaauugagagaaguccacc

SEQ ID NO: 67529 - RNA, 24 nt, Artificial Sequence
  Synthetic
cuagaaaauugagagaaguccacc

SEQ ID NO: 67530 - RNA, 21 nt, Artificial Sequence
  Synthetic
cagccuccuaguacaaagacc

SEQ ID NO: 67531 - RNA, 22 nt, Artificial Sequence
  Synthetic
acagccuccuaguacaaagacc

SEQ ID NO: 67532 - RNA, 23 nt, Artificial Sequence
  Synthetic
uacagccuccuaguacaaagacc

SEQ ID NO: 67533 - RNA, 24 nt, Artificial Sequence
  Synthetic
cuacagccuccuaguacaaagacc

SEQ ID NO: 67534 - RNA, 21 nt, Artificial Sequence
  Synthetic
agggaccguccaagaaagccc

SEQ ID NO: 67535 - RNA, 23 nt, Artificial Sequence
  Synthetic
agagggaccguccaagaaagccc

SEQ ID NO: 67536 - RNA, 21 nt, Artificial Sequence
  Synthetic
cgcguaaagagaggugcgccc

SEQ ID NO: 67537 - RNA, 22 nt, Artificial Sequence
  Synthetic
ccgcguaaagagaggugcgccc

SEQ ID NO: 67538 - RNA, 23 nt, Artificial Sequence
  Synthetic
accgcguaaagagaggugcgccc

SEQ ID NO: 67539 - RNA, 21 nt, Artificial Sequence
  Synthetic
caugauguagcucuuguuccc

SEQ ID NO: 67540 - RNA, 22 nt, Artificial Sequence
  Synthetic
ccaugauguagcucuuguuccc

SEQ ID NO: 67541 - RNA, 23 nt, Artificial Sequence
  Synthetic
cccaugauguagcucuuguuccc

SEQ ID NO: 67542 - RNA, 24 nt, Artificial Sequence
  Synthetic
ccccaugauguagcucuuguuccc

SEQ ID NO: 67543 - RNA, 21 nt, Artificial Sequence
  Synthetic
cauaggaauuuuccgaaagcc

SEQ ID NO: 67544 - RNA, 22 nt, Artificial Sequence
  Synthetic
ccauaggaauuuuccgaaagcc

SEQ ID NO: 67545 - RNA, 23 nt, Artificial Sequence
  Synthetic
cccauaggaauuuuccgaaagcc

SEQ ID NO: 67546 - RNA, 24 nt, Artificial Sequence
  Synthetic
ucccauaggaauuuuccgaaagcc

SEQ ID NO: 67547 - RNA, 18 nt, Artificial Sequence
  Synthetic
aacgccgcagacacaucc

SEQ ID NO: 67548 - RNA, 19 nt, Artificial Sequence
  Synthetic
aaacgccgcagacacaucc

SEQ ID NO: 67549 - RNA, 20 nt, Artificial Sequence
  Synthetic
aaaacgccgcagacacaucc

SEQ ID NO: 67550 - RNA, 21 nt, Artificial Sequence
  Synthetic
uaaaacgccgcagacacaucc

SEQ ID NO: 67551 - RNA, 22 nt, Artificial Sequence
  Synthetic
auaaaacgccgcagacacaucc

SEQ ID NO: 67552 - RNA, 24 nt, Artificial Sequence
  Synthetic
ugauaaaacgccgcagacacaucc

SEQ ID NO: 67553 - RNA, 18 nt, Artificial Sequence
  Synthetic
acuggugguugaugaucc

SEQ ID NO: 67554 - RNA, 19 nt, Artificial Sequence
  Synthetic
uacuggugguugaugaucc

SEQ ID NO: 67555 - RNA, 21 nt, Artificial Sequence
  Synthetic
cguacuggugguugaugaucc

SEQ ID NO: 67556 - RNA, 22 nt, Artificial Sequence
  Synthetic
ccguacuggugguugaugaucc

SEQ ID NO: 67557 - RNA, 23 nt, Artificial Sequence
  Synthetic
cccguacuggugguugaugaucc

SEQ ID NO: 67558 - RNA, 24 nt, Artificial Sequence
  Synthetic
ucccguacuggugguugaugaucc

SEQ ID NO: 67559 - RNA, 21 nt, Artificial Sequence
  Synthetic
  misc_feature (16)..(16): n is a, c, g, or u
cgucuaacaacaguanucucc

SEQ ID NO: 67560 - RNA, 22 nt, Artificial Sequence
  Synthetic
  misc_feature (17)..(17): n is a, c, g, or u
ucgucuaacaacaguanucucc

SEQ ID NO: 67561 - RNA, 23 nt, Artificial Sequence
  Synthetic
  misc_feature (18)..(18): n is a, c, g, or u
uucgucuaacaacaguanucucc

SEQ ID NO: 67562 - RNA, 24 nt, Artificial Sequence
  Synthetic
  misc_feature (19)..(19): n is a, c, g, or u
cuucgucuaacaacaguanucucc

SEQ ID NO: 67563 - RNA, 21 nt, Artificial Sequence
  Synthetic
  misc_feature (13)..(13): n is a, c, g, or u
cguugacauugcngagagucc

SEQ ID NO: 67564 - RNA, 22 nt, Artificial Sequence
  Synthetic
  misc_feature (14)..(14): n is a, c, g, or u
ucguugacauugcngagagucc

SEQ ID NO: 67565 - RNA, 21 nt, Artificial Sequence
  Synthetic
auacaagugcaauuuccgucc

SEQ ID NO: 67566 - RNA, 22 nt, Artificial Sequence
  Synthetic
aauacaagugcaauuuccgucc

SEQ ID NO: 67567 - RNA, 21 nt, Artificial Sequence
  Synthetic
acauaacugacuacuaggucc

SEQ ID NO: 67568 - RNA, 23 nt, Artificial Sequence
  Synthetic
ugacauaacugacuacuaggucc

SEQ ID NO: 67569 - RNA, 24 nt, Artificial Sequence
  Synthetic
uugacauaacugacuacuaggucc

SEQ ID NO: 67570 - RNA, 21 nt, Artificial Sequence
  Synthetic
  misc_feature (6)..(6): n is a, c, g, or u
cucuangacgguuucucuucc

SEQ ID NO: 67571 - RNA, 22 nt, Artificial Sequence
  Synthetic
  misc_feature (7)..(7): n is a, c, g, or u
acucuangacgguuucucuucc

SEQ ID NO: 67572 - RNA, 23 nt, Artificial Sequence
  Synthetic
  misc_feature (8)..(8): n is a, c, g, or u
uacucuangacgguuucucuucc

SEQ ID NO: 67573 - RNA, 24 nt, Artificial Sequence
  Synthetic
  misc_feature (9)..(9): n is a, c, g, or u
auacucuangacgguuucucuucc

SEQ ID NO: 67574 - RNA, 18 nt, Artificial Sequence
  Synthetic
cccgccuguaacacgagc

SEQ ID NO: 67575 - RNA, 19 nt, Artificial Sequence
  Synthetic
ccccgccuguaacacgagc

SEQ ID NO: 67576 - RNA, 20 nt, Artificial Sequence
  Synthetic
accccgccuguaacacgagc

SEQ ID NO: 67577 - RNA, 21 nt, Artificial Sequence
  Synthetic
aaacauagagguuccuugagc

SEQ ID NO: 67578 - RNA, 18 nt, Artificial Sequence
  Synthetic
ugagaucuucugcgacgc

SEQ ID NO: 67579 - RNA, 19 nt, Artificial Sequence
  Synthetic
uugagaucuucugcgacgc

SEQ ID NO: 67580 - RNA, 20 nt, Artificial Sequence
  Synthetic
auugagaucuucugcgacgc

SEQ ID NO: 67581 - RNA, 22 nt, Artificial Sequence
  Synthetic
agauugacgagaugagugaggc

SEQ ID NO: 67582 - RNA, 23 nt, Artificial Sequence
  Synthetic
aagauugacgagaugagugaggc

SEQ ID NO: 67583 - RNA, 21 nt, Artificial Sequence
  Synthetic
augaacaagagaugauuaggc

SEQ ID NO: 67584 - RNA, 22 nt, Artificial Sequence
  Synthetic
caugaacaagagaugauuaggc

SEQ ID NO: 67585 - RNA, 23 nt, Artificial Sequence
  Synthetic
acaugaacaagagaugauuaggc

SEQ ID NO: 67586 - RNA, 18 nt, Artificial Sequence
  Synthetic
aaccacugaacaaauggc

SEQ ID NO: 67587 - RNA, 20 nt, Artificial Sequence
  Synthetic
cgaaccacugaacaaauggc

SEQ ID NO: 67588 - RNA, 23 nt, Artificial Sequence
  Synthetic
cggcgaaccacugaacaaauggc

SEQ ID NO: 67589 - RNA, 24 nt, Artificial Sequence
  Synthetic
ccggcgaaccacugaacaaauggc

SEQ ID NO: 67590 - RNA, 21 nt, Artificial Sequence
  Synthetic
  misc_feature (14)..(14): n is a, c, g, or u
ccacaaagguuccncgcaugc

SEQ ID NO: 67591 - RNA, 23 nt, Artificial Sequence
  Synthetic
  misc_feature (16)..(16): n is a, c, g, or u
agccacaaagguuccncgcaugc

SEQ ID NO: 67592 - RNA, 22 nt, Artificial Sequence
  Synthetic
uggcgagaaagugaaagccugc

SEQ ID NO: 67593 - RNA, 23 nt, Artificial Sequence
  Synthetic
uuggcgagaaagugaaagccugc

SEQ ID NO: 67594 - RNA, 19 nt, Artificial Sequence
  Synthetic
uggucuccaugcgacgugc

SEQ ID NO: 67595 - RNA, 21 nt, Artificial Sequence
  Synthetic
ccccagcaaagaauggcuugc

SEQ ID NO: 67596 - RNA, 22 nt, Artificial Sequence
  Synthetic
cccccagcaaagaauggcuugc

SEQ ID NO: 67597 - RNA, 23 nt, Artificial Sequence
  Synthetic
ccccccagcaaagaauggcuugc

SEQ ID NO: 67598 - RNA, 24 nt, Artificial Sequence
  Synthetic
uccccccagcaaagaauggcuugc

SEQ ID NO: 67599 - RNA, 18 nt, Artificial Sequence
  Synthetic
caccacgagucuagacuc

SEQ ID NO: 67600 - RNA, 19 nt, Artificial Sequence
  Synthetic
ccaccacgagucuagacuc

SEQ ID NO: 67601 - RNA, 20 nt, Artificial Sequence
  Synthetic
uccaccacgagucuagacuc

SEQ ID NO: 67602 - RNA, 21 nt, Artificial Sequence
  Synthetic
uuccauguucggugcaggguc

SEQ ID NO: 67603 - RNA, 22 nt, Artificial Sequence
  Synthetic
uuuccauguucggugcaggguc

SEQ ID NO: 67604 - RNA, 23 nt, Artificial Sequence
  Synthetic
cuuuccauguucggugcaggguc

SEQ ID NO: 67605 - RNA, 21 nt, Artificial Sequence
  Synthetic
aaaacaagcggcuaggaguuc

SEQ ID NO: 67606 - RNA, 22 nt, Artificial Sequence
  Synthetic
caaaacaagcggcuaggaguuc

SEQ ID NO: 67607 - RNA, 24 nt, Artificial Sequence
  Synthetic
agcaaaacaagcggcuaggaguuc

SEQ ID NO: 67608 - RNA, 18 nt, Artificial Sequence
  Synthetic
cggggagaccgcguaaag

SEQ ID NO: 67609 - RNA, 19 nt, Artificial Sequence
  Synthetic
acggggagaccgcguaaag

SEQ ID NO: 67610 - RNA, 21 nt, Artificial Sequence
  Synthetic
agacggggagaccgcguaaag

SEQ ID NO: 67611 - RNA, 22 nt, Artificial Sequence
  Synthetic
cagacggggagaccgcguaaag

SEQ ID NO: 67612 - RNA, 23 nt, Artificial Sequence
  Synthetic
acagacggggagaccgcguaaag

SEQ ID NO: 67613 - RNA, 24 nt, Artificial Sequence
  Synthetic
cacagacggggagaccgcguaaag

SEQ ID NO: 67614 - RNA, 21 nt, Artificial Sequence
  Synthetic
acgcauacagaggcauuaaag

SEQ ID NO: 67615 - RNA, 22 nt, Artificial Sequence
  Synthetic
cacgcauacagaggcauuaaag

SEQ ID NO: 67616 - RNA, 23 nt, Artificial Sequence
  Synthetic
acacgcauacagaggcauuaaag

SEQ ID NO: 67617 - RNA, 24 nt, Artificial Sequence
  Synthetic
uacacgcauacagaggcauuaaag

SEQ ID NO: 67618 - RNA, 22 nt, Artificial Sequence
  Synthetic
aguuuuccaguuaggauuaaag

SEQ ID NO: 67619 - RNA, 21 nt, Artificial Sequence
  Synthetic
augaugggaugggaauacaag

SEQ ID NO: 67620 - RNA, 23 nt, Artificial Sequence
  Synthetic
ugaugaugggaugggaauacaag

SEQ ID NO: 67621 - RNA, 24 nt, Artificial Sequence
  Synthetic
augaugaugggaugggaauacaag

SEQ ID NO: 67622 - RNA, 18 nt, Artificial Sequence
  Synthetic
cgacgugcagaggugaag

SEQ ID NO: 67623 - RNA, 20 nt, Artificial Sequence
  Synthetic
ugcgacgugcagaggugaag

SEQ ID NO: 67624 - RNA, 21 nt, Artificial Sequence
  Synthetic
augcgacgugcagaggugaag

SEQ ID NO: 67625 - RNA, 22 nt, Artificial Sequence
  Synthetic
caugcgacgugcagaggugaag

SEQ ID NO: 67626 - RNA, 23 nt, Artificial Sequence
  Synthetic
ccaugcgacgugcagaggugaag

SEQ ID NO: 67627 - RNA, 24 nt, Artificial Sequence
  Synthetic
uccaugcgacgugcagaggugaag

SEQ ID NO: 67628 - RNA, 21 nt, Artificial Sequence
  Synthetic
caagaagaugaggcauagcag

SEQ ID NO: 67629 - RNA, 22 nt, Artificial Sequence
  Synthetic
acaagaagaugaggcauagcag

SEQ ID NO: 67630 - RNA, 23 nt, Artificial Sequence
  Synthetic
aacaagaagaugaggcauagcag

SEQ ID NO: 67631 - RNA, 24 nt, Artificial Sequence
  Synthetic
caacaagaagaugaggcauagcag

SEQ ID NO: 67632 - RNA, 21 nt, Artificial Sequence
  Synthetic
uuacucugggauccugcagag

SEQ ID NO: 67633 - RNA, 22 nt, Artificial Sequence
  Synthetic
cuuacucugggauccugcagag

SEQ ID NO: 67634 - RNA, 23 nt, Artificial Sequence
  Synthetic
ucuuacucugggauccugcagag

SEQ ID NO: 67635 - RNA, 24 nt, Artificial Sequence
  Synthetic
cucuuacucugggauccugcagag

SEQ ID NO: 67636 - RNA, 18 nt, Artificial Sequence
  Synthetic
cucgagaagauugacgag

SEQ ID NO: 67637 - RNA, 19 nt, Artificial Sequence
  Synthetic
ccucgagaagauugacgag

SEQ ID NO: 67638 - RNA, 20 nt, Artificial Sequence
  Synthetic
uccucgagaagauugacgag

SEQ ID NO: 67639 - RNA, 21 nt, Artificial Sequence
  Synthetic
agcucccccuagaaaauugag

SEQ ID NO: 67640 - RNA, 21 nt, Artificial Sequence
  Synthetic
  misc_feature (5)..(5): n is a, c, g, or u
cccanaaaaugaggcgcuacg

SEQ ID NO: 67641 - RNA, 22 nt, Artificial Sequence
  Synthetic
  misc_feature (6)..(6): n is a, c, g, or u
acccanaaaaugaggcgcuacg

SEQ ID NO: 67642 - RNA, 24 nt, Artificial Sequence
  Synthetic
  misc_feature (8)..(8): n is a, c, g, or u
ugacccanaaaaugaggcgcuacg

SEQ ID NO: 67643 - RNA, 18 nt, Artificial Sequence
  Synthetic
  misc_feature (12)..(12): n is a, c, g, or u
acagaauuaucngucccg

SEQ ID NO: 67644 - RNA, 20 nt, Artificial Sequence
  Synthetic
  misc_feature (14)..(14): n is a, c, g, or u
cgacagaauuaucngucccg

SEQ ID NO: 67645 - RNA, 21 nt, Artificial Sequence
  Synthetic
  misc_feature (15)..(15): n is a, c, g, or u
acgacagaauuaucngucccg

SEQ ID NO: 67646 - RNA, 22 nt, Artificial Sequence
  Synthetic
  misc_feature (16)..(16): n is a, c, g, or u
aacgacagaauuaucngucccg

SEQ ID NO: 67647 - RNA, 24 nt, Artificial Sequence
  Synthetic
  misc_feature (18)..(18): n is a, c, g, or u
agaacgacagaauuaucngucccg

SEQ ID NO: 67648 - RNA, 21 nt, Artificial Sequence
  Synthetic
aggcugccuuccugacugccg

SEQ ID NO: 67649 - RNA, 22 nt, Artificial Sequence
  Synthetic
uaggcugccuuccugacugccg

SEQ ID NO: 67650 - RNA, 18 nt, Artificial Sequence
  Synthetic
  misc_feature (8)..(8): n is a, c, g, or u
cccgagangggucguccg

SEQ ID NO: 67651 - RNA, 19 nt, Artificial Sequence
  Synthetic
  misc_feature (9)..(9): n is a, c, g, or u
ccccgagangggucguccg

SEQ ID NO: 67652 - RNA, 20 nt, Artificial Sequence
  Synthetic
  misc_feature (10)..(10): n is a, c, g, or u
accccgagangggucguccg

SEQ ID NO: 67653 - RNA, 18 nt, Artificial Sequence
  Synthetic
cgaagugcacacgguccg

SEQ ID NO: 67654 - RNA, 20 nt, Artificial Sequence
  Synthetic
agcgaagugcacacgguccg

SEQ ID NO: 67655 - RNA, 21 nt, Artificial Sequence
  Synthetic
aagcgaagugcacacgguccg

SEQ ID NO: 67656 - RNA, 23 nt, Artificial Sequence
  Synthetic
ugaagcgaagugcacacgguccg

SEQ ID NO: 67657 - RNA, 19 nt, Artificial Sequence
  Synthetic
agacaaaggacgucccucg

SEQ ID NO: 67658 - RNA, 20 nt, Artificial Sequence
  Synthetic
uagacaaaggacgucccucg

SEQ ID NO: 67659 - RNA, 21 nt, Artificial Sequence
  Synthetic
agcuccaaauucuuuauaagg

SEQ ID NO: 67660 - RNA, 22 nt, Artificial Sequence
  Synthetic
uagcuccaaauucuuuauaagg

SEQ ID NO: 67661 - RNA, 24 nt, Artificial Sequence
  Synthetic
aguagcuccaaauucuuuauaagg

SEQ ID NO: 67662 - RNA, 21 nt, Artificial Sequence
  Synthetic
acacauccagcgauagccagg

SEQ ID NO: 67663 - RNA, 23 nt, Artificial Sequence
  Synthetic
agacacauccagcgauagccagg

SEQ ID NO: 67664 - RNA, 24 nt, Artificial Sequence
  Synthetic
cagacacauccagcgauagccagg

SEQ ID NO: 67665 - RNA, 18 nt, Artificial Sequence
  Synthetic
agagucgugcagguucgg

SEQ ID NO: 67666 - RNA, 19 nt, Artificial Sequence
  Synthetic
aagagucgugcagguucgg

SEQ ID NO: 67667 - RNA, 20 nt, Artificial Sequence
  Synthetic
caagagucgugcagguucgg

SEQ ID NO: 67668 - RNA, 22 nt, Artificial Sequence
  Synthetic
agcaagagucgugcagguucgg

SEQ ID NO: 67669 - RNA, 24 nt, Artificial Sequence
  Synthetic
ugagcaagagucgugcagguucgg

SEQ ID NO: 67670 - RNA, 21 nt, Artificial Sequence
  Synthetic
ccucuuauguaagaccuuggg

SEQ ID NO: 67671 - RNA, 22 nt, Artificial Sequence
  Synthetic
uccucuuauguaagaccuuggg

SEQ ID NO: 67672 - RNA, 24 nt, Artificial Sequence
  Synthetic
aguccucuuauguaagaccuuggg

SEQ ID NO: 67673 - RNA, 21 nt, Artificial Sequence
  Synthetic
auuugguggucuauaagcugg

SEQ ID NO: 67674 - RNA, 22 nt, Artificial Sequence
  Synthetic
cauuugguggucuauaagcugg

SEQ ID NO: 67675 - RNA, 21 nt, Artificial Sequence
  Synthetic
aaaaucccagaggauuggugg

SEQ ID NO: 67676 - RNA, 22 nt, Artificial Sequence
  Synthetic
aaaaaucccagaggauuggugg

SEQ ID NO: 67677 - RNA, 23 nt, Artificial Sequence
  Synthetic
aaaaaaucccagaggauuggugg

SEQ ID NO: 67678 - RNA, 21 nt, Artificial Sequence
  Synthetic
ccccaaaaggccuccgugugg

SEQ ID NO: 67679 - RNA, 22 nt, Artificial Sequence
  Synthetic
accccaaaaggccuccgugugg

SEQ ID NO: 67680 - RNA, 23 nt, Artificial Sequence
  Synthetic
caccccaaaaggccuccgugugg

SEQ ID NO: 67681 - RNA, 24 nt, Artificial Sequence
  Synthetic
ccaccccaaaaggccuccgugugg

SEQ ID NO: 67682 - RNA, 21 nt, Artificial Sequence
  Synthetic
  misc_feature (20)..(20): n is a, c, g, or u
cuccuaccuuguuggcuucng

SEQ ID NO: 67683 - RNA, 22 nt, Artificial Sequence
  Synthetic
  misc_feature (21)..(21): n is a, c, g, or u
acuccuaccuuguuggcuucng

SEQ ID NO: 67684 - RNA, 23 nt, Artificial Sequence
  Synthetic
  misc_feature (22)..(22): n is a, c, g, or u
cacuccuaccuuguuggcuucng

SEQ ID NO: 67685 - RNA, 24 nt, Artificial Sequence
  Synthetic
  misc_feature (23)..(23): n is a, c, g, or u
ccacuccuaccuuguuggcuucng

SEQ ID NO: 67686 - RNA, 21 nt, Artificial Sequence
  Synthetic
ccugaugugaugcuuuccaug

SEQ ID NO: 67687 - RNA, 22 nt, Artificial Sequence
  Synthetic
uccugaugugaugcuuuccaug

SEQ ID NO: 67688 - RNA, 23 nt, Artificial Sequence
  Synthetic
auccugaugugaugcuuuccaug

SEQ ID NO: 67689 - RNA, 24 nt, Artificial Sequence
  Synthetic
aauccugaugugaugcuuuccaug

SEQ ID NO: 67690 - RNA, 21 nt, Artificial Sequence
  Synthetic
ugacuacuaggucccuggaug

SEQ ID NO: 67691 - RNA, 22 nt, Artificial Sequence
  Synthetic
cugacuacuaggucccuggaug

SEQ ID NO: 67692 - RNA, 23 nt, Artificial Sequence
  Synthetic
acugacuacuaggucccuggaug

SEQ ID NO: 67693 - RNA, 24 nt, Artificial Sequence
  Synthetic
aacugacuacuaggucccuggaug

SEQ ID NO: 67694 - RNA, 21 nt, Artificial Sequence
  Synthetic
aaugauuaacuacauuaucug

SEQ ID NO: 67695 - RNA, 22 nt, Artificial Sequence
  Synthetic
uaaugauuaacuacauuaucug

SEQ ID NO: 67696 - RNA, 24 nt, Artificial Sequence
  Synthetic
aguaaugauuaacuacauuaucug

SEQ ID NO: 67697 - RNA, 21 nt, Artificial Sequence
  Synthetic
ccauaggguauguaaauagug

SEQ ID NO: 67698 - RNA, 22 nt, Artificial Sequence
  Synthetic
uccauaggguauguaaauagug

SEQ ID NO: 67699 - RNA, 23 nt, Artificial Sequence
  Synthetic
uuccauaggguauguaaauagug

SEQ ID NO: 67700 - RNA, 24 nt, Artificial Sequence
  Synthetic
cuuccauaggguauguaaauagug

SEQ ID NO: 67701 - RNA, 18 nt, Artificial Sequence
  Synthetic
cagggucccguacuggug

SEQ ID NO: 67702 - RNA, 18 nt, Artificial Sequence
  Synthetic
  misc_feature (18)..(18): n is a, c, g, or u
ucggucguugacauugcn

SEQ ID NO: 67703 - RNA, 21 nt, Artificial Sequence
  Synthetic
  misc_feature (21)..(21): n is a, c, g, or u
aggucggucguugacauugcn

SEQ ID NO: 67704 - RNA, 22 nt, Artificial Sequence
  Synthetic
  misc_feature (22)..(22): n is a, c, g, or u
aaggucggucguugacauugcn

SEQ ID NO: 67705 - RNA, 23 nt, Artificial Sequence
  Synthetic
  misc_feature (23)..(23): n is a, c, g, or u
caaggucggucguugacauugcn

SEQ ID NO: 67706 - RNA, 24 nt, Artificial Sequence
  Synthetic
  misc_feature (24)..(24): n is a, c, g, or u
ucaaggucggucguugacauugcn

SEQ ID NO: 67707 - RNA, 21 nt, Artificial Sequence
  Synthetic
acgagcagggguccuaggaau

SEQ ID NO: 67708 - RNA, 22 nt, Artificial Sequence
  Synthetic
cacgagcagggguccuaggaau

SEQ ID NO: 67709 - RNA, 23 nt, Artificial Sequence
  Synthetic
acacgagcagggguccuaggaau

SEQ ID NO: 67710 - RNA, 24 nt, Artificial Sequence
  Synthetic
aacacgagcagggguccuaggaau

SEQ ID NO: 67711 - RNA, 21 nt, Artificial Sequence
  Synthetic
aggaauuuuccgaaagcccau

SEQ ID NO: 67712 - RNA, 22 nt, Artificial Sequence
  Synthetic
uaggaauuuuccgaaagcccau

SEQ ID NO: 67713 - RNA, 23 nt, Artificial Sequence
  Synthetic
auaggaauuuuccgaaagcccau

SEQ ID NO: 67714 - RNA, 24 nt, Artificial Sequence
  Synthetic
cauaggaauuuuccgaaagcccau

SEQ ID NO: 67715 - RNA, 21 nt, Artificial Sequence
  Synthetic
cgggcugaggcccacucccau

SEQ ID NO: 67716 - RNA, 22 nt, Artificial Sequence
  Synthetic
acgggcugaggcccacucccau

SEQ ID NO: 67717 - RNA, 23 nt, Artificial Sequence
  Synthetic
aacgggcugaggcccacucccau

SEQ ID NO: 67718 - RNA, 24 nt, Artificial Sequence
  Synthetic
aaacgggcugaggcccacucccau

SEQ ID NO: 67719 - RNA, 18 nt, Artificial Sequence
  Synthetic
cuucugcgacgcggcgau

SEQ ID NO: 67720 - RNA, 19 nt, Artificial Sequence
  Synthetic
ucuucugcgacgcggcgau

SEQ ID NO: 67721 - RNA, 20 nt, Artificial Sequence
  Synthetic
aucuucugcgacgcggcgau

SEQ ID NO: 67722 - RNA, 22 nt, Artificial Sequence
  Synthetic
cgaaagcccaugaugaugggau

SEQ ID NO: 67723 - RNA, 23 nt, Artificial Sequence
  Synthetic
ccgaaagcccaugaugaugggau

SEQ ID NO: 67724 - RNA, 24 nt, Artificial Sequence
  Synthetic
uccgaaagcccaugaugaugggau

SEQ ID NO: 67725 - RNA, 22 nt, Artificial Sequence
  Synthetic
ugucucucaaagguggagugau

SEQ ID NO: 67726 - RNA, 24 nt, Artificial Sequence
  Synthetic
agugucucucaaagguggagugau

SEQ ID NO: 67727 - RNA, 21 nt, Artificial Sequence
  Synthetic
ugcccgccuuccauaggguau

SEQ ID NO: 67728 - RNA, 22 nt, Artificial Sequence
  Synthetic
augcccgccuuccauaggguau

SEQ ID NO: 67729 - RNA, 24 nt, Artificial Sequence
  Synthetic
agaugcccgccuuccauaggguau

SEQ ID NO: 67730 - RNA, 18 nt, Artificial Sequence
  Synthetic
ucggcagggucccguacu

SEQ ID NO: 67731 - RNA, 19 nt, Artificial Sequence
  Synthetic
uucggcagggucccguacu

SEQ ID NO: 67732 - RNA, 18 nt, Artificial Sequence
  Synthetic
aauuuaugccuacagccu

SEQ ID NO: 67733 - RNA, 19 nt, Artificial Sequence
  Synthetic
caauuuaugccuacagccu

SEQ ID NO: 67734 - RNA, 20 nt, Artificial Sequence
  Synthetic
ccaauuuaugccuacagccu

SEQ ID NO: 67735 - RNA, 21 nt, Artificial Sequence
  Synthetic
aacagucuuugaaguaugccu

SEQ ID NO: 67736 - RNA, 22 nt, Artificial Sequence
  Synthetic
aaacagucuuugaaguaugccu

SEQ ID NO: 67737 - RNA, 23 nt, Artificial Sequence
  Synthetic
caaacagucuuugaaguaugccu

SEQ ID NO: 67738 - RNA, 24 nt, Artificial Sequence
  Synthetic
acaaacagucuuugaaguaugccu

SEQ ID NO: 67739 - RNA, 18 nt, Artificial Sequence
  Synthetic
aacacgagcagggguccu

SEQ ID NO: 67740 - RNA, 19 nt, Artificial Sequence
  Synthetic
uaacacgagcagggguccu

SEQ ID NO: 67741 - RNA, 21 nt, Artificial Sequence
  Synthetic
uguaacacgagcagggguccu

SEQ ID NO: 67742 - RNA, 22 nt, Artificial Sequence
  Synthetic
cuguaacacgagcagggguccu

SEQ ID NO: 67743 - RNA, 23 nt, Artificial Sequence
  Synthetic
ccuguaacacgagcagggguccu

SEQ ID NO: 67744 - RNA, 22 nt, Artificial Sequence
  Synthetic
cgagaguaacuccacaguagcu

SEQ ID NO: 67745 - RNA, 23 nt, Artificial Sequence
  Synthetic
acgagaguaacuccacaguagcu

SEQ ID NO: 67746 - RNA, 24 nt, Artificial Sequence
  Synthetic
aacgagaguaacuccacaguagcu

SEQ ID NO: 67747 - RNA, 18 nt, Artificial Sequence
  Synthetic
cgagcaaaacaagcggcu

SEQ ID NO: 67748 - RNA, 20 nt, Artificial Sequence
  Synthetic
ugcgagcaaaacaagcggcu

SEQ ID NO: 67749 - RNA, 21 nt, Artificial Sequence
  Synthetic
cugcgagcaaaacaagcggcu

SEQ ID NO: 67750 - RNA, 23 nt, Artificial Sequence
  Synthetic
ugcugcgagcaaaacaagcggcu

SEQ ID NO: 67751 - RNA, 24 nt, Artificial Sequence
  Synthetic
cugcugcgagcaaaacaagcggcu

SEQ ID NO: 67752 - RNA, 21 nt, Artificial Sequence
  Synthetic
aauagugucugguuuggaagu

SEQ ID NO: 67753 - RNA, 22 nt, Artificial Sequence
  Synthetic
aaauagugucugguuuggaagu

SEQ ID NO: 67754 - RNA, 23 nt, Artificial Sequence
  Synthetic
uaaauagugucugguuuggaagu

SEQ ID NO: 67755 - RNA, 21 nt, Artificial Sequence
  Synthetic
uggucuauaagcuggaggagu

SEQ ID NO: 67756 - RNA, 24 nt, Artificial Sequence
  Synthetic
ugguggucuauaagcuggaggagu

SEQ ID NO: 67757 - RNA, 19 nt, Artificial Sequence
  Synthetic
agguucggcagggucccgu

SEQ ID NO: 67758 - RNA, 20 nt, Artificial Sequence
  Synthetic
cagguucggcagggucccgu

SEQ ID NO: 67759 - RNA, 18 nt, Artificial Sequence
  Synthetic
uccuugagcaagagucgu

SEQ ID NO: 67760 - RNA, 19 nt, Artificial Sequence
  Synthetic
uuccuugagcaagagucgu

SEQ ID NO: 67761 - RNA, 22 nt, Artificial Sequence
  Synthetic
agguuccuugagcaagagucgu

SEQ ID NO: 67762 - RNA, 24 nt, Artificial Sequence
  Synthetic
agagguuccuugagcaagagucgu

SEQ ID NO: 67763 - RNA, 19 nt, Artificial Sequence
  Synthetic
cguugccgggcaacggggu

SEQ ID NO: 67764 - RNA, 20 nt, Artificial Sequence
  Synthetic
ccguugccgggcaacggggu

SEQ ID NO: 67765 - RNA, 23 nt, Artificial Sequence
  Synthetic
  misc_feature (1)..(1): n is a, c, g, or u
nggccguugccgggcaacggggu

SEQ ID NO: 67766 - RNA, 24 nt, Artificial Sequence
  Synthetic
  misc_feature (2)..(2): n is a, c, g, or u
cnggccguugccgggcaacggggu

SEQ ID NO: 67767 - RNA, 22 nt, Artificial Sequence
  Synthetic
agaggugaaaaaguugcauggu

SEQ ID NO: 67768 - RNA, 23 nt, Artificial Sequence
  Synthetic
cagaggugaaaaaguugcauggu

SEQ ID NO: 67769 - RNA, 22 nt, Artificial Sequence
  Synthetic
agucuagacucugcgguauugu

SEQ ID NO: 67770 - RNA, 24 nt, Artificial Sequence
  Synthetic
cgagucuagacucugcgguauugu

SEQ ID NO: 67771 - RNA, 21 nt, Artificial Sequence
  Synthetic
auuguggucccaaucuggauu

SEQ ID NO: 67772 - RNA, 21 nt, Artificial Sequence
  Synthetic
  misc_feature (10)..(10): n is a, c, g, or u
ccacaauucnuugacauacuu

SEQ ID NO: 67773 - RNA, 22 nt, Artificial Sequence
  Synthetic
  misc_feature (11)..(11): n is a, c, g, or u
cccacaauucnuugacauacuu

SEQ ID NO: 67774 - RNA, 23 nt, Artificial Sequence
  Synthetic
  misc_feature (12)..(12): n is a, c, g, or u
acccacaauucnuugacauacuu

SEQ ID NO: 67775 - RNA, 21 nt, Artificial Sequence
  Synthetic
ccccguaaaauuucccaccuu

SEQ ID NO: 67776 - RNA, 23 nt, Artificial Sequence
  Synthetic
agccccguaaaauuucccaccuu

SEQ ID NO: 67777 - RNA, 24 nt, Artificial Sequence
  Synthetic
aagccccguaaaauuucccaccuu

SEQ ID NO: 67778 - RNA, 18 nt, Artificial Sequence
  Synthetic
aaacgggcaacauaccuu

SEQ ID NO: 67779 - RNA, 19 nt, Artificial Sequence
  Synthetic
caaacgggcaacauaccuu

SEQ ID NO: 67780 - RNA, 20 nt, Artificial Sequence
  Synthetic
acaaacgggcaacauaccuu

SEQ ID NO: 67781 - RNA, 22 nt, Artificial Sequence
  Synthetic
aggucccuggaugcuggaucuu

SEQ ID NO: 67782 - RNA, 23 nt, Artificial Sequence
  Synthetic
uaggucccuggaugcuggaucuu

SEQ ID NO: 67783 - RNA, 24 nt, Artificial Sequence
  Synthetic
cuaggucccuggaugcuggaucuu

SEQ ID NO: 67784 - RNA, 22 nt, Artificial Sequence
  Synthetic
ugggcaagauuuggugggcguu

SEQ ID NO: 67785 - RNA, 23 nt, Artificial Sequence
  Synthetic
uugggcaagauuuggugggcguu

SEQ ID NO: 67786 - RNA, 24 nt, Artificial Sequence
  Synthetic
cuugggcaagauuuggugggcguu

SEQ ID NO: 67787 - RNA, 20 nt, Artificial Sequence
  Synthetic
agggucccguacuggugguu

SEQ ID NO: 67788 - RNA, 21 nt, Artificial Sequence
  Synthetic
cagggucccguacuggugguu

SEQ ID NO: 67789 - RNA, 24 nt, Artificial Sequence
  Synthetic
cggcagggucccguacuggugguu

SEQ ID NO: 67790 - RNA, 22 nt, Artificial Sequence
  Synthetic
uguugauaagauaggggcauuu

SEQ ID NO: 67791 - RNA, 24 nt, Artificial Sequence
  Synthetic
aguguugauaagauaggggcauuu

SEQ ID NO: 67792 - RNA, 21 nt, Artificial Sequence
  Synthetic
uauguaaauagugucugguuu

SEQ ID NO: 67793 - RNA, 23 nt, Artificial Sequence
  Synthetic
uggcugcuaggcugugcugccaa

SEQ ID NO: 67794 - RNA, 24 nt, Artificial Sequence
  Synthetic
auggcugcuaggcugugcugccaa

SEQ ID NO: 67795 - RNA, 21 nt, Artificial Sequence
  Synthetic
acuaggaggcuguaggcauaa

SEQ ID NO: 67796 - RNA, 22 nt, Artificial Sequence
  Synthetic
uacuaggaggcuguaggcauaa

SEQ ID NO: 67797 - RNA, 24 nt, Artificial Sequence
  Synthetic
uguacuaggaggcuguaggcauaa

SEQ ID NO: 67798 - RNA, 21 nt, Artificial Sequence
  Synthetic
caauuuguagguccucuaaca

SEQ ID NO: 67799 - RNA, 22 nt, Artificial Sequence
  Synthetic
acaauuuguagguccucuaaca

SEQ ID NO: 67800 - RNA, 23 nt, Artificial Sequence
  Synthetic
aacaauuuguagguccucuaaca

SEQ ID NO: 67801 - RNA, 21 nt, Artificial Sequence
  Synthetic
acuccuccagcuuauagacca

SEQ ID NO: 67802 - RNA, 22 nt, Artificial Sequence
  Synthetic
cacuccuccagcuuauagacca

SEQ ID NO: 67803 - RNA, 24 nt, Artificial Sequence
  Synthetic
cgcacuccuccagcuuauagacca

SEQ ID NO: 67804 - RNA, 19 nt, Artificial Sequence
  Synthetic
agaccaccgugaacgccca

SEQ ID NO: 67805 - RNA, 22 nt, Artificial Sequence
  Synthetic
uggagaccaccgugaacgccca

SEQ ID NO: 67806 - RNA, 23 nt, Artificial Sequence
  Synthetic
auggagaccaccgugaacgccca

SEQ ID NO: 67807 - RNA, 24 nt, Artificial Sequence
  Synthetic
cauggagaccaccgugaacgccca

SEQ ID NO: 67808 - RNA, 22 nt, Artificial Sequence
  Synthetic
agagacacucauccucaggcca

SEQ ID NO: 67809 - RNA, 24 nt, Artificial Sequence
  Synthetic
ugagagacacucauccucaggcca

SEQ ID NO: 67810 - RNA, 18 nt, Artificial Sequence
  Synthetic
ccgcuuguuuugcucgca

SEQ ID NO: 67811 - RNA, 20 nt, Artificial Sequence
  Synthetic
agccgcuuguuuugcucgca

SEQ ID NO: 67812 - RNA, 21 nt, Artificial Sequence
  Synthetic
uagccgcuuguuuugcucgca

SEQ ID NO: 67813 - RNA, 22 nt, Artificial Sequence
  Synthetic
cuagccgcuuguuuugcucgca

SEQ ID NO: 67814 - RNA, 23 nt, Artificial Sequence
  Synthetic
ccuagccgcuuguuuugcucgca

SEQ ID NO: 67815 - RNA, 24 nt, Artificial Sequence
  Synthetic
uccuagccgcuuguuuugcucgca

SEQ ID NO: 67816 - RNA, 18 nt, Artificial Sequence
  Synthetic
cucaaucgccgcgucgca

SEQ ID NO: 67817 - RNA, 19 nt, Artificial Sequence
  Synthetic
ucucaaucgccgcgucgca

SEQ ID NO: 67818 - RNA, 20 nt, Artificial Sequence
  Synthetic
aucucaaucgccgcgucgca

SEQ ID NO: 67819 - RNA, 21 nt, Artificial Sequence
  Synthetic
uguuaguauuccuuggacuca

SEQ ID NO: 67820 - RNA, 22 nt, Artificial Sequence
  Synthetic
auguuaguauuccuuggacuca

SEQ ID NO: 67821 - RNA, 23 nt, Artificial Sequence
  Synthetic
aauguuaguauuccuuggacuca

SEQ ID NO: 67822 - RNA, 24 nt, Artificial Sequence
  Synthetic
caauguuaguauuccuuggacuca

SEQ ID NO: 67823 - RNA, 21 nt, Artificial Sequence
  Synthetic
cuaauaugggccuaaaguuca

SEQ ID NO: 67824 - RNA, 22 nt, Artificial Sequence
  Synthetic
acuaauaugggccuaaaguuca

SEQ ID NO: 67825 - RNA, 23 nt, Artificial Sequence
  Synthetic
uacuaauaugggccuaaaguuca

SEQ ID NO: 67826 - RNA, 24 nt, Artificial Sequence
  Synthetic
auacuaauaugggccuaaaguuca

SEQ ID NO: 67827 - RNA, 22 nt, Artificial Sequence
  Synthetic
uggaagauccagcauccaggga

SEQ ID NO: 67828 - RNA, 23 nt, Artificial Sequence
  Synthetic
uuggaagauccagcauccaggga

SEQ ID NO: 67829 - RNA, 24 nt, Artificial Sequence
  Synthetic
uuuggaagauccagcauccaggga

SEQ ID NO: 67830 - RNA, 21 nt, Artificial Sequence
  Synthetic
agccauucuuugcugggggga

SEQ ID NO: 67831 - RNA, 22 nt, Artificial Sequence
  Synthetic
aagccauucuuugcugggggga

SEQ ID NO: 67832 - RNA, 23 nt, Artificial Sequence
  Synthetic
caagccauucuuugcugggggga

SEQ ID NO: 67833 - RNA, 21 nt, Artificial Sequence
  Synthetic
ccagcauccagggaccuagua

SEQ ID NO: 67834 - RNA, 22 nt, Artificial Sequence
  Synthetic
uccagcauccagggaccuagua

SEQ ID NO: 67835 - RNA, 23 nt, Artificial Sequence
  Synthetic
auccagcauccagggaccuagua

SEQ ID NO: 67836 - RNA, 21 nt, Artificial Sequence
  Synthetic
uaaugccucuguaugcgugua

SEQ ID NO: 67837 - RNA, 22 nt, Artificial Sequence
  Synthetic
uuaaugccucuguaugcgugua

SEQ ID NO: 67838 - RNA, 23 nt, Artificial Sequence
  Synthetic
uuuaaugccucuguaugcgugua

SEQ ID NO: 67839 - RNA, 24 nt, Artificial Sequence
  Synthetic
cuuuaaugccucuguaugcgugua

SEQ ID NO: 67840 - RNA, 19 nt, Artificial Sequence
  Synthetic
cggggcgcaccucucuuua

SEQ ID NO: 67841 - RNA, 20 nt, Artificial Sequence
  Synthetic
acggggcgcaccucucuuua

SEQ ID NO: 67842 - RNA, 21 nt, Artificial Sequence
  Synthetic
cacggggcgcaccucucuuua

SEQ ID NO: 67843 - RNA, 22 nt, Artificial Sequence
  Synthetic
ccacggggcgcaccucucuuua

SEQ ID NO: 67844 - RNA, 23 nt, Artificial Sequence
  Synthetic
accacggggcgcaccucucuuua

SEQ ID NO: 67845 - RNA, 21 nt, Artificial Sequence
  Synthetic
ugggcuuugcugccccuuuua

SEQ ID NO: 67846 - RNA, 22 nt, Artificial Sequence
  Synthetic
uugggcuuugcugccccuuuua

SEQ ID NO: 67847 - RNA, 23 nt, Artificial Sequence
  Synthetic
uuugggcuuugcugccccuuuua

SEQ ID NO: 67848 - RNA, 24 nt, Artificial Sequence
  Synthetic
uuuugggcuuugcugccccuuuua

SEQ ID NO: 67849 - RNA, 21 nt, Artificial Sequence
  Synthetic
cucuaacaguaaaugaaaaac

SEQ ID NO: 67850 - RNA, 22 nt, Artificial Sequence
  Synthetic
ccucuaacaguaaaugaaaaac

SEQ ID NO: 67851 - RNA, 23 nt, Artificial Sequence
  Synthetic
uccucuaacaguaaaugaaaaac

SEQ ID NO: 67852 - RNA, 18 nt, Artificial Sequence
  Synthetic
cucccucgccucgcagac

SEQ ID NO: 67853 - RNA, 19 nt, Artificial Sequence
  Synthetic
acucccucgccucgcagac

SEQ ID NO: 67854 - RNA, 20 nt, Artificial Sequence
  Synthetic
aacucccucgccucgcagac

SEQ ID NO: 67855 - RNA, 22 nt, Artificial Sequence
  Synthetic
agaacucccucgccucgcagac

SEQ ID NO: 67856 - RNA, 23 nt, Artificial Sequence
  Synthetic
aagaacucccucgccucgcagac

SEQ ID NO: 67857 - RNA, 21 nt, Artificial Sequence
  Synthetic
ugcuguucaaaaccuucggac

SEQ ID NO: 67858 - RNA, 22 nt, Artificial Sequence
  Synthetic
uugcuguucaaaaccuucggac

SEQ ID NO: 67859 - RNA, 24 nt, Artificial Sequence
  Synthetic
uguugcuguucaaaaccuucggac

SEQ ID NO: 67860 - RNA, 21 nt, Artificial Sequence
  Synthetic
accagaaauccagauugggac

SEQ ID NO: 67861 - RNA, 22 nt, Artificial Sequence
  Synthetic
caccagaaauccagauugggac

SEQ ID NO: 67862 - RNA, 23 nt, Artificial Sequence
  Synthetic
acaccagaaauccagauugggac

SEQ ID NO: 67863 - RNA, 24 nt, Artificial Sequence
  Synthetic
aacaccagaaauccagauugggac

SEQ ID NO: 67864 - RNA, 19 nt, Artificial Sequence
  Synthetic
cgggguuuuucuuguugac

SEQ ID NO: 67865 - RNA, 22 nt, Artificial Sequence
  Synthetic
aggcgggguuuuucuuguugac

SEQ ID NO: 67866 - RNA, 23 nt, Artificial Sequence
  Synthetic
caggcgggguuuuucuuguugac

SEQ ID NO: 67867 - RNA, 24 nt, Artificial Sequence
  Synthetic
acaggcgggguuuuucuuguugac

SEQ ID NO: 67868 - RNA, 23 nt, Artificial Sequence
  Synthetic
cggcagucaggaaggcagccuac

SEQ ID NO: 67869 - RNA, 24 nt, Artificial Sequence
  Synthetic
ucggcagucaggaaggcagccuac

SEQ ID NO: 67870 - RNA, 18 nt, Artificial Sequence
  Synthetic
auuccaggaucaucaacc

SEQ ID NO: 67871 - RNA, 19 nt, Artificial Sequence
  Synthetic
aauuccaggaucaucaacc

SEQ ID NO: 67872 - RNA, 20 nt, Artificial Sequence
  Synthetic
uaauuccaggaucaucaacc

SEQ ID NO: 67873 - RNA, 21 nt, Artificial Sequence
  Synthetic
cuaauuccaggaucaucaacc

SEQ ID NO: 67874 - RNA, 22 nt, Artificial Sequence
  Synthetic
ucuaauuccaggaucaucaacc

SEQ ID NO: 67875 - RNA, 23 nt, Artificial Sequence
  Synthetic
cucuaauuccaggaucaucaacc

SEQ ID NO: 67876 - RNA, 24 nt, Artificial Sequence
  Synthetic
ccucuaauuccaggaucaucaacc

SEQ ID NO: 67877 - RNA, 21 nt, Artificial Sequence
  Synthetic
ccagcauucagagcaaacacc

SEQ ID NO: 67878 - RNA, 22 nt, Artificial Sequence
  Synthetic
uccagcauucagagcaaacacc

SEQ ID NO: 67879 - RNA, 23 nt, Artificial Sequence
  Synthetic
auccagcauucagagcaaacacc

SEQ ID NO: 67880 - RNA, 21 nt, Artificial Sequence
  Synthetic
ugggggaagaaucauuccacc

SEQ ID NO: 67881 - RNA, 22 nt, Artificial Sequence
  Synthetic
augggggaagaaucauuccacc

SEQ ID NO: 67882 - RNA, 23 nt, Artificial Sequence
  Synthetic
aaugggggaagaaucauuccacc

SEQ ID NO: 67883 - RNA, 21 nt, Artificial Sequence
  Synthetic
augucaauacuaauaugggcc

SEQ ID NO: 67884 - RNA, 22 nt, Artificial Sequence
  Synthetic
uaugucaauacuaauaugggcc

SEQ ID NO: 67885 - RNA, 23 nt, Artificial Sequence
  Synthetic
uuaugucaauacuaauaugggcc

SEQ ID NO: 67886 - RNA, 21 nt, Artificial Sequence
  Synthetic
uucaagccuccaagcugugcc

SEQ ID NO: 67887 - RNA, 23 nt, Artificial Sequence
  Synthetic
uguucaagccuccaagcugugcc

SEQ ID NO: 67888 - RNA, 24 nt, Artificial Sequence
  Synthetic
cuguucaagccuccaagcugugcc

SEQ ID NO: 67889 - RNA, 18 nt, Artificial Sequence
  Synthetic
cgcccaccaaaucuugcc

SEQ ID NO: 67890 - RNA, 19 nt, Artificial Sequence
  Synthetic
acgcccaccaaaucuugcc

SEQ ID NO: 67891 - RNA, 20 nt, Artificial Sequence
  Synthetic
aacgcccaccaaaucuugcc

SEQ ID NO: 67892 - RNA, 21 nt, Artificial Sequence
  Synthetic
ccaccaagcucugcaggaucc

SEQ ID NO: 67893 - RNA, 22 nt, Artificial Sequence
  Synthetic
uccaccaagcucugcaggaucc

SEQ ID NO: 67894 - RNA, 23 nt, Artificial Sequence
  Synthetic
uuccaccaagcucugcaggaucc

SEQ ID NO: 67895 - RNA, 24 nt, Artificial Sequence
  Synthetic
auuccaccaagcucugcaggaucc

SEQ ID NO: 67896 - RNA, 21 nt, Artificial Sequence
  Synthetic
agguauguugcccguuugucc

SEQ ID NO: 67897 - RNA, 22 nt, Artificial Sequence
  Synthetic
aagguauguugcccguuugucc

SEQ ID NO: 67898 - RNA, 23 nt, Artificial Sequence
  Synthetic
caagguauguugcccguuugucc

SEQ ID NO: 67899 - RNA, 24 nt, Artificial Sequence
  Synthetic
ucaagguauguugcccguuugucc

SEQ ID NO: 67900 - RNA, 21 nt, Artificial Sequence
  Synthetic
uuguacuaggaggcuguaggc

SEQ ID NO: 67901 - RNA, 22 nt, Artificial Sequence
  Synthetic
uuuguacuaggaggcuguaggc

SEQ ID NO: 67902 - RNA, 23 nt, Artificial Sequence
  Synthetic
cuuuguacuaggaggcuguaggc

SEQ ID NO: 67903 - RNA, 24 nt, Artificial Sequence
  Synthetic
ucuuuguacuaggaggcuguaggc

SEQ ID NO: 67904 - RNA, 21 nt, Artificial Sequence
  Synthetic
uaggagugggagcauucgggc

SEQ ID NO: 67905 - RNA, 24 nt, Artificial Sequence
  Synthetic
agguaggagugggagcauucgggc

SEQ ID NO: 67906 - RNA, 21 nt, Artificial Sequence
  Synthetic
cuguauuuuccugcugguggc

SEQ ID NO: 67907 - RNA, 22 nt, Artificial Sequence
  Synthetic
ccuguauuuuccugcugguggc

SEQ ID NO: 67908 - RNA, 21 nt, Artificial Sequence
  Synthetic
cgccuccugccuccaccaauc

SEQ ID NO: 67909 - RNA, 22 nt, Artificial Sequence
  Synthetic
ccgccuccugccuccaccaauc

SEQ ID NO: 67910 - RNA, 23 nt, Artificial Sequence
  Synthetic
uccgccuccugccuccaccaauc

SEQ ID NO: 67911 - RNA, 24 nt, Artificial Sequence
  Synthetic
auccgccuccugccuccaccaauc

SEQ ID NO: 67912 - RNA, 24 nt, Artificial Sequence
  Synthetic
ugggggccaagucuguacaacauc

SEQ ID NO: 67913 - RNA, 24 nt, Artificial Sequence
  Synthetic
uggggcuuucuuggacggucccuc

SEQ ID NO: 67914 - RNA, 18 nt, Artificial Sequence
  Synthetic
caucucgucaaucuucuc

SEQ ID NO: 67915 - RNA, 19 nt, Artificial Sequence
  Synthetic
ucaucucgucaaucuucuc

SEQ ID NO: 67916 - RNA, 20 nt, Artificial Sequence
  Synthetic
cucaucucgucaaucuucuc

SEQ ID NO: 67917 - RNA, 21 nt, Artificial Sequence
  Synthetic
acucaucucgucaaucuucuc

SEQ ID NO: 67918 - RNA, 22 nt, Artificial Sequence
  Synthetic
cacucaucucgucaaucuucuc

SEQ ID NO: 67919 - RNA, 23 nt, Artificial Sequence
  Synthetic
ucacucaucucgucaaucuucuc

SEQ ID NO: 67920 - RNA, 24 nt, Artificial Sequence
  Synthetic
cucacucaucucgucaaucuucuc

SEQ ID NO: 67921 - RNA, 19 nt, Artificial Sequence
  Synthetic
ugucuacgucccgucagcg

SEQ ID NO: 67922 - RNA, 20 nt, Artificial Sequence
  Synthetic
uugucuacgucccgucagcg

SEQ ID NO: 67923 - RNA, 18 nt, Artificial Sequence
  Synthetic
aauuuguccuggcuaucg

SEQ ID NO: 67924 - RNA, 19 nt, Artificial Sequence
  Synthetic
caauuuguccuggcuaucg

SEQ ID NO: 67925 - RNA, 20 nt, Artificial Sequence
  Synthetic
ccaauuuguccuggcuaucg

SEQ ID NO: 67926 - RNA, 21 nt, Artificial Sequence
  Synthetic
uccaauuuguccuggcuaucg

SEQ ID NO: 67927 - RNA, 22 nt, Artificial Sequence
  Synthetic
cuccaauuuguccuggcuaucg

SEQ ID NO: 67928 - RNA, 23 nt, Artificial Sequence
  Synthetic
ccuccaauuuguccuggcuaucg

SEQ ID NO: 67929 - RNA, 24 nt, Artificial Sequence
  Synthetic
uccuccaauuuguccuggcuaucg

SEQ ID NO: 67930 - RNA, 18 nt, Artificial Sequence
  Synthetic
caucaucaugggcuuucg

SEQ ID NO: 67931 - RNA, 19 nt, Artificial Sequence
  Synthetic
ccaucaucaugggcuuucg

SEQ ID NO: 67932 - RNA, 20 nt, Artificial Sequence
  Synthetic
cccaucaucaugggcuuucg

SEQ ID NO: 67933 - RNA, 21 nt, Artificial Sequence
  Synthetic
ucccaucaucaugggcuuucg

SEQ ID NO: 67934 - RNA, 22 nt, Artificial Sequence
  Synthetic
aucccaucaucaugggcuuucg

SEQ ID NO: 67935 - RNA, 23 nt, Artificial Sequence
  Synthetic
caucccaucaucaugggcuuucg

SEQ ID NO: 67936 - RNA, 24 nt, Artificial Sequence
  Synthetic
ccaucccaucaucaugggcuuucg

SEQ ID NO: 67937 - RNA, 23 nt, Artificial Sequence
  Synthetic
aggaccccugcucguguuacagg

SEQ ID NO: 67938 - RNA, 24 nt, Artificial Sequence
  Synthetic
uaggaccccugcucguguuacagg

SEQ ID NO: 67939 - RNA, 18 nt, Artificial Sequence
  Synthetic
ugguggcuccaguuccgg

SEQ ID NO: 67940 - RNA, 19 nt, Artificial Sequence
  Synthetic
cugguggcuccaguuccgg

SEQ ID NO: 67941 - RNA, 21 nt, Artificial Sequence
  Synthetic
ugcugguggcuccaguuccgg

SEQ ID NO: 67942 - RNA, 22 nt, Artificial Sequence
  Synthetic
cugcugguggcuccaguuccgg

SEQ ID NO: 67943 - RNA, 23 nt, Artificial Sequence
  Synthetic
ccugcugguggcuccaguuccgg

SEQ ID NO: 67944 - RNA, 24 nt, Artificial Sequence
  Synthetic
uccugcugguggcuccaguuccgg

SEQ ID NO: 67945 - RNA, 20 nt, Artificial Sequence
  Synthetic
cggucccucucgaauggggg

SEQ ID NO: 67946 - RNA, 21 nt, Artificial Sequence
  Synthetic
uggaugaugugguauuggggg

SEQ ID NO: 67947 - RNA, 22 nt, Artificial Sequence
  Synthetic
auggaugaugugguauuggggg

SEQ ID NO: 67948 - RNA, 23 nt, Artificial Sequence
  Synthetic
uauggaugaugugguauuggggg

SEQ ID NO: 67949 - RNA, 24 nt, Artificial Sequence
  Synthetic
auauggaugaugugguauuggggg

SEQ ID NO: 67950 - RNA, 22 nt, Artificial Sequence
  Synthetic
agauuaaacuuagucaugccug

SEQ ID NO: 67951 - RNA, 23 nt, Artificial Sequence
  Synthetic
aagauuaaacuuagucaugccug

SEQ ID NO: 67952 - RNA, 21 nt, Artificial Sequence
  Synthetic
caugcaacuuuuucaccucug

SEQ ID NO: 67953 - RNA, 22 nt, Artificial Sequence
  Synthetic
ccaugcaacuuuuucaccucug

SEQ ID NO: 67954 - RNA, 23 nt, Artificial Sequence
  Synthetic
accaugcaacuuuuucaccucug

SEQ ID NO: 67955 - RNA, 24 nt, Artificial Sequence
  Synthetic
caccaugcaacuuuuucaccucug

SEQ ID NO: 67956 - RNA, 21 nt, Artificial Sequence
  Synthetic
acaacauuccaccaagcucug

SEQ ID NO: 67957 - RNA, 22 nt, Artificial Sequence
  Synthetic
cacaacauuccaccaagcucug

SEQ ID NO: 67958 - RNA, 23 nt, Artificial Sequence
  Synthetic
ccacaacauuccaccaagcucug

SEQ ID NO: 67959 - RNA, 24 nt, Artificial Sequence
  Synthetic
uccacaacauuccaccaagcucug

SEQ ID NO: 67960 - RNA, 21 nt, Artificial Sequence
  Synthetic
  misc_feature (13)..(13): n is a, c, g, or u
ccggcaacggccnggucugug

SEQ ID NO: 67961 - RNA, 22 nt, Artificial Sequence
  Synthetic
  misc_feature (14)..(14): n is a, c, g, or u
cccggcaacggccnggucugug

SEQ ID NO: 67962 - RNA, 24 nt, Artificial Sequence
  Synthetic
  misc_feature (16)..(16): n is a, c, g, or u
ugcccggcaacggccnggucugug

SEQ ID NO: 67963 - RNA, 21 nt, Artificial Sequence
  Synthetic
  misc_feature (7)..(7): n is a, c, g, or u
uguuaancggccuauugauug

SEQ ID NO: 67964 - RNA, 22 nt, Artificial Sequence
  Synthetic
  misc_feature (8)..(8): n is a, c, g, or u
cuguuaancggccuauugauug

SEQ ID NO: 67965 - RNA, 23 nt, Artificial Sequence
  Synthetic
  misc_feature (9)..(9): n is a, c, g, or u
ccuguuaancggccuauugauug

SEQ ID NO: 67966 - RNA, 24 nt, Artificial Sequence
  Synthetic
  misc_feature (10)..(10): n is a, c, g, or u
cccuguuaancggccuauugauug

SEQ ID NO: 67967 - RNA, 21 nt, Artificial Sequence
  Synthetic
cuacaucauggggcuuucuug

SEQ ID NO: 67968 - RNA, 23 nt, Artificial Sequence
  Synthetic
agcuacaucauggggcuuucuug

SEQ ID NO: 67969 - RNA, 21 nt, Artificial Sequence
  Synthetic
cucaaucuccagcuucccaau

SEQ ID NO: 67970 - RNA, 22 nt, Artificial Sequence
  Synthetic
ucucaaucuccagcuucccaau

SEQ ID NO: 67971 - RNA, 23 nt, Artificial Sequence
  Synthetic
aucucaaucuccagcuucccaau

SEQ ID NO: 67972 - RNA, 21 nt, Artificial Sequence
  Synthetic
cuaguagucaguuaugucaau

SEQ ID NO: 67973 - RNA, 22 nt, Artificial Sequence
  Synthetic
ccuaguagucaguuaugucaau

SEQ ID NO: 67974 - RNA, 23 nt, Artificial Sequence
  Synthetic
accuaguagucaguuaugucaau

SEQ ID NO: 67975 - RNA, 21 nt, Artificial Sequence
  Synthetic
cgaacauggaaagcaucacau

SEQ ID NO: 67976 - RNA, 22 nt, Artificial Sequence
  Synthetic
ccgaacauggaaagcaucacau

SEQ ID NO: 67977 - RNA, 23 nt, Artificial Sequence
  Synthetic
accgaacauggaaagcaucacau

SEQ ID NO: 67978 - RNA, 24 nt, Artificial Sequence
  Synthetic
caccgaacauggaaagcaucacau

SEQ ID NO: 67979 - RNA, 18 nt, Artificial Sequence
  Synthetic
cgccgcgucgcagaagau

SEQ ID NO: 67980 - RNA, 19 nt, Artificial Sequence
  Synthetic
ucgccgcgucgcagaagau

SEQ ID NO: 67981 - RNA, 20 nt, Artificial Sequence
  Synthetic
aucgccgcgucgcagaagau

SEQ ID NO: 67982 - RNA, 18 nt, Artificial Sequence
  Synthetic
cgccucgcagacgaagau

SEQ ID NO: 67983 - RNA, 19 nt, Artificial Sequence
  Synthetic
ucgccucgcagacgaagau

SEQ ID NO: 67984 - RNA, 20 nt, Artificial Sequence
  Synthetic
cucgccucgcagacgaagau

SEQ ID NO: 67985 - RNA, 18 nt, Artificial Sequence
  Synthetic
cuuucggaaaauuccuau

SEQ ID NO: 67986 - RNA, 22 nt, Artificial Sequence
  Synthetic
ugggcuuucggaaaauuccuau

SEQ ID NO: 67987 - RNA, 23 nt, Artificial Sequence
  Synthetic
augggcuuucggaaaauuccuau

SEQ ID NO: 67988 - RNA, 24 nt, Artificial Sequence
  Synthetic
caugggcuuucggaaaauuccuau

SEQ ID NO: 67989 - RNA, 22 nt, Artificial Sequence
  Synthetic
agauaccgccucagcucuguau

SEQ ID NO: 67990 - RNA, 23 nt, Artificial Sequence
  Synthetic
uagauaccgccucagcucuguau

SEQ ID NO: 67991 - RNA, 24 nt, Artificial Sequence
  Synthetic
cuagauaccgccucagcucuguau

SEQ ID NO: 67992 - RNA, 24 nt, Artificial Sequence
  Synthetic
ugggccuaaaguucaggcaauuau

SEQ ID NO: 67993 - RNA, 21 nt, Artificial Sequence
  Synthetic
agggaccuaguagucaguuau

SEQ ID NO: 67994 - RNA, 22 nt, Artificial Sequence
  Synthetic
cagggaccuaguagucaguuau

SEQ ID NO: 67995 - RNA, 23 nt, Artificial Sequence
  Synthetic
ccagggaccuaguagucaguuau

SEQ ID NO: 67996 - RNA, 24 nt, Artificial Sequence
  Synthetic
uccagggaccuaguagucaguuau

SEQ ID NO: 67997 - RNA, 18 nt, Artificial Sequence
  Synthetic
uaccgcagagucuagacu

SEQ ID NO: 67998 - RNA, 19 nt, Artificial Sequence
  Synthetic
auaccgcagagucuagacu

SEQ ID NO: 67999 - RNA, 20 nt, Artificial Sequence
  Synthetic
aauaccgcagagucuagacu

SEQ ID NO: 68000 - RNA, 21 nt, Artificial Sequence
  Synthetic
agauccagcauccagggaccu

SEQ ID NO: 68001 - RNA, 22 nt, Artificial Sequence
  Synthetic
aagauccagcauccagggaccu

SEQ ID NO: 68002 - RNA, 21 nt, Artificial Sequence
  Synthetic
  misc_feature (15)..(15): n is a, c, g, or u
aaacucccuguuaancggccu

SEQ ID NO: 68003 - RNA, 22 nt, Artificial Sequence
  Synthetic
  misc_feature (16)..(16): n is a, c, g, or u
aaaacucccuguuaancggccu

SEQ ID NO: 68004 - RNA, 24 nt, Artificial Sequence
  Synthetic
  misc_feature (18)..(18): n is a, c, g, or u
agaaaacucccuguuaancggccu

SEQ ID NO: 68005 - RNA, 21 nt, Artificial Sequence
  Synthetic
cagcucuguaucgggaugccu

SEQ ID NO: 68006 - RNA, 22 nt, Artificial Sequence
  Synthetic
ucagcucuguaucgggaugccu

SEQ ID NO: 68007 - RNA, 23 nt, Artificial Sequence
  Synthetic
cucagcucuguaucgggaugccu

SEQ ID NO: 68008 - RNA, 24 nt, Artificial Sequence
  Synthetic
ccucagcucuguaucgggaugccu

SEQ ID NO: 68009 - RNA, 22 nt, Artificial Sequence
  Synthetic
aguaagaggccuguauuuuccu

SEQ ID NO: 68010 - RNA, 24 nt, Artificial Sequence
  Synthetic
agaguaagaggccuguauuuuccu

SEQ ID NO: 68011 - RNA, 24 nt, Artificial Sequence
  Synthetic
cgggcuuucccccacugucuggcu

SEQ ID NO: 68012 - RNA, 18 nt, Artificial Sequence
  Synthetic
acaauuuguagguccucu

SEQ ID NO: 68013 - RNA, 19 nt, Artificial Sequence
  Synthetic
aacaauuuguagguccucu

SEQ ID NO: 68014 - RNA, 21 nt, Artificial Sequence
  Synthetic
ugaacaauuuguagguccucu

SEQ ID NO: 68015 - RNA, 23 nt, Artificial Sequence
  Synthetic
ugugaacaauuuguagguccucu

SEQ ID NO: 68016 - RNA, 24 nt, Artificial Sequence
  Synthetic
augugaacaauuuguagguccucu

SEQ ID NO: 68017 - RNA, 19 nt, Artificial Sequence
  Synthetic
agacucgugguggacuucu

SEQ ID NO: 68018 - RNA, 20 nt, Artificial Sequence
  Synthetic
uagacucgugguggacuucu

SEQ ID NO: 68019 - RNA, 21 nt, Artificial Sequence
  Synthetic
cuagacucgugguggacuucu

SEQ ID NO: 68020 - RNA, 22 nt, Artificial Sequence
  Synthetic
ucuagacucgugguggacuucu

SEQ ID NO: 68021 - RNA, 24 nt, Artificial Sequence
  Synthetic
agucuagacucgugguggacuucu

SEQ ID NO: 68022 - RNA, 21 nt, Artificial Sequence
  Synthetic
  misc_feature (7)..(7): n is a, c, g, or u
cuggacngaagccaacaaggu

SEQ ID NO: 68023 - RNA, 22 nt, Artificial Sequence
  Synthetic
  misc_feature (8)..(8): n is a, c, g, or u
acuggacngaagccaacaaggu

SEQ ID NO: 68024 - RNA, 23 nt, Artificial Sequence
  Synthetic
  misc_feature (9)..(9): n is a, c, g, or u
cacuggacngaagccaacaaggu

SEQ ID NO: 68025 - RNA, 24 nt, Artificial Sequence
  Synthetic
  misc_feature (10)..(10): n is a, c, g, or u
ccacuggacngaagccaacaaggu

SEQ ID NO: 68026 - RNA, 22 nt, Artificial Sequence
  Synthetic
agaagaucucaaucuccagcuu

SEQ ID NO: 68027 - RNA, 23 nt, Artificial Sequence
  Synthetic
cagaagaucucaaucuccagcuu

SEQ ID NO: 68028 - RNA, 22 nt, Artificial Sequence
  Synthetic
ugcugcuaugccucaucuucuu

SEQ ID NO: 68029 - RNA, 23 nt, Artificial Sequence
  Synthetic
cugcugcuaugccucaucuucuu

SEQ ID NO: 68030 - RNA, 24 nt, Artificial Sequence
  Synthetic
ccugcugcuaugccucaucuucuu

SEQ ID NO: 68031 - RNA, 22 nt, Artificial Sequence
  Synthetic
ugagucccuuuauaccucuguu

SEQ ID NO: 68032 - RNA, 23 nt, Artificial Sequence
  Synthetic
uugagucccuuuauaccucuguu

SEQ ID NO: 68033 - RNA, 24 nt, Artificial Sequence
  Synthetic
cuugagucccuuuauaccucuguu

SEQ ID NO: 68034 - RNA, 21 nt, Artificial Sequence
  Synthetic
  misc_feature (2)..(2): n is a, c, g, or u
cnuagaguauuuggugucuuu

SEQ ID NO: 68035 - RNA, 22 nt, Artificial Sequence
  Synthetic
  misc_feature (3)..(3): n is a, c, g, or u
ucnuagaguauuuggugucuuu

SEQ ID NO: 68036 - RNA, 24 nt, Artificial Sequence
  Synthetic
  misc_feature (5)..(5): n is a, c, g, or u
cgucnuagaguauuuggugucuuu

SEQ ID NO: 68037 - RNA, 21 nt, Artificial Sequence
  Synthetic
  misc_feature (5)..(5): n is a, c, g, or u
cuacncguagcgccucauuuu

SEQ ID NO: 68038 - RNA, 22 nt, Artificial Sequence
  Synthetic
  misc_feature (6)..(6): n is a, c, g, or u
acuacncguagcgccucauuuu

SEQ ID NO: 68039 - RNA, 23 nt, Artificial Sequence
  Synthetic
  misc_feature (7)..(7): n is a, c, g, or u
aacuacncguagcgccucauuuu

SEQ ID NO: 68040 - RNA, 24 nt, Artificial Sequence
  Synthetic
  misc_feature (8)..(8): n is a, c, g, or u
aaacuacncguagcgccucauuuu

SEQ ID NO: 68041 - RNA, 18 nt, Artificial Sequence
  Synthetic
guauacccaaagacaaaa

SEQ ID NO: 68042 - RNA, 22 nt, Artificial Sequence
  Synthetic
guauacccaaagacaaaagaaa

SEQ ID NO: 68043 - RNA, 18 nt, Artificial Sequence
  Synthetic
guccagaagaaccaacaa

SEQ ID NO: 68044 - RNA, 21 nt, Artificial Sequence
  Synthetic
guuaauaauguccuggugcaa

SEQ ID NO: 68045 - RNA, 20 nt, Artificial Sequence
  Synthetic
guagcucuuguucccaagaa

SEQ ID NO: 68046 - RNA, 18 nt, Artificial Sequence
  Synthetic
gaucucuuacugaaggaa

SEQ ID NO: 68047 - RNA, 19 nt, Artificial Sequence
  Synthetic
gcagcaggaugaagaggaa

SEQ ID NO: 68048 - RNA, 24 nt, Artificial Sequence
  Synthetic
gcauagcagcaggaugaagaggaa

SEQ ID NO: 68049 - RNA, 18 nt, Artificial Sequence
  Synthetic
gugaggcaguagucggaa

SEQ ID NO: 68050 - RNA, 20 nt, Artificial Sequence
  Synthetic
gagugaggcaguagucggaa

SEQ ID NO: 68051 - RNA, 23 nt, Artificial Sequence
  Synthetic
gaugagugaggcaguagucggaa

SEQ ID NO: 68052 - RNA, 23 nt, Artificial Sequence
  Synthetic
gauuaacuacauuaucuggauaa

SEQ ID NO: 68053 - RNA, 21 nt, Artificial Sequence
  Synthetic
  misc_feature (2)..(2): n is a, c, g, or u
gnuuaacagggaguuuucuaa

SEQ ID NO: 68054 - RNA, 24 nt, Artificial Sequence
  Synthetic
  misc_feature (5)..(5): n is a, c, g, or u
gccgnuuaacagggaguuuucuaa

SEQ ID NO: 68055 - RNA, 19 nt, Artificial Sequence
  Synthetic
gaacaguaggacaugaaca

SEQ ID NO: 68056 - RNA, 23 nt, Artificial Sequence
  Synthetic
guuucucuuccaaaagugagaca

SEQ ID NO: 68057 - RNA, 24 nt, Artificial Sequence
  Synthetic
gguuucucuuccaaaagugagaca

SEQ ID NO: 68058 - RNA, 21 nt, Artificial Sequence
  Synthetic
gccaggacaaauuggaggaca

SEQ ID NO: 68059 - RNA, 23 nt, Artificial Sequence
  Synthetic
guucccaagaauaaggugaccca

SEQ ID NO: 68060 - RNA, 18 nt, Artificial Sequence
  Synthetic
gccuauggccaagcccca

SEQ ID NO: 68061 - RNA, 19 nt, Artificial Sequence
  Synthetic
ggccuauggccaagcccca

SEQ ID NO: 68062 - RNA, 22 nt, Artificial Sequence
  Synthetic
gauggccuauggccaagcccca

SEQ ID NO: 68063 - RNA, 18 nt, Artificial Sequence
  Synthetic
ggucgggaaaaaauccca

SEQ ID NO: 68064 - RNA, 20 nt, Artificial Sequence
  Synthetic
guggucgggaaaaaauccca

SEQ ID NO: 68065 - RNA, 19 nt, Artificial Sequence
  Synthetic
gcucugaaugcuggaucca

SEQ ID NO: 68066 - RNA, 20 nt, Artificial Sequence
  Synthetic
  misc_feature (8)..(9): n is a, c, g, or u
gucauuannuccccccagca

SEQ ID NO: 68067 - RNA, 22 nt, Artificial Sequence
  Synthetic
  misc_feature (10)..(11): n is a, c, g, or u
gagucauuannuccccccagca

SEQ ID NO: 68068 - RNA, 18 nt, Artificial Sequence
  Synthetic
guugauaagauaggggca

SEQ ID NO: 68069 - RNA, 20 nt, Artificial Sequence
  Synthetic
guguugauaagauaggggca

SEQ ID NO: 68070 - RNA, 23 nt, Artificial Sequence
  Synthetic
gaaguguugauaagauaggggca

SEQ ID NO: 68071 - RNA, 24 nt, Artificial Sequence
  Synthetic
ggaaguguugauaagauaggggca

SEQ ID NO: 68072 - RNA, 18 nt, Artificial Sequence
  Synthetic
gaggugaagcgaagugca

SEQ ID NO: 68073 - RNA, 19 nt, Artificial Sequence
  Synthetic
  misc_feature (4)..(4): n is a, c, g, or u
gugnggugaacaaugcuca

SEQ ID NO: 68074 - RNA, 20 nt, Artificial Sequence
  Synthetic
  misc_feature (5)..(5): n is a, c, g, or u
ggugnggugaacaaugcuca

SEQ ID NO: 68075 - RNA, 24 nt, Artificial Sequence
  Synthetic
  misc_feature (3)..(3): n is a, c, g, or u
  misc_feature (9)..(9): n is a, c, g, or u
gunuggugnggugaacaaugcuca

SEQ ID NO: 68076 - RNA, 22 nt, Artificial Sequence
  Synthetic
gcaaaugaauaucaggaaaaga

SEQ ID NO: 68077 - RNA, 24 nt, Artificial Sequence
  Synthetic
gugcaaaugaauaucaggaaaaga

SEQ ID NO: 68078 - RNA, 18 nt, Artificial Sequence
  Synthetic
guaagaccuugggcaaga

SEQ ID NO: 68079 - RNA, 21 nt, Artificial Sequence
  Synthetic
gaaagugaaagccugcuuaga

SEQ ID NO: 68080 - RNA, 23 nt, Artificial Sequence
  Synthetic
gagaaagugaaagccugcuuaga

SEQ ID NO: 68081 - RNA, 20 nt, Artificial Sequence
  Synthetic
gaucuucgucugcgaggcga

SEQ ID NO: 68082 - RNA, 20 nt, Artificial Sequence
  Synthetic
gcaggguccccaauccucga

SEQ ID NO: 68083 - RNA, 19 nt, Artificial Sequence
  Synthetic
gugcaaaugaauaucagga

SEQ ID NO: 68084 - RNA, 20 nt, Artificial Sequence
  Synthetic
ggugcaaaugaauaucagga

SEQ ID NO: 68085 - RNA, 20 nt, Artificial Sequence
  Synthetic
gauccaacugguggucggga

SEQ ID NO: 68086 - RNA, 23 nt, Artificial Sequence
  Synthetic
  misc_feature (2)..(2): n is a, c, g, or u
  misc_feature (11)..(11): n is a, c, g, or u
gnaaauauuunguagagauggga

SEQ ID NO: 68087 - RNA, 24 nt, Artificial Sequence
  Synthetic
  misc_feature (3)..(3): n is a, c, g, or u
  misc_feature (12)..(12): n is a, c, g, or u
ggnaaauauuunguagagauggga

SEQ ID NO: 68088 - RNA, 21 nt, Artificial Sequence
  Synthetic
gaaaaaaucuagcaggcauga

SEQ ID NO: 68089 - RNA, 22 nt, Artificial Sequence
  Synthetic
ggaaaaaaucuagcaggcauga

SEQ ID NO: 68090 - RNA, 23 nt, Artificial Sequence
  Synthetic
gggaaaaaaucuagcaggcauga

SEQ ID NO: 68091 - RNA, 24 nt, Artificial Sequence
  Synthetic
gaauuuuccgaaagcccaugauga

SEQ ID NO: 68092 - RNA, 18 nt, Artificial Sequence
  Synthetic
ggguccuaggaauccuga

SEQ ID NO: 68093 - RNA, 19 nt, Artificial Sequence
  Synthetic
gggguccuaggaauccuga

SEQ ID NO: 68094 - RNA, 22 nt, Artificial Sequence
  Synthetic
gcagggguccuaggaauccuga

SEQ ID NO: 68095 - RNA, 24 nt, Artificial Sequence
  Synthetic
gagcagggguccuaggaauccuga

SEQ ID NO: 68096 - RNA, 20 nt, Artificial Sequence
  Synthetic
gcaucccgauacagagcuga

SEQ ID NO: 68097 - RNA, 18 nt, Artificial Sequence
  Synthetic
gauugacgagaugaguga

SEQ ID NO: 68098 - RNA, 19 nt, Artificial Sequence
  Synthetic
gaugauuaggcagagguga

SEQ ID NO: 68099 - RNA, 21 nt, Artificial Sequence
  Synthetic
gagaugauuaggcagagguga

SEQ ID NO: 68100 - RNA, 20 nt, Artificial Sequence
  Synthetic
  misc_feature (4)..(4): n is a, c, g, or u
guanucuccggaaguguuga

SEQ ID NO: 68101 - RNA, 19 nt, Artificial Sequence
  Synthetic
  misc_feature (2)..(2): n is a, c, g, or u
  misc_feature (11)..(11): n is a, c, g, or u
gnguaguuucncuuuuaua

SEQ ID NO: 68102 - RNA, 24 nt, Artificial Sequence
  Synthetic
  misc_feature (7)..(7): n is a, c, g, or u
  misc_feature (16)..(16): n is a, c, g, or u
gcuacgnguaguuucncuuuuaua

SEQ ID NO: 68103 - RNA, 19 nt, Artificial Sequence
  Synthetic
guauugacauaacugacua

SEQ ID NO: 68104 - RNA, 18 nt, Artificial Sequence
  Synthetic
gagcugaggcgguaucua

SEQ ID NO: 68105 - RNA, 24 nt, Artificial Sequence
  Synthetic
gauacagagcugaggcgguaucua

SEQ ID NO: 68106 - RNA, 19 nt, Artificial Sequence
  Synthetic
gaagucagaaggcaaaaac

SEQ ID NO: 68107 - RNA, 23 nt, Artificial Sequence
  Synthetic
gaaagaagucagaaggcaaaaac

SEQ ID NO: 68108 - RNA, 24 nt, Artificial Sequence
  Synthetic
ggaaagaagucagaaggcaaaaac

SEQ ID NO: 68109 - RNA, 19 nt, Artificial Sequence
  Synthetic
gagacaagaaaugugaaac

SEQ ID NO: 68110 - RNA, 21 nt, Artificial Sequence
  Synthetic
gugagacaagaaaugugaaac

SEQ ID NO: 68111 - RNA, 20 nt, Artificial Sequence
  Synthetic
gacaaaagaaaauugguaac

SEQ ID NO: 68112 - RNA, 20 nt, Artificial Sequence
  Synthetic
gacaagaaaugugaaaccac

SEQ ID NO: 68113 - RNA, 22 nt, Artificial Sequence
  Synthetic
gagacaagaaaugugaaaccac

SEQ ID NO: 68114 - RNA, 24 nt, Artificial Sequence
  Synthetic
gugagacaagaaaugugaaaccac

SEQ ID NO: 68115 - RNA, 22 nt, Artificial Sequence
  Synthetic
  misc_feature (15)..(15): n is a, c, g, or u
gaucuuccaaauuuncacccac

SEQ ID NO: 68116 - RNA, 23 nt, Artificial Sequence
  Synthetic
  misc_feature (16)..(16): n is a, c, g, or u
ggaucuuccaaauuuncacccac

SEQ ID NO: 68117 - RNA, 18 nt, Artificial Sequence
  Synthetic
gaucggcagaggagccac

SEQ ID NO: 68118 - RNA, 19 nt, Artificial Sequence
  Synthetic
ggaucggcagaggagccac

SEQ ID NO: 68119 - RNA, 18 nt, Artificial Sequence
  Synthetic
gauuuggugggcguucac

SEQ ID NO: 68120 - RNA, 18 nt, Artificial Sequence
  Synthetic
gacaaacgggcaacauac

SEQ ID NO: 68121 - RNA, 19 nt, Artificial Sequence
  Synthetic
ggacaaacgggcaacauac

SEQ ID NO: 68122 - RNA, 21 nt, Artificial Sequence
  Synthetic
gaggacaaacgggcaacauac

SEQ ID NO: 68123 - RNA, 20 nt, Artificial Sequence
  Synthetic
gcagcaaagcccaaaagacc

SEQ ID NO: 68124 - RNA, 21 nt, Artificial Sequence
  Synthetic
ggcagcaaagcccaaaagacc

SEQ ID NO: 68125 - RNA, 22 nt, Artificial Sequence
  Synthetic
gggcagcaaagcccaaaagacc

SEQ ID NO: 68126 - RNA, 23 nt, Artificial Sequence
  Synthetic
ggggcagcaaagcccaaaagacc

SEQ ID NO: 68127 - RNA, 19 nt, Artificial Sequence
  Synthetic
gccuccuaguacaaagacc

SEQ ID NO: 68128 - RNA, 18 nt, Artificial Sequence
  Synthetic
gaccguccaagaaagccc

SEQ ID NO: 68129 - RNA, 19 nt, Artificial Sequence
  Synthetic
ggaccguccaagaaagccc

SEQ ID NO: 68130 - RNA, 20 nt, Artificial Sequence
  Synthetic
gggaccguccaagaaagccc

SEQ ID NO: 68131 - RNA, 18 nt, Artificial Sequence
  Synthetic
guaaagagaggugcgccc

SEQ ID NO: 68132 - RNA, 20 nt, Artificial Sequence
  Synthetic
gcguaaagagaggugcgccc

SEQ ID NO: 68133 - RNA, 18 nt, Artificial Sequence
  Synthetic
gauguagcucuuguuccc

SEQ ID NO: 68134 - RNA, 20 nt, Artificial Sequence
  Synthetic
gauguuguacagacuuggcc

SEQ ID NO: 68135 - RNA, 20 nt, Artificial Sequence
  Synthetic
  misc_feature (15)..(15): n is a, c, g, or u
gucuaacaacaguanucucc

SEQ ID NO: 68136 - RNA, 20 nt, Artificial Sequence
  Synthetic
  misc_feature (12)..(12): n is a, c, g, or u
guugacauugcngagagucc

SEQ ID NO: 68137 - RNA, 19 nt, Artificial Sequence
  Synthetic
gaacaagagaugauuaggc

SEQ ID NO: 68138 - RNA, 18 nt, Artificial Sequence
  Synthetic
  misc_feature (15)..(15): n is a, c, g, or u
gggggagugaacccnggc

SEQ ID NO: 68139 - RNA, 20 nt, Artificial Sequence
  Synthetic
  misc_feature (17)..(17): n is a, c, g, or u
gugggggagugaacccnggc

SEQ ID NO: 68140 - RNA, 22 nt, Artificial Sequence
  Synthetic
  misc_feature (19)..(19): n is a, c, g, or u
gugugggggagugaacccnggc

SEQ ID NO: 68141 - RNA, 18 nt, Artificial Sequence
  Synthetic
gagaaagugaaagccugc

SEQ ID NO: 68142 - RNA, 20 nt, Artificial Sequence
  Synthetic
gcgagaaagugaaagccugc

SEQ ID NO: 68143 - RNA, 19 nt, Artificial Sequence
  Synthetic
gcaaaaacgagaguaacuc

SEQ ID NO: 68144 - RNA, 20 nt, Artificial Sequence
  Synthetic
ggcaaaaacgagaguaacuc

SEQ ID NO: 68145 - RNA, 23 nt, Artificial Sequence
  Synthetic
gaaggcaaaaacgagaguaacuc

SEQ ID NO: 68146 - RNA, 21 nt, Artificial Sequence
  Synthetic
gaaaauacaggccucuuacuc

SEQ ID NO: 68147 - RNA, 22 nt, Artificial Sequence
  Synthetic
ggaaaauacaggccucuuacuc

SEQ ID NO: 68148 - RNA, 21 nt, Artificial Sequence
  Synthetic
gccugaggaugagugucucuc

SEQ ID NO: 68149 - RNA, 22 nt, Artificial Sequence
  Synthetic
ggccugaggaugagugucucuc

SEQ ID NO: 68150 - RNA, 18 nt, Artificial Sequence
  Synthetic
gaguuuucuaaaacaguc

SEQ ID NO: 68151 - RNA, 19 nt, Artificial Sequence
  Synthetic
ggaguuuucuaaaacaguc

SEQ ID NO: 68152 - RNA, 20 nt, Artificial Sequence
  Synthetic
gggaguuuucuaaaacaguc

SEQ ID NO: 68153 - RNA, 19 nt, Artificial Sequence
  Synthetic
gcauacagaggcauuaaag

SEQ ID NO: 68154 - RNA, 19 nt, Artificial Sequence
  Synthetic
gaugggaugggaauacaag

SEQ ID NO: 68155 - RNA, 21 nt, Artificial Sequence
  Synthetic
gucuuugaaguaugccucaag

SEQ ID NO: 68156 - RNA, 19 nt, Artificial Sequence
  Synthetic
gaacuggagccaccagcag

SEQ ID NO: 68157 - RNA, 20 nt, Artificial Sequence
  Synthetic
ggaacuggagccaccagcag

SEQ ID NO: 68158 - RNA, 18 nt, Artificial Sequence
  Synthetic
gaagaugaggcauagcag

SEQ ID NO: 68159 - RNA, 19 nt, Artificial Sequence
  Synthetic
gcauggugcuggugcgcag

SEQ ID NO: 68160 - RNA, 21 nt, Artificial Sequence
  Synthetic
gaauggcuugccugagugcag

SEQ ID NO: 68161 - RNA, 20 nt, Artificial Sequence
  Synthetic
gacaaauuggaggacaagag

SEQ ID NO: 68162 - RNA, 21 nt, Artificial Sequence
  Synthetic
ggacaaauuggaggacaagag

SEQ ID NO: 68163 - RNA, 21 nt, Artificial Sequence
  Synthetic
gcauagcagcaggaugaagag

SEQ ID NO: 68164 - RNA, 22 nt, Artificial Sequence
  Synthetic
ggcauagcagcaggaugaagag

SEQ ID NO: 68165 - RNA, 24 nt, Artificial Sequence
  Synthetic
gaggcauagcagcaggaugaagag

SEQ ID NO: 68166 - RNA, 20 nt, Artificial Sequence
  Synthetic
  misc_feature (3)..(3): n is a, c, g, or u
ganccccaagcgaccccgag

SEQ ID NO: 68167 - RNA, 24 nt, Artificial Sequence
  Synthetic
  misc_feature (3)..(3): n is a, c, g, or u
  misc_feature (7)..(7): n is a, c, g, or u
ganaganccccaagcgaccccgag

SEQ ID NO: 68168 - RNA, 18 nt, Artificial Sequence
  Synthetic
gauugguggaggcaggag

SEQ ID NO: 68169 - RNA, 21 nt, Artificial Sequence
  Synthetic
gccgauugguggaggcaggag

SEQ ID NO: 68170 - RNA, 21 nt, Artificial Sequence
  Synthetic
gcaaagaauggcuugccugag

SEQ ID NO: 68171 - RNA, 20 nt, Artificial Sequence
  Synthetic
gcucccccuagaaaauugag

SEQ ID NO: 68172 - RNA, 19 nt, Artificial Sequence
  Synthetic
  misc_feature (9)..(9): n is a, c, g, or u
guagaaganuaaagccccg

SEQ ID NO: 68173 - RNA, 24 nt, Artificial Sequence
  Synthetic
  misc_feature (14)..(14): n is a, c, g, or u
guauaguagaaganuaaagccccg

SEQ ID NO: 68174 - RNA, 19 nt, Artificial Sequence
  Synthetic
gcugccuuccugacugccg

SEQ ID NO: 68175 - RNA, 20 nt, Artificial Sequence
  Synthetic
ggcugccuuccugacugccg

SEQ ID NO: 68176 - RNA, 19 nt, Artificial Sequence
  Synthetic
gaugagugucucucaaagg

SEQ ID NO: 68177 - RNA, 20 nt, Artificial Sequence
  Synthetic
ggaugagugucucucaaagg

SEQ ID NO: 68178 - RNA, 22 nt, Artificial Sequence
  Synthetic
gaggaugagugucucucaaagg

SEQ ID NO: 68179 - RNA, 20 nt, Artificial Sequence
  Synthetic
gcuccaaauucuuuauaagg

SEQ ID NO: 68180 - RNA, 18 nt, Artificial Sequence
  Synthetic
guuaggauuaaagacagg

SEQ ID NO: 68181 - RNA, 18 nt, Artificial Sequence
  Synthetic
gggaaaaaaucccagagg

SEQ ID NO: 68182 - RNA, 21 nt, Artificial Sequence
  Synthetic
gucgggaaaaaaucccagagg

SEQ ID NO: 68183 - RNA, 22 nt, Artificial Sequence
  Synthetic
ggucgggaaaaaaucccagagg

SEQ ID NO: 68184 - RNA, 24 nt, Artificial Sequence
  Synthetic
guggucgggaaaaaaucccagagg

SEQ ID NO: 68185 - RNA, 21 nt, Artificial Sequence
  Synthetic
guuuuauaccuuucucuaggg

SEQ ID NO: 68186 - RNA, 22 nt, Artificial Sequence
  Synthetic
gguuuuauaccuuucucuaggg

SEQ ID NO: 68187 - RNA, 19 nt, Artificial Sequence
  Synthetic
gagugucucucaaaggugg

SEQ ID NO: 68188 - RNA, 22 nt, Artificial Sequence
  Synthetic
gaugagugucucucaaaggugg

SEQ ID NO: 68189 - RNA, 23 nt, Artificial Sequence
  Synthetic
ggaugagugucucucaaaggugg

SEQ ID NO: 68190 - RNA, 21 nt, Artificial Sequence
  Synthetic
  misc_feature (18)..(18): n is a, c, g, or u
gcuugccugagugcagunugg

SEQ ID NO: 68191 - RNA, 22 nt, Artificial Sequence
  Synthetic
  misc_feature (19)..(19): n is a, c, g, or u
ggcuugccugagugcagunugg

SEQ ID NO: 68192 - RNA, 18 nt, Artificial Sequence
  Synthetic
ggauccugcagagcuugg

SEQ ID NO: 68193 - RNA, 19 nt, Artificial Sequence
  Synthetic
gggauccugcagagcuugg

SEQ ID NO: 68194 - RNA, 24 nt, Artificial Sequence
  Synthetic
gauuucugguguuugcucugaaug

SEQ ID NO: 68195 - RNA, 18 nt, Artificial Sequence
  Synthetic
gaugugaugcuuuccaug

SEQ ID NO: 68196 - RNA, 20 nt, Artificial Sequence
  Synthetic
gacuacuaggucccuggaug

SEQ ID NO: 68197 - RNA, 18 nt, Artificial Sequence
  Synthetic
gauuaacuacauuaucug

SEQ ID NO: 68198 - RNA, 20 nt, Artificial Sequence
  Synthetic
gaugcuuuccauguucggug

SEQ ID NO: 68199 - RNA, 22 nt, Artificial Sequence
  Synthetic
gugaugcuuuccauguucggug

SEQ ID NO: 68200 - RNA, 18 nt, Artificial Sequence
  Synthetic
  misc_feature (8)..(8): n is a, c, g, or u
  misc_feature (14)..(14): n is a, c, g, or u
gugcagunuggugnggug

SEQ ID NO: 68201 - RNA, 20 nt, Artificial Sequence
  Synthetic
  misc_feature (10)..(10): n is a, c, g, or u
  misc_feature (16)..(16): n is a, c, g, or u
gagugcagunuggugnggug

SEQ ID NO: 68202 - RNA, 24 nt, Artificial Sequence
  Synthetic
  misc_feature (14)..(14): n is a, c, g, or u
  misc_feature (20)..(20): n is a, c, g, or u
gccugagugcagunuggugnggug

SEQ ID NO: 68203 - RNA, 18 nt, Artificial Sequence
  Synthetic
gcacagcuuggaggcuug

SEQ ID NO: 68204 - RNA, 19 nt, Artificial Sequence
  Synthetic
ggcacagcuuggaggcuug

SEQ ID NO: 68205 - RNA, 18 nt, Artificial Sequence
  Synthetic
gcagaggugaaaaaguug

SEQ ID NO: 68206 - RNA, 19 nt, Artificial Sequence
  Synthetic
ggcagaggugaaaaaguug

SEQ ID NO: 68207 - RNA, 24 nt, Artificial Sequence
  Synthetic
gauuaggcagaggugaaaaaguug

SEQ ID NO: 68208 - RNA, 24 nt, Artificial Sequence
  Synthetic
gacaaauuggaggacaagagguug

SEQ ID NO: 68209 - RNA, 22 nt, Artificial Sequence
  Synthetic
  misc_feature (9)..(9): n is a, c, g, or u
  misc_feature (22)..(22): n is a, c, g, or u
gauuuucanucugauguguucn

SEQ ID NO: 68210 - RNA, 20 nt, Artificial Sequence
  Synthetic
guugggauuguggucccaau

SEQ ID NO: 68211 - RNA, 19 nt, Artificial Sequence
  Synthetic
gagcagggguccuaggaau

SEQ ID NO: 68212 - RNA, 23 nt, Artificial Sequence
  Synthetic
gcccaugaugaugggaugggaau

SEQ ID NO: 68213 - RNA, 18 nt, Artificial Sequence
  Synthetic
gcaacaugagggaaacau

SEQ ID NO: 68214 - RNA, 23 nt, Artificial Sequence
  Synthetic
gaacagcaacaugagggaaacau

SEQ ID NO: 68215 - RNA, 19 nt, Artificial Sequence
  Synthetic
gaauuuuccgaaagcccau

SEQ ID NO: 68216 - RNA, 20 nt, Artificial Sequence
  Synthetic
ggaauuuuccgaaagcccau

SEQ ID NO: 68217 - RNA, 19 nt, Artificial Sequence
  Synthetic
gccugaacuuuaggcccau

SEQ ID NO: 68218 - RNA, 18 nt, Artificial Sequence
  Synthetic
gcugaggcccacucccau

SEQ ID NO: 68219 - RNA, 19 nt, Artificial Sequence
  Synthetic
ggcugaggcccacucccau

SEQ ID NO: 68220 - RNA, 20 nt, Artificial Sequence
  Synthetic
gggcugaggcccacucccau

SEQ ID NO: 68221 - RNA, 21 nt, Artificial Sequence
  Synthetic
gcucaggagauucuaaggcau

SEQ ID NO: 68222 - RNA, 22 nt, Artificial Sequence
  Synthetic
guccaguggucuuuguugggau

SEQ ID NO: 68223 - RNA, 20 nt, Artificial Sequence
  Synthetic
gcccgccuuccauaggguau

SEQ ID NO: 68224 - RNA, 20 nt, Artificial Sequence
  Synthetic
guaaugauuaacuacauuau

SEQ ID NO: 68225 - RNA, 23 nt, Artificial Sequence
  Synthetic
gaaguaaugauuaacuacauuau

SEQ ID NO: 68226 - RNA, 24 nt, Artificial Sequence
  Synthetic
ggaaguaaugauuaacuacauuau

SEQ ID NO: 68227 - RNA, 19 nt, Artificial Sequence
  Synthetic
guagcuccaaauucuuuau

SEQ ID NO: 68228 - RNA, 19 nt, Artificial Sequence
  Synthetic
  misc_feature (11)..(11): n is a, c, g, or u
gugguaauganccccaacu

SEQ ID NO: 68229 - RNA, 22 nt, Artificial Sequence
  Synthetic
gcucugaaugcuggauccaacu

SEQ ID NO: 68230 - RNA, 22 nt, Artificial Sequence
  Synthetic
guaacagagguauaaagggacu

SEQ ID NO: 68231 - RNA, 23 nt, Artificial Sequence
  Synthetic
gguaacagagguauaaagggacu

SEQ ID NO: 68232 - RNA, 18 nt, Artificial Sequence
  Synthetic
  misc_feature (3)..(3): n is a, c, g, or u
  misc_feature (9)..(9): n is a, c, g, or u
ganuggagnuuggggacu

SEQ ID NO: 68233 - RNA, 20 nt, Artificial Sequence
  Synthetic
  misc_feature (5)..(5): n is a, c, g, or u
  misc_feature (11)..(11): n is a, c, g, or u
guganuggagnuuggggacu

SEQ ID NO: 68234 - RNA, 22 nt, Artificial Sequence
  Synthetic
  misc_feature (7)..(7): n is a, c, g, or u
  misc_feature (13)..(13): n is a, c, g, or u
gaguganuggagnuuggggacu

SEQ ID NO: 68235 - RNA, 24 nt, Artificial Sequence
  Synthetic
  misc_feature (9)..(9): n is a, c, g, or u
  misc_feature (15)..(15): n is a, c, g, or u
gugaguganuggagnuuggggacu

SEQ ID NO: 68236 - RNA, 19 nt, Artificial Sequence
  Synthetic
guaggcugccuuccugacu

SEQ ID NO: 68237 - RNA, 20 nt, Artificial Sequence
  Synthetic
gguaggcugccuuccugacu

SEQ ID NO: 68238 - RNA, 21 nt, Artificial Sequence
  Synthetic
ggguaggcugccuuccugacu

SEQ ID NO: 68239 - RNA, 22 nt, Artificial Sequence
  Synthetic
gggguaggcugccuuccugacu

SEQ ID NO: 68240 - RNA, 22 nt, Artificial Sequence
  Synthetic
gaccaauuuaugccuacagccu

SEQ ID NO: 68241 - RNA, 21 nt, Artificial Sequence
  Synthetic
gaauacuaacauugggaagcu

SEQ ID NO: 68242 - RNA, 22 nt, Artificial Sequence
  Synthetic
ggaauacuaacauugggaagcu

SEQ ID NO: 68243 - RNA, 19 nt, Artificial Sequence
  Synthetic
gaguaacuccacaguagcu

SEQ ID NO: 68244 - RNA, 18 nt, Artificial Sequence
  Synthetic
gcaggaggcggaucugcu

SEQ ID NO: 68245 - RNA, 19 nt, Artificial Sequence
  Synthetic
ggcaggaggcggaucugcu

SEQ ID NO: 68246 - RNA, 21 nt, Artificial Sequence
  Synthetic
gaggcaggaggcggaucugcu

SEQ ID NO: 68247 - RNA, 22 nt, Artificial Sequence
  Synthetic
ggaggcaggaggcggaucugcu

SEQ ID NO: 68248 - RNA, 24 nt, Artificial Sequence
  Synthetic
guggaggcaggaggcggaucugcu

SEQ ID NO: 68249 - RNA, 18 nt, Artificial Sequence
  Synthetic
ggauuucugguguuugcu

SEQ ID NO: 68250 - RNA, 18 nt, Artificial Sequence
  Synthetic
ggccaagccccagccagu

SEQ ID NO: 68251 - RNA, 24 nt, Artificial Sequence
  Synthetic
gccuauggccaagccccagccagu

SEQ ID NO: 68252 - RNA, 21 nt, Artificial Sequence
  Synthetic
gaaaagauggaguuuuccagu

SEQ ID NO: 68253 - RNA, 22 nt, Artificial Sequence
  Synthetic
ggaaaagauggaguuuuccagu

SEQ ID NO: 68254 - RNA, 18 nt, Artificial Sequence
  Synthetic
ggcuaggaguuccgcagu

SEQ ID NO: 68255 - RNA, 20 nt, Artificial Sequence
  Synthetic
gcggcuaggaguuccgcagu

SEQ ID NO: 68256 - RNA, 19 nt, Artificial Sequence
  Synthetic
gucuauaagcuggaggagu

SEQ ID NO: 68257 - RNA, 20 nt, Artificial Sequence
  Synthetic
ggucuauaagcuggaggagu

SEQ ID NO: 68258 - RNA, 18 nt, Artificial Sequence
  Synthetic
gugaaaaaguugcauggu

SEQ ID NO: 68259 - RNA, 19 nt, Artificial Sequence
  Synthetic
ggugaaaaaguugcauggu

SEQ ID NO: 68260 - RNA, 20 nt, Artificial Sequence
  Synthetic
gucuuuguugggauuguggu

SEQ ID NO: 68261 - RNA, 21 nt, Artificial Sequence
  Synthetic
ggucuuuguugggauuguggu

SEQ ID NO: 68262 - RNA, 23 nt, Artificial Sequence
  Synthetic
guggucuuuguugggauuguggu

SEQ ID NO: 68263 - RNA, 19 nt, Artificial Sequence
  Synthetic
  misc_feature (17)..(17): n is a, c, g, or u
gaacgacagaauuaucngu

SEQ ID NO: 68264 - RNA, 21 nt, Artificial Sequence
  Synthetic
  misc_feature (19)..(19): n is a, c, g, or u
gagaacgacagaauuaucngu

SEQ ID NO: 68265 - RNA, 23 nt, Artificial Sequence
  Synthetic
  misc_feature (21)..(21): n is a, c, g, or u
gagagaacgacagaauuaucngu

SEQ ID NO: 68266 - RNA, 24 nt, Artificial Sequence
  Synthetic
  misc_feature (22)..(22): n is a, c, g, or u
ggagagaacgacagaauuaucngu

SEQ ID NO: 68267 - RNA, 21 nt, Artificial Sequence
  Synthetic
guucacauuuguuaauaaugu

SEQ ID NO: 68268 - RNA, 22 nt, Artificial Sequence
  Synthetic
  misc_feature (6)..(6): n is a, c, g, or u
gcuucnguccaguggucuuugu

SEQ ID NO: 68269 - RNA, 23 nt, Artificial Sequence
  Synthetic
  misc_feature (7)..(7): n is a, c, g, or u
ggcuucnguccaguggucuuugu

SEQ ID NO: 68270 - RNA, 19 nt, Artificial Sequence
  Synthetic
gaaaaaaucccagaggauu

SEQ ID NO: 68271 - RNA, 20 nt, Artificial Sequence
  Synthetic
ggaaaaaaucccagaggauu

SEQ ID NO: 68272 - RNA, 21 nt, Artificial Sequence
  Synthetic
gggaaaaaaucccagaggauu

SEQ ID NO: 68273 - RNA, 24 nt, Artificial Sequence
  Synthetic
gucgggaaaaaaucccagaggauu

SEQ ID NO: 68274 - RNA, 18 nt, Artificial Sequence
  Synthetic
guggucccaaucuggauu

SEQ ID NO: 68275 - RNA, 21 nt, Artificial Sequence
  Synthetic
gacaaacgggcaacauaccuu

SEQ ID NO: 68276 - RNA, 22 nt, Artificial Sequence
  Synthetic
ggacaaacgggcaacauaccuu

SEQ ID NO: 68277 - RNA, 24 nt, Artificial Sequence
  Synthetic
gaggacaaacgggcaacauaccuu

SEQ ID NO: 68278 - RNA, 19 nt, Artificial Sequence
  Synthetic
guuuacacagaaaggccuu

SEQ ID NO: 68279 - RNA, 20 nt, Artificial Sequence
  Synthetic
gucccuggaugcuggaucuu

SEQ ID NO: 68280 - RNA, 20 nt, Artificial Sequence
  Synthetic
gucuuuaaacaaacagucuu

SEQ ID NO: 68281 - RNA, 19 nt, Artificial Sequence
  Synthetic
gcaagauuuggugggcguu

SEQ ID NO: 68282 - RNA, 20 nt, Artificial Sequence
  Synthetic
ggcaagauuuggugggcguu

SEQ ID NO: 68283 - RNA, 22 nt, Artificial Sequence
  Synthetic
gaccuacaaauuguucacauuu

SEQ ID NO: 68284 - RNA, 23 nt, Artificial Sequence
  Synthetic
ggaccuacaaauuguucacauuu

SEQ ID NO: 68285 - RNA, 18 nt, Artificial Sequence
  Synthetic
gauaagauaggggcauuu

SEQ ID NO: 68286 - RNA, 24 nt, Artificial Sequence
  Synthetic
gaauaucaggaaaagauggaguuu

SEQ ID NO: 68287 - RNA, 18 nt, Artificial Sequence
  Synthetic
guaaauagugucugguuu

SEQ ID NO: 68288 - RNA, 23 nt, Artificial Sequence
  Synthetic
guaaaugaaaaacgaagauuaaa

SEQ ID NO: 68289 - RNA, 20 nt, Artificial Sequence
  Synthetic
  misc_feature (12)..(12): n is a, c, g, or u
gaccacuggacngaagccaa

SEQ ID NO: 68290 - RNA, 18 nt, Artificial Sequence
  Synthetic
gcuaggcugugcugccaa

SEQ ID NO: 68291 - RNA, 19 nt, Artificial Sequence
  Synthetic
gacacucauccucaggcca

SEQ ID NO: 68292 - RNA, 20 nt, Artificial Sequence
  Synthetic
gcaugcuaaaaacauugcca

SEQ ID NO: 68293 - RNA, 21 nt, Artificial Sequence
  Synthetic
ggcaugcuaaaaacauugcca

SEQ ID NO: 68294 - RNA, 20 nt, Artificial Sequence
  Synthetic
guauaaaaccuuauuaucca

SEQ ID NO: 68295 - RNA, 21 nt, Artificial Sequence
  Synthetic
gguauaaaaccuuauuaucca

SEQ ID NO: 68296 - RNA, 20 nt, Artificial Sequence
  Synthetic
guuaguauuccuuggacuca

SEQ ID NO: 68297 - RNA, 24 nt, Artificial Sequence
  Synthetic
gccuauugauuggaaaguauguca

SEQ ID NO: 68298 - RNA, 19 nt, Artificial Sequence
  Synthetic
  misc_feature (8)..(8): n is a, c, g, or u
gaggagungggggaggaga

SEQ ID NO: 68299 - RNA, 20 nt, Artificial Sequence
  Synthetic
  misc_feature (9)..(9): n is a, c, g, or u
ggaggagungggggaggaga

SEQ ID NO: 68300 - RNA, 21 nt, Artificial Sequence
  Synthetic
  misc_feature (10)..(10): n is a, c, g, or u
gggaggagungggggaggaga

SEQ ID NO: 68301 - RNA, 20 nt, Artificial Sequence
  Synthetic
gaagauccagcauccaggga

SEQ ID NO: 68302 - RNA, 20 nt, Artificial Sequence
  Synthetic
gccauucuuugcugggggga

SEQ ID NO: 68303 - RNA, 20 nt, Artificial Sequence
  Synthetic
gcuuucaguuauauggauga

SEQ ID NO: 68304 - RNA, 21 nt, Artificial Sequence
  Synthetic
ggcuuucaguuauauggauga

SEQ ID NO: 68305 - RNA, 22 nt, Artificial Sequence
  Synthetic
  misc_feature (2)..(2): n is a, c, g, or u
gncauggacauugacccuuaua

SEQ ID NO: 68306 - RNA, 23 nt, Artificial Sequence
  Synthetic
  misc_feature (3)..(3): n is a, c, g, or u
ggncauggacauugacccuuaua

SEQ ID NO: 68307 - RNA, 18 nt, Artificial Sequence
  Synthetic
gauuuuuucccaucucua

SEQ ID NO: 68308 - RNA, 22 nt, Artificial Sequence
  Synthetic
gcuagauuuuuucccaucucua

SEQ ID NO: 68309 - RNA, 18 nt, Artificial Sequence
  Synthetic
gacuucuuuccuucagua

SEQ ID NO: 68310 - RNA, 19 nt, Artificial Sequence
  Synthetic
  misc_feature (12)..(12): n is a, c, g, or u
gagaaaccgucnuagagua

SEQ ID NO: 68311 - RNA, 22 nt, Artificial Sequence
  Synthetic
  misc_feature (15)..(15): n is a, c, g, or u
gaagagaaaccgucnuagagua

SEQ ID NO: 68312 - RNA, 23 nt, Artificial Sequence
  Synthetic
  misc_feature (16)..(16): n is a, c, g, or u
ggaagagaaaccgucnuagagua

SEQ ID NO: 68313 - RNA, 18 nt, Artificial Sequence
  Synthetic
gcauccagggaccuagua

SEQ ID NO: 68314 - RNA, 18 nt, Artificial Sequence
  Synthetic
gcuuugcugccccuuuua

SEQ ID NO: 68315 - RNA, 19 nt, Artificial Sequence
  Synthetic
ggcuuugcugccccuuuua

SEQ ID NO: 68316 - RNA, 20 nt, Artificial Sequence
  Synthetic
gggcuuugcugccccuuuua

SEQ ID NO: 68317 - RNA, 20 nt, Artificial Sequence
  Synthetic
gcuguucaaaaccuucggac

SEQ ID NO: 68318 - RNA, 18 nt, Artificial Sequence
  Synthetic
gucaggaaggcagccuac

SEQ ID NO: 68319 - RNA, 20 nt, Artificial Sequence
  Synthetic
  misc_feature (3)..(4): n is a, c, g, or u
gannuaaugacucuagcuac

SEQ ID NO: 68320 - RNA, 21 nt, Artificial Sequence
  Synthetic
  misc_feature (4)..(5): n is a, c, g, or u
ggannuaaugacucuagcuac

SEQ ID NO: 68321 - RNA, 22 nt, Artificial Sequence
  Synthetic
  misc_feature (5)..(6): n is a, c, g, or u
gggannuaaugacucuagcuac

SEQ ID NO: 68322 - RNA, 23 nt, Artificial Sequence
  Synthetic
  misc_feature (6)..(7): n is a, c, g, or u
ggggannuaaugacucuagcuac

SEQ ID NO: 68323 - RNA, 24 nt, Artificial Sequence
  Synthetic
  misc_feature (7)..(8): n is a, c, g, or u
gggggannuaaugacucuagcuac

SEQ ID NO: 68324 - RNA, 18 nt, Artificial Sequence
  Synthetic
gcauucagagcaaacacc

SEQ ID NO: 68325 - RNA, 18 nt, Artificial Sequence
  Synthetic
gggaagaaucauuccacc

SEQ ID NO: 68326 - RNA, 19 nt, Artificial Sequence
  Synthetic
ggggaagaaucauuccacc

SEQ ID NO: 68327 - RNA, 20 nt, Artificial Sequence
  Synthetic
gggggaagaaucauuccacc

SEQ ID NO: 68328 - RNA, 22 nt, Artificial Sequence
  Synthetic
gauaauucugucguucucuccc

SEQ ID NO: 68329 - RNA, 19 nt, Artificial Sequence
  Synthetic
gucaauacuaauaugggcc

SEQ ID NO: 68330 - RNA, 18 nt, Artificial Sequence
  Synthetic
gauccgccuccugccucc

SEQ ID NO: 68331 - RNA, 21 nt, Artificial Sequence
  Synthetic
gcagauccgccuccugccucc

SEQ ID NO: 68332 - RNA, 19 nt, Artificial Sequence
  Synthetic
guauguugcccguuugucc

SEQ ID NO: 68333 - RNA, 20 nt, Artificial Sequence
  Synthetic
gguauguugcccguuugucc

SEQ ID NO: 68334 - RNA, 18 nt, Artificial Sequence
  Synthetic
gccuucugacuucuuucc

SEQ ID NO: 68335 - RNA, 24 nt, Artificial Sequence
  Synthetic
guuuuugccuucugacuucuuucc

SEQ ID NO: 68336 - RNA, 19 nt, Artificial Sequence
  Synthetic
guacuaggaggcuguaggc

SEQ ID NO: 68337 - RNA, 18 nt, Artificial Sequence
  Synthetic
gagugggagcauucgggc

SEQ ID NO: 68338 - RNA, 19 nt, Artificial Sequence
  Synthetic
ggagugggagcauucgggc

SEQ ID NO: 68339 - RNA, 19 nt, Artificial Sequence
  Synthetic
guauuuuccugcugguggc

SEQ ID NO: 68340 - RNA, 18 nt, Artificial Sequence
  Synthetic
gcucccgugugucuuggc

SEQ ID NO: 68341 - RNA, 20 nt, Artificial Sequence
  Synthetic
gagcucccgugugucuuggc

SEQ ID NO: 68342 - RNA, 20 nt, Artificial Sequence
  Synthetic
gccuccugccuccaccaauc

SEQ ID NO: 68343 - RNA, 19 nt, Artificial Sequence
  Synthetic
gccaagucuguacaacauc

SEQ ID NO: 68344 - RNA, 20 nt, Artificial Sequence
  Synthetic
ggccaagucuguacaacauc

SEQ ID NO: 68345 - RNA, 20 nt, Artificial Sequence
  Synthetic
gcuuucuuggacggucccuc

SEQ ID NO: 68346 - RNA, 23 nt, Artificial Sequence
  Synthetic
gaaucauuccaccaccaauccuc

SEQ ID NO: 68347 - RNA, 21 nt, Artificial Sequence
  Synthetic
gacuacugccucacucaucuc

SEQ ID NO: 68348 - RNA, 18 nt, Artificial Sequence
  Synthetic
gaggacucuuggacucuc

SEQ ID NO: 68349 - RNA, 20 nt, Artificial Sequence
  Synthetic
gcccguuuguccucuaauuc

SEQ ID NO: 68350 - RNA, 23 nt, Artificial Sequence
  Synthetic
guugcccguuuguccucuaauuc

SEQ ID NO: 68351 - RNA, 21 nt, Artificial Sequence
  Synthetic
guuuacuagugccauuuguuc

SEQ ID NO: 68352 - RNA, 18 nt, Artificial Sequence
  Synthetic
  misc_feature (13)..(13): n is a, c, g, or u
ggauauucccuanauuuc

SEQ ID NO: 68353 - RNA, 19 nt, Artificial Sequence
  Synthetic
  misc_feature (14)..(14): n is a, c, g, or u
gggauauucccuanauuuc

SEQ ID NO: 68354 - RNA, 20 nt, Artificial Sequence
  Synthetic
  misc_feature (15)..(15): n is a, c, g, or u
ggggauauucccuanauuuc

SEQ ID NO: 68355 - RNA, 23 nt, Artificial Sequence
  Synthetic
  misc_feature (18)..(18): n is a, c, g, or u
gauggggauauucccuanauuuc

SEQ ID NO: 68356 - RNA, 20 nt, Artificial Sequence
  Synthetic
gauuuuuucccgaccaccag

SEQ ID NO: 68357 - RNA, 21 nt, Artificial Sequence
  Synthetic
ggauuuuuucccgaccaccag

SEQ ID NO: 68358 - RNA, 22 nt, Artificial Sequence
  Synthetic
gggauuuuuucccgaccaccag

SEQ ID NO: 68359 - RNA, 23 nt, Artificial Sequence
  Synthetic
  misc_feature (3)..(3): n is a, c, g, or u
ganuacuguuguuagacgaagag

SEQ ID NO: 68360 - RNA, 22 nt, Artificial Sequence
  Synthetic
gacaaaaauccucacaauaccg

SEQ ID NO: 68361 - RNA, 18 nt, Artificial Sequence
  Synthetic
  misc_feature (6)..(6): n is a, c, g, or u
ggagcnaaacuuaucggg

SEQ ID NO: 68362 - RNA, 22 nt, Artificial Sequence
  Synthetic
  misc_feature (10)..(10): n is a, c, g, or u
gucuggagcnaaacuuaucggg

SEQ ID NO: 68363 - RNA, 23 nt, Artificial Sequence
  Synthetic
  misc_feature (11)..(11): n is a, c, g, or u
ggucuggagcnaaacuuaucggg

SEQ ID NO: 68364 - RNA, 19 nt, Artificial Sequence
  Synthetic
gaugaugugguauuggggg

SEQ ID NO: 68365 - RNA, 20 nt, Artificial Sequence
  Synthetic
ggaugaugugguauuggggg

SEQ ID NO: 68366 - RNA, 18 nt, Artificial Sequence
  Synthetic
guuuguuuaaagacuggg

SEQ ID NO: 68367 - RNA, 22 nt, Artificial Sequence
  Synthetic
gacuguuuguuuaaagacuggg

SEQ ID NO: 68368 - RNA, 24 nt, Artificial Sequence
  Synthetic
  misc_feature (3)..(4): n is a, c, g, or u
gannuaaugacucuagcuaccugg

SEQ ID NO: 68369 - RNA, 21 nt, Artificial Sequence
  Synthetic
gccucagcccguuucuccugg

SEQ ID NO: 68370 - RNA, 22 nt, Artificial Sequence
  Synthetic
ggccucagcccguuucuccugg

SEQ ID NO: 68371 - RNA, 23 nt, Artificial Sequence
  Synthetic
gggccucagcccguuucuccugg

SEQ ID NO: 68372 - RNA, 20 nt, Artificial Sequence
  Synthetic
gucuggcuuucaguuauaug

SEQ ID NO: 68373 - RNA, 18 nt, Artificial Sequence
  Synthetic
gcaacuuuuucaccucug

SEQ ID NO: 68374 - RNA, 23 nt, Artificial Sequence
  Synthetic
guauuccuuggacucacaaggug

SEQ ID NO: 68375 - RNA, 19 nt, Artificial Sequence
  Synthetic
gacauuauuaacaaaugug

SEQ ID NO: 68376 - RNA, 20 nt, Artificial Sequence
  Synthetic
ggacauuauuaacaaaugug

SEQ ID NO: 68377 - RNA, 18 nt, Artificial Sequence
  Synthetic
  misc_feature (10)..(10): n is a, c, g, or u
gcaacggccnggucugug

SEQ ID NO: 68378 - RNA, 19 nt, Artificial Sequence
  Synthetic
  misc_feature (11)..(11): n is a, c, g, or u
ggcaacggccnggucugug

SEQ ID NO: 68379 - RNA, 20 nt, Artificial Sequence
  Synthetic
  misc_feature (6)..(6): n is a, c, g, or u
guuaancggccuauugauug

SEQ ID NO: 68380 - RNA, 24 nt, Artificial Sequence
  Synthetic
  misc_feature (17)..(17): n is a, c, g, or u
gcuaccugggugggugnaaauuug

SEQ ID NO: 68381 - RNA, 18 nt, Artificial Sequence
  Synthetic
guuuacuagugccauuug

SEQ ID NO: 68382 - RNA, 23 nt, Artificial Sequence
  Synthetic
gcucaguuuacuagugccauuug

SEQ ID NO: 68383 - RNA, 24 nt, Artificial Sequence
  Synthetic
ggcucaguuuacuagugccauuug

SEQ ID NO: 68384 - RNA, 18 nt, Artificial Sequence
  Synthetic
  misc_feature (3)..(3): n is a, c, g, or u
  misc_feature (18)..(18): n is a, c, g, or u
gcnaaacuuaucgggacn

SEQ ID NO: 68385 - RNA, 20 nt, Artificial Sequence
  Synthetic
  misc_feature (5)..(5): n is a, c, g, or u
  misc_feature (20)..(20): n is a, c, g, or u
gagcnaaacuuaucgggacn

SEQ ID NO: 68386 - RNA, 21 nt, Artificial Sequence
  Synthetic
  misc_feature (6)..(6): n is a, c, g, or u
  misc_feature (21)..(21): n is a, c, g, or u
ggagcnaaacuuaucgggacn

SEQ ID NO: 68387 - RNA, 24 nt, Artificial Sequence
  Synthetic
gcauucagagcaaacaccagaaau

SEQ ID NO: 68388 - RNA, 18 nt, Artificial Sequence
  Synthetic
guagucaguuaugucaau

SEQ ID NO: 68389 - RNA, 20 nt, Artificial Sequence
  Synthetic
gaacauggaaagcaucacau

SEQ ID NO: 68390 - RNA, 19 nt, Artificial Sequence
  Synthetic
guugguucuucuggacuau

SEQ ID NO: 68391 - RNA, 18 nt, Artificial Sequence
  Synthetic
gguauaaaaccuuauuau

SEQ ID NO: 68392 - RNA, 22 nt, Artificial Sequence
  Synthetic
gaaagguauaaaaccuuauuau

SEQ ID NO: 68393 - RNA, 24 nt, Artificial Sequence
  Synthetic
gagaaagguauaaaaccuuauuau

SEQ ID NO: 68394 - RNA, 20 nt, Artificial Sequence
  Synthetic
gauccagcauccagggaccu

SEQ ID NO: 68395 - RNA, 19 nt, Artificial Sequence
  Synthetic
gcucuguaucgggaugccu

SEQ ID NO: 68396 - RNA, 24 nt, Artificial Sequence
  Synthetic
guuuuucuuguugacaaaaauccu

SEQ ID NO: 68397 - RNA, 19 nt, Artificial Sequence
  Synthetic
gaaccuuuguggcuccucu

SEQ ID NO: 68398 - RNA, 20 nt, Artificial Sequence
  Synthetic
ggaaccuuuguggcuccucu

SEQ ID NO: 68399 - RNA, 22 nt, Artificial Sequence
  Synthetic
  misc_feature (2)..(2): n is a, c, g, or u
gnggaaccuuuguggcuccucu

SEQ ID NO: 68400 - RNA, 24 nt, Artificial Sequence
  Synthetic
  misc_feature (4)..(4): n is a, c, g, or u
gcgnggaaccuuuguggcuccucu

SEQ ID NO: 68401 - RNA, 21 nt, Artificial Sequence
  Synthetic
guuaccaauuuucuuuugucu

SEQ ID NO: 68402 - RNA, 22 nt, Artificial Sequence
  Synthetic
  misc_feature (19)..(19): n is a, c, g, or u
gaauccugcggacgacccnucu

SEQ ID NO: 68403 - RNA, 21 nt, Artificial Sequence
  Synthetic
guauuuggugucuuuuggagu

SEQ ID NO: 68404 - RNA, 23 nt, Artificial Sequence
  Synthetic
gaguauuuggugucuuuuggagu

SEQ ID NO: 68405 - RNA, 18 nt, Artificial Sequence
  Synthetic
  misc_feature (4)..(4): n is a, c, g, or u
gacngaagccaacaaggu

SEQ ID NO: 68406 - RNA, 19 nt, Artificial Sequence
  Synthetic
  misc_feature (5)..(5): n is a, c, g, or u
ggacngaagccaacaaggu

SEQ ID NO: 68407 - RNA, 22 nt, Artificial Sequence
  Synthetic
gacucuagcuaccugggugggu

SEQ ID NO: 68408 - RNA, 19 nt, Artificial Sequence
  Synthetic
gugugucuuggccaaaauu

SEQ ID NO: 68409 - RNA, 19 nt, Artificial Sequence
  Synthetic
  misc_feature (14)..(14): n is a, c, g, or u
gaaaguaugucaangaauu

SEQ ID NO: 68410 - RNA, 20 nt, Artificial Sequence
  Synthetic
  misc_feature (15)..(15): n is a, c, g, or u
ggaaaguaugucaangaauu

SEQ ID NO: 68411 - RNA, 24 nt, Artificial Sequence
  Synthetic
  misc_feature (19)..(19): n is a, c, g, or u
gauuggaaaguaugucaangaauu

SEQ ID NO: 68412 - RNA, 18 nt, Artificial Sequence
  Synthetic
  misc_feature (12)..(12): n is a, c, g, or u
gggggaggaganuagauu

SEQ ID NO: 68413 - RNA, 21 nt, Artificial Sequence
  Synthetic
  misc_feature (3)..(3): n is a, c, g, or u
  misc_feature (15)..(15): n is a, c, g, or u
gungggggaggaganuagauu

SEQ ID NO: 68414 - RNA, 23 nt, Artificial Sequence
  Synthetic
  misc_feature (5)..(5): n is a, c, g, or u
  misc_feature (17)..(17): n is a, c, g, or u
gagungggggaggaganuagauu

SEQ ID NO: 68415 - RNA, 24 nt, Artificial Sequence
  Synthetic
  misc_feature (6)..(6): n is a, c, g, or u
  misc_feature (18)..(18): n is a, c, g, or u
ggagungggggaggaganuagauu

SEQ ID NO: 68416 - RNA, 18 nt, Artificial Sequence
  Synthetic
gaucucaaucuccagcuu

SEQ ID NO: 68417 - RNA, 18 nt, Artificial Sequence
  Synthetic
gcuaugccucaucuucuu

SEQ ID NO: 68418 - RNA, 19 nt, Artificial Sequence
  Synthetic
gucccuuuauaccucuguu

SEQ ID NO: 68419 - RNA, 19 nt, Artificial Sequence
  Synthetic
guuucuccuggcucaguuu

SEQ ID NO: 68420 - RNA, 23 nt, Artificial Sequence
  Synthetic
gcccguuucuccuggcucaguuu

SEQ ID NO: 68421 - RNA, 18 nt, Artificial Sequence
  Synthetic
ggucugugccaaguguuu

SEQ ID NO: 68422 - RNA, 22 nt, Artificial Sequence
  Synthetic
  misc_feature (4)..(4): n is a, c, g, or u
gccnggucugugccaaguguuu

SEQ ID NO: 68423 - RNA, 23 nt, Artificial Sequence
  Synthetic
  misc_feature (5)..(5): n is a, c, g, or u
ggccnggucugugccaaguguuu

SEQ ID NO: 68424 - RNA, 19 nt, Artificial Sequence
  Synthetic
uguauacccaaagacaaaa

SEQ ID NO: 68425 - RNA, 20 nt, Artificial Sequence
  Synthetic
auguauacccaaagacaaaa

SEQ ID NO: 68426 - RNA, 21 nt, Artificial Sequence
  Synthetic
aauguauacccaaagacaaaa

SEQ ID NO: 68427 - RNA, 22 nt, Artificial Sequence
  Synthetic
aaauguauacccaaagacaaaa

SEQ ID NO: 68428 - RNA, 23 nt, Artificial Sequence
  Synthetic
uaaauguauacccaaagacaaaa

SEQ ID NO: 68429 - RNA, 24 nt, Artificial Sequence
  Synthetic
uuaaauguauacccaaagacaaaa

SEQ ID NO: 68430 - RNA, 18 nt, Artificial Sequence
  Synthetic
acccaaagacaaaagaaa

SEQ ID NO: 68431 - RNA, 19 nt, Artificial Sequence
  Synthetic
uacccaaagacaaaagaaa

SEQ ID NO: 68432 - RNA, 20 nt, Artificial Sequence
  Synthetic
auacccaaagacaaaagaaa

SEQ ID NO: 68433 - RNA, 21 nt, Artificial Sequence
  Synthetic
uauacccaaagacaaaagaaa

SEQ ID NO: 68434 - RNA, 23 nt, Artificial Sequence
  Synthetic
uguauacccaaagacaaaagaaa

SEQ ID NO: 68435 - RNA, 24 nt, Artificial Sequence
  Synthetic
auguauacccaaagacaaaagaaa

SEQ ID NO: 68436 - RNA, 19 nt, Artificial Sequence
  Synthetic
aguccagaagaaccaacaa

SEQ ID NO: 68437 - RNA, 20 nt, Artificial Sequence
  Synthetic
uaguccagaagaaccaacaa

SEQ ID NO: 68438 - RNA, 18 nt, Artificial Sequence
  Synthetic
  misc_feature (2)..(2): n is a, c, g, or u
cnggccguugccgggcaa

SEQ ID NO: 68439 - RNA, 19 nt, Artificial Sequence
  Synthetic
  misc_feature (3)..(3): n is a, c, g, or u
ccnggccguugccgggcaa

SEQ ID NO: 68440 - RNA, 20 nt, Artificial Sequence
  Synthetic
  misc_feature (4)..(4): n is a, c, g, or u
accnggccguugccgggcaa

SEQ ID NO: 68441 - RNA, 18 nt, Artificial Sequence
  Synthetic
aauaauguccuggugcaa

SEQ ID NO: 68442 - RNA, 19 nt, Artificial Sequence
  Synthetic
uaauaauguccuggugcaa

SEQ ID NO: 68443 - RNA, 20 nt, Artificial Sequence
  Synthetic
uuaauaauguccuggugcaa

SEQ ID NO: 68444 - RNA, 22 nt, Artificial Sequence
  Synthetic
uguuaauaauguccuggugcaa

SEQ ID NO: 68445 - RNA, 23 nt, Artificial Sequence
  Synthetic
uuguuaauaauguccuggugcaa

SEQ ID NO: 68446 - RNA, 24 nt, Artificial Sequence
  Synthetic
uuuguuaauaauguccuggugcaa

SEQ ID NO: 68447 - RNA, 18 nt, Artificial Sequence
  Synthetic
agcucuuguucccaagaa

SEQ ID NO: 68448 - RNA, 19 nt, Artificial Sequence
  Synthetic
uagcucuuguucccaagaa

SEQ ID NO: 68449 - RNA, 19 nt, Artificial Sequence
  Synthetic
agaucucuuacugaaggaa

SEQ ID NO: 68450 - RNA, 20 nt, Artificial Sequence
  Synthetic
aagaucucuuacugaaggaa

SEQ ID NO: 68451 - RNA, 18 nt, Artificial Sequence
  Synthetic
cagcaggaugaagaggaa

SEQ ID NO: 68452 - RNA, 20 nt, Artificial Sequence
  Synthetic
agcagcaggaugaagaggaa

SEQ ID NO: 68453 - RNA, 21 nt, Artificial Sequence
  Synthetic
uagcagcaggaugaagaggaa

SEQ ID NO: 68454 - RNA, 22 nt, Artificial Sequence
  Synthetic
auagcagcaggaugaagaggaa

SEQ ID NO: 68455 - RNA, 23 nt, Artificial Sequence
  Synthetic
cauagcagcaggaugaagaggaa

SEQ ID NO: 68456 - RNA, 19 nt, Artificial Sequence
  Synthetic
agugaggcaguagucggaa

SEQ ID NO: 68457 - RNA, 21 nt, Artificial Sequence
  Synthetic
ugagugaggcaguagucggaa

SEQ ID NO: 68458 - RNA, 22 nt, Artificial Sequence
  Synthetic
augagugaggcaguagucggaa

SEQ ID NO: 68459 - RNA, 24 nt, Artificial Sequence
  Synthetic
agaugagugaggcaguagucggaa

SEQ ID NO: 68460 - RNA, 18 nt, Artificial Sequence
  Synthetic
acuacauuaucuggauaa

SEQ ID NO: 68461 - RNA, 19 nt, Artificial Sequence
  Synthetic
aacuacauuaucuggauaa

SEQ ID NO: 68462 - RNA, 20 nt, Artificial Sequence
  Synthetic
uaacuacauuaucuggauaa

SEQ ID NO: 68463 - RNA, 21 nt, Artificial Sequence
  Synthetic
uuaacuacauuaucuggauaa

SEQ ID NO: 68464 - RNA, 22 nt, Artificial Sequence
  Synthetic
auuaacuacauuaucuggauaa

SEQ ID NO: 68465 - RNA, 24 nt, Artificial Sequence
  Synthetic
ugauuaacuacauuaucuggauaa

SEQ ID NO: 68466 - RNA, 18 nt, Artificial Sequence
  Synthetic
uaacagggaguuuucuaa

SEQ ID NO: 68467 - RNA, 19 nt, Artificial Sequence
  Synthetic
uuaacagggaguuuucuaa

SEQ ID NO: 68468 - RNA, 20 nt, Artificial Sequence
  Synthetic
  misc_feature (1)..(1): n is a, c, g, or u
nuuaacagggaguuuucuaa

SEQ ID NO: 68469 - RNA, 22 nt, Artificial Sequence
  Synthetic
  misc_feature (3)..(3): n is a, c, g, or u
cgnuuaacagggaguuuucuaa

SEQ ID NO: 68470 - RNA, 23 nt, Artificial Sequence
  Synthetic
  misc_feature (4)..(4): n is a, c, g, or u
ccgnuuaacagggaguuuucuaa

SEQ ID NO: 68471 - RNA, 18 nt, Artificial Sequence
  Synthetic
ccucccagucuuuaaaca

SEQ ID NO: 68472 - RNA, 19 nt, Artificial Sequence
  Synthetic
uccucccagucuuuaaaca

SEQ ID NO: 68473 - RNA, 20 nt, Artificial Sequence
  Synthetic
cuccucccagucuuuaaaca

SEQ ID NO: 68474 - RNA, 21 nt, Artificial Sequence
  Synthetic
acuccucccagucuuuaaaca

SEQ ID NO: 68475 - RNA, 22 nt, Artificial Sequence
  Synthetic
  misc_feature (1)..(1): n is a, c, g, or u
nacuccucccagucuuuaaaca

SEQ ID NO: 68476 - RNA, 23 nt, Artificial Sequence
  Synthetic
  misc_feature (2)..(2): n is a, c, g, or u
cnacuccucccagucuuuaaaca

SEQ ID NO: 68477 - RNA, 24 nt, Artificial Sequence
  Synthetic
  misc_feature (3)..(3): n is a, c, g, or u
ccnacuccucccagucuuuaaaca

SEQ ID NO: 68478 - RNA, 18 nt, Artificial Sequence
  Synthetic
aacaguaggacaugaaca

SEQ ID NO: 68479 - RNA, 20 nt, Artificial Sequence
  Synthetic
ugaacaguaggacaugaaca

SEQ ID NO: 68480 - RNA, 18 nt, Artificial Sequence
  Synthetic
  misc_feature (12)..(12): n is a, c, g, or u
ucaauaggccgnuuaaca

SEQ ID NO: 68481 - RNA, 19 nt, Artificial Sequence
  Synthetic
  misc_feature (13)..(13): n is a, c, g, or u
aucaauaggccgnuuaaca

SEQ ID NO: 68482 - RNA, 20 nt, Artificial Sequence
  Synthetic
  misc_feature (14)..(14): n is a, c, g, or u
aaucaauaggccgnuuaaca

SEQ ID NO: 68483 - RNA, 21 nt, Artificial Sequence
  Synthetic
  misc_feature (15)..(15): n is a, c, g, or u
caaucaauaggccgnuuaaca

SEQ ID NO: 68484 - RNA, 22 nt, Artificial Sequence
  Synthetic
  misc_feature (16)..(16): n is a, c, g, or u
ccaaucaauaggccgnuuaaca

SEQ ID NO: 68485 - RNA, 23 nt, Artificial Sequence
  Synthetic
  misc_feature (17)..(17): n is a, c, g, or u
uccaaucaauaggccgnuuaaca

SEQ ID NO: 68486 - RNA, 24 nt, Artificial Sequence
  Synthetic
  misc_feature (18)..(18): n is a, c, g, or u
uuccaaucaauaggccgnuuaaca

SEQ ID NO: 68487 - RNA, 18 nt, Artificial Sequence
  Synthetic
uccacacuccaaaagaca

SEQ ID NO: 68488 - RNA, 19 nt, Artificial Sequence
  Synthetic
auccacacuccaaaagaca

SEQ ID NO: 68489 - RNA, 20 nt, Artificial Sequence
  Synthetic
aauccacacuccaaaagaca

SEQ ID NO: 68490 - RNA, 18 nt, Artificial Sequence
  Synthetic
ucuuccaaaagugagaca

SEQ ID NO: 68491 - RNA, 19 nt, Artificial Sequence
  Synthetic
cucuuccaaaagugagaca

SEQ ID NO: 68492 - RNA, 20 nt, Artificial Sequence
  Synthetic
ucucuuccaaaagugagaca

SEQ ID NO: 68493 - RNA, 21 nt, Artificial Sequence
  Synthetic
uucucuuccaaaagugagaca

SEQ ID NO: 68494 - RNA, 22 nt, Artificial Sequence
  Synthetic
uuucucuuccaaaagugagaca

SEQ ID NO: 68495 - RNA, 18 nt, Artificial Sequence
  Synthetic
aggacaaauuggaggaca

SEQ ID NO: 68496 - RNA, 19 nt, Artificial Sequence
  Synthetic
caggacaaauuggaggaca

SEQ ID NO: 68497 - RNA, 20 nt, Artificial Sequence
  Synthetic
ccaggacaaauuggaggaca

SEQ ID NO: 68498 - RNA, 22 nt, Artificial Sequence
  Synthetic
agccaggacaaauuggaggaca

SEQ ID NO: 68499 - RNA, 23 nt, Artificial Sequence
  Synthetic
uagccaggacaaauuggaggaca

SEQ ID NO: 68500 - RNA, 24 nt, Artificial Sequence
  Synthetic
auagccaggacaaauuggaggaca

SEQ ID NO: 68501 - RNA, 18 nt, Artificial Sequence
  Synthetic
uuccaauuacauaaccca

SEQ ID NO: 68502 - RNA, 19 nt, Artificial Sequence
  Synthetic
cuuccaauuacauaaccca

SEQ ID NO: 68503 - RNA, 20 nt, Artificial Sequence
  Synthetic
acuuccaauuacauaaccca

SEQ ID NO: 68504 - RNA, 18 nt, Artificial Sequence
  Synthetic
caagaauaaggugaccca

SEQ ID NO: 68505 - RNA, 19 nt, Artificial Sequence
  Synthetic
ccaagaauaaggugaccca

SEQ ID NO: 68506 - RNA, 20 nt, Artificial Sequence
  Synthetic
cccaagaauaaggugaccca

SEQ ID NO: 68507 - RNA, 21 nt, Artificial Sequence
  Synthetic
ucccaagaauaaggugaccca

SEQ ID NO: 68508 - RNA, 22 nt, Artificial Sequence
  Synthetic
uucccaagaauaaggugaccca

SEQ ID NO: 68509 - RNA, 24 nt, Artificial Sequence
  Synthetic
uguucccaagaauaaggugaccca

SEQ ID NO: 68510 - RNA, 20 nt, Artificial Sequence
  Synthetic
uggccuauggccaagcccca

SEQ ID NO: 68511 - RNA, 21 nt, Artificial Sequence
  Synthetic
auggccuauggccaagcccca

SEQ ID NO: 68512 - RNA, 23 nt, Artificial Sequence
  Synthetic
ugauggccuauggccaagcccca

SEQ ID NO: 68513 - RNA, 24 nt, Artificial Sequence
  Synthetic
cugauggccuauggccaagcccca

SEQ ID NO: 68514 - RNA, 19 nt, Artificial Sequence
  Synthetic
uggucgggaaaaaauccca

SEQ ID NO: 68515 - RNA, 18 nt, Artificial Sequence
  Synthetic
ccauauaacugaaagcca

SEQ ID NO: 68516 - RNA, 19 nt, Artificial Sequence
  Synthetic
uccauauaacugaaagcca

SEQ ID NO: 68517 - RNA, 20 nt, Artificial Sequence
  Synthetic
auccauauaacugaaagcca

SEQ ID NO: 68518 - RNA, 18 nt, Artificial Sequence
  Synthetic
cucugaaugcuggaucca

SEQ ID NO: 68519 - RNA, 20 nt, Artificial Sequence
  Synthetic
ugcucugaaugcuggaucca

SEQ ID NO: 68520 - RNA, 18 nt, Artificial Sequence
  Synthetic
ucccaccuugugagucca

SEQ ID NO: 68521 - RNA, 19 nt, Artificial Sequence
  Synthetic
uucccaccuugugagucca

SEQ ID NO: 68522 - RNA, 20 nt, Artificial Sequence
  Synthetic
uuucccaccuugugagucca

SEQ ID NO: 68523 - RNA, 18 nt, Artificial Sequence
  Synthetic
uaagaugcccgccuucca

SEQ ID NO: 68524 - RNA, 19 nt, Artificial Sequence
  Synthetic
auaagaugcccgccuucca

SEQ ID NO: 68525 - RNA, 20 nt, Artificial Sequence
  Synthetic
uauaagaugcccgccuucca

SEQ ID NO: 68526 - RNA, 18 nt, Artificial Sequence
  Synthetic
  misc_feature (3)..(3): n is a, c, g, or u
ucnuugacauacuuucca

SEQ ID NO: 68527 - RNA, 19 nt, Artificial Sequence
  Synthetic
  misc_feature (4)..(4): n is a, c, g, or u
uucnuugacauacuuucca

SEQ ID NO: 68528 - RNA, 20 nt, Artificial Sequence
  Synthetic
  misc_feature (5)..(5): n is a, c, g, or u
auucnuugacauacuuucca

SEQ ID NO: 68529 - RNA, 21 nt, Artificial Sequence
  Synthetic
  misc_feature (6)..(6): n is a, c, g, or u
aauucnuugacauacuuucca

SEQ ID NO: 68530 - RNA, 22 nt, Artificial Sequence
  Synthetic
  misc_feature (7)..(7): n is a, c, g, or u
caauucnuugacauacuuucca

SEQ ID NO: 68531 - RNA, 23 nt, Artificial Sequence
  Synthetic
  misc_feature (8)..(8): n is a, c, g, or u
acaauucnuugacauacuuucca

SEQ ID NO: 68532 - RNA, 24 nt, Artificial Sequence
  Synthetic
  misc_feature (9)..(9): n is a, c, g, or u
cacaauucnuugacauacuuucca

SEQ ID NO: 68533 - RNA, 18 nt, Artificial Sequence
  Synthetic
  misc_feature (6)..(7): n is a, c, g, or u
cauuannuccccccagca

SEQ ID NO: 68534 - RNA, 19 nt, Artificial Sequence
  Synthetic
  misc_feature (7)..(8): n is a, c, g, or u
ucauuannuccccccagca

SEQ ID NO: 68535 - RNA, 21 nt, Artificial Sequence
  Synthetic
  misc_feature (9)..(10): n is a, c, g, or u
agucauuannuccccccagca

SEQ ID NO: 68536 - RNA, 23 nt, Artificial Sequence
  Synthetic
  misc_feature (11)..(12): n is a, c, g, or u
agagucauuannuccccccagca

SEQ ID NO: 68537 - RNA, 24 nt, Artificial Sequence
  Synthetic
  misc_feature (12)..(13): n is a, c, g, or u
uagagucauuannuccccccagca

SEQ ID NO: 68538 - RNA, 19 nt, Artificial Sequence
  Synthetic
uguugauaagauaggggca

SEQ ID NO: 68539 - RNA, 21 nt, Artificial Sequence
  Synthetic
aguguugauaagauaggggca

SEQ ID NO: 68540 - RNA, 22 nt, Artificial Sequence
  Synthetic
aaguguugauaagauaggggca

SEQ ID NO: 68541 - RNA, 19 nt, Artificial Sequence
  Synthetic
agaggugaagcgaagugca

SEQ ID NO: 68542 - RNA, 20 nt, Artificial Sequence
  Synthetic
cagaggugaagcgaagugca

SEQ ID NO: 68543 - RNA, 18 nt, Artificial Sequence
  Synthetic
  misc_feature (3)..(3): n is a, c, g, or u
ugnggugaacaaugcuca

SEQ ID NO: 68544 - RNA, 21 nt, Artificial Sequence
  Synthetic
  misc_feature (6)..(6): n is a, c, g, or u
uggugnggugaacaaugcuca

SEQ ID NO: 68545 - RNA, 22 nt, Artificial Sequence
  Synthetic
  misc_feature (1)..(1): n is a, c, g, or u
  misc_feature (7)..(7): n is a, c, g, or u
nuggugnggugaacaaugcuca

SEQ ID NO: 68546 - RNA, 23 nt, Artificial Sequence
  Synthetic
  misc_feature (2)..(2): n is a, c, g, or u
  misc_feature (8)..(8): n is a, c, g, or u
unuggugnggugaacaaugcuca

SEQ ID NO: 68547 - RNA, 18 nt, Artificial Sequence
  Synthetic
augaauaucaggaaaaga

SEQ ID NO: 68548 - RNA, 19 nt, Artificial Sequence
  Synthetic
aaugaauaucaggaaaaga

SEQ ID NO: 68549 - RNA, 20 nt, Artificial Sequence
  Synthetic
aaaugaauaucaggaaaaga

SEQ ID NO: 68550 - RNA, 21 nt, Artificial Sequence
  Synthetic
caaaugaauaucaggaaaaga

SEQ ID NO: 68551 - RNA, 23 nt, Artificial Sequence
  Synthetic
ugcaaaugaauaucaggaaaaga

SEQ ID NO: 68552 - RNA, 18 nt, Artificial Sequence
  Synthetic
aguaggacaugaacaaga

SEQ ID NO: 68553 - RNA, 19 nt, Artificial Sequence
  Synthetic
caguaggacaugaacaaga

SEQ ID NO: 68554 - RNA, 20 nt, Artificial Sequence
  Synthetic
acaguaggacaugaacaaga

SEQ ID NO: 68555 - RNA, 19 nt, Artificial Sequence
  Synthetic
uguaagaccuugggcaaga

SEQ ID NO: 68556 - RNA, 20 nt, Artificial Sequence
  Synthetic
auguaagaccuugggcaaga

SEQ ID NO: 68557 - RNA, 18 nt, Artificial Sequence
  Synthetic
agugaaagccugcuuaga

SEQ ID NO: 68558 - RNA, 19 nt, Artificial Sequence
  Synthetic
aagugaaagccugcuuaga

SEQ ID NO: 68559 - RNA, 20 nt, Artificial Sequence
  Synthetic
aaagugaaagccugcuuaga

SEQ ID NO: 68560 - RNA, 22 nt, Artificial Sequence
  Synthetic
agaaagugaaagccugcuuaga

SEQ ID NO: 68561 - RNA, 24 nt, Artificial Sequence
  Synthetic
cgagaaagugaaagccugcuuaga

SEQ ID NO: 68562 - RNA, 18 nt, Artificial Sequence
  Synthetic
auuuccgggagagaacga

SEQ ID NO: 68563 - RNA, 19 nt, Artificial Sequence
  Synthetic
uauuuccgggagagaacga

SEQ ID NO: 68564 - RNA, 20 nt, Artificial Sequence
  Synthetic
auauuuccgggagagaacga

SEQ ID NO: 68565 - RNA, 18 nt, Artificial Sequence
  Synthetic
ucuucgucugcgaggcga

SEQ ID NO: 68566 - RNA, 19 nt, Artificial Sequence
  Synthetic
aucuucgucugcgaggcga

SEQ ID NO: 68567 - RNA, 18 nt, Artificial Sequence
  Synthetic
aggguccccaauccucga

SEQ ID NO: 68568 - RNA, 19 nt, Artificial Sequence
  Synthetic
caggguccccaauccucga

SEQ ID NO: 68569 - RNA, 18 nt, Artificial Sequence
  Synthetic
aggacgucccucgcagga

SEQ ID NO: 68570 - RNA, 19 nt, Artificial Sequence
  Synthetic
aaggacgucccucgcagga

SEQ ID NO: 68571 - RNA, 20 nt, Artificial Sequence
  Synthetic
aaaggacgucccucgcagga

SEQ ID NO: 68572 - RNA, 18 nt, Artificial Sequence
  Synthetic
ugcaaaugaauaucagga

SEQ ID NO: 68573 - RNA, 18 nt, Artificial Sequence
  Synthetic
uccaacugguggucggga

SEQ ID NO: 68574 - RNA, 19 nt, Artificial Sequence
  Synthetic
auccaacugguggucggga

SEQ ID NO: 68575 - RNA, 18 nt, Artificial Sequence
  Synthetic
  misc_feature (6)..(6): n is a, c, g, or u
uauuunguagagauggga

SEQ ID NO: 68576 - RNA, 19 nt, Artificial Sequence
  Synthetic
  misc_feature (7)..(7): n is a, c, g, or u
auauuunguagagauggga

SEQ ID NO: 68577 - RNA, 20 nt, Artificial Sequence
  Synthetic
  misc_feature (8)..(8): n is a, c, g, or u
aauauuunguagagauggga

SEQ ID NO: 68578 - RNA, 21 nt, Artificial Sequence
  Synthetic
  misc_feature (9)..(9): n is a, c, g, or u
aaauauuunguagagauggga

SEQ ID NO: 68579 - RNA, 22 nt, Artificial Sequence
  Synthetic
  misc_feature (1)..(1): n is a, c, g, or u
  misc_feature (10)..(10): n is a, c, g, or u
naaauauuunguagagauggga

SEQ ID NO: 68580 - RNA, 18 nt, Artificial Sequence
  Synthetic
cagccuagcagccaugga

SEQ ID NO: 68581 - RNA, 19 nt, Artificial Sequence
  Synthetic
acagccuagcagccaugga

SEQ ID NO: 68582 - RNA, 20 nt, Artificial Sequence
  Synthetic
cacagccuagcagccaugga

SEQ ID NO: 68583 - RNA, 18 nt, Artificial Sequence
  Synthetic
aauagugucugguuugga

SEQ ID NO: 68584 - RNA, 19 nt, Artificial Sequence
  Synthetic
aaauagugucugguuugga

SEQ ID NO: 68585 - RNA, 20 nt, Artificial Sequence
  Synthetic
uaaauagugucugguuugga

SEQ ID NO: 68586 - RNA, 18 nt, Artificial Sequence
  Synthetic
aaaaucuagcaggcauga

SEQ ID NO: 68587 - RNA, 19 nt, Artificial Sequence
  Synthetic
aaaaaucuagcaggcauga

SEQ ID NO: 68588 - RNA, 20 nt, Artificial Sequence
  Synthetic
aaaaaaucuagcaggcauga

SEQ ID NO: 68589 - RNA, 24 nt, Artificial Sequence
  Synthetic
ugggaaaaaaucuagcaggcauga

SEQ ID NO: 68590 - RNA, 18 nt, Artificial Sequence
  Synthetic
uccgaaagcccaugauga

SEQ ID NO: 68591 - RNA, 19 nt, Artificial Sequence
  Synthetic
uuccgaaagcccaugauga

SEQ ID NO: 68592 - RNA, 20 nt, Artificial Sequence
  Synthetic
uuuccgaaagcccaugauga

SEQ ID NO: 68593 - RNA, 21 nt, Artificial Sequence
  Synthetic
uuuuccgaaagcccaugauga

SEQ ID NO: 68594 - RNA, 22 nt, Artificial Sequence
  Synthetic
auuuuccgaaagcccaugauga

SEQ ID NO: 68595 - RNA, 23 nt, Artificial Sequence
  Synthetic
aauuuuccgaaagcccaugauga

SEQ ID NO: 68596 - RNA, 18 nt, Artificial Sequence
  Synthetic
agcccggcgaaccacuga

SEQ ID NO: 68597 - RNA, 19 nt, Artificial Sequence
  Synthetic
aagcccggcgaaccacuga

SEQ ID NO: 68598 - RNA, 20 nt, Artificial Sequence
  Synthetic
aaagcccggcgaaccacuga

SEQ ID NO: 68599 - RNA, 20 nt, Artificial Sequence
  Synthetic
agggguccuaggaauccuga

SEQ ID NO: 68600 - RNA, 21 nt, Artificial Sequence
  Synthetic
cagggguccuaggaauccuga

SEQ ID NO: 68601 - RNA, 23 nt, Artificial Sequence
  Synthetic
agcagggguccuaggaauccuga

SEQ ID NO: 68602 - RNA, 18 nt, Artificial Sequence
  Synthetic
aucccgauacagagcuga

SEQ ID NO: 68603 - RNA, 19 nt, Artificial Sequence
  Synthetic
caucccgauacagagcuga

SEQ ID NO: 68604 - RNA, 19 nt, Artificial Sequence
  Synthetic
agauugacgagaugaguga

SEQ ID NO: 68605 - RNA, 20 nt, Artificial Sequence
  Synthetic
aagauugacgagaugaguga

SEQ ID NO: 68606 - RNA, 18 nt, Artificial Sequence
  Synthetic
augauuaggcagagguga

SEQ ID NO: 68607 - RNA, 20 nt, Artificial Sequence
  Synthetic
agaugauuaggcagagguga

SEQ ID NO: 68608 - RNA, 22 nt, Artificial Sequence
  Synthetic
agagaugauuaggcagagguga

SEQ ID NO: 68609 - RNA, 23 nt, Artificial Sequence
  Synthetic
aagagaugauuaggcagagguga

SEQ ID NO: 68610 - RNA, 24 nt, Artificial Sequence
  Synthetic
caagagaugauuaggcagagguga

SEQ ID NO: 68611 - RNA, 18 nt, Artificial Sequence
  Synthetic
aauccucgagaagauuga

SEQ ID NO: 68612 - RNA, 19 nt, Artificial Sequence
  Synthetic
caauccucgagaagauuga

SEQ ID NO: 68613 - RNA, 20 nt, Artificial Sequence
  Synthetic
ccaauccucgagaagauuga

SEQ ID NO: 68614 - RNA, 18 nt, Artificial Sequence
  Synthetic
  misc_feature (2)..(2): n is a, c, g, or u
anucuccggaaguguuga

SEQ ID NO: 68615 - RNA, 19 nt, Artificial Sequence
  Synthetic
  misc_feature (3)..(3): n is a, c, g, or u
uanucuccggaaguguuga

SEQ ID NO: 68616 - RNA, 18 nt, Artificial Sequence
  Synthetic
  misc_feature (1)..(1): n is a, c, g, or u
  misc_feature (10)..(10): n is a, c, g, or u
nguaguuucncuuuuaua

SEQ ID NO: 68617 - RNA, 20 nt, Artificial Sequence
  Synthetic
  misc_feature (3)..(3): n is a, c, g, or u
  misc_feature (12)..(12): n is a, c, g, or u
cgnguaguuucncuuuuaua

SEQ ID NO: 68618 - RNA, 21 nt, Artificial Sequence
  Synthetic
  misc_feature (4)..(4): n is a, c, g, or u
  misc_feature (13)..(13): n is a, c, g, or u
acgnguaguuucncuuuuaua

SEQ ID NO: 68619 - RNA, 22 nt, Artificial Sequence
  Synthetic
  misc_feature (5)..(5): n is a, c, g, or u
  misc_feature (14)..(14): n is a, c, g, or u
uacgnguaguuucncuuuuaua

SEQ ID NO: 68620 - RNA, 23 nt, Artificial Sequence
  Synthetic
  misc_feature (6)..(6): n is a, c, g, or u
  misc_feature (15)..(15): n is a, c, g, or u
cuacgnguaguuucncuuuuaua

SEQ ID NO: 68621 - RNA, 18 nt, Artificial Sequence
  Synthetic
uauugacauaacugacua

SEQ ID NO: 68622 - RNA, 20 nt, Artificial Sequence
  Synthetic
aguauugacauaacugacua

SEQ ID NO: 68623 - RNA, 21 nt, Artificial Sequence
  Synthetic
uaguauugacauaacugacua

SEQ ID NO: 68624 - RNA, 22 nt, Artificial Sequence
  Synthetic
uuaguauugacauaacugacua

SEQ ID NO: 68625 - RNA, 23 nt, Artificial Sequence
  Synthetic
auuaguauugacauaacugacua

SEQ ID NO: 68626 - RNA, 24 nt, Artificial Sequence
  Synthetic
uauuaguauugacauaacugacua

SEQ ID NO: 68627 - RNA, 19 nt, Artificial Sequence
  Synthetic
agagcugaggcgguaucua

SEQ ID NO: 68628 - RNA, 20 nt, Artificial Sequence
  Synthetic
cagagcugaggcgguaucua

SEQ ID NO: 68629 - RNA, 21 nt, Artificial Sequence
  Synthetic
acagagcugaggcgguaucua

SEQ ID NO: 68630 - RNA, 22 nt, Artificial Sequence
  Synthetic
uacagagcugaggcgguaucua

SEQ ID NO: 68631 - RNA, 23 nt, Artificial Sequence
  Synthetic
auacagagcugaggcgguaucua

SEQ ID NO: 68632 - RNA, 18 nt, Artificial Sequence
  Synthetic
  misc_feature (16)..(16): n is a, c, g, or u
cauaacccaugaaaunua

SEQ ID NO: 68633 - RNA, 19 nt, Artificial Sequence
  Synthetic
  misc_feature (17)..(17): n is a, c, g, or u
acauaacccaugaaaunua

SEQ ID NO: 68634 - RNA, 20 nt, Artificial Sequence
  Synthetic
  misc_feature (18)..(18): n is a, c, g, or u
uacauaacccaugaaaunua

SEQ ID NO: 68635 - RNA, 21 nt, Artificial Sequence
  Synthetic
  misc_feature (19)..(19): n is a, c, g, or u
uuacauaacccaugaaaunua

SEQ ID NO: 68636 - RNA, 22 nt, Artificial Sequence
  Synthetic
  misc_feature (20)..(20): n is a, c, g, or u
auuacauaacccaugaaaunua

SEQ ID NO: 68637 - RNA, 23 nt, Artificial Sequence
  Synthetic
  misc_feature (21)..(21): n is a, c, g, or u
aauuacauaacccaugaaaunua

SEQ ID NO: 68638 - RNA, 24 nt, Artificial Sequence
  Synthetic
  misc_feature (22)..(22): n is a, c, g, or u
caauuacauaacccaugaaaunua

SEQ ID NO: 68639 - RNA, 18 nt, Artificial Sequence
  Synthetic
aagucagaaggcaaaaac

SEQ ID NO: 68640 - RNA, 20 nt, Artificial Sequence
  Synthetic
agaagucagaaggcaaaaac

SEQ ID NO: 68641 - RNA, 21 nt, Artificial Sequence
  Synthetic
aagaagucagaaggcaaaaac

SEQ ID NO: 68642 - RNA, 22 nt, Artificial Sequence
  Synthetic
aaagaagucagaaggcaaaaac

SEQ ID NO: 68643 - RNA, 18 nt, Artificial Sequence
  Synthetic
agacaagaaaugugaaac

SEQ ID NO: 68644 - RNA, 20 nt, Artificial Sequence
  Synthetic
ugagacaagaaaugugaaac

SEQ ID NO: 68645 - RNA, 22 nt, Artificial Sequence
  Synthetic
agugagacaagaaaugugaaac

SEQ ID NO: 68646 - RNA, 23 nt, Artificial Sequence
  Synthetic
aagugagacaagaaaugugaaac

SEQ ID NO: 68647 - RNA, 24 nt, Artificial Sequence
  Synthetic
aaagugagacaagaaaugugaaac

SEQ ID NO: 68648 - RNA, 18 nt, Artificial Sequence
  Synthetic
caaaagaaaauugguaac

SEQ ID NO: 68649 - RNA, 19 nt, Artificial Sequence
  Synthetic
acaaaagaaaauugguaac

SEQ ID NO: 68650 - RNA, 21 nt, Artificial Sequence
  Synthetic
agacaaaagaaaauugguaac

SEQ ID NO: 68651 - RNA, 22 nt, Artificial Sequence
  Synthetic
aagacaaaagaaaauugguaac

SEQ ID NO: 68652 - RNA, 23 nt, Artificial Sequence
  Synthetic
aaagacaaaagaaaauugguaac

SEQ ID NO: 68653 - RNA, 24 nt, Artificial Sequence
  Synthetic
caaagacaaaagaaaauugguaac

SEQ ID NO: 68654 - RNA, 18 nt, Artificial Sequence
  Synthetic
caagaaaugugaaaccac

SEQ ID NO: 68655 - RNA, 19 nt, Artificial Sequence
  Synthetic
acaagaaaugugaaaccac

SEQ ID NO: 68656 - RNA, 21 nt, Artificial Sequence
  Synthetic
agacaagaaaugugaaaccac

SEQ ID NO: 68657 - RNA, 23 nt, Artificial Sequence
  Synthetic
ugagacaagaaaugugaaaccac

SEQ ID NO: 68658 - RNA, 18 nt, Artificial Sequence
  Synthetic
  misc_feature (11)..(11): n is a, c, g, or u
uuccaaauuuncacccac

SEQ ID NO: 68659 - RNA, 19 nt, Artificial Sequence
  Synthetic
  misc_feature (12)..(12): n is a, c, g, or u
cuuccaaauuuncacccac

SEQ ID NO: 68660 - RNA, 20 nt, Artificial Sequence
  Synthetic
  misc_feature (13)..(13): n is a, c, g, or u
ucuuccaaauuuncacccac

SEQ ID NO: 68661 - RNA, 21 nt, Artificial Sequence
  Synthetic
  misc_feature (14)..(14): n is a, c, g, or u
aucuuccaaauuuncacccac

SEQ ID NO: 68662 - RNA, 24 nt, Artificial Sequence
  Synthetic
  misc_feature (17)..(17): n is a, c, g, or u
uggaucuuccaaauuuncacccac

SEQ ID NO: 68663 - RNA, 20 nt, Artificial Sequence
  Synthetic
uggaucggcagaggagccac

SEQ ID NO: 68664 - RNA, 19 nt, Artificial Sequence
  Synthetic
agauuuggugggcguucac

SEQ ID NO: 68665 - RNA, 20 nt, Artificial Sequence
  Synthetic
aagauuuggugggcguucac

SEQ ID NO: 68666 - RNA, 20 nt, Artificial Sequence
  Synthetic
aggacaaacgggcaacauac

SEQ ID NO: 68667 - RNA, 22 nt, Artificial Sequence
  Synthetic
agaggacaaacgggcaacauac

SEQ ID NO: 68668 - RNA, 23 nt, Artificial Sequence
  Synthetic
uagaggacaaacgggcaacauac

SEQ ID NO: 68669 - RNA, 24 nt, Artificial Sequence
  Synthetic
uuagaggacaaacgggcaacauac

SEQ ID NO: 68670 - RNA, 18 nt, Artificial Sequence
  Synthetic
aauugagagaaguccacc

SEQ ID NO: 68671 - RNA, 19 nt, Artificial Sequence
  Synthetic
aaauugagagaaguccacc

SEQ ID NO: 68672 - RNA, 20 nt, Artificial Sequence
  Synthetic
aaaauugagagaaguccacc

SEQ ID NO: 68673 - RNA, 18 nt, Artificial Sequence
  Synthetic
agcaaagcccaaaagacc

SEQ ID NO: 68674 - RNA, 19 nt, Artificial Sequence
  Synthetic
cagcaaagcccaaaagacc

SEQ ID NO: 68675 - RNA, 24 nt, Artificial Sequence
  Synthetic
aggggcagcaaagcccaaaagacc

SEQ ID NO: 68676 - RNA, 18 nt, Artificial Sequence
  Synthetic
ccuccuaguacaaagacc

SEQ ID NO: 68677 - RNA, 20 nt, Artificial Sequence
  Synthetic
agccuccuaguacaaagacc

SEQ ID NO: 68678 - RNA, 19 nt, Artificial Sequence
  Synthetic
cguaaagagaggugcgccc

SEQ ID NO: 68679 - RNA, 19 nt, Artificial Sequence
  Synthetic
ugauguagcucuuguuccc

SEQ ID NO: 68680 - RNA, 20 nt, Artificial Sequence
  Synthetic
augauguagcucuuguuccc

SEQ ID NO: 68681 - RNA, 18 nt, Artificial Sequence
  Synthetic
aggaauuuuccgaaagcc

SEQ ID NO: 68682 - RNA, 19 nt, Artificial Sequence
  Synthetic
uaggaauuuuccgaaagcc

SEQ ID NO: 68683 - RNA, 20 nt, Artificial Sequence
  Synthetic
auaggaauuuuccgaaagcc

SEQ ID NO: 68684 - RNA, 18 nt, Artificial Sequence
  Synthetic
uguuguacagacuuggcc

SEQ ID NO: 68685 - RNA, 19 nt, Artificial Sequence
  Synthetic
auguuguacagacuuggcc

SEQ ID NO: 68686 - RNA, 21 nt, Artificial Sequence
  Synthetic
agauguuguacagacuuggcc

SEQ ID NO: 68687 - RNA, 22 nt, Artificial Sequence
  Synthetic
aagauguuguacagacuuggcc

SEQ ID NO: 68688 - RNA, 23 nt, Artificial Sequence
  Synthetic
caagauguuguacagacuuggcc

SEQ ID NO: 68689 - RNA, 24 nt, Artificial Sequence
  Synthetic
ucaagauguuguacagacuuggcc

SEQ ID NO: 68690 - RNA, 18 nt, Artificial Sequence
  Synthetic
  misc_feature (13)..(13): n is a, c, g, or u
cuaacaacaguanucucc

SEQ ID NO: 68691 - RNA, 19 nt, Artificial Sequence
  Synthetic
  misc_feature (14)..(14): n is a, c, g, or u
ucuaacaacaguanucucc

SEQ ID NO: 68692 - RNA, 18 nt, Artificial Sequence
  Synthetic
  misc_feature (10)..(10): n is a, c, g, or u
ugacauugcngagagucc

SEQ ID NO: 68693 - RNA, 19 nt, Artificial Sequence
  Synthetic
  misc_feature (11)..(11): n is a, c, g, or u
uugacauugcngagagucc

SEQ ID NO: 68694 - RNA, 18 nt, Artificial Sequence
  Synthetic
caagugcaauuuccgucc

SEQ ID NO: 68695 - RNA, 19 nt, Artificial Sequence
  Synthetic
acaagugcaauuuccgucc

SEQ ID NO: 68696 - RNA, 20 nt, Artificial Sequence
  Synthetic
uacaagugcaauuuccgucc

SEQ ID NO: 68697 - RNA, 18 nt, Artificial Sequence
  Synthetic
uaacugacuacuaggucc

SEQ ID NO: 68698 - RNA, 19 nt, Artificial Sequence
  Synthetic
auaacugacuacuaggucc

SEQ ID NO: 68699 - RNA, 20 nt, Artificial Sequence
  Synthetic
cauaacugacuacuaggucc

SEQ ID NO: 68700 - RNA, 18 nt, Artificial Sequence
  Synthetic
  misc_feature (14)..(14): n is a, c, g, or u
ccuuguuggcuucngucc

SEQ ID NO: 68701 - RNA, 19 nt, Artificial Sequence
  Synthetic
  misc_feature (15)..(15): n is a, c, g, or u
accuuguuggcuucngucc

SEQ ID NO: 68702 - RNA, 20 nt, Artificial Sequence
  Synthetic
  misc_feature (16)..(16): n is a, c, g, or u
uaccuuguuggcuucngucc

SEQ ID NO: 68703 - RNA, 21 nt, Artificial Sequence
  Synthetic
  misc_feature (17)..(17): n is a, c, g, or u
cuaccuuguuggcuucngucc

SEQ ID NO: 68704 - RNA, 22 nt, Artificial Sequence
  Synthetic
  misc_feature (18)..(18): n is a, c, g, or u
ccuaccuuguuggcuucngucc

SEQ ID NO: 68705 - RNA, 23 nt, Artificial Sequence
  Synthetic
  misc_feature (19)..(19): n is a, c, g, or u
uccuaccuuguuggcuucngucc

SEQ ID NO: 68706 - RNA, 24 nt, Artificial Sequence
  Synthetic
  misc_feature (20)..(20): n is a, c, g, or u
cuccuaccuuguuggcuucngucc

SEQ ID NO: 68707 - RNA, 18 nt, Artificial Sequence
  Synthetic
  misc_feature (3)..(3): n is a, c, g, or u
uangacgguuucucuucc

SEQ ID NO: 68708 - RNA, 19 nt, Artificial Sequence
  Synthetic
  misc_feature (4)..(4): n is a, c, g, or u
cuangacgguuucucuucc

SEQ ID NO: 68709 - RNA, 20 nt, Artificial Sequence
  Synthetic
  misc_feature (5)..(5): n is a, c, g, or u
ucuangacgguuucucuucc

SEQ ID NO: 68710 - RNA, 18 nt, Artificial Sequence
  Synthetic
cauagagguuccuugagc

SEQ ID NO: 68711 - RNA, 19 nt, Artificial Sequence
  Synthetic
acauagagguuccuugagc

SEQ ID NO: 68712 - RNA, 20 nt, Artificial Sequence
  Synthetic
aacauagagguuccuugagc

SEQ ID NO: 68713 - RNA, 18 nt, Artificial Sequence
  Synthetic
  misc_feature (2)..(2): n is a, c, g, or u
uncacccacccagguagc

SEQ ID NO: 68714 - RNA, 19 nt, Artificial Sequence
  Synthetic
  misc_feature (3)..(3): n is a, c, g, or u
uuncacccacccagguagc

SEQ ID NO: 68715 - RNA, 20 nt, Artificial Sequence
  Synthetic
  misc_feature (4)..(4): n is a, c, g, or u
uuuncacccacccagguagc

SEQ ID NO: 68716 - RNA, 21 nt, Artificial Sequence
  Synthetic
  misc_feature (5)..(5): n is a, c, g, or u
auuuncacccacccagguagc

SEQ ID NO: 68717 - RNA, 22 nt, Artificial Sequence
  Synthetic
  misc_feature (6)..(6): n is a, c, g, or u
aauuuncacccacccagguagc

SEQ ID NO: 68718 - RNA, 23 nt, Artificial Sequence
  Synthetic
  misc_feature (7)..(7): n is a, c, g, or u
aaauuuncacccacccagguagc

SEQ ID NO: 68719 - RNA, 24 nt, Artificial Sequence
  Synthetic
  misc_feature (8)..(8): n is a, c, g, or u
caaauuuncacccacccagguagc

SEQ ID NO: 68720 - RNA, 18 nt, Artificial Sequence
  Synthetic
ugacgagaugagugaggc

SEQ ID NO: 68721 - RNA, 19 nt, Artificial Sequence
  Synthetic
uugacgagaugagugaggc

SEQ ID NO: 68722 - RNA, 20 nt, Artificial Sequence
  Synthetic
auugacgagaugagugaggc

SEQ ID NO: 68723 - RNA, 18 nt, Artificial Sequence
  Synthetic
aacaagagaugauuaggc

SEQ ID NO: 68724 - RNA, 20 nt, Artificial Sequence
  Synthetic
ugaacaagagaugauuaggc

SEQ ID NO: 68725 - RNA, 19 nt, Artificial Sequence
  Synthetic
  misc_feature (16)..(16): n is a, c, g, or u
ugggggagugaacccnggc

SEQ ID NO: 68726 - RNA, 21 nt, Artificial Sequence
  Synthetic
  misc_feature (18)..(18): n is a, c, g, or u
ugugggggagugaacccnggc

SEQ ID NO: 68727 - RNA, 23 nt, Artificial Sequence
  Synthetic
  misc_feature (20)..(20): n is a, c, g, or u
cgugugggggagugaacccnggc

SEQ ID NO: 68728 - RNA, 24 nt, Artificial Sequence
  Synthetic
  misc_feature (21)..(21): n is a, c, g, or u
ccgugugggggagugaacccnggc

SEQ ID NO: 68729 - RNA, 18 nt, Artificial Sequence
  Synthetic
  misc_feature (11)..(11): n is a, c, g, or u
caaagguuccncgcaugc

SEQ ID NO: 68730 - RNA, 19 nt, Artificial Sequence
  Synthetic
  misc_feature (12)..(12): n is a, c, g, or u
acaaagguuccncgcaugc

SEQ ID NO: 68731 - RNA, 20 nt, Artificial Sequence
  Synthetic
  misc_feature (13)..(13): n is a, c, g, or u
cacaaagguuccncgcaugc

SEQ ID NO: 68732 - RNA, 19 nt, Artificial Sequence
  Synthetic
cgagaaagugaaagccugc

SEQ ID NO: 68733 - RNA, 18 nt, Artificial Sequence
  Synthetic
cagcaaagaauggcuugc

SEQ ID NO: 68734 - RNA, 19 nt, Artificial Sequence
  Synthetic
ccagcaaagaauggcuugc

SEQ ID NO: 68735 - RNA, 20 nt, Artificial Sequence
  Synthetic
cccagcaaagaauggcuugc

SEQ ID NO: 68736 - RNA, 18 nt, Artificial Sequence
  Synthetic
caaaaacgagaguaacuc

SEQ ID NO: 68737 - RNA, 21 nt, Artificial Sequence
  Synthetic
aggcaaaaacgagaguaacuc

SEQ ID NO: 68738 - RNA, 22 nt, Artificial Sequence
  Synthetic
aaggcaaaaacgagaguaacuc

SEQ ID NO: 68739 - RNA, 24 nt, Artificial Sequence
  Synthetic
agaaggcaaaaacgagaguaacuc

SEQ ID NO: 68740 - RNA, 18 nt, Artificial Sequence
  Synthetic
aauacaggccucuuacuc

SEQ ID NO: 68741 - RNA, 19 nt, Artificial Sequence
  Synthetic
aaauacaggccucuuacuc

SEQ ID NO: 68742 - RNA, 20 nt, Artificial Sequence
  Synthetic
aaaauacaggccucuuacuc

SEQ ID NO: 68743 - RNA, 23 nt, Artificial Sequence
  Synthetic
aggaaaauacaggccucuuacuc

SEQ ID NO: 68744 - RNA, 24 nt, Artificial Sequence
  Synthetic
caggaaaauacaggccucuuacuc

SEQ ID NO: 68745 - RNA, 18 nt, Artificial Sequence
  Synthetic
ugaggaugagugucucuc

SEQ ID NO: 68746 - RNA, 19 nt, Artificial Sequence
  Synthetic
cugaggaugagugucucuc

SEQ ID NO: 68747 - RNA, 20 nt, Artificial Sequence
  Synthetic
ccugaggaugagugucucuc

SEQ ID NO: 68748 - RNA, 23 nt, Artificial Sequence
  Synthetic
uggccugaggaugagugucucuc

SEQ ID NO: 68749 - RNA, 24 nt, Artificial Sequence
  Synthetic
auggccugaggaugagugucucuc

SEQ ID NO: 68750 - RNA, 21 nt, Artificial Sequence
  Synthetic
agggaguuuucuaaaacaguc

SEQ ID NO: 68751 - RNA, 22 nt, Artificial Sequence
  Synthetic
cagggaguuuucuaaaacaguc

SEQ ID NO: 68752 - RNA, 23 nt, Artificial Sequence
  Synthetic
acagggaguuuucuaaaacaguc

SEQ ID NO: 68753 - RNA, 24 nt, Artificial Sequence
  Synthetic
aacagggaguuuucuaaaacaguc

SEQ ID NO: 68754 - RNA, 18 nt, Artificial Sequence
  Synthetic
cauguucggugcaggguc

SEQ ID NO: 68755 - RNA, 19 nt, Artificial Sequence
  Synthetic
ccauguucggugcaggguc

SEQ ID NO: 68756 - RNA, 20 nt, Artificial Sequence
  Synthetic
uccauguucggugcaggguc

SEQ ID NO: 68757 - RNA, 18 nt, Artificial Sequence
  Synthetic
acaagcggcuaggaguuc

SEQ ID NO: 68758 - RNA, 19 nt, Artificial Sequence
  Synthetic
aacaagcggcuaggaguuc

SEQ ID NO: 68759 - RNA, 20 nt, Artificial Sequence
  Synthetic
aaacaagcggcuaggaguuc

SEQ ID NO: 68760 - RNA, 18 nt, Artificial Sequence
  Synthetic
cauacagaggcauuaaag

SEQ ID NO: 68761 - RNA, 20 nt, Artificial Sequence
  Synthetic
cgcauacagaggcauuaaag

SEQ ID NO: 68762 - RNA, 18 nt, Artificial Sequence
  Synthetic
uuccaguuaggauuaaag

SEQ ID NO: 68763 - RNA, 19 nt, Artificial Sequence
  Synthetic
uuuccaguuaggauuaaag

SEQ ID NO: 68764 - RNA, 20 nt, Artificial Sequence
  Synthetic
uuuuccaguuaggauuaaag

SEQ ID NO: 68765 - RNA, 18 nt, Artificial Sequence
  Synthetic
augggaugggaauacaag

SEQ ID NO: 68766 - RNA, 20 nt, Artificial Sequence
  Synthetic
ugaugggaugggaauacaag

SEQ ID NO: 68767 - RNA, 18 nt, Artificial Sequence
  Synthetic
uuugaaguaugccucaag

SEQ ID NO: 68768 - RNA, 19 nt, Artificial Sequence
  Synthetic
cuuugaaguaugccucaag

SEQ ID NO: 68769 - RNA, 20 nt, Artificial Sequence
  Synthetic
ucuuugaaguaugccucaag

SEQ ID NO: 68770 - RNA, 22 nt, Artificial Sequence
  Synthetic
agucuuugaaguaugccucaag

SEQ ID NO: 68771 - RNA, 23 nt, Artificial Sequence
  Synthetic
cagucuuugaaguaugccucaag

SEQ ID NO: 68772 - RNA, 24 nt, Artificial Sequence
  Synthetic
acagucuuugaaguaugccucaag

SEQ ID NO: 68773 - RNA, 18 nt, Artificial Sequence
  Synthetic
cuagcaggcaugacuaag

SEQ ID NO: 68774 - RNA, 19 nt, Artificial Sequence
  Synthetic
ucuagcaggcaugacuaag

SEQ ID NO: 68775 - RNA, 20 nt, Artificial Sequence
  Synthetic
aucuagcaggcaugacuaag

SEQ ID NO: 68776 - RNA, 21 nt, Artificial Sequence
  Synthetic
aaucuagcaggcaugacuaag

SEQ ID NO: 68777 - RNA, 22 nt, Artificial Sequence
  Synthetic
aaaucuagcaggcaugacuaag

SEQ ID NO: 68778 - RNA, 23 nt, Artificial Sequence
  Synthetic
aaaaucuagcaggcaugacuaag

SEQ ID NO: 68779 - RNA, 24 nt, Artificial Sequence
  Synthetic
aaaaaucuagcaggcaugacuaag

SEQ ID NO: 68780 - RNA, 18 nt, Artificial Sequence
  Synthetic
aacuggagccaccagcag

SEQ ID NO: 68781 - RNA, 21 nt, Artificial Sequence
  Synthetic
cggaacuggagccaccagcag

SEQ ID NO: 68782 - RNA, 22 nt, Artificial Sequence
  Synthetic
ccggaacuggagccaccagcag

SEQ ID NO: 68783 - RNA, 23 nt, Artificial Sequence
  Synthetic
uccggaacuggagccaccagcag

SEQ ID NO: 68784 - RNA, 24 nt, Artificial Sequence
  Synthetic
uuccggaacuggagccaccagcag

SEQ ID NO: 68785 - RNA, 19 nt, Artificial Sequence
  Synthetic
agaagaugaggcauagcag

SEQ ID NO: 68786 - RNA, 20 nt, Artificial Sequence
  Synthetic
aagaagaugaggcauagcag

SEQ ID NO: 68787 - RNA, 18 nt, Artificial Sequence
  Synthetic
cauggugcuggugcgcag

SEQ ID NO: 68788 - RNA, 20 nt, Artificial Sequence
  Synthetic
ugcauggugcuggugcgcag

SEQ ID NO: 68789 - RNA, 18 nt, Artificial Sequence
  Synthetic
uggcuugccugagugcag

SEQ ID NO: 68790 - RNA, 19 nt, Artificial Sequence
  Synthetic
auggcuugccugagugcag

SEQ ID NO: 68791 - RNA, 20 nt, Artificial Sequence
  Synthetic
aauggcuugccugagugcag

SEQ ID NO: 68792 - RNA, 22 nt, Artificial Sequence
  Synthetic
agaauggcuugccugagugcag

SEQ ID NO: 68793 - RNA, 23 nt, Artificial Sequence
  Synthetic
aagaauggcuugccugagugcag

SEQ ID NO: 68794 - RNA, 24 nt, Artificial Sequence
  Synthetic
aaagaauggcuugccugagugcag

SEQ ID NO: 68795 - RNA, 18 nt, Artificial Sequence
  Synthetic
caaauuggaggacaagag

SEQ ID NO: 68796 - RNA, 19 nt, Artificial Sequence
  Synthetic
acaaauuggaggacaagag

SEQ ID NO: 68797 - RNA, 22 nt, Artificial Sequence
  Synthetic
aggacaaauuggaggacaagag

SEQ ID NO: 68798 - RNA, 23 nt, Artificial Sequence
  Synthetic
caggacaaauuggaggacaagag

SEQ ID NO: 68799 - RNA, 24 nt, Artificial Sequence
  Synthetic
ccaggacaaauuggaggacaagag

SEQ ID NO: 68800 - RNA, 18 nt, Artificial Sequence
  Synthetic
uagcagcaggaugaagag

SEQ ID NO: 68801 - RNA, 19 nt, Artificial Sequence
  Synthetic
auagcagcaggaugaagag

SEQ ID NO: 68802 - RNA, 20 nt, Artificial Sequence
  Synthetic
cauagcagcaggaugaagag

SEQ ID NO: 68803 - RNA, 23 nt, Artificial Sequence
  Synthetic
aggcauagcagcaggaugaagag

SEQ ID NO: 68804 - RNA, 18 nt, Artificial Sequence
  Synthetic
cucugggauccugcagag

SEQ ID NO: 68805 - RNA, 19 nt, Artificial Sequence
  Synthetic
acucugggauccugcagag

SEQ ID NO: 68806 - RNA, 20 nt, Artificial Sequence
  Synthetic
uacucugggauccugcagag

SEQ ID NO: 68807 - RNA, 18 nt, Artificial Sequence
  Synthetic
  misc_feature (1)..(1): n is a, c, g, or u
nccccaagcgaccccgag

SEQ ID NO: 68808 - RNA, 19 nt, Artificial Sequence
  Synthetic
  misc_feature (2)..(2): n is a, c, g, or u
anccccaagcgaccccgag

SEQ ID NO: 68809 - RNA, 21 nt, Artificial Sequence
  Synthetic
  misc_feature (4)..(4): n is a, c, g, or u
aganccccaagcgaccccgag

SEQ ID NO: 68810 - RNA, 22 nt, Artificial Sequence
  Synthetic
  misc_feature (1)..(1): n is a, c, g, or u
  misc_feature (5)..(5): n is a, c, g, or u
naganccccaagcgaccccgag

SEQ ID NO: 68811 - RNA, 23 nt, Artificial Sequence
  Synthetic
  misc_feature (2)..(2): n is a, c, g, or u
  misc_feature (6)..(6): n is a, c, g, or u
anaganccccaagcgaccccgag

SEQ ID NO: 68812 - RNA, 19 nt, Artificial Sequence
  Synthetic
cgauugguggaggcaggag

SEQ ID NO: 68813 - RNA, 20 nt, Artificial Sequence
  Synthetic
ccgauugguggaggcaggag

SEQ ID NO: 68814 - RNA, 22 nt, Artificial Sequence
  Synthetic
ugccgauugguggaggcaggag

SEQ ID NO: 68815 - RNA, 23 nt, Artificial Sequence
  Synthetic
cugccgauugguggaggcaggag

SEQ ID NO: 68816 - RNA, 24 nt, Artificial Sequence
  Synthetic
acugccgauugguggaggcaggag

SEQ ID NO: 68817 - RNA, 18 nt, Artificial Sequence
  Synthetic
aagaauggcuugccugag

SEQ ID NO: 68818 - RNA, 19 nt, Artificial Sequence
  Synthetic
aaagaauggcuugccugag

SEQ ID NO: 68819 - RNA, 20 nt, Artificial Sequence
  Synthetic
caaagaauggcuugccugag

SEQ ID NO: 68820 - RNA, 22 nt, Artificial Sequence
  Synthetic
agcaaagaauggcuugccugag

SEQ ID NO: 68821 - RNA, 23 nt, Artificial Sequence
  Synthetic
cagcaaagaauggcuugccugag

SEQ ID NO: 68822 - RNA, 24 nt, Artificial Sequence
  Synthetic
ccagcaaagaauggcuugccugag

SEQ ID NO: 68823 - RNA, 18 nt, Artificial Sequence
  Synthetic
ucccccuagaaaauugag

SEQ ID NO: 68824 - RNA, 19 nt, Artificial Sequence
  Synthetic
cucccccuagaaaauugag

SEQ ID NO: 68825 - RNA, 18 nt, Artificial Sequence
  Synthetic
  misc_feature (2)..(2): n is a, c, g, or u
anaaaaugaggcgcuacg

SEQ ID NO: 68826 - RNA, 19 nt, Artificial Sequence
  Synthetic
  misc_feature (3)..(3): n is a, c, g, or u
canaaaaugaggcgcuacg

SEQ ID NO: 68827 - RNA, 20 nt, Artificial Sequence
  Synthetic
  misc_feature (4)..(4): n is a, c, g, or u
ccanaaaaugaggcgcuacg

SEQ ID NO: 68828 - RNA, 18 nt, Artificial Sequence
  Synthetic
  misc_feature (8)..(8): n is a, c, g, or u
uagaaganuaaagccccg

SEQ ID NO: 68829 - RNA, 20 nt, Artificial Sequence
  Synthetic
  misc_feature (10)..(10): n is a, c, g, or u
aguagaaganuaaagccccg

SEQ ID NO: 68830 - RNA, 21 nt, Artificial Sequence
  Synthetic
  misc_feature (11)..(11): n is a, c, g, or u
uaguagaaganuaaagccccg

SEQ ID NO: 68831 - RNA, 22 nt, Artificial Sequence
  Synthetic
  misc_feature (12)..(12): n is a, c, g, or u
auaguagaaganuaaagccccg

SEQ ID NO: 68832 - RNA, 23 nt, Artificial Sequence
  Synthetic
  misc_feature (13)..(13): n is a, c, g, or u
uauaguagaaganuaaagccccg

SEQ ID NO: 68833 - RNA, 18 nt, Artificial Sequence
  Synthetic
cugccuuccugacugccg

SEQ ID NO: 68834 - RNA, 18 nt, Artificial Sequence
  Synthetic
augagugucucucaaagg

SEQ ID NO: 68835 - RNA, 21 nt, Artificial Sequence
  Synthetic
aggaugagugucucucaaagg

SEQ ID NO: 68836 - RNA, 23 nt, Artificial Sequence
  Synthetic
ugaggaugagugucucucaaagg

SEQ ID NO: 68837 - RNA, 24 nt, Artificial Sequence
  Synthetic
cugaggaugagugucucucaaagg

SEQ ID NO: 68838 - RNA, 18 nt, Artificial Sequence
  Synthetic
uccaaauucuuuauaagg

SEQ ID NO: 68839 - RNA, 19 nt, Artificial Sequence
  Synthetic
cuccaaauucuuuauaagg

SEQ ID NO: 68840 - RNA, 19 nt, Artificial Sequence
  Synthetic
aguuaggauuaaagacagg

SEQ ID NO: 68841 - RNA, 20 nt, Artificial Sequence
  Synthetic
caguuaggauuaaagacagg

SEQ ID NO: 68842 - RNA, 21 nt, Artificial Sequence
  Synthetic
ccaguuaggauuaaagacagg

SEQ ID NO: 68843 - RNA, 22 nt, Artificial Sequence
  Synthetic
uccaguuaggauuaaagacagg

SEQ ID NO: 68844 - RNA, 23 nt, Artificial Sequence
  Synthetic
uuccaguuaggauuaaagacagg

SEQ ID NO: 68845 - RNA, 24 nt, Artificial Sequence
  Synthetic
uuuccaguuaggauuaaagacagg

SEQ ID NO: 68846 - RNA, 18 nt, Artificial Sequence
  Synthetic
cauccagcgauagccagg

SEQ ID NO: 68847 - RNA, 19 nt, Artificial Sequence
  Synthetic
acauccagcgauagccagg

SEQ ID NO: 68848 - RNA, 20 nt, Artificial Sequence
  Synthetic
cacauccagcgauagccagg

SEQ ID NO: 68849 - RNA, 19 nt, Artificial Sequence
  Synthetic
cgggaaaaaaucccagagg

SEQ ID NO: 68850 - RNA, 20 nt, Artificial Sequence
  Synthetic
ucgggaaaaaaucccagagg

SEQ ID NO: 68851 - RNA, 23 nt, Artificial Sequence
  Synthetic
uggucgggaaaaaaucccagagg

SEQ ID NO: 68852 - RNA, 18 nt, Artificial Sequence
  Synthetic
ccacugcauggccugagg

SEQ ID NO: 68853 - RNA, 19 nt, Artificial Sequence
  Synthetic
uccacugcauggccugagg

SEQ ID NO: 68854 - RNA, 20 nt, Artificial Sequence
  Synthetic
uuccacugcauggccugagg

SEQ ID NO: 68855 - RNA, 18 nt, Artificial Sequence
  Synthetic
uuauaccuuucucuaggg

SEQ ID NO: 68856 - RNA, 19 nt, Artificial Sequence
  Synthetic
uuuauaccuuucucuaggg

SEQ ID NO: 68857 - RNA, 20 nt, Artificial Sequence
  Synthetic
uuuuauaccuuucucuaggg

SEQ ID NO: 68858 - RNA, 23 nt, Artificial Sequence
  Synthetic
agguuuuauaccuuucucuaggg

SEQ ID NO: 68859 - RNA, 24 nt, Artificial Sequence
  Synthetic
aagguuuuauaccuuucucuaggg

SEQ ID NO: 68860 - RNA, 18 nt, Artificial Sequence
  Synthetic
cuuauguaagaccuuggg

SEQ ID NO: 68861 - RNA, 19 nt, Artificial Sequence
  Synthetic
ucuuauguaagaccuuggg

SEQ ID NO: 68862 - RNA, 20 nt, Artificial Sequence
  Synthetic
cucuuauguaagaccuuggg

SEQ ID NO: 68863 - RNA, 18 nt, Artificial Sequence
  Synthetic
ugguggucuauaagcugg

SEQ ID NO: 68864 - RNA, 19 nt, Artificial Sequence
  Synthetic
uugguggucuauaagcugg

SEQ ID NO: 68865 - RNA, 20 nt, Artificial Sequence
  Synthetic
uuugguggucuauaagcugg

SEQ ID NO: 68866 - RNA, 18 nt, Artificial Sequence
  Synthetic
agugucucucaaaggugg

SEQ ID NO: 68867 - RNA, 20 nt, Artificial Sequence
  Synthetic
ugagugucucucaaaggugg

SEQ ID NO: 68868 - RNA, 21 nt, Artificial Sequence
  Synthetic
augagugucucucaaaggugg

SEQ ID NO: 68869 - RNA, 24 nt, Artificial Sequence
  Synthetic
aggaugagugucucucaaaggugg

SEQ ID NO: 68870 - RNA, 18 nt, Artificial Sequence
  Synthetic
ccagaggauugguggugg

SEQ ID NO: 68871 - RNA, 19 nt, Artificial Sequence
  Synthetic
cccagaggauugguggugg

SEQ ID NO: 68872 - RNA, 20 nt, Artificial Sequence
  Synthetic
ucccagaggauugguggugg

SEQ ID NO: 68873 - RNA, 21 nt, Artificial Sequence
  Synthetic
aucccagaggauugguggugg

SEQ ID NO: 68874 - RNA, 22 nt, Artificial Sequence
  Synthetic
aaucccagaggauugguggugg

SEQ ID NO: 68875 - RNA, 23 nt, Artificial Sequence
  Synthetic
aaaucccagaggauugguggugg

SEQ ID NO: 68876 - RNA, 24 nt, Artificial Sequence
  Synthetic
aaaaucccagaggauugguggugg

SEQ ID NO: 68877 - RNA, 18 nt, Artificial Sequence
  Synthetic
aucccagaggauuggugg

SEQ ID NO: 68878 - RNA, 19 nt, Artificial Sequence
  Synthetic
aaucccagaggauuggugg

SEQ ID NO: 68879 - RNA, 20 nt, Artificial Sequence
  Synthetic
aaaucccagaggauuggugg

SEQ ID NO: 68880 - RNA, 18 nt, Artificial Sequence
  Synthetic
caaaaggccuccgugugg

SEQ ID NO: 68881 - RNA, 19 nt, Artificial Sequence
  Synthetic
ccaaaaggccuccgugugg

SEQ ID NO: 68882 - RNA, 20 nt, Artificial Sequence
  Synthetic
cccaaaaggccuccgugugg

SEQ ID NO: 68883 - RNA, 18 nt, Artificial Sequence
  Synthetic
  misc_feature (15)..(15): n is a, c, g, or u
ugccugagugcagunugg

SEQ ID NO: 68884 - RNA, 19 nt, Artificial Sequence
  Synthetic
  misc_feature (16)..(16): n is a, c, g, or u
uugccugagugcagunugg

SEQ ID NO: 68885 - RNA, 20 nt, Artificial Sequence
  Synthetic
  misc_feature (17)..(17): n is a, c, g, or u
cuugccugagugcagunugg

SEQ ID NO: 68886 - RNA, 23 nt, Artificial Sequence
  Synthetic
  misc_feature (20)..(20): n is a, c, g, or u
uggcuugccugagugcagunugg

SEQ ID NO: 68887 - RNA, 24 nt, Artificial Sequence
  Synthetic
  misc_feature (21)..(21): n is a, c, g, or u
auggcuugccugagugcagunugg

SEQ ID NO: 68888 - RNA, 20 nt, Artificial Sequence
  Synthetic
ugggauccugcagagcuugg

SEQ ID NO: 68889 - RNA, 21 nt, Artificial Sequence
  Synthetic
cugggauccugcagagcuugg

SEQ ID NO: 68890 - RNA, 22 nt, Artificial Sequence
  Synthetic
ucugggauccugcagagcuugg

SEQ ID NO: 68891 - RNA, 23 nt, Artificial Sequence
  Synthetic
cucugggauccugcagagcuugg

SEQ ID NO: 68892 - RNA, 24 nt, Artificial Sequence
  Synthetic
acucugggauccugcagagcuugg

SEQ ID NO: 68893 - RNA, 18 nt, Artificial Sequence
  Synthetic
  misc_feature (17)..(17): n is a, c, g, or u
cuaccuuguuggcuucng

SEQ ID NO: 68894 - RNA, 19 nt, Artificial Sequence
  Synthetic
  misc_feature (18)..(18): n is a, c, g, or u
ccuaccuuguuggcuucng

SEQ ID NO: 68895 - RNA, 20 nt, Artificial Sequence
  Synthetic
  misc_feature (19)..(19): n is a, c, g, or u
uccuaccuuguuggcuucng

SEQ ID NO: 68896 - RNA, 18 nt, Artificial Sequence
  Synthetic
ugguguuugcucugaaug

SEQ ID NO: 68897 - RNA, 19 nt, Artificial Sequence
  Synthetic
cugguguuugcucugaaug

SEQ ID NO: 68898 - RNA, 20 nt, Artificial Sequence
  Synthetic
ucugguguuugcucugaaug

SEQ ID NO: 68899 - RNA, 21 nt, Artificial Sequence
  Synthetic
uucugguguuugcucugaaug

SEQ ID NO: 68900 - RNA, 22 nt, Artificial Sequence
  Synthetic
uuucugguguuugcucugaaug

SEQ ID NO: 68901 - RNA, 23 nt, Artificial Sequence
  Synthetic
auuucugguguuugcucugaaug

SEQ ID NO: 68902 - RNA, 19 nt, Artificial Sequence
  Synthetic
ugaugugaugcuuuccaug

SEQ ID NO: 68903 - RNA, 20 nt, Artificial Sequence
  Synthetic
cugaugugaugcuuuccaug

SEQ ID NO: 68904 - RNA, 18 nt, Artificial Sequence
  Synthetic
cuacuaggucccuggaug

SEQ ID NO: 68905 - RNA, 19 nt, Artificial Sequence
  Synthetic
acuacuaggucccuggaug

SEQ ID NO: 68906 - RNA, 19 nt, Artificial Sequence
  Synthetic
ugauuaacuacauuaucug

SEQ ID NO: 68907 - RNA, 20 nt, Artificial Sequence
  Synthetic
augauuaacuacauuaucug

SEQ ID NO: 68908 - RNA, 18 nt, Artificial Sequence
  Synthetic
uaggguauguaaauagug

SEQ ID NO: 68909 - RNA, 19 nt, Artificial Sequence
  Synthetic
auaggguauguaaauagug

SEQ ID NO: 68910 - RNA, 20 nt, Artificial Sequence
  Synthetic
cauaggguauguaaauagug

SEQ ID NO: 68911 - RNA, 18 nt, Artificial Sequence
  Synthetic
ugcuuuccauguucggug

SEQ ID NO: 68912 - RNA, 19 nt, Artificial Sequence
  Synthetic
augcuuuccauguucggug

SEQ ID NO: 68913 - RNA, 21 nt, Artificial Sequence
  Synthetic
ugaugcuuuccauguucggug

SEQ ID NO: 68914 - RNA, 23 nt, Artificial Sequence
  Synthetic
ugugaugcuuuccauguucggug

SEQ ID NO: 68915 - RNA, 24 nt, Artificial Sequence
  Synthetic
augugaugcuuuccauguucggug

SEQ ID NO: 68916 - RNA, 19 nt, Artificial Sequence
  Synthetic
  misc_feature (9)..(9): n is a, c, g, or u
  misc_feature (15)..(15): n is a, c, g, or u
agugcagunuggugnggug

SEQ ID NO: 68917 - RNA, 21 nt, Artificial Sequence
  Synthetic
  misc_feature (11)..(11): n is a, c, g, or u
  misc_feature (17)..(17): n is a, c, g, or u
ugagugcagunuggugnggug

SEQ ID NO: 68918 - RNA, 22 nt, Artificial Sequence
  Synthetic
  misc_feature (12)..(12): n is a, c, g, or u
  misc_feature (18)..(18): n is a, c, g, or u
cugagugcagunuggugnggug

SEQ ID NO: 68919 - RNA, 23 nt, Artificial Sequence
  Synthetic
  misc_feature (13)..(13): n is a, c, g, or u
  misc_feature (19)..(19): n is a, c, g, or u
ccugagugcagunuggugnggug

SEQ ID NO: 68920 - RNA, 20 nt, Artificial Sequence
  Synthetic
aggcacagcuuggaggcuug

SEQ ID NO: 68921 - RNA, 21 nt, Artificial Sequence
  Synthetic
aaggcacagcuuggaggcuug

SEQ ID NO: 68922 - RNA, 22 nt, Artificial Sequence
  Synthetic
caaggcacagcuuggaggcuug

SEQ ID NO: 68923 - RNA, 23 nt, Artificial Sequence
  Synthetic
ccaaggcacagcuuggaggcuug

SEQ ID NO: 68924 - RNA, 24 nt, Artificial Sequence
  Synthetic
cccaaggcacagcuuggaggcuug

SEQ ID NO: 68925 - RNA, 20 nt, Artificial Sequence
  Synthetic
aggcagaggugaaaaaguug

SEQ ID NO: 68926 - RNA, 21 nt, Artificial Sequence
  Synthetic
uaggcagaggugaaaaaguug

SEQ ID NO: 68927 - RNA, 22 nt, Artificial Sequence
  Synthetic
uuaggcagaggugaaaaaguug

SEQ ID NO: 68928 - RNA, 23 nt, Artificial Sequence
  Synthetic
auuaggcagaggugaaaaaguug

SEQ ID NO: 68929 - RNA, 18 nt, Artificial Sequence
  Synthetic
uuggaggacaagagguug

SEQ ID NO: 68930 - RNA, 19 nt, Artificial Sequence
  Synthetic
auuggaggacaagagguug

SEQ ID NO: 68931 - RNA, 20 nt, Artificial Sequence
  Synthetic
aauuggaggacaagagguug

SEQ ID NO: 68932 - RNA, 21 nt, Artificial Sequence
  Synthetic
aaauuggaggacaagagguug

SEQ ID NO: 68933 - RNA, 22 nt, Artificial Sequence
  Synthetic
caaauuggaggacaagagguug

SEQ ID NO: 68934 - RNA, 23 nt, Artificial Sequence
  Synthetic
acaaauuggaggacaagagguug

SEQ ID NO: 68935 - RNA, 18 nt, Artificial Sequence
  Synthetic
  misc_feature (18)..(18): n is a, c, g, or u
acagucuuugauuuucan

SEQ ID NO: 68936 - RNA, 19 nt, Artificial Sequence
  Synthetic
  misc_feature (19)..(19): n is a, c, g, or u
aacagucuuugauuuucan

SEQ ID NO: 68937 - RNA, 20 nt, Artificial Sequence
  Synthetic
  misc_feature (20)..(20): n is a, c, g, or u
aaacagucuuugauuuucan

SEQ ID NO: 68938 - RNA, 21 nt, Artificial Sequence
  Synthetic
  misc_feature (21)..(21): n is a, c, g, or u
aaaacagucuuugauuuucan

SEQ ID NO: 68939 - RNA, 22 nt, Artificial Sequence
  Synthetic
  misc_feature (22)..(22): n is a, c, g, or u
uaaaacagucuuugauuuucan

SEQ ID NO: 68940 - RNA, 23 nt, Artificial Sequence
  Synthetic
  misc_feature (23)..(23): n is a, c, g, or u
cuaaaacagucuuugauuuucan

SEQ ID NO: 68941 - RNA, 24 nt, Artificial Sequence
  Synthetic
  misc_feature (24)..(24): n is a, c, g, or u
ucuaaaacagucuuugauuuucan

SEQ ID NO: 68942 - RNA, 18 nt, Artificial Sequence
  Synthetic
  misc_feature (18)..(18): n is a, c, g, or u
agacaccaaauacucuan

SEQ ID NO: 68943 - RNA, 19 nt, Artificial Sequence
  Synthetic
  misc_feature (19)..(19): n is a, c, g, or u
aagacaccaaauacucuan

SEQ ID NO: 68944 - RNA, 20 nt, Artificial Sequence
  Synthetic
  misc_feature (20)..(20): n is a, c, g, or u
aaagacaccaaauacucuan

SEQ ID NO: 68945 - RNA, 21 nt, Artificial Sequence
  Synthetic
  misc_feature (21)..(21): n is a, c, g, or u
aaaagacaccaaauacucuan

SEQ ID NO: 68946 - RNA, 22 nt, Artificial Sequence
  Synthetic
  misc_feature (22)..(22): n is a, c, g, or u
caaaagacaccaaauacucuan

SEQ ID NO: 68947 - RNA, 23 nt, Artificial Sequence
  Synthetic
  misc_feature (23)..(23): n is a, c, g, or u
ccaaaagacaccaaauacucuan

SEQ ID NO: 68948 - RNA, 24 nt, Artificial Sequence
  Synthetic
  misc_feature (24)..(24): n is a, c, g, or u
uccaaaagacaccaaauacucuan

SEQ ID NO: 68949 - RNA, 18 nt, Artificial Sequence
  Synthetic
  misc_feature (5)..(5): n is a, c, g, or u
  misc_feature (18)..(18): n is a, c, g, or u
uucanucugauguguucn

SEQ ID NO: 68950 - RNA, 19 nt, Artificial Sequence
  Synthetic
  misc_feature (6)..(6): n is a, c, g, or u
  misc_feature (19)..(19): n is a, c, g, or u
uuucanucugauguguucn

SEQ ID NO: 68951 - RNA, 20 nt, Artificial Sequence
  Synthetic
  misc_feature (7)..(7): n is a, c, g, or u
  misc_feature (20)..(20): n is a, c, g, or u
uuuucanucugauguguucn

SEQ ID NO: 68952 - RNA, 21 nt, Artificial Sequence
  Synthetic
  misc_feature (8)..(8): n is a, c, g, or u
  misc_feature (21)..(21): n is a, c, g, or u
auuuucanucugauguguucn

SEQ ID NO: 68953 - RNA, 23 nt, Artificial Sequence
  Synthetic
  misc_feature (10)..(10): n is a, c, g, or u
  misc_feature (23)..(23): n is a, c, g, or u
ugauuuucanucugauguguucn

SEQ ID NO: 68954 - RNA, 24 nt, Artificial Sequence
  Synthetic
  misc_feature (11)..(11): n is a, c, g, or u
  misc_feature (24)..(24): n is a, c, g, or u
uugauuuucanucugauguguucn

SEQ ID NO: 68955 - RNA, 18 nt, Artificial Sequence
  Synthetic
ugggauuguggucccaau

SEQ ID NO: 68956 - RNA, 19 nt, Artificial Sequence
  Synthetic
uugggauuguggucccaau

SEQ ID NO: 68957 - RNA, 21 nt, Artificial Sequence
  Synthetic
uguugggauuguggucccaau

SEQ ID NO: 68958 - RNA, 22 nt, Artificial Sequence
  Synthetic
uuguugggauuguggucccaau

SEQ ID NO: 68959 - RNA, 23 nt, Artificial Sequence
  Synthetic
uuuguugggauuguggucccaau

SEQ ID NO: 68960 - RNA, 24 nt, Artificial Sequence
  Synthetic
cuuuguugggauuguggucccaau

SEQ ID NO: 68961 - RNA, 18 nt, Artificial Sequence
  Synthetic
agcagggguccuaggaau

SEQ ID NO: 68962 - RNA, 20 nt, Artificial Sequence
  Synthetic
cgagcagggguccuaggaau

SEQ ID NO: 68963 - RNA, 18 nt, Artificial Sequence
  Synthetic
ugaugaugggaugggaau

SEQ ID NO: 68964 - RNA, 19 nt, Artificial Sequence
  Synthetic
augaugaugggaugggaau

SEQ ID NO: 68965 - RNA, 20 nt, Artificial Sequence
  Synthetic
caugaugaugggaugggaau

SEQ ID NO: 68966 - RNA, 21 nt, Artificial Sequence
  Synthetic
ccaugaugaugggaugggaau

SEQ ID NO: 68967 - RNA, 22 nt, Artificial Sequence
  Synthetic
cccaugaugaugggaugggaau

SEQ ID NO: 68968 - RNA, 24 nt, Artificial Sequence
  Synthetic
agcccaugaugaugggaugggaau

SEQ ID NO: 68969 - RNA, 19 nt, Artificial Sequence
  Synthetic
agcaacaugagggaaacau

SEQ ID NO: 68970 - RNA, 20 nt, Artificial Sequence
  Synthetic
cagcaacaugagggaaacau

SEQ ID NO: 68971 - RNA, 21 nt, Artificial Sequence
  Synthetic
acagcaacaugagggaaacau

SEQ ID NO: 68972 - RNA, 22 nt, Artificial Sequence
  Synthetic
aacagcaacaugagggaaacau

SEQ ID NO: 68973 - RNA, 24 nt, Artificial Sequence
  Synthetic
ugaacagcaacaugagggaaacau

SEQ ID NO: 68974 - RNA, 18 nt, Artificial Sequence
  Synthetic
aauuuuccgaaagcccau

SEQ ID NO: 68975 - RNA, 18 nt, Artificial Sequence
  Synthetic
ccugaacuuuaggcccau

SEQ ID NO: 68976 - RNA, 20 nt, Artificial Sequence
  Synthetic
ugccugaacuuuaggcccau

SEQ ID NO: 68977 - RNA, 21 nt, Artificial Sequence
  Synthetic
uugccugaacuuuaggcccau

SEQ ID NO: 68978 - RNA, 22 nt, Artificial Sequence
  Synthetic
auugccugaacuuuaggcccau

SEQ ID NO: 68979 - RNA, 23 nt, Artificial Sequence
  Synthetic
aauugccugaacuuuaggcccau

SEQ ID NO: 68980 - RNA, 24 nt, Artificial Sequence
  Synthetic
uaauugccugaacuuuaggcccau

SEQ ID NO: 68981 - RNA, 18 nt, Artificial Sequence
  Synthetic
caggagauucuaaggcau

SEQ ID NO: 68982 - RNA, 19 nt, Artificial Sequence
  Synthetic
ucaggagauucuaaggcau

SEQ ID NO: 68983 - RNA, 20 nt, Artificial Sequence
  Synthetic
cucaggagauucuaaggcau

SEQ ID NO: 68984 - RNA, 22 nt, Artificial Sequence
  Synthetic
ugcucaggagauucuaaggcau

SEQ ID NO: 68985 - RNA, 23 nt, Artificial Sequence
  Synthetic
augcucaggagauucuaaggcau

SEQ ID NO: 68986 - RNA, 24 nt, Artificial Sequence
  Synthetic
aaugcucaggagauucuaaggcau

SEQ ID NO: 68987 - RNA, 18 nt, Artificial Sequence
  Synthetic
cauugggaagcuggagau

SEQ ID NO: 68988 - RNA, 19 nt, Artificial Sequence
  Synthetic
acauugggaagcuggagau

SEQ ID NO: 68989 - RNA, 20 nt, Artificial Sequence
  Synthetic
aacauugggaagcuggagau

SEQ ID NO: 68990 - RNA, 21 nt, Artificial Sequence
  Synthetic
uaacauugggaagcuggagau

SEQ ID NO: 68991 - RNA, 22 nt, Artificial Sequence
  Synthetic
cuaacauugggaagcuggagau

SEQ ID NO: 68992 - RNA, 23 nt, Artificial Sequence
  Synthetic
acuaacauugggaagcuggagau

SEQ ID NO: 68993 - RNA, 24 nt, Artificial Sequence
  Synthetic
uacuaacauugggaagcuggagau

SEQ ID NO: 68994 - RNA, 18 nt, Artificial Sequence
  Synthetic
agcccaugaugaugggau

SEQ ID NO: 68995 - RNA, 19 nt, Artificial Sequence
  Synthetic
aagcccaugaugaugggau

SEQ ID NO: 68996 - RNA, 20 nt, Artificial Sequence
  Synthetic
aaagcccaugaugaugggau

SEQ ID NO: 68997 - RNA, 18 nt, Artificial Sequence
  Synthetic
aguggucuuuguugggau

SEQ ID NO: 68998 - RNA, 19 nt, Artificial Sequence
  Synthetic
caguggucuuuguugggau

SEQ ID NO: 68999 - RNA, 20 nt, Artificial Sequence
  Synthetic
ccaguggucuuuguugggau

SEQ ID NO: 69000 - RNA, 21 nt, Artificial Sequence
  Synthetic
uccaguggucuuuguugggau

SEQ ID NO: 69001 - RNA, 23 nt, Artificial Sequence
  Synthetic
  misc_feature (1)..(1): n is a, c, g, or u
nguccaguggucuuuguugggau

SEQ ID NO: 69002 - RNA, 24 nt, Artificial Sequence
  Synthetic
  misc_feature (2)..(2): n is a, c, g, or u
cnguccaguggucuuuguugggau

SEQ ID NO: 69003 - RNA, 18 nt, Artificial Sequence
  Synthetic
uuuuuguuuuguugggau

SEQ ID NO: 69004 - RNA, 19 nt, Artificial Sequence
  Synthetic
cuuuuuguuuuguugggau

SEQ ID NO: 69005 - RNA, 20 nt, Artificial Sequence
  Synthetic
ucuuuuuguuuuguugggau

SEQ ID NO: 69006 - RNA, 21 nt, Artificial Sequence
  Synthetic
aucuuuuuguuuuguugggau

SEQ ID NO: 69007 - RNA, 22 nt, Artificial Sequence
  Synthetic
caucuuuuuguuuuguugggau

SEQ ID NO: 69008 - RNA, 23 nt, Artificial Sequence
  Synthetic
ccaucuuuuuguuuuguugggau

SEQ ID NO: 69009 - RNA, 24 nt, Artificial Sequence
  Synthetic
cccaucuuuuuguuuuguugggau

SEQ ID NO: 69010 - RNA, 18 nt, Artificial Sequence
  Synthetic
ucucaaagguggagugau

SEQ ID NO: 69011 - RNA, 19 nt, Artificial Sequence
  Synthetic
cucucaaagguggagugau

SEQ ID NO: 69012 - RNA, 20 nt, Artificial Sequence
  Synthetic
ucucucaaagguggagugau

SEQ ID NO: 69013 - RNA, 18 nt, Artificial Sequence
  Synthetic
ccgccuuccauaggguau

SEQ ID NO: 69014 - RNA, 19 nt, Artificial Sequence
  Synthetic
cccgccuuccauaggguau

SEQ ID NO: 69015 - RNA, 18 nt, Artificial Sequence
  Synthetic
aaugauuaacuacauuau

SEQ ID NO: 69016 - RNA, 19 nt, Artificial Sequence
  Synthetic
uaaugauuaacuacauuau

SEQ ID NO: 69017 - RNA, 21 nt, Artificial Sequence
  Synthetic
aguaaugauuaacuacauuau

SEQ ID NO: 69018 - RNA, 22 nt, Artificial Sequence
  Synthetic
aaguaaugauuaacuacauuau

SEQ ID NO: 69019 - RNA, 18 nt, Artificial Sequence
  Synthetic
uagcuccaaauucuuuau

SEQ ID NO: 69020 - RNA, 20 nt, Artificial Sequence
  Synthetic
aguagcuccaaauucuuuau

SEQ ID NO: 69021 - RNA, 21 nt, Artificial Sequence
  Synthetic
caguagcuccaaauucuuuau

SEQ ID NO: 69022 - RNA, 22 nt, Artificial Sequence
  Synthetic
acaguagcuccaaauucuuuau

SEQ ID NO: 69023 - RNA, 23 nt, Artificial Sequence
  Synthetic
cacaguagcuccaaauucuuuau

SEQ ID NO: 69024 - RNA, 24 nt, Artificial Sequence
  Synthetic
ccacaguagcuccaaauucuuuau

SEQ ID NO: 69025 - RNA, 18 nt, Artificial Sequence
  Synthetic
  misc_feature (10)..(10): n is a, c, g, or u
ugguaauganccccaacu

SEQ ID NO: 69026 - RNA, 20 nt, Artificial Sequence
  Synthetic
  misc_feature (12)..(12): n is a, c, g, or u
ugugguaauganccccaacu

SEQ ID NO: 69027 - RNA, 21 nt, Artificial Sequence
  Synthetic
  misc_feature (1)..(1): n is a, c, g, or u
  misc_feature (13)..(13): n is a, c, g, or u
nugugguaauganccccaacu

SEQ ID NO: 69028 - RNA, 22 nt, Artificial Sequence
  Synthetic
  misc_feature (2)..(2): n is a, c, g, or u
  misc_feature (14)..(14): n is a, c, g, or u
cnugugguaauganccccaacu

SEQ ID NO: 69029 - RNA, 23 nt, Artificial Sequence
  Synthetic
  misc_feature (3)..(3): n is a, c, g, or u
  misc_feature (15)..(15): n is a, c, g, or u
ucnugugguaauganccccaacu

SEQ ID NO: 69030 - RNA, 24 nt, Artificial Sequence
  Synthetic
  misc_feature (4)..(4): n is a, c, g, or u
  misc_feature (16)..(16): n is a, c, g, or u
uucnugugguaauganccccaacu

SEQ ID NO: 69031 - RNA, 18 nt, Artificial Sequence
  Synthetic
ugaaugcuggauccaacu

SEQ ID NO: 69032 - RNA, 19 nt, Artificial Sequence
  Synthetic
cugaaugcuggauccaacu

SEQ ID NO: 69033 - RNA, 20 nt, Artificial Sequence
  Synthetic
ucugaaugcuggauccaacu

SEQ ID NO: 69034 - RNA, 21 nt, Artificial Sequence
  Synthetic
cucugaaugcuggauccaacu

SEQ ID NO: 69035 - RNA, 23 nt, Artificial Sequence
  Synthetic
ugcucugaaugcuggauccaacu

SEQ ID NO: 69036 - RNA, 24 nt, Artificial Sequence
  Synthetic
uugcucugaaugcuggauccaacu

SEQ ID NO: 69037 - RNA, 18 nt, Artificial Sequence
  Synthetic
cagagguauaaagggacu

SEQ ID NO: 69038 - RNA, 19 nt, Artificial Sequence
  Synthetic
acagagguauaaagggacu

SEQ ID NO: 69039 - RNA, 20 nt, Artificial Sequence
  Synthetic
aacagagguauaaagggacu

SEQ ID NO: 69040 - RNA, 21 nt, Artificial Sequence
  Synthetic
uaacagagguauaaagggacu

SEQ ID NO: 69041 - RNA, 24 nt, Artificial Sequence
  Synthetic
ugguaacagagguauaaagggacu

SEQ ID NO: 69042 - RNA, 19 nt, Artificial Sequence
  Synthetic
  misc_feature (4)..(4): n is a, c, g, or u
  misc_feature (10)..(10): n is a, c, g, or u
uganuggagnuuggggacu

SEQ ID NO: 69043 - RNA, 21 nt, Artificial Sequence
  Synthetic
  misc_feature (6)..(6): n is a, c, g, or u
  misc_feature (12)..(12): n is a, c, g, or u
aguganuggagnuuggggacu

SEQ ID NO: 69044 - RNA, 23 nt, Artificial Sequence
  Synthetic
  misc_feature (8)..(8): n is a, c, g, or u
  misc_feature (14)..(14): n is a, c, g, or u
ugaguganuggagnuuggggacu

SEQ ID NO: 69045 - RNA, 18 nt, Artificial Sequence
  Synthetic
uaggcugccuuccugacu

SEQ ID NO: 69046 - RNA, 23 nt, Artificial Sequence
  Synthetic
ugggguaggcugccuuccugacu

SEQ ID NO: 69047 - RNA, 24 nt, Artificial Sequence
  Synthetic
uugggguaggcugccuuccugacu

SEQ ID NO: 69048 - RNA, 18 nt, Artificial Sequence
  Synthetic
uuuacuguuagaggaccu

SEQ ID NO: 69049 - RNA, 19 nt, Artificial Sequence
  Synthetic
auuuacuguuagaggaccu

SEQ ID NO: 69050 - RNA, 20 nt, Artificial Sequence
  Synthetic
cauuuacuguuagaggaccu

SEQ ID NO: 69051 - RNA, 21 nt, Artificial Sequence
  Synthetic
ucauuuacuguuagaggaccu

SEQ ID NO: 69052 - RNA, 22 nt, Artificial Sequence
  Synthetic
uucauuuacuguuagaggaccu

SEQ ID NO: 69053 - RNA, 23 nt, Artificial Sequence
  Synthetic
uuucauuuacuguuagaggaccu

SEQ ID NO: 69054 - RNA, 24 nt, Artificial Sequence
  Synthetic
uuuucauuuacuguuagaggaccu

SEQ ID NO: 69055 - RNA, 21 nt, Artificial Sequence
  Synthetic
accaauuuaugccuacagccu

SEQ ID NO: 69056 - RNA, 23 nt, Artificial Sequence
  Synthetic
agaccaauuuaugccuacagccu

SEQ ID NO: 69057 - RNA, 24 nt, Artificial Sequence
  Synthetic
cagaccaauuuaugccuacagccu

SEQ ID NO: 69058 - RNA, 18 nt, Artificial Sequence
  Synthetic
agucuuugaaguaugccu

SEQ ID NO: 69059 - RNA, 19 nt, Artificial Sequence
  Synthetic
cagucuuugaaguaugccu

SEQ ID NO: 69060 - RNA, 20 nt, Artificial Sequence
  Synthetic
acagucuuugaaguaugccu

SEQ ID NO: 69061 - RNA, 18 nt, Artificial Sequence
  Synthetic
  misc_feature (12)..(12): n is a, c, g, or u
ucuccucccccnacuccu

SEQ ID NO: 69062 - RNA, 19 nt, Artificial Sequence
  Synthetic
  misc_feature (1)..(1): n is a, c, g, or u
  misc_feature (13)..(13): n is a, c, g, or u
nucuccucccccnacuccu

SEQ ID NO: 69063 - RNA, 20 nt, Artificial Sequence
  Synthetic
  misc_feature (2)..(2): n is a, c, g, or u
  misc_feature (14)..(14): n is a, c, g, or u
anucuccucccccnacuccu

SEQ ID NO: 69064 - RNA, 21 nt, Artificial Sequence
  Synthetic
  misc_feature (3)..(3): n is a, c, g, or u
  misc_feature (15)..(15): n is a, c, g, or u
uanucuccucccccnacuccu

SEQ ID NO: 69065 - RNA, 22 nt, Artificial Sequence
  Synthetic
  misc_feature (4)..(4): n is a, c, g, or u
  misc_feature (16)..(16): n is a, c, g, or u
cuanucuccucccccnacuccu

SEQ ID NO: 69066 - RNA, 23 nt, Artificial Sequence
  Synthetic
  misc_feature (5)..(5): n is a, c, g, or u
  misc_feature (17)..(17): n is a, c, g, or u
ucuanucuccucccccnacuccu

SEQ ID NO: 69067 - RNA, 24 nt, Artificial Sequence
  Synthetic
  misc_feature (6)..(6): n is a, c, g, or u
  misc_feature (18)..(18): n is a, c, g, or u
aucuanucuccucccccnacuccu

SEQ ID NO: 69068 - RNA, 18 nt, Artificial Sequence
  Synthetic
uacuaacauugggaagcu

SEQ ID NO: 69069 - RNA, 19 nt, Artificial Sequence
  Synthetic
auacuaacauugggaagcu

SEQ ID NO: 69070 - RNA, 20 nt, Artificial Sequence
  Synthetic
aauacuaacauugggaagcu

SEQ ID NO: 69071 - RNA, 23 nt, Artificial Sequence
  Synthetic
aggaauacuaacauugggaagcu

SEQ ID NO: 69072 - RNA, 24 nt, Artificial Sequence
  Synthetic
aaggaauacuaacauugggaagcu

SEQ ID NO: 69073 - RNA, 18 nt, Artificial Sequence
  Synthetic
aguaacuccacaguagcu

SEQ ID NO: 69074 - RNA, 20 nt, Artificial Sequence
  Synthetic
agaguaacuccacaguagcu

SEQ ID NO: 69075 - RNA, 20 nt, Artificial Sequence
  Synthetic
aggcaggaggcggaucugcu

SEQ ID NO: 69076 - RNA, 23 nt, Artificial Sequence
  Synthetic
uggaggcaggaggcggaucugcu

SEQ ID NO: 69077 - RNA, 19 nt, Artificial Sequence
  Synthetic
uggauuucugguguuugcu

SEQ ID NO: 69078 - RNA, 20 nt, Artificial Sequence
  Synthetic
cuggauuucugguguuugcu

SEQ ID NO: 69079 - RNA, 21 nt, Artificial Sequence
  Synthetic
ucuggauuucugguguuugcu

SEQ ID NO: 69080 - RNA, 22 nt, Artificial Sequence
  Synthetic
aucuggauuucugguguuugcu

SEQ ID NO: 69081 - RNA, 23 nt, Artificial Sequence
  Synthetic
aaucuggauuucugguguuugcu

SEQ ID NO: 69082 - RNA, 24 nt, Artificial Sequence
  Synthetic
caaucuggauuucugguguuugcu

SEQ ID NO: 69083 - RNA, 18 nt, Artificial Sequence
  Synthetic
  misc_feature (7)..(7): n is a, c, g, or u
acaguanucuccggaagu

SEQ ID NO: 69084 - RNA, 19 nt, Artificial Sequence
  Synthetic
  misc_feature (8)..(8): n is a, c, g, or u
aacaguanucuccggaagu

SEQ ID NO: 69085 - RNA, 20 nt, Artificial Sequence
  Synthetic
  misc_feature (9)..(9): n is a, c, g, or u
caacaguanucuccggaagu

SEQ ID NO: 69086 - RNA, 21 nt, Artificial Sequence
  Synthetic
  misc_feature (10)..(10): n is a, c, g, or u
acaacaguanucuccggaagu

SEQ ID NO: 69087 - RNA, 22 nt, Artificial Sequence
  Synthetic
  misc_feature (11)..(11): n is a, c, g, or u
aacaacaguanucuccggaagu

SEQ ID NO: 69088 - RNA, 23 nt, Artificial Sequence
  Synthetic
  misc_feature (12)..(12): n is a, c, g, or u
uaacaacaguanucuccggaagu

SEQ ID NO: 69089 - RNA, 24 nt, Artificial Sequence
  Synthetic
  misc_feature (13)..(13): n is a, c, g, or u
cuaacaacaguanucuccggaagu

SEQ ID NO: 69090 - RNA, 18 nt, Artificial Sequence
  Synthetic
agugucugguuuggaagu

SEQ ID NO: 69091 - RNA, 19 nt, Artificial Sequence
  Synthetic
uagugucugguuuggaagu

SEQ ID NO: 69092 - RNA, 20 nt, Artificial Sequence
  Synthetic
auagugucugguuuggaagu

SEQ ID NO: 69093 - RNA, 19 nt, Artificial Sequence
  Synthetic
uggccaagccccagccagu

SEQ ID NO: 69094 - RNA, 20 nt, Artificial Sequence
  Synthetic
auggccaagccccagccagu

SEQ ID NO: 69095 - RNA, 21 nt, Artificial Sequence
  Synthetic
uauggccaagccccagccagu

SEQ ID NO: 69096 - RNA, 22 nt, Artificial Sequence
  Synthetic
cuauggccaagccccagccagu

SEQ ID NO: 69097 - RNA, 23 nt, Artificial Sequence
  Synthetic
ccuauggccaagccccagccagu

SEQ ID NO: 69098 - RNA, 18 nt, Artificial Sequence
  Synthetic
aagauggaguuuuccagu

SEQ ID NO: 69099 - RNA, 19 nt, Artificial Sequence
  Synthetic
aaagauggaguuuuccagu

SEQ ID NO: 69100 - RNA, 20 nt, Artificial Sequence
  Synthetic
aaaagauggaguuuuccagu

SEQ ID NO: 69101 - RNA, 23 nt, Artificial Sequence
  Synthetic
aggaaaagauggaguuuuccagu

SEQ ID NO: 69102 - RNA, 24 nt, Artificial Sequence
  Synthetic
caggaaaagauggaguuuuccagu

SEQ ID NO: 69103 - RNA, 19 nt, Artificial Sequence
  Synthetic
cggcuaggaguuccgcagu

SEQ ID NO: 69104 - RNA, 18 nt, Artificial Sequence
  Synthetic
ucuauaagcuggaggagu

SEQ ID NO: 69105 - RNA, 20 nt, Artificial Sequence
  Synthetic
aggugaaaaaguugcauggu

SEQ ID NO: 69106 - RNA, 18 nt, Artificial Sequence
  Synthetic
uguuaauaauguccuggu

SEQ ID NO: 69107 - RNA, 19 nt, Artificial Sequence
  Synthetic
uuguuaauaauguccuggu

SEQ ID NO: 69108 - RNA, 20 nt, Artificial Sequence
  Synthetic
uuuguuaauaauguccuggu

SEQ ID NO: 69109 - RNA, 21 nt, Artificial Sequence
  Synthetic
auuuguuaauaauguccuggu

SEQ ID NO: 69110 - RNA, 22 nt, Artificial Sequence
  Synthetic
cauuuguuaauaauguccuggu

SEQ ID NO: 69111 - RNA, 23 nt, Artificial Sequence
  Synthetic
acauuuguuaauaauguccuggu

SEQ ID NO: 69112 - RNA, 24 nt, Artificial Sequence
  Synthetic
cacauuuguuaauaauguccuggu

SEQ ID NO: 69113 - RNA, 18 nt, Artificial Sequence
  Synthetic
cuuuguugggauuguggu

SEQ ID NO: 69114 - RNA, 19 nt, Artificial Sequence
  Synthetic
ucuuuguugggauuguggu

SEQ ID NO: 69115 - RNA, 22 nt, Artificial Sequence
  Synthetic
uggucuuuguugggauuguggu

SEQ ID NO: 69116 - RNA, 24 nt, Artificial Sequence
  Synthetic
aguggucuuuguugggauuguggu

SEQ ID NO: 69117 - RNA, 18 nt, Artificial Sequence
  Synthetic
  misc_feature (16)..(16): n is a, c, g, or u
aacgacagaauuaucngu

SEQ ID NO: 69118 - RNA, 20 nt, Artificial Sequence
  Synthetic
  misc_feature (18)..(18): n is a, c, g, or u
agaacgacagaauuaucngu

SEQ ID NO: 69119 - RNA, 22 nt, Artificial Sequence
  Synthetic
  misc_feature (20)..(20): n is a, c, g, or u
agagaacgacagaauuaucngu

SEQ ID NO: 69120 - RNA, 18 nt, Artificial Sequence
  Synthetic
  misc_feature (7)..(7): n is a, c, g, or u
  misc_feature (16)..(16): n is a, c, g, or u
uaggggnaaauauuungu

SEQ ID NO: 69121 - RNA, 19 nt, Artificial Sequence
  Synthetic
  misc_feature (8)..(8): n is a, c, g, or u
  misc_feature (17)..(17): n is a, c, g, or u
cuaggggnaaauauuungu

SEQ ID NO: 69122 - RNA, 20 nt, Artificial Sequence
  Synthetic
  misc_feature (9)..(9): n is a, c, g, or u
  misc_feature (18)..(18): n is a, c, g, or u
ucuaggggnaaauauuungu

SEQ ID NO: 69123 - RNA, 21 nt, Artificial Sequence
  Synthetic
  misc_feature (10)..(10): n is a, c, g, or u
  misc_feature (19)..(19): n is a, c, g, or u
cucuaggggnaaauauuungu

SEQ ID NO: 69124 - RNA, 22 nt, Artificial Sequence
  Synthetic
  misc_feature (11)..(11): n is a, c, g, or u
  misc_feature (20)..(20): n is a, c, g, or u
ucucuaggggnaaauauuungu

SEQ ID NO: 69125 - RNA, 23 nt, Artificial Sequence
  Synthetic
  misc_feature (12)..(12): n is a, c, g, or u
  misc_feature (21)..(21): n is a, c, g, or u
uucucuaggggnaaauauuungu

SEQ ID NO: 69126 - RNA, 24 nt, Artificial Sequence
  Synthetic
  misc_feature (13)..(13): n is a, c, g, or u
  misc_feature (22)..(22): n is a, c, g, or u
uuucucuaggggnaaauauuungu

SEQ ID NO: 69127 - RNA, 18 nt, Artificial Sequence
  Synthetic
cacauuuguuaauaaugu

SEQ ID NO: 69128 - RNA, 19 nt, Artificial Sequence
  Synthetic
ucacauuuguuaauaaugu

SEQ ID NO: 69129 - RNA, 20 nt, Artificial Sequence
  Synthetic
uucacauuuguuaauaaugu

SEQ ID NO: 69130 - RNA, 22 nt, Artificial Sequence
  Synthetic
uguucacauuuguuaauaaugu

SEQ ID NO: 69131 - RNA, 23 nt, Artificial Sequence
  Synthetic
uuguucacauuuguuaauaaugu

SEQ ID NO: 69132 - RNA, 24 nt, Artificial Sequence
  Synthetic
auuguucacauuuguuaauaaugu

SEQ ID NO: 69133 - RNA, 18 nt, Artificial Sequence
  Synthetic
  misc_feature (2)..(2): n is a, c, g, or u
  misc_feature (15)..(15): n is a, c, g, or u
anucugauguguucnugu

SEQ ID NO: 69134 - RNA, 19 nt, Artificial Sequence
  Synthetic
  misc_feature (3)..(3): n is a, c, g, or u
  misc_feature (16)..(16): n is a, c, g, or u
canucugauguguucnugu

SEQ ID NO: 69135 - RNA, 20 nt, Artificial Sequence
  Synthetic
  misc_feature (4)..(4): n is a, c, g, or u
  misc_feature (17)..(17): n is a, c, g, or u
ucanucugauguguucnugu

SEQ ID NO: 69136 - RNA, 21 nt, Artificial Sequence
  Synthetic
  misc_feature (5)..(5): n is a, c, g, or u
  misc_feature (18)..(18): n is a, c, g, or u
uucanucugauguguucnugu

SEQ ID NO: 69137 - RNA, 22 nt, Artificial Sequence
  Synthetic
  misc_feature (6)..(6): n is a, c, g, or u
  misc_feature (19)..(19): n is a, c, g, or u
uuucanucugauguguucnugu

SEQ ID NO: 69138 - RNA, 23 nt, Artificial Sequence
  Synthetic
  misc_feature (7)..(7): n is a, c, g, or u
  misc_feature (20)..(20): n is a, c, g, or u
uuuucanucugauguguucnugu

SEQ ID NO: 69139 - RNA, 24 nt, Artificial Sequence
  Synthetic
  misc_feature (8)..(8): n is a, c, g, or u
  misc_feature (21)..(21): n is a, c, g, or u
auuuucanucugauguguucnugu

SEQ ID NO: 69140 - RNA, 18 nt, Artificial Sequence
  Synthetic
uagacucugcgguauugu

SEQ ID NO: 69141 - RNA, 19 nt, Artificial Sequence
  Synthetic
cuagacucugcgguauugu

SEQ ID NO: 69142 - RNA, 20 nt, Artificial Sequence
  Synthetic
ucuagacucugcgguauugu

SEQ ID NO: 69143 - RNA, 18 nt, Artificial Sequence
  Synthetic
  misc_feature (2)..(2): n is a, c, g, or u
cnguccaguggucuuugu

SEQ ID NO: 69144 - RNA, 19 nt, Artificial Sequence
  Synthetic
  misc_feature (3)..(3): n is a, c, g, or u
ucnguccaguggucuuugu

SEQ ID NO: 69145 - RNA, 20 nt, Artificial Sequence
  Synthetic
  misc_feature (4)..(4): n is a, c, g, or u
uucnguccaguggucuuugu

SEQ ID NO: 69146 - RNA, 21 nt, Artificial Sequence
  Synthetic
  misc_feature (5)..(5): n is a, c, g, or u
cuucnguccaguggucuuugu

SEQ ID NO: 69147 - RNA, 24 nt, Artificial Sequence
  Synthetic
  misc_feature (8)..(8): n is a, c, g, or u
uggcuucnguccaguggucuuugu

SEQ ID NO: 69148 - RNA, 18 nt, Artificial Sequence
  Synthetic
cccaucuuuuuguuuugu

SEQ ID NO: 69149 - RNA, 19 nt, Artificial Sequence
  Synthetic
ccccaucuuuuuguuuugu

SEQ ID NO: 69150 - RNA, 20 nt, Artificial Sequence
  Synthetic
uccccaucuuuuuguuuugu

SEQ ID NO: 69151 - RNA, 21 nt, Artificial Sequence
  Synthetic
auccccaucuuuuuguuuugu

SEQ ID NO: 69152 - RNA, 22 nt, Artificial Sequence
  Synthetic
uauccccaucuuuuuguuuugu

SEQ ID NO: 69153 - RNA, 23 nt, Artificial Sequence
  Synthetic
auauccccaucuuuuuguuuugu

SEQ ID NO: 69154 - RNA, 24 nt, Artificial Sequence
  Synthetic
aauauccccaucuuuuuguuuugu

SEQ ID NO: 69155 - RNA, 18 nt, Artificial Sequence
  Synthetic
aaaaaaucccagaggauu

SEQ ID NO: 69156 - RNA, 22 nt, Artificial Sequence
  Synthetic
cgggaaaaaaucccagaggauu

SEQ ID NO: 69157 - RNA, 23 nt, Artificial Sequence
  Synthetic
ucgggaaaaaaucccagaggauu

SEQ ID NO: 69158 - RNA, 19 nt, Artificial Sequence
  Synthetic
uguggucccaaucuggauu

SEQ ID NO: 69159 - RNA, 20 nt, Artificial Sequence
  Synthetic
uuguggucccaaucuggauu

SEQ ID NO: 69160 - RNA, 18 nt, Artificial Sequence
  Synthetic
  misc_feature (7)..(7): n is a, c, g, or u
caauucnuugacauacuu

SEQ ID NO: 69161 - RNA, 19 nt, Artificial Sequence
  Synthetic
  misc_feature (8)..(8): n is a, c, g, or u
acaauucnuugacauacuu

SEQ ID NO: 69162 - RNA, 20 nt, Artificial Sequence
  Synthetic
  misc_feature (9)..(9): n is a, c, g, or u
cacaauucnuugacauacuu

SEQ ID NO: 69163 - RNA, 18 nt, Artificial Sequence
  Synthetic
cguaaaauuucccaccuu

SEQ ID NO: 69164 - RNA, 19 nt, Artificial Sequence
  Synthetic
ccguaaaauuucccaccuu

SEQ ID NO: 69165 - RNA, 20 nt, Artificial Sequence
  Synthetic
cccguaaaauuucccaccuu

SEQ ID NO: 69166 - RNA, 23 nt, Artificial Sequence
  Synthetic
aggacaaacgggcaacauaccuu

SEQ ID NO: 69167 - RNA, 18 nt, Artificial Sequence
  Synthetic
uuuacacagaaaggccuu

SEQ ID NO: 69168 - RNA, 20 nt, Artificial Sequence
  Synthetic
uguuuacacagaaaggccuu

SEQ ID NO: 69169 - RNA, 21 nt, Artificial Sequence
  Synthetic
uuguuuacacagaaaggccuu

SEQ ID NO: 69170 - RNA, 22 nt, Artificial Sequence
  Synthetic
auuguuuacacagaaaggccuu

SEQ ID NO: 69171 - RNA, 23 nt, Artificial Sequence
  Synthetic
uauuguuuacacagaaaggccuu

SEQ ID NO: 69172 - RNA, 24 nt, Artificial Sequence
  Synthetic
  misc_feature (1)..(1): n is a, c, g, or u
nuauuguuuacacagaaaggccuu

SEQ ID NO: 69173 - RNA, 18 nt, Artificial Sequence
  Synthetic
cccuggaugcuggaucuu

SEQ ID NO: 69174 - RNA, 19 nt, Artificial Sequence
  Synthetic
ucccuggaugcuggaucuu

SEQ ID NO: 69175 - RNA, 18 nt, Artificial Sequence
  Synthetic
cuuuaaacaaacagucuu

SEQ ID NO: 69176 - RNA, 19 nt, Artificial Sequence
  Synthetic
ucuuuaaacaaacagucuu

SEQ ID NO: 69177 - RNA, 21 nt, Artificial Sequence
  Synthetic
agucuuuaaacaaacagucuu

SEQ ID NO: 69178 - RNA, 22 nt, Artificial Sequence
  Synthetic
cagucuuuaaacaaacagucuu

SEQ ID NO: 69179 - RNA, 23 nt, Artificial Sequence
  Synthetic
ccagucuuuaaacaaacagucuu

SEQ ID NO: 69180 - RNA, 24 nt, Artificial Sequence
  Synthetic
cccagucuuuaaacaaacagucuu

SEQ ID NO: 69181 - RNA, 18 nt, Artificial Sequence
  Synthetic
caagauuuggugggcguu

SEQ ID NO: 69182 - RNA, 18 nt, Artificial Sequence
  Synthetic
aaauuguucacauuuguu

SEQ ID NO: 69183 - RNA, 19 nt, Artificial Sequence
  Synthetic
caaauuguucacauuuguu

SEQ ID NO: 69184 - RNA, 20 nt, Artificial Sequence
  Synthetic
acaaauuguucacauuuguu

SEQ ID NO: 69185 - RNA, 21 nt, Artificial Sequence
  Synthetic
uacaaauuguucacauuuguu

SEQ ID NO: 69186 - RNA, 22 nt, Artificial Sequence
  Synthetic
cuacaaauuguucacauuuguu

SEQ ID NO: 69187 - RNA, 23 nt, Artificial Sequence
  Synthetic
ccuacaaauuguucacauuuguu

SEQ ID NO: 69188 - RNA, 24 nt, Artificial Sequence
  Synthetic
accuacaaauuguucacauuuguu

SEQ ID NO: 69189 - RNA, 18 nt, Artificial Sequence
  Synthetic
uacaaauuguucacauuu

SEQ ID NO: 69190 - RNA, 19 nt, Artificial Sequence
  Synthetic
cuacaaauuguucacauuu

SEQ ID NO: 69191 - RNA, 20 nt, Artificial Sequence
  Synthetic
ccuacaaauuguucacauuu

SEQ ID NO: 69192 - RNA, 21 nt, Artificial Sequence
  Synthetic
accuacaaauuguucacauuu

SEQ ID NO: 69193 - RNA, 24 nt, Artificial Sequence
  Synthetic
aggaccuacaaauuguucacauuu

SEQ ID NO: 69194 - RNA, 19 nt, Artificial Sequence
  Synthetic
ugauaagauaggggcauuu

SEQ ID NO: 69195 - RNA, 20 nt, Artificial Sequence
  Synthetic
uugauaagauaggggcauuu

SEQ ID NO: 69196 - RNA, 18 nt, Artificial Sequence
  Synthetic
caggaaaagauggaguuu

SEQ ID NO: 69197 - RNA, 19 nt, Artificial Sequence
  Synthetic
ucaggaaaagauggaguuu

SEQ ID NO: 69198 - RNA, 20 nt, Artificial Sequence
  Synthetic
aucaggaaaagauggaguuu

SEQ ID NO: 69199 - RNA, 21 nt, Artificial Sequence
  Synthetic
uaucaggaaaagauggaguuu

SEQ ID NO: 69200 - RNA, 22 nt, Artificial Sequence
  Synthetic
auaucaggaaaagauggaguuu

SEQ ID NO: 69201 - RNA, 23 nt, Artificial Sequence
  Synthetic
aauaucaggaaaagauggaguuu

SEQ ID NO: 69202 - RNA, 19 nt, Artificial Sequence
  Synthetic
uguaaauagugucugguuu

SEQ ID NO: 69203 - RNA, 20 nt, Artificial Sequence
  Synthetic
auguaaauagugucugguuu

SEQ ID NO: 69204 - RNA, 18 nt, Artificial Sequence
  Synthetic
ugaaaaacgaagauuaaa

SEQ ID NO: 69205 - RNA, 19 nt, Artificial Sequence
  Synthetic
augaaaaacgaagauuaaa

SEQ ID NO: 69206 - RNA, 20 nt, Artificial Sequence
  Synthetic
aaugaaaaacgaagauuaaa

SEQ ID NO: 69207 - RNA, 21 nt, Artificial Sequence
  Synthetic
aaaugaaaaacgaagauuaaa

SEQ ID NO: 69208 - RNA, 22 nt, Artificial Sequence
  Synthetic
uaaaugaaaaacgaagauuaaa

SEQ ID NO: 69209 - RNA, 24 nt, Artificial Sequence
  Synthetic
aguaaaugaaaaacgaagauuaaa

SEQ ID NO: 69210 - RNA, 18 nt, Artificial Sequence
  Synthetic
uaaaucccaacaaaacaa

SEQ ID NO: 69211 - RNA, 19 nt, Artificial Sequence
  Synthetic
uuaaaucccaacaaaacaa

SEQ ID NO: 69212 - RNA, 20 nt, Artificial Sequence
  Synthetic
uuuaaaucccaacaaaacaa

SEQ ID NO: 69213 - RNA, 21 nt, Artificial Sequence
  Synthetic
auuuaaaucccaacaaaacaa

SEQ ID NO: 69214 - RNA, 22 nt, Artificial Sequence
  Synthetic
cauuuaaaucccaacaaaacaa

SEQ ID NO: 69215 - RNA, 23 nt, Artificial Sequence
  Synthetic
acauuuaaaucccaacaaaacaa

SEQ ID NO: 69216 - RNA, 24 nt, Artificial Sequence
  Synthetic
uacauuuaaaucccaacaaaacaa

SEQ ID NO: 69217 - RNA, 18 nt, Artificial Sequence
  Synthetic
  misc_feature (10)..(10): n is a, c, g, or u
ccacuggacngaagccaa

SEQ ID NO: 69218 - RNA, 19 nt, Artificial Sequence
  Synthetic
  misc_feature (11)..(11): n is a, c, g, or u
accacuggacngaagccaa

SEQ ID NO: 69219 - RNA, 21 nt, Artificial Sequence
  Synthetic
  misc_feature (13)..(13): n is a, c, g, or u
agaccacuggacngaagccaa

SEQ ID NO: 69220 - RNA, 22 nt, Artificial Sequence
  Synthetic
  misc_feature (14)..(14): n is a, c, g, or u
aagaccacuggacngaagccaa

SEQ ID NO: 69221 - RNA, 23 nt, Artificial Sequence
  Synthetic
  misc_feature (15)..(15): n is a, c, g, or u
aaagaccacuggacngaagccaa

SEQ ID NO: 69222 - RNA, 24 nt, Artificial Sequence
  Synthetic
  misc_feature (16)..(16): n is a, c, g, or u
caaagaccacuggacngaagccaa

SEQ ID NO: 69223 - RNA, 19 nt, Artificial Sequence
  Synthetic
ugcuaggcugugcugccaa

SEQ ID NO: 69224 - RNA, 20 nt, Artificial Sequence
  Synthetic
cugcuaggcugugcugccaa

SEQ ID NO: 69225 - RNA, 18 nt, Artificial Sequence
  Synthetic
aggaggcuguaggcauaa

SEQ ID NO: 69226 - RNA, 19 nt, Artificial Sequence
  Synthetic
uaggaggcuguaggcauaa

SEQ ID NO: 69227 - RNA, 20 nt, Artificial Sequence
  Synthetic
cuaggaggcuguaggcauaa

SEQ ID NO: 69228 - RNA, 18 nt, Artificial Sequence
  Synthetic
accuuauuauccagauaa

SEQ ID NO: 69229 - RNA, 19 nt, Artificial Sequence
  Synthetic
aaccuuauuauccagauaa

SEQ ID NO: 69230 - RNA, 20 nt, Artificial Sequence
  Synthetic
aaaccuuauuauccagauaa

SEQ ID NO: 69231 - RNA, 21 nt, Artificial Sequence
  Synthetic
aaaaccuuauuauccagauaa

SEQ ID NO: 69232 - RNA, 22 nt, Artificial Sequence
  Synthetic
uaaaaccuuauuauccagauaa

SEQ ID NO: 69233 - RNA, 23 nt, Artificial Sequence
  Synthetic
auaaaaccuuauuauccagauaa

SEQ ID NO: 69234 - RNA, 24 nt, Artificial Sequence
  Synthetic
uauaaaaccuuauuauccagauaa

SEQ ID NO: 69235 - RNA, 18 nt, Artificial Sequence
  Synthetic
uuuguagguccucuaaca

SEQ ID NO: 69236 - RNA, 19 nt, Artificial Sequence
  Synthetic
auuuguagguccucuaaca

SEQ ID NO: 69237 - RNA, 20 nt, Artificial Sequence
  Synthetic
aauuuguagguccucuaaca

SEQ ID NO: 69238 - RNA, 18 nt, Artificial Sequence
  Synthetic
ccuccagcuuauagacca

SEQ ID NO: 69239 - RNA, 19 nt, Artificial Sequence
  Synthetic
uccuccagcuuauagacca

SEQ ID NO: 69240 - RNA, 20 nt, Artificial Sequence
  Synthetic
cuccuccagcuuauagacca

SEQ ID NO: 69241 - RNA, 18 nt, Artificial Sequence
  Synthetic
acacucauccucaggcca

SEQ ID NO: 69242 - RNA, 20 nt, Artificial Sequence
  Synthetic
agacacucauccucaggcca

SEQ ID NO: 69243 - RNA, 18 nt, Artificial Sequence
  Synthetic
augcuaaaaacauugcca

SEQ ID NO: 69244 - RNA, 19 nt, Artificial Sequence
  Synthetic
caugcuaaaaacauugcca

SEQ ID NO: 69245 - RNA, 22 nt, Artificial Sequence
  Synthetic
aggcaugcuaaaaacauugcca

SEQ ID NO: 69246 - RNA, 23 nt, Artificial Sequence
  Synthetic
aaggcaugcuaaaaacauugcca

SEQ ID NO: 69247 - RNA, 24 nt, Artificial Sequence
  Synthetic
caaggcaugcuaaaaacauugcca

SEQ ID NO: 69248 - RNA, 18 nt, Artificial Sequence
  Synthetic
auaaaaccuuauuaucca

SEQ ID NO: 69249 - RNA, 19 nt, Artificial Sequence
  Synthetic
uauaaaaccuuauuaucca

SEQ ID NO: 69250 - RNA, 22 nt, Artificial Sequence
  Synthetic
agguauaaaaccuuauuaucca

SEQ ID NO: 69251 - RNA, 23 nt, Artificial Sequence
  Synthetic
aagguauaaaaccuuauuaucca

SEQ ID NO: 69252 - RNA, 24 nt, Artificial Sequence
  Synthetic
aaagguauaaaaccuuauuaucca

SEQ ID NO: 69253 - RNA, 18 nt, Artificial Sequence
  Synthetic
uaguauuccuuggacuca

SEQ ID NO: 69254 - RNA, 19 nt, Artificial Sequence
  Synthetic
uuaguauuccuuggacuca

SEQ ID NO: 69255 - RNA, 18 nt, Artificial Sequence
  Synthetic
ugauuggaaaguauguca

SEQ ID NO: 69256 - RNA, 19 nt, Artificial Sequence
  Synthetic
uugauuggaaaguauguca

SEQ ID NO: 69257 - RNA, 20 nt, Artificial Sequence
  Synthetic
auugauuggaaaguauguca

SEQ ID NO: 69258 - RNA, 21 nt, Artificial Sequence
  Synthetic
uauugauuggaaaguauguca

SEQ ID NO: 69259 - RNA, 22 nt, Artificial Sequence
  Synthetic
cuauugauuggaaaguauguca

SEQ ID NO: 69260 - RNA, 23 nt, Artificial Sequence
  Synthetic
ccuauugauuggaaaguauguca

SEQ ID NO: 69261 - RNA, 18 nt, Artificial Sequence
  Synthetic
auaugggccuaaaguuca

SEQ ID NO: 69262 - RNA, 19 nt, Artificial Sequence
  Synthetic
aauaugggccuaaaguuca

SEQ ID NO: 69263 - RNA, 20 nt, Artificial Sequence
  Synthetic
uaauaugggccuaaaguuca

SEQ ID NO: 69264 - RNA, 18 nt, Artificial Sequence
  Synthetic
  misc_feature (7)..(7): n is a, c, g, or u
aggagungggggaggaga

SEQ ID NO: 69265 - RNA, 22 nt, Artificial Sequence
  Synthetic
  misc_feature (11)..(11): n is a, c, g, or u
ugggaggagungggggaggaga

SEQ ID NO: 69266 - RNA, 23 nt, Artificial Sequence
  Synthetic
  misc_feature (12)..(12): n is a, c, g, or u
cugggaggagungggggaggaga

SEQ ID NO: 69267 - RNA, 24 nt, Artificial Sequence
  Synthetic
  misc_feature (13)..(13): n is a, c, g, or u
acugggaggagungggggaggaga

SEQ ID NO: 69268 - RNA, 18 nt, Artificial Sequence
  Synthetic
agauccagcauccaggga

SEQ ID NO: 69269 - RNA, 19 nt, Artificial Sequence
  Synthetic
aagauccagcauccaggga

SEQ ID NO: 69270 - RNA, 18 nt, Artificial Sequence
  Synthetic
cauucuuugcugggggga

SEQ ID NO: 69271 - RNA, 19 nt, Artificial Sequence
  Synthetic
ccauucuuugcugggggga

SEQ ID NO: 69272 - RNA, 18 nt, Artificial Sequence
  Synthetic
uuucaguuauauggauga

SEQ ID NO: 69273 - RNA, 19 nt, Artificial Sequence
  Synthetic
cuuucaguuauauggauga

SEQ ID NO: 69274 - RNA, 22 nt, Artificial Sequence
  Synthetic
uggcuuucaguuauauggauga

SEQ ID NO: 69275 - RNA, 23 nt, Artificial Sequence
  Synthetic
cuggcuuucaguuauauggauga

SEQ ID NO: 69276 - RNA, 24 nt, Artificial Sequence
  Synthetic
ucuggcuuucaguuauauggauga

SEQ ID NO: 69277 - RNA, 18 nt, Artificial Sequence
  Synthetic
uggacauugacccuuaua

SEQ ID NO: 69278 - RNA, 19 nt, Artificial Sequence
  Synthetic
auggacauugacccuuaua

SEQ ID NO: 69279 - RNA, 20 nt, Artificial Sequence
  Synthetic
cauggacauugacccuuaua

SEQ ID NO: 69280 - RNA, 21 nt, Artificial Sequence
  Synthetic
  misc_feature (1)..(1): n is a, c, g, or u
ncauggacauugacccuuaua

SEQ ID NO: 69281 - RNA, 24 nt, Artificial Sequence
  Synthetic
  misc_feature (1)..(1): n is a, c, g, or u
  misc_feature (4)..(4): n is a, c, g, or u
nggncauggacauugacccuuaua

SEQ ID NO: 69282 - RNA, 19 nt, Artificial Sequence
  Synthetic
agauuuuuucccaucucua

SEQ ID NO: 69283 - RNA, 20 nt, Artificial Sequence
  Synthetic
uagauuuuuucccaucucua

SEQ ID NO: 69284 - RNA, 21 nt, Artificial Sequence
  Synthetic
cuagauuuuuucccaucucua

SEQ ID NO: 69285 - RNA, 23 nt, Artificial Sequence
  Synthetic
ugcuagauuuuuucccaucucua

SEQ ID NO: 69286 - RNA, 24 nt, Artificial Sequence
  Synthetic
cugcuagauuuuuucccaucucua

SEQ ID NO: 69287 - RNA, 19 nt, Artificial Sequence
  Synthetic
ugacuucuuuccuucagua

SEQ ID NO: 69288 - RNA, 20 nt, Artificial Sequence
  Synthetic
cugacuucuuuccuucagua

SEQ ID NO: 69289 - RNA, 21 nt, Artificial Sequence
  Synthetic
ucugacuucuuuccuucagua

SEQ ID NO: 69290 - RNA, 22 nt, Artificial Sequence
  Synthetic
uucugacuucuuuccuucagua

SEQ ID NO: 69291 - RNA, 23 nt, Artificial Sequence
  Synthetic
cuucugacuucuuuccuucagua

SEQ ID NO: 69292 - RNA, 24 nt, Artificial Sequence
  Synthetic
ccuucugacuucuuuccuucagua

SEQ ID NO: 69293 - RNA, 18 nt, Artificial Sequence
  Synthetic
  misc_feature (11)..(11): n is a, c, g, or u
agaaaccgucnuagagua

SEQ ID NO: 69294 - RNA, 20 nt, Artificial Sequence
  Synthetic
  misc_feature (13)..(13): n is a, c, g, or u
agagaaaccgucnuagagua

SEQ ID NO: 69295 - RNA, 21 nt, Artificial Sequence
  Synthetic
  misc_feature (14)..(14): n is a, c, g, or u
aagagaaaccgucnuagagua

SEQ ID NO: 69296 - RNA, 24 nt, Artificial Sequence
  Synthetic
  misc_feature (17)..(17): n is a, c, g, or u
uggaagagaaaccgucnuagagua

SEQ ID NO: 69297 - RNA, 19 nt, Artificial Sequence
  Synthetic
agcauccagggaccuagua

SEQ ID NO: 69298 - RNA, 20 nt, Artificial Sequence
  Synthetic
cagcauccagggaccuagua

SEQ ID NO: 69299 - RNA, 18 nt, Artificial Sequence
  Synthetic
uauuauccagauaaugua

SEQ ID NO: 69300 - RNA, 19 nt, Artificial Sequence
  Synthetic
uuauuauccagauaaugua

SEQ ID NO: 69301 - RNA, 20 nt, Artificial Sequence
  Synthetic
cuuauuauccagauaaugua

SEQ ID NO: 69302 - RNA, 21 nt, Artificial Sequence
  Synthetic
ccuuauuauccagauaaugua

SEQ ID NO: 69303 - RNA, 22 nt, Artificial Sequence
  Synthetic
accuuauuauccagauaaugua

SEQ ID NO: 69304 - RNA, 23 nt, Artificial Sequence
  Synthetic
aaccuuauuauccagauaaugua

SEQ ID NO: 69305 - RNA, 24 nt, Artificial Sequence
  Synthetic
aaaccuuauuauccagauaaugua

SEQ ID NO: 69306 - RNA, 18 nt, Artificial Sequence
  Synthetic
ugccucuguaugcgugua

SEQ ID NO: 69307 - RNA, 19 nt, Artificial Sequence
  Synthetic
augccucuguaugcgugua

SEQ ID NO: 69308 - RNA, 20 nt, Artificial Sequence
  Synthetic
aaugccucuguaugcgugua

SEQ ID NO: 69309 - RNA, 18 nt, Artificial Sequence
  Synthetic
acaaggccuuucugugua

SEQ ID NO: 69310 - RNA, 19 nt, Artificial Sequence
  Synthetic
uacaaggccuuucugugua

SEQ ID NO: 69311 - RNA, 20 nt, Artificial Sequence
  Synthetic
uuacaaggccuuucugugua

SEQ ID NO: 69312 - RNA, 21 nt, Artificial Sequence
  Synthetic
cuuacaaggccuuucugugua

SEQ ID NO: 69313 - RNA, 22 nt, Artificial Sequence
  Synthetic
acuuacaaggccuuucugugua

SEQ ID NO: 69314 - RNA, 23 nt, Artificial Sequence
  Synthetic
aacuuacaaggccuuucugugua

SEQ ID NO: 69315 - RNA, 24 nt, Artificial Sequence
  Synthetic
caacuuacaaggccuuucugugua

SEQ ID NO: 69316 - RNA, 18 nt, Artificial Sequence
  Synthetic
ugcaccaggacauuauua

SEQ ID NO: 69317 - RNA, 19 nt, Artificial Sequence
  Synthetic
uugcaccaggacauuauua

SEQ ID NO: 69318 - RNA, 20 nt, Artificial Sequence
  Synthetic
uuugcaccaggacauuauua

SEQ ID NO: 69319 - RNA, 21 nt, Artificial Sequence
  Synthetic
auuugcaccaggacauuauua

SEQ ID NO: 69320 - RNA, 22 nt, Artificial Sequence
  Synthetic
cauuugcaccaggacauuauua

SEQ ID NO: 69321 - RNA, 23 nt, Artificial Sequence
  Synthetic
ucauuugcaccaggacauuauua

SEQ ID NO: 69322 - RNA, 24 nt, Artificial Sequence
  Synthetic
uucauuugcaccaggacauuauua

SEQ ID NO: 69323 - RNA, 18 nt, Artificial Sequence
  Synthetic
  misc_feature (5)..(5): n is a, c, g, or u
ccuanauuucauggguua

SEQ ID NO: 69324 - RNA, 19 nt, Artificial Sequence
  Synthetic
  misc_feature (6)..(6): n is a, c, g, or u
cccuanauuucauggguua

SEQ ID NO: 69325 - RNA, 20 nt, Artificial Sequence
  Synthetic
  misc_feature (7)..(7): n is a, c, g, or u
ucccuanauuucauggguua

SEQ ID NO: 69326 - RNA, 21 nt, Artificial Sequence
  Synthetic
  misc_feature (8)..(8): n is a, c, g, or u
uucccuanauuucauggguua

SEQ ID NO: 69327 - RNA, 22 nt, Artificial Sequence
  Synthetic
  misc_feature (9)..(9): n is a, c, g, or u
auucccuanauuucauggguua

SEQ ID NO: 69328 - RNA, 23 nt, Artificial Sequence
  Synthetic
  misc_feature (10)..(10): n is a, c, g, or u
uauucccuanauuucauggguua

SEQ ID NO: 69329 - RNA, 24 nt, Artificial Sequence
  Synthetic
  misc_feature (11)..(11): n is a, c, g, or u
auauucccuanauuucauggguua

SEQ ID NO: 69330 - RNA, 18 nt, Artificial Sequence
  Synthetic
uaacaguaaaugaaaaac

SEQ ID NO: 69331 - RNA, 19 nt, Artificial Sequence
  Synthetic
cuaacaguaaaugaaaaac

SEQ ID NO: 69332 - RNA, 20 nt, Artificial Sequence
  Synthetic
ucuaacaguaaaugaaaaac

SEQ ID NO: 69333 - RNA, 18 nt, Artificial Sequence
  Synthetic
uguucaaaaccuucggac

SEQ ID NO: 69334 - RNA, 19 nt, Artificial Sequence
  Synthetic
cuguucaaaaccuucggac

SEQ ID NO: 69335 - RNA, 18 nt, Artificial Sequence
  Synthetic
agaaauccagauugggac

SEQ ID NO: 69336 - RNA, 19 nt, Artificial Sequence
  Synthetic
cagaaauccagauugggac

SEQ ID NO: 69337 - RNA, 20 nt, Artificial Sequence
  Synthetic
ccagaaauccagauugggac

SEQ ID NO: 69338 - RNA, 19 nt, Artificial Sequence
  Synthetic
agucaggaaggcagccuac

SEQ ID NO: 69339 - RNA, 20 nt, Artificial Sequence
  Synthetic
cagucaggaaggcagccuac

SEQ ID NO: 69340 - RNA, 18 nt, Artificial Sequence
  Synthetic
  misc_feature (1)..(2): n is a, c, g, or u
nnuaaugacucuagcuac

SEQ ID NO: 69341 - RNA, 19 nt, Artificial Sequence
  Synthetic
  misc_feature (2)..(3): n is a, c, g, or u
annuaaugacucuagcuac

SEQ ID NO: 69342 - RNA, 19 nt, Artificial Sequence
  Synthetic
agcauucagagcaaacacc

SEQ ID NO: 69343 - RNA, 20 nt, Artificial Sequence
  Synthetic
cagcauucagagcaaacacc

SEQ ID NO: 69344 - RNA, 18 nt, Artificial Sequence
  Synthetic
ugggauuuuuucccgacc

SEQ ID NO: 69345 - RNA, 19 nt, Artificial Sequence
  Synthetic
cugggauuuuuucccgacc

SEQ ID NO: 69346 - RNA, 20 nt, Artificial Sequence
  Synthetic
ucugggauuuuuucccgacc

SEQ ID NO: 69347 - RNA, 21 nt, Artificial Sequence
  Synthetic
cucugggauuuuuucccgacc

SEQ ID NO: 69348 - RNA, 22 nt, Artificial Sequence
  Synthetic
ccucugggauuuuuucccgacc

SEQ ID NO: 69349 - RNA, 23 nt, Artificial Sequence
  Synthetic
uccucugggauuuuuucccgacc

SEQ ID NO: 69350 - RNA, 24 nt, Artificial Sequence
  Synthetic
auccucugggauuuuuucccgacc

SEQ ID NO: 69351 - RNA, 18 nt, Artificial Sequence
  Synthetic
auucugucguucucuccc

SEQ ID NO: 69352 - RNA, 19 nt, Artificial Sequence
  Synthetic
aauucugucguucucuccc

SEQ ID NO: 69353 - RNA, 20 nt, Artificial Sequence
  Synthetic
uaauucugucguucucuccc

SEQ ID NO: 69354 - RNA, 21 nt, Artificial Sequence
  Synthetic
auaauucugucguucucuccc

SEQ ID NO: 69355 - RNA, 23 nt, Artificial Sequence
  Synthetic
  misc_feature (1)..(1): n is a, c, g, or u
ngauaauucugucguucucuccc

SEQ ID NO: 69356 - RNA, 24 nt, Artificial Sequence
  Synthetic
  misc_feature (2)..(2): n is a, c, g, or u
cngauaauucugucguucucuccc

SEQ ID NO: 69357 - RNA, 18 nt, Artificial Sequence
  Synthetic
ucaauacuaauaugggcc

SEQ ID NO: 69358 - RNA, 20 nt, Artificial Sequence
  Synthetic
ugucaauacuaauaugggcc

SEQ ID NO: 69359 - RNA, 18 nt, Artificial Sequence
  Synthetic
aagccuccaagcugugcc

SEQ ID NO: 69360 - RNA, 19 nt, Artificial Sequence
  Synthetic
caagccuccaagcugugcc

SEQ ID NO: 69361 - RNA, 20 nt, Artificial Sequence
  Synthetic
ucaagccuccaagcugugcc

SEQ ID NO: 69362 - RNA, 18 nt, Artificial Sequence
  Synthetic
ccaagcucugcaggaucc

SEQ ID NO: 69363 - RNA, 19 nt, Artificial Sequence
  Synthetic
accaagcucugcaggaucc

SEQ ID NO: 69364 - RNA, 20 nt, Artificial Sequence
  Synthetic
caccaagcucugcaggaucc

SEQ ID NO: 69365 - RNA, 19 nt, Artificial Sequence
  Synthetic
agauccgccuccugccucc

SEQ ID NO: 69366 - RNA, 20 nt, Artificial Sequence
  Synthetic
cagauccgccuccugccucc

SEQ ID NO: 69367 - RNA, 22 nt, Artificial Sequence
  Synthetic
agcagauccgccuccugccucc

SEQ ID NO: 69368 - RNA, 23 nt, Artificial Sequence
  Synthetic
cagcagauccgccuccugccucc

SEQ ID NO: 69369 - RNA, 24 nt, Artificial Sequence
  Synthetic
ccagcagauccgccuccugccucc

SEQ ID NO: 69370 - RNA, 18 nt, Artificial Sequence
  Synthetic
cucaccaaccucuugucc

SEQ ID NO: 69371 - RNA, 19 nt, Artificial Sequence
  Synthetic
acucaccaaccucuugucc

SEQ ID NO: 69372 - RNA, 20 nt, Artificial Sequence
  Synthetic
cacucaccaaccucuugucc

SEQ ID NO: 69373 - RNA, 21 nt, Artificial Sequence
  Synthetic
ucacucaccaaccucuugucc

SEQ ID NO: 69374 - RNA, 22 nt, Artificial Sequence
  Synthetic
  misc_feature (1)..(1): n is a, c, g, or u
nucacucaccaaccucuugucc

SEQ ID NO: 69375 - RNA, 23 nt, Artificial Sequence
  Synthetic
  misc_feature (2)..(2): n is a, c, g, or u
anucacucaccaaccucuugucc

SEQ ID NO: 69376 - RNA, 24 nt, Artificial Sequence
  Synthetic
  misc_feature (3)..(3): n is a, c, g, or u
canucacucaccaaccucuugucc

SEQ ID NO: 69377 - RNA, 18 nt, Artificial Sequence
  Synthetic
uauguugcccguuugucc

SEQ ID NO: 69378 - RNA, 19 nt, Artificial Sequence
  Synthetic
ugccuucugacuucuuucc

SEQ ID NO: 69379 - RNA, 20 nt, Artificial Sequence
  Synthetic
uugccuucugacuucuuucc

SEQ ID NO: 69380 - RNA, 21 nt, Artificial Sequence
  Synthetic
uuugccuucugacuucuuucc

SEQ ID NO: 69381 - RNA, 22 nt, Artificial Sequence
  Synthetic
uuuugccuucugacuucuuucc

SEQ ID NO: 69382 - RNA, 23 nt, Artificial Sequence
  Synthetic
uuuuugccuucugacuucuuucc

SEQ ID NO: 69383 - RNA, 18 nt, Artificial Sequence
  Synthetic
uacuaggaggcuguaggc

SEQ ID NO: 69384 - RNA, 20 nt, Artificial Sequence
  Synthetic
uguacuaggaggcuguaggc

SEQ ID NO: 69385 - RNA, 20 nt, Artificial Sequence
  Synthetic
aggagugggagcauucgggc

SEQ ID NO: 69386 - RNA, 18 nt, Artificial Sequence
  Synthetic
uauuuuccugcugguggc

SEQ ID NO: 69387 - RNA, 20 nt, Artificial Sequence
  Synthetic
uguauuuuccugcugguggc

SEQ ID NO: 69388 - RNA, 19 nt, Artificial Sequence
  Synthetic
agcucccgugugucuuggc

SEQ ID NO: 69389 - RNA, 18 nt, Artificial Sequence
  Synthetic
  misc_feature (10)..(10): n is a, c, g, or u
acaauguggnuauccugc

SEQ ID NO: 69390 - RNA, 19 nt, Artificial Sequence
  Synthetic
  misc_feature (11)..(11): n is a, c, g, or u
cacaauguggnuauccugc

SEQ ID NO: 69391 - RNA, 20 nt, Artificial Sequence
  Synthetic
  misc_feature (12)..(12): n is a, c, g, or u
acacaauguggnuauccugc

SEQ ID NO: 69392 - RNA, 21 nt, Artificial Sequence
  Synthetic
  misc_feature (13)..(13): n is a, c, g, or u
uacacaauguggnuauccugc

SEQ ID NO: 69393 - RNA, 22 nt, Artificial Sequence
  Synthetic
  misc_feature (14)..(14): n is a, c, g, or u
uuacacaauguggnuauccugc

SEQ ID NO: 69394 - RNA, 23 nt, Artificial Sequence
  Synthetic
  misc_feature (15)..(15): n is a, c, g, or u
uuuacacaauguggnuauccugc

SEQ ID NO: 69395 - RNA, 24 nt, Artificial Sequence
  Synthetic
  misc_feature (16)..(16): n is a, c, g, or u
uuuuacacaauguggnuauccugc

SEQ ID NO: 69396 - RNA, 18 nt, Artificial Sequence
  Synthetic
cuccugccuccaccaauc

SEQ ID NO: 69397 - RNA, 19 nt, Artificial Sequence
  Synthetic
ccuccugccuccaccaauc

SEQ ID NO: 69398 - RNA, 18 nt, Artificial Sequence
  Synthetic
ccaagucuguacaacauc

SEQ ID NO: 69399 - RNA, 18 nt, Artificial Sequence
  Synthetic
uuucuuggacggucccuc

SEQ ID NO: 69400 - RNA, 19 nt, Artificial Sequence
  Synthetic
cuuucuuggacggucccuc

SEQ ID NO: 69401 - RNA, 18 nt, Artificial Sequence
  Synthetic
auuccaccaccaauccuc

SEQ ID NO: 69402 - RNA, 19 nt, Artificial Sequence
  Synthetic
cauuccaccaccaauccuc

SEQ ID NO: 69403 - RNA, 20 nt, Artificial Sequence
  Synthetic
ucauuccaccaccaauccuc

SEQ ID NO: 69404 - RNA, 21 nt, Artificial Sequence
  Synthetic
aucauuccaccaccaauccuc

SEQ ID NO: 69405 - RNA, 22 nt, Artificial Sequence
  Synthetic
aaucauuccaccaccaauccuc

SEQ ID NO: 69406 - RNA, 24 nt, Artificial Sequence
  Synthetic
agaaucauuccaccaccaauccuc

SEQ ID NO: 69407 - RNA, 18 nt, Artificial Sequence
  Synthetic
uacugccucacucaucuc

SEQ ID NO: 69408 - RNA, 19 nt, Artificial Sequence
  Synthetic
cuacugccucacucaucuc

SEQ ID NO: 69409 - RNA, 20 nt, Artificial Sequence
  Synthetic
acuacugccucacucaucuc

SEQ ID NO: 69410 - RNA, 22 nt, Artificial Sequence
  Synthetic
cgacuacugccucacucaucuc

SEQ ID NO: 69411 - RNA, 23 nt, Artificial Sequence
  Synthetic
ccgacuacugccucacucaucuc

SEQ ID NO: 69412 - RNA, 24 nt, Artificial Sequence
  Synthetic
uccgacuacugccucacucaucuc

SEQ ID NO: 69413 - RNA, 19 nt, Artificial Sequence
  Synthetic
agaggacucuuggacucuc

SEQ ID NO: 69414 - RNA, 20 nt, Artificial Sequence
  Synthetic
aagaggacucuuggacucuc

SEQ ID NO: 69415 - RNA, 21 nt, Artificial Sequence
  Synthetic
uaagaggacucuuggacucuc

SEQ ID NO: 69416 - RNA, 22 nt, Artificial Sequence
  Synthetic
auaagaggacucuuggacucuc

SEQ ID NO: 69417 - RNA, 23 nt, Artificial Sequence
  Synthetic
cauaagaggacucuuggacucuc

SEQ ID NO: 69418 - RNA, 24 nt, Artificial Sequence
  Synthetic
acauaagaggacucuuggacucuc

SEQ ID NO: 69419 - RNA, 18 nt, Artificial Sequence
  Synthetic
ucuucuacuauaccuguc

SEQ ID NO: 69420 - RNA, 19 nt, Artificial Sequence
  Synthetic
  misc_feature (1)..(1): n is a, c, g, or u
nucuucuacuauaccuguc

SEQ ID NO: 69421 - RNA, 20 nt, Artificial Sequence
  Synthetic
  misc_feature (2)..(2): n is a, c, g, or u
anucuucuacuauaccuguc

SEQ ID NO: 69422 - RNA, 21 nt, Artificial Sequence
  Synthetic
  misc_feature (3)..(3): n is a, c, g, or u
uanucuucuacuauaccuguc

SEQ ID NO: 69423 - RNA, 22 nt, Artificial Sequence
  Synthetic
  misc_feature (4)..(4): n is a, c, g, or u
uuanucuucuacuauaccuguc

SEQ ID NO: 69424 - RNA, 23 nt, Artificial Sequence
  Synthetic
  misc_feature (5)..(5): n is a, c, g, or u
uuuanucuucuacuauaccuguc

SEQ ID NO: 69425 - RNA, 24 nt, Artificial Sequence
  Synthetic
  misc_feature (6)..(6): n is a, c, g, or u
cuuuanucuucuacuauaccuguc

SEQ ID NO: 69426 - RNA, 18 nt, Artificial Sequence
  Synthetic
ccguuuguccucuaauuc

SEQ ID NO: 69427 - RNA, 19 nt, Artificial Sequence
  Synthetic
cccguuuguccucuaauuc

SEQ ID NO: 69428 - RNA, 21 nt, Artificial Sequence
  Synthetic
ugcccguuuguccucuaauuc

SEQ ID NO: 69429 - RNA, 22 nt, Artificial Sequence
  Synthetic
uugcccguuuguccucuaauuc

SEQ ID NO: 69430 - RNA, 24 nt, Artificial Sequence
  Synthetic
uguugcccguuuguccucuaauuc

SEQ ID NO: 69431 - RNA, 18 nt, Artificial Sequence
  Synthetic
uacuagugccauuuguuc

SEQ ID NO: 69432 - RNA, 19 nt, Artificial Sequence
  Synthetic
uuacuagugccauuuguuc

SEQ ID NO: 69433 - RNA, 20 nt, Artificial Sequence
  Synthetic
uuuacuagugccauuuguuc

SEQ ID NO: 69434 - RNA, 22 nt, Artificial Sequence
  Synthetic
aguuuacuagugccauuuguuc

SEQ ID NO: 69435 - RNA, 23 nt, Artificial Sequence
  Synthetic
caguuuacuagugccauuuguuc

SEQ ID NO: 69436 - RNA, 24 nt, Artificial Sequence
  Synthetic
ucaguuuacuagugccauuuguuc

SEQ ID NO: 69437 - RNA, 21 nt, Artificial Sequence
  Synthetic
  misc_feature (16)..(16): n is a, c, g, or u
uggggauauucccuanauuuc

SEQ ID NO: 69438 - RNA, 22 nt, Artificial Sequence
  Synthetic
  misc_feature (17)..(17): n is a, c, g, or u
auggggauauucccuanauuuc

SEQ ID NO: 69439 - RNA, 24 nt, Artificial Sequence
  Synthetic
  misc_feature (19)..(19): n is a, c, g, or u
agauggggauauucccuanauuuc

SEQ ID NO: 69440 - RNA, 18 nt, Artificial Sequence
  Synthetic
uuuuuucccgaccaccag

SEQ ID NO: 69441 - RNA, 19 nt, Artificial Sequence
  Synthetic
auuuuuucccgaccaccag

SEQ ID NO: 69442 - RNA, 23 nt, Artificial Sequence
  Synthetic
ugggauuuuuucccgaccaccag

SEQ ID NO: 69443 - RNA, 24 nt, Artificial Sequence
  Synthetic
cugggauuuuuucccgaccaccag

SEQ ID NO: 69444 - RNA, 18 nt, Artificial Sequence
  Synthetic
cuguuguuagacgaagag

SEQ ID NO: 69445 - RNA, 19 nt, Artificial Sequence
  Synthetic
acuguuguuagacgaagag

SEQ ID NO: 69446 - RNA, 20 nt, Artificial Sequence
  Synthetic
uacuguuguuagacgaagag

SEQ ID NO: 69447 - RNA, 21 nt, Artificial Sequence
  Synthetic
  misc_feature (1)..(1): n is a, c, g, or u
nuacuguuguuagacgaagag

SEQ ID NO: 69448 - RNA, 22 nt, Artificial Sequence
  Synthetic
  misc_feature (2)..(2): n is a, c, g, or u
anuacuguuguuagacgaagag

SEQ ID NO: 69449 - RNA, 24 nt, Artificial Sequence
  Synthetic
  misc_feature (4)..(4): n is a, c, g, or u
aganuacuguuguuagacgaagag

SEQ ID NO: 69450 - RNA, 18 nt, Artificial Sequence
  Synthetic
  misc_feature (9)..(9): n is a, c, g, or u
aaauauuunccccuagag

SEQ ID NO: 69451 - RNA, 19 nt, Artificial Sequence
  Synthetic
  misc_feature (1)..(1): n is a, c, g, or u
  misc_feature (10)..(10): n is a, c, g, or u
naaauauuunccccuagag

SEQ ID NO: 69452 - RNA, 20 nt, Artificial Sequence
  Synthetic
  misc_feature (2)..(2): n is a, c, g, or u
  misc_feature (11)..(11): n is a, c, g, or u
cnaaauauuunccccuagag

SEQ ID NO: 69453 - RNA, 21 nt, Artificial Sequence
  Synthetic
  misc_feature (3)..(3): n is a, c, g, or u
  misc_feature (12)..(12): n is a, c, g, or u
acnaaauauuunccccuagag

SEQ ID NO: 69454 - RNA, 22 nt, Artificial Sequence
  Synthetic
  misc_feature (4)..(4): n is a, c, g, or u
  misc_feature (13)..(13): n is a, c, g, or u
uacnaaauauuunccccuagag

SEQ ID NO: 69455 - RNA, 23 nt, Artificial Sequence
  Synthetic
  misc_feature (5)..(5): n is a, c, g, or u
  misc_feature (14)..(14): n is a, c, g, or u
cuacnaaauauuunccccuagag

SEQ ID NO: 69456 - RNA, 24 nt, Artificial Sequence
  Synthetic
  misc_feature (6)..(6): n is a, c, g, or u
  misc_feature (15)..(15): n is a, c, g, or u
ucuacnaaauauuunccccuagag

SEQ ID NO: 69457 - RNA, 18 nt, Artificial Sequence
  Synthetic
aaaauccucacaauaccg

SEQ ID NO: 69458 - RNA, 19 nt, Artificial Sequence
  Synthetic
aaaaauccucacaauaccg

SEQ ID NO: 69459 - RNA, 20 nt, Artificial Sequence
  Synthetic
caaaaauccucacaauaccg

SEQ ID NO: 69460 - RNA, 21 nt, Artificial Sequence
  Synthetic
acaaaaauccucacaauaccg

SEQ ID NO: 69461 - RNA, 23 nt, Artificial Sequence
  Synthetic
ugacaaaaauccucacaauaccg

SEQ ID NO: 69462 - RNA, 24 nt, Artificial Sequence
  Synthetic
uugacaaaaauccucacaauaccg

SEQ ID NO: 69463 - RNA, 18 nt, Artificial Sequence
  Synthetic
cccugcucguguuacagg

SEQ ID NO: 69464 - RNA, 19 nt, Artificial Sequence
  Synthetic
ccccugcucguguuacagg

SEQ ID NO: 69465 - RNA, 20 nt, Artificial Sequence
  Synthetic
accccugcucguguuacagg

SEQ ID NO: 69466 - RNA, 18 nt, Artificial Sequence
  Synthetic
cccguugcccggcaacgg

SEQ ID NO: 69467 - RNA, 19 nt, Artificial Sequence
  Synthetic
ccccguugcccggcaacgg

SEQ ID NO: 69468 - RNA, 20 nt, Artificial Sequence
  Synthetic
accccguugcccggcaacgg

SEQ ID NO: 69469 - RNA, 19 nt, Artificial Sequence
  Synthetic
  misc_feature (7)..(7): n is a, c, g, or u
uggagcnaaacuuaucggg

SEQ ID NO: 69470 - RNA, 20 nt, Artificial Sequence
  Synthetic
  misc_feature (8)..(8): n is a, c, g, or u
cuggagcnaaacuuaucggg

SEQ ID NO: 69471 - RNA, 21 nt, Artificial Sequence
  Synthetic
  misc_feature (9)..(9): n is a, c, g, or u
ucuggagcnaaacuuaucggg

SEQ ID NO: 69472 - RNA, 24 nt, Artificial Sequence
  Synthetic
  misc_feature (12)..(12): n is a, c, g, or u
aggucuggagcnaaacuuaucggg

SEQ ID NO: 69473 - RNA, 18 nt, Artificial Sequence
  Synthetic
augaugugguauuggggg

SEQ ID NO: 69474 - RNA, 19 nt, Artificial Sequence
  Synthetic
uguuuguuuaaagacuggg

SEQ ID NO: 69475 - RNA, 20 nt, Artificial Sequence
  Synthetic
cuguuuguuuaaagacuggg

SEQ ID NO: 69476 - RNA, 21 nt, Artificial Sequence
  Synthetic
acuguuuguuuaaagacuggg

SEQ ID NO: 69477 - RNA, 23 nt, Artificial Sequence
  Synthetic
agacuguuuguuuaaagacuggg

SEQ ID NO: 69478 - RNA, 24 nt, Artificial Sequence
  Synthetic
aagacuguuuguuuaaagacuggg

SEQ ID NO: 69479 - RNA, 18 nt, Artificial Sequence
  Synthetic
augacucuagcuaccugg

SEQ ID NO: 69480 - RNA, 19 nt, Artificial Sequence
  Synthetic
aaugacucuagcuaccugg

SEQ ID NO: 69481 - RNA, 20 nt, Artificial Sequence
  Synthetic
uaaugacucuagcuaccugg

SEQ ID NO: 69482 - RNA, 21 nt, Artificial Sequence
  Synthetic
  misc_feature (1)..(1): n is a, c, g, or u
nuaaugacucuagcuaccugg

SEQ ID NO: 69483 - RNA, 22 nt, Artificial Sequence
  Synthetic
  misc_feature (1)..(2): n is a, c, g, or u
nnuaaugacucuagcuaccugg

SEQ ID NO: 69484 - RNA, 23 nt, Artificial Sequence
  Synthetic
  misc_feature (2)..(3): n is a, c, g, or u
annuaaugacucuagcuaccugg

SEQ ID NO: 69485 - RNA, 18 nt, Artificial Sequence
  Synthetic
ucagcccguuucuccugg

SEQ ID NO: 69486 - RNA, 19 nt, Artificial Sequence
  Synthetic
cucagcccguuucuccugg

SEQ ID NO: 69487 - RNA, 20 nt, Artificial Sequence
  Synthetic
ccucagcccguuucuccugg

SEQ ID NO: 69488 - RNA, 24 nt, Artificial Sequence
  Synthetic
ugggccucagcccguuucuccugg

SEQ ID NO: 69489 - RNA, 18 nt, Artificial Sequence
  Synthetic
cuggcuuucaguuauaug

SEQ ID NO: 69490 - RNA, 19 nt, Artificial Sequence
  Synthetic
ucuggcuuucaguuauaug

SEQ ID NO: 69491 - RNA, 21 nt, Artificial Sequence
  Synthetic
ugucuggcuuucaguuauaug

SEQ ID NO: 69492 - RNA, 22 nt, Artificial Sequence
  Synthetic
cugucuggcuuucaguuauaug

SEQ ID NO: 69493 - RNA, 23 nt, Artificial Sequence
  Synthetic
acugucuggcuuucaguuauaug

SEQ ID NO: 69494 - RNA, 24 nt, Artificial Sequence
  Synthetic
cacugucuggcuuucaguuauaug

SEQ ID NO: 69495 - RNA, 18 nt, Artificial Sequence
  Synthetic
aagaauuuggagcuacug

SEQ ID NO: 69496 - RNA, 19 nt, Artificial Sequence
  Synthetic
aaagaauuuggagcuacug

SEQ ID NO: 69497 - RNA, 20 nt, Artificial Sequence
  Synthetic
uaaagaauuuggagcuacug

SEQ ID NO: 69498 - RNA, 21 nt, Artificial Sequence
  Synthetic
auaaagaauuuggagcuacug

SEQ ID NO: 69499 - RNA, 22 nt, Artificial Sequence
  Synthetic
uauaaagaauuuggagcuacug

SEQ ID NO: 69500 - RNA, 23 nt, Artificial Sequence
  Synthetic
uuauaaagaauuuggagcuacug

SEQ ID NO: 69501 - RNA, 24 nt, Artificial Sequence
  Synthetic
cuuauaaagaauuuggagcuacug

SEQ ID NO: 69502 - RNA, 18 nt, Artificial Sequence
  Synthetic
uaaacuuagucaugccug

SEQ ID NO: 69503 - RNA, 19 nt, Artificial Sequence
  Synthetic
uuaaacuuagucaugccug

SEQ ID NO: 69504 - RNA, 20 nt, Artificial Sequence
  Synthetic
auuaaacuuagucaugccug

SEQ ID NO: 69505 - RNA, 19 nt, Artificial Sequence
  Synthetic
ugcaacuuuuucaccucug

SEQ ID NO: 69506 - RNA, 20 nt, Artificial Sequence
  Synthetic
augcaacuuuuucaccucug

SEQ ID NO: 69507 - RNA, 18 nt, Artificial Sequence
  Synthetic
acauuccaccaagcucug

SEQ ID NO: 69508 - RNA, 19 nt, Artificial Sequence
  Synthetic
aacauuccaccaagcucug

SEQ ID NO: 69509 - RNA, 20 nt, Artificial Sequence
  Synthetic
caacauuccaccaagcucug

SEQ ID NO: 69510 - RNA, 18 nt, Artificial Sequence
  Synthetic
ccuuggacucacaaggug

SEQ ID NO: 69511 - RNA, 19 nt, Artificial Sequence
  Synthetic
uccuuggacucacaaggug

SEQ ID NO: 69512 - RNA, 20 nt, Artificial Sequence
  Synthetic
uuccuuggacucacaaggug

SEQ ID NO: 69513 - RNA, 21 nt, Artificial Sequence
  Synthetic
auuccuuggacucacaaggug

SEQ ID NO: 69514 - RNA, 22 nt, Artificial Sequence
  Synthetic
uauuccuuggacucacaaggug

SEQ ID NO: 69515 - RNA, 24 nt, Artificial Sequence
  Synthetic
aguauuccuuggacucacaaggug

SEQ ID NO: 69516 - RNA, 18 nt, Artificial Sequence
  Synthetic
acauuauuaacaaaugug

SEQ ID NO: 69517 - RNA, 21 nt, Artificial Sequence
  Synthetic
aggacauuauuaacaaaugug

SEQ ID NO: 69518 - RNA, 22 nt, Artificial Sequence
  Synthetic
caggacauuauuaacaaaugug

SEQ ID NO: 69519 - RNA, 23 nt, Artificial Sequence
  Synthetic
ccaggacauuauuaacaaaugug

SEQ ID NO: 69520 - RNA, 24 nt, Artificial Sequence
  Synthetic
accaggacauuauuaacaaaugug

SEQ ID NO: 69521 - RNA, 20 nt, Artificial Sequence
  Synthetic
  misc_feature (12)..(12): n is a, c, g, or u
cggcaacggccnggucugug

SEQ ID NO: 69522 - RNA, 18 nt, Artificial Sequence
  Synthetic
  misc_feature (4)..(4): n is a, c, g, or u
uaancggccuauugauug

SEQ ID NO: 69523 - RNA, 19 nt, Artificial Sequence
  Synthetic
  misc_feature (5)..(5): n is a, c, g, or u
uuaancggccuauugauug

SEQ ID NO: 69524 - RNA, 18 nt, Artificial Sequence
  Synthetic
caucauggggcuuucuug

SEQ ID NO: 69525 - RNA, 19 nt, Artificial Sequence
  Synthetic
acaucauggggcuuucuug

SEQ ID NO: 69526 - RNA, 20 nt, Artificial Sequence
  Synthetic
uacaucauggggcuuucuug

SEQ ID NO: 69527 - RNA, 18 nt, Artificial Sequence
  Synthetic
  misc_feature (11)..(11): n is a, c, g, or u
ugggugggugnaaauuug

SEQ ID NO: 69528 - RNA, 19 nt, Artificial Sequence
  Synthetic
  misc_feature (12)..(12): n is a, c, g, or u
cugggugggugnaaauuug

SEQ ID NO: 69529 - RNA, 20 nt, Artificial Sequence
  Synthetic
  misc_feature (13)..(13): n is a, c, g, or u
ccugggugggugnaaauuug

SEQ ID NO: 69530 - RNA, 21 nt, Artificial Sequence
  Synthetic
  misc_feature (14)..(14): n is a, c, g, or u
accugggugggugnaaauuug

SEQ ID NO: 69531 - RNA, 22 nt, Artificial Sequence
  Synthetic
  misc_feature (15)..(15): n is a, c, g, or u
uaccugggugggugnaaauuug

SEQ ID NO: 69532 - RNA, 23 nt, Artificial Sequence
  Synthetic
  misc_feature (16)..(16): n is a, c, g, or u
cuaccugggugggugnaaauuug

SEQ ID NO: 69533 - RNA, 19 nt, Artificial Sequence
  Synthetic
aguuuacuagugccauuug

SEQ ID NO: 69534 - RNA, 20 nt, Artificial Sequence
  Synthetic
caguuuacuagugccauuug

SEQ ID NO: 69535 - RNA, 21 nt, Artificial Sequence
  Synthetic
ucaguuuacuagugccauuug

SEQ ID NO: 69536 - RNA, 22 nt, Artificial Sequence
  Synthetic
cucaguuuacuagugccauuug

SEQ ID NO: 69537 - RNA, 19 nt, Artificial Sequence
  Synthetic
  misc_feature (4)..(4): n is a, c, g, or u
  misc_feature (19)..(19): n is a, c, g, or u
agcnaaacuuaucgggacn

SEQ ID NO: 69538 - RNA, 22 nt, Artificial Sequence
  Synthetic
  misc_feature (7)..(7): n is a, c, g, or u
  misc_feature (22)..(22): n is a, c, g, or u
uggagcnaaacuuaucgggacn

SEQ ID NO: 69539 - RNA, 23 nt, Artificial Sequence
  Synthetic
  misc_feature (8)..(8): n is a, c, g, or u
  misc_feature (23)..(23): n is a, c, g, or u
cuggagcnaaacuuaucgggacn

SEQ ID NO: 69540 - RNA, 24 nt, Artificial Sequence
  Synthetic
  misc_feature (9)..(9): n is a, c, g, or u
  misc_feature (24)..(24): n is a, c, g, or u
ucuggagcnaaacuuaucgggacn

SEQ ID NO: 69541 - RNA, 18 nt, Artificial Sequence
  Synthetic
  misc_feature (18)..(18): n is a, c, g, or u
uuggaagagaaaccgucn

SEQ ID NO: 69542 - RNA, 19 nt, Artificial Sequence
  Synthetic
  misc_feature (19)..(19): n is a, c, g, or u
uuuggaagagaaaccgucn

SEQ ID NO: 69543 - RNA, 20 nt, Artificial Sequence
  Synthetic
  misc_feature (20)..(20): n is a, c, g, or u
uuuuggaagagaaaccgucn

SEQ ID NO: 69544 - RNA, 21 nt, Artificial Sequence
  Synthetic
  misc_feature (21)..(21): n is a, c, g, or u
cuuuuggaagagaaaccgucn

SEQ ID NO: 69545 - RNA, 22 nt, Artificial Sequence
  Synthetic
  misc_feature (22)..(22): n is a, c, g, or u
acuuuuggaagagaaaccgucn

SEQ ID NO: 69546 - RNA, 23 nt, Artificial Sequence
  Synthetic
  misc_feature (23)..(23): n is a, c, g, or u
cacuuuuggaagagaaaccgucn

SEQ ID NO: 69547 - RNA, 24 nt, Artificial Sequence
  Synthetic
  misc_feature (24)..(24): n is a, c, g, or u
ucacuuuuggaagagaaaccgucn

SEQ ID NO: 69548 - RNA, 18 nt, Artificial Sequence
  Synthetic
agagcaaacaccagaaau

SEQ ID NO: 69549 - RNA, 19 nt, Artificial Sequence
  Synthetic
cagagcaaacaccagaaau

SEQ ID NO: 69550 - RNA, 20 nt, Artificial Sequence
  Synthetic
ucagagcaaacaccagaaau

SEQ ID NO: 69551 - RNA, 21 nt, Artificial Sequence
  Synthetic
uucagagcaaacaccagaaau

SEQ ID NO: 69552 - RNA, 22 nt, Artificial Sequence
  Synthetic
auucagagcaaacaccagaaau

SEQ ID NO: 69553 - RNA, 23 nt, Artificial Sequence
  Synthetic
cauucagagcaaacaccagaaau

SEQ ID NO: 69554 - RNA, 18 nt, Artificial Sequence
  Synthetic
aaucuccagcuucccaau

SEQ ID NO: 69555 - RNA, 19 nt, Artificial Sequence
  Synthetic
caaucuccagcuucccaau

SEQ ID NO: 69556 - RNA, 20 nt, Artificial Sequence
  Synthetic
ucaaucuccagcuucccaau

SEQ ID NO: 69557 - RNA, 19 nt, Artificial Sequence
  Synthetic
aguagucaguuaugucaau

SEQ ID NO: 69558 - RNA, 20 nt, Artificial Sequence
  Synthetic
uaguagucaguuaugucaau

SEQ ID NO: 69559 - RNA, 18 nt, Artificial Sequence
  Synthetic
acauggaaagcaucacau

SEQ ID NO: 69560 - RNA, 19 nt, Artificial Sequence
  Synthetic
aacauggaaagcaucacau

SEQ ID NO: 69561 - RNA, 18 nt, Artificial Sequence
  Synthetic
uugucuuuggguauacau

SEQ ID NO: 69562 - RNA, 19 nt, Artificial Sequence
  Synthetic
uuugucuuuggguauacau

SEQ ID NO: 69563 - RNA, 20 nt, Artificial Sequence
  Synthetic
uuuugucuuuggguauacau

SEQ ID NO: 69564 - RNA, 21 nt, Artificial Sequence
  Synthetic
cuuuugucuuuggguauacau

SEQ ID NO: 69565 - RNA, 22 nt, Artificial Sequence
  Synthetic
ucuuuugucuuuggguauacau

SEQ ID NO: 69566 - RNA, 23 nt, Artificial Sequence
  Synthetic
uucuuuugucuuuggguauacau

SEQ ID NO: 69567 - RNA, 24 nt, Artificial Sequence
  Synthetic
uuucuuuugucuuuggguauacau

SEQ ID NO: 69568 - RNA, 18 nt, Artificial Sequence
  Synthetic
ccaacaaaacaaaaagau

SEQ ID NO: 69569 - RNA, 19 nt, Artificial Sequence
  Synthetic
cccaacaaaacaaaaagau

SEQ ID NO: 69570 - RNA, 20 nt, Artificial Sequence
  Synthetic
ucccaacaaaacaaaaagau

SEQ ID NO: 69571 - RNA, 21 nt, Artificial Sequence
  Synthetic
aucccaacaaaacaaaaagau

SEQ ID NO: 69572 - RNA, 22 nt, Artificial Sequence
  Synthetic
aaucccaacaaaacaaaaagau

SEQ ID NO: 69573 - RNA, 23 nt, Artificial Sequence
  Synthetic
aaaucccaacaaaacaaaaagau

SEQ ID NO: 69574 - RNA, 24 nt, Artificial Sequence
  Synthetic
uaaaucccaacaaaacaaaaagau

SEQ ID NO: 69575 - RNA, 18 nt, Artificial Sequence
  Synthetic
uugguucuucuggacuau

SEQ ID NO: 69576 - RNA, 20 nt, Artificial Sequence
  Synthetic
uguugguucuucuggacuau

SEQ ID NO: 69577 - RNA, 21 nt, Artificial Sequence
  Synthetic
uuguugguucuucuggacuau

SEQ ID NO: 69578 - RNA, 22 nt, Artificial Sequence
  Synthetic
cuuguugguucuucuggacuau

SEQ ID NO: 69579 - RNA, 23 nt, Artificial Sequence
  Synthetic
ucuuguugguucuucuggacuau

SEQ ID NO: 69580 - RNA, 24 nt, Artificial Sequence
  Synthetic
uucuuguugguucuucuggacuau

SEQ ID NO: 69581 - RNA, 18 nt, Artificial Sequence
  Synthetic
accgccucagcucuguau

SEQ ID NO: 69582 - RNA, 19 nt, Artificial Sequence
  Synthetic
uaccgccucagcucuguau

SEQ ID NO: 69583 - RNA, 20 nt, Artificial Sequence
  Synthetic
auaccgccucagcucuguau

SEQ ID NO: 69584 - RNA, 18 nt, Artificial Sequence
  Synthetic
uaaaguucaggcaauuau

SEQ ID NO: 69585 - RNA, 19 nt, Artificial Sequence
  Synthetic
cuaaaguucaggcaauuau

SEQ ID NO: 69586 - RNA, 20 nt, Artificial Sequence
  Synthetic
ccuaaaguucaggcaauuau

SEQ ID NO: 69587 - RNA, 19 nt, Artificial Sequence
  Synthetic
agguauaaaaccuuauuau

SEQ ID NO: 69588 - RNA, 20 nt, Artificial Sequence
  Synthetic
aagguauaaaaccuuauuau

SEQ ID NO: 69589 - RNA, 21 nt, Artificial Sequence
  Synthetic
aaagguauaaaaccuuauuau

SEQ ID NO: 69590 - RNA, 23 nt, Artificial Sequence
  Synthetic
agaaagguauaaaaccuuauuau

SEQ ID NO: 69591 - RNA, 18 nt, Artificial Sequence
  Synthetic
ugucuggcuuucaguuau

SEQ ID NO: 69592 - RNA, 19 nt, Artificial Sequence
  Synthetic
cugucuggcuuucaguuau

SEQ ID NO: 69593 - RNA, 20 nt, Artificial Sequence
  Synthetic
acugucuggcuuucaguuau

SEQ ID NO: 69594 - RNA, 21 nt, Artificial Sequence
  Synthetic
cacugucuggcuuucaguuau

SEQ ID NO: 69595 - RNA, 22 nt, Artificial Sequence
  Synthetic
ccacugucuggcuuucaguuau

SEQ ID NO: 69596 - RNA, 23 nt, Artificial Sequence
  Synthetic
cccacugucuggcuuucaguuau

SEQ ID NO: 69597 - RNA, 24 nt, Artificial Sequence
  Synthetic
ccccacugucuggcuuucaguuau

SEQ ID NO: 69598 - RNA, 18 nt, Artificial Sequence
  Synthetic
uccagcauccagggaccu

SEQ ID NO: 69599 - RNA, 19 nt, Artificial Sequence
  Synthetic
auccagcauccagggaccu

SEQ ID NO: 69600 - RNA, 18 nt, Artificial Sequence
  Synthetic
  misc_feature (12)..(12): n is a, c, g, or u
cucccuguuaancggccu

SEQ ID NO: 69601 - RNA, 19 nt, Artificial Sequence
  Synthetic
  misc_feature (13)..(13): n is a, c, g, or u
acucccuguuaancggccu

SEQ ID NO: 69602 - RNA, 20 nt, Artificial Sequence
  Synthetic
  misc_feature (14)..(14): n is a, c, g, or u
aacucccuguuaancggccu

SEQ ID NO: 69603 - RNA, 18 nt, Artificial Sequence
  Synthetic
cucuguaucgggaugccu

SEQ ID NO: 69604 - RNA, 20 nt, Artificial Sequence
  Synthetic
agcucuguaucgggaugccu

SEQ ID NO: 69605 - RNA, 18 nt, Artificial Sequence
  Synthetic
cuuguugacaaaaauccu

SEQ ID NO: 69606 - RNA, 19 nt, Artificial Sequence
  Synthetic
ucuuguugacaaaaauccu

SEQ ID NO: 69607 - RNA, 20 nt, Artificial Sequence
  Synthetic
uucuuguugacaaaaauccu

SEQ ID NO: 69608 - RNA, 21 nt, Artificial Sequence
  Synthetic
uuucuuguugacaaaaauccu

SEQ ID NO: 69609 - RNA, 22 nt, Artificial Sequence
  Synthetic
uuuucuuguugacaaaaauccu

SEQ ID NO: 69610 - RNA, 23 nt, Artificial Sequence
  Synthetic
uuuuucuuguugacaaaaauccu

SEQ ID NO: 69611 - RNA, 18 nt, Artificial Sequence
  Synthetic
agaggccuguauuuuccu

SEQ ID NO: 69612 - RNA, 19 nt, Artificial Sequence
  Synthetic
aagaggccuguauuuuccu

SEQ ID NO: 69613 - RNA, 20 nt, Artificial Sequence
  Synthetic
uaagaggccuguauuuuccu

SEQ ID NO: 69614 - RNA, 18 nt, Artificial Sequence
  Synthetic
uucccccacugucuggcu

SEQ ID NO: 69615 - RNA, 19 nt, Artificial Sequence
  Synthetic
uuucccccacugucuggcu

SEQ ID NO: 69616 - RNA, 20 nt, Artificial Sequence
  Synthetic
cuuucccccacugucuggcu

SEQ ID NO: 69617 - RNA, 18 nt, Artificial Sequence
  Synthetic
aaccuuuguggcuccucu

SEQ ID NO: 69618 - RNA, 21 nt, Artificial Sequence
  Synthetic
  misc_feature (1)..(1): n is a, c, g, or u
nggaaccuuuguggcuccucu

SEQ ID NO: 69619 - RNA, 23 nt, Artificial Sequence
  Synthetic
  misc_feature (3)..(3): n is a, c, g, or u
cgnggaaccuuuguggcuccucu

SEQ ID NO: 69620 - RNA, 18 nt, Artificial Sequence
  Synthetic
accaauuuucuuuugucu

SEQ ID NO: 69621 - RNA, 19 nt, Artificial Sequence
  Synthetic
uaccaauuuucuuuugucu

SEQ ID NO: 69622 - RNA, 20 nt, Artificial Sequence
  Synthetic
uuaccaauuuucuuuugucu

SEQ ID NO: 69623 - RNA, 22 nt, Artificial Sequence
  Synthetic
uguuaccaauuuucuuuugucu

SEQ ID NO: 69624 - RNA, 23 nt, Artificial Sequence
  Synthetic
cuguuaccaauuuucuuuugucu

SEQ ID NO: 69625 - RNA, 24 nt, Artificial Sequence
  Synthetic
ucuguuaccaauuuucuuuugucu

SEQ ID NO: 69626 - RNA, 18 nt, Artificial Sequence
  Synthetic
  misc_feature (15)..(15): n is a, c, g, or u
ccugcggacgacccnucu

SEQ ID NO: 69627 - RNA, 19 nt, Artificial Sequence
  Synthetic
  misc_feature (16)..(16): n is a, c, g, or u
uccugcggacgacccnucu

SEQ ID NO: 69628 - RNA, 20 nt, Artificial Sequence
  Synthetic
  misc_feature (17)..(17): n is a, c, g, or u
auccugcggacgacccnucu

SEQ ID NO: 69629 - RNA, 21 nt, Artificial Sequence
  Synthetic
  misc_feature (18)..(18): n is a, c, g, or u
aauccugcggacgacccnucu

SEQ ID NO: 69630 - RNA, 23 nt, Artificial Sequence
  Synthetic
  misc_feature (20)..(20): n is a, c, g, or u
ugaauccugcggacgacccnucu

SEQ ID NO: 69631 - RNA, 24 nt, Artificial Sequence
  Synthetic
  misc_feature (21)..(21): n is a, c, g, or u
cugaauccugcggacgacccnucu

SEQ ID NO: 69632 - RNA, 18 nt, Artificial Sequence
  Synthetic
uuuggugucuuuuggagu

SEQ ID NO: 69633 - RNA, 19 nt, Artificial Sequence
  Synthetic
auuuggugucuuuuggagu

SEQ ID NO: 69634 - RNA, 20 nt, Artificial Sequence
  Synthetic
uauuuggugucuuuuggagu

SEQ ID NO: 69635 - RNA, 22 nt, Artificial Sequence
  Synthetic
aguauuuggugucuuuuggagu

SEQ ID NO: 69636 - RNA, 24 nt, Artificial Sequence
  Synthetic
agaguauuuggugucuuuuggagu

SEQ ID NO: 69637 - RNA, 20 nt, Artificial Sequence
  Synthetic
  misc_feature (6)..(6): n is a, c, g, or u
uggacngaagccaacaaggu

SEQ ID NO: 69638 - RNA, 18 nt, Artificial Sequence
  Synthetic
cuagcuaccugggugggu

SEQ ID NO: 69639 - RNA, 19 nt, Artificial Sequence
  Synthetic
ucuagcuaccugggugggu

SEQ ID NO: 69640 - RNA, 20 nt, Artificial Sequence
  Synthetic
cucuagcuaccugggugggu

SEQ ID NO: 69641 - RNA, 21 nt, Artificial Sequence
  Synthetic
acucuagcuaccugggugggu

SEQ ID NO: 69642 - RNA, 23 nt, Artificial Sequence
  Synthetic
ugacucuagcuaccugggugggu

SEQ ID NO: 69643 - RNA, 24 nt, Artificial Sequence
  Synthetic
augacucuagcuaccugggugggu

SEQ ID NO: 69644 - RNA, 18 nt, Artificial Sequence
  Synthetic
  misc_feature (4)..(4): n is a, c, g, or u
  misc_feature (17)..(17): n is a, c, g, or u
acangaacacaucaganu

SEQ ID NO: 69645 - RNA, 19 nt, Artificial Sequence
  Synthetic
  misc_feature (5)..(5): n is a, c, g, or u
  misc_feature (18)..(18): n is a, c, g, or u
cacangaacacaucaganu

SEQ ID NO: 69646 - RNA, 20 nt, Artificial Sequence
  Synthetic
  misc_feature (6)..(6): n is a, c, g, or u
  misc_feature (19)..(19): n is a, c, g, or u
ccacangaacacaucaganu

SEQ ID NO: 69647 - RNA, 21 nt, Artificial Sequence
  Synthetic
  misc_feature (7)..(7): n is a, c, g, or u
  misc_feature (20)..(20): n is a, c, g, or u
accacangaacacaucaganu

SEQ ID NO: 69648 - RNA, 22 nt, Artificial Sequence
  Synthetic
  misc_feature (8)..(8): n is a, c, g, or u
  misc_feature (21)..(21): n is a, c, g, or u
uaccacangaacacaucaganu

SEQ ID NO: 69649 - RNA, 23 nt, Artificial Sequence
  Synthetic
  misc_feature (9)..(9): n is a, c, g, or u
  misc_feature (22)..(22): n is a, c, g, or u
uuaccacangaacacaucaganu

SEQ ID NO: 69650 - RNA, 24 nt, Artificial Sequence
  Synthetic
  misc_feature (10)..(10): n is a, c, g, or u
  misc_feature (23)..(23): n is a, c, g, or u
auuaccacangaacacaucaganu

SEQ ID NO: 69651 - RNA, 18 nt, Artificial Sequence
  Synthetic
ugugucuuggccaaaauu

SEQ ID NO: 69652 - RNA, 20 nt, Artificial Sequence
  Synthetic
cgugugucuuggccaaaauu

SEQ ID NO: 69653 - RNA, 21 nt, Artificial Sequence
  Synthetic
ccgugugucuuggccaaaauu

SEQ ID NO: 69654 - RNA, 22 nt, Artificial Sequence
  Synthetic
cccgugugucuuggccaaaauu

SEQ ID NO: 69655 - RNA, 23 nt, Artificial Sequence
  Synthetic
ucccgugugucuuggccaaaauu

SEQ ID NO: 69656 - RNA, 24 nt, Artificial Sequence
  Synthetic
cucccgugugucuuggccaaaauu

SEQ ID NO: 69657 - RNA, 18 nt, Artificial Sequence
  Synthetic
  misc_feature (13)..(13): n is a, c, g, or u
aaaguaugucaangaauu

SEQ ID NO: 69658 - RNA, 21 nt, Artificial Sequence
  Synthetic
  misc_feature (16)..(16): n is a, c, g, or u
uggaaaguaugucaangaauu

SEQ ID NO: 69659 - RNA, 22 nt, Artificial Sequence
  Synthetic
  misc_feature (17)..(17): n is a, c, g, or u
uuggaaaguaugucaangaauu

SEQ ID NO: 69660 - RNA, 23 nt, Artificial Sequence
  Synthetic
  misc_feature (18)..(18): n is a, c, g, or u
auuggaaaguaugucaangaauu

SEQ ID NO: 69661 - RNA, 18 nt, Artificial Sequence
  Synthetic
uucauggguuauguaauu

SEQ ID NO: 69662 - RNA, 19 nt, Artificial Sequence
  Synthetic
uuucauggguuauguaauu

SEQ ID NO: 69663 - RNA, 20 nt, Artificial Sequence
  Synthetic
auuucauggguuauguaauu

SEQ ID NO: 69664 - RNA, 21 nt, Artificial Sequence
  Synthetic
  misc_feature (1)..(1): n is a, c, g, or u
nauuucauggguuauguaauu

SEQ ID NO: 69665 - RNA, 22 nt, Artificial Sequence
  Synthetic
  misc_feature (2)..(2): n is a, c, g, or u
anauuucauggguuauguaauu

SEQ ID NO: 69666 - RNA, 23 nt, Artificial Sequence
  Synthetic
  misc_feature (3)..(3): n is a, c, g, or u
uanauuucauggguuauguaauu

SEQ ID NO: 69667 - RNA, 24 nt, Artificial Sequence
  Synthetic
  misc_feature (4)..(4): n is a, c, g, or u
cuanauuucauggguuauguaauu

SEQ ID NO: 69668 - RNA, 19 nt, Artificial Sequence
  Synthetic
  misc_feature (1)..(1): n is a, c, g, or u
  misc_feature (13)..(13): n is a, c, g, or u
ngggggaggaganuagauu

SEQ ID NO: 69669 - RNA, 20 nt, Artificial Sequence
  Synthetic
  misc_feature (2)..(2): n is a, c, g, or u
  misc_feature (14)..(14): n is a, c, g, or u
ungggggaggaganuagauu

SEQ ID NO: 69670 - RNA, 22 nt, Artificial Sequence
  Synthetic
  misc_feature (4)..(4): n is a, c, g, or u
  misc_feature (16)..(16): n is a, c, g, or u
agungggggaggaganuagauu

SEQ ID NO: 69671 - RNA, 19 nt, Artificial Sequence
  Synthetic
agaucucaaucuccagcuu

SEQ ID NO: 69672 - RNA, 20 nt, Artificial Sequence
  Synthetic
aagaucucaaucuccagcuu

SEQ ID NO: 69673 - RNA, 18 nt, Artificial Sequence
  Synthetic
ccuucaguaagagaucuu

SEQ ID NO: 69674 - RNA, 19 nt, Artificial Sequence
  Synthetic
uccuucaguaagagaucuu

SEQ ID NO: 69675 - RNA, 20 nt, Artificial Sequence
  Synthetic
uuccuucaguaagagaucuu

SEQ ID NO: 69676 - RNA, 21 nt, Artificial Sequence
  Synthetic
uuuccuucaguaagagaucuu

SEQ ID NO: 69677 - RNA, 22 nt, Artificial Sequence
  Synthetic
cuuuccuucaguaagagaucuu

SEQ ID NO: 69678 - RNA, 23 nt, Artificial Sequence
  Synthetic
ucuuuccuucaguaagagaucuu

SEQ ID NO: 69679 - RNA, 24 nt, Artificial Sequence
  Synthetic
uucuuuccuucaguaagagaucuu

SEQ ID NO: 69680 - RNA, 19 nt, Artificial Sequence
  Synthetic
ugcuaugccucaucuucuu

SEQ ID NO: 69681 - RNA, 20 nt, Artificial Sequence
  Synthetic
cugcuaugccucaucuucuu

SEQ ID NO: 69682 - RNA, 18 nt, Artificial Sequence
  Synthetic
ucccuuuauaccucuguu

SEQ ID NO: 69683 - RNA, 20 nt, Artificial Sequence
  Synthetic
agucccuuuauaccucuguu

SEQ ID NO: 69684 - RNA, 18 nt, Artificial Sequence
  Synthetic
aacaaaugugaacaauuu

SEQ ID NO: 69685 - RNA, 19 nt, Artificial Sequence
  Synthetic
uaacaaaugugaacaauuu

SEQ ID NO: 69686 - RNA, 20 nt, Artificial Sequence
  Synthetic
uuaacaaaugugaacaauuu

SEQ ID NO: 69687 - RNA, 21 nt, Artificial Sequence
  Synthetic
auuaacaaaugugaacaauuu

SEQ ID NO: 69688 - RNA, 22 nt, Artificial Sequence
  Synthetic
uauuaacaaaugugaacaauuu

SEQ ID NO: 69689 - RNA, 23 nt, Artificial Sequence
  Synthetic
uuauuaacaaaugugaacaauuu

SEQ ID NO: 69690 - RNA, 24 nt, Artificial Sequence
  Synthetic
auuauuaacaaaugugaacaauuu

SEQ ID NO: 69691 - RNA, 18 nt, Artificial Sequence
  Synthetic
ccccacacggaggccuuu

SEQ ID NO: 69692 - RNA, 19 nt, Artificial Sequence
  Synthetic
cccccacacggaggccuuu

SEQ ID NO: 69693 - RNA, 20 nt, Artificial Sequence
  Synthetic
ucccccacacggaggccuuu

SEQ ID NO: 69694 - RNA, 21 nt, Artificial Sequence
  Synthetic
cucccccacacggaggccuuu

SEQ ID NO: 69695 - RNA, 22 nt, Artificial Sequence
  Synthetic
acucccccacacggaggccuuu

SEQ ID NO: 69696 - RNA, 23 nt, Artificial Sequence
  Synthetic
cacucccccacacggaggccuuu

SEQ ID NO: 69697 - RNA, 24 nt, Artificial Sequence
  Synthetic
ucacucccccacacggaggccuuu

SEQ ID NO: 69698 - RNA, 18 nt, Artificial Sequence
  Synthetic
agaguauuuggugucuuu

SEQ ID NO: 69699 - RNA, 19 nt, Artificial Sequence
  Synthetic
uagaguauuuggugucuuu

SEQ ID NO: 69700 - RNA, 20 nt, Artificial Sequence
  Synthetic
  misc_feature (1)..(1): n is a, c, g, or u
nuagaguauuuggugucuuu

SEQ ID NO: 69701 - RNA, 18 nt, Artificial Sequence
  Synthetic
uuucuccuggcucaguuu

SEQ ID NO: 69702 - RNA, 20 nt, Artificial Sequence
  Synthetic
cguuucuccuggcucaguuu

SEQ ID NO: 69703 - RNA, 21 nt, Artificial Sequence
  Synthetic
ccguuucuccuggcucaguuu

SEQ ID NO: 69704 - RNA, 22 nt, Artificial Sequence
  Synthetic
cccguuucuccuggcucaguuu

SEQ ID NO: 69705 - RNA, 24 nt, Artificial Sequence
  Synthetic
agcccguuucuccuggcucaguuu

SEQ ID NO: 69706 - RNA, 19 nt, Artificial Sequence
  Synthetic
  misc_feature (1)..(1): n is a, c, g, or u
nggucugugccaaguguuu

SEQ ID NO: 69707 - RNA, 20 nt, Artificial Sequence
  Synthetic
  misc_feature (2)..(2): n is a, c, g, or u
cnggucugugccaaguguuu

SEQ ID NO: 69708 - RNA, 21 nt, Artificial Sequence
  Synthetic
  misc_feature (3)..(3): n is a, c, g, or u
ccnggucugugccaaguguuu

SEQ ID NO: 69709 - RNA, 24 nt, Artificial Sequence
  Synthetic
  misc_feature (6)..(6): n is a, c, g, or u
cggccnggucugugccaaguguuu

SEQ ID NO: 69710 - RNA, 18 nt, Artificial Sequence
  Synthetic
  misc_feature (2)..(2): n is a, c, g, or u
cncguagcgccucauuuu

SEQ ID NO: 69711 - RNA, 19 nt, Artificial Sequence
  Synthetic
  misc_feature (3)..(3): n is a, c, g, or u
acncguagcgccucauuuu

SEQ ID NO: 69712 - RNA, 20 nt, Artificial Sequence
  Synthetic
  misc_feature (4)..(4): n is a, c, g, or u
uacncguagcgccucauuuu

SEQ ID NO: 69713 - RNA, 18 nt, Artificial Sequence
  Synthetic
uggaaaacuccaucuuuu

SEQ ID NO: 69714 - RNA, 19 nt, Artificial Sequence
  Synthetic
cuggaaaacuccaucuuuu

SEQ ID NO: 69715 - RNA, 20 nt, Artificial Sequence
  Synthetic
acuggaaaacuccaucuuuu

SEQ ID NO: 69716 - RNA, 21 nt, Artificial Sequence
  Synthetic
aacuggaaaacuccaucuuuu

SEQ ID NO: 69717 - RNA, 22 nt, Artificial Sequence
  Synthetic
uaacuggaaaacuccaucuuuu

SEQ ID NO: 69718 - RNA, 23 nt, Artificial Sequence
  Synthetic
cuaacuggaaaacuccaucuuuu

SEQ ID NO: 69719 - RNA, 24 nt, Artificial Sequence
  Synthetic
ccuaacuggaaaacuccaucuuuu

SEQ ID NO: 69720 - RNA, 18 nt, Artificial Sequence
  Synthetic
  misc_feature (1)..(1): n is a, c, g, or u
nguagagaugggaaaaaa

SEQ ID NO: 69721 - RNA, 19 nt, Artificial Sequence
  Synthetic
  misc_feature (2)..(2): n is a, c, g, or u
unguagagaugggaaaaaa

SEQ ID NO: 69722 - RNA, 20 nt, Artificial Sequence
  Synthetic
  misc_feature (3)..(3): n is a, c, g, or u
uunguagagaugggaaaaaa

SEQ ID NO: 69723 - RNA, 21 nt, Artificial Sequence
  Synthetic
  misc_feature (4)..(4): n is a, c, g, or u
uuunguagagaugggaaaaaa

SEQ ID NO: 69724 - RNA, 22 nt, Artificial Sequence
  Synthetic
  misc_feature (5)..(5): n is a, c, g, or u
auuunguagagaugggaaaaaa

SEQ ID NO: 69725 - RNA, 23 nt, Artificial Sequence
  Synthetic
  misc_feature (6)..(6): n is a, c, g, or u
uauuunguagagaugggaaaaaa

SEQ ID NO: 69726 - RNA, 24 nt, Artificial Sequence
  Synthetic
  misc_feature (7)..(7): n is a, c, g, or u
auauuunguagagaugggaaaaaa

SEQ ID NO: 69727 - RNA, 18 nt, Artificial Sequence
  Synthetic
gaagucagaaggcaaaaa

SEQ ID NO: 69728 - RNA, 19 nt, Artificial Sequence
  Synthetic
agaagucagaaggcaaaaa

SEQ ID NO: 69729 - RNA, 20 nt, Artificial Sequence
  Synthetic
aagaagucagaaggcaaaaa

SEQ ID NO: 69730 - RNA, 21 nt, Artificial Sequence
  Synthetic
aaagaagucagaaggcaaaaa

SEQ ID NO: 69731 - RNA, 22 nt, Artificial Sequence
  Synthetic
gaaagaagucagaaggcaaaaa

SEQ ID NO: 69732 - RNA, 23 nt, Artificial Sequence
  Synthetic
ggaaagaagucagaaggcaaaaa

SEQ ID NO: 69733 - RNA, 24 nt, Artificial Sequence
  Synthetic
aggaaagaagucagaaggcaaaaa

SEQ ID NO: 69734 - RNA, 18 nt, Artificial Sequence
  Synthetic
acgguuucucuuccaaaa

SEQ ID NO: 69735 - RNA, 19 nt, Artificial Sequence
  Synthetic
gacgguuucucuuccaaaa

SEQ ID NO: 69736 - RNA, 20 nt, Artificial Sequence
  Synthetic
  misc_feature (1)..(1): n is a, c, g, or u
ngacgguuucucuuccaaaa

SEQ ID NO: 69737 - RNA, 21 nt, Artificial Sequence
  Synthetic
  misc_feature (2)..(2): n is a, c, g, or u
angacgguuucucuuccaaaa

SEQ ID NO: 69738 - RNA, 22 nt, Artificial Sequence
  Synthetic
  misc_feature (3)..(3): n is a, c, g, or u
uangacgguuucucuuccaaaa

SEQ ID NO: 69739 - RNA, 23 nt, Artificial Sequence
  Synthetic
  misc_feature (4)..(4): n is a, c, g, or u
cuangacgguuucucuuccaaaa

SEQ ID NO: 69740 - RNA, 24 nt, Artificial Sequence
  Synthetic
  misc_feature (5)..(5): n is a, c, g, or u
ucuangacgguuucucuuccaaaa

SEQ ID NO: 69741 - RNA, 18 nt, Artificial Sequence
  Synthetic
agaagucagaaggcaaaa

SEQ ID NO: 69742 - RNA, 19 nt, Artificial Sequence
  Synthetic
aagaagucagaaggcaaaa

SEQ ID NO: 69743 - RNA, 20 nt, Artificial Sequence
  Synthetic
aaagaagucagaaggcaaaa

SEQ ID NO: 69744 - RNA, 21 nt, Artificial Sequence
  Synthetic
gaaagaagucagaaggcaaaa

SEQ ID NO: 69745 - RNA, 22 nt, Artificial Sequence
  Synthetic
ggaaagaagucagaaggcaaaa

SEQ ID NO: 69746 - RNA, 23 nt, Artificial Sequence
  Synthetic
aggaaagaagucagaaggcaaaa

SEQ ID NO: 69747 - RNA, 24 nt, Artificial Sequence
  Synthetic
aaggaaagaagucagaaggcaaaa

SEQ ID NO: 69748 - RNA, 18 nt, Artificial Sequence
  Synthetic
ggagcucccccuagaaaa

SEQ ID NO: 69749 - RNA, 19 nt, Artificial Sequence
  Synthetic
gggagcucccccuagaaaa

SEQ ID NO: 69750 - RNA, 20 nt, Artificial Sequence
  Synthetic
cgggagcucccccuagaaaa

SEQ ID NO: 69751 - RNA, 21 nt, Artificial Sequence
  Synthetic
acgggagcucccccuagaaaa

SEQ ID NO: 69752 - RNA, 22 nt, Artificial Sequence
  Synthetic
cacgggagcucccccuagaaaa

SEQ ID NO: 69753 - RNA, 23 nt, Artificial Sequence
  Synthetic
acacgggagcucccccuagaaaa

SEQ ID NO: 69754 - RNA, 24 nt, Artificial Sequence
  Synthetic
cacacgggagcucccccuagaaaa

SEQ ID NO: 69755 - RNA, 18 nt, Artificial Sequence
  Synthetic
gagccaccagcaggaaaa

SEQ ID NO: 69756 - RNA, 19 nt, Artificial Sequence
  Synthetic
ggagccaccagcaggaaaa

SEQ ID NO: 69757 - RNA, 20 nt, Artificial Sequence
  Synthetic
uggagccaccagcaggaaaa

SEQ ID NO: 69758 - RNA, 21 nt, Artificial Sequence
  Synthetic
cuggagccaccagcaggaaaa

SEQ ID NO: 69759 - RNA, 22 nt, Artificial Sequence
  Synthetic
acuggagccaccagcaggaaaa

SEQ ID NO: 69760 - RNA, 23 nt, Artificial Sequence
  Synthetic
aacuggagccaccagcaggaaaa

SEQ ID NO: 69761 - RNA, 24 nt, Artificial Sequence
  Synthetic
gaacuggagccaccagcaggaaaa

SEQ ID NO: 69762 - RNA, 18 nt, Artificial Sequence
  Synthetic
aaaugaauaucaggaaaa

SEQ ID NO: 69763 - RNA, 19 nt, Artificial Sequence
  Synthetic
caaaugaauaucaggaaaa

SEQ ID NO: 69764 - RNA, 20 nt, Artificial Sequence
  Synthetic
gcaaaugaauaucaggaaaa

SEQ ID NO: 69765 - RNA, 21 nt, Artificial Sequence
  Synthetic
ugcaaaugaauaucaggaaaa

SEQ ID NO: 69766 - RNA, 22 nt, Artificial Sequence
  Synthetic
gugcaaaugaauaucaggaaaa

SEQ ID NO: 69767 - RNA, 23 nt, Artificial Sequence
  Synthetic
ggugcaaaugaauaucaggaaaa

SEQ ID NO: 69768 - RNA, 24 nt, Artificial Sequence
  Synthetic
uggugcaaaugaauaucaggaaaa

SEQ ID NO: 69769 - RNA, 18 nt, Artificial Sequence
  Synthetic
  misc_feature (14)..(14): n is a, c, g, or u
auaaggugacccanaaaa

SEQ ID NO: 69770 - RNA, 19 nt, Artificial Sequence
  Synthetic
  misc_feature (15)..(15): n is a, c, g, or u
aauaaggugacccanaaaa

SEQ ID NO: 69771 - RNA, 20 nt, Artificial Sequence
  Synthetic
  misc_feature (16)..(16): n is a, c, g, or u
gaauaaggugacccanaaaa

SEQ ID NO: 69772 - RNA, 21 nt, Artificial Sequence
  Synthetic
  misc_feature (17)..(17): n is a, c, g, or u
agaauaaggugacccanaaaa

SEQ ID NO: 69773 - RNA, 22 nt, Artificial Sequence
  Synthetic
  misc_feature (18)..(18): n is a, c, g, or u
aagaauaaggugacccanaaaa

SEQ ID NO: 69774 - RNA, 23 nt, Artificial Sequence
  Synthetic
  misc_feature (19)..(19): n is a, c, g, or u
caagaauaaggugacccanaaaa

SEQ ID NO: 69775 - RNA, 24 nt, Artificial Sequence
  Synthetic
  misc_feature (20)..(20): n is a, c, g, or u
ccaagaauaaggugacccanaaaa

SEQ ID NO: 69776 - RNA, 18 nt, Artificial Sequence
  Synthetic
uguauacccaaagacaaa

SEQ ID NO: 69777 - RNA, 19 nt, Artificial Sequence
  Synthetic
auguauacccaaagacaaa

SEQ ID NO: 69778 - RNA, 20 nt, Artificial Sequence
  Synthetic
aauguauacccaaagacaaa

SEQ ID NO: 69779 - RNA, 21 nt, Artificial Sequence
  Synthetic
aaauguauacccaaagacaaa

SEQ ID NO: 69780 - RNA, 22 nt, Artificial Sequence
  Synthetic
uaaauguauacccaaagacaaa

SEQ ID NO: 69781 - RNA, 23 nt, Artificial Sequence
  Synthetic
uuaaauguauacccaaagacaaa

SEQ ID NO: 69782 - RNA, 24 nt, Artificial Sequence
  Synthetic
uuuaaauguauacccaaagacaaa

SEQ ID NO: 69783 - RNA, 18 nt, Artificial Sequence
  Synthetic
agcgauagccaggacaaa

SEQ ID NO: 69784 - RNA, 19 nt, Artificial Sequence
  Synthetic
cagcgauagccaggacaaa

SEQ ID NO: 69785 - RNA, 20 nt, Artificial Sequence
  Synthetic
ccagcgauagccaggacaaa

SEQ ID NO: 69786 - RNA, 21 nt, Artificial Sequence
  Synthetic
uccagcgauagccaggacaaa

SEQ ID NO: 69787 - RNA, 22 nt, Artificial Sequence
  Synthetic
auccagcgauagccaggacaaa

SEQ ID NO: 69788 - RNA, 23 nt, Artificial Sequence
  Synthetic
cauccagcgauagccaggacaaa

SEQ ID NO: 69789 - RNA, 24 nt, Artificial Sequence
  Synthetic
acauccagcgauagccaggacaaa

SEQ ID NO: 69790 - RNA, 18 nt, Artificial Sequence
  Synthetic
uuuaaauguauacccaaa

SEQ ID NO: 69791 - RNA, 19 nt, Artificial Sequence
  Synthetic
auuuaaauguauacccaaa

SEQ ID NO: 69792 - RNA, 20 nt, Artificial Sequence
  Synthetic
gauuuaaauguauacccaaa

SEQ ID NO: 69793 - RNA, 21 nt, Artificial Sequence
  Synthetic
ggauuuaaauguauacccaaa

SEQ ID NO: 69794 - RNA, 22 nt, Artificial Sequence
  Synthetic
gggauuuaaauguauacccaaa

SEQ ID NO: 69795 - RNA, 23 nt, Artificial Sequence
  Synthetic
ugggauuuaaauguauacccaaa

SEQ ID NO: 69796 - RNA, 24 nt, Artificial Sequence
  Synthetic
uugggauuuaaauguauacccaaa

SEQ ID NO: 69797 - RNA, 18 nt, Artificial Sequence
  Synthetic
gacgguuucucuuccaaa

SEQ ID NO: 69798 - RNA, 19 nt, Artificial Sequence
  Synthetic
  misc_feature (1)..(1): n is a, c, g, or u
ngacgguuucucuuccaaa

SEQ ID NO: 69799 - RNA, 20 nt, Artificial Sequence
  Synthetic
  misc_feature (2)..(2): n is a, c, g, or u
angacgguuucucuuccaaa

SEQ ID NO: 69800 - RNA, 21 nt, Artificial Sequence
  Synthetic
  misc_feature (3)..(3): n is a, c, g, or u
uangacgguuucucuuccaaa

SEQ ID NO: 69801 - RNA, 22 nt, Artificial Sequence
  Synthetic
  misc_feature (4)..(4): n is a, c, g, or u
cuangacgguuucucuuccaaa

SEQ ID NO: 69802 - RNA, 23 nt, Artificial Sequence
  Synthetic
  misc_feature (5)..(5): n is a, c, g, or u
ucuangacgguuucucuuccaaa

SEQ ID NO: 69803 - RNA, 24 nt, Artificial Sequence
  Synthetic
  misc_feature (6)..(6): n is a, c, g, or u
cucuangacgguuucucuuccaaa

SEQ ID NO: 69804 - RNA, 18 nt, Artificial Sequence
  Synthetic
agaccugcugcgagcaaa

SEQ ID NO: 69805 - RNA, 19 nt, Artificial Sequence
  Synthetic
cagaccugcugcgagcaaa

SEQ ID NO: 69806 - RNA, 20 nt, Artificial Sequence
  Synthetic
ccagaccugcugcgagcaaa

SEQ ID NO: 69807 - RNA, 21 nt, Artificial Sequence
  Synthetic
uccagaccugcugcgagcaaa

SEQ ID NO: 69808 - RNA, 22 nt, Artificial Sequence
  Synthetic
cuccagaccugcugcgagcaaa

SEQ ID NO: 69809 - RNA, 23 nt, Artificial Sequence
  Synthetic
gcuccagaccugcugcgagcaaa

SEQ ID NO: 69810 - RNA, 24 nt, Artificial Sequence
  Synthetic
  misc_feature (1)..(1): n is a, c, g, or u
ngcuccagaccugcugcgagcaaa

SEQ ID NO: 69811 - RNA, 18 nt, Artificial Sequence
  Synthetic
aagaagucagaaggcaaa

SEQ ID NO: 69812 - RNA, 19 nt, Artificial Sequence
  Synthetic
aaagaagucagaaggcaaa

SEQ ID NO: 69813 - RNA, 20 nt, Artificial Sequence
  Synthetic
gaaagaagucagaaggcaaa

SEQ ID NO: 69814 - RNA, 21 nt, Artificial Sequence
  Synthetic
ggaaagaagucagaaggcaaa

SEQ ID NO: 69815 - RNA, 22 nt, Artificial Sequence
  Synthetic
aggaaagaagucagaaggcaaa

SEQ ID NO: 69816 - RNA, 23 nt, Artificial Sequence
  Synthetic
aaggaaagaagucagaaggcaaa

SEQ ID NO: 69817 - RNA, 24 nt, Artificial Sequence
  Synthetic
gaaggaaagaagucagaaggcaaa

SEQ ID NO: 69818 - RNA, 18 nt, Artificial Sequence
  Synthetic
ggaugagugucucucaaa

SEQ ID NO: 69819 - RNA, 19 nt, Artificial Sequence
  Synthetic
aggaugagugucucucaaa

SEQ ID NO: 69820 - RNA, 20 nt, Artificial Sequence
  Synthetic
gaggaugagugucucucaaa

SEQ ID NO: 69821 - RNA, 21 nt, Artificial Sequence
  Synthetic
ugaggaugagugucucucaaa

SEQ ID NO: 69822 - RNA, 22 nt, Artificial Sequence
  Synthetic
cugaggaugagugucucucaaa

SEQ ID NO: 69823 - RNA, 23 nt, Artificial Sequence
  Synthetic
ccugaggaugagugucucucaaa

SEQ ID NO: 69824 - RNA, 24 nt, Artificial Sequence
  Synthetic
gccugaggaugagugucucucaaa

SEQ ID NO: 69825 - RNA, 18 nt, Artificial Sequence
  Synthetic
caaaagugagacaagaaa

SEQ ID NO: 69826 - RNA, 19 nt, Artificial Sequence
  Synthetic
ccaaaagugagacaagaaa

SEQ ID NO: 69827 - RNA, 20 nt, Artificial Sequence
  Synthetic
uccaaaagugagacaagaaa

SEQ ID NO: 69828 - RNA, 21 nt, Artificial Sequence
  Synthetic
uuccaaaagugagacaagaaa

SEQ ID NO: 69829 - RNA, 22 nt, Artificial Sequence
  Synthetic
cuuccaaaagugagacaagaaa

SEQ ID NO: 69830 - RNA, 23 nt, Artificial Sequence
  Synthetic
ucuuccaaaagugagacaagaaa

SEQ ID NO: 69831 - RNA, 24 nt, Artificial Sequence
  Synthetic
cucuuccaaaagugagacaagaaa

SEQ ID NO: 69832 - RNA, 18 nt, Artificial Sequence
  Synthetic
uuguaaguuggcgagaaa

SEQ ID NO: 69833 - RNA, 19 nt, Artificial Sequence
  Synthetic
cuuguaaguuggcgagaaa

SEQ ID NO: 69834 - RNA, 20 nt, Artificial Sequence
  Synthetic
ccuuguaaguuggcgagaaa

SEQ ID NO: 69835 - RNA, 21 nt, Artificial Sequence
  Synthetic
gccuuguaaguuggcgagaaa

SEQ ID NO: 69836 - RNA, 22 nt, Artificial Sequence
  Synthetic
ggccuuguaaguuggcgagaaa

SEQ ID NO: 69837 - RNA, 23 nt, Artificial Sequence
  Synthetic
aggccuuguaaguuggcgagaaa

SEQ ID NO: 69838 - RNA, 24 nt, Artificial Sequence
  Synthetic
aaggccuuguaaguuggcgagaaa

SEQ ID NO: 69839 - RNA, 18 nt, Artificial Sequence
  Synthetic
gggagcucccccuagaaa

SEQ ID NO: 69840 - RNA, 19 nt, Artificial Sequence
  Synthetic
cgggagcucccccuagaaa

SEQ ID NO: 69841 - RNA, 20 nt, Artificial Sequence
  Synthetic
acgggagcucccccuagaaa

SEQ ID NO: 69842 - RNA, 21 nt, Artificial Sequence
  Synthetic
cacgggagcucccccuagaaa

SEQ ID NO: 69843 - RNA, 22 nt, Artificial Sequence
  Synthetic
acacgggagcucccccuagaaa

SEQ ID NO: 69844 - RNA, 23 nt, Artificial Sequence
  Synthetic
cacacgggagcucccccuagaaa

SEQ ID NO: 69845 - RNA, 24 nt, Artificial Sequence
  Synthetic
acacacgggagcucccccuagaaa

SEQ ID NO: 69846 - RNA, 18 nt, Artificial Sequence
  Synthetic
acagcaacaugagggaaa

SEQ ID NO: 69847 - RNA, 19 nt, Artificial Sequence
  Synthetic
aacagcaacaugagggaaa

SEQ ID NO: 69848 - RNA, 20 nt, Artificial Sequence
  Synthetic
gaacagcaacaugagggaaa

SEQ ID NO: 69849 - RNA, 21 nt, Artificial Sequence
  Synthetic
ugaacagcaacaugagggaaa

SEQ ID NO: 69850 - RNA, 22 nt, Artificial Sequence
  Synthetic
uugaacagcaacaugagggaaa

SEQ ID NO: 69851 - RNA, 23 nt, Artificial Sequence
  Synthetic
uuugaacagcaacaugagggaaa

SEQ ID NO: 69852 - RNA, 24 nt, Artificial Sequence
  Synthetic
uuuugaacagcaacaugagggaaa

SEQ ID NO: 69853 - RNA, 18 nt, Artificial Sequence
  Synthetic
auuacauaacccaugaaa

SEQ ID NO: 69854 - RNA, 19 nt, Artificial Sequence
  Synthetic
aauuacauaacccaugaaa

SEQ ID NO: 69855 - RNA, 20 nt, Artificial Sequence
  Synthetic
caauuacauaacccaugaaa

SEQ ID NO: 69856 - RNA, 21 nt, Artificial Sequence
  Synthetic
ccaauuacauaacccaugaaa

SEQ ID NO: 69857 - RNA, 22 nt, Artificial Sequence
  Synthetic
uccaauuacauaacccaugaaa

SEQ ID NO: 69858 - RNA, 23 nt, Artificial Sequence
  Synthetic
uuccaauuacauaacccaugaaa

SEQ ID NO: 69859 - RNA, 24 nt, Artificial Sequence
  Synthetic
cuuccaauuacauaacccaugaaa

SEQ ID NO: 69860 - RNA, 18 nt, Artificial Sequence
  Synthetic
ucauccauauaacugaaa

SEQ ID NO: 69861 - RNA, 19 nt, Artificial Sequence
  Synthetic
aucauccauauaacugaaa

SEQ ID NO: 69862 - RNA, 20 nt, Artificial Sequence
  Synthetic
caucauccauauaacugaaa

SEQ ID NO: 69863 - RNA, 21 nt, Artificial Sequence
  Synthetic
acaucauccauauaacugaaa

SEQ ID NO: 69864 - RNA, 22 nt, Artificial Sequence
  Synthetic
cacaucauccauauaacugaaa

SEQ ID NO: 69865 - RNA, 23 nt, Artificial Sequence
  Synthetic
ccacaucauccauauaacugaaa

SEQ ID NO: 69866 - RNA, 24 nt, Artificial Sequence
  Synthetic
accacaucauccauauaacugaaa

SEQ ID NO: 69867 - RNA, 18 nt, Artificial Sequence
  Synthetic
  misc_feature (15)..(15): n is a, c, g, or u
aauaaggugacccanaaa

SEQ ID NO: 69868 - RNA, 19 nt, Artificial Sequence
  Synthetic
  misc_feature (16)..(16): n is a, c, g, or u
gaauaaggugacccanaaa

SEQ ID NO: 69869 - RNA, 20 nt, Artificial Sequence
  Synthetic
  misc_feature (17)..(17): n is a, c, g, or u
agaauaaggugacccanaaa

SEQ ID NO: 69870 - RNA, 21 nt, Artificial Sequence
  Synthetic
  misc_feature (18)..(18): n is a, c, g, or u
aagaauaaggugacccanaaa

SEQ ID NO: 69871 - RNA, 22 nt, Artificial Sequence
  Synthetic
  misc_feature (19)..(19): n is a, c, g, or u
caagaauaaggugacccanaaa

SEQ ID NO: 69872 - RNA, 23 nt, Artificial Sequence
  Synthetic
  misc_feature (20)..(20): n is a, c, g, or u
ccaagaauaaggugacccanaaa

SEQ ID NO: 69873 - RNA, 24 nt, Artificial Sequence
  Synthetic
  misc_feature (21)..(21): n is a, c, g, or u
cccaagaauaaggugacccanaaa

SEQ ID NO: 69874 - RNA, 18 nt, Artificial Sequence
  Synthetic
acaaauggcacuaguaaa

SEQ ID NO: 69875 - RNA, 19 nt, Artificial Sequence
  Synthetic
aacaaauggcacuaguaaa

SEQ ID NO: 69876 - RNA, 20 nt, Artificial Sequence
  Synthetic
gaacaaauggcacuaguaaa

SEQ ID NO: 69877 - RNA, 21 nt, Artificial Sequence
  Synthetic
ugaacaaauggcacuaguaaa

SEQ ID NO: 69878 - RNA, 22 nt, Artificial Sequence
  Synthetic
cugaacaaauggcacuaguaaa

SEQ ID NO: 69879 - RNA, 23 nt, Artificial Sequence
  Synthetic
acugaacaaauggcacuaguaaa

SEQ ID NO: 69880 - RNA, 24 nt, Artificial Sequence
  Synthetic
cacugaacaaauggcacuaguaaa

SEQ ID NO: 69881 - RNA, 18 nt, Artificial Sequence
  Synthetic
acggggagaccgcguaaa

SEQ ID NO: 69882 - RNA, 19 nt, Artificial Sequence
  Synthetic
gacggggagaccgcguaaa

SEQ ID NO: 69883 - RNA, 20 nt, Artificial Sequence
  Synthetic
agacggggagaccgcguaaa

SEQ ID NO: 69884 - RNA, 21 nt, Artificial Sequence
  Synthetic
cagacggggagaccgcguaaa

SEQ ID NO: 69885 - RNA, 22 nt, Artificial Sequence
  Synthetic
acagacggggagaccgcguaaa

SEQ ID NO: 69886 - RNA, 23 nt, Artificial Sequence
  Synthetic
cacagacggggagaccgcguaaa

SEQ ID NO: 69887 - RNA, 24 nt, Artificial Sequence
  Synthetic
gcacagacggggagaccgcguaaa

SEQ ID NO: 69888 - RNA, 18 nt, Artificial Sequence
  Synthetic
  misc_feature (4)..(4): n is a, c, g, or u
auanccacauuguguaaa

SEQ ID NO: 69889 - RNA, 19 nt, Artificial Sequence
  Synthetic
  misc_feature (5)..(5): n is a, c, g, or u
gauanccacauuguguaaa

SEQ ID NO: 69890 - RNA, 20 nt, Artificial Sequence
  Synthetic
  misc_feature (6)..(6): n is a, c, g, or u
ggauanccacauuguguaaa

SEQ ID NO: 69891 - RNA, 21 nt, Artificial Sequence
  Synthetic
  misc_feature (7)..(7): n is a, c, g, or u
aggauanccacauuguguaaa

SEQ ID NO: 69892 - RNA, 22 nt, Artificial Sequence
  Synthetic
  misc_feature (8)..(8): n is a, c, g, or u
caggauanccacauuguguaaa

SEQ ID NO: 69893 - RNA, 23 nt, Artificial Sequence
  Synthetic
  misc_feature (9)..(9): n is a, c, g, or u
gcaggauanccacauuguguaaa

SEQ ID NO: 69894 - RNA, 24 nt, Artificial Sequence
  Synthetic
  misc_feature (10)..(10): n is a, c, g, or u
agcaggauanccacauuguguaaa

SEQ ID NO: 69895 - RNA, 18 nt, Artificial Sequence
  Synthetic
gcauacagaggcauuaaa

SEQ ID NO: 69896 - RNA, 19 nt, Artificial Sequence
  Synthetic
cgcauacagaggcauuaaa

SEQ ID NO: 69897 - RNA, 20 nt, Artificial Sequence
  Synthetic
acgcauacagaggcauuaaa

SEQ ID NO: 69898 - RNA, 21 nt, Artificial Sequence
  Synthetic
cacgcauacagaggcauuaaa

SEQ ID NO: 69899 - RNA, 22 nt, Artificial Sequence
  Synthetic
acacgcauacagaggcauuaaa

SEQ ID NO: 69900 - RNA, 23 nt, Artificial Sequence
  Synthetic
uacacgcauacagaggcauuaaa

SEQ ID NO: 69901 - RNA, 24 nt, Artificial Sequence
  Synthetic
auacacgcauacagaggcauuaaa

SEQ ID NO: 69902 - RNA, 18 nt, Artificial Sequence
  Synthetic
uuuccaguuaggauuaaa

SEQ ID NO: 69903 - RNA, 19 nt, Artificial Sequence
  Synthetic
uuuuccaguuaggauuaaa

SEQ ID NO: 69904 - RNA, 20 nt, Artificial Sequence
  Synthetic
guuuuccaguuaggauuaaa

SEQ ID NO: 69905 - RNA, 21 nt, Artificial Sequence
  Synthetic
aguuuuccaguuaggauuaaa

SEQ ID NO: 69906 - RNA, 22 nt, Artificial Sequence
  Synthetic
gaguuuuccaguuaggauuaaa

SEQ ID NO: 69907 - RNA, 23 nt, Artificial Sequence
  Synthetic
ggaguuuuccaguuaggauuaaa

SEQ ID NO: 69908 - RNA, 24 nt, Artificial Sequence
  Synthetic
uggaguuuuccaguuaggauuaaa

SEQ ID NO: 69909 - RNA, 18 nt, Artificial Sequence
  Synthetic
gaggauuuuugucaacaa

SEQ ID NO: 69910 - RNA, 19 nt, Artificial Sequence
  Synthetic
ugaggauuuuugucaacaa

SEQ ID NO: 69911 - RNA, 20 nt, Artificial Sequence
  Synthetic
gugaggauuuuugucaacaa

SEQ ID NO: 69912 - RNA, 21 nt, Artificial Sequence
  Synthetic
ugugaggauuuuugucaacaa

SEQ ID NO: 69913 - RNA, 22 nt, Artificial Sequence
  Synthetic
uugugaggauuuuugucaacaa

SEQ ID NO: 69914 - RNA, 23 nt, Artificial Sequence
  Synthetic
auugugaggauuuuugucaacaa

SEQ ID NO: 69915 - RNA, 24 nt, Artificial Sequence
  Synthetic
uauugugaggauuuuugucaacaa

SEQ ID NO: 69916 - RNA, 18 nt, Artificial Sequence
  Synthetic
auguauacccaaagacaa

SEQ ID NO: 69917 - RNA, 19 nt, Artificial Sequence
  Synthetic
aauguauacccaaagacaa

SEQ ID NO: 69918 - RNA, 20 nt, Artificial Sequence
  Synthetic
aaauguauacccaaagacaa

SEQ ID NO: 69919 - RNA, 21 nt, Artificial Sequence
  Synthetic
uaaauguauacccaaagacaa

SEQ ID NO: 69920 - RNA, 22 nt, Artificial Sequence
  Synthetic
uuaaauguauacccaaagacaa

SEQ ID NO: 69921 - RNA, 23 nt, Artificial Sequence
  Synthetic
uuuaaauguauacccaaagacaa

SEQ ID NO: 69922 - RNA, 24 nt, Artificial Sequence
  Synthetic
auuuaaauguauacccaaagacaa

SEQ ID NO: 69923 - RNA, 18 nt, Artificial Sequence
  Synthetic
cagcgauagccaggacaa

SEQ ID NO: 69924 - RNA, 19 nt, Artificial Sequence
  Synthetic
ccagcgauagccaggacaa

SEQ ID NO: 69925 - RNA, 20 nt, Artificial Sequence
  Synthetic
uccagcgauagccaggacaa

SEQ ID NO: 69926 - RNA, 21 nt, Artificial Sequence
  Synthetic
auccagcgauagccaggacaa

SEQ ID NO: 69927 - RNA, 22 nt, Artificial Sequence
  Synthetic
cauccagcgauagccaggacaa

SEQ ID NO: 69928 - RNA, 23 nt, Artificial Sequence
  Synthetic
acauccagcgauagccaggacaa

SEQ ID NO: 69929 - RNA, 24 nt, Artificial Sequence
  Synthetic
cacauccagcgauagccaggacaa

SEQ ID NO: 69930 - RNA, 18 nt, Artificial Sequence
  Synthetic
ccuggaauuagaggacaa

SEQ ID NO: 69931 - RNA, 19 nt, Artificial Sequence
  Synthetic
uccuggaauuagaggacaa

SEQ ID NO: 69932 - RNA, 20 nt, Artificial Sequence
  Synthetic
auccuggaauuagaggacaa

SEQ ID NO: 69933 - RNA, 21 nt, Artificial Sequence
  Synthetic
gauccuggaauuagaggacaa

SEQ ID NO: 69934 - RNA, 22 nt, Artificial Sequence
  Synthetic
ugauccuggaauuagaggacaa

SEQ ID NO: 69935 - RNA, 23 nt, Artificial Sequence
  Synthetic
augauccuggaauuagaggacaa

SEQ ID NO: 69936 - RNA, 24 nt, Artificial Sequence
  Synthetic
gaugauccuggaauuagaggacaa

SEQ ID NO: 69937 - RNA, 18 nt, Artificial Sequence
  Synthetic
auaguccagaagaaccaa

SEQ ID NO: 69938 - RNA, 19 nt, Artificial Sequence
  Synthetic
gauaguccagaagaaccaa

SEQ ID NO: 69939 - RNA, 20 nt, Artificial Sequence
  Synthetic
ugauaguccagaagaaccaa

SEQ ID NO: 69940 - RNA, 21 nt, Artificial Sequence
  Synthetic
uugauaguccagaagaaccaa

SEQ ID NO: 69941 - RNA, 22 nt, Artificial Sequence
  Synthetic
cuugauaguccagaagaaccaa

SEQ ID NO: 69942 - RNA, 23 nt, Artificial Sequence
  Synthetic
ccuugauaguccagaagaaccaa

SEQ ID NO: 69943 - RNA, 24 nt, Artificial Sequence
  Synthetic
accuugauaguccagaagaaccaa

SEQ ID NO: 69944 - RNA, 18 nt, Artificial Sequence
  Synthetic
uugggauuguggucccaa

SEQ ID NO: 69945 - RNA, 19 nt, Artificial Sequence
  Synthetic
guugggauuguggucccaa

SEQ ID NO: 69946 - RNA, 20 nt, Artificial Sequence
  Synthetic
uguugggauuguggucccaa

SEQ ID NO: 69947 - RNA, 21 nt, Artificial Sequence
  Synthetic
uuguugggauuguggucccaa

SEQ ID NO: 69948 - RNA, 22 nt, Artificial Sequence
  Synthetic
uuuguugggauuguggucccaa

SEQ ID NO: 69949 - RNA, 23 nt, Artificial Sequence
  Synthetic
cuuuguugggauuguggucccaa

SEQ ID NO: 69950 - RNA, 24 nt, Artificial Sequence
  Synthetic
ucuuuguugggauuguggucccaa

SEQ ID NO: 69951 - RNA, 18 nt, Artificial Sequence
  Synthetic
ucgagagggaccguccaa

SEQ ID NO: 69952 - RNA, 19 nt, Artificial Sequence
  Synthetic
uucgagagggaccguccaa

SEQ ID NO: 69953 - RNA, 20 nt, Artificial Sequence
  Synthetic
auucgagagggaccguccaa

SEQ ID NO: 69954 - RNA, 18 nt, Artificial Sequence
  Synthetic
gaagguuuugaacagcaa

SEQ ID NO: 69955 - RNA, 19 nt, Artificial Sequence
  Synthetic
cgaagguuuugaacagcaa

SEQ ID NO: 69956 - RNA, 20 nt, Artificial Sequence
  Synthetic
ccgaagguuuugaacagcaa

SEQ ID NO: 69957 - RNA, 21 nt, Artificial Sequence
  Synthetic
uccgaagguuuugaacagcaa

SEQ ID NO: 69958 - RNA, 22 nt, Artificial Sequence
  Synthetic
guccgaagguuuugaacagcaa

SEQ ID NO: 69959 - RNA, 23 nt, Artificial Sequence
  Synthetic
cguccgaagguuuugaacagcaa

SEQ ID NO: 69960 - RNA, 24 nt, Artificial Sequence
  Synthetic
ccguccgaagguuuugaacagcaa

SEQ ID NO: 69961 - RNA, 18 nt, Artificial Sequence
  Synthetic
cagaccugcugcgagcaa

SEQ ID NO: 69962 - RNA, 19 nt, Artificial Sequence
  Synthetic
ccagaccugcugcgagcaa

SEQ ID NO: 69963 - RNA, 20 nt, Artificial Sequence
  Synthetic
uccagaccugcugcgagcaa

SEQ ID NO: 69964 - RNA, 21 nt, Artificial Sequence
  Synthetic
cuccagaccugcugcgagcaa

SEQ ID NO: 69965 - RNA, 22 nt, Artificial Sequence
  Synthetic
gcuccagaccugcugcgagcaa

SEQ ID NO: 69966 - RNA, 23 nt, Artificial Sequence
  Synthetic
  misc_feature (1)..(1): n is a, c, g, or u
ngcuccagaccugcugcgagcaa

SEQ ID NO: 69967 - RNA, 24 nt, Artificial Sequence
  Synthetic
  misc_feature (2)..(2): n is a, c, g, or u
ungcuccagaccugcugcgagcaa

SEQ ID NO: 69968 - RNA, 18 nt, Artificial Sequence
  Synthetic
ugugaggauuuuugucaa

SEQ ID NO: 69969 - RNA, 19 nt, Artificial Sequence
  Synthetic
uugugaggauuuuugucaa

SEQ ID NO: 69970 - RNA, 20 nt, Artificial Sequence
  Synthetic
auugugaggauuuuugucaa

SEQ ID NO: 69971 - RNA, 21 nt, Artificial Sequence
  Synthetic
uauugugaggauuuuugucaa

SEQ ID NO: 69972 - RNA, 22 nt, Artificial Sequence
  Synthetic
guauugugaggauuuuugucaa

SEQ ID NO: 69973 - RNA, 23 nt, Artificial Sequence
  Synthetic
gguauugugaggauuuuugucaa

SEQ ID NO: 69974 - RNA, 24 nt, Artificial Sequence
  Synthetic
cgguauugugaggauuuuugucaa

SEQ ID NO: 69975 - RNA, 18 nt, Artificial Sequence
  Synthetic
ucuuacugaaggaaagaa

SEQ ID NO: 69976 - RNA, 19 nt, Artificial Sequence
  Synthetic
cucuuacugaaggaaagaa

SEQ ID NO: 69977 - RNA, 20 nt, Artificial Sequence
  Synthetic
ucucuuacugaaggaaagaa

SEQ ID NO: 69978 - RNA, 21 nt, Artificial Sequence
  Synthetic
aucucuuacugaaggaaagaa

SEQ ID NO: 69979 - RNA, 22 nt, Artificial Sequence
  Synthetic
gaucucuuacugaaggaaagaa

SEQ ID NO: 69980 - RNA, 23 nt, Artificial Sequence
  Synthetic
agaucucuuacugaaggaaagaa

SEQ ID NO: 69981 - RNA, 24 nt, Artificial Sequence
  Synthetic
aagaucucuuacugaaggaaagaa

SEQ ID NO: 69982 - RNA, 18 nt, Artificial Sequence
  Synthetic
cagaagaaccaacaagaa

SEQ ID NO: 69983 - RNA, 19 nt, Artificial Sequence
  Synthetic
ccagaagaaccaacaagaa

SEQ ID NO: 69984 - RNA, 20 nt, Artificial Sequence
  Synthetic
uccagaagaaccaacaagaa

SEQ ID NO: 69985 - RNA, 21 nt, Artificial Sequence
  Synthetic
guccagaagaaccaacaagaa

SEQ ID NO: 69986 - RNA, 22 nt, Artificial Sequence
  Synthetic
aguccagaagaaccaacaagaa

SEQ ID NO: 69987 - RNA, 23 nt, Artificial Sequence
  Synthetic
uaguccagaagaaccaacaagaa

SEQ ID NO: 69988 - RNA, 24 nt, Artificial Sequence
  Synthetic
auaguccagaagaaccaacaagaa

SEQ ID NO: 69989 - RNA, 18 nt, Artificial Sequence
  Synthetic
gaaggaaagaagucagaa

SEQ ID NO: 69990 - RNA, 19 nt, Artificial Sequence
  Synthetic
ugaaggaaagaagucagaa

SEQ ID NO: 69991 - RNA, 20 nt, Artificial Sequence
  Synthetic
cugaaggaaagaagucagaa

SEQ ID NO: 69992 - RNA, 21 nt, Artificial Sequence
  Synthetic
acugaaggaaagaagucagaa

SEQ ID NO: 69993 - RNA, 22 nt, Artificial Sequence
  Synthetic
uacugaaggaaagaagucagaa

SEQ ID NO: 69994 - RNA, 23 nt, Artificial Sequence
  Synthetic
uuacugaaggaaagaagucagaa

SEQ ID NO: 69995 - RNA, 24 nt, Artificial Sequence
  Synthetic
cuuacugaaggaaagaagucagaa

SEQ ID NO: 69996 - RNA, 18 nt, Artificial Sequence
  Synthetic
cuuguaaguuggcgagaa

SEQ ID NO: 69997 - RNA, 19 nt, Artificial Sequence
  Synthetic
ccuuguaaguuggcgagaa

SEQ ID NO: 69998 - RNA, 20 nt, Artificial Sequence
  Synthetic
gccuuguaaguuggcgagaa

SEQ ID NO: 69999 - RNA, 21 nt, Artificial Sequence
  Synthetic
ggccuuguaaguuggcgagaa

SEQ ID NO: 70000 - RNA, 22 nt, Artificial Sequence
  Synthetic
aggccuuguaaguuggcgagaa

SEQ ID NO: 70001 - RNA, 23 nt, Artificial Sequence
  Synthetic
aaggccuuguaaguuggcgagaa

SEQ ID NO: 70002 - RNA, 24 nt, Artificial Sequence
  Synthetic
aaaggccuuguaaguuggcgagaa

SEQ ID NO: 70003 - RNA, 18 nt, Artificial Sequence
  Synthetic
uaaacugagccaggagaa

SEQ ID NO: 70004 - RNA, 19 nt, Artificial Sequence
  Synthetic
guaaacugagccaggagaa

SEQ ID NO: 70005 - RNA, 20 nt, Artificial Sequence
  Synthetic
aguaaacugagccaggagaa

SEQ ID NO: 70006 - RNA, 21 nt, Artificial Sequence
  Synthetic
uaguaaacugagccaggagaa

SEQ ID NO: 70007 - RNA, 22 nt, Artificial Sequence
  Synthetic
cuaguaaacugagccaggagaa

SEQ ID NO: 70008 - RNA, 23 nt, Artificial Sequence
  Synthetic
acuaguaaacugagccaggagaa

SEQ ID NO: 70009 - RNA, 24 nt, Artificial Sequence
  Synthetic
cacuaguaaacugagccaggagaa

SEQ ID NO: 70010 - RNA, 18 nt, Artificial Sequence
  Synthetic
ggaacggcagacggagaa

SEQ ID NO: 70011 - RNA, 19 nt, Artificial Sequence
  Synthetic
  misc_feature (1)..(1): n is a, c, g, or u
nggaacggcagacggagaa

SEQ ID NO: 70012 - RNA, 20 nt, Artificial Sequence
  Synthetic
  misc_feature (2)..(2): n is a, c, g, or u
cnggaacggcagacggagaa

SEQ ID NO: 70013 - RNA, 21 nt, Artificial Sequence
  Synthetic
  misc_feature (3)..(3): n is a, c, g, or u
gcnggaacggcagacggagaa

SEQ ID NO: 70014 - RNA, 22 nt, Artificial Sequence
  Synthetic
  misc_feature (4)..(4): n is a, c, g, or u
ggcnggaacggcagacggagaa

SEQ ID NO: 70015 - RNA, 23 nt, Artificial Sequence
  Synthetic
  misc_feature (5)..(5): n is a, c, g, or u
cggcnggaacggcagacggagaa

SEQ ID NO: 70016 - RNA, 24 nt, Artificial Sequence
  Synthetic
  misc_feature (6)..(6): n is a, c, g, or u
ucggcnggaacggcagacggagaa

SEQ ID NO: 70017 - RNA, 18 nt, Artificial Sequence
  Synthetic
ggguucacuguuccggaa

SEQ ID NO: 70018 - RNA, 19 nt, Artificial Sequence
  Synthetic
aggguucacuguuccggaa

SEQ ID NO: 70019 - RNA, 20 nt, Artificial Sequence
  Synthetic
caggguucacuguuccggaa

SEQ ID NO: 70020 - RNA, 21 nt, Artificial Sequence
  Synthetic
acaggguucacuguuccggaa

SEQ ID NO: 70021 - RNA, 22 nt, Artificial Sequence
  Synthetic
aacaggguucacuguuccggaa

SEQ ID NO: 70022 - RNA, 23 nt, Artificial Sequence
  Synthetic
gaacaggguucacuguuccggaa

SEQ ID NO: 70023 - RNA, 24 nt, Artificial Sequence
  Synthetic
ggaacaggguucacuguuccggaa

SEQ ID NO: 70024 - RNA, 18 nt, Artificial Sequence
  Synthetic
augaugaugggaugggaa

SEQ ID NO: 70025 - RNA, 19 nt, Artificial Sequence
  Synthetic
caugaugaugggaugggaa

SEQ ID NO: 70026 - RNA, 20 nt, Artificial Sequence
  Synthetic
ccaugaugaugggaugggaa

SEQ ID NO: 70027 - RNA, 21 nt, Artificial Sequence
  Synthetic
cccaugaugaugggaugggaa

SEQ ID NO: 70028 - RNA, 22 nt, Artificial Sequence
  Synthetic
gcccaugaugaugggaugggaa

SEQ ID NO: 70029 - RNA, 23 nt, Artificial Sequence
  Synthetic
agcccaugaugaugggaugggaa

SEQ ID NO: 70030 - RNA, 24 nt, Artificial Sequence
  Synthetic
aagcccaugaugaugggaugggaa

SEQ ID NO: 70031 - RNA, 18 nt, Artificial Sequence
  Synthetic
gaauacuaacauugggaa

SEQ ID NO: 70032 - RNA, 19 nt, Artificial Sequence
  Synthetic
ggaauacuaacauugggaa

SEQ ID NO: 70033 - RNA, 20 nt, Artificial Sequence
  Synthetic
aggaauacuaacauugggaa

SEQ ID NO: 70034 - RNA, 21 nt, Artificial Sequence
  Synthetic
aaggaauacuaacauugggaa

SEQ ID NO: 70035 - RNA, 22 nt, Artificial Sequence
  Synthetic
caaggaauacuaacauugggaa

SEQ ID NO: 70036 - RNA, 23 nt, Artificial Sequence
  Synthetic
ccaaggaauacuaacauugggaa

SEQ ID NO: 70037 - RNA, 24 nt, Artificial Sequence
  Synthetic
uccaaggaauacuaacauugggaa

SEQ ID NO: 70038 - RNA, 18 nt, Artificial Sequence
  Synthetic
ugguugaugauccuggaa

SEQ ID NO: 70039 - RNA, 19 nt, Artificial Sequence
  Synthetic
gugguugaugauccuggaa

SEQ ID NO: 70040 - RNA, 20 nt, Artificial Sequence
  Synthetic
ggugguugaugauccuggaa

SEQ ID NO: 70041 - RNA, 21 nt, Artificial Sequence
  Synthetic
uggugguugaugauccuggaa

SEQ ID NO: 70042 - RNA, 22 nt, Artificial Sequence
  Synthetic
cuggugguugaugauccuggaa

SEQ ID NO: 70043 - RNA, 23 nt, Artificial Sequence
  Synthetic
acuggugguugaugauccuggaa

SEQ ID NO: 70044 - RNA, 24 nt, Artificial Sequence
  Synthetic
uacuggugguugaugauccuggaa

SEQ ID NO: 70045 - RNA, 18 nt, Artificial Sequence
  Synthetic
ugaacaguaggacaugaa

SEQ ID NO: 70046 - RNA, 19 nt, Artificial Sequence
  Synthetic
uugaacaguaggacaugaa

SEQ ID NO: 70047 - RNA, 20 nt, Artificial Sequence
  Synthetic
cuugaacaguaggacaugaa

SEQ ID NO: 70048 - RNA, 21 nt, Artificial Sequence
  Synthetic
gcuugaacaguaggacaugaa

SEQ ID NO: 70049 - RNA, 22 nt, Artificial Sequence
  Synthetic
ggcuugaacaguaggacaugaa

SEQ ID NO: 70050 - RNA, 23 nt, Artificial Sequence
  Synthetic
aggcuugaacaguaggacaugaa

SEQ ID NO: 70051 - RNA, 24 nt, Artificial Sequence
  Synthetic
gaggcuugaacaguaggacaugaa

SEQ ID NO: 70052 - RNA, 18 nt, Artificial Sequence
  Synthetic
gcauagcagcaggaugaa

SEQ ID NO: 70053 - RNA, 19 nt, Artificial Sequence
  Synthetic
ggcauagcagcaggaugaa

SEQ ID NO: 70054 - RNA, 20 nt, Artificial Sequence
  Synthetic
aggcauagcagcaggaugaa

SEQ ID NO: 70055 - RNA, 21 nt, Artificial Sequence
  Synthetic
gaggcauagcagcaggaugaa

SEQ ID NO: 70056 - RNA, 22 nt, Artificial Sequence
  Synthetic
ugaggcauagcagcaggaugaa

SEQ ID NO: 70057 - RNA, 23 nt, Artificial Sequence
  Synthetic
augaggcauagcagcaggaugaa

SEQ ID NO: 70058 - RNA, 24 nt, Artificial Sequence
  Synthetic
gaugaggcauagcagcaggaugaa

SEQ ID NO: 70059 - RNA, 18 nt, Artificial Sequence
  Synthetic
agaagaucucuuacugaa

SEQ ID NO: 70060 - RNA, 19 nt, Artificial Sequence
  Synthetic
uagaagaucucuuacugaa

SEQ ID NO: 70061 - RNA, 20 nt, Artificial Sequence
  Synthetic
cuagaagaucucuuacugaa

SEQ ID NO: 70062 - RNA, 21 nt, Artificial Sequence
  Synthetic
ucuagaagaucucuuacugaa

SEQ ID NO: 70063 - RNA, 22 nt, Artificial Sequence
  Synthetic
aucuagaagaucucuuacugaa

SEQ ID NO: 70064 - RNA, 23 nt, Artificial Sequence
  Synthetic
uaucuagaagaucucuuacugaa

SEQ ID NO: 70065 - RNA, 24 nt, Artificial Sequence
  Synthetic
guaucuagaagaucucuuacugaa

SEQ ID NO: 70066 - RNA, 18 nt, Artificial Sequence
  Synthetic
gcgacgugcagaggugaa

SEQ ID NO: 70067 - RNA, 19 nt, Artificial Sequence
  Synthetic
ugcgacgugcagaggugaa

SEQ ID NO: 70068 - RNA, 20 nt, Artificial Sequence
  Synthetic
augcgacgugcagaggugaa

SEQ ID NO: 70069 - RNA, 21 nt, Artificial Sequence
  Synthetic
caugcgacgugcagaggugaa

SEQ ID NO: 70070 - RNA, 22 nt, Artificial Sequence
  Synthetic
ccaugcgacgugcagaggugaa

SEQ ID NO: 70071 - RNA, 23 nt, Artificial Sequence
  Synthetic
uccaugcgacgugcagaggugaa

SEQ ID NO: 70072 - RNA, 24 nt, Artificial Sequence
  Synthetic
cuccaugcgacgugcagaggugaa

SEQ ID NO: 70073 - RNA, 18 nt, Artificial Sequence
  Synthetic
  misc_feature (16)..(16): n is a, c, g, or u
gaauaaggugacccanaa

SEQ ID NO: 70074 - RNA, 19 nt, Artificial Sequence
  Synthetic
  misc_feature (17)..(17): n is a, c, g, or u
agaauaaggugacccanaa

SEQ ID NO: 70075 - RNA, 20 nt, Artificial Sequence
  Synthetic
  misc_feature (18)..(18): n is a, c, g, or u
aagaauaaggugacccanaa

SEQ ID NO: 70076 - RNA, 21 nt, Artificial Sequence
  Synthetic
  misc_feature (19)..(19): n is a, c, g, or u
caagaauaaggugacccanaa

SEQ ID NO: 70077 - RNA, 22 nt, Artificial Sequence
  Synthetic
  misc_feature (20)..(20): n is a, c, g, or u
ccaagaauaaggugacccanaa

SEQ ID NO: 70078 - RNA, 23 nt, Artificial Sequence
  Synthetic
  misc_feature (21)..(21): n is a, c, g, or u
cccaagaauaaggugacccanaa

SEQ ID NO: 70079 - RNA, 24 nt, Artificial Sequence
  Synthetic
  misc_feature (22)..(22): n is a, c, g, or u
ucccaagaauaaggugacccanaa

SEQ ID NO: 70080 - RNA, 18 nt, Artificial Sequence
  Synthetic
ucuuguucccaagaauaa

SEQ ID NO: 70081 - RNA, 19 nt, Artificial Sequence
  Synthetic
cucuuguucccaagaauaa

SEQ ID NO: 70082 - RNA, 20 nt, Artificial Sequence
  Synthetic
gcucuuguucccaagaauaa

SEQ ID NO: 70083 - RNA, 21 nt, Artificial Sequence
  Synthetic
agcucuuguucccaagaauaa

SEQ ID NO: 70084 - RNA, 22 nt, Artificial Sequence
  Synthetic
uagcucuuguucccaagaauaa

SEQ ID NO: 70085 - RNA, 23 nt, Artificial Sequence
  Synthetic
guagcucuuguucccaagaauaa

SEQ ID NO: 70086 - RNA, 24 nt, Artificial Sequence
  Synthetic
uguagcucuuguucccaagaauaa

SEQ ID NO: 70087 - RNA, 18 nt, Artificial Sequence
  Synthetic
cuccggaaguguugauaa

SEQ ID NO: 70088 - RNA, 19 nt, Artificial Sequence
  Synthetic
ucuccggaaguguugauaa

SEQ ID NO: 70089 - RNA, 20 nt, Artificial Sequence
  Synthetic
  misc_feature (1)..(1): n is a, c, g, or u
nucuccggaaguguugauaa

SEQ ID NO: 70090 - RNA, 21 nt, Artificial Sequence
  Synthetic
  misc_feature (2)..(2): n is a, c, g, or u
anucuccggaaguguugauaa

SEQ ID NO: 70091 - RNA, 22 nt, Artificial Sequence
  Synthetic
  misc_feature (3)..(3): n is a, c, g, or u
uanucuccggaaguguugauaa

SEQ ID NO: 70092 - RNA, 23 nt, Artificial Sequence
  Synthetic
  misc_feature (4)..(4): n is a, c, g, or u
guanucuccggaaguguugauaa

SEQ ID NO: 70093 - RNA, 24 nt, Artificial Sequence
  Synthetic
  misc_feature (5)..(5): n is a, c, g, or u
aguanucuccggaaguguugauaa

SEQ ID NO: 70094 - RNA, 18 nt, Artificial Sequence
  Synthetic
accacaucauccauauaa

SEQ ID NO: 70095 - RNA, 19 nt, Artificial Sequence
  Synthetic
uaccacaucauccauauaa

SEQ ID NO: 70096 - RNA, 20 nt, Artificial Sequence
  Synthetic
auaccacaucauccauauaa

SEQ ID NO: 70097 - RNA, 21 nt, Artificial Sequence
  Synthetic
aauaccacaucauccauauaa

SEQ ID NO: 70098 - RNA, 22 nt, Artificial Sequence
  Synthetic
caauaccacaucauccauauaa

SEQ ID NO: 70099 - RNA, 23 nt, Artificial Sequence
  Synthetic
ccaauaccacaucauccauauaa

SEQ ID NO: 70100 - RNA, 24 nt, Artificial Sequence
  Synthetic
cccaauaccacaucauccauauaa

SEQ ID NO: 70101 - RNA, 18 nt, Artificial Sequence
  Synthetic
gcauuugguggucuauaa

SEQ ID NO: 70102 - RNA, 19 nt, Artificial Sequence
  Synthetic
ggcauuugguggucuauaa

SEQ ID NO: 70103 - RNA, 20 nt, Artificial Sequence
  Synthetic
gggcauuugguggucuauaa

SEQ ID NO: 70104 - RNA, 21 nt, Artificial Sequence
  Synthetic
ggggcauuugguggucuauaa

SEQ ID NO: 70105 - RNA, 22 nt, Artificial Sequence
  Synthetic
aggggcauuugguggucuauaa

SEQ ID NO: 70106 - RNA, 23 nt, Artificial Sequence
  Synthetic
uaggggcauuugguggucuauaa

SEQ ID NO: 70107 - RNA, 24 nt, Artificial Sequence
  Synthetic
auaggggcauuugguggucuauaa

SEQ ID NO: 70108 - RNA, 18 nt, Artificial Sequence
  Synthetic
uugguaacagagguauaa

SEQ ID NO: 70109 - RNA, 19 nt, Artificial Sequence
  Synthetic
auugguaacagagguauaa

SEQ ID NO: 70110 - RNA, 20 nt, Artificial Sequence
  Synthetic
aauugguaacagagguauaa

SEQ ID NO: 70111 - RNA, 21 nt, Artificial Sequence
  Synthetic
aaauugguaacagagguauaa

SEQ ID NO: 70112 - RNA, 22 nt, Artificial Sequence
  Synthetic
aaaauugguaacagagguauaa

SEQ ID NO: 70113 - RNA, 23 nt, Artificial Sequence
  Synthetic
gaaaauugguaacagagguauaa

SEQ ID NO: 70114 - RNA, 24 nt, Artificial Sequence
  Synthetic
agaaaauugguaacagagguauaa

SEQ ID NO: 70115 - RNA, 18 nt, Artificial Sequence
  Synthetic
aacaaauggcacuaguaa

SEQ ID NO: 70116 - RNA, 19 nt, Artificial Sequence
  Synthetic
gaacaaauggcacuaguaa

SEQ ID NO: 70117 - RNA, 20 nt, Artificial Sequence
  Synthetic
ugaacaaauggcacuaguaa

SEQ ID NO: 70118 - RNA, 21 nt, Artificial Sequence
  Synthetic
cugaacaaauggcacuaguaa

SEQ ID NO: 70119 - RNA, 22 nt, Artificial Sequence
  Synthetic
acugaacaaauggcacuaguaa

SEQ ID NO: 70120 - RNA, 23 nt, Artificial Sequence
  Synthetic
cacugaacaaauggcacuaguaa

SEQ ID NO: 70121 - RNA, 24 nt, Artificial Sequence
  Synthetic
ccacugaacaaauggcacuaguaa

SEQ ID NO: 70122 - RNA, 18 nt, Artificial Sequence
  Synthetic
gacggggagaccgcguaa

SEQ ID NO: 70123 - RNA, 19 nt, Artificial Sequence
  Synthetic
agacggggagaccgcguaa

SEQ ID NO: 70124 - RNA, 20 nt, Artificial Sequence
  Synthetic
cagacggggagaccgcguaa

SEQ ID NO: 70125 - RNA, 21 nt, Artificial Sequence
  Synthetic
acagacggggagaccgcguaa

SEQ ID NO: 70126 - RNA, 22 nt, Artificial Sequence
  Synthetic
cacagacggggagaccgcguaa

SEQ ID NO: 70127 - RNA, 23 nt, Artificial Sequence
  Synthetic
gcacagacggggagaccgcguaa

SEQ ID NO: 70128 - RNA, 24 nt, Artificial Sequence
  Synthetic
ggcacagacggggagaccgcguaa

SEQ ID NO: 70129 - RNA, 18 nt, Artificial Sequence
  Synthetic
acaaaagaaaauugguaa

SEQ ID NO: 70130 - RNA, 19 nt, Artificial Sequence
  Synthetic
gacaaaagaaaauugguaa

SEQ ID NO: 70131 - RNA, 20 nt, Artificial Sequence
  Synthetic
agacaaaagaaaauugguaa

SEQ ID NO: 70132 - RNA, 21 nt, Artificial Sequence
  Synthetic
aagacaaaagaaaauugguaa

SEQ ID NO: 70133 - RNA, 22 nt, Artificial Sequence
  Synthetic
aaagacaaaagaaaauugguaa

SEQ ID NO: 70134 - RNA, 23 nt, Artificial Sequence
  Synthetic
caaagacaaaagaaaauugguaa

SEQ ID NO: 70135 - RNA, 24 nt, Artificial Sequence
  Synthetic
ccaaagacaaaagaaaauugguaa

SEQ ID NO: 70136 - RNA, 18 nt, Artificial Sequence
  Synthetic
gaaaaaccccgccuguaa

SEQ ID NO: 70137 - RNA, 19 nt, Artificial Sequence
  Synthetic
agaaaaaccccgccuguaa

SEQ ID NO: 70138 - RNA, 20 nt, Artificial Sequence
  Synthetic
aagaaaaaccccgccuguaa

SEQ ID NO: 70139 - RNA, 21 nt, Artificial Sequence
  Synthetic
caagaaaaaccccgccuguaa

SEQ ID NO: 70140 - RNA, 22 nt, Artificial Sequence
  Synthetic
acaagaaaaaccccgccuguaa

SEQ ID NO: 70141 - RNA, 23 nt, Artificial Sequence
  Synthetic
aacaagaaaaaccccgccuguaa

SEQ ID NO: 70142 - RNA, 24 nt, Artificial Sequence
  Synthetic
caacaagaaaaaccccgccuguaa

SEQ ID NO: 70143 - RNA, 18 nt, Artificial Sequence
  Synthetic
  misc_feature (5)..(5): n is a, c, g, or u
gauanccacauuguguaa

SEQ ID NO: 70144 - RNA, 19 nt, Artificial Sequence
  Synthetic
  misc_feature (6)..(6): n is a, c, g, or u
ggauanccacauuguguaa

SEQ ID NO: 70145 - RNA, 20 nt, Artificial Sequence
  Synthetic
  misc_feature (7)..(7): n is a, c, g, or u
aggauanccacauuguguaa

SEQ ID NO: 70146 - RNA, 21 nt, Artificial Sequence
  Synthetic
  misc_feature (8)..(8): n is a, c, g, or u
caggauanccacauuguguaa

SEQ ID NO: 70147 - RNA, 22 nt, Artificial Sequence
  Synthetic
  misc_feature (9)..(9): n is a, c, g, or u
gcaggauanccacauuguguaa

SEQ ID NO: 70148 - RNA, 23 nt, Artificial Sequence
  Synthetic
  misc_feature (10)..(10): n is a, c, g, or u
agcaggauanccacauuguguaa

SEQ ID NO: 70149 - RNA, 24 nt, Artificial Sequence
  Synthetic
  misc_feature (11)..(11): n is a, c, g, or u
aagcaggauanccacauuguguaa

SEQ ID NO: 70150 - RNA, 18 nt, Artificial Sequence
  Synthetic
cacagaaaggccuuguaa

SEQ ID NO: 70151 - RNA, 19 nt, Artificial Sequence
  Synthetic
acacagaaaggccuuguaa

SEQ ID NO: 70152 - RNA, 20 nt, Artificial Sequence
  Synthetic
uacacagaaaggccuuguaa

SEQ ID NO: 70153 - RNA, 21 nt, Artificial Sequence
  Synthetic
uuacacagaaaggccuuguaa

SEQ ID NO: 70154 - RNA, 22 nt, Artificial Sequence
  Synthetic
uuuacacagaaaggccuuguaa

SEQ ID NO: 70155 - RNA, 23 nt, Artificial Sequence
  Synthetic
guuuacacagaaaggccuuguaa

SEQ ID NO: 70156 - RNA, 24 nt, Artificial Sequence
  Synthetic
uguuuacacagaaaggccuuguaa

SEQ ID NO: 70157 - RNA, 18 nt, Artificial Sequence
  Synthetic
cgcauacagaggcauuaa

SEQ ID NO: 70158 - RNA, 19 nt, Artificial Sequence
  Synthetic
acgcauacagaggcauuaa

SEQ ID NO: 70159 - RNA, 20 nt, Artificial Sequence
  Synthetic
cacgcauacagaggcauuaa

SEQ ID NO: 70160 - RNA, 21 nt, Artificial Sequence
  Synthetic
acacgcauacagaggcauuaa

SEQ ID NO: 70161 - RNA, 22 nt, Artificial Sequence
  Synthetic
uacacgcauacagaggcauuaa

SEQ ID NO: 70162 - RNA, 23 nt, Artificial Sequence
  Synthetic
auacacgcauacagaggcauuaa

SEQ ID NO: 70163 - RNA, 24 nt, Artificial Sequence
  Synthetic
aauacacgcauacagaggcauuaa

SEQ ID NO: 70164 - RNA, 18 nt, Artificial Sequence
  Synthetic
  misc_feature (14)..(14): n is a, c, g, or u
aaucaauaggccgnuuaa

SEQ ID NO: 70165 - RNA, 19 nt, Artificial Sequence
  Synthetic
  misc_feature (15)..(15): n is a, c, g, or u
caaucaauaggccgnuuaa

SEQ ID NO: 70166 - RNA, 20 nt, Artificial Sequence
  Synthetic
  misc_feature (16)..(16): n is a, c, g, or u
ccaaucaauaggccgnuuaa

SEQ ID NO: 70167 - RNA, 21 nt, Artificial Sequence
  Synthetic
  misc_feature (17)..(17): n is a, c, g, or u
uccaaucaauaggccgnuuaa

SEQ ID NO: 70168 - RNA, 22 nt, Artificial Sequence
  Synthetic
  misc_feature (18)..(18): n is a, c, g, or u
uuccaaucaauaggccgnuuaa

SEQ ID NO: 70169 - RNA, 23 nt, Artificial Sequence
  Synthetic
  misc_feature (19)..(19): n is a, c, g, or u
uuuccaaucaauaggccgnuuaa

SEQ ID NO: 70170 - RNA, 24 nt, Artificial Sequence
  Synthetic
  misc_feature (20)..(20): n is a, c, g, or u
cuuuccaaucaauaggccgnuuaa

SEQ ID NO: 70171 - RNA, 18 nt, Artificial Sequence
  Synthetic
acuccucccagucuuuaa

SEQ ID NO: 70172 - RNA, 19 nt, Artificial Sequence
  Synthetic
  misc_feature (1)..(1): n is a, c, g, or u
nacuccucccagucuuuaa

SEQ ID NO: 70173 - RNA, 20 nt, Artificial Sequence
  Synthetic
  misc_feature (2)..(2): n is a, c, g, or u
cnacuccucccagucuuuaa

SEQ ID NO: 70174 - RNA, 21 nt, Artificial Sequence
  Synthetic
  misc_feature (3)..(3): n is a, c, g, or u
ccnacuccucccagucuuuaa

SEQ ID NO: 70175 - RNA, 22 nt, Artificial Sequence
  Synthetic
  misc_feature (4)..(4): n is a, c, g, or u
cccnacuccucccagucuuuaa

SEQ ID NO: 70176 - RNA, 23 nt, Artificial Sequence
  Synthetic
  misc_feature (5)..(5): n is a, c, g, or u
ccccnacuccucccagucuuuaa

SEQ ID NO: 70177 - RNA, 24 nt, Artificial Sequence
  Synthetic
  misc_feature (6)..(6): n is a, c, g, or u
cccccnacuccucccagucuuuaa

SEQ ID NO: 70178 - RNA, 18 nt, Artificial Sequence
  Synthetic
ccugcugcgagcaaaaca

SEQ ID NO: 70179 - RNA, 19 nt, Artificial Sequence
  Synthetic
accugcugcgagcaaaaca

SEQ ID NO: 70180 - RNA, 20 nt, Artificial Sequence
  Synthetic
gaccugcugcgagcaaaaca

SEQ ID NO: 70181 - RNA, 21 nt, Artificial Sequence
  Synthetic
agaccugcugcgagcaaaaca

SEQ ID NO: 70182 - RNA, 22 nt, Artificial Sequence
  Synthetic
cagaccugcugcgagcaaaaca

SEQ ID NO: 70183 - RNA, 23 nt, Artificial Sequence
  Synthetic
ccagaccugcugcgagcaaaaca

SEQ ID NO: 70184 - RNA, 24 nt, Artificial Sequence
  Synthetic
uccagaccugcugcgagcaaaaca

SEQ ID NO: 70185 - RNA, 18 nt, Artificial Sequence
  Synthetic
ggguugcaucagcaaaca

SEQ ID NO: 70186 - RNA, 19 nt, Artificial Sequence
  Synthetic
gggguugcaucagcaaaca

SEQ ID NO: 70187 - RNA, 20 nt, Artificial Sequence
  Synthetic
ggggguugcaucagcaaaca

SEQ ID NO: 70188 - RNA, 21 nt, Artificial Sequence
  Synthetic
uggggguugcaucagcaaaca

SEQ ID NO: 70189 - RNA, 22 nt, Artificial Sequence
  Synthetic
guggggguugcaucagcaaaca

SEQ ID NO: 70190 - RNA, 23 nt, Artificial Sequence
  Synthetic
aguggggguugcaucagcaaaca

SEQ ID NO: 70191 - RNA, 24 nt, Artificial Sequence
  Synthetic
caguggggguugcaucagcaaaca

SEQ ID NO: 70192 - RNA, 18 nt, Artificial Sequence
  Synthetic
agcaacaugagggaaaca

SEQ ID NO: 70193 - RNA, 19 nt, Artificial Sequence
  Synthetic
cagcaacaugagggaaaca

SEQ ID NO: 70194 - RNA, 20 nt, Artificial Sequence
  Synthetic
acagcaacaugagggaaaca

SEQ ID NO: 70195 - RNA, 21 nt, Artificial Sequence
  Synthetic
aacagcaacaugagggaaaca

SEQ ID NO: 70196 - RNA, 22 nt, Artificial Sequence
  Synthetic
gaacagcaacaugagggaaaca

SEQ ID NO: 70197 - RNA, 23 nt, Artificial Sequence
  Synthetic
ugaacagcaacaugagggaaaca

SEQ ID NO: 70198 - RNA, 24 nt, Artificial Sequence
  Synthetic
uugaacagcaacaugagggaaaca

SEQ ID NO: 70199 - RNA, 18 nt, Artificial Sequence
  Synthetic
aguccagaagaaccaaca

SEQ ID NO: 70200 - RNA, 19 nt, Artificial Sequence
  Synthetic
uaguccagaagaaccaaca

SEQ ID NO: 70201 - RNA, 20 nt, Artificial Sequence
  Synthetic
auaguccagaagaaccaaca

SEQ ID NO: 70202 - RNA, 21 nt, Artificial Sequence
  Synthetic
gauaguccagaagaaccaaca

SEQ ID NO: 70203 - RNA, 22 nt, Artificial Sequence
  Synthetic
ugauaguccagaagaaccaaca

SEQ ID NO: 70204 - RNA, 23 nt, Artificial Sequence
  Synthetic
uugauaguccagaagaaccaaca

SEQ ID NO: 70205 - RNA, 24 nt, Artificial Sequence
  Synthetic
cuugauaguccagaagaaccaaca

SEQ ID NO: 70206 - RNA, 18 nt, Artificial Sequence
  Synthetic
agguuuugaacagcaaca

SEQ ID NO: 70207 - RNA, 19 nt, Artificial Sequence
  Synthetic
aagguuuugaacagcaaca

SEQ ID NO: 70208 - RNA, 20 nt, Artificial Sequence
  Synthetic
gaagguuuugaacagcaaca

SEQ ID NO: 70209 - RNA, 21 nt, Artificial Sequence
  Synthetic
cgaagguuuugaacagcaaca

SEQ ID NO: 70210 - RNA, 22 nt, Artificial Sequence
  Synthetic
ccgaagguuuugaacagcaaca

SEQ ID NO: 70211 - RNA, 23 nt, Artificial Sequence
  Synthetic
uccgaagguuuugaacagcaaca

SEQ ID NO: 70212 - RNA, 24 nt, Artificial Sequence
  Synthetic
guccgaagguuuugaacagcaaca

SEQ ID NO: 70213 - RNA, 18 nt, Artificial Sequence
  Synthetic
ugaggauuuuugucaaca

SEQ ID NO: 70214 - RNA, 19 nt, Artificial Sequence
  Synthetic
gugaggauuuuugucaaca

SEQ ID NO: 70215 - RNA, 20 nt, Artificial Sequence
  Synthetic
ugugaggauuuuugucaaca

SEQ ID NO: 70216 - RNA, 21 nt, Artificial Sequence
  Synthetic
uugugaggauuuuugucaaca

SEQ ID NO: 70217 - RNA, 22 nt, Artificial Sequence
  Synthetic
auugugaggauuuuugucaaca

SEQ ID NO: 70218 - RNA, 23 nt, Artificial Sequence
  Synthetic
uauugugaggauuuuugucaaca

SEQ ID NO: 70219 - RNA, 24 nt, Artificial Sequence
  Synthetic
guauugugaggauuuuugucaaca

SEQ ID NO: 70220 - RNA, 18 nt, Artificial Sequence
  Synthetic
ccggcgaaccacugaaca

SEQ ID NO: 70221 - RNA, 19 nt, Artificial Sequence
  Synthetic
cccggcgaaccacugaaca

SEQ ID NO: 70222 - RNA, 20 nt, Artificial Sequence
  Synthetic
gcccggcgaaccacugaaca

SEQ ID NO: 70223 - RNA, 18 nt, Artificial Sequence
  Synthetic
agcuuggaggcuugaaca

SEQ ID NO: 70224 - RNA, 19 nt, Artificial Sequence
  Synthetic
cagcuuggaggcuugaaca

SEQ ID NO: 70225 - RNA, 20 nt, Artificial Sequence
  Synthetic
acagcuuggaggcuugaaca

SEQ ID NO: 70226 - RNA, 21 nt, Artificial Sequence
  Synthetic
cacagcuuggaggcuugaaca

SEQ ID NO: 70227 - RNA, 22 nt, Artificial Sequence
  Synthetic
gcacagcuuggaggcuugaaca

SEQ ID NO: 70228 - RNA, 23 nt, Artificial Sequence
  Synthetic
ggcacagcuuggaggcuugaaca

SEQ ID NO: 70229 - RNA, 24 nt, Artificial Sequence
  Synthetic
aggcacagcuuggaggcuugaaca

SEQ ID NO: 70230 - RNA, 18 nt, Artificial Sequence
  Synthetic
guccaaggaauacuaaca

SEQ ID NO: 70231 - RNA, 19 nt, Artificial Sequence
  Synthetic
aguccaaggaauacuaaca

SEQ ID NO: 70232 - RNA, 20 nt, Artificial Sequence
  Synthetic
gaguccaaggaauacuaaca

SEQ ID NO: 70233 - RNA, 21 nt, Artificial Sequence
  Synthetic
ugaguccaaggaauacuaaca

SEQ ID NO: 70234 - RNA, 22 nt, Artificial Sequence
  Synthetic
gugaguccaaggaauacuaaca

SEQ ID NO: 70235 - RNA, 23 nt, Artificial Sequence
  Synthetic
ugugaguccaaggaauacuaaca

SEQ ID NO: 70236 - RNA, 24 nt, Artificial Sequence
  Synthetic
uugugaguccaaggaauacuaaca

SEQ ID NO: 70237 - RNA, 18 nt, Artificial Sequence
  Synthetic
aauuuuggccaagacaca

SEQ ID NO: 70238 - RNA, 19 nt, Artificial Sequence
  Synthetic
gaauuuuggccaagacaca

SEQ ID NO: 70239 - RNA, 20 nt, Artificial Sequence
  Synthetic
cgaauuuuggccaagacaca

SEQ ID NO: 70240 - RNA, 21 nt, Artificial Sequence
  Synthetic
gcgaauuuuggccaagacaca

SEQ ID NO: 70241 - RNA, 22 nt, Artificial Sequence
  Synthetic
ugcgaauuuuggccaagacaca

SEQ ID NO: 70242 - RNA, 23 nt, Artificial Sequence
  Synthetic
cugcgaauuuuggccaagacaca

SEQ ID NO: 70243 - RNA, 24 nt, Artificial Sequence
  Synthetic
acugcgaauuuuggccaagacaca

SEQ ID NO: 70244 - RNA, 18 nt, Artificial Sequence
  Synthetic
uaaaacgccgcagacaca

SEQ ID NO: 70245 - RNA, 19 nt, Artificial Sequence
  Synthetic
auaaaacgccgcagacaca

SEQ ID NO: 70246 - RNA, 20 nt, Artificial Sequence
  Synthetic
gauaaaacgccgcagacaca

SEQ ID NO: 70247 - RNA, 21 nt, Artificial Sequence
  Synthetic
ugauaaaacgccgcagacaca

SEQ ID NO: 70248 - RNA, 22 nt, Artificial Sequence
  Synthetic
augauaaaacgccgcagacaca

SEQ ID NO: 70249 - RNA, 23 nt, Artificial Sequence
  Synthetic
gaugauaaaacgccgcagacaca

SEQ ID NO: 70250 - RNA, 24 nt, Artificial Sequence
  Synthetic
agaugauaaaacgccgcagacaca

SEQ ID NO: 70251 - RNA, 18 nt, Artificial Sequence
  Synthetic
  misc_feature (4)..(5): n is a, c, g, or u
ucannuauuguuuacaca

SEQ ID NO: 70252 - RNA, 19 nt, Artificial Sequence
  Synthetic
  misc_feature (5)..(6): n is a, c, g, or u
uucannuauuguuuacaca

SEQ ID NO: 70253 - RNA, 20 nt, Artificial Sequence
  Synthetic
  misc_feature (6)..(7): n is a, c, g, or u
guucannuauuguuuacaca

SEQ ID NO: 70254 - RNA, 21 nt, Artificial Sequence
  Synthetic
  misc_feature (7)..(8): n is a, c, g, or u
gguucannuauuguuuacaca

SEQ ID NO: 70255 - RNA, 22 nt, Artificial Sequence
  Synthetic
  misc_feature (8)..(9): n is a, c, g, or u
agguucannuauuguuuacaca

SEQ ID NO: 70256 - RNA, 23 nt, Artificial Sequence
  Synthetic
  misc_feature (9)..(10): n is a, c, g, or u
aagguucannuauuguuuacaca

SEQ ID NO: 70257 - RNA, 24 nt, Artificial Sequence
  Synthetic
  misc_feature (10)..(11): n is a, c, g, or u
aaagguucannuauuguuuacaca

SEQ ID NO: 70258 - RNA, 18 nt, Artificial Sequence
  Synthetic
ggcagaugagaaggcaca

SEQ ID NO: 70259 - RNA, 19 nt, Artificial Sequence
  Synthetic
cggcagaugagaaggcaca

SEQ ID NO: 70260 - RNA, 20 nt, Artificial Sequence
  Synthetic
ccggcagaugagaaggcaca

SEQ ID NO: 70261 - RNA, 21 nt, Artificial Sequence
  Synthetic
uccggcagaugagaaggcaca

SEQ ID NO: 70262 - RNA, 22 nt, Artificial Sequence
  Synthetic
guccggcagaugagaaggcaca

SEQ ID NO: 70263 - RNA, 23 nt, Artificial Sequence
  Synthetic
gguccggcagaugagaaggcaca

SEQ ID NO: 70264 - RNA, 24 nt, Artificial Sequence
  Synthetic
cgguccggcagaugagaaggcaca

SEQ ID NO: 70265 - RNA, 18 nt, Artificial Sequence
  Synthetic
aauguauacccaaagaca

SEQ ID NO: 70266 - RNA, 19 nt, Artificial Sequence
  Synthetic
aaauguauacccaaagaca

SEQ ID NO: 70267 - RNA, 20 nt, Artificial Sequence
  Synthetic
uaaauguauacccaaagaca

SEQ ID NO: 70268 - RNA, 21 nt, Artificial Sequence
  Synthetic
uuaaauguauacccaaagaca

SEQ ID NO: 70269 - RNA, 22 nt, Artificial Sequence
  Synthetic
uuuaaauguauacccaaagaca

SEQ ID NO: 70270 - RNA, 23 nt, Artificial Sequence
  Synthetic
auuuaaauguauacccaaagaca

SEQ ID NO: 70271 - RNA, 24 nt, Artificial Sequence
  Synthetic
gauuuaaauguauacccaaagaca

SEQ ID NO: 70272 - RNA, 18 nt, Artificial Sequence
  Synthetic
cgaauuuuggccaagaca

SEQ ID NO: 70273 - RNA, 19 nt, Artificial Sequence
  Synthetic
gcgaauuuuggccaagaca

SEQ ID NO: 70274 - RNA, 20 nt, Artificial Sequence
  Synthetic
ugcgaauuuuggccaagaca

SEQ ID NO: 70275 - RNA, 21 nt, Artificial Sequence
  Synthetic
cugcgaauuuuggccaagaca

SEQ ID NO: 70276 - RNA, 22 nt, Artificial Sequence
  Synthetic
acugcgaauuuuggccaagaca

SEQ ID NO: 70277 - RNA, 23 nt, Artificial Sequence
  Synthetic
gacugcgaauuuuggccaagaca

SEQ ID NO: 70278 - RNA, 24 nt, Artificial Sequence
  Synthetic
ggacugcgaauuuuggccaagaca

SEQ ID NO: 70279 - RNA, 18 nt, Artificial Sequence
  Synthetic
auaacugaaagccagaca

SEQ ID NO: 70280 - RNA, 19 nt, Artificial Sequence
  Synthetic
uauaacugaaagccagaca

SEQ ID NO: 70281 - RNA, 20 nt, Artificial Sequence
  Synthetic
auauaacugaaagccagaca

SEQ ID NO: 70282 - RNA, 21 nt, Artificial Sequence
  Synthetic
cauauaacugaaagccagaca

SEQ ID NO: 70283 - RNA, 22 nt, Artificial Sequence
  Synthetic
ccauauaacugaaagccagaca

SEQ ID NO: 70284 - RNA, 23 nt, Artificial Sequence
  Synthetic
uccauauaacugaaagccagaca

SEQ ID NO: 70285 - RNA, 24 nt, Artificial Sequence
  Synthetic
auccauauaacugaaagccagaca

SEQ ID NO: 70286 - RNA, 18 nt, Artificial Sequence
  Synthetic
gcugacgggacguagaca

SEQ ID NO: 70287 - RNA, 19 nt, Artificial Sequence
  Synthetic
cgcugacgggacguagaca

SEQ ID NO: 70288 - RNA, 20 nt, Artificial Sequence
  Synthetic
gcgcugacgggacguagaca

SEQ ID NO: 70289 - RNA, 18 nt, Artificial Sequence
  Synthetic
uccuggaauuagaggaca

SEQ ID NO: 70290 - RNA, 19 nt, Artificial Sequence
  Synthetic
auccuggaauuagaggaca

SEQ ID NO: 70291 - RNA, 20 nt, Artificial Sequence
  Synthetic
gauccuggaauuagaggaca

SEQ ID NO: 70292 - RNA, 21 nt, Artificial Sequence
  Synthetic
ugauccuggaauuagaggaca

SEQ ID NO: 70293 - RNA, 22 nt, Artificial Sequence
  Synthetic
augauccuggaauuagaggaca

SEQ ID NO: 70294 - RNA, 23 nt, Artificial Sequence
  Synthetic
gaugauccuggaauuagaggaca

SEQ ID NO: 70295 - RNA, 24 nt, Artificial Sequence
  Synthetic
ugaugauccuggaauuagaggaca

SEQ ID NO: 70296 - RNA, 18 nt, Artificial Sequence
  Synthetic
  misc_feature (6)..(7): n is a, c, g, or u
guucannuauuguuuaca

SEQ ID NO: 70297 - RNA, 19 nt, Artificial Sequence
  Synthetic
  misc_feature (7)..(8): n is a, c, g, or u
gguucannuauuguuuaca

SEQ ID NO: 70298 - RNA, 20 nt, Artificial Sequence
  Synthetic
  misc_feature (8)..(9): n is a, c, g, or u
agguucannuauuguuuaca

SEQ ID NO: 70299 - RNA, 21 nt, Artificial Sequence
  Synthetic
  misc_feature (9)..(10): n is a, c, g, or u
aagguucannuauuguuuaca

SEQ ID NO: 70300 - RNA, 22 nt, Artificial Sequence
  Synthetic
  misc_feature (10)..(11): n is a, c, g, or u
aaagguucannuauuguuuaca

SEQ ID NO: 70301 - RNA, 23 nt, Artificial Sequence
  Synthetic
  misc_feature (11)..(12): n is a, c, g, or u
uaaagguucannuauuguuuaca

SEQ ID NO: 70302 - RNA, 24 nt, Artificial Sequence
  Synthetic
  misc_feature (12)..(13): n is a, c, g, or u
guaaagguucannuauuguuuaca

SEQ ID NO: 70303 - RNA, 18 nt, Artificial Sequence
  Synthetic
gauaguccagaagaacca

SEQ ID NO: 70304 - RNA, 19 nt, Artificial Sequence
  Synthetic
ugauaguccagaagaacca

SEQ ID NO: 70305 - RNA, 20 nt, Artificial Sequence
  Synthetic
uugauaguccagaagaacca

SEQ ID NO: 70306 - RNA, 21 nt, Artificial Sequence
  Synthetic
cuugauaguccagaagaacca

SEQ ID NO: 70307 - RNA, 22 nt, Artificial Sequence
  Synthetic
ccuugauaguccagaagaacca

SEQ ID NO: 70308 - RNA, 23 nt, Artificial Sequence
  Synthetic
accuugauaguccagaagaacca

SEQ ID NO: 70309 - RNA, 24 nt, Artificial Sequence
  Synthetic
uaccuugauaguccagaagaacca

SEQ ID NO: 70310 - RNA, 18 nt, Artificial Sequence
  Synthetic
ggaaagcccggcgaacca

SEQ ID NO: 70311 - RNA, 19 nt, Artificial Sequence
  Synthetic
gggaaagcccggcgaacca

SEQ ID NO: 70312 - RNA, 20 nt, Artificial Sequence
  Synthetic
ggggaaagcccggcgaacca

SEQ ID NO: 70313 - RNA, 21 nt, Artificial Sequence
  Synthetic
gggggaaagcccggcgaacca

SEQ ID NO: 70314 - RNA, 22 nt, Artificial Sequence
  Synthetic
ugggggaaagcccggcgaacca

SEQ ID NO: 70315 - RNA, 23 nt, Artificial Sequence
  Synthetic
gugggggaaagcccggcgaacca

SEQ ID NO: 70316 - RNA, 24 nt, Artificial Sequence
  Synthetic
agugggggaaagcccggcgaacca

SEQ ID NO: 70317 - RNA, 18 nt, Artificial Sequence
  Synthetic
ccggaacuggagccacca

SEQ ID NO: 70318 - RNA, 19 nt, Artificial Sequence
  Synthetic
uccggaacuggagccacca

SEQ ID NO: 70319 - RNA, 20 nt, Artificial Sequence
  Synthetic
uuccggaacuggagccacca

SEQ ID NO: 70320 - RNA, 21 nt, Artificial Sequence
  Synthetic
guuccggaacuggagccacca

SEQ ID NO: 70321 - RNA, 22 nt, Artificial Sequence
  Synthetic
uguuccggaacuggagccacca

SEQ ID NO: 70322 - RNA, 23 nt, Artificial Sequence
  Synthetic
cuguuccggaacuggagccacca

SEQ ID NO: 70323 - RNA, 24 nt, Artificial Sequence
  Synthetic
acuguuccggaacuggagccacca

SEQ ID NO: 70324 - RNA, 18 nt, Artificial Sequence
  Synthetic
  misc_feature (8)..(8): n is a, c, g, or u
caaauuuncacccaccca

SEQ ID NO: 70325 - RNA, 19 nt, Artificial Sequence
  Synthetic
  misc_feature (9)..(9): n is a, c, g, or u
ccaaauuuncacccaccca

SEQ ID NO: 70326 - RNA, 20 nt, Artificial Sequence
  Synthetic
  misc_feature (10)..(10): n is a, c, g, or u
uccaaauuuncacccaccca

SEQ ID NO: 70327 - RNA, 21 nt, Artificial Sequence
  Synthetic
  misc_feature (11)..(11): n is a, c, g, or u
uuccaaauuuncacccaccca

SEQ ID NO: 70328 - RNA, 22 nt, Artificial Sequence
  Synthetic
  misc_feature (12)..(12): n is a, c, g, or u
cuuccaaauuuncacccaccca

SEQ ID NO: 70329 - RNA, 23 nt, Artificial Sequence
  Synthetic
  misc_feature (13)..(13): n is a, c, g, or u
ucuuccaaauuuncacccaccca

SEQ ID NO: 70330 - RNA, 24 nt, Artificial Sequence
  Synthetic
  misc_feature (14)..(14): n is a, c, g, or u
aucuuccaaauuuncacccaccca

SEQ ID NO: 70331 - RNA, 18 nt, Artificial Sequence
  Synthetic
  misc_feature (12)..(12): n is a, c, g, or u
cuuccaaauuuncaccca

SEQ ID NO: 70332 - RNA, 19 nt, Artificial Sequence
  Synthetic
  misc_feature (13)..(13): n is a, c, g, or u
ucuuccaaauuuncaccca

SEQ ID NO: 70333 - RNA, 20 nt, Artificial Sequence
  Synthetic
  misc_feature (14)..(14): n is a, c, g, or u
aucuuccaaauuuncaccca

SEQ ID NO: 70334 - RNA, 21 nt, Artificial Sequence
  Synthetic
  misc_feature (15)..(15): n is a, c, g, or u
gaucuuccaaauuuncaccca

SEQ ID NO: 70335 - RNA, 22 nt, Artificial Sequence
  Synthetic
  misc_feature (16)..(16): n is a, c, g, or u
ggaucuuccaaauuuncaccca

SEQ ID NO: 70336 - RNA, 23 nt, Artificial Sequence
  Synthetic
  misc_feature (17)..(17): n is a, c, g, or u
uggaucuuccaaauuuncaccca

SEQ ID NO: 70337 - RNA, 24 nt, Artificial Sequence
  Synthetic
  misc_feature (18)..(18): n is a, c, g, or u
cuggaucuuccaaauuuncaccca

SEQ ID NO: 70338 - RNA, 18 nt, Artificial Sequence
  Synthetic
ccugagggcuccacccca

SEQ ID NO: 70339 - RNA, 19 nt, Artificial Sequence
  Synthetic
gccugagggcuccacccca

SEQ ID NO: 70340 - RNA, 20 nt, Artificial Sequence
  Synthetic
agccugagggcuccacccca

SEQ ID NO: 70341 - RNA, 21 nt, Artificial Sequence
  Synthetic
gagccugagggcuccacccca

SEQ ID NO: 70342 - RNA, 22 nt, Artificial Sequence
  Synthetic
ugagccugagggcuccacccca

SEQ ID NO: 70343 - RNA, 23 nt, Artificial Sequence
  Synthetic
uugagccugagggcuccacccca

SEQ ID NO: 70344 - RNA, 24 nt, Artificial Sequence
  Synthetic
cuugagccugagggcuccacccca

SEQ ID NO: 70345 - RNA, 18 nt, Artificial Sequence
  Synthetic
  misc_feature (9)..(10): n is a, c, g, or u
agucauuannucccccca

SEQ ID NO: 70346 - RNA, 19 nt, Artificial Sequence
  Synthetic
  misc_feature (10)..(11): n is a, c, g, or u
gagucauuannucccccca

SEQ ID NO: 70347 - RNA, 20 nt, Artificial Sequence
  Synthetic
  misc_feature (11)..(12): n is a, c, g, or u
agagucauuannucccccca

SEQ ID NO: 70348 - RNA, 21 nt, Artificial Sequence
  Synthetic
  misc_feature (12)..(13): n is a, c, g, or u
uagagucauuannucccccca

SEQ ID NO: 70349 - RNA, 22 nt, Artificial Sequence
  Synthetic
  misc_feature (13)..(14): n is a, c, g, or u
cuagagucauuannucccccca

SEQ ID NO: 70350 - RNA, 23 nt, Artificial Sequence
  Synthetic
  misc_feature (14)..(15): n is a, c, g, or u
gcuagagucauuannucccccca

SEQ ID NO: 70351 - RNA, 24 nt, Artificial Sequence
  Synthetic
  misc_feature (15)..(16): n is a, c, g, or u
agcuagagucauuannucccccca

SEQ ID NO: 70352 - RNA, 18 nt, Artificial Sequence
  Synthetic
ggaaugauucuuccccca

SEQ ID NO: 70353 - RNA, 19 nt, Artificial Sequence
  Synthetic
uggaaugauucuuccccca

SEQ ID NO: 70354 - RNA, 20 nt, Artificial Sequence
  Synthetic
guggaaugauucuuccccca

SEQ ID NO: 70355 - RNA, 21 nt, Artificial Sequence
  Synthetic
gguggaaugauucuuccccca

SEQ ID NO: 70356 - RNA, 22 nt, Artificial Sequence
  Synthetic
ugguggaaugauucuuccccca

SEQ ID NO: 70357 - RNA, 23 nt, Artificial Sequence
  Synthetic
gugguggaaugauucuuccccca

SEQ ID NO: 70358 - RNA, 24 nt, Artificial Sequence
  Synthetic
ggugguggaaugauucuuccccca

SEQ ID NO: 70359 - RNA, 18 nt, Artificial Sequence
  Synthetic
  misc_feature (9)..(9): n is a, c, g, or u
  misc_feature (13)..(13): n is a, c, g, or u
ggggacganagancccca

SEQ ID NO: 70360 - RNA, 19 nt, Artificial Sequence
  Synthetic
  misc_feature (10)..(10): n is a, c, g, or u
  misc_feature (14)..(14): n is a, c, g, or u
aggggacganagancccca

SEQ ID NO: 70361 - RNA, 20 nt, Artificial Sequence
  Synthetic
  misc_feature (11)..(11): n is a, c, g, or u
  misc_feature (15)..(15): n is a, c, g, or u
aaggggacganagancccca

SEQ ID NO: 70362 - RNA, 21 nt, Artificial Sequence
  Synthetic
  misc_feature (12)..(12): n is a, c, g, or u
  misc_feature (16)..(16): n is a, c, g, or u
gaaggggacganagancccca

SEQ ID NO: 70363 - RNA, 22 nt, Artificial Sequence
  Synthetic
  misc_feature (13)..(13): n is a, c, g, or u
  misc_feature (17)..(17): n is a, c, g, or u
agaaggggacganagancccca

SEQ ID NO: 70364 - RNA, 23 nt, Artificial Sequence
  Synthetic
  misc_feature (14)..(14): n is a, c, g, or u
  misc_feature (18)..(18): n is a, c, g, or u
gagaaggggacganagancccca

SEQ ID NO: 70365 - RNA, 24 nt, Artificial Sequence
  Synthetic
  misc_feature (15)..(15): n is a, c, g, or u
  misc_feature (19)..(19): n is a, c, g, or u
ggagaaggggacganagancccca

SEQ ID NO: 70366 - RNA, 18 nt, Artificial Sequence
  Synthetic
aaggggcagcaaagccca

SEQ ID NO: 70367 - RNA, 19 nt, Artificial Sequence
  Synthetic
aaaggggcagcaaagccca

SEQ ID NO: 70368 - RNA, 20 nt, Artificial Sequence
  Synthetic
aaaaggggcagcaaagccca

SEQ ID NO: 70369 - RNA, 21 nt, Artificial Sequence
  Synthetic
uaaaaggggcagcaaagccca

SEQ ID NO: 70370 - RNA, 22 nt, Artificial Sequence
  Synthetic
guaaaaggggcagcaaagccca

SEQ ID NO: 70371 - RNA, 23 nt, Artificial Sequence
  Synthetic
uguaaaaggggcagcaaagccca

SEQ ID NO: 70372 - RNA, 24 nt, Artificial Sequence
  Synthetic
guguaaaaggggcagcaaagccca

SEQ ID NO: 70373 - RNA, 18 nt, Artificial Sequence
  Synthetic
ggcugaggcccacuccca

SEQ ID NO: 70374 - RNA, 19 nt, Artificial Sequence
  Synthetic
gggcugaggcccacuccca

SEQ ID NO: 70375 - RNA, 20 nt, Artificial Sequence
  Synthetic
cgggcugaggcccacuccca

SEQ ID NO: 70376 - RNA, 21 nt, Artificial Sequence
  Synthetic
acgggcugaggcccacuccca

SEQ ID NO: 70377 - RNA, 22 nt, Artificial Sequence
  Synthetic
aacgggcugaggcccacuccca

SEQ ID NO: 70378 - RNA, 23 nt, Artificial Sequence
  Synthetic
aaacgggcugaggcccacuccca

SEQ ID NO: 70379 - RNA, 24 nt, Artificial Sequence
  Synthetic
gaaacgggcugaggcccacuccca

SEQ ID NO: 70380 - RNA, 18 nt, Artificial Sequence
  Synthetic
  misc_feature (8)..(8): n is a, c, g, or u
  misc_feature (11)..(11): n is a, c, g, or u
guccaugnccnaaagcca

SEQ ID NO: 70381 - RNA, 19 nt, Artificial Sequence
  Synthetic
  misc_feature (9)..(9): n is a, c, g, or u
  misc_feature (12)..(12): n is a, c, g, or u
uguccaugnccnaaagcca

SEQ ID NO: 70382 - RNA, 20 nt, Artificial Sequence
  Synthetic
  misc_feature (10)..(10): n is a, c, g, or u
  misc_feature (13)..(13): n is a, c, g, or u
auguccaugnccnaaagcca

SEQ ID NO: 70383 - RNA, 21 nt, Artificial Sequence
  Synthetic
  misc_feature (11)..(11): n is a, c, g, or u
  misc_feature (14)..(14): n is a, c, g, or u
aauguccaugnccnaaagcca

SEQ ID NO: 70384 - RNA, 22 nt, Artificial Sequence
  Synthetic
  misc_feature (12)..(12): n is a, c, g, or u
  misc_feature (15)..(15): n is a, c, g, or u
caauguccaugnccnaaagcca

SEQ ID NO: 70385 - RNA, 23 nt, Artificial Sequence
  Synthetic
  misc_feature (13)..(13): n is a, c, g, or u
  misc_feature (16)..(16): n is a, c, g, or u
ucaauguccaugnccnaaagcca

SEQ ID NO: 70386 - RNA, 24 nt, Artificial Sequence
  Synthetic
  misc_feature (14)..(14): n is a, c, g, or u
  misc_feature (17)..(17): n is a, c, g, or u
gucaauguccaugnccnaaagcca

SEQ ID NO: 70387 - RNA, 18 nt, Artificial Sequence
  Synthetic
auggccaagccccagcca

SEQ ID NO: 70388 - RNA, 19 nt, Artificial Sequence
  Synthetic
uauggccaagccccagcca

SEQ ID NO: 70389 - RNA, 20 nt, Artificial Sequence
  Synthetic
cuauggccaagccccagcca

SEQ ID NO: 70390 - RNA, 21 nt, Artificial Sequence
  Synthetic
ccuauggccaagccccagcca

SEQ ID NO: 70391 - RNA, 22 nt, Artificial Sequence
  Synthetic
gccuauggccaagccccagcca

SEQ ID NO: 70392 - RNA, 23 nt, Artificial Sequence
  Synthetic
ggccuauggccaagccccagcca

SEQ ID NO: 70393 - RNA, 24 nt, Artificial Sequence
  Synthetic
uggccuauggccaagccccagcca

SEQ ID NO: 70394 - RNA, 18 nt, Artificial Sequence
  Synthetic
agcacagccuagcagcca

SEQ ID NO: 70395 - RNA, 19 nt, Artificial Sequence
  Synthetic
cagcacagccuagcagcca

SEQ ID NO: 70396 - RNA, 20 nt, Artificial Sequence
  Synthetic
gcagcacagccuagcagcca

SEQ ID NO: 70397 - RNA, 21 nt, Artificial Sequence
  Synthetic
ggcagcacagccuagcagcca

SEQ ID NO: 70398 - RNA, 22 nt, Artificial Sequence
  Synthetic
uggcagcacagccuagcagcca

SEQ ID NO: 70399 - RNA, 23 nt, Artificial Sequence
  Synthetic
uuggcagcacagccuagcagcca

SEQ ID NO: 70400 - RNA, 24 nt, Artificial Sequence
  Synthetic
guuggcagcacagccuagcagcca

SEQ ID NO: 70401 - RNA, 18 nt, Artificial Sequence
  Synthetic
ggaucggcagaggagcca

SEQ ID NO: 70402 - RNA, 19 nt, Artificial Sequence
  Synthetic
uggaucggcagaggagcca

SEQ ID NO: 70403 - RNA, 20 nt, Artificial Sequence
  Synthetic
auggaucggcagaggagcca

SEQ ID NO: 70404 - RNA, 21 nt, Artificial Sequence
  Synthetic
uauggaucggcagaggagcca

SEQ ID NO: 70405 - RNA, 22 nt, Artificial Sequence
  Synthetic
guauggaucggcagaggagcca

SEQ ID NO: 70406 - RNA, 23 nt, Artificial Sequence
  Synthetic
aguauggaucggcagaggagcca

SEQ ID NO: 70407 - RNA, 24 nt, Artificial Sequence
  Synthetic
caguauggaucggcagaggagcca

SEQ ID NO: 70408 - RNA, 18 nt, Artificial Sequence
  Synthetic
cacuaguaaacugagcca

SEQ ID NO: 70409 - RNA, 19 nt, Artificial Sequence
  Synthetic
gcacuaguaaacugagcca

SEQ ID NO: 70410 - RNA, 20 nt, Artificial Sequence
  Synthetic
ggcacuaguaaacugagcca

SEQ ID NO: 70411 - RNA, 21 nt, Artificial Sequence
  Synthetic
uggcacuaguaaacugagcca

SEQ ID NO: 70412 - RNA, 22 nt, Artificial Sequence
  Synthetic
auggcacuaguaaacugagcca

SEQ ID NO: 70413 - RNA, 23 nt, Artificial Sequence
  Synthetic
aauggcacuaguaaacugagcca

SEQ ID NO: 70414 - RNA, 24 nt, Artificial Sequence
  Synthetic
aaauggcacuaguaaacugagcca

SEQ ID NO: 70415 - RNA, 18 nt, Artificial Sequence
  Synthetic
ccaauaccacaucaucca

SEQ ID NO: 70416 - RNA, 19 nt, Artificial Sequence
  Synthetic
cccaauaccacaucaucca

SEQ ID NO: 70417 - RNA, 20 nt, Artificial Sequence
  Synthetic
ccccaauaccacaucaucca

SEQ ID NO: 70418 - RNA, 21 nt, Artificial Sequence
  Synthetic
cccccaauaccacaucaucca

SEQ ID NO: 70419 - RNA, 22 nt, Artificial Sequence
  Synthetic
gcccccaauaccacaucaucca

SEQ ID NO: 70420 - RNA, 23 nt, Artificial Sequence
  Synthetic
ggcccccaauaccacaucaucca

SEQ ID NO: 70421 - RNA, 24 nt, Artificial Sequence
  Synthetic
uggcccccaauaccacaucaucca

SEQ ID NO: 70422 - RNA, 18 nt, Artificial Sequence
  Synthetic
cgucccucgcaggaucca

SEQ ID NO: 70423 - RNA, 19 nt, Artificial Sequence
  Synthetic
acgucccucgcaggaucca

SEQ ID NO: 70424 - RNA, 20 nt, Artificial Sequence
  Synthetic
gacgucccucgcaggaucca

SEQ ID NO: 70425 - RNA, 21 nt, Artificial Sequence
  Synthetic
ggacgucccucgcaggaucca

SEQ ID NO: 70426 - RNA, 22 nt, Artificial Sequence
  Synthetic
aggacgucccucgcaggaucca

SEQ ID NO: 70427 - RNA, 23 nt, Artificial Sequence
  Synthetic
aaggacgucccucgcaggaucca

SEQ ID NO: 70428 - RNA, 24 nt, Artificial Sequence
  Synthetic
aaaggacgucccucgcaggaucca

SEQ ID NO: 70429 - RNA, 18 nt, Artificial Sequence
  Synthetic
gugcgaauccacacucca

SEQ ID NO: 70430 - RNA, 19 nt, Artificial Sequence
  Synthetic
agugcgaauccacacucca

SEQ ID NO: 70431 - RNA, 20 nt, Artificial Sequence
  Synthetic
gagugcgaauccacacucca

SEQ ID NO: 70432 - RNA, 21 nt, Artificial Sequence
  Synthetic
ggagugcgaauccacacucca

SEQ ID NO: 70433 - RNA, 22 nt, Artificial Sequence
  Synthetic
aggagugcgaauccacacucca

SEQ ID NO: 70434 - RNA, 23 nt, Artificial Sequence
  Synthetic
gaggagugcgaauccacacucca

SEQ ID NO: 70435 - RNA, 24 nt, Artificial Sequence
  Synthetic
ggaggagugcgaauccacacucca

SEQ ID NO: 70436 - RNA, 18 nt, Artificial Sequence
  Synthetic
cguucacgguggucucca

SEQ ID NO: 70437 - RNA, 19 nt, Artificial Sequence
  Synthetic
gcguucacgguggucucca

SEQ ID NO: 70438 - RNA, 20 nt, Artificial Sequence
  Synthetic
ggcguucacgguggucucca

SEQ ID NO: 70439 - RNA, 18 nt, Artificial Sequence
  Synthetic
acauaccuugauagucca

SEQ ID NO: 70440 - RNA, 19 nt, Artificial Sequence
  Synthetic
aacauaccuugauagucca

SEQ ID NO: 70441 - RNA, 20 nt, Artificial Sequence
  Synthetic
caacauaccuugauagucca

SEQ ID NO: 70442 - RNA, 21 nt, Artificial Sequence
  Synthetic
gcaacauaccuugauagucca

SEQ ID NO: 70443 - RNA, 22 nt, Artificial Sequence
  Synthetic
ggcaacauaccuugauagucca

SEQ ID NO: 70444 - RNA, 23 nt, Artificial Sequence
  Synthetic
gggcaacauaccuugauagucca

SEQ ID NO: 70445 - RNA, 24 nt, Artificial Sequence
  Synthetic
cgggcaacauaccuugauagucca

SEQ ID NO: 70446 - RNA, 18 nt, Artificial Sequence
  Synthetic
uucgagagggaccgucca

SEQ ID NO: 70447 - RNA, 19 nt, Artificial Sequence
  Synthetic
auucgagagggaccgucca

SEQ ID NO: 70448 - RNA, 20 nt, Artificial Sequence
  Synthetic
cauucgagagggaccgucca

SEQ ID NO: 70449 - RNA, 18 nt, Artificial Sequence
  Synthetic
aaaagauggaguuuucca

SEQ ID NO: 70450 - RNA, 19 nt, Artificial Sequence
  Synthetic
gaaaagauggaguuuucca

SEQ ID NO: 70451 - RNA, 20 nt, Artificial Sequence
  Synthetic
ggaaaagauggaguuuucca

SEQ ID NO: 70452 - RNA, 21 nt, Artificial Sequence
  Synthetic
aggaaaagauggaguuuucca

SEQ ID NO: 70453 - RNA, 22 nt, Artificial Sequence
  Synthetic
caggaaaagauggaguuuucca

SEQ ID NO: 70454 - RNA, 23 nt, Artificial Sequence
  Synthetic
ucaggaaaagauggaguuuucca

SEQ ID NO: 70455 - RNA, 24 nt, Artificial Sequence
  Synthetic
aucaggaaaagauggaguuuucca

SEQ ID NO: 70456 - RNA, 18 nt, Artificial Sequence
  Synthetic
gaacuggagccaccagca

SEQ ID NO: 70457 - RNA, 19 nt, Artificial Sequence
  Synthetic
ggaacuggagccaccagca

SEQ ID NO: 70458 - RNA, 20 nt, Artificial Sequence
  Synthetic
cggaacuggagccaccagca

SEQ ID NO: 70459 - RNA, 21 nt, Artificial Sequence
  Synthetic
ccggaacuggagccaccagca

SEQ ID NO: 70460 - RNA, 22 nt, Artificial Sequence
  Synthetic
uccggaacuggagccaccagca

SEQ ID NO: 70461 - RNA, 23 nt, Artificial Sequence
  Synthetic
uuccggaacuggagccaccagca

SEQ ID NO: 70462 - RNA, 24 nt, Artificial Sequence
  Synthetic
guuccggaacuggagccaccagca

SEQ ID NO: 70463 - RNA, 18 nt, Artificial Sequence
  Synthetic
agaagaugaggcauagca

SEQ ID NO: 70464 - RNA, 19 nt, Artificial Sequence
  Synthetic
aagaagaugaggcauagca

SEQ ID NO: 70465 - RNA, 20 nt, Artificial Sequence
  Synthetic
caagaagaugaggcauagca

SEQ ID NO: 70466 - RNA, 21 nt, Artificial Sequence
  Synthetic
acaagaagaugaggcauagca

SEQ ID NO: 70467 - RNA, 22 nt, Artificial Sequence
  Synthetic
aacaagaagaugaggcauagca

SEQ ID NO: 70468 - RNA, 23 nt, Artificial Sequence
  Synthetic
caacaagaagaugaggcauagca

SEQ ID NO: 70469 - RNA, 24 nt, Artificial Sequence
  Synthetic
ccaacaagaagaugaggcauagca

SEQ ID NO: 70470 - RNA, 18 nt, Artificial Sequence
  Synthetic
uuagauugaauacacgca

SEQ ID NO: 70471 - RNA, 19 nt, Artificial Sequence
  Synthetic
cuuagauugaauacacgca

SEQ ID NO: 70472 - RNA, 20 nt, Artificial Sequence
  Synthetic
gcuuagauugaauacacgca

SEQ ID NO: 70473 - RNA, 21 nt, Artificial Sequence
  Synthetic
ugcuuagauugaauacacgca

SEQ ID NO: 70474 - RNA, 22 nt, Artificial Sequence
  Synthetic
cugcuuagauugaauacacgca

SEQ ID NO: 70475 - RNA, 23 nt, Artificial Sequence
  Synthetic
ccugcuuagauugaauacacgca

SEQ ID NO: 70476 - RNA, 24 nt, Artificial Sequence
  Synthetic
gccugcuuagauugaauacacgca

SEQ ID NO: 70477 - RNA, 18 nt, Artificial Sequence
  Synthetic
uacacgcauacagaggca

SEQ ID NO: 70478 - RNA, 19 nt, Artificial Sequence
  Synthetic
auacacgcauacagaggca

SEQ ID NO: 70479 - RNA, 20 nt, Artificial Sequence
  Synthetic
aauacacgcauacagaggca

SEQ ID NO: 70480 - RNA, 21 nt, Artificial Sequence
  Synthetic
gaauacacgcauacagaggca

SEQ ID NO: 70481 - RNA, 22 nt, Artificial Sequence
  Synthetic
ugaauacacgcauacagaggca

SEQ ID NO: 70482 - RNA, 23 nt, Artificial Sequence
  Synthetic
uugaauacacgcauacagaggca

SEQ ID NO: 70483 - RNA, 24 nt, Artificial Sequence
  Synthetic
auugaauacacgcauacagaggca

SEQ ID NO: 70484 - RNA, 18 nt, Artificial Sequence
  Synthetic
ugccgauugguggaggca

SEQ ID NO: 70485 - RNA, 19 nt, Artificial Sequence
  Synthetic
cugccgauugguggaggca

SEQ ID NO: 70486 - RNA, 20 nt, Artificial Sequence
  Synthetic
acugccgauugguggaggca

SEQ ID NO: 70487 - RNA, 21 nt, Artificial Sequence
  Synthetic
gacugccgauugguggaggca

SEQ ID NO: 70488 - RNA, 22 nt, Artificial Sequence
  Synthetic
ugacugccgauugguggaggca

SEQ ID NO: 70489 - RNA, 23 nt, Artificial Sequence
  Synthetic
cugacugccgauugguggaggca

SEQ ID NO: 70490 - RNA, 24 nt, Artificial Sequence
  Synthetic
ccugacugccgauugguggaggca

SEQ ID NO: 70491 - RNA, 18 nt, Artificial Sequence
  Synthetic
  misc_feature (9)..(9): n is a, c, g, or u
uggucggcnggaacggca

SEQ ID NO: 70492 - RNA, 19 nt, Artificial Sequence
  Synthetic
  misc_feature (10)..(10): n is a, c, g, or u
guggucggcnggaacggca

SEQ ID NO: 70493 - RNA, 20 nt, Artificial Sequence
  Synthetic
  misc_feature (11)..(11): n is a, c, g, or u
cguggucggcnggaacggca

SEQ ID NO: 70494 - RNA, 21 nt, Artificial Sequence
  Synthetic
  misc_feature (12)..(12): n is a, c, g, or u
ccguggucggcnggaacggca

SEQ ID NO: 70495 - RNA, 22 nt, Artificial Sequence
  Synthetic
  misc_feature (13)..(13): n is a, c, g, or u
cccguggucggcnggaacggca

SEQ ID NO: 70496 - RNA, 23 nt, Artificial Sequence
  Synthetic
  misc_feature (14)..(14): n is a, c, g, or u
ccccguggucggcnggaacggca

SEQ ID NO: 70497 - RNA, 24 nt, Artificial Sequence
  Synthetic
  misc_feature (15)..(15): n is a, c, g, or u
gccccguggucggcnggaacggca

SEQ ID NO: 70498 - RNA, 18 nt, Artificial Sequence
  Synthetic
agugcacacgguccggca

SEQ ID NO: 70499 - RNA, 19 nt, Artificial Sequence
  Synthetic
aagugcacacgguccggca

SEQ ID NO: 70500 - RNA, 20 nt, Artificial Sequence
  Synthetic
gaagugcacacgguccggca

SEQ ID NO: 70501 - RNA, 18 nt, Artificial Sequence
  Synthetic
ccgcaguauggaucggca

SEQ ID NO: 70502 - RNA, 19 nt, Artificial Sequence
  Synthetic
uccgcaguauggaucggca

SEQ ID NO: 70503 - RNA, 20 nt, Artificial Sequence
  Synthetic
uuccgcaguauggaucggca

SEQ ID NO: 70504 - RNA, 21 nt, Artificial Sequence
  Synthetic
guuccgcaguauggaucggca

SEQ ID NO: 70505 - RNA, 22 nt, Artificial Sequence
  Synthetic
aguuccgcaguauggaucggca

SEQ ID NO: 70506 - RNA, 23 nt, Artificial Sequence
  Synthetic
gaguuccgcaguauggaucggca

SEQ ID NO: 70507 - RNA, 24 nt, Artificial Sequence
  Synthetic
ggaguuccgcaguauggaucggca

SEQ ID NO: 70508 - RNA, 18 nt, Artificial Sequence
  Synthetic
  misc_feature (3)..(3): n is a, c, g, or u
ccnggccguugccgggca

SEQ ID NO: 70509 - RNA, 19 nt, Artificial Sequence
  Synthetic
  misc_feature (4)..(4): n is a, c, g, or u
accnggccguugccgggca

SEQ ID NO: 70510 - RNA, 20 nt, Artificial Sequence
  Synthetic
  misc_feature (5)..(5): n is a, c, g, or u
gaccnggccguugccgggca

SEQ ID NO: 70511 - RNA, 21 nt, Artificial Sequence
  Synthetic
  misc_feature (6)..(6): n is a, c, g, or u
agaccnggccguugccgggca

SEQ ID NO: 70512 - RNA, 22 nt, Artificial Sequence
  Synthetic
  misc_feature (7)..(7): n is a, c, g, or u
cagaccnggccguugccgggca

SEQ ID NO: 70513 - RNA, 23 nt, Artificial Sequence
  Synthetic
  misc_feature (8)..(8): n is a, c, g, or u
acagaccnggccguugccgggca

SEQ ID NO: 70514 - RNA, 24 nt, Artificial Sequence
  Synthetic
  misc_feature (9)..(9): n is a, c, g, or u
cacagaccnggccguugccgggca

SEQ ID NO: 70515 - RNA, 18 nt, Artificial Sequence
  Synthetic
cauuguguaaaaggggca

SEQ ID NO: 70516 - RNA, 19 nt, Artificial Sequence
  Synthetic
acauuguguaaaaggggca

SEQ ID NO: 70517 - RNA, 20 nt, Artificial Sequence
  Synthetic
cacauuguguaaaaggggca

SEQ ID NO: 70518 - RNA, 21 nt, Artificial Sequence
  Synthetic
ccacauuguguaaaaggggca

SEQ ID NO: 70519 - RNA, 22 nt, Artificial Sequence
  Synthetic
  misc_feature (1)..(1): n is a, c, g, or u
nccacauuguguaaaaggggca

SEQ ID NO: 70520 - RNA, 23 nt, Artificial Sequence
  Synthetic
  misc_feature (2)..(2): n is a, c, g, or u
anccacauuguguaaaaggggca

SEQ ID NO: 70521 - RNA, 24 nt, Artificial Sequence
  Synthetic
  misc_feature (3)..(3): n is a, c, g, or u
uanccacauuguguaaaaggggca

SEQ ID NO: 70522 - RNA, 18 nt, Artificial Sequence
  Synthetic
uaauaauguccuggugca

SEQ ID NO: 70523 - RNA, 19 nt, Artificial Sequence
  Synthetic
uuaauaauguccuggugca

SEQ ID NO: 70524 - RNA, 20 nt, Artificial Sequence
  Synthetic
guuaauaauguccuggugca

SEQ ID NO: 70525 - RNA, 21 nt, Artificial Sequence
  Synthetic
uguuaauaauguccuggugca

SEQ ID NO: 70526 - RNA, 22 nt, Artificial Sequence
  Synthetic
uuguuaauaauguccuggugca

SEQ ID NO: 70527 - RNA, 23 nt, Artificial Sequence
  Synthetic
uuuguuaauaauguccuggugca

SEQ ID NO: 70528 - RNA, 24 nt, Artificial Sequence
  Synthetic
auuuguuaauaauguccuggugca

SEQ ID NO: 70529 - RNA, 18 nt, Artificial Sequence
  Synthetic
ugacauacuuuccaauca

SEQ ID NO: 70530 - RNA, 19 nt, Artificial Sequence
  Synthetic
uugacauacuuuccaauca

SEQ ID NO: 70531 - RNA, 20 nt, Artificial Sequence
  Synthetic
  misc_feature (1)..(1): n is a, c, g, or u
nuugacauacuuuccaauca

SEQ ID NO: 70532 - RNA, 21 nt, Artificial Sequence
  Synthetic
  misc_feature (2)..(2): n is a, c, g, or u
cnuugacauacuuuccaauca

SEQ ID NO: 70533 - RNA, 22 nt, Artificial Sequence
  Synthetic
  misc_feature (3)..(3): n is a, c, g, or u
ucnuugacauacuuuccaauca

SEQ ID NO: 70534 - RNA, 23 nt, Artificial Sequence
  Synthetic
  misc_feature (4)..(4): n is a, c, g, or u
uucnuugacauacuuuccaauca

SEQ ID NO: 70535 - RNA, 24 nt, Artificial Sequence
  Synthetic
  misc_feature (5)..(5): n is a, c, g, or u
auucnuugacauacuuuccaauca

SEQ ID NO: 70536 - RNA, 18 nt, Artificial Sequence
  Synthetic
ccaguggggguugcauca

SEQ ID NO: 70537 - RNA, 19 nt, Artificial Sequence
  Synthetic
gccaguggggguugcauca

SEQ ID NO: 70538 - RNA, 20 nt, Artificial Sequence
  Synthetic
agccaguggggguugcauca

SEQ ID NO: 70539 - RNA, 21 nt, Artificial Sequence
  Synthetic
cagccaguggggguugcauca

SEQ ID NO: 70540 - RNA, 22 nt, Artificial Sequence
  Synthetic
ccagccaguggggguugcauca

SEQ ID NO: 70541 - RNA, 23 nt, Artificial Sequence
  Synthetic
cccagccaguggggguugcauca

SEQ ID NO: 70542 - RNA, 24 nt, Artificial Sequence
  Synthetic
ccccagccaguggggguugcauca

SEQ ID NO: 70543 - RNA, 18 nt, Artificial Sequence
  Synthetic
uggugcaaaugaauauca

SEQ ID NO: 70544 - RNA, 19 nt, Artificial Sequence
  Synthetic
cuggugcaaaugaauauca

SEQ ID NO: 70545 - RNA, 20 nt, Artificial Sequence
  Synthetic
ccuggugcaaaugaauauca

SEQ ID NO: 70546 - RNA, 21 nt, Artificial Sequence
  Synthetic
uccuggugcaaaugaauauca

SEQ ID NO: 70547 - RNA, 22 nt, Artificial Sequence
  Synthetic
guccuggugcaaaugaauauca

SEQ ID NO: 70548 - RNA, 23 nt, Artificial Sequence
  Synthetic
uguccuggugcaaaugaauauca

SEQ ID NO: 70549 - RNA, 24 nt, Artificial Sequence
  Synthetic
auguccuggugcaaaugaauauca

SEQ ID NO: 70550 - RNA, 18 nt, Artificial Sequence
  Synthetic
acugaaggaaagaaguca

SEQ ID NO: 70551 - RNA, 19 nt, Artificial Sequence
  Synthetic
uacugaaggaaagaaguca

SEQ ID NO: 70552 - RNA, 20 nt, Artificial Sequence
  Synthetic
uuacugaaggaaagaaguca

SEQ ID NO: 70553 - RNA, 21 nt, Artificial Sequence
  Synthetic
cuuacugaaggaaagaaguca

SEQ ID NO: 70554 - RNA, 22 nt, Artificial Sequence
  Synthetic
ucuuacugaaggaaagaaguca

SEQ ID NO: 70555 - RNA, 23 nt, Artificial Sequence
  Synthetic
cucuuacugaaggaaagaaguca

SEQ ID NO: 70556 - RNA, 24 nt, Artificial Sequence
  Synthetic
ucucuuacugaaggaaagaaguca

SEQ ID NO: 70557 - RNA, 18 nt, Artificial Sequence
  Synthetic
uugugaggauuuuuguca

SEQ ID NO: 70558 - RNA, 19 nt, Artificial Sequence
  Synthetic
auugugaggauuuuuguca

SEQ ID NO: 70559 - RNA, 20 nt, Artificial Sequence
  Synthetic
uauugugaggauuuuuguca

SEQ ID NO: 70560 - RNA, 21 nt, Artificial Sequence
  Synthetic
guauugugaggauuuuuguca

SEQ ID NO: 70561 - RNA, 22 nt, Artificial Sequence
  Synthetic
gguauugugaggauuuuuguca

SEQ ID NO: 70562 - RNA, 23 nt, Artificial Sequence
  Synthetic
cgguauugugaggauuuuuguca

SEQ ID NO: 70563 - RNA, 24 nt, Artificial Sequence
  Synthetic
gcgguauugugaggauuuuuguca

SEQ ID NO: 70564 - RNA, 18 nt, Artificial Sequence
  Synthetic
uaaauguauacccaaaga

SEQ ID NO: 70565 - RNA, 19 nt, Artificial Sequence
  Synthetic
uuaaauguauacccaaaga

SEQ ID NO: 70566 - RNA, 20 nt, Artificial Sequence
  Synthetic
uuuaaauguauacccaaaga

SEQ ID NO: 70567 - RNA, 21 nt, Artificial Sequence
  Synthetic
auuuaaauguauacccaaaga

SEQ ID NO: 70568 - RNA, 22 nt, Artificial Sequence
  Synthetic
gauuuaaauguauacccaaaga

SEQ ID NO: 70569 - RNA, 23 nt, Artificial Sequence
  Synthetic
ggauuuaaauguauacccaaaga

SEQ ID NO: 70570 - RNA, 24 nt, Artificial Sequence
  Synthetic
gggauuuaaauguauacccaaaga

SEQ ID NO: 70571 - RNA, 18 nt, Artificial Sequence
  Synthetic
uagcucuuguucccaaga

SEQ ID NO: 70572 - RNA, 19 nt, Artificial Sequence
  Synthetic
guagcucuuguucccaaga

SEQ ID NO: 70573 - RNA, 20 nt, Artificial Sequence
  Synthetic
uguagcucuuguucccaaga

SEQ ID NO: 70574 - RNA, 21 nt, Artificial Sequence
  Synthetic
auguagcucuuguucccaaga

SEQ ID NO: 70575 - RNA, 22 nt, Artificial Sequence
  Synthetic
gauguagcucuuguucccaaga

SEQ ID NO: 70576 - RNA, 23 nt, Artificial Sequence
  Synthetic
ugauguagcucuuguucccaaga

SEQ ID NO: 70577 - RNA, 24 nt, Artificial Sequence
  Synthetic
augauguagcucuuguucccaaga

SEQ ID NO: 70578 - RNA, 18 nt, Artificial Sequence
  Synthetic
gaagaaccaacaagaaga

SEQ ID NO: 70579 - RNA, 19 nt, Artificial Sequence
  Synthetic
agaagaaccaacaagaaga

SEQ ID NO: 70580 - RNA, 20 nt, Artificial Sequence
  Synthetic
cagaagaaccaacaagaaga

SEQ ID NO: 70581 - RNA, 21 nt, Artificial Sequence
  Synthetic
ccagaagaaccaacaagaaga

SEQ ID NO: 70582 - RNA, 22 nt, Artificial Sequence
  Synthetic
uccagaagaaccaacaagaaga

SEQ ID NO: 70583 - RNA, 23 nt, Artificial Sequence
  Synthetic
guccagaagaaccaacaagaaga

SEQ ID NO: 70584 - RNA, 24 nt, Artificial Sequence
  Synthetic
aguccagaagaaccaacaagaaga

SEQ ID NO: 70585 - RNA, 18 nt, Artificial Sequence
  Synthetic
ccuugauaguccagaaga

SEQ ID NO: 70586 - RNA, 19 nt, Artificial Sequence
  Synthetic
accuugauaguccagaaga

SEQ ID NO: 70587 - RNA, 20 nt, Artificial Sequence
  Synthetic
uaccuugauaguccagaaga

SEQ ID NO: 70588 - RNA, 21 nt, Artificial Sequence
  Synthetic
auaccuugauaguccagaaga

SEQ ID NO: 70589 - RNA, 22 nt, Artificial Sequence
  Synthetic
cauaccuugauaguccagaaga

SEQ ID NO: 70590 - RNA, 23 nt, Artificial Sequence
  Synthetic
acauaccuugauaguccagaaga

SEQ ID NO: 70591 - RNA, 24 nt, Artificial Sequence
  Synthetic
aacauaccuugauaguccagaaga

SEQ ID NO: 70592 - RNA, 18 nt, Artificial Sequence
  Synthetic
gacagguauaguagaaga

SEQ ID NO: 70593 - RNA, 19 nt, Artificial Sequence
  Synthetic
agacagguauaguagaaga

SEQ ID NO: 70594 - RNA, 20 nt, Artificial Sequence
  Synthetic
aagacagguauaguagaaga

SEQ ID NO: 70595 - RNA, 21 nt, Artificial Sequence
  Synthetic
aaagacagguauaguagaaga

SEQ ID NO: 70596 - RNA, 22 nt, Artificial Sequence
  Synthetic
uaaagacagguauaguagaaga

SEQ ID NO: 70597 - RNA, 23 nt, Artificial Sequence
  Synthetic
uuaaagacagguauaguagaaga

SEQ ID NO: 70598 - RNA, 24 nt, Artificial Sequence
  Synthetic
auuaaagacagguauaguagaaga

SEQ ID NO: 70599 - RNA, 18 nt, Artificial Sequence
  Synthetic
auagcagcaggaugaaga

SEQ ID NO: 70600 - RNA, 19 nt, Artificial Sequence
  Synthetic
cauagcagcaggaugaaga

SEQ ID NO: 70601 - RNA, 20 nt, Artificial Sequence
  Synthetic
gcauagcagcaggaugaaga

SEQ ID NO: 70602 - RNA, 21 nt, Artificial Sequence
  Synthetic
ggcauagcagcaggaugaaga

SEQ ID NO: 70603 - RNA, 22 nt, Artificial Sequence
  Synthetic
aggcauagcagcaggaugaaga

SEQ ID NO: 70604 - RNA, 23 nt, Artificial Sequence
  Synthetic
gaggcauagcagcaggaugaaga

SEQ ID NO: 70605 - RNA, 24 nt, Artificial Sequence
  Synthetic
ugaggcauagcagcaggaugaaga

SEQ ID NO: 70606 - RNA, 18 nt, Artificial Sequence
  Synthetic
ccggaaguguugauaaga

SEQ ID NO: 70607 - RNA, 19 nt, Artificial Sequence
  Synthetic
uccggaaguguugauaaga

SEQ ID NO: 70608 - RNA, 20 nt, Artificial Sequence
  Synthetic
cuccggaaguguugauaaga

SEQ ID NO: 70609 - RNA, 21 nt, Artificial Sequence
  Synthetic
ucuccggaaguguugauaaga

SEQ ID NO: 70610 - RNA, 22 nt, Artificial Sequence
  Synthetic
  misc_feature (1)..(1): n is a, c, g, or u
nucuccggaaguguugauaaga

SEQ ID NO: 70611 - RNA, 23 nt, Artificial Sequence
  Synthetic
  misc_feature (2)..(2): n is a, c, g, or u
anucuccggaaguguugauaaga

SEQ ID NO: 70612 - RNA, 24 nt, Artificial Sequence
  Synthetic
  misc_feature (3)..(3): n is a, c, g, or u
uanucuccggaaguguugauaaga

SEQ ID NO: 70613 - RNA, 18 nt, Artificial Sequence
  Synthetic
cagaugagaaggcacaga

SEQ ID NO: 70614 - RNA, 19 nt, Artificial Sequence
  Synthetic
gcagaugagaaggcacaga

SEQ ID NO: 70615 - RNA, 20 nt, Artificial Sequence
  Synthetic
ggcagaugagaaggcacaga

SEQ ID NO: 70616 - RNA, 21 nt, Artificial Sequence
  Synthetic
cggcagaugagaaggcacaga

SEQ ID NO: 70617 - RNA, 22 nt, Artificial Sequence
  Synthetic
ccggcagaugagaaggcacaga

SEQ ID NO: 70618 - RNA, 23 nt, Artificial Sequence
  Synthetic
uccggcagaugagaaggcacaga

SEQ ID NO: 70619 - RNA, 24 nt, Artificial Sequence
  Synthetic
guccggcagaugagaaggcacaga

SEQ ID NO: 70620 - RNA, 18 nt, Artificial Sequence
  Synthetic
gcaaacacuuggcacaga

SEQ ID NO: 70621 - RNA, 19 nt, Artificial Sequence
  Synthetic
agcaaacacuuggcacaga

SEQ ID NO: 70622 - RNA, 20 nt, Artificial Sequence
  Synthetic
cagcaaacacuuggcacaga

SEQ ID NO: 70623 - RNA, 21 nt, Artificial Sequence
  Synthetic
ucagcaaacacuuggcacaga

SEQ ID NO: 70624 - RNA, 22 nt, Artificial Sequence
  Synthetic
aucagcaaacacuuggcacaga

SEQ ID NO: 70625 - RNA, 23 nt, Artificial Sequence
  Synthetic
caucagcaaacacuuggcacaga

SEQ ID NO: 70626 - RNA, 24 nt, Artificial Sequence
  Synthetic
gcaucagcaaacacuuggcacaga

SEQ ID NO: 70627 - RNA, 18 nt, Artificial Sequence
  Synthetic
aaggcaucccgauacaga

SEQ ID NO: 70628 - RNA, 19 nt, Artificial Sequence
  Synthetic
uaaggcaucccgauacaga

SEQ ID NO: 70629 - RNA, 20 nt, Artificial Sequence
  Synthetic
cuaaggcaucccgauacaga

SEQ ID NO: 70630 - RNA, 21 nt, Artificial Sequence
  Synthetic
ucuaaggcaucccgauacaga

SEQ ID NO: 70631 - RNA, 22 nt, Artificial Sequence
  Synthetic
uucuaaggcaucccgauacaga

SEQ ID NO: 70632 - RNA, 23 nt, Artificial Sequence
  Synthetic
auucuaaggcaucccgauacaga

SEQ ID NO: 70633 - RNA, 24 nt, Artificial Sequence
  Synthetic
gauucuaaggcaucccgauacaga

SEQ ID NO: 70634 - RNA, 18 nt, Artificial Sequence
  Synthetic
cucaagauguuguacaga

SEQ ID NO: 70635 - RNA, 19 nt, Artificial Sequence
  Synthetic
acucaagauguuguacaga

SEQ ID NO: 70636 - RNA, 20 nt, Artificial Sequence
  Synthetic
gacucaagauguuguacaga

SEQ ID NO: 70637 - RNA, 21 nt, Artificial Sequence
  Synthetic
ggacucaagauguuguacaga

SEQ ID NO: 70638 - RNA, 22 nt, Artificial Sequence
  Synthetic
gggacucaagauguuguacaga

SEQ ID NO: 70639 - RNA, 23 nt, Artificial Sequence
  Synthetic
agggacucaagauguuguacaga

SEQ ID NO: 70640 - RNA, 24 nt, Artificial Sequence
  Synthetic
aagggacucaagauguuguacaga

SEQ ID NO: 70641 - RNA, 18 nt, Artificial Sequence
  Synthetic
aagagaugauuaggcaga

SEQ ID NO: 70642 - RNA, 19 nt, Artificial Sequence
  Synthetic
caagagaugauuaggcaga

SEQ ID NO: 70643 - RNA, 20 nt, Artificial Sequence
  Synthetic
acaagagaugauuaggcaga

SEQ ID NO: 70644 - RNA, 21 nt, Artificial Sequence
  Synthetic
aacaagagaugauuaggcaga

SEQ ID NO: 70645 - RNA, 22 nt, Artificial Sequence
  Synthetic
gaacaagagaugauuaggcaga

SEQ ID NO: 70646 - RNA, 23 nt, Artificial Sequence
  Synthetic
ugaacaagagaugauuaggcaga

SEQ ID NO: 70647 - RNA, 24 nt, Artificial Sequence
  Synthetic
augaacaagagaugauuaggcaga

SEQ ID NO: 70648 - RNA, 18 nt, Artificial Sequence
  Synthetic
  misc_feature (7)..(7): n is a, c, g, or u
gucggcnggaacggcaga

SEQ ID NO: 70649 - RNA, 19 nt, Artificial Sequence
  Synthetic
  misc_feature (8)..(8): n is a, c, g, or u
ggucggcnggaacggcaga

SEQ ID NO: 70650 - RNA, 20 nt, Artificial Sequence
  Synthetic
  misc_feature (9)..(9): n is a, c, g, or u
uggucggcnggaacggcaga

SEQ ID NO: 70651 - RNA, 21 nt, Artificial Sequence
  Synthetic
  misc_feature (10)..(10): n is a, c, g, or u
guggucggcnggaacggcaga

SEQ ID NO: 70652 - RNA, 22 nt, Artificial Sequence
  Synthetic
  misc_feature (11)..(11): n is a, c, g, or u
cguggucggcnggaacggcaga

SEQ ID NO: 70653 - RNA, 23 nt, Artificial Sequence
  Synthetic
  misc_feature (12)..(12): n is a, c, g, or u
ccguggucggcnggaacggcaga

SEQ ID NO: 70654 - RNA, 24 nt, Artificial Sequence
  Synthetic
  misc_feature (13)..(13): n is a, c, g, or u
cccguggucggcnggaacggcaga

SEQ ID NO: 70655 - RNA, 18 nt, Artificial Sequence
  Synthetic
ugcacacgguccggcaga

SEQ ID NO: 70656 - RNA, 19 nt, Artificial Sequence
  Synthetic
gugcacacgguccggcaga

SEQ ID NO: 70657 - RNA, 20 nt, Artificial Sequence
  Synthetic
agugcacacgguccggcaga

SEQ ID NO: 70658 - RNA, 18 nt, Artificial Sequence
  Synthetic
cuccaugcgacgugcaga

SEQ ID NO: 70659 - RNA, 19 nt, Artificial Sequence
  Synthetic
ucuccaugcgacgugcaga

SEQ ID NO: 70660 - RNA, 20 nt, Artificial Sequence
  Synthetic
gucuccaugcgacgugcaga

SEQ ID NO: 70661 - RNA, 21 nt, Artificial Sequence
  Synthetic
ggucuccaugcgacgugcaga

SEQ ID NO: 70662 - RNA, 22 nt, Artificial Sequence
  Synthetic
uggucuccaugcgacgugcaga

SEQ ID NO: 70663 - RNA, 23 nt, Artificial Sequence
  Synthetic
guggucuccaugcgacgugcaga

SEQ ID NO: 70664 - RNA, 24 nt, Artificial Sequence
  Synthetic
gguggucuccaugcgacgugcaga

SEQ ID NO: 70665 - RNA, 18 nt, Artificial Sequence
  Synthetic
  misc_feature (2)..(2): n is a, c, g, or u
  misc_feature (11)..(11): n is a, c, g, or u
gnaaauauuunguagaga

SEQ ID NO: 70666 - RNA, 19 nt, Artificial Sequence
  Synthetic
  misc_feature (3)..(3): n is a, c, g, or u
  misc_feature (12)..(12): n is a, c, g, or u
ggnaaauauuunguagaga

SEQ ID NO: 70667 - RNA, 20 nt, Artificial Sequence
  Synthetic
  misc_feature (4)..(4): n is a, c, g, or u
  misc_feature (13)..(13): n is a, c, g, or u
gggnaaauauuunguagaga

SEQ ID NO: 70668 - RNA, 21 nt, Artificial Sequence
  Synthetic
  misc_feature (5)..(5): n is a, c, g, or u
  misc_feature (14)..(14): n is a, c, g, or u
ggggnaaauauuunguagaga

SEQ ID NO: 70669 - RNA, 22 nt, Artificial Sequence
  Synthetic
  misc_feature (6)..(6): n is a, c, g, or u
  misc_feature (15)..(15): n is a, c, g, or u
aggggnaaauauuunguagaga

SEQ ID NO: 70670 - RNA, 23 nt, Artificial Sequence
  Synthetic
  misc_feature (7)..(7): n is a, c, g, or u
  misc_feature (16)..(16): n is a, c, g, or u
uaggggnaaauauuunguagaga

SEQ ID NO: 70671 - RNA, 24 nt, Artificial Sequence
  Synthetic
  misc_feature (8)..(8): n is a, c, g, or u
  misc_feature (17)..(17): n is a, c, g, or u
cuaggggnaaauauuunguagaga

SEQ ID NO: 70672 - RNA, 18 nt, Artificial Sequence
  Synthetic
guaaacugagccaggaga

SEQ ID NO: 70673 - RNA, 19 nt, Artificial Sequence
  Synthetic
aguaaacugagccaggaga

SEQ ID NO: 70674 - RNA, 20 nt, Artificial Sequence
  Synthetic
uaguaaacugagccaggaga

SEQ ID NO: 70675 - RNA, 21 nt, Artificial Sequence
  Synthetic
cuaguaaacugagccaggaga

SEQ ID NO: 70676 - RNA, 22 nt, Artificial Sequence
  Synthetic
acuaguaaacugagccaggaga

SEQ ID NO: 70677 - RNA, 23 nt, Artificial Sequence
  Synthetic
cacuaguaaacugagccaggaga

SEQ ID NO: 70678 - RNA, 24 nt, Artificial Sequence
  Synthetic
gcacuaguaaacugagccaggaga

SEQ ID NO: 70679 - RNA, 18 nt, Artificial Sequence
  Synthetic
  misc_feature (1)..(1): n is a, c, g, or u
nggaacggcagacggaga

SEQ ID NO: 70680 - RNA, 19 nt, Artificial Sequence
  Synthetic
  misc_feature (2)..(2): n is a, c, g, or u
cnggaacggcagacggaga

SEQ ID NO: 70681 - RNA, 20 nt, Artificial Sequence
  Synthetic
  misc_feature (3)..(3): n is a, c, g, or u
gcnggaacggcagacggaga

SEQ ID NO: 70682 - RNA, 21 nt, Artificial Sequence
  Synthetic
  misc_feature (4)..(4): n is a, c, g, or u
ggcnggaacggcagacggaga

SEQ ID NO: 70683 - RNA, 22 nt, Artificial Sequence
  Synthetic
  misc_feature (5)..(5): n is a, c, g, or u
cggcnggaacggcagacggaga

SEQ ID NO: 70684 - RNA, 23 nt, Artificial Sequence
  Synthetic
  misc_feature (6)..(6): n is a, c, g, or u
ucggcnggaacggcagacggaga

SEQ ID NO: 70685 - RNA, 24 nt, Artificial Sequence
  Synthetic
  misc_feature (7)..(7): n is a, c, g, or u
gucggcnggaacggcagacggaga

SEQ ID NO: 70686 - RNA, 18 nt, Artificial Sequence
  Synthetic
acauugggaagcuggaga

SEQ ID NO: 70687 - RNA, 19 nt, Artificial Sequence
  Synthetic
aacauugggaagcuggaga

SEQ ID NO: 70688 - RNA, 20 nt, Artificial Sequence
  Synthetic
uaacauugggaagcuggaga

SEQ ID NO: 70689 - RNA, 21 nt, Artificial Sequence
  Synthetic
cuaacauugggaagcuggaga

SEQ ID NO: 70690 - RNA, 22 nt, Artificial Sequence
  Synthetic
acuaacauugggaagcuggaga

SEQ ID NO: 70691 - RNA, 23 nt, Artificial Sequence
  Synthetic
uacuaacauugggaagcuggaga

SEQ ID NO: 70692 - RNA, 24 nt, Artificial Sequence
  Synthetic
auacuaacauugggaagcuggaga

SEQ ID NO: 70693 - RNA, 18 nt, Artificial Sequence
  Synthetic
ucucuuccaaaagugaga

SEQ ID NO: 70694 - RNA, 19 nt, Artificial Sequence
  Synthetic
uucucuuccaaaagugaga

SEQ ID NO: 70695 - RNA, 20 nt, Artificial Sequence
  Synthetic
uuucucuuccaaaagugaga

SEQ ID NO: 70696 - RNA, 21 nt, Artificial Sequence
  Synthetic
guuucucuuccaaaagugaga

SEQ ID NO: 70697 - RNA, 22 nt, Artificial Sequence
  Synthetic
gguuucucuuccaaaagugaga

SEQ ID NO: 70698 - RNA, 23 nt, Artificial Sequence
  Synthetic
cgguuucucuuccaaaagugaga

SEQ ID NO: 70699 - RNA, 24 nt, Artificial Sequence
  Synthetic
acgguuucucuuccaaaagugaga

SEQ ID NO: 70700 - RNA, 18 nt, Artificial Sequence
  Synthetic
gcgcugacgggacguaga

SEQ ID NO: 70701 - RNA, 19 nt, Artificial Sequence
  Synthetic
agcgcugacgggacguaga

SEQ ID NO: 70702 - RNA, 20 nt, Artificial Sequence
  Synthetic
cagcgcugacgggacguaga

SEQ ID NO: 70703 - RNA, 18 nt, Artificial Sequence
  Synthetic
  misc_feature (4)..(4): n is a, c, g, or u
  misc_feature (13)..(13): n is a, c, g, or u
gggnaaauauuunguaga

SEQ ID NO: 70704 - RNA, 19 nt, Artificial Sequence
  Synthetic
  misc_feature (5)..(5): n is a, c, g, or u
  misc_feature (14)..(14): n is a, c, g, or u
ggggnaaauauuunguaga

SEQ ID NO: 70705 - RNA, 20 nt, Artificial Sequence
  Synthetic
  misc_feature (6)..(6): n is a, c, g, or u
  misc_feature (15)..(15): n is a, c, g, or u
aggggnaaauauuunguaga

SEQ ID NO: 70706 - RNA, 21 nt, Artificial Sequence
  Synthetic
  misc_feature (7)..(7): n is a, c, g, or u
  misc_feature (16)..(16): n is a, c, g, or u
uaggggnaaauauuunguaga

SEQ ID NO: 70707 - RNA, 22 nt, Artificial Sequence
  Synthetic
  misc_feature (8)..(8): n is a, c, g, or u
  misc_feature (17)..(17): n is a, c, g, or u
cuaggggnaaauauuunguaga

SEQ ID NO: 70708 - RNA, 23 nt, Artificial Sequence
  Synthetic
  misc_feature (9)..(9): n is a, c, g, or u
  misc_feature (18)..(18): n is a, c, g, or u
ucuaggggnaaauauuunguaga

SEQ ID NO: 70709 - RNA, 24 nt, Artificial Sequence
  Synthetic
  misc_feature (10)..(10): n is a, c, g, or u
  misc_feature (19)..(19): n is a, c, g, or u
cucuaggggnaaauauuunguaga

SEQ ID NO: 70710 - RNA, 18 nt, Artificial Sequence
  Synthetic
accccgccuguaacacga

SEQ ID NO: 70711 - RNA, 19 nt, Artificial Sequence
  Synthetic
aaccccgccuguaacacga

SEQ ID NO: 70712 - RNA, 20 nt, Artificial Sequence
  Synthetic
aaaccccgccuguaacacga

SEQ ID NO: 70713 - RNA, 21 nt, Artificial Sequence
  Synthetic
aaaaccccgccuguaacacga

SEQ ID NO: 70714 - RNA, 22 nt, Artificial Sequence
  Synthetic
aaaaaccccgccuguaacacga

SEQ ID NO: 70715 - RNA, 23 nt, Artificial Sequence
  Synthetic
gaaaaaccccgccuguaacacga

SEQ ID NO: 70716 - RNA, 24 nt, Artificial Sequence
  Synthetic
agaaaaaccccgccuguaacacga

SEQ ID NO: 70717 - RNA, 18 nt, Artificial Sequence
  Synthetic
ccucgagaagauugacga

SEQ ID NO: 70718 - RNA, 19 nt, Artificial Sequence
  Synthetic
uccucgagaagauugacga

SEQ ID NO: 70719 - RNA, 20 nt, Artificial Sequence
  Synthetic
auccucgagaagauugacga

SEQ ID NO: 70720 - RNA, 21 nt, Artificial Sequence
  Synthetic
aauccucgagaagauugacga

SEQ ID NO: 70721 - RNA, 22 nt, Artificial Sequence
  Synthetic
caauccucgagaagauugacga

SEQ ID NO: 70722 - RNA, 23 nt, Artificial Sequence
  Synthetic
ccaauccucgagaagauugacga

SEQ ID NO: 70723 - RNA, 24 nt, Artificial Sequence
  Synthetic
cccaauccucgagaagauugacga

SEQ ID NO: 70724 - RNA, 18 nt, Artificial Sequence
  Synthetic
  misc_feature (2)..(2): n is a, c, g, or u
anccccaagcgaccccga

SEQ ID NO: 70725 - RNA, 19 nt, Artificial Sequence
  Synthetic
  misc_feature (3)..(3): n is a, c, g, or u
ganccccaagcgaccccga

SEQ ID NO: 70726 - RNA, 20 nt, Artificial Sequence
  Synthetic
  misc_feature (4)..(4): n is a, c, g, or u
aganccccaagcgaccccga

SEQ ID NO: 70727 - RNA, 21 nt, Artificial Sequence
  Synthetic
  misc_feature (1)..(1): n is a, c, g, or u
  misc_feature (5)..(5): n is a, c, g, or u
naganccccaagcgaccccga

SEQ ID NO: 70728 - RNA, 22 nt, Artificial Sequence
  Synthetic
  misc_feature (2)..(2): n is a, c, g, or u
  misc_feature (6)..(6): n is a, c, g, or u
anaganccccaagcgaccccga

SEQ ID NO: 70729 - RNA, 23 nt, Artificial Sequence
  Synthetic
  misc_feature (3)..(3): n is a, c, g, or u
  misc_feature (7)..(7): n is a, c, g, or u
ganaganccccaagcgaccccga

SEQ ID NO: 70730 - RNA, 24 nt, Artificial Sequence
  Synthetic
  misc_feature (4)..(4): n is a, c, g, or u
  misc_feature (8)..(8): n is a, c, g, or u
cganaganccccaagcgaccccga

SEQ ID NO: 70731 - RNA, 18 nt, Artificial Sequence
  Synthetic
gauucuaaggcaucccga

SEQ ID NO: 70732 - RNA, 19 nt, Artificial Sequence
  Synthetic
agauucuaaggcaucccga

SEQ ID NO: 70733 - RNA, 20 nt, Artificial Sequence
  Synthetic
gagauucuaaggcaucccga

SEQ ID NO: 70734 - RNA, 21 nt, Artificial Sequence
  Synthetic
ggagauucuaaggcaucccga

SEQ ID NO: 70735 - RNA, 22 nt, Artificial Sequence
  Synthetic
aggagauucuaaggcaucccga

SEQ ID NO: 70736 - RNA, 23 nt, Artificial Sequence
  Synthetic
caggagauucuaaggcaucccga

SEQ ID NO: 70737 - RNA, 24 nt, Artificial Sequence
  Synthetic
ucaggagauucuaaggcaucccga

SEQ ID NO: 70738 - RNA, 18 nt, Artificial Sequence
  Synthetic
ucuucugcgacgcggcga

SEQ ID NO: 70739 - RNA, 19 nt, Artificial Sequence
  Synthetic
aucuucugcgacgcggcga

SEQ ID NO: 70740 - RNA, 20 nt, Artificial Sequence
  Synthetic
gaucuucugcgacgcggcga

SEQ ID NO: 70741 - RNA, 18 nt, Artificial Sequence
  Synthetic
gcuccagaccugcugcga

SEQ ID NO: 70742 - RNA, 19 nt, Artificial Sequence
  Synthetic
  misc_feature (1)..(1): n is a, c, g, or u
ngcuccagaccugcugcga

SEQ ID NO: 70743 - RNA, 20 nt, Artificial Sequence
  Synthetic
  misc_feature (2)..(2): n is a, c, g, or u
ungcuccagaccugcugcga

SEQ ID NO: 70744 - RNA, 21 nt, Artificial Sequence
  Synthetic
  misc_feature (3)..(3): n is a, c, g, or u
uungcuccagaccugcugcga

SEQ ID NO: 70745 - RNA, 22 nt, Artificial Sequence
  Synthetic
  misc_feature (4)..(4): n is a, c, g, or u
uuungcuccagaccugcugcga

SEQ ID NO: 70746 - RNA, 23 nt, Artificial Sequence
  Synthetic
  misc_feature (5)..(5): n is a, c, g, or u
guuungcuccagaccugcugcga

SEQ ID NO: 70747 - RNA, 24 nt, Artificial Sequence
  Synthetic
  misc_feature (6)..(6): n is a, c, g, or u
aguuungcuccagaccugcugcga

SEQ ID NO: 70748 - RNA, 18 nt, Artificial Sequence
  Synthetic
ugagaucuucgucugcga

SEQ ID NO: 70749 - RNA, 19 nt, Artificial Sequence
  Synthetic
uugagaucuucgucugcga

SEQ ID NO: 70750 - RNA, 20 nt, Artificial Sequence
  Synthetic
auugagaucuucgucugcga

SEQ ID NO: 70751 - RNA, 18 nt, Artificial Sequence
  Synthetic
gauugagaucuucugcga

SEQ ID NO: 70752 - RNA, 19 nt, Artificial Sequence
  Synthetic
agauugagaucuucugcga

SEQ ID NO: 70753 - RNA, 20 nt, Artificial Sequence
  Synthetic
gagauugagaucuucugcga

SEQ ID NO: 70754 - RNA, 21 nt, Artificial Sequence
  Synthetic
ggagauugagaucuucugcga

SEQ ID NO: 70755 - RNA, 22 nt, Artificial Sequence
  Synthetic
uggagauugagaucuucugcga

SEQ ID NO: 70756 - RNA, 23 nt, Artificial Sequence
  Synthetic
cuggagauugagaucuucugcga

SEQ ID NO: 70757 - RNA, 24 nt, Artificial Sequence
  Synthetic
gcuggagauugagaucuucugcga

SEQ ID NO: 70758 - RNA, 18 nt, Artificial Sequence
  Synthetic
gauucuucccccauucga

SEQ ID NO: 70759 - RNA, 19 nt, Artificial Sequence
  Synthetic
ugauucuucccccauucga

SEQ ID NO: 70760 - RNA, 20 nt, Artificial Sequence
  Synthetic
augauucuucccccauucga

SEQ ID NO: 70761 - RNA, 21 nt, Artificial Sequence
  Synthetic
aaugauucuucccccauucga

SEQ ID NO: 70762 - RNA, 22 nt, Artificial Sequence
  Synthetic
gaaugauucuucccccauucga

SEQ ID NO: 70763 - RNA, 23 nt, Artificial Sequence
  Synthetic
ggaaugauucuucccccauucga

SEQ ID NO: 70764 - RNA, 24 nt, Artificial Sequence
  Synthetic
uggaaugauucuucccccauucga

SEQ ID NO: 70765 - RNA, 18 nt, Artificial Sequence
  Synthetic
agaucucuuacugaagga

SEQ ID NO: 70766 - RNA, 19 nt, Artificial Sequence
  Synthetic
aagaucucuuacugaagga

SEQ ID NO: 70767 - RNA, 20 nt, Artificial Sequence
  Synthetic
gaagaucucuuacugaagga

SEQ ID NO: 70768 - RNA, 21 nt, Artificial Sequence
  Synthetic
agaagaucucuuacugaagga

SEQ ID NO: 70769 - RNA, 22 nt, Artificial Sequence
  Synthetic
uagaagaucucuuacugaagga

SEQ ID NO: 70770 - RNA, 23 nt, Artificial Sequence
  Synthetic
cuagaagaucucuuacugaagga

SEQ ID NO: 70771 - RNA, 24 nt, Artificial Sequence
  Synthetic
ucuagaagaucucuuacugaagga

SEQ ID NO: 70772 - RNA, 18 nt, Artificial Sequence
  Synthetic
ugaggcauagcagcagga

SEQ ID NO: 70773 - RNA, 19 nt, Artificial Sequence
  Synthetic
augaggcauagcagcagga

SEQ ID NO: 70774 - RNA, 20 nt, Artificial Sequence
  Synthetic
gaugaggcauagcagcagga

SEQ ID NO: 70775 - RNA, 21 nt, Artificial Sequence
  Synthetic
agaugaggcauagcagcagga

SEQ ID NO: 70776 - RNA, 22 nt, Artificial Sequence
  Synthetic
aagaugaggcauagcagcagga

SEQ ID NO: 70777 - RNA, 23 nt, Artificial Sequence
  Synthetic
gaagaugaggcauagcagcagga

SEQ ID NO: 70778 - RNA, 24 nt, Artificial Sequence
  Synthetic
agaagaugaggcauagcagcagga

SEQ ID NO: 70779 - RNA, 18 nt, Artificial Sequence
  Synthetic
  misc_feature (3)..(3): n is a, c, g, or u
gangggucguccgcagga

SEQ ID NO: 70780 - RNA, 19 nt, Artificial Sequence
  Synthetic
  misc_feature (4)..(4): n is a, c, g, or u
agangggucguccgcagga

SEQ ID NO: 70781 - RNA, 20 nt, Artificial Sequence
  Synthetic
  misc_feature (5)..(5): n is a, c, g, or u
gagangggucguccgcagga

SEQ ID NO: 70782 - RNA, 21 nt, Artificial Sequence
  Synthetic
  misc_feature (6)..(6): n is a, c, g, or u
cgagangggucguccgcagga

SEQ ID NO: 70783 - RNA, 22 nt, Artificial Sequence
  Synthetic
  misc_feature (7)..(7): n is a, c, g, or u
ccgagangggucguccgcagga

SEQ ID NO: 70784 - RNA, 23 nt, Artificial Sequence
  Synthetic
  misc_feature (8)..(8): n is a, c, g, or u
cccgagangggucguccgcagga

SEQ ID NO: 70785 - RNA, 24 nt, Artificial Sequence
  Synthetic
  misc_feature (9)..(9): n is a, c, g, or u
ccccgagangggucguccgcagga

SEQ ID NO: 70786 - RNA, 18 nt, Artificial Sequence
  Synthetic
cgauugguggaggcagga

SEQ ID NO: 70787 - RNA, 19 nt, Artificial Sequence
  Synthetic
ccgauugguggaggcagga

SEQ ID NO: 70788 - RNA, 20 nt, Artificial Sequence
  Synthetic
gccgauugguggaggcagga

SEQ ID NO: 70789 - RNA, 21 nt, Artificial Sequence
  Synthetic
ugccgauugguggaggcagga

SEQ ID NO: 70790 - RNA, 22 nt, Artificial Sequence
  Synthetic
cugccgauugguggaggcagga

SEQ ID NO: 70791 - RNA, 23 nt, Artificial Sequence
  Synthetic
acugccgauugguggaggcagga

SEQ ID NO: 70792 - RNA, 24 nt, Artificial Sequence
  Synthetic
gacugccgauugguggaggcagga

SEQ ID NO: 70793 - RNA, 18 nt, Artificial Sequence
  Synthetic
ccaggacaaauuggagga

SEQ ID NO: 70794 - RNA, 19 nt, Artificial Sequence
  Synthetic
gccaggacaaauuggagga

SEQ ID NO: 70795 - RNA, 20 nt, Artificial Sequence
  Synthetic
agccaggacaaauuggagga

SEQ ID NO: 70796 - RNA, 21 nt, Artificial Sequence
  Synthetic
uagccaggacaaauuggagga

SEQ ID NO: 70797 - RNA, 22 nt, Artificial Sequence
  Synthetic
auagccaggacaaauuggagga

SEQ ID NO: 70798 - RNA, 23 nt, Artificial Sequence
  Synthetic
gauagccaggacaaauuggagga

SEQ ID NO: 70799 - RNA, 24 nt, Artificial Sequence
  Synthetic
cgauagccaggacaaauuggagga

SEQ ID NO: 70800 - RNA, 18 nt, Artificial Sequence
  Synthetic
gaggcuugaacaguagga

SEQ ID NO: 70801 - RNA, 19 nt, Artificial Sequence
  Synthetic
ggaggcuugaacaguagga

SEQ ID NO: 70802 - RNA, 20 nt, Artificial Sequence
  Synthetic
uggaggcuugaacaguagga

SEQ ID NO: 70803 - RNA, 21 nt, Artificial Sequence
  Synthetic
uuggaggcuugaacaguagga

SEQ ID NO: 70804 - RNA, 22 nt, Artificial Sequence
  Synthetic
cuuggaggcuugaacaguagga

SEQ ID NO: 70805 - RNA, 23 nt, Artificial Sequence
  Synthetic
gcuuggaggcuugaacaguagga

SEQ ID NO: 70806 - RNA, 24 nt, Artificial Sequence
  Synthetic
agcuuggaggcuugaacaguagga

SEQ ID NO: 70807 - RNA, 18 nt, Artificial Sequence
  Synthetic
ggaguuuuccaguuagga

SEQ ID NO: 70808 - RNA, 19 nt, Artificial Sequence
  Synthetic
uggaguuuuccaguuagga

SEQ ID NO: 70809 - RNA, 20 nt, Artificial Sequence
  Synthetic
auggaguuuuccaguuagga

SEQ ID NO: 70810 - RNA, 21 nt, Artificial Sequence
  Synthetic
gauggaguuuuccaguuagga

SEQ ID NO: 70811 - RNA, 22 nt, Artificial Sequence
  Synthetic
agauggaguuuuccaguuagga

SEQ ID NO: 70812 - RNA, 23 nt, Artificial Sequence
  Synthetic
aagauggaguuuuccaguuagga

SEQ ID NO: 70813 - RNA, 24 nt, Artificial Sequence
  Synthetic
aaagauggaguuuuccaguuagga

SEQ ID NO: 70814 - RNA, 18 nt, Artificial Sequence
  Synthetic
  misc_feature (3)..(3): n is a, c, g, or u
gcnggaacggcagacgga

SEQ ID NO: 70815 - RNA, 19 nt, Artificial Sequence
  Synthetic
  misc_feature (4)..(4): n is a, c, g, or u
ggcnggaacggcagacgga

SEQ ID NO: 70816 - RNA, 20 nt, Artificial Sequence
  Synthetic
  misc_feature (5)..(5): n is a, c, g, or u
cggcnggaacggcagacgga

SEQ ID NO: 70817 - RNA, 21 nt, Artificial Sequence
  Synthetic
  misc_feature (6)..(6): n is a, c, g, or u
ucggcnggaacggcagacgga

SEQ ID NO: 70818 - RNA, 22 nt, Artificial Sequence
  Synthetic
  misc_feature (7)..(7): n is a, c, g, or u
gucggcnggaacggcagacgga

SEQ ID NO: 70819 - RNA, 23 nt, Artificial Sequence
  Synthetic
  misc_feature (8)..(8): n is a, c, g, or u
ggucggcnggaacggcagacgga

SEQ ID NO: 70820 - RNA, 24 nt, Artificial Sequence
  Synthetic
  misc_feature (9)..(9): n is a, c, g, or u
uggucggcnggaacggcagacgga

SEQ ID NO: 70821 - RNA, 18 nt, Artificial Sequence
  Synthetic
aggguucacuguuccgga

SEQ ID NO: 70822 - RNA, 19 nt, Artificial Sequence
  Synthetic
caggguucacuguuccgga

SEQ ID NO: 70823 - RNA, 20 nt, Artificial Sequence
  Synthetic
acaggguucacuguuccgga

SEQ ID NO: 70824 - RNA, 18 nt, Artificial Sequence
  Synthetic
agugaggcaguagucgga

SEQ ID NO: 70825 - RNA, 19 nt, Artificial Sequence
  Synthetic
gagugaggcaguagucgga

SEQ ID NO: 70826 - RNA, 20 nt, Artificial Sequence
  Synthetic
ugagugaggcaguagucgga

SEQ ID NO: 70827 - RNA, 21 nt, Artificial Sequence
  Synthetic
augagugaggcaguagucgga

SEQ ID NO: 70828 - RNA, 22 nt, Artificial Sequence
  Synthetic
gaugagugaggcaguagucgga

SEQ ID NO: 70829 - RNA, 23 nt, Artificial Sequence
  Synthetic
agaugagugaggcaguagucgga

SEQ ID NO: 70830 - RNA, 24 nt, Artificial Sequence
  Synthetic
gagaugagugaggcaguagucgga

SEQ ID NO: 70831 - RNA, 18 nt, Artificial Sequence
  Synthetic
aacagagguauaaaggga

SEQ ID NO: 70832 - RNA, 19 nt, Artificial Sequence
  Synthetic
uaacagagguauaaaggga

SEQ ID NO: 70833 - RNA, 20 nt, Artificial Sequence
  Synthetic
guaacagagguauaaaggga

SEQ ID NO: 70834 - RNA, 21 nt, Artificial Sequence
  Synthetic
gguaacagagguauaaaggga

SEQ ID NO: 70835 - RNA, 22 nt, Artificial Sequence
  Synthetic
ugguaacagagguauaaaggga

SEQ ID NO: 70836 - RNA, 23 nt, Artificial Sequence
  Synthetic
uugguaacagagguauaaaggga

SEQ ID NO: 70837 - RNA, 24 nt, Artificial Sequence
  Synthetic
auugguaacagagguauaaaggga

SEQ ID NO: 70838 - RNA, 18 nt, Artificial Sequence
  Synthetic
gauucagcgcugacggga

SEQ ID NO: 70839 - RNA, 19 nt, Artificial Sequence
  Synthetic
ggauucagcgcugacggga

SEQ ID NO: 70840 - RNA, 20 nt, Artificial Sequence
  Synthetic
aggauucagcgcugacggga

SEQ ID NO: 70841 - RNA, 21 nt, Artificial Sequence
  Synthetic
caggauucagcgcugacggga

SEQ ID NO: 70842 - RNA, 22 nt, Artificial Sequence
  Synthetic
gcaggauucagcgcugacggga

SEQ ID NO: 70843 - RNA, 23 nt, Artificial Sequence
  Synthetic
cgcaggauucagcgcugacggga

SEQ ID NO: 70844 - RNA, 24 nt, Artificial Sequence
  Synthetic
ccgcaggauucagcgcugacggga

SEQ ID NO: 70845 - RNA, 18 nt, Artificial Sequence
  Synthetic
  misc_feature (1)..(1): n is a, c, g, or u
ngauguauauuuccggga

SEQ ID NO: 70846 - RNA, 19 nt, Artificial Sequence
  Synthetic
  misc_feature (2)..(2): n is a, c, g, or u
angauguauauuuccggga

SEQ ID NO: 70847 - RNA, 20 nt, Artificial Sequence
  Synthetic
  misc_feature (3)..(3): n is a, c, g, or u
aangauguauauuuccggga

SEQ ID NO: 70848 - RNA, 21 nt, Artificial Sequence
  Synthetic
  misc_feature (4)..(4): n is a, c, g, or u
aaangauguauauuuccggga

SEQ ID NO: 70849 - RNA, 22 nt, Artificial Sequence
  Synthetic
  misc_feature (5)..(5): n is a, c, g, or u
gaaangauguauauuuccggga

SEQ ID NO: 70850 - RNA, 23 nt, Artificial Sequence
  Synthetic
  misc_feature (6)..(6): n is a, c, g, or u
ggaaangauguauauuuccggga

SEQ ID NO: 70851 - RNA, 24 nt, Artificial Sequence
  Synthetic
  misc_feature (7)..(7): n is a, c, g, or u
uggaaangauguauauuuccggga

SEQ ID NO: 70852 - RNA, 18 nt, Artificial Sequence
  Synthetic
aggccuccguguggggga

SEQ ID NO: 70853 - RNA, 19 nt, Artificial Sequence
  Synthetic
aaggccuccguguggggga

SEQ ID NO: 70854 - RNA, 20 nt, Artificial Sequence
  Synthetic
aaaggccuccguguggggga

SEQ ID NO: 70855 - RNA, 21 nt, Artificial Sequence
  Synthetic
aaaaggccuccguguggggga

SEQ ID NO: 70856 - RNA, 22 nt, Artificial Sequence
  Synthetic
caaaaggccuccguguggggga

SEQ ID NO: 70857 - RNA, 23 nt, Artificial Sequence
  Synthetic
ccaaaaggccuccguguggggga

SEQ ID NO: 70858 - RNA, 24 nt, Artificial Sequence
  Synthetic
cccaaaaggccuccguguggggga

SEQ ID NO: 70859 - RNA, 18 nt, Artificial Sequence
  Synthetic
aagcccaugaugauggga

SEQ ID NO: 70860 - RNA, 19 nt, Artificial Sequence
  Synthetic
aaagcccaugaugauggga

SEQ ID NO: 70861 - RNA, 20 nt, Artificial Sequence
  Synthetic
gaaagcccaugaugauggga

SEQ ID NO: 70862 - RNA, 21 nt, Artificial Sequence
  Synthetic
cgaaagcccaugaugauggga

SEQ ID NO: 70863 - RNA, 22 nt, Artificial Sequence
  Synthetic
ccgaaagcccaugaugauggga

SEQ ID NO: 70864 - RNA, 23 nt, Artificial Sequence
  Synthetic
uccgaaagcccaugaugauggga

SEQ ID NO: 70865 - RNA, 24 nt, Artificial Sequence
  Synthetic
uuccgaaagcccaugaugauggga

SEQ ID NO: 70866 - RNA, 18 nt, Artificial Sequence
  Synthetic
cuuuuuguuuuguuggga

SEQ ID NO: 70867 - RNA, 19 nt, Artificial Sequence
  Synthetic
ucuuuuuguuuuguuggga

SEQ ID NO: 70868 - RNA, 20 nt, Artificial Sequence
  Synthetic
aucuuuuuguuuuguuggga

SEQ ID NO: 70869 - RNA, 21 nt, Artificial Sequence
  Synthetic
caucuuuuuguuuuguuggga

SEQ ID NO: 70870 - RNA, 22 nt, Artificial Sequence
  Synthetic
ccaucuuuuuguuuuguuggga

SEQ ID NO: 70871 - RNA, 23 nt, Artificial Sequence
  Synthetic
cccaucuuuuuguuuuguuggga

SEQ ID NO: 70872 - RNA, 24 nt, Artificial Sequence
  Synthetic
ccccaucuuuuuguuuuguuggga

SEQ ID NO: 70873 - RNA, 18 nt, Artificial Sequence
  Synthetic
gugguugaugauccugga

SEQ ID NO: 70874 - RNA, 19 nt, Artificial Sequence
  Synthetic
ggugguugaugauccugga

SEQ ID NO: 70875 - RNA, 20 nt, Artificial Sequence
  Synthetic
uggugguugaugauccugga

SEQ ID NO: 70876 - RNA, 21 nt, Artificial Sequence
  Synthetic
cuggugguugaugauccugga

SEQ ID NO: 70877 - RNA, 22 nt, Artificial Sequence
  Synthetic
acuggugguugaugauccugga

SEQ ID NO: 70878 - RNA, 23 nt, Artificial Sequence
  Synthetic
uacuggugguugaugauccugga

SEQ ID NO: 70879 - RNA, 24 nt, Artificial Sequence
  Synthetic
guacuggugguugaugauccugga

SEQ ID NO: 70880 - RNA, 18 nt, Artificial Sequence
  Synthetic
uuugcucugaaugcugga

SEQ ID NO: 70881 - RNA, 19 nt, Artificial Sequence
  Synthetic
guuugcucugaaugcugga

SEQ ID NO: 70882 - RNA, 20 nt, Artificial Sequence
  Synthetic
uguuugcucugaaugcugga

SEQ ID NO: 70883 - RNA, 21 nt, Artificial Sequence
  Synthetic
guguuugcucugaaugcugga

SEQ ID NO: 70884 - RNA, 22 nt, Artificial Sequence
  Synthetic
gguguuugcucugaaugcugga

SEQ ID NO: 70885 - RNA, 23 nt, Artificial Sequence
  Synthetic
ugguguuugcucugaaugcugga

SEQ ID NO: 70886 - RNA, 24 nt, Artificial Sequence
  Synthetic
cugguguuugcucugaaugcugga

SEQ ID NO: 70887 - RNA, 18 nt, Artificial Sequence
  Synthetic
ugacugccgauuggugga

SEQ ID NO: 70888 - RNA, 19 nt, Artificial Sequence
  Synthetic
cugacugccgauuggugga

SEQ ID NO: 70889 - RNA, 20 nt, Artificial Sequence
  Synthetic
ccugacugccgauuggugga

SEQ ID NO: 70890 - RNA, 21 nt, Artificial Sequence
  Synthetic
uccugacugccgauuggugga

SEQ ID NO: 70891 - RNA, 22 nt, Artificial Sequence
  Synthetic
uuccugacugccgauuggugga

SEQ ID NO: 70892 - RNA, 23 nt, Artificial Sequence
  Synthetic
cuuccugacugccgauuggugga

SEQ ID NO: 70893 - RNA, 24 nt, Artificial Sequence
  Synthetic
ccuuccugacugccgauuggugga

SEQ ID NO: 70894 - RNA, 18 nt, Artificial Sequence
  Synthetic
uuuugaacagcaacauga

SEQ ID NO: 70895 - RNA, 19 nt, Artificial Sequence
  Synthetic
guuuugaacagcaacauga

SEQ ID NO: 70896 - RNA, 20 nt, Artificial Sequence
  Synthetic
gguuuugaacagcaacauga

SEQ ID NO: 70897 - RNA, 21 nt, Artificial Sequence
  Synthetic
agguuuugaacagcaacauga

SEQ ID NO: 70898 - RNA, 22 nt, Artificial Sequence
  Synthetic
aagguuuugaacagcaacauga

SEQ ID NO: 70899 - RNA, 23 nt, Artificial Sequence
  Synthetic
gaagguuuugaacagcaacauga

SEQ ID NO: 70900 - RNA, 24 nt, Artificial Sequence
  Synthetic
cgaagguuuugaacagcaacauga

SEQ ID NO: 70901 - RNA, 18 nt, Artificial Sequence
  Synthetic
uugaacaguaggacauga

SEQ ID NO: 70902 - RNA, 19 nt, Artificial Sequence
  Synthetic
cuugaacaguaggacauga

SEQ ID NO: 70903 - RNA, 20 nt, Artificial Sequence
  Synthetic
gcuugaacaguaggacauga

SEQ ID NO: 70904 - RNA, 21 nt, Artificial Sequence
  Synthetic
ggcuugaacaguaggacauga

SEQ ID NO: 70905 - RNA, 22 nt, Artificial Sequence
  Synthetic
aggcuugaacaguaggacauga

SEQ ID NO: 70906 - RNA, 23 nt, Artificial Sequence
  Synthetic
gaggcuugaacaguaggacauga

SEQ ID NO: 70907 - RNA, 24 nt, Artificial Sequence
  Synthetic
ggaggcuugaacaguaggacauga

SEQ ID NO: 70908 - RNA, 18 nt, Artificial Sequence
  Synthetic
uccaagaaagccccauga

SEQ ID NO: 70909 - RNA, 19 nt, Artificial Sequence
  Synthetic
guccaagaaagccccauga

SEQ ID NO: 70910 - RNA, 20 nt, Artificial Sequence
  Synthetic
cguccaagaaagccccauga

SEQ ID NO: 70911 - RNA, 21 nt, Artificial Sequence
  Synthetic
ccguccaagaaagccccauga

SEQ ID NO: 70912 - RNA, 22 nt, Artificial Sequence
  Synthetic
accguccaagaaagccccauga

SEQ ID NO: 70913 - RNA, 23 nt, Artificial Sequence
  Synthetic
gaccguccaagaaagccccauga

SEQ ID NO: 70914 - RNA, 24 nt, Artificial Sequence
  Synthetic
ggaccguccaagaaagccccauga

SEQ ID NO: 70915 - RNA, 18 nt, Artificial Sequence
  Synthetic
ggaugaagaggaagauga

SEQ ID NO: 70916 - RNA, 19 nt, Artificial Sequence
  Synthetic
aggaugaagaggaagauga

SEQ ID NO: 70917 - RNA, 20 nt, Artificial Sequence
  Synthetic
caggaugaagaggaagauga

SEQ ID NO: 70918 - RNA, 21 nt, Artificial Sequence
  Synthetic
gcaggaugaagaggaagauga

SEQ ID NO: 70919 - RNA, 22 nt, Artificial Sequence
  Synthetic
agcaggaugaagaggaagauga

SEQ ID NO: 70920 - RNA, 23 nt, Artificial Sequence
  Synthetic
cagcaggaugaagaggaagauga

SEQ ID NO: 70921 - RNA, 24 nt, Artificial Sequence
  Synthetic
gcagcaggaugaagaggaagauga

SEQ ID NO: 70922 - RNA, 18 nt, Artificial Sequence
  Synthetic
acacgguccggcagauga

SEQ ID NO: 70923 - RNA, 19 nt, Artificial Sequence
  Synthetic
cacacgguccggcagauga

SEQ ID NO: 70924 - RNA, 20 nt, Artificial Sequence
  Synthetic
gcacacgguccggcagauga

SEQ ID NO: 70925 - RNA, 18 nt, Artificial Sequence
  Synthetic
gacaugaacaagagauga

SEQ ID NO: 70926 - RNA, 19 nt, Artificial Sequence
  Synthetic
ggacaugaacaagagauga

SEQ ID NO: 70927 - RNA, 20 nt, Artificial Sequence
  Synthetic
aggacaugaacaagagauga

SEQ ID NO: 70928 - RNA, 21 nt, Artificial Sequence
  Synthetic
uaggacaugaacaagagauga

SEQ ID NO: 70929 - RNA, 22 nt, Artificial Sequence
  Synthetic
guaggacaugaacaagagauga

SEQ ID NO: 70930 - RNA, 23 nt, Artificial Sequence
  Synthetic
aguaggacaugaacaagagauga

SEQ ID NO: 70931 - RNA, 24 nt, Artificial Sequence
  Synthetic
caguaggacaugaacaagagauga

SEQ ID NO: 70932 - RNA, 18 nt, Artificial Sequence
  Synthetic
agaagauugacgagauga

SEQ ID NO: 70933 - RNA, 19 nt, Artificial Sequence
  Synthetic
gagaagauugacgagauga

SEQ ID NO: 70934 - RNA, 20 nt, Artificial Sequence
  Synthetic
cgagaagauugacgagauga

SEQ ID NO: 70935 - RNA, 21 nt, Artificial Sequence
  Synthetic
ucgagaagauugacgagauga

SEQ ID NO: 70936 - RNA, 22 nt, Artificial Sequence
  Synthetic
cucgagaagauugacgagauga

SEQ ID NO: 70937 - RNA, 23 nt, Artificial Sequence
  Synthetic
ccucgagaagauugacgagauga

SEQ ID NO: 70938 - RNA, 24 nt, Artificial Sequence
  Synthetic
uccucgagaagauugacgagauga

SEQ ID NO: 70939 - RNA, 18 nt, Artificial Sequence
  Synthetic
ggcauagcagcaggauga

SEQ ID NO: 70940 - RNA, 19 nt, Artificial Sequence
  Synthetic
aggcauagcagcaggauga

SEQ ID NO: 70941 - RNA, 20 nt, Artificial Sequence
  Synthetic
gaggcauagcagcaggauga

SEQ ID NO: 70942 - RNA, 21 nt, Artificial Sequence
  Synthetic
ugaggcauagcagcaggauga

SEQ ID NO: 70943 - RNA, 22 nt, Artificial Sequence
  Synthetic
augaggcauagcagcaggauga

SEQ ID NO: 70944 - RNA, 23 nt, Artificial Sequence
  Synthetic
gaugaggcauagcagcaggauga

SEQ ID NO: 70945 - RNA, 24 nt, Artificial Sequence
  Synthetic
agaugaggcauagcagcaggauga

SEQ ID NO: 70946 - RNA, 18 nt, Artificial Sequence
  Synthetic
auggcacuaguaaacuga

SEQ ID NO: 70947 - RNA, 19 nt, Artificial Sequence
  Synthetic
aauggcacuaguaaacuga

SEQ ID NO: 70948 - RNA, 20 nt, Artificial Sequence
  Synthetic
aaauggcacuaguaaacuga

SEQ ID NO: 70949 - RNA, 21 nt, Artificial Sequence
  Synthetic
caaauggcacuaguaaacuga

SEQ ID NO: 70950 - RNA, 22 nt, Artificial Sequence
  Synthetic
acaaauggcacuaguaaacuga

SEQ ID NO: 70951 - RNA, 23 nt, Artificial Sequence
  Synthetic
aacaaauggcacuaguaaacuga

SEQ ID NO: 70952 - RNA, 24 nt, Artificial Sequence
  Synthetic
gaacaaauggcacuaguaaacuga

SEQ ID NO: 70953 - RNA, 18 nt, Artificial Sequence
  Synthetic
uagaagaucucuuacuga

SEQ ID NO: 70954 - RNA, 19 nt, Artificial Sequence
  Synthetic
cuagaagaucucuuacuga

SEQ ID NO: 70955 - RNA, 20 nt, Artificial Sequence
  Synthetic
ucuagaagaucucuuacuga

SEQ ID NO: 70956 - RNA, 21 nt, Artificial Sequence
  Synthetic
aucuagaagaucucuuacuga

SEQ ID NO: 70957 - RNA, 22 nt, Artificial Sequence
  Synthetic
uaucuagaagaucucuuacuga

SEQ ID NO: 70958 - RNA, 23 nt, Artificial Sequence
  Synthetic
guaucuagaagaucucuuacuga

SEQ ID NO: 70959 - RNA, 24 nt, Artificial Sequence
  Synthetic
gguaucuagaagaucucuuacuga

SEQ ID NO: 70960 - RNA, 18 nt, Artificial Sequence
  Synthetic
cgcaggauucagcgcuga

SEQ ID NO: 70961 - RNA, 19 nt, Artificial Sequence
  Synthetic
ccgcaggauucagcgcuga

SEQ ID NO: 70962 - RNA, 20 nt, Artificial Sequence
  Synthetic
uccgcaggauucagcgcuga

SEQ ID NO: 70963 - RNA, 18 nt, Artificial Sequence
  Synthetic
uuucucuuccaaaaguga

SEQ ID NO: 70964 - RNA, 19 nt, Artificial Sequence
  Synthetic
guuucucuuccaaaaguga

SEQ ID NO: 70965 - RNA, 20 nt, Artificial Sequence
  Synthetic
gguuucucuuccaaaaguga

SEQ ID NO: 70966 - RNA, 21 nt, Artificial Sequence
  Synthetic
cgguuucucuuccaaaaguga

SEQ ID NO: 70967 - RNA, 22 nt, Artificial Sequence
  Synthetic
acgguuucucuuccaaaaguga

SEQ ID NO: 70968 - RNA, 23 nt, Artificial Sequence
  Synthetic
gacgguuucucuuccaaaaguga

SEQ ID NO: 70969 - RNA, 24 nt, Artificial Sequence
  Synthetic
  misc_feature (1)..(1): n is a, c, g, or u
ngacgguuucucuuccaaaaguga

SEQ ID NO: 70970 - RNA, 18 nt, Artificial Sequence
  Synthetic
cucucaaagguggaguga

SEQ ID NO: 70971 - RNA, 19 nt, Artificial Sequence
  Synthetic
ucucucaaagguggaguga

SEQ ID NO: 70972 - RNA, 20 nt, Artificial Sequence
  Synthetic
gucucucaaagguggaguga

SEQ ID NO: 70973 - RNA, 21 nt, Artificial Sequence
  Synthetic
ugucucucaaagguggaguga

SEQ ID NO: 70974 - RNA, 22 nt, Artificial Sequence
  Synthetic
gugucucucaaagguggaguga

SEQ ID NO: 70975 - RNA, 23 nt, Artificial Sequence
  Synthetic
agugucucucaaagguggaguga

SEQ ID NO: 70976 - RNA, 24 nt, Artificial Sequence
  Synthetic
gagugucucucaaagguggaguga

SEQ ID NO: 70977 - RNA, 18 nt, Artificial Sequence
  Synthetic
caagagguuggugaguga

SEQ ID NO: 70978 - RNA, 19 nt, Artificial Sequence
  Synthetic
acaagagguuggugaguga

SEQ ID NO: 70979 - RNA, 20 nt, Artificial Sequence
  Synthetic
gacaagagguuggugaguga

SEQ ID NO: 70980 - RNA, 21 nt, Artificial Sequence
  Synthetic
ggacaagagguuggugaguga

SEQ ID NO: 70981 - RNA, 22 nt, Artificial Sequence
  Synthetic
aggacaagagguuggugaguga

SEQ ID NO: 70982 - RNA, 23 nt, Artificial Sequence
  Synthetic
gaggacaagagguuggugaguga

SEQ ID NO: 70983 - RNA, 24 nt, Artificial Sequence
  Synthetic
ggaggacaagagguuggugaguga

SEQ ID NO: 70984 - RNA, 18 nt, Artificial Sequence
  Synthetic
ugcgacgugcagagguga

SEQ ID NO: 70985 - RNA, 19 nt, Artificial Sequence
  Synthetic
augcgacgugcagagguga

SEQ ID NO: 70986 - RNA, 20 nt, Artificial Sequence
  Synthetic
caugcgacgugcagagguga

SEQ ID NO: 70987 - RNA, 21 nt, Artificial Sequence
  Synthetic
ccaugcgacgugcagagguga

SEQ ID NO: 70988 - RNA, 22 nt, Artificial Sequence
  Synthetic
uccaugcgacgugcagagguga

SEQ ID NO: 70989 - RNA, 23 nt, Artificial Sequence
  Synthetic
cuccaugcgacgugcagagguga

SEQ ID NO: 70990 - RNA, 24 nt, Artificial Sequence
  Synthetic
ucuccaugcgacgugcagagguga

SEQ ID NO: 70991 - RNA, 18 nt, Artificial Sequence
  Synthetic
cucccccuagaaaauuga

SEQ ID NO: 70992 - RNA, 19 nt, Artificial Sequence
  Synthetic
gcucccccuagaaaauuga

SEQ ID NO: 70993 - RNA, 20 nt, Artificial Sequence
  Synthetic
agcucccccuagaaaauuga

SEQ ID NO: 70994 - RNA, 21 nt, Artificial Sequence
  Synthetic
gagcucccccuagaaaauuga

SEQ ID NO: 70995 - RNA, 22 nt, Artificial Sequence
  Synthetic
ggagcucccccuagaaaauuga

SEQ ID NO: 70996 - RNA, 23 nt, Artificial Sequence
  Synthetic
gggagcucccccuagaaaauuga

SEQ ID NO: 70997 - RNA, 24 nt, Artificial Sequence
  Synthetic
cgggagcucccccuagaaaauuga

SEQ ID NO: 70998 - RNA, 18 nt, Artificial Sequence
  Synthetic
ggcccauauuaguauuga

SEQ ID NO: 70999 - RNA, 19 nt, Artificial Sequence
  Synthetic
aggcccauauuaguauuga

SEQ ID NO: 71000 - RNA, 20 nt, Artificial Sequence
  Synthetic
uaggcccauauuaguauuga

SEQ ID NO: 71001 - RNA, 21 nt, Artificial Sequence
  Synthetic
uuaggcccauauuaguauuga

SEQ ID NO: 71002 - RNA, 22 nt, Artificial Sequence
  Synthetic
uuuaggcccauauuaguauuga

SEQ ID NO: 71003 - RNA, 23 nt, Artificial Sequence
  Synthetic
cuuuaggcccauauuaguauuga

SEQ ID NO: 71004 - RNA, 24 nt, Artificial Sequence
  Synthetic
acuuuaggcccauauuaguauuga

SEQ ID NO: 71005 - RNA, 18 nt, Artificial Sequence
  Synthetic
aacauagagguuccuuga

SEQ ID NO: 71006 - RNA, 19 nt, Artificial Sequence
  Synthetic
aaacauagagguuccuuga

SEQ ID NO: 71007 - RNA, 20 nt, Artificial Sequence
  Synthetic
gaaacauagagguuccuuga

SEQ ID NO: 71008 - RNA, 21 nt, Artificial Sequence
  Synthetic
ggaaacauagagguuccuuga

SEQ ID NO: 71009 - RNA, 22 nt, Artificial Sequence
  Synthetic
gggaaacauagagguuccuuga

SEQ ID NO: 71010 - RNA, 23 nt, Artificial Sequence
  Synthetic
agggaaacauagagguuccuuga

SEQ ID NO: 71011 - RNA, 24 nt, Artificial Sequence
  Synthetic
gagggaaacauagagguuccuuga

SEQ ID NO: 71012 - RNA, 18 nt, Artificial Sequence
  Synthetic
uccuggugcaaaugaaua

SEQ ID NO: 71013 - RNA, 19 nt, Artificial Sequence
  Synthetic
guccuggugcaaaugaaua

SEQ ID NO: 71014 - RNA, 20 nt, Artificial Sequence
  Synthetic
uguccuggugcaaaugaaua

SEQ ID NO: 71015 - RNA, 21 nt, Artificial Sequence
  Synthetic
auguccuggugcaaaugaaua

SEQ ID NO: 71016 - RNA, 22 nt, Artificial Sequence
  Synthetic
aauguccuggugcaaaugaaua

SEQ ID NO: 71017 - RNA, 23 nt, Artificial Sequence
  Synthetic
uaauguccuggugcaaaugaaua

SEQ ID NO: 71018 - RNA, 24 nt, Artificial Sequence
  Synthetic
auaauguccuggugcaaaugaaua

SEQ ID NO: 71019 - RNA, 18 nt, Artificial Sequence
  Synthetic
cauauuaguauugacaua

SEQ ID NO: 71020 - RNA, 19 nt, Artificial Sequence
  Synthetic
ccauauuaguauugacaua

SEQ ID NO: 71021 - RNA, 20 nt, Artificial Sequence
  Synthetic
cccauauuaguauugacaua

SEQ ID NO: 71022 - RNA, 21 nt, Artificial Sequence
  Synthetic
gcccauauuaguauugacaua

SEQ ID NO: 71023 - RNA, 22 nt, Artificial Sequence
  Synthetic
ggcccauauuaguauugacaua

SEQ ID NO: 71024 - RNA, 23 nt, Artificial Sequence
  Synthetic
aggcccauauuaguauugacaua

SEQ ID NO: 71025 - RNA, 24 nt, Artificial Sequence
  Synthetic
uaggcccauauuaguauugacaua

SEQ ID NO: 71026 - RNA, 18 nt, Artificial Sequence
  Synthetic
agauugaauacacgcaua

SEQ ID NO: 71027 - RNA, 19 nt, Artificial Sequence
  Synthetic
uagauugaauacacgcaua

SEQ ID NO: 71028 - RNA, 20 nt, Artificial Sequence
  Synthetic
uuagauugaauacacgcaua

SEQ ID NO: 71029 - RNA, 21 nt, Artificial Sequence
  Synthetic
cuuagauugaauacacgcaua

SEQ ID NO: 71030 - RNA, 22 nt, Artificial Sequence
  Synthetic
gcuuagauugaauacacgcaua

SEQ ID NO: 71031 - RNA, 23 nt, Artificial Sequence
  Synthetic
ugcuuagauugaauacacgcaua

SEQ ID NO: 71032 - RNA, 24 nt, Artificial Sequence
  Synthetic
cugcuuagauugaauacacgcaua

SEQ ID NO: 71033 - RNA, 18 nt, Artificial Sequence
  Synthetic
uucuaaggcaucccgaua

SEQ ID NO: 71034 - RNA, 19 nt, Artificial Sequence
  Synthetic
auucuaaggcaucccgaua

SEQ ID NO: 71035 - RNA, 20 nt, Artificial Sequence
  Synthetic
gauucuaaggcaucccgaua

SEQ ID NO: 71036 - RNA, 21 nt, Artificial Sequence
  Synthetic
agauucuaaggcaucccgaua

SEQ ID NO: 71037 - RNA, 22 nt, Artificial Sequence
  Synthetic
gagauucuaaggcaucccgaua

SEQ ID NO: 71038 - RNA, 23 nt, Artificial Sequence
  Synthetic
ggagauucuaaggcaucccgaua

SEQ ID NO: 71039 - RNA, 24 nt, Artificial Sequence
  Synthetic
aggagauucuaaggcaucccgaua

SEQ ID NO: 71040 - RNA, 18 nt, Artificial Sequence
  Synthetic
cagacacauccagcgaua

SEQ ID NO: 71041 - RNA, 19 nt, Artificial Sequence
  Synthetic
gcagacacauccagcgaua

SEQ ID NO: 71042 - RNA, 20 nt, Artificial Sequence
  Synthetic
cgcagacacauccagcgaua

SEQ ID NO: 71043 - RNA, 21 nt, Artificial Sequence
  Synthetic
ccgcagacacauccagcgaua

SEQ ID NO: 71044 - RNA, 22 nt, Artificial Sequence
  Synthetic
gccgcagacacauccagcgaua

SEQ ID NO: 71045 - RNA, 23 nt, Artificial Sequence
  Synthetic
cgccgcagacacauccagcgaua

SEQ ID NO: 71046 - RNA, 24 nt, Artificial Sequence
  Synthetic
acgccgcagacacauccagcgaua

SEQ ID NO: 71047 - RNA, 18 nt, Artificial Sequence
  Synthetic
aacuacauuaucuggaua

SEQ ID NO: 71048 - RNA, 19 nt, Artificial Sequence
  Synthetic
uaacuacauuaucuggaua

SEQ ID NO: 71049 - RNA, 20 nt, Artificial Sequence
  Synthetic
uuaacuacauuaucuggaua

SEQ ID NO: 71050 - RNA, 21 nt, Artificial Sequence
  Synthetic
auuaacuacauuaucuggaua

SEQ ID NO: 71051 - RNA, 22 nt, Artificial Sequence
  Synthetic
gauuaacuacauuaucuggaua

SEQ ID NO: 71052 - RNA, 23 nt, Artificial Sequence
  Synthetic
ugauuaacuacauuaucuggaua

SEQ ID NO: 71053 - RNA, 24 nt, Artificial Sequence
  Synthetic
augauuaacuacauuaucuggaua

SEQ ID NO: 71054 - RNA, 18 nt, Artificial Sequence
  Synthetic
uaccacaucauccauaua

SEQ ID NO: 71055 - RNA, 19 nt, Artificial Sequence
  Synthetic
auaccacaucauccauaua

SEQ ID NO: 71056 - RNA, 20 nt, Artificial Sequence
  Synthetic
aauaccacaucauccauaua

SEQ ID NO: 71057 - RNA, 21 nt, Artificial Sequence
  Synthetic
caauaccacaucauccauaua

SEQ ID NO: 71058 - RNA, 22 nt, Artificial Sequence
  Synthetic
ccaauaccacaucauccauaua

SEQ ID NO: 71059 - RNA, 23 nt, Artificial Sequence
  Synthetic
cccaauaccacaucauccauaua

SEQ ID NO: 71060 - RNA, 24 nt, Artificial Sequence
  Synthetic
ccccaauaccacaucauccauaua

SEQ ID NO: 71061 - RNA, 18 nt, Artificial Sequence
  Synthetic
ggauuaaagacagguaua

SEQ ID NO: 71062 - RNA, 19 nt, Artificial Sequence
  Synthetic
aggauuaaagacagguaua

SEQ ID NO: 71063 - RNA, 20 nt, Artificial Sequence
  Synthetic
uaggauuaaagacagguaua

SEQ ID NO: 71064 - RNA, 21 nt, Artificial Sequence
  Synthetic
uuaggauuaaagacagguaua

SEQ ID NO: 71065 - RNA, 22 nt, Artificial Sequence
  Synthetic
guuaggauuaaagacagguaua

SEQ ID NO: 71066 - RNA, 23 nt, Artificial Sequence
  Synthetic
aguuaggauuaaagacagguaua

SEQ ID NO: 71067 - RNA, 24 nt, Artificial Sequence
  Synthetic
caguuaggauuaaagacagguaua

SEQ ID NO: 71068 - RNA, 18 nt, Artificial Sequence
  Synthetic
auugguaacagagguaua

SEQ ID NO: 71069 - RNA, 19 nt, Artificial Sequence
  Synthetic
aauugguaacagagguaua

SEQ ID NO: 71070 - RNA, 20 nt, Artificial Sequence
  Synthetic
aaauugguaacagagguaua

SEQ ID NO: 71071 - RNA, 21 nt, Artificial Sequence
  Synthetic
aaaauugguaacagagguaua

SEQ ID NO: 71072 - RNA, 22 nt, Artificial Sequence
  Synthetic
gaaaauugguaacagagguaua

SEQ ID NO: 71073 - RNA, 23 nt, Artificial Sequence
  Synthetic
agaaaauugguaacagagguaua

SEQ ID NO: 71074 - RNA, 24 nt, Artificial Sequence
  Synthetic
aagaaaauugguaacagagguaua

SEQ ID NO: 71075 - RNA, 18 nt, Artificial Sequence
  Synthetic
uugggauuuaaauguaua

SEQ ID NO: 71076 - RNA, 19 nt, Artificial Sequence
  Synthetic
guugggauuuaaauguaua

SEQ ID NO: 71077 - RNA, 20 nt, Artificial Sequence
  Synthetic
uguugggauuuaaauguaua

SEQ ID NO: 71078 - RNA, 21 nt, Artificial Sequence
  Synthetic
uuguugggauuuaaauguaua

SEQ ID NO: 71079 - RNA, 22 nt, Artificial Sequence
  Synthetic
uuuguugggauuuaaauguaua

SEQ ID NO: 71080 - RNA, 23 nt, Artificial Sequence
  Synthetic
uuuuguugggauuuaaauguaua

SEQ ID NO: 71081 - RNA, 24 nt, Artificial Sequence
  Synthetic
guuuuguugggauuuaaauguaua

SEQ ID NO: 71082 - RNA, 18 nt, Artificial Sequence
  Synthetic
acugaacaaauggcacua

SEQ ID NO: 71083 - RNA, 19 nt, Artificial Sequence
  Synthetic
cacugaacaaauggcacua

SEQ ID NO: 71084 - RNA, 20 nt, Artificial Sequence
  Synthetic
ccacugaacaaauggcacua

SEQ ID NO: 71085 - RNA, 21 nt, Artificial Sequence
  Synthetic
accacugaacaaauggcacua

SEQ ID NO: 71086 - RNA, 22 nt, Artificial Sequence
  Synthetic
aaccacugaacaaauggcacua

SEQ ID NO: 71087 - RNA, 23 nt, Artificial Sequence
  Synthetic
gaaccacugaacaaauggcacua

SEQ ID NO: 71088 - RNA, 24 nt, Artificial Sequence
  Synthetic
cgaaccacugaacaaauggcacua

SEQ ID NO: 71089 - RNA, 18 nt, Artificial Sequence
  Synthetic
gagaugggaaaaaaucua

SEQ ID NO: 71090 - RNA, 19 nt, Artificial Sequence
  Synthetic
agagaugggaaaaaaucua

SEQ ID NO: 71091 - RNA, 20 nt, Artificial Sequence
  Synthetic
uagagaugggaaaaaaucua

SEQ ID NO: 71092 - RNA, 21 nt, Artificial Sequence
  Synthetic
guagagaugggaaaaaaucua

SEQ ID NO: 71093 - RNA, 22 nt, Artificial Sequence
  Synthetic
  misc_feature (1)..(1): n is a, c, g, or u
nguagagaugggaaaaaaucua

SEQ ID NO: 71094 - RNA, 23 nt, Artificial Sequence
  Synthetic
  misc_feature (2)..(2): n is a, c, g, or u
unguagagaugggaaaaaaucua

SEQ ID NO: 71095 - RNA, 24 nt, Artificial Sequence
  Synthetic
  misc_feature (3)..(3): n is a, c, g, or u
uunguagagaugggaaaaaaucua

SEQ ID NO: 71096 - RNA, 18 nt, Artificial Sequence
  Synthetic
gagggaguucuucuucua

SEQ ID NO: 71097 - RNA, 19 nt, Artificial Sequence
  Synthetic
cgagggaguucuucuucua

SEQ ID NO: 71098 - RNA, 20 nt, Artificial Sequence
  Synthetic
gcgagggaguucuucuucua

SEQ ID NO: 71099 - RNA, 18 nt, Artificial Sequence
  Synthetic
gagaugagugaggcagua

SEQ ID NO: 71100 - RNA, 19 nt, Artificial Sequence
  Synthetic
cgagaugagugaggcagua

SEQ ID NO: 71101 - RNA, 20 nt, Artificial Sequence
  Synthetic
acgagaugagugaggcagua

SEQ ID NO: 71102 - RNA, 21 nt, Artificial Sequence
  Synthetic
gacgagaugagugaggcagua

SEQ ID NO: 71103 - RNA, 22 nt, Artificial Sequence
  Synthetic
ugacgagaugagugaggcagua

SEQ ID NO: 71104 - RNA, 23 nt, Artificial Sequence
  Synthetic
uugacgagaugagugaggcagua

SEQ ID NO: 71105 - RNA, 24 nt, Artificial Sequence
  Synthetic
auugacgagaugagugaggcagua

SEQ ID NO: 71106 - RNA, 18 nt, Artificial Sequence
  Synthetic
uuaaagacagguauagua

SEQ ID NO: 71107 - RNA, 19 nt, Artificial Sequence
  Synthetic
auuaaagacagguauagua

SEQ ID NO: 71108 - RNA, 20 nt, Artificial Sequence
  Synthetic
gauuaaagacagguauagua

SEQ ID NO: 71109 - RNA, 21 nt, Artificial Sequence
  Synthetic
ggauuaaagacagguauagua

SEQ ID NO: 71110 - RNA, 22 nt, Artificial Sequence
  Synthetic
aggauuaaagacagguauagua

SEQ ID NO: 71111 - RNA, 23 nt, Artificial Sequence
  Synthetic
uaggauuaaagacagguauagua

SEQ ID NO: 71112 - RNA, 24 nt, Artificial Sequence
  Synthetic
uuaggauuaaagacagguauagua

SEQ ID NO: 71113 - RNA, 18 nt, Artificial Sequence
  Synthetic
gccuacagccuccuagua

SEQ ID NO: 71114 - RNA, 19 nt, Artificial Sequence
  Synthetic
ugccuacagccuccuagua

SEQ ID NO: 71115 - RNA, 20 nt, Artificial Sequence
  Synthetic
augccuacagccuccuagua

SEQ ID NO: 71116 - RNA, 21 nt, Artificial Sequence
  Synthetic
uaugccuacagccuccuagua

SEQ ID NO: 71117 - RNA, 22 nt, Artificial Sequence
  Synthetic
uuaugccuacagccuccuagua

SEQ ID NO: 71118 - RNA, 23 nt, Artificial Sequence
  Synthetic
uuuaugccuacagccuccuagua

SEQ ID NO: 71119 - RNA, 24 nt, Artificial Sequence
  Synthetic
auuuaugccuacagccuccuagua

SEQ ID NO: 71120 - RNA, 18 nt, Artificial Sequence
  Synthetic
cagcgcugacgggacgua

SEQ ID NO: 71121 - RNA, 19 nt, Artificial Sequence
  Synthetic
ucagcgcugacgggacgua

SEQ ID NO: 71122 - RNA, 20 nt, Artificial Sequence
  Synthetic
uucagcgcugacgggacgua

SEQ ID NO: 71123 - RNA, 21 nt, Artificial Sequence
  Synthetic
auucagcgcugacgggacgua

SEQ ID NO: 71124 - RNA, 22 nt, Artificial Sequence
  Synthetic
gauucagcgcugacgggacgua

SEQ ID NO: 71125 - RNA, 23 nt, Artificial Sequence
  Synthetic
ggauucagcgcugacgggacgua

SEQ ID NO: 71126 - RNA, 24 nt, Artificial Sequence
  Synthetic
aggauucagcgcugacgggacgua

SEQ ID NO: 71127 - RNA, 18 nt, Artificial Sequence
  Synthetic
agacggggagaccgcgua

SEQ ID NO: 71128 - RNA, 19 nt, Artificial Sequence
  Synthetic
cagacggggagaccgcgua

SEQ ID NO: 71129 - RNA, 20 nt, Artificial Sequence
  Synthetic
acagacggggagaccgcgua

SEQ ID NO: 71130 - RNA, 18 nt, Artificial Sequence
  Synthetic
  misc_feature (4)..(4): n is a, c, g, or u
uuuncacccacccaggua

SEQ ID NO: 71131 - RNA, 19 nt, Artificial Sequence
  Synthetic
  misc_feature (5)..(5): n is a, c, g, or u
auuuncacccacccaggua

SEQ ID NO: 71132 - RNA, 20 nt, Artificial Sequence
  Synthetic
  misc_feature (6)..(6): n is a, c, g, or u
aauuuncacccacccaggua

SEQ ID NO: 71133 - RNA, 21 nt, Artificial Sequence
  Synthetic
  misc_feature (7)..(7): n is a, c, g, or u
aaauuuncacccacccaggua

SEQ ID NO: 71134 - RNA, 22 nt, Artificial Sequence
  Synthetic
  misc_feature (8)..(8): n is a, c, g, or u
caaauuuncacccacccaggua

SEQ ID NO: 71135 - RNA, 23 nt, Artificial Sequence
  Synthetic
  misc_feature (9)..(9): n is a, c, g, or u
ccaaauuuncacccacccaggua

SEQ ID NO: 71136 - RNA, 24 nt, Artificial Sequence
  Synthetic
  misc_feature (10)..(10): n is a, c, g, or u
uccaaauuuncacccacccaggua

SEQ ID NO: 71137 - RNA, 18 nt, Artificial Sequence
  Synthetic
aaauugguaacagaggua

SEQ ID NO: 71138 - RNA, 19 nt, Artificial Sequence
  Synthetic
aaaauugguaacagaggua

SEQ ID NO: 71139 - RNA, 20 nt, Artificial Sequence
  Synthetic
gaaaauugguaacagaggua

SEQ ID NO: 71140 - RNA, 21 nt, Artificial Sequence
  Synthetic
agaaaauugguaacagaggua

SEQ ID NO: 71141 - RNA, 22 nt, Artificial Sequence
  Synthetic
aagaaaauugguaacagaggua

SEQ ID NO: 71142 - RNA, 23 nt, Artificial Sequence
  Synthetic
aaagaaaauugguaacagaggua

SEQ ID NO: 71143 - RNA, 24 nt, Artificial Sequence
  Synthetic
aaaagaaaauugguaacagaggua

SEQ ID NO: 71144 - RNA, 18 nt, Artificial Sequence
  Synthetic
uacagagcugaggcggua

SEQ ID NO: 71145 - RNA, 19 nt, Artificial Sequence
  Synthetic
auacagagcugaggcggua

SEQ ID NO: 71146 - RNA, 20 nt, Artificial Sequence
  Synthetic
gauacagagcugaggcggua

SEQ ID NO: 71147 - RNA, 21 nt, Artificial Sequence
  Synthetic
cgauacagagcugaggcggua

SEQ ID NO: 71148 - RNA, 22 nt, Artificial Sequence
  Synthetic
ccgauacagagcugaggcggua

SEQ ID NO: 71149 - RNA, 23 nt, Artificial Sequence
  Synthetic
cccgauacagagcugaggcggua

SEQ ID NO: 71150 - RNA, 24 nt, Artificial Sequence
  Synthetic
ucccgauacagagcugaggcggua

SEQ ID NO: 71151 - RNA, 18 nt, Artificial Sequence
  Synthetic
cccgccuuccauagggua

SEQ ID NO: 71152 - RNA, 19 nt, Artificial Sequence
  Synthetic
gcccgccuuccauagggua

SEQ ID NO: 71153 - RNA, 20 nt, Artificial Sequence
  Synthetic
ugcccgccuuccauagggua

SEQ ID NO: 71154 - RNA, 18 nt, Artificial Sequence
  Synthetic
gacaaaagaaaauuggua

SEQ ID NO: 71155 - RNA, 19 nt, Artificial Sequence
  Synthetic
agacaaaagaaaauuggua

SEQ ID NO: 71156 - RNA, 20 nt, Artificial Sequence
  Synthetic
aagacaaaagaaaauuggua

SEQ ID NO: 71157 - RNA, 21 nt, Artificial Sequence
  Synthetic
aaagacaaaagaaaauuggua

SEQ ID NO: 71158 - RNA, 22 nt, Artificial Sequence
  Synthetic
caaagacaaaagaaaauuggua

SEQ ID NO: 71159 - RNA, 23 nt, Artificial Sequence
  Synthetic
ccaaagacaaaagaaaauuggua

SEQ ID NO: 71160 - RNA, 24 nt, Artificial Sequence
  Synthetic
cccaaagacaaaagaaaauuggua

SEQ ID NO: 71161 - RNA, 18 nt, Artificial Sequence
  Synthetic
  misc_feature (6)..(6): n is a, c, g, or u
ggauanccacauugugua

SEQ ID NO: 71162 - RNA, 19 nt, Artificial Sequence
  Synthetic
  misc_feature (7)..(7): n is a, c, g, or u
aggauanccacauugugua

SEQ ID NO: 71163 - RNA, 20 nt, Artificial Sequence
  Synthetic
  misc_feature (8)..(8): n is a, c, g, or u
caggauanccacauugugua

SEQ ID NO: 71164 - RNA, 21 nt, Artificial Sequence
  Synthetic
  misc_feature (9)..(9): n is a, c, g, or u
gcaggauanccacauugugua

SEQ ID NO: 71165 - RNA, 22 nt, Artificial Sequence
  Synthetic
  misc_feature (10)..(10): n is a, c, g, or u
agcaggauanccacauugugua

SEQ ID NO: 71166 - RNA, 23 nt, Artificial Sequence
  Synthetic
  misc_feature (11)..(11): n is a, c, g, or u
aagcaggauanccacauugugua

SEQ ID NO: 71167 - RNA, 24 nt, Artificial Sequence
  Synthetic
  misc_feature (12)..(12): n is a, c, g, or u
aaagcaggauanccacauugugua

SEQ ID NO: 71168 - RNA, 18 nt, Artificial Sequence
  Synthetic
  misc_feature (2)..(2): n is a, c, g, or u
anccccaacuuccaauua

SEQ ID NO: 71169 - RNA, 19 nt, Artificial Sequence
  Synthetic
  misc_feature (3)..(3): n is a, c, g, or u
ganccccaacuuccaauua

SEQ ID NO: 71170 - RNA, 20 nt, Artificial Sequence
  Synthetic
  misc_feature (4)..(4): n is a, c, g, or u
uganccccaacuuccaauua

SEQ ID NO: 71171 - RNA, 21 nt, Artificial Sequence
  Synthetic
  misc_feature (5)..(5): n is a, c, g, or u
auganccccaacuuccaauua

SEQ ID NO: 71172 - RNA, 22 nt, Artificial Sequence
  Synthetic
  misc_feature (6)..(6): n is a, c, g, or u
aauganccccaacuuccaauua

SEQ ID NO: 71173 - RNA, 23 nt, Artificial Sequence
  Synthetic
  misc_feature (7)..(7): n is a, c, g, or u
uaauganccccaacuuccaauua

SEQ ID NO: 71174 - RNA, 24 nt, Artificial Sequence
  Synthetic
  misc_feature (8)..(8): n is a, c, g, or u
guaauganccccaacuuccaauua

SEQ ID NO: 71175 - RNA, 18 nt, Artificial Sequence
  Synthetic
uugaugauccuggaauua

SEQ ID NO: 71176 - RNA, 19 nt, Artificial Sequence
  Synthetic
guugaugauccuggaauua

SEQ ID NO: 71177 - RNA, 20 nt, Artificial Sequence
  Synthetic
gguugaugauccuggaauua

SEQ ID NO: 71178 - RNA, 21 nt, Artificial Sequence
  Synthetic
ugguugaugauccuggaauua

SEQ ID NO: 71179 - RNA, 22 nt, Artificial Sequence
  Synthetic
gugguugaugauccuggaauua

SEQ ID NO: 71180 - RNA, 23 nt, Artificial Sequence
  Synthetic
ggugguugaugauccuggaauua

SEQ ID NO: 71181 - RNA, 24 nt, Artificial Sequence
  Synthetic
uggugguugaugauccuggaauua

SEQ ID NO: 71182 - RNA, 18 nt, Artificial Sequence
  Synthetic
uaaugauuaacuacauua

SEQ ID NO: 71183 - RNA, 19 nt, Artificial Sequence
  Synthetic
guaaugauuaacuacauua

SEQ ID NO: 71184 - RNA, 20 nt, Artificial Sequence
  Synthetic
aguaaugauuaacuacauua

SEQ ID NO: 71185 - RNA, 21 nt, Artificial Sequence
  Synthetic
aaguaaugauuaacuacauua

SEQ ID NO: 71186 - RNA, 22 nt, Artificial Sequence
  Synthetic
gaaguaaugauuaacuacauua

SEQ ID NO: 71187 - RNA, 23 nt, Artificial Sequence
  Synthetic
ggaaguaaugauuaacuacauua

SEQ ID NO: 71188 - RNA, 24 nt, Artificial Sequence
  Synthetic
uggaaguaaugauuaacuacauua

SEQ ID NO: 71189 - RNA, 18 nt, Artificial Sequence
  Synthetic
augaacaagagaugauua

SEQ ID NO: 71190 - RNA, 19 nt, Artificial Sequence
  Synthetic
caugaacaagagaugauua

SEQ ID NO: 71191 - RNA, 20 nt, Artificial Sequence
  Synthetic
acaugaacaagagaugauua

SEQ ID NO: 71192 - RNA, 21 nt, Artificial Sequence
  Synthetic
gacaugaacaagagaugauua

SEQ ID NO: 71193 - RNA, 22 nt, Artificial Sequence
  Synthetic
ggacaugaacaagagaugauua

SEQ ID NO: 71194 - RNA, 23 nt, Artificial Sequence
  Synthetic
aggacaugaacaagagaugauua

SEQ ID NO: 71195 - RNA, 24 nt, Artificial Sequence
  Synthetic
uaggacaugaacaagagaugauua

SEQ ID NO: 71196 - RNA, 18 nt, Artificial Sequence
  Synthetic
aguccaagaguccucuua

SEQ ID NO: 71197 - RNA, 19 nt, Artificial Sequence
  Synthetic
gaguccaagaguccucuua

SEQ ID NO: 71198 - RNA, 20 nt, Artificial Sequence
  Synthetic
agaguccaagaguccucuua

SEQ ID NO: 71199 - RNA, 21 nt, Artificial Sequence
  Synthetic
gagaguccaagaguccucuua

SEQ ID NO: 71200 - RNA, 22 nt, Artificial Sequence
  Synthetic
  misc_feature (1)..(1): n is a, c, g, or u
ngagaguccaagaguccucuua

SEQ ID NO: 71201 - RNA, 23 nt, Artificial Sequence
  Synthetic
  misc_feature (2)..(2): n is a, c, g, or u
cngagaguccaagaguccucuua

SEQ ID NO: 71202 - RNA, 24 nt, Artificial Sequence
  Synthetic
  misc_feature (3)..(3): n is a, c, g, or u
gcngagaguccaagaguccucuua

SEQ ID NO: 71203 - RNA, 18 nt, Artificial Sequence
  Synthetic
uaucuagaagaucucuua

SEQ ID NO: 71204 - RNA, 19 nt, Artificial Sequence
  Synthetic
guaucuagaagaucucuua

SEQ ID NO: 71205 - RNA, 20 nt, Artificial Sequence
  Synthetic
gguaucuagaagaucucuua

SEQ ID NO: 71206 - RNA, 21 nt, Artificial Sequence
  Synthetic
cgguaucuagaagaucucuua

SEQ ID NO: 71207 - RNA, 22 nt, Artificial Sequence
  Synthetic
gcgguaucuagaagaucucuua

SEQ ID NO: 71208 - RNA, 23 nt, Artificial Sequence
  Synthetic
ggcgguaucuagaagaucucuua

SEQ ID NO: 71209 - RNA, 24 nt, Artificial Sequence
  Synthetic
aggcgguaucuagaagaucucuua

SEQ ID NO: 71210 - RNA, 18 nt, Artificial Sequence
  Synthetic
guuuuucauuuacuguua

SEQ ID NO: 71211 - RNA, 19 nt, Artificial Sequence
  Synthetic
cguuuuucauuuacuguua

SEQ ID NO: 71212 - RNA, 20 nt, Artificial Sequence
  Synthetic
ucguuuuucauuuacuguua

SEQ ID NO: 71213 - RNA, 21 nt, Artificial Sequence
  Synthetic
uucguuuuucauuuacuguua

SEQ ID NO: 71214 - RNA, 22 nt, Artificial Sequence
  Synthetic
cuucguuuuucauuuacuguua

SEQ ID NO: 71215 - RNA, 23 nt, Artificial Sequence
  Synthetic
ucuucguuuuucauuuacuguua

SEQ ID NO: 71216 - RNA, 24 nt, Artificial Sequence
  Synthetic
aucuucguuuuucauuuacuguua

SEQ ID NO: 71217 - RNA, 18 nt, Artificial Sequence
  Synthetic
  misc_feature (15)..(15): n is a, c, g, or u
caaucaauaggccgnuua

SEQ ID NO: 71218 - RNA, 19 nt, Artificial Sequence
  Synthetic
  misc_feature (16)..(16): n is a, c, g, or u
ccaaucaauaggccgnuua

SEQ ID NO: 71219 - RNA, 20 nt, Artificial Sequence
  Synthetic
  misc_feature (17)..(17): n is a, c, g, or u
uccaaucaauaggccgnuua

SEQ ID NO: 71220 - RNA, 21 nt, Artificial Sequence
  Synthetic
  misc_feature (18)..(18): n is a, c, g, or u
uuccaaucaauaggccgnuua

SEQ ID NO: 71221 - RNA, 22 nt, Artificial Sequence
  Synthetic
  misc_feature (19)..(19): n is a, c, g, or u
uuuccaaucaauaggccgnuua

SEQ ID NO: 71222 - RNA, 23 nt, Artificial Sequence
  Synthetic
  misc_feature (20)..(20): n is a, c, g, or u
cuuuccaaucaauaggccgnuua

SEQ ID NO: 71223 - RNA, 24 nt, Artificial Sequence
  Synthetic
  misc_feature (21)..(21): n is a, c, g, or u
acuuuccaaucaauaggccgnuua

SEQ ID NO: 71224 - RNA, 18 nt, Artificial Sequence
  Synthetic
  misc_feature (1)..(1): n is a, c, g, or u
nacuccucccagucuuua

SEQ ID NO: 71225 - RNA, 19 nt, Artificial Sequence
  Synthetic
  misc_feature (2)..(2): n is a, c, g, or u
cnacuccucccagucuuua

SEQ ID NO: 71226 - RNA, 20 nt, Artificial Sequence
  Synthetic
  misc_feature (3)..(3): n is a, c, g, or u
ccnacuccucccagucuuua

SEQ ID NO: 71227 - RNA, 21 nt, Artificial Sequence
  Synthetic
  misc_feature (4)..(4): n is a, c, g, or u
cccnacuccucccagucuuua

SEQ ID NO: 71228 - RNA, 22 nt, Artificial Sequence
  Synthetic
  misc_feature (5)..(5): n is a, c, g, or u
ccccnacuccucccagucuuua

SEQ ID NO: 71229 - RNA, 23 nt, Artificial Sequence
  Synthetic
  misc_feature (6)..(6): n is a, c, g, or u
cccccnacuccucccagucuuua

SEQ ID NO: 71230 - RNA, 24 nt, Artificial Sequence
  Synthetic
  misc_feature (7)..(7): n is a, c, g, or u
ucccccnacuccucccagucuuua

SEQ ID NO: 71231 - RNA, 18 nt, Artificial Sequence
  Synthetic
guagcuccaaauucuuua

SEQ ID NO: 71232 - RNA, 19 nt, Artificial Sequence
  Synthetic
aguagcuccaaauucuuua

SEQ ID NO: 71233 - RNA, 20 nt, Artificial Sequence
  Synthetic
caguagcuccaaauucuuua

SEQ ID NO: 71234 - RNA, 21 nt, Artificial Sequence
  Synthetic
acaguagcuccaaauucuuua

SEQ ID NO: 71235 - RNA, 22 nt, Artificial Sequence
  Synthetic
cacaguagcuccaaauucuuua

SEQ ID NO: 71236 - RNA, 23 nt, Artificial Sequence
  Synthetic
ccacaguagcuccaaauucuuua

SEQ ID NO: 71237 - RNA, 24 nt, Artificial Sequence
  Synthetic
uccacaguagcuccaaauucuuua

SEQ ID NO: 71238 - RNA, 18 nt, Artificial Sequence
  Synthetic
  misc_feature (8)..(9): n is a, c, g, or u
agguucannuauuguuua

SEQ ID NO: 71239 - RNA, 19 nt, Artificial Sequence
  Synthetic
  misc_feature (9)..(10): n is a, c, g, or u
aagguucannuauuguuua

SEQ ID NO: 71240 - RNA, 20 nt, Artificial Sequence
  Synthetic
  misc_feature (10)..(11): n is a, c, g, or u
aaagguucannuauuguuua

SEQ ID NO: 71241 - RNA, 21 nt, Artificial Sequence
  Synthetic
  misc_feature (11)..(12): n is a, c, g, or u
uaaagguucannuauuguuua

SEQ ID NO: 71242 - RNA, 22 nt, Artificial Sequence
  Synthetic
  misc_feature (12)..(13): n is a, c, g, or u
guaaagguucannuauuguuua

SEQ ID NO: 71243 - RNA, 23 nt, Artificial Sequence
  Synthetic
  misc_feature (13)..(14): n is a, c, g, or u
gguaaagguucannuauuguuua

SEQ ID NO: 71244 - RNA, 24 nt, Artificial Sequence
  Synthetic
  misc_feature (14)..(15): n is a, c, g, or u
ggguaaagguucannuauuguuua

SEQ ID NO: 71245 - RNA, 18 nt, Artificial Sequence
  Synthetic
  misc_feature (3)..(3): n is a, c, g, or u
  misc_feature (12)..(12): n is a, c, g, or u
cgnguaguuucncuuuua

SEQ ID NO: 71246 - RNA, 19 nt, Artificial Sequence
  Synthetic
  misc_feature (4)..(4): n is a, c, g, or u
  misc_feature (13)..(13): n is a, c, g, or u
acgnguaguuucncuuuua

SEQ ID NO: 71247 - RNA, 20 nt, Artificial Sequence
  Synthetic
  misc_feature (5)..(5): n is a, c, g, or u
  misc_feature (14)..(14): n is a, c, g, or u
uacgnguaguuucncuuuua

SEQ ID NO: 71248 - RNA, 21 nt, Artificial Sequence
  Synthetic
  misc_feature (6)..(6): n is a, c, g, or u
  misc_feature (15)..(15): n is a, c, g, or u
cuacgnguaguuucncuuuua

SEQ ID NO: 71249 - RNA, 22 nt, Artificial Sequence
  Synthetic
  misc_feature (7)..(7): n is a, c, g, or u
  misc_feature (16)..(16): n is a, c, g, or u
gcuacgnguaguuucncuuuua

SEQ ID NO: 71250 - RNA, 23 nt, Artificial Sequence
  Synthetic
  misc_feature (8)..(8): n is a, c, g, or u
  misc_feature (17)..(17): n is a, c, g, or u
cgcuacgnguaguuucncuuuua

SEQ ID NO: 71251 - RNA, 24 nt, Artificial Sequence
  Synthetic
  misc_feature (9)..(9): n is a, c, g, or u
  misc_feature (18)..(18): n is a, c, g, or u
gcgcuacgnguaguuucncuuuua

SEQ ID NO: 71252 - RNA, 18 nt, Artificial Sequence
  Synthetic
cagcaacaugagggaaac

SEQ ID NO: 71253 - RNA, 19 nt, Artificial Sequence
  Synthetic
acagcaacaugagggaaac

SEQ ID NO: 71254 - RNA, 20 nt, Artificial Sequence
  Synthetic
aacagcaacaugagggaaac

SEQ ID NO: 71255 - RNA, 21 nt, Artificial Sequence
  Synthetic
gaacagcaacaugagggaaac

SEQ ID NO: 71256 - RNA, 22 nt, Artificial Sequence
  Synthetic
ugaacagcaacaugagggaaac

SEQ ID NO: 71257 - RNA, 23 nt, Artificial Sequence
  Synthetic
uugaacagcaacaugagggaaac

SEQ ID NO: 71258 - RNA, 24 nt, Artificial Sequence
  Synthetic
uuugaacagcaacaugagggaaac

SEQ ID NO: 71259 - RNA, 18 nt, Artificial Sequence
  Synthetic
uaguccagaagaaccaac

SEQ ID NO: 71260 - RNA, 19 nt, Artificial Sequence
  Synthetic
auaguccagaagaaccaac

SEQ ID NO: 71261 - RNA, 20 nt, Artificial Sequence
  Synthetic
gauaguccagaagaaccaac

SEQ ID NO: 71262 - RNA, 21 nt, Artificial Sequence
  Synthetic
ugauaguccagaagaaccaac

SEQ ID NO: 71263 - RNA, 22 nt, Artificial Sequence
  Synthetic
uugauaguccagaagaaccaac

SEQ ID NO: 71264 - RNA, 23 nt, Artificial Sequence
  Synthetic
cuugauaguccagaagaaccaac

SEQ ID NO: 71265 - RNA, 24 nt, Artificial Sequence
  Synthetic
ccuugauaguccagaagaaccaac

SEQ ID NO: 71266 - RNA, 18 nt, Artificial Sequence
  Synthetic
aagguuuugaacagcaac

SEQ ID NO: 71267 - RNA, 19 nt, Artificial Sequence
  Synthetic
gaagguuuugaacagcaac

SEQ ID NO: 71268 - RNA, 20 nt, Artificial Sequence
  Synthetic
cgaagguuuugaacagcaac

SEQ ID NO: 71269 - RNA, 21 nt, Artificial Sequence
  Synthetic
ccgaagguuuugaacagcaac

SEQ ID NO: 71270 - RNA, 22 nt, Artificial Sequence
  Synthetic
uccgaagguuuugaacagcaac

SEQ ID NO: 71271 - RNA, 23 nt, Artificial Sequence
  Synthetic
guccgaagguuuugaacagcaac

SEQ ID NO: 71272 - RNA, 24 nt, Artificial Sequence
  Synthetic
cguccgaagguuuugaacagcaac

SEQ ID NO: 71273 - RNA, 18 nt, Artificial Sequence
  Synthetic
gugaggauuuuugucaac

SEQ ID NO: 71274 - RNA, 19 nt, Artificial Sequence
  Synthetic
ugugaggauuuuugucaac

SEQ ID NO: 71275 - RNA, 20 nt, Artificial Sequence
  Synthetic
uugugaggauuuuugucaac

SEQ ID NO: 71276 - RNA, 21 nt, Artificial Sequence
  Synthetic
auugugaggauuuuugucaac

SEQ ID NO: 71277 - RNA, 22 nt, Artificial Sequence
  Synthetic
uauugugaggauuuuugucaac

SEQ ID NO: 71278 - RNA, 23 nt, Artificial Sequence
  Synthetic
guauugugaggauuuuugucaac

SEQ ID NO: 71279 - RNA, 24 nt, Artificial Sequence
  Synthetic
gguauugugaggauuuuugucaac

SEQ ID NO: 71280 - RNA, 18 nt, Artificial Sequence
  Synthetic
auauuuccgggagagaac

SEQ ID NO: 71281 - RNA, 19 nt, Artificial Sequence
  Synthetic
uauauuuccgggagagaac

SEQ ID NO: 71282 - RNA, 20 nt, Artificial Sequence
  Synthetic
guauauuuccgggagagaac

SEQ ID NO: 71283 - RNA, 21 nt, Artificial Sequence
  Synthetic
uguauauuuccgggagagaac

SEQ ID NO: 71284 - RNA, 22 nt, Artificial Sequence
  Synthetic
auguauauuuccgggagagaac

SEQ ID NO: 71285 - RNA, 23 nt, Artificial Sequence
  Synthetic
gauguauauuuccgggagagaac

SEQ ID NO: 71286 - RNA, 24 nt, Artificial Sequence
  Synthetic
  misc_feature (1)..(1): n is a, c, g, or u
ngauguauauuuccgggagagaac

SEQ ID NO: 71287 - RNA, 18 nt, Artificial Sequence
  Synthetic
gguucacuguuccggaac

SEQ ID NO: 71288 - RNA, 19 nt, Artificial Sequence
  Synthetic
ggguucacuguuccggaac

SEQ ID NO: 71289 - RNA, 20 nt, Artificial Sequence
  Synthetic
aggguucacuguuccggaac

SEQ ID NO: 71290 - RNA, 21 nt, Artificial Sequence
  Synthetic
caggguucacuguuccggaac

SEQ ID NO: 71291 - RNA, 22 nt, Artificial Sequence
  Synthetic
acaggguucacuguuccggaac

SEQ ID NO: 71292 - RNA, 23 nt, Artificial Sequence
  Synthetic
aacaggguucacuguuccggaac

SEQ ID NO: 71293 - RNA, 24 nt, Artificial Sequence
  Synthetic
gaacaggguucacuguuccggaac

SEQ ID NO: 71294 - RNA, 18 nt, Artificial Sequence
  Synthetic
  misc_feature (13)..(13): n is a, c, g, or u
cccguggucggcnggaac

SEQ ID NO: 71295 - RNA, 19 nt, Artificial Sequence
  Synthetic
  misc_feature (14)..(14): n is a, c, g, or u
ccccguggucggcnggaac

SEQ ID NO: 71296 - RNA, 20 nt, Artificial Sequence
  Synthetic
  misc_feature (15)..(15): n is a, c, g, or u
gccccguggucggcnggaac

SEQ ID NO: 71297 - RNA, 21 nt, Artificial Sequence
  Synthetic
  misc_feature (16)..(16): n is a, c, g, or u
cgccccguggucggcnggaac

SEQ ID NO: 71298 - RNA, 22 nt, Artificial Sequence
  Synthetic
  misc_feature (17)..(17): n is a, c, g, or u
gcgccccguggucggcnggaac

SEQ ID NO: 71299 - RNA, 23 nt, Artificial Sequence
  Synthetic
  misc_feature (18)..(18): n is a, c, g, or u
ugcgccccguggucggcnggaac

SEQ ID NO: 71300 - RNA, 24 nt, Artificial Sequence
  Synthetic
  misc_feature (19)..(19): n is a, c, g, or u
gugcgccccguggucggcnggaac

SEQ ID NO: 71301 - RNA, 18 nt, Artificial Sequence
  Synthetic
gaacaguaggacaugaac

SEQ ID NO: 71302 - RNA, 19 nt, Artificial Sequence
  Synthetic
ugaacaguaggacaugaac

SEQ ID NO: 71303 - RNA, 20 nt, Artificial Sequence
  Synthetic
uugaacaguaggacaugaac

SEQ ID NO: 71304 - RNA, 21 nt, Artificial Sequence
  Synthetic
cuugaacaguaggacaugaac

SEQ ID NO: 71305 - RNA, 22 nt, Artificial Sequence
  Synthetic
gcuugaacaguaggacaugaac

SEQ ID NO: 71306 - RNA, 23 nt, Artificial Sequence
  Synthetic
ggcuugaacaguaggacaugaac

SEQ ID NO: 71307 - RNA, 24 nt, Artificial Sequence
  Synthetic
aggcuugaacaguaggacaugaac

SEQ ID NO: 71308 - RNA, 18 nt, Artificial Sequence
  Synthetic
cacaauaauugccugaac

SEQ ID NO: 71309 - RNA, 19 nt, Artificial Sequence
  Synthetic
ccacaauaauugccugaac

SEQ ID NO: 71310 - RNA, 20 nt, Artificial Sequence
  Synthetic
accacaauaauugccugaac

SEQ ID NO: 71311 - RNA, 21 nt, Artificial Sequence
  Synthetic
aaccacaauaauugccugaac

SEQ ID NO: 71312 - RNA, 22 nt, Artificial Sequence
  Synthetic
aaaccacaauaauugccugaac

SEQ ID NO: 71313 - RNA, 23 nt, Artificial Sequence
  Synthetic
gaaaccacaauaauugccugaac

SEQ ID NO: 71314 - RNA, 24 nt, Artificial Sequence
  Synthetic
ugaaaccacaauaauugccugaac

SEQ ID NO: 71315 - RNA, 18 nt, Artificial Sequence
  Synthetic
ccgugugggggagugaac

SEQ ID NO: 71316 - RNA, 19 nt, Artificial Sequence
  Synthetic
uccgugugggggagugaac

SEQ ID NO: 71317 - RNA, 20 nt, Artificial Sequence
  Synthetic
cuccgugugggggagugaac

SEQ ID NO: 71318 - RNA, 21 nt, Artificial Sequence
  Synthetic
ccuccgugugggggagugaac

SEQ ID NO: 71319 - RNA, 22 nt, Artificial Sequence
  Synthetic
gccuccgugugggggagugaac

SEQ ID NO: 71320 - RNA, 23 nt, Artificial Sequence
  Synthetic
ggccuccgugugggggagugaac

SEQ ID NO: 71321 - RNA, 24 nt, Artificial Sequence
  Synthetic
aggccuccgugugggggagugaac

SEQ ID NO: 71322 - RNA, 18 nt, Artificial Sequence
  Synthetic
cagcuuggaggcuugaac

SEQ ID NO: 71323 - RNA, 19 nt, Artificial Sequence
  Synthetic
acagcuuggaggcuugaac

SEQ ID NO: 71324 - RNA, 20 nt, Artificial Sequence
  Synthetic
cacagcuuggaggcuugaac

SEQ ID NO: 71325 - RNA, 21 nt, Artificial Sequence
  Synthetic
gcacagcuuggaggcuugaac

SEQ ID NO: 71326 - RNA, 22 nt, Artificial Sequence
  Synthetic
ggcacagcuuggaggcuugaac

SEQ ID NO: 71327 - RNA, 23 nt, Artificial Sequence
  Synthetic
aggcacagcuuggaggcuugaac

SEQ ID NO: 71328 - RNA, 24 nt, Artificial Sequence
  Synthetic
aaggcacagcuuggaggcuugaac

SEQ ID NO: 71329 - RNA, 18 nt, Artificial Sequence
  Synthetic
cguccgaagguuuugaac

SEQ ID NO: 71330 - RNA, 19 nt, Artificial Sequence
  Synthetic
ccguccgaagguuuugaac

SEQ ID NO: 71331 - RNA, 20 nt, Artificial Sequence
  Synthetic
uccguccgaagguuuugaac

SEQ ID NO: 71332 - RNA, 21 nt, Artificial Sequence
  Synthetic
uuccguccgaagguuuugaac

SEQ ID NO: 71333 - RNA, 22 nt, Artificial Sequence
  Synthetic
uuuccguccgaagguuuugaac

SEQ ID NO: 71334 - RNA, 23 nt, Artificial Sequence
  Synthetic
auuuccguccgaagguuuugaac

SEQ ID NO: 71335 - RNA, 24 nt, Artificial Sequence
  Synthetic
aauuuccguccgaagguuuugaac

SEQ ID NO: 71336 - RNA, 18 nt, Artificial Sequence
  Synthetic
ccacaucauccauauaac

SEQ ID NO: 71337 - RNA, 19 nt, Artificial Sequence
  Synthetic
accacaucauccauauaac

SEQ ID NO: 71338 - RNA, 20 nt, Artificial Sequence
  Synthetic
uaccacaucauccauauaac

SEQ ID NO: 71339 - RNA, 21 nt, Artificial Sequence
  Synthetic
auaccacaucauccauauaac

SEQ ID NO: 71340 - RNA, 22 nt, Artificial Sequence
  Synthetic
aauaccacaucauccauauaac

SEQ ID NO: 71341 - RNA, 23 nt, Artificial Sequence
  Synthetic
caauaccacaucauccauauaac

SEQ ID NO: 71342 - RNA, 24 nt, Artificial Sequence
  Synthetic
ccaauaccacaucauccauauaac

SEQ ID NO: 71343 - RNA, 18 nt, Artificial Sequence
  Synthetic
aguccaaggaauacuaac

SEQ ID NO: 71344 - RNA, 19 nt, Artificial Sequence
  Synthetic
gaguccaaggaauacuaac

SEQ ID NO: 71345 - RNA, 20 nt, Artificial Sequence
  Synthetic
ugaguccaaggaauacuaac

SEQ ID NO: 71346 - RNA, 21 nt, Artificial Sequence
  Synthetic
gugaguccaaggaauacuaac

SEQ ID NO: 71347 - RNA, 22 nt, Artificial Sequence
  Synthetic
ugugaguccaaggaauacuaac

SEQ ID NO: 71348 - RNA, 23 nt, Artificial Sequence
  Synthetic
uugugaguccaaggaauacuaac

SEQ ID NO: 71349 - RNA, 24 nt, Artificial Sequence
  Synthetic
cuugugaguccaaggaauacuaac

SEQ ID NO: 71350 - RNA, 18 nt, Artificial Sequence
  Synthetic
aaaaaccccgccuguaac

SEQ ID NO: 71351 - RNA, 19 nt, Artificial Sequence
  Synthetic
gaaaaaccccgccuguaac

SEQ ID NO: 71352 - RNA, 20 nt, Artificial Sequence
  Synthetic
agaaaaaccccgccuguaac

SEQ ID NO: 71353 - RNA, 21 nt, Artificial Sequence
  Synthetic
aagaaaaaccccgccuguaac

SEQ ID NO: 71354 - RNA, 22 nt, Artificial Sequence
  Synthetic
caagaaaaaccccgccuguaac

SEQ ID NO: 71355 - RNA, 23 nt, Artificial Sequence
  Synthetic
acaagaaaaaccccgccuguaac

SEQ ID NO: 71356 - RNA, 24 nt, Artificial Sequence
  Synthetic
aacaagaaaaaccccgccuguaac

SEQ ID NO: 71357 - RNA, 18 nt, Artificial Sequence
  Synthetic
  misc_feature (13)..(13): n is a, c, g, or u
aucaauaggccgnuuaac

SEQ ID NO: 71358 - RNA, 19 nt, Artificial Sequence
  Synthetic
  misc_feature (14)..(14): n is a, c, g, or u
aaucaauaggccgnuuaac

SEQ ID NO: 71359 - RNA, 20 nt, Artificial Sequence
  Synthetic
  misc_feature (15)..(15): n is a, c, g, or u
caaucaauaggccgnuuaac

SEQ ID NO: 71360 - RNA, 21 nt, Artificial Sequence
  Synthetic
  misc_feature (16)..(16): n is a, c, g, or u
ccaaucaauaggccgnuuaac

SEQ ID NO: 71361 - RNA, 22 nt, Artificial Sequence
  Synthetic
  misc_feature (17)..(17): n is a, c, g, or u
uccaaucaauaggccgnuuaac

SEQ ID NO: 71362 - RNA, 23 nt, Artificial Sequence
  Synthetic
  misc_feature (18)..(18): n is a, c, g, or u
uuccaaucaauaggccgnuuaac

SEQ ID NO: 71363 - RNA, 24 nt, Artificial Sequence
  Synthetic
  misc_feature (19)..(19): n is a, c, g, or u
uuuccaaucaauaggccgnuuaac

SEQ ID NO: 71364 - RNA, 18 nt, Artificial Sequence
  Synthetic
auuuuggccaagacacac

SEQ ID NO: 71365 - RNA, 19 nt, Artificial Sequence
  Synthetic
aauuuuggccaagacacac

SEQ ID NO: 71366 - RNA, 20 nt, Artificial Sequence
  Synthetic
gaauuuuggccaagacacac

SEQ ID NO: 71367 - RNA, 21 nt, Artificial Sequence
  Synthetic
cgaauuuuggccaagacacac

SEQ ID NO: 71368 - RNA, 22 nt, Artificial Sequence
  Synthetic
gcgaauuuuggccaagacacac

SEQ ID NO: 71369 - RNA, 23 nt, Artificial Sequence
  Synthetic
ugcgaauuuuggccaagacacac

SEQ ID NO: 71370 - RNA, 24 nt, Artificial Sequence
  Synthetic
cugcgaauuuuggccaagacacac

SEQ ID NO: 71371 - RNA, 18 nt, Artificial Sequence
  Synthetic
aggagugcgaauccacac

SEQ ID NO: 71372 - RNA, 19 nt, Artificial Sequence
  Synthetic
gaggagugcgaauccacac

SEQ ID NO: 71373 - RNA, 20 nt, Artificial Sequence
  Synthetic
ggaggagugcgaauccacac

SEQ ID NO: 71374 - RNA, 21 nt, Artificial Sequence
  Synthetic
uggaggagugcgaauccacac

SEQ ID NO: 71375 - RNA, 22 nt, Artificial Sequence
  Synthetic
cuggaggagugcgaauccacac

SEQ ID NO: 71376 - RNA, 23 nt, Artificial Sequence
  Synthetic
gcuggaggagugcgaauccacac

SEQ ID NO: 71377 - RNA, 24 nt, Artificial Sequence
  Synthetic
agcuggaggagugcgaauccacac

SEQ ID NO: 71378 - RNA, 18 nt, Artificial Sequence
  Synthetic
gaauuuuggccaagacac

SEQ ID NO: 71379 - RNA, 19 nt, Artificial Sequence
  Synthetic
cgaauuuuggccaagacac

SEQ ID NO: 71380 - RNA, 20 nt, Artificial Sequence
  Synthetic
gcgaauuuuggccaagacac

SEQ ID NO: 71381 - RNA, 21 nt, Artificial Sequence
  Synthetic
ugcgaauuuuggccaagacac

SEQ ID NO: 71382 - RNA, 22 nt, Artificial Sequence
  Synthetic
cugcgaauuuuggccaagacac

SEQ ID NO: 71383 - RNA, 23 nt, Artificial Sequence
  Synthetic
acugcgaauuuuggccaagacac

SEQ ID NO: 71384 - RNA, 24 nt, Artificial Sequence
  Synthetic
gacugcgaauuuuggccaagacac

SEQ ID NO: 71385 - RNA, 18 nt, Artificial Sequence
  Synthetic
  misc_feature (5)..(6): n is a, c, g, or u
uucannuauuguuuacac

SEQ ID NO: 71386 - RNA, 19 nt, Artificial Sequence
  Synthetic
  misc_feature (6)..(7): n is a, c, g, or u
guucannuauuguuuacac

SEQ ID NO: 71387 - RNA, 20 nt, Artificial Sequence
  Synthetic
  misc_feature (7)..(8): n is a, c, g, or u
gguucannuauuguuuacac

SEQ ID NO: 71388 - RNA, 21 nt, Artificial Sequence
  Synthetic
  misc_feature (8)..(9): n is a, c, g, or u
agguucannuauuguuuacac

SEQ ID NO: 71389 - RNA, 22 nt, Artificial Sequence
  Synthetic
  misc_feature (9)..(10): n is a, c, g, or u
aagguucannuauuguuuacac

SEQ ID NO: 71390 - RNA, 23 nt, Artificial Sequence
  Synthetic
  misc_feature (10)..(11): n is a, c, g, or u
aaagguucannuauuguuuacac

SEQ ID NO: 71391 - RNA, 24 nt, Artificial Sequence
  Synthetic
  misc_feature (11)..(12): n is a, c, g, or u
uaaagguucannuauuguuuacac

SEQ ID NO: 71392 - RNA, 18 nt, Artificial Sequence
  Synthetic
  misc_feature (7)..(7): n is a, c, g, or u
  misc_feature (10)..(10): n is a, c, g, or u
uccaugnccnaaagccac

SEQ ID NO: 71393 - RNA, 19 nt, Artificial Sequence
  Synthetic
  misc_feature (8)..(8): n is a, c, g, or u
  misc_feature (11)..(11): n is a, c, g, or u
guccaugnccnaaagccac

SEQ ID NO: 71394 - RNA, 20 nt, Artificial Sequence
  Synthetic
  misc_feature (9)..(9): n is a, c, g, or u
  misc_feature (12)..(12): n is a, c, g, or u
uguccaugnccnaaagccac

SEQ ID NO: 71395 - RNA, 21 nt, Artificial Sequence
  Synthetic
  misc_feature (10)..(10): n is a, c, g, or u
  misc_feature (13)..(13): n is a, c, g, or u
auguccaugnccnaaagccac

SEQ ID NO: 71396 - RNA, 22 nt, Artificial Sequence
  Synthetic
  misc_feature (11)..(11): n is a, c, g, or u
  misc_feature (14)..(14): n is a, c, g, or u
aauguccaugnccnaaagccac

SEQ ID NO: 71397 - RNA, 23 nt, Artificial Sequence
  Synthetic
  misc_feature (12)..(12): n is a, c, g, or u
  misc_feature (15)..(15): n is a, c, g, or u
caauguccaugnccnaaagccac

SEQ ID NO: 71398 - RNA, 24 nt, Artificial Sequence
  Synthetic
  misc_feature (13)..(13): n is a, c, g, or u
  misc_feature (16)..(16): n is a, c, g, or u
ucaauguccaugnccnaaagccac

SEQ ID NO: 71399 - RNA, 18 nt, Artificial Sequence
  Synthetic
aaacgagaguaacuccac

SEQ ID NO: 71400 - RNA, 19 nt, Artificial Sequence
  Synthetic
aaaacgagaguaacuccac

SEQ ID NO: 71401 - RNA, 20 nt, Artificial Sequence
  Synthetic
aaaaacgagaguaacuccac

SEQ ID NO: 71402 - RNA, 21 nt, Artificial Sequence
  Synthetic
caaaaacgagaguaacuccac

SEQ ID NO: 71403 - RNA, 22 nt, Artificial Sequence
  Synthetic
gcaaaaacgagaguaacuccac

SEQ ID NO: 71404 - RNA, 23 nt, Artificial Sequence
  Synthetic
ggcaaaaacgagaguaacuccac

SEQ ID NO: 71405 - RNA, 24 nt, Artificial Sequence
  Synthetic
aggcaaaaacgagaguaacuccac

SEQ ID NO: 71406 - RNA, 18 nt, Artificial Sequence
  Synthetic
ugagccugagggcuccac

SEQ ID NO: 71407 - RNA, 19 nt, Artificial Sequence
  Synthetic
uugagccugagggcuccac

SEQ ID NO: 71408 - RNA, 20 nt, Artificial Sequence
  Synthetic
cuugagccugagggcuccac

SEQ ID NO: 71409 - RNA, 21 nt, Artificial Sequence
  Synthetic
ccuugagccugagggcuccac

SEQ ID NO: 71410 - RNA, 22 nt, Artificial Sequence
  Synthetic
gccuugagccugagggcuccac

SEQ ID NO: 71411 - RNA, 23 nt, Artificial Sequence
  Synthetic
ugccuugagccugagggcuccac

SEQ ID NO: 71412 - RNA, 24 nt, Artificial Sequence
  Synthetic
augccuugagccugagggcuccac

SEQ ID NO: 71413 - RNA, 18 nt, Artificial Sequence
  Synthetic
aaauugagagaaguccac

SEQ ID NO: 71414 - RNA, 19 nt, Artificial Sequence
  Synthetic
aaaauugagagaaguccac

SEQ ID NO: 71415 - RNA, 20 nt, Artificial Sequence
  Synthetic
gaaaauugagagaaguccac

SEQ ID NO: 71416 - RNA, 21 nt, Artificial Sequence
  Synthetic
agaaaauugagagaaguccac

SEQ ID NO: 71417 - RNA, 22 nt, Artificial Sequence
  Synthetic
uagaaaauugagagaaguccac

SEQ ID NO: 71418 - RNA, 23 nt, Artificial Sequence
  Synthetic
cuagaaaauugagagaaguccac

SEQ ID NO: 71419 - RNA, 24 nt, Artificial Sequence
  Synthetic
ccuagaaaauugagagaaguccac

SEQ ID NO: 71420 - RNA, 18 nt, Artificial Sequence
  Synthetic
auccacacuccaaaagac

SEQ ID NO: 71421 - RNA, 19 nt, Artificial Sequence
  Synthetic
aauccacacuccaaaagac

SEQ ID NO: 71422 - RNA, 20 nt, Artificial Sequence
  Synthetic
gaauccacacuccaaaagac

SEQ ID NO: 71423 - RNA, 21 nt, Artificial Sequence
  Synthetic
cgaauccacacuccaaaagac

SEQ ID NO: 71424 - RNA, 22 nt, Artificial Sequence
  Synthetic
gcgaauccacacuccaaaagac

SEQ ID NO: 71425 - RNA, 23 nt, Artificial Sequence
  Synthetic
ugcgaauccacacuccaaaagac

SEQ ID NO: 71426 - RNA, 24 nt, Artificial Sequence
  Synthetic
gugcgaauccacacuccaaaagac

SEQ ID NO: 71427 - RNA, 18 nt, Artificial Sequence
  Synthetic
aaauguauacccaaagac

SEQ ID NO: 71428 - RNA, 19 nt, Artificial Sequence
  Synthetic
uaaauguauacccaaagac

SEQ ID NO: 71429 - RNA, 20 nt, Artificial Sequence
  Synthetic
uuaaauguauacccaaagac

SEQ ID NO: 71430 - RNA, 21 nt, Artificial Sequence
  Synthetic
uuuaaauguauacccaaagac

SEQ ID NO: 71431 - RNA, 22 nt, Artificial Sequence
  Synthetic
auuuaaauguauacccaaagac

SEQ ID NO: 71432 - RNA, 23 nt, Artificial Sequence
  Synthetic
gauuuaaauguauacccaaagac

SEQ ID NO: 71433 - RNA, 24 nt, Artificial Sequence
  Synthetic
ggauuuaaauguauacccaaagac

SEQ ID NO: 71434 - RNA, 18 nt, Artificial Sequence
  Synthetic
aguccucuuauguaagac

SEQ ID NO: 71435 - RNA, 19 nt, Artificial Sequence
  Synthetic
gaguccucuuauguaagac

SEQ ID NO: 71436 - RNA, 20 nt, Artificial Sequence
  Synthetic
agaguccucuuauguaagac

SEQ ID NO: 71437 - RNA, 21 nt, Artificial Sequence
  Synthetic
aagaguccucuuauguaagac

SEQ ID NO: 71438 - RNA, 22 nt, Artificial Sequence
  Synthetic
caagaguccucuuauguaagac

SEQ ID NO: 71439 - RNA, 23 nt, Artificial Sequence
  Synthetic
ccaagaguccucuuauguaagac

SEQ ID NO: 71440 - RNA, 24 nt, Artificial Sequence
  Synthetic
uccaagaguccucuuauguaagac

SEQ ID NO: 71441 - RNA, 18 nt, Artificial Sequence
  Synthetic
agaugagaaggcacagac

SEQ ID NO: 71442 - RNA, 19 nt, Artificial Sequence
  Synthetic
cagaugagaaggcacagac

SEQ ID NO: 71443 - RNA, 20 nt, Artificial Sequence
  Synthetic
gcagaugagaaggcacagac

SEQ ID NO: 71444 - RNA, 21 nt, Artificial Sequence
  Synthetic
ggcagaugagaaggcacagac

SEQ ID NO: 71445 - RNA, 22 nt, Artificial Sequence
  Synthetic
cggcagaugagaaggcacagac

SEQ ID NO: 71446 - RNA, 23 nt, Artificial Sequence
  Synthetic
ccggcagaugagaaggcacagac

SEQ ID NO: 71447 - RNA, 24 nt, Artificial Sequence
  Synthetic
uccggcagaugagaaggcacagac

SEQ ID NO: 71448 - RNA, 18 nt, Artificial Sequence
  Synthetic
uauaacugaaagccagac

SEQ ID NO: 71449 - RNA, 19 nt, Artificial Sequence
  Synthetic
auauaacugaaagccagac

SEQ ID NO: 71450 - RNA, 20 nt, Artificial Sequence
  Synthetic
cauauaacugaaagccagac

SEQ ID NO: 71451 - RNA, 21 nt, Artificial Sequence
  Synthetic
ccauauaacugaaagccagac

SEQ ID NO: 71452 - RNA, 22 nt, Artificial Sequence
  Synthetic
uccauauaacugaaagccagac

SEQ ID NO: 71453 - RNA, 23 nt, Artificial Sequence
  Synthetic
auccauauaacugaaagccagac

SEQ ID NO: 71454 - RNA, 24 nt, Artificial Sequence
  Synthetic
cauccauauaacugaaagccagac

SEQ ID NO: 71455 - RNA, 18 nt, Artificial Sequence
  Synthetic
  misc_feature (6)..(6): n is a, c, g, or u
ucggcnggaacggcagac

SEQ ID NO: 71456 - RNA, 19 nt, Artificial Sequence
  Synthetic
  misc_feature (7)..(7): n is a, c, g, or u
gucggcnggaacggcagac

SEQ ID NO: 71457 - RNA, 20 nt, Artificial Sequence
  Synthetic
  misc_feature (8)..(8): n is a, c, g, or u
ggucggcnggaacggcagac

SEQ ID NO: 71458 - RNA, 21 nt, Artificial Sequence
  Synthetic
  misc_feature (9)..(9): n is a, c, g, or u
uggucggcnggaacggcagac

SEQ ID NO: 71459 - RNA, 22 nt, Artificial Sequence
  Synthetic
  misc_feature (10)..(10): n is a, c, g, or u
guggucggcnggaacggcagac

SEQ ID NO: 71460 - RNA, 23 nt, Artificial Sequence
  Synthetic
  misc_feature (11)..(11): n is a, c, g, or u
cguggucggcnggaacggcagac

SEQ ID NO: 71461 - RNA, 24 nt, Artificial Sequence
  Synthetic
  misc_feature (12)..(12): n is a, c, g, or u
ccguggucggcnggaacggcagac

SEQ ID NO: 71462 - RNA, 18 nt, Artificial Sequence
  Synthetic
cucuuccaaaagugagac

SEQ ID NO: 71463 - RNA, 19 nt, Artificial Sequence
  Synthetic
ucucuuccaaaagugagac

SEQ ID NO: 71464 - RNA, 20 nt, Artificial Sequence
  Synthetic
uucucuuccaaaagugagac

SEQ ID NO: 71465 - RNA, 21 nt, Artificial Sequence
  Synthetic
uuucucuuccaaaagugagac

SEQ ID NO: 71466 - RNA, 22 nt, Artificial Sequence
  Synthetic
guuucucuuccaaaagugagac

SEQ ID NO: 71467 - RNA, 23 nt, Artificial Sequence
  Synthetic
gguuucucuuccaaaagugagac

SEQ ID NO: 71468 - RNA, 24 nt, Artificial Sequence
  Synthetic
cgguuucucuuccaaaagugagac

SEQ ID NO: 71469 - RNA, 18 nt, Artificial Sequence
  Synthetic
cgcugacgggacguagac

SEQ ID NO: 71470 - RNA, 19 nt, Artificial Sequence
  Synthetic
gcgcugacgggacguagac

SEQ ID NO: 71471 - RNA, 20 nt, Artificial Sequence
  Synthetic
agcgcugacgggacguagac

SEQ ID NO: 71472 - RNA, 18 nt, Artificial Sequence
  Synthetic
  misc_feature (3)..(3): n is a, c, g, or u
  misc_feature (7)..(7): n is a, c, g, or u
ganaganccccaagcgac

SEQ ID NO: 71473 - RNA, 19 nt, Artificial Sequence
  Synthetic
  misc_feature (4)..(4): n is a, c, g, or u
  misc_feature (8)..(8): n is a, c, g, or u
cganaganccccaagcgac

SEQ ID NO: 71474 - RNA, 20 nt, Artificial Sequence
  Synthetic
  misc_feature (5)..(5): n is a, c, g, or u
  misc_feature (9)..(9): n is a, c, g, or u
acganaganccccaagcgac

SEQ ID NO: 71475 - RNA, 21 nt, Artificial Sequence
  Synthetic
  misc_feature (6)..(6): n is a, c, g, or u
  misc_feature (10)..(10): n is a, c, g, or u
gacganaganccccaagcgac

SEQ ID NO: 71476 - RNA, 22 nt, Artificial Sequence
  Synthetic
  misc_feature (7)..(7): n is a, c, g, or u
  misc_feature (11)..(11): n is a, c, g, or u
ggacganaganccccaagcgac

SEQ ID NO: 71477 - RNA, 23 nt, Artificial Sequence
  Synthetic
  misc_feature (8)..(8): n is a, c, g, or u
  misc_feature (12)..(12): n is a, c, g, or u
gggacganaganccccaagcgac

SEQ ID NO: 71478 - RNA, 24 nt, Artificial Sequence
  Synthetic
  misc_feature (9)..(9): n is a, c, g, or u
  misc_feature (13)..(13): n is a, c, g, or u
ggggacganaganccccaagcgac

SEQ ID NO: 71479 - RNA, 18 nt, Artificial Sequence
  Synthetic
caggacaaauuggaggac

SEQ ID NO: 71480 - RNA, 19 nt, Artificial Sequence
  Synthetic
ccaggacaaauuggaggac

SEQ ID NO: 71481 - RNA, 20 nt, Artificial Sequence
  Synthetic
gccaggacaaauuggaggac

SEQ ID NO: 71482 - RNA, 21 nt, Artificial Sequence
  Synthetic
agccaggacaaauuggaggac

SEQ ID NO: 71483 - RNA, 22 nt, Artificial Sequence
  Synthetic
uagccaggacaaauuggaggac

SEQ ID NO: 71484 - RNA, 23 nt, Artificial Sequence
  Synthetic
auagccaggacaaauuggaggac

SEQ ID NO: 71485 - RNA, 24 nt, Artificial Sequence
  Synthetic
gauagccaggacaaauuggaggac

SEQ ID NO: 71486 - RNA, 18 nt, Artificial Sequence
  Synthetic
aggcuugaacaguaggac

SEQ ID NO: 71487 - RNA, 19 nt, Artificial Sequence
  Synthetic
gaggcuugaacaguaggac

SEQ ID NO: 71488 - RNA, 20 nt, Artificial Sequence
  Synthetic
ggaggcuugaacaguaggac

SEQ ID NO: 71489 - RNA, 21 nt, Artificial Sequence
  Synthetic
uggaggcuugaacaguaggac

SEQ ID NO: 71490 - RNA, 22 nt, Artificial Sequence
  Synthetic
uuggaggcuugaacaguaggac

SEQ ID NO: 71491 - RNA, 23 nt, Artificial Sequence
  Synthetic
cuuggaggcuugaacaguaggac

SEQ ID NO: 71492 - RNA, 24 nt, Artificial Sequence
  Synthetic
gcuuggaggcuugaacaguaggac

SEQ ID NO: 71493 - RNA, 18 nt, Artificial Sequence
  Synthetic
acagagguauaaagggac

SEQ ID NO: 71494 - RNA, 19 nt, Artificial Sequence
  Synthetic
aacagagguauaaagggac

SEQ ID NO: 71495 - RNA, 20 nt, Artificial Sequence
  Synthetic
uaacagagguauaaagggac

SEQ ID NO: 71496 - RNA, 21 nt, Artificial Sequence
  Synthetic
guaacagagguauaaagggac

SEQ ID NO: 71497 - RNA, 22 nt, Artificial Sequence
  Synthetic
gguaacagagguauaaagggac

SEQ ID NO: 71498 - RNA, 23 nt, Artificial Sequence
  Synthetic
ugguaacagagguauaaagggac

SEQ ID NO: 71499 - RNA, 24 nt, Artificial Sequence
  Synthetic
uugguaacagagguauaaagggac

SEQ ID NO: 71500 - RNA, 18 nt, Artificial Sequence
  Synthetic
auucagcgcugacgggac

SEQ ID NO: 71501 - RNA, 19 nt, Artificial Sequence
  Synthetic
gauucagcgcugacgggac

SEQ ID NO: 71502 - RNA, 20 nt, Artificial Sequence
  Synthetic
ggauucagcgcugacgggac

SEQ ID NO: 71503 - RNA, 21 nt, Artificial Sequence
  Synthetic
aggauucagcgcugacgggac

SEQ ID NO: 71504 - RNA, 22 nt, Artificial Sequence
  Synthetic
caggauucagcgcugacgggac

SEQ ID NO: 71505 - RNA, 23 nt, Artificial Sequence
  Synthetic
gcaggauucagcgcugacgggac

SEQ ID NO: 71506 - RNA, 24 nt, Artificial Sequence
  Synthetic
cgcaggauucagcgcugacgggac

SEQ ID NO: 71507 - RNA, 18 nt, Artificial Sequence
  Synthetic
gcagacggagaaggggac

SEQ ID NO: 71508 - RNA, 19 nt, Artificial Sequence
  Synthetic
ggcagacggagaaggggac

SEQ ID NO: 71509 - RNA, 20 nt, Artificial Sequence
  Synthetic
cggcagacggagaaggggac

SEQ ID NO: 71510 - RNA, 21 nt, Artificial Sequence
  Synthetic
acggcagacggagaaggggac

SEQ ID NO: 71511 - RNA, 22 nt, Artificial Sequence
  Synthetic
aacggcagacggagaaggggac

SEQ ID NO: 71512 - RNA, 23 nt, Artificial Sequence
  Synthetic
gaacggcagacggagaaggggac

SEQ ID NO: 71513 - RNA, 24 nt, Artificial Sequence
  Synthetic
ggaacggcagacggagaaggggac

SEQ ID NO: 71514 - RNA, 18 nt, Artificial Sequence
  Synthetic
  misc_feature (4)..(4): n is a, c, g, or u
  misc_feature (10)..(10): n is a, c, g, or u
uganuggagnuuggggac

SEQ ID NO: 71515 - RNA, 19 nt, Artificial Sequence
  Synthetic
  misc_feature (5)..(5): n is a, c, g, or u
  misc_feature (11)..(11): n is a, c, g, or u
guganuggagnuuggggac

SEQ ID NO: 71516 - RNA, 20 nt, Artificial Sequence
  Synthetic
  misc_feature (6)..(6): n is a, c, g, or u
  misc_feature (12)..(12): n is a, c, g, or u
aguganuggagnuuggggac

SEQ ID NO: 71517 - RNA, 21 nt, Artificial Sequence
  Synthetic
  misc_feature (7)..(7): n is a, c, g, or u
  misc_feature (13)..(13): n is a, c, g, or u
gaguganuggagnuuggggac

SEQ ID NO: 71518 - RNA, 22 nt, Artificial Sequence
  Synthetic
  misc_feature (8)..(8): n is a, c, g, or u
  misc_feature (14)..(14): n is a, c, g, or u
ugaguganuggagnuuggggac

SEQ ID NO: 71519 - RNA, 23 nt, Artificial Sequence
  Synthetic
  misc_feature (9)..(9): n is a, c, g, or u
  misc_feature (15)..(15): n is a, c, g, or u
gugaguganuggagnuuggggac

SEQ ID NO: 71520 - RNA, 24 nt, Artificial Sequence
  Synthetic
  misc_feature (10)..(10): n is a, c, g, or u
  misc_feature (16)..(16): n is a, c, g, or u
ggugaguganuggagnuuggggac

SEQ ID NO: 71521 - RNA, 18 nt, Artificial Sequence
  Synthetic
gauugaauacacgcauac

SEQ ID NO: 71522 - RNA, 19 nt, Artificial Sequence
  Synthetic
agauugaauacacgcauac

SEQ ID NO: 71523 - RNA, 20 nt, Artificial Sequence
  Synthetic
uagauugaauacacgcauac

SEQ ID NO: 71524 - RNA, 21 nt, Artificial Sequence
  Synthetic
uuagauugaauacacgcauac

SEQ ID NO: 71525 - RNA, 22 nt, Artificial Sequence
  Synthetic
cuuagauugaauacacgcauac

SEQ ID NO: 71526 - RNA, 23 nt, Artificial Sequence
  Synthetic
gcuuagauugaauacacgcauac

SEQ ID NO: 71527 - RNA, 24 nt, Artificial Sequence
  Synthetic
ugcuuagauugaauacacgcauac

SEQ ID NO: 71528 - RNA, 18 nt, Artificial Sequence
  Synthetic
ugggauuuaaauguauac

SEQ ID NO: 71529 - RNA, 19 nt, Artificial Sequence
  Synthetic
uugggauuuaaauguauac

SEQ ID NO: 71530 - RNA, 20 nt, Artificial Sequence
  Synthetic
guugggauuuaaauguauac

SEQ ID NO: 71531 - RNA, 21 nt, Artificial Sequence
  Synthetic
uguugggauuuaaauguauac

SEQ ID NO: 71532 - RNA, 22 nt, Artificial Sequence
  Synthetic
uuguugggauuuaaauguauac

SEQ ID NO: 71533 - RNA, 23 nt, Artificial Sequence
  Synthetic
uuuguugggauuuaaauguauac

SEQ ID NO: 71534 - RNA, 24 nt, Artificial Sequence
  Synthetic
uuuuguugggauuuaaauguauac

SEQ ID NO: 71535 - RNA, 18 nt, Artificial Sequence
  Synthetic
ccuacagccuccuaguac

SEQ ID NO: 71536 - RNA, 19 nt, Artificial Sequence
  Synthetic
gccuacagccuccuaguac

SEQ ID NO: 71537 - RNA, 20 nt, Artificial Sequence
  Synthetic
ugccuacagccuccuaguac

SEQ ID NO: 71538 - RNA, 21 nt, Artificial Sequence
  Synthetic
augccuacagccuccuaguac

SEQ ID NO: 71539 - RNA, 22 nt, Artificial Sequence
  Synthetic
uaugccuacagccuccuaguac

SEQ ID NO: 71540 - RNA, 23 nt, Artificial Sequence
  Synthetic
uuaugccuacagccuccuaguac

SEQ ID NO: 71541 - RNA, 24 nt, Artificial Sequence
  Synthetic
uuuaugccuacagccuccuaguac

SEQ ID NO: 71542 - RNA, 18 nt, Artificial Sequence
  Synthetic
aaaauacaggccucuuac

SEQ ID NO: 71543 - RNA, 19 nt, Artificial Sequence
  Synthetic
gaaaauacaggccucuuac

SEQ ID NO: 71544 - RNA, 20 nt, Artificial Sequence
  Synthetic
ggaaaauacaggccucuuac

SEQ ID NO: 71545 - RNA, 21 nt, Artificial Sequence
  Synthetic
aggaaaauacaggccucuuac

SEQ ID NO: 71546 - RNA, 22 nt, Artificial Sequence
  Synthetic
caggaaaauacaggccucuuac

SEQ ID NO: 71547 - RNA, 23 nt, Artificial Sequence
  Synthetic
gcaggaaaauacaggccucuuac

SEQ ID NO: 71548 - RNA, 24 nt, Artificial Sequence
  Synthetic
agcaggaaaauacaggccucuuac

SEQ ID NO: 71549 - RNA, 18 nt, Artificial Sequence
  Synthetic
aucuagaagaucucuuac

SEQ ID NO: 71550 - RNA, 19 nt, Artificial Sequence
  Synthetic
uaucuagaagaucucuuac

SEQ ID NO: 71551 - RNA, 20 nt, Artificial Sequence
  Synthetic
guaucuagaagaucucuuac

SEQ ID NO: 71552 - RNA, 21 nt, Artificial Sequence
  Synthetic
gguaucuagaagaucucuuac

SEQ ID NO: 71553 - RNA, 22 nt, Artificial Sequence
  Synthetic
cgguaucuagaagaucucuuac

SEQ ID NO: 71554 - RNA, 23 nt, Artificial Sequence
  Synthetic
gcgguaucuagaagaucucuuac

SEQ ID NO: 71555 - RNA, 24 nt, Artificial Sequence
  Synthetic
ggcgguaucuagaagaucucuuac

SEQ ID NO: 71556 - RNA, 18 nt, Artificial Sequence
  Synthetic
  misc_feature (7)..(8): n is a, c, g, or u
gguucannuauuguuuac

SEQ ID NO: 71557 - RNA, 19 nt, Artificial Sequence
  Synthetic
  misc_feature (8)..(9): n is a, c, g, or u
agguucannuauuguuuac

SEQ ID NO: 71558 - RNA, 20 nt, Artificial Sequence
  Synthetic
  misc_feature (9)..(10): n is a, c, g, or u
aagguucannuauuguuuac

SEQ ID NO: 71559 - RNA, 21 nt, Artificial Sequence
  Synthetic
  misc_feature (10)..(11): n is a, c, g, or u
aaagguucannuauuguuuac

SEQ ID NO: 71560 - RNA, 22 nt, Artificial Sequence
  Synthetic
  misc_feature (11)..(12): n is a, c, g, or u
uaaagguucannuauuguuuac

SEQ ID NO: 71561 - RNA, 23 nt, Artificial Sequence
  Synthetic
  misc_feature (12)..(13): n is a, c, g, or u
guaaagguucannuauuguuuac

SEQ ID NO: 71562 - RNA, 24 nt, Artificial Sequence
  Synthetic
  misc_feature (13)..(14): n is a, c, g, or u
gguaaagguucannuauuguuuac

SEQ ID NO: 71563 - RNA, 18 nt, Artificial Sequence
  Synthetic
ugauaguccagaagaacc

SEQ ID NO: 71564 - RNA, 19 nt, Artificial Sequence
  Synthetic
uugauaguccagaagaacc

SEQ ID NO: 71565 - RNA, 20 nt, Artificial Sequence
  Synthetic
cuugauaguccagaagaacc

SEQ ID NO: 71566 - RNA, 21 nt, Artificial Sequence
  Synthetic
ccuugauaguccagaagaacc

SEQ ID NO: 71567 - RNA, 22 nt, Artificial Sequence
  Synthetic
accuugauaguccagaagaacc

SEQ ID NO: 71568 - RNA, 23 nt, Artificial Sequence
  Synthetic
uaccuugauaguccagaagaacc

SEQ ID NO: 71569 - RNA, 24 nt, Artificial Sequence
  Synthetic
auaccuugauaguccagaagaacc

SEQ ID NO: 71570 - RNA, 18 nt, Artificial Sequence
  Synthetic
gggaaagcccggcgaacc

SEQ ID NO: 71571 - RNA, 19 nt, Artificial Sequence
  Synthetic
ggggaaagcccggcgaacc

SEQ ID NO: 71572 - RNA, 20 nt, Artificial Sequence
  Synthetic
gggggaaagcccggcgaacc

SEQ ID NO: 71573 - RNA, 21 nt, Artificial Sequence
  Synthetic
ugggggaaagcccggcgaacc

SEQ ID NO: 71574 - RNA, 22 nt, Artificial Sequence
  Synthetic
gugggggaaagcccggcgaacc

SEQ ID NO: 71575 - RNA, 23 nt, Artificial Sequence
  Synthetic
agugggggaaagcccggcgaacc

SEQ ID NO: 71576 - RNA, 24 nt, Artificial Sequence
  Synthetic
cagugggggaaagcccggcgaacc

SEQ ID NO: 71577 - RNA, 18 nt, Artificial Sequence
  Synthetic
acuuccaauuacauaacc

SEQ ID NO: 71578 - RNA, 19 nt, Artificial Sequence
  Synthetic
aacuuccaauuacauaacc

SEQ ID NO: 71579 - RNA, 20 nt, Artificial Sequence
  Synthetic
caacuuccaauuacauaacc

SEQ ID NO: 71580 - RNA, 21 nt, Artificial Sequence
  Synthetic
ccaacuuccaauuacauaacc

SEQ ID NO: 71581 - RNA, 22 nt, Artificial Sequence
  Synthetic
cccaacuuccaauuacauaacc

SEQ ID NO: 71582 - RNA, 23 nt, Artificial Sequence
  Synthetic
ccccaacuuccaauuacauaacc

SEQ ID NO: 71583 - RNA, 24 nt, Artificial Sequence
  Synthetic
  misc_feature (1)..(1): n is a, c, g, or u
nccccaacuuccaauuacauaacc

SEQ ID NO: 71584 - RNA, 18 nt, Artificial Sequence
  Synthetic
  misc_feature (6)..(6): n is a, c, g, or u
  misc_feature (9)..(9): n is a, c, g, or u
ccaugnccnaaagccacc

SEQ ID NO: 71585 - RNA, 19 nt, Artificial Sequence
  Synthetic
  misc_feature (7)..(7): n is a, c, g, or u
  misc_feature (10)..(10): n is a, c, g, or u
uccaugnccnaaagccacc

SEQ ID NO: 71586 - RNA, 20 nt, Artificial Sequence
  Synthetic
  misc_feature (8)..(8): n is a, c, g, or u
  misc_feature (11)..(11): n is a, c, g, or u
guccaugnccnaaagccacc

SEQ ID NO: 71587 - RNA, 21 nt, Artificial Sequence
  Synthetic
  misc_feature (9)..(9): n is a, c, g, or u
  misc_feature (12)..(12): n is a, c, g, or u
uguccaugnccnaaagccacc

SEQ ID NO: 71588 - RNA, 22 nt, Artificial Sequence
  Synthetic
  misc_feature (10)..(10): n is a, c, g, or u
  misc_feature (13)..(13): n is a, c, g, or u
auguccaugnccnaaagccacc

SEQ ID NO: 71589 - RNA, 23 nt, Artificial Sequence
  Synthetic
  misc_feature (11)..(11): n is a, c, g, or u
  misc_feature (14)..(14): n is a, c, g, or u
aauguccaugnccnaaagccacc

SEQ ID NO: 71590 - RNA, 24 nt, Artificial Sequence
  Synthetic
  misc_feature (12)..(12): n is a, c, g, or u
  misc_feature (15)..(15): n is a, c, g, or u
caauguccaugnccnaaagccacc

SEQ ID NO: 71591 - RNA, 18 nt, Artificial Sequence
  Synthetic
uccggaacuggagccacc

SEQ ID NO: 71592 - RNA, 19 nt, Artificial Sequence
  Synthetic
uuccggaacuggagccacc

SEQ ID NO: 71593 - RNA, 20 nt, Artificial Sequence
  Synthetic
guuccggaacuggagccacc

SEQ ID NO: 71594 - RNA, 21 nt, Artificial Sequence
  Synthetic
uguuccggaacuggagccacc

SEQ ID NO: 71595 - RNA, 22 nt, Artificial Sequence
  Synthetic
cuguuccggaacuggagccacc

SEQ ID NO: 71596 - RNA, 23 nt, Artificial Sequence
  Synthetic
acuguuccggaacuggagccacc

SEQ ID NO: 71597 - RNA, 24 nt, Artificial Sequence
  Synthetic
cacuguuccggaacuggagccacc

SEQ ID NO: 71598 - RNA, 18 nt, Artificial Sequence
  Synthetic
gagccugagggcuccacc

SEQ ID NO: 71599 - RNA, 19 nt, Artificial Sequence
  Synthetic
ugagccugagggcuccacc

SEQ ID NO: 71600 - RNA, 20 nt, Artificial Sequence
  Synthetic
uugagccugagggcuccacc

SEQ ID NO: 71601 - RNA, 21 nt, Artificial Sequence
  Synthetic
cuugagccugagggcuccacc

SEQ ID NO: 71602 - RNA, 22 nt, Artificial Sequence
  Synthetic
ccuugagccugagggcuccacc

SEQ ID NO: 71603 - RNA, 23 nt, Artificial Sequence
  Synthetic
gccuugagccugagggcuccacc

SEQ ID NO: 71604 - RNA, 24 nt, Artificial Sequence
  Synthetic
ugccuugagccugagggcuccacc

SEQ ID NO: 71605 - RNA, 18 nt, Artificial Sequence
  Synthetic
guccucuuauguaagacc

SEQ ID NO: 71606 - RNA, 19 nt, Artificial Sequence
  Synthetic
aguccucuuauguaagacc

SEQ ID NO: 71607 - RNA, 20 nt, Artificial Sequence
  Synthetic
gaguccucuuauguaagacc

SEQ ID NO: 71608 - RNA, 21 nt, Artificial Sequence
  Synthetic
agaguccucuuauguaagacc

SEQ ID NO: 71609 - RNA, 22 nt, Artificial Sequence
  Synthetic
aagaguccucuuauguaagacc

SEQ ID NO: 71610 - RNA, 23 nt, Artificial Sequence
  Synthetic
caagaguccucuuauguaagacc

SEQ ID NO: 71611 - RNA, 24 nt, Artificial Sequence
  Synthetic
ccaagaguccucuuauguaagacc

SEQ ID NO: 71612 - RNA, 18 nt, Artificial Sequence
  Synthetic
  misc_feature (2)..(2): n is a, c, g, or u
  misc_feature (6)..(6): n is a, c, g, or u
anaganccccaagcgacc

SEQ ID NO: 71613 - RNA, 19 nt, Artificial Sequence
  Synthetic
  misc_feature (3)..(3): n is a, c, g, or u
  misc_feature (7)..(7): n is a, c, g, or u
ganaganccccaagcgacc

SEQ ID NO: 71614 - RNA, 20 nt, Artificial Sequence
  Synthetic
  misc_feature (4)..(4): n is a, c, g, or u
  misc_feature (8)..(8): n is a, c, g, or u
cganaganccccaagcgacc

SEQ ID NO: 71615 - RNA, 21 nt, Artificial Sequence
  Synthetic
  misc_feature (5)..(5): n is a, c, g, or u
  misc_feature (9)..(9): n is a, c, g, or u
acganaganccccaagcgacc

SEQ ID NO: 71616 - RNA, 22 nt, Artificial Sequence
  Synthetic
  misc_feature (6)..(6): n is a, c, g, or u
  misc_feature (10)..(10): n is a, c, g, or u
gacganaganccccaagcgacc

SEQ ID NO: 71617 - RNA, 23 nt, Artificial Sequence
  Synthetic
  misc_feature (7)..(7): n is a, c, g, or u
  misc_feature (11)..(11): n is a, c, g, or u
ggacganaganccccaagcgacc

SEQ ID NO: 71618 - RNA, 24 nt, Artificial Sequence
  Synthetic
  misc_feature (8)..(8): n is a, c, g, or u
  misc_feature (12)..(12): n is a, c, g, or u
gggacganaganccccaagcgacc

SEQ ID NO: 71619 - RNA, 18 nt, Artificial Sequence
  Synthetic
auuuacuguuagaggacc

SEQ ID NO: 71620 - RNA, 19 nt, Artificial Sequence
  Synthetic
cauuuacuguuagaggacc

SEQ ID NO: 71621 - RNA, 20 nt, Artificial Sequence
  Synthetic
ucauuuacuguuagaggacc

SEQ ID NO: 71622 - RNA, 21 nt, Artificial Sequence
  Synthetic
uucauuuacuguuagaggacc

SEQ ID NO: 71623 - RNA, 22 nt, Artificial Sequence
  Synthetic
uuucauuuacuguuagaggacc

SEQ ID NO: 71624 - RNA, 23 nt, Artificial Sequence
  Synthetic
uuuucauuuacuguuagaggacc

SEQ ID NO: 71625 - RNA, 24 nt, Artificial Sequence
  Synthetic
uuuuucauuuacuguuagaggacc

SEQ ID NO: 71626 - RNA, 18 nt, Artificial Sequence
  Synthetic
cccaagaauaaggugacc

SEQ ID NO: 71627 - RNA, 19 nt, Artificial Sequence
  Synthetic
ucccaagaauaaggugacc

SEQ ID NO: 71628 - RNA, 20 nt, Artificial Sequence
  Synthetic
uucccaagaauaaggugacc

SEQ ID NO: 71629 - RNA, 21 nt, Artificial Sequence
  Synthetic
guucccaagaauaaggugacc

SEQ ID NO: 71630 - RNA, 22 nt, Artificial Sequence
  Synthetic
uguucccaagaauaaggugacc

SEQ ID NO: 71631 - RNA, 23 nt, Artificial Sequence
  Synthetic
uuguucccaagaauaaggugacc

SEQ ID NO: 71632 - RNA, 24 nt, Artificial Sequence
  Synthetic
cuuguucccaagaauaaggugacc

SEQ ID NO: 71633 - RNA, 18 nt, Artificial Sequence
  Synthetic
gggauuuaaauguauacc

SEQ ID NO: 71634 - RNA, 19 nt, Artificial Sequence
  Synthetic
ugggauuuaaauguauacc

SEQ ID NO: 71635 - RNA, 20 nt, Artificial Sequence
  Synthetic
uugggauuuaaauguauacc

SEQ ID NO: 71636 - RNA, 21 nt, Artificial Sequence
  Synthetic
guugggauuuaaauguauacc

SEQ ID NO: 71637 - RNA, 22 nt, Artificial Sequence
  Synthetic
uguugggauuuaaauguauacc

SEQ ID NO: 71638 - RNA, 23 nt, Artificial Sequence
  Synthetic
uuguugggauuuaaauguauacc

SEQ ID NO: 71639 - RNA, 24 nt, Artificial Sequence
  Synthetic
uuuguugggauuuaaauguauacc

SEQ ID NO: 71640 - RNA, 18 nt, Artificial Sequence
  Synthetic
cuuccaauuacauaaccc

SEQ ID NO: 71641 - RNA, 19 nt, Artificial Sequence
  Synthetic
acuuccaauuacauaaccc

SEQ ID NO: 71642 - RNA, 20 nt, Artificial Sequence
  Synthetic
aacuuccaauuacauaaccc

SEQ ID NO: 71643 - RNA, 21 nt, Artificial Sequence
  Synthetic
caacuuccaauuacauaaccc

SEQ ID NO: 71644 - RNA, 22 nt, Artificial Sequence
  Synthetic
ccaacuuccaauuacauaaccc

SEQ ID NO: 71645 - RNA, 23 nt, Artificial Sequence
  Synthetic
cccaacuuccaauuacauaaccc

SEQ ID NO: 71646 - RNA, 24 nt, Artificial Sequence
  Synthetic
ccccaacuuccaauuacauaaccc

SEQ ID NO: 71647 - RNA, 18 nt, Artificial Sequence
  Synthetic
agccugagggcuccaccc

SEQ ID NO: 71648 - RNA, 19 nt, Artificial Sequence
  Synthetic
gagccugagggcuccaccc

SEQ ID NO: 71649 - RNA, 20 nt, Artificial Sequence
  Synthetic
ugagccugagggcuccaccc

SEQ ID NO: 71650 - RNA, 21 nt, Artificial Sequence
  Synthetic
uugagccugagggcuccaccc

SEQ ID NO: 71651 - RNA, 22 nt, Artificial Sequence
  Synthetic
cuugagccugagggcuccaccc

SEQ ID NO: 71652 - RNA, 23 nt, Artificial Sequence
  Synthetic
ccuugagccugagggcuccaccc

SEQ ID NO: 71653 - RNA, 24 nt, Artificial Sequence
  Synthetic
gccuugagccugagggcuccaccc

SEQ ID NO: 71654 - RNA, 18 nt, Artificial Sequence
  Synthetic
  misc_feature (1)..(1): n is a, c, g, or u
  misc_feature (5)..(5): n is a, c, g, or u
naganccccaagcgaccc

SEQ ID NO: 71655 - RNA, 19 nt, Artificial Sequence
  Synthetic
  misc_feature (2)..(2): n is a, c, g, or u
  misc_feature (6)..(6): n is a, c, g, or u
anaganccccaagcgaccc

SEQ ID NO: 71656 - RNA, 20 nt, Artificial Sequence
  Synthetic
  misc_feature (3)..(3): n is a, c, g, or u
  misc_feature (7)..(7): n is a, c, g, or u
ganaganccccaagcgaccc

SEQ ID NO: 71657 - RNA, 21 nt, Artificial Sequence
  Synthetic
  misc_feature (4)..(4): n is a, c, g, or u
  misc_feature (8)..(8): n is a, c, g, or u
cganaganccccaagcgaccc

SEQ ID NO: 71658 - RNA, 22 nt, Artificial Sequence
  Synthetic
  misc_feature (5)..(5): n is a, c, g, or u
  misc_feature (9)..(9): n is a, c, g, or u
acganaganccccaagcgaccc

SEQ ID NO: 71659 - RNA, 23 nt, Artificial Sequence
  Synthetic
  misc_feature (6)..(6): n is a, c, g, or u
  misc_feature (10)..(10): n is a, c, g, or u
gacganaganccccaagcgaccc

SEQ ID NO: 71660 - RNA, 24 nt, Artificial Sequence
  Synthetic
  misc_feature (7)..(7): n is a, c, g, or u
  misc_feature (11)..(11): n is a, c, g, or u
ggacganaganccccaagcgaccc

SEQ ID NO: 71661 - RNA, 18 nt, Artificial Sequence
  Synthetic
ccaagaauaaggugaccc

SEQ ID NO: 71662 - RNA, 19 nt, Artificial Sequence
  Synthetic
cccaagaauaaggugaccc

SEQ ID NO: 71663 - RNA, 20 nt, Artificial Sequence
  Synthetic
ucccaagaauaaggugaccc

SEQ ID NO: 71664 - RNA, 21 nt, Artificial Sequence
  Synthetic
uucccaagaauaaggugaccc

SEQ ID NO: 71665 - RNA, 22 nt, Artificial Sequence
  Synthetic
guucccaagaauaaggugaccc

SEQ ID NO: 71666 - RNA, 23 nt, Artificial Sequence
  Synthetic
uguucccaagaauaaggugaccc

SEQ ID NO: 71667 - RNA, 24 nt, Artificial Sequence
  Synthetic
uuguucccaagaauaaggugaccc

SEQ ID NO: 71668 - RNA, 18 nt, Artificial Sequence
  Synthetic
ggauuuaaauguauaccc

SEQ ID NO: 71669 - RNA, 19 nt, Artificial Sequence
  Synthetic
gggauuuaaauguauaccc

SEQ ID NO: 71670 - RNA, 20 nt, Artificial Sequence
  Synthetic
ugggauuuaaauguauaccc

SEQ ID NO: 71671 - RNA, 21 nt, Artificial Sequence
  Synthetic
uugggauuuaaauguauaccc

SEQ ID NO: 71672 - RNA, 22 nt, Artificial Sequence
  Synthetic
guugggauuuaaauguauaccc

SEQ ID NO: 71673 - RNA, 23 nt, Artificial Sequence
  Synthetic
uguugggauuuaaauguauaccc

SEQ ID NO: 71674 - RNA, 24 nt, Artificial Sequence
  Synthetic
uuguugggauuuaaauguauaccc

SEQ ID NO: 71675 - RNA, 18 nt, Artificial Sequence
  Synthetic
gccugagggcuccacccc

SEQ ID NO: 71676 - RNA, 19 nt, Artificial Sequence
  Synthetic
agccugagggcuccacccc

SEQ ID NO: 71677 - RNA, 20 nt, Artificial Sequence
  Synthetic
gagccugagggcuccacccc

SEQ ID NO: 71678 - RNA, 21 nt, Artificial Sequence
  Synthetic
ugagccugagggcuccacccc

SEQ ID NO: 71679 - RNA, 22 nt, Artificial Sequence
  Synthetic
uugagccugagggcuccacccc

SEQ ID NO: 71680 - RNA, 23 nt, Artificial Sequence
  Synthetic
cuugagccugagggcuccacccc

SEQ ID NO: 71681 - RNA, 24 nt, Artificial Sequence
  Synthetic
ccuugagccugagggcuccacccc

SEQ ID NO: 71682 - RNA, 18 nt, Artificial Sequence
  Synthetic
  misc_feature (10)..(11): n is a, c, g, or u
gagucauuannucccccc

SEQ ID NO: 71683 - RNA, 19 nt, Artificial Sequence
  Synthetic
  misc_feature (11)..(12): n is a, c, g, or u
agagucauuannucccccc

SEQ ID NO: 71684 - RNA, 20 nt, Artificial Sequence
  Synthetic
  misc_feature (12)..(13): n is a, c, g, or u
uagagucauuannucccccc

SEQ ID NO: 71685 - RNA, 21 nt, Artificial Sequence
  Synthetic
  misc_feature (13)..(14): n is a, c, g, or u
cuagagucauuannucccccc

SEQ ID NO: 71686 - RNA, 22 nt, Artificial Sequence
  Synthetic
  misc_feature (14)..(15): n is a, c, g, or u
gcuagagucauuannucccccc

SEQ ID NO: 71687 - RNA, 23 nt, Artificial Sequence
  Synthetic
  misc_feature (15)..(16): n is a, c, g, or u
agcuagagucauuannucccccc

SEQ ID NO: 71688 - RNA, 24 nt, Artificial Sequence
  Synthetic
  misc_feature (16)..(17): n is a, c, g, or u
uagcuagagucauuannucccccc

SEQ ID NO: 71689 - RNA, 18 nt, Artificial Sequence
  Synthetic
acacacgggagcuccccc

SEQ ID NO: 71690 - RNA, 19 nt, Artificial Sequence
  Synthetic
gacacacgggagcuccccc

SEQ ID NO: 71691 - RNA, 20 nt, Artificial Sequence
  Synthetic
agacacacgggagcuccccc

SEQ ID NO: 71692 - RNA, 21 nt, Artificial Sequence
  Synthetic
aagacacacgggagcuccccc

SEQ ID NO: 71693 - RNA, 22 nt, Artificial Sequence
  Synthetic
caagacacacgggagcuccccc

SEQ ID NO: 71694 - RNA, 23 nt, Artificial Sequence
  Synthetic
ccaagacacacgggagcuccccc

SEQ ID NO: 71695 - RNA, 24 nt, Artificial Sequence
  Synthetic
gccaagacacacgggagcuccccc

SEQ ID NO: 71696 - RNA, 18 nt, Artificial Sequence
  Synthetic
  misc_feature (9)..(9): n is a, c, g, or u
guagaaganuaaagcccc

SEQ ID NO: 71697 - RNA, 19 nt, Artificial Sequence
  Synthetic
  misc_feature (10)..(10): n is a, c, g, or u
aguagaaganuaaagcccc

SEQ ID NO: 71698 - RNA, 20 nt, Artificial Sequence
  Synthetic
  misc_feature (11)..(11): n is a, c, g, or u
uaguagaaganuaaagcccc

SEQ ID NO: 71699 - RNA, 21 nt, Artificial Sequence
  Synthetic
  misc_feature (12)..(12): n is a, c, g, or u
auaguagaaganuaaagcccc

SEQ ID NO: 71700 - RNA, 22 nt, Artificial Sequence
  Synthetic
  misc_feature (13)..(13): n is a, c, g, or u
uauaguagaaganuaaagcccc

SEQ ID NO: 71701 - RNA, 23 nt, Artificial Sequence
  Synthetic
  misc_feature (14)..(14): n is a, c, g, or u
guauaguagaaganuaaagcccc

SEQ ID NO: 71702 - RNA, 24 nt, Artificial Sequence
  Synthetic
  misc_feature (15)..(15): n is a, c, g, or u
gguauaguagaaganuaaagcccc

SEQ ID NO: 71703 - RNA, 18 nt, Artificial Sequence
  Synthetic
gacacacgggagcucccc

SEQ ID NO: 71704 - RNA, 19 nt, Artificial Sequence
  Synthetic
agacacacgggagcucccc

SEQ ID NO: 71705 - RNA, 20 nt, Artificial Sequence
  Synthetic
aagacacacgggagcucccc

SEQ ID NO: 71706 - RNA, 21 nt, Artificial Sequence
  Synthetic
caagacacacgggagcucccc

SEQ ID NO: 71707 - RNA, 22 nt, Artificial Sequence
  Synthetic
ccaagacacacgggagcucccc

SEQ ID NO: 71708 - RNA, 23 nt, Artificial Sequence
  Synthetic
gccaagacacacgggagcucccc

SEQ ID NO: 71709 - RNA, 24 nt, Artificial Sequence
  Synthetic
ggccaagacacacgggagcucccc

SEQ ID NO: 71710 - RNA, 18 nt, Artificial Sequence
  Synthetic
aaaggggcagcaaagccc

SEQ ID NO: 71711 - RNA, 19 nt, Artificial Sequence
  Synthetic
aaaaggggcagcaaagccc

SEQ ID NO: 71712 - RNA, 20 nt, Artificial Sequence
  Synthetic
uaaaaggggcagcaaagccc

SEQ ID NO: 71713 - RNA, 21 nt, Artificial Sequence
  Synthetic
guaaaaggggcagcaaagccc

SEQ ID NO: 71714 - RNA, 22 nt, Artificial Sequence
  Synthetic
uguaaaaggggcagcaaagccc

SEQ ID NO: 71715 - RNA, 23 nt, Artificial Sequence
  Synthetic
guguaaaaggggcagcaaagccc

SEQ ID NO: 71716 - RNA, 24 nt, Artificial Sequence
  Synthetic
uguguaaaaggggcagcaaagccc

SEQ ID NO: 71717 - RNA, 18 nt, Artificial Sequence
  Synthetic
gacagugggggaaagccc

SEQ ID NO: 71718 - RNA, 19 nt, Artificial Sequence
  Synthetic
agacagugggggaaagccc

SEQ ID NO: 71719 - RNA, 20 nt, Artificial Sequence
  Synthetic
cagacagugggggaaagccc

SEQ ID NO: 71720 - RNA, 21 nt, Artificial Sequence
  Synthetic
ccagacagugggggaaagccc

SEQ ID NO: 71721 - RNA, 22 nt, Artificial Sequence
  Synthetic
gccagacagugggggaaagccc

SEQ ID NO: 71722 - RNA, 23 nt, Artificial Sequence
  Synthetic
agccagacagugggggaaagccc

SEQ ID NO: 71723 - RNA, 24 nt, Artificial Sequence
  Synthetic
aagccagacagugggggaaagccc

SEQ ID NO: 71724 - RNA, 18 nt, Artificial Sequence
  Synthetic
  misc_feature (10)..(10): n is a, c, g, or u
aguagaaganuaaagccc

SEQ ID NO: 71725 - RNA, 19 nt, Artificial Sequence
  Synthetic
  misc_feature (11)..(11): n is a, c, g, or u
uaguagaaganuaaagccc

SEQ ID NO: 71726 - RNA, 20 nt, Artificial Sequence
  Synthetic
  misc_feature (12)..(12): n is a, c, g, or u
auaguagaaganuaaagccc

SEQ ID NO: 71727 - RNA, 21 nt, Artificial Sequence
  Synthetic
  misc_feature (13)..(13): n is a, c, g, or u
uauaguagaaganuaaagccc

SEQ ID NO: 71728 - RNA, 22 nt, Artificial Sequence
  Synthetic
  misc_feature (14)..(14): n is a, c, g, or u
guauaguagaaganuaaagccc

SEQ ID NO: 71729 - RNA, 23 nt, Artificial Sequence
  Synthetic
  misc_feature (15)..(15): n is a, c, g, or u
gguauaguagaaganuaaagccc

SEQ ID NO: 71730 - RNA, 24 nt, Artificial Sequence
  Synthetic
  misc_feature (16)..(16): n is a, c, g, or u
agguauaguagaaganuaaagccc

SEQ ID NO: 71731 - RNA, 18 nt, Artificial Sequence
  Synthetic
uggucgggaaaaaauccc

SEQ ID NO: 71732 - RNA, 19 nt, Artificial Sequence
  Synthetic
guggucgggaaaaaauccc

SEQ ID NO: 71733 - RNA, 20 nt, Artificial Sequence
  Synthetic
gguggucgggaaaaaauccc

SEQ ID NO: 71734 - RNA, 21 nt, Artificial Sequence
  Synthetic
ugguggucgggaaaaaauccc

SEQ ID NO: 71735 - RNA, 22 nt, Artificial Sequence
  Synthetic
cugguggucgggaaaaaauccc

SEQ ID NO: 71736 - RNA, 23 nt, Artificial Sequence
  Synthetic
acugguggucgggaaaaaauccc

SEQ ID NO: 71737 - RNA, 24 nt, Artificial Sequence
  Synthetic
aacugguggucgggaaaaaauccc

SEQ ID NO: 71738 - RNA, 18 nt, Artificial Sequence
  Synthetic
gggcugaggcccacuccc

SEQ ID NO: 71739 - RNA, 19 nt, Artificial Sequence
  Synthetic
cgggcugaggcccacuccc

SEQ ID NO: 71740 - RNA, 20 nt, Artificial Sequence
  Synthetic
acgggcugaggcccacuccc

SEQ ID NO: 71741 - RNA, 21 nt, Artificial Sequence
  Synthetic
aacgggcugaggcccacuccc

SEQ ID NO: 71742 - RNA, 22 nt, Artificial Sequence
  Synthetic
aaacgggcugaggcccacuccc

SEQ ID NO: 71743 - RNA, 23 nt, Artificial Sequence
  Synthetic
gaaacgggcugaggcccacuccc

SEQ ID NO: 71744 - RNA, 24 nt, Artificial Sequence
  Synthetic
agaaacgggcugaggcccacuccc

SEQ ID NO: 71745 - RNA, 18 nt, Artificial Sequence
  Synthetic
agacacacgggagcuccc

SEQ ID NO: 71746 - RNA, 19 nt, Artificial Sequence
  Synthetic
aagacacacgggagcuccc

SEQ ID NO: 71747 - RNA, 20 nt, Artificial Sequence
  Synthetic
caagacacacgggagcuccc

SEQ ID NO: 71748 - RNA, 21 nt, Artificial Sequence
  Synthetic
ccaagacacacgggagcuccc

SEQ ID NO: 71749 - RNA, 22 nt, Artificial Sequence
  Synthetic
gccaagacacacgggagcuccc

SEQ ID NO: 71750 - RNA, 23 nt, Artificial Sequence
  Synthetic
ggccaagacacacgggagcuccc

SEQ ID NO: 71751 - RNA, 24 nt, Artificial Sequence
  Synthetic
uggccaagacacacgggagcuccc

SEQ ID NO: 71752 - RNA, 18 nt, Artificial Sequence
  Synthetic
  misc_feature (13)..(13): n is a, c, g, or u
gacagaauuaucnguccc

SEQ ID NO: 71753 - RNA, 19 nt, Artificial Sequence
  Synthetic
  misc_feature (14)..(14): n is a, c, g, or u
cgacagaauuaucnguccc

SEQ ID NO: 71754 - RNA, 20 nt, Artificial Sequence
  Synthetic
  misc_feature (15)..(15): n is a, c, g, or u
acgacagaauuaucnguccc

SEQ ID NO: 71755 - RNA, 21 nt, Artificial Sequence
  Synthetic
  misc_feature (16)..(16): n is a, c, g, or u
aacgacagaauuaucnguccc

SEQ ID NO: 71756 - RNA, 22 nt, Artificial Sequence
  Synthetic
  misc_feature (17)..(17): n is a, c, g, or u
gaacgacagaauuaucnguccc

SEQ ID NO: 71757 - RNA, 23 nt, Artificial Sequence
  Synthetic
  misc_feature (18)..(18): n is a, c, g, or u
agaacgacagaauuaucnguccc

SEQ ID NO: 71758 - RNA, 24 nt, Artificial Sequence
  Synthetic
  misc_feature (19)..(19): n is a, c, g, or u
gagaacgacagaauuaucnguccc

SEQ ID NO: 71759 - RNA, 18 nt, Artificial Sequence
  Synthetic
  misc_feature (13)..(14): n is a, c, g, or u
cuagagucauuannuccc

SEQ ID NO: 71760 - RNA, 19 nt, Artificial Sequence
  Synthetic
  misc_feature (14)..(15): n is a, c, g, or u
gcuagagucauuannuccc

SEQ ID NO: 71761 - RNA, 20 nt, Artificial Sequence
  Synthetic
  misc_feature (15)..(16): n is a, c, g, or u
agcuagagucauuannuccc

SEQ ID NO: 71762 - RNA, 21 nt, Artificial Sequence
  Synthetic
  misc_feature (16)..(17): n is a, c, g, or u
uagcuagagucauuannuccc

SEQ ID NO: 71763 - RNA, 22 nt, Artificial Sequence
  Synthetic
  misc_feature (17)..(18): n is a, c, g, or u
guagcuagagucauuannuccc

SEQ ID NO: 71764 - RNA, 23 nt, Artificial Sequence
  Synthetic
  misc_feature (18)..(19): n is a, c, g, or u
gguagcuagagucauuannuccc

SEQ ID NO: 71765 - RNA, 24 nt, Artificial Sequence
  Synthetic
  misc_feature (19)..(20): n is a, c, g, or u
agguagcuagagucauuannuccc

SEQ ID NO: 71766 - RNA, 18 nt, Artificial Sequence
  Synthetic
aaaaggggcagcaaagcc

SEQ ID NO: 71767 - RNA, 19 nt, Artificial Sequence
  Synthetic
uaaaaggggcagcaaagcc

SEQ ID NO: 71768 - RNA, 20 nt, Artificial Sequence
  Synthetic
guaaaaggggcagcaaagcc

SEQ ID NO: 71769 - RNA, 21 nt, Artificial Sequence
  Synthetic
uguaaaaggggcagcaaagcc

SEQ ID NO: 71770 - RNA, 22 nt, Artificial Sequence
  Synthetic
guguaaaaggggcagcaaagcc

SEQ ID NO: 71771 - RNA, 23 nt, Artificial Sequence
  Synthetic
uguguaaaaggggcagcaaagcc

SEQ ID NO: 71772 - RNA, 24 nt, Artificial Sequence
  Synthetic
uuguguaaaaggggcagcaaagcc

SEQ ID NO: 71773 - RNA, 18 nt, Artificial Sequence
  Synthetic
uauggccaagccccagcc

SEQ ID NO: 71774 - RNA, 19 nt, Artificial Sequence
  Synthetic
cuauggccaagccccagcc

SEQ ID NO: 71775 - RNA, 20 nt, Artificial Sequence
  Synthetic
ccuauggccaagccccagcc

SEQ ID NO: 71776 - RNA, 21 nt, Artificial Sequence
  Synthetic
gccuauggccaagccccagcc

SEQ ID NO: 71777 - RNA, 22 nt, Artificial Sequence
  Synthetic
ggccuauggccaagccccagcc

SEQ ID NO: 71778 - RNA, 23 nt, Artificial Sequence
  Synthetic
uggccuauggccaagccccagcc

SEQ ID NO: 71779 - RNA, 24 nt, Artificial Sequence
  Synthetic
auggccuauggccaagccccagcc

SEQ ID NO: 71780 - RNA, 18 nt, Artificial Sequence
  Synthetic
cagcacagccuagcagcc

SEQ ID NO: 71781 - RNA, 19 nt, Artificial Sequence
  Synthetic
gcagcacagccuagcagcc

SEQ ID NO: 71782 - RNA, 20 nt, Artificial Sequence
  Synthetic
ggcagcacagccuagcagcc

SEQ ID NO: 71783 - RNA, 21 nt, Artificial Sequence
  Synthetic
uggcagcacagccuagcagcc

SEQ ID NO: 71784 - RNA, 22 nt, Artificial Sequence
  Synthetic
uuggcagcacagccuagcagcc

SEQ ID NO: 71785 - RNA, 23 nt, Artificial Sequence
  Synthetic
guuggcagcacagccuagcagcc

SEQ ID NO: 71786 - RNA, 24 nt, Artificial Sequence
  Synthetic
aguuggcagcacagccuagcagcc

SEQ ID NO: 71787 - RNA, 18 nt, Artificial Sequence
  Synthetic
uggaucggcagaggagcc

SEQ ID NO: 71788 - RNA, 19 nt, Artificial Sequence
  Synthetic
auggaucggcagaggagcc

SEQ ID NO: 71789 - RNA, 20 nt, Artificial Sequence
  Synthetic
uauggaucggcagaggagcc

SEQ ID NO: 71790 - RNA, 21 nt, Artificial Sequence
  Synthetic
guauggaucggcagaggagcc

SEQ ID NO: 71791 - RNA, 22 nt, Artificial Sequence
  Synthetic
aguauggaucggcagaggagcc

SEQ ID NO: 71792 - RNA, 23 nt, Artificial Sequence
  Synthetic
caguauggaucggcagaggagcc

SEQ ID NO: 71793 - RNA, 24 nt, Artificial Sequence
  Synthetic
gcaguauggaucggcagaggagcc

SEQ ID NO: 71794 - RNA, 18 nt, Artificial Sequence
  Synthetic
uguuccggaacuggagcc

SEQ ID NO: 71795 - RNA, 19 nt, Artificial Sequence
  Synthetic
cuguuccggaacuggagcc

SEQ ID NO: 71796 - RNA, 20 nt, Artificial Sequence
  Synthetic
acuguuccggaacuggagcc

SEQ ID NO: 71797 - RNA, 21 nt, Artificial Sequence
  Synthetic
cacuguuccggaacuggagcc

SEQ ID NO: 71798 - RNA, 22 nt, Artificial Sequence
  Synthetic
ucacuguuccggaacuggagcc

SEQ ID NO: 71799 - RNA, 23 nt, Artificial Sequence
  Synthetic
uucacuguuccggaacuggagcc

SEQ ID NO: 71800 - RNA, 24 nt, Artificial Sequence
  Synthetic
guucacuguuccggaacuggagcc

SEQ ID NO: 71801 - RNA, 18 nt, Artificial Sequence
  Synthetic
gcacuaguaaacugagcc

SEQ ID NO: 71802 - RNA, 19 nt, Artificial Sequence
  Synthetic
ggcacuaguaaacugagcc

SEQ ID NO: 71803 - RNA, 20 nt, Artificial Sequence
  Synthetic
uggcacuaguaaacugagcc

SEQ ID NO: 71804 - RNA, 21 nt, Artificial Sequence
  Synthetic
auggcacuaguaaacugagcc

SEQ ID NO: 71805 - RNA, 22 nt, Artificial Sequence
  Synthetic
aauggcacuaguaaacugagcc

SEQ ID NO: 71806 - RNA, 23 nt, Artificial Sequence
  Synthetic
aaauggcacuaguaaacugagcc

SEQ ID NO: 71807 - RNA, 24 nt, Artificial Sequence
  Synthetic
caaauggcacuaguaaacugagcc

SEQ ID NO: 71808 - RNA, 18 nt, Artificial Sequence
  Synthetic
uuuagcaugccuugagcc

SEQ ID NO: 71809 - RNA, 19 nt, Artificial Sequence
  Synthetic
uuuuagcaugccuugagcc

SEQ ID NO: 71810 - RNA, 20 nt, Artificial Sequence
  Synthetic
uuuuuagcaugccuugagcc

SEQ ID NO: 71811 - RNA, 21 nt, Artificial Sequence
  Synthetic
guuuuuagcaugccuugagcc

SEQ ID NO: 71812 - RNA, 22 nt, Artificial Sequence
  Synthetic
uguuuuuagcaugccuugagcc

SEQ ID NO: 71813 - RNA, 23 nt, Artificial Sequence
  Synthetic
auguuuuuagcaugccuugagcc

SEQ ID NO: 71814 - RNA, 24 nt, Artificial Sequence
  Synthetic
aauguuuuuagcaugccuugagcc

SEQ ID NO: 71815 - RNA, 18 nt, Artificial Sequence
  Synthetic
ggaagaugauaaaacgcc

SEQ ID NO: 71816 - RNA, 19 nt, Artificial Sequence
  Synthetic
aggaagaugauaaaacgcc

SEQ ID NO: 71817 - RNA, 20 nt, Artificial Sequence
  Synthetic
gaggaagaugauaaaacgcc

SEQ ID NO: 71818 - RNA, 21 nt, Artificial Sequence
  Synthetic
agaggaagaugauaaaacgcc

SEQ ID NO: 71819 - RNA, 22 nt, Artificial Sequence
  Synthetic
aagaggaagaugauaaaacgcc

SEQ ID NO: 71820 - RNA, 23 nt, Artificial Sequence
  Synthetic
gaagaggaagaugauaaaacgcc

SEQ ID NO: 71821 - RNA, 24 nt, Artificial Sequence
  Synthetic
ugaagaggaagaugauaaaacgcc

SEQ ID NO: 71822 - RNA, 18 nt, Artificial Sequence
  Synthetic
aacaagaaaaaccccgcc

SEQ ID NO: 71823 - RNA, 19 nt, Artificial Sequence
  Synthetic
caacaagaaaaaccccgcc

SEQ ID NO: 71824 - RNA, 20 nt, Artificial Sequence
  Synthetic
ucaacaagaaaaaccccgcc

SEQ ID NO: 71825 - RNA, 21 nt, Artificial Sequence
  Synthetic
gucaacaagaaaaaccccgcc

SEQ ID NO: 71826 - RNA, 22 nt, Artificial Sequence
  Synthetic
ugucaacaagaaaaaccccgcc

SEQ ID NO: 71827 - RNA, 23 nt, Artificial Sequence
  Synthetic
uugucaacaagaaaaaccccgcc

SEQ ID NO: 71828 - RNA, 24 nt, Artificial Sequence
  Synthetic
uuugucaacaagaaaaaccccgcc

SEQ ID NO: 71829 - RNA, 18 nt, Artificial Sequence
  Synthetic
  misc_feature (1)..(1): n is a, c, g, or u
ncgcaugcgcugauggcc

SEQ ID NO: 71830 - RNA, 19 nt, Artificial Sequence
  Synthetic
  misc_feature (2)..(2): n is a, c, g, or u
cncgcaugcgcugauggcc

SEQ ID NO: 71831 - RNA, 20 nt, Artificial Sequence
  Synthetic
  misc_feature (3)..(3): n is a, c, g, or u
ccncgcaugcgcugauggcc

SEQ ID NO: 71832 - RNA, 21 nt, Artificial Sequence
  Synthetic
  misc_feature (4)..(4): n is a, c, g, or u
uccncgcaugcgcugauggcc

SEQ ID NO: 71833 - RNA, 22 nt, Artificial Sequence
  Synthetic
  misc_feature (5)..(5): n is a, c, g, or u
uuccncgcaugcgcugauggcc

SEQ ID NO: 71834 - RNA, 23 nt, Artificial Sequence
  Synthetic
  misc_feature (6)..(6): n is a, c, g, or u
guuccncgcaugcgcugauggcc

SEQ ID NO: 71835 - RNA, 24 nt, Artificial Sequence
  Synthetic
  misc_feature (7)..(7): n is a, c, g, or u
gguuccncgcaugcgcugauggcc

SEQ ID NO: 71836 - RNA, 18 nt, Artificial Sequence
  Synthetic
caauguuuuuagcaugcc

SEQ ID NO: 71837 - RNA, 19 nt, Artificial Sequence
  Synthetic
gcaauguuuuuagcaugcc

SEQ ID NO: 71838 - RNA, 20 nt, Artificial Sequence
  Synthetic
ggcaauguuuuuagcaugcc

SEQ ID NO: 71839 - RNA, 21 nt, Artificial Sequence
  Synthetic
uggcaauguuuuuagcaugcc

SEQ ID NO: 71840 - RNA, 22 nt, Artificial Sequence
  Synthetic
cuggcaauguuuuuagcaugcc

SEQ ID NO: 71841 - RNA, 23 nt, Artificial Sequence
  Synthetic
gcuggcaauguuuuuagcaugcc

SEQ ID NO: 71842 - RNA, 24 nt, Artificial Sequence
  Synthetic
ugcuggcaauguuuuuagcaugcc

SEQ ID NO: 71843 - RNA, 18 nt, Artificial Sequence
  Synthetic
cagucuuugaaguaugcc

SEQ ID NO: 71844 - RNA, 19 nt, Artificial Sequence
  Synthetic
acagucuuugaaguaugcc

SEQ ID NO: 71845 - RNA, 20 nt, Artificial Sequence
  Synthetic
aacagucuuugaaguaugcc

SEQ ID NO: 71846 - RNA, 21 nt, Artificial Sequence
  Synthetic
aaacagucuuugaaguaugcc

SEQ ID NO: 71847 - RNA, 22 nt, Artificial Sequence
  Synthetic
caaacagucuuugaaguaugcc

SEQ ID NO: 71848 - RNA, 23 nt, Artificial Sequence
  Synthetic
acaaacagucuuugaaguaugcc

SEQ ID NO: 71849 - RNA, 24 nt, Artificial Sequence
  Synthetic
aacaaacagucuuugaaguaugcc

SEQ ID NO: 71850 - RNA, 18 nt, Artificial Sequence
  Synthetic
cgcagaccaauuuaugcc

SEQ ID NO: 71851 - RNA, 19 nt, Artificial Sequence
  Synthetic
gcgcagaccaauuuaugcc

SEQ ID NO: 71852 - RNA, 20 nt, Artificial Sequence
  Synthetic
ugcgcagaccaauuuaugcc

SEQ ID NO: 71853 - RNA, 21 nt, Artificial Sequence
  Synthetic
gugcgcagaccaauuuaugcc

SEQ ID NO: 71854 - RNA, 22 nt, Artificial Sequence
  Synthetic
ggugcgcagaccaauuuaugcc

SEQ ID NO: 71855 - RNA, 23 nt, Artificial Sequence
  Synthetic
uggugcgcagaccaauuuaugcc

SEQ ID NO: 71856 - RNA, 24 nt, Artificial Sequence
  Synthetic
cuggugcgcagaccaauuuaugcc

SEQ ID NO: 71857 - RNA, 18 nt, Artificial Sequence
  Synthetic
  misc_feature (12)..(12): n is a, c, g, or u
  misc_feature (16)..(16): n is a, c, g, or u
gaaggggacganagancc

SEQ ID NO: 71858 - RNA, 19 nt, Artificial Sequence
  Synthetic
  misc_feature (13)..(13): n is a, c, g, or u
  misc_feature (17)..(17): n is a, c, g, or u
agaaggggacganagancc

SEQ ID NO: 71859 - RNA, 20 nt, Artificial Sequence
  Synthetic
  misc_feature (14)..(14): n is a, c, g, or u
  misc_feature (18)..(18): n is a, c, g, or u
gagaaggggacganagancc

SEQ ID NO: 71860 - RNA, 21 nt, Artificial Sequence
  Synthetic
  misc_feature (15)..(15): n is a, c, g, or u
  misc_feature (19)..(19): n is a, c, g, or u
ggagaaggggacganagancc

SEQ ID NO: 71861 - RNA, 22 nt, Artificial Sequence
  Synthetic
  misc_feature (16)..(16): n is a, c, g, or u
  misc_feature (20)..(20): n is a, c, g, or u
cggagaaggggacganagancc

SEQ ID NO: 71862 - RNA, 23 nt, Artificial Sequence
  Synthetic
  misc_feature (17)..(17): n is a, c, g, or u
  misc_feature (21)..(21): n is a, c, g, or u
acggagaaggggacganagancc

SEQ ID NO: 71863 - RNA, 24 nt, Artificial Sequence
  Synthetic
  misc_feature (18)..(18): n is a, c, g, or u
  misc_feature (22)..(22): n is a, c, g, or u
gacggagaaggggacganagancc

SEQ ID NO: 71864 - RNA, 18 nt, Artificial Sequence
  Synthetic
  misc_feature (16)..(16): n is a, c, g, or u
gggucaauguccaugncc

SEQ ID NO: 71865 - RNA, 19 nt, Artificial Sequence
  Synthetic
  misc_feature (17)..(17): n is a, c, g, or u
agggucaauguccaugncc

SEQ ID NO: 71866 - RNA, 20 nt, Artificial Sequence
  Synthetic
  misc_feature (18)..(18): n is a, c, g, or u
aagggucaauguccaugncc

SEQ ID NO: 71867 - RNA, 21 nt, Artificial Sequence
  Synthetic
  misc_feature (19)..(19): n is a, c, g, or u
uaagggucaauguccaugncc

SEQ ID NO: 71868 - RNA, 22 nt, Artificial Sequence
  Synthetic
  misc_feature (20)..(20): n is a, c, g, or u
auaagggucaauguccaugncc

SEQ ID NO: 71869 - RNA, 23 nt, Artificial Sequence
  Synthetic
  misc_feature (21)..(21): n is a, c, g, or u
uauaagggucaauguccaugncc

SEQ ID NO: 71870 - RNA, 24 nt, Artificial Sequence
  Synthetic
  misc_feature (22)..(22): n is a, c, g, or u
uuauaagggucaauguccaugncc

SEQ ID NO: 71871 - RNA, 18 nt, Artificial Sequence
  Synthetic
guggucgggaaaaaaucc

SEQ ID NO: 71872 - RNA, 19 nt, Artificial Sequence
  Synthetic
gguggucgggaaaaaaucc

SEQ ID NO: 71873 - RNA, 20 nt, Artificial Sequence
  Synthetic
ugguggucgggaaaaaaucc

SEQ ID NO: 71874 - RNA, 21 nt, Artificial Sequence
  Synthetic
cugguggucgggaaaaaaucc

SEQ ID NO: 71875 - RNA, 22 nt, Artificial Sequence
  Synthetic
acugguggucgggaaaaaaucc

SEQ ID NO: 71876 - RNA, 23 nt, Artificial Sequence
  Synthetic
aacugguggucgggaaaaaaucc

SEQ ID NO: 71877 - RNA, 24 nt, Artificial Sequence
  Synthetic
caacugguggucgggaaaaaaucc

SEQ ID NO: 71878 - RNA, 18 nt, Artificial Sequence
  Synthetic
gugcaggguccccaaucc

SEQ ID NO: 71879 - RNA, 19 nt, Artificial Sequence
  Synthetic
ggugcaggguccccaaucc

SEQ ID NO: 71880 - RNA, 20 nt, Artificial Sequence
  Synthetic
cggugcaggguccccaaucc

SEQ ID NO: 71881 - RNA, 21 nt, Artificial Sequence
  Synthetic
ucggugcaggguccccaaucc

SEQ ID NO: 71882 - RNA, 22 nt, Artificial Sequence
  Synthetic
uucggugcaggguccccaaucc

SEQ ID NO: 71883 - RNA, 23 nt, Artificial Sequence
  Synthetic
guucggugcaggguccccaaucc

SEQ ID NO: 71884 - RNA, 24 nt, Artificial Sequence
  Synthetic
uguucggugcaggguccccaaucc

SEQ ID NO: 71885 - RNA, 18 nt, Artificial Sequence
  Synthetic
ccucuuacucugggaucc

SEQ ID NO: 71886 - RNA, 19 nt, Artificial Sequence
  Synthetic
gccucuuacucugggaucc

SEQ ID NO: 71887 - RNA, 20 nt, Artificial Sequence
  Synthetic
ggccucuuacucugggaucc

SEQ ID NO: 71888 - RNA, 21 nt, Artificial Sequence
  Synthetic
aggccucuuacucugggaucc

SEQ ID NO: 71889 - RNA, 22 nt, Artificial Sequence
  Synthetic
caggccucuuacucugggaucc

SEQ ID NO: 71890 - RNA, 23 nt, Artificial Sequence
  Synthetic
acaggccucuuacucugggaucc

SEQ ID NO: 71891 - RNA, 24 nt, Artificial Sequence
  Synthetic
uacaggccucuuacucugggaucc

SEQ ID NO: 71892 - RNA, 18 nt, Artificial Sequence
  Synthetic
agugcgaauccacacucc

SEQ ID NO: 71893 - RNA, 19 nt, Artificial Sequence
  Synthetic
gagugcgaauccacacucc

SEQ ID NO: 71894 - RNA, 20 nt, Artificial Sequence
  Synthetic
ggagugcgaauccacacucc

SEQ ID NO: 71895 - RNA, 21 nt, Artificial Sequence
  Synthetic
aggagugcgaauccacacucc

SEQ ID NO: 71896 - RNA, 22 nt, Artificial Sequence
  Synthetic
gaggagugcgaauccacacucc

SEQ ID NO: 71897 - RNA, 23 nt, Artificial Sequence
  Synthetic
ggaggagugcgaauccacacucc

SEQ ID NO: 71898 - RNA, 24 nt, Artificial Sequence
  Synthetic
uggaggagugcgaauccacacucc

SEQ ID NO: 71899 - RNA, 18 nt, Artificial Sequence
  Synthetic
cgggcugaggcccacucc

SEQ ID NO: 71900 - RNA, 19 nt, Artificial Sequence
  Synthetic
acgggcugaggcccacucc

SEQ ID NO: 71901 - RNA, 20 nt, Artificial Sequence
  Synthetic
aacgggcugaggcccacucc

SEQ ID NO: 71902 - RNA, 21 nt, Artificial Sequence
  Synthetic
aaacgggcugaggcccacucc

SEQ ID NO: 71903 - RNA, 22 nt, Artificial Sequence
  Synthetic
gaaacgggcugaggcccacucc

SEQ ID NO: 71904 - RNA, 23 nt, Artificial Sequence
  Synthetic
agaaacgggcugaggcccacucc

SEQ ID NO: 71905 - RNA, 24 nt, Artificial Sequence
  Synthetic
gagaaacgggcugaggcccacucc

SEQ ID NO: 71906 - RNA, 18 nt, Artificial Sequence
  Synthetic
uucccaccuugugagucc

SEQ ID NO: 71907 - RNA, 19 nt, Artificial Sequence
  Synthetic
uuucccaccuugugagucc

SEQ ID NO: 71908 - RNA, 20 nt, Artificial Sequence
  Synthetic
auuucccaccuugugagucc

SEQ ID NO: 71909 - RNA, 21 nt, Artificial Sequence
  Synthetic
aauuucccaccuugugagucc

SEQ ID NO: 71910 - RNA, 22 nt, Artificial Sequence
  Synthetic
aaauuucccaccuugugagucc

SEQ ID NO: 71911 - RNA, 23 nt, Artificial Sequence
  Synthetic
aaaauuucccaccuugugagucc

SEQ ID NO: 71912 - RNA, 24 nt, Artificial Sequence
  Synthetic
uaaaauuucccaccuugugagucc

SEQ ID NO: 71913 - RNA, 18 nt, Artificial Sequence
  Synthetic
aacauaccuugauagucc

SEQ ID NO: 71914 - RNA, 19 nt, Artificial Sequence
  Synthetic
caacauaccuugauagucc

SEQ ID NO: 71915 - RNA, 20 nt, Artificial Sequence
  Synthetic
gcaacauaccuugauagucc

SEQ ID NO: 71916 - RNA, 18 nt, Artificial Sequence
  Synthetic
auucgagagggaccgucc

SEQ ID NO: 71917 - RNA, 19 nt, Artificial Sequence
  Synthetic
cauucgagagggaccgucc

SEQ ID NO: 71918 - RNA, 20 nt, Artificial Sequence
  Synthetic
ccauucgagagggaccgucc

SEQ ID NO: 71919 - RNA, 18 nt, Artificial Sequence
  Synthetic
  misc_feature (9)..(9): n is a, c, g, or u
ccccgagangggucgucc

SEQ ID NO: 71920 - RNA, 19 nt, Artificial Sequence
  Synthetic
  misc_feature (10)..(10): n is a, c, g, or u
accccgagangggucgucc

SEQ ID NO: 71921 - RNA, 20 nt, Artificial Sequence
  Synthetic
  misc_feature (11)..(11): n is a, c, g, or u
gaccccgagangggucgucc

SEQ ID NO: 71922 - RNA, 21 nt, Artificial Sequence
  Synthetic
  misc_feature (12)..(12): n is a, c, g, or u
cgaccccgagangggucgucc

SEQ ID NO: 71923 - RNA, 22 nt, Artificial Sequence
  Synthetic
  misc_feature (13)..(13): n is a, c, g, or u
gcgaccccgagangggucgucc

SEQ ID NO: 71924 - RNA, 23 nt, Artificial Sequence
  Synthetic
  misc_feature (14)..(14): n is a, c, g, or u
agcgaccccgagangggucgucc

SEQ ID NO: 71925 - RNA, 24 nt, Artificial Sequence
  Synthetic
  misc_feature (15)..(15): n is a, c, g, or u
aagcgaccccgagangggucgucc

SEQ ID NO: 71926 - RNA, 18 nt, Artificial Sequence
  Synthetic
gcgaagugcacacggucc

SEQ ID NO: 71927 - RNA, 19 nt, Artificial Sequence
  Synthetic
agcgaagugcacacggucc

SEQ ID NO: 71928 - RNA, 20 nt, Artificial Sequence
  Synthetic
aagcgaagugcacacggucc

SEQ ID NO: 71929 - RNA, 21 nt, Artificial Sequence
  Synthetic
gaagcgaagugcacacggucc

SEQ ID NO: 71930 - RNA, 22 nt, Artificial Sequence
  Synthetic
ugaagcgaagugcacacggucc

SEQ ID NO: 71931 - RNA, 23 nt, Artificial Sequence
  Synthetic
gugaagcgaagugcacacggucc

SEQ ID NO: 71932 - RNA, 24 nt, Artificial Sequence
  Synthetic
ggugaagcgaagugcacacggucc

SEQ ID NO: 71933 - RNA, 18 nt, Artificial Sequence
  Synthetic
uaacacgagcaggggucc

SEQ ID NO: 71934 - RNA, 19 nt, Artificial Sequence
  Synthetic
guaacacgagcaggggucc

SEQ ID NO: 71935 - RNA, 20 nt, Artificial Sequence
  Synthetic
uguaacacgagcaggggucc

SEQ ID NO: 71936 - RNA, 21 nt, Artificial Sequence
  Synthetic
cuguaacacgagcaggggucc

SEQ ID NO: 71937 - RNA, 22 nt, Artificial Sequence
  Synthetic
ccuguaacacgagcaggggucc

SEQ ID NO: 71938 - RNA, 23 nt, Artificial Sequence
  Synthetic
gccuguaacacgagcaggggucc

SEQ ID NO: 71939 - RNA, 24 nt, Artificial Sequence
  Synthetic
cgccuguaacacgagcaggggucc

SEQ ID NO: 71940 - RNA, 18 nt, Artificial Sequence
  Synthetic
auaagaugcccgccuucc

SEQ ID NO: 71941 - RNA, 19 nt, Artificial Sequence
  Synthetic
uauaagaugcccgccuucc

SEQ ID NO: 71942 - RNA, 20 nt, Artificial Sequence
  Synthetic
auauaagaugcccgccuucc

SEQ ID NO: 71943 - RNA, 21 nt, Artificial Sequence
  Synthetic
uauauaagaugcccgccuucc

SEQ ID NO: 71944 - RNA, 22 nt, Artificial Sequence
  Synthetic
uuauauaagaugcccgccuucc

SEQ ID NO: 71945 - RNA, 23 nt, Artificial Sequence
  Synthetic
uuuauauaagaugcccgccuucc

SEQ ID NO: 71946 - RNA, 24 nt, Artificial Sequence
  Synthetic
uuuuauauaagaugcccgccuucc

SEQ ID NO: 71947 - RNA, 18 nt, Artificial Sequence
  Synthetic
gggaaacauagagguucc

SEQ ID NO: 71948 - RNA, 19 nt, Artificial Sequence
  Synthetic
agggaaacauagagguucc

SEQ ID NO: 71949 - RNA, 20 nt, Artificial Sequence
  Synthetic
gagggaaacauagagguucc

SEQ ID NO: 71950 - RNA, 21 nt, Artificial Sequence
  Synthetic
ugagggaaacauagagguucc

SEQ ID NO: 71951 - RNA, 22 nt, Artificial Sequence
  Synthetic
augagggaaacauagagguucc

SEQ ID NO: 71952 - RNA, 23 nt, Artificial Sequence
  Synthetic
caugagggaaacauagagguucc

SEQ ID NO: 71953 - RNA, 24 nt, Artificial Sequence
  Synthetic
acaugagggaaacauagagguucc

SEQ ID NO: 71954 - RNA, 18 nt, Artificial Sequence
  Synthetic
ugauguagcucuuguucc

SEQ ID NO: 71955 - RNA, 19 nt, Artificial Sequence
  Synthetic
augauguagcucuuguucc

SEQ ID NO: 71956 - RNA, 20 nt, Artificial Sequence
  Synthetic
caugauguagcucuuguucc

SEQ ID NO: 71957 - RNA, 21 nt, Artificial Sequence
  Synthetic
ccaugauguagcucuuguucc

SEQ ID NO: 71958 - RNA, 22 nt, Artificial Sequence
  Synthetic
cccaugauguagcucuuguucc

SEQ ID NO: 71959 - RNA, 23 nt, Artificial Sequence
  Synthetic
ccccaugauguagcucuuguucc

SEQ ID NO: 71960 - RNA, 24 nt, Artificial Sequence
  Synthetic
gccccaugauguagcucuuguucc

SEQ ID NO: 71961 - RNA, 18 nt, Artificial Sequence
  Synthetic
  misc_feature (5)..(5): n is a, c, g, or u
gaaangauguauauuucc

SEQ ID NO: 71962 - RNA, 19 nt, Artificial Sequence
  Synthetic
  misc_feature (6)..(6): n is a, c, g, or u
ggaaangauguauauuucc

SEQ ID NO: 71963 - RNA, 20 nt, Artificial Sequence
  Synthetic
  misc_feature (7)..(7): n is a, c, g, or u
uggaaangauguauauuucc

SEQ ID NO: 71964 - RNA, 21 nt, Artificial Sequence
  Synthetic
  misc_feature (8)..(8): n is a, c, g, or u
auggaaangauguauauuucc

SEQ ID NO: 71965 - RNA, 22 nt, Artificial Sequence
  Synthetic
  misc_feature (9)..(9): n is a, c, g, or u
cauggaaangauguauauuucc

SEQ ID NO: 71966 - RNA, 23 nt, Artificial Sequence
  Synthetic
  misc_feature (10)..(10): n is a, c, g, or u
ccauggaaangauguauauuucc

SEQ ID NO: 71967 - RNA, 24 nt, Artificial Sequence
  Synthetic
  misc_feature (11)..(11): n is a, c, g, or u
gccauggaaangauguauauuucc

SEQ ID NO: 71968 - RNA, 18 nt, Artificial Sequence
  Synthetic
cucccauaggaauuuucc

SEQ ID NO: 71969 - RNA, 19 nt, Artificial Sequence
  Synthetic
acucccauaggaauuuucc

SEQ ID NO: 71970 - RNA, 20 nt, Artificial Sequence
  Synthetic
cacucccauaggaauuuucc

SEQ ID NO: 71971 - RNA, 21 nt, Artificial Sequence
  Synthetic
ccacucccauaggaauuuucc

SEQ ID NO: 71972 - RNA, 22 nt, Artificial Sequence
  Synthetic
cccacucccauaggaauuuucc

SEQ ID NO: 71973 - RNA, 23 nt, Artificial Sequence
  Synthetic
gcccacucccauaggaauuuucc

SEQ ID NO: 71974 - RNA, 24 nt, Artificial Sequence
  Synthetic
ggcccacucccauaggaauuuucc

SEQ ID NO: 71975 - RNA, 18 nt, Artificial Sequence
  Synthetic
uaaaaggggcagcaaagc

SEQ ID NO: 71976 - RNA, 19 nt, Artificial Sequence
  Synthetic
guaaaaggggcagcaaagc

SEQ ID NO: 71977 - RNA, 20 nt, Artificial Sequence
  Synthetic
uguaaaaggggcagcaaagc

SEQ ID NO: 71978 - RNA, 21 nt, Artificial Sequence
  Synthetic
guguaaaaggggcagcaaagc

SEQ ID NO: 71979 - RNA, 22 nt, Artificial Sequence
  Synthetic
uguguaaaaggggcagcaaagc

SEQ ID NO: 71980 - RNA, 23 nt, Artificial Sequence
  Synthetic
uuguguaaaaggggcagcaaagc

SEQ ID NO: 71981 - RNA, 24 nt, Artificial Sequence
  Synthetic
auuguguaaaaggggcagcaaagc

SEQ ID NO: 71982 - RNA, 18 nt, Artificial Sequence
  Synthetic
gauggccuauggccaagc

SEQ ID NO: 71983 - RNA, 19 nt, Artificial Sequence
  Synthetic
ugauggccuauggccaagc

SEQ ID NO: 71984 - RNA, 20 nt, Artificial Sequence
  Synthetic
cugauggccuauggccaagc

SEQ ID NO: 71985 - RNA, 21 nt, Artificial Sequence
  Synthetic
gcugauggccuauggccaagc

SEQ ID NO: 71986 - RNA, 22 nt, Artificial Sequence
  Synthetic
cgcugauggccuauggccaagc

SEQ ID NO: 71987 - RNA, 23 nt, Artificial Sequence
  Synthetic
gcgcugauggccuauggccaagc

SEQ ID NO: 71988 - RNA, 24 nt, Artificial Sequence
  Synthetic
ugcgcugauggccuauggccaagc

SEQ ID NO: 71989 - RNA, 18 nt, Artificial Sequence
  Synthetic
auacuaacauugggaagc

SEQ ID NO: 71990 - RNA, 19 nt, Artificial Sequence
  Synthetic
aauacuaacauugggaagc

SEQ ID NO: 71991 - RNA, 20 nt, Artificial Sequence
  Synthetic
gaauacuaacauugggaagc

SEQ ID NO: 71992 - RNA, 21 nt, Artificial Sequence
  Synthetic
ggaauacuaacauugggaagc

SEQ ID NO: 71993 - RNA, 22 nt, Artificial Sequence
  Synthetic
aggaauacuaacauugggaagc

SEQ ID NO: 71994 - RNA, 23 nt, Artificial Sequence
  Synthetic
aaggaauacuaacauugggaagc

SEQ ID NO: 71995 - RNA, 24 nt, Artificial Sequence
  Synthetic
caaggaauacuaacauugggaagc

SEQ ID NO: 71996 - RNA, 18 nt, Artificial Sequence
  Synthetic
auuugguggucuauaagc

SEQ ID NO: 71997 - RNA, 19 nt, Artificial Sequence
  Synthetic
cauuugguggucuauaagc

SEQ ID NO: 71998 - RNA, 20 nt, Artificial Sequence
  Synthetic
gcauuugguggucuauaagc

SEQ ID NO: 71999 - RNA, 21 nt, Artificial Sequence
  Synthetic
ggcauuugguggucuauaagc

SEQ ID NO: 72000 - RNA, 22 nt, Artificial Sequence
  Synthetic
gggcauuugguggucuauaagc

SEQ ID NO: 72001 - RNA, 23 nt, Artificial Sequence
  Synthetic
ggggcauuugguggucuauaagc

SEQ ID NO: 72002 - RNA, 24 nt, Artificial Sequence
  Synthetic
aggggcauuugguggucuauaagc

SEQ ID NO: 72003 - RNA, 18 nt, Artificial Sequence
  Synthetic
agccacccaaggcacagc

SEQ ID NO: 72004 - RNA, 19 nt, Artificial Sequence
  Synthetic
aagccacccaaggcacagc

SEQ ID NO: 72005 - RNA, 20 nt, Artificial Sequence
  Synthetic
aaagccacccaaggcacagc

SEQ ID NO: 72006 - RNA, 21 nt, Artificial Sequence
  Synthetic
  misc_feature (1)..(1): n is a, c, g, or u
naaagccacccaaggcacagc

SEQ ID NO: 72007 - RNA, 22 nt, Artificial Sequence
  Synthetic
  misc_feature (2)..(2): n is a, c, g, or u
cnaaagccacccaaggcacagc

SEQ ID NO: 72008 - RNA, 23 nt, Artificial Sequence
  Synthetic
  misc_feature (3)..(3): n is a, c, g, or u
ccnaaagccacccaaggcacagc

SEQ ID NO: 72009 - RNA, 24 nt, Artificial Sequence
  Synthetic
  misc_feature (1)..(1): n is a, c, g, or u
  misc_feature (4)..(4): n is a, c, g, or u
nccnaaagccacccaaggcacagc

SEQ ID NO: 72010 - RNA, 18 nt, Artificial Sequence
  Synthetic
ggaacuggagccaccagc

SEQ ID NO: 72011 - RNA, 19 nt, Artificial Sequence
  Synthetic
cggaacuggagccaccagc

SEQ ID NO: 72012 - RNA, 20 nt, Artificial Sequence
  Synthetic
ccggaacuggagccaccagc

SEQ ID NO: 72013 - RNA, 21 nt, Artificial Sequence
  Synthetic
uccggaacuggagccaccagc

SEQ ID NO: 72014 - RNA, 22 nt, Artificial Sequence
  Synthetic
uuccggaacuggagccaccagc

SEQ ID NO: 72015 - RNA, 23 nt, Artificial Sequence
  Synthetic
guuccggaacuggagccaccagc

SEQ ID NO: 72016 - RNA, 24 nt, Artificial Sequence
  Synthetic
uguuccggaacuggagccaccagc

SEQ ID NO: 72017 - RNA, 18 nt, Artificial Sequence
  Synthetic
  misc_feature (7)..(8): n is a, c, g, or u
ucauuannuccccccagc

SEQ ID NO: 72018 - RNA, 19 nt, Artificial Sequence
  Synthetic
  misc_feature (8)..(9): n is a, c, g, or u
gucauuannuccccccagc

SEQ ID NO: 72019 - RNA, 20 nt, Artificial Sequence
  Synthetic
  misc_feature (9)..(10): n is a, c, g, or u
agucauuannuccccccagc

SEQ ID NO: 72020 - RNA, 21 nt, Artificial Sequence
  Synthetic
  misc_feature (10)..(11): n is a, c, g, or u
gagucauuannuccccccagc

SEQ ID NO: 72021 - RNA, 22 nt, Artificial Sequence
  Synthetic
  misc_feature (11)..(12): n is a, c, g, or u
agagucauuannuccccccagc

SEQ ID NO: 72022 - RNA, 23 nt, Artificial Sequence
  Synthetic
  misc_feature (12)..(13): n is a, c, g, or u
uagagucauuannuccccccagc

SEQ ID NO: 72023 - RNA, 24 nt, Artificial Sequence
  Synthetic
  misc_feature (13)..(14): n is a, c, g, or u
cuagagucauuannuccccccagc

SEQ ID NO: 72024 - RNA, 18 nt, Artificial Sequence
  Synthetic
gccgcagacacauccagc

SEQ ID NO: 72025 - RNA, 19 nt, Artificial Sequence
  Synthetic
cgccgcagacacauccagc

SEQ ID NO: 72026 - RNA, 20 nt, Artificial Sequence
  Synthetic
acgccgcagacacauccagc

SEQ ID NO: 72027 - RNA, 21 nt, Artificial Sequence
  Synthetic
aacgccgcagacacauccagc

SEQ ID NO: 72028 - RNA, 22 nt, Artificial Sequence
  Synthetic
aaacgccgcagacacauccagc

SEQ ID NO: 72029 - RNA, 23 nt, Artificial Sequence
  Synthetic
aaaacgccgcagacacauccagc

SEQ ID NO: 72030 - RNA, 24 nt, Artificial Sequence
  Synthetic
uaaaacgccgcagacacauccagc

SEQ ID NO: 72031 - RNA, 18 nt, Artificial Sequence
  Synthetic
gcagcacagccuagcagc

SEQ ID NO: 72032 - RNA, 19 nt, Artificial Sequence
  Synthetic
ggcagcacagccuagcagc

SEQ ID NO: 72033 - RNA, 20 nt, Artificial Sequence
  Synthetic
uggcagcacagccuagcagc

SEQ ID NO: 72034 - RNA, 21 nt, Artificial Sequence
  Synthetic
uuggcagcacagccuagcagc

SEQ ID NO: 72035 - RNA, 22 nt, Artificial Sequence
  Synthetic
guuggcagcacagccuagcagc

SEQ ID NO: 72036 - RNA, 23 nt, Artificial Sequence
  Synthetic
aguuggcagcacagccuagcagc

SEQ ID NO: 72037 - RNA, 24 nt, Artificial Sequence
  Synthetic
caguuggcagcacagccuagcagc

SEQ ID NO: 72038 - RNA, 18 nt, Artificial Sequence
  Synthetic
ucguccgcaggauucagc

SEQ ID NO: 72039 - RNA, 19 nt, Artificial Sequence
  Synthetic
gucguccgcaggauucagc

SEQ ID NO: 72040 - RNA, 20 nt, Artificial Sequence
  Synthetic
ggucguccgcaggauucagc

SEQ ID NO: 72041 - RNA, 21 nt, Artificial Sequence
  Synthetic
gggucguccgcaggauucagc

SEQ ID NO: 72042 - RNA, 22 nt, Artificial Sequence
  Synthetic
  misc_feature (1)..(1): n is a, c, g, or u
ngggucguccgcaggauucagc

SEQ ID NO: 72043 - RNA, 23 nt, Artificial Sequence
  Synthetic
  misc_feature (2)..(2): n is a, c, g, or u
angggucguccgcaggauucagc

SEQ ID NO: 72044 - RNA, 24 nt, Artificial Sequence
  Synthetic
  misc_feature (3)..(3): n is a, c, g, or u
gangggucguccgcaggauucagc

SEQ ID NO: 72045 - RNA, 18 nt, Artificial Sequence
  Synthetic
ggcaucccgauacagagc

SEQ ID NO: 72046 - RNA, 19 nt, Artificial Sequence
  Synthetic
aggcaucccgauacagagc

SEQ ID NO: 72047 - RNA, 20 nt, Artificial Sequence
  Synthetic
aaggcaucccgauacagagc

SEQ ID NO: 72048 - RNA, 21 nt, Artificial Sequence
  Synthetic
uaaggcaucccgauacagagc

SEQ ID NO: 72049 - RNA, 22 nt, Artificial Sequence
  Synthetic
cuaaggcaucccgauacagagc

SEQ ID NO: 72050 - RNA, 23 nt, Artificial Sequence
  Synthetic
ucuaaggcaucccgauacagagc

SEQ ID NO: 72051 - RNA, 24 nt, Artificial Sequence
  Synthetic
uucuaaggcaucccgauacagagc

SEQ ID NO: 72052 - RNA, 18 nt, Artificial Sequence
  Synthetic
auggaucggcagaggagc

SEQ ID NO: 72053 - RNA, 19 nt, Artificial Sequence
  Synthetic
uauggaucggcagaggagc

SEQ ID NO: 72054 - RNA, 20 nt, Artificial Sequence
  Synthetic
guauggaucggcagaggagc

SEQ ID NO: 72055 - RNA, 21 nt, Artificial Sequence
  Synthetic
aguauggaucggcagaggagc

SEQ ID NO: 72056 - RNA, 22 nt, Artificial Sequence
  Synthetic
caguauggaucggcagaggagc

SEQ ID NO: 72057 - RNA, 23 nt, Artificial Sequence
  Synthetic
gcaguauggaucggcagaggagc

SEQ ID NO: 72058 - RNA, 24 nt, Artificial Sequence
  Synthetic
cgcaguauggaucggcagaggagc

SEQ ID NO: 72059 - RNA, 18 nt, Artificial Sequence
  Synthetic
ggcacuaguaaacugagc

SEQ ID NO: 72060 - RNA, 19 nt, Artificial Sequence
  Synthetic
uggcacuaguaaacugagc

SEQ ID NO: 72061 - RNA, 20 nt, Artificial Sequence
  Synthetic
auggcacuaguaaacugagc

SEQ ID NO: 72062 - RNA, 21 nt, Artificial Sequence
  Synthetic
aauggcacuaguaaacugagc

SEQ ID NO: 72063 - RNA, 22 nt, Artificial Sequence
  Synthetic
aaauggcacuaguaaacugagc

SEQ ID NO: 72064 - RNA, 23 nt, Artificial Sequence
  Synthetic
caaauggcacuaguaaacugagc

SEQ ID NO: 72065 - RNA, 24 nt, Artificial Sequence
  Synthetic
acaaauggcacuaguaaacugagc

SEQ ID NO: 72066 - RNA, 18 nt, Artificial Sequence
  Synthetic
uuuuagcaugccuugagc

SEQ ID NO: 72067 - RNA, 19 nt, Artificial Sequence
  Synthetic
uuuuuagcaugccuugagc

SEQ ID NO: 72068 - RNA, 20 nt, Artificial Sequence
  Synthetic
guuuuuagcaugccuugagc

SEQ ID NO: 72069 - RNA, 21 nt, Artificial Sequence
  Synthetic
uguuuuuagcaugccuugagc

SEQ ID NO: 72070 - RNA, 22 nt, Artificial Sequence
  Synthetic
auguuuuuagcaugccuugagc

SEQ ID NO: 72071 - RNA, 23 nt, Artificial Sequence
  Synthetic
aauguuuuuagcaugccuugagc

SEQ ID NO: 72072 - RNA, 24 nt, Artificial Sequence
  Synthetic
caauguuuuuagcaugccuugagc

SEQ ID NO: 72073 - RNA, 18 nt, Artificial Sequence
  Synthetic
aagaagaugaggcauagc

SEQ ID NO: 72074 - RNA, 19 nt, Artificial Sequence
  Synthetic
caagaagaugaggcauagc

SEQ ID NO: 72075 - RNA, 20 nt, Artificial Sequence
  Synthetic
acaagaagaugaggcauagc

SEQ ID NO: 72076 - RNA, 21 nt, Artificial Sequence
  Synthetic
aacaagaagaugaggcauagc

SEQ ID NO: 72077 - RNA, 22 nt, Artificial Sequence
  Synthetic
caacaagaagaugaggcauagc

SEQ ID NO: 72078 - RNA, 23 nt, Artificial Sequence
  Synthetic
ccaacaagaagaugaggcauagc

SEQ ID NO: 72079 - RNA, 24 nt, Artificial Sequence
  Synthetic
accaacaagaagaugaggcauagc

SEQ ID NO: 72080 - RNA, 18 nt, Artificial Sequence
  Synthetic
gacacauccagcgauagc

SEQ ID NO: 72081 - RNA, 19 nt, Artificial Sequence
  Synthetic
agacacauccagcgauagc

SEQ ID NO: 72082 - RNA, 20 nt, Artificial Sequence
  Synthetic
cagacacauccagcgauagc

SEQ ID NO: 72083 - RNA, 21 nt, Artificial Sequence
  Synthetic
gcagacacauccagcgauagc

SEQ ID NO: 72084 - RNA, 22 nt, Artificial Sequence
  Synthetic
cgcagacacauccagcgauagc

SEQ ID NO: 72085 - RNA, 23 nt, Artificial Sequence
  Synthetic
ccgcagacacauccagcgauagc

SEQ ID NO: 72086 - RNA, 24 nt, Artificial Sequence
  Synthetic
gccgcagacacauccagcgauagc

SEQ ID NO: 72087 - RNA, 18 nt, Artificial Sequence
  Synthetic
gaguaacuccacaguagc

SEQ ID NO: 72088 - RNA, 19 nt, Artificial Sequence
  Synthetic
agaguaacuccacaguagc

SEQ ID NO: 72089 - RNA, 20 nt, Artificial Sequence
  Synthetic
gagaguaacuccacaguagc

SEQ ID NO: 72090 - RNA, 21 nt, Artificial Sequence
  Synthetic
cgagaguaacuccacaguagc

SEQ ID NO: 72091 - RNA, 22 nt, Artificial Sequence
  Synthetic
acgagaguaacuccacaguagc

SEQ ID NO: 72092 - RNA, 23 nt, Artificial Sequence
  Synthetic
aacgagaguaacuccacaguagc

SEQ ID NO: 72093 - RNA, 24 nt, Artificial Sequence
  Synthetic
aaacgagaguaacuccacaguagc

SEQ ID NO: 72094 - RNA, 18 nt, Artificial Sequence
  Synthetic
aggaagaugauaaaacgc

SEQ ID NO: 72095 - RNA, 19 nt, Artificial Sequence
  Synthetic
gaggaagaugauaaaacgc

SEQ ID NO: 72096 - RNA, 20 nt, Artificial Sequence
  Synthetic
agaggaagaugauaaaacgc

SEQ ID NO: 72097 - RNA, 21 nt, Artificial Sequence
  Synthetic
aagaggaagaugauaaaacgc

SEQ ID NO: 72098 - RNA, 22 nt, Artificial Sequence
  Synthetic
gaagaggaagaugauaaaacgc

SEQ ID NO: 72099 - RNA, 23 nt, Artificial Sequence
  Synthetic
ugaagaggaagaugauaaaacgc

SEQ ID NO: 72100 - RNA, 24 nt, Artificial Sequence
  Synthetic
augaagaggaagaugauaaaacgc

SEQ ID NO: 72101 - RNA, 18 nt, Artificial Sequence
  Synthetic
cacagacggggagaccgc

SEQ ID NO: 72102 - RNA, 19 nt, Artificial Sequence
  Synthetic
gcacagacggggagaccgc

SEQ ID NO: 72103 - RNA, 20 nt, Artificial Sequence
  Synthetic
ggcacagacggggagaccgc

SEQ ID NO: 72104 - RNA, 21 nt, Artificial Sequence
  Synthetic
aggcacagacggggagaccgc

SEQ ID NO: 72105 - RNA, 22 nt, Artificial Sequence
  Synthetic
aaggcacagacggggagaccgc

SEQ ID NO: 72106 - RNA, 23 nt, Artificial Sequence
  Synthetic
gaaggcacagacggggagaccgc

SEQ ID NO: 72107 - RNA, 24 nt, Artificial Sequence
  Synthetic
agaaggcacagacggggagaccgc

SEQ ID NO: 72108 - RNA, 18 nt, Artificial Sequence
  Synthetic
ggaaagaagucagaaggc

SEQ ID NO: 72109 - RNA, 19 nt, Artificial Sequence
  Synthetic
aggaaagaagucagaaggc

SEQ ID NO: 72110 - RNA, 20 nt, Artificial Sequence
  Synthetic
aaggaaagaagucagaaggc

SEQ ID NO: 72111 - RNA, 21 nt, Artificial Sequence
  Synthetic
gaaggaaagaagucagaaggc

SEQ ID NO: 72112 - RNA, 22 nt, Artificial Sequence
  Synthetic
ugaaggaaagaagucagaaggc

SEQ ID NO: 72113 - RNA, 23 nt, Artificial Sequence
  Synthetic
cugaaggaaagaagucagaaggc

SEQ ID NO: 72114 - RNA, 24 nt, Artificial Sequence
  Synthetic
acugaaggaaagaagucagaaggc

SEQ ID NO: 72115 - RNA, 18 nt, Artificial Sequence
  Synthetic
uccggcagaugagaaggc

SEQ ID NO: 72116 - RNA, 19 nt, Artificial Sequence
  Synthetic
guccggcagaugagaaggc

SEQ ID NO: 72117 - RNA, 20 nt, Artificial Sequence
  Synthetic
gguccggcagaugagaaggc

SEQ ID NO: 72118 - RNA, 21 nt, Artificial Sequence
  Synthetic
cgguccggcagaugagaaggc

SEQ ID NO: 72119 - RNA, 22 nt, Artificial Sequence
  Synthetic
acgguccggcagaugagaaggc

SEQ ID NO: 72120 - RNA, 23 nt, Artificial Sequence
  Synthetic
cacgguccggcagaugagaaggc

SEQ ID NO: 72121 - RNA, 24 nt, Artificial Sequence
  Synthetic
acacgguccggcagaugagaaggc

SEQ ID NO: 72122 - RNA, 18 nt, Artificial Sequence
  Synthetic
auacacgcauacagaggc

SEQ ID NO: 72123 - RNA, 19 nt, Artificial Sequence
  Synthetic
aauacacgcauacagaggc

SEQ ID NO: 72124 - RNA, 20 nt, Artificial Sequence
  Synthetic
gaauacacgcauacagaggc

SEQ ID NO: 72125 - RNA, 21 nt, Artificial Sequence
  Synthetic
ugaauacacgcauacagaggc

SEQ ID NO: 72126 - RNA, 22 nt, Artificial Sequence
  Synthetic
uugaauacacgcauacagaggc

SEQ ID NO: 72127 - RNA, 23 nt, Artificial Sequence
  Synthetic
auugaauacacgcauacagaggc

SEQ ID NO: 72128 - RNA, 24 nt, Artificial Sequence
  Synthetic
gauugaauacacgcauacagaggc

SEQ ID NO: 72129 - RNA, 18 nt, Artificial Sequence
  Synthetic
gaucuucgucugcgaggc

SEQ ID NO: 72130 - RNA, 19 nt, Artificial Sequence
  Synthetic
agaucuucgucugcgaggc

SEQ ID NO: 72131 - RNA, 20 nt, Artificial Sequence
  Synthetic
gagaucuucgucugcgaggc

SEQ ID NO: 72132 - RNA, 18 nt, Artificial Sequence
  Synthetic
cugccgauugguggaggc

SEQ ID NO: 72133 - RNA, 19 nt, Artificial Sequence
  Synthetic
acugccgauugguggaggc

SEQ ID NO: 72134 - RNA, 20 nt, Artificial Sequence
  Synthetic
gacugccgauugguggaggc

SEQ ID NO: 72135 - RNA, 21 nt, Artificial Sequence
  Synthetic
ugacugccgauugguggaggc

SEQ ID NO: 72136 - RNA, 22 nt, Artificial Sequence
  Synthetic
cugacugccgauugguggaggc

SEQ ID NO: 72137 - RNA, 23 nt, Artificial Sequence
  Synthetic
ccugacugccgauugguggaggc

SEQ ID NO: 72138 - RNA, 24 nt, Artificial Sequence
  Synthetic
uccugacugccgauugguggaggc

SEQ ID NO: 72139 - RNA, 18 nt, Artificial Sequence
  Synthetic
aaggcacagcuuggaggc

SEQ ID NO: 72140 - RNA, 19 nt, Artificial Sequence
  Synthetic
caaggcacagcuuggaggc

SEQ ID NO: 72141 - RNA, 20 nt, Artificial Sequence
  Synthetic
ccaaggcacagcuuggaggc

SEQ ID NO: 72142 - RNA, 21 nt, Artificial Sequence
  Synthetic
cccaaggcacagcuuggaggc

SEQ ID NO: 72143 - RNA, 22 nt, Artificial Sequence
  Synthetic
acccaaggcacagcuuggaggc

SEQ ID NO: 72144 - RNA, 23 nt, Artificial Sequence
  Synthetic
cacccaaggcacagcuuggaggc

SEQ ID NO: 72145 - RNA, 24 nt, Artificial Sequence
  Synthetic
ccacccaaggcacagcuuggaggc

SEQ ID NO: 72146 - RNA, 18 nt, Artificial Sequence
  Synthetic
gcgagcaaaacaagcggc

SEQ ID NO: 72147 - RNA, 19 nt, Artificial Sequence
  Synthetic
ugcgagcaaaacaagcggc

SEQ ID NO: 72148 - RNA, 20 nt, Artificial Sequence
  Synthetic
cugcgagcaaaacaagcggc

SEQ ID NO: 72149 - RNA, 21 nt, Artificial Sequence
  Synthetic
gcugcgagcaaaacaagcggc

SEQ ID NO: 72150 - RNA, 22 nt, Artificial Sequence
  Synthetic
ugcugcgagcaaaacaagcggc

SEQ ID NO: 72151 - RNA, 23 nt, Artificial Sequence
  Synthetic
cugcugcgagcaaaacaagcggc

SEQ ID NO: 72152 - RNA, 24 nt, Artificial Sequence
  Synthetic
ccugcugcgagcaaaacaagcggc

SEQ ID NO: 72153 - RNA, 18 nt, Artificial Sequence
  Synthetic
uccgcaguauggaucggc

SEQ ID NO: 72154 - RNA, 19 nt, Artificial Sequence
  Synthetic
uuccgcaguauggaucggc

SEQ ID NO: 72155 - RNA, 20 nt, Artificial Sequence
  Synthetic
guuccgcaguauggaucggc

SEQ ID NO: 72156 - RNA, 21 nt, Artificial Sequence
  Synthetic
aguuccgcaguauggaucggc

SEQ ID NO: 72157 - RNA, 22 nt, Artificial Sequence
  Synthetic
gaguuccgcaguauggaucggc

SEQ ID NO: 72158 - RNA, 23 nt, Artificial Sequence
  Synthetic
ggaguuccgcaguauggaucggc

SEQ ID NO: 72159 - RNA, 24 nt, Artificial Sequence
  Synthetic
aggaguuccgcaguauggaucggc

SEQ ID NO: 72160 - RNA, 18 nt, Artificial Sequence
  Synthetic
gugcgccccguggucggc

SEQ ID NO: 72161 - RNA, 19 nt, Artificial Sequence
  Synthetic
ggugcgccccguggucggc

SEQ ID NO: 72162 - RNA, 20 nt, Artificial Sequence
  Synthetic
aggugcgccccguggucggc

SEQ ID NO: 72163 - RNA, 21 nt, Artificial Sequence
  Synthetic
gaggugcgccccguggucggc

SEQ ID NO: 72164 - RNA, 22 nt, Artificial Sequence
  Synthetic
agaggugcgccccguggucggc

SEQ ID NO: 72165 - RNA, 23 nt, Artificial Sequence
  Synthetic
gagaggugcgccccguggucggc

SEQ ID NO: 72166 - RNA, 24 nt, Artificial Sequence
  Synthetic
agagaggugcgccccguggucggc

SEQ ID NO: 72167 - RNA, 18 nt, Artificial Sequence
  Synthetic
gagccaggagaaacgggc

SEQ ID NO: 72168 - RNA, 19 nt, Artificial Sequence
  Synthetic
ugagccaggagaaacgggc

SEQ ID NO: 72169 - RNA, 20 nt, Artificial Sequence
  Synthetic
cugagccaggagaaacgggc

SEQ ID NO: 72170 - RNA, 21 nt, Artificial Sequence
  Synthetic
acugagccaggagaaacgggc

SEQ ID NO: 72171 - RNA, 22 nt, Artificial Sequence
  Synthetic
aacugagccaggagaaacgggc

SEQ ID NO: 72172 - RNA, 23 nt, Artificial Sequence
  Synthetic
aaacugagccaggagaaacgggc

SEQ ID NO: 72173 - RNA, 24 nt, Artificial Sequence
  Synthetic
uaaacugagccaggagaaacgggc

SEQ ID NO: 72174 - RNA, 18 nt, Artificial Sequence
  Synthetic
  misc_feature (4)..(4): n is a, c, g, or u
accnggccguugccgggc

SEQ ID NO: 72175 - RNA, 19 nt, Artificial Sequence
  Synthetic
  misc_feature (5)..(5): n is a, c, g, or u
gaccnggccguugccgggc

SEQ ID NO: 72176 - RNA, 20 nt, Artificial Sequence
  Synthetic
  misc_feature (6)..(6): n is a, c, g, or u
agaccnggccguugccgggc

SEQ ID NO: 72177 - RNA, 21 nt, Artificial Sequence
  Synthetic
  misc_feature (7)..(7): n is a, c, g, or u
cagaccnggccguugccgggc

SEQ ID NO: 72178 - RNA, 22 nt, Artificial Sequence
  Synthetic
  misc_feature (8)..(8): n is a, c, g, or u
acagaccnggccguugccgggc

SEQ ID NO: 72179 - RNA, 23 nt, Artificial Sequence
  Synthetic
  misc_feature (9)..(9): n is a, c, g, or u
cacagaccnggccguugccgggc

SEQ ID NO: 72180 - RNA, 24 nt, Artificial Sequence
  Synthetic
  misc_feature (10)..(10): n is a, c, g, or u
gcacagaccnggccguugccgggc

SEQ ID NO: 72181 - RNA, 18 nt, Artificial Sequence
  Synthetic
acauuguguaaaaggggc

SEQ ID NO: 72182 - RNA, 19 nt, Artificial Sequence
  Synthetic
cacauuguguaaaaggggc

SEQ ID NO: 72183 - RNA, 20 nt, Artificial Sequence
  Synthetic
ccacauuguguaaaaggggc

SEQ ID NO: 72184 - RNA, 21 nt, Artificial Sequence
  Synthetic
  misc_feature (1)..(1): n is a, c, g, or u
nccacauuguguaaaaggggc

SEQ ID NO: 72185 - RNA, 22 nt, Artificial Sequence
  Synthetic
  misc_feature (2)..(2): n is a, c, g, or u
anccacauuguguaaaaggggc

SEQ ID NO: 72186 - RNA, 23 nt, Artificial Sequence
  Synthetic
  misc_feature (3)..(3): n is a, c, g, or u
uanccacauuguguaaaaggggc

SEQ ID NO: 72187 - RNA, 24 nt, Artificial Sequence
  Synthetic
  misc_feature (4)..(4): n is a, c, g, or u
auanccacauuguguaaaaggggc

SEQ ID NO: 72188 - RNA, 18 nt, Artificial Sequence
  Synthetic
caucagcaaacacuuggc

SEQ ID NO: 72189 - RNA, 19 nt, Artificial Sequence
  Synthetic
gcaucagcaaacacuuggc

SEQ ID NO: 72190 - RNA, 20 nt, Artificial Sequence
  Synthetic
ugcaucagcaaacacuuggc

SEQ ID NO: 72191 - RNA, 21 nt, Artificial Sequence
  Synthetic
uugcaucagcaaacacuuggc

SEQ ID NO: 72192 - RNA, 22 nt, Artificial Sequence
  Synthetic
guugcaucagcaaacacuuggc

SEQ ID NO: 72193 - RNA, 23 nt, Artificial Sequence
  Synthetic
gguugcaucagcaaacacuuggc

SEQ ID NO: 72194 - RNA, 24 nt, Artificial Sequence
  Synthetic
ggguugcaucagcaaacacuuggc

SEQ ID NO: 72195 - RNA, 18 nt, Artificial Sequence
  Synthetic
aaggccuuguaaguuggc

SEQ ID NO: 72196 - RNA, 19 nt, Artificial Sequence
  Synthetic
aaaggccuuguaaguuggc

SEQ ID NO: 72197 - RNA, 20 nt, Artificial Sequence
  Synthetic
gaaaggccuuguaaguuggc

SEQ ID NO: 72198 - RNA, 21 nt, Artificial Sequence
  Synthetic
agaaaggccuuguaaguuggc

SEQ ID NO: 72199 - RNA, 22 nt, Artificial Sequence
  Synthetic
cagaaaggccuuguaaguuggc

SEQ ID NO: 72200 - RNA, 23 nt, Artificial Sequence
  Synthetic
acagaaaggccuuguaaguuggc

SEQ ID NO: 72201 - RNA, 24 nt, Artificial Sequence
  Synthetic
cacagaaaggccuuguaaguuggc

SEQ ID NO: 72202 - RNA, 18 nt, Artificial Sequence
  Synthetic
gggacugcgaauuuuggc

SEQ ID NO: 72203 - RNA, 19 nt, Artificial Sequence
  Synthetic
ggggacugcgaauuuuggc

SEQ ID NO: 72204 - RNA, 20 nt, Artificial Sequence
  Synthetic
uggggacugcgaauuuuggc

SEQ ID NO: 72205 - RNA, 21 nt, Artificial Sequence
  Synthetic
uuggggacugcgaauuuuggc

SEQ ID NO: 72206 - RNA, 22 nt, Artificial Sequence
  Synthetic
  misc_feature (1)..(1): n is a, c, g, or u
nuuggggacugcgaauuuuggc

SEQ ID NO: 72207 - RNA, 23 nt, Artificial Sequence
  Synthetic
  misc_feature (2)..(2): n is a, c, g, or u
gnuuggggacugcgaauuuuggc

SEQ ID NO: 72208 - RNA, 24 nt, Artificial Sequence
  Synthetic
  misc_feature (3)..(3): n is a, c, g, or u
agnuuggggacugcgaauuuuggc

SEQ ID NO: 72209 - RNA, 18 nt, Artificial Sequence
  Synthetic
  misc_feature (1)..(1): n is a, c, g, or u
  misc_feature (16)..(16): n is a, c, g, or u
ngucccgauaaguuungc

SEQ ID NO: 72210 - RNA, 19 nt, Artificial Sequence
  Synthetic
  misc_feature (2)..(2): n is a, c, g, or u
  misc_feature (17)..(17): n is a, c, g, or u
cngucccgauaaguuungc

SEQ ID NO: 72211 - RNA, 20 nt, Artificial Sequence
  Synthetic
  misc_feature (3)..(3): n is a, c, g, or u
  misc_feature (18)..(18): n is a, c, g, or u
ucngucccgauaaguuungc

SEQ ID NO: 72212 - RNA, 21 nt, Artificial Sequence
  Synthetic
  misc_feature (4)..(4): n is a, c, g, or u
  misc_feature (19)..(19): n is a, c, g, or u
aucngucccgauaaguuungc

SEQ ID NO: 72213 - RNA, 22 nt, Artificial Sequence
  Synthetic
  misc_feature (5)..(5): n is a, c, g, or u
  misc_feature (20)..(20): n is a, c, g, or u
uaucngucccgauaaguuungc

SEQ ID NO: 72214 - RNA, 23 nt, Artificial Sequence
  Synthetic
  misc_feature (6)..(6): n is a, c, g, or u
  misc_feature (21)..(21): n is a, c, g, or u
uuaucngucccgauaaguuungc

SEQ ID NO: 72215 - RNA, 24 nt, Artificial Sequence
  Synthetic
  misc_feature (7)..(7): n is a, c, g, or u
  misc_feature (22)..(22): n is a, c, g, or u
auuaucngucccgauaaguuungc

SEQ ID NO: 72216 - RNA, 18 nt, Artificial Sequence
  Synthetic
  misc_feature (6)..(6): n is a, c, g, or u
uggugnggugaacaaugc

SEQ ID NO: 72217 - RNA, 19 nt, Artificial Sequence
  Synthetic
  misc_feature (1)..(1): n is a, c, g, or u
  misc_feature (7)..(7): n is a, c, g, or u
nuggugnggugaacaaugc

SEQ ID NO: 72218 - RNA, 20 nt, Artificial Sequence
  Synthetic
  misc_feature (2)..(2): n is a, c, g, or u
  misc_feature (8)..(8): n is a, c, g, or u
unuggugnggugaacaaugc

SEQ ID NO: 72219 - RNA, 21 nt, Artificial Sequence
  Synthetic
  misc_feature (3)..(3): n is a, c, g, or u
  misc_feature (9)..(9): n is a, c, g, or u
gunuggugnggugaacaaugc

SEQ ID NO: 72220 - RNA, 22 nt, Artificial Sequence
  Synthetic
  misc_feature (4)..(4): n is a, c, g, or u
  misc_feature (10)..(10): n is a, c, g, or u
agunuggugnggugaacaaugc

SEQ ID NO: 72221 - RNA, 23 nt, Artificial Sequence
  Synthetic
  misc_feature (5)..(5): n is a, c, g, or u
  misc_feature (11)..(11): n is a, c, g, or u
cagunuggugnggugaacaaugc

SEQ ID NO: 72222 - RNA, 24 nt, Artificial Sequence
  Synthetic
  misc_feature (6)..(6): n is a, c, g, or u
  misc_feature (12)..(12): n is a, c, g, or u
gcagunuggugnggugaacaaugc

SEQ ID NO: 72223 - RNA, 18 nt, Artificial Sequence
  Synthetic
gcaauguuuuuagcaugc

SEQ ID NO: 72224 - RNA, 19 nt, Artificial Sequence
  Synthetic
ggcaauguuuuuagcaugc

SEQ ID NO: 72225 - RNA, 20 nt, Artificial Sequence
  Synthetic
uggcaauguuuuuagcaugc

SEQ ID NO: 72226 - RNA, 21 nt, Artificial Sequence
  Synthetic
cuggcaauguuuuuagcaugc

SEQ ID NO: 72227 - RNA, 22 nt, Artificial Sequence
  Synthetic
gcuggcaauguuuuuagcaugc

SEQ ID NO: 72228 - RNA, 23 nt, Artificial Sequence
  Synthetic
ugcuggcaauguuuuuagcaugc

SEQ ID NO: 72229 - RNA, 24 nt, Artificial Sequence
  Synthetic
cugcuggcaauguuuuuagcaugc

SEQ ID NO: 72230 - RNA, 18 nt, Artificial Sequence
  Synthetic
acagucuuugaaguaugc

SEQ ID NO: 72231 - RNA, 19 nt, Artificial Sequence
  Synthetic
aacagucuuugaaguaugc

SEQ ID NO: 72232 - RNA, 20 nt, Artificial Sequence
  Synthetic
aaacagucuuugaaguaugc

SEQ ID NO: 72233 - RNA, 21 nt, Artificial Sequence
  Synthetic
caaacagucuuugaaguaugc

SEQ ID NO: 72234 - RNA, 22 nt, Artificial Sequence
  Synthetic
acaaacagucuuugaaguaugc

SEQ ID NO: 72235 - RNA, 23 nt, Artificial Sequence
  Synthetic
aacaaacagucuuugaaguaugc

SEQ ID NO: 72236 - RNA, 24 nt, Artificial Sequence
  Synthetic
aaacaaacagucuuugaaguaugc

SEQ ID NO: 72237 - RNA, 18 nt, Artificial Sequence
  Synthetic
  misc_feature (5)..(5): n is a, c, g, or u
guuungcuccagaccugc

SEQ ID NO: 72238 - RNA, 19 nt, Artificial Sequence
  Synthetic
  misc_feature (6)..(6): n is a, c, g, or u
aguuungcuccagaccugc

SEQ ID NO: 72239 - RNA, 20 nt, Artificial Sequence
  Synthetic
  misc_feature (7)..(7): n is a, c, g, or u
aaguuungcuccagaccugc

SEQ ID NO: 72240 - RNA, 21 nt, Artificial Sequence
  Synthetic
  misc_feature (8)..(8): n is a, c, g, or u
uaaguuungcuccagaccugc

SEQ ID NO: 72241 - RNA, 22 nt, Artificial Sequence
  Synthetic
  misc_feature (9)..(9): n is a, c, g, or u
auaaguuungcuccagaccugc

SEQ ID NO: 72242 - RNA, 23 nt, Artificial Sequence
  Synthetic
  misc_feature (10)..(10): n is a, c, g, or u
gauaaguuungcuccagaccugc

SEQ ID NO: 72243 - RNA, 24 nt, Artificial Sequence
  Synthetic
  misc_feature (11)..(11): n is a, c, g, or u
cgauaaguuungcuccagaccugc

SEQ ID NO: 72244 - RNA, 18 nt, Artificial Sequence
  Synthetic
guugcauggugcuggugc

SEQ ID NO: 72245 - RNA, 19 nt, Artificial Sequence
  Synthetic
aguugcauggugcuggugc

SEQ ID NO: 72246 - RNA, 20 nt, Artificial Sequence
  Synthetic
aaguugcauggugcuggugc

SEQ ID NO: 72247 - RNA, 21 nt, Artificial Sequence
  Synthetic
aaaguugcauggugcuggugc

SEQ ID NO: 72248 - RNA, 22 nt, Artificial Sequence
  Synthetic
aaaaguugcauggugcuggugc

SEQ ID NO: 72249 - RNA, 23 nt, Artificial Sequence
  Synthetic
aaaaaguugcauggugcuggugc

SEQ ID NO: 72250 - RNA, 24 nt, Artificial Sequence
  Synthetic
gaaaaaguugcauggugcuggugc

SEQ ID NO: 72251 - RNA, 18 nt, Artificial Sequence
  Synthetic
ugaaaccacaauaauugc

SEQ ID NO: 72252 - RNA, 19 nt, Artificial Sequence
  Synthetic
gugaaaccacaauaauugc

SEQ ID NO: 72253 - RNA, 20 nt, Artificial Sequence
  Synthetic
ugugaaaccacaauaauugc

SEQ ID NO: 72254 - RNA, 21 nt, Artificial Sequence
  Synthetic
augugaaaccacaauaauugc

SEQ ID NO: 72255 - RNA, 22 nt, Artificial Sequence
  Synthetic
aaugugaaaccacaauaauugc

SEQ ID NO: 72256 - RNA, 23 nt, Artificial Sequence
  Synthetic
aaaugugaaaccacaauaauugc

SEQ ID NO: 72257 - RNA, 24 nt, Artificial Sequence
  Synthetic
gaaaugugaaaccacaauaauugc

SEQ ID NO: 72258 - RNA, 18 nt, Artificial Sequence
  Synthetic
gucggucguugacauugc

SEQ ID NO: 72259 - RNA, 19 nt, Artificial Sequence
  Synthetic
ggucggucguugacauugc

SEQ ID NO: 72260 - RNA, 20 nt, Artificial Sequence
  Synthetic
aggucggucguugacauugc

SEQ ID NO: 72261 - RNA, 18 nt, Artificial Sequence
  Synthetic
ccagccaguggggguugc

SEQ ID NO: 72262 - RNA, 19 nt, Artificial Sequence
  Synthetic
cccagccaguggggguugc

SEQ ID NO: 72263 - RNA, 20 nt, Artificial Sequence
  Synthetic
ccccagccaguggggguugc

SEQ ID NO: 72264 - RNA, 21 nt, Artificial Sequence
  Synthetic
gccccagccaguggggguugc

SEQ ID NO: 72265 - RNA, 22 nt, Artificial Sequence
  Synthetic
agccccagccaguggggguugc

SEQ ID NO: 72266 - RNA, 23 nt, Artificial Sequence
  Synthetic
aagccccagccaguggggguugc

SEQ ID NO: 72267 - RNA, 24 nt, Artificial Sequence
  Synthetic
caagccccagccaguggggguugc

SEQ ID NO: 72268 - RNA, 18 nt, Artificial Sequence
  Synthetic
uggauuucugguguuugc

SEQ ID NO: 72269 - RNA, 19 nt, Artificial Sequence
  Synthetic
cuggauuucugguguuugc

SEQ ID NO: 72270 - RNA, 20 nt, Artificial Sequence
  Synthetic
ucuggauuucugguguuugc

SEQ ID NO: 72271 - RNA, 21 nt, Artificial Sequence
  Synthetic
aucuggauuucugguguuugc

SEQ ID NO: 72272 - RNA, 22 nt, Artificial Sequence
  Synthetic
aaucuggauuucugguguuugc

SEQ ID NO: 72273 - RNA, 23 nt, Artificial Sequence
  Synthetic
caaucuggauuucugguguuugc

SEQ ID NO: 72274 - RNA, 24 nt, Artificial Sequence
  Synthetic
ccaaucuggauuucugguguuugc

SEQ ID NO: 72275 - RNA, 18 nt, Artificial Sequence
  Synthetic
  misc_feature (13)..(13): n is a, c, g, or u
  misc_feature (17)..(17): n is a, c, g, or u
agaaggggacganaganc

SEQ ID NO: 72276 - RNA, 19 nt, Artificial Sequence
  Synthetic
  misc_feature (14)..(14): n is a, c, g, or u
  misc_feature (18)..(18): n is a, c, g, or u
gagaaggggacganaganc

SEQ ID NO: 72277 - RNA, 20 nt, Artificial Sequence
  Synthetic
  misc_feature (15)..(15): n is a, c, g, or u
  misc_feature (19)..(19): n is a, c, g, or u
ggagaaggggacganaganc

SEQ ID NO: 72278 - RNA, 21 nt, Artificial Sequence
  Synthetic
  misc_feature (16)..(16): n is a, c, g, or u
  misc_feature (20)..(20): n is a, c, g, or u
cggagaaggggacganaganc

SEQ ID NO: 72279 - RNA, 22 nt, Artificial Sequence
  Synthetic
  misc_feature (17)..(17): n is a, c, g, or u
  misc_feature (21)..(21): n is a, c, g, or u
acggagaaggggacganaganc

SEQ ID NO: 72280 - RNA, 23 nt, Artificial Sequence
  Synthetic
  misc_feature (18)..(18): n is a, c, g, or u
  misc_feature (22)..(22): n is a, c, g, or u
gacggagaaggggacganaganc

SEQ ID NO: 72281 - RNA, 24 nt, Artificial Sequence
  Synthetic
  misc_feature (19)..(19): n is a, c, g, or u
  misc_feature (23)..(23): n is a, c, g, or u
agacggagaaggggacganaganc

SEQ ID NO: 72282 - RNA, 18 nt, Artificial Sequence
  Synthetic
  misc_feature (5)..(5): n is a, c, g, or u
  misc_feature (17)..(17): n is a, c, g, or u
guucnugugguaauganc

SEQ ID NO: 72283 - RNA, 19 nt, Artificial Sequence
  Synthetic
  misc_feature (6)..(6): n is a, c, g, or u
  misc_feature (18)..(18): n is a, c, g, or u
uguucnugugguaauganc

SEQ ID NO: 72284 - RNA, 20 nt, Artificial Sequence
  Synthetic
  misc_feature (7)..(7): n is a, c, g, or u
  misc_feature (19)..(19): n is a, c, g, or u
guguucnugugguaauganc

SEQ ID NO: 72285 - RNA, 21 nt, Artificial Sequence
  Synthetic
  misc_feature (8)..(8): n is a, c, g, or u
  misc_feature (20)..(20): n is a, c, g, or u
uguguucnugugguaauganc

SEQ ID NO: 72286 - RNA, 22 nt, Artificial Sequence
  Synthetic
  misc_feature (9)..(9): n is a, c, g, or u
  misc_feature (21)..(21): n is a, c, g, or u
auguguucnugugguaauganc

SEQ ID NO: 72287 - RNA, 23 nt, Artificial Sequence
  Synthetic
  misc_feature (10)..(10): n is a, c, g, or u
  misc_feature (22)..(22): n is a, c, g, or u
gauguguucnugugguaauganc

SEQ ID NO: 72288 - RNA, 24 nt, Artificial Sequence
  Synthetic
  misc_feature (11)..(11): n is a, c, g, or u
  misc_feature (23)..(23): n is a, c, g, or u
ugauguguucnugugguaauganc

SEQ ID NO: 72289 - RNA, 18 nt, Artificial Sequence
  Synthetic
  misc_feature (17)..(17): n is a, c, g, or u
agggucaauguccaugnc

SEQ ID NO: 72290 - RNA, 19 nt, Artificial Sequence
  Synthetic
  misc_feature (18)..(18): n is a, c, g, or u
aagggucaauguccaugnc

SEQ ID NO: 72291 - RNA, 20 nt, Artificial Sequence
  Synthetic
  misc_feature (19)..(19): n is a, c, g, or u
uaagggucaauguccaugnc

SEQ ID NO: 72292 - RNA, 21 nt, Artificial Sequence
  Synthetic
  misc_feature (20)..(20): n is a, c, g, or u
auaagggucaauguccaugnc

SEQ ID NO: 72293 - RNA, 22 nt, Artificial Sequence
  Synthetic
  misc_feature (21)..(21): n is a, c, g, or u
uauaagggucaauguccaugnc

SEQ ID NO: 72294 - RNA, 23 nt, Artificial Sequence
  Synthetic
  misc_feature (22)..(22): n is a, c, g, or u
uuauaagggucaauguccaugnc

SEQ ID NO: 72295 - RNA, 24 nt, Artificial Sequence
  Synthetic
  misc_feature (23)..(23): n is a, c, g, or u
uuuauaagggucaauguccaugnc

SEQ ID NO: 72296 - RNA, 18 nt, Artificial Sequence
  Synthetic
gguggucgggaaaaaauc

SEQ ID NO: 72297 - RNA, 19 nt, Artificial Sequence
  Synthetic
ugguggucgggaaaaaauc

SEQ ID NO: 72298 - RNA, 20 nt, Artificial Sequence
  Synthetic
cugguggucgggaaaaaauc

SEQ ID NO: 72299 - RNA, 21 nt, Artificial Sequence
  Synthetic
acugguggucgggaaaaaauc

SEQ ID NO: 72300 - RNA, 22 nt, Artificial Sequence
  Synthetic
aacugguggucgggaaaaaauc

SEQ ID NO: 72301 - RNA, 23 nt, Artificial Sequence
  Synthetic
caacugguggucgggaaaaaauc

SEQ ID NO: 72302 - RNA, 24 nt, Artificial Sequence
  Synthetic
ccaacugguggucgggaaaaaauc

SEQ ID NO: 72303 - RNA, 18 nt, Artificial Sequence
  Synthetic
ggugcaggguccccaauc

SEQ ID NO: 72304 - RNA, 19 nt, Artificial Sequence
  Synthetic
cggugcaggguccccaauc

SEQ ID NO: 72305 - RNA, 20 nt, Artificial Sequence
  Synthetic
ucggugcaggguccccaauc

SEQ ID NO: 72306 - RNA, 18 nt, Artificial Sequence
  Synthetic
uugacauacuuuccaauc

SEQ ID NO: 72307 - RNA, 19 nt, Artificial Sequence
  Synthetic
  misc_feature (1)..(1): n is a, c, g, or u
nuugacauacuuuccaauc

SEQ ID NO: 72308 - RNA, 20 nt, Artificial Sequence
  Synthetic
  misc_feature (2)..(2): n is a, c, g, or u
cnuugacauacuuuccaauc

SEQ ID NO: 72309 - RNA, 21 nt, Artificial Sequence
  Synthetic
  misc_feature (3)..(3): n is a, c, g, or u
ucnuugacauacuuuccaauc

SEQ ID NO: 72310 - RNA, 22 nt, Artificial Sequence
  Synthetic
  misc_feature (4)..(4): n is a, c, g, or u
uucnuugacauacuuuccaauc

SEQ ID NO: 72311 - RNA, 23 nt, Artificial Sequence
  Synthetic
  misc_feature (5)..(5): n is a, c, g, or u
auucnuugacauacuuuccaauc

SEQ ID NO: 72312 - RNA, 24 nt, Artificial Sequence
  Synthetic
  misc_feature (6)..(6): n is a, c, g, or u
aauucnuugacauacuuuccaauc

SEQ ID NO: 72313 - RNA, 18 nt, Artificial Sequence
  Synthetic
gccaguggggguugcauc

SEQ ID NO: 72314 - RNA, 19 nt, Artificial Sequence
  Synthetic
agccaguggggguugcauc

SEQ ID NO: 72315 - RNA, 20 nt, Artificial Sequence
  Synthetic
cagccaguggggguugcauc

SEQ ID NO: 72316 - RNA, 21 nt, Artificial Sequence
  Synthetic
ccagccaguggggguugcauc

SEQ ID NO: 72317 - RNA, 22 nt, Artificial Sequence
  Synthetic
cccagccaguggggguugcauc

SEQ ID NO: 72318 - RNA, 23 nt, Artificial Sequence
  Synthetic
ccccagccaguggggguugcauc

SEQ ID NO: 72319 - RNA, 24 nt, Artificial Sequence
  Synthetic
gccccagccaguggggguugcauc

SEQ ID NO: 72320 - RNA, 18 nt, Artificial Sequence
  Synthetic
aguuccgcaguauggauc

SEQ ID NO: 72321 - RNA, 19 nt, Artificial Sequence
  Synthetic
gaguuccgcaguauggauc

SEQ ID NO: 72322 - RNA, 20 nt, Artificial Sequence
  Synthetic
ggaguuccgcaguauggauc

SEQ ID NO: 72323 - RNA, 21 nt, Artificial Sequence
  Synthetic
aggaguuccgcaguauggauc

SEQ ID NO: 72324 - RNA, 22 nt, Artificial Sequence
  Synthetic
uaggaguuccgcaguauggauc

SEQ ID NO: 72325 - RNA, 23 nt, Artificial Sequence
  Synthetic
cuaggaguuccgcaguauggauc

SEQ ID NO: 72326 - RNA, 24 nt, Artificial Sequence
  Synthetic
gcuaggaguuccgcaguauggauc

SEQ ID NO: 72327 - RNA, 18 nt, Artificial Sequence
  Synthetic
uacuggugguugaugauc

SEQ ID NO: 72328 - RNA, 19 nt, Artificial Sequence
  Synthetic
guacuggugguugaugauc

SEQ ID NO: 72329 - RNA, 20 nt, Artificial Sequence
  Synthetic
cguacuggugguugaugauc

SEQ ID NO: 72330 - RNA, 18 nt, Artificial Sequence
  Synthetic
cuggugcaaaugaauauc

SEQ ID NO: 72331 - RNA, 19 nt, Artificial Sequence
  Synthetic
ccuggugcaaaugaauauc

SEQ ID NO: 72332 - RNA, 20 nt, Artificial Sequence
  Synthetic
uccuggugcaaaugaauauc

SEQ ID NO: 72333 - RNA, 21 nt, Artificial Sequence
  Synthetic
guccuggugcaaaugaauauc

SEQ ID NO: 72334 - RNA, 22 nt, Artificial Sequence
  Synthetic
uguccuggugcaaaugaauauc

SEQ ID NO: 72335 - RNA, 23 nt, Artificial Sequence
  Synthetic
auguccuggugcaaaugaauauc

SEQ ID NO: 72336 - RNA, 24 nt, Artificial Sequence
  Synthetic
aauguccuggugcaaaugaauauc

SEQ ID NO: 72337 - RNA, 18 nt, Artificial Sequence
  Synthetic
cagagcugaggcgguauc

SEQ ID NO: 72338 - RNA, 19 nt, Artificial Sequence
  Synthetic
acagagcugaggcgguauc

SEQ ID NO: 72339 - RNA, 20 nt, Artificial Sequence
  Synthetic
uacagagcugaggcgguauc

SEQ ID NO: 72340 - RNA, 18 nt, Artificial Sequence
  Synthetic
gagugcgaauccacacuc

SEQ ID NO: 72341 - RNA, 19 nt, Artificial Sequence
  Synthetic
ggagugcgaauccacacuc

SEQ ID NO: 72342 - RNA, 20 nt, Artificial Sequence
  Synthetic
aggagugcgaauccacacuc

SEQ ID NO: 72343 - RNA, 21 nt, Artificial Sequence
  Synthetic
gaggagugcgaauccacacuc

SEQ ID NO: 72344 - RNA, 22 nt, Artificial Sequence
  Synthetic
ggaggagugcgaauccacacuc

SEQ ID NO: 72345 - RNA, 23 nt, Artificial Sequence
  Synthetic
uggaggagugcgaauccacacuc

SEQ ID NO: 72346 - RNA, 24 nt, Artificial Sequence
  Synthetic
cuggaggagugcgaauccacacuc

SEQ ID NO: 72347 - RNA, 18 nt, Artificial Sequence
  Synthetic
aaaagacaccaaauacuc

SEQ ID NO: 72348 - RNA, 19 nt, Artificial Sequence
  Synthetic
caaaagacaccaaauacuc

SEQ ID NO: 72349 - RNA, 20 nt, Artificial Sequence
  Synthetic
ccaaaagacaccaaauacuc

SEQ ID NO: 72350 - RNA, 21 nt, Artificial Sequence
  Synthetic
uccaaaagacaccaaauacuc

SEQ ID NO: 72351 - RNA, 22 nt, Artificial Sequence
  Synthetic
cuccaaaagacaccaaauacuc

SEQ ID NO: 72352 - RNA, 23 nt, Artificial Sequence
  Synthetic
acuccaaaagacaccaaauacuc

SEQ ID NO: 72353 - RNA, 24 nt, Artificial Sequence
  Synthetic
cacuccaaaagacaccaaauacuc

SEQ ID NO: 72354 - RNA, 18 nt, Artificial Sequence
  Synthetic
agacaaaggacgucccuc

SEQ ID NO: 72355 - RNA, 19 nt, Artificial Sequence
  Synthetic
uagacaaaggacgucccuc

SEQ ID NO: 72356 - RNA, 20 nt, Artificial Sequence
  Synthetic
guagacaaaggacgucccuc

SEQ ID NO: 72357 - RNA, 21 nt, Artificial Sequence
  Synthetic
cguagacaaaggacgucccuc

SEQ ID NO: 72358 - RNA, 22 nt, Artificial Sequence
  Synthetic
acguagacaaaggacgucccuc

SEQ ID NO: 72359 - RNA, 23 nt, Artificial Sequence
  Synthetic
gacguagacaaaggacgucccuc

SEQ ID NO: 72360 - RNA, 24 nt, Artificial Sequence
  Synthetic
ggacguagacaaaggacgucccuc

SEQ ID NO: 72361 - RNA, 18 nt, Artificial Sequence
  Synthetic
gcaggguccccaauccuc

SEQ ID NO: 72362 - RNA, 19 nt, Artificial Sequence
  Synthetic
ugcaggguccccaauccuc

SEQ ID NO: 72363 - RNA, 20 nt, Artificial Sequence
  Synthetic
gugcaggguccccaauccuc

SEQ ID NO: 72364 - RNA, 21 nt, Artificial Sequence
  Synthetic
ggugcaggguccccaauccuc

SEQ ID NO: 72365 - RNA, 22 nt, Artificial Sequence
  Synthetic
cggugcaggguccccaauccuc

SEQ ID NO: 72366 - RNA, 23 nt, Artificial Sequence
  Synthetic
ucggugcaggguccccaauccuc

SEQ ID NO: 72367 - RNA, 24 nt, Artificial Sequence
  Synthetic
uucggugcaggguccccaauccuc

SEQ ID NO: 72368 - RNA, 18 nt, Artificial Sequence
  Synthetic
  misc_feature (4)..(4): n is a, c, g, or u
gugnggugaacaaugcuc

SEQ ID NO: 72369 - RNA, 19 nt, Artificial Sequence
  Synthetic
  misc_feature (5)..(5): n is a, c, g, or u
ggugnggugaacaaugcuc

SEQ ID NO: 72370 - RNA, 20 nt, Artificial Sequence
  Synthetic
  misc_feature (6)..(6): n is a, c, g, or u
uggugnggugaacaaugcuc

SEQ ID NO: 72371 - RNA, 21 nt, Artificial Sequence
  Synthetic
  misc_feature (1)..(1): n is a, c, g, or u
  misc_feature (7)..(7): n is a, c, g, or u
nuggugnggugaacaaugcuc

SEQ ID NO: 72372 - RNA, 22 nt, Artificial Sequence
  Synthetic
  misc_feature (2)..(2): n is a, c, g, or u
  misc_feature (8)..(8): n is a, c, g, or u
unuggugnggugaacaaugcuc

SEQ ID NO: 72373 - RNA, 23 nt, Artificial Sequence
  Synthetic
  misc_feature (3)..(3): n is a, c, g, or u
  misc_feature (9)..(9): n is a, c, g, or u
gunuggugnggugaacaaugcuc

SEQ ID NO: 72374 - RNA, 24 nt, Artificial Sequence
  Synthetic
  misc_feature (4)..(4): n is a, c, g, or u
  misc_feature (10)..(10): n is a, c, g, or u
agunuggugnggugaacaaugcuc

SEQ ID NO: 72375 - RNA, 18 nt, Artificial Sequence
  Synthetic
ccugaggaugagugucuc

SEQ ID NO: 72376 - RNA, 19 nt, Artificial Sequence
  Synthetic
gccugaggaugagugucuc

SEQ ID NO: 72377 - RNA, 20 nt, Artificial Sequence
  Synthetic
ggccugaggaugagugucuc

SEQ ID NO: 72378 - RNA, 21 nt, Artificial Sequence
  Synthetic
uggccugaggaugagugucuc

SEQ ID NO: 72379 - RNA, 22 nt, Artificial Sequence
  Synthetic
auggccugaggaugagugucuc

SEQ ID NO: 72380 - RNA, 23 nt, Artificial Sequence
  Synthetic
cauggccugaggaugagugucuc

SEQ ID NO: 72381 - RNA, 24 nt, Artificial Sequence
  Synthetic
gcauggccugaggaugagugucuc

SEQ ID NO: 72382 - RNA, 18 nt, Artificial Sequence
  Synthetic
  misc_feature (14)..(14): n is a, c, g, or u
ucuaacaacaguanucuc

SEQ ID NO: 72383 - RNA, 19 nt, Artificial Sequence
  Synthetic
  misc_feature (15)..(15): n is a, c, g, or u
gucuaacaacaguanucuc

SEQ ID NO: 72384 - RNA, 20 nt, Artificial Sequence
  Synthetic
  misc_feature (16)..(16): n is a, c, g, or u
cgucuaacaacaguanucuc

SEQ ID NO: 72385 - RNA, 21 nt, Artificial Sequence
  Synthetic
  misc_feature (17)..(17): n is a, c, g, or u
ucgucuaacaacaguanucuc

SEQ ID NO: 72386 - RNA, 22 nt, Artificial Sequence
  Synthetic
  misc_feature (18)..(18): n is a, c, g, or u
uucgucuaacaacaguanucuc

SEQ ID NO: 72387 - RNA, 23 nt, Artificial Sequence
  Synthetic
  misc_feature (19)..(19): n is a, c, g, or u
cuucgucuaacaacaguanucuc

SEQ ID NO: 72388 - RNA, 24 nt, Artificial Sequence
  Synthetic
  misc_feature (20)..(20): n is a, c, g, or u
ucuucgucuaacaacaguanucuc

SEQ ID NO: 72389 - RNA, 18 nt, Artificial Sequence
  Synthetic
agguuuuauaccuuucuc

SEQ ID NO: 72390 - RNA, 19 nt, Artificial Sequence
  Synthetic
aagguuuuauaccuuucuc

SEQ ID NO: 72391 - RNA, 20 nt, Artificial Sequence
  Synthetic
uaagguuuuauaccuuucuc

SEQ ID NO: 72392 - RNA, 21 nt, Artificial Sequence
  Synthetic
auaagguuuuauaccuuucuc

SEQ ID NO: 72393 - RNA, 22 nt, Artificial Sequence
  Synthetic
aauaagguuuuauaccuuucuc

SEQ ID NO: 72394 - RNA, 23 nt, Artificial Sequence
  Synthetic
uaauaagguuuuauaccuuucuc

SEQ ID NO: 72395 - RNA, 24 nt, Artificial Sequence
  Synthetic
auaauaagguuuuauaccuuucuc

SEQ ID NO: 72396 - RNA, 18 nt, Artificial Sequence
  Synthetic
uacugaaggaaagaaguc

SEQ ID NO: 72397 - RNA, 19 nt, Artificial Sequence
  Synthetic
uuacugaaggaaagaaguc

SEQ ID NO: 72398 - RNA, 20 nt, Artificial Sequence
  Synthetic
cuuacugaaggaaagaaguc

SEQ ID NO: 72399 - RNA, 21 nt, Artificial Sequence
  Synthetic
ucuuacugaaggaaagaaguc

SEQ ID NO: 72400 - RNA, 22 nt, Artificial Sequence
  Synthetic
cucuuacugaaggaaagaaguc

SEQ ID NO: 72401 - RNA, 23 nt, Artificial Sequence
  Synthetic
ucucuuacugaaggaaagaaguc

SEQ ID NO: 72402 - RNA, 24 nt, Artificial Sequence
  Synthetic
aucucuuacugaaggaaagaaguc

SEQ ID NO: 72403 - RNA, 18 nt, Artificial Sequence
  Synthetic
gucuuuaaacaaacaguc

SEQ ID NO: 72404 - RNA, 19 nt, Artificial Sequence
  Synthetic
agucuuuaaacaaacaguc

SEQ ID NO: 72405 - RNA, 20 nt, Artificial Sequence
  Synthetic
cagucuuuaaacaaacaguc

SEQ ID NO: 72406 - RNA, 21 nt, Artificial Sequence
  Synthetic
ccagucuuuaaacaaacaguc

SEQ ID NO: 72407 - RNA, 22 nt, Artificial Sequence
  Synthetic
cccagucuuuaaacaaacaguc

SEQ ID NO: 72408 - RNA, 23 nt, Artificial Sequence
  Synthetic
ucccagucuuuaaacaaacaguc

SEQ ID NO: 72409 - RNA, 24 nt, Artificial Sequence
  Synthetic
cucccagucuuuaaacaaacaguc

SEQ ID NO: 72410 - RNA, 18 nt, Artificial Sequence
  Synthetic
  misc_feature (5)..(5): n is a, c, g, or u
ccccnacuccucccaguc

SEQ ID NO: 72411 - RNA, 19 nt, Artificial Sequence
  Synthetic
  misc_feature (6)..(6): n is a, c, g, or u
cccccnacuccucccaguc

SEQ ID NO: 72412 - RNA, 20 nt, Artificial Sequence
  Synthetic
  misc_feature (7)..(7): n is a, c, g, or u
ucccccnacuccucccaguc

SEQ ID NO: 72413 - RNA, 21 nt, Artificial Sequence
  Synthetic
  misc_feature (8)..(8): n is a, c, g, or u
cucccccnacuccucccaguc

SEQ ID NO: 72414 - RNA, 22 nt, Artificial Sequence
  Synthetic
  misc_feature (9)..(9): n is a, c, g, or u
ccucccccnacuccucccaguc

SEQ ID NO: 72415 - RNA, 23 nt, Artificial Sequence
  Synthetic
  misc_feature (10)..(10): n is a, c, g, or u
uccucccccnacuccucccaguc

SEQ ID NO: 72416 - RNA, 24 nt, Artificial Sequence
  Synthetic
  misc_feature (11)..(11): n is a, c, g, or u
cuccucccccnacuccucccaguc

SEQ ID NO: 72417 - RNA, 18 nt, Artificial Sequence
  Synthetic
  misc_feature (11)..(11): n is a, c, g, or u
uugacauugcngagaguc

SEQ ID NO: 72418 - RNA, 19 nt, Artificial Sequence
  Synthetic
  misc_feature (12)..(12): n is a, c, g, or u
guugacauugcngagaguc

SEQ ID NO: 72419 - RNA, 20 nt, Artificial Sequence
  Synthetic
  misc_feature (13)..(13): n is a, c, g, or u
cguugacauugcngagaguc

SEQ ID NO: 72420 - RNA, 21 nt, Artificial Sequence
  Synthetic
  misc_feature (14)..(14): n is a, c, g, or u
ucguugacauugcngagaguc

SEQ ID NO: 72421 - RNA, 22 nt, Artificial Sequence
  Synthetic
  misc_feature (15)..(15): n is a, c, g, or u
gucguugacauugcngagaguc

SEQ ID NO: 72422 - RNA, 23 nt, Artificial Sequence
  Synthetic
  misc_feature (16)..(16): n is a, c, g, or u
ggucguugacauugcngagaguc

SEQ ID NO: 72423 - RNA, 24 nt, Artificial Sequence
  Synthetic
  misc_feature (17)..(17): n is a, c, g, or u
cggucguugacauugcngagaguc

SEQ ID NO: 72424 - RNA, 18 nt, Artificial Sequence
  Synthetic
uuucccaccuugugaguc

SEQ ID NO: 72425 - RNA, 19 nt, Artificial Sequence
  Synthetic
auuucccaccuugugaguc

SEQ ID NO: 72426 - RNA, 20 nt, Artificial Sequence
  Synthetic
aauuucccaccuugugaguc

SEQ ID NO: 72427 - RNA, 21 nt, Artificial Sequence
  Synthetic
aaauuucccaccuugugaguc

SEQ ID NO: 72428 - RNA, 22 nt, Artificial Sequence
  Synthetic
aaaauuucccaccuugugaguc

SEQ ID NO: 72429 - RNA, 23 nt, Artificial Sequence
  Synthetic
uaaaauuucccaccuugugaguc

SEQ ID NO: 72430 - RNA, 24 nt, Artificial Sequence
  Synthetic
guaaaauuucccaccuugugaguc

SEQ ID NO: 72431 - RNA, 18 nt, Artificial Sequence
  Synthetic
caacauaccuugauaguc

SEQ ID NO: 72432 - RNA, 19 nt, Artificial Sequence
  Synthetic
gcaacauaccuugauaguc

SEQ ID NO: 72433 - RNA, 20 nt, Artificial Sequence
  Synthetic
ggcaacauaccuugauaguc

SEQ ID NO: 72434 - RNA, 21 nt, Artificial Sequence
  Synthetic
gggcaacauaccuugauaguc

SEQ ID NO: 72435 - RNA, 22 nt, Artificial Sequence
  Synthetic
cgggcaacauaccuugauaguc

SEQ ID NO: 72436 - RNA, 23 nt, Artificial Sequence
  Synthetic
acgggcaacauaccuugauaguc

SEQ ID NO: 72437 - RNA, 24 nt, Artificial Sequence
  Synthetic
aacgggcaacauaccuugauaguc

SEQ ID NO: 72438 - RNA, 18 nt, Artificial Sequence
  Synthetic
cauucgagagggaccguc

SEQ ID NO: 72439 - RNA, 19 nt, Artificial Sequence
  Synthetic
ccauucgagagggaccguc

SEQ ID NO: 72440 - RNA, 20 nt, Artificial Sequence
  Synthetic
cccauucgagagggaccguc

SEQ ID NO: 72441 - RNA, 18 nt, Artificial Sequence
  Synthetic
acaagugcaauuuccguc

SEQ ID NO: 72442 - RNA, 19 nt, Artificial Sequence
  Synthetic
uacaagugcaauuuccguc

SEQ ID NO: 72443 - RNA, 20 nt, Artificial Sequence
  Synthetic
auacaagugcaauuuccguc

SEQ ID NO: 72444 - RNA, 21 nt, Artificial Sequence
  Synthetic
aauacaagugcaauuuccguc

SEQ ID NO: 72445 - RNA, 22 nt, Artificial Sequence
  Synthetic
gaauacaagugcaauuuccguc

SEQ ID NO: 72446 - RNA, 23 nt, Artificial Sequence
  Synthetic
ggaauacaagugcaauuuccguc

SEQ ID NO: 72447 - RNA, 24 nt, Artificial Sequence
  Synthetic
gggaauacaagugcaauuuccguc

SEQ ID NO: 72448 - RNA, 18 nt, Artificial Sequence
  Synthetic
  misc_feature (10)..(10): n is a, c, g, or u
accccgagangggucguc

SEQ ID NO: 72449 - RNA, 19 nt, Artificial Sequence
  Synthetic
  misc_feature (11)..(11): n is a, c, g, or u
gaccccgagangggucguc

SEQ ID NO: 72450 - RNA, 20 nt, Artificial Sequence
  Synthetic
  misc_feature (12)..(12): n is a, c, g, or u
cgaccccgagangggucguc

SEQ ID NO: 72451 - RNA, 18 nt, Artificial Sequence
  Synthetic
gcgauugagaucuucguc

SEQ ID NO: 72452 - RNA, 19 nt, Artificial Sequence
  Synthetic
ggcgauugagaucuucguc

SEQ ID NO: 72453 - RNA, 20 nt, Artificial Sequence
  Synthetic
cggcgauugagaucuucguc

SEQ ID NO: 72454 - RNA, 18 nt, Artificial Sequence
  Synthetic
auaacugacuacuagguc

SEQ ID NO: 72455 - RNA, 19 nt, Artificial Sequence
  Synthetic
cauaacugacuacuagguc

SEQ ID NO: 72456 - RNA, 20 nt, Artificial Sequence
  Synthetic
acauaacugacuacuagguc

SEQ ID NO: 72457 - RNA, 21 nt, Artificial Sequence
  Synthetic
gacauaacugacuacuagguc

SEQ ID NO: 72458 - RNA, 22 nt, Artificial Sequence
  Synthetic
ugacauaacugacuacuagguc

SEQ ID NO: 72459 - RNA, 23 nt, Artificial Sequence
  Synthetic
uugacauaacugacuacuagguc

SEQ ID NO: 72460 - RNA, 24 nt, Artificial Sequence
  Synthetic
auugacauaacugacuacuagguc

SEQ ID NO: 72461 - RNA, 18 nt, Artificial Sequence
  Synthetic
uaugccucaaggucgguc

SEQ ID NO: 72462 - RNA, 19 nt, Artificial Sequence
  Synthetic
guaugccucaaggucgguc

SEQ ID NO: 72463 - RNA, 20 nt, Artificial Sequence
  Synthetic
aguaugccucaaggucgguc

SEQ ID NO: 72464 - RNA, 21 nt, Artificial Sequence
  Synthetic
aaguaugccucaaggucgguc

SEQ ID NO: 72465 - RNA, 22 nt, Artificial Sequence
  Synthetic
gaaguaugccucaaggucgguc

SEQ ID NO: 72466 - RNA, 23 nt, Artificial Sequence
  Synthetic
ugaaguaugccucaaggucgguc

SEQ ID NO: 72467 - RNA, 24 nt, Artificial Sequence
  Synthetic
uugaaguaugccucaaggucgguc

SEQ ID NO: 72468 - RNA, 18 nt, Artificial Sequence
  Synthetic
guaacacgagcagggguc

SEQ ID NO: 72469 - RNA, 19 nt, Artificial Sequence
  Synthetic
uguaacacgagcagggguc

SEQ ID NO: 72470 - RNA, 20 nt, Artificial Sequence
  Synthetic
cuguaacacgagcagggguc

SEQ ID NO: 72471 - RNA, 21 nt, Artificial Sequence
  Synthetic
ccuguaacacgagcagggguc

SEQ ID NO: 72472 - RNA, 22 nt, Artificial Sequence
  Synthetic
gccuguaacacgagcagggguc

SEQ ID NO: 72473 - RNA, 23 nt, Artificial Sequence
  Synthetic
cgccuguaacacgagcagggguc

SEQ ID NO: 72474 - RNA, 24 nt, Artificial Sequence
  Synthetic
ccgccuguaacacgagcagggguc

SEQ ID NO: 72475 - RNA, 18 nt, Artificial Sequence
  Synthetic
uggauccaacuggugguc

SEQ ID NO: 72476 - RNA, 19 nt, Artificial Sequence
  Synthetic
cuggauccaacuggugguc

SEQ ID NO: 72477 - RNA, 20 nt, Artificial Sequence
  Synthetic
gcuggauccaacuggugguc

SEQ ID NO: 72478 - RNA, 21 nt, Artificial Sequence
  Synthetic
ugcuggauccaacuggugguc

SEQ ID NO: 72479 - RNA, 22 nt, Artificial Sequence
  Synthetic
augcuggauccaacuggugguc

SEQ ID NO: 72480 - RNA, 23 nt, Artificial Sequence
  Synthetic
aaugcuggauccaacuggugguc

SEQ ID NO: 72481 - RNA, 24 nt, Artificial Sequence
  Synthetic
gaaugcuggauccaacuggugguc

SEQ ID NO: 72482 - RNA, 18 nt, Artificial Sequence
  Synthetic
uaggggcauuuggugguc

SEQ ID NO: 72483 - RNA, 19 nt, Artificial Sequence
  Synthetic
auaggggcauuuggugguc

SEQ ID NO: 72484 - RNA, 20 nt, Artificial Sequence
  Synthetic
gauaggggcauuuggugguc

SEQ ID NO: 72485 - RNA, 21 nt, Artificial Sequence
  Synthetic
agauaggggcauuuggugguc

SEQ ID NO: 72486 - RNA, 22 nt, Artificial Sequence
  Synthetic
aagauaggggcauuuggugguc

SEQ ID NO: 72487 - RNA, 23 nt, Artificial Sequence
  Synthetic
uaagauaggggcauuuggugguc

SEQ ID NO: 72488 - RNA, 24 nt, Artificial Sequence
  Synthetic
auaagauaggggcauuuggugguc

SEQ ID NO: 72489 - RNA, 18 nt, Artificial Sequence
  Synthetic
auugugaggauuuuuguc

SEQ ID NO: 72490 - RNA, 19 nt, Artificial Sequence
  Synthetic
uauugugaggauuuuuguc

SEQ ID NO: 72491 - RNA, 20 nt, Artificial Sequence
  Synthetic
guauugugaggauuuuuguc

SEQ ID NO: 72492 - RNA, 21 nt, Artificial Sequence
  Synthetic
gguauugugaggauuuuuguc

SEQ ID NO: 72493 - RNA, 22 nt, Artificial Sequence
  Synthetic
cgguauugugaggauuuuuguc

SEQ ID NO: 72494 - RNA, 23 nt, Artificial Sequence
  Synthetic
gcgguauugugaggauuuuuguc

SEQ ID NO: 72495 - RNA, 24 nt, Artificial Sequence
  Synthetic
ugcgguauugugaggauuuuuguc

SEQ ID NO: 72496 - RNA, 18 nt, Artificial Sequence
  Synthetic
  misc_feature (16)..(16): n is a, c, g, or u
cgucuaacaacaguanuc

SEQ ID NO: 72497 - RNA, 19 nt, Artificial Sequence
  Synthetic
  misc_feature (17)..(17): n is a, c, g, or u
ucgucuaacaacaguanuc

SEQ ID NO: 72498 - RNA, 20 nt, Artificial Sequence
  Synthetic
  misc_feature (18)..(18): n is a, c, g, or u
uucgucuaacaacaguanuc

SEQ ID NO: 72499 - RNA, 21 nt, Artificial Sequence
  Synthetic
  misc_feature (19)..(19): n is a, c, g, or u
cuucgucuaacaacaguanuc

SEQ ID NO: 72500 - RNA, 22 nt, Artificial Sequence
  Synthetic
  misc_feature (20)..(20): n is a, c, g, or u
ucuucgucuaacaacaguanuc

SEQ ID NO: 72501 - RNA, 23 nt, Artificial Sequence
  Synthetic
  misc_feature (21)..(21): n is a, c, g, or u
cucuucgucuaacaacaguanuc

SEQ ID NO: 72502 - RNA, 24 nt, Artificial Sequence
  Synthetic
  misc_feature (22)..(22): n is a, c, g, or u
ccucuucgucuaacaacaguanuc

SEQ ID NO: 72503 - RNA, 18 nt, Artificial Sequence
  Synthetic
ccaaaagacccacaauuc

SEQ ID NO: 72504 - RNA, 19 nt, Artificial Sequence
  Synthetic
cccaaaagacccacaauuc

SEQ ID NO: 72505 - RNA, 20 nt, Artificial Sequence
  Synthetic
gcccaaaagacccacaauuc

SEQ ID NO: 72506 - RNA, 21 nt, Artificial Sequence
  Synthetic
agcccaaaagacccacaauuc

SEQ ID NO: 72507 - RNA, 22 nt, Artificial Sequence
  Synthetic
aagcccaaaagacccacaauuc

SEQ ID NO: 72508 - RNA, 23 nt, Artificial Sequence
  Synthetic
aaagcccaaaagacccacaauuc

SEQ ID NO: 72509 - RNA, 24 nt, Artificial Sequence
  Synthetic
caaagcccaaaagacccacaauuc

SEQ ID NO: 72510 - RNA, 18 nt, Artificial Sequence
  Synthetic
augauucuucccccauuc

SEQ ID NO: 72511 - RNA, 19 nt, Artificial Sequence
  Synthetic
aaugauucuucccccauuc

SEQ ID NO: 72512 - RNA, 20 nt, Artificial Sequence
  Synthetic
gaaugauucuucccccauuc

SEQ ID NO: 72513 - RNA, 18 nt, Artificial Sequence
  Synthetic
acaaugcucaggagauuc

SEQ ID NO: 72514 - RNA, 19 nt, Artificial Sequence
  Synthetic
aacaaugcucaggagauuc

SEQ ID NO: 72515 - RNA, 20 nt, Artificial Sequence
  Synthetic
gaacaaugcucaggagauuc

SEQ ID NO: 72516 - RNA, 21 nt, Artificial Sequence
  Synthetic
ugaacaaugcucaggagauuc

SEQ ID NO: 72517 - RNA, 22 nt, Artificial Sequence
  Synthetic
gugaacaaugcucaggagauuc

SEQ ID NO: 72518 - RNA, 23 nt, Artificial Sequence
  Synthetic
ggugaacaaugcucaggagauuc

SEQ ID NO: 72519 - RNA, 24 nt, Artificial Sequence
  Synthetic
  misc_feature (1)..(1): n is a, c, g, or u
nggugaacaaugcucaggagauuc

SEQ ID NO: 72520 - RNA, 18 nt, Artificial Sequence
  Synthetic
uauaagaugcccgccuuc

SEQ ID NO: 72521 - RNA, 19 nt, Artificial Sequence
  Synthetic
auauaagaugcccgccuuc

SEQ ID NO: 72522 - RNA, 20 nt, Artificial Sequence
  Synthetic
uauauaagaugcccgccuuc

SEQ ID NO: 72523 - RNA, 21 nt, Artificial Sequence
  Synthetic
uuauauaagaugcccgccuuc

SEQ ID NO: 72524 - RNA, 22 nt, Artificial Sequence
  Synthetic
uuuauauaagaugcccgccuuc

SEQ ID NO: 72525 - RNA, 23 nt, Artificial Sequence
  Synthetic
uuuuauauaagaugcccgccuuc

SEQ ID NO: 72526 - RNA, 24 nt, Artificial Sequence
  Synthetic
cuuuuauauaagaugcccgccuuc

SEQ ID NO: 72527 - RNA, 18 nt, Artificial Sequence
  Synthetic
cuggagauugagaucuuc

SEQ ID NO: 72528 - RNA, 19 nt, Artificial Sequence
  Synthetic
gcuggagauugagaucuuc

SEQ ID NO: 72529 - RNA, 20 nt, Artificial Sequence
  Synthetic
agcuggagauugagaucuuc

SEQ ID NO: 72530 - RNA, 21 nt, Artificial Sequence
  Synthetic
aagcuggagauugagaucuuc

SEQ ID NO: 72531 - RNA, 22 nt, Artificial Sequence
  Synthetic
gaagcuggagauugagaucuuc

SEQ ID NO: 72532 - RNA, 23 nt, Artificial Sequence
  Synthetic
ggaagcuggagauugagaucuuc

SEQ ID NO: 72533 - RNA, 24 nt, Artificial Sequence
  Synthetic
gggaagcuggagauugagaucuuc

SEQ ID NO: 72534 - RNA, 18 nt, Artificial Sequence
  Synthetic
  misc_feature (4)..(4): n is a, c, g, or u
cuangacgguuucucuuc

SEQ ID NO: 72535 - RNA, 19 nt, Artificial Sequence
  Synthetic
  misc_feature (5)..(5): n is a, c, g, or u
ucuangacgguuucucuuc

SEQ ID NO: 72536 - RNA, 20 nt, Artificial Sequence
  Synthetic
  misc_feature (6)..(6): n is a, c, g, or u
cucuangacgguuucucuuc

SEQ ID NO: 72537 - RNA, 21 nt, Artificial Sequence
  Synthetic
  misc_feature (7)..(7): n is a, c, g, or u
acucuangacgguuucucuuc

SEQ ID NO: 72538 - RNA, 22 nt, Artificial Sequence
  Synthetic
  misc_feature (8)..(8): n is a, c, g, or u
uacucuangacgguuucucuuc

SEQ ID NO: 72539 - RNA, 23 nt, Artificial Sequence
  Synthetic
  misc_feature (9)..(9): n is a, c, g, or u
auacucuangacgguuucucuuc

SEQ ID NO: 72540 - RNA, 24 nt, Artificial Sequence
  Synthetic
  misc_feature (10)..(10): n is a, c, g, or u
aauacucuangacgguuucucuuc

SEQ ID NO: 72541 - RNA, 18 nt, Artificial Sequence
  Synthetic
gcgagggaguucuucuuc

SEQ ID NO: 72542 - RNA, 19 nt, Artificial Sequence
  Synthetic
ggcgagggaguucuucuuc

SEQ ID NO: 72543 - RNA, 20 nt, Artificial Sequence
  Synthetic
aggcgagggaguucuucuuc

SEQ ID NO: 72544 - RNA, 21 nt, Artificial Sequence
  Synthetic
gaggcgagggaguucuucuuc

SEQ ID NO: 72545 - RNA, 22 nt, Artificial Sequence
  Synthetic
cgaggcgagggaguucuucuuc

SEQ ID NO: 72546 - RNA, 23 nt, Artificial Sequence
  Synthetic
gcgaggcgagggaguucuucuuc

SEQ ID NO: 72547 - RNA, 24 nt, Artificial Sequence
  Synthetic
ugcgaggcgagggaguucuucuuc

SEQ ID NO: 72548 - RNA, 18 nt, Artificial Sequence
  Synthetic
caagagucgugcagguuc

SEQ ID NO: 72549 - RNA, 19 nt, Artificial Sequence
  Synthetic
gcaagagucgugcagguuc

SEQ ID NO: 72550 - RNA, 20 nt, Artificial Sequence
  Synthetic
agcaagagucgugcagguuc

SEQ ID NO: 72551 - RNA, 21 nt, Artificial Sequence
  Synthetic
gagcaagagucgugcagguuc

SEQ ID NO: 72552 - RNA, 22 nt, Artificial Sequence
  Synthetic
ugagcaagagucgugcagguuc

SEQ ID NO: 72553 - RNA, 23 nt, Artificial Sequence
  Synthetic
uugagcaagagucgugcagguuc

SEQ ID NO: 72554 - RNA, 24 nt, Artificial Sequence
  Synthetic
cuugagcaagagucgugcagguuc

SEQ ID NO: 72555 - RNA, 18 nt, Artificial Sequence
  Synthetic
agggaaacauagagguuc

SEQ ID NO: 72556 - RNA, 19 nt, Artificial Sequence
  Synthetic
gagggaaacauagagguuc

SEQ ID NO: 72557 - RNA, 20 nt, Artificial Sequence
  Synthetic
ugagggaaacauagagguuc

SEQ ID NO: 72558 - RNA, 21 nt, Artificial Sequence
  Synthetic
augagggaaacauagagguuc

SEQ ID NO: 72559 - RNA, 22 nt, Artificial Sequence
  Synthetic
caugagggaaacauagagguuc

SEQ ID NO: 72560 - RNA, 23 nt, Artificial Sequence
  Synthetic
acaugagggaaacauagagguuc

SEQ ID NO: 72561 - RNA, 24 nt, Artificial Sequence
  Synthetic
aacaugagggaaacauagagguuc

SEQ ID NO: 72562 - RNA, 18 nt, Artificial Sequence
  Synthetic
gaacaggguucacuguuc

SEQ ID NO: 72563 - RNA, 19 nt, Artificial Sequence
  Synthetic
ggaacaggguucacuguuc

SEQ ID NO: 72564 - RNA, 20 nt, Artificial Sequence
  Synthetic
cggaacaggguucacuguuc

SEQ ID NO: 72565 - RNA, 21 nt, Artificial Sequence
  Synthetic
ucggaacaggguucacuguuc

SEQ ID NO: 72566 - RNA, 22 nt, Artificial Sequence
  Synthetic
gucggaacaggguucacuguuc

SEQ ID NO: 72567 - RNA, 23 nt, Artificial Sequence
  Synthetic
agucggaacaggguucacuguuc

SEQ ID NO: 72568 - RNA, 24 nt, Artificial Sequence
  Synthetic
uagucggaacaggguucacuguuc

SEQ ID NO: 72569 - RNA, 18 nt, Artificial Sequence
  Synthetic
augauguagcucuuguuc

SEQ ID NO: 72570 - RNA, 19 nt, Artificial Sequence
  Synthetic
caugauguagcucuuguuc

SEQ ID NO: 72571 - RNA, 20 nt, Artificial Sequence
  Synthetic
ccaugauguagcucuuguuc

SEQ ID NO: 72572 - RNA, 21 nt, Artificial Sequence
  Synthetic
cccaugauguagcucuuguuc

SEQ ID NO: 72573 - RNA, 22 nt, Artificial Sequence
  Synthetic
ccccaugauguagcucuuguuc

SEQ ID NO: 72574 - RNA, 23 nt, Artificial Sequence
  Synthetic
gccccaugauguagcucuuguuc

SEQ ID NO: 72575 - RNA, 24 nt, Artificial Sequence
  Synthetic
agccccaugauguagcucuuguuc

SEQ ID NO: 72576 - RNA, 18 nt, Artificial Sequence
  Synthetic
  misc_feature (6)..(6): n is a, c, g, or u
ggaaangauguauauuuc

SEQ ID NO: 72577 - RNA, 19 nt, Artificial Sequence
  Synthetic
  misc_feature (7)..(7): n is a, c, g, or u
uggaaangauguauauuuc

SEQ ID NO: 72578 - RNA, 20 nt, Artificial Sequence
  Synthetic
  misc_feature (8)..(8): n is a, c, g, or u
auggaaangauguauauuuc

SEQ ID NO: 72579 - RNA, 21 nt, Artificial Sequence
  Synthetic
  misc_feature (9)..(9): n is a, c, g, or u
cauggaaangauguauauuuc

SEQ ID NO: 72580 - RNA, 22 nt, Artificial Sequence
  Synthetic
  misc_feature (10)..(10): n is a, c, g, or u
ccauggaaangauguauauuuc

SEQ ID NO: 72581 - RNA, 23 nt, Artificial Sequence
  Synthetic
  misc_feature (11)..(11): n is a, c, g, or u
gccauggaaangauguauauuuc

SEQ ID NO: 72582 - RNA, 24 nt, Artificial Sequence
  Synthetic
  misc_feature (12)..(12): n is a, c, g, or u
agccauggaaangauguauauuuc

SEQ ID NO: 72583 - RNA, 18 nt, Artificial Sequence
  Synthetic
uaagguuuuauaccuuuc

SEQ ID NO: 72584 - RNA, 19 nt, Artificial Sequence
  Synthetic
auaagguuuuauaccuuuc

SEQ ID NO: 72585 - RNA, 20 nt, Artificial Sequence
  Synthetic
aauaagguuuuauaccuuuc

SEQ ID NO: 72586 - RNA, 21 nt, Artificial Sequence
  Synthetic
uaauaagguuuuauaccuuuc

SEQ ID NO: 72587 - RNA, 22 nt, Artificial Sequence
  Synthetic
auaauaagguuuuauaccuuuc

SEQ ID NO: 72588 - RNA, 23 nt, Artificial Sequence
  Synthetic
gauaauaagguuuuauaccuuuc

SEQ ID NO: 72589 - RNA, 24 nt, Artificial Sequence
  Synthetic
ggauaauaagguuuuauaccuuuc

SEQ ID NO: 72590 - RNA, 18 nt, Artificial Sequence
  Synthetic
acucccauaggaauuuuc

SEQ ID NO: 72591 - RNA, 19 nt, Artificial Sequence
  Synthetic
cacucccauaggaauuuuc

SEQ ID NO: 72592 - RNA, 20 nt, Artificial Sequence
  Synthetic
ccacucccauaggaauuuuc

SEQ ID NO: 72593 - RNA, 21 nt, Artificial Sequence
  Synthetic
cccacucccauaggaauuuuc

SEQ ID NO: 72594 - RNA, 22 nt, Artificial Sequence
  Synthetic
gcccacucccauaggaauuuuc

SEQ ID NO: 72595 - RNA, 23 nt, Artificial Sequence
  Synthetic
ggcccacucccauaggaauuuuc

SEQ ID NO: 72596 - RNA, 24 nt, Artificial Sequence
  Synthetic
aggcccacucccauaggaauuuuc

SEQ ID NO: 72597 - RNA, 18 nt, Artificial Sequence
  Synthetic
  misc_feature (2)..(2): n is a, c, g, or u
gnuuaacagggaguuuuc

SEQ ID NO: 72598 - RNA, 19 nt, Artificial Sequence
  Synthetic
  misc_feature (3)..(3): n is a, c, g, or u
cgnuuaacagggaguuuuc

SEQ ID NO: 72599 - RNA, 20 nt, Artificial Sequence
  Synthetic
  misc_feature (4)..(4): n is a, c, g, or u
ccgnuuaacagggaguuuuc

SEQ ID NO: 72600 - RNA, 21 nt, Artificial Sequence
  Synthetic
  misc_feature (5)..(5): n is a, c, g, or u
gccgnuuaacagggaguuuuc

SEQ ID NO: 72601 - RNA, 22 nt, Artificial Sequence
  Synthetic
  misc_feature (6)..(6): n is a, c, g, or u
ggccgnuuaacagggaguuuuc

SEQ ID NO: 72602 - RNA, 23 nt, Artificial Sequence
  Synthetic
  misc_feature (7)..(7): n is a, c, g, or u
aggccgnuuaacagggaguuuuc

SEQ ID NO: 72603 - RNA, 24 nt, Artificial Sequence
  Synthetic
  misc_feature (8)..(8): n is a, c, g, or u
uaggccgnuuaacagggaguuuuc

SEQ ID NO: 72604 - RNA, 18 nt, Artificial Sequence
  Synthetic
cgguuucucuuccaaaag

SEQ ID NO: 72605 - RNA, 19 nt, Artificial Sequence
  Synthetic
acgguuucucuuccaaaag

SEQ ID NO: 72606 - RNA, 20 nt, Artificial Sequence
  Synthetic
gacgguuucucuuccaaaag

SEQ ID NO: 72607 - RNA, 21 nt, Artificial Sequence
  Synthetic
  misc_feature (1)..(1): n is a, c, g, or u
ngacgguuucucuuccaaaag

SEQ ID NO: 72608 - RNA, 22 nt, Artificial Sequence
  Synthetic
  misc_feature (2)..(2): n is a, c, g, or u
angacgguuucucuuccaaaag

SEQ ID NO: 72609 - RNA, 23 nt, Artificial Sequence
  Synthetic
  misc_feature (3)..(3): n is a, c, g, or u
uangacgguuucucuuccaaaag

SEQ ID NO: 72610 - RNA, 24 nt, Artificial Sequence
  Synthetic
  misc_feature (4)..(4): n is a, c, g, or u
cuangacgguuucucuuccaaaag

SEQ ID NO: 72611 - RNA, 18 nt, Artificial Sequence
  Synthetic
aaugaauaucaggaaaag

SEQ ID NO: 72612 - RNA, 19 nt, Artificial Sequence
  Synthetic
aaaugaauaucaggaaaag

SEQ ID NO: 72613 - RNA, 20 nt, Artificial Sequence
  Synthetic
caaaugaauaucaggaaaag

SEQ ID NO: 72614 - RNA, 21 nt, Artificial Sequence
  Synthetic
gcaaaugaauaucaggaaaag

SEQ ID NO: 72615 - RNA, 22 nt, Artificial Sequence
  Synthetic
ugcaaaugaauaucaggaaaag

SEQ ID NO: 72616 - RNA, 23 nt, Artificial Sequence
  Synthetic
gugcaaaugaauaucaggaaaag

SEQ ID NO: 72617 - RNA, 24 nt, Artificial Sequence
  Synthetic
ggugcaaaugaauaucaggaaaag

SEQ ID NO: 72618 - RNA, 18 nt, Artificial Sequence
  Synthetic
uuaaauguauacccaaag

SEQ ID NO: 72619 - RNA, 19 nt, Artificial Sequence
  Synthetic
uuuaaauguauacccaaag

SEQ ID NO: 72620 - RNA, 20 nt, Artificial Sequence
  Synthetic
auuuaaauguauacccaaag

SEQ ID NO: 72621 - RNA, 21 nt, Artificial Sequence
  Synthetic
gauuuaaauguauacccaaag

SEQ ID NO: 72622 - RNA, 22 nt, Artificial Sequence
  Synthetic
ggauuuaaauguauacccaaag

SEQ ID NO: 72623 - RNA, 23 nt, Artificial Sequence
  Synthetic
gggauuuaaauguauacccaaag

SEQ ID NO: 72624 - RNA, 24 nt, Artificial Sequence
  Synthetic
ugggauuuaaauguauacccaaag

SEQ ID NO: 72625 - RNA, 18 nt, Artificial Sequence
  Synthetic
  misc_feature (3)..(4): n is a, c, g, or u
uannuccccccagcaaag

SEQ ID NO: 72626 - RNA, 19 nt, Artificial Sequence
  Synthetic
  misc_feature (4)..(5): n is a, c, g, or u
uuannuccccccagcaaag

SEQ ID NO: 72627 - RNA, 20 nt, Artificial Sequence
  Synthetic
  misc_feature (5)..(6): n is a, c, g, or u
auuannuccccccagcaaag

SEQ ID NO: 72628 - RNA, 21 nt, Artificial Sequence
  Synthetic
  misc_feature (6)..(7): n is a, c, g, or u
cauuannuccccccagcaaag

SEQ ID NO: 72629 - RNA, 22 nt, Artificial Sequence
  Synthetic
  misc_feature (7)..(8): n is a, c, g, or u
ucauuannuccccccagcaaag

SEQ ID NO: 72630 - RNA, 23 nt, Artificial Sequence
  Synthetic
  misc_feature (8)..(9): n is a, c, g, or u
gucauuannuccccccagcaaag

SEQ ID NO: 72631 - RNA, 24 nt, Artificial Sequence
  Synthetic
  misc_feature (9)..(10): n is a, c, g, or u
agucauuannuccccccagcaaag

SEQ ID NO: 72632 - RNA, 18 nt, Artificial Sequence
  Synthetic
guaaaaggggcagcaaag

SEQ ID NO: 72633 - RNA, 19 nt, Artificial Sequence
  Synthetic
uguaaaaggggcagcaaag

SEQ ID NO: 72634 - RNA, 20 nt, Artificial Sequence
  Synthetic
guguaaaaggggcagcaaag

SEQ ID NO: 72635 - RNA, 21 nt, Artificial Sequence
  Synthetic
uguguaaaaggggcagcaaag

SEQ ID NO: 72636 - RNA, 22 nt, Artificial Sequence
  Synthetic
uuguguaaaaggggcagcaaag

SEQ ID NO: 72637 - RNA, 23 nt, Artificial Sequence
  Synthetic
auuguguaaaaggggcagcaaag

SEQ ID NO: 72638 - RNA, 24 nt, Artificial Sequence
  Synthetic
cauuguguaaaaggggcagcaaag

SEQ ID NO: 72639 - RNA, 18 nt, Artificial Sequence
  Synthetic
gaugagugucucucaaag

SEQ ID NO: 72640 - RNA, 19 nt, Artificial Sequence
  Synthetic
ggaugagugucucucaaag

SEQ ID NO: 72641 - RNA, 20 nt, Artificial Sequence
  Synthetic
aggaugagugucucucaaag

SEQ ID NO: 72642 - RNA, 21 nt, Artificial Sequence
  Synthetic
gaggaugagugucucucaaag

SEQ ID NO: 72643 - RNA, 22 nt, Artificial Sequence
  Synthetic
ugaggaugagugucucucaaag

SEQ ID NO: 72644 - RNA, 23 nt, Artificial Sequence
  Synthetic
cugaggaugagugucucucaaag

SEQ ID NO: 72645 - RNA, 24 nt, Artificial Sequence
  Synthetic
ccugaggaugagugucucucaaag

SEQ ID NO: 72646 - RNA, 18 nt, Artificial Sequence
  Synthetic
uguaaguuggcgagaaag

SEQ ID NO: 72647 - RNA, 19 nt, Artificial Sequence
  Synthetic
uuguaaguuggcgagaaag

SEQ ID NO: 72648 - RNA, 20 nt, Artificial Sequence
  Synthetic
cuuguaaguuggcgagaaag

SEQ ID NO: 72649 - RNA, 21 nt, Artificial Sequence
  Synthetic
ccuuguaaguuggcgagaaag

SEQ ID NO: 72650 - RNA, 22 nt, Artificial Sequence
  Synthetic
gccuuguaaguuggcgagaaag

SEQ ID NO: 72651 - RNA, 23 nt, Artificial Sequence
  Synthetic
ggccuuguaaguuggcgagaaag

SEQ ID NO: 72652 - RNA, 24 nt, Artificial Sequence
  Synthetic
aggccuuguaaguuggcgagaaag

SEQ ID NO: 72653 - RNA, 18 nt, Artificial Sequence
  Synthetic
ccagacagugggggaaag

SEQ ID NO: 72654 - RNA, 19 nt, Artificial Sequence
  Synthetic
gccagacagugggggaaag

SEQ ID NO: 72655 - RNA, 20 nt, Artificial Sequence
  Synthetic
agccagacagugggggaaag

SEQ ID NO: 72656 - RNA, 21 nt, Artificial Sequence
  Synthetic
aagccagacagugggggaaag

SEQ ID NO: 72657 - RNA, 22 nt, Artificial Sequence
  Synthetic
aaagccagacagugggggaaag

SEQ ID NO: 72658 - RNA, 23 nt, Artificial Sequence
  Synthetic
gaaagccagacagugggggaaag

SEQ ID NO: 72659 - RNA, 24 nt, Artificial Sequence
  Synthetic
ugaaagccagacagugggggaaag

SEQ ID NO: 72660 - RNA, 18 nt, Artificial Sequence
  Synthetic
cauccauauaacugaaag

SEQ ID NO: 72661 - RNA, 19 nt, Artificial Sequence
  Synthetic
ucauccauauaacugaaag

SEQ ID NO: 72662 - RNA, 20 nt, Artificial Sequence
  Synthetic
aucauccauauaacugaaag

SEQ ID NO: 72663 - RNA, 21 nt, Artificial Sequence
  Synthetic
caucauccauauaacugaaag

SEQ ID NO: 72664 - RNA, 22 nt, Artificial Sequence
  Synthetic
acaucauccauauaacugaaag

SEQ ID NO: 72665 - RNA, 23 nt, Artificial Sequence
  Synthetic
cacaucauccauauaacugaaag

SEQ ID NO: 72666 - RNA, 24 nt, Artificial Sequence
  Synthetic
ccacaucauccauauaacugaaag

SEQ ID NO: 72667 - RNA, 18 nt, Artificial Sequence
  Synthetic
aggauuuuugucaacaag

SEQ ID NO: 72668 - RNA, 19 nt, Artificial Sequence
  Synthetic
gaggauuuuugucaacaag

SEQ ID NO: 72669 - RNA, 20 nt, Artificial Sequence
  Synthetic
ugaggauuuuugucaacaag

SEQ ID NO: 72670 - RNA, 21 nt, Artificial Sequence
  Synthetic
gugaggauuuuugucaacaag

SEQ ID NO: 72671 - RNA, 22 nt, Artificial Sequence
  Synthetic
ugugaggauuuuugucaacaag

SEQ ID NO: 72672 - RNA, 23 nt, Artificial Sequence
  Synthetic
uugugaggauuuuugucaacaag

SEQ ID NO: 72673 - RNA, 24 nt, Artificial Sequence
  Synthetic
auugugaggauuuuugucaacaag

SEQ ID NO: 72674 - RNA, 18 nt, Artificial Sequence
  Synthetic
guagcucuuguucccaag

SEQ ID NO: 72675 - RNA, 19 nt, Artificial Sequence
  Synthetic
uguagcucuuguucccaag

SEQ ID NO: 72676 - RNA, 20 nt, Artificial Sequence
  Synthetic
auguagcucuuguucccaag

SEQ ID NO: 72677 - RNA, 21 nt, Artificial Sequence
  Synthetic
gauguagcucuuguucccaag

SEQ ID NO: 72678 - RNA, 22 nt, Artificial Sequence
  Synthetic
ugauguagcucuuguucccaag

SEQ ID NO: 72679 - RNA, 23 nt, Artificial Sequence
  Synthetic
augauguagcucuuguucccaag

SEQ ID NO: 72680 - RNA, 24 nt, Artificial Sequence
  Synthetic
caugauguagcucuuguucccaag

SEQ ID NO: 72681 - RNA, 18 nt, Artificial Sequence
  Synthetic
cuuacugaaggaaagaag

SEQ ID NO: 72682 - RNA, 19 nt, Artificial Sequence
  Synthetic
ucuuacugaaggaaagaag

SEQ ID NO: 72683 - RNA, 20 nt, Artificial Sequence
  Synthetic
cucuuacugaaggaaagaag

SEQ ID NO: 72684 - RNA, 21 nt, Artificial Sequence
  Synthetic
ucucuuacugaaggaaagaag

SEQ ID NO: 72685 - RNA, 22 nt, Artificial Sequence
  Synthetic
aucucuuacugaaggaaagaag

SEQ ID NO: 72686 - RNA, 23 nt, Artificial Sequence
  Synthetic
gaucucuuacugaaggaaagaag

SEQ ID NO: 72687 - RNA, 24 nt, Artificial Sequence
  Synthetic
agaucucuuacugaaggaaagaag

SEQ ID NO: 72688 - RNA, 18 nt, Artificial Sequence
  Synthetic
agaagaaccaacaagaag

SEQ ID NO: 72689 - RNA, 19 nt, Artificial Sequence
  Synthetic
cagaagaaccaacaagaag

SEQ ID NO: 72690 - RNA, 20 nt, Artificial Sequence
  Synthetic
ccagaagaaccaacaagaag

SEQ ID NO: 72691 - RNA, 21 nt, Artificial Sequence
  Synthetic
uccagaagaaccaacaagaag

SEQ ID NO: 72692 - RNA, 22 nt, Artificial Sequence
  Synthetic
guccagaagaaccaacaagaag

SEQ ID NO: 72693 - RNA, 23 nt, Artificial Sequence
  Synthetic
aguccagaagaaccaacaagaag

SEQ ID NO: 72694 - RNA, 24 nt, Artificial Sequence
  Synthetic
uaguccagaagaaccaacaagaag

SEQ ID NO: 72695 - RNA, 18 nt, Artificial Sequence
  Synthetic
aaggaaagaagucagaag

SEQ ID NO: 72696 - RNA, 19 nt, Artificial Sequence
  Synthetic
gaaggaaagaagucagaag

SEQ ID NO: 72697 - RNA, 20 nt, Artificial Sequence
  Synthetic
ugaaggaaagaagucagaag

SEQ ID NO: 72698 - RNA, 21 nt, Artificial Sequence
  Synthetic
cugaaggaaagaagucagaag

SEQ ID NO: 72699 - RNA, 22 nt, Artificial Sequence
  Synthetic
acugaaggaaagaagucagaag

SEQ ID NO: 72700 - RNA, 23 nt, Artificial Sequence
  Synthetic
uacugaaggaaagaagucagaag

SEQ ID NO: 72701 - RNA, 24 nt, Artificial Sequence
  Synthetic
uuacugaaggaaagaagucagaag

SEQ ID NO: 72702 - RNA, 18 nt, Artificial Sequence
  Synthetic
uccccaauccucgagaag

SEQ ID NO: 72703 - RNA, 19 nt, Artificial Sequence
  Synthetic
guccccaauccucgagaag

SEQ ID NO: 72704 - RNA, 20 nt, Artificial Sequence
  Synthetic
gguccccaauccucgagaag

SEQ ID NO: 72705 - RNA, 21 nt, Artificial Sequence
  Synthetic
ggguccccaauccucgagaag

SEQ ID NO: 72706 - RNA, 22 nt, Artificial Sequence
  Synthetic
aggguccccaauccucgagaag

SEQ ID NO: 72707 - RNA, 23 nt, Artificial Sequence
  Synthetic
caggguccccaauccucgagaag

SEQ ID NO: 72708 - RNA, 24 nt, Artificial Sequence
  Synthetic
gcaggguccccaauccucgagaag

SEQ ID NO: 72709 - RNA, 18 nt, Artificial Sequence
  Synthetic
agacagguauaguagaag

SEQ ID NO: 72710 - RNA, 19 nt, Artificial Sequence
  Synthetic
aagacagguauaguagaag

SEQ ID NO: 72711 - RNA, 20 nt, Artificial Sequence
  Synthetic
aaagacagguauaguagaag

SEQ ID NO: 72712 - RNA, 21 nt, Artificial Sequence
  Synthetic
uaaagacagguauaguagaag

SEQ ID NO: 72713 - RNA, 22 nt, Artificial Sequence
  Synthetic
uuaaagacagguauaguagaag

SEQ ID NO: 72714 - RNA, 23 nt, Artificial Sequence
  Synthetic
auuaaagacagguauaguagaag

SEQ ID NO: 72715 - RNA, 24 nt, Artificial Sequence
  Synthetic
gauuaaagacagguauaguagaag

SEQ ID NO: 72716 - RNA, 18 nt, Artificial Sequence
  Synthetic
aauacuaacauugggaag

SEQ ID NO: 72717 - RNA, 19 nt, Artificial Sequence
  Synthetic
gaauacuaacauugggaag

SEQ ID NO: 72718 - RNA, 20 nt, Artificial Sequence
  Synthetic
ggaauacuaacauugggaag

SEQ ID NO: 72719 - RNA, 21 nt, Artificial Sequence
  Synthetic
aggaauacuaacauugggaag

SEQ ID NO: 72720 - RNA, 22 nt, Artificial Sequence
  Synthetic
aaggaauacuaacauugggaag

SEQ ID NO: 72721 - RNA, 23 nt, Artificial Sequence
  Synthetic
caaggaauacuaacauugggaag

SEQ ID NO: 72722 - RNA, 24 nt, Artificial Sequence
  Synthetic
ccaaggaauacuaacauugggaag

SEQ ID NO: 72723 - RNA, 18 nt, Artificial Sequence
  Synthetic
cauagcagcaggaugaag

SEQ ID NO: 72724 - RNA, 19 nt, Artificial Sequence
  Synthetic
gcauagcagcaggaugaag

SEQ ID NO: 72725 - RNA, 20 nt, Artificial Sequence
  Synthetic
ggcauagcagcaggaugaag

SEQ ID NO: 72726 - RNA, 21 nt, Artificial Sequence
  Synthetic
aggcauagcagcaggaugaag

SEQ ID NO: 72727 - RNA, 22 nt, Artificial Sequence
  Synthetic
gaggcauagcagcaggaugaag

SEQ ID NO: 72728 - RNA, 23 nt, Artificial Sequence
  Synthetic
ugaggcauagcagcaggaugaag

SEQ ID NO: 72729 - RNA, 24 nt, Artificial Sequence
  Synthetic
augaggcauagcagcaggaugaag

SEQ ID NO: 72730 - RNA, 18 nt, Artificial Sequence
  Synthetic
gaagaucucuuacugaag

SEQ ID NO: 72731 - RNA, 19 nt, Artificial Sequence
  Synthetic
agaagaucucuuacugaag

SEQ ID NO: 72732 - RNA, 20 nt, Artificial Sequence
  Synthetic
uagaagaucucuuacugaag

SEQ ID NO: 72733 - RNA, 21 nt, Artificial Sequence
  Synthetic
cuagaagaucucuuacugaag

SEQ ID NO: 72734 - RNA, 22 nt, Artificial Sequence
  Synthetic
ucuagaagaucucuuacugaag

SEQ ID NO: 72735 - RNA, 23 nt, Artificial Sequence
  Synthetic
aucuagaagaucucuuacugaag

SEQ ID NO: 72736 - RNA, 24 nt, Artificial Sequence
  Synthetic
uaucuagaagaucucuuacugaag

SEQ ID NO: 72737 - RNA, 18 nt, Artificial Sequence
  Synthetic
uccggaaguguugauaag

SEQ ID NO: 72738 - RNA, 19 nt, Artificial Sequence
  Synthetic
cuccggaaguguugauaag

SEQ ID NO: 72739 - RNA, 20 nt, Artificial Sequence
  Synthetic
ucuccggaaguguugauaag

SEQ ID NO: 72740 - RNA, 21 nt, Artificial Sequence
  Synthetic
  misc_feature (1)..(1): n is a, c, g, or u
nucuccggaaguguugauaag

SEQ ID NO: 72741 - RNA, 22 nt, Artificial Sequence
  Synthetic
  misc_feature (2)..(2): n is a, c, g, or u
anucuccggaaguguugauaag

SEQ ID NO: 72742 - RNA, 23 nt, Artificial Sequence
  Synthetic
  misc_feature (3)..(3): n is a, c, g, or u
uanucuccggaaguguugauaag

SEQ ID NO: 72743 - RNA, 24 nt, Artificial Sequence
  Synthetic
  misc_feature (4)..(4): n is a, c, g, or u
guanucuccggaaguguugauaag

SEQ ID NO: 72744 - RNA, 18 nt, Artificial Sequence
  Synthetic
cauuugguggucuauaag

SEQ ID NO: 72745 - RNA, 19 nt, Artificial Sequence
  Synthetic
gcauuugguggucuauaag

SEQ ID NO: 72746 - RNA, 20 nt, Artificial Sequence
  Synthetic
ggcauuugguggucuauaag

SEQ ID NO: 72747 - RNA, 21 nt, Artificial Sequence
  Synthetic
gggcauuugguggucuauaag

SEQ ID NO: 72748 - RNA, 22 nt, Artificial Sequence
  Synthetic
ggggcauuugguggucuauaag

SEQ ID NO: 72749 - RNA, 23 nt, Artificial Sequence
  Synthetic
aggggcauuugguggucuauaag

SEQ ID NO: 72750 - RNA, 24 nt, Artificial Sequence
  Synthetic
uaggggcauuugguggucuauaag

SEQ ID NO: 72751 - RNA, 18 nt, Artificial Sequence
  Synthetic
gcuuggaggcuugaacag

SEQ ID NO: 72752 - RNA, 19 nt, Artificial Sequence
  Synthetic
agcuuggaggcuugaacag

SEQ ID NO: 72753 - RNA, 20 nt, Artificial Sequence
  Synthetic
cagcuuggaggcuugaacag

SEQ ID NO: 72754 - RNA, 21 nt, Artificial Sequence
  Synthetic
acagcuuggaggcuugaacag

SEQ ID NO: 72755 - RNA, 22 nt, Artificial Sequence
  Synthetic
cacagcuuggaggcuugaacag

SEQ ID NO: 72756 - RNA, 23 nt, Artificial Sequence
  Synthetic
gcacagcuuggaggcuugaacag

SEQ ID NO: 72757 - RNA, 24 nt, Artificial Sequence
  Synthetic
ggcacagcuuggaggcuugaacag

SEQ ID NO: 72758 - RNA, 18 nt, Artificial Sequence
  Synthetic
  misc_feature (3)..(4): n is a, c, g, or u
cannuauuguuuacacag

SEQ ID NO: 72759 - RNA, 19 nt, Artificial Sequence
  Synthetic
  misc_feature (4)..(5): n is a, c, g, or u
ucannuauuguuuacacag

SEQ ID NO: 72760 - RNA, 20 nt, Artificial Sequence
  Synthetic
  misc_feature (5)..(6): n is a, c, g, or u
uucannuauuguuuacacag

SEQ ID NO: 72761 - RNA, 21 nt, Artificial Sequence
  Synthetic
  misc_feature (6)..(7): n is a, c, g, or u
guucannuauuguuuacacag

SEQ ID NO: 72762 - RNA, 22 nt, Artificial Sequence
  Synthetic
  misc_feature (7)..(8): n is a, c, g, or u
gguucannuauuguuuacacag

SEQ ID NO: 72763 - RNA, 23 nt, Artificial Sequence
  Synthetic
  misc_feature (8)..(9): n is a, c, g, or u
agguucannuauuguuuacacag

SEQ ID NO: 72764 - RNA, 24 nt, Artificial Sequence
  Synthetic
  misc_feature (9)..(10): n is a, c, g, or u
aagguucannuauuguuuacacag

SEQ ID NO: 72765 - RNA, 18 nt, Artificial Sequence
  Synthetic
auccaguuggcagcacag

SEQ ID NO: 72766 - RNA, 19 nt, Artificial Sequence
  Synthetic
gauccaguuggcagcacag

SEQ ID NO: 72767 - RNA, 20 nt, Artificial Sequence
  Synthetic
ggauccaguuggcagcacag

SEQ ID NO: 72768 - RNA, 21 nt, Artificial Sequence
  Synthetic
aggauccaguuggcagcacag

SEQ ID NO: 72769 - RNA, 22 nt, Artificial Sequence
  Synthetic
caggauccaguuggcagcacag

SEQ ID NO: 72770 - RNA, 23 nt, Artificial Sequence
  Synthetic
gcaggauccaguuggcagcacag

SEQ ID NO: 72771 - RNA, 24 nt, Artificial Sequence
  Synthetic
cgcaggauccaguuggcagcacag

SEQ ID NO: 72772 - RNA, 18 nt, Artificial Sequence
  Synthetic
aagccacccaaggcacag

SEQ ID NO: 72773 - RNA, 19 nt, Artificial Sequence
  Synthetic
aaagccacccaaggcacag

SEQ ID NO: 72774 - RNA, 20 nt, Artificial Sequence
  Synthetic
  misc_feature (1)..(1): n is a, c, g, or u
naaagccacccaaggcacag

SEQ ID NO: 72775 - RNA, 21 nt, Artificial Sequence
  Synthetic
  misc_feature (2)..(2): n is a, c, g, or u
cnaaagccacccaaggcacag

SEQ ID NO: 72776 - RNA, 22 nt, Artificial Sequence
  Synthetic
  misc_feature (3)..(3): n is a, c, g, or u
ccnaaagccacccaaggcacag

SEQ ID NO: 72777 - RNA, 23 nt, Artificial Sequence
  Synthetic
  misc_feature (1)..(1): n is a, c, g, or u
  misc_feature (4)..(4): n is a, c, g, or u
nccnaaagccacccaaggcacag

SEQ ID NO: 72778 - RNA, 24 nt, Artificial Sequence
  Synthetic
  misc_feature (2)..(2): n is a, c, g, or u
  misc_feature (5)..(5): n is a, c, g, or u
gnccnaaagccacccaaggcacag

SEQ ID NO: 72779 - RNA, 18 nt, Artificial Sequence
  Synthetic
gcagaugagaaggcacag

SEQ ID NO: 72780 - RNA, 19 nt, Artificial Sequence
  Synthetic
ggcagaugagaaggcacag

SEQ ID NO: 72781 - RNA, 20 nt, Artificial Sequence
  Synthetic
cggcagaugagaaggcacag

SEQ ID NO: 72782 - RNA, 21 nt, Artificial Sequence
  Synthetic
ccggcagaugagaaggcacag

SEQ ID NO: 72783 - RNA, 22 nt, Artificial Sequence
  Synthetic
uccggcagaugagaaggcacag

SEQ ID NO: 72784 - RNA, 23 nt, Artificial Sequence
  Synthetic
guccggcagaugagaaggcacag

SEQ ID NO: 72785 - RNA, 24 nt, Artificial Sequence
  Synthetic
gguccggcagaugagaaggcacag

SEQ ID NO: 72786 - RNA, 18 nt, Artificial Sequence
  Synthetic
uaacugaaagccagacag

SEQ ID NO: 72787 - RNA, 19 nt, Artificial Sequence
  Synthetic
auaacugaaagccagacag

SEQ ID NO: 72788 - RNA, 20 nt, Artificial Sequence
  Synthetic
uauaacugaaagccagacag

SEQ ID NO: 72789 - RNA, 21 nt, Artificial Sequence
  Synthetic
auauaacugaaagccagacag

SEQ ID NO: 72790 - RNA, 22 nt, Artificial Sequence
  Synthetic
cauauaacugaaagccagacag

SEQ ID NO: 72791 - RNA, 23 nt, Artificial Sequence
  Synthetic
ccauauaacugaaagccagacag

SEQ ID NO: 72792 - RNA, 24 nt, Artificial Sequence
  Synthetic
uccauauaacugaaagccagacag

SEQ ID NO: 72793 - RNA, 18 nt, Artificial Sequence
  Synthetic
cggaacuggagccaccag

SEQ ID NO: 72794 - RNA, 19 nt, Artificial Sequence
  Synthetic
ccggaacuggagccaccag

SEQ ID NO: 72795 - RNA, 20 nt, Artificial Sequence
  Synthetic
uccggaacuggagccaccag

SEQ ID NO: 72796 - RNA, 21 nt, Artificial Sequence
  Synthetic
uuccggaacuggagccaccag

SEQ ID NO: 72797 - RNA, 22 nt, Artificial Sequence
  Synthetic
guuccggaacuggagccaccag

SEQ ID NO: 72798 - RNA, 23 nt, Artificial Sequence
  Synthetic
uguuccggaacuggagccaccag

SEQ ID NO: 72799 - RNA, 24 nt, Artificial Sequence
  Synthetic
cuguuccggaacuggagccaccag

SEQ ID NO: 72800 - RNA, 18 nt, Artificial Sequence
  Synthetic
  misc_feature (8)..(9): n is a, c, g, or u
gucauuannuccccccag

SEQ ID NO: 72801 - RNA, 19 nt, Artificial Sequence
  Synthetic
  misc_feature (9)..(10): n is a, c, g, or u
agucauuannuccccccag

SEQ ID NO: 72802 - RNA, 20 nt, Artificial Sequence
  Synthetic
  misc_feature (10)..(11): n is a, c, g, or u
gagucauuannuccccccag

SEQ ID NO: 72803 - RNA, 21 nt, Artificial Sequence
  Synthetic
  misc_feature (11)..(12): n is a, c, g, or u
agagucauuannuccccccag

SEQ ID NO: 72804 - RNA, 22 nt, Artificial Sequence
  Synthetic
  misc_feature (12)..(13): n is a, c, g, or u
uagagucauuannuccccccag

SEQ ID NO: 72805 - RNA, 23 nt, Artificial Sequence
  Synthetic
  misc_feature (13)..(14): n is a, c, g, or u
cuagagucauuannuccccccag

SEQ ID NO: 72806 - RNA, 24 nt, Artificial Sequence
  Synthetic
  misc_feature (14)..(15): n is a, c, g, or u
gcuagagucauuannuccccccag

SEQ ID NO: 72807 - RNA, 18 nt, Artificial Sequence
  Synthetic
uggccaagccccagccag

SEQ ID NO: 72808 - RNA, 19 nt, Artificial Sequence
  Synthetic
auggccaagccccagccag

SEQ ID NO: 72809 - RNA, 20 nt, Artificial Sequence
  Synthetic
uauggccaagccccagccag

SEQ ID NO: 72810 - RNA, 21 nt, Artificial Sequence
  Synthetic
cuauggccaagccccagccag

SEQ ID NO: 72811 - RNA, 22 nt, Artificial Sequence
  Synthetic
ccuauggccaagccccagccag

SEQ ID NO: 72812 - RNA, 23 nt, Artificial Sequence
  Synthetic
gccuauggccaagccccagccag

SEQ ID NO: 72813 - RNA, 24 nt, Artificial Sequence
  Synthetic
ggccuauggccaagccccagccag

SEQ ID NO: 72814 - RNA, 18 nt, Artificial Sequence
  Synthetic
acuaguaaacugagccag

SEQ ID NO: 72815 - RNA, 19 nt, Artificial Sequence
  Synthetic
cacuaguaaacugagccag

SEQ ID NO: 72816 - RNA, 20 nt, Artificial Sequence
  Synthetic
gcacuaguaaacugagccag

SEQ ID NO: 72817 - RNA, 21 nt, Artificial Sequence
  Synthetic
ggcacuaguaaacugagccag

SEQ ID NO: 72818 - RNA, 22 nt, Artificial Sequence
  Synthetic
uggcacuaguaaacugagccag

SEQ ID NO: 72819 - RNA, 23 nt, Artificial Sequence
  Synthetic
auggcacuaguaaacugagccag

SEQ ID NO: 72820 - RNA, 24 nt, Artificial Sequence
  Synthetic
aauggcacuaguaaacugagccag

SEQ ID NO: 72821 - RNA, 18 nt, Artificial Sequence
  Synthetic
acauccagcgauagccag

SEQ ID NO: 72822 - RNA, 19 nt, Artificial Sequence
  Synthetic
cacauccagcgauagccag

SEQ ID NO: 72823 - RNA, 20 nt, Artificial Sequence
  Synthetic
acacauccagcgauagccag

SEQ ID NO: 72824 - RNA, 21 nt, Artificial Sequence
  Synthetic
gacacauccagcgauagccag

SEQ ID NO: 72825 - RNA, 22 nt, Artificial Sequence
  Synthetic
agacacauccagcgauagccag

SEQ ID NO: 72826 - RNA, 23 nt, Artificial Sequence
  Synthetic
cagacacauccagcgauagccag

SEQ ID NO: 72827 - RNA, 24 nt, Artificial Sequence
  Synthetic
gcagacacauccagcgauagccag

SEQ ID NO: 72828 - RNA, 18 nt, Artificial Sequence
  Synthetic
cauaccuugauaguccag

SEQ ID NO: 72829 - RNA, 19 nt, Artificial Sequence
  Synthetic
acauaccuugauaguccag

SEQ ID NO: 72830 - RNA, 20 nt, Artificial Sequence
  Synthetic
aacauaccuugauaguccag

SEQ ID NO: 72831 - RNA, 21 nt, Artificial Sequence
  Synthetic
caacauaccuugauaguccag

SEQ ID NO: 72832 - RNA, 22 nt, Artificial Sequence
  Synthetic
gcaacauaccuugauaguccag

SEQ ID NO: 72833 - RNA, 23 nt, Artificial Sequence
  Synthetic
ggcaacauaccuugauaguccag

SEQ ID NO: 72834 - RNA, 24 nt, Artificial Sequence
  Synthetic
gggcaacauaccuugauaguccag

SEQ ID NO: 72835 - RNA, 18 nt, Artificial Sequence
  Synthetic
aaagauggaguuuuccag

SEQ ID NO: 72836 - RNA, 19 nt, Artificial Sequence
  Synthetic
aaaagauggaguuuuccag

SEQ ID NO: 72837 - RNA, 20 nt, Artificial Sequence
  Synthetic
gaaaagauggaguuuuccag

SEQ ID NO: 72838 - RNA, 21 nt, Artificial Sequence
  Synthetic
ggaaaagauggaguuuuccag

SEQ ID NO: 72839 - RNA, 22 nt, Artificial Sequence
  Synthetic
aggaaaagauggaguuuuccag

SEQ ID NO: 72840 - RNA, 23 nt, Artificial Sequence
  Synthetic
caggaaaagauggaguuuuccag

SEQ ID NO: 72841 - RNA, 24 nt, Artificial Sequence
  Synthetic
ucaggaaaagauggaguuuuccag

SEQ ID NO: 72842 - RNA, 18 nt, Artificial Sequence
  Synthetic
gaugaggcauagcagcag

SEQ ID NO: 72843 - RNA, 19 nt, Artificial Sequence
  Synthetic
agaugaggcauagcagcag

SEQ ID NO: 72844 - RNA, 20 nt, Artificial Sequence
  Synthetic
aagaugaggcauagcagcag

SEQ ID NO: 72845 - RNA, 21 nt, Artificial Sequence
  Synthetic
gaagaugaggcauagcagcag

SEQ ID NO: 72846 - RNA, 22 nt, Artificial Sequence
  Synthetic
agaagaugaggcauagcagcag

SEQ ID NO: 72847 - RNA, 23 nt, Artificial Sequence
  Synthetic
aagaagaugaggcauagcagcag

SEQ ID NO: 72848 - RNA, 24 nt, Artificial Sequence
  Synthetic
caagaagaugaggcauagcagcag

SEQ ID NO: 72849 - RNA, 18 nt, Artificial Sequence
  Synthetic
cggcuaggaguuccgcag

SEQ ID NO: 72850 - RNA, 19 nt, Artificial Sequence
  Synthetic
gcggcuaggaguuccgcag

SEQ ID NO: 72851 - RNA, 20 nt, Artificial Sequence
  Synthetic
agcggcuaggaguuccgcag

SEQ ID NO: 72852 - RNA, 21 nt, Artificial Sequence
  Synthetic
aagcggcuaggaguuccgcag

SEQ ID NO: 72853 - RNA, 22 nt, Artificial Sequence
  Synthetic
caagcggcuaggaguuccgcag

SEQ ID NO: 72854 - RNA, 23 nt, Artificial Sequence
  Synthetic
acaagcggcuaggaguuccgcag

SEQ ID NO: 72855 - RNA, 24 nt, Artificial Sequence
  Synthetic
aacaagcggcuaggaguuccgcag

SEQ ID NO: 72856 - RNA, 18 nt, Artificial Sequence
  Synthetic
  misc_feature (8)..(8): n is a, c, g, or u
ggucggcnggaacggcag

SEQ ID NO: 72857 - RNA, 19 nt, Artificial Sequence
  Synthetic
  misc_feature (9)..(9): n is a, c, g, or u
uggucggcnggaacggcag

SEQ ID NO: 72858 - RNA, 20 nt, Artificial Sequence
  Synthetic
  misc_feature (10)..(10): n is a, c, g, or u
guggucggcnggaacggcag

SEQ ID NO: 72859 - RNA, 21 nt, Artificial Sequence
  Synthetic
  misc_feature (11)..(11): n is a, c, g, or u
cguggucggcnggaacggcag

SEQ ID NO: 72860 - RNA, 22 nt, Artificial Sequence
  Synthetic
  misc_feature (12)..(12): n is a, c, g, or u
ccguggucggcnggaacggcag

SEQ ID NO: 72861 - RNA, 23 nt, Artificial Sequence
  Synthetic
  misc_feature (13)..(13): n is a, c, g, or u
cccguggucggcnggaacggcag

SEQ ID NO: 72862 - RNA, 24 nt, Artificial Sequence
  Synthetic
  misc_feature (14)..(14): n is a, c, g, or u
ccccguggucggcnggaacggcag

SEQ ID NO: 72863 - RNA, 18 nt, Artificial Sequence
  Synthetic
gugcacacgguccggcag

SEQ ID NO: 72864 - RNA, 19 nt, Artificial Sequence
  Synthetic
agugcacacgguccggcag

SEQ ID NO: 72865 - RNA, 20 nt, Artificial Sequence
  Synthetic
aagugcacacgguccggcag

SEQ ID NO: 72866 - RNA, 18 nt, Artificial Sequence
  Synthetic
cgcaguauggaucggcag

SEQ ID NO: 72867 - RNA, 19 nt, Artificial Sequence
  Synthetic
ccgcaguauggaucggcag

SEQ ID NO: 72868 - RNA, 20 nt, Artificial Sequence
  Synthetic
uccgcaguauggaucggcag

SEQ ID NO: 72869 - RNA, 21 nt, Artificial Sequence
  Synthetic
uuccgcaguauggaucggcag

SEQ ID NO: 72870 - RNA, 22 nt, Artificial Sequence
  Synthetic
guuccgcaguauggaucggcag

SEQ ID NO: 72871 - RNA, 23 nt, Artificial Sequence
  Synthetic
aguuccgcaguauggaucggcag

SEQ ID NO: 72872 - RNA, 24 nt, Artificial Sequence
  Synthetic
gaguuccgcaguauggaucggcag

SEQ ID NO: 72873 - RNA, 18 nt, Artificial Sequence
  Synthetic
auuguguaaaaggggcag

SEQ ID NO: 72874 - RNA, 19 nt, Artificial Sequence
  Synthetic
cauuguguaaaaggggcag

SEQ ID NO: 72875 - RNA, 20 nt, Artificial Sequence
  Synthetic
acauuguguaaaaggggcag

SEQ ID NO: 72876 - RNA, 21 nt, Artificial Sequence
  Synthetic
cacauuguguaaaaggggcag

SEQ ID NO: 72877 - RNA, 22 nt, Artificial Sequence
  Synthetic
ccacauuguguaaaaggggcag

SEQ ID NO: 72878 - RNA, 23 nt, Artificial Sequence
  Synthetic
  misc_feature (1)..(1): n is a, c, g, or u
nccacauuguguaaaaggggcag

SEQ ID NO: 72879 - RNA, 24 nt, Artificial Sequence
  Synthetic
  misc_feature (2)..(2): n is a, c, g, or u
anccacauuguguaaaaggggcag

SEQ ID NO: 72880 - RNA, 18 nt, Artificial Sequence
  Synthetic
gcaggauccaguuggcag

SEQ ID NO: 72881 - RNA, 19 nt, Artificial Sequence
  Synthetic
cgcaggauccaguuggcag

SEQ ID NO: 72882 - RNA, 20 nt, Artificial Sequence
  Synthetic
ucgcaggauccaguuggcag

SEQ ID NO: 72883 - RNA, 21 nt, Artificial Sequence
  Synthetic
cucgcaggauccaguuggcag

SEQ ID NO: 72884 - RNA, 22 nt, Artificial Sequence
  Synthetic
ccucgcaggauccaguuggcag

SEQ ID NO: 72885 - RNA, 23 nt, Artificial Sequence
  Synthetic
cccucgcaggauccaguuggcag

SEQ ID NO: 72886 - RNA, 24 nt, Artificial Sequence
  Synthetic
ucccucgcaggauccaguuggcag

SEQ ID NO: 72887 - RNA, 18 nt, Artificial Sequence
  Synthetic
ggugcaaaugaauaucag

SEQ ID NO: 72888 - RNA, 19 nt, Artificial Sequence
  Synthetic
uggugcaaaugaauaucag

SEQ ID NO: 72889 - RNA, 20 nt, Artificial Sequence
  Synthetic
cuggugcaaaugaauaucag

SEQ ID NO: 72890 - RNA, 21 nt, Artificial Sequence
  Synthetic
ccuggugcaaaugaauaucag

SEQ ID NO: 72891 - RNA, 22 nt, Artificial Sequence
  Synthetic
uccuggugcaaaugaauaucag

SEQ ID NO: 72892 - RNA, 23 nt, Artificial Sequence
  Synthetic
guccuggugcaaaugaauaucag

SEQ ID NO: 72893 - RNA, 24 nt, Artificial Sequence
  Synthetic
uguccuggugcaaaugaauaucag

SEQ ID NO: 72894 - RNA, 18 nt, Artificial Sequence
  Synthetic
aggcaucccgauacagag

SEQ ID NO: 72895 - RNA, 19 nt, Artificial Sequence
  Synthetic
aaggcaucccgauacagag

SEQ ID NO: 72896 - RNA, 20 nt, Artificial Sequence
  Synthetic
uaaggcaucccgauacagag

SEQ ID NO: 72897 - RNA, 21 nt, Artificial Sequence
  Synthetic
cuaaggcaucccgauacagag

SEQ ID NO: 72898 - RNA, 22 nt, Artificial Sequence
  Synthetic
ucuaaggcaucccgauacagag

SEQ ID NO: 72899 - RNA, 23 nt, Artificial Sequence
  Synthetic
uucuaaggcaucccgauacagag

SEQ ID NO: 72900 - RNA, 24 nt, Artificial Sequence
  Synthetic
auucuaaggcaucccgauacagag

SEQ ID NO: 72901 - RNA, 18 nt, Artificial Sequence
  Synthetic
agagaugauuaggcagag

SEQ ID NO: 72902 - RNA, 19 nt, Artificial Sequence
  Synthetic
aagagaugauuaggcagag

SEQ ID NO: 72903 - RNA, 20 nt, Artificial Sequence
  Synthetic
caagagaugauuaggcagag

SEQ ID NO: 72904 - RNA, 21 nt, Artificial Sequence
  Synthetic
acaagagaugauuaggcagag

SEQ ID NO: 72905 - RNA, 22 nt, Artificial Sequence
  Synthetic
aacaagagaugauuaggcagag

SEQ ID NO: 72906 - RNA, 23 nt, Artificial Sequence
  Synthetic
gaacaagagaugauuaggcagag

SEQ ID NO: 72907 - RNA, 24 nt, Artificial Sequence
  Synthetic
ugaacaagagaugauuaggcagag

SEQ ID NO: 72908 - RNA, 18 nt, Artificial Sequence
  Synthetic
uccaugcgacgugcagag

SEQ ID NO: 72909 - RNA, 19 nt, Artificial Sequence
  Synthetic
cuccaugcgacgugcagag

SEQ ID NO: 72910 - RNA, 20 nt, Artificial Sequence
  Synthetic
ucuccaugcgacgugcagag

SEQ ID NO: 72911 - RNA, 21 nt, Artificial Sequence
  Synthetic
gucuccaugcgacgugcagag

SEQ ID NO: 72912 - RNA, 22 nt, Artificial Sequence
  Synthetic
ggucuccaugcgacgugcagag

SEQ ID NO: 72913 - RNA, 23 nt, Artificial Sequence
  Synthetic
uggucuccaugcgacgugcagag

SEQ ID NO: 72914 - RNA, 24 nt, Artificial Sequence
  Synthetic
guggucuccaugcgacgugcagag

SEQ ID NO: 72915 - RNA, 18 nt, Artificial Sequence
  Synthetic
uguauauuuccgggagag

SEQ ID NO: 72916 - RNA, 19 nt, Artificial Sequence
  Synthetic
auguauauuuccgggagag

SEQ ID NO: 72917 - RNA, 20 nt, Artificial Sequence
  Synthetic
gauguauauuuccgggagag

SEQ ID NO: 72918 - RNA, 21 nt, Artificial Sequence
  Synthetic
  misc_feature (1)..(1): n is a, c, g, or u
ngauguauauuuccgggagag

SEQ ID NO: 72919 - RNA, 22 nt, Artificial Sequence
  Synthetic
  misc_feature (2)..(2): n is a, c, g, or u
angauguauauuuccgggagag

SEQ ID NO: 72920 - RNA, 23 nt, Artificial Sequence
  Synthetic
  misc_feature (3)..(3): n is a, c, g, or u
aangauguauauuuccgggagag

SEQ ID NO: 72921 - RNA, 24 nt, Artificial Sequence
  Synthetic
  misc_feature (4)..(4): n is a, c, g, or u
aaangauguauauuuccgggagag

SEQ ID NO: 72922 - RNA, 18 nt, Artificial Sequence
  Synthetic
  misc_feature (13)..(13): n is a, c, g, or u
cguugacauugcngagag

SEQ ID NO: 72923 - RNA, 19 nt, Artificial Sequence
  Synthetic
  misc_feature (14)..(14): n is a, c, g, or u
ucguugacauugcngagag

SEQ ID NO: 72924 - RNA, 20 nt, Artificial Sequence
  Synthetic
  misc_feature (15)..(15): n is a, c, g, or u
gucguugacauugcngagag

SEQ ID NO: 72925 - RNA, 21 nt, Artificial Sequence
  Synthetic
  misc_feature (16)..(16): n is a, c, g, or u
ggucguugacauugcngagag

SEQ ID NO: 72926 - RNA, 22 nt, Artificial Sequence
  Synthetic
  misc_feature (17)..(17): n is a, c, g, or u
cggucguugacauugcngagag

SEQ ID NO: 72927 - RNA, 23 nt, Artificial Sequence
  Synthetic
  misc_feature (18)..(18): n is a, c, g, or u
ucggucguugacauugcngagag

SEQ ID NO: 72928 - RNA, 24 nt, Artificial Sequence
  Synthetic
  misc_feature (19)..(19): n is a, c, g, or u
gucggucguugacauugcngagag

SEQ ID NO: 72929 - RNA, 18 nt, Artificial Sequence
  Synthetic
  misc_feature (3)..(3): n is a, c, g, or u
  misc_feature (12)..(12): n is a, c, g, or u
ggnaaauauuunguagag

SEQ ID NO: 72930 - RNA, 19 nt, Artificial Sequence
  Synthetic
  misc_feature (4)..(4): n is a, c, g, or u
  misc_feature (13)..(13): n is a, c, g, or u
gggnaaauauuunguagag

SEQ ID NO: 72931 - RNA, 20 nt, Artificial Sequence
  Synthetic
  misc_feature (5)..(5): n is a, c, g, or u
  misc_feature (14)..(14): n is a, c, g, or u
ggggnaaauauuunguagag

SEQ ID NO: 72932 - RNA, 21 nt, Artificial Sequence
  Synthetic
  misc_feature (6)..(6): n is a, c, g, or u
  misc_feature (15)..(15): n is a, c, g, or u
aggggnaaauauuunguagag

SEQ ID NO: 72933 - RNA, 22 nt, Artificial Sequence
  Synthetic
  misc_feature (7)..(7): n is a, c, g, or u
  misc_feature (16)..(16): n is a, c, g, or u
uaggggnaaauauuunguagag

SEQ ID NO: 72934 - RNA, 23 nt, Artificial Sequence
  Synthetic
  misc_feature (8)..(8): n is a, c, g, or u
  misc_feature (17)..(17): n is a, c, g, or u
cuaggggnaaauauuunguagag

SEQ ID NO: 72935 - RNA, 24 nt, Artificial Sequence
  Synthetic
  misc_feature (9)..(9): n is a, c, g, or u
  misc_feature (18)..(18): n is a, c, g, or u
ucuaggggnaaauauuunguagag

SEQ ID NO: 72936 - RNA, 18 nt, Artificial Sequence
  Synthetic
augauccuggaauuagag

SEQ ID NO: 72937 - RNA, 19 nt, Artificial Sequence
  Synthetic
gaugauccuggaauuagag

SEQ ID NO: 72938 - RNA, 20 nt, Artificial Sequence
  Synthetic
ugaugauccuggaauuagag

SEQ ID NO: 72939 - RNA, 21 nt, Artificial Sequence
  Synthetic
uugaugauccuggaauuagag

SEQ ID NO: 72940 - RNA, 22 nt, Artificial Sequence
  Synthetic
guugaugauccuggaauuagag

SEQ ID NO: 72941 - RNA, 23 nt, Artificial Sequence
  Synthetic
gguugaugauccuggaauuagag

SEQ ID NO: 72942 - RNA, 24 nt, Artificial Sequence
  Synthetic
ugguugaugauccuggaauuagag

SEQ ID NO: 72943 - RNA, 18 nt, Artificial Sequence
  Synthetic
ucagaaggcaaaaacgag

SEQ ID NO: 72944 - RNA, 19 nt, Artificial Sequence
  Synthetic
gucagaaggcaaaaacgag

SEQ ID NO: 72945 - RNA, 20 nt, Artificial Sequence
  Synthetic
agucagaaggcaaaaacgag

SEQ ID NO: 72946 - RNA, 21 nt, Artificial Sequence
  Synthetic
aagucagaaggcaaaaacgag

SEQ ID NO: 72947 - RNA, 22 nt, Artificial Sequence
  Synthetic
gaagucagaaggcaaaaacgag

SEQ ID NO: 72948 - RNA, 23 nt, Artificial Sequence
  Synthetic
agaagucagaaggcaaaaacgag

SEQ ID NO: 72949 - RNA, 24 nt, Artificial Sequence
  Synthetic
aagaagucagaaggcaaaaacgag

SEQ ID NO: 72950 - RNA, 18 nt, Artificial Sequence
  Synthetic
ccccgccuguaacacgag

SEQ ID NO: 72951 - RNA, 19 nt, Artificial Sequence
  Synthetic
accccgccuguaacacgag

SEQ ID NO: 72952 - RNA, 20 nt, Artificial Sequence
  Synthetic
aaccccgccuguaacacgag

SEQ ID NO: 72953 - RNA, 18 nt, Artificial Sequence
  Synthetic
agagaaguccaccacgag

SEQ ID NO: 72954 - RNA, 19 nt, Artificial Sequence
  Synthetic
gagagaaguccaccacgag

SEQ ID NO: 72955 - RNA, 20 nt, Artificial Sequence
  Synthetic
ugagagaaguccaccacgag

SEQ ID NO: 72956 - RNA, 21 nt, Artificial Sequence
  Synthetic
uugagagaaguccaccacgag

SEQ ID NO: 72957 - RNA, 22 nt, Artificial Sequence
  Synthetic
auugagagaaguccaccacgag

SEQ ID NO: 72958 - RNA, 23 nt, Artificial Sequence
  Synthetic
aauugagagaaguccaccacgag

SEQ ID NO: 72959 - RNA, 24 nt, Artificial Sequence
  Synthetic
aaauugagagaaguccaccacgag

SEQ ID NO: 72960 - RNA, 18 nt, Artificial Sequence
  Synthetic
cuccagaccugcugcgag

SEQ ID NO: 72961 - RNA, 19 nt, Artificial Sequence
  Synthetic
gcuccagaccugcugcgag

SEQ ID NO: 72962 - RNA, 20 nt, Artificial Sequence
  Synthetic
  misc_feature (1)..(1): n is a, c, g, or u
ngcuccagaccugcugcgag

SEQ ID NO: 72963 - RNA, 21 nt, Artificial Sequence
  Synthetic
  misc_feature (2)..(2): n is a, c, g, or u
ungcuccagaccugcugcgag

SEQ ID NO: 72964 - RNA, 22 nt, Artificial Sequence
  Synthetic
  misc_feature (3)..(3): n is a, c, g, or u
uungcuccagaccugcugcgag

SEQ ID NO: 72965 - RNA, 23 nt, Artificial Sequence
  Synthetic
  misc_feature (4)..(4): n is a, c, g, or u
uuungcuccagaccugcugcgag

SEQ ID NO: 72966 - RNA, 24 nt, Artificial Sequence
  Synthetic
  misc_feature (5)..(5): n is a, c, g, or u
guuungcuccagaccugcugcgag

SEQ ID NO: 72967 - RNA, 18 nt, Artificial Sequence
  Synthetic
gagaucuucgucugcgag

SEQ ID NO: 72968 - RNA, 19 nt, Artificial Sequence
  Synthetic
ugagaucuucgucugcgag

SEQ ID NO: 72969 - RNA, 20 nt, Artificial Sequence
  Synthetic
uugagaucuucgucugcgag

SEQ ID NO: 72970 - RNA, 18 nt, Artificial Sequence
  Synthetic
auucuucccccauucgag

SEQ ID NO: 72971 - RNA, 19 nt, Artificial Sequence
  Synthetic
gauucuucccccauucgag

SEQ ID NO: 72972 - RNA, 20 nt, Artificial Sequence
  Synthetic
ugauucuucccccauucgag

SEQ ID NO: 72973 - RNA, 21 nt, Artificial Sequence
  Synthetic
augauucuucccccauucgag

SEQ ID NO: 72974 - RNA, 22 nt, Artificial Sequence
  Synthetic
aaugauucuucccccauucgag

SEQ ID NO: 72975 - RNA, 23 nt, Artificial Sequence
  Synthetic
gaaugauucuucccccauucgag

SEQ ID NO: 72976 - RNA, 24 nt, Artificial Sequence
  Synthetic
ggaaugauucuucccccauucgag

SEQ ID NO: 72977 - RNA, 18 nt, Artificial Sequence
  Synthetic
gucuauaagcuggaggag

SEQ ID NO: 72978 - RNA, 19 nt, Artificial Sequence
  Synthetic
ggucuauaagcuggaggag

SEQ ID NO: 72979 - RNA, 20 nt, Artificial Sequence
  Synthetic
uggucuauaagcuggaggag

SEQ ID NO: 72980 - RNA, 21 nt, Artificial Sequence
  Synthetic
guggucuauaagcuggaggag

SEQ ID NO: 72981 - RNA, 22 nt, Artificial Sequence
  Synthetic
gguggucuauaagcuggaggag

SEQ ID NO: 72982 - RNA, 23 nt, Artificial Sequence
  Synthetic
ugguggucuauaagcuggaggag

SEQ ID NO: 72983 - RNA, 24 nt, Artificial Sequence
  Synthetic
uugguggucuauaagcuggaggag

SEQ ID NO: 72984 - RNA, 18 nt, Artificial Sequence
  Synthetic
  misc_feature (2)..(2): n is a, c, g, or u
cnggaacggcagacggag

SEQ ID NO: 72985 - RNA, 19 nt, Artificial Sequence
  Synthetic
  misc_feature (3)..(3): n is a, c, g, or u
gcnggaacggcagacggag

SEQ ID NO: 72986 - RNA, 20 nt, Artificial Sequence
  Synthetic
  misc_feature (4)..(4): n is a, c, g, or u
ggcnggaacggcagacggag

SEQ ID NO: 72987 - RNA, 21 nt, Artificial Sequence
  Synthetic
  misc_feature (5)..(5): n is a, c, g, or u
cggcnggaacggcagacggag

SEQ ID NO: 72988 - RNA, 22 nt, Artificial Sequence
  Synthetic
  misc_feature (6)..(6): n is a, c, g, or u
ucggcnggaacggcagacggag

SEQ ID NO: 72989 - RNA, 23 nt, Artificial Sequence
  Synthetic
  misc_feature (7)..(7): n is a, c, g, or u
gucggcnggaacggcagacggag

SEQ ID NO: 72990 - RNA, 24 nt, Artificial Sequence
  Synthetic
  misc_feature (8)..(8): n is a, c, g, or u
ggucggcnggaacggcagacggag

SEQ ID NO: 72991 - RNA, 18 nt, Artificial Sequence
  Synthetic
aacauugggaagcuggag

SEQ ID NO: 72992 - RNA, 19 nt, Artificial Sequence
  Synthetic
uaacauugggaagcuggag

SEQ ID NO: 72993 - RNA, 20 nt, Artificial Sequence
  Synthetic
cuaacauugggaagcuggag

SEQ ID NO: 72994 - RNA, 21 nt, Artificial Sequence
  Synthetic
acuaacauugggaagcuggag

SEQ ID NO: 72995 - RNA, 22 nt, Artificial Sequence
  Synthetic
uacuaacauugggaagcuggag

SEQ ID NO: 72996 - RNA, 23 nt, Artificial Sequence
  Synthetic
auacuaacauugggaagcuggag

SEQ ID NO: 72997 - RNA, 24 nt, Artificial Sequence
  Synthetic
aauacuaacauugggaagcuggag

SEQ ID NO: 72998 - RNA, 18 nt, Artificial Sequence
  Synthetic
gacugccgauugguggag

SEQ ID NO: 72999 - RNA, 19 nt, Artificial Sequence
  Synthetic
ugacugccgauugguggag

SEQ ID NO: 73000 - RNA, 20 nt, Artificial Sequence
  Synthetic
cugacugccgauugguggag

SEQ ID NO: 73001 - RNA, 21 nt, Artificial Sequence
  Synthetic
ccugacugccgauugguggag

SEQ ID NO: 73002 - RNA, 22 nt, Artificial Sequence
  Synthetic
uccugacugccgauugguggag

SEQ ID NO: 73003 - RNA, 23 nt, Artificial Sequence
  Synthetic
uuccugacugccgauugguggag

SEQ ID NO: 73004 - RNA, 24 nt, Artificial Sequence
  Synthetic
cuuccugacugccgauugguggag

SEQ ID NO: 73005 - RNA, 18 nt, Artificial Sequence
  Synthetic
  misc_feature (13)..(13): n is a, c, g, or u
guuggugaguganuggag

SEQ ID NO: 73006 - RNA, 19 nt, Artificial Sequence
  Synthetic
  misc_feature (14)..(14): n is a, c, g, or u
gguuggugaguganuggag

SEQ ID NO: 73007 - RNA, 20 nt, Artificial Sequence
  Synthetic
  misc_feature (15)..(15): n is a, c, g, or u
agguuggugaguganuggag

SEQ ID NO: 73008 - RNA, 21 nt, Artificial Sequence
  Synthetic
  misc_feature (16)..(16): n is a, c, g, or u
gagguuggugaguganuggag

SEQ ID NO: 73009 - RNA, 22 nt, Artificial Sequence
  Synthetic
  misc_feature (17)..(17): n is a, c, g, or u
agagguuggugaguganuggag

SEQ ID NO: 73010 - RNA, 23 nt, Artificial Sequence
  Synthetic
  misc_feature (18)..(18): n is a, c, g, or u
aagagguuggugaguganuggag

SEQ ID NO: 73011 - RNA, 24 nt, Artificial Sequence
  Synthetic
  misc_feature (19)..(19): n is a, c, g, or u
caagagguuggugaguganuggag

SEQ ID NO: 73012 - RNA, 18 nt, Artificial Sequence
  Synthetic
agccaggacaaauuggag

SEQ ID NO: 73013 - RNA, 19 nt, Artificial Sequence
  Synthetic
uagccaggacaaauuggag

SEQ ID NO: 73014 - RNA, 20 nt, Artificial Sequence
  Synthetic
auagccaggacaaauuggag

SEQ ID NO: 73015 - RNA, 21 nt, Artificial Sequence
  Synthetic
gauagccaggacaaauuggag

SEQ ID NO: 73016 - RNA, 22 nt, Artificial Sequence
  Synthetic
cgauagccaggacaaauuggag

SEQ ID NO: 73017 - RNA, 23 nt, Artificial Sequence
  Synthetic
gcgauagccaggacaaauuggag

SEQ ID NO: 73018 - RNA, 24 nt, Artificial Sequence
  Synthetic
agcgauagccaggacaaauuggag

SEQ ID NO: 73019 - RNA, 18 nt, Artificial Sequence
  Synthetic
uuugaacagcaacaugag

SEQ ID NO: 73020 - RNA, 19 nt, Artificial Sequence
  Synthetic
uuuugaacagcaacaugag

SEQ ID NO: 73021 - RNA, 20 nt, Artificial Sequence
  Synthetic
guuuugaacagcaacaugag

SEQ ID NO: 73022 - RNA, 21 nt, Artificial Sequence
  Synthetic
gguuuugaacagcaacaugag

SEQ ID NO: 73023 - RNA, 22 nt, Artificial Sequence
  Synthetic
agguuuugaacagcaacaugag

SEQ ID NO: 73024 - RNA, 23 nt, Artificial Sequence
  Synthetic
aagguuuugaacagcaacaugag

SEQ ID NO: 73025 - RNA, 24 nt, Artificial Sequence
  Synthetic
gaagguuuugaacagcaacaugag

SEQ ID NO: 73026 - RNA, 18 nt, Artificial Sequence
  Synthetic
gaagauugacgagaugag

SEQ ID NO: 73027 - RNA, 19 nt, Artificial Sequence
  Synthetic
agaagauugacgagaugag

SEQ ID NO: 73028 - RNA, 20 nt, Artificial Sequence
  Synthetic
gagaagauugacgagaugag

SEQ ID NO: 73029 - RNA, 21 nt, Artificial Sequence
  Synthetic
cgagaagauugacgagaugag

SEQ ID NO: 73030 - RNA, 22 nt, Artificial Sequence
  Synthetic
ucgagaagauugacgagaugag

SEQ ID NO: 73031 - RNA, 23 nt, Artificial Sequence
  Synthetic
cucgagaagauugacgagaugag

SEQ ID NO: 73032 - RNA, 24 nt, Artificial Sequence
  Synthetic
ccucgagaagauugacgagaugag

SEQ ID NO: 73033 - RNA, 18 nt, Artificial Sequence
  Synthetic
uggcacuaguaaacugag

SEQ ID NO: 73034 - RNA, 19 nt, Artificial Sequence
  Synthetic
auggcacuaguaaacugag

SEQ ID NO: 73035 - RNA, 20 nt, Artificial Sequence
  Synthetic
aauggcacuaguaaacugag

SEQ ID NO: 73036 - RNA, 21 nt, Artificial Sequence
  Synthetic
aaauggcacuaguaaacugag

SEQ ID NO: 73037 - RNA, 22 nt, Artificial Sequence
  Synthetic
caaauggcacuaguaaacugag

SEQ ID NO: 73038 - RNA, 23 nt, Artificial Sequence
  Synthetic
acaaauggcacuaguaaacugag

SEQ ID NO: 73039 - RNA, 24 nt, Artificial Sequence
  Synthetic
aacaaauggcacuaguaaacugag

SEQ ID NO: 73040 - RNA, 18 nt, Artificial Sequence
  Synthetic
uucucuuccaaaagugag

SEQ ID NO: 73041 - RNA, 19 nt, Artificial Sequence
  Synthetic
uuucucuuccaaaagugag

SEQ ID NO: 73042 - RNA, 20 nt, Artificial Sequence
  Synthetic
guuucucuuccaaaagugag

SEQ ID NO: 73043 - RNA, 21 nt, Artificial Sequence
  Synthetic
gguuucucuuccaaaagugag

SEQ ID NO: 73044 - RNA, 22 nt, Artificial Sequence
  Synthetic
cgguuucucuuccaaaagugag

SEQ ID NO: 73045 - RNA, 23 nt, Artificial Sequence
  Synthetic
acgguuucucuuccaaaagugag

SEQ ID NO: 73046 - RNA, 24 nt, Artificial Sequence
  Synthetic
gacgguuucucuuccaaaagugag

SEQ ID NO: 73047 - RNA, 18 nt, Artificial Sequence
  Synthetic
aauuucccaccuugugag

SEQ ID NO: 73048 - RNA, 19 nt, Artificial Sequence
  Synthetic
aaauuucccaccuugugag

SEQ ID NO: 73049 - RNA, 20 nt, Artificial Sequence
  Synthetic
aaaauuucccaccuugugag

SEQ ID NO: 73050 - RNA, 21 nt, Artificial Sequence
  Synthetic
uaaaauuucccaccuugugag

SEQ ID NO: 73051 - RNA, 22 nt, Artificial Sequence
  Synthetic
guaaaauuucccaccuugugag

SEQ ID NO: 73052 - RNA, 23 nt, Artificial Sequence
  Synthetic
cguaaaauuucccaccuugugag

SEQ ID NO: 73053 - RNA, 24 nt, Artificial Sequence
  Synthetic
ccguaaaauuucccaccuugugag

SEQ ID NO: 73054 - RNA, 18 nt, Artificial Sequence
  Synthetic
uuuuuagcaugccuugag

SEQ ID NO: 73055 - RNA, 19 nt, Artificial Sequence
  Synthetic
guuuuuagcaugccuugag

SEQ ID NO: 73056 - RNA, 20 nt, Artificial Sequence
  Synthetic
uguuuuuagcaugccuugag

SEQ ID NO: 73057 - RNA, 21 nt, Artificial Sequence
  Synthetic
auguuuuuagcaugccuugag

SEQ ID NO: 73058 - RNA, 22 nt, Artificial Sequence
  Synthetic
aauguuuuuagcaugccuugag

SEQ ID NO: 73059 - RNA, 23 nt, Artificial Sequence
  Synthetic
caauguuuuuagcaugccuugag

SEQ ID NO: 73060 - RNA, 24 nt, Artificial Sequence
  Synthetic
gcaauguuuuuagcaugccuugag

SEQ ID NO: 73061 - RNA, 18 nt, Artificial Sequence
  Synthetic
acauagagguuccuugag

SEQ ID NO: 73062 - RNA, 19 nt, Artificial Sequence
  Synthetic
aacauagagguuccuugag

SEQ ID NO: 73063 - RNA, 20 nt, Artificial Sequence
  Synthetic
aaacauagagguuccuugag

SEQ ID NO: 73064 - RNA, 21 nt, Artificial Sequence
  Synthetic
gaaacauagagguuccuugag

SEQ ID NO: 73065 - RNA, 22 nt, Artificial Sequence
  Synthetic
ggaaacauagagguuccuugag

SEQ ID NO: 73066 - RNA, 23 nt, Artificial Sequence
  Synthetic
gggaaacauagagguuccuugag

SEQ ID NO: 73067 - RNA, 24 nt, Artificial Sequence
  Synthetic
agggaaacauagagguuccuugag

SEQ ID NO: 73068 - RNA, 18 nt, Artificial Sequence
  Synthetic
agacacauccagcgauag

SEQ ID NO: 73069 - RNA, 19 nt, Artificial Sequence
  Synthetic
cagacacauccagcgauag

SEQ ID NO: 73070 - RNA, 20 nt, Artificial Sequence
  Synthetic
gcagacacauccagcgauag

SEQ ID NO: 73071 - RNA, 21 nt, Artificial Sequence
  Synthetic
cgcagacacauccagcgauag

SEQ ID NO: 73072 - RNA, 22 nt, Artificial Sequence
  Synthetic
ccgcagacacauccagcgauag

SEQ ID NO: 73073 - RNA, 23 nt, Artificial Sequence
  Synthetic
gccgcagacacauccagcgauag

SEQ ID NO: 73074 - RNA, 24 nt, Artificial Sequence
  Synthetic
cgccgcagacacauccagcgauag

SEQ ID NO: 73075 - RNA, 18 nt, Artificial Sequence
  Synthetic
ggcaacauaccuugauag

SEQ ID NO: 73076 - RNA, 19 nt, Artificial Sequence
  Synthetic
gggcaacauaccuugauag

SEQ ID NO: 73077 - RNA, 20 nt, Artificial Sequence
  Synthetic
cgggcaacauaccuugauag

SEQ ID NO: 73078 - RNA, 21 nt, Artificial Sequence
  Synthetic
acgggcaacauaccuugauag

SEQ ID NO: 73079 - RNA, 22 nt, Artificial Sequence
  Synthetic
aacgggcaacauaccuugauag

SEQ ID NO: 73080 - RNA, 23 nt, Artificial Sequence
  Synthetic
aaacgggcaacauaccuugauag

SEQ ID NO: 73081 - RNA, 24 nt, Artificial Sequence
  Synthetic
caaacgggcaacauaccuugauag

SEQ ID NO: 73082 - RNA, 18 nt, Artificial Sequence
  Synthetic
gauuaaagacagguauag

SEQ ID NO: 73083 - RNA, 19 nt, Artificial Sequence
  Synthetic
ggauuaaagacagguauag

SEQ ID NO: 73084 - RNA, 20 nt, Artificial Sequence
  Synthetic
aggauuaaagacagguauag

SEQ ID NO: 73085 - RNA, 21 nt, Artificial Sequence
  Synthetic
uaggauuaaagacagguauag

SEQ ID NO: 73086 - RNA, 22 nt, Artificial Sequence
  Synthetic
uuaggauuaaagacagguauag

SEQ ID NO: 73087 - RNA, 23 nt, Artificial Sequence
  Synthetic
guuaggauuaaagacagguauag

SEQ ID NO: 73088 - RNA, 24 nt, Artificial Sequence
  Synthetic
aguuaggauuaaagacagguauag

SEQ ID NO: 73089 - RNA, 18 nt, Artificial Sequence
  Synthetic
augccuacagccuccuag

SEQ ID NO: 73090 - RNA, 19 nt, Artificial Sequence
  Synthetic
uaugccuacagccuccuag

SEQ ID NO: 73091 - RNA, 20 nt, Artificial Sequence
  Synthetic
uuaugccuacagccuccuag

SEQ ID NO: 73092 - RNA, 21 nt, Artificial Sequence
  Synthetic
uuuaugccuacagccuccuag

SEQ ID NO: 73093 - RNA, 22 nt, Artificial Sequence
  Synthetic
auuuaugccuacagccuccuag

SEQ ID NO: 73094 - RNA, 23 nt, Artificial Sequence
  Synthetic
aauuuaugccuacagccuccuag

SEQ ID NO: 73095 - RNA, 24 nt, Artificial Sequence
  Synthetic
caauuuaugccuacagccuccuag

SEQ ID NO: 73096 - RNA, 18 nt, Artificial Sequence
  Synthetic
agaugagugaggcaguag

SEQ ID NO: 73097 - RNA, 19 nt, Artificial Sequence
  Synthetic
gagaugagugaggcaguag

SEQ ID NO: 73098 - RNA, 20 nt, Artificial Sequence
  Synthetic
cgagaugagugaggcaguag

SEQ ID NO: 73099 - RNA, 21 nt, Artificial Sequence
  Synthetic
acgagaugagugaggcaguag

SEQ ID NO: 73100 - RNA, 22 nt, Artificial Sequence
  Synthetic
gacgagaugagugaggcaguag

SEQ ID NO: 73101 - RNA, 23 nt, Artificial Sequence
  Synthetic
ugacgagaugagugaggcaguag

SEQ ID NO: 73102 - RNA, 24 nt, Artificial Sequence
  Synthetic
uugacgagaugagugaggcaguag

SEQ ID NO: 73103 - RNA, 18 nt, Artificial Sequence
  Synthetic
agcgcugacgggacguag

SEQ ID NO: 73104 - RNA, 19 nt, Artificial Sequence
  Synthetic
cagcgcugacgggacguag

SEQ ID NO: 73105 - RNA, 20 nt, Artificial Sequence
  Synthetic
ucagcgcugacgggacguag

SEQ ID NO: 73106 - RNA, 21 nt, Artificial Sequence
  Synthetic
uucagcgcugacgggacguag

SEQ ID NO: 73107 - RNA, 22 nt, Artificial Sequence
  Synthetic
auucagcgcugacgggacguag

SEQ ID NO: 73108 - RNA, 23 nt, Artificial Sequence
  Synthetic
gauucagcgcugacgggacguag

SEQ ID NO: 73109 - RNA, 24 nt, Artificial Sequence
  Synthetic
ggauucagcgcugacgggacguag

SEQ ID NO: 73110 - RNA, 18 nt, Artificial Sequence
  Synthetic
  misc_feature (3)..(3): n is a, c, g, or u
uuncacccacccagguag

SEQ ID NO: 73111 - RNA, 19 nt, Artificial Sequence
  Synthetic
  misc_feature (4)..(4): n is a, c, g, or u
uuuncacccacccagguag

SEQ ID NO: 73112 - RNA, 20 nt, Artificial Sequence
  Synthetic
  misc_feature (5)..(5): n is a, c, g, or u
auuuncacccacccagguag

SEQ ID NO: 73113 - RNA, 21 nt, Artificial Sequence
  Synthetic
  misc_feature (6)..(6): n is a, c, g, or u
aauuuncacccacccagguag

SEQ ID NO: 73114 - RNA, 22 nt, Artificial Sequence
  Synthetic
  misc_feature (7)..(7): n is a, c, g, or u
aaauuuncacccacccagguag

SEQ ID NO: 73115 - RNA, 23 nt, Artificial Sequence
  Synthetic
  misc_feature (8)..(8): n is a, c, g, or u
caaauuuncacccacccagguag

SEQ ID NO: 73116 - RNA, 24 nt, Artificial Sequence
  Synthetic
  misc_feature (9)..(9): n is a, c, g, or u
ccaaauuuncacccacccagguag

SEQ ID NO: 73117 - RNA, 18 nt, Artificial Sequence
  Synthetic
ugaacaagagaugauuag

SEQ ID NO: 73118 - RNA, 19 nt, Artificial Sequence
  Synthetic
augaacaagagaugauuag

SEQ ID NO: 73119 - RNA, 20 nt, Artificial Sequence
  Synthetic
caugaacaagagaugauuag

SEQ ID NO: 73120 - RNA, 21 nt, Artificial Sequence
  Synthetic
acaugaacaagagaugauuag

SEQ ID NO: 73121 - RNA, 22 nt, Artificial Sequence
  Synthetic
gacaugaacaagagaugauuag

SEQ ID NO: 73122 - RNA, 23 nt, Artificial Sequence
  Synthetic
ggacaugaacaagagaugauuag

SEQ ID NO: 73123 - RNA, 24 nt, Artificial Sequence
  Synthetic
aggacaugaacaagagaugauuag

SEQ ID NO: 73124 - RNA, 18 nt, Artificial Sequence
  Synthetic
aagugaaagccugcuuag

SEQ ID NO: 73125 - RNA, 19 nt, Artificial Sequence
  Synthetic
aaagugaaagccugcuuag

SEQ ID NO: 73126 - RNA, 20 nt, Artificial Sequence
  Synthetic
gaaagugaaagccugcuuag

SEQ ID NO: 73127 - RNA, 21 nt, Artificial Sequence
  Synthetic
agaaagugaaagccugcuuag

SEQ ID NO: 73128 - RNA, 22 nt, Artificial Sequence
  Synthetic
gagaaagugaaagccugcuuag

SEQ ID NO: 73129 - RNA, 23 nt, Artificial Sequence
  Synthetic
cgagaaagugaaagccugcuuag

SEQ ID NO: 73130 - RNA, 24 nt, Artificial Sequence
  Synthetic
gcgagaaagugaaagccugcuuag

SEQ ID NO: 73131 - RNA, 18 nt, Artificial Sequence
  Synthetic
ggaauuagaggacaaacg

SEQ ID NO: 73132 - RNA, 19 nt, Artificial Sequence
  Synthetic
uggaauuagaggacaaacg

SEQ ID NO: 73133 - RNA, 20 nt, Artificial Sequence
  Synthetic
cuggaauuagaggacaaacg

SEQ ID NO: 73134 - RNA, 21 nt, Artificial Sequence
  Synthetic
ccuggaauuagaggacaaacg

SEQ ID NO: 73135 - RNA, 22 nt, Artificial Sequence
  Synthetic
uccuggaauuagaggacaaacg

SEQ ID NO: 73136 - RNA, 23 nt, Artificial Sequence
  Synthetic
auccuggaauuagaggacaaacg

SEQ ID NO: 73137 - RNA, 24 nt, Artificial Sequence
  Synthetic
gauccuggaauuagaggacaaacg

SEQ ID NO: 73138 - RNA, 18 nt, Artificial Sequence
  Synthetic
uauuuccgggagagaacg

SEQ ID NO: 73139 - RNA, 19 nt, Artificial Sequence
  Synthetic
auauuuccgggagagaacg

SEQ ID NO: 73140 - RNA, 20 nt, Artificial Sequence
  Synthetic
uauauuuccgggagagaacg

SEQ ID NO: 73141 - RNA, 21 nt, Artificial Sequence
  Synthetic
guauauuuccgggagagaacg

SEQ ID NO: 73142 - RNA, 22 nt, Artificial Sequence
  Synthetic
uguauauuuccgggagagaacg

SEQ ID NO: 73143 - RNA, 23 nt, Artificial Sequence
  Synthetic
auguauauuuccgggagagaacg

SEQ ID NO: 73144 - RNA, 24 nt, Artificial Sequence
  Synthetic
gauguauauuuccgggagagaacg

SEQ ID NO: 73145 - RNA, 18 nt, Artificial Sequence
  Synthetic
  misc_feature (12)..(12): n is a, c, g, or u
ccguggucggcnggaacg

SEQ ID NO: 73146 - RNA, 19 nt, Artificial Sequence
  Synthetic
  misc_feature (13)..(13): n is a, c, g, or u
cccguggucggcnggaacg

SEQ ID NO: 73147 - RNA, 20 nt, Artificial Sequence
  Synthetic
  misc_feature (14)..(14): n is a, c, g, or u
ccccguggucggcnggaacg

SEQ ID NO: 73148 - RNA, 21 nt, Artificial Sequence
  Synthetic
  misc_feature (15)..(15): n is a, c, g, or u
gccccguggucggcnggaacg

SEQ ID NO: 73149 - RNA, 22 nt, Artificial Sequence
  Synthetic
  misc_feature (16)..(16): n is a, c, g, or u
cgccccguggucggcnggaacg

SEQ ID NO: 73150 - RNA, 23 nt, Artificial Sequence
  Synthetic
  misc_feature (17)..(17): n is a, c, g, or u
gcgccccguggucggcnggaacg

SEQ ID NO: 73151 - RNA, 24 nt, Artificial Sequence
  Synthetic
  misc_feature (18)..(18): n is a, c, g, or u
ugcgccccguggucggcnggaacg

SEQ ID NO: 73152 - RNA, 18 nt, Artificial Sequence
  Synthetic
aaccccgccuguaacacg

SEQ ID NO: 73153 - RNA, 19 nt, Artificial Sequence
  Synthetic
aaaccccgccuguaacacg

SEQ ID NO: 73154 - RNA, 20 nt, Artificial Sequence
  Synthetic
aaaaccccgccuguaacacg

SEQ ID NO: 73155 - RNA, 21 nt, Artificial Sequence
  Synthetic
aaaaaccccgccuguaacacg

SEQ ID NO: 73156 - RNA, 22 nt, Artificial Sequence
  Synthetic
gaaaaaccccgccuguaacacg

SEQ ID NO: 73157 - RNA, 23 nt, Artificial Sequence
  Synthetic
agaaaaaccccgccuguaacacg

SEQ ID NO: 73158 - RNA, 24 nt, Artificial Sequence
  Synthetic
aagaaaaaccccgccuguaacacg

SEQ ID NO: 73159 - RNA, 18 nt, Artificial Sequence
  Synthetic
gaugagaaggcacagacg

SEQ ID NO: 73160 - RNA, 19 nt, Artificial Sequence
  Synthetic
agaugagaaggcacagacg

SEQ ID NO: 73161 - RNA, 20 nt, Artificial Sequence
  Synthetic
cagaugagaaggcacagacg

SEQ ID NO: 73162 - RNA, 21 nt, Artificial Sequence
  Synthetic
gcagaugagaaggcacagacg

SEQ ID NO: 73163 - RNA, 22 nt, Artificial Sequence
  Synthetic
ggcagaugagaaggcacagacg

SEQ ID NO: 73164 - RNA, 23 nt, Artificial Sequence
  Synthetic
cggcagaugagaaggcacagacg

SEQ ID NO: 73165 - RNA, 24 nt, Artificial Sequence
  Synthetic
ccggcagaugagaaggcacagacg

SEQ ID NO: 73166 - RNA, 18 nt, Artificial Sequence
  Synthetic
  misc_feature (5)..(5): n is a, c, g, or u
cggcnggaacggcagacg

SEQ ID NO: 73167 - RNA, 19 nt, Artificial Sequence
  Synthetic
  misc_feature (6)..(6): n is a, c, g, or u
ucggcnggaacggcagacg

SEQ ID NO: 73168 - RNA, 20 nt, Artificial Sequence
  Synthetic
  misc_feature (7)..(7): n is a, c, g, or u
gucggcnggaacggcagacg

SEQ ID NO: 73169 - RNA, 21 nt, Artificial Sequence
  Synthetic
  misc_feature (8)..(8): n is a, c, g, or u
ggucggcnggaacggcagacg

SEQ ID NO: 73170 - RNA, 22 nt, Artificial Sequence
  Synthetic
  misc_feature (9)..(9): n is a, c, g, or u
uggucggcnggaacggcagacg

SEQ ID NO: 73171 - RNA, 23 nt, Artificial Sequence
  Synthetic
  misc_feature (10)..(10): n is a, c, g, or u
guggucggcnggaacggcagacg

SEQ ID NO: 73172 - RNA, 24 nt, Artificial Sequence
  Synthetic
  misc_feature (11)..(11): n is a, c, g, or u
cguggucggcnggaacggcagacg

SEQ ID NO: 73173 - RNA, 18 nt, Artificial Sequence
  Synthetic
gguggucuccaugcgacg

SEQ ID NO: 73174 - RNA, 19 nt, Artificial Sequence
  Synthetic
cgguggucuccaugcgacg

SEQ ID NO: 73175 - RNA, 20 nt, Artificial Sequence
  Synthetic
acgguggucuccaugcgacg

SEQ ID NO: 73176 - RNA, 18 nt, Artificial Sequence
  Synthetic
cagacggagaaggggacg

SEQ ID NO: 73177 - RNA, 19 nt, Artificial Sequence
  Synthetic
gcagacggagaaggggacg

SEQ ID NO: 73178 - RNA, 20 nt, Artificial Sequence
  Synthetic
ggcagacggagaaggggacg

SEQ ID NO: 73179 - RNA, 21 nt, Artificial Sequence
  Synthetic
cggcagacggagaaggggacg

SEQ ID NO: 73180 - RNA, 22 nt, Artificial Sequence
  Synthetic
acggcagacggagaaggggacg

SEQ ID NO: 73181 - RNA, 23 nt, Artificial Sequence
  Synthetic
aacggcagacggagaaggggacg

SEQ ID NO: 73182 - RNA, 24 nt, Artificial Sequence
  Synthetic
gaacggcagacggagaaggggacg

SEQ ID NO: 73183 - RNA, 18 nt, Artificial Sequence
  Synthetic
gcacagacggggagaccg

SEQ ID NO: 73184 - RNA, 19 nt, Artificial Sequence
  Synthetic
ggcacagacggggagaccg

SEQ ID NO: 73185 - RNA, 20 nt, Artificial Sequence
  Synthetic
aggcacagacggggagaccg

SEQ ID NO: 73186 - RNA, 21 nt, Artificial Sequence
  Synthetic
aaggcacagacggggagaccg

SEQ ID NO: 73187 - RNA, 22 nt, Artificial Sequence
  Synthetic
gaaggcacagacggggagaccg

SEQ ID NO: 73188 - RNA, 23 nt, Artificial Sequence
  Synthetic
agaaggcacagacggggagaccg

SEQ ID NO: 73189 - RNA, 24 nt, Artificial Sequence
  Synthetic
gagaaggcacagacggggagaccg

SEQ ID NO: 73190 - RNA, 18 nt, Artificial Sequence
  Synthetic
cccauucgagagggaccg

SEQ ID NO: 73191 - RNA, 19 nt, Artificial Sequence
  Synthetic
ccccauucgagagggaccg

SEQ ID NO: 73192 - RNA, 20 nt, Artificial Sequence
  Synthetic
cccccauucgagagggaccg

SEQ ID NO: 73193 - RNA, 18 nt, Artificial Sequence
  Synthetic
acagugggggaaagcccg

SEQ ID NO: 73194 - RNA, 19 nt, Artificial Sequence
  Synthetic
gacagugggggaaagcccg

SEQ ID NO: 73195 - RNA, 20 nt, Artificial Sequence
  Synthetic
agacagugggggaaagcccg

SEQ ID NO: 73196 - RNA, 21 nt, Artificial Sequence
  Synthetic
cagacagugggggaaagcccg

SEQ ID NO: 73197 - RNA, 22 nt, Artificial Sequence
  Synthetic
ccagacagugggggaaagcccg

SEQ ID NO: 73198 - RNA, 23 nt, Artificial Sequence
  Synthetic
gccagacagugggggaaagcccg

SEQ ID NO: 73199 - RNA, 24 nt, Artificial Sequence
  Synthetic
agccagacagugggggaaagcccg

SEQ ID NO: 73200 - RNA, 18 nt, Artificial Sequence
  Synthetic
uuuccaaucaauaggccg

SEQ ID NO: 73201 - RNA, 19 nt, Artificial Sequence
  Synthetic
cuuuccaaucaauaggccg

SEQ ID NO: 73202 - RNA, 20 nt, Artificial Sequence
  Synthetic
acuuuccaaucaauaggccg

SEQ ID NO: 73203 - RNA, 21 nt, Artificial Sequence
  Synthetic
uacuuuccaaucaauaggccg

SEQ ID NO: 73204 - RNA, 22 nt, Artificial Sequence
  Synthetic
auacuuuccaaucaauaggccg

SEQ ID NO: 73205 - RNA, 23 nt, Artificial Sequence
  Synthetic
cauacuuuccaaucaauaggccg

SEQ ID NO: 73206 - RNA, 24 nt, Artificial Sequence
  Synthetic
acauacuuuccaaucaauaggccg

SEQ ID NO: 73207 - RNA, 18 nt, Artificial Sequence
  Synthetic
  misc_feature (7)..(7): n is a, c, g, or u
cagaccnggccguugccg

SEQ ID NO: 73208 - RNA, 19 nt, Artificial Sequence
  Synthetic
  misc_feature (8)..(8): n is a, c, g, or u
acagaccnggccguugccg

SEQ ID NO: 73209 - RNA, 20 nt, Artificial Sequence
  Synthetic
  misc_feature (9)..(9): n is a, c, g, or u
cacagaccnggccguugccg

SEQ ID NO: 73210 - RNA, 21 nt, Artificial Sequence
  Synthetic
  misc_feature (10)..(10): n is a, c, g, or u
gcacagaccnggccguugccg

SEQ ID NO: 73211 - RNA, 22 nt, Artificial Sequence
  Synthetic
  misc_feature (11)..(11): n is a, c, g, or u
ggcacagaccnggccguugccg

SEQ ID NO: 73212 - RNA, 23 nt, Artificial Sequence
  Synthetic
  misc_feature (12)..(12): n is a, c, g, or u
uggcacagaccnggccguugccg

SEQ ID NO: 73213 - RNA, 24 nt, Artificial Sequence
  Synthetic
  misc_feature (13)..(13): n is a, c, g, or u
uuggcacagaccnggccguugccg

SEQ ID NO: 73214 - RNA, 18 nt, Artificial Sequence
  Synthetic
caccccaaaaggccuccg

SEQ ID NO: 73215 - RNA, 19 nt, Artificial Sequence
  Synthetic
ccaccccaaaaggccuccg

SEQ ID NO: 73216 - RNA, 20 nt, Artificial Sequence
  Synthetic
uccaccccaaaaggccuccg

SEQ ID NO: 73217 - RNA, 21 nt, Artificial Sequence
  Synthetic
cuccaccccaaaaggccuccg

SEQ ID NO: 73218 - RNA, 22 nt, Artificial Sequence
  Synthetic
gcuccaccccaaaaggccuccg

SEQ ID NO: 73219 - RNA, 23 nt, Artificial Sequence
  Synthetic
ggcuccaccccaaaaggccuccg

SEQ ID NO: 73220 - RNA, 24 nt, Artificial Sequence
  Synthetic
gggcuccaccccaaaaggccuccg

SEQ ID NO: 73221 - RNA, 18 nt, Artificial Sequence
  Synthetic
auacaagugcaauuuccg

SEQ ID NO: 73222 - RNA, 19 nt, Artificial Sequence
  Synthetic
aauacaagugcaauuuccg

SEQ ID NO: 73223 - RNA, 20 nt, Artificial Sequence
  Synthetic
gaauacaagugcaauuuccg

SEQ ID NO: 73224 - RNA, 21 nt, Artificial Sequence
  Synthetic
ggaauacaagugcaauuuccg

SEQ ID NO: 73225 - RNA, 22 nt, Artificial Sequence
  Synthetic
gggaauacaagugcaauuuccg

SEQ ID NO: 73226 - RNA, 23 nt, Artificial Sequence
  Synthetic
ugggaauacaagugcaauuuccg

SEQ ID NO: 73227 - RNA, 24 nt, Artificial Sequence
  Synthetic
augggaauacaagugcaauuuccg

SEQ ID NO: 73228 - RNA, 18 nt, Artificial Sequence
  Synthetic
  misc_feature (4)..(4): n is a, c, g, or u
aaangauguauauuuccg

SEQ ID NO: 73229 - RNA, 19 nt, Artificial Sequence
  Synthetic
  misc_feature (5)..(5): n is a, c, g, or u
gaaangauguauauuuccg

SEQ ID NO: 73230 - RNA, 20 nt, Artificial Sequence
  Synthetic
  misc_feature (6)..(6): n is a, c, g, or u
ggaaangauguauauuuccg

SEQ ID NO: 73231 - RNA, 21 nt, Artificial Sequence
  Synthetic
  misc_feature (7)..(7): n is a, c, g, or u
uggaaangauguauauuuccg

SEQ ID NO: 73232 - RNA, 22 nt, Artificial Sequence
  Synthetic
  misc_feature (8)..(8): n is a, c, g, or u
auggaaangauguauauuuccg

SEQ ID NO: 73233 - RNA, 23 nt, Artificial Sequence
  Synthetic
  misc_feature (9)..(9): n is a, c, g, or u
cauggaaangauguauauuuccg

SEQ ID NO: 73234 - RNA, 24 nt, Artificial Sequence
  Synthetic
  misc_feature (10)..(10): n is a, c, g, or u
ccauggaaangauguauauuuccg

SEQ ID NO: 73235 - RNA, 18 nt, Artificial Sequence
  Synthetic
cugcgagcaaaacaagcg

SEQ ID NO: 73236 - RNA, 19 nt, Artificial Sequence
  Synthetic
gcugcgagcaaaacaagcg

SEQ ID NO: 73237 - RNA, 20 nt, Artificial Sequence
  Synthetic
ugcugcgagcaaaacaagcg

SEQ ID NO: 73238 - RNA, 21 nt, Artificial Sequence
  Synthetic
cugcugcgagcaaaacaagcg

SEQ ID NO: 73239 - RNA, 22 nt, Artificial Sequence
  Synthetic
ccugcugcgagcaaaacaagcg

SEQ ID NO: 73240 - RNA, 23 nt, Artificial Sequence
  Synthetic
accugcugcgagcaaaacaagcg

SEQ ID NO: 73241 - RNA, 24 nt, Artificial Sequence
  Synthetic
gaccugcugcgagcaaaacaagcg

SEQ ID NO: 73242 - RNA, 18 nt, Artificial Sequence
  Synthetic
acagacggggagaccgcg

SEQ ID NO: 73243 - RNA, 19 nt, Artificial Sequence
  Synthetic
cacagacggggagaccgcg

SEQ ID NO: 73244 - RNA, 20 nt, Artificial Sequence
  Synthetic
gcacagacggggagaccgcg

SEQ ID NO: 73245 - RNA, 21 nt, Artificial Sequence
  Synthetic
ggcacagacggggagaccgcg

SEQ ID NO: 73246 - RNA, 22 nt, Artificial Sequence
  Synthetic
aggcacagacggggagaccgcg

SEQ ID NO: 73247 - RNA, 23 nt, Artificial Sequence
  Synthetic
aaggcacagacggggagaccgcg

SEQ ID NO: 73248 - RNA, 24 nt, Artificial Sequence
  Synthetic
gaaggcacagacggggagaccgcg

SEQ ID NO: 73249 - RNA, 18 nt, Artificial Sequence
  Synthetic
aucuucgucugcgaggcg

SEQ ID NO: 73250 - RNA, 19 nt, Artificial Sequence
  Synthetic
gaucuucgucugcgaggcg

SEQ ID NO: 73251 - RNA, 20 nt, Artificial Sequence
  Synthetic
agaucuucgucugcgaggcg

SEQ ID NO: 73252 - RNA, 18 nt, Artificial Sequence
  Synthetic
aucuucugcgacgcggcg

SEQ ID NO: 73253 - RNA, 19 nt, Artificial Sequence
  Synthetic
gaucuucugcgacgcggcg

SEQ ID NO: 73254 - RNA, 20 nt, Artificial Sequence
  Synthetic
agaucuucugcgacgcggcg

SEQ ID NO: 73255 - RNA, 18 nt, Artificial Sequence
  Synthetic
aggccuuguaaguuggcg

SEQ ID NO: 73256 - RNA, 19 nt, Artificial Sequence
  Synthetic
aaggccuuguaaguuggcg

SEQ ID NO: 73257 - RNA, 20 nt, Artificial Sequence
  Synthetic
aaaggccuuguaaguuggcg

SEQ ID NO: 73258 - RNA, 21 nt, Artificial Sequence
  Synthetic
gaaaggccuuguaaguuggcg

SEQ ID NO: 73259 - RNA, 22 nt, Artificial Sequence
  Synthetic
agaaaggccuuguaaguuggcg

SEQ ID NO: 73260 - RNA, 23 nt, Artificial Sequence
  Synthetic
cagaaaggccuuguaaguuggcg

SEQ ID NO: 73261 - RNA, 24 nt, Artificial Sequence
  Synthetic
acagaaaggccuuguaaguuggcg

SEQ ID NO: 73262 - RNA, 18 nt, Artificial Sequence
  Synthetic
  misc_feature (1)..(1): n is a, c, g, or u
ngcuccagaccugcugcg

SEQ ID NO: 73263 - RNA, 19 nt, Artificial Sequence
  Synthetic
  misc_feature (2)..(2): n is a, c, g, or u
ungcuccagaccugcugcg

SEQ ID NO: 73264 - RNA, 20 nt, Artificial Sequence
  Synthetic
  misc_feature (3)..(3): n is a, c, g, or u
uungcuccagaccugcugcg

SEQ ID NO: 73265 - RNA, 21 nt, Artificial Sequence
  Synthetic
  misc_feature (4)..(4): n is a, c, g, or u
uuungcuccagaccugcugcg

SEQ ID NO: 73266 - RNA, 22 nt, Artificial Sequence
  Synthetic
  misc_feature (5)..(5): n is a, c, g, or u
guuungcuccagaccugcugcg

SEQ ID NO: 73267 - RNA, 23 nt, Artificial Sequence
  Synthetic
  misc_feature (6)..(6): n is a, c, g, or u
aguuungcuccagaccugcugcg

SEQ ID NO: 73268 - RNA, 24 nt, Artificial Sequence
  Synthetic
  misc_feature (7)..(7): n is a, c, g, or u
aaguuungcuccagaccugcugcg

SEQ ID NO: 73269 - RNA, 18 nt, Artificial Sequence
  Synthetic
guuccgcaguauggaucg

SEQ ID NO: 73270 - RNA, 19 nt, Artificial Sequence
  Synthetic
aguuccgcaguauggaucg

SEQ ID NO: 73271 - RNA, 20 nt, Artificial Sequence
  Synthetic
gaguuccgcaguauggaucg

SEQ ID NO: 73272 - RNA, 21 nt, Artificial Sequence
  Synthetic
ggaguuccgcaguauggaucg

SEQ ID NO: 73273 - RNA, 22 nt, Artificial Sequence
  Synthetic
aggaguuccgcaguauggaucg

SEQ ID NO: 73274 - RNA, 23 nt, Artificial Sequence
  Synthetic
uaggaguuccgcaguauggaucg

SEQ ID NO: 73275 - RNA, 24 nt, Artificial Sequence
  Synthetic
cuaggaguuccgcaguauggaucg

SEQ ID NO: 73276 - RNA, 18 nt, Artificial Sequence
  Synthetic
caggguccccaauccucg

SEQ ID NO: 73277 - RNA, 19 nt, Artificial Sequence
  Synthetic
gcaggguccccaauccucg

SEQ ID NO: 73278 - RNA, 20 nt, Artificial Sequence
  Synthetic
ugcaggguccccaauccucg

SEQ ID NO: 73279 - RNA, 18 nt, Artificial Sequence
  Synthetic
uuccuugagcaagagucg

SEQ ID NO: 73280 - RNA, 19 nt, Artificial Sequence
  Synthetic
guuccuugagcaagagucg

SEQ ID NO: 73281 - RNA, 20 nt, Artificial Sequence
  Synthetic
gguuccuugagcaagagucg

SEQ ID NO: 73282 - RNA, 21 nt, Artificial Sequence
  Synthetic
agguuccuugagcaagagucg

SEQ ID NO: 73283 - RNA, 22 nt, Artificial Sequence
  Synthetic
gagguuccuugagcaagagucg

SEQ ID NO: 73284 - RNA, 23 nt, Artificial Sequence
  Synthetic
agagguuccuugagcaagagucg

SEQ ID NO: 73285 - RNA, 24 nt, Artificial Sequence
  Synthetic
uagagguuccuugagcaagagucg

SEQ ID NO: 73286 - RNA, 18 nt, Artificial Sequence
  Synthetic
aggugcgccccguggucg

SEQ ID NO: 73287 - RNA, 19 nt, Artificial Sequence
  Synthetic
gaggugcgccccguggucg

SEQ ID NO: 73288 - RNA, 20 nt, Artificial Sequence
  Synthetic
agaggugcgccccguggucg

SEQ ID NO: 73289 - RNA, 21 nt, Artificial Sequence
  Synthetic
gagaggugcgccccguggucg

SEQ ID NO: 73290 - RNA, 22 nt, Artificial Sequence
  Synthetic
agagaggugcgccccguggucg

SEQ ID NO: 73291 - RNA, 23 nt, Artificial Sequence
  Synthetic
aagagaggugcgccccguggucg

SEQ ID NO: 73292 - RNA, 24 nt, Artificial Sequence
  Synthetic
aaagagaggugcgccccguggucg

SEQ ID NO: 73293 - RNA, 18 nt, Artificial Sequence
  Synthetic
ggauccaacugguggucg

SEQ ID NO: 73294 - RNA, 19 nt, Artificial Sequence
  Synthetic
uggauccaacugguggucg

SEQ ID NO: 73295 - RNA, 20 nt, Artificial Sequence
  Synthetic
cuggauccaacugguggucg

SEQ ID NO: 73296 - RNA, 21 nt, Artificial Sequence
  Synthetic
gcuggauccaacugguggucg

SEQ ID NO: 73297 - RNA, 22 nt, Artificial Sequence
  Synthetic
ugcuggauccaacugguggucg

SEQ ID NO: 73298 - RNA, 23 nt, Artificial Sequence
  Synthetic
augcuggauccaacugguggucg

SEQ ID NO: 73299 - RNA, 24 nt, Artificial Sequence
  Synthetic
aaugcuggauccaacugguggucg

SEQ ID NO: 73300 - RNA, 18 nt, Artificial Sequence
  Synthetic
ugauucuucccccauucg

SEQ ID NO: 73301 - RNA, 19 nt, Artificial Sequence
  Synthetic
augauucuucccccauucg

SEQ ID NO: 73302 - RNA, 20 nt, Artificial Sequence
  Synthetic
aaugauucuucccccauucg

SEQ ID NO: 73303 - RNA, 18 nt, Artificial Sequence
  Synthetic
aggggaccugccucuucg

SEQ ID NO: 73304 - RNA, 19 nt, Artificial Sequence
  Synthetic
uaggggaccugccucuucg

SEQ ID NO: 73305 - RNA, 20 nt, Artificial Sequence
  Synthetic
cuaggggaccugccucuucg

SEQ ID NO: 73306 - RNA, 21 nt, Artificial Sequence
  Synthetic
ucuaggggaccugccucuucg

SEQ ID NO: 73307 - RNA, 22 nt, Artificial Sequence
  Synthetic
uucuaggggaccugccucuucg

SEQ ID NO: 73308 - RNA, 23 nt, Artificial Sequence
  Synthetic
cuucuaggggaccugccucuucg

SEQ ID NO: 73309 - RNA, 24 nt, Artificial Sequence
  Synthetic
ucuucuaggggaccugccucuucg

SEQ ID NO: 73310 - RNA, 18 nt, Artificial Sequence
  Synthetic
aagagucgugcagguucg

SEQ ID NO: 73311 - RNA, 19 nt, Artificial Sequence
  Synthetic
caagagucgugcagguucg

SEQ ID NO: 73312 - RNA, 20 nt, Artificial Sequence
  Synthetic
gcaagagucgugcagguucg

SEQ ID NO: 73313 - RNA, 21 nt, Artificial Sequence
  Synthetic
agcaagagucgugcagguucg

SEQ ID NO: 73314 - RNA, 22 nt, Artificial Sequence
  Synthetic
gagcaagagucgugcagguucg

SEQ ID NO: 73315 - RNA, 23 nt, Artificial Sequence
  Synthetic
ugagcaagagucgugcagguucg

SEQ ID NO: 73316 - RNA, 24 nt, Artificial Sequence
  Synthetic
uugagcaagagucgugcagguucg

SEQ ID NO: 73317 - RNA, 18 nt, Artificial Sequence
  Synthetic
  misc_feature (1)..(1): n is a, c, g, or u
nccacauuguguaaaagg

SEQ ID NO: 73318 - RNA, 19 nt, Artificial Sequence
  Synthetic
  misc_feature (2)..(2): n is a, c, g, or u
anccacauuguguaaaagg

SEQ ID NO: 73319 - RNA, 20 nt, Artificial Sequence
  Synthetic
  misc_feature (3)..(3): n is a, c, g, or u
uanccacauuguguaaaagg

SEQ ID NO: 73320 - RNA, 21 nt, Artificial Sequence
  Synthetic
  misc_feature (4)..(4): n is a, c, g, or u
auanccacauuguguaaaagg

SEQ ID NO: 73321 - RNA, 22 nt, Artificial Sequence
  Synthetic
  misc_feature (5)..(5): n is a, c, g, or u
gauanccacauuguguaaaagg

SEQ ID NO: 73322 - RNA, 23 nt, Artificial Sequence
  Synthetic
  misc_feature (6)..(6): n is a, c, g, or u
ggauanccacauuguguaaaagg

SEQ ID NO: 73323 - RNA, 24 nt, Artificial Sequence
  Synthetic
  misc_feature (7)..(7): n is a, c, g, or u
aggauanccacauuguguaaaagg

SEQ ID NO: 73324 - RNA, 18 nt, Artificial Sequence
  Synthetic
  misc_feature (1)..(1): n is a, c, g, or u
  misc_feature (4)..(4): n is a, c, g, or u
nccnaaagccacccaagg

SEQ ID NO: 73325 - RNA, 19 nt, Artificial Sequence
  Synthetic
  misc_feature (2)..(2): n is a, c, g, or u
  misc_feature (5)..(5): n is a, c, g, or u
gnccnaaagccacccaagg

SEQ ID NO: 73326 - RNA, 20 nt, Artificial Sequence
  Synthetic
  misc_feature (3)..(3): n is a, c, g, or u
  misc_feature (6)..(6): n is a, c, g, or u
ugnccnaaagccacccaagg

SEQ ID NO: 73327 - RNA, 21 nt, Artificial Sequence
  Synthetic
  misc_feature (4)..(4): n is a, c, g, or u
  misc_feature (7)..(7): n is a, c, g, or u
augnccnaaagccacccaagg

SEQ ID NO: 73328 - RNA, 22 nt, Artificial Sequence
  Synthetic
  misc_feature (5)..(5): n is a, c, g, or u
  misc_feature (8)..(8): n is a, c, g, or u
caugnccnaaagccacccaagg

SEQ ID NO: 73329 - RNA, 23 nt, Artificial Sequence
  Synthetic
  misc_feature (6)..(6): n is a, c, g, or u
  misc_feature (9)..(9): n is a, c, g, or u
ccaugnccnaaagccacccaagg

SEQ ID NO: 73330 - RNA, 24 nt, Artificial Sequence
  Synthetic
  misc_feature (7)..(7): n is a, c, g, or u
  misc_feature (10)..(10): n is a, c, g, or u
uccaugnccnaaagccacccaagg

SEQ ID NO: 73331 - RNA, 18 nt, Artificial Sequence
  Synthetic
aggaaagaagucagaagg

SEQ ID NO: 73332 - RNA, 19 nt, Artificial Sequence
  Synthetic
aaggaaagaagucagaagg

SEQ ID NO: 73333 - RNA, 20 nt, Artificial Sequence
  Synthetic
gaaggaaagaagucagaagg

SEQ ID NO: 73334 - RNA, 21 nt, Artificial Sequence
  Synthetic
ugaaggaaagaagucagaagg

SEQ ID NO: 73335 - RNA, 22 nt, Artificial Sequence
  Synthetic
cugaaggaaagaagucagaagg

SEQ ID NO: 73336 - RNA, 23 nt, Artificial Sequence
  Synthetic
acugaaggaaagaagucagaagg

SEQ ID NO: 73337 - RNA, 24 nt, Artificial Sequence
  Synthetic
uacugaaggaaagaagucagaagg

SEQ ID NO: 73338 - RNA, 18 nt, Artificial Sequence
  Synthetic
guccggcagaugagaagg

SEQ ID NO: 73339 - RNA, 19 nt, Artificial Sequence
  Synthetic
gguccggcagaugagaagg

SEQ ID NO: 73340 - RNA, 20 nt, Artificial Sequence
  Synthetic
cgguccggcagaugagaagg

SEQ ID NO: 73341 - RNA, 21 nt, Artificial Sequence
  Synthetic
acgguccggcagaugagaagg

SEQ ID NO: 73342 - RNA, 22 nt, Artificial Sequence
  Synthetic
cacgguccggcagaugagaagg

SEQ ID NO: 73343 - RNA, 23 nt, Artificial Sequence
  Synthetic
acacgguccggcagaugagaagg

SEQ ID NO: 73344 - RNA, 24 nt, Artificial Sequence
  Synthetic
cacacgguccggcagaugagaagg

SEQ ID NO: 73345 - RNA, 18 nt, Artificial Sequence
  Synthetic
aagaucucuuacugaagg

SEQ ID NO: 73346 - RNA, 19 nt, Artificial Sequence
  Synthetic
gaagaucucuuacugaagg

SEQ ID NO: 73347 - RNA, 20 nt, Artificial Sequence
  Synthetic
agaagaucucuuacugaagg

SEQ ID NO: 73348 - RNA, 21 nt, Artificial Sequence
  Synthetic
uagaagaucucuuacugaagg

SEQ ID NO: 73349 - RNA, 22 nt, Artificial Sequence
  Synthetic
cuagaagaucucuuacugaagg

SEQ ID NO: 73350 - RNA, 23 nt, Artificial Sequence
  Synthetic
ucuagaagaucucuuacugaagg

SEQ ID NO: 73351 - RNA, 24 nt, Artificial Sequence
  Synthetic
aucuagaagaucucuuacugaagg

SEQ ID NO: 73352 - RNA, 18 nt, Artificial Sequence
  Synthetic
cuaguaaacugagccagg

SEQ ID NO: 73353 - RNA, 19 nt, Artificial Sequence
  Synthetic
acuaguaaacugagccagg

SEQ ID NO: 73354 - RNA, 20 nt, Artificial Sequence
  Synthetic
cacuaguaaacugagccagg

SEQ ID NO: 73355 - RNA, 21 nt, Artificial Sequence
  Synthetic
gcacuaguaaacugagccagg

SEQ ID NO: 73356 - RNA, 22 nt, Artificial Sequence
  Synthetic
ggcacuaguaaacugagccagg

SEQ ID NO: 73357 - RNA, 23 nt, Artificial Sequence
  Synthetic
uggcacuaguaaacugagccagg

SEQ ID NO: 73358 - RNA, 24 nt, Artificial Sequence
  Synthetic
auggcacuaguaaacugagccagg

SEQ ID NO: 73359 - RNA, 18 nt, Artificial Sequence
  Synthetic
augaggcauagcagcagg

SEQ ID NO: 73360 - RNA, 19 nt, Artificial Sequence
  Synthetic
gaugaggcauagcagcagg

SEQ ID NO: 73361 - RNA, 20 nt, Artificial Sequence
  Synthetic
agaugaggcauagcagcagg

SEQ ID NO: 73362 - RNA, 21 nt, Artificial Sequence
  Synthetic
aagaugaggcauagcagcagg

SEQ ID NO: 73363 - RNA, 22 nt, Artificial Sequence
  Synthetic
gaagaugaggcauagcagcagg

SEQ ID NO: 73364 - RNA, 23 nt, Artificial Sequence
  Synthetic
agaagaugaggcauagcagcagg

SEQ ID NO: 73365 - RNA, 24 nt, Artificial Sequence
  Synthetic
aagaagaugaggcauagcagcagg

SEQ ID NO: 73366 - RNA, 18 nt, Artificial Sequence
  Synthetic
gggaaaaaaucuagcagg

SEQ ID NO: 73367 - RNA, 19 nt, Artificial Sequence
  Synthetic
ugggaaaaaaucuagcagg

SEQ ID NO: 73368 - RNA, 20 nt, Artificial Sequence
  Synthetic
augggaaaaaaucuagcagg

SEQ ID NO: 73369 - RNA, 21 nt, Artificial Sequence
  Synthetic
gaugggaaaaaaucuagcagg

SEQ ID NO: 73370 - RNA, 22 nt, Artificial Sequence
  Synthetic
agaugggaaaaaaucuagcagg

SEQ ID NO: 73371 - RNA, 23 nt, Artificial Sequence
  Synthetic
gagaugggaaaaaaucuagcagg

SEQ ID NO: 73372 - RNA, 24 nt, Artificial Sequence
  Synthetic
agagaugggaaaaaaucuagcagg

SEQ ID NO: 73373 - RNA, 18 nt, Artificial Sequence
  Synthetic
gagcaagagucgugcagg

SEQ ID NO: 73374 - RNA, 19 nt, Artificial Sequence
  Synthetic
ugagcaagagucgugcagg

SEQ ID NO: 73375 - RNA, 20 nt, Artificial Sequence
  Synthetic
uugagcaagagucgugcagg

SEQ ID NO: 73376 - RNA, 21 nt, Artificial Sequence
  Synthetic
cuugagcaagagucgugcagg

SEQ ID NO: 73377 - RNA, 22 nt, Artificial Sequence
  Synthetic
ccuugagcaagagucgugcagg

SEQ ID NO: 73378 - RNA, 23 nt, Artificial Sequence
  Synthetic
uccuugagcaagagucgugcagg

SEQ ID NO: 73379 - RNA, 24 nt, Artificial Sequence
  Synthetic
uuccuugagcaagagucgugcagg

SEQ ID NO: 73380 - RNA, 18 nt, Artificial Sequence
  Synthetic
gugcaaaugaauaucagg

SEQ ID NO: 73381 - RNA, 19 nt, Artificial Sequence
  Synthetic
ggugcaaaugaauaucagg

SEQ ID NO: 73382 - RNA, 20 nt, Artificial Sequence
  Synthetic
uggugcaaaugaauaucagg

SEQ ID NO: 73383 - RNA, 21 nt, Artificial Sequence
  Synthetic
cuggugcaaaugaauaucagg

SEQ ID NO: 73384 - RNA, 22 nt, Artificial Sequence
  Synthetic
ccuggugcaaaugaauaucagg

SEQ ID NO: 73385 - RNA, 23 nt, Artificial Sequence
  Synthetic
uccuggugcaaaugaauaucagg

SEQ ID NO: 73386 - RNA, 24 nt, Artificial Sequence
  Synthetic
guccuggugcaaaugaauaucagg

SEQ ID NO: 73387 - RNA, 18 nt, Artificial Sequence
  Synthetic
gaaaauugguaacagagg

SEQ ID NO: 73388 - RNA, 19 nt, Artificial Sequence
  Synthetic
agaaaauugguaacagagg

SEQ ID NO: 73389 - RNA, 20 nt, Artificial Sequence
  Synthetic
aagaaaauugguaacagagg

SEQ ID NO: 73390 - RNA, 21 nt, Artificial Sequence
  Synthetic
aaagaaaauugguaacagagg

SEQ ID NO: 73391 - RNA, 22 nt, Artificial Sequence
  Synthetic
aaaagaaaauugguaacagagg

SEQ ID NO: 73392 - RNA, 23 nt, Artificial Sequence
  Synthetic
caaaagaaaauugguaacagagg

SEQ ID NO: 73393 - RNA, 24 nt, Artificial Sequence
  Synthetic
acaaaagaaaauugguaacagagg

SEQ ID NO: 73394 - RNA, 18 nt, Artificial Sequence
  Synthetic
gagaugauuaggcagagg

SEQ ID NO: 73395 - RNA, 19 nt, Artificial Sequence
  Synthetic
agagaugauuaggcagagg

SEQ ID NO: 73396 - RNA, 20 nt, Artificial Sequence
  Synthetic
aagagaugauuaggcagagg

SEQ ID NO: 73397 - RNA, 21 nt, Artificial Sequence
  Synthetic
caagagaugauuaggcagagg

SEQ ID NO: 73398 - RNA, 22 nt, Artificial Sequence
  Synthetic
acaagagaugauuaggcagagg

SEQ ID NO: 73399 - RNA, 23 nt, Artificial Sequence
  Synthetic
aacaagagaugauuaggcagagg

SEQ ID NO: 73400 - RNA, 24 nt, Artificial Sequence
  Synthetic
gaacaagagaugauuaggcagagg

SEQ ID NO: 73401 - RNA, 18 nt, Artificial Sequence
  Synthetic
ccaugcgacgugcagagg

SEQ ID NO: 73402 - RNA, 19 nt, Artificial Sequence
  Synthetic
uccaugcgacgugcagagg

SEQ ID NO: 73403 - RNA, 20 nt, Artificial Sequence
  Synthetic
cuccaugcgacgugcagagg

SEQ ID NO: 73404 - RNA, 21 nt, Artificial Sequence
  Synthetic
ucuccaugcgacgugcagagg

SEQ ID NO: 73405 - RNA, 22 nt, Artificial Sequence
  Synthetic
gucuccaugcgacgugcagagg

SEQ ID NO: 73406 - RNA, 23 nt, Artificial Sequence
  Synthetic
ggucuccaugcgacgugcagagg

SEQ ID NO: 73407 - RNA, 24 nt, Artificial Sequence
  Synthetic
uggucuccaugcgacgugcagagg

SEQ ID NO: 73408 - RNA, 18 nt, Artificial Sequence
  Synthetic
ugauccuggaauuagagg

SEQ ID NO: 73409 - RNA, 19 nt, Artificial Sequence
  Synthetic
augauccuggaauuagagg

SEQ ID NO: 73410 - RNA, 20 nt, Artificial Sequence
  Synthetic
gaugauccuggaauuagagg

SEQ ID NO: 73411 - RNA, 21 nt, Artificial Sequence
  Synthetic
ugaugauccuggaauuagagg

SEQ ID NO: 73412 - RNA, 22 nt, Artificial Sequence
  Synthetic
uugaugauccuggaauuagagg

SEQ ID NO: 73413 - RNA, 23 nt, Artificial Sequence
  Synthetic
guugaugauccuggaauuagagg

SEQ ID NO: 73414 - RNA, 24 nt, Artificial Sequence
  Synthetic
gguugaugauccuggaauuagagg

SEQ ID NO: 73415 - RNA, 18 nt, Artificial Sequence
  Synthetic
agaucuucgucugcgagg

SEQ ID NO: 73416 - RNA, 19 nt, Artificial Sequence
  Synthetic
gagaucuucgucugcgagg

SEQ ID NO: 73417 - RNA, 20 nt, Artificial Sequence
  Synthetic
ugagaucuucgucugcgagg

SEQ ID NO: 73418 - RNA, 21 nt, Artificial Sequence
  Synthetic
uugagaucuucgucugcgagg

SEQ ID NO: 73419 - RNA, 22 nt, Artificial Sequence
  Synthetic
auugagaucuucgucugcgagg

SEQ ID NO: 73420 - RNA, 23 nt, Artificial Sequence
  Synthetic
gauugagaucuucgucugcgagg

SEQ ID NO: 73421 - RNA, 24 nt, Artificial Sequence
  Synthetic
cgauugagaucuucgucugcgagg

SEQ ID NO: 73422 - RNA, 18 nt, Artificial Sequence
  Synthetic
acugccgauugguggagg

SEQ ID NO: 73423 - RNA, 19 nt, Artificial Sequence
  Synthetic
gacugccgauugguggagg

SEQ ID NO: 73424 - RNA, 20 nt, Artificial Sequence
  Synthetic
ugacugccgauugguggagg

SEQ ID NO: 73425 - RNA, 21 nt, Artificial Sequence
  Synthetic
cugacugccgauugguggagg

SEQ ID NO: 73426 - RNA, 22 nt, Artificial Sequence
  Synthetic
ccugacugccgauugguggagg

SEQ ID NO: 73427 - RNA, 23 nt, Artificial Sequence
  Synthetic
uccugacugccgauugguggagg

SEQ ID NO: 73428 - RNA, 24 nt, Artificial Sequence
  Synthetic
uuccugacugccgauugguggagg

SEQ ID NO: 73429 - RNA, 18 nt, Artificial Sequence
  Synthetic
gccaggacaaauuggagg

SEQ ID NO: 73430 - RNA, 19 nt, Artificial Sequence
  Synthetic
agccaggacaaauuggagg

SEQ ID NO: 73431 - RNA, 20 nt, Artificial Sequence
  Synthetic
uagccaggacaaauuggagg

SEQ ID NO: 73432 - RNA, 21 nt, Artificial Sequence
  Synthetic
auagccaggacaaauuggagg

SEQ ID NO: 73433 - RNA, 22 nt, Artificial Sequence
  Synthetic
gauagccaggacaaauuggagg

SEQ ID NO: 73434 - RNA, 23 nt, Artificial Sequence
  Synthetic
cgauagccaggacaaauuggagg

SEQ ID NO: 73435 - RNA, 24 nt, Artificial Sequence
  Synthetic
gcgauagccaggacaaauuggagg

SEQ ID NO: 73436 - RNA, 18 nt, Artificial Sequence
  Synthetic
caaggcacagcuuggagg

SEQ ID NO: 73437 - RNA, 19 nt, Artificial Sequence
  Synthetic
ccaaggcacagcuuggagg

SEQ ID NO: 73438 - RNA, 20 nt, Artificial Sequence
  Synthetic
cccaaggcacagcuuggagg

SEQ ID NO: 73439 - RNA, 21 nt, Artificial Sequence
  Synthetic
acccaaggcacagcuuggagg

SEQ ID NO: 73440 - RNA, 22 nt, Artificial Sequence
  Synthetic
cacccaaggcacagcuuggagg

SEQ ID NO: 73441 - RNA, 23 nt, Artificial Sequence
  Synthetic
ccacccaaggcacagcuuggagg

SEQ ID NO: 73442 - RNA, 24 nt, Artificial Sequence
  Synthetic
gccacccaaggcacagcuuggagg

SEQ ID NO: 73443 - RNA, 18 nt, Artificial Sequence
  Synthetic
accaacaagaagaugagg

SEQ ID NO: 73444 - RNA, 19 nt, Artificial Sequence
  Synthetic
aaccaacaagaagaugagg

SEQ ID NO: 73445 - RNA, 20 nt, Artificial Sequence
  Synthetic
gaaccaacaagaagaugagg

SEQ ID NO: 73446 - RNA, 21 nt, Artificial Sequence
  Synthetic
agaaccaacaagaagaugagg

SEQ ID NO: 73447 - RNA, 22 nt, Artificial Sequence
  Synthetic
aagaaccaacaagaagaugagg

SEQ ID NO: 73448 - RNA, 23 nt, Artificial Sequence
  Synthetic
gaagaaccaacaagaagaugagg

SEQ ID NO: 73449 - RNA, 24 nt, Artificial Sequence
  Synthetic
agaagaaccaacaagaagaugagg

SEQ ID NO: 73450 - RNA, 18 nt, Artificial Sequence
  Synthetic
uuuauaccuuucucuagg

SEQ ID NO: 73451 - RNA, 19 nt, Artificial Sequence
  Synthetic
uuuuauaccuuucucuagg

SEQ ID NO: 73452 - RNA, 20 nt, Artificial Sequence
  Synthetic
guuuuauaccuuucucuagg

SEQ ID NO: 73453 - RNA, 21 nt, Artificial Sequence
  Synthetic
gguuuuauaccuuucucuagg

SEQ ID NO: 73454 - RNA, 22 nt, Artificial Sequence
  Synthetic
agguuuuauaccuuucucuagg

SEQ ID NO: 73455 - RNA, 23 nt, Artificial Sequence
  Synthetic
aagguuuuauaccuuucucuagg

SEQ ID NO: 73456 - RNA, 24 nt, Artificial Sequence
  Synthetic
uaagguuuuauaccuuucucuagg

SEQ ID NO: 73457 - RNA, 18 nt, Artificial Sequence
  Synthetic
gaacaagagaugauuagg

SEQ ID NO: 73458 - RNA, 19 nt, Artificial Sequence
  Synthetic
ugaacaagagaugauuagg

SEQ ID NO: 73459 - RNA, 20 nt, Artificial Sequence
  Synthetic
augaacaagagaugauuagg

SEQ ID NO: 73460 - RNA, 21 nt, Artificial Sequence
  Synthetic
caugaacaagagaugauuagg

SEQ ID NO: 73461 - RNA, 22 nt, Artificial Sequence
  Synthetic
acaugaacaagagaugauuagg

SEQ ID NO: 73462 - RNA, 23 nt, Artificial Sequence
  Synthetic
gacaugaacaagagaugauuagg

SEQ ID NO: 73463 - RNA, 24 nt, Artificial Sequence
  Synthetic
ggacaugaacaagagaugauuagg

SEQ ID NO: 73464 - RNA, 18 nt, Artificial Sequence
  Synthetic
uggaguuuuccaguuagg

SEQ ID NO: 73465 - RNA, 19 nt, Artificial Sequence
  Synthetic
auggaguuuuccaguuagg

SEQ ID NO: 73466 - RNA, 20 nt, Artificial Sequence
  Synthetic
gauggaguuuuccaguuagg

SEQ ID NO: 73467 - RNA, 21 nt, Artificial Sequence
  Synthetic
agauggaguuuuccaguuagg

SEQ ID NO: 73468 - RNA, 22 nt, Artificial Sequence
  Synthetic
aagauggaguuuuccaguuagg

SEQ ID NO: 73469 - RNA, 23 nt, Artificial Sequence
  Synthetic
aaagauggaguuuuccaguuagg

SEQ ID NO: 73470 - RNA, 24 nt, Artificial Sequence
  Synthetic
aaaagauggaguuuuccaguuagg

SEQ ID NO: 73471 - RNA, 18 nt, Artificial Sequence
  Synthetic
cugagccaggagaaacgg

SEQ ID NO: 73472 - RNA, 19 nt, Artificial Sequence
  Synthetic
acugagccaggagaaacgg

SEQ ID NO: 73473 - RNA, 20 nt, Artificial Sequence
  Synthetic
aacugagccaggagaaacgg

SEQ ID NO: 73474 - RNA, 21 nt, Artificial Sequence
  Synthetic
aaacugagccaggagaaacgg

SEQ ID NO: 73475 - RNA, 22 nt, Artificial Sequence
  Synthetic
uaaacugagccaggagaaacgg

SEQ ID NO: 73476 - RNA, 23 nt, Artificial Sequence
  Synthetic
guaaacugagccaggagaaacgg

SEQ ID NO: 73477 - RNA, 24 nt, Artificial Sequence
  Synthetic
aguaaacugagccaggagaaacgg

SEQ ID NO: 73478 - RNA, 18 nt, Artificial Sequence
  Synthetic
gccguugccgggcaacgg

SEQ ID NO: 73479 - RNA, 19 nt, Artificial Sequence
  Synthetic
ggccguugccgggcaacgg

SEQ ID NO: 73480 - RNA, 20 nt, Artificial Sequence
  Synthetic
  misc_feature (1)..(1): n is a, c, g, or u
nggccguugccgggcaacgg

SEQ ID NO: 73481 - RNA, 21 nt, Artificial Sequence
  Synthetic
  misc_feature (2)..(2): n is a, c, g, or u
cnggccguugccgggcaacgg

SEQ ID NO: 73482 - RNA, 22 nt, Artificial Sequence
  Synthetic
  misc_feature (3)..(3): n is a, c, g, or u
ccnggccguugccgggcaacgg

SEQ ID NO: 73483 - RNA, 23 nt, Artificial Sequence
  Synthetic
  misc_feature (4)..(4): n is a, c, g, or u
accnggccguugccgggcaacgg

SEQ ID NO: 73484 - RNA, 24 nt, Artificial Sequence
  Synthetic
  misc_feature (5)..(5): n is a, c, g, or u
gaccnggccguugccgggcaacgg

SEQ ID NO: 73485 - RNA, 18 nt, Artificial Sequence
  Synthetic
gaagcgaagugcacacgg

SEQ ID NO: 73486 - RNA, 19 nt, Artificial Sequence
  Synthetic
ugaagcgaagugcacacgg

SEQ ID NO: 73487 - RNA, 20 nt, Artificial Sequence
  Synthetic
gugaagcgaagugcacacgg

SEQ ID NO: 73488 - RNA, 21 nt, Artificial Sequence
  Synthetic
ggugaagcgaagugcacacgg

SEQ ID NO: 73489 - RNA, 22 nt, Artificial Sequence
  Synthetic
aggugaagcgaagugcacacgg

SEQ ID NO: 73490 - RNA, 23 nt, Artificial Sequence
  Synthetic
gaggugaagcgaagugcacacgg

SEQ ID NO: 73491 - RNA, 24 nt, Artificial Sequence
  Synthetic
agaggugaagcgaagugcacacgg

SEQ ID NO: 73492 - RNA, 18 nt, Artificial Sequence
  Synthetic
augagaaggcacagacgg

SEQ ID NO: 73493 - RNA, 19 nt, Artificial Sequence
  Synthetic
gaugagaaggcacagacgg

SEQ ID NO: 73494 - RNA, 20 nt, Artificial Sequence
  Synthetic
agaugagaaggcacagacgg

SEQ ID NO: 73495 - RNA, 21 nt, Artificial Sequence
  Synthetic
cagaugagaaggcacagacgg

SEQ ID NO: 73496 - RNA, 22 nt, Artificial Sequence
  Synthetic
gcagaugagaaggcacagacgg

SEQ ID NO: 73497 - RNA, 23 nt, Artificial Sequence
  Synthetic
ggcagaugagaaggcacagacgg

SEQ ID NO: 73498 - RNA, 24 nt, Artificial Sequence
  Synthetic
cggcagaugagaaggcacagacgg

SEQ ID NO: 73499 - RNA, 18 nt, Artificial Sequence
  Synthetic
  misc_feature (4)..(4): n is a, c, g, or u
ggcnggaacggcagacgg

SEQ ID NO: 73500 - RNA, 19 nt, Artificial Sequence
  Synthetic
  misc_feature (5)..(5): n is a, c, g, or u
cggcnggaacggcagacgg

SEQ ID NO: 73501 - RNA, 20 nt, Artificial Sequence
  Synthetic
  misc_feature (6)..(6): n is a, c, g, or u
ucggcnggaacggcagacgg

SEQ ID NO: 73502 - RNA, 21 nt, Artificial Sequence
  Synthetic
  misc_feature (7)..(7): n is a, c, g, or u
gucggcnggaacggcagacgg

SEQ ID NO: 73503 - RNA, 22 nt, Artificial Sequence
  Synthetic
  misc_feature (8)..(8): n is a, c, g, or u
ggucggcnggaacggcagacgg

SEQ ID NO: 73504 - RNA, 23 nt, Artificial Sequence
  Synthetic
  misc_feature (9)..(9): n is a, c, g, or u
uggucggcnggaacggcagacgg

SEQ ID NO: 73505 - RNA, 24 nt, Artificial Sequence
  Synthetic
  misc_feature (10)..(10): n is a, c, g, or u
guggucggcnggaacggcagacgg

SEQ ID NO: 73506 - RNA, 18 nt, Artificial Sequence
  Synthetic
  misc_feature (3)..(3): n is a, c, g, or u
aangauguauauuuccgg

SEQ ID NO: 73507 - RNA, 19 nt, Artificial Sequence
  Synthetic
  misc_feature (4)..(4): n is a, c, g, or u
aaangauguauauuuccgg

SEQ ID NO: 73508 - RNA, 20 nt, Artificial Sequence
  Synthetic
  misc_feature (5)..(5): n is a, c, g, or u
gaaangauguauauuuccgg

SEQ ID NO: 73509 - RNA, 21 nt, Artificial Sequence
  Synthetic
  misc_feature (6)..(6): n is a, c, g, or u
ggaaangauguauauuuccgg

SEQ ID NO: 73510 - RNA, 22 nt, Artificial Sequence
  Synthetic
  misc_feature (7)..(7): n is a, c, g, or u
uggaaangauguauauuuccgg

SEQ ID NO: 73511 - RNA, 23 nt, Artificial Sequence
  Synthetic
  misc_feature (8)..(8): n is a, c, g, or u
auggaaangauguauauuuccgg

SEQ ID NO: 73512 - RNA, 24 nt, Artificial Sequence
  Synthetic
  misc_feature (9)..(9): n is a, c, g, or u
cauggaaangauguauauuuccgg

SEQ ID NO: 73513 - RNA, 18 nt, Artificial Sequence
  Synthetic
ugcgagcaaaacaagcgg

SEQ ID NO: 73514 - RNA, 19 nt, Artificial Sequence
  Synthetic
cugcgagcaaaacaagcgg

SEQ ID NO: 73515 - RNA, 20 nt, Artificial Sequence
  Synthetic
gcugcgagcaaaacaagcgg

SEQ ID NO: 73516 - RNA, 21 nt, Artificial Sequence
  Synthetic
ugcugcgagcaaaacaagcgg

SEQ ID NO: 73517 - RNA, 22 nt, Artificial Sequence
  Synthetic
cugcugcgagcaaaacaagcgg

SEQ ID NO: 73518 - RNA, 23 nt, Artificial Sequence
  Synthetic
ccugcugcgagcaaaacaagcgg

SEQ ID NO: 73519 - RNA, 24 nt, Artificial Sequence
  Synthetic
accugcugcgagcaaaacaagcgg

SEQ ID NO: 73520 - RNA, 18 nt, Artificial Sequence
  Synthetic
uuccgcaguauggaucgg

SEQ ID NO: 73521 - RNA, 19 nt, Artificial Sequence
  Synthetic
guuccgcaguauggaucgg

SEQ ID NO: 73522 - RNA, 20 nt, Artificial Sequence
  Synthetic
aguuccgcaguauggaucgg

SEQ ID NO: 73523 - RNA, 18 nt, Artificial Sequence
  Synthetic
gagugaggcaguagucgg

SEQ ID NO: 73524 - RNA, 19 nt, Artificial Sequence
  Synthetic
ugagugaggcaguagucgg

SEQ ID NO: 73525 - RNA, 20 nt, Artificial Sequence
  Synthetic
augagugaggcaguagucgg

SEQ ID NO: 73526 - RNA, 21 nt, Artificial Sequence
  Synthetic
gaugagugaggcaguagucgg

SEQ ID NO: 73527 - RNA, 22 nt, Artificial Sequence
  Synthetic
agaugagugaggcaguagucgg

SEQ ID NO: 73528 - RNA, 23 nt, Artificial Sequence
  Synthetic
gagaugagugaggcaguagucgg

SEQ ID NO: 73529 - RNA, 24 nt, Artificial Sequence
  Synthetic
cgagaugagugaggcaguagucgg

SEQ ID NO: 73530 - RNA, 18 nt, Artificial Sequence
  Synthetic
ggugcgccccguggucgg

SEQ ID NO: 73531 - RNA, 19 nt, Artificial Sequence
  Synthetic
aggugcgccccguggucgg

SEQ ID NO: 73532 - RNA, 20 nt, Artificial Sequence
  Synthetic
gaggugcgccccguggucgg

SEQ ID NO: 73533 - RNA, 21 nt, Artificial Sequence
  Synthetic
agaggugcgccccguggucgg

SEQ ID NO: 73534 - RNA, 22 nt, Artificial Sequence
  Synthetic
gagaggugcgccccguggucgg

SEQ ID NO: 73535 - RNA, 23 nt, Artificial Sequence
  Synthetic
agagaggugcgccccguggucgg

SEQ ID NO: 73536 - RNA, 24 nt, Artificial Sequence
  Synthetic
aagagaggugcgccccguggucgg

SEQ ID NO: 73537 - RNA, 18 nt, Artificial Sequence
  Synthetic
gauccaacugguggucgg

SEQ ID NO: 73538 - RNA, 19 nt, Artificial Sequence
  Synthetic
ggauccaacugguggucgg

SEQ ID NO: 73539 - RNA, 20 nt, Artificial Sequence
  Synthetic
uggauccaacugguggucgg

SEQ ID NO: 73540 - RNA, 21 nt, Artificial Sequence
  Synthetic
cuggauccaacugguggucgg

SEQ ID NO: 73541 - RNA, 22 nt, Artificial Sequence
  Synthetic
gcuggauccaacugguggucgg

SEQ ID NO: 73542 - RNA, 23 nt, Artificial Sequence
  Synthetic
ugcuggauccaacugguggucgg

SEQ ID NO: 73543 - RNA, 24 nt, Artificial Sequence
  Synthetic
augcuggauccaacugguggucgg

SEQ ID NO: 73544 - RNA, 18 nt, Artificial Sequence
  Synthetic
gaugcuuuccauguucgg

SEQ ID NO: 73545 - RNA, 19 nt, Artificial Sequence
  Synthetic
ugaugcuuuccauguucgg

SEQ ID NO: 73546 - RNA, 20 nt, Artificial Sequence
  Synthetic
gugaugcuuuccauguucgg

SEQ ID NO: 73547 - RNA, 21 nt, Artificial Sequence
  Synthetic
ugugaugcuuuccauguucgg

SEQ ID NO: 73548 - RNA, 22 nt, Artificial Sequence
  Synthetic
augugaugcuuuccauguucgg

SEQ ID NO: 73549 - RNA, 23 nt, Artificial Sequence
  Synthetic
gaugugaugcuuuccauguucgg

SEQ ID NO: 73550 - RNA, 24 nt, Artificial Sequence
  Synthetic
ugaugugaugcuuuccauguucgg

SEQ ID NO: 73551 - RNA, 18 nt, Artificial Sequence
  Synthetic
acggcagacggagaaggg

SEQ ID NO: 73552 - RNA, 19 nt, Artificial Sequence
  Synthetic
aacggcagacggagaaggg

SEQ ID NO: 73553 - RNA, 20 nt, Artificial Sequence
  Synthetic
gaacggcagacggagaaggg

SEQ ID NO: 73554 - RNA, 21 nt, Artificial Sequence
  Synthetic
ggaacggcagacggagaaggg

SEQ ID NO: 73555 - RNA, 22 nt, Artificial Sequence
  Synthetic
  misc_feature (1)..(1): n is a, c, g, or u
nggaacggcagacggagaaggg

SEQ ID NO: 73556 - RNA, 23 nt, Artificial Sequence
  Synthetic
  misc_feature (2)..(2): n is a, c, g, or u
cnggaacggcagacggagaaggg

SEQ ID NO: 73557 - RNA, 24 nt, Artificial Sequence
  Synthetic
  misc_feature (3)..(3): n is a, c, g, or u
gcnggaacggcagacggagaaggg

SEQ ID NO: 73558 - RNA, 18 nt, Artificial Sequence
  Synthetic
ugagccaggagaaacggg

SEQ ID NO: 73559 - RNA, 19 nt, Artificial Sequence
  Synthetic
cugagccaggagaaacggg

SEQ ID NO: 73560 - RNA, 20 nt, Artificial Sequence
  Synthetic
acugagccaggagaaacggg

SEQ ID NO: 73561 - RNA, 21 nt, Artificial Sequence
  Synthetic
aacugagccaggagaaacggg

SEQ ID NO: 73562 - RNA, 22 nt, Artificial Sequence
  Synthetic
aaacugagccaggagaaacggg

SEQ ID NO: 73563 - RNA, 23 nt, Artificial Sequence
  Synthetic
uaaacugagccaggagaaacggg

SEQ ID NO: 73564 - RNA, 24 nt, Artificial Sequence
  Synthetic
guaaacugagccaggagaaacggg

SEQ ID NO: 73565 - RNA, 18 nt, Artificial Sequence
  Synthetic
ccguugccgggcaacggg

SEQ ID NO: 73566 - RNA, 19 nt, Artificial Sequence
  Synthetic
gccguugccgggcaacggg

SEQ ID NO: 73567 - RNA, 20 nt, Artificial Sequence
  Synthetic
ggccguugccgggcaacggg

SEQ ID NO: 73568 - RNA, 21 nt, Artificial Sequence
  Synthetic
  misc_feature (1)..(1): n is a, c, g, or u
nggccguugccgggcaacggg

SEQ ID NO: 73569 - RNA, 22 nt, Artificial Sequence
  Synthetic
  misc_feature (2)..(2): n is a, c, g, or u
cnggccguugccgggcaacggg

SEQ ID NO: 73570 - RNA, 23 nt, Artificial Sequence
  Synthetic
  misc_feature (3)..(3): n is a, c, g, or u
ccnggccguugccgggcaacggg

SEQ ID NO: 73571 - RNA, 24 nt, Artificial Sequence
  Synthetic
  misc_feature (4)..(4): n is a, c, g, or u
accnggccguugccgggcaacggg

SEQ ID NO: 73572 - RNA, 18 nt, Artificial Sequence
  Synthetic
  misc_feature (2)..(2): n is a, c, g, or u
angauguauauuuccggg

SEQ ID NO: 73573 - RNA, 19 nt, Artificial Sequence
  Synthetic
  misc_feature (3)..(3): n is a, c, g, or u
aangauguauauuuccggg

SEQ ID NO: 73574 - RNA, 20 nt, Artificial Sequence
  Synthetic
  misc_feature (4)..(4): n is a, c, g, or u
aaangauguauauuuccggg

SEQ ID NO: 73575 - RNA, 21 nt, Artificial Sequence
  Synthetic
  misc_feature (5)..(5): n is a, c, g, or u
gaaangauguauauuuccggg

SEQ ID NO: 73576 - RNA, 22 nt, Artificial Sequence
  Synthetic
  misc_feature (6)..(6): n is a, c, g, or u
ggaaangauguauauuuccggg

SEQ ID NO: 73577 - RNA, 23 nt, Artificial Sequence
  Synthetic
  misc_feature (7)..(7): n is a, c, g, or u
uggaaangauguauauuuccggg

SEQ ID NO: 73578 - RNA, 24 nt, Artificial Sequence
  Synthetic
  misc_feature (8)..(8): n is a, c, g, or u
auggaaangauguauauuuccggg

SEQ ID NO: 73579 - RNA, 18 nt, Artificial Sequence
  Synthetic
auccaacugguggucggg

SEQ ID NO: 73580 - RNA, 19 nt, Artificial Sequence
  Synthetic
gauccaacugguggucggg

SEQ ID NO: 73581 - RNA, 20 nt, Artificial Sequence
  Synthetic
ggauccaacugguggucggg

SEQ ID NO: 73582 - RNA, 21 nt, Artificial Sequence
  Synthetic
uggauccaacugguggucggg

SEQ ID NO: 73583 - RNA, 22 nt, Artificial Sequence
  Synthetic
cuggauccaacugguggucggg

SEQ ID NO: 73584 - RNA, 23 nt, Artificial Sequence
  Synthetic
gcuggauccaacugguggucggg

SEQ ID NO: 73585 - RNA, 24 nt, Artificial Sequence
  Synthetic
ugcuggauccaacugguggucggg

SEQ ID NO: 73586 - RNA, 18 nt, Artificial Sequence
  Synthetic
cguugccgggcaacgggg

SEQ ID NO: 73587 - RNA, 19 nt, Artificial Sequence
  Synthetic
ccguugccgggcaacgggg

SEQ ID NO: 73588 - RNA, 20 nt, Artificial Sequence
  Synthetic
gccguugccgggcaacgggg

SEQ ID NO: 73589 - RNA, 21 nt, Artificial Sequence
  Synthetic
ggccguugccgggcaacgggg

SEQ ID NO: 73590 - RNA, 22 nt, Artificial Sequence
  Synthetic
  misc_feature (1)..(1): n is a, c, g, or u
nggccguugccgggcaacgggg

SEQ ID NO: 73591 - RNA, 23 nt, Artificial Sequence
  Synthetic
  misc_feature (2)..(2): n is a, c, g, or u
cnggccguugccgggcaacgggg

SEQ ID NO: 73592 - RNA, 24 nt, Artificial Sequence
  Synthetic
  misc_feature (3)..(3): n is a, c, g, or u
ccnggccguugccgggcaacgggg

SEQ ID NO: 73593 - RNA, 18 nt, Artificial Sequence
  Synthetic
aaggccuccguguggggg

SEQ ID NO: 73594 - RNA, 19 nt, Artificial Sequence
  Synthetic
aaaggccuccguguggggg

SEQ ID NO: 73595 - RNA, 20 nt, Artificial Sequence
  Synthetic
aaaaggccuccguguggggg

SEQ ID NO: 73596 - RNA, 21 nt, Artificial Sequence
  Synthetic
caaaaggccuccguguggggg

SEQ ID NO: 73597 - RNA, 22 nt, Artificial Sequence
  Synthetic
ccaaaaggccuccguguggggg

SEQ ID NO: 73598 - RNA, 23 nt, Artificial Sequence
  Synthetic
cccaaaaggccuccguguggggg

SEQ ID NO: 73599 - RNA, 24 nt, Artificial Sequence
  Synthetic
ccccaaaaggccuccguguggggg

SEQ ID NO: 73600 - RNA, 18 nt, Artificial Sequence
  Synthetic
gaaagccagacagugggg

SEQ ID NO: 73601 - RNA, 19 nt, Artificial Sequence
  Synthetic
ugaaagccagacagugggg

SEQ ID NO: 73602 - RNA, 20 nt, Artificial Sequence
  Synthetic
cugaaagccagacagugggg

SEQ ID NO: 73603 - RNA, 21 nt, Artificial Sequence
  Synthetic
acugaaagccagacagugggg

SEQ ID NO: 73604 - RNA, 22 nt, Artificial Sequence
  Synthetic
aacugaaagccagacagugggg

SEQ ID NO: 73605 - RNA, 23 nt, Artificial Sequence
  Synthetic
uaacugaaagccagacagugggg

SEQ ID NO: 73606 - RNA, 24 nt, Artificial Sequence
  Synthetic
auaacugaaagccagacagugggg

SEQ ID NO: 73607 - RNA, 18 nt, Artificial Sequence
  Synthetic
  misc_feature (7)..(7): n is a, c, g, or u
auauuunguagagauggg

SEQ ID NO: 73608 - RNA, 19 nt, Artificial Sequence
  Synthetic
  misc_feature (8)..(8): n is a, c, g, or u
aauauuunguagagauggg

SEQ ID NO: 73609 - RNA, 20 nt, Artificial Sequence
  Synthetic
  misc_feature (9)..(9): n is a, c, g, or u
aaauauuunguagagauggg

SEQ ID NO: 73610 - RNA, 21 nt, Artificial Sequence
  Synthetic
  misc_feature (1)..(1): n is a, c, g, or u
  misc_feature (10)..(10): n is a, c, g, or u
naaauauuunguagagauggg

SEQ ID NO: 73611 - RNA, 22 nt, Artificial Sequence
  Synthetic
  misc_feature (2)..(2): n is a, c, g, or u
  misc_feature (11)..(11): n is a, c, g, or u
gnaaauauuunguagagauggg

SEQ ID NO: 73612 - RNA, 23 nt, Artificial Sequence
  Synthetic
  misc_feature (3)..(3): n is a, c, g, or u
  misc_feature (12)..(12): n is a, c, g, or u
ggnaaauauuunguagagauggg

SEQ ID NO: 73613 - RNA, 24 nt, Artificial Sequence
  Synthetic
  misc_feature (4)..(4): n is a, c, g, or u
  misc_feature (13)..(13): n is a, c, g, or u
gggnaaauauuunguagagauggg

SEQ ID NO: 73614 - RNA, 18 nt, Artificial Sequence
  Synthetic
aaagcccaugaugauggg

SEQ ID NO: 73615 - RNA, 19 nt, Artificial Sequence
  Synthetic
gaaagcccaugaugauggg

SEQ ID NO: 73616 - RNA, 20 nt, Artificial Sequence
  Synthetic
cgaaagcccaugaugauggg

SEQ ID NO: 73617 - RNA, 21 nt, Artificial Sequence
  Synthetic
ccgaaagcccaugaugauggg

SEQ ID NO: 73618 - RNA, 22 nt, Artificial Sequence
  Synthetic
uccgaaagcccaugaugauggg

SEQ ID NO: 73619 - RNA, 23 nt, Artificial Sequence
  Synthetic
uuccgaaagcccaugaugauggg

SEQ ID NO: 73620 - RNA, 24 nt, Artificial Sequence
  Synthetic
uuuccgaaagcccaugaugauggg

SEQ ID NO: 73621 - RNA, 18 nt, Artificial Sequence
  Synthetic
ugaaagccagacaguggg

SEQ ID NO: 73622 - RNA, 19 nt, Artificial Sequence
  Synthetic
cugaaagccagacaguggg

SEQ ID NO: 73623 - RNA, 20 nt, Artificial Sequence
  Synthetic
acugaaagccagacaguggg

SEQ ID NO: 73624 - RNA, 21 nt, Artificial Sequence
  Synthetic
aacugaaagccagacaguggg

SEQ ID NO: 73625 - RNA, 22 nt, Artificial Sequence
  Synthetic
uaacugaaagccagacaguggg

SEQ ID NO: 73626 - RNA, 23 nt, Artificial Sequence
  Synthetic
auaacugaaagccagacaguggg

SEQ ID NO: 73627 - RNA, 24 nt, Artificial Sequence
  Synthetic
uauaacugaaagccagacaguggg

SEQ ID NO: 73628 - RNA, 18 nt, Artificial Sequence
  Synthetic
aaagguggagugauuggg

SEQ ID NO: 73629 - RNA, 19 nt, Artificial Sequence
  Synthetic
caaagguggagugauuggg

SEQ ID NO: 73630 - RNA, 20 nt, Artificial Sequence
  Synthetic
ucaaagguggagugauuggg

SEQ ID NO: 73631 - RNA, 21 nt, Artificial Sequence
  Synthetic
cucaaagguggagugauuggg

SEQ ID NO: 73632 - RNA, 22 nt, Artificial Sequence
  Synthetic
ucucaaagguggagugauuggg

SEQ ID NO: 73633 - RNA, 23 nt, Artificial Sequence
  Synthetic
cucucaaagguggagugauuggg

SEQ ID NO: 73634 - RNA, 24 nt, Artificial Sequence
  Synthetic
ucucucaaagguggagugauuggg

SEQ ID NO: 73635 - RNA, 18 nt, Artificial Sequence
  Synthetic
  misc_feature (16)..(16): n is a, c, g, or u
ugggggagugaacccngg

SEQ ID NO: 73636 - RNA, 19 nt, Artificial Sequence
  Synthetic
  misc_feature (17)..(17): n is a, c, g, or u
gugggggagugaacccngg

SEQ ID NO: 73637 - RNA, 20 nt, Artificial Sequence
  Synthetic
  misc_feature (18)..(18): n is a, c, g, or u
ugugggggagugaacccngg

SEQ ID NO: 73638 - RNA, 21 nt, Artificial Sequence
  Synthetic
  misc_feature (19)..(19): n is a, c, g, or u
gugugggggagugaacccngg

SEQ ID NO: 73639 - RNA, 22 nt, Artificial Sequence
  Synthetic
  misc_feature (20)..(20): n is a, c, g, or u
cgugugggggagugaacccngg

SEQ ID NO: 73640 - RNA, 23 nt, Artificial Sequence
  Synthetic
  misc_feature (21)..(21): n is a, c, g, or u
ccgugugggggagugaacccngg

SEQ ID NO: 73641 - RNA, 24 nt, Artificial Sequence
  Synthetic
  misc_feature (22)..(22): n is a, c, g, or u
uccgugugggggagugaacccngg

SEQ ID NO: 73642 - RNA, 18 nt, Artificial Sequence
  Synthetic
  misc_feature (16)..(16): n is a, c, g, or u
cgccccguggucggcngg

SEQ ID NO: 73643 - RNA, 19 nt, Artificial Sequence
  Synthetic
  misc_feature (17)..(17): n is a, c, g, or u
gcgccccguggucggcngg

SEQ ID NO: 73644 - RNA, 20 nt, Artificial Sequence
  Synthetic
  misc_feature (18)..(18): n is a, c, g, or u
ugcgccccguggucggcngg

SEQ ID NO: 73645 - RNA, 21 nt, Artificial Sequence
  Synthetic
  misc_feature (19)..(19): n is a, c, g, or u
gugcgccccguggucggcngg

SEQ ID NO: 73646 - RNA, 22 nt, Artificial Sequence
  Synthetic
  misc_feature (20)..(20): n is a, c, g, or u
ggugcgccccguggucggcngg

SEQ ID NO: 73647 - RNA, 23 nt, Artificial Sequence
  Synthetic
  misc_feature (21)..(21): n is a, c, g, or u
aggugcgccccguggucggcngg

SEQ ID NO: 73648 - RNA, 24 nt, Artificial Sequence
  Synthetic
  misc_feature (22)..(22): n is a, c, g, or u
gaggugcgccccguggucggcngg

SEQ ID NO: 73649 - RNA, 18 nt, Artificial Sequence
  Synthetic
  misc_feature (8)..(8): n is a, c, g, or u
aauauuunguagagaugg

SEQ ID NO: 73650 - RNA, 19 nt, Artificial Sequence
  Synthetic
  misc_feature (9)..(9): n is a, c, g, or u
aaauauuunguagagaugg

SEQ ID NO: 73651 - RNA, 20 nt, Artificial Sequence
  Synthetic
  misc_feature (1)..(1): n is a, c, g, or u
  misc_feature (10)..(10): n is a, c, g, or u
naaauauuunguagagaugg

SEQ ID NO: 73652 - RNA, 21 nt, Artificial Sequence
  Synthetic
  misc_feature (2)..(2): n is a, c, g, or u
  misc_feature (11)..(11): n is a, c, g, or u
gnaaauauuunguagagaugg

SEQ ID NO: 73653 - RNA, 22 nt, Artificial Sequence
  Synthetic
  misc_feature (3)..(3): n is a, c, g, or u
  misc_feature (12)..(12): n is a, c, g, or u
ggnaaauauuunguagagaugg

SEQ ID NO: 73654 - RNA, 23 nt, Artificial Sequence
  Synthetic
  misc_feature (4)..(4): n is a, c, g, or u
  misc_feature (13)..(13): n is a, c, g, or u
gggnaaauauuunguagagaugg

SEQ ID NO: 73655 - RNA, 24 nt, Artificial Sequence
  Synthetic
  misc_feature (5)..(5): n is a, c, g, or u
  misc_feature (14)..(14): n is a, c, g, or u
ggggnaaauauuunguagagaugg

SEQ ID NO: 73656 - RNA, 18 nt, Artificial Sequence
  Synthetic
gaaagcccaugaugaugg

SEQ ID NO: 73657 - RNA, 19 nt, Artificial Sequence
  Synthetic
cgaaagcccaugaugaugg

SEQ ID NO: 73658 - RNA, 20 nt, Artificial Sequence
  Synthetic
ccgaaagcccaugaugaugg

SEQ ID NO: 73659 - RNA, 21 nt, Artificial Sequence
  Synthetic
uccgaaagcccaugaugaugg

SEQ ID NO: 73660 - RNA, 22 nt, Artificial Sequence
  Synthetic
uuccgaaagcccaugaugaugg

SEQ ID NO: 73661 - RNA, 23 nt, Artificial Sequence
  Synthetic
uuuccgaaagcccaugaugaugg

SEQ ID NO: 73662 - RNA, 24 nt, Artificial Sequence
  Synthetic
uuuuccgaaagcccaugaugaugg

SEQ ID NO: 73663 - RNA, 18 nt, Artificial Sequence
  Synthetic
ugcgcugauggccuaugg

SEQ ID NO: 73664 - RNA, 19 nt, Artificial Sequence
  Synthetic
augcgcugauggccuaugg

SEQ ID NO: 73665 - RNA, 20 nt, Artificial Sequence
  Synthetic
caugcgcugauggccuaugg

SEQ ID NO: 73666 - RNA, 18 nt, Artificial Sequence
  Synthetic
aggaguuccgcaguaugg

SEQ ID NO: 73667 - RNA, 19 nt, Artificial Sequence
  Synthetic
uaggaguuccgcaguaugg

SEQ ID NO: 73668 - RNA, 20 nt, Artificial Sequence
  Synthetic
cuaggaguuccgcaguaugg

SEQ ID NO: 73669 - RNA, 18 nt, Artificial Sequence
  Synthetic
uuguuaauaauguccugg

SEQ ID NO: 73670 - RNA, 19 nt, Artificial Sequence
  Synthetic
uuuguuaauaauguccugg

SEQ ID NO: 73671 - RNA, 20 nt, Artificial Sequence
  Synthetic
auuuguuaauaauguccugg

SEQ ID NO: 73672 - RNA, 21 nt, Artificial Sequence
  Synthetic
cauuuguuaauaauguccugg

SEQ ID NO: 73673 - RNA, 22 nt, Artificial Sequence
  Synthetic
acauuuguuaauaauguccugg

SEQ ID NO: 73674 - RNA, 23 nt, Artificial Sequence
  Synthetic
cacauuuguuaauaauguccugg

SEQ ID NO: 73675 - RNA, 24 nt, Artificial Sequence
  Synthetic
ucacauuuguuaauaauguccugg

SEQ ID NO: 73676 - RNA, 18 nt, Artificial Sequence
  Synthetic
uauguaaauagugucugg

SEQ ID NO: 73677 - RNA, 19 nt, Artificial Sequence
  Synthetic
guauguaaauagugucugg

SEQ ID NO: 73678 - RNA, 20 nt, Artificial Sequence
  Synthetic
gguauguaaauagugucugg

SEQ ID NO: 73679 - RNA, 21 nt, Artificial Sequence
  Synthetic
ggguauguaaauagugucugg

SEQ ID NO: 73680 - RNA, 22 nt, Artificial Sequence
  Synthetic
aggguauguaaauagugucugg

SEQ ID NO: 73681 - RNA, 23 nt, Artificial Sequence
  Synthetic
uaggguauguaaauagugucugg

SEQ ID NO: 73682 - RNA, 24 nt, Artificial Sequence
  Synthetic
auaggguauguaaauagugucugg

SEQ ID NO: 73683 - RNA, 18 nt, Artificial Sequence
  Synthetic
cugaaagccagacagugg

SEQ ID NO: 73684 - RNA, 19 nt, Artificial Sequence
  Synthetic
acugaaagccagacagugg

SEQ ID NO: 73685 - RNA, 20 nt, Artificial Sequence
  Synthetic
aacugaaagccagacagugg

SEQ ID NO: 73686 - RNA, 21 nt, Artificial Sequence
  Synthetic
uaacugaaagccagacagugg

SEQ ID NO: 73687 - RNA, 22 nt, Artificial Sequence
  Synthetic
auaacugaaagccagacagugg

SEQ ID NO: 73688 - RNA, 23 nt, Artificial Sequence
  Synthetic
uauaacugaaagccagacagugg

SEQ ID NO: 73689 - RNA, 24 nt, Artificial Sequence
  Synthetic
auauaacugaaagccagacagugg

SEQ ID NO: 73690 - RNA, 18 nt, Artificial Sequence
  Synthetic
gcuggauccaacuggugg

SEQ ID NO: 73691 - RNA, 19 nt, Artificial Sequence
  Synthetic
ugcuggauccaacuggugg

SEQ ID NO: 73692 - RNA, 20 nt, Artificial Sequence
  Synthetic
augcuggauccaacuggugg

SEQ ID NO: 73693 - RNA, 21 nt, Artificial Sequence
  Synthetic
aaugcuggauccaacuggugg

SEQ ID NO: 73694 - RNA, 22 nt, Artificial Sequence
  Synthetic
gaaugcuggauccaacuggugg

SEQ ID NO: 73695 - RNA, 23 nt, Artificial Sequence
  Synthetic
ugaaugcuggauccaacuggugg

SEQ ID NO: 73696 - RNA, 24 nt, Artificial Sequence
  Synthetic
cugaaugcuggauccaacuggugg

SEQ ID NO: 73697 - RNA, 18 nt, Artificial Sequence
  Synthetic
uuccugacugccgauugg

SEQ ID NO: 73698 - RNA, 19 nt, Artificial Sequence
  Synthetic
cuuccugacugccgauugg

SEQ ID NO: 73699 - RNA, 20 nt, Artificial Sequence
  Synthetic
ccuuccugacugccgauugg

SEQ ID NO: 73700 - RNA, 21 nt, Artificial Sequence
  Synthetic
gccuuccugacugccgauugg

SEQ ID NO: 73701 - RNA, 22 nt, Artificial Sequence
  Synthetic
ugccuuccugacugccgauugg

SEQ ID NO: 73702 - RNA, 23 nt, Artificial Sequence
  Synthetic
cugccuuccugacugccgauugg

SEQ ID NO: 73703 - RNA, 24 nt, Artificial Sequence
  Synthetic
gcugccuuccugacugccgauugg

SEQ ID NO: 73704 - RNA, 18 nt, Artificial Sequence
  Synthetic
caaagguggagugauugg

SEQ ID NO: 73705 - RNA, 19 nt, Artificial Sequence
  Synthetic
ucaaagguggagugauugg

SEQ ID NO: 73706 - RNA, 20 nt, Artificial Sequence
  Synthetic
cucaaagguggagugauugg

SEQ ID NO: 73707 - RNA, 21 nt, Artificial Sequence
  Synthetic
ucucaaagguggagugauugg

SEQ ID NO: 73708 - RNA, 22 nt, Artificial Sequence
  Synthetic
cucucaaagguggagugauugg

SEQ ID NO: 73709 - RNA, 23 nt, Artificial Sequence
  Synthetic
ucucucaaagguggagugauugg

SEQ ID NO: 73710 - RNA, 24 nt, Artificial Sequence
  Synthetic
gucucucaaagguggagugauugg

SEQ ID NO: 73711 - RNA, 18 nt, Artificial Sequence
  Synthetic
gcaucagcaaacacuugg

SEQ ID NO: 73712 - RNA, 19 nt, Artificial Sequence
  Synthetic
ugcaucagcaaacacuugg

SEQ ID NO: 73713 - RNA, 20 nt, Artificial Sequence
  Synthetic
uugcaucagcaaacacuugg

SEQ ID NO: 73714 - RNA, 21 nt, Artificial Sequence
  Synthetic
guugcaucagcaaacacuugg

SEQ ID NO: 73715 - RNA, 22 nt, Artificial Sequence
  Synthetic
gguugcaucagcaaacacuugg

SEQ ID NO: 73716 - RNA, 23 nt, Artificial Sequence
  Synthetic
ggguugcaucagcaaacacuugg

SEQ ID NO: 73717 - RNA, 24 nt, Artificial Sequence
  Synthetic
gggguugcaucagcaaacacuugg

SEQ ID NO: 73718 - RNA, 18 nt, Artificial Sequence
  Synthetic
ucuuauguaagaccuugg

SEQ ID NO: 73719 - RNA, 19 nt, Artificial Sequence
  Synthetic
cucuuauguaagaccuugg

SEQ ID NO: 73720 - RNA, 20 nt, Artificial Sequence
  Synthetic
ccucuuauguaagaccuugg

SEQ ID NO: 73721 - RNA, 21 nt, Artificial Sequence
  Synthetic
uccucuuauguaagaccuugg

SEQ ID NO: 73722 - RNA, 22 nt, Artificial Sequence
  Synthetic
guccucuuauguaagaccuugg

SEQ ID NO: 73723 - RNA, 23 nt, Artificial Sequence
  Synthetic
aguccucuuauguaagaccuugg

SEQ ID NO: 73724 - RNA, 24 nt, Artificial Sequence
  Synthetic
gaguccucuuauguaagaccuugg

SEQ ID NO: 73725 - RNA, 18 nt, Artificial Sequence
  Synthetic
aaaggccuuguaaguugg

SEQ ID NO: 73726 - RNA, 19 nt, Artificial Sequence
  Synthetic
gaaaggccuuguaaguugg

SEQ ID NO: 73727 - RNA, 20 nt, Artificial Sequence
  Synthetic
agaaaggccuuguaaguugg

SEQ ID NO: 73728 - RNA, 21 nt, Artificial Sequence
  Synthetic
cagaaaggccuuguaaguugg

SEQ ID NO: 73729 - RNA, 22 nt, Artificial Sequence
  Synthetic
acagaaaggccuuguaaguugg

SEQ ID NO: 73730 - RNA, 23 nt, Artificial Sequence
  Synthetic
cacagaaaggccuuguaaguugg

SEQ ID NO: 73731 - RNA, 24 nt, Artificial Sequence
  Synthetic
acacagaaaggccuuguaaguugg

SEQ ID NO: 73732 - RNA, 18 nt, Artificial Sequence
  Synthetic
ggggacugcgaauuuugg

SEQ ID NO: 73733 - RNA, 19 nt, Artificial Sequence
  Synthetic
uggggacugcgaauuuugg

SEQ ID NO: 73734 - RNA, 20 nt, Artificial Sequence
  Synthetic
uuggggacugcgaauuuugg

SEQ ID NO: 73735 - RNA, 21 nt, Artificial Sequence
  Synthetic
  misc_feature (1)..(1): n is a, c, g, or u
nuuggggacugcgaauuuugg

SEQ ID NO: 73736 - RNA, 22 nt, Artificial Sequence
  Synthetic
  misc_feature (2)..(2): n is a, c, g, or u
gnuuggggacugcgaauuuugg

SEQ ID NO: 73737 - RNA, 23 nt, Artificial Sequence
  Synthetic
  misc_feature (3)..(3): n is a, c, g, or u
agnuuggggacugcgaauuuugg

SEQ ID NO: 73738 - RNA, 24 nt, Artificial Sequence
  Synthetic
  misc_feature (4)..(4): n is a, c, g, or u
gagnuuggggacugcgaauuuugg

SEQ ID NO: 73739 - RNA, 18 nt, Artificial Sequence
  Synthetic
  misc_feature (11)..(11): n is a, c, g, or u
  misc_feature (17)..(17): n is a, c, g, or u
ugagugcagunuggugng

SEQ ID NO: 73740 - RNA, 19 nt, Artificial Sequence
  Synthetic
  misc_feature (12)..(12): n is a, c, g, or u
  misc_feature (18)..(18): n is a, c, g, or u
cugagugcagunuggugng

SEQ ID NO: 73741 - RNA, 20 nt, Artificial Sequence
  Synthetic
  misc_feature (13)..(13): n is a, c, g, or u
  misc_feature (19)..(19): n is a, c, g, or u
ccugagugcagunuggugng

SEQ ID NO: 73742 - RNA, 21 nt, Artificial Sequence
  Synthetic
  misc_feature (14)..(14): n is a, c, g, or u
  misc_feature (20)..(20): n is a, c, g, or u
gccugagugcagunuggugng

SEQ ID NO: 73743 - RNA, 22 nt, Artificial Sequence
  Synthetic
  misc_feature (15)..(15): n is a, c, g, or u
  misc_feature (21)..(21): n is a, c, g, or u
ugccugagugcagunuggugng

SEQ ID NO: 73744 - RNA, 23 nt, Artificial Sequence
  Synthetic
  misc_feature (16)..(16): n is a, c, g, or u
  misc_feature (22)..(22): n is a, c, g, or u
uugccugagugcagunuggugng

SEQ ID NO: 73745 - RNA, 24 nt, Artificial Sequence
  Synthetic
  misc_feature (17)..(17): n is a, c, g, or u
  misc_feature (23)..(23): n is a, c, g, or u
cuugccugagugcagunuggugng

SEQ ID NO: 73746 - RNA, 18 nt, Artificial Sequence
  Synthetic
  misc_feature (8)..(8): n is a, c, g, or u
  misc_feature (17)..(17): n is a, c, g, or u
cuaggggnaaauauuung

SEQ ID NO: 73747 - RNA, 19 nt, Artificial Sequence
  Synthetic
  misc_feature (9)..(9): n is a, c, g, or u
  misc_feature (18)..(18): n is a, c, g, or u
ucuaggggnaaauauuung

SEQ ID NO: 73748 - RNA, 20 nt, Artificial Sequence
  Synthetic
  misc_feature (10)..(10): n is a, c, g, or u
  misc_feature (19)..(19): n is a, c, g, or u
cucuaggggnaaauauuung

SEQ ID NO: 73749 - RNA, 21 nt, Artificial Sequence
  Synthetic
  misc_feature (11)..(11): n is a, c, g, or u
  misc_feature (20)..(20): n is a, c, g, or u
ucucuaggggnaaauauuung

SEQ ID NO: 73750 - RNA, 22 nt, Artificial Sequence
  Synthetic
  misc_feature (12)..(12): n is a, c, g, or u
  misc_feature (21)..(21): n is a, c, g, or u
uucucuaggggnaaauauuung

SEQ ID NO: 73751 - RNA, 23 nt, Artificial Sequence
  Synthetic
  misc_feature (13)..(13): n is a, c, g, or u
  misc_feature (22)..(22): n is a, c, g, or u
uuucucuaggggnaaauauuung

SEQ ID NO: 73752 - RNA, 24 nt, Artificial Sequence
  Synthetic
  misc_feature (14)..(14): n is a, c, g, or u
  misc_feature (23)..(23): n is a, c, g, or u
cuuucucuaggggnaaauauuung

SEQ ID NO: 73753 - RNA, 18 nt, Artificial Sequence
  Synthetic
aaagugagacaagaaaug

SEQ ID NO: 73754 - RNA, 19 nt, Artificial Sequence
  Synthetic
aaaagugagacaagaaaug

SEQ ID NO: 73755 - RNA, 20 nt, Artificial Sequence
  Synthetic
caaaagugagacaagaaaug

SEQ ID NO: 73756 - RNA, 21 nt, Artificial Sequence
  Synthetic
ccaaaagugagacaagaaaug

SEQ ID NO: 73757 - RNA, 22 nt, Artificial Sequence
  Synthetic
uccaaaagugagacaagaaaug

SEQ ID NO: 73758 - RNA, 23 nt, Artificial Sequence
  Synthetic
uuccaaaagugagacaagaaaug

SEQ ID NO: 73759 - RNA, 24 nt, Artificial Sequence
  Synthetic
cuuccaaaagugagacaagaaaug

SEQ ID NO: 73760 - RNA, 18 nt, Artificial Sequence
  Synthetic
  misc_feature (1)..(1): n is a, c, g, or u
  misc_feature (7)..(7): n is a, c, g, or u
nuggugnggugaacaaug

SEQ ID NO: 73761 - RNA, 19 nt, Artificial Sequence
  Synthetic
  misc_feature (2)..(2): n is a, c, g, or u
  misc_feature (8)..(8): n is a, c, g, or u
unuggugnggugaacaaug

SEQ ID NO: 73762 - RNA, 20 nt, Artificial Sequence
  Synthetic
  misc_feature (3)..(3): n is a, c, g, or u
  misc_feature (9)..(9): n is a, c, g, or u
gunuggugnggugaacaaug

SEQ ID NO: 73763 - RNA, 21 nt, Artificial Sequence
  Synthetic
  misc_feature (4)..(4): n is a, c, g, or u
  misc_feature (10)..(10): n is a, c, g, or u
agunuggugnggugaacaaug

SEQ ID NO: 73764 - RNA, 22 nt, Artificial Sequence
  Synthetic
  misc_feature (5)..(5): n is a, c, g, or u
  misc_feature (11)..(11): n is a, c, g, or u
cagunuggugnggugaacaaug

SEQ ID NO: 73765 - RNA, 23 nt, Artificial Sequence
  Synthetic
  misc_feature (6)..(6): n is a, c, g, or u
  misc_feature (12)..(12): n is a, c, g, or u
gcagunuggugnggugaacaaug

SEQ ID NO: 73766 - RNA, 24 nt, Artificial Sequence
  Synthetic
  misc_feature (7)..(7): n is a, c, g, or u
  misc_feature (13)..(13): n is a, c, g, or u
ugcagunuggugnggugaacaaug

SEQ ID NO: 73767 - RNA, 18 nt, Artificial Sequence
  Synthetic
ucugguuuggaaguaaug

SEQ ID NO: 73768 - RNA, 19 nt, Artificial Sequence
  Synthetic
gucugguuuggaaguaaug

SEQ ID NO: 73769 - RNA, 20 nt, Artificial Sequence
  Synthetic
ugucugguuuggaaguaaug

SEQ ID NO: 73770 - RNA, 21 nt, Artificial Sequence
  Synthetic
gugucugguuuggaaguaaug

SEQ ID NO: 73771 - RNA, 22 nt, Artificial Sequence
  Synthetic
agugucugguuuggaaguaaug

SEQ ID NO: 73772 - RNA, 23 nt, Artificial Sequence
  Synthetic
uagugucugguuuggaaguaaug

SEQ ID NO: 73773 - RNA, 24 nt, Artificial Sequence
  Synthetic
auagugucugguuuggaaguaaug

SEQ ID NO: 73774 - RNA, 18 nt, Artificial Sequence
  Synthetic
guuuugaacagcaacaug

SEQ ID NO: 73775 - RNA, 19 nt, Artificial Sequence
  Synthetic
gguuuugaacagcaacaug

SEQ ID NO: 73776 - RNA, 20 nt, Artificial Sequence
  Synthetic
agguuuugaacagcaacaug

SEQ ID NO: 73777 - RNA, 21 nt, Artificial Sequence
  Synthetic
aagguuuugaacagcaacaug

SEQ ID NO: 73778 - RNA, 22 nt, Artificial Sequence
  Synthetic
gaagguuuugaacagcaacaug

SEQ ID NO: 73779 - RNA, 23 nt, Artificial Sequence
  Synthetic
cgaagguuuugaacagcaacaug

SEQ ID NO: 73780 - RNA, 24 nt, Artificial Sequence
  Synthetic
ccgaagguuuugaacagcaacaug

SEQ ID NO: 73781 - RNA, 18 nt, Artificial Sequence
  Synthetic
cuugaacaguaggacaug

SEQ ID NO: 73782 - RNA, 19 nt, Artificial Sequence
  Synthetic
gcuugaacaguaggacaug

SEQ ID NO: 73783 - RNA, 20 nt, Artificial Sequence
  Synthetic
ggcuugaacaguaggacaug

SEQ ID NO: 73784 - RNA, 21 nt, Artificial Sequence
  Synthetic
aggcuugaacaguaggacaug

SEQ ID NO: 73785 - RNA, 22 nt, Artificial Sequence
  Synthetic
gaggcuugaacaguaggacaug

SEQ ID NO: 73786 - RNA, 23 nt, Artificial Sequence
  Synthetic
ggaggcuugaacaguaggacaug

SEQ ID NO: 73787 - RNA, 24 nt, Artificial Sequence
  Synthetic
uggaggcuugaacaguaggacaug

SEQ ID NO: 73788 - RNA, 18 nt, Artificial Sequence
  Synthetic
aaaaaucuagcaggcaug

SEQ ID NO: 73789 - RNA, 19 nt, Artificial Sequence
  Synthetic
aaaaaaucuagcaggcaug

SEQ ID NO: 73790 - RNA, 20 nt, Artificial Sequence
  Synthetic
gaaaaaaucuagcaggcaug

SEQ ID NO: 73791 - RNA, 21 nt, Artificial Sequence
  Synthetic
ggaaaaaaucuagcaggcaug

SEQ ID NO: 73792 - RNA, 22 nt, Artificial Sequence
  Synthetic
gggaaaaaaucuagcaggcaug

SEQ ID NO: 73793 - RNA, 23 nt, Artificial Sequence
  Synthetic
ugggaaaaaaucuagcaggcaug

SEQ ID NO: 73794 - RNA, 24 nt, Artificial Sequence
  Synthetic
augggaaaaaaucuagcaggcaug

SEQ ID NO: 73795 - RNA, 18 nt, Artificial Sequence
  Synthetic
aggaugaagaggaagaug

SEQ ID NO: 73796 - RNA, 19 nt, Artificial Sequence
  Synthetic
caggaugaagaggaagaug

SEQ ID NO: 73797 - RNA, 20 nt, Artificial Sequence
  Synthetic
gcaggaugaagaggaagaug

SEQ ID NO: 73798 - RNA, 21 nt, Artificial Sequence
  Synthetic
agcaggaugaagaggaagaug

SEQ ID NO: 73799 - RNA, 22 nt, Artificial Sequence
  Synthetic
cagcaggaugaagaggaagaug

SEQ ID NO: 73800 - RNA, 23 nt, Artificial Sequence
  Synthetic
gcagcaggaugaagaggaagaug

SEQ ID NO: 73801 - RNA, 24 nt, Artificial Sequence
  Synthetic
agcagcaggaugaagaggaagaug

SEQ ID NO: 73802 - RNA, 18 nt, Artificial Sequence
  Synthetic
cacacgguccggcagaug

SEQ ID NO: 73803 - RNA, 19 nt, Artificial Sequence
  Synthetic
gcacacgguccggcagaug

SEQ ID NO: 73804 - RNA, 20 nt, Artificial Sequence
  Synthetic
ugcacacgguccggcagaug

SEQ ID NO: 73805 - RNA, 21 nt, Artificial Sequence
  Synthetic
gugcacacgguccggcagaug

SEQ ID NO: 73806 - RNA, 22 nt, Artificial Sequence
  Synthetic
agugcacacgguccggcagaug

SEQ ID NO: 73807 - RNA, 23 nt, Artificial Sequence
  Synthetic
aagugcacacgguccggcagaug

SEQ ID NO: 73808 - RNA, 24 nt, Artificial Sequence
  Synthetic
gaagugcacacgguccggcagaug

SEQ ID NO: 73809 - RNA, 18 nt, Artificial Sequence
  Synthetic
ggacaugaacaagagaug

SEQ ID NO: 73810 - RNA, 19 nt, Artificial Sequence
  Synthetic
aggacaugaacaagagaug

SEQ ID NO: 73811 - RNA, 20 nt, Artificial Sequence
  Synthetic
uaggacaugaacaagagaug

SEQ ID NO: 73812 - RNA, 21 nt, Artificial Sequence
  Synthetic
guaggacaugaacaagagaug

SEQ ID NO: 73813 - RNA, 22 nt, Artificial Sequence
  Synthetic
aguaggacaugaacaagagaug

SEQ ID NO: 73814 - RNA, 23 nt, Artificial Sequence
  Synthetic
caguaggacaugaacaagagaug

SEQ ID NO: 73815 - RNA, 24 nt, Artificial Sequence
  Synthetic
acaguaggacaugaacaagagaug

SEQ ID NO: 73816 - RNA, 18 nt, Artificial Sequence
  Synthetic
  misc_feature (9)..(9): n is a, c, g, or u
aaauauuunguagagaug

SEQ ID NO: 73817 - RNA, 19 nt, Artificial Sequence
  Synthetic
  misc_feature (1)..(1): n is a, c, g, or u
  misc_feature (10)..(10): n is a, c, g, or u
naaauauuunguagagaug

SEQ ID NO: 73818 - RNA, 20 nt, Artificial Sequence
  Synthetic
  misc_feature (2)..(2): n is a, c, g, or u
  misc_feature (11)..(11): n is a, c, g, or u
gnaaauauuunguagagaug

SEQ ID NO: 73819 - RNA, 21 nt, Artificial Sequence
  Synthetic
  misc_feature (3)..(3): n is a, c, g, or u
  misc_feature (12)..(12): n is a, c, g, or u
ggnaaauauuunguagagaug

SEQ ID NO: 73820 - RNA, 22 nt, Artificial Sequence
  Synthetic
  misc_feature (4)..(4): n is a, c, g, or u
  misc_feature (13)..(13): n is a, c, g, or u
gggnaaauauuunguagagaug

SEQ ID NO: 73821 - RNA, 23 nt, Artificial Sequence
  Synthetic
  misc_feature (5)..(5): n is a, c, g, or u
  misc_feature (14)..(14): n is a, c, g, or u
ggggnaaauauuunguagagaug

SEQ ID NO: 73822 - RNA, 24 nt, Artificial Sequence
  Synthetic
  misc_feature (6)..(6): n is a, c, g, or u
  misc_feature (15)..(15): n is a, c, g, or u
aggggnaaauauuunguagagaug

SEQ ID NO: 73823 - RNA, 18 nt, Artificial Sequence
  Synthetic
gagaagauugacgagaug

SEQ ID NO: 73824 - RNA, 19 nt, Artificial Sequence
  Synthetic
cgagaagauugacgagaug

SEQ ID NO: 73825 - RNA, 20 nt, Artificial Sequence
  Synthetic
ucgagaagauugacgagaug

SEQ ID NO: 73826 - RNA, 21 nt, Artificial Sequence
  Synthetic
cucgagaagauugacgagaug

SEQ ID NO: 73827 - RNA, 22 nt, Artificial Sequence
  Synthetic
ccucgagaagauugacgagaug

SEQ ID NO: 73828 - RNA, 23 nt, Artificial Sequence
  Synthetic
uccucgagaagauugacgagaug

SEQ ID NO: 73829 - RNA, 24 nt, Artificial Sequence
  Synthetic
auccucgagaagauugacgagaug

SEQ ID NO: 73830 - RNA, 18 nt, Artificial Sequence
  Synthetic
aggcauagcagcaggaug

SEQ ID NO: 73831 - RNA, 19 nt, Artificial Sequence
  Synthetic
gaggcauagcagcaggaug

SEQ ID NO: 73832 - RNA, 20 nt, Artificial Sequence
  Synthetic
ugaggcauagcagcaggaug

SEQ ID NO: 73833 - RNA, 21 nt, Artificial Sequence
  Synthetic
augaggcauagcagcaggaug

SEQ ID NO: 73834 - RNA, 22 nt, Artificial Sequence
  Synthetic
gaugaggcauagcagcaggaug

SEQ ID NO: 73835 - RNA, 23 nt, Artificial Sequence
  Synthetic
agaugaggcauagcagcaggaug

SEQ ID NO: 73836 - RNA, 24 nt, Artificial Sequence
  Synthetic
aagaugaggcauagcagcaggaug

SEQ ID NO: 73837 - RNA, 18 nt, Artificial Sequence
  Synthetic
uuccgaaagcccaugaug

SEQ ID NO: 73838 - RNA, 19 nt, Artificial Sequence
  Synthetic
uuuccgaaagcccaugaug

SEQ ID NO: 73839 - RNA, 20 nt, Artificial Sequence
  Synthetic
uuuuccgaaagcccaugaug

SEQ ID NO: 73840 - RNA, 21 nt, Artificial Sequence
  Synthetic
auuuuccgaaagcccaugaug

SEQ ID NO: 73841 - RNA, 22 nt, Artificial Sequence
  Synthetic
aauuuuccgaaagcccaugaug

SEQ ID NO: 73842 - RNA, 23 nt, Artificial Sequence
  Synthetic
gaauuuuccgaaagcccaugaug

SEQ ID NO: 73843 - RNA, 24 nt, Artificial Sequence
  Synthetic
ggaauuuuccgaaagcccaugaug

SEQ ID NO: 73844 - RNA, 18 nt, Artificial Sequence
  Synthetic
augcgcugauggccuaug

SEQ ID NO: 73845 - RNA, 19 nt, Artificial Sequence
  Synthetic
caugcgcugauggccuaug

SEQ ID NO: 73846 - RNA, 20 nt, Artificial Sequence
  Synthetic
gcaugcgcugauggccuaug

SEQ ID NO: 73847 - RNA, 21 nt, Artificial Sequence
  Synthetic
cgcaugcgcugauggccuaug

SEQ ID NO: 73848 - RNA, 22 nt, Artificial Sequence
  Synthetic
  misc_feature (1)..(1): n is a, c, g, or u
ncgcaugcgcugauggccuaug

SEQ ID NO: 73849 - RNA, 23 nt, Artificial Sequence
  Synthetic
  misc_feature (2)..(2): n is a, c, g, or u
cncgcaugcgcugauggccuaug

SEQ ID NO: 73850 - RNA, 24 nt, Artificial Sequence
  Synthetic
  misc_feature (3)..(3): n is a, c, g, or u
ccncgcaugcgcugauggccuaug

SEQ ID NO: 73851 - RNA, 18 nt, Artificial Sequence
  Synthetic
uccaagaguccucuuaug

SEQ ID NO: 73852 - RNA, 19 nt, Artificial Sequence
  Synthetic
guccaagaguccucuuaug

SEQ ID NO: 73853 - RNA, 20 nt, Artificial Sequence
  Synthetic
aguccaagaguccucuuaug

SEQ ID NO: 73854 - RNA, 21 nt, Artificial Sequence
  Synthetic
gaguccaagaguccucuuaug

SEQ ID NO: 73855 - RNA, 22 nt, Artificial Sequence
  Synthetic
agaguccaagaguccucuuaug

SEQ ID NO: 73856 - RNA, 23 nt, Artificial Sequence
  Synthetic
gagaguccaagaguccucuuaug

SEQ ID NO: 73857 - RNA, 24 nt, Artificial Sequence
  Synthetic
  misc_feature (1)..(1): n is a, c, g, or u
ngagaguccaagaguccucuuaug

SEQ ID NO: 73858 - RNA, 18 nt, Artificial Sequence
  Synthetic
aagcccggcgaaccacug

SEQ ID NO: 73859 - RNA, 19 nt, Artificial Sequence
  Synthetic
aaagcccggcgaaccacug

SEQ ID NO: 73860 - RNA, 20 nt, Artificial Sequence
  Synthetic
gaaagcccggcgaaccacug

SEQ ID NO: 73861 - RNA, 21 nt, Artificial Sequence
  Synthetic
ggaaagcccggcgaaccacug

SEQ ID NO: 73862 - RNA, 22 nt, Artificial Sequence
  Synthetic
gggaaagcccggcgaaccacug

SEQ ID NO: 73863 - RNA, 23 nt, Artificial Sequence
  Synthetic
ggggaaagcccggcgaaccacug

SEQ ID NO: 73864 - RNA, 24 nt, Artificial Sequence
  Synthetic
gggggaaagcccggcgaaccacug

SEQ ID NO: 73865 - RNA, 18 nt, Artificial Sequence
  Synthetic
cuagaagaucucuuacug

SEQ ID NO: 73866 - RNA, 19 nt, Artificial Sequence
  Synthetic
ucuagaagaucucuuacug

SEQ ID NO: 73867 - RNA, 20 nt, Artificial Sequence
  Synthetic
aucuagaagaucucuuacug

SEQ ID NO: 73868 - RNA, 21 nt, Artificial Sequence
  Synthetic
uaucuagaagaucucuuacug

SEQ ID NO: 73869 - RNA, 22 nt, Artificial Sequence
  Synthetic
guaucuagaagaucucuuacug

SEQ ID NO: 73870 - RNA, 23 nt, Artificial Sequence
  Synthetic
gguaucuagaagaucucuuacug

SEQ ID NO: 73871 - RNA, 24 nt, Artificial Sequence
  Synthetic
cgguaucuagaagaucucuuacug

SEQ ID NO: 73872 - RNA, 18 nt, Artificial Sequence
  Synthetic
uucguuuuucauuuacug

SEQ ID NO: 73873 - RNA, 19 nt, Artificial Sequence
  Synthetic
cuucguuuuucauuuacug

SEQ ID NO: 73874 - RNA, 20 nt, Artificial Sequence
  Synthetic
ucuucguuuuucauuuacug

SEQ ID NO: 73875 - RNA, 21 nt, Artificial Sequence
  Synthetic
aucuucguuuuucauuuacug

SEQ ID NO: 73876 - RNA, 22 nt, Artificial Sequence
  Synthetic
aaucuucguuuuucauuuacug

SEQ ID NO: 73877 - RNA, 23 nt, Artificial Sequence
  Synthetic
uaaucuucguuuuucauuuacug

SEQ ID NO: 73878 - RNA, 24 nt, Artificial Sequence
  Synthetic
uuaaucuucguuuuucauuuacug

SEQ ID NO: 73879 - RNA, 18 nt, Artificial Sequence
  Synthetic
cgagaaagugaaagccug

SEQ ID NO: 73880 - RNA, 19 nt, Artificial Sequence
  Synthetic
gcgagaaagugaaagccug

SEQ ID NO: 73881 - RNA, 20 nt, Artificial Sequence
  Synthetic
ggcgagaaagugaaagccug

SEQ ID NO: 73882 - RNA, 21 nt, Artificial Sequence
  Synthetic
uggcgagaaagugaaagccug

SEQ ID NO: 73883 - RNA, 22 nt, Artificial Sequence
  Synthetic
uuggcgagaaagugaaagccug

SEQ ID NO: 73884 - RNA, 23 nt, Artificial Sequence
  Synthetic
guuggcgagaaagugaaagccug

SEQ ID NO: 73885 - RNA, 24 nt, Artificial Sequence
  Synthetic
aguuggcgagaaagugaaagccug

SEQ ID NO: 73886 - RNA, 18 nt, Artificial Sequence
  Synthetic
ucuuacucugggauccug

SEQ ID NO: 73887 - RNA, 19 nt, Artificial Sequence
  Synthetic
cucuuacucugggauccug

SEQ ID NO: 73888 - RNA, 20 nt, Artificial Sequence
  Synthetic
ccucuuacucugggauccug

SEQ ID NO: 73889 - RNA, 21 nt, Artificial Sequence
  Synthetic
gccucuuacucugggauccug

SEQ ID NO: 73890 - RNA, 22 nt, Artificial Sequence
  Synthetic
ggccucuuacucugggauccug

SEQ ID NO: 73891 - RNA, 23 nt, Artificial Sequence
  Synthetic
aggccucuuacucugggauccug

SEQ ID NO: 73892 - RNA, 24 nt, Artificial Sequence
  Synthetic
caggccucuuacucugggauccug

SEQ ID NO: 73893 - RNA, 18 nt, Artificial Sequence
  Synthetic
uugguggucuauaagcug

SEQ ID NO: 73894 - RNA, 19 nt, Artificial Sequence
  Synthetic
uuugguggucuauaagcug

SEQ ID NO: 73895 - RNA, 20 nt, Artificial Sequence
  Synthetic
auuugguggucuauaagcug

SEQ ID NO: 73896 - RNA, 18 nt, Artificial Sequence
  Synthetic
ccgcaggauucagcgcug

SEQ ID NO: 73897 - RNA, 19 nt, Artificial Sequence
  Synthetic
uccgcaggauucagcgcug

SEQ ID NO: 73898 - RNA, 20 nt, Artificial Sequence
  Synthetic
guccgcaggauucagcgcug

SEQ ID NO: 73899 - RNA, 21 nt, Artificial Sequence
  Synthetic
cguccgcaggauucagcgcug

SEQ ID NO: 73900 - RNA, 22 nt, Artificial Sequence
  Synthetic
ucguccgcaggauucagcgcug

SEQ ID NO: 73901 - RNA, 23 nt, Artificial Sequence
  Synthetic
gucguccgcaggauucagcgcug

SEQ ID NO: 73902 - RNA, 24 nt, Artificial Sequence
  Synthetic
ggucguccgcaggauucagcgcug

SEQ ID NO: 73903 - RNA, 18 nt, Artificial Sequence
  Synthetic
gauugagaucuucgucug

SEQ ID NO: 73904 - RNA, 19 nt, Artificial Sequence
  Synthetic
cgauugagaucuucgucug

SEQ ID NO: 73905 - RNA, 20 nt, Artificial Sequence
  Synthetic
gcgauugagaucuucgucug

SEQ ID NO: 73906 - RNA, 18 nt, Artificial Sequence
  Synthetic
acugaaagccagacagug

SEQ ID NO: 73907 - RNA, 19 nt, Artificial Sequence
  Synthetic
aacugaaagccagacagug

SEQ ID NO: 73908 - RNA, 20 nt, Artificial Sequence
  Synthetic
uaacugaaagccagacagug

SEQ ID NO: 73909 - RNA, 21 nt, Artificial Sequence
  Synthetic
auaacugaaagccagacagug

SEQ ID NO: 73910 - RNA, 22 nt, Artificial Sequence
  Synthetic
uauaacugaaagccagacagug

SEQ ID NO: 73911 - RNA, 23 nt, Artificial Sequence
  Synthetic
auauaacugaaagccagacagug

SEQ ID NO: 73912 - RNA, 24 nt, Artificial Sequence
  Synthetic
cauauaacugaaagccagacagug

SEQ ID NO: 73913 - RNA, 18 nt, Artificial Sequence
  Synthetic
ucucucaaagguggagug

SEQ ID NO: 73914 - RNA, 19 nt, Artificial Sequence
  Synthetic
gucucucaaagguggagug

SEQ ID NO: 73915 - RNA, 20 nt, Artificial Sequence
  Synthetic
ugucucucaaagguggagug

SEQ ID NO: 73916 - RNA, 21 nt, Artificial Sequence
  Synthetic
gugucucucaaagguggagug

SEQ ID NO: 73917 - RNA, 22 nt, Artificial Sequence
  Synthetic
agugucucucaaagguggagug

SEQ ID NO: 73918 - RNA, 23 nt, Artificial Sequence
  Synthetic
gagugucucucaaagguggagug

SEQ ID NO: 73919 - RNA, 24 nt, Artificial Sequence
  Synthetic
ugagugucucucaaagguggagug

SEQ ID NO: 73920 - RNA, 18 nt, Artificial Sequence
  Synthetic
acaagagguuggugagug

SEQ ID NO: 73921 - RNA, 19 nt, Artificial Sequence
  Synthetic
gacaagagguuggugagug

SEQ ID NO: 73922 - RNA, 20 nt, Artificial Sequence
  Synthetic
ggacaagagguuggugagug

SEQ ID NO: 73923 - RNA, 21 nt, Artificial Sequence
  Synthetic
aggacaagagguuggugagug

SEQ ID NO: 73924 - RNA, 22 nt, Artificial Sequence
  Synthetic
gaggacaagagguuggugagug

SEQ ID NO: 73925 - RNA, 23 nt, Artificial Sequence
  Synthetic
ggaggacaagagguuggugagug

SEQ ID NO: 73926 - RNA, 24 nt, Artificial Sequence
  Synthetic
uggaggacaagagguuggugagug

SEQ ID NO: 73927 - RNA, 18 nt, Artificial Sequence
  Synthetic
uggucuccaugcgacgug

SEQ ID NO: 73928 - RNA, 19 nt, Artificial Sequence
  Synthetic
guggucuccaugcgacgug

SEQ ID NO: 73929 - RNA, 20 nt, Artificial Sequence
  Synthetic
gguggucuccaugcgacgug

SEQ ID NO: 73930 - RNA, 21 nt, Artificial Sequence
  Synthetic
cgguggucuccaugcgacgug

SEQ ID NO: 73931 - RNA, 22 nt, Artificial Sequence
  Synthetic
acgguggucuccaugcgacgug

SEQ ID NO: 73932 - RNA, 23 nt, Artificial Sequence
  Synthetic
cacgguggucuccaugcgacgug

SEQ ID NO: 73933 - RNA, 24 nt, Artificial Sequence
  Synthetic
ucacgguggucuccaugcgacgug

SEQ ID NO: 73934 - RNA, 18 nt, Artificial Sequence
  Synthetic
agagaggugcgccccgug

SEQ ID NO: 73935 - RNA, 19 nt, Artificial Sequence
  Synthetic
aagagaggugcgccccgug

SEQ ID NO: 73936 - RNA, 20 nt, Artificial Sequence
  Synthetic
aaagagaggugcgccccgug

SEQ ID NO: 73937 - RNA, 18 nt, Artificial Sequence
  Synthetic
ccccaaaaggccuccgug

SEQ ID NO: 73938 - RNA, 19 nt, Artificial Sequence
  Synthetic
accccaaaaggccuccgug

SEQ ID NO: 73939 - RNA, 20 nt, Artificial Sequence
  Synthetic
caccccaaaaggccuccgug

SEQ ID NO: 73940 - RNA, 21 nt, Artificial Sequence
  Synthetic
ccaccccaaaaggccuccgug

SEQ ID NO: 73941 - RNA, 22 nt, Artificial Sequence
  Synthetic
uccaccccaaaaggccuccgug

SEQ ID NO: 73942 - RNA, 23 nt, Artificial Sequence
  Synthetic
cuccaccccaaaaggccuccgug

SEQ ID NO: 73943 - RNA, 24 nt, Artificial Sequence
  Synthetic
gcuccaccccaaaaggccuccgug

SEQ ID NO: 73944 - RNA, 18 nt, Artificial Sequence
  Synthetic
gaugauuaggcagaggug

SEQ ID NO: 73945 - RNA, 19 nt, Artificial Sequence
  Synthetic
agaugauuaggcagaggug

SEQ ID NO: 73946 - RNA, 20 nt, Artificial Sequence
  Synthetic
gagaugauuaggcagaggug

SEQ ID NO: 73947 - RNA, 21 nt, Artificial Sequence
  Synthetic
agagaugauuaggcagaggug

SEQ ID NO: 73948 - RNA, 22 nt, Artificial Sequence
  Synthetic
aagagaugauuaggcagaggug

SEQ ID NO: 73949 - RNA, 23 nt, Artificial Sequence
  Synthetic
caagagaugauuaggcagaggug

SEQ ID NO: 73950 - RNA, 24 nt, Artificial Sequence
  Synthetic
acaagagaugauuaggcagaggug

SEQ ID NO: 73951 - RNA, 18 nt, Artificial Sequence
  Synthetic
ugcuggauccaacuggug

SEQ ID NO: 73952 - RNA, 19 nt, Artificial Sequence
  Synthetic
augcuggauccaacuggug

SEQ ID NO: 73953 - RNA, 20 nt, Artificial Sequence
  Synthetic
aaugcuggauccaacuggug

SEQ ID NO: 73954 - RNA, 21 nt, Artificial Sequence
  Synthetic
gaaugcuggauccaacuggug

SEQ ID NO: 73955 - RNA, 22 nt, Artificial Sequence
  Synthetic
ugaaugcuggauccaacuggug

SEQ ID NO: 73956 - RNA, 23 nt, Artificial Sequence
  Synthetic
cugaaugcuggauccaacuggug

SEQ ID NO: 73957 - RNA, 24 nt, Artificial Sequence
  Synthetic
ucugaaugcuggauccaacuggug

SEQ ID NO: 73958 - RNA, 18 nt, Artificial Sequence
  Synthetic
aguugcauggugcuggug

SEQ ID NO: 73959 - RNA, 19 nt, Artificial Sequence
  Synthetic
aaguugcauggugcuggug

SEQ ID NO: 73960 - RNA, 20 nt, Artificial Sequence
  Synthetic
aaaguugcauggugcuggug

SEQ ID NO: 73961 - RNA, 21 nt, Artificial Sequence
  Synthetic
aaaaguugcauggugcuggug

SEQ ID NO: 73962 - RNA, 22 nt, Artificial Sequence
  Synthetic
aaaaaguugcauggugcuggug

SEQ ID NO: 73963 - RNA, 23 nt, Artificial Sequence
  Synthetic
gaaaaaguugcauggugcuggug

SEQ ID NO: 73964 - RNA, 24 nt, Artificial Sequence
  Synthetic
ugaaaaaguugcauggugcuggug

SEQ ID NO: 73965 - RNA, 18 nt, Artificial Sequence
  Synthetic
aaucccagaggauuggug

SEQ ID NO: 73966 - RNA, 19 nt, Artificial Sequence
  Synthetic
aaaucccagaggauuggug

SEQ ID NO: 73967 - RNA, 20 nt, Artificial Sequence
  Synthetic
aaaaucccagaggauuggug

SEQ ID NO: 73968 - RNA, 21 nt, Artificial Sequence
  Synthetic
aaaaaucccagaggauuggug

SEQ ID NO: 73969 - RNA, 22 nt, Artificial Sequence
  Synthetic
aaaaaaucccagaggauuggug

SEQ ID NO: 73970 - RNA, 23 nt, Artificial Sequence
  Synthetic
gaaaaaaucccagaggauuggug

SEQ ID NO: 73971 - RNA, 24 nt, Artificial Sequence
  Synthetic
ggaaaaaaucccagaggauuggug

SEQ ID NO: 73972 - RNA, 18 nt, Artificial Sequence
  Synthetic
gaggacaagagguuggug

SEQ ID NO: 73973 - RNA, 19 nt, Artificial Sequence
  Synthetic
ggaggacaagagguuggug

SEQ ID NO: 73974 - RNA, 20 nt, Artificial Sequence
  Synthetic
uggaggacaagagguuggug

SEQ ID NO: 73975 - RNA, 21 nt, Artificial Sequence
  Synthetic
uuggaggacaagagguuggug

SEQ ID NO: 73976 - RNA, 22 nt, Artificial Sequence
  Synthetic
auuggaggacaagagguuggug

SEQ ID NO: 73977 - RNA, 23 nt, Artificial Sequence
  Synthetic
aauuggaggacaagagguuggug

SEQ ID NO: 73978 - RNA, 24 nt, Artificial Sequence
  Synthetic
aaauuggaggacaagagguuggug

SEQ ID NO: 73979 - RNA, 18 nt, Artificial Sequence
  Synthetic
ccaaaaggccuccgugug

SEQ ID NO: 73980 - RNA, 19 nt, Artificial Sequence
  Synthetic
cccaaaaggccuccgugug

SEQ ID NO: 73981 - RNA, 20 nt, Artificial Sequence
  Synthetic
ccccaaaaggccuccgugug

SEQ ID NO: 73982 - RNA, 21 nt, Artificial Sequence
  Synthetic
accccaaaaggccuccgugug

SEQ ID NO: 73983 - RNA, 22 nt, Artificial Sequence
  Synthetic
caccccaaaaggccuccgugug

SEQ ID NO: 73984 - RNA, 23 nt, Artificial Sequence
  Synthetic
ccaccccaaaaggccuccgugug

SEQ ID NO: 73985 - RNA, 24 nt, Artificial Sequence
  Synthetic
uccaccccaaaaggccuccgugug

SEQ ID NO: 73986 - RNA, 18 nt, Artificial Sequence
  Synthetic
  misc_feature (8)..(8): n is a, c, g, or u
caggauanccacauugug

SEQ ID NO: 73987 - RNA, 19 nt, Artificial Sequence
  Synthetic
  misc_feature (9)..(9): n is a, c, g, or u
gcaggauanccacauugug

SEQ ID NO: 73988 - RNA, 20 nt, Artificial Sequence
  Synthetic
  misc_feature (10)..(10): n is a, c, g, or u
agcaggauanccacauugug

SEQ ID NO: 73989 - RNA, 21 nt, Artificial Sequence
  Synthetic
  misc_feature (11)..(11): n is a, c, g, or u
aagcaggauanccacauugug

SEQ ID NO: 73990 - RNA, 22 nt, Artificial Sequence
  Synthetic
  misc_feature (12)..(12): n is a, c, g, or u
aaagcaggauanccacauugug

SEQ ID NO: 73991 - RNA, 23 nt, Artificial Sequence
  Synthetic
  misc_feature (13)..(13): n is a, c, g, or u
uaaagcaggauanccacauugug

SEQ ID NO: 73992 - RNA, 24 nt, Artificial Sequence
  Synthetic
  misc_feature (14)..(14): n is a, c, g, or u
uuaaagcaggauanccacauugug

SEQ ID NO: 73993 - RNA, 18 nt, Artificial Sequence
  Synthetic
gcucccccuagaaaauug

SEQ ID NO: 73994 - RNA, 19 nt, Artificial Sequence
  Synthetic
agcucccccuagaaaauug

SEQ ID NO: 73995 - RNA, 20 nt, Artificial Sequence
  Synthetic
gagcucccccuagaaaauug

SEQ ID NO: 73996 - RNA, 21 nt, Artificial Sequence
  Synthetic
ggagcucccccuagaaaauug

SEQ ID NO: 73997 - RNA, 22 nt, Artificial Sequence
  Synthetic
gggagcucccccuagaaaauug

SEQ ID NO: 73998 - RNA, 23 nt, Artificial Sequence
  Synthetic
cgggagcucccccuagaaaauug

SEQ ID NO: 73999 - RNA, 24 nt, Artificial Sequence
  Synthetic
acgggagcucccccuagaaaauug

SEQ ID NO: 74000 - RNA, 18 nt, Artificial Sequence
  Synthetic
gauagccaggacaaauug

SEQ ID NO: 74001 - RNA, 19 nt, Artificial Sequence
  Synthetic
cgauagccaggacaaauug

SEQ ID NO: 74002 - RNA, 20 nt, Artificial Sequence
  Synthetic
gcgauagccaggacaaauug

SEQ ID NO: 74003 - RNA, 21 nt, Artificial Sequence
  Synthetic
agcgauagccaggacaaauug

SEQ ID NO: 74004 - RNA, 22 nt, Artificial Sequence
  Synthetic
cagcgauagccaggacaaauug

SEQ ID NO: 74005 - RNA, 23 nt, Artificial Sequence
  Synthetic
ccagcgauagccaggacaaauug

SEQ ID NO: 74006 - RNA, 24 nt, Artificial Sequence
  Synthetic
uccagcgauagccaggacaaauug

SEQ ID NO: 74007 - RNA, 18 nt, Artificial Sequence
  Synthetic
gugaaaccacaauaauug

SEQ ID NO: 74008 - RNA, 19 nt, Artificial Sequence
  Synthetic
ugugaaaccacaauaauug

SEQ ID NO: 74009 - RNA, 20 nt, Artificial Sequence
  Synthetic
augugaaaccacaauaauug

SEQ ID NO: 74010 - RNA, 21 nt, Artificial Sequence
  Synthetic
aaugugaaaccacaauaauug

SEQ ID NO: 74011 - RNA, 22 nt, Artificial Sequence
  Synthetic
aaaugugaaaccacaauaauug

SEQ ID NO: 74012 - RNA, 23 nt, Artificial Sequence
  Synthetic
gaaaugugaaaccacaauaauug

SEQ ID NO: 74013 - RNA, 24 nt, Artificial Sequence
  Synthetic
agaaaugugaaaccacaauaauug

SEQ ID NO: 74014 - RNA, 18 nt, Artificial Sequence
  Synthetic
caaggaauacuaacauug

SEQ ID NO: 74015 - RNA, 19 nt, Artificial Sequence
  Synthetic
ccaaggaauacuaacauug

SEQ ID NO: 74016 - RNA, 20 nt, Artificial Sequence
  Synthetic
uccaaggaauacuaacauug

SEQ ID NO: 74017 - RNA, 21 nt, Artificial Sequence
  Synthetic
guccaaggaauacuaacauug

SEQ ID NO: 74018 - RNA, 22 nt, Artificial Sequence
  Synthetic
aguccaaggaauacuaacauug

SEQ ID NO: 74019 - RNA, 23 nt, Artificial Sequence
  Synthetic
gaguccaaggaauacuaacauug

SEQ ID NO: 74020 - RNA, 24 nt, Artificial Sequence
  Synthetic
ugaguccaaggaauacuaacauug

SEQ ID NO: 74021 - RNA, 18 nt, Artificial Sequence
  Synthetic
  misc_feature (10)..(10): n is a, c, g, or u
agcaggauanccacauug

SEQ ID NO: 74022 - RNA, 19 nt, Artificial Sequence
  Synthetic
  misc_feature (11)..(11): n is a, c, g, or u
aagcaggauanccacauug

SEQ ID NO: 74023 - RNA, 20 nt, Artificial Sequence
  Synthetic
  misc_feature (12)..(12): n is a, c, g, or u
aaagcaggauanccacauug

SEQ ID NO: 74024 - RNA, 21 nt, Artificial Sequence
  Synthetic
  misc_feature (13)..(13): n is a, c, g, or u
uaaagcaggauanccacauug

SEQ ID NO: 74025 - RNA, 22 nt, Artificial Sequence
  Synthetic
  misc_feature (14)..(14): n is a, c, g, or u
uuaaagcaggauanccacauug

SEQ ID NO: 74026 - RNA, 23 nt, Artificial Sequence
  Synthetic
  misc_feature (15)..(15): n is a, c, g, or u
auuaaagcaggauanccacauug

SEQ ID NO: 74027 - RNA, 24 nt, Artificial Sequence
  Synthetic
  misc_feature (16)..(16): n is a, c, g, or u
cauuaaagcaggauanccacauug

SEQ ID NO: 74028 - RNA, 18 nt, Artificial Sequence
  Synthetic
ggucggucguugacauug

SEQ ID NO: 74029 - RNA, 19 nt, Artificial Sequence
  Synthetic
aggucggucguugacauug

SEQ ID NO: 74030 - RNA, 20 nt, Artificial Sequence
  Synthetic
aaggucggucguugacauug

SEQ ID NO: 74031 - RNA, 18 nt, Artificial Sequence
  Synthetic
caauccucgagaagauug

SEQ ID NO: 74032 - RNA, 19 nt, Artificial Sequence
  Synthetic
ccaauccucgagaagauug

SEQ ID NO: 74033 - RNA, 20 nt, Artificial Sequence
  Synthetic
cccaauccucgagaagauug

SEQ ID NO: 74034 - RNA, 21 nt, Artificial Sequence
  Synthetic
ccccaauccucgagaagauug

SEQ ID NO: 74035 - RNA, 22 nt, Artificial Sequence
  Synthetic
uccccaauccucgagaagauug

SEQ ID NO: 74036 - RNA, 23 nt, Artificial Sequence
  Synthetic
guccccaauccucgagaagauug

SEQ ID NO: 74037 - RNA, 24 nt, Artificial Sequence
  Synthetic
gguccccaauccucgagaagauug

SEQ ID NO: 74038 - RNA, 18 nt, Artificial Sequence
  Synthetic
cuuccugacugccgauug

SEQ ID NO: 74039 - RNA, 19 nt, Artificial Sequence
  Synthetic
ccuuccugacugccgauug

SEQ ID NO: 74040 - RNA, 20 nt, Artificial Sequence
  Synthetic
gccuuccugacugccgauug

SEQ ID NO: 74041 - RNA, 21 nt, Artificial Sequence
  Synthetic
ugccuuccugacugccgauug

SEQ ID NO: 74042 - RNA, 22 nt, Artificial Sequence
  Synthetic
cugccuuccugacugccgauug

SEQ ID NO: 74043 - RNA, 23 nt, Artificial Sequence
  Synthetic
gcugccuuccugacugccgauug

SEQ ID NO: 74044 - RNA, 24 nt, Artificial Sequence
  Synthetic
ggcugccuuccugacugccgauug

SEQ ID NO: 74045 - RNA, 18 nt, Artificial Sequence
  Synthetic
cuagacucugcgguauug

SEQ ID NO: 74046 - RNA, 19 nt, Artificial Sequence
  Synthetic
ucuagacucugcgguauug

SEQ ID NO: 74047 - RNA, 20 nt, Artificial Sequence
  Synthetic
gucuagacucugcgguauug

SEQ ID NO: 74048 - RNA, 21 nt, Artificial Sequence
  Synthetic
agucuagacucugcgguauug

SEQ ID NO: 74049 - RNA, 22 nt, Artificial Sequence
  Synthetic
gagucuagacucugcgguauug

SEQ ID NO: 74050 - RNA, 23 nt, Artificial Sequence
  Synthetic
cgagucuagacucugcgguauug

SEQ ID NO: 74051 - RNA, 24 nt, Artificial Sequence
  Synthetic
acgagucuagacucugcgguauug

SEQ ID NO: 74052 - RNA, 18 nt, Artificial Sequence
  Synthetic
cucuuauguaagaccuug

SEQ ID NO: 74053 - RNA, 19 nt, Artificial Sequence
  Synthetic
ccucuuauguaagaccuug

SEQ ID NO: 74054 - RNA, 20 nt, Artificial Sequence
  Synthetic
uccucuuauguaagaccuug

SEQ ID NO: 74055 - RNA, 21 nt, Artificial Sequence
  Synthetic
guccucuuauguaagaccuug

SEQ ID NO: 74056 - RNA, 22 nt, Artificial Sequence
  Synthetic
aguccucuuauguaagaccuug

SEQ ID NO: 74057 - RNA, 23 nt, Artificial Sequence
  Synthetic
gaguccucuuauguaagaccuug

SEQ ID NO: 74058 - RNA, 24 nt, Artificial Sequence
  Synthetic
agaguccucuuauguaagaccuug

SEQ ID NO: 74059 - RNA, 18 nt, Artificial Sequence
  Synthetic
aaacauagagguuccuug

SEQ ID NO: 74060 - RNA, 19 nt, Artificial Sequence
  Synthetic
gaaacauagagguuccuug

SEQ ID NO: 74061 - RNA, 20 nt, Artificial Sequence
  Synthetic
ggaaacauagagguuccuug

SEQ ID NO: 74062 - RNA, 21 nt, Artificial Sequence
  Synthetic
gggaaacauagagguuccuug

SEQ ID NO: 74063 - RNA, 22 nt, Artificial Sequence
  Synthetic
agggaaacauagagguuccuug

SEQ ID NO: 74064 - RNA, 23 nt, Artificial Sequence
  Synthetic
gagggaaacauagagguuccuug

SEQ ID NO: 74065 - RNA, 24 nt, Artificial Sequence
  Synthetic
ugagggaaacauagagguuccuug

SEQ ID NO: 74066 - RNA, 18 nt, Artificial Sequence
  Synthetic
gggauccugcagagcuug

SEQ ID NO: 74067 - RNA, 19 nt, Artificial Sequence
  Synthetic
ugggauccugcagagcuug

SEQ ID NO: 74068 - RNA, 20 nt, Artificial Sequence
  Synthetic
cugggauccugcagagcuug

SEQ ID NO: 74069 - RNA, 21 nt, Artificial Sequence
  Synthetic
ucugggauccugcagagcuug

SEQ ID NO: 74070 - RNA, 22 nt, Artificial Sequence
  Synthetic
cucugggauccugcagagcuug

SEQ ID NO: 74071 - RNA, 23 nt, Artificial Sequence
  Synthetic
acucugggauccugcagagcuug

SEQ ID NO: 74072 - RNA, 24 nt, Artificial Sequence
  Synthetic
uacucugggauccugcagagcuug

SEQ ID NO: 74073 - RNA, 18 nt, Artificial Sequence
  Synthetic
ccagcaaagaauggcuug

SEQ ID NO: 74074 - RNA, 19 nt, Artificial Sequence
  Synthetic
cccagcaaagaauggcuug

SEQ ID NO: 74075 - RNA, 20 nt, Artificial Sequence
  Synthetic
ccccagcaaagaauggcuug

SEQ ID NO: 74076 - RNA, 21 nt, Artificial Sequence
  Synthetic
cccccagcaaagaauggcuug

SEQ ID NO: 74077 - RNA, 22 nt, Artificial Sequence
  Synthetic
ccccccagcaaagaauggcuug

SEQ ID NO: 74078 - RNA, 23 nt, Artificial Sequence
  Synthetic
uccccccagcaaagaauggcuug

SEQ ID NO: 74079 - RNA, 24 nt, Artificial Sequence
  Synthetic
  misc_feature (1)..(1): n is a, c, g, or u
nuccccccagcaaagaauggcuug

SEQ ID NO: 74080 - RNA, 18 nt, Artificial Sequence
  Synthetic
gaaaggccuuguaaguug

SEQ ID NO: 74081 - RNA, 19 nt, Artificial Sequence
  Synthetic
agaaaggccuuguaaguug

SEQ ID NO: 74082 - RNA, 20 nt, Artificial Sequence
  Synthetic
cagaaaggccuuguaaguug

SEQ ID NO: 74083 - RNA, 21 nt, Artificial Sequence
  Synthetic
acagaaaggccuuguaaguug

SEQ ID NO: 74084 - RNA, 22 nt, Artificial Sequence
  Synthetic
cacagaaaggccuuguaaguug

SEQ ID NO: 74085 - RNA, 23 nt, Artificial Sequence
  Synthetic
acacagaaaggccuuguaaguug

SEQ ID NO: 74086 - RNA, 24 nt, Artificial Sequence
  Synthetic
uacacagaaaggccuuguaaguug

SEQ ID NO: 74087 - RNA, 18 nt, Artificial Sequence
  Synthetic
  misc_feature (10)..(10): n is a, c, g, or u
gcacagaccnggccguug

SEQ ID NO: 74088 - RNA, 19 nt, Artificial Sequence
  Synthetic
  misc_feature (11)..(11): n is a, c, g, or u
ggcacagaccnggccguug

SEQ ID NO: 74089 - RNA, 20 nt, Artificial Sequence
  Synthetic
  misc_feature (12)..(12): n is a, c, g, or u
uggcacagaccnggccguug

SEQ ID NO: 74090 - RNA, 21 nt, Artificial Sequence
  Synthetic
  misc_feature (13)..(13): n is a, c, g, or u
uuggcacagaccnggccguug

SEQ ID NO: 74091 - RNA, 22 nt, Artificial Sequence
  Synthetic
  misc_feature (14)..(14): n is a, c, g, or u
cuuggcacagaccnggccguug

SEQ ID NO: 74092 - RNA, 23 nt, Artificial Sequence
  Synthetic
  misc_feature (15)..(15): n is a, c, g, or u
acuuggcacagaccnggccguug

SEQ ID NO: 74093 - RNA, 24 nt, Artificial Sequence
  Synthetic
  misc_feature (16)..(16): n is a, c, g, or u
cacuuggcacagaccnggccguug

SEQ ID NO: 74094 - RNA, 18 nt, Artificial Sequence
  Synthetic
gagcuugguggaauguug

SEQ ID NO: 74095 - RNA, 19 nt, Artificial Sequence
  Synthetic
agagcuugguggaauguug

SEQ ID NO: 74096 - RNA, 20 nt, Artificial Sequence
  Synthetic
cagagcuugguggaauguug

SEQ ID NO: 74097 - RNA, 21 nt, Artificial Sequence
  Synthetic
gcagagcuugguggaauguug

SEQ ID NO: 74098 - RNA, 22 nt, Artificial Sequence
  Synthetic
ugcagagcuugguggaauguug

SEQ ID NO: 74099 - RNA, 23 nt, Artificial Sequence
  Synthetic
cugcagagcuugguggaauguug

SEQ ID NO: 74100 - RNA, 24 nt, Artificial Sequence
  Synthetic
ccugcagagcuugguggaauguug

SEQ ID NO: 74101 - RNA, 18 nt, Artificial Sequence
  Synthetic
aagggacucaagauguug

SEQ ID NO: 74102 - RNA, 19 nt, Artificial Sequence
  Synthetic
aaagggacucaagauguug

SEQ ID NO: 74103 - RNA, 20 nt, Artificial Sequence
  Synthetic
uaaagggacucaagauguug

SEQ ID NO: 74104 - RNA, 21 nt, Artificial Sequence
  Synthetic
auaaagggacucaagauguug

SEQ ID NO: 74105 - RNA, 22 nt, Artificial Sequence
  Synthetic
uauaaagggacucaagauguug

SEQ ID NO: 74106 - RNA, 23 nt, Artificial Sequence
  Synthetic
guauaaagggacucaagauguug

SEQ ID NO: 74107 - RNA, 24 nt, Artificial Sequence
  Synthetic
gguauaaagggacucaagauguug

SEQ ID NO: 74108 - RNA, 18 nt, Artificial Sequence
  Synthetic
  misc_feature (3)..(3): n is a, c, g, or u
uanucuccggaaguguug

SEQ ID NO: 74109 - RNA, 19 nt, Artificial Sequence
  Synthetic
  misc_feature (4)..(4): n is a, c, g, or u
guanucuccggaaguguug

SEQ ID NO: 74110 - RNA, 20 nt, Artificial Sequence
  Synthetic
  misc_feature (5)..(5): n is a, c, g, or u
aguanucuccggaaguguug

SEQ ID NO: 74111 - RNA, 21 nt, Artificial Sequence
  Synthetic
  misc_feature (6)..(6): n is a, c, g, or u
caguanucuccggaaguguug

SEQ ID NO: 74112 - RNA, 22 nt, Artificial Sequence
  Synthetic
  misc_feature (7)..(7): n is a, c, g, or u
acaguanucuccggaaguguug

SEQ ID NO: 74113 - RNA, 23 nt, Artificial Sequence
  Synthetic
  misc_feature (8)..(8): n is a, c, g, or u
aacaguanucuccggaaguguug

SEQ ID NO: 74114 - RNA, 24 nt, Artificial Sequence
  Synthetic
  misc_feature (9)..(9): n is a, c, g, or u
caacaguanucuccggaaguguug

SEQ ID NO: 74115 - RNA, 18 nt, Artificial Sequence
  Synthetic
gaccuugggcaagauuug

SEQ ID NO: 74116 - RNA, 19 nt, Artificial Sequence
  Synthetic
agaccuugggcaagauuug

SEQ ID NO: 74117 - RNA, 20 nt, Artificial Sequence
  Synthetic
aagaccuugggcaagauuug

SEQ ID NO: 74118 - RNA, 21 nt, Artificial Sequence
  Synthetic
uaagaccuugggcaagauuug

SEQ ID NO: 74119 - RNA, 22 nt, Artificial Sequence
  Synthetic
guaagaccuugggcaagauuug

SEQ ID NO: 74120 - RNA, 23 nt, Artificial Sequence
  Synthetic
uguaagaccuugggcaagauuug

SEQ ID NO: 74121 - RNA, 24 nt, Artificial Sequence
  Synthetic
auguaagaccuugggcaagauuug

SEQ ID NO: 74122 - RNA, 18 nt, Artificial Sequence
  Synthetic
  misc_feature (3)..(3): n is a, c, g, or u
ucnguccaguggucuuug

SEQ ID NO: 74123 - RNA, 19 nt, Artificial Sequence
  Synthetic
  misc_feature (4)..(4): n is a, c, g, or u
uucnguccaguggucuuug

SEQ ID NO: 74124 - RNA, 20 nt, Artificial Sequence
  Synthetic
  misc_feature (5)..(5): n is a, c, g, or u
cuucnguccaguggucuuug

SEQ ID NO: 74125 - RNA, 21 nt, Artificial Sequence
  Synthetic
  misc_feature (6)..(6): n is a, c, g, or u
gcuucnguccaguggucuuug

SEQ ID NO: 74126 - RNA, 22 nt, Artificial Sequence
  Synthetic
  misc_feature (7)..(7): n is a, c, g, or u
ggcuucnguccaguggucuuug

SEQ ID NO: 74127 - RNA, 23 nt, Artificial Sequence
  Synthetic
  misc_feature (8)..(8): n is a, c, g, or u
uggcuucnguccaguggucuuug

SEQ ID NO: 74128 - RNA, 24 nt, Artificial Sequence
  Synthetic
  misc_feature (9)..(9): n is a, c, g, or u
uuggcuucnguccaguggucuuug

SEQ ID NO: 74129 - RNA, 18 nt, Artificial Sequence
  Synthetic
uggggacugcgaauuuug

SEQ ID NO: 74130 - RNA, 19 nt, Artificial Sequence
  Synthetic
uuggggacugcgaauuuug

SEQ ID NO: 74131 - RNA, 20 nt, Artificial Sequence
  Synthetic
  misc_feature (1)..(1): n is a, c, g, or u
nuuggggacugcgaauuuug

SEQ ID NO: 74132 - RNA, 21 nt, Artificial Sequence
  Synthetic
  misc_feature (2)..(2): n is a, c, g, or u
gnuuggggacugcgaauuuug

SEQ ID NO: 74133 - RNA, 22 nt, Artificial Sequence
  Synthetic
  misc_feature (3)..(3): n is a, c, g, or u
agnuuggggacugcgaauuuug

SEQ ID NO: 74134 - RNA, 23 nt, Artificial Sequence
  Synthetic
  misc_feature (4)..(4): n is a, c, g, or u
gagnuuggggacugcgaauuuug

SEQ ID NO: 74135 - RNA, 24 nt, Artificial Sequence
  Synthetic
  misc_feature (5)..(5): n is a, c, g, or u
ggagnuuggggacugcgaauuuug

SEQ ID NO: 74136 - RNA, 18 nt, Artificial Sequence
  Synthetic
uuccguccgaagguuuug

SEQ ID NO: 74137 - RNA, 19 nt, Artificial Sequence
  Synthetic
uuuccguccgaagguuuug

SEQ ID NO: 74138 - RNA, 20 nt, Artificial Sequence
  Synthetic
auuuccguccgaagguuuug

SEQ ID NO: 74139 - RNA, 21 nt, Artificial Sequence
  Synthetic
aauuuccguccgaagguuuug

SEQ ID NO: 74140 - RNA, 22 nt, Artificial Sequence
  Synthetic
caauuuccguccgaagguuuug

SEQ ID NO: 74141 - RNA, 23 nt, Artificial Sequence
  Synthetic
gcaauuuccguccgaagguuuug

SEQ ID NO: 74142 - RNA, 24 nt, Artificial Sequence
  Synthetic
ugcaauuuccguccgaagguuuug

SEQ ID NO: 74143 - RNA, 18 nt, Artificial Sequence
  Synthetic
ccccaucuuuuuguuuug

SEQ ID NO: 74144 - RNA, 19 nt, Artificial Sequence
  Synthetic
uccccaucuuuuuguuuug

SEQ ID NO: 74145 - RNA, 20 nt, Artificial Sequence
  Synthetic
auccccaucuuuuuguuuug

SEQ ID NO: 74146 - RNA, 21 nt, Artificial Sequence
  Synthetic
uauccccaucuuuuuguuuug

SEQ ID NO: 74147 - RNA, 22 nt, Artificial Sequence
  Synthetic
auauccccaucuuuuuguuuug

SEQ ID NO: 74148 - RNA, 23 nt, Artificial Sequence
  Synthetic
aauauccccaucuuuuuguuuug

SEQ ID NO: 74149 - RNA, 24 nt, Artificial Sequence
  Synthetic
gaauauccccaucuuuuuguuuug

SEQ ID NO: 74150 - RNA, 18 nt, Artificial Sequence
  Synthetic
  misc_feature (18)..(18): n is a, c, g, or u
acagguauaguagaagan

SEQ ID NO: 74151 - RNA, 19 nt, Artificial Sequence
  Synthetic
  misc_feature (19)..(19): n is a, c, g, or u
gacagguauaguagaagan

SEQ ID NO: 74152 - RNA, 20 nt, Artificial Sequence
  Synthetic
  misc_feature (20)..(20): n is a, c, g, or u
agacagguauaguagaagan

SEQ ID NO: 74153 - RNA, 21 nt, Artificial Sequence
  Synthetic
  misc_feature (21)..(21): n is a, c, g, or u
aagacagguauaguagaagan

SEQ ID NO: 74154 - RNA, 22 nt, Artificial Sequence
  Synthetic
  misc_feature (22)..(22): n is a, c, g, or u
aaagacagguauaguagaagan

SEQ ID NO: 74155 - RNA, 23 nt, Artificial Sequence
  Synthetic
  misc_feature (23)..(23): n is a, c, g, or u
uaaagacagguauaguagaagan

SEQ ID NO: 74156 - RNA, 24 nt, Artificial Sequence
  Synthetic
  misc_feature (24)..(24): n is a, c, g, or u
uuaaagacagguauaguagaagan

SEQ ID NO: 74157 - RNA, 18 nt, Artificial Sequence
  Synthetic
  misc_feature (18)..(18): n is a, c, g, or u
aagagguuggugagugan

SEQ ID NO: 74158 - RNA, 19 nt, Artificial Sequence
  Synthetic
  misc_feature (19)..(19): n is a, c, g, or u
caagagguuggugagugan

SEQ ID NO: 74159 - RNA, 20 nt, Artificial Sequence
  Synthetic
  misc_feature (20)..(20): n is a, c, g, or u
acaagagguuggugagugan

SEQ ID NO: 74160 - RNA, 21 nt, Artificial Sequence
  Synthetic
  misc_feature (21)..(21): n is a, c, g, or u
gacaagagguuggugagugan

SEQ ID NO: 74161 - RNA, 22 nt, Artificial Sequence
  Synthetic
  misc_feature (22)..(22): n is a, c, g, or u
ggacaagagguuggugagugan

SEQ ID NO: 74162 - RNA, 23 nt, Artificial Sequence
  Synthetic
  misc_feature (23)..(23): n is a, c, g, or u
aggacaagagguuggugagugan

SEQ ID NO: 74163 - RNA, 24 nt, Artificial Sequence
  Synthetic
  misc_feature (24)..(24): n is a, c, g, or u
gaggacaagagguuggugagugan

SEQ ID NO: 74164 - RNA, 18 nt, Artificial Sequence
  Synthetic
  misc_feature (12)..(12): n is a, c, g, or u
  misc_feature (18)..(18): n is a, c, g, or u
uuggugaguganuggagn

SEQ ID NO: 74165 - RNA, 19 nt, Artificial Sequence
  Synthetic
  misc_feature (13)..(13): n is a, c, g, or u
  misc_feature (19)..(19): n is a, c, g, or u
guuggugaguganuggagn

SEQ ID NO: 74166 - RNA, 20 nt, Artificial Sequence
  Synthetic
  misc_feature (14)..(14): n is a, c, g, or u
  misc_feature (20)..(20): n is a, c, g, or u
gguuggugaguganuggagn

SEQ ID NO: 74167 - RNA, 21 nt, Artificial Sequence
  Synthetic
  misc_feature (15)..(15): n is a, c, g, or u
  misc_feature (21)..(21): n is a, c, g, or u
agguuggugaguganuggagn

SEQ ID NO: 74168 - RNA, 22 nt, Artificial Sequence
  Synthetic
  misc_feature (16)..(16): n is a, c, g, or u
  misc_feature (22)..(22): n is a, c, g, or u
gagguuggugaguganuggagn

SEQ ID NO: 74169 - RNA, 23 nt, Artificial Sequence
  Synthetic
  misc_feature (17)..(17): n is a, c, g, or u
  misc_feature (23)..(23): n is a, c, g, or u
agagguuggugaguganuggagn

SEQ ID NO: 74170 - RNA, 24 nt, Artificial Sequence
  Synthetic
  misc_feature (18)..(18): n is a, c, g, or u
  misc_feature (24)..(24): n is a, c, g, or u
aagagguuggugaguganuggagn

SEQ ID NO: 74171 - RNA, 18 nt, Artificial Sequence
  Synthetic
  misc_feature (18)..(18): n is a, c, g, or u
aagggucaauguccaugn

SEQ ID NO: 74172 - RNA, 19 nt, Artificial Sequence
  Synthetic
  misc_feature (19)..(19): n is a, c, g, or u
uaagggucaauguccaugn

SEQ ID NO: 74173 - RNA, 20 nt, Artificial Sequence
  Synthetic
  misc_feature (20)..(20): n is a, c, g, or u
auaagggucaauguccaugn

SEQ ID NO: 74174 - RNA, 21 nt, Artificial Sequence
  Synthetic
  misc_feature (21)..(21): n is a, c, g, or u
uauaagggucaauguccaugn

SEQ ID NO: 74175 - RNA, 22 nt, Artificial Sequence
  Synthetic
  misc_feature (22)..(22): n is a, c, g, or u
uuauaagggucaauguccaugn

SEQ ID NO: 74176 - RNA, 23 nt, Artificial Sequence
  Synthetic
  misc_feature (23)..(23): n is a, c, g, or u
uuuauaagggucaauguccaugn

SEQ ID NO: 74177 - RNA, 24 nt, Artificial Sequence
  Synthetic
  misc_feature (24)..(24): n is a, c, g, or u
cuuuauaagggucaauguccaugn

SEQ ID NO: 74178 - RNA, 18 nt, Artificial Sequence
  Synthetic
  misc_feature (12)..(12): n is a, c, g, or u
  misc_feature (18)..(18): n is a, c, g, or u
cugagugcagunuggugn

SEQ ID NO: 74179 - RNA, 19 nt, Artificial Sequence
  Synthetic
  misc_feature (13)..(13): n is a, c, g, or u
  misc_feature (19)..(19): n is a, c, g, or u
ccugagugcagunuggugn

SEQ ID NO: 74180 - RNA, 20 nt, Artificial Sequence
  Synthetic
  misc_feature (14)..(14): n is a, c, g, or u
  misc_feature (20)..(20): n is a, c, g, or u
gccugagugcagunuggugn

SEQ ID NO: 74181 - RNA, 21 nt, Artificial Sequence
  Synthetic
  misc_feature (15)..(15): n is a, c, g, or u
  misc_feature (21)..(21): n is a, c, g, or u
ugccugagugcagunuggugn

SEQ ID NO: 74182 - RNA, 22 nt, Artificial Sequence
  Synthetic
  misc_feature (16)..(16): n is a, c, g, or u
  misc_feature (22)..(22): n is a, c, g, or u
uugccugagugcagunuggugn

SEQ ID NO: 74183 - RNA, 23 nt, Artificial Sequence
  Synthetic
  misc_feature (17)..(17): n is a, c, g, or u
  misc_feature (23)..(23): n is a, c, g, or u
cuugccugagugcagunuggugn

SEQ ID NO: 74184 - RNA, 24 nt, Artificial Sequence
  Synthetic
  misc_feature (18)..(18): n is a, c, g, or u
  misc_feature (24)..(24): n is a, c, g, or u
gcuugccugagugcagunuggugn

SEQ ID NO: 74185 - RNA, 18 nt, Artificial Sequence
  Synthetic
  misc_feature (18)..(18): n is a, c, g, or u
uacauaacccaugaaaun

SEQ ID NO: 74186 - RNA, 19 nt, Artificial Sequence
  Synthetic
  misc_feature (19)..(19): n is a, c, g, or u
uuacauaacccaugaaaun

SEQ ID NO: 74187 - RNA, 20 nt, Artificial Sequence
  Synthetic
  misc_feature (20)..(20): n is a, c, g, or u
auuacauaacccaugaaaun

SEQ ID NO: 74188 - RNA, 21 nt, Artificial Sequence
  Synthetic
  misc_feature (21)..(21): n is a, c, g, or u
aauuacauaacccaugaaaun

SEQ ID NO: 74189 - RNA, 22 nt, Artificial Sequence
  Synthetic
  misc_feature (22)..(22): n is a, c, g, or u
caauuacauaacccaugaaaun

SEQ ID NO: 74190 - RNA, 23 nt, Artificial Sequence
  Synthetic
  misc_feature (23)..(23): n is a, c, g, or u
ccaauuacauaacccaugaaaun

SEQ ID NO: 74191 - RNA, 24 nt, Artificial Sequence
  Synthetic
  misc_feature (24)..(24): n is a, c, g, or u
uccaauuacauaacccaugaaaun

SEQ ID NO: 74192 - RNA, 18 nt, Artificial Sequence
  Synthetic
  misc_feature (9)..(9): n is a, c, g, or u
  misc_feature (18)..(18): n is a, c, g, or u
ucuaggggnaaauauuun

SEQ ID NO: 74193 - RNA, 19 nt, Artificial Sequence
  Synthetic
  misc_feature (10)..(10): n is a, c, g, or u
  misc_feature (19)..(19): n is a, c, g, or u
cucuaggggnaaauauuun

SEQ ID NO: 74194 - RNA, 20 nt, Artificial Sequence
  Synthetic
  misc_feature (11)..(11): n is a, c, g, or u
  misc_feature (20)..(20): n is a, c, g, or u
ucucuaggggnaaauauuun

SEQ ID NO: 74195 - RNA, 21 nt, Artificial Sequence
  Synthetic
  misc_feature (12)..(12): n is a, c, g, or u
  misc_feature (21)..(21): n is a, c, g, or u
uucucuaggggnaaauauuun

SEQ ID NO: 74196 - RNA, 22 nt, Artificial Sequence
  Synthetic
  misc_feature (13)..(13): n is a, c, g, or u
  misc_feature (22)..(22): n is a, c, g, or u
uuucucuaggggnaaauauuun

SEQ ID NO: 74197 - RNA, 23 nt, Artificial Sequence
  Synthetic
  misc_feature (14)..(14): n is a, c, g, or u
  misc_feature (23)..(23): n is a, c, g, or u
cuuucucuaggggnaaauauuun

SEQ ID NO: 74198 - RNA, 24 nt, Artificial Sequence
  Synthetic
  misc_feature (15)..(15): n is a, c, g, or u
  misc_feature (24)..(24): n is a, c, g, or u
ccuuucucuaggggnaaauauuun

SEQ ID NO: 74199 - RNA, 18 nt, Artificial Sequence
  Synthetic
ugguggucgggaaaaaau

SEQ ID NO: 74200 - RNA, 19 nt, Artificial Sequence
  Synthetic
cugguggucgggaaaaaau

SEQ ID NO: 74201 - RNA, 20 nt, Artificial Sequence
  Synthetic
acugguggucgggaaaaaau

SEQ ID NO: 74202 - RNA, 21 nt, Artificial Sequence
  Synthetic
aacugguggucgggaaaaaau

SEQ ID NO: 74203 - RNA, 22 nt, Artificial Sequence
  Synthetic
caacugguggucgggaaaaaau

SEQ ID NO: 74204 - RNA, 23 nt, Artificial Sequence
  Synthetic
ccaacugguggucgggaaaaaau

SEQ ID NO: 74205 - RNA, 24 nt, Artificial Sequence
  Synthetic
uccaacugguggucgggaaaaaau

SEQ ID NO: 74206 - RNA, 18 nt, Artificial Sequence
  Synthetic
gagcucccccuagaaaau

SEQ ID NO: 74207 - RNA, 19 nt, Artificial Sequence
  Synthetic
ggagcucccccuagaaaau

SEQ ID NO: 74208 - RNA, 20 nt, Artificial Sequence
  Synthetic
gggagcucccccuagaaaau

SEQ ID NO: 74209 - RNA, 21 nt, Artificial Sequence
  Synthetic
cgggagcucccccuagaaaau

SEQ ID NO: 74210 - RNA, 22 nt, Artificial Sequence
  Synthetic
acgggagcucccccuagaaaau

SEQ ID NO: 74211 - RNA, 23 nt, Artificial Sequence
  Synthetic
cacgggagcucccccuagaaaau

SEQ ID NO: 74212 - RNA, 24 nt, Artificial Sequence
  Synthetic
acacgggagcucccccuagaaaau

SEQ ID NO: 74213 - RNA, 18 nt, Artificial Sequence
  Synthetic
agccaccagcaggaaaau

SEQ ID NO: 74214 - RNA, 19 nt, Artificial Sequence
  Synthetic
gagccaccagcaggaaaau

SEQ ID NO: 74215 - RNA, 20 nt, Artificial Sequence
  Synthetic
ggagccaccagcaggaaaau

SEQ ID NO: 74216 - RNA, 21 nt, Artificial Sequence
  Synthetic
uggagccaccagcaggaaaau

SEQ ID NO: 74217 - RNA, 22 nt, Artificial Sequence
  Synthetic
cuggagccaccagcaggaaaau

SEQ ID NO: 74218 - RNA, 23 nt, Artificial Sequence
  Synthetic
acuggagccaccagcaggaaaau

SEQ ID NO: 74219 - RNA, 24 nt, Artificial Sequence
  Synthetic
aacuggagccaccagcaggaaaau

SEQ ID NO: 74220 - RNA, 18 nt, Artificial Sequence
  Synthetic
gcgauagccaggacaaau

SEQ ID NO: 74221 - RNA, 19 nt, Artificial Sequence
  Synthetic
agcgauagccaggacaaau

SEQ ID NO: 74222 - RNA, 20 nt, Artificial Sequence
  Synthetic
cagcgauagccaggacaaau

SEQ ID NO: 74223 - RNA, 21 nt, Artificial Sequence
  Synthetic
ccagcgauagccaggacaaau

SEQ ID NO: 74224 - RNA, 22 nt, Artificial Sequence
  Synthetic
uccagcgauagccaggacaaau

SEQ ID NO: 74225 - RNA, 23 nt, Artificial Sequence
  Synthetic
auccagcgauagccaggacaaau

SEQ ID NO: 74226 - RNA, 24 nt, Artificial Sequence
  Synthetic
cauccagcgauagccaggacaaau

SEQ ID NO: 74227 - RNA, 18 nt, Artificial Sequence
  Synthetic
aaaagugagacaagaaau

SEQ ID NO: 74228 - RNA, 19 nt, Artificial Sequence
  Synthetic
caaaagugagacaagaaau

SEQ ID NO: 74229 - RNA, 20 nt, Artificial Sequence
  Synthetic
ccaaaagugagacaagaaau

SEQ ID NO: 74230 - RNA, 21 nt, Artificial Sequence
  Synthetic
uccaaaagugagacaagaaau

SEQ ID NO: 74231 - RNA, 22 nt, Artificial Sequence
  Synthetic
uuccaaaagugagacaagaaau

SEQ ID NO: 74232 - RNA, 23 nt, Artificial Sequence
  Synthetic
cuuccaaaagugagacaagaaau

SEQ ID NO: 74233 - RNA, 24 nt, Artificial Sequence
  Synthetic
ucuuccaaaagugagacaagaaau

SEQ ID NO: 74234 - RNA, 18 nt, Artificial Sequence
  Synthetic
uuacauaacccaugaaau

SEQ ID NO: 74235 - RNA, 19 nt, Artificial Sequence
  Synthetic
auuacauaacccaugaaau

SEQ ID NO: 74236 - RNA, 20 nt, Artificial Sequence
  Synthetic
aauuacauaacccaugaaau

SEQ ID NO: 74237 - RNA, 21 nt, Artificial Sequence
  Synthetic
caauuacauaacccaugaaau

SEQ ID NO: 74238 - RNA, 22 nt, Artificial Sequence
  Synthetic
ccaauuacauaacccaugaaau

SEQ ID NO: 74239 - RNA, 23 nt, Artificial Sequence
  Synthetic
uccaauuacauaacccaugaaau

SEQ ID NO: 74240 - RNA, 24 nt, Artificial Sequence
  Synthetic
uuccaauuacauaacccaugaaau

SEQ ID NO: 74241 - RNA, 18 nt, Artificial Sequence
  Synthetic
  misc_feature (3)..(3): n is a, c, g, or u
agnuuggggacugcgaau

SEQ ID NO: 74242 - RNA, 19 nt, Artificial Sequence
  Synthetic
  misc_feature (4)..(4): n is a, c, g, or u
gagnuuggggacugcgaau

SEQ ID NO: 74243 - RNA, 20 nt, Artificial Sequence
  Synthetic
  misc_feature (5)..(5): n is a, c, g, or u
ggagnuuggggacugcgaau

SEQ ID NO: 74244 - RNA, 21 nt, Artificial Sequence
  Synthetic
  misc_feature (6)..(6): n is a, c, g, or u
uggagnuuggggacugcgaau

SEQ ID NO: 74245 - RNA, 22 nt, Artificial Sequence
  Synthetic
  misc_feature (1)..(1): n is a, c, g, or u
  misc_feature (7)..(7): n is a, c, g, or u
nuggagnuuggggacugcgaau

SEQ ID NO: 74246 - RNA, 23 nt, Artificial Sequence
  Synthetic
  misc_feature (2)..(2): n is a, c, g, or u
  misc_feature (8)..(8): n is a, c, g, or u
anuggagnuuggggacugcgaau

SEQ ID NO: 74247 - RNA, 24 nt, Artificial Sequence
  Synthetic
  misc_feature (3)..(3): n is a, c, g, or u
  misc_feature (9)..(9): n is a, c, g, or u
ganuggagnuuggggacugcgaau

SEQ ID NO: 74248 - RNA, 18 nt, Artificial Sequence
  Synthetic
cuugugaguccaaggaau

SEQ ID NO: 74249 - RNA, 19 nt, Artificial Sequence
  Synthetic
ccuugugaguccaaggaau

SEQ ID NO: 74250 - RNA, 20 nt, Artificial Sequence
  Synthetic
accuugugaguccaaggaau

SEQ ID NO: 74251 - RNA, 21 nt, Artificial Sequence
  Synthetic
caccuugugaguccaaggaau

SEQ ID NO: 74252 - RNA, 22 nt, Artificial Sequence
  Synthetic
ccaccuugugaguccaaggaau

SEQ ID NO: 74253 - RNA, 23 nt, Artificial Sequence
  Synthetic
cccaccuugugaguccaaggaau

SEQ ID NO: 74254 - RNA, 24 nt, Artificial Sequence
  Synthetic
ucccaccuugugaguccaaggaau

SEQ ID NO: 74255 - RNA, 18 nt, Artificial Sequence
  Synthetic
gguugaugauccuggaau

SEQ ID NO: 74256 - RNA, 19 nt, Artificial Sequence
  Synthetic
ugguugaugauccuggaau

SEQ ID NO: 74257 - RNA, 20 nt, Artificial Sequence
  Synthetic
gugguugaugauccuggaau

SEQ ID NO: 74258 - RNA, 21 nt, Artificial Sequence
  Synthetic
ggugguugaugauccuggaau

SEQ ID NO: 74259 - RNA, 22 nt, Artificial Sequence
  Synthetic
uggugguugaugauccuggaau

SEQ ID NO: 74260 - RNA, 23 nt, Artificial Sequence
  Synthetic
cuggugguugaugauccuggaau

SEQ ID NO: 74261 - RNA, 24 nt, Artificial Sequence
  Synthetic
acuggugguugaugauccuggaau

SEQ ID NO: 74262 - RNA, 18 nt, Artificial Sequence
  Synthetic
guccuggugcaaaugaau

SEQ ID NO: 74263 - RNA, 19 nt, Artificial Sequence
  Synthetic
uguccuggugcaaaugaau

SEQ ID NO: 74264 - RNA, 20 nt, Artificial Sequence
  Synthetic
auguccuggugcaaaugaau

SEQ ID NO: 74265 - RNA, 21 nt, Artificial Sequence
  Synthetic
aauguccuggugcaaaugaau

SEQ ID NO: 74266 - RNA, 22 nt, Artificial Sequence
  Synthetic
uaauguccuggugcaaaugaau

SEQ ID NO: 74267 - RNA, 23 nt, Artificial Sequence
  Synthetic
auaauguccuggugcaaaugaau

SEQ ID NO: 74268 - RNA, 24 nt, Artificial Sequence
  Synthetic
aauaauguccuggugcaaaugaau

SEQ ID NO: 74269 - RNA, 18 nt, Artificial Sequence
  Synthetic
cugguguuugcucugaau

SEQ ID NO: 74270 - RNA, 19 nt, Artificial Sequence
  Synthetic
ucugguguuugcucugaau

SEQ ID NO: 74271 - RNA, 20 nt, Artificial Sequence
  Synthetic
uucugguguuugcucugaau

SEQ ID NO: 74272 - RNA, 21 nt, Artificial Sequence
  Synthetic
uuucugguguuugcucugaau

SEQ ID NO: 74273 - RNA, 22 nt, Artificial Sequence
  Synthetic
auuucugguguuugcucugaau

SEQ ID NO: 74274 - RNA, 23 nt, Artificial Sequence
  Synthetic
gauuucugguguuugcucugaau

SEQ ID NO: 74275 - RNA, 24 nt, Artificial Sequence
  Synthetic
ggauuucugguguuugcucugaau

SEQ ID NO: 74276 - RNA, 18 nt, Artificial Sequence
  Synthetic
gguuuugaacagcaacau

SEQ ID NO: 74277 - RNA, 19 nt, Artificial Sequence
  Synthetic
agguuuugaacagcaacau

SEQ ID NO: 74278 - RNA, 20 nt, Artificial Sequence
  Synthetic
aagguuuugaacagcaacau

SEQ ID NO: 74279 - RNA, 21 nt, Artificial Sequence
  Synthetic
gaagguuuugaacagcaacau

SEQ ID NO: 74280 - RNA, 22 nt, Artificial Sequence
  Synthetic
cgaagguuuugaacagcaacau

SEQ ID NO: 74281 - RNA, 23 nt, Artificial Sequence
  Synthetic
ccgaagguuuugaacagcaacau

SEQ ID NO: 74282 - RNA, 24 nt, Artificial Sequence
  Synthetic
uccgaagguuuugaacagcaacau

SEQ ID NO: 74283 - RNA, 18 nt, Artificial Sequence
  Synthetic
uccaaggaauacuaacau

SEQ ID NO: 74284 - RNA, 19 nt, Artificial Sequence
  Synthetic
guccaaggaauacuaacau

SEQ ID NO: 74285 - RNA, 20 nt, Artificial Sequence
  Synthetic
aguccaaggaauacuaacau

SEQ ID NO: 74286 - RNA, 21 nt, Artificial Sequence
  Synthetic
gaguccaaggaauacuaacau

SEQ ID NO: 74287 - RNA, 22 nt, Artificial Sequence
  Synthetic
ugaguccaaggaauacuaacau

SEQ ID NO: 74288 - RNA, 23 nt, Artificial Sequence
  Synthetic
gugaguccaaggaauacuaacau

SEQ ID NO: 74289 - RNA, 24 nt, Artificial Sequence
  Synthetic
ugugaguccaaggaauacuaacau

SEQ ID NO: 74290 - RNA, 18 nt, Artificial Sequence
  Synthetic
gaaugauucuucccccau

SEQ ID NO: 74291 - RNA, 19 nt, Artificial Sequence
  Synthetic
ggaaugauucuucccccau

SEQ ID NO: 74292 - RNA, 20 nt, Artificial Sequence
  Synthetic
uggaaugauucuucccccau

SEQ ID NO: 74293 - RNA, 21 nt, Artificial Sequence
  Synthetic
guggaaugauucuucccccau

SEQ ID NO: 74294 - RNA, 22 nt, Artificial Sequence
  Synthetic
gguggaaugauucuucccccau

SEQ ID NO: 74295 - RNA, 23 nt, Artificial Sequence
  Synthetic
ugguggaaugauucuucccccau

SEQ ID NO: 74296 - RNA, 24 nt, Artificial Sequence
  Synthetic
gugguggaaugauucuucccccau

SEQ ID NO: 74297 - RNA, 18 nt, Artificial Sequence
  Synthetic
gcacagccuagcagccau

SEQ ID NO: 74298 - RNA, 19 nt, Artificial Sequence
  Synthetic
agcacagccuagcagccau

SEQ ID NO: 74299 - RNA, 20 nt, Artificial Sequence
  Synthetic
cagcacagccuagcagccau

SEQ ID NO: 74300 - RNA, 21 nt, Artificial Sequence
  Synthetic
gcagcacagccuagcagccau

SEQ ID NO: 74301 - RNA, 22 nt, Artificial Sequence
  Synthetic
ggcagcacagccuagcagccau

SEQ ID NO: 74302 - RNA, 23 nt, Artificial Sequence
  Synthetic
uggcagcacagccuagcagccau

SEQ ID NO: 74303 - RNA, 24 nt, Artificial Sequence
  Synthetic
uuggcagcacagccuagcagccau

SEQ ID NO: 74304 - RNA, 18 nt, Artificial Sequence
  Synthetic
uagauugaauacacgcau

SEQ ID NO: 74305 - RNA, 19 nt, Artificial Sequence
  Synthetic
uuagauugaauacacgcau

SEQ ID NO: 74306 - RNA, 20 nt, Artificial Sequence
  Synthetic
cuuagauugaauacacgcau

SEQ ID NO: 74307 - RNA, 21 nt, Artificial Sequence
  Synthetic
gcuuagauugaauacacgcau

SEQ ID NO: 74308 - RNA, 22 nt, Artificial Sequence
  Synthetic
ugcuuagauugaauacacgcau

SEQ ID NO: 74309 - RNA, 23 nt, Artificial Sequence
  Synthetic
cugcuuagauugaauacacgcau

SEQ ID NO: 74310 - RNA, 24 nt, Artificial Sequence
  Synthetic
ccugcuuagauugaauacacgcau

SEQ ID NO: 74311 - RNA, 18 nt, Artificial Sequence
  Synthetic
acacgcauacagaggcau

SEQ ID NO: 74312 - RNA, 19 nt, Artificial Sequence
  Synthetic
uacacgcauacagaggcau

SEQ ID NO: 74313 - RNA, 20 nt, Artificial Sequence
  Synthetic
auacacgcauacagaggcau

SEQ ID NO: 74314 - RNA, 21 nt, Artificial Sequence
  Synthetic
aauacacgcauacagaggcau

SEQ ID NO: 74315 - RNA, 22 nt, Artificial Sequence
  Synthetic
gaauacacgcauacagaggcau

SEQ ID NO: 74316 - RNA, 23 nt, Artificial Sequence
  Synthetic
ugaauacacgcauacagaggcau

SEQ ID NO: 74317 - RNA, 24 nt, Artificial Sequence
  Synthetic
uugaauacacgcauacagaggcau

SEQ ID NO: 74318 - RNA, 18 nt, Artificial Sequence
  Synthetic
aacaagaagaugaggcau

SEQ ID NO: 74319 - RNA, 19 nt, Artificial Sequence
  Synthetic
caacaagaagaugaggcau

SEQ ID NO: 74320 - RNA, 20 nt, Artificial Sequence
  Synthetic
ccaacaagaagaugaggcau

SEQ ID NO: 74321 - RNA, 21 nt, Artificial Sequence
  Synthetic
accaacaagaagaugaggcau

SEQ ID NO: 74322 - RNA, 22 nt, Artificial Sequence
  Synthetic
aaccaacaagaagaugaggcau

SEQ ID NO: 74323 - RNA, 23 nt, Artificial Sequence
  Synthetic
gaaccaacaagaagaugaggcau

SEQ ID NO: 74324 - RNA, 24 nt, Artificial Sequence
  Synthetic
agaaccaacaagaagaugaggcau

SEQ ID NO: 74325 - RNA, 18 nt, Artificial Sequence
  Synthetic
caggaugaagaggaagau

SEQ ID NO: 74326 - RNA, 19 nt, Artificial Sequence
  Synthetic
gcaggaugaagaggaagau

SEQ ID NO: 74327 - RNA, 20 nt, Artificial Sequence
  Synthetic
agcaggaugaagaggaagau

SEQ ID NO: 74328 - RNA, 21 nt, Artificial Sequence
  Synthetic
cagcaggaugaagaggaagau

SEQ ID NO: 74329 - RNA, 22 nt, Artificial Sequence
  Synthetic
gcagcaggaugaagaggaagau

SEQ ID NO: 74330 - RNA, 23 nt, Artificial Sequence
  Synthetic
agcagcaggaugaagaggaagau

SEQ ID NO: 74331 - RNA, 24 nt, Artificial Sequence
  Synthetic
uagcagcaggaugaagaggaagau

SEQ ID NO: 74332 - RNA, 18 nt, Artificial Sequence
  Synthetic
cggaaguguugauaagau

SEQ ID NO: 74333 - RNA, 19 nt, Artificial Sequence
  Synthetic
ccggaaguguugauaagau

SEQ ID NO: 74334 - RNA, 20 nt, Artificial Sequence
  Synthetic
uccggaaguguugauaagau

SEQ ID NO: 74335 - RNA, 21 nt, Artificial Sequence
  Synthetic
cuccggaaguguugauaagau

SEQ ID NO: 74336 - RNA, 22 nt, Artificial Sequence
  Synthetic
ucuccggaaguguugauaagau

SEQ ID NO: 74337 - RNA, 23 nt, Artificial Sequence
  Synthetic
  misc_feature (1)..(1): n is a, c, g, or u
nucuccggaaguguugauaagau

SEQ ID NO: 74338 - RNA, 24 nt, Artificial Sequence
  Synthetic
  misc_feature (2)..(2): n is a, c, g, or u
anucuccggaaguguugauaagau

SEQ ID NO: 74339 - RNA, 18 nt, Artificial Sequence
  Synthetic
gcacacgguccggcagau

SEQ ID NO: 74340 - RNA, 19 nt, Artificial Sequence
  Synthetic
ugcacacgguccggcagau

SEQ ID NO: 74341 - RNA, 20 nt, Artificial Sequence
  Synthetic
gugcacacgguccggcagau

SEQ ID NO: 74342 - RNA, 18 nt, Artificial Sequence
  Synthetic
  misc_feature (1)..(1): n is a, c, g, or u
  misc_feature (10)..(10): n is a, c, g, or u
naaauauuunguagagau

SEQ ID NO: 74343 - RNA, 19 nt, Artificial Sequence
  Synthetic
  misc_feature (2)..(2): n is a, c, g, or u
  misc_feature (11)..(11): n is a, c, g, or u
gnaaauauuunguagagau

SEQ ID NO: 74344 - RNA, 20 nt, Artificial Sequence
  Synthetic
  misc_feature (3)..(3): n is a, c, g, or u
  misc_feature (12)..(12): n is a, c, g, or u
ggnaaauauuunguagagau

SEQ ID NO: 74345 - RNA, 21 nt, Artificial Sequence
  Synthetic
  misc_feature (4)..(4): n is a, c, g, or u
  misc_feature (13)..(13): n is a, c, g, or u
gggnaaauauuunguagagau

SEQ ID NO: 74346 - RNA, 22 nt, Artificial Sequence
  Synthetic
  misc_feature (5)..(5): n is a, c, g, or u
  misc_feature (14)..(14): n is a, c, g, or u
ggggnaaauauuunguagagau

SEQ ID NO: 74347 - RNA, 23 nt, Artificial Sequence
  Synthetic
  misc_feature (6)..(6): n is a, c, g, or u
  misc_feature (15)..(15): n is a, c, g, or u
aggggnaaauauuunguagagau

SEQ ID NO: 74348 - RNA, 24 nt, Artificial Sequence
  Synthetic
  misc_feature (7)..(7): n is a, c, g, or u
  misc_feature (16)..(16): n is a, c, g, or u
uaggggnaaauauuunguagagau

SEQ ID NO: 74349 - RNA, 18 nt, Artificial Sequence
  Synthetic
gaacaaugcucaggagau

SEQ ID NO: 74350 - RNA, 19 nt, Artificial Sequence
  Synthetic
ugaacaaugcucaggagau

SEQ ID NO: 74351 - RNA, 20 nt, Artificial Sequence
  Synthetic
gugaacaaugcucaggagau

SEQ ID NO: 74352 - RNA, 21 nt, Artificial Sequence
  Synthetic
ggugaacaaugcucaggagau

SEQ ID NO: 74353 - RNA, 22 nt, Artificial Sequence
  Synthetic
  misc_feature (1)..(1): n is a, c, g, or u
nggugaacaaugcucaggagau

SEQ ID NO: 74354 - RNA, 23 nt, Artificial Sequence
  Synthetic
  misc_feature (2)..(2): n is a, c, g, or u
gnggugaacaaugcucaggagau

SEQ ID NO: 74355 - RNA, 24 nt, Artificial Sequence
  Synthetic
  misc_feature (3)..(3): n is a, c, g, or u
ugnggugaacaaugcucaggagau

SEQ ID NO: 74356 - RNA, 18 nt, Artificial Sequence
  Synthetic
auucuaaggcaucccgau

SEQ ID NO: 74357 - RNA, 19 nt, Artificial Sequence
  Synthetic
gauucuaaggcaucccgau

SEQ ID NO: 74358 - RNA, 20 nt, Artificial Sequence
  Synthetic
agauucuaaggcaucccgau

SEQ ID NO: 74359 - RNA, 21 nt, Artificial Sequence
  Synthetic
gagauucuaaggcaucccgau

SEQ ID NO: 74360 - RNA, 22 nt, Artificial Sequence
  Synthetic
ggagauucuaaggcaucccgau

SEQ ID NO: 74361 - RNA, 23 nt, Artificial Sequence
  Synthetic
aggagauucuaaggcaucccgau

SEQ ID NO: 74362 - RNA, 24 nt, Artificial Sequence
  Synthetic
caggagauucuaaggcaucccgau

SEQ ID NO: 74363 - RNA, 18 nt, Artificial Sequence
  Synthetic
gaggcauagcagcaggau

SEQ ID NO: 74364 - RNA, 19 nt, Artificial Sequence
  Synthetic
ugaggcauagcagcaggau

SEQ ID NO: 74365 - RNA, 20 nt, Artificial Sequence
  Synthetic
augaggcauagcagcaggau

SEQ ID NO: 74366 - RNA, 21 nt, Artificial Sequence
  Synthetic
gaugaggcauagcagcaggau

SEQ ID NO: 74367 - RNA, 22 nt, Artificial Sequence
  Synthetic
agaugaggcauagcagcaggau

SEQ ID NO: 74368 - RNA, 23 nt, Artificial Sequence
  Synthetic
aagaugaggcauagcagcaggau

SEQ ID NO: 74369 - RNA, 24 nt, Artificial Sequence
  Synthetic
gaagaugaggcauagcagcaggau

SEQ ID NO: 74370 - RNA, 18 nt, Artificial Sequence
  Synthetic
gaguuuuccaguuaggau

SEQ ID NO: 74371 - RNA, 19 nt, Artificial Sequence
  Synthetic
ggaguuuuccaguuaggau

SEQ ID NO: 74372 - RNA, 20 nt, Artificial Sequence
  Synthetic
uggaguuuuccaguuaggau

SEQ ID NO: 74373 - RNA, 21 nt, Artificial Sequence
  Synthetic
auggaguuuuccaguuaggau

SEQ ID NO: 74374 - RNA, 22 nt, Artificial Sequence
  Synthetic
gauggaguuuuccaguuaggau

SEQ ID NO: 74375 - RNA, 23 nt, Artificial Sequence
  Synthetic
agauggaguuuuccaguuaggau

SEQ ID NO: 74376 - RNA, 24 nt, Artificial Sequence
  Synthetic
aagauggaguuuuccaguuaggau

SEQ ID NO: 74377 - RNA, 18 nt, Artificial Sequence
  Synthetic
acuacuaggucccuggau

SEQ ID NO: 74378 - RNA, 19 nt, Artificial Sequence
  Synthetic
gacuacuaggucccuggau

SEQ ID NO: 74379 - RNA, 20 nt, Artificial Sequence
  Synthetic
ugacuacuaggucccuggau

SEQ ID NO: 74380 - RNA, 21 nt, Artificial Sequence
  Synthetic
cugacuacuaggucccuggau

SEQ ID NO: 74381 - RNA, 22 nt, Artificial Sequence
  Synthetic
acugacuacuaggucccuggau

SEQ ID NO: 74382 - RNA, 23 nt, Artificial Sequence
  Synthetic
aacugacuacuaggucccuggau

SEQ ID NO: 74383 - RNA, 24 nt, Artificial Sequence
  Synthetic
uaacugacuacuaggucccuggau

SEQ ID NO: 74384 - RNA, 18 nt, Artificial Sequence
  Synthetic
uaacuacauuaucuggau

SEQ ID NO: 74385 - RNA, 19 nt, Artificial Sequence
  Synthetic
uuaacuacauuaucuggau

SEQ ID NO: 74386 - RNA, 20 nt, Artificial Sequence
  Synthetic
auuaacuacauuaucuggau

SEQ ID NO: 74387 - RNA, 21 nt, Artificial Sequence
  Synthetic
gauuaacuacauuaucuggau

SEQ ID NO: 74388 - RNA, 22 nt, Artificial Sequence
  Synthetic
ugauuaacuacauuaucuggau

SEQ ID NO: 74389 - RNA, 23 nt, Artificial Sequence
  Synthetic
augauuaacuacauuaucuggau

SEQ ID NO: 74390 - RNA, 24 nt, Artificial Sequence
  Synthetic
aaugauuaacuacauuaucuggau

SEQ ID NO: 74391 - RNA, 18 nt, Artificial Sequence
  Synthetic
uuuccgaaagcccaugau

SEQ ID NO: 74392 - RNA, 19 nt, Artificial Sequence
  Synthetic
uuuuccgaaagcccaugau

SEQ ID NO: 74393 - RNA, 20 nt, Artificial Sequence
  Synthetic
auuuuccgaaagcccaugau

SEQ ID NO: 74394 - RNA, 21 nt, Artificial Sequence
  Synthetic
aauuuuccgaaagcccaugau

SEQ ID NO: 74395 - RNA, 22 nt, Artificial Sequence
  Synthetic
gaauuuuccgaaagcccaugau

SEQ ID NO: 74396 - RNA, 23 nt, Artificial Sequence
  Synthetic
ggaauuuuccgaaagcccaugau

SEQ ID NO: 74397 - RNA, 24 nt, Artificial Sequence
  Synthetic
aggaauuuuccgaaagcccaugau

SEQ ID NO: 74398 - RNA, 18 nt, Artificial Sequence
  Synthetic
guacuggugguugaugau

SEQ ID NO: 74399 - RNA, 19 nt, Artificial Sequence
  Synthetic
cguacuggugguugaugau

SEQ ID NO: 74400 - RNA, 20 nt, Artificial Sequence
  Synthetic
ccguacuggugguugaugau

SEQ ID NO: 74401 - RNA, 21 nt, Artificial Sequence
  Synthetic
cccguacuggugguugaugau

SEQ ID NO: 74402 - RNA, 22 nt, Artificial Sequence
  Synthetic
ucccguacuggugguugaugau

SEQ ID NO: 74403 - RNA, 23 nt, Artificial Sequence
  Synthetic
gucccguacuggugguugaugau

SEQ ID NO: 74404 - RNA, 24 nt, Artificial Sequence
  Synthetic
ggucccguacuggugguugaugau

SEQ ID NO: 74405 - RNA, 18 nt, Artificial Sequence
  Synthetic
ccuggugcaaaugaauau

SEQ ID NO: 74406 - RNA, 19 nt, Artificial Sequence
  Synthetic
uccuggugcaaaugaauau

SEQ ID NO: 74407 - RNA, 20 nt, Artificial Sequence
  Synthetic
guccuggugcaaaugaauau

SEQ ID NO: 74408 - RNA, 21 nt, Artificial Sequence
  Synthetic
uguccuggugcaaaugaauau

SEQ ID NO: 74409 - RNA, 22 nt, Artificial Sequence
  Synthetic
auguccuggugcaaaugaauau

SEQ ID NO: 74410 - RNA, 23 nt, Artificial Sequence
  Synthetic
aauguccuggugcaaaugaauau

SEQ ID NO: 74411 - RNA, 24 nt, Artificial Sequence
  Synthetic
uaauguccuggugcaaaugaauau

SEQ ID NO: 74412 - RNA, 18 nt, Artificial Sequence
  Synthetic
aggauuaaagacagguau

SEQ ID NO: 74413 - RNA, 19 nt, Artificial Sequence
  Synthetic
uaggauuaaagacagguau

SEQ ID NO: 74414 - RNA, 20 nt, Artificial Sequence
  Synthetic
uuaggauuaaagacagguau

SEQ ID NO: 74415 - RNA, 21 nt, Artificial Sequence
  Synthetic
guuaggauuaaagacagguau

SEQ ID NO: 74416 - RNA, 22 nt, Artificial Sequence
  Synthetic
aguuaggauuaaagacagguau

SEQ ID NO: 74417 - RNA, 23 nt, Artificial Sequence
  Synthetic
caguuaggauuaaagacagguau

SEQ ID NO: 74418 - RNA, 24 nt, Artificial Sequence
  Synthetic
ccaguuaggauuaaagacagguau

SEQ ID NO: 74419 - RNA, 18 nt, Artificial Sequence
  Synthetic
aauugguaacagagguau

SEQ ID NO: 74420 - RNA, 19 nt, Artificial Sequence
  Synthetic
aaauugguaacagagguau

SEQ ID NO: 74421 - RNA, 20 nt, Artificial Sequence
  Synthetic
aaaauugguaacagagguau

SEQ ID NO: 74422 - RNA, 21 nt, Artificial Sequence
  Synthetic
gaaaauugguaacagagguau

SEQ ID NO: 74423 - RNA, 22 nt, Artificial Sequence
  Synthetic
agaaaauugguaacagagguau

SEQ ID NO: 74424 - RNA, 23 nt, Artificial Sequence
  Synthetic
aagaaaauugguaacagagguau

SEQ ID NO: 74425 - RNA, 24 nt, Artificial Sequence
  Synthetic
aaagaaaauugguaacagagguau

SEQ ID NO: 74426 - RNA, 18 nt, Artificial Sequence
  Synthetic
acagagcugaggcgguau

SEQ ID NO: 74427 - RNA, 19 nt, Artificial Sequence
  Synthetic
uacagagcugaggcgguau

SEQ ID NO: 74428 - RNA, 20 nt, Artificial Sequence
  Synthetic
auacagagcugaggcgguau

SEQ ID NO: 74429 - RNA, 21 nt, Artificial Sequence
  Synthetic
gauacagagcugaggcgguau

SEQ ID NO: 74430 - RNA, 22 nt, Artificial Sequence
  Synthetic
cgauacagagcugaggcgguau

SEQ ID NO: 74431 - RNA, 23 nt, Artificial Sequence
  Synthetic
ccgauacagagcugaggcgguau

SEQ ID NO: 74432 - RNA, 24 nt, Artificial Sequence
  Synthetic
cccgauacagagcugaggcgguau

SEQ ID NO: 74433 - RNA, 18 nt, Artificial Sequence
  Synthetic
gucuagacucugcgguau

SEQ ID NO: 74434 - RNA, 19 nt, Artificial Sequence
  Synthetic
agucuagacucugcgguau

SEQ ID NO: 74435 - RNA, 20 nt, Artificial Sequence
  Synthetic
gagucuagacucugcgguau

SEQ ID NO: 74436 - RNA, 21 nt, Artificial Sequence
  Synthetic
cgagucuagacucugcgguau

SEQ ID NO: 74437 - RNA, 22 nt, Artificial Sequence
  Synthetic
acgagucuagacucugcgguau

SEQ ID NO: 74438 - RNA, 23 nt, Artificial Sequence
  Synthetic
cacgagucuagacucugcgguau

SEQ ID NO: 74439 - RNA, 24 nt, Artificial Sequence
  Synthetic
ccacgagucuagacucugcgguau

SEQ ID NO: 74440 - RNA, 18 nt, Artificial Sequence
  Synthetic
guccaagaguccucuuau

SEQ ID NO: 74441 - RNA, 19 nt, Artificial Sequence
  Synthetic
aguccaagaguccucuuau

SEQ ID NO: 74442 - RNA, 20 nt, Artificial Sequence
  Synthetic
gaguccaagaguccucuuau

SEQ ID NO: 74443 - RNA, 21 nt, Artificial Sequence
  Synthetic
agaguccaagaguccucuuau

SEQ ID NO: 74444 - RNA, 22 nt, Artificial Sequence
  Synthetic
gagaguccaagaguccucuuau

SEQ ID NO: 74445 - RNA, 23 nt, Artificial Sequence
  Synthetic
  misc_feature (1)..(1): n is a, c, g, or u
ngagaguccaagaguccucuuau

SEQ ID NO: 74446 - RNA, 24 nt, Artificial Sequence
  Synthetic
  misc_feature (2)..(2): n is a, c, g, or u
cngagaguccaagaguccucuuau

SEQ ID NO: 74447 - RNA, 18 nt, Artificial Sequence
  Synthetic
  misc_feature (2)..(2): n is a, c, g, or u
  misc_feature (11)..(11): n is a, c, g, or u
gnguaguuucncuuuuau

SEQ ID NO: 74448 - RNA, 19 nt, Artificial Sequence
  Synthetic
  misc_feature (3)..(3): n is a, c, g, or u
  misc_feature (12)..(12): n is a, c, g, or u
cgnguaguuucncuuuuau

SEQ ID NO: 74449 - RNA, 20 nt, Artificial Sequence
  Synthetic
  misc_feature (4)..(4): n is a, c, g, or u
  misc_feature (13)..(13): n is a, c, g, or u
acgnguaguuucncuuuuau

SEQ ID NO: 74450 - RNA, 21 nt, Artificial Sequence
  Synthetic
  misc_feature (5)..(5): n is a, c, g, or u
  misc_feature (14)..(14): n is a, c, g, or u
uacgnguaguuucncuuuuau

SEQ ID NO: 74451 - RNA, 22 nt, Artificial Sequence
  Synthetic
  misc_feature (6)..(6): n is a, c, g, or u
  misc_feature (15)..(15): n is a, c, g, or u
cuacgnguaguuucncuuuuau

SEQ ID NO: 74452 - RNA, 23 nt, Artificial Sequence
  Synthetic
  misc_feature (7)..(7): n is a, c, g, or u
  misc_feature (16)..(16): n is a, c, g, or u
gcuacgnguaguuucncuuuuau

SEQ ID NO: 74453 - RNA, 24 nt, Artificial Sequence
  Synthetic
  misc_feature (8)..(8): n is a, c, g, or u
  misc_feature (17)..(17): n is a, c, g, or u
cgcuacgnguaguuucncuuuuau

SEQ ID NO: 74454 - RNA, 18 nt, Artificial Sequence
  Synthetic
acaauaauugccugaacu

SEQ ID NO: 74455 - RNA, 19 nt, Artificial Sequence
  Synthetic
cacaauaauugccugaacu

SEQ ID NO: 74456 - RNA, 20 nt, Artificial Sequence
  Synthetic
ccacaauaauugccugaacu

SEQ ID NO: 74457 - RNA, 21 nt, Artificial Sequence
  Synthetic
accacaauaauugccugaacu

SEQ ID NO: 74458 - RNA, 22 nt, Artificial Sequence
  Synthetic
aaccacaauaauugccugaacu

SEQ ID NO: 74459 - RNA, 23 nt, Artificial Sequence
  Synthetic
aaaccacaauaauugccugaacu

SEQ ID NO: 74460 - RNA, 24 nt, Artificial Sequence
  Synthetic
gaaaccacaauaauugccugaacu

SEQ ID NO: 74461 - RNA, 18 nt, Artificial Sequence
  Synthetic
cacaucauccauauaacu

SEQ ID NO: 74462 - RNA, 19 nt, Artificial Sequence
  Synthetic
ccacaucauccauauaacu

SEQ ID NO: 74463 - RNA, 20 nt, Artificial Sequence
  Synthetic
accacaucauccauauaacu

SEQ ID NO: 74464 - RNA, 21 nt, Artificial Sequence
  Synthetic
uaccacaucauccauauaacu

SEQ ID NO: 74465 - RNA, 22 nt, Artificial Sequence
  Synthetic
auaccacaucauccauauaacu

SEQ ID NO: 74466 - RNA, 23 nt, Artificial Sequence
  Synthetic
aauaccacaucauccauauaacu

SEQ ID NO: 74467 - RNA, 24 nt, Artificial Sequence
  Synthetic
caauaccacaucauccauauaacu

SEQ ID NO: 74468 - RNA, 18 nt, Artificial Sequence
  Synthetic
ggagugcgaauccacacu

SEQ ID NO: 74469 - RNA, 19 nt, Artificial Sequence
  Synthetic
aggagugcgaauccacacu

SEQ ID NO: 74470 - RNA, 20 nt, Artificial Sequence
  Synthetic
gaggagugcgaauccacacu

SEQ ID NO: 74471 - RNA, 21 nt, Artificial Sequence
  Synthetic
ggaggagugcgaauccacacu

SEQ ID NO: 74472 - RNA, 22 nt, Artificial Sequence
  Synthetic
uggaggagugcgaauccacacu

SEQ ID NO: 74473 - RNA, 23 nt, Artificial Sequence
  Synthetic
cuggaggagugcgaauccacacu

SEQ ID NO: 74474 - RNA, 24 nt, Artificial Sequence
  Synthetic
gcuggaggagugcgaauccacacu

SEQ ID NO: 74475 - RNA, 18 nt, Artificial Sequence
  Synthetic
cacugaacaaauggcacu

SEQ ID NO: 74476 - RNA, 19 nt, Artificial Sequence
  Synthetic
ccacugaacaaauggcacu

SEQ ID NO: 74477 - RNA, 20 nt, Artificial Sequence
  Synthetic
accacugaacaaauggcacu

SEQ ID NO: 74478 - RNA, 21 nt, Artificial Sequence
  Synthetic
aaccacugaacaaauggcacu

SEQ ID NO: 74479 - RNA, 22 nt, Artificial Sequence
  Synthetic
gaaccacugaacaaauggcacu

SEQ ID NO: 74480 - RNA, 23 nt, Artificial Sequence
  Synthetic
cgaaccacugaacaaauggcacu

SEQ ID NO: 74481 - RNA, 24 nt, Artificial Sequence
  Synthetic
gcgaaccacugaacaaauggcacu

SEQ ID NO: 74482 - RNA, 18 nt, Artificial Sequence
  Synthetic
guauugacauaacugacu

SEQ ID NO: 74483 - RNA, 19 nt, Artificial Sequence
  Synthetic
aguauugacauaacugacu

SEQ ID NO: 74484 - RNA, 20 nt, Artificial Sequence
  Synthetic
uaguauugacauaacugacu

SEQ ID NO: 74485 - RNA, 21 nt, Artificial Sequence
  Synthetic
uuaguauugacauaacugacu

SEQ ID NO: 74486 - RNA, 22 nt, Artificial Sequence
  Synthetic
auuaguauugacauaacugacu

SEQ ID NO: 74487 - RNA, 23 nt, Artificial Sequence
  Synthetic
uauuaguauugacauaacugacu

SEQ ID NO: 74488 - RNA, 24 nt, Artificial Sequence
  Synthetic
auauuaguauugacauaacugacu

SEQ ID NO: 74489 - RNA, 18 nt, Artificial Sequence
  Synthetic
aaauacaggccucuuacu

SEQ ID NO: 74490 - RNA, 19 nt, Artificial Sequence
  Synthetic
aaaauacaggccucuuacu

SEQ ID NO: 74491 - RNA, 20 nt, Artificial Sequence
  Synthetic
gaaaauacaggccucuuacu

SEQ ID NO: 74492 - RNA, 21 nt, Artificial Sequence
  Synthetic
ggaaaauacaggccucuuacu

SEQ ID NO: 74493 - RNA, 22 nt, Artificial Sequence
  Synthetic
aggaaaauacaggccucuuacu

SEQ ID NO: 74494 - RNA, 23 nt, Artificial Sequence
  Synthetic
caggaaaauacaggccucuuacu

SEQ ID NO: 74495 - RNA, 24 nt, Artificial Sequence
  Synthetic
gcaggaaaauacaggccucuuacu

SEQ ID NO: 74496 - RNA, 18 nt, Artificial Sequence
  Synthetic
ucuagaagaucucuuacu

SEQ ID NO: 74497 - RNA, 19 nt, Artificial Sequence
  Synthetic
aucuagaagaucucuuacu

SEQ ID NO: 74498 - RNA, 20 nt, Artificial Sequence
  Synthetic
uaucuagaagaucucuuacu

SEQ ID NO: 74499 - RNA, 21 nt, Artificial Sequence
  Synthetic
guaucuagaagaucucuuacu

SEQ ID NO: 74500 - RNA, 22 nt, Artificial Sequence
  Synthetic
gguaucuagaagaucucuuacu

SEQ ID NO: 74501 - RNA, 23 nt, Artificial Sequence
  Synthetic
cgguaucuagaagaucucuuacu

SEQ ID NO: 74502 - RNA, 24 nt, Artificial Sequence
  Synthetic
gcgguaucuagaagaucucuuacu

SEQ ID NO: 74503 - RNA, 18 nt, Artificial Sequence
  Synthetic
cuucguuuuucauuuacu

SEQ ID NO: 74504 - RNA, 19 nt, Artificial Sequence
  Synthetic
ucuucguuuuucauuuacu

SEQ ID NO: 74505 - RNA, 20 nt, Artificial Sequence
  Synthetic
aucuucguuuuucauuuacu

SEQ ID NO: 74506 - RNA, 21 nt, Artificial Sequence
  Synthetic
aaucuucguuuuucauuuacu

SEQ ID NO: 74507 - RNA, 22 nt, Artificial Sequence
  Synthetic
uaaucuucguuuuucauuuacu

SEQ ID NO: 74508 - RNA, 23 nt, Artificial Sequence
  Synthetic
uuaaucuucguuuuucauuuacu

SEQ ID NO: 74509 - RNA, 24 nt, Artificial Sequence
  Synthetic
uuuaaucuucguuuuucauuuacu

SEQ ID NO: 74510 - RNA, 18 nt, Artificial Sequence
  Synthetic
ccguaaaauuucccaccu

SEQ ID NO: 74511 - RNA, 19 nt, Artificial Sequence
  Synthetic
cccguaaaauuucccaccu

SEQ ID NO: 74512 - RNA, 20 nt, Artificial Sequence
  Synthetic
ccccguaaaauuucccaccu

SEQ ID NO: 74513 - RNA, 21 nt, Artificial Sequence
  Synthetic
gccccguaaaauuucccaccu

SEQ ID NO: 74514 - RNA, 22 nt, Artificial Sequence
  Synthetic
agccccguaaaauuucccaccu

SEQ ID NO: 74515 - RNA, 23 nt, Artificial Sequence
  Synthetic
aagccccguaaaauuucccaccu

SEQ ID NO: 74516 - RNA, 24 nt, Artificial Sequence
  Synthetic
aaagccccguaaaauuucccaccu

SEQ ID NO: 74517 - RNA, 18 nt, Artificial Sequence
  Synthetic
cacacgggagcucccccu

SEQ ID NO: 74518 - RNA, 19 nt, Artificial Sequence
  Synthetic
acacacgggagcucccccu

SEQ ID NO: 74519 - RNA, 20 nt, Artificial Sequence
  Synthetic
gacacacgggagcucccccu

SEQ ID NO: 74520 - RNA, 21 nt, Artificial Sequence
  Synthetic
agacacacgggagcucccccu

SEQ ID NO: 74521 - RNA, 22 nt, Artificial Sequence
  Synthetic
aagacacacgggagcucccccu

SEQ ID NO: 74522 - RNA, 23 nt, Artificial Sequence
  Synthetic
caagacacacgggagcucccccu

SEQ ID NO: 74523 - RNA, 24 nt, Artificial Sequence
  Synthetic
ccaagacacacgggagcucccccu

SEQ ID NO: 74524 - RNA, 18 nt, Artificial Sequence
  Synthetic
uagacaaaggacgucccu

SEQ ID NO: 74525 - RNA, 19 nt, Artificial Sequence
  Synthetic
guagacaaaggacgucccu

SEQ ID NO: 74526 - RNA, 20 nt, Artificial Sequence
  Synthetic
cguagacaaaggacgucccu

SEQ ID NO: 74527 - RNA, 21 nt, Artificial Sequence
  Synthetic
acguagacaaaggacgucccu

SEQ ID NO: 74528 - RNA, 22 nt, Artificial Sequence
  Synthetic
gacguagacaaaggacgucccu

SEQ ID NO: 74529 - RNA, 23 nt, Artificial Sequence
  Synthetic
ggacguagacaaaggacgucccu

SEQ ID NO: 74530 - RNA, 24 nt, Artificial Sequence
  Synthetic
gggacguagacaaaggacgucccu

SEQ ID NO: 74531 - RNA, 18 nt, Artificial Sequence
  Synthetic
caguuggcagcacagccu

SEQ ID NO: 74532 - RNA, 19 nt, Artificial Sequence
  Synthetic
ccaguuggcagcacagccu

SEQ ID NO: 74533 - RNA, 20 nt, Artificial Sequence
  Synthetic
uccaguuggcagcacagccu

SEQ ID NO: 74534 - RNA, 21 nt, Artificial Sequence
  Synthetic
auccaguuggcagcacagccu

SEQ ID NO: 74535 - RNA, 22 nt, Artificial Sequence
  Synthetic
gauccaguuggcagcacagccu

SEQ ID NO: 74536 - RNA, 23 nt, Artificial Sequence
  Synthetic
ggauccaguuggcagcacagccu

SEQ ID NO: 74537 - RNA, 24 nt, Artificial Sequence
  Synthetic
aggauccaguuggcagcacagccu

SEQ ID NO: 74538 - RNA, 18 nt, Artificial Sequence
  Synthetic
uuagcaugccuugagccu

SEQ ID NO: 74539 - RNA, 19 nt, Artificial Sequence
  Synthetic
uuuagcaugccuugagccu

SEQ ID NO: 74540 - RNA, 20 nt, Artificial Sequence
  Synthetic
uuuuagcaugccuugagccu

SEQ ID NO: 74541 - RNA, 21 nt, Artificial Sequence
  Synthetic
uuuuuagcaugccuugagccu

SEQ ID NO: 74542 - RNA, 22 nt, Artificial Sequence
  Synthetic
guuuuuagcaugccuugagccu

SEQ ID NO: 74543 - RNA, 23 nt, Artificial Sequence
  Synthetic
uguuuuuagcaugccuugagccu

SEQ ID NO: 74544 - RNA, 24 nt, Artificial Sequence
  Synthetic
auguuuuuagcaugccuugagccu

SEQ ID NO: 74545 - RNA, 18 nt, Artificial Sequence
  Synthetic
guuuacacagaaaggccu

SEQ ID NO: 74546 - RNA, 19 nt, Artificial Sequence
  Synthetic
uguuuacacagaaaggccu

SEQ ID NO: 74547 - RNA, 20 nt, Artificial Sequence
  Synthetic
uuguuuacacagaaaggccu

SEQ ID NO: 74548 - RNA, 21 nt, Artificial Sequence
  Synthetic
auuguuuacacagaaaggccu

SEQ ID NO: 74549 - RNA, 22 nt, Artificial Sequence
  Synthetic
uauuguuuacacagaaaggccu

SEQ ID NO: 74550 - RNA, 23 nt, Artificial Sequence
  Synthetic
  misc_feature (1)..(1): n is a, c, g, or u
nuauuguuuacacagaaaggccu

SEQ ID NO: 74551 - RNA, 24 nt, Artificial Sequence
  Synthetic
  misc_feature (1)..(2): n is a, c, g, or u
nnuauuguuuacacagaaaggccu

SEQ ID NO: 74552 - RNA, 18 nt, Artificial Sequence
  Synthetic
ugcaggguccccaauccu

SEQ ID NO: 74553 - RNA, 19 nt, Artificial Sequence
  Synthetic
gugcaggguccccaauccu

SEQ ID NO: 74554 - RNA, 20 nt, Artificial Sequence
  Synthetic
ggugcaggguccccaauccu

SEQ ID NO: 74555 - RNA, 18 nt, Artificial Sequence
  Synthetic
cucuuacucugggauccu

SEQ ID NO: 74556 - RNA, 19 nt, Artificial Sequence
  Synthetic
ccucuuacucugggauccu

SEQ ID NO: 74557 - RNA, 20 nt, Artificial Sequence
  Synthetic
gccucuuacucugggauccu

SEQ ID NO: 74558 - RNA, 21 nt, Artificial Sequence
  Synthetic
ggccucuuacucugggauccu

SEQ ID NO: 74559 - RNA, 22 nt, Artificial Sequence
  Synthetic
aggccucuuacucugggauccu

SEQ ID NO: 74560 - RNA, 23 nt, Artificial Sequence
  Synthetic
caggccucuuacucugggauccu

SEQ ID NO: 74561 - RNA, 24 nt, Artificial Sequence
  Synthetic
acaggccucuuacucugggauccu

SEQ ID NO: 74562 - RNA, 18 nt, Artificial Sequence
  Synthetic
uuugguggucuauaagcu

SEQ ID NO: 74563 - RNA, 19 nt, Artificial Sequence
  Synthetic
auuugguggucuauaagcu

SEQ ID NO: 74564 - RNA, 20 nt, Artificial Sequence
  Synthetic
cauuugguggucuauaagcu

SEQ ID NO: 74565 - RNA, 21 nt, Artificial Sequence
  Synthetic
gcauuugguggucuauaagcu

SEQ ID NO: 74566 - RNA, 22 nt, Artificial Sequence
  Synthetic
ggcauuugguggucuauaagcu

SEQ ID NO: 74567 - RNA, 23 nt, Artificial Sequence
  Synthetic
gggcauuugguggucuauaagcu

SEQ ID NO: 74568 - RNA, 24 nt, Artificial Sequence
  Synthetic
ggggcauuugguggucuauaagcu

SEQ ID NO: 74569 - RNA, 18 nt, Artificial Sequence
  Synthetic
gccacccaaggcacagcu

SEQ ID NO: 74570 - RNA, 19 nt, Artificial Sequence
  Synthetic
agccacccaaggcacagcu

SEQ ID NO: 74571 - RNA, 20 nt, Artificial Sequence
  Synthetic
aagccacccaaggcacagcu

SEQ ID NO: 74572 - RNA, 21 nt, Artificial Sequence
  Synthetic
aaagccacccaaggcacagcu

SEQ ID NO: 74573 - RNA, 22 nt, Artificial Sequence
  Synthetic
  misc_feature (1)..(1): n is a, c, g, or u
naaagccacccaaggcacagcu

SEQ ID NO: 74574 - RNA, 23 nt, Artificial Sequence
  Synthetic
  misc_feature (2)..(2): n is a, c, g, or u
cnaaagccacccaaggcacagcu

SEQ ID NO: 74575 - RNA, 24 nt, Artificial Sequence
  Synthetic
  misc_feature (3)..(3): n is a, c, g, or u
ccnaaagccacccaaggcacagcu

SEQ ID NO: 74576 - RNA, 18 nt, Artificial Sequence
  Synthetic
uccgcaggauucagcgcu

SEQ ID NO: 74577 - RNA, 19 nt, Artificial Sequence
  Synthetic
guccgcaggauucagcgcu

SEQ ID NO: 74578 - RNA, 20 nt, Artificial Sequence
  Synthetic
cguccgcaggauucagcgcu

SEQ ID NO: 74579 - RNA, 21 nt, Artificial Sequence
  Synthetic
ucguccgcaggauucagcgcu

SEQ ID NO: 74580 - RNA, 22 nt, Artificial Sequence
  Synthetic
gucguccgcaggauucagcgcu

SEQ ID NO: 74581 - RNA, 23 nt, Artificial Sequence
  Synthetic
ggucguccgcaggauucagcgcu

SEQ ID NO: 74582 - RNA, 24 nt, Artificial Sequence
  Synthetic
gggucguccgcaggauucagcgcu

SEQ ID NO: 74583 - RNA, 18 nt, Artificial Sequence
  Synthetic
  misc_feature (8)..(8): n is a, c, g, or u
agguuccncgcaugcgcu

SEQ ID NO: 74584 - RNA, 19 nt, Artificial Sequence
  Synthetic
  misc_feature (9)..(9): n is a, c, g, or u
aagguuccncgcaugcgcu

SEQ ID NO: 74585 - RNA, 20 nt, Artificial Sequence
  Synthetic
  misc_feature (10)..(10): n is a, c, g, or u
aaagguuccncgcaugcgcu

SEQ ID NO: 74586 - RNA, 21 nt, Artificial Sequence
  Synthetic
  misc_feature (11)..(11): n is a, c, g, or u
caaagguuccncgcaugcgcu

SEQ ID NO: 74587 - RNA, 22 nt, Artificial Sequence
  Synthetic
  misc_feature (12)..(12): n is a, c, g, or u
acaaagguuccncgcaugcgcu

SEQ ID NO: 74588 - RNA, 23 nt, Artificial Sequence
  Synthetic
  misc_feature (13)..(13): n is a, c, g, or u
cacaaagguuccncgcaugcgcu

SEQ ID NO: 74589 - RNA, 24 nt, Artificial Sequence
  Synthetic
  misc_feature (14)..(14): n is a, c, g, or u
ccacaaagguuccncgcaugcgcu

SEQ ID NO: 74590 - RNA, 18 nt, Artificial Sequence
  Synthetic
  misc_feature (15)..(15): n is a, c, g, or u
gucccgauaaguuungcu

SEQ ID NO: 74591 - RNA, 19 nt, Artificial Sequence
  Synthetic
  misc_feature (1)..(1): n is a, c, g, or u
  misc_feature (16)..(16): n is a, c, g, or u
ngucccgauaaguuungcu

SEQ ID NO: 74592 - RNA, 20 nt, Artificial Sequence
  Synthetic
  misc_feature (2)..(2): n is a, c, g, or u
  misc_feature (17)..(17): n is a, c, g, or u
cngucccgauaaguuungcu

SEQ ID NO: 74593 - RNA, 21 nt, Artificial Sequence
  Synthetic
  misc_feature (3)..(3): n is a, c, g, or u
  misc_feature (18)..(18): n is a, c, g, or u
ucngucccgauaaguuungcu

SEQ ID NO: 74594 - RNA, 22 nt, Artificial Sequence
  Synthetic
  misc_feature (4)..(4): n is a, c, g, or u
  misc_feature (19)..(19): n is a, c, g, or u
aucngucccgauaaguuungcu

SEQ ID NO: 74595 - RNA, 23 nt, Artificial Sequence
  Synthetic
  misc_feature (5)..(5): n is a, c, g, or u
  misc_feature (20)..(20): n is a, c, g, or u
uaucngucccgauaaguuungcu

SEQ ID NO: 74596 - RNA, 24 nt, Artificial Sequence
  Synthetic
  misc_feature (6)..(6): n is a, c, g, or u
  misc_feature (21)..(21): n is a, c, g, or u
uuaucngucccgauaaguuungcu

SEQ ID NO: 74597 - RNA, 18 nt, Artificial Sequence
  Synthetic
  misc_feature (5)..(5): n is a, c, g, or u
ggugnggugaacaaugcu

SEQ ID NO: 74598 - RNA, 19 nt, Artificial Sequence
  Synthetic
  misc_feature (6)..(6): n is a, c, g, or u
uggugnggugaacaaugcu

SEQ ID NO: 74599 - RNA, 20 nt, Artificial Sequence
  Synthetic
  misc_feature (1)..(1): n is a, c, g, or u
  misc_feature (7)..(7): n is a, c, g, or u
nuggugnggugaacaaugcu

SEQ ID NO: 74600 - RNA, 21 nt, Artificial Sequence
  Synthetic
  misc_feature (2)..(2): n is a, c, g, or u
  misc_feature (8)..(8): n is a, c, g, or u
unuggugnggugaacaaugcu

SEQ ID NO: 74601 - RNA, 22 nt, Artificial Sequence
  Synthetic
  misc_feature (3)..(3): n is a, c, g, or u
  misc_feature (9)..(9): n is a, c, g, or u
gunuggugnggugaacaaugcu

SEQ ID NO: 74602 - RNA, 23 nt, Artificial Sequence
  Synthetic
  misc_feature (4)..(4): n is a, c, g, or u
  misc_feature (10)..(10): n is a, c, g, or u
agunuggugnggugaacaaugcu

SEQ ID NO: 74603 - RNA, 24 nt, Artificial Sequence
  Synthetic
  misc_feature (5)..(5): n is a, c, g, or u
  misc_feature (11)..(11): n is a, c, g, or u
cagunuggugnggugaacaaugcu

SEQ ID NO: 74604 - RNA, 18 nt, Artificial Sequence
  Synthetic
  misc_feature (4)..(4): n is a, c, g, or u
uuungcuccagaccugcu

SEQ ID NO: 74605 - RNA, 19 nt, Artificial Sequence
  Synthetic
  misc_feature (5)..(5): n is a, c, g, or u
guuungcuccagaccugcu

SEQ ID NO: 74606 - RNA, 20 nt, Artificial Sequence
  Synthetic
  misc_feature (6)..(6): n is a, c, g, or u
aguuungcuccagaccugcu

SEQ ID NO: 74607 - RNA, 21 nt, Artificial Sequence
  Synthetic
  misc_feature (7)..(7): n is a, c, g, or u
aaguuungcuccagaccugcu

SEQ ID NO: 74608 - RNA, 22 nt, Artificial Sequence
  Synthetic
  misc_feature (8)..(8): n is a, c, g, or u
uaaguuungcuccagaccugcu

SEQ ID NO: 74609 - RNA, 23 nt, Artificial Sequence
  Synthetic
  misc_feature (9)..(9): n is a, c, g, or u
auaaguuungcuccagaccugcu

SEQ ID NO: 74610 - RNA, 24 nt, Artificial Sequence
  Synthetic
  misc_feature (10)..(10): n is a, c, g, or u
gauaaguuungcuccagaccugcu

SEQ ID NO: 74611 - RNA, 18 nt, Artificial Sequence
  Synthetic
agagaugggaaaaaaucu

SEQ ID NO: 74612 - RNA, 19 nt, Artificial Sequence
  Synthetic
uagagaugggaaaaaaucu

SEQ ID NO: 74613 - RNA, 20 nt, Artificial Sequence
  Synthetic
guagagaugggaaaaaaucu

SEQ ID NO: 74614 - RNA, 21 nt, Artificial Sequence
  Synthetic
  misc_feature (1)..(1): n is a, c, g, or u
nguagagaugggaaaaaaucu

SEQ ID NO: 74615 - RNA, 22 nt, Artificial Sequence
  Synthetic
  misc_feature (2)..(2): n is a, c, g, or u
unguagagaugggaaaaaaucu

SEQ ID NO: 74616 - RNA, 23 nt, Artificial Sequence
  Synthetic
  misc_feature (3)..(3): n is a, c, g, or u
uunguagagaugggaaaaaaucu

SEQ ID NO: 74617 - RNA, 24 nt, Artificial Sequence
  Synthetic
  misc_feature (4)..(4): n is a, c, g, or u
uuunguagagaugggaaaaaaucu

SEQ ID NO: 74618 - RNA, 18 nt, Artificial Sequence
  Synthetic
gaggcaggaggcggaucu

SEQ ID NO: 74619 - RNA, 19 nt, Artificial Sequence
  Synthetic
ggaggcaggaggcggaucu

SEQ ID NO: 74620 - RNA, 20 nt, Artificial Sequence
  Synthetic
uggaggcaggaggcggaucu

SEQ ID NO: 74621 - RNA, 21 nt, Artificial Sequence
  Synthetic
guggaggcaggaggcggaucu

SEQ ID NO: 74622 - RNA, 22 nt, Artificial Sequence
  Synthetic
gguggaggcaggaggcggaucu

SEQ ID NO: 74623 - RNA, 23 nt, Artificial Sequence
  Synthetic
ugguggaggcaggaggcggaucu

SEQ ID NO: 74624 - RNA, 24 nt, Artificial Sequence
  Synthetic
uugguggaggcaggaggcggaucu

SEQ ID NO: 74625 - RNA, 18 nt, Artificial Sequence
  Synthetic
ucccuggaugcuggaucu

SEQ ID NO: 74626 - RNA, 19 nt, Artificial Sequence
  Synthetic
gucccuggaugcuggaucu

SEQ ID NO: 74627 - RNA, 20 nt, Artificial Sequence
  Synthetic
ggucccuggaugcuggaucu

SEQ ID NO: 74628 - RNA, 21 nt, Artificial Sequence
  Synthetic
aggucccuggaugcuggaucu

SEQ ID NO: 74629 - RNA, 22 nt, Artificial Sequence
  Synthetic
uaggucccuggaugcuggaucu

SEQ ID NO: 74630 - RNA, 23 nt, Artificial Sequence
  Synthetic
cuaggucccuggaugcuggaucu

SEQ ID NO: 74631 - RNA, 24 nt, Artificial Sequence
  Synthetic
acuaggucccuggaugcuggaucu

SEQ ID NO: 74632 - RNA, 18 nt, Artificial Sequence
  Synthetic
agagcugaggcgguaucu

SEQ ID NO: 74633 - RNA, 19 nt, Artificial Sequence
  Synthetic
cagagcugaggcgguaucu

SEQ ID NO: 74634 - RNA, 20 nt, Artificial Sequence
  Synthetic
acagagcugaggcgguaucu

SEQ ID NO: 74635 - RNA, 18 nt, Artificial Sequence
  Synthetic
cugaggaugagugucucu

SEQ ID NO: 74636 - RNA, 19 nt, Artificial Sequence
  Synthetic
ccugaggaugagugucucu

SEQ ID NO: 74637 - RNA, 20 nt, Artificial Sequence
  Synthetic
gccugaggaugagugucucu

SEQ ID NO: 74638 - RNA, 21 nt, Artificial Sequence
  Synthetic
ggccugaggaugagugucucu

SEQ ID NO: 74639 - RNA, 22 nt, Artificial Sequence
  Synthetic
uggccugaggaugagugucucu

SEQ ID NO: 74640 - RNA, 23 nt, Artificial Sequence
  Synthetic
auggccugaggaugagugucucu

SEQ ID NO: 74641 - RNA, 24 nt, Artificial Sequence
  Synthetic
cauggccugaggaugagugucucu

SEQ ID NO: 74642 - RNA, 18 nt, Artificial Sequence
  Synthetic
gguuuuauaccuuucucu

SEQ ID NO: 74643 - RNA, 19 nt, Artificial Sequence
  Synthetic
agguuuuauaccuuucucu

SEQ ID NO: 74644 - RNA, 20 nt, Artificial Sequence
  Synthetic
aagguuuuauaccuuucucu

SEQ ID NO: 74645 - RNA, 21 nt, Artificial Sequence
  Synthetic
uaagguuuuauaccuuucucu

SEQ ID NO: 74646 - RNA, 22 nt, Artificial Sequence
  Synthetic
auaagguuuuauaccuuucucu

SEQ ID NO: 74647 - RNA, 23 nt, Artificial Sequence
  Synthetic
aauaagguuuuauaccuuucucu

SEQ ID NO: 74648 - RNA, 24 nt, Artificial Sequence
  Synthetic
uaauaagguuuuauaccuuucucu

SEQ ID NO: 74649 - RNA, 18 nt, Artificial Sequence
  Synthetic
  misc_feature (6)..(6): n is a, c, g, or u
cucuangacgguuucucu

SEQ ID NO: 74650 - RNA, 19 nt, Artificial Sequence
  Synthetic
  misc_feature (7)..(7): n is a, c, g, or u
acucuangacgguuucucu

SEQ ID NO: 74651 - RNA, 20 nt, Artificial Sequence
  Synthetic
  misc_feature (8)..(8): n is a, c, g, or u
uacucuangacgguuucucu

SEQ ID NO: 74652 - RNA, 21 nt, Artificial Sequence
  Synthetic
  misc_feature (9)..(9): n is a, c, g, or u
auacucuangacgguuucucu

SEQ ID NO: 74653 - RNA, 22 nt, Artificial Sequence
  Synthetic
  misc_feature (10)..(10): n is a, c, g, or u
aauacucuangacgguuucucu

SEQ ID NO: 74654 - RNA, 23 nt, Artificial Sequence
  Synthetic
  misc_feature (11)..(11): n is a, c, g, or u
aaauacucuangacgguuucucu

SEQ ID NO: 74655 - RNA, 24 nt, Artificial Sequence
  Synthetic
  misc_feature (12)..(12): n is a, c, g, or u
caaauacucuangacgguuucucu

SEQ ID NO: 74656 - RNA, 18 nt, Artificial Sequence
  Synthetic
ucuuuaaacaaacagucu

SEQ ID NO: 74657 - RNA, 19 nt, Artificial Sequence
  Synthetic
gucuuuaaacaaacagucu

SEQ ID NO: 74658 - RNA, 20 nt, Artificial Sequence
  Synthetic
agucuuuaaacaaacagucu

SEQ ID NO: 74659 - RNA, 21 nt, Artificial Sequence
  Synthetic
cagucuuuaaacaaacagucu

SEQ ID NO: 74660 - RNA, 22 nt, Artificial Sequence
  Synthetic
ccagucuuuaaacaaacagucu

SEQ ID NO: 74661 - RNA, 23 nt, Artificial Sequence
  Synthetic
cccagucuuuaaacaaacagucu

SEQ ID NO: 74662 - RNA, 24 nt, Artificial Sequence
  Synthetic
ucccagucuuuaaacaaacagucu

SEQ ID NO: 74663 - RNA, 18 nt, Artificial Sequence
  Synthetic
  misc_feature (4)..(4): n is a, c, g, or u
cccnacuccucccagucu

SEQ ID NO: 74664 - RNA, 19 nt, Artificial Sequence
  Synthetic
  misc_feature (5)..(5): n is a, c, g, or u
ccccnacuccucccagucu

SEQ ID NO: 74665 - RNA, 20 nt, Artificial Sequence
  Synthetic
  misc_feature (6)..(6): n is a, c, g, or u
cccccnacuccucccagucu

SEQ ID NO: 74666 - RNA, 21 nt, Artificial Sequence
  Synthetic
  misc_feature (7)..(7): n is a, c, g, or u
ucccccnacuccucccagucu

SEQ ID NO: 74667 - RNA, 22 nt, Artificial Sequence
  Synthetic
  misc_feature (8)..(8): n is a, c, g, or u
cucccccnacuccucccagucu

SEQ ID NO: 74668 - RNA, 23 nt, Artificial Sequence
  Synthetic
  misc_feature (9)..(9): n is a, c, g, or u
ccucccccnacuccucccagucu

SEQ ID NO: 74669 - RNA, 24 nt, Artificial Sequence
  Synthetic
  misc_feature (10)..(10): n is a, c, g, or u
uccucccccnacuccucccagucu

SEQ ID NO: 74670 - RNA, 18 nt, Artificial Sequence
  Synthetic
cgauugagaucuucgucu

SEQ ID NO: 74671 - RNA, 19 nt, Artificial Sequence
  Synthetic
gcgauugagaucuucgucu

SEQ ID NO: 74672 - RNA, 20 nt, Artificial Sequence
  Synthetic
ggcgauugagaucuucgucu

SEQ ID NO: 74673 - RNA, 18 nt, Artificial Sequence
  Synthetic
ggaccugccucuucgucu

SEQ ID NO: 74674 - RNA, 19 nt, Artificial Sequence
  Synthetic
gggaccugccucuucgucu

SEQ ID NO: 74675 - RNA, 20 nt, Artificial Sequence
  Synthetic
ggggaccugccucuucgucu

SEQ ID NO: 74676 - RNA, 21 nt, Artificial Sequence
  Synthetic
aggggaccugccucuucgucu

SEQ ID NO: 74677 - RNA, 22 nt, Artificial Sequence
  Synthetic
uaggggaccugccucuucgucu

SEQ ID NO: 74678 - RNA, 23 nt, Artificial Sequence
  Synthetic
cuaggggaccugccucuucgucu

SEQ ID NO: 74679 - RNA, 24 nt, Artificial Sequence
  Synthetic
ucuaggggaccugccucuucgucu

SEQ ID NO: 74680 - RNA, 18 nt, Artificial Sequence
  Synthetic
aggggcauuugguggucu

SEQ ID NO: 74681 - RNA, 19 nt, Artificial Sequence
  Synthetic
uaggggcauuugguggucu

SEQ ID NO: 74682 - RNA, 20 nt, Artificial Sequence
  Synthetic
auaggggcauuugguggucu

SEQ ID NO: 74683 - RNA, 21 nt, Artificial Sequence
  Synthetic
gauaggggcauuugguggucu

SEQ ID NO: 74684 - RNA, 22 nt, Artificial Sequence
  Synthetic
agauaggggcauuugguggucu

SEQ ID NO: 74685 - RNA, 23 nt, Artificial Sequence
  Synthetic
aagauaggggcauuugguggucu

SEQ ID NO: 74686 - RNA, 24 nt, Artificial Sequence
  Synthetic
uaagauaggggcauuugguggucu

SEQ ID NO: 74687 - RNA, 18 nt, Artificial Sequence
  Synthetic
gccugaggaugagugucu

SEQ ID NO: 74688 - RNA, 19 nt, Artificial Sequence
  Synthetic
ggccugaggaugagugucu

SEQ ID NO: 74689 - RNA, 20 nt, Artificial Sequence
  Synthetic
uggccugaggaugagugucu

SEQ ID NO: 74690 - RNA, 21 nt, Artificial Sequence
  Synthetic
auggccugaggaugagugucu

SEQ ID NO: 74691 - RNA, 22 nt, Artificial Sequence
  Synthetic
cauggccugaggaugagugucu

SEQ ID NO: 74692 - RNA, 23 nt, Artificial Sequence
  Synthetic
gcauggccugaggaugagugucu

SEQ ID NO: 74693 - RNA, 24 nt, Artificial Sequence
  Synthetic
ugcauggccugaggaugagugucu

SEQ ID NO: 74694 - RNA, 18 nt, Artificial Sequence
  Synthetic
  misc_feature (15)..(15): n is a, c, g, or u
gucuaacaacaguanucu

SEQ ID NO: 74695 - RNA, 19 nt, Artificial Sequence
  Synthetic
  misc_feature (16)..(16): n is a, c, g, or u
cgucuaacaacaguanucu

SEQ ID NO: 74696 - RNA, 20 nt, Artificial Sequence
  Synthetic
  misc_feature (17)..(17): n is a, c, g, or u
ucgucuaacaacaguanucu

SEQ ID NO: 74697 - RNA, 21 nt, Artificial Sequence
  Synthetic
  misc_feature (18)..(18): n is a, c, g, or u
uucgucuaacaacaguanucu

SEQ ID NO: 74698 - RNA, 22 nt, Artificial Sequence
  Synthetic
  misc_feature (19)..(19): n is a, c, g, or u
cuucgucuaacaacaguanucu

SEQ ID NO: 74699 - RNA, 23 nt, Artificial Sequence
  Synthetic
  misc_feature (20)..(20): n is a, c, g, or u
ucuucgucuaacaacaguanucu

SEQ ID NO: 74700 - RNA, 24 nt, Artificial Sequence
  Synthetic
  misc_feature (21)..(21): n is a, c, g, or u
cucuucgucuaacaacaguanucu

SEQ ID NO: 74701 - RNA, 18 nt, Artificial Sequence
  Synthetic
cgagggaguucuucuucu

SEQ ID NO: 74702 - RNA, 19 nt, Artificial Sequence
  Synthetic
gcgagggaguucuucuucu

SEQ ID NO: 74703 - RNA, 20 nt, Artificial Sequence
  Synthetic
ggcgagggaguucuucuucu

SEQ ID NO: 74704 - RNA, 21 nt, Artificial Sequence
  Synthetic
aggcgagggaguucuucuucu

SEQ ID NO: 74705 - RNA, 22 nt, Artificial Sequence
  Synthetic
gaggcgagggaguucuucuucu

SEQ ID NO: 74706 - RNA, 23 nt, Artificial Sequence
  Synthetic
cgaggcgagggaguucuucuucu

SEQ ID NO: 74707 - RNA, 24 nt, Artificial Sequence
  Synthetic
gcgaggcgagggaguucuucuucu

SEQ ID NO: 74708 - RNA, 18 nt, Artificial Sequence
  Synthetic
aggcgagggaguucuucu

SEQ ID NO: 74709 - RNA, 19 nt, Artificial Sequence
  Synthetic
gaggcgagggaguucuucu

SEQ ID NO: 74710 - RNA, 20 nt, Artificial Sequence
  Synthetic
cgaggcgagggaguucuucu

SEQ ID NO: 74711 - RNA, 21 nt, Artificial Sequence
  Synthetic
gcgaggcgagggaguucuucu

SEQ ID NO: 74712 - RNA, 22 nt, Artificial Sequence
  Synthetic
ugcgaggcgagggaguucuucu

SEQ ID NO: 74713 - RNA, 23 nt, Artificial Sequence
  Synthetic
cugcgaggcgagggaguucuucu

SEQ ID NO: 74714 - RNA, 24 nt, Artificial Sequence
  Synthetic
ucugcgaggcgagggaguucuucu

SEQ ID NO: 74715 - RNA, 18 nt, Artificial Sequence
  Synthetic
aagguuuuauaccuuucu

SEQ ID NO: 74716 - RNA, 19 nt, Artificial Sequence
  Synthetic
uaagguuuuauaccuuucu

SEQ ID NO: 74717 - RNA, 20 nt, Artificial Sequence
  Synthetic
auaagguuuuauaccuuucu

SEQ ID NO: 74718 - RNA, 21 nt, Artificial Sequence
  Synthetic
aauaagguuuuauaccuuucu

SEQ ID NO: 74719 - RNA, 22 nt, Artificial Sequence
  Synthetic
uaauaagguuuuauaccuuucu

SEQ ID NO: 74720 - RNA, 23 nt, Artificial Sequence
  Synthetic
auaauaagguuuuauaccuuucu

SEQ ID NO: 74721 - RNA, 24 nt, Artificial Sequence
  Synthetic
gauaauaagguuuuauaccuuucu

SEQ ID NO: 74722 - RNA, 18 nt, Artificial Sequence
  Synthetic
guaaguuggcgagaaagu

SEQ ID NO: 74723 - RNA, 19 nt, Artificial Sequence
  Synthetic
uguaaguuggcgagaaagu

SEQ ID NO: 74724 - RNA, 20 nt, Artificial Sequence
  Synthetic
uuguaaguuggcgagaaagu

SEQ ID NO: 74725 - RNA, 21 nt, Artificial Sequence
  Synthetic
cuuguaaguuggcgagaaagu

SEQ ID NO: 74726 - RNA, 22 nt, Artificial Sequence
  Synthetic
ccuuguaaguuggcgagaaagu

SEQ ID NO: 74727 - RNA, 23 nt, Artificial Sequence
  Synthetic
gccuuguaaguuggcgagaaagu

SEQ ID NO: 74728 - RNA, 24 nt, Artificial Sequence
  Synthetic
ggccuuguaaguuggcgagaaagu

SEQ ID NO: 74729 - RNA, 18 nt, Artificial Sequence
  Synthetic
uuacugaaggaaagaagu

SEQ ID NO: 74730 - RNA, 19 nt, Artificial Sequence
  Synthetic
cuuacugaaggaaagaagu

SEQ ID NO: 74731 - RNA, 20 nt, Artificial Sequence
  Synthetic
ucuuacugaaggaaagaagu

SEQ ID NO: 74732 - RNA, 21 nt, Artificial Sequence
  Synthetic
cucuuacugaaggaaagaagu

SEQ ID NO: 74733 - RNA, 22 nt, Artificial Sequence
  Synthetic
ucucuuacugaaggaaagaagu

SEQ ID NO: 74734 - RNA, 23 nt, Artificial Sequence
  Synthetic
aucucuuacugaaggaaagaagu

SEQ ID NO: 74735 - RNA, 24 nt, Artificial Sequence
  Synthetic
gaucucuuacugaaggaaagaagu

SEQ ID NO: 74736 - RNA, 18 nt, Artificial Sequence
  Synthetic
aacugaaagccagacagu

SEQ ID NO: 74737 - RNA, 19 nt, Artificial Sequence
  Synthetic
uaacugaaagccagacagu

SEQ ID NO: 74738 - RNA, 20 nt, Artificial Sequence
  Synthetic
auaacugaaagccagacagu

SEQ ID NO: 74739 - RNA, 21 nt, Artificial Sequence
  Synthetic
uauaacugaaagccagacagu

SEQ ID NO: 74740 - RNA, 22 nt, Artificial Sequence
  Synthetic
auauaacugaaagccagacagu

SEQ ID NO: 74741 - RNA, 23 nt, Artificial Sequence
  Synthetic
cauauaacugaaagccagacagu

SEQ ID NO: 74742 - RNA, 24 nt, Artificial Sequence
  Synthetic
ccauauaacugaaagccagacagu

SEQ ID NO: 74743 - RNA, 18 nt, Artificial Sequence
  Synthetic
  misc_feature (12)..(12): n is a, c, g, or u
guugacauugcngagagu

SEQ ID NO: 74744 - RNA, 19 nt, Artificial Sequence
  Synthetic
  misc_feature (13)..(13): n is a, c, g, or u
cguugacauugcngagagu

SEQ ID NO: 74745 - RNA, 20 nt, Artificial Sequence
  Synthetic
  misc_feature (14)..(14): n is a, c, g, or u
ucguugacauugcngagagu

SEQ ID NO: 74746 - RNA, 21 nt, Artificial Sequence
  Synthetic
  misc_feature (15)..(15): n is a, c, g, or u
gucguugacauugcngagagu

SEQ ID NO: 74747 - RNA, 22 nt, Artificial Sequence
  Synthetic
  misc_feature (16)..(16): n is a, c, g, or u
ggucguugacauugcngagagu

SEQ ID NO: 74748 - RNA, 23 nt, Artificial Sequence
  Synthetic
  misc_feature (17)..(17): n is a, c, g, or u
cggucguugacauugcngagagu

SEQ ID NO: 74749 - RNA, 24 nt, Artificial Sequence
  Synthetic
  misc_feature (18)..(18): n is a, c, g, or u
ucggucguugacauugcngagagu

SEQ ID NO: 74750 - RNA, 18 nt, Artificial Sequence
  Synthetic
gagaaguccaccacgagu

SEQ ID NO: 74751 - RNA, 19 nt, Artificial Sequence
  Synthetic
agagaaguccaccacgagu

SEQ ID NO: 74752 - RNA, 20 nt, Artificial Sequence
  Synthetic
gagagaaguccaccacgagu

SEQ ID NO: 74753 - RNA, 21 nt, Artificial Sequence
  Synthetic
ugagagaaguccaccacgagu

SEQ ID NO: 74754 - RNA, 22 nt, Artificial Sequence
  Synthetic
uugagagaaguccaccacgagu

SEQ ID NO: 74755 - RNA, 23 nt, Artificial Sequence
  Synthetic
auugagagaaguccaccacgagu

SEQ ID NO: 74756 - RNA, 24 nt, Artificial Sequence
  Synthetic
aauugagagaaguccaccacgagu

SEQ ID NO: 74757 - RNA, 18 nt, Artificial Sequence
  Synthetic
auuucccaccuugugagu

SEQ ID NO: 74758 - RNA, 19 nt, Artificial Sequence
  Synthetic
aauuucccaccuugugagu

SEQ ID NO: 74759 - RNA, 20 nt, Artificial Sequence
  Synthetic
aaauuucccaccuugugagu

SEQ ID NO: 74760 - RNA, 21 nt, Artificial Sequence
  Synthetic
aaaauuucccaccuugugagu

SEQ ID NO: 74761 - RNA, 22 nt, Artificial Sequence
  Synthetic
uaaaauuucccaccuugugagu

SEQ ID NO: 74762 - RNA, 23 nt, Artificial Sequence
  Synthetic
guaaaauuucccaccuugugagu

SEQ ID NO: 74763 - RNA, 24 nt, Artificial Sequence
  Synthetic
cguaaaauuucccaccuugugagu

SEQ ID NO: 74764 - RNA, 18 nt, Artificial Sequence
  Synthetic
gcaacauaccuugauagu

SEQ ID NO: 74765 - RNA, 19 nt, Artificial Sequence
  Synthetic
ggcaacauaccuugauagu

SEQ ID NO: 74766 - RNA, 20 nt, Artificial Sequence
  Synthetic
gggcaacauaccuugauagu

SEQ ID NO: 74767 - RNA, 21 nt, Artificial Sequence
  Synthetic
cgggcaacauaccuugauagu

SEQ ID NO: 74768 - RNA, 22 nt, Artificial Sequence
  Synthetic
acgggcaacauaccuugauagu

SEQ ID NO: 74769 - RNA, 23 nt, Artificial Sequence
  Synthetic
aacgggcaacauaccuugauagu

SEQ ID NO: 74770 - RNA, 24 nt, Artificial Sequence
  Synthetic
aaacgggcaacauaccuugauagu

SEQ ID NO: 74771 - RNA, 18 nt, Artificial Sequence
  Synthetic
auuaaagacagguauagu

SEQ ID NO: 74772 - RNA, 19 nt, Artificial Sequence
  Synthetic
gauuaaagacagguauagu

SEQ ID NO: 74773 - RNA, 20 nt, Artificial Sequence
  Synthetic
ggauuaaagacagguauagu

SEQ ID NO: 74774 - RNA, 21 nt, Artificial Sequence
  Synthetic
aggauuaaagacagguauagu

SEQ ID NO: 74775 - RNA, 22 nt, Artificial Sequence
  Synthetic
uaggauuaaagacagguauagu

SEQ ID NO: 74776 - RNA, 23 nt, Artificial Sequence
  Synthetic
uuaggauuaaagacagguauagu

SEQ ID NO: 74777 - RNA, 24 nt, Artificial Sequence
  Synthetic
guuaggauuaaagacagguauagu

SEQ ID NO: 74778 - RNA, 18 nt, Artificial Sequence
  Synthetic
ugccuacagccuccuagu

SEQ ID NO: 74779 - RNA, 19 nt, Artificial Sequence
  Synthetic
augccuacagccuccuagu

SEQ ID NO: 74780 - RNA, 20 nt, Artificial Sequence
  Synthetic
uaugccuacagccuccuagu

SEQ ID NO: 74781 - RNA, 21 nt, Artificial Sequence
  Synthetic
uuaugccuacagccuccuagu

SEQ ID NO: 74782 - RNA, 22 nt, Artificial Sequence
  Synthetic
uuuaugccuacagccuccuagu

SEQ ID NO: 74783 - RNA, 23 nt, Artificial Sequence
  Synthetic
auuuaugccuacagccuccuagu

SEQ ID NO: 74784 - RNA, 24 nt, Artificial Sequence
  Synthetic
aauuuaugccuacagccuccuagu

SEQ ID NO: 74785 - RNA, 18 nt, Artificial Sequence
  Synthetic
gaugagugaggcaguagu

SEQ ID NO: 74786 - RNA, 19 nt, Artificial Sequence
  Synthetic
agaugagugaggcaguagu

SEQ ID NO: 74787 - RNA, 20 nt, Artificial Sequence
  Synthetic
gagaugagugaggcaguagu

SEQ ID NO: 74788 - RNA, 21 nt, Artificial Sequence
  Synthetic
cgagaugagugaggcaguagu

SEQ ID NO: 74789 - RNA, 22 nt, Artificial Sequence
  Synthetic
acgagaugagugaggcaguagu

SEQ ID NO: 74790 - RNA, 23 nt, Artificial Sequence
  Synthetic
gacgagaugagugaggcaguagu

SEQ ID NO: 74791 - RNA, 24 nt, Artificial Sequence
  Synthetic
ugacgagaugagugaggcaguagu

SEQ ID NO: 74792 - RNA, 18 nt, Artificial Sequence
  Synthetic
cuuuaggcccauauuagu

SEQ ID NO: 74793 - RNA, 19 nt, Artificial Sequence
  Synthetic
acuuuaggcccauauuagu

SEQ ID NO: 74794 - RNA, 20 nt, Artificial Sequence
  Synthetic
aacuuuaggcccauauuagu

SEQ ID NO: 74795 - RNA, 21 nt, Artificial Sequence
  Synthetic
gaacuuuaggcccauauuagu

SEQ ID NO: 74796 - RNA, 22 nt, Artificial Sequence
  Synthetic
ugaacuuuaggcccauauuagu

SEQ ID NO: 74797 - RNA, 23 nt, Artificial Sequence
  Synthetic
cugaacuuuaggcccauauuagu

SEQ ID NO: 74798 - RNA, 24 nt, Artificial Sequence
  Synthetic
ccugaacuuuaggcccauauuagu

SEQ ID NO: 74799 - RNA, 18 nt, Artificial Sequence
  Synthetic
guggucuccaugcgacgu

SEQ ID NO: 74800 - RNA, 19 nt, Artificial Sequence
  Synthetic
gguggucuccaugcgacgu

SEQ ID NO: 74801 - RNA, 20 nt, Artificial Sequence
  Synthetic
cgguggucuccaugcgacgu

SEQ ID NO: 74802 - RNA, 21 nt, Artificial Sequence
  Synthetic
acgguggucuccaugcgacgu

SEQ ID NO: 74803 - RNA, 22 nt, Artificial Sequence
  Synthetic
cacgguggucuccaugcgacgu

SEQ ID NO: 74804 - RNA, 23 nt, Artificial Sequence
  Synthetic
ucacgguggucuccaugcgacgu

SEQ ID NO: 74805 - RNA, 24 nt, Artificial Sequence
  Synthetic
uucacgguggucuccaugcgacgu

SEQ ID NO: 74806 - RNA, 18 nt, Artificial Sequence
  Synthetic
ccauucgagagggaccgu

SEQ ID NO: 74807 - RNA, 19 nt, Artificial Sequence
  Synthetic
cccauucgagagggaccgu

SEQ ID NO: 74808 - RNA, 20 nt, Artificial Sequence
  Synthetic
ccccauucgagagggaccgu

SEQ ID NO: 74809 - RNA, 18 nt, Artificial Sequence
  Synthetic
accccaaaaggccuccgu

SEQ ID NO: 74810 - RNA, 19 nt, Artificial Sequence
  Synthetic
caccccaaaaggccuccgu

SEQ ID NO: 74811 - RNA, 20 nt, Artificial Sequence
  Synthetic
ccaccccaaaaggccuccgu

SEQ ID NO: 74812 - RNA, 21 nt, Artificial Sequence
  Synthetic
uccaccccaaaaggccuccgu

SEQ ID NO: 74813 - RNA, 22 nt, Artificial Sequence
  Synthetic
cuccaccccaaaaggccuccgu

SEQ ID NO: 74814 - RNA, 23 nt, Artificial Sequence
  Synthetic
gcuccaccccaaaaggccuccgu

SEQ ID NO: 74815 - RNA, 24 nt, Artificial Sequence
  Synthetic
ggcuccaccccaaaaggccuccgu

SEQ ID NO: 74816 - RNA, 18 nt, Artificial Sequence
  Synthetic
uacaagugcaauuuccgu

SEQ ID NO: 74817 - RNA, 19 nt, Artificial Sequence
  Synthetic
auacaagugcaauuuccgu

SEQ ID NO: 74818 - RNA, 20 nt, Artificial Sequence
  Synthetic
aauacaagugcaauuuccgu

SEQ ID NO: 74819 - RNA, 21 nt, Artificial Sequence
  Synthetic
gaauacaagugcaauuuccgu

SEQ ID NO: 74820 - RNA, 22 nt, Artificial Sequence
  Synthetic
ggaauacaagugcaauuuccgu

SEQ ID NO: 74821 - RNA, 23 nt, Artificial Sequence
  Synthetic
gggaauacaagugcaauuuccgu

SEQ ID NO: 74822 - RNA, 24 nt, Artificial Sequence
  Synthetic
ugggaauacaagugcaauuuccgu

SEQ ID NO: 74823 - RNA, 18 nt, Artificial Sequence
  Synthetic
cagacggggagaccgcgu

SEQ ID NO: 74824 - RNA, 19 nt, Artificial Sequence
  Synthetic
acagacggggagaccgcgu

SEQ ID NO: 74825 - RNA, 20 nt, Artificial Sequence
  Synthetic
cacagacggggagaccgcgu

SEQ ID NO: 74826 - RNA, 21 nt, Artificial Sequence
  Synthetic
gcacagacggggagaccgcgu

SEQ ID NO: 74827 - RNA, 22 nt, Artificial Sequence
  Synthetic
ggcacagacggggagaccgcgu

SEQ ID NO: 74828 - RNA, 23 nt, Artificial Sequence
  Synthetic
aggcacagacggggagaccgcgu

SEQ ID NO: 74829 - RNA, 24 nt, Artificial Sequence
  Synthetic
aaggcacagacggggagaccgcgu

SEQ ID NO: 74830 - RNA, 18 nt, Artificial Sequence
  Synthetic
caauuuccguccgaaggu

SEQ ID NO: 74831 - RNA, 19 nt, Artificial Sequence
  Synthetic
gcaauuuccguccgaaggu

SEQ ID NO: 74832 - RNA, 20 nt, Artificial Sequence
  Synthetic
ugcaauuuccguccgaaggu

SEQ ID NO: 74833 - RNA, 21 nt, Artificial Sequence
  Synthetic
gugcaauuuccguccgaaggu

SEQ ID NO: 74834 - RNA, 22 nt, Artificial Sequence
  Synthetic
agugcaauuuccguccgaaggu

SEQ ID NO: 74835 - RNA, 23 nt, Artificial Sequence
  Synthetic
aagugcaauuuccguccgaaggu

SEQ ID NO: 74836 - RNA, 24 nt, Artificial Sequence
  Synthetic
caagugcaauuuccguccgaaggu

SEQ ID NO: 74837 - RNA, 18 nt, Artificial Sequence
  Synthetic
aaaauugguaacagaggu

SEQ ID NO: 74838 - RNA, 19 nt, Artificial Sequence
  Synthetic
gaaaauugguaacagaggu

SEQ ID NO: 74839 - RNA, 20 nt, Artificial Sequence
  Synthetic
agaaaauugguaacagaggu

SEQ ID NO: 74840 - RNA, 21 nt, Artificial Sequence
  Synthetic
aagaaaauugguaacagaggu

SEQ ID NO: 74841 - RNA, 22 nt, Artificial Sequence
  Synthetic
aaagaaaauugguaacagaggu

SEQ ID NO: 74842 - RNA, 23 nt, Artificial Sequence
  Synthetic
aaaagaaaauugguaacagaggu

SEQ ID NO: 74843 - RNA, 24 nt, Artificial Sequence
  Synthetic
caaaagaaaauugguaacagaggu

SEQ ID NO: 74844 - RNA, 18 nt, Artificial Sequence
  Synthetic
agaugauuaggcagaggu

SEQ ID NO: 74845 - RNA, 19 nt, Artificial Sequence
  Synthetic
gagaugauuaggcagaggu

SEQ ID NO: 74846 - RNA, 20 nt, Artificial Sequence
  Synthetic
agagaugauuaggcagaggu

SEQ ID NO: 74847 - RNA, 21 nt, Artificial Sequence
  Synthetic
aagagaugauuaggcagaggu

SEQ ID NO: 74848 - RNA, 22 nt, Artificial Sequence
  Synthetic
caagagaugauuaggcagaggu

SEQ ID NO: 74849 - RNA, 23 nt, Artificial Sequence
  Synthetic
acaagagaugauuaggcagaggu

SEQ ID NO: 74850 - RNA, 24 nt, Artificial Sequence
  Synthetic
aacaagagaugauuaggcagaggu

SEQ ID NO: 74851 - RNA, 18 nt, Artificial Sequence
  Synthetic
augcuuuccauguucggu

SEQ ID NO: 74852 - RNA, 19 nt, Artificial Sequence
  Synthetic
gaugcuuuccauguucggu

SEQ ID NO: 74853 - RNA, 20 nt, Artificial Sequence
  Synthetic
ugaugcuuuccauguucggu

SEQ ID NO: 74854 - RNA, 21 nt, Artificial Sequence
  Synthetic
gugaugcuuuccauguucggu

SEQ ID NO: 74855 - RNA, 22 nt, Artificial Sequence
  Synthetic
ugugaugcuuuccauguucggu

SEQ ID NO: 74856 - RNA, 23 nt, Artificial Sequence
  Synthetic
augugaugcuuuccauguucggu

SEQ ID NO: 74857 - RNA, 24 nt, Artificial Sequence
  Synthetic
gaugugaugcuuuccauguucggu

SEQ ID NO: 74858 - RNA, 18 nt, Artificial Sequence
  Synthetic
uguaacacgagcaggggu

SEQ ID NO: 74859 - RNA, 19 nt, Artificial Sequence
  Synthetic
cuguaacacgagcaggggu

SEQ ID NO: 74860 - RNA, 20 nt, Artificial Sequence
  Synthetic
ccuguaacacgagcaggggu

SEQ ID NO: 74861 - RNA, 21 nt, Artificial Sequence
  Synthetic
gccuguaacacgagcaggggu

SEQ ID NO: 74862 - RNA, 22 nt, Artificial Sequence
  Synthetic
cgccuguaacacgagcaggggu

SEQ ID NO: 74863 - RNA, 23 nt, Artificial Sequence
  Synthetic
ccgccuguaacacgagcaggggu

SEQ ID NO: 74864 - RNA, 24 nt, Artificial Sequence
  Synthetic
cccgccuguaacacgagcaggggu

SEQ ID NO: 74865 - RNA, 18 nt, Artificial Sequence
  Synthetic
auguaaauagugucuggu

SEQ ID NO: 74866 - RNA, 19 nt, Artificial Sequence
  Synthetic
uauguaaauagugucuggu

SEQ ID NO: 74867 - RNA, 20 nt, Artificial Sequence
  Synthetic
guauguaaauagugucuggu

SEQ ID NO: 74868 - RNA, 21 nt, Artificial Sequence
  Synthetic
gguauguaaauagugucuggu

SEQ ID NO: 74869 - RNA, 22 nt, Artificial Sequence
  Synthetic
ggguauguaaauagugucuggu

SEQ ID NO: 74870 - RNA, 23 nt, Artificial Sequence
  Synthetic
aggguauguaaauagugucuggu

SEQ ID NO: 74871 - RNA, 24 nt, Artificial Sequence
  Synthetic
uaggguauguaaauagugucuggu

SEQ ID NO: 74872 - RNA, 18 nt, Artificial Sequence
  Synthetic
cuggauccaacugguggu

SEQ ID NO: 74873 - RNA, 19 nt, Artificial Sequence
  Synthetic
gcuggauccaacugguggu

SEQ ID NO: 74874 - RNA, 20 nt, Artificial Sequence
  Synthetic
ugcuggauccaacugguggu

SEQ ID NO: 74875 - RNA, 21 nt, Artificial Sequence
  Synthetic
augcuggauccaacugguggu

SEQ ID NO: 74876 - RNA, 22 nt, Artificial Sequence
  Synthetic
aaugcuggauccaacugguggu

SEQ ID NO: 74877 - RNA, 23 nt, Artificial Sequence
  Synthetic
gaaugcuggauccaacugguggu

SEQ ID NO: 74878 - RNA, 24 nt, Artificial Sequence
  Synthetic
ugaaugcuggauccaacugguggu

SEQ ID NO: 74879 - RNA, 18 nt, Artificial Sequence
  Synthetic
  misc_feature (12)..(12): n is a, c, g, or u
cugauguguucnuguggu

SEQ ID NO: 74880 - RNA, 19 nt, Artificial Sequence
  Synthetic
  misc_feature (13)..(13): n is a, c, g, or u
ucugauguguucnuguggu

SEQ ID NO: 74881 - RNA, 20 nt, Artificial Sequence
  Synthetic
  misc_feature (1)..(1): n is a, c, g, or u
  misc_feature (14)..(14): n is a, c, g, or u
nucugauguguucnuguggu

SEQ ID NO: 74882 - RNA, 21 nt, Artificial Sequence
  Synthetic
  misc_feature (2)..(2): n is a, c, g, or u
  misc_feature (15)..(15): n is a, c, g, or u
anucugauguguucnuguggu

SEQ ID NO: 74883 - RNA, 22 nt, Artificial Sequence
  Synthetic
  misc_feature (3)..(3): n is a, c, g, or u
  misc_feature (16)..(16): n is a, c, g, or u
canucugauguguucnuguggu

SEQ ID NO: 74884 - RNA, 23 nt, Artificial Sequence
  Synthetic
  misc_feature (4)..(4): n is a, c, g, or u
  misc_feature (17)..(17): n is a, c, g, or u
ucanucugauguguucnuguggu

SEQ ID NO: 74885 - RNA, 24 nt, Artificial Sequence
  Synthetic
  misc_feature (5)..(5): n is a, c, g, or u
  misc_feature (18)..(18): n is a, c, g, or u
uucanucugauguguucnuguggu

SEQ ID NO: 74886 - RNA, 18 nt, Artificial Sequence
  Synthetic
agacaaaagaaaauuggu

SEQ ID NO: 74887 - RNA, 19 nt, Artificial Sequence
  Synthetic
aagacaaaagaaaauuggu

SEQ ID NO: 74888 - RNA, 20 nt, Artificial Sequence
  Synthetic
aaagacaaaagaaaauuggu

SEQ ID NO: 74889 - RNA, 21 nt, Artificial Sequence
  Synthetic
caaagacaaaagaaaauuggu

SEQ ID NO: 74890 - RNA, 22 nt, Artificial Sequence
  Synthetic
ccaaagacaaaagaaaauuggu

SEQ ID NO: 74891 - RNA, 23 nt, Artificial Sequence
  Synthetic
cccaaagacaaaagaaaauuggu

SEQ ID NO: 74892 - RNA, 24 nt, Artificial Sequence
  Synthetic
acccaaagacaaaagaaaauuggu

SEQ ID NO: 74893 - RNA, 18 nt, Artificial Sequence
  Synthetic
uccugacugccgauuggu

SEQ ID NO: 74894 - RNA, 19 nt, Artificial Sequence
  Synthetic
uuccugacugccgauuggu

SEQ ID NO: 74895 - RNA, 20 nt, Artificial Sequence
  Synthetic
cuuccugacugccgauuggu

SEQ ID NO: 74896 - RNA, 21 nt, Artificial Sequence
  Synthetic
ccuuccugacugccgauuggu

SEQ ID NO: 74897 - RNA, 22 nt, Artificial Sequence
  Synthetic
gccuuccugacugccgauuggu

SEQ ID NO: 74898 - RNA, 23 nt, Artificial Sequence
  Synthetic
ugccuuccugacugccgauuggu

SEQ ID NO: 74899 - RNA, 24 nt, Artificial Sequence
  Synthetic
cugccuuccugacugccgauuggu

SEQ ID NO: 74900 - RNA, 18 nt, Artificial Sequence
  Synthetic
aaaucccagaggauuggu

SEQ ID NO: 74901 - RNA, 19 nt, Artificial Sequence
  Synthetic
aaaaucccagaggauuggu

SEQ ID NO: 74902 - RNA, 20 nt, Artificial Sequence
  Synthetic
aaaaaucccagaggauuggu

SEQ ID NO: 74903 - RNA, 21 nt, Artificial Sequence
  Synthetic
aaaaaaucccagaggauuggu

SEQ ID NO: 74904 - RNA, 22 nt, Artificial Sequence
  Synthetic
gaaaaaaucccagaggauuggu

SEQ ID NO: 74905 - RNA, 23 nt, Artificial Sequence
  Synthetic
ggaaaaaaucccagaggauuggu

SEQ ID NO: 74906 - RNA, 24 nt, Artificial Sequence
  Synthetic
gggaaaaaaucccagaggauuggu

SEQ ID NO: 74907 - RNA, 18 nt, Artificial Sequence
  Synthetic
cagagcuugguggaaugu

SEQ ID NO: 74908 - RNA, 19 nt, Artificial Sequence
  Synthetic
gcagagcuugguggaaugu

SEQ ID NO: 74909 - RNA, 20 nt, Artificial Sequence
  Synthetic
ugcagagcuugguggaaugu

SEQ ID NO: 74910 - RNA, 21 nt, Artificial Sequence
  Synthetic
cugcagagcuugguggaaugu

SEQ ID NO: 74911 - RNA, 22 nt, Artificial Sequence
  Synthetic
ccugcagagcuugguggaaugu

SEQ ID NO: 74912 - RNA, 23 nt, Artificial Sequence
  Synthetic
uccugcagagcuugguggaaugu

SEQ ID NO: 74913 - RNA, 24 nt, Artificial Sequence
  Synthetic
auccugcagagcuugguggaaugu

SEQ ID NO: 74914 - RNA, 18 nt, Artificial Sequence
  Synthetic
cggaacaggguucacugu

SEQ ID NO: 74915 - RNA, 19 nt, Artificial Sequence
  Synthetic
ucggaacaggguucacugu

SEQ ID NO: 74916 - RNA, 20 nt, Artificial Sequence
  Synthetic
gucggaacaggguucacugu

SEQ ID NO: 74917 - RNA, 18 nt, Artificial Sequence
  Synthetic
ucguuuuucauuuacugu

SEQ ID NO: 74918 - RNA, 19 nt, Artificial Sequence
  Synthetic
uucguuuuucauuuacugu

SEQ ID NO: 74919 - RNA, 20 nt, Artificial Sequence
  Synthetic
cuucguuuuucauuuacugu

SEQ ID NO: 74920 - RNA, 21 nt, Artificial Sequence
  Synthetic
ucuucguuuuucauuuacugu

SEQ ID NO: 74921 - RNA, 22 nt, Artificial Sequence
  Synthetic
aucuucguuuuucauuuacugu

SEQ ID NO: 74922 - RNA, 23 nt, Artificial Sequence
  Synthetic
aaucuucguuuuucauuuacugu

SEQ ID NO: 74923 - RNA, 24 nt, Artificial Sequence
  Synthetic
uaaucuucguuuuucauuuacugu

SEQ ID NO: 74924 - RNA, 18 nt, Artificial Sequence
  Synthetic
cccaaaaggccuccgugu

SEQ ID NO: 74925 - RNA, 19 nt, Artificial Sequence
  Synthetic
ccccaaaaggccuccgugu

SEQ ID NO: 74926 - RNA, 20 nt, Artificial Sequence
  Synthetic
accccaaaaggccuccgugu

SEQ ID NO: 74927 - RNA, 21 nt, Artificial Sequence
  Synthetic
caccccaaaaggccuccgugu

SEQ ID NO: 74928 - RNA, 22 nt, Artificial Sequence
  Synthetic
ccaccccaaaaggccuccgugu

SEQ ID NO: 74929 - RNA, 23 nt, Artificial Sequence
  Synthetic
uccaccccaaaaggccuccgugu

SEQ ID NO: 74930 - RNA, 24 nt, Artificial Sequence
  Synthetic
cuccaccccaaaaggccuccgugu

SEQ ID NO: 74931 - RNA, 18 nt, Artificial Sequence
  Synthetic
  misc_feature (7)..(7): n is a, c, g, or u
aggauanccacauugugu

SEQ ID NO: 74932 - RNA, 19 nt, Artificial Sequence
  Synthetic
  misc_feature (8)..(8): n is a, c, g, or u
caggauanccacauugugu

SEQ ID NO: 74933 - RNA, 20 nt, Artificial Sequence
  Synthetic
  misc_feature (9)..(9): n is a, c, g, or u
gcaggauanccacauugugu

SEQ ID NO: 74934 - RNA, 21 nt, Artificial Sequence
  Synthetic
  misc_feature (10)..(10): n is a, c, g, or u
agcaggauanccacauugugu

SEQ ID NO: 74935 - RNA, 22 nt, Artificial Sequence
  Synthetic
  misc_feature (11)..(11): n is a, c, g, or u
aagcaggauanccacauugugu

SEQ ID NO: 74936 - RNA, 23 nt, Artificial Sequence
  Synthetic
  misc_feature (12)..(12): n is a, c, g, or u
aaagcaggauanccacauugugu

SEQ ID NO: 74937 - RNA, 24 nt, Artificial Sequence
  Synthetic
  misc_feature (13)..(13): n is a, c, g, or u
uaaagcaggauanccacauugugu

SEQ ID NO: 74938 - RNA, 18 nt, Artificial Sequence
  Synthetic
  misc_feature (9)..(9): n is a, c, g, or u
gcaggauanccacauugu

SEQ ID NO: 74939 - RNA, 19 nt, Artificial Sequence
  Synthetic
  misc_feature (10)..(10): n is a, c, g, or u
agcaggauanccacauugu

SEQ ID NO: 74940 - RNA, 20 nt, Artificial Sequence
  Synthetic
  misc_feature (11)..(11): n is a, c, g, or u
aagcaggauanccacauugu

SEQ ID NO: 74941 - RNA, 21 nt, Artificial Sequence
  Synthetic
  misc_feature (12)..(12): n is a, c, g, or u
aaagcaggauanccacauugu

SEQ ID NO: 74942 - RNA, 22 nt, Artificial Sequence
  Synthetic
  misc_feature (13)..(13): n is a, c, g, or u
uaaagcaggauanccacauugu

SEQ ID NO: 74943 - RNA, 23 nt, Artificial Sequence
  Synthetic
  misc_feature (14)..(14): n is a, c, g, or u
uuaaagcaggauanccacauugu

SEQ ID NO: 74944 - RNA, 24 nt, Artificial Sequence
  Synthetic
  misc_feature (15)..(15): n is a, c, g, or u
auuaaagcaggauanccacauugu

SEQ ID NO: 74945 - RNA, 18 nt, Artificial Sequence
  Synthetic
agggacucaagauguugu

SEQ ID NO: 74946 - RNA, 19 nt, Artificial Sequence
  Synthetic
aagggacucaagauguugu

SEQ ID NO: 74947 - RNA, 20 nt, Artificial Sequence
  Synthetic
aaagggacucaagauguugu

SEQ ID NO: 74948 - RNA, 21 nt, Artificial Sequence
  Synthetic
uaaagggacucaagauguugu

SEQ ID NO: 74949 - RNA, 22 nt, Artificial Sequence
  Synthetic
auaaagggacucaagauguugu

SEQ ID NO: 74950 - RNA, 23 nt, Artificial Sequence
  Synthetic
uauaaagggacucaagauguugu

SEQ ID NO: 74951 - RNA, 24 nt, Artificial Sequence
  Synthetic
guauaaagggacucaagauguugu

SEQ ID NO: 74952 - RNA, 18 nt, Artificial Sequence
  Synthetic
  misc_feature (11)..(11): n is a, c, g, or u
  misc_feature (17)..(17): n is a, c, g, or u
uggugaguganuggagnu

SEQ ID NO: 74953 - RNA, 19 nt, Artificial Sequence
  Synthetic
  misc_feature (12)..(12): n is a, c, g, or u
  misc_feature (18)..(18): n is a, c, g, or u
uuggugaguganuggagnu

SEQ ID NO: 74954 - RNA, 20 nt, Artificial Sequence
  Synthetic
  misc_feature (13)..(13): n is a, c, g, or u
  misc_feature (19)..(19): n is a, c, g, or u
guuggugaguganuggagnu

SEQ ID NO: 74955 - RNA, 21 nt, Artificial Sequence
  Synthetic
  misc_feature (14)..(14): n is a, c, g, or u
  misc_feature (20)..(20): n is a, c, g, or u
gguuggugaguganuggagnu

SEQ ID NO: 74956 - RNA, 22 nt, Artificial Sequence
  Synthetic
  misc_feature (15)..(15): n is a, c, g, or u
  misc_feature (21)..(21): n is a, c, g, or u
agguuggugaguganuggagnu

SEQ ID NO: 74957 - RNA, 23 nt, Artificial Sequence
  Synthetic
  misc_feature (16)..(16): n is a, c, g, or u
  misc_feature (22)..(22): n is a, c, g, or u
gagguuggugaguganuggagnu

SEQ ID NO: 74958 - RNA, 24 nt, Artificial Sequence
  Synthetic
  misc_feature (17)..(17): n is a, c, g, or u
  misc_feature (23)..(23): n is a, c, g, or u
agagguuggugaguganuggagnu

SEQ ID NO: 74959 - RNA, 18 nt, Artificial Sequence
  Synthetic
  misc_feature (17)..(17): n is a, c, g, or u
acauaacccaugaaaunu

SEQ ID NO: 74960 - RNA, 19 nt, Artificial Sequence
  Synthetic
  misc_feature (18)..(18): n is a, c, g, or u
uacauaacccaugaaaunu

SEQ ID NO: 74961 - RNA, 20 nt, Artificial Sequence
  Synthetic
  misc_feature (19)..(19): n is a, c, g, or u
uuacauaacccaugaaaunu

SEQ ID NO: 74962 - RNA, 21 nt, Artificial Sequence
  Synthetic
  misc_feature (20)..(20): n is a, c, g, or u
auuacauaacccaugaaaunu

SEQ ID NO: 74963 - RNA, 22 nt, Artificial Sequence
  Synthetic
  misc_feature (21)..(21): n is a, c, g, or u
aauuacauaacccaugaaaunu

SEQ ID NO: 74964 - RNA, 23 nt, Artificial Sequence
  Synthetic
  misc_feature (22)..(22): n is a, c, g, or u
caauuacauaacccaugaaaunu

SEQ ID NO: 74965 - RNA, 24 nt, Artificial Sequence
  Synthetic
  misc_feature (23)..(23): n is a, c, g, or u
ccaauuacauaacccaugaaaunu

SEQ ID NO: 74966 - RNA, 18 nt, Artificial Sequence
  Synthetic
caaagacaaaagaaaauu

SEQ ID NO: 74967 - RNA, 19 nt, Artificial Sequence
  Synthetic
ccaaagacaaaagaaaauu

SEQ ID NO: 74968 - RNA, 20 nt, Artificial Sequence
  Synthetic
cccaaagacaaaagaaaauu

SEQ ID NO: 74969 - RNA, 21 nt, Artificial Sequence
  Synthetic
acccaaagacaaaagaaaauu

SEQ ID NO: 74970 - RNA, 22 nt, Artificial Sequence
  Synthetic
uacccaaagacaaaagaaaauu

SEQ ID NO: 74971 - RNA, 23 nt, Artificial Sequence
  Synthetic
auacccaaagacaaaagaaaauu

SEQ ID NO: 74972 - RNA, 24 nt, Artificial Sequence
  Synthetic
uauacccaaagacaaaagaaaauu

SEQ ID NO: 74973 - RNA, 18 nt, Artificial Sequence
  Synthetic
agcucccccuagaaaauu

SEQ ID NO: 74974 - RNA, 19 nt, Artificial Sequence
  Synthetic
gagcucccccuagaaaauu

SEQ ID NO: 74975 - RNA, 20 nt, Artificial Sequence
  Synthetic
ggagcucccccuagaaaauu

SEQ ID NO: 74976 - RNA, 21 nt, Artificial Sequence
  Synthetic
gggagcucccccuagaaaauu

SEQ ID NO: 74977 - RNA, 22 nt, Artificial Sequence
  Synthetic
cgggagcucccccuagaaaauu

SEQ ID NO: 74978 - RNA, 23 nt, Artificial Sequence
  Synthetic
acgggagcucccccuagaaaauu

SEQ ID NO: 74979 - RNA, 24 nt, Artificial Sequence
  Synthetic
cacgggagcucccccuagaaaauu

SEQ ID NO: 74980 - RNA, 18 nt, Artificial Sequence
  Synthetic
cgauagccaggacaaauu

SEQ ID NO: 74981 - RNA, 19 nt, Artificial Sequence
  Synthetic
gcgauagccaggacaaauu

SEQ ID NO: 74982 - RNA, 20 nt, Artificial Sequence
  Synthetic
agcgauagccaggacaaauu

SEQ ID NO: 74983 - RNA, 21 nt, Artificial Sequence
  Synthetic
cagcgauagccaggacaaauu

SEQ ID NO: 74984 - RNA, 22 nt, Artificial Sequence
  Synthetic
ccagcgauagccaggacaaauu

SEQ ID NO: 74985 - RNA, 23 nt, Artificial Sequence
  Synthetic
uccagcgauagccaggacaaauu

SEQ ID NO: 74986 - RNA, 24 nt, Artificial Sequence
  Synthetic
auccagcgauagccaggacaaauu

SEQ ID NO: 74987 - RNA, 18 nt, Artificial Sequence
  Synthetic
guugaugauccuggaauu

SEQ ID NO: 74988 - RNA, 19 nt, Artificial Sequence
  Synthetic
gguugaugauccuggaauu

SEQ ID NO: 74989 - RNA, 20 nt, Artificial Sequence
  Synthetic
ugguugaugauccuggaauu

SEQ ID NO: 74990 - RNA, 21 nt, Artificial Sequence
  Synthetic
gugguugaugauccuggaauu

SEQ ID NO: 74991 - RNA, 22 nt, Artificial Sequence
  Synthetic
ggugguugaugauccuggaauu

SEQ ID NO: 74992 - RNA, 23 nt, Artificial Sequence
  Synthetic
uggugguugaugauccuggaauu

SEQ ID NO: 74993 - RNA, 24 nt, Artificial Sequence
  Synthetic
cuggugguugaugauccuggaauu

SEQ ID NO: 74994 - RNA, 18 nt, Artificial Sequence
  Synthetic
ccaaggaauacuaacauu

SEQ ID NO: 74995 - RNA, 19 nt, Artificial Sequence
  Synthetic
uccaaggaauacuaacauu

SEQ ID NO: 74996 - RNA, 20 nt, Artificial Sequence
  Synthetic
guccaaggaauacuaacauu

SEQ ID NO: 74997 - RNA, 21 nt, Artificial Sequence
  Synthetic
aguccaaggaauacuaacauu

SEQ ID NO: 74998 - RNA, 22 nt, Artificial Sequence
  Synthetic
gaguccaaggaauacuaacauu

SEQ ID NO: 74999 - RNA, 23 nt, Artificial Sequence
  Synthetic
ugaguccaaggaauacuaacauu

SEQ ID NO: 75000 - RNA, 24 nt, Artificial Sequence
  Synthetic
gugaguccaaggaauacuaacauu

SEQ ID NO: 75001 - RNA, 18 nt, Artificial Sequence
  Synthetic
aggucggucguugacauu

SEQ ID NO: 75002 - RNA, 19 nt, Artificial Sequence
  Synthetic
aaggucggucguugacauu

SEQ ID NO: 75003 - RNA, 20 nt, Artificial Sequence
  Synthetic
caaggucggucguugacauu

SEQ ID NO: 75004 - RNA, 18 nt, Artificial Sequence
  Synthetic
aaugauucuucccccauu

SEQ ID NO: 75005 - RNA, 19 nt, Artificial Sequence
  Synthetic
gaaugauucuucccccauu

SEQ ID NO: 75006 - RNA, 20 nt, Artificial Sequence
  Synthetic
ggaaugauucuucccccauu

SEQ ID NO: 75007 - RNA, 21 nt, Artificial Sequence
  Synthetic
uggaaugauucuucccccauu

SEQ ID NO: 75008 - RNA, 22 nt, Artificial Sequence
  Synthetic
guggaaugauucuucccccauu

SEQ ID NO: 75009 - RNA, 23 nt, Artificial Sequence
  Synthetic
gguggaaugauucuucccccauu

SEQ ID NO: 75010 - RNA, 24 nt, Artificial Sequence
  Synthetic
ugguggaaugauucuucccccauu

SEQ ID NO: 75011 - RNA, 18 nt, Artificial Sequence
  Synthetic
ccaauccucgagaagauu

SEQ ID NO: 75012 - RNA, 19 nt, Artificial Sequence
  Synthetic
cccaauccucgagaagauu

SEQ ID NO: 75013 - RNA, 20 nt, Artificial Sequence
  Synthetic
ccccaauccucgagaagauu

SEQ ID NO: 75014 - RNA, 21 nt, Artificial Sequence
  Synthetic
uccccaauccucgagaagauu

SEQ ID NO: 75015 - RNA, 22 nt, Artificial Sequence
  Synthetic
guccccaauccucgagaagauu

SEQ ID NO: 75016 - RNA, 23 nt, Artificial Sequence
  Synthetic
gguccccaauccucgagaagauu

SEQ ID NO: 75017 - RNA, 24 nt, Artificial Sequence
  Synthetic
ggguccccaauccucgagaagauu

SEQ ID NO: 75018 - RNA, 18 nt, Artificial Sequence
  Synthetic
aacaaugcucaggagauu

SEQ ID NO: 75019 - RNA, 19 nt, Artificial Sequence
  Synthetic
gaacaaugcucaggagauu

SEQ ID NO: 75020 - RNA, 20 nt, Artificial Sequence
  Synthetic
ugaacaaugcucaggagauu

SEQ ID NO: 75021 - RNA, 21 nt, Artificial Sequence
  Synthetic
gugaacaaugcucaggagauu

SEQ ID NO: 75022 - RNA, 22 nt, Artificial Sequence
  Synthetic
ggugaacaaugcucaggagauu

SEQ ID NO: 75023 - RNA, 23 nt, Artificial Sequence
  Synthetic
  misc_feature (1)..(1): n is a, c, g, or u
nggugaacaaugcucaggagauu

SEQ ID NO: 75024 - RNA, 24 nt, Artificial Sequence
  Synthetic
  misc_feature (2)..(2): n is a, c, g, or u
gnggugaacaaugcucaggagauu

SEQ ID NO: 75025 - RNA, 18 nt, Artificial Sequence
  Synthetic
ccuuccugacugccgauu

SEQ ID NO: 75026 - RNA, 19 nt, Artificial Sequence
  Synthetic
gccuuccugacugccgauu

SEQ ID NO: 75027 - RNA, 20 nt, Artificial Sequence
  Synthetic
ugccuuccugacugccgauu

SEQ ID NO: 75028 - RNA, 21 nt, Artificial Sequence
  Synthetic
cugccuuccugacugccgauu

SEQ ID NO: 75029 - RNA, 22 nt, Artificial Sequence
  Synthetic
gcugccuuccugacugccgauu

SEQ ID NO: 75030 - RNA, 23 nt, Artificial Sequence
  Synthetic
ggcugccuuccugacugccgauu

SEQ ID NO: 75031 - RNA, 24 nt, Artificial Sequence
  Synthetic
aggcugccuuccugacugccgauu

SEQ ID NO: 75032 - RNA, 18 nt, Artificial Sequence
  Synthetic
aguuuuccaguuaggauu

SEQ ID NO: 75033 - RNA, 19 nt, Artificial Sequence
  Synthetic
gaguuuuccaguuaggauu

SEQ ID NO: 75034 - RNA, 20 nt, Artificial Sequence
  Synthetic
ggaguuuuccaguuaggauu

SEQ ID NO: 75035 - RNA, 21 nt, Artificial Sequence
  Synthetic
uggaguuuuccaguuaggauu

SEQ ID NO: 75036 - RNA, 22 nt, Artificial Sequence
  Synthetic
auggaguuuuccaguuaggauu

SEQ ID NO: 75037 - RNA, 23 nt, Artificial Sequence
  Synthetic
gauggaguuuuccaguuaggauu

SEQ ID NO: 75038 - RNA, 24 nt, Artificial Sequence
  Synthetic
agauggaguuuuccaguuaggauu

SEQ ID NO: 75039 - RNA, 18 nt, Artificial Sequence
  Synthetic
  misc_feature (8)..(8): n is a, c, g, or u
auggaaangauguauauu

SEQ ID NO: 75040 - RNA, 19 nt, Artificial Sequence
  Synthetic
  misc_feature (9)..(9): n is a, c, g, or u
cauggaaangauguauauu

SEQ ID NO: 75041 - RNA, 20 nt, Artificial Sequence
  Synthetic
  misc_feature (10)..(10): n is a, c, g, or u
ccauggaaangauguauauu

SEQ ID NO: 75042 - RNA, 21 nt, Artificial Sequence
  Synthetic
  misc_feature (11)..(11): n is a, c, g, or u
gccauggaaangauguauauu

SEQ ID NO: 75043 - RNA, 22 nt, Artificial Sequence
  Synthetic
  misc_feature (12)..(12): n is a, c, g, or u
agccauggaaangauguauauu

SEQ ID NO: 75044 - RNA, 23 nt, Artificial Sequence
  Synthetic
  misc_feature (13)..(13): n is a, c, g, or u
cagccauggaaangauguauauu

SEQ ID NO: 75045 - RNA, 24 nt, Artificial Sequence
  Synthetic
  misc_feature (14)..(14): n is a, c, g, or u
gcagccauggaaangauguauauu

SEQ ID NO: 75046 - RNA, 18 nt, Artificial Sequence
  Synthetic
ucuagacucugcgguauu

SEQ ID NO: 75047 - RNA, 19 nt, Artificial Sequence
  Synthetic
gucuagacucugcgguauu

SEQ ID NO: 75048 - RNA, 20 nt, Artificial Sequence
  Synthetic
agucuagacucugcgguauu

SEQ ID NO: 75049 - RNA, 21 nt, Artificial Sequence
  Synthetic
gagucuagacucugcgguauu

SEQ ID NO: 75050 - RNA, 22 nt, Artificial Sequence
  Synthetic
cgagucuagacucugcgguauu

SEQ ID NO: 75051 - RNA, 23 nt, Artificial Sequence
  Synthetic
acgagucuagacucugcgguauu

SEQ ID NO: 75052 - RNA, 24 nt, Artificial Sequence
  Synthetic
cacgagucuagacucugcgguauu

SEQ ID NO: 75053 - RNA, 18 nt, Artificial Sequence
  Synthetic
ugcucccacuccuaccuu

SEQ ID NO: 75054 - RNA, 19 nt, Artificial Sequence
  Synthetic
augcucccacuccuaccuu

SEQ ID NO: 75055 - RNA, 20 nt, Artificial Sequence
  Synthetic
aaugcucccacuccuaccuu

SEQ ID NO: 75056 - RNA, 21 nt, Artificial Sequence
  Synthetic
gaaugcucccacuccuaccuu

SEQ ID NO: 75057 - RNA, 22 nt, Artificial Sequence
  Synthetic
cgaaugcucccacuccuaccuu

SEQ ID NO: 75058 - RNA, 23 nt, Artificial Sequence
  Synthetic
ccgaaugcucccacuccuaccuu

SEQ ID NO: 75059 - RNA, 24 nt, Artificial Sequence
  Synthetic
cccgaaugcucccacuccuaccuu

SEQ ID NO: 75060 - RNA, 18 nt, Artificial Sequence
  Synthetic
auugggguaggcugccuu

SEQ ID NO: 75061 - RNA, 19 nt, Artificial Sequence
  Synthetic
gauugggguaggcugccuu

SEQ ID NO: 75062 - RNA, 20 nt, Artificial Sequence
  Synthetic
ugauugggguaggcugccuu

SEQ ID NO: 75063 - RNA, 21 nt, Artificial Sequence
  Synthetic
gugauugggguaggcugccuu

SEQ ID NO: 75064 - RNA, 22 nt, Artificial Sequence
  Synthetic
agugauugggguaggcugccuu

SEQ ID NO: 75065 - RNA, 23 nt, Artificial Sequence
  Synthetic
gagugauugggguaggcugccuu

SEQ ID NO: 75066 - RNA, 24 nt, Artificial Sequence
  Synthetic
ggagugauugggguaggcugccuu

SEQ ID NO: 75067 - RNA, 18 nt, Artificial Sequence
  Synthetic
ccacccaaggcacagcuu

SEQ ID NO: 75068 - RNA, 19 nt, Artificial Sequence
  Synthetic
gccacccaaggcacagcuu

SEQ ID NO: 75069 - RNA, 20 nt, Artificial Sequence
  Synthetic
agccacccaaggcacagcuu

SEQ ID NO: 75070 - RNA, 21 nt, Artificial Sequence
  Synthetic
aagccacccaaggcacagcuu

SEQ ID NO: 75071 - RNA, 22 nt, Artificial Sequence
  Synthetic
aaagccacccaaggcacagcuu

SEQ ID NO: 75072 - RNA, 23 nt, Artificial Sequence
  Synthetic
  misc_feature (1)..(1): n is a, c, g, or u
naaagccacccaaggcacagcuu

SEQ ID NO: 75073 - RNA, 24 nt, Artificial Sequence
  Synthetic
  misc_feature (2)..(2): n is a, c, g, or u
cnaaagccacccaaggcacagcuu

SEQ ID NO: 75074 - RNA, 18 nt, Artificial Sequence
  Synthetic
ugggauccugcagagcuu

SEQ ID NO: 75075 - RNA, 19 nt, Artificial Sequence
  Synthetic
cugggauccugcagagcuu

SEQ ID NO: 75076 - RNA, 20 nt, Artificial Sequence
  Synthetic
ucugggauccugcagagcuu

SEQ ID NO: 75077 - RNA, 21 nt, Artificial Sequence
  Synthetic
cucugggauccugcagagcuu

SEQ ID NO: 75078 - RNA, 22 nt, Artificial Sequence
  Synthetic
acucugggauccugcagagcuu

SEQ ID NO: 75079 - RNA, 23 nt, Artificial Sequence
  Synthetic
uacucugggauccugcagagcuu

SEQ ID NO: 75080 - RNA, 24 nt, Artificial Sequence
  Synthetic
uuacucugggauccugcagagcuu

SEQ ID NO: 75081 - RNA, 18 nt, Artificial Sequence
  Synthetic
guaucuagaagaucucuu

SEQ ID NO: 75082 - RNA, 19 nt, Artificial Sequence
  Synthetic
gguaucuagaagaucucuu

SEQ ID NO: 75083 - RNA, 20 nt, Artificial Sequence
  Synthetic
cgguaucuagaagaucucuu

SEQ ID NO: 75084 - RNA, 18 nt, Artificial Sequence
  Synthetic
  misc_feature (5)..(5): n is a, c, g, or u
ucuangacgguuucucuu

SEQ ID NO: 75085 - RNA, 19 nt, Artificial Sequence
  Synthetic
  misc_feature (6)..(6): n is a, c, g, or u
cucuangacgguuucucuu

SEQ ID NO: 75086 - RNA, 20 nt, Artificial Sequence
  Synthetic
  misc_feature (7)..(7): n is a, c, g, or u
acucuangacgguuucucuu

SEQ ID NO: 75087 - RNA, 21 nt, Artificial Sequence
  Synthetic
  misc_feature (8)..(8): n is a, c, g, or u
uacucuangacgguuucucuu

SEQ ID NO: 75088 - RNA, 22 nt, Artificial Sequence
  Synthetic
  misc_feature (9)..(9): n is a, c, g, or u
auacucuangacgguuucucuu

SEQ ID NO: 75089 - RNA, 23 nt, Artificial Sequence
  Synthetic
  misc_feature (10)..(10): n is a, c, g, or u
aauacucuangacgguuucucuu

SEQ ID NO: 75090 - RNA, 24 nt, Artificial Sequence
  Synthetic
  misc_feature (11)..(11): n is a, c, g, or u
aaauacucuangacgguuucucuu

SEQ ID NO: 75091 - RNA, 18 nt, Artificial Sequence
  Synthetic
caguagcuccaaauucuu

SEQ ID NO: 75092 - RNA, 19 nt, Artificial Sequence
  Synthetic
acaguagcuccaaauucuu

SEQ ID NO: 75093 - RNA, 20 nt, Artificial Sequence
  Synthetic
cacaguagcuccaaauucuu

SEQ ID NO: 75094 - RNA, 21 nt, Artificial Sequence
  Synthetic
ccacaguagcuccaaauucuu

SEQ ID NO: 75095 - RNA, 22 nt, Artificial Sequence
  Synthetic
uccacaguagcuccaaauucuu

SEQ ID NO: 75096 - RNA, 23 nt, Artificial Sequence
  Synthetic
cuccacaguagcuccaaauucuu

SEQ ID NO: 75097 - RNA, 24 nt, Artificial Sequence
  Synthetic
acuccacaguagcuccaaauucuu

SEQ ID NO: 75098 - RNA, 18 nt, Artificial Sequence
  Synthetic
ggcgagggaguucuucuu

SEQ ID NO: 75099 - RNA, 19 nt, Artificial Sequence
  Synthetic
aggcgagggaguucuucuu

SEQ ID NO: 75100 - RNA, 20 nt, Artificial Sequence
  Synthetic
gaggcgagggaguucuucuu

SEQ ID NO: 75101 - RNA, 21 nt, Artificial Sequence
  Synthetic
cgaggcgagggaguucuucuu

SEQ ID NO: 75102 - RNA, 22 nt, Artificial Sequence
  Synthetic
gcgaggcgagggaguucuucuu

SEQ ID NO: 75103 - RNA, 23 nt, Artificial Sequence
  Synthetic
ugcgaggcgagggaguucuucuu

SEQ ID NO: 75104 - RNA, 24 nt, Artificial Sequence
  Synthetic
cugcgaggcgagggaguucuucuu

SEQ ID NO: 75105 - RNA, 18 nt, Artificial Sequence
  Synthetic
agaaaggccuuguaaguu

SEQ ID NO: 75106 - RNA, 19 nt, Artificial Sequence
  Synthetic
cagaaaggccuuguaaguu

SEQ ID NO: 75107 - RNA, 20 nt, Artificial Sequence
  Synthetic
acagaaaggccuuguaaguu

SEQ ID NO: 75108 - RNA, 21 nt, Artificial Sequence
  Synthetic
cacagaaaggccuuguaaguu

SEQ ID NO: 75109 - RNA, 22 nt, Artificial Sequence
  Synthetic
acacagaaaggccuuguaaguu

SEQ ID NO: 75110 - RNA, 23 nt, Artificial Sequence
  Synthetic
uacacagaaaggccuuguaaguu

SEQ ID NO: 75111 - RNA, 24 nt, Artificial Sequence
  Synthetic
uuacacagaaaggccuuguaaguu

SEQ ID NO: 75112 - RNA, 18 nt, Artificial Sequence
  Synthetic
cccucgcaggauccaguu

SEQ ID NO: 75113 - RNA, 19 nt, Artificial Sequence
  Synthetic
ucccucgcaggauccaguu

SEQ ID NO: 75114 - RNA, 20 nt, Artificial Sequence
  Synthetic
gucccucgcaggauccaguu

SEQ ID NO: 75115 - RNA, 21 nt, Artificial Sequence
  Synthetic
cgucccucgcaggauccaguu

SEQ ID NO: 75116 - RNA, 22 nt, Artificial Sequence
  Synthetic
acgucccucgcaggauccaguu

SEQ ID NO: 75117 - RNA, 23 nt, Artificial Sequence
  Synthetic
gacgucccucgcaggauccaguu

SEQ ID NO: 75118 - RNA, 24 nt, Artificial Sequence
  Synthetic
ggacgucccucgcaggauccaguu

SEQ ID NO: 75119 - RNA, 18 nt, Artificial Sequence
  Synthetic
  misc_feature (11)..(11): n is a, c, g, or u
ggcacagaccnggccguu

SEQ ID NO: 75120 - RNA, 19 nt, Artificial Sequence
  Synthetic
  misc_feature (12)..(12): n is a, c, g, or u
uggcacagaccnggccguu

SEQ ID NO: 75121 - RNA, 20 nt, Artificial Sequence
  Synthetic
  misc_feature (13)..(13): n is a, c, g, or u
uuggcacagaccnggccguu

SEQ ID NO: 75122 - RNA, 21 nt, Artificial Sequence
  Synthetic
  misc_feature (14)..(14): n is a, c, g, or u
cuuggcacagaccnggccguu

SEQ ID NO: 75123 - RNA, 22 nt, Artificial Sequence
  Synthetic
  misc_feature (15)..(15): n is a, c, g, or u
acuuggcacagaccnggccguu

SEQ ID NO: 75124 - RNA, 23 nt, Artificial Sequence
  Synthetic
  misc_feature (16)..(16): n is a, c, g, or u
cacuuggcacagaccnggccguu

SEQ ID NO: 75125 - RNA, 24 nt, Artificial Sequence
  Synthetic
  misc_feature (17)..(17): n is a, c, g, or u
acacuuggcacagaccnggccguu

SEQ ID NO: 75126 - RNA, 18 nt, Artificial Sequence
  Synthetic
aauuuccguccgaagguu

SEQ ID NO: 75127 - RNA, 19 nt, Artificial Sequence
  Synthetic
caauuuccguccgaagguu

SEQ ID NO: 75128 - RNA, 20 nt, Artificial Sequence
  Synthetic
gcaauuuccguccgaagguu

SEQ ID NO: 75129 - RNA, 18 nt, Artificial Sequence
  Synthetic
auuggaggacaagagguu

SEQ ID NO: 75130 - RNA, 19 nt, Artificial Sequence
  Synthetic
aauuggaggacaagagguu

SEQ ID NO: 75131 - RNA, 20 nt, Artificial Sequence
  Synthetic
aaauuggaggacaagagguu

SEQ ID NO: 75132 - RNA, 21 nt, Artificial Sequence
  Synthetic
caaauuggaggacaagagguu

SEQ ID NO: 75133 - RNA, 22 nt, Artificial Sequence
  Synthetic
acaaauuggaggacaagagguu

SEQ ID NO: 75134 - RNA, 23 nt, Artificial Sequence
  Synthetic
gacaaauuggaggacaagagguu

SEQ ID NO: 75135 - RNA, 24 nt, Artificial Sequence
  Synthetic
ggacaaauuggaggacaagagguu

SEQ ID NO: 75136 - RNA, 18 nt, Artificial Sequence
  Synthetic
uguaaauagugucugguu

SEQ ID NO: 75137 - RNA, 19 nt, Artificial Sequence
  Synthetic
auguaaauagugucugguu

SEQ ID NO: 75138 - RNA, 20 nt, Artificial Sequence
  Synthetic
uauguaaauagugucugguu

SEQ ID NO: 75139 - RNA, 21 nt, Artificial Sequence
  Synthetic
guauguaaauagugucugguu

SEQ ID NO: 75140 - RNA, 22 nt, Artificial Sequence
  Synthetic
gguauguaaauagugucugguu

SEQ ID NO: 75141 - RNA, 23 nt, Artificial Sequence
  Synthetic
ggguauguaaauagugucugguu

SEQ ID NO: 75142 - RNA, 24 nt, Artificial Sequence
  Synthetic
aggguauguaaauagugucugguu

SEQ ID NO: 75143 - RNA, 18 nt, Artificial Sequence
  Synthetic
ggaucugcuggcaauguu

SEQ ID NO: 75144 - RNA, 19 nt, Artificial Sequence
  Synthetic
cggaucugcuggcaauguu

SEQ ID NO: 75145 - RNA, 20 nt, Artificial Sequence
  Synthetic
gcggaucugcuggcaauguu

SEQ ID NO: 75146 - RNA, 21 nt, Artificial Sequence
  Synthetic
ggcggaucugcuggcaauguu

SEQ ID NO: 75147 - RNA, 22 nt, Artificial Sequence
  Synthetic
aggcggaucugcuggcaauguu

SEQ ID NO: 75148 - RNA, 23 nt, Artificial Sequence
  Synthetic
gaggcggaucugcuggcaauguu

SEQ ID NO: 75149 - RNA, 24 nt, Artificial Sequence
  Synthetic
ggaggcggaucugcuggcaauguu

SEQ ID NO: 75150 - RNA, 18 nt, Artificial Sequence
  Synthetic
agagcuugguggaauguu

SEQ ID NO: 75151 - RNA, 19 nt, Artificial Sequence
  Synthetic
cagagcuugguggaauguu

SEQ ID NO: 75152 - RNA, 20 nt, Artificial Sequence
  Synthetic
gcagagcuugguggaauguu

SEQ ID NO: 75153 - RNA, 21 nt, Artificial Sequence
  Synthetic
ugcagagcuugguggaauguu

SEQ ID NO: 75154 - RNA, 22 nt, Artificial Sequence
  Synthetic
cugcagagcuugguggaauguu

SEQ ID NO: 75155 - RNA, 23 nt, Artificial Sequence
  Synthetic
ccugcagagcuugguggaauguu

SEQ ID NO: 75156 - RNA, 24 nt, Artificial Sequence
  Synthetic
uccugcagagcuugguggaauguu

SEQ ID NO: 75157 - RNA, 18 nt, Artificial Sequence
  Synthetic
ggaacaggguucacuguu

SEQ ID NO: 75158 - RNA, 19 nt, Artificial Sequence
  Synthetic
cggaacaggguucacuguu

SEQ ID NO: 75159 - RNA, 20 nt, Artificial Sequence
  Synthetic
ucggaacaggguucacuguu

SEQ ID NO: 75160 - RNA, 21 nt, Artificial Sequence
  Synthetic
gucggaacaggguucacuguu

SEQ ID NO: 75161 - RNA, 22 nt, Artificial Sequence
  Synthetic
agucggaacaggguucacuguu

SEQ ID NO: 75162 - RNA, 23 nt, Artificial Sequence
  Synthetic
uagucggaacaggguucacuguu

SEQ ID NO: 75163 - RNA, 24 nt, Artificial Sequence
  Synthetic
guagucggaacaggguucacuguu

SEQ ID NO: 75164 - RNA, 18 nt, Artificial Sequence
  Synthetic
cguuuuucauuuacuguu

SEQ ID NO: 75165 - RNA, 19 nt, Artificial Sequence
  Synthetic
ucguuuuucauuuacuguu

SEQ ID NO: 75166 - RNA, 20 nt, Artificial Sequence
  Synthetic
uucguuuuucauuuacuguu

SEQ ID NO: 75167 - RNA, 21 nt, Artificial Sequence
  Synthetic
cuucguuuuucauuuacuguu

SEQ ID NO: 75168 - RNA, 22 nt, Artificial Sequence
  Synthetic
ucuucguuuuucauuuacuguu

SEQ ID NO: 75169 - RNA, 23 nt, Artificial Sequence
  Synthetic
aucuucguuuuucauuuacuguu

SEQ ID NO: 75170 - RNA, 24 nt, Artificial Sequence
  Synthetic
aaucuucguuuuucauuuacuguu

SEQ ID NO: 75171 - RNA, 18 nt, Artificial Sequence
  Synthetic
  misc_feature (4)..(4): n is a, c, g, or u
guanucuccggaaguguu

SEQ ID NO: 75172 - RNA, 19 nt, Artificial Sequence
  Synthetic
  misc_feature (5)..(5): n is a, c, g, or u
aguanucuccggaaguguu

SEQ ID NO: 75173 - RNA, 20 nt, Artificial Sequence
  Synthetic
  misc_feature (6)..(6): n is a, c, g, or u
caguanucuccggaaguguu

SEQ ID NO: 75174 - RNA, 21 nt, Artificial Sequence
  Synthetic
  misc_feature (7)..(7): n is a, c, g, or u
acaguanucuccggaaguguu

SEQ ID NO: 75175 - RNA, 22 nt, Artificial Sequence
  Synthetic
  misc_feature (8)..(8): n is a, c, g, or u
aacaguanucuccggaaguguu

SEQ ID NO: 75176 - RNA, 23 nt, Artificial Sequence
  Synthetic
  misc_feature (9)..(9): n is a, c, g, or u
caacaguanucuccggaaguguu

SEQ ID NO: 75177 - RNA, 24 nt, Artificial Sequence
  Synthetic
  misc_feature (10)..(10): n is a, c, g, or u
acaacaguanucuccggaaguguu

SEQ ID NO: 75178 - RNA, 18 nt, Artificial Sequence
  Synthetic
caugauguagcucuuguu

SEQ ID NO: 75179 - RNA, 19 nt, Artificial Sequence
  Synthetic
ccaugauguagcucuuguu

SEQ ID NO: 75180 - RNA, 20 nt, Artificial Sequence
  Synthetic
cccaugauguagcucuuguu

SEQ ID NO: 75181 - RNA, 21 nt, Artificial Sequence
  Synthetic
ccccaugauguagcucuuguu

SEQ ID NO: 75182 - RNA, 22 nt, Artificial Sequence
  Synthetic
gccccaugauguagcucuuguu

SEQ ID NO: 75183 - RNA, 23 nt, Artificial Sequence
  Synthetic
agccccaugauguagcucuuguu

SEQ ID NO: 75184 - RNA, 24 nt, Artificial Sequence
  Synthetic
aagccccaugauguagcucuuguu

SEQ ID NO: 75185 - RNA, 18 nt, Artificial Sequence
  Synthetic
  misc_feature (10)..(10): n is a, c, g, or u
  misc_feature (16)..(16): n is a, c, g, or u
ggugaguganuggagnuu

SEQ ID NO: 75186 - RNA, 19 nt, Artificial Sequence
  Synthetic
  misc_feature (11)..(11): n is a, c, g, or u
  misc_feature (17)..(17): n is a, c, g, or u
uggugaguganuggagnuu

SEQ ID NO: 75187 - RNA, 20 nt, Artificial Sequence
  Synthetic
  misc_feature (12)..(12): n is a, c, g, or u
  misc_feature (18)..(18): n is a, c, g, or u
uuggugaguganuggagnuu

SEQ ID NO: 75188 - RNA, 21 nt, Artificial Sequence
  Synthetic
  misc_feature (13)..(13): n is a, c, g, or u
  misc_feature (19)..(19): n is a, c, g, or u
guuggugaguganuggagnuu

SEQ ID NO: 75189 - RNA, 22 nt, Artificial Sequence
  Synthetic
  misc_feature (14)..(14): n is a, c, g, or u
  misc_feature (20)..(20): n is a, c, g, or u
gguuggugaguganuggagnuu

SEQ ID NO: 75190 - RNA, 23 nt, Artificial Sequence
  Synthetic
  misc_feature (15)..(15): n is a, c, g, or u
  misc_feature (21)..(21): n is a, c, g, or u
agguuggugaguganuggagnuu

SEQ ID NO: 75191 - RNA, 24 nt, Artificial Sequence
  Synthetic
  misc_feature (16)..(16): n is a, c, g, or u
  misc_feature (22)..(22): n is a, c, g, or u
gagguuggugaguganuggagnuu

SEQ ID NO: 75192 - RNA, 18 nt, Artificial Sequence
  Synthetic
  misc_feature (16)..(16): n is a, c, g, or u
ccaaucaauaggccgnuu

SEQ ID NO: 75193 - RNA, 19 nt, Artificial Sequence
  Synthetic
  misc_feature (17)..(17): n is a, c, g, or u
uccaaucaauaggccgnuu

SEQ ID NO: 75194 - RNA, 20 nt, Artificial Sequence
  Synthetic
  misc_feature (18)..(18): n is a, c, g, or u
uuccaaucaauaggccgnuu

SEQ ID NO: 75195 - RNA, 21 nt, Artificial Sequence
  Synthetic
  misc_feature (19)..(19): n is a, c, g, or u
uuuccaaucaauaggccgnuu

SEQ ID NO: 75196 - RNA, 22 nt, Artificial Sequence
  Synthetic
  misc_feature (20)..(20): n is a, c, g, or u
cuuuccaaucaauaggccgnuu

SEQ ID NO: 75197 - RNA, 23 nt, Artificial Sequence
  Synthetic
  misc_feature (21)..(21): n is a, c, g, or u
acuuuccaaucaauaggccgnuu

SEQ ID NO: 75198 - RNA, 24 nt, Artificial Sequence
  Synthetic
  misc_feature (22)..(22): n is a, c, g, or u
uacuuuccaaucaauaggccgnuu

SEQ ID NO: 75199 - RNA, 18 nt, Artificial Sequence
  Synthetic
ccacucccauaggaauuu

SEQ ID NO: 75200 - RNA, 19 nt, Artificial Sequence
  Synthetic
cccacucccauaggaauuu

SEQ ID NO: 75201 - RNA, 20 nt, Artificial Sequence
  Synthetic
gcccacucccauaggaauuu

SEQ ID NO: 75202 - RNA, 21 nt, Artificial Sequence
  Synthetic
ggcccacucccauaggaauuu

SEQ ID NO: 75203 - RNA, 22 nt, Artificial Sequence
  Synthetic
aggcccacucccauaggaauuu

SEQ ID NO: 75204 - RNA, 23 nt, Artificial Sequence
  Synthetic
gaggcccacucccauaggaauuu

SEQ ID NO: 75205 - RNA, 24 nt, Artificial Sequence
  Synthetic
ugaggcccacucccauaggaauuu

SEQ ID NO: 75206 - RNA, 18 nt, Artificial Sequence
  Synthetic
agaccuugggcaagauuu

SEQ ID NO: 75207 - RNA, 19 nt, Artificial Sequence
  Synthetic
aagaccuugggcaagauuu

SEQ ID NO: 75208 - RNA, 20 nt, Artificial Sequence
  Synthetic
uaagaccuugggcaagauuu

SEQ ID NO: 75209 - RNA, 21 nt, Artificial Sequence
  Synthetic
guaagaccuugggcaagauuu

SEQ ID NO: 75210 - RNA, 22 nt, Artificial Sequence
  Synthetic
uguaagaccuugggcaagauuu

SEQ ID NO: 75211 - RNA, 23 nt, Artificial Sequence
  Synthetic
auguaagaccuugggcaagauuu

SEQ ID NO: 75212 - RNA, 24 nt, Artificial Sequence
  Synthetic
uauguaagaccuugggcaagauuu

SEQ ID NO: 75213 - RNA, 18 nt, Artificial Sequence
  Synthetic
  misc_feature (10)..(10): n is a, c, g, or u
cucuaggggnaaauauuu

SEQ ID NO: 75214 - RNA, 19 nt, Artificial Sequence
  Synthetic
  misc_feature (11)..(11): n is a, c, g, or u
ucucuaggggnaaauauuu

SEQ ID NO: 75215 - RNA, 20 nt, Artificial Sequence
  Synthetic
  misc_feature (12)..(12): n is a, c, g, or u
uucucuaggggnaaauauuu

SEQ ID NO: 75216 - RNA, 21 nt, Artificial Sequence
  Synthetic
  misc_feature (13)..(13): n is a, c, g, or u
uuucucuaggggnaaauauuu

SEQ ID NO: 75217 - RNA, 22 nt, Artificial Sequence
  Synthetic
  misc_feature (14)..(14): n is a, c, g, or u
cuuucucuaggggnaaauauuu

SEQ ID NO: 75218 - RNA, 23 nt, Artificial Sequence
  Synthetic
  misc_feature (15)..(15): n is a, c, g, or u
ccuuucucuaggggnaaauauuu

SEQ ID NO: 75219 - RNA, 24 nt, Artificial Sequence
  Synthetic
  misc_feature (16)..(16): n is a, c, g, or u
accuuucucuaggggnaaauauuu

SEQ ID NO: 75220 - RNA, 18 nt, Artificial Sequence
  Synthetic
  misc_feature (7)..(7): n is a, c, g, or u
uggaaangauguauauuu

SEQ ID NO: 75221 - RNA, 19 nt, Artificial Sequence
  Synthetic
  misc_feature (8)..(8): n is a, c, g, or u
auggaaangauguauauuu

SEQ ID NO: 75222 - RNA, 20 nt, Artificial Sequence
  Synthetic
  misc_feature (9)..(9): n is a, c, g, or u
cauggaaangauguauauuu

SEQ ID NO: 75223 - RNA, 21 nt, Artificial Sequence
  Synthetic
  misc_feature (10)..(10): n is a, c, g, or u
ccauggaaangauguauauuu

SEQ ID NO: 75224 - RNA, 22 nt, Artificial Sequence
  Synthetic
  misc_feature (11)..(11): n is a, c, g, or u
gccauggaaangauguauauuu

SEQ ID NO: 75225 - RNA, 23 nt, Artificial Sequence
  Synthetic
  misc_feature (12)..(12): n is a, c, g, or u
agccauggaaangauguauauuu

SEQ ID NO: 75226 - RNA, 24 nt, Artificial Sequence
  Synthetic
  misc_feature (13)..(13): n is a, c, g, or u
cagccauggaaangauguauauuu

SEQ ID NO: 75227 - RNA, 18 nt, Artificial Sequence
  Synthetic
  misc_feature (4)..(4): n is a, c, g, or u
uucnguccaguggucuuu

SEQ ID NO: 75228 - RNA, 19 nt, Artificial Sequence
  Synthetic
  misc_feature (5)..(5): n is a, c, g, or u
cuucnguccaguggucuuu

SEQ ID NO: 75229 - RNA, 20 nt, Artificial Sequence
  Synthetic
  misc_feature (6)..(6): n is a, c, g, or u
gcuucnguccaguggucuuu

SEQ ID NO: 75230 - RNA, 21 nt, Artificial Sequence
  Synthetic
  misc_feature (7)..(7): n is a, c, g, or u
ggcuucnguccaguggucuuu

SEQ ID NO: 75231 - RNA, 22 nt, Artificial Sequence
  Synthetic
  misc_feature (8)..(8): n is a, c, g, or u
uggcuucnguccaguggucuuu

SEQ ID NO: 75232 - RNA, 23 nt, Artificial Sequence
  Synthetic
  misc_feature (9)..(9): n is a, c, g, or u
uuggcuucnguccaguggucuuu

SEQ ID NO: 75233 - RNA, 24 nt, Artificial Sequence
  Synthetic
  misc_feature (10)..(10): n is a, c, g, or u
guuggcuucnguccaguggucuuu

SEQ ID NO: 75234 - RNA, 18 nt, Artificial Sequence
  Synthetic
aguagcuccaaauucuuu

SEQ ID NO: 75235 - RNA, 19 nt, Artificial Sequence
  Synthetic
caguagcuccaaauucuuu

SEQ ID NO: 75236 - RNA, 20 nt, Artificial Sequence
  Synthetic
acaguagcuccaaauucuuu

SEQ ID NO: 75237 - RNA, 21 nt, Artificial Sequence
  Synthetic
cacaguagcuccaaauucuuu

SEQ ID NO: 75238 - RNA, 22 nt, Artificial Sequence
  Synthetic
ccacaguagcuccaaauucuuu

SEQ ID NO: 75239 - RNA, 23 nt, Artificial Sequence
  Synthetic
uccacaguagcuccaaauucuuu

SEQ ID NO: 75240 - RNA, 24 nt, Artificial Sequence
  Synthetic
cuccacaguagcuccaaauucuuu

SEQ ID NO: 75241 - RNA, 18 nt, Artificial Sequence
  Synthetic
  misc_feature (4)..(4): n is a, c, g, or u
ccgnuuaacagggaguuu

SEQ ID NO: 75242 - RNA, 19 nt, Artificial Sequence
  Synthetic
  misc_feature (5)..(5): n is a, c, g, or u
gccgnuuaacagggaguuu

SEQ ID NO: 75243 - RNA, 20 nt, Artificial Sequence
  Synthetic
  misc_feature (6)..(6): n is a, c, g, or u
ggccgnuuaacagggaguuu

SEQ ID NO: 75244 - RNA, 21 nt, Artificial Sequence
  Synthetic
  misc_feature (7)..(7): n is a, c, g, or u
aggccgnuuaacagggaguuu

SEQ ID NO: 75245 - RNA, 22 nt, Artificial Sequence
  Synthetic
  misc_feature (8)..(8): n is a, c, g, or u
uaggccgnuuaacagggaguuu

SEQ ID NO: 75246 - RNA, 23 nt, Artificial Sequence
  Synthetic
  misc_feature (9)..(9): n is a, c, g, or u
auaggccgnuuaacagggaguuu

SEQ ID NO: 75247 - RNA, 24 nt, Artificial Sequence
  Synthetic
  misc_feature (10)..(10): n is a, c, g, or u
aauaggccgnuuaacagggaguuu

SEQ ID NO: 75248 - RNA, 18 nt, Artificial Sequence
  Synthetic
cacucccauaggaauuuu

SEQ ID NO: 75249 - RNA, 19 nt, Artificial Sequence
  Synthetic
ccacucccauaggaauuuu

SEQ ID NO: 75250 - RNA, 20 nt, Artificial Sequence
  Synthetic
cccacucccauaggaauuuu

SEQ ID NO: 75251 - RNA, 21 nt, Artificial Sequence
  Synthetic
gcccacucccauaggaauuuu

SEQ ID NO: 75252 - RNA, 22 nt, Artificial Sequence
  Synthetic
ggcccacucccauaggaauuuu

SEQ ID NO: 75253 - RNA, 23 nt, Artificial Sequence
  Synthetic
aggcccacucccauaggaauuuu

SEQ ID NO: 75254 - RNA, 24 nt, Artificial Sequence
  Synthetic
gaggcccacucccauaggaauuuu

SEQ ID NO: 75255 - RNA, 18 nt, Artificial Sequence
  Synthetic
  misc_feature (3)..(3): n is a, c, g, or u
cgnuuaacagggaguuuu

SEQ ID NO: 75256 - RNA, 19 nt, Artificial Sequence
  Synthetic
  misc_feature (4)..(4): n is a, c, g, or u
ccgnuuaacagggaguuuu

SEQ ID NO: 75257 - RNA, 20 nt, Artificial Sequence
  Synthetic
  misc_feature (5)..(5): n is a, c, g, or u
gccgnuuaacagggaguuuu

SEQ ID NO: 75258 - RNA, 21 nt, Artificial Sequence
  Synthetic
  misc_feature (6)..(6): n is a, c, g, or u
ggccgnuuaacagggaguuuu

SEQ ID NO: 75259 - RNA, 22 nt, Artificial Sequence
  Synthetic
  misc_feature (7)..(7): n is a, c, g, or u
aggccgnuuaacagggaguuuu

SEQ ID NO: 75260 - RNA, 23 nt, Artificial Sequence
  Synthetic
  misc_feature (8)..(8): n is a, c, g, or u
uaggccgnuuaacagggaguuuu

SEQ ID NO: 75261 - RNA, 24 nt, Artificial Sequence
  Synthetic
  misc_feature (9)..(9): n is a, c, g, or u
auaggccgnuuaacagggaguuuu

SEQ ID NO: 75262 - RNA, 18 nt, Artificial Sequence
  Synthetic
uccccaucuuuuuguuuu

SEQ ID NO: 75263 - RNA, 19 nt, Artificial Sequence
  Synthetic
auccccaucuuuuuguuuu

SEQ ID NO: 75264 - RNA, 20 nt, Artificial Sequence
  Synthetic
uauccccaucuuuuuguuuu

SEQ ID NO: 75265 - RNA, 21 nt, Artificial Sequence
  Synthetic
auauccccaucuuuuuguuuu

SEQ ID NO: 75266 - RNA, 22 nt, Artificial Sequence
  Synthetic
aauauccccaucuuuuuguuuu

SEQ ID NO: 75267 - RNA, 23 nt, Artificial Sequence
  Synthetic
gaauauccccaucuuuuuguuuu

SEQ ID NO: 75268 - RNA, 24 nt, Artificial Sequence
  Synthetic
ggaauauccccaucuuuuuguuuu

SEQ ID NO: 75269 - RNA, 18 nt, Artificial Sequence
  Synthetic
gguauugugaggauuuuu

SEQ ID NO: 75270 - RNA, 19 nt, Artificial Sequence
  Synthetic
cgguauugugaggauuuuu

SEQ ID NO: 75271 - RNA, 20 nt, Artificial Sequence
  Synthetic
gcgguauugugaggauuuuu

SEQ ID NO: 75272 - RNA, 21 nt, Artificial Sequence
  Synthetic
ugcgguauugugaggauuuuu

SEQ ID NO: 75273 - RNA, 22 nt, Artificial Sequence
  Synthetic
cugcgguauugugaggauuuuu

SEQ ID NO: 75274 - RNA, 23 nt, Artificial Sequence
  Synthetic
ucugcgguauugugaggauuuuu

SEQ ID NO: 75275 - RNA, 24 nt, Artificial Sequence
  Synthetic
cucugcgguauugugaggauuuuu

SEQ ID NO: 75276 - RNA, 18 nt, Artificial Sequence
  Synthetic
aucccaacaaaacaaaaa

SEQ ID NO: 75277 - RNA, 19 nt, Artificial Sequence
  Synthetic
aaucccaacaaaacaaaaa

SEQ ID NO: 75278 - RNA, 20 nt, Artificial Sequence
  Synthetic
aaaucccaacaaaacaaaaa

SEQ ID NO: 75279 - RNA, 21 nt, Artificial Sequence
  Synthetic
uaaaucccaacaaaacaaaaa

SEQ ID NO: 75280 - RNA, 22 nt, Artificial Sequence
  Synthetic
uuaaaucccaacaaaacaaaaa

SEQ ID NO: 75281 - RNA, 23 nt, Artificial Sequence
  Synthetic
uuuaaaucccaacaaaacaaaaa

SEQ ID NO: 75282 - RNA, 24 nt, Artificial Sequence
  Synthetic
auuuaaaucccaacaaaacaaaaa

SEQ ID NO: 75283 - RNA, 18 nt, Artificial Sequence
  Synthetic
cuaacaguaaaugaaaaa

SEQ ID NO: 75284 - RNA, 19 nt, Artificial Sequence
  Synthetic
ucuaacaguaaaugaaaaa

SEQ ID NO: 75285 - RNA, 20 nt, Artificial Sequence
  Synthetic
cucuaacaguaaaugaaaaa

SEQ ID NO: 75286 - RNA, 21 nt, Artificial Sequence
  Synthetic
ccucuaacaguaaaugaaaaa

SEQ ID NO: 75287 - RNA, 22 nt, Artificial Sequence
  Synthetic
uccucuaacaguaaaugaaaaa

SEQ ID NO: 75288 - RNA, 23 nt, Artificial Sequence
  Synthetic
guccucuaacaguaaaugaaaaa

SEQ ID NO: 75289 - RNA, 24 nt, Artificial Sequence
  Synthetic
gguccucuaacaguaaaugaaaaa

SEQ ID NO: 75290 - RNA, 18 nt, Artificial Sequence
  Synthetic
auuuaaaucccaacaaaa

SEQ ID NO: 75291 - RNA, 19 nt, Artificial Sequence
  Synthetic
cauuuaaaucccaacaaaa

SEQ ID NO: 75292 - RNA, 20 nt, Artificial Sequence
  Synthetic
acauuuaaaucccaacaaaa

SEQ ID NO: 75293 - RNA, 21 nt, Artificial Sequence
  Synthetic
uacauuuaaaucccaacaaaa

SEQ ID NO: 75294 - RNA, 22 nt, Artificial Sequence
  Synthetic
auacauuuaaaucccaacaaaa

SEQ ID NO: 75295 - RNA, 23 nt, Artificial Sequence
  Synthetic
uauacauuuaaaucccaacaaaa

SEQ ID NO: 75296 - RNA, 24 nt, Artificial Sequence
  Synthetic
guauacauuuaaaucccaacaaaa

SEQ ID NO: 75297 - RNA, 18 nt, Artificial Sequence
  Synthetic
ucuaacaguaaaugaaaa

SEQ ID NO: 75298 - RNA, 19 nt, Artificial Sequence
  Synthetic
cucuaacaguaaaugaaaa

SEQ ID NO: 75299 - RNA, 20 nt, Artificial Sequence
  Synthetic
ccucuaacaguaaaugaaaa

SEQ ID NO: 75300 - RNA, 21 nt, Artificial Sequence
  Synthetic
uccucuaacaguaaaugaaaa

SEQ ID NO: 75301 - RNA, 22 nt, Artificial Sequence
  Synthetic
guccucuaacaguaaaugaaaa

SEQ ID NO: 75302 - RNA, 23 nt, Artificial Sequence
  Synthetic
gguccucuaacaguaaaugaaaa

SEQ ID NO: 75303 - RNA, 24 nt, Artificial Sequence
  Synthetic
agguccucuaacaguaaaugaaaa

SEQ ID NO: 75304 - RNA, 18 nt, Artificial Sequence
  Synthetic
  misc_feature (12)..(12): n is a, c, g, or u
aacacaucaganugaaaa

SEQ ID NO: 75305 - RNA, 19 nt, Artificial Sequence
  Synthetic
  misc_feature (13)..(13): n is a, c, g, or u
gaacacaucaganugaaaa

SEQ ID NO: 75306 - RNA, 20 nt, Artificial Sequence
  Synthetic
  misc_feature (1)..(1): n is a, c, g, or u
  misc_feature (14)..(14): n is a, c, g, or u
ngaacacaucaganugaaaa

SEQ ID NO: 75307 - RNA, 21 nt, Artificial Sequence
  Synthetic
  misc_feature (2)..(2): n is a, c, g, or u
  misc_feature (15)..(15): n is a, c, g, or u
angaacacaucaganugaaaa

SEQ ID NO: 75308 - RNA, 22 nt, Artificial Sequence
  Synthetic
  misc_feature (3)..(3): n is a, c, g, or u
  misc_feature (16)..(16): n is a, c, g, or u
cangaacacaucaganugaaaa

SEQ ID NO: 75309 - RNA, 23 nt, Artificial Sequence
  Synthetic
  misc_feature (4)..(4): n is a, c, g, or u
  misc_feature (17)..(17): n is a, c, g, or u
acangaacacaucaganugaaaa

SEQ ID NO: 75310 - RNA, 24 nt, Artificial Sequence
  Synthetic
  misc_feature (5)..(5): n is a, c, g, or u
  misc_feature (18)..(18): n is a, c, g, or u
cacangaacacaucaganugaaaa

SEQ ID NO: 75311 - RNA, 18 nt, Artificial Sequence
  Synthetic
cgggcaucuuauauaaaa

SEQ ID NO: 75312 - RNA, 19 nt, Artificial Sequence
  Synthetic
gcgggcaucuuauauaaaa

SEQ ID NO: 75313 - RNA, 20 nt, Artificial Sequence
  Synthetic
ggcgggcaucuuauauaaaa

SEQ ID NO: 75314 - RNA, 21 nt, Artificial Sequence
  Synthetic
aggcgggcaucuuauauaaaa

SEQ ID NO: 75315 - RNA, 22 nt, Artificial Sequence
  Synthetic
aaggcgggcaucuuauauaaaa

SEQ ID NO: 75316 - RNA, 23 nt, Artificial Sequence
  Synthetic
gaaggcgggcaucuuauauaaaa

SEQ ID NO: 75317 - RNA, 24 nt, Artificial Sequence
  Synthetic
ggaaggcgggcaucuuauauaaaa

SEQ ID NO: 75318 - RNA, 18 nt, Artificial Sequence
  Synthetic
cauuuaaaucccaacaaa

SEQ ID NO: 75319 - RNA, 19 nt, Artificial Sequence
  Synthetic
acauuuaaaucccaacaaa

SEQ ID NO: 75320 - RNA, 20 nt, Artificial Sequence
  Synthetic
uacauuuaaaucccaacaaa

SEQ ID NO: 75321 - RNA, 21 nt, Artificial Sequence
  Synthetic
auacauuuaaaucccaacaaa

SEQ ID NO: 75322 - RNA, 22 nt, Artificial Sequence
  Synthetic
uauacauuuaaaucccaacaaa

SEQ ID NO: 75323 - RNA, 23 nt, Artificial Sequence
  Synthetic
guauacauuuaaaucccaacaaa

SEQ ID NO: 75324 - RNA, 24 nt, Artificial Sequence
  Synthetic
gguauacauuuaaaucccaacaaa

SEQ ID NO: 75325 - RNA, 18 nt, Artificial Sequence
  Synthetic
caggacauuauuaacaaa

SEQ ID NO: 75326 - RNA, 19 nt, Artificial Sequence
  Synthetic
ccaggacauuauuaacaaa

SEQ ID NO: 75327 - RNA, 20 nt, Artificial Sequence
  Synthetic
accaggacauuauuaacaaa

SEQ ID NO: 75328 - RNA, 21 nt, Artificial Sequence
  Synthetic
caccaggacauuauuaacaaa

SEQ ID NO: 75329 - RNA, 22 nt, Artificial Sequence
  Synthetic
gcaccaggacauuauuaacaaa

SEQ ID NO: 75330 - RNA, 23 nt, Artificial Sequence
  Synthetic
ugcaccaggacauuauuaacaaa

SEQ ID NO: 75331 - RNA, 24 nt, Artificial Sequence
  Synthetic
uugcaccaggacauuauuaacaaa

SEQ ID NO: 75332 - RNA, 18 nt, Artificial Sequence
  Synthetic
uuaaucauuacuuccaaa

SEQ ID NO: 75333 - RNA, 19 nt, Artificial Sequence
  Synthetic
guuaaucauuacuuccaaa

SEQ ID NO: 75334 - RNA, 20 nt, Artificial Sequence
  Synthetic
aguuaaucauuacuuccaaa

SEQ ID NO: 75335 - RNA, 21 nt, Artificial Sequence
  Synthetic
uaguuaaucauuacuuccaaa

SEQ ID NO: 75336 - RNA, 22 nt, Artificial Sequence
  Synthetic
guaguuaaucauuacuuccaaa

SEQ ID NO: 75337 - RNA, 23 nt, Artificial Sequence
  Synthetic
uguaguuaaucauuacuuccaaa

SEQ ID NO: 75338 - RNA, 24 nt, Artificial Sequence
  Synthetic
auguaguuaaucauuacuuccaaa

SEQ ID NO: 75339 - RNA, 18 nt, Artificial Sequence
  Synthetic
cagagcaaacaccagaaa

SEQ ID NO: 75340 - RNA, 19 nt, Artificial Sequence
  Synthetic
ucagagcaaacaccagaaa

SEQ ID NO: 75341 - RNA, 20 nt, Artificial Sequence
  Synthetic
uucagagcaaacaccagaaa

SEQ ID NO: 75342 - RNA, 21 nt, Artificial Sequence
  Synthetic
auucagagcaaacaccagaaa

SEQ ID NO: 75343 - RNA, 22 nt, Artificial Sequence
  Synthetic
cauucagagcaaacaccagaaa

SEQ ID NO: 75344 - RNA, 23 nt, Artificial Sequence
  Synthetic
gcauucagagcaaacaccagaaa

SEQ ID NO: 75345 - RNA, 24 nt, Artificial Sequence
  Synthetic
agcauucagagcaaacaccagaaa

SEQ ID NO: 75346 - RNA, 18 nt, Artificial Sequence
  Synthetic
cucuaacaguaaaugaaa

SEQ ID NO: 75347 - RNA, 19 nt, Artificial Sequence
  Synthetic
ccucuaacaguaaaugaaa

SEQ ID NO: 75348 - RNA, 20 nt, Artificial Sequence
  Synthetic
uccucuaacaguaaaugaaa

SEQ ID NO: 75349 - RNA, 21 nt, Artificial Sequence
  Synthetic
guccucuaacaguaaaugaaa

SEQ ID NO: 75350 - RNA, 22 nt, Artificial Sequence
  Synthetic
gguccucuaacaguaaaugaaa

SEQ ID NO: 75351 - RNA, 23 nt, Artificial Sequence
  Synthetic
agguccucuaacaguaaaugaaa

SEQ ID NO: 75352 - RNA, 24 nt, Artificial Sequence
  Synthetic
uagguccucuaacaguaaaugaaa

SEQ ID NO: 75353 - RNA, 18 nt, Artificial Sequence
  Synthetic
  misc_feature (13)..(13): n is a, c, g, or u
gaacacaucaganugaaa

SEQ ID NO: 75354 - RNA, 19 nt, Artificial Sequence
  Synthetic
  misc_feature (1)..(1): n is a, c, g, or u
  misc_feature (14)..(14): n is a, c, g, or u
ngaacacaucaganugaaa

SEQ ID NO: 75355 - RNA, 20 nt, Artificial Sequence
  Synthetic
  misc_feature (2)..(2): n is a, c, g, or u
  misc_feature (15)..(15): n is a, c, g, or u
angaacacaucaganugaaa

SEQ ID NO: 75356 - RNA, 21 nt, Artificial Sequence
  Synthetic
  misc_feature (3)..(3): n is a, c, g, or u
  misc_feature (16)..(16): n is a, c, g, or u
cangaacacaucaganugaaa

SEQ ID NO: 75357 - RNA, 22 nt, Artificial Sequence
  Synthetic
  misc_feature (4)..(4): n is a, c, g, or u
  misc_feature (17)..(17): n is a, c, g, or u
acangaacacaucaganugaaa

SEQ ID NO: 75358 - RNA, 23 nt, Artificial Sequence
  Synthetic
  misc_feature (5)..(5): n is a, c, g, or u
  misc_feature (18)..(18): n is a, c, g, or u
cacangaacacaucaganugaaa

SEQ ID NO: 75359 - RNA, 24 nt, Artificial Sequence
  Synthetic
  misc_feature (6)..(6): n is a, c, g, or u
  misc_feature (19)..(19): n is a, c, g, or u
ccacangaacacaucaganugaaa

SEQ ID NO: 75360 - RNA, 18 nt, Artificial Sequence
  Synthetic
  misc_feature (15)..(15): n is a, c, g, or u
uaccugggugggugnaaa

SEQ ID NO: 75361 - RNA, 19 nt, Artificial Sequence
  Synthetic
  misc_feature (16)..(16): n is a, c, g, or u
cuaccugggugggugnaaa

SEQ ID NO: 75362 - RNA, 20 nt, Artificial Sequence
  Synthetic
  misc_feature (17)..(17): n is a, c, g, or u
gcuaccugggugggugnaaa

SEQ ID NO: 75363 - RNA, 21 nt, Artificial Sequence
  Synthetic
  misc_feature (18)..(18): n is a, c, g, or u
agcuaccugggugggugnaaa

SEQ ID NO: 75364 - RNA, 22 nt, Artificial Sequence
  Synthetic
  misc_feature (19)..(19): n is a, c, g, or u
uagcuaccugggugggugnaaa

SEQ ID NO: 75365 - RNA, 23 nt, Artificial Sequence
  Synthetic
  misc_feature (20)..(20): n is a, c, g, or u
cuagcuaccugggugggugnaaa

SEQ ID NO: 75366 - RNA, 24 nt, Artificial Sequence
  Synthetic
  misc_feature (21)..(21): n is a, c, g, or u
ucuagcuaccugggugggugnaaa

SEQ ID NO: 75367 - RNA, 18 nt, Artificial Sequence
  Synthetic
gcgggcaucuuauauaaa

SEQ ID NO: 75368 - RNA, 19 nt, Artificial Sequence
  Synthetic
ggcgggcaucuuauauaaa

SEQ ID NO: 75369 - RNA, 20 nt, Artificial Sequence
  Synthetic
aggcgggcaucuuauauaaa

SEQ ID NO: 75370 - RNA, 21 nt, Artificial Sequence
  Synthetic
aaggcgggcaucuuauauaaa

SEQ ID NO: 75371 - RNA, 22 nt, Artificial Sequence
  Synthetic
gaaggcgggcaucuuauauaaa

SEQ ID NO: 75372 - RNA, 23 nt, Artificial Sequence
  Synthetic
ggaaggcgggcaucuuauauaaa

SEQ ID NO: 75373 - RNA, 24 nt, Artificial Sequence
  Synthetic
uggaaggcgggcaucuuauauaaa

SEQ ID NO: 75374 - RNA, 18 nt, Artificial Sequence
  Synthetic
agguccucuaacaguaaa

SEQ ID NO: 75375 - RNA, 19 nt, Artificial Sequence
  Synthetic
uagguccucuaacaguaaa

SEQ ID NO: 75376 - RNA, 20 nt, Artificial Sequence
  Synthetic
guagguccucuaacaguaaa

SEQ ID NO: 75377 - RNA, 21 nt, Artificial Sequence
  Synthetic
uguagguccucuaacaguaaa

SEQ ID NO: 75378 - RNA, 22 nt, Artificial Sequence
  Synthetic
uuguagguccucuaacaguaaa

SEQ ID NO: 75379 - RNA, 23 nt, Artificial Sequence
  Synthetic
uuuguagguccucuaacaguaaa

SEQ ID NO: 75380 - RNA, 24 nt, Artificial Sequence
  Synthetic
auuuguagguccucuaacaguaaa

SEQ ID NO: 75381 - RNA, 18 nt, Artificial Sequence
  Synthetic
acauuuaaaucccaacaa

SEQ ID NO: 75382 - RNA, 19 nt, Artificial Sequence
  Synthetic
uacauuuaaaucccaacaa

SEQ ID NO: 75383 - RNA, 20 nt, Artificial Sequence
  Synthetic
auacauuuaaaucccaacaa

SEQ ID NO: 75384 - RNA, 21 nt, Artificial Sequence
  Synthetic
uauacauuuaaaucccaacaa

SEQ ID NO: 75385 - RNA, 22 nt, Artificial Sequence
  Synthetic
guauacauuuaaaucccaacaa

SEQ ID NO: 75386 - RNA, 23 nt, Artificial Sequence
  Synthetic
gguauacauuuaaaucccaacaa

SEQ ID NO: 75387 - RNA, 24 nt, Artificial Sequence
  Synthetic
ggguauacauuuaaaucccaacaa

SEQ ID NO: 75388 - RNA, 18 nt, Artificial Sequence
  Synthetic
  misc_feature (7)..(7): n is a, c, g, or u
cuggacngaagccaacaa

SEQ ID NO: 75389 - RNA, 19 nt, Artificial Sequence
  Synthetic
  misc_feature (8)..(8): n is a, c, g, or u
acuggacngaagccaacaa

SEQ ID NO: 75390 - RNA, 20 nt, Artificial Sequence
  Synthetic
  misc_feature (9)..(9): n is a, c, g, or u
cacuggacngaagccaacaa

SEQ ID NO: 75391 - RNA, 21 nt, Artificial Sequence
  Synthetic
  misc_feature (10)..(10): n is a, c, g, or u
ccacuggacngaagccaacaa

SEQ ID NO: 75392 - RNA, 22 nt, Artificial Sequence
  Synthetic
  misc_feature (11)..(11): n is a, c, g, or u
accacuggacngaagccaacaa

SEQ ID NO: 75393 - RNA, 23 nt, Artificial Sequence
  Synthetic
  misc_feature (12)..(12): n is a, c, g, or u
gaccacuggacngaagccaacaa

SEQ ID NO: 75394 - RNA, 24 nt, Artificial Sequence
  Synthetic
  misc_feature (13)..(13): n is a, c, g, or u
agaccacuggacngaagccaacaa

SEQ ID NO: 75395 - RNA, 18 nt, Artificial Sequence
  Synthetic
gcugccccuuuuacacaa

SEQ ID NO: 75396 - RNA, 19 nt, Artificial Sequence
  Synthetic
ugcugccccuuuuacacaa

SEQ ID NO: 75397 - RNA, 20 nt, Artificial Sequence
  Synthetic
uugcugccccuuuuacacaa

SEQ ID NO: 75398 - RNA, 21 nt, Artificial Sequence
  Synthetic
uuugcugccccuuuuacacaa

SEQ ID NO: 75399 - RNA, 22 nt, Artificial Sequence
  Synthetic
cuuugcugccccuuuuacacaa

SEQ ID NO: 75400 - RNA, 23 nt, Artificial Sequence
  Synthetic
gcuuugcugccccuuuuacacaa

SEQ ID NO: 75401 - RNA, 24 nt, Artificial Sequence
  Synthetic
ggcuuugcugccccuuuuacacaa

SEQ ID NO: 75402 - RNA, 18 nt, Artificial Sequence
  Synthetic
uauuccuuggacucacaa

SEQ ID NO: 75403 - RNA, 19 nt, Artificial Sequence
  Synthetic
guauuccuuggacucacaa

SEQ ID NO: 75404 - RNA, 20 nt, Artificial Sequence
  Synthetic
aguauuccuuggacucacaa

SEQ ID NO: 75405 - RNA, 21 nt, Artificial Sequence
  Synthetic
uaguauuccuuggacucacaa

SEQ ID NO: 75406 - RNA, 22 nt, Artificial Sequence
  Synthetic
uuaguauuccuuggacucacaa

SEQ ID NO: 75407 - RNA, 23 nt, Artificial Sequence
  Synthetic
guuaguauuccuuggacucacaa

SEQ ID NO: 75408 - RNA, 24 nt, Artificial Sequence
  Synthetic
uguuaguauuccuuggacucacaa

SEQ ID NO: 75409 - RNA, 18 nt, Artificial Sequence
  Synthetic
uauacauuuaaaucccaa

SEQ ID NO: 75410 - RNA, 19 nt, Artificial Sequence
  Synthetic
guauacauuuaaaucccaa

SEQ ID NO: 75411 - RNA, 20 nt, Artificial Sequence
  Synthetic
gguauacauuuaaaucccaa

SEQ ID NO: 75412 - RNA, 21 nt, Artificial Sequence
  Synthetic
ggguauacauuuaaaucccaa

SEQ ID NO: 75413 - RNA, 22 nt, Artificial Sequence
  Synthetic
uggguauacauuuaaaucccaa

SEQ ID NO: 75414 - RNA, 23 nt, Artificial Sequence
  Synthetic
uuggguauacauuuaaaucccaa

SEQ ID NO: 75415 - RNA, 24 nt, Artificial Sequence
  Synthetic
uuuggguauacauuuaaaucccaa

SEQ ID NO: 75416 - RNA, 18 nt, Artificial Sequence
  Synthetic
uugggaccacaaucccaa

SEQ ID NO: 75417 - RNA, 19 nt, Artificial Sequence
  Synthetic
auugggaccacaaucccaa

SEQ ID NO: 75418 - RNA, 20 nt, Artificial Sequence
  Synthetic
gauugggaccacaaucccaa

SEQ ID NO: 75419 - RNA, 21 nt, Artificial Sequence
  Synthetic
agauugggaccacaaucccaa

SEQ ID NO: 75420 - RNA, 22 nt, Artificial Sequence
  Synthetic
cagauugggaccacaaucccaa

SEQ ID NO: 75421 - RNA, 23 nt, Artificial Sequence
  Synthetic
ccagauugggaccacaaucccaa

SEQ ID NO: 75422 - RNA, 24 nt, Artificial Sequence
  Synthetic
uccagauugggaccacaaucccaa

SEQ ID NO: 75423 - RNA, 18 nt, Artificial Sequence
  Synthetic
guuaaucauuacuuccaa

SEQ ID NO: 75424 - RNA, 19 nt, Artificial Sequence
  Synthetic
aguuaaucauuacuuccaa

SEQ ID NO: 75425 - RNA, 20 nt, Artificial Sequence
  Synthetic
uaguuaaucauuacuuccaa

SEQ ID NO: 75426 - RNA, 21 nt, Artificial Sequence
  Synthetic
guaguuaaucauuacuuccaa

SEQ ID NO: 75427 - RNA, 22 nt, Artificial Sequence
  Synthetic
uguaguuaaucauuacuuccaa

SEQ ID NO: 75428 - RNA, 23 nt, Artificial Sequence
  Synthetic
auguaguuaaucauuacuuccaa

SEQ ID NO: 75429 - RNA, 24 nt, Artificial Sequence
  Synthetic
aauguaguuaaucauuacuuccaa

SEQ ID NO: 75430 - RNA, 18 nt, Artificial Sequence
  Synthetic
cuguaugcguguauucaa

SEQ ID NO: 75431 - RNA, 19 nt, Artificial Sequence
  Synthetic
ucuguaugcguguauucaa

SEQ ID NO: 75432 - RNA, 20 nt, Artificial Sequence
  Synthetic
cucuguaugcguguauucaa

SEQ ID NO: 75433 - RNA, 21 nt, Artificial Sequence
  Synthetic
ccucuguaugcguguauucaa

SEQ ID NO: 75434 - RNA, 22 nt, Artificial Sequence
  Synthetic
gccucuguaugcguguauucaa

SEQ ID NO: 75435 - RNA, 23 nt, Artificial Sequence
  Synthetic
ugccucuguaugcguguauucaa

SEQ ID NO: 75436 - RNA, 24 nt, Artificial Sequence
  Synthetic
augccucuguaugcguguauucaa

SEQ ID NO: 75437 - RNA, 18 nt, Artificial Sequence
  Synthetic
auugacccuuauaaagaa

SEQ ID NO: 75438 - RNA, 19 nt, Artificial Sequence
  Synthetic
cauugacccuuauaaagaa

SEQ ID NO: 75439 - RNA, 20 nt, Artificial Sequence
  Synthetic
acauugacccuuauaaagaa

SEQ ID NO: 75440 - RNA, 21 nt, Artificial Sequence
  Synthetic
gacauugacccuuauaaagaa

SEQ ID NO: 75441 - RNA, 22 nt, Artificial Sequence
  Synthetic
ggacauugacccuuauaaagaa

SEQ ID NO: 75442 - RNA, 23 nt, Artificial Sequence
  Synthetic
uggacauugacccuuauaaagaa

SEQ ID NO: 75443 - RNA, 24 nt, Artificial Sequence
  Synthetic
auggacauugacccuuauaaagaa

SEQ ID NO: 75444 - RNA, 18 nt, Artificial Sequence
  Synthetic
gaggcagguccccuagaa

SEQ ID NO: 75445 - RNA, 19 nt, Artificial Sequence
  Synthetic
agaggcagguccccuagaa

SEQ ID NO: 75446 - RNA, 20 nt, Artificial Sequence
  Synthetic
aagaggcagguccccuagaa

SEQ ID NO: 75447 - RNA, 21 nt, Artificial Sequence
  Synthetic
gaagaggcagguccccuagaa

SEQ ID NO: 75448 - RNA, 22 nt, Artificial Sequence
  Synthetic
cgaagaggcagguccccuagaa

SEQ ID NO: 75449 - RNA, 23 nt, Artificial Sequence
  Synthetic
acgaagaggcagguccccuagaa

SEQ ID NO: 75450 - RNA, 24 nt, Artificial Sequence
  Synthetic
gacgaagaggcagguccccuagaa

SEQ ID NO: 75451 - RNA, 18 nt, Artificial Sequence
  Synthetic
uggggacccugcaccgaa

SEQ ID NO: 75452 - RNA, 19 nt, Artificial Sequence
  Synthetic
uuggggacccugcaccgaa

SEQ ID NO: 75453 - RNA, 20 nt, Artificial Sequence
  Synthetic
auuggggacccugcaccgaa

SEQ ID NO: 75454 - RNA, 21 nt, Artificial Sequence
  Synthetic
gauuggggacccugcaccgaa

SEQ ID NO: 75455 - RNA, 22 nt, Artificial Sequence
  Synthetic
ggauuggggacccugcaccgaa

SEQ ID NO: 75456 - RNA, 23 nt, Artificial Sequence
  Synthetic
aggauuggggacccugcaccgaa

SEQ ID NO: 75457 - RNA, 24 nt, Artificial Sequence
  Synthetic
gaggauuggggacccugcaccgaa

SEQ ID NO: 75458 - RNA, 18 nt, Artificial Sequence
  Synthetic
uggacggucccucucgaa

SEQ ID NO: 75459 - RNA, 19 nt, Artificial Sequence
  Synthetic
uuggacggucccucucgaa

SEQ ID NO: 75460 - RNA, 20 nt, Artificial Sequence
  Synthetic
cuuggacggucccucucgaa

SEQ ID NO: 75461 - RNA, 21 nt, Artificial Sequence
  Synthetic
ucuuggacggucccucucgaa

SEQ ID NO: 75462 - RNA, 22 nt, Artificial Sequence
  Synthetic
uucuuggacggucccucucgaa

SEQ ID NO: 75463 - RNA, 23 nt, Artificial Sequence
  Synthetic
uuucuuggacggucccucucgaa

SEQ ID NO: 75464 - RNA, 24 nt, Artificial Sequence
  Synthetic
cuuucuuggacggucccucucgaa

SEQ ID NO: 75465 - RNA, 18 nt, Artificial Sequence
  Synthetic
ccaaucggcagucaggaa

SEQ ID NO: 75466 - RNA, 19 nt, Artificial Sequence
  Synthetic
accaaucggcagucaggaa

SEQ ID NO: 75467 - RNA, 20 nt, Artificial Sequence
  Synthetic
caccaaucggcagucaggaa

SEQ ID NO: 75468 - RNA, 21 nt, Artificial Sequence
  Synthetic
ccaccaaucggcagucaggaa

SEQ ID NO: 75469 - RNA, 22 nt, Artificial Sequence
  Synthetic
uccaccaaucggcagucaggaa

SEQ ID NO: 75470 - RNA, 23 nt, Artificial Sequence
  Synthetic
cuccaccaaucggcagucaggaa

SEQ ID NO: 75471 - RNA, 24 nt, Artificial Sequence
  Synthetic
ccuccaccaaucggcagucaggaa

SEQ ID NO: 75472 - RNA, 18 nt, Artificial Sequence
  Synthetic
ucaccuuauucuugggaa

SEQ ID NO: 75473 - RNA, 19 nt, Artificial Sequence
  Synthetic
gucaccuuauucuugggaa

SEQ ID NO: 75474 - RNA, 20 nt, Artificial Sequence
  Synthetic
ggucaccuuauucuugggaa

SEQ ID NO: 75475 - RNA, 21 nt, Artificial Sequence
  Synthetic
gggucaccuuauucuugggaa

SEQ ID NO: 75476 - RNA, 22 nt, Artificial Sequence
  Synthetic
ugggucaccuuauucuugggaa

SEQ ID NO: 75477 - RNA, 23 nt, Artificial Sequence
  Synthetic
  misc_feature (1)..(1): n is a, c, g, or u
nugggucaccuuauucuugggaa

SEQ ID NO: 75478 - RNA, 24 nt, Artificial Sequence
  Synthetic
  misc_feature (2)..(2): n is a, c, g, or u
unugggucaccuuauucuugggaa

SEQ ID NO: 75479 - RNA, 18 nt, Artificial Sequence
  Synthetic
uuuacauacccuauggaa

SEQ ID NO: 75480 - RNA, 19 nt, Artificial Sequence
  Synthetic
auuuacauacccuauggaa

SEQ ID NO: 75481 - RNA, 20 nt, Artificial Sequence
  Synthetic
uauuuacauacccuauggaa

SEQ ID NO: 75482 - RNA, 21 nt, Artificial Sequence
  Synthetic
cuauuuacauacccuauggaa

SEQ ID NO: 75483 - RNA, 22 nt, Artificial Sequence
  Synthetic
acuauuuacauacccuauggaa

SEQ ID NO: 75484 - RNA, 23 nt, Artificial Sequence
  Synthetic
cacuauuuacauacccuauggaa

SEQ ID NO: 75485 - RNA, 24 nt, Artificial Sequence
  Synthetic
acacuauuuacauacccuauggaa

SEQ ID NO: 75486 - RNA, 18 nt, Artificial Sequence
  Synthetic
uggguuauguaauuggaa

SEQ ID NO: 75487 - RNA, 19 nt, Artificial Sequence
  Synthetic
auggguuauguaauuggaa

SEQ ID NO: 75488 - RNA, 20 nt, Artificial Sequence
  Synthetic
cauggguuauguaauuggaa

SEQ ID NO: 75489 - RNA, 21 nt, Artificial Sequence
  Synthetic
ucauggguuauguaauuggaa

SEQ ID NO: 75490 - RNA, 22 nt, Artificial Sequence
  Synthetic
uucauggguuauguaauuggaa

SEQ ID NO: 75491 - RNA, 23 nt, Artificial Sequence
  Synthetic
uuucauggguuauguaauuggaa

SEQ ID NO: 75492 - RNA, 24 nt, Artificial Sequence
  Synthetic
auuucauggguuauguaauuggaa

SEQ ID NO: 75493 - RNA, 18 nt, Artificial Sequence
  Synthetic
cuugucucacuuuuggaa

SEQ ID NO: 75494 - RNA, 19 nt, Artificial Sequence
  Synthetic
ucuugucucacuuuuggaa

SEQ ID NO: 75495 - RNA, 20 nt, Artificial Sequence
  Synthetic
uucuugucucacuuuuggaa

SEQ ID NO: 75496 - RNA, 21 nt, Artificial Sequence
  Synthetic
uuucuugucucacuuuuggaa

SEQ ID NO: 75497 - RNA, 22 nt, Artificial Sequence
  Synthetic
auuucuugucucacuuuuggaa

SEQ ID NO: 75498 - RNA, 23 nt, Artificial Sequence
  Synthetic
cauuucuugucucacuuuuggaa

SEQ ID NO: 75499 - RNA, 24 nt, Artificial Sequence
  Synthetic
acauuucuugucucacuuuuggaa

SEQ ID NO: 75500 - RNA, 18 nt, Artificial Sequence
  Synthetic
  misc_feature (15)..(15): n is a, c, g, or u
aaagaccacuggacngaa

SEQ ID NO: 75501 - RNA, 19 nt, Artificial Sequence
  Synthetic
  misc_feature (16)..(16): n is a, c, g, or u
caaagaccacuggacngaa

SEQ ID NO: 75502 - RNA, 20 nt, Artificial Sequence
  Synthetic
  misc_feature (17)..(17): n is a, c, g, or u
acaaagaccacuggacngaa

SEQ ID NO: 75503 - RNA, 21 nt, Artificial Sequence
  Synthetic
  misc_feature (18)..(18): n is a, c, g, or u
aacaaagaccacuggacngaa

SEQ ID NO: 75504 - RNA, 22 nt, Artificial Sequence
  Synthetic
  misc_feature (19)..(19): n is a, c, g, or u
caacaaagaccacuggacngaa

SEQ ID NO: 75505 - RNA, 23 nt, Artificial Sequence
  Synthetic
  misc_feature (20)..(20): n is a, c, g, or u
ccaacaaagaccacuggacngaa

SEQ ID NO: 75506 - RNA, 24 nt, Artificial Sequence
  Synthetic
  misc_feature (21)..(21): n is a, c, g, or u
cccaacaaagaccacuggacngaa

SEQ ID NO: 75507 - RNA, 18 nt, Artificial Sequence
  Synthetic
gcccaaggucuuacauaa

SEQ ID NO: 75508 - RNA, 19 nt, Artificial Sequence
  Synthetic
ugcccaaggucuuacauaa

SEQ ID NO: 75509 - RNA, 20 nt, Artificial Sequence
  Synthetic
uugcccaaggucuuacauaa

SEQ ID NO: 75510 - RNA, 21 nt, Artificial Sequence
  Synthetic
cuugcccaaggucuuacauaa

SEQ ID NO: 75511 - RNA, 22 nt, Artificial Sequence
  Synthetic
ucuugcccaaggucuuacauaa

SEQ ID NO: 75512 - RNA, 23 nt, Artificial Sequence
  Synthetic
aucuugcccaaggucuuacauaa

SEQ ID NO: 75513 - RNA, 24 nt, Artificial Sequence
  Synthetic
aaucuugcccaaggucuuacauaa

SEQ ID NO: 75514 - RNA, 18 nt, Artificial Sequence
  Synthetic
caguuaugucaauacuaa

SEQ ID NO: 75515 - RNA, 19 nt, Artificial Sequence
  Synthetic
ucaguuaugucaauacuaa

SEQ ID NO: 75516 - RNA, 20 nt, Artificial Sequence
  Synthetic
gucaguuaugucaauacuaa

SEQ ID NO: 75517 - RNA, 21 nt, Artificial Sequence
  Synthetic
agucaguuaugucaauacuaa

SEQ ID NO: 75518 - RNA, 22 nt, Artificial Sequence
  Synthetic
uagucaguuaugucaauacuaa

SEQ ID NO: 75519 - RNA, 23 nt, Artificial Sequence
  Synthetic
guagucaguuaugucaauacuaa

SEQ ID NO: 75520 - RNA, 24 nt, Artificial Sequence
  Synthetic
aguagucaguuaugucaauacuaa

SEQ ID NO: 75521 - RNA, 18 nt, Artificial Sequence
  Synthetic
accugucuuuaauccuaa

SEQ ID NO: 75522 - RNA, 19 nt, Artificial Sequence
  Synthetic
uaccugucuuuaauccuaa

SEQ ID NO: 75523 - RNA, 20 nt, Artificial Sequence
  Synthetic
auaccugucuuuaauccuaa

SEQ ID NO: 75524 - RNA, 21 nt, Artificial Sequence
  Synthetic
uauaccugucuuuaauccuaa

SEQ ID NO: 75525 - RNA, 22 nt, Artificial Sequence
  Synthetic
cuauaccugucuuuaauccuaa

SEQ ID NO: 75526 - RNA, 23 nt, Artificial Sequence
  Synthetic
acuauaccugucuuuaauccuaa

SEQ ID NO: 75527 - RNA, 24 nt, Artificial Sequence
  Synthetic
uacuauaccugucuuuaauccuaa

SEQ ID NO: 75528 - RNA, 18 nt, Artificial Sequence
  Synthetic
ugcguguauucaaucuaa

SEQ ID NO: 75529 - RNA, 19 nt, Artificial Sequence
  Synthetic
augcguguauucaaucuaa

SEQ ID NO: 75530 - RNA, 20 nt, Artificial Sequence
  Synthetic
uaugcguguauucaaucuaa

SEQ ID NO: 75531 - RNA, 21 nt, Artificial Sequence
  Synthetic
guaugcguguauucaaucuaa

SEQ ID NO: 75532 - RNA, 22 nt, Artificial Sequence
  Synthetic
uguaugcguguauucaaucuaa

SEQ ID NO: 75533 - RNA, 23 nt, Artificial Sequence
  Synthetic
cuguaugcguguauucaaucuaa

SEQ ID NO: 75534 - RNA, 24 nt, Artificial Sequence
  Synthetic
ucuguaugcguguauucaaucuaa

SEQ ID NO: 75535 - RNA, 18 nt, Artificial Sequence
  Synthetic
uagguccucuaacaguaa

SEQ ID NO: 75536 - RNA, 19 nt, Artificial Sequence
  Synthetic
guagguccucuaacaguaa

SEQ ID NO: 75537 - RNA, 20 nt, Artificial Sequence
  Synthetic
uguagguccucuaacaguaa

SEQ ID NO: 75538 - RNA, 21 nt, Artificial Sequence
  Synthetic
uuguagguccucuaacaguaa

SEQ ID NO: 75539 - RNA, 22 nt, Artificial Sequence
  Synthetic
uuuguagguccucuaacaguaa

SEQ ID NO: 75540 - RNA, 23 nt, Artificial Sequence
  Synthetic
auuuguagguccucuaacaguaa

SEQ ID NO: 75541 - RNA, 24 nt, Artificial Sequence
  Synthetic
aauuuguagguccucuaacaguaa

SEQ ID NO: 75542 - RNA, 18 nt, Artificial Sequence
  Synthetic
auuucauggguuauguaa

SEQ ID NO: 75543 - RNA, 19 nt, Artificial Sequence
  Synthetic
  misc_feature (1)..(1): n is a, c, g, or u
nauuucauggguuauguaa

SEQ ID NO: 75544 - RNA, 20 nt, Artificial Sequence
  Synthetic
  misc_feature (2)..(2): n is a, c, g, or u
anauuucauggguuauguaa

SEQ ID NO: 75545 - RNA, 21 nt, Artificial Sequence
  Synthetic
  misc_feature (3)..(3): n is a, c, g, or u
uanauuucauggguuauguaa

SEQ ID NO: 75546 - RNA, 22 nt, Artificial Sequence
  Synthetic
  misc_feature (4)..(4): n is a, c, g, or u
cuanauuucauggguuauguaa

SEQ ID NO: 75547 - RNA, 23 nt, Artificial Sequence
  Synthetic
  misc_feature (5)..(5): n is a, c, g, or u
ccuanauuucauggguuauguaa

SEQ ID NO: 75548 - RNA, 24 nt, Artificial Sequence
  Synthetic
  misc_feature (6)..(6): n is a, c, g, or u
cccuanauuucauggguuauguaa

SEQ ID NO: 75549 - RNA, 18 nt, Artificial Sequence
  Synthetic
uuaaaucccaacaaaaca

SEQ ID NO: 75550 - RNA, 19 nt, Artificial Sequence
  Synthetic
uuuaaaucccaacaaaaca

SEQ ID NO: 75551 - RNA, 20 nt, Artificial Sequence
  Synthetic
auuuaaaucccaacaaaaca

SEQ ID NO: 75552 - RNA, 21 nt, Artificial Sequence
  Synthetic
cauuuaaaucccaacaaaaca

SEQ ID NO: 75553 - RNA, 22 nt, Artificial Sequence
  Synthetic
acauuuaaaucccaacaaaaca

SEQ ID NO: 75554 - RNA, 23 nt, Artificial Sequence
  Synthetic
uacauuuaaaucccaacaaaaca

SEQ ID NO: 75555 - RNA, 24 nt, Artificial Sequence
  Synthetic
auacauuuaaaucccaacaaaaca

SEQ ID NO: 75556 - RNA, 18 nt, Artificial Sequence
  Synthetic
cagcauucagagcaaaca

SEQ ID NO: 75557 - RNA, 19 nt, Artificial Sequence
  Synthetic
ccagcauucagagcaaaca

SEQ ID NO: 75558 - RNA, 20 nt, Artificial Sequence
  Synthetic
uccagcauucagagcaaaca

SEQ ID NO: 75559 - RNA, 21 nt, Artificial Sequence
  Synthetic
auccagcauucagagcaaaca

SEQ ID NO: 75560 - RNA, 22 nt, Artificial Sequence
  Synthetic
gauccagcauucagagcaaaca

SEQ ID NO: 75561 - RNA, 23 nt, Artificial Sequence
  Synthetic
ggauccagcauucagagcaaaca

SEQ ID NO: 75562 - RNA, 24 nt, Artificial Sequence
  Synthetic
uggauccagcauucagagcaaaca

SEQ ID NO: 75563 - RNA, 18 nt, Artificial Sequence
  Synthetic
gggacccugcaccgaaca

SEQ ID NO: 75564 - RNA, 19 nt, Artificial Sequence
  Synthetic
ggggacccugcaccgaaca

SEQ ID NO: 75565 - RNA, 20 nt, Artificial Sequence
  Synthetic
uggggacccugcaccgaaca

SEQ ID NO: 75566 - RNA, 21 nt, Artificial Sequence
  Synthetic
uuggggacccugcaccgaaca

SEQ ID NO: 75567 - RNA, 22 nt, Artificial Sequence
  Synthetic
auuggggacccugcaccgaaca

SEQ ID NO: 75568 - RNA, 23 nt, Artificial Sequence
  Synthetic
gauuggggacccugcaccgaaca

SEQ ID NO: 75569 - RNA, 24 nt, Artificial Sequence
  Synthetic
ggauuggggacccugcaccgaaca

SEQ ID NO: 75570 - RNA, 18 nt, Artificial Sequence
  Synthetic
ggcuccaguuccggaaca

SEQ ID NO: 75571 - RNA, 19 nt, Artificial Sequence
  Synthetic
uggcuccaguuccggaaca

SEQ ID NO: 75572 - RNA, 20 nt, Artificial Sequence
  Synthetic
guggcuccaguuccggaaca

SEQ ID NO: 75573 - RNA, 21 nt, Artificial Sequence
  Synthetic
gguggcuccaguuccggaaca

SEQ ID NO: 75574 - RNA, 22 nt, Artificial Sequence
  Synthetic
ugguggcuccaguuccggaaca

SEQ ID NO: 75575 - RNA, 23 nt, Artificial Sequence
  Synthetic
cugguggcuccaguuccggaaca

SEQ ID NO: 75576 - RNA, 24 nt, Artificial Sequence
  Synthetic
gcugguggcuccaguuccggaaca

SEQ ID NO: 75577 - RNA, 18 nt, Artificial Sequence
  Synthetic
  misc_feature (11)..(11): n is a, c, g, or u
cauuaccacangaacaca

SEQ ID NO: 75578 - RNA, 19 nt, Artificial Sequence
  Synthetic
  misc_feature (12)..(12): n is a, c, g, or u
ucauuaccacangaacaca

SEQ ID NO: 75579 - RNA, 20 nt, Artificial Sequence
  Synthetic
  misc_feature (1)..(1): n is a, c, g, or u
  misc_feature (13)..(13): n is a, c, g, or u
nucauuaccacangaacaca

SEQ ID NO: 75580 - RNA, 21 nt, Artificial Sequence
  Synthetic
  misc_feature (2)..(2): n is a, c, g, or u
  misc_feature (14)..(14): n is a, c, g, or u
gnucauuaccacangaacaca

SEQ ID NO: 75581 - RNA, 22 nt, Artificial Sequence
  Synthetic
  misc_feature (3)..(3): n is a, c, g, or u
  misc_feature (15)..(15): n is a, c, g, or u
ggnucauuaccacangaacaca

SEQ ID NO: 75582 - RNA, 23 nt, Artificial Sequence
  Synthetic
  misc_feature (4)..(4): n is a, c, g, or u
  misc_feature (16)..(16): n is a, c, g, or u
gggnucauuaccacangaacaca

SEQ ID NO: 75583 - RNA, 24 nt, Artificial Sequence
  Synthetic
  misc_feature (5)..(5): n is a, c, g, or u
  misc_feature (17)..(17): n is a, c, g, or u
ggggnucauuaccacangaacaca

SEQ ID NO: 75584 - RNA, 18 nt, Artificial Sequence
  Synthetic
  misc_feature (1)..(1): n is a, c, g, or u
nggguucacucccccaca

SEQ ID NO: 75585 - RNA, 19 nt, Artificial Sequence
  Synthetic
  misc_feature (2)..(2): n is a, c, g, or u
cnggguucacucccccaca

SEQ ID NO: 75586 - RNA, 20 nt, Artificial Sequence
  Synthetic
  misc_feature (3)..(3): n is a, c, g, or u
ccnggguucacucccccaca

SEQ ID NO: 75587 - RNA, 21 nt, Artificial Sequence
  Synthetic
  misc_feature (4)..(4): n is a, c, g, or u
gccnggguucacucccccaca

SEQ ID NO: 75588 - RNA, 22 nt, Artificial Sequence
  Synthetic
  misc_feature (5)..(5): n is a, c, g, or u
ggccnggguucacucccccaca

SEQ ID NO: 75589 - RNA, 23 nt, Artificial Sequence
  Synthetic
  misc_feature (6)..(6): n is a, c, g, or u
gggccnggguucacucccccaca

SEQ ID NO: 75590 - RNA, 24 nt, Artificial Sequence
  Synthetic
  misc_feature (7)..(7): n is a, c, g, or u
cgggccnggguucacucccccaca

SEQ ID NO: 75591 - RNA, 18 nt, Artificial Sequence
  Synthetic
aacauggaaagcaucaca

SEQ ID NO: 75592 - RNA, 19 nt, Artificial Sequence
  Synthetic
gaacauggaaagcaucaca

SEQ ID NO: 75593 - RNA, 20 nt, Artificial Sequence
  Synthetic
cgaacauggaaagcaucaca

SEQ ID NO: 75594 - RNA, 21 nt, Artificial Sequence
  Synthetic
ccgaacauggaaagcaucaca

SEQ ID NO: 75595 - RNA, 22 nt, Artificial Sequence
  Synthetic
accgaacauggaaagcaucaca

SEQ ID NO: 75596 - RNA, 23 nt, Artificial Sequence
  Synthetic
caccgaacauggaaagcaucaca

SEQ ID NO: 75597 - RNA, 24 nt, Artificial Sequence
  Synthetic
gcaccgaacauggaaagcaucaca

SEQ ID NO: 75598 - RNA, 18 nt, Artificial Sequence
  Synthetic
uuugucuuuggguauaca

SEQ ID NO: 75599 - RNA, 19 nt, Artificial Sequence
  Synthetic
uuuugucuuuggguauaca

SEQ ID NO: 75600 - RNA, 20 nt, Artificial Sequence
  Synthetic
cuuuugucuuuggguauaca

SEQ ID NO: 75601 - RNA, 21 nt, Artificial Sequence
  Synthetic
ucuuuugucuuuggguauaca

SEQ ID NO: 75602 - RNA, 22 nt, Artificial Sequence
  Synthetic
uucuuuugucuuuggguauaca

SEQ ID NO: 75603 - RNA, 23 nt, Artificial Sequence
  Synthetic
uuucuuuugucuuuggguauaca

SEQ ID NO: 75604 - RNA, 24 nt, Artificial Sequence
  Synthetic
uuuucuuuugucuuuggguauaca

SEQ ID NO: 75605 - RNA, 18 nt, Artificial Sequence
  Synthetic
cuugcccaaggucuuaca

SEQ ID NO: 75606 - RNA, 19 nt, Artificial Sequence
  Synthetic
ucuugcccaaggucuuaca

SEQ ID NO: 75607 - RNA, 20 nt, Artificial Sequence
  Synthetic
aucuugcccaaggucuuaca

SEQ ID NO: 75608 - RNA, 21 nt, Artificial Sequence
  Synthetic
aaucuugcccaaggucuuaca

SEQ ID NO: 75609 - RNA, 22 nt, Artificial Sequence
  Synthetic
aaaucuugcccaaggucuuaca

SEQ ID NO: 75610 - RNA, 23 nt, Artificial Sequence
  Synthetic
caaaucuugcccaaggucuuaca

SEQ ID NO: 75611 - RNA, 24 nt, Artificial Sequence
  Synthetic
ccaaaucuugcccaaggucuuaca

SEQ ID NO: 75612 - RNA, 18 nt, Artificial Sequence
  Synthetic
accccugcucguguuaca

SEQ ID NO: 75613 - RNA, 19 nt, Artificial Sequence
  Synthetic
gaccccugcucguguuaca

SEQ ID NO: 75614 - RNA, 20 nt, Artificial Sequence
  Synthetic
ggaccccugcucguguuaca

SEQ ID NO: 75615 - RNA, 21 nt, Artificial Sequence
  Synthetic
aggaccccugcucguguuaca

SEQ ID NO: 75616 - RNA, 22 nt, Artificial Sequence
  Synthetic
uaggaccccugcucguguuaca

SEQ ID NO: 75617 - RNA, 23 nt, Artificial Sequence
  Synthetic
cuaggaccccugcucguguuaca

SEQ ID NO: 75618 - RNA, 24 nt, Artificial Sequence
  Synthetic
ccuaggaccccugcucguguuaca

SEQ ID NO: 75619 - RNA, 18 nt, Artificial Sequence
  Synthetic
auuuuuucccgaccacca

SEQ ID NO: 75620 - RNA, 19 nt, Artificial Sequence
  Synthetic
gauuuuuucccgaccacca

SEQ ID NO: 75621 - RNA, 20 nt, Artificial Sequence
  Synthetic
ggauuuuuucccgaccacca

SEQ ID NO: 75622 - RNA, 21 nt, Artificial Sequence
  Synthetic
gggauuuuuucccgaccacca

SEQ ID NO: 75623 - RNA, 22 nt, Artificial Sequence
  Synthetic
ugggauuuuuucccgaccacca

SEQ ID NO: 75624 - RNA, 23 nt, Artificial Sequence
  Synthetic
cugggauuuuuucccgaccacca

SEQ ID NO: 75625 - RNA, 24 nt, Artificial Sequence
  Synthetic
ucugggauuuuuucccgaccacca

SEQ ID NO: 75626 - RNA, 18 nt, Artificial Sequence
  Synthetic
cgccuccugccuccacca

SEQ ID NO: 75627 - RNA, 19 nt, Artificial Sequence
  Synthetic
ccgccuccugccuccacca

SEQ ID NO: 75628 - RNA, 20 nt, Artificial Sequence
  Synthetic
uccgccuccugccuccacca

SEQ ID NO: 75629 - RNA, 21 nt, Artificial Sequence
  Synthetic
auccgccuccugccuccacca

SEQ ID NO: 75630 - RNA, 22 nt, Artificial Sequence
  Synthetic
gauccgccuccugccuccacca

SEQ ID NO: 75631 - RNA, 23 nt, Artificial Sequence
  Synthetic
agauccgccuccugccuccacca

SEQ ID NO: 75632 - RNA, 24 nt, Artificial Sequence
  Synthetic
cagauccgccuccugccuccacca

SEQ ID NO: 75633 - RNA, 18 nt, Artificial Sequence
  Synthetic
gucugcgcaccagcacca

SEQ ID NO: 75634 - RNA, 19 nt, Artificial Sequence
  Synthetic
ggucugcgcaccagcacca

SEQ ID NO: 75635 - RNA, 20 nt, Artificial Sequence
  Synthetic
uggucugcgcaccagcacca

SEQ ID NO: 75636 - RNA, 21 nt, Artificial Sequence
  Synthetic
uuggucugcgcaccagcacca

SEQ ID NO: 75637 - RNA, 22 nt, Artificial Sequence
  Synthetic
auuggucugcgcaccagcacca

SEQ ID NO: 75638 - RNA, 23 nt, Artificial Sequence
  Synthetic
aauuggucugcgcaccagcacca

SEQ ID NO: 75639 - RNA, 24 nt, Artificial Sequence
  Synthetic
aaauuggucugcgcaccagcacca

SEQ ID NO: 75640 - RNA, 18 nt, Artificial Sequence
  Synthetic
caaucccaacaaagacca

SEQ ID NO: 75641 - RNA, 19 nt, Artificial Sequence
  Synthetic
acaaucccaacaaagacca

SEQ ID NO: 75642 - RNA, 20 nt, Artificial Sequence
  Synthetic
cacaaucccaacaaagacca

SEQ ID NO: 75643 - RNA, 21 nt, Artificial Sequence
  Synthetic
ccacaaucccaacaaagacca

SEQ ID NO: 75644 - RNA, 22 nt, Artificial Sequence
  Synthetic
accacaaucccaacaaagacca

SEQ ID NO: 75645 - RNA, 23 nt, Artificial Sequence
  Synthetic
gaccacaaucccaacaaagacca

SEQ ID NO: 75646 - RNA, 24 nt, Artificial Sequence
  Synthetic
ggaccacaaucccaacaaagacca

SEQ ID NO: 75647 - RNA, 18 nt, Artificial Sequence
  Synthetic
  misc_feature (10)..(10): n is a, c, g, or u
ugccguuccngccgacca

SEQ ID NO: 75648 - RNA, 19 nt, Artificial Sequence
  Synthetic
  misc_feature (11)..(11): n is a, c, g, or u
cugccguuccngccgacca

SEQ ID NO: 75649 - RNA, 20 nt, Artificial Sequence
  Synthetic
  misc_feature (12)..(12): n is a, c, g, or u
ucugccguuccngccgacca

SEQ ID NO: 75650 - RNA, 21 nt, Artificial Sequence
  Synthetic
  misc_feature (13)..(13): n is a, c, g, or u
gucugccguuccngccgacca

SEQ ID NO: 75651 - RNA, 22 nt, Artificial Sequence
  Synthetic
  misc_feature (14)..(14): n is a, c, g, or u
cgucugccguuccngccgacca

SEQ ID NO: 75652 - RNA, 23 nt, Artificial Sequence
  Synthetic
  misc_feature (15)..(15): n is a, c, g, or u
ccgucugccguuccngccgacca

SEQ ID NO: 75653 - RNA, 24 nt, Artificial Sequence
  Synthetic
  misc_feature (16)..(16): n is a, c, g, or u
uccgucugccguuccngccgacca

SEQ ID NO: 75654 - RNA, 18 nt, Artificial Sequence
  Synthetic
  misc_feature (9)..(9): n is a, c, g, or u
aguuggggnucauuacca

SEQ ID NO: 75655 - RNA, 19 nt, Artificial Sequence
  Synthetic
  misc_feature (10)..(10): n is a, c, g, or u
aaguuggggnucauuacca

SEQ ID NO: 75656 - RNA, 20 nt, Artificial Sequence
  Synthetic
  misc_feature (11)..(11): n is a, c, g, or u
gaaguuggggnucauuacca

SEQ ID NO: 75657 - RNA, 21 nt, Artificial Sequence
  Synthetic
  misc_feature (12)..(12): n is a, c, g, or u
ggaaguuggggnucauuacca

SEQ ID NO: 75658 - RNA, 22 nt, Artificial Sequence
  Synthetic
  misc_feature (13)..(13): n is a, c, g, or u
uggaaguuggggnucauuacca

SEQ ID NO: 75659 - RNA, 23 nt, Artificial Sequence
  Synthetic
  misc_feature (14)..(14): n is a, c, g, or u
uuggaaguuggggnucauuacca

SEQ ID NO: 75660 - RNA, 24 nt, Artificial Sequence
  Synthetic
  misc_feature (15)..(15): n is a, c, g, or u
auuggaaguuggggnucauuacca

SEQ ID NO: 75661 - RNA, 18 nt, Artificial Sequence
  Synthetic
  misc_feature (3)..(3): n is a, c, g, or u
ccnggguucacuccccca

SEQ ID NO: 75662 - RNA, 19 nt, Artificial Sequence
  Synthetic
  misc_feature (4)..(4): n is a, c, g, or u
gccnggguucacuccccca

SEQ ID NO: 75663 - RNA, 20 nt, Artificial Sequence
  Synthetic
  misc_feature (5)..(5): n is a, c, g, or u
ggccnggguucacuccccca

SEQ ID NO: 75664 - RNA, 21 nt, Artificial Sequence
  Synthetic
  misc_feature (6)..(6): n is a, c, g, or u
gggccnggguucacuccccca

SEQ ID NO: 75665 - RNA, 22 nt, Artificial Sequence
  Synthetic
  misc_feature (7)..(7): n is a, c, g, or u
cgggccnggguucacuccccca

SEQ ID NO: 75666 - RNA, 23 nt, Artificial Sequence
  Synthetic
  misc_feature (8)..(8): n is a, c, g, or u
ucgggccnggguucacuccccca

SEQ ID NO: 75667 - RNA, 24 nt, Artificial Sequence
  Synthetic
  misc_feature (9)..(9): n is a, c, g, or u
uucgggccnggguucacuccccca

SEQ ID NO: 75668 - RNA, 18 nt, Artificial Sequence
  Synthetic
guauacauuuaaauccca

SEQ ID NO: 75669 - RNA, 19 nt, Artificial Sequence
  Synthetic
gguauacauuuaaauccca

SEQ ID NO: 75670 - RNA, 20 nt, Artificial Sequence
  Synthetic
ggguauacauuuaaauccca

SEQ ID NO: 75671 - RNA, 21 nt, Artificial Sequence
  Synthetic
uggguauacauuuaaauccca

SEQ ID NO: 75672 - RNA, 22 nt, Artificial Sequence
  Synthetic
uuggguauacauuuaaauccca

SEQ ID NO: 75673 - RNA, 23 nt, Artificial Sequence
  Synthetic
uuuggguauacauuuaaauccca

SEQ ID NO: 75674 - RNA, 24 nt, Artificial Sequence
  Synthetic
cuuuggguauacauuuaaauccca

SEQ ID NO: 75675 - RNA, 18 nt, Artificial Sequence
  Synthetic
auugggaccacaauccca

SEQ ID NO: 75676 - RNA, 19 nt, Artificial Sequence
  Synthetic
gauugggaccacaauccca

SEQ ID NO: 75677 - RNA, 20 nt, Artificial Sequence
  Synthetic
agauugggaccacaauccca

SEQ ID NO: 75678 - RNA, 21 nt, Artificial Sequence
  Synthetic
cagauugggaccacaauccca

SEQ ID NO: 75679 - RNA, 22 nt, Artificial Sequence
  Synthetic
ccagauugggaccacaauccca

SEQ ID NO: 75680 - RNA, 23 nt, Artificial Sequence
  Synthetic
uccagauugggaccacaauccca

SEQ ID NO: 75681 - RNA, 24 nt, Artificial Sequence
  Synthetic
auccagauugggaccacaauccca

SEQ ID NO: 75682 - RNA, 18 nt, Artificial Sequence
  Synthetic
  misc_feature (11)..(11): n is a, c, g, or u
accacuggacngaagcca

SEQ ID NO: 75683 - RNA, 19 nt, Artificial Sequence
  Synthetic
  misc_feature (12)..(12): n is a, c, g, or u
gaccacuggacngaagcca

SEQ ID NO: 75684 - RNA, 20 nt, Artificial Sequence
  Synthetic
  misc_feature (13)..(13): n is a, c, g, or u
agaccacuggacngaagcca

SEQ ID NO: 75685 - RNA, 21 nt, Artificial Sequence
  Synthetic
  misc_feature (14)..(14): n is a, c, g, or u
aagaccacuggacngaagcca

SEQ ID NO: 75686 - RNA, 22 nt, Artificial Sequence
  Synthetic
  misc_feature (15)..(15): n is a, c, g, or u
aaagaccacuggacngaagcca

SEQ ID NO: 75687 - RNA, 23 nt, Artificial Sequence
  Synthetic
  misc_feature (16)..(16): n is a, c, g, or u
caaagaccacuggacngaagcca

SEQ ID NO: 75688 - RNA, 24 nt, Artificial Sequence
  Synthetic
  misc_feature (17)..(17): n is a, c, g, or u
acaaagaccacuggacngaagcca

SEQ ID NO: 75689 - RNA, 18 nt, Artificial Sequence
  Synthetic
ugcuaggcugugcugcca

SEQ ID NO: 75690 - RNA, 19 nt, Artificial Sequence
  Synthetic
cugcuaggcugugcugcca

SEQ ID NO: 75691 - RNA, 20 nt, Artificial Sequence
  Synthetic
gcugcuaggcugugcugcca

SEQ ID NO: 75692 - RNA, 21 nt, Artificial Sequence
  Synthetic
ggcugcuaggcugugcugcca

SEQ ID NO: 75693 - RNA, 22 nt, Artificial Sequence
  Synthetic
uggcugcuaggcugugcugcca

SEQ ID NO: 75694 - RNA, 23 nt, Artificial Sequence
  Synthetic
auggcugcuaggcugugcugcca

SEQ ID NO: 75695 - RNA, 24 nt, Artificial Sequence
  Synthetic
cauggcugcuaggcugugcugcca

SEQ ID NO: 75696 - RNA, 18 nt, Artificial Sequence
  Synthetic
aauuuggaagauccagca

SEQ ID NO: 75697 - RNA, 19 nt, Artificial Sequence
  Synthetic
aaauuuggaagauccagca

SEQ ID NO: 75698 - RNA, 20 nt, Artificial Sequence
  Synthetic
  misc_feature (1)..(1): n is a, c, g, or u
naaauuuggaagauccagca

SEQ ID NO: 75699 - RNA, 21 nt, Artificial Sequence
  Synthetic
  misc_feature (2)..(2): n is a, c, g, or u
gnaaauuuggaagauccagca

SEQ ID NO: 75700 - RNA, 22 nt, Artificial Sequence
  Synthetic
  misc_feature (3)..(3): n is a, c, g, or u
ugnaaauuuggaagauccagca

SEQ ID NO: 75701 - RNA, 23 nt, Artificial Sequence
  Synthetic
  misc_feature (4)..(4): n is a, c, g, or u
gugnaaauuuggaagauccagca

SEQ ID NO: 75702 - RNA, 24 nt, Artificial Sequence
  Synthetic
  misc_feature (5)..(5): n is a, c, g, or u
ggugnaaauuuggaagauccagca

SEQ ID NO: 75703 - RNA, 18 nt, Artificial Sequence
  Synthetic
caccaguuggauccagca

SEQ ID NO: 75704 - RNA, 19 nt, Artificial Sequence
  Synthetic
ccaccaguuggauccagca

SEQ ID NO: 75705 - RNA, 20 nt, Artificial Sequence
  Synthetic
accaccaguuggauccagca

SEQ ID NO: 75706 - RNA, 21 nt, Artificial Sequence
  Synthetic
gaccaccaguuggauccagca

SEQ ID NO: 75707 - RNA, 22 nt, Artificial Sequence
  Synthetic
cgaccaccaguuggauccagca

SEQ ID NO: 75708 - RNA, 23 nt, Artificial Sequence
  Synthetic
ccgaccaccaguuggauccagca

SEQ ID NO: 75709 - RNA, 24 nt, Artificial Sequence
  Synthetic
cccgaccaccaguuggauccagca

SEQ ID NO: 75710 - RNA, 18 nt, Artificial Sequence
  Synthetic
aagguaggagugggagca

SEQ ID NO: 75711 - RNA, 19 nt, Artificial Sequence
  Synthetic
caagguaggagugggagca

SEQ ID NO: 75712 - RNA, 20 nt, Artificial Sequence
  Synthetic
acaagguaggagugggagca

SEQ ID NO: 75713 - RNA, 21 nt, Artificial Sequence
  Synthetic
aacaagguaggagugggagca

SEQ ID NO: 75714 - RNA, 22 nt, Artificial Sequence
  Synthetic
caacaagguaggagugggagca

SEQ ID NO: 75715 - RNA, 23 nt, Artificial Sequence
  Synthetic
ccaacaagguaggagugggagca

SEQ ID NO: 75716 - RNA, 24 nt, Artificial Sequence
  Synthetic
gccaacaagguaggagugggagca

SEQ ID NO: 75717 - RNA, 18 nt, Artificial Sequence
  Synthetic
gaacucccucgccucgca

SEQ ID NO: 75718 - RNA, 19 nt, Artificial Sequence
  Synthetic
agaacucccucgccucgca

SEQ ID NO: 75719 - RNA, 20 nt, Artificial Sequence
  Synthetic
aagaacucccucgccucgca

SEQ ID NO: 75720 - RNA, 21 nt, Artificial Sequence
  Synthetic
gaagaacucccucgccucgca

SEQ ID NO: 75721 - RNA, 22 nt, Artificial Sequence
  Synthetic
agaagaacucccucgccucgca

SEQ ID NO: 75722 - RNA, 23 nt, Artificial Sequence
  Synthetic
aagaagaacucccucgccucgca

SEQ ID NO: 75723 - RNA, 24 nt, Artificial Sequence
  Synthetic
gaagaagaacucccucgccucgca

SEQ ID NO: 75724 - RNA, 18 nt, Artificial Sequence
  Synthetic
ucaccucugcacgucgca

SEQ ID NO: 75725 - RNA, 19 nt, Artificial Sequence
  Synthetic
uucaccucugcacgucgca

SEQ ID NO: 75726 - RNA, 20 nt, Artificial Sequence
  Synthetic
cuucaccucugcacgucgca

SEQ ID NO: 75727 - RNA, 21 nt, Artificial Sequence
  Synthetic
gcuucaccucugcacgucgca

SEQ ID NO: 75728 - RNA, 22 nt, Artificial Sequence
  Synthetic
cgcuucaccucugcacgucgca

SEQ ID NO: 75729 - RNA, 23 nt, Artificial Sequence
  Synthetic
ucgcuucaccucugcacgucgca

SEQ ID NO: 75730 - RNA, 24 nt, Artificial Sequence
  Synthetic
uucgcuucaccucugcacgucgca

SEQ ID NO: 75731 - RNA, 18 nt, Artificial Sequence
  Synthetic
ugccuccaccaaucggca

SEQ ID NO: 75732 - RNA, 19 nt, Artificial Sequence
  Synthetic
cugccuccaccaaucggca

SEQ ID NO: 75733 - RNA, 20 nt, Artificial Sequence
  Synthetic
ccugccuccaccaaucggca

SEQ ID NO: 75734 - RNA, 21 nt, Artificial Sequence
  Synthetic
uccugccuccaccaaucggca

SEQ ID NO: 75735 - RNA, 22 nt, Artificial Sequence
  Synthetic
cuccugccuccaccaaucggca

SEQ ID NO: 75736 - RNA, 23 nt, Artificial Sequence
  Synthetic
ccuccugccuccaccaaucggca

SEQ ID NO: 75737 - RNA, 24 nt, Artificial Sequence
  Synthetic
gccuccugccuccaccaaucggca

SEQ ID NO: 75738 - RNA, 18 nt, Artificial Sequence
  Synthetic
ucauccucaggccaugca

SEQ ID NO: 75739 - RNA, 19 nt, Artificial Sequence
  Synthetic
cucauccucaggccaugca

SEQ ID NO: 75740 - RNA, 20 nt, Artificial Sequence
  Synthetic
acucauccucaggccaugca

SEQ ID NO: 75741 - RNA, 21 nt, Artificial Sequence
  Synthetic
cacucauccucaggccaugca

SEQ ID NO: 75742 - RNA, 22 nt, Artificial Sequence
  Synthetic
acacucauccucaggccaugca

SEQ ID NO: 75743 - RNA, 23 nt, Artificial Sequence
  Synthetic
gacacucauccucaggccaugca

SEQ ID NO: 75744 - RNA, 24 nt, Artificial Sequence
  Synthetic
agacacucauccucaggccaugca

SEQ ID NO: 75745 - RNA, 18 nt, Artificial Sequence
  Synthetic
  misc_feature (6)..(6): n is a, c, g, or u
  misc_feature (12)..(12): n is a, c, g, or u
ucaccncaccanacugca

SEQ ID NO: 75746 - RNA, 19 nt, Artificial Sequence
  Synthetic
  misc_feature (7)..(7): n is a, c, g, or u
  misc_feature (13)..(13): n is a, c, g, or u
uucaccncaccanacugca

SEQ ID NO: 75747 - RNA, 20 nt, Artificial Sequence
  Synthetic
  misc_feature (8)..(8): n is a, c, g, or u
  misc_feature (14)..(14): n is a, c, g, or u
guucaccncaccanacugca

SEQ ID NO: 75748 - RNA, 21 nt, Artificial Sequence
  Synthetic
  misc_feature (9)..(9): n is a, c, g, or u
  misc_feature (15)..(15): n is a, c, g, or u
uguucaccncaccanacugca

SEQ ID NO: 75749 - RNA, 22 nt, Artificial Sequence
  Synthetic
  misc_feature (10)..(10): n is a, c, g, or u
  misc_feature (16)..(16): n is a, c, g, or u
uuguucaccncaccanacugca

SEQ ID NO: 75750 - RNA, 23 nt, Artificial Sequence
  Synthetic
  misc_feature (11)..(11): n is a, c, g, or u
  misc_feature (17)..(17): n is a, c, g, or u
auuguucaccncaccanacugca

SEQ ID NO: 75751 - RNA, 24 nt, Artificial Sequence
  Synthetic
  misc_feature (12)..(12): n is a, c, g, or u
  misc_feature (18)..(18): n is a, c, g, or u
cauuguucaccncaccanacugca

SEQ ID NO: 75752 - RNA, 18 nt, Artificial Sequence
  Synthetic
aggauuggggacccugca

SEQ ID NO: 75753 - RNA, 19 nt, Artificial Sequence
  Synthetic
gaggauuggggacccugca

SEQ ID NO: 75754 - RNA, 20 nt, Artificial Sequence
  Synthetic
cgaggauuggggacccugca

SEQ ID NO: 75755 - RNA, 21 nt, Artificial Sequence
  Synthetic
ucgaggauuggggacccugca

SEQ ID NO: 75756 - RNA, 22 nt, Artificial Sequence
  Synthetic
cucgaggauuggggacccugca

SEQ ID NO: 75757 - RNA, 23 nt, Artificial Sequence
  Synthetic
ucucgaggauuggggacccugca

SEQ ID NO: 75758 - RNA, 24 nt, Artificial Sequence
  Synthetic
uucucgaggauuggggacccugca

SEQ ID NO: 75759 - RNA, 18 nt, Artificial Sequence
  Synthetic
uccugauauucauuugca

SEQ ID NO: 75760 - RNA, 19 nt, Artificial Sequence
  Synthetic
uuccugauauucauuugca

SEQ ID NO: 75761 - RNA, 20 nt, Artificial Sequence
  Synthetic
uuuccugauauucauuugca

SEQ ID NO: 75762 - RNA, 21 nt, Artificial Sequence
  Synthetic
uuuuccugauauucauuugca

SEQ ID NO: 75763 - RNA, 22 nt, Artificial Sequence
  Synthetic
cuuuuccugauauucauuugca

SEQ ID NO: 75764 - RNA, 23 nt, Artificial Sequence
  Synthetic
ucuuuuccugauauucauuugca

SEQ ID NO: 75765 - RNA, 24 nt, Artificial Sequence
  Synthetic
aucuuuuccugauauucauuugca

SEQ ID NO: 75766 - RNA, 18 nt, Artificial Sequence
  Synthetic
ggaacaagagcuacauca

SEQ ID NO: 75767 - RNA, 19 nt, Artificial Sequence
  Synthetic
gggaacaagagcuacauca

SEQ ID NO: 75768 - RNA, 20 nt, Artificial Sequence
  Synthetic
ugggaacaagagcuacauca

SEQ ID NO: 75769 - RNA, 21 nt, Artificial Sequence
  Synthetic
uugggaacaagagcuacauca

SEQ ID NO: 75770 - RNA, 22 nt, Artificial Sequence
  Synthetic
cuugggaacaagagcuacauca

SEQ ID NO: 75771 - RNA, 23 nt, Artificial Sequence
  Synthetic
ucuugggaacaagagcuacauca

SEQ ID NO: 75772 - RNA, 24 nt, Artificial Sequence
  Synthetic
uucuugggaacaagagcuacauca

SEQ ID NO: 75773 - RNA, 18 nt, Artificial Sequence
  Synthetic
  misc_feature (2)..(2): n is a, c, g, or u
  misc_feature (8)..(8): n is a, c, g, or u
cncaccanacugcacuca

SEQ ID NO: 75774 - RNA, 19 nt, Artificial Sequence
  Synthetic
  misc_feature (3)..(3): n is a, c, g, or u
  misc_feature (9)..(9): n is a, c, g, or u
ccncaccanacugcacuca

SEQ ID NO: 75775 - RNA, 20 nt, Artificial Sequence
  Synthetic
  misc_feature (4)..(4): n is a, c, g, or u
  misc_feature (10)..(10): n is a, c, g, or u
accncaccanacugcacuca

SEQ ID NO: 75776 - RNA, 21 nt, Artificial Sequence
  Synthetic
  misc_feature (5)..(5): n is a, c, g, or u
  misc_feature (11)..(11): n is a, c, g, or u
caccncaccanacugcacuca

SEQ ID NO: 75777 - RNA, 22 nt, Artificial Sequence
  Synthetic
  misc_feature (6)..(6): n is a, c, g, or u
  misc_feature (12)..(12): n is a, c, g, or u
ucaccncaccanacugcacuca

SEQ ID NO: 75778 - RNA, 23 nt, Artificial Sequence
  Synthetic
  misc_feature (7)..(7): n is a, c, g, or u
  misc_feature (13)..(13): n is a, c, g, or u
uucaccncaccanacugcacuca

SEQ ID NO: 75779 - RNA, 24 nt, Artificial Sequence
  Synthetic
  misc_feature (8)..(8): n is a, c, g, or u
  misc_feature (14)..(14): n is a, c, g, or u
guucaccncaccanacugcacuca

SEQ ID NO: 75780 - RNA, 18 nt, Artificial Sequence
  Synthetic
cugcacgacucuugcuca

SEQ ID NO: 75781 - RNA, 19 nt, Artificial Sequence
  Synthetic
ccugcacgacucuugcuca

SEQ ID NO: 75782 - RNA, 20 nt, Artificial Sequence
  Synthetic
accugcacgacucuugcuca

SEQ ID NO: 75783 - RNA, 21 nt, Artificial Sequence
  Synthetic
aaccugcacgacucuugcuca

SEQ ID NO: 75784 - RNA, 22 nt, Artificial Sequence
  Synthetic
gaaccugcacgacucuugcuca

SEQ ID NO: 75785 - RNA, 23 nt, Artificial Sequence
  Synthetic
cgaaccugcacgacucuugcuca

SEQ ID NO: 75786 - RNA, 24 nt, Artificial Sequence
  Synthetic
ccgaaccugcacgacucuugcuca

SEQ ID NO: 75787 - RNA, 18 nt, Artificial Sequence
  Synthetic
uccaccaaucggcaguca

SEQ ID NO: 75788 - RNA, 19 nt, Artificial Sequence
  Synthetic
cuccaccaaucggcaguca

SEQ ID NO: 75789 - RNA, 20 nt, Artificial Sequence
  Synthetic
ccuccaccaaucggcaguca

SEQ ID NO: 75790 - RNA, 21 nt, Artificial Sequence
  Synthetic
gccuccaccaaucggcaguca

SEQ ID NO: 75791 - RNA, 22 nt, Artificial Sequence
  Synthetic
ugccuccaccaaucggcaguca

SEQ ID NO: 75792 - RNA, 23 nt, Artificial Sequence
  Synthetic
cugccuccaccaaucggcaguca

SEQ ID NO: 75793 - RNA, 24 nt, Artificial Sequence
  Synthetic
ccugccuccaccaaucggcaguca

SEQ ID NO: 75794 - RNA, 18 nt, Artificial Sequence
  Synthetic
ucugacuucuuuccuuca

SEQ ID NO: 75795 - RNA, 19 nt, Artificial Sequence
  Synthetic
uucugacuucuuuccuuca

SEQ ID NO: 75796 - RNA, 20 nt, Artificial Sequence
  Synthetic
cuucugacuucuuuccuuca

SEQ ID NO: 75797 - RNA, 21 nt, Artificial Sequence
  Synthetic
ccuucugacuucuuuccuuca

SEQ ID NO: 75798 - RNA, 22 nt, Artificial Sequence
  Synthetic
gccuucugacuucuuuccuuca

SEQ ID NO: 75799 - RNA, 23 nt, Artificial Sequence
  Synthetic
ugccuucugacuucuuuccuuca

SEQ ID NO: 75800 - RNA, 24 nt, Artificial Sequence
  Synthetic
uugccuucugacuucuuuccuuca

SEQ ID NO: 75801 - RNA, 18 nt, Artificial Sequence
  Synthetic
cccaacaaaacaaaaaga

SEQ ID NO: 75802 - RNA, 19 nt, Artificial Sequence
  Synthetic
ucccaacaaaacaaaaaga

SEQ ID NO: 75803 - RNA, 20 nt, Artificial Sequence
  Synthetic
aucccaacaaaacaaaaaga

SEQ ID NO: 75804 - RNA, 21 nt, Artificial Sequence
  Synthetic
aaucccaacaaaacaaaaaga

SEQ ID NO: 75805 - RNA, 22 nt, Artificial Sequence
  Synthetic
aaaucccaacaaaacaaaaaga

SEQ ID NO: 75806 - RNA, 23 nt, Artificial Sequence
  Synthetic
uaaaucccaacaaaacaaaaaga

SEQ ID NO: 75807 - RNA, 24 nt, Artificial Sequence
  Synthetic
uuaaaucccaacaaaacaaaaaga

SEQ ID NO: 75808 - RNA, 18 nt, Artificial Sequence
  Synthetic
agacuguuuguuuaaaga

SEQ ID NO: 75809 - RNA, 19 nt, Artificial Sequence
  Synthetic
aagacuguuuguuuaaaga

SEQ ID NO: 75810 - RNA, 20 nt, Artificial Sequence
  Synthetic
aaagacuguuuguuuaaaga

SEQ ID NO: 75811 - RNA, 21 nt, Artificial Sequence
  Synthetic
caaagacuguuuguuuaaaga

SEQ ID NO: 75812 - RNA, 22 nt, Artificial Sequence
  Synthetic
ucaaagacuguuuguuuaaaga

SEQ ID NO: 75813 - RNA, 23 nt, Artificial Sequence
  Synthetic
uucaaagacuguuuguuuaaaga

SEQ ID NO: 75814 - RNA, 24 nt, Artificial Sequence
  Synthetic
cuucaaagacuguuuguuuaaaga

SEQ ID NO: 75815 - RNA, 18 nt, Artificial Sequence
  Synthetic
guaaaugaaaaacgaaga

SEQ ID NO: 75816 - RNA, 19 nt, Artificial Sequence
  Synthetic
aguaaaugaaaaacgaaga

SEQ ID NO: 75817 - RNA, 20 nt, Artificial Sequence
  Synthetic
caguaaaugaaaaacgaaga

SEQ ID NO: 75818 - RNA, 21 nt, Artificial Sequence
  Synthetic
acaguaaaugaaaaacgaaga

SEQ ID NO: 75819 - RNA, 22 nt, Artificial Sequence
  Synthetic
aacaguaaaugaaaaacgaaga

SEQ ID NO: 75820 - RNA, 23 nt, Artificial Sequence
  Synthetic
uaacaguaaaugaaaaacgaaga

SEQ ID NO: 75821 - RNA, 24 nt, Artificial Sequence
  Synthetic
cuaacaguaaaugaaaaacgaaga

SEQ ID NO: 75822 - RNA, 18 nt, Artificial Sequence
  Synthetic
acuguuguuagacgaaga

SEQ ID NO: 75823 - RNA, 19 nt, Artificial Sequence
  Synthetic
uacuguuguuagacgaaga

SEQ ID NO: 75824 - RNA, 20 nt, Artificial Sequence
  Synthetic
  misc_feature (1)..(1): n is a, c, g, or u
nuacuguuguuagacgaaga

SEQ ID NO: 75825 - RNA, 21 nt, Artificial Sequence
  Synthetic
  misc_feature (2)..(2): n is a, c, g, or u
anuacuguuguuagacgaaga

SEQ ID NO: 75826 - RNA, 22 nt, Artificial Sequence
  Synthetic
  misc_feature (3)..(3): n is a, c, g, or u
ganuacuguuguuagacgaaga

SEQ ID NO: 75827 - RNA, 23 nt, Artificial Sequence
  Synthetic
  misc_feature (4)..(4): n is a, c, g, or u
aganuacuguuguuagacgaaga

SEQ ID NO: 75828 - RNA, 24 nt, Artificial Sequence
  Synthetic
  misc_feature (5)..(5): n is a, c, g, or u
gaganuacuguuguuagacgaaga

SEQ ID NO: 75829 - RNA, 18 nt, Artificial Sequence
  Synthetic
  misc_feature (6)..(6): n is a, c, g, or u
gggugnaaauuuggaaga

SEQ ID NO: 75830 - RNA, 19 nt, Artificial Sequence
  Synthetic
  misc_feature (7)..(7): n is a, c, g, or u
ugggugnaaauuuggaaga

SEQ ID NO: 75831 - RNA, 20 nt, Artificial Sequence
  Synthetic
  misc_feature (8)..(8): n is a, c, g, or u
gugggugnaaauuuggaaga

SEQ ID NO: 75832 - RNA, 21 nt, Artificial Sequence
  Synthetic
  misc_feature (9)..(9): n is a, c, g, or u
ggugggugnaaauuuggaaga

SEQ ID NO: 75833 - RNA, 22 nt, Artificial Sequence
  Synthetic
  misc_feature (10)..(10): n is a, c, g, or u
gggugggugnaaauuuggaaga

SEQ ID NO: 75834 - RNA, 23 nt, Artificial Sequence
  Synthetic
  misc_feature (11)..(11): n is a, c, g, or u
ugggugggugnaaauuuggaaga

SEQ ID NO: 75835 - RNA, 24 nt, Artificial Sequence
  Synthetic
  misc_feature (12)..(12): n is a, c, g, or u
cugggugggugnaaauuuggaaga

SEQ ID NO: 75836 - RNA, 18 nt, Artificial Sequence
  Synthetic
gcucugcaggaucccaga

SEQ ID NO: 75837 - RNA, 19 nt, Artificial Sequence
  Synthetic
agcucugcaggaucccaga

SEQ ID NO: 75838 - RNA, 20 nt, Artificial Sequence
  Synthetic
aagcucugcaggaucccaga

SEQ ID NO: 75839 - RNA, 21 nt, Artificial Sequence
  Synthetic
caagcucugcaggaucccaga

SEQ ID NO: 75840 - RNA, 22 nt, Artificial Sequence
  Synthetic
ccaagcucugcaggaucccaga

SEQ ID NO: 75841 - RNA, 23 nt, Artificial Sequence
  Synthetic
accaagcucugcaggaucccaga

SEQ ID NO: 75842 - RNA, 24 nt, Artificial Sequence
  Synthetic
caccaagcucugcaggaucccaga

SEQ ID NO: 75843 - RNA, 18 nt, Artificial Sequence
  Synthetic
aaacaccagaaauccaga

SEQ ID NO: 75844 - RNA, 19 nt, Artificial Sequence
  Synthetic
caaacaccagaaauccaga

SEQ ID NO: 75845 - RNA, 20 nt, Artificial Sequence
  Synthetic
gcaaacaccagaaauccaga

SEQ ID NO: 75846 - RNA, 21 nt, Artificial Sequence
  Synthetic
agcaaacaccagaaauccaga

SEQ ID NO: 75847 - RNA, 22 nt, Artificial Sequence
  Synthetic
gagcaaacaccagaaauccaga

SEQ ID NO: 75848 - RNA, 23 nt, Artificial Sequence
  Synthetic
agagcaaacaccagaaauccaga

SEQ ID NO: 75849 - RNA, 24 nt, Artificial Sequence
  Synthetic
cagagcaaacaccagaaauccaga

SEQ ID NO: 75850 - RNA, 18 nt, Artificial Sequence
  Synthetic
acucccucgccucgcaga

SEQ ID NO: 75851 - RNA, 19 nt, Artificial Sequence
  Synthetic
aacucccucgccucgcaga

SEQ ID NO: 75852 - RNA, 20 nt, Artificial Sequence
  Synthetic
gaacucccucgccucgcaga

SEQ ID NO: 75853 - RNA, 21 nt, Artificial Sequence
  Synthetic
agaacucccucgccucgcaga

SEQ ID NO: 75854 - RNA, 22 nt, Artificial Sequence
  Synthetic
aagaacucccucgccucgcaga

SEQ ID NO: 75855 - RNA, 23 nt, Artificial Sequence
  Synthetic
gaagaacucccucgccucgcaga

SEQ ID NO: 75856 - RNA, 24 nt, Artificial Sequence
  Synthetic
agaagaacucccucgccucgcaga

SEQ ID NO: 75857 - RNA, 18 nt, Artificial Sequence
  Synthetic
  misc_feature (6)..(6): n is a, c, g, or u
ccacangaacacaucaga

SEQ ID NO: 75858 - RNA, 19 nt, Artificial Sequence
  Synthetic
  misc_feature (7)..(7): n is a, c, g, or u
accacangaacacaucaga

SEQ ID NO: 75859 - RNA, 20 nt, Artificial Sequence
  Synthetic
  misc_feature (8)..(8): n is a, c, g, or u
uaccacangaacacaucaga

SEQ ID NO: 75860 - RNA, 21 nt, Artificial Sequence
  Synthetic
  misc_feature (9)..(9): n is a, c, g, or u
uuaccacangaacacaucaga

SEQ ID NO: 75861 - RNA, 22 nt, Artificial Sequence
  Synthetic
  misc_feature (10)..(10): n is a, c, g, or u
auuaccacangaacacaucaga

SEQ ID NO: 75862 - RNA, 23 nt, Artificial Sequence
  Synthetic
  misc_feature (11)..(11): n is a, c, g, or u
cauuaccacangaacacaucaga

SEQ ID NO: 75863 - RNA, 24 nt, Artificial Sequence
  Synthetic
  misc_feature (12)..(12): n is a, c, g, or u
ucauuaccacangaacacaucaga

SEQ ID NO: 75864 - RNA, 18 nt, Artificial Sequence
  Synthetic
uuggauccagcauucaga

SEQ ID NO: 75865 - RNA, 19 nt, Artificial Sequence
  Synthetic
guuggauccagcauucaga

SEQ ID NO: 75866 - RNA, 20 nt, Artificial Sequence
  Synthetic
aguuggauccagcauucaga

SEQ ID NO: 75867 - RNA, 21 nt, Artificial Sequence
  Synthetic
caguuggauccagcauucaga

SEQ ID NO: 75868 - RNA, 22 nt, Artificial Sequence
  Synthetic
ccaguuggauccagcauucaga

SEQ ID NO: 75869 - RNA, 23 nt, Artificial Sequence
  Synthetic
accaguuggauccagcauucaga

SEQ ID NO: 75870 - RNA, 24 nt, Artificial Sequence
  Synthetic
caccaguuggauccagcauucaga

SEQ ID NO: 75871 - RNA, 18 nt, Artificial Sequence
  Synthetic
  misc_feature (1)..(1): n is a, c, g, or u
  misc_feature (10)..(10): n is a, c, g, or u
naaauauuunccccuaga

SEQ ID NO: 75872 - RNA, 19 nt, Artificial Sequence
  Synthetic
  misc_feature (2)..(2): n is a, c, g, or u
  misc_feature (11)..(11): n is a, c, g, or u
cnaaauauuunccccuaga

SEQ ID NO: 75873 - RNA, 20 nt, Artificial Sequence
  Synthetic
  misc_feature (3)..(3): n is a, c, g, or u
  misc_feature (12)..(12): n is a, c, g, or u
acnaaauauuunccccuaga

SEQ ID NO: 75874 - RNA, 21 nt, Artificial Sequence
  Synthetic
  misc_feature (4)..(4): n is a, c, g, or u
  misc_feature (13)..(13): n is a, c, g, or u
uacnaaauauuunccccuaga

SEQ ID NO: 75875 - RNA, 22 nt, Artificial Sequence
  Synthetic
  misc_feature (5)..(5): n is a, c, g, or u
  misc_feature (14)..(14): n is a, c, g, or u
cuacnaaauauuunccccuaga

SEQ ID NO: 75876 - RNA, 23 nt, Artificial Sequence
  Synthetic
  misc_feature (6)..(6): n is a, c, g, or u
  misc_feature (15)..(15): n is a, c, g, or u
ucuacnaaauauuunccccuaga

SEQ ID NO: 75877 - RNA, 24 nt, Artificial Sequence
  Synthetic
  misc_feature (7)..(7): n is a, c, g, or u
  misc_feature (16)..(16): n is a, c, g, or u
cucuacnaaauauuunccccuaga

SEQ ID NO: 75878 - RNA, 18 nt, Artificial Sequence
  Synthetic
agaggcagguccccuaga

SEQ ID NO: 75879 - RNA, 19 nt, Artificial Sequence
  Synthetic
aagaggcagguccccuaga

SEQ ID NO: 75880 - RNA, 20 nt, Artificial Sequence
  Synthetic
gaagaggcagguccccuaga

SEQ ID NO: 75881 - RNA, 21 nt, Artificial Sequence
  Synthetic
cgaagaggcagguccccuaga

SEQ ID NO: 75882 - RNA, 22 nt, Artificial Sequence
  Synthetic
acgaagaggcagguccccuaga

SEQ ID NO: 75883 - RNA, 23 nt, Artificial Sequence
  Synthetic
gacgaagaggcagguccccuaga

SEQ ID NO: 75884 - RNA, 24 nt, Artificial Sequence
  Synthetic
agacgaagaggcagguccccuaga

SEQ ID NO: 75885 - RNA, 18 nt, Artificial Sequence
  Synthetic
  misc_feature (2)..(2): n is a, c, g, or u
  misc_feature (14)..(14): n is a, c, g, or u
ungggggaggaganuaga

SEQ ID NO: 75886 - RNA, 19 nt, Artificial Sequence
  Synthetic
  misc_feature (3)..(3): n is a, c, g, or u
  misc_feature (15)..(15): n is a, c, g, or u
gungggggaggaganuaga

SEQ ID NO: 75887 - RNA, 20 nt, Artificial Sequence
  Synthetic
  misc_feature (4)..(4): n is a, c, g, or u
  misc_feature (16)..(16): n is a, c, g, or u
agungggggaggaganuaga

SEQ ID NO: 75888 - RNA, 21 nt, Artificial Sequence
  Synthetic
  misc_feature (5)..(5): n is a, c, g, or u
  misc_feature (17)..(17): n is a, c, g, or u
gagungggggaggaganuaga

SEQ ID NO: 75889 - RNA, 22 nt, Artificial Sequence
  Synthetic
  misc_feature (6)..(6): n is a, c, g, or u
  misc_feature (18)..(18): n is a, c, g, or u
ggagungggggaggaganuaga

SEQ ID NO: 75890 - RNA, 23 nt, Artificial Sequence
  Synthetic
  misc_feature (7)..(7): n is a, c, g, or u
  misc_feature (19)..(19): n is a, c, g, or u
aggagungggggaggaganuaga

SEQ ID NO: 75891 - RNA, 24 nt, Artificial Sequence
  Synthetic
  misc_feature (8)..(8): n is a, c, g, or u
  misc_feature (20)..(20): n is a, c, g, or u
gaggagungggggaggaganuaga

SEQ ID NO: 75892 - RNA, 18 nt, Artificial Sequence
  Synthetic
  misc_feature (5)..(5): n is a, c, g, or u
gaganuacuguuguuaga

SEQ ID NO: 75893 - RNA, 19 nt, Artificial Sequence
  Synthetic
  misc_feature (6)..(6): n is a, c, g, or u
ggaganuacuguuguuaga

SEQ ID NO: 75894 - RNA, 20 nt, Artificial Sequence
  Synthetic
  misc_feature (7)..(7): n is a, c, g, or u
cggaganuacuguuguuaga

SEQ ID NO: 75895 - RNA, 21 nt, Artificial Sequence
  Synthetic
  misc_feature (8)..(8): n is a, c, g, or u
ccggaganuacuguuguuaga

SEQ ID NO: 75896 - RNA, 22 nt, Artificial Sequence
  Synthetic
  misc_feature (9)..(9): n is a, c, g, or u
uccggaganuacuguuguuaga

SEQ ID NO: 75897 - RNA, 23 nt, Artificial Sequence
  Synthetic
  misc_feature (10)..(10): n is a, c, g, or u
uuccggaganuacuguuguuaga

SEQ ID NO: 75898 - RNA, 24 nt, Artificial Sequence
  Synthetic
  misc_feature (11)..(11): n is a, c, g, or u
cuuccggaganuacuguuguuaga

SEQ ID NO: 75899 - RNA, 18 nt, Artificial Sequence
  Synthetic
  misc_feature (2)..(2): n is a, c, g, or u
anuacuguuguuagacga

SEQ ID NO: 75900 - RNA, 19 nt, Artificial Sequence
  Synthetic
  misc_feature (3)..(3): n is a, c, g, or u
ganuacuguuguuagacga

SEQ ID NO: 75901 - RNA, 20 nt, Artificial Sequence
  Synthetic
  misc_feature (4)..(4): n is a, c, g, or u
aganuacuguuguuagacga

SEQ ID NO: 75902 - RNA, 21 nt, Artificial Sequence
  Synthetic
  misc_feature (5)..(5): n is a, c, g, or u
gaganuacuguuguuagacga

SEQ ID NO: 75903 - RNA, 22 nt, Artificial Sequence
  Synthetic
  misc_feature (6)..(6): n is a, c, g, or u
ggaganuacuguuguuagacga

SEQ ID NO: 75904 - RNA, 23 nt, Artificial Sequence
  Synthetic
  misc_feature (7)..(7): n is a, c, g, or u
cggaganuacuguuguuagacga

SEQ ID NO: 75905 - RNA, 24 nt, Artificial Sequence
  Synthetic
  misc_feature (8)..(8): n is a, c, g, or u
ccggaganuacuguuguuagacga

SEQ ID NO: 75906 - RNA, 18 nt, Artificial Sequence
  Synthetic
uuggacggucccucucga

SEQ ID NO: 75907 - RNA, 19 nt, Artificial Sequence
  Synthetic
cuuggacggucccucucga

SEQ ID NO: 75908 - RNA, 20 nt, Artificial Sequence
  Synthetic
ucuuggacggucccucucga

SEQ ID NO: 75909 - RNA, 21 nt, Artificial Sequence
  Synthetic
uucuuggacggucccucucga

SEQ ID NO: 75910 - RNA, 22 nt, Artificial Sequence
  Synthetic
uuucuuggacggucccucucga

SEQ ID NO: 75911 - RNA, 23 nt, Artificial Sequence
  Synthetic
cuuucuuggacggucccucucga

SEQ ID NO: 75912 - RNA, 24 nt, Artificial Sequence
  Synthetic
gcuuucuuggacggucccucucga

SEQ ID NO: 75913 - RNA, 18 nt, Artificial Sequence
  Synthetic
cgucaaucuucucgagga

SEQ ID NO: 75914 - RNA, 19 nt, Artificial Sequence
  Synthetic
ucgucaaucuucucgagga

SEQ ID NO: 75915 - RNA, 20 nt, Artificial Sequence
  Synthetic
cucgucaaucuucucgagga

SEQ ID NO: 75916 - RNA, 21 nt, Artificial Sequence
  Synthetic
ucucgucaaucuucucgagga

SEQ ID NO: 75917 - RNA, 22 nt, Artificial Sequence
  Synthetic
aucucgucaaucuucucgagga

SEQ ID NO: 75918 - RNA, 23 nt, Artificial Sequence
  Synthetic
caucucgucaaucuucucgagga

SEQ ID NO: 75919 - RNA, 24 nt, Artificial Sequence
  Synthetic
ucaucucgucaaucuucucgagga

SEQ ID NO: 75920 - RNA, 18 nt, Artificial Sequence
  Synthetic
guuuaaagacugggagga

SEQ ID NO: 75921 - RNA, 19 nt, Artificial Sequence
  Synthetic
uguuuaaagacugggagga

SEQ ID NO: 75922 - RNA, 20 nt, Artificial Sequence
  Synthetic
uuguuuaaagacugggagga

SEQ ID NO: 75923 - RNA, 21 nt, Artificial Sequence
  Synthetic
uuuguuuaaagacugggagga

SEQ ID NO: 75924 - RNA, 22 nt, Artificial Sequence
  Synthetic
guuuguuuaaagacugggagga

SEQ ID NO: 75925 - RNA, 23 nt, Artificial Sequence
  Synthetic
uguuuguuuaaagacugggagga

SEQ ID NO: 75926 - RNA, 24 nt, Artificial Sequence
  Synthetic
cuguuuguuuaaagacugggagga

SEQ ID NO: 75927 - RNA, 18 nt, Artificial Sequence
  Synthetic
gaagccaacaagguagga

SEQ ID NO: 75928 - RNA, 19 nt, Artificial Sequence
  Synthetic
  misc_feature (1)..(1): n is a, c, g, or u
ngaagccaacaagguagga

SEQ ID NO: 75929 - RNA, 20 nt, Artificial Sequence
  Synthetic
  misc_feature (2)..(2): n is a, c, g, or u
cngaagccaacaagguagga

SEQ ID NO: 75930 - RNA, 21 nt, Artificial Sequence
  Synthetic
  misc_feature (3)..(3): n is a, c, g, or u
acngaagccaacaagguagga

SEQ ID NO: 75931 - RNA, 22 nt, Artificial Sequence
  Synthetic
  misc_feature (4)..(4): n is a, c, g, or u
gacngaagccaacaagguagga

SEQ ID NO: 75932 - RNA, 23 nt, Artificial Sequence
  Synthetic
  misc_feature (5)..(5): n is a, c, g, or u
ggacngaagccaacaagguagga

SEQ ID NO: 75933 - RNA, 24 nt, Artificial Sequence
  Synthetic
  misc_feature (6)..(6): n is a, c, g, or u
uggacngaagccaacaagguagga

SEQ ID NO: 75934 - RNA, 18 nt, Artificial Sequence
  Synthetic
cuguucaaaaccuucgga

SEQ ID NO: 75935 - RNA, 19 nt, Artificial Sequence
  Synthetic
gcuguucaaaaccuucgga

SEQ ID NO: 75936 - RNA, 20 nt, Artificial Sequence
  Synthetic
ugcuguucaaaaccuucgga

SEQ ID NO: 75937 - RNA, 21 nt, Artificial Sequence
  Synthetic
uugcuguucaaaaccuucgga

SEQ ID NO: 75938 - RNA, 22 nt, Artificial Sequence
  Synthetic
guugcuguucaaaaccuucgga

SEQ ID NO: 75939 - RNA, 23 nt, Artificial Sequence
  Synthetic
uguugcuguucaaaaccuucgga

SEQ ID NO: 75940 - RNA, 24 nt, Artificial Sequence
  Synthetic
auguugcuguucaaaaccuucgga

SEQ ID NO: 75941 - RNA, 18 nt, Artificial Sequence
  Synthetic
  misc_feature (12)..(12): n is a, c, g, or u
cugggaggagunggggga

SEQ ID NO: 75942 - RNA, 19 nt, Artificial Sequence
  Synthetic
  misc_feature (13)..(13): n is a, c, g, or u
acugggaggagunggggga

SEQ ID NO: 75943 - RNA, 20 nt, Artificial Sequence
  Synthetic
  misc_feature (14)..(14): n is a, c, g, or u
gacugggaggagunggggga

SEQ ID NO: 75944 - RNA, 21 nt, Artificial Sequence
  Synthetic
  misc_feature (15)..(15): n is a, c, g, or u
agacugggaggagunggggga

SEQ ID NO: 75945 - RNA, 22 nt, Artificial Sequence
  Synthetic
  misc_feature (16)..(16): n is a, c, g, or u
aagacugggaggagunggggga

SEQ ID NO: 75946 - RNA, 23 nt, Artificial Sequence
  Synthetic
  misc_feature (17)..(17): n is a, c, g, or u
aaagacugggaggagunggggga

SEQ ID NO: 75947 - RNA, 24 nt, Artificial Sequence
  Synthetic
  misc_feature (18)..(18): n is a, c, g, or u
uaaagacugggaggagunggggga

SEQ ID NO: 75948 - RNA, 18 nt, Artificial Sequence
  Synthetic
cggaaaauuccuauggga

SEQ ID NO: 75949 - RNA, 19 nt, Artificial Sequence
  Synthetic
ucggaaaauuccuauggga

SEQ ID NO: 75950 - RNA, 20 nt, Artificial Sequence
  Synthetic
uucggaaaauuccuauggga

SEQ ID NO: 75951 - RNA, 21 nt, Artificial Sequence
  Synthetic
uuucggaaaauuccuauggga

SEQ ID NO: 75952 - RNA, 22 nt, Artificial Sequence
  Synthetic
cuuucggaaaauuccuauggga

SEQ ID NO: 75953 - RNA, 23 nt, Artificial Sequence
  Synthetic
gcuuucggaaaauuccuauggga

SEQ ID NO: 75954 - RNA, 24 nt, Artificial Sequence
  Synthetic
ggcuuucggaaaauuccuauggga

SEQ ID NO: 75955 - RNA, 18 nt, Artificial Sequence
  Synthetic
gucaccuuauucuuggga

SEQ ID NO: 75956 - RNA, 19 nt, Artificial Sequence
  Synthetic
ggucaccuuauucuuggga

SEQ ID NO: 75957 - RNA, 20 nt, Artificial Sequence
  Synthetic
gggucaccuuauucuuggga

SEQ ID NO: 75958 - RNA, 21 nt, Artificial Sequence
  Synthetic
ugggucaccuuauucuuggga

SEQ ID NO: 75959 - RNA, 22 nt, Artificial Sequence
  Synthetic
  misc_feature (1)..(1): n is a, c, g, or u
nugggucaccuuauucuuggga

SEQ ID NO: 75960 - RNA, 23 nt, Artificial Sequence
  Synthetic
  misc_feature (2)..(2): n is a, c, g, or u
unugggucaccuuauucuuggga

SEQ ID NO: 75961 - RNA, 24 nt, Artificial Sequence
  Synthetic
  misc_feature (3)..(3): n is a, c, g, or u
uunugggucaccuuauucuuggga

SEQ ID NO: 75962 - RNA, 18 nt, Artificial Sequence
  Synthetic
ccaacaaagaccacugga

SEQ ID NO: 75963 - RNA, 19 nt, Artificial Sequence
  Synthetic
cccaacaaagaccacugga

SEQ ID NO: 75964 - RNA, 20 nt, Artificial Sequence
  Synthetic
ucccaacaaagaccacugga

SEQ ID NO: 75965 - RNA, 21 nt, Artificial Sequence
  Synthetic
aucccaacaaagaccacugga

SEQ ID NO: 75966 - RNA, 22 nt, Artificial Sequence
  Synthetic
aaucccaacaaagaccacugga

SEQ ID NO: 75967 - RNA, 23 nt, Artificial Sequence
  Synthetic
caaucccaacaaagaccacugga

SEQ ID NO: 75968 - RNA, 24 nt, Artificial Sequence
  Synthetic
acaaucccaacaaagaccacugga

SEQ ID NO: 75969 - RNA, 18 nt, Artificial Sequence
  Synthetic
gcucgcagcaggucugga

SEQ ID NO: 75970 - RNA, 19 nt, Artificial Sequence
  Synthetic
ugcucgcagcaggucugga

SEQ ID NO: 75971 - RNA, 20 nt, Artificial Sequence
  Synthetic
uugcucgcagcaggucugga

SEQ ID NO: 75972 - RNA, 21 nt, Artificial Sequence
  Synthetic
uuugcucgcagcaggucugga

SEQ ID NO: 75973 - RNA, 22 nt, Artificial Sequence
  Synthetic
uuuugcucgcagcaggucugga

SEQ ID NO: 75974 - RNA, 23 nt, Artificial Sequence
  Synthetic
guuuugcucgcagcaggucugga

SEQ ID NO: 75975 - RNA, 24 nt, Artificial Sequence
  Synthetic
uguuuugcucgcagcaggucugga

SEQ ID NO: 75976 - RNA, 18 nt, Artificial Sequence
  Synthetic
ucccgaccaccaguugga

SEQ ID NO: 75977 - RNA, 19 nt, Artificial Sequence
  Synthetic
uucccgaccaccaguugga

SEQ ID NO: 75978 - RNA, 20 nt, Artificial Sequence
  Synthetic
uuucccgaccaccaguugga

SEQ ID NO: 75979 - RNA, 21 nt, Artificial Sequence
  Synthetic
uuuucccgaccaccaguugga

SEQ ID NO: 75980 - RNA, 22 nt, Artificial Sequence
  Synthetic
uuuuucccgaccaccaguugga

SEQ ID NO: 75981 - RNA, 23 nt, Artificial Sequence
  Synthetic
uuuuuucccgaccaccaguugga

SEQ ID NO: 75982 - RNA, 24 nt, Artificial Sequence
  Synthetic
auuuuuucccgaccaccaguugga

SEQ ID NO: 75983 - RNA, 18 nt, Artificial Sequence
  Synthetic
ucuugucucacuuuugga

SEQ ID NO: 75984 - RNA, 19 nt, Artificial Sequence
  Synthetic
uucuugucucacuuuugga

SEQ ID NO: 75985 - RNA, 20 nt, Artificial Sequence
  Synthetic
uuucuugucucacuuuugga

SEQ ID NO: 75986 - RNA, 21 nt, Artificial Sequence
  Synthetic
auuucuugucucacuuuugga

SEQ ID NO: 75987 - RNA, 22 nt, Artificial Sequence
  Synthetic
cauuucuugucucacuuuugga

SEQ ID NO: 75988 - RNA, 23 nt, Artificial Sequence
  Synthetic
acauuucuugucucacuuuugga

SEQ ID NO: 75989 - RNA, 24 nt, Artificial Sequence
  Synthetic
cacauuucuugucucacuuuugga

SEQ ID NO: 75990 - RNA, 18 nt, Artificial Sequence
  Synthetic
gugccaaguguuugcuga

SEQ ID NO: 75991 - RNA, 19 nt, Artificial Sequence
  Synthetic
ugugccaaguguuugcuga

SEQ ID NO: 75992 - RNA, 20 nt, Artificial Sequence
  Synthetic
cugugccaaguguuugcuga

SEQ ID NO: 75993 - RNA, 21 nt, Artificial Sequence
  Synthetic
ucugugccaaguguuugcuga

SEQ ID NO: 75994 - RNA, 22 nt, Artificial Sequence
  Synthetic
gucugugccaaguguuugcuga

SEQ ID NO: 75995 - RNA, 23 nt, Artificial Sequence
  Synthetic
ggucugugccaaguguuugcuga

SEQ ID NO: 75996 - RNA, 24 nt, Artificial Sequence
  Synthetic
  misc_feature (1)..(1): n is a, c, g, or u
nggucugugccaaguguuugcuga

SEQ ID NO: 75997 - RNA, 18 nt, Artificial Sequence
  Synthetic
  misc_feature (7)..(7): n is a, c, g, or u
uguuaancggccuauuga

SEQ ID NO: 75998 - RNA, 19 nt, Artificial Sequence
  Synthetic
  misc_feature (8)..(8): n is a, c, g, or u
cuguuaancggccuauuga

SEQ ID NO: 75999 - RNA, 20 nt, Artificial Sequence
  Synthetic
  misc_feature (9)..(9): n is a, c, g, or u
ccuguuaancggccuauuga

SEQ ID NO: 76000 - RNA, 21 nt, Artificial Sequence
  Synthetic
  misc_feature (10)..(10): n is a, c, g, or u
cccuguuaancggccuauuga

SEQ ID NO: 76001 - RNA, 22 nt, Artificial Sequence
  Synthetic
  misc_feature (11)..(11): n is a, c, g, or u
ucccuguuaancggccuauuga

SEQ ID NO: 76002 - RNA, 23 nt, Artificial Sequence
  Synthetic
  misc_feature (12)..(12): n is a, c, g, or u
cucccuguuaancggccuauuga

SEQ ID NO: 76003 - RNA, 24 nt, Artificial Sequence
  Synthetic
  misc_feature (13)..(13): n is a, c, g, or u
acucccuguuaancggccuauuga

SEQ ID NO: 76004 - RNA, 18 nt, Artificial Sequence
  Synthetic
cgggguuuuucuuguuga

SEQ ID NO: 76005 - RNA, 19 nt, Artificial Sequence
  Synthetic
gcgggguuuuucuuguuga

SEQ ID NO: 76006 - RNA, 20 nt, Artificial Sequence
  Synthetic
ggcgggguuuuucuuguuga

SEQ ID NO: 76007 - RNA, 21 nt, Artificial Sequence
  Synthetic
aggcgggguuuuucuuguuga

SEQ ID NO: 76008 - RNA, 22 nt, Artificial Sequence
  Synthetic
caggcgggguuuuucuuguuga

SEQ ID NO: 76009 - RNA, 23 nt, Artificial Sequence
  Synthetic
acaggcgggguuuuucuuguuga

SEQ ID NO: 76010 - RNA, 24 nt, Artificial Sequence
  Synthetic
uacaggcgggguuuuucuuguuga

SEQ ID NO: 76011 - RNA, 18 nt, Artificial Sequence
  Synthetic
cuuucuguguaaacaaua

SEQ ID NO: 76012 - RNA, 19 nt, Artificial Sequence
  Synthetic
ccuuucuguguaaacaaua

SEQ ID NO: 76013 - RNA, 20 nt, Artificial Sequence
  Synthetic
gccuuucuguguaaacaaua

SEQ ID NO: 76014 - RNA, 21 nt, Artificial Sequence
  Synthetic
ggccuuucuguguaaacaaua

SEQ ID NO: 76015 - RNA, 22 nt, Artificial Sequence
  Synthetic
aggccuuucuguguaaacaaua

SEQ ID NO: 76016 - RNA, 23 nt, Artificial Sequence
  Synthetic
aaggccuuucuguguaaacaaua

SEQ ID NO: 76017 - RNA, 24 nt, Artificial Sequence
  Synthetic
caaggccuuucuguguaaacaaua

SEQ ID NO: 76018 - RNA, 18 nt, Artificial Sequence
  Synthetic
ugcccaaggucuuacaua

SEQ ID NO: 76019 - RNA, 19 nt, Artificial Sequence
  Synthetic
uugcccaaggucuuacaua

SEQ ID NO: 76020 - RNA, 20 nt, Artificial Sequence
  Synthetic
cuugcccaaggucuuacaua

SEQ ID NO: 76021 - RNA, 21 nt, Artificial Sequence
  Synthetic
ucuugcccaaggucuuacaua

SEQ ID NO: 76022 - RNA, 22 nt, Artificial Sequence
  Synthetic
aucuugcccaaggucuuacaua

SEQ ID NO: 76023 - RNA, 23 nt, Artificial Sequence
  Synthetic
aaucuugcccaaggucuuacaua

SEQ ID NO: 76024 - RNA, 24 nt, Artificial Sequence
  Synthetic
aaaucuugcccaaggucuuacaua

SEQ ID NO: 76025 - RNA, 18 nt, Artificial Sequence
  Synthetic
gaaggcgggcaucuuaua

SEQ ID NO: 76026 - RNA, 19 nt, Artificial Sequence
  Synthetic
ggaaggcgggcaucuuaua

SEQ ID NO: 76027 - RNA, 20 nt, Artificial Sequence
  Synthetic
uggaaggcgggcaucuuaua

SEQ ID NO: 76028 - RNA, 21 nt, Artificial Sequence
  Synthetic
auggaaggcgggcaucuuaua

SEQ ID NO: 76029 - RNA, 22 nt, Artificial Sequence
  Synthetic
uauggaaggcgggcaucuuaua

SEQ ID NO: 76030 - RNA, 23 nt, Artificial Sequence
  Synthetic
cuauggaaggcgggcaucuuaua

SEQ ID NO: 76031 - RNA, 24 nt, Artificial Sequence
  Synthetic
ccuauggaaggcgggcaucuuaua

SEQ ID NO: 76032 - RNA, 18 nt, Artificial Sequence
  Synthetic
guugguucuucuggacua

SEQ ID NO: 76033 - RNA, 19 nt, Artificial Sequence
  Synthetic
uguugguucuucuggacua

SEQ ID NO: 76034 - RNA, 20 nt, Artificial Sequence
  Synthetic
uuguugguucuucuggacua

SEQ ID NO: 76035 - RNA, 21 nt, Artificial Sequence
  Synthetic
cuuguugguucuucuggacua

SEQ ID NO: 76036 - RNA, 22 nt, Artificial Sequence
  Synthetic
ucuuguugguucuucuggacua

SEQ ID NO: 76037 - RNA, 23 nt, Artificial Sequence
  Synthetic
uucuuguugguucuucuggacua

SEQ ID NO: 76038 - RNA, 24 nt, Artificial Sequence
  Synthetic
cuucuuguugguucuucuggacua

SEQ ID NO: 76039 - RNA, 18 nt, Artificial Sequence
  Synthetic
uuaaaggucuuuguacua

SEQ ID NO: 76040 - RNA, 19 nt, Artificial Sequence
  Synthetic
auuaaaggucuuuguacua

SEQ ID NO: 76041 - RNA, 20 nt, Artificial Sequence
  Synthetic
gauuaaaggucuuuguacua

SEQ ID NO: 76042 - RNA, 21 nt, Artificial Sequence
  Synthetic
agauuaaaggucuuuguacua

SEQ ID NO: 76043 - RNA, 22 nt, Artificial Sequence
  Synthetic
uagauuaaaggucuuuguacua

SEQ ID NO: 76044 - RNA, 23 nt, Artificial Sequence
  Synthetic
  misc_feature (1)..(1): n is a, c, g, or u
nuagauuaaaggucuuuguacua

SEQ ID NO: 76045 - RNA, 24 nt, Artificial Sequence
  Synthetic
  misc_feature (2)..(2): n is a, c, g, or u
anuagauuaaaggucuuuguacua

SEQ ID NO: 76046 - RNA, 18 nt, Artificial Sequence
  Synthetic
cacuauuuacauacccua

SEQ ID NO: 76047 - RNA, 19 nt, Artificial Sequence
  Synthetic
acacuauuuacauacccua

SEQ ID NO: 76048 - RNA, 20 nt, Artificial Sequence
  Synthetic
gacacuauuuacauacccua

SEQ ID NO: 76049 - RNA, 21 nt, Artificial Sequence
  Synthetic
agacacuauuuacauacccua

SEQ ID NO: 76050 - RNA, 22 nt, Artificial Sequence
  Synthetic
cagacacuauuuacauacccua

SEQ ID NO: 76051 - RNA, 23 nt, Artificial Sequence
  Synthetic
ccagacacuauuuacauacccua

SEQ ID NO: 76052 - RNA, 24 nt, Artificial Sequence
  Synthetic
accagacacuauuuacauacccua

SEQ ID NO: 76053 - RNA, 18 nt, Artificial Sequence
  Synthetic
  misc_feature (3)..(3): n is a, c, g, or u
  misc_feature (12)..(12): n is a, c, g, or u
acnaaauauuunccccua

SEQ ID NO: 76054 - RNA, 19 nt, Artificial Sequence
  Synthetic
  misc_feature (4)..(4): n is a, c, g, or u
  misc_feature (13)..(13): n is a, c, g, or u
uacnaaauauuunccccua

SEQ ID NO: 76055 - RNA, 20 nt, Artificial Sequence
  Synthetic
  misc_feature (5)..(5): n is a, c, g, or u
  misc_feature (14)..(14): n is a, c, g, or u
cuacnaaauauuunccccua

SEQ ID NO: 76056 - RNA, 21 nt, Artificial Sequence
  Synthetic
  misc_feature (6)..(6): n is a, c, g, or u
  misc_feature (15)..(15): n is a, c, g, or u
ucuacnaaauauuunccccua

SEQ ID NO: 76057 - RNA, 22 nt, Artificial Sequence
  Synthetic
  misc_feature (7)..(7): n is a, c, g, or u
  misc_feature (16)..(16): n is a, c, g, or u
cucuacnaaauauuunccccua

SEQ ID NO: 76058 - RNA, 23 nt, Artificial Sequence
  Synthetic
  misc_feature (8)..(8): n is a, c, g, or u
  misc_feature (17)..(17): n is a, c, g, or u
ucucuacnaaauauuunccccua

SEQ ID NO: 76059 - RNA, 24 nt, Artificial Sequence
  Synthetic
  misc_feature (9)..(9): n is a, c, g, or u
  misc_feature (18)..(18): n is a, c, g, or u
aucucuacnaaauauuunccccua

SEQ ID NO: 76060 - RNA, 18 nt, Artificial Sequence
  Synthetic
gaagaggcagguccccua

SEQ ID NO: 76061 - RNA, 19 nt, Artificial Sequence
  Synthetic
cgaagaggcagguccccua

SEQ ID NO: 76062 - RNA, 20 nt, Artificial Sequence
  Synthetic
acgaagaggcagguccccua

SEQ ID NO: 76063 - RNA, 21 nt, Artificial Sequence
  Synthetic
gacgaagaggcagguccccua

SEQ ID NO: 76064 - RNA, 22 nt, Artificial Sequence
  Synthetic
agacgaagaggcagguccccua

SEQ ID NO: 76065 - RNA, 23 nt, Artificial Sequence
  Synthetic
uagacgaagaggcagguccccua

SEQ ID NO: 76066 - RNA, 24 nt, Artificial Sequence
  Synthetic
uuagacgaagaggcagguccccua

SEQ ID NO: 76067 - RNA, 18 nt, Artificial Sequence
  Synthetic
uaccugucuuuaauccua

SEQ ID NO: 76068 - RNA, 19 nt, Artificial Sequence
  Synthetic
auaccugucuuuaauccua

SEQ ID NO: 76069 - RNA, 20 nt, Artificial Sequence
  Synthetic
uauaccugucuuuaauccua

SEQ ID NO: 76070 - RNA, 21 nt, Artificial Sequence
  Synthetic
cuauaccugucuuuaauccua

SEQ ID NO: 76071 - RNA, 22 nt, Artificial Sequence
  Synthetic
acuauaccugucuuuaauccua

SEQ ID NO: 76072 - RNA, 23 nt, Artificial Sequence
  Synthetic
uacuauaccugucuuuaauccua

SEQ ID NO: 76073 - RNA, 24 nt, Artificial Sequence
  Synthetic
cuacuauaccugucuuuaauccua

SEQ ID NO: 76074 - RNA, 18 nt, Artificial Sequence
  Synthetic
gcuuucggaaaauuccua

SEQ ID NO: 76075 - RNA, 19 nt, Artificial Sequence
  Synthetic
ggcuuucggaaaauuccua

SEQ ID NO: 76076 - RNA, 20 nt, Artificial Sequence
  Synthetic
gggcuuucggaaaauuccua

SEQ ID NO: 76077 - RNA, 21 nt, Artificial Sequence
  Synthetic
ugggcuuucggaaaauuccua

SEQ ID NO: 76078 - RNA, 22 nt, Artificial Sequence
  Synthetic
augggcuuucggaaaauuccua

SEQ ID NO: 76079 - RNA, 23 nt, Artificial Sequence
  Synthetic
caugggcuuucggaaaauuccua

SEQ ID NO: 76080 - RNA, 24 nt, Artificial Sequence
  Synthetic
ucaugggcuuucggaaaauuccua

SEQ ID NO: 76081 - RNA, 18 nt, Artificial Sequence
  Synthetic
  misc_feature (2)..(3): n is a, c, g, or u
annuaaugacucuagcua

SEQ ID NO: 76082 - RNA, 19 nt, Artificial Sequence
  Synthetic
  misc_feature (3)..(4): n is a, c, g, or u
gannuaaugacucuagcua

SEQ ID NO: 76083 - RNA, 20 nt, Artificial Sequence
  Synthetic
  misc_feature (4)..(5): n is a, c, g, or u
ggannuaaugacucuagcua

SEQ ID NO: 76084 - RNA, 21 nt, Artificial Sequence
  Synthetic
  misc_feature (5)..(6): n is a, c, g, or u
gggannuaaugacucuagcua

SEQ ID NO: 76085 - RNA, 22 nt, Artificial Sequence
  Synthetic
  misc_feature (6)..(7): n is a, c, g, or u
ggggannuaaugacucuagcua

SEQ ID NO: 76086 - RNA, 23 nt, Artificial Sequence
  Synthetic
  misc_feature (7)..(8): n is a, c, g, or u
gggggannuaaugacucuagcua

SEQ ID NO: 76087 - RNA, 24 nt, Artificial Sequence
  Synthetic
  misc_feature (8)..(9): n is a, c, g, or u
ggggggannuaaugacucuagcua

SEQ ID NO: 76088 - RNA, 18 nt, Artificial Sequence
  Synthetic
augcguguauucaaucua

SEQ ID NO: 76089 - RNA, 19 nt, Artificial Sequence
  Synthetic
uaugcguguauucaaucua

SEQ ID NO: 76090 - RNA, 20 nt, Artificial Sequence
  Synthetic
guaugcguguauucaaucua

SEQ ID NO: 76091 - RNA, 21 nt, Artificial Sequence
  Synthetic
uguaugcguguauucaaucua

SEQ ID NO: 76092 - RNA, 22 nt, Artificial Sequence
  Synthetic
cuguaugcguguauucaaucua

SEQ ID NO: 76093 - RNA, 23 nt, Artificial Sequence
  Synthetic
ucuguaugcguguauucaaucua

SEQ ID NO: 76094 - RNA, 24 nt, Artificial Sequence
  Synthetic
cucuguaugcguguauucaaucua

SEQ ID NO: 76095 - RNA, 18 nt, Artificial Sequence
  Synthetic
acuucucucaauuuucua

SEQ ID NO: 76096 - RNA, 19 nt, Artificial Sequence
  Synthetic
gacuucucucaauuuucua

SEQ ID NO: 76097 - RNA, 20 nt, Artificial Sequence
  Synthetic
ggacuucucucaauuuucua

SEQ ID NO: 76098 - RNA, 21 nt, Artificial Sequence
  Synthetic
uggacuucucucaauuuucua

SEQ ID NO: 76099 - RNA, 22 nt, Artificial Sequence
  Synthetic
guggacuucucucaauuuucua

SEQ ID NO: 76100 - RNA, 23 nt, Artificial Sequence
  Synthetic
gguggacuucucucaauuuucua

SEQ ID NO: 76101 - RNA, 24 nt, Artificial Sequence
  Synthetic
ugguggacuucucucaauuuucua

SEQ ID NO: 76102 - RNA, 18 nt, Artificial Sequence
  Synthetic
guagguccucuaacagua

SEQ ID NO: 76103 - RNA, 19 nt, Artificial Sequence
  Synthetic
uguagguccucuaacagua

SEQ ID NO: 76104 - RNA, 20 nt, Artificial Sequence
  Synthetic
uuguagguccucuaacagua

SEQ ID NO: 76105 - RNA, 21 nt, Artificial Sequence
  Synthetic
uuuguagguccucuaacagua

SEQ ID NO: 76106 - RNA, 22 nt, Artificial Sequence
  Synthetic
auuuguagguccucuaacagua

SEQ ID NO: 76107 - RNA, 23 nt, Artificial Sequence
  Synthetic
aauuuguagguccucuaacagua

SEQ ID NO: 76108 - RNA, 24 nt, Artificial Sequence
  Synthetic
caauuuguagguccucuaacagua

SEQ ID NO: 76109 - RNA, 18 nt, Artificial Sequence
  Synthetic
gaucaucaaccaccagua

SEQ ID NO: 76110 - RNA, 19 nt, Artificial Sequence
  Synthetic
ggaucaucaaccaccagua

SEQ ID NO: 76111 - RNA, 20 nt, Artificial Sequence
  Synthetic
aggaucaucaaccaccagua

SEQ ID NO: 76112 - RNA, 21 nt, Artificial Sequence
  Synthetic
caggaucaucaaccaccagua

SEQ ID NO: 76113 - RNA, 22 nt, Artificial Sequence
  Synthetic
ccaggaucaucaaccaccagua

SEQ ID NO: 76114 - RNA, 23 nt, Artificial Sequence
  Synthetic
uccaggaucaucaaccaccagua

SEQ ID NO: 76115 - RNA, 24 nt, Artificial Sequence
  Synthetic
uuccaggaucaucaaccaccagua

SEQ ID NO: 76116 - RNA, 18 nt, Artificial Sequence
  Synthetic
cugcaggaucccagagua

SEQ ID NO: 76117 - RNA, 19 nt, Artificial Sequence
  Synthetic
ucugcaggaucccagagua

SEQ ID NO: 76118 - RNA, 20 nt, Artificial Sequence
  Synthetic
cucugcaggaucccagagua

SEQ ID NO: 76119 - RNA, 21 nt, Artificial Sequence
  Synthetic
gcucugcaggaucccagagua

SEQ ID NO: 76120 - RNA, 22 nt, Artificial Sequence
  Synthetic
agcucugcaggaucccagagua

SEQ ID NO: 76121 - RNA, 23 nt, Artificial Sequence
  Synthetic
aagcucugcaggaucccagagua

SEQ ID NO: 76122 - RNA, 24 nt, Artificial Sequence
  Synthetic
caagcucugcaggaucccagagua

SEQ ID NO: 76123 - RNA, 18 nt, Artificial Sequence
  Synthetic
  misc_feature (2)..(2): n is a, c, g, or u
unccccuagagaaaggua

SEQ ID NO: 76124 - RNA, 19 nt, Artificial Sequence
  Synthetic
  misc_feature (3)..(3): n is a, c, g, or u
uunccccuagagaaaggua

SEQ ID NO: 76125 - RNA, 20 nt, Artificial Sequence
  Synthetic
  misc_feature (4)..(4): n is a, c, g, or u
uuunccccuagagaaaggua

SEQ ID NO: 76126 - RNA, 21 nt, Artificial Sequence
  Synthetic
  misc_feature (5)..(5): n is a, c, g, or u
auuunccccuagagaaaggua

SEQ ID NO: 76127 - RNA, 22 nt, Artificial Sequence
  Synthetic
  misc_feature (6)..(6): n is a, c, g, or u
uauuunccccuagagaaaggua

SEQ ID NO: 76128 - RNA, 23 nt, Artificial Sequence
  Synthetic
  misc_feature (7)..(7): n is a, c, g, or u
auauuunccccuagagaaaggua

SEQ ID NO: 76129 - RNA, 24 nt, Artificial Sequence
  Synthetic
  misc_feature (8)..(8): n is a, c, g, or u
aauauuunccccuagagaaaggua

SEQ ID NO: 76130 - RNA, 18 nt, Artificial Sequence
  Synthetic
uauauggaugauguggua

SEQ ID NO: 76131 - RNA, 19 nt, Artificial Sequence
  Synthetic
uuauauggaugauguggua

SEQ ID NO: 76132 - RNA, 20 nt, Artificial Sequence
  Synthetic
guuauauggaugauguggua

SEQ ID NO: 76133 - RNA, 21 nt, Artificial Sequence
  Synthetic
aguuauauggaugauguggua

SEQ ID NO: 76134 - RNA, 22 nt, Artificial Sequence
  Synthetic
caguuauauggaugauguggua

SEQ ID NO: 76135 - RNA, 23 nt, Artificial Sequence
  Synthetic
ucaguuauauggaugauguggua

SEQ ID NO: 76136 - RNA, 24 nt, Artificial Sequence
  Synthetic
uucaguuauauggaugauguggua

SEQ ID NO: 76137 - RNA, 18 nt, Artificial Sequence
  Synthetic
  misc_feature (1)..(1): n is a, c, g, or u
nauuucauggguuaugua

SEQ ID NO: 76138 - RNA, 19 nt, Artificial Sequence
  Synthetic
  misc_feature (2)..(2): n is a, c, g, or u
anauuucauggguuaugua

SEQ ID NO: 76139 - RNA, 20 nt, Artificial Sequence
  Synthetic
  misc_feature (3)..(3): n is a, c, g, or u
uanauuucauggguuaugua

SEQ ID NO: 76140 - RNA, 21 nt, Artificial Sequence
  Synthetic
  misc_feature (4)..(4): n is a, c, g, or u
cuanauuucauggguuaugua

SEQ ID NO: 76141 - RNA, 22 nt, Artificial Sequence
  Synthetic
  misc_feature (5)..(5): n is a, c, g, or u
ccuanauuucauggguuaugua

SEQ ID NO: 76142 - RNA, 23 nt, Artificial Sequence
  Synthetic
  misc_feature (6)..(6): n is a, c, g, or u
cccuanauuucauggguuaugua

SEQ ID NO: 76143 - RNA, 24 nt, Artificial Sequence
  Synthetic
  misc_feature (7)..(7): n is a, c, g, or u
ucccuanauuucauggguuaugua

SEQ ID NO: 76144 - RNA, 18 nt, Artificial Sequence
  Synthetic
uaccgccucagcucugua

SEQ ID NO: 76145 - RNA, 19 nt, Artificial Sequence
  Synthetic
auaccgccucagcucugua

SEQ ID NO: 76146 - RNA, 20 nt, Artificial Sequence
  Synthetic
gauaccgccucagcucugua

SEQ ID NO: 76147 - RNA, 21 nt, Artificial Sequence
  Synthetic
agauaccgccucagcucugua

SEQ ID NO: 76148 - RNA, 22 nt, Artificial Sequence
  Synthetic
uagauaccgccucagcucugua

SEQ ID NO: 76149 - RNA, 23 nt, Artificial Sequence
  Synthetic
cuagauaccgccucagcucugua

SEQ ID NO: 76150 - RNA, 24 nt, Artificial Sequence
  Synthetic
ucuagauaccgccucagcucugua

SEQ ID NO: 76151 - RNA, 18 nt, Artificial Sequence
  Synthetic
agauuaaaggucuuugua

SEQ ID NO: 76152 - RNA, 19 nt, Artificial Sequence
  Synthetic
uagauuaaaggucuuugua

SEQ ID NO: 76153 - RNA, 20 nt, Artificial Sequence
  Synthetic
  misc_feature (1)..(1): n is a, c, g, or u
nuagauuaaaggucuuugua

SEQ ID NO: 76154 - RNA, 21 nt, Artificial Sequence
  Synthetic
  misc_feature (2)..(2): n is a, c, g, or u
anuagauuaaaggucuuugua

SEQ ID NO: 76155 - RNA, 22 nt, Artificial Sequence
  Synthetic
  misc_feature (3)..(3): n is a, c, g, or u
ganuagauuaaaggucuuugua

SEQ ID NO: 76156 - RNA, 23 nt, Artificial Sequence
  Synthetic
  misc_feature (4)..(4): n is a, c, g, or u
aganuagauuaaaggucuuugua

SEQ ID NO: 76157 - RNA, 24 nt, Artificial Sequence
  Synthetic
  misc_feature (5)..(5): n is a, c, g, or u
gaganuagauuaaaggucuuugua

SEQ ID NO: 76158 - RNA, 18 nt, Artificial Sequence
  Synthetic
agguauaaaaccuuauua

SEQ ID NO: 76159 - RNA, 19 nt, Artificial Sequence
  Synthetic
aagguauaaaaccuuauua

SEQ ID NO: 76160 - RNA, 20 nt, Artificial Sequence
  Synthetic
aaagguauaaaaccuuauua

SEQ ID NO: 76161 - RNA, 21 nt, Artificial Sequence
  Synthetic
gaaagguauaaaaccuuauua

SEQ ID NO: 76162 - RNA, 22 nt, Artificial Sequence
  Synthetic
agaaagguauaaaaccuuauua

SEQ ID NO: 76163 - RNA, 23 nt, Artificial Sequence
  Synthetic
gagaaagguauaaaaccuuauua

SEQ ID NO: 76164 - RNA, 24 nt, Artificial Sequence
  Synthetic
agagaaagguauaaaaccuuauua

SEQ ID NO: 76165 - RNA, 18 nt, Artificial Sequence
  Synthetic
  misc_feature (11)..(11): n is a, c, g, or u
ggucuggagcnaaacuua

SEQ ID NO: 76166 - RNA, 19 nt, Artificial Sequence
  Synthetic
  misc_feature (12)..(12): n is a, c, g, or u
aggucuggagcnaaacuua

SEQ ID NO: 76167 - RNA, 20 nt, Artificial Sequence
  Synthetic
  misc_feature (13)..(13): n is a, c, g, or u
caggucuggagcnaaacuua

SEQ ID NO: 76168 - RNA, 21 nt, Artificial Sequence
  Synthetic
  misc_feature (14)..(14): n is a, c, g, or u
gcaggucuggagcnaaacuua

SEQ ID NO: 76169 - RNA, 22 nt, Artificial Sequence
  Synthetic
  misc_feature (15)..(15): n is a, c, g, or u
agcaggucuggagcnaaacuua

SEQ ID NO: 76170 - RNA, 23 nt, Artificial Sequence
  Synthetic
  misc_feature (16)..(16): n is a, c, g, or u
cagcaggucuggagcnaaacuua

SEQ ID NO: 76171 - RNA, 24 nt, Artificial Sequence
  Synthetic
  misc_feature (17)..(17): n is a, c, g, or u
gcagcaggucuggagcnaaacuua

SEQ ID NO: 76172 - RNA, 18 nt, Artificial Sequence
  Synthetic
cacuuucucgccaacuua

SEQ ID NO: 76173 - RNA, 19 nt, Artificial Sequence
  Synthetic
ucacuuucucgccaacuua

SEQ ID NO: 76174 - RNA, 20 nt, Artificial Sequence
  Synthetic
uucacuuucucgccaacuua

SEQ ID NO: 76175 - RNA, 21 nt, Artificial Sequence
  Synthetic
uuucacuuucucgccaacuua

SEQ ID NO: 76176 - RNA, 22 nt, Artificial Sequence
  Synthetic
cuuucacuuucucgccaacuua

SEQ ID NO: 76177 - RNA, 23 nt, Artificial Sequence
  Synthetic
gcuuucacuuucucgccaacuua

SEQ ID NO: 76178 - RNA, 24 nt, Artificial Sequence
  Synthetic
ggcuuucacuuucucgccaacuua

SEQ ID NO: 76179 - RNA, 18 nt, Artificial Sequence
  Synthetic
cauggacauugacccuua

SEQ ID NO: 76180 - RNA, 19 nt, Artificial Sequence
  Synthetic
  misc_feature (1)..(1): n is a, c, g, or u
ncauggacauugacccuua

SEQ ID NO: 76181 - RNA, 20 nt, Artificial Sequence
  Synthetic
  misc_feature (2)..(2): n is a, c, g, or u
gncauggacauugacccuua

SEQ ID NO: 76182 - RNA, 21 nt, Artificial Sequence
  Synthetic
  misc_feature (3)..(3): n is a, c, g, or u
ggncauggacauugacccuua

SEQ ID NO: 76183 - RNA, 22 nt, Artificial Sequence
  Synthetic
  misc_feature (1)..(1): n is a, c, g, or u
  misc_feature (4)..(4): n is a, c, g, or u
nggncauggacauugacccuua

SEQ ID NO: 76184 - RNA, 23 nt, Artificial Sequence
  Synthetic
  misc_feature (2)..(2): n is a, c, g, or u
  misc_feature (5)..(5): n is a, c, g, or u
unggncauggacauugacccuua

SEQ ID NO: 76185 - RNA, 24 nt, Artificial Sequence
  Synthetic
  misc_feature (3)..(3): n is a, c, g, or u
  misc_feature (6)..(6): n is a, c, g, or u
uunggncauggacauugacccuua

SEQ ID NO: 76186 - RNA, 18 nt, Artificial Sequence
  Synthetic
uggaaggcgggcaucuua

SEQ ID NO: 76187 - RNA, 19 nt, Artificial Sequence
  Synthetic
auggaaggcgggcaucuua

SEQ ID NO: 76188 - RNA, 20 nt, Artificial Sequence
  Synthetic
uauggaaggcgggcaucuua

SEQ ID NO: 76189 - RNA, 21 nt, Artificial Sequence
  Synthetic
cuauggaaggcgggcaucuua

SEQ ID NO: 76190 - RNA, 22 nt, Artificial Sequence
  Synthetic
ccuauggaaggcgggcaucuua

SEQ ID NO: 76191 - RNA, 23 nt, Artificial Sequence
  Synthetic
cccuauggaaggcgggcaucuua

SEQ ID NO: 76192 - RNA, 24 nt, Artificial Sequence
  Synthetic
acccuauggaaggcgggcaucuua

SEQ ID NO: 76193 - RNA, 18 nt, Artificial Sequence
  Synthetic
aucuugcccaaggucuua

SEQ ID NO: 76194 - RNA, 19 nt, Artificial Sequence
  Synthetic
aaucuugcccaaggucuua

SEQ ID NO: 76195 - RNA, 20 nt, Artificial Sequence
  Synthetic
aaaucuugcccaaggucuua

SEQ ID NO: 76196 - RNA, 21 nt, Artificial Sequence
  Synthetic
caaaucuugcccaaggucuua

SEQ ID NO: 76197 - RNA, 22 nt, Artificial Sequence
  Synthetic
ccaaaucuugcccaaggucuua

SEQ ID NO: 76198 - RNA, 23 nt, Artificial Sequence
  Synthetic
accaaaucuugcccaaggucuua

SEQ ID NO: 76199 - RNA, 24 nt, Artificial Sequence
  Synthetic
caccaaaucuugcccaaggucuua

SEQ ID NO: 76200 - RNA, 18 nt, Artificial Sequence
  Synthetic
cugucuggcuuucaguua

SEQ ID NO: 76201 - RNA, 19 nt, Artificial Sequence
  Synthetic
acugucuggcuuucaguua

SEQ ID NO: 76202 - RNA, 20 nt, Artificial Sequence
  Synthetic
cacugucuggcuuucaguua

SEQ ID NO: 76203 - RNA, 21 nt, Artificial Sequence
  Synthetic
ccacugucuggcuuucaguua

SEQ ID NO: 76204 - RNA, 22 nt, Artificial Sequence
  Synthetic
cccacugucuggcuuucaguua

SEQ ID NO: 76205 - RNA, 23 nt, Artificial Sequence
  Synthetic
ccccacugucuggcuuucaguua

SEQ ID NO: 76206 - RNA, 24 nt, Artificial Sequence
  Synthetic
cccccacugucuggcuuucaguua

SEQ ID NO: 76207 - RNA, 18 nt, Artificial Sequence
  Synthetic
uuagaaaacucccuguua

SEQ ID NO: 76208 - RNA, 19 nt, Artificial Sequence
  Synthetic
uuuagaaaacucccuguua

SEQ ID NO: 76209 - RNA, 20 nt, Artificial Sequence
  Synthetic
uuuuagaaaacucccuguua

SEQ ID NO: 76210 - RNA, 21 nt, Artificial Sequence
  Synthetic
guuuuagaaaacucccuguua

SEQ ID NO: 76211 - RNA, 22 nt, Artificial Sequence
  Synthetic
uguuuuagaaaacucccuguua

SEQ ID NO: 76212 - RNA, 23 nt, Artificial Sequence
  Synthetic
cuguuuuagaaaacucccuguua

SEQ ID NO: 76213 - RNA, 24 nt, Artificial Sequence
  Synthetic
acuguuuuagaaaacucccuguua

SEQ ID NO: 76214 - RNA, 18 nt, Artificial Sequence
  Synthetic
  misc_feature (7)..(7): n is a, c, g, or u
cggaganuacuguuguua

SEQ ID NO: 76215 - RNA, 19 nt, Artificial Sequence
  Synthetic
  misc_feature (8)..(8): n is a, c, g, or u
ccggaganuacuguuguua

SEQ ID NO: 76216 - RNA, 20 nt, Artificial Sequence
  Synthetic
  misc_feature (9)..(9): n is a, c, g, or u
uccggaganuacuguuguua

SEQ ID NO: 76217 - RNA, 21 nt, Artificial Sequence
  Synthetic
  misc_feature (10)..(10): n is a, c, g, or u
uuccggaganuacuguuguua

SEQ ID NO: 76218 - RNA, 22 nt, Artificial Sequence
  Synthetic
  misc_feature (11)..(11): n is a, c, g, or u
cuuccggaganuacuguuguua

SEQ ID NO: 76219 - RNA, 23 nt, Artificial Sequence
  Synthetic
  misc_feature (12)..(12): n is a, c, g, or u
acuuccggaganuacuguuguua

SEQ ID NO: 76220 - RNA, 24 nt, Artificial Sequence
  Synthetic
  misc_feature (13)..(13): n is a, c, g, or u
cacuuccggaganuacuguuguua

SEQ ID NO: 76221 - RNA, 18 nt, Artificial Sequence
  Synthetic
acaaggugggaaauuuua

SEQ ID NO: 76222 - RNA, 19 nt, Artificial Sequence
  Synthetic
cacaaggugggaaauuuua

SEQ ID NO: 76223 - RNA, 20 nt, Artificial Sequence
  Synthetic
ucacaaggugggaaauuuua

SEQ ID NO: 76224 - RNA, 21 nt, Artificial Sequence
  Synthetic
cucacaaggugggaaauuuua

SEQ ID NO: 76225 - RNA, 22 nt, Artificial Sequence
  Synthetic
acucacaaggugggaaauuuua

SEQ ID NO: 76226 - RNA, 23 nt, Artificial Sequence
  Synthetic
gacucacaaggugggaaauuuua

SEQ ID NO: 76227 - RNA, 24 nt, Artificial Sequence
  Synthetic
ggacucacaaggugggaaauuuua

SEQ ID NO: 76228 - RNA, 18 nt, Artificial Sequence
  Synthetic
aaaucaaagacuguuuua

SEQ ID NO: 76229 - RNA, 19 nt, Artificial Sequence
  Synthetic
aaaaucaaagacuguuuua

SEQ ID NO: 76230 - RNA, 20 nt, Artificial Sequence
  Synthetic
gaaaaucaaagacuguuuua

SEQ ID NO: 76231 - RNA, 21 nt, Artificial Sequence
  Synthetic
ugaaaaucaaagacuguuuua

SEQ ID NO: 76232 - RNA, 22 nt, Artificial Sequence
  Synthetic
  misc_feature (1)..(1): n is a, c, g, or u
nugaaaaucaaagacuguuuua

SEQ ID NO: 76233 - RNA, 23 nt, Artificial Sequence
  Synthetic
  misc_feature (2)..(2): n is a, c, g, or u
anugaaaaucaaagacuguuuua

SEQ ID NO: 76234 - RNA, 24 nt, Artificial Sequence
  Synthetic
  misc_feature (3)..(3): n is a, c, g, or u
ganugaaaaucaaagacuguuuua

SEQ ID NO: 76235 - RNA, 18 nt, Artificial Sequence
  Synthetic
uuuaaaucccaacaaaac

SEQ ID NO: 76236 - RNA, 19 nt, Artificial Sequence
  Synthetic
auuuaaaucccaacaaaac

SEQ ID NO: 76237 - RNA, 20 nt, Artificial Sequence
  Synthetic
cauuuaaaucccaacaaaac

SEQ ID NO: 76238 - RNA, 21 nt, Artificial Sequence
  Synthetic
acauuuaaaucccaacaaaac

SEQ ID NO: 76239 - RNA, 22 nt, Artificial Sequence
  Synthetic
uacauuuaaaucccaacaaaac

SEQ ID NO: 76240 - RNA, 23 nt, Artificial Sequence
  Synthetic
auacauuuaaaucccaacaaaac

SEQ ID NO: 76241 - RNA, 24 nt, Artificial Sequence
  Synthetic
uauacauuuaaaucccaacaaaac

SEQ ID NO: 76242 - RNA, 18 nt, Artificial Sequence
  Synthetic
ccagcauucagagcaaac

SEQ ID NO: 76243 - RNA, 19 nt, Artificial Sequence
  Synthetic
uccagcauucagagcaaac

SEQ ID NO: 76244 - RNA, 20 nt, Artificial Sequence
  Synthetic
auccagcauucagagcaaac

SEQ ID NO: 76245 - RNA, 21 nt, Artificial Sequence
  Synthetic
gauccagcauucagagcaaac

SEQ ID NO: 76246 - RNA, 22 nt, Artificial Sequence
  Synthetic
ggauccagcauucagagcaaac

SEQ ID NO: 76247 - RNA, 23 nt, Artificial Sequence
  Synthetic
uggauccagcauucagagcaaac

SEQ ID NO: 76248 - RNA, 24 nt, Artificial Sequence
  Synthetic
uuggauccagcauucagagcaaac

SEQ ID NO: 76249 - RNA, 18 nt, Artificial Sequence
  Synthetic
ugggaccacaaucccaac

SEQ ID NO: 76250 - RNA, 19 nt, Artificial Sequence
  Synthetic
uugggaccacaaucccaac

SEQ ID NO: 76251 - RNA, 20 nt, Artificial Sequence
  Synthetic
auugggaccacaaucccaac

SEQ ID NO: 76252 - RNA, 21 nt, Artificial Sequence
  Synthetic
gauugggaccacaaucccaac

SEQ ID NO: 76253 - RNA, 22 nt, Artificial Sequence
  Synthetic
agauugggaccacaaucccaac

SEQ ID NO: 76254 - RNA, 23 nt, Artificial Sequence
  Synthetic
cagauugggaccacaaucccaac

SEQ ID NO: 76255 - RNA, 24 nt, Artificial Sequence
  Synthetic
ccagauugggaccacaaucccaac

SEQ ID NO: 76256 - RNA, 18 nt, Artificial Sequence
  Synthetic
ggggacccugcaccgaac

SEQ ID NO: 76257 - RNA, 19 nt, Artificial Sequence
  Synthetic
uggggacccugcaccgaac

SEQ ID NO: 76258 - RNA, 20 nt, Artificial Sequence
  Synthetic
uuggggacccugcaccgaac

SEQ ID NO: 76259 - RNA, 21 nt, Artificial Sequence
  Synthetic
auuggggacccugcaccgaac

SEQ ID NO: 76260 - RNA, 22 nt, Artificial Sequence
  Synthetic
gauuggggacccugcaccgaac

SEQ ID NO: 76261 - RNA, 23 nt, Artificial Sequence
  Synthetic
ggauuggggacccugcaccgaac

SEQ ID NO: 76262 - RNA, 24 nt, Artificial Sequence
  Synthetic
aggauuggggacccugcaccgaac

SEQ ID NO: 76263 - RNA, 18 nt, Artificial Sequence
  Synthetic
uggcuccaguuccggaac

SEQ ID NO: 76264 - RNA, 19 nt, Artificial Sequence
  Synthetic
guggcuccaguuccggaac

SEQ ID NO: 76265 - RNA, 20 nt, Artificial Sequence
  Synthetic
gguggcuccaguuccggaac

SEQ ID NO: 76266 - RNA, 21 nt, Artificial Sequence
  Synthetic
ugguggcuccaguuccggaac

SEQ ID NO: 76267 - RNA, 22 nt, Artificial Sequence
  Synthetic
cugguggcuccaguuccggaac

SEQ ID NO: 76268 - RNA, 23 nt, Artificial Sequence
  Synthetic
gcugguggcuccaguuccggaac

SEQ ID NO: 76269 - RNA, 24 nt, Artificial Sequence
  Synthetic
ugcugguggcuccaguuccggaac

SEQ ID NO: 76270 - RNA, 18 nt, Artificial Sequence
  Synthetic
caccuuauucuugggaac

SEQ ID NO: 76271 - RNA, 19 nt, Artificial Sequence
  Synthetic
ucaccuuauucuugggaac

SEQ ID NO: 76272 - RNA, 20 nt, Artificial Sequence
  Synthetic
gucaccuuauucuugggaac

SEQ ID NO: 76273 - RNA, 21 nt, Artificial Sequence
  Synthetic
ggucaccuuauucuugggaac

SEQ ID NO: 76274 - RNA, 22 nt, Artificial Sequence
  Synthetic
gggucaccuuauucuugggaac

SEQ ID NO: 76275 - RNA, 23 nt, Artificial Sequence
  Synthetic
ugggucaccuuauucuugggaac

SEQ ID NO: 76276 - RNA, 24 nt, Artificial Sequence
  Synthetic
  misc_feature (1)..(1): n is a, c, g, or u
nugggucaccuuauucuugggaac

SEQ ID NO: 76277 - RNA, 18 nt, Artificial Sequence
  Synthetic
ccugucuuuaauccuaac

SEQ ID NO: 76278 - RNA, 19 nt, Artificial Sequence
  Synthetic
accugucuuuaauccuaac

SEQ ID NO: 76279 - RNA, 20 nt, Artificial Sequence
  Synthetic
uaccugucuuuaauccuaac

SEQ ID NO: 76280 - RNA, 21 nt, Artificial Sequence
  Synthetic
auaccugucuuuaauccuaac

SEQ ID NO: 76281 - RNA, 22 nt, Artificial Sequence
  Synthetic
uauaccugucuuuaauccuaac

SEQ ID NO: 76282 - RNA, 23 nt, Artificial Sequence
  Synthetic
cuauaccugucuuuaauccuaac

SEQ ID NO: 76283 - RNA, 24 nt, Artificial Sequence
  Synthetic
acuauaccugucuuuaauccuaac

SEQ ID NO: 76284 - RNA, 18 nt, Artificial Sequence
  Synthetic
auuuguagguccucuaac

SEQ ID NO: 76285 - RNA, 19 nt, Artificial Sequence
  Synthetic
aauuuguagguccucuaac

SEQ ID NO: 76286 - RNA, 20 nt, Artificial Sequence
  Synthetic
caauuuguagguccucuaac

SEQ ID NO: 76287 - RNA, 21 nt, Artificial Sequence
  Synthetic
acaauuuguagguccucuaac

SEQ ID NO: 76288 - RNA, 22 nt, Artificial Sequence
  Synthetic
aacaauuuguagguccucuaac

SEQ ID NO: 76289 - RNA, 23 nt, Artificial Sequence
  Synthetic
gaacaauuuguagguccucuaac

SEQ ID NO: 76290 - RNA, 24 nt, Artificial Sequence
  Synthetic
ugaacaauuuguagguccucuaac

SEQ ID NO: 76291 - RNA, 18 nt, Artificial Sequence
  Synthetic
agcauucagagcaaacac

SEQ ID NO: 76292 - RNA, 19 nt, Artificial Sequence
  Synthetic
cagcauucagagcaaacac

SEQ ID NO: 76293 - RNA, 20 nt, Artificial Sequence
  Synthetic
ccagcauucagagcaaacac

SEQ ID NO: 76294 - RNA, 21 nt, Artificial Sequence
  Synthetic
uccagcauucagagcaaacac

SEQ ID NO: 76295 - RNA, 22 nt, Artificial Sequence
  Synthetic
auccagcauucagagcaaacac

SEQ ID NO: 76296 - RNA, 23 nt, Artificial Sequence
  Synthetic
gauccagcauucagagcaaacac

SEQ ID NO: 76297 - RNA, 24 nt, Artificial Sequence
  Synthetic
ggauccagcauucagagcaaacac

SEQ ID NO: 76298 - RNA, 18 nt, Artificial Sequence
  Synthetic
  misc_feature (12)..(12): n is a, c, g, or u
ucauuaccacangaacac

SEQ ID NO: 76299 - RNA, 19 nt, Artificial Sequence
  Synthetic
  misc_feature (1)..(1): n is a, c, g, or u
  misc_feature (13)..(13): n is a, c, g, or u
nucauuaccacangaacac

SEQ ID NO: 76300 - RNA, 20 nt, Artificial Sequence
  Synthetic
  misc_feature (2)..(2): n is a, c, g, or u
  misc_feature (14)..(14): n is a, c, g, or u
gnucauuaccacangaacac

SEQ ID NO: 76301 - RNA, 21 nt, Artificial Sequence
  Synthetic
  misc_feature (3)..(3): n is a, c, g, or u
  misc_feature (15)..(15): n is a, c, g, or u
ggnucauuaccacangaacac

SEQ ID NO: 76302 - RNA, 22 nt, Artificial Sequence
  Synthetic
  misc_feature (4)..(4): n is a, c, g, or u
  misc_feature (16)..(16): n is a, c, g, or u
gggnucauuaccacangaacac

SEQ ID NO: 76303 - RNA, 23 nt, Artificial Sequence
  Synthetic
  misc_feature (5)..(5): n is a, c, g, or u
  misc_feature (17)..(17): n is a, c, g, or u
ggggnucauuaccacangaacac

SEQ ID NO: 76304 - RNA, 24 nt, Artificial Sequence
  Synthetic
  misc_feature (6)..(6): n is a, c, g, or u
  misc_feature (18)..(18): n is a, c, g, or u
uggggnucauuaccacangaacac

SEQ ID NO: 76305 - RNA, 18 nt, Artificial Sequence
  Synthetic
ggguucacucccccacac

SEQ ID NO: 76306 - RNA, 19 nt, Artificial Sequence
  Synthetic
  misc_feature (1)..(1): n is a, c, g, or u
nggguucacucccccacac

SEQ ID NO: 76307 - RNA, 20 nt, Artificial Sequence
  Synthetic
  misc_feature (2)..(2): n is a, c, g, or u
cnggguucacucccccacac

SEQ ID NO: 76308 - RNA, 21 nt, Artificial Sequence
  Synthetic
  misc_feature (3)..(3): n is a, c, g, or u
ccnggguucacucccccacac

SEQ ID NO: 76309 - RNA, 22 nt, Artificial Sequence
  Synthetic
  misc_feature (4)..(4): n is a, c, g, or u
gccnggguucacucccccacac

SEQ ID NO: 76310 - RNA, 23 nt, Artificial Sequence
  Synthetic
  misc_feature (5)..(5): n is a, c, g, or u
ggccnggguucacucccccacac

SEQ ID NO: 76311 - RNA, 24 nt, Artificial Sequence
  Synthetic
  misc_feature (6)..(6): n is a, c, g, or u
gggccnggguucacucccccacac

SEQ ID NO: 76312 - RNA, 18 nt, Artificial Sequence
  Synthetic
acgucgcauggagaccac

SEQ ID NO: 76313 - RNA, 19 nt, Artificial Sequence
  Synthetic
cacgucgcauggagaccac

SEQ ID NO: 76314 - RNA, 20 nt, Artificial Sequence
  Synthetic
gcacgucgcauggagaccac

SEQ ID NO: 76315 - RNA, 21 nt, Artificial Sequence
  Synthetic
ugcacgucgcauggagaccac

SEQ ID NO: 76316 - RNA, 22 nt, Artificial Sequence
  Synthetic
cugcacgucgcauggagaccac

SEQ ID NO: 76317 - RNA, 23 nt, Artificial Sequence
  Synthetic
ucugcacgucgcauggagaccac

SEQ ID NO: 76318 - RNA, 24 nt, Artificial Sequence
  Synthetic
cucugcacgucgcauggagaccac

SEQ ID NO: 76319 - RNA, 18 nt, Artificial Sequence
  Synthetic
  misc_feature (8)..(8): n is a, c, g, or u
guuggggnucauuaccac

SEQ ID NO: 76320 - RNA, 19 nt, Artificial Sequence
  Synthetic
  misc_feature (9)..(9): n is a, c, g, or u
aguuggggnucauuaccac

SEQ ID NO: 76321 - RNA, 20 nt, Artificial Sequence
  Synthetic
  misc_feature (10)..(10): n is a, c, g, or u
aaguuggggnucauuaccac

SEQ ID NO: 76322 - RNA, 21 nt, Artificial Sequence
  Synthetic
  misc_feature (11)..(11): n is a, c, g, or u
gaaguuggggnucauuaccac

SEQ ID NO: 76323 - RNA, 22 nt, Artificial Sequence
  Synthetic
  misc_feature (12)..(12): n is a, c, g, or u
ggaaguuggggnucauuaccac

SEQ ID NO: 76324 - RNA, 23 nt, Artificial Sequence
  Synthetic
  misc_feature (13)..(13): n is a, c, g, or u
uggaaguuggggnucauuaccac

SEQ ID NO: 76325 - RNA, 24 nt, Artificial Sequence
  Synthetic
  misc_feature (14)..(14): n is a, c, g, or u
uuggaaguuggggnucauuaccac

SEQ ID NO: 76326 - RNA, 18 nt, Artificial Sequence
  Synthetic
  misc_feature (2)..(2): n is a, c, g, or u
cnggguucacucccccac

SEQ ID NO: 76327 - RNA, 19 nt, Artificial Sequence
  Synthetic
  misc_feature (3)..(3): n is a, c, g, or u
ccnggguucacucccccac

SEQ ID NO: 76328 - RNA, 20 nt, Artificial Sequence
  Synthetic
  misc_feature (4)..(4): n is a, c, g, or u
gccnggguucacucccccac

SEQ ID NO: 76329 - RNA, 21 nt, Artificial Sequence
  Synthetic
  misc_feature (5)..(5): n is a, c, g, or u
ggccnggguucacucccccac

SEQ ID NO: 76330 - RNA, 22 nt, Artificial Sequence
  Synthetic
  misc_feature (6)..(6): n is a, c, g, or u
gggccnggguucacucccccac

SEQ ID NO: 76331 - RNA, 23 nt, Artificial Sequence
  Synthetic
  misc_feature (7)..(7): n is a, c, g, or u
cgggccnggguucacucccccac

SEQ ID NO: 76332 - RNA, 24 nt, Artificial Sequence
  Synthetic
  misc_feature (8)..(8): n is a, c, g, or u
ucgggccnggguucacucccccac

SEQ ID NO: 76333 - RNA, 18 nt, Artificial Sequence
  Synthetic
  misc_feature (5)..(5): n is a, c, g, or u
  misc_feature (11)..(11): n is a, c, g, or u
caccncaccanacugcac

SEQ ID NO: 76334 - RNA, 19 nt, Artificial Sequence
  Synthetic
  misc_feature (6)..(6): n is a, c, g, or u
  misc_feature (12)..(12): n is a, c, g, or u
ucaccncaccanacugcac

SEQ ID NO: 76335 - RNA, 20 nt, Artificial Sequence
  Synthetic
  misc_feature (7)..(7): n is a, c, g, or u
  misc_feature (13)..(13): n is a, c, g, or u
uucaccncaccanacugcac

SEQ ID NO: 76336 - RNA, 21 nt, Artificial Sequence
  Synthetic
  misc_feature (8)..(8): n is a, c, g, or u
  misc_feature (14)..(14): n is a, c, g, or u
guucaccncaccanacugcac

SEQ ID NO: 76337 - RNA, 22 nt, Artificial Sequence
  Synthetic
  misc_feature (9)..(9): n is a, c, g, or u
  misc_feature (15)..(15): n is a, c, g, or u
uguucaccncaccanacugcac

SEQ ID NO: 76338 - RNA, 23 nt, Artificial Sequence
  Synthetic
  misc_feature (10)..(10): n is a, c, g, or u
  misc_feature (16)..(16): n is a, c, g, or u
uuguucaccncaccanacugcac

SEQ ID NO: 76339 - RNA, 24 nt, Artificial Sequence
  Synthetic
  misc_feature (11)..(11): n is a, c, g, or u
  misc_feature (17)..(17): n is a, c, g, or u
auuguucaccncaccanacugcac

SEQ ID NO: 76340 - RNA, 18 nt, Artificial Sequence
  Synthetic
ccugauauucauuugcac

SEQ ID NO: 76341 - RNA, 19 nt, Artificial Sequence
  Synthetic
uccugauauucauuugcac

SEQ ID NO: 76342 - RNA, 20 nt, Artificial Sequence
  Synthetic
uuccugauauucauuugcac

SEQ ID NO: 76343 - RNA, 21 nt, Artificial Sequence
  Synthetic
uuuccugauauucauuugcac

SEQ ID NO: 76344 - RNA, 22 nt, Artificial Sequence
  Synthetic
uuuuccugauauucauuugcac

SEQ ID NO: 76345 - RNA, 23 nt, Artificial Sequence
  Synthetic
cuuuuccugauauucauuugcac

SEQ ID NO: 76346 - RNA, 24 nt, Artificial Sequence
  Synthetic
ucuuuuccugauauucauuugcac

SEQ ID NO: 76347 - RNA, 18 nt, Artificial Sequence
  Synthetic
gaacauggaaagcaucac

SEQ ID NO: 76348 - RNA, 19 nt, Artificial Sequence
  Synthetic
cgaacauggaaagcaucac

SEQ ID NO: 76349 - RNA, 20 nt, Artificial Sequence
  Synthetic
ccgaacauggaaagcaucac

SEQ ID NO: 76350 - RNA, 21 nt, Artificial Sequence
  Synthetic
accgaacauggaaagcaucac

SEQ ID NO: 76351 - RNA, 22 nt, Artificial Sequence
  Synthetic
caccgaacauggaaagcaucac

SEQ ID NO: 76352 - RNA, 23 nt, Artificial Sequence
  Synthetic
gcaccgaacauggaaagcaucac

SEQ ID NO: 76353 - RNA, 24 nt, Artificial Sequence
  Synthetic
ugcaccgaacauggaaagcaucac

SEQ ID NO: 76354 - RNA, 18 nt, Artificial Sequence
  Synthetic
gacuguuuguuuaaagac

SEQ ID NO: 76355 - RNA, 19 nt, Artificial Sequence
  Synthetic
agacuguuuguuuaaagac

SEQ ID NO: 76356 - RNA, 20 nt, Artificial Sequence
  Synthetic
aagacuguuuguuuaaagac

SEQ ID NO: 76357 - RNA, 21 nt, Artificial Sequence
  Synthetic
aaagacuguuuguuuaaagac

SEQ ID NO: 76358 - RNA, 22 nt, Artificial Sequence
  Synthetic
caaagacuguuuguuuaaagac

SEQ ID NO: 76359 - RNA, 23 nt, Artificial Sequence
  Synthetic
ucaaagacuguuuguuuaaagac

SEQ ID NO: 76360 - RNA, 24 nt, Artificial Sequence
  Synthetic
uucaaagacuguuuguuuaaagac

SEQ ID NO: 76361 - RNA, 18 nt, Artificial Sequence
  Synthetic
  misc_feature (4)..(4): n is a, c, g, or u
aganuacuguuguuagac

SEQ ID NO: 76362 - RNA, 19 nt, Artificial Sequence
  Synthetic
  misc_feature (5)..(5): n is a, c, g, or u
gaganuacuguuguuagac

SEQ ID NO: 76363 - RNA, 20 nt, Artificial Sequence
  Synthetic
  misc_feature (6)..(6): n is a, c, g, or u
ggaganuacuguuguuagac

SEQ ID NO: 76364 - RNA, 21 nt, Artificial Sequence
  Synthetic
  misc_feature (7)..(7): n is a, c, g, or u
cggaganuacuguuguuagac

SEQ ID NO: 76365 - RNA, 22 nt, Artificial Sequence
  Synthetic
  misc_feature (8)..(8): n is a, c, g, or u
ccggaganuacuguuguuagac

SEQ ID NO: 76366 - RNA, 23 nt, Artificial Sequence
  Synthetic
  misc_feature (9)..(9): n is a, c, g, or u
uccggaganuacuguuguuagac

SEQ ID NO: 76367 - RNA, 24 nt, Artificial Sequence
  Synthetic
  misc_feature (10)..(10): n is a, c, g, or u
uuccggaganuacuguuguuagac

SEQ ID NO: 76368 - RNA, 18 nt, Artificial Sequence
  Synthetic
gcaaugucaacgaccgac

SEQ ID NO: 76369 - RNA, 19 nt, Artificial Sequence
  Synthetic
  misc_feature (1)..(1): n is a, c, g, or u
ngcaaugucaacgaccgac

SEQ ID NO: 76370 - RNA, 20 nt, Artificial Sequence
  Synthetic
  misc_feature (2)..(2): n is a, c, g, or u
cngcaaugucaacgaccgac

SEQ ID NO: 76371 - RNA, 21 nt, Artificial Sequence
  Synthetic
  misc_feature (3)..(3): n is a, c, g, or u
ucngcaaugucaacgaccgac

SEQ ID NO: 76372 - RNA, 22 nt, Artificial Sequence
  Synthetic
  misc_feature (4)..(4): n is a, c, g, or u
cucngcaaugucaacgaccgac

SEQ ID NO: 76373 - RNA, 23 nt, Artificial Sequence
  Synthetic
  misc_feature (5)..(5): n is a, c, g, or u
ucucngcaaugucaacgaccgac

SEQ ID NO: 76374 - RNA, 24 nt, Artificial Sequence
  Synthetic
  misc_feature (6)..(6): n is a, c, g, or u
cucucngcaaugucaacgaccgac

SEQ ID NO: 76375 - RNA, 18 nt, Artificial Sequence
  Synthetic
  misc_feature (12)..(12): n is a, c, g, or u
ucugccguuccngccgac

SEQ ID NO: 76376 - RNA, 19 nt, Artificial Sequence
  Synthetic
  misc_feature (13)..(13): n is a, c, g, or u
gucugccguuccngccgac

SEQ ID NO: 76377 - RNA, 20 nt, Artificial Sequence
  Synthetic
  misc_feature (14)..(14): n is a, c, g, or u
cgucugccguuccngccgac

SEQ ID NO: 76378 - RNA, 21 nt, Artificial Sequence
  Synthetic
  misc_feature (15)..(15): n is a, c, g, or u
ccgucugccguuccngccgac

SEQ ID NO: 76379 - RNA, 22 nt, Artificial Sequence
  Synthetic
  misc_feature (16)..(16): n is a, c, g, or u
uccgucugccguuccngccgac

SEQ ID NO: 76380 - RNA, 23 nt, Artificial Sequence
  Synthetic
  misc_feature (17)..(17): n is a, c, g, or u
cuccgucugccguuccngccgac

SEQ ID NO: 76381 - RNA, 24 nt, Artificial Sequence
  Synthetic
  misc_feature (18)..(18): n is a, c, g, or u
ucuccgucugccguuccngccgac

SEQ ID NO: 76382 - RNA, 18 nt, Artificial Sequence
  Synthetic
  misc_feature (8)..(8): n is a, c, g, or u
  misc_feature (11)..(11): n is a, c, g, or u
uggcuuunggncauggac

SEQ ID NO: 76383 - RNA, 19 nt, Artificial Sequence
  Synthetic
  misc_feature (9)..(9): n is a, c, g, or u
  misc_feature (12)..(12): n is a, c, g, or u
guggcuuunggncauggac

SEQ ID NO: 76384 - RNA, 20 nt, Artificial Sequence
  Synthetic
  misc_feature (10)..(10): n is a, c, g, or u
  misc_feature (13)..(13): n is a, c, g, or u
gguggcuuunggncauggac

SEQ ID NO: 76385 - RNA, 21 nt, Artificial Sequence
  Synthetic
  misc_feature (11)..(11): n is a, c, g, or u
  misc_feature (14)..(14): n is a, c, g, or u
ggguggcuuunggncauggac

SEQ ID NO: 76386 - RNA, 22 nt, Artificial Sequence
  Synthetic
  misc_feature (12)..(12): n is a, c, g, or u
  misc_feature (15)..(15): n is a, c, g, or u
uggguggcuuunggncauggac

SEQ ID NO: 76387 - RNA, 23 nt, Artificial Sequence
  Synthetic
  misc_feature (13)..(13): n is a, c, g, or u
  misc_feature (16)..(16): n is a, c, g, or u
uuggguggcuuunggncauggac

SEQ ID NO: 76388 - RNA, 24 nt, Artificial Sequence
  Synthetic
  misc_feature (14)..(14): n is a, c, g, or u
  misc_feature (17)..(17): n is a, c, g, or u
cuuggguggcuuunggncauggac

SEQ ID NO: 76389 - RNA, 18 nt, Artificial Sequence
  Synthetic
caacaaagaccacuggac

SEQ ID NO: 76390 - RNA, 19 nt, Artificial Sequence
  Synthetic
ccaacaaagaccacuggac

SEQ ID NO: 76391 - RNA, 20 nt, Artificial Sequence
  Synthetic
cccaacaaagaccacuggac

SEQ ID NO: 76392 - RNA, 21 nt, Artificial Sequence
  Synthetic
ucccaacaaagaccacuggac

SEQ ID NO: 76393 - RNA, 22 nt, Artificial Sequence
  Synthetic
aucccaacaaagaccacuggac

SEQ ID NO: 76394 - RNA, 23 nt, Artificial Sequence
  Synthetic
aaucccaacaaagaccacuggac

SEQ ID NO: 76395 - RNA, 24 nt, Artificial Sequence
  Synthetic
caaucccaacaaagaccacuggac

SEQ ID NO: 76396 - RNA, 18 nt, Artificial Sequence
  Synthetic
  misc_feature (10)..(11): n is a, c, g, or u
cuggggggannuaaugac

SEQ ID NO: 76397 - RNA, 19 nt, Artificial Sequence
  Synthetic
  misc_feature (11)..(12): n is a, c, g, or u
gcuggggggannuaaugac

SEQ ID NO: 76398 - RNA, 20 nt, Artificial Sequence
  Synthetic
  misc_feature (12)..(13): n is a, c, g, or u
ugcuggggggannuaaugac

SEQ ID NO: 76399 - RNA, 21 nt, Artificial Sequence
  Synthetic
  misc_feature (13)..(14): n is a, c, g, or u
uugcuggggggannuaaugac

SEQ ID NO: 76400 - RNA, 22 nt, Artificial Sequence
  Synthetic
  misc_feature (14)..(15): n is a, c, g, or u
uuugcuggggggannuaaugac

SEQ ID NO: 76401 - RNA, 23 nt, Artificial Sequence
  Synthetic
  misc_feature (15)..(16): n is a, c, g, or u
cuuugcuggggggannuaaugac

SEQ ID NO: 76402 - RNA, 24 nt, Artificial Sequence
  Synthetic
  misc_feature (16)..(17): n is a, c, g, or u
ucuuugcuggggggannuaaugac

SEQ ID NO: 76403 - RNA, 18 nt, Artificial Sequence
  Synthetic
caaaaauccucacaauac

SEQ ID NO: 76404 - RNA, 19 nt, Artificial Sequence
  Synthetic
acaaaaauccucacaauac

SEQ ID NO: 76405 - RNA, 20 nt, Artificial Sequence
  Synthetic
gacaaaaauccucacaauac

SEQ ID NO: 76406 - RNA, 21 nt, Artificial Sequence
  Synthetic
ugacaaaaauccucacaauac

SEQ ID NO: 76407 - RNA, 22 nt, Artificial Sequence
  Synthetic
uugacaaaaauccucacaauac

SEQ ID NO: 76408 - RNA, 23 nt, Artificial Sequence
  Synthetic
guugacaaaaauccucacaauac

SEQ ID NO: 76409 - RNA, 24 nt, Artificial Sequence
  Synthetic
uguugacaaaaauccucacaauac

SEQ ID NO: 76410 - RNA, 18 nt, Artificial Sequence
  Synthetic
uccucugccgauccauac

SEQ ID NO: 76411 - RNA, 19 nt, Artificial Sequence
  Synthetic
cuccucugccgauccauac

SEQ ID NO: 76412 - RNA, 20 nt, Artificial Sequence
  Synthetic
gcuccucugccgauccauac

SEQ ID NO: 76413 - RNA, 21 nt, Artificial Sequence
  Synthetic
ggcuccucugccgauccauac

SEQ ID NO: 76414 - RNA, 22 nt, Artificial Sequence
  Synthetic
uggcuccucugccgauccauac

SEQ ID NO: 76415 - RNA, 23 nt, Artificial Sequence
  Synthetic
guggcuccucugccgauccauac

SEQ ID NO: 76416 - RNA, 24 nt, Artificial Sequence
  Synthetic
uguggcuccucugccgauccauac

SEQ ID NO: 76417 - RNA, 18 nt, Artificial Sequence
  Synthetic
accgaccuugaggcauac

SEQ ID NO: 76418 - RNA, 19 nt, Artificial Sequence
  Synthetic
gaccgaccuugaggcauac

SEQ ID NO: 76419 - RNA, 20 nt, Artificial Sequence
  Synthetic
cgaccgaccuugaggcauac

SEQ ID NO: 76420 - RNA, 18 nt, Artificial Sequence
  Synthetic
uaaagaauuuggagcuac

SEQ ID NO: 76421 - RNA, 19 nt, Artificial Sequence
  Synthetic
auaaagaauuuggagcuac

SEQ ID NO: 76422 - RNA, 20 nt, Artificial Sequence
  Synthetic
uauaaagaauuuggagcuac

SEQ ID NO: 76423 - RNA, 21 nt, Artificial Sequence
  Synthetic
uuauaaagaauuuggagcuac

SEQ ID NO: 76424 - RNA, 22 nt, Artificial Sequence
  Synthetic
cuuauaaagaauuuggagcuac

SEQ ID NO: 76425 - RNA, 23 nt, Artificial Sequence
  Synthetic
ccuuauaaagaauuuggagcuac

SEQ ID NO: 76426 - RNA, 24 nt, Artificial Sequence
  Synthetic
cccuuauaaagaauuuggagcuac

SEQ ID NO: 76427 - RNA, 18 nt, Artificial Sequence
  Synthetic
gauuaaaggucuuuguac

SEQ ID NO: 76428 - RNA, 19 nt, Artificial Sequence
  Synthetic
agauuaaaggucuuuguac

SEQ ID NO: 76429 - RNA, 20 nt, Artificial Sequence
  Synthetic
uagauuaaaggucuuuguac

SEQ ID NO: 76430 - RNA, 21 nt, Artificial Sequence
  Synthetic
  misc_feature (1)..(1): n is a, c, g, or u
nuagauuaaaggucuuuguac

SEQ ID NO: 76431 - RNA, 22 nt, Artificial Sequence
  Synthetic
  misc_feature (2)..(2): n is a, c, g, or u
anuagauuaaaggucuuuguac

SEQ ID NO: 76432 - RNA, 23 nt, Artificial Sequence
  Synthetic
  misc_feature (3)..(3): n is a, c, g, or u
ganuagauuaaaggucuuuguac

SEQ ID NO: 76433 - RNA, 24 nt, Artificial Sequence
  Synthetic
  misc_feature (4)..(4): n is a, c, g, or u
aganuagauuaaaggucuuuguac

SEQ ID NO: 76434 - RNA, 18 nt, Artificial Sequence
  Synthetic
ucuugcccaaggucuuac

SEQ ID NO: 76435 - RNA, 19 nt, Artificial Sequence
  Synthetic
aucuugcccaaggucuuac

SEQ ID NO: 76436 - RNA, 20 nt, Artificial Sequence
  Synthetic
aaucuugcccaaggucuuac

SEQ ID NO: 76437 - RNA, 21 nt, Artificial Sequence
  Synthetic
aaaucuugcccaaggucuuac

SEQ ID NO: 76438 - RNA, 22 nt, Artificial Sequence
  Synthetic
caaaucuugcccaaggucuuac

SEQ ID NO: 76439 - RNA, 23 nt, Artificial Sequence
  Synthetic
ccaaaucuugcccaaggucuuac

SEQ ID NO: 76440 - RNA, 24 nt, Artificial Sequence
  Synthetic
accaaaucuugcccaaggucuuac

SEQ ID NO: 76441 - RNA, 18 nt, Artificial Sequence
  Synthetic
auguugcuguucaaaacc

SEQ ID NO: 76442 - RNA, 19 nt, Artificial Sequence
  Synthetic
cauguugcuguucaaaacc

SEQ ID NO: 76443 - RNA, 20 nt, Artificial Sequence
  Synthetic
ucauguugcuguucaaaacc

SEQ ID NO: 76444 - RNA, 21 nt, Artificial Sequence
  Synthetic
cucauguugcuguucaaaacc

SEQ ID NO: 76445 - RNA, 22 nt, Artificial Sequence
  Synthetic
ccucauguugcuguucaaaacc

SEQ ID NO: 76446 - RNA, 23 nt, Artificial Sequence
  Synthetic
cccucauguugcuguucaaaacc

SEQ ID NO: 76447 - RNA, 24 nt, Artificial Sequence
  Synthetic
ucccucauguugcuguucaaaacc

SEQ ID NO: 76448 - RNA, 18 nt, Artificial Sequence
  Synthetic
cgucgcauggagaccacc

SEQ ID NO: 76449 - RNA, 19 nt, Artificial Sequence
  Synthetic
acgucgcauggagaccacc

SEQ ID NO: 76450 - RNA, 20 nt, Artificial Sequence
  Synthetic
cacgucgcauggagaccacc

SEQ ID NO: 76451 - RNA, 21 nt, Artificial Sequence
  Synthetic
gcacgucgcauggagaccacc

SEQ ID NO: 76452 - RNA, 22 nt, Artificial Sequence
  Synthetic
ugcacgucgcauggagaccacc

SEQ ID NO: 76453 - RNA, 23 nt, Artificial Sequence
  Synthetic
cugcacgucgcauggagaccacc

SEQ ID NO: 76454 - RNA, 24 nt, Artificial Sequence
  Synthetic
ucugcacgucgcauggagaccacc

SEQ ID NO: 76455 - RNA, 18 nt, Artificial Sequence
  Synthetic
uaccccaaucacuccacc

SEQ ID NO: 76456 - RNA, 19 nt, Artificial Sequence
  Synthetic
cuaccccaaucacuccacc

SEQ ID NO: 76457 - RNA, 20 nt, Artificial Sequence
  Synthetic
ccuaccccaaucacuccacc

SEQ ID NO: 76458 - RNA, 21 nt, Artificial Sequence
  Synthetic
gccuaccccaaucacuccacc

SEQ ID NO: 76459 - RNA, 22 nt, Artificial Sequence
  Synthetic
agccuaccccaaucacuccacc

SEQ ID NO: 76460 - RNA, 23 nt, Artificial Sequence
  Synthetic
cagccuaccccaaucacuccacc

SEQ ID NO: 76461 - RNA, 24 nt, Artificial Sequence
  Synthetic
gcagccuaccccaaucacuccacc

SEQ ID NO: 76462 - RNA, 18 nt, Artificial Sequence
  Synthetic
acaaucccaacaaagacc

SEQ ID NO: 76463 - RNA, 19 nt, Artificial Sequence
  Synthetic
cacaaucccaacaaagacc

SEQ ID NO: 76464 - RNA, 20 nt, Artificial Sequence
  Synthetic
ccacaaucccaacaaagacc

SEQ ID NO: 76465 - RNA, 21 nt, Artificial Sequence
  Synthetic
accacaaucccaacaaagacc

SEQ ID NO: 76466 - RNA, 22 nt, Artificial Sequence
  Synthetic
gaccacaaucccaacaaagacc

SEQ ID NO: 76467 - RNA, 23 nt, Artificial Sequence
  Synthetic
ggaccacaaucccaacaaagacc

SEQ ID NO: 76468 - RNA, 24 nt, Artificial Sequence
  Synthetic
gggaccacaaucccaacaaagacc

SEQ ID NO: 76469 - RNA, 18 nt, Artificial Sequence
  Synthetic
uccuccagcuuauagacc

SEQ ID NO: 76470 - RNA, 19 nt, Artificial Sequence
  Synthetic
cuccuccagcuuauagacc

SEQ ID NO: 76471 - RNA, 20 nt, Artificial Sequence
  Synthetic
acuccuccagcuuauagacc

SEQ ID NO: 76472 - RNA, 18 nt, Artificial Sequence
  Synthetic
caaugucaacgaccgacc

SEQ ID NO: 76473 - RNA, 19 nt, Artificial Sequence
  Synthetic
gcaaugucaacgaccgacc

SEQ ID NO: 76474 - RNA, 20 nt, Artificial Sequence
  Synthetic
  misc_feature (1)..(1): n is a, c, g, or u
ngcaaugucaacgaccgacc

SEQ ID NO: 76475 - RNA, 21 nt, Artificial Sequence
  Synthetic
  misc_feature (2)..(2): n is a, c, g, or u
cngcaaugucaacgaccgacc

SEQ ID NO: 76476 - RNA, 22 nt, Artificial Sequence
  Synthetic
  misc_feature (3)..(3): n is a, c, g, or u
ucngcaaugucaacgaccgacc

SEQ ID NO: 76477 - RNA, 23 nt, Artificial Sequence
  Synthetic
  misc_feature (4)..(4): n is a, c, g, or u
cucngcaaugucaacgaccgacc

SEQ ID NO: 76478 - RNA, 24 nt, Artificial Sequence
  Synthetic
  misc_feature (5)..(5): n is a, c, g, or u
ucucngcaaugucaacgaccgacc

SEQ ID NO: 76479 - RNA, 18 nt, Artificial Sequence
  Synthetic
  misc_feature (11)..(11): n is a, c, g, or u
cugccguuccngccgacc

SEQ ID NO: 76480 - RNA, 19 nt, Artificial Sequence
  Synthetic
  misc_feature (12)..(12): n is a, c, g, or u
ucugccguuccngccgacc

SEQ ID NO: 76481 - RNA, 20 nt, Artificial Sequence
  Synthetic
  misc_feature (13)..(13): n is a, c, g, or u
gucugccguuccngccgacc

SEQ ID NO: 76482 - RNA, 21 nt, Artificial Sequence
  Synthetic
  misc_feature (14)..(14): n is a, c, g, or u
cgucugccguuccngccgacc

SEQ ID NO: 76483 - RNA, 22 nt, Artificial Sequence
  Synthetic
  misc_feature (15)..(15): n is a, c, g, or u
ccgucugccguuccngccgacc

SEQ ID NO: 76484 - RNA, 23 nt, Artificial Sequence
  Synthetic
  misc_feature (16)..(16): n is a, c, g, or u
uccgucugccguuccngccgacc

SEQ ID NO: 76485 - RNA, 24 nt, Artificial Sequence
  Synthetic
  misc_feature (17)..(17): n is a, c, g, or u
cuccgucugccguuccngccgacc

SEQ ID NO: 76486 - RNA, 18 nt, Artificial Sequence
  Synthetic
aaaaauccucacaauacc

SEQ ID NO: 76487 - RNA, 19 nt, Artificial Sequence
  Synthetic
caaaaauccucacaauacc

SEQ ID NO: 76488 - RNA, 20 nt, Artificial Sequence
  Synthetic
acaaaaauccucacaauacc

SEQ ID NO: 76489 - RNA, 21 nt, Artificial Sequence
  Synthetic
gacaaaaauccucacaauacc

SEQ ID NO: 76490 - RNA, 22 nt, Artificial Sequence
  Synthetic
ugacaaaaauccucacaauacc

SEQ ID NO: 76491 - RNA, 23 nt, Artificial Sequence
  Synthetic
uugacaaaaauccucacaauacc

SEQ ID NO: 76492 - RNA, 24 nt, Artificial Sequence
  Synthetic
guugacaaaaauccucacaauacc

SEQ ID NO: 76493 - RNA, 18 nt, Artificial Sequence
  Synthetic
gacacuauuuacauaccc

SEQ ID NO: 76494 - RNA, 19 nt, Artificial Sequence
  Synthetic
agacacuauuuacauaccc

SEQ ID NO: 76495 - RNA, 20 nt, Artificial Sequence
  Synthetic
cagacacuauuuacauaccc

SEQ ID NO: 76496 - RNA, 21 nt, Artificial Sequence
  Synthetic
ccagacacuauuuacauaccc

SEQ ID NO: 76497 - RNA, 22 nt, Artificial Sequence
  Synthetic
accagacacuauuuacauaccc

SEQ ID NO: 76498 - RNA, 23 nt, Artificial Sequence
  Synthetic
aaccagacacuauuuacauaccc

SEQ ID NO: 76499 - RNA, 24 nt, Artificial Sequence
  Synthetic
aaaccagacacuauuuacauaccc

SEQ ID NO: 76500 - RNA, 18 nt, Artificial Sequence
  Synthetic
uuugcugaugcaaccccc

SEQ ID NO: 76501 - RNA, 19 nt, Artificial Sequence
  Synthetic
guuugcugaugcaaccccc

SEQ ID NO: 76502 - RNA, 20 nt, Artificial Sequence
  Synthetic
uguuugcugaugcaaccccc

SEQ ID NO: 76503 - RNA, 21 nt, Artificial Sequence
  Synthetic
guguuugcugaugcaaccccc

SEQ ID NO: 76504 - RNA, 22 nt, Artificial Sequence
  Synthetic
aguguuugcugaugcaaccccc

SEQ ID NO: 76505 - RNA, 23 nt, Artificial Sequence
  Synthetic
aaguguuugcugaugcaaccccc

SEQ ID NO: 76506 - RNA, 24 nt, Artificial Sequence
  Synthetic
caaguguuugcugaugcaaccccc

SEQ ID NO: 76507 - RNA, 18 nt, Artificial Sequence
  Synthetic
  misc_feature (5)..(5): n is a, c, g, or u
  misc_feature (14)..(14): n is a, c, g, or u
cuacnaaauauuuncccc

SEQ ID NO: 76508 - RNA, 19 nt, Artificial Sequence
  Synthetic
  misc_feature (6)..(6): n is a, c, g, or u
  misc_feature (15)..(15): n is a, c, g, or u
ucuacnaaauauuuncccc

SEQ ID NO: 76509 - RNA, 20 nt, Artificial Sequence
  Synthetic
  misc_feature (7)..(7): n is a, c, g, or u
  misc_feature (16)..(16): n is a, c, g, or u
cucuacnaaauauuuncccc

SEQ ID NO: 76510 - RNA, 21 nt, Artificial Sequence
  Synthetic
  misc_feature (8)..(8): n is a, c, g, or u
  misc_feature (17)..(17): n is a, c, g, or u
ucucuacnaaauauuuncccc

SEQ ID NO: 76511 - RNA, 22 nt, Artificial Sequence
  Synthetic
  misc_feature (9)..(9): n is a, c, g, or u
  misc_feature (18)..(18): n is a, c, g, or u
aucucuacnaaauauuuncccc

SEQ ID NO: 76512 - RNA, 23 nt, Artificial Sequence
  Synthetic
  misc_feature (10)..(10): n is a, c, g, or u
  misc_feature (19)..(19): n is a, c, g, or u
caucucuacnaaauauuuncccc

SEQ ID NO: 76513 - RNA, 24 nt, Artificial Sequence
  Synthetic
  misc_feature (11)..(11): n is a, c, g, or u
  misc_feature (20)..(20): n is a, c, g, or u
ccaucucuacnaaauauuuncccc

SEQ ID NO: 76514 - RNA, 18 nt, Artificial Sequence
  Synthetic
acgaagaggcaggucccc

SEQ ID NO: 76515 - RNA, 19 nt, Artificial Sequence
  Synthetic
gacgaagaggcaggucccc

SEQ ID NO: 76516 - RNA, 20 nt, Artificial Sequence
  Synthetic
agacgaagaggcaggucccc

SEQ ID NO: 76517 - RNA, 21 nt, Artificial Sequence
  Synthetic
uagacgaagaggcaggucccc

SEQ ID NO: 76518 - RNA, 22 nt, Artificial Sequence
  Synthetic
uuagacgaagaggcaggucccc

SEQ ID NO: 76519 - RNA, 23 nt, Artificial Sequence
  Synthetic
guuagacgaagaggcaggucccc

SEQ ID NO: 76520 - RNA, 24 nt, Artificial Sequence
  Synthetic
uguuagacgaagaggcaggucccc

SEQ ID NO: 76521 - RNA, 18 nt, Artificial Sequence
  Synthetic
ccuuuugggguggagccc

SEQ ID NO: 76522 - RNA, 19 nt, Artificial Sequence
  Synthetic
gccuuuugggguggagccc

SEQ ID NO: 76523 - RNA, 20 nt, Artificial Sequence
  Synthetic
ggccuuuugggguggagccc

SEQ ID NO: 76524 - RNA, 21 nt, Artificial Sequence
  Synthetic
aggccuuuugggguggagccc

SEQ ID NO: 76525 - RNA, 22 nt, Artificial Sequence
  Synthetic
gaggccuuuugggguggagccc

SEQ ID NO: 76526 - RNA, 23 nt, Artificial Sequence
  Synthetic
ggaggccuuuugggguggagccc

SEQ ID NO: 76527 - RNA, 24 nt, Artificial Sequence
  Synthetic
cggaggccuuuugggguggagccc

SEQ ID NO: 76528 - RNA, 18 nt, Artificial Sequence
  Synthetic
agaccaccgugaacgccc

SEQ ID NO: 76529 - RNA, 19 nt, Artificial Sequence
  Synthetic
gagaccaccgugaacgccc

SEQ ID NO: 76530 - RNA, 20 nt, Artificial Sequence
  Synthetic
ggagaccaccgugaacgccc

SEQ ID NO: 76531 - RNA, 21 nt, Artificial Sequence
  Synthetic
uggagaccaccgugaacgccc

SEQ ID NO: 76532 - RNA, 22 nt, Artificial Sequence
  Synthetic
auggagaccaccgugaacgccc

SEQ ID NO: 76533 - RNA, 23 nt, Artificial Sequence
  Synthetic
cauggagaccaccgugaacgccc

SEQ ID NO: 76534 - RNA, 24 nt, Artificial Sequence
  Synthetic
gcauggagaccaccgugaacgccc

SEQ ID NO: 76535 - RNA, 18 nt, Artificial Sequence
  Synthetic
accuuuaccccguugccc

SEQ ID NO: 76536 - RNA, 19 nt, Artificial Sequence
  Synthetic
aaccuuuaccccguugccc

SEQ ID NO: 76537 - RNA, 20 nt, Artificial Sequence
  Synthetic
gaaccuuuaccccguugccc

SEQ ID NO: 76538 - RNA, 21 nt, Artificial Sequence
  Synthetic
ugaaccuuuaccccguugccc

SEQ ID NO: 76539 - RNA, 22 nt, Artificial Sequence
  Synthetic
  misc_feature (1)..(1): n is a, c, g, or u
nugaaccuuuaccccguugccc

SEQ ID NO: 76540 - RNA, 23 nt, Artificial Sequence
  Synthetic
  misc_feature (1)..(2): n is a, c, g, or u
nnugaaccuuuaccccguugccc

SEQ ID NO: 76541 - RNA, 24 nt, Artificial Sequence
  Synthetic
  misc_feature (2)..(3): n is a, c, g, or u
annugaaccuuuaccccguugccc

SEQ ID NO: 76542 - RNA, 18 nt, Artificial Sequence
  Synthetic
  misc_feature (6)..(6): n is a, c, g, or u
  misc_feature (15)..(15): n is a, c, g, or u
ucuacnaaauauuunccc

SEQ ID NO: 76543 - RNA, 19 nt, Artificial Sequence
  Synthetic
  misc_feature (7)..(7): n is a, c, g, or u
  misc_feature (16)..(16): n is a, c, g, or u
cucuacnaaauauuunccc

SEQ ID NO: 76544 - RNA, 20 nt, Artificial Sequence
  Synthetic
  misc_feature (8)..(8): n is a, c, g, or u
  misc_feature (17)..(17): n is a, c, g, or u
ucucuacnaaauauuunccc

SEQ ID NO: 76545 - RNA, 21 nt, Artificial Sequence
  Synthetic
  misc_feature (9)..(9): n is a, c, g, or u
  misc_feature (18)..(18): n is a, c, g, or u
aucucuacnaaauauuunccc

SEQ ID NO: 76546 - RNA, 22 nt, Artificial Sequence
  Synthetic
  misc_feature (10)..(10): n is a, c, g, or u
  misc_feature (19)..(19): n is a, c, g, or u
caucucuacnaaauauuunccc

SEQ ID NO: 76547 - RNA, 23 nt, Artificial Sequence
  Synthetic
  misc_feature (11)..(11): n is a, c, g, or u
  misc_feature (20)..(20): n is a, c, g, or u
ccaucucuacnaaauauuunccc

SEQ ID NO: 76548 - RNA, 24 nt, Artificial Sequence
  Synthetic
  misc_feature (12)..(12): n is a, c, g, or u
  misc_feature (21)..(21): n is a, c, g, or u
cccaucucuacnaaauauuunccc

SEQ ID NO: 76549 - RNA, 18 nt, Artificial Sequence
  Synthetic
gguauacauuuaaauccc

SEQ ID NO: 76550 - RNA, 19 nt, Artificial Sequence
  Synthetic
ggguauacauuuaaauccc

SEQ ID NO: 76551 - RNA, 20 nt, Artificial Sequence
  Synthetic
uggguauacauuuaaauccc

SEQ ID NO: 76552 - RNA, 21 nt, Artificial Sequence
  Synthetic
uuggguauacauuuaaauccc

SEQ ID NO: 76553 - RNA, 22 nt, Artificial Sequence
  Synthetic
uuuggguauacauuuaaauccc

SEQ ID NO: 76554 - RNA, 23 nt, Artificial Sequence
  Synthetic
cuuuggguauacauuuaaauccc

SEQ ID NO: 76555 - RNA, 24 nt, Artificial Sequence
  Synthetic
ucuuuggguauacauuuaaauccc

SEQ ID NO: 76556 - RNA, 18 nt, Artificial Sequence
  Synthetic
gauugggaccacaauccc

SEQ ID NO: 76557 - RNA, 19 nt, Artificial Sequence
  Synthetic
agauugggaccacaauccc

SEQ ID NO: 76558 - RNA, 20 nt, Artificial Sequence
  Synthetic
cagauugggaccacaauccc

SEQ ID NO: 76559 - RNA, 21 nt, Artificial Sequence
  Synthetic
ccagauugggaccacaauccc

SEQ ID NO: 76560 - RNA, 22 nt, Artificial Sequence
  Synthetic
uccagauugggaccacaauccc

SEQ ID NO: 76561 - RNA, 23 nt, Artificial Sequence
  Synthetic
auccagauugggaccacaauccc

SEQ ID NO: 76562 - RNA, 24 nt, Artificial Sequence
  Synthetic
aauccagauugggaccacaauccc

SEQ ID NO: 76563 - RNA, 18 nt, Artificial Sequence
  Synthetic
guccuuugucuacguccc

SEQ ID NO: 76564 - RNA, 19 nt, Artificial Sequence
  Synthetic
cguccuuugucuacguccc

SEQ ID NO: 76565 - RNA, 20 nt, Artificial Sequence
  Synthetic
acguccuuugucuacguccc

SEQ ID NO: 76566 - RNA, 18 nt, Artificial Sequence
  Synthetic
gacgaagaggcagguccc

SEQ ID NO: 76567 - RNA, 19 nt, Artificial Sequence
  Synthetic
agacgaagaggcagguccc

SEQ ID NO: 76568 - RNA, 20 nt, Artificial Sequence
  Synthetic
uagacgaagaggcagguccc

SEQ ID NO: 76569 - RNA, 21 nt, Artificial Sequence
  Synthetic
uuagacgaagaggcagguccc

SEQ ID NO: 76570 - RNA, 22 nt, Artificial Sequence
  Synthetic
guuagacgaagaggcagguccc

SEQ ID NO: 76571 - RNA, 23 nt, Artificial Sequence
  Synthetic
uguuagacgaagaggcagguccc

SEQ ID NO: 76572 - RNA, 24 nt, Artificial Sequence
  Synthetic
uuguuagacgaagaggcagguccc

SEQ ID NO: 76573 - RNA, 18 nt, Artificial Sequence
  Synthetic
uguccuacuguucaagcc

SEQ ID NO: 76574 - RNA, 19 nt, Artificial Sequence
  Synthetic
auguccuacuguucaagcc

SEQ ID NO: 76575 - RNA, 20 nt, Artificial Sequence
  Synthetic
cauguccuacuguucaagcc

SEQ ID NO: 76576 - RNA, 21 nt, Artificial Sequence
  Synthetic
ucauguccuacuguucaagcc

SEQ ID NO: 76577 - RNA, 22 nt, Artificial Sequence
  Synthetic
uucauguccuacuguucaagcc

SEQ ID NO: 76578 - RNA, 23 nt, Artificial Sequence
  Synthetic
guucauguccuacuguucaagcc

SEQ ID NO: 76579 - RNA, 24 nt, Artificial Sequence
  Synthetic
uguucauguccuacuguucaagcc

SEQ ID NO: 76580 - RNA, 18 nt, Artificial Sequence
  Synthetic
  misc_feature (12)..(12): n is a, c, g, or u
gaccacuggacngaagcc

SEQ ID NO: 76581 - RNA, 19 nt, Artificial Sequence
  Synthetic
  misc_feature (13)..(13): n is a, c, g, or u
agaccacuggacngaagcc

SEQ ID NO: 76582 - RNA, 20 nt, Artificial Sequence
  Synthetic
  misc_feature (14)..(14): n is a, c, g, or u
aagaccacuggacngaagcc

SEQ ID NO: 76583 - RNA, 21 nt, Artificial Sequence
  Synthetic
  misc_feature (15)..(15): n is a, c, g, or u
aaagaccacuggacngaagcc

SEQ ID NO: 76584 - RNA, 22 nt, Artificial Sequence
  Synthetic
  misc_feature (16)..(16): n is a, c, g, or u
caaagaccacuggacngaagcc

SEQ ID NO: 76585 - RNA, 23 nt, Artificial Sequence
  Synthetic
  misc_feature (17)..(17): n is a, c, g, or u
acaaagaccacuggacngaagcc

SEQ ID NO: 76586 - RNA, 24 nt, Artificial Sequence
  Synthetic
  misc_feature (18)..(18): n is a, c, g, or u
aacaaagaccacuggacngaagcc

SEQ ID NO: 76587 - RNA, 18 nt, Artificial Sequence
  Synthetic
gccuuuugggguggagcc

SEQ ID NO: 76588 - RNA, 19 nt, Artificial Sequence
  Synthetic
ggccuuuugggguggagcc

SEQ ID NO: 76589 - RNA, 20 nt, Artificial Sequence
  Synthetic
aggccuuuugggguggagcc

SEQ ID NO: 76590 - RNA, 21 nt, Artificial Sequence
  Synthetic
gaggccuuuugggguggagcc

SEQ ID NO: 76591 - RNA, 22 nt, Artificial Sequence
  Synthetic
ggaggccuuuugggguggagcc

SEQ ID NO: 76592 - RNA, 23 nt, Artificial Sequence
  Synthetic
cggaggccuuuugggguggagcc

SEQ ID NO: 76593 - RNA, 24 nt, Artificial Sequence
  Synthetic
acggaggccuuuugggguggagcc

SEQ ID NO: 76594 - RNA, 18 nt, Artificial Sequence
  Synthetic
ggggcuuggccauaggcc

SEQ ID NO: 76595 - RNA, 19 nt, Artificial Sequence
  Synthetic
uggggcuuggccauaggcc

SEQ ID NO: 76596 - RNA, 20 nt, Artificial Sequence
  Synthetic
cuggggcuuggccauaggcc

SEQ ID NO: 76597 - RNA, 21 nt, Artificial Sequence
  Synthetic
gcuggggcuuggccauaggcc

SEQ ID NO: 76598 - RNA, 22 nt, Artificial Sequence
  Synthetic
ggcuggggcuuggccauaggcc

SEQ ID NO: 76599 - RNA, 23 nt, Artificial Sequence
  Synthetic
uggcuggggcuuggccauaggcc

SEQ ID NO: 76600 - RNA, 24 nt, Artificial Sequence
  Synthetic
cuggcuggggcuuggccauaggcc

SEQ ID NO: 76601 - RNA, 18 nt, Artificial Sequence
  Synthetic
acuggcuggggcuuggcc

SEQ ID NO: 76602 - RNA, 19 nt, Artificial Sequence
  Synthetic
cacuggcuggggcuuggcc

SEQ ID NO: 76603 - RNA, 20 nt, Artificial Sequence
  Synthetic
ccacuggcuggggcuuggcc

SEQ ID NO: 76604 - RNA, 21 nt, Artificial Sequence
  Synthetic
cccacuggcuggggcuuggcc

SEQ ID NO: 76605 - RNA, 22 nt, Artificial Sequence
  Synthetic
ccccacuggcuggggcuuggcc

SEQ ID NO: 76606 - RNA, 23 nt, Artificial Sequence
  Synthetic
cccccacuggcuggggcuuggcc

SEQ ID NO: 76607 - RNA, 24 nt, Artificial Sequence
  Synthetic
acccccacuggcuggggcuuggcc

SEQ ID NO: 76608 - RNA, 18 nt, Artificial Sequence
  Synthetic
gcucuguaucgggaugcc

SEQ ID NO: 76609 - RNA, 19 nt, Artificial Sequence
  Synthetic
agcucuguaucgggaugcc

SEQ ID NO: 76610 - RNA, 20 nt, Artificial Sequence
  Synthetic
cagcucuguaucgggaugcc

SEQ ID NO: 76611 - RNA, 18 nt, Artificial Sequence
  Synthetic
caugcuaaaaacauugcc

SEQ ID NO: 76612 - RNA, 19 nt, Artificial Sequence
  Synthetic
gcaugcuaaaaacauugcc

SEQ ID NO: 76613 - RNA, 20 nt, Artificial Sequence
  Synthetic
ggcaugcuaaaaacauugcc

SEQ ID NO: 76614 - RNA, 21 nt, Artificial Sequence
  Synthetic
aggcaugcuaaaaacauugcc

SEQ ID NO: 76615 - RNA, 22 nt, Artificial Sequence
  Synthetic
aaggcaugcuaaaaacauugcc

SEQ ID NO: 76616 - RNA, 23 nt, Artificial Sequence
  Synthetic
caaggcaugcuaaaaacauugcc

SEQ ID NO: 76617 - RNA, 24 nt, Artificial Sequence
  Synthetic
ucaaggcaugcuaaaaacauugcc

SEQ ID NO: 76618 - RNA, 18 nt, Artificial Sequence
  Synthetic
  misc_feature (7)..(7): n is a, c, g, or u
  misc_feature (16)..(16): n is a, c, g, or u
cucuacnaaauauuuncc

SEQ ID NO: 76619 - RNA, 19 nt, Artificial Sequence
  Synthetic
  misc_feature (8)..(8): n is a, c, g, or u
  misc_feature (17)..(17): n is a, c, g, or u
ucucuacnaaauauuuncc

SEQ ID NO: 76620 - RNA, 20 nt, Artificial Sequence
  Synthetic
  misc_feature (9)..(9): n is a, c, g, or u
  misc_feature (18)..(18): n is a, c, g, or u
aucucuacnaaauauuuncc

SEQ ID NO: 76621 - RNA, 21 nt, Artificial Sequence
  Synthetic
  misc_feature (10)..(10): n is a, c, g, or u
  misc_feature (19)..(19): n is a, c, g, or u
caucucuacnaaauauuuncc

SEQ ID NO: 76622 - RNA, 22 nt, Artificial Sequence
  Synthetic
  misc_feature (11)..(11): n is a, c, g, or u
  misc_feature (20)..(20): n is a, c, g, or u
ccaucucuacnaaauauuuncc

SEQ ID NO: 76623 - RNA, 23 nt, Artificial Sequence
  Synthetic
  misc_feature (12)..(12): n is a, c, g, or u
  misc_feature (21)..(21): n is a, c, g, or u
cccaucucuacnaaauauuuncc

SEQ ID NO: 76624 - RNA, 24 nt, Artificial Sequence
  Synthetic
  misc_feature (13)..(13): n is a, c, g, or u
  misc_feature (22)..(22): n is a, c, g, or u
ucccaucucuacnaaauauuuncc

SEQ ID NO: 76625 - RNA, 18 nt, Artificial Sequence
  Synthetic
ucauuccaccaccaaucc

SEQ ID NO: 76626 - RNA, 19 nt, Artificial Sequence
  Synthetic
aucauuccaccaccaaucc

SEQ ID NO: 76627 - RNA, 20 nt, Artificial Sequence
  Synthetic
aaucauuccaccaccaaucc

SEQ ID NO: 76628 - RNA, 21 nt, Artificial Sequence
  Synthetic
gaaucauuccaccaccaaucc

SEQ ID NO: 76629 - RNA, 22 nt, Artificial Sequence
  Synthetic
agaaucauuccaccaccaaucc

SEQ ID NO: 76630 - RNA, 23 nt, Artificial Sequence
  Synthetic
aagaaucauuccaccaccaaucc

SEQ ID NO: 76631 - RNA, 24 nt, Artificial Sequence
  Synthetic
gaagaaucauuccaccaccaaucc

SEQ ID NO: 76632 - RNA, 18 nt, Artificial Sequence
  Synthetic
cccgucagcgcugaaucc

SEQ ID NO: 76633 - RNA, 19 nt, Artificial Sequence
  Synthetic
ucccgucagcgcugaaucc

SEQ ID NO: 76634 - RNA, 20 nt, Artificial Sequence
  Synthetic
gucccgucagcgcugaaucc

SEQ ID NO: 76635 - RNA, 18 nt, Artificial Sequence
  Synthetic
uuggaagauccagcaucc

SEQ ID NO: 76636 - RNA, 19 nt, Artificial Sequence
  Synthetic
uuuggaagauccagcaucc

SEQ ID NO: 76637 - RNA, 20 nt, Artificial Sequence
  Synthetic
auuuggaagauccagcaucc

SEQ ID NO: 76638 - RNA, 21 nt, Artificial Sequence
  Synthetic
aauuuggaagauccagcaucc

SEQ ID NO: 76639 - RNA, 22 nt, Artificial Sequence
  Synthetic
aaauuuggaagauccagcaucc

SEQ ID NO: 76640 - RNA, 23 nt, Artificial Sequence
  Synthetic
  misc_feature (1)..(1): n is a, c, g, or u
naaauuuggaagauccagcaucc

SEQ ID NO: 76641 - RNA, 24 nt, Artificial Sequence
  Synthetic
  misc_feature (2)..(2): n is a, c, g, or u
gnaaauuuggaagauccagcaucc

SEQ ID NO: 76642 - RNA, 18 nt, Artificial Sequence
  Synthetic
uuugagagacacucaucc

SEQ ID NO: 76643 - RNA, 19 nt, Artificial Sequence
  Synthetic
cuuugagagacacucaucc

SEQ ID NO: 76644 - RNA, 20 nt, Artificial Sequence
  Synthetic
ccuuugagagacacucaucc

SEQ ID NO: 76645 - RNA, 21 nt, Artificial Sequence
  Synthetic
accuuugagagacacucaucc

SEQ ID NO: 76646 - RNA, 22 nt, Artificial Sequence
  Synthetic
caccuuugagagacacucaucc

SEQ ID NO: 76647 - RNA, 23 nt, Artificial Sequence
  Synthetic
ccaccuuugagagacacucaucc

SEQ ID NO: 76648 - RNA, 24 nt, Artificial Sequence
  Synthetic
uccaccuuugagagacacucaucc

SEQ ID NO: 76649 - RNA, 18 nt, Artificial Sequence
  Synthetic
gugcugccaacuggaucc

SEQ ID NO: 76650 - RNA, 19 nt, Artificial Sequence
  Synthetic
ugugcugccaacuggaucc

SEQ ID NO: 76651 - RNA, 20 nt, Artificial Sequence
  Synthetic
cugugcugccaacuggaucc

SEQ ID NO: 76652 - RNA, 21 nt, Artificial Sequence
  Synthetic
gcugugcugccaacuggaucc

SEQ ID NO: 76653 - RNA, 22 nt, Artificial Sequence
  Synthetic
ggcugugcugccaacuggaucc

SEQ ID NO: 76654 - RNA, 23 nt, Artificial Sequence
  Synthetic
aggcugugcugccaacuggaucc

SEQ ID NO: 76655 - RNA, 24 nt, Artificial Sequence
  Synthetic
uaggcugugcugccaacuggaucc

SEQ ID NO: 76656 - RNA, 18 nt, Artificial Sequence
  Synthetic
aguguggauucgcacucc

SEQ ID NO: 76657 - RNA, 19 nt, Artificial Sequence
  Synthetic
gaguguggauucgcacucc

SEQ ID NO: 76658 - RNA, 20 nt, Artificial Sequence
  Synthetic
ggaguguggauucgcacucc

SEQ ID NO: 76659 - RNA, 18 nt, Artificial Sequence
  Synthetic
aauucugucguucucucc

SEQ ID NO: 76660 - RNA, 19 nt, Artificial Sequence
  Synthetic
uaauucugucguucucucc

SEQ ID NO: 76661 - RNA, 20 nt, Artificial Sequence
  Synthetic
auaauucugucguucucucc

SEQ ID NO: 76662 - RNA, 21 nt, Artificial Sequence
  Synthetic
gauaauucugucguucucucc

SEQ ID NO: 76663 - RNA, 22 nt, Artificial Sequence
  Synthetic
  misc_feature (1)..(1): n is a, c, g, or u
ngauaauucugucguucucucc

SEQ ID NO: 76664 - RNA, 23 nt, Artificial Sequence
  Synthetic
  misc_feature (2)..(2): n is a, c, g, or u
cngauaauucugucguucucucc

SEQ ID NO: 76665 - RNA, 24 nt, Artificial Sequence
  Synthetic
  misc_feature (3)..(3): n is a, c, g, or u
acngauaauucugucguucucucc

SEQ ID NO: 76666 - RNA, 18 nt, Artificial Sequence
  Synthetic
agacgaagaggcaggucc

SEQ ID NO: 76667 - RNA, 19 nt, Artificial Sequence
  Synthetic
uagacgaagaggcaggucc

SEQ ID NO: 76668 - RNA, 20 nt, Artificial Sequence
  Synthetic
uuagacgaagaggcaggucc

SEQ ID NO: 76669 - RNA, 21 nt, Artificial Sequence
  Synthetic
guuagacgaagaggcaggucc

SEQ ID NO: 76670 - RNA, 22 nt, Artificial Sequence
  Synthetic
uguuagacgaagaggcaggucc

SEQ ID NO: 76671 - RNA, 23 nt, Artificial Sequence
  Synthetic
uuguuagacgaagaggcaggucc

SEQ ID NO: 76672 - RNA, 24 nt, Artificial Sequence
  Synthetic
guuguuagacgaagaggcaggucc

SEQ ID NO: 76673 - RNA, 18 nt, Artificial Sequence
  Synthetic
ugaacaauuuguaggucc

SEQ ID NO: 76674 - RNA, 19 nt, Artificial Sequence
  Synthetic
gugaacaauuuguaggucc

SEQ ID NO: 76675 - RNA, 20 nt, Artificial Sequence
  Synthetic
ugugaacaauuuguaggucc

SEQ ID NO: 76676 - RNA, 21 nt, Artificial Sequence
  Synthetic
augugaacaauuuguaggucc

SEQ ID NO: 76677 - RNA, 22 nt, Artificial Sequence
  Synthetic
aaugugaacaauuuguaggucc

SEQ ID NO: 76678 - RNA, 23 nt, Artificial Sequence
  Synthetic
aaaugugaacaauuuguaggucc

SEQ ID NO: 76679 - RNA, 24 nt, Artificial Sequence
  Synthetic
caaaugugaacaauuuguaggucc

SEQ ID NO: 76680 - RNA, 18 nt, Artificial Sequence
  Synthetic
gggcuuucggaaaauucc

SEQ ID NO: 76681 - RNA, 19 nt, Artificial Sequence
  Synthetic
ugggcuuucggaaaauucc

SEQ ID NO: 76682 - RNA, 20 nt, Artificial Sequence
  Synthetic
augggcuuucggaaaauucc

SEQ ID NO: 76683 - RNA, 21 nt, Artificial Sequence
  Synthetic
caugggcuuucggaaaauucc

SEQ ID NO: 76684 - RNA, 22 nt, Artificial Sequence
  Synthetic
ucaugggcuuucggaaaauucc

SEQ ID NO: 76685 - RNA, 23 nt, Artificial Sequence
  Synthetic
aucaugggcuuucggaaaauucc

SEQ ID NO: 76686 - RNA, 24 nt, Artificial Sequence
  Synthetic
caucaugggcuuucggaaaauucc

SEQ ID NO: 76687 - RNA, 18 nt, Artificial Sequence
  Synthetic
gcaucacaucaggauucc

SEQ ID NO: 76688 - RNA, 19 nt, Artificial Sequence
  Synthetic
agcaucacaucaggauucc

SEQ ID NO: 76689 - RNA, 20 nt, Artificial Sequence
  Synthetic
aagcaucacaucaggauucc

SEQ ID NO: 76690 - RNA, 21 nt, Artificial Sequence
  Synthetic
aaagcaucacaucaggauucc

SEQ ID NO: 76691 - RNA, 22 nt, Artificial Sequence
  Synthetic
gaaagcaucacaucaggauucc

SEQ ID NO: 76692 - RNA, 23 nt, Artificial Sequence
  Synthetic
ggaaagcaucacaucaggauucc

SEQ ID NO: 76693 - RNA, 24 nt, Artificial Sequence
  Synthetic
uggaaagcaucacaucaggauucc

SEQ ID NO: 76694 - RNA, 18 nt, Artificial Sequence
  Synthetic
ucccaauguuaguauucc

SEQ ID NO: 76695 - RNA, 19 nt, Artificial Sequence
  Synthetic
uucccaauguuaguauucc

SEQ ID NO: 76696 - RNA, 20 nt, Artificial Sequence
  Synthetic
cuucccaauguuaguauucc

SEQ ID NO: 76697 - RNA, 21 nt, Artificial Sequence
  Synthetic
gcuucccaauguuaguauucc

SEQ ID NO: 76698 - RNA, 22 nt, Artificial Sequence
  Synthetic
agcuucccaauguuaguauucc

SEQ ID NO: 76699 - RNA, 23 nt, Artificial Sequence
  Synthetic
cagcuucccaauguuaguauucc

SEQ ID NO: 76700 - RNA, 24 nt, Artificial Sequence
  Synthetic
ccagcuucccaauguuaguauucc

SEQ ID NO: 76701 - RNA, 18 nt, Artificial Sequence
  Synthetic
uaucuuaucaacacuucc

SEQ ID NO: 76702 - RNA, 19 nt, Artificial Sequence
  Synthetic
cuaucuuaucaacacuucc

SEQ ID NO: 76703 - RNA, 20 nt, Artificial Sequence
  Synthetic
ccuaucuuaucaacacuucc

SEQ ID NO: 76704 - RNA, 21 nt, Artificial Sequence
  Synthetic
cccuaucuuaucaacacuucc

SEQ ID NO: 76705 - RNA, 22 nt, Artificial Sequence
  Synthetic
ccccuaucuuaucaacacuucc

SEQ ID NO: 76706 - RNA, 23 nt, Artificial Sequence
  Synthetic
gccccuaucuuaucaacacuucc

SEQ ID NO: 76707 - RNA, 24 nt, Artificial Sequence
  Synthetic
ugccccuaucuuaucaacacuucc

SEQ ID NO: 76708 - RNA, 18 nt, Artificial Sequence
  Synthetic
ugucuacgucccgucagc

SEQ ID NO: 76709 - RNA, 19 nt, Artificial Sequence
  Synthetic
uugucuacgucccgucagc

SEQ ID NO: 76710 - RNA, 20 nt, Artificial Sequence
  Synthetic
uuugucuacgucccgucagc

SEQ ID NO: 76711 - RNA, 21 nt, Artificial Sequence
  Synthetic
cuuugucuacgucccgucagc

SEQ ID NO: 76712 - RNA, 22 nt, Artificial Sequence
  Synthetic
ccuuugucuacgucccgucagc

SEQ ID NO: 76713 - RNA, 23 nt, Artificial Sequence
  Synthetic
uccuuugucuacgucccgucagc

SEQ ID NO: 76714 - RNA, 24 nt, Artificial Sequence
  Synthetic
guccuuugucuacgucccgucagc

SEQ ID NO: 76715 - RNA, 18 nt, Artificial Sequence
  Synthetic
agaucuucuagauaccgc

SEQ ID NO: 76716 - RNA, 19 nt, Artificial Sequence
  Synthetic
gagaucuucuagauaccgc

SEQ ID NO: 76717 - RNA, 20 nt, Artificial Sequence
  Synthetic
agagaucuucuagauaccgc

SEQ ID NO: 76718 - RNA, 21 nt, Artificial Sequence
  Synthetic
aagagaucuucuagauaccgc

SEQ ID NO: 76719 - RNA, 22 nt, Artificial Sequence
  Synthetic
uaagagaucuucuagauaccgc

SEQ ID NO: 76720 - RNA, 23 nt, Artificial Sequence
  Synthetic
guaagagaucuucuagauaccgc

SEQ ID NO: 76721 - RNA, 24 nt, Artificial Sequence
  Synthetic
aguaagagaucuucuagauaccgc

SEQ ID NO: 76722 - RNA, 18 nt, Artificial Sequence
  Synthetic
gcauaaauuggucugcgc

SEQ ID NO: 76723 - RNA, 19 nt, Artificial Sequence
  Synthetic
ggcauaaauuggucugcgc

SEQ ID NO: 76724 - RNA, 20 nt, Artificial Sequence
  Synthetic
aggcauaaauuggucugcgc

SEQ ID NO: 76725 - RNA, 18 nt, Artificial Sequence
  Synthetic
gccgcuuguuuugcucgc

SEQ ID NO: 76726 - RNA, 19 nt, Artificial Sequence
  Synthetic
agccgcuuguuuugcucgc

SEQ ID NO: 76727 - RNA, 20 nt, Artificial Sequence
  Synthetic
uagccgcuuguuuugcucgc

SEQ ID NO: 76728 - RNA, 21 nt, Artificial Sequence
  Synthetic
cuagccgcuuguuuugcucgc

SEQ ID NO: 76729 - RNA, 22 nt, Artificial Sequence
  Synthetic
ccuagccgcuuguuuugcucgc

SEQ ID NO: 76730 - RNA, 23 nt, Artificial Sequence
  Synthetic
uccuagccgcuuguuuugcucgc

SEQ ID NO: 76731 - RNA, 24 nt, Artificial Sequence
  Synthetic
cuccuagccgcuuguuuugcucgc

SEQ ID NO: 76732 - RNA, 18 nt, Artificial Sequence
  Synthetic
uucaccucugcacgucgc

SEQ ID NO: 76733 - RNA, 19 nt, Artificial Sequence
  Synthetic
cuucaccucugcacgucgc

SEQ ID NO: 76734 - RNA, 20 nt, Artificial Sequence
  Synthetic
gcuucaccucugcacgucgc

SEQ ID NO: 76735 - RNA, 21 nt, Artificial Sequence
  Synthetic
cgcuucaccucugcacgucgc

SEQ ID NO: 76736 - RNA, 22 nt, Artificial Sequence
  Synthetic
ucgcuucaccucugcacgucgc

SEQ ID NO: 76737 - RNA, 23 nt, Artificial Sequence
  Synthetic
uucgcuucaccucugcacgucgc

SEQ ID NO: 76738 - RNA, 24 nt, Artificial Sequence
  Synthetic
cuucgcuucaccucugcacgucgc

SEQ ID NO: 76739 - RNA, 18 nt, Artificial Sequence
  Synthetic
ucucaaucgccgcgucgc

SEQ ID NO: 76740 - RNA, 19 nt, Artificial Sequence
  Synthetic
aucucaaucgccgcgucgc

SEQ ID NO: 76741 - RNA, 20 nt, Artificial Sequence
  Synthetic
gaucucaaucgccgcgucgc

SEQ ID NO: 76742 - RNA, 18 nt, Artificial Sequence
  Synthetic
  misc_feature (6)..(6): n is a, c, g, or u
gacccnucucggggucgc

SEQ ID NO: 76743 - RNA, 19 nt, Artificial Sequence
  Synthetic
  misc_feature (7)..(7): n is a, c, g, or u
cgacccnucucggggucgc

SEQ ID NO: 76744 - RNA, 20 nt, Artificial Sequence
  Synthetic
  misc_feature (8)..(8): n is a, c, g, or u
acgacccnucucggggucgc

SEQ ID NO: 76745 - RNA, 18 nt, Artificial Sequence
  Synthetic
gggguggagcccucaggc

SEQ ID NO: 76746 - RNA, 19 nt, Artificial Sequence
  Synthetic
ugggguggagcccucaggc

SEQ ID NO: 76747 - RNA, 20 nt, Artificial Sequence
  Synthetic
uugggguggagcccucaggc

SEQ ID NO: 76748 - RNA, 21 nt, Artificial Sequence
  Synthetic
uuugggguggagcccucaggc

SEQ ID NO: 76749 - RNA, 22 nt, Artificial Sequence
  Synthetic
uuuugggguggagcccucaggc

SEQ ID NO: 76750 - RNA, 23 nt, Artificial Sequence
  Synthetic
cuuuugggguggagcccucaggc

SEQ ID NO: 76751 - RNA, 24 nt, Artificial Sequence
  Synthetic
ccuuuugggguggagcccucaggc

SEQ ID NO: 76752 - RNA, 18 nt, Artificial Sequence
  Synthetic
gucuuuguacuaggaggc

SEQ ID NO: 76753 - RNA, 19 nt, Artificial Sequence
  Synthetic
ggucuuuguacuaggaggc

SEQ ID NO: 76754 - RNA, 20 nt, Artificial Sequence
  Synthetic
aggucuuuguacuaggaggc

SEQ ID NO: 76755 - RNA, 21 nt, Artificial Sequence
  Synthetic
aaggucuuuguacuaggaggc

SEQ ID NO: 76756 - RNA, 22 nt, Artificial Sequence
  Synthetic
aaaggucuuuguacuaggaggc

SEQ ID NO: 76757 - RNA, 23 nt, Artificial Sequence
  Synthetic
uaaaggucuuuguacuaggaggc

SEQ ID NO: 76758 - RNA, 24 nt, Artificial Sequence
  Synthetic
uuaaaggucuuuguacuaggaggc

SEQ ID NO: 76759 - RNA, 18 nt, Artificial Sequence
  Synthetic
uuuaccccguugcccggc

SEQ ID NO: 76760 - RNA, 19 nt, Artificial Sequence
  Synthetic
cuuuaccccguugcccggc

SEQ ID NO: 76761 - RNA, 20 nt, Artificial Sequence
  Synthetic
ccuuuaccccguugcccggc

SEQ ID NO: 76762 - RNA, 18 nt, Artificial Sequence
  Synthetic
gucaauacuaauaugggc

SEQ ID NO: 76763 - RNA, 19 nt, Artificial Sequence
  Synthetic
ugucaauacuaauaugggc

SEQ ID NO: 76764 - RNA, 20 nt, Artificial Sequence
  Synthetic
augucaauacuaauaugggc

SEQ ID NO: 76765 - RNA, 21 nt, Artificial Sequence
  Synthetic
uaugucaauacuaauaugggc

SEQ ID NO: 76766 - RNA, 22 nt, Artificial Sequence
  Synthetic
uuaugucaauacuaauaugggc

SEQ ID NO: 76767 - RNA, 23 nt, Artificial Sequence
  Synthetic
guuaugucaauacuaauaugggc

SEQ ID NO: 76768 - RNA, 24 nt, Artificial Sequence
  Synthetic
aguuaugucaauacuaauaugggc

SEQ ID NO: 76769 - RNA, 18 nt, Artificial Sequence
  Synthetic
auuccuaugggagugggc

SEQ ID NO: 76770 - RNA, 19 nt, Artificial Sequence
  Synthetic
aauuccuaugggagugggc

SEQ ID NO: 76771 - RNA, 20 nt, Artificial Sequence
  Synthetic
aaauuccuaugggagugggc

SEQ ID NO: 76772 - RNA, 21 nt, Artificial Sequence
  Synthetic
aaaauuccuaugggagugggc

SEQ ID NO: 76773 - RNA, 22 nt, Artificial Sequence
  Synthetic
gaaaauuccuaugggagugggc

SEQ ID NO: 76774 - RNA, 23 nt, Artificial Sequence
  Synthetic
ggaaaauuccuaugggagugggc

SEQ ID NO: 76775 - RNA, 24 nt, Artificial Sequence
  Synthetic
cggaaaauuccuaugggagugggc

SEQ ID NO: 76776 - RNA, 18 nt, Artificial Sequence
  Synthetic
gaugcaacccccacuggc

SEQ ID NO: 76777 - RNA, 19 nt, Artificial Sequence
  Synthetic
ugaugcaacccccacuggc

SEQ ID NO: 76778 - RNA, 20 nt, Artificial Sequence
  Synthetic
cugaugcaacccccacuggc

SEQ ID NO: 76779 - RNA, 21 nt, Artificial Sequence
  Synthetic
gcugaugcaacccccacuggc

SEQ ID NO: 76780 - RNA, 22 nt, Artificial Sequence
  Synthetic
ugcugaugcaacccccacuggc

SEQ ID NO: 76781 - RNA, 23 nt, Artificial Sequence
  Synthetic
uugcugaugcaacccccacuggc

SEQ ID NO: 76782 - RNA, 24 nt, Artificial Sequence
  Synthetic
uuugcugaugcaacccccacuggc

SEQ ID NO: 76783 - RNA, 18 nt, Artificial Sequence
  Synthetic
cacuggcuggggcuuggc

SEQ ID NO: 76784 - RNA, 19 nt, Artificial Sequence
  Synthetic
ccacuggcuggggcuuggc

SEQ ID NO: 76785 - RNA, 20 nt, Artificial Sequence
  Synthetic
cccacuggcuggggcuuggc

SEQ ID NO: 76786 - RNA, 21 nt, Artificial Sequence
  Synthetic
ccccacuggcuggggcuuggc

SEQ ID NO: 76787 - RNA, 22 nt, Artificial Sequence
  Synthetic
cccccacuggcuggggcuuggc

SEQ ID NO: 76788 - RNA, 23 nt, Artificial Sequence
  Synthetic
acccccacuggcuggggcuuggc

SEQ ID NO: 76789 - RNA, 24 nt, Artificial Sequence
  Synthetic
aacccccacuggcuggggcuuggc

SEQ ID NO: 76790 - RNA, 18 nt, Artificial Sequence
  Synthetic
cucauccucaggccaugc

SEQ ID NO: 76791 - RNA, 19 nt, Artificial Sequence
  Synthetic
acucauccucaggccaugc

SEQ ID NO: 76792 - RNA, 20 nt, Artificial Sequence
  Synthetic
cacucauccucaggccaugc

SEQ ID NO: 76793 - RNA, 21 nt, Artificial Sequence
  Synthetic
acacucauccucaggccaugc

SEQ ID NO: 76794 - RNA, 22 nt, Artificial Sequence
  Synthetic
gacacucauccucaggccaugc

SEQ ID NO: 76795 - RNA, 23 nt, Artificial Sequence
  Synthetic
agacacucauccucaggccaugc

SEQ ID NO: 76796 - RNA, 24 nt, Artificial Sequence
  Synthetic
gagacacucauccucaggccaugc

SEQ ID NO: 76797 - RNA, 18 nt, Artificial Sequence
  Synthetic
uaggccaucagcgcaugc

SEQ ID NO: 76798 - RNA, 19 nt, Artificial Sequence
  Synthetic
auaggccaucagcgcaugc

SEQ ID NO: 76799 - RNA, 20 nt, Artificial Sequence
  Synthetic
cauaggccaucagcgcaugc

SEQ ID NO: 76800 - RNA, 21 nt, Artificial Sequence
  Synthetic
ccauaggccaucagcgcaugc

SEQ ID NO: 76801 - RNA, 22 nt, Artificial Sequence
  Synthetic
gccauaggccaucagcgcaugc

SEQ ID NO: 76802 - RNA, 23 nt, Artificial Sequence
  Synthetic
ggccauaggccaucagcgcaugc

SEQ ID NO: 76803 - RNA, 24 nt, Artificial Sequence
  Synthetic
uggccauaggccaucagcgcaugc

SEQ ID NO: 76804 - RNA, 18 nt, Artificial Sequence
  Synthetic
cucaggcucaaggcaugc

SEQ ID NO: 76805 - RNA, 19 nt, Artificial Sequence
  Synthetic
ccucaggcucaaggcaugc

SEQ ID NO: 76806 - RNA, 20 nt, Artificial Sequence
  Synthetic
cccucaggcucaaggcaugc

SEQ ID NO: 76807 - RNA, 21 nt, Artificial Sequence
  Synthetic
gcccucaggcucaaggcaugc

SEQ ID NO: 76808 - RNA, 22 nt, Artificial Sequence
  Synthetic
agcccucaggcucaaggcaugc

SEQ ID NO: 76809 - RNA, 23 nt, Artificial Sequence
  Synthetic
gagcccucaggcucaaggcaugc

SEQ ID NO: 76810 - RNA, 24 nt, Artificial Sequence
  Synthetic
ggagcccucaggcucaaggcaugc

SEQ ID NO: 76811 - RNA, 18 nt, Artificial Sequence
  Synthetic
agcucuguaucgggaugc

SEQ ID NO: 76812 - RNA, 19 nt, Artificial Sequence
  Synthetic
cagcucuguaucgggaugc

SEQ ID NO: 76813 - RNA, 20 nt, Artificial Sequence
  Synthetic
ucagcucuguaucgggaugc

SEQ ID NO: 76814 - RNA, 21 nt, Artificial Sequence
  Synthetic
cucagcucuguaucgggaugc

SEQ ID NO: 76815 - RNA, 22 nt, Artificial Sequence
  Synthetic
ccucagcucuguaucgggaugc

SEQ ID NO: 76816 - RNA, 23 nt, Artificial Sequence
  Synthetic
gccucagcucuguaucgggaugc

SEQ ID NO: 76817 - RNA, 24 nt, Artificial Sequence
  Synthetic
cgccucagcucuguaucgggaugc

SEQ ID NO: 76818 - RNA, 18 nt, Artificial Sequence
  Synthetic
gaggauuggggacccugc

SEQ ID NO: 76819 - RNA, 19 nt, Artificial Sequence
  Synthetic
cgaggauuggggacccugc

SEQ ID NO: 76820 - RNA, 20 nt, Artificial Sequence
  Synthetic
ucgaggauuggggacccugc

SEQ ID NO: 76821 - RNA, 21 nt, Artificial Sequence
  Synthetic
cucgaggauuggggacccugc

SEQ ID NO: 76822 - RNA, 22 nt, Artificial Sequence
  Synthetic
ucucgaggauuggggacccugc

SEQ ID NO: 76823 - RNA, 23 nt, Artificial Sequence
  Synthetic
uucucgaggauuggggacccugc

SEQ ID NO: 76824 - RNA, 24 nt, Artificial Sequence
  Synthetic
cuucucgaggauuggggacccugc

SEQ ID NO: 76825 - RNA, 18 nt, Artificial Sequence
  Synthetic
cugccaacuggauccugc

SEQ ID NO: 76826 - RNA, 19 nt, Artificial Sequence
  Synthetic
gcugccaacuggauccugc

SEQ ID NO: 76827 - RNA, 20 nt, Artificial Sequence
  Synthetic
ugcugccaacuggauccugc

SEQ ID NO: 76828 - RNA, 21 nt, Artificial Sequence
  Synthetic
gugcugccaacuggauccugc

SEQ ID NO: 76829 - RNA, 22 nt, Artificial Sequence
  Synthetic
ugugcugccaacuggauccugc

SEQ ID NO: 76830 - RNA, 23 nt, Artificial Sequence
  Synthetic
cugugcugccaacuggauccugc

SEQ ID NO: 76831 - RNA, 24 nt, Artificial Sequence
  Synthetic
gcugugcugccaacuggauccugc

SEQ ID NO: 76832 - RNA, 18 nt, Artificial Sequence
  Synthetic
caagccuccaagcugugc

SEQ ID NO: 76833 - RNA, 19 nt, Artificial Sequence
  Synthetic
ucaagccuccaagcugugc

SEQ ID NO: 76834 - RNA, 20 nt, Artificial Sequence
  Synthetic
uucaagccuccaagcugugc

SEQ ID NO: 76835 - RNA, 21 nt, Artificial Sequence
  Synthetic
guucaagccuccaagcugugc

SEQ ID NO: 76836 - RNA, 22 nt, Artificial Sequence
  Synthetic
uguucaagccuccaagcugugc

SEQ ID NO: 76837 - RNA, 23 nt, Artificial Sequence
  Synthetic
cuguucaagccuccaagcugugc

SEQ ID NO: 76838 - RNA, 24 nt, Artificial Sequence
  Synthetic
acuguucaagccuccaagcugugc

SEQ ID NO: 76839 - RNA, 18 nt, Artificial Sequence
  Synthetic
acgcccaccaaaucuugc

SEQ ID NO: 76840 - RNA, 19 nt, Artificial Sequence
  Synthetic
aacgcccaccaaaucuugc

SEQ ID NO: 76841 - RNA, 20 nt, Artificial Sequence
  Synthetic
gaacgcccaccaaaucuugc

SEQ ID NO: 76842 - RNA, 18 nt, Artificial Sequence
  Synthetic
aaccugcacgacucuugc

SEQ ID NO: 76843 - RNA, 19 nt, Artificial Sequence
  Synthetic
gaaccugcacgacucuugc

SEQ ID NO: 76844 - RNA, 20 nt, Artificial Sequence
  Synthetic
cgaaccugcacgacucuugc

SEQ ID NO: 76845 - RNA, 18 nt, Artificial Sequence
  Synthetic
uuccugauauucauuugc

SEQ ID NO: 76846 - RNA, 19 nt, Artificial Sequence
  Synthetic
uuuccugauauucauuugc

SEQ ID NO: 76847 - RNA, 20 nt, Artificial Sequence
  Synthetic
uuuuccugauauucauuugc

SEQ ID NO: 76848 - RNA, 21 nt, Artificial Sequence
  Synthetic
cuuuuccugauauucauuugc

SEQ ID NO: 76849 - RNA, 22 nt, Artificial Sequence
  Synthetic
ucuuuuccugauauucauuugc

SEQ ID NO: 76850 - RNA, 23 nt, Artificial Sequence
  Synthetic
aucuuuuccugauauucauuugc

SEQ ID NO: 76851 - RNA, 24 nt, Artificial Sequence
  Synthetic
caucuuuuccugauauucauuugc

SEQ ID NO: 76852 - RNA, 18 nt, Artificial Sequence
  Synthetic
aggcaagccauucuuugc

SEQ ID NO: 76853 - RNA, 19 nt, Artificial Sequence
  Synthetic
caggcaagccauucuuugc

SEQ ID NO: 76854 - RNA, 20 nt, Artificial Sequence
  Synthetic
ucaggcaagccauucuuugc

SEQ ID NO: 76855 - RNA, 21 nt, Artificial Sequence
  Synthetic
cucaggcaagccauucuuugc

SEQ ID NO: 76856 - RNA, 22 nt, Artificial Sequence
  Synthetic
acucaggcaagccauucuuugc

SEQ ID NO: 76857 - RNA, 23 nt, Artificial Sequence
  Synthetic
cacucaggcaagccauucuuugc

SEQ ID NO: 76858 - RNA, 24 nt, Artificial Sequence
  Synthetic
gcacucaggcaagccauucuuugc

SEQ ID NO: 76859 - RNA, 18 nt, Artificial Sequence
  Synthetic
  misc_feature (14)..(14): n is a, c, g, or u
  misc_feature (17)..(17): n is a, c, g, or u
cuuggguggcuuunggnc

SEQ ID NO: 76860 - RNA, 19 nt, Artificial Sequence
  Synthetic
  misc_feature (15)..(15): n is a, c, g, or u
  misc_feature (18)..(18): n is a, c, g, or u
ccuuggguggcuuunggnc

SEQ ID NO: 76861 - RNA, 20 nt, Artificial Sequence
  Synthetic
  misc_feature (16)..(16): n is a, c, g, or u
  misc_feature (19)..(19): n is a, c, g, or u
gccuuggguggcuuunggnc

SEQ ID NO: 76862 - RNA, 21 nt, Artificial Sequence
  Synthetic
  misc_feature (17)..(17): n is a, c, g, or u
  misc_feature (20)..(20): n is a, c, g, or u
ugccuuggguggcuuunggnc

SEQ ID NO: 76863 - RNA, 22 nt, Artificial Sequence
  Synthetic
  misc_feature (18)..(18): n is a, c, g, or u
  misc_feature (21)..(21): n is a, c, g, or u
gugccuuggguggcuuunggnc

SEQ ID NO: 76864 - RNA, 23 nt, Artificial Sequence
  Synthetic
  misc_feature (19)..(19): n is a, c, g, or u
  misc_feature (22)..(22): n is a, c, g, or u
ugugccuuggguggcuuunggnc

SEQ ID NO: 76865 - RNA, 24 nt, Artificial Sequence
  Synthetic
  misc_feature (20)..(20): n is a, c, g, or u
  misc_feature (23)..(23): n is a, c, g, or u
cugugccuuggguggcuuunggnc

SEQ ID NO: 76866 - RNA, 18 nt, Artificial Sequence
  Synthetic
  misc_feature (10)..(10): n is a, c, g, or u
cacaucaganugaaaauc

SEQ ID NO: 76867 - RNA, 19 nt, Artificial Sequence
  Synthetic
  misc_feature (11)..(11): n is a, c, g, or u
acacaucaganugaaaauc

SEQ ID NO: 76868 - RNA, 20 nt, Artificial Sequence
  Synthetic
  misc_feature (12)..(12): n is a, c, g, or u
aacacaucaganugaaaauc

SEQ ID NO: 76869 - RNA, 21 nt, Artificial Sequence
  Synthetic
  misc_feature (13)..(13): n is a, c, g, or u
gaacacaucaganugaaaauc

SEQ ID NO: 76870 - RNA, 22 nt, Artificial Sequence
  Synthetic
  misc_feature (1)..(1): n is a, c, g, or u
  misc_feature (14)..(14): n is a, c, g, or u
ngaacacaucaganugaaaauc

SEQ ID NO: 76871 - RNA, 23 nt, Artificial Sequence
  Synthetic
  misc_feature (2)..(2): n is a, c, g, or u
  misc_feature (15)..(15): n is a, c, g, or u
angaacacaucaganugaaaauc

SEQ ID NO: 76872 - RNA, 24 nt, Artificial Sequence
  Synthetic
  misc_feature (3)..(3): n is a, c, g, or u
  misc_feature (16)..(16): n is a, c, g, or u
cangaacacaucaganugaaaauc

SEQ ID NO: 76873 - RNA, 18 nt, Artificial Sequence
  Synthetic
ucgcagaagaucucaauc

SEQ ID NO: 76874 - RNA, 19 nt, Artificial Sequence
  Synthetic
gucgcagaagaucucaauc

SEQ ID NO: 76875 - RNA, 20 nt, Artificial Sequence
  Synthetic
cgucgcagaagaucucaauc

SEQ ID NO: 76876 - RNA, 18 nt, Artificial Sequence
  Synthetic
gggaacaagagcuacauc

SEQ ID NO: 76877 - RNA, 19 nt, Artificial Sequence
  Synthetic
ugggaacaagagcuacauc

SEQ ID NO: 76878 - RNA, 20 nt, Artificial Sequence
  Synthetic
uugggaacaagagcuacauc

SEQ ID NO: 76879 - RNA, 21 nt, Artificial Sequence
  Synthetic
cuugggaacaagagcuacauc

SEQ ID NO: 76880 - RNA, 22 nt, Artificial Sequence
  Synthetic
ucuugggaacaagagcuacauc

SEQ ID NO: 76881 - RNA, 23 nt, Artificial Sequence
  Synthetic
uucuugggaacaagagcuacauc

SEQ ID NO: 76882 - RNA, 24 nt, Artificial Sequence
  Synthetic
auucuugggaacaagagcuacauc

SEQ ID NO: 76883 - RNA, 18 nt, Artificial Sequence
  Synthetic
uuuggaagauccagcauc

SEQ ID NO: 76884 - RNA, 19 nt, Artificial Sequence
  Synthetic
auuuggaagauccagcauc

SEQ ID NO: 76885 - RNA, 20 nt, Artificial Sequence
  Synthetic
aauuuggaagauccagcauc

SEQ ID NO: 76886 - RNA, 21 nt, Artificial Sequence
  Synthetic
aaauuuggaagauccagcauc

SEQ ID NO: 76887 - RNA, 22 nt, Artificial Sequence
  Synthetic
  misc_feature (1)..(1): n is a, c, g, or u
naaauuuggaagauccagcauc

SEQ ID NO: 76888 - RNA, 23 nt, Artificial Sequence
  Synthetic
  misc_feature (2)..(2): n is a, c, g, or u
gnaaauuuggaagauccagcauc

SEQ ID NO: 76889 - RNA, 24 nt, Artificial Sequence
  Synthetic
  misc_feature (3)..(3): n is a, c, g, or u
ugnaaauuuggaagauccagcauc

SEQ ID NO: 76890 - RNA, 18 nt, Artificial Sequence
  Synthetic
uauucccaucccaucauc

SEQ ID NO: 76891 - RNA, 19 nt, Artificial Sequence
  Synthetic
guauucccaucccaucauc

SEQ ID NO: 76892 - RNA, 20 nt, Artificial Sequence
  Synthetic
uguauucccaucccaucauc

SEQ ID NO: 76893 - RNA, 21 nt, Artificial Sequence
  Synthetic
uuguauucccaucccaucauc

SEQ ID NO: 76894 - RNA, 22 nt, Artificial Sequence
  Synthetic
cuuguauucccaucccaucauc

SEQ ID NO: 76895 - RNA, 23 nt, Artificial Sequence
  Synthetic
acuuguauucccaucccaucauc

SEQ ID NO: 76896 - RNA, 24 nt, Artificial Sequence
  Synthetic
cacuuguauucccaucccaucauc

SEQ ID NO: 76897 - RNA, 18 nt, Artificial Sequence
  Synthetic
cuuugagagacacucauc

SEQ ID NO: 76898 - RNA, 19 nt, Artificial Sequence
  Synthetic
ccuuugagagacacucauc

SEQ ID NO: 76899 - RNA, 20 nt, Artificial Sequence
  Synthetic
accuuugagagacacucauc

SEQ ID NO: 76900 - RNA, 21 nt, Artificial Sequence
  Synthetic
caccuuugagagacacucauc

SEQ ID NO: 76901 - RNA, 22 nt, Artificial Sequence
  Synthetic
ccaccuuugagagacacucauc

SEQ ID NO: 76902 - RNA, 23 nt, Artificial Sequence
  Synthetic
uccaccuuugagagacacucauc

SEQ ID NO: 76903 - RNA, 24 nt, Artificial Sequence
  Synthetic
cuccaccuuugagagacacucauc

SEQ ID NO: 76904 - RNA, 18 nt, Artificial Sequence
  Synthetic
uccucuaauuccaggauc

SEQ ID NO: 76905 - RNA, 19 nt, Artificial Sequence
  Synthetic
guccucuaauuccaggauc

SEQ ID NO: 76906 - RNA, 20 nt, Artificial Sequence
  Synthetic
uguccucuaauuccaggauc

SEQ ID NO: 76907 - RNA, 21 nt, Artificial Sequence
  Synthetic
uuguccucuaauuccaggauc

SEQ ID NO: 76908 - RNA, 22 nt, Artificial Sequence
  Synthetic
uuuguccucuaauuccaggauc

SEQ ID NO: 76909 - RNA, 23 nt, Artificial Sequence
  Synthetic
guuuguccucuaauuccaggauc

SEQ ID NO: 76910 - RNA, 24 nt, Artificial Sequence
  Synthetic
cguuuguccucuaauuccaggauc

SEQ ID NO: 76911 - RNA, 18 nt, Artificial Sequence
  Synthetic
accaagcucugcaggauc

SEQ ID NO: 76912 - RNA, 19 nt, Artificial Sequence
  Synthetic
caccaagcucugcaggauc

SEQ ID NO: 76913 - RNA, 20 nt, Artificial Sequence
  Synthetic
ccaccaagcucugcaggauc

SEQ ID NO: 76914 - RNA, 21 nt, Artificial Sequence
  Synthetic
uccaccaagcucugcaggauc

SEQ ID NO: 76915 - RNA, 22 nt, Artificial Sequence
  Synthetic
uuccaccaagcucugcaggauc

SEQ ID NO: 76916 - RNA, 23 nt, Artificial Sequence
  Synthetic
auuccaccaagcucugcaggauc

SEQ ID NO: 76917 - RNA, 24 nt, Artificial Sequence
  Synthetic
cauuccaccaagcucugcaggauc

SEQ ID NO: 76918 - RNA, 18 nt, Artificial Sequence
  Synthetic
caauuuguccuggcuauc

SEQ ID NO: 76919 - RNA, 19 nt, Artificial Sequence
  Synthetic
ccaauuuguccuggcuauc

SEQ ID NO: 76920 - RNA, 20 nt, Artificial Sequence
  Synthetic
uccaauuuguccuggcuauc

SEQ ID NO: 76921 - RNA, 21 nt, Artificial Sequence
  Synthetic
cuccaauuuguccuggcuauc

SEQ ID NO: 76922 - RNA, 22 nt, Artificial Sequence
  Synthetic
ccuccaauuuguccuggcuauc

SEQ ID NO: 76923 - RNA, 23 nt, Artificial Sequence
  Synthetic
uccuccaauuuguccuggcuauc

SEQ ID NO: 76924 - RNA, 24 nt, Artificial Sequence
  Synthetic
guccuccaauuuguccuggcuauc

SEQ ID NO: 76925 - RNA, 18 nt, Artificial Sequence
  Synthetic
  misc_feature (6)..(6): n is a, c, g, or u
  misc_feature (12)..(12): n is a, c, g, or u
cccaancuccanucacuc

SEQ ID NO: 76926 - RNA, 19 nt, Artificial Sequence
  Synthetic
  misc_feature (7)..(7): n is a, c, g, or u
  misc_feature (13)..(13): n is a, c, g, or u
ccccaancuccanucacuc

SEQ ID NO: 76927 - RNA, 20 nt, Artificial Sequence
  Synthetic
  misc_feature (8)..(8): n is a, c, g, or u
  misc_feature (14)..(14): n is a, c, g, or u
uccccaancuccanucacuc

SEQ ID NO: 76928 - RNA, 21 nt, Artificial Sequence
  Synthetic
  misc_feature (9)..(9): n is a, c, g, or u
  misc_feature (15)..(15): n is a, c, g, or u
guccccaancuccanucacuc

SEQ ID NO: 76929 - RNA, 22 nt, Artificial Sequence
  Synthetic
  misc_feature (10)..(10): n is a, c, g, or u
  misc_feature (16)..(16): n is a, c, g, or u
aguccccaancuccanucacuc

SEQ ID NO: 76930 - RNA, 23 nt, Artificial Sequence
  Synthetic
  misc_feature (11)..(11): n is a, c, g, or u
  misc_feature (17)..(17): n is a, c, g, or u
caguccccaancuccanucacuc

SEQ ID NO: 76931 - RNA, 24 nt, Artificial Sequence
  Synthetic
  misc_feature (12)..(12): n is a, c, g, or u
  misc_feature (18)..(18): n is a, c, g, or u
gcaguccccaancuccanucacuc

SEQ ID NO: 76932 - RNA, 18 nt, Artificial Sequence
  Synthetic
ucuuacauaagaggacuc

SEQ ID NO: 76933 - RNA, 19 nt, Artificial Sequence
  Synthetic
gucuuacauaagaggacuc

SEQ ID NO: 76934 - RNA, 20 nt, Artificial Sequence
  Synthetic
ggucuuacauaagaggacuc

SEQ ID NO: 76935 - RNA, 21 nt, Artificial Sequence
  Synthetic
aggucuuacauaagaggacuc

SEQ ID NO: 76936 - RNA, 22 nt, Artificial Sequence
  Synthetic
aaggucuuacauaagaggacuc

SEQ ID NO: 76937 - RNA, 23 nt, Artificial Sequence
  Synthetic
caaggucuuacauaagaggacuc

SEQ ID NO: 76938 - RNA, 24 nt, Artificial Sequence
  Synthetic
ccaaggucuuacauaagaggacuc

SEQ ID NO: 76939 - RNA, 18 nt, Artificial Sequence
  Synthetic
uuaguauuccuuggacuc

SEQ ID NO: 76940 - RNA, 19 nt, Artificial Sequence
  Synthetic
guuaguauuccuuggacuc

SEQ ID NO: 76941 - RNA, 20 nt, Artificial Sequence
  Synthetic
uguuaguauuccuuggacuc

SEQ ID NO: 76942 - RNA, 21 nt, Artificial Sequence
  Synthetic
auguuaguauuccuuggacuc

SEQ ID NO: 76943 - RNA, 22 nt, Artificial Sequence
  Synthetic
aauguuaguauuccuuggacuc

SEQ ID NO: 76944 - RNA, 23 nt, Artificial Sequence
  Synthetic
caauguuaguauuccuuggacuc

SEQ ID NO: 76945 - RNA, 24 nt, Artificial Sequence
  Synthetic
ccaauguuaguauuccuuggacuc

SEQ ID NO: 76946 - RNA, 18 nt, Artificial Sequence
  Synthetic
gaagaacucccucgccuc

SEQ ID NO: 76947 - RNA, 19 nt, Artificial Sequence
  Synthetic
agaagaacucccucgccuc

SEQ ID NO: 76948 - RNA, 20 nt, Artificial Sequence
  Synthetic
aagaagaacucccucgccuc

SEQ ID NO: 76949 - RNA, 21 nt, Artificial Sequence
  Synthetic
gaagaagaacucccucgccuc

SEQ ID NO: 76950 - RNA, 22 nt, Artificial Sequence
  Synthetic
agaagaagaacucccucgccuc

SEQ ID NO: 76951 - RNA, 23 nt, Artificial Sequence
  Synthetic
uagaagaagaacucccucgccuc

SEQ ID NO: 76952 - RNA, 24 nt, Artificial Sequence
  Synthetic
cuagaagaagaacucccucgccuc

SEQ ID NO: 76953 - RNA, 18 nt, Artificial Sequence
  Synthetic
caacauuccaccaagcuc

SEQ ID NO: 76954 - RNA, 19 nt, Artificial Sequence
  Synthetic
acaacauuccaccaagcuc

SEQ ID NO: 76955 - RNA, 20 nt, Artificial Sequence
  Synthetic
cacaacauuccaccaagcuc

SEQ ID NO: 76956 - RNA, 18 nt, Artificial Sequence
  Synthetic
ccugcacgacucuugcuc

SEQ ID NO: 76957 - RNA, 19 nt, Artificial Sequence
  Synthetic
accugcacgacucuugcuc

SEQ ID NO: 76958 - RNA, 20 nt, Artificial Sequence
  Synthetic
aaccugcacgacucuugcuc

SEQ ID NO: 76959 - RNA, 18 nt, Artificial Sequence
  Synthetic
gggaugccuuagaaucuc

SEQ ID NO: 76960 - RNA, 19 nt, Artificial Sequence
  Synthetic
cgggaugccuuagaaucuc

SEQ ID NO: 76961 - RNA, 20 nt, Artificial Sequence
  Synthetic
ucgggaugccuuagaaucuc

SEQ ID NO: 76962 - RNA, 21 nt, Artificial Sequence
  Synthetic
aucgggaugccuuagaaucuc

SEQ ID NO: 76963 - RNA, 22 nt, Artificial Sequence
  Synthetic
uaucgggaugccuuagaaucuc

SEQ ID NO: 76964 - RNA, 23 nt, Artificial Sequence
  Synthetic
guaucgggaugccuuagaaucuc

SEQ ID NO: 76965 - RNA, 24 nt, Artificial Sequence
  Synthetic
uguaucgggaugccuuagaaucuc

SEQ ID NO: 76966 - RNA, 18 nt, Artificial Sequence
  Synthetic
uaauucugucguucucuc

SEQ ID NO: 76967 - RNA, 19 nt, Artificial Sequence
  Synthetic
auaauucugucguucucuc

SEQ ID NO: 76968 - RNA, 20 nt, Artificial Sequence
  Synthetic
gauaauucugucguucucuc

SEQ ID NO: 76969 - RNA, 21 nt, Artificial Sequence
  Synthetic
  misc_feature (1)..(1): n is a, c, g, or u
ngauaauucugucguucucuc

SEQ ID NO: 76970 - RNA, 22 nt, Artificial Sequence
  Synthetic
  misc_feature (2)..(2): n is a, c, g, or u
cngauaauucugucguucucuc

SEQ ID NO: 76971 - RNA, 23 nt, Artificial Sequence
  Synthetic
  misc_feature (3)..(3): n is a, c, g, or u
acngauaauucugucguucucuc

SEQ ID NO: 76972 - RNA, 24 nt, Artificial Sequence
  Synthetic
  misc_feature (4)..(4): n is a, c, g, or u
gacngauaauucugucguucucuc

SEQ ID NO: 76973 - RNA, 18 nt, Artificial Sequence
  Synthetic
gcaggcuuucacuuucuc

SEQ ID NO: 76974 - RNA, 19 nt, Artificial Sequence
  Synthetic
agcaggcuuucacuuucuc

SEQ ID NO: 76975 - RNA, 20 nt, Artificial Sequence
  Synthetic
aagcaggcuuucacuuucuc

SEQ ID NO: 76976 - RNA, 21 nt, Artificial Sequence
  Synthetic
uaagcaggcuuucacuuucuc

SEQ ID NO: 76977 - RNA, 22 nt, Artificial Sequence
  Synthetic
cuaagcaggcuuucacuuucuc

SEQ ID NO: 76978 - RNA, 23 nt, Artificial Sequence
  Synthetic
ucuaagcaggcuuucacuuucuc

SEQ ID NO: 76979 - RNA, 24 nt, Artificial Sequence
  Synthetic
aucuaagcaggcuuucacuuucuc

SEQ ID NO: 76980 - RNA, 18 nt, Artificial Sequence
  Synthetic
uggccaaaauucgcaguc

SEQ ID NO: 76981 - RNA, 19 nt, Artificial Sequence
  Synthetic
uuggccaaaauucgcaguc

SEQ ID NO: 76982 - RNA, 20 nt, Artificial Sequence
  Synthetic
cuuggccaaaauucgcaguc

SEQ ID NO: 76983 - RNA, 21 nt, Artificial Sequence
  Synthetic
ucuuggccaaaauucgcaguc

SEQ ID NO: 76984 - RNA, 22 nt, Artificial Sequence
  Synthetic
gucuuggccaaaauucgcaguc

SEQ ID NO: 76985 - RNA, 23 nt, Artificial Sequence
  Synthetic
ugucuuggccaaaauucgcaguc

SEQ ID NO: 76986 - RNA, 24 nt, Artificial Sequence
  Synthetic
gugucuuggccaaaauucgcaguc

SEQ ID NO: 76987 - RNA, 18 nt, Artificial Sequence
  Synthetic
cuccaccaaucggcaguc

SEQ ID NO: 76988 - RNA, 19 nt, Artificial Sequence
  Synthetic
ccuccaccaaucggcaguc

SEQ ID NO: 76989 - RNA, 20 nt, Artificial Sequence
  Synthetic
gccuccaccaaucggcaguc

SEQ ID NO: 76990 - RNA, 21 nt, Artificial Sequence
  Synthetic
ugccuccaccaaucggcaguc

SEQ ID NO: 76991 - RNA, 22 nt, Artificial Sequence
  Synthetic
cugccuccaccaaucggcaguc

SEQ ID NO: 76992 - RNA, 23 nt, Artificial Sequence
  Synthetic
ccugccuccaccaaucggcaguc

SEQ ID NO: 76993 - RNA, 24 nt, Artificial Sequence
  Synthetic
uccugccuccaccaaucggcaguc

SEQ ID NO: 76994 - RNA, 18 nt, Artificial Sequence
  Synthetic
uuuggaagagaaaccguc

SEQ ID NO: 76995 - RNA, 19 nt, Artificial Sequence
  Synthetic
uuuuggaagagaaaccguc

SEQ ID NO: 76996 - RNA, 20 nt, Artificial Sequence
  Synthetic
cuuuuggaagagaaaccguc

SEQ ID NO: 76997 - RNA, 21 nt, Artificial Sequence
  Synthetic
acuuuuggaagagaaaccguc

SEQ ID NO: 76998 - RNA, 22 nt, Artificial Sequence
  Synthetic
cacuuuuggaagagaaaccguc

SEQ ID NO: 76999 - RNA, 23 nt, Artificial Sequence
  Synthetic
ucacuuuuggaagagaaaccguc

SEQ ID NO: 77000 - RNA, 24 nt, Artificial Sequence
  Synthetic
cucacuuuuggaagagaaaccguc

SEQ ID NO: 77001 - RNA, 18 nt, Artificial Sequence
  Synthetic
gaucucaaucgccgcguc

SEQ ID NO: 77002 - RNA, 19 nt, Artificial Sequence
  Synthetic
agaucucaaucgccgcguc

SEQ ID NO: 77003 - RNA, 20 nt, Artificial Sequence
  Synthetic
aagaucucaaucgccgcguc

SEQ ID NO: 77004 - RNA, 18 nt, Artificial Sequence
  Synthetic
uuuugcucgcagcagguc

SEQ ID NO: 77005 - RNA, 19 nt, Artificial Sequence
  Synthetic
guuuugcucgcagcagguc

SEQ ID NO: 77006 - RNA, 20 nt, Artificial Sequence
  Synthetic
uguuuugcucgcagcagguc

SEQ ID NO: 77007 - RNA, 21 nt, Artificial Sequence
  Synthetic
uuguuuugcucgcagcagguc

SEQ ID NO: 77008 - RNA, 22 nt, Artificial Sequence
  Synthetic
cuuguuuugcucgcagcagguc

SEQ ID NO: 77009 - RNA, 23 nt, Artificial Sequence
  Synthetic
gcuuguuuugcucgcagcagguc

SEQ ID NO: 77010 - RNA, 24 nt, Artificial Sequence
  Synthetic
cgcuuguuuugcucgcagcagguc

SEQ ID NO: 77011 - RNA, 18 nt, Artificial Sequence
  Synthetic
  misc_feature (10)..(10): n is a, c, g, or u
uggacucucngcaauguc

SEQ ID NO: 77012 - RNA, 19 nt, Artificial Sequence
  Synthetic
  misc_feature (11)..(11): n is a, c, g, or u
uuggacucucngcaauguc

SEQ ID NO: 77013 - RNA, 20 nt, Artificial Sequence
  Synthetic
  misc_feature (12)..(12): n is a, c, g, or u
cuuggacucucngcaauguc

SEQ ID NO: 77014 - RNA, 21 nt, Artificial Sequence
  Synthetic
  misc_feature (13)..(13): n is a, c, g, or u
ucuuggacucucngcaauguc

SEQ ID NO: 77015 - RNA, 22 nt, Artificial Sequence
  Synthetic
  misc_feature (14)..(14): n is a, c, g, or u
cucuuggacucucngcaauguc

SEQ ID NO: 77016 - RNA, 23 nt, Artificial Sequence
  Synthetic
  misc_feature (15)..(15): n is a, c, g, or u
acucuuggacucucngcaauguc

SEQ ID NO: 77017 - RNA, 24 nt, Artificial Sequence
  Synthetic
  misc_feature (16)..(16): n is a, c, g, or u
gacucuuggacucucngcaauguc

SEQ ID NO: 77018 - RNA, 18 nt, Artificial Sequence
  Synthetic
uugauuggaaaguauguc

SEQ ID NO: 77019 - RNA, 19 nt, Artificial Sequence
  Synthetic
auugauuggaaaguauguc

SEQ ID NO: 77020 - RNA, 20 nt, Artificial Sequence
  Synthetic
uauugauuggaaaguauguc

SEQ ID NO: 77021 - RNA, 21 nt, Artificial Sequence
  Synthetic
cuauugauuggaaaguauguc

SEQ ID NO: 77022 - RNA, 22 nt, Artificial Sequence
  Synthetic
ccuauugauuggaaaguauguc

SEQ ID NO: 77023 - RNA, 23 nt, Artificial Sequence
  Synthetic
gccuauugauuggaaaguauguc

SEQ ID NO: 77024 - RNA, 24 nt, Artificial Sequence
  Synthetic
ggccuauugauuggaaaguauguc

SEQ ID NO: 77025 - RNA, 18 nt, Artificial Sequence
  Synthetic
gcuaucgcuggauguguc

SEQ ID NO: 77026 - RNA, 19 nt, Artificial Sequence
  Synthetic
ggcuaucgcuggauguguc

SEQ ID NO: 77027 - RNA, 20 nt, Artificial Sequence
  Synthetic
uggcuaucgcuggauguguc

SEQ ID NO: 77028 - RNA, 21 nt, Artificial Sequence
  Synthetic
cuggcuaucgcuggauguguc

SEQ ID NO: 77029 - RNA, 22 nt, Artificial Sequence
  Synthetic
ccuggcuaucgcuggauguguc

SEQ ID NO: 77030 - RNA, 23 nt, Artificial Sequence
  Synthetic
uccuggcuaucgcuggauguguc

SEQ ID NO: 77031 - RNA, 24 nt, Artificial Sequence
  Synthetic
guccuggcuaucgcuggauguguc

SEQ ID NO: 77032 - RNA, 18 nt, Artificial Sequence
  Synthetic
uaccaauuuucuuuuguc

SEQ ID NO: 77033 - RNA, 19 nt, Artificial Sequence
  Synthetic
uuaccaauuuucuuuuguc

SEQ ID NO: 77034 - RNA, 20 nt, Artificial Sequence
  Synthetic
guuaccaauuuucuuuuguc

SEQ ID NO: 77035 - RNA, 21 nt, Artificial Sequence
  Synthetic
uguuaccaauuuucuuuuguc

SEQ ID NO: 77036 - RNA, 22 nt, Artificial Sequence
  Synthetic
cuguuaccaauuuucuuuuguc

SEQ ID NO: 77037 - RNA, 23 nt, Artificial Sequence
  Synthetic
ucuguuaccaauuuucuuuuguc

SEQ ID NO: 77038 - RNA, 24 nt, Artificial Sequence
  Synthetic
cucuguuaccaauuuucuuuuguc

SEQ ID NO: 77039 - RNA, 18 nt, Artificial Sequence
  Synthetic
  misc_feature (16)..(16): n is a, c, g, or u
uccugcggacgacccnuc

SEQ ID NO: 77040 - RNA, 19 nt, Artificial Sequence
  Synthetic
  misc_feature (17)..(17): n is a, c, g, or u
auccugcggacgacccnuc

SEQ ID NO: 77041 - RNA, 20 nt, Artificial Sequence
  Synthetic
  misc_feature (18)..(18): n is a, c, g, or u
aauccugcggacgacccnuc

SEQ ID NO: 77042 - RNA, 21 nt, Artificial Sequence
  Synthetic
  misc_feature (19)..(19): n is a, c, g, or u
gaauccugcggacgacccnuc

SEQ ID NO: 77043 - RNA, 22 nt, Artificial Sequence
  Synthetic
  misc_feature (20)..(20): n is a, c, g, or u
ugaauccugcggacgacccnuc

SEQ ID NO: 77044 - RNA, 23 nt, Artificial Sequence
  Synthetic
  misc_feature (21)..(21): n is a, c, g, or u
cugaauccugcggacgacccnuc

SEQ ID NO: 77045 - RNA, 24 nt, Artificial Sequence
  Synthetic
  misc_feature (22)..(22): n is a, c, g, or u
gcugaauccugcggacgacccnuc

SEQ ID NO: 77046 - RNA, 18 nt, Artificial Sequence
  Synthetic
agcaucacaucaggauuc

SEQ ID NO: 77047 - RNA, 19 nt, Artificial Sequence
  Synthetic
aagcaucacaucaggauuc

SEQ ID NO: 77048 - RNA, 20 nt, Artificial Sequence
  Synthetic
aaagcaucacaucaggauuc

SEQ ID NO: 77049 - RNA, 21 nt, Artificial Sequence
  Synthetic
gaaagcaucacaucaggauuc

SEQ ID NO: 77050 - RNA, 22 nt, Artificial Sequence
  Synthetic
ggaaagcaucacaucaggauuc

SEQ ID NO: 77051 - RNA, 23 nt, Artificial Sequence
  Synthetic
uggaaagcaucacaucaggauuc

SEQ ID NO: 77052 - RNA, 24 nt, Artificial Sequence
  Synthetic
auggaaagcaucacaucaggauuc

SEQ ID NO: 77053 - RNA, 18 nt, Artificial Sequence
  Synthetic
uucccaauguuaguauuc

SEQ ID NO: 77054 - RNA, 19 nt, Artificial Sequence
  Synthetic
cuucccaauguuaguauuc

SEQ ID NO: 77055 - RNA, 20 nt, Artificial Sequence
  Synthetic
gcuucccaauguuaguauuc

SEQ ID NO: 77056 - RNA, 21 nt, Artificial Sequence
  Synthetic
agcuucccaauguuaguauuc

SEQ ID NO: 77057 - RNA, 22 nt, Artificial Sequence
  Synthetic
cagcuucccaauguuaguauuc

SEQ ID NO: 77058 - RNA, 23 nt, Artificial Sequence
  Synthetic
ccagcuucccaauguuaguauuc

SEQ ID NO: 77059 - RNA, 24 nt, Artificial Sequence
  Synthetic
uccagcuucccaauguuaguauuc

SEQ ID NO: 77060 - RNA, 18 nt, Artificial Sequence
  Synthetic
  misc_feature (3)..(3): n is a, c, g, or u
uunugggucaccuuauuc

SEQ ID NO: 77061 - RNA, 19 nt, Artificial Sequence
  Synthetic
  misc_feature (4)..(4): n is a, c, g, or u
uuunugggucaccuuauuc

SEQ ID NO: 77062 - RNA, 20 nt, Artificial Sequence
  Synthetic
  misc_feature (5)..(5): n is a, c, g, or u
uuuunugggucaccuuauuc

SEQ ID NO: 77063 - RNA, 21 nt, Artificial Sequence
  Synthetic
  misc_feature (6)..(6): n is a, c, g, or u
auuuunugggucaccuuauuc

SEQ ID NO: 77064 - RNA, 22 nt, Artificial Sequence
  Synthetic
  misc_feature (7)..(7): n is a, c, g, or u
cauuuunugggucaccuuauuc

SEQ ID NO: 77065 - RNA, 23 nt, Artificial Sequence
  Synthetic
  misc_feature (8)..(8): n is a, c, g, or u
ucauuuunugggucaccuuauuc

SEQ ID NO: 77066 - RNA, 24 nt, Artificial Sequence
  Synthetic
  misc_feature (9)..(9): n is a, c, g, or u
cucauuuunugggucaccuuauuc

SEQ ID NO: 77067 - RNA, 18 nt, Artificial Sequence
  Synthetic
cuaucuuaucaacacuuc

SEQ ID NO: 77068 - RNA, 19 nt, Artificial Sequence
  Synthetic
ccuaucuuaucaacacuuc

SEQ ID NO: 77069 - RNA, 20 nt, Artificial Sequence
  Synthetic
cccuaucuuaucaacacuuc

SEQ ID NO: 77070 - RNA, 21 nt, Artificial Sequence
  Synthetic
ccccuaucuuaucaacacuuc

SEQ ID NO: 77071 - RNA, 22 nt, Artificial Sequence
  Synthetic
gccccuaucuuaucaacacuuc

SEQ ID NO: 77072 - RNA, 23 nt, Artificial Sequence
  Synthetic
ugccccuaucuuaucaacacuuc

SEQ ID NO: 77073 - RNA, 24 nt, Artificial Sequence
  Synthetic
augccccuaucuuaucaacacuuc

SEQ ID NO: 77074 - RNA, 18 nt, Artificial Sequence
  Synthetic
gaccuugaggcauacuuc

SEQ ID NO: 77075 - RNA, 19 nt, Artificial Sequence
  Synthetic
cgaccuugaggcauacuuc

SEQ ID NO: 77076 - RNA, 20 nt, Artificial Sequence
  Synthetic
ccgaccuugaggcauacuuc

SEQ ID NO: 77077 - RNA, 18 nt, Artificial Sequence
  Synthetic
uucugacuucuuuccuuc

SEQ ID NO: 77078 - RNA, 19 nt, Artificial Sequence
  Synthetic
cuucugacuucuuuccuuc

SEQ ID NO: 77079 - RNA, 20 nt, Artificial Sequence
  Synthetic
ccuucugacuucuuuccuuc

SEQ ID NO: 77080 - RNA, 21 nt, Artificial Sequence
  Synthetic
gccuucugacuucuuuccuuc

SEQ ID NO: 77081 - RNA, 22 nt, Artificial Sequence
  Synthetic
ugccuucugacuucuuuccuuc

SEQ ID NO: 77082 - RNA, 23 nt, Artificial Sequence
  Synthetic
uugccuucugacuucuuuccuuc

SEQ ID NO: 77083 - RNA, 24 nt, Artificial Sequence
  Synthetic
uuugccuucugacuucuuuccuuc

SEQ ID NO: 77084 - RNA, 18 nt, Artificial Sequence
  Synthetic
cucaucucgucaaucuuc

SEQ ID NO: 77085 - RNA, 19 nt, Artificial Sequence
  Synthetic
acucaucucgucaaucuuc

SEQ ID NO: 77086 - RNA, 20 nt, Artificial Sequence
  Synthetic
cacucaucucgucaaucuuc

SEQ ID NO: 77087 - RNA, 21 nt, Artificial Sequence
  Synthetic
ucacucaucucgucaaucuuc

SEQ ID NO: 77088 - RNA, 22 nt, Artificial Sequence
  Synthetic
cucacucaucucgucaaucuuc

SEQ ID NO: 77089 - RNA, 23 nt, Artificial Sequence
  Synthetic
ccucacucaucucgucaaucuuc

SEQ ID NO: 77090 - RNA, 24 nt, Artificial Sequence
  Synthetic
gccucacucaucucgucaaucuuc

SEQ ID NO: 77091 - RNA, 18 nt, Artificial Sequence
  Synthetic
ugcugguggcuccaguuc

SEQ ID NO: 77092 - RNA, 19 nt, Artificial Sequence
  Synthetic
cugcugguggcuccaguuc

SEQ ID NO: 77093 - RNA, 20 nt, Artificial Sequence
  Synthetic
ccugcugguggcuccaguuc

SEQ ID NO: 77094 - RNA, 21 nt, Artificial Sequence
  Synthetic
uccugcugguggcuccaguuc

SEQ ID NO: 77095 - RNA, 22 nt, Artificial Sequence
  Synthetic
uuccugcugguggcuccaguuc

SEQ ID NO: 77096 - RNA, 23 nt, Artificial Sequence
  Synthetic
uuuccugcugguggcuccaguuc

SEQ ID NO: 77097 - RNA, 24 nt, Artificial Sequence
  Synthetic
uuuuccugcugguggcuccaguuc

SEQ ID NO: 77098 - RNA, 18 nt, Artificial Sequence
  Synthetic
ccauuuguucagugguuc

SEQ ID NO: 77099 - RNA, 19 nt, Artificial Sequence
  Synthetic
gccauuuguucagugguuc

SEQ ID NO: 77100 - RNA, 20 nt, Artificial Sequence
  Synthetic
ugccauuuguucagugguuc

SEQ ID NO: 77101 - RNA, 21 nt, Artificial Sequence
  Synthetic
gugccauuuguucagugguuc

SEQ ID NO: 77102 - RNA, 22 nt, Artificial Sequence
  Synthetic
agugccauuuguucagugguuc

SEQ ID NO: 77103 - RNA, 23 nt, Artificial Sequence
  Synthetic
uagugccauuuguucagugguuc

SEQ ID NO: 77104 - RNA, 24 nt, Artificial Sequence
  Synthetic
cuagugccauuuguucagugguuc

SEQ ID NO: 77105 - RNA, 18 nt, Artificial Sequence
  Synthetic
cuacaucauggggcuuuc

SEQ ID NO: 77106 - RNA, 19 nt, Artificial Sequence
  Synthetic
gcuacaucauggggcuuuc

SEQ ID NO: 77107 - RNA, 20 nt, Artificial Sequence
  Synthetic
agcuacaucauggggcuuuc

SEQ ID NO: 77108 - RNA, 21 nt, Artificial Sequence
  Synthetic
gagcuacaucauggggcuuuc

SEQ ID NO: 77109 - RNA, 22 nt, Artificial Sequence
  Synthetic
agagcuacaucauggggcuuuc

SEQ ID NO: 77110 - RNA, 23 nt, Artificial Sequence
  Synthetic
aagagcuacaucauggggcuuuc

SEQ ID NO: 77111 - RNA, 24 nt, Artificial Sequence
  Synthetic
caagagcuacaucauggggcuuuc

SEQ ID NO: 77112 - RNA, 18 nt, Artificial Sequence
  Synthetic
ccaucaucaugggcuuuc

SEQ ID NO: 77113 - RNA, 19 nt, Artificial Sequence
  Synthetic
cccaucaucaugggcuuuc

SEQ ID NO: 77114 - RNA, 20 nt, Artificial Sequence
  Synthetic
ucccaucaucaugggcuuuc

SEQ ID NO: 77115 - RNA, 21 nt, Artificial Sequence
  Synthetic
aucccaucaucaugggcuuuc

SEQ ID NO: 77116 - RNA, 22 nt, Artificial Sequence
  Synthetic
caucccaucaucaugggcuuuc

SEQ ID NO: 77117 - RNA, 23 nt, Artificial Sequence
  Synthetic
ccaucccaucaucaugggcuuuc

SEQ ID NO: 77118 - RNA, 24 nt, Artificial Sequence
  Synthetic
cccaucccaucaucaugggcuuuc

SEQ ID NO: 77119 - RNA, 18 nt, Artificial Sequence
  Synthetic
  misc_feature (14)..(14): n is a, c, g, or u
ggaaauauacaucnuuuc

SEQ ID NO: 77120 - RNA, 19 nt, Artificial Sequence
  Synthetic
  misc_feature (15)..(15): n is a, c, g, or u
cggaaauauacaucnuuuc

SEQ ID NO: 77121 - RNA, 20 nt, Artificial Sequence
  Synthetic
  misc_feature (16)..(16): n is a, c, g, or u
ccggaaauauacaucnuuuc

SEQ ID NO: 77122 - RNA, 21 nt, Artificial Sequence
  Synthetic
  misc_feature (17)..(17): n is a, c, g, or u
cccggaaauauacaucnuuuc

SEQ ID NO: 77123 - RNA, 22 nt, Artificial Sequence
  Synthetic
  misc_feature (18)..(18): n is a, c, g, or u
ucccggaaauauacaucnuuuc

SEQ ID NO: 77124 - RNA, 23 nt, Artificial Sequence
  Synthetic
  misc_feature (19)..(19): n is a, c, g, or u
cucccggaaauauacaucnuuuc

SEQ ID NO: 77125 - RNA, 24 nt, Artificial Sequence
  Synthetic
  misc_feature (20)..(20): n is a, c, g, or u
ucucccggaaauauacaucnuuuc

SEQ ID NO: 77126 - RNA, 18 nt, Artificial Sequence
  Synthetic
ggacuucucucaauuuuc

SEQ ID NO: 77127 - RNA, 19 nt, Artificial Sequence
  Synthetic
uggacuucucucaauuuuc

SEQ ID NO: 77128 - RNA, 20 nt, Artificial Sequence
  Synthetic
guggacuucucucaauuuuc

SEQ ID NO: 77129 - RNA, 21 nt, Artificial Sequence
  Synthetic
gguggacuucucucaauuuuc

SEQ ID NO: 77130 - RNA, 22 nt, Artificial Sequence
  Synthetic
ugguggacuucucucaauuuuc

SEQ ID NO: 77131 - RNA, 23 nt, Artificial Sequence
  Synthetic
gugguggacuucucucaauuuuc

SEQ ID NO: 77132 - RNA, 24 nt, Artificial Sequence
  Synthetic
cgugguggacuucucucaauuuuc

SEQ ID NO: 77133 - RNA, 18 nt, Artificial Sequence
  Synthetic
ucccaacaaaacaaaaag

SEQ ID NO: 77134 - RNA, 19 nt, Artificial Sequence
  Synthetic
aucccaacaaaacaaaaag

SEQ ID NO: 77135 - RNA, 20 nt, Artificial Sequence
  Synthetic
aaucccaacaaaacaaaaag

SEQ ID NO: 77136 - RNA, 21 nt, Artificial Sequence
  Synthetic
aaaucccaacaaaacaaaaag

SEQ ID NO: 77137 - RNA, 22 nt, Artificial Sequence
  Synthetic
uaaaucccaacaaaacaaaaag

SEQ ID NO: 77138 - RNA, 23 nt, Artificial Sequence
  Synthetic
uuaaaucccaacaaaacaaaaag

SEQ ID NO: 77139 - RNA, 24 nt, Artificial Sequence
  Synthetic
uuuaaaucccaacaaaacaaaaag

SEQ ID NO: 77140 - RNA, 18 nt, Artificial Sequence
  Synthetic
gggcaucuuauauaaaag

SEQ ID NO: 77141 - RNA, 19 nt, Artificial Sequence
  Synthetic
cgggcaucuuauauaaaag

SEQ ID NO: 77142 - RNA, 20 nt, Artificial Sequence
  Synthetic
gcgggcaucuuauauaaaag

SEQ ID NO: 77143 - RNA, 21 nt, Artificial Sequence
  Synthetic
ggcgggcaucuuauauaaaag

SEQ ID NO: 77144 - RNA, 22 nt, Artificial Sequence
  Synthetic
aggcgggcaucuuauauaaaag

SEQ ID NO: 77145 - RNA, 23 nt, Artificial Sequence
  Synthetic
aaggcgggcaucuuauauaaaag

SEQ ID NO: 77146 - RNA, 24 nt, Artificial Sequence
  Synthetic
gaaggcgggcaucuuauauaaaag

SEQ ID NO: 77147 - RNA, 18 nt, Artificial Sequence
  Synthetic
acuaauaugggccuaaag

SEQ ID NO: 77148 - RNA, 19 nt, Artificial Sequence
  Synthetic
uacuaauaugggccuaaag

SEQ ID NO: 77149 - RNA, 20 nt, Artificial Sequence
  Synthetic
auacuaauaugggccuaaag

SEQ ID NO: 77150 - RNA, 21 nt, Artificial Sequence
  Synthetic
aauacuaauaugggccuaaag

SEQ ID NO: 77151 - RNA, 22 nt, Artificial Sequence
  Synthetic
caauacuaauaugggccuaaag

SEQ ID NO: 77152 - RNA, 23 nt, Artificial Sequence
  Synthetic
ucaauacuaauaugggccuaaag

SEQ ID NO: 77153 - RNA, 24 nt, Artificial Sequence
  Synthetic
gucaauacuaauaugggccuaaag

SEQ ID NO: 77154 - RNA, 18 nt, Artificial Sequence
  Synthetic
aagacuguuuguuuaaag

SEQ ID NO: 77155 - RNA, 19 nt, Artificial Sequence
  Synthetic
aaagacuguuuguuuaaag

SEQ ID NO: 77156 - RNA, 20 nt, Artificial Sequence
  Synthetic
caaagacuguuuguuuaaag

SEQ ID NO: 77157 - RNA, 21 nt, Artificial Sequence
  Synthetic
ucaaagacuguuuguuuaaag

SEQ ID NO: 77158 - RNA, 22 nt, Artificial Sequence
  Synthetic
uucaaagacuguuuguuuaaag

SEQ ID NO: 77159 - RNA, 23 nt, Artificial Sequence
  Synthetic
cuucaaagacuguuuguuuaaag

SEQ ID NO: 77160 - RNA, 24 nt, Artificial Sequence
  Synthetic
acuucaaagacuguuuguuuaaag

SEQ ID NO: 77161 - RNA, 18 nt, Artificial Sequence
  Synthetic
  misc_feature (6)..(6): n is a, c, g, or u
uggacngaagccaacaag

SEQ ID NO: 77162 - RNA, 19 nt, Artificial Sequence
  Synthetic
  misc_feature (7)..(7): n is a, c, g, or u
cuggacngaagccaacaag

SEQ ID NO: 77163 - RNA, 20 nt, Artificial Sequence
  Synthetic
  misc_feature (8)..(8): n is a, c, g, or u
acuggacngaagccaacaag

SEQ ID NO: 77164 - RNA, 21 nt, Artificial Sequence
  Synthetic
  misc_feature (9)..(9): n is a, c, g, or u
cacuggacngaagccaacaag

SEQ ID NO: 77165 - RNA, 22 nt, Artificial Sequence
  Synthetic
  misc_feature (10)..(10): n is a, c, g, or u
ccacuggacngaagccaacaag

SEQ ID NO: 77166 - RNA, 23 nt, Artificial Sequence
  Synthetic
  misc_feature (11)..(11): n is a, c, g, or u
accacuggacngaagccaacaag

SEQ ID NO: 77167 - RNA, 24 nt, Artificial Sequence
  Synthetic
  misc_feature (12)..(12): n is a, c, g, or u
gaccacuggacngaagccaacaag

SEQ ID NO: 77168 - RNA, 18 nt, Artificial Sequence
  Synthetic
auuccuuggacucacaag

SEQ ID NO: 77169 - RNA, 19 nt, Artificial Sequence
  Synthetic
uauuccuuggacucacaag

SEQ ID NO: 77170 - RNA, 20 nt, Artificial Sequence
  Synthetic
guauuccuuggacucacaag

SEQ ID NO: 77171 - RNA, 21 nt, Artificial Sequence
  Synthetic
aguauuccuuggacucacaag

SEQ ID NO: 77172 - RNA, 22 nt, Artificial Sequence
  Synthetic
uaguauuccuuggacucacaag

SEQ ID NO: 77173 - RNA, 23 nt, Artificial Sequence
  Synthetic
uuaguauuccuuggacucacaag

SEQ ID NO: 77174 - RNA, 24 nt, Artificial Sequence
  Synthetic
guuaguauuccuuggacucacaag

SEQ ID NO: 77175 - RNA, 18 nt, Artificial Sequence
  Synthetic
aggcagguccccuagaag

SEQ ID NO: 77176 - RNA, 19 nt, Artificial Sequence
  Synthetic
gaggcagguccccuagaag

SEQ ID NO: 77177 - RNA, 20 nt, Artificial Sequence
  Synthetic
agaggcagguccccuagaag

SEQ ID NO: 77178 - RNA, 21 nt, Artificial Sequence
  Synthetic
aagaggcagguccccuagaag

SEQ ID NO: 77179 - RNA, 22 nt, Artificial Sequence
  Synthetic
gaagaggcagguccccuagaag

SEQ ID NO: 77180 - RNA, 23 nt, Artificial Sequence
  Synthetic
cgaagaggcagguccccuagaag

SEQ ID NO: 77181 - RNA, 24 nt, Artificial Sequence
  Synthetic
acgaagaggcagguccccuagaag

SEQ ID NO: 77182 - RNA, 18 nt, Artificial Sequence
  Synthetic
aguaaaugaaaaacgaag

SEQ ID NO: 77183 - RNA, 19 nt, Artificial Sequence
  Synthetic
caguaaaugaaaaacgaag

SEQ ID NO: 77184 - RNA, 20 nt, Artificial Sequence
  Synthetic
acaguaaaugaaaaacgaag

SEQ ID NO: 77185 - RNA, 21 nt, Artificial Sequence
  Synthetic
aacaguaaaugaaaaacgaag

SEQ ID NO: 77186 - RNA, 22 nt, Artificial Sequence
  Synthetic
uaacaguaaaugaaaaacgaag

SEQ ID NO: 77187 - RNA, 23 nt, Artificial Sequence
  Synthetic
cuaacaguaaaugaaaaacgaag

SEQ ID NO: 77188 - RNA, 24 nt, Artificial Sequence
  Synthetic
ucuaacaguaaaugaaaaacgaag

SEQ ID NO: 77189 - RNA, 18 nt, Artificial Sequence
  Synthetic
uuacauacccuauggaag

SEQ ID NO: 77190 - RNA, 19 nt, Artificial Sequence
  Synthetic
uuuacauacccuauggaag

SEQ ID NO: 77191 - RNA, 20 nt, Artificial Sequence
  Synthetic
auuuacauacccuauggaag

SEQ ID NO: 77192 - RNA, 21 nt, Artificial Sequence
  Synthetic
uauuuacauacccuauggaag

SEQ ID NO: 77193 - RNA, 22 nt, Artificial Sequence
  Synthetic
cuauuuacauacccuauggaag

SEQ ID NO: 77194 - RNA, 23 nt, Artificial Sequence
  Synthetic
acuauuuacauacccuauggaag

SEQ ID NO: 77195 - RNA, 24 nt, Artificial Sequence
  Synthetic
cacuauuuacauacccuauggaag

SEQ ID NO: 77196 - RNA, 18 nt, Artificial Sequence
  Synthetic
ggguuauguaauuggaag

SEQ ID NO: 77197 - RNA, 19 nt, Artificial Sequence
  Synthetic
uggguuauguaauuggaag

SEQ ID NO: 77198 - RNA, 20 nt, Artificial Sequence
  Synthetic
auggguuauguaauuggaag

SEQ ID NO: 77199 - RNA, 21 nt, Artificial Sequence
  Synthetic
cauggguuauguaauuggaag

SEQ ID NO: 77200 - RNA, 22 nt, Artificial Sequence
  Synthetic
ucauggguuauguaauuggaag

SEQ ID NO: 77201 - RNA, 23 nt, Artificial Sequence
  Synthetic
uucauggguuauguaauuggaag

SEQ ID NO: 77202 - RNA, 24 nt, Artificial Sequence
  Synthetic
uuucauggguuauguaauuggaag

SEQ ID NO: 77203 - RNA, 18 nt, Artificial Sequence
  Synthetic
uugucucacuuuuggaag

SEQ ID NO: 77204 - RNA, 19 nt, Artificial Sequence
  Synthetic
cuugucucacuuuuggaag

SEQ ID NO: 77205 - RNA, 20 nt, Artificial Sequence
  Synthetic
ucuugucucacuuuuggaag

SEQ ID NO: 77206 - RNA, 21 nt, Artificial Sequence
  Synthetic
uucuugucucacuuuuggaag

SEQ ID NO: 77207 - RNA, 22 nt, Artificial Sequence
  Synthetic
uuucuugucucacuuuuggaag

SEQ ID NO: 77208 - RNA, 23 nt, Artificial Sequence
  Synthetic
auuucuugucucacuuuuggaag

SEQ ID NO: 77209 - RNA, 24 nt, Artificial Sequence
  Synthetic
cauuucuugucucacuuuuggaag

SEQ ID NO: 77210 - RNA, 18 nt, Artificial Sequence
  Synthetic
ccccugcucguguuacag

SEQ ID NO: 77211 - RNA, 19 nt, Artificial Sequence
  Synthetic
accccugcucguguuacag

SEQ ID NO: 77212 - RNA, 20 nt, Artificial Sequence
  Synthetic
gaccccugcucguguuacag

SEQ ID NO: 77213 - RNA, 21 nt, Artificial Sequence
  Synthetic
ggaccccugcucguguuacag

SEQ ID NO: 77214 - RNA, 22 nt, Artificial Sequence
  Synthetic
aggaccccugcucguguuacag

SEQ ID NO: 77215 - RNA, 23 nt, Artificial Sequence
  Synthetic
uaggaccccugcucguguuacag

SEQ ID NO: 77216 - RNA, 24 nt, Artificial Sequence
  Synthetic
cuaggaccccugcucguguuacag

SEQ ID NO: 77217 - RNA, 18 nt, Artificial Sequence
  Synthetic
aggaucaucaaccaccag

SEQ ID NO: 77218 - RNA, 19 nt, Artificial Sequence
  Synthetic
caggaucaucaaccaccag

SEQ ID NO: 77219 - RNA, 20 nt, Artificial Sequence
  Synthetic
ccaggaucaucaaccaccag

SEQ ID NO: 77220 - RNA, 21 nt, Artificial Sequence
  Synthetic
uccaggaucaucaaccaccag

SEQ ID NO: 77221 - RNA, 22 nt, Artificial Sequence
  Synthetic
uuccaggaucaucaaccaccag

SEQ ID NO: 77222 - RNA, 23 nt, Artificial Sequence
  Synthetic
auuccaggaucaucaaccaccag

SEQ ID NO: 77223 - RNA, 24 nt, Artificial Sequence
  Synthetic
aauuccaggaucaucaaccaccag

SEQ ID NO: 77224 - RNA, 18 nt, Artificial Sequence
  Synthetic
agcucugcaggaucccag

SEQ ID NO: 77225 - RNA, 19 nt, Artificial Sequence
  Synthetic
aagcucugcaggaucccag

SEQ ID NO: 77226 - RNA, 20 nt, Artificial Sequence
  Synthetic
caagcucugcaggaucccag

SEQ ID NO: 77227 - RNA, 21 nt, Artificial Sequence
  Synthetic
ccaagcucugcaggaucccag

SEQ ID NO: 77228 - RNA, 22 nt, Artificial Sequence
  Synthetic
accaagcucugcaggaucccag

SEQ ID NO: 77229 - RNA, 23 nt, Artificial Sequence
  Synthetic
caccaagcucugcaggaucccag

SEQ ID NO: 77230 - RNA, 24 nt, Artificial Sequence
  Synthetic
ccaccaagcucugcaggaucccag

SEQ ID NO: 77231 - RNA, 18 nt, Artificial Sequence
  Synthetic
caaacaccagaaauccag

SEQ ID NO: 77232 - RNA, 19 nt, Artificial Sequence
  Synthetic
gcaaacaccagaaauccag

SEQ ID NO: 77233 - RNA, 20 nt, Artificial Sequence
  Synthetic
agcaaacaccagaaauccag

SEQ ID NO: 77234 - RNA, 21 nt, Artificial Sequence
  Synthetic
gagcaaacaccagaaauccag

SEQ ID NO: 77235 - RNA, 22 nt, Artificial Sequence
  Synthetic
agagcaaacaccagaaauccag

SEQ ID NO: 77236 - RNA, 23 nt, Artificial Sequence
  Synthetic
cagagcaaacaccagaaauccag

SEQ ID NO: 77237 - RNA, 24 nt, Artificial Sequence
  Synthetic
ucagagcaaacaccagaaauccag

SEQ ID NO: 77238 - RNA, 18 nt, Artificial Sequence
  Synthetic
aacucccucgccucgcag

SEQ ID NO: 77239 - RNA, 19 nt, Artificial Sequence
  Synthetic
gaacucccucgccucgcag

SEQ ID NO: 77240 - RNA, 20 nt, Artificial Sequence
  Synthetic
agaacucccucgccucgcag

SEQ ID NO: 77241 - RNA, 21 nt, Artificial Sequence
  Synthetic
aagaacucccucgccucgcag

SEQ ID NO: 77242 - RNA, 22 nt, Artificial Sequence
  Synthetic
gaagaacucccucgccucgcag

SEQ ID NO: 77243 - RNA, 23 nt, Artificial Sequence
  Synthetic
agaagaacucccucgccucgcag

SEQ ID NO: 77244 - RNA, 24 nt, Artificial Sequence
  Synthetic
aagaagaacucccucgccucgcag

SEQ ID NO: 77245 - RNA, 18 nt, Artificial Sequence
  Synthetic
gccuccaccaaucggcag

SEQ ID NO: 77246 - RNA, 19 nt, Artificial Sequence
  Synthetic
ugccuccaccaaucggcag

SEQ ID NO: 77247 - RNA, 20 nt, Artificial Sequence
  Synthetic
cugccuccaccaaucggcag

SEQ ID NO: 77248 - RNA, 21 nt, Artificial Sequence
  Synthetic
ccugccuccaccaaucggcag

SEQ ID NO: 77249 - RNA, 22 nt, Artificial Sequence
  Synthetic
uccugccuccaccaaucggcag

SEQ ID NO: 77250 - RNA, 23 nt, Artificial Sequence
  Synthetic
cuccugccuccaccaaucggcag

SEQ ID NO: 77251 - RNA, 24 nt, Artificial Sequence
  Synthetic
ccuccugccuccaccaaucggcag

SEQ ID NO: 77252 - RNA, 18 nt, Artificial Sequence
  Synthetic
cauccucaggccaugcag

SEQ ID NO: 77253 - RNA, 19 nt, Artificial Sequence
  Synthetic
ucauccucaggccaugcag

SEQ ID NO: 77254 - RNA, 20 nt, Artificial Sequence
  Synthetic
cucauccucaggccaugcag

SEQ ID NO: 77255 - RNA, 21 nt, Artificial Sequence
  Synthetic
acucauccucaggccaugcag

SEQ ID NO: 77256 - RNA, 22 nt, Artificial Sequence
  Synthetic
cacucauccucaggccaugcag

SEQ ID NO: 77257 - RNA, 23 nt, Artificial Sequence
  Synthetic
acacucauccucaggccaugcag

SEQ ID NO: 77258 - RNA, 24 nt, Artificial Sequence
  Synthetic
gacacucauccucaggccaugcag

SEQ ID NO: 77259 - RNA, 18 nt, Artificial Sequence
  Synthetic
  misc_feature (7)..(7): n is a, c, g, or u
accacangaacacaucag

SEQ ID NO: 77260 - RNA, 19 nt, Artificial Sequence
  Synthetic
  misc_feature (8)..(8): n is a, c, g, or u
uaccacangaacacaucag

SEQ ID NO: 77261 - RNA, 20 nt, Artificial Sequence
  Synthetic
  misc_feature (9)..(9): n is a, c, g, or u
uuaccacangaacacaucag

SEQ ID NO: 77262 - RNA, 21 nt, Artificial Sequence
  Synthetic
  misc_feature (10)..(10): n is a, c, g, or u
auuaccacangaacacaucag

SEQ ID NO: 77263 - RNA, 22 nt, Artificial Sequence
  Synthetic
  misc_feature (11)..(11): n is a, c, g, or u
cauuaccacangaacacaucag

SEQ ID NO: 77264 - RNA, 23 nt, Artificial Sequence
  Synthetic
  misc_feature (12)..(12): n is a, c, g, or u
ucauuaccacangaacacaucag

SEQ ID NO: 77265 - RNA, 24 nt, Artificial Sequence
  Synthetic
  misc_feature (1)..(1): n is a, c, g, or u
  misc_feature (13)..(13): n is a, c, g, or u
nucauuaccacangaacacaucag

SEQ ID NO: 77266 - RNA, 18 nt, Artificial Sequence
  Synthetic
  misc_feature (1)..(1): n is a, c, g, or u
  misc_feature (7)..(7): n is a, c, g, or u
ncaccanacugcacucag

SEQ ID NO: 77267 - RNA, 19 nt, Artificial Sequence
  Synthetic
  misc_feature (2)..(2): n is a, c, g, or u
  misc_feature (8)..(8): n is a, c, g, or u
cncaccanacugcacucag

SEQ ID NO: 77268 - RNA, 20 nt, Artificial Sequence
  Synthetic
  misc_feature (3)..(3): n is a, c, g, or u
  misc_feature (9)..(9): n is a, c, g, or u
ccncaccanacugcacucag

SEQ ID NO: 77269 - RNA, 21 nt, Artificial Sequence
  Synthetic
  misc_feature (4)..(4): n is a, c, g, or u
  misc_feature (10)..(10): n is a, c, g, or u
accncaccanacugcacucag

SEQ ID NO: 77270 - RNA, 22 nt, Artificial Sequence
  Synthetic
  misc_feature (5)..(5): n is a, c, g, or u
  misc_feature (11)..(11): n is a, c, g, or u
caccncaccanacugcacucag

SEQ ID NO: 77271 - RNA, 23 nt, Artificial Sequence
  Synthetic
  misc_feature (6)..(6): n is a, c, g, or u
  misc_feature (12)..(12): n is a, c, g, or u
ucaccncaccanacugcacucag

SEQ ID NO: 77272 - RNA, 24 nt, Artificial Sequence
  Synthetic
  misc_feature (7)..(7): n is a, c, g, or u
  misc_feature (13)..(13): n is a, c, g, or u
uucaccncaccanacugcacucag

SEQ ID NO: 77273 - RNA, 18 nt, Artificial Sequence
  Synthetic
ccaccaaucggcagucag

SEQ ID NO: 77274 - RNA, 19 nt, Artificial Sequence
  Synthetic
uccaccaaucggcagucag

SEQ ID NO: 77275 - RNA, 20 nt, Artificial Sequence
  Synthetic
cuccaccaaucggcagucag

SEQ ID NO: 77276 - RNA, 21 nt, Artificial Sequence
  Synthetic
ccuccaccaaucggcagucag

SEQ ID NO: 77277 - RNA, 22 nt, Artificial Sequence
  Synthetic
gccuccaccaaucggcagucag

SEQ ID NO: 77278 - RNA, 23 nt, Artificial Sequence
  Synthetic
ugccuccaccaaucggcagucag

SEQ ID NO: 77279 - RNA, 24 nt, Artificial Sequence
  Synthetic
cugccuccaccaaucggcagucag

SEQ ID NO: 77280 - RNA, 18 nt, Artificial Sequence
  Synthetic
guuggauccagcauucag

SEQ ID NO: 77281 - RNA, 19 nt, Artificial Sequence
  Synthetic
aguuggauccagcauucag

SEQ ID NO: 77282 - RNA, 20 nt, Artificial Sequence
  Synthetic
caguuggauccagcauucag

SEQ ID NO: 77283 - RNA, 21 nt, Artificial Sequence
  Synthetic
ccaguuggauccagcauucag

SEQ ID NO: 77284 - RNA, 22 nt, Artificial Sequence
  Synthetic
accaguuggauccagcauucag

SEQ ID NO: 77285 - RNA, 23 nt, Artificial Sequence
  Synthetic
caccaguuggauccagcauucag

SEQ ID NO: 77286 - RNA, 24 nt, Artificial Sequence
  Synthetic
ccaccaguuggauccagcauucag

SEQ ID NO: 77287 - RNA, 18 nt, Artificial Sequence
  Synthetic
cugacuucuuuccuucag

SEQ ID NO: 77288 - RNA, 19 nt, Artificial Sequence
  Synthetic
ucugacuucuuuccuucag

SEQ ID NO: 77289 - RNA, 20 nt, Artificial Sequence
  Synthetic
uucugacuucuuuccuucag

SEQ ID NO: 77290 - RNA, 21 nt, Artificial Sequence
  Synthetic
cuucugacuucuuuccuucag

SEQ ID NO: 77291 - RNA, 22 nt, Artificial Sequence
  Synthetic
ccuucugacuucuuuccuucag

SEQ ID NO: 77292 - RNA, 23 nt, Artificial Sequence
  Synthetic
gccuucugacuucuuuccuucag

SEQ ID NO: 77293 - RNA, 24 nt, Artificial Sequence
  Synthetic
ugccuucugacuucuuuccuucag

SEQ ID NO: 77294 - RNA, 18 nt, Artificial Sequence
  Synthetic
cucugcaggaucccagag

SEQ ID NO: 77295 - RNA, 19 nt, Artificial Sequence
  Synthetic
gcucugcaggaucccagag

SEQ ID NO: 77296 - RNA, 20 nt, Artificial Sequence
  Synthetic
agcucugcaggaucccagag

SEQ ID NO: 77297 - RNA, 21 nt, Artificial Sequence
  Synthetic
aagcucugcaggaucccagag

SEQ ID NO: 77298 - RNA, 22 nt, Artificial Sequence
  Synthetic
caagcucugcaggaucccagag

SEQ ID NO: 77299 - RNA, 23 nt, Artificial Sequence
  Synthetic
ccaagcucugcaggaucccagag

SEQ ID NO: 77300 - RNA, 24 nt, Artificial Sequence
  Synthetic
accaagcucugcaggaucccagag

SEQ ID NO: 77301 - RNA, 18 nt, Artificial Sequence
  Synthetic
ccucacaauaccgcagag

SEQ ID NO: 77302 - RNA, 19 nt, Artificial Sequence
  Synthetic
uccucacaauaccgcagag

SEQ ID NO: 77303 - RNA, 20 nt, Artificial Sequence
  Synthetic
auccucacaauaccgcagag

SEQ ID NO: 77304 - RNA, 21 nt, Artificial Sequence
  Synthetic
aauccucacaauaccgcagag

SEQ ID NO: 77305 - RNA, 22 nt, Artificial Sequence
  Synthetic
aaauccucacaauaccgcagag

SEQ ID NO: 77306 - RNA, 23 nt, Artificial Sequence
  Synthetic
aaaauccucacaauaccgcagag

SEQ ID NO: 77307 - RNA, 24 nt, Artificial Sequence
  Synthetic
aaaaauccucacaauaccgcagag

SEQ ID NO: 77308 - RNA, 18 nt, Artificial Sequence
  Synthetic
  misc_feature (8)..(8): n is a, c, g, or u
gaggagungggggaggag

SEQ ID NO: 77309 - RNA, 19 nt, Artificial Sequence
  Synthetic
  misc_feature (9)..(9): n is a, c, g, or u
ggaggagungggggaggag

SEQ ID NO: 77310 - RNA, 20 nt, Artificial Sequence
  Synthetic
  misc_feature (10)..(10): n is a, c, g, or u
gggaggagungggggaggag

SEQ ID NO: 77311 - RNA, 21 nt, Artificial Sequence
  Synthetic
  misc_feature (11)..(11): n is a, c, g, or u
ugggaggagungggggaggag

SEQ ID NO: 77312 - RNA, 22 nt, Artificial Sequence
  Synthetic
  misc_feature (12)..(12): n is a, c, g, or u
cugggaggagungggggaggag

SEQ ID NO: 77313 - RNA, 23 nt, Artificial Sequence
  Synthetic
  misc_feature (13)..(13): n is a, c, g, or u
acugggaggagungggggaggag

SEQ ID NO: 77314 - RNA, 24 nt, Artificial Sequence
  Synthetic
  misc_feature (14)..(14): n is a, c, g, or u
gacugggaggagungggggaggag

SEQ ID NO: 77315 - RNA, 18 nt, Artificial Sequence
  Synthetic
uuuaaagacugggaggag

SEQ ID NO: 77316 - RNA, 19 nt, Artificial Sequence
  Synthetic
guuuaaagacugggaggag

SEQ ID NO: 77317 - RNA, 20 nt, Artificial Sequence
  Synthetic
uguuuaaagacugggaggag

SEQ ID NO: 77318 - RNA, 21 nt, Artificial Sequence
  Synthetic
uuguuuaaagacugggaggag

SEQ ID NO: 77319 - RNA, 22 nt, Artificial Sequence
  Synthetic
uuuguuuaaagacugggaggag

SEQ ID NO: 77320 - RNA, 23 nt, Artificial Sequence
  Synthetic
guuuguuuaaagacugggaggag

SEQ ID NO: 77321 - RNA, 24 nt, Artificial Sequence
  Synthetic
uguuuguuuaaagacugggaggag

SEQ ID NO: 77322 - RNA, 18 nt, Artificial Sequence
  Synthetic
aagccaacaagguaggag

SEQ ID NO: 77323 - RNA, 19 nt, Artificial Sequence
  Synthetic
gaagccaacaagguaggag

SEQ ID NO: 77324 - RNA, 20 nt, Artificial Sequence
  Synthetic
  misc_feature (1)..(1): n is a, c, g, or u
ngaagccaacaagguaggag

SEQ ID NO: 77325 - RNA, 21 nt, Artificial Sequence
  Synthetic
  misc_feature (2)..(2): n is a, c, g, or u
cngaagccaacaagguaggag

SEQ ID NO: 77326 - RNA, 22 nt, Artificial Sequence
  Synthetic
  misc_feature (3)..(3): n is a, c, g, or u
acngaagccaacaagguaggag

SEQ ID NO: 77327 - RNA, 23 nt, Artificial Sequence
  Synthetic
  misc_feature (4)..(4): n is a, c, g, or u
gacngaagccaacaagguaggag

SEQ ID NO: 77328 - RNA, 24 nt, Artificial Sequence
  Synthetic
  misc_feature (5)..(5): n is a, c, g, or u
ggacngaagccaacaagguaggag

SEQ ID NO: 77329 - RNA, 18 nt, Artificial Sequence
  Synthetic
cucgcagcaggucuggag

SEQ ID NO: 77330 - RNA, 19 nt, Artificial Sequence
  Synthetic
gcucgcagcaggucuggag

SEQ ID NO: 77331 - RNA, 20 nt, Artificial Sequence
  Synthetic
ugcucgcagcaggucuggag

SEQ ID NO: 77332 - RNA, 21 nt, Artificial Sequence
  Synthetic
uugcucgcagcaggucuggag

SEQ ID NO: 77333 - RNA, 22 nt, Artificial Sequence
  Synthetic
uuugcucgcagcaggucuggag

SEQ ID NO: 77334 - RNA, 23 nt, Artificial Sequence
  Synthetic
uuuugcucgcagcaggucuggag

SEQ ID NO: 77335 - RNA, 24 nt, Artificial Sequence
  Synthetic
guuuugcucgcagcaggucuggag

SEQ ID NO: 77336 - RNA, 18 nt, Artificial Sequence
  Synthetic
auuuggugucuuuuggag

SEQ ID NO: 77337 - RNA, 19 nt, Artificial Sequence
  Synthetic
uauuuggugucuuuuggag

SEQ ID NO: 77338 - RNA, 20 nt, Artificial Sequence
  Synthetic
guauuuggugucuuuuggag

SEQ ID NO: 77339 - RNA, 21 nt, Artificial Sequence
  Synthetic
aguauuuggugucuuuuggag

SEQ ID NO: 77340 - RNA, 22 nt, Artificial Sequence
  Synthetic
gaguauuuggugucuuuuggag

SEQ ID NO: 77341 - RNA, 23 nt, Artificial Sequence
  Synthetic
agaguauuuggugucuuuuggag

SEQ ID NO: 77342 - RNA, 24 nt, Artificial Sequence
  Synthetic
uagaguauuuggugucuuuuggag

SEQ ID NO: 77343 - RNA, 18 nt, Artificial Sequence
  Synthetic
  misc_feature (2)..(2): n is a, c, g, or u
  misc_feature (11)..(11): n is a, c, g, or u
cnaaauauuunccccuag

SEQ ID NO: 77344 - RNA, 19 nt, Artificial Sequence
  Synthetic
  misc_feature (3)..(3): n is a, c, g, or u
  misc_feature (12)..(12): n is a, c, g, or u
acnaaauauuunccccuag

SEQ ID NO: 77345 - RNA, 20 nt, Artificial Sequence
  Synthetic
  misc_feature (4)..(4): n is a, c, g, or u
  misc_feature (13)..(13): n is a, c, g, or u
uacnaaauauuunccccuag

SEQ ID NO: 77346 - RNA, 21 nt, Artificial Sequence
  Synthetic
  misc_feature (5)..(5): n is a, c, g, or u
  misc_feature (14)..(14): n is a, c, g, or u
cuacnaaauauuunccccuag

SEQ ID NO: 77347 - RNA, 22 nt, Artificial Sequence
  Synthetic
  misc_feature (6)..(6): n is a, c, g, or u
  misc_feature (15)..(15): n is a, c, g, or u
ucuacnaaauauuunccccuag

SEQ ID NO: 77348 - RNA, 23 nt, Artificial Sequence
  Synthetic
  misc_feature (7)..(7): n is a, c, g, or u
  misc_feature (16)..(16): n is a, c, g, or u
cucuacnaaauauuunccccuag

SEQ ID NO: 77349 - RNA, 24 nt, Artificial Sequence
  Synthetic
  misc_feature (8)..(8): n is a, c, g, or u
  misc_feature (17)..(17): n is a, c, g, or u
ucucuacnaaauauuunccccuag

SEQ ID NO: 77350 - RNA, 18 nt, Artificial Sequence
  Synthetic
aagaggcagguccccuag

SEQ ID NO: 77351 - RNA, 19 nt, Artificial Sequence
  Synthetic
gaagaggcagguccccuag

SEQ ID NO: 77352 - RNA, 20 nt, Artificial Sequence
  Synthetic
cgaagaggcagguccccuag

SEQ ID NO: 77353 - RNA, 21 nt, Artificial Sequence
  Synthetic
acgaagaggcagguccccuag

SEQ ID NO: 77354 - RNA, 22 nt, Artificial Sequence
  Synthetic
gacgaagaggcagguccccuag

SEQ ID NO: 77355 - RNA, 23 nt, Artificial Sequence
  Synthetic
agacgaagaggcagguccccuag

SEQ ID NO: 77356 - RNA, 24 nt, Artificial Sequence
  Synthetic
uagacgaagaggcagguccccuag

SEQ ID NO: 77357 - RNA, 18 nt, Artificial Sequence
  Synthetic
cuucucucaauuuucuag

SEQ ID NO: 77358 - RNA, 19 nt, Artificial Sequence
  Synthetic
acuucucucaauuuucuag

SEQ ID NO: 77359 - RNA, 20 nt, Artificial Sequence
  Synthetic
gacuucucucaauuuucuag

SEQ ID NO: 77360 - RNA, 21 nt, Artificial Sequence
  Synthetic
ggacuucucucaauuuucuag

SEQ ID NO: 77361 - RNA, 22 nt, Artificial Sequence
  Synthetic
uggacuucucucaauuuucuag

SEQ ID NO: 77362 - RNA, 23 nt, Artificial Sequence
  Synthetic
guggacuucucucaauuuucuag

SEQ ID NO: 77363 - RNA, 24 nt, Artificial Sequence
  Synthetic
gguggacuucucucaauuuucuag

SEQ ID NO: 77364 - RNA, 18 nt, Artificial Sequence
  Synthetic
  misc_feature (3)..(3): n is a, c, g, or u
  misc_feature (15)..(15): n is a, c, g, or u
gungggggaggaganuag

SEQ ID NO: 77365 - RNA, 19 nt, Artificial Sequence
  Synthetic
  misc_feature (4)..(4): n is a, c, g, or u
  misc_feature (16)..(16): n is a, c, g, or u
agungggggaggaganuag

SEQ ID NO: 77366 - RNA, 20 nt, Artificial Sequence
  Synthetic
  misc_feature (5)..(5): n is a, c, g, or u
  misc_feature (17)..(17): n is a, c, g, or u
gagungggggaggaganuag

SEQ ID NO: 77367 - RNA, 21 nt, Artificial Sequence
  Synthetic
  misc_feature (6)..(6): n is a, c, g, or u
  misc_feature (18)..(18): n is a, c, g, or u
ggagungggggaggaganuag

SEQ ID NO: 77368 - RNA, 22 nt, Artificial Sequence
  Synthetic
  misc_feature (7)..(7): n is a, c, g, or u
  misc_feature (19)..(19): n is a, c, g, or u
aggagungggggaggaganuag

SEQ ID NO: 77369 - RNA, 23 nt, Artificial Sequence
  Synthetic
  misc_feature (8)..(8): n is a, c, g, or u
  misc_feature (20)..(20): n is a, c, g, or u
gaggagungggggaggaganuag

SEQ ID NO: 77370 - RNA, 24 nt, Artificial Sequence
  Synthetic
  misc_feature (9)..(9): n is a, c, g, or u
  misc_feature (21)..(21): n is a, c, g, or u
ggaggagungggggaggaganuag

SEQ ID NO: 77371 - RNA, 18 nt, Artificial Sequence
  Synthetic
  misc_feature (6)..(6): n is a, c, g, or u
ggaganuacuguuguuag

SEQ ID NO: 77372 - RNA, 19 nt, Artificial Sequence
  Synthetic
  misc_feature (7)..(7): n is a, c, g, or u
cggaganuacuguuguuag

SEQ ID NO: 77373 - RNA, 20 nt, Artificial Sequence
  Synthetic
  misc_feature (8)..(8): n is a, c, g, or u
ccggaganuacuguuguuag

SEQ ID NO: 77374 - RNA, 21 nt, Artificial Sequence
  Synthetic
  misc_feature (9)..(9): n is a, c, g, or u
uccggaganuacuguuguuag

SEQ ID NO: 77375 - RNA, 22 nt, Artificial Sequence
  Synthetic
  misc_feature (10)..(10): n is a, c, g, or u
uuccggaganuacuguuguuag

SEQ ID NO: 77376 - RNA, 23 nt, Artificial Sequence
  Synthetic
  misc_feature (11)..(11): n is a, c, g, or u
cuuccggaganuacuguuguuag

SEQ ID NO: 77377 - RNA, 24 nt, Artificial Sequence
  Synthetic
  misc_feature (12)..(12): n is a, c, g, or u
acuuccggaganuacuguuguuag

SEQ ID NO: 77378 - RNA, 18 nt, Artificial Sequence
  Synthetic
  misc_feature (6)..(6): n is a, c, g, or u
cucucngcaaugucaacg

SEQ ID NO: 77379 - RNA, 19 nt, Artificial Sequence
  Synthetic
  misc_feature (7)..(7): n is a, c, g, or u
acucucngcaaugucaacg

SEQ ID NO: 77380 - RNA, 20 nt, Artificial Sequence
  Synthetic
  misc_feature (8)..(8): n is a, c, g, or u
gacucucngcaaugucaacg

SEQ ID NO: 77381 - RNA, 21 nt, Artificial Sequence
  Synthetic
  misc_feature (9)..(9): n is a, c, g, or u
ggacucucngcaaugucaacg

SEQ ID NO: 77382 - RNA, 22 nt, Artificial Sequence
  Synthetic
  misc_feature (10)..(10): n is a, c, g, or u
uggacucucngcaaugucaacg

SEQ ID NO: 77383 - RNA, 23 nt, Artificial Sequence
  Synthetic
  misc_feature (11)..(11): n is a, c, g, or u
uuggacucucngcaaugucaacg

SEQ ID NO: 77384 - RNA, 24 nt, Artificial Sequence
  Synthetic
  misc_feature (12)..(12): n is a, c, g, or u
cuuggacucucngcaaugucaacg

SEQ ID NO: 77385 - RNA, 18 nt, Artificial Sequence
  Synthetic
  misc_feature (3)..(3): n is a, c, g, or u
ganuacuguuguuagacg

SEQ ID NO: 77386 - RNA, 19 nt, Artificial Sequence
  Synthetic
  misc_feature (4)..(4): n is a, c, g, or u
aganuacuguuguuagacg

SEQ ID NO: 77387 - RNA, 20 nt, Artificial Sequence
  Synthetic
  misc_feature (5)..(5): n is a, c, g, or u
gaganuacuguuguuagacg

SEQ ID NO: 77388 - RNA, 21 nt, Artificial Sequence
  Synthetic
  misc_feature (6)..(6): n is a, c, g, or u
ggaganuacuguuguuagacg

SEQ ID NO: 77389 - RNA, 22 nt, Artificial Sequence
  Synthetic
  misc_feature (7)..(7): n is a, c, g, or u
cggaganuacuguuguuagacg

SEQ ID NO: 77390 - RNA, 23 nt, Artificial Sequence
  Synthetic
  misc_feature (8)..(8): n is a, c, g, or u
ccggaganuacuguuguuagacg

SEQ ID NO: 77391 - RNA, 24 nt, Artificial Sequence
  Synthetic
  misc_feature (9)..(9): n is a, c, g, or u
uccggaganuacuguuguuagacg

SEQ ID NO: 77392 - RNA, 18 nt, Artificial Sequence
  Synthetic
aggccaucagcgcaugcg

SEQ ID NO: 77393 - RNA, 19 nt, Artificial Sequence
  Synthetic
uaggccaucagcgcaugcg

SEQ ID NO: 77394 - RNA, 20 nt, Artificial Sequence
  Synthetic
auaggccaucagcgcaugcg

SEQ ID NO: 77395 - RNA, 21 nt, Artificial Sequence
  Synthetic
cauaggccaucagcgcaugcg

SEQ ID NO: 77396 - RNA, 22 nt, Artificial Sequence
  Synthetic
ccauaggccaucagcgcaugcg

SEQ ID NO: 77397 - RNA, 23 nt, Artificial Sequence
  Synthetic
gccauaggccaucagcgcaugcg

SEQ ID NO: 77398 - RNA, 24 nt, Artificial Sequence
  Synthetic
ggccauaggccaucagcgcaugcg

SEQ ID NO: 77399 - RNA, 18 nt, Artificial Sequence
  Synthetic
ucagcgcugaauccugcg

SEQ ID NO: 77400 - RNA, 19 nt, Artificial Sequence
  Synthetic
gucagcgcugaauccugcg

SEQ ID NO: 77401 - RNA, 20 nt, Artificial Sequence
  Synthetic
cgucagcgcugaauccugcg

SEQ ID NO: 77402 - RNA, 21 nt, Artificial Sequence
  Synthetic
ccgucagcgcugaauccugcg

SEQ ID NO: 77403 - RNA, 22 nt, Artificial Sequence
  Synthetic
cccgucagcgcugaauccugcg

SEQ ID NO: 77404 - RNA, 23 nt, Artificial Sequence
  Synthetic
ucccgucagcgcugaauccugcg

SEQ ID NO: 77405 - RNA, 24 nt, Artificial Sequence
  Synthetic
gucccgucagcgcugaauccugcg

SEQ ID NO: 77406 - RNA, 18 nt, Artificial Sequence
  Synthetic
ugccaacuggauccugcg

SEQ ID NO: 77407 - RNA, 19 nt, Artificial Sequence
  Synthetic
cugccaacuggauccugcg

SEQ ID NO: 77408 - RNA, 20 nt, Artificial Sequence
  Synthetic
gcugccaacuggauccugcg

SEQ ID NO: 77409 - RNA, 21 nt, Artificial Sequence
  Synthetic
ugcugccaacuggauccugcg

SEQ ID NO: 77410 - RNA, 22 nt, Artificial Sequence
  Synthetic
gugcugccaacuggauccugcg

SEQ ID NO: 77411 - RNA, 23 nt, Artificial Sequence
  Synthetic
ugugcugccaacuggauccugcg

SEQ ID NO: 77412 - RNA, 24 nt, Artificial Sequence
  Synthetic
cugugcugccaacuggauccugcg

SEQ ID NO: 77413 - RNA, 18 nt, Artificial Sequence
  Synthetic
cuuggacggucccucucg

SEQ ID NO: 77414 - RNA, 19 nt, Artificial Sequence
  Synthetic
ucuuggacggucccucucg

SEQ ID NO: 77415 - RNA, 20 nt, Artificial Sequence
  Synthetic
uucuuggacggucccucucg

SEQ ID NO: 77416 - RNA, 18 nt, Artificial Sequence
  Synthetic
cuucaccucugcacgucg

SEQ ID NO: 77417 - RNA, 19 nt, Artificial Sequence
  Synthetic
gcuucaccucugcacgucg

SEQ ID NO: 77418 - RNA, 20 nt, Artificial Sequence
  Synthetic
cgcuucaccucugcacgucg

SEQ ID NO: 77419 - RNA, 21 nt, Artificial Sequence
  Synthetic
ucgcuucaccucugcacgucg

SEQ ID NO: 77420 - RNA, 22 nt, Artificial Sequence
  Synthetic
uucgcuucaccucugcacgucg

SEQ ID NO: 77421 - RNA, 23 nt, Artificial Sequence
  Synthetic
cuucgcuucaccucugcacgucg

SEQ ID NO: 77422 - RNA, 24 nt, Artificial Sequence
  Synthetic
acuucgcuucaccucugcacgucg

SEQ ID NO: 77423 - RNA, 18 nt, Artificial Sequence
  Synthetic
aucucaaucgccgcgucg

SEQ ID NO: 77424 - RNA, 19 nt, Artificial Sequence
  Synthetic
gaucucaaucgccgcgucg

SEQ ID NO: 77425 - RNA, 20 nt, Artificial Sequence
  Synthetic
agaucucaaucgccgcgucg

SEQ ID NO: 77426 - RNA, 18 nt, Artificial Sequence
  Synthetic
  misc_feature (7)..(7): n is a, c, g, or u
cgacccnucucggggucg

SEQ ID NO: 77427 - RNA, 19 nt, Artificial Sequence
  Synthetic
  misc_feature (8)..(8): n is a, c, g, or u
acgacccnucucggggucg

SEQ ID NO: 77428 - RNA, 20 nt, Artificial Sequence
  Synthetic
  misc_feature (9)..(9): n is a, c, g, or u
gacgacccnucucggggucg

SEQ ID NO: 77429 - RNA, 21 nt, Artificial Sequence
  Synthetic
  misc_feature (10)..(10): n is a, c, g, or u
ggacgacccnucucggggucg

SEQ ID NO: 77430 - RNA, 22 nt, Artificial Sequence
  Synthetic
  misc_feature (11)..(11): n is a, c, g, or u
cggacgacccnucucggggucg

SEQ ID NO: 77431 - RNA, 23 nt, Artificial Sequence
  Synthetic
  misc_feature (12)..(12): n is a, c, g, or u
gcggacgacccnucucggggucg

SEQ ID NO: 77432 - RNA, 24 nt, Artificial Sequence
  Synthetic
  misc_feature (13)..(13): n is a, c, g, or u
ugcggacgacccnucucggggucg

SEQ ID NO: 77433 - RNA, 18 nt, Artificial Sequence
  Synthetic
ugcuguucaaaaccuucg

SEQ ID NO: 77434 - RNA, 19 nt, Artificial Sequence
  Synthetic
uugcuguucaaaaccuucg

SEQ ID NO: 77435 - RNA, 20 nt, Artificial Sequence
  Synthetic
guugcuguucaaaaccuucg

SEQ ID NO: 77436 - RNA, 21 nt, Artificial Sequence
  Synthetic
uguugcuguucaaaaccuucg

SEQ ID NO: 77437 - RNA, 22 nt, Artificial Sequence
  Synthetic
auguugcuguucaaaaccuucg

SEQ ID NO: 77438 - RNA, 23 nt, Artificial Sequence
  Synthetic
cauguugcuguucaaaaccuucg

SEQ ID NO: 77439 - RNA, 24 nt, Artificial Sequence
  Synthetic
ucauguugcuguucaaaaccuucg

SEQ ID NO: 77440 - RNA, 18 nt, Artificial Sequence
  Synthetic
cauuuguucagugguucg

SEQ ID NO: 77441 - RNA, 19 nt, Artificial Sequence
  Synthetic
ccauuuguucagugguucg

SEQ ID NO: 77442 - RNA, 20 nt, Artificial Sequence
  Synthetic
gccauuuguucagugguucg

SEQ ID NO: 77443 - RNA, 21 nt, Artificial Sequence
  Synthetic
ugccauuuguucagugguucg

SEQ ID NO: 77444 - RNA, 22 nt, Artificial Sequence
  Synthetic
gugccauuuguucagugguucg

SEQ ID NO: 77445 - RNA, 23 nt, Artificial Sequence
  Synthetic
agugccauuuguucagugguucg

SEQ ID NO: 77446 - RNA, 24 nt, Artificial Sequence
  Synthetic
uagugccauuuguucagugguucg

SEQ ID NO: 77447 - RNA, 18 nt, Artificial Sequence
  Synthetic
  misc_feature (4)..(4): n is a, c, g, or u
uuunccccuagagaaagg

SEQ ID NO: 77448 - RNA, 19 nt, Artificial Sequence
  Synthetic
  misc_feature (5)..(5): n is a, c, g, or u
auuunccccuagagaaagg

SEQ ID NO: 77449 - RNA, 20 nt, Artificial Sequence
  Synthetic
  misc_feature (6)..(6): n is a, c, g, or u
uauuunccccuagagaaagg

SEQ ID NO: 77450 - RNA, 21 nt, Artificial Sequence
  Synthetic
  misc_feature (7)..(7): n is a, c, g, or u
auauuunccccuagagaaagg

SEQ ID NO: 77451 - RNA, 22 nt, Artificial Sequence
  Synthetic
  misc_feature (8)..(8): n is a, c, g, or u
aauauuunccccuagagaaagg

SEQ ID NO: 77452 - RNA, 23 nt, Artificial Sequence
  Synthetic
  misc_feature (9)..(9): n is a, c, g, or u
aaauauuunccccuagagaaagg

SEQ ID NO: 77453 - RNA, 24 nt, Artificial Sequence
  Synthetic
  misc_feature (1)..(1): n is a, c, g, or u
  misc_feature (10)..(10): n is a, c, g, or u
naaauauuunccccuagagaaagg

SEQ ID NO: 77454 - RNA, 18 nt, Artificial Sequence
  Synthetic
  misc_feature (5)..(5): n is a, c, g, or u
ggacngaagccaacaagg

SEQ ID NO: 77455 - RNA, 19 nt, Artificial Sequence
  Synthetic
  misc_feature (6)..(6): n is a, c, g, or u
uggacngaagccaacaagg

SEQ ID NO: 77456 - RNA, 20 nt, Artificial Sequence
  Synthetic
  misc_feature (7)..(7): n is a, c, g, or u
cuggacngaagccaacaagg

SEQ ID NO: 77457 - RNA, 21 nt, Artificial Sequence
  Synthetic
  misc_feature (8)..(8): n is a, c, g, or u
acuggacngaagccaacaagg

SEQ ID NO: 77458 - RNA, 22 nt, Artificial Sequence
  Synthetic
  misc_feature (9)..(9): n is a, c, g, or u
cacuggacngaagccaacaagg

SEQ ID NO: 77459 - RNA, 23 nt, Artificial Sequence
  Synthetic
  misc_feature (10)..(10): n is a, c, g, or u
ccacuggacngaagccaacaagg

SEQ ID NO: 77460 - RNA, 24 nt, Artificial Sequence
  Synthetic
  misc_feature (11)..(11): n is a, c, g, or u
accacuggacngaagccaacaagg

SEQ ID NO: 77461 - RNA, 18 nt, Artificial Sequence
  Synthetic
uuccuuggacucacaagg

SEQ ID NO: 77462 - RNA, 19 nt, Artificial Sequence
  Synthetic
auuccuuggacucacaagg

SEQ ID NO: 77463 - RNA, 20 nt, Artificial Sequence
  Synthetic
uauuccuuggacucacaagg

SEQ ID NO: 77464 - RNA, 21 nt, Artificial Sequence
  Synthetic
guauuccuuggacucacaagg

SEQ ID NO: 77465 - RNA, 22 nt, Artificial Sequence
  Synthetic
aguauuccuuggacucacaagg

SEQ ID NO: 77466 - RNA, 23 nt, Artificial Sequence
  Synthetic
uaguauuccuuggacucacaagg

SEQ ID NO: 77467 - RNA, 24 nt, Artificial Sequence
  Synthetic
uuaguauuccuuggacucacaagg

SEQ ID NO: 77468 - RNA, 18 nt, Artificial Sequence
  Synthetic
uguuuugcucgcagcagg

SEQ ID NO: 77469 - RNA, 19 nt, Artificial Sequence
  Synthetic
uuguuuugcucgcagcagg

SEQ ID NO: 77470 - RNA, 20 nt, Artificial Sequence
  Synthetic
cuuguuuugcucgcagcagg

SEQ ID NO: 77471 - RNA, 21 nt, Artificial Sequence
  Synthetic
gcuuguuuugcucgcagcagg

SEQ ID NO: 77472 - RNA, 22 nt, Artificial Sequence
  Synthetic
cgcuuguuuugcucgcagcagg

SEQ ID NO: 77473 - RNA, 23 nt, Artificial Sequence
  Synthetic
ccgcuuguuuugcucgcagcagg

SEQ ID NO: 77474 - RNA, 24 nt, Artificial Sequence
  Synthetic
gccgcuuguuuugcucgcagcagg

SEQ ID NO: 77475 - RNA, 18 nt, Artificial Sequence
  Synthetic
ugggguggagcccucagg

SEQ ID NO: 77476 - RNA, 19 nt, Artificial Sequence
  Synthetic
uugggguggagcccucagg

SEQ ID NO: 77477 - RNA, 20 nt, Artificial Sequence
  Synthetic
uuugggguggagcccucagg

SEQ ID NO: 77478 - RNA, 21 nt, Artificial Sequence
  Synthetic
uuuugggguggagcccucagg

SEQ ID NO: 77479 - RNA, 22 nt, Artificial Sequence
  Synthetic
cuuuugggguggagcccucagg

SEQ ID NO: 77480 - RNA, 23 nt, Artificial Sequence
  Synthetic
ccuuuugggguggagcccucagg

SEQ ID NO: 77481 - RNA, 24 nt, Artificial Sequence
  Synthetic
gccuuuugggguggagcccucagg

SEQ ID NO: 77482 - RNA, 18 nt, Artificial Sequence
  Synthetic
ucgucaaucuucucgagg

SEQ ID NO: 77483 - RNA, 19 nt, Artificial Sequence
  Synthetic
cucgucaaucuucucgagg

SEQ ID NO: 77484 - RNA, 20 nt, Artificial Sequence
  Synthetic
ucucgucaaucuucucgagg

SEQ ID NO: 77485 - RNA, 21 nt, Artificial Sequence
  Synthetic
aucucgucaaucuucucgagg

SEQ ID NO: 77486 - RNA, 22 nt, Artificial Sequence
  Synthetic
caucucgucaaucuucucgagg

SEQ ID NO: 77487 - RNA, 23 nt, Artificial Sequence
  Synthetic
ucaucucgucaaucuucucgagg

SEQ ID NO: 77488 - RNA, 24 nt, Artificial Sequence
  Synthetic
cucaucucgucaaucuucucgagg

SEQ ID NO: 77489 - RNA, 18 nt, Artificial Sequence
  Synthetic
uucucucaauuuucuagg

SEQ ID NO: 77490 - RNA, 19 nt, Artificial Sequence
  Synthetic
cuucucucaauuuucuagg

SEQ ID NO: 77491 - RNA, 20 nt, Artificial Sequence
  Synthetic
acuucucucaauuuucuagg

SEQ ID NO: 77492 - RNA, 21 nt, Artificial Sequence
  Synthetic
gacuucucucaauuuucuagg

SEQ ID NO: 77493 - RNA, 22 nt, Artificial Sequence
  Synthetic
ggacuucucucaauuuucuagg

SEQ ID NO: 77494 - RNA, 23 nt, Artificial Sequence
  Synthetic
uggacuucucucaauuuucuagg

SEQ ID NO: 77495 - RNA, 24 nt, Artificial Sequence
  Synthetic
guggacuucucucaauuuucuagg

SEQ ID NO: 77496 - RNA, 18 nt, Artificial Sequence
  Synthetic
  misc_feature (1)..(1): n is a, c, g, or u
ngaagccaacaagguagg

SEQ ID NO: 77497 - RNA, 19 nt, Artificial Sequence
  Synthetic
  misc_feature (2)..(2): n is a, c, g, or u
cngaagccaacaagguagg

SEQ ID NO: 77498 - RNA, 20 nt, Artificial Sequence
  Synthetic
  misc_feature (3)..(3): n is a, c, g, or u
acngaagccaacaagguagg

SEQ ID NO: 77499 - RNA, 21 nt, Artificial Sequence
  Synthetic
  misc_feature (4)..(4): n is a, c, g, or u
gacngaagccaacaagguagg

SEQ ID NO: 77500 - RNA, 22 nt, Artificial Sequence
  Synthetic
  misc_feature (5)..(5): n is a, c, g, or u
ggacngaagccaacaagguagg

SEQ ID NO: 77501 - RNA, 23 nt, Artificial Sequence
  Synthetic
  misc_feature (6)..(6): n is a, c, g, or u
uggacngaagccaacaagguagg

SEQ ID NO: 77502 - RNA, 24 nt, Artificial Sequence
  Synthetic
  misc_feature (7)..(7): n is a, c, g, or u
cuggacngaagccaacaagguagg

SEQ ID NO: 77503 - RNA, 18 nt, Artificial Sequence
  Synthetic
guacuaggaggcuguagg

SEQ ID NO: 77504 - RNA, 19 nt, Artificial Sequence
  Synthetic
uguacuaggaggcuguagg

SEQ ID NO: 77505 - RNA, 20 nt, Artificial Sequence
  Synthetic
uuguacuaggaggcuguagg

SEQ ID NO: 77506 - RNA, 21 nt, Artificial Sequence
  Synthetic
uuuguacuaggaggcuguagg

SEQ ID NO: 77507 - RNA, 22 nt, Artificial Sequence
  Synthetic
cuuuguacuaggaggcuguagg

SEQ ID NO: 77508 - RNA, 23 nt, Artificial Sequence
  Synthetic
ucuuuguacuaggaggcuguagg

SEQ ID NO: 77509 - RNA, 24 nt, Artificial Sequence
  Synthetic
gucuuuguacuaggaggcuguagg

SEQ ID NO: 77510 - RNA, 18 nt, Artificial Sequence
  Synthetic
gcuguucaaaaccuucgg

SEQ ID NO: 77511 - RNA, 19 nt, Artificial Sequence
  Synthetic
ugcuguucaaaaccuucgg

SEQ ID NO: 77512 - RNA, 20 nt, Artificial Sequence
  Synthetic
uugcuguucaaaaccuucgg

SEQ ID NO: 77513 - RNA, 21 nt, Artificial Sequence
  Synthetic
guugcuguucaaaaccuucgg

SEQ ID NO: 77514 - RNA, 22 nt, Artificial Sequence
  Synthetic
uguugcuguucaaaaccuucgg

SEQ ID NO: 77515 - RNA, 23 nt, Artificial Sequence
  Synthetic
auguugcuguucaaaaccuucgg

SEQ ID NO: 77516 - RNA, 24 nt, Artificial Sequence
  Synthetic
cauguugcuguucaaaaccuucgg

SEQ ID NO: 77517 - RNA, 18 nt, Artificial Sequence
  Synthetic
ggagugggagcauucggg

SEQ ID NO: 77518 - RNA, 19 nt, Artificial Sequence
  Synthetic
aggagugggagcauucggg

SEQ ID NO: 77519 - RNA, 20 nt, Artificial Sequence
  Synthetic
uaggagugggagcauucggg

SEQ ID NO: 77520 - RNA, 21 nt, Artificial Sequence
  Synthetic
guaggagugggagcauucggg

SEQ ID NO: 77521 - RNA, 22 nt, Artificial Sequence
  Synthetic
gguaggagugggagcauucggg

SEQ ID NO: 77522 - RNA, 23 nt, Artificial Sequence
  Synthetic
agguaggagugggagcauucggg

SEQ ID NO: 77523 - RNA, 24 nt, Artificial Sequence
  Synthetic
aagguaggagugggagcauucggg

SEQ ID NO: 77524 - RNA, 18 nt, Artificial Sequence
  Synthetic
  misc_feature (13)..(13): n is a, c, g, or u
acugggaggagunggggg

SEQ ID NO: 77525 - RNA, 19 nt, Artificial Sequence
  Synthetic
  misc_feature (14)..(14): n is a, c, g, or u
gacugggaggagunggggg

SEQ ID NO: 77526 - RNA, 20 nt, Artificial Sequence
  Synthetic
  misc_feature (15)..(15): n is a, c, g, or u
agacugggaggagunggggg

SEQ ID NO: 77527 - RNA, 21 nt, Artificial Sequence
  Synthetic
  misc_feature (16)..(16): n is a, c, g, or u
aagacugggaggagunggggg

SEQ ID NO: 77528 - RNA, 22 nt, Artificial Sequence
  Synthetic
  misc_feature (17)..(17): n is a, c, g, or u
aaagacugggaggagunggggg

SEQ ID NO: 77529 - RNA, 23 nt, Artificial Sequence
  Synthetic
  misc_feature (18)..(18): n is a, c, g, or u
uaaagacugggaggagunggggg

SEQ ID NO: 77530 - RNA, 24 nt, Artificial Sequence
  Synthetic
  misc_feature (19)..(19): n is a, c, g, or u
uuaaagacugggaggagunggggg

SEQ ID NO: 77531 - RNA, 18 nt, Artificial Sequence
  Synthetic
  misc_feature (14)..(14): n is a, c, g, or u
gacugggaggagungggg

SEQ ID NO: 77532 - RNA, 19 nt, Artificial Sequence
  Synthetic
  misc_feature (15)..(15): n is a, c, g, or u
agacugggaggagungggg

SEQ ID NO: 77533 - RNA, 20 nt, Artificial Sequence
  Synthetic
  misc_feature (16)..(16): n is a, c, g, or u
aagacugggaggagungggg

SEQ ID NO: 77534 - RNA, 21 nt, Artificial Sequence
  Synthetic
  misc_feature (17)..(17): n is a, c, g, or u
aaagacugggaggagungggg

SEQ ID NO: 77535 - RNA, 22 nt, Artificial Sequence
  Synthetic
  misc_feature (18)..(18): n is a, c, g, or u
uaaagacugggaggagungggg

SEQ ID NO: 77536 - RNA, 23 nt, Artificial Sequence
  Synthetic
  misc_feature (19)..(19): n is a, c, g, or u
uuaaagacugggaggagungggg

SEQ ID NO: 77537 - RNA, 24 nt, Artificial Sequence
  Synthetic
  misc_feature (20)..(20): n is a, c, g, or u
uuuaaagacugggaggagungggg

SEQ ID NO: 77538 - RNA, 18 nt, Artificial Sequence
  Synthetic
ggucccucucgaaugggg

SEQ ID NO: 77539 - RNA, 19 nt, Artificial Sequence
  Synthetic
cggucccucucgaaugggg

SEQ ID NO: 77540 - RNA, 20 nt, Artificial Sequence
  Synthetic
acggucccucucgaaugggg

SEQ ID NO: 77541 - RNA, 18 nt, Artificial Sequence
  Synthetic
aacccccacuggcugggg

SEQ ID NO: 77542 - RNA, 19 nt, Artificial Sequence
  Synthetic
caacccccacuggcugggg

SEQ ID NO: 77543 - RNA, 20 nt, Artificial Sequence
  Synthetic
gcaacccccacuggcugggg

SEQ ID NO: 77544 - RNA, 21 nt, Artificial Sequence
  Synthetic
ugcaacccccacuggcugggg

SEQ ID NO: 77545 - RNA, 22 nt, Artificial Sequence
  Synthetic
augcaacccccacuggcugggg

SEQ ID NO: 77546 - RNA, 23 nt, Artificial Sequence
  Synthetic
gaugcaacccccacuggcugggg

SEQ ID NO: 77547 - RNA, 24 nt, Artificial Sequence
  Synthetic
ugaugcaacccccacuggcugggg

SEQ ID NO: 77548 - RNA, 18 nt, Artificial Sequence
  Synthetic
gaugaugugguauugggg

SEQ ID NO: 77549 - RNA, 19 nt, Artificial Sequence
  Synthetic
ggaugaugugguauugggg

SEQ ID NO: 77550 - RNA, 20 nt, Artificial Sequence
  Synthetic
uggaugaugugguauugggg

SEQ ID NO: 77551 - RNA, 21 nt, Artificial Sequence
  Synthetic
auggaugaugugguauugggg

SEQ ID NO: 77552 - RNA, 22 nt, Artificial Sequence
  Synthetic
uauggaugaugugguauugggg

SEQ ID NO: 77553 - RNA, 23 nt, Artificial Sequence
  Synthetic
auauggaugaugugguauugggg

SEQ ID NO: 77554 - RNA, 24 nt, Artificial Sequence
  Synthetic
uauauggaugaugugguauugggg

SEQ ID NO: 77555 - RNA, 18 nt, Artificial Sequence
  Synthetic
cacggaggccuuuugggg

SEQ ID NO: 77556 - RNA, 19 nt, Artificial Sequence
  Synthetic
acacggaggccuuuugggg

SEQ ID NO: 77557 - RNA, 20 nt, Artificial Sequence
  Synthetic
cacacggaggccuuuugggg

SEQ ID NO: 77558 - RNA, 21 nt, Artificial Sequence
  Synthetic
ccacacggaggccuuuugggg

SEQ ID NO: 77559 - RNA, 22 nt, Artificial Sequence
  Synthetic
cccacacggaggccuuuugggg

SEQ ID NO: 77560 - RNA, 23 nt, Artificial Sequence
  Synthetic
ccccacacggaggccuuuugggg

SEQ ID NO: 77561 - RNA, 24 nt, Artificial Sequence
  Synthetic
cccccacacggaggccuuuugggg

SEQ ID NO: 77562 - RNA, 18 nt, Artificial Sequence
  Synthetic
  misc_feature (15)..(15): n is a, c, g, or u
agacugggaggagunggg

SEQ ID NO: 77563 - RNA, 19 nt, Artificial Sequence
  Synthetic
  misc_feature (16)..(16): n is a, c, g, or u
aagacugggaggagunggg

SEQ ID NO: 77564 - RNA, 20 nt, Artificial Sequence
  Synthetic
  misc_feature (17)..(17): n is a, c, g, or u
aaagacugggaggagunggg

SEQ ID NO: 77565 - RNA, 21 nt, Artificial Sequence
  Synthetic
  misc_feature (18)..(18): n is a, c, g, or u
uaaagacugggaggagunggg

SEQ ID NO: 77566 - RNA, 22 nt, Artificial Sequence
  Synthetic
  misc_feature (19)..(19): n is a, c, g, or u
uuaaagacugggaggagunggg

SEQ ID NO: 77567 - RNA, 23 nt, Artificial Sequence
  Synthetic
  misc_feature (20)..(20): n is a, c, g, or u
uuuaaagacugggaggagunggg

SEQ ID NO: 77568 - RNA, 24 nt, Artificial Sequence
  Synthetic
  misc_feature (21)..(21): n is a, c, g, or u
guuuaaagacugggaggagunggg

SEQ ID NO: 77569 - RNA, 18 nt, Artificial Sequence
  Synthetic
cggucccucucgaauggg

SEQ ID NO: 77570 - RNA, 19 nt, Artificial Sequence
  Synthetic
acggucccucucgaauggg

SEQ ID NO: 77571 - RNA, 20 nt, Artificial Sequence
  Synthetic
gacggucccucucgaauggg

SEQ ID NO: 77572 - RNA, 21 nt, Artificial Sequence
  Synthetic
ggacggucccucucgaauggg

SEQ ID NO: 77573 - RNA, 22 nt, Artificial Sequence
  Synthetic
uggacggucccucucgaauggg

SEQ ID NO: 77574 - RNA, 23 nt, Artificial Sequence
  Synthetic
uuggacggucccucucgaauggg

SEQ ID NO: 77575 - RNA, 24 nt, Artificial Sequence
  Synthetic
cuuggacggucccucucgaauggg

SEQ ID NO: 77576 - RNA, 18 nt, Artificial Sequence
  Synthetic
ugucaauacuaauauggg

SEQ ID NO: 77577 - RNA, 19 nt, Artificial Sequence
  Synthetic
augucaauacuaauauggg

SEQ ID NO: 77578 - RNA, 20 nt, Artificial Sequence
  Synthetic
uaugucaauacuaauauggg

SEQ ID NO: 77579 - RNA, 21 nt, Artificial Sequence
  Synthetic
uuaugucaauacuaauauggg

SEQ ID NO: 77580 - RNA, 22 nt, Artificial Sequence
  Synthetic
guuaugucaauacuaauauggg

SEQ ID NO: 77581 - RNA, 23 nt, Artificial Sequence
  Synthetic
aguuaugucaauacuaauauggg

SEQ ID NO: 77582 - RNA, 24 nt, Artificial Sequence
  Synthetic
caguuaugucaauacuaauauggg

SEQ ID NO: 77583 - RNA, 18 nt, Artificial Sequence
  Synthetic
ucggaaaauuccuauggg

SEQ ID NO: 77584 - RNA, 19 nt, Artificial Sequence
  Synthetic
uucggaaaauuccuauggg

SEQ ID NO: 77585 - RNA, 20 nt, Artificial Sequence
  Synthetic
uuucggaaaauuccuauggg

SEQ ID NO: 77586 - RNA, 21 nt, Artificial Sequence
  Synthetic
cuuucggaaaauuccuauggg

SEQ ID NO: 77587 - RNA, 22 nt, Artificial Sequence
  Synthetic
gcuuucggaaaauuccuauggg

SEQ ID NO: 77588 - RNA, 23 nt, Artificial Sequence
  Synthetic
ggcuuucggaaaauuccuauggg

SEQ ID NO: 77589 - RNA, 24 nt, Artificial Sequence
  Synthetic
gggcuuucggaaaauuccuauggg

SEQ ID NO: 77590 - RNA, 18 nt, Artificial Sequence
  Synthetic
ucuagcuaccuggguggg

SEQ ID NO: 77591 - RNA, 19 nt, Artificial Sequence
  Synthetic
cucuagcuaccuggguggg

SEQ ID NO: 77592 - RNA, 20 nt, Artificial Sequence
  Synthetic
acucuagcuaccuggguggg

SEQ ID NO: 77593 - RNA, 21 nt, Artificial Sequence
  Synthetic
gacucuagcuaccuggguggg

SEQ ID NO: 77594 - RNA, 22 nt, Artificial Sequence
  Synthetic
ugacucuagcuaccuggguggg

SEQ ID NO: 77595 - RNA, 23 nt, Artificial Sequence
  Synthetic
augacucuagcuaccuggguggg

SEQ ID NO: 77596 - RNA, 24 nt, Artificial Sequence
  Synthetic
aaugacucuagcuaccuggguggg

SEQ ID NO: 77597 - RNA, 18 nt, Artificial Sequence
  Synthetic
ggucaccuuauucuuggg

SEQ ID NO: 77598 - RNA, 19 nt, Artificial Sequence
  Synthetic
gggucaccuuauucuuggg

SEQ ID NO: 77599 - RNA, 20 nt, Artificial Sequence
  Synthetic
ugggucaccuuauucuuggg

SEQ ID NO: 77600 - RNA, 21 nt, Artificial Sequence
  Synthetic
  misc_feature (1)..(1): n is a, c, g, or u
nugggucaccuuauucuuggg

SEQ ID NO: 77601 - RNA, 22 nt, Artificial Sequence
  Synthetic
  misc_feature (2)..(2): n is a, c, g, or u
unugggucaccuuauucuuggg

SEQ ID NO: 77602 - RNA, 23 nt, Artificial Sequence
  Synthetic
  misc_feature (3)..(3): n is a, c, g, or u
uunugggucaccuuauucuuggg

SEQ ID NO: 77603 - RNA, 24 nt, Artificial Sequence
  Synthetic
  misc_feature (4)..(4): n is a, c, g, or u
uuunugggucaccuuauucuuggg

SEQ ID NO: 77604 - RNA, 18 nt, Artificial Sequence
  Synthetic
acacggaggccuuuuggg

SEQ ID NO: 77605 - RNA, 19 nt, Artificial Sequence
  Synthetic
cacacggaggccuuuuggg

SEQ ID NO: 77606 - RNA, 20 nt, Artificial Sequence
  Synthetic
ccacacggaggccuuuuggg

SEQ ID NO: 77607 - RNA, 21 nt, Artificial Sequence
  Synthetic
cccacacggaggccuuuuggg

SEQ ID NO: 77608 - RNA, 22 nt, Artificial Sequence
  Synthetic
ccccacacggaggccuuuuggg

SEQ ID NO: 77609 - RNA, 23 nt, Artificial Sequence
  Synthetic
cccccacacggaggccuuuuggg

SEQ ID NO: 77610 - RNA, 24 nt, Artificial Sequence
  Synthetic
ucccccacacggaggccuuuuggg

SEQ ID NO: 77611 - RNA, 18 nt, Artificial Sequence
  Synthetic
  misc_feature (16)..(16): n is a, c, g, or u
aagacugggaggagungg

SEQ ID NO: 77612 - RNA, 19 nt, Artificial Sequence
  Synthetic
  misc_feature (17)..(17): n is a, c, g, or u
aaagacugggaggagungg

SEQ ID NO: 77613 - RNA, 20 nt, Artificial Sequence
  Synthetic
  misc_feature (18)..(18): n is a, c, g, or u
uaaagacugggaggagungg

SEQ ID NO: 77614 - RNA, 21 nt, Artificial Sequence
  Synthetic
  misc_feature (19)..(19): n is a, c, g, or u
uuaaagacugggaggagungg

SEQ ID NO: 77615 - RNA, 22 nt, Artificial Sequence
  Synthetic
  misc_feature (20)..(20): n is a, c, g, or u
uuuaaagacugggaggagungg

SEQ ID NO: 77616 - RNA, 23 nt, Artificial Sequence
  Synthetic
  misc_feature (21)..(21): n is a, c, g, or u
guuuaaagacugggaggagungg

SEQ ID NO: 77617 - RNA, 24 nt, Artificial Sequence
  Synthetic
  misc_feature (22)..(22): n is a, c, g, or u
uguuuaaagacugggaggagungg

SEQ ID NO: 77618 - RNA, 18 nt, Artificial Sequence
  Synthetic
acggucccucucgaaugg

SEQ ID NO: 77619 - RNA, 19 nt, Artificial Sequence
  Synthetic
gacggucccucucgaaugg

SEQ ID NO: 77620 - RNA, 20 nt, Artificial Sequence
  Synthetic
ggacggucccucucgaaugg

SEQ ID NO: 77621 - RNA, 21 nt, Artificial Sequence
  Synthetic
uggacggucccucucgaaugg

SEQ ID NO: 77622 - RNA, 22 nt, Artificial Sequence
  Synthetic
uuggacggucccucucgaaugg

SEQ ID NO: 77623 - RNA, 23 nt, Artificial Sequence
  Synthetic
cuuggacggucccucucgaaugg

SEQ ID NO: 77624 - RNA, 24 nt, Artificial Sequence
  Synthetic
ucuuggacggucccucucgaaugg

SEQ ID NO: 77625 - RNA, 18 nt, Artificial Sequence
  Synthetic
cccaacaaagaccacugg

SEQ ID NO: 77626 - RNA, 19 nt, Artificial Sequence
  Synthetic
ucccaacaaagaccacugg

SEQ ID NO: 77627 - RNA, 20 nt, Artificial Sequence
  Synthetic
aucccaacaaagaccacugg

SEQ ID NO: 77628 - RNA, 21 nt, Artificial Sequence
  Synthetic
aaucccaacaaagaccacugg

SEQ ID NO: 77629 - RNA, 22 nt, Artificial Sequence
  Synthetic
caaucccaacaaagaccacugg

SEQ ID NO: 77630 - RNA, 23 nt, Artificial Sequence
  Synthetic
acaaucccaacaaagaccacugg

SEQ ID NO: 77631 - RNA, 24 nt, Artificial Sequence
  Synthetic
cacaaucccaacaaagaccacugg

SEQ ID NO: 77632 - RNA, 18 nt, Artificial Sequence
  Synthetic
ugaugcaacccccacugg

SEQ ID NO: 77633 - RNA, 19 nt, Artificial Sequence
  Synthetic
cugaugcaacccccacugg

SEQ ID NO: 77634 - RNA, 20 nt, Artificial Sequence
  Synthetic
gcugaugcaacccccacugg

SEQ ID NO: 77635 - RNA, 21 nt, Artificial Sequence
  Synthetic
ugcugaugcaacccccacugg

SEQ ID NO: 77636 - RNA, 22 nt, Artificial Sequence
  Synthetic
uugcugaugcaacccccacugg

SEQ ID NO: 77637 - RNA, 23 nt, Artificial Sequence
  Synthetic
uuugcugaugcaacccccacugg

SEQ ID NO: 77638 - RNA, 24 nt, Artificial Sequence
  Synthetic
guuugcugaugcaacccccacugg

SEQ ID NO: 77639 - RNA, 18 nt, Artificial Sequence
  Synthetic
uguuuguuuaaagacugg

SEQ ID NO: 77640 - RNA, 19 nt, Artificial Sequence
  Synthetic
cuguuuguuuaaagacugg

SEQ ID NO: 77641 - RNA, 20 nt, Artificial Sequence
  Synthetic
acuguuuguuuaaagacugg

SEQ ID NO: 77642 - RNA, 21 nt, Artificial Sequence
  Synthetic
gacuguuuguuuaaagacugg

SEQ ID NO: 77643 - RNA, 22 nt, Artificial Sequence
  Synthetic
agacuguuuguuuaaagacugg

SEQ ID NO: 77644 - RNA, 23 nt, Artificial Sequence
  Synthetic
aagacuguuuguuuaaagacugg

SEQ ID NO: 77645 - RNA, 24 nt, Artificial Sequence
  Synthetic
aaagacuguuuguuuaaagacugg

SEQ ID NO: 77646 - RNA, 18 nt, Artificial Sequence
  Synthetic
caagccauucuuugcugg

SEQ ID NO: 77647 - RNA, 19 nt, Artificial Sequence
  Synthetic
gcaagccauucuuugcugg

SEQ ID NO: 77648 - RNA, 20 nt, Artificial Sequence
  Synthetic
ggcaagccauucuuugcugg

SEQ ID NO: 77649 - RNA, 21 nt, Artificial Sequence
  Synthetic
aggcaagccauucuuugcugg

SEQ ID NO: 77650 - RNA, 22 nt, Artificial Sequence
  Synthetic
caggcaagccauucuuugcugg

SEQ ID NO: 77651 - RNA, 23 nt, Artificial Sequence
  Synthetic
ucaggcaagccauucuuugcugg

SEQ ID NO: 77652 - RNA, 24 nt, Artificial Sequence
  Synthetic
cucaggcaagccauucuuugcugg

SEQ ID NO: 77653 - RNA, 18 nt, Artificial Sequence
  Synthetic
agcucccgugugucuugg

SEQ ID NO: 77654 - RNA, 19 nt, Artificial Sequence
  Synthetic
gagcucccgugugucuugg

SEQ ID NO: 77655 - RNA, 20 nt, Artificial Sequence
  Synthetic
ggagcucccgugugucuugg

SEQ ID NO: 77656 - RNA, 21 nt, Artificial Sequence
  Synthetic
gggagcucccgugugucuugg

SEQ ID NO: 77657 - RNA, 22 nt, Artificial Sequence
  Synthetic
ggggagcucccgugugucuugg

SEQ ID NO: 77658 - RNA, 23 nt, Artificial Sequence
  Synthetic
gggggagcucccgugugucuugg

SEQ ID NO: 77659 - RNA, 24 nt, Artificial Sequence
  Synthetic
agggggagcucccgugugucuugg

SEQ ID NO: 77660 - RNA, 18 nt, Artificial Sequence
  Synthetic
uucuugucucacuuuugg

SEQ ID NO: 77661 - RNA, 19 nt, Artificial Sequence
  Synthetic
uuucuugucucacuuuugg

SEQ ID NO: 77662 - RNA, 20 nt, Artificial Sequence
  Synthetic
auuucuugucucacuuuugg

SEQ ID NO: 77663 - RNA, 21 nt, Artificial Sequence
  Synthetic
cauuucuugucucacuuuugg

SEQ ID NO: 77664 - RNA, 22 nt, Artificial Sequence
  Synthetic
acauuucuugucucacuuuugg

SEQ ID NO: 77665 - RNA, 23 nt, Artificial Sequence
  Synthetic
cacauuucuugucucacuuuugg

SEQ ID NO: 77666 - RNA, 24 nt, Artificial Sequence
  Synthetic
ucacauuucuugucucacuuuugg

SEQ ID NO: 77667 - RNA, 18 nt, Artificial Sequence
  Synthetic
cacacggaggccuuuugg

SEQ ID NO: 77668 - RNA, 19 nt, Artificial Sequence
  Synthetic
ccacacggaggccuuuugg

SEQ ID NO: 77669 - RNA, 20 nt, Artificial Sequence
  Synthetic
cccacacggaggccuuuugg

SEQ ID NO: 77670 - RNA, 21 nt, Artificial Sequence
  Synthetic
ccccacacggaggccuuuugg

SEQ ID NO: 77671 - RNA, 22 nt, Artificial Sequence
  Synthetic
cccccacacggaggccuuuugg

SEQ ID NO: 77672 - RNA, 23 nt, Artificial Sequence
  Synthetic
ucccccacacggaggccuuuugg

SEQ ID NO: 77673 - RNA, 24 nt, Artificial Sequence
  Synthetic
cucccccacacggaggccuuuugg

SEQ ID NO: 77674 - RNA, 18 nt, Artificial Sequence
  Synthetic
  misc_feature (17)..(17): n is a, c, g, or u
aaagacugggaggagung

SEQ ID NO: 77675 - RNA, 19 nt, Artificial Sequence
  Synthetic
  misc_feature (18)..(18): n is a, c, g, or u
uaaagacugggaggagung

SEQ ID NO: 77676 - RNA, 20 nt, Artificial Sequence
  Synthetic
  misc_feature (19)..(19): n is a, c, g, or u
uuaaagacugggaggagung

SEQ ID NO: 77677 - RNA, 21 nt, Artificial Sequence
  Synthetic
  misc_feature (20)..(20): n is a, c, g, or u
uuuaaagacugggaggagung

SEQ ID NO: 77678 - RNA, 22 nt, Artificial Sequence
  Synthetic
  misc_feature (21)..(21): n is a, c, g, or u
guuuaaagacugggaggagung

SEQ ID NO: 77679 - RNA, 23 nt, Artificial Sequence
  Synthetic
  misc_feature (22)..(22): n is a, c, g, or u
uguuuaaagacugggaggagung

SEQ ID NO: 77680 - RNA, 24 nt, Artificial Sequence
  Synthetic
  misc_feature (23)..(23): n is a, c, g, or u
uuguuuaaagacugggaggagung

SEQ ID NO: 77681 - RNA, 18 nt, Artificial Sequence
  Synthetic
guccucuaacaguaaaug

SEQ ID NO: 77682 - RNA, 19 nt, Artificial Sequence
  Synthetic
gguccucuaacaguaaaug

SEQ ID NO: 77683 - RNA, 20 nt, Artificial Sequence
  Synthetic
agguccucuaacaguaaaug

SEQ ID NO: 77684 - RNA, 21 nt, Artificial Sequence
  Synthetic
uagguccucuaacaguaaaug

SEQ ID NO: 77685 - RNA, 22 nt, Artificial Sequence
  Synthetic
guagguccucuaacaguaaaug

SEQ ID NO: 77686 - RNA, 23 nt, Artificial Sequence
  Synthetic
uguagguccucuaacaguaaaug

SEQ ID NO: 77687 - RNA, 24 nt, Artificial Sequence
  Synthetic
uuguagguccucuaacaguaaaug

SEQ ID NO: 77688 - RNA, 18 nt, Artificial Sequence
  Synthetic
gacggucccucucgaaug

SEQ ID NO: 77689 - RNA, 19 nt, Artificial Sequence
  Synthetic
ggacggucccucucgaaug

SEQ ID NO: 77690 - RNA, 20 nt, Artificial Sequence
  Synthetic
uggacggucccucucgaaug

SEQ ID NO: 77691 - RNA, 21 nt, Artificial Sequence
  Synthetic
uuggacggucccucucgaaug

SEQ ID NO: 77692 - RNA, 22 nt, Artificial Sequence
  Synthetic
cuuggacggucccucucgaaug

SEQ ID NO: 77693 - RNA, 23 nt, Artificial Sequence
  Synthetic
ucuuggacggucccucucgaaug

SEQ ID NO: 77694 - RNA, 24 nt, Artificial Sequence
  Synthetic
uucuuggacggucccucucgaaug

SEQ ID NO: 77695 - RNA, 18 nt, Artificial Sequence
  Synthetic
gacccugcaccgaacaug

SEQ ID NO: 77696 - RNA, 19 nt, Artificial Sequence
  Synthetic
ggacccugcaccgaacaug

SEQ ID NO: 77697 - RNA, 20 nt, Artificial Sequence
  Synthetic
gggacccugcaccgaacaug

SEQ ID NO: 77698 - RNA, 21 nt, Artificial Sequence
  Synthetic
ggggacccugcaccgaacaug

SEQ ID NO: 77699 - RNA, 22 nt, Artificial Sequence
  Synthetic
uggggacccugcaccgaacaug

SEQ ID NO: 77700 - RNA, 23 nt, Artificial Sequence
  Synthetic
uuggggacccugcaccgaacaug

SEQ ID NO: 77701 - RNA, 24 nt, Artificial Sequence
  Synthetic
auuggggacccugcaccgaacaug

SEQ ID NO: 77702 - RNA, 18 nt, Artificial Sequence
  Synthetic
auaggccaucagcgcaug

SEQ ID NO: 77703 - RNA, 19 nt, Artificial Sequence
  Synthetic
cauaggccaucagcgcaug

SEQ ID NO: 77704 - RNA, 20 nt, Artificial Sequence
  Synthetic
ccauaggccaucagcgcaug

SEQ ID NO: 77705 - RNA, 21 nt, Artificial Sequence
  Synthetic
gccauaggccaucagcgcaug

SEQ ID NO: 77706 - RNA, 22 nt, Artificial Sequence
  Synthetic
ggccauaggccaucagcgcaug

SEQ ID NO: 77707 - RNA, 23 nt, Artificial Sequence
  Synthetic
uggccauaggccaucagcgcaug

SEQ ID NO: 77708 - RNA, 24 nt, Artificial Sequence
  Synthetic
uuggccauaggccaucagcgcaug

SEQ ID NO: 77709 - RNA, 18 nt, Artificial Sequence
  Synthetic
ccucaggcucaaggcaug

SEQ ID NO: 77710 - RNA, 19 nt, Artificial Sequence
  Synthetic
cccucaggcucaaggcaug

SEQ ID NO: 77711 - RNA, 20 nt, Artificial Sequence
  Synthetic
gcccucaggcucaaggcaug

SEQ ID NO: 77712 - RNA, 21 nt, Artificial Sequence
  Synthetic
agcccucaggcucaaggcaug

SEQ ID NO: 77713 - RNA, 22 nt, Artificial Sequence
  Synthetic
gagcccucaggcucaaggcaug

SEQ ID NO: 77714 - RNA, 23 nt, Artificial Sequence
  Synthetic
ggagcccucaggcucaaggcaug

SEQ ID NO: 77715 - RNA, 24 nt, Artificial Sequence
  Synthetic
uggagcccucaggcucaaggcaug

SEQ ID NO: 77716 - RNA, 18 nt, Artificial Sequence
  Synthetic
cuauuuacauacccuaug

SEQ ID NO: 77717 - RNA, 19 nt, Artificial Sequence
  Synthetic
acuauuuacauacccuaug

SEQ ID NO: 77718 - RNA, 20 nt, Artificial Sequence
  Synthetic
cacuauuuacauacccuaug

SEQ ID NO: 77719 - RNA, 21 nt, Artificial Sequence
  Synthetic
acacuauuuacauacccuaug

SEQ ID NO: 77720 - RNA, 22 nt, Artificial Sequence
  Synthetic
gacacuauuuacauacccuaug

SEQ ID NO: 77721 - RNA, 23 nt, Artificial Sequence
  Synthetic
agacacuauuuacauacccuaug

SEQ ID NO: 77722 - RNA, 24 nt, Artificial Sequence
  Synthetic
cagacacuauuuacauacccuaug

SEQ ID NO: 77723 - RNA, 18 nt, Artificial Sequence
  Synthetic
ugucuuuaauccuaacug

SEQ ID NO: 77724 - RNA, 19 nt, Artificial Sequence
  Synthetic
cugucuuuaauccuaacug

SEQ ID NO: 77725 - RNA, 20 nt, Artificial Sequence
  Synthetic
ccugucuuuaauccuaacug

SEQ ID NO: 77726 - RNA, 21 nt, Artificial Sequence
  Synthetic
accugucuuuaauccuaacug

SEQ ID NO: 77727 - RNA, 22 nt, Artificial Sequence
  Synthetic
uaccugucuuuaauccuaacug

SEQ ID NO: 77728 - RNA, 23 nt, Artificial Sequence
  Synthetic
auaccugucuuuaauccuaacug

SEQ ID NO: 77729 - RNA, 24 nt, Artificial Sequence
  Synthetic
uauaccugucuuuaauccuaacug

SEQ ID NO: 77730 - RNA, 18 nt, Artificial Sequence
  Synthetic
cugaugcaacccccacug

SEQ ID NO: 77731 - RNA, 19 nt, Artificial Sequence
  Synthetic
gcugaugcaacccccacug

SEQ ID NO: 77732 - RNA, 20 nt, Artificial Sequence
  Synthetic
ugcugaugcaacccccacug

SEQ ID NO: 77733 - RNA, 21 nt, Artificial Sequence
  Synthetic
uugcugaugcaacccccacug

SEQ ID NO: 77734 - RNA, 22 nt, Artificial Sequence
  Synthetic
uuugcugaugcaacccccacug

SEQ ID NO: 77735 - RNA, 23 nt, Artificial Sequence
  Synthetic
guuugcugaugcaacccccacug

SEQ ID NO: 77736 - RNA, 24 nt, Artificial Sequence
  Synthetic
uguuugcugaugcaacccccacug

SEQ ID NO: 77737 - RNA, 18 nt, Artificial Sequence
  Synthetic
ccgggcuuucccccacug

SEQ ID NO: 77738 - RNA, 19 nt, Artificial Sequence
  Synthetic
gccgggcuuucccccacug

SEQ ID NO: 77739 - RNA, 20 nt, Artificial Sequence
  Synthetic
cgccgggcuuucccccacug

SEQ ID NO: 77740 - RNA, 21 nt, Artificial Sequence
  Synthetic
ucgccgggcuuucccccacug

SEQ ID NO: 77741 - RNA, 22 nt, Artificial Sequence
  Synthetic
uucgccgggcuuucccccacug

SEQ ID NO: 77742 - RNA, 23 nt, Artificial Sequence
  Synthetic
guucgccgggcuuucccccacug

SEQ ID NO: 77743 - RNA, 24 nt, Artificial Sequence
  Synthetic
gguucgccgggcuuucccccacug

SEQ ID NO: 77744 - RNA, 18 nt, Artificial Sequence
  Synthetic
cuguuuguuuaaagacug

SEQ ID NO: 77745 - RNA, 19 nt, Artificial Sequence
  Synthetic
acuguuuguuuaaagacug

SEQ ID NO: 77746 - RNA, 20 nt, Artificial Sequence
  Synthetic
gacuguuuguuuaaagacug

SEQ ID NO: 77747 - RNA, 21 nt, Artificial Sequence
  Synthetic
agacuguuuguuuaaagacug

SEQ ID NO: 77748 - RNA, 22 nt, Artificial Sequence
  Synthetic
aagacuguuuguuuaaagacug

SEQ ID NO: 77749 - RNA, 23 nt, Artificial Sequence
  Synthetic
aaagacuguuuguuuaaagacug

SEQ ID NO: 77750 - RNA, 24 nt, Artificial Sequence
  Synthetic
caaagacuguuuguuuaaagacug

SEQ ID NO: 77751 - RNA, 18 nt, Artificial Sequence
  Synthetic
cucugccgauccauacug

SEQ ID NO: 77752 - RNA, 19 nt, Artificial Sequence
  Synthetic
ccucugccgauccauacug

SEQ ID NO: 77753 - RNA, 20 nt, Artificial Sequence
  Synthetic
uccucugccgauccauacug

SEQ ID NO: 77754 - RNA, 21 nt, Artificial Sequence
  Synthetic
cuccucugccgauccauacug

SEQ ID NO: 77755 - RNA, 22 nt, Artificial Sequence
  Synthetic
gcuccucugccgauccauacug

SEQ ID NO: 77756 - RNA, 23 nt, Artificial Sequence
  Synthetic
ggcuccucugccgauccauacug

SEQ ID NO: 77757 - RNA, 24 nt, Artificial Sequence
  Synthetic
uggcuccucugccgauccauacug

SEQ ID NO: 77758 - RNA, 18 nt, Artificial Sequence
  Synthetic
cuuguucauguccuacug

SEQ ID NO: 77759 - RNA, 19 nt, Artificial Sequence
  Synthetic
ucuuguucauguccuacug

SEQ ID NO: 77760 - RNA, 20 nt, Artificial Sequence
  Synthetic
cucuuguucauguccuacug

SEQ ID NO: 77761 - RNA, 21 nt, Artificial Sequence
  Synthetic
ucucuuguucauguccuacug

SEQ ID NO: 77762 - RNA, 22 nt, Artificial Sequence
  Synthetic
aucucuuguucauguccuacug

SEQ ID NO: 77763 - RNA, 23 nt, Artificial Sequence
  Synthetic
caucucuuguucauguccuacug

SEQ ID NO: 77764 - RNA, 24 nt, Artificial Sequence
  Synthetic
ucaucucuuguucauguccuacug

SEQ ID NO: 77765 - RNA, 18 nt, Artificial Sequence
  Synthetic
gggacccugccgaaccug

SEQ ID NO: 77766 - RNA, 19 nt, Artificial Sequence
  Synthetic
cgggacccugccgaaccug

SEQ ID NO: 77767 - RNA, 20 nt, Artificial Sequence
  Synthetic
acgggacccugccgaaccug

SEQ ID NO: 77768 - RNA, 21 nt, Artificial Sequence
  Synthetic
uacgggacccugccgaaccug

SEQ ID NO: 77769 - RNA, 22 nt, Artificial Sequence
  Synthetic
guacgggacccugccgaaccug

SEQ ID NO: 77770 - RNA, 23 nt, Artificial Sequence
  Synthetic
aguacgggacccugccgaaccug

SEQ ID NO: 77771 - RNA, 24 nt, Artificial Sequence
  Synthetic
caguacgggacccugccgaaccug

SEQ ID NO: 77772 - RNA, 18 nt, Artificial Sequence
  Synthetic
aaugacucuagcuaccug

SEQ ID NO: 77773 - RNA, 19 nt, Artificial Sequence
  Synthetic
uaaugacucuagcuaccug

SEQ ID NO: 77774 - RNA, 20 nt, Artificial Sequence
  Synthetic
  misc_feature (1)..(1): n is a, c, g, or u
nuaaugacucuagcuaccug

SEQ ID NO: 77775 - RNA, 21 nt, Artificial Sequence
  Synthetic
  misc_feature (1)..(2): n is a, c, g, or u
nnuaaugacucuagcuaccug

SEQ ID NO: 77776 - RNA, 22 nt, Artificial Sequence
  Synthetic
  misc_feature (2)..(3): n is a, c, g, or u
annuaaugacucuagcuaccug

SEQ ID NO: 77777 - RNA, 23 nt, Artificial Sequence
  Synthetic
  misc_feature (3)..(4): n is a, c, g, or u
gannuaaugacucuagcuaccug

SEQ ID NO: 77778 - RNA, 24 nt, Artificial Sequence
  Synthetic
  misc_feature (4)..(5): n is a, c, g, or u
ggannuaaugacucuagcuaccug

SEQ ID NO: 77779 - RNA, 18 nt, Artificial Sequence
  Synthetic
caccaguacgggacccug

SEQ ID NO: 77780 - RNA, 19 nt, Artificial Sequence
  Synthetic
ccaccaguacgggacccug

SEQ ID NO: 77781 - RNA, 20 nt, Artificial Sequence
  Synthetic
accaccaguacgggacccug

SEQ ID NO: 77782 - RNA, 21 nt, Artificial Sequence
  Synthetic
aaccaccaguacgggacccug

SEQ ID NO: 77783 - RNA, 22 nt, Artificial Sequence
  Synthetic
caaccaccaguacgggacccug

SEQ ID NO: 77784 - RNA, 23 nt, Artificial Sequence
  Synthetic
ucaaccaccaguacgggacccug

SEQ ID NO: 77785 - RNA, 24 nt, Artificial Sequence
  Synthetic
aucaaccaccaguacgggacccug

SEQ ID NO: 77786 - RNA, 18 nt, Artificial Sequence
  Synthetic
gcugccaacuggauccug

SEQ ID NO: 77787 - RNA, 19 nt, Artificial Sequence
  Synthetic
ugcugccaacuggauccug

SEQ ID NO: 77788 - RNA, 20 nt, Artificial Sequence
  Synthetic
gugcugccaacuggauccug

SEQ ID NO: 77789 - RNA, 21 nt, Artificial Sequence
  Synthetic
ugugcugccaacuggauccug

SEQ ID NO: 77790 - RNA, 22 nt, Artificial Sequence
  Synthetic
cugugcugccaacuggauccug

SEQ ID NO: 77791 - RNA, 23 nt, Artificial Sequence
  Synthetic
gcugugcugccaacuggauccug

SEQ ID NO: 77792 - RNA, 24 nt, Artificial Sequence
  Synthetic
ggcugugcugccaacuggauccug

SEQ ID NO: 77793 - RNA, 18 nt, Artificial Sequence
  Synthetic
  misc_feature (6)..(6): n is a, c, g, or u
acaucnuuuccauggcug

SEQ ID NO: 77794 - RNA, 19 nt, Artificial Sequence
  Synthetic
  misc_feature (7)..(7): n is a, c, g, or u
uacaucnuuuccauggcug

SEQ ID NO: 77795 - RNA, 20 nt, Artificial Sequence
  Synthetic
  misc_feature (8)..(8): n is a, c, g, or u
auacaucnuuuccauggcug

SEQ ID NO: 77796 - RNA, 21 nt, Artificial Sequence
  Synthetic
  misc_feature (9)..(9): n is a, c, g, or u
uauacaucnuuuccauggcug

SEQ ID NO: 77797 - RNA, 22 nt, Artificial Sequence
  Synthetic
  misc_feature (10)..(10): n is a, c, g, or u
auauacaucnuuuccauggcug

SEQ ID NO: 77798 - RNA, 23 nt, Artificial Sequence
  Synthetic
  misc_feature (11)..(11): n is a, c, g, or u
aauauacaucnuuuccauggcug

SEQ ID NO: 77799 - RNA, 24 nt, Artificial Sequence
  Synthetic
  misc_feature (12)..(12): n is a, c, g, or u
aaauauacaucnuuuccauggcug

SEQ ID NO: 77800 - RNA, 18 nt, Artificial Sequence
  Synthetic
guuucccucauguugcug

SEQ ID NO: 77801 - RNA, 19 nt, Artificial Sequence
  Synthetic
uguuucccucauguugcug

SEQ ID NO: 77802 - RNA, 20 nt, Artificial Sequence
  Synthetic
auguuucccucauguugcug

SEQ ID NO: 77803 - RNA, 21 nt, Artificial Sequence
  Synthetic
uauguuucccucauguugcug

SEQ ID NO: 77804 - RNA, 22 nt, Artificial Sequence
  Synthetic
cuauguuucccucauguugcug

SEQ ID NO: 77805 - RNA, 23 nt, Artificial Sequence
  Synthetic
ucuauguuucccucauguugcug

SEQ ID NO: 77806 - RNA, 24 nt, Artificial Sequence
  Synthetic
cucuauguuucccucauguugcug

SEQ ID NO: 77807 - RNA, 18 nt, Artificial Sequence
  Synthetic
gcaagccauucuuugcug

SEQ ID NO: 77808 - RNA, 19 nt, Artificial Sequence
  Synthetic
ggcaagccauucuuugcug

SEQ ID NO: 77809 - RNA, 20 nt, Artificial Sequence
  Synthetic
aggcaagccauucuuugcug

SEQ ID NO: 77810 - RNA, 21 nt, Artificial Sequence
  Synthetic
caggcaagccauucuuugcug

SEQ ID NO: 77811 - RNA, 22 nt, Artificial Sequence
  Synthetic
ucaggcaagccauucuuugcug

SEQ ID NO: 77812 - RNA, 23 nt, Artificial Sequence
  Synthetic
cucaggcaagccauucuuugcug

SEQ ID NO: 77813 - RNA, 24 nt, Artificial Sequence
  Synthetic
acucaggcaagccauucuuugcug

SEQ ID NO: 77814 - RNA, 18 nt, Artificial Sequence
  Synthetic
ucugugccuucucaucug

SEQ ID NO: 77815 - RNA, 19 nt, Artificial Sequence
  Synthetic
gucugugccuucucaucug

SEQ ID NO: 77816 - RNA, 20 nt, Artificial Sequence
  Synthetic
cgucugugccuucucaucug

SEQ ID NO: 77817 - RNA, 21 nt, Artificial Sequence
  Synthetic
ccgucugugccuucucaucug

SEQ ID NO: 77818 - RNA, 22 nt, Artificial Sequence
  Synthetic
cccgucugugccuucucaucug

SEQ ID NO: 77819 - RNA, 23 nt, Artificial Sequence
  Synthetic
ccccgucugugccuucucaucug

SEQ ID NO: 77820 - RNA, 24 nt, Artificial Sequence
  Synthetic
uccccgucugugccuucucaucug

SEQ ID NO: 77821 - RNA, 18 nt, Artificial Sequence
  Synthetic
uauugggggccaagucug

SEQ ID NO: 77822 - RNA, 19 nt, Artificial Sequence
  Synthetic
guauugggggccaagucug

SEQ ID NO: 77823 - RNA, 20 nt, Artificial Sequence
  Synthetic
gguauugggggccaagucug

SEQ ID NO: 77824 - RNA, 21 nt, Artificial Sequence
  Synthetic
ugguauugggggccaagucug

SEQ ID NO: 77825 - RNA, 22 nt, Artificial Sequence
  Synthetic
gugguauugggggccaagucug

SEQ ID NO: 77826 - RNA, 23 nt, Artificial Sequence
  Synthetic
ugugguauugggggccaagucug

SEQ ID NO: 77827 - RNA, 24 nt, Artificial Sequence
  Synthetic
augugguauugggggccaagucug

SEQ ID NO: 77828 - RNA, 18 nt, Artificial Sequence
  Synthetic
acuuacaaggccuuucug

SEQ ID NO: 77829 - RNA, 19 nt, Artificial Sequence
  Synthetic
aacuuacaaggccuuucug

SEQ ID NO: 77830 - RNA, 20 nt, Artificial Sequence
  Synthetic
caacuuacaaggccuuucug

SEQ ID NO: 77831 - RNA, 21 nt, Artificial Sequence
  Synthetic
ccaacuuacaaggccuuucug

SEQ ID NO: 77832 - RNA, 22 nt, Artificial Sequence
  Synthetic
gccaacuuacaaggccuuucug

SEQ ID NO: 77833 - RNA, 23 nt, Artificial Sequence
  Synthetic
cgccaacuuacaaggccuuucug

SEQ ID NO: 77834 - RNA, 24 nt, Artificial Sequence
  Synthetic
ucgccaacuuacaaggccuuucug

SEQ ID NO: 77835 - RNA, 18 nt, Artificial Sequence
  Synthetic
gcagagucuagacucgug

SEQ ID NO: 77836 - RNA, 19 nt, Artificial Sequence
  Synthetic
cgcagagucuagacucgug

SEQ ID NO: 77837 - RNA, 20 nt, Artificial Sequence
  Synthetic
ccgcagagucuagacucgug

SEQ ID NO: 77838 - RNA, 21 nt, Artificial Sequence
  Synthetic
accgcagagucuagacucgug

SEQ ID NO: 77839 - RNA, 22 nt, Artificial Sequence
  Synthetic
uaccgcagagucuagacucgug

SEQ ID NO: 77840 - RNA, 23 nt, Artificial Sequence
  Synthetic
auaccgcagagucuagacucgug

SEQ ID NO: 77841 - RNA, 24 nt, Artificial Sequence
  Synthetic
aauaccgcagagucuagacucgug

SEQ ID NO: 77842 - RNA, 18 nt, Artificial Sequence
  Synthetic
  misc_feature (8)..(8): n is a, c, g, or u
cuguuaancggccuauug

SEQ ID NO: 77843 - RNA, 19 nt, Artificial Sequence
  Synthetic
  misc_feature (9)..(9): n is a, c, g, or u
ccuguuaancggccuauug

SEQ ID NO: 77844 - RNA, 20 nt, Artificial Sequence
  Synthetic
  misc_feature (10)..(10): n is a, c, g, or u
cccuguuaancggccuauug

SEQ ID NO: 77845 - RNA, 21 nt, Artificial Sequence
  Synthetic
  misc_feature (11)..(11): n is a, c, g, or u
ucccuguuaancggccuauug

SEQ ID NO: 77846 - RNA, 22 nt, Artificial Sequence
  Synthetic
  misc_feature (12)..(12): n is a, c, g, or u
cucccuguuaancggccuauug

SEQ ID NO: 77847 - RNA, 23 nt, Artificial Sequence
  Synthetic
  misc_feature (13)..(13): n is a, c, g, or u
acucccuguuaancggccuauug

SEQ ID NO: 77848 - RNA, 24 nt, Artificial Sequence
  Synthetic
  misc_feature (14)..(14): n is a, c, g, or u
aacucccuguuaancggccuauug

SEQ ID NO: 77849 - RNA, 18 nt, Artificial Sequence
  Synthetic
ccuccaagcugugccuug

SEQ ID NO: 77850 - RNA, 19 nt, Artificial Sequence
  Synthetic
gccuccaagcugugccuug

SEQ ID NO: 77851 - RNA, 20 nt, Artificial Sequence
  Synthetic
agccuccaagcugugccuug

SEQ ID NO: 77852 - RNA, 21 nt, Artificial Sequence
  Synthetic
aagccuccaagcugugccuug

SEQ ID NO: 77853 - RNA, 22 nt, Artificial Sequence
  Synthetic
caagccuccaagcugugccuug

SEQ ID NO: 77854 - RNA, 23 nt, Artificial Sequence
  Synthetic
ucaagccuccaagcugugccuug

SEQ ID NO: 77855 - RNA, 24 nt, Artificial Sequence
  Synthetic
uucaagccuccaagcugugccuug

SEQ ID NO: 77856 - RNA, 18 nt, Artificial Sequence
  Synthetic
aacgcccaccaaaucuug

SEQ ID NO: 77857 - RNA, 19 nt, Artificial Sequence
  Synthetic
gaacgcccaccaaaucuug

SEQ ID NO: 77858 - RNA, 20 nt, Artificial Sequence
  Synthetic
ugaacgcccaccaaaucuug

SEQ ID NO: 77859 - RNA, 21 nt, Artificial Sequence
  Synthetic
gugaacgcccaccaaaucuug

SEQ ID NO: 77860 - RNA, 22 nt, Artificial Sequence
  Synthetic
cgugaacgcccaccaaaucuug

SEQ ID NO: 77861 - RNA, 23 nt, Artificial Sequence
  Synthetic
ccgugaacgcccaccaaaucuug

SEQ ID NO: 77862 - RNA, 24 nt, Artificial Sequence
  Synthetic
accgugaacgcccaccaaaucuug

SEQ ID NO: 77863 - RNA, 18 nt, Artificial Sequence
  Synthetic
gaaccugcacgacucuug

SEQ ID NO: 77864 - RNA, 19 nt, Artificial Sequence
  Synthetic
cgaaccugcacgacucuug

SEQ ID NO: 77865 - RNA, 20 nt, Artificial Sequence
  Synthetic
ccgaaccugcacgacucuug

SEQ ID NO: 77866 - RNA, 21 nt, Artificial Sequence
  Synthetic
gccgaaccugcacgacucuug

SEQ ID NO: 77867 - RNA, 22 nt, Artificial Sequence
  Synthetic
ugccgaaccugcacgacucuug

SEQ ID NO: 77868 - RNA, 23 nt, Artificial Sequence
  Synthetic
cugccgaaccugcacgacucuug

SEQ ID NO: 77869 - RNA, 24 nt, Artificial Sequence
  Synthetic
ccugccgaaccugcacgacucuug

SEQ ID NO: 77870 - RNA, 18 nt, Artificial Sequence
  Synthetic
gagcucccgugugucuug

SEQ ID NO: 77871 - RNA, 19 nt, Artificial Sequence
  Synthetic
ggagcucccgugugucuug

SEQ ID NO: 77872 - RNA, 20 nt, Artificial Sequence
  Synthetic
gggagcucccgugugucuug

SEQ ID NO: 77873 - RNA, 21 nt, Artificial Sequence
  Synthetic
ggggagcucccgugugucuug

SEQ ID NO: 77874 - RNA, 22 nt, Artificial Sequence
  Synthetic
gggggagcucccgugugucuug

SEQ ID NO: 77875 - RNA, 23 nt, Artificial Sequence
  Synthetic
agggggagcucccgugugucuug

SEQ ID NO: 77876 - RNA, 24 nt, Artificial Sequence
  Synthetic
uagggggagcucccgugugucuug

SEQ ID NO: 77877 - RNA, 18 nt, Artificial Sequence
  Synthetic
ugaaccuuuaccccguug

SEQ ID NO: 77878 - RNA, 19 nt, Artificial Sequence
  Synthetic
  misc_feature (1)..(1): n is a, c, g, or u
nugaaccuuuaccccguug

SEQ ID NO: 77879 - RNA, 20 nt, Artificial Sequence
  Synthetic
  misc_feature (1)..(2): n is a, c, g, or u
nnugaaccuuuaccccguug

SEQ ID NO: 77880 - RNA, 21 nt, Artificial Sequence
  Synthetic
  misc_feature (2)..(3): n is a, c, g, or u
annugaaccuuuaccccguug

SEQ ID NO: 77881 - RNA, 22 nt, Artificial Sequence
  Synthetic
  misc_feature (3)..(4): n is a, c, g, or u
uannugaaccuuuaccccguug

SEQ ID NO: 77882 - RNA, 23 nt, Artificial Sequence
  Synthetic
  misc_feature (4)..(5): n is a, c, g, or u
auannugaaccuuuaccccguug

SEQ ID NO: 77883 - RNA, 24 nt, Artificial Sequence
  Synthetic
  misc_feature (5)..(6): n is a, c, g, or u
aauannugaaccuuuaccccguug

SEQ ID NO: 77884 - RNA, 18 nt, Artificial Sequence
  Synthetic
  misc_feature (10)..(10): n is a, c, g, or u
uuccggaganuacuguug

SEQ ID NO: 77885 - RNA, 19 nt, Artificial Sequence
  Synthetic
  misc_feature (11)..(11): n is a, c, g, or u
cuuccggaganuacuguug

SEQ ID NO: 77886 - RNA, 20 nt, Artificial Sequence
  Synthetic
  misc_feature (12)..(12): n is a, c, g, or u
acuuccggaganuacuguug

SEQ ID NO: 77887 - RNA, 21 nt, Artificial Sequence
  Synthetic
  misc_feature (13)..(13): n is a, c, g, or u
cacuuccggaganuacuguug

SEQ ID NO: 77888 - RNA, 22 nt, Artificial Sequence
  Synthetic
  misc_feature (14)..(14): n is a, c, g, or u
acacuuccggaganuacuguug

SEQ ID NO: 77889 - RNA, 23 nt, Artificial Sequence
  Synthetic
  misc_feature (15)..(15): n is a, c, g, or u
aacacuuccggaganuacuguug

SEQ ID NO: 77890 - RNA, 24 nt, Artificial Sequence
  Synthetic
  misc_feature (16)..(16): n is a, c, g, or u
caacacuuccggaganuacuguug

SEQ ID NO: 77891 - RNA, 18 nt, Artificial Sequence
  Synthetic
gcgggguuuuucuuguug

SEQ ID NO: 77892 - RNA, 19 nt, Artificial Sequence
  Synthetic
ggcgggguuuuucuuguug

SEQ ID NO: 77893 - RNA, 20 nt, Artificial Sequence
  Synthetic
aggcgggguuuuucuuguug

SEQ ID NO: 77894 - RNA, 21 nt, Artificial Sequence
  Synthetic
caggcgggguuuuucuuguug

SEQ ID NO: 77895 - RNA, 22 nt, Artificial Sequence
  Synthetic
acaggcgggguuuuucuuguug

SEQ ID NO: 77896 - RNA, 23 nt, Artificial Sequence
  Synthetic
uacaggcgggguuuuucuuguug

SEQ ID NO: 77897 - RNA, 24 nt, Artificial Sequence
  Synthetic
uuacaggcgggguuuuucuuguug

SEQ ID NO: 77898 - RNA, 18 nt, Artificial Sequence
  Synthetic
ccaaucacuccaccuuug

SEQ ID NO: 77899 - RNA, 19 nt, Artificial Sequence
  Synthetic
cccaaucacuccaccuuug

SEQ ID NO: 77900 - RNA, 20 nt, Artificial Sequence
  Synthetic
ccccaaucacuccaccuuug

SEQ ID NO: 77901 - RNA, 21 nt, Artificial Sequence
  Synthetic
accccaaucacuccaccuuug

SEQ ID NO: 77902 - RNA, 22 nt, Artificial Sequence
  Synthetic
uaccccaaucacuccaccuuug

SEQ ID NO: 77903 - RNA, 23 nt, Artificial Sequence
  Synthetic
cuaccccaaucacuccaccuuug

SEQ ID NO: 77904 - RNA, 24 nt, Artificial Sequence
  Synthetic
ccuaccccaaucacuccaccuuug

SEQ ID NO: 77905 - RNA, 18 nt, Artificial Sequence
  Synthetic
caggcaagccauucuuug

SEQ ID NO: 77906 - RNA, 19 nt, Artificial Sequence
  Synthetic
ucaggcaagccauucuuug

SEQ ID NO: 77907 - RNA, 20 nt, Artificial Sequence
  Synthetic
cucaggcaagccauucuuug

SEQ ID NO: 77908 - RNA, 21 nt, Artificial Sequence
  Synthetic
acucaggcaagccauucuuug

SEQ ID NO: 77909 - RNA, 22 nt, Artificial Sequence
  Synthetic
cacucaggcaagccauucuuug

SEQ ID NO: 77910 - RNA, 23 nt, Artificial Sequence
  Synthetic
gcacucaggcaagccauucuuug

SEQ ID NO: 77911 - RNA, 24 nt, Artificial Sequence
  Synthetic
ugcacucaggcaagccauucuuug

SEQ ID NO: 77912 - RNA, 18 nt, Artificial Sequence
  Synthetic
uacuucaaagacuguuug

SEQ ID NO: 77913 - RNA, 19 nt, Artificial Sequence
  Synthetic
auacuucaaagacuguuug

SEQ ID NO: 77914 - RNA, 20 nt, Artificial Sequence
  Synthetic
cauacuucaaagacuguuug

SEQ ID NO: 77915 - RNA, 21 nt, Artificial Sequence
  Synthetic
gcauacuucaaagacuguuug

SEQ ID NO: 77916 - RNA, 22 nt, Artificial Sequence
  Synthetic
ggcauacuucaaagacuguuug

SEQ ID NO: 77917 - RNA, 23 nt, Artificial Sequence
  Synthetic
aggcauacuucaaagacuguuug

SEQ ID NO: 77918 - RNA, 24 nt, Artificial Sequence
  Synthetic
gaggcauacuucaaagacuguuug

SEQ ID NO: 77919 - RNA, 18 nt, Artificial Sequence
  Synthetic
uuucuugucucacuuuug

SEQ ID NO: 77920 - RNA, 19 nt, Artificial Sequence
  Synthetic
auuucuugucucacuuuug

SEQ ID NO: 77921 - RNA, 20 nt, Artificial Sequence
  Synthetic
cauuucuugucucacuuuug

SEQ ID NO: 77922 - RNA, 21 nt, Artificial Sequence
  Synthetic
acauuucuugucucacuuuug

SEQ ID NO: 77923 - RNA, 22 nt, Artificial Sequence
  Synthetic
cacauuucuugucucacuuuug

SEQ ID NO: 77924 - RNA, 23 nt, Artificial Sequence
  Synthetic
ucacauuucuugucucacuuuug

SEQ ID NO: 77925 - RNA, 24 nt, Artificial Sequence
  Synthetic
uucacauuucuugucucacuuuug

SEQ ID NO: 77926 - RNA, 18 nt, Artificial Sequence
  Synthetic
  misc_feature (5)..(5): n is a, c, g, or u
  misc_feature (18)..(18): n is a, c, g, or u
cacangaacacaucagan

SEQ ID NO: 77927 - RNA, 19 nt, Artificial Sequence
  Synthetic
  misc_feature (6)..(6): n is a, c, g, or u
  misc_feature (19)..(19): n is a, c, g, or u
ccacangaacacaucagan

SEQ ID NO: 77928 - RNA, 20 nt, Artificial Sequence
  Synthetic
  misc_feature (7)..(7): n is a, c, g, or u
  misc_feature (20)..(20): n is a, c, g, or u
accacangaacacaucagan

SEQ ID NO: 77929 - RNA, 21 nt, Artificial Sequence
  Synthetic
  misc_feature (8)..(8): n is a, c, g, or u
  misc_feature (21)..(21): n is a, c, g, or u
uaccacangaacacaucagan

SEQ ID NO: 77930 - RNA, 22 nt, Artificial Sequence
  Synthetic
  misc_feature (9)..(9): n is a, c, g, or u
  misc_feature (22)..(22): n is a, c, g, or u
uuaccacangaacacaucagan

SEQ ID NO: 77931 - RNA, 23 nt, Artificial Sequence
  Synthetic
  misc_feature (10)..(10): n is a, c, g, or u
  misc_feature (23)..(23): n is a, c, g, or u
auuaccacangaacacaucagan

SEQ ID NO: 77932 - RNA, 24 nt, Artificial Sequence
  Synthetic
  misc_feature (11)..(11): n is a, c, g, or u
  misc_feature (24)..(24): n is a, c, g, or u
cauuaccacangaacacaucagan

SEQ ID NO: 77933 - RNA, 18 nt, Artificial Sequence
  Synthetic
  misc_feature (18)..(18): n is a, c, g, or u
uuucuguguaaacaauan

SEQ ID NO: 77934 - RNA, 19 nt, Artificial Sequence
  Synthetic
  misc_feature (19)..(19): n is a, c, g, or u
cuuucuguguaaacaauan

SEQ ID NO: 77935 - RNA, 20 nt, Artificial Sequence
  Synthetic
  misc_feature (20)..(20): n is a, c, g, or u
ccuuucuguguaaacaauan

SEQ ID NO: 77936 - RNA, 21 nt, Artificial Sequence
  Synthetic
  misc_feature (21)..(21): n is a, c, g, or u
gccuuucuguguaaacaauan

SEQ ID NO: 77937 - RNA, 22 nt, Artificial Sequence
  Synthetic
  misc_feature (22)..(22): n is a, c, g, or u
ggccuuucuguguaaacaauan

SEQ ID NO: 77938 - RNA, 23 nt, Artificial Sequence
  Synthetic
  misc_feature (23)..(23): n is a, c, g, or u
aggccuuucuguguaaacaauan

SEQ ID NO: 77939 - RNA, 24 nt, Artificial Sequence
  Synthetic
  misc_feature (24)..(24): n is a, c, g, or u
aaggccuuucuguguaaacaauan

SEQ ID NO: 77940 - RNA, 18 nt, Artificial Sequence
  Synthetic
  misc_feature (9)..(9): n is a, c, g, or u
  misc_feature (18)..(18): n is a, c, g, or u
uauaaaagngaaacuacn

SEQ ID NO: 77941 - RNA, 19 nt, Artificial Sequence
  Synthetic
  misc_feature (10)..(10): n is a, c, g, or u
  misc_feature (19)..(19): n is a, c, g, or u
auauaaaagngaaacuacn

SEQ ID NO: 77942 - RNA, 20 nt, Artificial Sequence
  Synthetic
  misc_feature (11)..(11): n is a, c, g, or u
  misc_feature (20)..(20): n is a, c, g, or u
uauauaaaagngaaacuacn

SEQ ID NO: 77943 - RNA, 21 nt, Artificial Sequence
  Synthetic
  misc_feature (12)..(12): n is a, c, g, or u
  misc_feature (21)..(21): n is a, c, g, or u
uuauauaaaagngaaacuacn

SEQ ID NO: 77944 - RNA, 22 nt, Artificial Sequence
  Synthetic
  misc_feature (13)..(13): n is a, c, g, or u
  misc_feature (22)..(22): n is a, c, g, or u
cuuauauaaaagngaaacuacn

SEQ ID NO: 77945 - RNA, 23 nt, Artificial Sequence
  Synthetic
  misc_feature (14)..(14): n is a, c, g, or u
  misc_feature (23)..(23): n is a, c, g, or u
ucuuauauaaaagngaaacuacn

SEQ ID NO: 77946 - RNA, 24 nt, Artificial Sequence
  Synthetic
  misc_feature (15)..(15): n is a, c, g, or u
  misc_feature (24)..(24): n is a, c, g, or u
aucuuauauaaaagngaaacuacn

SEQ ID NO: 77947 - RNA, 18 nt, Artificial Sequence
  Synthetic
  misc_feature (18)..(18): n is a, c, g, or u
ucuccgucugccguuccn

SEQ ID NO: 77948 - RNA, 19 nt, Artificial Sequence
  Synthetic
  misc_feature (19)..(19): n is a, c, g, or u
uucuccgucugccguuccn

SEQ ID NO: 77949 - RNA, 20 nt, Artificial Sequence
  Synthetic
  misc_feature (20)..(20): n is a, c, g, or u
cuucuccgucugccguuccn

SEQ ID NO: 77950 - RNA, 21 nt, Artificial Sequence
  Synthetic
  misc_feature (21)..(21): n is a, c, g, or u
ccuucuccgucugccguuccn

SEQ ID NO: 77951 - RNA, 22 nt, Artificial Sequence
  Synthetic
  misc_feature (22)..(22): n is a, c, g, or u
cccuucuccgucugccguuccn

SEQ ID NO: 77952 - RNA, 23 nt, Artificial Sequence
  Synthetic
  misc_feature (23)..(23): n is a, c, g, or u
ccccuucuccgucugccguuccn

SEQ ID NO: 77953 - RNA, 24 nt, Artificial Sequence
  Synthetic
  misc_feature (24)..(24): n is a, c, g, or u
uccccuucuccgucugccguuccn

SEQ ID NO: 77954 - RNA, 18 nt, Artificial Sequence
  Synthetic
  misc_feature (15)..(15): n is a, c, g, or u
  misc_feature (18)..(18): n is a, c, g, or u
ccuuggguggcuuunggn

SEQ ID NO: 77955 - RNA, 19 nt, Artificial Sequence
  Synthetic
  misc_feature (16)..(16): n is a, c, g, or u
  misc_feature (19)..(19): n is a, c, g, or u
gccuuggguggcuuunggn

SEQ ID NO: 77956 - RNA, 20 nt, Artificial Sequence
  Synthetic
  misc_feature (17)..(17): n is a, c, g, or u
  misc_feature (20)..(20): n is a, c, g, or u
ugccuuggguggcuuunggn

SEQ ID NO: 77957 - RNA, 21 nt, Artificial Sequence
  Synthetic
  misc_feature (18)..(18): n is a, c, g, or u
  misc_feature (21)..(21): n is a, c, g, or u
gugccuuggguggcuuunggn

SEQ ID NO: 77958 - RNA, 22 nt, Artificial Sequence
  Synthetic
  misc_feature (19)..(19): n is a, c, g, or u
  misc_feature (22)..(22): n is a, c, g, or u
ugugccuuggguggcuuunggn

SEQ ID NO: 77959 - RNA, 23 nt, Artificial Sequence
  Synthetic
  misc_feature (20)..(20): n is a, c, g, or u
  misc_feature (23)..(23): n is a, c, g, or u
cugugccuuggguggcuuunggn

SEQ ID NO: 77960 - RNA, 24 nt, Artificial Sequence
  Synthetic
  misc_feature (21)..(21): n is a, c, g, or u
  misc_feature (24)..(24): n is a, c, g, or u
gcugugccuuggguggcuuunggn

SEQ ID NO: 77961 - RNA, 18 nt, Artificial Sequence
  Synthetic
  misc_feature (18)..(18): n is a, c, g, or u
uaaagacugggaggagun

SEQ ID NO: 77962 - RNA, 19 nt, Artificial Sequence
  Synthetic
  misc_feature (19)..(19): n is a, c, g, or u
uuaaagacugggaggagun

SEQ ID NO: 77963 - RNA, 20 nt, Artificial Sequence
  Synthetic
  misc_feature (20)..(20): n is a, c, g, or u
uuuaaagacugggaggagun

SEQ ID NO: 77964 - RNA, 21 nt, Artificial Sequence
  Synthetic
  misc_feature (21)..(21): n is a, c, g, or u
guuuaaagacugggaggagun

SEQ ID NO: 77965 - RNA, 22 nt, Artificial Sequence
  Synthetic
  misc_feature (22)..(22): n is a, c, g, or u
uguuuaaagacugggaggagun

SEQ ID NO: 77966 - RNA, 23 nt, Artificial Sequence
  Synthetic
  misc_feature (23)..(23): n is a, c, g, or u
uuguuuaaagacugggaggagun

SEQ ID NO: 77967 - RNA, 24 nt, Artificial Sequence
  Synthetic
  misc_feature (24)..(24): n is a, c, g, or u
uuuguuuaaagacugggaggagun

SEQ ID NO: 77968 - RNA, 18 nt, Artificial Sequence
  Synthetic
  misc_feature (11)..(11): n is a, c, g, or u
acacaucaganugaaaau

SEQ ID NO: 77969 - RNA, 19 nt, Artificial Sequence
  Synthetic
  misc_feature (12)..(12): n is a, c, g, or u
aacacaucaganugaaaau

SEQ ID NO: 77970 - RNA, 20 nt, Artificial Sequence
  Synthetic
  misc_feature (13)..(13): n is a, c, g, or u
gaacacaucaganugaaaau

SEQ ID NO: 77971 - RNA, 21 nt, Artificial Sequence
  Synthetic
  misc_feature (1)..(1): n is a, c, g, or u
  misc_feature (14)..(14): n is a, c, g, or u
ngaacacaucaganugaaaau

SEQ ID NO: 77972 - RNA, 22 nt, Artificial Sequence
  Synthetic
  misc_feature (2)..(2): n is a, c, g, or u
  misc_feature (15)..(15): n is a, c, g, or u
angaacacaucaganugaaaau

SEQ ID NO: 77973 - RNA, 23 nt, Artificial Sequence
  Synthetic
  misc_feature (3)..(3): n is a, c, g, or u
  misc_feature (16)..(16): n is a, c, g, or u
cangaacacaucaganugaaaau

SEQ ID NO: 77974 - RNA, 24 nt, Artificial Sequence
  Synthetic
  misc_feature (4)..(4): n is a, c, g, or u
  misc_feature (17)..(17): n is a, c, g, or u
acangaacacaucaganugaaaau

SEQ ID NO: 77975 - RNA, 18 nt, Artificial Sequence
  Synthetic
aggacauuauuaacaaau

SEQ ID NO: 77976 - RNA, 19 nt, Artificial Sequence
  Synthetic
caggacauuauuaacaaau

SEQ ID NO: 77977 - RNA, 20 nt, Artificial Sequence
  Synthetic
ccaggacauuauuaacaaau

SEQ ID NO: 77978 - RNA, 21 nt, Artificial Sequence
  Synthetic
accaggacauuauuaacaaau

SEQ ID NO: 77979 - RNA, 22 nt, Artificial Sequence
  Synthetic
caccaggacauuauuaacaaau

SEQ ID NO: 77980 - RNA, 23 nt, Artificial Sequence
  Synthetic
gcaccaggacauuauuaacaaau

SEQ ID NO: 77981 - RNA, 24 nt, Artificial Sequence
  Synthetic
ugcaccaggacauuauuaacaaau

SEQ ID NO: 77982 - RNA, 18 nt, Artificial Sequence
  Synthetic
  misc_feature (14)..(14): n is a, c, g, or u
accugggugggugnaaau

SEQ ID NO: 77983 - RNA, 19 nt, Artificial Sequence
  Synthetic
  misc_feature (15)..(15): n is a, c, g, or u
uaccugggugggugnaaau

SEQ ID NO: 77984 - RNA, 20 nt, Artificial Sequence
  Synthetic
  misc_feature (16)..(16): n is a, c, g, or u
cuaccugggugggugnaaau

SEQ ID NO: 77985 - RNA, 21 nt, Artificial Sequence
  Synthetic
  misc_feature (17)..(17): n is a, c, g, or u
gcuaccugggugggugnaaau

SEQ ID NO: 77986 - RNA, 22 nt, Artificial Sequence
  Synthetic
  misc_feature (18)..(18): n is a, c, g, or u
agcuaccugggugggugnaaau

SEQ ID NO: 77987 - RNA, 23 nt, Artificial Sequence
  Synthetic
  misc_feature (19)..(19): n is a, c, g, or u
uagcuaccugggugggugnaaau

SEQ ID NO: 77988 - RNA, 24 nt, Artificial Sequence
  Synthetic
  misc_feature (20)..(20): n is a, c, g, or u
cuagcuaccugggugggugnaaau

SEQ ID NO: 77989 - RNA, 18 nt, Artificial Sequence
  Synthetic
gguccucuaacaguaaau

SEQ ID NO: 77990 - RNA, 19 nt, Artificial Sequence
  Synthetic
agguccucuaacaguaaau

SEQ ID NO: 77991 - RNA, 20 nt, Artificial Sequence
  Synthetic
uagguccucuaacaguaaau

SEQ ID NO: 77992 - RNA, 21 nt, Artificial Sequence
  Synthetic
guagguccucuaacaguaaau

SEQ ID NO: 77993 - RNA, 22 nt, Artificial Sequence
  Synthetic
uguagguccucuaacaguaaau

SEQ ID NO: 77994 - RNA, 23 nt, Artificial Sequence
  Synthetic
uuguagguccucuaacaguaaau

SEQ ID NO: 77995 - RNA, 24 nt, Artificial Sequence
  Synthetic
uuuguagguccucuaacaguaaau

SEQ ID NO: 77996 - RNA, 18 nt, Artificial Sequence
  Synthetic
uuggguauacauuuaaau

SEQ ID NO: 77997 - RNA, 19 nt, Artificial Sequence
  Synthetic
uuuggguauacauuuaaau

SEQ ID NO: 77998 - RNA, 20 nt, Artificial Sequence
  Synthetic
cuuuggguauacauuuaaau

SEQ ID NO: 77999 - RNA, 21 nt, Artificial Sequence
  Synthetic
ucuuuggguauacauuuaaau

SEQ ID NO: 78000 - RNA, 22 nt, Artificial Sequence
  Synthetic
gucuuuggguauacauuuaaau

SEQ ID NO: 78001 - RNA, 23 nt, Artificial Sequence
  Synthetic
ugucuuuggguauacauuuaaau

SEQ ID NO: 78002 - RNA, 24 nt, Artificial Sequence
  Synthetic
uugucuuuggguauacauuuaaau

SEQ ID NO: 78003 - RNA, 18 nt, Artificial Sequence
  Synthetic
ccagauugggaccacaau

SEQ ID NO: 78004 - RNA, 19 nt, Artificial Sequence
  Synthetic
uccagauugggaccacaau

SEQ ID NO: 78005 - RNA, 20 nt, Artificial Sequence
  Synthetic
auccagauugggaccacaau

SEQ ID NO: 78006 - RNA, 21 nt, Artificial Sequence
  Synthetic
aauccagauugggaccacaau

SEQ ID NO: 78007 - RNA, 22 nt, Artificial Sequence
  Synthetic
aaauccagauugggaccacaau

SEQ ID NO: 78008 - RNA, 23 nt, Artificial Sequence
  Synthetic
gaaauccagauugggaccacaau

SEQ ID NO: 78009 - RNA, 24 nt, Artificial Sequence
  Synthetic
agaaauccagauugggaccacaau

SEQ ID NO: 78010 - RNA, 18 nt, Artificial Sequence
  Synthetic
  misc_feature (13)..(13): n is a, c, g, or u
ucuuggacucucngcaau

SEQ ID NO: 78011 - RNA, 19 nt, Artificial Sequence
  Synthetic
  misc_feature (14)..(14): n is a, c, g, or u
cucuuggacucucngcaau

SEQ ID NO: 78012 - RNA, 20 nt, Artificial Sequence
  Synthetic
  misc_feature (15)..(15): n is a, c, g, or u
acucuuggacucucngcaau

SEQ ID NO: 78013 - RNA, 21 nt, Artificial Sequence
  Synthetic
  misc_feature (16)..(16): n is a, c, g, or u
gacucuuggacucucngcaau

SEQ ID NO: 78014 - RNA, 22 nt, Artificial Sequence
  Synthetic
  misc_feature (17)..(17): n is a, c, g, or u
ggacucuuggacucucngcaau

SEQ ID NO: 78015 - RNA, 23 nt, Artificial Sequence
  Synthetic
  misc_feature (18)..(18): n is a, c, g, or u
aggacucuuggacucucngcaau

SEQ ID NO: 78016 - RNA, 24 nt, Artificial Sequence
  Synthetic
  misc_feature (19)..(19): n is a, c, g, or u
gaggacucuuggacucucngcaau

SEQ ID NO: 78017 - RNA, 18 nt, Artificial Sequence
  Synthetic
uguaugcguguauucaau

SEQ ID NO: 78018 - RNA, 19 nt, Artificial Sequence
  Synthetic
cuguaugcguguauucaau

SEQ ID NO: 78019 - RNA, 20 nt, Artificial Sequence
  Synthetic
ucuguaugcguguauucaau

SEQ ID NO: 78020 - RNA, 21 nt, Artificial Sequence
  Synthetic
cucuguaugcguguauucaau

SEQ ID NO: 78021 - RNA, 22 nt, Artificial Sequence
  Synthetic
ccucuguaugcguguauucaau

SEQ ID NO: 78022 - RNA, 23 nt, Artificial Sequence
  Synthetic
gccucuguaugcguguauucaau

SEQ ID NO: 78023 - RNA, 24 nt, Artificial Sequence
  Synthetic
ugccucuguaugcguguauucaau

SEQ ID NO: 78024 - RNA, 18 nt, Artificial Sequence
  Synthetic
uugacccuuauaaagaau

SEQ ID NO: 78025 - RNA, 19 nt, Artificial Sequence
  Synthetic
auugacccuuauaaagaau

SEQ ID NO: 78026 - RNA, 20 nt, Artificial Sequence
  Synthetic
cauugacccuuauaaagaau

SEQ ID NO: 78027 - RNA, 21 nt, Artificial Sequence
  Synthetic
acauugacccuuauaaagaau

SEQ ID NO: 78028 - RNA, 22 nt, Artificial Sequence
  Synthetic
gacauugacccuuauaaagaau

SEQ ID NO: 78029 - RNA, 23 nt, Artificial Sequence
  Synthetic
ggacauugacccuuauaaagaau

SEQ ID NO: 78030 - RNA, 24 nt, Artificial Sequence
  Synthetic
uggacauugacccuuauaaagaau

SEQ ID NO: 78031 - RNA, 18 nt, Artificial Sequence
  Synthetic
ggacggucccucucgaau

SEQ ID NO: 78032 - RNA, 19 nt, Artificial Sequence
  Synthetic
uggacggucccucucgaau

SEQ ID NO: 78033 - RNA, 20 nt, Artificial Sequence
  Synthetic
uuggacggucccucucgaau

SEQ ID NO: 78034 - RNA, 21 nt, Artificial Sequence
  Synthetic
cuuggacggucccucucgaau

SEQ ID NO: 78035 - RNA, 22 nt, Artificial Sequence
  Synthetic
ucuuggacggucccucucgaau

SEQ ID NO: 78036 - RNA, 23 nt, Artificial Sequence
  Synthetic
uucuuggacggucccucucgaau

SEQ ID NO: 78037 - RNA, 24 nt, Artificial Sequence
  Synthetic
uuucuuggacggucccucucgaau

SEQ ID NO: 78038 - RNA, 18 nt, Artificial Sequence
  Synthetic
  misc_feature (14)..(14): n is a, c, g, or u
gaaaguaugucaangaau

SEQ ID NO: 78039 - RNA, 19 nt, Artificial Sequence
  Synthetic
  misc_feature (15)..(15): n is a, c, g, or u
ggaaaguaugucaangaau

SEQ ID NO: 78040 - RNA, 20 nt, Artificial Sequence
  Synthetic
  misc_feature (16)..(16): n is a, c, g, or u
uggaaaguaugucaangaau

SEQ ID NO: 78041 - RNA, 21 nt, Artificial Sequence
  Synthetic
  misc_feature (17)..(17): n is a, c, g, or u
uuggaaaguaugucaangaau

SEQ ID NO: 78042 - RNA, 22 nt, Artificial Sequence
  Synthetic
  misc_feature (18)..(18): n is a, c, g, or u
auuggaaaguaugucaangaau

SEQ ID NO: 78043 - RNA, 23 nt, Artificial Sequence
  Synthetic
  misc_feature (19)..(19): n is a, c, g, or u
gauuggaaaguaugucaangaau

SEQ ID NO: 78044 - RNA, 24 nt, Artificial Sequence
  Synthetic
  misc_feature (20)..(20): n is a, c, g, or u
ugauuggaaaguaugucaangaau

SEQ ID NO: 78045 - RNA, 18 nt, Artificial Sequence
  Synthetic
aguuaugucaauacuaau

SEQ ID NO: 78046 - RNA, 19 nt, Artificial Sequence
  Synthetic
caguuaugucaauacuaau

SEQ ID NO: 78047 - RNA, 20 nt, Artificial Sequence
  Synthetic
ucaguuaugucaauacuaau

SEQ ID NO: 78048 - RNA, 21 nt, Artificial Sequence
  Synthetic
gucaguuaugucaauacuaau

SEQ ID NO: 78049 - RNA, 22 nt, Artificial Sequence
  Synthetic
agucaguuaugucaauacuaau

SEQ ID NO: 78050 - RNA, 23 nt, Artificial Sequence
  Synthetic
uagucaguuaugucaauacuaau

SEQ ID NO: 78051 - RNA, 24 nt, Artificial Sequence
  Synthetic
guagucaguuaugucaauacuaau

SEQ ID NO: 78052 - RNA, 18 nt, Artificial Sequence
  Synthetic
gcccguuuguccucuaau

SEQ ID NO: 78053 - RNA, 19 nt, Artificial Sequence
  Synthetic
ugcccguuuguccucuaau

SEQ ID NO: 78054 - RNA, 20 nt, Artificial Sequence
  Synthetic
uugcccguuuguccucuaau

SEQ ID NO: 78055 - RNA, 21 nt, Artificial Sequence
  Synthetic
guugcccguuuguccucuaau

SEQ ID NO: 78056 - RNA, 22 nt, Artificial Sequence
  Synthetic
uguugcccguuuguccucuaau

SEQ ID NO: 78057 - RNA, 23 nt, Artificial Sequence
  Synthetic
auguugcccguuuguccucuaau

SEQ ID NO: 78058 - RNA, 24 nt, Artificial Sequence
  Synthetic
uauguugcccguuuguccucuaau

SEQ ID NO: 78059 - RNA, 18 nt, Artificial Sequence
  Synthetic
uuucauggguuauguaau

SEQ ID NO: 78060 - RNA, 19 nt, Artificial Sequence
  Synthetic
auuucauggguuauguaau

SEQ ID NO: 78061 - RNA, 20 nt, Artificial Sequence
  Synthetic
  misc_feature (1)..(1): n is a, c, g, or u
nauuucauggguuauguaau

SEQ ID NO: 78062 - RNA, 21 nt, Artificial Sequence
  Synthetic
  misc_feature (2)..(2): n is a, c, g, or u
anauuucauggguuauguaau

SEQ ID NO: 78063 - RNA, 22 nt, Artificial Sequence
  Synthetic
  misc_feature (3)..(3): n is a, c, g, or u
uanauuucauggguuauguaau

SEQ ID NO: 78064 - RNA, 23 nt, Artificial Sequence
  Synthetic
  misc_feature (4)..(4): n is a, c, g, or u
cuanauuucauggguuauguaau

SEQ ID NO: 78065 - RNA, 24 nt, Artificial Sequence
  Synthetic
  misc_feature (5)..(5): n is a, c, g, or u
ccuanauuucauggguuauguaau

SEQ ID NO: 78066 - RNA, 18 nt, Artificial Sequence
  Synthetic
acuauaccugucuuuaau

SEQ ID NO: 78067 - RNA, 19 nt, Artificial Sequence
  Synthetic
uacuauaccugucuuuaau

SEQ ID NO: 78068 - RNA, 20 nt, Artificial Sequence
  Synthetic
cuacuauaccugucuuuaau

SEQ ID NO: 78069 - RNA, 21 nt, Artificial Sequence
  Synthetic
ucuacuauaccugucuuuaau

SEQ ID NO: 78070 - RNA, 22 nt, Artificial Sequence
  Synthetic
uucuacuauaccugucuuuaau

SEQ ID NO: 78071 - RNA, 23 nt, Artificial Sequence
  Synthetic
cuucuacuauaccugucuuuaau

SEQ ID NO: 78072 - RNA, 24 nt, Artificial Sequence
  Synthetic
ucuucuacuauaccugucuuuaau

SEQ ID NO: 78073 - RNA, 18 nt, Artificial Sequence
  Synthetic
gccaagucuguacaacau

SEQ ID NO: 78074 - RNA, 19 nt, Artificial Sequence
  Synthetic
ggccaagucuguacaacau

SEQ ID NO: 78075 - RNA, 20 nt, Artificial Sequence
  Synthetic
gggccaagucuguacaacau

SEQ ID NO: 78076 - RNA, 21 nt, Artificial Sequence
  Synthetic
ggggccaagucuguacaacau

SEQ ID NO: 78077 - RNA, 22 nt, Artificial Sequence
  Synthetic
gggggccaagucuguacaacau

SEQ ID NO: 78078 - RNA, 23 nt, Artificial Sequence
  Synthetic
ugggggccaagucuguacaacau

SEQ ID NO: 78079 - RNA, 24 nt, Artificial Sequence
  Synthetic
uugggggccaagucuguacaacau

SEQ ID NO: 78080 - RNA, 18 nt, Artificial Sequence
  Synthetic
ggacccugcaccgaacau

SEQ ID NO: 78081 - RNA, 19 nt, Artificial Sequence
  Synthetic
gggacccugcaccgaacau

SEQ ID NO: 78082 - RNA, 20 nt, Artificial Sequence
  Synthetic
ggggacccugcaccgaacau

SEQ ID NO: 78083 - RNA, 18 nt, Artificial Sequence
  Synthetic
ugggaacaagagcuacau

SEQ ID NO: 78084 - RNA, 19 nt, Artificial Sequence
  Synthetic
uugggaacaagagcuacau

SEQ ID NO: 78085 - RNA, 20 nt, Artificial Sequence
  Synthetic
cuugggaacaagagcuacau

SEQ ID NO: 78086 - RNA, 21 nt, Artificial Sequence
  Synthetic
ucuugggaacaagagcuacau

SEQ ID NO: 78087 - RNA, 22 nt, Artificial Sequence
  Synthetic
uucuugggaacaagagcuacau

SEQ ID NO: 78088 - RNA, 23 nt, Artificial Sequence
  Synthetic
auucuugggaacaagagcuacau

SEQ ID NO: 78089 - RNA, 24 nt, Artificial Sequence
  Synthetic
uauucuugggaacaagagcuacau

SEQ ID NO: 78090 - RNA, 18 nt, Artificial Sequence
  Synthetic
uugcccaaggucuuacau

SEQ ID NO: 78091 - RNA, 19 nt, Artificial Sequence
  Synthetic
cuugcccaaggucuuacau

SEQ ID NO: 78092 - RNA, 20 nt, Artificial Sequence
  Synthetic
ucuugcccaaggucuuacau

SEQ ID NO: 78093 - RNA, 21 nt, Artificial Sequence
  Synthetic
aucuugcccaaggucuuacau

SEQ ID NO: 78094 - RNA, 22 nt, Artificial Sequence
  Synthetic
aaucuugcccaaggucuuacau

SEQ ID NO: 78095 - RNA, 23 nt, Artificial Sequence
  Synthetic
aaaucuugcccaaggucuuacau

SEQ ID NO: 78096 - RNA, 24 nt, Artificial Sequence
  Synthetic
caaaucuugcccaaggucuuacau

SEQ ID NO: 78097 - RNA, 18 nt, Artificial Sequence
  Synthetic
auuuggaagauccagcau

SEQ ID NO: 78098 - RNA, 19 nt, Artificial Sequence
  Synthetic
aauuuggaagauccagcau

SEQ ID NO: 78099 - RNA, 20 nt, Artificial Sequence
  Synthetic
aaauuuggaagauccagcau

SEQ ID NO: 78100 - RNA, 21 nt, Artificial Sequence
  Synthetic
  misc_feature (1)..(1): n is a, c, g, or u
naaauuuggaagauccagcau

SEQ ID NO: 78101 - RNA, 22 nt, Artificial Sequence
  Synthetic
  misc_feature (2)..(2): n is a, c, g, or u
gnaaauuuggaagauccagcau

SEQ ID NO: 78102 - RNA, 23 nt, Artificial Sequence
  Synthetic
  misc_feature (3)..(3): n is a, c, g, or u
ugnaaauuuggaagauccagcau

SEQ ID NO: 78103 - RNA, 24 nt, Artificial Sequence
  Synthetic
  misc_feature (4)..(4): n is a, c, g, or u
gugnaaauuuggaagauccagcau

SEQ ID NO: 78104 - RNA, 18 nt, Artificial Sequence
  Synthetic
accaguuggauccagcau

SEQ ID NO: 78105 - RNA, 19 nt, Artificial Sequence
  Synthetic
caccaguuggauccagcau

SEQ ID NO: 78106 - RNA, 20 nt, Artificial Sequence
  Synthetic
ccaccaguuggauccagcau

SEQ ID NO: 78107 - RNA, 21 nt, Artificial Sequence
  Synthetic
accaccaguuggauccagcau

SEQ ID NO: 78108 - RNA, 22 nt, Artificial Sequence
  Synthetic
gaccaccaguuggauccagcau

SEQ ID NO: 78109 - RNA, 23 nt, Artificial Sequence
  Synthetic
cgaccaccaguuggauccagcau

SEQ ID NO: 78110 - RNA, 24 nt, Artificial Sequence
  Synthetic
ccgaccaccaguuggauccagcau

SEQ ID NO: 78111 - RNA, 18 nt, Artificial Sequence
  Synthetic
agguaggagugggagcau

SEQ ID NO: 78112 - RNA, 19 nt, Artificial Sequence
  Synthetic
aagguaggagugggagcau

SEQ ID NO: 78113 - RNA, 20 nt, Artificial Sequence
  Synthetic
caagguaggagugggagcau

SEQ ID NO: 78114 - RNA, 21 nt, Artificial Sequence
  Synthetic
acaagguaggagugggagcau

SEQ ID NO: 78115 - RNA, 22 nt, Artificial Sequence
  Synthetic
aacaagguaggagugggagcau

SEQ ID NO: 78116 - RNA, 23 nt, Artificial Sequence
  Synthetic
caacaagguaggagugggagcau

SEQ ID NO: 78117 - RNA, 24 nt, Artificial Sequence
  Synthetic
ccaacaagguaggagugggagcau

SEQ ID NO: 78118 - RNA, 18 nt, Artificial Sequence
  Synthetic
caccucugcacgucgcau

SEQ ID NO: 78119 - RNA, 19 nt, Artificial Sequence
  Synthetic
ucaccucugcacgucgcau

SEQ ID NO: 78120 - RNA, 20 nt, Artificial Sequence
  Synthetic
uucaccucugcacgucgcau

SEQ ID NO: 78121 - RNA, 21 nt, Artificial Sequence
  Synthetic
cuucaccucugcacgucgcau

SEQ ID NO: 78122 - RNA, 22 nt, Artificial Sequence
  Synthetic
gcuucaccucugcacgucgcau

SEQ ID NO: 78123 - RNA, 23 nt, Artificial Sequence
  Synthetic
cgcuucaccucugcacgucgcau

SEQ ID NO: 78124 - RNA, 24 nt, Artificial Sequence
  Synthetic
ucgcuucaccucugcacgucgcau

SEQ ID NO: 78125 - RNA, 18 nt, Artificial Sequence
  Synthetic
cccucaggcucaaggcau

SEQ ID NO: 78126 - RNA, 19 nt, Artificial Sequence
  Synthetic
gcccucaggcucaaggcau

SEQ ID NO: 78127 - RNA, 20 nt, Artificial Sequence
  Synthetic
agcccucaggcucaaggcau

SEQ ID NO: 78128 - RNA, 21 nt, Artificial Sequence
  Synthetic
gagcccucaggcucaaggcau

SEQ ID NO: 78129 - RNA, 22 nt, Artificial Sequence
  Synthetic
ggagcccucaggcucaaggcau

SEQ ID NO: 78130 - RNA, 23 nt, Artificial Sequence
  Synthetic
uggagcccucaggcucaaggcau

SEQ ID NO: 78131 - RNA, 24 nt, Artificial Sequence
  Synthetic
guggagcccucaggcucaaggcau

SEQ ID NO: 78132 - RNA, 18 nt, Artificial Sequence
  Synthetic
guauucccaucccaucau

SEQ ID NO: 78133 - RNA, 19 nt, Artificial Sequence
  Synthetic
uguauucccaucccaucau

SEQ ID NO: 78134 - RNA, 20 nt, Artificial Sequence
  Synthetic
uuguauucccaucccaucau

SEQ ID NO: 78135 - RNA, 21 nt, Artificial Sequence
  Synthetic
cuuguauucccaucccaucau

SEQ ID NO: 78136 - RNA, 22 nt, Artificial Sequence
  Synthetic
acuuguauucccaucccaucau

SEQ ID NO: 78137 - RNA, 23 nt, Artificial Sequence
  Synthetic
cacuuguauucccaucccaucau

SEQ ID NO: 78138 - RNA, 24 nt, Artificial Sequence
  Synthetic
gcacuuguauucccaucccaucau

SEQ ID NO: 78139 - RNA, 18 nt, Artificial Sequence
  Synthetic
aacaccagaaauccagau

SEQ ID NO: 78140 - RNA, 19 nt, Artificial Sequence
  Synthetic
aaacaccagaaauccagau

SEQ ID NO: 78141 - RNA, 20 nt, Artificial Sequence
  Synthetic
caaacaccagaaauccagau

SEQ ID NO: 78142 - RNA, 21 nt, Artificial Sequence
  Synthetic
gcaaacaccagaaauccagau

SEQ ID NO: 78143 - RNA, 22 nt, Artificial Sequence
  Synthetic
agcaaacaccagaaauccagau

SEQ ID NO: 78144 - RNA, 23 nt, Artificial Sequence
  Synthetic
gagcaaacaccagaaauccagau

SEQ ID NO: 78145 - RNA, 24 nt, Artificial Sequence
  Synthetic
agagcaaacaccagaaauccagau

SEQ ID NO: 78146 - RNA, 18 nt, Artificial Sequence
  Synthetic
  misc_feature (1)..(1): n is a, c, g, or u
  misc_feature (13)..(13): n is a, c, g, or u
ngggggaggaganuagau

SEQ ID NO: 78147 - RNA, 19 nt, Artificial Sequence
  Synthetic
  misc_feature (2)..(2): n is a, c, g, or u
  misc_feature (14)..(14): n is a, c, g, or u
ungggggaggaganuagau

SEQ ID NO: 78148 - RNA, 20 nt, Artificial Sequence
  Synthetic
  misc_feature (3)..(3): n is a, c, g, or u
  misc_feature (15)..(15): n is a, c, g, or u
gungggggaggaganuagau

SEQ ID NO: 78149 - RNA, 21 nt, Artificial Sequence
  Synthetic
  misc_feature (4)..(4): n is a, c, g, or u
  misc_feature (16)..(16): n is a, c, g, or u
agungggggaggaganuagau

SEQ ID NO: 78150 - RNA, 22 nt, Artificial Sequence
  Synthetic
  misc_feature (5)..(5): n is a, c, g, or u
  misc_feature (17)..(17): n is a, c, g, or u
gagungggggaggaganuagau

SEQ ID NO: 78151 - RNA, 23 nt, Artificial Sequence
  Synthetic
  misc_feature (6)..(6): n is a, c, g, or u
  misc_feature (18)..(18): n is a, c, g, or u
ggagungggggaggaganuagau

SEQ ID NO: 78152 - RNA, 24 nt, Artificial Sequence
  Synthetic
  misc_feature (7)..(7): n is a, c, g, or u
  misc_feature (19)..(19): n is a, c, g, or u
aggagungggggaggaganuagau

SEQ ID NO: 78153 - RNA, 18 nt, Artificial Sequence
  Synthetic
caccaagcucugcaggau

SEQ ID NO: 78154 - RNA, 19 nt, Artificial Sequence
  Synthetic
ccaccaagcucugcaggau

SEQ ID NO: 78155 - RNA, 20 nt, Artificial Sequence
  Synthetic
uccaccaagcucugcaggau

SEQ ID NO: 78156 - RNA, 21 nt, Artificial Sequence
  Synthetic
uuccaccaagcucugcaggau

SEQ ID NO: 78157 - RNA, 22 nt, Artificial Sequence
  Synthetic
auuccaccaagcucugcaggau

SEQ ID NO: 78158 - RNA, 23 nt, Artificial Sequence
  Synthetic
cauuccaccaagcucugcaggau

SEQ ID NO: 78159 - RNA, 24 nt, Artificial Sequence
  Synthetic
acauuccaccaagcucugcaggau

SEQ ID NO: 78160 - RNA, 18 nt, Artificial Sequence
  Synthetic
gucaaucuucucgaggau

SEQ ID NO: 78161 - RNA, 19 nt, Artificial Sequence
  Synthetic
cgucaaucuucucgaggau

SEQ ID NO: 78162 - RNA, 20 nt, Artificial Sequence
  Synthetic
ucgucaaucuucucgaggau

SEQ ID NO: 78163 - RNA, 18 nt, Artificial Sequence
  Synthetic
  misc_feature (6)..(6): n is a, c, g, or u
guuaancggccuauugau

SEQ ID NO: 78164 - RNA, 19 nt, Artificial Sequence
  Synthetic
  misc_feature (7)..(7): n is a, c, g, or u
uguuaancggccuauugau

SEQ ID NO: 78165 - RNA, 20 nt, Artificial Sequence
  Synthetic
  misc_feature (8)..(8): n is a, c, g, or u
cuguuaancggccuauugau

SEQ ID NO: 78166 - RNA, 21 nt, Artificial Sequence
  Synthetic
  misc_feature (9)..(9): n is a, c, g, or u
ccuguuaancggccuauugau

SEQ ID NO: 78167 - RNA, 22 nt, Artificial Sequence
  Synthetic
  misc_feature (10)..(10): n is a, c, g, or u
cccuguuaancggccuauugau

SEQ ID NO: 78168 - RNA, 23 nt, Artificial Sequence
  Synthetic
  misc_feature (11)..(11): n is a, c, g, or u
ucccuguuaancggccuauugau

SEQ ID NO: 78169 - RNA, 24 nt, Artificial Sequence
  Synthetic
  misc_feature (12)..(12): n is a, c, g, or u
cucccuguuaancggccuauugau

SEQ ID NO: 78170 - RNA, 18 nt, Artificial Sequence
  Synthetic
aaggcgggcaucuuauau

SEQ ID NO: 78171 - RNA, 19 nt, Artificial Sequence
  Synthetic
gaaggcgggcaucuuauau

SEQ ID NO: 78172 - RNA, 20 nt, Artificial Sequence
  Synthetic
ggaaggcgggcaucuuauau

SEQ ID NO: 78173 - RNA, 21 nt, Artificial Sequence
  Synthetic
uggaaggcgggcaucuuauau

SEQ ID NO: 78174 - RNA, 22 nt, Artificial Sequence
  Synthetic
auggaaggcgggcaucuuauau

SEQ ID NO: 78175 - RNA, 23 nt, Artificial Sequence
  Synthetic
uauggaaggcgggcaucuuauau

SEQ ID NO: 78176 - RNA, 24 nt, Artificial Sequence
  Synthetic
cuauggaaggcgggcaucuuauau

SEQ ID NO: 78177 - RNA, 18 nt, Artificial Sequence
  Synthetic
acuauuuacauacccuau

SEQ ID NO: 78178 - RNA, 19 nt, Artificial Sequence
  Synthetic
cacuauuuacauacccuau

SEQ ID NO: 78179 - RNA, 20 nt, Artificial Sequence
  Synthetic
acacuauuuacauacccuau

SEQ ID NO: 78180 - RNA, 21 nt, Artificial Sequence
  Synthetic
gacacuauuuacauacccuau

SEQ ID NO: 78181 - RNA, 22 nt, Artificial Sequence
  Synthetic
agacacuauuuacauacccuau

SEQ ID NO: 78182 - RNA, 23 nt, Artificial Sequence
  Synthetic
cagacacuauuuacauacccuau

SEQ ID NO: 78183 - RNA, 24 nt, Artificial Sequence
  Synthetic
ccagacacuauuuacauacccuau

SEQ ID NO: 78184 - RNA, 18 nt, Artificial Sequence
  Synthetic
cuauugauuggaaaguau

SEQ ID NO: 78185 - RNA, 19 nt, Artificial Sequence
  Synthetic
ccuauugauuggaaaguau

SEQ ID NO: 78186 - RNA, 20 nt, Artificial Sequence
  Synthetic
gccuauugauuggaaaguau

SEQ ID NO: 78187 - RNA, 21 nt, Artificial Sequence
  Synthetic
ggccuauugauuggaaaguau

SEQ ID NO: 78188 - RNA, 22 nt, Artificial Sequence
  Synthetic
cggccuauugauuggaaaguau

SEQ ID NO: 78189 - RNA, 23 nt, Artificial Sequence
  Synthetic
  misc_feature (1)..(1): n is a, c, g, or u
ncggccuauugauuggaaaguau

SEQ ID NO: 78190 - RNA, 24 nt, Artificial Sequence
  Synthetic
  misc_feature (2)..(2): n is a, c, g, or u
ancggccuauugauuggaaaguau

SEQ ID NO: 78191 - RNA, 18 nt, Artificial Sequence
  Synthetic
auauggaugaugugguau

SEQ ID NO: 78192 - RNA, 19 nt, Artificial Sequence
  Synthetic
uauauggaugaugugguau

SEQ ID NO: 78193 - RNA, 20 nt, Artificial Sequence
  Synthetic
uuauauggaugaugugguau

SEQ ID NO: 78194 - RNA, 21 nt, Artificial Sequence
  Synthetic
guuauauggaugaugugguau

SEQ ID NO: 78195 - RNA, 22 nt, Artificial Sequence
  Synthetic
aguuauauggaugaugugguau

SEQ ID NO: 78196 - RNA, 23 nt, Artificial Sequence
  Synthetic
caguuauauggaugaugugguau

SEQ ID NO: 78197 - RNA, 24 nt, Artificial Sequence
  Synthetic
ucaguuauauggaugaugugguau

SEQ ID NO: 78198 - RNA, 18 nt, Artificial Sequence
  Synthetic
  misc_feature (10)..(10): n is a, c, g, or u
gucuggagcnaaacuuau

SEQ ID NO: 78199 - RNA, 19 nt, Artificial Sequence
  Synthetic
  misc_feature (11)..(11): n is a, c, g, or u
ggucuggagcnaaacuuau

SEQ ID NO: 78200 - RNA, 20 nt, Artificial Sequence
  Synthetic
  misc_feature (12)..(12): n is a, c, g, or u
aggucuggagcnaaacuuau

SEQ ID NO: 78201 - RNA, 21 nt, Artificial Sequence
  Synthetic
  misc_feature (13)..(13): n is a, c, g, or u
caggucuggagcnaaacuuau

SEQ ID NO: 78202 - RNA, 22 nt, Artificial Sequence
  Synthetic
  misc_feature (14)..(14): n is a, c, g, or u
gcaggucuggagcnaaacuuau

SEQ ID NO: 78203 - RNA, 23 nt, Artificial Sequence
  Synthetic
  misc_feature (15)..(15): n is a, c, g, or u
agcaggucuggagcnaaacuuau

SEQ ID NO: 78204 - RNA, 24 nt, Artificial Sequence
  Synthetic
  misc_feature (16)..(16): n is a, c, g, or u
cagcaggucuggagcnaaacuuau

SEQ ID NO: 78205 - RNA, 18 nt, Artificial Sequence
  Synthetic
auggacauugacccuuau

SEQ ID NO: 78206 - RNA, 19 nt, Artificial Sequence
  Synthetic
cauggacauugacccuuau

SEQ ID NO: 78207 - RNA, 20 nt, Artificial Sequence
  Synthetic
  misc_feature (1)..(1): n is a, c, g, or u
ncauggacauugacccuuau

SEQ ID NO: 78208 - RNA, 21 nt, Artificial Sequence
  Synthetic
  misc_feature (2)..(2): n is a, c, g, or u
gncauggacauugacccuuau

SEQ ID NO: 78209 - RNA, 22 nt, Artificial Sequence
  Synthetic
  misc_feature (3)..(3): n is a, c, g, or u
ggncauggacauugacccuuau

SEQ ID NO: 78210 - RNA, 23 nt, Artificial Sequence
  Synthetic
  misc_feature (1)..(1): n is a, c, g, or u
  misc_feature (4)..(4): n is a, c, g, or u
nggncauggacauugacccuuau

SEQ ID NO: 78211 - RNA, 24 nt, Artificial Sequence
  Synthetic
  misc_feature (2)..(2): n is a, c, g, or u
  misc_feature (5)..(5): n is a, c, g, or u
unggncauggacauugacccuuau

SEQ ID NO: 78212 - RNA, 18 nt, Artificial Sequence
  Synthetic
ggaaggcgggcaucuuau

SEQ ID NO: 78213 - RNA, 19 nt, Artificial Sequence
  Synthetic
uggaaggcgggcaucuuau

SEQ ID NO: 78214 - RNA, 20 nt, Artificial Sequence
  Synthetic
auggaaggcgggcaucuuau

SEQ ID NO: 78215 - RNA, 21 nt, Artificial Sequence
  Synthetic
uauggaaggcgggcaucuuau

SEQ ID NO: 78216 - RNA, 22 nt, Artificial Sequence
  Synthetic
cuauggaaggcgggcaucuuau

SEQ ID NO: 78217 - RNA, 23 nt, Artificial Sequence
  Synthetic
ccuauggaaggcgggcaucuuau

SEQ ID NO: 78218 - RNA, 24 nt, Artificial Sequence
  Synthetic
cccuauggaaggcgggcaucuuau

SEQ ID NO: 78219 - RNA, 18 nt, Artificial Sequence
  Synthetic
uucacuuucucgccaacu

SEQ ID NO: 78220 - RNA, 19 nt, Artificial Sequence
  Synthetic
uuucacuuucucgccaacu

SEQ ID NO: 78221 - RNA, 20 nt, Artificial Sequence
  Synthetic
cuuucacuuucucgccaacu

SEQ ID NO: 78222 - RNA, 21 nt, Artificial Sequence
  Synthetic
gcuuucacuuucucgccaacu

SEQ ID NO: 78223 - RNA, 22 nt, Artificial Sequence
  Synthetic
ggcuuucacuuucucgccaacu

SEQ ID NO: 78224 - RNA, 23 nt, Artificial Sequence
  Synthetic
aggcuuucacuuucucgccaacu

SEQ ID NO: 78225 - RNA, 24 nt, Artificial Sequence
  Synthetic
caggcuuucacuuucucgccaacu

SEQ ID NO: 78226 - RNA, 18 nt, Artificial Sequence
  Synthetic
gauccauacugcggaacu

SEQ ID NO: 78227 - RNA, 19 nt, Artificial Sequence
  Synthetic
cgauccauacugcggaacu

SEQ ID NO: 78228 - RNA, 20 nt, Artificial Sequence
  Synthetic
ccgauccauacugcggaacu

SEQ ID NO: 78229 - RNA, 18 nt, Artificial Sequence
  Synthetic
cugucuuuaauccuaacu

SEQ ID NO: 78230 - RNA, 19 nt, Artificial Sequence
  Synthetic
ccugucuuuaauccuaacu

SEQ ID NO: 78231 - RNA, 20 nt, Artificial Sequence
  Synthetic
accugucuuuaauccuaacu

SEQ ID NO: 78232 - RNA, 21 nt, Artificial Sequence
  Synthetic
uaccugucuuuaauccuaacu

SEQ ID NO: 78233 - RNA, 22 nt, Artificial Sequence
  Synthetic
auaccugucuuuaauccuaacu

SEQ ID NO: 78234 - RNA, 23 nt, Artificial Sequence
  Synthetic
uauaccugucuuuaauccuaacu

SEQ ID NO: 78235 - RNA, 24 nt, Artificial Sequence
  Synthetic
cuauaccugucuuuaauccuaacu

SEQ ID NO: 78236 - RNA, 18 nt, Artificial Sequence
  Synthetic
cccuaucuuaucaacacu

SEQ ID NO: 78237 - RNA, 19 nt, Artificial Sequence
  Synthetic
ccccuaucuuaucaacacu

SEQ ID NO: 78238 - RNA, 20 nt, Artificial Sequence
  Synthetic
gccccuaucuuaucaacacu

SEQ ID NO: 78239 - RNA, 21 nt, Artificial Sequence
  Synthetic
ugccccuaucuuaucaacacu

SEQ ID NO: 78240 - RNA, 22 nt, Artificial Sequence
  Synthetic
augccccuaucuuaucaacacu

SEQ ID NO: 78241 - RNA, 23 nt, Artificial Sequence
  Synthetic
aaugccccuaucuuaucaacacu

SEQ ID NO: 78242 - RNA, 24 nt, Artificial Sequence
  Synthetic
aaaugccccuaucuuaucaacacu

SEQ ID NO: 78243 - RNA, 18 nt, Artificial Sequence
  Synthetic
cacauuucuugucucacu

SEQ ID NO: 78244 - RNA, 19 nt, Artificial Sequence
  Synthetic
ucacauuucuugucucacu

SEQ ID NO: 78245 - RNA, 20 nt, Artificial Sequence
  Synthetic
uucacauuucuugucucacu

SEQ ID NO: 78246 - RNA, 21 nt, Artificial Sequence
  Synthetic
uuucacauuucuugucucacu

SEQ ID NO: 78247 - RNA, 22 nt, Artificial Sequence
  Synthetic
guuucacauuucuugucucacu

SEQ ID NO: 78248 - RNA, 23 nt, Artificial Sequence
  Synthetic
gguuucacauuucuugucucacu

SEQ ID NO: 78249 - RNA, 24 nt, Artificial Sequence
  Synthetic
ugguuucacauuucuugucucacu

SEQ ID NO: 78250 - RNA, 18 nt, Artificial Sequence
  Synthetic
acuguuuguuuaaagacu

SEQ ID NO: 78251 - RNA, 19 nt, Artificial Sequence
  Synthetic
gacuguuuguuuaaagacu

SEQ ID NO: 78252 - RNA, 20 nt, Artificial Sequence
  Synthetic
agacuguuuguuuaaagacu

SEQ ID NO: 78253 - RNA, 21 nt, Artificial Sequence
  Synthetic
aagacuguuuguuuaaagacu

SEQ ID NO: 78254 - RNA, 22 nt, Artificial Sequence
  Synthetic
aaagacuguuuguuuaaagacu

SEQ ID NO: 78255 - RNA, 23 nt, Artificial Sequence
  Synthetic
caaagacuguuuguuuaaagacu

SEQ ID NO: 78256 - RNA, 24 nt, Artificial Sequence
  Synthetic
ucaaagacuguuuguuuaaagacu

SEQ ID NO: 78257 - RNA, 18 nt, Artificial Sequence
  Synthetic
gucuuacauaagaggacu

SEQ ID NO: 78258 - RNA, 19 nt, Artificial Sequence
  Synthetic
ggucuuacauaagaggacu

SEQ ID NO: 78259 - RNA, 20 nt, Artificial Sequence
  Synthetic
aggucuuacauaagaggacu

SEQ ID NO: 78260 - RNA, 21 nt, Artificial Sequence
  Synthetic
aaggucuuacauaagaggacu

SEQ ID NO: 78261 - RNA, 22 nt, Artificial Sequence
  Synthetic
caaggucuuacauaagaggacu

SEQ ID NO: 78262 - RNA, 23 nt, Artificial Sequence
  Synthetic
ccaaggucuuacauaagaggacu

SEQ ID NO: 78263 - RNA, 24 nt, Artificial Sequence
  Synthetic
cccaaggucuuacauaagaggacu

SEQ ID NO: 78264 - RNA, 18 nt, Artificial Sequence
  Synthetic
uguugguucuucuggacu

SEQ ID NO: 78265 - RNA, 19 nt, Artificial Sequence
  Synthetic
uuguugguucuucuggacu

SEQ ID NO: 78266 - RNA, 20 nt, Artificial Sequence
  Synthetic
cuuguugguucuucuggacu

SEQ ID NO: 78267 - RNA, 21 nt, Artificial Sequence
  Synthetic
ucuuguugguucuucuggacu

SEQ ID NO: 78268 - RNA, 22 nt, Artificial Sequence
  Synthetic
uucuuguugguucuucuggacu

SEQ ID NO: 78269 - RNA, 23 nt, Artificial Sequence
  Synthetic
cuucuuguugguucuucuggacu

SEQ ID NO: 78270 - RNA, 24 nt, Artificial Sequence
  Synthetic
ucuucuuguugguucuucuggacu

SEQ ID NO: 78271 - RNA, 18 nt, Artificial Sequence
  Synthetic
guuaguauuccuuggacu

SEQ ID NO: 78272 - RNA, 19 nt, Artificial Sequence
  Synthetic
uguuaguauuccuuggacu

SEQ ID NO: 78273 - RNA, 20 nt, Artificial Sequence
  Synthetic
auguuaguauuccuuggacu

SEQ ID NO: 78274 - RNA, 21 nt, Artificial Sequence
  Synthetic
aauguuaguauuccuuggacu

SEQ ID NO: 78275 - RNA, 22 nt, Artificial Sequence
  Synthetic
caauguuaguauuccuuggacu

SEQ ID NO: 78276 - RNA, 23 nt, Artificial Sequence
  Synthetic
ccaauguuaguauuccuuggacu

SEQ ID NO: 78277 - RNA, 24 nt, Artificial Sequence
  Synthetic
cccaauguuaguauuccuuggacu

SEQ ID NO: 78278 - RNA, 18 nt, Artificial Sequence
  Synthetic
ccucugccgauccauacu

SEQ ID NO: 78279 - RNA, 19 nt, Artificial Sequence
  Synthetic
uccucugccgauccauacu

SEQ ID NO: 78280 - RNA, 20 nt, Artificial Sequence
  Synthetic
cuccucugccgauccauacu

SEQ ID NO: 78281 - RNA, 21 nt, Artificial Sequence
  Synthetic
gcuccucugccgauccauacu

SEQ ID NO: 78282 - RNA, 22 nt, Artificial Sequence
  Synthetic
ggcuccucugccgauccauacu

SEQ ID NO: 78283 - RNA, 23 nt, Artificial Sequence
  Synthetic
uggcuccucugccgauccauacu

SEQ ID NO: 78284 - RNA, 24 nt, Artificial Sequence
  Synthetic
guggcuccucugccgauccauacu

SEQ ID NO: 78285 - RNA, 18 nt, Artificial Sequence
  Synthetic
ccgaccuugaggcauacu

SEQ ID NO: 78286 - RNA, 19 nt, Artificial Sequence
  Synthetic
accgaccuugaggcauacu

SEQ ID NO: 78287 - RNA, 20 nt, Artificial Sequence
  Synthetic
gaccgaccuugaggcauacu

SEQ ID NO: 78288 - RNA, 18 nt, Artificial Sequence
  Synthetic
aaagaauuuggagcuacu

SEQ ID NO: 78289 - RNA, 19 nt, Artificial Sequence
  Synthetic
uaaagaauuuggagcuacu

SEQ ID NO: 78290 - RNA, 20 nt, Artificial Sequence
  Synthetic
auaaagaauuuggagcuacu

SEQ ID NO: 78291 - RNA, 21 nt, Artificial Sequence
  Synthetic
uauaaagaauuuggagcuacu

SEQ ID NO: 78292 - RNA, 22 nt, Artificial Sequence
  Synthetic
uuauaaagaauuuggagcuacu

SEQ ID NO: 78293 - RNA, 23 nt, Artificial Sequence
  Synthetic
cuuauaaagaauuuggagcuacu

SEQ ID NO: 78294 - RNA, 24 nt, Artificial Sequence
  Synthetic
ccuuauaaagaauuuggagcuacu

SEQ ID NO: 78295 - RNA, 18 nt, Artificial Sequence
  Synthetic
auuaaaggucuuuguacu

SEQ ID NO: 78296 - RNA, 19 nt, Artificial Sequence
  Synthetic
gauuaaaggucuuuguacu

SEQ ID NO: 78297 - RNA, 20 nt, Artificial Sequence
  Synthetic
agauuaaaggucuuuguacu

SEQ ID NO: 78298 - RNA, 21 nt, Artificial Sequence
  Synthetic
uagauuaaaggucuuuguacu

SEQ ID NO: 78299 - RNA, 22 nt, Artificial Sequence
  Synthetic
  misc_feature (1)..(1): n is a, c, g, or u
nuagauuaaaggucuuuguacu

SEQ ID NO: 78300 - RNA, 23 nt, Artificial Sequence
  Synthetic
  misc_feature (2)..(2): n is a, c, g, or u
anuagauuaaaggucuuuguacu

SEQ ID NO: 78301 - RNA, 24 nt, Artificial Sequence
  Synthetic
  misc_feature (3)..(3): n is a, c, g, or u
ganuagauuaaaggucuuuguacu

SEQ ID NO: 78302 - RNA, 18 nt, Artificial Sequence
  Synthetic
auguaguuaaucauuacu

SEQ ID NO: 78303 - RNA, 19 nt, Artificial Sequence
  Synthetic
aauguaguuaaucauuacu

SEQ ID NO: 78304 - RNA, 20 nt, Artificial Sequence
  Synthetic
uaauguaguuaaucauuacu

SEQ ID NO: 78305 - RNA, 21 nt, Artificial Sequence
  Synthetic
auaauguaguuaaucauuacu

SEQ ID NO: 78306 - RNA, 22 nt, Artificial Sequence
  Synthetic
gauaauguaguuaaucauuacu

SEQ ID NO: 78307 - RNA, 23 nt, Artificial Sequence
  Synthetic
agauaauguaguuaaucauuacu

SEQ ID NO: 78308 - RNA, 24 nt, Artificial Sequence
  Synthetic
cagauaauguaguuaaucauuacu

SEQ ID NO: 78309 - RNA, 18 nt, Artificial Sequence
  Synthetic
uguugcuguucaaaaccu

SEQ ID NO: 78310 - RNA, 19 nt, Artificial Sequence
  Synthetic
auguugcuguucaaaaccu

SEQ ID NO: 78311 - RNA, 20 nt, Artificial Sequence
  Synthetic
cauguugcuguucaaaaccu

SEQ ID NO: 78312 - RNA, 21 nt, Artificial Sequence
  Synthetic
ucauguugcuguucaaaaccu

SEQ ID NO: 78313 - RNA, 22 nt, Artificial Sequence
  Synthetic
cucauguugcuguucaaaaccu

SEQ ID NO: 78314 - RNA, 23 nt, Artificial Sequence
  Synthetic
ccucauguugcuguucaaaaccu

SEQ ID NO: 78315 - RNA, 24 nt, Artificial Sequence
  Synthetic
cccucauguugcuguucaaaaccu

SEQ ID NO: 78316 - RNA, 18 nt, Artificial Sequence
  Synthetic
accccaaucacuccaccu

SEQ ID NO: 78317 - RNA, 19 nt, Artificial Sequence
  Synthetic
uaccccaaucacuccaccu

SEQ ID NO: 78318 - RNA, 20 nt, Artificial Sequence
  Synthetic
cuaccccaaucacuccaccu

SEQ ID NO: 78319 - RNA, 21 nt, Artificial Sequence
  Synthetic
ccuaccccaaucacuccaccu

SEQ ID NO: 78320 - RNA, 22 nt, Artificial Sequence
  Synthetic
gccuaccccaaucacuccaccu

SEQ ID NO: 78321 - RNA, 23 nt, Artificial Sequence
  Synthetic
agccuaccccaaucacuccaccu

SEQ ID NO: 78322 - RNA, 24 nt, Artificial Sequence
  Synthetic
cagccuaccccaaucacuccaccu

SEQ ID NO: 78323 - RNA, 18 nt, Artificial Sequence
  Synthetic
aaugucaacgaccgaccu

SEQ ID NO: 78324 - RNA, 19 nt, Artificial Sequence
  Synthetic
caaugucaacgaccgaccu

SEQ ID NO: 78325 - RNA, 20 nt, Artificial Sequence
  Synthetic
gcaaugucaacgaccgaccu

SEQ ID NO: 78326 - RNA, 21 nt, Artificial Sequence
  Synthetic
  misc_feature (1)..(1): n is a, c, g, or u
ngcaaugucaacgaccgaccu

SEQ ID NO: 78327 - RNA, 22 nt, Artificial Sequence
  Synthetic
  misc_feature (2)..(2): n is a, c, g, or u
cngcaaugucaacgaccgaccu

SEQ ID NO: 78328 - RNA, 23 nt, Artificial Sequence
  Synthetic
  misc_feature (3)..(3): n is a, c, g, or u
ucngcaaugucaacgaccgaccu

SEQ ID NO: 78329 - RNA, 24 nt, Artificial Sequence
  Synthetic
  misc_feature (4)..(4): n is a, c, g, or u
cucngcaaugucaacgaccgaccu

SEQ ID NO: 78330 - RNA, 18 nt, Artificial Sequence
  Synthetic
ccaccaguacgggacccu

SEQ ID NO: 78331 - RNA, 19 nt, Artificial Sequence
  Synthetic
accaccaguacgggacccu

SEQ ID NO: 78332 - RNA, 20 nt, Artificial Sequence
  Synthetic
aaccaccaguacgggacccu

SEQ ID NO: 78333 - RNA, 21 nt, Artificial Sequence
  Synthetic
caaccaccaguacgggacccu

SEQ ID NO: 78334 - RNA, 22 nt, Artificial Sequence
  Synthetic
ucaaccaccaguacgggacccu

SEQ ID NO: 78335 - RNA, 23 nt, Artificial Sequence
  Synthetic
aucaaccaccaguacgggacccu

SEQ ID NO: 78336 - RNA, 24 nt, Artificial Sequence
  Synthetic
caucaaccaccaguacgggacccu

SEQ ID NO: 78337 - RNA, 18 nt, Artificial Sequence
  Synthetic
  misc_feature (2)..(2): n is a, c, g, or u
gncauggacauugacccu

SEQ ID NO: 78338 - RNA, 19 nt, Artificial Sequence
  Synthetic
  misc_feature (3)..(3): n is a, c, g, or u
ggncauggacauugacccu

SEQ ID NO: 78339 - RNA, 20 nt, Artificial Sequence
  Synthetic
  misc_feature (1)..(1): n is a, c, g, or u
  misc_feature (4)..(4): n is a, c, g, or u
nggncauggacauugacccu

SEQ ID NO: 78340 - RNA, 21 nt, Artificial Sequence
  Synthetic
  misc_feature (2)..(2): n is a, c, g, or u
  misc_feature (5)..(5): n is a, c, g, or u
unggncauggacauugacccu

SEQ ID NO: 78341 - RNA, 22 nt, Artificial Sequence
  Synthetic
  misc_feature (3)..(3): n is a, c, g, or u
  misc_feature (6)..(6): n is a, c, g, or u
uunggncauggacauugacccu

SEQ ID NO: 78342 - RNA, 23 nt, Artificial Sequence
  Synthetic
  misc_feature (4)..(4): n is a, c, g, or u
  misc_feature (7)..(7): n is a, c, g, or u
uuunggncauggacauugacccu

SEQ ID NO: 78343 - RNA, 24 nt, Artificial Sequence
  Synthetic
  misc_feature (5)..(5): n is a, c, g, or u
  misc_feature (8)..(8): n is a, c, g, or u
cuuunggncauggacauugacccu

SEQ ID NO: 78344 - RNA, 18 nt, Artificial Sequence
  Synthetic
acacuauuuacauacccu

SEQ ID NO: 78345 - RNA, 19 nt, Artificial Sequence
  Synthetic
gacacuauuuacauacccu

SEQ ID NO: 78346 - RNA, 20 nt, Artificial Sequence
  Synthetic
agacacuauuuacauacccu

SEQ ID NO: 78347 - RNA, 21 nt, Artificial Sequence
  Synthetic
cagacacuauuuacauacccu

SEQ ID NO: 78348 - RNA, 22 nt, Artificial Sequence
  Synthetic
ccagacacuauuuacauacccu

SEQ ID NO: 78349 - RNA, 23 nt, Artificial Sequence
  Synthetic
accagacacuauuuacauacccu

SEQ ID NO: 78350 - RNA, 24 nt, Artificial Sequence
  Synthetic
aaccagacacuauuuacauacccu

SEQ ID NO: 78351 - RNA, 18 nt, Artificial Sequence
  Synthetic
  misc_feature (4)..(4): n is a, c, g, or u
  misc_feature (13)..(13): n is a, c, g, or u
uacnaaauauuunccccu

SEQ ID NO: 78352 - RNA, 19 nt, Artificial Sequence
  Synthetic
  misc_feature (5)..(5): n is a, c, g, or u
  misc_feature (14)..(14): n is a, c, g, or u
cuacnaaauauuunccccu

SEQ ID NO: 78353 - RNA, 20 nt, Artificial Sequence
  Synthetic
  misc_feature (6)..(6): n is a, c, g, or u
  misc_feature (15)..(15): n is a, c, g, or u
ucuacnaaauauuunccccu

SEQ ID NO: 78354 - RNA, 21 nt, Artificial Sequence
  Synthetic
  misc_feature (7)..(7): n is a, c, g, or u
  misc_feature (16)..(16): n is a, c, g, or u
cucuacnaaauauuunccccu

SEQ ID NO: 78355 - RNA, 22 nt, Artificial Sequence
  Synthetic
  misc_feature (8)..(8): n is a, c, g, or u
  misc_feature (17)..(17): n is a, c, g, or u
ucucuacnaaauauuunccccu

SEQ ID NO: 78356 - RNA, 23 nt, Artificial Sequence
  Synthetic
  misc_feature (9)..(9): n is a, c, g, or u
  misc_feature (18)..(18): n is a, c, g, or u
aucucuacnaaauauuunccccu

SEQ ID NO: 78357 - RNA, 24 nt, Artificial Sequence
  Synthetic
  misc_feature (10)..(10): n is a, c, g, or u
  misc_feature (19)..(19): n is a, c, g, or u
caucucuacnaaauauuunccccu

SEQ ID NO: 78358 - RNA, 18 nt, Artificial Sequence
  Synthetic
cgaagaggcagguccccu

SEQ ID NO: 78359 - RNA, 19 nt, Artificial Sequence
  Synthetic
acgaagaggcagguccccu

SEQ ID NO: 78360 - RNA, 20 nt, Artificial Sequence
  Synthetic
gacgaagaggcagguccccu

SEQ ID NO: 78361 - RNA, 21 nt, Artificial Sequence
  Synthetic
agacgaagaggcagguccccu

SEQ ID NO: 78362 - RNA, 22 nt, Artificial Sequence
  Synthetic
uagacgaagaggcagguccccu

SEQ ID NO: 78363 - RNA, 23 nt, Artificial Sequence
  Synthetic
uuagacgaagaggcagguccccu

SEQ ID NO: 78364 - RNA, 24 nt, Artificial Sequence
  Synthetic
guuagacgaagaggcagguccccu

SEQ ID NO: 78365 - RNA, 18 nt, Artificial Sequence
  Synthetic
uguuuuagaaaacucccu

SEQ ID NO: 78366 - RNA, 19 nt, Artificial Sequence
  Synthetic
cuguuuuagaaaacucccu

SEQ ID NO: 78367 - RNA, 20 nt, Artificial Sequence
  Synthetic
acuguuuuagaaaacucccu

SEQ ID NO: 78368 - RNA, 21 nt, Artificial Sequence
  Synthetic
gacuguuuuagaaaacucccu

SEQ ID NO: 78369 - RNA, 22 nt, Artificial Sequence
  Synthetic
agacuguuuuagaaaacucccu

SEQ ID NO: 78370 - RNA, 23 nt, Artificial Sequence
  Synthetic
aagacuguuuuagaaaacucccu

SEQ ID NO: 78371 - RNA, 24 nt, Artificial Sequence
  Synthetic
aaagacuguuuuagaaaacucccu

SEQ ID NO: 78372 - RNA, 18 nt, Artificial Sequence
  Synthetic
cuuucuuggacggucccu

SEQ ID NO: 78373 - RNA, 19 nt, Artificial Sequence
  Synthetic
gcuuucuuggacggucccu

SEQ ID NO: 78374 - RNA, 20 nt, Artificial Sequence
  Synthetic
ggcuuucuuggacggucccu

SEQ ID NO: 78375 - RNA, 21 nt, Artificial Sequence
  Synthetic
gggcuuucuuggacggucccu

SEQ ID NO: 78376 - RNA, 22 nt, Artificial Sequence
  Synthetic
ggggcuuucuuggacggucccu

SEQ ID NO: 78377 - RNA, 23 nt, Artificial Sequence
  Synthetic
uggggcuuucuuggacggucccu

SEQ ID NO: 78378 - RNA, 24 nt, Artificial Sequence
  Synthetic
auggggcuuucuuggacggucccu

SEQ ID NO: 78379 - RNA, 18 nt, Artificial Sequence
  Synthetic
guccuacuguucaagccu

SEQ ID NO: 78380 - RNA, 19 nt, Artificial Sequence
  Synthetic
uguccuacuguucaagccu

SEQ ID NO: 78381 - RNA, 20 nt, Artificial Sequence
  Synthetic
auguccuacuguucaagccu

SEQ ID NO: 78382 - RNA, 21 nt, Artificial Sequence
  Synthetic
cauguccuacuguucaagccu

SEQ ID NO: 78383 - RNA, 22 nt, Artificial Sequence
  Synthetic
ucauguccuacuguucaagccu

SEQ ID NO: 78384 - RNA, 23 nt, Artificial Sequence
  Synthetic
uucauguccuacuguucaagccu

SEQ ID NO: 78385 - RNA, 24 nt, Artificial Sequence
  Synthetic
guucauguccuacuguucaagccu

SEQ ID NO: 78386 - RNA, 18 nt, Artificial Sequence
  Synthetic
agaagaacucccucgccu

SEQ ID NO: 78387 - RNA, 19 nt, Artificial Sequence
  Synthetic
aagaagaacucccucgccu

SEQ ID NO: 78388 - RNA, 20 nt, Artificial Sequence
  Synthetic
gaagaagaacucccucgccu

SEQ ID NO: 78389 - RNA, 21 nt, Artificial Sequence
  Synthetic
agaagaagaacucccucgccu

SEQ ID NO: 78390 - RNA, 22 nt, Artificial Sequence
  Synthetic
uagaagaagaacucccucgccu

SEQ ID NO: 78391 - RNA, 23 nt, Artificial Sequence
  Synthetic
cuagaagaagaacucccucgccu

SEQ ID NO: 78392 - RNA, 24 nt, Artificial Sequence
  Synthetic
ccuagaagaagaacucccucgccu

SEQ ID NO: 78393 - RNA, 18 nt, Artificial Sequence
  Synthetic
ucccccacacggaggccu

SEQ ID NO: 78394 - RNA, 19 nt, Artificial Sequence
  Synthetic
cucccccacacggaggccu

SEQ ID NO: 78395 - RNA, 20 nt, Artificial Sequence
  Synthetic
acucccccacacggaggccu

SEQ ID NO: 78396 - RNA, 21 nt, Artificial Sequence
  Synthetic
cacucccccacacggaggccu

SEQ ID NO: 78397 - RNA, 22 nt, Artificial Sequence
  Synthetic
ucacucccccacacggaggccu

SEQ ID NO: 78398 - RNA, 23 nt, Artificial Sequence
  Synthetic
uucacucccccacacggaggccu

SEQ ID NO: 78399 - RNA, 24 nt, Artificial Sequence
  Synthetic
guucacucccccacacggaggccu

SEQ ID NO: 78400 - RNA, 18 nt, Artificial Sequence
  Synthetic
uuaaacuuagucaugccu

SEQ ID NO: 78401 - RNA, 19 nt, Artificial Sequence
  Synthetic
auuaaacuuagucaugccu

SEQ ID NO: 78402 - RNA, 20 nt, Artificial Sequence
  Synthetic
gauuaaacuuagucaugccu

SEQ ID NO: 78403 - RNA, 21 nt, Artificial Sequence
  Synthetic
agauuaaacuuagucaugccu

SEQ ID NO: 78404 - RNA, 22 nt, Artificial Sequence
  Synthetic
aagauuaaacuuagucaugccu

SEQ ID NO: 78405 - RNA, 23 nt, Artificial Sequence
  Synthetic
gaagauuaaacuuagucaugccu

SEQ ID NO: 78406 - RNA, 24 nt, Artificial Sequence
  Synthetic
cgaagauuaaacuuagucaugccu

SEQ ID NO: 78407 - RNA, 18 nt, Artificial Sequence
  Synthetic
uuacucucguuuuugccu

SEQ ID NO: 78408 - RNA, 19 nt, Artificial Sequence
  Synthetic
guuacucucguuuuugccu

SEQ ID NO: 78409 - RNA, 20 nt, Artificial Sequence
  Synthetic
aguuacucucguuuuugccu

SEQ ID NO: 78410 - RNA, 21 nt, Artificial Sequence
  Synthetic
gaguuacucucguuuuugccu

SEQ ID NO: 78411 - RNA, 22 nt, Artificial Sequence
  Synthetic
ggaguuacucucguuuuugccu

SEQ ID NO: 78412 - RNA, 23 nt, Artificial Sequence
  Synthetic
uggaguuacucucguuuuugccu

SEQ ID NO: 78413 - RNA, 24 nt, Artificial Sequence
  Synthetic
guggaguuacucucguuuuugccu

SEQ ID NO: 78414 - RNA, 18 nt, Artificial Sequence
  Synthetic
cauuccaccaccaauccu

SEQ ID NO: 78415 - RNA, 19 nt, Artificial Sequence
  Synthetic
ucauuccaccaccaauccu

SEQ ID NO: 78416 - RNA, 20 nt, Artificial Sequence
  Synthetic
aucauuccaccaccaauccu

SEQ ID NO: 78417 - RNA, 21 nt, Artificial Sequence
  Synthetic
aaucauuccaccaccaauccu

SEQ ID NO: 78418 - RNA, 22 nt, Artificial Sequence
  Synthetic
gaaucauuccaccaccaauccu

SEQ ID NO: 78419 - RNA, 23 nt, Artificial Sequence
  Synthetic
agaaucauuccaccaccaauccu

SEQ ID NO: 78420 - RNA, 24 nt, Artificial Sequence
  Synthetic
aagaaucauuccaccaccaauccu

SEQ ID NO: 78421 - RNA, 18 nt, Artificial Sequence
  Synthetic
ccgucagcgcugaauccu

SEQ ID NO: 78422 - RNA, 19 nt, Artificial Sequence
  Synthetic
cccgucagcgcugaauccu

SEQ ID NO: 78423 - RNA, 20 nt, Artificial Sequence
  Synthetic
ucccgucagcgcugaauccu

SEQ ID NO: 78424 - RNA, 18 nt, Artificial Sequence
  Synthetic
ugcugccaacuggauccu

SEQ ID NO: 78425 - RNA, 19 nt, Artificial Sequence
  Synthetic
gugcugccaacuggauccu

SEQ ID NO: 78426 - RNA, 20 nt, Artificial Sequence
  Synthetic
ugugcugccaacuggauccu

SEQ ID NO: 78427 - RNA, 21 nt, Artificial Sequence
  Synthetic
cugugcugccaacuggauccu

SEQ ID NO: 78428 - RNA, 22 nt, Artificial Sequence
  Synthetic
gcugugcugccaacuggauccu

SEQ ID NO: 78429 - RNA, 23 nt, Artificial Sequence
  Synthetic
ggcugugcugccaacuggauccu

SEQ ID NO: 78430 - RNA, 24 nt, Artificial Sequence
  Synthetic
aggcugugcugccaacuggauccu

SEQ ID NO: 78431 - RNA, 18 nt, Artificial Sequence
  Synthetic
ggcuuucggaaaauuccu

SEQ ID NO: 78432 - RNA, 19 nt, Artificial Sequence
  Synthetic
gggcuuucggaaaauuccu

SEQ ID NO: 78433 - RNA, 20 nt, Artificial Sequence
  Synthetic
ugggcuuucggaaaauuccu

SEQ ID NO: 78434 - RNA, 21 nt, Artificial Sequence
  Synthetic
augggcuuucggaaaauuccu

SEQ ID NO: 78435 - RNA, 22 nt, Artificial Sequence
  Synthetic
caugggcuuucggaaaauuccu

SEQ ID NO: 78436 - RNA, 23 nt, Artificial Sequence
  Synthetic
ucaugggcuuucggaaaauuccu

SEQ ID NO: 78437 - RNA, 24 nt, Artificial Sequence
  Synthetic
aucaugggcuuucggaaaauuccu

SEQ ID NO: 78438 - RNA, 18 nt, Artificial Sequence
  Synthetic
auucgcacuccuccagcu

SEQ ID NO: 78439 - RNA, 19 nt, Artificial Sequence
  Synthetic
gauucgcacuccuccagcu

SEQ ID NO: 78440 - RNA, 20 nt, Artificial Sequence
  Synthetic
ggauucgcacuccuccagcu

SEQ ID NO: 78441 - RNA, 21 nt, Artificial Sequence
  Synthetic
uggauucgcacuccuccagcu

SEQ ID NO: 78442 - RNA, 22 nt, Artificial Sequence
  Synthetic
guggauucgcacuccuccagcu

SEQ ID NO: 78443 - RNA, 23 nt, Artificial Sequence
  Synthetic
uguggauucgcacuccuccagcu

SEQ ID NO: 78444 - RNA, 24 nt, Artificial Sequence
  Synthetic
guguggauucgcacuccuccagcu

SEQ ID NO: 78445 - RNA, 18 nt, Artificial Sequence
  Synthetic
  misc_feature (5)..(5): n is a, c, g, or u
acccnucucggggucgcu

SEQ ID NO: 78446 - RNA, 19 nt, Artificial Sequence
  Synthetic
  misc_feature (6)..(6): n is a, c, g, or u
gacccnucucggggucgcu

SEQ ID NO: 78447 - RNA, 20 nt, Artificial Sequence
  Synthetic
  misc_feature (7)..(7): n is a, c, g, or u
cgacccnucucggggucgcu

SEQ ID NO: 78448 - RNA, 18 nt, Artificial Sequence
  Synthetic
ggguggagcccucaggcu

SEQ ID NO: 78449 - RNA, 19 nt, Artificial Sequence
  Synthetic
gggguggagcccucaggcu

SEQ ID NO: 78450 - RNA, 20 nt, Artificial Sequence
  Synthetic
ugggguggagcccucaggcu

SEQ ID NO: 78451 - RNA, 21 nt, Artificial Sequence
  Synthetic
uugggguggagcccucaggcu

SEQ ID NO: 78452 - RNA, 22 nt, Artificial Sequence
  Synthetic
uuugggguggagcccucaggcu

SEQ ID NO: 78453 - RNA, 23 nt, Artificial Sequence
  Synthetic
uuuugggguggagcccucaggcu

SEQ ID NO: 78454 - RNA, 24 nt, Artificial Sequence
  Synthetic
cuuuugggguggagcccucaggcu

SEQ ID NO: 78455 - RNA, 18 nt, Artificial Sequence
  Synthetic
ucuuuguacuaggaggcu

SEQ ID NO: 78456 - RNA, 19 nt, Artificial Sequence
  Synthetic
gucuuuguacuaggaggcu

SEQ ID NO: 78457 - RNA, 20 nt, Artificial Sequence
  Synthetic
ggucuuuguacuaggaggcu

SEQ ID NO: 78458 - RNA, 21 nt, Artificial Sequence
  Synthetic
aggucuuuguacuaggaggcu

SEQ ID NO: 78459 - RNA, 22 nt, Artificial Sequence
  Synthetic
aaggucuuuguacuaggaggcu

SEQ ID NO: 78460 - RNA, 23 nt, Artificial Sequence
  Synthetic
aaaggucuuuguacuaggaggcu

SEQ ID NO: 78461 - RNA, 24 nt, Artificial Sequence
  Synthetic
uaaaggucuuuguacuaggaggcu

SEQ ID NO: 78462 - RNA, 18 nt, Artificial Sequence
  Synthetic
aucccaucaucaugggcu

SEQ ID NO: 78463 - RNA, 19 nt, Artificial Sequence
  Synthetic
caucccaucaucaugggcu

SEQ ID NO: 78464 - RNA, 20 nt, Artificial Sequence
  Synthetic
ccaucccaucaucaugggcu

SEQ ID NO: 78465 - RNA, 21 nt, Artificial Sequence
  Synthetic
cccaucccaucaucaugggcu

SEQ ID NO: 78466 - RNA, 22 nt, Artificial Sequence
  Synthetic
ucccaucccaucaucaugggcu

SEQ ID NO: 78467 - RNA, 23 nt, Artificial Sequence
  Synthetic
uucccaucccaucaucaugggcu

SEQ ID NO: 78468 - RNA, 24 nt, Artificial Sequence
  Synthetic
auucccaucccaucaucaugggcu

SEQ ID NO: 78469 - RNA, 18 nt, Artificial Sequence
  Synthetic
  misc_feature (7)..(7): n is a, c, g, or u
uacaucnuuuccauggcu

SEQ ID NO: 78470 - RNA, 19 nt, Artificial Sequence
  Synthetic
  misc_feature (8)..(8): n is a, c, g, or u
auacaucnuuuccauggcu

SEQ ID NO: 78471 - RNA, 20 nt, Artificial Sequence
  Synthetic
  misc_feature (9)..(9): n is a, c, g, or u
uauacaucnuuuccauggcu

SEQ ID NO: 78472 - RNA, 21 nt, Artificial Sequence
  Synthetic
  misc_feature (10)..(10): n is a, c, g, or u
auauacaucnuuuccauggcu

SEQ ID NO: 78473 - RNA, 22 nt, Artificial Sequence
  Synthetic
  misc_feature (11)..(11): n is a, c, g, or u
aauauacaucnuuuccauggcu

SEQ ID NO: 78474 - RNA, 23 nt, Artificial Sequence
  Synthetic
  misc_feature (12)..(12): n is a, c, g, or u
aaauauacaucnuuuccauggcu

SEQ ID NO: 78475 - RNA, 24 nt, Artificial Sequence
  Synthetic
  misc_feature (13)..(13): n is a, c, g, or u
gaaauauacaucnuuuccauggcu

SEQ ID NO: 78476 - RNA, 18 nt, Artificial Sequence
  Synthetic
gcugugccuuggguggcu

SEQ ID NO: 78477 - RNA, 19 nt, Artificial Sequence
  Synthetic
agcugugccuuggguggcu

SEQ ID NO: 78478 - RNA, 20 nt, Artificial Sequence
  Synthetic
aagcugugccuuggguggcu

SEQ ID NO: 78479 - RNA, 21 nt, Artificial Sequence
  Synthetic
caagcugugccuuggguggcu

SEQ ID NO: 78480 - RNA, 22 nt, Artificial Sequence
  Synthetic
ccaagcugugccuuggguggcu

SEQ ID NO: 78481 - RNA, 23 nt, Artificial Sequence
  Synthetic
uccaagcugugccuuggguggcu

SEQ ID NO: 78482 - RNA, 24 nt, Artificial Sequence
  Synthetic
cuccaagcugugccuuggguggcu

SEQ ID NO: 78483 - RNA, 18 nt, Artificial Sequence
  Synthetic
ucaggcucaaggcaugcu

SEQ ID NO: 78484 - RNA, 19 nt, Artificial Sequence
  Synthetic
cucaggcucaaggcaugcu

SEQ ID NO: 78485 - RNA, 20 nt, Artificial Sequence
  Synthetic
ccucaggcucaaggcaugcu

SEQ ID NO: 78486 - RNA, 21 nt, Artificial Sequence
  Synthetic
cccucaggcucaaggcaugcu

SEQ ID NO: 78487 - RNA, 22 nt, Artificial Sequence
  Synthetic
gcccucaggcucaaggcaugcu

SEQ ID NO: 78488 - RNA, 23 nt, Artificial Sequence
  Synthetic
agcccucaggcucaaggcaugcu

SEQ ID NO: 78489 - RNA, 24 nt, Artificial Sequence
  Synthetic
gagcccucaggcucaaggcaugcu

SEQ ID NO: 78490 - RNA, 18 nt, Artificial Sequence
  Synthetic
ggccuguauuuuccugcu

SEQ ID NO: 78491 - RNA, 19 nt, Artificial Sequence
  Synthetic
aggccuguauuuuccugcu

SEQ ID NO: 78492 - RNA, 20 nt, Artificial Sequence
  Synthetic
gaggccuguauuuuccugcu

SEQ ID NO: 78493 - RNA, 21 nt, Artificial Sequence
  Synthetic
agaggccuguauuuuccugcu

SEQ ID NO: 78494 - RNA, 22 nt, Artificial Sequence
  Synthetic
aagaggccuguauuuuccugcu

SEQ ID NO: 78495 - RNA, 23 nt, Artificial Sequence
  Synthetic
uaagaggccuguauuuuccugcu

SEQ ID NO: 78496 - RNA, 24 nt, Artificial Sequence
  Synthetic
guaagaggccuguauuuuccugcu

SEQ ID NO: 78497 - RNA, 18 nt, Artificial Sequence
  Synthetic
uggcugcuaggcugugcu

SEQ ID NO: 78498 - RNA, 19 nt, Artificial Sequence
  Synthetic
auggcugcuaggcugugcu

SEQ ID NO: 78499 - RNA, 20 nt, Artificial Sequence
  Synthetic
cauggcugcuaggcugugcu

SEQ ID NO: 78500 - RNA, 21 nt, Artificial Sequence
  Synthetic
ccauggcugcuaggcugugcu

SEQ ID NO: 78501 - RNA, 22 nt, Artificial Sequence
  Synthetic
uccauggcugcuaggcugugcu

SEQ ID NO: 78502 - RNA, 23 nt, Artificial Sequence
  Synthetic
uuccauggcugcuaggcugugcu

SEQ ID NO: 78503 - RNA, 24 nt, Artificial Sequence
  Synthetic
uuuccauggcugcuaggcugugcu

SEQ ID NO: 78504 - RNA, 18 nt, Artificial Sequence
  Synthetic
accugcacgacucuugcu

SEQ ID NO: 78505 - RNA, 19 nt, Artificial Sequence
  Synthetic
aaccugcacgacucuugcu

SEQ ID NO: 78506 - RNA, 20 nt, Artificial Sequence
  Synthetic
gaaccugcacgacucuugcu

SEQ ID NO: 78507 - RNA, 21 nt, Artificial Sequence
  Synthetic
cgaaccugcacgacucuugcu

SEQ ID NO: 78508 - RNA, 22 nt, Artificial Sequence
  Synthetic
ccgaaccugcacgacucuugcu

SEQ ID NO: 78509 - RNA, 23 nt, Artificial Sequence
  Synthetic
gccgaaccugcacgacucuugcu

SEQ ID NO: 78510 - RNA, 24 nt, Artificial Sequence
  Synthetic
ugccgaaccugcacgacucuugcu

SEQ ID NO: 78511 - RNA, 18 nt, Artificial Sequence
  Synthetic
ggcaagccauucuuugcu

SEQ ID NO: 78512 - RNA, 19 nt, Artificial Sequence
  Synthetic
aggcaagccauucuuugcu

SEQ ID NO: 78513 - RNA, 20 nt, Artificial Sequence
  Synthetic
caggcaagccauucuuugcu

SEQ ID NO: 78514 - RNA, 21 nt, Artificial Sequence
  Synthetic
ucaggcaagccauucuuugcu

SEQ ID NO: 78515 - RNA, 22 nt, Artificial Sequence
  Synthetic
cucaggcaagccauucuuugcu

SEQ ID NO: 78516 - RNA, 23 nt, Artificial Sequence
  Synthetic
acucaggcaagccauucuuugcu

SEQ ID NO: 78517 - RNA, 24 nt, Artificial Sequence
  Synthetic
cacucaggcaagccauucuuugcu

SEQ ID NO: 78518 - RNA, 18 nt, Artificial Sequence
  Synthetic
cuagccgcuuguuuugcu

SEQ ID NO: 78519 - RNA, 19 nt, Artificial Sequence
  Synthetic
ccuagccgcuuguuuugcu

SEQ ID NO: 78520 - RNA, 20 nt, Artificial Sequence
  Synthetic
uccuagccgcuuguuuugcu

SEQ ID NO: 78521 - RNA, 21 nt, Artificial Sequence
  Synthetic
cuccuagccgcuuguuuugcu

SEQ ID NO: 78522 - RNA, 22 nt, Artificial Sequence
  Synthetic
acuccuagccgcuuguuuugcu

SEQ ID NO: 78523 - RNA, 23 nt, Artificial Sequence
  Synthetic
aacuccuagccgcuuguuuugcu

SEQ ID NO: 78524 - RNA, 24 nt, Artificial Sequence
  Synthetic
gaacuccuagccgcuuguuuugcu

SEQ ID NO: 78525 - RNA, 18 nt, Artificial Sequence
  Synthetic
cgggaugccuuagaaucu

SEQ ID NO: 78526 - RNA, 19 nt, Artificial Sequence
  Synthetic
ucgggaugccuuagaaucu

SEQ ID NO: 78527 - RNA, 20 nt, Artificial Sequence
  Synthetic
aucgggaugccuuagaaucu

SEQ ID NO: 78528 - RNA, 21 nt, Artificial Sequence
  Synthetic
uaucgggaugccuuagaaucu

SEQ ID NO: 78529 - RNA, 22 nt, Artificial Sequence
  Synthetic
guaucgggaugccuuagaaucu

SEQ ID NO: 78530 - RNA, 23 nt, Artificial Sequence
  Synthetic
uguaucgggaugccuuagaaucu

SEQ ID NO: 78531 - RNA, 24 nt, Artificial Sequence
  Synthetic
cuguaucgggaugccuuagaaucu

SEQ ID NO: 78532 - RNA, 18 nt, Artificial Sequence
  Synthetic
gucugugccuucucaucu

SEQ ID NO: 78533 - RNA, 19 nt, Artificial Sequence
  Synthetic
cgucugugccuucucaucu

SEQ ID NO: 78534 - RNA, 20 nt, Artificial Sequence
  Synthetic
ccgucugugccuucucaucu

SEQ ID NO: 78535 - RNA, 21 nt, Artificial Sequence
  Synthetic
cccgucugugccuucucaucu

SEQ ID NO: 78536 - RNA, 22 nt, Artificial Sequence
  Synthetic
ccccgucugugccuucucaucu

SEQ ID NO: 78537 - RNA, 23 nt, Artificial Sequence
  Synthetic
uccccgucugugccuucucaucu

SEQ ID NO: 78538 - RNA, 24 nt, Artificial Sequence
  Synthetic
cuccccgucugugccuucucaucu

SEQ ID NO: 78539 - RNA, 18 nt, Artificial Sequence
  Synthetic
uccuucaguaagagaucu

SEQ ID NO: 78540 - RNA, 19 nt, Artificial Sequence
  Synthetic
uuccuucaguaagagaucu

SEQ ID NO: 78541 - RNA, 20 nt, Artificial Sequence
  Synthetic
uuuccuucaguaagagaucu

SEQ ID NO: 78542 - RNA, 21 nt, Artificial Sequence
  Synthetic
cuuuccuucaguaagagaucu

SEQ ID NO: 78543 - RNA, 22 nt, Artificial Sequence
  Synthetic
ucuuuccuucaguaagagaucu

SEQ ID NO: 78544 - RNA, 23 nt, Artificial Sequence
  Synthetic
uucuuuccuucaguaagagaucu

SEQ ID NO: 78545 - RNA, 24 nt, Artificial Sequence
  Synthetic
cuucuuuccuucaguaagagaucu

SEQ ID NO: 78546 - RNA, 18 nt, Artificial Sequence
  Synthetic
aacauuccaccaagcucu

SEQ ID NO: 78547 - RNA, 19 nt, Artificial Sequence
  Synthetic
caacauuccaccaagcucu

SEQ ID NO: 78548 - RNA, 20 nt, Artificial Sequence
  Synthetic
acaacauuccaccaagcucu

SEQ ID NO: 78549 - RNA, 21 nt, Artificial Sequence
  Synthetic
cacaacauuccaccaagcucu

SEQ ID NO: 78550 - RNA, 22 nt, Artificial Sequence
  Synthetic
ccacaacauuccaccaagcucu

SEQ ID NO: 78551 - RNA, 23 nt, Artificial Sequence
  Synthetic
uccacaacauuccaccaagcucu

SEQ ID NO: 78552 - RNA, 24 nt, Artificial Sequence
  Synthetic
uuccacaacauuccaccaagcucu

SEQ ID NO: 78553 - RNA, 18 nt, Artificial Sequence
  Synthetic
agauuuuuucccaucucu

SEQ ID NO: 78554 - RNA, 19 nt, Artificial Sequence
  Synthetic
uagauuuuuucccaucucu

SEQ ID NO: 78555 - RNA, 20 nt, Artificial Sequence
  Synthetic
cuagauuuuuucccaucucu

SEQ ID NO: 78556 - RNA, 21 nt, Artificial Sequence
  Synthetic
gcuagauuuuuucccaucucu

SEQ ID NO: 78557 - RNA, 22 nt, Artificial Sequence
  Synthetic
ugcuagauuuuuucccaucucu

SEQ ID NO: 78558 - RNA, 23 nt, Artificial Sequence
  Synthetic
cugcuagauuuuuucccaucucu

SEQ ID NO: 78559 - RNA, 24 nt, Artificial Sequence
  Synthetic
ccugcuagauuuuuucccaucucu

SEQ ID NO: 78560 - RNA, 18 nt, Artificial Sequence
  Synthetic
auaauucugucguucucu

SEQ ID NO: 78561 - RNA, 19 nt, Artificial Sequence
  Synthetic
gauaauucugucguucucu

SEQ ID NO: 78562 - RNA, 20 nt, Artificial Sequence
  Synthetic
  misc_feature (1)..(1): n is a, c, g, or u
ngauaauucugucguucucu

SEQ ID NO: 78563 - RNA, 21 nt, Artificial Sequence
  Synthetic
  misc_feature (2)..(2): n is a, c, g, or u
cngauaauucugucguucucu

SEQ ID NO: 78564 - RNA, 22 nt, Artificial Sequence
  Synthetic
  misc_feature (3)..(3): n is a, c, g, or u
acngauaauucugucguucucu

SEQ ID NO: 78565 - RNA, 23 nt, Artificial Sequence
  Synthetic
  misc_feature (4)..(4): n is a, c, g, or u
gacngauaauucugucguucucu

SEQ ID NO: 78566 - RNA, 24 nt, Artificial Sequence
  Synthetic
  misc_feature (5)..(5): n is a, c, g, or u
ggacngauaauucugucguucucu

SEQ ID NO: 78567 - RNA, 18 nt, Artificial Sequence
  Synthetic
  misc_feature (5)..(5): n is a, c, g, or u
ucaangaauugugggucu

SEQ ID NO: 78568 - RNA, 19 nt, Artificial Sequence
  Synthetic
  misc_feature (6)..(6): n is a, c, g, or u
gucaangaauugugggucu

SEQ ID NO: 78569 - RNA, 20 nt, Artificial Sequence
  Synthetic
  misc_feature (7)..(7): n is a, c, g, or u
ugucaangaauugugggucu

SEQ ID NO: 78570 - RNA, 21 nt, Artificial Sequence
  Synthetic
  misc_feature (8)..(8): n is a, c, g, or u
augucaangaauugugggucu

SEQ ID NO: 78571 - RNA, 22 nt, Artificial Sequence
  Synthetic
  misc_feature (9)..(9): n is a, c, g, or u
uaugucaangaauugugggucu

SEQ ID NO: 78572 - RNA, 23 nt, Artificial Sequence
  Synthetic
  misc_feature (10)..(10): n is a, c, g, or u
guaugucaangaauugugggucu

SEQ ID NO: 78573 - RNA, 24 nt, Artificial Sequence
  Synthetic
  misc_feature (11)..(11): n is a, c, g, or u
aguaugucaangaauugugggucu

SEQ ID NO: 78574 - RNA, 18 nt, Artificial Sequence
  Synthetic
  misc_feature (1)..(1): n is a, c, g, or u
nuagaguauuuggugucu

SEQ ID NO: 78575 - RNA, 19 nt, Artificial Sequence
  Synthetic
  misc_feature (2)..(2): n is a, c, g, or u
cnuagaguauuuggugucu

SEQ ID NO: 78576 - RNA, 20 nt, Artificial Sequence
  Synthetic
  misc_feature (3)..(3): n is a, c, g, or u
ucnuagaguauuuggugucu

SEQ ID NO: 78577 - RNA, 21 nt, Artificial Sequence
  Synthetic
  misc_feature (4)..(4): n is a, c, g, or u
gucnuagaguauuuggugucu

SEQ ID NO: 78578 - RNA, 22 nt, Artificial Sequence
  Synthetic
  misc_feature (5)..(5): n is a, c, g, or u
cgucnuagaguauuuggugucu

SEQ ID NO: 78579 - RNA, 23 nt, Artificial Sequence
  Synthetic
  misc_feature (6)..(6): n is a, c, g, or u
ccgucnuagaguauuuggugucu

SEQ ID NO: 78580 - RNA, 24 nt, Artificial Sequence
  Synthetic
  misc_feature (7)..(7): n is a, c, g, or u
accgucnuagaguauuuggugucu

SEQ ID NO: 78581 - RNA, 18 nt, Artificial Sequence
  Synthetic
  misc_feature (2)..(2): n is a, c, g, or u
unugggucaccuuauucu

SEQ ID NO: 78582 - RNA, 19 nt, Artificial Sequence
  Synthetic
  misc_feature (3)..(3): n is a, c, g, or u
uunugggucaccuuauucu

SEQ ID NO: 78583 - RNA, 20 nt, Artificial Sequence
  Synthetic
  misc_feature (4)..(4): n is a, c, g, or u
uuunugggucaccuuauucu

SEQ ID NO: 78584 - RNA, 21 nt, Artificial Sequence
  Synthetic
  misc_feature (5)..(5): n is a, c, g, or u
uuuunugggucaccuuauucu

SEQ ID NO: 78585 - RNA, 22 nt, Artificial Sequence
  Synthetic
  misc_feature (6)..(6): n is a, c, g, or u
auuuunugggucaccuuauucu

SEQ ID NO: 78586 - RNA, 23 nt, Artificial Sequence
  Synthetic
  misc_feature (7)..(7): n is a, c, g, or u
cauuuunugggucaccuuauucu

SEQ ID NO: 78587 - RNA, 24 nt, Artificial Sequence
  Synthetic
  misc_feature (8)..(8): n is a, c, g, or u
ucauuuunugggucaccuuauucu

SEQ ID NO: 78588 - RNA, 18 nt, Artificial Sequence
  Synthetic
ucaucucgucaaucuucu

SEQ ID NO: 78589 - RNA, 19 nt, Artificial Sequence
  Synthetic
cucaucucgucaaucuucu

SEQ ID NO: 78590 - RNA, 20 nt, Artificial Sequence
  Synthetic
acucaucucgucaaucuucu

SEQ ID NO: 78591 - RNA, 21 nt, Artificial Sequence
  Synthetic
cacucaucucgucaaucuucu

SEQ ID NO: 78592 - RNA, 22 nt, Artificial Sequence
  Synthetic
ucacucaucucgucaaucuucu

SEQ ID NO: 78593 - RNA, 23 nt, Artificial Sequence
  Synthetic
cucacucaucucgucaaucuucu

SEQ ID NO: 78594 - RNA, 24 nt, Artificial Sequence
  Synthetic
ccucacucaucucgucaaucuucu

SEQ ID NO: 78595 - RNA, 18 nt, Artificial Sequence
  Synthetic
caucuucuuguugguucu

SEQ ID NO: 78596 - RNA, 19 nt, Artificial Sequence
  Synthetic
ucaucuucuuguugguucu

SEQ ID NO: 78597 - RNA, 20 nt, Artificial Sequence
  Synthetic
cucaucuucuuguugguucu

SEQ ID NO: 78598 - RNA, 21 nt, Artificial Sequence
  Synthetic
ccucaucuucuuguugguucu

SEQ ID NO: 78599 - RNA, 22 nt, Artificial Sequence
  Synthetic
gccucaucuucuuguugguucu

SEQ ID NO: 78600 - RNA, 23 nt, Artificial Sequence
  Synthetic
ugccucaucuucuuguugguucu

SEQ ID NO: 78601 - RNA, 24 nt, Artificial Sequence
  Synthetic
augccucaucuucuuguugguucu

SEQ ID NO: 78602 - RNA, 18 nt, Artificial Sequence
  Synthetic
gggccucagcccguuucu

SEQ ID NO: 78603 - RNA, 19 nt, Artificial Sequence
  Synthetic
ugggccucagcccguuucu

SEQ ID NO: 78604 - RNA, 20 nt, Artificial Sequence
  Synthetic
gugggccucagcccguuucu

SEQ ID NO: 78605 - RNA, 21 nt, Artificial Sequence
  Synthetic
agugggccucagcccguuucu

SEQ ID NO: 78606 - RNA, 22 nt, Artificial Sequence
  Synthetic
gagugggccucagcccguuucu

SEQ ID NO: 78607 - RNA, 23 nt, Artificial Sequence
  Synthetic
ggagugggccucagcccguuucu

SEQ ID NO: 78608 - RNA, 24 nt, Artificial Sequence
  Synthetic
gggagugggccucagcccguuucu

SEQ ID NO: 78609 - RNA, 18 nt, Artificial Sequence
  Synthetic
gacuucucucaauuuucu

SEQ ID NO: 78610 - RNA, 19 nt, Artificial Sequence
  Synthetic
ggacuucucucaauuuucu

SEQ ID NO: 78611 - RNA, 20 nt, Artificial Sequence
  Synthetic
uggacuucucucaauuuucu

SEQ ID NO: 78612 - RNA, 21 nt, Artificial Sequence
  Synthetic
guggacuucucucaauuuucu

SEQ ID NO: 78613 - RNA, 22 nt, Artificial Sequence
  Synthetic
gguggacuucucucaauuuucu

SEQ ID NO: 78614 - RNA, 23 nt, Artificial Sequence
  Synthetic
ugguggacuucucucaauuuucu

SEQ ID NO: 78615 - RNA, 24 nt, Artificial Sequence
  Synthetic
gugguggacuucucucaauuuucu

SEQ ID NO: 78616 - RNA, 18 nt, Artificial Sequence
  Synthetic
cuaauaugggccuaaagu

SEQ ID NO: 78617 - RNA, 19 nt, Artificial Sequence
  Synthetic
acuaauaugggccuaaagu

SEQ ID NO: 78618 - RNA, 20 nt, Artificial Sequence
  Synthetic
uacuaauaugggccuaaagu

SEQ ID NO: 78619 - RNA, 21 nt, Artificial Sequence
  Synthetic
auacuaauaugggccuaaagu

SEQ ID NO: 78620 - RNA, 22 nt, Artificial Sequence
  Synthetic
aauacuaauaugggccuaaagu

SEQ ID NO: 78621 - RNA, 23 nt, Artificial Sequence
  Synthetic
caauacuaauaugggccuaaagu

SEQ ID NO: 78622 - RNA, 24 nt, Artificial Sequence
  Synthetic
ucaauacuaauaugggccuaaagu

SEQ ID NO: 78623 - RNA, 18 nt, Artificial Sequence
  Synthetic
gguuauguaauuggaagu

SEQ ID NO: 78624 - RNA, 19 nt, Artificial Sequence
  Synthetic
ggguuauguaauuggaagu

SEQ ID NO: 78625 - RNA, 20 nt, Artificial Sequence
  Synthetic
uggguuauguaauuggaagu

SEQ ID NO: 78626 - RNA, 21 nt, Artificial Sequence
  Synthetic
auggguuauguaauuggaagu

SEQ ID NO: 78627 - RNA, 22 nt, Artificial Sequence
  Synthetic
cauggguuauguaauuggaagu

SEQ ID NO: 78628 - RNA, 23 nt, Artificial Sequence
  Synthetic
ucauggguuauguaauuggaagu

SEQ ID NO: 78629 - RNA, 24 nt, Artificial Sequence
  Synthetic
uucauggguuauguaauuggaagu

SEQ ID NO: 78630 - RNA, 18 nt, Artificial Sequence
  Synthetic
ggaucaucaaccaccagu

SEQ ID NO: 78631 - RNA, 19 nt, Artificial Sequence
  Synthetic
aggaucaucaaccaccagu

SEQ ID NO: 78632 - RNA, 20 nt, Artificial Sequence
  Synthetic
caggaucaucaaccaccagu

SEQ ID NO: 78633 - RNA, 21 nt, Artificial Sequence
  Synthetic
ccaggaucaucaaccaccagu

SEQ ID NO: 78634 - RNA, 22 nt, Artificial Sequence
  Synthetic
uccaggaucaucaaccaccagu

SEQ ID NO: 78635 - RNA, 23 nt, Artificial Sequence
  Synthetic
uuccaggaucaucaaccaccagu

SEQ ID NO: 78636 - RNA, 24 nt, Artificial Sequence
  Synthetic
auuccaggaucaucaaccaccagu

SEQ ID NO: 78637 - RNA, 18 nt, Artificial Sequence
  Synthetic
ccugcugguggcuccagu

SEQ ID NO: 78638 - RNA, 19 nt, Artificial Sequence
  Synthetic
uccugcugguggcuccagu

SEQ ID NO: 78639 - RNA, 20 nt, Artificial Sequence
  Synthetic
uuccugcugguggcuccagu

SEQ ID NO: 78640 - RNA, 21 nt, Artificial Sequence
  Synthetic
uuuccugcugguggcuccagu

SEQ ID NO: 78641 - RNA, 22 nt, Artificial Sequence
  Synthetic
uuuuccugcugguggcuccagu

SEQ ID NO: 78642 - RNA, 23 nt, Artificial Sequence
  Synthetic
auuuuccugcugguggcuccagu

SEQ ID NO: 78643 - RNA, 24 nt, Artificial Sequence
  Synthetic
uauuuuccugcugguggcuccagu

SEQ ID NO: 78644 - RNA, 18 nt, Artificial Sequence
  Synthetic
ccuccaccaaucggcagu

SEQ ID NO: 78645 - RNA, 19 nt, Artificial Sequence
  Synthetic
gccuccaccaaucggcagu

SEQ ID NO: 78646 - RNA, 20 nt, Artificial Sequence
  Synthetic
ugccuccaccaaucggcagu

SEQ ID NO: 78647 - RNA, 21 nt, Artificial Sequence
  Synthetic
cugccuccaccaaucggcagu

SEQ ID NO: 78648 - RNA, 22 nt, Artificial Sequence
  Synthetic
ccugccuccaccaaucggcagu

SEQ ID NO: 78649 - RNA, 23 nt, Artificial Sequence
  Synthetic
uccugccuccaccaaucggcagu

SEQ ID NO: 78650 - RNA, 24 nt, Artificial Sequence
  Synthetic
cuccugccuccaccaaucggcagu

SEQ ID NO: 78651 - RNA, 18 nt, Artificial Sequence
  Synthetic
ugacuucuuuccuucagu

SEQ ID NO: 78652 - RNA, 19 nt, Artificial Sequence
  Synthetic
cugacuucuuuccuucagu

SEQ ID NO: 78653 - RNA, 20 nt, Artificial Sequence
  Synthetic
ucugacuucuuuccuucagu

SEQ ID NO: 78654 - RNA, 21 nt, Artificial Sequence
  Synthetic
uucugacuucuuuccuucagu

SEQ ID NO: 78655 - RNA, 22 nt, Artificial Sequence
  Synthetic
cuucugacuucuuuccuucagu

SEQ ID NO: 78656 - RNA, 23 nt, Artificial Sequence
  Synthetic
ccuucugacuucuuuccuucagu

SEQ ID NO: 78657 - RNA, 24 nt, Artificial Sequence
  Synthetic
gccuucugacuucuuuccuucagu

SEQ ID NO: 78658 - RNA, 18 nt, Artificial Sequence
  Synthetic
ucugcaggaucccagagu

SEQ ID NO: 78659 - RNA, 19 nt, Artificial Sequence
  Synthetic
cucugcaggaucccagagu

SEQ ID NO: 78660 - RNA, 20 nt, Artificial Sequence
  Synthetic
gcucugcaggaucccagagu

SEQ ID NO: 78661 - RNA, 21 nt, Artificial Sequence
  Synthetic
agcucugcaggaucccagagu

SEQ ID NO: 78662 - RNA, 22 nt, Artificial Sequence
  Synthetic
aagcucugcaggaucccagagu

SEQ ID NO: 78663 - RNA, 23 nt, Artificial Sequence
  Synthetic
caagcucugcaggaucccagagu

SEQ ID NO: 78664 - RNA, 24 nt, Artificial Sequence
  Synthetic
ccaagcucugcaggaucccagagu

SEQ ID NO: 78665 - RNA, 18 nt, Artificial Sequence
  Synthetic
cucacaauaccgcagagu

SEQ ID NO: 78666 - RNA, 19 nt, Artificial Sequence
  Synthetic
ccucacaauaccgcagagu

SEQ ID NO: 78667 - RNA, 20 nt, Artificial Sequence
  Synthetic
uccucacaauaccgcagagu

SEQ ID NO: 78668 - RNA, 21 nt, Artificial Sequence
  Synthetic
auccucacaauaccgcagagu

SEQ ID NO: 78669 - RNA, 22 nt, Artificial Sequence
  Synthetic
aauccucacaauaccgcagagu

SEQ ID NO: 78670 - RNA, 23 nt, Artificial Sequence
  Synthetic
aaauccucacaauaccgcagagu

SEQ ID NO: 78671 - RNA, 24 nt, Artificial Sequence
  Synthetic
aaaauccucacaauaccgcagagu

SEQ ID NO: 78672 - RNA, 18 nt, Artificial Sequence
  Synthetic
uuaaagacugggaggagu

SEQ ID NO: 78673 - RNA, 19 nt, Artificial Sequence
  Synthetic
uuuaaagacugggaggagu

SEQ ID NO: 78674 - RNA, 20 nt, Artificial Sequence
  Synthetic
guuuaaagacugggaggagu

SEQ ID NO: 78675 - RNA, 21 nt, Artificial Sequence
  Synthetic
uguuuaaagacugggaggagu

SEQ ID NO: 78676 - RNA, 22 nt, Artificial Sequence
  Synthetic
uuguuuaaagacugggaggagu

SEQ ID NO: 78677 - RNA, 23 nt, Artificial Sequence
  Synthetic
uuuguuuaaagacugggaggagu

SEQ ID NO: 78678 - RNA, 24 nt, Artificial Sequence
  Synthetic
guuuguuuaaagacugggaggagu

SEQ ID NO: 78679 - RNA, 18 nt, Artificial Sequence
  Synthetic
agccaacaagguaggagu

SEQ ID NO: 78680 - RNA, 19 nt, Artificial Sequence
  Synthetic
aagccaacaagguaggagu

SEQ ID NO: 78681 - RNA, 20 nt, Artificial Sequence
  Synthetic
gaagccaacaagguaggagu

SEQ ID NO: 78682 - RNA, 21 nt, Artificial Sequence
  Synthetic
  misc_feature (1)..(1): n is a, c, g, or u
ngaagccaacaagguaggagu

SEQ ID NO: 78683 - RNA, 22 nt, Artificial Sequence
  Synthetic
  misc_feature (2)..(2): n is a, c, g, or u
cngaagccaacaagguaggagu

SEQ ID NO: 78684 - RNA, 23 nt, Artificial Sequence
  Synthetic
  misc_feature (3)..(3): n is a, c, g, or u
acngaagccaacaagguaggagu

SEQ ID NO: 78685 - RNA, 24 nt, Artificial Sequence
  Synthetic
  misc_feature (4)..(4): n is a, c, g, or u
gacngaagccaacaagguaggagu

SEQ ID NO: 78686 - RNA, 18 nt, Artificial Sequence
  Synthetic
uuuuggaagagaaaccgu

SEQ ID NO: 78687 - RNA, 19 nt, Artificial Sequence
  Synthetic
cuuuuggaagagaaaccgu

SEQ ID NO: 78688 - RNA, 20 nt, Artificial Sequence
  Synthetic
acuuuuggaagagaaaccgu

SEQ ID NO: 78689 - RNA, 21 nt, Artificial Sequence
  Synthetic
cacuuuuggaagagaaaccgu

SEQ ID NO: 78690 - RNA, 22 nt, Artificial Sequence
  Synthetic
ucacuuuuggaagagaaaccgu

SEQ ID NO: 78691 - RNA, 23 nt, Artificial Sequence
  Synthetic
cucacuuuuggaagagaaaccgu

SEQ ID NO: 78692 - RNA, 24 nt, Artificial Sequence
  Synthetic
ucucacuuuuggaagagaaaccgu

SEQ ID NO: 78693 - RNA, 18 nt, Artificial Sequence
  Synthetic
agaucucaaucgccgcgu

SEQ ID NO: 78694 - RNA, 19 nt, Artificial Sequence
  Synthetic
aagaucucaaucgccgcgu

SEQ ID NO: 78695 - RNA, 20 nt, Artificial Sequence
  Synthetic
gaagaucucaaucgccgcgu

SEQ ID NO: 78696 - RNA, 18 nt, Artificial Sequence
  Synthetic
cgcagagucuagacucgu

SEQ ID NO: 78697 - RNA, 19 nt, Artificial Sequence
  Synthetic
ccgcagagucuagacucgu

SEQ ID NO: 78698 - RNA, 20 nt, Artificial Sequence
  Synthetic
accgcagagucuagacucgu

SEQ ID NO: 78699 - RNA, 21 nt, Artificial Sequence
  Synthetic
uaccgcagagucuagacucgu

SEQ ID NO: 78700 - RNA, 22 nt, Artificial Sequence
  Synthetic
auaccgcagagucuagacucgu

SEQ ID NO: 78701 - RNA, 23 nt, Artificial Sequence
  Synthetic
aauaccgcagagucuagacucgu

SEQ ID NO: 78702 - RNA, 24 nt, Artificial Sequence
  Synthetic
caauaccgcagagucuagacucgu

SEQ ID NO: 78703 - RNA, 18 nt, Artificial Sequence
  Synthetic
  misc_feature (3)..(3): n is a, c, g, or u
uunccccuagagaaaggu

SEQ ID NO: 78704 - RNA, 19 nt, Artificial Sequence
  Synthetic
  misc_feature (4)..(4): n is a, c, g, or u
uuunccccuagagaaaggu

SEQ ID NO: 78705 - RNA, 20 nt, Artificial Sequence
  Synthetic
  misc_feature (5)..(5): n is a, c, g, or u
auuunccccuagagaaaggu

SEQ ID NO: 78706 - RNA, 21 nt, Artificial Sequence
  Synthetic
  misc_feature (6)..(6): n is a, c, g, or u
uauuunccccuagagaaaggu

SEQ ID NO: 78707 - RNA, 22 nt, Artificial Sequence
  Synthetic
  misc_feature (7)..(7): n is a, c, g, or u
auauuunccccuagagaaaggu

SEQ ID NO: 78708 - RNA, 23 nt, Artificial Sequence
  Synthetic
  misc_feature (8)..(8): n is a, c, g, or u
aauauuunccccuagagaaaggu

SEQ ID NO: 78709 - RNA, 24 nt, Artificial Sequence
  Synthetic
  misc_feature (9)..(9): n is a, c, g, or u
aaauauuunccccuagagaaaggu

SEQ ID NO: 78710 - RNA, 18 nt, Artificial Sequence
  Synthetic
uccuuggacucacaaggu

SEQ ID NO: 78711 - RNA, 19 nt, Artificial Sequence
  Synthetic
uuccuuggacucacaaggu

SEQ ID NO: 78712 - RNA, 20 nt, Artificial Sequence
  Synthetic
auuccuuggacucacaaggu

SEQ ID NO: 78713 - RNA, 21 nt, Artificial Sequence
  Synthetic
uauuccuuggacucacaaggu

SEQ ID NO: 78714 - RNA, 22 nt, Artificial Sequence
  Synthetic
guauuccuuggacucacaaggu

SEQ ID NO: 78715 - RNA, 23 nt, Artificial Sequence
  Synthetic
aguauuccuuggacucacaaggu

SEQ ID NO: 78716 - RNA, 24 nt, Artificial Sequence
  Synthetic
uaguauuccuuggacucacaaggu

SEQ ID NO: 78717 - RNA, 18 nt, Artificial Sequence
  Synthetic
guuuugcucgcagcaggu

SEQ ID NO: 78718 - RNA, 19 nt, Artificial Sequence
  Synthetic
uguuuugcucgcagcaggu

SEQ ID NO: 78719 - RNA, 20 nt, Artificial Sequence
  Synthetic
uuguuuugcucgcagcaggu

SEQ ID NO: 78720 - RNA, 21 nt, Artificial Sequence
  Synthetic
cuuguuuugcucgcagcaggu

SEQ ID NO: 78721 - RNA, 22 nt, Artificial Sequence
  Synthetic
gcuuguuuugcucgcagcaggu

SEQ ID NO: 78722 - RNA, 23 nt, Artificial Sequence
  Synthetic
cgcuuguuuugcucgcagcaggu

SEQ ID NO: 78723 - RNA, 24 nt, Artificial Sequence
  Synthetic
ccgcuuguuuugcucgcagcaggu

SEQ ID NO: 78724 - RNA, 18 nt, Artificial Sequence
  Synthetic
uuauauggaugauguggu

SEQ ID NO: 78725 - RNA, 19 nt, Artificial Sequence
  Synthetic
guuauauggaugauguggu

SEQ ID NO: 78726 - RNA, 20 nt, Artificial Sequence
  Synthetic
aguuauauggaugauguggu

SEQ ID NO: 78727 - RNA, 21 nt, Artificial Sequence
  Synthetic
caguuauauggaugauguggu

SEQ ID NO: 78728 - RNA, 22 nt, Artificial Sequence
  Synthetic
ucaguuauauggaugauguggu

SEQ ID NO: 78729 - RNA, 23 nt, Artificial Sequence
  Synthetic
uucaguuauauggaugauguggu

SEQ ID NO: 78730 - RNA, 24 nt, Artificial Sequence
  Synthetic
uuucaguuauauggaugauguggu

SEQ ID NO: 78731 - RNA, 18 nt, Artificial Sequence
  Synthetic
  misc_feature (1)..(1): n is a, c, g, or u
nugaaaaucaaagacugu

SEQ ID NO: 78732 - RNA, 19 nt, Artificial Sequence
  Synthetic
  misc_feature (2)..(2): n is a, c, g, or u
anugaaaaucaaagacugu

SEQ ID NO: 78733 - RNA, 20 nt, Artificial Sequence
  Synthetic
  misc_feature (3)..(3): n is a, c, g, or u
ganugaaaaucaaagacugu

SEQ ID NO: 78734 - RNA, 21 nt, Artificial Sequence
  Synthetic
  misc_feature (4)..(4): n is a, c, g, or u
aganugaaaaucaaagacugu

SEQ ID NO: 78735 - RNA, 22 nt, Artificial Sequence
  Synthetic
  misc_feature (5)..(5): n is a, c, g, or u
caganugaaaaucaaagacugu

SEQ ID NO: 78736 - RNA, 23 nt, Artificial Sequence
  Synthetic
  misc_feature (6)..(6): n is a, c, g, or u
ucaganugaaaaucaaagacugu

SEQ ID NO: 78737 - RNA, 24 nt, Artificial Sequence
  Synthetic
  misc_feature (7)..(7): n is a, c, g, or u
aucaganugaaaaucaaagacugu

SEQ ID NO: 78738 - RNA, 18 nt, Artificial Sequence
  Synthetic
uuguucauguccuacugu

SEQ ID NO: 78739 - RNA, 19 nt, Artificial Sequence
  Synthetic
cuuguucauguccuacugu

SEQ ID NO: 78740 - RNA, 20 nt, Artificial Sequence
  Synthetic
ucuuguucauguccuacugu

SEQ ID NO: 78741 - RNA, 21 nt, Artificial Sequence
  Synthetic
cucuuguucauguccuacugu

SEQ ID NO: 78742 - RNA, 22 nt, Artificial Sequence
  Synthetic
ucucuuguucauguccuacugu

SEQ ID NO: 78743 - RNA, 23 nt, Artificial Sequence
  Synthetic
aucucuuguucauguccuacugu

SEQ ID NO: 78744 - RNA, 24 nt, Artificial Sequence
  Synthetic
caucucuuguucauguccuacugu

SEQ ID NO: 78745 - RNA, 18 nt, Artificial Sequence
  Synthetic
cggaacagugaacccugu

SEQ ID NO: 78746 - RNA, 19 nt, Artificial Sequence
  Synthetic
ccggaacagugaacccugu

SEQ ID NO: 78747 - RNA, 20 nt, Artificial Sequence
  Synthetic
uccggaacagugaacccugu

SEQ ID NO: 78748 - RNA, 21 nt, Artificial Sequence
  Synthetic
uuccggaacagugaacccugu

SEQ ID NO: 78749 - RNA, 22 nt, Artificial Sequence
  Synthetic
guuccggaacagugaacccugu

SEQ ID NO: 78750 - RNA, 23 nt, Artificial Sequence
  Synthetic
aguuccggaacagugaacccugu

SEQ ID NO: 78751 - RNA, 24 nt, Artificial Sequence
  Synthetic
caguuccggaacagugaacccugu

SEQ ID NO: 78752 - RNA, 18 nt, Artificial Sequence
  Synthetic
uuucccucauguugcugu

SEQ ID NO: 78753 - RNA, 19 nt, Artificial Sequence
  Synthetic
guuucccucauguugcugu

SEQ ID NO: 78754 - RNA, 20 nt, Artificial Sequence
  Synthetic
uguuucccucauguugcugu

SEQ ID NO: 78755 - RNA, 21 nt, Artificial Sequence
  Synthetic
auguuucccucauguugcugu

SEQ ID NO: 78756 - RNA, 22 nt, Artificial Sequence
  Synthetic
uauguuucccucauguugcugu

SEQ ID NO: 78757 - RNA, 23 nt, Artificial Sequence
  Synthetic
cuauguuucccucauguugcugu

SEQ ID NO: 78758 - RNA, 24 nt, Artificial Sequence
  Synthetic
ucuauguuucccucauguugcugu

SEQ ID NO: 78759 - RNA, 18 nt, Artificial Sequence
  Synthetic
auaccgccucagcucugu

SEQ ID NO: 78760 - RNA, 19 nt, Artificial Sequence
  Synthetic
gauaccgccucagcucugu

SEQ ID NO: 78761 - RNA, 20 nt, Artificial Sequence
  Synthetic
agauaccgccucagcucugu

SEQ ID NO: 78762 - RNA, 21 nt, Artificial Sequence
  Synthetic
uagauaccgccucagcucugu

SEQ ID NO: 78763 - RNA, 22 nt, Artificial Sequence
  Synthetic
cuagauaccgccucagcucugu

SEQ ID NO: 78764 - RNA, 23 nt, Artificial Sequence
  Synthetic
ucuagauaccgccucagcucugu

SEQ ID NO: 78765 - RNA, 24 nt, Artificial Sequence
  Synthetic
uucuagauaccgccucagcucugu

SEQ ID NO: 78766 - RNA, 18 nt, Artificial Sequence
  Synthetic
  misc_feature (11)..(11): n is a, c, g, or u
ggcaacggccnggucugu

SEQ ID NO: 78767 - RNA, 19 nt, Artificial Sequence
  Synthetic
  misc_feature (12)..(12): n is a, c, g, or u
cggcaacggccnggucugu

SEQ ID NO: 78768 - RNA, 20 nt, Artificial Sequence
  Synthetic
  misc_feature (13)..(13): n is a, c, g, or u
ccggcaacggccnggucugu

SEQ ID NO: 78769 - RNA, 21 nt, Artificial Sequence
  Synthetic
  misc_feature (14)..(14): n is a, c, g, or u
cccggcaacggccnggucugu

SEQ ID NO: 78770 - RNA, 22 nt, Artificial Sequence
  Synthetic
  misc_feature (15)..(15): n is a, c, g, or u
gcccggcaacggccnggucugu

SEQ ID NO: 78771 - RNA, 23 nt, Artificial Sequence
  Synthetic
  misc_feature (16)..(16): n is a, c, g, or u
ugcccggcaacggccnggucugu

SEQ ID NO: 78772 - RNA, 24 nt, Artificial Sequence
  Synthetic
  misc_feature (17)..(17): n is a, c, g, or u
uugcccggcaacggccnggucugu

SEQ ID NO: 78773 - RNA, 18 nt, Artificial Sequence
  Synthetic
cuuacaaggccuuucugu

SEQ ID NO: 78774 - RNA, 19 nt, Artificial Sequence
  Synthetic
acuuacaaggccuuucugu

SEQ ID NO: 78775 - RNA, 20 nt, Artificial Sequence
  Synthetic
aacuuacaaggccuuucugu

SEQ ID NO: 78776 - RNA, 21 nt, Artificial Sequence
  Synthetic
caacuuacaaggccuuucugu

SEQ ID NO: 78777 - RNA, 22 nt, Artificial Sequence
  Synthetic
ccaacuuacaaggccuuucugu

SEQ ID NO: 78778 - RNA, 23 nt, Artificial Sequence
  Synthetic
gccaacuuacaaggccuuucugu

SEQ ID NO: 78779 - RNA, 24 nt, Artificial Sequence
  Synthetic
cgccaacuuacaaggccuuucugu

SEQ ID NO: 78780 - RNA, 18 nt, Artificial Sequence
  Synthetic
uaggaccccugcucgugu

SEQ ID NO: 78781 - RNA, 19 nt, Artificial Sequence
  Synthetic
cuaggaccccugcucgugu

SEQ ID NO: 78782 - RNA, 20 nt, Artificial Sequence
  Synthetic
ccuaggaccccugcucgugu

SEQ ID NO: 78783 - RNA, 21 nt, Artificial Sequence
  Synthetic
uccuaggaccccugcucgugu

SEQ ID NO: 78784 - RNA, 22 nt, Artificial Sequence
  Synthetic
uuccuaggaccccugcucgugu

SEQ ID NO: 78785 - RNA, 23 nt, Artificial Sequence
  Synthetic
auuccuaggaccccugcucgugu

SEQ ID NO: 78786 - RNA, 24 nt, Artificial Sequence
  Synthetic
gauuccuaggaccccugcucgugu

SEQ ID NO: 78787 - RNA, 18 nt, Artificial Sequence
  Synthetic
gggggagcucccgugugu

SEQ ID NO: 78788 - RNA, 19 nt, Artificial Sequence
  Synthetic
agggggagcucccgugugu

SEQ ID NO: 78789 - RNA, 20 nt, Artificial Sequence
  Synthetic
uagggggagcucccgugugu

SEQ ID NO: 78790 - RNA, 21 nt, Artificial Sequence
  Synthetic
cuagggggagcucccgugugu

SEQ ID NO: 78791 - RNA, 22 nt, Artificial Sequence
  Synthetic
ucuagggggagcucccgugugu

SEQ ID NO: 78792 - RNA, 23 nt, Artificial Sequence
  Synthetic
uucuagggggagcucccgugugu

SEQ ID NO: 78793 - RNA, 24 nt, Artificial Sequence
  Synthetic
uuucuagggggagcucccgugugu

SEQ ID NO: 78794 - RNA, 18 nt, Artificial Sequence
  Synthetic
ucuuguccuccaauuugu

SEQ ID NO: 78795 - RNA, 19 nt, Artificial Sequence
  Synthetic
cucuuguccuccaauuugu

SEQ ID NO: 78796 - RNA, 20 nt, Artificial Sequence
  Synthetic
ccucuuguccuccaauuugu

SEQ ID NO: 78797 - RNA, 21 nt, Artificial Sequence
  Synthetic
accucuuguccuccaauuugu

SEQ ID NO: 78798 - RNA, 22 nt, Artificial Sequence
  Synthetic
aaccucuuguccuccaauuugu

SEQ ID NO: 78799 - RNA, 23 nt, Artificial Sequence
  Synthetic
caaccucuuguccuccaauuugu

SEQ ID NO: 78800 - RNA, 24 nt, Artificial Sequence
  Synthetic
ccaaccucuuguccuccaauuugu

SEQ ID NO: 78801 - RNA, 18 nt, Artificial Sequence
  Synthetic
uagauuaaaggucuuugu

SEQ ID NO: 78802 - RNA, 19 nt, Artificial Sequence
  Synthetic
  misc_feature (1)..(1): n is a, c, g, or u
nuagauuaaaggucuuugu

SEQ ID NO: 78803 - RNA, 20 nt, Artificial Sequence
  Synthetic
  misc_feature (2)..(2): n is a, c, g, or u
anuagauuaaaggucuuugu

SEQ ID NO: 78804 - RNA, 21 nt, Artificial Sequence
  Synthetic
  misc_feature (3)..(3): n is a, c, g, or u
ganuagauuaaaggucuuugu

SEQ ID NO: 78805 - RNA, 22 nt, Artificial Sequence
  Synthetic
  misc_feature (4)..(4): n is a, c, g, or u
aganuagauuaaaggucuuugu

SEQ ID NO: 78806 - RNA, 23 nt, Artificial Sequence
  Synthetic
  misc_feature (5)..(5): n is a, c, g, or u
gaganuagauuaaaggucuuugu

SEQ ID NO: 78807 - RNA, 24 nt, Artificial Sequence
  Synthetic
  misc_feature (6)..(6): n is a, c, g, or u
ggaganuagauuaaaggucuuugu

SEQ ID NO: 78808 - RNA, 18 nt, Artificial Sequence
  Synthetic
acuucaaagacuguuugu

SEQ ID NO: 78809 - RNA, 19 nt, Artificial Sequence
  Synthetic
uacuucaaagacuguuugu

SEQ ID NO: 78810 - RNA, 20 nt, Artificial Sequence
  Synthetic
auacuucaaagacuguuugu

SEQ ID NO: 78811 - RNA, 21 nt, Artificial Sequence
  Synthetic
cauacuucaaagacuguuugu

SEQ ID NO: 78812 - RNA, 22 nt, Artificial Sequence
  Synthetic
gcauacuucaaagacuguuugu

SEQ ID NO: 78813 - RNA, 23 nt, Artificial Sequence
  Synthetic
ggcauacuucaaagacuguuugu

SEQ ID NO: 78814 - RNA, 24 nt, Artificial Sequence
  Synthetic
aggcauacuucaaagacuguuugu

SEQ ID NO: 78815 - RNA, 18 nt, Artificial Sequence
  Synthetic
  misc_feature (17)..(17): n is a, c, g, or u
auccugcggacgacccnu

SEQ ID NO: 78816 - RNA, 19 nt, Artificial Sequence
  Synthetic
  misc_feature (18)..(18): n is a, c, g, or u
aauccugcggacgacccnu

SEQ ID NO: 78817 - RNA, 20 nt, Artificial Sequence
  Synthetic
  misc_feature (19)..(19): n is a, c, g, or u
gaauccugcggacgacccnu

SEQ ID NO: 78818 - RNA, 21 nt, Artificial Sequence
  Synthetic
  misc_feature (20)..(20): n is a, c, g, or u
ugaauccugcggacgacccnu

SEQ ID NO: 78819 - RNA, 22 nt, Artificial Sequence
  Synthetic
  misc_feature (21)..(21): n is a, c, g, or u
cugaauccugcggacgacccnu

SEQ ID NO: 78820 - RNA, 23 nt, Artificial Sequence
  Synthetic
  misc_feature (22)..(22): n is a, c, g, or u
gcugaauccugcggacgacccnu

SEQ ID NO: 78821 - RNA, 24 nt, Artificial Sequence
  Synthetic
  misc_feature (23)..(23): n is a, c, g, or u
cgcugaauccugcggacgacccnu

SEQ ID NO: 78822 - RNA, 18 nt, Artificial Sequence
  Synthetic
  misc_feature (16)..(17): n is a, c, g, or u
ucuuugcuggggggannu

SEQ ID NO: 78823 - RNA, 19 nt, Artificial Sequence
  Synthetic
  misc_feature (17)..(18): n is a, c, g, or u
uucuuugcuggggggannu

SEQ ID NO: 78824 - RNA, 20 nt, Artificial Sequence
  Synthetic
  misc_feature (18)..(19): n is a, c, g, or u
auucuuugcuggggggannu

SEQ ID NO: 78825 - RNA, 21 nt, Artificial Sequence
  Synthetic
  misc_feature (19)..(20): n is a, c, g, or u
cauucuuugcuggggggannu

SEQ ID NO: 78826 - RNA, 22 nt, Artificial Sequence
  Synthetic
  misc_feature (20)..(21): n is a, c, g, or u
ccauucuuugcuggggggannu

SEQ ID NO: 78827 - RNA, 23 nt, Artificial Sequence
  Synthetic
  misc_feature (21)..(22): n is a, c, g, or u
gccauucuuugcuggggggannu

SEQ ID NO: 78828 - RNA, 24 nt, Artificial Sequence
  Synthetic
  misc_feature (22)..(23): n is a, c, g, or u
agccauucuuugcuggggggannu

SEQ ID NO: 78829 - RNA, 18 nt, Artificial Sequence
  Synthetic
  misc_feature (13)..(13): n is a, c, g, or u
ccugggugggugnaaauu

SEQ ID NO: 78830 - RNA, 19 nt, Artificial Sequence
  Synthetic
  misc_feature (14)..(14): n is a, c, g, or u
accugggugggugnaaauu

SEQ ID NO: 78831 - RNA, 20 nt, Artificial Sequence
  Synthetic
  misc_feature (15)..(15): n is a, c, g, or u
uaccugggugggugnaaauu

SEQ ID NO: 78832 - RNA, 21 nt, Artificial Sequence
  Synthetic
  misc_feature (16)..(16): n is a, c, g, or u
cuaccugggugggugnaaauu

SEQ ID NO: 78833 - RNA, 22 nt, Artificial Sequence
  Synthetic
  misc_feature (17)..(17): n is a, c, g, or u
gcuaccugggugggugnaaauu

SEQ ID NO: 78834 - RNA, 23 nt, Artificial Sequence
  Synthetic
  misc_feature (18)..(18): n is a, c, g, or u
agcuaccugggugggugnaaauu

SEQ ID NO: 78835 - RNA, 24 nt, Artificial Sequence
  Synthetic
  misc_feature (19)..(19): n is a, c, g, or u
uagcuaccugggugggugnaaauu

SEQ ID NO: 78836 - RNA, 18 nt, Artificial Sequence
  Synthetic
uaacaaaugugaacaauu

SEQ ID NO: 78837 - RNA, 19 nt, Artificial Sequence
  Synthetic
uuaacaaaugugaacaauu

SEQ ID NO: 78838 - RNA, 20 nt, Artificial Sequence
  Synthetic
auuaacaaaugugaacaauu

SEQ ID NO: 78839 - RNA, 21 nt, Artificial Sequence
  Synthetic
uauuaacaaaugugaacaauu

SEQ ID NO: 78840 - RNA, 22 nt, Artificial Sequence
  Synthetic
uuauuaacaaaugugaacaauu

SEQ ID NO: 78841 - RNA, 23 nt, Artificial Sequence
  Synthetic
auuauuaacaaaugugaacaauu

SEQ ID NO: 78842 - RNA, 24 nt, Artificial Sequence
  Synthetic
cauuauuaacaaaugugaacaauu

SEQ ID NO: 78843 - RNA, 18 nt, Artificial Sequence
  Synthetic
ugacccuuauaaagaauu

SEQ ID NO: 78844 - RNA, 19 nt, Artificial Sequence
  Synthetic
uugacccuuauaaagaauu

SEQ ID NO: 78845 - RNA, 20 nt, Artificial Sequence
  Synthetic
auugacccuuauaaagaauu

SEQ ID NO: 78846 - RNA, 21 nt, Artificial Sequence
  Synthetic
cauugacccuuauaaagaauu

SEQ ID NO: 78847 - RNA, 22 nt, Artificial Sequence
  Synthetic
acauugacccuuauaaagaauu

SEQ ID NO: 78848 - RNA, 23 nt, Artificial Sequence
  Synthetic
gacauugacccuuauaaagaauu

SEQ ID NO: 78849 - RNA, 24 nt, Artificial Sequence
  Synthetic
ggacauugacccuuauaaagaauu

SEQ ID NO: 78850 - RNA, 18 nt, Artificial Sequence
  Synthetic
cccguuuguccucuaauu

SEQ ID NO: 78851 - RNA, 19 nt, Artificial Sequence
  Synthetic
gcccguuuguccucuaauu

SEQ ID NO: 78852 - RNA, 20 nt, Artificial Sequence
  Synthetic
ugcccguuuguccucuaauu

SEQ ID NO: 78853 - RNA, 21 nt, Artificial Sequence
  Synthetic
uugcccguuuguccucuaauu

SEQ ID NO: 78854 - RNA, 22 nt, Artificial Sequence
  Synthetic
guugcccguuuguccucuaauu

SEQ ID NO: 78855 - RNA, 23 nt, Artificial Sequence
  Synthetic
uguugcccguuuguccucuaauu

SEQ ID NO: 78856 - RNA, 24 nt, Artificial Sequence
  Synthetic
auguugcccguuuguccucuaauu

SEQ ID NO: 78857 - RNA, 18 nt, Artificial Sequence
  Synthetic
aggcaugcuaaaaacauu

SEQ ID NO: 78858 - RNA, 19 nt, Artificial Sequence
  Synthetic
aaggcaugcuaaaaacauu

SEQ ID NO: 78859 - RNA, 20 nt, Artificial Sequence
  Synthetic
caaggcaugcuaaaaacauu

SEQ ID NO: 78860 - RNA, 21 nt, Artificial Sequence
  Synthetic
ucaaggcaugcuaaaaacauu

SEQ ID NO: 78861 - RNA, 22 nt, Artificial Sequence
  Synthetic
cucaaggcaugcuaaaaacauu

SEQ ID NO: 78862 - RNA, 23 nt, Artificial Sequence
  Synthetic
gcucaaggcaugcuaaaaacauu

SEQ ID NO: 78863 - RNA, 24 nt, Artificial Sequence
  Synthetic
ggcucaaggcaugcuaaaaacauu

SEQ ID NO: 78864 - RNA, 18 nt, Artificial Sequence
  Synthetic
cauuugcaccaggacauu

SEQ ID NO: 78865 - RNA, 19 nt, Artificial Sequence
  Synthetic
ucauuugcaccaggacauu

SEQ ID NO: 78866 - RNA, 20 nt, Artificial Sequence
  Synthetic
uucauuugcaccaggacauu

SEQ ID NO: 78867 - RNA, 21 nt, Artificial Sequence
  Synthetic
auucauuugcaccaggacauu

SEQ ID NO: 78868 - RNA, 22 nt, Artificial Sequence
  Synthetic
uauucauuugcaccaggacauu

SEQ ID NO: 78869 - RNA, 23 nt, Artificial Sequence
  Synthetic
auauucauuugcaccaggacauu

SEQ ID NO: 78870 - RNA, 24 nt, Artificial Sequence
  Synthetic
gauauucauuugcaccaggacauu

SEQ ID NO: 78871 - RNA, 18 nt, Artificial Sequence
  Synthetic
ccaguuggauccagcauu

SEQ ID NO: 78872 - RNA, 19 nt, Artificial Sequence
  Synthetic
accaguuggauccagcauu

SEQ ID NO: 78873 - RNA, 20 nt, Artificial Sequence
  Synthetic
caccaguuggauccagcauu

SEQ ID NO: 78874 - RNA, 21 nt, Artificial Sequence
  Synthetic
ccaccaguuggauccagcauu

SEQ ID NO: 78875 - RNA, 22 nt, Artificial Sequence
  Synthetic
accaccaguuggauccagcauu

SEQ ID NO: 78876 - RNA, 23 nt, Artificial Sequence
  Synthetic
gaccaccaguuggauccagcauu

SEQ ID NO: 78877 - RNA, 24 nt, Artificial Sequence
  Synthetic
cgaccaccaguuggauccagcauu

SEQ ID NO: 78878 - RNA, 18 nt, Artificial Sequence
  Synthetic
aagcaucacaucaggauu

SEQ ID NO: 78879 - RNA, 19 nt, Artificial Sequence
  Synthetic
aaagcaucacaucaggauu

SEQ ID NO: 78880 - RNA, 20 nt, Artificial Sequence
  Synthetic
gaaagcaucacaucaggauu

SEQ ID NO: 78881 - RNA, 21 nt, Artificial Sequence
  Synthetic
ggaaagcaucacaucaggauu

SEQ ID NO: 78882 - RNA, 22 nt, Artificial Sequence
  Synthetic
uggaaagcaucacaucaggauu

SEQ ID NO: 78883 - RNA, 23 nt, Artificial Sequence
  Synthetic
auggaaagcaucacaucaggauu

SEQ ID NO: 78884 - RNA, 24 nt, Artificial Sequence
  Synthetic
cauggaaagcaucacaucaggauu

SEQ ID NO: 78885 - RNA, 18 nt, Artificial Sequence
  Synthetic
ucaaucuucucgaggauu

SEQ ID NO: 78886 - RNA, 19 nt, Artificial Sequence
  Synthetic
gucaaucuucucgaggauu

SEQ ID NO: 78887 - RNA, 20 nt, Artificial Sequence
  Synthetic
cgucaaucuucucgaggauu

SEQ ID NO: 78888 - RNA, 21 nt, Artificial Sequence
  Synthetic
ucgucaaucuucucgaggauu

SEQ ID NO: 78889 - RNA, 22 nt, Artificial Sequence
  Synthetic
cucgucaaucuucucgaggauu

SEQ ID NO: 78890 - RNA, 23 nt, Artificial Sequence
  Synthetic
ucucgucaaucuucucgaggauu

SEQ ID NO: 78891 - RNA, 24 nt, Artificial Sequence
  Synthetic
aucucgucaaucuucucgaggauu

SEQ ID NO: 78892 - RNA, 18 nt, Artificial Sequence
  Synthetic
  misc_feature (5)..(5): n is a, c, g, or u
uuaancggccuauugauu

SEQ ID NO: 78893 - RNA, 19 nt, Artificial Sequence
  Synthetic
  misc_feature (6)..(6): n is a, c, g, or u
guuaancggccuauugauu

SEQ ID NO: 78894 - RNA, 20 nt, Artificial Sequence
  Synthetic
  misc_feature (7)..(7): n is a, c, g, or u
uguuaancggccuauugauu

SEQ ID NO: 78895 - RNA, 21 nt, Artificial Sequence
  Synthetic
  misc_feature (8)..(8): n is a, c, g, or u
cuguuaancggccuauugauu

SEQ ID NO: 78896 - RNA, 22 nt, Artificial Sequence
  Synthetic
  misc_feature (9)..(9): n is a, c, g, or u
ccuguuaancggccuauugauu

SEQ ID NO: 78897 - RNA, 23 nt, Artificial Sequence
  Synthetic
  misc_feature (10)..(10): n is a, c, g, or u
cccuguuaancggccuauugauu

SEQ ID NO: 78898 - RNA, 24 nt, Artificial Sequence
  Synthetic
  misc_feature (11)..(11): n is a, c, g, or u
ucccuguuaancggccuauugauu

SEQ ID NO: 78899 - RNA, 18 nt, Artificial Sequence
  Synthetic
uauggaugaugugguauu

SEQ ID NO: 78900 - RNA, 19 nt, Artificial Sequence
  Synthetic
auauggaugaugugguauu

SEQ ID NO: 78901 - RNA, 20 nt, Artificial Sequence
  Synthetic
uauauggaugaugugguauu

SEQ ID NO: 78902 - RNA, 21 nt, Artificial Sequence
  Synthetic
uuauauggaugaugugguauu

SEQ ID NO: 78903 - RNA, 22 nt, Artificial Sequence
  Synthetic
guuauauggaugaugugguauu

SEQ ID NO: 78904 - RNA, 23 nt, Artificial Sequence
  Synthetic
aguuauauggaugaugugguauu

SEQ ID NO: 78905 - RNA, 24 nt, Artificial Sequence
  Synthetic
caguuauauggaugaugugguauu

SEQ ID NO: 78906 - RNA, 18 nt, Artificial Sequence
  Synthetic
uugcaccaggacauuauu

SEQ ID NO: 78907 - RNA, 19 nt, Artificial Sequence
  Synthetic
uuugcaccaggacauuauu

SEQ ID NO: 78908 - RNA, 20 nt, Artificial Sequence
  Synthetic
auuugcaccaggacauuauu

SEQ ID NO: 78909 - RNA, 21 nt, Artificial Sequence
  Synthetic
cauuugcaccaggacauuauu

SEQ ID NO: 78910 - RNA, 22 nt, Artificial Sequence
  Synthetic
ucauuugcaccaggacauuauu

SEQ ID NO: 78911 - RNA, 23 nt, Artificial Sequence
  Synthetic
uucauuugcaccaggacauuauu

SEQ ID NO: 78912 - RNA, 24 nt, Artificial Sequence
  Synthetic
auucauuugcaccaggacauuauu

SEQ ID NO: 78913 - RNA, 18 nt, Artificial Sequence
  Synthetic
  misc_feature (4)..(4): n is a, c, g, or u
uuunugggucaccuuauu

SEQ ID NO: 78914 - RNA, 19 nt, Artificial Sequence
  Synthetic
  misc_feature (5)..(5): n is a, c, g, or u
uuuunugggucaccuuauu

SEQ ID NO: 78915 - RNA, 20 nt, Artificial Sequence
  Synthetic
  misc_feature (6)..(6): n is a, c, g, or u
auuuunugggucaccuuauu

SEQ ID NO: 78916 - RNA, 21 nt, Artificial Sequence
  Synthetic
  misc_feature (7)..(7): n is a, c, g, or u
cauuuunugggucaccuuauu

SEQ ID NO: 78917 - RNA, 22 nt, Artificial Sequence
  Synthetic
  misc_feature (8)..(8): n is a, c, g, or u
ucauuuunugggucaccuuauu

SEQ ID NO: 78918 - RNA, 23 nt, Artificial Sequence
  Synthetic
  misc_feature (9)..(9): n is a, c, g, or u
cucauuuunugggucaccuuauu

SEQ ID NO: 78919 - RNA, 24 nt, Artificial Sequence
  Synthetic
  misc_feature (10)..(10): n is a, c, g, or u
ccucauuuunugggucaccuuauu

SEQ ID NO: 78920 - RNA, 18 nt, Artificial Sequence
  Synthetic
  misc_feature (12)..(12): n is a, c, g, or u
aggucuggagcnaaacuu

SEQ ID NO: 78921 - RNA, 19 nt, Artificial Sequence
  Synthetic
  misc_feature (13)..(13): n is a, c, g, or u
caggucuggagcnaaacuu

SEQ ID NO: 78922 - RNA, 20 nt, Artificial Sequence
  Synthetic
  misc_feature (14)..(14): n is a, c, g, or u
gcaggucuggagcnaaacuu

SEQ ID NO: 78923 - RNA, 21 nt, Artificial Sequence
  Synthetic
  misc_feature (15)..(15): n is a, c, g, or u
agcaggucuggagcnaaacuu

SEQ ID NO: 78924 - RNA, 22 nt, Artificial Sequence
  Synthetic
  misc_feature (16)..(16): n is a, c, g, or u
cagcaggucuggagcnaaacuu

SEQ ID NO: 78925 - RNA, 23 nt, Artificial Sequence
  Synthetic
  misc_feature (17)..(17): n is a, c, g, or u
gcagcaggucuggagcnaaacuu

SEQ ID NO: 78926 - RNA, 24 nt, Artificial Sequence
  Synthetic
  misc_feature (18)..(18): n is a, c, g, or u
cgcagcaggucuggagcnaaacuu

SEQ ID NO: 78927 - RNA, 18 nt, Artificial Sequence
  Synthetic
ucacuuucucgccaacuu

SEQ ID NO: 78928 - RNA, 19 nt, Artificial Sequence
  Synthetic
uucacuuucucgccaacuu

SEQ ID NO: 78929 - RNA, 20 nt, Artificial Sequence
  Synthetic
uuucacuuucucgccaacuu

SEQ ID NO: 78930 - RNA, 21 nt, Artificial Sequence
  Synthetic
cuuucacuuucucgccaacuu

SEQ ID NO: 78931 - RNA, 22 nt, Artificial Sequence
  Synthetic
gcuuucacuuucucgccaacuu

SEQ ID NO: 78932 - RNA, 23 nt, Artificial Sequence
  Synthetic
ggcuuucacuuucucgccaacuu

SEQ ID NO: 78933 - RNA, 24 nt, Artificial Sequence
  Synthetic
aggcuuucacuuucucgccaacuu

SEQ ID NO: 78934 - RNA, 18 nt, Artificial Sequence
  Synthetic
ccuaucuuaucaacacuu

SEQ ID NO: 78935 - RNA, 19 nt, Artificial Sequence
  Synthetic
cccuaucuuaucaacacuu

SEQ ID NO: 78936 - RNA, 20 nt, Artificial Sequence
  Synthetic
ccccuaucuuaucaacacuu

SEQ ID NO: 78937 - RNA, 21 nt, Artificial Sequence
  Synthetic
gccccuaucuuaucaacacuu

SEQ ID NO: 78938 - RNA, 22 nt, Artificial Sequence
  Synthetic
ugccccuaucuuaucaacacuu

SEQ ID NO: 78939 - RNA, 23 nt, Artificial Sequence
  Synthetic
augccccuaucuuaucaacacuu

SEQ ID NO: 78940 - RNA, 24 nt, Artificial Sequence
  Synthetic
aaugccccuaucuuaucaacacuu

SEQ ID NO: 78941 - RNA, 18 nt, Artificial Sequence
  Synthetic
acauuucuugucucacuu

SEQ ID NO: 78942 - RNA, 19 nt, Artificial Sequence
  Synthetic
cacauuucuugucucacuu

SEQ ID NO: 78943 - RNA, 20 nt, Artificial Sequence
  Synthetic
ucacauuucuugucucacuu

SEQ ID NO: 78944 - RNA, 21 nt, Artificial Sequence
  Synthetic
uucacauuucuugucucacuu

SEQ ID NO: 78945 - RNA, 22 nt, Artificial Sequence
  Synthetic
uuucacauuucuugucucacuu

SEQ ID NO: 78946 - RNA, 23 nt, Artificial Sequence
  Synthetic
guuucacauuucuugucucacuu

SEQ ID NO: 78947 - RNA, 24 nt, Artificial Sequence
  Synthetic
gguuucacauuucuugucucacuu

SEQ ID NO: 78948 - RNA, 18 nt, Artificial Sequence
  Synthetic
cgaccuugaggcauacuu

SEQ ID NO: 78949 - RNA, 19 nt, Artificial Sequence
  Synthetic
ccgaccuugaggcauacuu

SEQ ID NO: 78950 - RNA, 20 nt, Artificial Sequence
  Synthetic
accgaccuugaggcauacuu

SEQ ID NO: 78951 - RNA, 21 nt, Artificial Sequence
  Synthetic
gaccgaccuugaggcauacuu

SEQ ID NO: 78952 - RNA, 22 nt, Artificial Sequence
  Synthetic
cgaccgaccuugaggcauacuu

SEQ ID NO: 78953 - RNA, 23 nt, Artificial Sequence
  Synthetic
acgaccgaccuugaggcauacuu

SEQ ID NO: 78954 - RNA, 24 nt, Artificial Sequence
  Synthetic
aacgaccgaccuugaggcauacuu

SEQ ID NO: 78955 - RNA, 18 nt, Artificial Sequence
  Synthetic
uguaguuaaucauuacuu

SEQ ID NO: 78956 - RNA, 19 nt, Artificial Sequence
  Synthetic
auguaguuaaucauuacuu

SEQ ID NO: 78957 - RNA, 20 nt, Artificial Sequence
  Synthetic
aauguaguuaaucauuacuu

SEQ ID NO: 78958 - RNA, 21 nt, Artificial Sequence
  Synthetic
uaauguaguuaaucauuacuu

SEQ ID NO: 78959 - RNA, 22 nt, Artificial Sequence
  Synthetic
auaauguaguuaaucauuacuu

SEQ ID NO: 78960 - RNA, 23 nt, Artificial Sequence
  Synthetic
gauaauguaguuaaucauuacuu

SEQ ID NO: 78961 - RNA, 24 nt, Artificial Sequence
  Synthetic
agauaauguaguuaaucauuacuu

SEQ ID NO: 78962 - RNA, 18 nt, Artificial Sequence
  Synthetic
  misc_feature (10)..(10): n is a, c, g, or u
gcgcaugcgnggaaccuu

SEQ ID NO: 78963 - RNA, 19 nt, Artificial Sequence
  Synthetic
  misc_feature (11)..(11): n is a, c, g, or u
agcgcaugcgnggaaccuu

SEQ ID NO: 78964 - RNA, 20 nt, Artificial Sequence
  Synthetic
  misc_feature (12)..(12): n is a, c, g, or u
cagcgcaugcgnggaaccuu

SEQ ID NO: 78965 - RNA, 21 nt, Artificial Sequence
  Synthetic
  misc_feature (13)..(13): n is a, c, g, or u
ucagcgcaugcgnggaaccuu

SEQ ID NO: 78966 - RNA, 22 nt, Artificial Sequence
  Synthetic
  misc_feature (14)..(14): n is a, c, g, or u
aucagcgcaugcgnggaaccuu

SEQ ID NO: 78967 - RNA, 23 nt, Artificial Sequence
  Synthetic
  misc_feature (15)..(15): n is a, c, g, or u
caucagcgcaugcgnggaaccuu

SEQ ID NO: 78968 - RNA, 24 nt, Artificial Sequence
  Synthetic
  misc_feature (16)..(16): n is a, c, g, or u
ccaucagcgcaugcgnggaaccuu

SEQ ID NO: 78969 - RNA, 18 nt, Artificial Sequence
  Synthetic
ccccaaucacuccaccuu

SEQ ID NO: 78970 - RNA, 19 nt, Artificial Sequence
  Synthetic
accccaaucacuccaccuu

SEQ ID NO: 78971 - RNA, 20 nt, Artificial Sequence
  Synthetic
uaccccaaucacuccaccuu

SEQ ID NO: 78972 - RNA, 21 nt, Artificial Sequence
  Synthetic
cuaccccaaucacuccaccuu

SEQ ID NO: 78973 - RNA, 22 nt, Artificial Sequence
  Synthetic
ccuaccccaaucacuccaccuu

SEQ ID NO: 78974 - RNA, 23 nt, Artificial Sequence
  Synthetic
gccuaccccaaucacuccaccuu

SEQ ID NO: 78975 - RNA, 24 nt, Artificial Sequence
  Synthetic
agccuaccccaaucacuccaccuu

SEQ ID NO: 78976 - RNA, 18 nt, Artificial Sequence
  Synthetic
  misc_feature (1)..(1): n is a, c, g, or u
ncauggacauugacccuu

SEQ ID NO: 78977 - RNA, 19 nt, Artificial Sequence
  Synthetic
  misc_feature (2)..(2): n is a, c, g, or u
gncauggacauugacccuu

SEQ ID NO: 78978 - RNA, 20 nt, Artificial Sequence
  Synthetic
  misc_feature (3)..(3): n is a, c, g, or u
ggncauggacauugacccuu

SEQ ID NO: 78979 - RNA, 21 nt, Artificial Sequence
  Synthetic
  misc_feature (1)..(1): n is a, c, g, or u
  misc_feature (4)..(4): n is a, c, g, or u
nggncauggacauugacccuu

SEQ ID NO: 78980 - RNA, 22 nt, Artificial Sequence
  Synthetic
  misc_feature (2)..(2): n is a, c, g, or u
  misc_feature (5)..(5): n is a, c, g, or u
unggncauggacauugacccuu

SEQ ID NO: 78981 - RNA, 23 nt, Artificial Sequence
  Synthetic
  misc_feature (3)..(3): n is a, c, g, or u
  misc_feature (6)..(6): n is a, c, g, or u
uunggncauggacauugacccuu

SEQ ID NO: 78982 - RNA, 24 nt, Artificial Sequence
  Synthetic
  misc_feature (4)..(4): n is a, c, g, or u
  misc_feature (7)..(7): n is a, c, g, or u
uuunggncauggacauugacccuu

SEQ ID NO: 78983 - RNA, 18 nt, Artificial Sequence
  Synthetic
cccccacacggaggccuu

SEQ ID NO: 78984 - RNA, 19 nt, Artificial Sequence
  Synthetic
ucccccacacggaggccuu

SEQ ID NO: 78985 - RNA, 20 nt, Artificial Sequence
  Synthetic
cucccccacacggaggccuu

SEQ ID NO: 78986 - RNA, 21 nt, Artificial Sequence
  Synthetic
acucccccacacggaggccuu

SEQ ID NO: 78987 - RNA, 22 nt, Artificial Sequence
  Synthetic
cacucccccacacggaggccuu

SEQ ID NO: 78988 - RNA, 23 nt, Artificial Sequence
  Synthetic
ucacucccccacacggaggccuu

SEQ ID NO: 78989 - RNA, 24 nt, Artificial Sequence
  Synthetic
uucacucccccacacggaggccuu

SEQ ID NO: 78990 - RNA, 18 nt, Artificial Sequence
  Synthetic
uucgcacuccuccagcuu

SEQ ID NO: 78991 - RNA, 19 nt, Artificial Sequence
  Synthetic
auucgcacuccuccagcuu

SEQ ID NO: 78992 - RNA, 20 nt, Artificial Sequence
  Synthetic
gauucgcacuccuccagcuu

SEQ ID NO: 78993 - RNA, 21 nt, Artificial Sequence
  Synthetic
ggauucgcacuccuccagcuu

SEQ ID NO: 78994 - RNA, 22 nt, Artificial Sequence
  Synthetic
uggauucgcacuccuccagcuu

SEQ ID NO: 78995 - RNA, 23 nt, Artificial Sequence
  Synthetic
guggauucgcacuccuccagcuu

SEQ ID NO: 78996 - RNA, 24 nt, Artificial Sequence
  Synthetic
uguggauucgcacuccuccagcuu

SEQ ID NO: 78997 - RNA, 18 nt, Artificial Sequence
  Synthetic
ucccaucaucaugggcuu

SEQ ID NO: 78998 - RNA, 19 nt, Artificial Sequence
  Synthetic
aucccaucaucaugggcuu

SEQ ID NO: 78999 - RNA, 20 nt, Artificial Sequence
  Synthetic
caucccaucaucaugggcuu

SEQ ID NO: 79000 - RNA, 21 nt, Artificial Sequence
  Synthetic
ccaucccaucaucaugggcuu

SEQ ID NO: 79001 - RNA, 22 nt, Artificial Sequence
  Synthetic
cccaucccaucaucaugggcuu

SEQ ID NO: 79002 - RNA, 23 nt, Artificial Sequence
  Synthetic
ucccaucccaucaucaugggcuu

SEQ ID NO: 79003 - RNA, 24 nt, Artificial Sequence
  Synthetic
uucccaucccaucaucaugggcuu

SEQ ID NO: 79004 - RNA, 18 nt, Artificial Sequence
  Synthetic
acucaucucgucaaucuu

SEQ ID NO: 79005 - RNA, 19 nt, Artificial Sequence
  Synthetic
cacucaucucgucaaucuu

SEQ ID NO: 79006 - RNA, 20 nt, Artificial Sequence
  Synthetic
ucacucaucucgucaaucuu

SEQ ID NO: 79007 - RNA, 21 nt, Artificial Sequence
  Synthetic
cucacucaucucgucaaucuu

SEQ ID NO: 79008 - RNA, 22 nt, Artificial Sequence
  Synthetic
ccucacucaucucgucaaucuu

SEQ ID NO: 79009 - RNA, 23 nt, Artificial Sequence
  Synthetic
gccucacucaucucgucaaucuu

SEQ ID NO: 79010 - RNA, 24 nt, Artificial Sequence
  Synthetic
ugccucacucaucucgucaaucuu

SEQ ID NO: 79011 - RNA, 18 nt, Artificial Sequence
  Synthetic
accaaaugccccuaucuu

SEQ ID NO: 79012 - RNA, 19 nt, Artificial Sequence
  Synthetic
caccaaaugccccuaucuu

SEQ ID NO: 79013 - RNA, 20 nt, Artificial Sequence
  Synthetic
ccaccaaaugccccuaucuu

SEQ ID NO: 79014 - RNA, 21 nt, Artificial Sequence
  Synthetic
accaccaaaugccccuaucuu

SEQ ID NO: 79015 - RNA, 22 nt, Artificial Sequence
  Synthetic
gaccaccaaaugccccuaucuu

SEQ ID NO: 79016 - RNA, 23 nt, Artificial Sequence
  Synthetic
agaccaccaaaugccccuaucuu

SEQ ID NO: 79017 - RNA, 24 nt, Artificial Sequence
  Synthetic
uagaccaccaaaugccccuaucuu

SEQ ID NO: 79018 - RNA, 18 nt, Artificial Sequence
  Synthetic
  misc_feature (4)..(4): n is a, c, g, or u
caangaauugugggucuu

SEQ ID NO: 79019 - RNA, 19 nt, Artificial Sequence
  Synthetic
  misc_feature (5)..(5): n is a, c, g, or u
ucaangaauugugggucuu

SEQ ID NO: 79020 - RNA, 20 nt, Artificial Sequence
  Synthetic
  misc_feature (6)..(6): n is a, c, g, or u
gucaangaauugugggucuu

SEQ ID NO: 79021 - RNA, 21 nt, Artificial Sequence
  Synthetic
  misc_feature (7)..(7): n is a, c, g, or u
ugucaangaauugugggucuu

SEQ ID NO: 79022 - RNA, 22 nt, Artificial Sequence
  Synthetic
  misc_feature (8)..(8): n is a, c, g, or u
augucaangaauugugggucuu

SEQ ID NO: 79023 - RNA, 23 nt, Artificial Sequence
  Synthetic
  misc_feature (9)..(9): n is a, c, g, or u
uaugucaangaauugugggucuu

SEQ ID NO: 79024 - RNA, 24 nt, Artificial Sequence
  Synthetic
  misc_feature (10)..(10): n is a, c, g, or u
guaugucaangaauugugggucuu

SEQ ID NO: 79025 - RNA, 18 nt, Artificial Sequence
  Synthetic
uagaguauuuggugucuu

SEQ ID NO: 79026 - RNA, 19 nt, Artificial Sequence
  Synthetic
  misc_feature (1)..(1): n is a, c, g, or u
nuagaguauuuggugucuu

SEQ ID NO: 79027 - RNA, 20 nt, Artificial Sequence
  Synthetic
  misc_feature (2)..(2): n is a, c, g, or u
cnuagaguauuuggugucuu

SEQ ID NO: 79028 - RNA, 21 nt, Artificial Sequence
  Synthetic
  misc_feature (3)..(3): n is a, c, g, or u
ucnuagaguauuuggugucuu

SEQ ID NO: 79029 - RNA, 22 nt, Artificial Sequence
  Synthetic
  misc_feature (4)..(4): n is a, c, g, or u
gucnuagaguauuuggugucuu

SEQ ID NO: 79030 - RNA, 23 nt, Artificial Sequence
  Synthetic
  misc_feature (5)..(5): n is a, c, g, or u
cgucnuagaguauuuggugucuu

SEQ ID NO: 79031 - RNA, 24 nt, Artificial Sequence
  Synthetic
  misc_feature (6)..(6): n is a, c, g, or u
ccgucnuagaguauuuggugucuu

SEQ ID NO: 79032 - RNA, 18 nt, Artificial Sequence
  Synthetic
  misc_feature (1)..(1): n is a, c, g, or u
nugggucaccuuauucuu

SEQ ID NO: 79033 - RNA, 19 nt, Artificial Sequence
  Synthetic
  misc_feature (2)..(2): n is a, c, g, or u
unugggucaccuuauucuu

SEQ ID NO: 79034 - RNA, 20 nt, Artificial Sequence
  Synthetic
  misc_feature (3)..(3): n is a, c, g, or u
uunugggucaccuuauucuu

SEQ ID NO: 79035 - RNA, 21 nt, Artificial Sequence
  Synthetic
  misc_feature (4)..(4): n is a, c, g, or u
uuunugggucaccuuauucuu

SEQ ID NO: 79036 - RNA, 22 nt, Artificial Sequence
  Synthetic
  misc_feature (5)..(5): n is a, c, g, or u
uuuunugggucaccuuauucuu

SEQ ID NO: 79037 - RNA, 23 nt, Artificial Sequence
  Synthetic
  misc_feature (6)..(6): n is a, c, g, or u
auuuunugggucaccuuauucuu

SEQ ID NO: 79038 - RNA, 24 nt, Artificial Sequence
  Synthetic
  misc_feature (7)..(7): n is a, c, g, or u
cauuuunugggucaccuuauucuu

SEQ ID NO: 79039 - RNA, 18 nt, Artificial Sequence
  Synthetic
aucuucuuguugguucuu

SEQ ID NO: 79040 - RNA, 19 nt, Artificial Sequence
  Synthetic
caucuucuuguugguucuu

SEQ ID NO: 79041 - RNA, 20 nt, Artificial Sequence
  Synthetic
ucaucuucuuguugguucuu

SEQ ID NO: 79042 - RNA, 21 nt, Artificial Sequence
  Synthetic
cucaucuucuuguugguucuu

SEQ ID NO: 79043 - RNA, 22 nt, Artificial Sequence
  Synthetic
ccucaucuucuuguugguucuu

SEQ ID NO: 79044 - RNA, 23 nt, Artificial Sequence
  Synthetic
gccucaucuucuuguugguucuu

SEQ ID NO: 79045 - RNA, 24 nt, Artificial Sequence
  Synthetic
ugccucaucuucuuguugguucuu

SEQ ID NO: 79046 - RNA, 18 nt, Artificial Sequence
  Synthetic
acaggcgggguuuuucuu

SEQ ID NO: 79047 - RNA, 19 nt, Artificial Sequence
  Synthetic
uacaggcgggguuuuucuu

SEQ ID NO: 79048 - RNA, 20 nt, Artificial Sequence
  Synthetic
uuacaggcgggguuuuucuu

SEQ ID NO: 79049 - RNA, 21 nt, Artificial Sequence
  Synthetic
guuacaggcgggguuuuucuu

SEQ ID NO: 79050 - RNA, 22 nt, Artificial Sequence
  Synthetic
uguuacaggcgggguuuuucuu

SEQ ID NO: 79051 - RNA, 23 nt, Artificial Sequence
  Synthetic
guguuacaggcgggguuuuucuu

SEQ ID NO: 79052 - RNA, 24 nt, Artificial Sequence
  Synthetic
cguguuacaggcgggguuuuucuu

SEQ ID NO: 79053 - RNA, 18 nt, Artificial Sequence
  Synthetic
cugcugguggcuccaguu

SEQ ID NO: 79054 - RNA, 19 nt, Artificial Sequence
  Synthetic
ccugcugguggcuccaguu

SEQ ID NO: 79055 - RNA, 20 nt, Artificial Sequence
  Synthetic
uccugcugguggcuccaguu

SEQ ID NO: 79056 - RNA, 21 nt, Artificial Sequence
  Synthetic
uuccugcugguggcuccaguu

SEQ ID NO: 79057 - RNA, 22 nt, Artificial Sequence
  Synthetic
uuuccugcugguggcuccaguu

SEQ ID NO: 79058 - RNA, 23 nt, Artificial Sequence
  Synthetic
uuuuccugcugguggcuccaguu

SEQ ID NO: 79059 - RNA, 24 nt, Artificial Sequence
  Synthetic
auuuuccugcugguggcuccaguu

SEQ ID NO: 79060 - RNA, 18 nt, Artificial Sequence
  Synthetic
ugaaaaucaaagacuguu

SEQ ID NO: 79061 - RNA, 19 nt, Artificial Sequence
  Synthetic
  misc_feature (1)..(1): n is a, c, g, or u
nugaaaaucaaagacuguu

SEQ ID NO: 79062 - RNA, 20 nt, Artificial Sequence
  Synthetic
  misc_feature (2)..(2): n is a, c, g, or u
anugaaaaucaaagacuguu

SEQ ID NO: 79063 - RNA, 21 nt, Artificial Sequence
  Synthetic
  misc_feature (3)..(3): n is a, c, g, or u
ganugaaaaucaaagacuguu

SEQ ID NO: 79064 - RNA, 22 nt, Artificial Sequence
  Synthetic
  misc_feature (4)..(4): n is a, c, g, or u
aganugaaaaucaaagacuguu

SEQ ID NO: 79065 - RNA, 23 nt, Artificial Sequence
  Synthetic
  misc_feature (5)..(5): n is a, c, g, or u
caganugaaaaucaaagacuguu

SEQ ID NO: 79066 - RNA, 24 nt, Artificial Sequence
  Synthetic
  misc_feature (6)..(6): n is a, c, g, or u
ucaganugaaaaucaaagacuguu

SEQ ID NO: 79067 - RNA, 18 nt, Artificial Sequence
  Synthetic
  misc_feature (11)..(11): n is a, c, g, or u
cuuccggaganuacuguu

SEQ ID NO: 79068 - RNA, 19 nt, Artificial Sequence
  Synthetic
  misc_feature (12)..(12): n is a, c, g, or u
acuuccggaganuacuguu

SEQ ID NO: 79069 - RNA, 20 nt, Artificial Sequence
  Synthetic
  misc_feature (13)..(13): n is a, c, g, or u
cacuuccggaganuacuguu

SEQ ID NO: 79070 - RNA, 21 nt, Artificial Sequence
  Synthetic
  misc_feature (14)..(14): n is a, c, g, or u
acacuuccggaganuacuguu

SEQ ID NO: 79071 - RNA, 22 nt, Artificial Sequence
  Synthetic
  misc_feature (15)..(15): n is a, c, g, or u
aacacuuccggaganuacuguu

SEQ ID NO: 79072 - RNA, 23 nt, Artificial Sequence
  Synthetic
  misc_feature (16)..(16): n is a, c, g, or u
caacacuuccggaganuacuguu

SEQ ID NO: 79073 - RNA, 24 nt, Artificial Sequence
  Synthetic
  misc_feature (17)..(17): n is a, c, g, or u
ucaacacuuccggaganuacuguu

SEQ ID NO: 79074 - RNA, 18 nt, Artificial Sequence
  Synthetic
uucccucauguugcuguu

SEQ ID NO: 79075 - RNA, 19 nt, Artificial Sequence
  Synthetic
uuucccucauguugcuguu

SEQ ID NO: 79076 - RNA, 20 nt, Artificial Sequence
  Synthetic
guuucccucauguugcuguu

SEQ ID NO: 79077 - RNA, 21 nt, Artificial Sequence
  Synthetic
uguuucccucauguugcuguu

SEQ ID NO: 79078 - RNA, 22 nt, Artificial Sequence
  Synthetic
auguuucccucauguugcuguu

SEQ ID NO: 79079 - RNA, 23 nt, Artificial Sequence
  Synthetic
uauguuucccucauguugcuguu

SEQ ID NO: 79080 - RNA, 24 nt, Artificial Sequence
  Synthetic
cuauguuucccucauguugcuguu

SEQ ID NO: 79081 - RNA, 18 nt, Artificial Sequence
  Synthetic
aggaccccugcucguguu

SEQ ID NO: 79082 - RNA, 19 nt, Artificial Sequence
  Synthetic
uaggaccccugcucguguu

SEQ ID NO: 79083 - RNA, 20 nt, Artificial Sequence
  Synthetic
cuaggaccccugcucguguu

SEQ ID NO: 79084 - RNA, 21 nt, Artificial Sequence
  Synthetic
ccuaggaccccugcucguguu

SEQ ID NO: 79085 - RNA, 22 nt, Artificial Sequence
  Synthetic
uccuaggaccccugcucguguu

SEQ ID NO: 79086 - RNA, 23 nt, Artificial Sequence
  Synthetic
uuccuaggaccccugcucguguu

SEQ ID NO: 79087 - RNA, 24 nt, Artificial Sequence
  Synthetic
auuccuaggaccccugcucguguu

SEQ ID NO: 79088 - RNA, 18 nt, Artificial Sequence
  Synthetic
ggcgggguuuuucuuguu

SEQ ID NO: 79089 - RNA, 19 nt, Artificial Sequence
  Synthetic
aggcgggguuuuucuuguu

SEQ ID NO: 79090 - RNA, 20 nt, Artificial Sequence
  Synthetic
caggcgggguuuuucuuguu

SEQ ID NO: 79091 - RNA, 21 nt, Artificial Sequence
  Synthetic
acaggcgggguuuuucuuguu

SEQ ID NO: 79092 - RNA, 22 nt, Artificial Sequence
  Synthetic
uacaggcgggguuuuucuuguu

SEQ ID NO: 79093 - RNA, 23 nt, Artificial Sequence
  Synthetic
uuacaggcgggguuuuucuuguu

SEQ ID NO: 79094 - RNA, 24 nt, Artificial Sequence
  Synthetic
guuacaggcgggguuuuucuuguu

SEQ ID NO: 79095 - RNA, 18 nt, Artificial Sequence
  Synthetic
cuucaaagacuguuuguu

SEQ ID NO: 79096 - RNA, 19 nt, Artificial Sequence
  Synthetic
acuucaaagacuguuuguu

SEQ ID NO: 79097 - RNA, 20 nt, Artificial Sequence
  Synthetic
uacuucaaagacuguuuguu

SEQ ID NO: 79098 - RNA, 21 nt, Artificial Sequence
  Synthetic
auacuucaaagacuguuuguu

SEQ ID NO: 79099 - RNA, 22 nt, Artificial Sequence
  Synthetic
cauacuucaaagacuguuuguu

SEQ ID NO: 79100 - RNA, 23 nt, Artificial Sequence
  Synthetic
gcauacuucaaagacuguuuguu

SEQ ID NO: 79101 - RNA, 24 nt, Artificial Sequence
  Synthetic
ggcauacuucaaagacuguuuguu

SEQ ID NO: 79102 - RNA, 18 nt, Artificial Sequence
  Synthetic
ucacaaggugggaaauuu

SEQ ID NO: 79103 - RNA, 19 nt, Artificial Sequence
  Synthetic
cucacaaggugggaaauuu

SEQ ID NO: 79104 - RNA, 20 nt, Artificial Sequence
  Synthetic
acucacaaggugggaaauuu

SEQ ID NO: 79105 - RNA, 21 nt, Artificial Sequence
  Synthetic
gacucacaaggugggaaauuu

SEQ ID NO: 79106 - RNA, 22 nt, Artificial Sequence
  Synthetic
ggacucacaaggugggaaauuu

SEQ ID NO: 79107 - RNA, 23 nt, Artificial Sequence
  Synthetic
uggacucacaaggugggaaauuu

SEQ ID NO: 79108 - RNA, 24 nt, Artificial Sequence
  Synthetic
uuggacucacaaggugggaaauuu

SEQ ID NO: 79109 - RNA, 18 nt, Artificial Sequence
  Synthetic
  misc_feature (12)..(12): n is a, c, g, or u
cugggugggugnaaauuu

SEQ ID NO: 79110 - RNA, 19 nt, Artificial Sequence
  Synthetic
  misc_feature (13)..(13): n is a, c, g, or u
ccugggugggugnaaauuu

SEQ ID NO: 79111 - RNA, 20 nt, Artificial Sequence
  Synthetic
  misc_feature (14)..(14): n is a, c, g, or u
accugggugggugnaaauuu

SEQ ID NO: 79112 - RNA, 21 nt, Artificial Sequence
  Synthetic
  misc_feature (15)..(15): n is a, c, g, or u
uaccugggugggugnaaauuu

SEQ ID NO: 79113 - RNA, 22 nt, Artificial Sequence
  Synthetic
  misc_feature (16)..(16): n is a, c, g, or u
cuaccugggugggugnaaauuu

SEQ ID NO: 79114 - RNA, 23 nt, Artificial Sequence
  Synthetic
  misc_feature (17)..(17): n is a, c, g, or u
gcuaccugggugggugnaaauuu

SEQ ID NO: 79115 - RNA, 24 nt, Artificial Sequence
  Synthetic
  misc_feature (18)..(18): n is a, c, g, or u
agcuaccugggugggugnaaauuu

SEQ ID NO: 79116 - RNA, 18 nt, Artificial Sequence
  Synthetic
guggacuucucucaauuu

SEQ ID NO: 79117 - RNA, 19 nt, Artificial Sequence
  Synthetic
gguggacuucucucaauuu

SEQ ID NO: 79118 - RNA, 20 nt, Artificial Sequence
  Synthetic
ugguggacuucucucaauuu

SEQ ID NO: 79119 - RNA, 21 nt, Artificial Sequence
  Synthetic
gugguggacuucucucaauuu

SEQ ID NO: 79120 - RNA, 22 nt, Artificial Sequence
  Synthetic
cgugguggacuucucucaauuu

SEQ ID NO: 79121 - RNA, 23 nt, Artificial Sequence
  Synthetic
ucgugguggacuucucucaauuu

SEQ ID NO: 79122 - RNA, 24 nt, Artificial Sequence
  Synthetic
cucgugguggacuucucucaauuu

SEQ ID NO: 79123 - RNA, 18 nt, Artificial Sequence
  Synthetic
  misc_feature (3)..(3): n is a, c, g, or u
acncguagcgccucauuu

SEQ ID NO: 79124 - RNA, 19 nt, Artificial Sequence
  Synthetic
  misc_feature (4)..(4): n is a, c, g, or u
uacncguagcgccucauuu

SEQ ID NO: 79125 - RNA, 20 nt, Artificial Sequence
  Synthetic
  misc_feature (5)..(5): n is a, c, g, or u
cuacncguagcgccucauuu

SEQ ID NO: 79126 - RNA, 21 nt, Artificial Sequence
  Synthetic
  misc_feature (6)..(6): n is a, c, g, or u
acuacncguagcgccucauuu

SEQ ID NO: 79127 - RNA, 22 nt, Artificial Sequence
  Synthetic
  misc_feature (7)..(7): n is a, c, g, or u
aacuacncguagcgccucauuu

SEQ ID NO: 79128 - RNA, 23 nt, Artificial Sequence
  Synthetic
  misc_feature (8)..(8): n is a, c, g, or u
aaacuacncguagcgccucauuu

SEQ ID NO: 79129 - RNA, 24 nt, Artificial Sequence
  Synthetic
  misc_feature (9)..(9): n is a, c, g, or u
gaaacuacncguagcgccucauuu

SEQ ID NO: 79130 - RNA, 18 nt, Artificial Sequence
  Synthetic
  misc_feature (14)..(14): n is a, c, g, or u
gggauauucccuanauuu

SEQ ID NO: 79131 - RNA, 19 nt, Artificial Sequence
  Synthetic
  misc_feature (15)..(15): n is a, c, g, or u
ggggauauucccuanauuu

SEQ ID NO: 79132 - RNA, 20 nt, Artificial Sequence
  Synthetic
  misc_feature (16)..(16): n is a, c, g, or u
uggggauauucccuanauuu

SEQ ID NO: 79133 - RNA, 21 nt, Artificial Sequence
  Synthetic
  misc_feature (17)..(17): n is a, c, g, or u
auggggauauucccuanauuu

SEQ ID NO: 79134 - RNA, 22 nt, Artificial Sequence
  Synthetic
  misc_feature (18)..(18): n is a, c, g, or u
gauggggauauucccuanauuu

SEQ ID NO: 79135 - RNA, 23 nt, Artificial Sequence
  Synthetic
  misc_feature (19)..(19): n is a, c, g, or u
agauggggauauucccuanauuu

SEQ ID NO: 79136 - RNA, 24 nt, Artificial Sequence
  Synthetic
  misc_feature (20)..(20): n is a, c, g, or u
aagauggggauauucccuanauuu

SEQ ID NO: 79137 - RNA, 18 nt, Artificial Sequence
  Synthetic
cauuucuugucucacuuu

SEQ ID NO: 79138 - RNA, 19 nt, Artificial Sequence
  Synthetic
acauuucuugucucacuuu

SEQ ID NO: 79139 - RNA, 20 nt, Artificial Sequence
  Synthetic
cacauuucuugucucacuuu

SEQ ID NO: 79140 - RNA, 21 nt, Artificial Sequence
  Synthetic
ucacauuucuugucucacuuu

SEQ ID NO: 79141 - RNA, 22 nt, Artificial Sequence
  Synthetic
uucacauuucuugucucacuuu

SEQ ID NO: 79142 - RNA, 23 nt, Artificial Sequence
  Synthetic
uuucacauuucuugucucacuuu

SEQ ID NO: 79143 - RNA, 24 nt, Artificial Sequence
  Synthetic
guuucacauuucuugucucacuuu

SEQ ID NO: 79144 - RNA, 18 nt, Artificial Sequence
  Synthetic
cccaaucacuccaccuuu

SEQ ID NO: 79145 - RNA, 19 nt, Artificial Sequence
  Synthetic
ccccaaucacuccaccuuu

SEQ ID NO: 79146 - RNA, 20 nt, Artificial Sequence
  Synthetic
accccaaucacuccaccuuu

SEQ ID NO: 79147 - RNA, 21 nt, Artificial Sequence
  Synthetic
uaccccaaucacuccaccuuu

SEQ ID NO: 79148 - RNA, 22 nt, Artificial Sequence
  Synthetic
cuaccccaaucacuccaccuuu

SEQ ID NO: 79149 - RNA, 23 nt, Artificial Sequence
  Synthetic
ccuaccccaaucacuccaccuuu

SEQ ID NO: 79150 - RNA, 24 nt, Artificial Sequence
  Synthetic
gccuaccccaaucacuccaccuuu

SEQ ID NO: 79151 - RNA, 18 nt, Artificial Sequence
  Synthetic
gcuacaucauggggcuuu

SEQ ID NO: 79152 - RNA, 19 nt, Artificial Sequence
  Synthetic
agcuacaucauggggcuuu

SEQ ID NO: 79153 - RNA, 20 nt, Artificial Sequence
  Synthetic
gagcuacaucauggggcuuu

SEQ ID NO: 79154 - RNA, 21 nt, Artificial Sequence
  Synthetic
agagcuacaucauggggcuuu

SEQ ID NO: 79155 - RNA, 22 nt, Artificial Sequence
  Synthetic
aagagcuacaucauggggcuuu

SEQ ID NO: 79156 - RNA, 23 nt, Artificial Sequence
  Synthetic
caagagcuacaucauggggcuuu

SEQ ID NO: 79157 - RNA, 24 nt, Artificial Sequence
  Synthetic
acaagagcuacaucauggggcuuu

SEQ ID NO: 79158 - RNA, 18 nt, Artificial Sequence
  Synthetic
cccaucaucaugggcuuu

SEQ ID NO: 79159 - RNA, 19 nt, Artificial Sequence
  Synthetic
ucccaucaucaugggcuuu

SEQ ID NO: 79160 - RNA, 20 nt, Artificial Sequence
  Synthetic
aucccaucaucaugggcuuu

SEQ ID NO: 79161 - RNA, 21 nt, Artificial Sequence
  Synthetic
caucccaucaucaugggcuuu

SEQ ID NO: 79162 - RNA, 22 nt, Artificial Sequence
  Synthetic
ccaucccaucaucaugggcuuu

SEQ ID NO: 79163 - RNA, 23 nt, Artificial Sequence
  Synthetic
cccaucccaucaucaugggcuuu

SEQ ID NO: 79164 - RNA, 24 nt, Artificial Sequence
  Synthetic
ucccaucccaucaucaugggcuuu

SEQ ID NO: 79165 - RNA, 18 nt, Artificial Sequence
  Synthetic
ucaggcaagccauucuuu

SEQ ID NO: 79166 - RNA, 19 nt, Artificial Sequence
  Synthetic
cucaggcaagccauucuuu

SEQ ID NO: 79167 - RNA, 20 nt, Artificial Sequence
  Synthetic
acucaggcaagccauucuuu

SEQ ID NO: 79168 - RNA, 21 nt, Artificial Sequence
  Synthetic
cacucaggcaagccauucuuu

SEQ ID NO: 79169 - RNA, 22 nt, Artificial Sequence
  Synthetic
gcacucaggcaagccauucuuu

SEQ ID NO: 79170 - RNA, 23 nt, Artificial Sequence
  Synthetic
ugcacucaggcaagccauucuuu

SEQ ID NO: 79171 - RNA, 24 nt, Artificial Sequence
  Synthetic
cugcacucaggcaagccauucuuu

SEQ ID NO: 79172 - RNA, 18 nt, Artificial Sequence
  Synthetic
gaaaaucaaagacuguuu

SEQ ID NO: 79173 - RNA, 19 nt, Artificial Sequence
  Synthetic
ugaaaaucaaagacuguuu

SEQ ID NO: 79174 - RNA, 20 nt, Artificial Sequence
  Synthetic
  misc_feature (1)..(1): n is a, c, g, or u
nugaaaaucaaagacuguuu

SEQ ID NO: 79175 - RNA, 21 nt, Artificial Sequence
  Synthetic
  misc_feature (2)..(2): n is a, c, g, or u
anugaaaaucaaagacuguuu

SEQ ID NO: 79176 - RNA, 22 nt, Artificial Sequence
  Synthetic
  misc_feature (3)..(3): n is a, c, g, or u
ganugaaaaucaaagacuguuu

SEQ ID NO: 79177 - RNA, 23 nt, Artificial Sequence
  Synthetic
  misc_feature (4)..(4): n is a, c, g, or u
aganugaaaaucaaagacuguuu

SEQ ID NO: 79178 - RNA, 24 nt, Artificial Sequence
  Synthetic
  misc_feature (5)..(5): n is a, c, g, or u
caganugaaaaucaaagacuguuu

SEQ ID NO: 79179 - RNA, 18 nt, Artificial Sequence
  Synthetic
uucaaagacuguuuguuu

SEQ ID NO: 79180 - RNA, 19 nt, Artificial Sequence
  Synthetic
cuucaaagacuguuuguuu

SEQ ID NO: 79181 - RNA, 20 nt, Artificial Sequence
  Synthetic
acuucaaagacuguuuguuu

SEQ ID NO: 79182 - RNA, 21 nt, Artificial Sequence
  Synthetic
uacuucaaagacuguuuguuu

SEQ ID NO: 79183 - RNA, 22 nt, Artificial Sequence
  Synthetic
auacuucaaagacuguuuguuu

SEQ ID NO: 79184 - RNA, 23 nt, Artificial Sequence
  Synthetic
cauacuucaaagacuguuuguuu

SEQ ID NO: 79185 - RNA, 24 nt, Artificial Sequence
  Synthetic
gcauacuucaaagacuguuuguuu

SEQ ID NO: 79186 - RNA, 18 nt, Artificial Sequence
  Synthetic
cacaaggugggaaauuuu

SEQ ID NO: 79187 - RNA, 19 nt, Artificial Sequence
  Synthetic
ucacaaggugggaaauuuu

SEQ ID NO: 79188 - RNA, 20 nt, Artificial Sequence
  Synthetic
cucacaaggugggaaauuuu

SEQ ID NO: 79189 - RNA, 21 nt, Artificial Sequence
  Synthetic
acucacaaggugggaaauuuu

SEQ ID NO: 79190 - RNA, 22 nt, Artificial Sequence
  Synthetic
gacucacaaggugggaaauuuu

SEQ ID NO: 79191 - RNA, 23 nt, Artificial Sequence
  Synthetic
ggacucacaaggugggaaauuuu

SEQ ID NO: 79192 - RNA, 24 nt, Artificial Sequence
  Synthetic
uggacucacaaggugggaaauuuu

SEQ ID NO: 79193 - RNA, 18 nt, Artificial Sequence
  Synthetic
uggacuucucucaauuuu

SEQ ID NO: 79194 - RNA, 19 nt, Artificial Sequence
  Synthetic
guggacuucucucaauuuu

SEQ ID NO: 79195 - RNA, 20 nt, Artificial Sequence
  Synthetic
gguggacuucucucaauuuu

SEQ ID NO: 79196 - RNA, 21 nt, Artificial Sequence
  Synthetic
ugguggacuucucucaauuuu

SEQ ID NO: 79197 - RNA, 22 nt, Artificial Sequence
  Synthetic
gugguggacuucucucaauuuu

SEQ ID NO: 79198 - RNA, 23 nt, Artificial Sequence
  Synthetic
cgugguggacuucucucaauuuu

SEQ ID NO: 79199 - RNA, 24 nt, Artificial Sequence
  Synthetic
ucgugguggacuucucucaauuuu

SEQ ID NO: 79200 - RNA, 18 nt, Artificial Sequence
  Synthetic
auuucuugucucacuuuu

SEQ ID NO: 79201 - RNA, 19 nt, Artificial Sequence
  Synthetic
cauuucuugucucacuuuu

SEQ ID NO: 79202 - RNA, 20 nt, Artificial Sequence
  Synthetic
acauuucuugucucacuuuu

SEQ ID NO: 79203 - RNA, 21 nt, Artificial Sequence
  Synthetic
cacauuucuugucucacuuuu

SEQ ID NO: 79204 - RNA, 22 nt, Artificial Sequence
  Synthetic
ucacauuucuugucucacuuuu

SEQ ID NO: 79205 - RNA, 23 nt, Artificial Sequence
  Synthetic
uucacauuucuugucucacuuuu

SEQ ID NO: 79206 - RNA, 24 nt, Artificial Sequence
  Synthetic
uuucacauuucuugucucacuuuu

SEQ ID NO: 79207 - RNA, 18 nt, Artificial Sequence
  Synthetic
aaaaucaaagacuguuuu

SEQ ID NO: 79208 - RNA, 19 nt, Artificial Sequence
  Synthetic
gaaaaucaaagacuguuuu

SEQ ID NO: 79209 - RNA, 20 nt, Artificial Sequence
  Synthetic
ugaaaaucaaagacuguuuu

SEQ ID NO: 79210 - RNA, 21 nt, Artificial Sequence
  Synthetic
  misc_feature (1)..(1): n is a, c, g, or u
nugaaaaucaaagacuguuuu

SEQ ID NO: 79211 - RNA, 22 nt, Artificial Sequence
  Synthetic
  misc_feature (2)..(2): n is a, c, g, or u
anugaaaaucaaagacuguuuu

SEQ ID NO: 79212 - RNA, 23 nt, Artificial Sequence
  Synthetic
  misc_feature (3)..(3): n is a, c, g, or u
ganugaaaaucaaagacuguuuu

SEQ ID NO: 79213 - RNA, 24 nt, Artificial Sequence
  Synthetic
  misc_feature (4)..(4): n is a, c, g, or u
aganugaaaaucaaagacuguuuu

SEQ ID NO: 79214 - RNA, 18 nt, Artificial Sequence
  Synthetic
aauccucugggauuuuuu

SEQ ID NO: 79215 - RNA, 19 nt, Artificial Sequence
  Synthetic
caauccucugggauuuuuu

SEQ ID NO: 79216 - RNA, 20 nt, Artificial Sequence
  Synthetic
ccaauccucugggauuuuuu

SEQ ID NO: 79217 - RNA, 21 nt, Artificial Sequence
  Synthetic
accaauccucugggauuuuuu

SEQ ID NO: 79218 - RNA, 22 nt, Artificial Sequence
  Synthetic
caccaauccucugggauuuuuu

SEQ ID NO: 79219 - RNA, 23 nt, Artificial Sequence
  Synthetic
ccaccaauccucugggauuuuuu

SEQ ID NO: 79220 - RNA, 24 nt, Artificial Sequence
  Synthetic
accaccaauccucugggauuuuuu

SEQ ID NO: 79221 - RNA, 17 nt, Artificial Sequence
  Synthetic
gccgggcaacgggguaa

SEQ ID NO: 79222 - RNA, 17 nt, Artificial Sequence
  Synthetic
gucgugcagguucugca

SEQ ID NO: 79223 - RNA, 17 nt, Artificial Sequence
  Synthetic
gcgggauucagcgccga

SEQ ID NO: 79224 - RNA, 17 nt, Artificial Sequence
  Synthetic
gugcaauuuccguccga

SEQ ID NO: 79225 - RNA, 17 nt, Artificial Sequence
  Synthetic
gcugacgcaacccccac

SEQ ID NO: 79226 - RNA, 17 nt, Artificial Sequence
  Synthetic
guugcccggcaacggcc

SEQ ID NO: 79227 - RNA, 17 nt, Artificial Sequence
  Synthetic
ggauugaagucccaauc

SEQ ID NO: 79228 - RNA, 17 nt, Artificial Sequence
  Synthetic
gcgaagugcacacgguc

SEQ ID NO: 79229 - RNA, 17 nt, Artificial Sequence
  Synthetic
gcaguauggaucggcag

SEQ ID NO: 79230 - RNA, 17 nt, Artificial Sequence
  Synthetic
ggaguccgcguaaagag

SEQ ID NO: 79231 - RNA, 17 nt, Artificial Sequence
  Synthetic
gcgcaccucucuuuacg

SEQ ID NO: 79232 - RNA, 17 nt, Artificial Sequence
  Synthetic
gucggcgcugaaucccg

SEQ ID NO: 79233 - RNA, 17 nt, Artificial Sequence
  Synthetic
ggccaucagcgcaugcg

SEQ ID NO: 79234 - RNA, 17 nt, Artificial Sequence
  Synthetic
gccaacuggauccugcg

SEQ ID NO: 79235 - RNA, 17 nt, Artificial Sequence
  Synthetic
gcggacgacccuucucg

SEQ ID NO: 79236 - RNA, 17 nt, Artificial Sequence
  Synthetic
gguggucuauaagcugg

SEQ ID NO: 79237 - RNA, 17 nt, Artificial Sequence
  Synthetic
gacucugcgguauugug

SEQ ID NO: 79238 - RNA, 17 nt, Artificial Sequence
  Synthetic
gucaacgaccgaccuug

SEQ ID NO: 79239 - RNA, 17 nt, Artificial Sequence
  Synthetic
gugggucaccauauucu

SEQ ID NO: 79240 - RNA, 17 nt, Artificial Sequence
  Synthetic
ggcuuucccccacuguu

SEQ ID NO: 79241 - RNA, 20 nt, Artificial Sequence
  Synthetic
ggauaaccacauuguguaaa

SEQ ID NO: 79242 - RNA, 20 nt, Artificial Sequence
  Synthetic
  misc_feature (11)..(11): n is a, c, g, or u
gucccaagcgnccccgagaa

SEQ ID NO: 79243 - RNA, 20 nt, Artificial Sequence
  Synthetic
guugccgggcaacgggguaa

SEQ ID NO: 79244 - RNA, 20 nt, Artificial Sequence
  Synthetic
  misc_feature (2)..(2): n is a, c, g, or u
gnagucgugcagguucugca

SEQ ID NO: 79245 - RNA, 20 nt, Artificial Sequence
  Synthetic
gaccuucgucugcgaggcga

SEQ ID NO: 79246 - RNA, 20 nt, Artificial Sequence
  Synthetic
gcgagggaguucuucuucua

SEQ ID NO: 79247 - RNA, 20 nt, Artificial Sequence
  Synthetic
ggacuucucucaauuuucua

SEQ ID NO: 79248 - RNA, 20 nt, Artificial Sequence
  Synthetic
gcacagaccuggccguugcc

SEQ ID NO: 79249 - RNA, 20 nt, Artificial Sequence
  Synthetic
gcuccuaccuuguuggcguc

SEQ ID NO: 79250 - RNA, 20 nt, Artificial Sequence
  Synthetic
gaagcgaagugcacacgguc

SEQ ID NO: 79251 - RNA, 20 nt, Artificial Sequence
  Synthetic
gcuggauccaacuggugguc

SEQ ID NO: 79252 - RNA, 20 nt, Artificial Sequence
  Synthetic
gggcaacgggguaaagguuc

SEQ ID NO: 79253 - RNA, 20 nt, Artificial Sequence
  Synthetic
ggucuccaugcgacgugcag

SEQ ID NO: 79254 - RNA, 20 nt, Artificial Sequence
  Synthetic
gauugagaucuucugcgacg

SEQ ID NO: 79255 - RNA, 20 nt, Artificial Sequence
  Synthetic
ggggcgcaccucucuuuacg

SEQ ID NO: 79256 - RNA, 20 nt, Artificial Sequence
  Synthetic
guaaagagaggugcgccccg

SEQ ID NO: 79257 - RNA, 20 nt, Artificial Sequence
  Synthetic
gauugagaccuucgucugcg

SEQ ID NO: 79258 - RNA, 20 nt, Artificial Sequence
  Synthetic
ggccuguauuucccugcugg

SEQ ID NO: 79259 - RNA, 20 nt, Artificial Sequence
  Synthetic
gacgcaacccccacuggcug

SEQ ID NO: 79260 - RNA, 20 nt, Artificial Sequence
  Synthetic
guuaucgcuggaugugucug

SEQ ID NO: 79261 - RNA, 20 nt, Artificial Sequence
  Synthetic
gucaaucuucucgaggauug

SEQ ID NO: 79262 - RNA, 20 nt, Artificial Sequence
  Synthetic
  misc_feature (20)..(20): n is a, c, g, or u
gcgcaugcguggaaccuuun

SEQ ID NO: 79263 - RNA, 20 nt, Artificial Sequence
  Synthetic
gggaacaagagcuacagcau

SEQ ID NO: 79264 - RNA, 20 nt, Artificial Sequence
  Synthetic
ggcuuucggaaaauuccuau

SEQ ID NO: 79265 - RNA, 20 nt, Artificial Sequence
  Synthetic
ggguugcgucagcaaacacu

SEQ ID NO: 79266 - RNA, 20 nt, Artificial Sequence
  Synthetic
ggagcuggagcauucgggcu

SEQ ID NO: 79267 - RNA, 20 nt, Artificial Sequence
  Synthetic
gucgcagaagaucucaaucu

SEQ ID NO: 79268 - RNA, 20 nt, Artificial Sequence
  Synthetic
guccuuuguuuacgucccgu

SEQ ID NO: 79269 - RNA, 20 nt, Artificial Sequence
  Synthetic
guccucuuauguaagaccuu

SEQ ID NO: 79270 - RNA, 20 nt, Artificial Sequence
  Synthetic
  misc_feature (15)..(15): n is a, c, g, or u
gacccuucucggggncgcuu

SEQ ID NO: 79271 - RNA, 20 nt, Artificial Sequence
  Synthetic
gcaauuuccguccgaagguu

SEQ ID NO: 79272 - RNA, 17 nt, Artificial Sequence
  Synthetic
ugguaacagcgguaaaa

SEQ ID NO: 79273 - RNA, 17 nt, Artificial Sequence
  Synthetic
cgacgggacguaaacaa

SEQ ID NO: 79274 - RNA, 17 nt, Artificial Sequence
  Synthetic
uggccguugccgggcaa

SEQ ID NO: 79275 - RNA, 17 nt, Artificial Sequence
  Synthetic
caccucugcacgucgca

SEQ ID NO: 79276 - RNA, 17 nt, Artificial Sequence
  Synthetic
cuucgucugcgaggcga

SEQ ID NO: 79277 - RNA, 17 nt, Artificial Sequence
  Synthetic
ccaaucgccagucagga

SEQ ID NO: 79278 - RNA, 17 nt, Artificial Sequence
  Synthetic
uguaccaaaccuucgga

SEQ ID NO: 79279 - RNA, 17 nt, Artificial Sequence
  Synthetic
cuaggaguuccgcagua

SEQ ID NO: 79280 - RNA, 17 nt, Artificial Sequence
  Synthetic
uuguucagugguucgua

SEQ ID NO: 79281 - RNA, 17 nt, Artificial Sequence
  Synthetic
  misc_feature (6)..(6): n is a, c, g, or u
  misc_feature (9)..(9): n is a, c, g, or u
ccguuncgnccgaccac

SEQ ID NO: 79282 - RNA, 17 nt, Artificial Sequence
  Synthetic
cgggauucagcgccgac

SEQ ID NO: 79283 - RNA, 17 nt, Artificial Sequence
  Synthetic
accuuuaccccguugcc

SEQ ID NO: 79284 - RNA, 17 nt, Artificial Sequence
  Synthetic
cgagaagggucguccgc

SEQ ID NO: 79285 - RNA, 17 nt, Artificial Sequence
  Synthetic
caaaggacgucccgcgc

SEQ ID NO: 79286 - RNA, 17 nt, Artificial Sequence
  Synthetic
cuuguccugguuaucgc

SEQ ID NO: 79287 - RNA, 17 nt, Artificial Sequence
  Synthetic
uuguuagacgacgaggc

SEQ ID NO: 79288 - RNA, 17 nt, Artificial Sequence
  Synthetic
acgcaacccccacuggc

SEQ ID NO: 79289 - RNA, 17 nt, Artificial Sequence
  Synthetic
cgcggacgacccuucuc

SEQ ID NO: 79290 - RNA, 17 nt, Artificial Sequence
  Synthetic
ccuaccuuguuggcguc

SEQ ID NO: 79291 - RNA, 17 nt, Artificial Sequence
  Synthetic
caacgggguaaagguuc

SEQ ID NO: 79292 - RNA, 17 nt, Artificial Sequence
  Synthetic
ccaaggucuuacauaag

SEQ ID NO: 79293 - RNA, 17 nt, Artificial Sequence
  Synthetic
cuccaugcgacgugcag

SEQ ID NO: 79294 - RNA, 17 nt, Artificial Sequence
  Synthetic
  misc_feature (5)..(5): n is a, c, g, or u
  misc_feature (8)..(8): n is a, c, g, or u
cguuncgnccgaccacg

SEQ ID NO: 79295 - RNA, 17 nt, Artificial Sequence
  Synthetic
acuguuguuagacgacg

SEQ ID NO: 79296 - RNA, 17 nt, Artificial Sequence
  Synthetic
ugagaucuucugcgacg

SEQ ID NO: 79297 - RNA, 17 nt, Artificial Sequence
  Synthetic
aagagaggugcgccccg

SEQ ID NO: 79298 - RNA, 17 nt, Artificial Sequence
  Synthetic
ccgagaagggucguccg

SEQ ID NO: 79299 - RNA, 17 nt, Artificial Sequence
  Synthetic
ugagaccuucgucugcg

SEQ ID NO: 79300 - RNA, 17 nt, Artificial Sequence
  Synthetic
cgcagagucuagacucg

SEQ ID NO: 79301 - RNA, 17 nt, Artificial Sequence
  Synthetic
uaucgucaaucuucucg

SEQ ID NO: 79302 - RNA, 17 nt, Artificial Sequence
  Synthetic
uucaccccaccgcacgg

SEQ ID NO: 79303 - RNA, 17 nt, Artificial Sequence
  Synthetic
agagucuagacucgugg

SEQ ID NO: 79304 - RNA, 17 nt, Artificial Sequence
  Synthetic
ucugccgauccauacug

SEQ ID NO: 79305 - RNA, 17 nt, Artificial Sequence
  Synthetic
cacgagucuagacucug

SEQ ID NO: 79306 - RNA, 17 nt, Artificial Sequence
  Synthetic
aaggccuccgugcggug

SEQ ID NO: 79307 - RNA, 17 nt, Artificial Sequence
  Synthetic
acaccgcaaauccagau

SEQ ID NO: 79308 - RNA, 17 nt, Artificial Sequence
  Synthetic
aguuccgcaguauggau

SEQ ID NO: 79309 - RNA, 17 nt, Artificial Sequence
  Synthetic
uugcgucagcaaacacu

SEQ ID NO: 79310 - RNA, 17 nt, Artificial Sequence
  Synthetic
ccgcggacgacccuucu

SEQ ID NO: 79311 - RNA, 17 nt, Artificial Sequence
  Synthetic
cgauaaccaggacaagu

SEQ ID NO: 79312 - RNA, 17 nt, Artificial Sequence
  Synthetic
cuuucccgaccaccagu

SEQ ID NO: 79313 - RNA, 17 nt, Artificial Sequence
  Synthetic
cccgcgcaggauccagu

SEQ ID NO: 79314 - RNA, 17 nt, Artificial Sequence
  Synthetic
cuuuguuuacgucccgu

SEQ ID NO: 79315 - RNA, 17 nt, Artificial Sequence
  Synthetic
ccagacgccaacaaggu

SEQ ID NO: 79316 - RNA, 17 nt, Artificial Sequence
  Synthetic
aaaggccuccgugcggu

SEQ ID NO: 79317 - RNA, 17 nt, Artificial Sequence
  Synthetic
caccgcaaauccagauu

SEQ ID NO: 79318 - RNA, 17 nt, Artificial Sequence
  Synthetic
caaucuucucgaggauu

SEQ ID NO: 79319 - RNA, 17 nt, Artificial Sequence
  Synthetic
uugcuguaccaaaccuu

SEQ ID NO: 79320 - RNA, 17 nt, Artificial Sequence
  Synthetic
auuuccguccgaagguu

SEQ ID NO: 79321 - RNA, 17 nt, Artificial Sequence
  Synthetic
accgcacggaggccuuu

SEQ ID NO: 79322 - RNA, 17 nt, Artificial Sequence
  Synthetic
ccgcacggaggccuuuu

SEQ ID NO: 79323 - RNA, 20 nt, Artificial Sequence
  Synthetic
aauugguaacagcgguaaaa

SEQ ID NO: 79324 - RNA, 20 nt, Artificial Sequence
  Synthetic
ccuacgaaccacugaacaaa

SEQ ID NO: 79325 - RNA, 20 nt, Artificial Sequence
  Synthetic
cgccgacgggacguaaacaa

SEQ ID NO: 79326 - RNA, 20 nt, Artificial Sequence
  Synthetic
uuuaccccguugcccggcaa

SEQ ID NO: 79327 - RNA, 20 nt, Artificial Sequence
  Synthetic
  misc_feature (15)..(15): n is a, c, g, or u
  misc_feature (18)..(18): n is a, c, g, or u
cgccccguggucggncgnaa

SEQ ID NO: 79328 - RNA, 20 nt, Artificial Sequence
  Synthetic
uugggacuucaaucccaaca

SEQ ID NO: 79329 - RNA, 20 nt, Artificial Sequence
  Synthetic
cacuuucucgccaacuuaca

SEQ ID NO: 79330 - RNA, 20 nt, Artificial Sequence
  Synthetic
uguucuccauguucagcgca

SEQ ID NO: 79331 - RNA, 20 nt, Artificial Sequence
  Synthetic
cucccucgccucgcagacga

SEQ ID NO: 79332 - RNA, 20 nt, Artificial Sequence
  Synthetic
uccgcgggauucagcgccga

SEQ ID NO: 79333 - RNA, 20 nt, Artificial Sequence
  Synthetic
caggugcaauuuccguccga

SEQ ID NO: 79334 - RNA, 20 nt, Artificial Sequence
  Synthetic
agguuccacgcaugcgcuga

SEQ ID NO: 79335 - RNA, 20 nt, Artificial Sequence
  Synthetic
agcucuuguucccaagaaua

SEQ ID NO: 79336 - RNA, 20 nt, Artificial Sequence
  Synthetic
acuagauguucuggauaaua

SEQ ID NO: 79337 - RNA, 20 nt, Artificial Sequence
  Synthetic
ccggaaguguugauaagaua

SEQ ID NO: 79338 - RNA, 20 nt, Artificial Sequence
  Synthetic
cggcuaggaguuccgcagua

SEQ ID NO: 79339 - RNA, 20 nt, Artificial Sequence
  Synthetic
cauuuguucagugguucgua

SEQ ID NO: 79340 - RNA, 20 nt, Artificial Sequence
  Synthetic
caaucaauaggccuguuaac

SEQ ID NO: 79341 - RNA, 20 nt, Artificial Sequence
  Synthetic
  misc_feature (9)..(9): n is a, c, g, or u
  misc_feature (12)..(12): n is a, c, g, or u
cugccguuncgnccgaccac

SEQ ID NO: 79342 - RNA, 20 nt, Artificial Sequence
  Synthetic
uuugcugacgcaacccccac

SEQ ID NO: 79343 - RNA, 20 nt, Artificial Sequence
  Synthetic
ccgcgggauucagcgccgac

SEQ ID NO: 79344 - RNA, 20 nt, Artificial Sequence
  Synthetic
  misc_feature (10)..(10): n is a, c, g, or u
aggaccccuncucguguuac

SEQ ID NO: 79345 - RNA, 20 nt, Artificial Sequence
  Synthetic
uggcacuaguaaacugagcc

SEQ ID NO: 79346 - RNA, 20 nt, Artificial Sequence
  Synthetic
cccguugcccggcaacggcc

SEQ ID NO: 79347 - RNA, 20 nt, Artificial Sequence
  Synthetic
uaccuuguuggcgucuggcc

SEQ ID NO: 79348 - RNA, 20 nt, Artificial Sequence
  Synthetic
ugaaccuuuaccccguugcc

SEQ ID NO: 79349 - RNA, 20 nt, Artificial Sequence
  Synthetic
ccccgagaagggucguccgc

SEQ ID NO: 79350 - RNA, 20 nt, Artificial Sequence
  Synthetic
aaacaaaggacgucccgcgc

SEQ ID NO: 79351 - RNA, 20 nt, Artificial Sequence
  Synthetic
caacuuguccugguuaucgc

SEQ ID NO: 79352 - RNA, 20 nt, Artificial Sequence
  Synthetic
uuacacacucuauggaaggc

SEQ ID NO: 79353 - RNA, 20 nt, Artificial Sequence
  Synthetic
cuguuguuagacgacgaggc

SEQ ID NO: 79354 - RNA, 20 nt, Artificial Sequence
  Synthetic
cugacgcaacccccacuggc

SEQ ID NO: 79355 - RNA, 20 nt, Artificial Sequence
  Synthetic
ucgcagaagaucucaaucuc

SEQ ID NO: 79356 - RNA, 20 nt, Artificial Sequence
  Synthetic
ucccgcggacgacccuucuc

SEQ ID NO: 79357 - RNA, 20 nt, Artificial Sequence
  Synthetic
uguuuugcucgcagcagguc

SEQ ID NO: 79358 - RNA, 20 nt, Artificial Sequence
  Synthetic
cuaauaugggccuaaaguuc

SEQ ID NO: 79359 - RNA, 20 nt, Artificial Sequence
  Synthetic
caugaccaagccccagccag

SEQ ID NO: 79360 - RNA, 20 nt, Artificial Sequence
  Synthetic
uccgcaguauggaucggcag

SEQ ID NO: 79361 - RNA, 20 nt, Artificial Sequence
  Synthetic
cggggaguccgcguaaagag

SEQ ID NO: 79362 - RNA, 20 nt, Artificial Sequence
  Synthetic
ucggaaaauuccuaugggag

SEQ ID NO: 79363 - RNA, 20 nt, Artificial Sequence
  Synthetic
cggaaguguugauaagauag

SEQ ID NO: 79364 - RNA, 20 nt, Artificial Sequence
  Synthetic
  misc_feature (8)..(8): n is a, c, g, or u
  misc_feature (11)..(11): n is a, c, g, or u
ugccguuncgnccgaccacg

SEQ ID NO: 79365 - RNA, 20 nt, Artificial Sequence
  Synthetic
acuacuguuguuagacgacg

SEQ ID NO: 79366 - RNA, 20 nt, Artificial Sequence
  Synthetic
cccgucggcgcugaaucccg

SEQ ID NO: 79367 - RNA, 20 nt, Artificial Sequence
  Synthetic
augggccaucagcgcaugcg

SEQ ID NO: 79368 - RNA, 20 nt, Artificial Sequence
  Synthetic
uaccgcagagucuagacucg

SEQ ID NO: 79369 - RNA, 20 nt, Artificial Sequence
  Synthetic
cccgcggacgacccuucucg

SEQ ID NO: 79370 - RNA, 20 nt, Artificial Sequence
  Synthetic
agguuugguacagcaacagg

SEQ ID NO: 79371 - RNA, 20 nt, Artificial Sequence
  Synthetic
  misc_feature (7)..(7): n is a, c, g, or u
accccuncucguguuacagg

SEQ ID NO: 79372 - RNA, 20 nt, Artificial Sequence
  Synthetic
acuucucucaauuuucuagg

SEQ ID NO: 79373 - RNA, 20 nt, Artificial Sequence
  Synthetic
cgcagagucuagacucgugg

SEQ ID NO: 79374 - RNA, 20 nt, Artificial Sequence
  Synthetic
cgauaaccaggacaaguugg

SEQ ID NO: 79375 - RNA, 20 nt, Artificial Sequence
  Synthetic
uccucugccgauccauacug

SEQ ID NO: 79376 - RNA, 20 nt, Artificial Sequence
  Synthetic
caccacgagucuagacucug

SEQ ID NO: 79377 - RNA, 20 nt, Artificial Sequence
  Synthetic
auuuggugucuuucggagug

SEQ ID NO: 79378 - RNA, 20 nt, Artificial Sequence
  Synthetic
cuagacucugcgguauugug

SEQ ID NO: 79379 - RNA, 20 nt, Artificial Sequence
  Synthetic
aaugucaacgaccgaccuug

SEQ ID NO: 79380 - RNA, 20 nt, Artificial Sequence
  Synthetic
  misc_feature (5)..(5): n is a, c, g, or u
acacnuagcgccucauuuug

SEQ ID NO: 79381 - RNA, 20 nt, Artificial Sequence
  Synthetic
aggaggcuguaggcauaaau

SEQ ID NO: 79382 - RNA, 20 nt, Artificial Sequence
  Synthetic
acuggcuggggcuuggucau

SEQ ID NO: 79383 - RNA, 20 nt, Artificial Sequence
  Synthetic
caaacaccgcaaauccagau

SEQ ID NO: 79384 - RNA, 20 nt, Artificial Sequence
  Synthetic
aggaguuccgcaguauggau

SEQ ID NO: 79385 - RNA, 20 nt, Artificial Sequence
  Synthetic
  misc_feature (14)..(14): n is a, c, g, or u
uuccgaaagcccangaugau

SEQ ID NO: 79386 - RNA, 20 nt, Artificial Sequence
  Synthetic
acaggagguuggugagugau

SEQ ID NO: 79387 - RNA, 20 nt, Artificial Sequence
  Synthetic
uuauauggaugaugugguau

SEQ ID NO: 79388 - RNA, 20 nt, Artificial Sequence
  Synthetic
ugcgagcaaaacaagcggcu

SEQ ID NO: 79389 - RNA, 20 nt, Artificial Sequence
  Synthetic
ugacgcaacccccacuggcu

SEQ ID NO: 79390 - RNA, 20 nt, Artificial Sequence
  Synthetic
cagcgauaaccaggacaagu

SEQ ID NO: 79391 - RNA, 20 nt, Artificial Sequence
  Synthetic
cacagaaaggccuuguaagu

SEQ ID NO: 79392 - RNA, 20 nt, Artificial Sequence
  Synthetic
cgucccgcgcaggauccagu

SEQ ID NO: 79393 - RNA, 20 nt, Artificial Sequence
  Synthetic
cggaaaauuccuaugggagu

SEQ ID NO: 79394 - RNA, 20 nt, Artificial Sequence
  Synthetic
ccauuuguucagugguucgu

SEQ ID NO: 79395 - RNA, 20 nt, Artificial Sequence
  Synthetic
uggccagacgccaacaaggu

SEQ ID NO: 79396 - RNA, 20 nt, Artificial Sequence
  Synthetic
auuccuuggacucauaaggu

SEQ ID NO: 79397 - RNA, 20 nt, Artificial Sequence
  Synthetic
ccaaaaggccuccgugcggu

SEQ ID NO: 79398 - RNA, 20 nt, Artificial Sequence
  Synthetic
aaacaccgcaaauccagauu

SEQ ID NO: 79399 - RNA, 20 nt, Artificial Sequence
  Synthetic
cgucaaucuucucgaggauu

SEQ ID NO: 79400 - RNA, 20 nt, Artificial Sequence
  Synthetic
cuguugcuguaccaaaccuu

SEQ ID NO: 79401 - RNA, 20 nt, Artificial Sequence
  Synthetic
uagggcuuucccccacuguu

SEQ ID NO: 79402 - RNA, 20 nt, Artificial Sequence
  Synthetic
cccaccgcacggaggccuuu

SEQ ID NO: 79403 - RNA, 17 nt, Artificial Sequence
  Synthetic
gguaacagcgguaaaaa

SEQ ID NO: 79404 - RNA, 17 nt, Artificial Sequence
  Synthetic
gagggcuccaccccaaa

SEQ ID NO: 79405 - RNA, 17 nt, Artificial Sequence
  Synthetic
ggaugaguguuucucaa

SEQ ID NO: 79406 - RNA, 17 nt, Artificial Sequence
  Synthetic
guauuguuuacacagaa

SEQ ID NO: 79407 - RNA, 17 nt, Artificial Sequence
  Synthetic
ggacuucaaucccaaca

SEQ ID NO: 79408 - RNA, 17 nt, Artificial Sequence
  Synthetic
ggacccugcgcugaaca

SEQ ID NO: 79409 - RNA, 17 nt, Artificial Sequence
  Synthetic
gugaagcgaagugcaca

SEQ ID NO: 79410 - RNA, 17 nt, Artificial Sequence
  Synthetic
  misc_feature (7)..(7): n is a, c, g, or u
  misc_feature (10)..(10): n is a, c, g, or u
gccguuncgnccgacca

SEQ ID NO: 79411 - RNA, 17 nt, Artificial Sequence
  Synthetic
gcacagccuagcagcca

SEQ ID NO: 79412 - RNA, 17 nt, Artificial Sequence
  Synthetic
gaacaagagcuacagca

SEQ ID NO: 79413 - RNA, 17 nt, Artificial Sequence
  Synthetic
  misc_feature (3)..(3): n is a, c, g, or u
ggnuucaccccaccgca

SEQ ID NO: 79414 - RNA, 17 nt, Artificial Sequence
  Synthetic
gaggugaaaaaguugca

SEQ ID NO: 79415 - RNA, 17 nt, Artificial Sequence
  Synthetic
guucuucuggacuauca

SEQ ID NO: 79416 - RNA, 17 nt, Artificial Sequence
  Synthetic
  misc_feature (3)..(4): n is a, c, g, or u
gannuggugggcguuca

SEQ ID NO: 79417 - RNA, 17 nt, Artificial Sequence
  Synthetic
gaaggaaagaagucaga

SEQ ID NO: 79418 - RNA, 17 nt, Artificial Sequence
  Synthetic
  misc_feature (2)..(2): n is a, c, g, or u
gnaacggcagacggaga

SEQ ID NO: 79419 - RNA, 17 nt, Artificial Sequence
  Synthetic
gaaguguugauaagaua

SEQ ID NO: 79420 - RNA, 17 nt, Artificial Sequence
  Synthetic
gcuccaaauucuuuaua

SEQ ID NO: 79421 - RNA, 17 nt, Artificial Sequence
  Synthetic
ggaauuagaggacaaac

SEQ ID NO: 79422 - RNA, 17 nt, Artificial Sequence
  Synthetic
ggccguugccgggcaac

SEQ ID NO: 79423 - RNA, 17 nt, Artificial Sequence
  Synthetic
  misc_feature (4)..(4): n is a, c, g, or u
gagncaguagucggaac

SEQ ID NO: 79424 - RNA, 17 nt, Artificial Sequence
  Synthetic
guuuacuguuccugaac

SEQ ID NO: 79425 - RNA, 17 nt, Artificial Sequence
  Synthetic
gaaaacuuccuguuaac

SEQ ID NO: 79426 - RNA, 17 nt, Artificial Sequence
  Synthetic
gaugagaaggcacagac

SEQ ID NO: 79427 - RNA, 17 nt, Artificial Sequence
  Synthetic
guuuguccucuaauucc

SEQ ID NO: 79428 - RNA, 17 nt, Artificial Sequence
  Synthetic
gaacuggagccaccagc

SEQ ID NO: 79429 - RNA, 17 nt, Artificial Sequence
  Synthetic
gccaacaagguaggagc

SEQ ID NO: 79430 - RNA, 17 nt, Artificial Sequence
  Synthetic
guguuugcucugaaggc

SEQ ID NO: 79431 - RNA, 17 nt, Artificial Sequence
  Synthetic
ggccuguauuucccugc

SEQ ID NO: 79432 - RNA, 17 nt, Artificial Sequence
  Synthetic
  misc_feature (11)..(11): n is a, c, g, or u
  misc_feature (14)..(14): n is a, c, g, or u
ggcaagcaauncunugc

SEQ ID NO: 79433 - RNA, 17 nt, Artificial Sequence
  Synthetic
gaaucccagaggauugc

SEQ ID NO: 79434 - RNA, 17 nt, Artificial Sequence
  Synthetic
gcaggaggcggauuugc

SEQ ID NO: 79435 - RNA, 17 nt, Artificial Sequence
  Synthetic
gagaaacacucauccuc

SEQ ID NO: 79436 - RNA, 17 nt, Artificial Sequence
  Synthetic
guggagcccucaggcuc

SEQ ID NO: 79437 - RNA, 17 nt, Artificial Sequence
  Synthetic
ggauccaacuggugguc

SEQ ID NO: 79438 - RNA, 17 nt, Artificial Sequence
  Synthetic
gcugguggcuccaguuc

SEQ ID NO: 79439 - RNA, 17 nt, Artificial Sequence
  Synthetic
gcugcgagcaaaacaag

SEQ ID NO: 79440 - RNA, 17 nt, Artificial Sequence
  Synthetic
gaccaagccccagccag

SEQ ID NO: 79441 - RNA, 17 nt, Artificial Sequence
  Synthetic
gaaaauuccuaugggag

SEQ ID NO: 79442 - RNA, 17 nt, Artificial Sequence
  Synthetic
  misc_feature (15)..(15): n is a, c, g, or u
gccuguaacacgagnag

SEQ ID NO: 79443 - RNA, 17 nt, Artificial Sequence
  Synthetic
gggaguucuucuucuag

SEQ ID NO: 79444 - RNA, 17 nt, Artificial Sequence
  Synthetic
  misc_feature (3)..(3): n is a, c, g, or u
gangauccuggaauuag

SEQ ID NO: 79445 - RNA, 17 nt, Artificial Sequence
  Synthetic
gccguugccgggcaacg

SEQ ID NO: 79446 - RNA, 17 nt, Artificial Sequence
  Synthetic
  misc_feature (10)..(10): n is a, c, g, or u
gacucuagcnaccuggg

SEQ ID NO: 79447 - RNA, 17 nt, Artificial Sequence
  Synthetic
gguuggugagugauugg

SEQ ID NO: 79448 - RNA, 17 nt, Artificial Sequence
  Synthetic
ggaugaugugguauugg

SEQ ID NO: 79449 - RNA, 17 nt, Artificial Sequence
  Synthetic
gaucuugcagaguuugg

SEQ ID NO: 79450 - RNA, 17 nt, Artificial Sequence
  Synthetic
gccccuuuuacacaaug

SEQ ID NO: 79451 - RNA, 17 nt, Artificial Sequence
  Synthetic
  misc_feature (3)..(3): n is a, c, g, or u
gangguguuuuccaaug

SEQ ID NO: 79452 - RNA, 17 nt, Artificial Sequence
  Synthetic
gaaccaacaagaagaug

SEQ ID NO: 79453 - RNA, 17 nt, Artificial Sequence
  Synthetic
gcaacccccacuggcug

SEQ ID NO: 79454 - RNA, 17 nt, Artificial Sequence
  Synthetic
gucccaaucuggauuug

SEQ ID NO: 79455 - RNA, 17 nt, Artificial Sequence
  Synthetic
gaaacgauguauauuug

SEQ ID NO: 79456 - RNA, 17 nt, Artificial Sequence
  Synthetic
ggcuggggcuuggucau

SEQ ID NO: 79457 - RNA, 17 nt, Artificial Sequence
  Synthetic
ggaaguguugauaagau

SEQ ID NO: 79458 - RNA, 17 nt, Artificial Sequence
  Synthetic
  misc_feature (6)..(6): n is a, c, g, or u
gcccangaugaugggau

SEQ ID NO: 79459 - RNA, 17 nt, Artificial Sequence
  Synthetic
ggagguuggugagugau

SEQ ID NO: 79460 - RNA, 17 nt, Artificial Sequence
  Synthetic
gccuccaagcugugccu

SEQ ID NO: 79461 - RNA, 17 nt, Artificial Sequence
  Synthetic
gagcaaaacaagcggcu

SEQ ID NO: 79462 - RNA, 17 nt, Artificial Sequence
  Synthetic
gcuggagcauucgggcu

SEQ ID NO: 79463 - RNA, 17 nt, Artificial Sequence
  Synthetic
  misc_feature (10)..(10): n is a, c, g, or u
  misc_feature (13)..(13): n is a, c, g, or u
gcaagcaauncunugcu

SEQ ID NO: 79464 - RNA, 17 nt, Artificial Sequence
  Synthetic
gcagaagaucucaaucu

SEQ ID NO: 79465 - RNA, 17 nt, Artificial Sequence
  Synthetic
  misc_feature (3)..(3): n is a, c, g, or u
  misc_feature (6)..(6): n is a, c, g, or u
ggnacnaccgugugucu

SEQ ID NO: 79466 - RNA, 17 nt, Artificial Sequence
  Synthetic
gagggaguucuucuucu

SEQ ID NO: 79467 - RNA, 17 nt, Artificial Sequence
  Synthetic
gaaguaugccucaaggu

SEQ ID NO: 79468 - RNA, 17 nt, Artificial Sequence
  Synthetic
guuggaggacaggaggu

SEQ ID NO: 79469 - RNA, 17 nt, Artificial Sequence
  Synthetic
ggugagugauuggaggu

SEQ ID NO: 79470 - RNA, 17 nt, Artificial Sequence
  Synthetic
  misc_feature (12)..(12): n is a, c, g, or u
gguggagacagnggggu

SEQ ID NO: 79471 - RNA, 17 nt, Artificial Sequence
  Synthetic
gaggugcgccccguggu

SEQ ID NO: 79472 - RNA, 17 nt, Artificial Sequence
  Synthetic
  misc_feature (3)..(3): n is a, c, g, or u
  misc_feature (12)..(12): n is a, c, g, or u
gunugucaacgnauugu

SEQ ID NO: 79473 - RNA, 17 nt, Artificial Sequence
  Synthetic
  misc_feature (3)..(3): n is a, c, g, or u
ganccuuauaaagaauu

SEQ ID NO: 79474 - RNA, 17 nt, Artificial Sequence
  Synthetic
guaggagcuggagcauu

SEQ ID NO: 79475 - RNA, 17 nt, Artificial Sequence
  Synthetic
gauaagauaggggcauu

SEQ ID NO: 79476 - RNA, 17 nt, Artificial Sequence
  Synthetic
gugagugauuggagguu

SEQ ID NO: 79477 - RNA, 17 nt, Artificial Sequence
  Synthetic
  misc_feature (8)..(8): n is a, c, g, or u
  misc_feature (14)..(14): n is a, c, g, or u
guaaauanugucunguu

SEQ ID NO: 79478 - RNA, 17 nt, Artificial Sequence
  Synthetic
ggccagguguccuuguu

SEQ ID NO: 79479 - RNA, 17 nt, Artificial Sequence
  Synthetic
gugccuuggguggcuuu

SEQ ID NO: 79480 - RNA, 17 nt, Artificial Sequence
  Synthetic
gaguauuuggugucuuu

SEQ ID NO: 79481 - RNA, 20 nt, Artificial Sequence
  Synthetic
gauaaccacauuguguaaaa

SEQ ID NO: 79482 - RNA, 20 nt, Artificial Sequence
  Synthetic
guaaacugagccaggagaaa

SEQ ID NO: 79483 - RNA, 20 nt, Artificial Sequence
  Synthetic
  misc_feature (3)..(3): n is a, c, g, or u
  misc_feature (12)..(12): n is a, c, g, or u
ganugaauacangcauacaa

SEQ ID NO: 79484 - RNA, 20 nt, Artificial Sequence
  Synthetic
  misc_feature (18)..(18): n is a, c, g, or u
gguuuaauacccuuaucnaa

SEQ ID NO: 79485 - RNA, 20 nt, Artificial Sequence
  Synthetic
  misc_feature (17)..(18): n is a, c, g, or u
gaucggcagaggagccnnaa

SEQ ID NO: 79486 - RNA, 20 nt, Artificial Sequence
  Synthetic
  misc_feature (6)..(6): n is a, c, g, or u
gagagncaguagucggaaca

SEQ ID NO: 79487 - RNA, 20 nt, Artificial Sequence
  Synthetic
gaggugaagcgaagugcaca

SEQ ID NO: 79488 - RNA, 20 nt, Artificial Sequence
  Synthetic
gcagcacagccuagcagcca

SEQ ID NO: 79489 - RNA, 20 nt, Artificial Sequence
  Synthetic
gcaaauauacaucguuucca

SEQ ID NO: 79490 - RNA, 20 nt, Artificial Sequence
  Synthetic
gcagaggugaaaaaguugca

SEQ ID NO: 79491 - RNA, 20 nt, Artificial Sequence
  Synthetic
ggguggagcccucaggcuca

SEQ ID NO: 79492 - RNA, 20 nt, Artificial Sequence
  Synthetic
ggcagaugagaaggcacaga

SEQ ID NO: 79493 - RNA, 20 nt, Artificial Sequence
  Synthetic
  misc_feature (2)..(2): n is a, c, g, or u
  misc_feature (5)..(5): n is a, c, g, or u
gncgnaacggcagacggaga

SEQ ID NO: 79494 - RNA, 20 nt, Artificial Sequence
  Synthetic
gguuugguacagcaacagga

SEQ ID NO: 79495 - RNA, 20 nt, Artificial Sequence
  Synthetic
  misc_feature (10)..(10): n is a, c, g, or u
gaaagcccangaugauggga

SEQ ID NO: 79496 - RNA, 20 nt, Artificial Sequence
  Synthetic
  misc_feature (4)..(4): n is a, c, g, or u
guanuaugcccugagccuga

SEQ ID NO: 79497 - RNA, 20 nt, Artificial Sequence
  Synthetic
  misc_feature (11)..(11): n is a, c, g, or u
  misc_feature (14)..(14): n is a, c, g, or u
  misc_feature (19)..(19): n is a, c, g, or u
ggguuacucunuanauuuna

SEQ ID NO: 79498 - RNA, 20 nt, Artificial Sequence
  Synthetic
  misc_feature (2)..(2): n is a, c, g, or u
gnagcuccaaauucuuuaua

SEQ ID NO: 79499 - RNA, 20 nt, Artificial Sequence
  Synthetic
gggcuuucggaaaauuccua

SEQ ID NO: 79500 - RNA, 20 nt, Artificial Sequence
  Synthetic
  misc_feature (5)..(5): n is a, c, g, or u
gacanuauuuacacacucua

SEQ ID NO: 79501 - RNA, 20 nt, Artificial Sequence
  Synthetic
  misc_feature (3)..(3): n is a, c, g, or u
ggnuaugucauuggauguua

SEQ ID NO: 79502 - RNA, 20 nt, Artificial Sequence
  Synthetic
gcagaugagaaggcacagac

SEQ ID NO: 79503 - RNA, 20 nt, Artificial Sequence
  Synthetic
ggguaggcugccuuccugac

SEQ ID NO: 79504 - RNA, 20 nt, Artificial Sequence
  Synthetic
gcaaacacuuggcacagacc

SEQ ID NO: 79505 - RNA, 20 nt, Artificial Sequence
  Synthetic
gggccucagcccguuucucc

SEQ ID NO: 79506 - RNA, 20 nt, Artificial Sequence
  Synthetic
  misc_feature (9)..(9): n is a, c, g, or u
gcauacaanggcauuaaagc

SEQ ID NO: 79507 - RNA, 20 nt, Artificial Sequence
  Synthetic
  misc_feature (6)..(6): n is a, c, g, or u
gcauungguggucuauaagc

SEQ ID NO: 79508 - RNA, 20 nt, Artificial Sequence
  Synthetic
gacgccaacaagguaggagc

SEQ ID NO: 79509 - RNA, 20 nt, Artificial Sequence
  Synthetic
gcgguguuugcucugaaggc

SEQ ID NO: 79510 - RNA, 20 nt, Artificial Sequence
  Synthetic
  misc_feature (15)..(15): n is a, c, g, or u
  misc_feature (18)..(18): n is a, c, g, or u
gacuggcgauuggungangc

SEQ ID NO: 79511 - RNA, 20 nt, Artificial Sequence
  Synthetic
  misc_feature (17)..(18): n is a, c, g, or u
gguucugcauggucccnngc

SEQ ID NO: 79512 - RNA, 20 nt, Artificial Sequence
  Synthetic
gucugugccuucucaucugc

SEQ ID NO: 79513 - RNA, 20 nt, Artificial Sequence
  Synthetic
gugaaaaaguugcauggugc

SEQ ID NO: 79514 - RNA, 20 nt, Artificial Sequence
  Synthetic
ggcacagaccuggccguugc

SEQ ID NO: 79515 - RNA, 20 nt, Artificial Sequence
  Synthetic
  misc_feature (3)..(3): n is a, c, g, or u
gangcaggaggcggauuugc

SEQ ID NO: 79516 - RNA, 20 nt, Artificial Sequence
  Synthetic
  misc_feature (19)..(19): n is a, c, g, or u
gaaauacaggccucucacnc

SEQ ID NO: 79517 - RNA, 20 nt, Artificial Sequence
  Synthetic
gggguggagcccucaggcuc

SEQ ID NO: 79518 - RNA, 20 nt, Artificial Sequence
  Synthetic
  misc_feature (3)..(3): n is a, c, g, or u
  misc_feature (6)..(6): n is a, c, g, or u
gcnucnaccaaucgccaguc

SEQ ID NO: 79519 - RNA, 20 nt, Artificial Sequence
  Synthetic
  misc_feature (18)..(18): n is a, c, g, or u
ggucuggagcaaacauunuc

SEQ ID NO: 79520 - RNA, 20 nt, Artificial Sequence
  Synthetic
ggcauagcagcaggaugaag

SEQ ID NO: 79521 - RNA, 20 nt, Artificial Sequence
  Synthetic
gcaacaggagggauacauag

SEQ ID NO: 79522 - RNA, 20 nt, Artificial Sequence
  Synthetic
gacuucucucaauuuucuag

SEQ ID NO: 79523 - RNA, 20 nt, Artificial Sequence
  Synthetic
  misc_feature (6)..(6): n is a, c, g, or u
guugangauccuggaauuag

SEQ ID NO: 79524 - RNA, 20 nt, Artificial Sequence
  Synthetic
gcugccaacuggauccugcg

SEQ ID NO: 79525 - RNA, 20 nt, Artificial Sequence
  Synthetic
ggaugaguguuucucaaagg

SEQ ID NO: 79526 - RNA, 20 nt, Artificial Sequence
  Synthetic
  misc_feature (3)..(3): n is a, c, g, or u
ggnuucaccccaccgcacgg

SEQ ID NO: 79527 - RNA, 20 nt, Artificial Sequence
  Synthetic
  misc_feature (3)..(4): n is a, c, g, or u
gannuggugggcguucacgg

SEQ ID NO: 79528 - RNA, 20 nt, Artificial Sequence
  Synthetic
  misc_feature (10)..(10): n is a, c, g, or u
  misc_feature (13)..(13): n is a, c, g, or u
gcaagcaauncunugcuggg

SEQ ID NO: 79529 - RNA, 20 nt, Artificial Sequence
  Synthetic
  misc_feature (18)..(18): n is a, c, g, or u
gauaagauaggggcauungg

SEQ ID NO: 79530 - RNA, 20 nt, Artificial Sequence
  Synthetic
  misc_feature (11)..(11): n is a, c, g, or u
  misc_feature (14)..(14): n is a, c, g, or u
ggcaagcaauncunugcugg

SEQ ID NO: 79531 - RNA, 20 nt, Artificial Sequence
  Synthetic
gaaucccagaggauugcugg

SEQ ID NO: 79532 - RNA, 20 nt, Artificial Sequence
  Synthetic
gaccaagccccagccagugg

SEQ ID NO: 79533 - RNA, 20 nt, Artificial Sequence
  Synthetic
ggagguuggugagugauugg

SEQ ID NO: 79534 - RNA, 20 nt, Artificial Sequence
  Synthetic
gcugccccuuuuacacaaug

SEQ ID NO: 79535 - RNA, 20 nt, Artificial Sequence
  Synthetic
ggaacaagagcuacagcaug

SEQ ID NO: 79536 - RNA, 20 nt, Artificial Sequence
  Synthetic
gaagaaccaacaagaagaug

SEQ ID NO: 79537 - RNA, 20 nt, Artificial Sequence
  Synthetic
  misc_feature (4)..(4): n is a, c, g, or u
  misc_feature (13)..(13): n is a, c, g, or u
ggcnucccgauanagagcug

SEQ ID NO: 79538 - RNA, 20 nt, Artificial Sequence
  Synthetic
gagccaggagaaacgggcug

SEQ ID NO: 79539 - RNA, 20 nt, Artificial Sequence
  Synthetic
  misc_feature (7)..(7): n is a, c, g, or u
  misc_feature (16)..(16): n is a, c, g, or u
gaaagunugucaacgnauug

SEQ ID NO: 79540 - RNA, 20 nt, Artificial Sequence
  Synthetic
gaagucccaaucuggauuug

SEQ ID NO: 79541 - RNA, 20 nt, Artificial Sequence
  Synthetic
  misc_feature (20)..(20): n is a, c, g, or u
guauucccaucccaucaucn

SEQ ID NO: 79542 - RNA, 20 nt, Artificial Sequence
  Synthetic
  misc_feature (19)..(20): n is a, c, g, or u
guaagaccuugggcaagann

SEQ ID NO: 79543 - RNA, 20 nt, Artificial Sequence
  Synthetic
  misc_feature (6)..(6): n is a, c, g, or u
  misc_feature (12)..(12): n is a, c, g, or u
  misc_feature (19)..(20): n is a, c, g, or u
ggaucnucaacnaccagcnn

SEQ ID NO: 79544 - RNA, 20 nt, Artificial Sequence
  Synthetic
gggcugaggcccacucccau

SEQ ID NO: 79545 - RNA, 20 nt, Artificial Sequence
  Synthetic
  misc_feature (10)..(10): n is a, c, g, or u
  misc_feature (13)..(13): n is a, c, g, or u
  misc_feature (18)..(18): n is a, c, g, or u
gguuacucunuanauuunau

SEQ ID NO: 79546 - RNA, 20 nt, Artificial Sequence
  Synthetic
  misc_feature (2)..(2): n is a, c, g, or u
gnuaugucauuggauguuau

SEQ ID NO: 79547 - RNA, 20 nt, Artificial Sequence
  Synthetic
  misc_feature (11)..(11): n is a, c, g, or u
guaacacgagnagggguccu

SEQ ID NO: 79548 - RNA, 20 nt, Artificial Sequence
  Synthetic
gucuuacauaagaggacucu

SEQ ID NO: 79549 - RNA, 20 nt, Artificial Sequence
  Synthetic
  misc_feature (6)..(6): n is a, c, g, or u
  misc_feature (9)..(9): n is a, c, g, or u
gggggnacnaccgugugucu

SEQ ID NO: 79550 - RNA, 20 nt, Artificial Sequence
  Synthetic
ggcgagggaguucuucuucu

SEQ ID NO: 79551 - RNA, 20 nt, Artificial Sequence
  Synthetic
  misc_feature (7)..(7): n is a, c, g, or u
guuuaangacugggaggagu

SEQ ID NO: 79552 - RNA, 20 nt, Artificial Sequence
  Synthetic
  misc_feature (5)..(5): n is a, c, g, or u
  misc_feature (7)..(7): n is a, c, g, or u
  misc_feature (13)..(13): n is a, c, g, or u
gauangngagagncaguagu

SEQ ID NO: 79553 - RNA, 20 nt, Artificial Sequence
  Synthetic
guuggugagugauuggaggu

SEQ ID NO: 79554 - RNA, 20 nt, Artificial Sequence
  Synthetic
ggcuggauccaacugguggu

SEQ ID NO: 79555 - RNA, 20 nt, Artificial Sequence
  Synthetic
  misc_feature (15)..(16): n is a, c, g, or u
gaccuugggcaagannuggu

SEQ ID NO: 79556 - RNA, 20 nt, Artificial Sequence
  Synthetic
gucuggccagguguccuugu

SEQ ID NO: 79557 - RNA, 20 nt, Artificial Sequence
  Synthetic
gcuaugccucaucuucuugu

SEQ ID NO: 79558 - RNA, 20 nt, Artificial Sequence
  Synthetic
guugauaagauaggggcauu

SEQ ID NO: 79559 - RNA, 20 nt, Artificial Sequence
  Synthetic
gacaugaacaagagaugauu

SEQ ID NO: 79560 - RNA, 20 nt, Artificial Sequence
  Synthetic
  misc_feature (3)..(3): n is a, c, g, or u
  misc_feature (18)..(18): n is a, c, g, or u
ggnaaauauuugguaacnuu

SEQ ID NO: 79561 - RNA, 20 nt, Artificial Sequence
  Synthetic
gcugugccuuggguggcuuu

SEQ ID NO: 79562 - RNA, 17 nt, Artificial Sequence
  Synthetic
aaccacauuguguaaaa

SEQ ID NO: 79563 - RNA, 17 nt, Artificial Sequence
  Synthetic
acgaaccacugaacaaa

SEQ ID NO: 79564 - RNA, 17 nt, Artificial Sequence
  Synthetic
uggaauuagaggacaaa

SEQ ID NO: 79565 - RNA, 17 nt, Artificial Sequence
  Synthetic
aacugagccaggagaaa

SEQ ID NO: 79566 - RNA, 17 nt, Artificial Sequence
  Synthetic
uaaccacauuguguaaa

SEQ ID NO: 79567 - RNA, 17 nt, Artificial Sequence
  Synthetic
  misc_feature (9)..(9): n is a, c, g, or u
ugaauacangcauacaa

SEQ ID NO: 79568 - RNA, 17 nt, Artificial Sequence
  Synthetic
accccguugcccggcaa

SEQ ID NO: 79569 - RNA, 17 nt, Artificial Sequence
  Synthetic
  misc_feature (8)..(8): n is a, c, g, or u
ccaagcgnccccgagaa

SEQ ID NO: 79570 - RNA, 17 nt, Artificial Sequence
  Synthetic
  misc_feature (1)..(1): n is a, c, g, or u
naacggcagacggagaa

SEQ ID NO: 79571 - RNA, 17 nt, Artificial Sequence
  Synthetic
  misc_feature (15)..(15): n is a, c, g, or u
uuaauacccuuaucnaa

SEQ ID NO: 79572 - RNA, 17 nt, Artificial Sequence
  Synthetic
  misc_feature (12)..(12): n is a, c, g, or u
  misc_feature (15)..(15): n is a, c, g, or u
cccguggucggncgnaa

SEQ ID NO: 79573 - RNA, 17 nt, Artificial Sequence
  Synthetic
  misc_feature (14)..(15): n is a, c, g, or u
cggcagaggagccnnaa

SEQ ID NO: 79574 - RNA, 17 nt, Artificial Sequence
  Synthetic
  misc_feature (6)..(6): n is a, c, g, or u
  misc_feature (12)..(12): n is a, c, g, or u
uauuunccauungauaa

SEQ ID NO: 79575 - RNA, 17 nt, Artificial Sequence
  Synthetic
cuggccagacgccaaca

SEQ ID NO: 79576 - RNA, 17 nt, Artificial Sequence
  Synthetic
  misc_feature (3)..(3): n is a, c, g, or u
agncaguagucggaaca

SEQ ID NO: 79577 - RNA, 17 nt, Artificial Sequence
  Synthetic
auuuuggccaagacaca

SEQ ID NO: 79578 - RNA, 17 nt, Artificial Sequence
  Synthetic
uuucucgccaacuuaca

SEQ ID NO: 79579 - RNA, 17 nt, Artificial Sequence
  Synthetic
  misc_feature (3)..(3): n is a, c, g, or u
  misc_feature (6)..(6): n is a, c, g, or u
ugnccnaaagccaccca

SEQ ID NO: 79580 - RNA, 17 nt, Artificial Sequence
  Synthetic
  misc_feature (7)..(8): n is a, c, g, or u
ccaccannucuugccca

SEQ ID NO: 79581 - RNA, 17 nt, Artificial Sequence
  Synthetic
cccaccuuaugagucca

SEQ ID NO: 79582 - RNA, 17 nt, Artificial Sequence
  Synthetic
aauauacaucguuucca

SEQ ID NO: 79583 - RNA, 17 nt, Artificial Sequence
  Synthetic
aacuggagccaccagca

SEQ ID NO: 79584 - RNA, 17 nt, Artificial Sequence
  Synthetic
ucuccauguucagcgca

SEQ ID NO: 79585 - RNA, 17 nt, Artificial Sequence
  Synthetic
  misc_feature (12)..(12): n is a, c, g, or u
  misc_feature (15)..(15): n is a, c, g, or u
uggguggcuuunggnca

SEQ ID NO: 79586 - RNA, 17 nt, Artificial Sequence
  Synthetic
cuuugaaguaugccuca

SEQ ID NO: 79587 - RNA, 17 nt, Artificial Sequence
  Synthetic
uggagcccucaggcuca

SEQ ID NO: 79588 - RNA, 17 nt, Artificial Sequence
  Synthetic
uggcuggggcuugguca

SEQ ID NO: 79589 - RNA, 17 nt, Artificial Sequence
  Synthetic
  misc_feature (10)..(10): n is a, c, g, or u
  misc_feature (14)..(14): n is a, c, g, or u
ugcacgacuncugnuca

SEQ ID NO: 79590 - RNA, 17 nt, Artificial Sequence
  Synthetic
uguauauuaggaaaaga

SEQ ID NO: 79591 - RNA, 17 nt, Artificial Sequence
  Synthetic
  misc_feature (11)..(11): n is a, c, g, or u
cuaacaaaacnaaaaga

SEQ ID NO: 79592 - RNA, 17 nt, Artificial Sequence
  Synthetic
agaugagaaggcacaga

SEQ ID NO: 79593 - RNA, 17 nt, Artificial Sequence
  Synthetic
  misc_feature (5)..(5): n is a, c, g, or u
  misc_feature (8)..(8): n is a, c, g, or u
ucggncgnaacggcaga

SEQ ID NO: 79594 - RNA, 17 nt, Artificial Sequence
  Synthetic
  misc_feature (9)..(9): n is a, c, g, or u
cccaagcgnccccgaga

SEQ ID NO: 79595 - RNA, 17 nt, Artificial Sequence
  Synthetic
cgguccggcagaugaga

SEQ ID NO: 79596 - RNA, 17 nt, Artificial Sequence
  Synthetic
ccucgccucgcagacga

SEQ ID NO: 79597 - RNA, 17 nt, Artificial Sequence
  Synthetic
uugguacagcaacagga

SEQ ID NO: 79598 - RNA, 17 nt, Artificial Sequence
  Synthetic
  misc_feature (7)..(7): n is a, c, g, or u
agcccangaugauggga

SEQ ID NO: 79599 - RNA, 17 nt, Artificial Sequence
  Synthetic
uuuacacacucuaugga

SEQ ID NO: 79600 - RNA, 17 nt, Artificial Sequence
  Synthetic
uugcagaguuuggugga

SEQ ID NO: 79601 - RNA, 17 nt, Artificial Sequence
  Synthetic
  misc_feature (15)..(15): n is a, c, g, or u
agaagaucucguacnga

SEQ ID NO: 79602 - RNA, 17 nt, Artificial Sequence
  Synthetic
  misc_feature (12)..(12): n is a, c, g, or u
ccgaaagcccangauga

SEQ ID NO: 79603 - RNA, 17 nt, Artificial Sequence
  Synthetic
  misc_feature (1)..(1): n is a, c, g, or u
nuaugcccugagccuga

SEQ ID NO: 79604 - RNA, 17 nt, Artificial Sequence
  Synthetic
uuccacgcaugcgcuga

SEQ ID NO: 79605 - RNA, 17 nt, Artificial Sequence
  Synthetic
ugcgguguuugcucuga

SEQ ID NO: 79606 - RNA, 17 nt, Artificial Sequence
  Synthetic
  misc_feature (16)..(16): n is a, c, g, or u
cgccuguaacacgagna

SEQ ID NO: 79607 - RNA, 17 nt, Artificial Sequence
  Synthetic
  misc_feature (8)..(8): n is a, c, g, or u
  misc_feature (11)..(11): n is a, c, g, or u
  misc_feature (16)..(16): n is a, c, g, or u
uuacucunuanauuuna

SEQ ID NO: 79608 - RNA, 17 nt, Artificial Sequence
  Synthetic
ucuuguucccaagaaua

SEQ ID NO: 79609 - RNA, 17 nt, Artificial Sequence
  Synthetic
agauguucuggauaaua

SEQ ID NO: 79610 - RNA, 17 nt, Artificial Sequence
  Synthetic
  misc_feature (7)..(7): n is a, c, g, or u
uuaugunaacacuaaua

SEQ ID NO: 79611 - RNA, 17 nt, Artificial Sequence
  Synthetic
uauuccuuggacucaua

SEQ ID NO: 79612 - RNA, 17 nt, Artificial Sequence
  Synthetic
  misc_feature (7)..(7): n is a, c, g, or u
  misc_feature (13)..(13): n is a, c, g, or u
auauuunccauungaua

SEQ ID NO: 79613 - RNA, 17 nt, Artificial Sequence
  Synthetic
uuuggcuuucaguuaua

SEQ ID NO: 79614 - RNA, 17 nt, Artificial Sequence
  Synthetic
cuuucggaaaauuccua

SEQ ID NO: 79615 - RNA, 17 nt, Artificial Sequence
  Synthetic
  misc_feature (2)..(2): n is a, c, g, or u
anuauuuacacacucua

SEQ ID NO: 79616 - RNA, 17 nt, Artificial Sequence
  Synthetic
augcucaggagacucua

SEQ ID NO: 79617 - RNA, 17 nt, Artificial Sequence
  Synthetic
agggaguucuucuucua

SEQ ID NO: 79618 - RNA, 17 nt, Artificial Sequence
  Synthetic
cuucucucaauuuucua

SEQ ID NO: 79619 - RNA, 17 nt, Artificial Sequence
  Synthetic
uaugucauuggauguua

SEQ ID NO: 79620 - RNA, 17 nt, Artificial Sequence
  Synthetic
  misc_feature (8)..(8): n is a, c, g, or u
aucuuuunguuuuguua

SEQ ID NO: 79621 - RNA, 17 nt, Artificial Sequence
  Synthetic
acugagccaggagaaac

SEQ ID NO: 79622 - RNA, 17 nt, Artificial Sequence
  Synthetic
uaggcugugcugccaac

SEQ ID NO: 79623 - RNA, 17 nt, Artificial Sequence
  Synthetic
ugaaggcuggauccaac

SEQ ID NO: 79624 - RNA, 17 nt, Artificial Sequence
  Synthetic
agguuugguacagcaac

SEQ ID NO: 79625 - RNA, 17 nt, Artificial Sequence
  Synthetic
ucaauaggccuguuaac

SEQ ID NO: 79626 - RNA, 17 nt, Artificial Sequence
  Synthetic
  misc_feature (9)..(9): n is a, c, g, or u
caaugaggnuuaaagac

SEQ ID NO: 79627 - RNA, 17 nt, Artificial Sequence
  Synthetic
aggacaaguuggaggac

SEQ ID NO: 79628 - RNA, 17 nt, Artificial Sequence
  Synthetic
  misc_feature (14)..(14): n is a, c, g, or u
acuguuuguuuaangac

SEQ ID NO: 79629 - RNA, 17 nt, Artificial Sequence
  Synthetic
uaggcugccuuccugac

SEQ ID NO: 79630 - RNA, 17 nt, Artificial Sequence
  Synthetic
caccagcagggaaauac

SEQ ID NO: 79631 - RNA, 17 nt, Artificial Sequence
  Synthetic
ugaugggaugggaauac

SEQ ID NO: 79632 - RNA, 17 nt, Artificial Sequence
  Synthetic
  misc_feature (7)..(7): n is a, c, g, or u
accccuncucguguuac

SEQ ID NO: 79633 - RNA, 17 nt, Artificial Sequence
  Synthetic
  misc_feature (9)..(9): n is a, c, g, or u
aaggugggnaacuuuac

SEQ ID NO: 79634 - RNA, 17 nt, Artificial Sequence
  Synthetic
cacauccagcgauaacc

SEQ ID NO: 79635 - RNA, 17 nt, Artificial Sequence
  Synthetic
aucccaacaaggacacc

SEQ ID NO: 79636 - RNA, 17 nt, Artificial Sequence
  Synthetic
aacacuuggcacagacc

SEQ ID NO: 79637 - RNA, 17 nt, Artificial Sequence
  Synthetic
  misc_feature (14)..(14): n is a, c, g, or u
uaaugacucuagcnacc

SEQ ID NO: 79638 - RNA, 17 nt, Artificial Sequence
  Synthetic
  misc_feature (8)..(8): n is a, c, g, or u
caaauuancacccaccc

SEQ ID NO: 79639 - RNA, 17 nt, Artificial Sequence
  Synthetic
cacuaguaaacugagcc

SEQ ID NO: 79640 - RNA, 17 nt, Artificial Sequence
  Synthetic
cuuguuggcgucuggcc

SEQ ID NO: 79641 - RNA, 17 nt, Artificial Sequence
  Synthetic
cagaccuggccguugcc

SEQ ID NO: 79642 - RNA, 17 nt, Artificial Sequence
  Synthetic
  misc_feature (6)..(6): n is a, c, g, or u
  misc_feature (12)..(12): n is a, c, g, or u
cuggunguugangaucc

SEQ ID NO: 79643 - RNA, 17 nt, Artificial Sequence
  Synthetic
ccucagcccguuucucc

SEQ ID NO: 79644 - RNA, 17 nt, Artificial Sequence
  Synthetic
uguccuccaacuugucc

SEQ ID NO: 79645 - RNA, 17 nt, Artificial Sequence
  Synthetic
  misc_feature (6)..(6): n is a, c, g, or u
uacaanggcauuaaagc

SEQ ID NO: 79646 - RNA, 17 nt, Artificial Sequence
  Synthetic
  misc_feature (3)..(3): n is a, c, g, or u
uungguggucuauaagc

SEQ ID NO: 79647 - RNA, 17 nt, Artificial Sequence
  Synthetic
  misc_feature (1)..(1): n is a, c, g, or u
  misc_feature (10)..(10): n is a, c, g, or u
nuguauucanucuaagc

SEQ ID NO: 79648 - RNA, 17 nt, Artificial Sequence
  Synthetic
agaugaggcauagcagc

SEQ ID NO: 79649 - RNA, 17 nt, Artificial Sequence
  Synthetic
cuuguuuugcucgcagc

SEQ ID NO: 79650 - RNA, 17 nt, Artificial Sequence
  Synthetic
uuuggauaaaaccuagc

SEQ ID NO: 79651 - RNA, 17 nt, Artificial Sequence
  Synthetic
uucuccauguucagcgc

SEQ ID NO: 79652 - RNA, 17 nt, Artificial Sequence
  Synthetic
ccaacuggauccugcgc

SEQ ID NO: 79653 - RNA, 17 nt, Artificial Sequence
  Synthetic
cacacucuauggaaggc

SEQ ID NO: 79654 - RNA, 17 nt, Artificial Sequence
  Synthetic
  misc_feature (3)..(3): n is a, c, g, or u
cuncucguguuacaggc

SEQ ID NO: 79655 - RNA, 17 nt, Artificial Sequence
  Synthetic
agcuggagcauucgggc

SEQ ID NO: 79656 - RNA, 17 nt, Artificial Sequence
  Synthetic
  misc_feature (12)..(12): n is a, c, g, or u
  misc_feature (15)..(15): n is a, c, g, or u
uggcgauuggungangc

SEQ ID NO: 79657 - RNA, 17 nt, Artificial Sequence
  Synthetic
  misc_feature (14)..(15): n is a, c, g, or u
ucugcauggucccnngc

SEQ ID NO: 79658 - RNA, 17 nt, Artificial Sequence
  Synthetic
ugugccuucucaucugc

SEQ ID NO: 79659 - RNA, 17 nt, Artificial Sequence
  Synthetic
  misc_feature (5)..(5): n is a, c, g, or u
  misc_feature (9)..(9): n is a, c, g, or u
uugancagnagucgugc

SEQ ID NO: 79660 - RNA, 17 nt, Artificial Sequence
  Synthetic
aaaaaguugcauggugc

SEQ ID NO: 79661 - RNA, 17 nt, Artificial Sequence
  Synthetic
acagaccuggccguugc

SEQ ID NO: 79662 - RNA, 17 nt, Artificial Sequence
  Synthetic
aaacgauguauauuugc

SEQ ID NO: 79663 - RNA, 17 nt, Artificial Sequence
  Synthetic
  misc_feature (16)..(16): n is a, c, g, or u
auacaggccucucacnc

SEQ ID NO: 79664 - RNA, 17 nt, Artificial Sequence
  Synthetic
auggagaacaucacauc

SEQ ID NO: 79665 - RNA, 17 nt, Artificial Sequence
  Synthetic
  misc_feature (13)..(13): n is a, c, g, or u
cgccucagcucunuauc

SEQ ID NO: 79666 - RNA, 17 nt, Artificial Sequence
  Synthetic
  misc_feature (5)..(5): n is a, c, g, or u
cucancauacugcacuc

SEQ ID NO: 79667 - RNA, 17 nt, Artificial Sequence
  Synthetic
uuugggguggagcccuc

SEQ ID NO: 79668 - RNA, 17 nt, Artificial Sequence
  Synthetic
uuccaccagcaauccuc

SEQ ID NO: 79669 - RNA, 17 nt, Artificial Sequence
  Synthetic
  misc_feature (9)..(9): n is a, c, g, or u
ugaggugancaaugcuc

SEQ ID NO: 79670 - RNA, 17 nt, Artificial Sequence
  Synthetic
cagaagaucucaaucuc

SEQ ID NO: 79671 - RNA, 17 nt, Artificial Sequence
  Synthetic
cuaacaacaguagucuc

SEQ ID NO: 79672 - RNA, 17 nt, Artificial Sequence
  Synthetic
  misc_feature (3)..(3): n is a, c, g, or u
ucnaccaaucgccaguc

SEQ ID NO: 79673 - RNA, 17 nt, Artificial Sequence
  Synthetic
uuugcucgcagcagguc

SEQ ID NO: 79674 - RNA, 17 nt, Artificial Sequence
  Synthetic
  misc_feature (15)..(15): n is a, c, g, or u
cuggagcaaacauunuc

SEQ ID NO: 79675 - RNA, 17 nt, Artificial Sequence
  Synthetic
uaggagcuggagcauuc

SEQ ID NO: 79676 - RNA, 17 nt, Artificial Sequence
  Synthetic
uaucuuaucaacacuuc

SEQ ID NO: 79677 - RNA, 17 nt, Artificial Sequence
  Synthetic
cuucuuguugguucuuc

SEQ ID NO: 79678 - RNA, 17 nt, Artificial Sequence
  Synthetic
auaugggccuaaaguuc

SEQ ID NO: 79679 - RNA, 17 nt, Artificial Sequence
  Synthetic
ugauuaacuagauguuc

SEQ ID NO: 79680 - RNA, 17 nt, Artificial Sequence
  Synthetic
accacauuguguaaaag

SEQ ID NO: 79681 - RNA, 17 nt, Artificial Sequence
  Synthetic
aacggcagacggagaag

SEQ ID NO: 79682 - RNA, 17 nt, Artificial Sequence
  Synthetic
auagcagcaggaugaag

SEQ ID NO: 79683 - RNA, 17 nt, Artificial Sequence
  Synthetic
aacugaaagccaaacag

SEQ ID NO: 79684 - RNA, 17 nt, Artificial Sequence
  Synthetic
aagaaaauugguaacag

SEQ ID NO: 79685 - RNA, 17 nt, Artificial Sequence
  Synthetic
cucaaagguggagacag

SEQ ID NO: 79686 - RNA, 17 nt, Artificial Sequence
  Synthetic
ucgggaaagaaucccag

SEQ ID NO: 79687 - RNA, 17 nt, Artificial Sequence
  Synthetic
aagagaugauuaggcag

SEQ ID NO: 79688 - RNA, 17 nt, Artificial Sequence
  Synthetic
auccucaggccaugcag

SEQ ID NO: 79689 - RNA, 17 nt, Artificial Sequence
  Synthetic
uagugccauuuguucag

SEQ ID NO: 79690 - RNA, 17 nt, Artificial Sequence
  Synthetic
  misc_feature (12)..(12): n is a, c, g, or u
caagaucccagngugag

SEQ ID NO: 79691 - RNA, 17 nt, Artificial Sequence
  Synthetic
  misc_feature (9)..(9): n is a, c, g, or u
uucucauunacugugag

SEQ ID NO: 79692 - RNA, 17 nt, Artificial Sequence
  Synthetic
acaggagggauacauag

SEQ ID NO: 79693 - RNA, 17 nt, Artificial Sequence
  Synthetic
aaguguugauaagauag

SEQ ID NO: 79694 - RNA, 17 nt, Artificial Sequence
  Synthetic
uucucucaauuuucuag

SEQ ID NO: 79695 - RNA, 17 nt, Artificial Sequence
  Synthetic
augagaaggcacagacg

SEQ ID NO: 79696 - RNA, 17 nt, Artificial Sequence
  Synthetic
  misc_feature (2)..(2): n is a, c, g, or u
uncucguguuacaggcg

SEQ ID NO: 79697 - RNA, 17 nt, Artificial Sequence
  Synthetic
ccuucgucugcgaggcg

SEQ ID NO: 79698 - RNA, 17 nt, Artificial Sequence
  Synthetic
ugaguguuucucaaagg

SEQ ID NO: 79699 - RNA, 17 nt, Artificial Sequence
  Synthetic
acacacucuauggaagg

SEQ ID NO: 79700 - RNA, 17 nt, Artificial Sequence
  Synthetic
uccuuggacucauaagg

SEQ ID NO: 79701 - RNA, 17 nt, Artificial Sequence
  Synthetic
uuugguacagcaacagg

SEQ ID NO: 79702 - RNA, 17 nt, Artificial Sequence
  Synthetic
acaaguuggaggacagg

SEQ ID NO: 79703 - RNA, 17 nt, Artificial Sequence
  Synthetic
  misc_feature (4)..(4): n is a, c, g, or u
ccuncucguguuacagg

SEQ ID NO: 79704 - RNA, 17 nt, Artificial Sequence
  Synthetic
  misc_feature (9)..(9): n is a, c, g, or u
  misc_feature (12)..(12): n is a, c, g, or u
cgauuggungangcagg

SEQ ID NO: 79705 - RNA, 17 nt, Artificial Sequence
  Synthetic
  misc_feature (6)..(6): n is a, c, g, or u
  misc_feature (9)..(9): n is a, c, g, or u
uuggungangcaggagg

SEQ ID NO: 79706 - RNA, 17 nt, Artificial Sequence
  Synthetic
  misc_feature (7)..(7): n is a, c, g, or u
ccgauanagagcugagg

SEQ ID NO: 79707 - RNA, 17 nt, Artificial Sequence
  Synthetic
ucucucaauuuucuagg

SEQ ID NO: 79708 - RNA, 17 nt, Artificial Sequence
  Synthetic
  misc_feature (2)..(2): n is a, c, g, or u
  misc_feature (4)..(4): n is a, c, g, or u
  misc_feature (6)..(6): n is a, c, g, or u
  misc_feature (13)..(13): n is a, c, g, or u
angnunuuuguanuagg

SEQ ID NO: 79709 - RNA, 17 nt, Artificial Sequence
  Synthetic
  misc_feature (1)..(1): n is a, c, g, or u
nuggugggcguucacgg

SEQ ID NO: 79710 - RNA, 17 nt, Artificial Sequence
  Synthetic
aaaaggccuccgugcgg

SEQ ID NO: 79711 - RNA, 17 nt, Artificial Sequence
  Synthetic
cugggaggaguuggggg

SEQ ID NO: 79712 - RNA, 17 nt, Artificial Sequence
  Synthetic
acggaggccuuuugggg

SEQ ID NO: 79713 - RNA, 17 nt, Artificial Sequence
  Synthetic
  misc_feature (10)..(10): n is a, c, g, or u
uuuguuuaangacuggg

SEQ ID NO: 79714 - RNA, 17 nt, Artificial Sequence
  Synthetic
  misc_feature (7)..(7): n is a, c, g, or u
  misc_feature (10)..(10): n is a, c, g, or u
agcaauncunugcuggg

SEQ ID NO: 79715 - RNA, 17 nt, Artificial Sequence
  Synthetic
ccaagcugugccuuggg

SEQ ID NO: 79716 - RNA, 17 nt, Artificial Sequence
  Synthetic
  misc_feature (15)..(15): n is a, c, g, or u
aagauaggggcauungg

SEQ ID NO: 79717 - RNA, 17 nt, Artificial Sequence
  Synthetic
aggcuggauccaacugg

SEQ ID NO: 79718 - RNA, 17 nt, Artificial Sequence
  Synthetic
cuguauuucccugcugg

SEQ ID NO: 79719 - RNA, 17 nt, Artificial Sequence
  Synthetic
  misc_feature (8)..(8): n is a, c, g, or u
  misc_feature (11)..(11): n is a, c, g, or u
aagcaauncunugcugg

SEQ ID NO: 79720 - RNA, 17 nt, Artificial Sequence
  Synthetic
ucccagaggauugcugg

SEQ ID NO: 79721 - RNA, 17 nt, Artificial Sequence
  Synthetic
ugaaagccaaacagugg

SEQ ID NO: 79722 - RNA, 17 nt, Artificial Sequence
  Synthetic
caagccccagccagugg

SEQ ID NO: 79723 - RNA, 17 nt, Artificial Sequence
  Synthetic
  misc_feature (13)..(14): n is a, c, g, or u
ccuugggcaagannugg

SEQ ID NO: 79724 - RNA, 17 nt, Artificial Sequence
  Synthetic
cccaaggcacagcuugg

SEQ ID NO: 79725 - RNA, 17 nt, Artificial Sequence
  Synthetic
uaaccaggacaaguugg

SEQ ID NO: 79726 - RNA, 17 nt, Artificial Sequence
  Synthetic
  misc_feature (1)..(1): n is a, c, g, or u
ngacugggaggaguugg

SEQ ID NO: 79727 - RNA, 17 nt, Artificial Sequence
  Synthetic
  misc_feature (16)..(16): n is a, c, g, or u
caaagguggagacagng

SEQ ID NO: 79728 - RNA, 17 nt, Artificial Sequence
  Synthetic
uggugacccacaaaaug

SEQ ID NO: 79729 - RNA, 17 nt, Artificial Sequence
  Synthetic
acaagagcuacagcaug

SEQ ID NO: 79730 - RNA, 17 nt, Artificial Sequence
  Synthetic
  misc_feature (9)..(9): n is a, c, g, or u
aacaaaacnaaaagaug

SEQ ID NO: 79731 - RNA, 17 nt, Artificial Sequence
  Synthetic
caguuauauggaugaug

SEQ ID NO: 79732 - RNA, 17 nt, Artificial Sequence
  Synthetic
  misc_feature (2)..(2): n is a, c, g, or u
anuaugcccugagccug

SEQ ID NO: 79733 - RNA, 17 nt, Artificial Sequence
  Synthetic
uuccacugcauggccug

SEQ ID NO: 79734 - RNA, 17 nt, Artificial Sequence
  Synthetic
  misc_feature (1)..(1): n is a, c, g, or u
  misc_feature (10)..(10): n is a, c, g, or u
nucccgauanagagcug

SEQ ID NO: 79735 - RNA, 17 nt, Artificial Sequence
  Synthetic
ccaggagaaacgggcug

SEQ ID NO: 79736 - RNA, 17 nt, Artificial Sequence
  Synthetic
  misc_feature (9)..(9): n is a, c, g, or u
  misc_feature (12)..(12): n is a, c, g, or u
caagcaauncunugcug

SEQ ID NO: 79737 - RNA, 17 nt, Artificial Sequence
  Synthetic
  misc_feature (14)..(14): n is a, c, g, or u
agaauuuggagcuncug

SEQ ID NO: 79738 - RNA, 17 nt, Artificial Sequence
  Synthetic
aucgcuggaugugucug

SEQ ID NO: 79739 - RNA, 17 nt, Artificial Sequence
  Synthetic
cugaaagccaaacagug

SEQ ID NO: 79740 - RNA, 17 nt, Artificial Sequence
  Synthetic
ccaagccccagccagug

SEQ ID NO: 79741 - RNA, 17 nt, Artificial Sequence
  Synthetic
uggugucuuucggagug

SEQ ID NO: 79742 - RNA, 17 nt, Artificial Sequence
  Synthetic
cccaaaaggccuccgug

SEQ ID NO: 79743 - RNA, 17 nt, Artificial Sequence
  Synthetic
  misc_feature (15)..(15): n is a, c, g, or u
cugagugcaguaugnug

SEQ ID NO: 79744 - RNA, 17 nt, Artificial Sequence
  Synthetic
aaucuucucgaggauug

SEQ ID NO: 79745 - RNA, 17 nt, Artificial Sequence
  Synthetic
  misc_feature (4)..(4): n is a, c, g, or u
  misc_feature (13)..(13): n is a, c, g, or u
agunugucaacgnauug

SEQ ID NO: 79746 - RNA, 17 nt, Artificial Sequence
  Synthetic
uggaugaugugguauug

SEQ ID NO: 79747 - RNA, 17 nt, Artificial Sequence
  Synthetic
  misc_feature (4)..(4): n is a, c, g, or u
  misc_feature (12)..(12): n is a, c, g, or u
ugunugaugugnucuug

SEQ ID NO: 79748 - RNA, 17 nt, Artificial Sequence
  Synthetic
  misc_feature (2)..(2): n is a, c, g, or u
angacugggaggaguug

SEQ ID NO: 79749 - RNA, 17 nt, Artificial Sequence
  Synthetic
aguuugguggaagguug

SEQ ID NO: 79750 - RNA, 17 nt, Artificial Sequence
  Synthetic
ugagugauuggagguug

SEQ ID NO: 79751 - RNA, 17 nt, Artificial Sequence
  Synthetic
  misc_feature (14)..(14): n is a, c, g, or u
aguucaggcaacunuug

SEQ ID NO: 79752 - RNA, 17 nt, Artificial Sequence
  Synthetic
  misc_feature (2)..(2): n is a, c, g, or u
cnuagcgccucauuuug

SEQ ID NO: 79753 - RNA, 17 nt, Artificial Sequence
  Synthetic
cgcacggaggccuuuug

SEQ ID NO: 79754 - RNA, 17 nt, Artificial Sequence
  Synthetic
  misc_feature (8)..(8): n is a, c, g, or u
  misc_feature (17)..(17): n is a, c, g, or u
aggugggnaacuuuacn

SEQ ID NO: 79755 - RNA, 17 nt, Artificial Sequence
  Synthetic
  misc_feature (4)..(4): n is a, c, g, or u
  misc_feature (10)..(10): n is a, c, g, or u
  misc_feature (17)..(17): n is a, c, g, or u
aucnucaacnaccagcn

SEQ ID NO: 79756 - RNA, 17 nt, Artificial Sequence
  Synthetic
  misc_feature (17)..(17): n is a, c, g, or u
uucccaucccaucaucn

SEQ ID NO: 79757 - RNA, 17 nt, Artificial Sequence
  Synthetic
  misc_feature (17)..(17): n is a, c, g, or u
ucaaagguggagacagn

SEQ ID NO: 79758 - RNA, 17 nt, Artificial Sequence
  Synthetic
  misc_feature (17)..(17): n is a, c, g, or u
ccgccuguaacacgagn

SEQ ID NO: 79759 - RNA, 17 nt, Artificial Sequence
  Synthetic
  misc_feature (16)..(17): n is a, c, g, or u
agaccuugggcaagann

SEQ ID NO: 79760 - RNA, 17 nt, Artificial Sequence
  Synthetic
  misc_feature (3)..(3): n is a, c, g, or u
  misc_feature (9)..(9): n is a, c, g, or u
  misc_feature (16)..(17): n is a, c, g, or u
ucnucaacnaccagcnn

SEQ ID NO: 79761 - RNA, 17 nt, Artificial Sequence
  Synthetic
  misc_feature (9)..(9): n is a, c, g, or u
  misc_feature (12)..(12): n is a, c, g, or u
  misc_feature (16)..(17): n is a, c, g, or u
acuaggucncungaunn

SEQ ID NO: 79762 - RNA, 17 nt, Artificial Sequence
  Synthetic
  misc_feature (17)..(17): n is a, c, g, or u
caugcguggaaccuuun

SEQ ID NO: 79763 - RNA, 17 nt, Artificial Sequence
  Synthetic
caaagacaaaagaaaau

SEQ ID NO: 79764 - RNA, 17 nt, Artificial Sequence
  Synthetic
aggcuguaggcauaaau

SEQ ID NO: 79765 - RNA, 17 nt, Artificial Sequence
  Synthetic
  misc_feature (3)..(3): n is a, c, g, or u
canacuuuccaaucaau

SEQ ID NO: 79766 - RNA, 17 nt, Artificial Sequence
  Synthetic
cugaggcccacucccau

SEQ ID NO: 79767 - RNA, 17 nt, Artificial Sequence
  Synthetic
aacaagagcuacagcau

SEQ ID NO: 79768 - RNA, 17 nt, Artificial Sequence
  Synthetic
  misc_feature (11)..(11): n is a, c, g, or u
cugucuuuaanccucau

SEQ ID NO: 79769 - RNA, 17 nt, Artificial Sequence
  Synthetic
  misc_feature (3)..(3): n is a, c, g, or u
  misc_feature (9)..(9): n is a, c, g, or u
uunaugggnuaugucau

SEQ ID NO: 79770 - RNA, 17 nt, Artificial Sequence
  Synthetic
  misc_feature (10)..(10): n is a, c, g, or u
uaacaaaacnaaaagau

SEQ ID NO: 79771 - RNA, 17 nt, Artificial Sequence
  Synthetic
ccuuccugacuggcgau

SEQ ID NO: 79772 - RNA, 17 nt, Artificial Sequence
  Synthetic
ucaaucuucucgaggau

SEQ ID NO: 79773 - RNA, 17 nt, Artificial Sequence
  Synthetic
  misc_feature (11)..(11): n is a, c, g, or u
cgaaagcccangaugau

SEQ ID NO: 79774 - RNA, 17 nt, Artificial Sequence
  Synthetic
uuaacaggccuauugau

SEQ ID NO: 79775 - RNA, 17 nt, Artificial Sequence
  Synthetic
  misc_feature (7)..(7): n is a, c, g, or u
  misc_feature (10)..(10): n is a, c, g, or u
  misc_feature (15)..(15): n is a, c, g, or u
uacucunuanauuunau

SEQ ID NO: 79776 - RNA, 17 nt, Artificial Sequence
  Synthetic
  misc_feature (6)..(6): n is a, c, g, or u
uaugunaacacuaauau

SEQ ID NO: 79777 - RNA, 17 nt, Artificial Sequence
  Synthetic
uuucggaaaauuccuau

SEQ ID NO: 79778 - RNA, 17 nt, Artificial Sequence
  Synthetic
uauggaugaugugguau

SEQ ID NO: 79779 - RNA, 17 nt, Artificial Sequence
  Synthetic
  misc_feature (14)..(14): n is a, c, g, or u
ccgccucagcucunuau

SEQ ID NO: 79780 - RNA, 17 nt, Artificial Sequence
  Synthetic
augucauuggauguuau

SEQ ID NO: 79781 - RNA, 17 nt, Artificial Sequence
  Synthetic
aagaugcuguacagacu

SEQ ID NO: 79782 - RNA, 17 nt, Artificial Sequence
  Synthetic
  misc_feature (13)..(13): n is a, c, g, or u
cuguuuguuuaangacu

SEQ ID NO: 79783 - RNA, 17 nt, Artificial Sequence
  Synthetic
  misc_feature (2)..(2): n is a, c, g, or u
unacauaacugacuacu

SEQ ID NO: 79784 - RNA, 17 nt, Artificial Sequence
  Synthetic
ccucuuauguaagaccu

SEQ ID NO: 79785 - RNA, 17 nt, Artificial Sequence
  Synthetic
  misc_feature (13)..(13): n is a, c, g, or u
aaugacucuagcnaccu

SEQ ID NO: 79786 - RNA, 17 nt, Artificial Sequence
  Synthetic
  misc_feature (8)..(8): n is a, c, g, or u
acacgagnagggguccu

SEQ ID NO: 79787 - RNA, 17 nt, Artificial Sequence
  Synthetic
aucacaucaggauuccu

SEQ ID NO: 79788 - RNA, 17 nt, Artificial Sequence
  Synthetic
ucaauguuaguauuccu

SEQ ID NO: 79789 - RNA, 17 nt, Artificial Sequence
  Synthetic
ccacccaaggcacagcu

SEQ ID NO: 79790 - RNA, 17 nt, Artificial Sequence
  Synthetic
  misc_feature (13)..(13): n is a, c, g, or u
cccuucucggggncgcu

SEQ ID NO: 79791 - RNA, 17 nt, Artificial Sequence
  Synthetic
ccccacuggcuggggcu

SEQ ID NO: 79792 - RNA, 17 nt, Artificial Sequence
  Synthetic
cgcaacccccacuggcu

SEQ ID NO: 79793 - RNA, 17 nt, Artificial Sequence
  Synthetic
  misc_feature (5)..(5): n is a, c, g, or u
aauunauuaugccugcu

SEQ ID NO: 79794 - RNA, 17 nt, Artificial Sequence
  Synthetic
ucguuuccauggcugcu

SEQ ID NO: 79795 - RNA, 17 nt, Artificial Sequence
  Synthetic
  misc_feature (15)..(15): n is a, c, g, or u
uacaggccucucacncu

SEQ ID NO: 79796 - RNA, 17 nt, Artificial Sequence
  Synthetic
uuacauaagaggacucu

SEQ ID NO: 79797 - RNA, 17 nt, Artificial Sequence
  Synthetic
uccaccagcaauccucu

SEQ ID NO: 79798 - RNA, 17 nt, Artificial Sequence
  Synthetic
  misc_feature (11)..(11): n is a, c, g, or u
auuuuuugaunaugucu

SEQ ID NO: 79799 - RNA, 17 nt, Artificial Sequence
  Synthetic
acuucucucaauuuucu

SEQ ID NO: 79800 - RNA, 17 nt, Artificial Sequence
  Synthetic
agaaaggccuuguaagu

SEQ ID NO: 79801 - RNA, 17 nt, Artificial Sequence
  Synthetic
acugaaagccaaacagu

SEQ ID NO: 79802 - RNA, 17 nt, Artificial Sequence
  Synthetic
uuggaggcuugaacagu

SEQ ID NO: 79803 - RNA, 17 nt, Artificial Sequence
  Synthetic
accaagccccagccagu

SEQ ID NO: 79804 - RNA, 17 nt, Artificial Sequence
  Synthetic
  misc_feature (4)..(4): n is a, c, g, or u
uaangacugggaggagu

SEQ ID NO: 79805 - RNA, 17 nt, Artificial Sequence
  Synthetic
aaaauuccuaugggagu

SEQ ID NO: 79806 - RNA, 17 nt, Artificial Sequence
  Synthetic
  misc_feature (2)..(2): n is a, c, g, or u
  misc_feature (4)..(4): n is a, c, g, or u
  misc_feature (10)..(10): n is a, c, g, or u
angngagagncaguagu

SEQ ID NO: 79807 - RNA, 17 nt, Artificial Sequence
  Synthetic
uuuguucagugguucgu

SEQ ID NO: 79808 - RNA, 17 nt, Artificial Sequence
  Synthetic
ccuuggacucauaaggu

SEQ ID NO: 79809 - RNA, 17 nt, Artificial Sequence
  Synthetic
  misc_feature (9)..(9): n is a, c, g, or u
acucuagcnaccugggu

SEQ ID NO: 79810 - RNA, 17 nt, Artificial Sequence
  Synthetic
uggauccaacugguggu

SEQ ID NO: 79811 - RNA, 17 nt, Artificial Sequence
  Synthetic
  misc_feature (12)..(13): n is a, c, g, or u
cuugggcaagannuggu

SEQ ID NO: 79812 - RNA, 17 nt, Artificial Sequence
  Synthetic
  misc_feature (6)..(6): n is a, c, g, or u
uuguanuaggaggcugu

SEQ ID NO: 79813 - RNA, 17 nt, Artificial Sequence
  Synthetic
uccagcuccuaccuugu

SEQ ID NO: 79814 - RNA, 17 nt, Artificial Sequence
  Synthetic
uggccagguguccuugu

SEQ ID NO: 79815 - RNA, 17 nt, Artificial Sequence
  Synthetic
augccucaucuucuugu

SEQ ID NO: 79816 - RNA, 17 nt, Artificial Sequence
  Synthetic
  misc_feature (12)..(12): n is a, c, g, or u
aaaugugaacanuuugu

SEQ ID NO: 79817 - RNA, 17 nt, Artificial Sequence
  Synthetic
  misc_feature (1)..(1): n is a, c, g, or u
nuagcgccucauuuugu

SEQ ID NO: 79818 - RNA, 17 nt, Artificial Sequence
  Synthetic
  misc_feature (5)..(5): n is a, c, g, or u
  misc_feature (7)..(7): n is a, c, g, or u
  misc_feature (9)..(9): n is a, c, g, or u
  misc_feature (16)..(16): n is a, c, g, or u
uuaangnunuuuguanu

SEQ ID NO: 79819 - RNA, 17 nt, Artificial Sequence
  Synthetic
  misc_feature (16)..(16): n is a, c, g, or u
ucccaucccaucaucnu

SEQ ID NO: 79820 - RNA, 17 nt, Artificial Sequence
  Synthetic
  misc_feature (16)..(16): n is a, c, g, or u
ucuggagcaaacauunu

SEQ ID NO: 79821 - RNA, 17 nt, Artificial Sequence
  Synthetic
  misc_feature (12)..(12): n is a, c, g, or u
cugggugggugnuaauu

SEQ ID NO: 79822 - RNA, 17 nt, Artificial Sequence
  Synthetic
augaacaagagaugauu

SEQ ID NO: 79823 - RNA, 17 nt, Artificial Sequence
  Synthetic
  misc_feature (4)..(4): n is a, c, g, or u
  misc_feature (10)..(10): n is a, c, g, or u
aucnaauggnaaauauu

SEQ ID NO: 79824 - RNA, 17 nt, Artificial Sequence
  Synthetic
ugguguaaauguauauu

SEQ ID NO: 79825 - RNA, 17 nt, Artificial Sequence
  Synthetic
  misc_feature (4)..(4): n is a, c, g, or u
  misc_feature (7)..(8): n is a, c, g, or u
aacngunnuagaguauu

SEQ ID NO: 79826 - RNA, 17 nt, Artificial Sequence
  Synthetic
auggaugaugugguauu

SEQ ID NO: 79827 - RNA, 17 nt, Artificial Sequence
  Synthetic
cucuuauguaagaccuu

SEQ ID NO: 79828 - RNA, 17 nt, Artificial Sequence
  Synthetic
ccuccaagcugugccuu

SEQ ID NO: 79829 - RNA, 17 nt, Artificial Sequence
  Synthetic
  misc_feature (12)..(12): n is a, c, g, or u
ccuucucggggncgcuu

SEQ ID NO: 79830 - RNA, 17 nt, Artificial Sequence
  Synthetic
caauuuucuuuugucuu

SEQ ID NO: 79831 - RNA, 17 nt, Artificial Sequence
  Synthetic
ugggucaccauauucuu

SEQ ID NO: 79832 - RNA, 17 nt, Artificial Sequence
  Synthetic
ugggaucuugcagaguu

SEQ ID NO: 79833 - RNA, 17 nt, Artificial Sequence
  Synthetic
  misc_feature (3)..(3): n is a, c, g, or u
aangacugggaggaguu

SEQ ID NO: 79834 - RNA, 17 nt, Artificial Sequence
  Synthetic
  misc_feature (9)..(9): n is a, c, g, or u
caucuuuunguuuuguu

SEQ ID NO: 79835 - RNA, 17 nt, Artificial Sequence
  Synthetic
  misc_feature (15)..(15): n is a, c, g, or u
aaauauuugguaacnuu

SEQ ID NO: 79836 - RNA, 17 nt, Artificial Sequence
  Synthetic
uuggggacugcgaauuu

SEQ ID NO: 79837 - RNA, 17 nt, Artificial Sequence
  Synthetic
  misc_feature (2)..(2): n is a, c, g, or u
anaguugccugaacuuu

SEQ ID NO: 79838 - RNA, 17 nt, Artificial Sequence
  Synthetic
auuucuugucucacuuu

SEQ ID NO: 79839 - RNA, 17 nt, Artificial Sequence
  Synthetic
  misc_feature (9)..(9): n is a, c, g, or u
ccaucaucnugggcuuu

SEQ ID NO: 79840 - RNA, 17 nt, Artificial Sequence
  Synthetic
  misc_feature (4)..(4): n is a, c, g, or u
acgnauugugggucuuu

SEQ ID NO: 79841 - RNA, 17 nt, Artificial Sequence
  Synthetic
aauuuucuuuugucuuu

SEQ ID NO: 79842 - RNA, 17 nt, Artificial Sequence
  Synthetic
  misc_feature (3)..(3): n is a, c, g, or u
cgnauugugggucuuuu

SEQ ID NO: 79843 - RNA, 20 nt, Artificial Sequence
  Synthetic
auugguaacagcgguaaaaa

SEQ ID NO: 79844 - RNA, 20 nt, Artificial Sequence
  Synthetic
uccuggaauuagaggacaaa

SEQ ID NO: 79845 - RNA, 20 nt, Artificial Sequence
  Synthetic
ccugagggcuccaccccaaa

SEQ ID NO: 79846 - RNA, 20 nt, Artificial Sequence
  Synthetic
accuggccguugccgggcaa

SEQ ID NO: 79847 - RNA, 20 nt, Artificial Sequence
  Synthetic
ugaggaugaguguuucucaa

SEQ ID NO: 79848 - RNA, 20 nt, Artificial Sequence
  Synthetic
cagguauuguuuacacagaa

SEQ ID NO: 79849 - RNA, 20 nt, Artificial Sequence
  Synthetic
  misc_feature (1)..(1): n is a, c, g, or u
  misc_feature (4)..(4): n is a, c, g, or u
ncgnaacggcagacggagaa

SEQ ID NO: 79850 - RNA, 20 nt, Artificial Sequence
  Synthetic
  misc_feature (9)..(9): n is a, c, g, or u
  misc_feature (15)..(15): n is a, c, g, or u
aaauauuunccauungauaa

SEQ ID NO: 79851 - RNA, 20 nt, Artificial Sequence
  Synthetic
caccuggccagacgccaaca

SEQ ID NO: 79852 - RNA, 20 nt, Artificial Sequence
  Synthetic
uggggacccugcgcugaaca

SEQ ID NO: 79853 - RNA, 20 nt, Artificial Sequence
  Synthetic
cgaauuuuggccaagacaca

SEQ ID NO: 79854 - RNA, 20 nt, Artificial Sequence
  Synthetic
  misc_feature (10)..(10): n is a, c, g, or u
  misc_feature (13)..(13): n is a, c, g, or u
ucugccguuncgnccgacca

SEQ ID NO: 79855 - RNA, 20 nt, Artificial Sequence
  Synthetic
  misc_feature (6)..(6): n is a, c, g, or u
  misc_feature (9)..(9): n is a, c, g, or u
ccaugnccnaaagccaccca

SEQ ID NO: 79856 - RNA, 20 nt, Artificial Sequence
  Synthetic
  misc_feature (10)..(11): n is a, c, g, or u
cgcccaccannucuugccca

SEQ ID NO: 79857 - RNA, 20 nt, Artificial Sequence
  Synthetic
  misc_feature (3)..(3): n is a, c, g, or u
uuncccaccuuaugagucca

SEQ ID NO: 79858 - RNA, 20 nt, Artificial Sequence
  Synthetic
ugggaacaagagcuacagca

SEQ ID NO: 79859 - RNA, 20 nt, Artificial Sequence
  Synthetic
cugaacuggagccaccagca

SEQ ID NO: 79860 - RNA, 20 nt, Artificial Sequence
  Synthetic
  misc_feature (6)..(6): n is a, c, g, or u
cugggnuucaccccaccgca

SEQ ID NO: 79861 - RNA, 20 nt, Artificial Sequence
  Synthetic
cuucaccucugcacgucgca

SEQ ID NO: 79862 - RNA, 20 nt, Artificial Sequence
  Synthetic
  misc_feature (15)..(15): n is a, c, g, or u
  misc_feature (18)..(18): n is a, c, g, or u
ccuuggguggcuuunggnca

SEQ ID NO: 79863 - RNA, 20 nt, Artificial Sequence
  Synthetic
uugguucuucuggacuauca

SEQ ID NO: 79864 - RNA, 20 nt, Artificial Sequence
  Synthetic
agucuuugaaguaugccuca

SEQ ID NO: 79865 - RNA, 20 nt, Artificial Sequence
  Synthetic
cacuggcuggggcuugguca

SEQ ID NO: 79866 - RNA, 20 nt, Artificial Sequence
  Synthetic
  misc_feature (13)..(13): n is a, c, g, or u
  misc_feature (17)..(17): n is a, c, g, or u
accugcacgacuncugnuca

SEQ ID NO: 79867 - RNA, 20 nt, Artificial Sequence
  Synthetic
  misc_feature (6)..(7): n is a, c, g, or u
caagannuggugggcguuca

SEQ ID NO: 79868 - RNA, 20 nt, Artificial Sequence
  Synthetic
aaauguauauuaggaaaaga

SEQ ID NO: 79869 - RNA, 20 nt, Artificial Sequence
  Synthetic
  misc_feature (14)..(14): n is a, c, g, or u
acccuaacaaaacnaaaaga

SEQ ID NO: 79870 - RNA, 20 nt, Artificial Sequence
  Synthetic
  misc_feature (8)..(8): n is a, c, g, or u
  misc_feature (11)..(11): n is a, c, g, or u
uggucggncgnaacggcaga

SEQ ID NO: 79871 - RNA, 20 nt, Artificial Sequence
  Synthetic
  misc_feature (3)..(3): n is a, c, g, or u
acngaaggaaagaagucaga

SEQ ID NO: 79872 - RNA, 20 nt, Artificial Sequence
  Synthetic
  misc_feature (12)..(12): n is a, c, g, or u
agucccaagcgnccccgaga

SEQ ID NO: 79873 - RNA, 20 nt, Artificial Sequence
  Synthetic
acacgguccggcagaugaga

SEQ ID NO: 79874 - RNA, 20 nt, Artificial Sequence
  Synthetic
  misc_feature (2)..(2): n is a, c, g, or u
cnaccaaucgccagucagga

SEQ ID NO: 79875 - RNA, 20 nt, Artificial Sequence
  Synthetic
ugcuguaccaaaccuucgga

SEQ ID NO: 79876 - RNA, 20 nt, Artificial Sequence
  Synthetic
  misc_feature (1)..(1): n is a, c, g, or u
nuauuuacacacucuaugga

SEQ ID NO: 79877 - RNA, 20 nt, Artificial Sequence
  Synthetic
aucuugcagaguuuggugga

SEQ ID NO: 79878 - RNA, 20 nt, Artificial Sequence
  Synthetic
  misc_feature (3)..(3): n is a, c, g, or u
  misc_feature (18)..(18): n is a, c, g, or u
ucnagaagaucucguacnga

SEQ ID NO: 79879 - RNA, 20 nt, Artificial Sequence
  Synthetic
  misc_feature (15)..(15): n is a, c, g, or u
uuuccgaaagcccangauga

SEQ ID NO: 79880 - RNA, 20 nt, Artificial Sequence
  Synthetic
auuugcgguguuugcucuga

SEQ ID NO: 79881 - RNA, 20 nt, Artificial Sequence
  Synthetic
  misc_feature (19)..(19): n is a, c, g, or u
ccccgccuguaacacgagna

SEQ ID NO: 79882 - RNA, 20 nt, Artificial Sequence
  Synthetic
  misc_feature (10)..(10): n is a, c, g, or u
caguuaugunaacacuaaua

SEQ ID NO: 79883 - RNA, 20 nt, Artificial Sequence
  Synthetic
uaguauuccuuggacucaua

SEQ ID NO: 79884 - RNA, 20 nt, Artificial Sequence
  Synthetic
  misc_feature (10)..(10): n is a, c, g, or u
  misc_feature (16)..(16): n is a, c, g, or u
caaauauuunccauungaua

SEQ ID NO: 79885 - RNA, 20 nt, Artificial Sequence
  Synthetic
cuguuuggcuuucaguuaua

SEQ ID NO: 79886 - RNA, 20 nt, Artificial Sequence
  Synthetic
  misc_feature (1)..(1): n is a, c, g, or u
ncaaugcucaggagacucua

SEQ ID NO: 79887 - RNA, 20 nt, Artificial Sequence
  Synthetic
  misc_feature (11)..(11): n is a, c, g, or u
cccaucuuuunguuuuguua

SEQ ID NO: 79888 - RNA, 20 nt, Artificial Sequence
  Synthetic
ccuggaauuagaggacaaac

SEQ ID NO: 79889 - RNA, 20 nt, Artificial Sequence
  Synthetic
uaaacugagccaggagaaac

SEQ ID NO: 79890 - RNA, 20 nt, Artificial Sequence
  Synthetic
ugcuaggcugugcugccaac

SEQ ID NO: 79891 - RNA, 20 nt, Artificial Sequence
  Synthetic
cucugaaggcuggauccaac

SEQ ID NO: 79892 - RNA, 20 nt, Artificial Sequence
  Synthetic
cgaagguuugguacagcaac

SEQ ID NO: 79893 - RNA, 20 nt, Artificial Sequence
  Synthetic
ccuggccguugccgggcaac

SEQ ID NO: 79894 - RNA, 20 nt, Artificial Sequence
  Synthetic
  misc_feature (1)..(1): n is a, c, g, or u
  misc_feature (7)..(7): n is a, c, g, or u
ngagagncaguagucggaac

SEQ ID NO: 79895 - RNA, 20 nt, Artificial Sequence
  Synthetic
aggguuuacuguuccugaac

SEQ ID NO: 79896 - RNA, 20 nt, Artificial Sequence
  Synthetic
uuagaaaacuuccuguuaac

SEQ ID NO: 79897 - RNA, 20 nt, Artificial Sequence
  Synthetic
  misc_feature (12)..(12): n is a, c, g, or u
uuccaaugaggnuuaaagac

SEQ ID NO: 79898 - RNA, 20 nt, Artificial Sequence
  Synthetic
accaggacaaguuggaggac

SEQ ID NO: 79899 - RNA, 20 nt, Artificial Sequence
  Synthetic
  misc_feature (17)..(17): n is a, c, g, or u
aagacuguuuguuuaangac

SEQ ID NO: 79900 - RNA, 20 nt, Artificial Sequence
  Synthetic
agccaccagcagggaaauac

SEQ ID NO: 79901 - RNA, 20 nt, Artificial Sequence
  Synthetic
  misc_feature (1)..(1): n is a, c, g, or u
ngaugaugggaugggaauac

SEQ ID NO: 79902 - RNA, 20 nt, Artificial Sequence
  Synthetic
  misc_feature (12)..(12): n is a, c, g, or u
cauaaggugggnaacuuuac

SEQ ID NO: 79903 - RNA, 20 nt, Artificial Sequence
  Synthetic
agacacauccagcgauaacc

SEQ ID NO: 79904 - RNA, 20 nt, Artificial Sequence
  Synthetic
ucaaucccaacaaggacacc

SEQ ID NO: 79905 - RNA, 20 nt, Artificial Sequence
  Synthetic
  misc_feature (2)..(2): n is a, c, g, or u
  misc_feature (17)..(17): n is a, c, g, or u
ancuaaugacucuagcnacc

SEQ ID NO: 79906 - RNA, 20 nt, Artificial Sequence
  Synthetic
  misc_feature (11)..(11): n is a, c, g, or u
uuccaaauuancacccaccc

SEQ ID NO: 79907 - RNA, 20 nt, Artificial Sequence
  Synthetic
  misc_feature (1)..(2): n is a, c, g, or u
  misc_feature (9)..(9): n is a, c, g, or u
  misc_feature (15)..(15): n is a, c, g, or u
nngcuggunguugangaucc

SEQ ID NO: 79908 - RNA, 20 nt, Artificial Sequence
  Synthetic
uccuguccuccaacuugucc

SEQ ID NO: 79909 - RNA, 20 nt, Artificial Sequence
  Synthetic
cccguuuguccucuaauucc

SEQ ID NO: 79910 - RNA, 20 nt, Artificial Sequence
  Synthetic
  misc_feature (4)..(4): n is a, c, g, or u
  misc_feature (13)..(13): n is a, c, g, or u
ugcnuguauucanucuaagc

SEQ ID NO: 79911 - RNA, 20 nt, Artificial Sequence
  Synthetic
ccugaacuggagccaccagc

SEQ ID NO: 79912 - RNA, 20 nt, Artificial Sequence
  Synthetic
agaagaugaggcauagcagc

SEQ ID NO: 79913 - RNA, 20 nt, Artificial Sequence
  Synthetic
ccgcuuguuuugcucgcagc

SEQ ID NO: 79914 - RNA, 20 nt, Artificial Sequence
  Synthetic
  misc_feature (3)..(3): n is a, c, g, or u
acnuuuggauaaaaccuagc

SEQ ID NO: 79915 - RNA, 20 nt, Artificial Sequence
  Synthetic
auguucuccauguucagcgc

SEQ ID NO: 79916 - RNA, 20 nt, Artificial Sequence
  Synthetic
cugccaacuggauccugcgc

SEQ ID NO: 79917 - RNA, 20 nt, Artificial Sequence
  Synthetic
  misc_feature (6)..(6): n is a, c, g, or u
ccccuncucguguuacaggc

SEQ ID NO: 79918 - RNA, 20 nt, Artificial Sequence
  Synthetic
aggagcuggagcauucgggc

SEQ ID NO: 79919 - RNA, 20 nt, Artificial Sequence
  Synthetic
agaggccuguauuucccugc

SEQ ID NO: 79920 - RNA, 20 nt, Artificial Sequence
  Synthetic
  misc_feature (8)..(8): n is a, c, g, or u
  misc_feature (12)..(12): n is a, c, g, or u
uccuugancagnagucgugc

SEQ ID NO: 79921 - RNA, 20 nt, Artificial Sequence
  Synthetic
  misc_feature (14)..(14): n is a, c, g, or u
  misc_feature (17)..(17): n is a, c, g, or u
ucaggcaagcaauncunugc

SEQ ID NO: 79922 - RNA, 20 nt, Artificial Sequence
  Synthetic
aaagaaucccagaggauugc

SEQ ID NO: 79923 - RNA, 20 nt, Artificial Sequence
  Synthetic
uggaaacgauguauauuugc

SEQ ID NO: 79924 - RNA, 20 nt, Artificial Sequence
  Synthetic
uugggauugaagucccaauc

SEQ ID NO: 79925 - RNA, 20 nt, Artificial Sequence
  Synthetic
aacauggagaacaucacauc

SEQ ID NO: 79926 - RNA, 20 nt, Artificial Sequence
  Synthetic
  misc_feature (16)..(16): n is a, c, g, or u
uaccgccucagcucunuauc

SEQ ID NO: 79927 - RNA, 20 nt, Artificial Sequence
  Synthetic
  misc_feature (8)..(8): n is a, c, g, or u
caccucancauacugcacuc

SEQ ID NO: 79928 - RNA, 20 nt, Artificial Sequence
  Synthetic
ccuuuugggguggagcccuc

SEQ ID NO: 79929 - RNA, 20 nt, Artificial Sequence
  Synthetic
ucuuuccaccagcaauccuc

SEQ ID NO: 79930 - RNA, 20 nt, Artificial Sequence
  Synthetic
uuugagaaacacucauccuc

SEQ ID NO: 79931 - RNA, 20 nt, Artificial Sequence
  Synthetic
  misc_feature (3)..(3): n is a, c, g, or u
  misc_feature (12)..(12): n is a, c, g, or u
ugnugaggugancaaugcuc

SEQ ID NO: 79932 - RNA, 20 nt, Artificial Sequence
  Synthetic
cgucuaacaacaguagucuc

SEQ ID NO: 79933 - RNA, 20 nt, Artificial Sequence
  Synthetic
agguaggagcuggagcauuc

SEQ ID NO: 79934 - RNA, 20 nt, Artificial Sequence
  Synthetic
cccuaucuuaucaacacuuc

SEQ ID NO: 79935 - RNA, 20 nt, Artificial Sequence
  Synthetic
caucuucuuguugguucuuc

SEQ ID NO: 79936 - RNA, 20 nt, Artificial Sequence
  Synthetic
ccugcugguggcuccaguuc

SEQ ID NO: 79937 - RNA, 20 nt, Artificial Sequence
  Synthetic
uaaugauuaacuagauguuc

SEQ ID NO: 79938 - RNA, 20 nt, Artificial Sequence
  Synthetic
auaaccacauuguguaaaag

SEQ ID NO: 79939 - RNA, 20 nt, Artificial Sequence
  Synthetic
ccugcugcgagcaaaacaag

SEQ ID NO: 79940 - RNA, 20 nt, Artificial Sequence
  Synthetic
  misc_feature (3)..(3): n is a, c, g, or u
cgnaacggcagacggagaag

SEQ ID NO: 79941 - RNA, 20 nt, Artificial Sequence
  Synthetic
ugcccaaggucuuacauaag

SEQ ID NO: 79942 - RNA, 20 nt, Artificial Sequence
  Synthetic
uauaacugaaagccaaacag

SEQ ID NO: 79943 - RNA, 20 nt, Artificial Sequence
  Synthetic
caaaagaaaauugguaacag

SEQ ID NO: 79944 - RNA, 20 nt, Artificial Sequence
  Synthetic
uuucucaaagguggagacag

SEQ ID NO: 79945 - RNA, 20 nt, Artificial Sequence
  Synthetic
uggucgggaaagaaucccag

SEQ ID NO: 79946 - RNA, 20 nt, Artificial Sequence
  Synthetic
aacaagagaugauuaggcag

SEQ ID NO: 79947 - RNA, 20 nt, Artificial Sequence
  Synthetic
cucauccucaggccaugcag

SEQ ID NO: 79948 - RNA, 20 nt, Artificial Sequence
  Synthetic
uacuagugccauuuguucag

SEQ ID NO: 79949 - RNA, 20 nt, Artificial Sequence
  Synthetic
  misc_feature (15)..(15): n is a, c, g, or u
cugcaagaucccagngugag

SEQ ID NO: 79950 - RNA, 20 nt, Artificial Sequence
  Synthetic
  misc_feature (2)..(2): n is a, c, g, or u
  misc_feature (12)..(12): n is a, c, g, or u
cnuuucucauunacugugag

SEQ ID NO: 79951 - RNA, 20 nt, Artificial Sequence
  Synthetic
  misc_feature (18)..(18): n is a, c, g, or u
cccgccuguaacacgagnag

SEQ ID NO: 79952 - RNA, 20 nt, Artificial Sequence
  Synthetic
cgagggaguucuucuucuag

SEQ ID NO: 79953 - RNA, 20 nt, Artificial Sequence
  Synthetic
cuggccguugccgggcaacg

SEQ ID NO: 79954 - RNA, 20 nt, Artificial Sequence
  Synthetic
cagaugagaaggcacagacg

SEQ ID NO: 79955 - RNA, 20 nt, Artificial Sequence
  Synthetic
  misc_feature (1)..(1): n is a, c, g, or u
nccccgagaagggucguccg

SEQ ID NO: 79956 - RNA, 20 nt, Artificial Sequence
  Synthetic
  misc_feature (5)..(5): n is a, c, g, or u
cccuncucguguuacaggcg

SEQ ID NO: 79957 - RNA, 20 nt, Artificial Sequence
  Synthetic
agaccuucgucugcgaggcg

SEQ ID NO: 79958 - RNA, 20 nt, Artificial Sequence
  Synthetic
  misc_feature (1)..(1): n is a, c, g, or u
  misc_feature (3)..(3): n is a, c, g, or u
ncnuaucgucaaucuucucg

SEQ ID NO: 79959 - RNA, 20 nt, Artificial Sequence
  Synthetic
uuuacacacucuauggaagg

SEQ ID NO: 79960 - RNA, 20 nt, Artificial Sequence
  Synthetic
uauuccuuggacucauaagg

SEQ ID NO: 79961 - RNA, 20 nt, Artificial Sequence
  Synthetic
aggacaaguuggaggacagg

SEQ ID NO: 79962 - RNA, 20 nt, Artificial Sequence
  Synthetic
  misc_feature (12)..(12): n is a, c, g, or u
  misc_feature (15)..(15): n is a, c, g, or u
uggcgauuggungangcagg

SEQ ID NO: 79963 - RNA, 20 nt, Artificial Sequence
  Synthetic
  misc_feature (9)..(9): n is a, c, g, or u
  misc_feature (12)..(12): n is a, c, g, or u
cgauuggungangcaggagg

SEQ ID NO: 79964 - RNA, 20 nt, Artificial Sequence
  Synthetic
  misc_feature (1)..(1): n is a, c, g, or u
  misc_feature (10)..(10): n is a, c, g, or u
nucccgauanagagcugagg

SEQ ID NO: 79965 - RNA, 20 nt, Artificial Sequence
  Synthetic
  misc_feature (5)..(5): n is a, c, g, or u
  misc_feature (7)..(7): n is a, c, g, or u
  misc_feature (9)..(9): n is a, c, g, or u
  misc_feature (16)..(16): n is a, c, g, or u
uuaangnunuuuguanuagg

SEQ ID NO: 79966 - RNA, 20 nt, Artificial Sequence
  Synthetic
cccaaaaggccuccgugcgg

SEQ ID NO: 79967 - RNA, 20 nt, Artificial Sequence
  Synthetic
  misc_feature (1)..(1): n is a, c, g, or u
ngacugggaggaguuggggg

SEQ ID NO: 79968 - RNA, 20 nt, Artificial Sequence
  Synthetic
cgcacggaggccuuuugggg

SEQ ID NO: 79969 - RNA, 20 nt, Artificial Sequence
  Synthetic
  misc_feature (13)..(13): n is a, c, g, or u
cuguuuguuuaangacuggg

SEQ ID NO: 79970 - RNA, 20 nt, Artificial Sequence
  Synthetic
  misc_feature (13)..(13): n is a, c, g, or u
aaugacucuagcnaccuggg

SEQ ID NO: 79971 - RNA, 20 nt, Artificial Sequence
  Synthetic
ccuccaagcugugccuuggg

SEQ ID NO: 79972 - RNA, 20 nt, Artificial Sequence
  Synthetic
ugaaggcuggauccaacugg

SEQ ID NO: 79973 - RNA, 20 nt, Artificial Sequence
  Synthetic
  misc_feature (3)..(3): n is a, c, g, or u
uungguggucuauaagcugg

SEQ ID NO: 79974 - RNA, 20 nt, Artificial Sequence
  Synthetic
aacugaaagccaaacagugg

SEQ ID NO: 79975 - RNA, 20 nt, Artificial Sequence
  Synthetic
  misc_feature (16)..(17): n is a, c, g, or u
agaccuugggcaagannugg

SEQ ID NO: 79976 - RNA, 20 nt, Artificial Sequence
  Synthetic
uauggaugaugugguauugg

SEQ ID NO: 79977 - RNA, 20 nt, Artificial Sequence
  Synthetic
ccacccaaggcacagcuugg

SEQ ID NO: 79978 - RNA, 20 nt, Artificial Sequence
  Synthetic
  misc_feature (4)..(4): n is a, c, g, or u
uaangacugggaggaguugg

SEQ ID NO: 79979 - RNA, 20 nt, Artificial Sequence
  Synthetic
ugggaucuugcagaguuugg

SEQ ID NO: 79980 - RNA, 20 nt, Artificial Sequence
  Synthetic
  misc_feature (19)..(19): n is a, c, g, or u
ucucaaagguggagacagng

SEQ ID NO: 79981 - RNA, 20 nt, Artificial Sequence
  Synthetic
auauggugacccacaaaaug

SEQ ID NO: 79982 - RNA, 20 nt, Artificial Sequence
  Synthetic
  misc_feature (6)..(6): n is a, c, g, or u
aaagangguguuuuccaaug

SEQ ID NO: 79983 - RNA, 20 nt, Artificial Sequence
  Synthetic
  misc_feature (12)..(12): n is a, c, g, or u
ccuaacaaaacnaaaagaug

SEQ ID NO: 79984 - RNA, 20 nt, Artificial Sequence
  Synthetic
uuucaguuauauggaugaug

SEQ ID NO: 79985 - RNA, 20 nt, Artificial Sequence
  Synthetic
  misc_feature (5)..(5): n is a, c, g, or u
uguanuaugcccugagccug

SEQ ID NO: 79986 - RNA, 20 nt, Artificial Sequence
  Synthetic
  misc_feature (12)..(12): n is a, c, g, or u
  misc_feature (15)..(15): n is a, c, g, or u
aggcaagcaauncunugcug

SEQ ID NO: 79987 - RNA, 20 nt, Artificial Sequence
  Synthetic
  misc_feature (17)..(17): n is a, c, g, or u
uaaagaauuuggagcuncug

SEQ ID NO: 79988 - RNA, 20 nt, Artificial Sequence
  Synthetic
uaacugaaagccaaacagug

SEQ ID NO: 79989 - RNA, 20 nt, Artificial Sequence
  Synthetic
ugaccaagccccagccagug

SEQ ID NO: 79990 - RNA, 20 nt, Artificial Sequence
  Synthetic
caccccaaaaggccuccgug

SEQ ID NO: 79991 - RNA, 20 nt, Artificial Sequence
  Synthetic
caaaaggccuccgugcggug

SEQ ID NO: 79992 - RNA, 20 nt, Artificial Sequence
  Synthetic
  misc_feature (18)..(18): n is a, c, g, or u
ugccugagugcaguaugnug

SEQ ID NO: 79993 - RNA, 20 nt, Artificial Sequence
  Synthetic
auauggaugaugugguauug

SEQ ID NO: 79994 - RNA, 20 nt, Artificial Sequence
  Synthetic
  misc_feature (3)..(3): n is a, c, g, or u
  misc_feature (7)..(7): n is a, c, g, or u
  misc_feature (15)..(15): n is a, c, g, or u
uunugunugaugugnucuug

SEQ ID NO: 79995 - RNA, 20 nt, Artificial Sequence
  Synthetic
  misc_feature (5)..(5): n is a, c, g, or u
uuaangacugggaggaguug

SEQ ID NO: 79996 - RNA, 20 nt, Artificial Sequence
  Synthetic
cagaguuugguggaagguug

SEQ ID NO: 79997 - RNA, 20 nt, Artificial Sequence
  Synthetic
uggugagugauuggagguug

SEQ ID NO: 79998 - RNA, 20 nt, Artificial Sequence
  Synthetic
  misc_feature (17)..(17): n is a, c, g, or u
uaaaguucaggcaacunuug

SEQ ID NO: 79999 - RNA, 20 nt, Artificial Sequence
  Synthetic
auggaaacgauguauauuug

SEQ ID NO: 80000 - RNA, 20 nt, Artificial Sequence
  Synthetic
caccgcacggaggccuuuug

SEQ ID NO: 80001 - RNA, 20 nt, Artificial Sequence
  Synthetic
  misc_feature (11)..(11): n is a, c, g, or u
  misc_feature (20)..(20): n is a, c, g, or u
auaaggugggnaacuuuacn

SEQ ID NO: 80002 - RNA, 20 nt, Artificial Sequence
  Synthetic
  misc_feature (7)..(7): n is a, c, g, or u
  misc_feature (13)..(13): n is a, c, g, or u
  misc_feature (20)..(20): n is a, c, g, or u
aggaucnucaacnaccagcn

SEQ ID NO: 80003 - RNA, 20 nt, Artificial Sequence
  Synthetic
  misc_feature (20)..(20): n is a, c, g, or u
uucucaaagguggagacagn

SEQ ID NO: 80004 - RNA, 20 nt, Artificial Sequence
  Synthetic
  misc_feature (20)..(20): n is a, c, g, or u
accccgccuguaacacgagn

SEQ ID NO: 80005 - RNA, 20 nt, Artificial Sequence
  Synthetic
  misc_feature (12)..(12): n is a, c, g, or u
  misc_feature (15)..(15): n is a, c, g, or u
  misc_feature (19)..(20): n is a, c, g, or u
acuacuaggucncungaunn

SEQ ID NO: 80006 - RNA, 20 nt, Artificial Sequence
  Synthetic
acccaaagacaaaagaaaau

SEQ ID NO: 80007 - RNA, 20 nt, Artificial Sequence
  Synthetic
  misc_feature (6)..(6): n is a, c, g, or u
ugacanacuuuccaaucaau

SEQ ID NO: 80008 - RNA, 20 nt, Artificial Sequence
  Synthetic
  misc_feature (2)..(2): n is a, c, g, or u
  misc_feature (14)..(14): n is a, c, g, or u
unccugucuuuaanccucau

SEQ ID NO: 80009 - RNA, 20 nt, Artificial Sequence
  Synthetic
  misc_feature (1)..(1): n is a, c, g, or u
  misc_feature (6)..(6): n is a, c, g, or u
  misc_feature (12)..(12): n is a, c, g, or u
nauuunaugggnuaugucau

SEQ ID NO: 80010 - RNA, 20 nt, Artificial Sequence
  Synthetic
  misc_feature (13)..(13): n is a, c, g, or u
cccuaacaaaacnaaaagau

SEQ ID NO: 80011 - RNA, 20 nt, Artificial Sequence
  Synthetic
uccggaaguguugauaagau

SEQ ID NO: 80012 - RNA, 20 nt, Artificial Sequence
  Synthetic
cugccuuccugacuggcgau

SEQ ID NO: 80013 - RNA, 20 nt, Artificial Sequence
  Synthetic
ucgucaaucuucucgaggau

SEQ ID NO: 80014 - RNA, 20 nt, Artificial Sequence
  Synthetic
  misc_feature (9)..(9): n is a, c, g, or u
aaagcccangaugaugggau

SEQ ID NO: 80015 - RNA, 20 nt, Artificial Sequence
  Synthetic
cuguuaacaggccuauugau

SEQ ID NO: 80016 - RNA, 20 nt, Artificial Sequence
  Synthetic
  misc_feature (9)..(9): n is a, c, g, or u
aguuaugunaacacuaauau

SEQ ID NO: 80017 - RNA, 20 nt, Artificial Sequence
  Synthetic
  misc_feature (17)..(17): n is a, c, g, or u
auaccgccucagcucunuau

SEQ ID NO: 80018 - RNA, 20 nt, Artificial Sequence
  Synthetic
cucaagaugcuguacagacu

SEQ ID NO: 80019 - RNA, 20 nt, Artificial Sequence
  Synthetic
  misc_feature (16)..(16): n is a, c, g, or u
agacuguuuguuuaangacu

SEQ ID NO: 80020 - RNA, 20 nt, Artificial Sequence
  Synthetic
  misc_feature (5)..(5): n is a, c, g, or u
uguunacauaacugacuacu

SEQ ID NO: 80021 - RNA, 20 nt, Artificial Sequence
  Synthetic
aguccucuuauguaagaccu

SEQ ID NO: 80022 - RNA, 20 nt, Artificial Sequence
  Synthetic
  misc_feature (1)..(1): n is a, c, g, or u
  misc_feature (16)..(16): n is a, c, g, or u
ncuaaugacucuagcnaccu

SEQ ID NO: 80023 - RNA, 20 nt, Artificial Sequence
  Synthetic
caagccuccaagcugugccu

SEQ ID NO: 80024 - RNA, 20 nt, Artificial Sequence
  Synthetic
aacaucacaucaggauuccu

SEQ ID NO: 80025 - RNA, 20 nt, Artificial Sequence
  Synthetic
aucucaauguuaguauuccu

SEQ ID NO: 80026 - RNA, 20 nt, Artificial Sequence
  Synthetic
aagccacccaaggcacagcu

SEQ ID NO: 80027 - RNA, 20 nt, Artificial Sequence
  Synthetic
  misc_feature (16)..(16): n is a, c, g, or u
cgacccuucucggggncgcu

SEQ ID NO: 80028 - RNA, 20 nt, Artificial Sequence
  Synthetic
aacccccacuggcuggggcu

SEQ ID NO: 80029 - RNA, 20 nt, Artificial Sequence
  Synthetic
  misc_feature (8)..(8): n is a, c, g, or u
ugcaauunauuaugccugcu

SEQ ID NO: 80030 - RNA, 20 nt, Artificial Sequence
  Synthetic
acaucguuuccauggcugcu

SEQ ID NO: 80031 - RNA, 20 nt, Artificial Sequence
  Synthetic
  misc_feature (13)..(13): n is a, c, g, or u
  misc_feature (16)..(16): n is a, c, g, or u
caggcaagcaauncunugcu

SEQ ID NO: 80032 - RNA, 20 nt, Artificial Sequence
  Synthetic
  misc_feature (18)..(18): n is a, c, g, or u
aaauacaggccucucacncu

SEQ ID NO: 80033 - RNA, 20 nt, Artificial Sequence
  Synthetic
cuuuccaccagcaauccucu

SEQ ID NO: 80034 - RNA, 20 nt, Artificial Sequence
  Synthetic
  misc_feature (14)..(14): n is a, c, g, or u
cacauuuuuugaunaugucu

SEQ ID NO: 80035 - RNA, 20 nt, Artificial Sequence
  Synthetic
uuugugggucaccauauucu

SEQ ID NO: 80036 - RNA, 20 nt, Artificial Sequence
  Synthetic
aucccgcggacgacccuucu

SEQ ID NO: 80037 - RNA, 20 nt, Artificial Sequence
  Synthetic
uggacuucucucaauuuucu

SEQ ID NO: 80038 - RNA, 20 nt, Artificial Sequence
  Synthetic
auaacugaaagccaaacagu

SEQ ID NO: 80039 - RNA, 20 nt, Artificial Sequence
  Synthetic
agcuuggaggcuugaacagu

SEQ ID NO: 80040 - RNA, 20 nt, Artificial Sequence
  Synthetic
auucuuucccgaccaccagu

SEQ ID NO: 80041 - RNA, 20 nt, Artificial Sequence
  Synthetic
augaccaagccccagccagu

SEQ ID NO: 80042 - RNA, 20 nt, Artificial Sequence
  Synthetic
uuugaaguaugccucaaggu

SEQ ID NO: 80043 - RNA, 20 nt, Artificial Sequence
  Synthetic
caaguuggaggacaggaggu

SEQ ID NO: 80044 - RNA, 20 nt, Artificial Sequence
  Synthetic
  misc_feature (15)..(15): n is a, c, g, or u
aaagguggagacagnggggu

SEQ ID NO: 80045 - RNA, 20 nt, Artificial Sequence
  Synthetic
  misc_feature (12)..(12): n is a, c, g, or u
augacucuagcnaccugggu

SEQ ID NO: 80046 - RNA, 20 nt, Artificial Sequence
  Synthetic
agagaggugcgccccguggu

SEQ ID NO: 80047 - RNA, 20 nt, Artificial Sequence
  Synthetic
  misc_feature (2)..(2): n is a, c, g, or u
  misc_feature (9)..(9): n is a, c, g, or u
unuuuguanuaggaggcugu

SEQ ID NO: 80048 - RNA, 20 nt, Artificial Sequence
  Synthetic
  misc_feature (6)..(6): n is a, c, g, or u
  misc_feature (15)..(15): n is a, c, g, or u
aaagunugucaacgnauugu

SEQ ID NO: 80049 - RNA, 20 nt, Artificial Sequence
  Synthetic
ugcuccagcuccuaccuugu

SEQ ID NO: 80050 - RNA, 20 nt, Artificial Sequence
  Synthetic
  misc_feature (15)..(15): n is a, c, g, or u
aaaaaaugugaacanuuugu

SEQ ID NO: 80051 - RNA, 20 nt, Artificial Sequence
  Synthetic
  misc_feature (4)..(4): n is a, c, g, or u
cacnuagcgccucauuuugu

SEQ ID NO: 80052 - RNA, 20 nt, Artificial Sequence
  Synthetic
  misc_feature (3)..(3): n is a, c, g, or u
  misc_feature (8)..(8): n is a, c, g, or u
  misc_feature (10)..(10): n is a, c, g, or u
  misc_feature (12)..(12): n is a, c, g, or u
  misc_feature (19)..(19): n is a, c, g, or u
agnuuaangnunuuuguanu

SEQ ID NO: 80053 - RNA, 20 nt, Artificial Sequence
  Synthetic
  misc_feature (19)..(19): n is a, c, g, or u
uauucccaucccaucaucnu

SEQ ID NO: 80054 - RNA, 20 nt, Artificial Sequence
  Synthetic
  misc_feature (19)..(19): n is a, c, g, or u
aggucuggagcaaacauunu

SEQ ID NO: 80055 - RNA, 20 nt, Artificial Sequence
  Synthetic
  misc_feature (6)..(6): n is a, c, g, or u
auuganccuuauaaagaauu

SEQ ID NO: 80056 - RNA, 20 nt, Artificial Sequence
  Synthetic
  misc_feature (1)..(1): n is a, c, g, or u
  misc_feature (15)..(15): n is a, c, g, or u
naccugggugggugnuaauu

SEQ ID NO: 80057 - RNA, 20 nt, Artificial Sequence
  Synthetic
aagguaggagcuggagcauu

SEQ ID NO: 80058 - RNA, 20 nt, Artificial Sequence
  Synthetic
  misc_feature (7)..(7): n is a, c, g, or u
  misc_feature (13)..(13): n is a, c, g, or u
cuuaucnaauggnaaauauu

SEQ ID NO: 80059 - RNA, 20 nt, Artificial Sequence
  Synthetic
ucuugguguaaauguauauu

SEQ ID NO: 80060 - RNA, 20 nt, Artificial Sequence
  Synthetic
  misc_feature (7)..(7): n is a, c, g, or u
  misc_feature (10)..(11): n is a, c, g, or u
agaaacngunnuagaguauu

SEQ ID NO: 80061 - RNA, 20 nt, Artificial Sequence
  Synthetic
uauauggaugaugugguauu

SEQ ID NO: 80062 - RNA, 20 nt, Artificial Sequence
  Synthetic
aagccuccaagcugugccuu

SEQ ID NO: 80063 - RNA, 20 nt, Artificial Sequence
  Synthetic
uaccaauuuucuuuugucuu

SEQ ID NO: 80064 - RNA, 20 nt, Artificial Sequence
  Synthetic
uugugggucaccauauucuu

SEQ ID NO: 80065 - RNA, 20 nt, Artificial Sequence
  Synthetic
  misc_feature (2)..(2): n is a, c, g, or u
cncugggaucuugcagaguu

SEQ ID NO: 80066 - RNA, 20 nt, Artificial Sequence
  Synthetic
  misc_feature (6)..(6): n is a, c, g, or u
uuuaangacugggaggaguu

SEQ ID NO: 80067 - RNA, 20 nt, Artificial Sequence
  Synthetic
uuggugagugauuggagguu

SEQ ID NO: 80068 - RNA, 20 nt, Artificial Sequence
  Synthetic
  misc_feature (11)..(11): n is a, c, g, or u
  misc_feature (17)..(17): n is a, c, g, or u
uguguaaauanugucunguu

SEQ ID NO: 80069 - RNA, 20 nt, Artificial Sequence
  Synthetic
ucuggccagguguccuuguu

SEQ ID NO: 80070 - RNA, 20 nt, Artificial Sequence
  Synthetic
  misc_feature (12)..(12): n is a, c, g, or u
ccccaucuuuunguuuuguu

SEQ ID NO: 80071 - RNA, 20 nt, Artificial Sequence
  Synthetic
agguuggggacugcgaauuu

SEQ ID NO: 80072 - RNA, 20 nt, Artificial Sequence
  Synthetic
  misc_feature (5)..(5): n is a, c, g, or u
acaanaguugccugaacuuu

SEQ ID NO: 80073 - RNA, 20 nt, Artificial Sequence
  Synthetic
cacauuucuugucucacuuu

SEQ ID NO: 80074 - RNA, 20 nt, Artificial Sequence
  Synthetic
  misc_feature (12)..(12): n is a, c, g, or u
aucccaucaucnugggcuuu

SEQ ID NO: 80075 - RNA, 20 nt, Artificial Sequence
  Synthetic
  misc_feature (7)..(7): n is a, c, g, or u
ucaacgnauugugggucuuu

SEQ ID NO: 80076 - RNA, 20 nt, Artificial Sequence
  Synthetic
  misc_feature (1)..(1): n is a, c, g, or u
nuagaguauuuggugucuuu

SEQ ID NO: 80077 - RNA, 20 nt, Artificial Sequence
  Synthetic
accaauuuucuuuugucuuu

SEQ ID NO: 80078 - RNA, 20 nt, Artificial Sequence
  Synthetic
ccaccgcacggaggccuuuu

SEQ ID NO: 80079 - RNA, 20 nt, Artificial Sequence
  Synthetic
  misc_feature (6)..(6): n is a, c, g, or u
caacgnauugugggucuuuu

SEQ ID NO: 80080 - RNA, 22 nt, Artificial Sequence
  Synthetic
  misc_feature (18)..(18): n is a, c, g, or u
guauauuugcgggagagnacaa

SEQ ID NO: 80081 - RNA, 21 nt, Artificial Sequence
  Synthetic
gaccuggccguugccgggcaa

SEQ ID NO: 80082 - RNA, 18 nt, Artificial Sequence
  Synthetic
ggucgggaaagaauccca

SEQ ID NO: 80083 - RNA, 20 nt, Artificial Sequence
  Synthetic
guggucgggaaagaauccca

SEQ ID NO: 80084 - RNA, 21 nt, Artificial Sequence
  Synthetic
gguggucgggaaagaauccca

SEQ ID NO: 80085 - RNA, 21 nt, Artificial Sequence
  Synthetic
  misc_feature (4)..(4): n is a, c, g, or u
guuncccaccuuaugagucca

SEQ ID NO: 80086 - RNA, 19 nt, Artificial Sequence
  Synthetic
  misc_feature (17)..(17): n is a, c, g, or u
gucggucguugacauunca

SEQ ID NO: 80087 - RNA, 20 nt, Artificial Sequence
  Synthetic
  misc_feature (18)..(18): n is a, c, g, or u
ggucggucguugacauunca

SEQ ID NO: 80088 - RNA, 21 nt, Artificial Sequence
  Synthetic
gaaagugaaagccugcuuaga

SEQ ID NO: 80089 - RNA, 23 nt, Artificial Sequence
  Synthetic
gagaaagugaaagccugcuuaga

SEQ ID NO: 80090 - RNA, 21 nt, Artificial Sequence
  Synthetic
ggcagacggagaaggggacga

SEQ ID NO: 80091 - RNA, 20 nt, Artificial Sequence
  Synthetic
gaccuucgucugcgaggcga

SEQ ID NO: 80092 - RNA, 22 nt, Artificial Sequence
  Synthetic
gagaccuucgucugcgaggcga

SEQ ID NO: 80093 - RNA, 20 nt, Artificial Sequence
  Synthetic
gauccaacugguggucggga

SEQ ID NO: 80094 - RNA, 21 nt, Artificial Sequence
  Synthetic
ggauccaacugguggucggga

SEQ ID NO: 80095 - RNA, 24 nt, Artificial Sequence
  Synthetic
gcuggauccaacugguggucggga

SEQ ID NO: 80096 - RNA, 24 nt, Artificial Sequence
  Synthetic
  misc_feature (19)..(19): n is a, c, g, or u
gaauuuuccgaaagcccangauga

SEQ ID NO: 80097 - RNA, 23 nt, Artificial Sequence
  Synthetic
gaaagaagucagaaggcaaaaac

SEQ ID NO: 80098 - RNA, 24 nt, Artificial Sequence
  Synthetic
ggaaagaagucagaaggcaaaaac

SEQ ID NO: 80099 - RNA, 21 nt, Artificial Sequence
  Synthetic
gaaaauugagagaaguccacc

SEQ ID NO: 80100 - RNA, 23 nt, Artificial Sequence
  Synthetic
  misc_feature (13)..(13): n is a, c, g, or u
gucguugacauuncagagagucc

SEQ ID NO: 80101 - RNA, 24 nt, Artificial Sequence
  Synthetic
  misc_feature (14)..(14): n is a, c, g, or u
ggucguugacauuncagagagucc

SEQ ID NO: 80102 - RNA, 22 nt, Artificial Sequence
  Synthetic
  misc_feature (16)..(16): n is a, c, g, or u
gugcgguggggugaancccagc

SEQ ID NO: 80103 - RNA, 21 nt, Artificial Sequence
  Synthetic
  misc_feature (20)..(20): n is a, c, g, or u
ggaaauacaggccucucacnc

SEQ ID NO: 80104 - RNA, 22 nt, Artificial Sequence
  Synthetic
  misc_feature (21)..(21): n is a, c, g, or u
gggaaauacaggccucucacnc

SEQ ID NO: 80105 - RNA, 21 nt, Artificial Sequence
  Synthetic
guuucucaaagguggagacag

SEQ ID NO: 80106 - RNA, 23 nt, Artificial Sequence
  Synthetic
guguuucucaaagguggagacag

SEQ ID NO: 80107 - RNA, 24 nt, Artificial Sequence
  Synthetic
  misc_feature (3)..(3): n is a, c, g, or u
  misc_feature (17)..(17): n is a, c, g, or u
ganagagucccaagcgnccccgag

SEQ ID NO: 80108 - RNA, 21 nt, Artificial Sequence
  Synthetic
  misc_feature (11)..(11): n is a, c, g, or u
  misc_feature (14)..(14): n is a, c, g, or u
ggcgauuggungangcaggag

SEQ ID NO: 80109 - RNA, 21 nt, Artificial Sequence
  Synthetic
  misc_feature (2)..(2): n is a, c, g, or u
  misc_feature (14)..(14): n is a, c, g, or u
gnuuaaagacaggnacaguag

SEQ ID NO: 80110 - RNA, 22 nt, Artificial Sequence
  Synthetic
  misc_feature (3)..(3): n is a, c, g, or u
  misc_feature (15)..(15): n is a, c, g, or u
ggnuuaaagacaggnacaguag

SEQ ID NO: 80111 - RNA, 24 nt, Artificial Sequence
  Synthetic
  misc_feature (5)..(5): n is a, c, g, or u
  misc_feature (17)..(17): n is a, c, g, or u
gaggnuuaaagacaggnacaguag

SEQ ID NO: 80112 - RNA, 21 nt, Artificial Sequence
  Synthetic
gcagaugagaaggcacagacg

SEQ ID NO: 80113 - RNA, 22 nt, Artificial Sequence
  Synthetic
ggcagaugagaaggcacagacg

SEQ ID NO: 80114 - RNA, 21 nt, Artificial Sequence
  Synthetic
  misc_feature (2)..(2): n is a, c, g, or u
gnccccgagaagggucguccg

SEQ ID NO: 80115 - RNA, 23 nt, Artificial Sequence
  Synthetic
  misc_feature (4)..(4): n is a, c, g, or u
gcgnccccgagaagggucguccg

SEQ ID NO: 80116 - RNA, 20 nt, Artificial Sequence
  Synthetic
gauguucuccauguucagcg

SEQ ID NO: 80117 - RNA, 22 nt, Artificial Sequence
  Synthetic
gugauguucuccauguucagcg

SEQ ID NO: 80118 - RNA, 21 nt, Artificial Sequence
  Synthetic
guaaacaaaggacgucccgcg

SEQ ID NO: 80119 - RNA, 24 nt, Artificial Sequence
  Synthetic
gacguaaacaaaggacgucccgcg

SEQ ID NO: 80120 - RNA, 24 nt, Artificial Sequence
  Synthetic
gauuugcgguguuugcucugaagg

SEQ ID NO: 80121 - RNA, 22 nt, Artificial Sequence
  Synthetic
gaagguuugguacagcaacagg

SEQ ID NO: 80122 - RNA, 23 nt, Artificial Sequence
  Synthetic
  misc_feature (6)..(6): n is a, c, g, or u
gcauungguggucuauaagcugg

SEQ ID NO: 80123 - RNA, 24 nt, Artificial Sequence
  Synthetic
  misc_feature (7)..(7): n is a, c, g, or u
ggcauungguggucuauaagcugg

SEQ ID NO: 80124 - RNA, 21 nt, Artificial Sequence
  Synthetic
  misc_feature (10)..(10): n is a, c, g, or u
gccucucacncugggaucuug

SEQ ID NO: 80125 - RNA, 22 nt, Artificial Sequence
  Synthetic
  misc_feature (11)..(11): n is a, c, g, or u
ggccucucacncugggaucuug

SEQ ID NO: 80126 - RNA, 24 nt, Artificial Sequence
  Synthetic
gacaaguuggaggacaggagguug

SEQ ID NO: 80127 - RNA, 20 nt, Artificial Sequence
  Synthetic
guugggauugaagucccaau

SEQ ID NO: 80128 - RNA, 21 nt, Artificial Sequence
  Synthetic
  misc_feature (10)..(10): n is a, c, g, or u
gaaagcccangaugaugggau

SEQ ID NO: 80129 - RNA, 22 nt, Artificial Sequence
  Synthetic
gagugauuggagguuggggacu

SEQ ID NO: 80130 - RNA, 24 nt, Artificial Sequence
  Synthetic
gugagugauuggagguuggggacu

SEQ ID NO: 80131 - RNA, 24 nt, Artificial Sequence
  Synthetic
  misc_feature (15)..(15): n is a, c, g, or u
gccuguaacacgagnagggguccu

SEQ ID NO: 80132 - RNA, 19 nt, Artificial Sequence
  Synthetic
gcgagcaaaacaagcggcu

SEQ ID NO: 80133 - RNA, 22 nt, Artificial Sequence
  Synthetic
gcugcgagcaaaacaagcggcu

SEQ ID NO: 80134 - RNA, 18 nt, Artificial Sequence
  Synthetic
gaccaagccccagccagu

SEQ ID NO: 80135 - RNA, 24 nt, Artificial Sequence
  Synthetic
gcccaugaccaagccccagccagu

SEQ ID NO: 80136 - RNA, 19 nt, Artificial Sequence
  Synthetic
gucuauaagcuggaggagu

SEQ ID NO: 80137 - RNA, 20 nt, Artificial Sequence
  Synthetic
ggucuauaagcuggaggagu

SEQ ID NO: 80138 - RNA, 22 nt, Artificial Sequence
  Synthetic
guggucuauaagcuggaggagu

SEQ ID NO: 80139 - RNA, 23 nt, Artificial Sequence
  Synthetic
gguggucuauaagcuggaggagu

SEQ ID NO: 80140 - RNA, 21 nt, Artificial Sequence
  Synthetic
gucuagacucugcgguauugu

SEQ ID NO: 80141 - RNA, 23 nt, Artificial Sequence
  Synthetic
gagucuagacucugcgguauugu

SEQ ID NO: 80142 - RNA, 22 nt, Artificial Sequence
  Synthetic
gcgucuggccagguguccuugu

SEQ ID NO: 80143 - RNA, 23 nt, Artificial Sequence
  Synthetic
ggcgucuggccagguguccuugu

SEQ ID NO: 80144 - RNA, 23 nt, Artificial Sequence
  Synthetic
  misc_feature (16)..(16): n is a, c, g, or u
guaaccccaucuuuunguuuugu

SEQ ID NO: 80145 - RNA, 22 nt, Artificial Sequence
  Synthetic
  misc_feature (5)..(5): n is a, c, g, or u
  misc_feature (14)..(14): n is a, c, g, or u
gcccnguaaaguuncccaccuu

SEQ ID NO: 80146 - RNA, 23 nt, Artificial Sequence
  Synthetic
gaaguaaugauuaacuagauguu

SEQ ID NO: 80147 - RNA, 24 nt, Artificial Sequence
  Synthetic
ggaaguaaugauuaacuagauguu

SEQ ID NO: 80148 - RNA, 21 nt, Artificial Sequence
  Synthetic
gcugcuaggcugugcugccaa

SEQ ID NO: 80149 - RNA, 22 nt, Artificial Sequence
  Synthetic
ggcugcuaggcugugcugccaa

SEQ ID NO: 80150 - RNA, 22 nt, Artificial Sequence
  Synthetic
  misc_feature (2)..(2): n is a, c, g, or u
  misc_feature (15)..(15): n is a, c, g, or u
gncauggacauuganccuuaua

SEQ ID NO: 80151 - RNA, 23 nt, Artificial Sequence
  Synthetic
  misc_feature (3)..(3): n is a, c, g, or u
  misc_feature (16)..(16): n is a, c, g, or u
ggncauggacauuganccuuaua

SEQ ID NO: 80152 - RNA, 18 nt, Artificial Sequence
  Synthetic
gggguuuuucuuguugac

SEQ ID NO: 80153 - RNA, 20 nt, Artificial Sequence
  Synthetic
gcgggguuuuucuuguugac

SEQ ID NO: 80154 - RNA, 21 nt, Artificial Sequence
  Synthetic
ggcgggguuuuucuuguugac

SEQ ID NO: 80155 - RNA, 21 nt, Artificial Sequence
  Synthetic
  misc_feature (4)..(4): n is a, c, g, or u
  misc_feature (19)..(19): n is a, c, g, or u
ggancuaaugacucuagcnac

SEQ ID NO: 80156 - RNA, 22 nt, Artificial Sequence
  Synthetic
  misc_feature (5)..(5): n is a, c, g, or u
  misc_feature (20)..(20): n is a, c, g, or u
gggancuaaugacucuagcnac

SEQ ID NO: 80157 - RNA, 23 nt, Artificial Sequence
  Synthetic
  misc_feature (6)..(6): n is a, c, g, or u
  misc_feature (21)..(21): n is a, c, g, or u
ggggancuaaugacucuagcnac

SEQ ID NO: 80158 - RNA, 24 nt, Artificial Sequence
  Synthetic
  misc_feature (7)..(7): n is a, c, g, or u
  misc_feature (22)..(22): n is a, c, g, or u
gggggancuaaugacucuagcnac

SEQ ID NO: 80159 - RNA, 22 nt, Artificial Sequence
  Synthetic
guucaagccuccaagcugugcc

SEQ ID NO: 80160 - RNA, 19 nt, Artificial Sequence
  Synthetic
gccaagucuguacagcauc

SEQ ID NO: 80161 - RNA, 20 nt, Artificial Sequence
  Synthetic
ggccaagucuguacagcauc

SEQ ID NO: 80162 - RNA, 21 nt, Artificial Sequence
  Synthetic
gggccaagucuguacagcauc

SEQ ID NO: 80163 - RNA, 22 nt, Artificial Sequence
  Synthetic
ggggccaagucuguacagcauc

SEQ ID NO: 80164 - RNA, 23 nt, Artificial Sequence
  Synthetic
gggggccaagucuguacagcauc

SEQ ID NO: 80165 - RNA, 23 nt, Artificial Sequence
  Synthetic
gaaucuuuccaccagcaauccuc

SEQ ID NO: 80166 - RNA, 18 nt, Artificial Sequence
  Synthetic
gcagaagaucucaaucuc

SEQ ID NO: 80167 - RNA, 21 nt, Artificial Sequence
  Synthetic
gucgcagaagaucucaaucuc

SEQ ID NO: 80168 - RNA, 23 nt, Artificial Sequence
  Synthetic
gcgucgcagaagaucucaaucuc

SEQ ID NO: 80169 - RNA, 20 nt, Artificial Sequence
  Synthetic
gcccguuuguccucuaauuc

SEQ ID NO: 80170 - RNA, 23 nt, Artificial Sequence
  Synthetic
guugcccguuuguccucuaauuc

SEQ ID NO: 80171 - RNA, 20 nt, Artificial Sequence
  Synthetic
gauucuuucccgaccaccag

SEQ ID NO: 80172 - RNA, 21 nt, Artificial Sequence
  Synthetic
ggauucuuucccgaccaccag

SEQ ID NO: 80173 - RNA, 22 nt, Artificial Sequence
  Synthetic
gggauucuuucccgaccaccag

SEQ ID NO: 80174 - RNA, 22 nt, Artificial Sequence
  Synthetic
gacaagaauccucacaauaccg

SEQ ID NO: 80175 - RNA, 18 nt, Artificial Sequence
  Synthetic
guuuacgucccgucggcg

SEQ ID NO: 80176 - RNA, 21 nt, Artificial Sequence
  Synthetic
  misc_feature (8)..(8): n is a, c, g, or u
gaccccuncucguguuacagg

SEQ ID NO: 80177 - RNA, 22 nt, Artificial Sequence
  Synthetic
  misc_feature (9)..(9): n is a, c, g, or u
ggaccccuncucguguuacagg

SEQ ID NO: 80178 - RNA, 22 nt, Artificial Sequence
  Synthetic
gaacaagagcuacagcaugggg

SEQ ID NO: 80179 - RNA, 23 nt, Artificial Sequence
  Synthetic
ggaacaagagcuacagcaugggg

SEQ ID NO: 80180 - RNA, 24 nt, Artificial Sequence
  Synthetic
gggaacaagagcuacagcaugggg

SEQ ID NO: 80181 - RNA, 22 nt, Artificial Sequence
  Synthetic
  misc_feature (15)..(15): n is a, c, g, or u
gacuguuuguuuaangacuggg

SEQ ID NO: 80182 - RNA, 24 nt, Artificial Sequence
  Synthetic
  misc_feature (3)..(3): n is a, c, g, or u
  misc_feature (18)..(18): n is a, c, g, or u
gancuaaugacucuagcnaccugg

SEQ ID NO: 80183 - RNA, 23 nt, Artificial Sequence
  Synthetic
gcugaacauggagaacaucacau

SEQ ID NO: 80184 - RNA, 24 nt, Artificial Sequence
  Synthetic
  misc_feature (15)..(15): n is a, c, g, or u
  misc_feature (21)..(21): n is a, c, g, or u
guuaccaaauauuunccauungau

SEQ ID NO: 80185 - RNA, 19 nt, Artificial Sequence
  Synthetic
gcuuucggaaaauuccuau

SEQ ID NO: 80186 - RNA, 20 nt, Artificial Sequence
  Synthetic
ggcuuucggaaaauuccuau

SEQ ID NO: 80187 - RNA, 21 nt, Artificial Sequence
  Synthetic
gggcuuucggaaaauuccuau

SEQ ID NO: 80188 - RNA, 19 nt, Artificial Sequence
  Synthetic
  misc_feature (6)..(6): n is a, c, g, or u
  misc_feature (15)..(15): n is a, c, g, or u
gcucunuaucgggangccu

SEQ ID NO: 80189 - RNA, 21 nt, Artificial Sequence
  Synthetic
guuaccaauuuucuuuugucu

SEQ ID NO: 80190 - RNA, 24 nt, Artificial Sequence
  Synthetic
gcuguuaccaauuuucuuuugucu

SEQ ID NO: 80191 - RNA, 21 nt, Artificial Sequence
  Synthetic
guauuuggugucuuucggagu

SEQ ID NO: 80192 - RNA, 23 nt, Artificial Sequence
  Synthetic
gaguauuuggugucuuucggagu

SEQ ID NO: 80193 - RNA, 24 nt, Artificial Sequence
  Synthetic
  misc_feature (12)..(12): n is a, c, g, or u
  misc_feature (21)..(21): n is a, c, g, or u
gauuggaaagunugucaacgnauu

SEQ ID NO: 80194 - RNA, 20 nt, Artificial Sequence
  Synthetic
  misc_feature (8)..(8): n is a, c, g, or u
gucaacgnauugugggucuu

SEQ ID NO: 80195 - RNA, 24 nt, Artificial Sequence
  Synthetic
  misc_feature (3)..(3): n is a, c, g, or u
  misc_feature (12)..(12): n is a, c, g, or u
gunugucaacgnauugugggucuu

SEQ ID NO: 80196 - RNA, 23 nt, Artificial Sequence
  Synthetic
  misc_feature (3)..(4): n is a, c, g, or u
gunnuagaguauuuggugucuuu

SEQ ID NO: 80197 - RNA, 21 nt, Artificial Sequence
  Synthetic
  misc_feature (17)..(17): n is a, c, g, or u
uauauuugcgggagagnacaa

SEQ ID NO: 80198 - RNA, 23 nt, Artificial Sequence
  Synthetic
  misc_feature (19)..(19): n is a, c, g, or u
uguauauuugcgggagagnacaa

SEQ ID NO: 80199 - RNA, 24 nt, Artificial Sequence
  Synthetic
  misc_feature (20)..(20): n is a, c, g, or u
auguauauuugcgggagagnacaa

SEQ ID NO: 80200 - RNA, 18 nt, Artificial Sequence
  Synthetic
cuggccguugccgggcaa

SEQ ID NO: 80201 - RNA, 19 nt, Artificial Sequence
  Synthetic
ccuggccguugccgggcaa

SEQ ID NO: 80202 - RNA, 20 nt, Artificial Sequence
  Synthetic
accuggccguugccgggcaa

SEQ ID NO: 80203 - RNA, 22 nt, Artificial Sequence
  Synthetic
agaccuggccguugccgggcaa

SEQ ID NO: 80204 - RNA, 23 nt, Artificial Sequence
  Synthetic
cagaccuggccguugccgggcaa

SEQ ID NO: 80205 - RNA, 24 nt, Artificial Sequence
  Synthetic
acagaccuggccguugccgggcaa

SEQ ID NO: 80206 - RNA, 21 nt, Artificial Sequence
  Synthetic
  misc_feature (1)..(1): n is a, c, g, or u
  misc_feature (3)..(3): n is a, c, g, or u
  misc_feature (9)..(9): n is a, c, g, or u
ngngagagncaguagucggaa

SEQ ID NO: 80207 - RNA, 22 nt, Artificial Sequence
  Synthetic
  misc_feature (2)..(2): n is a, c, g, or u
  misc_feature (4)..(4): n is a, c, g, or u
  misc_feature (10)..(10): n is a, c, g, or u
angngagagncaguagucggaa

SEQ ID NO: 80208 - RNA, 23 nt, Artificial Sequence
  Synthetic
  misc_feature (3)..(3): n is a, c, g, or u
  misc_feature (5)..(5): n is a, c, g, or u
  misc_feature (11)..(11): n is a, c, g, or u
uangngagagncaguagucggaa

SEQ ID NO: 80209 - RNA, 24 nt, Artificial Sequence
  Synthetic
  misc_feature (4)..(4): n is a, c, g, or u
  misc_feature (6)..(6): n is a, c, g, or u
  misc_feature (12)..(12): n is a, c, g, or u
auangngagagncaguagucggaa

SEQ ID NO: 80210 - RNA, 19 nt, Artificial Sequence
  Synthetic
uggucgggaaagaauccca

SEQ ID NO: 80211 - RNA, 22 nt, Artificial Sequence
  Synthetic
ugguggucgggaaagaauccca

SEQ ID NO: 80212 - RNA, 23 nt, Artificial Sequence
  Synthetic
cugguggucgggaaagaauccca

SEQ ID NO: 80213 - RNA, 24 nt, Artificial Sequence
  Synthetic
acugguggucgggaaagaauccca

SEQ ID NO: 80214 - RNA, 22 nt, Artificial Sequence
  Synthetic
  misc_feature (5)..(5): n is a, c, g, or u
aguuncccaccuuaugagucca

SEQ ID NO: 80215 - RNA, 23 nt, Artificial Sequence
  Synthetic
  misc_feature (6)..(6): n is a, c, g, or u
aaguuncccaccuuaugagucca

SEQ ID NO: 80216 - RNA, 24 nt, Artificial Sequence
  Synthetic
  misc_feature (7)..(7): n is a, c, g, or u
aaaguuncccaccuuaugagucca

SEQ ID NO: 80217 - RNA, 18 nt, Artificial Sequence
  Synthetic
uaauauacccgccuucca

SEQ ID NO: 80218 - RNA, 19 nt, Artificial Sequence
  Synthetic
auaauauacccgccuucca

SEQ ID NO: 80219 - RNA, 20 nt, Artificial Sequence
  Synthetic
uauaauauacccgccuucca

SEQ ID NO: 80220 - RNA, 21 nt, Artificial Sequence
  Synthetic
auauaauauacccgccuucca

SEQ ID NO: 80221 - RNA, 22 nt, Artificial Sequence
  Synthetic
uauauaauauacccgccuucca

SEQ ID NO: 80222 - RNA, 23 nt, Artificial Sequence
  Synthetic
uuauauaauauacccgccuucca

SEQ ID NO: 80223 - RNA, 24 nt, Artificial Sequence
  Synthetic
cuuauauaauauacccgccuucca

SEQ ID NO: 80224 - RNA, 18 nt, Artificial Sequence
  Synthetic
  misc_feature (16)..(16): n is a, c, g, or u
ucggucguugacauunca

SEQ ID NO: 80225 - RNA, 21 nt, Artificial Sequence
  Synthetic
  misc_feature (19)..(19): n is a, c, g, or u
aggucggucguugacauunca

SEQ ID NO: 80226 - RNA, 22 nt, Artificial Sequence
  Synthetic
  misc_feature (20)..(20): n is a, c, g, or u
aaggucggucguugacauunca

SEQ ID NO: 80227 - RNA, 23 nt, Artificial Sequence
  Synthetic
  misc_feature (21)..(21): n is a, c, g, or u
caaggucggucguugacauunca

SEQ ID NO: 80228 - RNA, 24 nt, Artificial Sequence
  Synthetic
  misc_feature (22)..(22): n is a, c, g, or u
ucaaggucggucguugacauunca

SEQ ID NO: 80229 - RNA, 22 nt, Artificial Sequence
  Synthetic
agaaagugaaagccugcuuaga

SEQ ID NO: 80230 - RNA, 24 nt, Artificial Sequence
  Synthetic
cgagaaagugaaagccugcuuaga

SEQ ID NO: 80231 - RNA, 22 nt, Artificial Sequence
  Synthetic
cggcagacggagaaggggacga

SEQ ID NO: 80232 - RNA, 23 nt, Artificial Sequence
  Synthetic
acggcagacggagaaggggacga

SEQ ID NO: 80233 - RNA, 24 nt, Artificial Sequence
  Synthetic
aacggcagacggagaaggggacga

SEQ ID NO: 80234 - RNA, 18 nt, Artificial Sequence
  Synthetic
ccuucgucugcgaggcga

SEQ ID NO: 80235 - RNA, 19 nt, Artificial Sequence
  Synthetic
accuucgucugcgaggcga

SEQ ID NO: 80236 - RNA, 21 nt, Artificial Sequence
  Synthetic
agaccuucgucugcgaggcga

SEQ ID NO: 80237 - RNA, 23 nt, Artificial Sequence
  Synthetic
ugagaccuucgucugcgaggcga

SEQ ID NO: 80238 - RNA, 24 nt, Artificial Sequence
  Synthetic
uugagaccuucgucugcgaggcga

SEQ ID NO: 80239 - RNA, 18 nt, Artificial Sequence
  Synthetic
uccaacugguggucggga

SEQ ID NO: 80240 - RNA, 19 nt, Artificial Sequence
  Synthetic
auccaacugguggucggga

SEQ ID NO: 80241 - RNA, 22 nt, Artificial Sequence
  Synthetic
uggauccaacugguggucggga

SEQ ID NO: 80242 - RNA, 23 nt, Artificial Sequence
  Synthetic
cuggauccaacugguggucggga

SEQ ID NO: 80243 - RNA, 21 nt, Artificial Sequence
  Synthetic
  misc_feature (16)..(16): n is a, c, g, or u
uuuuccgaaagcccangauga

SEQ ID NO: 80244 - RNA, 22 nt, Artificial Sequence
  Synthetic
  misc_feature (17)..(17): n is a, c, g, or u
auuuuccgaaagcccangauga

SEQ ID NO: 80245 - RNA, 23 nt, Artificial Sequence
  Synthetic
  misc_feature (18)..(18): n is a, c, g, or u
aauuuuccgaaagcccangauga

SEQ ID NO: 80246 - RNA, 21 nt, Artificial Sequence
  Synthetic
  misc_feature (8)..(8): n is a, c, g, or u
  misc_feature (14)..(14): n is a, c, g, or u
  misc_feature (19)..(19): n is a, c, g, or u
ugacauancccaunaaaunua

SEQ ID NO: 80247 - RNA, 22 nt, Artificial Sequence
  Synthetic
  misc_feature (9)..(9): n is a, c, g, or u
  misc_feature (15)..(15): n is a, c, g, or u
  misc_feature (20)..(20): n is a, c, g, or u
augacauancccaunaaaunua

SEQ ID NO: 80248 - RNA, 23 nt, Artificial Sequence
  Synthetic
  misc_feature (10)..(10): n is a, c, g, or u
  misc_feature (16)..(16): n is a, c, g, or u
  misc_feature (21)..(21): n is a, c, g, or u
aaugacauancccaunaaaunua

SEQ ID NO: 80249 - RNA, 24 nt, Artificial Sequence
  Synthetic
  misc_feature (11)..(11): n is a, c, g, or u
  misc_feature (17)..(17): n is a, c, g, or u
  misc_feature (22)..(22): n is a, c, g, or u
caaugacauancccaunaaaunua

SEQ ID NO: 80250 - RNA, 21 nt, Artificial Sequence
  Synthetic
aagaagucagaaggcaaaaac

SEQ ID NO: 80251 - RNA, 22 nt, Artificial Sequence
  Synthetic
aaagaagucagaaggcaaaaac

SEQ ID NO: 80252 - RNA, 22 nt, Artificial Sequence
  Synthetic
agaaaauugagagaaguccacc

SEQ ID NO: 80253 - RNA, 23 nt, Artificial Sequence
  Synthetic
uagaaaauugagagaaguccacc

SEQ ID NO: 80254 - RNA, 24 nt, Artificial Sequence
  Synthetic
cuagaaaauugagagaaguccacc

SEQ ID NO: 80255 - RNA, 21 nt, Artificial Sequence
  Synthetic
caugcuguagcucuuguuccc

SEQ ID NO: 80256 - RNA, 22 nt, Artificial Sequence
  Synthetic
ccaugcuguagcucuuguuccc

SEQ ID NO: 80257 - RNA, 23 nt, Artificial Sequence
  Synthetic
cccaugcuguagcucuuguuccc

SEQ ID NO: 80258 - RNA, 24 nt, Artificial Sequence
  Synthetic
ccccaugcuguagcucuuguuccc

SEQ ID NO: 80259 - RNA, 21 nt, Artificial Sequence
  Synthetic
  misc_feature (11)..(11): n is a, c, g, or u
cguugacauuncagagagucc

SEQ ID NO: 80260 - RNA, 22 nt, Artificial Sequence
  Synthetic
  misc_feature (12)..(12): n is a, c, g, or u
ucguugacauuncagagagucc

SEQ ID NO: 80261 - RNA, 21 nt, Artificial Sequence
  Synthetic
  misc_feature (15)..(15): n is a, c, g, or u
ugcgguggggugaancccagc

SEQ ID NO: 80262 - RNA, 23 nt, Artificial Sequence
  Synthetic
  misc_feature (17)..(17): n is a, c, g, or u
cgugcgguggggugaancccagc

SEQ ID NO: 80263 - RNA, 24 nt, Artificial Sequence
  Synthetic
  misc_feature (18)..(18): n is a, c, g, or u
ccgugcgguggggugaancccagc

SEQ ID NO: 80264 - RNA, 21 nt, Artificial Sequence
  Synthetic
  misc_feature (5)..(5): n is a, c, g, or u
  misc_feature (19)..(19): n is a, c, g, or u
auuancacccacccaggungc

SEQ ID NO: 80265 - RNA, 22 nt, Artificial Sequence
  Synthetic
  misc_feature (6)..(6): n is a, c, g, or u
  misc_feature (20)..(20): n is a, c, g, or u
aauuancacccacccaggungc

SEQ ID NO: 80266 - RNA, 23 nt, Artificial Sequence
  Synthetic
  misc_feature (7)..(7): n is a, c, g, or u
  misc_feature (21)..(21): n is a, c, g, or u
aaauuancacccacccaggungc

SEQ ID NO: 80267 - RNA, 24 nt, Artificial Sequence
  Synthetic
  misc_feature (8)..(8): n is a, c, g, or u
  misc_feature (22)..(22): n is a, c, g, or u
caaauuancacccacccaggungc

SEQ ID NO: 80268 - RNA, 21 nt, Artificial Sequence
  Synthetic
  misc_feature (9)..(9): n is a, c, g, or u
  misc_feature (12)..(12): n is a, c, g, or u
ccccagcanagnauugcuugc

SEQ ID NO: 80269 - RNA, 22 nt, Artificial Sequence
  Synthetic
  misc_feature (10)..(10): n is a, c, g, or u
  misc_feature (13)..(13): n is a, c, g, or u
cccccagcanagnauugcuugc

SEQ ID NO: 80270 - RNA, 23 nt, Artificial Sequence
  Synthetic
  misc_feature (11)..(11): n is a, c, g, or u
  misc_feature (14)..(14): n is a, c, g, or u
ccccccagcanagnauugcuugc

SEQ ID NO: 80271 - RNA, 24 nt, Artificial Sequence
  Synthetic
  misc_feature (12)..(12): n is a, c, g, or u
  misc_feature (15)..(15): n is a, c, g, or u
uccccccagcanagnauugcuugc

SEQ ID NO: 80272 - RNA, 23 nt, Artificial Sequence
  Synthetic
  misc_feature (22)..(22): n is a, c, g, or u
agggaaauacaggccucucacnc

SEQ ID NO: 80273 - RNA, 24 nt, Artificial Sequence
  Synthetic
  misc_feature (23)..(23): n is a, c, g, or u
cagggaaauacaggccucucacnc

SEQ ID NO: 80274 - RNA, 21 nt, Artificial Sequence
  Synthetic
  misc_feature (2)..(2): n is a, c, g, or u
  misc_feature (11)..(11): n is a, c, g, or u
angcauacaanggcauuaaag

SEQ ID NO: 80275 - RNA, 22 nt, Artificial Sequence
  Synthetic
  misc_feature (3)..(3): n is a, c, g, or u
  misc_feature (12)..(12): n is a, c, g, or u
cangcauacaanggcauuaaag

SEQ ID NO: 80276 - RNA, 23 nt, Artificial Sequence
  Synthetic
  misc_feature (4)..(4): n is a, c, g, or u
  misc_feature (13)..(13): n is a, c, g, or u
acangcauacaanggcauuaaag

SEQ ID NO: 80277 - RNA, 24 nt, Artificial Sequence
  Synthetic
  misc_feature (5)..(5): n is a, c, g, or u
  misc_feature (14)..(14): n is a, c, g, or u
uacangcauacaanggcauuaaag

SEQ ID NO: 80278 - RNA, 22 nt, Artificial Sequence
  Synthetic
uguuucucaaagguggagacag

SEQ ID NO: 80279 - RNA, 24 nt, Artificial Sequence
  Synthetic
aguguuucucaaagguggagacag

SEQ ID NO: 80280 - RNA, 21 nt, Artificial Sequence
  Synthetic
caagaagaugaggcauagcag

SEQ ID NO: 80281 - RNA, 22 nt, Artificial Sequence
  Synthetic
acaagaagaugaggcauagcag

SEQ ID NO: 80282 - RNA, 23 nt, Artificial Sequence
  Synthetic
aacaagaagaugaggcauagcag

SEQ ID NO: 80283 - RNA, 24 nt, Artificial Sequence
  Synthetic
caacaagaagaugaggcauagcag

SEQ ID NO: 80284 - RNA, 21 nt, Artificial Sequence
  Synthetic
  misc_feature (14)..(14): n is a, c, g, or u
agagucccaagcgnccccgag

SEQ ID NO: 80285 - RNA, 22 nt, Artificial Sequence
  Synthetic
  misc_feature (1)..(1): n is a, c, g, or u
  misc_feature (15)..(15): n is a, c, g, or u
nagagucccaagcgnccccgag

SEQ ID NO: 80286 - RNA, 23 nt, Artificial Sequence
  Synthetic
  misc_feature (2)..(2): n is a, c, g, or u
  misc_feature (16)..(16): n is a, c, g, or u
anagagucccaagcgnccccgag

SEQ ID NO: 80287 - RNA, 22 nt, Artificial Sequence
  Synthetic
  misc_feature (12)..(12): n is a, c, g, or u
  misc_feature (15)..(15): n is a, c, g, or u
uggcgauuggungangcaggag

SEQ ID NO: 80288 - RNA, 23 nt, Artificial Sequence
  Synthetic
  misc_feature (13)..(13): n is a, c, g, or u
  misc_feature (16)..(16): n is a, c, g, or u
cuggcgauuggungangcaggag

SEQ ID NO: 80289 - RNA, 24 nt, Artificial Sequence
  Synthetic
  misc_feature (14)..(14): n is a, c, g, or u
  misc_feature (17)..(17): n is a, c, g, or u
acuggcgauuggungangcaggag

SEQ ID NO: 80290 - RNA, 23 nt, Artificial Sequence
  Synthetic
  misc_feature (4)..(4): n is a, c, g, or u
  misc_feature (16)..(16): n is a, c, g, or u
aggnuuaaagacaggnacaguag

SEQ ID NO: 80291 - RNA, 23 nt, Artificial Sequence
  Synthetic
cggcagaugagaaggcacagacg

SEQ ID NO: 80292 - RNA, 24 nt, Artificial Sequence
  Synthetic
ccggcagaugagaaggcacagacg

SEQ ID NO: 80293 - RNA, 18 nt, Artificial Sequence
  Synthetic
cccgagaagggucguccg

SEQ ID NO: 80294 - RNA, 19 nt, Artificial Sequence
  Synthetic
ccccgagaagggucguccg

SEQ ID NO: 80295 - RNA, 20 nt, Artificial Sequence
  Synthetic
  misc_feature (1)..(1): n is a, c, g, or u
nccccgagaagggucguccg

SEQ ID NO: 80296 - RNA, 22 nt, Artificial Sequence
  Synthetic
  misc_feature (3)..(3): n is a, c, g, or u
cgnccccgagaagggucguccg

SEQ ID NO: 80297 - RNA, 24 nt, Artificial Sequence
  Synthetic
  misc_feature (5)..(5): n is a, c, g, or u
agcgnccccgagaagggucguccg

SEQ ID NO: 80298 - RNA, 18 nt, Artificial Sequence
  Synthetic
uguucuccauguucagcg

SEQ ID NO: 80299 - RNA, 19 nt, Artificial Sequence
  Synthetic
auguucuccauguucagcg

SEQ ID NO: 80300 - RNA, 21 nt, Artificial Sequence
  Synthetic
ugauguucuccauguucagcg

SEQ ID NO: 80301 - RNA, 23 nt, Artificial Sequence
  Synthetic
ugugauguucuccauguucagcg

SEQ ID NO: 80302 - RNA, 24 nt, Artificial Sequence
  Synthetic
augugauguucuccauguucagcg

SEQ ID NO: 80303 - RNA, 18 nt, Artificial Sequence
  Synthetic
aacaaaggacgucccgcg

SEQ ID NO: 80304 - RNA, 19 nt, Artificial Sequence
  Synthetic
aaacaaaggacgucccgcg

SEQ ID NO: 80305 - RNA, 20 nt, Artificial Sequence
  Synthetic
uaaacaaaggacgucccgcg

SEQ ID NO: 80306 - RNA, 22 nt, Artificial Sequence
  Synthetic
cguaaacaaaggacgucccgcg

SEQ ID NO: 80307 - RNA, 23 nt, Artificial Sequence
  Synthetic
acguaaacaaaggacgucccgcg

SEQ ID NO: 80308 - RNA, 21 nt, Artificial Sequence
  Synthetic
uugcgguguuugcucugaagg

SEQ ID NO: 80309 - RNA, 22 nt, Artificial Sequence
  Synthetic
uuugcgguguuugcucugaagg

SEQ ID NO: 80310 - RNA, 23 nt, Artificial Sequence
  Synthetic
auuugcgguguuugcucugaagg

SEQ ID NO: 80311 - RNA, 21 nt, Artificial Sequence
  Synthetic
aagguuugguacagcaacagg

SEQ ID NO: 80312 - RNA, 23 nt, Artificial Sequence
  Synthetic
cgaagguuugguacagcaacagg

SEQ ID NO: 80313 - RNA, 24 nt, Artificial Sequence
  Synthetic
ccgaagguuugguacagcaacagg

SEQ ID NO: 80314 - RNA, 18 nt, Artificial Sequence
  Synthetic
caaaaggccuccgugcgg

SEQ ID NO: 80315 - RNA, 19 nt, Artificial Sequence
  Synthetic
ccaaaaggccuccgugcgg

SEQ ID NO: 80316 - RNA, 20 nt, Artificial Sequence
  Synthetic
cccaaaaggccuccgugcgg

SEQ ID NO: 80317 - RNA, 21 nt, Artificial Sequence
  Synthetic
ccccaaaaggccuccgugcgg

SEQ ID NO: 80318 - RNA, 22 nt, Artificial Sequence
  Synthetic
accccaaaaggccuccgugcgg

SEQ ID NO: 80319 - RNA, 23 nt, Artificial Sequence
  Synthetic
caccccaaaaggccuccgugcgg

SEQ ID NO: 80320 - RNA, 24 nt, Artificial Sequence
  Synthetic
ccaccccaaaaggccuccgugcgg

SEQ ID NO: 80321 - RNA, 21 nt, Artificial Sequence
  Synthetic
  misc_feature (4)..(4): n is a, c, g, or u
auungguggucuauaagcugg

SEQ ID NO: 80322 - RNA, 22 nt, Artificial Sequence
  Synthetic
  misc_feature (5)..(5): n is a, c, g, or u
cauungguggucuauaagcugg

SEQ ID NO: 80323 - RNA, 23 nt, Artificial Sequence
  Synthetic
  misc_feature (12)..(12): n is a, c, g, or u
aggccucucacncugggaucuug

SEQ ID NO: 80324 - RNA, 24 nt, Artificial Sequence
  Synthetic
  misc_feature (13)..(13): n is a, c, g, or u
caggccucucacncugggaucuug

SEQ ID NO: 80325 - RNA, 21 nt, Artificial Sequence
  Synthetic
aaguuggaggacaggagguug

SEQ ID NO: 80326 - RNA, 22 nt, Artificial Sequence
  Synthetic
caaguuggaggacaggagguug

SEQ ID NO: 80327 - RNA, 23 nt, Artificial Sequence
  Synthetic
acaaguuggaggacaggagguug

SEQ ID NO: 80328 - RNA, 18 nt, Artificial Sequence
  Synthetic
  misc_feature (18)..(18): n is a, c, g, or u
cccgccuguaacacgagn

SEQ ID NO: 80329 - RNA, 19 nt, Artificial Sequence
  Synthetic
  misc_feature (19)..(19): n is a, c, g, or u
ccccgccuguaacacgagn

SEQ ID NO: 80330 - RNA, 20 nt, Artificial Sequence
  Synthetic
  misc_feature (20)..(20): n is a, c, g, or u
accccgccuguaacacgagn

SEQ ID NO: 80331 - RNA, 21 nt, Artificial Sequence
  Synthetic
  misc_feature (21)..(21): n is a, c, g, or u
aaccccgccuguaacacgagn

SEQ ID NO: 80332 - RNA, 22 nt, Artificial Sequence
  Synthetic
  misc_feature (22)..(22): n is a, c, g, or u
aaaccccgccuguaacacgagn

SEQ ID NO: 80333 - RNA, 23 nt, Artificial Sequence
  Synthetic
  misc_feature (23)..(23): n is a, c, g, or u
aaaaccccgccuguaacacgagn

SEQ ID NO: 80334 - RNA, 24 nt, Artificial Sequence
  Synthetic
  misc_feature (24)..(24): n is a, c, g, or u
aaaaaccccgccuguaacacgagn

SEQ ID NO: 80335 - RNA, 21 nt, Artificial Sequence
  Synthetic
  misc_feature (14)..(14): n is a, c, g, or u
  misc_feature (17)..(17): n is a, c, g, or u
  misc_feature (21)..(21): n is a, c, g, or u
ugacuacuaggucncungaun

SEQ ID NO: 80336 - RNA, 22 nt, Artificial Sequence
  Synthetic
  misc_feature (15)..(15): n is a, c, g, or u
  misc_feature (18)..(18): n is a, c, g, or u
  misc_feature (22)..(22): n is a, c, g, or u
cugacuacuaggucncungaun

SEQ ID NO: 80337 - RNA, 23 nt, Artificial Sequence
  Synthetic
  misc_feature (16)..(16): n is a, c, g, or u
  misc_feature (19)..(19): n is a, c, g, or u
  misc_feature (23)..(23): n is a, c, g, or u
acugacuacuaggucncungaun

SEQ ID NO: 80338 - RNA, 24 nt, Artificial Sequence
  Synthetic
  misc_feature (17)..(17): n is a, c, g, or u
  misc_feature (20)..(20): n is a, c, g, or u
  misc_feature (24)..(24): n is a, c, g, or u
aacugacuacuaggucncungaun

SEQ ID NO: 80339 - RNA, 18 nt, Artificial Sequence
  Synthetic
ugggauugaagucccaau

SEQ ID NO: 80340 - RNA, 19 nt, Artificial Sequence
  Synthetic
uugggauugaagucccaau

SEQ ID NO: 80341 - RNA, 21 nt, Artificial Sequence
  Synthetic
uguugggauugaagucccaau

SEQ ID NO: 80342 - RNA, 22 nt, Artificial Sequence
  Synthetic
uuguugggauugaagucccaau

SEQ ID NO: 80343 - RNA, 23 nt, Artificial Sequence
  Synthetic
cuuguugggauugaagucccaau

SEQ ID NO: 80344 - RNA, 24 nt, Artificial Sequence
  Synthetic
ccuuguugggauugaagucccaau

SEQ ID NO: 80345 - RNA, 21 nt, Artificial Sequence
  Synthetic
cgggcugaggcccacucccau

SEQ ID NO: 80346 - RNA, 22 nt, Artificial Sequence
  Synthetic
acgggcugaggcccacucccau

SEQ ID NO: 80347 - RNA, 23 nt, Artificial Sequence
  Synthetic
aacgggcugaggcccacucccau

SEQ ID NO: 80348 - RNA, 24 nt, Artificial Sequence
  Synthetic
aaacgggcugaggcccacucccau

SEQ ID NO: 80349 - RNA, 22 nt, Artificial Sequence
  Synthetic
  misc_feature (11)..(11): n is a, c, g, or u
cgaaagcccangaugaugggau

SEQ ID NO: 80350 - RNA, 23 nt, Artificial Sequence
  Synthetic
  misc_feature (12)..(12): n is a, c, g, or u
ccgaaagcccangaugaugggau

SEQ ID NO: 80351 - RNA, 24 nt, Artificial Sequence
  Synthetic
  misc_feature (13)..(13): n is a, c, g, or u
uccgaaagcccangaugaugggau

SEQ ID NO: 80352 - RNA, 21 nt, Artificial Sequence
  Synthetic
agugauuggagguuggggacu

SEQ ID NO: 80353 - RNA, 23 nt, Artificial Sequence
  Synthetic
ugagugauuggagguuggggacu

SEQ ID NO: 80354 - RNA, 21 nt, Artificial Sequence
  Synthetic
  misc_feature (12)..(12): n is a, c, g, or u
uguaacacgagnagggguccu

SEQ ID NO: 80355 - RNA, 22 nt, Artificial Sequence
  Synthetic
  misc_feature (13)..(13): n is a, c, g, or u
cuguaacacgagnagggguccu

SEQ ID NO: 80356 - RNA, 23 nt, Artificial Sequence
  Synthetic
  misc_feature (14)..(14): n is a, c, g, or u
ccuguaacacgagnagggguccu

SEQ ID NO: 80357 - RNA, 18 nt, Artificial Sequence
  Synthetic
cgagcaaaacaagcggcu

SEQ ID NO: 80358 - RNA, 20 nt, Artificial Sequence
  Synthetic
ugcgagcaaaacaagcggcu

SEQ ID NO: 80359 - RNA, 21 nt, Artificial Sequence
  Synthetic
cugcgagcaaaacaagcggcu

SEQ ID NO: 80360 - RNA, 23 nt, Artificial Sequence
  Synthetic
ugcugcgagcaaaacaagcggcu

SEQ ID NO: 80361 - RNA, 24 nt, Artificial Sequence
  Synthetic
cugcugcgagcaaaacaagcggcu

SEQ ID NO: 80362 - RNA, 19 nt, Artificial Sequence
  Synthetic
ugaccaagccccagccagu

SEQ ID NO: 80363 - RNA, 20 nt, Artificial Sequence
  Synthetic
augaccaagccccagccagu

SEQ ID NO: 80364 - RNA, 21 nt, Artificial Sequence
  Synthetic
caugaccaagccccagccagu

SEQ ID NO: 80365 - RNA, 22 nt, Artificial Sequence
  Synthetic
ccaugaccaagccccagccagu

SEQ ID NO: 80366 - RNA, 23 nt, Artificial Sequence
  Synthetic
cccaugaccaagccccagccagu

SEQ ID NO: 80367 - RNA, 21 nt, Artificial Sequence
  Synthetic
agcggcuaggaguuccgcagu

SEQ ID NO: 80368 - RNA, 22 nt, Artificial Sequence
  Synthetic
aagcggcuaggaguuccgcagu

SEQ ID NO: 80369 - RNA, 23 nt, Artificial Sequence
  Synthetic
caagcggcuaggaguuccgcagu

SEQ ID NO: 80370 - RNA, 24 nt, Artificial Sequence
  Synthetic
acaagcggcuaggaguuccgcagu

SEQ ID NO: 80371 - RNA, 18 nt, Artificial Sequence
  Synthetic
ucuauaagcuggaggagu

SEQ ID NO: 80372 - RNA, 21 nt, Artificial Sequence
  Synthetic
uggucuauaagcuggaggagu

SEQ ID NO: 80373 - RNA, 24 nt, Artificial Sequence
  Synthetic
  misc_feature (1)..(1): n is a, c, g, or u
ngguggucuauaagcuggaggagu

SEQ ID NO: 80374 - RNA, 18 nt, Artificial Sequence
  Synthetic
uagacucugcgguauugu

SEQ ID NO: 80375 - RNA, 19 nt, Artificial Sequence
  Synthetic
cuagacucugcgguauugu

SEQ ID NO: 80376 - RNA, 20 nt, Artificial Sequence
  Synthetic
ucuagacucugcgguauugu

SEQ ID NO: 80377 - RNA, 22 nt, Artificial Sequence
  Synthetic
agucuagacucugcgguauugu

SEQ ID NO: 80378 - RNA, 24 nt, Artificial Sequence
  Synthetic
cgagucuagacucugcgguauugu

SEQ ID NO: 80379 - RNA, 21 nt, Artificial Sequence
  Synthetic
cgucuggccagguguccuugu

SEQ ID NO: 80380 - RNA, 24 nt, Artificial Sequence
  Synthetic
uggcgucuggccagguguccuugu

SEQ ID NO: 80381 - RNA, 21 nt, Artificial Sequence
  Synthetic
  misc_feature (14)..(14): n is a, c, g, or u
aaccccaucuuuunguuuugu

SEQ ID NO: 80382 - RNA, 22 nt, Artificial Sequence
  Synthetic
  misc_feature (15)..(15): n is a, c, g, or u
uaaccccaucuuuunguuuugu

SEQ ID NO: 80383 - RNA, 24 nt, Artificial Sequence
  Synthetic
  misc_feature (17)..(17): n is a, c, g, or u
aguaaccccaucuuuunguuuugu

SEQ ID NO: 80384 - RNA, 21 nt, Artificial Sequence
  Synthetic
  misc_feature (4)..(4): n is a, c, g, or u
  misc_feature (13)..(13): n is a, c, g, or u
cccnguaaaguuncccaccuu

SEQ ID NO: 80385 - RNA, 23 nt, Artificial Sequence
  Synthetic
  misc_feature (6)..(6): n is a, c, g, or u
  misc_feature (15)..(15): n is a, c, g, or u
agcccnguaaaguuncccaccuu

SEQ ID NO: 80386 - RNA, 24 nt, Artificial Sequence
  Synthetic
  misc_feature (7)..(7): n is a, c, g, or u
  misc_feature (16)..(16): n is a, c, g, or u
aagcccnguaaaguuncccaccuu

SEQ ID NO: 80387 - RNA, 21 nt, Artificial Sequence
  Synthetic
aguaaugauuaacuagauguu

SEQ ID NO: 80388 - RNA, 22 nt, Artificial Sequence
  Synthetic
aaguaaugauuaacuagauguu

SEQ ID NO: 80389 - RNA, 23 nt, Artificial Sequence
  Synthetic
uggcugcuaggcugugcugccaa

SEQ ID NO: 80390 - RNA, 24 nt, Artificial Sequence
  Synthetic
auggcugcuaggcugugcugccaa

SEQ ID NO: 80391 - RNA, 21 nt, Artificial Sequence
  Synthetic
  misc_feature (15)..(15): n is a, c, g, or u
aacccuaacaaaacnaaaaga

SEQ ID NO: 80392 - RNA, 22 nt, Artificial Sequence
  Synthetic
  misc_feature (16)..(16): n is a, c, g, or u
aaacccuaacaaaacnaaaaga

SEQ ID NO: 80393 - RNA, 23 nt, Artificial Sequence
  Synthetic
  misc_feature (17)..(17): n is a, c, g, or u
uaaacccuaacaaaacnaaaaga

SEQ ID NO: 80394 - RNA, 24 nt, Artificial Sequence
  Synthetic
  misc_feature (18)..(18): n is a, c, g, or u
uuaaacccuaacaaaacnaaaaga

SEQ ID NO: 80395 - RNA, 21 nt, Artificial Sequence
  Synthetic
  misc_feature (1)..(1): n is a, c, g, or u
  misc_feature (14)..(14): n is a, c, g, or u
ncauggacauuganccuuaua

SEQ ID NO: 80396 - RNA, 24 nt, Artificial Sequence
  Synthetic
  misc_feature (1)..(1): n is a, c, g, or u
  misc_feature (4)..(4): n is a, c, g, or u
  misc_feature (17)..(17): n is a, c, g, or u
nggncauggacauuganccuuaua

SEQ ID NO: 80397 - RNA, 19 nt, Artificial Sequence
  Synthetic
cgggguuuuucuuguugac

SEQ ID NO: 80398 - RNA, 22 nt, Artificial Sequence
  Synthetic
aggcgggguuuuucuuguugac

SEQ ID NO: 80399 - RNA, 23 nt, Artificial Sequence
  Synthetic
caggcgggguuuuucuuguugac

SEQ ID NO: 80400 - RNA, 24 nt, Artificial Sequence
  Synthetic
acaggcgggguuuuucuuguugac

SEQ ID NO: 80401 - RNA, 18 nt, Artificial Sequence
  Synthetic
aagccuccaagcugugcc

SEQ ID NO: 80402 - RNA, 19 nt, Artificial Sequence
  Synthetic
caagccuccaagcugugcc

SEQ ID NO: 80403 - RNA, 20 nt, Artificial Sequence
  Synthetic
ucaagccuccaagcugugcc

SEQ ID NO: 80404 - RNA, 21 nt, Artificial Sequence
  Synthetic
uucaagccuccaagcugugcc

SEQ ID NO: 80405 - RNA, 23 nt, Artificial Sequence
  Synthetic
uguucaagccuccaagcugugcc

SEQ ID NO: 80406 - RNA, 24 nt, Artificial Sequence
  Synthetic
cuguucaagccuccaagcugugcc

SEQ ID NO: 80407 - RNA, 18 nt, Artificial Sequence
  Synthetic
ccaagucuguacagcauc

SEQ ID NO: 80408 - RNA, 24 nt, Artificial Sequence
  Synthetic
ugggggccaagucuguacagcauc

SEQ ID NO: 80409 - RNA, 18 nt, Artificial Sequence
  Synthetic
uuuccaccagcaauccuc

SEQ ID NO: 80410 - RNA, 19 nt, Artificial Sequence
  Synthetic
cuuuccaccagcaauccuc

SEQ ID NO: 80411 - RNA, 20 nt, Artificial Sequence
  Synthetic
ucuuuccaccagcaauccuc

SEQ ID NO: 80412 - RNA, 21 nt, Artificial Sequence
  Synthetic
aucuuuccaccagcaauccuc

SEQ ID NO: 80413 - RNA, 22 nt, Artificial Sequence
  Synthetic
aaucuuuccaccagcaauccuc

SEQ ID NO: 80414 - RNA, 24 nt, Artificial Sequence
  Synthetic
agaaucuuuccaccagcaauccuc

SEQ ID NO: 80415 - RNA, 19 nt, Artificial Sequence
  Synthetic
cgcagaagaucucaaucuc

SEQ ID NO: 80416 - RNA, 20 nt, Artificial Sequence
  Synthetic
ucgcagaagaucucaaucuc

SEQ ID NO: 80417 - RNA, 22 nt, Artificial Sequence
  Synthetic
cgucgcagaagaucucaaucuc

SEQ ID NO: 80418 - RNA, 24 nt, Artificial Sequence
  Synthetic
cgcgucgcagaagaucucaaucuc

SEQ ID NO: 80419 - RNA, 18 nt, Artificial Sequence
  Synthetic
  misc_feature (2)..(2): n is a, c, g, or u
cnuaucgucaaucuucuc

SEQ ID NO: 80420 - RNA, 19 nt, Artificial Sequence
  Synthetic
  misc_feature (1)..(1): n is a, c, g, or u
  misc_feature (3)..(3): n is a, c, g, or u
ncnuaucgucaaucuucuc

SEQ ID NO: 80421 - RNA, 20 nt, Artificial Sequence
  Synthetic
  misc_feature (2)..(2): n is a, c, g, or u
  misc_feature (4)..(4): n is a, c, g, or u
cncnuaucgucaaucuucuc

SEQ ID NO: 80422 - RNA, 21 nt, Artificial Sequence
  Synthetic
  misc_feature (3)..(3): n is a, c, g, or u
  misc_feature (5)..(5): n is a, c, g, or u
ucncnuaucgucaaucuucuc

SEQ ID NO: 80423 - RNA, 22 nt, Artificial Sequence
  Synthetic
  misc_feature (4)..(4): n is a, c, g, or u
  misc_feature (6)..(6): n is a, c, g, or u
cucncnuaucgucaaucuucuc

SEQ ID NO: 80424 - RNA, 23 nt, Artificial Sequence
  Synthetic
  misc_feature (5)..(5): n is a, c, g, or u
  misc_feature (7)..(7): n is a, c, g, or u
ucucncnuaucgucaaucuucuc

SEQ ID NO: 80425 - RNA, 24 nt, Artificial Sequence
  Synthetic
  misc_feature (6)..(6): n is a, c, g, or u
  misc_feature (8)..(8): n is a, c, g, or u
cucucncnuaucgucaaucuucuc

SEQ ID NO: 80426 - RNA, 18 nt, Artificial Sequence
  Synthetic
ccguuuguccucuaauuc

SEQ ID NO: 80427 - RNA, 19 nt, Artificial Sequence
  Synthetic
cccguuuguccucuaauuc

SEQ ID NO: 80428 - RNA, 21 nt, Artificial Sequence
  Synthetic
ugcccguuuguccucuaauuc

SEQ ID NO: 80429 - RNA, 22 nt, Artificial Sequence
  Synthetic
uugcccguuuguccucuaauuc

SEQ ID NO: 80430 - RNA, 24 nt, Artificial Sequence
  Synthetic
uguugcccguuuguccucuaauuc

SEQ ID NO: 80431 - RNA, 18 nt, Artificial Sequence
  Synthetic
uuacacacucuauggaag

SEQ ID NO: 80432 - RNA, 19 nt, Artificial Sequence
  Synthetic
uuuacacacucuauggaag

SEQ ID NO: 80433 - RNA, 20 nt, Artificial Sequence
  Synthetic
auuuacacacucuauggaag

SEQ ID NO: 80434 - RNA, 21 nt, Artificial Sequence
  Synthetic
uauuuacacacucuauggaag

SEQ ID NO: 80435 - RNA, 22 nt, Artificial Sequence
  Synthetic
  misc_feature (1)..(1): n is a, c, g, or u
nuauuuacacacucuauggaag

SEQ ID NO: 80436 - RNA, 23 nt, Artificial Sequence
  Synthetic
  misc_feature (2)..(2): n is a, c, g, or u
anuauuuacacacucuauggaag

SEQ ID NO: 80437 - RNA, 24 nt, Artificial Sequence
  Synthetic
  misc_feature (3)..(3): n is a, c, g, or u
canuauuuacacacucuauggaag

SEQ ID NO: 80438 - RNA, 18 nt, Artificial Sequence
  Synthetic
uucuuucccgaccaccag

SEQ ID NO: 80439 - RNA, 19 nt, Artificial Sequence
  Synthetic
auucuuucccgaccaccag

SEQ ID NO: 80440 - RNA, 23 nt, Artificial Sequence
  Synthetic
ugggauucuuucccgaccaccag

SEQ ID NO: 80441 - RNA, 24 nt, Artificial Sequence
  Synthetic
cugggauucuuucccgaccaccag

SEQ ID NO: 80442 - RNA, 18 nt, Artificial Sequence
  Synthetic
agaauccucacaauaccg

SEQ ID NO: 80443 - RNA, 19 nt, Artificial Sequence
  Synthetic
aagaauccucacaauaccg

SEQ ID NO: 80444 - RNA, 20 nt, Artificial Sequence
  Synthetic
caagaauccucacaauaccg

SEQ ID NO: 80445 - RNA, 21 nt, Artificial Sequence
  Synthetic
acaagaauccucacaauaccg

SEQ ID NO: 80446 - RNA, 23 nt, Artificial Sequence
  Synthetic
ugacaagaauccucacaauaccg

SEQ ID NO: 80447 - RNA, 24 nt, Artificial Sequence
  Synthetic
uugacaagaauccucacaauaccg

SEQ ID NO: 80448 - RNA, 19 nt, Artificial Sequence
  Synthetic
uguuuacgucccgucggcg

SEQ ID NO: 80449 - RNA, 20 nt, Artificial Sequence
  Synthetic
uuguuuacgucccgucggcg

SEQ ID NO: 80450 - RNA, 21 nt, Artificial Sequence
  Synthetic
uuuguuuacgucccgucggcg

SEQ ID NO: 80451 - RNA, 22 nt, Artificial Sequence
  Synthetic
cuuuguuuacgucccgucggcg

SEQ ID NO: 80452 - RNA, 23 nt, Artificial Sequence
  Synthetic
ccuuuguuuacgucccgucggcg

SEQ ID NO: 80453 - RNA, 24 nt, Artificial Sequence
  Synthetic
uccuuuguuuacgucccgucggcg

SEQ ID NO: 80454 - RNA, 21 nt, Artificial Sequence
  Synthetic
uccaacuuguccugguuaucg

SEQ ID NO: 80455 - RNA, 22 nt, Artificial Sequence
  Synthetic
cuccaacuuguccugguuaucg

SEQ ID NO: 80456 - RNA, 23 nt, Artificial Sequence
  Synthetic
ccuccaacuuguccugguuaucg

SEQ ID NO: 80457 - RNA, 24 nt, Artificial Sequence
  Synthetic
uccuccaacuuguccugguuaucg

SEQ ID NO: 80458 - RNA, 18 nt, Artificial Sequence
  Synthetic
  misc_feature (5)..(5): n is a, c, g, or u
cccuncucguguuacagg

SEQ ID NO: 80459 - RNA, 19 nt, Artificial Sequence
  Synthetic
  misc_feature (6)..(6): n is a, c, g, or u
ccccuncucguguuacagg

SEQ ID NO: 80460 - RNA, 20 nt, Artificial Sequence
  Synthetic
  misc_feature (7)..(7): n is a, c, g, or u
accccuncucguguuacagg

SEQ ID NO: 80461 - RNA, 23 nt, Artificial Sequence
  Synthetic
  misc_feature (10)..(10): n is a, c, g, or u
aggaccccuncucguguuacagg

SEQ ID NO: 80462 - RNA, 24 nt, Artificial Sequence
  Synthetic
  misc_feature (11)..(11): n is a, c, g, or u
uaggaccccuncucguguuacagg

SEQ ID NO: 80463 - RNA, 21 nt, Artificial Sequence
  Synthetic
aacaagagcuacagcaugggg

SEQ ID NO: 80464 - RNA, 21 nt, Artificial Sequence
  Synthetic
  misc_feature (14)..(14): n is a, c, g, or u
acuguuuguuuaangacuggg

SEQ ID NO: 80465 - RNA, 23 nt, Artificial Sequence
  Synthetic
  misc_feature (16)..(16): n is a, c, g, or u
agacuguuuguuuaangacuggg

SEQ ID NO: 80466 - RNA, 24 nt, Artificial Sequence
  Synthetic
  misc_feature (17)..(17): n is a, c, g, or u
aagacuguuuguuuaangacuggg

SEQ ID NO: 80467 - RNA, 21 nt, Artificial Sequence
  Synthetic
  misc_feature (15)..(15): n is a, c, g, or u
cuaaugacucuagcnaccugg

SEQ ID NO: 80468 - RNA, 22 nt, Artificial Sequence
  Synthetic
  misc_feature (1)..(1): n is a, c, g, or u
  misc_feature (16)..(16): n is a, c, g, or u
ncuaaugacucuagcnaccugg

SEQ ID NO: 80469 - RNA, 23 nt, Artificial Sequence
  Synthetic
  misc_feature (2)..(2): n is a, c, g, or u
  misc_feature (17)..(17): n is a, c, g, or u
ancuaaugacucuagcnaccugg

SEQ ID NO: 80470 - RNA, 21 nt, Artificial Sequence
  Synthetic
  misc_feature (18)..(18): n is a, c, g, or u
auaaagaauuuggagcuncug

SEQ ID NO: 80471 - RNA, 22 nt, Artificial Sequence
  Synthetic
  misc_feature (19)..(19): n is a, c, g, or u
uauaaagaauuuggagcuncug

SEQ ID NO: 80472 - RNA, 23 nt, Artificial Sequence
  Synthetic
  misc_feature (20)..(20): n is a, c, g, or u
uuauaaagaauuuggagcuncug

SEQ ID NO: 80473 - RNA, 24 nt, Artificial Sequence
  Synthetic
  misc_feature (21)..(21): n is a, c, g, or u
cuuauaaagaauuuggagcuncug

SEQ ID NO: 80474 - RNA, 21 nt, Artificial Sequence
  Synthetic
ugaacauggagaacaucacau

SEQ ID NO: 80475 - RNA, 22 nt, Artificial Sequence
  Synthetic
cugaacauggagaacaucacau

SEQ ID NO: 80476 - RNA, 24 nt, Artificial Sequence
  Synthetic
cgcugaacauggagaacaucacau

SEQ ID NO: 80477 - RNA, 21 nt, Artificial Sequence
  Synthetic
  misc_feature (12)..(12): n is a, c, g, or u
  misc_feature (18)..(18): n is a, c, g, or u
accaaauauuunccauungau

SEQ ID NO: 80478 - RNA, 22 nt, Artificial Sequence
  Synthetic
  misc_feature (13)..(13): n is a, c, g, or u
  misc_feature (19)..(19): n is a, c, g, or u
uaccaaauauuunccauungau

SEQ ID NO: 80479 - RNA, 23 nt, Artificial Sequence
  Synthetic
  misc_feature (14)..(14): n is a, c, g, or u
  misc_feature (20)..(20): n is a, c, g, or u
uuaccaaauauuunccauungau

SEQ ID NO: 80480 - RNA, 18 nt, Artificial Sequence
  Synthetic
cuuucggaaaauuccuau

SEQ ID NO: 80481 - RNA, 22 nt, Artificial Sequence
  Synthetic
ugggcuuucggaaaauuccuau

SEQ ID NO: 80482 - RNA, 23 nt, Artificial Sequence
  Synthetic
  misc_feature (1)..(1): n is a, c, g, or u
nugggcuuucggaaaauuccuau

SEQ ID NO: 80483 - RNA, 24 nt, Artificial Sequence
  Synthetic
  misc_feature (2)..(2): n is a, c, g, or u
cnugggcuuucggaaaauuccuau

SEQ ID NO: 80484 - RNA, 21 nt, Artificial Sequence
  Synthetic
cacuguuuggcuuucaguuau

SEQ ID NO: 80485 - RNA, 22 nt, Artificial Sequence
  Synthetic
ccacuguuuggcuuucaguuau

SEQ ID NO: 80486 - RNA, 23 nt, Artificial Sequence
  Synthetic
cccacuguuuggcuuucaguuau

SEQ ID NO: 80487 - RNA, 24 nt, Artificial Sequence
  Synthetic
ccccacuguuuggcuuucaguuau

SEQ ID NO: 80488 - RNA, 18 nt, Artificial Sequence
  Synthetic
  misc_feature (5)..(5): n is a, c, g, or u
  misc_feature (14)..(14): n is a, c, g, or u
cucunuaucgggangccu

SEQ ID NO: 80489 - RNA, 20 nt, Artificial Sequence
  Synthetic
  misc_feature (7)..(7): n is a, c, g, or u
  misc_feature (16)..(16): n is a, c, g, or u
agcucunuaucgggangccu

SEQ ID NO: 80490 - RNA, 21 nt, Artificial Sequence
  Synthetic
  misc_feature (8)..(8): n is a, c, g, or u
  misc_feature (17)..(17): n is a, c, g, or u
cagcucunuaucgggangccu

SEQ ID NO: 80491 - RNA, 22 nt, Artificial Sequence
  Synthetic
  misc_feature (9)..(9): n is a, c, g, or u
  misc_feature (18)..(18): n is a, c, g, or u
ucagcucunuaucgggangccu

SEQ ID NO: 80492 - RNA, 23 nt, Artificial Sequence
  Synthetic
  misc_feature (10)..(10): n is a, c, g, or u
  misc_feature (19)..(19): n is a, c, g, or u
cucagcucunuaucgggangccu

SEQ ID NO: 80493 - RNA, 24 nt, Artificial Sequence
  Synthetic
  misc_feature (11)..(11): n is a, c, g, or u
  misc_feature (20)..(20): n is a, c, g, or u
ccucagcucunuaucgggangccu

SEQ ID NO: 80494 - RNA, 22 nt, Artificial Sequence
  Synthetic
uguuaccaauuuucuuuugucu

SEQ ID NO: 80495 - RNA, 23 nt, Artificial Sequence
  Synthetic
cuguuaccaauuuucuuuugucu

SEQ ID NO: 80496 - RNA, 18 nt, Artificial Sequence
  Synthetic
uuuggugucuuucggagu

SEQ ID NO: 80497 - RNA, 19 nt, Artificial Sequence
  Synthetic
auuuggugucuuucggagu

SEQ ID NO: 80498 - RNA, 20 nt, Artificial Sequence
  Synthetic
uauuuggugucuuucggagu

SEQ ID NO: 80499 - RNA, 22 nt, Artificial Sequence
  Synthetic
aguauuuggugucuuucggagu

SEQ ID NO: 80500 - RNA, 24 nt, Artificial Sequence
  Synthetic
agaguauuuggugucuuucggagu

SEQ ID NO: 80501 - RNA, 21 nt, Artificial Sequence
  Synthetic
  misc_feature (9)..(9): n is a, c, g, or u
  misc_feature (18)..(18): n is a, c, g, or u
uggaaagunugucaacgnauu

SEQ ID NO: 80502 - RNA, 22 nt, Artificial Sequence
  Synthetic
  misc_feature (10)..(10): n is a, c, g, or u
  misc_feature (19)..(19): n is a, c, g, or u
uuggaaagunugucaacgnauu

SEQ ID NO: 80503 - RNA, 23 nt, Artificial Sequence
  Synthetic
  misc_feature (11)..(11): n is a, c, g, or u
  misc_feature (20)..(20): n is a, c, g, or u
auuggaaagunugucaacgnauu

SEQ ID NO: 80504 - RNA, 18 nt, Artificial Sequence
  Synthetic
  misc_feature (6)..(6): n is a, c, g, or u
caacgnauugugggucuu

SEQ ID NO: 80505 - RNA, 19 nt, Artificial Sequence
  Synthetic
  misc_feature (7)..(7): n is a, c, g, or u
ucaacgnauugugggucuu

SEQ ID NO: 80506 - RNA, 21 nt, Artificial Sequence
  Synthetic
  misc_feature (9)..(9): n is a, c, g, or u
ugucaacgnauugugggucuu

SEQ ID NO: 80507 - RNA, 22 nt, Artificial Sequence
  Synthetic
  misc_feature (1)..(1): n is a, c, g, or u
  misc_feature (10)..(10): n is a, c, g, or u
nugucaacgnauugugggucuu

SEQ ID NO: 80508 - RNA, 23 nt, Artificial Sequence
  Synthetic
  misc_feature (2)..(2): n is a, c, g, or u
  misc_feature (11)..(11): n is a, c, g, or u
unugucaacgnauugugggucuu

SEQ ID NO: 80509 - RNA, 21 nt, Artificial Sequence
  Synthetic
  misc_feature (5)..(5): n is a, c, g, or u
ugggnuaugucauuggauguu

SEQ ID NO: 80510 - RNA, 22 nt, Artificial Sequence
  Synthetic
  misc_feature (6)..(6): n is a, c, g, or u
augggnuaugucauuggauguu

SEQ ID NO: 80511 - RNA, 23 nt, Artificial Sequence
  Synthetic
  misc_feature (1)..(1): n is a, c, g, or u
  misc_feature (7)..(7): n is a, c, g, or u
naugggnuaugucauuggauguu

SEQ ID NO: 80512 - RNA, 24 nt, Artificial Sequence
  Synthetic
  misc_feature (2)..(2): n is a, c, g, or u
  misc_feature (8)..(8): n is a, c, g, or u
unaugggnuaugucauuggauguu

SEQ ID NO: 80513 - RNA, 18 nt, Artificial Sequence
  Synthetic
caccgcacggaggccuuu

SEQ ID NO: 80514 - RNA, 19 nt, Artificial Sequence
  Synthetic
ccaccgcacggaggccuuu

SEQ ID NO: 80515 - RNA, 20 nt, Artificial Sequence
  Synthetic
cccaccgcacggaggccuuu

SEQ ID NO: 80516 - RNA, 21 nt, Artificial Sequence
  Synthetic
ccccaccgcacggaggccuuu

SEQ ID NO: 80517 - RNA, 22 nt, Artificial Sequence
  Synthetic
accccaccgcacggaggccuuu

SEQ ID NO: 80518 - RNA, 23 nt, Artificial Sequence
  Synthetic
caccccaccgcacggaggccuuu

SEQ ID NO: 80519 - RNA, 24 nt, Artificial Sequence
  Synthetic
ucaccccaccgcacggaggccuuu

SEQ ID NO: 80520 - RNA, 21 nt, Artificial Sequence
  Synthetic
  misc_feature (1)..(2): n is a, c, g, or u
nnuagaguauuuggugucuuu

SEQ ID NO: 80521 - RNA, 22 nt, Artificial Sequence
  Synthetic
  misc_feature (2)..(3): n is a, c, g, or u
unnuagaguauuuggugucuuu

SEQ ID NO: 80522 - RNA, 24 nt, Artificial Sequence
  Synthetic
  misc_feature (1)..(1): n is a, c, g, or u
  misc_feature (4)..(5): n is a, c, g, or u
ngunnuagaguauuuggugucuuu

SEQ ID NO: 80523 - RNA, 21 nt, Artificial Sequence
  Synthetic
  misc_feature (7)..(7): n is a, c, g, or u
caacacnuagcgccucauuuu

SEQ ID NO: 80524 - RNA, 22 nt, Artificial Sequence
  Synthetic
  misc_feature (8)..(8): n is a, c, g, or u
acaacacnuagcgccucauuuu

SEQ ID NO: 80525 - RNA, 23 nt, Artificial Sequence
  Synthetic
  misc_feature (9)..(9): n is a, c, g, or u
aacaacacnuagcgccucauuuu

SEQ ID NO: 80526 - RNA, 24 nt, Artificial Sequence
  Synthetic
  misc_feature (10)..(10): n is a, c, g, or u
aaacaacacnuagcgccucauuuu

SEQ ID NO: 80527 - RNA, 18 nt, Artificial Sequence
  Synthetic
  misc_feature (14)..(14): n is a, c, g, or u
auuugcgggagagnacaa

SEQ ID NO: 80528 - RNA, 19 nt, Artificial Sequence
  Synthetic
  misc_feature (15)..(15): n is a, c, g, or u
uauuugcgggagagnacaa

SEQ ID NO: 80529 - RNA, 20 nt, Artificial Sequence
  Synthetic
  misc_feature (16)..(16): n is a, c, g, or u
auauuugcgggagagnacaa

SEQ ID NO: 80530 - RNA, 18 nt, Artificial Sequence
  Synthetic
  misc_feature (6)..(6): n is a, c, g, or u
gagagncaguagucggaa

SEQ ID NO: 80531 - RNA, 19 nt, Artificial Sequence
  Synthetic
  misc_feature (1)..(1): n is a, c, g, or u
  misc_feature (7)..(7): n is a, c, g, or u
ngagagncaguagucggaa

SEQ ID NO: 80532 - RNA, 20 nt, Artificial Sequence
  Synthetic
  misc_feature (2)..(2): n is a, c, g, or u
  misc_feature (8)..(8): n is a, c, g, or u
gngagagncaguagucggaa

SEQ ID NO: 80533 - RNA, 18 nt, Artificial Sequence
  Synthetic
  misc_feature (1)..(1): n is a, c, g, or u
ncccaccuuaugagucca

SEQ ID NO: 80534 - RNA, 19 nt, Artificial Sequence
  Synthetic
  misc_feature (2)..(2): n is a, c, g, or u
uncccaccuuaugagucca

SEQ ID NO: 80535 - RNA, 20 nt, Artificial Sequence
  Synthetic
  misc_feature (3)..(3): n is a, c, g, or u
uuncccaccuuaugagucca

SEQ ID NO: 80536 - RNA, 18 nt, Artificial Sequence
  Synthetic
agugaaagccugcuuaga

SEQ ID NO: 80537 - RNA, 19 nt, Artificial Sequence
  Synthetic
aagugaaagccugcuuaga

SEQ ID NO: 80538 - RNA, 20 nt, Artificial Sequence
  Synthetic
aaagugaaagccugcuuaga

SEQ ID NO: 80539 - RNA, 18 nt, Artificial Sequence
  Synthetic
agacggagaaggggacga

SEQ ID NO: 80540 - RNA, 19 nt, Artificial Sequence
  Synthetic
cagacggagaaggggacga

SEQ ID NO: 80541 - RNA, 20 nt, Artificial Sequence
  Synthetic
gcagacggagaaggggacga

SEQ ID NO: 80542 - RNA, 18 nt, Artificial Sequence
  Synthetic
  misc_feature (13)..(13): n is a, c, g, or u
uccgaaagcccangauga

SEQ ID NO: 80543 - RNA, 19 nt, Artificial Sequence
  Synthetic
  misc_feature (14)..(14): n is a, c, g, or u
uuccgaaagcccangauga

SEQ ID NO: 80544 - RNA, 20 nt, Artificial Sequence
  Synthetic
  misc_feature (15)..(15): n is a, c, g, or u
uuuccgaaagcccangauga

SEQ ID NO: 80545 - RNA, 18 nt, Artificial Sequence
  Synthetic
  misc_feature (5)..(5): n is a, c, g, or u
  misc_feature (11)..(11): n is a, c, g, or u
  misc_feature (16)..(16): n is a, c, g, or u
cauancccaunaaaunua

SEQ ID NO: 80546 - RNA, 19 nt, Artificial Sequence
  Synthetic
  misc_feature (6)..(6): n is a, c, g, or u
  misc_feature (12)..(12): n is a, c, g, or u
  misc_feature (17)..(17): n is a, c, g, or u
acauancccaunaaaunua

SEQ ID NO: 80547 - RNA, 20 nt, Artificial Sequence
  Synthetic
  misc_feature (7)..(7): n is a, c, g, or u
  misc_feature (13)..(13): n is a, c, g, or u
  misc_feature (18)..(18): n is a, c, g, or u
gacauancccaunaaaunua

SEQ ID NO: 80548 - RNA, 18 nt, Artificial Sequence
  Synthetic
aagucagaaggcaaaaac

SEQ ID NO: 80549 - RNA, 19 nt, Artificial Sequence
  Synthetic
gaagucagaaggcaaaaac

SEQ ID NO: 80550 - RNA, 20 nt, Artificial Sequence
  Synthetic
agaagucagaaggcaaaaac

SEQ ID NO: 80551 - RNA, 18 nt, Artificial Sequence
  Synthetic
aauugagagaaguccacc

SEQ ID NO: 80552 - RNA, 19 nt, Artificial Sequence
  Synthetic
aaauugagagaaguccacc

SEQ ID NO: 80553 - RNA, 20 nt, Artificial Sequence
  Synthetic
aaaauugagagaaguccacc

SEQ ID NO: 80554 - RNA, 18 nt, Artificial Sequence
  Synthetic
gcuguagcucuuguuccc

SEQ ID NO: 80555 - RNA, 19 nt, Artificial Sequence
  Synthetic
ugcuguagcucuuguuccc

SEQ ID NO: 80556 - RNA, 20 nt, Artificial Sequence
  Synthetic
augcuguagcucuuguuccc

SEQ ID NO: 80557 - RNA, 18 nt, Artificial Sequence
  Synthetic
  misc_feature (7)..(7): n is a, c, g, or u
  misc_feature (13)..(13): n is a, c, g, or u
gcuggunguugangaucc

SEQ ID NO: 80558 - RNA, 19 nt, Artificial Sequence
  Synthetic
  misc_feature (1)..(1): n is a, c, g, or u
  misc_feature (8)..(8): n is a, c, g, or u
  misc_feature (14)..(14): n is a, c, g, or u
ngcuggunguugangaucc

SEQ ID NO: 80559 - RNA, 20 nt, Artificial Sequence
  Synthetic
  misc_feature (1)..(2): n is a, c, g, or u
  misc_feature (9)..(9): n is a, c, g, or u
  misc_feature (15)..(15): n is a, c, g, or u
nngcuggunguugangaucc

SEQ ID NO: 80560 - RNA, 21 nt, Artificial Sequence
  Synthetic
  misc_feature (2)..(3): n is a, c, g, or u
  misc_feature (10)..(10): n is a, c, g, or u
  misc_feature (16)..(16): n is a, c, g, or u
cnngcuggunguugangaucc

SEQ ID NO: 80561 - RNA, 22 nt, Artificial Sequence
  Synthetic
  misc_feature (3)..(4): n is a, c, g, or u
  misc_feature (11)..(11): n is a, c, g, or u
  misc_feature (17)..(17): n is a, c, g, or u
ccnngcuggunguugangaucc

SEQ ID NO: 80562 - RNA, 23 nt, Artificial Sequence
  Synthetic
  misc_feature (4)..(5): n is a, c, g, or u
  misc_feature (12)..(12): n is a, c, g, or u
  misc_feature (18)..(18): n is a, c, g, or u
cccnngcuggunguugangaucc

SEQ ID NO: 80563 - RNA, 24 nt, Artificial Sequence
  Synthetic
  misc_feature (5)..(6): n is a, c, g, or u
  misc_feature (13)..(13): n is a, c, g, or u
  misc_feature (19)..(19): n is a, c, g, or u
ucccnngcuggunguugangaucc

SEQ ID NO: 80564 - RNA, 18 nt, Artificial Sequence
  Synthetic
  misc_feature (8)..(8): n is a, c, g, or u
ugacauuncagagagucc

SEQ ID NO: 80565 - RNA, 19 nt, Artificial Sequence
  Synthetic
  misc_feature (9)..(9): n is a, c, g, or u
uugacauuncagagagucc

SEQ ID NO: 80566 - RNA, 20 nt, Artificial Sequence
  Synthetic
  misc_feature (10)..(10): n is a, c, g, or u
guugacauuncagagagucc

SEQ ID NO: 80567 - RNA, 18 nt, Artificial Sequence
  Synthetic
  misc_feature (12)..(12): n is a, c, g, or u
gguggggugaancccagc

SEQ ID NO: 80568 - RNA, 19 nt, Artificial Sequence
  Synthetic
  misc_feature (13)..(13): n is a, c, g, or u
cgguggggugaancccagc

SEQ ID NO: 80569 - RNA, 20 nt, Artificial Sequence
  Synthetic
  misc_feature (14)..(14): n is a, c, g, or u
gcgguggggugaancccagc

SEQ ID NO: 80570 - RNA, 18 nt, Artificial Sequence
  Synthetic
  misc_feature (2)..(2): n is a, c, g, or u
  misc_feature (16)..(16): n is a, c, g, or u
ancacccacccaggungc

SEQ ID NO: 80571 - RNA, 19 nt, Artificial Sequence
  Synthetic
  misc_feature (3)..(3): n is a, c, g, or u
  misc_feature (17)..(17): n is a, c, g, or u
uancacccacccaggungc

SEQ ID NO: 80572 - RNA, 20 nt, Artificial Sequence
  Synthetic
  misc_feature (4)..(4): n is a, c, g, or u
  misc_feature (18)..(18): n is a, c, g, or u
uuancacccacccaggungc

SEQ ID NO: 80573 - RNA, 18 nt, Artificial Sequence
  Synthetic
  misc_feature (6)..(6): n is a, c, g, or u
  misc_feature (9)..(9): n is a, c, g, or u
cagcanagnauugcuugc

SEQ ID NO: 80574 - RNA, 19 nt, Artificial Sequence
  Synthetic
  misc_feature (7)..(7): n is a, c, g, or u
  misc_feature (10)..(10): n is a, c, g, or u
ccagcanagnauugcuugc

SEQ ID NO: 80575 - RNA, 20 nt, Artificial Sequence
  Synthetic
  misc_feature (8)..(8): n is a, c, g, or u
  misc_feature (11)..(11): n is a, c, g, or u
cccagcanagnauugcuugc

SEQ ID NO: 80576 - RNA, 18 nt, Artificial Sequence
  Synthetic
  misc_feature (17)..(17): n is a, c, g, or u
aauacaggccucucacnc

SEQ ID NO: 80577 - RNA, 19 nt, Artificial Sequence
  Synthetic
  misc_feature (18)..(18): n is a, c, g, or u
aaauacaggccucucacnc

SEQ ID NO: 80578 - RNA, 20 nt, Artificial Sequence
  Synthetic
  misc_feature (19)..(19): n is a, c, g, or u
gaaauacaggccucucacnc

SEQ ID NO: 80579 - RNA, 18 nt, Artificial Sequence
  Synthetic
  misc_feature (8)..(8): n is a, c, g, or u
cauacaanggcauuaaag

SEQ ID NO: 80580 - RNA, 19 nt, Artificial Sequence
  Synthetic
  misc_feature (9)..(9): n is a, c, g, or u
gcauacaanggcauuaaag

SEQ ID NO: 80581 - RNA, 20 nt, Artificial Sequence
  Synthetic
  misc_feature (1)..(1): n is a, c, g, or u
  misc_feature (10)..(10): n is a, c, g, or u
ngcauacaanggcauuaaag

SEQ ID NO: 80582 - RNA, 18 nt, Artificial Sequence
  Synthetic
ucucaaagguggagacag

SEQ ID NO: 80583 - RNA, 19 nt, Artificial Sequence
  Synthetic
uucucaaagguggagacag

SEQ ID NO: 80584 - RNA, 20 nt, Artificial Sequence
  Synthetic
uuucucaaagguggagacag

SEQ ID NO: 80585 - RNA, 18 nt, Artificial Sequence
  Synthetic
gaagaugaggcauagcag

SEQ ID NO: 80586 - RNA, 19 nt, Artificial Sequence
  Synthetic
agaagaugaggcauagcag

SEQ ID NO: 80587 - RNA, 20 nt, Artificial Sequence
  Synthetic
aagaagaugaggcauagcag

SEQ ID NO: 80588 - RNA, 18 nt, Artificial Sequence
  Synthetic
  misc_feature (11)..(11): n is a, c, g, or u
gucccaagcgnccccgag

SEQ ID NO: 80589 - RNA, 19 nt, Artificial Sequence
  Synthetic
  misc_feature (12)..(12): n is a, c, g, or u
agucccaagcgnccccgag

SEQ ID NO: 80590 - RNA, 20 nt, Artificial Sequence
  Synthetic
  misc_feature (13)..(13): n is a, c, g, or u
gagucccaagcgnccccgag

SEQ ID NO: 80591 - RNA, 18 nt, Artificial Sequence
  Synthetic
  misc_feature (8)..(8): n is a, c, g, or u
  misc_feature (11)..(11): n is a, c, g, or u
gauuggungangcaggag

SEQ ID NO: 80592 - RNA, 19 nt, Artificial Sequence
  Synthetic
  misc_feature (9)..(9): n is a, c, g, or u
  misc_feature (12)..(12): n is a, c, g, or u
cgauuggungangcaggag

SEQ ID NO: 80593 - RNA, 20 nt, Artificial Sequence
  Synthetic
  misc_feature (10)..(10): n is a, c, g, or u
  misc_feature (13)..(13): n is a, c, g, or u
gcgauuggungangcaggag

SEQ ID NO: 80594 - RNA, 18 nt, Artificial Sequence
  Synthetic
  misc_feature (11)..(11): n is a, c, g, or u
uaaagacaggnacaguag

SEQ ID NO: 80595 - RNA, 19 nt, Artificial Sequence
  Synthetic
  misc_feature (12)..(12): n is a, c, g, or u
uuaaagacaggnacaguag

SEQ ID NO: 80596 - RNA, 20 nt, Artificial Sequence
  Synthetic
  misc_feature (1)..(1): n is a, c, g, or u
  misc_feature (13)..(13): n is a, c, g, or u
nuuaaagacaggnacaguag

SEQ ID NO: 80597 - RNA, 18 nt, Artificial Sequence
  Synthetic
gaugagaaggcacagacg

SEQ ID NO: 80598 - RNA, 19 nt, Artificial Sequence
  Synthetic
agaugagaaggcacagacg

SEQ ID NO: 80599 - RNA, 20 nt, Artificial Sequence
  Synthetic
cagaugagaaggcacagacg

SEQ ID NO: 80600 - RNA, 18 nt, Artificial Sequence
  Synthetic
cgguguuugcucugaagg

SEQ ID NO: 80601 - RNA, 19 nt, Artificial Sequence
  Synthetic
gcgguguuugcucugaagg

SEQ ID NO: 80602 - RNA, 20 nt, Artificial Sequence
  Synthetic
ugcgguguuugcucugaagg

SEQ ID NO: 80603 - RNA, 18 nt, Artificial Sequence
  Synthetic
guuugguacagcaacagg

SEQ ID NO: 80604 - RNA, 19 nt, Artificial Sequence
  Synthetic
gguuugguacagcaacagg

SEQ ID NO: 80605 - RNA, 20 nt, Artificial Sequence
  Synthetic
agguuugguacagcaacagg

SEQ ID NO: 80606 - RNA, 18 nt, Artificial Sequence
  Synthetic
ccacugcauggccugagg

SEQ ID NO: 80607 - RNA, 19 nt, Artificial Sequence
  Synthetic
uccacugcauggccugagg

SEQ ID NO: 80608 - RNA, 20 nt, Artificial Sequence
  Synthetic
uuccacugcauggccugagg

SEQ ID NO: 80609 - RNA, 18 nt, Artificial Sequence
  Synthetic
  misc_feature (1)..(1): n is a, c, g, or u
ngguggucuauaagcugg

SEQ ID NO: 80610 - RNA, 19 nt, Artificial Sequence
  Synthetic
  misc_feature (2)..(2): n is a, c, g, or u
ungguggucuauaagcugg

SEQ ID NO: 80611 - RNA, 20 nt, Artificial Sequence
  Synthetic
  misc_feature (3)..(3): n is a, c, g, or u
uungguggucuauaagcugg

SEQ ID NO: 80612 - RNA, 18 nt, Artificial Sequence
  Synthetic
  misc_feature (7)..(7): n is a, c, g, or u
ucucacncugggaucuug

SEQ ID NO: 80613 - RNA, 19 nt, Artificial Sequence
  Synthetic
  misc_feature (8)..(8): n is a, c, g, or u
cucucacncugggaucuug

SEQ ID NO: 80614 - RNA, 20 nt, Artificial Sequence
  Synthetic
  misc_feature (9)..(9): n is a, c, g, or u
ccucucacncugggaucuug

SEQ ID NO: 80615 - RNA, 18 nt, Artificial Sequence
  Synthetic
uuggaggacaggagguug

SEQ ID NO: 80616 - RNA, 19 nt, Artificial Sequence
  Synthetic
guuggaggacaggagguug

SEQ ID NO: 80617 - RNA, 20 nt, Artificial Sequence
  Synthetic
aguuggaggacaggagguug

SEQ ID NO: 80618 - RNA, 18 nt, Artificial Sequence
  Synthetic
  misc_feature (11)..(11): n is a, c, g, or u
  misc_feature (14)..(14): n is a, c, g, or u
  misc_feature (18)..(18): n is a, c, g, or u
cuacuaggucncungaun

SEQ ID NO: 80619 - RNA, 19 nt, Artificial Sequence
  Synthetic
  misc_feature (12)..(12): n is a, c, g, or u
  misc_feature (15)..(15): n is a, c, g, or u
  misc_feature (19)..(19): n is a, c, g, or u
acuacuaggucncungaun

SEQ ID NO: 80620 - RNA, 20 nt, Artificial Sequence
  Synthetic
  misc_feature (13)..(13): n is a, c, g, or u
  misc_feature (16)..(16): n is a, c, g, or u
  misc_feature (20)..(20): n is a, c, g, or u
gacuacuaggucncungaun

SEQ ID NO: 80621 - RNA, 18 nt, Artificial Sequence
  Synthetic
gcugaggcccacucccau

SEQ ID NO: 80622 - RNA, 19 nt, Artificial Sequence
  Synthetic
ggcugaggcccacucccau

SEQ ID NO: 80623 - RNA, 20 nt, Artificial Sequence
  Synthetic
gggcugaggcccacucccau

SEQ ID NO: 80624 - RNA, 18 nt, Artificial Sequence
  Synthetic
  misc_feature (7)..(7): n is a, c, g, or u
agcccangaugaugggau

SEQ ID NO: 80625 - RNA, 19 nt, Artificial Sequence
  Synthetic
  misc_feature (8)..(8): n is a, c, g, or u
aagcccangaugaugggau

SEQ ID NO: 80626 - RNA, 20 nt, Artificial Sequence
  Synthetic
  misc_feature (9)..(9): n is a, c, g, or u
aaagcccangaugaugggau

SEQ ID NO: 80627 - RNA, 18 nt, Artificial Sequence
  Synthetic
gauuggagguuggggacu

SEQ ID NO: 80628 - RNA, 19 nt, Artificial Sequence
  Synthetic
ugauuggagguuggggacu

SEQ ID NO: 80629 - RNA, 20 nt, Artificial Sequence
  Synthetic
gugauuggagguuggggacu

SEQ ID NO: 80630 - RNA, 18 nt, Artificial Sequence
  Synthetic
  misc_feature (5)..(5): n is a, c, g, or u
  misc_feature (15)..(15): n is a, c, g, or u
cuucnuuucucauunacu

SEQ ID NO: 80631 - RNA, 19 nt, Artificial Sequence
  Synthetic
  misc_feature (6)..(6): n is a, c, g, or u
  misc_feature (16)..(16): n is a, c, g, or u
ucuucnuuucucauunacu

SEQ ID NO: 80632 - RNA, 20 nt, Artificial Sequence
  Synthetic
  misc_feature (1)..(1): n is a, c, g, or u
  misc_feature (7)..(7): n is a, c, g, or u
  misc_feature (17)..(17): n is a, c, g, or u
nucuucnuuucucauunacu

SEQ ID NO: 80633 - RNA, 21 nt, Artificial Sequence
  Synthetic
  misc_feature (2)..(2): n is a, c, g, or u
  misc_feature (8)..(8): n is a, c, g, or u
  misc_feature (18)..(18): n is a, c, g, or u
anucuucnuuucucauunacu

SEQ ID NO: 80634 - RNA, 22 nt, Artificial Sequence
  Synthetic
  misc_feature (3)..(3): n is a, c, g, or u
  misc_feature (9)..(9): n is a, c, g, or u
  misc_feature (19)..(19): n is a, c, g, or u
canucuucnuuucucauunacu

SEQ ID NO: 80635 - RNA, 23 nt, Artificial Sequence
  Synthetic
  misc_feature (4)..(4): n is a, c, g, or u
  misc_feature (10)..(10): n is a, c, g, or u
  misc_feature (20)..(20): n is a, c, g, or u
gcanucuucnuuucucauunacu

SEQ ID NO: 80636 - RNA, 24 nt, Artificial Sequence
  Synthetic
  misc_feature (5)..(5): n is a, c, g, or u
  misc_feature (11)..(11): n is a, c, g, or u
  misc_feature (21)..(21): n is a, c, g, or u
ugcanucuucnuuucucauunacu

SEQ ID NO: 80637 - RNA, 18 nt, Artificial Sequence
  Synthetic
  misc_feature (9)..(9): n is a, c, g, or u
aacacgagnagggguccu

SEQ ID NO: 80638 - RNA, 19 nt, Artificial Sequence
  Synthetic
  misc_feature (10)..(10): n is a, c, g, or u
uaacacgagnagggguccu

SEQ ID NO: 80639 - RNA, 20 nt, Artificial Sequence
  Synthetic
  misc_feature (11)..(11): n is a, c, g, or u
guaacacgagnagggguccu

SEQ ID NO: 80640 - RNA, 18 nt, Artificial Sequence
  Synthetic
ggcuaggaguuccgcagu

SEQ ID NO: 80641 - RNA, 19 nt, Artificial Sequence
  Synthetic
cggcuaggaguuccgcagu

SEQ ID NO: 80642 - RNA, 20 nt, Artificial Sequence
  Synthetic
gcggcuaggaguuccgcagu

SEQ ID NO: 80643 - RNA, 18 nt, Artificial Sequence
  Synthetic
cuggccagguguccuugu

SEQ ID NO: 80644 - RNA, 19 nt, Artificial Sequence
  Synthetic
ucuggccagguguccuugu

SEQ ID NO: 80645 - RNA, 20 nt, Artificial Sequence
  Synthetic
gucuggccagguguccuugu

SEQ ID NO: 80646 - RNA, 18 nt, Artificial Sequence
  Synthetic
  misc_feature (11)..(11): n is a, c, g, or u
cccaucuuuunguuuugu

SEQ ID NO: 80647 - RNA, 19 nt, Artificial Sequence
  Synthetic
  misc_feature (12)..(12): n is a, c, g, or u
ccccaucuuuunguuuugu

SEQ ID NO: 80648 - RNA, 20 nt, Artificial Sequence
  Synthetic
  misc_feature (13)..(13): n is a, c, g, or u
accccaucuuuunguuuugu

SEQ ID NO: 80649 - RNA, 18 nt, Artificial Sequence
  Synthetic
  misc_feature (2)..(2): n is a, c, g, or u
  misc_feature (17)..(17): n is a, c, g, or u
gnaaauauuugguaacnu

SEQ ID NO: 80650 - RNA, 19 nt, Artificial Sequence
  Synthetic
  misc_feature (3)..(3): n is a, c, g, or u
  misc_feature (18)..(18): n is a, c, g, or u
ggnaaauauuugguaacnu

SEQ ID NO: 80651 - RNA, 20 nt, Artificial Sequence
  Synthetic
  misc_feature (4)..(4): n is a, c, g, or u
  misc_feature (19)..(19): n is a, c, g, or u
uggnaaauauuugguaacnu

SEQ ID NO: 80652 - RNA, 21 nt, Artificial Sequence
  Synthetic
  misc_feature (5)..(5): n is a, c, g, or u
  misc_feature (20)..(20): n is a, c, g, or u
auggnaaauauuugguaacnu

SEQ ID NO: 80653 - RNA, 22 nt, Artificial Sequence
  Synthetic
  misc_feature (6)..(6): n is a, c, g, or u
  misc_feature (21)..(21): n is a, c, g, or u
aauggnaaauauuugguaacnu

SEQ ID NO: 80654 - RNA, 23 nt, Artificial Sequence
  Synthetic
  misc_feature (1)..(1): n is a, c, g, or u
  misc_feature (7)..(7): n is a, c, g, or u
  misc_feature (22)..(22): n is a, c, g, or u
naauggnaaauauuugguaacnu

SEQ ID NO: 80655 - RNA, 24 nt, Artificial Sequence
  Synthetic
  misc_feature (2)..(2): n is a, c, g, or u
  misc_feature (8)..(8): n is a, c, g, or u
  misc_feature (23)..(23): n is a, c, g, or u
cnaauggnaaauauuugguaacnu

SEQ ID NO: 80656 - RNA, 18 nt, Artificial Sequence
  Synthetic
  misc_feature (1)..(1): n is a, c, g, or u
  misc_feature (10)..(10): n is a, c, g, or u
nguaaaguuncccaccuu

SEQ ID NO: 80657 - RNA, 19 nt, Artificial Sequence
  Synthetic
  misc_feature (2)..(2): n is a, c, g, or u
  misc_feature (11)..(11): n is a, c, g, or u
cnguaaaguuncccaccuu

SEQ ID NO: 80658 - RNA, 20 nt, Artificial Sequence
  Synthetic
  misc_feature (3)..(3): n is a, c, g, or u
  misc_feature (12)..(12): n is a, c, g, or u
ccnguaaaguuncccaccuu

SEQ ID NO: 80659 - RNA, 18 nt, Artificial Sequence
  Synthetic
aaugauuaacuagauguu

SEQ ID NO: 80660 - RNA, 19 nt, Artificial Sequence
  Synthetic
uaaugauuaacuagauguu

SEQ ID NO: 80661 - RNA, 20 nt, Artificial Sequence
  Synthetic
guaaugauuaacuagauguu

SEQ ID NO: 80662 - RNA, 18 nt, Artificial Sequence
  Synthetic
gcuaggcugugcugccaa

SEQ ID NO: 80663 - RNA, 19 nt, Artificial Sequence
  Synthetic
ugcuaggcugugcugccaa

SEQ ID NO: 80664 - RNA, 20 nt, Artificial Sequence
  Synthetic
cugcuaggcugugcugccaa

SEQ ID NO: 80665 - RNA, 18 nt, Artificial Sequence
  Synthetic
  misc_feature (7)..(7): n is a, c, g, or u
  misc_feature (11)..(11): n is a, c, g, or u
acaucanacanaaaauca

SEQ ID NO: 80666 - RNA, 19 nt, Artificial Sequence
  Synthetic
  misc_feature (8)..(8): n is a, c, g, or u
  misc_feature (12)..(12): n is a, c, g, or u
cacaucanacanaaaauca

SEQ ID NO: 80667 - RNA, 20 nt, Artificial Sequence
  Synthetic
  misc_feature (1)..(1): n is a, c, g, or u
  misc_feature (9)..(9): n is a, c, g, or u
  misc_feature (13)..(13): n is a, c, g, or u
ncacaucanacanaaaauca

SEQ ID NO: 80668 - RNA, 21 nt, Artificial Sequence
  Synthetic
  misc_feature (2)..(2): n is a, c, g, or u
  misc_feature (10)..(10): n is a, c, g, or u
  misc_feature (14)..(14): n is a, c, g, or u
ancacaucanacanaaaauca

SEQ ID NO: 80669 - RNA, 22 nt, Artificial Sequence
  Synthetic
  misc_feature (3)..(3): n is a, c, g, or u
  misc_feature (11)..(11): n is a, c, g, or u
  misc_feature (15)..(15): n is a, c, g, or u
gancacaucanacanaaaauca

SEQ ID NO: 80670 - RNA, 23 nt, Artificial Sequence
  Synthetic
  misc_feature (4)..(4): n is a, c, g, or u
  misc_feature (12)..(12): n is a, c, g, or u
  misc_feature (16)..(16): n is a, c, g, or u
agancacaucanacanaaaauca

SEQ ID NO: 80671 - RNA, 24 nt, Artificial Sequence
  Synthetic
  misc_feature (5)..(5): n is a, c, g, or u
  misc_feature (13)..(13): n is a, c, g, or u
  misc_feature (17)..(17): n is a, c, g, or u
aagancacaucanacanaaaauca

SEQ ID NO: 80672 - RNA, 18 nt, Artificial Sequence
  Synthetic
  misc_feature (5)..(5): n is a, c, g, or u
  misc_feature (11)..(11): n is a, c, g, or u
auuunaugggnuauguca

SEQ ID NO: 80673 - RNA, 19 nt, Artificial Sequence
  Synthetic
  misc_feature (1)..(1): n is a, c, g, or u
  misc_feature (6)..(6): n is a, c, g, or u
  misc_feature (12)..(12): n is a, c, g, or u
nauuunaugggnuauguca

SEQ ID NO: 80674 - RNA, 20 nt, Artificial Sequence
  Synthetic
  misc_feature (2)..(2): n is a, c, g, or u
  misc_feature (7)..(7): n is a, c, g, or u
  misc_feature (13)..(13): n is a, c, g, or u
anauuunaugggnuauguca

SEQ ID NO: 80675 - RNA, 21 nt, Artificial Sequence
  Synthetic
  misc_feature (3)..(3): n is a, c, g, or u
  misc_feature (8)..(8): n is a, c, g, or u
  misc_feature (14)..(14): n is a, c, g, or u
uanauuunaugggnuauguca

SEQ ID NO: 80676 - RNA, 22 nt, Artificial Sequence
  Synthetic
  misc_feature (1)..(1): n is a, c, g, or u
  misc_feature (4)..(4): n is a, c, g, or u
  misc_feature (9)..(9): n is a, c, g, or u
  misc_feature (15)..(15): n is a, c, g, or u
nuanauuunaugggnuauguca

SEQ ID NO: 80677 - RNA, 23 nt, Artificial Sequence
  Synthetic
  misc_feature (2)..(2): n is a, c, g, or u
  misc_feature (5)..(5): n is a, c, g, or u
  misc_feature (10)..(10): n is a, c, g, or u
  misc_feature (16)..(16): n is a, c, g, or u
unuanauuunaugggnuauguca

SEQ ID NO: 80678 - RNA, 24 nt, Artificial Sequence
  Synthetic
  misc_feature (3)..(3): n is a, c, g, or u
  misc_feature (6)..(6): n is a, c, g, or u
  misc_feature (11)..(11): n is a, c, g, or u
  misc_feature (17)..(17): n is a, c, g, or u
cunuanauuunaugggnuauguca

SEQ ID NO: 80679 - RNA, 18 nt, Artificial Sequence
  Synthetic
  misc_feature (12)..(12): n is a, c, g, or u
ccuaacaaaacnaaaaga

SEQ ID NO: 80680 - RNA, 19 nt, Artificial Sequence
  Synthetic
  misc_feature (13)..(13): n is a, c, g, or u
cccuaacaaaacnaaaaga

SEQ ID NO: 80681 - RNA, 20 nt, Artificial Sequence
  Synthetic
  misc_feature (14)..(14): n is a, c, g, or u
acccuaacaaaacnaaaaga

SEQ ID NO: 80682 - RNA, 18 nt, Artificial Sequence
  Synthetic
  misc_feature (11)..(11): n is a, c, g, or u
uggacauuganccuuaua

SEQ ID NO: 80683 - RNA, 19 nt, Artificial Sequence
  Synthetic
  misc_feature (12)..(12): n is a, c, g, or u
auggacauuganccuuaua

SEQ ID NO: 80684 - RNA, 20 nt, Artificial Sequence
  Synthetic
  misc_feature (13)..(13): n is a, c, g, or u
cauggacauuganccuuaua

SEQ ID NO: 80685 - RNA, 18 nt, Artificial Sequence
  Synthetic
  misc_feature (1)..(1): n is a, c, g, or u
  misc_feature (16)..(16): n is a, c, g, or u
ncuaaugacucuagcnac

SEQ ID NO: 80686 - RNA, 19 nt, Artificial Sequence
  Synthetic
  misc_feature (2)..(2): n is a, c, g, or u
  misc_feature (17)..(17): n is a, c, g, or u
ancuaaugacucuagcnac

SEQ ID NO: 80687 - RNA, 20 nt, Artificial Sequence
  Synthetic
  misc_feature (3)..(3): n is a, c, g, or u
  misc_feature (18)..(18): n is a, c, g, or u
gancuaaugacucuagcnac

SEQ ID NO: 80688 - RNA, 18 nt, Artificial Sequence
  Synthetic
aacuuguccugguuaucg

SEQ ID NO: 80689 - RNA, 19 nt, Artificial Sequence
  Synthetic
caacuuguccugguuaucg

SEQ ID NO: 80690 - RNA, 20 nt, Artificial Sequence
  Synthetic
ccaacuuguccugguuaucg

SEQ ID NO: 80691 - RNA, 18 nt, Artificial Sequence
  Synthetic
aagagcuacagcaugggg

SEQ ID NO: 80692 - RNA, 19 nt, Artificial Sequence
  Synthetic
caagagcuacagcaugggg

SEQ ID NO: 80693 - RNA, 20 nt, Artificial Sequence
  Synthetic
acaagagcuacagcaugggg

SEQ ID NO: 80694 - RNA, 18 nt, Artificial Sequence
  Synthetic
  misc_feature (11)..(11): n is a, c, g, or u
guuuguuuaangacuggg

SEQ ID NO: 80695 - RNA, 19 nt, Artificial Sequence
  Synthetic
  misc_feature (12)..(12): n is a, c, g, or u
uguuuguuuaangacuggg

SEQ ID NO: 80696 - RNA, 20 nt, Artificial Sequence
  Synthetic
  misc_feature (13)..(13): n is a, c, g, or u
cuguuuguuuaangacuggg

SEQ ID NO: 80697 - RNA, 18 nt, Artificial Sequence
  Synthetic
  misc_feature (12)..(12): n is a, c, g, or u
augacucuagcnaccugg

SEQ ID NO: 80698 - RNA, 19 nt, Artificial Sequence
  Synthetic
  misc_feature (13)..(13): n is a, c, g, or u
aaugacucuagcnaccugg

SEQ ID NO: 80699 - RNA, 20 nt, Artificial Sequence
  Synthetic
  misc_feature (14)..(14): n is a, c, g, or u
uaaugacucuagcnaccugg

SEQ ID NO: 80700 - RNA, 18 nt, Artificial Sequence
  Synthetic
  misc_feature (15)..(15): n is a, c, g, or u
aagaauuuggagcuncug

SEQ ID NO: 80701 - RNA, 19 nt, Artificial Sequence
  Synthetic
  misc_feature (16)..(16): n is a, c, g, or u
aaagaauuuggagcuncug

SEQ ID NO: 80702 - RNA, 20 nt, Artificial Sequence
  Synthetic
  misc_feature (17)..(17): n is a, c, g, or u
uaaagaauuuggagcuncug

SEQ ID NO: 80703 - RNA, 18 nt, Artificial Sequence
  Synthetic
  misc_feature (14)..(14): n is a, c, g, or u
  misc_feature (17)..(18): n is a, c, g, or u
uuggaagagaaacngunn

SEQ ID NO: 80704 - RNA, 19 nt, Artificial Sequence
  Synthetic
  misc_feature (15)..(15): n is a, c, g, or u
  misc_feature (18)..(19): n is a, c, g, or u
uuuggaagagaaacngunn

SEQ ID NO: 80705 - RNA, 20 nt, Artificial Sequence
  Synthetic
  misc_feature (16)..(16): n is a, c, g, or u
  misc_feature (19)..(20): n is a, c, g, or u
uuuuggaagagaaacngunn

SEQ ID NO: 80706 - RNA, 21 nt, Artificial Sequence
  Synthetic
  misc_feature (17)..(17): n is a, c, g, or u
  misc_feature (20)..(21): n is a, c, g, or u
cuuuuggaagagaaacngunn

SEQ ID NO: 80707 - RNA, 22 nt, Artificial Sequence
  Synthetic
  misc_feature (18)..(18): n is a, c, g, or u
  misc_feature (21)..(22): n is a, c, g, or u
acuuuuggaagagaaacngunn

SEQ ID NO: 80708 - RNA, 23 nt, Artificial Sequence
  Synthetic
  misc_feature (19)..(19): n is a, c, g, or u
  misc_feature (22)..(23): n is a, c, g, or u
cacuuuuggaagagaaacngunn

SEQ ID NO: 80709 - RNA, 24 nt, Artificial Sequence
  Synthetic
  misc_feature (20)..(20): n is a, c, g, or u
  misc_feature (23)..(24): n is a, c, g, or u
ucacuuuuggaagagaaacngunn

SEQ ID NO: 80710 - RNA, 18 nt, Artificial Sequence
  Synthetic
acauggagaacaucacau

SEQ ID NO: 80711 - RNA, 19 nt, Artificial Sequence
  Synthetic
aacauggagaacaucacau

SEQ ID NO: 80712 - RNA, 20 nt, Artificial Sequence
  Synthetic
gaacauggagaacaucacau

SEQ ID NO: 80713 - RNA, 18 nt, Artificial Sequence
  Synthetic
  misc_feature (9)..(9): n is a, c, g, or u
  misc_feature (15)..(15): n is a, c, g, or u
aaauauuunccauungau

SEQ ID NO: 80714 - RNA, 19 nt, Artificial Sequence
  Synthetic
  misc_feature (10)..(10): n is a, c, g, or u
  misc_feature (16)..(16): n is a, c, g, or u
caaauauuunccauungau

SEQ ID NO: 80715 - RNA, 20 nt, Artificial Sequence
  Synthetic
  misc_feature (11)..(11): n is a, c, g, or u
  misc_feature (17)..(17): n is a, c, g, or u
ccaaauauuunccauungau

SEQ ID NO: 80716 - RNA, 18 nt, Artificial Sequence
  Synthetic
uguuuggcuuucaguuau

SEQ ID NO: 80717 - RNA, 19 nt, Artificial Sequence
  Synthetic
cuguuuggcuuucaguuau

SEQ ID NO: 80718 - RNA, 20 nt, Artificial Sequence
  Synthetic
acuguuuggcuuucaguuau

SEQ ID NO: 80719 - RNA, 18 nt, Artificial Sequence
  Synthetic
accaauuuucuuuugucu

SEQ ID NO: 80720 - RNA, 19 nt, Artificial Sequence
  Synthetic
uaccaauuuucuuuugucu

SEQ ID NO: 80721 - RNA, 20 nt, Artificial Sequence
  Synthetic
uuaccaauuuucuuuugucu

SEQ ID NO: 80722 - RNA, 18 nt, Artificial Sequence
  Synthetic
  misc_feature (6)..(6): n is a, c, g, or u
  misc_feature (15)..(15): n is a, c, g, or u
aaagunugucaacgnauu

SEQ ID NO: 80723 - RNA, 19 nt, Artificial Sequence
  Synthetic
  misc_feature (7)..(7): n is a, c, g, or u
  misc_feature (16)..(16): n is a, c, g, or u
gaaagunugucaacgnauu

SEQ ID NO: 80724 - RNA, 20 nt, Artificial Sequence
  Synthetic
  misc_feature (8)..(8): n is a, c, g, or u
  misc_feature (17)..(17): n is a, c, g, or u
ggaaagunugucaacgnauu

SEQ ID NO: 80725 - RNA, 18 nt, Artificial Sequence
  Synthetic
  misc_feature (2)..(2): n is a, c, g, or u
gnuaugucauuggauguu

SEQ ID NO: 80726 - RNA, 19 nt, Artificial Sequence
  Synthetic
  misc_feature (3)..(3): n is a, c, g, or u
ggnuaugucauuggauguu

SEQ ID NO: 80727 - RNA, 20 nt, Artificial Sequence
  Synthetic
  misc_feature (4)..(4): n is a, c, g, or u
gggnuaugucauuggauguu

SEQ ID NO: 80728 - RNA, 18 nt, Artificial Sequence
  Synthetic
agaguauuuggugucuuu

SEQ ID NO: 80729 - RNA, 19 nt, Artificial Sequence
  Synthetic
uagaguauuuggugucuuu

SEQ ID NO: 80730 - RNA, 20 nt, Artificial Sequence
  Synthetic
  misc_feature (1)..(1): n is a, c, g, or u
nuagaguauuuggugucuuu

SEQ ID NO: 80731 - RNA, 18 nt, Artificial Sequence
  Synthetic
  misc_feature (4)..(4): n is a, c, g, or u
cacnuagcgccucauuuu

SEQ ID NO: 80732 - RNA, 19 nt, Artificial Sequence
  Synthetic
  misc_feature (5)..(5): n is a, c, g, or u
acacnuagcgccucauuuu

SEQ ID NO: 80733 - RNA, 20 nt, Artificial Sequence
  Synthetic
  misc_feature (6)..(6): n is a, c, g, or u
aacacnuagcgccucauuuu

SEQ ID NO: 80734 - RNA, 18 nt, Artificial Sequence
  Synthetic
  misc_feature (3)..(3): n is a, c, g, or u
acnguuucucuuccaaaa

SEQ ID NO: 80735 - RNA, 19 nt, Artificial Sequence
  Synthetic
  misc_feature (1)..(1): n is a, c, g, or u
  misc_feature (4)..(4): n is a, c, g, or u
nacnguuucucuuccaaaa

SEQ ID NO: 80736 - RNA, 20 nt, Artificial Sequence
  Synthetic
  misc_feature (1)..(2): n is a, c, g, or u
  misc_feature (5)..(5): n is a, c, g, or u
nnacnguuucucuuccaaaa

SEQ ID NO: 80737 - RNA, 21 nt, Artificial Sequence
  Synthetic
  misc_feature (2)..(3): n is a, c, g, or u
  misc_feature (6)..(6): n is a, c, g, or u
annacnguuucucuuccaaaa

SEQ ID NO: 80738 - RNA, 22 nt, Artificial Sequence
  Synthetic
  misc_feature (3)..(4): n is a, c, g, or u
  misc_feature (7)..(7): n is a, c, g, or u
uannacnguuucucuuccaaaa

SEQ ID NO: 80739 - RNA, 23 nt, Artificial Sequence
  Synthetic
  misc_feature (4)..(5): n is a, c, g, or u
  misc_feature (8)..(8): n is a, c, g, or u
cuannacnguuucucuuccaaaa

SEQ ID NO: 80740 - RNA, 24 nt, Artificial Sequence
  Synthetic
  misc_feature (5)..(6): n is a, c, g, or u
  misc_feature (9)..(9): n is a, c, g, or u
ucuannacnguuucucuuccaaaa

SEQ ID NO: 80741 - RNA, 18 nt, Artificial Sequence
  Synthetic
agaagucagaaggcaaaa

SEQ ID NO: 80742 - RNA, 19 nt, Artificial Sequence
  Synthetic
aagaagucagaaggcaaaa

SEQ ID NO: 80743 - RNA, 20 nt, Artificial Sequence
  Synthetic
aaagaagucagaaggcaaaa

SEQ ID NO: 80744 - RNA, 21 nt, Artificial Sequence
  Synthetic
gaaagaagucagaaggcaaaa

SEQ ID NO: 80745 - RNA, 22 nt, Artificial Sequence
  Synthetic
ggaaagaagucagaaggcaaaa

SEQ ID NO: 80746 - RNA, 23 nt, Artificial Sequence
  Synthetic
aggaaagaagucagaaggcaaaa

SEQ ID NO: 80747 - RNA, 24 nt, Artificial Sequence
  Synthetic
aaggaaagaagucagaaggcaaaa

SEQ ID NO: 80748 - RNA, 18 nt, Artificial Sequence
  Synthetic
  misc_feature (3)..(3): n is a, c, g, or u
  misc_feature (6)..(6): n is a, c, g, or u
gunguncccccuagaaaa

SEQ ID NO: 80749 - RNA, 19 nt, Artificial Sequence
  Synthetic
  misc_feature (4)..(4): n is a, c, g, or u
  misc_feature (7)..(7): n is a, c, g, or u
ggunguncccccuagaaaa

SEQ ID NO: 80750 - RNA, 20 nt, Artificial Sequence
  Synthetic
  misc_feature (5)..(5): n is a, c, g, or u
  misc_feature (8)..(8): n is a, c, g, or u
cggunguncccccuagaaaa

SEQ ID NO: 80751 - RNA, 21 nt, Artificial Sequence
  Synthetic
  misc_feature (6)..(6): n is a, c, g, or u
  misc_feature (9)..(9): n is a, c, g, or u
acggunguncccccuagaaaa

SEQ ID NO: 80752 - RNA, 22 nt, Artificial Sequence
  Synthetic
  misc_feature (7)..(7): n is a, c, g, or u
  misc_feature (10)..(10): n is a, c, g, or u
cacggunguncccccuagaaaa

SEQ ID NO: 80753 - RNA, 23 nt, Artificial Sequence
  Synthetic
  misc_feature (8)..(8): n is a, c, g, or u
  misc_feature (11)..(11): n is a, c, g, or u
acacggunguncccccuagaaaa

SEQ ID NO: 80754 - RNA, 24 nt, Artificial Sequence
  Synthetic
  misc_feature (9)..(9): n is a, c, g, or u
  misc_feature (12)..(12): n is a, c, g, or u
cacacggunguncccccuagaaaa

SEQ ID NO: 80755 - RNA, 18 nt, Artificial Sequence
  Synthetic
uugguaacagcgguaaaa

SEQ ID NO: 80756 - RNA, 19 nt, Artificial Sequence
  Synthetic
auugguaacagcgguaaaa

SEQ ID NO: 80757 - RNA, 20 nt, Artificial Sequence
  Synthetic
aauugguaacagcgguaaaa

SEQ ID NO: 80758 - RNA, 21 nt, Artificial Sequence
  Synthetic
aaauugguaacagcgguaaaa

SEQ ID NO: 80759 - RNA, 22 nt, Artificial Sequence
  Synthetic
aaaauugguaacagcgguaaaa

SEQ ID NO: 80760 - RNA, 23 nt, Artificial Sequence
  Synthetic
gaaaauugguaacagcgguaaaa

SEQ ID NO: 80761 - RNA, 24 nt, Artificial Sequence
  Synthetic
agaaaauugguaacagcgguaaaa

SEQ ID NO: 80762 - RNA, 18 nt, Artificial Sequence
  Synthetic
aauauggugacccacaaa

SEQ ID NO: 80763 - RNA, 19 nt, Artificial Sequence
  Synthetic
gaauauggugacccacaaa

SEQ ID NO: 80764 - RNA, 20 nt, Artificial Sequence
  Synthetic
agaauauggugacccacaaa

SEQ ID NO: 80765 - RNA, 21 nt, Artificial Sequence
  Synthetic
aagaauauggugacccacaaa

SEQ ID NO: 80766 - RNA, 22 nt, Artificial Sequence
  Synthetic
caagaauauggugacccacaaa

SEQ ID NO: 80767 - RNA, 23 nt, Artificial Sequence
  Synthetic
ccaagaauauggugacccacaaa

SEQ ID NO: 80768 - RNA, 24 nt, Artificial Sequence
  Synthetic
cccaagaauauggugacccacaaa

SEQ ID NO: 80769 - RNA, 18 nt, Artificial Sequence
  Synthetic
uuguaaguuggcgagaaa

SEQ ID NO: 80770 - RNA, 19 nt, Artificial Sequence
  Synthetic
cuuguaaguuggcgagaaa

SEQ ID NO: 80771 - RNA, 20 nt, Artificial Sequence
  Synthetic
ccuuguaaguuggcgagaaa

SEQ ID NO: 80772 - RNA, 21 nt, Artificial Sequence
  Synthetic
gccuuguaaguuggcgagaaa

SEQ ID NO: 80773 - RNA, 22 nt, Artificial Sequence
  Synthetic
ggccuuguaaguuggcgagaaa

SEQ ID NO: 80774 - RNA, 23 nt, Artificial Sequence
  Synthetic
aggccuuguaaguuggcgagaaa

SEQ ID NO: 80775 - RNA, 24 nt, Artificial Sequence
  Synthetic
aaggccuuguaaguuggcgagaaa

SEQ ID NO: 80776 - RNA, 18 nt, Artificial Sequence
  Synthetic
acaaauggcacuaguaaa

SEQ ID NO: 80777 - RNA, 19 nt, Artificial Sequence
  Synthetic
aacaaauggcacuaguaaa

SEQ ID NO: 80778 - RNA, 20 nt, Artificial Sequence
  Synthetic
gaacaaauggcacuaguaaa

SEQ ID NO: 80779 - RNA, 21 nt, Artificial Sequence
  Synthetic
ugaacaaauggcacuaguaaa

SEQ ID NO: 80780 - RNA, 22 nt, Artificial Sequence
  Synthetic
cugaacaaauggcacuaguaaa

SEQ ID NO: 80781 - RNA, 23 nt, Artificial Sequence
  Synthetic
acugaacaaauggcacuaguaaa

SEQ ID NO: 80782 - RNA, 24 nt, Artificial Sequence
  Synthetic
cacugaacaaauggcacuaguaaa

SEQ ID NO: 80783 - RNA, 18 nt, Artificial Sequence
  Synthetic
acggggaguccgcguaaa

SEQ ID NO: 80784 - RNA, 19 nt, Artificial Sequence
  Synthetic
gacggggaguccgcguaaa

SEQ ID NO: 80785 - RNA, 20 nt, Artificial Sequence
  Synthetic
agacggggaguccgcguaaa

SEQ ID NO: 80786 - RNA, 21 nt, Artificial Sequence
  Synthetic
cagacggggaguccgcguaaa

SEQ ID NO: 80787 - RNA, 22 nt, Artificial Sequence
  Synthetic
acagacggggaguccgcguaaa

SEQ ID NO: 80788 - RNA, 23 nt, Artificial Sequence
  Synthetic
cacagacggggaguccgcguaaa

SEQ ID NO: 80789 - RNA, 24 nt, Artificial Sequence
  Synthetic
gcacagacggggaguccgcguaaa

SEQ ID NO: 80790 - RNA, 18 nt, Artificial Sequence
  Synthetic
auugguaacagcgguaaa

SEQ ID NO: 80791 - RNA, 19 nt, Artificial Sequence
  Synthetic
aauugguaacagcgguaaa

SEQ ID NO: 80792 - RNA, 20 nt, Artificial Sequence
  Synthetic
aaauugguaacagcgguaaa

SEQ ID NO: 80793 - RNA, 21 nt, Artificial Sequence
  Synthetic
aaaauugguaacagcgguaaa

SEQ ID NO: 80794 - RNA, 22 nt, Artificial Sequence
  Synthetic
gaaaauugguaacagcgguaaa

SEQ ID NO: 80795 - RNA, 23 nt, Artificial Sequence
  Synthetic
agaaaauugguaacagcgguaaa

SEQ ID NO: 80796 - RNA, 24 nt, Artificial Sequence
  Synthetic
aagaaaauugguaacagcgguaaa

SEQ ID NO: 80797 - RNA, 18 nt, Artificial Sequence
  Synthetic
auaaccacauuguguaaa

SEQ ID NO: 80798 - RNA, 19 nt, Artificial Sequence
  Synthetic
gauaaccacauuguguaaa

SEQ ID NO: 80799 - RNA, 20 nt, Artificial Sequence
  Synthetic
ggauaaccacauuguguaaa

SEQ ID NO: 80800 - RNA, 21 nt, Artificial Sequence
  Synthetic
aggauaaccacauuguguaaa

SEQ ID NO: 80801 - RNA, 22 nt, Artificial Sequence
  Synthetic
caggauaaccacauuguguaaa

SEQ ID NO: 80802 - RNA, 23 nt, Artificial Sequence
  Synthetic
gcaggauaaccacauuguguaaa

SEQ ID NO: 80803 - RNA, 24 nt, Artificial Sequence
  Synthetic
agcaggauaaccacauuguguaaa

SEQ ID NO: 80804 - RNA, 18 nt, Artificial Sequence
  Synthetic
auguauacccaaagacaa

SEQ ID NO: 80805 - RNA, 19 nt, Artificial Sequence
  Synthetic
aauguauacccaaagacaa

SEQ ID NO: 80806 - RNA, 20 nt, Artificial Sequence
  Synthetic
aaauguauacccaaagacaa

SEQ ID NO: 80807 - RNA, 21 nt, Artificial Sequence
  Synthetic
uaaauguauacccaaagacaa

SEQ ID NO: 80808 - RNA, 22 nt, Artificial Sequence
  Synthetic
uuaaauguauacccaaagacaa

SEQ ID NO: 80809 - RNA, 23 nt, Artificial Sequence
  Synthetic
uuuaaauguauacccaaagacaa

SEQ ID NO: 80810 - RNA, 24 nt, Artificial Sequence
  Synthetic
guuuaaauguauacccaaagacaa

SEQ ID NO: 80811 - RNA, 18 nt, Artificial Sequence
  Synthetic
ccuggaauuagaggacaa

SEQ ID NO: 80812 - RNA, 19 nt, Artificial Sequence
  Synthetic
uccuggaauuagaggacaa

SEQ ID NO: 80813 - RNA, 20 nt, Artificial Sequence
  Synthetic
auccuggaauuagaggacaa

SEQ ID NO: 80814 - RNA, 21 nt, Artificial Sequence
  Synthetic
gauccuggaauuagaggacaa

SEQ ID NO: 80815 - RNA, 22 nt, Artificial Sequence
  Synthetic
  misc_feature (1)..(1): n is a, c, g, or u
ngauccuggaauuagaggacaa

SEQ ID NO: 80816 - RNA, 23 nt, Artificial Sequence
  Synthetic
  misc_feature (2)..(2): n is a, c, g, or u
angauccuggaauuagaggacaa

SEQ ID NO: 80817 - RNA, 24 nt, Artificial Sequence
  Synthetic
  misc_feature (3)..(3): n is a, c, g, or u
gangauccuggaauuagaggacaa

SEQ ID NO: 80818 - RNA, 18 nt, Artificial Sequence
  Synthetic
gaagguuugguacagcaa

SEQ ID NO: 80819 - RNA, 19 nt, Artificial Sequence
  Synthetic
cgaagguuugguacagcaa

SEQ ID NO: 80820 - RNA, 20 nt, Artificial Sequence
  Synthetic
ccgaagguuugguacagcaa

SEQ ID NO: 80821 - RNA, 21 nt, Artificial Sequence
  Synthetic
uccgaagguuugguacagcaa

SEQ ID NO: 80822 - RNA, 22 nt, Artificial Sequence
  Synthetic
guccgaagguuugguacagcaa

SEQ ID NO: 80823 - RNA, 23 nt, Artificial Sequence
  Synthetic
cguccgaagguuugguacagcaa

SEQ ID NO: 80824 - RNA, 24 nt, Artificial Sequence
  Synthetic
ccguccgaagguuugguacagcaa

SEQ ID NO: 80825 - RNA, 18 nt, Artificial Sequence
  Synthetic
uaaacugagccaggagaa

SEQ ID NO: 80826 - RNA, 19 nt, Artificial Sequence
  Synthetic
guaaacugagccaggagaa

SEQ ID NO: 80827 - RNA, 20 nt, Artificial Sequence
  Synthetic
aguaaacugagccaggagaa

SEQ ID NO: 80828 - RNA, 21 nt, Artificial Sequence
  Synthetic
uaguaaacugagccaggagaa

SEQ ID NO: 80829 - RNA, 22 nt, Artificial Sequence
  Synthetic
cuaguaaacugagccaggagaa

SEQ ID NO: 80830 - RNA, 23 nt, Artificial Sequence
  Synthetic
acuaguaaacugagccaggagaa

SEQ ID NO: 80831 - RNA, 24 nt, Artificial Sequence
  Synthetic
cacuaguaaacugagccaggagaa

SEQ ID NO: 80832 - RNA, 18 nt, Artificial Sequence
  Synthetic
  misc_feature (2)..(2): n is a, c, g, or u
gnaacggcagacggagaa

SEQ ID NO: 80833 - RNA, 19 nt, Artificial Sequence
  Synthetic
  misc_feature (3)..(3): n is a, c, g, or u
cgnaacggcagacggagaa

SEQ ID NO: 80834 - RNA, 20 nt, Artificial Sequence
  Synthetic
  misc_feature (1)..(1): n is a, c, g, or u
  misc_feature (4)..(4): n is a, c, g, or u
ncgnaacggcagacggagaa

SEQ ID NO: 80835 - RNA, 21 nt, Artificial Sequence
  Synthetic
  misc_feature (2)..(2): n is a, c, g, or u
  misc_feature (5)..(5): n is a, c, g, or u
gncgnaacggcagacggagaa

SEQ ID NO: 80836 - RNA, 22 nt, Artificial Sequence
  Synthetic
  misc_feature (3)..(3): n is a, c, g, or u
  misc_feature (6)..(6): n is a, c, g, or u
ggncgnaacggcagacggagaa

SEQ ID NO: 80837 - RNA, 23 nt, Artificial Sequence
  Synthetic
  misc_feature (4)..(4): n is a, c, g, or u
  misc_feature (7)..(7): n is a, c, g, or u
cggncgnaacggcagacggagaa

SEQ ID NO: 80838 - RNA, 24 nt, Artificial Sequence
  Synthetic
  misc_feature (5)..(5): n is a, c, g, or u
  misc_feature (8)..(8): n is a, c, g, or u
ucggncgnaacggcagacggagaa

SEQ ID NO: 80839 - RNA, 18 nt, Artificial Sequence
  Synthetic
gcauagcagcaggaugaa

SEQ ID NO: 80840 - RNA, 19 nt, Artificial Sequence
  Synthetic
ggcauagcagcaggaugaa

SEQ ID NO: 80841 - RNA, 20 nt, Artificial Sequence
  Synthetic
aggcauagcagcaggaugaa

SEQ ID NO: 80842 - RNA, 21 nt, Artificial Sequence
  Synthetic
gaggcauagcagcaggaugaa

SEQ ID NO: 80843 - RNA, 22 nt, Artificial Sequence
  Synthetic
ugaggcauagcagcaggaugaa

SEQ ID NO: 80844 - RNA, 23 nt, Artificial Sequence
  Synthetic
augaggcauagcagcaggaugaa

SEQ ID NO: 80845 - RNA, 24 nt, Artificial Sequence
  Synthetic
gaugaggcauagcagcaggaugaa

SEQ ID NO: 80846 - RNA, 18 nt, Artificial Sequence
  Synthetic
ggguuuacuguuccugaa

SEQ ID NO: 80847 - RNA, 19 nt, Artificial Sequence
  Synthetic
aggguuuacuguuccugaa

SEQ ID NO: 80848 - RNA, 20 nt, Artificial Sequence
  Synthetic
caggguuuacuguuccugaa

SEQ ID NO: 80849 - RNA, 21 nt, Artificial Sequence
  Synthetic
acaggguuuacuguuccugaa

SEQ ID NO: 80850 - RNA, 22 nt, Artificial Sequence
  Synthetic
aacaggguuuacuguuccugaa

SEQ ID NO: 80851 - RNA, 23 nt, Artificial Sequence
  Synthetic
gaacaggguuuacuguuccugaa

SEQ ID NO: 80852 - RNA, 24 nt, Artificial Sequence
  Synthetic
ggaacaggguuuacuguuccugaa

SEQ ID NO: 80853 - RNA, 18 nt, Artificial Sequence
  Synthetic
gcgacgugcagaggugaa

SEQ ID NO: 80854 - RNA, 19 nt, Artificial Sequence
  Synthetic
ugcgacgugcagaggugaa

SEQ ID NO: 80855 - RNA, 20 nt, Artificial Sequence
  Synthetic
augcgacgugcagaggugaa

SEQ ID NO: 80856 - RNA, 21 nt, Artificial Sequence
  Synthetic
caugcgacgugcagaggugaa

SEQ ID NO: 80857 - RNA, 22 nt, Artificial Sequence
  Synthetic
ccaugcgacgugcagaggugaa

SEQ ID NO: 80858 - RNA, 23 nt, Artificial Sequence
  Synthetic
uccaugcgacgugcagaggugaa

SEQ ID NO: 80859 - RNA, 24 nt, Artificial Sequence
  Synthetic
cuccaugcgacgugcagaggugaa

SEQ ID NO: 80860 - RNA, 18 nt, Artificial Sequence
  Synthetic
accacaucauccauauaa

SEQ ID NO: 80861 - RNA, 19 nt, Artificial Sequence
  Synthetic
uaccacaucauccauauaa

SEQ ID NO: 80862 - RNA, 20 nt, Artificial Sequence
  Synthetic
auaccacaucauccauauaa

SEQ ID NO: 80863 - RNA, 21 nt, Artificial Sequence
  Synthetic
aauaccacaucauccauauaa

SEQ ID NO: 80864 - RNA, 22 nt, Artificial Sequence
  Synthetic
caauaccacaucauccauauaa

SEQ ID NO: 80865 - RNA, 23 nt, Artificial Sequence
  Synthetic
ccaauaccacaucauccauauaa

SEQ ID NO: 80866 - RNA, 24 nt, Artificial Sequence
  Synthetic
cccaauaccacaucauccauauaa

SEQ ID NO: 80867 - RNA, 18 nt, Artificial Sequence
  Synthetic
gauaaccacauuguguaa

SEQ ID NO: 80868 - RNA, 19 nt, Artificial Sequence
  Synthetic
ggauaaccacauuguguaa

SEQ ID NO: 80869 - RNA, 20 nt, Artificial Sequence
  Synthetic
aggauaaccacauuguguaa

SEQ ID NO: 80870 - RNA, 21 nt, Artificial Sequence
  Synthetic
caggauaaccacauuguguaa

SEQ ID NO: 80871 - RNA, 22 nt, Artificial Sequence
  Synthetic
gcaggauaaccacauuguguaa

SEQ ID NO: 80872 - RNA, 23 nt, Artificial Sequence
  Synthetic
agcaggauaaccacauuguguaa

SEQ ID NO: 80873 - RNA, 24 nt, Artificial Sequence
  Synthetic
aagcaggauaaccacauuguguaa

SEQ ID NO: 80874 - RNA, 18 nt, Artificial Sequence
  Synthetic
aaucaauaggccuguuaa

SEQ ID NO: 80875 - RNA, 19 nt, Artificial Sequence
  Synthetic
caaucaauaggccuguuaa

SEQ ID NO: 80876 - RNA, 20 nt, Artificial Sequence
  Synthetic
ccaaucaauaggccuguuaa

SEQ ID NO: 80877 - RNA, 21 nt, Artificial Sequence
  Synthetic
uccaaucaauaggccuguuaa

SEQ ID NO: 80878 - RNA, 22 nt, Artificial Sequence
  Synthetic
uuccaaucaauaggccuguuaa

SEQ ID NO: 80879 - RNA, 23 nt, Artificial Sequence
  Synthetic
uuuccaaucaauaggccuguuaa

SEQ ID NO: 80880 - RNA, 24 nt, Artificial Sequence
  Synthetic
cuuuccaaucaauaggccuguuaa

SEQ ID NO: 80881 - RNA, 18 nt, Artificial Sequence
  Synthetic
auaacugaaagccaaaca

SEQ ID NO: 80882 - RNA, 19 nt, Artificial Sequence
  Synthetic
uauaacugaaagccaaaca

SEQ ID NO: 80883 - RNA, 20 nt, Artificial Sequence
  Synthetic
auauaacugaaagccaaaca

SEQ ID NO: 80884 - RNA, 21 nt, Artificial Sequence
  Synthetic
cauauaacugaaagccaaaca

SEQ ID NO: 80885 - RNA, 22 nt, Artificial Sequence
  Synthetic
ccauauaacugaaagccaaaca

SEQ ID NO: 80886 - RNA, 23 nt, Artificial Sequence
  Synthetic
uccauauaacugaaagccaaaca

SEQ ID NO: 80887 - RNA, 24 nt, Artificial Sequence
  Synthetic
auccauauaacugaaagccaaaca

SEQ ID NO: 80888 - RNA, 18 nt, Artificial Sequence
  Synthetic
gccgacgggacguaaaca

SEQ ID NO: 80889 - RNA, 19 nt, Artificial Sequence
  Synthetic
cgccgacgggacguaaaca

SEQ ID NO: 80890 - RNA, 20 nt, Artificial Sequence
  Synthetic
gcgccgacgggacguaaaca

SEQ ID NO: 80891 - RNA, 21 nt, Artificial Sequence
  Synthetic
agcgccgacgggacguaaaca

SEQ ID NO: 80892 - RNA, 22 nt, Artificial Sequence
  Synthetic
cagcgccgacgggacguaaaca

SEQ ID NO: 80893 - RNA, 23 nt, Artificial Sequence
  Synthetic
ucagcgccgacgggacguaaaca

SEQ ID NO: 80894 - RNA, 24 nt, Artificial Sequence
  Synthetic
uucagcgccgacgggacguaaaca

SEQ ID NO: 80895 - RNA, 18 nt, Artificial Sequence
  Synthetic
guccaaggaauacuaaca

SEQ ID NO: 80896 - RNA, 19 nt, Artificial Sequence
  Synthetic
aguccaaggaauacuaaca

SEQ ID NO: 80897 - RNA, 20 nt, Artificial Sequence
  Synthetic
gaguccaaggaauacuaaca

SEQ ID NO: 80898 - RNA, 21 nt, Artificial Sequence
  Synthetic
ugaguccaaggaauacuaaca

SEQ ID NO: 80899 - RNA, 22 nt, Artificial Sequence
  Synthetic
augaguccaaggaauacuaaca

SEQ ID NO: 80900 - RNA, 23 nt, Artificial Sequence
  Synthetic
uaugaguccaaggaauacuaaca

SEQ ID NO: 80901 - RNA, 24 nt, Artificial Sequence
  Synthetic
uuaugaguccaaggaauacuaaca

SEQ ID NO: 80902 - RNA, 18 nt, Artificial Sequence
  Synthetic
uucucaaagguggagaca

SEQ ID NO: 80903 - RNA, 19 nt, Artificial Sequence
  Synthetic
uuucucaaagguggagaca

SEQ ID NO: 80904 - RNA, 20 nt, Artificial Sequence
  Synthetic
guuucucaaagguggagaca

SEQ ID NO: 80905 - RNA, 21 nt, Artificial Sequence
  Synthetic
uguuucucaaagguggagaca

SEQ ID NO: 80906 - RNA, 22 nt, Artificial Sequence
  Synthetic
guguuucucaaagguggagaca

SEQ ID NO: 80907 - RNA, 23 nt, Artificial Sequence
  Synthetic
aguguuucucaaagguggagaca

SEQ ID NO: 80908 - RNA, 24 nt, Artificial Sequence
  Synthetic
gaguguuucucaaagguggagaca

SEQ ID NO: 80909 - RNA, 18 nt, Artificial Sequence
  Synthetic
agcaacaggagggauaca

SEQ ID NO: 80910 - RNA, 19 nt, Artificial Sequence
  Synthetic
cagcaacaggagggauaca

SEQ ID NO: 80911 - RNA, 20 nt, Artificial Sequence
  Synthetic
acagcaacaggagggauaca

SEQ ID NO: 80912 - RNA, 21 nt, Artificial Sequence
  Synthetic
uacagcaacaggagggauaca

SEQ ID NO: 80913 - RNA, 22 nt, Artificial Sequence
  Synthetic
guacagcaacaggagggauaca

SEQ ID NO: 80914 - RNA, 23 nt, Artificial Sequence
  Synthetic
gguacagcaacaggagggauaca

SEQ ID NO: 80915 - RNA, 24 nt, Artificial Sequence
  Synthetic
ugguacagcaacaggagggauaca

SEQ ID NO: 80916 - RNA, 18 nt, Artificial Sequence
  Synthetic
guucagguauuguuuaca

SEQ ID NO: 80917 - RNA, 19 nt, Artificial Sequence
  Synthetic
gguucagguauuguuuaca

SEQ ID NO: 80918 - RNA, 20 nt, Artificial Sequence
  Synthetic
agguucagguauuguuuaca

SEQ ID NO: 80919 - RNA, 21 nt, Artificial Sequence
  Synthetic
aagguucagguauuguuuaca

SEQ ID NO: 80920 - RNA, 22 nt, Artificial Sequence
  Synthetic
aaagguucagguauuguuuaca

SEQ ID NO: 80921 - RNA, 23 nt, Artificial Sequence
  Synthetic
uaaagguucagguauuguuuaca

SEQ ID NO: 80922 - RNA, 24 nt, Artificial Sequence
  Synthetic
guaaagguucagguauuguuuaca

SEQ ID NO: 80923 - RNA, 18 nt, Artificial Sequence
  Synthetic
ggaaagcccuacgaacca

SEQ ID NO: 80924 - RNA, 19 nt, Artificial Sequence
  Synthetic
gggaaagcccuacgaacca

SEQ ID NO: 80925 - RNA, 20 nt, Artificial Sequence
  Synthetic
ggggaaagcccuacgaacca

SEQ ID NO: 80926 - RNA, 21 nt, Artificial Sequence
  Synthetic
gggggaaagcccuacgaacca

SEQ ID NO: 80927 - RNA, 22 nt, Artificial Sequence
  Synthetic
ugggggaaagcccuacgaacca

SEQ ID NO: 80928 - RNA, 23 nt, Artificial Sequence
  Synthetic
gugggggaaagcccuacgaacca

SEQ ID NO: 80929 - RNA, 24 nt, Artificial Sequence
  Synthetic
agugggggaaagcccuacgaacca

SEQ ID NO: 80930 - RNA, 18 nt, Artificial Sequence
  Synthetic
ggcugaggcccacuccca

SEQ ID NO: 80931 - RNA, 19 nt, Artificial Sequence
  Synthetic
gggcugaggcccacuccca

SEQ ID NO: 80932 - RNA, 20 nt, Artificial Sequence
  Synthetic
cgggcugaggcccacuccca

SEQ ID NO: 80933 - RNA, 21 nt, Artificial Sequence
  Synthetic
acgggcugaggcccacuccca

SEQ ID NO: 80934 - RNA, 22 nt, Artificial Sequence
  Synthetic
aacgggcugaggcccacuccca

SEQ ID NO: 80935 - RNA, 23 nt, Artificial Sequence
  Synthetic
aaacgggcugaggcccacuccca

SEQ ID NO: 80936 - RNA, 24 nt, Artificial Sequence
  Synthetic
gaaacgggcugaggcccacuccca

SEQ ID NO: 80937 - RNA, 18 nt, Artificial Sequence
  Synthetic
augaccaagccccagcca

SEQ ID NO: 80938 - RNA, 19 nt, Artificial Sequence
  Synthetic
caugaccaagccccagcca

SEQ ID NO: 80939 - RNA, 20 nt, Artificial Sequence
  Synthetic
ccaugaccaagccccagcca

SEQ ID NO: 80940 - RNA, 21 nt, Artificial Sequence
  Synthetic
cccaugaccaagccccagcca

SEQ ID NO: 80941 - RNA, 22 nt, Artificial Sequence
  Synthetic
gcccaugaccaagccccagcca

SEQ ID NO: 80942 - RNA, 23 nt, Artificial Sequence
  Synthetic
ggcccaugaccaagccccagcca

SEQ ID NO: 80943 - RNA, 24 nt, Artificial Sequence
  Synthetic
uggcccaugaccaagccccagcca

SEQ ID NO: 80944 - RNA, 18 nt, Artificial Sequence
  Synthetic
agcacagccuagcagcca

SEQ ID NO: 80945 - RNA, 19 nt, Artificial Sequence
  Synthetic
cagcacagccuagcagcca

SEQ ID NO: 80946 - RNA, 20 nt, Artificial Sequence
  Synthetic
gcagcacagccuagcagcca

SEQ ID NO: 80947 - RNA, 21 nt, Artificial Sequence
  Synthetic
ggcagcacagccuagcagcca

SEQ ID NO: 80948 - RNA, 22 nt, Artificial Sequence
  Synthetic
uggcagcacagccuagcagcca

SEQ ID NO: 80949 - RNA, 23 nt, Artificial Sequence
  Synthetic
uuggcagcacagccuagcagcca

SEQ ID NO: 80950 - RNA, 24 nt, Artificial Sequence
  Synthetic
guuggcagcacagccuagcagcca

SEQ ID NO: 80951 - RNA, 18 nt, Artificial Sequence
  Synthetic
  misc_feature (7)..(7): n is a, c, g, or u
aaaagangguguuuucca

SEQ ID NO: 80952 - RNA, 19 nt, Artificial Sequence
  Synthetic
  misc_feature (8)..(8): n is a, c, g, or u
gaaaagangguguuuucca

SEQ ID NO: 80953 - RNA, 20 nt, Artificial Sequence
  Synthetic
  misc_feature (9)..(9): n is a, c, g, or u
ggaaaagangguguuuucca

SEQ ID NO: 80954 - RNA, 21 nt, Artificial Sequence
  Synthetic
  misc_feature (10)..(10): n is a, c, g, or u
aggaaaagangguguuuucca

SEQ ID NO: 80955 - RNA, 22 nt, Artificial Sequence
  Synthetic
  misc_feature (11)..(11): n is a, c, g, or u
uaggaaaagangguguuuucca

SEQ ID NO: 80956 - RNA, 23 nt, Artificial Sequence
  Synthetic
  misc_feature (12)..(12): n is a, c, g, or u
uuaggaaaagangguguuuucca

SEQ ID NO: 80957 - RNA, 24 nt, Artificial Sequence
  Synthetic
  misc_feature (13)..(13): n is a, c, g, or u
auuaggaaaagangguguuuucca

SEQ ID NO: 80958 - RNA, 18 nt, Artificial Sequence
  Synthetic
gaacuggagccaccagca

SEQ ID NO: 80959 - RNA, 19 nt, Artificial Sequence
  Synthetic
ugaacuggagccaccagca

SEQ ID NO: 80960 - RNA, 20 nt, Artificial Sequence
  Synthetic
cugaacuggagccaccagca

SEQ ID NO: 80961 - RNA, 21 nt, Artificial Sequence
  Synthetic
ccugaacuggagccaccagca

SEQ ID NO: 80962 - RNA, 22 nt, Artificial Sequence
  Synthetic
uccugaacuggagccaccagca

SEQ ID NO: 80963 - RNA, 23 nt, Artificial Sequence
  Synthetic
uuccugaacuggagccaccagca

SEQ ID NO: 80964 - RNA, 24 nt, Artificial Sequence
  Synthetic
guuccugaacuggagccaccagca

SEQ ID NO: 80965 - RNA, 18 nt, Artificial Sequence
  Synthetic
ccgcaguauggaucggca

SEQ ID NO: 80966 - RNA, 19 nt, Artificial Sequence
  Synthetic
uccgcaguauggaucggca

SEQ ID NO: 80967 - RNA, 20 nt, Artificial Sequence
  Synthetic
uuccgcaguauggaucggca

SEQ ID NO: 80968 - RNA, 21 nt, Artificial Sequence
  Synthetic
guuccgcaguauggaucggca

SEQ ID NO: 80969 - RNA, 22 nt, Artificial Sequence
  Synthetic
aguuccgcaguauggaucggca

SEQ ID NO: 80970 - RNA, 23 nt, Artificial Sequence
  Synthetic
gaguuccgcaguauggaucggca

SEQ ID NO: 80971 - RNA, 24 nt, Artificial Sequence
  Synthetic
ggaguuccgcaguauggaucggca

SEQ ID NO: 80972 - RNA, 18 nt, Artificial Sequence
  Synthetic
ccuggccguugccgggca

SEQ ID NO: 80973 - RNA, 19 nt, Artificial Sequence
  Synthetic
accuggccguugccgggca

SEQ ID NO: 80974 - RNA, 20 nt, Artificial Sequence
  Synthetic
gaccuggccguugccgggca

SEQ ID NO: 80975 - RNA, 21 nt, Artificial Sequence
  Synthetic
agaccuggccguugccgggca

SEQ ID NO: 80976 - RNA, 22 nt, Artificial Sequence
  Synthetic
cagaccuggccguugccgggca

SEQ ID NO: 80977 - RNA, 23 nt, Artificial Sequence
  Synthetic
acagaccuggccguugccgggca

SEQ ID NO: 80978 - RNA, 24 nt, Artificial Sequence
  Synthetic
cacagaccuggccguugccgggca

SEQ ID NO: 80979 - RNA, 18 nt, Artificial Sequence
  Synthetic
ccggaaguguugauaaga

SEQ ID NO: 80980 - RNA, 19 nt, Artificial Sequence
  Synthetic
uccggaaguguugauaaga

SEQ ID NO: 80981 - RNA, 20 nt, Artificial Sequence
  Synthetic
cuccggaaguguugauaaga

SEQ ID NO: 80982 - RNA, 21 nt, Artificial Sequence
  Synthetic
ucuccggaaguguugauaaga

SEQ ID NO: 80983 - RNA, 22 nt, Artificial Sequence
  Synthetic
gucuccggaaguguugauaaga

SEQ ID NO: 80984 - RNA, 23 nt, Artificial Sequence
  Synthetic
agucuccggaaguguugauaaga

SEQ ID NO: 80985 - RNA, 24 nt, Artificial Sequence
  Synthetic
uagucuccggaaguguugauaaga

SEQ ID NO: 80986 - RNA, 18 nt, Artificial Sequence
  Synthetic
cagaugagaaggcacaga

SEQ ID NO: 80987 - RNA, 19 nt, Artificial Sequence
  Synthetic
gcagaugagaaggcacaga

SEQ ID NO: 80988 - RNA, 20 nt, Artificial Sequence
  Synthetic
ggcagaugagaaggcacaga

SEQ ID NO: 80989 - RNA, 21 nt, Artificial Sequence
  Synthetic
cggcagaugagaaggcacaga

SEQ ID NO: 80990 - RNA, 22 nt, Artificial Sequence
  Synthetic
ccggcagaugagaaggcacaga

SEQ ID NO: 80991 - RNA, 23 nt, Artificial Sequence
  Synthetic
uccggcagaugagaaggcacaga

SEQ ID NO: 80992 - RNA, 24 nt, Artificial Sequence
  Synthetic
guccggcagaugagaaggcacaga

SEQ ID NO: 80993 - RNA, 18 nt, Artificial Sequence
  Synthetic
  misc_feature (6)..(6): n is a, c, g, or u
  misc_feature (9)..(9): n is a, c, g, or u
gucggncgnaacggcaga

SEQ ID NO: 80994 - RNA, 19 nt, Artificial Sequence
  Synthetic
  misc_feature (7)..(7): n is a, c, g, or u
  misc_feature (10)..(10): n is a, c, g, or u
ggucggncgnaacggcaga

SEQ ID NO: 80995 - RNA, 20 nt, Artificial Sequence
  Synthetic
  misc_feature (8)..(8): n is a, c, g, or u
  misc_feature (11)..(11): n is a, c, g, or u
uggucggncgnaacggcaga

SEQ ID NO: 80996 - RNA, 21 nt, Artificial Sequence
  Synthetic
  misc_feature (9)..(9): n is a, c, g, or u
  misc_feature (12)..(12): n is a, c, g, or u
guggucggncgnaacggcaga

SEQ ID NO: 80997 - RNA, 22 nt, Artificial Sequence
  Synthetic
  misc_feature (10)..(10): n is a, c, g, or u
  misc_feature (13)..(13): n is a, c, g, or u
cguggucggncgnaacggcaga

SEQ ID NO: 80998 - RNA, 23 nt, Artificial Sequence
  Synthetic
  misc_feature (11)..(11): n is a, c, g, or u
  misc_feature (14)..(14): n is a, c, g, or u
ccguggucggncgnaacggcaga

SEQ ID NO: 80999 - RNA, 24 nt, Artificial Sequence
  Synthetic
  misc_feature (12)..(12): n is a, c, g, or u
  misc_feature (15)..(15): n is a, c, g, or u
cccguggucggncgnaacggcaga

SEQ ID NO: 81000 - RNA, 18 nt, Artificial Sequence
  Synthetic
acauugagauucccgaga

SEQ ID NO: 81001 - RNA, 19 nt, Artificial Sequence
  Synthetic
aacauugagauucccgaga

SEQ ID NO: 81002 - RNA, 20 nt, Artificial Sequence
  Synthetic
uaacauugagauucccgaga

SEQ ID NO: 81003 - RNA, 21 nt, Artificial Sequence
  Synthetic
cuaacauugagauucccgaga

SEQ ID NO: 81004 - RNA, 22 nt, Artificial Sequence
  Synthetic
acuaacauugagauucccgaga

SEQ ID NO: 81005 - RNA, 23 nt, Artificial Sequence
  Synthetic
uacuaacauugagauucccgaga

SEQ ID NO: 81006 - RNA, 24 nt, Artificial Sequence
  Synthetic
auacuaacauugagauucccgaga

SEQ ID NO: 81007 - RNA, 18 nt, Artificial Sequence
  Synthetic
  misc_feature (3)..(3): n is a, c, g, or u
cgnaacggcagacggaga

SEQ ID NO: 81008 - RNA, 19 nt, Artificial Sequence
  Synthetic
  misc_feature (1)..(1): n is a, c, g, or u
  misc_feature (4)..(4): n is a, c, g, or u
ncgnaacggcagacggaga

SEQ ID NO: 81009 - RNA, 20 nt, Artificial Sequence
  Synthetic
  misc_feature (2)..(2): n is a, c, g, or u
  misc_feature (5)..(5): n is a, c, g, or u
gncgnaacggcagacggaga

SEQ ID NO: 81010 - RNA, 21 nt, Artificial Sequence
  Synthetic
  misc_feature (3)..(3): n is a, c, g, or u
  misc_feature (6)..(6): n is a, c, g, or u
ggncgnaacggcagacggaga

SEQ ID NO: 81011 - RNA, 22 nt, Artificial Sequence
  Synthetic
  misc_feature (4)..(4): n is a, c, g, or u
  misc_feature (7)..(7): n is a, c, g, or u
cggncgnaacggcagacggaga

SEQ ID NO: 81012 - RNA, 23 nt, Artificial Sequence
  Synthetic
  misc_feature (5)..(5): n is a, c, g, or u
  misc_feature (8)..(8): n is a, c, g, or u
ucggncgnaacggcagacggaga

SEQ ID NO: 81013 - RNA, 24 nt, Artificial Sequence
  Synthetic
  misc_feature (6)..(6): n is a, c, g, or u
  misc_feature (9)..(9): n is a, c, g, or u
gucggncgnaacggcagacggaga

SEQ ID NO: 81014 - RNA, 18 nt, Artificial Sequence
  Synthetic
cgcgggauucagcgccga

SEQ ID NO: 81015 - RNA, 19 nt, Artificial Sequence
  Synthetic
ccgcgggauucagcgccga

SEQ ID NO: 81016 - RNA, 20 nt, Artificial Sequence
  Synthetic
uccgcgggauucagcgccga

SEQ ID NO: 81017 - RNA, 21 nt, Artificial Sequence
  Synthetic
guccgcgggauucagcgccga

SEQ ID NO: 81018 - RNA, 22 nt, Artificial Sequence
  Synthetic
cguccgcgggauucagcgccga

SEQ ID NO: 81019 - RNA, 23 nt, Artificial Sequence
  Synthetic
ucguccgcgggauucagcgccga

SEQ ID NO: 81020 - RNA, 24 nt, Artificial Sequence
  Synthetic
gucguccgcgggauucagcgccga

SEQ ID NO: 81021 - RNA, 18 nt, Artificial Sequence
  Synthetic
ucuucugcgacgcggcga

SEQ ID NO: 81022 - RNA, 19 nt, Artificial Sequence
  Synthetic
aucuucugcgacgcggcga

SEQ ID NO: 81023 - RNA, 20 nt, Artificial Sequence
  Synthetic
gaucuucugcgacgcggcga

SEQ ID NO: 81024 - RNA, 21 nt, Artificial Sequence
  Synthetic
agaucuucugcgacgcggcga

SEQ ID NO: 81025 - RNA, 22 nt, Artificial Sequence
  Synthetic
gagaucuucugcgacgcggcga

SEQ ID NO: 81026 - RNA, 23 nt, Artificial Sequence
  Synthetic
ugagaucuucugcgacgcggcga

SEQ ID NO: 81027 - RNA, 24 nt, Artificial Sequence
  Synthetic
uugagaucuucugcgacgcggcga

SEQ ID NO: 81028 - RNA, 18 nt, Artificial Sequence
  Synthetic
  misc_feature (12)..(12): n is a, c, g, or u
agaucucguacngaagga

SEQ ID NO: 81029 - RNA, 19 nt, Artificial Sequence
  Synthetic
  misc_feature (13)..(13): n is a, c, g, or u
aagaucucguacngaagga

SEQ ID NO: 81030 - RNA, 20 nt, Artificial Sequence
  Synthetic
  misc_feature (14)..(14): n is a, c, g, or u
gaagaucucguacngaagga

SEQ ID NO: 81031 - RNA, 21 nt, Artificial Sequence
  Synthetic
  misc_feature (15)..(15): n is a, c, g, or u
agaagaucucguacngaagga

SEQ ID NO: 81032 - RNA, 22 nt, Artificial Sequence
  Synthetic
  misc_feature (1)..(1): n is a, c, g, or u
  misc_feature (16)..(16): n is a, c, g, or u
nagaagaucucguacngaagga

SEQ ID NO: 81033 - RNA, 23 nt, Artificial Sequence
  Synthetic
  misc_feature (2)..(2): n is a, c, g, or u
  misc_feature (17)..(17): n is a, c, g, or u
cnagaagaucucguacngaagga

SEQ ID NO: 81034 - RNA, 24 nt, Artificial Sequence
  Synthetic
  misc_feature (3)..(3): n is a, c, g, or u
  misc_feature (18)..(18): n is a, c, g, or u
ucnagaagaucucguacngaagga

SEQ ID NO: 81035 - RNA, 18 nt, Artificial Sequence
  Synthetic
ccaggacaaguuggagga

SEQ ID NO: 81036 - RNA, 19 nt, Artificial Sequence
  Synthetic
accaggacaaguuggagga

SEQ ID NO: 81037 - RNA, 20 nt, Artificial Sequence
  Synthetic
aaccaggacaaguuggagga

SEQ ID NO: 81038 - RNA, 21 nt, Artificial Sequence
  Synthetic
uaaccaggacaaguuggagga

SEQ ID NO: 81039 - RNA, 22 nt, Artificial Sequence
  Synthetic
auaaccaggacaaguuggagga

SEQ ID NO: 81040 - RNA, 23 nt, Artificial Sequence
  Synthetic
gauaaccaggacaaguuggagga

SEQ ID NO: 81041 - RNA, 24 nt, Artificial Sequence
  Synthetic
cgauaaccaggacaaguuggagga

SEQ ID NO: 81042 - RNA, 18 nt, Artificial Sequence
  Synthetic
  misc_feature (8)..(8): n is a, c, g, or u
aagcccangaugauggga

SEQ ID NO: 81043 - RNA, 19 nt, Artificial Sequence
  Synthetic
  misc_feature (9)..(9): n is a, c, g, or u
aaagcccangaugauggga

SEQ ID NO: 81044 - RNA, 20 nt, Artificial Sequence
  Synthetic
  misc_feature (10)..(10): n is a, c, g, or u
gaaagcccangaugauggga

SEQ ID NO: 81045 - RNA, 21 nt, Artificial Sequence
  Synthetic
  misc_feature (11)..(11): n is a, c, g, or u
cgaaagcccangaugauggga

SEQ ID NO: 81046 - RNA, 22 nt, Artificial Sequence
  Synthetic
  misc_feature (12)..(12): n is a, c, g, or u
ccgaaagcccangaugauggga

SEQ ID NO: 81047 - RNA, 23 nt, Artificial Sequence
  Synthetic
  misc_feature (13)..(13): n is a, c, g, or u
uccgaaagcccangaugauggga

SEQ ID NO: 81048 - RNA, 24 nt, Artificial Sequence
  Synthetic
  misc_feature (14)..(14): n is a, c, g, or u
uuccgaaagcccangaugauggga

SEQ ID NO: 81049 - RNA, 18 nt, Artificial Sequence
  Synthetic
cagguguccuuguuggga

SEQ ID NO: 81050 - RNA, 19 nt, Artificial Sequence
  Synthetic
ccagguguccuuguuggga

SEQ ID NO: 81051 - RNA, 20 nt, Artificial Sequence
  Synthetic
gccagguguccuuguuggga

SEQ ID NO: 81052 - RNA, 21 nt, Artificial Sequence
  Synthetic
ggccagguguccuuguuggga

SEQ ID NO: 81053 - RNA, 22 nt, Artificial Sequence
  Synthetic
uggccagguguccuuguuggga

SEQ ID NO: 81054 - RNA, 23 nt, Artificial Sequence
  Synthetic
cuggccagguguccuuguuggga

SEQ ID NO: 81055 - RNA, 24 nt, Artificial Sequence
  Synthetic
ucuggccagguguccuuguuggga

SEQ ID NO: 81056 - RNA, 18 nt, Artificial Sequence
  Synthetic
  misc_feature (1)..(1): n is a, c, g, or u
  misc_feature (16)..(16): n is a, c, g, or u
nagaagaucucguacnga

SEQ ID NO: 81057 - RNA, 19 nt, Artificial Sequence
  Synthetic
  misc_feature (2)..(2): n is a, c, g, or u
  misc_feature (17)..(17): n is a, c, g, or u
cnagaagaucucguacnga

SEQ ID NO: 81058 - RNA, 20 nt, Artificial Sequence
  Synthetic
  misc_feature (3)..(3): n is a, c, g, or u
  misc_feature (18)..(18): n is a, c, g, or u
ucnagaagaucucguacnga

SEQ ID NO: 81059 - RNA, 21 nt, Artificial Sequence
  Synthetic
  misc_feature (4)..(4): n is a, c, g, or u
  misc_feature (19)..(19): n is a, c, g, or u
aucnagaagaucucguacnga

SEQ ID NO: 81060 - RNA, 22 nt, Artificial Sequence
  Synthetic
  misc_feature (5)..(5): n is a, c, g, or u
  misc_feature (20)..(20): n is a, c, g, or u
uaucnagaagaucucguacnga

SEQ ID NO: 81061 - RNA, 23 nt, Artificial Sequence
  Synthetic
  misc_feature (6)..(6): n is a, c, g, or u
  misc_feature (21)..(21): n is a, c, g, or u
guaucnagaagaucucguacnga

SEQ ID NO: 81062 - RNA, 24 nt, Artificial Sequence
  Synthetic
  misc_feature (7)..(7): n is a, c, g, or u
  misc_feature (22)..(22): n is a, c, g, or u
gguaucnagaagaucucguacnga

SEQ ID NO: 81063 - RNA, 18 nt, Artificial Sequence
  Synthetic
caggagguuggugaguga

SEQ ID NO: 81064 - RNA, 19 nt, Artificial Sequence
  Synthetic
acaggagguuggugaguga

SEQ ID NO: 81065 - RNA, 20 nt, Artificial Sequence
  Synthetic
gacaggagguuggugaguga

SEQ ID NO: 81066 - RNA, 21 nt, Artificial Sequence
  Synthetic
ggacaggagguuggugaguga

SEQ ID NO: 81067 - RNA, 22 nt, Artificial Sequence
  Synthetic
aggacaggagguuggugaguga

SEQ ID NO: 81068 - RNA, 23 nt, Artificial Sequence
  Synthetic
gaggacaggagguuggugaguga

SEQ ID NO: 81069 - RNA, 24 nt, Artificial Sequence
  Synthetic
ggaggacaggagguuggugaguga

SEQ ID NO: 81070 - RNA, 18 nt, Artificial Sequence
  Synthetic
  misc_feature (2)..(2): n is a, c, g, or u
uncccccuagaaaauuga

SEQ ID NO: 81071 - RNA, 19 nt, Artificial Sequence
  Synthetic
  misc_feature (3)..(3): n is a, c, g, or u
guncccccuagaaaauuga

SEQ ID NO: 81072 - RNA, 20 nt, Artificial Sequence
  Synthetic
  misc_feature (1)..(1): n is a, c, g, or u
  misc_feature (4)..(4): n is a, c, g, or u
nguncccccuagaaaauuga

SEQ ID NO: 81073 - RNA, 21 nt, Artificial Sequence
  Synthetic
  misc_feature (2)..(2): n is a, c, g, or u
  misc_feature (5)..(5): n is a, c, g, or u
unguncccccuagaaaauuga

SEQ ID NO: 81074 - RNA, 22 nt, Artificial Sequence
  Synthetic
  misc_feature (3)..(3): n is a, c, g, or u
  misc_feature (6)..(6): n is a, c, g, or u
gunguncccccuagaaaauuga

SEQ ID NO: 81075 - RNA, 23 nt, Artificial Sequence
  Synthetic
  misc_feature (4)..(4): n is a, c, g, or u
  misc_feature (7)..(7): n is a, c, g, or u
ggunguncccccuagaaaauuga

SEQ ID NO: 81076 - RNA, 24 nt, Artificial Sequence
  Synthetic
  misc_feature (5)..(5): n is a, c, g, or u
  misc_feature (8)..(8): n is a, c, g, or u
cggunguncccccuagaaaauuga

SEQ ID NO: 81077 - RNA, 18 nt, Artificial Sequence
  Synthetic
  misc_feature (10)..(10): n is a, c, g, or u
cucuaaggcnucccgaua

SEQ ID NO: 81078 - RNA, 19 nt, Artificial Sequence
  Synthetic
  misc_feature (11)..(11): n is a, c, g, or u
acucuaaggcnucccgaua

SEQ ID NO: 81079 - RNA, 20 nt, Artificial Sequence
  Synthetic
  misc_feature (12)..(12): n is a, c, g, or u
gacucuaaggcnucccgaua

SEQ ID NO: 81080 - RNA, 21 nt, Artificial Sequence
  Synthetic
  misc_feature (13)..(13): n is a, c, g, or u
agacucuaaggcnucccgaua

SEQ ID NO: 81081 - RNA, 22 nt, Artificial Sequence
  Synthetic
  misc_feature (14)..(14): n is a, c, g, or u
gagacucuaaggcnucccgaua

SEQ ID NO: 81082 - RNA, 23 nt, Artificial Sequence
  Synthetic
  misc_feature (15)..(15): n is a, c, g, or u
ggagacucuaaggcnucccgaua

SEQ ID NO: 81083 - RNA, 24 nt, Artificial Sequence
  Synthetic
  misc_feature (16)..(16): n is a, c, g, or u
aggagacucuaaggcnucccgaua

SEQ ID NO: 81084 - RNA, 18 nt, Artificial Sequence
  Synthetic
gagggaguucuucuucua

SEQ ID NO: 81085 - RNA, 19 nt, Artificial Sequence
  Synthetic
cgagggaguucuucuucua

SEQ ID NO: 81086 - RNA, 20 nt, Artificial Sequence
  Synthetic
gcgagggaguucuucuucua

SEQ ID NO: 81087 - RNA, 21 nt, Artificial Sequence
  Synthetic
ggcgagggaguucuucuucua

SEQ ID NO: 81088 - RNA, 22 nt, Artificial Sequence
  Synthetic
aggcgagggaguucuucuucua

SEQ ID NO: 81089 - RNA, 23 nt, Artificial Sequence
  Synthetic
gaggcgagggaguucuucuucua

SEQ ID NO: 81090 - RNA, 24 nt, Artificial Sequence
  Synthetic
cgaggcgagggaguucuucuucua

SEQ ID NO: 81091 - RNA, 18 nt, Artificial Sequence
  Synthetic
agacggggaguccgcgua

SEQ ID NO: 81092 - RNA, 19 nt, Artificial Sequence
  Synthetic
cagacggggaguccgcgua

SEQ ID NO: 81093 - RNA, 20 nt, Artificial Sequence
  Synthetic
acagacggggaguccgcgua

SEQ ID NO: 81094 - RNA, 21 nt, Artificial Sequence
  Synthetic
cacagacggggaguccgcgua

SEQ ID NO: 81095 - RNA, 22 nt, Artificial Sequence
  Synthetic
gcacagacggggaguccgcgua

SEQ ID NO: 81096 - RNA, 23 nt, Artificial Sequence
  Synthetic
ggcacagacggggaguccgcgua

SEQ ID NO: 81097 - RNA, 24 nt, Artificial Sequence
  Synthetic
aggcacagacggggaguccgcgua

SEQ ID NO: 81098 - RNA, 18 nt, Artificial Sequence
  Synthetic
  misc_feature (5)..(5): n is a, c, g, or u
uaucnagaagaucucgua

SEQ ID NO: 81099 - RNA, 19 nt, Artificial Sequence
  Synthetic
  misc_feature (6)..(6): n is a, c, g, or u
guaucnagaagaucucgua

SEQ ID NO: 81100 - RNA, 20 nt, Artificial Sequence
  Synthetic
  misc_feature (7)..(7): n is a, c, g, or u
gguaucnagaagaucucgua

SEQ ID NO: 81101 - RNA, 21 nt, Artificial Sequence
  Synthetic
  misc_feature (8)..(8): n is a, c, g, or u
cgguaucnagaagaucucgua

SEQ ID NO: 81102 - RNA, 22 nt, Artificial Sequence
  Synthetic
  misc_feature (9)..(9): n is a, c, g, or u
gcgguaucnagaagaucucgua

SEQ ID NO: 81103 - RNA, 23 nt, Artificial Sequence
  Synthetic
  misc_feature (10)..(10): n is a, c, g, or u
ggcgguaucnagaagaucucgua

SEQ ID NO: 81104 - RNA, 24 nt, Artificial Sequence
  Synthetic
  misc_feature (11)..(11): n is a, c, g, or u
aggcgguaucnagaagaucucgua

SEQ ID NO: 81105 - RNA, 18 nt, Artificial Sequence
  Synthetic
  misc_feature (5)..(5): n is a, c, g, or u
uugangauccuggaauua

SEQ ID NO: 81106 - RNA, 19 nt, Artificial Sequence
  Synthetic
  misc_feature (6)..(6): n is a, c, g, or u
guugangauccuggaauua

SEQ ID NO: 81107 - RNA, 20 nt, Artificial Sequence
  Synthetic
  misc_feature (1)..(1): n is a, c, g, or u
  misc_feature (7)..(7): n is a, c, g, or u
nguugangauccuggaauua

SEQ ID NO: 81108 - RNA, 21 nt, Artificial Sequence
  Synthetic
  misc_feature (2)..(2): n is a, c, g, or u
  misc_feature (8)..(8): n is a, c, g, or u
unguugangauccuggaauua

SEQ ID NO: 81109 - RNA, 22 nt, Artificial Sequence
  Synthetic
  misc_feature (3)..(3): n is a, c, g, or u
  misc_feature (9)..(9): n is a, c, g, or u
gunguugangauccuggaauua

SEQ ID NO: 81110 - RNA, 23 nt, Artificial Sequence
  Synthetic
  misc_feature (4)..(4): n is a, c, g, or u
  misc_feature (10)..(10): n is a, c, g, or u
ggunguugangauccuggaauua

SEQ ID NO: 81111 - RNA, 24 nt, Artificial Sequence
  Synthetic
  misc_feature (5)..(5): n is a, c, g, or u
  misc_feature (11)..(11): n is a, c, g, or u
uggunguugangauccuggaauua

SEQ ID NO: 81112 - RNA, 18 nt, Artificial Sequence
  Synthetic
uaguccagaagaaccaac

SEQ ID NO: 81113 - RNA, 19 nt, Artificial Sequence
  Synthetic
auaguccagaagaaccaac

SEQ ID NO: 81114 - RNA, 20 nt, Artificial Sequence
  Synthetic
gauaguccagaagaaccaac

SEQ ID NO: 81115 - RNA, 21 nt, Artificial Sequence
  Synthetic
ugauaguccagaagaaccaac

SEQ ID NO: 81116 - RNA, 22 nt, Artificial Sequence
  Synthetic
uugauaguccagaagaaccaac

SEQ ID NO: 81117 - RNA, 23 nt, Artificial Sequence
  Synthetic
cuugauaguccagaagaaccaac

SEQ ID NO: 81118 - RNA, 24 nt, Artificial Sequence
  Synthetic
ccuugauaguccagaagaaccaac

SEQ ID NO: 81119 - RNA, 18 nt, Artificial Sequence
  Synthetic
aagguuugguacagcaac

SEQ ID NO: 81120 - RNA, 19 nt, Artificial Sequence
  Synthetic
gaagguuugguacagcaac

SEQ ID NO: 81121 - RNA, 20 nt, Artificial Sequence
  Synthetic
cgaagguuugguacagcaac

SEQ ID NO: 81122 - RNA, 21 nt, Artificial Sequence
  Synthetic
ccgaagguuugguacagcaac

SEQ ID NO: 81123 - RNA, 22 nt, Artificial Sequence
  Synthetic
uccgaagguuugguacagcaac

SEQ ID NO: 81124 - RNA, 23 nt, Artificial Sequence
  Synthetic
guccgaagguuugguacagcaac

SEQ ID NO: 81125 - RNA, 24 nt, Artificial Sequence
  Synthetic
cguccgaagguuugguacagcaac

SEQ ID NO: 81126 - RNA, 18 nt, Artificial Sequence
  Synthetic
gugaggauucuugucaac

SEQ ID NO: 81127 - RNA, 19 nt, Artificial Sequence
  Synthetic
ugugaggauucuugucaac

SEQ ID NO: 81128 - RNA, 20 nt, Artificial Sequence
  Synthetic
uugugaggauucuugucaac

SEQ ID NO: 81129 - RNA, 21 nt, Artificial Sequence
  Synthetic
auugugaggauucuugucaac

SEQ ID NO: 81130 - RNA, 22 nt, Artificial Sequence
  Synthetic
uauugugaggauucuugucaac

SEQ ID NO: 81131 - RNA, 23 nt, Artificial Sequence
  Synthetic
guauugugaggauucuugucaac

SEQ ID NO: 81132 - RNA, 24 nt, Artificial Sequence
  Synthetic
gguauugugaggauucuugucaac

SEQ ID NO: 81133 - RNA, 18 nt, Artificial Sequence
  Synthetic
gaacaguaggacaugaac

SEQ ID NO: 81134 - RNA, 19 nt, Artificial Sequence
  Synthetic
ugaacaguaggacaugaac

SEQ ID NO: 81135 - RNA, 20 nt, Artificial Sequence
  Synthetic
uugaacaguaggacaugaac

SEQ ID NO: 81136 - RNA, 21 nt, Artificial Sequence
  Synthetic
cuugaacaguaggacaugaac

SEQ ID NO: 81137 - RNA, 22 nt, Artificial Sequence
  Synthetic
gcuugaacaguaggacaugaac

SEQ ID NO: 81138 - RNA, 23 nt, Artificial Sequence
  Synthetic
ggcuugaacaguaggacaugaac

SEQ ID NO: 81139 - RNA, 24 nt, Artificial Sequence
  Synthetic
aggcuugaacaguaggacaugaac

SEQ ID NO: 81140 - RNA, 18 nt, Artificial Sequence
  Synthetic
gguuuacuguuccugaac

SEQ ID NO: 81141 - RNA, 19 nt, Artificial Sequence
  Synthetic
ggguuuacuguuccugaac

SEQ ID NO: 81142 - RNA, 20 nt, Artificial Sequence
  Synthetic
aggguuuacuguuccugaac

SEQ ID NO: 81143 - RNA, 21 nt, Artificial Sequence
  Synthetic
caggguuuacuguuccugaac

SEQ ID NO: 81144 - RNA, 22 nt, Artificial Sequence
  Synthetic
acaggguuuacuguuccugaac

SEQ ID NO: 81145 - RNA, 23 nt, Artificial Sequence
  Synthetic
aacaggguuuacuguuccugaac

SEQ ID NO: 81146 - RNA, 24 nt, Artificial Sequence
  Synthetic
gaacaggguuuacuguuccugaac

SEQ ID NO: 81147 - RNA, 18 nt, Artificial Sequence
  Synthetic
gacacauccagcgauaac

SEQ ID NO: 81148 - RNA, 19 nt, Artificial Sequence
  Synthetic
agacacauccagcgauaac

SEQ ID NO: 81149 - RNA, 20 nt, Artificial Sequence
  Synthetic
cagacacauccagcgauaac

SEQ ID NO: 81150 - RNA, 21 nt, Artificial Sequence
  Synthetic
gcagacacauccagcgauaac

SEQ ID NO: 81151 - RNA, 22 nt, Artificial Sequence
  Synthetic
cgcagacacauccagcgauaac

SEQ ID NO: 81152 - RNA, 23 nt, Artificial Sequence
  Synthetic
ccgcagacacauccagcgauaac

SEQ ID NO: 81153 - RNA, 24 nt, Artificial Sequence
  Synthetic
gccgcagacacauccagcgauaac

SEQ ID NO: 81154 - RNA, 18 nt, Artificial Sequence
  Synthetic
aaaaaccccgccuguaac

SEQ ID NO: 81155 - RNA, 19 nt, Artificial Sequence
  Synthetic
gaaaaaccccgccuguaac

SEQ ID NO: 81156 - RNA, 20 nt, Artificial Sequence
  Synthetic
agaaaaaccccgccuguaac

SEQ ID NO: 81157 - RNA, 21 nt, Artificial Sequence
  Synthetic
aagaaaaaccccgccuguaac

SEQ ID NO: 81158 - RNA, 22 nt, Artificial Sequence
  Synthetic
caagaaaaaccccgccuguaac

SEQ ID NO: 81159 - RNA, 23 nt, Artificial Sequence
  Synthetic
acaagaaaaaccccgccuguaac

SEQ ID NO: 81160 - RNA, 24 nt, Artificial Sequence
  Synthetic
aacaagaaaaaccccgccuguaac

SEQ ID NO: 81161 - RNA, 18 nt, Artificial Sequence
  Synthetic
aucaauaggccuguuaac

SEQ ID NO: 81162 - RNA, 19 nt, Artificial Sequence
  Synthetic
aaucaauaggccuguuaac

SEQ ID NO: 81163 - RNA, 20 nt, Artificial Sequence
  Synthetic
caaucaauaggccuguuaac

SEQ ID NO: 81164 - RNA, 21 nt, Artificial Sequence
  Synthetic
ccaaucaauaggccuguuaac

SEQ ID NO: 81165 - RNA, 22 nt, Artificial Sequence
  Synthetic
uccaaucaauaggccuguuaac

SEQ ID NO: 81166 - RNA, 23 nt, Artificial Sequence
  Synthetic
uuccaaucaauaggccuguuaac

SEQ ID NO: 81167 - RNA, 24 nt, Artificial Sequence
  Synthetic
uuuccaaucaauaggccuguuaac

SEQ ID NO: 81168 - RNA, 18 nt, Artificial Sequence
  Synthetic
agaugagaaggcacagac

SEQ ID NO: 81169 - RNA, 19 nt, Artificial Sequence
  Synthetic
cagaugagaaggcacagac

SEQ ID NO: 81170 - RNA, 20 nt, Artificial Sequence
  Synthetic
gcagaugagaaggcacagac

SEQ ID NO: 81171 - RNA, 21 nt, Artificial Sequence
  Synthetic
ggcagaugagaaggcacagac

SEQ ID NO: 81172 - RNA, 22 nt, Artificial Sequence
  Synthetic
cggcagaugagaaggcacagac

SEQ ID NO: 81173 - RNA, 23 nt, Artificial Sequence
  Synthetic
ccggcagaugagaaggcacagac

SEQ ID NO: 81174 - RNA, 24 nt, Artificial Sequence
  Synthetic
uccggcagaugagaaggcacagac

SEQ ID NO: 81175 - RNA, 18 nt, Artificial Sequence
  Synthetic
cucuuccaaaagugagac

SEQ ID NO: 81176 - RNA, 19 nt, Artificial Sequence
  Synthetic
ucucuuccaaaagugagac

SEQ ID NO: 81177 - RNA, 20 nt, Artificial Sequence
  Synthetic
uucucuuccaaaagugagac

SEQ ID NO: 81178 - RNA, 21 nt, Artificial Sequence
  Synthetic
uuucucuuccaaaagugagac

SEQ ID NO: 81179 - RNA, 22 nt, Artificial Sequence
  Synthetic
guuucucuuccaaaagugagac

SEQ ID NO: 81180 - RNA, 23 nt, Artificial Sequence
  Synthetic
  misc_feature (1)..(1): n is a, c, g, or u
nguuucucuuccaaaagugagac

SEQ ID NO: 81181 - RNA, 24 nt, Artificial Sequence
  Synthetic
  misc_feature (2)..(2): n is a, c, g, or u
cnguuucucuuccaaaagugagac

SEQ ID NO: 81182 - RNA, 18 nt, Artificial Sequence
  Synthetic
caggacaaguuggaggac

SEQ ID NO: 81183 - RNA, 19 nt, Artificial Sequence
  Synthetic
ccaggacaaguuggaggac

SEQ ID NO: 81184 - RNA, 20 nt, Artificial Sequence
  Synthetic
accaggacaaguuggaggac

SEQ ID NO: 81185 - RNA, 21 nt, Artificial Sequence
  Synthetic
aaccaggacaaguuggaggac

SEQ ID NO: 81186 - RNA, 22 nt, Artificial Sequence
  Synthetic
uaaccaggacaaguuggaggac

SEQ ID NO: 81187 - RNA, 23 nt, Artificial Sequence
  Synthetic
auaaccaggacaaguuggaggac

SEQ ID NO: 81188 - RNA, 24 nt, Artificial Sequence
  Synthetic
gauaaccaggacaaguuggaggac

SEQ ID NO: 81189 - RNA, 18 nt, Artificial Sequence
  Synthetic
aggcuugaacaguaggac

SEQ ID NO: 81190 - RNA, 19 nt, Artificial Sequence
  Synthetic
gaggcuugaacaguaggac

SEQ ID NO: 81191 - RNA, 20 nt, Artificial Sequence
  Synthetic
ggaggcuugaacaguaggac

SEQ ID NO: 81192 - RNA, 21 nt, Artificial Sequence
  Synthetic
uggaggcuugaacaguaggac

SEQ ID NO: 81193 - RNA, 22 nt, Artificial Sequence
  Synthetic
uuggaggcuugaacaguaggac

SEQ ID NO: 81194 - RNA, 23 nt, Artificial Sequence
  Synthetic
cuuggaggcuugaacaguaggac

SEQ ID NO: 81195 - RNA, 24 nt, Artificial Sequence
  Synthetic
gcuuggaggcuugaacaguaggac

SEQ ID NO: 81196 - RNA, 18 nt, Artificial Sequence
  Synthetic
guccucuuauguaagacc

SEQ ID NO: 81197 - RNA, 19 nt, Artificial Sequence
  Synthetic
aguccucuuauguaagacc

SEQ ID NO: 81198 - RNA, 20 nt, Artificial Sequence
  Synthetic
gaguccucuuauguaagacc

SEQ ID NO: 81199 - RNA, 21 nt, Artificial Sequence
  Synthetic
agaguccucuuauguaagacc

SEQ ID NO: 81200 - RNA, 22 nt, Artificial Sequence
  Synthetic
aagaguccucuuauguaagacc

SEQ ID NO: 81201 - RNA, 23 nt, Artificial Sequence
  Synthetic
caagaguccucuuauguaagacc

SEQ ID NO: 81202 - RNA, 24 nt, Artificial Sequence
  Synthetic
ccaagaguccucuuauguaagacc

SEQ ID NO: 81203 - RNA, 18 nt, Artificial Sequence
  Synthetic
  misc_feature (10)..(10): n is a, c, g, or u
  misc_feature (13)..(13): n is a, c, g, or u
acacacggungunccccc

SEQ ID NO: 81204 - RNA, 19 nt, Artificial Sequence
  Synthetic
  misc_feature (11)..(11): n is a, c, g, or u
  misc_feature (14)..(14): n is a, c, g, or u
gacacacggungunccccc

SEQ ID NO: 81205 - RNA, 20 nt, Artificial Sequence
  Synthetic
  misc_feature (12)..(12): n is a, c, g, or u
  misc_feature (15)..(15): n is a, c, g, or u
agacacacggungunccccc

SEQ ID NO: 81206 - RNA, 21 nt, Artificial Sequence
  Synthetic
  misc_feature (13)..(13): n is a, c, g, or u
  misc_feature (16)..(16): n is a, c, g, or u
aagacacacggungunccccc

SEQ ID NO: 81207 - RNA, 22 nt, Artificial Sequence
  Synthetic
  misc_feature (14)..(14): n is a, c, g, or u
  misc_feature (17)..(17): n is a, c, g, or u
caagacacacggungunccccc

SEQ ID NO: 81208 - RNA, 23 nt, Artificial Sequence
  Synthetic
  misc_feature (15)..(15): n is a, c, g, or u
  misc_feature (18)..(18): n is a, c, g, or u
ccaagacacacggungunccccc

SEQ ID NO: 81209 - RNA, 24 nt, Artificial Sequence
  Synthetic
  misc_feature (16)..(16): n is a, c, g, or u
  misc_feature (19)..(19): n is a, c, g, or u
gccaagacacacggungunccccc

SEQ ID NO: 81210 - RNA, 18 nt, Artificial Sequence
  Synthetic
  misc_feature (14)..(14): n is a, c, g, or u
agagucccaagcgncccc

SEQ ID NO: 81211 - RNA, 19 nt, Artificial Sequence
  Synthetic
  misc_feature (1)..(1): n is a, c, g, or u
  misc_feature (15)..(15): n is a, c, g, or u
nagagucccaagcgncccc

SEQ ID NO: 81212 - RNA, 20 nt, Artificial Sequence
  Synthetic
  misc_feature (2)..(2): n is a, c, g, or u
  misc_feature (16)..(16): n is a, c, g, or u
anagagucccaagcgncccc

SEQ ID NO: 81213 - RNA, 21 nt, Artificial Sequence
  Synthetic
  misc_feature (3)..(3): n is a, c, g, or u
  misc_feature (17)..(17): n is a, c, g, or u
ganagagucccaagcgncccc

SEQ ID NO: 81214 - RNA, 22 nt, Artificial Sequence
  Synthetic
  misc_feature (4)..(4): n is a, c, g, or u
  misc_feature (18)..(18): n is a, c, g, or u
cganagagucccaagcgncccc

SEQ ID NO: 81215 - RNA, 23 nt, Artificial Sequence
  Synthetic
  misc_feature (5)..(5): n is a, c, g, or u
  misc_feature (19)..(19): n is a, c, g, or u
acganagagucccaagcgncccc

SEQ ID NO: 81216 - RNA, 24 nt, Artificial Sequence
  Synthetic
  misc_feature (6)..(6): n is a, c, g, or u
  misc_feature (20)..(20): n is a, c, g, or u
gacganagagucccaagcgncccc

SEQ ID NO: 81217 - RNA, 18 nt, Artificial Sequence
  Synthetic
cagcacagccuagcagcc

SEQ ID NO: 81218 - RNA, 19 nt, Artificial Sequence
  Synthetic
gcagcacagccuagcagcc

SEQ ID NO: 81219 - RNA, 20 nt, Artificial Sequence
  Synthetic
ggcagcacagccuagcagcc

SEQ ID NO: 81220 - RNA, 21 nt, Artificial Sequence
  Synthetic
uggcagcacagccuagcagcc

SEQ ID NO: 81221 - RNA, 22 nt, Artificial Sequence
  Synthetic
uuggcagcacagccuagcagcc

SEQ ID NO: 81222 - RNA, 23 nt, Artificial Sequence
  Synthetic
guuggcagcacagccuagcagcc

SEQ ID NO: 81223 - RNA, 24 nt, Artificial Sequence
  Synthetic
aguuggcagcacagccuagcagcc

SEQ ID NO: 81224 - RNA, 18 nt, Artificial Sequence
  Synthetic
gcacuaguaaacugagcc

SEQ ID NO: 81225 - RNA, 19 nt, Artificial Sequence
  Synthetic
ggcacuaguaaacugagcc

SEQ ID NO: 81226 - RNA, 20 nt, Artificial Sequence
  Synthetic
uggcacuaguaaacugagcc

SEQ ID NO: 81227 - RNA, 21 nt, Artificial Sequence
  Synthetic
auggcacuaguaaacugagcc

SEQ ID NO: 81228 - RNA, 22 nt, Artificial Sequence
  Synthetic
aauggcacuaguaaacugagcc

SEQ ID NO: 81229 - RNA, 23 nt, Artificial Sequence
  Synthetic
aaauggcacuaguaaacugagcc

SEQ ID NO: 81230 - RNA, 24 nt, Artificial Sequence
  Synthetic
caaauggcacuaguaaacugagcc

SEQ ID NO: 81231 - RNA, 18 nt, Artificial Sequence
  Synthetic
  misc_feature (4)..(4): n is a, c, g, or u
  misc_feature (12)..(12): n is a, c, g, or u
caanguuuguanuaugcc

SEQ ID NO: 81232 - RNA, 19 nt, Artificial Sequence
  Synthetic
  misc_feature (5)..(5): n is a, c, g, or u
  misc_feature (13)..(13): n is a, c, g, or u
gcaanguuuguanuaugcc

SEQ ID NO: 81233 - RNA, 20 nt, Artificial Sequence
  Synthetic
  misc_feature (6)..(6): n is a, c, g, or u
  misc_feature (14)..(14): n is a, c, g, or u
ggcaanguuuguanuaugcc

SEQ ID NO: 81234 - RNA, 21 nt, Artificial Sequence
  Synthetic
  misc_feature (7)..(7): n is a, c, g, or u
  misc_feature (15)..(15): n is a, c, g, or u
uggcaanguuuguanuaugcc

SEQ ID NO: 81235 - RNA, 22 nt, Artificial Sequence
  Synthetic
  misc_feature (8)..(8): n is a, c, g, or u
  misc_feature (16)..(16): n is a, c, g, or u
cuggcaanguuuguanuaugcc

SEQ ID NO: 81236 - RNA, 23 nt, Artificial Sequence
  Synthetic
  misc_feature (9)..(9): n is a, c, g, or u
  misc_feature (17)..(17): n is a, c, g, or u
gcuggcaanguuuguanuaugcc

SEQ ID NO: 81237 - RNA, 24 nt, Artificial Sequence
  Synthetic
  misc_feature (10)..(10): n is a, c, g, or u
  misc_feature (18)..(18): n is a, c, g, or u
ugcuggcaanguuuguanuaugcc

SEQ ID NO: 81238 - RNA, 18 nt, Artificial Sequence
  Synthetic
  misc_feature (2)..(2): n is a, c, g, or u
  misc_feature (16)..(16): n is a, c, g, or u
anagagucccaagcgncc

SEQ ID NO: 81239 - RNA, 19 nt, Artificial Sequence
  Synthetic
  misc_feature (3)..(3): n is a, c, g, or u
  misc_feature (17)..(17): n is a, c, g, or u
ganagagucccaagcgncc

SEQ ID NO: 81240 - RNA, 20 nt, Artificial Sequence
  Synthetic
  misc_feature (4)..(4): n is a, c, g, or u
  misc_feature (18)..(18): n is a, c, g, or u
cganagagucccaagcgncc

SEQ ID NO: 81241 - RNA, 21 nt, Artificial Sequence
  Synthetic
  misc_feature (5)..(5): n is a, c, g, or u
  misc_feature (19)..(19): n is a, c, g, or u
acganagagucccaagcgncc

SEQ ID NO: 81242 - RNA, 22 nt, Artificial Sequence
  Synthetic
  misc_feature (6)..(6): n is a, c, g, or u
  misc_feature (20)..(20): n is a, c, g, or u
gacganagagucccaagcgncc

SEQ ID NO: 81243 - RNA, 23 nt, Artificial Sequence
  Synthetic
  misc_feature (7)..(7): n is a, c, g, or u
  misc_feature (21)..(21): n is a, c, g, or u
ggacganagagucccaagcgncc

SEQ ID NO: 81244 - RNA, 24 nt, Artificial Sequence
  Synthetic
  misc_feature (8)..(8): n is a, c, g, or u
  misc_feature (22)..(22): n is a, c, g, or u
gggacganagagucccaagcgncc

SEQ ID NO: 81245 - RNA, 18 nt, Artificial Sequence
  Synthetic
gcgcaggguccccaaucc

SEQ ID NO: 81246 - RNA, 19 nt, Artificial Sequence
  Synthetic
agcgcaggguccccaaucc

SEQ ID NO: 81247 - RNA, 20 nt, Artificial Sequence
  Synthetic
cagcgcaggguccccaaucc

SEQ ID NO: 81248 - RNA, 21 nt, Artificial Sequence
  Synthetic
ucagcgcaggguccccaaucc

SEQ ID NO: 81249 - RNA, 22 nt, Artificial Sequence
  Synthetic
uucagcgcaggguccccaaucc

SEQ ID NO: 81250 - RNA, 23 nt, Artificial Sequence
  Synthetic
guucagcgcaggguccccaaucc

SEQ ID NO: 81251 - RNA, 24 nt, Artificial Sequence
  Synthetic
uguucagcgcaggguccccaaucc

SEQ ID NO: 81252 - RNA, 18 nt, Artificial Sequence
  Synthetic
guggucgggaaagaaucc

SEQ ID NO: 81253 - RNA, 19 nt, Artificial Sequence
  Synthetic
gguggucgggaaagaaucc

SEQ ID NO: 81254 - RNA, 20 nt, Artificial Sequence
  Synthetic
ugguggucgggaaagaaucc

SEQ ID NO: 81255 - RNA, 21 nt, Artificial Sequence
  Synthetic
cugguggucgggaaagaaucc

SEQ ID NO: 81256 - RNA, 22 nt, Artificial Sequence
  Synthetic
acugguggucgggaaagaaucc

SEQ ID NO: 81257 - RNA, 23 nt, Artificial Sequence
  Synthetic
aacugguggucgggaaagaaucc

SEQ ID NO: 81258 - RNA, 24 nt, Artificial Sequence
  Synthetic
caacugguggucgggaaagaaucc

SEQ ID NO: 81259 - RNA, 18 nt, Artificial Sequence
  Synthetic
  misc_feature (2)..(2): n is a, c, g, or u
uncccaccuuaugagucc

SEQ ID NO: 81260 - RNA, 19 nt, Artificial Sequence
  Synthetic
  misc_feature (3)..(3): n is a, c, g, or u
uuncccaccuuaugagucc

SEQ ID NO: 81261 - RNA, 20 nt, Artificial Sequence
  Synthetic
  misc_feature (4)..(4): n is a, c, g, or u
guuncccaccuuaugagucc

SEQ ID NO: 81262 - RNA, 21 nt, Artificial Sequence
  Synthetic
  misc_feature (5)..(5): n is a, c, g, or u
aguuncccaccuuaugagucc

SEQ ID NO: 81263 - RNA, 22 nt, Artificial Sequence
  Synthetic
  misc_feature (6)..(6): n is a, c, g, or u
aaguuncccaccuuaugagucc

SEQ ID NO: 81264 - RNA, 23 nt, Artificial Sequence
  Synthetic
  misc_feature (7)..(7): n is a, c, g, or u
aaaguuncccaccuuaugagucc

SEQ ID NO: 81265 - RNA, 24 nt, Artificial Sequence
  Synthetic
  misc_feature (8)..(8): n is a, c, g, or u
uaaaguuncccaccuuaugagucc

SEQ ID NO: 81266 - RNA, 18 nt, Artificial Sequence
  Synthetic
ccccgagaagggucgucc

SEQ ID NO: 81267 - RNA, 19 nt, Artificial Sequence
  Synthetic
  misc_feature (1)..(1): n is a, c, g, or u
nccccgagaagggucgucc

SEQ ID NO: 81268 - RNA, 20 nt, Artificial Sequence
  Synthetic
  misc_feature (2)..(2): n is a, c, g, or u
gnccccgagaagggucgucc

SEQ ID NO: 81269 - RNA, 21 nt, Artificial Sequence
  Synthetic
  misc_feature (3)..(3): n is a, c, g, or u
cgnccccgagaagggucgucc

SEQ ID NO: 81270 - RNA, 22 nt, Artificial Sequence
  Synthetic
  misc_feature (4)..(4): n is a, c, g, or u
gcgnccccgagaagggucgucc

SEQ ID NO: 81271 - RNA, 23 nt, Artificial Sequence
  Synthetic
  misc_feature (5)..(5): n is a, c, g, or u
agcgnccccgagaagggucgucc

SEQ ID NO: 81272 - RNA, 24 nt, Artificial Sequence
  Synthetic
  misc_feature (6)..(6): n is a, c, g, or u
aagcgnccccgagaagggucgucc

SEQ ID NO: 81273 - RNA, 18 nt, Artificial Sequence
  Synthetic
  misc_feature (10)..(10): n is a, c, g, or u
uaacacgagnaggggucc

SEQ ID NO: 81274 - RNA, 19 nt, Artificial Sequence
  Synthetic
  misc_feature (11)..(11): n is a, c, g, or u
guaacacgagnaggggucc

SEQ ID NO: 81275 - RNA, 20 nt, Artificial Sequence
  Synthetic
  misc_feature (12)..(12): n is a, c, g, or u
uguaacacgagnaggggucc

SEQ ID NO: 81276 - RNA, 21 nt, Artificial Sequence
  Synthetic
  misc_feature (13)..(13): n is a, c, g, or u
cuguaacacgagnaggggucc

SEQ ID NO: 81277 - RNA, 22 nt, Artificial Sequence
  Synthetic
  misc_feature (14)..(14): n is a, c, g, or u
ccuguaacacgagnaggggucc

SEQ ID NO: 81278 - RNA, 23 nt, Artificial Sequence
  Synthetic
  misc_feature (15)..(15): n is a, c, g, or u
gccuguaacacgagnaggggucc

SEQ ID NO: 81279 - RNA, 24 nt, Artificial Sequence
  Synthetic
  misc_feature (16)..(16): n is a, c, g, or u
cgccuguaacacgagnaggggucc

SEQ ID NO: 81280 - RNA, 18 nt, Artificial Sequence
  Synthetic
  misc_feature (4)..(4): n is a, c, g, or u
auungguggucuauaagc

SEQ ID NO: 81281 - RNA, 19 nt, Artificial Sequence
  Synthetic
  misc_feature (5)..(5): n is a, c, g, or u
cauungguggucuauaagc

SEQ ID NO: 81282 - RNA, 20 nt, Artificial Sequence
  Synthetic
  misc_feature (6)..(6): n is a, c, g, or u
gcauungguggucuauaagc

SEQ ID NO: 81283 - RNA, 21 nt, Artificial Sequence
  Synthetic
  misc_feature (7)..(7): n is a, c, g, or u
ggcauungguggucuauaagc

SEQ ID NO: 81284 - RNA, 22 nt, Artificial Sequence
  Synthetic
  misc_feature (8)..(8): n is a, c, g, or u
gggcauungguggucuauaagc

SEQ ID NO: 81285 - RNA, 23 nt, Artificial Sequence
  Synthetic
  misc_feature (9)..(9): n is a, c, g, or u
ggggcauungguggucuauaagc

SEQ ID NO: 81286 - RNA, 24 nt, Artificial Sequence
  Synthetic
  misc_feature (10)..(10): n is a, c, g, or u
aggggcauungguggucuauaagc

SEQ ID NO: 81287 - RNA, 18 nt, Artificial Sequence
  Synthetic
agccacccaaggcacagc

SEQ ID NO: 81288 - RNA, 19 nt, Artificial Sequence
  Synthetic
aagccacccaaggcacagc

SEQ ID NO: 81289 - RNA, 20 nt, Artificial Sequence
  Synthetic
aaagccacccaaggcacagc

SEQ ID NO: 81290 - RNA, 21 nt, Artificial Sequence
  Synthetic
  misc_feature (1)..(1): n is a, c, g, or u
naaagccacccaaggcacagc

SEQ ID NO: 81291 - RNA, 22 nt, Artificial Sequence
  Synthetic
  misc_feature (2)..(2): n is a, c, g, or u
cnaaagccacccaaggcacagc

SEQ ID NO: 81292 - RNA, 23 nt, Artificial Sequence
  Synthetic
  misc_feature (3)..(3): n is a, c, g, or u
ccnaaagccacccaaggcacagc

SEQ ID NO: 81293 - RNA, 24 nt, Artificial Sequence
  Synthetic
  misc_feature (1)..(1): n is a, c, g, or u
  misc_feature (4)..(4): n is a, c, g, or u
nccnaaagccacccaaggcacagc

SEQ ID NO: 81294 - RNA, 18 nt, Artificial Sequence
  Synthetic
ugaacuggagccaccagc

SEQ ID NO: 81295 - RNA, 19 nt, Artificial Sequence
  Synthetic
cugaacuggagccaccagc

SEQ ID NO: 81296 - RNA, 20 nt, Artificial Sequence
  Synthetic
ccugaacuggagccaccagc

SEQ ID NO: 81297 - RNA, 21 nt, Artificial Sequence
  Synthetic
uccugaacuggagccaccagc

SEQ ID NO: 81298 - RNA, 22 nt, Artificial Sequence
  Synthetic
uuccugaacuggagccaccagc

SEQ ID NO: 81299 - RNA, 23 nt, Artificial Sequence
  Synthetic
guuccugaacuggagccaccagc

SEQ ID NO: 81300 - RNA, 24 nt, Artificial Sequence
  Synthetic
uguuccugaacuggagccaccagc

SEQ ID NO: 81301 - RNA, 18 nt, Artificial Sequence
  Synthetic
ggcacuaguaaacugagc

SEQ ID NO: 81302 - RNA, 19 nt, Artificial Sequence
  Synthetic
uggcacuaguaaacugagc

SEQ ID NO: 81303 - RNA, 20 nt, Artificial Sequence
  Synthetic
auggcacuaguaaacugagc

SEQ ID NO: 81304 - RNA, 21 nt, Artificial Sequence
  Synthetic
aauggcacuaguaaacugagc

SEQ ID NO: 81305 - RNA, 22 nt, Artificial Sequence
  Synthetic
aaauggcacuaguaaacugagc

SEQ ID NO: 81306 - RNA, 23 nt, Artificial Sequence
  Synthetic
caaauggcacuaguaaacugagc

SEQ ID NO: 81307 - RNA, 24 nt, Artificial Sequence
  Synthetic
acaaauggcacuaguaaacugagc

SEQ ID NO: 81308 - RNA, 18 nt, Artificial Sequence
  Synthetic
  misc_feature (6)..(6): n is a, c, g, or u
uuguanuaugcccugagc

SEQ ID NO: 81309 - RNA, 19 nt, Artificial Sequence
  Synthetic
  misc_feature (7)..(7): n is a, c, g, or u
uuuguanuaugcccugagc

SEQ ID NO: 81310 - RNA, 20 nt, Artificial Sequence
  Synthetic
  misc_feature (8)..(8): n is a, c, g, or u
guuuguanuaugcccugagc

SEQ ID NO: 81311 - RNA, 21 nt, Artificial Sequence
  Synthetic
  misc_feature (1)..(1): n is a, c, g, or u
  misc_feature (9)..(9): n is a, c, g, or u
nguuuguanuaugcccugagc

SEQ ID NO: 81312 - RNA, 22 nt, Artificial Sequence
  Synthetic
  misc_feature (2)..(2): n is a, c, g, or u
  misc_feature (10)..(10): n is a, c, g, or u
anguuuguanuaugcccugagc

SEQ ID NO: 81313 - RNA, 23 nt, Artificial Sequence
  Synthetic
  misc_feature (3)..(3): n is a, c, g, or u
  misc_feature (11)..(11): n is a, c, g, or u
aanguuuguanuaugcccugagc

SEQ ID NO: 81314 - RNA, 24 nt, Artificial Sequence
  Synthetic
  misc_feature (4)..(4): n is a, c, g, or u
  misc_feature (12)..(12): n is a, c, g, or u
caanguuuguanuaugcccugagc

SEQ ID NO: 81315 - RNA, 18 nt, Artificial Sequence
  Synthetic
gaccuucgucugcgaggc

SEQ ID NO: 81316 - RNA, 19 nt, Artificial Sequence
  Synthetic
agaccuucgucugcgaggc

SEQ ID NO: 81317 - RNA, 20 nt, Artificial Sequence
  Synthetic
gagaccuucgucugcgaggc

SEQ ID NO: 81318 - RNA, 21 nt, Artificial Sequence
  Synthetic
ugagaccuucgucugcgaggc

SEQ ID NO: 81319 - RNA, 22 nt, Artificial Sequence
  Synthetic
uugagaccuucgucugcgaggc

SEQ ID NO: 81320 - RNA, 23 nt, Artificial Sequence
  Synthetic
auugagaccuucgucugcgaggc

SEQ ID NO: 81321 - RNA, 24 nt, Artificial Sequence
  Synthetic
gauugagaccuucgucugcgaggc

SEQ ID NO: 81322 - RNA, 18 nt, Artificial Sequence
  Synthetic
aaggcacagcuuggaggc

SEQ ID NO: 81323 - RNA, 19 nt, Artificial Sequence
  Synthetic
caaggcacagcuuggaggc

SEQ ID NO: 81324 - RNA, 20 nt, Artificial Sequence
  Synthetic
ccaaggcacagcuuggaggc

SEQ ID NO: 81325 - RNA, 21 nt, Artificial Sequence
  Synthetic
cccaaggcacagcuuggaggc

SEQ ID NO: 81326 - RNA, 22 nt, Artificial Sequence
  Synthetic
acccaaggcacagcuuggaggc

SEQ ID NO: 81327 - RNA, 23 nt, Artificial Sequence
  Synthetic
cacccaaggcacagcuuggaggc

SEQ ID NO: 81328 - RNA, 24 nt, Artificial Sequence
  Synthetic
ccacccaaggcacagcuuggaggc

SEQ ID NO: 81329 - RNA, 18 nt, Artificial Sequence
  Synthetic
gcgagcaaaacaagcggc

SEQ ID NO: 81330 - RNA, 19 nt, Artificial Sequence
  Synthetic
ugcgagcaaaacaagcggc

SEQ ID NO: 81331 - RNA, 20 nt, Artificial Sequence
  Synthetic
cugcgagcaaaacaagcggc

SEQ ID NO: 81332 - RNA, 21 nt, Artificial Sequence
  Synthetic
gcugcgagcaaaacaagcggc

SEQ ID NO: 81333 - RNA, 22 nt, Artificial Sequence
  Synthetic
ugcugcgagcaaaacaagcggc

SEQ ID NO: 81334 - RNA, 23 nt, Artificial Sequence
  Synthetic
cugcugcgagcaaaacaagcggc

SEQ ID NO: 81335 - RNA, 24 nt, Artificial Sequence
  Synthetic
ccugcugcgagcaaaacaagcggc

SEQ ID NO: 81336 - RNA, 18 nt, Artificial Sequence
  Synthetic
aaggccuuguaaguuggc

SEQ ID NO: 81337 - RNA, 19 nt, Artificial Sequence
  Synthetic
aaaggccuuguaaguuggc

SEQ ID NO: 81338 - RNA, 20 nt, Artificial Sequence
  Synthetic
gaaaggccuuguaaguuggc

SEQ ID NO: 81339 - RNA, 21 nt, Artificial Sequence
  Synthetic
agaaaggccuuguaaguuggc

SEQ ID NO: 81340 - RNA, 22 nt, Artificial Sequence
  Synthetic
cagaaaggccuuguaaguuggc

SEQ ID NO: 81341 - RNA, 23 nt, Artificial Sequence
  Synthetic
acagaaaggccuuguaaguuggc

SEQ ID NO: 81342 - RNA, 24 nt, Artificial Sequence
  Synthetic
cacagaaaggccuuguaaguuggc

SEQ ID NO: 81343 - RNA, 18 nt, Artificial Sequence
  Synthetic
  misc_feature (13)..(13): n is a, c, g, or u
  misc_feature (16)..(16): n is a, c, g, or u
cuggcgauuggungangc

SEQ ID NO: 81344 - RNA, 19 nt, Artificial Sequence
  Synthetic
  misc_feature (14)..(14): n is a, c, g, or u
  misc_feature (17)..(17): n is a, c, g, or u
acuggcgauuggungangc

SEQ ID NO: 81345 - RNA, 20 nt, Artificial Sequence
  Synthetic
  misc_feature (15)..(15): n is a, c, g, or u
  misc_feature (18)..(18): n is a, c, g, or u
gacuggcgauuggungangc

SEQ ID NO: 81346 - RNA, 21 nt, Artificial Sequence
  Synthetic
  misc_feature (16)..(16): n is a, c, g, or u
  misc_feature (19)..(19): n is a, c, g, or u
ugacuggcgauuggungangc

SEQ ID NO: 81347 - RNA, 22 nt, Artificial Sequence
  Synthetic
  misc_feature (17)..(17): n is a, c, g, or u
  misc_feature (20)..(20): n is a, c, g, or u
cugacuggcgauuggungangc

SEQ ID NO: 81348 - RNA, 23 nt, Artificial Sequence
  Synthetic
  misc_feature (18)..(18): n is a, c, g, or u
  misc_feature (21)..(21): n is a, c, g, or u
ccugacuggcgauuggungangc

SEQ ID NO: 81349 - RNA, 24 nt, Artificial Sequence
  Synthetic
  misc_feature (19)..(19): n is a, c, g, or u
  misc_feature (22)..(22): n is a, c, g, or u
uccugacuggcgauuggungangc

SEQ ID NO: 81350 - RNA, 18 nt, Artificial Sequence
  Synthetic
  misc_feature (12)..(12): n is a, c, g, or u
ugaaaccacaanaguugc

SEQ ID NO: 81351 - RNA, 19 nt, Artificial Sequence
  Synthetic
  misc_feature (13)..(13): n is a, c, g, or u
gugaaaccacaanaguugc

SEQ ID NO: 81352 - RNA, 20 nt, Artificial Sequence
  Synthetic
  misc_feature (14)..(14): n is a, c, g, or u
ugugaaaccacaanaguugc

SEQ ID NO: 81353 - RNA, 21 nt, Artificial Sequence
  Synthetic
  misc_feature (15)..(15): n is a, c, g, or u
augugaaaccacaanaguugc

SEQ ID NO: 81354 - RNA, 22 nt, Artificial Sequence
  Synthetic
  misc_feature (16)..(16): n is a, c, g, or u
aaugugaaaccacaanaguugc

SEQ ID NO: 81355 - RNA, 23 nt, Artificial Sequence
  Synthetic
  misc_feature (17)..(17): n is a, c, g, or u
aaaugugaaaccacaanaguugc

SEQ ID NO: 81356 - RNA, 24 nt, Artificial Sequence
  Synthetic
  misc_feature (18)..(18): n is a, c, g, or u
gaaaugugaaaccacaanaguugc

SEQ ID NO: 81357 - RNA, 18 nt, Artificial Sequence
  Synthetic
gaaacgauguauauuugc

SEQ ID NO: 81358 - RNA, 19 nt, Artificial Sequence
  Synthetic
ggaaacgauguauauuugc

SEQ ID NO: 81359 - RNA, 20 nt, Artificial Sequence
  Synthetic
uggaaacgauguauauuugc

SEQ ID NO: 81360 - RNA, 21 nt, Artificial Sequence
  Synthetic
auggaaacgauguauauuugc

SEQ ID NO: 81361 - RNA, 22 nt, Artificial Sequence
  Synthetic
cauggaaacgauguauauuugc

SEQ ID NO: 81362 - RNA, 23 nt, Artificial Sequence
  Synthetic
ccauggaaacgauguauauuugc

SEQ ID NO: 81363 - RNA, 24 nt, Artificial Sequence
  Synthetic
gccauggaaacgauguauauuugc

SEQ ID NO: 81364 - RNA, 18 nt, Artificial Sequence
  Synthetic
  misc_feature (1)..(1): n is a, c, g, or u
  misc_feature (8)..(8): n is a, c, g, or u
  misc_feature (14)..(14): n is a, c, g, or u
ngcuggunguugangauc

SEQ ID NO: 81365 - RNA, 19 nt, Artificial Sequence
  Synthetic
  misc_feature (1)..(2): n is a, c, g, or u
  misc_feature (9)..(9): n is a, c, g, or u
  misc_feature (15)..(15): n is a, c, g, or u
nngcuggunguugangauc

SEQ ID NO: 81366 - RNA, 20 nt, Artificial Sequence
  Synthetic
  misc_feature (2)..(3): n is a, c, g, or u
  misc_feature (10)..(10): n is a, c, g, or u
  misc_feature (16)..(16): n is a, c, g, or u
cnngcuggunguugangauc

SEQ ID NO: 81367 - RNA, 21 nt, Artificial Sequence
  Synthetic
  misc_feature (3)..(4): n is a, c, g, or u
  misc_feature (11)..(11): n is a, c, g, or u
  misc_feature (17)..(17): n is a, c, g, or u
ccnngcuggunguugangauc

SEQ ID NO: 81368 - RNA, 22 nt, Artificial Sequence
  Synthetic
  misc_feature (4)..(5): n is a, c, g, or u
  misc_feature (12)..(12): n is a, c, g, or u
  misc_feature (18)..(18): n is a, c, g, or u
cccnngcuggunguugangauc

SEQ ID NO: 81369 - RNA, 23 nt, Artificial Sequence
  Synthetic
  misc_feature (5)..(6): n is a, c, g, or u
  misc_feature (13)..(13): n is a, c, g, or u
  misc_feature (19)..(19): n is a, c, g, or u
ucccnngcuggunguugangauc

SEQ ID NO: 81370 - RNA, 24 nt, Artificial Sequence
  Synthetic
  misc_feature (6)..(7): n is a, c, g, or u
  misc_feature (14)..(14): n is a, c, g, or u
  misc_feature (20)..(20): n is a, c, g, or u
gucccnngcuggunguugangauc

SEQ ID NO: 81371 - RNA, 18 nt, Artificial Sequence
  Synthetic
  misc_feature (1)..(1): n is a, c, g, or u
nagagcugaggcgguauc

SEQ ID NO: 81372 - RNA, 19 nt, Artificial Sequence
  Synthetic
  misc_feature (2)..(2): n is a, c, g, or u
anagagcugaggcgguauc

SEQ ID NO: 81373 - RNA, 20 nt, Artificial Sequence
  Synthetic
  misc_feature (3)..(3): n is a, c, g, or u
uanagagcugaggcgguauc

SEQ ID NO: 81374 - RNA, 21 nt, Artificial Sequence
  Synthetic
  misc_feature (4)..(4): n is a, c, g, or u
auanagagcugaggcgguauc

SEQ ID NO: 81375 - RNA, 22 nt, Artificial Sequence
  Synthetic
  misc_feature (5)..(5): n is a, c, g, or u
gauanagagcugaggcgguauc

SEQ ID NO: 81376 - RNA, 23 nt, Artificial Sequence
  Synthetic
  misc_feature (6)..(6): n is a, c, g, or u
cgauanagagcugaggcgguauc

SEQ ID NO: 81377 - RNA, 24 nt, Artificial Sequence
  Synthetic
  misc_feature (7)..(7): n is a, c, g, or u
ccgauanagagcugaggcgguauc

SEQ ID NO: 81378 - RNA, 18 nt, Artificial Sequence
  Synthetic
gcaggguccccaauccuc

SEQ ID NO: 81379 - RNA, 19 nt, Artificial Sequence
  Synthetic
cgcaggguccccaauccuc

SEQ ID NO: 81380 - RNA, 20 nt, Artificial Sequence
  Synthetic
gcgcaggguccccaauccuc

SEQ ID NO: 81381 - RNA, 21 nt, Artificial Sequence
  Synthetic
agcgcaggguccccaauccuc

SEQ ID NO: 81382 - RNA, 22 nt, Artificial Sequence
  Synthetic
cagcgcaggguccccaauccuc

SEQ ID NO: 81383 - RNA, 23 nt, Artificial Sequence
  Synthetic
ucagcgcaggguccccaauccuc

SEQ ID NO: 81384 - RNA, 24 nt, Artificial Sequence
  Synthetic
uucagcgcaggguccccaauccuc

SEQ ID NO: 81385 - RNA, 18 nt, Artificial Sequence
  Synthetic
  misc_feature (1)..(1): n is a, c, g, or u
  misc_feature (10)..(10): n is a, c, g, or u
nugaggugancaaugcuc

SEQ ID NO: 81386 - RNA, 19 nt, Artificial Sequence
  Synthetic
  misc_feature (2)..(2): n is a, c, g, or u
  misc_feature (11)..(11): n is a, c, g, or u
gnugaggugancaaugcuc

SEQ ID NO: 81387 - RNA, 20 nt, Artificial Sequence
  Synthetic
  misc_feature (3)..(3): n is a, c, g, or u
  misc_feature (12)..(12): n is a, c, g, or u
ugnugaggugancaaugcuc

SEQ ID NO: 81388 - RNA, 21 nt, Artificial Sequence
  Synthetic
  misc_feature (4)..(4): n is a, c, g, or u
  misc_feature (13)..(13): n is a, c, g, or u
augnugaggugancaaugcuc

SEQ ID NO: 81389 - RNA, 22 nt, Artificial Sequence
  Synthetic
  misc_feature (5)..(5): n is a, c, g, or u
  misc_feature (14)..(14): n is a, c, g, or u
uaugnugaggugancaaugcuc

SEQ ID NO: 81390 - RNA, 23 nt, Artificial Sequence
  Synthetic
  misc_feature (6)..(6): n is a, c, g, or u
  misc_feature (15)..(15): n is a, c, g, or u
guaugnugaggugancaaugcuc

SEQ ID NO: 81391 - RNA, 24 nt, Artificial Sequence
  Synthetic
  misc_feature (7)..(7): n is a, c, g, or u
  misc_feature (16)..(16): n is a, c, g, or u
aguaugnugaggugancaaugcuc

SEQ ID NO: 81392 - RNA, 18 nt, Artificial Sequence
  Synthetic
ucuaacaacaguagucuc

SEQ ID NO: 81393 - RNA, 19 nt, Artificial Sequence
  Synthetic
gucuaacaacaguagucuc

SEQ ID NO: 81394 - RNA, 20 nt, Artificial Sequence
  Synthetic
cgucuaacaacaguagucuc

SEQ ID NO: 81395 - RNA, 21 nt, Artificial Sequence
  Synthetic
ucgucuaacaacaguagucuc

SEQ ID NO: 81396 - RNA, 22 nt, Artificial Sequence
  Synthetic
gucgucuaacaacaguagucuc

SEQ ID NO: 81397 - RNA, 23 nt, Artificial Sequence
  Synthetic
cgucgucuaacaacaguagucuc

SEQ ID NO: 81398 - RNA, 24 nt, Artificial Sequence
  Synthetic
ucgucgucuaacaacaguagucuc

SEQ ID NO: 81399 - RNA, 18 nt, Artificial Sequence
  Synthetic
caacauaccuugauaguc

SEQ ID NO: 81400 - RNA, 19 nt, Artificial Sequence
  Synthetic
gcaacauaccuugauaguc

SEQ ID NO: 81401 - RNA, 20 nt, Artificial Sequence
  Synthetic
ggcaacauaccuugauaguc

SEQ ID NO: 81402 - RNA, 21 nt, Artificial Sequence
  Synthetic
gggcaacauaccuugauaguc

SEQ ID NO: 81403 - RNA, 22 nt, Artificial Sequence
  Synthetic
cgggcaacauaccuugauaguc

SEQ ID NO: 81404 - RNA, 23 nt, Artificial Sequence
  Synthetic
acgggcaacauaccuugauaguc

SEQ ID NO: 81405 - RNA, 24 nt, Artificial Sequence
  Synthetic
aacgggcaacauaccuugauaguc

SEQ ID NO: 81406 - RNA, 18 nt, Artificial Sequence
  Synthetic
uggauccaacuggugguc

SEQ ID NO: 81407 - RNA, 19 nt, Artificial Sequence
  Synthetic
cuggauccaacuggugguc

SEQ ID NO: 81408 - RNA, 20 nt, Artificial Sequence
  Synthetic
gcuggauccaacuggugguc

SEQ ID NO: 81409 - RNA, 21 nt, Artificial Sequence
  Synthetic
ggcuggauccaacuggugguc

SEQ ID NO: 81410 - RNA, 22 nt, Artificial Sequence
  Synthetic
aggcuggauccaacuggugguc

SEQ ID NO: 81411 - RNA, 23 nt, Artificial Sequence
  Synthetic
aaggcuggauccaacuggugguc

SEQ ID NO: 81412 - RNA, 24 nt, Artificial Sequence
  Synthetic
gaaggcuggauccaacuggugguc

SEQ ID NO: 81413 - RNA, 18 nt, Artificial Sequence
  Synthetic
auacuaacauugagauuc

SEQ ID NO: 81414 - RNA, 19 nt, Artificial Sequence
  Synthetic
aauacuaacauugagauuc

SEQ ID NO: 81415 - RNA, 20 nt, Artificial Sequence
  Synthetic
gaauacuaacauugagauuc

SEQ ID NO: 81416 - RNA, 21 nt, Artificial Sequence
  Synthetic
ggaauacuaacauugagauuc

SEQ ID NO: 81417 - RNA, 22 nt, Artificial Sequence
  Synthetic
aggaauacuaacauugagauuc

SEQ ID NO: 81418 - RNA, 23 nt, Artificial Sequence
  Synthetic
aaggaauacuaacauugagauuc

SEQ ID NO: 81419 - RNA, 24 nt, Artificial Sequence
  Synthetic
caaggaauacuaacauugagauuc

SEQ ID NO: 81420 - RNA, 18 nt, Artificial Sequence
  Synthetic
gcgagggaguucuucuuc

SEQ ID NO: 81421 - RNA, 19 nt, Artificial Sequence
  Synthetic
ggcgagggaguucuucuuc

SEQ ID NO: 81422 - RNA, 20 nt, Artificial Sequence
  Synthetic
aggcgagggaguucuucuuc

SEQ ID NO: 81423 - RNA, 21 nt, Artificial Sequence
  Synthetic
gaggcgagggaguucuucuuc

SEQ ID NO: 81424 - RNA, 22 nt, Artificial Sequence
  Synthetic
cgaggcgagggaguucuucuuc

SEQ ID NO: 81425 - RNA, 23 nt, Artificial Sequence
  Synthetic
gcgaggcgagggaguucuucuuc

SEQ ID NO: 81426 - RNA, 24 nt, Artificial Sequence
  Synthetic
ugcgaggcgagggaguucuucuuc

SEQ ID NO: 81427 - RNA, 18 nt, Artificial Sequence
  Synthetic
gaacaggguuuacuguuc

SEQ ID NO: 81428 - RNA, 19 nt, Artificial Sequence
  Synthetic
ggaacaggguuuacuguuc

SEQ ID NO: 81429 - RNA, 20 nt, Artificial Sequence
  Synthetic
cggaacaggguuuacuguuc

SEQ ID NO: 81430 - RNA, 21 nt, Artificial Sequence
  Synthetic
ucggaacaggguuuacuguuc

SEQ ID NO: 81431 - RNA, 22 nt, Artificial Sequence
  Synthetic
gucggaacaggguuuacuguuc

SEQ ID NO: 81432 - RNA, 23 nt, Artificial Sequence
  Synthetic
agucggaacaggguuuacuguuc

SEQ ID NO: 81433 - RNA, 24 nt, Artificial Sequence
  Synthetic
uagucggaacaggguuuacuguuc

SEQ ID NO: 81434 - RNA, 18 nt, Artificial Sequence
  Synthetic
gaugaguguuucucaaag

SEQ ID NO: 81435 - RNA, 19 nt, Artificial Sequence
  Synthetic
ggaugaguguuucucaaag

SEQ ID NO: 81436 - RNA, 20 nt, Artificial Sequence
  Synthetic
aggaugaguguuucucaaag

SEQ ID NO: 81437 - RNA, 21 nt, Artificial Sequence
  Synthetic
gaggaugaguguuucucaaag

SEQ ID NO: 81438 - RNA, 22 nt, Artificial Sequence
  Synthetic
ugaggaugaguguuucucaaag

SEQ ID NO: 81439 - RNA, 23 nt, Artificial Sequence
  Synthetic
cugaggaugaguguuucucaaag

SEQ ID NO: 81440 - RNA, 24 nt, Artificial Sequence
  Synthetic
ccugaggaugaguguuucucaaag

SEQ ID NO: 81441 - RNA, 18 nt, Artificial Sequence
  Synthetic
agcgauaaccaggacaag

SEQ ID NO: 81442 - RNA, 19 nt, Artificial Sequence
  Synthetic
cagcgauaaccaggacaag

SEQ ID NO: 81443 - RNA, 20 nt, Artificial Sequence
  Synthetic
ccagcgauaaccaggacaag

SEQ ID NO: 81444 - RNA, 21 nt, Artificial Sequence
  Synthetic
uccagcgauaaccaggacaag

SEQ ID NO: 81445 - RNA, 22 nt, Artificial Sequence
  Synthetic
auccagcgauaaccaggacaag

SEQ ID NO: 81446 - RNA, 23 nt, Artificial Sequence
  Synthetic
cauccagcgauaaccaggacaag

SEQ ID NO: 81447 - RNA, 24 nt, Artificial Sequence
  Synthetic
acauccagcgauaaccaggacaag

SEQ ID NO: 81448 - RNA, 18 nt, Artificial Sequence
  Synthetic
agaagaaccaacaagaag

SEQ ID NO: 81449 - RNA, 19 nt, Artificial Sequence
  Synthetic
cagaagaaccaacaagaag

SEQ ID NO: 81450 - RNA, 20 nt, Artificial Sequence
  Synthetic
ccagaagaaccaacaagaag

SEQ ID NO: 81451 - RNA, 21 nt, Artificial Sequence
  Synthetic
uccagaagaaccaacaagaag

SEQ ID NO: 81452 - RNA, 22 nt, Artificial Sequence
  Synthetic
guccagaagaaccaacaagaag

SEQ ID NO: 81453 - RNA, 23 nt, Artificial Sequence
  Synthetic
aguccagaagaaccaacaagaag

SEQ ID NO: 81454 - RNA, 24 nt, Artificial Sequence
  Synthetic
uaguccagaagaaccaacaagaag

SEQ ID NO: 81455 - RNA, 18 nt, Artificial Sequence
  Synthetic
cauagcagcaggaugaag

SEQ ID NO: 81456 - RNA, 19 nt, Artificial Sequence
  Synthetic
gcauagcagcaggaugaag

SEQ ID NO: 81457 - RNA, 20 nt, Artificial Sequence
  Synthetic
ggcauagcagcaggaugaag

SEQ ID NO: 81458 - RNA, 21 nt, Artificial Sequence
  Synthetic
aggcauagcagcaggaugaag

SEQ ID NO: 81459 - RNA, 22 nt, Artificial Sequence
  Synthetic
gaggcauagcagcaggaugaag

SEQ ID NO: 81460 - RNA, 23 nt, Artificial Sequence
  Synthetic
ugaggcauagcagcaggaugaag

SEQ ID NO: 81461 - RNA, 24 nt, Artificial Sequence
  Synthetic
augaggcauagcagcaggaugaag

SEQ ID NO: 81462 - RNA, 18 nt, Artificial Sequence
  Synthetic
  misc_feature (5)..(5): n is a, c, g, or u
cauungguggucuauaag

SEQ ID NO: 81463 - RNA, 19 nt, Artificial Sequence
  Synthetic
  misc_feature (6)..(6): n is a, c, g, or u
gcauungguggucuauaag

SEQ ID NO: 81464 - RNA, 20 nt, Artificial Sequence
  Synthetic
  misc_feature (7)..(7): n is a, c, g, or u
ggcauungguggucuauaag

SEQ ID NO: 81465 - RNA, 21 nt, Artificial Sequence
  Synthetic
  misc_feature (8)..(8): n is a, c, g, or u
gggcauungguggucuauaag

SEQ ID NO: 81466 - RNA, 22 nt, Artificial Sequence
  Synthetic
  misc_feature (9)..(9): n is a, c, g, or u
ggggcauungguggucuauaag

SEQ ID NO: 81467 - RNA, 23 nt, Artificial Sequence
  Synthetic
  misc_feature (10)..(10): n is a, c, g, or u
aggggcauungguggucuauaag

SEQ ID NO: 81468 - RNA, 24 nt, Artificial Sequence
  Synthetic
  misc_feature (11)..(11): n is a, c, g, or u
uaggggcauungguggucuauaag

SEQ ID NO: 81469 - RNA, 18 nt, Artificial Sequence
  Synthetic
uaacugaaagccaaacag

SEQ ID NO: 81470 - RNA, 19 nt, Artificial Sequence
  Synthetic
auaacugaaagccaaacag

SEQ ID NO: 81471 - RNA, 20 nt, Artificial Sequence
  Synthetic
uauaacugaaagccaaacag

SEQ ID NO: 81472 - RNA, 21 nt, Artificial Sequence
  Synthetic
auauaacugaaagccaaacag

SEQ ID NO: 81473 - RNA, 22 nt, Artificial Sequence
  Synthetic
cauauaacugaaagccaaacag

SEQ ID NO: 81474 - RNA, 23 nt, Artificial Sequence
  Synthetic
ccauauaacugaaagccaaacag

SEQ ID NO: 81475 - RNA, 24 nt, Artificial Sequence
  Synthetic
uccauauaacugaaagccaaacag

SEQ ID NO: 81476 - RNA, 18 nt, Artificial Sequence
  Synthetic
gguuugguacagcaacag

SEQ ID NO: 81477 - RNA, 19 nt, Artificial Sequence
  Synthetic
agguuugguacagcaacag

SEQ ID NO: 81478 - RNA, 20 nt, Artificial Sequence
  Synthetic
aagguuugguacagcaacag

SEQ ID NO: 81479 - RNA, 21 nt, Artificial Sequence
  Synthetic
gaagguuugguacagcaacag

SEQ ID NO: 81480 - RNA, 22 nt, Artificial Sequence
  Synthetic
cgaagguuugguacagcaacag

SEQ ID NO: 81481 - RNA, 23 nt, Artificial Sequence
  Synthetic
ccgaagguuugguacagcaacag

SEQ ID NO: 81482 - RNA, 24 nt, Artificial Sequence
  Synthetic
uccgaagguuugguacagcaacag

SEQ ID NO: 81483 - RNA, 18 nt, Artificial Sequence
  Synthetic
gcuuggaggcuugaacag

SEQ ID NO: 81484 - RNA, 19 nt, Artificial Sequence
  Synthetic
agcuuggaggcuugaacag

SEQ ID NO: 81485 - RNA, 20 nt, Artificial Sequence
  Synthetic
cagcuuggaggcuugaacag

SEQ ID NO: 81486 - RNA, 21 nt, Artificial Sequence
  Synthetic
acagcuuggaggcuugaacag

SEQ ID NO: 81487 - RNA, 22 nt, Artificial Sequence
  Synthetic
cacagcuuggaggcuugaacag

SEQ ID NO: 81488 - RNA, 23 nt, Artificial Sequence
  Synthetic
gcacagcuuggaggcuugaacag

SEQ ID NO: 81489 - RNA, 24 nt, Artificial Sequence
  Synthetic
ggcacagcuuggaggcuugaacag

SEQ ID NO: 81490 - RNA, 18 nt, Artificial Sequence
  Synthetic
gcagaugagaaggcacag

SEQ ID NO: 81491 - RNA, 19 nt, Artificial Sequence
  Synthetic
ggcagaugagaaggcacag

SEQ ID NO: 81492 - RNA, 20 nt, Artificial Sequence
  Synthetic
cggcagaugagaaggcacag

SEQ ID NO: 81493 - RNA, 21 nt, Artificial Sequence
  Synthetic
ccggcagaugagaaggcacag

SEQ ID NO: 81494 - RNA, 22 nt, Artificial Sequence
  Synthetic
uccggcagaugagaaggcacag

SEQ ID NO: 81495 - RNA, 23 nt, Artificial Sequence
  Synthetic
guccggcagaugagaaggcacag

SEQ ID NO: 81496 - RNA, 24 nt, Artificial Sequence
  Synthetic
gguccggcagaugagaaggcacag

SEQ ID NO: 81497 - RNA, 18 nt, Artificial Sequence
  Synthetic
  misc_feature (2)..(2): n is a, c, g, or u
  misc_feature (14)..(14): n is a, c, g, or u
gnuuaaagacaggnacag

SEQ ID NO: 81498 - RNA, 19 nt, Artificial Sequence
  Synthetic
  misc_feature (3)..(3): n is a, c, g, or u
  misc_feature (15)..(15): n is a, c, g, or u
ggnuuaaagacaggnacag

SEQ ID NO: 81499 - RNA, 20 nt, Artificial Sequence
  Synthetic
  misc_feature (4)..(4): n is a, c, g, or u
  misc_feature (16)..(16): n is a, c, g, or u
aggnuuaaagacaggnacag

SEQ ID NO: 81500 - RNA, 21 nt, Artificial Sequence
  Synthetic
  misc_feature (5)..(5): n is a, c, g, or u
  misc_feature (17)..(17): n is a, c, g, or u
gaggnuuaaagacaggnacag

SEQ ID NO: 81501 - RNA, 22 nt, Artificial Sequence
  Synthetic
  misc_feature (6)..(6): n is a, c, g, or u
  misc_feature (18)..(18): n is a, c, g, or u
ugaggnuuaaagacaggnacag

SEQ ID NO: 81502 - RNA, 23 nt, Artificial Sequence
  Synthetic
  misc_feature (7)..(7): n is a, c, g, or u
  misc_feature (19)..(19): n is a, c, g, or u
augaggnuuaaagacaggnacag

SEQ ID NO: 81503 - RNA, 24 nt, Artificial Sequence
  Synthetic
  misc_feature (8)..(8): n is a, c, g, or u
  misc_feature (20)..(20): n is a, c, g, or u
aaugaggnuuaaagacaggnacag

SEQ ID NO: 81504 - RNA, 18 nt, Artificial Sequence
  Synthetic
cugaacuggagccaccag

SEQ ID NO: 81505 - RNA, 19 nt, Artificial Sequence
  Synthetic
ccugaacuggagccaccag

SEQ ID NO: 81506 - RNA, 20 nt, Artificial Sequence
  Synthetic
uccugaacuggagccaccag

SEQ ID NO: 81507 - RNA, 21 nt, Artificial Sequence
  Synthetic
uuccugaacuggagccaccag

SEQ ID NO: 81508 - RNA, 22 nt, Artificial Sequence
  Synthetic
guuccugaacuggagccaccag

SEQ ID NO: 81509 - RNA, 23 nt, Artificial Sequence
  Synthetic
uguuccugaacuggagccaccag

SEQ ID NO: 81510 - RNA, 24 nt, Artificial Sequence
  Synthetic
cuguuccugaacuggagccaccag

SEQ ID NO: 81511 - RNA, 18 nt, Artificial Sequence
  Synthetic
ugaccaagccccagccag

SEQ ID NO: 81512 - RNA, 19 nt, Artificial Sequence
  Synthetic
augaccaagccccagccag

SEQ ID NO: 81513 - RNA, 20 nt, Artificial Sequence
  Synthetic
caugaccaagccccagccag

SEQ ID NO: 81514 - RNA, 21 nt, Artificial Sequence
  Synthetic
ccaugaccaagccccagccag

SEQ ID NO: 81515 - RNA, 22 nt, Artificial Sequence
  Synthetic
cccaugaccaagccccagccag

SEQ ID NO: 81516 - RNA, 23 nt, Artificial Sequence
  Synthetic
gcccaugaccaagccccagccag

SEQ ID NO: 81517 - RNA, 24 nt, Artificial Sequence
  Synthetic
ggcccaugaccaagccccagccag

SEQ ID NO: 81518 - RNA, 18 nt, Artificial Sequence
  Synthetic
acuaguaaacugagccag

SEQ ID NO: 81519 - RNA, 19 nt, Artificial Sequence
  Synthetic
cacuaguaaacugagccag

SEQ ID NO: 81520 - RNA, 20 nt, Artificial Sequence
  Synthetic
gcacuaguaaacugagccag

SEQ ID NO: 81521 - RNA, 21 nt, Artificial Sequence
  Synthetic
ggcacuaguaaacugagccag

SEQ ID NO: 81522 - RNA, 22 nt, Artificial Sequence
  Synthetic
uggcacuaguaaacugagccag

SEQ ID NO: 81523 - RNA, 23 nt, Artificial Sequence
  Synthetic
auggcacuaguaaacugagccag

SEQ ID NO: 81524 - RNA, 24 nt, Artificial Sequence
  Synthetic
aauggcacuaguaaacugagccag

SEQ ID NO: 81525 - RNA, 18 nt, Artificial Sequence
  Synthetic
cauaccuugauaguccag

SEQ ID NO: 81526 - RNA, 19 nt, Artificial Sequence
  Synthetic
acauaccuugauaguccag

SEQ ID NO: 81527 - RNA, 20 nt, Artificial Sequence
  Synthetic
aacauaccuugauaguccag

SEQ ID NO: 81528 - RNA, 21 nt, Artificial Sequence
  Synthetic
caacauaccuugauaguccag

SEQ ID NO: 81529 - RNA, 22 nt, Artificial Sequence
  Synthetic
gcaacauaccuugauaguccag

SEQ ID NO: 81530 - RNA, 23 nt, Artificial Sequence
  Synthetic
ggcaacauaccuugauaguccag

SEQ ID NO: 81531 - RNA, 24 nt, Artificial Sequence
  Synthetic
gggcaacauaccuugauaguccag

SEQ ID NO: 81532 - RNA, 18 nt, Artificial Sequence
  Synthetic
  misc_feature (7)..(7): n is a, c, g, or u
  misc_feature (10)..(10): n is a, c, g, or u
ggucggncgnaacggcag

SEQ ID NO: 81533 - RNA, 19 nt, Artificial Sequence
  Synthetic
  misc_feature (8)..(8): n is a, c, g, or u
  misc_feature (11)..(11): n is a, c, g, or u
uggucggncgnaacggcag

SEQ ID NO: 81534 - RNA, 20 nt, Artificial Sequence
  Synthetic
  misc_feature (9)..(9): n is a, c, g, or u
  misc_feature (12)..(12): n is a, c, g, or u
guggucggncgnaacggcag

SEQ ID NO: 81535 - RNA, 21 nt, Artificial Sequence
  Synthetic
  misc_feature (10)..(10): n is a, c, g, or u
  misc_feature (13)..(13): n is a, c, g, or u
cguggucggncgnaacggcag

SEQ ID NO: 81536 - RNA, 22 nt, Artificial Sequence
  Synthetic
  misc_feature (11)..(11): n is a, c, g, or u
  misc_feature (14)..(14): n is a, c, g, or u
ccguggucggncgnaacggcag

SEQ ID NO: 81537 - RNA, 23 nt, Artificial Sequence
  Synthetic
  misc_feature (12)..(12): n is a, c, g, or u
  misc_feature (15)..(15): n is a, c, g, or u
cccguggucggncgnaacggcag

SEQ ID NO: 81538 - RNA, 24 nt, Artificial Sequence
  Synthetic
  misc_feature (13)..(13): n is a, c, g, or u
  misc_feature (16)..(16): n is a, c, g, or u
ccccguggucggncgnaacggcag

SEQ ID NO: 81539 - RNA, 18 nt, Artificial Sequence
  Synthetic
gugcacacgguccggcag

SEQ ID NO: 81540 - RNA, 19 nt, Artificial Sequence
  Synthetic
agugcacacgguccggcag

SEQ ID NO: 81541 - RNA, 20 nt, Artificial Sequence
  Synthetic
aagugcacacgguccggcag

SEQ ID NO: 81542 - RNA, 21 nt, Artificial Sequence
  Synthetic
gaagugcacacgguccggcag

SEQ ID NO: 81543 - RNA, 22 nt, Artificial Sequence
  Synthetic
cgaagugcacacgguccggcag

SEQ ID NO: 81544 - RNA, 23 nt, Artificial Sequence
  Synthetic
gcgaagugcacacgguccggcag

SEQ ID NO: 81545 - RNA, 24 nt, Artificial Sequence
  Synthetic
agcgaagugcacacgguccggcag

SEQ ID NO: 81546 - RNA, 18 nt, Artificial Sequence
  Synthetic
cgcaguauggaucggcag

SEQ ID NO: 81547 - RNA, 19 nt, Artificial Sequence
  Synthetic
ccgcaguauggaucggcag

SEQ ID NO: 81548 - RNA, 20 nt, Artificial Sequence
  Synthetic
uccgcaguauggaucggcag

SEQ ID NO: 81549 - RNA, 21 nt, Artificial Sequence
  Synthetic
uuccgcaguauggaucggcag

SEQ ID NO: 81550 - RNA, 22 nt, Artificial Sequence
  Synthetic
guuccgcaguauggaucggcag

SEQ ID NO: 81551 - RNA, 23 nt, Artificial Sequence
  Synthetic
aguuccgcaguauggaucggcag

SEQ ID NO: 81552 - RNA, 24 nt, Artificial Sequence
  Synthetic
gaguuccgcaguauggaucggcag

SEQ ID NO: 81553 - RNA, 18 nt, Artificial Sequence
  Synthetic
agagaugauuaggcagag

SEQ ID NO: 81554 - RNA, 19 nt, Artificial Sequence
  Synthetic
aagagaugauuaggcagag

SEQ ID NO: 81555 - RNA, 20 nt, Artificial Sequence
  Synthetic
caagagaugauuaggcagag

SEQ ID NO: 81556 - RNA, 21 nt, Artificial Sequence
  Synthetic
acaagagaugauuaggcagag

SEQ ID NO: 81557 - RNA, 22 nt, Artificial Sequence
  Synthetic
aacaagagaugauuaggcagag

SEQ ID NO: 81558 - RNA, 23 nt, Artificial Sequence
  Synthetic
gaacaagagaugauuaggcagag

SEQ ID NO: 81559 - RNA, 24 nt, Artificial Sequence
  Synthetic
ugaacaagagaugauuaggcagag

SEQ ID NO: 81560 - RNA, 18 nt, Artificial Sequence
  Synthetic
uccaugcgacgugcagag

SEQ ID NO: 81561 - RNA, 19 nt, Artificial Sequence
  Synthetic
cuccaugcgacgugcagag

SEQ ID NO: 81562 - RNA, 20 nt, Artificial Sequence
  Synthetic
ucuccaugcgacgugcagag

SEQ ID NO: 81563 - RNA, 21 nt, Artificial Sequence
  Synthetic
gucuccaugcgacgugcagag

SEQ ID NO: 81564 - RNA, 22 nt, Artificial Sequence
  Synthetic
ggucuccaugcgacgugcagag

SEQ ID NO: 81565 - RNA, 23 nt, Artificial Sequence
  Synthetic
uggucuccaugcgacgugcagag

SEQ ID NO: 81566 - RNA, 24 nt, Artificial Sequence
  Synthetic
guggucuccaugcgacgugcagag

SEQ ID NO: 81567 - RNA, 18 nt, Artificial Sequence
  Synthetic
  misc_feature (5)..(5): n is a, c, g, or u
  misc_feature (14)..(14): n is a, c, g, or u
aggcnucccgauanagag

SEQ ID NO: 81568 - RNA, 19 nt, Artificial Sequence
  Synthetic
  misc_feature (6)..(6): n is a, c, g, or u
  misc_feature (15)..(15): n is a, c, g, or u
aaggcnucccgauanagag

SEQ ID NO: 81569 - RNA, 20 nt, Artificial Sequence
  Synthetic
  misc_feature (7)..(7): n is a, c, g, or u
  misc_feature (16)..(16): n is a, c, g, or u
uaaggcnucccgauanagag

SEQ ID NO: 81570 - RNA, 21 nt, Artificial Sequence
  Synthetic
  misc_feature (8)..(8): n is a, c, g, or u
  misc_feature (17)..(17): n is a, c, g, or u
cuaaggcnucccgauanagag

SEQ ID NO: 81571 - RNA, 22 nt, Artificial Sequence
  Synthetic
  misc_feature (9)..(9): n is a, c, g, or u
  misc_feature (18)..(18): n is a, c, g, or u
ucuaaggcnucccgauanagag

SEQ ID NO: 81572 - RNA, 23 nt, Artificial Sequence
  Synthetic
  misc_feature (10)..(10): n is a, c, g, or u
  misc_feature (19)..(19): n is a, c, g, or u
cucuaaggcnucccgauanagag

SEQ ID NO: 81573 - RNA, 24 nt, Artificial Sequence
  Synthetic
  misc_feature (11)..(11): n is a, c, g, or u
  misc_feature (20)..(20): n is a, c, g, or u
acucuaaggcnucccgauanagag

SEQ ID NO: 81574 - RNA, 18 nt, Artificial Sequence
  Synthetic
ccccgccuguaacacgag

SEQ ID NO: 81575 - RNA, 19 nt, Artificial Sequence
  Synthetic
accccgccuguaacacgag

SEQ ID NO: 81576 - RNA, 20 nt, Artificial Sequence
  Synthetic
aaccccgccuguaacacgag

SEQ ID NO: 81577 - RNA, 21 nt, Artificial Sequence
  Synthetic
aaaccccgccuguaacacgag

SEQ ID NO: 81578 - RNA, 22 nt, Artificial Sequence
  Synthetic
aaaaccccgccuguaacacgag

SEQ ID NO: 81579 - RNA, 23 nt, Artificial Sequence
  Synthetic
aaaaaccccgccuguaacacgag

SEQ ID NO: 81580 - RNA, 24 nt, Artificial Sequence
  Synthetic
gaaaaaccccgccuguaacacgag

SEQ ID NO: 81581 - RNA, 18 nt, Artificial Sequence
  Synthetic
gagaccuucgucugcgag

SEQ ID NO: 81582 - RNA, 19 nt, Artificial Sequence
  Synthetic
ugagaccuucgucugcgag

SEQ ID NO: 81583 - RNA, 20 nt, Artificial Sequence
  Synthetic
uugagaccuucgucugcgag

SEQ ID NO: 81584 - RNA, 21 nt, Artificial Sequence
  Synthetic
auugagaccuucgucugcgag

SEQ ID NO: 81585 - RNA, 22 nt, Artificial Sequence
  Synthetic
gauugagaccuucgucugcgag

SEQ ID NO: 81586 - RNA, 23 nt, Artificial Sequence
  Synthetic
cgauugagaccuucgucugcgag

SEQ ID NO: 81587 - RNA, 24 nt, Artificial Sequence
  Synthetic
gcgauugagaccuucgucugcgag

SEQ ID NO: 81588 - RNA, 18 nt, Artificial Sequence
  Synthetic
  misc_feature (1)..(1): n is a, c, g, or u
  misc_feature (4)..(4): n is a, c, g, or u
ncgnaacggcagacggag

SEQ ID NO: 81589 - RNA, 19 nt, Artificial Sequence
  Synthetic
  misc_feature (2)..(2): n is a, c, g, or u
  misc_feature (5)..(5): n is a, c, g, or u
gncgnaacggcagacggag

SEQ ID NO: 81590 - RNA, 20 nt, Artificial Sequence
  Synthetic
  misc_feature (3)..(3): n is a, c, g, or u
  misc_feature (6)..(6): n is a, c, g, or u
ggncgnaacggcagacggag

SEQ ID NO: 81591 - RNA, 21 nt, Artificial Sequence
  Synthetic
  misc_feature (4)..(4): n is a, c, g, or u
  misc_feature (7)..(7): n is a, c, g, or u
cggncgnaacggcagacggag

SEQ ID NO: 81592 - RNA, 22 nt, Artificial Sequence
  Synthetic
  misc_feature (5)..(5): n is a, c, g, or u
  misc_feature (8)..(8): n is a, c, g, or u
ucggncgnaacggcagacggag

SEQ ID NO: 81593 - RNA, 23 nt, Artificial Sequence
  Synthetic
  misc_feature (6)..(6): n is a, c, g, or u
  misc_feature (9)..(9): n is a, c, g, or u
gucggncgnaacggcagacggag

SEQ ID NO: 81594 - RNA, 24 nt, Artificial Sequence
  Synthetic
  misc_feature (7)..(7): n is a, c, g, or u
  misc_feature (10)..(10): n is a, c, g, or u
ggucggncgnaacggcagacggag

SEQ ID NO: 81595 - RNA, 18 nt, Artificial Sequence
  Synthetic
  misc_feature (4)..(4): n is a, c, g, or u
  misc_feature (6)..(6): n is a, c, g, or u
  misc_feature (12)..(12): n is a, c, g, or u
auangngagagncaguag

SEQ ID NO: 81596 - RNA, 19 nt, Artificial Sequence
  Synthetic
  misc_feature (5)..(5): n is a, c, g, or u
  misc_feature (7)..(7): n is a, c, g, or u
  misc_feature (13)..(13): n is a, c, g, or u
gauangngagagncaguag

SEQ ID NO: 81597 - RNA, 20 nt, Artificial Sequence
  Synthetic
  misc_feature (6)..(6): n is a, c, g, or u
  misc_feature (8)..(8): n is a, c, g, or u
  misc_feature (14)..(14): n is a, c, g, or u
cgauangngagagncaguag

SEQ ID NO: 81598 - RNA, 21 nt, Artificial Sequence
  Synthetic
  misc_feature (7)..(7): n is a, c, g, or u
  misc_feature (9)..(9): n is a, c, g, or u
  misc_feature (15)..(15): n is a, c, g, or u
acgauangngagagncaguag

SEQ ID NO: 81599 - RNA, 22 nt, Artificial Sequence
  Synthetic
  misc_feature (8)..(8): n is a, c, g, or u
  misc_feature (10)..(10): n is a, c, g, or u
  misc_feature (16)..(16): n is a, c, g, or u
gacgauangngagagncaguag

SEQ ID NO: 81600 - RNA, 23 nt, Artificial Sequence
  Synthetic
  misc_feature (9)..(9): n is a, c, g, or u
  misc_feature (11)..(11): n is a, c, g, or u
  misc_feature (17)..(17): n is a, c, g, or u
ugacgauangngagagncaguag

SEQ ID NO: 81601 - RNA, 24 nt, Artificial Sequence
  Synthetic
  misc_feature (10)..(10): n is a, c, g, or u
  misc_feature (12)..(12): n is a, c, g, or u
  misc_feature (18)..(18): n is a, c, g, or u
uugacgauangngagagncaguag

SEQ ID NO: 81602 - RNA, 18 nt, Artificial Sequence
  Synthetic
  misc_feature (4)..(4): n is a, c, g, or u
  misc_feature (7)..(7): n is a, c, g, or u
cggncgnaacggcagacg

SEQ ID NO: 81603 - RNA, 19 nt, Artificial Sequence
  Synthetic
  misc_feature (5)..(5): n is a, c, g, or u
  misc_feature (8)..(8): n is a, c, g, or u
ucggncgnaacggcagacg

SEQ ID NO: 81604 - RNA, 20 nt, Artificial Sequence
  Synthetic
  misc_feature (6)..(6): n is a, c, g, or u
  misc_feature (9)..(9): n is a, c, g, or u
gucggncgnaacggcagacg

SEQ ID NO: 81605 - RNA, 21 nt, Artificial Sequence
  Synthetic
  misc_feature (7)..(7): n is a, c, g, or u
  misc_feature (10)..(10): n is a, c, g, or u
ggucggncgnaacggcagacg

SEQ ID NO: 81606 - RNA, 22 nt, Artificial Sequence
  Synthetic
  misc_feature (8)..(8): n is a, c, g, or u
  misc_feature (11)..(11): n is a, c, g, or u
uggucggncgnaacggcagacg

SEQ ID NO: 81607 - RNA, 23 nt, Artificial Sequence
  Synthetic
  misc_feature (9)..(9): n is a, c, g, or u
  misc_feature (12)..(12): n is a, c, g, or u
guggucggncgnaacggcagacg

SEQ ID NO: 81608 - RNA, 24 nt, Artificial Sequence
  Synthetic
  misc_feature (10)..(10): n is a, c, g, or u
  misc_feature (13)..(13): n is a, c, g, or u
cguggucggncgnaacggcagacg

SEQ ID NO: 81609 - RNA, 18 nt, Artificial Sequence
  Synthetic
ccgcgggauucagcgccg

SEQ ID NO: 81610 - RNA, 19 nt, Artificial Sequence
  Synthetic
uccgcgggauucagcgccg

SEQ ID NO: 81611 - RNA, 20 nt, Artificial Sequence
  Synthetic
guccgcgggauucagcgccg

SEQ ID NO: 81612 - RNA, 21 nt, Artificial Sequence
  Synthetic
cguccgcgggauucagcgccg

SEQ ID NO: 81613 - RNA, 22 nt, Artificial Sequence
  Synthetic
ucguccgcgggauucagcgccg

SEQ ID NO: 81614 - RNA, 23 nt, Artificial Sequence
  Synthetic
gucguccgcgggauucagcgccg

SEQ ID NO: 81615 - RNA, 24 nt, Artificial Sequence
  Synthetic
ggucguccgcgggauucagcgccg

SEQ ID NO: 81616 - RNA, 18 nt, Artificial Sequence
  Synthetic
accuucgucugcgaggcg

SEQ ID NO: 81617 - RNA, 19 nt, Artificial Sequence
  Synthetic
gaccuucgucugcgaggcg

SEQ ID NO: 81618 - RNA, 20 nt, Artificial Sequence
  Synthetic
agaccuucgucugcgaggcg

SEQ ID NO: 81619 - RNA, 21 nt, Artificial Sequence
  Synthetic
gagaccuucgucugcgaggcg

SEQ ID NO: 81620 - RNA, 22 nt, Artificial Sequence
  Synthetic
ugagaccuucgucugcgaggcg

SEQ ID NO: 81621 - RNA, 23 nt, Artificial Sequence
  Synthetic
uugagaccuucgucugcgaggcg

SEQ ID NO: 81622 - RNA, 24 nt, Artificial Sequence
  Synthetic
auugagaccuucgucugcgaggcg

SEQ ID NO: 81623 - RNA, 18 nt, Artificial Sequence
  Synthetic
ccaaaaggccuccgugcg

SEQ ID NO: 81624 - RNA, 19 nt, Artificial Sequence
  Synthetic
cccaaaaggccuccgugcg

SEQ ID NO: 81625 - RNA, 20 nt, Artificial Sequence
  Synthetic
ccccaaaaggccuccgugcg

SEQ ID NO: 81626 - RNA, 21 nt, Artificial Sequence
  Synthetic
accccaaaaggccuccgugcg

SEQ ID NO: 81627 - RNA, 22 nt, Artificial Sequence
  Synthetic
caccccaaaaggccuccgugcg

SEQ ID NO: 81628 - RNA, 23 nt, Artificial Sequence
  Synthetic
ccaccccaaaaggccuccgugcg

SEQ ID NO: 81629 - RNA, 24 nt, Artificial Sequence
  Synthetic
uccaccccaaaaggccuccgugcg

SEQ ID NO: 81630 - RNA, 18 nt, Artificial Sequence
  Synthetic
augaguguuucucaaagg

SEQ ID NO: 81631 - RNA, 19 nt, Artificial Sequence
  Synthetic
gaugaguguuucucaaagg

SEQ ID NO: 81632 - RNA, 20 nt, Artificial Sequence
  Synthetic
ggaugaguguuucucaaagg

SEQ ID NO: 81633 - RNA, 21 nt, Artificial Sequence
  Synthetic
aggaugaguguuucucaaagg

SEQ ID NO: 81634 - RNA, 22 nt, Artificial Sequence
  Synthetic
gaggaugaguguuucucaaagg

SEQ ID NO: 81635 - RNA, 23 nt, Artificial Sequence
  Synthetic
ugaggaugaguguuucucaaagg

SEQ ID NO: 81636 - RNA, 24 nt, Artificial Sequence
  Synthetic
cugaggaugaguguuucucaaagg

SEQ ID NO: 81637 - RNA, 18 nt, Artificial Sequence
  Synthetic
augaggcauagcagcagg

SEQ ID NO: 81638 - RNA, 19 nt, Artificial Sequence
  Synthetic
gaugaggcauagcagcagg

SEQ ID NO: 81639 - RNA, 20 nt, Artificial Sequence
  Synthetic
agaugaggcauagcagcagg

SEQ ID NO: 81640 - RNA, 21 nt, Artificial Sequence
  Synthetic
aagaugaggcauagcagcagg

SEQ ID NO: 81641 - RNA, 22 nt, Artificial Sequence
  Synthetic
gaagaugaggcauagcagcagg

SEQ ID NO: 81642 - RNA, 23 nt, Artificial Sequence
  Synthetic
agaagaugaggcauagcagcagg

SEQ ID NO: 81643 - RNA, 24 nt, Artificial Sequence
  Synthetic
aagaagaugaggcauagcagcagg

SEQ ID NO: 81644 - RNA, 18 nt, Artificial Sequence
  Synthetic
uuggugagugauuggagg

SEQ ID NO: 81645 - RNA, 19 nt, Artificial Sequence
  Synthetic
guuggugagugauuggagg

SEQ ID NO: 81646 - RNA, 20 nt, Artificial Sequence
  Synthetic
gguuggugagugauuggagg

SEQ ID NO: 81647 - RNA, 21 nt, Artificial Sequence
  Synthetic
agguuggugagugauuggagg

SEQ ID NO: 81648 - RNA, 22 nt, Artificial Sequence
  Synthetic
gagguuggugagugauuggagg

SEQ ID NO: 81649 - RNA, 23 nt, Artificial Sequence
  Synthetic
ggagguuggugagugauuggagg

SEQ ID NO: 81650 - RNA, 24 nt, Artificial Sequence
  Synthetic
aggagguuggugagugauuggagg

SEQ ID NO: 81651 - RNA, 18 nt, Artificial Sequence
  Synthetic
gaacaagagaugauuagg

SEQ ID NO: 81652 - RNA, 19 nt, Artificial Sequence
  Synthetic
ugaacaagagaugauuagg

SEQ ID NO: 81653 - RNA, 20 nt, Artificial Sequence
  Synthetic
augaacaagagaugauuagg

SEQ ID NO: 81654 - RNA, 21 nt, Artificial Sequence
  Synthetic
caugaacaagagaugauuagg

SEQ ID NO: 81655 - RNA, 22 nt, Artificial Sequence
  Synthetic
acaugaacaagagaugauuagg

SEQ ID NO: 81656 - RNA, 23 nt, Artificial Sequence
  Synthetic
gacaugaacaagagaugauuagg

SEQ ID NO: 81657 - RNA, 24 nt, Artificial Sequence
  Synthetic
ggacaugaacaagagaugauuagg

SEQ ID NO: 81658 - RNA, 18 nt, Artificial Sequence
  Synthetic
aacgauguauauuugcgg

SEQ ID NO: 81659 - RNA, 19 nt, Artificial Sequence
  Synthetic
aaacgauguauauuugcgg

SEQ ID NO: 81660 - RNA, 20 nt, Artificial Sequence
  Synthetic
gaaacgauguauauuugcgg

SEQ ID NO: 81661 - RNA, 21 nt, Artificial Sequence
  Synthetic
ggaaacgauguauauuugcgg

SEQ ID NO: 81662 - RNA, 22 nt, Artificial Sequence
  Synthetic
uggaaacgauguauauuugcgg

SEQ ID NO: 81663 - RNA, 23 nt, Artificial Sequence
  Synthetic
auggaaacgauguauauuugcgg

SEQ ID NO: 81664 - RNA, 24 nt, Artificial Sequence
  Synthetic
cauggaaacgauguauauuugcgg

SEQ ID NO: 81665 - RNA, 18 nt, Artificial Sequence
  Synthetic
uuccgcaguauggaucgg

SEQ ID NO: 81666 - RNA, 19 nt, Artificial Sequence
  Synthetic
guuccgcaguauggaucgg

SEQ ID NO: 81667 - RNA, 20 nt, Artificial Sequence
  Synthetic
aguuccgcaguauggaucgg

SEQ ID NO: 81668 - RNA, 21 nt, Artificial Sequence
  Synthetic
gaguuccgcaguauggaucgg

SEQ ID NO: 81669 - RNA, 22 nt, Artificial Sequence
  Synthetic
ggaguuccgcaguauggaucgg

SEQ ID NO: 81670 - RNA, 23 nt, Artificial Sequence
  Synthetic
aggaguuccgcaguauggaucgg

SEQ ID NO: 81671 - RNA, 24 nt, Artificial Sequence
  Synthetic
uaggaguuccgcaguauggaucgg

SEQ ID NO: 81672 - RNA, 18 nt, Artificial Sequence
  Synthetic
ugagccaggagaaacggg

SEQ ID NO: 81673 - RNA, 19 nt, Artificial Sequence
  Synthetic
cugagccaggagaaacggg

SEQ ID NO: 81674 - RNA, 20 nt, Artificial Sequence
  Synthetic
acugagccaggagaaacggg

SEQ ID NO: 81675 - RNA, 21 nt, Artificial Sequence
  Synthetic
aacugagccaggagaaacggg

SEQ ID NO: 81676 - RNA, 22 nt, Artificial Sequence
  Synthetic
aaacugagccaggagaaacggg

SEQ ID NO: 81677 - RNA, 23 nt, Artificial Sequence
  Synthetic
uaaacugagccaggagaaacggg

SEQ ID NO: 81678 - RNA, 24 nt, Artificial Sequence
  Synthetic
guaaacugagccaggagaaacggg

SEQ ID NO: 81679 - RNA, 18 nt, Artificial Sequence
  Synthetic
  misc_feature (9)..(9): n is a, c, g, or u
aaagcccangaugauggg

SEQ ID NO: 81680 - RNA, 19 nt, Artificial Sequence
  Synthetic
  misc_feature (10)..(10): n is a, c, g, or u
gaaagcccangaugauggg

SEQ ID NO: 81681 - RNA, 20 nt, Artificial Sequence
  Synthetic
  misc_feature (11)..(11): n is a, c, g, or u
cgaaagcccangaugauggg

SEQ ID NO: 81682 - RNA, 21 nt, Artificial Sequence
  Synthetic
  misc_feature (12)..(12): n is a, c, g, or u
ccgaaagcccangaugauggg

SEQ ID NO: 81683 - RNA, 22 nt, Artificial Sequence
  Synthetic
  misc_feature (13)..(13): n is a, c, g, or u
uccgaaagcccangaugauggg

SEQ ID NO: 81684 - RNA, 23 nt, Artificial Sequence
  Synthetic
  misc_feature (14)..(14): n is a, c, g, or u
uuccgaaagcccangaugauggg

SEQ ID NO: 81685 - RNA, 24 nt, Artificial Sequence
  Synthetic
  misc_feature (15)..(15): n is a, c, g, or u
uuuccgaaagcccangaugauggg

SEQ ID NO: 81686 - RNA, 18 nt, Artificial Sequence
  Synthetic
aggccuccgugcgguggg

SEQ ID NO: 81687 - RNA, 19 nt, Artificial Sequence
  Synthetic
aaggccuccgugcgguggg

SEQ ID NO: 81688 - RNA, 20 nt, Artificial Sequence
  Synthetic
aaaggccuccgugcgguggg

SEQ ID NO: 81689 - RNA, 21 nt, Artificial Sequence
  Synthetic
aaaaggccuccgugcgguggg

SEQ ID NO: 81690 - RNA, 22 nt, Artificial Sequence
  Synthetic
caaaaggccuccgugcgguggg

SEQ ID NO: 81691 - RNA, 23 nt, Artificial Sequence
  Synthetic
ccaaaaggccuccgugcgguggg

SEQ ID NO: 81692 - RNA, 24 nt, Artificial Sequence
  Synthetic
cccaaaaggccuccgugcgguggg

SEQ ID NO: 81693 - RNA, 18 nt, Artificial Sequence
  Synthetic
aucccagaggauugcugg

SEQ ID NO: 81694 - RNA, 19 nt, Artificial Sequence
  Synthetic
aaucccagaggauugcugg

SEQ ID NO: 81695 - RNA, 20 nt, Artificial Sequence
  Synthetic
gaaucccagaggauugcugg

SEQ ID NO: 81696 - RNA, 21 nt, Artificial Sequence
  Synthetic
agaaucccagaggauugcugg

SEQ ID NO: 81697 - RNA, 22 nt, Artificial Sequence
  Synthetic
aagaaucccagaggauugcugg

SEQ ID NO: 81698 - RNA, 23 nt, Artificial Sequence
  Synthetic
aaagaaucccagaggauugcugg

SEQ ID NO: 81699 - RNA, 24 nt, Artificial Sequence
  Synthetic
gaaagaaucccagaggauugcugg

SEQ ID NO: 81700 - RNA, 18 nt, Artificial Sequence
  Synthetic
cugaaagccaaacagugg

SEQ ID NO: 81701 - RNA, 19 nt, Artificial Sequence
  Synthetic
acugaaagccaaacagugg

SEQ ID NO: 81702 - RNA, 20 nt, Artificial Sequence
  Synthetic
aacugaaagccaaacagugg

SEQ ID NO: 81703 - RNA, 21 nt, Artificial Sequence
  Synthetic
uaacugaaagccaaacagugg

SEQ ID NO: 81704 - RNA, 22 nt, Artificial Sequence
  Synthetic
auaacugaaagccaaacagugg

SEQ ID NO: 81705 - RNA, 23 nt, Artificial Sequence
  Synthetic
uauaacugaaagccaaacagugg

SEQ ID NO: 81706 - RNA, 24 nt, Artificial Sequence
  Synthetic
auauaacugaaagccaaacagugg

SEQ ID NO: 81707 - RNA, 18 nt, Artificial Sequence
  Synthetic
gcuggauccaacuggugg

SEQ ID NO: 81708 - RNA, 19 nt, Artificial Sequence
  Synthetic
ggcuggauccaacuggugg

SEQ ID NO: 81709 - RNA, 20 nt, Artificial Sequence
  Synthetic
aggcuggauccaacuggugg

SEQ ID NO: 81710 - RNA, 21 nt, Artificial Sequence
  Synthetic
aaggcuggauccaacuggugg

SEQ ID NO: 81711 - RNA, 22 nt, Artificial Sequence
  Synthetic
gaaggcuggauccaacuggugg

SEQ ID NO: 81712 - RNA, 23 nt, Artificial Sequence
  Synthetic
ugaaggcuggauccaacuggugg

SEQ ID NO: 81713 - RNA, 24 nt, Artificial Sequence
  Synthetic
cugaaggcuggauccaacuggugg

SEQ ID NO: 81714 - RNA, 18 nt, Artificial Sequence
  Synthetic
ggaucuugcagaguuugg

SEQ ID NO: 81715 - RNA, 19 nt, Artificial Sequence
  Synthetic
gggaucuugcagaguuugg

SEQ ID NO: 81716 - RNA, 20 nt, Artificial Sequence
  Synthetic
ugggaucuugcagaguuugg

SEQ ID NO: 81717 - RNA, 21 nt, Artificial Sequence
  Synthetic
cugggaucuugcagaguuugg

SEQ ID NO: 81718 - RNA, 22 nt, Artificial Sequence
  Synthetic
  misc_feature (1)..(1): n is a, c, g, or u
ncugggaucuugcagaguuugg

SEQ ID NO: 81719 - RNA, 23 nt, Artificial Sequence
  Synthetic
  misc_feature (2)..(2): n is a, c, g, or u
cncugggaucuugcagaguuugg

SEQ ID NO: 81720 - RNA, 24 nt, Artificial Sequence
  Synthetic
  misc_feature (3)..(3): n is a, c, g, or u
acncugggaucuugcagaguuugg

SEQ ID NO: 81721 - RNA, 18 nt, Artificial Sequence
  Synthetic
  misc_feature (14)..(14): n is a, c, g, or u
  misc_feature (17)..(17): n is a, c, g, or u
acuggcgauuggungang

SEQ ID NO: 81722 - RNA, 19 nt, Artificial Sequence
  Synthetic
  misc_feature (15)..(15): n is a, c, g, or u
  misc_feature (18)..(18): n is a, c, g, or u
gacuggcgauuggungang

SEQ ID NO: 81723 - RNA, 20 nt, Artificial Sequence
  Synthetic
  misc_feature (16)..(16): n is a, c, g, or u
  misc_feature (19)..(19): n is a, c, g, or u
ugacuggcgauuggungang

SEQ ID NO: 81724 - RNA, 21 nt, Artificial Sequence
  Synthetic
  misc_feature (17)..(17): n is a, c, g, or u
  misc_feature (20)..(20): n is a, c, g, or u
cugacuggcgauuggungang

SEQ ID NO: 81725 - RNA, 22 nt, Artificial Sequence
  Synthetic
  misc_feature (18)..(18): n is a, c, g, or u
  misc_feature (21)..(21): n is a, c, g, or u
ccugacuggcgauuggungang

SEQ ID NO: 81726 - RNA, 23 nt, Artificial Sequence
  Synthetic
  misc_feature (19)..(19): n is a, c, g, or u
  misc_feature (22)..(22): n is a, c, g, or u
uccugacuggcgauuggungang

SEQ ID NO: 81727 - RNA, 24 nt, Artificial Sequence
  Synthetic
  misc_feature (20)..(20): n is a, c, g, or u
  misc_feature (23)..(23): n is a, c, g, or u
uuccugacuggcgauuggungang

SEQ ID NO: 81728 - RNA, 18 nt, Artificial Sequence
  Synthetic
  misc_feature (2)..(2): n is a, c, g, or u
  misc_feature (17)..(17): n is a, c, g, or u
cnagaagaucucguacng

SEQ ID NO: 81729 - RNA, 19 nt, Artificial Sequence
  Synthetic
  misc_feature (3)..(3): n is a, c, g, or u
  misc_feature (18)..(18): n is a, c, g, or u
ucnagaagaucucguacng

SEQ ID NO: 81730 - RNA, 20 nt, Artificial Sequence
  Synthetic
  misc_feature (4)..(4): n is a, c, g, or u
  misc_feature (19)..(19): n is a, c, g, or u
aucnagaagaucucguacng

SEQ ID NO: 81731 - RNA, 21 nt, Artificial Sequence
  Synthetic
  misc_feature (5)..(5): n is a, c, g, or u
  misc_feature (20)..(20): n is a, c, g, or u
uaucnagaagaucucguacng

SEQ ID NO: 81732 - RNA, 22 nt, Artificial Sequence
  Synthetic
  misc_feature (6)..(6): n is a, c, g, or u
  misc_feature (21)..(21): n is a, c, g, or u
guaucnagaagaucucguacng

SEQ ID NO: 81733 - RNA, 23 nt, Artificial Sequence
  Synthetic
  misc_feature (7)..(7): n is a, c, g, or u
  misc_feature (22)..(22): n is a, c, g, or u
gguaucnagaagaucucguacng

SEQ ID NO: 81734 - RNA, 24 nt, Artificial Sequence
  Synthetic
  misc_feature (8)..(8): n is a, c, g, or u
  misc_feature (23)..(23): n is a, c, g, or u
cgguaucnagaagaucucguacng

SEQ ID NO: 81735 - RNA, 18 nt, Artificial Sequence
  Synthetic
aggcauagcagcaggaug

SEQ ID NO: 81736 - RNA, 19 nt, Artificial Sequence
  Synthetic
gaggcauagcagcaggaug

SEQ ID NO: 81737 - RNA, 20 nt, Artificial Sequence
  Synthetic
ugaggcauagcagcaggaug

SEQ ID NO: 81738 - RNA, 21 nt, Artificial Sequence
  Synthetic
augaggcauagcagcaggaug

SEQ ID NO: 81739 - RNA, 22 nt, Artificial Sequence
  Synthetic
gaugaggcauagcagcaggaug

SEQ ID NO: 81740 - RNA, 23 nt, Artificial Sequence
  Synthetic
agaugaggcauagcagcaggaug

SEQ ID NO: 81741 - RNA, 24 nt, Artificial Sequence
  Synthetic
aagaugaggcauagcagcaggaug

SEQ ID NO: 81742 - RNA, 18 nt, Artificial Sequence
  Synthetic
  misc_feature (14)..(14): n is a, c, g, or u
uuccgaaagcccangaug

SEQ ID NO: 81743 - RNA, 19 nt, Artificial Sequence
  Synthetic
  misc_feature (15)..(15): n is a, c, g, or u
uuuccgaaagcccangaug

SEQ ID NO: 81744 - RNA, 20 nt, Artificial Sequence
  Synthetic
  misc_feature (16)..(16): n is a, c, g, or u
uuuuccgaaagcccangaug

SEQ ID NO: 81745 - RNA, 21 nt, Artificial Sequence
  Synthetic
  misc_feature (17)..(17): n is a, c, g, or u
auuuuccgaaagcccangaug

SEQ ID NO: 81746 - RNA, 22 nt, Artificial Sequence
  Synthetic
  misc_feature (18)..(18): n is a, c, g, or u
aauuuuccgaaagcccangaug

SEQ ID NO: 81747 - RNA, 23 nt, Artificial Sequence
  Synthetic
  misc_feature (19)..(19): n is a, c, g, or u
gaauuuuccgaaagcccangaug

SEQ ID NO: 81748 - RNA, 24 nt, Artificial Sequence
  Synthetic
  misc_feature (20)..(20): n is a, c, g, or u
ggaauuuuccgaaagcccangaug

SEQ ID NO: 81749 - RNA, 18 nt, Artificial Sequence
  Synthetic
uugccugagugcaguaug

SEQ ID NO: 81750 - RNA, 19 nt, Artificial Sequence
  Synthetic
cuugccugagugcaguaug

SEQ ID NO: 81751 - RNA, 20 nt, Artificial Sequence
  Synthetic
gcuugccugagugcaguaug

SEQ ID NO: 81752 - RNA, 21 nt, Artificial Sequence
  Synthetic
ugcuugccugagugcaguaug

SEQ ID NO: 81753 - RNA, 22 nt, Artificial Sequence
  Synthetic
uugcuugccugagugcaguaug

SEQ ID NO: 81754 - RNA, 23 nt, Artificial Sequence
  Synthetic
auugcuugccugagugcaguaug

SEQ ID NO: 81755 - RNA, 24 nt, Artificial Sequence
  Synthetic
  misc_feature (1)..(1): n is a, c, g, or u
nauugcuugccugagugcaguaug

SEQ ID NO: 81756 - RNA, 18 nt, Artificial Sequence
  Synthetic
  misc_feature (2)..(2): n is a, c, g, or u
ungguggucuauaagcug

SEQ ID NO: 81757 - RNA, 19 nt, Artificial Sequence
  Synthetic
  misc_feature (3)..(3): n is a, c, g, or u
uungguggucuauaagcug

SEQ ID NO: 81758 - RNA, 20 nt, Artificial Sequence
  Synthetic
  misc_feature (4)..(4): n is a, c, g, or u
auungguggucuauaagcug

SEQ ID NO: 81759 - RNA, 21 nt, Artificial Sequence
  Synthetic
  misc_feature (5)..(5): n is a, c, g, or u
cauungguggucuauaagcug

SEQ ID NO: 81760 - RNA, 22 nt, Artificial Sequence
  Synthetic
  misc_feature (6)..(6): n is a, c, g, or u
gcauungguggucuauaagcug

SEQ ID NO: 81761 - RNA, 23 nt, Artificial Sequence
  Synthetic
  misc_feature (7)..(7): n is a, c, g, or u
ggcauungguggucuauaagcug

SEQ ID NO: 81762 - RNA, 24 nt, Artificial Sequence
  Synthetic
  misc_feature (8)..(8): n is a, c, g, or u
gggcauungguggucuauaagcug

SEQ ID NO: 81763 - RNA, 18 nt, Artificial Sequence
  Synthetic
aaucccagaggauugcug

SEQ ID NO: 81764 - RNA, 19 nt, Artificial Sequence
  Synthetic
gaaucccagaggauugcug

SEQ ID NO: 81765 - RNA, 20 nt, Artificial Sequence
  Synthetic
agaaucccagaggauugcug

SEQ ID NO: 81766 - RNA, 21 nt, Artificial Sequence
  Synthetic
aagaaucccagaggauugcug

SEQ ID NO: 81767 - RNA, 22 nt, Artificial Sequence
  Synthetic
aaagaaucccagaggauugcug

SEQ ID NO: 81768 - RNA, 23 nt, Artificial Sequence
  Synthetic
gaaagaaucccagaggauugcug

SEQ ID NO: 81769 - RNA, 24 nt, Artificial Sequence
  Synthetic
ggaaagaaucccagaggauugcug

SEQ ID NO: 81770 - RNA, 18 nt, Artificial Sequence
  Synthetic
acugaaagccaaacagug

SEQ ID NO: 81771 - RNA, 19 nt, Artificial Sequence
  Synthetic
aacugaaagccaaacagug

SEQ ID NO: 81772 - RNA, 20 nt, Artificial Sequence
  Synthetic
uaacugaaagccaaacagug

SEQ ID NO: 81773 - RNA, 21 nt, Artificial Sequence
  Synthetic
auaacugaaagccaaacagug

SEQ ID NO: 81774 - RNA, 22 nt, Artificial Sequence
  Synthetic
uauaacugaaagccaaacagug

SEQ ID NO: 81775 - RNA, 23 nt, Artificial Sequence
  Synthetic
auauaacugaaagccaaacagug

SEQ ID NO: 81776 - RNA, 24 nt, Artificial Sequence
  Synthetic
cauauaacugaaagccaaacagug

SEQ ID NO: 81777 - RNA, 18 nt, Artificial Sequence
  Synthetic
uggucuccaugcgacgug

SEQ ID NO: 81778 - RNA, 19 nt, Artificial Sequence
  Synthetic
guggucuccaugcgacgug

SEQ ID NO: 81779 - RNA, 20 nt, Artificial Sequence
  Synthetic
gguggucuccaugcgacgug

SEQ ID NO: 81780 - RNA, 21 nt, Artificial Sequence
  Synthetic
cgguggucuccaugcgacgug

SEQ ID NO: 81781 - RNA, 22 nt, Artificial Sequence
  Synthetic
acgguggucuccaugcgacgug

SEQ ID NO: 81782 - RNA, 23 nt, Artificial Sequence
  Synthetic
cacgguggucuccaugcgacgug

SEQ ID NO: 81783 - RNA, 24 nt, Artificial Sequence
  Synthetic
ucacgguggucuccaugcgacgug

SEQ ID NO: 81784 - RNA, 18 nt, Artificial Sequence
  Synthetic
  misc_feature (15)..(16): n is a, c, g, or u
gaccuugggcaagannug

SEQ ID NO: 81785 - RNA, 19 nt, Artificial Sequence
  Synthetic
  misc_feature (16)..(17): n is a, c, g, or u
agaccuugggcaagannug

SEQ ID NO: 81786 - RNA, 20 nt, Artificial Sequence
  Synthetic
  misc_feature (17)..(18): n is a, c, g, or u
aagaccuugggcaagannug

SEQ ID NO: 81787 - RNA, 21 nt, Artificial Sequence
  Synthetic
  misc_feature (18)..(19): n is a, c, g, or u
uaagaccuugggcaagannug

SEQ ID NO: 81788 - RNA, 22 nt, Artificial Sequence
  Synthetic
  misc_feature (19)..(20): n is a, c, g, or u
guaagaccuugggcaagannug

SEQ ID NO: 81789 - RNA, 23 nt, Artificial Sequence
  Synthetic
  misc_feature (20)..(21): n is a, c, g, or u
uguaagaccuugggcaagannug

SEQ ID NO: 81790 - RNA, 24 nt, Artificial Sequence
  Synthetic
  misc_feature (21)..(22): n is a, c, g, or u
auguaagaccuugggcaagannug

SEQ ID NO: 81791 - RNA, 18 nt, Artificial Sequence
  Synthetic
ucuggccagguguccuug

SEQ ID NO: 81792 - RNA, 19 nt, Artificial Sequence
  Synthetic
gucuggccagguguccuug

SEQ ID NO: 81793 - RNA, 20 nt, Artificial Sequence
  Synthetic
cgucuggccagguguccuug

SEQ ID NO: 81794 - RNA, 21 nt, Artificial Sequence
  Synthetic
gcgucuggccagguguccuug

SEQ ID NO: 81795 - RNA, 22 nt, Artificial Sequence
  Synthetic
ggcgucuggccagguguccuug

SEQ ID NO: 81796 - RNA, 23 nt, Artificial Sequence
  Synthetic
uggcgucuggccagguguccuug

SEQ ID NO: 81797 - RNA, 24 nt, Artificial Sequence
  Synthetic
uuggcgucuggccagguguccuug

SEQ ID NO: 81798 - RNA, 18 nt, Artificial Sequence
  Synthetic
gauaaccaggacaaguug

SEQ ID NO: 81799 - RNA, 19 nt, Artificial Sequence
  Synthetic
cgauaaccaggacaaguug

SEQ ID NO: 81800 - RNA, 20 nt, Artificial Sequence
  Synthetic
gcgauaaccaggacaaguug

SEQ ID NO: 81801 - RNA, 21 nt, Artificial Sequence
  Synthetic
agcgauaaccaggacaaguug

SEQ ID NO: 81802 - RNA, 22 nt, Artificial Sequence
  Synthetic
cagcgauaaccaggacaaguug

SEQ ID NO: 81803 - RNA, 23 nt, Artificial Sequence
  Synthetic
ccagcgauaaccaggacaaguug

SEQ ID NO: 81804 - RNA, 24 nt, Artificial Sequence
  Synthetic
uccagcgauaaccaggacaaguug

SEQ ID NO: 81805 - RNA, 18 nt, Artificial Sequence
  Synthetic
gaaaggccuuguaaguug

SEQ ID NO: 81806 - RNA, 19 nt, Artificial Sequence
  Synthetic
agaaaggccuuguaaguug

SEQ ID NO: 81807 - RNA, 20 nt, Artificial Sequence
  Synthetic
cagaaaggccuuguaaguug

SEQ ID NO: 81808 - RNA, 21 nt, Artificial Sequence
  Synthetic
acagaaaggccuuguaaguug

SEQ ID NO: 81809 - RNA, 22 nt, Artificial Sequence
  Synthetic
cacagaaaggccuuguaaguug

SEQ ID NO: 81810 - RNA, 23 nt, Artificial Sequence
  Synthetic
acacagaaaggccuuguaaguug

SEQ ID NO: 81811 - RNA, 24 nt, Artificial Sequence
  Synthetic
uacacagaaaggccuuguaaguug

SEQ ID NO: 81812 - RNA, 18 nt, Artificial Sequence
  Synthetic
gcacagaccuggccguug

SEQ ID NO: 81813 - RNA, 19 nt, Artificial Sequence
  Synthetic
ggcacagaccuggccguug

SEQ ID NO: 81814 - RNA, 20 nt, Artificial Sequence
  Synthetic
uggcacagaccuggccguug

SEQ ID NO: 81815 - RNA, 21 nt, Artificial Sequence
  Synthetic
uuggcacagaccuggccguug

SEQ ID NO: 81816 - RNA, 22 nt, Artificial Sequence
  Synthetic
cuuggcacagaccuggccguug

SEQ ID NO: 81817 - RNA, 23 nt, Artificial Sequence
  Synthetic
acuuggcacagaccuggccguug

SEQ ID NO: 81818 - RNA, 24 nt, Artificial Sequence
  Synthetic
cacuuggcacagaccuggccguug

SEQ ID NO: 81819 - RNA, 18 nt, Artificial Sequence
  Synthetic
gaguuugguggaagguug

SEQ ID NO: 81820 - RNA, 19 nt, Artificial Sequence
  Synthetic
agaguuugguggaagguug

SEQ ID NO: 81821 - RNA, 20 nt, Artificial Sequence
  Synthetic
cagaguuugguggaagguug

SEQ ID NO: 81822 - RNA, 21 nt, Artificial Sequence
  Synthetic
gcagaguuugguggaagguug

SEQ ID NO: 81823 - RNA, 22 nt, Artificial Sequence
  Synthetic
ugcagaguuugguggaagguug

SEQ ID NO: 81824 - RNA, 23 nt, Artificial Sequence
  Synthetic
uugcagaguuugguggaagguug

SEQ ID NO: 81825 - RNA, 24 nt, Artificial Sequence
  Synthetic
cuugcagaguuugguggaagguug

SEQ ID NO: 81826 - RNA, 18 nt, Artificial Sequence
  Synthetic
ggaaacgauguauauuug

SEQ ID NO: 81827 - RNA, 19 nt, Artificial Sequence
  Synthetic
uggaaacgauguauauuug

SEQ ID NO: 81828 - RNA, 20 nt, Artificial Sequence
  Synthetic
auggaaacgauguauauuug

SEQ ID NO: 81829 - RNA, 21 nt, Artificial Sequence
  Synthetic
cauggaaacgauguauauuug

SEQ ID NO: 81830 - RNA, 22 nt, Artificial Sequence
  Synthetic
ccauggaaacgauguauauuug

SEQ ID NO: 81831 - RNA, 23 nt, Artificial Sequence
  Synthetic
gccauggaaacgauguauauuug

SEQ ID NO: 81832 - RNA, 24 nt, Artificial Sequence
  Synthetic
agccauggaaacgauguauauuug

SEQ ID NO: 81833 - RNA, 18 nt, Artificial Sequence
  Synthetic
gggaucuugcagaguuug

SEQ ID NO: 81834 - RNA, 19 nt, Artificial Sequence
  Synthetic
ugggaucuugcagaguuug

SEQ ID NO: 81835 - RNA, 20 nt, Artificial Sequence
  Synthetic
cugggaucuugcagaguuug

SEQ ID NO: 81836 - RNA, 21 nt, Artificial Sequence
  Synthetic
  misc_feature (1)..(1): n is a, c, g, or u
ncugggaucuugcagaguuug

SEQ ID NO: 81837 - RNA, 22 nt, Artificial Sequence
  Synthetic
  misc_feature (2)..(2): n is a, c, g, or u
cncugggaucuugcagaguuug

SEQ ID NO: 81838 - RNA, 23 nt, Artificial Sequence
  Synthetic
  misc_feature (3)..(3): n is a, c, g, or u
acncugggaucuugcagaguuug

SEQ ID NO: 81839 - RNA, 24 nt, Artificial Sequence
  Synthetic
  misc_feature (4)..(4): n is a, c, g, or u
cacncugggaucuugcagaguuug

SEQ ID NO: 81840 - RNA, 18 nt, Artificial Sequence
  Synthetic
  misc_feature (18)..(18): n is a, c, g, or u
cgagaagauugacgauan

SEQ ID NO: 81841 - RNA, 19 nt, Artificial Sequence
  Synthetic
  misc_feature (19)..(19): n is a, c, g, or u
ucgagaagauugacgauan

SEQ ID NO: 81842 - RNA, 20 nt, Artificial Sequence
  Synthetic
  misc_feature (20)..(20): n is a, c, g, or u
cucgagaagauugacgauan

SEQ ID NO: 81843 - RNA, 21 nt, Artificial Sequence
  Synthetic
  misc_feature (21)..(21): n is a, c, g, or u
ccucgagaagauugacgauan

SEQ ID NO: 81844 - RNA, 22 nt, Artificial Sequence
  Synthetic
  misc_feature (22)..(22): n is a, c, g, or u
uccucgagaagauugacgauan

SEQ ID NO: 81845 - RNA, 23 nt, Artificial Sequence
  Synthetic
  misc_feature (23)..(23): n is a, c, g, or u
auccucgagaagauugacgauan

SEQ ID NO: 81846 - RNA, 24 nt, Artificial Sequence
  Synthetic
  misc_feature (24)..(24): n is a, c, g, or u
aauccucgagaagauugacgauan

SEQ ID NO: 81847 - RNA, 18 nt, Artificial Sequence
  Synthetic
  misc_feature (18)..(18): n is a, c, g, or u
aaauacaggccucucacn

SEQ ID NO: 81848 - RNA, 19 nt, Artificial Sequence
  Synthetic
  misc_feature (19)..(19): n is a, c, g, or u
gaaauacaggccucucacn

SEQ ID NO: 81849 - RNA, 20 nt, Artificial Sequence
  Synthetic
  misc_feature (20)..(20): n is a, c, g, or u
ggaaauacaggccucucacn

SEQ ID NO: 81850 - RNA, 21 nt, Artificial Sequence
  Synthetic
  misc_feature (21)..(21): n is a, c, g, or u
gggaaauacaggccucucacn

SEQ ID NO: 81851 - RNA, 22 nt, Artificial Sequence
  Synthetic
  misc_feature (22)..(22): n is a, c, g, or u
agggaaauacaggccucucacn

SEQ ID NO: 81852 - RNA, 23 nt, Artificial Sequence
  Synthetic
  misc_feature (23)..(23): n is a, c, g, or u
cagggaaauacaggccucucacn

SEQ ID NO: 81853 - RNA, 24 nt, Artificial Sequence
  Synthetic
  misc_feature (24)..(24): n is a, c, g, or u
gcagggaaauacaggccucucacn

SEQ ID NO: 81854 - RNA, 18 nt, Artificial Sequence
  Synthetic
  misc_feature (16)..(16): n is a, c, g, or u
  misc_feature (18)..(18): n is a, c, g, or u
agaagauugacgauangn

SEQ ID NO: 81855 - RNA, 19 nt, Artificial Sequence
  Synthetic
  misc_feature (17)..(17): n is a, c, g, or u
  misc_feature (19)..(19): n is a, c, g, or u
gagaagauugacgauangn

SEQ ID NO: 81856 - RNA, 20 nt, Artificial Sequence
  Synthetic
  misc_feature (18)..(18): n is a, c, g, or u
  misc_feature (20)..(20): n is a, c, g, or u
cgagaagauugacgauangn

SEQ ID NO: 81857 - RNA, 21 nt, Artificial Sequence
  Synthetic
  misc_feature (19)..(19): n is a, c, g, or u
  misc_feature (21)..(21): n is a, c, g, or u
ucgagaagauugacgauangn

SEQ ID NO: 81858 - RNA, 22 nt, Artificial Sequence
  Synthetic
  misc_feature (20)..(20): n is a, c, g, or u
  misc_feature (22)..(22): n is a, c, g, or u
cucgagaagauugacgauangn

SEQ ID NO: 81859 - RNA, 23 nt, Artificial Sequence
  Synthetic
  misc_feature (21)..(21): n is a, c, g, or u
  misc_feature (23)..(23): n is a, c, g, or u
ccucgagaagauugacgauangn

SEQ ID NO: 81860 - RNA, 24 nt, Artificial Sequence
  Synthetic
  misc_feature (22)..(22): n is a, c, g, or u
  misc_feature (24)..(24): n is a, c, g, or u
uccucgagaagauugacgauangn

SEQ ID NO: 81861 - RNA, 18 nt, Artificial Sequence
  Synthetic
  misc_feature (18)..(18): n is a, c, g, or u
ggucggucguugacauun

SEQ ID NO: 81862 - RNA, 19 nt, Artificial Sequence
  Synthetic
  misc_feature (19)..(19): n is a, c, g, or u
aggucggucguugacauun

SEQ ID NO: 81863 - RNA, 20 nt, Artificial Sequence
  Synthetic
  misc_feature (20)..(20): n is a, c, g, or u
aaggucggucguugacauun

SEQ ID NO: 81864 - RNA, 21 nt, Artificial Sequence
  Synthetic
  misc_feature (21)..(21): n is a, c, g, or u
caaggucggucguugacauun

SEQ ID NO: 81865 - RNA, 22 nt, Artificial Sequence
  Synthetic
  misc_feature (22)..(22): n is a, c, g, or u
ucaaggucggucguugacauun

SEQ ID NO: 81866 - RNA, 23 nt, Artificial Sequence
  Synthetic
  misc_feature (23)..(23): n is a, c, g, or u
cucaaggucggucguugacauun

SEQ ID NO: 81867 - RNA, 24 nt, Artificial Sequence
  Synthetic
  misc_feature (24)..(24): n is a, c, g, or u
ccucaaggucggucguugacauun

SEQ ID NO: 81868 - RNA, 18 nt, Artificial Sequence
  Synthetic
aaaagugagacaagaaau

SEQ ID NO: 81869 - RNA, 19 nt, Artificial Sequence
  Synthetic
caaaagugagacaagaaau

SEQ ID NO: 81870 - RNA, 20 nt, Artificial Sequence
  Synthetic
ccaaaagugagacaagaaau

SEQ ID NO: 81871 - RNA, 21 nt, Artificial Sequence
  Synthetic
uccaaaagugagacaagaaau

SEQ ID NO: 81872 - RNA, 22 nt, Artificial Sequence
  Synthetic
uuccaaaagugagacaagaaau

SEQ ID NO: 81873 - RNA, 23 nt, Artificial Sequence
  Synthetic
cuuccaaaagugagacaagaaau

SEQ ID NO: 81874 - RNA, 24 nt, Artificial Sequence
  Synthetic
ucuuccaaaagugagacaagaaau

SEQ ID NO: 81875 - RNA, 18 nt, Artificial Sequence
  Synthetic
  misc_feature (1)..(1): n is a, c, g, or u
  misc_feature (7)..(7): n is a, c, g, or u
nguugangauccuggaau

SEQ ID NO: 81876 - RNA, 19 nt, Artificial Sequence
  Synthetic
  misc_feature (2)..(2): n is a, c, g, or u
  misc_feature (8)..(8): n is a, c, g, or u
unguugangauccuggaau

SEQ ID NO: 81877 - RNA, 20 nt, Artificial Sequence
  Synthetic
  misc_feature (3)..(3): n is a, c, g, or u
  misc_feature (9)..(9): n is a, c, g, or u
gunguugangauccuggaau

SEQ ID NO: 81878 - RNA, 21 nt, Artificial Sequence
  Synthetic
  misc_feature (4)..(4): n is a, c, g, or u
  misc_feature (10)..(10): n is a, c, g, or u
ggunguugangauccuggaau

SEQ ID NO: 81879 - RNA, 22 nt, Artificial Sequence
  Synthetic
  misc_feature (5)..(5): n is a, c, g, or u
  misc_feature (11)..(11): n is a, c, g, or u
uggunguugangauccuggaau

SEQ ID NO: 81880 - RNA, 23 nt, Artificial Sequence
  Synthetic
  misc_feature (6)..(6): n is a, c, g, or u
  misc_feature (12)..(12): n is a, c, g, or u
cuggunguugangauccuggaau

SEQ ID NO: 81881 - RNA, 24 nt, Artificial Sequence
  Synthetic
  misc_feature (7)..(7): n is a, c, g, or u
  misc_feature (13)..(13): n is a, c, g, or u
gcuggunguugangauccuggaau

SEQ ID NO: 81882 - RNA, 18 nt, Artificial Sequence
  Synthetic
cggaaguguugauaagau

SEQ ID NO: 81883 - RNA, 19 nt, Artificial Sequence
  Synthetic
ccggaaguguugauaagau

SEQ ID NO: 81884 - RNA, 20 nt, Artificial Sequence
  Synthetic
uccggaaguguugauaagau

SEQ ID NO: 81885 - RNA, 21 nt, Artificial Sequence
  Synthetic
cuccggaaguguugauaagau

SEQ ID NO: 81886 - RNA, 22 nt, Artificial Sequence
  Synthetic
ucuccggaaguguugauaagau

SEQ ID NO: 81887 - RNA, 23 nt, Artificial Sequence
  Synthetic
gucuccggaaguguugauaagau

SEQ ID NO: 81888 - RNA, 24 nt, Artificial Sequence
  Synthetic
agucuccggaaguguugauaagau

SEQ ID NO: 81889 - RNA, 18 nt, Artificial Sequence
  Synthetic
gcacacgguccggcagau

SEQ ID NO: 81890 - RNA, 19 nt, Artificial Sequence
  Synthetic
ugcacacgguccggcagau

SEQ ID NO: 81891 - RNA, 20 nt, Artificial Sequence
  Synthetic
gugcacacgguccggcagau

SEQ ID NO: 81892 - RNA, 21 nt, Artificial Sequence
  Synthetic
agugcacacgguccggcagau

SEQ ID NO: 81893 - RNA, 22 nt, Artificial Sequence
  Synthetic
aagugcacacgguccggcagau

SEQ ID NO: 81894 - RNA, 23 nt, Artificial Sequence
  Synthetic
gaagugcacacgguccggcagau

SEQ ID NO: 81895 - RNA, 24 nt, Artificial Sequence
  Synthetic
cgaagugcacacgguccggcagau

SEQ ID NO: 81896 - RNA, 18 nt, Artificial Sequence
  Synthetic
aggagguuggugagugau

SEQ ID NO: 81897 - RNA, 19 nt, Artificial Sequence
  Synthetic
caggagguuggugagugau

SEQ ID NO: 81898 - RNA, 20 nt, Artificial Sequence
  Synthetic
acaggagguuggugagugau

SEQ ID NO: 81899 - RNA, 21 nt, Artificial Sequence
  Synthetic
gacaggagguuggugagugau

SEQ ID NO: 81900 - RNA, 22 nt, Artificial Sequence
  Synthetic
ggacaggagguuggugagugau

SEQ ID NO: 81901 - RNA, 23 nt, Artificial Sequence
  Synthetic
aggacaggagguuggugagugau

SEQ ID NO: 81902 - RNA, 24 nt, Artificial Sequence
  Synthetic
gaggacaggagguuggugagugau

SEQ ID NO: 81903 - RNA, 18 nt, Artificial Sequence
  Synthetic
cuugguguaaauguauau

SEQ ID NO: 81904 - RNA, 19 nt, Artificial Sequence
  Synthetic
ucuugguguaaauguauau

SEQ ID NO: 81905 - RNA, 20 nt, Artificial Sequence
  Synthetic
gucuugguguaaauguauau

SEQ ID NO: 81906 - RNA, 21 nt, Artificial Sequence
  Synthetic
ugucuugguguaaauguauau

SEQ ID NO: 81907 - RNA, 22 nt, Artificial Sequence
  Synthetic
augucuugguguaaauguauau

SEQ ID NO: 81908 - RNA, 23 nt, Artificial Sequence
  Synthetic
  misc_feature (1)..(1): n is a, c, g, or u
naugucuugguguaaauguauau

SEQ ID NO: 81909 - RNA, 24 nt, Artificial Sequence
  Synthetic
  misc_feature (2)..(2): n is a, c, g, or u
unaugucuugguguaaauguauau

SEQ ID NO: 81910 - RNA, 18 nt, Artificial Sequence
  Synthetic
ggagugcgaauccacacu

SEQ ID NO: 81911 - RNA, 19 nt, Artificial Sequence
  Synthetic
aggagugcgaauccacacu

SEQ ID NO: 81912 - RNA, 20 nt, Artificial Sequence
  Synthetic
gaggagugcgaauccacacu

SEQ ID NO: 81913 - RNA, 21 nt, Artificial Sequence
  Synthetic
ggaggagugcgaauccacacu

SEQ ID NO: 81914 - RNA, 22 nt, Artificial Sequence
  Synthetic
uggaggagugcgaauccacacu

SEQ ID NO: 81915 - RNA, 23 nt, Artificial Sequence
  Synthetic
cuggaggagugcgaauccacacu

SEQ ID NO: 81916 - RNA, 24 nt, Artificial Sequence
  Synthetic
gcuggaggagugcgaauccacacu

SEQ ID NO: 81917 - RNA, 18 nt, Artificial Sequence
  Synthetic
acagugggggaaagcccu

SEQ ID NO: 81918 - RNA, 19 nt, Artificial Sequence
  Synthetic
aacagugggggaaagcccu

SEQ ID NO: 81919 - RNA, 20 nt, Artificial Sequence
  Synthetic
aaacagugggggaaagcccu

SEQ ID NO: 81920 - RNA, 21 nt, Artificial Sequence
  Synthetic
caaacagugggggaaagcccu

SEQ ID NO: 81921 - RNA, 22 nt, Artificial Sequence
  Synthetic
ccaaacagugggggaaagcccu

SEQ ID NO: 81922 - RNA, 23 nt, Artificial Sequence
  Synthetic
gccaaacagugggggaaagcccu

SEQ ID NO: 81923 - RNA, 24 nt, Artificial Sequence
  Synthetic
agccaaacagugggggaaagcccu

SEQ ID NO: 81924 - RNA, 18 nt, Artificial Sequence
  Synthetic
  misc_feature (4)..(4): n is a, c, g, or u
guanuaugcccugagccu

SEQ ID NO: 81925 - RNA, 19 nt, Artificial Sequence
  Synthetic
  misc_feature (5)..(5): n is a, c, g, or u
uguanuaugcccugagccu

SEQ ID NO: 81926 - RNA, 20 nt, Artificial Sequence
  Synthetic
  misc_feature (6)..(6): n is a, c, g, or u
uuguanuaugcccugagccu

SEQ ID NO: 81927 - RNA, 21 nt, Artificial Sequence
  Synthetic
  misc_feature (7)..(7): n is a, c, g, or u
uuuguanuaugcccugagccu

SEQ ID NO: 81928 - RNA, 22 nt, Artificial Sequence
  Synthetic
  misc_feature (8)..(8): n is a, c, g, or u
guuuguanuaugcccugagccu

SEQ ID NO: 81929 - RNA, 23 nt, Artificial Sequence
  Synthetic
  misc_feature (1)..(1): n is a, c, g, or u
  misc_feature (9)..(9): n is a, c, g, or u
nguuuguanuaugcccugagccu

SEQ ID NO: 81930 - RNA, 24 nt, Artificial Sequence
  Synthetic
  misc_feature (2)..(2): n is a, c, g, or u
  misc_feature (10)..(10): n is a, c, g, or u
anguuuguanuaugcccugagccu

SEQ ID NO: 81931 - RNA, 18 nt, Artificial Sequence
  Synthetic
gccacccaaggcacagcu

SEQ ID NO: 81932 - RNA, 19 nt, Artificial Sequence
  Synthetic
agccacccaaggcacagcu

SEQ ID NO: 81933 - RNA, 20 nt, Artificial Sequence
  Synthetic
aagccacccaaggcacagcu

SEQ ID NO: 81934 - RNA, 21 nt, Artificial Sequence
  Synthetic
aaagccacccaaggcacagcu

SEQ ID NO: 81935 - RNA, 22 nt, Artificial Sequence
  Synthetic
  misc_feature (1)..(1): n is a, c, g, or u
naaagccacccaaggcacagcu

SEQ ID NO: 81936 - RNA, 23 nt, Artificial Sequence
  Synthetic
  misc_feature (2)..(2): n is a, c, g, or u
cnaaagccacccaaggcacagcu

SEQ ID NO: 81937 - RNA, 24 nt, Artificial Sequence
  Synthetic
  misc_feature (3)..(3): n is a, c, g, or u
ccnaaagccacccaaggcacagcu

SEQ ID NO: 81938 - RNA, 18 nt, Artificial Sequence
  Synthetic
  misc_feature (2)..(2): n is a, c, g, or u
  misc_feature (11)..(11): n is a, c, g, or u
gnugaggugancaaugcu

SEQ ID NO: 81939 - RNA, 19 nt, Artificial Sequence
  Synthetic
  misc_feature (3)..(3): n is a, c, g, or u
  misc_feature (12)..(12): n is a, c, g, or u
ugnugaggugancaaugcu

SEQ ID NO: 81940 - RNA, 20 nt, Artificial Sequence
  Synthetic
  misc_feature (4)..(4): n is a, c, g, or u
  misc_feature (13)..(13): n is a, c, g, or u
augnugaggugancaaugcu

SEQ ID NO: 81941 - RNA, 21 nt, Artificial Sequence
  Synthetic
  misc_feature (5)..(5): n is a, c, g, or u
  misc_feature (14)..(14): n is a, c, g, or u
uaugnugaggugancaaugcu

SEQ ID NO: 81942 - RNA, 22 nt, Artificial Sequence
  Synthetic
  misc_feature (6)..(6): n is a, c, g, or u
  misc_feature (15)..(15): n is a, c, g, or u
guaugnugaggugancaaugcu

SEQ ID NO: 81943 - RNA, 23 nt, Artificial Sequence
  Synthetic
  misc_feature (7)..(7): n is a, c, g, or u
  misc_feature (16)..(16): n is a, c, g, or u
aguaugnugaggugancaaugcu

SEQ ID NO: 81944 - RNA, 24 nt, Artificial Sequence
  Synthetic
  misc_feature (8)..(8): n is a, c, g, or u
  misc_feature (17)..(17): n is a, c, g, or u
caguaugnugaggugancaaugcu

SEQ ID NO: 81945 - RNA, 18 nt, Artificial Sequence
  Synthetic
guuugcuccagaccugcu

SEQ ID NO: 81946 - RNA, 19 nt, Artificial Sequence
  Synthetic
uguuugcuccagaccugcu

SEQ ID NO: 81947 - RNA, 20 nt, Artificial Sequence
  Synthetic
auguuugcuccagaccugcu

SEQ ID NO: 81948 - RNA, 21 nt, Artificial Sequence
  Synthetic
aauguuugcuccagaccugcu

SEQ ID NO: 81949 - RNA, 22 nt, Artificial Sequence
  Synthetic
  misc_feature (1)..(1): n is a, c, g, or u
naauguuugcuccagaccugcu

SEQ ID NO: 81950 - RNA, 23 nt, Artificial Sequence
  Synthetic
  misc_feature (2)..(2): n is a, c, g, or u
anaauguuugcuccagaccugcu

SEQ ID NO: 81951 - RNA, 24 nt, Artificial Sequence
  Synthetic
  misc_feature (3)..(3): n is a, c, g, or u
ganaauguuugcuccagaccugcu

SEQ ID NO: 81952 - RNA, 18 nt, Artificial Sequence
  Synthetic
ggauuugcgguguuugcu

SEQ ID NO: 81953 - RNA, 19 nt, Artificial Sequence
  Synthetic
uggauuugcgguguuugcu

SEQ ID NO: 81954 - RNA, 20 nt, Artificial Sequence
  Synthetic
cuggauuugcgguguuugcu

SEQ ID NO: 81955 - RNA, 21 nt, Artificial Sequence
  Synthetic
ucuggauuugcgguguuugcu

SEQ ID NO: 81956 - RNA, 22 nt, Artificial Sequence
  Synthetic
aucuggauuugcgguguuugcu

SEQ ID NO: 81957 - RNA, 23 nt, Artificial Sequence
  Synthetic
aaucuggauuugcgguguuugcu

SEQ ID NO: 81958 - RNA, 24 nt, Artificial Sequence
  Synthetic
caaucuggauuugcgguguuugcu

SEQ ID NO: 81959 - RNA, 18 nt, Artificial Sequence
  Synthetic
  misc_feature (3)..(3): n is a, c, g, or u
ucnuuaaacaaacagucu

SEQ ID NO: 81960 - RNA, 19 nt, Artificial Sequence
  Synthetic
  misc_feature (4)..(4): n is a, c, g, or u
gucnuuaaacaaacagucu

SEQ ID NO: 81961 - RNA, 20 nt, Artificial Sequence
  Synthetic
  misc_feature (5)..(5): n is a, c, g, or u
agucnuuaaacaaacagucu

SEQ ID NO: 81962 - RNA, 21 nt, Artificial Sequence
  Synthetic
  misc_feature (6)..(6): n is a, c, g, or u
cagucnuuaaacaaacagucu

SEQ ID NO: 81963 - RNA, 22 nt, Artificial Sequence
  Synthetic
  misc_feature (7)..(7): n is a, c, g, or u
ccagucnuuaaacaaacagucu

SEQ ID NO: 81964 - RNA, 23 nt, Artificial Sequence
  Synthetic
  misc_feature (8)..(8): n is a, c, g, or u
cccagucnuuaaacaaacagucu

SEQ ID NO: 81965 - RNA, 24 nt, Artificial Sequence
  Synthetic
  misc_feature (9)..(9): n is a, c, g, or u
ucccagucnuuaaacaaacagucu

SEQ ID NO: 81966 - RNA, 18 nt, Artificial Sequence
  Synthetic
gucuaacaacaguagucu

SEQ ID NO: 81967 - RNA, 19 nt, Artificial Sequence
  Synthetic
cgucuaacaacaguagucu

SEQ ID NO: 81968 - RNA, 20 nt, Artificial Sequence
  Synthetic
ucgucuaacaacaguagucu

SEQ ID NO: 81969 - RNA, 21 nt, Artificial Sequence
  Synthetic
gucgucuaacaacaguagucu

SEQ ID NO: 81970 - RNA, 22 nt, Artificial Sequence
  Synthetic
cgucgucuaacaacaguagucu

SEQ ID NO: 81971 - RNA, 23 nt, Artificial Sequence
  Synthetic
ucgucgucuaacaacaguagucu

SEQ ID NO: 81972 - RNA, 24 nt, Artificial Sequence
  Synthetic
cucgucgucuaacaacaguagucu

SEQ ID NO: 81973 - RNA, 18 nt, Artificial Sequence
  Synthetic
cgauugagaccuucgucu

SEQ ID NO: 81974 - RNA, 19 nt, Artificial Sequence
  Synthetic
gcgauugagaccuucgucu

SEQ ID NO: 81975 - RNA, 20 nt, Artificial Sequence
  Synthetic
ggcgauugagaccuucgucu

SEQ ID NO: 81976 - RNA, 21 nt, Artificial Sequence
  Synthetic
cggcgauugagaccuucgucu

SEQ ID NO: 81977 - RNA, 22 nt, Artificial Sequence
  Synthetic
gcggcgauugagaccuucgucu

SEQ ID NO: 81978 - RNA, 23 nt, Artificial Sequence
  Synthetic
cgcggcgauugagaccuucgucu

SEQ ID NO: 81979 - RNA, 24 nt, Artificial Sequence
  Synthetic
acgcggcgauugagaccuucgucu

SEQ ID NO: 81980 - RNA, 18 nt, Artificial Sequence
  Synthetic
cgagggaguucuucuucu

SEQ ID NO: 81981 - RNA, 19 nt, Artificial Sequence
  Synthetic
gcgagggaguucuucuucu

SEQ ID NO: 81982 - RNA, 20 nt, Artificial Sequence
  Synthetic
ggcgagggaguucuucuucu

SEQ ID NO: 81983 - RNA, 21 nt, Artificial Sequence
  Synthetic
aggcgagggaguucuucuucu

SEQ ID NO: 81984 - RNA, 22 nt, Artificial Sequence
  Synthetic
gaggcgagggaguucuucuucu

SEQ ID NO: 81985 - RNA, 23 nt, Artificial Sequence
  Synthetic
cgaggcgagggaguucuucuucu

SEQ ID NO: 81986 - RNA, 24 nt, Artificial Sequence
  Synthetic
gcgaggcgagggaguucuucuucu

SEQ ID NO: 81987 - RNA, 18 nt, Artificial Sequence
  Synthetic
gcgauaaccaggacaagu

SEQ ID NO: 81988 - RNA, 19 nt, Artificial Sequence
  Synthetic
agcgauaaccaggacaagu

SEQ ID NO: 81989 - RNA, 20 nt, Artificial Sequence
  Synthetic
cagcgauaaccaggacaagu

SEQ ID NO: 81990 - RNA, 21 nt, Artificial Sequence
  Synthetic
ccagcgauaaccaggacaagu

SEQ ID NO: 81991 - RNA, 22 nt, Artificial Sequence
  Synthetic
uccagcgauaaccaggacaagu

SEQ ID NO: 81992 - RNA, 23 nt, Artificial Sequence
  Synthetic
auccagcgauaaccaggacaagu

SEQ ID NO: 81993 - RNA, 24 nt, Artificial Sequence
  Synthetic
cauccagcgauaaccaggacaagu

SEQ ID NO: 81994 - RNA, 18 nt, Artificial Sequence
  Synthetic
  misc_feature (5)..(5): n is a, c, g, or u
guacngaaggaaagaagu

SEQ ID NO: 81995 - RNA, 19 nt, Artificial Sequence
  Synthetic
  misc_feature (6)..(6): n is a, c, g, or u
cguacngaaggaaagaagu

SEQ ID NO: 81996 - RNA, 20 nt, Artificial Sequence
  Synthetic
  misc_feature (7)..(7): n is a, c, g, or u
ucguacngaaggaaagaagu

SEQ ID NO: 81997 - RNA, 21 nt, Artificial Sequence
  Synthetic
  misc_feature (8)..(8): n is a, c, g, or u
cucguacngaaggaaagaagu

SEQ ID NO: 81998 - RNA, 22 nt, Artificial Sequence
  Synthetic
  misc_feature (9)..(9): n is a, c, g, or u
ucucguacngaaggaaagaagu

SEQ ID NO: 81999 - RNA, 23 nt, Artificial Sequence
  Synthetic
  misc_feature (10)..(10): n is a, c, g, or u
aucucguacngaaggaaagaagu

SEQ ID NO: 82000 - RNA, 24 nt, Artificial Sequence
  Synthetic
  misc_feature (11)..(11): n is a, c, g, or u
gaucucguacngaaggaaagaagu

SEQ ID NO: 82001 - RNA, 18 nt, Artificial Sequence
  Synthetic
aacugaaagccaaacagu

SEQ ID NO: 82002 - RNA, 19 nt, Artificial Sequence
  Synthetic
uaacugaaagccaaacagu

SEQ ID NO: 82003 - RNA, 20 nt, Artificial Sequence
  Synthetic
auaacugaaagccaaacagu

SEQ ID NO: 82004 - RNA, 21 nt, Artificial Sequence
  Synthetic
uauaacugaaagccaaacagu

SEQ ID NO: 82005 - RNA, 22 nt, Artificial Sequence
  Synthetic
auauaacugaaagccaaacagu

SEQ ID NO: 82006 - RNA, 23 nt, Artificial Sequence
  Synthetic
cauauaacugaaagccaaacagu

SEQ ID NO: 82007 - RNA, 24 nt, Artificial Sequence
  Synthetic
ccauauaacugaaagccaaacagu

SEQ ID NO: 82008 - RNA, 18 nt, Artificial Sequence
  Synthetic
  misc_feature (3)..(3): n is a, c, g, or u
  misc_feature (5)..(5): n is a, c, g, or u
  misc_feature (11)..(11): n is a, c, g, or u
uangngagagncaguagu

SEQ ID NO: 82009 - RNA, 19 nt, Artificial Sequence
  Synthetic
  misc_feature (4)..(4): n is a, c, g, or u
  misc_feature (6)..(6): n is a, c, g, or u
  misc_feature (12)..(12): n is a, c, g, or u
auangngagagncaguagu

SEQ ID NO: 82010 - RNA, 20 nt, Artificial Sequence
  Synthetic
  misc_feature (5)..(5): n is a, c, g, or u
  misc_feature (7)..(7): n is a, c, g, or u
  misc_feature (13)..(13): n is a, c, g, or u
gauangngagagncaguagu

SEQ ID NO: 82011 - RNA, 21 nt, Artificial Sequence
  Synthetic
  misc_feature (6)..(6): n is a, c, g, or u
  misc_feature (8)..(8): n is a, c, g, or u
  misc_feature (14)..(14): n is a, c, g, or u
cgauangngagagncaguagu

SEQ ID NO: 82012 - RNA, 22 nt, Artificial Sequence
  Synthetic
  misc_feature (7)..(7): n is a, c, g, or u
  misc_feature (9)..(9): n is a, c, g, or u
  misc_feature (15)..(15): n is a, c, g, or u
acgauangngagagncaguagu

SEQ ID NO: 82013 - RNA, 23 nt, Artificial Sequence
  Synthetic
  misc_feature (8)..(8): n is a, c, g, or u
  misc_feature (10)..(10): n is a, c, g, or u
  misc_feature (16)..(16): n is a, c, g, or u
gacgauangngagagncaguagu

SEQ ID NO: 82014 - RNA, 24 nt, Artificial Sequence
  Synthetic
  misc_feature (9)..(9): n is a, c, g, or u
  misc_feature (11)..(11): n is a, c, g, or u
  misc_feature (17)..(17): n is a, c, g, or u
ugacgauangngagagncaguagu

SEQ ID NO: 82015 - RNA, 18 nt, Artificial Sequence
  Synthetic
uacaggugcaauuuccgu

SEQ ID NO: 82016 - RNA, 19 nt, Artificial Sequence
  Synthetic
auacaggugcaauuuccgu

SEQ ID NO: 82017 - RNA, 20 nt, Artificial Sequence
  Synthetic
aauacaggugcaauuuccgu

SEQ ID NO: 82018 - RNA, 21 nt, Artificial Sequence
  Synthetic
gaauacaggugcaauuuccgu

SEQ ID NO: 82019 - RNA, 22 nt, Artificial Sequence
  Synthetic
ggaauacaggugcaauuuccgu

SEQ ID NO: 82020 - RNA, 23 nt, Artificial Sequence
  Synthetic
gggaauacaggugcaauuuccgu

SEQ ID NO: 82021 - RNA, 24 nt, Artificial Sequence
  Synthetic
ugggaauacaggugcaauuuccgu

SEQ ID NO: 82022 - RNA, 18 nt, Artificial Sequence
  Synthetic
uggugagugauuggaggu

SEQ ID NO: 82023 - RNA, 19 nt, Artificial Sequence
  Synthetic
uuggugagugauuggaggu

SEQ ID NO: 82024 - RNA, 20 nt, Artificial Sequence
  Synthetic
guuggugagugauuggaggu

SEQ ID NO: 82025 - RNA, 21 nt, Artificial Sequence
  Synthetic
gguuggugagugauuggaggu

SEQ ID NO: 82026 - RNA, 22 nt, Artificial Sequence
  Synthetic
agguuggugagugauuggaggu

SEQ ID NO: 82027 - RNA, 23 nt, Artificial Sequence
  Synthetic
gagguuggugagugauuggaggu

SEQ ID NO: 82028 - RNA, 24 nt, Artificial Sequence
  Synthetic
ggagguuggugagugauuggaggu

SEQ ID NO: 82029 - RNA, 18 nt, Artificial Sequence
  Synthetic
cuggauccaacugguggu

SEQ ID NO: 82030 - RNA, 19 nt, Artificial Sequence
  Synthetic
gcuggauccaacugguggu

SEQ ID NO: 82031 - RNA, 20 nt, Artificial Sequence
  Synthetic
ggcuggauccaacugguggu

SEQ ID NO: 82032 - RNA, 21 nt, Artificial Sequence
  Synthetic
aggcuggauccaacugguggu

SEQ ID NO: 82033 - RNA, 22 nt, Artificial Sequence
  Synthetic
aaggcuggauccaacugguggu

SEQ ID NO: 82034 - RNA, 23 nt, Artificial Sequence
  Synthetic
gaaggcuggauccaacugguggu

SEQ ID NO: 82035 - RNA, 24 nt, Artificial Sequence
  Synthetic
ugaaggcuggauccaacugguggu

SEQ ID NO: 82036 - RNA, 18 nt, Artificial Sequence
  Synthetic
  misc_feature (10)..(10): n is a, c, g, or u
  misc_feature (16)..(16): n is a, c, g, or u
guguaaauanugucungu

SEQ ID NO: 82037 - RNA, 19 nt, Artificial Sequence
  Synthetic
  misc_feature (11)..(11): n is a, c, g, or u
  misc_feature (17)..(17): n is a, c, g, or u
uguguaaauanugucungu

SEQ ID NO: 82038 - RNA, 20 nt, Artificial Sequence
  Synthetic
  misc_feature (12)..(12): n is a, c, g, or u
  misc_feature (18)..(18): n is a, c, g, or u
guguguaaauanugucungu

SEQ ID NO: 82039 - RNA, 21 nt, Artificial Sequence
  Synthetic
  misc_feature (13)..(13): n is a, c, g, or u
  misc_feature (19)..(19): n is a, c, g, or u
aguguguaaauanugucungu

SEQ ID NO: 82040 - RNA, 22 nt, Artificial Sequence
  Synthetic
  misc_feature (14)..(14): n is a, c, g, or u
  misc_feature (20)..(20): n is a, c, g, or u
gaguguguaaauanugucungu

SEQ ID NO: 82041 - RNA, 23 nt, Artificial Sequence
  Synthetic
  misc_feature (15)..(15): n is a, c, g, or u
  misc_feature (21)..(21): n is a, c, g, or u
agaguguguaaauanugucungu

SEQ ID NO: 82042 - RNA, 24 nt, Artificial Sequence
  Synthetic
  misc_feature (16)..(16): n is a, c, g, or u
  misc_feature (22)..(22): n is a, c, g, or u
uagaguguguaaauanugucungu

SEQ ID NO: 82043 - RNA, 18 nt, Artificial Sequence
  Synthetic
  misc_feature (1)..(1): n is a, c, g, or u
  misc_feature (4)..(4): n is a, c, g, or u
nguncccccuagaaaauu

SEQ ID NO: 82044 - RNA, 19 nt, Artificial Sequence
  Synthetic
  misc_feature (2)..(2): n is a, c, g, or u
  misc_feature (5)..(5): n is a, c, g, or u
unguncccccuagaaaauu

SEQ ID NO: 82045 - RNA, 20 nt, Artificial Sequence
  Synthetic
  misc_feature (3)..(3): n is a, c, g, or u
  misc_feature (6)..(6): n is a, c, g, or u
gunguncccccuagaaaauu

SEQ ID NO: 82046 - RNA, 21 nt, Artificial Sequence
  Synthetic
  misc_feature (4)..(4): n is a, c, g, or u
  misc_feature (7)..(7): n is a, c, g, or u
ggunguncccccuagaaaauu

SEQ ID NO: 82047 - RNA, 22 nt, Artificial Sequence
  Synthetic
  misc_feature (5)..(5): n is a, c, g, or u
  misc_feature (8)..(8): n is a, c, g, or u
cggunguncccccuagaaaauu

SEQ ID NO: 82048 - RNA, 23 nt, Artificial Sequence
  Synthetic
  misc_feature (6)..(6): n is a, c, g, or u
  misc_feature (9)..(9): n is a, c, g, or u
acggunguncccccuagaaaauu

SEQ ID NO: 82049 - RNA, 24 nt, Artificial Sequence
  Synthetic
  misc_feature (7)..(7): n is a, c, g, or u
  misc_feature (10)..(10): n is a, c, g, or u
cacggunguncccccuagaaaauu

SEQ ID NO: 82050 - RNA, 18 nt, Artificial Sequence
  Synthetic
uugguguaaauguauauu

SEQ ID NO: 82051 - RNA, 19 nt, Artificial Sequence
  Synthetic
cuugguguaaauguauauu

SEQ ID NO: 82052 - RNA, 20 nt, Artificial Sequence
  Synthetic
ucuugguguaaauguauauu

SEQ ID NO: 82053 - RNA, 21 nt, Artificial Sequence
  Synthetic
gucuugguguaaauguauauu

SEQ ID NO: 82054 - RNA, 22 nt, Artificial Sequence
  Synthetic
ugucuugguguaaauguauauu

SEQ ID NO: 82055 - RNA, 23 nt, Artificial Sequence
  Synthetic
augucuugguguaaauguauauu

SEQ ID NO: 82056 - RNA, 24 nt, Artificial Sequence
  Synthetic
  misc_feature (1)..(1): n is a, c, g, or u
naugucuugguguaaauguauauu

SEQ ID NO: 82057 - RNA, 18 nt, Artificial Sequence
  Synthetic
ucuagacucugcgguauu

SEQ ID NO: 82058 - RNA, 19 nt, Artificial Sequence
  Synthetic
gucuagacucugcgguauu

SEQ ID NO: 82059 - RNA, 20 nt, Artificial Sequence
  Synthetic
agucuagacucugcgguauu

SEQ ID NO: 82060 - RNA, 21 nt, Artificial Sequence
  Synthetic
gagucuagacucugcgguauu

SEQ ID NO: 82061 - RNA, 22 nt, Artificial Sequence
  Synthetic
cgagucuagacucugcgguauu

SEQ ID NO: 82062 - RNA, 23 nt, Artificial Sequence
  Synthetic
acgagucuagacucugcgguauu

SEQ ID NO: 82063 - RNA, 24 nt, Artificial Sequence
  Synthetic
cacgagucuagacucugcgguauu

SEQ ID NO: 82064 - RNA, 18 nt, Artificial Sequence
  Synthetic
agaguuugguggaagguu

SEQ ID NO: 82065 - RNA, 19 nt, Artificial Sequence
  Synthetic
cagaguuugguggaagguu

SEQ ID NO: 82066 - RNA, 20 nt, Artificial Sequence
  Synthetic
gcagaguuugguggaagguu

SEQ ID NO: 82067 - RNA, 21 nt, Artificial Sequence
  Synthetic
ugcagaguuugguggaagguu

SEQ ID NO: 82068 - RNA, 22 nt, Artificial Sequence
  Synthetic
uugcagaguuugguggaagguu

SEQ ID NO: 82069 - RNA, 23 nt, Artificial Sequence
  Synthetic
cuugcagaguuugguggaagguu

SEQ ID NO: 82070 - RNA, 24 nt, Artificial Sequence
  Synthetic
ucuugcagaguuugguggaagguu

SEQ ID NO: 82071 - RNA, 18 nt, Artificial Sequence
  Synthetic
ggugagugauuggagguu

SEQ ID NO: 82072 - RNA, 19 nt, Artificial Sequence
  Synthetic
uggugagugauuggagguu

SEQ ID NO: 82073 - RNA, 20 nt, Artificial Sequence
  Synthetic
uuggugagugauuggagguu

SEQ ID NO: 82074 - RNA, 21 nt, Artificial Sequence
  Synthetic
guuggugagugauuggagguu

SEQ ID NO: 82075 - RNA, 22 nt, Artificial Sequence
  Synthetic
gguuggugagugauuggagguu

SEQ ID NO: 82076 - RNA, 23 nt, Artificial Sequence
  Synthetic
agguuggugagugauuggagguu

SEQ ID NO: 82077 - RNA, 24 nt, Artificial Sequence
  Synthetic
gagguuggugagugauuggagguu

SEQ ID NO: 82078 - RNA, 18 nt, Artificial Sequence
  Synthetic
  misc_feature (9)..(9): n is a, c, g, or u
  misc_feature (15)..(15): n is a, c, g, or u
uguaaauanugucunguu

SEQ ID NO: 82079 - RNA, 19 nt, Artificial Sequence
  Synthetic
  misc_feature (10)..(10): n is a, c, g, or u
  misc_feature (16)..(16): n is a, c, g, or u
guguaaauanugucunguu

SEQ ID NO: 82080 - RNA, 20 nt, Artificial Sequence
  Synthetic
  misc_feature (11)..(11): n is a, c, g, or u
  misc_feature (17)..(17): n is a, c, g, or u
uguguaaauanugucunguu

SEQ ID NO: 82081 - RNA, 21 nt, Artificial Sequence
  Synthetic
  misc_feature (12)..(12): n is a, c, g, or u
  misc_feature (18)..(18): n is a, c, g, or u
guguguaaauanugucunguu

SEQ ID NO: 82082 - RNA, 22 nt, Artificial Sequence
  Synthetic
  misc_feature (13)..(13): n is a, c, g, or u
  misc_feature (19)..(19): n is a, c, g, or u
aguguguaaauanugucunguu

SEQ ID NO: 82083 - RNA, 23 nt, Artificial Sequence
  Synthetic
  misc_feature (14)..(14): n is a, c, g, or u
  misc_feature (20)..(20): n is a, c, g, or u
gaguguguaaauanugucunguu

SEQ ID NO: 82084 - RNA, 24 nt, Artificial Sequence
  Synthetic
  misc_feature (15)..(15): n is a, c, g, or u
  misc_feature (21)..(21): n is a, c, g, or u
agaguguguaaauanugucunguu

SEQ ID NO: 82085 - RNA, 18 nt, Artificial Sequence
  Synthetic
uggaaacgauguauauuu

SEQ ID NO: 82086 - RNA, 19 nt, Artificial Sequence
  Synthetic
auggaaacgauguauauuu

SEQ ID NO: 82087 - RNA, 20 nt, Artificial Sequence
  Synthetic
cauggaaacgauguauauuu

SEQ ID NO: 82088 - RNA, 21 nt, Artificial Sequence
  Synthetic
ccauggaaacgauguauauuu

SEQ ID NO: 82089 - RNA, 22 nt, Artificial Sequence
  Synthetic
gccauggaaacgauguauauuu

SEQ ID NO: 82090 - RNA, 23 nt, Artificial Sequence
  Synthetic
agccauggaaacgauguauauuu

SEQ ID NO: 82091 - RNA, 24 nt, Artificial Sequence
  Synthetic
cagccauggaaacgauguauauuu

SEQ ID NO: 82092 - RNA, 18 nt, Artificial Sequence
  Synthetic
cacucccauaggaauuuu

SEQ ID NO: 82093 - RNA, 19 nt, Artificial Sequence
  Synthetic
ccacucccauaggaauuuu

SEQ ID NO: 82094 - RNA, 20 nt, Artificial Sequence
  Synthetic
cccacucccauaggaauuuu

SEQ ID NO: 82095 - RNA, 21 nt, Artificial Sequence
  Synthetic
gcccacucccauaggaauuuu

SEQ ID NO: 82096 - RNA, 22 nt, Artificial Sequence
  Synthetic
ggcccacucccauaggaauuuu

SEQ ID NO: 82097 - RNA, 23 nt, Artificial Sequence
  Synthetic
aggcccacucccauaggaauuuu

SEQ ID NO: 82098 - RNA, 24 nt, Artificial Sequence
  Synthetic
gaggcccacucccauaggaauuuu

SEQ ID NO: 82099 - RNA, 18 nt, Artificial Sequence
  Synthetic
  misc_feature (10)..(10): n is a, c, g, or u
acucacagunaaugagaa

SEQ ID NO: 82100 - RNA, 19 nt, Artificial Sequence
  Synthetic
  misc_feature (11)..(11): n is a, c, g, or u
cacucacagunaaugagaa

SEQ ID NO: 82101 - RNA, 20 nt, Artificial Sequence
  Synthetic
  misc_feature (12)..(12): n is a, c, g, or u
ccacucacagunaaugagaa

SEQ ID NO: 82102 - RNA, 21 nt, Artificial Sequence
  Synthetic
  misc_feature (1)..(1): n is a, c, g, or u
  misc_feature (13)..(13): n is a, c, g, or u
nccacucacagunaaugagaa

SEQ ID NO: 82103 - RNA, 22 nt, Artificial Sequence
  Synthetic
  misc_feature (2)..(2): n is a, c, g, or u
  misc_feature (14)..(14): n is a, c, g, or u
gnccacucacagunaaugagaa

SEQ ID NO: 82104 - RNA, 23 nt, Artificial Sequence
  Synthetic
  misc_feature (3)..(3): n is a, c, g, or u
  misc_feature (15)..(15): n is a, c, g, or u
ggnccacucacagunaaugagaa

SEQ ID NO: 82105 - RNA, 24 nt, Artificial Sequence
  Synthetic
  misc_feature (4)..(4): n is a, c, g, or u
  misc_feature (16)..(16): n is a, c, g, or u
aggnccacucacagunaaugagaa

SEQ ID NO: 82106 - RNA, 18 nt, Artificial Sequence
  Synthetic
cuugucucacuuuuggaa

SEQ ID NO: 82107 - RNA, 19 nt, Artificial Sequence
  Synthetic
ucuugucucacuuuuggaa

SEQ ID NO: 82108 - RNA, 20 nt, Artificial Sequence
  Synthetic
uucuugucucacuuuuggaa

SEQ ID NO: 82109 - RNA, 21 nt, Artificial Sequence
  Synthetic
uuucuugucucacuuuuggaa

SEQ ID NO: 82110 - RNA, 22 nt, Artificial Sequence
  Synthetic
auuucuugucucacuuuuggaa

SEQ ID NO: 82111 - RNA, 23 nt, Artificial Sequence
  Synthetic
cauuucuugucucacuuuuggaa

SEQ ID NO: 82112 - RNA, 24 nt, Artificial Sequence
  Synthetic
acauuucuugucucacuuuuggaa

SEQ ID NO: 82113 - RNA, 18 nt, Artificial Sequence
  Synthetic
gcccaaggucuuacauaa

SEQ ID NO: 82114 - RNA, 19 nt, Artificial Sequence
  Synthetic
ugcccaaggucuuacauaa

SEQ ID NO: 82115 - RNA, 20 nt, Artificial Sequence
  Synthetic
uugcccaaggucuuacauaa

SEQ ID NO: 82116 - RNA, 21 nt, Artificial Sequence
  Synthetic
cuugcccaaggucuuacauaa

SEQ ID NO: 82117 - RNA, 22 nt, Artificial Sequence
  Synthetic
ucuugcccaaggucuuacauaa

SEQ ID NO: 82118 - RNA, 23 nt, Artificial Sequence
  Synthetic
  misc_feature (1)..(1): n is a, c, g, or u
nucuugcccaaggucuuacauaa

SEQ ID NO: 82119 - RNA, 24 nt, Artificial Sequence
  Synthetic
  misc_feature (1)..(2): n is a, c, g, or u
nnucuugcccaaggucuuacauaa

SEQ ID NO: 82120 - RNA, 18 nt, Artificial Sequence
  Synthetic
ggcggguauauuauauaa

SEQ ID NO: 82121 - RNA, 19 nt, Artificial Sequence
  Synthetic
aggcggguauauuauauaa

SEQ ID NO: 82122 - RNA, 20 nt, Artificial Sequence
  Synthetic
aaggcggguauauuauauaa

SEQ ID NO: 82123 - RNA, 21 nt, Artificial Sequence
  Synthetic
gaaggcggguauauuauauaa

SEQ ID NO: 82124 - RNA, 22 nt, Artificial Sequence
  Synthetic
ggaaggcggguauauuauauaa

SEQ ID NO: 82125 - RNA, 23 nt, Artificial Sequence
  Synthetic
uggaaggcggguauauuauauaa

SEQ ID NO: 82126 - RNA, 24 nt, Artificial Sequence
  Synthetic
auggaaggcggguauauuauauaa

SEQ ID NO: 82127 - RNA, 18 nt, Artificial Sequence
  Synthetic
gggacccugcgcugaaca

SEQ ID NO: 82128 - RNA, 19 nt, Artificial Sequence
  Synthetic
ggggacccugcgcugaaca

SEQ ID NO: 82129 - RNA, 20 nt, Artificial Sequence
  Synthetic
uggggacccugcgcugaaca

SEQ ID NO: 82130 - RNA, 21 nt, Artificial Sequence
  Synthetic
uuggggacccugcgcugaaca

SEQ ID NO: 82131 - RNA, 22 nt, Artificial Sequence
  Synthetic
auuggggacccugcgcugaaca

SEQ ID NO: 82132 - RNA, 23 nt, Artificial Sequence
  Synthetic
gauuggggacccugcgcugaaca

SEQ ID NO: 82133 - RNA, 24 nt, Artificial Sequence
  Synthetic
ggauuggggacccugcgcugaaca

SEQ ID NO: 82134 - RNA, 18 nt, Artificial Sequence
  Synthetic
  misc_feature (8)..(8): n is a, c, g, or u
  misc_feature (11)..(11): n is a, c, g, or u
ugccguuncgnccgacca

SEQ ID NO: 82135 - RNA, 19 nt, Artificial Sequence
  Synthetic
  misc_feature (9)..(9): n is a, c, g, or u
  misc_feature (12)..(12): n is a, c, g, or u
cugccguuncgnccgacca

SEQ ID NO: 82136 - RNA, 20 nt, Artificial Sequence
  Synthetic
  misc_feature (10)..(10): n is a, c, g, or u
  misc_feature (13)..(13): n is a, c, g, or u
ucugccguuncgnccgacca

SEQ ID NO: 82137 - RNA, 21 nt, Artificial Sequence
  Synthetic
  misc_feature (11)..(11): n is a, c, g, or u
  misc_feature (14)..(14): n is a, c, g, or u
gucugccguuncgnccgacca

SEQ ID NO: 82138 - RNA, 22 nt, Artificial Sequence
  Synthetic
  misc_feature (12)..(12): n is a, c, g, or u
  misc_feature (15)..(15): n is a, c, g, or u
cgucugccguuncgnccgacca

SEQ ID NO: 82139 - RNA, 23 nt, Artificial Sequence
  Synthetic
  misc_feature (13)..(13): n is a, c, g, or u
  misc_feature (16)..(16): n is a, c, g, or u
ccgucugccguuncgnccgacca

SEQ ID NO: 82140 - RNA, 24 nt, Artificial Sequence
  Synthetic
  misc_feature (14)..(14): n is a, c, g, or u
  misc_feature (17)..(17): n is a, c, g, or u
uccgucugccguuncgnccgacca

SEQ ID NO: 82141 - RNA, 18 nt, Artificial Sequence
  Synthetic
ggaacaagagcuacagca

SEQ ID NO: 82142 - RNA, 19 nt, Artificial Sequence
  Synthetic
gggaacaagagcuacagca

SEQ ID NO: 82143 - RNA, 20 nt, Artificial Sequence
  Synthetic
ugggaacaagagcuacagca

SEQ ID NO: 82144 - RNA, 21 nt, Artificial Sequence
  Synthetic
uugggaacaagagcuacagca

SEQ ID NO: 82145 - RNA, 22 nt, Artificial Sequence
  Synthetic
cuugggaacaagagcuacagca

SEQ ID NO: 82146 - RNA, 23 nt, Artificial Sequence
  Synthetic
ucuugggaacaagagcuacagca

SEQ ID NO: 82147 - RNA, 24 nt, Artificial Sequence
  Synthetic
uucuugggaacaagagcuacagca

SEQ ID NO: 82148 - RNA, 18 nt, Artificial Sequence
  Synthetic
  misc_feature (4)..(4): n is a, c, g, or u
gggnuucaccccaccgca

SEQ ID NO: 82149 - RNA, 19 nt, Artificial Sequence
  Synthetic
  misc_feature (5)..(5): n is a, c, g, or u
ugggnuucaccccaccgca

SEQ ID NO: 82150 - RNA, 20 nt, Artificial Sequence
  Synthetic
  misc_feature (6)..(6): n is a, c, g, or u
cugggnuucaccccaccgca

SEQ ID NO: 82151 - RNA, 21 nt, Artificial Sequence
  Synthetic
  misc_feature (7)..(7): n is a, c, g, or u
gcugggnuucaccccaccgca

SEQ ID NO: 82152 - RNA, 22 nt, Artificial Sequence
  Synthetic
  misc_feature (8)..(8): n is a, c, g, or u
ggcugggnuucaccccaccgca

SEQ ID NO: 82153 - RNA, 23 nt, Artificial Sequence
  Synthetic
  misc_feature (9)..(9): n is a, c, g, or u
gggcugggnuucaccccaccgca

SEQ ID NO: 82154 - RNA, 24 nt, Artificial Sequence
  Synthetic
  misc_feature (10)..(10): n is a, c, g, or u
cgggcugggnuucaccccaccgca

SEQ ID NO: 82155 - RNA, 18 nt, Artificial Sequence
  Synthetic
ucaccucugcacgucgca

SEQ ID NO: 82156 - RNA, 19 nt, Artificial Sequence
  Synthetic
uucaccucugcacgucgca

SEQ ID NO: 82157 - RNA, 20 nt, Artificial Sequence
  Synthetic
cuucaccucugcacgucgca

SEQ ID NO: 82158 - RNA, 21 nt, Artificial Sequence
  Synthetic
gcuucaccucugcacgucgca

SEQ ID NO: 82159 - RNA, 22 nt, Artificial Sequence
  Synthetic
cgcuucaccucugcacgucgca

SEQ ID NO: 82160 - RNA, 23 nt, Artificial Sequence
  Synthetic
ucgcuucaccucugcacgucgca

SEQ ID NO: 82161 - RNA, 24 nt, Artificial Sequence
  Synthetic
uucgcuucaccucugcacgucgca

SEQ ID NO: 82162 - RNA, 18 nt, Artificial Sequence
  Synthetic
ucauccucaggccaugca

SEQ ID NO: 82163 - RNA, 19 nt, Artificial Sequence
  Synthetic
cucauccucaggccaugca

SEQ ID NO: 82164 - RNA, 20 nt, Artificial Sequence
  Synthetic
acucauccucaggccaugca

SEQ ID NO: 82165 - RNA, 21 nt, Artificial Sequence
  Synthetic
cacucauccucaggccaugca

SEQ ID NO: 82166 - RNA, 22 nt, Artificial Sequence
  Synthetic
acacucauccucaggccaugca

SEQ ID NO: 82167 - RNA, 23 nt, Artificial Sequence
  Synthetic
aacacucauccucaggccaugca

SEQ ID NO: 82168 - RNA, 24 nt, Artificial Sequence
  Synthetic
aaacacucauccucaggccaugca

SEQ ID NO: 82169 - RNA, 18 nt, Artificial Sequence
  Synthetic
  misc_feature (1)..(1): n is a, c, g, or u
  misc_feature (13)..(13): n is a, c, g, or u
nccugucuuuaanccuca

SEQ ID NO: 82170 - RNA, 19 nt, Artificial Sequence
  Synthetic
  misc_feature (2)..(2): n is a, c, g, or u
  misc_feature (14)..(14): n is a, c, g, or u
unccugucuuuaanccuca

SEQ ID NO: 82171 - RNA, 20 nt, Artificial Sequence
  Synthetic
  misc_feature (3)..(3): n is a, c, g, or u
  misc_feature (15)..(15): n is a, c, g, or u
gunccugucuuuaanccuca

SEQ ID NO: 82172 - RNA, 21 nt, Artificial Sequence
  Synthetic
  misc_feature (4)..(4): n is a, c, g, or u
  misc_feature (16)..(16): n is a, c, g, or u
ugunccugucuuuaanccuca

SEQ ID NO: 82173 - RNA, 22 nt, Artificial Sequence
  Synthetic
  misc_feature (5)..(5): n is a, c, g, or u
  misc_feature (17)..(17): n is a, c, g, or u
cugunccugucuuuaanccuca

SEQ ID NO: 82174 - RNA, 23 nt, Artificial Sequence
  Synthetic
  misc_feature (6)..(6): n is a, c, g, or u
  misc_feature (18)..(18): n is a, c, g, or u
acugunccugucuuuaanccuca

SEQ ID NO: 82175 - RNA, 24 nt, Artificial Sequence
  Synthetic
  misc_feature (7)..(7): n is a, c, g, or u
  misc_feature (19)..(19): n is a, c, g, or u
uacugunccugucuuuaanccuca

SEQ ID NO: 82176 - RNA, 18 nt, Artificial Sequence
  Synthetic
  misc_feature (11)..(11): n is a, c, g, or u
  misc_feature (15)..(15): n is a, c, g, or u
cugcacgacuncugnuca

SEQ ID NO: 82177 - RNA, 19 nt, Artificial Sequence
  Synthetic
  misc_feature (12)..(12): n is a, c, g, or u
  misc_feature (16)..(16): n is a, c, g, or u
ccugcacgacuncugnuca

SEQ ID NO: 82178 - RNA, 20 nt, Artificial Sequence
  Synthetic
  misc_feature (13)..(13): n is a, c, g, or u
  misc_feature (17)..(17): n is a, c, g, or u
accugcacgacuncugnuca

SEQ ID NO: 82179 - RNA, 21 nt, Artificial Sequence
  Synthetic
  misc_feature (14)..(14): n is a, c, g, or u
  misc_feature (18)..(18): n is a, c, g, or u
aaccugcacgacuncugnuca

SEQ ID NO: 82180 - RNA, 22 nt, Artificial Sequence
  Synthetic
  misc_feature (15)..(15): n is a, c, g, or u
  misc_feature (19)..(19): n is a, c, g, or u
gaaccugcacgacuncugnuca

SEQ ID NO: 82181 - RNA, 23 nt, Artificial Sequence
  Synthetic
  misc_feature (16)..(16): n is a, c, g, or u
  misc_feature (20)..(20): n is a, c, g, or u
agaaccugcacgacuncugnuca

SEQ ID NO: 82182 - RNA, 24 nt, Artificial Sequence
  Synthetic
  misc_feature (17)..(17): n is a, c, g, or u
  misc_feature (21)..(21): n is a, c, g, or u
cagaaccugcacgacuncugnuca

SEQ ID NO: 82183 - RNA, 18 nt, Artificial Sequence
  Synthetic
cggguauauuauauaaga

SEQ ID NO: 82184 - RNA, 19 nt, Artificial Sequence
  Synthetic
gcggguauauuauauaaga

SEQ ID NO: 82185 - RNA, 20 nt, Artificial Sequence
  Synthetic
ggcggguauauuauauaaga

SEQ ID NO: 82186 - RNA, 21 nt, Artificial Sequence
  Synthetic
aggcggguauauuauauaaga

SEQ ID NO: 82187 - RNA, 22 nt, Artificial Sequence
  Synthetic
aaggcggguauauuauauaaga

SEQ ID NO: 82188 - RNA, 23 nt, Artificial Sequence
  Synthetic
gaaggcggguauauuauauaaga

SEQ ID NO: 82189 - RNA, 24 nt, Artificial Sequence
  Synthetic
ggaaggcggguauauuauauaaga

SEQ ID NO: 82190 - RNA, 18 nt, Artificial Sequence
  Synthetic
aaacaccgcaaauccaga

SEQ ID NO: 82191 - RNA, 19 nt, Artificial Sequence
  Synthetic
caaacaccgcaaauccaga

SEQ ID NO: 82192 - RNA, 20 nt, Artificial Sequence
  Synthetic
gcaaacaccgcaaauccaga

SEQ ID NO: 82193 - RNA, 21 nt, Artificial Sequence
  Synthetic
agcaaacaccgcaaauccaga

SEQ ID NO: 82194 - RNA, 22 nt, Artificial Sequence
  Synthetic
gagcaaacaccgcaaauccaga

SEQ ID NO: 82195 - RNA, 23 nt, Artificial Sequence
  Synthetic
agagcaaacaccgcaaauccaga

SEQ ID NO: 82196 - RNA, 24 nt, Artificial Sequence
  Synthetic
cagagcaaacaccgcaaauccaga

SEQ ID NO: 82197 - RNA, 18 nt, Artificial Sequence
  Synthetic
cgucaaucuucucgagga

SEQ ID NO: 82198 - RNA, 19 nt, Artificial Sequence
  Synthetic
ucgucaaucuucucgagga

SEQ ID NO: 82199 - RNA, 20 nt, Artificial Sequence
  Synthetic
aucgucaaucuucucgagga

SEQ ID NO: 82200 - RNA, 21 nt, Artificial Sequence
  Synthetic
uaucgucaaucuucucgagga

SEQ ID NO: 82201 - RNA, 22 nt, Artificial Sequence
  Synthetic
  misc_feature (1)..(1): n is a, c, g, or u
nuaucgucaaucuucucgagga

SEQ ID NO: 82202 - RNA, 23 nt, Artificial Sequence
  Synthetic
  misc_feature (2)..(2): n is a, c, g, or u
cnuaucgucaaucuucucgagga

SEQ ID NO: 82203 - RNA, 24 nt, Artificial Sequence
  Synthetic
  misc_feature (1)..(1): n is a, c, g, or u
  misc_feature (3)..(3): n is a, c, g, or u
ncnuaucgucaaucuucucgagga

SEQ ID NO: 82204 - RNA, 18 nt, Artificial Sequence
  Synthetic
cuguaccaaaccuucgga

SEQ ID NO: 82205 - RNA, 19 nt, Artificial Sequence
  Synthetic
gcuguaccaaaccuucgga

SEQ ID NO: 82206 - RNA, 20 nt, Artificial Sequence
  Synthetic
ugcuguaccaaaccuucgga

SEQ ID NO: 82207 - RNA, 21 nt, Artificial Sequence
  Synthetic
uugcuguaccaaaccuucgga

SEQ ID NO: 82208 - RNA, 22 nt, Artificial Sequence
  Synthetic
guugcuguaccaaaccuucgga

SEQ ID NO: 82209 - RNA, 23 nt, Artificial Sequence
  Synthetic
uguugcuguaccaaaccuucgga

SEQ ID NO: 82210 - RNA, 24 nt, Artificial Sequence
  Synthetic
cuguugcuguaccaaaccuucgga

SEQ ID NO: 82211 - RNA, 18 nt, Artificial Sequence
  Synthetic
cggaaaauuccuauggga

SEQ ID NO: 82212 - RNA, 19 nt, Artificial Sequence
  Synthetic
ucggaaaauuccuauggga

SEQ ID NO: 82213 - RNA, 20 nt, Artificial Sequence
  Synthetic
uucggaaaauuccuauggga

SEQ ID NO: 82214 - RNA, 21 nt, Artificial Sequence
  Synthetic
uuucggaaaauuccuauggga

SEQ ID NO: 82215 - RNA, 22 nt, Artificial Sequence
  Synthetic
cuuucggaaaauuccuauggga

SEQ ID NO: 82216 - RNA, 23 nt, Artificial Sequence
  Synthetic
gcuuucggaaaauuccuauggga

SEQ ID NO: 82217 - RNA, 24 nt, Artificial Sequence
  Synthetic
ggcuuucggaaaauuccuauggga

SEQ ID NO: 82218 - RNA, 18 nt, Artificial Sequence
  Synthetic
  misc_feature (16)..(16): n is a, c, g, or u
agacuguuuguuuaanga

SEQ ID NO: 82219 - RNA, 19 nt, Artificial Sequence
  Synthetic
  misc_feature (17)..(17): n is a, c, g, or u
aagacuguuuguuuaanga

SEQ ID NO: 82220 - RNA, 20 nt, Artificial Sequence
  Synthetic
  misc_feature (18)..(18): n is a, c, g, or u
aaagacuguuuguuuaanga

SEQ ID NO: 82221 - RNA, 21 nt, Artificial Sequence
  Synthetic
  misc_feature (19)..(19): n is a, c, g, or u
caaagacuguuuguuuaanga

SEQ ID NO: 82222 - RNA, 22 nt, Artificial Sequence
  Synthetic
  misc_feature (20)..(20): n is a, c, g, or u
ucaaagacuguuuguuuaanga

SEQ ID NO: 82223 - RNA, 23 nt, Artificial Sequence
  Synthetic
  misc_feature (21)..(21): n is a, c, g, or u
uucaaagacuguuuguuuaanga

SEQ ID NO: 82224 - RNA, 24 nt, Artificial Sequence
  Synthetic
  misc_feature (22)..(22): n is a, c, g, or u
cuucaaagacuguuuguuuaanga

SEQ ID NO: 82225 - RNA, 18 nt, Artificial Sequence
  Synthetic
uguuaacaggccuauuga

SEQ ID NO: 82226 - RNA, 19 nt, Artificial Sequence
  Synthetic
cuguuaacaggccuauuga

SEQ ID NO: 82227 - RNA, 20 nt, Artificial Sequence
  Synthetic
ccuguuaacaggccuauuga

SEQ ID NO: 82228 - RNA, 21 nt, Artificial Sequence
  Synthetic
uccuguuaacaggccuauuga

SEQ ID NO: 82229 - RNA, 22 nt, Artificial Sequence
  Synthetic
uuccuguuaacaggccuauuga

SEQ ID NO: 82230 - RNA, 23 nt, Artificial Sequence
  Synthetic
cuuccuguuaacaggccuauuga

SEQ ID NO: 82231 - RNA, 24 nt, Artificial Sequence
  Synthetic
acuuccuguuaacaggccuauuga

SEQ ID NO: 82232 - RNA, 18 nt, Artificial Sequence
  Synthetic
  misc_feature (5)..(5): n is a, c, g, or u
  misc_feature (17)..(17): n is a, c, g, or u
uaggnccacucacaguna

SEQ ID NO: 82233 - RNA, 19 nt, Artificial Sequence
  Synthetic
  misc_feature (6)..(6): n is a, c, g, or u
  misc_feature (18)..(18): n is a, c, g, or u
guaggnccacucacaguna

SEQ ID NO: 82234 - RNA, 20 nt, Artificial Sequence
  Synthetic
  misc_feature (7)..(7): n is a, c, g, or u
  misc_feature (19)..(19): n is a, c, g, or u
uguaggnccacucacaguna

SEQ ID NO: 82235 - RNA, 21 nt, Artificial Sequence
  Synthetic
  misc_feature (8)..(8): n is a, c, g, or u
  misc_feature (20)..(20): n is a, c, g, or u
uuguaggnccacucacaguna

SEQ ID NO: 82236 - RNA, 22 nt, Artificial Sequence
  Synthetic
  misc_feature (9)..(9): n is a, c, g, or u
  misc_feature (21)..(21): n is a, c, g, or u
uuuguaggnccacucacaguna

SEQ ID NO: 82237 - RNA, 23 nt, Artificial Sequence
  Synthetic
  misc_feature (1)..(1): n is a, c, g, or u
  misc_feature (10)..(10): n is a, c, g, or u
  misc_feature (22)..(22): n is a, c, g, or u
nuuuguaggnccacucacaguna

SEQ ID NO: 82238 - RNA, 24 nt, Artificial Sequence
  Synthetic
  misc_feature (2)..(2): n is a, c, g, or u
  misc_feature (11)..(11): n is a, c, g, or u
  misc_feature (23)..(23): n is a, c, g, or u
anuuuguaggnccacucacaguna

SEQ ID NO: 82239 - RNA, 18 nt, Artificial Sequence
  Synthetic
gcuuucggaaaauuccua

SEQ ID NO: 82240 - RNA, 19 nt, Artificial Sequence
  Synthetic
ggcuuucggaaaauuccua

SEQ ID NO: 82241 - RNA, 20 nt, Artificial Sequence
  Synthetic
gggcuuucggaaaauuccua

SEQ ID NO: 82242 - RNA, 21 nt, Artificial Sequence
  Synthetic
ugggcuuucggaaaauuccua

SEQ ID NO: 82243 - RNA, 22 nt, Artificial Sequence
  Synthetic
  misc_feature (1)..(1): n is a, c, g, or u
nugggcuuucggaaaauuccua

SEQ ID NO: 82244 - RNA, 23 nt, Artificial Sequence
  Synthetic
  misc_feature (2)..(2): n is a, c, g, or u
cnugggcuuucggaaaauuccua

SEQ ID NO: 82245 - RNA, 24 nt, Artificial Sequence
  Synthetic
  misc_feature (3)..(3): n is a, c, g, or u
ucnugggcuuucggaaaauuccua

SEQ ID NO: 82246 - RNA, 18 nt, Artificial Sequence
  Synthetic
  misc_feature (3)..(3): n is a, c, g, or u
canuauuuacacacucua

SEQ ID NO: 82247 - RNA, 19 nt, Artificial Sequence
  Synthetic
  misc_feature (4)..(4): n is a, c, g, or u
acanuauuuacacacucua

SEQ ID NO: 82248 - RNA, 20 nt, Artificial Sequence
  Synthetic
  misc_feature (5)..(5): n is a, c, g, or u
gacanuauuuacacacucua

SEQ ID NO: 82249 - RNA, 21 nt, Artificial Sequence
  Synthetic
  misc_feature (6)..(6): n is a, c, g, or u
agacanuauuuacacacucua

SEQ ID NO: 82250 - RNA, 22 nt, Artificial Sequence
  Synthetic
  misc_feature (1)..(1): n is a, c, g, or u
  misc_feature (7)..(7): n is a, c, g, or u
nagacanuauuuacacacucua

SEQ ID NO: 82251 - RNA, 23 nt, Artificial Sequence
  Synthetic
  misc_feature (2)..(2): n is a, c, g, or u
  misc_feature (8)..(8): n is a, c, g, or u
cnagacanuauuuacacacucua

SEQ ID NO: 82252 - RNA, 24 nt, Artificial Sequence
  Synthetic
  misc_feature (3)..(3): n is a, c, g, or u
  misc_feature (9)..(9): n is a, c, g, or u
acnagacanuauuuacacacucua

SEQ ID NO: 82253 - RNA, 18 nt, Artificial Sequence
  Synthetic
acuucucucaauuuucua

SEQ ID NO: 82254 - RNA, 19 nt, Artificial Sequence
  Synthetic
gacuucucucaauuuucua

SEQ ID NO: 82255 - RNA, 20 nt, Artificial Sequence
  Synthetic
ggacuucucucaauuuucua

SEQ ID NO: 82256 - RNA, 21 nt, Artificial Sequence
  Synthetic
uggacuucucucaauuuucua

SEQ ID NO: 82257 - RNA, 22 nt, Artificial Sequence
  Synthetic
guggacuucucucaauuuucua

SEQ ID NO: 82258 - RNA, 23 nt, Artificial Sequence
  Synthetic
gguggacuucucucaauuuucua

SEQ ID NO: 82259 - RNA, 24 nt, Artificial Sequence
  Synthetic
ugguggacuucucucaauuuucua

SEQ ID NO: 82260 - RNA, 18 nt, Artificial Sequence
  Synthetic
uauauggaugauguggua

SEQ ID NO: 82261 - RNA, 19 nt, Artificial Sequence
  Synthetic
uuauauggaugauguggua

SEQ ID NO: 82262 - RNA, 20 nt, Artificial Sequence
  Synthetic
guuauauggaugauguggua

SEQ ID NO: 82263 - RNA, 21 nt, Artificial Sequence
  Synthetic
aguuauauggaugauguggua

SEQ ID NO: 82264 - RNA, 22 nt, Artificial Sequence
  Synthetic
caguuauauggaugauguggua

SEQ ID NO: 82265 - RNA, 23 nt, Artificial Sequence
  Synthetic
ucaguuauauggaugauguggua

SEQ ID NO: 82266 - RNA, 24 nt, Artificial Sequence
  Synthetic
uucaguuauauggaugauguggua

SEQ ID NO: 82267 - RNA, 18 nt, Artificial Sequence
  Synthetic
  misc_feature (16)..(16): n is a, c, g, or u
uaccgccucagcucunua

SEQ ID NO: 82268 - RNA, 19 nt, Artificial Sequence
  Synthetic
  misc_feature (17)..(17): n is a, c, g, or u
auaccgccucagcucunua

SEQ ID NO: 82269 - RNA, 20 nt, Artificial Sequence
  Synthetic
  misc_feature (18)..(18): n is a, c, g, or u
gauaccgccucagcucunua

SEQ ID NO: 82270 - RNA, 21 nt, Artificial Sequence
  Synthetic
  misc_feature (1)..(1): n is a, c, g, or u
  misc_feature (19)..(19): n is a, c, g, or u
ngauaccgccucagcucunua

SEQ ID NO: 82271 - RNA, 22 nt, Artificial Sequence
  Synthetic
  misc_feature (2)..(2): n is a, c, g, or u
  misc_feature (20)..(20): n is a, c, g, or u
ungauaccgccucagcucunua

SEQ ID NO: 82272 - RNA, 23 nt, Artificial Sequence
  Synthetic
  misc_feature (3)..(3): n is a, c, g, or u
  misc_feature (21)..(21): n is a, c, g, or u
cungauaccgccucagcucunua

SEQ ID NO: 82273 - RNA, 24 nt, Artificial Sequence
  Synthetic
  misc_feature (4)..(4): n is a, c, g, or u
  misc_feature (22)..(22): n is a, c, g, or u
ucungauaccgccucagcucunua

SEQ ID NO: 82274 - RNA, 18 nt, Artificial Sequence
  Synthetic
  misc_feature (11)..(11): n is a, c, g, or u
auaaggugggnaacuuua

SEQ ID NO: 82275 - RNA, 19 nt, Artificial Sequence
  Synthetic
  misc_feature (12)..(12): n is a, c, g, or u
cauaaggugggnaacuuua

SEQ ID NO: 82276 - RNA, 20 nt, Artificial Sequence
  Synthetic
  misc_feature (13)..(13): n is a, c, g, or u
ucauaaggugggnaacuuua

SEQ ID NO: 82277 - RNA, 21 nt, Artificial Sequence
  Synthetic
  misc_feature (14)..(14): n is a, c, g, or u
cucauaaggugggnaacuuua

SEQ ID NO: 82278 - RNA, 22 nt, Artificial Sequence
  Synthetic
  misc_feature (15)..(15): n is a, c, g, or u
acucauaaggugggnaacuuua

SEQ ID NO: 82279 - RNA, 23 nt, Artificial Sequence
  Synthetic
  misc_feature (16)..(16): n is a, c, g, or u
gacucauaaggugggnaacuuua

SEQ ID NO: 82280 - RNA, 24 nt, Artificial Sequence
  Synthetic
  misc_feature (17)..(17): n is a, c, g, or u
ggacucauaaggugggnaacuuua

SEQ ID NO: 82281 - RNA, 18 nt, Artificial Sequence
  Synthetic
ugggacuucaaucccaac

SEQ ID NO: 82282 - RNA, 19 nt, Artificial Sequence
  Synthetic
uugggacuucaaucccaac

SEQ ID NO: 82283 - RNA, 20 nt, Artificial Sequence
  Synthetic
auugggacuucaaucccaac

SEQ ID NO: 82284 - RNA, 21 nt, Artificial Sequence
  Synthetic
gauugggacuucaaucccaac

SEQ ID NO: 82285 - RNA, 22 nt, Artificial Sequence
  Synthetic
agauugggacuucaaucccaac

SEQ ID NO: 82286 - RNA, 23 nt, Artificial Sequence
  Synthetic
cagauugggacuucaaucccaac

SEQ ID NO: 82287 - RNA, 24 nt, Artificial Sequence
  Synthetic
ccagauugggacuucaaucccaac

SEQ ID NO: 82288 - RNA, 18 nt, Artificial Sequence
  Synthetic
caccauauucuugggaac

SEQ ID NO: 82289 - RNA, 19 nt, Artificial Sequence
  Synthetic
ucaccauauucuugggaac

SEQ ID NO: 82290 - RNA, 20 nt, Artificial Sequence
  Synthetic
gucaccauauucuugggaac

SEQ ID NO: 82291 - RNA, 21 nt, Artificial Sequence
  Synthetic
ggucaccauauucuugggaac

SEQ ID NO: 82292 - RNA, 22 nt, Artificial Sequence
  Synthetic
gggucaccauauucuugggaac

SEQ ID NO: 82293 - RNA, 23 nt, Artificial Sequence
  Synthetic
ugggucaccauauucuugggaac

SEQ ID NO: 82294 - RNA, 24 nt, Artificial Sequence
  Synthetic
gugggucaccauauucuugggaac

SEQ ID NO: 82295 - RNA, 18 nt, Artificial Sequence
  Synthetic
ggggacccugcgcugaac

SEQ ID NO: 82296 - RNA, 19 nt, Artificial Sequence
  Synthetic
uggggacccugcgcugaac

SEQ ID NO: 82297 - RNA, 20 nt, Artificial Sequence
  Synthetic
uuggggacccugcgcugaac

SEQ ID NO: 82298 - RNA, 21 nt, Artificial Sequence
  Synthetic
auuggggacccugcgcugaac

SEQ ID NO: 82299 - RNA, 22 nt, Artificial Sequence
  Synthetic
gauuggggacccugcgcugaac

SEQ ID NO: 82300 - RNA, 23 nt, Artificial Sequence
  Synthetic
ggauuggggacccugcgcugaac

SEQ ID NO: 82301 - RNA, 24 nt, Artificial Sequence
  Synthetic
aggauuggggacccugcgcugaac

SEQ ID NO: 82302 - RNA, 18 nt, Artificial Sequence
  Synthetic
  misc_feature (15)..(15): n is a, c, g, or u
gacuguuuguuuaangac

SEQ ID NO: 82303 - RNA, 19 nt, Artificial Sequence
  Synthetic
  misc_feature (16)..(16): n is a, c, g, or u
agacuguuuguuuaangac

SEQ ID NO: 82304 - RNA, 20 nt, Artificial Sequence
  Synthetic
  misc_feature (17)..(17): n is a, c, g, or u
aagacuguuuguuuaangac

SEQ ID NO: 82305 - RNA, 21 nt, Artificial Sequence
  Synthetic
  misc_feature (18)..(18): n is a, c, g, or u
aaagacuguuuguuuaangac

SEQ ID NO: 82306 - RNA, 22 nt, Artificial Sequence
  Synthetic
  misc_feature (19)..(19): n is a, c, g, or u
caaagacuguuuguuuaangac

SEQ ID NO: 82307 - RNA, 23 nt, Artificial Sequence
  Synthetic
  misc_feature (20)..(20): n is a, c, g, or u
ucaaagacuguuuguuuaangac

SEQ ID NO: 82308 - RNA, 24 nt, Artificial Sequence
  Synthetic
  misc_feature (21)..(21): n is a, c, g, or u
uucaaagacuguuuguuuaangac

SEQ ID NO: 82309 - RNA, 18 nt, Artificial Sequence
  Synthetic
uuucuguguaaacaauac

SEQ ID NO: 82310 - RNA, 19 nt, Artificial Sequence
  Synthetic
cuuucuguguaaacaauac

SEQ ID NO: 82311 - RNA, 20 nt, Artificial Sequence
  Synthetic
ccuuucuguguaaacaauac

SEQ ID NO: 82312 - RNA, 21 nt, Artificial Sequence
  Synthetic
gccuuucuguguaaacaauac

SEQ ID NO: 82313 - RNA, 22 nt, Artificial Sequence
  Synthetic
ggccuuucuguguaaacaauac

SEQ ID NO: 82314 - RNA, 23 nt, Artificial Sequence
  Synthetic
aggccuuucuguguaaacaauac

SEQ ID NO: 82315 - RNA, 24 nt, Artificial Sequence
  Synthetic
aaggccuuucuguguaaacaauac

SEQ ID NO: 82316 - RNA, 18 nt, Artificial Sequence
  Synthetic
gggcgcaccucucuuuac

SEQ ID NO: 82317 - RNA, 19 nt, Artificial Sequence
  Synthetic
ggggcgcaccucucuuuac

SEQ ID NO: 82318 - RNA, 20 nt, Artificial Sequence
  Synthetic
cggggcgcaccucucuuuac

SEQ ID NO: 82319 - RNA, 21 nt, Artificial Sequence
  Synthetic
acggggcgcaccucucuuuac

SEQ ID NO: 82320 - RNA, 22 nt, Artificial Sequence
  Synthetic
cacggggcgcaccucucuuuac

SEQ ID NO: 82321 - RNA, 23 nt, Artificial Sequence
  Synthetic
ccacggggcgcaccucucuuuac

SEQ ID NO: 82322 - RNA, 24 nt, Artificial Sequence
  Synthetic
accacggggcgcaccucucuuuac

SEQ ID NO: 82323 - RNA, 18 nt, Artificial Sequence
  Synthetic
cgucgcauggagaccacc

SEQ ID NO: 82324 - RNA, 19 nt, Artificial Sequence
  Synthetic
acgucgcauggagaccacc

SEQ ID NO: 82325 - RNA, 20 nt, Artificial Sequence
  Synthetic
cacgucgcauggagaccacc

SEQ ID NO: 82326 - RNA, 21 nt, Artificial Sequence
  Synthetic
gcacgucgcauggagaccacc

SEQ ID NO: 82327 - RNA, 22 nt, Artificial Sequence
  Synthetic
ugcacgucgcauggagaccacc

SEQ ID NO: 82328 - RNA, 23 nt, Artificial Sequence
  Synthetic
cugcacgucgcauggagaccacc

SEQ ID NO: 82329 - RNA, 24 nt, Artificial Sequence
  Synthetic
ucugcacgucgcauggagaccacc

SEQ ID NO: 82330 - RNA, 18 nt, Artificial Sequence
  Synthetic
  misc_feature (1)..(1): n is a, c, g, or u
naaugucaacgaccgacc

SEQ ID NO: 82331 - RNA, 19 nt, Artificial Sequence
  Synthetic
  misc_feature (2)..(2): n is a, c, g, or u
gnaaugucaacgaccgacc

SEQ ID NO: 82332 - RNA, 20 nt, Artificial Sequence
  Synthetic
  misc_feature (3)..(3): n is a, c, g, or u
ugnaaugucaacgaccgacc

SEQ ID NO: 82333 - RNA, 21 nt, Artificial Sequence
  Synthetic
  misc_feature (4)..(4): n is a, c, g, or u
cugnaaugucaacgaccgacc

SEQ ID NO: 82334 - RNA, 22 nt, Artificial Sequence
  Synthetic
  misc_feature (5)..(5): n is a, c, g, or u
ucugnaaugucaacgaccgacc

SEQ ID NO: 82335 - RNA, 23 nt, Artificial Sequence
  Synthetic
  misc_feature (6)..(6): n is a, c, g, or u
cucugnaaugucaacgaccgacc

SEQ ID NO: 82336 - RNA, 24 nt, Artificial Sequence
  Synthetic
  misc_feature (7)..(7): n is a, c, g, or u
ucucugnaaugucaacgaccgacc

SEQ ID NO: 82337 - RNA, 18 nt, Artificial Sequence
  Synthetic
  misc_feature (9)..(9): n is a, c, g, or u
  misc_feature (12)..(12): n is a, c, g, or u
cugccguuncgnccgacc

SEQ ID NO: 82338 - RNA, 19 nt, Artificial Sequence
  Synthetic
  misc_feature (10)..(10): n is a, c, g, or u
  misc_feature (13)..(13): n is a, c, g, or u
ucugccguuncgnccgacc

SEQ ID NO: 82339 - RNA, 20 nt, Artificial Sequence
  Synthetic
  misc_feature (11)..(11): n is a, c, g, or u
  misc_feature (14)..(14): n is a, c, g, or u
gucugccguuncgnccgacc

SEQ ID NO: 82340 - RNA, 21 nt, Artificial Sequence
  Synthetic
  misc_feature (12)..(12): n is a, c, g, or u
  misc_feature (15)..(15): n is a, c, g, or u
cgucugccguuncgnccgacc

SEQ ID NO: 82341 - RNA, 22 nt, Artificial Sequence
  Synthetic
  misc_feature (13)..(13): n is a, c, g, or u
  misc_feature (16)..(16): n is a, c, g, or u
ccgucugccguuncgnccgacc

SEQ ID NO: 82342 - RNA, 23 nt, Artificial Sequence
  Synthetic
  misc_feature (14)..(14): n is a, c, g, or u
  misc_feature (17)..(17): n is a, c, g, or u
uccgucugccguuncgnccgacc

SEQ ID NO: 82343 - RNA, 24 nt, Artificial Sequence
  Synthetic
  misc_feature (15)..(15): n is a, c, g, or u
  misc_feature (18)..(18): n is a, c, g, or u
cuccgucugccguuncgnccgacc

SEQ ID NO: 82344 - RNA, 18 nt, Artificial Sequence
  Synthetic
acgacgaggcaggucccc

SEQ ID NO: 82345 - RNA, 19 nt, Artificial Sequence
  Synthetic
gacgacgaggcaggucccc

SEQ ID NO: 82346 - RNA, 20 nt, Artificial Sequence
  Synthetic
agacgacgaggcaggucccc

SEQ ID NO: 82347 - RNA, 21 nt, Artificial Sequence
  Synthetic
uagacgacgaggcaggucccc

SEQ ID NO: 82348 - RNA, 22 nt, Artificial Sequence
  Synthetic
uuagacgacgaggcaggucccc

SEQ ID NO: 82349 - RNA, 23 nt, Artificial Sequence
  Synthetic
guuagacgacgaggcaggucccc

SEQ ID NO: 82350 - RNA, 24 nt, Artificial Sequence
  Synthetic
uguuagacgacgaggcaggucccc

SEQ ID NO: 82351 - RNA, 18 nt, Artificial Sequence
  Synthetic
ccgucggcgcugaauccc

SEQ ID NO: 82352 - RNA, 19 nt, Artificial Sequence
  Synthetic
cccgucggcgcugaauccc

SEQ ID NO: 82353 - RNA, 20 nt, Artificial Sequence
  Synthetic
ucccgucggcgcugaauccc

SEQ ID NO: 82354 - RNA, 21 nt, Artificial Sequence
  Synthetic
gucccgucggcgcugaauccc

SEQ ID NO: 82355 - RNA, 22 nt, Artificial Sequence
  Synthetic
cgucccgucggcgcugaauccc

SEQ ID NO: 82356 - RNA, 23 nt, Artificial Sequence
  Synthetic
acgucccgucggcgcugaauccc

SEQ ID NO: 82357 - RNA, 24 nt, Artificial Sequence
  Synthetic
uacgucccgucggcgcugaauccc

SEQ ID NO: 82358 - RNA, 18 nt, Artificial Sequence
  Synthetic
acaucacaucaggauucc

SEQ ID NO: 82359 - RNA, 19 nt, Artificial Sequence
  Synthetic
aacaucacaucaggauucc

SEQ ID NO: 82360 - RNA, 20 nt, Artificial Sequence
  Synthetic
gaacaucacaucaggauucc

SEQ ID NO: 82361 - RNA, 21 nt, Artificial Sequence
  Synthetic
agaacaucacaucaggauucc

SEQ ID NO: 82362 - RNA, 22 nt, Artificial Sequence
  Synthetic
gagaacaucacaucaggauucc

SEQ ID NO: 82363 - RNA, 23 nt, Artificial Sequence
  Synthetic
ggagaacaucacaucaggauucc

SEQ ID NO: 82364 - RNA, 24 nt, Artificial Sequence
  Synthetic
uggagaacaucacaucaggauucc

SEQ ID NO: 82365 - RNA, 18 nt, Artificial Sequence
  Synthetic
ucucaauguuaguauucc

SEQ ID NO: 82366 - RNA, 19 nt, Artificial Sequence
  Synthetic
aucucaauguuaguauucc

SEQ ID NO: 82367 - RNA, 20 nt, Artificial Sequence
  Synthetic
aaucucaauguuaguauucc

SEQ ID NO: 82368 - RNA, 21 nt, Artificial Sequence
  Synthetic
gaaucucaauguuaguauucc

SEQ ID NO: 82369 - RNA, 22 nt, Artificial Sequence
  Synthetic
ggaaucucaauguuaguauucc

SEQ ID NO: 82370 - RNA, 23 nt, Artificial Sequence
  Synthetic
gggaaucucaauguuaguauucc

SEQ ID NO: 82371 - RNA, 24 nt, Artificial Sequence
  Synthetic
cgggaaucucaauguuaguauucc

SEQ ID NO: 82372 - RNA, 18 nt, Artificial Sequence
  Synthetic
gggaacaagagcuacagc

SEQ ID NO: 82373 - RNA, 19 nt, Artificial Sequence
  Synthetic
ugggaacaagagcuacagc

SEQ ID NO: 82374 - RNA, 20 nt, Artificial Sequence
  Synthetic
uugggaacaagagcuacagc

SEQ ID NO: 82375 - RNA, 21 nt, Artificial Sequence
  Synthetic
cuugggaacaagagcuacagc

SEQ ID NO: 82376 - RNA, 22 nt, Artificial Sequence
  Synthetic
ucuugggaacaagagcuacagc

SEQ ID NO: 82377 - RNA, 23 nt, Artificial Sequence
  Synthetic
uucuugggaacaagagcuacagc

SEQ ID NO: 82378 - RNA, 24 nt, Artificial Sequence
  Synthetic
auucuugggaacaagagcuacagc

SEQ ID NO: 82379 - RNA, 18 nt, Artificial Sequence
  Synthetic
  misc_feature (6)..(6): n is a, c, g, or u
  misc_feature (12)..(12): n is a, c, g, or u
ggaucnucaacnaccagc

SEQ ID NO: 82380 - RNA, 19 nt, Artificial Sequence
  Synthetic
  misc_feature (7)..(7): n is a, c, g, or u
  misc_feature (13)..(13): n is a, c, g, or u
aggaucnucaacnaccagc

SEQ ID NO: 82381 - RNA, 20 nt, Artificial Sequence
  Synthetic
  misc_feature (8)..(8): n is a, c, g, or u
  misc_feature (14)..(14): n is a, c, g, or u
caggaucnucaacnaccagc

SEQ ID NO: 82382 - RNA, 21 nt, Artificial Sequence
  Synthetic
  misc_feature (9)..(9): n is a, c, g, or u
  misc_feature (15)..(15): n is a, c, g, or u
ccaggaucnucaacnaccagc

SEQ ID NO: 82383 - RNA, 22 nt, Artificial Sequence
  Synthetic
  misc_feature (10)..(10): n is a, c, g, or u
  misc_feature (16)..(16): n is a, c, g, or u
uccaggaucnucaacnaccagc

SEQ ID NO: 82384 - RNA, 23 nt, Artificial Sequence
  Synthetic
  misc_feature (11)..(11): n is a, c, g, or u
  misc_feature (17)..(17): n is a, c, g, or u
uuccaggaucnucaacnaccagc

SEQ ID NO: 82385 - RNA, 24 nt, Artificial Sequence
  Synthetic
  misc_feature (12)..(12): n is a, c, g, or u
  misc_feature (18)..(18): n is a, c, g, or u
auuccaggaucnucaacnaccagc

SEQ ID NO: 82386 - RNA, 18 nt, Artificial Sequence
  Synthetic
cgccaacaagguaggagc

SEQ ID NO: 82387 - RNA, 19 nt, Artificial Sequence
  Synthetic
acgccaacaagguaggagc

SEQ ID NO: 82388 - RNA, 20 nt, Artificial Sequence
  Synthetic
gacgccaacaagguaggagc

SEQ ID NO: 82389 - RNA, 21 nt, Artificial Sequence
  Synthetic
agacgccaacaagguaggagc

SEQ ID NO: 82390 - RNA, 22 nt, Artificial Sequence
  Synthetic
cagacgccaacaagguaggagc

SEQ ID NO: 82391 - RNA, 23 nt, Artificial Sequence
  Synthetic
ccagacgccaacaagguaggagc

SEQ ID NO: 82392 - RNA, 24 nt, Artificial Sequence
  Synthetic
gccagacgccaacaagguaggagc

SEQ ID NO: 82393 - RNA, 18 nt, Artificial Sequence
  Synthetic
  misc_feature (5)..(5): n is a, c, g, or u
ugggnuucaccccaccgc

SEQ ID NO: 82394 - RNA, 19 nt, Artificial Sequence
  Synthetic
  misc_feature (6)..(6): n is a, c, g, or u
cugggnuucaccccaccgc

SEQ ID NO: 82395 - RNA, 20 nt, Artificial Sequence
  Synthetic
  misc_feature (7)..(7): n is a, c, g, or u
gcugggnuucaccccaccgc

SEQ ID NO: 82396 - RNA, 21 nt, Artificial Sequence
  Synthetic
  misc_feature (8)..(8): n is a, c, g, or u
ggcugggnuucaccccaccgc

SEQ ID NO: 82397 - RNA, 22 nt, Artificial Sequence
  Synthetic
  misc_feature (9)..(9): n is a, c, g, or u
gggcugggnuucaccccaccgc

SEQ ID NO: 82398 - RNA, 23 nt, Artificial Sequence
  Synthetic
  misc_feature (10)..(10): n is a, c, g, or u
cgggcugggnuucaccccaccgc

SEQ ID NO: 82399 - RNA, 24 nt, Artificial Sequence
  Synthetic
  misc_feature (11)..(11): n is a, c, g, or u
ucgggcugggnuucaccccaccgc

SEQ ID NO: 82400 - RNA, 18 nt, Artificial Sequence
  Synthetic
  misc_feature (15)..(15): n is a, c, g, or u
gacccuucucggggncgc

SEQ ID NO: 82401 - RNA, 19 nt, Artificial Sequence
  Synthetic
  misc_feature (16)..(16): n is a, c, g, or u
cgacccuucucggggncgc

SEQ ID NO: 82402 - RNA, 20 nt, Artificial Sequence
  Synthetic
  misc_feature (17)..(17): n is a, c, g, or u
acgacccuucucggggncgc

SEQ ID NO: 82403 - RNA, 21 nt, Artificial Sequence
  Synthetic
  misc_feature (18)..(18): n is a, c, g, or u
gacgacccuucucggggncgc

SEQ ID NO: 82404 - RNA, 22 nt, Artificial Sequence
  Synthetic
  misc_feature (19)..(19): n is a, c, g, or u
ggacgacccuucucggggncgc

SEQ ID NO: 82405 - RNA, 23 nt, Artificial Sequence
  Synthetic
  misc_feature (20)..(20): n is a, c, g, or u
cggacgacccuucucggggncgc

SEQ ID NO: 82406 - RNA, 24 nt, Artificial Sequence
  Synthetic
  misc_feature (21)..(21): n is a, c, g, or u
gcggacgacccuucucggggncgc

SEQ ID NO: 82407 - RNA, 18 nt, Artificial Sequence
  Synthetic
uucaccucugcacgucgc

SEQ ID NO: 82408 - RNA, 19 nt, Artificial Sequence
  Synthetic
cuucaccucugcacgucgc

SEQ ID NO: 82409 - RNA, 20 nt, Artificial Sequence
  Synthetic
gcuucaccucugcacgucgc

SEQ ID NO: 82410 - RNA, 21 nt, Artificial Sequence
  Synthetic
cgcuucaccucugcacgucgc

SEQ ID NO: 82411 - RNA, 22 nt, Artificial Sequence
  Synthetic
ucgcuucaccucugcacgucgc

SEQ ID NO: 82412 - RNA, 23 nt, Artificial Sequence
  Synthetic
uucgcuucaccucugcacgucgc

SEQ ID NO: 82413 - RNA, 24 nt, Artificial Sequence
  Synthetic
cuucgcuucaccucugcacgucgc

SEQ ID NO: 82414 - RNA, 18 nt, Artificial Sequence
  Synthetic
gacgcaacccccacuggc

SEQ ID NO: 82415 - RNA, 19 nt, Artificial Sequence
  Synthetic
ugacgcaacccccacuggc

SEQ ID NO: 82416 - RNA, 20 nt, Artificial Sequence
  Synthetic
cugacgcaacccccacuggc

SEQ ID NO: 82417 - RNA, 21 nt, Artificial Sequence
  Synthetic
gcugacgcaacccccacuggc

SEQ ID NO: 82418 - RNA, 22 nt, Artificial Sequence
  Synthetic
ugcugacgcaacccccacuggc

SEQ ID NO: 82419 - RNA, 23 nt, Artificial Sequence
  Synthetic
uugcugacgcaacccccacuggc

SEQ ID NO: 82420 - RNA, 24 nt, Artificial Sequence
  Synthetic
uuugcugacgcaacccccacuggc

SEQ ID NO: 82421 - RNA, 18 nt, Artificial Sequence
  Synthetic
ugggccaucagcgcaugc

SEQ ID NO: 82422 - RNA, 19 nt, Artificial Sequence
  Synthetic
augggccaucagcgcaugc

SEQ ID NO: 82423 - RNA, 20 nt, Artificial Sequence
  Synthetic
caugggccaucagcgcaugc

SEQ ID NO: 82424 - RNA, 21 nt, Artificial Sequence
  Synthetic
ucaugggccaucagcgcaugc

SEQ ID NO: 82425 - RNA, 22 nt, Artificial Sequence
  Synthetic
gucaugggccaucagcgcaugc

SEQ ID NO: 82426 - RNA, 23 nt, Artificial Sequence
  Synthetic
ggucaugggccaucagcgcaugc

SEQ ID NO: 82427 - RNA, 24 nt, Artificial Sequence
  Synthetic
uggucaugggccaucagcgcaugc

SEQ ID NO: 82428 - RNA, 18 nt, Artificial Sequence
  Synthetic
cugccaacuggauccugc

SEQ ID NO: 82429 - RNA, 19 nt, Artificial Sequence
  Synthetic
gcugccaacuggauccugc

SEQ ID NO: 82430 - RNA, 20 nt, Artificial Sequence
  Synthetic
ugcugccaacuggauccugc

SEQ ID NO: 82431 - RNA, 21 nt, Artificial Sequence
  Synthetic
gugcugccaacuggauccugc

SEQ ID NO: 82432 - RNA, 22 nt, Artificial Sequence
  Synthetic
ugugcugccaacuggauccugc

SEQ ID NO: 82433 - RNA, 23 nt, Artificial Sequence
  Synthetic
cugugcugccaacuggauccugc

SEQ ID NO: 82434 - RNA, 24 nt, Artificial Sequence
  Synthetic
gcugugcugccaacuggauccugc

SEQ ID NO: 82435 - RNA, 18 nt, Artificial Sequence
  Synthetic
  misc_feature (12)..(12): n is a, c, g, or u
  misc_feature (15)..(15): n is a, c, g, or u
aggcaagcaauncunugc

SEQ ID NO: 82436 - RNA, 19 nt, Artificial Sequence
  Synthetic
  misc_feature (13)..(13): n is a, c, g, or u
  misc_feature (16)..(16): n is a, c, g, or u
caggcaagcaauncunugc

SEQ ID NO: 82437 - RNA, 20 nt, Artificial Sequence
  Synthetic
  misc_feature (14)..(14): n is a, c, g, or u
  misc_feature (17)..(17): n is a, c, g, or u
ucaggcaagcaauncunugc

SEQ ID NO: 82438 - RNA, 21 nt, Artificial Sequence
  Synthetic
  misc_feature (15)..(15): n is a, c, g, or u
  misc_feature (18)..(18): n is a, c, g, or u
cucaggcaagcaauncunugc

SEQ ID NO: 82439 - RNA, 22 nt, Artificial Sequence
  Synthetic
  misc_feature (16)..(16): n is a, c, g, or u
  misc_feature (19)..(19): n is a, c, g, or u
acucaggcaagcaauncunugc

SEQ ID NO: 82440 - RNA, 23 nt, Artificial Sequence
  Synthetic
  misc_feature (17)..(17): n is a, c, g, or u
  misc_feature (20)..(20): n is a, c, g, or u
cacucaggcaagcaauncunugc

SEQ ID NO: 82441 - RNA, 24 nt, Artificial Sequence
  Synthetic
  misc_feature (18)..(18): n is a, c, g, or u
  misc_feature (21)..(21): n is a, c, g, or u
gcacucaggcaagcaauncunugc

SEQ ID NO: 82442 - RNA, 18 nt, Artificial Sequence
  Synthetic
  misc_feature (14)..(14): n is a, c, g, or u
  misc_feature (17)..(17): n is a, c, g, or u
cuuggguggcuuunggnc

SEQ ID NO: 82443 - RNA, 19 nt, Artificial Sequence
  Synthetic
  misc_feature (15)..(15): n is a, c, g, or u
  misc_feature (18)..(18): n is a, c, g, or u
ccuuggguggcuuunggnc

SEQ ID NO: 82444 - RNA, 20 nt, Artificial Sequence
  Synthetic
  misc_feature (16)..(16): n is a, c, g, or u
  misc_feature (19)..(19): n is a, c, g, or u
gccuuggguggcuuunggnc

SEQ ID NO: 82445 - RNA, 21 nt, Artificial Sequence
  Synthetic
  misc_feature (17)..(17): n is a, c, g, or u
  misc_feature (20)..(20): n is a, c, g, or u
ugccuuggguggcuuunggnc

SEQ ID NO: 82446 - RNA, 22 nt, Artificial Sequence
  Synthetic
  misc_feature (18)..(18): n is a, c, g, or u
  misc_feature (21)..(21): n is a, c, g, or u
gugccuuggguggcuuunggnc

SEQ ID NO: 82447 - RNA, 23 nt, Artificial Sequence
  Synthetic
  misc_feature (19)..(19): n is a, c, g, or u
  misc_feature (22)..(22): n is a, c, g, or u
ugugccuuggguggcuuunggnc

SEQ ID NO: 82448 - RNA, 24 nt, Artificial Sequence
  Synthetic
  misc_feature (20)..(20): n is a, c, g, or u
  misc_feature (23)..(23): n is a, c, g, or u
cugugccuuggguggcuuunggnc

SEQ ID NO: 82449 - RNA, 18 nt, Artificial Sequence
  Synthetic
ucgcagaagaucucaauc

SEQ ID NO: 82450 - RNA, 19 nt, Artificial Sequence
  Synthetic
gucgcagaagaucucaauc

SEQ ID NO: 82451 - RNA, 20 nt, Artificial Sequence
  Synthetic
cgucgcagaagaucucaauc

SEQ ID NO: 82452 - RNA, 21 nt, Artificial Sequence
  Synthetic
gcgucgcagaagaucucaauc

SEQ ID NO: 82453 - RNA, 22 nt, Artificial Sequence
  Synthetic
cgcgucgcagaagaucucaauc

SEQ ID NO: 82454 - RNA, 23 nt, Artificial Sequence
  Synthetic
ccgcgucgcagaagaucucaauc

SEQ ID NO: 82455 - RNA, 24 nt, Artificial Sequence
  Synthetic
gccgcgucgcagaagaucucaauc

SEQ ID NO: 82456 - RNA, 18 nt, Artificial Sequence
  Synthetic
uauucccaucccaucauc

SEQ ID NO: 82457 - RNA, 19 nt, Artificial Sequence
  Synthetic
guauucccaucccaucauc

SEQ ID NO: 82458 - RNA, 20 nt, Artificial Sequence
  Synthetic
uguauucccaucccaucauc

SEQ ID NO: 82459 - RNA, 21 nt, Artificial Sequence
  Synthetic
cuguauucccaucccaucauc

SEQ ID NO: 82460 - RNA, 22 nt, Artificial Sequence
  Synthetic
ccuguauucccaucccaucauc

SEQ ID NO: 82461 - RNA, 23 nt, Artificial Sequence
  Synthetic
accuguauucccaucccaucauc

SEQ ID NO: 82462 - RNA, 24 nt, Artificial Sequence
  Synthetic
caccuguauucccaucccaucauc

SEQ ID NO: 82463 - RNA, 18 nt, Artificial Sequence
  Synthetic
guauuaaaccuuauuauc

SEQ ID NO: 82464 - RNA, 19 nt, Artificial Sequence
  Synthetic
gguauuaaaccuuauuauc

SEQ ID NO: 82465 - RNA, 20 nt, Artificial Sequence
  Synthetic
ggguauuaaaccuuauuauc

SEQ ID NO: 82466 - RNA, 21 nt, Artificial Sequence
  Synthetic
aggguauuaaaccuuauuauc

SEQ ID NO: 82467 - RNA, 22 nt, Artificial Sequence
  Synthetic
aaggguauuaaaccuuauuauc

SEQ ID NO: 82468 - RNA, 23 nt, Artificial Sequence
  Synthetic
uaaggguauuaaaccuuauuauc

SEQ ID NO: 82469 - RNA, 24 nt, Artificial Sequence
  Synthetic
auaaggguauuaaaccuuauuauc

SEQ ID NO: 82470 - RNA, 18 nt, Artificial Sequence
  Synthetic
ucuuacauaagaggacuc

SEQ ID NO: 82471 - RNA, 19 nt, Artificial Sequence
  Synthetic
gucuuacauaagaggacuc

SEQ ID NO: 82472 - RNA, 20 nt, Artificial Sequence
  Synthetic
ggucuuacauaagaggacuc

SEQ ID NO: 82473 - RNA, 21 nt, Artificial Sequence
  Synthetic
aggucuuacauaagaggacuc

SEQ ID NO: 82474 - RNA, 22 nt, Artificial Sequence
  Synthetic
aaggucuuacauaagaggacuc

SEQ ID NO: 82475 - RNA, 23 nt, Artificial Sequence
  Synthetic
caaggucuuacauaagaggacuc

SEQ ID NO: 82476 - RNA, 24 nt, Artificial Sequence
  Synthetic
ccaaggucuuacauaagaggacuc

SEQ ID NO: 82477 - RNA, 18 nt, Artificial Sequence
  Synthetic
  misc_feature (5)..(5): n is a, c, g, or u
gggangccuuagagucuc

SEQ ID NO: 82478 - RNA, 19 nt, Artificial Sequence
  Synthetic
  misc_feature (6)..(6): n is a, c, g, or u
cgggangccuuagagucuc

SEQ ID NO: 82479 - RNA, 20 nt, Artificial Sequence
  Synthetic
  misc_feature (7)..(7): n is a, c, g, or u
ucgggangccuuagagucuc

SEQ ID NO: 82480 - RNA, 21 nt, Artificial Sequence
  Synthetic
  misc_feature (8)..(8): n is a, c, g, or u
aucgggangccuuagagucuc

SEQ ID NO: 82481 - RNA, 22 nt, Artificial Sequence
  Synthetic
  misc_feature (9)..(9): n is a, c, g, or u
uaucgggangccuuagagucuc

SEQ ID NO: 82482 - RNA, 23 nt, Artificial Sequence
  Synthetic
  misc_feature (1)..(1): n is a, c, g, or u
  misc_feature (10)..(10): n is a, c, g, or u
nuaucgggangccuuagagucuc

SEQ ID NO: 82483 - RNA, 24 nt, Artificial Sequence
  Synthetic
  misc_feature (2)..(2): n is a, c, g, or u
  misc_feature (11)..(11): n is a, c, g, or u
unuaucgggangccuuagagucuc

SEQ ID NO: 82484 - RNA, 18 nt, Artificial Sequence
  Synthetic
  misc_feature (1)..(1): n is a, c, g, or u
  misc_feature (4)..(4): n is a, c, g, or u
nucnaccaaucgccaguc

SEQ ID NO: 82485 - RNA, 19 nt, Artificial Sequence
  Synthetic
  misc_feature (2)..(2): n is a, c, g, or u
  misc_feature (5)..(5): n is a, c, g, or u
cnucnaccaaucgccaguc

SEQ ID NO: 82486 - RNA, 20 nt, Artificial Sequence
  Synthetic
  misc_feature (3)..(3): n is a, c, g, or u
  misc_feature (6)..(6): n is a, c, g, or u
gcnucnaccaaucgccaguc

SEQ ID NO: 82487 - RNA, 21 nt, Artificial Sequence
  Synthetic
  misc_feature (4)..(4): n is a, c, g, or u
  misc_feature (7)..(7): n is a, c, g, or u
ugcnucnaccaaucgccaguc

SEQ ID NO: 82488 - RNA, 22 nt, Artificial Sequence
  Synthetic
  misc_feature (5)..(5): n is a, c, g, or u
  misc_feature (8)..(8): n is a, c, g, or u
cugcnucnaccaaucgccaguc

SEQ ID NO: 82489 - RNA, 23 nt, Artificial Sequence
  Synthetic
  misc_feature (6)..(6): n is a, c, g, or u
  misc_feature (9)..(9): n is a, c, g, or u
ccugcnucnaccaaucgccaguc

SEQ ID NO: 82490 - RNA, 24 nt, Artificial Sequence
  Synthetic
  misc_feature (7)..(7): n is a, c, g, or u
  misc_feature (10)..(10): n is a, c, g, or u
uccugcnucnaccaaucgccaguc

SEQ ID NO: 82491 - RNA, 18 nt, Artificial Sequence
  Synthetic
uuuugcucgcagcagguc

SEQ ID NO: 82492 - RNA, 19 nt, Artificial Sequence
  Synthetic
guuuugcucgcagcagguc

SEQ ID NO: 82493 - RNA, 20 nt, Artificial Sequence
  Synthetic
uguuuugcucgcagcagguc

SEQ ID NO: 82494 - RNA, 21 nt, Artificial Sequence
  Synthetic
uuguuuugcucgcagcagguc

SEQ ID NO: 82495 - RNA, 22 nt, Artificial Sequence
  Synthetic
cuuguuuugcucgcagcagguc

SEQ ID NO: 82496 - RNA, 23 nt, Artificial Sequence
  Synthetic
gcuuguuuugcucgcagcagguc

SEQ ID NO: 82497 - RNA, 24 nt, Artificial Sequence
  Synthetic
cgcuuguuuugcucgcagcagguc

SEQ ID NO: 82498 - RNA, 18 nt, Artificial Sequence
  Synthetic
acuggcuggggcuugguc

SEQ ID NO: 82499 - RNA, 19 nt, Artificial Sequence
  Synthetic
cacuggcuggggcuugguc

SEQ ID NO: 82500 - RNA, 20 nt, Artificial Sequence
  Synthetic
ccacuggcuggggcuugguc

SEQ ID NO: 82501 - RNA, 21 nt, Artificial Sequence
  Synthetic
cccacuggcuggggcuugguc

SEQ ID NO: 82502 - RNA, 22 nt, Artificial Sequence
  Synthetic
ccccacuggcuggggcuugguc

SEQ ID NO: 82503 - RNA, 23 nt, Artificial Sequence
  Synthetic
cccccacuggcuggggcuugguc

SEQ ID NO: 82504 - RNA, 24 nt, Artificial Sequence
  Synthetic
acccccacuggcuggggcuugguc

SEQ ID NO: 82505 - RNA, 18 nt, Artificial Sequence
  Synthetic
  misc_feature (12)..(12): n is a, c, g, or u
  misc_feature (16)..(16): n is a, c, g, or u
ccugcacgacuncugnuc

SEQ ID NO: 82506 - RNA, 19 nt, Artificial Sequence
  Synthetic
  misc_feature (13)..(13): n is a, c, g, or u
  misc_feature (17)..(17): n is a, c, g, or u
accugcacgacuncugnuc

SEQ ID NO: 82507 - RNA, 20 nt, Artificial Sequence
  Synthetic
  misc_feature (14)..(14): n is a, c, g, or u
  misc_feature (18)..(18): n is a, c, g, or u
aaccugcacgacuncugnuc

SEQ ID NO: 82508 - RNA, 21 nt, Artificial Sequence
  Synthetic
  misc_feature (15)..(15): n is a, c, g, or u
  misc_feature (19)..(19): n is a, c, g, or u
gaaccugcacgacuncugnuc

SEQ ID NO: 82509 - RNA, 22 nt, Artificial Sequence
  Synthetic
  misc_feature (16)..(16): n is a, c, g, or u
  misc_feature (20)..(20): n is a, c, g, or u
agaaccugcacgacuncugnuc

SEQ ID NO: 82510 - RNA, 23 nt, Artificial Sequence
  Synthetic
  misc_feature (17)..(17): n is a, c, g, or u
  misc_feature (21)..(21): n is a, c, g, or u
cagaaccugcacgacuncugnuc

SEQ ID NO: 82511 - RNA, 24 nt, Artificial Sequence
  Synthetic
  misc_feature (18)..(18): n is a, c, g, or u
  misc_feature (22)..(22): n is a, c, g, or u
gcagaaccugcacgacuncugnuc

SEQ ID NO: 82512 - RNA, 18 nt, Artificial Sequence
  Synthetic
uugugggucaccauauuc

SEQ ID NO: 82513 - RNA, 19 nt, Artificial Sequence
  Synthetic
uuugugggucaccauauuc

SEQ ID NO: 82514 - RNA, 20 nt, Artificial Sequence
  Synthetic
uuuugugggucaccauauuc

SEQ ID NO: 82515 - RNA, 21 nt, Artificial Sequence
  Synthetic
auuuugugggucaccauauuc

SEQ ID NO: 82516 - RNA, 22 nt, Artificial Sequence
  Synthetic
cauuuugugggucaccauauuc

SEQ ID NO: 82517 - RNA, 23 nt, Artificial Sequence
  Synthetic
ucauuuugugggucaccauauuc

SEQ ID NO: 82518 - RNA, 24 nt, Artificial Sequence
  Synthetic
cucauuuugugggucaccauauuc

SEQ ID NO: 82519 - RNA, 18 nt, Artificial Sequence
  Synthetic
cuaucuuaucaacacuuc

SEQ ID NO: 82520 - RNA, 19 nt, Artificial Sequence
  Synthetic
ccuaucuuaucaacacuuc

SEQ ID NO: 82521 - RNA, 20 nt, Artificial Sequence
  Synthetic
cccuaucuuaucaacacuuc

SEQ ID NO: 82522 - RNA, 21 nt, Artificial Sequence
  Synthetic
ccccuaucuuaucaacacuuc

SEQ ID NO: 82523 - RNA, 22 nt, Artificial Sequence
  Synthetic
gccccuaucuuaucaacacuuc

SEQ ID NO: 82524 - RNA, 23 nt, Artificial Sequence
  Synthetic
ugccccuaucuuaucaacacuuc

SEQ ID NO: 82525 - RNA, 24 nt, Artificial Sequence
  Synthetic
augccccuaucuuaucaacacuuc

SEQ ID NO: 82526 - RNA, 18 nt, Artificial Sequence
  Synthetic
ucccgcggacgacccuuc

SEQ ID NO: 82527 - RNA, 19 nt, Artificial Sequence
  Synthetic
aucccgcggacgacccuuc

SEQ ID NO: 82528 - RNA, 20 nt, Artificial Sequence
  Synthetic
aaucccgcggacgacccuuc

SEQ ID NO: 82529 - RNA, 21 nt, Artificial Sequence
  Synthetic
gaaucccgcggacgacccuuc

SEQ ID NO: 82530 - RNA, 22 nt, Artificial Sequence
  Synthetic
ugaaucccgcggacgacccuuc

SEQ ID NO: 82531 - RNA, 23 nt, Artificial Sequence
  Synthetic
cugaaucccgcggacgacccuuc

SEQ ID NO: 82532 - RNA, 24 nt, Artificial Sequence
  Synthetic
gcugaaucccgcggacgacccuuc

SEQ ID NO: 82533 - RNA, 18 nt, Artificial Sequence
  Synthetic
  misc_feature (2)..(2): n is a, c, g, or u
  misc_feature (4)..(4): n is a, c, g, or u
cncnuaucgucaaucuuc

SEQ ID NO: 82534 - RNA, 19 nt, Artificial Sequence
  Synthetic
  misc_feature (3)..(3): n is a, c, g, or u
  misc_feature (5)..(5): n is a, c, g, or u
ucncnuaucgucaaucuuc

SEQ ID NO: 82535 - RNA, 20 nt, Artificial Sequence
  Synthetic
  misc_feature (4)..(4): n is a, c, g, or u
  misc_feature (6)..(6): n is a, c, g, or u
cucncnuaucgucaaucuuc

SEQ ID NO: 82536 - RNA, 21 nt, Artificial Sequence
  Synthetic
  misc_feature (5)..(5): n is a, c, g, or u
  misc_feature (7)..(7): n is a, c, g, or u
ucucncnuaucgucaaucuuc

SEQ ID NO: 82537 - RNA, 22 nt, Artificial Sequence
  Synthetic
  misc_feature (6)..(6): n is a, c, g, or u
  misc_feature (8)..(8): n is a, c, g, or u
cucucncnuaucgucaaucuuc

SEQ ID NO: 82538 - RNA, 23 nt, Artificial Sequence
  Synthetic
  misc_feature (1)..(1): n is a, c, g, or u
  misc_feature (7)..(7): n is a, c, g, or u
  misc_feature (9)..(9): n is a, c, g, or u
ncucucncnuaucgucaaucuuc

SEQ ID NO: 82539 - RNA, 24 nt, Artificial Sequence
  Synthetic
  misc_feature (2)..(2): n is a, c, g, or u
  misc_feature (8)..(8): n is a, c, g, or u
  misc_feature (10)..(10): n is a, c, g, or u
gncucucncnuaucgucaaucuuc

SEQ ID NO: 82540 - RNA, 18 nt, Artificial Sequence
  Synthetic
ugcugguggcuccaguuc

SEQ ID NO: 82541 - RNA, 19 nt, Artificial Sequence
  Synthetic
cugcugguggcuccaguuc

SEQ ID NO: 82542 - RNA, 20 nt, Artificial Sequence
  Synthetic
ccugcugguggcuccaguuc

SEQ ID NO: 82543 - RNA, 21 nt, Artificial Sequence
  Synthetic
cccugcugguggcuccaguuc

SEQ ID NO: 82544 - RNA, 22 nt, Artificial Sequence
  Synthetic
ucccugcugguggcuccaguuc

SEQ ID NO: 82545 - RNA, 23 nt, Artificial Sequence
  Synthetic
uucccugcugguggcuccaguuc

SEQ ID NO: 82546 - RNA, 24 nt, Artificial Sequence
  Synthetic
uuucccugcugguggcuccaguuc

SEQ ID NO: 82547 - RNA, 18 nt, Artificial Sequence
  Synthetic
ggacuucucucaauuuuc

SEQ ID NO: 82548 - RNA, 19 nt, Artificial Sequence
  Synthetic
uggacuucucucaauuuuc

SEQ ID NO: 82549 - RNA, 20 nt, Artificial Sequence
  Synthetic
guggacuucucucaauuuuc

SEQ ID NO: 82550 - RNA, 21 nt, Artificial Sequence
  Synthetic
gguggacuucucucaauuuuc

SEQ ID NO: 82551 - RNA, 22 nt, Artificial Sequence
  Synthetic
ugguggacuucucucaauuuuc

SEQ ID NO: 82552 - RNA, 23 nt, Artificial Sequence
  Synthetic
gugguggacuucucucaauuuuc

SEQ ID NO: 82553 - RNA, 24 nt, Artificial Sequence
  Synthetic
cgugguggacuucucucaauuuuc

SEQ ID NO: 82554 - RNA, 18 nt, Artificial Sequence
  Synthetic
  misc_feature (13)..(13): n is a, c, g, or u
cccuaacaaaacnaaaag

SEQ ID NO: 82555 - RNA, 19 nt, Artificial Sequence
  Synthetic
  misc_feature (14)..(14): n is a, c, g, or u
acccuaacaaaacnaaaag

SEQ ID NO: 82556 - RNA, 20 nt, Artificial Sequence
  Synthetic
  misc_feature (15)..(15): n is a, c, g, or u
aacccuaacaaaacnaaaag

SEQ ID NO: 82557 - RNA, 21 nt, Artificial Sequence
  Synthetic
  misc_feature (16)..(16): n is a, c, g, or u
aaacccuaacaaaacnaaaag

SEQ ID NO: 82558 - RNA, 22 nt, Artificial Sequence
  Synthetic
  misc_feature (17)..(17): n is a, c, g, or u
uaaacccuaacaaaacnaaaag

SEQ ID NO: 82559 - RNA, 23 nt, Artificial Sequence
  Synthetic
  misc_feature (18)..(18): n is a, c, g, or u
uuaaacccuaacaaaacnaaaag

SEQ ID NO: 82560 - RNA, 24 nt, Artificial Sequence
  Synthetic
  misc_feature (19)..(19): n is a, c, g, or u
uuuaaacccuaacaaaacnaaaag

SEQ ID NO: 82561 - RNA, 18 nt, Artificial Sequence
  Synthetic
aggcagguccccuagaag

SEQ ID NO: 82562 - RNA, 19 nt, Artificial Sequence
  Synthetic
gaggcagguccccuagaag

SEQ ID NO: 82563 - RNA, 20 nt, Artificial Sequence
  Synthetic
cgaggcagguccccuagaag

SEQ ID NO: 82564 - RNA, 21 nt, Artificial Sequence
  Synthetic
acgaggcagguccccuagaag

SEQ ID NO: 82565 - RNA, 22 nt, Artificial Sequence
  Synthetic
gacgaggcagguccccuagaag

SEQ ID NO: 82566 - RNA, 23 nt, Artificial Sequence
  Synthetic
cgacgaggcagguccccuagaag

SEQ ID NO: 82567 - RNA, 24 nt, Artificial Sequence
  Synthetic
acgacgaggcagguccccuagaag

SEQ ID NO: 82568 - RNA, 18 nt, Artificial Sequence
  Synthetic
auuccuuggacucauaag

SEQ ID NO: 82569 - RNA, 19 nt, Artificial Sequence
  Synthetic
uauuccuuggacucauaag

SEQ ID NO: 82570 - RNA, 20 nt, Artificial Sequence
  Synthetic
guauuccuuggacucauaag

SEQ ID NO: 82571 - RNA, 21 nt, Artificial Sequence
  Synthetic
aguauuccuuggacucauaag

SEQ ID NO: 82572 - RNA, 22 nt, Artificial Sequence
  Synthetic
uaguauuccuuggacucauaag

SEQ ID NO: 82573 - RNA, 23 nt, Artificial Sequence
  Synthetic
uuaguauuccuuggacucauaag

SEQ ID NO: 82574 - RNA, 24 nt, Artificial Sequence
  Synthetic
guuaguauuccuuggacucauaag

SEQ ID NO: 82575 - RNA, 18 nt, Artificial Sequence
  Synthetic
  misc_feature (6)..(6): n is a, c, g, or u
ccccuncucguguuacag

SEQ ID NO: 82576 - RNA, 19 nt, Artificial Sequence
  Synthetic
  misc_feature (7)..(7): n is a, c, g, or u
accccuncucguguuacag

SEQ ID NO: 82577 - RNA, 20 nt, Artificial Sequence
  Synthetic
  misc_feature (8)..(8): n is a, c, g, or u
gaccccuncucguguuacag

SEQ ID NO: 82578 - RNA, 21 nt, Artificial Sequence
  Synthetic
  misc_feature (9)..(9): n is a, c, g, or u
ggaccccuncucguguuacag

SEQ ID NO: 82579 - RNA, 22 nt, Artificial Sequence
  Synthetic
  misc_feature (10)..(10): n is a, c, g, or u
aggaccccuncucguguuacag

SEQ ID NO: 82580 - RNA, 23 nt, Artificial Sequence
  Synthetic
  misc_feature (11)..(11): n is a, c, g, or u
uaggaccccuncucguguuacag

SEQ ID NO: 82581 - RNA, 24 nt, Artificial Sequence
  Synthetic
  misc_feature (12)..(12): n is a, c, g, or u
cuaggaccccuncucguguuacag

SEQ ID NO: 82582 - RNA, 18 nt, Artificial Sequence
  Synthetic
aacucccucgccucgcag

SEQ ID NO: 82583 - RNA, 19 nt, Artificial Sequence
  Synthetic
gaacucccucgccucgcag

SEQ ID NO: 82584 - RNA, 20 nt, Artificial Sequence
  Synthetic
agaacucccucgccucgcag

SEQ ID NO: 82585 - RNA, 21 nt, Artificial Sequence
  Synthetic
aagaacucccucgccucgcag

SEQ ID NO: 82586 - RNA, 22 nt, Artificial Sequence
  Synthetic
gaagaacucccucgccucgcag

SEQ ID NO: 82587 - RNA, 23 nt, Artificial Sequence
  Synthetic
agaagaacucccucgccucgcag

SEQ ID NO: 82588 - RNA, 24 nt, Artificial Sequence
  Synthetic
aagaagaacucccucgccucgcag

SEQ ID NO: 82589 - RNA, 18 nt, Artificial Sequence
  Synthetic
cauccucaggccaugcag

SEQ ID NO: 82590 - RNA, 19 nt, Artificial Sequence
  Synthetic
ucauccucaggccaugcag

SEQ ID NO: 82591 - RNA, 20 nt, Artificial Sequence
  Synthetic
cucauccucaggccaugcag

SEQ ID NO: 82592 - RNA, 21 nt, Artificial Sequence
  Synthetic
acucauccucaggccaugcag

SEQ ID NO: 82593 - RNA, 22 nt, Artificial Sequence
  Synthetic
cacucauccucaggccaugcag

SEQ ID NO: 82594 - RNA, 23 nt, Artificial Sequence
  Synthetic
acacucauccucaggccaugcag

SEQ ID NO: 82595 - RNA, 24 nt, Artificial Sequence
  Synthetic
aacacucauccucaggccaugcag

SEQ ID NO: 82596 - RNA, 18 nt, Artificial Sequence
  Synthetic
  misc_feature (6)..(6): n is a, c, g, or u
uuuaangacugggaggag

SEQ ID NO: 82597 - RNA, 19 nt, Artificial Sequence
  Synthetic
  misc_feature (7)..(7): n is a, c, g, or u
guuuaangacugggaggag

SEQ ID NO: 82598 - RNA, 20 nt, Artificial Sequence
  Synthetic
  misc_feature (8)..(8): n is a, c, g, or u
uguuuaangacugggaggag

SEQ ID NO: 82599 - RNA, 21 nt, Artificial Sequence
  Synthetic
  misc_feature (9)..(9): n is a, c, g, or u
uuguuuaangacugggaggag

SEQ ID NO: 82600 - RNA, 22 nt, Artificial Sequence
  Synthetic
  misc_feature (10)..(10): n is a, c, g, or u
uuuguuuaangacugggaggag

SEQ ID NO: 82601 - RNA, 23 nt, Artificial Sequence
  Synthetic
  misc_feature (11)..(11): n is a, c, g, or u
guuuguuuaangacugggaggag

SEQ ID NO: 82602 - RNA, 24 nt, Artificial Sequence
  Synthetic
  misc_feature (12)..(12): n is a, c, g, or u
uguuuguuuaangacugggaggag

SEQ ID NO: 82603 - RNA, 18 nt, Artificial Sequence
  Synthetic
acgccaacaagguaggag

SEQ ID NO: 82604 - RNA, 19 nt, Artificial Sequence
  Synthetic
gacgccaacaagguaggag

SEQ ID NO: 82605 - RNA, 20 nt, Artificial Sequence
  Synthetic
agacgccaacaagguaggag

SEQ ID NO: 82606 - RNA, 21 nt, Artificial Sequence
  Synthetic
cagacgccaacaagguaggag

SEQ ID NO: 82607 - RNA, 22 nt, Artificial Sequence
  Synthetic
ccagacgccaacaagguaggag

SEQ ID NO: 82608 - RNA, 23 nt, Artificial Sequence
  Synthetic
gccagacgccaacaagguaggag

SEQ ID NO: 82609 - RNA, 24 nt, Artificial Sequence
  Synthetic
ggccagacgccaacaagguaggag

SEQ ID NO: 82610 - RNA, 18 nt, Artificial Sequence
  Synthetic
acgaggcagguccccuag

SEQ ID NO: 82611 - RNA, 19 nt, Artificial Sequence
  Synthetic
gacgaggcagguccccuag

SEQ ID NO: 82612 - RNA, 20 nt, Artificial Sequence
  Synthetic
cgacgaggcagguccccuag

SEQ ID NO: 82613 - RNA, 21 nt, Artificial Sequence
  Synthetic
acgacgaggcagguccccuag

SEQ ID NO: 82614 - RNA, 22 nt, Artificial Sequence
  Synthetic
gacgacgaggcagguccccuag

SEQ ID NO: 82615 - RNA, 23 nt, Artificial Sequence
  Synthetic
agacgacgaggcagguccccuag

SEQ ID NO: 82616 - RNA, 24 nt, Artificial Sequence
  Synthetic
uagacgacgaggcagguccccuag

SEQ ID NO: 82617 - RNA, 18 nt, Artificial Sequence
  Synthetic
gacuacuguuguuagacg

SEQ ID NO: 82618 - RNA, 19 nt, Artificial Sequence
  Synthetic
agacuacuguuguuagacg

SEQ ID NO: 82619 - RNA, 20 nt, Artificial Sequence
  Synthetic
gagacuacuguuguuagacg

SEQ ID NO: 82620 - RNA, 21 nt, Artificial Sequence
  Synthetic
ggagacuacuguuguuagacg

SEQ ID NO: 82621 - RNA, 22 nt, Artificial Sequence
  Synthetic
cggagacuacuguuguuagacg

SEQ ID NO: 82622 - RNA, 23 nt, Artificial Sequence
  Synthetic
ccggagacuacuguuguuagacg

SEQ ID NO: 82623 - RNA, 24 nt, Artificial Sequence
  Synthetic
uccggagacuacuguuguuagacg

SEQ ID NO: 82624 - RNA, 18 nt, Artificial Sequence
  Synthetic
gggccaucagcgcaugcg

SEQ ID NO: 82625 - RNA, 19 nt, Artificial Sequence
  Synthetic
ugggccaucagcgcaugcg

SEQ ID NO: 82626 - RNA, 20 nt, Artificial Sequence
  Synthetic
augggccaucagcgcaugcg

SEQ ID NO: 82627 - RNA, 21 nt, Artificial Sequence
  Synthetic
caugggccaucagcgcaugcg

SEQ ID NO: 82628 - RNA, 22 nt, Artificial Sequence
  Synthetic
ucaugggccaucagcgcaugcg

SEQ ID NO: 82629 - RNA, 23 nt, Artificial Sequence
  Synthetic
gucaugggccaucagcgcaugcg

SEQ ID NO: 82630 - RNA, 24 nt, Artificial Sequence
  Synthetic
ggucaugggccaucagcgcaugcg

SEQ ID NO: 82631 - RNA, 18 nt, Artificial Sequence
  Synthetic
aggauuggggacccugcg

SEQ ID NO: 82632 - RNA, 19 nt, Artificial Sequence
  Synthetic
gaggauuggggacccugcg

SEQ ID NO: 82633 - RNA, 20 nt, Artificial Sequence
  Synthetic
cgaggauuggggacccugcg

SEQ ID NO: 82634 - RNA, 21 nt, Artificial Sequence
  Synthetic
ucgaggauuggggacccugcg

SEQ ID NO: 82635 - RNA, 22 nt, Artificial Sequence
  Synthetic
cucgaggauuggggacccugcg

SEQ ID NO: 82636 - RNA, 23 nt, Artificial Sequence
  Synthetic
ucucgaggauuggggacccugcg

SEQ ID NO: 82637 - RNA, 24 nt, Artificial Sequence
  Synthetic
uucucgaggauuggggacccugcg

SEQ ID NO: 82638 - RNA, 18 nt, Artificial Sequence
  Synthetic
ugccaacuggauccugcg

SEQ ID NO: 82639 - RNA, 19 nt, Artificial Sequence
  Synthetic
cugccaacuggauccugcg

SEQ ID NO: 82640 - RNA, 20 nt, Artificial Sequence
  Synthetic
gcugccaacuggauccugcg

SEQ ID NO: 82641 - RNA, 21 nt, Artificial Sequence
  Synthetic
ugcugccaacuggauccugcg

SEQ ID NO: 82642 - RNA, 22 nt, Artificial Sequence
  Synthetic
gugcugccaacuggauccugcg

SEQ ID NO: 82643 - RNA, 23 nt, Artificial Sequence
  Synthetic
ugugcugccaacuggauccugcg

SEQ ID NO: 82644 - RNA, 24 nt, Artificial Sequence
  Synthetic
cugugcugccaacuggauccugcg

SEQ ID NO: 82645 - RNA, 18 nt, Artificial Sequence
  Synthetic
gucucaaucgccgcgucg

SEQ ID NO: 82646 - RNA, 19 nt, Artificial Sequence
  Synthetic
ggucucaaucgccgcgucg

SEQ ID NO: 82647 - RNA, 20 nt, Artificial Sequence
  Synthetic
aggucucaaucgccgcgucg

SEQ ID NO: 82648 - RNA, 21 nt, Artificial Sequence
  Synthetic
aaggucucaaucgccgcgucg

SEQ ID NO: 82649 - RNA, 22 nt, Artificial Sequence
  Synthetic
gaaggucucaaucgccgcgucg

SEQ ID NO: 82650 - RNA, 23 nt, Artificial Sequence
  Synthetic
cgaaggucucaaucgccgcgucg

SEQ ID NO: 82651 - RNA, 24 nt, Artificial Sequence
  Synthetic
acgaaggucucaaucgccgcgucg

SEQ ID NO: 82652 - RNA, 18 nt, Artificial Sequence
  Synthetic
cauuuguucagugguucg

SEQ ID NO: 82653 - RNA, 19 nt, Artificial Sequence
  Synthetic
ccauuuguucagugguucg

SEQ ID NO: 82654 - RNA, 20 nt, Artificial Sequence
  Synthetic
gccauuuguucagugguucg

SEQ ID NO: 82655 - RNA, 21 nt, Artificial Sequence
  Synthetic
ugccauuuguucagugguucg

SEQ ID NO: 82656 - RNA, 22 nt, Artificial Sequence
  Synthetic
gugccauuuguucagugguucg

SEQ ID NO: 82657 - RNA, 23 nt, Artificial Sequence
  Synthetic
agugccauuuguucagugguucg

SEQ ID NO: 82658 - RNA, 24 nt, Artificial Sequence
  Synthetic
uagugccauuuguucagugguucg

SEQ ID NO: 82659 - RNA, 18 nt, Artificial Sequence
  Synthetic
ggccagacgccaacaagg

SEQ ID NO: 82660 - RNA, 19 nt, Artificial Sequence
  Synthetic
uggccagacgccaacaagg

SEQ ID NO: 82661 - RNA, 20 nt, Artificial Sequence
  Synthetic
cuggccagacgccaacaagg

SEQ ID NO: 82662 - RNA, 21 nt, Artificial Sequence
  Synthetic
ccuggccagacgccaacaagg

SEQ ID NO: 82663 - RNA, 22 nt, Artificial Sequence
  Synthetic
accuggccagacgccaacaagg

SEQ ID NO: 82664 - RNA, 23 nt, Artificial Sequence
  Synthetic
caccuggccagacgccaacaagg

SEQ ID NO: 82665 - RNA, 24 nt, Artificial Sequence
  Synthetic
acaccuggccagacgccaacaagg

SEQ ID NO: 82666 - RNA, 18 nt, Artificial Sequence
  Synthetic
gcuguaccaaaccuucgg

SEQ ID NO: 82667 - RNA, 19 nt, Artificial Sequence
  Synthetic
ugcuguaccaaaccuucgg

SEQ ID NO: 82668 - RNA, 20 nt, Artificial Sequence
  Synthetic
uugcuguaccaaaccuucgg

SEQ ID NO: 82669 - RNA, 21 nt, Artificial Sequence
  Synthetic
guugcuguaccaaaccuucgg

SEQ ID NO: 82670 - RNA, 22 nt, Artificial Sequence
  Synthetic
uguugcuguaccaaaccuucgg

SEQ ID NO: 82671 - RNA, 23 nt, Artificial Sequence
  Synthetic
cuguugcuguaccaaaccuucgg

SEQ ID NO: 82672 - RNA, 24 nt, Artificial Sequence
  Synthetic
ccuguugcuguaccaaaccuucgg

SEQ ID NO: 82673 - RNA, 18 nt, Artificial Sequence
  Synthetic
ggagcuggagcauucggg

SEQ ID NO: 82674 - RNA, 19 nt, Artificial Sequence
  Synthetic
aggagcuggagcauucggg

SEQ ID NO: 82675 - RNA, 20 nt, Artificial Sequence
  Synthetic
uaggagcuggagcauucggg

SEQ ID NO: 82676 - RNA, 21 nt, Artificial Sequence
  Synthetic
guaggagcuggagcauucggg

SEQ ID NO: 82677 - RNA, 22 nt, Artificial Sequence
  Synthetic
gguaggagcuggagcauucggg

SEQ ID NO: 82678 - RNA, 23 nt, Artificial Sequence
  Synthetic
agguaggagcuggagcauucggg

SEQ ID NO: 82679 - RNA, 24 nt, Artificial Sequence
  Synthetic
aagguaggagcuggagcauucggg

SEQ ID NO: 82680 - RNA, 18 nt, Artificial Sequence
  Synthetic
acugggaggaguuggggg

SEQ ID NO: 82681 - RNA, 19 nt, Artificial Sequence
  Synthetic
gacugggaggaguuggggg

SEQ ID NO: 82682 - RNA, 20 nt, Artificial Sequence
  Synthetic
  misc_feature (1)..(1): n is a, c, g, or u
ngacugggaggaguuggggg

SEQ ID NO: 82683 - RNA, 21 nt, Artificial Sequence
  Synthetic
  misc_feature (2)..(2): n is a, c, g, or u
angacugggaggaguuggggg

SEQ ID NO: 82684 - RNA, 22 nt, Artificial Sequence
  Synthetic
  misc_feature (3)..(3): n is a, c, g, or u
aangacugggaggaguuggggg

SEQ ID NO: 82685 - RNA, 23 nt, Artificial Sequence
  Synthetic
  misc_feature (4)..(4): n is a, c, g, or u
uaangacugggaggaguuggggg

SEQ ID NO: 82686 - RNA, 24 nt, Artificial Sequence
  Synthetic
  misc_feature (5)..(5): n is a, c, g, or u
uuaangacugggaggaguuggggg

SEQ ID NO: 82687 - RNA, 18 nt, Artificial Sequence
  Synthetic
gacugggaggaguugggg

SEQ ID NO: 82688 - RNA, 19 nt, Artificial Sequence
  Synthetic
  misc_feature (1)..(1): n is a, c, g, or u
ngacugggaggaguugggg

SEQ ID NO: 82689 - RNA, 20 nt, Artificial Sequence
  Synthetic
  misc_feature (2)..(2): n is a, c, g, or u
angacugggaggaguugggg

SEQ ID NO: 82690 - RNA, 21 nt, Artificial Sequence
  Synthetic
  misc_feature (3)..(3): n is a, c, g, or u
aangacugggaggaguugggg

SEQ ID NO: 82691 - RNA, 22 nt, Artificial Sequence
  Synthetic
  misc_feature (4)..(4): n is a, c, g, or u
uaangacugggaggaguugggg

SEQ ID NO: 82692 - RNA, 23 nt, Artificial Sequence
  Synthetic
  misc_feature (5)..(5): n is a, c, g, or u
uuaangacugggaggaguugggg

SEQ ID NO: 82693 - RNA, 24 nt, Artificial Sequence
  Synthetic
  misc_feature (6)..(6): n is a, c, g, or u
uuuaangacugggaggaguugggg

SEQ ID NO: 82694 - RNA, 18 nt, Artificial Sequence
  Synthetic
cacggaggccuuuugggg

SEQ ID NO: 82695 - RNA, 19 nt, Artificial Sequence
  Synthetic
gcacggaggccuuuugggg

SEQ ID NO: 82696 - RNA, 20 nt, Artificial Sequence
  Synthetic
cgcacggaggccuuuugggg

SEQ ID NO: 82697 - RNA, 21 nt, Artificial Sequence
  Synthetic
ccgcacggaggccuuuugggg

SEQ ID NO: 82698 - RNA, 22 nt, Artificial Sequence
  Synthetic
accgcacggaggccuuuugggg

SEQ ID NO: 82699 - RNA, 23 nt, Artificial Sequence
  Synthetic
caccgcacggaggccuuuugggg

SEQ ID NO: 82700 - RNA, 24 nt, Artificial Sequence
  Synthetic
ccaccgcacggaggccuuuugggg

SEQ ID NO: 82701 - RNA, 18 nt, Artificial Sequence
  Synthetic
gcacggaggccuuuuggg

SEQ ID NO: 82702 - RNA, 19 nt, Artificial Sequence
  Synthetic
cgcacggaggccuuuuggg

SEQ ID NO: 82703 - RNA, 20 nt, Artificial Sequence
  Synthetic
ccgcacggaggccuuuuggg

SEQ ID NO: 82704 - RNA, 21 nt, Artificial Sequence
  Synthetic
accgcacggaggccuuuuggg

SEQ ID NO: 82705 - RNA, 22 nt, Artificial Sequence
  Synthetic
caccgcacggaggccuuuuggg

SEQ ID NO: 82706 - RNA, 23 nt, Artificial Sequence
  Synthetic
ccaccgcacggaggccuuuuggg

SEQ ID NO: 82707 - RNA, 24 nt, Artificial Sequence
  Synthetic
cccaccgcacggaggccuuuuggg

SEQ ID NO: 82708 - RNA, 18 nt, Artificial Sequence
  Synthetic
ugacgcaacccccacugg

SEQ ID NO: 82709 - RNA, 19 nt, Artificial Sequence
  Synthetic
cugacgcaacccccacugg

SEQ ID NO: 82710 - RNA, 20 nt, Artificial Sequence
  Synthetic
gcugacgcaacccccacugg

SEQ ID NO: 82711 - RNA, 21 nt, Artificial Sequence
  Synthetic
ugcugacgcaacccccacugg

SEQ ID NO: 82712 - RNA, 22 nt, Artificial Sequence
  Synthetic
uugcugacgcaacccccacugg

SEQ ID NO: 82713 - RNA, 23 nt, Artificial Sequence
  Synthetic
uuugcugacgcaacccccacugg

SEQ ID NO: 82714 - RNA, 24 nt, Artificial Sequence
  Synthetic
guuugcugacgcaacccccacugg

SEQ ID NO: 82715 - RNA, 18 nt, Artificial Sequence
  Synthetic
  misc_feature (12)..(12): n is a, c, g, or u
uguuuguuuaangacugg

SEQ ID NO: 82716 - RNA, 19 nt, Artificial Sequence
  Synthetic
  misc_feature (13)..(13): n is a, c, g, or u
cuguuuguuuaangacugg

SEQ ID NO: 82717 - RNA, 20 nt, Artificial Sequence
  Synthetic
  misc_feature (14)..(14): n is a, c, g, or u
acuguuuguuuaangacugg

SEQ ID NO: 82718 - RNA, 21 nt, Artificial Sequence
  Synthetic
  misc_feature (15)..(15): n is a, c, g, or u
gacuguuuguuuaangacugg

SEQ ID NO: 82719 - RNA, 22 nt, Artificial Sequence
  Synthetic
  misc_feature (16)..(16): n is a, c, g, or u
agacuguuuguuuaangacugg

SEQ ID NO: 82720 - RNA, 23 nt, Artificial Sequence
  Synthetic
  misc_feature (17)..(17): n is a, c, g, or u
aagacuguuuguuuaangacugg

SEQ ID NO: 82721 - RNA, 24 nt, Artificial Sequence
  Synthetic
  misc_feature (18)..(18): n is a, c, g, or u
aaagacuguuuguuuaangacugg

SEQ ID NO: 82722 - RNA, 18 nt, Artificial Sequence
  Synthetic
  misc_feature (9)..(9): n is a, c, g, or u
  misc_feature (12)..(12): n is a, c, g, or u
caagcaauncunugcugg

SEQ ID NO: 82723 - RNA, 19 nt, Artificial Sequence
  Synthetic
  misc_feature (10)..(10): n is a, c, g, or u
  misc_feature (13)..(13): n is a, c, g, or u
gcaagcaauncunugcugg

SEQ ID NO: 82724 - RNA, 20 nt, Artificial Sequence
  Synthetic
  misc_feature (11)..(11): n is a, c, g, or u
  misc_feature (14)..(14): n is a, c, g, or u
ggcaagcaauncunugcugg

SEQ ID NO: 82725 - RNA, 21 nt, Artificial Sequence
  Synthetic
  misc_feature (12)..(12): n is a, c, g, or u
  misc_feature (15)..(15): n is a, c, g, or u
aggcaagcaauncunugcugg

SEQ ID NO: 82726 - RNA, 22 nt, Artificial Sequence
  Synthetic
  misc_feature (13)..(13): n is a, c, g, or u
  misc_feature (16)..(16): n is a, c, g, or u
caggcaagcaauncunugcugg

SEQ ID NO: 82727 - RNA, 23 nt, Artificial Sequence
  Synthetic
  misc_feature (14)..(14): n is a, c, g, or u
  misc_feature (17)..(17): n is a, c, g, or u
ucaggcaagcaauncunugcugg

SEQ ID NO: 82728 - RNA, 24 nt, Artificial Sequence
  Synthetic
  misc_feature (15)..(15): n is a, c, g, or u
  misc_feature (18)..(18): n is a, c, g, or u
cucaggcaagcaauncunugcugg

SEQ ID NO: 82729 - RNA, 18 nt, Artificial Sequence
  Synthetic
  misc_feature (2)..(2): n is a, c, g, or u
angacugggaggaguugg

SEQ ID NO: 82730 - RNA, 19 nt, Artificial Sequence
  Synthetic
  misc_feature (3)..(3): n is a, c, g, or u
aangacugggaggaguugg

SEQ ID NO: 82731 - RNA, 20 nt, Artificial Sequence
  Synthetic
  misc_feature (4)..(4): n is a, c, g, or u
uaangacugggaggaguugg

SEQ ID NO: 82732 - RNA, 21 nt, Artificial Sequence
  Synthetic
  misc_feature (5)..(5): n is a, c, g, or u
uuaangacugggaggaguugg

SEQ ID NO: 82733 - RNA, 22 nt, Artificial Sequence
  Synthetic
  misc_feature (6)..(6): n is a, c, g, or u
uuuaangacugggaggaguugg

SEQ ID NO: 82734 - RNA, 23 nt, Artificial Sequence
  Synthetic
  misc_feature (7)..(7): n is a, c, g, or u
guuuaangacugggaggaguugg

SEQ ID NO: 82735 - RNA, 24 nt, Artificial Sequence
  Synthetic
  misc_feature (8)..(8): n is a, c, g, or u
uguuuaangacugggaggaguugg

SEQ ID NO: 82736 - RNA, 18 nt, Artificial Sequence
  Synthetic
uucuugucucacuuuugg

SEQ ID NO: 82737 - RNA, 19 nt, Artificial Sequence
  Synthetic
uuucuugucucacuuuugg

SEQ ID NO: 82738 - RNA, 20 nt, Artificial Sequence
  Synthetic
auuucuugucucacuuuugg

SEQ ID NO: 82739 - RNA, 21 nt, Artificial Sequence
  Synthetic
cauuucuugucucacuuuugg

SEQ ID NO: 82740 - RNA, 22 nt, Artificial Sequence
  Synthetic
acauuucuugucucacuuuugg

SEQ ID NO: 82741 - RNA, 23 nt, Artificial Sequence
  Synthetic
cacauuucuugucucacuuuugg

SEQ ID NO: 82742 - RNA, 24 nt, Artificial Sequence
  Synthetic
ucacauuucuugucucacuuuugg

SEQ ID NO: 82743 - RNA, 18 nt, Artificial Sequence
  Synthetic
gacccugcgcugaacaug

SEQ ID NO: 82744 - RNA, 19 nt, Artificial Sequence
  Synthetic
ggacccugcgcugaacaug

SEQ ID NO: 82745 - RNA, 20 nt, Artificial Sequence
  Synthetic
gggacccugcgcugaacaug

SEQ ID NO: 82746 - RNA, 21 nt, Artificial Sequence
  Synthetic
ggggacccugcgcugaacaug

SEQ ID NO: 82747 - RNA, 22 nt, Artificial Sequence
  Synthetic
uggggacccugcgcugaacaug

SEQ ID NO: 82748 - RNA, 23 nt, Artificial Sequence
  Synthetic
uuggggacccugcgcugaacaug

SEQ ID NO: 82749 - RNA, 24 nt, Artificial Sequence
  Synthetic
auuggggacccugcgcugaacaug

SEQ ID NO: 82750 - RNA, 18 nt, Artificial Sequence
  Synthetic
  misc_feature (1)..(1): n is a, c, g, or u
  misc_feature (8)..(9): n is a, c, g, or u
naccagcnngggaccaug

SEQ ID NO: 82751 - RNA, 19 nt, Artificial Sequence
  Synthetic
  misc_feature (2)..(2): n is a, c, g, or u
  misc_feature (9)..(10): n is a, c, g, or u
cnaccagcnngggaccaug

SEQ ID NO: 82752 - RNA, 20 nt, Artificial Sequence
  Synthetic
  misc_feature (3)..(3): n is a, c, g, or u
  misc_feature (10)..(11): n is a, c, g, or u
acnaccagcnngggaccaug

SEQ ID NO: 82753 - RNA, 21 nt, Artificial Sequence
  Synthetic
  misc_feature (4)..(4): n is a, c, g, or u
  misc_feature (11)..(12): n is a, c, g, or u
aacnaccagcnngggaccaug

SEQ ID NO: 82754 - RNA, 22 nt, Artificial Sequence
  Synthetic
  misc_feature (5)..(5): n is a, c, g, or u
  misc_feature (12)..(13): n is a, c, g, or u
caacnaccagcnngggaccaug

SEQ ID NO: 82755 - RNA, 23 nt, Artificial Sequence
  Synthetic
  misc_feature (6)..(6): n is a, c, g, or u
  misc_feature (13)..(14): n is a, c, g, or u
ucaacnaccagcnngggaccaug

SEQ ID NO: 82756 - RNA, 24 nt, Artificial Sequence
  Synthetic
  misc_feature (1)..(1): n is a, c, g, or u
  misc_feature (7)..(7): n is a, c, g, or u
  misc_feature (14)..(15): n is a, c, g, or u
nucaacnaccagcnngggaccaug

SEQ ID NO: 82757 - RNA, 18 nt, Artificial Sequence
  Synthetic
cucugccgauccauacug

SEQ ID NO: 82758 - RNA, 19 nt, Artificial Sequence
  Synthetic
ccucugccgauccauacug

SEQ ID NO: 82759 - RNA, 20 nt, Artificial Sequence
  Synthetic
uccucugccgauccauacug

SEQ ID NO: 82760 - RNA, 21 nt, Artificial Sequence
  Synthetic
cuccucugccgauccauacug

SEQ ID NO: 82761 - RNA, 22 nt, Artificial Sequence
  Synthetic
gcuccucugccgauccauacug

SEQ ID NO: 82762 - RNA, 23 nt, Artificial Sequence
  Synthetic
ggcuccucugccgauccauacug

SEQ ID NO: 82763 - RNA, 24 nt, Artificial Sequence
  Synthetic
  misc_feature (1)..(1): n is a, c, g, or u
nggcuccucugccgauccauacug

SEQ ID NO: 82764 - RNA, 18 nt, Artificial Sequence
  Synthetic
  misc_feature (10)..(10): n is a, c, g, or u
  misc_feature (13)..(13): n is a, c, g, or u
gcaagcaauncunugcug

SEQ ID NO: 82765 - RNA, 19 nt, Artificial Sequence
  Synthetic
  misc_feature (11)..(11): n is a, c, g, or u
  misc_feature (14)..(14): n is a, c, g, or u
ggcaagcaauncunugcug

SEQ ID NO: 82766 - RNA, 20 nt, Artificial Sequence
  Synthetic
  misc_feature (12)..(12): n is a, c, g, or u
  misc_feature (15)..(15): n is a, c, g, or u
aggcaagcaauncunugcug

SEQ ID NO: 82767 - RNA, 21 nt, Artificial Sequence
  Synthetic
  misc_feature (13)..(13): n is a, c, g, or u
  misc_feature (16)..(16): n is a, c, g, or u
caggcaagcaauncunugcug

SEQ ID NO: 82768 - RNA, 22 nt, Artificial Sequence
  Synthetic
  misc_feature (14)..(14): n is a, c, g, or u
  misc_feature (17)..(17): n is a, c, g, or u
ucaggcaagcaauncunugcug

SEQ ID NO: 82769 - RNA, 23 nt, Artificial Sequence
  Synthetic
  misc_feature (15)..(15): n is a, c, g, or u
  misc_feature (18)..(18): n is a, c, g, or u
cucaggcaagcaauncunugcug

SEQ ID NO: 82770 - RNA, 24 nt, Artificial Sequence
  Synthetic
  misc_feature (16)..(16): n is a, c, g, or u
  misc_feature (19)..(19): n is a, c, g, or u
acucaggcaagcaauncunugcug

SEQ ID NO: 82771 - RNA, 18 nt, Artificial Sequence
  Synthetic
ucugugccuucucaucug

SEQ ID NO: 82772 - RNA, 19 nt, Artificial Sequence
  Synthetic
gucugugccuucucaucug

SEQ ID NO: 82773 - RNA, 20 nt, Artificial Sequence
  Synthetic
cgucugugccuucucaucug

SEQ ID NO: 82774 - RNA, 21 nt, Artificial Sequence
  Synthetic
ccgucugugccuucucaucug

SEQ ID NO: 82775 - RNA, 22 nt, Artificial Sequence
  Synthetic
cccgucugugccuucucaucug

SEQ ID NO: 82776 - RNA, 23 nt, Artificial Sequence
  Synthetic
ccccgucugugccuucucaucug

SEQ ID NO: 82777 - RNA, 24 nt, Artificial Sequence
  Synthetic
uccccgucugugccuucucaucug

SEQ ID NO: 82778 - RNA, 18 nt, Artificial Sequence
  Synthetic
gcagagucuagacucgug

SEQ ID NO: 82779 - RNA, 19 nt, Artificial Sequence
  Synthetic
cgcagagucuagacucgug

SEQ ID NO: 82780 - RNA, 20 nt, Artificial Sequence
  Synthetic
ccgcagagucuagacucgug

SEQ ID NO: 82781 - RNA, 21 nt, Artificial Sequence
  Synthetic
accgcagagucuagacucgug

SEQ ID NO: 82782 - RNA, 22 nt, Artificial Sequence
  Synthetic
uaccgcagagucuagacucgug

SEQ ID NO: 82783 - RNA, 23 nt, Artificial Sequence
  Synthetic
auaccgcagagucuagacucgug

SEQ ID NO: 82784 - RNA, 24 nt, Artificial Sequence
  Synthetic
aauaccgcagagucuagacucgug

SEQ ID NO: 82785 - RNA, 18 nt, Artificial Sequence
  Synthetic
  misc_feature (13)..(13): n is a, c, g, or u
  misc_feature (16)..(16): n is a, c, g, or u
caggcaagcaauncunug

SEQ ID NO: 82786 - RNA, 19 nt, Artificial Sequence
  Synthetic
  misc_feature (14)..(14): n is a, c, g, or u
  misc_feature (17)..(17): n is a, c, g, or u
ucaggcaagcaauncunug

SEQ ID NO: 82787 - RNA, 20 nt, Artificial Sequence
  Synthetic
  misc_feature (15)..(15): n is a, c, g, or u
  misc_feature (18)..(18): n is a, c, g, or u
cucaggcaagcaauncunug

SEQ ID NO: 82788 - RNA, 21 nt, Artificial Sequence
  Synthetic
  misc_feature (16)..(16): n is a, c, g, or u
  misc_feature (19)..(19): n is a, c, g, or u
acucaggcaagcaauncunug

SEQ ID NO: 82789 - RNA, 22 nt, Artificial Sequence
  Synthetic
  misc_feature (17)..(17): n is a, c, g, or u
  misc_feature (20)..(20): n is a, c, g, or u
cacucaggcaagcaauncunug

SEQ ID NO: 82790 - RNA, 23 nt, Artificial Sequence
  Synthetic
  misc_feature (18)..(18): n is a, c, g, or u
  misc_feature (21)..(21): n is a, c, g, or u
gcacucaggcaagcaauncunug

SEQ ID NO: 82791 - RNA, 24 nt, Artificial Sequence
  Synthetic
  misc_feature (19)..(19): n is a, c, g, or u
  misc_feature (22)..(22): n is a, c, g, or u
ugcacucaggcaagcaauncunug

SEQ ID NO: 82792 - RNA, 18 nt, Artificial Sequence
  Synthetic
  misc_feature (3)..(3): n is a, c, g, or u
aangacugggaggaguug

SEQ ID NO: 82793 - RNA, 19 nt, Artificial Sequence
  Synthetic
  misc_feature (4)..(4): n is a, c, g, or u
uaangacugggaggaguug

SEQ ID NO: 82794 - RNA, 20 nt, Artificial Sequence
  Synthetic
  misc_feature (5)..(5): n is a, c, g, or u
uuaangacugggaggaguug

SEQ ID NO: 82795 - RNA, 21 nt, Artificial Sequence
  Synthetic
  misc_feature (6)..(6): n is a, c, g, or u
uuuaangacugggaggaguug

SEQ ID NO: 82796 - RNA, 22 nt, Artificial Sequence
  Synthetic
  misc_feature (7)..(7): n is a, c, g, or u
guuuaangacugggaggaguug

SEQ ID NO: 82797 - RNA, 23 nt, Artificial Sequence
  Synthetic
  misc_feature (8)..(8): n is a, c, g, or u
uguuuaangacugggaggaguug

SEQ ID NO: 82798 - RNA, 24 nt, Artificial Sequence
  Synthetic
  misc_feature (9)..(9): n is a, c, g, or u
uuguuuaangacugggaggaguug

SEQ ID NO: 82799 - RNA, 18 nt, Artificial Sequence
  Synthetic
  misc_feature (2)..(2): n is a, c, g, or u
  misc_feature (7)..(7): n is a, c, g, or u
  misc_feature (9)..(9): n is a, c, g, or u
  misc_feature (11)..(11): n is a, c, g, or u
  misc_feature (18)..(18): n is a, c, g, or u
gnuuaangnunuuuguan

SEQ ID NO: 82800 - RNA, 19 nt, Artificial Sequence
  Synthetic
  misc_feature (3)..(3): n is a, c, g, or u
  misc_feature (8)..(8): n is a, c, g, or u
  misc_feature (10)..(10): n is a, c, g, or u
  misc_feature (12)..(12): n is a, c, g, or u
  misc_feature (19)..(19): n is a, c, g, or u
agnuuaangnunuuuguan

SEQ ID NO: 82801 - RNA, 20 nt, Artificial Sequence
  Synthetic
  misc_feature (4)..(4): n is a, c, g, or u
  misc_feature (9)..(9): n is a, c, g, or u
  misc_feature (11)..(11): n is a, c, g, or u
  misc_feature (13)..(13): n is a, c, g, or u
  misc_feature (20)..(20): n is a, c, g, or u
uagnuuaangnunuuuguan

SEQ ID NO: 82802 - RNA, 21 nt, Artificial Sequence
  Synthetic
  misc_feature (1)..(1): n is a, c, g, or u
  misc_feature (5)..(5): n is a, c, g, or u
  misc_feature (10)..(10): n is a, c, g, or u
  misc_feature (12)..(12): n is a, c, g, or u
  misc_feature (14)..(14): n is a, c, g, or u
  misc_feature (21)..(21): n is a, c, g, or u
nuagnuuaangnunuuuguan

SEQ ID NO: 82803 - RNA, 22 nt, Artificial Sequence
  Synthetic
  misc_feature (1)..(2): n is a, c, g, or u
  misc_feature (6)..(6): n is a, c, g, or u
  misc_feature (11)..(11): n is a, c, g, or u
  misc_feature (13)..(13): n is a, c, g, or u
  misc_feature (15)..(15): n is a, c, g, or u
  misc_feature (22)..(22): n is a, c, g, or u
nnuagnuuaangnunuuuguan

SEQ ID NO: 82804 - RNA, 23 nt, Artificial Sequence
  Synthetic
  misc_feature (2)..(3): n is a, c, g, or u
  misc_feature (7)..(7): n is a, c, g, or u
  misc_feature (12)..(12): n is a, c, g, or u
  misc_feature (14)..(14): n is a, c, g, or u
  misc_feature (16)..(16): n is a, c, g, or u
  misc_feature (23)..(23): n is a, c, g, or u
gnnuagnuuaangnunuuuguan

SEQ ID NO: 82805 - RNA, 24 nt, Artificial Sequence
  Synthetic
  misc_feature (3)..(4): n is a, c, g, or u
  misc_feature (8)..(8): n is a, c, g, or u
  misc_feature (13)..(13): n is a, c, g, or u
  misc_feature (15)..(15): n is a, c, g, or u
  misc_feature (17)..(17): n is a, c, g, or u
  misc_feature (24)..(24): n is a, c, g, or u
agnnuagnuuaangnunuuuguan

SEQ ID NO: 82806 - RNA, 18 nt, Artificial Sequence
  Synthetic
  misc_feature (5)..(5): n is a, c, g, or u
  misc_feature (11)..(11): n is a, c, g, or u
  misc_feature (18)..(18): n is a, c, g, or u
gaucnucaacnaccagcn

SEQ ID NO: 82807 - RNA, 19 nt, Artificial Sequence
  Synthetic
  misc_feature (6)..(6): n is a, c, g, or u
  misc_feature (12)..(12): n is a, c, g, or u
  misc_feature (19)..(19): n is a, c, g, or u
ggaucnucaacnaccagcn

SEQ ID NO: 82808 - RNA, 20 nt, Artificial Sequence
  Synthetic
  misc_feature (7)..(7): n is a, c, g, or u
  misc_feature (13)..(13): n is a, c, g, or u
  misc_feature (20)..(20): n is a, c, g, or u
aggaucnucaacnaccagcn

SEQ ID NO: 82809 - RNA, 21 nt, Artificial Sequence
  Synthetic
  misc_feature (8)..(8): n is a, c, g, or u
  misc_feature (14)..(14): n is a, c, g, or u
  misc_feature (21)..(21): n is a, c, g, or u
caggaucnucaacnaccagcn

SEQ ID NO: 82810 - RNA, 22 nt, Artificial Sequence
  Synthetic
  misc_feature (9)..(9): n is a, c, g, or u
  misc_feature (15)..(15): n is a, c, g, or u
  misc_feature (22)..(22): n is a, c, g, or u
ccaggaucnucaacnaccagcn

SEQ ID NO: 82811 - RNA, 23 nt, Artificial Sequence
  Synthetic
  misc_feature (10)..(10): n is a, c, g, or u
  misc_feature (16)..(16): n is a, c, g, or u
  misc_feature (23)..(23): n is a, c, g, or u
uccaggaucnucaacnaccagcn

SEQ ID NO: 82812 - RNA, 24 nt, Artificial Sequence
  Synthetic
  misc_feature (11)..(11): n is a, c, g, or u
  misc_feature (17)..(17): n is a, c, g, or u
  misc_feature (24)..(24): n is a, c, g, or u
uuccaggaucnucaacnaccagcn

SEQ ID NO: 82813 - RNA, 18 nt, Artificial Sequence
  Synthetic
  misc_feature (18)..(18): n is a, c, g, or u
acucugcaagaucccagn

SEQ ID NO: 82814 - RNA, 19 nt, Artificial Sequence
  Synthetic
  misc_feature (19)..(19): n is a, c, g, or u
aacucugcaagaucccagn

SEQ ID NO: 82815 - RNA, 20 nt, Artificial Sequence
  Synthetic
  misc_feature (20)..(20): n is a, c, g, or u
aaacucugcaagaucccagn

SEQ ID NO: 82816 - RNA, 21 nt, Artificial Sequence
  Synthetic
  misc_feature (21)..(21): n is a, c, g, or u
caaacucugcaagaucccagn

SEQ ID NO: 82817 - RNA, 22 nt, Artificial Sequence
  Synthetic
  misc_feature (22)..(22): n is a, c, g, or u
ccaaacucugcaagaucccagn

SEQ ID NO: 82818 - RNA, 23 nt, Artificial Sequence
  Synthetic
  misc_feature (23)..(23): n is a, c, g, or u
accaaacucugcaagaucccagn

SEQ ID NO: 82819 - RNA, 24 nt, Artificial Sequence
  Synthetic
  misc_feature (24)..(24): n is a, c, g, or u
caccaaacucugcaagaucccagn

SEQ ID NO: 82820 - RNA, 18 nt, Artificial Sequence
  Synthetic
  misc_feature (18)..(18): n is a, c, g, or u
ggucuggagcaaacauun

SEQ ID NO: 82821 - RNA, 19 nt, Artificial Sequence
  Synthetic
  misc_feature (19)..(19): n is a, c, g, or u
aggucuggagcaaacauun

SEQ ID NO: 82822 - RNA, 20 nt, Artificial Sequence
  Synthetic
  misc_feature (20)..(20): n is a, c, g, or u
caggucuggagcaaacauun

SEQ ID NO: 82823 - RNA, 21 nt, Artificial Sequence
  Synthetic
  misc_feature (21)..(21): n is a, c, g, or u
gcaggucuggagcaaacauun

SEQ ID NO: 82824 - RNA, 22 nt, Artificial Sequence
  Synthetic
  misc_feature (22)..(22): n is a, c, g, or u
agcaggucuggagcaaacauun

SEQ ID NO: 82825 - RNA, 23 nt, Artificial Sequence
  Synthetic
  misc_feature (23)..(23): n is a, c, g, or u
cagcaggucuggagcaaacauun

SEQ ID NO: 82826 - RNA, 24 nt, Artificial Sequence
  Synthetic
  misc_feature (24)..(24): n is a, c, g, or u
gcagcaggucuggagcaaacauun

SEQ ID NO: 82827 - RNA, 18 nt, Artificial Sequence
  Synthetic
  misc_feature (10)..(10): n is a, c, g, or u
  misc_feature (13)..(13): n is a, c, g, or u
  misc_feature (18)..(18): n is a, c, g, or u
gguuacucunuanauuun

SEQ ID NO: 82828 - RNA, 19 nt, Artificial Sequence
  Synthetic
  misc_feature (11)..(11): n is a, c, g, or u
  misc_feature (14)..(14): n is a, c, g, or u
  misc_feature (19)..(19): n is a, c, g, or u
ggguuacucunuanauuun

SEQ ID NO: 82829 - RNA, 20 nt, Artificial Sequence
  Synthetic
  misc_feature (12)..(12): n is a, c, g, or u
  misc_feature (15)..(15): n is a, c, g, or u
  misc_feature (20)..(20): n is a, c, g, or u
gggguuacucunuanauuun

SEQ ID NO: 82830 - RNA, 21 nt, Artificial Sequence
  Synthetic
  misc_feature (13)..(13): n is a, c, g, or u
  misc_feature (16)..(16): n is a, c, g, or u
  misc_feature (21)..(21): n is a, c, g, or u
ugggguuacucunuanauuun

SEQ ID NO: 82831 - RNA, 22 nt, Artificial Sequence
  Synthetic
  misc_feature (14)..(14): n is a, c, g, or u
  misc_feature (17)..(17): n is a, c, g, or u
  misc_feature (22)..(22): n is a, c, g, or u
augggguuacucunuanauuun

SEQ ID NO: 82832 - RNA, 23 nt, Artificial Sequence
  Synthetic
  misc_feature (15)..(15): n is a, c, g, or u
  misc_feature (18)..(18): n is a, c, g, or u
  misc_feature (23)..(23): n is a, c, g, or u
gaugggguuacucunuanauuun

SEQ ID NO: 82833 - RNA, 24 nt, Artificial Sequence
  Synthetic
  misc_feature (16)..(16): n is a, c, g, or u
  misc_feature (19)..(19): n is a, c, g, or u
  misc_feature (24)..(24): n is a, c, g, or u
agaugggguuacucunuanauuun

SEQ ID NO: 82834 - RNA, 18 nt, Artificial Sequence
  Synthetic
  misc_feature (8)..(8): n is a, c, g, or u
aagacaunaucaaaaaau

SEQ ID NO: 82835 - RNA, 19 nt, Artificial Sequence
  Synthetic
  misc_feature (9)..(9): n is a, c, g, or u
caagacaunaucaaaaaau

SEQ ID NO: 82836 - RNA, 20 nt, Artificial Sequence
  Synthetic
  misc_feature (10)..(10): n is a, c, g, or u
ccaagacaunaucaaaaaau

SEQ ID NO: 82837 - RNA, 21 nt, Artificial Sequence
  Synthetic
  misc_feature (11)..(11): n is a, c, g, or u
accaagacaunaucaaaaaau

SEQ ID NO: 82838 - RNA, 22 nt, Artificial Sequence
  Synthetic
  misc_feature (12)..(12): n is a, c, g, or u
caccaagacaunaucaaaaaau

SEQ ID NO: 82839 - RNA, 23 nt, Artificial Sequence
  Synthetic
  misc_feature (13)..(13): n is a, c, g, or u
acaccaagacaunaucaaaaaau

SEQ ID NO: 82840 - RNA, 24 nt, Artificial Sequence
  Synthetic
  misc_feature (14)..(14): n is a, c, g, or u
uacaccaagacaunaucaaaaaau

SEQ ID NO: 82841 - RNA, 18 nt, Artificial Sequence
  Synthetic
  misc_feature (5)..(5): n is a, c, g, or u
uuganccuuauaaagaau

SEQ ID NO: 82842 - RNA, 19 nt, Artificial Sequence
  Synthetic
  misc_feature (6)..(6): n is a, c, g, or u
auuganccuuauaaagaau

SEQ ID NO: 82843 - RNA, 20 nt, Artificial Sequence
  Synthetic
  misc_feature (7)..(7): n is a, c, g, or u
cauuganccuuauaaagaau

SEQ ID NO: 82844 - RNA, 21 nt, Artificial Sequence
  Synthetic
  misc_feature (8)..(8): n is a, c, g, or u
acauuganccuuauaaagaau

SEQ ID NO: 82845 - RNA, 22 nt, Artificial Sequence
  Synthetic
  misc_feature (9)..(9): n is a, c, g, or u
gacauuganccuuauaaagaau

SEQ ID NO: 82846 - RNA, 23 nt, Artificial Sequence
  Synthetic
  misc_feature (10)..(10): n is a, c, g, or u
ggacauuganccuuauaaagaau

SEQ ID NO: 82847 - RNA, 24 nt, Artificial Sequence
  Synthetic
  misc_feature (11)..(11): n is a, c, g, or u
uggacauuganccuuauaaagaau

SEQ ID NO: 82848 - RNA, 18 nt, Artificial Sequence
  Synthetic
  misc_feature (3)..(3): n is a, c, g, or u
  misc_feature (15)..(15): n is a, c, g, or u
ggnccacucacagunaau

SEQ ID NO: 82849 - RNA, 19 nt, Artificial Sequence
  Synthetic
  misc_feature (4)..(4): n is a, c, g, or u
  misc_feature (16)..(16): n is a, c, g, or u
aggnccacucacagunaau

SEQ ID NO: 82850 - RNA, 20 nt, Artificial Sequence
  Synthetic
  misc_feature (5)..(5): n is a, c, g, or u
  misc_feature (17)..(17): n is a, c, g, or u
uaggnccacucacagunaau

SEQ ID NO: 82851 - RNA, 21 nt, Artificial Sequence
  Synthetic
  misc_feature (6)..(6): n is a, c, g, or u
  misc_feature (18)..(18): n is a, c, g, or u
guaggnccacucacagunaau

SEQ ID NO: 82852 - RNA, 22 nt, Artificial Sequence
  Synthetic
  misc_feature (7)..(7): n is a, c, g, or u
  misc_feature (19)..(19): n is a, c, g, or u
uguaggnccacucacagunaau

SEQ ID NO: 82853 - RNA, 23 nt, Artificial Sequence
  Synthetic
  misc_feature (8)..(8): n is a, c, g, or u
  misc_feature (20)..(20): n is a, c, g, or u
uuguaggnccacucacagunaau

SEQ ID NO: 82854 - RNA, 24 nt, Artificial Sequence
  Synthetic
  misc_feature (9)..(9): n is a, c, g, or u
  misc_feature (21)..(21): n is a, c, g, or u
uuuguaggnccacucacagunaau

SEQ ID NO: 82855 - RNA, 18 nt, Artificial Sequence
  Synthetic
  misc_feature (9)..(9): n is a, c, g, or u
aguuaugunaacacuaau

SEQ ID NO: 82856 - RNA, 19 nt, Artificial Sequence
  Synthetic
  misc_feature (10)..(10): n is a, c, g, or u
caguuaugunaacacuaau

SEQ ID NO: 82857 - RNA, 20 nt, Artificial Sequence
  Synthetic
  misc_feature (11)..(11): n is a, c, g, or u
ucaguuaugunaacacuaau

SEQ ID NO: 82858 - RNA, 21 nt, Artificial Sequence
  Synthetic
  misc_feature (12)..(12): n is a, c, g, or u
gucaguuaugunaacacuaau

SEQ ID NO: 82859 - RNA, 22 nt, Artificial Sequence
  Synthetic
  misc_feature (13)..(13): n is a, c, g, or u
agucaguuaugunaacacuaau

SEQ ID NO: 82860 - RNA, 23 nt, Artificial Sequence
  Synthetic
  misc_feature (14)..(14): n is a, c, g, or u
uagucaguuaugunaacacuaau

SEQ ID NO: 82861 - RNA, 24 nt, Artificial Sequence
  Synthetic
  misc_feature (15)..(15): n is a, c, g, or u
guagucaguuaugunaacacuaau

SEQ ID NO: 82862 - RNA, 18 nt, Artificial Sequence
  Synthetic
  misc_feature (14)..(14): n is a, c, g, or u
accugggugggugnuaau

SEQ ID NO: 82863 - RNA, 19 nt, Artificial Sequence
  Synthetic
  misc_feature (1)..(1): n is a, c, g, or u
  misc_feature (15)..(15): n is a, c, g, or u
naccugggugggugnuaau

SEQ ID NO: 82864 - RNA, 20 nt, Artificial Sequence
  Synthetic
  misc_feature (2)..(2): n is a, c, g, or u
  misc_feature (16)..(16): n is a, c, g, or u
cnaccugggugggugnuaau

SEQ ID NO: 82865 - RNA, 21 nt, Artificial Sequence
  Synthetic
  misc_feature (3)..(3): n is a, c, g, or u
  misc_feature (17)..(17): n is a, c, g, or u
gcnaccugggugggugnuaau

SEQ ID NO: 82866 - RNA, 22 nt, Artificial Sequence
  Synthetic
  misc_feature (4)..(4): n is a, c, g, or u
  misc_feature (18)..(18): n is a, c, g, or u
agcnaccugggugggugnuaau

SEQ ID NO: 82867 - RNA, 23 nt, Artificial Sequence
  Synthetic
  misc_feature (5)..(5): n is a, c, g, or u
  misc_feature (19)..(19): n is a, c, g, or u
uagcnaccugggugggugnuaau

SEQ ID NO: 82868 - RNA, 24 nt, Artificial Sequence
  Synthetic
  misc_feature (6)..(6): n is a, c, g, or u
  misc_feature (20)..(20): n is a, c, g, or u
cuagcnaccugggugggugnuaau

SEQ ID NO: 82869 - RNA, 18 nt, Artificial Sequence
  Synthetic
uugcccaaggucuuacau

SEQ ID NO: 82870 - RNA, 19 nt, Artificial Sequence
  Synthetic
cuugcccaaggucuuacau

SEQ ID NO: 82871 - RNA, 20 nt, Artificial Sequence
  Synthetic
ucuugcccaaggucuuacau

SEQ ID NO: 82872 - RNA, 21 nt, Artificial Sequence
  Synthetic
  misc_feature (1)..(1): n is a, c, g, or u
nucuugcccaaggucuuacau

SEQ ID NO: 82873 - RNA, 22 nt, Artificial Sequence
  Synthetic
  misc_feature (1)..(2): n is a, c, g, or u
nnucuugcccaaggucuuacau

SEQ ID NO: 82874 - RNA, 23 nt, Artificial Sequence
  Synthetic
  misc_feature (2)..(3): n is a, c, g, or u
annucuugcccaaggucuuacau

SEQ ID NO: 82875 - RNA, 24 nt, Artificial Sequence
  Synthetic
  misc_feature (3)..(4): n is a, c, g, or u
cannucuugcccaaggucuuacau

SEQ ID NO: 82876 - RNA, 18 nt, Artificial Sequence
  Synthetic
agguaggagcuggagcau

SEQ ID NO: 82877 - RNA, 19 nt, Artificial Sequence
  Synthetic
aagguaggagcuggagcau

SEQ ID NO: 82878 - RNA, 20 nt, Artificial Sequence
  Synthetic
caagguaggagcuggagcau

SEQ ID NO: 82879 - RNA, 21 nt, Artificial Sequence
  Synthetic
acaagguaggagcuggagcau

SEQ ID NO: 82880 - RNA, 22 nt, Artificial Sequence
  Synthetic
aacaagguaggagcuggagcau

SEQ ID NO: 82881 - RNA, 23 nt, Artificial Sequence
  Synthetic
caacaagguaggagcuggagcau

SEQ ID NO: 82882 - RNA, 24 nt, Artificial Sequence
  Synthetic
ccaacaagguaggagcuggagcau

SEQ ID NO: 82883 - RNA, 18 nt, Artificial Sequence
  Synthetic
  misc_feature (12)..(12): n is a, c, g, or u
ccugucuuuaanccucau

SEQ ID NO: 82884 - RNA, 19 nt, Artificial Sequence
  Synthetic
  misc_feature (1)..(1): n is a, c, g, or u
  misc_feature (13)..(13): n is a, c, g, or u
nccugucuuuaanccucau

SEQ ID NO: 82885 - RNA, 20 nt, Artificial Sequence
  Synthetic
  misc_feature (2)..(2): n is a, c, g, or u
  misc_feature (14)..(14): n is a, c, g, or u
unccugucuuuaanccucau

SEQ ID NO: 82886 - RNA, 21 nt, Artificial Sequence
  Synthetic
  misc_feature (3)..(3): n is a, c, g, or u
  misc_feature (15)..(15): n is a, c, g, or u
gunccugucuuuaanccucau

SEQ ID NO: 82887 - RNA, 22 nt, Artificial Sequence
  Synthetic
  misc_feature (4)..(4): n is a, c, g, or u
  misc_feature (16)..(16): n is a, c, g, or u
ugunccugucuuuaanccucau

SEQ ID NO: 82888 - RNA, 23 nt, Artificial Sequence
  Synthetic
  misc_feature (5)..(5): n is a, c, g, or u
  misc_feature (17)..(17): n is a, c, g, or u
cugunccugucuuuaanccucau

SEQ ID NO: 82889 - RNA, 24 nt, Artificial Sequence
  Synthetic
  misc_feature (6)..(6): n is a, c, g, or u
  misc_feature (18)..(18): n is a, c, g, or u
acugunccugucuuuaanccucau

SEQ ID NO: 82890 - RNA, 18 nt, Artificial Sequence
  Synthetic
aacaccgcaaauccagau

SEQ ID NO: 82891 - RNA, 19 nt, Artificial Sequence
  Synthetic
aaacaccgcaaauccagau

SEQ ID NO: 82892 - RNA, 20 nt, Artificial Sequence
  Synthetic
caaacaccgcaaauccagau

SEQ ID NO: 82893 - RNA, 21 nt, Artificial Sequence
  Synthetic
gcaaacaccgcaaauccagau

SEQ ID NO: 82894 - RNA, 22 nt, Artificial Sequence
  Synthetic
agcaaacaccgcaaauccagau

SEQ ID NO: 82895 - RNA, 23 nt, Artificial Sequence
  Synthetic
gagcaaacaccgcaaauccagau

SEQ ID NO: 82896 - RNA, 24 nt, Artificial Sequence
  Synthetic
agagcaaacaccgcaaauccagau

SEQ ID NO: 82897 - RNA, 18 nt, Artificial Sequence
  Synthetic
gucaaucuucucgaggau

SEQ ID NO: 82898 - RNA, 19 nt, Artificial Sequence
  Synthetic
cgucaaucuucucgaggau

SEQ ID NO: 82899 - RNA, 20 nt, Artificial Sequence
  Synthetic
ucgucaaucuucucgaggau

SEQ ID NO: 82900 - RNA, 21 nt, Artificial Sequence
  Synthetic
aucgucaaucuucucgaggau

SEQ ID NO: 82901 - RNA, 22 nt, Artificial Sequence
  Synthetic
uaucgucaaucuucucgaggau

SEQ ID NO: 82902 - RNA, 23 nt, Artificial Sequence
  Synthetic
  misc_feature (1)..(1): n is a, c, g, or u
nuaucgucaaucuucucgaggau

SEQ ID NO: 82903 - RNA, 24 nt, Artificial Sequence
  Synthetic
  misc_feature (2)..(2): n is a, c, g, or u
cnuaucgucaaucuucucgaggau

SEQ ID NO: 82904 - RNA, 18 nt, Artificial Sequence
  Synthetic
guuaacaggccuauugau

SEQ ID NO: 82905 - RNA, 19 nt, Artificial Sequence
  Synthetic
uguuaacaggccuauugau

SEQ ID NO: 82906 - RNA, 20 nt, Artificial Sequence
  Synthetic
cuguuaacaggccuauugau

SEQ ID NO: 82907 - RNA, 21 nt, Artificial Sequence
  Synthetic
ccuguuaacaggccuauugau

SEQ ID NO: 82908 - RNA, 22 nt, Artificial Sequence
  Synthetic
uccuguuaacaggccuauugau

SEQ ID NO: 82909 - RNA, 23 nt, Artificial Sequence
  Synthetic
uuccuguuaacaggccuauugau

SEQ ID NO: 82910 - RNA, 24 nt, Artificial Sequence
  Synthetic
cuuccuguuaacaggccuauugau

SEQ ID NO: 82911 - RNA, 18 nt, Artificial Sequence
  Synthetic
aaggcggguauauuauau

SEQ ID NO: 82912 - RNA, 19 nt, Artificial Sequence
  Synthetic
gaaggcggguauauuauau

SEQ ID NO: 82913 - RNA, 20 nt, Artificial Sequence
  Synthetic
ggaaggcggguauauuauau

SEQ ID NO: 82914 - RNA, 21 nt, Artificial Sequence
  Synthetic
uggaaggcggguauauuauau

SEQ ID NO: 82915 - RNA, 22 nt, Artificial Sequence
  Synthetic
auggaaggcggguauauuauau

SEQ ID NO: 82916 - RNA, 23 nt, Artificial Sequence
  Synthetic
uauggaaggcggguauauuauau

SEQ ID NO: 82917 - RNA, 24 nt, Artificial Sequence
  Synthetic
cuauggaaggcggguauauuauau

SEQ ID NO: 82918 - RNA, 18 nt, Artificial Sequence
  Synthetic
auauggaugaugugguau

SEQ ID NO: 82919 - RNA, 19 nt, Artificial Sequence
  Synthetic
uauauggaugaugugguau

SEQ ID NO: 82920 - RNA, 20 nt, Artificial Sequence
  Synthetic
uuauauggaugaugugguau

SEQ ID NO: 82921 - RNA, 21 nt, Artificial Sequence
  Synthetic
guuauauggaugaugugguau

SEQ ID NO: 82922 - RNA, 22 nt, Artificial Sequence
  Synthetic
aguuauauggaugaugugguau

SEQ ID NO: 82923 - RNA, 23 nt, Artificial Sequence
  Synthetic
caguuauauggaugaugugguau

SEQ ID NO: 82924 - RNA, 24 nt, Artificial Sequence
  Synthetic
ucaguuauauggaugaugugguau

SEQ ID NO: 82925 - RNA, 18 nt, Artificial Sequence
  Synthetic
  misc_feature (15)..(15): n is a, c, g, or u
accgccucagcucunuau

SEQ ID NO: 82926 - RNA, 19 nt, Artificial Sequence
  Synthetic
  misc_feature (16)..(16): n is a, c, g, or u
uaccgccucagcucunuau

SEQ ID NO: 82927 - RNA, 20 nt, Artificial Sequence
  Synthetic
  misc_feature (17)..(17): n is a, c, g, or u
auaccgccucagcucunuau

SEQ ID NO: 82928 - RNA, 21 nt, Artificial Sequence
  Synthetic
  misc_feature (18)..(18): n is a, c, g, or u
gauaccgccucagcucunuau

SEQ ID NO: 82929 - RNA, 22 nt, Artificial Sequence
  Synthetic
  misc_feature (1)..(1): n is a, c, g, or u
  misc_feature (19)..(19): n is a, c, g, or u
ngauaccgccucagcucunuau

SEQ ID NO: 82930 - RNA, 23 nt, Artificial Sequence
  Synthetic
  misc_feature (2)..(2): n is a, c, g, or u
  misc_feature (20)..(20): n is a, c, g, or u
ungauaccgccucagcucunuau

SEQ ID NO: 82931 - RNA, 24 nt, Artificial Sequence
  Synthetic
  misc_feature (3)..(3): n is a, c, g, or u
  misc_feature (21)..(21): n is a, c, g, or u
cungauaccgccucagcucunuau

SEQ ID NO: 82932 - RNA, 18 nt, Artificial Sequence
  Synthetic
  misc_feature (14)..(14): n is a, c, g, or u
acuguuuguuuaangacu

SEQ ID NO: 82933 - RNA, 19 nt, Artificial Sequence
  Synthetic
  misc_feature (15)..(15): n is a, c, g, or u
gacuguuuguuuaangacu

SEQ ID NO: 82934 - RNA, 20 nt, Artificial Sequence
  Synthetic
  misc_feature (16)..(16): n is a, c, g, or u
agacuguuuguuuaangacu

SEQ ID NO: 82935 - RNA, 21 nt, Artificial Sequence
  Synthetic
  misc_feature (17)..(17): n is a, c, g, or u
aagacuguuuguuuaangacu

SEQ ID NO: 82936 - RNA, 22 nt, Artificial Sequence
  Synthetic
  misc_feature (18)..(18): n is a, c, g, or u
aaagacuguuuguuuaangacu

SEQ ID NO: 82937 - RNA, 23 nt, Artificial Sequence
  Synthetic
  misc_feature (19)..(19): n is a, c, g, or u
caaagacuguuuguuuaangacu

SEQ ID NO: 82938 - RNA, 24 nt, Artificial Sequence
  Synthetic
  misc_feature (20)..(20): n is a, c, g, or u
ucaaagacuguuuguuuaangacu

SEQ ID NO: 82939 - RNA, 18 nt, Artificial Sequence
  Synthetic
ccucugccgauccauacu

SEQ ID NO: 82940 - RNA, 19 nt, Artificial Sequence
  Synthetic
uccucugccgauccauacu

SEQ ID NO: 82941 - RNA, 20 nt, Artificial Sequence
  Synthetic
cuccucugccgauccauacu

SEQ ID NO: 82942 - RNA, 21 nt, Artificial Sequence
  Synthetic
gcuccucugccgauccauacu

SEQ ID NO: 82943 - RNA, 22 nt, Artificial Sequence
  Synthetic
ggcuccucugccgauccauacu

SEQ ID NO: 82944 - RNA, 23 nt, Artificial Sequence
  Synthetic
  misc_feature (1)..(1): n is a, c, g, or u
nggcuccucugccgauccauacu

SEQ ID NO: 82945 - RNA, 24 nt, Artificial Sequence
  Synthetic
  misc_feature (1)..(2): n is a, c, g, or u
nnggcuccucugccgauccauacu

SEQ ID NO: 82946 - RNA, 18 nt, Artificial Sequence
  Synthetic
uguugcuguaccaaaccu

SEQ ID NO: 82947 - RNA, 19 nt, Artificial Sequence
  Synthetic
cuguugcuguaccaaaccu

SEQ ID NO: 82948 - RNA, 20 nt, Artificial Sequence
  Synthetic
ccuguugcuguaccaaaccu

SEQ ID NO: 82949 - RNA, 21 nt, Artificial Sequence
  Synthetic
uccuguugcuguaccaaaccu

SEQ ID NO: 82950 - RNA, 22 nt, Artificial Sequence
  Synthetic
cuccuguugcuguaccaaaccu

SEQ ID NO: 82951 - RNA, 23 nt, Artificial Sequence
  Synthetic
ccuccuguugcuguaccaaaccu

SEQ ID NO: 82952 - RNA, 24 nt, Artificial Sequence
  Synthetic
cccuccuguugcuguaccaaaccu

SEQ ID NO: 82953 - RNA, 18 nt, Artificial Sequence
  Synthetic
  misc_feature (6)..(6): n is a, c, g, or u
accccncugucuccaccu

SEQ ID NO: 82954 - RNA, 19 nt, Artificial Sequence
  Synthetic
  misc_feature (7)..(7): n is a, c, g, or u
uaccccncugucuccaccu

SEQ ID NO: 82955 - RNA, 20 nt, Artificial Sequence
  Synthetic
  misc_feature (8)..(8): n is a, c, g, or u
cuaccccncugucuccaccu

SEQ ID NO: 82956 - RNA, 21 nt, Artificial Sequence
  Synthetic
  misc_feature (9)..(9): n is a, c, g, or u
ccuaccccncugucuccaccu

SEQ ID NO: 82957 - RNA, 22 nt, Artificial Sequence
  Synthetic
  misc_feature (10)..(10): n is a, c, g, or u
gccuaccccncugucuccaccu

SEQ ID NO: 82958 - RNA, 23 nt, Artificial Sequence
  Synthetic
  misc_feature (11)..(11): n is a, c, g, or u
agccuaccccncugucuccaccu

SEQ ID NO: 82959 - RNA, 24 nt, Artificial Sequence
  Synthetic
  misc_feature (12)..(12): n is a, c, g, or u
cagccuaccccncugucuccaccu

SEQ ID NO: 82960 - RNA, 18 nt, Artificial Sequence
  Synthetic
cuuuccaccagcaauccu

SEQ ID NO: 82961 - RNA, 19 nt, Artificial Sequence
  Synthetic
ucuuuccaccagcaauccu

SEQ ID NO: 82962 - RNA, 20 nt, Artificial Sequence
  Synthetic
aucuuuccaccagcaauccu

SEQ ID NO: 82963 - RNA, 21 nt, Artificial Sequence
  Synthetic
aaucuuuccaccagcaauccu

SEQ ID NO: 82964 - RNA, 22 nt, Artificial Sequence
  Synthetic
gaaucuuuccaccagcaauccu

SEQ ID NO: 82965 - RNA, 23 nt, Artificial Sequence
  Synthetic
agaaucuuuccaccagcaauccu

SEQ ID NO: 82966 - RNA, 24 nt, Artificial Sequence
  Synthetic
cagaaucuuuccaccagcaauccu

SEQ ID NO: 82967 - RNA, 18 nt, Artificial Sequence
  Synthetic
ggcuuucggaaaauuccu

SEQ ID NO: 82968 - RNA, 19 nt, Artificial Sequence
  Synthetic
gggcuuucggaaaauuccu

SEQ ID NO: 82969 - RNA, 20 nt, Artificial Sequence
  Synthetic
ugggcuuucggaaaauuccu

SEQ ID NO: 82970 - RNA, 21 nt, Artificial Sequence
  Synthetic
  misc_feature (1)..(1): n is a, c, g, or u
nugggcuuucggaaaauuccu

SEQ ID NO: 82971 - RNA, 22 nt, Artificial Sequence
  Synthetic
  misc_feature (2)..(2): n is a, c, g, or u
cnugggcuuucggaaaauuccu

SEQ ID NO: 82972 - RNA, 23 nt, Artificial Sequence
  Synthetic
  misc_feature (3)..(3): n is a, c, g, or u
ucnugggcuuucggaaaauuccu

SEQ ID NO: 82973 - RNA, 24 nt, Artificial Sequence
  Synthetic
  misc_feature (4)..(4): n is a, c, g, or u
aucnugggcuuucggaaaauuccu

SEQ ID NO: 82974 - RNA, 18 nt, Artificial Sequence
  Synthetic
  misc_feature (14)..(14): n is a, c, g, or u
acccuucucggggncgcu

SEQ ID NO: 82975 - RNA, 19 nt, Artificial Sequence
  Synthetic
  misc_feature (15)..(15): n is a, c, g, or u
gacccuucucggggncgcu

SEQ ID NO: 82976 - RNA, 20 nt, Artificial Sequence
  Synthetic
  misc_feature (16)..(16): n is a, c, g, or u
cgacccuucucggggncgcu

SEQ ID NO: 82977 - RNA, 21 nt, Artificial Sequence
  Synthetic
  misc_feature (17)..(17): n is a, c, g, or u
acgacccuucucggggncgcu

SEQ ID NO: 82978 - RNA, 22 nt, Artificial Sequence
  Synthetic
  misc_feature (18)..(18): n is a, c, g, or u
gacgacccuucucggggncgcu

SEQ ID NO: 82979 - RNA, 23 nt, Artificial Sequence
  Synthetic
  misc_feature (19)..(19): n is a, c, g, or u
ggacgacccuucucggggncgcu

SEQ ID NO: 82980 - RNA, 24 nt, Artificial Sequence
  Synthetic
  misc_feature (20)..(20): n is a, c, g, or u
cggacgacccuucucggggncgcu

SEQ ID NO: 82981 - RNA, 18 nt, Artificial Sequence
  Synthetic
ggguggagcccucaggcu

SEQ ID NO: 82982 - RNA, 19 nt, Artificial Sequence
  Synthetic
gggguggagcccucaggcu

SEQ ID NO: 82983 - RNA, 20 nt, Artificial Sequence
  Synthetic
ugggguggagcccucaggcu

SEQ ID NO: 82984 - RNA, 21 nt, Artificial Sequence
  Synthetic
uugggguggagcccucaggcu

SEQ ID NO: 82985 - RNA, 22 nt, Artificial Sequence
  Synthetic
uuugggguggagcccucaggcu

SEQ ID NO: 82986 - RNA, 23 nt, Artificial Sequence
  Synthetic
uuuugggguggagcccucaggcu

SEQ ID NO: 82987 - RNA, 24 nt, Artificial Sequence
  Synthetic
cuuuugggguggagcccucaggcu

SEQ ID NO: 82988 - RNA, 18 nt, Artificial Sequence
  Synthetic
  misc_feature (11)..(11): n is a, c, g, or u
  misc_feature (14)..(14): n is a, c, g, or u
ggcaagcaauncunugcu

SEQ ID NO: 82989 - RNA, 19 nt, Artificial Sequence
  Synthetic
  misc_feature (12)..(12): n is a, c, g, or u
  misc_feature (15)..(15): n is a, c, g, or u
aggcaagcaauncunugcu

SEQ ID NO: 82990 - RNA, 20 nt, Artificial Sequence
  Synthetic
  misc_feature (13)..(13): n is a, c, g, or u
  misc_feature (16)..(16): n is a, c, g, or u
caggcaagcaauncunugcu

SEQ ID NO: 82991 - RNA, 21 nt, Artificial Sequence
  Synthetic
  misc_feature (14)..(14): n is a, c, g, or u
  misc_feature (17)..(17): n is a, c, g, or u
ucaggcaagcaauncunugcu

SEQ ID NO: 82992 - RNA, 22 nt, Artificial Sequence
  Synthetic
  misc_feature (15)..(15): n is a, c, g, or u
  misc_feature (18)..(18): n is a, c, g, or u
cucaggcaagcaauncunugcu

SEQ ID NO: 82993 - RNA, 23 nt, Artificial Sequence
  Synthetic
  misc_feature (16)..(16): n is a, c, g, or u
  misc_feature (19)..(19): n is a, c, g, or u
acucaggcaagcaauncunugcu

SEQ ID NO: 82994 - RNA, 24 nt, Artificial Sequence
  Synthetic
  misc_feature (17)..(17): n is a, c, g, or u
  misc_feature (20)..(20): n is a, c, g, or u
cacucaggcaagcaauncunugcu

SEQ ID NO: 82995 - RNA, 18 nt, Artificial Sequence
  Synthetic
  misc_feature (16)..(16): n is a, c, g, or u
aaagaauuuggagcuncu

SEQ ID NO: 82996 - RNA, 19 nt, Artificial Sequence
  Synthetic
  misc_feature (17)..(17): n is a, c, g, or u
uaaagaauuuggagcuncu

SEQ ID NO: 82997 - RNA, 20 nt, Artificial Sequence
  Synthetic
  misc_feature (18)..(18): n is a, c, g, or u
auaaagaauuuggagcuncu

SEQ ID NO: 82998 - RNA, 21 nt, Artificial Sequence
  Synthetic
  misc_feature (19)..(19): n is a, c, g, or u
uauaaagaauuuggagcuncu

SEQ ID NO: 82999 - RNA, 22 nt, Artificial Sequence
  Synthetic
  misc_feature (20)..(20): n is a, c, g, or u
uuauaaagaauuuggagcuncu

SEQ ID NO: 83000 - RNA, 23 nt, Artificial Sequence
  Synthetic
  misc_feature (21)..(21): n is a, c, g, or u
cuuauaaagaauuuggagcuncu

SEQ ID NO: 83001 - RNA, 24 nt, Artificial Sequence
  Synthetic
  misc_feature (22)..(22): n is a, c, g, or u
ccuuauaaagaauuuggagcuncu

SEQ ID NO: 83002 - RNA, 18 nt, Artificial Sequence
  Synthetic
cgcagaagaucucaaucu

SEQ ID NO: 83003 - RNA, 19 nt, Artificial Sequence
  Synthetic
ucgcagaagaucucaaucu

SEQ ID NO: 83004 - RNA, 20 nt, Artificial Sequence
  Synthetic
gucgcagaagaucucaaucu

SEQ ID NO: 83005 - RNA, 21 nt, Artificial Sequence
  Synthetic
cgucgcagaagaucucaaucu

SEQ ID NO: 83006 - RNA, 22 nt, Artificial Sequence
  Synthetic
gcgucgcagaagaucucaaucu

SEQ ID NO: 83007 - RNA, 23 nt, Artificial Sequence
  Synthetic
cgcgucgcagaagaucucaaucu

SEQ ID NO: 83008 - RNA, 24 nt, Artificial Sequence
  Synthetic
ccgcgucgcagaagaucucaaucu

SEQ ID NO: 83009 - RNA, 18 nt, Artificial Sequence
  Synthetic
  misc_feature (4)..(4): n is a, c, g, or u
acanuauuuacacacucu

SEQ ID NO: 83010 - RNA, 19 nt, Artificial Sequence
  Synthetic
  misc_feature (5)..(5): n is a, c, g, or u
gacanuauuuacacacucu

SEQ ID NO: 83011 - RNA, 20 nt, Artificial Sequence
  Synthetic
  misc_feature (6)..(6): n is a, c, g, or u
agacanuauuuacacacucu

SEQ ID NO: 83012 - RNA, 21 nt, Artificial Sequence
  Synthetic
  misc_feature (1)..(1): n is a, c, g, or u
  misc_feature (7)..(7): n is a, c, g, or u
nagacanuauuuacacacucu

SEQ ID NO: 83013 - RNA, 22 nt, Artificial Sequence
  Synthetic
  misc_feature (2)..(2): n is a, c, g, or u
  misc_feature (8)..(8): n is a, c, g, or u
cnagacanuauuuacacacucu

SEQ ID NO: 83014 - RNA, 23 nt, Artificial Sequence
  Synthetic
  misc_feature (3)..(3): n is a, c, g, or u
  misc_feature (9)..(9): n is a, c, g, or u
acnagacanuauuuacacacucu

SEQ ID NO: 83015 - RNA, 24 nt, Artificial Sequence
  Synthetic
  misc_feature (4)..(4): n is a, c, g, or u
  misc_feature (10)..(10): n is a, c, g, or u
aacnagacanuauuuacacacucu

SEQ ID NO: 83016 - RNA, 18 nt, Artificial Sequence
  Synthetic
ugugggucaccauauucu

SEQ ID NO: 83017 - RNA, 19 nt, Artificial Sequence
  Synthetic
uugugggucaccauauucu

SEQ ID NO: 83018 - RNA, 20 nt, Artificial Sequence
  Synthetic
uuugugggucaccauauucu

SEQ ID NO: 83019 - RNA, 21 nt, Artificial Sequence
  Synthetic
uuuugugggucaccauauucu

SEQ ID NO: 83020 - RNA, 22 nt, Artificial Sequence
  Synthetic
auuuugugggucaccauauucu

SEQ ID NO: 83021 - RNA, 23 nt, Artificial Sequence
  Synthetic
cauuuugugggucaccauauucu

SEQ ID NO: 83022 - RNA, 24 nt, Artificial Sequence
  Synthetic
ucauuuugugggucaccauauucu

SEQ ID NO: 83023 - RNA, 18 nt, Artificial Sequence
  Synthetic
cccgcggacgacccuucu

SEQ ID NO: 83024 - RNA, 19 nt, Artificial Sequence
  Synthetic
ucccgcggacgacccuucu

SEQ ID NO: 83025 - RNA, 20 nt, Artificial Sequence
  Synthetic
aucccgcggacgacccuucu

SEQ ID NO: 83026 - RNA, 21 nt, Artificial Sequence
  Synthetic
aaucccgcggacgacccuucu

SEQ ID NO: 83027 - RNA, 22 nt, Artificial Sequence
  Synthetic
gaaucccgcggacgacccuucu

SEQ ID NO: 83028 - RNA, 23 nt, Artificial Sequence
  Synthetic
ugaaucccgcggacgacccuucu

SEQ ID NO: 83029 - RNA, 24 nt, Artificial Sequence
  Synthetic
cugaaucccgcggacgacccuucu

SEQ ID NO: 83030 - RNA, 18 nt, Artificial Sequence
  Synthetic
gacuucucucaauuuucu

SEQ ID NO: 83031 - RNA, 19 nt, Artificial Sequence
  Synthetic
ggacuucucucaauuuucu

SEQ ID NO: 83032 - RNA, 20 nt, Artificial Sequence
  Synthetic
uggacuucucucaauuuucu

SEQ ID NO: 83033 - RNA, 21 nt, Artificial Sequence
  Synthetic
guggacuucucucaauuuucu

SEQ ID NO: 83034 - RNA, 22 nt, Artificial Sequence
  Synthetic
gguggacuucucucaauuuucu

SEQ ID NO: 83035 - RNA, 23 nt, Artificial Sequence
  Synthetic
ugguggacuucucucaauuuucu

SEQ ID NO: 83036 - RNA, 24 nt, Artificial Sequence
  Synthetic
gugguggacuucucucaauuuucu

SEQ ID NO: 83037 - RNA, 18 nt, Artificial Sequence
  Synthetic
  misc_feature (2)..(2): n is a, c, g, or u
  misc_feature (5)..(5): n is a, c, g, or u
cnucnaccaaucgccagu

SEQ ID NO: 83038 - RNA, 19 nt, Artificial Sequence
  Synthetic
  misc_feature (3)..(3): n is a, c, g, or u
  misc_feature (6)..(6): n is a, c, g, or u
gcnucnaccaaucgccagu

SEQ ID NO: 83039 - RNA, 20 nt, Artificial Sequence
  Synthetic
  misc_feature (4)..(4): n is a, c, g, or u
  misc_feature (7)..(7): n is a, c, g, or u
ugcnucnaccaaucgccagu

SEQ ID NO: 83040 - RNA, 21 nt, Artificial Sequence
  Synthetic
  misc_feature (5)..(5): n is a, c, g, or u
  misc_feature (8)..(8): n is a, c, g, or u
cugcnucnaccaaucgccagu

SEQ ID NO: 83041 - RNA, 22 nt, Artificial Sequence
  Synthetic
  misc_feature (6)..(6): n is a, c, g, or u
  misc_feature (9)..(9): n is a, c, g, or u
ccugcnucnaccaaucgccagu

SEQ ID NO: 83042 - RNA, 23 nt, Artificial Sequence
  Synthetic
  misc_feature (7)..(7): n is a, c, g, or u
  misc_feature (10)..(10): n is a, c, g, or u
uccugcnucnaccaaucgccagu

SEQ ID NO: 83043 - RNA, 24 nt, Artificial Sequence
  Synthetic
  misc_feature (8)..(8): n is a, c, g, or u
  misc_feature (11)..(11): n is a, c, g, or u
cuccugcnucnaccaaucgccagu

SEQ ID NO: 83044 - RNA, 18 nt, Artificial Sequence
  Synthetic
  misc_feature (5)..(5): n is a, c, g, or u
uuaangacugggaggagu

SEQ ID NO: 83045 - RNA, 19 nt, Artificial Sequence
  Synthetic
  misc_feature (6)..(6): n is a, c, g, or u
uuuaangacugggaggagu

SEQ ID NO: 83046 - RNA, 20 nt, Artificial Sequence
  Synthetic
  misc_feature (7)..(7): n is a, c, g, or u
guuuaangacugggaggagu

SEQ ID NO: 83047 - RNA, 21 nt, Artificial Sequence
  Synthetic
  misc_feature (8)..(8): n is a, c, g, or u
uguuuaangacugggaggagu

SEQ ID NO: 83048 - RNA, 22 nt, Artificial Sequence
  Synthetic
  misc_feature (9)..(9): n is a, c, g, or u
uuguuuaangacugggaggagu

SEQ ID NO: 83049 - RNA, 23 nt, Artificial Sequence
  Synthetic
  misc_feature (10)..(10): n is a, c, g, or u
uuuguuuaangacugggaggagu

SEQ ID NO: 83050 - RNA, 24 nt, Artificial Sequence
  Synthetic
  misc_feature (11)..(11): n is a, c, g, or u
guuuguuuaangacugggaggagu

SEQ ID NO: 83051 - RNA, 18 nt, Artificial Sequence
  Synthetic
gccagacgccaacaaggu

SEQ ID NO: 83052 - RNA, 19 nt, Artificial Sequence
  Synthetic
ggccagacgccaacaaggu

SEQ ID NO: 83053 - RNA, 20 nt, Artificial Sequence
  Synthetic
uggccagacgccaacaaggu

SEQ ID NO: 83054 - RNA, 21 nt, Artificial Sequence
  Synthetic
cuggccagacgccaacaaggu

SEQ ID NO: 83055 - RNA, 22 nt, Artificial Sequence
  Synthetic
ccuggccagacgccaacaaggu

SEQ ID NO: 83056 - RNA, 23 nt, Artificial Sequence
  Synthetic
accuggccagacgccaacaaggu

SEQ ID NO: 83057 - RNA, 24 nt, Artificial Sequence
  Synthetic
caccuggccagacgccaacaaggu

SEQ ID NO: 83058 - RNA, 18 nt, Artificial Sequence
  Synthetic
guuuugcucgcagcaggu

SEQ ID NO: 83059 - RNA, 19 nt, Artificial Sequence
  Synthetic
uguuuugcucgcagcaggu

SEQ ID NO: 83060 - RNA, 20 nt, Artificial Sequence
  Synthetic
uuguuuugcucgcagcaggu

SEQ ID NO: 83061 - RNA, 21 nt, Artificial Sequence
  Synthetic
cuuguuuugcucgcagcaggu

SEQ ID NO: 83062 - RNA, 22 nt, Artificial Sequence
  Synthetic
gcuuguuuugcucgcagcaggu

SEQ ID NO: 83063 - RNA, 23 nt, Artificial Sequence
  Synthetic
cgcuuguuuugcucgcagcaggu

SEQ ID NO: 83064 - RNA, 24 nt, Artificial Sequence
  Synthetic
ccgcuuguuuugcucgcagcaggu

SEQ ID NO: 83065 - RNA, 18 nt, Artificial Sequence
  Synthetic
  misc_feature (16)..(16): n is a, c, g, or u
ugacuucuuuccuucngu

SEQ ID NO: 83066 - RNA, 19 nt, Artificial Sequence
  Synthetic
  misc_feature (17)..(17): n is a, c, g, or u
cugacuucuuuccuucngu

SEQ ID NO: 83067 - RNA, 20 nt, Artificial Sequence
  Synthetic
  misc_feature (18)..(18): n is a, c, g, or u
ucugacuucuuuccuucngu

SEQ ID NO: 83068 - RNA, 21 nt, Artificial Sequence
  Synthetic
  misc_feature (19)..(19): n is a, c, g, or u
uucugacuucuuuccuucngu

SEQ ID NO: 83069 - RNA, 22 nt, Artificial Sequence
  Synthetic
  misc_feature (20)..(20): n is a, c, g, or u
cuucugacuucuuuccuucngu

SEQ ID NO: 83070 - RNA, 23 nt, Artificial Sequence
  Synthetic
  misc_feature (21)..(21): n is a, c, g, or u
ccuucugacuucuuuccuucngu

SEQ ID NO: 83071 - RNA, 24 nt, Artificial Sequence
  Synthetic
  misc_feature (22)..(22): n is a, c, g, or u
gccuucugacuucuuuccuucngu

SEQ ID NO: 83072 - RNA, 18 nt, Artificial Sequence
  Synthetic
  misc_feature (16)..(16): n is a, c, g, or u
ucugcaagaucccagngu

SEQ ID NO: 83073 - RNA, 19 nt, Artificial Sequence
  Synthetic
  misc_feature (17)..(17): n is a, c, g, or u
cucugcaagaucccagngu

SEQ ID NO: 83074 - RNA, 20 nt, Artificial Sequence
  Synthetic
  misc_feature (18)..(18): n is a, c, g, or u
acucugcaagaucccagngu

SEQ ID NO: 83075 - RNA, 21 nt, Artificial Sequence
  Synthetic
  misc_feature (19)..(19): n is a, c, g, or u
aacucugcaagaucccagngu

SEQ ID NO: 83076 - RNA, 22 nt, Artificial Sequence
  Synthetic
  misc_feature (20)..(20): n is a, c, g, or u
aaacucugcaagaucccagngu

SEQ ID NO: 83077 - RNA, 23 nt, Artificial Sequence
  Synthetic
  misc_feature (21)..(21): n is a, c, g, or u
caaacucugcaagaucccagngu

SEQ ID NO: 83078 - RNA, 24 nt, Artificial Sequence
  Synthetic
  misc_feature (22)..(22): n is a, c, g, or u
ccaaacucugcaagaucccagngu

SEQ ID NO: 83079 - RNA, 18 nt, Artificial Sequence
  Synthetic
  misc_feature (1)..(1): n is a, c, g, or u
  misc_feature (6)..(6): n is a, c, g, or u
  misc_feature (8)..(8): n is a, c, g, or u
  misc_feature (10)..(10): n is a, c, g, or u
  misc_feature (17)..(17): n is a, c, g, or u
nuuaangnunuuuguanu

SEQ ID NO: 83080 - RNA, 19 nt, Artificial Sequence
  Synthetic
  misc_feature (2)..(2): n is a, c, g, or u
  misc_feature (7)..(7): n is a, c, g, or u
  misc_feature (9)..(9): n is a, c, g, or u
  misc_feature (11)..(11): n is a, c, g, or u
  misc_feature (18)..(18): n is a, c, g, or u
gnuuaangnunuuuguanu

SEQ ID NO: 83081 - RNA, 20 nt, Artificial Sequence
  Synthetic
  misc_feature (3)..(3): n is a, c, g, or u
  misc_feature (8)..(8): n is a, c, g, or u
  misc_feature (10)..(10): n is a, c, g, or u
  misc_feature (12)..(12): n is a, c, g, or u
  misc_feature (19)..(19): n is a, c, g, or u
agnuuaangnunuuuguanu

SEQ ID NO: 83082 - RNA, 21 nt, Artificial Sequence
  Synthetic
  misc_feature (4)..(4): n is a, c, g, or u
  misc_feature (9)..(9): n is a, c, g, or u
  misc_feature (11)..(11): n is a, c, g, or u
  misc_feature (13)..(13): n is a, c, g, or u
  misc_feature (20)..(20): n is a, c, g, or u
uagnuuaangnunuuuguanu

SEQ ID NO: 83083 - RNA, 22 nt, Artificial Sequence
  Synthetic
  misc_feature (1)..(1): n is a, c, g, or u
  misc_feature (5)..(5): n is a, c, g, or u
  misc_feature (10)..(10): n is a, c, g, or u
  misc_feature (12)..(12): n is a, c, g, or u
  misc_feature (14)..(14): n is a, c, g, or u
  misc_feature (21)..(21): n is a, c, g, or u
nuagnuuaangnunuuuguanu

SEQ ID NO: 83084 - RNA, 23 nt, Artificial Sequence
  Synthetic
  misc_feature (1)..(2): n is a, c, g, or u
  misc_feature (6)..(6): n is a, c, g, or u
  misc_feature (11)..(11): n is a, c, g, or u
  misc_feature (13)..(13): n is a, c, g, or u
  misc_feature (15)..(15): n is a, c, g, or u
  misc_feature (22)..(22): n is a, c, g, or u
nnuagnuuaangnunuuuguanu

SEQ ID NO: 83085 - RNA, 24 nt, Artificial Sequence
  Synthetic
  misc_feature (2)..(3): n is a, c, g, or u
  misc_feature (7)..(7): n is a, c, g, or u
  misc_feature (12)..(12): n is a, c, g, or u
  misc_feature (14)..(14): n is a, c, g, or u
  misc_feature (16)..(16): n is a, c, g, or u
  misc_feature (23)..(23): n is a, c, g, or u
gnnuagnuuaangnunuuuguanu

SEQ ID NO: 83086 - RNA, 18 nt, Artificial Sequence
  Synthetic
  misc_feature (17)..(17): n is a, c, g, or u
gucuggagcaaacauunu

SEQ ID NO: 83087 - RNA, 19 nt, Artificial Sequence
  Synthetic
  misc_feature (18)..(18): n is a, c, g, or u
ggucuggagcaaacauunu

SEQ ID NO: 83088 - RNA, 20 nt, Artificial Sequence
  Synthetic
  misc_feature (19)..(19): n is a, c, g, or u
aggucuggagcaaacauunu

SEQ ID NO: 83089 - RNA, 21 nt, Artificial Sequence
  Synthetic
  misc_feature (20)..(20): n is a, c, g, or u
caggucuggagcaaacauunu

SEQ ID NO: 83090 - RNA, 22 nt, Artificial Sequence
  Synthetic
  misc_feature (21)..(21): n is a, c, g, or u
gcaggucuggagcaaacauunu

SEQ ID NO: 83091 - RNA, 23 nt, Artificial Sequence
  Synthetic
  misc_feature (22)..(22): n is a, c, g, or u
agcaggucuggagcaaacauunu

SEQ ID NO: 83092 - RNA, 24 nt, Artificial Sequence
  Synthetic
  misc_feature (23)..(23): n is a, c, g, or u
cagcaggucuggagcaaacauunu

SEQ ID NO: 83093 - RNA, 18 nt, Artificial Sequence
  Synthetic
  misc_feature (4)..(4): n is a, c, g, or u
uganccuuauaaagaauu

SEQ ID NO: 83094 - RNA, 19 nt, Artificial Sequence
  Synthetic
  misc_feature (5)..(5): n is a, c, g, or u
uuganccuuauaaagaauu

SEQ ID NO: 83095 - RNA, 20 nt, Artificial Sequence
  Synthetic
  misc_feature (6)..(6): n is a, c, g, or u
auuganccuuauaaagaauu

SEQ ID NO: 83096 - RNA, 21 nt, Artificial Sequence
  Synthetic
  misc_feature (7)..(7): n is a, c, g, or u
cauuganccuuauaaagaauu

SEQ ID NO: 83097 - RNA, 22 nt, Artificial Sequence
  Synthetic
  misc_feature (8)..(8): n is a, c, g, or u
acauuganccuuauaaagaauu

SEQ ID NO: 83098 - RNA, 23 nt, Artificial Sequence
  Synthetic
  misc_feature (9)..(9): n is a, c, g, or u
gacauuganccuuauaaagaauu

SEQ ID NO: 83099 - RNA, 24 nt, Artificial Sequence
  Synthetic
  misc_feature (10)..(10): n is a, c, g, or u
ggacauuganccuuauaaagaauu

SEQ ID NO: 83100 - RNA, 18 nt, Artificial Sequence
  Synthetic
  misc_feature (13)..(13): n is a, c, g, or u
ccugggugggugnuaauu

SEQ ID NO: 83101 - RNA, 19 nt, Artificial Sequence
  Synthetic
  misc_feature (14)..(14): n is a, c, g, or u
accugggugggugnuaauu

SEQ ID NO: 83102 - RNA, 20 nt, Artificial Sequence
  Synthetic
  misc_feature (1)..(1): n is a, c, g, or u
  misc_feature (15)..(15): n is a, c, g, or u
naccugggugggugnuaauu

SEQ ID NO: 83103 - RNA, 21 nt, Artificial Sequence
  Synthetic
  misc_feature (2)..(2): n is a, c, g, or u
  misc_feature (16)..(16): n is a, c, g, or u
cnaccugggugggugnuaauu

SEQ ID NO: 83104 - RNA, 22 nt, Artificial Sequence
  Synthetic
  misc_feature (3)..(3): n is a, c, g, or u
  misc_feature (17)..(17): n is a, c, g, or u
gcnaccugggugggugnuaauu

SEQ ID NO: 83105 - RNA, 23 nt, Artificial Sequence
  Synthetic
  misc_feature (4)..(4): n is a, c, g, or u
  misc_feature (18)..(18): n is a, c, g, or u
agcnaccugggugggugnuaauu

SEQ ID NO: 83106 - RNA, 24 nt, Artificial Sequence
  Synthetic
  misc_feature (5)..(5): n is a, c, g, or u
  misc_feature (19)..(19): n is a, c, g, or u
uagcnaccugggugggugnuaauu

SEQ ID NO: 83107 - RNA, 18 nt, Artificial Sequence
  Synthetic
ucaaucuucucgaggauu

SEQ ID NO: 83108 - RNA, 19 nt, Artificial Sequence
  Synthetic
gucaaucuucucgaggauu

SEQ ID NO: 83109 - RNA, 20 nt, Artificial Sequence
  Synthetic
cgucaaucuucucgaggauu

SEQ ID NO: 83110 - RNA, 21 nt, Artificial Sequence
  Synthetic
ucgucaaucuucucgaggauu

SEQ ID NO: 83111 - RNA, 22 nt, Artificial Sequence
  Synthetic
aucgucaaucuucucgaggauu

SEQ ID NO: 83112 - RNA, 23 nt, Artificial Sequence
  Synthetic
uaucgucaaucuucucgaggauu

SEQ ID NO: 83113 - RNA, 24 nt, Artificial Sequence
  Synthetic
  misc_feature (1)..(1): n is a, c, g, or u
nuaucgucaaucuucucgaggauu

SEQ ID NO: 83114 - RNA, 18 nt, Artificial Sequence
  Synthetic
uauggaugaugugguauu

SEQ ID NO: 83115 - RNA, 19 nt, Artificial Sequence
  Synthetic
auauggaugaugugguauu

SEQ ID NO: 83116 - RNA, 20 nt, Artificial Sequence
  Synthetic
uauauggaugaugugguauu

SEQ ID NO: 83117 - RNA, 21 nt, Artificial Sequence
  Synthetic
uuauauggaugaugugguauu

SEQ ID NO: 83118 - RNA, 22 nt, Artificial Sequence
  Synthetic
guuauauggaugaugugguauu

SEQ ID NO: 83119 - RNA, 23 nt, Artificial Sequence
  Synthetic
aguuauauggaugaugugguauu

SEQ ID NO: 83120 - RNA, 24 nt, Artificial Sequence
  Synthetic
caguuauauggaugaugugguauu

SEQ ID NO: 83121 - RNA, 18 nt, Artificial Sequence
  Synthetic
ccuaucuuaucaacacuu

SEQ ID NO: 83122 - RNA, 19 nt, Artificial Sequence
  Synthetic
cccuaucuuaucaacacuu

SEQ ID NO: 83123 - RNA, 20 nt, Artificial Sequence
  Synthetic
ccccuaucuuaucaacacuu

SEQ ID NO: 83124 - RNA, 21 nt, Artificial Sequence
  Synthetic
gccccuaucuuaucaacacuu

SEQ ID NO: 83125 - RNA, 22 nt, Artificial Sequence
  Synthetic
ugccccuaucuuaucaacacuu

SEQ ID NO: 83126 - RNA, 23 nt, Artificial Sequence
  Synthetic
augccccuaucuuaucaacacuu

SEQ ID NO: 83127 - RNA, 24 nt, Artificial Sequence
  Synthetic
aaugccccuaucuuaucaacacuu

SEQ ID NO: 83128 - RNA, 18 nt, Artificial Sequence
  Synthetic
acauuucuugucucacuu

SEQ ID NO: 83129 - RNA, 19 nt, Artificial Sequence
  Synthetic
cacauuucuugucucacuu

SEQ ID NO: 83130 - RNA, 20 nt, Artificial Sequence
  Synthetic
ucacauuucuugucucacuu

SEQ ID NO: 83131 - RNA, 21 nt, Artificial Sequence
  Synthetic
uucacauuucuugucucacuu

SEQ ID NO: 83132 - RNA, 22 nt, Artificial Sequence
  Synthetic
uuucacauuucuugucucacuu

SEQ ID NO: 83133 - RNA, 23 nt, Artificial Sequence
  Synthetic
guuucacauuucuugucucacuu

SEQ ID NO: 83134 - RNA, 24 nt, Artificial Sequence
  Synthetic
gguuucacauuucuugucucacuu

SEQ ID NO: 83135 - RNA, 18 nt, Artificial Sequence
  Synthetic
ccaguuggauccagccuu

SEQ ID NO: 83136 - RNA, 19 nt, Artificial Sequence
  Synthetic
accaguuggauccagccuu

SEQ ID NO: 83137 - RNA, 20 nt, Artificial Sequence
  Synthetic
caccaguuggauccagccuu

SEQ ID NO: 83138 - RNA, 21 nt, Artificial Sequence
  Synthetic
ccaccaguuggauccagccuu

SEQ ID NO: 83139 - RNA, 22 nt, Artificial Sequence
  Synthetic
accaccaguuggauccagccuu

SEQ ID NO: 83140 - RNA, 23 nt, Artificial Sequence
  Synthetic
gaccaccaguuggauccagccuu

SEQ ID NO: 83141 - RNA, 24 nt, Artificial Sequence
  Synthetic
cgaccaccaguuggauccagccuu

SEQ ID NO: 83142 - RNA, 18 nt, Artificial Sequence
  Synthetic
ccaccgcacggaggccuu

SEQ ID NO: 83143 - RNA, 19 nt, Artificial Sequence
  Synthetic
cccaccgcacggaggccuu

SEQ ID NO: 83144 - RNA, 20 nt, Artificial Sequence
  Synthetic
ccccaccgcacggaggccuu

SEQ ID NO: 83145 - RNA, 21 nt, Artificial Sequence
  Synthetic
accccaccgcacggaggccuu

SEQ ID NO: 83146 - RNA, 22 nt, Artificial Sequence
  Synthetic
caccccaccgcacggaggccuu

SEQ ID NO: 83147 - RNA, 23 nt, Artificial Sequence
  Synthetic
ucaccccaccgcacggaggccuu

SEQ ID NO: 83148 - RNA, 24 nt, Artificial Sequence
  Synthetic
uucaccccaccgcacggaggccuu

SEQ ID NO: 83149 - RNA, 18 nt, Artificial Sequence
  Synthetic
  misc_feature (11)..(11): n is a, c, g, or u
ucccaucaucnugggcuu

SEQ ID NO: 83150 - RNA, 19 nt, Artificial Sequence
  Synthetic
  misc_feature (12)..(12): n is a, c, g, or u
aucccaucaucnugggcuu

SEQ ID NO: 83151 - RNA, 20 nt, Artificial Sequence
  Synthetic
  misc_feature (13)..(13): n is a, c, g, or u
caucccaucaucnugggcuu

SEQ ID NO: 83152 - RNA, 21 nt, Artificial Sequence
  Synthetic
  misc_feature (14)..(14): n is a, c, g, or u
ccaucccaucaucnugggcuu

SEQ ID NO: 83153 - RNA, 22 nt, Artificial Sequence
  Synthetic
  misc_feature (15)..(15): n is a, c, g, or u
cccaucccaucaucnugggcuu

SEQ ID NO: 83154 - RNA, 23 nt, Artificial Sequence
  Synthetic
  misc_feature (16)..(16): n is a, c, g, or u
ucccaucccaucaucnugggcuu

SEQ ID NO: 83155 - RNA, 24 nt, Artificial Sequence
  Synthetic
  misc_feature (17)..(17): n is a, c, g, or u
uucccaucccaucaucnugggcuu

SEQ ID NO: 83156 - RNA, 18 nt, Artificial Sequence
  Synthetic
uagaguauuuggugucuu

SEQ ID NO: 83157 - RNA, 19 nt, Artificial Sequence
  Synthetic
  misc_feature (1)..(1): n is a, c, g, or u
nuagaguauuuggugucuu

SEQ ID NO: 83158 - RNA, 20 nt, Artificial Sequence
  Synthetic
  misc_feature (1)..(2): n is a, c, g, or u
nnuagaguauuuggugucuu

SEQ ID NO: 83159 - RNA, 21 nt, Artificial Sequence
  Synthetic
  misc_feature (2)..(3): n is a, c, g, or u
unnuagaguauuuggugucuu

SEQ ID NO: 83160 - RNA, 22 nt, Artificial Sequence
  Synthetic
  misc_feature (3)..(4): n is a, c, g, or u
gunnuagaguauuuggugucuu

SEQ ID NO: 83161 - RNA, 23 nt, Artificial Sequence
  Synthetic
  misc_feature (1)..(1): n is a, c, g, or u
  misc_feature (4)..(5): n is a, c, g, or u
ngunnuagaguauuuggugucuu

SEQ ID NO: 83162 - RNA, 24 nt, Artificial Sequence
  Synthetic
  misc_feature (2)..(2): n is a, c, g, or u
  misc_feature (5)..(6): n is a, c, g, or u
cngunnuagaguauuuggugucuu

SEQ ID NO: 83163 - RNA, 18 nt, Artificial Sequence
  Synthetic
gugggucaccauauucuu

SEQ ID NO: 83164 - RNA, 19 nt, Artificial Sequence
  Synthetic
ugugggucaccauauucuu

SEQ ID NO: 83165 - RNA, 20 nt, Artificial Sequence
  Synthetic
uugugggucaccauauucuu

SEQ ID NO: 83166 - RNA, 21 nt, Artificial Sequence
  Synthetic
uuugugggucaccauauucuu

SEQ ID NO: 83167 - RNA, 22 nt, Artificial Sequence
  Synthetic
uuuugugggucaccauauucuu

SEQ ID NO: 83168 - RNA, 23 nt, Artificial Sequence
  Synthetic
auuuugugggucaccauauucuu

SEQ ID NO: 83169 - RNA, 24 nt, Artificial Sequence
  Synthetic
cauuuugugggucaccauauucuu

SEQ ID NO: 83170 - RNA, 18 nt, Artificial Sequence
  Synthetic
aucuucuuguugguucuu

SEQ ID NO: 83171 - RNA, 19 nt, Artificial Sequence
  Synthetic
caucuucuuguugguucuu

SEQ ID NO: 83172 - RNA, 20 nt, Artificial Sequence
  Synthetic
ucaucuucuuguugguucuu

SEQ ID NO: 83173 - RNA, 21 nt, Artificial Sequence
  Synthetic
cucaucuucuuguugguucuu

SEQ ID NO: 83174 - RNA, 22 nt, Artificial Sequence
  Synthetic
ccucaucuucuuguugguucuu

SEQ ID NO: 83175 - RNA, 23 nt, Artificial Sequence
  Synthetic
gccucaucuucuuguugguucuu

SEQ ID NO: 83176 - RNA, 24 nt, Artificial Sequence
  Synthetic
ugccucaucuucuuguugguucuu

SEQ ID NO: 83177 - RNA, 18 nt, Artificial Sequence
  Synthetic
cugcugguggcuccaguu

SEQ ID NO: 83178 - RNA, 19 nt, Artificial Sequence
  Synthetic
ccugcugguggcuccaguu

SEQ ID NO: 83179 - RNA, 20 nt, Artificial Sequence
  Synthetic
cccugcugguggcuccaguu

SEQ ID NO: 83180 - RNA, 21 nt, Artificial Sequence
  Synthetic
ucccugcugguggcuccaguu

SEQ ID NO: 83181 - RNA, 22 nt, Artificial Sequence
  Synthetic
uucccugcugguggcuccaguu

SEQ ID NO: 83182 - RNA, 23 nt, Artificial Sequence
  Synthetic
uuucccugcugguggcuccaguu

SEQ ID NO: 83183 - RNA, 24 nt, Artificial Sequence
  Synthetic
auuucccugcugguggcuccaguu

SEQ ID NO: 83184 - RNA, 18 nt, Artificial Sequence
  Synthetic
  misc_feature (4)..(4): n is a, c, g, or u
uaangacugggaggaguu

SEQ ID NO: 83185 - RNA, 19 nt, Artificial Sequence
  Synthetic
  misc_feature (5)..(5): n is a, c, g, or u
uuaangacugggaggaguu

SEQ ID NO: 83186 - RNA, 20 nt, Artificial Sequence
  Synthetic
  misc_feature (6)..(6): n is a, c, g, or u
uuuaangacugggaggaguu

SEQ ID NO: 83187 - RNA, 21 nt, Artificial Sequence
  Synthetic
  misc_feature (7)..(7): n is a, c, g, or u
guuuaangacugggaggaguu

SEQ ID NO: 83188 - RNA, 22 nt, Artificial Sequence
  Synthetic
  misc_feature (8)..(8): n is a, c, g, or u
uguuuaangacugggaggaguu

SEQ ID NO: 83189 - RNA, 23 nt, Artificial Sequence
  Synthetic
  misc_feature (9)..(9): n is a, c, g, or u
uuguuuaangacugggaggaguu

SEQ ID NO: 83190 - RNA, 24 nt, Artificial Sequence
  Synthetic
  misc_feature (10)..(10): n is a, c, g, or u
uuuguuuaangacugggaggaguu

SEQ ID NO: 83191 - RNA, 18 nt, Artificial Sequence
  Synthetic
cauuucuugucucacuuu

SEQ ID NO: 83192 - RNA, 19 nt, Artificial Sequence
  Synthetic
acauuucuugucucacuuu

SEQ ID NO: 83193 - RNA, 20 nt, Artificial Sequence
  Synthetic
cacauuucuugucucacuuu

SEQ ID NO: 83194 - RNA, 21 nt, Artificial Sequence
  Synthetic
ucacauuucuugucucacuuu

SEQ ID NO: 83195 - RNA, 22 nt, Artificial Sequence
  Synthetic
uucacauuucuugucucacuuu

SEQ ID NO: 83196 - RNA, 23 nt, Artificial Sequence
  Synthetic
uuucacauuucuugucucacuuu

SEQ ID NO: 83197 - RNA, 24 nt, Artificial Sequence
  Synthetic
guuucacauuucuugucucacuuu

SEQ ID NO: 83198 - RNA, 18 nt, Artificial Sequence
  Synthetic
  misc_feature (4)..(4): n is a, c, g, or u
cccncugucuccaccuuu

SEQ ID NO: 83199 - RNA, 19 nt, Artificial Sequence
  Synthetic
  misc_feature (5)..(5): n is a, c, g, or u
ccccncugucuccaccuuu

SEQ ID NO: 83200 - RNA, 20 nt, Artificial Sequence
  Synthetic
  misc_feature (6)..(6): n is a, c, g, or u
accccncugucuccaccuuu

SEQ ID NO: 83201 - RNA, 21 nt, Artificial Sequence
  Synthetic
  misc_feature (7)..(7): n is a, c, g, or u
uaccccncugucuccaccuuu

SEQ ID NO: 83202 - RNA, 22 nt, Artificial Sequence
  Synthetic
  misc_feature (8)..(8): n is a, c, g, or u
cuaccccncugucuccaccuuu

SEQ ID NO: 83203 - RNA, 23 nt, Artificial Sequence
  Synthetic
  misc_feature (9)..(9): n is a, c, g, or u
ccuaccccncugucuccaccuuu

SEQ ID NO: 83204 - RNA, 24 nt, Artificial Sequence
  Synthetic
  misc_feature (10)..(10): n is a, c, g, or u
gccuaccccncugucuccaccuuu

SEQ ID NO: 83205 - RNA, 18 nt, Artificial Sequence
  Synthetic
  misc_feature (10)..(10): n is a, c, g, or u
cccaucaucnugggcuuu

SEQ ID NO: 83206 - RNA, 19 nt, Artificial Sequence
  Synthetic
  misc_feature (11)..(11): n is a, c, g, or u
ucccaucaucnugggcuuu

SEQ ID NO: 83207 - RNA, 20 nt, Artificial Sequence
  Synthetic
  misc_feature (12)..(12): n is a, c, g, or u
aucccaucaucnugggcuuu

SEQ ID NO: 83208 - RNA, 21 nt, Artificial Sequence
  Synthetic
  misc_feature (13)..(13): n is a, c, g, or u
caucccaucaucnugggcuuu

SEQ ID NO: 83209 - RNA, 22 nt, Artificial Sequence
  Synthetic
  misc_feature (14)..(14): n is a, c, g, or u
ccaucccaucaucnugggcuuu

SEQ ID NO: 83210 - RNA, 23 nt, Artificial Sequence
  Synthetic
  misc_feature (15)..(15): n is a, c, g, or u
cccaucccaucaucnugggcuuu

SEQ ID NO: 83211 - RNA, 24 nt, Artificial Sequence
  Synthetic
  misc_feature (16)..(16): n is a, c, g, or u
ucccaucccaucaucnugggcuuu

SEQ ID NO: 83212 - RNA, 18 nt, Artificial Sequence
  Synthetic
  misc_feature (1)..(1): n is a, c, g, or u
naaaaucaaagaauguuu

SEQ ID NO: 83213 - RNA, 19 nt, Artificial Sequence
  Synthetic
  misc_feature (2)..(2): n is a, c, g, or u
anaaaaucaaagaauguuu

SEQ ID NO: 83214 - RNA, 20 nt, Artificial Sequence
  Synthetic
  misc_feature (3)..(3): n is a, c, g, or u
canaaaaucaaagaauguuu

SEQ ID NO: 83215 - RNA, 21 nt, Artificial Sequence
  Synthetic
  misc_feature (4)..(4): n is a, c, g, or u
acanaaaaucaaagaauguuu

SEQ ID NO: 83216 - RNA, 22 nt, Artificial Sequence
  Synthetic
  misc_feature (1)..(1): n is a, c, g, or u
  misc_feature (5)..(5): n is a, c, g, or u
nacanaaaaucaaagaauguuu

SEQ ID NO: 83217 - RNA, 23 nt, Artificial Sequence
  Synthetic
  misc_feature (2)..(2): n is a, c, g, or u
  misc_feature (6)..(6): n is a, c, g, or u
anacanaaaaucaaagaauguuu

SEQ ID NO: 83218 - RNA, 24 nt, Artificial Sequence
  Synthetic
  misc_feature (3)..(3): n is a, c, g, or u
  misc_feature (7)..(7): n is a, c, g, or u
canacanaaaaucaaagaauguuu

SEQ ID NO: 83219 - RNA, 22 nt, Artificial Sequence
  Synthetic
gauaguccagaagaaccaacaa

SEQ ID NO: 83220 - RNA, 21 nt, Artificial Sequence
  Synthetic
gaccuggccguugccgggcaa

SEQ ID NO: 83221 - RNA, 23 nt, Artificial Sequence
  Synthetic
gcuugaacaguaggacaugaaca

SEQ ID NO: 83222 - RNA, 24 nt, Artificial Sequence
  Synthetic
ggcuugaacaguaggacaugaaca

SEQ ID NO: 83223 - RNA, 21 nt, Artificial Sequence
  Synthetic
gaauccacacuccgaaagaca

SEQ ID NO: 83224 - RNA, 23 nt, Artificial Sequence
  Synthetic
gcgaauccacacuccgaaagaca

SEQ ID NO: 83225 - RNA, 23 nt, Artificial Sequence
  Synthetic
gacugcgaauuuuggccaagaca

SEQ ID NO: 83226 - RNA, 24 nt, Artificial Sequence
  Synthetic
ggacugcgaauuuuggccaagaca

SEQ ID NO: 83227 - RNA, 23 nt, Artificial Sequence
  Synthetic
guucccaagaauauggugaccca

SEQ ID NO: 83228 - RNA, 23 nt, Artificial Sequence
  Synthetic
guuugcucugaaggcuggaucca

SEQ ID NO: 83229 - RNA, 21 nt, Artificial Sequence
  Synthetic
  misc_feature (4)..(4): n is a, c, g, or u
guuncccaccuuaugagucca

SEQ ID NO: 83230 - RNA, 21 nt, Artificial Sequence
  Synthetic
gcagaggugaagcgaagugca

SEQ ID NO: 83231 - RNA, 23 nt, Artificial Sequence
  Synthetic
gugcagaggugaagcgaagugca

SEQ ID NO: 83232 - RNA, 22 nt, Artificial Sequence
  Synthetic
gaacaguaggacaugaacaaga

SEQ ID NO: 83233 - RNA, 21 nt, Artificial Sequence
  Synthetic
ggcagacggagaaggggacga

SEQ ID NO: 83234 - RNA, 22 nt, Artificial Sequence
  Synthetic
gagaccuucgucugcgaggcga

SEQ ID NO: 83235 - RNA, 18 nt, Artificial Sequence
  Synthetic
ggccuuguaaguuggcga

SEQ ID NO: 83236 - RNA, 22 nt, Artificial Sequence
  Synthetic
gaaaggccuuguaaguuggcga

SEQ ID NO: 83237 - RNA, 22 nt, Artificial Sequence
  Synthetic
gcgcaggguccccaauccucga

SEQ ID NO: 83238 - RNA, 21 nt, Artificial Sequence
  Synthetic
ggauccaacugguggucggga

SEQ ID NO: 83239 - RNA, 24 nt, Artificial Sequence
  Synthetic
gcuggauccaacugguggucggga

SEQ ID NO: 83240 - RNA, 21 nt, Artificial Sequence
  Synthetic
gcacagccuagcagccaugga

SEQ ID NO: 83241 - RNA, 24 nt, Artificial Sequence
  Synthetic
gcagcacagccuagcagccaugga

SEQ ID NO: 83242 - RNA, 21 nt, Artificial Sequence
  Synthetic
gaaagcccuacgaaccacuga

SEQ ID NO: 83243 - RNA, 22 nt, Artificial Sequence
  Synthetic
ggaaagcccuacgaaccacuga

SEQ ID NO: 83244 - RNA, 23 nt, Artificial Sequence
  Synthetic
gggaaagcccuacgaaccacuga

SEQ ID NO: 83245 - RNA, 24 nt, Artificial Sequence
  Synthetic
ggggaaagcccuacgaaccacuga

SEQ ID NO: 83246 - RNA, 20 nt, Artificial Sequence
  Synthetic
guagucuccggaaguguuga

SEQ ID NO: 83247 - RNA, 18 nt, Artificial Sequence
  Synthetic
gccucgucgucuaacaac

SEQ ID NO: 83248 - RNA, 23 nt, Artificial Sequence
  Synthetic
gaccugccucgucgucuaacaac

SEQ ID NO: 83249 - RNA, 24 nt, Artificial Sequence
  Synthetic
ggaccugccucgucgucuaacaac

SEQ ID NO: 83250 - RNA, 20 nt, Artificial Sequence
  Synthetic
gaccugccucgucgucuaac

SEQ ID NO: 83251 - RNA, 21 nt, Artificial Sequence
  Synthetic
gaaaauugagagaaguccacc

SEQ ID NO: 83252 - RNA, 24 nt, Artificial Sequence
  Synthetic
guccgcguaaagagaggugcgccc

SEQ ID NO: 83253 - RNA, 23 nt, Artificial Sequence
  Synthetic
gauaaaacgccgcagacacaucc

SEQ ID NO: 83254 - RNA, 23 nt, Artificial Sequence
  Synthetic
gucgucuaacaacaguagucucc

SEQ ID NO: 83255 - RNA, 23 nt, Artificial Sequence
  Synthetic
  misc_feature (13)..(13): n is a, c, g, or u
gucguugacauuncagagagucc

SEQ ID NO: 83256 - RNA, 24 nt, Artificial Sequence
  Synthetic
  misc_feature (14)..(14): n is a, c, g, or u
ggucguugacauuncagagagucc

SEQ ID NO: 83257 - RNA, 24 nt, Artificial Sequence
  Synthetic
gacaugaacaagagaugauuaggc

SEQ ID NO: 83258 - RNA, 19 nt, Artificial Sequence
  Synthetic
gaaccacugaacaaauggc

SEQ ID NO: 83259 - RNA, 18 nt, Artificial Sequence
  Synthetic
ggucuccaugcgacgugc

SEQ ID NO: 83260 - RNA, 20 nt, Artificial Sequence
  Synthetic
guggucuccaugcgacgugc

SEQ ID NO: 83261 - RNA, 22 nt, Artificial Sequence
  Synthetic
  misc_feature (21)..(21): n is a, c, g, or u
gauacauagagguuccuuganc

SEQ ID NO: 83262 - RNA, 23 nt, Artificial Sequence
  Synthetic
  misc_feature (22)..(22): n is a, c, g, or u
ggauacauagagguuccuuganc

SEQ ID NO: 83263 - RNA, 24 nt, Artificial Sequence
  Synthetic
  misc_feature (23)..(23): n is a, c, g, or u
gggauacauagagguuccuuganc

SEQ ID NO: 83264 - RNA, 21 nt, Artificial Sequence
  Synthetic
  misc_feature (20)..(20): n is a, c, g, or u
ggaaauacaggccucucacnc

SEQ ID NO: 83265 - RNA, 22 nt, Artificial Sequence
  Synthetic
  misc_feature (21)..(21): n is a, c, g, or u
gggaaauacaggccucucacnc

SEQ ID NO: 83266 - RNA, 21 nt, Artificial Sequence
  Synthetic
gccugaggaugaguguuucuc

SEQ ID NO: 83267 - RNA, 22 nt, Artificial Sequence
  Synthetic
ggccugaggaugaguguuucuc

SEQ ID NO: 83268 - RNA, 23 nt, Artificial Sequence
  Synthetic
gcaaaacaagcggcuaggaguuc

SEQ ID NO: 83269 - RNA, 20 nt, Artificial Sequence
  Synthetic
gacggggaguccgcguaaag

SEQ ID NO: 83270 - RNA, 19 nt, Artificial Sequence
  Synthetic
gcgacgugcagaggugaag

SEQ ID NO: 83271 - RNA, 21 nt, Artificial Sequence
  Synthetic
gcagaugagaaggcacagacg

SEQ ID NO: 83272 - RNA, 22 nt, Artificial Sequence
  Synthetic
ggcagaugagaaggcacagacg

SEQ ID NO: 83273 - RNA, 21 nt, Artificial Sequence
  Synthetic
  misc_feature (2)..(2): n is a, c, g, or u
gnccccgagaagggucguccg

SEQ ID NO: 83274 - RNA, 23 nt, Artificial Sequence
  Synthetic
  misc_feature (4)..(4): n is a, c, g, or u
gcgnccccgagaagggucguccg

SEQ ID NO: 83275 - RNA, 19 nt, Artificial Sequence
  Synthetic
gcgaagugcacacgguccg

SEQ ID NO: 83276 - RNA, 22 nt, Artificial Sequence
  Synthetic
gaagcgaagugcacacgguccg

SEQ ID NO: 83277 - RNA, 24 nt, Artificial Sequence
  Synthetic
gugaagcgaagugcacacgguccg

SEQ ID NO: 83278 - RNA, 22 nt, Artificial Sequence
  Synthetic
gugauguucuccauguucagcg

SEQ ID NO: 83279 - RNA, 23 nt, Artificial Sequence
  Synthetic
guaggcugccuuccugacuggcg

SEQ ID NO: 83280 - RNA, 24 nt, Artificial Sequence
  Synthetic
gguaggcugccuuccugacuggcg

SEQ ID NO: 83281 - RNA, 18 nt, Artificial Sequence
  Synthetic
gcaauuuccguccgaagg

SEQ ID NO: 83282 - RNA, 20 nt, Artificial Sequence
  Synthetic
gugcaauuuccguccgaagg

SEQ ID NO: 83283 - RNA, 21 nt, Artificial Sequence
  Synthetic
ggugcaauuuccguccgaagg

SEQ ID NO: 83284 - RNA, 24 nt, Artificial Sequence
  Synthetic
gauuugcgguguuugcucugaagg

SEQ ID NO: 83285 - RNA, 22 nt, Artificial Sequence
  Synthetic
gacacauccagcgauaaccagg

SEQ ID NO: 83286 - RNA, 23 nt, Artificial Sequence
  Synthetic
  misc_feature (6)..(6): n is a, c, g, or u
gcauungguggucuauaagcugg

SEQ ID NO: 83287 - RNA, 24 nt, Artificial Sequence
  Synthetic
  misc_feature (7)..(7): n is a, c, g, or u
ggcauungguggucuauaagcugg

SEQ ID NO: 83288 - RNA, 23 nt, Artificial Sequence
  Synthetic
gcuccuaccuuguuggcgucugg

SEQ ID NO: 83289 - RNA, 23 nt, Artificial Sequence
  Synthetic
guaaugauuaacuagauguucug

SEQ ID NO: 83290 - RNA, 24 nt, Artificial Sequence
  Synthetic
gacaaguuggaggacaggagguug

SEQ ID NO: 83291 - RNA, 21 nt, Artificial Sequence
  Synthetic
  misc_feature (21)..(21): n is a, c, g, or u
guugauaagauaggggcauun

SEQ ID NO: 83292 - RNA, 23 nt, Artificial Sequence
  Synthetic
  misc_feature (23)..(23): n is a, c, g, or u
guguugauaagauaggggcauun

SEQ ID NO: 83293 - RNA, 22 nt, Artificial Sequence
  Synthetic
gcucugaaggcuggauccaacu

SEQ ID NO: 83294 - RNA, 22 nt, Artificial Sequence
  Synthetic
guaacagcgguaaaaagggacu

SEQ ID NO: 83295 - RNA, 23 nt, Artificial Sequence
  Synthetic
gguaacagcgguaaaaagggacu

SEQ ID NO: 83296 - RNA, 24 nt, Artificial Sequence
  Synthetic
  misc_feature (15)..(15): n is a, c, g, or u
gccuguaacacgagnagggguccu

SEQ ID NO: 83297 - RNA, 19 nt, Artificial Sequence
  Synthetic
gcgagcaaaacaagcggcu

SEQ ID NO: 83298 - RNA, 22 nt, Artificial Sequence
  Synthetic
gcugcgagcaaaacaagcggcu

SEQ ID NO: 83299 - RNA, 20 nt, Artificial Sequence
  Synthetic
guccuuguugggauugaagu

SEQ ID NO: 83300 - RNA, 22 nt, Artificial Sequence
  Synthetic
guguccuuguugggauugaagu

SEQ ID NO: 83301 - RNA, 23 nt, Artificial Sequence
  Synthetic
gguguccuuguugggauugaagu

SEQ ID NO: 83302 - RNA, 24 nt, Artificial Sequence
  Synthetic
gcccaugaccaagccccagccagu

SEQ ID NO: 83303 - RNA, 22 nt, Artificial Sequence
  Synthetic
guggucuauaagcuggaggagu

SEQ ID NO: 83304 - RNA, 23 nt, Artificial Sequence
  Synthetic
gguggucuauaagcuggaggagu

SEQ ID NO: 83305 - RNA, 18 nt, Artificial Sequence
  Synthetic
gggcaacgggguaaaggu

SEQ ID NO: 83306 - RNA, 21 nt, Artificial Sequence
  Synthetic
gccgggcaacgggguaaaggu

SEQ ID NO: 83307 - RNA, 24 nt, Artificial Sequence
  Synthetic
guugccgggcaacgggguaaaggu

SEQ ID NO: 83308 - RNA, 18 nt, Artificial Sequence
  Synthetic
guugccgggcaacggggu

SEQ ID NO: 83309 - RNA, 21 nt, Artificial Sequence
  Synthetic
gccguugccgggcaacggggu

SEQ ID NO: 83310 - RNA, 22 nt, Artificial Sequence
  Synthetic
ggccguugccgggcaacggggu

SEQ ID NO: 83311 - RNA, 21 nt, Artificial Sequence
  Synthetic
gaggugaaaaaguugcauggu

SEQ ID NO: 83312 - RNA, 24 nt, Artificial Sequence
  Synthetic
gcagaggugaaaaaguugcauggu

SEQ ID NO: 83313 - RNA, 21 nt, Artificial Sequence
  Synthetic
gucuagacucugcgguauugu

SEQ ID NO: 83314 - RNA, 23 nt, Artificial Sequence
  Synthetic
gagucuagacucugcgguauugu

SEQ ID NO: 83315 - RNA, 22 nt, Artificial Sequence
  Synthetic
gcgucuggccagguguccuugu

SEQ ID NO: 83316 - RNA, 23 nt, Artificial Sequence
  Synthetic
ggcgucuggccagguguccuugu

SEQ ID NO: 83317 - RNA, 22 nt, Artificial Sequence
  Synthetic
guccccaauccucgagaagauu

SEQ ID NO: 83318 - RNA, 23 nt, Artificial Sequence
  Synthetic
gguccccaauccucgagaagauu

SEQ ID NO: 83319 - RNA, 24 nt, Artificial Sequence
  Synthetic
ggguccccaauccucgagaagauu

SEQ ID NO: 83320 - RNA, 22 nt, Artificial Sequence
  Synthetic
gauugaagucccaaucuggauu

SEQ ID NO: 83321 - RNA, 23 nt, Artificial Sequence
  Synthetic
ggauugaagucccaaucuggauu

SEQ ID NO: 83322 - RNA, 24 nt, Artificial Sequence
  Synthetic
gggauugaagucccaaucuggauu

SEQ ID NO: 83323 - RNA, 22 nt, Artificial Sequence
  Synthetic
gacaggagguuggugagugauu

SEQ ID NO: 83324 - RNA, 23 nt, Artificial Sequence
  Synthetic
ggacaggagguuggugagugauu

SEQ ID NO: 83325 - RNA, 24 nt, Artificial Sequence
  Synthetic
  misc_feature (11)..(11): n is a, c, g, or u
  misc_feature (20)..(20): n is a, c, g, or u
gacccacaauncguugacanacuu

SEQ ID NO: 83326 - RNA, 21 nt, Artificial Sequence
  Synthetic
ggacaccuggccagacgccaa

SEQ ID NO: 83327 - RNA, 21 nt, Artificial Sequence
  Synthetic
gcugcuaggcugugcugccaa

SEQ ID NO: 83328 - RNA, 22 nt, Artificial Sequence
  Synthetic
ggcugcuaggcugugcugccaa

SEQ ID NO: 83329 - RNA, 23 nt, Artificial Sequence
  Synthetic
gcacuccuccagcuuauagacca

SEQ ID NO: 83330 - RNA, 19 nt, Artificial Sequence
  Synthetic
gccgcuuguuuugcucgca

SEQ ID NO: 83331 - RNA, 20 nt, Artificial Sequence
  Synthetic
gucucaaucgccgcgucgca

SEQ ID NO: 83332 - RNA, 21 nt, Artificial Sequence
  Synthetic
ggcuuucaguuauauggauga

SEQ ID NO: 83333 - RNA, 24 nt, Artificial Sequence
  Synthetic
  misc_feature (21)..(21): n is a, c, g, or u
gaccuaguagucaguuaugunaac

SEQ ID NO: 83334 - RNA, 21 nt, Artificial Sequence
  Synthetic
gaacucccucgccucgcagac

SEQ ID NO: 83335 - RNA, 24 nt, Artificial Sequence
  Synthetic
gaagaacucccucgccucgcagac

SEQ ID NO: 83336 - RNA, 20 nt, Artificial Sequence
  Synthetic
gcuguaccaaaccuucggac

SEQ ID NO: 83337 - RNA, 23 nt, Artificial Sequence
  Synthetic
guugcuguaccaaaccuucggac

SEQ ID NO: 83338 - RNA, 18 nt, Artificial Sequence
  Synthetic
gggguuuuucuuguugac

SEQ ID NO: 83339 - RNA, 20 nt, Artificial Sequence
  Synthetic
gcgggguuuuucuuguugac

SEQ ID NO: 83340 - RNA, 21 nt, Artificial Sequence
  Synthetic
ggcgggguuuuucuuguugac

SEQ ID NO: 83341 - RNA, 23 nt, Artificial Sequence
  Synthetic
gccaaaauucgcaguccccaacc

SEQ ID NO: 83342 - RNA, 24 nt, Artificial Sequence
  Synthetic
ggccaaaauucgcaguccccaacc

SEQ ID NO: 83343 - RNA, 24 nt, Artificial Sequence
  Synthetic
gauccagccuucagagcaaacacc

SEQ ID NO: 83344 - RNA, 22 nt, Artificial Sequence
  Synthetic
guucaagccuccaagcugugcc

SEQ ID NO: 83345 - RNA, 23 nt, Artificial Sequence
  Synthetic
gccuguauuucccugcugguggc

SEQ ID NO: 83346 - RNA, 24 nt, Artificial Sequence
  Synthetic
ggccuguauuucccugcugguggc

SEQ ID NO: 83347 - RNA, 21 nt, Artificial Sequence
  Synthetic
gggccaagucuguacagcauc

SEQ ID NO: 83348 - RNA, 22 nt, Artificial Sequence
  Synthetic
ggggccaagucuguacagcauc

SEQ ID NO: 83349 - RNA, 23 nt, Artificial Sequence
  Synthetic
gggggccaagucuguacagcauc

SEQ ID NO: 83350 - RNA, 21 nt, Artificial Sequence
  Synthetic
ggauucuuucccgaccaccag

SEQ ID NO: 83351 - RNA, 22 nt, Artificial Sequence
  Synthetic
gggauucuuucccgaccaccag

SEQ ID NO: 83352 - RNA, 23 nt, Artificial Sequence
  Synthetic
gacuacuguuguuagacgacgag

SEQ ID NO: 83353 - RNA, 22 nt, Artificial Sequence
  Synthetic
gacaagaauccucacaauaccg

SEQ ID NO: 83354 - RNA, 18 nt, Artificial Sequence
  Synthetic
guuuacgucccgucggcg

SEQ ID NO: 83355 - RNA, 21 nt, Artificial Sequence
  Synthetic
  misc_feature (8)..(8): n is a, c, g, or u
gaccccuncucguguuacagg

SEQ ID NO: 83356 - RNA, 22 nt, Artificial Sequence
  Synthetic
  misc_feature (9)..(9): n is a, c, g, or u
ggaccccuncucguguuacagg

SEQ ID NO: 83357 - RNA, 22 nt, Artificial Sequence
  Synthetic
gaacaagagcuacagcaugggg

SEQ ID NO: 83358 - RNA, 23 nt, Artificial Sequence
  Synthetic
ggaacaagagcuacagcaugggg

SEQ ID NO: 83359 - RNA, 24 nt, Artificial Sequence
  Synthetic
gggaacaagagcuacagcaugggg

SEQ ID NO: 83360 - RNA, 23 nt, Artificial Sequence
  Synthetic
gcccggcaacggccaggucugug

SEQ ID NO: 83361 - RNA, 24 nt, Artificial Sequence
  Synthetic
gaucucaaucucgggaaucucaau

SEQ ID NO: 83362 - RNA, 21 nt, Artificial Sequence
  Synthetic
gaagaucucaaucucgggaau

SEQ ID NO: 83363 - RNA, 24 nt, Artificial Sequence
  Synthetic
gcagaagaucucaaucucgggaau

SEQ ID NO: 83364 - RNA, 23 nt, Artificial Sequence
  Synthetic
gcugaacauggagaacaucacau

SEQ ID NO: 83365 - RNA, 19 nt, Artificial Sequence
  Synthetic
gcuuucggaaaauuccuau

SEQ ID NO: 83366 - RNA, 20 nt, Artificial Sequence
  Synthetic
ggcuuucggaaaauuccuau

SEQ ID NO: 83367 - RNA, 21 nt, Artificial Sequence
  Synthetic
gggcuuucggaaaauuccuau

SEQ ID NO: 83368 - RNA, 21 nt, Artificial Sequence
  Synthetic
gcuuucccccacuguuuggcu

SEQ ID NO: 83369 - RNA, 22 nt, Artificial Sequence
  Synthetic
ggcuuucccccacuguuuggcu

SEQ ID NO: 83370 - RNA, 23 nt, Artificial Sequence
  Synthetic
gggcuuucccccacuguuuggcu

SEQ ID NO: 83371 - RNA, 18 nt, Artificial Sequence
  Synthetic
gacucgugguggacuucu

SEQ ID NO: 83372 - RNA, 23 nt, Artificial Sequence
  Synthetic
gucuagacucgugguggacuucu

SEQ ID NO: 83373 - RNA, 21 nt, Artificial Sequence
  Synthetic
guauuuggugucuuucggagu

SEQ ID NO: 83374 - RNA, 23 nt, Artificial Sequence
  Synthetic
gaguauuuggugucuuucggagu

SEQ ID NO: 83375 - RNA, 21 nt, Artificial Sequence
  Synthetic
  misc_feature (20)..(20): n is a, c, g, or u
gccuaaaguucaggcaacunu

SEQ ID NO: 83376 - RNA, 22 nt, Artificial Sequence
  Synthetic
  misc_feature (21)..(21): n is a, c, g, or u
ggccuaaaguucaggcaacunu

SEQ ID NO: 83377 - RNA, 23 nt, Artificial Sequence
  Synthetic
  misc_feature (22)..(22): n is a, c, g, or u
gggccuaaaguucaggcaacunu

SEQ ID NO: 83378 - RNA, 21 nt, Artificial Sequence
  Synthetic
gcugcuaugccucaucuucuu

SEQ ID NO: 83379 - RNA, 21 nt, Artificial Sequence
  Synthetic
gagucccuuuuuaccgcuguu

SEQ ID NO: 83380 - RNA, 21 nt, Artificial Sequence
  Synthetic
auaguccagaagaaccaacaa

SEQ ID NO: 83381 - RNA, 23 nt, Artificial Sequence
  Synthetic
ugauaguccagaagaaccaacaa

SEQ ID NO: 83382 - RNA, 24 nt, Artificial Sequence
  Synthetic
uugauaguccagaagaaccaacaa

SEQ ID NO: 83383 - RNA, 18 nt, Artificial Sequence
  Synthetic
cuggccguugccgggcaa

SEQ ID NO: 83384 - RNA, 19 nt, Artificial Sequence
  Synthetic
ccuggccguugccgggcaa

SEQ ID NO: 83385 - RNA, 20 nt, Artificial Sequence
  Synthetic
accuggccguugccgggcaa

SEQ ID NO: 83386 - RNA, 22 nt, Artificial Sequence
  Synthetic
agaccuggccguugccgggcaa

SEQ ID NO: 83387 - RNA, 23 nt, Artificial Sequence
  Synthetic
cagaccuggccguugccgggcaa

SEQ ID NO: 83388 - RNA, 24 nt, Artificial Sequence
  Synthetic
acagaccuggccguugccgggcaa

SEQ ID NO: 83389 - RNA, 21 nt, Artificial Sequence
  Synthetic
uugaacaguaggacaugaaca

SEQ ID NO: 83390 - RNA, 22 nt, Artificial Sequence
  Synthetic
cuugaacaguaggacaugaaca

SEQ ID NO: 83391 - RNA, 21 nt, Artificial Sequence
  Synthetic
caaucaauaggccuguuaaca

SEQ ID NO: 83392 - RNA, 22 nt, Artificial Sequence
  Synthetic
ccaaucaauaggccuguuaaca

SEQ ID NO: 83393 - RNA, 23 nt, Artificial Sequence
  Synthetic
uccaaucaauaggccuguuaaca

SEQ ID NO: 83394 - RNA, 24 nt, Artificial Sequence
  Synthetic
uuccaaucaauaggccuguuaaca

SEQ ID NO: 83395 - RNA, 22 nt, Artificial Sequence
  Synthetic
cgaauccacacuccgaaagaca

SEQ ID NO: 83396 - RNA, 24 nt, Artificial Sequence
  Synthetic
ugcgaauccacacuccgaaagaca

SEQ ID NO: 83397 - RNA, 21 nt, Artificial Sequence
  Synthetic
cugcgaauuuuggccaagaca

SEQ ID NO: 83398 - RNA, 22 nt, Artificial Sequence
  Synthetic
acugcgaauuuuggccaagaca

SEQ ID NO: 83399 - RNA, 21 nt, Artificial Sequence
  Synthetic
accaggacaaguuggaggaca

SEQ ID NO: 83400 - RNA, 22 nt, Artificial Sequence
  Synthetic
aaccaggacaaguuggaggaca

SEQ ID NO: 83401 - RNA, 23 nt, Artificial Sequence
  Synthetic
uaaccaggacaaguuggaggaca

SEQ ID NO: 83402 - RNA, 24 nt, Artificial Sequence
  Synthetic
auaaccaggacaaguuggaggaca

SEQ ID NO: 83403 - RNA, 18 nt, Artificial Sequence
  Synthetic
caagaauauggugaccca

SEQ ID NO: 83404 - RNA, 19 nt, Artificial Sequence
  Synthetic
ccaagaauauggugaccca

SEQ ID NO: 83405 - RNA, 20 nt, Artificial Sequence
  Synthetic
cccaagaauauggugaccca

SEQ ID NO: 83406 - RNA, 21 nt, Artificial Sequence
  Synthetic
ucccaagaauauggugaccca

SEQ ID NO: 83407 - RNA, 22 nt, Artificial Sequence
  Synthetic
uucccaagaauauggugaccca

SEQ ID NO: 83408 - RNA, 24 nt, Artificial Sequence
  Synthetic
uguucccaagaauauggugaccca

SEQ ID NO: 83409 - RNA, 21 nt, Artificial Sequence
  Synthetic
cauccauauaacugaaagcca

SEQ ID NO: 83410 - RNA, 22 nt, Artificial Sequence
  Synthetic
ucauccauauaacugaaagcca

SEQ ID NO: 83411 - RNA, 23 nt, Artificial Sequence
  Synthetic
aucauccauauaacugaaagcca

SEQ ID NO: 83412 - RNA, 24 nt, Artificial Sequence
  Synthetic
caucauccauauaacugaaagcca

SEQ ID NO: 83413 - RNA, 21 nt, Artificial Sequence
  Synthetic
uugcucugaaggcuggaucca

SEQ ID NO: 83414 - RNA, 22 nt, Artificial Sequence
  Synthetic
uuugcucugaaggcuggaucca

SEQ ID NO: 83415 - RNA, 24 nt, Artificial Sequence
  Synthetic
uguuugcucugaaggcuggaucca

SEQ ID NO: 83416 - RNA, 22 nt, Artificial Sequence
  Synthetic
  misc_feature (5)..(5): n is a, c, g, or u
aguuncccaccuuaugagucca

SEQ ID NO: 83417 - RNA, 23 nt, Artificial Sequence
  Synthetic
  misc_feature (6)..(6): n is a, c, g, or u
aaguuncccaccuuaugagucca

SEQ ID NO: 83418 - RNA, 24 nt, Artificial Sequence
  Synthetic
  misc_feature (7)..(7): n is a, c, g, or u
aaaguuncccaccuuaugagucca

SEQ ID NO: 83419 - RNA, 18 nt, Artificial Sequence
  Synthetic
uaauauacccgccuucca

SEQ ID NO: 83420 - RNA, 19 nt, Artificial Sequence
  Synthetic
auaauauacccgccuucca

SEQ ID NO: 83421 - RNA, 20 nt, Artificial Sequence
  Synthetic
uauaauauacccgccuucca

SEQ ID NO: 83422 - RNA, 21 nt, Artificial Sequence
  Synthetic
auauaauauacccgccuucca

SEQ ID NO: 83423 - RNA, 22 nt, Artificial Sequence
  Synthetic
uauauaauauacccgccuucca

SEQ ID NO: 83424 - RNA, 23 nt, Artificial Sequence
  Synthetic
uuauauaauauacccgccuucca

SEQ ID NO: 83425 - RNA, 24 nt, Artificial Sequence
  Synthetic
cuuauauaauauacccgccuucca

SEQ ID NO: 83426 - RNA, 22 nt, Artificial Sequence
  Synthetic
ugcagaggugaagcgaagugca

SEQ ID NO: 83427 - RNA, 24 nt, Artificial Sequence
  Synthetic
cgugcagaggugaagcgaagugca

SEQ ID NO: 83428 - RNA, 21 nt, Artificial Sequence
  Synthetic
  misc_feature (19)..(19): n is a, c, g, or u
aggucggucguugacauunca

SEQ ID NO: 83429 - RNA, 22 nt, Artificial Sequence
  Synthetic
  misc_feature (20)..(20): n is a, c, g, or u
aaggucggucguugacauunca

SEQ ID NO: 83430 - RNA, 23 nt, Artificial Sequence
  Synthetic
  misc_feature (21)..(21): n is a, c, g, or u
caaggucggucguugacauunca

SEQ ID NO: 83431 - RNA, 24 nt, Artificial Sequence
  Synthetic
  misc_feature (22)..(22): n is a, c, g, or u
ucaaggucggucguugacauunca

SEQ ID NO: 83432 - RNA, 21 nt, Artificial Sequence
  Synthetic
aacaguaggacaugaacaaga

SEQ ID NO: 83433 - RNA, 23 nt, Artificial Sequence
  Synthetic
ugaacaguaggacaugaacaaga

SEQ ID NO: 83434 - RNA, 24 nt, Artificial Sequence
  Synthetic
uugaacaguaggacaugaacaaga

SEQ ID NO: 83435 - RNA, 21 nt, Artificial Sequence
  Synthetic
uauguaagaccuugggcaaga

SEQ ID NO: 83436 - RNA, 22 nt, Artificial Sequence
  Synthetic
uuauguaagaccuugggcaaga

SEQ ID NO: 83437 - RNA, 23 nt, Artificial Sequence
  Synthetic
cuuauguaagaccuugggcaaga

SEQ ID NO: 83438 - RNA, 24 nt, Artificial Sequence
  Synthetic
ucuuauguaagaccuugggcaaga

SEQ ID NO: 83439 - RNA, 22 nt, Artificial Sequence
  Synthetic
cggcagacggagaaggggacga

SEQ ID NO: 83440 - RNA, 23 nt, Artificial Sequence
  Synthetic
acggcagacggagaaggggacga

SEQ ID NO: 83441 - RNA, 24 nt, Artificial Sequence
  Synthetic
aacggcagacggagaaggggacga

SEQ ID NO: 83442 - RNA, 21 nt, Artificial Sequence
  Synthetic
agaccuucgucugcgaggcga

SEQ ID NO: 83443 - RNA, 23 nt, Artificial Sequence
  Synthetic
ugagaccuucgucugcgaggcga

SEQ ID NO: 83444 - RNA, 24 nt, Artificial Sequence
  Synthetic
uugagaccuucgucugcgaggcga

SEQ ID NO: 83445 - RNA, 19 nt, Artificial Sequence
  Synthetic
aggccuuguaaguuggcga

SEQ ID NO: 83446 - RNA, 20 nt, Artificial Sequence
  Synthetic
aaggccuuguaaguuggcga

SEQ ID NO: 83447 - RNA, 21 nt, Artificial Sequence
  Synthetic
aaaggccuuguaaguuggcga

SEQ ID NO: 83448 - RNA, 23 nt, Artificial Sequence
  Synthetic
agaaaggccuuguaaguuggcga

SEQ ID NO: 83449 - RNA, 24 nt, Artificial Sequence
  Synthetic
cagaaaggccuuguaaguuggcga

SEQ ID NO: 83450 - RNA, 21 nt, Artificial Sequence
  Synthetic
cgcaggguccccaauccucga

SEQ ID NO: 83451 - RNA, 23 nt, Artificial Sequence
  Synthetic
agcgcaggguccccaauccucga

SEQ ID NO: 83452 - RNA, 24 nt, Artificial Sequence
  Synthetic
cagcgcaggguccccaauccucga

SEQ ID NO: 83453 - RNA, 18 nt, Artificial Sequence
  Synthetic
aggacgucccgcgcagga

SEQ ID NO: 83454 - RNA, 19 nt, Artificial Sequence
  Synthetic
aaggacgucccgcgcagga

SEQ ID NO: 83455 - RNA, 20 nt, Artificial Sequence
  Synthetic
aaaggacgucccgcgcagga

SEQ ID NO: 83456 - RNA, 22 nt, Artificial Sequence
  Synthetic
uggauccaacugguggucggga

SEQ ID NO: 83457 - RNA, 23 nt, Artificial Sequence
  Synthetic
cuggauccaacugguggucggga

SEQ ID NO: 83458 - RNA, 22 nt, Artificial Sequence
  Synthetic
agcacagccuagcagccaugga

SEQ ID NO: 83459 - RNA, 23 nt, Artificial Sequence
  Synthetic
cagcacagccuagcagccaugga

SEQ ID NO: 83460 - RNA, 18 nt, Artificial Sequence
  Synthetic
agucuccggaaguguuga

SEQ ID NO: 83461 - RNA, 19 nt, Artificial Sequence
  Synthetic
uagucuccggaaguguuga

SEQ ID NO: 83462 - RNA, 21 nt, Artificial Sequence
  Synthetic
aguagucuccggaaguguuga

SEQ ID NO: 83463 - RNA, 22 nt, Artificial Sequence
  Synthetic
caguagucuccggaaguguuga

SEQ ID NO: 83464 - RNA, 23 nt, Artificial Sequence
  Synthetic
acaguagucuccggaaguguuga

SEQ ID NO: 83465 - RNA, 24 nt, Artificial Sequence
  Synthetic
aacaguagucuccggaaguguuga

SEQ ID NO: 83466 - RNA, 19 nt, Artificial Sequence
  Synthetic
ugccucgucgucuaacaac

SEQ ID NO: 83467 - RNA, 20 nt, Artificial Sequence
  Synthetic
cugccucgucgucuaacaac

SEQ ID NO: 83468 - RNA, 21 nt, Artificial Sequence
  Synthetic
ccugccucgucgucuaacaac

SEQ ID NO: 83469 - RNA, 22 nt, Artificial Sequence
  Synthetic
accugccucgucgucuaacaac

SEQ ID NO: 83470 - RNA, 18 nt, Artificial Sequence
  Synthetic
ccugccucgucgucuaac

SEQ ID NO: 83471 - RNA, 19 nt, Artificial Sequence
  Synthetic
accugccucgucgucuaac

SEQ ID NO: 83472 - RNA, 22 nt, Artificial Sequence
  Synthetic
agaaaauugagagaaguccacc

SEQ ID NO: 83473 - RNA, 23 nt, Artificial Sequence
  Synthetic
uagaaaauugagagaaguccacc

SEQ ID NO: 83474 - RNA, 24 nt, Artificial Sequence
  Synthetic
cuagaaaauugagagaaguccacc

SEQ ID NO: 83475 - RNA, 21 nt, Artificial Sequence
  Synthetic
cgcguaaagagaggugcgccc

SEQ ID NO: 83476 - RNA, 22 nt, Artificial Sequence
  Synthetic
ccgcguaaagagaggugcgccc

SEQ ID NO: 83477 - RNA, 23 nt, Artificial Sequence
  Synthetic
uccgcguaaagagaggugcgccc

SEQ ID NO: 83478 - RNA, 21 nt, Artificial Sequence
  Synthetic
cauaggaauuuuccgaaagcc

SEQ ID NO: 83479 - RNA, 22 nt, Artificial Sequence
  Synthetic
ccauaggaauuuuccgaaagcc

SEQ ID NO: 83480 - RNA, 23 nt, Artificial Sequence
  Synthetic
cccauaggaauuuuccgaaagcc

SEQ ID NO: 83481 - RNA, 24 nt, Artificial Sequence
  Synthetic
ucccauaggaauuuuccgaaagcc

SEQ ID NO: 83482 - RNA, 21 nt, Artificial Sequence
  Synthetic
agaugcuguacagacuuggcc

SEQ ID NO: 83483 - RNA, 22 nt, Artificial Sequence
  Synthetic
aagaugcuguacagacuuggcc

SEQ ID NO: 83484 - RNA, 23 nt, Artificial Sequence
  Synthetic
caagaugcuguacagacuuggcc

SEQ ID NO: 83485 - RNA, 24 nt, Artificial Sequence
  Synthetic
ucaagaugcuguacagacuuggcc

SEQ ID NO: 83486 - RNA, 18 nt, Artificial Sequence
  Synthetic
aacgccgcagacacaucc

SEQ ID NO: 83487 - RNA, 19 nt, Artificial Sequence
  Synthetic
aaacgccgcagacacaucc

SEQ ID NO: 83488 - RNA, 20 nt, Artificial Sequence
  Synthetic
aaaacgccgcagacacaucc

SEQ ID NO: 83489 - RNA, 21 nt, Artificial Sequence
  Synthetic
uaaaacgccgcagacacaucc

SEQ ID NO: 83490 - RNA, 22 nt, Artificial Sequence
  Synthetic
auaaaacgccgcagacacaucc

SEQ ID NO: 83491 - RNA, 24 nt, Artificial Sequence
  Synthetic
ugauaaaacgccgcagacacaucc

SEQ ID NO: 83492 - RNA, 21 nt, Artificial Sequence
  Synthetic
cgucuaacaacaguagucucc

SEQ ID NO: 83493 - RNA, 22 nt, Artificial Sequence
  Synthetic
ucgucuaacaacaguagucucc

SEQ ID NO: 83494 - RNA, 24 nt, Artificial Sequence
  Synthetic
cgucgucuaacaacaguagucucc

SEQ ID NO: 83495 - RNA, 21 nt, Artificial Sequence
  Synthetic
  misc_feature (11)..(11): n is a, c, g, or u
cguugacauuncagagagucc

SEQ ID NO: 83496 - RNA, 22 nt, Artificial Sequence
  Synthetic
  misc_feature (12)..(12): n is a, c, g, or u
ucguugacauuncagagagucc

SEQ ID NO: 83497 - RNA, 18 nt, Artificial Sequence
  Synthetic
ugagaucuucugcgacgc

SEQ ID NO: 83498 - RNA, 19 nt, Artificial Sequence
  Synthetic
uugagaucuucugcgacgc

SEQ ID NO: 83499 - RNA, 20 nt, Artificial Sequence
  Synthetic
auugagaucuucugcgacgc

SEQ ID NO: 83500 - RNA, 21 nt, Artificial Sequence
  Synthetic
augaacaagagaugauuaggc

SEQ ID NO: 83501 - RNA, 22 nt, Artificial Sequence
  Synthetic
caugaacaagagaugauuaggc

SEQ ID NO: 83502 - RNA, 23 nt, Artificial Sequence
  Synthetic
acaugaacaagagaugauuaggc

SEQ ID NO: 83503 - RNA, 18 nt, Artificial Sequence
  Synthetic
aaccacugaacaaauggc

SEQ ID NO: 83504 - RNA, 20 nt, Artificial Sequence
  Synthetic
cgaaccacugaacaaauggc

SEQ ID NO: 83505 - RNA, 21 nt, Artificial Sequence
  Synthetic
acgaaccacugaacaaauggc

SEQ ID NO: 83506 - RNA, 22 nt, Artificial Sequence
  Synthetic
uacgaaccacugaacaaauggc

SEQ ID NO: 83507 - RNA, 23 nt, Artificial Sequence
  Synthetic
cuacgaaccacugaacaaauggc

SEQ ID NO: 83508 - RNA, 24 nt, Artificial Sequence
  Synthetic
ccuacgaaccacugaacaaauggc

SEQ ID NO: 83509 - RNA, 19 nt, Artificial Sequence
  Synthetic
uggucuccaugcgacgugc

SEQ ID NO: 83510 - RNA, 21 nt, Artificial Sequence
  Synthetic
  misc_feature (20)..(20): n is a, c, g, or u
auacauagagguuccuuganc

SEQ ID NO: 83511 - RNA, 23 nt, Artificial Sequence
  Synthetic
  misc_feature (22)..(22): n is a, c, g, or u
agggaaauacaggccucucacnc

SEQ ID NO: 83512 - RNA, 24 nt, Artificial Sequence
  Synthetic
  misc_feature (23)..(23): n is a, c, g, or u
cagggaaauacaggccucucacnc

SEQ ID NO: 83513 - RNA, 18 nt, Artificial Sequence
  Synthetic
caccacgagucuagacuc

SEQ ID NO: 83514 - RNA, 19 nt, Artificial Sequence
  Synthetic
ccaccacgagucuagacuc

SEQ ID NO: 83515 - RNA, 20 nt, Artificial Sequence
  Synthetic
uccaccacgagucuagacuc

SEQ ID NO: 83516 - RNA, 23 nt, Artificial Sequence
  Synthetic
uggccugaggaugaguguuucuc

SEQ ID NO: 83517 - RNA, 24 nt, Artificial Sequence
  Synthetic
auggccugaggaugaguguuucuc

SEQ ID NO: 83518 - RNA, 21 nt, Artificial Sequence
  Synthetic
aaaacaagcggcuaggaguuc

SEQ ID NO: 83519 - RNA, 22 nt, Artificial Sequence
  Synthetic
caaaacaagcggcuaggaguuc

SEQ ID NO: 83520 - RNA, 24 nt, Artificial Sequence
  Synthetic
agcaaaacaagcggcuaggaguuc

SEQ ID NO: 83521 - RNA, 18 nt, Artificial Sequence
  Synthetic
cggggaguccgcguaaag

SEQ ID NO: 83522 - RNA, 19 nt, Artificial Sequence
  Synthetic
acggggaguccgcguaaag

SEQ ID NO: 83523 - RNA, 18 nt, Artificial Sequence
  Synthetic
cgacgugcagaggugaag

SEQ ID NO: 83524 - RNA, 20 nt, Artificial Sequence
  Synthetic
ugcgacgugcagaggugaag

SEQ ID NO: 83525 - RNA, 21 nt, Artificial Sequence
  Synthetic
augcgacgugcagaggugaag

SEQ ID NO: 83526 - RNA, 22 nt, Artificial Sequence
  Synthetic
caugcgacgugcagaggugaag

SEQ ID NO: 83527 - RNA, 23 nt, Artificial Sequence
  Synthetic
ccaugcgacgugcagaggugaag

SEQ ID NO: 83528 - RNA, 24 nt, Artificial Sequence
  Synthetic
uccaugcgacgugcagaggugaag

SEQ ID NO: 83529 - RNA, 21 nt, Artificial Sequence
  Synthetic
caagaagaugaggcauagcag

SEQ ID NO: 83530 - RNA, 22 nt, Artificial Sequence
  Synthetic
acaagaagaugaggcauagcag

SEQ ID NO: 83531 - RNA, 23 nt, Artificial Sequence
  Synthetic
aacaagaagaugaggcauagcag

SEQ ID NO: 83532 - RNA, 24 nt, Artificial Sequence
  Synthetic
caacaagaagaugaggcauagcag

SEQ ID NO: 83533 - RNA, 23 nt, Artificial Sequence
  Synthetic
cggcagaugagaaggcacagacg

SEQ ID NO: 83534 - RNA, 24 nt, Artificial Sequence
  Synthetic
ccggcagaugagaaggcacagacg

SEQ ID NO: 83535 - RNA, 18 nt, Artificial Sequence
  Synthetic
caccccaaaaggccuccg

SEQ ID NO: 83536 - RNA, 19 nt, Artificial Sequence
  Synthetic
ccaccccaaaaggccuccg

SEQ ID NO: 83537 - RNA, 20 nt, Artificial Sequence
  Synthetic
uccaccccaaaaggccuccg

SEQ ID NO: 83538 - RNA, 22 nt, Artificial Sequence
  Synthetic
  misc_feature (3)..(3): n is a, c, g, or u
cgnccccgagaagggucguccg

SEQ ID NO: 83539 - RNA, 24 nt, Artificial Sequence
  Synthetic
  misc_feature (5)..(5): n is a, c, g, or u
agcgnccccgagaagggucguccg

SEQ ID NO: 83540 - RNA, 18 nt, Artificial Sequence
  Synthetic
cgaagugcacacgguccg

SEQ ID NO: 83541 - RNA, 20 nt, Artificial Sequence
  Synthetic
agcgaagugcacacgguccg

SEQ ID NO: 83542 - RNA, 21 nt, Artificial Sequence
  Synthetic
aagcgaagugcacacgguccg

SEQ ID NO: 83543 - RNA, 23 nt, Artificial Sequence
  Synthetic
ugaagcgaagugcacacgguccg

SEQ ID NO: 83544 - RNA, 21 nt, Artificial Sequence
  Synthetic
ugauguucuccauguucagcg

SEQ ID NO: 83545 - RNA, 23 nt, Artificial Sequence
  Synthetic
ugugauguucuccauguucagcg

SEQ ID NO: 83546 - RNA, 24 nt, Artificial Sequence
  Synthetic
augugauguucuccauguucagcg

SEQ ID NO: 83547 - RNA, 18 nt, Artificial Sequence
  Synthetic
aacaaaggacgucccgcg

SEQ ID NO: 83548 - RNA, 19 nt, Artificial Sequence
  Synthetic
aaacaaaggacgucccgcg

SEQ ID NO: 83549 - RNA, 20 nt, Artificial Sequence
  Synthetic
uaaacaaaggacgucccgcg

SEQ ID NO: 83550 - RNA, 21 nt, Artificial Sequence
  Synthetic
aggcugccuuccugacuggcg

SEQ ID NO: 83551 - RNA, 22 nt, Artificial Sequence
  Synthetic
uaggcugccuuccugacuggcg

SEQ ID NO: 83552 - RNA, 19 nt, Artificial Sequence
  Synthetic
ugcaauuuccguccgaagg

SEQ ID NO: 83553 - RNA, 22 nt, Artificial Sequence
  Synthetic
aggugcaauuuccguccgaagg

SEQ ID NO: 83554 - RNA, 23 nt, Artificial Sequence
  Synthetic
caggugcaauuuccguccgaagg

SEQ ID NO: 83555 - RNA, 24 nt, Artificial Sequence
  Synthetic
acaggugcaauuuccguccgaagg

SEQ ID NO: 83556 - RNA, 21 nt, Artificial Sequence
  Synthetic
uugcgguguuugcucugaagg

SEQ ID NO: 83557 - RNA, 22 nt, Artificial Sequence
  Synthetic
uuugcgguguuugcucugaagg

SEQ ID NO: 83558 - RNA, 23 nt, Artificial Sequence
  Synthetic
auuugcgguguuugcucugaagg

SEQ ID NO: 83559 - RNA, 21 nt, Artificial Sequence
  Synthetic
uagauguucuggauaauaagg

SEQ ID NO: 83560 - RNA, 22 nt, Artificial Sequence
  Synthetic
cuagauguucuggauaauaagg

SEQ ID NO: 83561 - RNA, 23 nt, Artificial Sequence
  Synthetic
acuagauguucuggauaauaagg

SEQ ID NO: 83562 - RNA, 24 nt, Artificial Sequence
  Synthetic
aacuagauguucuggauaauaagg

SEQ ID NO: 83563 - RNA, 18 nt, Artificial Sequence
  Synthetic
cauccagcgauaaccagg

SEQ ID NO: 83564 - RNA, 19 nt, Artificial Sequence
  Synthetic
acauccagcgauaaccagg

SEQ ID NO: 83565 - RNA, 20 nt, Artificial Sequence
  Synthetic
cacauccagcgauaaccagg

SEQ ID NO: 83566 - RNA, 21 nt, Artificial Sequence
  Synthetic
acacauccagcgauaaccagg

SEQ ID NO: 83567 - RNA, 23 nt, Artificial Sequence
  Synthetic
agacacauccagcgauaaccagg

SEQ ID NO: 83568 - RNA, 24 nt, Artificial Sequence
  Synthetic
cagacacauccagcgauaaccagg

SEQ ID NO: 83569 - RNA, 18 nt, Artificial Sequence
  Synthetic
caaaaggccuccgugcgg

SEQ ID NO: 83570 - RNA, 19 nt, Artificial Sequence
  Synthetic
ccaaaaggccuccgugcgg

SEQ ID NO: 83571 - RNA, 20 nt, Artificial Sequence
  Synthetic
cccaaaaggccuccgugcgg

SEQ ID NO: 83572 - RNA, 21 nt, Artificial Sequence
  Synthetic
ccccaaaaggccuccgugcgg

SEQ ID NO: 83573 - RNA, 22 nt, Artificial Sequence
  Synthetic
accccaaaaggccuccgugcgg

SEQ ID NO: 83574 - RNA, 23 nt, Artificial Sequence
  Synthetic
caccccaaaaggccuccgugcgg

SEQ ID NO: 83575 - RNA, 24 nt, Artificial Sequence
  Synthetic
ccaccccaaaaggccuccgugcgg

SEQ ID NO: 83576 - RNA, 21 nt, Artificial Sequence
  Synthetic
  misc_feature (4)..(4): n is a, c, g, or u
auungguggucuauaagcugg

SEQ ID NO: 83577 - RNA, 22 nt, Artificial Sequence
  Synthetic
  misc_feature (5)..(5): n is a, c, g, or u
cauungguggucuauaagcugg

SEQ ID NO: 83578 - RNA, 21 nt, Artificial Sequence
  Synthetic
uccuaccuuguuggcgucugg

SEQ ID NO: 83579 - RNA, 22 nt, Artificial Sequence
  Synthetic
cuccuaccuuguuggcgucugg

SEQ ID NO: 83580 - RNA, 24 nt, Artificial Sequence
  Synthetic
agcuccuaccuuguuggcgucugg

SEQ ID NO: 83581 - RNA, 21 nt, Artificial Sequence
  Synthetic
aaugauuaacuagauguucug

SEQ ID NO: 83582 - RNA, 22 nt, Artificial Sequence
  Synthetic
uaaugauuaacuagauguucug

SEQ ID NO: 83583 - RNA, 24 nt, Artificial Sequence
  Synthetic
aguaaugauuaacuagauguucug

SEQ ID NO: 83584 - RNA, 21 nt, Artificial Sequence
  Synthetic
aaguuggaggacaggagguug

SEQ ID NO: 83585 - RNA, 22 nt, Artificial Sequence
  Synthetic
caaguuggaggacaggagguug

SEQ ID NO: 83586 - RNA, 23 nt, Artificial Sequence
  Synthetic
acaaguuggaggacaggagguug

SEQ ID NO: 83587 - RNA, 21 nt, Artificial Sequence
  Synthetic
  misc_feature (21)..(21): n is a, c, g, or u
aaccccgccuguaacacgagn

SEQ ID NO: 83588 - RNA, 22 nt, Artificial Sequence
  Synthetic
  misc_feature (22)..(22): n is a, c, g, or u
aaaccccgccuguaacacgagn

SEQ ID NO: 83589 - RNA, 23 nt, Artificial Sequence
  Synthetic
  misc_feature (23)..(23): n is a, c, g, or u
aaaaccccgccuguaacacgagn

SEQ ID NO: 83590 - RNA, 24 nt, Artificial Sequence
  Synthetic
  misc_feature (24)..(24): n is a, c, g, or u
aaaaaccccgccuguaacacgagn

SEQ ID NO: 83591 - RNA, 22 nt, Artificial Sequence
  Synthetic
  misc_feature (22)..(22): n is a, c, g, or u
uguugauaagauaggggcauun

SEQ ID NO: 83592 - RNA, 24 nt, Artificial Sequence
  Synthetic
  misc_feature (24)..(24): n is a, c, g, or u
aguguugauaagauaggggcauun

SEQ ID NO: 83593 - RNA, 21 nt, Artificial Sequence
  Synthetic
uguugggauugaagucccaau

SEQ ID NO: 83594 - RNA, 22 nt, Artificial Sequence
  Synthetic
uuguugggauugaagucccaau

SEQ ID NO: 83595 - RNA, 23 nt, Artificial Sequence
  Synthetic
cuuguugggauugaagucccaau

SEQ ID NO: 83596 - RNA, 24 nt, Artificial Sequence
  Synthetic
ccuuguugggauugaagucccaau

SEQ ID NO: 83597 - RNA, 21 nt, Artificial Sequence
  Synthetic
  misc_feature (6)..(6): n is a, c, g, or u
acgagnagggguccuaggaau

SEQ ID NO: 83598 - RNA, 22 nt, Artificial Sequence
  Synthetic
  misc_feature (7)..(7): n is a, c, g, or u
cacgagnagggguccuaggaau

SEQ ID NO: 83599 - RNA, 23 nt, Artificial Sequence
  Synthetic
  misc_feature (8)..(8): n is a, c, g, or u
acacgagnagggguccuaggaau

SEQ ID NO: 83600 - RNA, 24 nt, Artificial Sequence
  Synthetic
  misc_feature (9)..(9): n is a, c, g, or u
aacacgagnagggguccuaggaau

SEQ ID NO: 83601 - RNA, 21 nt, Artificial Sequence
  Synthetic
cgggcugaggcccacucccau

SEQ ID NO: 83602 - RNA, 22 nt, Artificial Sequence
  Synthetic
acgggcugaggcccacucccau

SEQ ID NO: 83603 - RNA, 23 nt, Artificial Sequence
  Synthetic
aacgggcugaggcccacucccau

SEQ ID NO: 83604 - RNA, 24 nt, Artificial Sequence
  Synthetic
aaacgggcugaggcccacucccau

SEQ ID NO: 83605 - RNA, 21 nt, Artificial Sequence
  Synthetic
uaacauugagauucccgagau

SEQ ID NO: 83606 - RNA, 22 nt, Artificial Sequence
  Synthetic
cuaacauugagauucccgagau

SEQ ID NO: 83607 - RNA, 23 nt, Artificial Sequence
  Synthetic
acuaacauugagauucccgagau

SEQ ID NO: 83608 - RNA, 24 nt, Artificial Sequence
  Synthetic
uacuaacauugagauucccgagau

SEQ ID NO: 83609 - RNA, 21 nt, Artificial Sequence
  Synthetic
cucugaaggcuggauccaacu

SEQ ID NO: 83610 - RNA, 23 nt, Artificial Sequence
  Synthetic
ugcucugaaggcuggauccaacu

SEQ ID NO: 83611 - RNA, 24 nt, Artificial Sequence
  Synthetic
uugcucugaaggcuggauccaacu

SEQ ID NO: 83612 - RNA, 21 nt, Artificial Sequence
  Synthetic
uaacagcgguaaaaagggacu

SEQ ID NO: 83613 - RNA, 24 nt, Artificial Sequence
  Synthetic
ugguaacagcgguaaaaagggacu

SEQ ID NO: 83614 - RNA, 21 nt, Artificial Sequence
  Synthetic
aacagucuuugaaguaugccu

SEQ ID NO: 83615 - RNA, 22 nt, Artificial Sequence
  Synthetic
aaacagucuuugaaguaugccu

SEQ ID NO: 83616 - RNA, 23 nt, Artificial Sequence
  Synthetic
caaacagucuuugaaguaugccu

SEQ ID NO: 83617 - RNA, 24 nt, Artificial Sequence
  Synthetic
acaaacagucuuugaaguaugccu

SEQ ID NO: 83618 - RNA, 21 nt, Artificial Sequence
  Synthetic
  misc_feature (12)..(12): n is a, c, g, or u
uguaacacgagnagggguccu

SEQ ID NO: 83619 - RNA, 22 nt, Artificial Sequence
  Synthetic
  misc_feature (13)..(13): n is a, c, g, or u
cuguaacacgagnagggguccu

SEQ ID NO: 83620 - RNA, 23 nt, Artificial Sequence
  Synthetic
  misc_feature (14)..(14): n is a, c, g, or u
ccuguaacacgagnagggguccu

SEQ ID NO: 83621 - RNA, 18 nt, Artificial Sequence
  Synthetic
cgagcaaaacaagcggcu

SEQ ID NO: 83622 - RNA, 20 nt, Artificial Sequence
  Synthetic
ugcgagcaaaacaagcggcu

SEQ ID NO: 83623 - RNA, 21 nt, Artificial Sequence
  Synthetic
cugcgagcaaaacaagcggcu

SEQ ID NO: 83624 - RNA, 23 nt, Artificial Sequence
  Synthetic
ugcugcgagcaaaacaagcggcu

SEQ ID NO: 83625 - RNA, 24 nt, Artificial Sequence
  Synthetic
cugcugcgagcaaaacaagcggcu

SEQ ID NO: 83626 - RNA, 18 nt, Artificial Sequence
  Synthetic
ccuuguugggauugaagu

SEQ ID NO: 83627 - RNA, 19 nt, Artificial Sequence
  Synthetic
uccuuguugggauugaagu

SEQ ID NO: 83628 - RNA, 21 nt, Artificial Sequence
  Synthetic
uguccuuguugggauugaagu

SEQ ID NO: 83629 - RNA, 24 nt, Artificial Sequence
  Synthetic
agguguccuuguugggauugaagu

SEQ ID NO: 83630 - RNA, 21 nt, Artificial Sequence
  Synthetic
caugaccaagccccagccagu

SEQ ID NO: 83631 - RNA, 22 nt, Artificial Sequence
  Synthetic
ccaugaccaagccccagccagu

SEQ ID NO: 83632 - RNA, 23 nt, Artificial Sequence
  Synthetic
cccaugaccaagccccagccagu

SEQ ID NO: 83633 - RNA, 21 nt, Artificial Sequence
  Synthetic
uggucuauaagcuggaggagu

SEQ ID NO: 83634 - RNA, 24 nt, Artificial Sequence
  Synthetic
  misc_feature (1)..(1): n is a, c, g, or u
ngguggucuauaagcuggaggagu

SEQ ID NO: 83635 - RNA, 19 nt, Artificial Sequence
  Synthetic
cgggcaacgggguaaaggu

SEQ ID NO: 83636 - RNA, 20 nt, Artificial Sequence
  Synthetic
ccgggcaacgggguaaaggu

SEQ ID NO: 83637 - RNA, 22 nt, Artificial Sequence
  Synthetic
ugccgggcaacgggguaaaggu

SEQ ID NO: 83638 - RNA, 23 nt, Artificial Sequence
  Synthetic
uugccgggcaacgggguaaaggu

SEQ ID NO: 83639 - RNA, 19 nt, Artificial Sequence
  Synthetic
cguugccgggcaacggggu

SEQ ID NO: 83640 - RNA, 20 nt, Artificial Sequence
  Synthetic
ccguugccgggcaacggggu

SEQ ID NO: 83641 - RNA, 23 nt, Artificial Sequence
  Synthetic
uggccguugccgggcaacggggu

SEQ ID NO: 83642 - RNA, 24 nt, Artificial Sequence
  Synthetic
cuggccguugccgggcaacggggu

SEQ ID NO: 83643 - RNA, 22 nt, Artificial Sequence
  Synthetic
agaggugaaaaaguugcauggu

SEQ ID NO: 83644 - RNA, 23 nt, Artificial Sequence
  Synthetic
cagaggugaaaaaguugcauggu

SEQ ID NO: 83645 - RNA, 21 nt, Artificial Sequence
  Synthetic
uacccgccuuccauagagugu

SEQ ID NO: 83646 - RNA, 22 nt, Artificial Sequence
  Synthetic
auacccgccuuccauagagugu

SEQ ID NO: 83647 - RNA, 23 nt, Artificial Sequence
  Synthetic
uauacccgccuuccauagagugu

SEQ ID NO: 83648 - RNA, 24 nt, Artificial Sequence
  Synthetic
auauacccgccuuccauagagugu

SEQ ID NO: 83649 - RNA, 22 nt, Artificial Sequence
  Synthetic
agucuagacucugcgguauugu

SEQ ID NO: 83650 - RNA, 24 nt, Artificial Sequence
  Synthetic
cgagucuagacucugcgguauugu

SEQ ID NO: 83651 - RNA, 21 nt, Artificial Sequence
  Synthetic
cgucuggccagguguccuugu

SEQ ID NO: 83652 - RNA, 24 nt, Artificial Sequence
  Synthetic
uggcgucuggccagguguccuugu

SEQ ID NO: 83653 - RNA, 21 nt, Artificial Sequence
  Synthetic
uccccaauccucgagaagauu

SEQ ID NO: 83654 - RNA, 21 nt, Artificial Sequence
  Synthetic
auugaagucccaaucuggauu

SEQ ID NO: 83655 - RNA, 21 nt, Artificial Sequence
  Synthetic
acaggagguuggugagugauu

SEQ ID NO: 83656 - RNA, 24 nt, Artificial Sequence
  Synthetic
aggacaggagguuggugagugauu

SEQ ID NO: 83657 - RNA, 21 nt, Artificial Sequence
  Synthetic
  misc_feature (8)..(8): n is a, c, g, or u
  misc_feature (17)..(17): n is a, c, g, or u
ccacaauncguugacanacuu

SEQ ID NO: 83658 - RNA, 22 nt, Artificial Sequence
  Synthetic
  misc_feature (9)..(9): n is a, c, g, or u
  misc_feature (18)..(18): n is a, c, g, or u
cccacaauncguugacanacuu

SEQ ID NO: 83659 - RNA, 23 nt, Artificial Sequence
  Synthetic
  misc_feature (10)..(10): n is a, c, g, or u
  misc_feature (19)..(19): n is a, c, g, or u
acccacaauncguugacanacuu

SEQ ID NO: 83660 - RNA, 18 nt, Artificial Sequence
  Synthetic
aaacgggcaacauaccuu

SEQ ID NO: 83661 - RNA, 19 nt, Artificial Sequence
  Synthetic
caaacgggcaacauaccuu

SEQ ID NO: 83662 - RNA, 20 nt, Artificial Sequence
  Synthetic
acaaacgggcaacauaccuu

SEQ ID NO: 83663 - RNA, 22 nt, Artificial Sequence
  Synthetic
aggacaccuggccagacgccaa

SEQ ID NO: 83664 - RNA, 23 nt, Artificial Sequence
  Synthetic
aaggacaccuggccagacgccaa

SEQ ID NO: 83665 - RNA, 24 nt, Artificial Sequence
  Synthetic
caaggacaccuggccagacgccaa

SEQ ID NO: 83666 - RNA, 23 nt, Artificial Sequence
  Synthetic
uggcugcuaggcugugcugccaa

SEQ ID NO: 83667 - RNA, 24 nt, Artificial Sequence
  Synthetic
auggcugcuaggcugugcugccaa

SEQ ID NO: 83668 - RNA, 21 nt, Artificial Sequence
  Synthetic
acuccuccagcuuauagacca

SEQ ID NO: 83669 - RNA, 22 nt, Artificial Sequence
  Synthetic
cacuccuccagcuuauagacca

SEQ ID NO: 83670 - RNA, 24 nt, Artificial Sequence
  Synthetic
cgcacuccuccagcuuauagacca

SEQ ID NO: 83671 - RNA, 18 nt, Artificial Sequence
  Synthetic
ccgcuuguuuugcucgca

SEQ ID NO: 83672 - RNA, 20 nt, Artificial Sequence
  Synthetic
agccgcuuguuuugcucgca

SEQ ID NO: 83673 - RNA, 21 nt, Artificial Sequence
  Synthetic
uagccgcuuguuuugcucgca

SEQ ID NO: 83674 - RNA, 22 nt, Artificial Sequence
  Synthetic
cuagccgcuuguuuugcucgca

SEQ ID NO: 83675 - RNA, 23 nt, Artificial Sequence
  Synthetic
ccuagccgcuuguuuugcucgca

SEQ ID NO: 83676 - RNA, 24 nt, Artificial Sequence
  Synthetic
uccuagccgcuuguuuugcucgca

SEQ ID NO: 83677 - RNA, 18 nt, Artificial Sequence
  Synthetic
cucaaucgccgcgucgca

SEQ ID NO: 83678 - RNA, 19 nt, Artificial Sequence
  Synthetic
ucucaaucgccgcgucgca

SEQ ID NO: 83679 - RNA, 21 nt, Artificial Sequence
  Synthetic
uguuaguauuccuuggacuca

SEQ ID NO: 83680 - RNA, 22 nt, Artificial Sequence
  Synthetic
auguuaguauuccuuggacuca

SEQ ID NO: 83681 - RNA, 23 nt, Artificial Sequence
  Synthetic
aauguuaguauuccuuggacuca

SEQ ID NO: 83682 - RNA, 24 nt, Artificial Sequence
  Synthetic
caauguuaguauuccuuggacuca

SEQ ID NO: 83683 - RNA, 22 nt, Artificial Sequence
  Synthetic
uggcuuucaguuauauggauga

SEQ ID NO: 83684 - RNA, 23 nt, Artificial Sequence
  Synthetic
uuggcuuucaguuauauggauga

SEQ ID NO: 83685 - RNA, 24 nt, Artificial Sequence
  Synthetic
uuuggcuuucaguuauauggauga

SEQ ID NO: 83686 - RNA, 21 nt, Artificial Sequence
  Synthetic
  misc_feature (18)..(18): n is a, c, g, or u
cuaguagucaguuaugunaac

SEQ ID NO: 83687 - RNA, 22 nt, Artificial Sequence
  Synthetic
  misc_feature (19)..(19): n is a, c, g, or u
ccuaguagucaguuaugunaac

SEQ ID NO: 83688 - RNA, 23 nt, Artificial Sequence
  Synthetic
  misc_feature (20)..(20): n is a, c, g, or u
accuaguagucaguuaugunaac

SEQ ID NO: 83689 - RNA, 18 nt, Artificial Sequence
  Synthetic
cucccucgccucgcagac

SEQ ID NO: 83690 - RNA, 19 nt, Artificial Sequence
  Synthetic
acucccucgccucgcagac

SEQ ID NO: 83691 - RNA, 20 nt, Artificial Sequence
  Synthetic
aacucccucgccucgcagac

SEQ ID NO: 83692 - RNA, 22 nt, Artificial Sequence
  Synthetic
agaacucccucgccucgcagac

SEQ ID NO: 83693 - RNA, 23 nt, Artificial Sequence
  Synthetic
aagaacucccucgccucgcagac

SEQ ID NO: 83694 - RNA, 18 nt, Artificial Sequence
  Synthetic
uguaccaaaccuucggac

SEQ ID NO: 83695 - RNA, 19 nt, Artificial Sequence
  Synthetic
cuguaccaaaccuucggac

SEQ ID NO: 83696 - RNA, 21 nt, Artificial Sequence
  Synthetic
ugcuguaccaaaccuucggac

SEQ ID NO: 83697 - RNA, 22 nt, Artificial Sequence
  Synthetic
uugcuguaccaaaccuucggac

SEQ ID NO: 83698 - RNA, 24 nt, Artificial Sequence
  Synthetic
uguugcuguaccaaaccuucggac

SEQ ID NO: 83699 - RNA, 21 nt, Artificial Sequence
  Synthetic
accgcaaauccagauugggac

SEQ ID NO: 83700 - RNA, 22 nt, Artificial Sequence
  Synthetic
caccgcaaauccagauugggac

SEQ ID NO: 83701 - RNA, 23 nt, Artificial Sequence
  Synthetic
acaccgcaaauccagauugggac

SEQ ID NO: 83702 - RNA, 24 nt, Artificial Sequence
  Synthetic
aacaccgcaaauccagauugggac

SEQ ID NO: 83703 - RNA, 19 nt, Artificial Sequence
  Synthetic
cgggguuuuucuuguugac

SEQ ID NO: 83704 - RNA, 22 nt, Artificial Sequence
  Synthetic
aggcgggguuuuucuuguugac

SEQ ID NO: 83705 - RNA, 23 nt, Artificial Sequence
  Synthetic
caggcgggguuuuucuuguugac

SEQ ID NO: 83706 - RNA, 24 nt, Artificial Sequence
  Synthetic
acaggcgggguuuuucuuguugac

SEQ ID NO: 83707 - RNA, 21 nt, Artificial Sequence
  Synthetic
caaaauucgcaguccccaacc

SEQ ID NO: 83708 - RNA, 22 nt, Artificial Sequence
  Synthetic
ccaaaauucgcaguccccaacc

SEQ ID NO: 83709 - RNA, 21 nt, Artificial Sequence
  Synthetic
ccagccuucagagcaaacacc

SEQ ID NO: 83710 - RNA, 22 nt, Artificial Sequence
  Synthetic
uccagccuucagagcaaacacc

SEQ ID NO: 83711 - RNA, 23 nt, Artificial Sequence
  Synthetic
auccagccuucagagcaaacacc

SEQ ID NO: 83712 - RNA, 21 nt, Artificial Sequence
  Synthetic
uucaagccuccaagcugugcc

SEQ ID NO: 83713 - RNA, 23 nt, Artificial Sequence
  Synthetic
uguucaagccuccaagcugugcc

SEQ ID NO: 83714 - RNA, 24 nt, Artificial Sequence
  Synthetic
cuguucaagccuccaagcugugcc

SEQ ID NO: 83715 - RNA, 21 nt, Artificial Sequence
  Synthetic
agguauguugcccguuugucc

SEQ ID NO: 83716 - RNA, 22 nt, Artificial Sequence
  Synthetic
aagguauguugcccguuugucc

SEQ ID NO: 83717 - RNA, 23 nt, Artificial Sequence
  Synthetic
caagguauguugcccguuugucc

SEQ ID NO: 83718 - RNA, 24 nt, Artificial Sequence
  Synthetic
ucaagguauguugcccguuugucc

SEQ ID NO: 83719 - RNA, 21 nt, Artificial Sequence
  Synthetic
cuguauuucccugcugguggc

SEQ ID NO: 83720 - RNA, 22 nt, Artificial Sequence
  Synthetic
ccuguauuucccugcugguggc

SEQ ID NO: 83721 - RNA, 21 nt, Artificial Sequence
  Synthetic
uacacaaugugguuauccugc

SEQ ID NO: 83722 - RNA, 22 nt, Artificial Sequence
  Synthetic
uuacacaaugugguuauccugc

SEQ ID NO: 83723 - RNA, 23 nt, Artificial Sequence
  Synthetic
uuuacacaaugugguuauccugc

SEQ ID NO: 83724 - RNA, 24 nt, Artificial Sequence
  Synthetic
uuuuacacaaugugguuauccugc

SEQ ID NO: 83725 - RNA, 24 nt, Artificial Sequence
  Synthetic
ugggggccaagucuguacagcauc

SEQ ID NO: 83726 - RNA, 23 nt, Artificial Sequence
  Synthetic
ugggauucuuucccgaccaccag

SEQ ID NO: 83727 - RNA, 24 nt, Artificial Sequence
  Synthetic
cugggauucuuucccgaccaccag

SEQ ID NO: 83728 - RNA, 18 nt, Artificial Sequence
  Synthetic
cuguuguuagacgacgag

SEQ ID NO: 83729 - RNA, 19 nt, Artificial Sequence
  Synthetic
acuguuguuagacgacgag

SEQ ID NO: 83730 - RNA, 20 nt, Artificial Sequence
  Synthetic
uacuguuguuagacgacgag

SEQ ID NO: 83731 - RNA, 21 nt, Artificial Sequence
  Synthetic
cuacuguuguuagacgacgag

SEQ ID NO: 83732 - RNA, 22 nt, Artificial Sequence
  Synthetic
acuacuguuguuagacgacgag

SEQ ID NO: 83733 - RNA, 24 nt, Artificial Sequence
  Synthetic
agacuacuguuguuagacgacgag

SEQ ID NO: 83734 - RNA, 18 nt, Artificial Sequence
  Synthetic
agaauccucacaauaccg

SEQ ID NO: 83735 - RNA, 19 nt, Artificial Sequence
  Synthetic
aagaauccucacaauaccg

SEQ ID NO: 83736 - RNA, 20 nt, Artificial Sequence
  Synthetic
caagaauccucacaauaccg

SEQ ID NO: 83737 - RNA, 21 nt, Artificial Sequence
  Synthetic
acaagaauccucacaauaccg

SEQ ID NO: 83738 - RNA, 23 nt, Artificial Sequence
  Synthetic
ugacaagaauccucacaauaccg

SEQ ID NO: 83739 - RNA, 24 nt, Artificial Sequence
  Synthetic
uugacaagaauccucacaauaccg

SEQ ID NO: 83740 - RNA, 19 nt, Artificial Sequence
  Synthetic
uguuuacgucccgucggcg

SEQ ID NO: 83741 - RNA, 20 nt, Artificial Sequence
  Synthetic
uuguuuacgucccgucggcg

SEQ ID NO: 83742 - RNA, 21 nt, Artificial Sequence
  Synthetic
uccaacuuguccugguuaucg

SEQ ID NO: 83743 - RNA, 22 nt, Artificial Sequence
  Synthetic
cuccaacuuguccugguuaucg

SEQ ID NO: 83744 - RNA, 23 nt, Artificial Sequence
  Synthetic
ccuccaacuuguccugguuaucg

SEQ ID NO: 83745 - RNA, 24 nt, Artificial Sequence
  Synthetic
uccuccaacuuguccugguuaucg

SEQ ID NO: 83746 - RNA, 21 nt, Artificial Sequence
  Synthetic
  misc_feature (11)..(11): n is a, c, g, or u
ucccaucaucnugggcuuucg

SEQ ID NO: 83747 - RNA, 22 nt, Artificial Sequence
  Synthetic
  misc_feature (12)..(12): n is a, c, g, or u
aucccaucaucnugggcuuucg

SEQ ID NO: 83748 - RNA, 23 nt, Artificial Sequence
  Synthetic
  misc_feature (13)..(13): n is a, c, g, or u
caucccaucaucnugggcuuucg

SEQ ID NO: 83749 - RNA, 24 nt, Artificial Sequence
  Synthetic
  misc_feature (14)..(14): n is a, c, g, or u
ccaucccaucaucnugggcuuucg

SEQ ID NO: 83750 - RNA, 23 nt, Artificial Sequence
  Synthetic
  misc_feature (10)..(10): n is a, c, g, or u
aggaccccuncucguguuacagg

SEQ ID NO: 83751 - RNA, 24 nt, Artificial Sequence
  Synthetic
  misc_feature (11)..(11): n is a, c, g, or u
uaggaccccuncucguguuacagg

SEQ ID NO: 83752 - RNA, 21 nt, Artificial Sequence
  Synthetic
uggaugaugugguauuggggg

SEQ ID NO: 83753 - RNA, 22 nt, Artificial Sequence
  Synthetic
auggaugaugugguauuggggg

SEQ ID NO: 83754 - RNA, 23 nt, Artificial Sequence
  Synthetic
uauggaugaugugguauuggggg

SEQ ID NO: 83755 - RNA, 24 nt, Artificial Sequence
  Synthetic
auauggaugaugugguauuggggg

SEQ ID NO: 83756 - RNA, 21 nt, Artificial Sequence
  Synthetic
aacaagagcuacagcaugggg

SEQ ID NO: 83757 - RNA, 21 nt, Artificial Sequence
  Synthetic
caugcaacuuuuucaccucug

SEQ ID NO: 83758 - RNA, 22 nt, Artificial Sequence
  Synthetic
ccaugcaacuuuuucaccucug

SEQ ID NO: 83759 - RNA, 23 nt, Artificial Sequence
  Synthetic
accaugcaacuuuuucaccucug

SEQ ID NO: 83760 - RNA, 24 nt, Artificial Sequence
  Synthetic
caccaugcaacuuuuucaccucug

SEQ ID NO: 83761 - RNA, 21 nt, Artificial Sequence
  Synthetic
ccggcaacggccaggucugug

SEQ ID NO: 83762 - RNA, 22 nt, Artificial Sequence
  Synthetic
cccggcaacggccaggucugug

SEQ ID NO: 83763 - RNA, 24 nt, Artificial Sequence
  Synthetic
ugcccggcaacggccaggucugug

SEQ ID NO: 83764 - RNA, 21 nt, Artificial Sequence
  Synthetic
uguuaacaggccuauugauug

SEQ ID NO: 83765 - RNA, 22 nt, Artificial Sequence
  Synthetic
cuguuaacaggccuauugauug

SEQ ID NO: 83766 - RNA, 23 nt, Artificial Sequence
  Synthetic
ccuguuaacaggccuauugauug

SEQ ID NO: 83767 - RNA, 24 nt, Artificial Sequence
  Synthetic
uccuguuaacaggccuauugauug

SEQ ID NO: 83768 - RNA, 18 nt, Artificial Sequence
  Synthetic
aaucucgggaaucucaau

SEQ ID NO: 83769 - RNA, 19 nt, Artificial Sequence
  Synthetic
caaucucgggaaucucaau

SEQ ID NO: 83770 - RNA, 20 nt, Artificial Sequence
  Synthetic
ucaaucucgggaaucucaau

SEQ ID NO: 83771 - RNA, 21 nt, Artificial Sequence
  Synthetic
cucaaucucgggaaucucaau

SEQ ID NO: 83772 - RNA, 22 nt, Artificial Sequence
  Synthetic
ucucaaucucgggaaucucaau

SEQ ID NO: 83773 - RNA, 23 nt, Artificial Sequence
  Synthetic
aucucaaucucgggaaucucaau

SEQ ID NO: 83774 - RNA, 22 nt, Artificial Sequence
  Synthetic
agaagaucucaaucucgggaau

SEQ ID NO: 83775 - RNA, 23 nt, Artificial Sequence
  Synthetic
cagaagaucucaaucucgggaau

SEQ ID NO: 83776 - RNA, 21 nt, Artificial Sequence
  Synthetic
ugaacauggagaacaucacau

SEQ ID NO: 83777 - RNA, 22 nt, Artificial Sequence
  Synthetic
cugaacauggagaacaucacau

SEQ ID NO: 83778 - RNA, 24 nt, Artificial Sequence
  Synthetic
cgcugaacauggagaacaucacau

SEQ ID NO: 83779 - RNA, 18 nt, Artificial Sequence
  Synthetic
cgccgcgucgcagaagau

SEQ ID NO: 83780 - RNA, 19 nt, Artificial Sequence
  Synthetic
ucgccgcgucgcagaagau

SEQ ID NO: 83781 - RNA, 20 nt, Artificial Sequence
  Synthetic
aucgccgcgucgcagaagau

SEQ ID NO: 83782 - RNA, 18 nt, Artificial Sequence
  Synthetic
cuuucggaaaauuccuau

SEQ ID NO: 83783 - RNA, 22 nt, Artificial Sequence
  Synthetic
ugggcuuucggaaaauuccuau

SEQ ID NO: 83784 - RNA, 23 nt, Artificial Sequence
  Synthetic
  misc_feature (1)..(1): n is a, c, g, or u
nugggcuuucggaaaauuccuau

SEQ ID NO: 83785 - RNA, 24 nt, Artificial Sequence
  Synthetic
  misc_feature (2)..(2): n is a, c, g, or u
cnugggcuuucggaaaauuccuau

SEQ ID NO: 83786 - RNA, 18 nt, Artificial Sequence
  Synthetic
uaccgcagagucuagacu

SEQ ID NO: 83787 - RNA, 19 nt, Artificial Sequence
  Synthetic
auaccgcagagucuagacu

SEQ ID NO: 83788 - RNA, 20 nt, Artificial Sequence
  Synthetic
aauaccgcagagucuagacu

SEQ ID NO: 83789 - RNA, 24 nt, Artificial Sequence
  Synthetic
agggcuuucccccacuguuuggcu

SEQ ID NO: 83790 - RNA, 19 nt, Artificial Sequence
  Synthetic
agacucgugguggacuucu

SEQ ID NO: 83791 - RNA, 20 nt, Artificial Sequence
  Synthetic
uagacucgugguggacuucu

SEQ ID NO: 83792 - RNA, 21 nt, Artificial Sequence
  Synthetic
cuagacucgugguggacuucu

SEQ ID NO: 83793 - RNA, 22 nt, Artificial Sequence
  Synthetic
ucuagacucgugguggacuucu

SEQ ID NO: 83794 - RNA, 24 nt, Artificial Sequence
  Synthetic
agucuagacucgugguggacuucu

SEQ ID NO: 83795 - RNA, 22 nt, Artificial Sequence
  Synthetic
aguauuuggugucuuucggagu

SEQ ID NO: 83796 - RNA, 24 nt, Artificial Sequence
  Synthetic
agaguauuuggugucuuucggagu

SEQ ID NO: 83797 - RNA, 18 nt, Artificial Sequence
  Synthetic
cgccucgcagacgaaggu

SEQ ID NO: 83798 - RNA, 19 nt, Artificial Sequence
  Synthetic
ucgccucgcagacgaaggu

SEQ ID NO: 83799 - RNA, 20 nt, Artificial Sequence
  Synthetic
cucgccucgcagacgaaggu

SEQ ID NO: 83800 - RNA, 24 nt, Artificial Sequence
  Synthetic
  misc_feature (23)..(23): n is a, c, g, or u
ugggccuaaaguucaggcaacunu

SEQ ID NO: 83801 - RNA, 21 nt, Artificial Sequence
  Synthetic
ccgugugucuuggccaaaauu

SEQ ID NO: 83802 - RNA, 22 nt, Artificial Sequence
  Synthetic
accgugugucuuggccaaaauu

SEQ ID NO: 83803 - RNA, 23 nt, Artificial Sequence
  Synthetic
  misc_feature (1)..(1): n is a, c, g, or u
naccgugugucuuggccaaaauu

SEQ ID NO: 83804 - RNA, 24 nt, Artificial Sequence
  Synthetic
  misc_feature (2)..(2): n is a, c, g, or u
cnaccgugugucuuggccaaaauu

SEQ ID NO: 83805 - RNA, 22 nt, Artificial Sequence
  Synthetic
ugcugcuaugccucaucuucuu

SEQ ID NO: 83806 - RNA, 23 nt, Artificial Sequence
  Synthetic
cugcugcuaugccucaucuucuu

SEQ ID NO: 83807 - RNA, 24 nt, Artificial Sequence
  Synthetic
ccugcugcuaugccucaucuucuu

SEQ ID NO: 83808 - RNA, 22 nt, Artificial Sequence
  Synthetic
ugagucccuuuuuaccgcuguu

SEQ ID NO: 83809 - RNA, 23 nt, Artificial Sequence
  Synthetic
uugagucccuuuuuaccgcuguu

SEQ ID NO: 83810 - RNA, 24 nt, Artificial Sequence
  Synthetic
cuugagucccuuuuuaccgcuguu

SEQ ID NO: 83811 - RNA, 18 nt, Artificial Sequence
  Synthetic
caccgcacggaggccuuu

SEQ ID NO: 83812 - RNA, 19 nt, Artificial Sequence
  Synthetic
ccaccgcacggaggccuuu

SEQ ID NO: 83813 - RNA, 20 nt, Artificial Sequence
  Synthetic
cccaccgcacggaggccuuu

SEQ ID NO: 83814 - RNA, 18 nt, Artificial Sequence
  Synthetic
guauacccaaagacaaaa

SEQ ID NO: 83815 - RNA, 20 nt, Artificial Sequence
  Synthetic
guaaauguauauuaggaaaa

SEQ ID NO: 83816 - RNA, 22 nt, Artificial Sequence
  Synthetic
guguaaauguauauuaggaaaa

SEQ ID NO: 83817 - RNA, 23 nt, Artificial Sequence
  Synthetic
gguguaaauguauauuaggaaaa

SEQ ID NO: 83818 - RNA, 22 nt, Artificial Sequence
  Synthetic
guauacccaaagacaaaagaaa

SEQ ID NO: 83819 - RNA, 18 nt, Artificial Sequence
  Synthetic
guccagaagaaccaacaa

SEQ ID NO: 83820 - RNA, 22 nt, Artificial Sequence
  Synthetic
  misc_feature (18)..(18): n is a, c, g, or u
guauauuugcgggagagnacaa

SEQ ID NO: 83821 - RNA, 20 nt, Artificial Sequence
  Synthetic
guagcucuuguucccaagaa

SEQ ID NO: 83822 - RNA, 23 nt, Artificial Sequence
  Synthetic
gcuguagcucuuguucccaagaa

SEQ ID NO: 83823 - RNA, 18 nt, Artificial Sequence
  Synthetic
  misc_feature (11)..(11): n is a, c, g, or u
gaucucguacngaaggaa

SEQ ID NO: 83824 - RNA, 21 nt, Artificial Sequence
  Synthetic
  misc_feature (14)..(14): n is a, c, g, or u
gaagaucucguacngaaggaa

SEQ ID NO: 83825 - RNA, 19 nt, Artificial Sequence
  Synthetic
gcagcaggaugaagaggaa

SEQ ID NO: 83826 - RNA, 24 nt, Artificial Sequence
  Synthetic
gcauagcagcaggaugaagaggaa

SEQ ID NO: 83827 - RNA, 18 nt, Artificial Sequence
  Synthetic
  misc_feature (6)..(6): n is a, c, g, or u
gagagncaguagucggaa

SEQ ID NO: 83828 - RNA, 20 nt, Artificial Sequence
  Synthetic
  misc_feature (2)..(2): n is a, c, g, or u
  misc_feature (8)..(8): n is a, c, g, or u
gngagagncaguagucggaa

SEQ ID NO: 83829 - RNA, 23 nt, Artificial Sequence
  Synthetic
gauuaacuagauguucuggauaa

SEQ ID NO: 83830 - RNA, 19 nt, Artificial Sequence
  Synthetic
guuuggaaguaaugauuaa

SEQ ID NO: 83831 - RNA, 24 nt, Artificial Sequence
  Synthetic
  misc_feature (5)..(5): n is a, c, g, or u
gucunguuuggaaguaaugauuaa

SEQ ID NO: 83832 - RNA, 19 nt, Artificial Sequence
  Synthetic
gaacaguaggacaugaaca

SEQ ID NO: 83833 - RNA, 19 nt, Artificial Sequence
  Synthetic
  misc_feature (8)..(8): n is a, c, g, or u
guggcaangacccauaaca

SEQ ID NO: 83834 - RNA, 19 nt, Artificial Sequence
  Synthetic
gcgaauuuuggccaagaca

SEQ ID NO: 83835 - RNA, 23 nt, Artificial Sequence
  Synthetic
guuucucuuccaaaagugagaca

SEQ ID NO: 83836 - RNA, 18 nt, Artificial Sequence
  Synthetic
gcccaugaccaagcccca

SEQ ID NO: 83837 - RNA, 19 nt, Artificial Sequence
  Synthetic
ggcccaugaccaagcccca

SEQ ID NO: 83838 - RNA, 22 nt, Artificial Sequence
  Synthetic
gauggcccaugaccaagcccca

SEQ ID NO: 83839 - RNA, 18 nt, Artificial Sequence
  Synthetic
ggucgggaaagaauccca

SEQ ID NO: 83840 - RNA, 20 nt, Artificial Sequence
  Synthetic
guggucgggaaagaauccca

SEQ ID NO: 83841 - RNA, 21 nt, Artificial Sequence
  Synthetic
gguggucgggaaagaauccca

SEQ ID NO: 83842 - RNA, 19 nt, Artificial Sequence
  Synthetic
gcucugaaggcuggaucca

SEQ ID NO: 83843 - RNA, 18 nt, Artificial Sequence
  Synthetic
guugauaagauaggggca

SEQ ID NO: 83844 - RNA, 20 nt, Artificial Sequence
  Synthetic
guguugauaagauaggggca

SEQ ID NO: 83845 - RNA, 23 nt, Artificial Sequence
  Synthetic
gaaguguugauaagauaggggca

SEQ ID NO: 83846 - RNA, 24 nt, Artificial Sequence
  Synthetic
ggaaguguugauaagauaggggca

SEQ ID NO: 83847 - RNA, 18 nt, Artificial Sequence
  Synthetic
gaggugaagcgaagugca

SEQ ID NO: 83848 - RNA, 19 nt, Artificial Sequence
  Synthetic
  misc_feature (17)..(17): n is a, c, g, or u
gucggucguugacauunca

SEQ ID NO: 83849 - RNA, 20 nt, Artificial Sequence
  Synthetic
  misc_feature (18)..(18): n is a, c, g, or u
ggucggucguugacauunca

SEQ ID NO: 83850 - RNA, 18 nt, Artificial Sequence
  Synthetic
guaagaccuugggcaaga

SEQ ID NO: 83851 - RNA, 18 nt, Artificial Sequence
  Synthetic
  misc_feature (12)..(12): n is a, c, g, or u
  misc_feature (14)..(14): n is a, c, g, or u
gauugacgauangngaga

SEQ ID NO: 83852 - RNA, 21 nt, Artificial Sequence
  Synthetic
  misc_feature (15)..(15): n is a, c, g, or u
  misc_feature (17)..(17): n is a, c, g, or u
gaagauugacgauangngaga

SEQ ID NO: 83853 - RNA, 23 nt, Artificial Sequence
  Synthetic
  misc_feature (17)..(17): n is a, c, g, or u
  misc_feature (19)..(19): n is a, c, g, or u
gagaagauugacgauangngaga

SEQ ID NO: 83854 - RNA, 21 nt, Artificial Sequence
  Synthetic
gaaagugaaagccugcuuaga

SEQ ID NO: 83855 - RNA, 23 nt, Artificial Sequence
  Synthetic
gagaaagugaaagccugcuuaga

SEQ ID NO: 83856 - RNA, 20 nt, Artificial Sequence
  Synthetic
gcagacggagaaggggacga

SEQ ID NO: 83857 - RNA, 20 nt, Artificial Sequence
  Synthetic
gaccuucgucugcgaggcga

SEQ ID NO: 83858 - RNA, 20 nt, Artificial Sequence
  Synthetic
gcaggguccccaauccucga

SEQ ID NO: 83859 - RNA, 20 nt, Artificial Sequence
  Synthetic
gauccaacugguggucggga

SEQ ID NO: 83860 - RNA, 21 nt, Artificial Sequence
  Synthetic
  misc_feature (8)..(8): n is a, c, g, or u
  misc_feature (14)..(14): n is a, c, g, or u
guaaauanugucunguuugga

SEQ ID NO: 83861 - RNA, 23 nt, Artificial Sequence
  Synthetic
  misc_feature (10)..(10): n is a, c, g, or u
  misc_feature (16)..(16): n is a, c, g, or u
guguaaauanugucunguuugga

SEQ ID NO: 83862 - RNA, 24 nt, Artificial Sequence
  Synthetic
  misc_feature (19)..(19): n is a, c, g, or u
gaauuuuccgaaagcccangauga

SEQ ID NO: 83863 - RNA, 18 nt, Artificial Sequence
  Synthetic
ggguccuaggaauccuga

SEQ ID NO: 83864 - RNA, 19 nt, Artificial Sequence
  Synthetic
gggguccuaggaauccuga

SEQ ID NO: 83865 - RNA, 22 nt, Artificial Sequence
  Synthetic
  misc_feature (2)..(2): n is a, c, g, or u
gnagggguccuaggaauccuga

SEQ ID NO: 83866 - RNA, 24 nt, Artificial Sequence
  Synthetic
  misc_feature (4)..(4): n is a, c, g, or u
gagnagggguccuaggaauccuga

SEQ ID NO: 83867 - RNA, 20 nt, Artificial Sequence
  Synthetic
  misc_feature (3)..(3): n is a, c, g, or u
  misc_feature (12)..(12): n is a, c, g, or u
gcnucccgauanagagcuga

SEQ ID NO: 83868 - RNA, 21 nt, Artificial Sequence
  Synthetic
  misc_feature (4)..(4): n is a, c, g, or u
  misc_feature (13)..(13): n is a, c, g, or u
ggcnucccgauanagagcuga

SEQ ID NO: 83869 - RNA, 19 nt, Artificial Sequence
  Synthetic
gaugauuaggcagagguga

SEQ ID NO: 83870 - RNA, 21 nt, Artificial Sequence
  Synthetic
gagaugauuaggcagagguga

SEQ ID NO: 83871 - RNA, 18 nt, Artificial Sequence
  Synthetic
  misc_feature (17)..(17): n is a, c, g, or u
gagcugaggcgguaucna

SEQ ID NO: 83872 - RNA, 24 nt, Artificial Sequence
  Synthetic
  misc_feature (5)..(5): n is a, c, g, or u
  misc_feature (23)..(23): n is a, c, g, or u
gauanagagcugaggcgguaucna

SEQ ID NO: 83873 - RNA, 20 nt, Artificial Sequence
  Synthetic
gauaaaaccuagcaggcaua

SEQ ID NO: 83874 - RNA, 21 nt, Artificial Sequence
  Synthetic
ggauaaaaccuagcaggcaua

SEQ ID NO: 83875 - RNA, 19 nt, Artificial Sequence
  Synthetic
  misc_feature (6)..(6): n is a, c, g, or u
guguunacauaacugacua

SEQ ID NO: 83876 - RNA, 21 nt, Artificial Sequence
  Synthetic
  misc_feature (11)..(11): n is a, c, g, or u
  misc_feature (14)..(14): n is a, c, g, or u
gacacacggunguncccccua

SEQ ID NO: 83877 - RNA, 20 nt, Artificial Sequence
  Synthetic
  misc_feature (7)..(7): n is a, c, g, or u
  misc_feature (13)..(13): n is a, c, g, or u
  misc_feature (18)..(18): n is a, c, g, or u
gacauancccaunaaaunua

SEQ ID NO: 83878 - RNA, 23 nt, Artificial Sequence
  Synthetic
gauaauaagguuuaauacccuua

SEQ ID NO: 83879 - RNA, 24 nt, Artificial Sequence
  Synthetic
ggauaauaagguuuaauacccuua

SEQ ID NO: 83880 - RNA, 22 nt, Artificial Sequence
  Synthetic
  misc_feature (5)..(5): n is a, c, g, or u
gcuanguguuguuucucucuua

SEQ ID NO: 83881 - RNA, 24 nt, Artificial Sequence
  Synthetic
  misc_feature (7)..(7): n is a, c, g, or u
gcgcuanguguuguuucucucuua

SEQ ID NO: 83882 - RNA, 19 nt, Artificial Sequence
  Synthetic
gaagucagaaggcaaaaac

SEQ ID NO: 83883 - RNA, 23 nt, Artificial Sequence
  Synthetic
gaaagaagucagaaggcaaaaac

SEQ ID NO: 83884 - RNA, 24 nt, Artificial Sequence
  Synthetic
ggaaagaagucagaaggcaaaaac

SEQ ID NO: 83885 - RNA, 20 nt, Artificial Sequence
  Synthetic
gacaaaagaaaauugguaac

SEQ ID NO: 83886 - RNA, 20 nt, Artificial Sequence
  Synthetic
gacaagaaaugugaaaccac

SEQ ID NO: 83887 - RNA, 22 nt, Artificial Sequence
  Synthetic
gagacaagaaaugugaaaccac

SEQ ID NO: 83888 - RNA, 24 nt, Artificial Sequence
  Synthetic
gugagacaagaaaugugaaaccac

SEQ ID NO: 83889 - RNA, 22 nt, Artificial Sequence
  Synthetic
  misc_feature (15)..(15): n is a, c, g, or u
gaucuuccaaauuancacccac

SEQ ID NO: 83890 - RNA, 23 nt, Artificial Sequence
  Synthetic
  misc_feature (16)..(16): n is a, c, g, or u
ggaucuuccaaauuancacccac

SEQ ID NO: 83891 - RNA, 18 nt, Artificial Sequence
  Synthetic
  misc_feature (3)..(4): n is a, c, g, or u
gannuggugggcguucac

SEQ ID NO: 83892 - RNA, 22 nt, Artificial Sequence
  Synthetic
  misc_feature (7)..(8): n is a, c, g, or u
gcaagannuggugggcguucac

SEQ ID NO: 83893 - RNA, 23 nt, Artificial Sequence
  Synthetic
  misc_feature (8)..(9): n is a, c, g, or u
ggcaagannuggugggcguucac

SEQ ID NO: 83894 - RNA, 24 nt, Artificial Sequence
  Synthetic
  misc_feature (9)..(10): n is a, c, g, or u
gggcaagannuggugggcguucac

SEQ ID NO: 83895 - RNA, 18 nt, Artificial Sequence
  Synthetic
gacaaacgggcaacauac

SEQ ID NO: 83896 - RNA, 19 nt, Artificial Sequence
  Synthetic
ggacaaacgggcaacauac

SEQ ID NO: 83897 - RNA, 21 nt, Artificial Sequence
  Synthetic
gaggacaaacgggcaacauac

SEQ ID NO: 83898 - RNA, 20 nt, Artificial Sequence
  Synthetic
gcagcaaaacccaaaagacc

SEQ ID NO: 83899 - RNA, 21 nt, Artificial Sequence
  Synthetic
ggcagcaaaacccaaaagacc

SEQ ID NO: 83900 - RNA, 22 nt, Artificial Sequence
  Synthetic
gggcagcaaaacccaaaagacc

SEQ ID NO: 83901 - RNA, 23 nt, Artificial Sequence
  Synthetic
ggggcagcaaaacccaaaagacc

SEQ ID NO: 83902 - RNA, 18 nt, Artificial Sequence
  Synthetic
guaaagagaggugcgccc

SEQ ID NO: 83903 - RNA, 20 nt, Artificial Sequence
  Synthetic
gcguaaagagaggugcgccc

SEQ ID NO: 83904 - RNA, 22 nt, Artificial Sequence
  Synthetic
  misc_feature (2)..(2): n is a, c, g, or u
  misc_feature (17)..(17): n is a, c, g, or u
gnacaacagaguuaucnguccc

SEQ ID NO: 83905 - RNA, 24 nt, Artificial Sequence
  Synthetic
  misc_feature (4)..(4): n is a, c, g, or u
  misc_feature (19)..(19): n is a, c, g, or u
gagnacaacagaguuaucnguccc

SEQ ID NO: 83906 - RNA, 18 nt, Artificial Sequence
  Synthetic
gcuguagcucuuguuccc

SEQ ID NO: 83907 - RNA, 20 nt, Artificial Sequence
  Synthetic
gaugcuguacagacuuggcc

SEQ ID NO: 83908 - RNA, 18 nt, Artificial Sequence
  Synthetic
  misc_feature (7)..(7): n is a, c, g, or u
  misc_feature (13)..(13): n is a, c, g, or u
gcuggunguugangaucc

SEQ ID NO: 83909 - RNA, 20 nt, Artificial Sequence
  Synthetic
gucuaacaacaguagucucc

SEQ ID NO: 83910 - RNA, 20 nt, Artificial Sequence
  Synthetic
  misc_feature (10)..(10): n is a, c, g, or u
guugacauuncagagagucc

SEQ ID NO: 83911 - RNA, 23 nt, Artificial Sequence
  Synthetic
gaauacaggugcaauuuccgucc

SEQ ID NO: 83912 - RNA, 24 nt, Artificial Sequence
  Synthetic
ggaauacaggugcaauuuccgucc

SEQ ID NO: 83913 - RNA, 21 nt, Artificial Sequence
  Synthetic
gaauacuaacauugagauucc

SEQ ID NO: 83914 - RNA, 22 nt, Artificial Sequence
  Synthetic
ggaauacuaacauugagauucc

SEQ ID NO: 83915 - RNA, 18 nt, Artificial Sequence
  Synthetic
  misc_feature (12)..(12): n is a, c, g, or u
gguggggugaancccagc

SEQ ID NO: 83916 - RNA, 20 nt, Artificial Sequence
  Synthetic
  misc_feature (14)..(14): n is a, c, g, or u
gcgguggggugaancccagc

SEQ ID NO: 83917 - RNA, 22 nt, Artificial Sequence
  Synthetic
  misc_feature (16)..(16): n is a, c, g, or u
gugcgguggggugaancccagc

SEQ ID NO: 83918 - RNA, 19 nt, Artificial Sequence
  Synthetic
gaacaagagaugauuaggc

SEQ ID NO: 83919 - RNA, 22 nt, Artificial Sequence
  Synthetic
  misc_feature (4)..(5): n is a, c, g, or u
gccnnaaagguuccacgcaugc

SEQ ID NO: 83920 - RNA, 24 nt, Artificial Sequence
  Synthetic
  misc_feature (6)..(7): n is a, c, g, or u
gagccnnaaagguuccacgcaugc

SEQ ID NO: 83921 - RNA, 20 nt, Artificial Sequence
  Synthetic
  misc_feature (19)..(19): n is a, c, g, or u
gaaauacaggccucucacnc

SEQ ID NO: 83922 - RNA, 21 nt, Artificial Sequence
  Synthetic
  misc_feature (12)..(12): n is a, c, g, or u
  misc_feature (14)..(14): n is a, c, g, or u
  misc_feature (20)..(20): n is a, c, g, or u
gauugacgauangngagagnc

SEQ ID NO: 83923 - RNA, 24 nt, Artificial Sequence
  Synthetic
  misc_feature (15)..(15): n is a, c, g, or u
  misc_feature (17)..(17): n is a, c, g, or u
  misc_feature (23)..(23): n is a, c, g, or u
gaagauugacgauangngagagnc

SEQ ID NO: 83924 - RNA, 24 nt, Artificial Sequence
  Synthetic
guucuccauguucagcgcaggguc

SEQ ID NO: 83925 - RNA, 19 nt, Artificial Sequence
  Synthetic
gaaguuuucuaaaacauuc

SEQ ID NO: 83926 - RNA, 20 nt, Artificial Sequence
  Synthetic
ggaaguuuucuaaaacauuc

SEQ ID NO: 83927 - RNA, 19 nt, Artificial Sequence
  Synthetic
  misc_feature (9)..(9): n is a, c, g, or u
gcauacaanggcauuaaag

SEQ ID NO: 83928 - RNA, 21 nt, Artificial Sequence
  Synthetic
gucuuugaaguaugccucaag

SEQ ID NO: 83929 - RNA, 21 nt, Artificial Sequence
  Synthetic
guuucucaaagguggagacag

SEQ ID NO: 83930 - RNA, 23 nt, Artificial Sequence
  Synthetic
guguuucucaaagguggagacag

SEQ ID NO: 83931 - RNA, 19 nt, Artificial Sequence
  Synthetic
gaacuggagccaccagcag

SEQ ID NO: 83932 - RNA, 18 nt, Artificial Sequence
  Synthetic
gaagaugaggcauagcag

SEQ ID NO: 83933 - RNA, 19 nt, Artificial Sequence
  Synthetic
gcauggugcuggugcgcag

SEQ ID NO: 83934 - RNA, 21 nt, Artificial Sequence
  Synthetic
gcauagcagcaggaugaagag

SEQ ID NO: 83935 - RNA, 22 nt, Artificial Sequence
  Synthetic
ggcauagcagcaggaugaagag

SEQ ID NO: 83936 - RNA, 24 nt, Artificial Sequence
  Synthetic
gaggcauagcagcaggaugaagag

SEQ ID NO: 83937 - RNA, 18 nt, Artificial Sequence
  Synthetic
  misc_feature (11)..(11): n is a, c, g, or u
gucccaagcgnccccgag

SEQ ID NO: 83938 - RNA, 20 nt, Artificial Sequence
  Synthetic
  misc_feature (13)..(13): n is a, c, g, or u
gagucccaagcgnccccgag

SEQ ID NO: 83939 - RNA, 24 nt, Artificial Sequence
  Synthetic
  misc_feature (3)..(3): n is a, c, g, or u
  misc_feature (17)..(17): n is a, c, g, or u
ganagagucccaagcgnccccgag

SEQ ID NO: 83940 - RNA, 20 nt, Artificial Sequence
  Synthetic
gacaaguuggaggacaggag

SEQ ID NO: 83941 - RNA, 21 nt, Artificial Sequence
  Synthetic
ggacaaguuggaggacaggag

SEQ ID NO: 83942 - RNA, 18 nt, Artificial Sequence
  Synthetic
  misc_feature (8)..(8): n is a, c, g, or u
  misc_feature (11)..(11): n is a, c, g, or u
gauuggungangcaggag

SEQ ID NO: 83943 - RNA, 20 nt, Artificial Sequence
  Synthetic
  misc_feature (10)..(10): n is a, c, g, or u
  misc_feature (13)..(13): n is a, c, g, or u
gcgauuggungangcaggag

SEQ ID NO: 83944 - RNA, 21 nt, Artificial Sequence
  Synthetic
  misc_feature (11)..(11): n is a, c, g, or u
  misc_feature (14)..(14): n is a, c, g, or u
ggcgauuggungangcaggag

SEQ ID NO: 83945 - RNA, 21 nt, Artificial Sequence
  Synthetic
  misc_feature (4)..(4): n is a, c, g, or u
  misc_feature (7)..(7): n is a, c, g, or u
gcanagnauugcuugccugag

SEQ ID NO: 83946 - RNA, 20 nt, Artificial Sequence
  Synthetic
  misc_feature (3)..(3): n is a, c, g, or u
guncccccuagaaaauugag

SEQ ID NO: 83947 - RNA, 23 nt, Artificial Sequence
  Synthetic
  misc_feature (3)..(3): n is a, c, g, or u
  misc_feature (6)..(6): n is a, c, g, or u
gunguncccccuagaaaauugag

SEQ ID NO: 83948 - RNA, 24 nt, Artificial Sequence
  Synthetic
  misc_feature (4)..(4): n is a, c, g, or u
  misc_feature (7)..(7): n is a, c, g, or u
ggunguncccccuagaaaauugag

SEQ ID NO: 83949 - RNA, 21 nt, Artificial Sequence
  Synthetic
  misc_feature (2)..(2): n is a, c, g, or u
  misc_feature (14)..(14): n is a, c, g, or u
gnuuaaagacaggnacaguag

SEQ ID NO: 83950 - RNA, 22 nt, Artificial Sequence
  Synthetic
  misc_feature (3)..(3): n is a, c, g, or u
  misc_feature (15)..(15): n is a, c, g, or u
ggnuuaaagacaggnacaguag

SEQ ID NO: 83951 - RNA, 24 nt, Artificial Sequence
  Synthetic
  misc_feature (5)..(5): n is a, c, g, or u
  misc_feature (17)..(17): n is a, c, g, or u
gaggnuuaaagacaggnacaguag

SEQ ID NO: 83952 - RNA, 18 nt, Artificial Sequence
  Synthetic
gaugagaaggcacagacg

SEQ ID NO: 83953 - RNA, 22 nt, Artificial Sequence
  Synthetic
gcuccaccccaaaaggccuccg

SEQ ID NO: 83954 - RNA, 23 nt, Artificial Sequence
  Synthetic
ggcuccaccccaaaaggccuccg

SEQ ID NO: 83955 - RNA, 24 nt, Artificial Sequence
  Synthetic
gggcuccaccccaaaaggccuccg

SEQ ID NO: 83956 - RNA, 20 nt, Artificial Sequence
  Synthetic
gauguucuccauguucagcg

SEQ ID NO: 83957 - RNA, 19 nt, Artificial Sequence
  Synthetic
gcugccuuccugacuggcg

SEQ ID NO: 83958 - RNA, 20 nt, Artificial Sequence
  Synthetic
ggcugccuuccugacuggcg

SEQ ID NO: 83959 - RNA, 19 nt, Artificial Sequence
  Synthetic
gcgguguuugcucugaagg

SEQ ID NO: 83960 - RNA, 19 nt, Artificial Sequence
  Synthetic
gauguucuggauaauaagg

SEQ ID NO: 83961 - RNA, 20 nt, Artificial Sequence
  Synthetic
gcuccaaauucuuuauaagg

SEQ ID NO: 83962 - RNA, 23 nt, Artificial Sequence
  Synthetic
  misc_feature (2)..(2): n is a, c, g, or u
gnagcuccaaauucuuuauaagg

SEQ ID NO: 83963 - RNA, 18 nt, Artificial Sequence
  Synthetic
guuugguacagcaacagg

SEQ ID NO: 83964 - RNA, 19 nt, Artificial Sequence
  Synthetic
gguuugguacagcaacagg

SEQ ID NO: 83965 - RNA, 22 nt, Artificial Sequence
  Synthetic
gaagguuugguacagcaacagg

SEQ ID NO: 83966 - RNA, 19 nt, Artificial Sequence
  Synthetic
gaugggaugggaauacagg

SEQ ID NO: 83967 - RNA, 22 nt, Artificial Sequence
  Synthetic
gaugaugggaugggaauacagg

SEQ ID NO: 83968 - RNA, 23 nt, Artificial Sequence
  Synthetic
gaaucccagaggauugcuggugg

SEQ ID NO: 83969 - RNA, 19 nt, Artificial Sequence
  Synthetic
  misc_feature (18)..(18): n is a, c, g, or u
guagaagaauaaagcccng

SEQ ID NO: 83970 - RNA, 24 nt, Artificial Sequence
  Synthetic
  misc_feature (2)..(2): n is a, c, g, or u
  misc_feature (23)..(23): n is a, c, g, or u
gnacaguagaagaauaaagcccng

SEQ ID NO: 83971 - RNA, 21 nt, Artificial Sequence
  Synthetic
  misc_feature (17)..(17): n is a, c, g, or u
guuuaauacccuuaucnaaug

SEQ ID NO: 83972 - RNA, 22 nt, Artificial Sequence
  Synthetic
  misc_feature (18)..(18): n is a, c, g, or u
gguuuaauacccuuaucnaaug

SEQ ID NO: 83973 - RNA, 18 nt, Artificial Sequence
  Synthetic
  misc_feature (2)..(2): n is a, c, g, or u
gnagucgugcagguucug

SEQ ID NO: 83974 - RNA, 23 nt, Artificial Sequence
  Synthetic
  misc_feature (3)..(3): n is a, c, g, or u
  misc_feature (7)..(7): n is a, c, g, or u
gancagnagucgugcagguucug

SEQ ID NO: 83975 - RNA, 18 nt, Artificial Sequence
  Synthetic
gauuaacuagauguucug

SEQ ID NO: 83976 - RNA, 18 nt, Artificial Sequence
  Synthetic
  misc_feature (11)..(11): n is a, c, g, or u
gugcaguaugnugaggug

SEQ ID NO: 83977 - RNA, 20 nt, Artificial Sequence
  Synthetic
  misc_feature (13)..(13): n is a, c, g, or u
gagugcaguaugnugaggug

SEQ ID NO: 83978 - RNA, 24 nt, Artificial Sequence
  Synthetic
  misc_feature (17)..(17): n is a, c, g, or u
gccugagugcaguaugnugaggug

SEQ ID NO: 83979 - RNA, 18 nt, Artificial Sequence
  Synthetic
gaggacaggagguuggug

SEQ ID NO: 83980 - RNA, 19 nt, Artificial Sequence
  Synthetic
ggaggacaggagguuggug

SEQ ID NO: 83981 - RNA, 22 nt, Artificial Sequence
  Synthetic
guuggaggacaggagguuggug

SEQ ID NO: 83982 - RNA, 19 nt, Artificial Sequence
  Synthetic
gaucuugcagaguuuggug

SEQ ID NO: 83983 - RNA, 20 nt, Artificial Sequence
  Synthetic
ggaucuugcagaguuuggug

SEQ ID NO: 83984 - RNA, 21 nt, Artificial Sequence
  Synthetic
gggaucuugcagaguuuggug

SEQ ID NO: 83985 - RNA, 18 nt, Artificial Sequence
  Synthetic
gcacagcuuggaggcuug

SEQ ID NO: 83986 - RNA, 19 nt, Artificial Sequence
  Synthetic
ggcacagcuuggaggcuug

SEQ ID NO: 83987 - RNA, 21 nt, Artificial Sequence
  Synthetic
  misc_feature (10)..(10): n is a, c, g, or u
gccucucacncugggaucuug

SEQ ID NO: 83988 - RNA, 22 nt, Artificial Sequence
  Synthetic
  misc_feature (11)..(11): n is a, c, g, or u
ggccucucacncugggaucuug

SEQ ID NO: 83989 - RNA, 18 nt, Artificial Sequence
  Synthetic
gcagaggugaaaaaguug

SEQ ID NO: 83990 - RNA, 19 nt, Artificial Sequence
  Synthetic
ggcagaggugaaaaaguug

SEQ ID NO: 83991 - RNA, 24 nt, Artificial Sequence
  Synthetic
gauuaggcagaggugaaaaaguug

SEQ ID NO: 83992 - RNA, 19 nt, Artificial Sequence
  Synthetic
guuggaggacaggagguug

SEQ ID NO: 83993 - RNA, 19 nt, Artificial Sequence
  Synthetic
  misc_feature (19)..(19): n is a, c, g, or u
gaauuuuccgaaagcccan

SEQ ID NO: 83994 - RNA, 20 nt, Artificial Sequence
  Synthetic
  misc_feature (20)..(20): n is a, c, g, or u
ggaauuuuccgaaagcccan

SEQ ID NO: 83995 - RNA, 21 nt, Artificial Sequence
  Synthetic
  misc_feature (21)..(21): n is a, c, g, or u
gcuugccugagugcaguaugn

SEQ ID NO: 83996 - RNA, 18 nt, Artificial Sequence
  Synthetic
  misc_feature (17)..(18): n is a, c, g, or u
gguucugcauggucccnn

SEQ ID NO: 83997 - RNA, 21 nt, Artificial Sequence
  Synthetic
  misc_feature (20)..(21): n is a, c, g, or u
gcagguucugcauggucccnn

SEQ ID NO: 83998 - RNA, 23 nt, Artificial Sequence
  Synthetic
  misc_feature (22)..(23): n is a, c, g, or u
gugcagguucugcauggucccnn

SEQ ID NO: 83999 - RNA, 18 nt, Artificial Sequence
  Synthetic
  misc_feature (17)..(18): n is a, c, g, or u
gaucggcagaggagccnn

SEQ ID NO: 84000 - RNA, 19 nt, Artificial Sequence
  Synthetic
  misc_feature (18)..(19): n is a, c, g, or u
ggaucggcagaggagccnn

SEQ ID NO: 84001 - RNA, 23 nt, Artificial Sequence
  Synthetic
  misc_feature (22)..(23): n is a, c, g, or u
guauggaucggcagaggagccnn

SEQ ID NO: 84002 - RNA, 20 nt, Artificial Sequence
  Synthetic
  misc_feature (13)..(13): n is a, c, g, or u
  misc_feature (16)..(16): n is a, c, g, or u
  misc_feature (20)..(20): n is a, c, g, or u
gacuacuaggucncungaun

SEQ ID NO: 84003 - RNA, 18 nt, Artificial Sequence
  Synthetic
  misc_feature (18)..(18): n is a, c, g, or u
gauaagauaggggcauun

SEQ ID NO: 84004 - RNA, 20 nt, Artificial Sequence
  Synthetic
guugggauugaagucccaau

SEQ ID NO: 84005 - RNA, 19 nt, Artificial Sequence
  Synthetic
  misc_feature (4)..(4): n is a, c, g, or u
gagnagggguccuaggaau

SEQ ID NO: 84006 - RNA, 23 nt, Artificial Sequence
  Synthetic
  misc_feature (6)..(6): n is a, c, g, or u
gcccangaugaugggaugggaau

SEQ ID NO: 84007 - RNA, 19 nt, Artificial Sequence
  Synthetic
guccaaggaauacuaacau

SEQ ID NO: 84008 - RNA, 21 nt, Artificial Sequence
  Synthetic
gaguccaaggaauacuaacau

SEQ ID NO: 84009 - RNA, 18 nt, Artificial Sequence
  Synthetic
gcaacaggagggauacau

SEQ ID NO: 84010 - RNA, 23 nt, Artificial Sequence
  Synthetic
guacagcaacaggagggauacau

SEQ ID NO: 84011 - RNA, 24 nt, Artificial Sequence
  Synthetic
gguacagcaacaggagggauacau

SEQ ID NO: 84012 - RNA, 19 nt, Artificial Sequence
  Synthetic
gccugaacuuuaggcccau

SEQ ID NO: 84013 - RNA, 22 nt, Artificial Sequence
  Synthetic
guugccugaacuuuaggcccau

SEQ ID NO: 84014 - RNA, 18 nt, Artificial Sequence
  Synthetic
gcugaggcccacucccau

SEQ ID NO: 84015 - RNA, 19 nt, Artificial Sequence
  Synthetic
ggcugaggcccacucccau

SEQ ID NO: 84016 - RNA, 20 nt, Artificial Sequence
  Synthetic
gggcugaggcccacucccau

SEQ ID NO: 84017 - RNA, 21 nt, Artificial Sequence
  Synthetic
  misc_feature (10)..(10): n is a, c, g, or u
gaaagcccangaugaugggau

SEQ ID NO: 84018 - RNA, 21 nt, Artificial Sequence
  Synthetic
gccagguguccuuguugggau

SEQ ID NO: 84019 - RNA, 22 nt, Artificial Sequence
  Synthetic
ggccagguguccuuguugggau

SEQ ID NO: 84020 - RNA, 18 nt, Artificial Sequence
  Synthetic
gauuggagguuggggacu

SEQ ID NO: 84021 - RNA, 20 nt, Artificial Sequence
  Synthetic
gugauuggagguuggggacu

SEQ ID NO: 84022 - RNA, 22 nt, Artificial Sequence
  Synthetic
gagugauuggagguuggggacu

SEQ ID NO: 84023 - RNA, 24 nt, Artificial Sequence
  Synthetic
gugagugauuggagguuggggacu

SEQ ID NO: 84024 - RNA, 19 nt, Artificial Sequence
  Synthetic
guaggcugccuuccugacu

SEQ ID NO: 84025 - RNA, 20 nt, Artificial Sequence
  Synthetic
gguaggcugccuuccugacu

SEQ ID NO: 84026 - RNA, 21 nt, Artificial Sequence
  Synthetic
ggguaggcugccuuccugacu

SEQ ID NO: 84027 - RNA, 22 nt, Artificial Sequence
  Synthetic
gggguaggcugccuuccugacu

SEQ ID NO: 84028 - RNA, 24 nt, Artificial Sequence
  Synthetic
  misc_feature (2)..(2): n is a, c, g, or u
gngggguaggcugccuuccugacu

SEQ ID NO: 84029 - RNA, 23 nt, Artificial Sequence
  Synthetic
  misc_feature (4)..(4): n is a, c, g, or u
  misc_feature (10)..(10): n is a, c, g, or u
  misc_feature (20)..(20): n is a, c, g, or u
gcanucuucnuuucucauunacu

SEQ ID NO: 84030 - RNA, 20 nt, Artificial Sequence
  Synthetic
  misc_feature (11)..(11): n is a, c, g, or u
guaacacgagnagggguccu

SEQ ID NO: 84031 - RNA, 19 nt, Artificial Sequence
  Synthetic
  misc_feature (15)..(15): n is a, c, g, or u
gaguaacuccacagnagcu

SEQ ID NO: 84032 - RNA, 21 nt, Artificial Sequence
  Synthetic
  misc_feature (17)..(17): n is a, c, g, or u
gagaguaacuccacagnagcu

SEQ ID NO: 84033 - RNA, 24 nt, Artificial Sequence
  Synthetic
  misc_feature (8)..(8): n is a, c, g, or u
  misc_feature (14)..(14): n is a, c, g, or u
guaaauanugucunguuuggaagu

SEQ ID NO: 84034 - RNA, 18 nt, Artificial Sequence
  Synthetic
gaccaagccccagccagu

SEQ ID NO: 84035 - RNA, 18 nt, Artificial Sequence
  Synthetic
ggcuaggaguuccgcagu

SEQ ID NO: 84036 - RNA, 20 nt, Artificial Sequence
  Synthetic
gcggcuaggaguuccgcagu

SEQ ID NO: 84037 - RNA, 19 nt, Artificial Sequence
  Synthetic
gucuauaagcuggaggagu

SEQ ID NO: 84038 - RNA, 20 nt, Artificial Sequence
  Synthetic
ggucuauaagcuggaggagu

SEQ ID NO: 84039 - RNA, 20 nt, Artificial Sequence
  Synthetic
  misc_feature (10)..(10): n is a, c, g, or u
  misc_feature (14)..(14): n is a, c, g, or u
guuccuugancagnagucgu

SEQ ID NO: 84040 - RNA, 21 nt, Artificial Sequence
  Synthetic
  misc_feature (11)..(11): n is a, c, g, or u
  misc_feature (15)..(15): n is a, c, g, or u
gguuccuugancagnagucgu

SEQ ID NO: 84041 - RNA, 23 nt, Artificial Sequence
  Synthetic
  misc_feature (13)..(13): n is a, c, g, or u
  misc_feature (17)..(17): n is a, c, g, or u
gagguuccuugancagnagucgu

SEQ ID NO: 84042 - RNA, 18 nt, Artificial Sequence
  Synthetic
gugaaaaaguugcauggu

SEQ ID NO: 84043 - RNA, 19 nt, Artificial Sequence
  Synthetic
ggugaaaaaguugcauggu

SEQ ID NO: 84044 - RNA, 21 nt, Artificial Sequence
  Synthetic
  misc_feature (17)..(17): n is a, c, g, or u
guucacauuuuuugaunaugu

SEQ ID NO: 84045 - RNA, 20 nt, Artificial Sequence
  Synthetic
gucuggccagguguccuugu

SEQ ID NO: 84046 - RNA, 23 nt, Artificial Sequence
  Synthetic
  misc_feature (16)..(16): n is a, c, g, or u
guaaccccaucuuuunguuuugu

SEQ ID NO: 84047 - RNA, 18 nt, Artificial Sequence
  Synthetic
  misc_feature (2)..(2): n is a, c, g, or u
  misc_feature (17)..(17): n is a, c, g, or u
gnaaauauuugguaacnu

SEQ ID NO: 84048 - RNA, 19 nt, Artificial Sequence
  Synthetic
  misc_feature (3)..(3): n is a, c, g, or u
  misc_feature (18)..(18): n is a, c, g, or u
ggnaaauauuugguaacnu

SEQ ID NO: 84049 - RNA, 21 nt, Artificial Sequence
  Synthetic
  misc_feature (20)..(20): n is a, c, g, or u
gcucaggagacucuaaggcnu

SEQ ID NO: 84050 - RNA, 19 nt, Artificial Sequence
  Synthetic
gaaagaaucccagaggauu

SEQ ID NO: 84051 - RNA, 20 nt, Artificial Sequence
  Synthetic
ggaaagaaucccagaggauu

SEQ ID NO: 84052 - RNA, 21 nt, Artificial Sequence
  Synthetic
gggaaagaaucccagaggauu

SEQ ID NO: 84053 - RNA, 24 nt, Artificial Sequence
  Synthetic
gucgggaaagaaucccagaggauu

SEQ ID NO: 84054 - RNA, 18 nt, Artificial Sequence
  Synthetic
gaagucccaaucuggauu

SEQ ID NO: 84055 - RNA, 18 nt, Artificial Sequence
  Synthetic
ggagguuggugagugauu

SEQ ID NO: 84056 - RNA, 22 nt, Artificial Sequence
  Synthetic
  misc_feature (5)..(5): n is a, c, g, or u
  misc_feature (14)..(14): n is a, c, g, or u
gcccnguaaaguuncccaccuu

SEQ ID NO: 84057 - RNA, 21 nt, Artificial Sequence
  Synthetic
gacaaacgggcaacauaccuu

SEQ ID NO: 84058 - RNA, 22 nt, Artificial Sequence
  Synthetic
ggacaaacgggcaacauaccuu

SEQ ID NO: 84059 - RNA, 24 nt, Artificial Sequence
  Synthetic
gaggacaaacgggcaacauaccuu

SEQ ID NO: 84060 - RNA, 19 nt, Artificial Sequence
  Synthetic
guuuacacagaaaggccuu

SEQ ID NO: 84061 - RNA, 24 nt, Artificial Sequence
  Synthetic
guauuguuuacacagaaaggccuu

SEQ ID NO: 84062 - RNA, 20 nt, Artificial Sequence
  Synthetic
  misc_feature (4)..(4): n is a, c, g, or u
  misc_feature (7)..(7): n is a, c, g, or u
  misc_feature (11)..(12): n is a, c, g, or u
gucncungaunnuggaucuu

SEQ ID NO: 84063 - RNA, 21 nt, Artificial Sequence
  Synthetic
  misc_feature (5)..(5): n is a, c, g, or u
  misc_feature (8)..(8): n is a, c, g, or u
  misc_feature (12)..(13): n is a, c, g, or u
ggucncungaunnuggaucuu

SEQ ID NO: 84064 - RNA, 20 nt, Artificial Sequence
  Synthetic
  misc_feature (4)..(4): n is a, c, g, or u
gucnuuaaacaaacagucuu

SEQ ID NO: 84065 - RNA, 19 nt, Artificial Sequence
  Synthetic
  misc_feature (7)..(8): n is a, c, g, or u
gcaagannuggugggcguu

SEQ ID NO: 84066 - RNA, 20 nt, Artificial Sequence
  Synthetic
  misc_feature (8)..(9): n is a, c, g, or u
ggcaagannuggugggcguu

SEQ ID NO: 84067 - RNA, 21 nt, Artificial Sequence
  Synthetic
  misc_feature (9)..(10): n is a, c, g, or u
gggcaagannuggugggcguu

SEQ ID NO: 84068 - RNA, 18 nt, Artificial Sequence
  Synthetic
  misc_feature (7)..(8): n is a, c, g, or u
  misc_feature (15)..(15): n is a, c, g, or u
ggucccnngcuggunguu

SEQ ID NO: 84069 - RNA, 22 nt, Artificial Sequence
  Synthetic
  misc_feature (11)..(12): n is a, c, g, or u
  misc_feature (19)..(19): n is a, c, g, or u
gcauggucccnngcuggunguu

SEQ ID NO: 84070 - RNA, 20 nt, Artificial Sequence
  Synthetic
guaaugauuaacuagauguu

SEQ ID NO: 84071 - RNA, 23 nt, Artificial Sequence
  Synthetic
gaaguaaugauuaacuagauguu

SEQ ID NO: 84072 - RNA, 24 nt, Artificial Sequence
  Synthetic
ggaaguaaugauuaacuagauguu

SEQ ID NO: 84073 - RNA, 22 nt, Artificial Sequence
  Synthetic
  misc_feature (2)..(2): n is a, c, g, or u
  misc_feature (11)..(11): n is a, c, g, or u
gnccuacaaanuguucacauuu

SEQ ID NO: 84074 - RNA, 23 nt, Artificial Sequence
  Synthetic
  misc_feature (3)..(3): n is a, c, g, or u
  misc_feature (12)..(12): n is a, c, g, or u
ggnccuacaaanuguucacauuu

SEQ ID NO: 84075 - RNA, 18 nt, Artificial Sequence
  Synthetic
  misc_feature (8)..(8): n is a, c, g, or u
  misc_feature (14)..(14): n is a, c, g, or u
guaaauanugucunguuu

SEQ ID NO: 84076 - RNA, 20 nt, Artificial Sequence
  Synthetic
  misc_feature (10)..(10): n is a, c, g, or u
  misc_feature (16)..(16): n is a, c, g, or u
guguaaauanugucunguuu

SEQ ID NO: 84077 - RNA, 22 nt, Artificial Sequence
  Synthetic
  misc_feature (12)..(12): n is a, c, g, or u
  misc_feature (18)..(18): n is a, c, g, or u
guguguaaauanugucunguuu

SEQ ID NO: 84078 - RNA, 24 nt, Artificial Sequence
  Synthetic
  misc_feature (14)..(14): n is a, c, g, or u
  misc_feature (20)..(20): n is a, c, g, or u
gaguguguaaauanugucunguuu

SEQ ID NO: 84079 - RNA, 24 nt, Artificial Sequence
  Synthetic
  misc_feature (17)..(17): n is a, c, g, or u
guauauuaggaaaagangguguuu

SEQ ID NO: 84080 - RNA, 18 nt, Artificial Sequence
  Synthetic
gcugccccuuuuacacaa

SEQ ID NO: 84081 - RNA, 23 nt, Artificial Sequence
  Synthetic
guuuugcugccccuuuuacacaa

SEQ ID NO: 84082 - RNA, 24 nt, Artificial Sequence
  Synthetic
gguuuugcugccccuuuuacacaa

SEQ ID NO: 84083 - RNA, 20 nt, Artificial Sequence
  Synthetic
gacaccuggccagacgccaa

SEQ ID NO: 84084 - RNA, 18 nt, Artificial Sequence
  Synthetic
gcuaggcugugcugccaa

SEQ ID NO: 84085 - RNA, 23 nt, Artificial Sequence
  Synthetic
  misc_feature (4)..(4): n is a, c, g, or u
guanuaggaggcuguaggcauaa

SEQ ID NO: 84086 - RNA, 24 nt, Artificial Sequence
  Synthetic
  misc_feature (6)..(6): n is a, c, g, or u
  misc_feature (15)..(15): n is a, c, g, or u
gaacanuuuguaggnccacucaca

SEQ ID NO: 84087 - RNA, 21 nt, Artificial Sequence
  Synthetic
  misc_feature (10)..(10): n is a, c, g, or u
  misc_feature (18)..(18): n is a, c, g, or u
gccacaagancacaucanaca

SEQ ID NO: 84088 - RNA, 21 nt, Artificial Sequence
  Synthetic
gaaacacucauccucaggcca

SEQ ID NO: 84089 - RNA, 23 nt, Artificial Sequence
  Synthetic
gagaaacacucauccucaggcca

SEQ ID NO: 84090 - RNA, 20 nt, Artificial Sequence
  Synthetic
  misc_feature (6)..(6): n is a, c, g, or u
  misc_feature (14)..(14): n is a, c, g, or u
gcauanuacaaacnuugcca

SEQ ID NO: 84091 - RNA, 21 nt, Artificial Sequence
  Synthetic
  misc_feature (7)..(7): n is a, c, g, or u
  misc_feature (15)..(15): n is a, c, g, or u
ggcauanuacaaacnuugcca

SEQ ID NO: 84092 - RNA, 22 nt, Artificial Sequence
  Synthetic
  misc_feature (8)..(8): n is a, c, g, or u
  misc_feature (16)..(16): n is a, c, g, or u
gggcauanuacaaacnuugcca

SEQ ID NO: 84093 - RNA, 18 nt, Artificial Sequence
  Synthetic
  misc_feature (15)..(15): n is a, c, g, or u
guuaccaaauauuuncca

SEQ ID NO: 84094 - RNA, 22 nt, Artificial Sequence
  Synthetic
  misc_feature (3)..(3): n is a, c, g, or u
  misc_feature (11)..(11): n is a, c, g, or u
  misc_feature (15)..(15): n is a, c, g, or u
gancacaucanacanaaaauca

SEQ ID NO: 84095 - RNA, 20 nt, Artificial Sequence
  Synthetic
guuaguauuccuuggacuca

SEQ ID NO: 84096 - RNA, 20 nt, Artificial Sequence
  Synthetic
  misc_feature (6)..(6): n is a, c, g, or u
  misc_feature (9)..(9): n is a, c, g, or u
gcaauncunugcugggggga

SEQ ID NO: 84097 - RNA, 24 nt, Artificial Sequence
  Synthetic
  misc_feature (10)..(10): n is a, c, g, or u
  misc_feature (13)..(13): n is a, c, g, or u
gcaagcaauncunugcugggggga

SEQ ID NO: 84098 - RNA, 20 nt, Artificial Sequence
  Synthetic
  misc_feature (10)..(11): n is a, c, g, or u
  misc_feature (15)..(15): n is a, c, g, or u
  misc_feature (18)..(18): n is a, c, g, or u
gaagauccannaucnagnga

SEQ ID NO: 84099 - RNA, 21 nt, Artificial Sequence
  Synthetic
  misc_feature (11)..(12): n is a, c, g, or u
  misc_feature (16)..(16): n is a, c, g, or u
  misc_feature (19)..(19): n is a, c, g, or u
ggaagauccannaucnagnga

SEQ ID NO: 84100 - RNA, 20 nt, Artificial Sequence
  Synthetic
gcuuucaguuauauggauga

SEQ ID NO: 84101 - RNA, 22 nt, Artificial Sequence
  Synthetic
  misc_feature (2)..(2): n is a, c, g, or u
  misc_feature (15)..(15): n is a, c, g, or u
gncauggacauuganccuuaua

SEQ ID NO: 84102 - RNA, 23 nt, Artificial Sequence
  Synthetic
  misc_feature (3)..(3): n is a, c, g, or u
  misc_feature (16)..(16): n is a, c, g, or u
ggncauggacauuganccuuaua

SEQ ID NO: 84103 - RNA, 19 nt, Artificial Sequence
  Synthetic
  misc_feature (8)..(8): n is a, c, g, or u
  misc_feature (11)..(12): n is a, c, g, or u
gagaaacngunnuagagua

SEQ ID NO: 84104 - RNA, 22 nt, Artificial Sequence
  Synthetic
  misc_feature (11)..(11): n is a, c, g, or u
  misc_feature (14)..(15): n is a, c, g, or u
gaagagaaacngunnuagagua

SEQ ID NO: 84105 - RNA, 23 nt, Artificial Sequence
  Synthetic
  misc_feature (12)..(12): n is a, c, g, or u
  misc_feature (15)..(16): n is a, c, g, or u
ggaagagaaacngunnuagagua

SEQ ID NO: 84106 - RNA, 24 nt, Artificial Sequence
  Synthetic
  misc_feature (7)..(8): n is a, c, g, or u
  misc_feature (12)..(12): n is a, c, g, or u
  misc_feature (15)..(15): n is a, c, g, or u
gauccannaucnagngaccuagua

SEQ ID NO: 84107 - RNA, 18 nt, Artificial Sequence
  Synthetic
  misc_feature (15)..(15): n is a, c, g, or u
gacuucuuuccuucngua

SEQ ID NO: 84108 - RNA, 18 nt, Artificial Sequence
  Synthetic
  misc_feature (14)..(14): n is a, c, g, or u
gguuuuauccaaanguua

SEQ ID NO: 84109 - RNA, 22 nt, Artificial Sequence
  Synthetic
  misc_feature (18)..(18): n is a, c, g, or u
gcuagguuuuauccaaanguua

SEQ ID NO: 84110 - RNA, 18 nt, Artificial Sequence
  Synthetic
guuuugcugccccuuuua

SEQ ID NO: 84111 - RNA, 19 nt, Artificial Sequence
  Synthetic
gguuuugcugccccuuuua

SEQ ID NO: 84112 - RNA, 20 nt, Artificial Sequence
  Synthetic
ggguuuugcugccccuuuua

SEQ ID NO: 84113 - RNA, 18 nt, Artificial Sequence
  Synthetic
  misc_feature (15)..(15): n is a, c, g, or u
guagucaguuaugunaac

SEQ ID NO: 84114 - RNA, 18 nt, Artificial Sequence
  Synthetic
gcaaauccagauugggac

SEQ ID NO: 84115 - RNA, 20 nt, Artificial Sequence
  Synthetic
  misc_feature (3)..(3): n is a, c, g, or u
  misc_feature (18)..(18): n is a, c, g, or u
gancuaaugacucuagcnac

SEQ ID NO: 84116 - RNA, 21 nt, Artificial Sequence
  Synthetic
  misc_feature (4)..(4): n is a, c, g, or u
  misc_feature (19)..(19): n is a, c, g, or u
ggancuaaugacucuagcnac

SEQ ID NO: 84117 - RNA, 22 nt, Artificial Sequence
  Synthetic
  misc_feature (5)..(5): n is a, c, g, or u
  misc_feature (20)..(20): n is a, c, g, or u
gggancuaaugacucuagcnac

SEQ ID NO: 84118 - RNA, 23 nt, Artificial Sequence
  Synthetic
  misc_feature (6)..(6): n is a, c, g, or u
  misc_feature (21)..(21): n is a, c, g, or u
ggggancuaaugacucuagcnac

SEQ ID NO: 84119 - RNA, 24 nt, Artificial Sequence
  Synthetic
  misc_feature (7)..(7): n is a, c, g, or u
  misc_feature (22)..(22): n is a, c, g, or u
gggggancuaaugacucuagcnac

SEQ ID NO: 84120 - RNA, 18 nt, Artificial Sequence
  Synthetic
gccuucagagcaaacacc

SEQ ID NO: 84121 - RNA, 18 nt, Artificial Sequence
  Synthetic
gggcagaaucuuuccacc

SEQ ID NO: 84122 - RNA, 19 nt, Artificial Sequence
  Synthetic
ggggcagaaucuuuccacc

SEQ ID NO: 84123 - RNA, 23 nt, Artificial Sequence
  Synthetic
gcauggggcagaaucuuuccacc

SEQ ID NO: 84124 - RNA, 22 nt, Artificial Sequence
  Synthetic
  misc_feature (15)..(15): n is a, c, g, or u
gauaacucuguuguncucuccc

SEQ ID NO: 84125 - RNA, 19 nt, Artificial Sequence
  Synthetic
  misc_feature (3)..(3): n is a, c, g, or u
gunaacacuaauaugggcc

SEQ ID NO: 84126 - RNA, 24 nt, Artificial Sequence
  Synthetic
  misc_feature (8)..(8): n is a, c, g, or u
guuaugunaacacuaauaugggcc

SEQ ID NO: 84127 - RNA, 21 nt, Artificial Sequence
  Synthetic
  misc_feature (13)..(14): n is a, c, g, or u
gaacgcccaccannucuugcc

SEQ ID NO: 84128 - RNA, 23 nt, Artificial Sequence
  Synthetic
  misc_feature (15)..(16): n is a, c, g, or u
gugaacgcccaccannucuugcc

SEQ ID NO: 84129 - RNA, 19 nt, Artificial Sequence
  Synthetic
guauguugcccguuugucc

SEQ ID NO: 84130 - RNA, 20 nt, Artificial Sequence
  Synthetic
gguauguugcccguuugucc

SEQ ID NO: 84131 - RNA, 19 nt, Artificial Sequence
  Synthetic
  misc_feature (4)..(4): n is a, c, g, or u
guanuaggaggcuguaggc

SEQ ID NO: 84132 - RNA, 19 nt, Artificial Sequence
  Synthetic
guauuucccugcugguggc

SEQ ID NO: 84133 - RNA, 20 nt, Artificial Sequence
  Synthetic
  misc_feature (2)..(2): n is a, c, g, or u
  misc_feature (5)..(5): n is a, c, g, or u
gnacnaccgugugucuuggc

SEQ ID NO: 84134 - RNA, 21 nt, Artificial Sequence
  Synthetic
  misc_feature (3)..(3): n is a, c, g, or u
  misc_feature (6)..(6): n is a, c, g, or u
ggnacnaccgugugucuuggc

SEQ ID NO: 84135 - RNA, 22 nt, Artificial Sequence
  Synthetic
  misc_feature (4)..(4): n is a, c, g, or u
  misc_feature (7)..(7): n is a, c, g, or u
gggnacnaccgugugucuuggc

SEQ ID NO: 84136 - RNA, 23 nt, Artificial Sequence
  Synthetic
  misc_feature (5)..(5): n is a, c, g, or u
  misc_feature (8)..(8): n is a, c, g, or u
ggggnacnaccgugugucuuggc

SEQ ID NO: 84137 - RNA, 24 nt, Artificial Sequence
  Synthetic
  misc_feature (6)..(6): n is a, c, g, or u
  misc_feature (9)..(9): n is a, c, g, or u
gggggnacnaccgugugucuuggc

SEQ ID NO: 84138 - RNA, 20 nt, Artificial Sequence
  Synthetic
  misc_feature (10)..(10): n is a, c, g, or u
  misc_feature (13)..(13): n is a, c, g, or u
gccuccugcnucnaccaauc

SEQ ID NO: 84139 - RNA, 19 nt, Artificial Sequence
  Synthetic
gccaagucuguacagcauc

SEQ ID NO: 84140 - RNA, 20 nt, Artificial Sequence
  Synthetic
ggccaagucuguacagcauc

SEQ ID NO: 84141 - RNA, 21 nt, Artificial Sequence
  Synthetic
  misc_feature (9)..(9): n is a, c, g, or u
  misc_feature (15)..(15): n is a, c, g, or u
  misc_feature (17)..(17): n is a, c, g, or u
gacuacugncucucncnuauc

SEQ ID NO: 84142 - RNA, 23 nt, Artificial Sequence
  Synthetic
gaaucuuuccaccagcaauccuc

SEQ ID NO: 84143 - RNA, 18 nt, Artificial Sequence
  Synthetic
gcagaagaucucaaucuc

SEQ ID NO: 84144 - RNA, 18 nt, Artificial Sequence
  Synthetic
gaggacucuuggacucuc

SEQ ID NO: 84145 - RNA, 20 nt, Artificial Sequence
  Synthetic
gcccguuuguccucuaauuc

SEQ ID NO: 84146 - RNA, 23 nt, Artificial Sequence
  Synthetic
guugcccguuuguccucuaauuc

SEQ ID NO: 84147 - RNA, 21 nt, Artificial Sequence
  Synthetic
guuuacuagugccauuuguuc

SEQ ID NO: 84148 - RNA, 20 nt, Artificial Sequence
  Synthetic
gauucuuucccgaccaccag

SEQ ID NO: 84149 - RNA, 20 nt, Artificial Sequence
  Synthetic
gcugguggcuccaguucagg

SEQ ID NO: 84150 - RNA, 18 nt, Artificial Sequence
  Synthetic
  misc_feature (13)..(13): n is a, c, g, or u
ggagcaaacauunucggg

SEQ ID NO: 84151 - RNA, 22 nt, Artificial Sequence
  Synthetic
  misc_feature (17)..(17): n is a, c, g, or u
gucuggagcaaacauunucggg

SEQ ID NO: 84152 - RNA, 23 nt, Artificial Sequence
  Synthetic
  misc_feature (18)..(18): n is a, c, g, or u
ggucuggagcaaacauunucggg

SEQ ID NO: 84153 - RNA, 19 nt, Artificial Sequence
  Synthetic
gaugaugugguauuggggg

SEQ ID NO: 84154 - RNA, 20 nt, Artificial Sequence
  Synthetic
ggaugaugugguauuggggg

SEQ ID NO: 84155 - RNA, 20 nt, Artificial Sequence
  Synthetic
gcaacccccacuggcugggg

SEQ ID NO: 84156 - RNA, 23 nt, Artificial Sequence
  Synthetic
gacgcaacccccacuggcugggg

SEQ ID NO: 84157 - RNA, 18 nt, Artificial Sequence
  Synthetic
  misc_feature (11)..(11): n is a, c, g, or u
guuuguuuaangacuggg

SEQ ID NO: 84158 - RNA, 22 nt, Artificial Sequence
  Synthetic
  misc_feature (15)..(15): n is a, c, g, or u
gacuguuuguuuaangacuggg

SEQ ID NO: 84159 - RNA, 24 nt, Artificial Sequence
  Synthetic
  misc_feature (3)..(3): n is a, c, g, or u
  misc_feature (18)..(18): n is a, c, g, or u
gancuaaugacucuagcnaccugg

SEQ ID NO: 84160 - RNA, 21 nt, Artificial Sequence
  Synthetic
gccucagcccguuucuccugg

SEQ ID NO: 84161 - RNA, 22 nt, Artificial Sequence
  Synthetic
ggccucagcccguuucuccugg

SEQ ID NO: 84162 - RNA, 23 nt, Artificial Sequence
  Synthetic
gggccucagcccguuucuccugg

SEQ ID NO: 84163 - RNA, 20 nt, Artificial Sequence
  Synthetic
guuuggcuuucaguuauaug

SEQ ID NO: 84164 - RNA, 21 nt, Artificial Sequence
  Synthetic
  misc_feature (3)..(3): n is a, c, g, or u
  misc_feature (11)..(11): n is a, c, g, or u
ganugcaauunauuaugccug

SEQ ID NO: 84165 - RNA, 24 nt, Artificial Sequence
  Synthetic
  misc_feature (6)..(6): n is a, c, g, or u
  misc_feature (14)..(14): n is a, c, g, or u
gaaganugcaauunauuaugccug

SEQ ID NO: 84166 - RNA, 18 nt, Artificial Sequence
  Synthetic
gcaacuuuuucaccucug

SEQ ID NO: 84167 - RNA, 18 nt, Artificial Sequence
  Synthetic
gcaacggccaggucugug

SEQ ID NO: 84168 - RNA, 19 nt, Artificial Sequence
  Synthetic
ggcaacggccaggucugug

SEQ ID NO: 84169 - RNA, 20 nt, Artificial Sequence
  Synthetic
guuaacaggccuauugauug

SEQ ID NO: 84170 - RNA, 24 nt, Artificial Sequence
  Synthetic
  misc_feature (3)..(3): n is a, c, g, or u
  misc_feature (17)..(17): n is a, c, g, or u
gcnaccugggugggugnuaauuug

SEQ ID NO: 84171 - RNA, 18 nt, Artificial Sequence
  Synthetic
guuuacuagugccauuug

SEQ ID NO: 84172 - RNA, 23 nt, Artificial Sequence
  Synthetic
gcucaguuuacuagugccauuug

SEQ ID NO: 84173 - RNA, 24 nt, Artificial Sequence
  Synthetic
ggcucaguuuacuagugccauuug

SEQ ID NO: 84174 - RNA, 19 nt, Artificial Sequence
  Synthetic
  misc_feature (3)..(3): n is a, c, g, or u
  misc_feature (13)..(13): n is a, c, g, or u
  misc_feature (19)..(19): n is a, c, g, or u
gunaaugagaaangaagan

SEQ ID NO: 84175 - RNA, 21 nt, Artificial Sequence
  Synthetic
  misc_feature (18)..(18): n is a, c, g, or u
  misc_feature (21)..(21): n is a, c, g, or u
gcaaauccgccuccugcnucn

SEQ ID NO: 84176 - RNA, 24 nt, Artificial Sequence
  Synthetic
gccuucagagcaaacaccgcaaau

SEQ ID NO: 84177 - RNA, 18 nt, Artificial Sequence
  Synthetic
gaucucaaucucgggaau

SEQ ID NO: 84178 - RNA, 20 nt, Artificial Sequence
  Synthetic
gaacauggagaacaucacau

SEQ ID NO: 84179 - RNA, 24 nt, Artificial Sequence
  Synthetic
  misc_feature (15)..(15): n is a, c, g, or u
  misc_feature (21)..(21): n is a, c, g, or u
guuaccaaauauuunccauungau

SEQ ID NO: 84180 - RNA, 19 nt, Artificial Sequence
  Synthetic
guugguucuucuggacuau

SEQ ID NO: 84181 - RNA, 20 nt, Artificial Sequence
  Synthetic
  misc_feature (6)..(6): n is a, c, g, or u
  misc_feature (15)..(15): n is a, c, g, or u
gaacanuuuguaggnccacu

SEQ ID NO: 84182 - RNA, 22 nt, Artificial Sequence
  Synthetic
  misc_feature (8)..(8): n is a, c, g, or u
  misc_feature (17)..(17): n is a, c, g, or u
gugaacanuuuguaggnccacu

SEQ ID NO: 84183 - RNA, 20 nt, Artificial Sequence
  Synthetic
  misc_feature (7)..(8): n is a, c, g, or u
  misc_feature (12)..(12): n is a, c, g, or u
  misc_feature (15)..(15): n is a, c, g, or u
gauccannaucnagngaccu

SEQ ID NO: 84184 - RNA, 23 nt, Artificial Sequence
  Synthetic
  misc_feature (10)..(11): n is a, c, g, or u
  misc_feature (15)..(15): n is a, c, g, or u
  misc_feature (18)..(18): n is a, c, g, or u
gaagauccannaucnagngaccu

SEQ ID NO: 84185 - RNA, 24 nt, Artificial Sequence
  Synthetic
  misc_feature (11)..(12): n is a, c, g, or u
  misc_feature (16)..(16): n is a, c, g, or u
  misc_feature (19)..(19): n is a, c, g, or u
ggaagauccannaucnagngaccu

SEQ ID NO: 84186 - RNA, 19 nt, Artificial Sequence
  Synthetic
gagaggccuguauuucccu

SEQ ID NO: 84187 - RNA, 21 nt, Artificial Sequence
  Synthetic
gugagaggccuguauuucccu

SEQ ID NO: 84188 - RNA, 23 nt, Artificial Sequence
  Synthetic
  misc_feature (2)..(2): n is a, c, g, or u
gngugagaggccuguauuucccu

SEQ ID NO: 84189 - RNA, 23 nt, Artificial Sequence
  Synthetic
gaaaacuuccuguuaacaggccu

SEQ ID NO: 84190 - RNA, 19 nt, Artificial Sequence
  Synthetic
  misc_feature (6)..(6): n is a, c, g, or u
  misc_feature (15)..(15): n is a, c, g, or u
gcucunuaucgggangccu

SEQ ID NO: 84191 - RNA, 24 nt, Artificial Sequence
  Synthetic
guuuuucuuguugacaagaauccu

SEQ ID NO: 84192 - RNA, 19 nt, Artificial Sequence
  Synthetic
  misc_feature (9)..(10): n is a, c, g, or u
gaaccuuunnggcuccucu

SEQ ID NO: 84193 - RNA, 20 nt, Artificial Sequence
  Synthetic
  misc_feature (10)..(11): n is a, c, g, or u
ggaaccuuunnggcuccucu

SEQ ID NO: 84194 - RNA, 22 nt, Artificial Sequence
  Synthetic
  misc_feature (12)..(13): n is a, c, g, or u
guggaaccuuunnggcuccucu

SEQ ID NO: 84195 - RNA, 24 nt, Artificial Sequence
  Synthetic
  misc_feature (14)..(15): n is a, c, g, or u
gcguggaaccuuunnggcuccucu

SEQ ID NO: 84196 - RNA, 21 nt, Artificial Sequence
  Synthetic
guuaccaauuuucuuuugucu

SEQ ID NO: 84197 - RNA, 24 nt, Artificial Sequence
  Synthetic
gcuguuaccaauuuucuuuugucu

SEQ ID NO: 84198 - RNA, 22 nt, Artificial Sequence
  Synthetic
  misc_feature (10)..(10): n is a, c, g, or u
gacucuagcnaccugggugggu

SEQ ID NO: 84199 - RNA, 19 nt, Artificial Sequence
  Synthetic
gugugucuuggccaaaauu

SEQ ID NO: 84200 - RNA, 19 nt, Artificial Sequence
  Synthetic
  misc_feature (7)..(7): n is a, c, g, or u
  misc_feature (16)..(16): n is a, c, g, or u
gaaagunugucaacgnauu

SEQ ID NO: 84201 - RNA, 20 nt, Artificial Sequence
  Synthetic
  misc_feature (8)..(8): n is a, c, g, or u
  misc_feature (17)..(17): n is a, c, g, or u
ggaaagunugucaacgnauu

SEQ ID NO: 84202 - RNA, 24 nt, Artificial Sequence
  Synthetic
  misc_feature (12)..(12): n is a, c, g, or u
  misc_feature (21)..(21): n is a, c, g, or u
gauuggaaagunugucaacgnauu

SEQ ID NO: 84203 - RNA, 20 nt, Artificial Sequence
  Synthetic
  misc_feature (8)..(8): n is a, c, g, or u
gucaacgnauugugggucuu

SEQ ID NO: 84204 - RNA, 24 nt, Artificial Sequence
  Synthetic
  misc_feature (3)..(3): n is a, c, g, or u
  misc_feature (12)..(12): n is a, c, g, or u
gunugucaacgnauugugggucuu

SEQ ID NO: 84205 - RNA, 18 nt, Artificial Sequence
  Synthetic
gcuaugccucaucuucuu

SEQ ID NO: 84206 - RNA, 18 nt, Artificial Sequence
  Synthetic
  misc_feature (2)..(2): n is a, c, g, or u
gnuaugucauuggauguu

SEQ ID NO: 84207 - RNA, 19 nt, Artificial Sequence
  Synthetic
  misc_feature (3)..(3): n is a, c, g, or u
ggnuaugucauuggauguu

SEQ ID NO: 84208 - RNA, 20 nt, Artificial Sequence
  Synthetic
  misc_feature (4)..(4): n is a, c, g, or u
gggnuaugucauuggauguu

SEQ ID NO: 84209 - RNA, 19 nt, Artificial Sequence
  Synthetic
gucccuuuuuaccgcuguu

SEQ ID NO: 84210 - RNA, 23 nt, Artificial Sequence
  Synthetic
  misc_feature (3)..(4): n is a, c, g, or u
gunnuagaguauuuggugucuuu

SEQ ID NO: 84211 - RNA, 19 nt, Artificial Sequence
  Synthetic
guuucuccuggcucaguuu

SEQ ID NO: 84212 - RNA, 23 nt, Artificial Sequence
  Synthetic
gcccguuucuccuggcucaguuu

SEQ ID NO: 84213 - RNA, 19 nt, Artificial Sequence
  Synthetic
uguauacccaaagacaaaa

SEQ ID NO: 84214 - RNA, 20 nt, Artificial Sequence
  Synthetic
auguauacccaaagacaaaa

SEQ ID NO: 84215 - RNA, 21 nt, Artificial Sequence
  Synthetic
aauguauacccaaagacaaaa

SEQ ID NO: 84216 - RNA, 22 nt, Artificial Sequence
  Synthetic
aaauguauacccaaagacaaaa

SEQ ID NO: 84217 - RNA, 23 nt, Artificial Sequence
  Synthetic
uaaauguauacccaaagacaaaa

SEQ ID NO: 84218 - RNA, 24 nt, Artificial Sequence
  Synthetic
uuaaauguauacccaaagacaaaa

SEQ ID NO: 84219 - RNA, 18 nt, Artificial Sequence
  Synthetic
aaauguauauuaggaaaa

SEQ ID NO: 84220 - RNA, 19 nt, Artificial Sequence
  Synthetic
uaaauguauauuaggaaaa

SEQ ID NO: 84221 - RNA, 21 nt, Artificial Sequence
  Synthetic
uguaaauguauauuaggaaaa

SEQ ID NO: 84222 - RNA, 24 nt, Artificial Sequence
  Synthetic
ugguguaaauguauauuaggaaaa

SEQ ID NO: 84223 - RNA, 18 nt, Artificial Sequence
  Synthetic
acccaaagacaaaagaaa

SEQ ID NO: 84224 - RNA, 19 nt, Artificial Sequence
  Synthetic
uacccaaagacaaaagaaa

SEQ ID NO: 84225 - RNA, 20 nt, Artificial Sequence
  Synthetic
auacccaaagacaaaagaaa

SEQ ID NO: 84226 - RNA, 21 nt, Artificial Sequence
  Synthetic
uauacccaaagacaaaagaaa

SEQ ID NO: 84227 - RNA, 23 nt, Artificial Sequence
  Synthetic
uguauacccaaagacaaaagaaa

SEQ ID NO: 84228 - RNA, 24 nt, Artificial Sequence
  Synthetic
auguauacccaaagacaaaagaaa

SEQ ID NO: 84229 - RNA, 19 nt, Artificial Sequence
  Synthetic
aguccagaagaaccaacaa

SEQ ID NO: 84230 - RNA, 20 nt, Artificial Sequence
  Synthetic
uaguccagaagaaccaacaa

SEQ ID NO: 84231 - RNA, 18 nt, Artificial Sequence
  Synthetic
  misc_feature (14)..(14): n is a, c, g, or u
auuugcgggagagnacaa

SEQ ID NO: 84232 - RNA, 19 nt, Artificial Sequence
  Synthetic
  misc_feature (15)..(15): n is a, c, g, or u
uauuugcgggagagnacaa

SEQ ID NO: 84233 - RNA, 20 nt, Artificial Sequence
  Synthetic
  misc_feature (16)..(16): n is a, c, g, or u
auauuugcgggagagnacaa

SEQ ID NO: 84234 - RNA, 21 nt, Artificial Sequence
  Synthetic
  misc_feature (17)..(17): n is a, c, g, or u
uauauuugcgggagagnacaa

SEQ ID NO: 84235 - RNA, 23 nt, Artificial Sequence
  Synthetic
  misc_feature (19)..(19): n is a, c, g, or u
uguauauuugcgggagagnacaa

SEQ ID NO: 84236 - RNA, 24 nt, Artificial Sequence
  Synthetic
  misc_feature (20)..(20): n is a, c, g, or u
auguauauuugcgggagagnacaa

SEQ ID NO: 84237 - RNA, 18 nt, Artificial Sequence
  Synthetic
agcucuuguucccaagaa

SEQ ID NO: 84238 - RNA, 19 nt, Artificial Sequence
  Synthetic
uagcucuuguucccaagaa

SEQ ID NO: 84239 - RNA, 21 nt, Artificial Sequence
  Synthetic
uguagcucuuguucccaagaa

SEQ ID NO: 84240 - RNA, 22 nt, Artificial Sequence
  Synthetic
cuguagcucuuguucccaagaa

SEQ ID NO: 84241 - RNA, 24 nt, Artificial Sequence
  Synthetic
ugcuguagcucuuguucccaagaa

SEQ ID NO: 84242 - RNA, 19 nt, Artificial Sequence
  Synthetic
  misc_feature (12)..(12): n is a, c, g, or u
agaucucguacngaaggaa

SEQ ID NO: 84243 - RNA, 20 nt, Artificial Sequence
  Synthetic
  misc_feature (13)..(13): n is a, c, g, or u
aagaucucguacngaaggaa

SEQ ID NO: 84244 - RNA, 22 nt, Artificial Sequence
  Synthetic
  misc_feature (15)..(15): n is a, c, g, or u
agaagaucucguacngaaggaa

SEQ ID NO: 84245 - RNA, 23 nt, Artificial Sequence
  Synthetic
  misc_feature (1)..(1): n is a, c, g, or u
  misc_feature (16)..(16): n is a, c, g, or u
nagaagaucucguacngaaggaa

SEQ ID NO: 84246 - RNA, 24 nt, Artificial Sequence
  Synthetic
  misc_feature (2)..(2): n is a, c, g, or u
  misc_feature (17)..(17): n is a, c, g, or u
cnagaagaucucguacngaaggaa

SEQ ID NO: 84247 - RNA, 18 nt, Artificial Sequence
  Synthetic
cagcaggaugaagaggaa

SEQ ID NO: 84248 - RNA, 20 nt, Artificial Sequence
  Synthetic
agcagcaggaugaagaggaa

SEQ ID NO: 84249 - RNA, 21 nt, Artificial Sequence
  Synthetic
uagcagcaggaugaagaggaa

SEQ ID NO: 84250 - RNA, 22 nt, Artificial Sequence
  Synthetic
auagcagcaggaugaagaggaa

SEQ ID NO: 84251 - RNA, 23 nt, Artificial Sequence
  Synthetic
cauagcagcaggaugaagaggaa

SEQ ID NO: 84252 - RNA, 19 nt, Artificial Sequence
  Synthetic
  misc_feature (1)..(1): n is a, c, g, or u
  misc_feature (7)..(7): n is a, c, g, or u
ngagagncaguagucggaa

SEQ ID NO: 84253 - RNA, 21 nt, Artificial Sequence
  Synthetic
  misc_feature (1)..(1): n is a, c, g, or u
  misc_feature (3)..(3): n is a, c, g, or u
  misc_feature (9)..(9): n is a, c, g, or u
ngngagagncaguagucggaa

SEQ ID NO: 84254 - RNA, 22 nt, Artificial Sequence
  Synthetic
  misc_feature (2)..(2): n is a, c, g, or u
  misc_feature (4)..(4): n is a, c, g, or u
  misc_feature (10)..(10): n is a, c, g, or u
angngagagncaguagucggaa

SEQ ID NO: 84255 - RNA, 23 nt, Artificial Sequence
  Synthetic
  misc_feature (3)..(3): n is a, c, g, or u
  misc_feature (5)..(5): n is a, c, g, or u
  misc_feature (11)..(11): n is a, c, g, or u
uangngagagncaguagucggaa

SEQ ID NO: 84256 - RNA, 24 nt, Artificial Sequence
  Synthetic
  misc_feature (4)..(4): n is a, c, g, or u
  misc_feature (6)..(6): n is a, c, g, or u
  misc_feature (12)..(12): n is a, c, g, or u
auangngagagncaguagucggaa

SEQ ID NO: 84257 - RNA, 18 nt, Artificial Sequence
  Synthetic
acuagauguucuggauaa

SEQ ID NO: 84258 - RNA, 19 nt, Artificial Sequence
  Synthetic
aacuagauguucuggauaa

SEQ ID NO: 84259 - RNA, 20 nt, Artificial Sequence
  Synthetic
uaacuagauguucuggauaa

SEQ ID NO: 84260 - RNA, 21 nt, Artificial Sequence
  Synthetic
uuaacuagauguucuggauaa

SEQ ID NO: 84261 - RNA, 22 nt, Artificial Sequence
  Synthetic
auuaacuagauguucuggauaa

SEQ ID NO: 84262 - RNA, 24 nt, Artificial Sequence
  Synthetic
ugauuaacuagauguucuggauaa

SEQ ID NO: 84263 - RNA, 18 nt, Artificial Sequence
  Synthetic
uuuggaaguaaugauuaa

SEQ ID NO: 84264 - RNA, 20 nt, Artificial Sequence
  Synthetic
  misc_feature (1)..(1): n is a, c, g, or u
nguuuggaaguaaugauuaa

SEQ ID NO: 84265 - RNA, 21 nt, Artificial Sequence
  Synthetic
  misc_feature (2)..(2): n is a, c, g, or u
unguuuggaaguaaugauuaa

SEQ ID NO: 84266 - RNA, 22 nt, Artificial Sequence
  Synthetic
  misc_feature (3)..(3): n is a, c, g, or u
cunguuuggaaguaaugauuaa

SEQ ID NO: 84267 - RNA, 23 nt, Artificial Sequence
  Synthetic
  misc_feature (4)..(4): n is a, c, g, or u
ucunguuuggaaguaaugauuaa

SEQ ID NO: 84268 - RNA, 18 nt, Artificial Sequence
  Synthetic
  misc_feature (11)..(11): n is a, c, g, or u
ccucccagucnuuaaaca

SEQ ID NO: 84269 - RNA, 19 nt, Artificial Sequence
  Synthetic
  misc_feature (12)..(12): n is a, c, g, or u
uccucccagucnuuaaaca

SEQ ID NO: 84270 - RNA, 20 nt, Artificial Sequence
  Synthetic
  misc_feature (13)..(13): n is a, c, g, or u
cuccucccagucnuuaaaca

SEQ ID NO: 84271 - RNA, 21 nt, Artificial Sequence
  Synthetic
  misc_feature (14)..(14): n is a, c, g, or u
acuccucccagucnuuaaaca

SEQ ID NO: 84272 - RNA, 22 nt, Artificial Sequence
  Synthetic
  misc_feature (15)..(15): n is a, c, g, or u
aacuccucccagucnuuaaaca

SEQ ID NO: 84273 - RNA, 23 nt, Artificial Sequence
  Synthetic
  misc_feature (16)..(16): n is a, c, g, or u
caacuccucccagucnuuaaaca

SEQ ID NO: 84274 - RNA, 24 nt, Artificial Sequence
  Synthetic
  misc_feature (17)..(17): n is a, c, g, or u
ccaacuccucccagucnuuaaaca

SEQ ID NO: 84275 - RNA, 18 nt, Artificial Sequence
  Synthetic
aacaguaggacaugaaca

SEQ ID NO: 84276 - RNA, 20 nt, Artificial Sequence
  Synthetic
ugaacaguaggacaugaaca

SEQ ID NO: 84277 - RNA, 18 nt, Artificial Sequence
  Synthetic
  misc_feature (7)..(7): n is a, c, g, or u
uggcaangacccauaaca

SEQ ID NO: 84278 - RNA, 20 nt, Artificial Sequence
  Synthetic
  misc_feature (9)..(9): n is a, c, g, or u
uguggcaangacccauaaca

SEQ ID NO: 84279 - RNA, 21 nt, Artificial Sequence
  Synthetic
  misc_feature (10)..(10): n is a, c, g, or u
uuguggcaangacccauaaca

SEQ ID NO: 84280 - RNA, 22 nt, Artificial Sequence
  Synthetic
  misc_feature (11)..(11): n is a, c, g, or u
cuuguggcaangacccauaaca

SEQ ID NO: 84281 - RNA, 23 nt, Artificial Sequence
  Synthetic
  misc_feature (12)..(12): n is a, c, g, or u
ucuuguggcaangacccauaaca

SEQ ID NO: 84282 - RNA, 24 nt, Artificial Sequence
  Synthetic
  misc_feature (1)..(1): n is a, c, g, or u
  misc_feature (13)..(13): n is a, c, g, or u
nucuuguggcaangacccauaaca

SEQ ID NO: 84283 - RNA, 18 nt, Artificial Sequence
  Synthetic
ucaauaggccuguuaaca

SEQ ID NO: 84284 - RNA, 19 nt, Artificial Sequence
  Synthetic
aucaauaggccuguuaaca

SEQ ID NO: 84285 - RNA, 20 nt, Artificial Sequence
  Synthetic
aaucaauaggccuguuaaca

SEQ ID NO: 84286 - RNA, 18 nt, Artificial Sequence
  Synthetic
uccacacuccgaaagaca

SEQ ID NO: 84287 - RNA, 19 nt, Artificial Sequence
  Synthetic
auccacacuccgaaagaca

SEQ ID NO: 84288 - RNA, 20 nt, Artificial Sequence
  Synthetic
aauccacacuccgaaagaca

SEQ ID NO: 84289 - RNA, 18 nt, Artificial Sequence
  Synthetic
cgaauuuuggccaagaca

SEQ ID NO: 84290 - RNA, 20 nt, Artificial Sequence
  Synthetic
ugcgaauuuuggccaagaca

SEQ ID NO: 84291 - RNA, 18 nt, Artificial Sequence
  Synthetic
ucuuccaaaagugagaca

SEQ ID NO: 84292 - RNA, 19 nt, Artificial Sequence
  Synthetic
cucuuccaaaagugagaca

SEQ ID NO: 84293 - RNA, 20 nt, Artificial Sequence
  Synthetic
ucucuuccaaaagugagaca

SEQ ID NO: 84294 - RNA, 21 nt, Artificial Sequence
  Synthetic
uucucuuccaaaagugagaca

SEQ ID NO: 84295 - RNA, 22 nt, Artificial Sequence
  Synthetic
uuucucuuccaaaagugagaca

SEQ ID NO: 84296 - RNA, 24 nt, Artificial Sequence
  Synthetic
  misc_feature (1)..(1): n is a, c, g, or u
nguuucucuuccaaaagugagaca

SEQ ID NO: 84297 - RNA, 18 nt, Artificial Sequence
  Synthetic
aggacaaguuggaggaca

SEQ ID NO: 84298 - RNA, 19 nt, Artificial Sequence
  Synthetic
caggacaaguuggaggaca

SEQ ID NO: 84299 - RNA, 20 nt, Artificial Sequence
  Synthetic
ccaggacaaguuggaggaca

SEQ ID NO: 84300 - RNA, 20 nt, Artificial Sequence
  Synthetic
uggcccaugaccaagcccca

SEQ ID NO: 84301 - RNA, 21 nt, Artificial Sequence
  Synthetic
auggcccaugaccaagcccca

SEQ ID NO: 84302 - RNA, 23 nt, Artificial Sequence
  Synthetic
ugauggcccaugaccaagcccca

SEQ ID NO: 84303 - RNA, 24 nt, Artificial Sequence
  Synthetic
cugauggcccaugaccaagcccca

SEQ ID NO: 84304 - RNA, 18 nt, Artificial Sequence
  Synthetic
  misc_feature (14)..(14): n is a, c, g, or u
auccaaugacauanccca

SEQ ID NO: 84305 - RNA, 19 nt, Artificial Sequence
  Synthetic
  misc_feature (15)..(15): n is a, c, g, or u
cauccaaugacauanccca

SEQ ID NO: 84306 - RNA, 20 nt, Artificial Sequence
  Synthetic
  misc_feature (16)..(16): n is a, c, g, or u
acauccaaugacauanccca

SEQ ID NO: 84307 - RNA, 21 nt, Artificial Sequence
  Synthetic
  misc_feature (17)..(17): n is a, c, g, or u
aacauccaaugacauanccca

SEQ ID NO: 84308 - RNA, 22 nt, Artificial Sequence
  Synthetic
  misc_feature (18)..(18): n is a, c, g, or u
uaacauccaaugacauanccca

SEQ ID NO: 84309 - RNA, 23 nt, Artificial Sequence
  Synthetic
  misc_feature (19)..(19): n is a, c, g, or u
auaacauccaaugacauanccca

SEQ ID NO: 84310 - RNA, 24 nt, Artificial Sequence
  Synthetic
  misc_feature (20)..(20): n is a, c, g, or u
cauaacauccaaugacauanccca

SEQ ID NO: 84311 - RNA, 19 nt, Artificial Sequence
  Synthetic
uggucgggaaagaauccca

SEQ ID NO: 84312 - RNA, 22 nt, Artificial Sequence
  Synthetic
ugguggucgggaaagaauccca

SEQ ID NO: 84313 - RNA, 23 nt, Artificial Sequence
  Synthetic
cugguggucgggaaagaauccca

SEQ ID NO: 84314 - RNA, 24 nt, Artificial Sequence
  Synthetic
acugguggucgggaaagaauccca

SEQ ID NO: 84315 - RNA, 18 nt, Artificial Sequence
  Synthetic
ccauauaacugaaagcca

SEQ ID NO: 84316 - RNA, 19 nt, Artificial Sequence
  Synthetic
uccauauaacugaaagcca

SEQ ID NO: 84317 - RNA, 20 nt, Artificial Sequence
  Synthetic
auccauauaacugaaagcca

SEQ ID NO: 84318 - RNA, 18 nt, Artificial Sequence
  Synthetic
cucugaaggcuggaucca

SEQ ID NO: 84319 - RNA, 20 nt, Artificial Sequence
  Synthetic
ugcucugaaggcuggaucca

SEQ ID NO: 84320 - RNA, 18 nt, Artificial Sequence
  Synthetic
  misc_feature (1)..(1): n is a, c, g, or u
ncccaccuuaugagucca

SEQ ID NO: 84321 - RNA, 19 nt, Artificial Sequence
  Synthetic
  misc_feature (2)..(2): n is a, c, g, or u
uncccaccuuaugagucca

SEQ ID NO: 84322 - RNA, 20 nt, Artificial Sequence
  Synthetic
  misc_feature (3)..(3): n is a, c, g, or u
uuncccaccuuaugagucca

SEQ ID NO: 84323 - RNA, 18 nt, Artificial Sequence
  Synthetic
  misc_feature (1)..(1): n is a, c, g, or u
  misc_feature (10)..(10): n is a, c, g, or u
ncguugacanacuuucca

SEQ ID NO: 84324 - RNA, 19 nt, Artificial Sequence
  Synthetic
  misc_feature (2)..(2): n is a, c, g, or u
  misc_feature (11)..(11): n is a, c, g, or u
uncguugacanacuuucca

SEQ ID NO: 84325 - RNA, 20 nt, Artificial Sequence
  Synthetic
  misc_feature (3)..(3): n is a, c, g, or u
  misc_feature (12)..(12): n is a, c, g, or u
auncguugacanacuuucca

SEQ ID NO: 84326 - RNA, 21 nt, Artificial Sequence
  Synthetic
  misc_feature (4)..(4): n is a, c, g, or u
  misc_feature (13)..(13): n is a, c, g, or u
aauncguugacanacuuucca

SEQ ID NO: 84327 - RNA, 22 nt, Artificial Sequence
  Synthetic
  misc_feature (5)..(5): n is a, c, g, or u
  misc_feature (14)..(14): n is a, c, g, or u
caauncguugacanacuuucca

SEQ ID NO: 84328 - RNA, 23 nt, Artificial Sequence
  Synthetic
  misc_feature (6)..(6): n is a, c, g, or u
  misc_feature (15)..(15): n is a, c, g, or u
acaauncguugacanacuuucca

SEQ ID NO: 84329 - RNA, 24 nt, Artificial Sequence
  Synthetic
  misc_feature (7)..(7): n is a, c, g, or u
  misc_feature (16)..(16): n is a, c, g, or u
cacaauncguugacanacuuucca

SEQ ID NO: 84330 - RNA, 19 nt, Artificial Sequence
  Synthetic
uguugauaagauaggggca

SEQ ID NO: 84331 - RNA, 21 nt, Artificial Sequence
  Synthetic
aguguugauaagauaggggca

SEQ ID NO: 84332 - RNA, 22 nt, Artificial Sequence
  Synthetic
aaguguugauaagauaggggca

SEQ ID NO: 84333 - RNA, 19 nt, Artificial Sequence
  Synthetic
agaggugaagcgaagugca

SEQ ID NO: 84334 - RNA, 20 nt, Artificial Sequence
  Synthetic
cagaggugaagcgaagugca

SEQ ID NO: 84335 - RNA, 18 nt, Artificial Sequence
  Synthetic
  misc_feature (16)..(16): n is a, c, g, or u
ucggucguugacauunca

SEQ ID NO: 84336 - RNA, 18 nt, Artificial Sequence
  Synthetic
aguaggacaugaacaaga

SEQ ID NO: 84337 - RNA, 19 nt, Artificial Sequence
  Synthetic
caguaggacaugaacaaga

SEQ ID NO: 84338 - RNA, 20 nt, Artificial Sequence
  Synthetic
acaguaggacaugaacaaga

SEQ ID NO: 84339 - RNA, 19 nt, Artificial Sequence
  Synthetic
uguaagaccuugggcaaga

SEQ ID NO: 84340 - RNA, 20 nt, Artificial Sequence
  Synthetic
auguaagaccuugggcaaga

SEQ ID NO: 84341 - RNA, 19 nt, Artificial Sequence
  Synthetic
  misc_feature (13)..(13): n is a, c, g, or u
  misc_feature (15)..(15): n is a, c, g, or u
agauugacgauangngaga

SEQ ID NO: 84342 - RNA, 20 nt, Artificial Sequence
  Synthetic
  misc_feature (14)..(14): n is a, c, g, or u
  misc_feature (16)..(16): n is a, c, g, or u
aagauugacgauangngaga

SEQ ID NO: 84343 - RNA, 22 nt, Artificial Sequence
  Synthetic
  misc_feature (16)..(16): n is a, c, g, or u
  misc_feature (18)..(18): n is a, c, g, or u
agaagauugacgauangngaga

SEQ ID NO: 84344 - RNA, 24 nt, Artificial Sequence
  Synthetic
  misc_feature (18)..(18): n is a, c, g, or u
  misc_feature (20)..(20): n is a, c, g, or u
cgagaagauugacgauangngaga

SEQ ID NO: 84345 - RNA, 18 nt, Artificial Sequence
  Synthetic
agugaaagccugcuuaga

SEQ ID NO: 84346 - RNA, 19 nt, Artificial Sequence
  Synthetic
aagugaaagccugcuuaga

SEQ ID NO: 84347 - RNA, 20 nt, Artificial Sequence
  Synthetic
aaagugaaagccugcuuaga

SEQ ID NO: 84348 - RNA, 22 nt, Artificial Sequence
  Synthetic
agaaagugaaagccugcuuaga

SEQ ID NO: 84349 - RNA, 24 nt, Artificial Sequence
  Synthetic
cgagaaagugaaagccugcuuaga

SEQ ID NO: 84350 - RNA, 18 nt, Artificial Sequence
  Synthetic
agacggagaaggggacga

SEQ ID NO: 84351 - RNA, 19 nt, Artificial Sequence
  Synthetic
cagacggagaaggggacga

SEQ ID NO: 84352 - RNA, 18 nt, Artificial Sequence
  Synthetic
ccuucgucugcgaggcga

SEQ ID NO: 84353 - RNA, 19 nt, Artificial Sequence
  Synthetic
accuucgucugcgaggcga

SEQ ID NO: 84354 - RNA, 18 nt, Artificial Sequence
  Synthetic
aggguccccaauccucga

SEQ ID NO: 84355 - RNA, 19 nt, Artificial Sequence
  Synthetic
caggguccccaauccucga

SEQ ID NO: 84356 - RNA, 18 nt, Artificial Sequence
  Synthetic
uccaacugguggucggga

SEQ ID NO: 84357 - RNA, 19 nt, Artificial Sequence
  Synthetic
auccaacugguggucggga

SEQ ID NO: 84358 - RNA, 18 nt, Artificial Sequence
  Synthetic
cagccuagcagccaugga

SEQ ID NO: 84359 - RNA, 19 nt, Artificial Sequence
  Synthetic
acagccuagcagccaugga

SEQ ID NO: 84360 - RNA, 20 nt, Artificial Sequence
  Synthetic
cacagccuagcagccaugga

SEQ ID NO: 84361 - RNA, 18 nt, Artificial Sequence
  Synthetic
  misc_feature (5)..(5): n is a, c, g, or u
  misc_feature (11)..(11): n is a, c, g, or u
aauanugucunguuugga

SEQ ID NO: 84362 - RNA, 19 nt, Artificial Sequence
  Synthetic
  misc_feature (6)..(6): n is a, c, g, or u
  misc_feature (12)..(12): n is a, c, g, or u
aaauanugucunguuugga

SEQ ID NO: 84363 - RNA, 20 nt, Artificial Sequence
  Synthetic
  misc_feature (7)..(7): n is a, c, g, or u
  misc_feature (13)..(13): n is a, c, g, or u
uaaauanugucunguuugga

SEQ ID NO: 84364 - RNA, 22 nt, Artificial Sequence
  Synthetic
  misc_feature (9)..(9): n is a, c, g, or u
  misc_feature (15)..(15): n is a, c, g, or u
uguaaauanugucunguuugga

SEQ ID NO: 84365 - RNA, 24 nt, Artificial Sequence
  Synthetic
  misc_feature (11)..(11): n is a, c, g, or u
  misc_feature (17)..(17): n is a, c, g, or u
uguguaaauanugucunguuugga

SEQ ID NO: 84366 - RNA, 18 nt, Artificial Sequence
  Synthetic
  misc_feature (13)..(13): n is a, c, g, or u
uccgaaagcccangauga

SEQ ID NO: 84367 - RNA, 19 nt, Artificial Sequence
  Synthetic
  misc_feature (14)..(14): n is a, c, g, or u
uuccgaaagcccangauga

SEQ ID NO: 84368 - RNA, 20 nt, Artificial Sequence
  Synthetic
  misc_feature (15)..(15): n is a, c, g, or u
uuuccgaaagcccangauga

SEQ ID NO: 84369 - RNA, 21 nt, Artificial Sequence
  Synthetic
  misc_feature (16)..(16): n is a, c, g, or u
uuuuccgaaagcccangauga

SEQ ID NO: 84370 - RNA, 22 nt, Artificial Sequence
  Synthetic
  misc_feature (17)..(17): n is a, c, g, or u
auuuuccgaaagcccangauga

SEQ ID NO: 84371 - RNA, 23 nt, Artificial Sequence
  Synthetic
  misc_feature (18)..(18): n is a, c, g, or u
aauuuuccgaaagcccangauga

SEQ ID NO: 84372 - RNA, 18 nt, Artificial Sequence
  Synthetic
agcccuacgaaccacuga

SEQ ID NO: 84373 - RNA, 19 nt, Artificial Sequence
  Synthetic
aagcccuacgaaccacuga

SEQ ID NO: 84374 - RNA, 20 nt, Artificial Sequence
  Synthetic
aaagcccuacgaaccacuga

SEQ ID NO: 84375 - RNA, 20 nt, Artificial Sequence
  Synthetic
agggguccuaggaauccuga

SEQ ID NO: 84376 - RNA, 21 nt, Artificial Sequence
  Synthetic
  misc_feature (1)..(1): n is a, c, g, or u
nagggguccuaggaauccuga

SEQ ID NO: 84377 - RNA, 23 nt, Artificial Sequence
  Synthetic
  misc_feature (3)..(3): n is a, c, g, or u
agnagggguccuaggaauccuga

SEQ ID NO: 84378 - RNA, 18 nt, Artificial Sequence
  Synthetic
  misc_feature (1)..(1): n is a, c, g, or u
  misc_feature (10)..(10): n is a, c, g, or u
nucccgauanagagcuga

SEQ ID NO: 84379 - RNA, 19 nt, Artificial Sequence
  Synthetic
  misc_feature (2)..(2): n is a, c, g, or u
  misc_feature (11)..(11): n is a, c, g, or u
cnucccgauanagagcuga

SEQ ID NO: 84380 - RNA, 22 nt, Artificial Sequence
  Synthetic
  misc_feature (5)..(5): n is a, c, g, or u
  misc_feature (14)..(14): n is a, c, g, or u
aggcnucccgauanagagcuga

SEQ ID NO: 84381 - RNA, 23 nt, Artificial Sequence
  Synthetic
  misc_feature (6)..(6): n is a, c, g, or u
  misc_feature (15)..(15): n is a, c, g, or u
aaggcnucccgauanagagcuga

SEQ ID NO: 84382 - RNA, 24 nt, Artificial Sequence
  Synthetic
  misc_feature (7)..(7): n is a, c, g, or u
  misc_feature (16)..(16): n is a, c, g, or u
uaaggcnucccgauanagagcuga

SEQ ID NO: 84383 - RNA, 18 nt, Artificial Sequence
  Synthetic
augauuaggcagagguga

SEQ ID NO: 84384 - RNA, 20 nt, Artificial Sequence
  Synthetic
agaugauuaggcagagguga

SEQ ID NO: 84385 - RNA, 22 nt, Artificial Sequence
  Synthetic
agagaugauuaggcagagguga

SEQ ID NO: 84386 - RNA, 23 nt, Artificial Sequence
  Synthetic
aagagaugauuaggcagagguga

SEQ ID NO: 84387 - RNA, 24 nt, Artificial Sequence
  Synthetic
caagagaugauuaggcagagguga

SEQ ID NO: 84388 - RNA, 19 nt, Artificial Sequence
  Synthetic
  misc_feature (18)..(18): n is a, c, g, or u
agagcugaggcgguaucna

SEQ ID NO: 84389 - RNA, 20 nt, Artificial Sequence
  Synthetic
  misc_feature (1)..(1): n is a, c, g, or u
  misc_feature (19)..(19): n is a, c, g, or u
nagagcugaggcgguaucna

SEQ ID NO: 84390 - RNA, 21 nt, Artificial Sequence
  Synthetic
  misc_feature (2)..(2): n is a, c, g, or u
  misc_feature (20)..(20): n is a, c, g, or u
anagagcugaggcgguaucna

SEQ ID NO: 84391 - RNA, 22 nt, Artificial Sequence
  Synthetic
  misc_feature (3)..(3): n is a, c, g, or u
  misc_feature (21)..(21): n is a, c, g, or u
uanagagcugaggcgguaucna

SEQ ID NO: 84392 - RNA, 23 nt, Artificial Sequence
  Synthetic
  misc_feature (4)..(4): n is a, c, g, or u
  misc_feature (22)..(22): n is a, c, g, or u
auanagagcugaggcgguaucna

SEQ ID NO: 84393 - RNA, 18 nt, Artificial Sequence
  Synthetic
  misc_feature (7)..(7): n is a, c, g, or u
  misc_feature (13)..(13): n is a, c, g, or u
cuuaucnaauggnaaaua

SEQ ID NO: 84394 - RNA, 19 nt, Artificial Sequence
  Synthetic
  misc_feature (8)..(8): n is a, c, g, or u
  misc_feature (14)..(14): n is a, c, g, or u
ccuuaucnaauggnaaaua

SEQ ID NO: 84395 - RNA, 20 nt, Artificial Sequence
  Synthetic
  misc_feature (9)..(9): n is a, c, g, or u
  misc_feature (15)..(15): n is a, c, g, or u
cccuuaucnaauggnaaaua

SEQ ID NO: 84396 - RNA, 21 nt, Artificial Sequence
  Synthetic
  misc_feature (10)..(10): n is a, c, g, or u
  misc_feature (16)..(16): n is a, c, g, or u
acccuuaucnaauggnaaaua

SEQ ID NO: 84397 - RNA, 22 nt, Artificial Sequence
  Synthetic
  misc_feature (11)..(11): n is a, c, g, or u
  misc_feature (17)..(17): n is a, c, g, or u
uacccuuaucnaauggnaaaua

SEQ ID NO: 84398 - RNA, 23 nt, Artificial Sequence
  Synthetic
  misc_feature (12)..(12): n is a, c, g, or u
  misc_feature (18)..(18): n is a, c, g, or u
auacccuuaucnaauggnaaaua

SEQ ID NO: 84399 - RNA, 24 nt, Artificial Sequence
  Synthetic
  misc_feature (13)..(13): n is a, c, g, or u
  misc_feature (19)..(19): n is a, c, g, or u
aauacccuuaucnaauggnaaaua

SEQ ID NO: 84400 - RNA, 18 nt, Artificial Sequence
  Synthetic
uaaaaccuagcaggcaua

SEQ ID NO: 84401 - RNA, 19 nt, Artificial Sequence
  Synthetic
auaaaaccuagcaggcaua

SEQ ID NO: 84402 - RNA, 22 nt, Artificial Sequence
  Synthetic
uggauaaaaccuagcaggcaua

SEQ ID NO: 84403 - RNA, 23 nt, Artificial Sequence
  Synthetic
uuggauaaaaccuagcaggcaua

SEQ ID NO: 84404 - RNA, 24 nt, Artificial Sequence
  Synthetic
uuuggauaaaaccuagcaggcaua

SEQ ID NO: 84405 - RNA, 18 nt, Artificial Sequence
  Synthetic
  misc_feature (5)..(5): n is a, c, g, or u
uguunacauaacugacua

SEQ ID NO: 84406 - RNA, 20 nt, Artificial Sequence
  Synthetic
  misc_feature (7)..(7): n is a, c, g, or u
aguguunacauaacugacua

SEQ ID NO: 84407 - RNA, 21 nt, Artificial Sequence
  Synthetic
  misc_feature (8)..(8): n is a, c, g, or u
uaguguunacauaacugacua

SEQ ID NO: 84408 - RNA, 22 nt, Artificial Sequence
  Synthetic
  misc_feature (9)..(9): n is a, c, g, or u
uuaguguunacauaacugacua

SEQ ID NO: 84409 - RNA, 23 nt, Artificial Sequence
  Synthetic
  misc_feature (10)..(10): n is a, c, g, or u
auuaguguunacauaacugacua

SEQ ID NO: 84410 - RNA, 24 nt, Artificial Sequence
  Synthetic
  misc_feature (11)..(11): n is a, c, g, or u
uauuaguguunacauaacugacua

SEQ ID NO: 84411 - RNA, 18 nt, Artificial Sequence
  Synthetic
  misc_feature (8)..(8): n is a, c, g, or u
  misc_feature (11)..(11): n is a, c, g, or u
acacggunguncccccua

SEQ ID NO: 84412 - RNA, 19 nt, Artificial Sequence
  Synthetic
  misc_feature (9)..(9): n is a, c, g, or u
  misc_feature (12)..(12): n is a, c, g, or u
cacacggunguncccccua

SEQ ID NO: 84413 - RNA, 20 nt, Artificial Sequence
  Synthetic
  misc_feature (10)..(10): n is a, c, g, or u
  misc_feature (13)..(13): n is a, c, g, or u
acacacggunguncccccua

SEQ ID NO: 84414 - RNA, 22 nt, Artificial Sequence
  Synthetic
  misc_feature (12)..(12): n is a, c, g, or u
  misc_feature (15)..(15): n is a, c, g, or u
agacacacggunguncccccua

SEQ ID NO: 84415 - RNA, 23 nt, Artificial Sequence
  Synthetic
  misc_feature (13)..(13): n is a, c, g, or u
  misc_feature (16)..(16): n is a, c, g, or u
aagacacacggunguncccccua

SEQ ID NO: 84416 - RNA, 24 nt, Artificial Sequence
  Synthetic
  misc_feature (14)..(14): n is a, c, g, or u
  misc_feature (17)..(17): n is a, c, g, or u
caagacacacggunguncccccua

SEQ ID NO: 84417 - RNA, 18 nt, Artificial Sequence
  Synthetic
  misc_feature (5)..(5): n is a, c, g, or u
  misc_feature (11)..(11): n is a, c, g, or u
  misc_feature (16)..(16): n is a, c, g, or u
cauancccaunaaaunua

SEQ ID NO: 84418 - RNA, 19 nt, Artificial Sequence
  Synthetic
  misc_feature (6)..(6): n is a, c, g, or u
  misc_feature (12)..(12): n is a, c, g, or u
  misc_feature (17)..(17): n is a, c, g, or u
acauancccaunaaaunua

SEQ ID NO: 84419 - RNA, 21 nt, Artificial Sequence
  Synthetic
  misc_feature (8)..(8): n is a, c, g, or u
  misc_feature (14)..(14): n is a, c, g, or u
  misc_feature (19)..(19): n is a, c, g, or u
ugacauancccaunaaaunua

SEQ ID NO: 84420 - RNA, 22 nt, Artificial Sequence
  Synthetic
  misc_feature (9)..(9): n is a, c, g, or u
  misc_feature (15)..(15): n is a, c, g, or u
  misc_feature (20)..(20): n is a, c, g, or u
augacauancccaunaaaunua

SEQ ID NO: 84421 - RNA, 23 nt, Artificial Sequence
  Synthetic
  misc_feature (10)..(10): n is a, c, g, or u
  misc_feature (16)..(16): n is a, c, g, or u
  misc_feature (21)..(21): n is a, c, g, or u
aaugacauancccaunaaaunua

SEQ ID NO: 84422 - RNA, 24 nt, Artificial Sequence
  Synthetic
  misc_feature (11)..(11): n is a, c, g, or u
  misc_feature (17)..(17): n is a, c, g, or u
  misc_feature (22)..(22): n is a, c, g, or u
caaugacauancccaunaaaunua

SEQ ID NO: 84423 - RNA, 18 nt, Artificial Sequence
  Synthetic
uaagguuuaauacccuua

SEQ ID NO: 84424 - RNA, 19 nt, Artificial Sequence
  Synthetic
auaagguuuaauacccuua

SEQ ID NO: 84425 - RNA, 20 nt, Artificial Sequence
  Synthetic
aauaagguuuaauacccuua

SEQ ID NO: 84426 - RNA, 21 nt, Artificial Sequence
  Synthetic
uaauaagguuuaauacccuua

SEQ ID NO: 84427 - RNA, 22 nt, Artificial Sequence
  Synthetic
auaauaagguuuaauacccuua

SEQ ID NO: 84428 - RNA, 18 nt, Artificial Sequence
  Synthetic
  misc_feature (1)..(1): n is a, c, g, or u
nguguuguuucucucuua

SEQ ID NO: 84429 - RNA, 19 nt, Artificial Sequence
  Synthetic
  misc_feature (2)..(2): n is a, c, g, or u
anguguuguuucucucuua

SEQ ID NO: 84430 - RNA, 20 nt, Artificial Sequence
  Synthetic
  misc_feature (3)..(3): n is a, c, g, or u
uanguguuguuucucucuua

SEQ ID NO: 84431 - RNA, 21 nt, Artificial Sequence
  Synthetic
  misc_feature (4)..(4): n is a, c, g, or u
cuanguguuguuucucucuua

SEQ ID NO: 84432 - RNA, 23 nt, Artificial Sequence
  Synthetic
  misc_feature (6)..(6): n is a, c, g, or u
cgcuanguguuguuucucucuua

SEQ ID NO: 84433 - RNA, 18 nt, Artificial Sequence
  Synthetic
aagucagaaggcaaaaac

SEQ ID NO: 84434 - RNA, 20 nt, Artificial Sequence
  Synthetic
agaagucagaaggcaaaaac

SEQ ID NO: 84435 - RNA, 21 nt, Artificial Sequence
  Synthetic
aagaagucagaaggcaaaaac

SEQ ID NO: 84436 - RNA, 22 nt, Artificial Sequence
  Synthetic
aaagaagucagaaggcaaaaac

SEQ ID NO: 84437 - RNA, 18 nt, Artificial Sequence
  Synthetic
caaaagaaaauugguaac

SEQ ID NO: 84438 - RNA, 19 nt, Artificial Sequence
  Synthetic
acaaaagaaaauugguaac

SEQ ID NO: 84439 - RNA, 21 nt, Artificial Sequence
  Synthetic
agacaaaagaaaauugguaac

SEQ ID NO: 84440 - RNA, 22 nt, Artificial Sequence
  Synthetic
aagacaaaagaaaauugguaac

SEQ ID NO: 84441 - RNA, 23 nt, Artificial Sequence
  Synthetic
aaagacaaaagaaaauugguaac

SEQ ID NO: 84442 - RNA, 24 nt, Artificial Sequence
  Synthetic
caaagacaaaagaaaauugguaac

SEQ ID NO: 84443 - RNA, 18 nt, Artificial Sequence
  Synthetic
caagaaaugugaaaccac

SEQ ID NO: 84444 - RNA, 19 nt, Artificial Sequence
  Synthetic
acaagaaaugugaaaccac

SEQ ID NO: 84445 - RNA, 21 nt, Artificial Sequence
  Synthetic
agacaagaaaugugaaaccac

SEQ ID NO: 84446 - RNA, 23 nt, Artificial Sequence
  Synthetic
ugagacaagaaaugugaaaccac

SEQ ID NO: 84447 - RNA, 18 nt, Artificial Sequence
  Synthetic
  misc_feature (11)..(11): n is a, c, g, or u
uuccaaauuancacccac

SEQ ID NO: 84448 - RNA, 19 nt, Artificial Sequence
  Synthetic
  misc_feature (12)..(12): n is a, c, g, or u
cuuccaaauuancacccac

SEQ ID NO: 84449 - RNA, 20 nt, Artificial Sequence
  Synthetic
  misc_feature (13)..(13): n is a, c, g, or u
ucuuccaaauuancacccac

SEQ ID NO: 84450 - RNA, 21 nt, Artificial Sequence
  Synthetic
  misc_feature (14)..(14): n is a, c, g, or u
aucuuccaaauuancacccac

SEQ ID NO: 84451 - RNA, 24 nt, Artificial Sequence
  Synthetic
  misc_feature (17)..(17): n is a, c, g, or u
uggaucuuccaaauuancacccac

SEQ ID NO: 84452 - RNA, 19 nt, Artificial Sequence
  Synthetic
  misc_feature (4)..(5): n is a, c, g, or u
agannuggugggcguucac

SEQ ID NO: 84453 - RNA, 20 nt, Artificial Sequence
  Synthetic
  misc_feature (5)..(6): n is a, c, g, or u
aagannuggugggcguucac

SEQ ID NO: 84454 - RNA, 21 nt, Artificial Sequence
  Synthetic
  misc_feature (6)..(7): n is a, c, g, or u
caagannuggugggcguucac

SEQ ID NO: 84455 - RNA, 20 nt, Artificial Sequence
  Synthetic
aggacaaacgggcaacauac

SEQ ID NO: 84456 - RNA, 22 nt, Artificial Sequence
  Synthetic
agaggacaaacgggcaacauac

SEQ ID NO: 84457 - RNA, 23 nt, Artificial Sequence
  Synthetic
uagaggacaaacgggcaacauac

SEQ ID NO: 84458 - RNA, 24 nt, Artificial Sequence
  Synthetic
uuagaggacaaacgggcaacauac

SEQ ID NO: 84459 - RNA, 18 nt, Artificial Sequence
  Synthetic
aauugagagaaguccacc

SEQ ID NO: 84460 - RNA, 19 nt, Artificial Sequence
  Synthetic
aaauugagagaaguccacc

SEQ ID NO: 84461 - RNA, 20 nt, Artificial Sequence
  Synthetic
aaaauugagagaaguccacc

SEQ ID NO: 84462 - RNA, 18 nt, Artificial Sequence
  Synthetic
agcaaaacccaaaagacc

SEQ ID NO: 84463 - RNA, 19 nt, Artificial Sequence
  Synthetic
cagcaaaacccaaaagacc

SEQ ID NO: 84464 - RNA, 24 nt, Artificial Sequence
  Synthetic
aggggcagcaaaacccaaaagacc

SEQ ID NO: 84465 - RNA, 19 nt, Artificial Sequence
  Synthetic
cguaaagagaggugcgccc

SEQ ID NO: 84466 - RNA, 18 nt, Artificial Sequence
  Synthetic
  misc_feature (13)..(13): n is a, c, g, or u
aacagaguuaucnguccc

SEQ ID NO: 84467 - RNA, 19 nt, Artificial Sequence
  Synthetic
  misc_feature (14)..(14): n is a, c, g, or u
caacagaguuaucnguccc

SEQ ID NO: 84468 - RNA, 20 nt, Artificial Sequence
  Synthetic
  misc_feature (15)..(15): n is a, c, g, or u
acaacagaguuaucnguccc

SEQ ID NO: 84469 - RNA, 21 nt, Artificial Sequence
  Synthetic
  misc_feature (1)..(1): n is a, c, g, or u
  misc_feature (16)..(16): n is a, c, g, or u
nacaacagaguuaucnguccc

SEQ ID NO: 84470 - RNA, 23 nt, Artificial Sequence
  Synthetic
  misc_feature (3)..(3): n is a, c, g, or u
  misc_feature (18)..(18): n is a, c, g, or u
agnacaacagaguuaucnguccc

SEQ ID NO: 84471 - RNA, 19 nt, Artificial Sequence
  Synthetic
ugcuguagcucuuguuccc

SEQ ID NO: 84472 - RNA, 20 nt, Artificial Sequence
  Synthetic
augcuguagcucuuguuccc

SEQ ID NO: 84473 - RNA, 21 nt, Artificial Sequence
  Synthetic
caugcuguagcucuuguuccc

SEQ ID NO: 84474 - RNA, 22 nt, Artificial Sequence
  Synthetic
ccaugcuguagcucuuguuccc

SEQ ID NO: 84475 - RNA, 23 nt, Artificial Sequence
  Synthetic
cccaugcuguagcucuuguuccc

SEQ ID NO: 84476 - RNA, 24 nt, Artificial Sequence
  Synthetic
ccccaugcuguagcucuuguuccc

SEQ ID NO: 84477 - RNA, 18 nt, Artificial Sequence
  Synthetic
aggaauuuuccgaaagcc

SEQ ID NO: 84478 - RNA, 19 nt, Artificial Sequence
  Synthetic
uaggaauuuuccgaaagcc

SEQ ID NO: 84479 - RNA, 20 nt, Artificial Sequence
  Synthetic
auaggaauuuuccgaaagcc

SEQ ID NO: 84480 - RNA, 18 nt, Artificial Sequence
  Synthetic
ugcuguacagacuuggcc

SEQ ID NO: 84481 - RNA, 19 nt, Artificial Sequence
  Synthetic
augcuguacagacuuggcc

SEQ ID NO: 84482 - RNA, 19 nt, Artificial Sequence
  Synthetic
  misc_feature (1)..(1): n is a, c, g, or u
  misc_feature (8)..(8): n is a, c, g, or u
  misc_feature (14)..(14): n is a, c, g, or u
ngcuggunguugangaucc

SEQ ID NO: 84483 - RNA, 20 nt, Artificial Sequence
  Synthetic
  misc_feature (1)..(2): n is a, c, g, or u
  misc_feature (9)..(9): n is a, c, g, or u
  misc_feature (15)..(15): n is a, c, g, or u
nngcuggunguugangaucc

SEQ ID NO: 84484 - RNA, 21 nt, Artificial Sequence
  Synthetic
  misc_feature (2)..(3): n is a, c, g, or u
  misc_feature (10)..(10): n is a, c, g, or u
  misc_feature (16)..(16): n is a, c, g, or u
cnngcuggunguugangaucc

SEQ ID NO: 84485 - RNA, 22 nt, Artificial Sequence
  Synthetic
  misc_feature (3)..(4): n is a, c, g, or u
  misc_feature (11)..(11): n is a, c, g, or u
  misc_feature (17)..(17): n is a, c, g, or u
ccnngcuggunguugangaucc

SEQ ID NO: 84486 - RNA, 23 nt, Artificial Sequence
  Synthetic
  misc_feature (4)..(5): n is a, c, g, or u
  misc_feature (12)..(12): n is a, c, g, or u
  misc_feature (18)..(18): n is a, c, g, or u
cccnngcuggunguugangaucc

SEQ ID NO: 84487 - RNA, 24 nt, Artificial Sequence
  Synthetic
  misc_feature (5)..(6): n is a, c, g, or u
  misc_feature (13)..(13): n is a, c, g, or u
  misc_feature (19)..(19): n is a, c, g, or u
ucccnngcuggunguugangaucc

SEQ ID NO: 84488 - RNA, 18 nt, Artificial Sequence
  Synthetic
cuaacaacaguagucucc

SEQ ID NO: 84489 - RNA, 19 nt, Artificial Sequence
  Synthetic
ucuaacaacaguagucucc

SEQ ID NO: 84490 - RNA, 18 nt, Artificial Sequence
  Synthetic
  misc_feature (8)..(8): n is a, c, g, or u
ugacauuncagagagucc

SEQ ID NO: 84491 - RNA, 19 nt, Artificial Sequence
  Synthetic
  misc_feature (9)..(9): n is a, c, g, or u
uugacauuncagagagucc

SEQ ID NO: 84492 - RNA, 18 nt, Artificial Sequence
  Synthetic
caggugcaauuuccgucc

SEQ ID NO: 84493 - RNA, 19 nt, Artificial Sequence
  Synthetic
acaggugcaauuuccgucc

SEQ ID NO: 84494 - RNA, 20 nt, Artificial Sequence
  Synthetic
uacaggugcaauuuccgucc

SEQ ID NO: 84495 - RNA, 21 nt, Artificial Sequence
  Synthetic
auacaggugcaauuuccgucc

SEQ ID NO: 84496 - RNA, 22 nt, Artificial Sequence
  Synthetic
aauacaggugcaauuuccgucc

SEQ ID NO: 84497 - RNA, 18 nt, Artificial Sequence
  Synthetic
uacuaacauugagauucc

SEQ ID NO: 84498 - RNA, 19 nt, Artificial Sequence
  Synthetic
auacuaacauugagauucc

SEQ ID NO: 84499 - RNA, 20 nt, Artificial Sequence
  Synthetic
aauacuaacauugagauucc

SEQ ID NO: 84500 - RNA, 23 nt, Artificial Sequence
  Synthetic
aggaauacuaacauugagauucc

SEQ ID NO: 84501 - RNA, 24 nt, Artificial Sequence
  Synthetic
aaggaauacuaacauugagauucc

SEQ ID NO: 84502 - RNA, 18 nt, Artificial Sequence
  Synthetic
  misc_feature (3)..(4): n is a, c, g, or u
  misc_feature (7)..(7): n is a, c, g, or u
uannacnguuucucuucc

SEQ ID NO: 84503 - RNA, 19 nt, Artificial Sequence
  Synthetic
  misc_feature (4)..(5): n is a, c, g, or u
  misc_feature (8)..(8): n is a, c, g, or u
cuannacnguuucucuucc

SEQ ID NO: 84504 - RNA, 20 nt, Artificial Sequence
  Synthetic
  misc_feature (5)..(6): n is a, c, g, or u
  misc_feature (9)..(9): n is a, c, g, or u
ucuannacnguuucucuucc

SEQ ID NO: 84505 - RNA, 21 nt, Artificial Sequence
  Synthetic
  misc_feature (6)..(7): n is a, c, g, or u
  misc_feature (10)..(10): n is a, c, g, or u
cucuannacnguuucucuucc

SEQ ID NO: 84506 - RNA, 22 nt, Artificial Sequence
  Synthetic
  misc_feature (7)..(8): n is a, c, g, or u
  misc_feature (11)..(11): n is a, c, g, or u
acucuannacnguuucucuucc

SEQ ID NO: 84507 - RNA, 23 nt, Artificial Sequence
  Synthetic
  misc_feature (8)..(9): n is a, c, g, or u
  misc_feature (12)..(12): n is a, c, g, or u
uacucuannacnguuucucuucc

SEQ ID NO: 84508 - RNA, 24 nt, Artificial Sequence
  Synthetic
  misc_feature (9)..(10): n is a, c, g, or u
  misc_feature (13)..(13): n is a, c, g, or u
auacucuannacnguuucucuucc

SEQ ID NO: 84509 - RNA, 19 nt, Artificial Sequence
  Synthetic
  misc_feature (13)..(13): n is a, c, g, or u
cgguggggugaancccagc

SEQ ID NO: 84510 - RNA, 21 nt, Artificial Sequence
  Synthetic
  misc_feature (15)..(15): n is a, c, g, or u
ugcgguggggugaancccagc

SEQ ID NO: 84511 - RNA, 23 nt, Artificial Sequence
  Synthetic
  misc_feature (17)..(17): n is a, c, g, or u
cgugcgguggggugaancccagc

SEQ ID NO: 84512 - RNA, 24 nt, Artificial Sequence
  Synthetic
  misc_feature (18)..(18): n is a, c, g, or u
ccgugcgguggggugaancccagc

SEQ ID NO: 84513 - RNA, 18 nt, Artificial Sequence
  Synthetic
aacaagagaugauuaggc

SEQ ID NO: 84514 - RNA, 20 nt, Artificial Sequence
  Synthetic
ugaacaagagaugauuaggc

SEQ ID NO: 84515 - RNA, 18 nt, Artificial Sequence
  Synthetic
  misc_feature (2)..(2): n is a, c, g, or u
  misc_feature (16)..(16): n is a, c, g, or u
ancacccacccaggungc

SEQ ID NO: 84516 - RNA, 19 nt, Artificial Sequence
  Synthetic
  misc_feature (3)..(3): n is a, c, g, or u
  misc_feature (17)..(17): n is a, c, g, or u
uancacccacccaggungc

SEQ ID NO: 84517 - RNA, 20 nt, Artificial Sequence
  Synthetic
  misc_feature (4)..(4): n is a, c, g, or u
  misc_feature (18)..(18): n is a, c, g, or u
uuancacccacccaggungc

SEQ ID NO: 84518 - RNA, 21 nt, Artificial Sequence
  Synthetic
  misc_feature (5)..(5): n is a, c, g, or u
  misc_feature (19)..(19): n is a, c, g, or u
auuancacccacccaggungc

SEQ ID NO: 84519 - RNA, 22 nt, Artificial Sequence
  Synthetic
  misc_feature (6)..(6): n is a, c, g, or u
  misc_feature (20)..(20): n is a, c, g, or u
aauuancacccacccaggungc

SEQ ID NO: 84520 - RNA, 23 nt, Artificial Sequence
  Synthetic
  misc_feature (7)..(7): n is a, c, g, or u
  misc_feature (21)..(21): n is a, c, g, or u
aaauuancacccacccaggungc

SEQ ID NO: 84521 - RNA, 24 nt, Artificial Sequence
  Synthetic
  misc_feature (8)..(8): n is a, c, g, or u
  misc_feature (22)..(22): n is a, c, g, or u
caaauuancacccacccaggungc

SEQ ID NO: 84522 - RNA, 18 nt, Artificial Sequence
  Synthetic
  misc_feature (1)..(1): n is a, c, g, or u
naaagguuccacgcaugc

SEQ ID NO: 84523 - RNA, 19 nt, Artificial Sequence
  Synthetic
  misc_feature (1)..(2): n is a, c, g, or u
nnaaagguuccacgcaugc

SEQ ID NO: 84524 - RNA, 20 nt, Artificial Sequence
  Synthetic
  misc_feature (2)..(3): n is a, c, g, or u
cnnaaagguuccacgcaugc

SEQ ID NO: 84525 - RNA, 21 nt, Artificial Sequence
  Synthetic
  misc_feature (3)..(4): n is a, c, g, or u
ccnnaaagguuccacgcaugc

SEQ ID NO: 84526 - RNA, 23 nt, Artificial Sequence
  Synthetic
  misc_feature (5)..(6): n is a, c, g, or u
agccnnaaagguuccacgcaugc

SEQ ID NO: 84527 - RNA, 18 nt, Artificial Sequence
  Synthetic
  misc_feature (6)..(6): n is a, c, g, or u
  misc_feature (9)..(9): n is a, c, g, or u
cagcanagnauugcuugc

SEQ ID NO: 84528 - RNA, 19 nt, Artificial Sequence
  Synthetic
  misc_feature (7)..(7): n is a, c, g, or u
  misc_feature (10)..(10): n is a, c, g, or u
ccagcanagnauugcuugc

SEQ ID NO: 84529 - RNA, 20 nt, Artificial Sequence
  Synthetic
  misc_feature (8)..(8): n is a, c, g, or u
  misc_feature (11)..(11): n is a, c, g, or u
cccagcanagnauugcuugc

SEQ ID NO: 84530 - RNA, 21 nt, Artificial Sequence
  Synthetic
  misc_feature (9)..(9): n is a, c, g, or u
  misc_feature (12)..(12): n is a, c, g, or u
ccccagcanagnauugcuugc

SEQ ID NO: 84531 - RNA, 22 nt, Artificial Sequence
  Synthetic
  misc_feature (10)..(10): n is a, c, g, or u
  misc_feature (13)..(13): n is a, c, g, or u
cccccagcanagnauugcuugc

SEQ ID NO: 84532 - RNA, 23 nt, Artificial Sequence
  Synthetic
  misc_feature (11)..(11): n is a, c, g, or u
  misc_feature (14)..(14): n is a, c, g, or u
ccccccagcanagnauugcuugc

SEQ ID NO: 84533 - RNA, 24 nt, Artificial Sequence
  Synthetic
  misc_feature (12)..(12): n is a, c, g, or u
  misc_feature (15)..(15): n is a, c, g, or u
uccccccagcanagnauugcuugc

SEQ ID NO: 84534 - RNA, 18 nt, Artificial Sequence
  Synthetic
  misc_feature (17)..(17): n is a, c, g, or u
cauagagguuccuuganc

SEQ ID NO: 84535 - RNA, 19 nt, Artificial Sequence
  Synthetic
  misc_feature (18)..(18): n is a, c, g, or u
acauagagguuccuuganc

SEQ ID NO: 84536 - RNA, 20 nt, Artificial Sequence
  Synthetic
  misc_feature (19)..(19): n is a, c, g, or u
uacauagagguuccuuganc

SEQ ID NO: 84537 - RNA, 18 nt, Artificial Sequence
  Synthetic
  misc_feature (17)..(17): n is a, c, g, or u
aauacaggccucucacnc

SEQ ID NO: 84538 - RNA, 19 nt, Artificial Sequence
  Synthetic
  misc_feature (18)..(18): n is a, c, g, or u
aaauacaggccucucacnc

SEQ ID NO: 84539 - RNA, 18 nt, Artificial Sequence
  Synthetic
  misc_feature (9)..(9): n is a, c, g, or u
  misc_feature (11)..(11): n is a, c, g, or u
  misc_feature (17)..(17): n is a, c, g, or u
ugacgauangngagagnc

SEQ ID NO: 84540 - RNA, 19 nt, Artificial Sequence
  Synthetic
  misc_feature (10)..(10): n is a, c, g, or u
  misc_feature (12)..(12): n is a, c, g, or u
  misc_feature (18)..(18): n is a, c, g, or u
uugacgauangngagagnc

SEQ ID NO: 84541 - RNA, 20 nt, Artificial Sequence
  Synthetic
  misc_feature (11)..(11): n is a, c, g, or u
  misc_feature (13)..(13): n is a, c, g, or u
  misc_feature (19)..(19): n is a, c, g, or u
auugacgauangngagagnc

SEQ ID NO: 84542 - RNA, 22 nt, Artificial Sequence
  Synthetic
  misc_feature (13)..(13): n is a, c, g, or u
  misc_feature (15)..(15): n is a, c, g, or u
  misc_feature (21)..(21): n is a, c, g, or u
agauugacgauangngagagnc

SEQ ID NO: 84543 - RNA, 23 nt, Artificial Sequence
  Synthetic
  misc_feature (14)..(14): n is a, c, g, or u
  misc_feature (16)..(16): n is a, c, g, or u
  misc_feature (22)..(22): n is a, c, g, or u
aagauugacgauangngagagnc

SEQ ID NO: 84544 - RNA, 18 nt, Artificial Sequence
  Synthetic
ugaggaugaguguuucuc

SEQ ID NO: 84545 - RNA, 19 nt, Artificial Sequence
  Synthetic
cugaggaugaguguuucuc

SEQ ID NO: 84546 - RNA, 20 nt, Artificial Sequence
  Synthetic
ccugaggaugaguguuucuc

SEQ ID NO: 84547 - RNA, 18 nt, Artificial Sequence
  Synthetic
cauguucagcgcaggguc

SEQ ID NO: 84548 - RNA, 19 nt, Artificial Sequence
  Synthetic
ccauguucagcgcaggguc

SEQ ID NO: 84549 - RNA, 20 nt, Artificial Sequence
  Synthetic
uccauguucagcgcaggguc

SEQ ID NO: 84550 - RNA, 21 nt, Artificial Sequence
  Synthetic
cuccauguucagcgcaggguc

SEQ ID NO: 84551 - RNA, 22 nt, Artificial Sequence
  Synthetic
ucuccauguucagcgcaggguc

SEQ ID NO: 84552 - RNA, 23 nt, Artificial Sequence
  Synthetic
uucuccauguucagcgcaggguc

SEQ ID NO: 84553 - RNA, 18 nt, Artificial Sequence
  Synthetic
aaguuuucuaaaacauuc

SEQ ID NO: 84554 - RNA, 21 nt, Artificial Sequence
  Synthetic
aggaaguuuucuaaaacauuc

SEQ ID NO: 84555 - RNA, 22 nt, Artificial Sequence
  Synthetic
caggaaguuuucuaaaacauuc

SEQ ID NO: 84556 - RNA, 23 nt, Artificial Sequence
  Synthetic
acaggaaguuuucuaaaacauuc

SEQ ID NO: 84557 - RNA, 24 nt, Artificial Sequence
  Synthetic
aacaggaaguuuucuaaaacauuc

SEQ ID NO: 84558 - RNA, 18 nt, Artificial Sequence
  Synthetic
acaagcggcuaggaguuc

SEQ ID NO: 84559 - RNA, 19 nt, Artificial Sequence
  Synthetic
aacaagcggcuaggaguuc

SEQ ID NO: 84560 - RNA, 20 nt, Artificial Sequence
  Synthetic
aaacaagcggcuaggaguuc

SEQ ID NO: 84561 - RNA, 18 nt, Artificial Sequence
  Synthetic
  misc_feature (8)..(8): n is a, c, g, or u
cauacaanggcauuaaag

SEQ ID NO: 84562 - RNA, 20 nt, Artificial Sequence
  Synthetic
  misc_feature (1)..(1): n is a, c, g, or u
  misc_feature (10)..(10): n is a, c, g, or u
ngcauacaanggcauuaaag

SEQ ID NO: 84563 - RNA, 21 nt, Artificial Sequence
  Synthetic
  misc_feature (2)..(2): n is a, c, g, or u
  misc_feature (11)..(11): n is a, c, g, or u
angcauacaanggcauuaaag

SEQ ID NO: 84564 - RNA, 22 nt, Artificial Sequence
  Synthetic
  misc_feature (3)..(3): n is a, c, g, or u
  misc_feature (12)..(12): n is a, c, g, or u
cangcauacaanggcauuaaag

SEQ ID NO: 84565 - RNA, 23 nt, Artificial Sequence
  Synthetic
  misc_feature (4)..(4): n is a, c, g, or u
  misc_feature (13)..(13): n is a, c, g, or u
acangcauacaanggcauuaaag

SEQ ID NO: 84566 - RNA, 24 nt, Artificial Sequence
  Synthetic
  misc_feature (5)..(5): n is a, c, g, or u
  misc_feature (14)..(14): n is a, c, g, or u
uacangcauacaanggcauuaaag

SEQ ID NO: 84567 - RNA, 18 nt, Artificial Sequence
  Synthetic
uuugaaguaugccucaag

SEQ ID NO: 84568 - RNA, 19 nt, Artificial Sequence
  Synthetic
cuuugaaguaugccucaag

SEQ ID NO: 84569 - RNA, 20 nt, Artificial Sequence
  Synthetic
ucuuugaaguaugccucaag

SEQ ID NO: 84570 - RNA, 22 nt, Artificial Sequence
  Synthetic
agucuuugaaguaugccucaag

SEQ ID NO: 84571 - RNA, 23 nt, Artificial Sequence
  Synthetic
cagucuuugaaguaugccucaag

SEQ ID NO: 84572 - RNA, 24 nt, Artificial Sequence
  Synthetic
acagucuuugaaguaugccucaag

SEQ ID NO: 84573 - RNA, 18 nt, Artificial Sequence
  Synthetic
ucucaaagguggagacag

SEQ ID NO: 84574 - RNA, 19 nt, Artificial Sequence
  Synthetic
uucucaaagguggagacag

SEQ ID NO: 84575 - RNA, 20 nt, Artificial Sequence
  Synthetic
uuucucaaagguggagacag

SEQ ID NO: 84576 - RNA, 22 nt, Artificial Sequence
  Synthetic
uguuucucaaagguggagacag

SEQ ID NO: 84577 - RNA, 24 nt, Artificial Sequence
  Synthetic
aguguuucucaaagguggagacag

SEQ ID NO: 84578 - RNA, 18 nt, Artificial Sequence
  Synthetic
aacuggagccaccagcag

SEQ ID NO: 84579 - RNA, 20 nt, Artificial Sequence
  Synthetic
ugaacuggagccaccagcag

SEQ ID NO: 84580 - RNA, 21 nt, Artificial Sequence
  Synthetic
cugaacuggagccaccagcag

SEQ ID NO: 84581 - RNA, 22 nt, Artificial Sequence
  Synthetic
ccugaacuggagccaccagcag

SEQ ID NO: 84582 - RNA, 23 nt, Artificial Sequence
  Synthetic
uccugaacuggagccaccagcag

SEQ ID NO: 84583 - RNA, 24 nt, Artificial Sequence
  Synthetic
uuccugaacuggagccaccagcag

SEQ ID NO: 84584 - RNA, 19 nt, Artificial Sequence
  Synthetic
agaagaugaggcauagcag

SEQ ID NO: 84585 - RNA, 20 nt, Artificial Sequence
  Synthetic
aagaagaugaggcauagcag

SEQ ID NO: 84586 - RNA, 18 nt, Artificial Sequence
  Synthetic
cauggugcuggugcgcag

SEQ ID NO: 84587 - RNA, 20 nt, Artificial Sequence
  Synthetic
ugcauggugcuggugcgcag

SEQ ID NO: 84588 - RNA, 18 nt, Artificial Sequence
  Synthetic
uagcagcaggaugaagag

SEQ ID NO: 84589 - RNA, 19 nt, Artificial Sequence
  Synthetic
auagcagcaggaugaagag

SEQ ID NO: 84590 - RNA, 20 nt, Artificial Sequence
  Synthetic
cauagcagcaggaugaagag

SEQ ID NO: 84591 - RNA, 23 nt, Artificial Sequence
  Synthetic
aggcauagcagcaggaugaagag

SEQ ID NO: 84592 - RNA, 18 nt, Artificial Sequence
  Synthetic
  misc_feature (2)..(2): n is a, c, g, or u
cncugggaucuugcagag

SEQ ID NO: 84593 - RNA, 19 nt, Artificial Sequence
  Synthetic
  misc_feature (3)..(3): n is a, c, g, or u
acncugggaucuugcagag

SEQ ID NO: 84594 - RNA, 20 nt, Artificial Sequence
  Synthetic
  misc_feature (4)..(4): n is a, c, g, or u
cacncugggaucuugcagag

SEQ ID NO: 84595 - RNA, 21 nt, Artificial Sequence
  Synthetic
  misc_feature (5)..(5): n is a, c, g, or u
ucacncugggaucuugcagag

SEQ ID NO: 84596 - RNA, 22 nt, Artificial Sequence
  Synthetic
  misc_feature (6)..(6): n is a, c, g, or u
cucacncugggaucuugcagag

SEQ ID NO: 84597 - RNA, 23 nt, Artificial Sequence
  Synthetic
  misc_feature (7)..(7): n is a, c, g, or u
ucucacncugggaucuugcagag

SEQ ID NO: 84598 - RNA, 24 nt, Artificial Sequence
  Synthetic
  misc_feature (8)..(8): n is a, c, g, or u
cucucacncugggaucuugcagag

SEQ ID NO: 84599 - RNA, 19 nt, Artificial Sequence
  Synthetic
  misc_feature (12)..(12): n is a, c, g, or u
agucccaagcgnccccgag

SEQ ID NO: 84600 - RNA, 21 nt, Artificial Sequence
  Synthetic
  misc_feature (14)..(14): n is a, c, g, or u
agagucccaagcgnccccgag

SEQ ID NO: 84601 - RNA, 22 nt, Artificial Sequence
  Synthetic
  misc_feature (1)..(1): n is a, c, g, or u
  misc_feature (15)..(15): n is a, c, g, or u
nagagucccaagcgnccccgag

SEQ ID NO: 84602 - RNA, 23 nt, Artificial Sequence
  Synthetic
  misc_feature (2)..(2): n is a, c, g, or u
  misc_feature (16)..(16): n is a, c, g, or u
anagagucccaagcgnccccgag

SEQ ID NO: 84603 - RNA, 18 nt, Artificial Sequence
  Synthetic
caaguuggaggacaggag

SEQ ID NO: 84604 - RNA, 19 nt, Artificial Sequence
  Synthetic
acaaguuggaggacaggag

SEQ ID NO: 84605 - RNA, 22 nt, Artificial Sequence
  Synthetic
aggacaaguuggaggacaggag

SEQ ID NO: 84606 - RNA, 23 nt, Artificial Sequence
  Synthetic
caggacaaguuggaggacaggag

SEQ ID NO: 84607 - RNA, 24 nt, Artificial Sequence
  Synthetic
ccaggacaaguuggaggacaggag

SEQ ID NO: 84608 - RNA, 19 nt, Artificial Sequence
  Synthetic
  misc_feature (9)..(9): n is a, c, g, or u
  misc_feature (12)..(12): n is a, c, g, or u
cgauuggungangcaggag

SEQ ID NO: 84609 - RNA, 22 nt, Artificial Sequence
  Synthetic
  misc_feature (12)..(12): n is a, c, g, or u
  misc_feature (15)..(15): n is a, c, g, or u
uggcgauuggungangcaggag

SEQ ID NO: 84610 - RNA, 23 nt, Artificial Sequence
  Synthetic
  misc_feature (13)..(13): n is a, c, g, or u
  misc_feature (16)..(16): n is a, c, g, or u
cuggcgauuggungangcaggag

SEQ ID NO: 84611 - RNA, 24 nt, Artificial Sequence
  Synthetic
  misc_feature (14)..(14): n is a, c, g, or u
  misc_feature (17)..(17): n is a, c, g, or u
acuggcgauuggungangcaggag

SEQ ID NO: 84612 - RNA, 18 nt, Artificial Sequence
  Synthetic
  misc_feature (1)..(1): n is a, c, g, or u
  misc_feature (4)..(4): n is a, c, g, or u
nagnauugcuugccugag

SEQ ID NO: 84613 - RNA, 19 nt, Artificial Sequence
  Synthetic
  misc_feature (2)..(2): n is a, c, g, or u
  misc_feature (5)..(5): n is a, c, g, or u
anagnauugcuugccugag

SEQ ID NO: 84614 - RNA, 20 nt, Artificial Sequence
  Synthetic
  misc_feature (3)..(3): n is a, c, g, or u
  misc_feature (6)..(6): n is a, c, g, or u
canagnauugcuugccugag

SEQ ID NO: 84615 - RNA, 22 nt, Artificial Sequence
  Synthetic
  misc_feature (5)..(5): n is a, c, g, or u
  misc_feature (8)..(8): n is a, c, g, or u
agcanagnauugcuugccugag

SEQ ID NO: 84616 - RNA, 23 nt, Artificial Sequence
  Synthetic
  misc_feature (6)..(6): n is a, c, g, or u
  misc_feature (9)..(9): n is a, c, g, or u
cagcanagnauugcuugccugag

SEQ ID NO: 84617 - RNA, 24 nt, Artificial Sequence
  Synthetic
  misc_feature (7)..(7): n is a, c, g, or u
  misc_feature (10)..(10): n is a, c, g, or u
ccagcanagnauugcuugccugag

SEQ ID NO: 84618 - RNA, 18 nt, Artificial Sequence
  Synthetic
  misc_feature (1)..(1): n is a, c, g, or u
ncccccuagaaaauugag

SEQ ID NO: 84619 - RNA, 19 nt, Artificial Sequence
  Synthetic
  misc_feature (2)..(2): n is a, c, g, or u
uncccccuagaaaauugag

SEQ ID NO: 84620 - RNA, 21 nt, Artificial Sequence
  Synthetic
  misc_feature (1)..(1): n is a, c, g, or u
  misc_feature (4)..(4): n is a, c, g, or u
nguncccccuagaaaauugag

SEQ ID NO: 84621 - RNA, 22 nt, Artificial Sequence
  Synthetic
  misc_feature (2)..(2): n is a, c, g, or u
  misc_feature (5)..(5): n is a, c, g, or u
unguncccccuagaaaauugag

SEQ ID NO: 84622 - RNA, 18 nt, Artificial Sequence
  Synthetic
  misc_feature (11)..(11): n is a, c, g, or u
uaaagacaggnacaguag

SEQ ID NO: 84623 - RNA, 19 nt, Artificial Sequence
  Synthetic
  misc_feature (12)..(12): n is a, c, g, or u
uuaaagacaggnacaguag

SEQ ID NO: 84624 - RNA, 20 nt, Artificial Sequence
  Synthetic
  misc_feature (1)..(1): n is a, c, g, or u
  misc_feature (13)..(13): n is a, c, g, or u
nuuaaagacaggnacaguag

SEQ ID NO: 84625 - RNA, 23 nt, Artificial Sequence
  Synthetic
  misc_feature (4)..(4): n is a, c, g, or u
  misc_feature (16)..(16): n is a, c, g, or u
aggnuuaaagacaggnacaguag

SEQ ID NO: 84626 - RNA, 19 nt, Artificial Sequence
  Synthetic
agaugagaaggcacagacg

SEQ ID NO: 84627 - RNA, 20 nt, Artificial Sequence
  Synthetic
cagaugagaaggcacagacg

SEQ ID NO: 84628 - RNA, 21 nt, Artificial Sequence
  Synthetic
cuccaccccaaaaggccuccg

SEQ ID NO: 84629 - RNA, 18 nt, Artificial Sequence
  Synthetic
cccgagaagggucguccg

SEQ ID NO: 84630 - RNA, 19 nt, Artificial Sequence
  Synthetic
ccccgagaagggucguccg

SEQ ID NO: 84631 - RNA, 20 nt, Artificial Sequence
  Synthetic
  misc_feature (1)..(1): n is a, c, g, or u
nccccgagaagggucguccg

SEQ ID NO: 84632 - RNA, 18 nt, Artificial Sequence
  Synthetic
uguucuccauguucagcg

SEQ ID NO: 84633 - RNA, 19 nt, Artificial Sequence
  Synthetic
auguucuccauguucagcg

SEQ ID NO: 84634 - RNA, 18 nt, Artificial Sequence
  Synthetic
cugccuuccugacuggcg

SEQ ID NO: 84635 - RNA, 18 nt, Artificial Sequence
  Synthetic
cgguguuugcucugaagg

SEQ ID NO: 84636 - RNA, 20 nt, Artificial Sequence
  Synthetic
ugcgguguuugcucugaagg

SEQ ID NO: 84637 - RNA, 18 nt, Artificial Sequence
  Synthetic
auguucuggauaauaagg

SEQ ID NO: 84638 - RNA, 20 nt, Artificial Sequence
  Synthetic
agauguucuggauaauaagg

SEQ ID NO: 84639 - RNA, 18 nt, Artificial Sequence
  Synthetic
uccaaauucuuuauaagg

SEQ ID NO: 84640 - RNA, 19 nt, Artificial Sequence
  Synthetic
cuccaaauucuuuauaagg

SEQ ID NO: 84641 - RNA, 21 nt, Artificial Sequence
  Synthetic
agcuccaaauucuuuauaagg

SEQ ID NO: 84642 - RNA, 22 nt, Artificial Sequence
  Synthetic
  misc_feature (1)..(1): n is a, c, g, or u
nagcuccaaauucuuuauaagg

SEQ ID NO: 84643 - RNA, 24 nt, Artificial Sequence
  Synthetic
  misc_feature (3)..(3): n is a, c, g, or u
agnagcuccaaauucuuuauaagg

SEQ ID NO: 84644 - RNA, 20 nt, Artificial Sequence
  Synthetic
agguuugguacagcaacagg

SEQ ID NO: 84645 - RNA, 21 nt, Artificial Sequence
  Synthetic
aagguuugguacagcaacagg

SEQ ID NO: 84646 - RNA, 23 nt, Artificial Sequence
  Synthetic
cgaagguuugguacagcaacagg

SEQ ID NO: 84647 - RNA, 24 nt, Artificial Sequence
  Synthetic
ccgaagguuugguacagcaacagg

SEQ ID NO: 84648 - RNA, 18 nt, Artificial Sequence
  Synthetic
  misc_feature (7)..(7): n is a, c, g, or u
augaggnuuaaagacagg

SEQ ID NO: 84649 - RNA, 19 nt, Artificial Sequence
  Synthetic
  misc_feature (8)..(8): n is a, c, g, or u
aaugaggnuuaaagacagg

SEQ ID NO: 84650 - RNA, 20 nt, Artificial Sequence
  Synthetic
  misc_feature (9)..(9): n is a, c, g, or u
caaugaggnuuaaagacagg

SEQ ID NO: 84651 - RNA, 21 nt, Artificial Sequence
  Synthetic
  misc_feature (10)..(10): n is a, c, g, or u
ccaaugaggnuuaaagacagg

SEQ ID NO: 84652 - RNA, 22 nt, Artificial Sequence
  Synthetic
  misc_feature (11)..(11): n is a, c, g, or u
uccaaugaggnuuaaagacagg

SEQ ID NO: 84653 - RNA, 23 nt, Artificial Sequence
  Synthetic
  misc_feature (12)..(12): n is a, c, g, or u
uuccaaugaggnuuaaagacagg

SEQ ID NO: 84654 - RNA, 24 nt, Artificial Sequence
  Synthetic
  misc_feature (13)..(13): n is a, c, g, or u
uuuccaaugaggnuuaaagacagg

SEQ ID NO: 84655 - RNA, 18 nt, Artificial Sequence
  Synthetic
augggaugggaauacagg

SEQ ID NO: 84656 - RNA, 20 nt, Artificial Sequence
  Synthetic
ugaugggaugggaauacagg

SEQ ID NO: 84657 - RNA, 21 nt, Artificial Sequence
  Synthetic
augaugggaugggaauacagg

SEQ ID NO: 84658 - RNA, 23 nt, Artificial Sequence
  Synthetic
  misc_feature (1)..(1): n is a, c, g, or u
ngaugaugggaugggaauacagg

SEQ ID NO: 84659 - RNA, 24 nt, Artificial Sequence
  Synthetic
  misc_feature (2)..(2): n is a, c, g, or u
angaugaugggaugggaauacagg

SEQ ID NO: 84660 - RNA, 18 nt, Artificial Sequence
  Synthetic
uggauaaaaccuagcagg

SEQ ID NO: 84661 - RNA, 19 nt, Artificial Sequence
  Synthetic
uuggauaaaaccuagcagg

SEQ ID NO: 84662 - RNA, 20 nt, Artificial Sequence
  Synthetic
uuuggauaaaaccuagcagg

SEQ ID NO: 84663 - RNA, 21 nt, Artificial Sequence
  Synthetic
  misc_feature (1)..(1): n is a, c, g, or u
nuuuggauaaaaccuagcagg

SEQ ID NO: 84664 - RNA, 22 nt, Artificial Sequence
  Synthetic
  misc_feature (2)..(2): n is a, c, g, or u
cnuuuggauaaaaccuagcagg

SEQ ID NO: 84665 - RNA, 23 nt, Artificial Sequence
  Synthetic
  misc_feature (3)..(3): n is a, c, g, or u
acnuuuggauaaaaccuagcagg

SEQ ID NO: 84666 - RNA, 24 nt, Artificial Sequence
  Synthetic
  misc_feature (4)..(4): n is a, c, g, or u
aacnuuuggauaaaaccuagcagg

SEQ ID NO: 84667 - RNA, 18 nt, Artificial Sequence
  Synthetic
ccacugcauggccugagg

SEQ ID NO: 84668 - RNA, 19 nt, Artificial Sequence
  Synthetic
uccacugcauggccugagg

SEQ ID NO: 84669 - RNA, 20 nt, Artificial Sequence
  Synthetic
uuccacugcauggccugagg

SEQ ID NO: 84670 - RNA, 18 nt, Artificial Sequence
  Synthetic
  misc_feature (1)..(1): n is a, c, g, or u
ngguggucuauaagcugg

SEQ ID NO: 84671 - RNA, 19 nt, Artificial Sequence
  Synthetic
  misc_feature (2)..(2): n is a, c, g, or u
ungguggucuauaagcugg

SEQ ID NO: 84672 - RNA, 20 nt, Artificial Sequence
  Synthetic
  misc_feature (3)..(3): n is a, c, g, or u
uungguggucuauaagcugg

SEQ ID NO: 84673 - RNA, 18 nt, Artificial Sequence
  Synthetic
uaccuuguuggcgucugg

SEQ ID NO: 84674 - RNA, 19 nt, Artificial Sequence
  Synthetic
cuaccuuguuggcgucugg

SEQ ID NO: 84675 - RNA, 20 nt, Artificial Sequence
  Synthetic
ccuaccuuguuggcgucugg

SEQ ID NO: 84676 - RNA, 18 nt, Artificial Sequence
  Synthetic
ccagaggauugcuggugg

SEQ ID NO: 84677 - RNA, 19 nt, Artificial Sequence
  Synthetic
cccagaggauugcuggugg

SEQ ID NO: 84678 - RNA, 20 nt, Artificial Sequence
  Synthetic
ucccagaggauugcuggugg

SEQ ID NO: 84679 - RNA, 21 nt, Artificial Sequence
  Synthetic
aucccagaggauugcuggugg

SEQ ID NO: 84680 - RNA, 22 nt, Artificial Sequence
  Synthetic
aaucccagaggauugcuggugg

SEQ ID NO: 84681 - RNA, 24 nt, Artificial Sequence
  Synthetic
agaaucccagaggauugcuggugg

SEQ ID NO: 84682 - RNA, 18 nt, Artificial Sequence
  Synthetic
  misc_feature (17)..(17): n is a, c, g, or u
uagaagaauaaagcccng

SEQ ID NO: 84683 - RNA, 20 nt, Artificial Sequence
  Synthetic
  misc_feature (19)..(19): n is a, c, g, or u
aguagaagaauaaagcccng

SEQ ID NO: 84684 - RNA, 21 nt, Artificial Sequence
  Synthetic
  misc_feature (20)..(20): n is a, c, g, or u
caguagaagaauaaagcccng

SEQ ID NO: 84685 - RNA, 22 nt, Artificial Sequence
  Synthetic
  misc_feature (21)..(21): n is a, c, g, or u
acaguagaagaauaaagcccng

SEQ ID NO: 84686 - RNA, 23 nt, Artificial Sequence
  Synthetic
  misc_feature (1)..(1): n is a, c, g, or u
  misc_feature (22)..(22): n is a, c, g, or u
nacaguagaagaauaaagcccng

SEQ ID NO: 84687 - RNA, 18 nt, Artificial Sequence
  Synthetic
  misc_feature (14)..(14): n is a, c, g, or u
uaauacccuuaucnaaug

SEQ ID NO: 84688 - RNA, 19 nt, Artificial Sequence
  Synthetic
  misc_feature (15)..(15): n is a, c, g, or u
uuaauacccuuaucnaaug

SEQ ID NO: 84689 - RNA, 20 nt, Artificial Sequence
  Synthetic
  misc_feature (16)..(16): n is a, c, g, or u
uuuaauacccuuaucnaaug

SEQ ID NO: 84690 - RNA, 23 nt, Artificial Sequence
  Synthetic
  misc_feature (19)..(19): n is a, c, g, or u
agguuuaauacccuuaucnaaug

SEQ ID NO: 84691 - RNA, 24 nt, Artificial Sequence
  Synthetic
  misc_feature (20)..(20): n is a, c, g, or u
aagguuuaauacccuuaucnaaug

SEQ ID NO: 84692 - RNA, 19 nt, Artificial Sequence
  Synthetic
  misc_feature (3)..(3): n is a, c, g, or u
agnagucgugcagguucug

SEQ ID NO: 84693 - RNA, 20 nt, Artificial Sequence
  Synthetic
  misc_feature (4)..(4): n is a, c, g, or u
cagnagucgugcagguucug

SEQ ID NO: 84694 - RNA, 21 nt, Artificial Sequence
  Synthetic
  misc_feature (1)..(1): n is a, c, g, or u
  misc_feature (5)..(5): n is a, c, g, or u
ncagnagucgugcagguucug

SEQ ID NO: 84695 - RNA, 22 nt, Artificial Sequence
  Synthetic
  misc_feature (2)..(2): n is a, c, g, or u
  misc_feature (6)..(6): n is a, c, g, or u
ancagnagucgugcagguucug

SEQ ID NO: 84696 - RNA, 24 nt, Artificial Sequence
  Synthetic
  misc_feature (4)..(4): n is a, c, g, or u
  misc_feature (8)..(8): n is a, c, g, or u
ugancagnagucgugcagguucug

SEQ ID NO: 84697 - RNA, 19 nt, Artificial Sequence
  Synthetic
ugauuaacuagauguucug

SEQ ID NO: 84698 - RNA, 20 nt, Artificial Sequence
  Synthetic
augauuaacuagauguucug

SEQ ID NO: 84699 - RNA, 19 nt, Artificial Sequence
  Synthetic
  misc_feature (12)..(12): n is a, c, g, or u
agugcaguaugnugaggug

SEQ ID NO: 84700 - RNA, 21 nt, Artificial Sequence
  Synthetic
  misc_feature (14)..(14): n is a, c, g, or u
ugagugcaguaugnugaggug

SEQ ID NO: 84701 - RNA, 22 nt, Artificial Sequence
  Synthetic
  misc_feature (15)..(15): n is a, c, g, or u
cugagugcaguaugnugaggug

SEQ ID NO: 84702 - RNA, 23 nt, Artificial Sequence
  Synthetic
  misc_feature (16)..(16): n is a, c, g, or u
ccugagugcaguaugnugaggug

SEQ ID NO: 84703 - RNA, 20 nt, Artificial Sequence
  Synthetic
uggaggacaggagguuggug

SEQ ID NO: 84704 - RNA, 21 nt, Artificial Sequence
  Synthetic
uuggaggacaggagguuggug

SEQ ID NO: 84705 - RNA, 23 nt, Artificial Sequence
  Synthetic
aguuggaggacaggagguuggug

SEQ ID NO: 84706 - RNA, 24 nt, Artificial Sequence
  Synthetic
aaguuggaggacaggagguuggug

SEQ ID NO: 84707 - RNA, 18 nt, Artificial Sequence
  Synthetic
aucuugcagaguuuggug

SEQ ID NO: 84708 - RNA, 22 nt, Artificial Sequence
  Synthetic
ugggaucuugcagaguuuggug

SEQ ID NO: 84709 - RNA, 23 nt, Artificial Sequence
  Synthetic
cugggaucuugcagaguuuggug

SEQ ID NO: 84710 - RNA, 24 nt, Artificial Sequence
  Synthetic
  misc_feature (1)..(1): n is a, c, g, or u
ncugggaucuugcagaguuuggug

SEQ ID NO: 84711 - RNA, 18 nt, Artificial Sequence
  Synthetic
  misc_feature (16)..(16): n is a, c, g, or u
acauucuuugauuuunug

SEQ ID NO: 84712 - RNA, 19 nt, Artificial Sequence
  Synthetic
  misc_feature (17)..(17): n is a, c, g, or u
aacauucuuugauuuunug

SEQ ID NO: 84713 - RNA, 20 nt, Artificial Sequence
  Synthetic
  misc_feature (18)..(18): n is a, c, g, or u
aaacauucuuugauuuunug

SEQ ID NO: 84714 - RNA, 21 nt, Artificial Sequence
  Synthetic
  misc_feature (19)..(19): n is a, c, g, or u
aaaacauucuuugauuuunug

SEQ ID NO: 84715 - RNA, 22 nt, Artificial Sequence
  Synthetic
  misc_feature (20)..(20): n is a, c, g, or u
uaaaacauucuuugauuuunug

SEQ ID NO: 84716 - RNA, 23 nt, Artificial Sequence
  Synthetic
  misc_feature (21)..(21): n is a, c, g, or u
cuaaaacauucuuugauuuunug

SEQ ID NO: 84717 - RNA, 24 nt, Artificial Sequence
  Synthetic
  misc_feature (22)..(22): n is a, c, g, or u
ucuaaaacauucuuugauuuunug

SEQ ID NO: 84718 - RNA, 20 nt, Artificial Sequence
  Synthetic
aggcacagcuuggaggcuug

SEQ ID NO: 84719 - RNA, 21 nt, Artificial Sequence
  Synthetic
aaggcacagcuuggaggcuug

SEQ ID NO: 84720 - RNA, 22 nt, Artificial Sequence
  Synthetic
caaggcacagcuuggaggcuug

SEQ ID NO: 84721 - RNA, 23 nt, Artificial Sequence
  Synthetic
ccaaggcacagcuuggaggcuug

SEQ ID NO: 84722 - RNA, 24 nt, Artificial Sequence
  Synthetic
cccaaggcacagcuuggaggcuug

SEQ ID NO: 84723 - RNA, 18 nt, Artificial Sequence
  Synthetic
  misc_feature (7)..(7): n is a, c, g, or u
ucucacncugggaucuug

SEQ ID NO: 84724 - RNA, 19 nt, Artificial Sequence
  Synthetic
  misc_feature (8)..(8): n is a, c, g, or u
cucucacncugggaucuug

SEQ ID NO: 84725 - RNA, 20 nt, Artificial Sequence
  Synthetic
  misc_feature (9)..(9): n is a, c, g, or u
ccucucacncugggaucuug

SEQ ID NO: 84726 - RNA, 23 nt, Artificial Sequence
  Synthetic
  misc_feature (12)..(12): n is a, c, g, or u
aggccucucacncugggaucuug

SEQ ID NO: 84727 - RNA, 24 nt, Artificial Sequence
  Synthetic
  misc_feature (13)..(13): n is a, c, g, or u
caggccucucacncugggaucuug

SEQ ID NO: 84728 - RNA, 20 nt, Artificial Sequence
  Synthetic
aggcagaggugaaaaaguug

SEQ ID NO: 84729 - RNA, 21 nt, Artificial Sequence
  Synthetic
uaggcagaggugaaaaaguug

SEQ ID NO: 84730 - RNA, 22 nt, Artificial Sequence
  Synthetic
uuaggcagaggugaaaaaguug

SEQ ID NO: 84731 - RNA, 23 nt, Artificial Sequence
  Synthetic
auuaggcagaggugaaaaaguug

SEQ ID NO: 84732 - RNA, 18 nt, Artificial Sequence
  Synthetic
uuggaggacaggagguug

SEQ ID NO: 84733 - RNA, 20 nt, Artificial Sequence
  Synthetic
aguuggaggacaggagguug

SEQ ID NO: 84734 - RNA, 18 nt, Artificial Sequence
  Synthetic
  misc_feature (18)..(18): n is a, c, g, or u
aauuuuccgaaagcccan

SEQ ID NO: 84735 - RNA, 21 nt, Artificial Sequence
  Synthetic
  misc_feature (21)..(21): n is a, c, g, or u
aggaauuuuccgaaagcccan

SEQ ID NO: 84736 - RNA, 22 nt, Artificial Sequence
  Synthetic
  misc_feature (22)..(22): n is a, c, g, or u
uaggaauuuuccgaaagcccan

SEQ ID NO: 84737 - RNA, 23 nt, Artificial Sequence
  Synthetic
  misc_feature (23)..(23): n is a, c, g, or u
auaggaauuuuccgaaagcccan

SEQ ID NO: 84738 - RNA, 24 nt, Artificial Sequence
  Synthetic
  misc_feature (24)..(24): n is a, c, g, or u
cauaggaauuuuccgaaagcccan

SEQ ID NO: 84739 - RNA, 18 nt, Artificial Sequence
  Synthetic
  misc_feature (18)..(18): n is a, c, g, or u
uaacugacuacuaggucn

SEQ ID NO: 84740 - RNA, 19 nt, Artificial Sequence
  Synthetic
  misc_feature (19)..(19): n is a, c, g, or u
auaacugacuacuaggucn

SEQ ID NO: 84741 - RNA, 20 nt, Artificial Sequence
  Synthetic
  misc_feature (20)..(20): n is a, c, g, or u
cauaacugacuacuaggucn

SEQ ID NO: 84742 - RNA, 21 nt, Artificial Sequence
  Synthetic
  misc_feature (21)..(21): n is a, c, g, or u
acauaacugacuacuaggucn

SEQ ID NO: 84743 - RNA, 22 nt, Artificial Sequence
  Synthetic
  misc_feature (1)..(1): n is a, c, g, or u
  misc_feature (22)..(22): n is a, c, g, or u
nacauaacugacuacuaggucn

SEQ ID NO: 84744 - RNA, 23 nt, Artificial Sequence
  Synthetic
  misc_feature (2)..(2): n is a, c, g, or u
  misc_feature (23)..(23): n is a, c, g, or u
unacauaacugacuacuaggucn

SEQ ID NO: 84745 - RNA, 24 nt, Artificial Sequence
  Synthetic
  misc_feature (3)..(3): n is a, c, g, or u
  misc_feature (24)..(24): n is a, c, g, or u
uunacauaacugacuacuaggucn

SEQ ID NO: 84746 - RNA, 18 nt, Artificial Sequence
  Synthetic
  misc_feature (18)..(18): n is a, c, g, or u
cccgccuguaacacgagn

SEQ ID NO: 84747 - RNA, 19 nt, Artificial Sequence
  Synthetic
  misc_feature (19)..(19): n is a, c, g, or u
ccccgccuguaacacgagn

SEQ ID NO: 84748 - RNA, 20 nt, Artificial Sequence
  Synthetic
  misc_feature (20)..(20): n is a, c, g, or u
accccgccuguaacacgagn

SEQ ID NO: 84749 - RNA, 18 nt, Artificial Sequence
  Synthetic
  misc_feature (18)..(18): n is a, c, g, or u
ugccugagugcaguaugn

SEQ ID NO: 84750 - RNA, 19 nt, Artificial Sequence
  Synthetic
  misc_feature (19)..(19): n is a, c, g, or u
uugccugagugcaguaugn

SEQ ID NO: 84751 - RNA, 20 nt, Artificial Sequence
  Synthetic
  misc_feature (20)..(20): n is a, c, g, or u
cuugccugagugcaguaugn

SEQ ID NO: 84752 - RNA, 22 nt, Artificial Sequence
  Synthetic
  misc_feature (22)..(22): n is a, c, g, or u
ugcuugccugagugcaguaugn

SEQ ID NO: 84753 - RNA, 23 nt, Artificial Sequence
  Synthetic
  misc_feature (23)..(23): n is a, c, g, or u
uugcuugccugagugcaguaugn

SEQ ID NO: 84754 - RNA, 24 nt, Artificial Sequence
  Synthetic
  misc_feature (24)..(24): n is a, c, g, or u
auugcuugccugagugcaguaugn

SEQ ID NO: 84755 - RNA, 19 nt, Artificial Sequence
  Synthetic
  misc_feature (18)..(19): n is a, c, g, or u
agguucugcauggucccnn

SEQ ID NO: 84756 - RNA, 20 nt, Artificial Sequence
  Synthetic
  misc_feature (19)..(20): n is a, c, g, or u
cagguucugcauggucccnn

SEQ ID NO: 84757 - RNA, 22 nt, Artificial Sequence
  Synthetic
  misc_feature (21)..(22): n is a, c, g, or u
ugcagguucugcauggucccnn

SEQ ID NO: 84758 - RNA, 24 nt, Artificial Sequence
  Synthetic
  misc_feature (23)..(24): n is a, c, g, or u
cgugcagguucugcauggucccnn

SEQ ID NO: 84759 - RNA, 20 nt, Artificial Sequence
  Synthetic
  misc_feature (19)..(20): n is a, c, g, or u
uggaucggcagaggagccnn

SEQ ID NO: 84760 - RNA, 21 nt, Artificial Sequence
  Synthetic
  misc_feature (20)..(21): n is a, c, g, or u
auggaucggcagaggagccnn

SEQ ID NO: 84761 - RNA, 22 nt, Artificial Sequence
  Synthetic
  misc_feature (21)..(22): n is a, c, g, or u
uauggaucggcagaggagccnn

SEQ ID NO: 84762 - RNA, 24 nt, Artificial Sequence
  Synthetic
  misc_feature (23)..(24): n is a, c, g, or u
aguauggaucggcagaggagccnn

SEQ ID NO: 84763 - RNA, 18 nt, Artificial Sequence
  Synthetic
  misc_feature (11)..(11): n is a, c, g, or u
  misc_feature (14)..(14): n is a, c, g, or u
  misc_feature (18)..(18): n is a, c, g, or u
cuacuaggucncungaun

SEQ ID NO: 84764 - RNA, 19 nt, Artificial Sequence
  Synthetic
  misc_feature (12)..(12): n is a, c, g, or u
  misc_feature (15)..(15): n is a, c, g, or u
  misc_feature (19)..(19): n is a, c, g, or u
acuacuaggucncungaun

SEQ ID NO: 84765 - RNA, 21 nt, Artificial Sequence
  Synthetic
  misc_feature (14)..(14): n is a, c, g, or u
  misc_feature (17)..(17): n is a, c, g, or u
  misc_feature (21)..(21): n is a, c, g, or u
ugacuacuaggucncungaun

SEQ ID NO: 84766 - RNA, 22 nt, Artificial Sequence
  Synthetic
  misc_feature (15)..(15): n is a, c, g, or u
  misc_feature (18)..(18): n is a, c, g, or u
  misc_feature (22)..(22): n is a, c, g, or u
cugacuacuaggucncungaun

SEQ ID NO: 84767 - RNA, 23 nt, Artificial Sequence
  Synthetic
  misc_feature (16)..(16): n is a, c, g, or u
  misc_feature (19)..(19): n is a, c, g, or u
  misc_feature (23)..(23): n is a, c, g, or u
acugacuacuaggucncungaun

SEQ ID NO: 84768 - RNA, 24 nt, Artificial Sequence
  Synthetic
  misc_feature (17)..(17): n is a, c, g, or u
  misc_feature (20)..(20): n is a, c, g, or u
  misc_feature (24)..(24): n is a, c, g, or u
aacugacuacuaggucncungaun

SEQ ID NO: 84769 - RNA, 19 nt, Artificial Sequence
  Synthetic
  misc_feature (19)..(19): n is a, c, g, or u
ugauaagauaggggcauun

SEQ ID NO: 84770 - RNA, 20 nt, Artificial Sequence
  Synthetic
  misc_feature (20)..(20): n is a, c, g, or u
uugauaagauaggggcauun

SEQ ID NO: 84771 - RNA, 18 nt, Artificial Sequence
  Synthetic
ugggauugaagucccaau

SEQ ID NO: 84772 - RNA, 19 nt, Artificial Sequence
  Synthetic
uugggauugaagucccaau

SEQ ID NO: 84773 - RNA, 18 nt, Artificial Sequence
  Synthetic
  misc_feature (3)..(3): n is a, c, g, or u
agnagggguccuaggaau

SEQ ID NO: 84774 - RNA, 20 nt, Artificial Sequence
  Synthetic
  misc_feature (5)..(5): n is a, c, g, or u
cgagnagggguccuaggaau

SEQ ID NO: 84775 - RNA, 18 nt, Artificial Sequence
  Synthetic
  misc_feature (1)..(1): n is a, c, g, or u
ngaugaugggaugggaau

SEQ ID NO: 84776 - RNA, 19 nt, Artificial Sequence
  Synthetic
  misc_feature (2)..(2): n is a, c, g, or u
angaugaugggaugggaau

SEQ ID NO: 84777 - RNA, 20 nt, Artificial Sequence
  Synthetic
  misc_feature (3)..(3): n is a, c, g, or u
cangaugaugggaugggaau

SEQ ID NO: 84778 - RNA, 21 nt, Artificial Sequence
  Synthetic
  misc_feature (4)..(4): n is a, c, g, or u
ccangaugaugggaugggaau

SEQ ID NO: 84779 - RNA, 22 nt, Artificial Sequence
  Synthetic
  misc_feature (5)..(5): n is a, c, g, or u
cccangaugaugggaugggaau

SEQ ID NO: 84780 - RNA, 24 nt, Artificial Sequence
  Synthetic
  misc_feature (7)..(7): n is a, c, g, or u
agcccangaugaugggaugggaau

SEQ ID NO: 84781 - RNA, 18 nt, Artificial Sequence
  Synthetic
uccaaggaauacuaacau

SEQ ID NO: 84782 - RNA, 20 nt, Artificial Sequence
  Synthetic
aguccaaggaauacuaacau

SEQ ID NO: 84783 - RNA, 22 nt, Artificial Sequence
  Synthetic
ugaguccaaggaauacuaacau

SEQ ID NO: 84784 - RNA, 23 nt, Artificial Sequence
  Synthetic
augaguccaaggaauacuaacau

SEQ ID NO: 84785 - RNA, 24 nt, Artificial Sequence
  Synthetic
uaugaguccaaggaauacuaacau

SEQ ID NO: 84786 - RNA, 19 nt, Artificial Sequence
  Synthetic
agcaacaggagggauacau

SEQ ID NO: 84787 - RNA, 20 nt, Artificial Sequence
  Synthetic
cagcaacaggagggauacau

SEQ ID NO: 84788 - RNA, 21 nt, Artificial Sequence
  Synthetic
acagcaacaggagggauacau

SEQ ID NO: 84789 - RNA, 22 nt, Artificial Sequence
  Synthetic
uacagcaacaggagggauacau

SEQ ID NO: 84790 - RNA, 18 nt, Artificial Sequence
  Synthetic
ccugaacuuuaggcccau

SEQ ID NO: 84791 - RNA, 20 nt, Artificial Sequence
  Synthetic
ugccugaacuuuaggcccau

SEQ ID NO: 84792 - RNA, 21 nt, Artificial Sequence
  Synthetic
uugccugaacuuuaggcccau

SEQ ID NO: 84793 - RNA, 23 nt, Artificial Sequence
  Synthetic
aguugccugaacuuuaggcccau

SEQ ID NO: 84794 - RNA, 24 nt, Artificial Sequence
  Synthetic
  misc_feature (1)..(1): n is a, c, g, or u
naguugccugaacuuuaggcccau

SEQ ID NO: 84795 - RNA, 18 nt, Artificial Sequence
  Synthetic
cauugagauucccgagau

SEQ ID NO: 84796 - RNA, 19 nt, Artificial Sequence
  Synthetic
acauugagauucccgagau

SEQ ID NO: 84797 - RNA, 20 nt, Artificial Sequence
  Synthetic
aacauugagauucccgagau

SEQ ID NO: 84798 - RNA, 18 nt, Artificial Sequence
  Synthetic
  misc_feature (7)..(7): n is a, c, g, or u
agcccangaugaugggau

SEQ ID NO: 84799 - RNA, 19 nt, Artificial Sequence
  Synthetic
  misc_feature (8)..(8): n is a, c, g, or u
aagcccangaugaugggau

SEQ ID NO: 84800 - RNA, 20 nt, Artificial Sequence
  Synthetic
  misc_feature (9)..(9): n is a, c, g, or u
aaagcccangaugaugggau

SEQ ID NO: 84801 - RNA, 22 nt, Artificial Sequence
  Synthetic
  misc_feature (11)..(11): n is a, c, g, or u
cgaaagcccangaugaugggau

SEQ ID NO: 84802 - RNA, 23 nt, Artificial Sequence
  Synthetic
  misc_feature (12)..(12): n is a, c, g, or u
ccgaaagcccangaugaugggau

SEQ ID NO: 84803 - RNA, 24 nt, Artificial Sequence
  Synthetic
  misc_feature (13)..(13): n is a, c, g, or u
uccgaaagcccangaugaugggau

SEQ ID NO: 84804 - RNA, 18 nt, Artificial Sequence
  Synthetic
agguguccuuguugggau

SEQ ID NO: 84805 - RNA, 19 nt, Artificial Sequence
  Synthetic
cagguguccuuguugggau

SEQ ID NO: 84806 - RNA, 20 nt, Artificial Sequence
  Synthetic
ccagguguccuuguugggau

SEQ ID NO: 84807 - RNA, 23 nt, Artificial Sequence
  Synthetic
uggccagguguccuuguugggau

SEQ ID NO: 84808 - RNA, 24 nt, Artificial Sequence
  Synthetic
cuggccagguguccuuguugggau

SEQ ID NO: 84809 - RNA, 18 nt, Artificial Sequence
  Synthetic
ugaaggcuggauccaacu

SEQ ID NO: 84810 - RNA, 19 nt, Artificial Sequence
  Synthetic
cugaaggcuggauccaacu

SEQ ID NO: 84811 - RNA, 20 nt, Artificial Sequence
  Synthetic
ucugaaggcuggauccaacu

SEQ ID NO: 84812 - RNA, 18 nt, Artificial Sequence
  Synthetic
cagcgguaaaaagggacu

SEQ ID NO: 84813 - RNA, 19 nt, Artificial Sequence
  Synthetic
acagcgguaaaaagggacu

SEQ ID NO: 84814 - RNA, 20 nt, Artificial Sequence
  Synthetic
aacagcgguaaaaagggacu

SEQ ID NO: 84815 - RNA, 19 nt, Artificial Sequence
  Synthetic
ugauuggagguuggggacu

SEQ ID NO: 84816 - RNA, 21 nt, Artificial Sequence
  Synthetic
agugauuggagguuggggacu

SEQ ID NO: 84817 - RNA, 23 nt, Artificial Sequence
  Synthetic
ugagugauuggagguuggggacu

SEQ ID NO: 84818 - RNA, 18 nt, Artificial Sequence
  Synthetic
uaggcugccuuccugacu

SEQ ID NO: 84819 - RNA, 23 nt, Artificial Sequence
  Synthetic
  misc_feature (1)..(1): n is a, c, g, or u
ngggguaggcugccuuccugacu

SEQ ID NO: 84820 - RNA, 18 nt, Artificial Sequence
  Synthetic
  misc_feature (5)..(5): n is a, c, g, or u
  misc_feature (15)..(15): n is a, c, g, or u
cuucnuuucucauunacu

SEQ ID NO: 84821 - RNA, 19 nt, Artificial Sequence
  Synthetic
  misc_feature (6)..(6): n is a, c, g, or u
  misc_feature (16)..(16): n is a, c, g, or u
ucuucnuuucucauunacu

SEQ ID NO: 84822 - RNA, 20 nt, Artificial Sequence
  Synthetic
  misc_feature (1)..(1): n is a, c, g, or u
  misc_feature (7)..(7): n is a, c, g, or u
  misc_feature (17)..(17): n is a, c, g, or u
nucuucnuuucucauunacu

SEQ ID NO: 84823 - RNA, 21 nt, Artificial Sequence
  Synthetic
  misc_feature (2)..(2): n is a, c, g, or u
  misc_feature (8)..(8): n is a, c, g, or u
  misc_feature (18)..(18): n is a, c, g, or u
anucuucnuuucucauunacu

SEQ ID NO: 84824 - RNA, 22 nt, Artificial Sequence
  Synthetic
  misc_feature (3)..(3): n is a, c, g, or u
  misc_feature (9)..(9): n is a, c, g, or u
  misc_feature (19)..(19): n is a, c, g, or u
canucuucnuuucucauunacu

SEQ ID NO: 84825 - RNA, 24 nt, Artificial Sequence
  Synthetic
  misc_feature (5)..(5): n is a, c, g, or u
  misc_feature (11)..(11): n is a, c, g, or u
  misc_feature (21)..(21): n is a, c, g, or u
ugcanucuucnuuucucauunacu

SEQ ID NO: 84826 - RNA, 18 nt, Artificial Sequence
  Synthetic
agucuuugaaguaugccu

SEQ ID NO: 84827 - RNA, 19 nt, Artificial Sequence
  Synthetic
cagucuuugaaguaugccu

SEQ ID NO: 84828 - RNA, 20 nt, Artificial Sequence
  Synthetic
acagucuuugaaguaugccu

SEQ ID NO: 84829 - RNA, 18 nt, Artificial Sequence
  Synthetic
  misc_feature (1)..(1): n is a, c, g, or u
ncuccucccccaacuccu

SEQ ID NO: 84830 - RNA, 19 nt, Artificial Sequence
  Synthetic
  misc_feature (1)..(2): n is a, c, g, or u
nncuccucccccaacuccu

SEQ ID NO: 84831 - RNA, 20 nt, Artificial Sequence
  Synthetic
  misc_feature (2)..(3): n is a, c, g, or u
anncuccucccccaacuccu

SEQ ID NO: 84832 - RNA, 21 nt, Artificial Sequence
  Synthetic
  misc_feature (3)..(4): n is a, c, g, or u
uanncuccucccccaacuccu

SEQ ID NO: 84833 - RNA, 22 nt, Artificial Sequence
  Synthetic
  misc_feature (4)..(5): n is a, c, g, or u
cuanncuccucccccaacuccu

SEQ ID NO: 84834 - RNA, 23 nt, Artificial Sequence
  Synthetic
  misc_feature (1)..(1): n is a, c, g, or u
  misc_feature (5)..(6): n is a, c, g, or u
ncuanncuccucccccaacuccu

SEQ ID NO: 84835 - RNA, 24 nt, Artificial Sequence
  Synthetic
  misc_feature (2)..(2): n is a, c, g, or u
  misc_feature (6)..(7): n is a, c, g, or u
ancuanncuccucccccaacuccu

SEQ ID NO: 84836 - RNA, 18 nt, Artificial Sequence
  Synthetic
  misc_feature (9)..(9): n is a, c, g, or u
aacacgagnagggguccu

SEQ ID NO: 84837 - RNA, 19 nt, Artificial Sequence
  Synthetic
  misc_feature (10)..(10): n is a, c, g, or u
uaacacgagnagggguccu

SEQ ID NO: 84838 - RNA, 18 nt, Artificial Sequence
  Synthetic
  misc_feature (14)..(14): n is a, c, g, or u
aguaacuccacagnagcu

SEQ ID NO: 84839 - RNA, 20 nt, Artificial Sequence
  Synthetic
  misc_feature (16)..(16): n is a, c, g, or u
agaguaacuccacagnagcu

SEQ ID NO: 84840 - RNA, 22 nt, Artificial Sequence
  Synthetic
  misc_feature (18)..(18): n is a, c, g, or u
cgagaguaacuccacagnagcu

SEQ ID NO: 84841 - RNA, 23 nt, Artificial Sequence
  Synthetic
  misc_feature (19)..(19): n is a, c, g, or u
acgagaguaacuccacagnagcu

SEQ ID NO: 84842 - RNA, 24 nt, Artificial Sequence
  Synthetic
  misc_feature (20)..(20): n is a, c, g, or u
aacgagaguaacuccacagnagcu

SEQ ID NO: 84843 - RNA, 18 nt, Artificial Sequence
  Synthetic
acaguagucuccggaagu

SEQ ID NO: 84844 - RNA, 19 nt, Artificial Sequence
  Synthetic
aacaguagucuccggaagu

SEQ ID NO: 84845 - RNA, 20 nt, Artificial Sequence
  Synthetic
caacaguagucuccggaagu

SEQ ID NO: 84846 - RNA, 21 nt, Artificial Sequence
  Synthetic
acaacaguagucuccggaagu

SEQ ID NO: 84847 - RNA, 22 nt, Artificial Sequence
  Synthetic
aacaacaguagucuccggaagu

SEQ ID NO: 84848 - RNA, 23 nt, Artificial Sequence
  Synthetic
uaacaacaguagucuccggaagu

SEQ ID NO: 84849 - RNA, 24 nt, Artificial Sequence
  Synthetic
cuaacaacaguagucuccggaagu

SEQ ID NO: 84850 - RNA, 18 nt, Artificial Sequence
  Synthetic
  misc_feature (2)..(2): n is a, c, g, or u
  misc_feature (8)..(8): n is a, c, g, or u
anugucunguuuggaagu

SEQ ID NO: 84851 - RNA, 19 nt, Artificial Sequence
  Synthetic
  misc_feature (3)..(3): n is a, c, g, or u
  misc_feature (9)..(9): n is a, c, g, or u
uanugucunguuuggaagu

SEQ ID NO: 84852 - RNA, 20 nt, Artificial Sequence
  Synthetic
  misc_feature (4)..(4): n is a, c, g, or u
  misc_feature (10)..(10): n is a, c, g, or u
auanugucunguuuggaagu

SEQ ID NO: 84853 - RNA, 21 nt, Artificial Sequence
  Synthetic
  misc_feature (5)..(5): n is a, c, g, or u
  misc_feature (11)..(11): n is a, c, g, or u
aauanugucunguuuggaagu

SEQ ID NO: 84854 - RNA, 22 nt, Artificial Sequence
  Synthetic
  misc_feature (6)..(6): n is a, c, g, or u
  misc_feature (12)..(12): n is a, c, g, or u
aaauanugucunguuuggaagu

SEQ ID NO: 84855 - RNA, 23 nt, Artificial Sequence
  Synthetic
  misc_feature (7)..(7): n is a, c, g, or u
  misc_feature (13)..(13): n is a, c, g, or u
uaaauanugucunguuuggaagu

SEQ ID NO: 84856 - RNA, 19 nt, Artificial Sequence
  Synthetic
ugaccaagccccagccagu

SEQ ID NO: 84857 - RNA, 20 nt, Artificial Sequence
  Synthetic
augaccaagccccagccagu

SEQ ID NO: 84858 - RNA, 19 nt, Artificial Sequence
  Synthetic
cggcuaggaguuccgcagu

SEQ ID NO: 84859 - RNA, 18 nt, Artificial Sequence
  Synthetic
ucuauaagcuggaggagu

SEQ ID NO: 84860 - RNA, 18 nt, Artificial Sequence
  Synthetic
  misc_feature (8)..(8): n is a, c, g, or u
  misc_feature (12)..(12): n is a, c, g, or u
uccuugancagnagucgu

SEQ ID NO: 84861 - RNA, 19 nt, Artificial Sequence
  Synthetic
  misc_feature (9)..(9): n is a, c, g, or u
  misc_feature (13)..(13): n is a, c, g, or u
uuccuugancagnagucgu

SEQ ID NO: 84862 - RNA, 22 nt, Artificial Sequence
  Synthetic
  misc_feature (12)..(12): n is a, c, g, or u
  misc_feature (16)..(16): n is a, c, g, or u
agguuccuugancagnagucgu

SEQ ID NO: 84863 - RNA, 24 nt, Artificial Sequence
  Synthetic
  misc_feature (14)..(14): n is a, c, g, or u
  misc_feature (18)..(18): n is a, c, g, or u
agagguuccuugancagnagucgu

SEQ ID NO: 84864 - RNA, 18 nt, Artificial Sequence
  Synthetic
  misc_feature (5)..(5): n is a, c, g, or u
uuuunguuuuguuagggu

SEQ ID NO: 84865 - RNA, 19 nt, Artificial Sequence
  Synthetic
  misc_feature (6)..(6): n is a, c, g, or u
cuuuunguuuuguuagggu

SEQ ID NO: 84866 - RNA, 20 nt, Artificial Sequence
  Synthetic
  misc_feature (7)..(7): n is a, c, g, or u
ucuuuunguuuuguuagggu

SEQ ID NO: 84867 - RNA, 21 nt, Artificial Sequence
  Synthetic
  misc_feature (8)..(8): n is a, c, g, or u
aucuuuunguuuuguuagggu

SEQ ID NO: 84868 - RNA, 22 nt, Artificial Sequence
  Synthetic
  misc_feature (9)..(9): n is a, c, g, or u
caucuuuunguuuuguuagggu

SEQ ID NO: 84869 - RNA, 23 nt, Artificial Sequence
  Synthetic
  misc_feature (10)..(10): n is a, c, g, or u
ccaucuuuunguuuuguuagggu

SEQ ID NO: 84870 - RNA, 24 nt, Artificial Sequence
  Synthetic
  misc_feature (11)..(11): n is a, c, g, or u
cccaucuuuunguuuuguuagggu

SEQ ID NO: 84871 - RNA, 20 nt, Artificial Sequence
  Synthetic
aggugaaaaaguugcauggu

SEQ ID NO: 84872 - RNA, 18 nt, Artificial Sequence
  Synthetic
  misc_feature (8)..(8): n is a, c, g, or u
uuuugaunaugucuuggu

SEQ ID NO: 84873 - RNA, 19 nt, Artificial Sequence
  Synthetic
  misc_feature (9)..(9): n is a, c, g, or u
uuuuugaunaugucuuggu

SEQ ID NO: 84874 - RNA, 20 nt, Artificial Sequence
  Synthetic
  misc_feature (10)..(10): n is a, c, g, or u
uuuuuugaunaugucuuggu

SEQ ID NO: 84875 - RNA, 21 nt, Artificial Sequence
  Synthetic
  misc_feature (11)..(11): n is a, c, g, or u
auuuuuugaunaugucuuggu

SEQ ID NO: 84876 - RNA, 22 nt, Artificial Sequence
  Synthetic
  misc_feature (12)..(12): n is a, c, g, or u
cauuuuuugaunaugucuuggu

SEQ ID NO: 84877 - RNA, 23 nt, Artificial Sequence
  Synthetic
  misc_feature (13)..(13): n is a, c, g, or u
acauuuuuugaunaugucuuggu

SEQ ID NO: 84878 - RNA, 24 nt, Artificial Sequence
  Synthetic
  misc_feature (14)..(14): n is a, c, g, or u
cacauuuuuugaunaugucuuggu

SEQ ID NO: 84879 - RNA, 18 nt, Artificial Sequence
  Synthetic
  misc_feature (14)..(14): n is a, c, g, or u
cacauuuuuugaunaugu

SEQ ID NO: 84880 - RNA, 19 nt, Artificial Sequence
  Synthetic
  misc_feature (15)..(15): n is a, c, g, or u
ucacauuuuuugaunaugu

SEQ ID NO: 84881 - RNA, 20 nt, Artificial Sequence
  Synthetic
  misc_feature (16)..(16): n is a, c, g, or u
uucacauuuuuugaunaugu

SEQ ID NO: 84882 - RNA, 22 nt, Artificial Sequence
  Synthetic
  misc_feature (18)..(18): n is a, c, g, or u
uguucacauuuuuugaunaugu

SEQ ID NO: 84883 - RNA, 23 nt, Artificial Sequence
  Synthetic
  misc_feature (1)..(1): n is a, c, g, or u
  misc_feature (19)..(19): n is a, c, g, or u
nuguucacauuuuuugaunaugu

SEQ ID NO: 84884 - RNA, 24 nt, Artificial Sequence
  Synthetic
  misc_feature (2)..(2): n is a, c, g, or u
  misc_feature (20)..(20): n is a, c, g, or u
anuguucacauuuuuugaunaugu

SEQ ID NO: 84885 - RNA, 18 nt, Artificial Sequence
  Synthetic
ccgccuuccauagagugu

SEQ ID NO: 84886 - RNA, 19 nt, Artificial Sequence
  Synthetic
cccgccuuccauagagugu

SEQ ID NO: 84887 - RNA, 20 nt, Artificial Sequence
  Synthetic
acccgccuuccauagagugu

SEQ ID NO: 84888 - RNA, 18 nt, Artificial Sequence
  Synthetic
uagacucugcgguauugu

SEQ ID NO: 84889 - RNA, 19 nt, Artificial Sequence
  Synthetic
cuagacucugcgguauugu

SEQ ID NO: 84890 - RNA, 20 nt, Artificial Sequence
  Synthetic
ucuagacucugcgguauugu

SEQ ID NO: 84891 - RNA, 18 nt, Artificial Sequence
  Synthetic
cuggccagguguccuugu

SEQ ID NO: 84892 - RNA, 19 nt, Artificial Sequence
  Synthetic
ucuggccagguguccuugu

SEQ ID NO: 84893 - RNA, 18 nt, Artificial Sequence
  Synthetic
  misc_feature (11)..(11): n is a, c, g, or u
cccaucuuuunguuuugu

SEQ ID NO: 84894 - RNA, 19 nt, Artificial Sequence
  Synthetic
  misc_feature (12)..(12): n is a, c, g, or u
ccccaucuuuunguuuugu

SEQ ID NO: 84895 - RNA, 20 nt, Artificial Sequence
  Synthetic
  misc_feature (13)..(13): n is a, c, g, or u
accccaucuuuunguuuugu

SEQ ID NO: 84896 - RNA, 21 nt, Artificial Sequence
  Synthetic
  misc_feature (14)..(14): n is a, c, g, or u
aaccccaucuuuunguuuugu

SEQ ID NO: 84897 - RNA, 22 nt, Artificial Sequence
  Synthetic
  misc_feature (15)..(15): n is a, c, g, or u
uaaccccaucuuuunguuuugu

SEQ ID NO: 84898 - RNA, 24 nt, Artificial Sequence
  Synthetic
  misc_feature (17)..(17): n is a, c, g, or u
aguaaccccaucuuuunguuuugu

SEQ ID NO: 84899 - RNA, 20 nt, Artificial Sequence
  Synthetic
  misc_feature (4)..(4): n is a, c, g, or u
  misc_feature (19)..(19): n is a, c, g, or u
uggnaaauauuugguaacnu

SEQ ID NO: 84900 - RNA, 21 nt, Artificial Sequence
  Synthetic
  misc_feature (5)..(5): n is a, c, g, or u
  misc_feature (20)..(20): n is a, c, g, or u
auggnaaauauuugguaacnu

SEQ ID NO: 84901 - RNA, 22 nt, Artificial Sequence
  Synthetic
  misc_feature (6)..(6): n is a, c, g, or u
  misc_feature (21)..(21): n is a, c, g, or u
aauggnaaauauuugguaacnu

SEQ ID NO: 84902 - RNA, 23 nt, Artificial Sequence
  Synthetic
  misc_feature (1)..(1): n is a, c, g, or u
  misc_feature (7)..(7): n is a, c, g, or u
  misc_feature (22)..(22): n is a, c, g, or u
naauggnaaauauuugguaacnu

SEQ ID NO: 84903 - RNA, 24 nt, Artificial Sequence
  Synthetic
  misc_feature (2)..(2): n is a, c, g, or u
  misc_feature (8)..(8): n is a, c, g, or u
  misc_feature (23)..(23): n is a, c, g, or u
cnaauggnaaauauuugguaacnu

SEQ ID NO: 84904 - RNA, 18 nt, Artificial Sequence
  Synthetic
  misc_feature (17)..(17): n is a, c, g, or u
caggagacucuaaggcnu

SEQ ID NO: 84905 - RNA, 19 nt, Artificial Sequence
  Synthetic
  misc_feature (18)..(18): n is a, c, g, or u
ucaggagacucuaaggcnu

SEQ ID NO: 84906 - RNA, 20 nt, Artificial Sequence
  Synthetic
  misc_feature (19)..(19): n is a, c, g, or u
cucaggagacucuaaggcnu

SEQ ID NO: 84907 - RNA, 22 nt, Artificial Sequence
  Synthetic
  misc_feature (21)..(21): n is a, c, g, or u
ugcucaggagacucuaaggcnu

SEQ ID NO: 84908 - RNA, 23 nt, Artificial Sequence
  Synthetic
  misc_feature (22)..(22): n is a, c, g, or u
augcucaggagacucuaaggcnu

SEQ ID NO: 84909 - RNA, 24 nt, Artificial Sequence
  Synthetic
  misc_feature (23)..(23): n is a, c, g, or u
aaugcucaggagacucuaaggcnu

SEQ ID NO: 84910 - RNA, 18 nt, Artificial Sequence
  Synthetic
ccaauccucgagaagauu

SEQ ID NO: 84911 - RNA, 19 nt, Artificial Sequence
  Synthetic
cccaauccucgagaagauu

SEQ ID NO: 84912 - RNA, 20 nt, Artificial Sequence
  Synthetic
ccccaauccucgagaagauu

SEQ ID NO: 84913 - RNA, 18 nt, Artificial Sequence
  Synthetic
aaagaaucccagaggauu

SEQ ID NO: 84914 - RNA, 22 nt, Artificial Sequence
  Synthetic
cgggaaagaaucccagaggauu

SEQ ID NO: 84915 - RNA, 23 nt, Artificial Sequence
  Synthetic
ucgggaaagaaucccagaggauu

SEQ ID NO: 84916 - RNA, 19 nt, Artificial Sequence
  Synthetic
ugaagucccaaucuggauu

SEQ ID NO: 84917 - RNA, 20 nt, Artificial Sequence
  Synthetic
uugaagucccaaucuggauu

SEQ ID NO: 84918 - RNA, 19 nt, Artificial Sequence
  Synthetic
aggagguuggugagugauu

SEQ ID NO: 84919 - RNA, 20 nt, Artificial Sequence
  Synthetic
caggagguuggugagugauu

SEQ ID NO: 84920 - RNA, 18 nt, Artificial Sequence
  Synthetic
  misc_feature (5)..(5): n is a, c, g, or u
  misc_feature (14)..(14): n is a, c, g, or u
caauncguugacanacuu

SEQ ID NO: 84921 - RNA, 19 nt, Artificial Sequence
  Synthetic
  misc_feature (6)..(6): n is a, c, g, or u
  misc_feature (15)..(15): n is a, c, g, or u
acaauncguugacanacuu

SEQ ID NO: 84922 - RNA, 20 nt, Artificial Sequence
  Synthetic
  misc_feature (7)..(7): n is a, c, g, or u
  misc_feature (16)..(16): n is a, c, g, or u
cacaauncguugacanacuu

SEQ ID NO: 84923 - RNA, 18 nt, Artificial Sequence
  Synthetic
  misc_feature (1)..(1): n is a, c, g, or u
  misc_feature (10)..(10): n is a, c, g, or u
nguaaaguuncccaccuu

SEQ ID NO: 84924 - RNA, 19 nt, Artificial Sequence
  Synthetic
  misc_feature (2)..(2): n is a, c, g, or u
  misc_feature (11)..(11): n is a, c, g, or u
cnguaaaguuncccaccuu

SEQ ID NO: 84925 - RNA, 20 nt, Artificial Sequence
  Synthetic
  misc_feature (3)..(3): n is a, c, g, or u
  misc_feature (12)..(12): n is a, c, g, or u
ccnguaaaguuncccaccuu

SEQ ID NO: 84926 - RNA, 21 nt, Artificial Sequence
  Synthetic
  misc_feature (4)..(4): n is a, c, g, or u
  misc_feature (13)..(13): n is a, c, g, or u
cccnguaaaguuncccaccuu

SEQ ID NO: 84927 - RNA, 23 nt, Artificial Sequence
  Synthetic
  misc_feature (6)..(6): n is a, c, g, or u
  misc_feature (15)..(15): n is a, c, g, or u
agcccnguaaaguuncccaccuu

SEQ ID NO: 84928 - RNA, 24 nt, Artificial Sequence
  Synthetic
  misc_feature (7)..(7): n is a, c, g, or u
  misc_feature (16)..(16): n is a, c, g, or u
aagcccnguaaaguuncccaccuu

SEQ ID NO: 84929 - RNA, 23 nt, Artificial Sequence
  Synthetic
aggacaaacgggcaacauaccuu

SEQ ID NO: 84930 - RNA, 18 nt, Artificial Sequence
  Synthetic
uuuacacagaaaggccuu

SEQ ID NO: 84931 - RNA, 20 nt, Artificial Sequence
  Synthetic
uguuuacacagaaaggccuu

SEQ ID NO: 84932 - RNA, 21 nt, Artificial Sequence
  Synthetic
uuguuuacacagaaaggccuu

SEQ ID NO: 84933 - RNA, 22 nt, Artificial Sequence
  Synthetic
auuguuuacacagaaaggccuu

SEQ ID NO: 84934 - RNA, 23 nt, Artificial Sequence
  Synthetic
uauuguuuacacagaaaggccuu

SEQ ID NO: 84935 - RNA, 18 nt, Artificial Sequence
  Synthetic
  misc_feature (2)..(2): n is a, c, g, or u
  misc_feature (5)..(5): n is a, c, g, or u
  misc_feature (9)..(10): n is a, c, g, or u
cncungaunnuggaucuu

SEQ ID NO: 84936 - RNA, 19 nt, Artificial Sequence
  Synthetic
  misc_feature (3)..(3): n is a, c, g, or u
  misc_feature (6)..(6): n is a, c, g, or u
  misc_feature (10)..(11): n is a, c, g, or u
ucncungaunnuggaucuu

SEQ ID NO: 84937 - RNA, 22 nt, Artificial Sequence
  Synthetic
  misc_feature (6)..(6): n is a, c, g, or u
  misc_feature (9)..(9): n is a, c, g, or u
  misc_feature (13)..(14): n is a, c, g, or u
aggucncungaunnuggaucuu

SEQ ID NO: 84938 - RNA, 23 nt, Artificial Sequence
  Synthetic
  misc_feature (7)..(7): n is a, c, g, or u
  misc_feature (10)..(10): n is a, c, g, or u
  misc_feature (14)..(15): n is a, c, g, or u
uaggucncungaunnuggaucuu

SEQ ID NO: 84939 - RNA, 24 nt, Artificial Sequence
  Synthetic
  misc_feature (8)..(8): n is a, c, g, or u
  misc_feature (11)..(11): n is a, c, g, or u
  misc_feature (15)..(16): n is a, c, g, or u
cuaggucncungaunnuggaucuu

SEQ ID NO: 84940 - RNA, 18 nt, Artificial Sequence
  Synthetic
  misc_feature (2)..(2): n is a, c, g, or u
cnuuaaacaaacagucuu

SEQ ID NO: 84941 - RNA, 19 nt, Artificial Sequence
  Synthetic
  misc_feature (3)..(3): n is a, c, g, or u
ucnuuaaacaaacagucuu

SEQ ID NO: 84942 - RNA, 21 nt, Artificial Sequence
  Synthetic
  misc_feature (5)..(5): n is a, c, g, or u
agucnuuaaacaaacagucuu

SEQ ID NO: 84943 - RNA, 22 nt, Artificial Sequence
  Synthetic
  misc_feature (6)..(6): n is a, c, g, or u
cagucnuuaaacaaacagucuu

SEQ ID NO: 84944 - RNA, 23 nt, Artificial Sequence
  Synthetic
  misc_feature (7)..(7): n is a, c, g, or u
ccagucnuuaaacaaacagucuu

SEQ ID NO: 84945 - RNA, 24 nt, Artificial Sequence
  Synthetic
  misc_feature (8)..(8): n is a, c, g, or u
cccagucnuuaaacaaacagucuu

SEQ ID NO: 84946 - RNA, 18 nt, Artificial Sequence
  Synthetic
  misc_feature (6)..(7): n is a, c, g, or u
caagannuggugggcguu

SEQ ID NO: 84947 - RNA, 22 nt, Artificial Sequence
  Synthetic
  misc_feature (10)..(11): n is a, c, g, or u
ugggcaagannuggugggcguu

SEQ ID NO: 84948 - RNA, 23 nt, Artificial Sequence
  Synthetic
  misc_feature (11)..(12): n is a, c, g, or u
uugggcaagannuggugggcguu

SEQ ID NO: 84949 - RNA, 24 nt, Artificial Sequence
  Synthetic
  misc_feature (12)..(13): n is a, c, g, or u
cuugggcaagannuggugggcguu

SEQ ID NO: 84950 - RNA, 19 nt, Artificial Sequence
  Synthetic
  misc_feature (8)..(9): n is a, c, g, or u
  misc_feature (16)..(16): n is a, c, g, or u
uggucccnngcuggunguu

SEQ ID NO: 84951 - RNA, 20 nt, Artificial Sequence
  Synthetic
  misc_feature (9)..(10): n is a, c, g, or u
  misc_feature (17)..(17): n is a, c, g, or u
auggucccnngcuggunguu

SEQ ID NO: 84952 - RNA, 21 nt, Artificial Sequence
  Synthetic
  misc_feature (10)..(11): n is a, c, g, or u
  misc_feature (18)..(18): n is a, c, g, or u
cauggucccnngcuggunguu

SEQ ID NO: 84953 - RNA, 23 nt, Artificial Sequence
  Synthetic
  misc_feature (12)..(13): n is a, c, g, or u
  misc_feature (20)..(20): n is a, c, g, or u
ugcauggucccnngcuggunguu

SEQ ID NO: 84954 - RNA, 24 nt, Artificial Sequence
  Synthetic
  misc_feature (13)..(14): n is a, c, g, or u
  misc_feature (21)..(21): n is a, c, g, or u
cugcauggucccnngcuggunguu

SEQ ID NO: 84955 - RNA, 18 nt, Artificial Sequence
  Synthetic
aaugauuaacuagauguu

SEQ ID NO: 84956 - RNA, 19 nt, Artificial Sequence
  Synthetic
uaaugauuaacuagauguu

SEQ ID NO: 84957 - RNA, 21 nt, Artificial Sequence
  Synthetic
aguaaugauuaacuagauguu

SEQ ID NO: 84958 - RNA, 22 nt, Artificial Sequence
  Synthetic
aaguaaugauuaacuagauguu

SEQ ID NO: 84959 - RNA, 18 nt, Artificial Sequence
  Synthetic
  misc_feature (7)..(7): n is a, c, g, or u
uacaaanuguucacauuu

SEQ ID NO: 84960 - RNA, 19 nt, Artificial Sequence
  Synthetic
  misc_feature (8)..(8): n is a, c, g, or u
cuacaaanuguucacauuu

SEQ ID NO: 84961 - RNA, 20 nt, Artificial Sequence
  Synthetic
  misc_feature (9)..(9): n is a, c, g, or u
ccuacaaanuguucacauuu

SEQ ID NO: 84962 - RNA, 21 nt, Artificial Sequence
  Synthetic
  misc_feature (1)..(1): n is a, c, g, or u
  misc_feature (10)..(10): n is a, c, g, or u
nccuacaaanuguucacauuu

SEQ ID NO: 84963 - RNA, 24 nt, Artificial Sequence
  Synthetic
  misc_feature (4)..(4): n is a, c, g, or u
  misc_feature (13)..(13): n is a, c, g, or u
uggnccuacaaanuguucacauuu

SEQ ID NO: 84964 - RNA, 19 nt, Artificial Sequence
  Synthetic
  misc_feature (9)..(9): n is a, c, g, or u
  misc_feature (15)..(15): n is a, c, g, or u
uguaaauanugucunguuu

SEQ ID NO: 84965 - RNA, 21 nt, Artificial Sequence
  Synthetic
  misc_feature (11)..(11): n is a, c, g, or u
  misc_feature (17)..(17): n is a, c, g, or u
uguguaaauanugucunguuu

SEQ ID NO: 84966 - RNA, 23 nt, Artificial Sequence
  Synthetic
  misc_feature (13)..(13): n is a, c, g, or u
  misc_feature (19)..(19): n is a, c, g, or u
aguguguaaauanugucunguuu

SEQ ID NO: 84967 - RNA, 18 nt, Artificial Sequence
  Synthetic
  misc_feature (11)..(11): n is a, c, g, or u
uaggaaaagangguguuu

SEQ ID NO: 84968 - RNA, 19 nt, Artificial Sequence
  Synthetic
  misc_feature (12)..(12): n is a, c, g, or u
uuaggaaaagangguguuu

SEQ ID NO: 84969 - RNA, 20 nt, Artificial Sequence
  Synthetic
  misc_feature (13)..(13): n is a, c, g, or u
auuaggaaaagangguguuu

SEQ ID NO: 84970 - RNA, 21 nt, Artificial Sequence
  Synthetic
  misc_feature (14)..(14): n is a, c, g, or u
uauuaggaaaagangguguuu

SEQ ID NO: 84971 - RNA, 22 nt, Artificial Sequence
  Synthetic
  misc_feature (15)..(15): n is a, c, g, or u
auauuaggaaaagangguguuu

SEQ ID NO: 84972 - RNA, 23 nt, Artificial Sequence
  Synthetic
  misc_feature (16)..(16): n is a, c, g, or u
uauauuaggaaaagangguguuu

SEQ ID NO: 84973 - RNA, 19 nt, Artificial Sequence
  Synthetic
ugcugccccuuuuacacaa

SEQ ID NO: 84974 - RNA, 20 nt, Artificial Sequence
  Synthetic
uugcugccccuuuuacacaa

SEQ ID NO: 84975 - RNA, 21 nt, Artificial Sequence
  Synthetic
uuugcugccccuuuuacacaa

SEQ ID NO: 84976 - RNA, 22 nt, Artificial Sequence
  Synthetic
uuuugcugccccuuuuacacaa

SEQ ID NO: 84977 - RNA, 18 nt, Artificial Sequence
  Synthetic
caccuggccagacgccaa

SEQ ID NO: 84978 - RNA, 19 nt, Artificial Sequence
  Synthetic
acaccuggccagacgccaa

SEQ ID NO: 84979 - RNA, 19 nt, Artificial Sequence
  Synthetic
ugcuaggcugugcugccaa

SEQ ID NO: 84980 - RNA, 20 nt, Artificial Sequence
  Synthetic
cugcuaggcugugcugccaa

SEQ ID NO: 84981 - RNA, 18 nt, Artificial Sequence
  Synthetic
aggaggcuguaggcauaa

SEQ ID NO: 84982 - RNA, 19 nt, Artificial Sequence
  Synthetic
uaggaggcuguaggcauaa

SEQ ID NO: 84983 - RNA, 20 nt, Artificial Sequence
  Synthetic
  misc_feature (1)..(1): n is a, c, g, or u
nuaggaggcuguaggcauaa

SEQ ID NO: 84984 - RNA, 21 nt, Artificial Sequence
  Synthetic
  misc_feature (2)..(2): n is a, c, g, or u
anuaggaggcuguaggcauaa

SEQ ID NO: 84985 - RNA, 22 nt, Artificial Sequence
  Synthetic
  misc_feature (3)..(3): n is a, c, g, or u
uanuaggaggcuguaggcauaa

SEQ ID NO: 84986 - RNA, 24 nt, Artificial Sequence
  Synthetic
  misc_feature (5)..(5): n is a, c, g, or u
uguanuaggaggcuguaggcauaa

SEQ ID NO: 84987 - RNA, 18 nt, Artificial Sequence
  Synthetic
accuuauuauccagaaca

SEQ ID NO: 84988 - RNA, 19 nt, Artificial Sequence
  Synthetic
aaccuuauuauccagaaca

SEQ ID NO: 84989 - RNA, 20 nt, Artificial Sequence
  Synthetic
aaaccuuauuauccagaaca

SEQ ID NO: 84990 - RNA, 21 nt, Artificial Sequence
  Synthetic
uaaaccuuauuauccagaaca

SEQ ID NO: 84991 - RNA, 22 nt, Artificial Sequence
  Synthetic
uuaaaccuuauuauccagaaca

SEQ ID NO: 84992 - RNA, 23 nt, Artificial Sequence
  Synthetic
auuaaaccuuauuauccagaaca

SEQ ID NO: 84993 - RNA, 24 nt, Artificial Sequence
  Synthetic
uauuaaaccuuauuauccagaaca

SEQ ID NO: 84994 - RNA, 18 nt, Artificial Sequence
  Synthetic
  misc_feature (9)..(9): n is a, c, g, or u
uuuguaggnccacucaca

SEQ ID NO: 84995 - RNA, 19 nt, Artificial Sequence
  Synthetic
  misc_feature (1)..(1): n is a, c, g, or u
  misc_feature (10)..(10): n is a, c, g, or u
nuuuguaggnccacucaca

SEQ ID NO: 84996 - RNA, 20 nt, Artificial Sequence
  Synthetic
  misc_feature (2)..(2): n is a, c, g, or u
  misc_feature (11)..(11): n is a, c, g, or u
anuuuguaggnccacucaca

SEQ ID NO: 84997 - RNA, 21 nt, Artificial Sequence
  Synthetic
  misc_feature (3)..(3): n is a, c, g, or u
  misc_feature (12)..(12): n is a, c, g, or u
canuuuguaggnccacucaca

SEQ ID NO: 84998 - RNA, 22 nt, Artificial Sequence
  Synthetic
  misc_feature (4)..(4): n is a, c, g, or u
  misc_feature (13)..(13): n is a, c, g, or u
acanuuuguaggnccacucaca

SEQ ID NO: 84999 - RNA, 23 nt, Artificial Sequence
  Synthetic
  misc_feature (5)..(5): n is a, c, g, or u
  misc_feature (14)..(14): n is a, c, g, or u
aacanuuuguaggnccacucaca

SEQ ID NO: 85000 - RNA, 18 nt, Artificial Sequence
  Synthetic
  misc_feature (7)..(7): n is a, c, g, or u
  misc_feature (15)..(15): n is a, c, g, or u
acaagancacaucanaca

SEQ ID NO: 85001 - RNA, 19 nt, Artificial Sequence
  Synthetic
  misc_feature (8)..(8): n is a, c, g, or u
  misc_feature (16)..(16): n is a, c, g, or u
cacaagancacaucanaca

SEQ ID NO: 85002 - RNA, 20 nt, Artificial Sequence
  Synthetic
  misc_feature (9)..(9): n is a, c, g, or u
  misc_feature (17)..(17): n is a, c, g, or u
ccacaagancacaucanaca

SEQ ID NO: 85003 - RNA, 22 nt, Artificial Sequence
  Synthetic
  misc_feature (11)..(11): n is a, c, g, or u
  misc_feature (19)..(19): n is a, c, g, or u
ugccacaagancacaucanaca

SEQ ID NO: 85004 - RNA, 23 nt, Artificial Sequence
  Synthetic
  misc_feature (12)..(12): n is a, c, g, or u
  misc_feature (20)..(20): n is a, c, g, or u
uugccacaagancacaucanaca

SEQ ID NO: 85005 - RNA, 24 nt, Artificial Sequence
  Synthetic
  misc_feature (1)..(1): n is a, c, g, or u
  misc_feature (13)..(13): n is a, c, g, or u
  misc_feature (21)..(21): n is a, c, g, or u
nuugccacaagancacaucanaca

SEQ ID NO: 85006 - RNA, 18 nt, Artificial Sequence
  Synthetic
ccuccagcuuauagacca

SEQ ID NO: 85007 - RNA, 19 nt, Artificial Sequence
  Synthetic
uccuccagcuuauagacca

SEQ ID NO: 85008 - RNA, 20 nt, Artificial Sequence
  Synthetic
cuccuccagcuuauagacca

SEQ ID NO: 85009 - RNA, 18 nt, Artificial Sequence
  Synthetic
acacucauccucaggcca

SEQ ID NO: 85010 - RNA, 19 nt, Artificial Sequence
  Synthetic
aacacucauccucaggcca

SEQ ID NO: 85011 - RNA, 20 nt, Artificial Sequence
  Synthetic
aaacacucauccucaggcca

SEQ ID NO: 85012 - RNA, 22 nt, Artificial Sequence
  Synthetic
agaaacacucauccucaggcca

SEQ ID NO: 85013 - RNA, 24 nt, Artificial Sequence
  Synthetic
ugagaaacacucauccucaggcca

SEQ ID NO: 85014 - RNA, 18 nt, Artificial Sequence
  Synthetic
  misc_feature (4)..(4): n is a, c, g, or u
  misc_feature (12)..(12): n is a, c, g, or u
auanuacaaacnuugcca

SEQ ID NO: 85015 - RNA, 19 nt, Artificial Sequence
  Synthetic
  misc_feature (5)..(5): n is a, c, g, or u
  misc_feature (13)..(13): n is a, c, g, or u
cauanuacaaacnuugcca

SEQ ID NO: 85016 - RNA, 23 nt, Artificial Sequence
  Synthetic
  misc_feature (9)..(9): n is a, c, g, or u
  misc_feature (17)..(17): n is a, c, g, or u
agggcauanuacaaacnuugcca

SEQ ID NO: 85017 - RNA, 24 nt, Artificial Sequence
  Synthetic
  misc_feature (10)..(10): n is a, c, g, or u
  misc_feature (18)..(18): n is a, c, g, or u
cagggcauanuacaaacnuugcca

SEQ ID NO: 85018 - RNA, 19 nt, Artificial Sequence
  Synthetic
  misc_feature (1)..(1): n is a, c, g, or u
  misc_feature (16)..(16): n is a, c, g, or u
nguuaccaaauauuuncca

SEQ ID NO: 85019 - RNA, 20 nt, Artificial Sequence
  Synthetic
  misc_feature (2)..(2): n is a, c, g, or u
  misc_feature (17)..(17): n is a, c, g, or u
anguuaccaaauauuuncca

SEQ ID NO: 85020 - RNA, 21 nt, Artificial Sequence
  Synthetic
  misc_feature (3)..(3): n is a, c, g, or u
  misc_feature (18)..(18): n is a, c, g, or u
aanguuaccaaauauuuncca

SEQ ID NO: 85021 - RNA, 22 nt, Artificial Sequence
  Synthetic
  misc_feature (4)..(4): n is a, c, g, or u
  misc_feature (19)..(19): n is a, c, g, or u
aaanguuaccaaauauuuncca

SEQ ID NO: 85022 - RNA, 23 nt, Artificial Sequence
  Synthetic
  misc_feature (5)..(5): n is a, c, g, or u
  misc_feature (20)..(20): n is a, c, g, or u
caaanguuaccaaauauuuncca

SEQ ID NO: 85023 - RNA, 24 nt, Artificial Sequence
  Synthetic
  misc_feature (6)..(6): n is a, c, g, or u
  misc_feature (21)..(21): n is a, c, g, or u
ccaaanguuaccaaauauuuncca

SEQ ID NO: 85024 - RNA, 18 nt, Artificial Sequence
  Synthetic
  misc_feature (1)..(1): n is a, c, g, or u
ncauacugcacucaggca

SEQ ID NO: 85025 - RNA, 19 nt, Artificial Sequence
  Synthetic
  misc_feature (2)..(2): n is a, c, g, or u
ancauacugcacucaggca

SEQ ID NO: 85026 - RNA, 20 nt, Artificial Sequence
  Synthetic
  misc_feature (3)..(3): n is a, c, g, or u
cancauacugcacucaggca

SEQ ID NO: 85027 - RNA, 21 nt, Artificial Sequence
  Synthetic
  misc_feature (4)..(4): n is a, c, g, or u
ucancauacugcacucaggca

SEQ ID NO: 85028 - RNA, 22 nt, Artificial Sequence
  Synthetic
  misc_feature (5)..(5): n is a, c, g, or u
cucancauacugcacucaggca

SEQ ID NO: 85029 - RNA, 23 nt, Artificial Sequence
  Synthetic
  misc_feature (6)..(6): n is a, c, g, or u
ccucancauacugcacucaggca

SEQ ID NO: 85030 - RNA, 24 nt, Artificial Sequence
  Synthetic
  misc_feature (7)..(7): n is a, c, g, or u
accucancauacugcacucaggca

SEQ ID NO: 85031 - RNA, 18 nt, Artificial Sequence
  Synthetic
  misc_feature (7)..(7): n is a, c, g, or u
  misc_feature (11)..(11): n is a, c, g, or u
acaucanacanaaaauca

SEQ ID NO: 85032 - RNA, 19 nt, Artificial Sequence
  Synthetic
  misc_feature (8)..(8): n is a, c, g, or u
  misc_feature (12)..(12): n is a, c, g, or u
cacaucanacanaaaauca

SEQ ID NO: 85033 - RNA, 20 nt, Artificial Sequence
  Synthetic
  misc_feature (1)..(1): n is a, c, g, or u
  misc_feature (9)..(9): n is a, c, g, or u
  misc_feature (13)..(13): n is a, c, g, or u
ncacaucanacanaaaauca

SEQ ID NO: 85034 - RNA, 21 nt, Artificial Sequence
  Synthetic
  misc_feature (2)..(2): n is a, c, g, or u
  misc_feature (10)..(10): n is a, c, g, or u
  misc_feature (14)..(14): n is a, c, g, or u
ancacaucanacanaaaauca

SEQ ID NO: 85035 - RNA, 23 nt, Artificial Sequence
  Synthetic
  misc_feature (4)..(4): n is a, c, g, or u
  misc_feature (12)..(12): n is a, c, g, or u
  misc_feature (16)..(16): n is a, c, g, or u
agancacaucanacanaaaauca

SEQ ID NO: 85036 - RNA, 24 nt, Artificial Sequence
  Synthetic
  misc_feature (5)..(5): n is a, c, g, or u
  misc_feature (13)..(13): n is a, c, g, or u
  misc_feature (17)..(17): n is a, c, g, or u
aagancacaucanacanaaaauca

SEQ ID NO: 85037 - RNA, 18 nt, Artificial Sequence
  Synthetic
  misc_feature (14)..(14): n is a, c, g, or u
uacaccaagacaunauca

SEQ ID NO: 85038 - RNA, 19 nt, Artificial Sequence
  Synthetic
  misc_feature (15)..(15): n is a, c, g, or u
uuacaccaagacaunauca

SEQ ID NO: 85039 - RNA, 20 nt, Artificial Sequence
  Synthetic
  misc_feature (16)..(16): n is a, c, g, or u
uuuacaccaagacaunauca

SEQ ID NO: 85040 - RNA, 21 nt, Artificial Sequence
  Synthetic
  misc_feature (17)..(17): n is a, c, g, or u
auuuacaccaagacaunauca

SEQ ID NO: 85041 - RNA, 22 nt, Artificial Sequence
  Synthetic
  misc_feature (18)..(18): n is a, c, g, or u
cauuuacaccaagacaunauca

SEQ ID NO: 85042 - RNA, 23 nt, Artificial Sequence
  Synthetic
  misc_feature (19)..(19): n is a, c, g, or u
acauuuacaccaagacaunauca

SEQ ID NO: 85043 - RNA, 24 nt, Artificial Sequence
  Synthetic
  misc_feature (20)..(20): n is a, c, g, or u
uacauuuacaccaagacaunauca

SEQ ID NO: 85044 - RNA, 18 nt, Artificial Sequence
  Synthetic
uaguauuccuuggacuca

SEQ ID NO: 85045 - RNA, 19 nt, Artificial Sequence
  Synthetic
uuaguauuccuuggacuca

SEQ ID NO: 85046 - RNA, 18 nt, Artificial Sequence
  Synthetic
  misc_feature (5)..(5): n is a, c, g, or u
  misc_feature (11)..(11): n is a, c, g, or u
auuunaugggnuauguca

SEQ ID NO: 85047 - RNA, 19 nt, Artificial Sequence
  Synthetic
  misc_feature (1)..(1): n is a, c, g, or u
  misc_feature (6)..(6): n is a, c, g, or u
  misc_feature (12)..(12): n is a, c, g, or u
nauuunaugggnuauguca

SEQ ID NO: 85048 - RNA, 20 nt, Artificial Sequence
  Synthetic
  misc_feature (2)..(2): n is a, c, g, or u
  misc_feature (7)..(7): n is a, c, g, or u
  misc_feature (13)..(13): n is a, c, g, or u
anauuunaugggnuauguca

SEQ ID NO: 85049 - RNA, 21 nt, Artificial Sequence
  Synthetic
  misc_feature (3)..(3): n is a, c, g, or u
  misc_feature (8)..(8): n is a, c, g, or u
  misc_feature (14)..(14): n is a, c, g, or u
uanauuunaugggnuauguca

SEQ ID NO: 85050 - RNA, 22 nt, Artificial Sequence
  Synthetic
  misc_feature (1)..(1): n is a, c, g, or u
  misc_feature (4)..(4): n is a, c, g, or u
  misc_feature (9)..(9): n is a, c, g, or u
  misc_feature (15)..(15): n is a, c, g, or u
nuanauuunaugggnuauguca

SEQ ID NO: 85051 - RNA, 23 nt, Artificial Sequence
  Synthetic
  misc_feature (2)..(2): n is a, c, g, or u
  misc_feature (5)..(5): n is a, c, g, or u
  misc_feature (10)..(10): n is a, c, g, or u
  misc_feature (16)..(16): n is a, c, g, or u
unuanauuunaugggnuauguca

SEQ ID NO: 85052 - RNA, 24 nt, Artificial Sequence
  Synthetic
  misc_feature (3)..(3): n is a, c, g, or u
  misc_feature (6)..(6): n is a, c, g, or u
  misc_feature (11)..(11): n is a, c, g, or u
  misc_feature (17)..(17): n is a, c, g, or u
cunuanauuunaugggnuauguca

SEQ ID NO: 85053 - RNA, 18 nt, Artificial Sequence
  Synthetic
  misc_feature (12)..(12): n is a, c, g, or u
ccuaacaaaacnaaaaga

SEQ ID NO: 85054 - RNA, 19 nt, Artificial Sequence
  Synthetic
  misc_feature (13)..(13): n is a, c, g, or u
cccuaacaaaacnaaaaga

SEQ ID NO: 85055 - RNA, 20 nt, Artificial Sequence
  Synthetic
  misc_feature (14)..(14): n is a, c, g, or u
acccuaacaaaacnaaaaga

SEQ ID NO: 85056 - RNA, 21 nt, Artificial Sequence
  Synthetic
  misc_feature (15)..(15): n is a, c, g, or u
aacccuaacaaaacnaaaaga

SEQ ID NO: 85057 - RNA, 22 nt, Artificial Sequence
  Synthetic
  misc_feature (16)..(16): n is a, c, g, or u
aaacccuaacaaaacnaaaaga

SEQ ID NO: 85058 - RNA, 23 nt, Artificial Sequence
  Synthetic
  misc_feature (17)..(17): n is a, c, g, or u
uaaacccuaacaaaacnaaaaga

SEQ ID NO: 85059 - RNA, 24 nt, Artificial Sequence
  Synthetic
  misc_feature (18)..(18): n is a, c, g, or u
uuaaacccuaacaaaacnaaaaga

SEQ ID NO: 85060 - RNA, 18 nt, Artificial Sequence
  Synthetic
  misc_feature (4)..(4): n is a, c, g, or u
  misc_feature (7)..(7): n is a, c, g, or u
aauncunugcugggggga

SEQ ID NO: 85061 - RNA, 19 nt, Artificial Sequence
  Synthetic
  misc_feature (5)..(5): n is a, c, g, or u
  misc_feature (8)..(8): n is a, c, g, or u
caauncunugcugggggga

SEQ ID NO: 85062 - RNA, 21 nt, Artificial Sequence
  Synthetic
  misc_feature (7)..(7): n is a, c, g, or u
  misc_feature (10)..(10): n is a, c, g, or u
agcaauncunugcugggggga

SEQ ID NO: 85063 - RNA, 22 nt, Artificial Sequence
  Synthetic
  misc_feature (8)..(8): n is a, c, g, or u
  misc_feature (11)..(11): n is a, c, g, or u
aagcaauncunugcugggggga

SEQ ID NO: 85064 - RNA, 23 nt, Artificial Sequence
  Synthetic
  misc_feature (9)..(9): n is a, c, g, or u
  misc_feature (12)..(12): n is a, c, g, or u
caagcaauncunugcugggggga

SEQ ID NO: 85065 - RNA, 18 nt, Artificial Sequence
  Synthetic
  misc_feature (8)..(9): n is a, c, g, or u
  misc_feature (13)..(13): n is a, c, g, or u
  misc_feature (16)..(16): n is a, c, g, or u
agauccannaucnagnga

SEQ ID NO: 85066 - RNA, 19 nt, Artificial Sequence
  Synthetic
  misc_feature (9)..(10): n is a, c, g, or u
  misc_feature (14)..(14): n is a, c, g, or u
  misc_feature (17)..(17): n is a, c, g, or u
aagauccannaucnagnga

SEQ ID NO: 85067 - RNA, 22 nt, Artificial Sequence
  Synthetic
  misc_feature (12)..(13): n is a, c, g, or u
  misc_feature (17)..(17): n is a, c, g, or u
  misc_feature (20)..(20): n is a, c, g, or u
uggaagauccannaucnagnga

SEQ ID NO: 85068 - RNA, 23 nt, Artificial Sequence
  Synthetic
  misc_feature (13)..(14): n is a, c, g, or u
  misc_feature (18)..(18): n is a, c, g, or u
  misc_feature (21)..(21): n is a, c, g, or u
uuggaagauccannaucnagnga

SEQ ID NO: 85069 - RNA, 24 nt, Artificial Sequence
  Synthetic
  misc_feature (14)..(15): n is a, c, g, or u
  misc_feature (19)..(19): n is a, c, g, or u
  misc_feature (22)..(22): n is a, c, g, or u
uuuggaagauccannaucnagnga

SEQ ID NO: 85070 - RNA, 18 nt, Artificial Sequence
  Synthetic
uuucaguuauauggauga

SEQ ID NO: 85071 - RNA, 19 nt, Artificial Sequence
  Synthetic
cuuucaguuauauggauga

SEQ ID NO: 85072 - RNA, 18 nt, Artificial Sequence
  Synthetic
  misc_feature (17)..(17): n is a, c, g, or u
uaaacccuaacaaaacna

SEQ ID NO: 85073 - RNA, 19 nt, Artificial Sequence
  Synthetic
  misc_feature (18)..(18): n is a, c, g, or u
uuaaacccuaacaaaacna

SEQ ID NO: 85074 - RNA, 20 nt, Artificial Sequence
  Synthetic
  misc_feature (19)..(19): n is a, c, g, or u
uuuaaacccuaacaaaacna

SEQ ID NO: 85075 - RNA, 21 nt, Artificial Sequence
  Synthetic
  misc_feature (20)..(20): n is a, c, g, or u
auuuaaacccuaacaaaacna

SEQ ID NO: 85076 - RNA, 22 nt, Artificial Sequence
  Synthetic
  misc_feature (21)..(21): n is a, c, g, or u
cauuuaaacccuaacaaaacna

SEQ ID NO: 85077 - RNA, 23 nt, Artificial Sequence
  Synthetic
  misc_feature (22)..(22): n is a, c, g, or u
acauuuaaacccuaacaaaacna

SEQ ID NO: 85078 - RNA, 24 nt, Artificial Sequence
  Synthetic
  misc_feature (23)..(23): n is a, c, g, or u
uacauuuaaacccuaacaaaacna

SEQ ID NO: 85079 - RNA, 18 nt, Artificial Sequence
  Synthetic
  misc_feature (11)..(11): n is a, c, g, or u
uggacauuganccuuaua

SEQ ID NO: 85080 - RNA, 19 nt, Artificial Sequence
  Synthetic
  misc_feature (12)..(12): n is a, c, g, or u
auggacauuganccuuaua

SEQ ID NO: 85081 - RNA, 20 nt, Artificial Sequence
  Synthetic
  misc_feature (13)..(13): n is a, c, g, or u
cauggacauuganccuuaua

SEQ ID NO: 85082 - RNA, 21 nt, Artificial Sequence
  Synthetic
  misc_feature (1)..(1): n is a, c, g, or u
  misc_feature (14)..(14): n is a, c, g, or u
ncauggacauuganccuuaua

SEQ ID NO: 85083 - RNA, 24 nt, Artificial Sequence
  Synthetic
  misc_feature (1)..(1): n is a, c, g, or u
  misc_feature (4)..(4): n is a, c, g, or u
  misc_feature (17)..(17): n is a, c, g, or u
nggncauggacauuganccuuaua

SEQ ID NO: 85084 - RNA, 18 nt, Artificial Sequence
  Synthetic
uauuauccagaacaucua

SEQ ID NO: 85085 - RNA, 19 nt, Artificial Sequence
  Synthetic
uuauuauccagaacaucua

SEQ ID NO: 85086 - RNA, 20 nt, Artificial Sequence
  Synthetic
cuuauuauccagaacaucua

SEQ ID NO: 85087 - RNA, 21 nt, Artificial Sequence
  Synthetic
ccuuauuauccagaacaucua

SEQ ID NO: 85088 - RNA, 22 nt, Artificial Sequence
  Synthetic
accuuauuauccagaacaucua

SEQ ID NO: 85089 - RNA, 23 nt, Artificial Sequence
  Synthetic
aaccuuauuauccagaacaucua

SEQ ID NO: 85090 - RNA, 24 nt, Artificial Sequence
  Synthetic
aaaccuuauuauccagaacaucua

SEQ ID NO: 85091 - RNA, 18 nt, Artificial Sequence
  Synthetic
  misc_feature (7)..(7): n is a, c, g, or u
  misc_feature (10)..(11): n is a, c, g, or u
agaaacngunnuagagua

SEQ ID NO: 85092 - RNA, 20 nt, Artificial Sequence
  Synthetic
  misc_feature (9)..(9): n is a, c, g, or u
  misc_feature (12)..(13): n is a, c, g, or u
agagaaacngunnuagagua

SEQ ID NO: 85093 - RNA, 21 nt, Artificial Sequence
  Synthetic
  misc_feature (10)..(10): n is a, c, g, or u
  misc_feature (13)..(14): n is a, c, g, or u
aagagaaacngunnuagagua

SEQ ID NO: 85094 - RNA, 24 nt, Artificial Sequence
  Synthetic
  misc_feature (13)..(13): n is a, c, g, or u
  misc_feature (16)..(17): n is a, c, g, or u
uggaagagaaacngunnuagagua

SEQ ID NO: 85095 - RNA, 18 nt, Artificial Sequence
  Synthetic
  misc_feature (1)..(2): n is a, c, g, or u
  misc_feature (6)..(6): n is a, c, g, or u
  misc_feature (9)..(9): n is a, c, g, or u
nnaucnagngaccuagua

SEQ ID NO: 85096 - RNA, 19 nt, Artificial Sequence
  Synthetic
  misc_feature (2)..(3): n is a, c, g, or u
  misc_feature (7)..(7): n is a, c, g, or u
  misc_feature (10)..(10): n is a, c, g, or u
annaucnagngaccuagua

SEQ ID NO: 85097 - RNA, 20 nt, Artificial Sequence
  Synthetic
  misc_feature (3)..(4): n is a, c, g, or u
  misc_feature (8)..(8): n is a, c, g, or u
  misc_feature (11)..(11): n is a, c, g, or u
cannaucnagngaccuagua

SEQ ID NO: 85098 - RNA, 21 nt, Artificial Sequence
  Synthetic
  misc_feature (4)..(5): n is a, c, g, or u
  misc_feature (9)..(9): n is a, c, g, or u
  misc_feature (12)..(12): n is a, c, g, or u
ccannaucnagngaccuagua

SEQ ID NO: 85099 - RNA, 22 nt, Artificial Sequence
  Synthetic
  misc_feature (5)..(6): n is a, c, g, or u
  misc_feature (10)..(10): n is a, c, g, or u
  misc_feature (13)..(13): n is a, c, g, or u
uccannaucnagngaccuagua

SEQ ID NO: 85100 - RNA, 23 nt, Artificial Sequence
  Synthetic
  misc_feature (6)..(7): n is a, c, g, or u
  misc_feature (11)..(11): n is a, c, g, or u
  misc_feature (14)..(14): n is a, c, g, or u
auccannaucnagngaccuagua

SEQ ID NO: 85101 - RNA, 19 nt, Artificial Sequence
  Synthetic
  misc_feature (16)..(16): n is a, c, g, or u
ugacuucuuuccuucngua

SEQ ID NO: 85102 - RNA, 20 nt, Artificial Sequence
  Synthetic
  misc_feature (17)..(17): n is a, c, g, or u
cugacuucuuuccuucngua

SEQ ID NO: 85103 - RNA, 21 nt, Artificial Sequence
  Synthetic
  misc_feature (18)..(18): n is a, c, g, or u
ucugacuucuuuccuucngua

SEQ ID NO: 85104 - RNA, 22 nt, Artificial Sequence
  Synthetic
  misc_feature (19)..(19): n is a, c, g, or u
uucugacuucuuuccuucngua

SEQ ID NO: 85105 - RNA, 23 nt, Artificial Sequence
  Synthetic
  misc_feature (20)..(20): n is a, c, g, or u
cuucugacuucuuuccuucngua

SEQ ID NO: 85106 - RNA, 24 nt, Artificial Sequence
  Synthetic
  misc_feature (21)..(21): n is a, c, g, or u
ccuucugacuucuuuccuucngua

SEQ ID NO: 85107 - RNA, 18 nt, Artificial Sequence
  Synthetic
acaaggccuuucugugua

SEQ ID NO: 85108 - RNA, 19 nt, Artificial Sequence
  Synthetic
uacaaggccuuucugugua

SEQ ID NO: 85109 - RNA, 20 nt, Artificial Sequence
  Synthetic
uuacaaggccuuucugugua

SEQ ID NO: 85110 - RNA, 21 nt, Artificial Sequence
  Synthetic
cuuacaaggccuuucugugua

SEQ ID NO: 85111 - RNA, 22 nt, Artificial Sequence
  Synthetic
acuuacaaggccuuucugugua

SEQ ID NO: 85112 - RNA, 23 nt, Artificial Sequence
  Synthetic
aacuuacaaggccuuucugugua

SEQ ID NO: 85113 - RNA, 24 nt, Artificial Sequence
  Synthetic
caacuuacaaggccuuucugugua

SEQ ID NO: 85114 - RNA, 19 nt, Artificial Sequence
  Synthetic
  misc_feature (15)..(15): n is a, c, g, or u
agguuuuauccaaanguua

SEQ ID NO: 85115 - RNA, 20 nt, Artificial Sequence
  Synthetic
  misc_feature (16)..(16): n is a, c, g, or u
uagguuuuauccaaanguua

SEQ ID NO: 85116 - RNA, 21 nt, Artificial Sequence
  Synthetic
  misc_feature (17)..(17): n is a, c, g, or u
cuagguuuuauccaaanguua

SEQ ID NO: 85117 - RNA, 23 nt, Artificial Sequence
  Synthetic
  misc_feature (19)..(19): n is a, c, g, or u
ugcuagguuuuauccaaanguua

SEQ ID NO: 85118 - RNA, 24 nt, Artificial Sequence
  Synthetic
  misc_feature (20)..(20): n is a, c, g, or u
cugcuagguuuuauccaaanguua

SEQ ID NO: 85119 - RNA, 21 nt, Artificial Sequence
  Synthetic
uggguuuugcugccccuuuua

SEQ ID NO: 85120 - RNA, 22 nt, Artificial Sequence
  Synthetic
uuggguuuugcugccccuuuua

SEQ ID NO: 85121 - RNA, 23 nt, Artificial Sequence
  Synthetic
uuuggguuuugcugccccuuuua

SEQ ID NO: 85122 - RNA, 24 nt, Artificial Sequence
  Synthetic
uuuuggguuuugcugccccuuuua

SEQ ID NO: 85123 - RNA, 19 nt, Artificial Sequence
  Synthetic
  misc_feature (16)..(16): n is a, c, g, or u
aguagucaguuaugunaac

SEQ ID NO: 85124 - RNA, 20 nt, Artificial Sequence
  Synthetic
  misc_feature (17)..(17): n is a, c, g, or u
uaguagucaguuaugunaac

SEQ ID NO: 85125 - RNA, 19 nt, Artificial Sequence
  Synthetic
cgcaaauccagauugggac

SEQ ID NO: 85126 - RNA, 20 nt, Artificial Sequence
  Synthetic
ccgcaaauccagauugggac

SEQ ID NO: 85127 - RNA, 18 nt, Artificial Sequence
  Synthetic
  misc_feature (1)..(1): n is a, c, g, or u
  misc_feature (16)..(16): n is a, c, g, or u
ncuaaugacucuagcnac

SEQ ID NO: 85128 - RNA, 19 nt, Artificial Sequence
  Synthetic
  misc_feature (2)..(2): n is a, c, g, or u
  misc_feature (17)..(17): n is a, c, g, or u
ancuaaugacucuagcnac

SEQ ID NO: 85129 - RNA, 18 nt, Artificial Sequence
  Synthetic
aauucgcaguccccaacc

SEQ ID NO: 85130 - RNA, 19 nt, Artificial Sequence
  Synthetic
aaauucgcaguccccaacc

SEQ ID NO: 85131 - RNA, 20 nt, Artificial Sequence
  Synthetic
aaaauucgcaguccccaacc

SEQ ID NO: 85132 - RNA, 19 nt, Artificial Sequence
  Synthetic
agccuucagagcaaacacc

SEQ ID NO: 85133 - RNA, 20 nt, Artificial Sequence
  Synthetic
cagccuucagagcaaacacc

SEQ ID NO: 85134 - RNA, 20 nt, Artificial Sequence
  Synthetic
uggggcagaaucuuuccacc

SEQ ID NO: 85135 - RNA, 21 nt, Artificial Sequence
  Synthetic
auggggcagaaucuuuccacc

SEQ ID NO: 85136 - RNA, 22 nt, Artificial Sequence
  Synthetic
cauggggcagaaucuuuccacc

SEQ ID NO: 85137 - RNA, 24 nt, Artificial Sequence
  Synthetic
agcauggggcagaaucuuuccacc

SEQ ID NO: 85138 - RNA, 18 nt, Artificial Sequence
  Synthetic
ugggauucuuucccgacc

SEQ ID NO: 85139 - RNA, 19 nt, Artificial Sequence
  Synthetic
cugggauucuuucccgacc

SEQ ID NO: 85140 - RNA, 20 nt, Artificial Sequence
  Synthetic
ucugggauucuuucccgacc

SEQ ID NO: 85141 - RNA, 21 nt, Artificial Sequence
  Synthetic
cucugggauucuuucccgacc

SEQ ID NO: 85142 - RNA, 22 nt, Artificial Sequence
  Synthetic
ccucugggauucuuucccgacc

SEQ ID NO: 85143 - RNA, 23 nt, Artificial Sequence
  Synthetic
uccucugggauucuuucccgacc

SEQ ID NO: 85144 - RNA, 24 nt, Artificial Sequence
  Synthetic
auccucugggauucuuucccgacc

SEQ ID NO: 85145 - RNA, 18 nt, Artificial Sequence
  Synthetic
  misc_feature (11)..(11): n is a, c, g, or u
acucuguuguncucuccc

SEQ ID NO: 85146 - RNA, 19 nt, Artificial Sequence
  Synthetic
  misc_feature (12)..(12): n is a, c, g, or u
aacucuguuguncucuccc

SEQ ID NO: 85147 - RNA, 20 nt, Artificial Sequence
  Synthetic
  misc_feature (13)..(13): n is a, c, g, or u
uaacucuguuguncucuccc

SEQ ID NO: 85148 - RNA, 21 nt, Artificial Sequence
  Synthetic
  misc_feature (14)..(14): n is a, c, g, or u
auaacucuguuguncucuccc

SEQ ID NO: 85149 - RNA, 23 nt, Artificial Sequence
  Synthetic
  misc_feature (1)..(1): n is a, c, g, or u
  misc_feature (16)..(16): n is a, c, g, or u
ngauaacucuguuguncucuccc

SEQ ID NO: 85150 - RNA, 24 nt, Artificial Sequence
  Synthetic
  misc_feature (2)..(2): n is a, c, g, or u
  misc_feature (17)..(17): n is a, c, g, or u
cngauaacucuguuguncucuccc

SEQ ID NO: 85151 - RNA, 18 nt, Artificial Sequence
  Synthetic
  misc_feature (2)..(2): n is a, c, g, or u
unaacacuaauaugggcc

SEQ ID NO: 85152 - RNA, 20 nt, Artificial Sequence
  Synthetic
  misc_feature (4)..(4): n is a, c, g, or u
ugunaacacuaauaugggcc

SEQ ID NO: 85153 - RNA, 21 nt, Artificial Sequence
  Synthetic
  misc_feature (5)..(5): n is a, c, g, or u
augunaacacuaauaugggcc

SEQ ID NO: 85154 - RNA, 22 nt, Artificial Sequence
  Synthetic
  misc_feature (6)..(6): n is a, c, g, or u
uaugunaacacuaauaugggcc

SEQ ID NO: 85155 - RNA, 23 nt, Artificial Sequence
  Synthetic
  misc_feature (7)..(7): n is a, c, g, or u
uuaugunaacacuaauaugggcc

SEQ ID NO: 85156 - RNA, 18 nt, Artificial Sequence
  Synthetic
aagccuccaagcugugcc

SEQ ID NO: 85157 - RNA, 19 nt, Artificial Sequence
  Synthetic
caagccuccaagcugugcc

SEQ ID NO: 85158 - RNA, 20 nt, Artificial Sequence
  Synthetic
ucaagccuccaagcugugcc

SEQ ID NO: 85159 - RNA, 18 nt, Artificial Sequence
  Synthetic
  misc_feature (10)..(11): n is a, c, g, or u
cgcccaccannucuugcc

SEQ ID NO: 85160 - RNA, 19 nt, Artificial Sequence
  Synthetic
  misc_feature (11)..(12): n is a, c, g, or u
acgcccaccannucuugcc

SEQ ID NO: 85161 - RNA, 20 nt, Artificial Sequence
  Synthetic
  misc_feature (12)..(13): n is a, c, g, or u
aacgcccaccannucuugcc

SEQ ID NO: 85162 - RNA, 22 nt, Artificial Sequence
  Synthetic
  misc_feature (14)..(15): n is a, c, g, or u
ugaacgcccaccannucuugcc

SEQ ID NO: 85163 - RNA, 24 nt, Artificial Sequence
  Synthetic
  misc_feature (16)..(17): n is a, c, g, or u
cgugaacgcccaccannucuugcc

SEQ ID NO: 85164 - RNA, 18 nt, Artificial Sequence
  Synthetic
uauguugcccguuugucc

SEQ ID NO: 85165 - RNA, 18 nt, Artificial Sequence
  Synthetic
  misc_feature (3)..(3): n is a, c, g, or u
uanuaggaggcuguaggc

SEQ ID NO: 85166 - RNA, 20 nt, Artificial Sequence
  Synthetic
  misc_feature (5)..(5): n is a, c, g, or u
uguanuaggaggcuguaggc

SEQ ID NO: 85167 - RNA, 21 nt, Artificial Sequence
  Synthetic
  misc_feature (6)..(6): n is a, c, g, or u
uuguanuaggaggcuguaggc

SEQ ID NO: 85168 - RNA, 22 nt, Artificial Sequence
  Synthetic
  misc_feature (7)..(7): n is a, c, g, or u
uuuguanuaggaggcuguaggc

SEQ ID NO: 85169 - RNA, 23 nt, Artificial Sequence
  Synthetic
  misc_feature (1)..(1): n is a, c, g, or u
  misc_feature (8)..(8): n is a, c, g, or u
nuuuguanuaggaggcuguaggc

SEQ ID NO: 85170 - RNA, 24 nt, Artificial Sequence
  Synthetic
  misc_feature (2)..(2): n is a, c, g, or u
  misc_feature (9)..(9): n is a, c, g, or u
unuuuguanuaggaggcuguaggc

SEQ ID NO: 85171 - RNA, 18 nt, Artificial Sequence
  Synthetic
uauuucccugcugguggc

SEQ ID NO: 85172 - RNA, 20 nt, Artificial Sequence
  Synthetic
uguauuucccugcugguggc

SEQ ID NO: 85173 - RNA, 18 nt, Artificial Sequence
  Synthetic
  misc_feature (3)..(3): n is a, c, g, or u
acnaccgugugucuuggc

SEQ ID NO: 85174 - RNA, 19 nt, Artificial Sequence
  Synthetic
  misc_feature (1)..(1): n is a, c, g, or u
  misc_feature (4)..(4): n is a, c, g, or u
nacnaccgugugucuuggc

SEQ ID NO: 85175 - RNA, 18 nt, Artificial Sequence
  Synthetic
acaaugugguuauccugc

SEQ ID NO: 85176 - RNA, 19 nt, Artificial Sequence
  Synthetic
cacaaugugguuauccugc

SEQ ID NO: 85177 - RNA, 20 nt, Artificial Sequence
  Synthetic
acacaaugugguuauccugc

SEQ ID NO: 85178 - RNA, 18 nt, Artificial Sequence
  Synthetic
  misc_feature (8)..(8): n is a, c, g, or u
  misc_feature (11)..(11): n is a, c, g, or u
cuccugcnucnaccaauc

SEQ ID NO: 85179 - RNA, 19 nt, Artificial Sequence
  Synthetic
  misc_feature (9)..(9): n is a, c, g, or u
  misc_feature (12)..(12): n is a, c, g, or u
ccuccugcnucnaccaauc

SEQ ID NO: 85180 - RNA, 21 nt, Artificial Sequence
  Synthetic
  misc_feature (11)..(11): n is a, c, g, or u
  misc_feature (14)..(14): n is a, c, g, or u
cgccuccugcnucnaccaauc

SEQ ID NO: 85181 - RNA, 22 nt, Artificial Sequence
  Synthetic
  misc_feature (12)..(12): n is a, c, g, or u
  misc_feature (15)..(15): n is a, c, g, or u
ccgccuccugcnucnaccaauc

SEQ ID NO: 85182 - RNA, 23 nt, Artificial Sequence
  Synthetic
  misc_feature (13)..(13): n is a, c, g, or u
  misc_feature (16)..(16): n is a, c, g, or u
uccgccuccugcnucnaccaauc

SEQ ID NO: 85183 - RNA, 24 nt, Artificial Sequence
  Synthetic
  misc_feature (14)..(14): n is a, c, g, or u
  misc_feature (17)..(17): n is a, c, g, or u
auccgccuccugcnucnaccaauc

SEQ ID NO: 85184 - RNA, 18 nt, Artificial Sequence
  Synthetic
ccaagucuguacagcauc

SEQ ID NO: 85185 - RNA, 18 nt, Artificial Sequence
  Synthetic
  misc_feature (6)..(6): n is a, c, g, or u
  misc_feature (12)..(12): n is a, c, g, or u
  misc_feature (14)..(14): n is a, c, g, or u
uacugncucucncnuauc

SEQ ID NO: 85186 - RNA, 19 nt, Artificial Sequence
  Synthetic
  misc_feature (7)..(7): n is a, c, g, or u
  misc_feature (13)..(13): n is a, c, g, or u
  misc_feature (15)..(15): n is a, c, g, or u
cuacugncucucncnuauc

SEQ ID NO: 85187 - RNA, 20 nt, Artificial Sequence
  Synthetic
  misc_feature (8)..(8): n is a, c, g, or u
  misc_feature (14)..(14): n is a, c, g, or u
  misc_feature (16)..(16): n is a, c, g, or u
acuacugncucucncnuauc

SEQ ID NO: 85188 - RNA, 22 nt, Artificial Sequence
  Synthetic
  misc_feature (10)..(10): n is a, c, g, or u
  misc_feature (16)..(16): n is a, c, g, or u
  misc_feature (18)..(18): n is a, c, g, or u
cgacuacugncucucncnuauc

SEQ ID NO: 85189 - RNA, 23 nt, Artificial Sequence
  Synthetic
  misc_feature (11)..(11): n is a, c, g, or u
  misc_feature (17)..(17): n is a, c, g, or u
  misc_feature (19)..(19): n is a, c, g, or u
ccgacuacugncucucncnuauc

SEQ ID NO: 85190 - RNA, 24 nt, Artificial Sequence
  Synthetic
  misc_feature (12)..(12): n is a, c, g, or u
  misc_feature (18)..(18): n is a, c, g, or u
  misc_feature (20)..(20): n is a, c, g, or u
uccgacuacugncucucncnuauc

SEQ ID NO: 85191 - RNA, 18 nt, Artificial Sequence
  Synthetic
uuuccaccagcaauccuc

SEQ ID NO: 85192 - RNA, 19 nt, Artificial Sequence
  Synthetic
cuuuccaccagcaauccuc

SEQ ID NO: 85193 - RNA, 20 nt, Artificial Sequence
  Synthetic
ucuuuccaccagcaauccuc

SEQ ID NO: 85194 - RNA, 21 nt, Artificial Sequence
  Synthetic
aucuuuccaccagcaauccuc

SEQ ID NO: 85195 - RNA, 22 nt, Artificial Sequence
  Synthetic
aaucuuuccaccagcaauccuc

SEQ ID NO: 85196 - RNA, 24 nt, Artificial Sequence
  Synthetic
agaaucuuuccaccagcaauccuc

SEQ ID NO: 85197 - RNA, 19 nt, Artificial Sequence
  Synthetic
cgcagaagaucucaaucuc

SEQ ID NO: 85198 - RNA, 20 nt, Artificial Sequence
  Synthetic
ucgcagaagaucucaaucuc

SEQ ID NO: 85199 - RNA, 19 nt, Artificial Sequence
  Synthetic
agaggacucuuggacucuc

SEQ ID NO: 85200 - RNA, 20 nt, Artificial Sequence
  Synthetic
aagaggacucuuggacucuc

SEQ ID NO: 85201 - RNA, 21 nt, Artificial Sequence
  Synthetic
uaagaggacucuuggacucuc

SEQ ID NO: 85202 - RNA, 22 nt, Artificial Sequence
  Synthetic
auaagaggacucuuggacucuc

SEQ ID NO: 85203 - RNA, 23 nt, Artificial Sequence
  Synthetic
cauaagaggacucuuggacucuc

SEQ ID NO: 85204 - RNA, 24 nt, Artificial Sequence
  Synthetic
acauaagaggacucuuggacucuc

SEQ ID NO: 85205 - RNA, 18 nt, Artificial Sequence
  Synthetic
  misc_feature (2)..(2): n is a, c, g, or u
cnuaucgucaaucuucuc

SEQ ID NO: 85206 - RNA, 19 nt, Artificial Sequence
  Synthetic
  misc_feature (1)..(1): n is a, c, g, or u
  misc_feature (3)..(3): n is a, c, g, or u
ncnuaucgucaaucuucuc

SEQ ID NO: 85207 - RNA, 20 nt, Artificial Sequence
  Synthetic
  misc_feature (2)..(2): n is a, c, g, or u
  misc_feature (4)..(4): n is a, c, g, or u
cncnuaucgucaaucuucuc

SEQ ID NO: 85208 - RNA, 21 nt, Artificial Sequence
  Synthetic
  misc_feature (3)..(3): n is a, c, g, or u
  misc_feature (5)..(5): n is a, c, g, or u
ucncnuaucgucaaucuucuc

SEQ ID NO: 85209 - RNA, 22 nt, Artificial Sequence
  Synthetic
  misc_feature (4)..(4): n is a, c, g, or u
  misc_feature (6)..(6): n is a, c, g, or u
cucncnuaucgucaaucuucuc

SEQ ID NO: 85210 - RNA, 23 nt, Artificial Sequence
  Synthetic
  misc_feature (5)..(5): n is a, c, g, or u
  misc_feature (7)..(7): n is a, c, g, or u
ucucncnuaucgucaaucuucuc

SEQ ID NO: 85211 - RNA, 24 nt, Artificial Sequence
  Synthetic
  misc_feature (6)..(6): n is a, c, g, or u
  misc_feature (8)..(8): n is a, c, g, or u
cucucncnuaucgucaaucuucuc

SEQ ID NO: 85212 - RNA, 18 nt, Artificial Sequence
  Synthetic
ccguuuguccucuaauuc

SEQ ID NO: 85213 - RNA, 19 nt, Artificial Sequence
  Synthetic
cccguuuguccucuaauuc

SEQ ID NO: 85214 - RNA, 21 nt, Artificial Sequence
  Synthetic
ugcccguuuguccucuaauuc

SEQ ID NO: 85215 - RNA, 22 nt, Artificial Sequence
  Synthetic
uugcccguuuguccucuaauuc

SEQ ID NO: 85216 - RNA, 24 nt, Artificial Sequence
  Synthetic
uguugcccguuuguccucuaauuc

SEQ ID NO: 85217 - RNA, 18 nt, Artificial Sequence
  Synthetic
uacuagugccauuuguuc

SEQ ID NO: 85218 - RNA, 19 nt, Artificial Sequence
  Synthetic
uuacuagugccauuuguuc

SEQ ID NO: 85219 - RNA, 20 nt, Artificial Sequence
  Synthetic
uuuacuagugccauuuguuc

SEQ ID NO: 85220 - RNA, 22 nt, Artificial Sequence
  Synthetic
aguuuacuagugccauuuguuc

SEQ ID NO: 85221 - RNA, 23 nt, Artificial Sequence
  Synthetic
caguuuacuagugccauuuguuc

SEQ ID NO: 85222 - RNA, 24 nt, Artificial Sequence
  Synthetic
ucaguuuacuagugccauuuguuc

SEQ ID NO: 85223 - RNA, 18 nt, Artificial Sequence
  Synthetic
uuacacacucuauggaag

SEQ ID NO: 85224 - RNA, 19 nt, Artificial Sequence
  Synthetic
uuuacacacucuauggaag

SEQ ID NO: 85225 - RNA, 20 nt, Artificial Sequence
  Synthetic
auuuacacacucuauggaag

SEQ ID NO: 85226 - RNA, 21 nt, Artificial Sequence
  Synthetic
uauuuacacacucuauggaag

SEQ ID NO: 85227 - RNA, 22 nt, Artificial Sequence
  Synthetic
  misc_feature (1)..(1): n is a, c, g, or u
nuauuuacacacucuauggaag

SEQ ID NO: 85228 - RNA, 23 nt, Artificial Sequence
  Synthetic
  misc_feature (2)..(2): n is a, c, g, or u
anuauuuacacacucuauggaag

SEQ ID NO: 85229 - RNA, 24 nt, Artificial Sequence
  Synthetic
  misc_feature (3)..(3): n is a, c, g, or u
canuauuuacacacucuauggaag

SEQ ID NO: 85230 - RNA, 18 nt, Artificial Sequence
  Synthetic
uucuuucccgaccaccag

SEQ ID NO: 85231 - RNA, 19 nt, Artificial Sequence
  Synthetic
auucuuucccgaccaccag

SEQ ID NO: 85232 - RNA, 18 nt, Artificial Sequence
  Synthetic
aacuuguccugguuaucg

SEQ ID NO: 85233 - RNA, 19 nt, Artificial Sequence
  Synthetic
caacuuguccugguuaucg

SEQ ID NO: 85234 - RNA, 20 nt, Artificial Sequence
  Synthetic
ccaacuuguccugguuaucg

SEQ ID NO: 85235 - RNA, 18 nt, Artificial Sequence
  Synthetic
  misc_feature (8)..(8): n is a, c, g, or u
caucaucnugggcuuucg

SEQ ID NO: 85236 - RNA, 19 nt, Artificial Sequence
  Synthetic
  misc_feature (9)..(9): n is a, c, g, or u
ccaucaucnugggcuuucg

SEQ ID NO: 85237 - RNA, 20 nt, Artificial Sequence
  Synthetic
  misc_feature (10)..(10): n is a, c, g, or u
cccaucaucnugggcuuucg

SEQ ID NO: 85238 - RNA, 18 nt, Artificial Sequence
  Synthetic
  misc_feature (5)..(5): n is a, c, g, or u
cccuncucguguuacagg

SEQ ID NO: 85239 - RNA, 19 nt, Artificial Sequence
  Synthetic
  misc_feature (6)..(6): n is a, c, g, or u
ccccuncucguguuacagg

SEQ ID NO: 85240 - RNA, 20 nt, Artificial Sequence
  Synthetic
  misc_feature (7)..(7): n is a, c, g, or u
accccuncucguguuacagg

SEQ ID NO: 85241 - RNA, 18 nt, Artificial Sequence
  Synthetic
ugguggcuccaguucagg

SEQ ID NO: 85242 - RNA, 19 nt, Artificial Sequence
  Synthetic
cugguggcuccaguucagg

SEQ ID NO: 85243 - RNA, 21 nt, Artificial Sequence
  Synthetic
ugcugguggcuccaguucagg

SEQ ID NO: 85244 - RNA, 22 nt, Artificial Sequence
  Synthetic
cugcugguggcuccaguucagg

SEQ ID NO: 85245 - RNA, 23 nt, Artificial Sequence
  Synthetic
ccugcugguggcuccaguucagg

SEQ ID NO: 85246 - RNA, 24 nt, Artificial Sequence
  Synthetic
cccugcugguggcuccaguucagg

SEQ ID NO: 85247 - RNA, 18 nt, Artificial Sequence
  Synthetic
cccguugcccggcaacgg

SEQ ID NO: 85248 - RNA, 19 nt, Artificial Sequence
  Synthetic
ccccguugcccggcaacgg

SEQ ID NO: 85249 - RNA, 20 nt, Artificial Sequence
  Synthetic
accccguugcccggcaacgg

SEQ ID NO: 85250 - RNA, 19 nt, Artificial Sequence
  Synthetic
  misc_feature (14)..(14): n is a, c, g, or u
uggagcaaacauunucggg

SEQ ID NO: 85251 - RNA, 20 nt, Artificial Sequence
  Synthetic
  misc_feature (15)..(15): n is a, c, g, or u
cuggagcaaacauunucggg

SEQ ID NO: 85252 - RNA, 21 nt, Artificial Sequence
  Synthetic
  misc_feature (16)..(16): n is a, c, g, or u
ucuggagcaaacauunucggg

SEQ ID NO: 85253 - RNA, 24 nt, Artificial Sequence
  Synthetic
  misc_feature (19)..(19): n is a, c, g, or u
aggucuggagcaaacauunucggg

SEQ ID NO: 85254 - RNA, 18 nt, Artificial Sequence
  Synthetic
augaugugguauuggggg

SEQ ID NO: 85255 - RNA, 18 nt, Artificial Sequence
  Synthetic
aagagcuacagcaugggg

SEQ ID NO: 85256 - RNA, 19 nt, Artificial Sequence
  Synthetic
caagagcuacagcaugggg

SEQ ID NO: 85257 - RNA, 20 nt, Artificial Sequence
  Synthetic
acaagagcuacagcaugggg

SEQ ID NO: 85258 - RNA, 18 nt, Artificial Sequence
  Synthetic
aacccccacuggcugggg

SEQ ID NO: 85259 - RNA, 19 nt, Artificial Sequence
  Synthetic
caacccccacuggcugggg

SEQ ID NO: 85260 - RNA, 21 nt, Artificial Sequence
  Synthetic
cgcaacccccacuggcugggg

SEQ ID NO: 85261 - RNA, 22 nt, Artificial Sequence
  Synthetic
acgcaacccccacuggcugggg

SEQ ID NO: 85262 - RNA, 24 nt, Artificial Sequence
  Synthetic
ugacgcaacccccacuggcugggg

SEQ ID NO: 85263 - RNA, 19 nt, Artificial Sequence
  Synthetic
  misc_feature (12)..(12): n is a, c, g, or u
uguuuguuuaangacuggg

SEQ ID NO: 85264 - RNA, 20 nt, Artificial Sequence
  Synthetic
  misc_feature (13)..(13): n is a, c, g, or u
cuguuuguuuaangacuggg

SEQ ID NO: 85265 - RNA, 21 nt, Artificial Sequence
  Synthetic
  misc_feature (14)..(14): n is a, c, g, or u
acuguuuguuuaangacuggg

SEQ ID NO: 85266 - RNA, 23 nt, Artificial Sequence
  Synthetic
  misc_feature (16)..(16): n is a, c, g, or u
agacuguuuguuuaangacuggg

SEQ ID NO: 85267 - RNA, 24 nt, Artificial Sequence
  Synthetic
  misc_feature (17)..(17): n is a, c, g, or u
aagacuguuuguuuaangacuggg

SEQ ID NO: 85268 - RNA, 18 nt, Artificial Sequence
  Synthetic
  misc_feature (12)..(12): n is a, c, g, or u
augacucuagcnaccugg

SEQ ID NO: 85269 - RNA, 19 nt, Artificial Sequence
  Synthetic
  misc_feature (13)..(13): n is a, c, g, or u
aaugacucuagcnaccugg

SEQ ID NO: 85270 - RNA, 20 nt, Artificial Sequence
  Synthetic
  misc_feature (14)..(14): n is a, c, g, or u
uaaugacucuagcnaccugg

SEQ ID NO: 85271 - RNA, 21 nt, Artificial Sequence
  Synthetic
  misc_feature (15)..(15): n is a, c, g, or u
cuaaugacucuagcnaccugg

SEQ ID NO: 85272 - RNA, 22 nt, Artificial Sequence
  Synthetic
  misc_feature (1)..(1): n is a, c, g, or u
  misc_feature (16)..(16): n is a, c, g, or u
ncuaaugacucuagcnaccugg

SEQ ID NO: 85273 - RNA, 23 nt, Artificial Sequence
  Synthetic
  misc_feature (2)..(2): n is a, c, g, or u
  misc_feature (17)..(17): n is a, c, g, or u
ancuaaugacucuagcnaccugg

SEQ ID NO: 85274 - RNA, 18 nt, Artificial Sequence
  Synthetic
ucagcccguuucuccugg

SEQ ID NO: 85275 - RNA, 19 nt, Artificial Sequence
  Synthetic
cucagcccguuucuccugg

SEQ ID NO: 85276 - RNA, 20 nt, Artificial Sequence
  Synthetic
ccucagcccguuucuccugg

SEQ ID NO: 85277 - RNA, 24 nt, Artificial Sequence
  Synthetic
ugggccucagcccguuucuccugg

SEQ ID NO: 85278 - RNA, 18 nt, Artificial Sequence
  Synthetic
uuggcuuucaguuauaug

SEQ ID NO: 85279 - RNA, 19 nt, Artificial Sequence
  Synthetic
uuuggcuuucaguuauaug

SEQ ID NO: 85280 - RNA, 21 nt, Artificial Sequence
  Synthetic
uguuuggcuuucaguuauaug

SEQ ID NO: 85281 - RNA, 22 nt, Artificial Sequence
  Synthetic
cuguuuggcuuucaguuauaug

SEQ ID NO: 85282 - RNA, 23 nt, Artificial Sequence
  Synthetic
acuguuuggcuuucaguuauaug

SEQ ID NO: 85283 - RNA, 24 nt, Artificial Sequence
  Synthetic
cacuguuuggcuuucaguuauaug

SEQ ID NO: 85284 - RNA, 18 nt, Artificial Sequence
  Synthetic
  misc_feature (8)..(8): n is a, c, g, or u
ugcaauunauuaugccug

SEQ ID NO: 85285 - RNA, 19 nt, Artificial Sequence
  Synthetic
  misc_feature (1)..(1): n is a, c, g, or u
  misc_feature (9)..(9): n is a, c, g, or u
nugcaauunauuaugccug

SEQ ID NO: 85286 - RNA, 20 nt, Artificial Sequence
  Synthetic
  misc_feature (2)..(2): n is a, c, g, or u
  misc_feature (10)..(10): n is a, c, g, or u
anugcaauunauuaugccug

SEQ ID NO: 85287 - RNA, 22 nt, Artificial Sequence
  Synthetic
  misc_feature (4)..(4): n is a, c, g, or u
  misc_feature (12)..(12): n is a, c, g, or u
aganugcaauunauuaugccug

SEQ ID NO: 85288 - RNA, 23 nt, Artificial Sequence
  Synthetic
  misc_feature (5)..(5): n is a, c, g, or u
  misc_feature (13)..(13): n is a, c, g, or u
aaganugcaauunauuaugccug

SEQ ID NO: 85289 - RNA, 18 nt, Artificial Sequence
  Synthetic
  misc_feature (15)..(15): n is a, c, g, or u
aagaauuuggagcuncug

SEQ ID NO: 85290 - RNA, 19 nt, Artificial Sequence
  Synthetic
  misc_feature (16)..(16): n is a, c, g, or u
aaagaauuuggagcuncug

SEQ ID NO: 85291 - RNA, 20 nt, Artificial Sequence
  Synthetic
  misc_feature (17)..(17): n is a, c, g, or u
uaaagaauuuggagcuncug

SEQ ID NO: 85292 - RNA, 21 nt, Artificial Sequence
  Synthetic
  misc_feature (18)..(18): n is a, c, g, or u
auaaagaauuuggagcuncug

SEQ ID NO: 85293 - RNA, 22 nt, Artificial Sequence
  Synthetic
  misc_feature (19)..(19): n is a, c, g, or u
uauaaagaauuuggagcuncug

SEQ ID NO: 85294 - RNA, 23 nt, Artificial Sequence
  Synthetic
  misc_feature (20)..(20): n is a, c, g, or u
uuauaaagaauuuggagcuncug

SEQ ID NO: 85295 - RNA, 24 nt, Artificial Sequence
  Synthetic
  misc_feature (21)..(21): n is a, c, g, or u
cuuauaaagaauuuggagcuncug

SEQ ID NO: 85296 - RNA, 18 nt, Artificial Sequence
  Synthetic
accuuccaccaaacucug

SEQ ID NO: 85297 - RNA, 19 nt, Artificial Sequence
  Synthetic
aaccuuccaccaaacucug

SEQ ID NO: 85298 - RNA, 20 nt, Artificial Sequence
  Synthetic
caaccuuccaccaaacucug

SEQ ID NO: 85299 - RNA, 21 nt, Artificial Sequence
  Synthetic
acaaccuuccaccaaacucug

SEQ ID NO: 85300 - RNA, 22 nt, Artificial Sequence
  Synthetic
cacaaccuuccaccaaacucug

SEQ ID NO: 85301 - RNA, 23 nt, Artificial Sequence
  Synthetic
ccacaaccuuccaccaaacucug

SEQ ID NO: 85302 - RNA, 24 nt, Artificial Sequence
  Synthetic
uccacaaccuuccaccaaacucug

SEQ ID NO: 85303 - RNA, 19 nt, Artificial Sequence
  Synthetic
ugcaacuuuuucaccucug

SEQ ID NO: 85304 - RNA, 20 nt, Artificial Sequence
  Synthetic
augcaacuuuuucaccucug

SEQ ID NO: 85305 - RNA, 20 nt, Artificial Sequence
  Synthetic
cggcaacggccaggucugug

SEQ ID NO: 85306 - RNA, 18 nt, Artificial Sequence
  Synthetic
uaacaggccuauugauug

SEQ ID NO: 85307 - RNA, 19 nt, Artificial Sequence
  Synthetic
uuaacaggccuauugauug

SEQ ID NO: 85308 - RNA, 18 nt, Artificial Sequence
  Synthetic
  misc_feature (11)..(11): n is a, c, g, or u
ugggugggugnuaauuug

SEQ ID NO: 85309 - RNA, 19 nt, Artificial Sequence
  Synthetic
  misc_feature (12)..(12): n is a, c, g, or u
cugggugggugnuaauuug

SEQ ID NO: 85310 - RNA, 20 nt, Artificial Sequence
  Synthetic
  misc_feature (13)..(13): n is a, c, g, or u
ccugggugggugnuaauuug

SEQ ID NO: 85311 - RNA, 21 nt, Artificial Sequence
  Synthetic
  misc_feature (14)..(14): n is a, c, g, or u
accugggugggugnuaauuug

SEQ ID NO: 85312 - RNA, 22 nt, Artificial Sequence
  Synthetic
  misc_feature (1)..(1): n is a, c, g, or u
  misc_feature (15)..(15): n is a, c, g, or u
naccugggugggugnuaauuug

SEQ ID NO: 85313 - RNA, 23 nt, Artificial Sequence
  Synthetic
  misc_feature (2)..(2): n is a, c, g, or u
  misc_feature (16)..(16): n is a, c, g, or u
cnaccugggugggugnuaauuug

SEQ ID NO: 85314 - RNA, 19 nt, Artificial Sequence
  Synthetic
aguuuacuagugccauuug

SEQ ID NO: 85315 - RNA, 20 nt, Artificial Sequence
  Synthetic
caguuuacuagugccauuug

SEQ ID NO: 85316 - RNA, 21 nt, Artificial Sequence
  Synthetic
ucaguuuacuagugccauuug

SEQ ID NO: 85317 - RNA, 22 nt, Artificial Sequence
  Synthetic
cucaguuuacuagugccauuug

SEQ ID NO: 85318 - RNA, 18 nt, Artificial Sequence
  Synthetic
  misc_feature (2)..(2): n is a, c, g, or u
  misc_feature (12)..(12): n is a, c, g, or u
  misc_feature (18)..(18): n is a, c, g, or u
unaaugagaaangaagan

SEQ ID NO: 85319 - RNA, 20 nt, Artificial Sequence
  Synthetic
  misc_feature (4)..(4): n is a, c, g, or u
  misc_feature (14)..(14): n is a, c, g, or u
  misc_feature (20)..(20): n is a, c, g, or u
agunaaugagaaangaagan

SEQ ID NO: 85320 - RNA, 21 nt, Artificial Sequence
  Synthetic
  misc_feature (5)..(5): n is a, c, g, or u
  misc_feature (15)..(15): n is a, c, g, or u
  misc_feature (21)..(21): n is a, c, g, or u
cagunaaugagaaangaagan

SEQ ID NO: 85321 - RNA, 22 nt, Artificial Sequence
  Synthetic
  misc_feature (6)..(6): n is a, c, g, or u
  misc_feature (16)..(16): n is a, c, g, or u
  misc_feature (22)..(22): n is a, c, g, or u
acagunaaugagaaangaagan

SEQ ID NO: 85322 - RNA, 23 nt, Artificial Sequence
  Synthetic
  misc_feature (7)..(7): n is a, c, g, or u
  misc_feature (17)..(17): n is a, c, g, or u
  misc_feature (23)..(23): n is a, c, g, or u
cacagunaaugagaaangaagan

SEQ ID NO: 85323 - RNA, 24 nt, Artificial Sequence
  Synthetic
  misc_feature (8)..(8): n is a, c, g, or u
  misc_feature (18)..(18): n is a, c, g, or u
  misc_feature (24)..(24): n is a, c, g, or u
ucacagunaaugagaaangaagan

SEQ ID NO: 85324 - RNA, 18 nt, Artificial Sequence
  Synthetic
  misc_feature (15)..(15): n is a, c, g, or u
  misc_feature (18)..(18): n is a, c, g, or u
aauccgccuccugcnucn

SEQ ID NO: 85325 - RNA, 19 nt, Artificial Sequence
  Synthetic
  misc_feature (16)..(16): n is a, c, g, or u
  misc_feature (19)..(19): n is a, c, g, or u
aaauccgccuccugcnucn

SEQ ID NO: 85326 - RNA, 20 nt, Artificial Sequence
  Synthetic
  misc_feature (17)..(17): n is a, c, g, or u
  misc_feature (20)..(20): n is a, c, g, or u
caaauccgccuccugcnucn

SEQ ID NO: 85327 - RNA, 22 nt, Artificial Sequence
  Synthetic
  misc_feature (19)..(19): n is a, c, g, or u
  misc_feature (22)..(22): n is a, c, g, or u
agcaaauccgccuccugcnucn

SEQ ID NO: 85328 - RNA, 23 nt, Artificial Sequence
  Synthetic
  misc_feature (20)..(20): n is a, c, g, or u
  misc_feature (23)..(23): n is a, c, g, or u
cagcaaauccgccuccugcnucn

SEQ ID NO: 85329 - RNA, 24 nt, Artificial Sequence
  Synthetic
  misc_feature (21)..(21): n is a, c, g, or u
  misc_feature (24)..(24): n is a, c, g, or u
ccagcaaauccgccuccugcnucn

SEQ ID NO: 85330 - RNA, 18 nt, Artificial Sequence
  Synthetic
  misc_feature (14)..(14): n is a, c, g, or u
  misc_feature (17)..(18): n is a, c, g, or u
uuggaagagaaacngunn

SEQ ID NO: 85331 - RNA, 19 nt, Artificial Sequence
  Synthetic
  misc_feature (15)..(15): n is a, c, g, or u
  misc_feature (18)..(19): n is a, c, g, or u
uuuggaagagaaacngunn

SEQ ID NO: 85332 - RNA, 20 nt, Artificial Sequence
  Synthetic
  misc_feature (16)..(16): n is a, c, g, or u
  misc_feature (19)..(20): n is a, c, g, or u
uuuuggaagagaaacngunn

SEQ ID NO: 85333 - RNA, 21 nt, Artificial Sequence
  Synthetic
  misc_feature (17)..(17): n is a, c, g, or u
  misc_feature (20)..(21): n is a, c, g, or u
cuuuuggaagagaaacngunn

SEQ ID NO: 85334 - RNA, 22 nt, Artificial Sequence
  Synthetic
  misc_feature (18)..(18): n is a, c, g, or u
  misc_feature (21)..(22): n is a, c, g, or u
acuuuuggaagagaaacngunn

SEQ ID NO: 85335 - RNA, 23 nt, Artificial Sequence
  Synthetic
  misc_feature (19)..(19): n is a, c, g, or u
  misc_feature (22)..(23): n is a, c, g, or u
cacuuuuggaagagaaacngunn

SEQ ID NO: 85336 - RNA, 24 nt, Artificial Sequence
  Synthetic
  misc_feature (20)..(20): n is a, c, g, or u
  misc_feature (23)..(24): n is a, c, g, or u
ucacuuuuggaagagaaacngunn

SEQ ID NO: 85337 - RNA, 18 nt, Artificial Sequence
  Synthetic
agagcaaacaccgcaaau

SEQ ID NO: 85338 - RNA, 19 nt, Artificial Sequence
  Synthetic
cagagcaaacaccgcaaau

SEQ ID NO: 85339 - RNA, 20 nt, Artificial Sequence
  Synthetic
ucagagcaaacaccgcaaau

SEQ ID NO: 85340 - RNA, 21 nt, Artificial Sequence
  Synthetic
uucagagcaaacaccgcaaau

SEQ ID NO: 85341 - RNA, 22 nt, Artificial Sequence
  Synthetic
cuucagagcaaacaccgcaaau

SEQ ID NO: 85342 - RNA, 23 nt, Artificial Sequence
  Synthetic
ccuucagagcaaacaccgcaaau

SEQ ID NO: 85343 - RNA, 19 nt, Artificial Sequence
  Synthetic
agaucucaaucucgggaau

SEQ ID NO: 85344 - RNA, 20 nt, Artificial Sequence
  Synthetic
aagaucucaaucucgggaau

SEQ ID NO: 85345 - RNA, 18 nt, Artificial Sequence
  Synthetic
acauggagaacaucacau

SEQ ID NO: 85346 - RNA, 19 nt, Artificial Sequence
  Synthetic
aacauggagaacaucacau

SEQ ID NO: 85347 - RNA, 18 nt, Artificial Sequence
  Synthetic
  misc_feature (9)..(9): n is a, c, g, or u
  misc_feature (15)..(15): n is a, c, g, or u
aaauauuunccauungau

SEQ ID NO: 85348 - RNA, 19 nt, Artificial Sequence
  Synthetic
  misc_feature (10)..(10): n is a, c, g, or u
  misc_feature (16)..(16): n is a, c, g, or u
caaauauuunccauungau

SEQ ID NO: 85349 - RNA, 20 nt, Artificial Sequence
  Synthetic
  misc_feature (11)..(11): n is a, c, g, or u
  misc_feature (17)..(17): n is a, c, g, or u
ccaaauauuunccauungau

SEQ ID NO: 85350 - RNA, 21 nt, Artificial Sequence
  Synthetic
  misc_feature (12)..(12): n is a, c, g, or u
  misc_feature (18)..(18): n is a, c, g, or u
accaaauauuunccauungau

SEQ ID NO: 85351 - RNA, 22 nt, Artificial Sequence
  Synthetic
  misc_feature (13)..(13): n is a, c, g, or u
  misc_feature (19)..(19): n is a, c, g, or u
uaccaaauauuunccauungau

SEQ ID NO: 85352 - RNA, 23 nt, Artificial Sequence
  Synthetic
  misc_feature (14)..(14): n is a, c, g, or u
  misc_feature (20)..(20): n is a, c, g, or u
uuaccaaauauuunccauungau

SEQ ID NO: 85353 - RNA, 18 nt, Artificial Sequence
  Synthetic
uugguucuucuggacuau

SEQ ID NO: 85354 - RNA, 20 nt, Artificial Sequence
  Synthetic
uguugguucuucuggacuau

SEQ ID NO: 85355 - RNA, 21 nt, Artificial Sequence
  Synthetic
uuguugguucuucuggacuau

SEQ ID NO: 85356 - RNA, 22 nt, Artificial Sequence
  Synthetic
cuuguugguucuucuggacuau

SEQ ID NO: 85357 - RNA, 23 nt, Artificial Sequence
  Synthetic
ucuuguugguucuucuggacuau

SEQ ID NO: 85358 - RNA, 24 nt, Artificial Sequence
  Synthetic
uucuuguugguucuucuggacuau

SEQ ID NO: 85359 - RNA, 18 nt, Artificial Sequence
  Synthetic
uguuuggcuuucaguuau

SEQ ID NO: 85360 - RNA, 19 nt, Artificial Sequence
  Synthetic
cuguuuggcuuucaguuau

SEQ ID NO: 85361 - RNA, 20 nt, Artificial Sequence
  Synthetic
acuguuuggcuuucaguuau

SEQ ID NO: 85362 - RNA, 21 nt, Artificial Sequence
  Synthetic
cacuguuuggcuuucaguuau

SEQ ID NO: 85363 - RNA, 22 nt, Artificial Sequence
  Synthetic
ccacuguuuggcuuucaguuau

SEQ ID NO: 85364 - RNA, 23 nt, Artificial Sequence
  Synthetic
cccacuguuuggcuuucaguuau

SEQ ID NO: 85365 - RNA, 24 nt, Artificial Sequence
  Synthetic
ccccacuguuuggcuuucaguuau

SEQ ID NO: 85366 - RNA, 18 nt, Artificial Sequence
  Synthetic
  misc_feature (4)..(4): n is a, c, g, or u
  misc_feature (13)..(13): n is a, c, g, or u
acanuuuguaggnccacu

SEQ ID NO: 85367 - RNA, 19 nt, Artificial Sequence
  Synthetic
  misc_feature (5)..(5): n is a, c, g, or u
  misc_feature (14)..(14): n is a, c, g, or u
aacanuuuguaggnccacu

SEQ ID NO: 85368 - RNA, 21 nt, Artificial Sequence
  Synthetic
  misc_feature (7)..(7): n is a, c, g, or u
  misc_feature (16)..(16): n is a, c, g, or u
ugaacanuuuguaggnccacu

SEQ ID NO: 85369 - RNA, 23 nt, Artificial Sequence
  Synthetic
  misc_feature (9)..(9): n is a, c, g, or u
  misc_feature (18)..(18): n is a, c, g, or u
ugugaacanuuuguaggnccacu

SEQ ID NO: 85370 - RNA, 24 nt, Artificial Sequence
  Synthetic
  misc_feature (10)..(10): n is a, c, g, or u
  misc_feature (19)..(19): n is a, c, g, or u
augugaacanuuuguaggnccacu

SEQ ID NO: 85371 - RNA, 18 nt, Artificial Sequence
  Synthetic
  misc_feature (5)..(6): n is a, c, g, or u
  misc_feature (10)..(10): n is a, c, g, or u
  misc_feature (13)..(13): n is a, c, g, or u
uccannaucnagngaccu

SEQ ID NO: 85372 - RNA, 19 nt, Artificial Sequence
  Synthetic
  misc_feature (6)..(7): n is a, c, g, or u
  misc_feature (11)..(11): n is a, c, g, or u
  misc_feature (14)..(14): n is a, c, g, or u
auccannaucnagngaccu

SEQ ID NO: 85373 - RNA, 21 nt, Artificial Sequence
  Synthetic
  misc_feature (8)..(9): n is a, c, g, or u
  misc_feature (13)..(13): n is a, c, g, or u
  misc_feature (16)..(16): n is a, c, g, or u
agauccannaucnagngaccu

SEQ ID NO: 85374 - RNA, 22 nt, Artificial Sequence
  Synthetic
  misc_feature (9)..(10): n is a, c, g, or u
  misc_feature (14)..(14): n is a, c, g, or u
  misc_feature (17)..(17): n is a, c, g, or u
aagauccannaucnagngaccu

SEQ ID NO: 85375 - RNA, 18 nt, Artificial Sequence
  Synthetic
agaggccuguauuucccu

SEQ ID NO: 85376 - RNA, 20 nt, Artificial Sequence
  Synthetic
ugagaggccuguauuucccu

SEQ ID NO: 85377 - RNA, 22 nt, Artificial Sequence
  Synthetic
  misc_feature (1)..(1): n is a, c, g, or u
ngugagaggccuguauuucccu

SEQ ID NO: 85378 - RNA, 24 nt, Artificial Sequence
  Synthetic
  misc_feature (3)..(3): n is a, c, g, or u
agngugagaggccuguauuucccu

SEQ ID NO: 85379 - RNA, 18 nt, Artificial Sequence
  Synthetic
cuuccuguuaacaggccu

SEQ ID NO: 85380 - RNA, 19 nt, Artificial Sequence
  Synthetic
acuuccuguuaacaggccu

SEQ ID NO: 85381 - RNA, 20 nt, Artificial Sequence
  Synthetic
aacuuccuguuaacaggccu

SEQ ID NO: 85382 - RNA, 21 nt, Artificial Sequence
  Synthetic
aaacuuccuguuaacaggccu

SEQ ID NO: 85383 - RNA, 22 nt, Artificial Sequence
  Synthetic
aaaacuuccuguuaacaggccu

SEQ ID NO: 85384 - RNA, 24 nt, Artificial Sequence
  Synthetic
agaaaacuuccuguuaacaggccu

SEQ ID NO: 85385 - RNA, 18 nt, Artificial Sequence
  Synthetic
  misc_feature (5)..(5): n is a, c, g, or u
  misc_feature (14)..(14): n is a, c, g, or u
cucunuaucgggangccu

SEQ ID NO: 85386 - RNA, 20 nt, Artificial Sequence
  Synthetic
  misc_feature (7)..(7): n is a, c, g, or u
  misc_feature (16)..(16): n is a, c, g, or u
agcucunuaucgggangccu

SEQ ID NO: 85387 - RNA, 21 nt, Artificial Sequence
  Synthetic
  misc_feature (8)..(8): n is a, c, g, or u
  misc_feature (17)..(17): n is a, c, g, or u
cagcucunuaucgggangccu

SEQ ID NO: 85388 - RNA, 22 nt, Artificial Sequence
  Synthetic
  misc_feature (9)..(9): n is a, c, g, or u
  misc_feature (18)..(18): n is a, c, g, or u
ucagcucunuaucgggangccu

SEQ ID NO: 85389 - RNA, 23 nt, Artificial Sequence
  Synthetic
  misc_feature (10)..(10): n is a, c, g, or u
  misc_feature (19)..(19): n is a, c, g, or u
cucagcucunuaucgggangccu

SEQ ID NO: 85390 - RNA, 24 nt, Artificial Sequence
  Synthetic
  misc_feature (11)..(11): n is a, c, g, or u
  misc_feature (20)..(20): n is a, c, g, or u
ccucagcucunuaucgggangccu

SEQ ID NO: 85391 - RNA, 18 nt, Artificial Sequence
  Synthetic
cuuguugacaagaauccu

SEQ ID NO: 85392 - RNA, 19 nt, Artificial Sequence
  Synthetic
ucuuguugacaagaauccu

SEQ ID NO: 85393 - RNA, 20 nt, Artificial Sequence
  Synthetic
uucuuguugacaagaauccu

SEQ ID NO: 85394 - RNA, 21 nt, Artificial Sequence
  Synthetic
uuucuuguugacaagaauccu

SEQ ID NO: 85395 - RNA, 22 nt, Artificial Sequence
  Synthetic
uuuucuuguugacaagaauccu

SEQ ID NO: 85396 - RNA, 23 nt, Artificial Sequence
  Synthetic
uuuuucuuguugacaagaauccu

SEQ ID NO: 85397 - RNA, 18 nt, Artificial Sequence
  Synthetic
uucccccacuguuuggcu

SEQ ID NO: 85398 - RNA, 19 nt, Artificial Sequence
  Synthetic
uuucccccacuguuuggcu

SEQ ID NO: 85399 - RNA, 20 nt, Artificial Sequence
  Synthetic
cuuucccccacuguuuggcu

SEQ ID NO: 85400 - RNA, 18 nt, Artificial Sequence
  Synthetic
  misc_feature (8)..(9): n is a, c, g, or u
aaccuuunnggcuccucu

SEQ ID NO: 85401 - RNA, 21 nt, Artificial Sequence
  Synthetic
  misc_feature (11)..(12): n is a, c, g, or u
uggaaccuuunnggcuccucu

SEQ ID NO: 85402 - RNA, 23 nt, Artificial Sequence
  Synthetic
  misc_feature (13)..(14): n is a, c, g, or u
cguggaaccuuunnggcuccucu

SEQ ID NO: 85403 - RNA, 18 nt, Artificial Sequence
  Synthetic
accaauuuucuuuugucu

SEQ ID NO: 85404 - RNA, 19 nt, Artificial Sequence
  Synthetic
uaccaauuuucuuuugucu

SEQ ID NO: 85405 - RNA, 20 nt, Artificial Sequence
  Synthetic
uuaccaauuuucuuuugucu

SEQ ID NO: 85406 - RNA, 22 nt, Artificial Sequence
  Synthetic
uguuaccaauuuucuuuugucu

SEQ ID NO: 85407 - RNA, 23 nt, Artificial Sequence
  Synthetic
cuguuaccaauuuucuuuugucu

SEQ ID NO: 85408 - RNA, 18 nt, Artificial Sequence
  Synthetic
uuuggugucuuucggagu

SEQ ID NO: 85409 - RNA, 19 nt, Artificial Sequence
  Synthetic
auuuggugucuuucggagu

SEQ ID NO: 85410 - RNA, 20 nt, Artificial Sequence
  Synthetic
uauuuggugucuuucggagu

SEQ ID NO: 85411 - RNA, 18 nt, Artificial Sequence
  Synthetic
  misc_feature (6)..(6): n is a, c, g, or u
cuagcnaccugggugggu

SEQ ID NO: 85412 - RNA, 19 nt, Artificial Sequence
  Synthetic
  misc_feature (7)..(7): n is a, c, g, or u
ucuagcnaccugggugggu

SEQ ID NO: 85413 - RNA, 20 nt, Artificial Sequence
  Synthetic
  misc_feature (8)..(8): n is a, c, g, or u
cucuagcnaccugggugggu

SEQ ID NO: 85414 - RNA, 21 nt, Artificial Sequence
  Synthetic
  misc_feature (9)..(9): n is a, c, g, or u
acucuagcnaccugggugggu

SEQ ID NO: 85415 - RNA, 23 nt, Artificial Sequence
  Synthetic
  misc_feature (11)..(11): n is a, c, g, or u
ugacucuagcnaccugggugggu

SEQ ID NO: 85416 - RNA, 24 nt, Artificial Sequence
  Synthetic
  misc_feature (12)..(12): n is a, c, g, or u
augacucuagcnaccugggugggu

SEQ ID NO: 85417 - RNA, 18 nt, Artificial Sequence
  Synthetic
uccuguccuccaacuugu

SEQ ID NO: 85418 - RNA, 19 nt, Artificial Sequence
  Synthetic
cuccuguccuccaacuugu

SEQ ID NO: 85419 - RNA, 20 nt, Artificial Sequence
  Synthetic
ccuccuguccuccaacuugu

SEQ ID NO: 85420 - RNA, 21 nt, Artificial Sequence
  Synthetic
accuccuguccuccaacuugu

SEQ ID NO: 85421 - RNA, 22 nt, Artificial Sequence
  Synthetic
aaccuccuguccuccaacuugu

SEQ ID NO: 85422 - RNA, 23 nt, Artificial Sequence
  Synthetic
caaccuccuguccuccaacuugu

SEQ ID NO: 85423 - RNA, 24 nt, Artificial Sequence
  Synthetic
ccaaccuccuguccuccaacuugu

SEQ ID NO: 85424 - RNA, 18 nt, Artificial Sequence
  Synthetic
  misc_feature (17)..(17): n is a, c, g, or u
uaaaguucaggcaacunu

SEQ ID NO: 85425 - RNA, 19 nt, Artificial Sequence
  Synthetic
  misc_feature (18)..(18): n is a, c, g, or u
cuaaaguucaggcaacunu

SEQ ID NO: 85426 - RNA, 20 nt, Artificial Sequence
  Synthetic
  misc_feature (19)..(19): n is a, c, g, or u
ccuaaaguucaggcaacunu

SEQ ID NO: 85427 - RNA, 18 nt, Artificial Sequence
  Synthetic
ugugucuuggccaaaauu

SEQ ID NO: 85428 - RNA, 20 nt, Artificial Sequence
  Synthetic
cgugugucuuggccaaaauu

SEQ ID NO: 85429 - RNA, 18 nt, Artificial Sequence
  Synthetic
  misc_feature (6)..(6): n is a, c, g, or u
  misc_feature (15)..(15): n is a, c, g, or u
aaagunugucaacgnauu

SEQ ID NO: 85430 - RNA, 21 nt, Artificial Sequence
  Synthetic
  misc_feature (9)..(9): n is a, c, g, or u
  misc_feature (18)..(18): n is a, c, g, or u
uggaaagunugucaacgnauu

SEQ ID NO: 85431 - RNA, 22 nt, Artificial Sequence
  Synthetic
  misc_feature (10)..(10): n is a, c, g, or u
  misc_feature (19)..(19): n is a, c, g, or u
uuggaaagunugucaacgnauu

SEQ ID NO: 85432 - RNA, 23 nt, Artificial Sequence
  Synthetic
  misc_feature (11)..(11): n is a, c, g, or u
  misc_feature (20)..(20): n is a, c, g, or u
auuggaaagunugucaacgnauu

SEQ ID NO: 85433 - RNA, 18 nt, Artificial Sequence
  Synthetic
  misc_feature (6)..(6): n is a, c, g, or u
ccuucnguacgagaucuu

SEQ ID NO: 85434 - RNA, 19 nt, Artificial Sequence
  Synthetic
  misc_feature (7)..(7): n is a, c, g, or u
uccuucnguacgagaucuu

SEQ ID NO: 85435 - RNA, 20 nt, Artificial Sequence
  Synthetic
  misc_feature (8)..(8): n is a, c, g, or u
uuccuucnguacgagaucuu

SEQ ID NO: 85436 - RNA, 21 nt, Artificial Sequence
  Synthetic
  misc_feature (9)..(9): n is a, c, g, or u
uuuccuucnguacgagaucuu

SEQ ID NO: 85437 - RNA, 22 nt, Artificial Sequence
  Synthetic
  misc_feature (10)..(10): n is a, c, g, or u
cuuuccuucnguacgagaucuu

SEQ ID NO: 85438 - RNA, 23 nt, Artificial Sequence
  Synthetic
  misc_feature (11)..(11): n is a, c, g, or u
ucuuuccuucnguacgagaucuu

SEQ ID NO: 85439 - RNA, 24 nt, Artificial Sequence
  Synthetic
  misc_feature (12)..(12): n is a, c, g, or u
uucuuuccuucnguacgagaucuu

SEQ ID NO: 85440 - RNA, 18 nt, Artificial Sequence
  Synthetic
  misc_feature (6)..(6): n is a, c, g, or u
caacgnauugugggucuu

SEQ ID NO: 85441 - RNA, 19 nt, Artificial Sequence
  Synthetic
  misc_feature (7)..(7): n is a, c, g, or u
ucaacgnauugugggucuu

SEQ ID NO: 85442 - RNA, 21 nt, Artificial Sequence
  Synthetic
  misc_feature (9)..(9): n is a, c, g, or u
ugucaacgnauugugggucuu

SEQ ID NO: 85443 - RNA, 22 nt, Artificial Sequence
  Synthetic
  misc_feature (1)..(1): n is a, c, g, or u
  misc_feature (10)..(10): n is a, c, g, or u
nugucaacgnauugugggucuu

SEQ ID NO: 85444 - RNA, 23 nt, Artificial Sequence
  Synthetic
  misc_feature (2)..(2): n is a, c, g, or u
  misc_feature (11)..(11): n is a, c, g, or u
unugucaacgnauugugggucuu

SEQ ID NO: 85445 - RNA, 19 nt, Artificial Sequence
  Synthetic
ugcuaugccucaucuucuu

SEQ ID NO: 85446 - RNA, 20 nt, Artificial Sequence
  Synthetic
cugcuaugccucaucuucuu

SEQ ID NO: 85447 - RNA, 21 nt, Artificial Sequence
  Synthetic
  misc_feature (5)..(5): n is a, c, g, or u
ugggnuaugucauuggauguu

SEQ ID NO: 85448 - RNA, 22 nt, Artificial Sequence
  Synthetic
  misc_feature (6)..(6): n is a, c, g, or u
augggnuaugucauuggauguu

SEQ ID NO: 85449 - RNA, 23 nt, Artificial Sequence
  Synthetic
  misc_feature (1)..(1): n is a, c, g, or u
  misc_feature (7)..(7): n is a, c, g, or u
naugggnuaugucauuggauguu

SEQ ID NO: 85450 - RNA, 24 nt, Artificial Sequence
  Synthetic
  misc_feature (2)..(2): n is a, c, g, or u
  misc_feature (8)..(8): n is a, c, g, or u
unaugggnuaugucauuggauguu

SEQ ID NO: 85451 - RNA, 18 nt, Artificial Sequence
  Synthetic
ucccuuuuuaccgcuguu

SEQ ID NO: 85452 - RNA, 20 nt, Artificial Sequence
  Synthetic
agucccuuuuuaccgcuguu

SEQ ID NO: 85453 - RNA, 18 nt, Artificial Sequence
  Synthetic
agaguauuuggugucuuu

SEQ ID NO: 85454 - RNA, 19 nt, Artificial Sequence
  Synthetic
uagaguauuuggugucuuu

SEQ ID NO: 85455 - RNA, 20 nt, Artificial Sequence
  Synthetic
  misc_feature (1)..(1): n is a, c, g, or u
nuagaguauuuggugucuuu

SEQ ID NO: 85456 - RNA, 21 nt, Artificial Sequence
  Synthetic
  misc_feature (1)..(2): n is a, c, g, or u
nnuagaguauuuggugucuuu

SEQ ID NO: 85457 - RNA, 22 nt, Artificial Sequence
  Synthetic
  misc_feature (2)..(3): n is a, c, g, or u
unnuagaguauuuggugucuuu

SEQ ID NO: 85458 - RNA, 24 nt, Artificial Sequence
  Synthetic
  misc_feature (1)..(1): n is a, c, g, or u
  misc_feature (4)..(5): n is a, c, g, or u
ngunnuagaguauuuggugucuuu

SEQ ID NO: 85459 - RNA, 18 nt, Artificial Sequence
  Synthetic
uuucuccuggcucaguuu

SEQ ID NO: 85460 - RNA, 20 nt, Artificial Sequence
  Synthetic
cguuucuccuggcucaguuu

SEQ ID NO: 85461 - RNA, 21 nt, Artificial Sequence
  Synthetic
ccguuucuccuggcucaguuu

SEQ ID NO: 85462 - RNA, 22 nt, Artificial Sequence
  Synthetic
cccguuucuccuggcucaguuu

SEQ ID NO: 85463 - RNA, 24 nt, Artificial Sequence
  Synthetic
agcccguuucuccuggcucaguuu

SEQ ID NO: 85464 - RNA, 18 nt, Artificial Sequence
  Synthetic
  misc_feature (4)..(4): n is a, c, g, or u
cacnuagcgccucauuuu

SEQ ID NO: 85465 - RNA, 19 nt, Artificial Sequence
  Synthetic
  misc_feature (5)..(5): n is a, c, g, or u
acacnuagcgccucauuuu

SEQ ID NO: 85466 - RNA, 20 nt, Artificial Sequence
  Synthetic
  misc_feature (6)..(6): n is a, c, g, or u
aacacnuagcgccucauuuu

SEQ ID NO: 85467 - RNA, 21 nt, Artificial Sequence
  Synthetic
  misc_feature (7)..(7): n is a, c, g, or u
caacacnuagcgccucauuuu

SEQ ID NO: 85468 - RNA, 22 nt, Artificial Sequence
  Synthetic
  misc_feature (8)..(8): n is a, c, g, or u
acaacacnuagcgccucauuuu

SEQ ID NO: 85469 - RNA, 23 nt, Artificial Sequence
  Synthetic
  misc_feature (9)..(9): n is a, c, g, or u
aacaacacnuagcgccucauuuu

SEQ ID NO: 85470 - RNA, 24 nt, Artificial Sequence
  Synthetic
  misc_feature (10)..(10): n is a, c, g, or u
aaacaacacnuagcgccucauuuu

SEQ ID NO: 85471 - RNA, 18 nt, Artificial Sequence
  Synthetic
  misc_feature (12)..(12): n is a, c, g, or u
uggaaaacaccnucuuuu

SEQ ID NO: 85472 - RNA, 19 nt, Artificial Sequence
  Synthetic
  misc_feature (13)..(13): n is a, c, g, or u
uuggaaaacaccnucuuuu

SEQ ID NO: 85473 - RNA, 20 nt, Artificial Sequence
  Synthetic
  misc_feature (14)..(14): n is a, c, g, or u
auuggaaaacaccnucuuuu

SEQ ID NO: 85474 - RNA, 21 nt, Artificial Sequence
  Synthetic
  misc_feature (15)..(15): n is a, c, g, or u
cauuggaaaacaccnucuuuu

SEQ ID NO: 85475 - RNA, 22 nt, Artificial Sequence
  Synthetic
  misc_feature (16)..(16): n is a, c, g, or u
ucauuggaaaacaccnucuuuu

SEQ ID NO: 85476 - RNA, 23 nt, Artificial Sequence
  Synthetic
  misc_feature (17)..(17): n is a, c, g, or u
cucauuggaaaacaccnucuuuu

SEQ ID NO: 85477 - RNA, 24 nt, Artificial Sequence
  Synthetic
  misc_feature (18)..(18): n is a, c, g, or u
ccucauuggaaaacaccnucuuuu

SEQ ID NO: 85478 - RNA, 18 nt, Artificial Sequence
  Synthetic
gaagucagaaggcaaaaa

SEQ ID NO: 85479 - RNA, 19 nt, Artificial Sequence
  Synthetic
agaagucagaaggcaaaaa

SEQ ID NO: 85480 - RNA, 20 nt, Artificial Sequence
  Synthetic
aagaagucagaaggcaaaaa

SEQ ID NO: 85481 - RNA, 21 nt, Artificial Sequence
  Synthetic
aaagaagucagaaggcaaaaa

SEQ ID NO: 85482 - RNA, 22 nt, Artificial Sequence
  Synthetic
gaaagaagucagaaggcaaaaa

SEQ ID NO: 85483 - RNA, 23 nt, Artificial Sequence
  Synthetic
ggaaagaagucagaaggcaaaaa

SEQ ID NO: 85484 - RNA, 24 nt, Artificial Sequence
  Synthetic
aggaaagaagucagaaggcaaaaa

SEQ ID NO: 85485 - RNA, 18 nt, Artificial Sequence
  Synthetic
auauggugacccacaaaa

SEQ ID NO: 85486 - RNA, 19 nt, Artificial Sequence
  Synthetic
aauauggugacccacaaaa

SEQ ID NO: 85487 - RNA, 20 nt, Artificial Sequence
  Synthetic
gaauauggugacccacaaaa

SEQ ID NO: 85488 - RNA, 21 nt, Artificial Sequence
  Synthetic
agaauauggugacccacaaaa

SEQ ID NO: 85489 - RNA, 22 nt, Artificial Sequence
  Synthetic
aagaauauggugacccacaaaa

SEQ ID NO: 85490 - RNA, 23 nt, Artificial Sequence
  Synthetic
caagaauauggugacccacaaaa

SEQ ID NO: 85491 - RNA, 24 nt, Artificial Sequence
  Synthetic
ccaagaauauggugacccacaaaa

SEQ ID NO: 85492 - RNA, 18 nt, Artificial Sequence
  Synthetic
  misc_feature (3)..(3): n is a, c, g, or u
acnguuucucuuccaaaa

SEQ ID NO: 85493 - RNA, 19 nt, Artificial Sequence
  Synthetic
  misc_feature (1)..(1): n is a, c, g, or u
  misc_feature (4)..(4): n is a, c, g, or u
nacnguuucucuuccaaaa

SEQ ID NO: 85494 - RNA, 20 nt, Artificial Sequence
  Synthetic
  misc_feature (1)..(2): n is a, c, g, or u
  misc_feature (5)..(5): n is a, c, g, or u
nnacnguuucucuuccaaaa

SEQ ID NO: 85495 - RNA, 21 nt, Artificial Sequence
  Synthetic
  misc_feature (2)..(3): n is a, c, g, or u
  misc_feature (6)..(6): n is a, c, g, or u
annacnguuucucuuccaaaa

SEQ ID NO: 85496 - RNA, 22 nt, Artificial Sequence
  Synthetic
  misc_feature (3)..(4): n is a, c, g, or u
  misc_feature (7)..(7): n is a, c, g, or u
uannacnguuucucuuccaaaa

SEQ ID NO: 85497 - RNA, 23 nt, Artificial Sequence
  Synthetic
  misc_feature (4)..(5): n is a, c, g, or u
  misc_feature (8)..(8): n is a, c, g, or u
cuannacnguuucucuuccaaaa

SEQ ID NO: 85498 - RNA, 24 nt, Artificial Sequence
  Synthetic
  misc_feature (5)..(6): n is a, c, g, or u
  misc_feature (9)..(9): n is a, c, g, or u
ucuannacnguuucucuuccaaaa

SEQ ID NO: 85499 - RNA, 18 nt, Artificial Sequence
  Synthetic
guaaaaggggcagcaaaa

SEQ ID NO: 85500 - RNA, 19 nt, Artificial Sequence
  Synthetic
uguaaaaggggcagcaaaa

SEQ ID NO: 85501 - RNA, 20 nt, Artificial Sequence
  Synthetic
guguaaaaggggcagcaaaa

SEQ ID NO: 85502 - RNA, 21 nt, Artificial Sequence
  Synthetic
uguguaaaaggggcagcaaaa

SEQ ID NO: 85503 - RNA, 22 nt, Artificial Sequence
  Synthetic
uuguguaaaaggggcagcaaaa

SEQ ID NO: 85504 - RNA, 23 nt, Artificial Sequence
  Synthetic
auuguguaaaaggggcagcaaaa

SEQ ID NO: 85505 - RNA, 24 nt, Artificial Sequence
  Synthetic
cauuguguaaaaggggcagcaaaa

SEQ ID NO: 85506 - RNA, 18 nt, Artificial Sequence
  Synthetic
agaagucagaaggcaaaa

SEQ ID NO: 85507 - RNA, 19 nt, Artificial Sequence
  Synthetic
aagaagucagaaggcaaaa

SEQ ID NO: 85508 - RNA, 20 nt, Artificial Sequence
  Synthetic
aaagaagucagaaggcaaaa

SEQ ID NO: 85509 - RNA, 21 nt, Artificial Sequence
  Synthetic
gaaagaagucagaaggcaaaa

SEQ ID NO: 85510 - RNA, 22 nt, Artificial Sequence
  Synthetic
ggaaagaagucagaaggcaaaa

SEQ ID NO: 85511 - RNA, 23 nt, Artificial Sequence
  Synthetic
aggaaagaagucagaaggcaaaa

SEQ ID NO: 85512 - RNA, 24 nt, Artificial Sequence
  Synthetic
aaggaaagaagucagaaggcaaaa

SEQ ID NO: 85513 - RNA, 18 nt, Artificial Sequence
  Synthetic
  misc_feature (3)..(3): n is a, c, g, or u
  misc_feature (6)..(6): n is a, c, g, or u
gunguncccccuagaaaa

SEQ ID NO: 85514 - RNA, 19 nt, Artificial Sequence
  Synthetic
  misc_feature (4)..(4): n is a, c, g, or u
  misc_feature (7)..(7): n is a, c, g, or u
ggunguncccccuagaaaa

SEQ ID NO: 85515 - RNA, 20 nt, Artificial Sequence
  Synthetic
  misc_feature (5)..(5): n is a, c, g, or u
  misc_feature (8)..(8): n is a, c, g, or u
cggunguncccccuagaaaa

SEQ ID NO: 85516 - RNA, 21 nt, Artificial Sequence
  Synthetic
  misc_feature (6)..(6): n is a, c, g, or u
  misc_feature (9)..(9): n is a, c, g, or u
acggunguncccccuagaaaa

SEQ ID NO: 85517 - RNA, 22 nt, Artificial Sequence
  Synthetic
  misc_feature (7)..(7): n is a, c, g, or u
  misc_feature (10)..(10): n is a, c, g, or u
cacggunguncccccuagaaaa

SEQ ID NO: 85518 - RNA, 23 nt, Artificial Sequence
  Synthetic
  misc_feature (8)..(8): n is a, c, g, or u
  misc_feature (11)..(11): n is a, c, g, or u
acacggunguncccccuagaaaa

SEQ ID NO: 85519 - RNA, 24 nt, Artificial Sequence
  Synthetic
  misc_feature (9)..(9): n is a, c, g, or u
  misc_feature (12)..(12): n is a, c, g, or u
cacacggunguncccccuagaaaa

SEQ ID NO: 85520 - RNA, 18 nt, Artificial Sequence
  Synthetic
  misc_feature (7)..(7): n is a, c, g, or u
gguaacnuuuggauaaaa

SEQ ID NO: 85521 - RNA, 19 nt, Artificial Sequence
  Synthetic
  misc_feature (8)..(8): n is a, c, g, or u
ugguaacnuuuggauaaaa

SEQ ID NO: 85522 - RNA, 20 nt, Artificial Sequence
  Synthetic
  misc_feature (9)..(9): n is a, c, g, or u
uugguaacnuuuggauaaaa

SEQ ID NO: 85523 - RNA, 21 nt, Artificial Sequence
  Synthetic
  misc_feature (10)..(10): n is a, c, g, or u
uuugguaacnuuuggauaaaa

SEQ ID NO: 85524 - RNA, 22 nt, Artificial Sequence
  Synthetic
  misc_feature (11)..(11): n is a, c, g, or u
auuugguaacnuuuggauaaaa

SEQ ID NO: 85525 - RNA, 23 nt, Artificial Sequence
  Synthetic
  misc_feature (12)..(12): n is a, c, g, or u
uauuugguaacnuuuggauaaaa

SEQ ID NO: 85526 - RNA, 24 nt, Artificial Sequence
  Synthetic
  misc_feature (13)..(13): n is a, c, g, or u
auauuugguaacnuuuggauaaaa

SEQ ID NO: 85527 - RNA, 18 nt, Artificial Sequence
  Synthetic
uugguaacagcgguaaaa

SEQ ID NO: 85528 - RNA, 19 nt, Artificial Sequence
  Synthetic
auugguaacagcgguaaaa

SEQ ID NO: 85529 - RNA, 20 nt, Artificial Sequence
  Synthetic
aauugguaacagcgguaaaa

SEQ ID NO: 85530 - RNA, 21 nt, Artificial Sequence
  Synthetic
aaauugguaacagcgguaaaa

SEQ ID NO: 85531 - RNA, 22 nt, Artificial Sequence
  Synthetic
aaaauugguaacagcgguaaaa

SEQ ID NO: 85532 - RNA, 23 nt, Artificial Sequence
  Synthetic
gaaaauugguaacagcgguaaaa

SEQ ID NO: 85533 - RNA, 24 nt, Artificial Sequence
  Synthetic
agaaaauugguaacagcgguaaaa

SEQ ID NO: 85534 - RNA, 18 nt, Artificial Sequence
  Synthetic
aauauggugacccacaaa

SEQ ID NO: 85535 - RNA, 19 nt, Artificial Sequence
  Synthetic
gaauauggugacccacaaa

SEQ ID NO: 85536 - RNA, 20 nt, Artificial Sequence
  Synthetic
agaauauggugacccacaaa

SEQ ID NO: 85537 - RNA, 21 nt, Artificial Sequence
  Synthetic
aagaauauggugacccacaaa

SEQ ID NO: 85538 - RNA, 22 nt, Artificial Sequence
  Synthetic
caagaauauggugacccacaaa

SEQ ID NO: 85539 - RNA, 23 nt, Artificial Sequence
  Synthetic
ccaagaauauggugacccacaaa

SEQ ID NO: 85540 - RNA, 24 nt, Artificial Sequence
  Synthetic
cccaagaauauggugacccacaaa

SEQ ID NO: 85541 - RNA, 18 nt, Artificial Sequence
  Synthetic
uguauacccaaagacaaa

SEQ ID NO: 85542 - RNA, 19 nt, Artificial Sequence
  Synthetic
auguauacccaaagacaaa

SEQ ID NO: 85543 - RNA, 20 nt, Artificial Sequence
  Synthetic
aauguauacccaaagacaaa

SEQ ID NO: 85544 - RNA, 21 nt, Artificial Sequence
  Synthetic
aaauguauacccaaagacaaa

SEQ ID NO: 85545 - RNA, 22 nt, Artificial Sequence
  Synthetic
uaaauguauacccaaagacaaa

SEQ ID NO: 85546 - RNA, 23 nt, Artificial Sequence
  Synthetic
uuaaauguauacccaaagacaaa

SEQ ID NO: 85547 - RNA, 24 nt, Artificial Sequence
  Synthetic
uuuaaauguauacccaaagacaaa

SEQ ID NO: 85548 - RNA, 18 nt, Artificial Sequence
  Synthetic
uuuaaauguauacccaaa

SEQ ID NO: 85549 - RNA, 19 nt, Artificial Sequence
  Synthetic
guuuaaauguauacccaaa

SEQ ID NO: 85550 - RNA, 20 nt, Artificial Sequence
  Synthetic
gguuuaaauguauacccaaa

SEQ ID NO: 85551 - RNA, 21 nt, Artificial Sequence
  Synthetic
ggguuuaaauguauacccaaa

SEQ ID NO: 85552 - RNA, 22 nt, Artificial Sequence
  Synthetic
aggguuuaaauguauacccaaa

SEQ ID NO: 85553 - RNA, 23 nt, Artificial Sequence
  Synthetic
uaggguuuaaauguauacccaaa

SEQ ID NO: 85554 - RNA, 24 nt, Artificial Sequence
  Synthetic
uuaggguuuaaauguauacccaaa

SEQ ID NO: 85555 - RNA, 18 nt, Artificial Sequence
  Synthetic
  misc_feature (1)..(1): n is a, c, g, or u
  misc_feature (4)..(4): n is a, c, g, or u
nacnguuucucuuccaaa

SEQ ID NO: 85556 - RNA, 19 nt, Artificial Sequence
  Synthetic
  misc_feature (1)..(2): n is a, c, g, or u
  misc_feature (5)..(5): n is a, c, g, or u
nnacnguuucucuuccaaa

SEQ ID NO: 85557 - RNA, 20 nt, Artificial Sequence
  Synthetic
  misc_feature (2)..(3): n is a, c, g, or u
  misc_feature (6)..(6): n is a, c, g, or u
annacnguuucucuuccaaa

SEQ ID NO: 85558 - RNA, 21 nt, Artificial Sequence
  Synthetic
  misc_feature (3)..(4): n is a, c, g, or u
  misc_feature (7)..(7): n is a, c, g, or u
uannacnguuucucuuccaaa

SEQ ID NO: 85559 - RNA, 22 nt, Artificial Sequence
  Synthetic
  misc_feature (4)..(5): n is a, c, g, or u
  misc_feature (8)..(8): n is a, c, g, or u
cuannacnguuucucuuccaaa

SEQ ID NO: 85560 - RNA, 23 nt, Artificial Sequence
  Synthetic
  misc_feature (5)..(6): n is a, c, g, or u
  misc_feature (9)..(9): n is a, c, g, or u
ucuannacnguuucucuuccaaa

SEQ ID NO: 85561 - RNA, 24 nt, Artificial Sequence
  Synthetic
  misc_feature (6)..(7): n is a, c, g, or u
  misc_feature (10)..(10): n is a, c, g, or u
cucuannacnguuucucuuccaaa

SEQ ID NO: 85562 - RNA, 18 nt, Artificial Sequence
  Synthetic
agaccugcugcgagcaaa

SEQ ID NO: 85563 - RNA, 19 nt, Artificial Sequence
  Synthetic
cagaccugcugcgagcaaa

SEQ ID NO: 85564 - RNA, 20 nt, Artificial Sequence
  Synthetic
ccagaccugcugcgagcaaa

SEQ ID NO: 85565 - RNA, 21 nt, Artificial Sequence
  Synthetic
uccagaccugcugcgagcaaa

SEQ ID NO: 85566 - RNA, 22 nt, Artificial Sequence
  Synthetic
cuccagaccugcugcgagcaaa

SEQ ID NO: 85567 - RNA, 23 nt, Artificial Sequence
  Synthetic
gcuccagaccugcugcgagcaaa

SEQ ID NO: 85568 - RNA, 24 nt, Artificial Sequence
  Synthetic
ugcuccagaccugcugcgagcaaa

SEQ ID NO: 85569 - RNA, 18 nt, Artificial Sequence
  Synthetic
aagaagucagaaggcaaa

SEQ ID NO: 85570 - RNA, 19 nt, Artificial Sequence
  Synthetic
aaagaagucagaaggcaaa

SEQ ID NO: 85571 - RNA, 20 nt, Artificial Sequence
  Synthetic
gaaagaagucagaaggcaaa

SEQ ID NO: 85572 - RNA, 21 nt, Artificial Sequence
  Synthetic
ggaaagaagucagaaggcaaa

SEQ ID NO: 85573 - RNA, 22 nt, Artificial Sequence
  Synthetic
aggaaagaagucagaaggcaaa

SEQ ID NO: 85574 - RNA, 23 nt, Artificial Sequence
  Synthetic
aaggaaagaagucagaaggcaaa

SEQ ID NO: 85575 - RNA, 24 nt, Artificial Sequence
  Synthetic
gaaggaaagaagucagaaggcaaa

SEQ ID NO: 85576 - RNA, 18 nt, Artificial Sequence
  Synthetic
ggaugaguguuucucaaa

SEQ ID NO: 85577 - RNA, 19 nt, Artificial Sequence
  Synthetic
aggaugaguguuucucaaa

SEQ ID NO: 85578 - RNA, 20 nt, Artificial Sequence
  Synthetic
gaggaugaguguuucucaaa

SEQ ID NO: 85579 - RNA, 21 nt, Artificial Sequence
  Synthetic
ugaggaugaguguuucucaaa

SEQ ID NO: 85580 - RNA, 22 nt, Artificial Sequence
  Synthetic
cugaggaugaguguuucucaaa

SEQ ID NO: 85581 - RNA, 23 nt, Artificial Sequence
  Synthetic
ccugaggaugaguguuucucaaa

SEQ ID NO: 85582 - RNA, 24 nt, Artificial Sequence
  Synthetic
gccugaggaugaguguuucucaaa

SEQ ID NO: 85583 - RNA, 18 nt, Artificial Sequence
  Synthetic
caaaagugagacaagaaa

SEQ ID NO: 85584 - RNA, 19 nt, Artificial Sequence
  Synthetic
ccaaaagugagacaagaaa

SEQ ID NO: 85585 - RNA, 20 nt, Artificial Sequence
  Synthetic
uccaaaagugagacaagaaa

SEQ ID NO: 85586 - RNA, 21 nt, Artificial Sequence
  Synthetic
uuccaaaagugagacaagaaa

SEQ ID NO: 85587 - RNA, 22 nt, Artificial Sequence
  Synthetic
cuuccaaaagugagacaagaaa

SEQ ID NO: 85588 - RNA, 23 nt, Artificial Sequence
  Synthetic
ucuuccaaaagugagacaagaaa

SEQ ID NO: 85589 - RNA, 24 nt, Artificial Sequence
  Synthetic
cucuuccaaaagugagacaagaaa

SEQ ID NO: 85590 - RNA, 18 nt, Artificial Sequence
  Synthetic
uuguaaguuggcgagaaa

SEQ ID NO: 85591 - RNA, 19 nt, Artificial Sequence
  Synthetic
cuuguaaguuggcgagaaa

SEQ ID NO: 85592 - RNA, 20 nt, Artificial Sequence
  Synthetic
ccuuguaaguuggcgagaaa

SEQ ID NO: 85593 - RNA, 21 nt, Artificial Sequence
  Synthetic
gccuuguaaguuggcgagaaa

SEQ ID NO: 85594 - RNA, 22 nt, Artificial Sequence
  Synthetic
ggccuuguaaguuggcgagaaa

SEQ ID NO: 85595 - RNA, 23 nt, Artificial Sequence
  Synthetic
aggccuuguaaguuggcgagaaa

SEQ ID NO: 85596 - RNA, 24 nt, Artificial Sequence
  Synthetic
aaggccuuguaaguuggcgagaaa

SEQ ID NO: 85597 - RNA, 18 nt, Artificial Sequence
  Synthetic
  misc_feature (4)..(4): n is a, c, g, or u
  misc_feature (7)..(7): n is a, c, g, or u
ggunguncccccuagaaa

SEQ ID NO: 85598 - RNA, 19 nt, Artificial Sequence
  Synthetic
  misc_feature (5)..(5): n is a, c, g, or u
  misc_feature (8)..(8): n is a, c, g, or u
cggunguncccccuagaaa

SEQ ID NO: 85599 - RNA, 20 nt, Artificial Sequence
  Synthetic
  misc_feature (6)..(6): n is a, c, g, or u
  misc_feature (9)..(9): n is a, c, g, or u
acggunguncccccuagaaa

SEQ ID NO: 85600 - RNA, 21 nt, Artificial Sequence
  Synthetic
  misc_feature (7)..(7): n is a, c, g, or u
  misc_feature (10)..(10): n is a, c, g, or u
cacggunguncccccuagaaa

SEQ ID NO: 85601 - RNA, 22 nt, Artificial Sequence
  Synthetic
  misc_feature (8)..(8): n is a, c, g, or u
  misc_feature (11)..(11): n is a, c, g, or u
acacggunguncccccuagaaa

SEQ ID NO: 85602 - RNA, 23 nt, Artificial Sequence
  Synthetic
  misc_feature (9)..(9): n is a, c, g, or u
  misc_feature (12)..(12): n is a, c, g, or u
cacacggunguncccccuagaaa

SEQ ID NO: 85603 - RNA, 24 nt, Artificial Sequence
  Synthetic
  misc_feature (10)..(10): n is a, c, g, or u
  misc_feature (13)..(13): n is a, c, g, or u
acacacggunguncccccuagaaa

SEQ ID NO: 85604 - RNA, 18 nt, Artificial Sequence
  Synthetic
gagccaccagcagggaaa

SEQ ID NO: 85605 - RNA, 19 nt, Artificial Sequence
  Synthetic
ggagccaccagcagggaaa

SEQ ID NO: 85606 - RNA, 20 nt, Artificial Sequence
  Synthetic
uggagccaccagcagggaaa

SEQ ID NO: 85607 - RNA, 21 nt, Artificial Sequence
  Synthetic
cuggagccaccagcagggaaa

SEQ ID NO: 85608 - RNA, 22 nt, Artificial Sequence
  Synthetic
acuggagccaccagcagggaaa

SEQ ID NO: 85609 - RNA, 23 nt, Artificial Sequence
  Synthetic
aacuggagccaccagcagggaaa

SEQ ID NO: 85610 - RNA, 24 nt, Artificial Sequence
  Synthetic
gaacuggagccaccagcagggaaa

SEQ ID NO: 85611 - RNA, 18 nt, Artificial Sequence
  Synthetic
ucauccauauaacugaaa

SEQ ID NO: 85612 - RNA, 19 nt, Artificial Sequence
  Synthetic
aucauccauauaacugaaa

SEQ ID NO: 85613 - RNA, 20 nt, Artificial Sequence
  Synthetic
caucauccauauaacugaaa

SEQ ID NO: 85614 - RNA, 21 nt, Artificial Sequence
  Synthetic
acaucauccauauaacugaaa

SEQ ID NO: 85615 - RNA, 22 nt, Artificial Sequence
  Synthetic
cacaucauccauauaacugaaa

SEQ ID NO: 85616 - RNA, 23 nt, Artificial Sequence
  Synthetic
ccacaucauccauauaacugaaa

SEQ ID NO: 85617 - RNA, 24 nt, Artificial Sequence
  Synthetic
accacaucauccauauaacugaaa

SEQ ID NO: 85618 - RNA, 18 nt, Artificial Sequence
  Synthetic
acaaauggcacuaguaaa

SEQ ID NO: 85619 - RNA, 19 nt, Artificial Sequence
  Synthetic
aacaaauggcacuaguaaa

SEQ ID NO: 85620 - RNA, 20 nt, Artificial Sequence
  Synthetic
gaacaaauggcacuaguaaa

SEQ ID NO: 85621 - RNA, 21 nt, Artificial Sequence
  Synthetic
ugaacaaauggcacuaguaaa

SEQ ID NO: 85622 - RNA, 22 nt, Artificial Sequence
  Synthetic
cugaacaaauggcacuaguaaa

SEQ ID NO: 85623 - RNA, 23 nt, Artificial Sequence
  Synthetic
acugaacaaauggcacuaguaaa

SEQ ID NO: 85624 - RNA, 24 nt, Artificial Sequence
  Synthetic
cacugaacaaauggcacuaguaaa

SEQ ID NO: 85625 - RNA, 18 nt, Artificial Sequence
  Synthetic
gcgccgacgggacguaaa

SEQ ID NO: 85626 - RNA, 19 nt, Artificial Sequence
  Synthetic
agcgccgacgggacguaaa

SEQ ID NO: 85627 - RNA, 20 nt, Artificial Sequence
  Synthetic
cagcgccgacgggacguaaa

SEQ ID NO: 85628 - RNA, 18 nt, Artificial Sequence
  Synthetic
acggggaguccgcguaaa

SEQ ID NO: 85629 - RNA, 19 nt, Artificial Sequence
  Synthetic
gacggggaguccgcguaaa

SEQ ID NO: 85630 - RNA, 20 nt, Artificial Sequence
  Synthetic
agacggggaguccgcguaaa

SEQ ID NO: 85631 - RNA, 18 nt, Artificial Sequence
  Synthetic
auugguaacagcgguaaa

SEQ ID NO: 85632 - RNA, 19 nt, Artificial Sequence
  Synthetic
aauugguaacagcgguaaa

SEQ ID NO: 85633 - RNA, 20 nt, Artificial Sequence
  Synthetic
aaauugguaacagcgguaaa

SEQ ID NO: 85634 - RNA, 21 nt, Artificial Sequence
  Synthetic
aaaauugguaacagcgguaaa

SEQ ID NO: 85635 - RNA, 22 nt, Artificial Sequence
  Synthetic
gaaaauugguaacagcgguaaa

SEQ ID NO: 85636 - RNA, 23 nt, Artificial Sequence
  Synthetic
agaaaauugguaacagcgguaaa

SEQ ID NO: 85637 - RNA, 24 nt, Artificial Sequence
  Synthetic
aagaaaauugguaacagcgguaaa

SEQ ID NO: 85638 - RNA, 18 nt, Artificial Sequence
  Synthetic
auaaccacauuguguaaa

SEQ ID NO: 85639 - RNA, 19 nt, Artificial Sequence
  Synthetic
gauaaccacauuguguaaa

SEQ ID NO: 85640 - RNA, 20 nt, Artificial Sequence
  Synthetic
ggauaaccacauuguguaaa

SEQ ID NO: 85641 - RNA, 21 nt, Artificial Sequence
  Synthetic
aggauaaccacauuguguaaa

SEQ ID NO: 85642 - RNA, 22 nt, Artificial Sequence
  Synthetic
caggauaaccacauuguguaaa

SEQ ID NO: 85643 - RNA, 23 nt, Artificial Sequence
  Synthetic
gcaggauaaccacauuguguaaa

SEQ ID NO: 85644 - RNA, 24 nt, Artificial Sequence
  Synthetic
agcaggauaaccacauuguguaaa

SEQ ID NO: 85645 - RNA, 18 nt, Artificial Sequence
  Synthetic
  misc_feature (9)..(9): n is a, c, g, or u
gcauacaanggcauuaaa

SEQ ID NO: 85646 - RNA, 19 nt, Artificial Sequence
  Synthetic
  misc_feature (1)..(1): n is a, c, g, or u
  misc_feature (10)..(10): n is a, c, g, or u
ngcauacaanggcauuaaa

SEQ ID NO: 85647 - RNA, 20 nt, Artificial Sequence
  Synthetic
  misc_feature (2)..(2): n is a, c, g, or u
  misc_feature (11)..(11): n is a, c, g, or u
angcauacaanggcauuaaa

SEQ ID NO: 85648 - RNA, 21 nt, Artificial Sequence
  Synthetic
  misc_feature (3)..(3): n is a, c, g, or u
  misc_feature (12)..(12): n is a, c, g, or u
cangcauacaanggcauuaaa

SEQ ID NO: 85649 - RNA, 22 nt, Artificial Sequence
  Synthetic
  misc_feature (4)..(4): n is a, c, g, or u
  misc_feature (13)..(13): n is a, c, g, or u
acangcauacaanggcauuaaa

SEQ ID NO: 85650 - RNA, 23 nt, Artificial Sequence
  Synthetic
  misc_feature (5)..(5): n is a, c, g, or u
  misc_feature (14)..(14): n is a, c, g, or u
uacangcauacaanggcauuaaa

SEQ ID NO: 85651 - RNA, 24 nt, Artificial Sequence
  Synthetic
  misc_feature (6)..(6): n is a, c, g, or u
  misc_feature (15)..(15): n is a, c, g, or u
auacangcauacaanggcauuaaa

SEQ ID NO: 85652 - RNA, 18 nt, Artificial Sequence
  Synthetic
  misc_feature (13)..(13): n is a, c, g, or u
uuuccaaugaggnuuaaa

SEQ ID NO: 85653 - RNA, 19 nt, Artificial Sequence
  Synthetic
  misc_feature (14)..(14): n is a, c, g, or u
uuuuccaaugaggnuuaaa

SEQ ID NO: 85654 - RNA, 20 nt, Artificial Sequence
  Synthetic
  misc_feature (15)..(15): n is a, c, g, or u
guuuuccaaugaggnuuaaa

SEQ ID NO: 85655 - RNA, 21 nt, Artificial Sequence
  Synthetic
  misc_feature (16)..(16): n is a, c, g, or u
uguuuuccaaugaggnuuaaa

SEQ ID NO: 85656 - RNA, 22 nt, Artificial Sequence
  Synthetic
  misc_feature (17)..(17): n is a, c, g, or u
guguuuuccaaugaggnuuaaa

SEQ ID NO: 85657 - RNA, 23 nt, Artificial Sequence
  Synthetic
  misc_feature (18)..(18): n is a, c, g, or u
gguguuuuccaaugaggnuuaaa

SEQ ID NO: 85658 - RNA, 24 nt, Artificial Sequence
  Synthetic
  misc_feature (1)..(1): n is a, c, g, or u
  misc_feature (19)..(19): n is a, c, g, or u
ngguguuuuccaaugaggnuuaaa

SEQ ID NO: 85659 - RNA, 18 nt, Artificial Sequence
  Synthetic
gaggauucuugucaacaa

SEQ ID NO: 85660 - RNA, 19 nt, Artificial Sequence
  Synthetic
ugaggauucuugucaacaa

SEQ ID NO: 85661 - RNA, 20 nt, Artificial Sequence
  Synthetic
gugaggauucuugucaacaa

SEQ ID NO: 85662 - RNA, 21 nt, Artificial Sequence
  Synthetic
ugugaggauucuugucaacaa

SEQ ID NO: 85663 - RNA, 22 nt, Artificial Sequence
  Synthetic
uugugaggauucuugucaacaa

SEQ ID NO: 85664 - RNA, 23 nt, Artificial Sequence
  Synthetic
auugugaggauucuugucaacaa

SEQ ID NO: 85665 - RNA, 24 nt, Artificial Sequence
  Synthetic
uauugugaggauucuugucaacaa

SEQ ID NO: 85666 - RNA, 18 nt, Artificial Sequence
  Synthetic
gaauauggugacccacaa

SEQ ID NO: 85667 - RNA, 19 nt, Artificial Sequence
  Synthetic
agaauauggugacccacaa

SEQ ID NO: 85668 - RNA, 20 nt, Artificial Sequence
  Synthetic
aagaauauggugacccacaa

SEQ ID NO: 85669 - RNA, 21 nt, Artificial Sequence
  Synthetic
caagaauauggugacccacaa

SEQ ID NO: 85670 - RNA, 22 nt, Artificial Sequence
  Synthetic
ccaagaauauggugacccacaa

SEQ ID NO: 85671 - RNA, 23 nt, Artificial Sequence
  Synthetic
cccaagaauauggugacccacaa

SEQ ID NO: 85672 - RNA, 24 nt, Artificial Sequence
  Synthetic
ucccaagaauauggugacccacaa

SEQ ID NO: 85673 - RNA, 18 nt, Artificial Sequence
  Synthetic
auguauacccaaagacaa

SEQ ID NO: 85674 - RNA, 19 nt, Artificial Sequence
  Synthetic
aauguauacccaaagacaa

SEQ ID NO: 85675 - RNA, 20 nt, Artificial Sequence
  Synthetic
aaauguauacccaaagacaa

SEQ ID NO: 85676 - RNA, 21 nt, Artificial Sequence
  Synthetic
uaaauguauacccaaagacaa

SEQ ID NO: 85677 - RNA, 22 nt, Artificial Sequence
  Synthetic
uuaaauguauacccaaagacaa

SEQ ID NO: 85678 - RNA, 23 nt, Artificial Sequence
  Synthetic
uuuaaauguauacccaaagacaa

SEQ ID NO: 85679 - RNA, 24 nt, Artificial Sequence
  Synthetic
guuuaaauguauacccaaagacaa

SEQ ID NO: 85680 - RNA, 18 nt, Artificial Sequence
  Synthetic
cagcgauaaccaggacaa

SEQ ID NO: 85681 - RNA, 19 nt, Artificial Sequence
  Synthetic
ccagcgauaaccaggacaa

SEQ ID NO: 85682 - RNA, 20 nt, Artificial Sequence
  Synthetic
uccagcgauaaccaggacaa

SEQ ID NO: 85683 - RNA, 21 nt, Artificial Sequence
  Synthetic
auccagcgauaaccaggacaa

SEQ ID NO: 85684 - RNA, 22 nt, Artificial Sequence
  Synthetic
cauccagcgauaaccaggacaa

SEQ ID NO: 85685 - RNA, 23 nt, Artificial Sequence
  Synthetic
acauccagcgauaaccaggacaa

SEQ ID NO: 85686 - RNA, 24 nt, Artificial Sequence
  Synthetic
cacauccagcgauaaccaggacaa

SEQ ID NO: 85687 - RNA, 18 nt, Artificial Sequence
  Synthetic
ccuggaauuagaggacaa

SEQ ID NO: 85688 - RNA, 19 nt, Artificial Sequence
  Synthetic
uccuggaauuagaggacaa

SEQ ID NO: 85689 - RNA, 20 nt, Artificial Sequence
  Synthetic
auccuggaauuagaggacaa

SEQ ID NO: 85690 - RNA, 21 nt, Artificial Sequence
  Synthetic
gauccuggaauuagaggacaa

SEQ ID NO: 85691 - RNA, 22 nt, Artificial Sequence
  Synthetic
  misc_feature (1)..(1): n is a, c, g, or u
ngauccuggaauuagaggacaa

SEQ ID NO: 85692 - RNA, 23 nt, Artificial Sequence
  Synthetic
  misc_feature (2)..(2): n is a, c, g, or u
angauccuggaauuagaggacaa

SEQ ID NO: 85693 - RNA, 24 nt, Artificial Sequence
  Synthetic
  misc_feature (3)..(3): n is a, c, g, or u
gangauccuggaauuagaggacaa

SEQ ID NO: 85694 - RNA, 18 nt, Artificial Sequence
  Synthetic
auaguccagaagaaccaa

SEQ ID NO: 85695 - RNA, 19 nt, Artificial Sequence
  Synthetic
gauaguccagaagaaccaa

SEQ ID NO: 85696 - RNA, 20 nt, Artificial Sequence
  Synthetic
ugauaguccagaagaaccaa

SEQ ID NO: 85697 - RNA, 21 nt, Artificial Sequence
  Synthetic
uugauaguccagaagaaccaa

SEQ ID NO: 85698 - RNA, 22 nt, Artificial Sequence
  Synthetic
cuugauaguccagaagaaccaa

SEQ ID NO: 85699 - RNA, 23 nt, Artificial Sequence
  Synthetic
ccuugauaguccagaagaaccaa

SEQ ID NO: 85700 - RNA, 24 nt, Artificial Sequence
  Synthetic
accuugauaguccagaagaaccaa

SEQ ID NO: 85701 - RNA, 18 nt, Artificial Sequence
  Synthetic
uugggauugaagucccaa

SEQ ID NO: 85702 - RNA, 19 nt, Artificial Sequence
  Synthetic
guugggauugaagucccaa

SEQ ID NO: 85703 - RNA, 20 nt, Artificial Sequence
  Synthetic
uguugggauugaagucccaa

SEQ ID NO: 85704 - RNA, 21 nt, Artificial Sequence
  Synthetic
uuguugggauugaagucccaa

SEQ ID NO: 85705 - RNA, 22 nt, Artificial Sequence
  Synthetic
cuuguugggauugaagucccaa

SEQ ID NO: 85706 - RNA, 23 nt, Artificial Sequence
  Synthetic
ccuuguugggauugaagucccaa

SEQ ID NO: 85707 - RNA, 24 nt, Artificial Sequence
  Synthetic
uccuuguugggauugaagucccaa

SEQ ID NO: 85708 - RNA, 18 nt, Artificial Sequence
  Synthetic
  misc_feature (6)..(6): n is a, c, g, or u
aaagangguguuuuccaa

SEQ ID NO: 85709 - RNA, 19 nt, Artificial Sequence
  Synthetic
  misc_feature (7)..(7): n is a, c, g, or u
aaaagangguguuuuccaa

SEQ ID NO: 85710 - RNA, 20 nt, Artificial Sequence
  Synthetic
  misc_feature (8)..(8): n is a, c, g, or u
gaaaagangguguuuuccaa

SEQ ID NO: 85711 - RNA, 21 nt, Artificial Sequence
  Synthetic
  misc_feature (9)..(9): n is a, c, g, or u
ggaaaagangguguuuuccaa

SEQ ID NO: 85712 - RNA, 22 nt, Artificial Sequence
  Synthetic
  misc_feature (10)..(10): n is a, c, g, or u
aggaaaagangguguuuuccaa

SEQ ID NO: 85713 - RNA, 23 nt, Artificial Sequence
  Synthetic
  misc_feature (11)..(11): n is a, c, g, or u
uaggaaaagangguguuuuccaa

SEQ ID NO: 85714 - RNA, 24 nt, Artificial Sequence
  Synthetic
  misc_feature (12)..(12): n is a, c, g, or u
uuaggaaaagangguguuuuccaa

SEQ ID NO: 85715 - RNA, 18 nt, Artificial Sequence
  Synthetic
gaagguuugguacagcaa

SEQ ID NO: 85716 - RNA, 19 nt, Artificial Sequence
  Synthetic
cgaagguuugguacagcaa

SEQ ID NO: 85717 - RNA, 20 nt, Artificial Sequence
  Synthetic
ccgaagguuugguacagcaa

SEQ ID NO: 85718 - RNA, 21 nt, Artificial Sequence
  Synthetic
uccgaagguuugguacagcaa

SEQ ID NO: 85719 - RNA, 22 nt, Artificial Sequence
  Synthetic
guccgaagguuugguacagcaa

SEQ ID NO: 85720 - RNA, 23 nt, Artificial Sequence
  Synthetic
cguccgaagguuugguacagcaa

SEQ ID NO: 85721 - RNA, 24 nt, Artificial Sequence
  Synthetic
ccguccgaagguuugguacagcaa

SEQ ID NO: 85722 - RNA, 18 nt, Artificial Sequence
  Synthetic
cagaccugcugcgagcaa

SEQ ID NO: 85723 - RNA, 19 nt, Artificial Sequence
  Synthetic
ccagaccugcugcgagcaa

SEQ ID NO: 85724 - RNA, 20 nt, Artificial Sequence
  Synthetic
uccagaccugcugcgagcaa

SEQ ID NO: 85725 - RNA, 21 nt, Artificial Sequence
  Synthetic
cuccagaccugcugcgagcaa

SEQ ID NO: 85726 - RNA, 22 nt, Artificial Sequence
  Synthetic
gcuccagaccugcugcgagcaa

SEQ ID NO: 85727 - RNA, 23 nt, Artificial Sequence
  Synthetic
ugcuccagaccugcugcgagcaa

SEQ ID NO: 85728 - RNA, 24 nt, Artificial Sequence
  Synthetic
uugcuccagaccugcugcgagcaa

SEQ ID NO: 85729 - RNA, 18 nt, Artificial Sequence
  Synthetic
ugugaggauucuugucaa

SEQ ID NO: 85730 - RNA, 19 nt, Artificial Sequence
  Synthetic
uugugaggauucuugucaa

SEQ ID NO: 85731 - RNA, 20 nt, Artificial Sequence
  Synthetic
auugugaggauucuugucaa

SEQ ID NO: 85732 - RNA, 21 nt, Artificial Sequence
  Synthetic
uauugugaggauucuugucaa

SEQ ID NO: 85733 - RNA, 22 nt, Artificial Sequence
  Synthetic
guauugugaggauucuugucaa

SEQ ID NO: 85734 - RNA, 23 nt, Artificial Sequence
  Synthetic
gguauugugaggauucuugucaa

SEQ ID NO: 85735 - RNA, 24 nt, Artificial Sequence
  Synthetic
cgguauugugaggauucuugucaa

SEQ ID NO: 85736 - RNA, 18 nt, Artificial Sequence
  Synthetic
  misc_feature (7)..(7): n is a, c, g, or u
ucguacngaaggaaagaa

SEQ ID NO: 85737 - RNA, 19 nt, Artificial Sequence
  Synthetic
  misc_feature (8)..(8): n is a, c, g, or u
cucguacngaaggaaagaa

SEQ ID NO: 85738 - RNA, 20 nt, Artificial Sequence
  Synthetic
  misc_feature (9)..(9): n is a, c, g, or u
ucucguacngaaggaaagaa

SEQ ID NO: 85739 - RNA, 21 nt, Artificial Sequence
  Synthetic
  misc_feature (10)..(10): n is a, c, g, or u
aucucguacngaaggaaagaa

SEQ ID NO: 85740 - RNA, 22 nt, Artificial Sequence
  Synthetic
  misc_feature (11)..(11): n is a, c, g, or u
gaucucguacngaaggaaagaa

SEQ ID NO: 85741 - RNA, 23 nt, Artificial Sequence
  Synthetic
  misc_feature (12)..(12): n is a, c, g, or u
agaucucguacngaaggaaagaa

SEQ ID NO: 85742 - RNA, 24 nt, Artificial Sequence
  Synthetic
  misc_feature (13)..(13): n is a, c, g, or u
aagaucucguacngaaggaaagaa

SEQ ID NO: 85743 - RNA, 18 nt, Artificial Sequence
  Synthetic
cagaagaaccaacaagaa

SEQ ID NO: 85744 - RNA, 19 nt, Artificial Sequence
  Synthetic
ccagaagaaccaacaagaa

SEQ ID NO: 85745 - RNA, 20 nt, Artificial Sequence
  Synthetic
uccagaagaaccaacaagaa

SEQ ID NO: 85746 - RNA, 21 nt, Artificial Sequence
  Synthetic
guccagaagaaccaacaagaa

SEQ ID NO: 85747 - RNA, 22 nt, Artificial Sequence
  Synthetic
aguccagaagaaccaacaagaa

SEQ ID NO: 85748 - RNA, 23 nt, Artificial Sequence
  Synthetic
uaguccagaagaaccaacaagaa

SEQ ID NO: 85749 - RNA, 24 nt, Artificial Sequence
  Synthetic
auaguccagaagaaccaacaagaa

SEQ ID NO: 85750 - RNA, 18 nt, Artificial Sequence
  Synthetic
  misc_feature (6)..(6): n is a, c, g, or u
acaggnacaguagaagaa

SEQ ID NO: 85751 - RNA, 19 nt, Artificial Sequence
  Synthetic
  misc_feature (7)..(7): n is a, c, g, or u
gacaggnacaguagaagaa

SEQ ID NO: 85752 - RNA, 20 nt, Artificial Sequence
  Synthetic
  misc_feature (8)..(8): n is a, c, g, or u
agacaggnacaguagaagaa

SEQ ID NO: 85753 - RNA, 21 nt, Artificial Sequence
  Synthetic
  misc_feature (9)..(9): n is a, c, g, or u
aagacaggnacaguagaagaa

SEQ ID NO: 85754 - RNA, 22 nt, Artificial Sequence
  Synthetic
  misc_feature (10)..(10): n is a, c, g, or u
aaagacaggnacaguagaagaa

SEQ ID NO: 85755 - RNA, 23 nt, Artificial Sequence
  Synthetic
  misc_feature (11)..(11): n is a, c, g, or u
uaaagacaggnacaguagaagaa

SEQ ID NO: 85756 - RNA, 24 nt, Artificial Sequence
  Synthetic
  misc_feature (12)..(12): n is a, c, g, or u
uuaaagacaggnacaguagaagaa

SEQ ID NO: 85757 - RNA, 18 nt, Artificial Sequence
  Synthetic
gaaggaaagaagucagaa

SEQ ID NO: 85758 - RNA, 19 nt, Artificial Sequence
  Synthetic
  misc_feature (1)..(1): n is a, c, g, or u
ngaaggaaagaagucagaa

SEQ ID NO: 85759 - RNA, 20 nt, Artificial Sequence
  Synthetic
  misc_feature (2)..(2): n is a, c, g, or u
cngaaggaaagaagucagaa

SEQ ID NO: 85760 - RNA, 21 nt, Artificial Sequence
  Synthetic
  misc_feature (3)..(3): n is a, c, g, or u
acngaaggaaagaagucagaa

SEQ ID NO: 85761 - RNA, 22 nt, Artificial Sequence
  Synthetic
  misc_feature (4)..(4): n is a, c, g, or u
uacngaaggaaagaagucagaa

SEQ ID NO: 85762 - RNA, 23 nt, Artificial Sequence
  Synthetic
  misc_feature (5)..(5): n is a, c, g, or u
guacngaaggaaagaagucagaa

SEQ ID NO: 85763 - RNA, 24 nt, Artificial Sequence
  Synthetic
  misc_feature (6)..(6): n is a, c, g, or u
cguacngaaggaaagaagucagaa

SEQ ID NO: 85764 - RNA, 18 nt, Artificial Sequence
  Synthetic
cuuguaaguuggcgagaa

SEQ ID NO: 85765 - RNA, 19 nt, Artificial Sequence
  Synthetic
ccuuguaaguuggcgagaa

SEQ ID NO: 85766 - RNA, 20 nt, Artificial Sequence
  Synthetic
gccuuguaaguuggcgagaa

SEQ ID NO: 85767 - RNA, 21 nt, Artificial Sequence
  Synthetic
ggccuuguaaguuggcgagaa

SEQ ID NO: 85768 - RNA, 22 nt, Artificial Sequence
  Synthetic
aggccuuguaaguuggcgagaa

SEQ ID NO: 85769 - RNA, 23 nt, Artificial Sequence
  Synthetic
aaggccuuguaaguuggcgagaa

SEQ ID NO: 85770 - RNA, 24 nt, Artificial Sequence
  Synthetic
aaaggccuuguaaguuggcgagaa

SEQ ID NO: 85771 - RNA, 18 nt, Artificial Sequence
  Synthetic
uaaacugagccaggagaa

SEQ ID NO: 85772 - RNA, 19 nt, Artificial Sequence
  Synthetic
guaaacugagccaggagaa

SEQ ID NO: 85773 - RNA, 20 nt, Artificial Sequence
  Synthetic
aguaaacugagccaggagaa

SEQ ID NO: 85774 - RNA, 21 nt, Artificial Sequence
  Synthetic
uaguaaacugagccaggagaa

SEQ ID NO: 85775 - RNA, 22 nt, Artificial Sequence
  Synthetic
cuaguaaacugagccaggagaa

SEQ ID NO: 85776 - RNA, 23 nt, Artificial Sequence
  Synthetic
acuaguaaacugagccaggagaa

SEQ ID NO: 85777 - RNA, 24 nt, Artificial Sequence
  Synthetic
cacuaguaaacugagccaggagaa

SEQ ID NO: 85778 - RNA, 18 nt, Artificial Sequence
  Synthetic
  misc_feature (2)..(2): n is a, c, g, or u
gnaacggcagacggagaa

SEQ ID NO: 85779 - RNA, 19 nt, Artificial Sequence
  Synthetic
  misc_feature (3)..(3): n is a, c, g, or u
cgnaacggcagacggagaa

SEQ ID NO: 85780 - RNA, 20 nt, Artificial Sequence
  Synthetic
  misc_feature (1)..(1): n is a, c, g, or u
  misc_feature (4)..(4): n is a, c, g, or u
ncgnaacggcagacggagaa

SEQ ID NO: 85781 - RNA, 21 nt, Artificial Sequence
  Synthetic
  misc_feature (2)..(2): n is a, c, g, or u
  misc_feature (5)..(5): n is a, c, g, or u
gncgnaacggcagacggagaa

SEQ ID NO: 85782 - RNA, 22 nt, Artificial Sequence
  Synthetic
  misc_feature (3)..(3): n is a, c, g, or u
  misc_feature (6)..(6): n is a, c, g, or u
ggncgnaacggcagacggagaa

SEQ ID NO: 85783 - RNA, 23 nt, Artificial Sequence
  Synthetic
  misc_feature (4)..(4): n is a, c, g, or u
  misc_feature (7)..(7): n is a, c, g, or u
cggncgnaacggcagacggagaa

SEQ ID NO: 85784 - RNA, 24 nt, Artificial Sequence
  Synthetic
  misc_feature (5)..(5): n is a, c, g, or u
  misc_feature (8)..(8): n is a, c, g, or u
ucggncgnaacggcagacggagaa

SEQ ID NO: 85785 - RNA, 18 nt, Artificial Sequence
  Synthetic
  misc_feature (2)..(2): n is a, c, g, or u
angaugaugggaugggaa

SEQ ID NO: 85786 - RNA, 19 nt, Artificial Sequence
  Synthetic
  misc_feature (3)..(3): n is a, c, g, or u
cangaugaugggaugggaa

SEQ ID NO: 85787 - RNA, 20 nt, Artificial Sequence
  Synthetic
  misc_feature (4)..(4): n is a, c, g, or u
ccangaugaugggaugggaa

SEQ ID NO: 85788 - RNA, 21 nt, Artificial Sequence
  Synthetic
  misc_feature (5)..(5): n is a, c, g, or u
cccangaugaugggaugggaa

SEQ ID NO: 85789 - RNA, 22 nt, Artificial Sequence
  Synthetic
  misc_feature (6)..(6): n is a, c, g, or u
gcccangaugaugggaugggaa

SEQ ID NO: 85790 - RNA, 23 nt, Artificial Sequence
  Synthetic
  misc_feature (7)..(7): n is a, c, g, or u
agcccangaugaugggaugggaa

SEQ ID NO: 85791 - RNA, 24 nt, Artificial Sequence
  Synthetic
  misc_feature (8)..(8): n is a, c, g, or u
aagcccangaugaugggaugggaa

SEQ ID NO: 85792 - RNA, 18 nt, Artificial Sequence
  Synthetic
  misc_feature (2)..(2): n is a, c, g, or u
  misc_feature (8)..(8): n is a, c, g, or u
unguugangauccuggaa

SEQ ID NO: 85793 - RNA, 19 nt, Artificial Sequence
  Synthetic
  misc_feature (3)..(3): n is a, c, g, or u
  misc_feature (9)..(9): n is a, c, g, or u
gunguugangauccuggaa

SEQ ID NO: 85794 - RNA, 20 nt, Artificial Sequence
  Synthetic
  misc_feature (4)..(4): n is a, c, g, or u
  misc_feature (10)..(10): n is a, c, g, or u
ggunguugangauccuggaa

SEQ ID NO: 85795 - RNA, 21 nt, Artificial Sequence
  Synthetic
  misc_feature (5)..(5): n is a, c, g, or u
  misc_feature (11)..(11): n is a, c, g, or u
uggunguugangauccuggaa

SEQ ID NO: 85796 - RNA, 22 nt, Artificial Sequence
  Synthetic
  misc_feature (6)..(6): n is a, c, g, or u
  misc_feature (12)..(12): n is a, c, g, or u
cuggunguugangauccuggaa

SEQ ID NO: 85797 - RNA, 23 nt, Artificial Sequence
  Synthetic
  misc_feature (7)..(7): n is a, c, g, or u
  misc_feature (13)..(13): n is a, c, g, or u
gcuggunguugangauccuggaa

SEQ ID NO: 85798 - RNA, 24 nt, Artificial Sequence
  Synthetic
  misc_feature (1)..(1): n is a, c, g, or u
  misc_feature (8)..(8): n is a, c, g, or u
  misc_feature (14)..(14): n is a, c, g, or u
ngcuggunguugangauccuggaa

SEQ ID NO: 85799 - RNA, 18 nt, Artificial Sequence
  Synthetic
  misc_feature (15)..(15): n is a, c, g, or u
agaagaucucguacngaa

SEQ ID NO: 85800 - RNA, 19 nt, Artificial Sequence
  Synthetic
  misc_feature (1)..(1): n is a, c, g, or u
  misc_feature (16)..(16): n is a, c, g, or u
nagaagaucucguacngaa

SEQ ID NO: 85801 - RNA, 20 nt, Artificial Sequence
  Synthetic
  misc_feature (2)..(2): n is a, c, g, or u
  misc_feature (17)..(17): n is a, c, g, or u
cnagaagaucucguacngaa

SEQ ID NO: 85802 - RNA, 21 nt, Artificial Sequence
  Synthetic
  misc_feature (3)..(3): n is a, c, g, or u
  misc_feature (18)..(18): n is a, c, g, or u
ucnagaagaucucguacngaa

SEQ ID NO: 85803 - RNA, 22 nt, Artificial Sequence
  Synthetic
  misc_feature (4)..(4): n is a, c, g, or u
  misc_feature (19)..(19): n is a, c, g, or u
aucnagaagaucucguacngaa

SEQ ID NO: 85804 - RNA, 23 nt, Artificial Sequence
  Synthetic
  misc_feature (5)..(5): n is a, c, g, or u
  misc_feature (20)..(20): n is a, c, g, or u
uaucnagaagaucucguacngaa

SEQ ID NO: 85805 - RNA, 24 nt, Artificial Sequence
  Synthetic
  misc_feature (6)..(6): n is a, c, g, or u
  misc_feature (21)..(21): n is a, c, g, or u
guaucnagaagaucucguacngaa

SEQ ID NO: 85806 - RNA, 18 nt, Artificial Sequence
  Synthetic
ugaacaguaggacaugaa

SEQ ID NO: 85807 - RNA, 19 nt, Artificial Sequence
  Synthetic
uugaacaguaggacaugaa

SEQ ID NO: 85808 - RNA, 20 nt, Artificial Sequence
  Synthetic
cuugaacaguaggacaugaa

SEQ ID NO: 85809 - RNA, 21 nt, Artificial Sequence
  Synthetic
gcuugaacaguaggacaugaa

SEQ ID NO: 85810 - RNA, 22 nt, Artificial Sequence
  Synthetic
ggcuugaacaguaggacaugaa

SEQ ID NO: 85811 - RNA, 23 nt, Artificial Sequence
  Synthetic
aggcuugaacaguaggacaugaa

SEQ ID NO: 85812 - RNA, 24 nt, Artificial Sequence
  Synthetic
gaggcuugaacaguaggacaugaa

SEQ ID NO: 85813 - RNA, 18 nt, Artificial Sequence
  Synthetic
gcauagcagcaggaugaa

SEQ ID NO: 85814 - RNA, 19 nt, Artificial Sequence
  Synthetic
ggcauagcagcaggaugaa

SEQ ID NO: 85815 - RNA, 20 nt, Artificial Sequence
  Synthetic
aggcauagcagcaggaugaa

SEQ ID NO: 85816 - RNA, 21 nt, Artificial Sequence
  Synthetic
gaggcauagcagcaggaugaa

SEQ ID NO: 85817 - RNA, 22 nt, Artificial Sequence
  Synthetic
ugaggcauagcagcaggaugaa

SEQ ID NO: 85818 - RNA, 23 nt, Artificial Sequence
  Synthetic
augaggcauagcagcaggaugaa

SEQ ID NO: 85819 - RNA, 24 nt, Artificial Sequence
  Synthetic
gaugaggcauagcagcaggaugaa

SEQ ID NO: 85820 - RNA, 18 nt, Artificial Sequence
  Synthetic
ggguuuacuguuccugaa

SEQ ID NO: 85821 - RNA, 19 nt, Artificial Sequence
  Synthetic
aggguuuacuguuccugaa

SEQ ID NO: 85822 - RNA, 20 nt, Artificial Sequence
  Synthetic
caggguuuacuguuccugaa

SEQ ID NO: 85823 - RNA, 21 nt, Artificial Sequence
  Synthetic
acaggguuuacuguuccugaa

SEQ ID NO: 85824 - RNA, 22 nt, Artificial Sequence
  Synthetic
aacaggguuuacuguuccugaa

SEQ ID NO: 85825 - RNA, 23 nt, Artificial Sequence
  Synthetic
gaacaggguuuacuguuccugaa

SEQ ID NO: 85826 - RNA, 24 nt, Artificial Sequence
  Synthetic
ggaacaggguuuacuguuccugaa

SEQ ID NO: 85827 - RNA, 18 nt, Artificial Sequence
  Synthetic
gcgacgugcagaggugaa

SEQ ID NO: 85828 - RNA, 19 nt, Artificial Sequence
  Synthetic
ugcgacgugcagaggugaa

SEQ ID NO: 85829 - RNA, 20 nt, Artificial Sequence
  Synthetic
augcgacgugcagaggugaa

SEQ ID NO: 85830 - RNA, 21 nt, Artificial Sequence
  Synthetic
caugcgacgugcagaggugaa

SEQ ID NO: 85831 - RNA, 22 nt, Artificial Sequence
  Synthetic
ccaugcgacgugcagaggugaa

SEQ ID NO: 85832 - RNA, 23 nt, Artificial Sequence
  Synthetic
uccaugcgacgugcagaggugaa

SEQ ID NO: 85833 - RNA, 24 nt, Artificial Sequence
  Synthetic
cuccaugcgacgugcagaggugaa

SEQ ID NO: 85834 - RNA, 18 nt, Artificial Sequence
  Synthetic
agacacauccagcgauaa

SEQ ID NO: 85835 - RNA, 19 nt, Artificial Sequence
  Synthetic
cagacacauccagcgauaa

SEQ ID NO: 85836 - RNA, 20 nt, Artificial Sequence
  Synthetic
gcagacacauccagcgauaa

SEQ ID NO: 85837 - RNA, 21 nt, Artificial Sequence
  Synthetic
cgcagacacauccagcgauaa

SEQ ID NO: 85838 - RNA, 22 nt, Artificial Sequence
  Synthetic
ccgcagacacauccagcgauaa

SEQ ID NO: 85839 - RNA, 23 nt, Artificial Sequence
  Synthetic
gccgcagacacauccagcgauaa

SEQ ID NO: 85840 - RNA, 24 nt, Artificial Sequence
  Synthetic
cgccgcagacacauccagcgauaa

SEQ ID NO: 85841 - RNA, 18 nt, Artificial Sequence
  Synthetic
cuccggaaguguugauaa

SEQ ID NO: 85842 - RNA, 19 nt, Artificial Sequence
  Synthetic
ucuccggaaguguugauaa

SEQ ID NO: 85843 - RNA, 20 nt, Artificial Sequence
  Synthetic
gucuccggaaguguugauaa

SEQ ID NO: 85844 - RNA, 21 nt, Artificial Sequence
  Synthetic
agucuccggaaguguugauaa

SEQ ID NO: 85845 - RNA, 22 nt, Artificial Sequence
  Synthetic
uagucuccggaaguguugauaa

SEQ ID NO: 85846 - RNA, 23 nt, Artificial Sequence
  Synthetic
guagucuccggaaguguugauaa

SEQ ID NO: 85847 - RNA, 24 nt, Artificial Sequence
  Synthetic
aguagucuccggaaguguugauaa

SEQ ID NO: 85848 - RNA, 18 nt, Artificial Sequence
  Synthetic
accacaucauccauauaa

SEQ ID NO: 85849 - RNA, 19 nt, Artificial Sequence
  Synthetic
uaccacaucauccauauaa
